United States Patent Application Publication US 2008/0104729 A1 - sequence listing, part 3

SEQ ID NO: 10706 - DNA, 402 bp, Arabidopsis thaliana
  unsure at all n locations
  Clone ID: LIB24-032-Q1-E1-B9
acgcgtccggtcacttaaaaccctaaattangacnatcgcaccggnattgcagacgacgttcgtgtcatcaaccaacttcctgaaacattcttcttcgtggggatnaccatcaccgaacaatgtgattcttcccaaaaacaagagatcttcttcctccgtagttgtcgccgccgtcggtgatgtctcttctgacggaacaatctacttaatcggcggagccatcgccgttgcactcgtcggaactgcattcccgatcctcttcaancgcagagacacntgtccggaatgtgacggaagcatgatttgtgaggaaaggangagtgactctgagaagccaacgccgcacgagaaggatcttcctcagatngtttgtgccannctgaaaggactcggaaangctt

SEQ ID NO: 10707 - DNA, 414 bp, Arabidopsis thaliana
  unsure at all n locations
  Clone ID: LIB24-032-Q1-E1-C6
acgcgtccgaagaaactccggagcagtggattccggtcctgaggaagatctgctggttcttggtcttggcacctcatgacccaatgcaatcaagcttgctcaatgcaactctggaagacaagaatttatcagaaatccctgatttcaagatgcttctaaaacaggtagtgacaatggaggttattcaatggacatctctgtggaacaaatacaaggatgagttcgagaaagagaanagcatgattggaggttctttgggtgacaaagctggtgaagatctgaaactgagaatcatcgaacataatatcctcgttgtctcaaagtactacgcaaggataaccttaaagagacttgccgagcttttatgcctgagcatggaggaggcggagaagcatctaacnggagatggtagtt

SEQ ID NO: 10708 - DNA, 465 bp, Arabidopsis thaliana
  unsure at all n locations
  Clone ID: LIB24-032-Q1-E1-C7
attctgccgccacggtcgaanaaaattcngngggtcnacccacgcgtccgcctcattcttcttaattccgatttttgagtgatggctatggcctctgcttctggttctgctctttgcttcactgatgcttctagctctcttgctttaagacgcgattgtggagctctttgcttgcctcctaggacagttacgtttggatttgtcgataaacctcttgtcaatctcgagcgattaagattatccactttgaagattagagcatcaaatgctactgctgtggagaatggaaagcaagaaggaagtgctgctgattctgataaagttccaactccagttgttataatcgaccaagattctgaccctgatgcaaccgttcttgaagttacattcggagatcgtcttggagctttacttgacactatgaatgcgctcaaaaacttgggattgaatgtcgtcaaggcaaat

SEQ ID NO: 10709 - DNA, 467 bp, Arabidopsis thaliana
  unsure at all n locations
  Clone ID: LIB24-032-Q1-E1-D1
attctgccggcacggtccaaaacccgggtcnacccacgcgtccgcnttcttctccccaagctgcctctctggcttttccccatcttcctgggttctccggattgcgatcttggtaactagatattgaatttagggtgccaatcaaatcgcagctgctagggggggatattaggcggagaagaaaatgggggttatgtccagacgggttttgcccgcctgtggtaacctctgtttcttctgtccttctttgagggcaangtctaggcatcccgttaaacgcnacaagaaaatgctcgctgaaatcttccctcgtaatcangaagctgaagcctaatgatagaaaaatcggcaagctgtgtgagtatgcgtctaggaatcctttacgaattccaaagattacagagtaccttgagcaaaaatgttacaaaagaattgcgaaatggaaatattggttcaagtgaaaantc

SEQ ID NO: 10710 - DNA, 413 bp, Arabidopsis thaliana
  unsure at all n locations
  Clone ID: LIB24-031-Q1-E1-F9
nnnnnnnnnnnnnnnnnnnnnnnnnnnnnnnnnnnnnnnnnnnnnnnnnnnnnnnnnnnnnnnnnnnnnnnnngtgtccattttattaggcatgttggtgatctttgtttcaccaatggtgttcgcagatgatttgacaccaatcccagagggcaaaccccaagtggtgcagtggttcaatacccacgttggtccattggctcaacgtaaaggcttagatcctgctctcgtagctgctgaggctgctccacgtatcatcaacgtgaatccaaagggaggtgaattcaaaacactaacagacgcaataaagagcgttcccgcagggaacacaaagcgggtgatcataaagatggctcatggtgagtacagagagaaggtcactatcgacaggaacaaanccttcattacatttg

SEQ ID NO: 10711 - DNA, 412 bp, Arabidopsis thaliana
  Clone ID: LIB24-031-Q1-E1-D9
caatatcgagttgatggagcccttgaagaaagtttgaattttgaggagaaggaacaagaatctgaagctcagagactattggaagcagagaagagaagattgctggctgaaatcgaacttgggtcaatctttaggaagagtgttgatgtggatacgttgcctaagatcgaagagacgatggataatgatgttgataagattgaattggttgatcatactgcgttggttgatgttgttcatcatcctaagagaccagggactgctcaaaatgagaaggatacacctagaaagcttaagaaaattggagataagagaaatgttattgaggggagtggagtagaaaacaatgggaagcagtttaggaagattgtacactaggaaacaattggagtcaatgaggtttgcccacatt

SEQ ID NO: 10712 - DNA, 481 bp, Arabidopsis thaliana
  unsure at all n locations
  Clone ID: LIB24-031-Q1-E1-E1
actgtttgccctgnccgtacaantccanaaattcccgggtccacccacgcgtccgaaaatgctggttgagttggctcattcatcaaatgatggagtcacacggaaccatatcttctccttgttcactgcaattgttaaatttgtccctgataaggttttggaccatattatcagcatacttacacttgttggtgaatcaactgtgacacagattgatagtcactcgaagtctatctttgaggggtttatatcaatggtcattccattttggctgtctaagactaagagtgaggagcagttgttacagatttttgtgaaagtcttacctgatattgttgagcatataaggcgtncaattgtagcttacttgctgggagttatcgggtgaacgaaatggcttgcctgctttgcttgtcctcntagnntaangtctttgatttcaaagaaaagactcancttggccttggtaatgccaacgtnt

SEQ ID NO: 10713 - DNA, 400 bp, Arabidopsis thaliana
  unsure at all n locations
  Clone ID: LIB24-031-Q1-E1-E11
tttcattcctccgatggcaccacctcaaagcttctcatcaagctccagaatggagcttttgtggaagctgtggtaatgagatacgatactcggttggggatgttaggagggaaaccacgtcctggaggttggttgtaagatgggttgcacattctgtgctactggtaccatgggatttaaaagcaatttaacatctggagaaattgtggagcagcttgttcacgcctctcgcattgctgatatacgcaacatcgttttcatgggaatgggagaacctttaaataactacaatgctgttgttgaanctgttcgtgtcatgttaaaccaaccatttcagctgtcgcccaaangaattaccatatcaactgtcggaattgttcacgcaattaacangctacac

SEQ ID NO: 10714 - DNA, 466 bp, Arabidopsis thaliana
  unsure at all n locations
  Clone ID: LIB24-031-Q1-E1-E3
attcccgggtcnacccacgcgtccgnatgttcttcctcttcttcgattctcctcttcgacgtctcttgttactgtgcgccgtcttagccttacgtgcgccaacggcgcactctcctatcctacgctcatctatcgtcactcccacagcgagagctgtctcggaagtttccggttgtactacgatcgatccagattttctcgtagagatctctgattctaaccagacgcgggtgatgtcgaaagctcgtgtgtacaccgaagtcaatgtgattcgacccaaggattattgggattacgagtcactcattgttcaatggggggagcaagatgattatgnaggtagtaagggaagggtangggcgtggaaaatatantgaagttttcgaggggtataaatgtgaacagcaaggganaangtgcaatnatcaaaaatcctcaaaacctgtttaagaaaaaagaagataan

SEQ ID NO: 10715 - DNA, 483 bp, Arabidopsis thaliana
  unsure at all n locations
  Clone ID: LIB24-031-Q1-E1-E4
ggccggtcanaataacgggtcnancacgcgtccgcatctctatcctctgtttcttcttcatggagacttgaaagcttttaaagtatatctaaaaacgcagtcgttttaagactgtgtgtgagaaatggntctgtttagagatattgttcttcttgggtttctcttctgcttgagcttagtagctactgtgacttcagaggagggagcaacgttgctggagattaagaagtcattcaaagatgtgaacaatgttctttatgactggacaacttcaccttcttcggattattgtgtctggagaggtgtgtcttgtgaaaatgtcaccttcaatgttgttgctcttaatttgtcagatttgaatcttgatggannaaatctcacctgcnattggaagattccaangaagncccttgtcaattgatctgcnanggtaatcccntngtccnggacaaaatccctgaatgaanattgggtgaccggttc

SEQ ID NO: 10716 - DNA, 487 bp, Arabidopsis thaliana
  unsure at all n locations
  Clone ID: LIB24-031-Q1-E1-E5
ggnccggtccaaaataaacgggtcnacgcncgcgtccgtgactcacaaaatctcaacgaagctcgaaaatggattcacgaaccaaggggaagacggtgatggaagttggtggcgatggcgttgccgtcataacactcatcaancctcccgtcaattctctatccttcgacgtgctatacaatctcaaaagtaattacaangaggccttgagcaggaatgatgttaaancnantgttattactggtgcaaaggggangttctctggtggctttgatatatcgggttttggtgaaatgcagaagggggaangtcaangagccaanaggctggttacatttngattgaacatcataaccgacttgcttgaaagctgccaatgaaaaccgtcngtcgctgccattgatgggaccntgcccttgggaaaggagggattagnaccntgcnaatggntttgtcatgnctangataatcagctcctggttcaaaa

SEQ ID NO: 10717 - DNA, 470 bp, Arabidopsis thaliana
  unsure at all n locations
  Clone ID: LIB24-031-Q1-E1-E8
attcccgggtcnacccacgcgtccgnacacgcgtccgagagtatcttatccctaatgatgttgtggatgttgatggtggtattaaagcggtaagaccaccaataattcagccccctccgggaagaaaactacctcttattgactttccaggatcatcgtgggatttccttacgtattttgctccaagtaaaacagttaagcggcagagttcctcctcttctgataatacctctgataaagaggaagttgaaacggaagagacgcgaggtatgtttgtccagttgggggatacggctcatgaggcatgcccattcgctacaaacgaggctgactcctccagtacaagtatccattatttcgcccgagttaatgcctctagaggttctatcgtcccttccttggctgaaggaggaaatttccggggacgagtancattanggttttgtgtatgaaggcagttcaaggttccc

SEQ ID NO: 10718 - DNA, 427 bp, Arabidopsis thaliana
  Clone ID: LIB24-031-Q1-E1-F1
acgcgtccggttttacagagatatttttgttgcaatgatatctctgtatcaaatattggccgagaagaagaagaagaagaaaaatgatcttaacatctttgcattttctgtttttgccatcatttgcttcaaattttatagtgtaaatgctatcaaattaccgcagcaagaagtcgatgctctgcagcaaatcgctaccacattgggctcgaaattctggaaattcgatgctgaaaattgtaagattgaaatggtggggttaactgaaactcctcctccaacagctaagcaagaaatagaatgtgaatgcagtcccactaacgacactgattgtcatgttgtcaaatttgcattcaaggaccataatcttccaggaactcttcctcaaatagtcaaagcttccctaccttcgggagatagacttggg

SEQ ID NO: 10719 - DNA, 412 bp, Arabidopsis thaliana
  unsure at all n locations
  Clone ID: LIB24-031-Q1-E1-F11
tcgtagctcgtcgctctgagccgttgataccaaatgctgttacgacgaaggcggacactgctgcgagctctacttcatcaaagcctggacatgagctattacttttcgaggctcttcaagaaggtctagaanaagagatggacagagatccacatgtatgtgtcatgggtgaagatgtaggccattacggaggctcatacaaagtanctaaaggcctagctgataagtttggcgatctcagggttctgganactccaatctgtgaaaacgccntcacnggtatgggcattggagccgccatgnncagcgaccnnagacgcgtcatcgaaangtatgaanatgggggtttctactcgttngccttcaagcnaaatctccanacnagctgtgggtagggctttcagctaatacn

SEQ ID NO: 10720 - DNA, 404 bp, Arabidopsis thaliana
  unsure at all n locations
  Clone ID: LIB24-031-Q1-E1-F12
tctcaataaaccctagtaccctttttctctcttattcttctatcttcctcctcctctatctttcgctcgagccattgagcaattatgtcgattccttgtctaaccgaagagacagccaaaactgttcttcgccaggtggagttctatttcagtgatagtaatctacccattgatgatttcctcaagaagactgttacagagagcgaacatggnttggtgagtttggcgttgatttgctcctttagtaagatgagaggatatttgaagttgggtgattctaaaggagatgatattcctganagataccatcaangctgttgctgatacncttcgaacctcttctgctctcaagatttctgacgatgggaaaaangttgggtangagtactgaatttttgangctg

SEQ ID NO: 10721 - DNA, 480 bp, Arabidopsis thaliana
  unsure at all n locations
  Clone ID: LIB24-031-Q1-E1-F5
ggnccggtccaaaattaacgggtccacncncgcgtccgcagacacgtgggggtttgatctttgttgtgaaatcganagataagctttggtaaaccatgggtggtcgttacgatcggaacacattcgacgaacaagacgaagtcaatccttttgctaatcctgggagtgttcctgctgcttcgaattccagactatcgcctttgcctcccgaacctgctggttttggttatggtcntactgttgacattcctcttgacagaccagggtctggtgcacaggatttnanaaacaaagagaaggagctccaaaccaaagaangctgacctaagacgacgagagcaagatcttaaaacgaaaacgggatgctgccaacaangaggcatggagagctgccatatgaangcaaaaggtaatcaatgagtcctanncaacccctccttaagncanntgcttgtgnatgtgtaatgtttacaccaagtt

SEQ ID NO: 10722 - DNA, 438 bp, Arabidopsis thaliana
  unsure at all n locations
  Clone ID: LIB24-031-Q1-E1-F6
gtaccaaatccanaaattcccnggtcnacccacgcgtccgtgtggagtggtttggtttgatttgatttcgatctgtgacaatggtggagactagtatcgacatggaggaaggaactctcgagatcggaatggagtatagaactgtctccggagttgctggacctttggtcatccttgacaaagtgaagggtccaaagtaccaggagattgttaatattcgcttaggagatggatcaacgagacgtggtcaggtcttggaggttgatggggagaaagctgttgtccaggtttttgaaggaacatctgggattgacaacaagtttaccaccggtgcaattcacaggagaaggtactgaaaacgcctgtgtcattggacatgcctggccgnannattaaacnggcccgggaaaanccaatngataatnggcctcccaattt

SEQ ID NO: 10723 - DNA, 473 bp, Arabidopsis thaliana
  unsure at all n locations
  Clone ID: LIB24-031-Q1-E1-F7
gtgccctccaaaattcangggtccacccacgcgtccggcgtgaagctctaatcgagaaaaaaatggaggttttggataggagagacgatgagatcagggactcgggaaacatggacagcatcaagtcacactatgttaccgactctgtttccgaggaacgccgctctcgtgagctcaaggatggagaccatcctttacggtacaagttttcgatatggtacactcntcgcacaccaggggttcggaaccagtcttatgaagataacatcaagaagatggtanaattcagcacggttgaangattttgggcctgctactgtcaccttgctcgttcttctctcttgcctagtccaagcagatcttcangttctttaaggatgggattcgtccattgtgggaangatggtgccaactgnaatgggangaaagtggatcataccnttcncaaaaagttgtatctgctcgcntctggg

SEQ ID NO: 10724 - DNA, 485 bp, Arabidopsis thaliana
  unsure at all n locations
  Clone ID: LIB24-031-Q1-E1-D6
cgtttgcccgnccgtaccgatccaaaaattcccgggtcgacccacgcgtccgtgcttcctcaatctaaggatttccatgaacaaggaactaaaatgagatctcttctctttgtactatcactcatttgcttttgctctcaaacagcactttcatggaagaaggaagagtttcgcagctgtgaccaaactccattttgtaaacgcgctcgatctcgtactcccggcgcgtgttctctaattgtcggcgatgtttccatcactgatggagatctcgtagcgaagcttctaccgaaagcgcctaatcaaggcgatggggatcagatcaagccgttgattctttctctctcagtttacaaggatgggatcgtgcggcttaaaatcgatgaggaccattcgttgaacccgccgaagaagaggttccaagttcctgatgtggtagtgtctgaagtttgaggagaagaagatctggctgcagaaagtancga

SEQ ID NO: 10725 - DNA, 444 bp, Arabidopsis thaliana
  unsure at all n locations
  Clone ID: LIB24-031-Q1-E1-A8
cgtttgcccgnccccgtaccgatccanaaattcccgggcccancggcantttttnaaaaggtttcccaaagaaggacagctcactttatctttcgtctctcttcttaggtcnagggttctggtggagaagattgtggttgtttcntagggttttctgagagaaagcatgttgttaactacgggaagaaaggagaaactctctgtttctaaaggttctgaaattgaaatctcgtctcaagantatgantanggtagtggaaatgtctggtattgtgtcattctcgaagaaaatctagctaaatcgaaacggaagaagctctctgtccgtcacttggattcnctgctcaagtatnantantctcctccgttaatcaanaccaccgtgcatcgtttcatgcgtccanttccgccgccggattcatttccagaggtcgantttgatga

SEQ ID NO: 10726 - DNA, 464 bp, Arabidopsis thaliana
  unsure at all n locations
  Clone ID: LIB24-031-Q1-E1-B10
cttctagccgcncggtaccggtcataaattcccgggccgtaccgtgcacgtaaaccacacaactcttttcataaaagccctctatctttcaacaaacatccgattagagtancaacaatagagatcaaacgtaactcacaaaatgctctcgtttcttatcccagttgtacagttttttcaggtggttatcgctgccgtagcatctgtagtcttcttagtgttcgccggtataaccttcggtgcctcaattgtgggactaaccatagccacaccgctttttgtcatcttcagtccgattctcgtaccagccactatagccactactttcctaagtcggaggggctaccgctgcagttgccctaggagtgacngcatttgctctcatactttggctctttaaacataggattgggagtanaaccgangaacaatccaagctccgaaaggagccncaaccaaaggca

SEQ ID NO: 10727 - DNA, 495 bp, Arabidopsis thaliana
  unsure at all n locations
  Clone ID: LIB24-031-Q1-E1-B2
aatgtttctttgnccggccggtccaaaataacgggtccagcncgcgtccgcacacncgtccgcccacgcgtccgcccacgcgtccgaaaacatgtataacanacancaactgtgacgctggattacactgcgaaacatgtatagccaacactgattttagacctagatgctccagaacccaacccatcaaccccatcaccaangcaaaggggttgccttttaacaagtattcatggttaaccacacacaactcttttgctcgtttgggggaagtatcacggaccggttctgctattttggctcctactaancatcangattcaaatcacanggccaactcnctaatggtgtaanagggtttatgctcgacatgtattgacttccancnacnatatccgggcttttccaattctttcgaagggnacangtttcaaatttcaacgcttttcaacccggctattancattttaaggggagtttcaaagtgtttccnag

SEQ ID NO: 10728 - DNA, 479 bp, Arabidopsis thaliana
  unsure at all n locations
  Clone ID: LIB24-031-Q1-E1-B3
gtacaagtccanaaattcccgggtcgacccacgcgtccgatgaaatccagcacccaatangcctagcaaacaagaatggtgcaagcacgccatctccatcgaaggaaaaaagtatctggggtacttatgccagaggagcagtttatgcgttacagagcagcaaaaagaatctcaaacagggcattattggttacctcagtggctcaaatggactagatagctccgggcttagctcatcagctgctgttggtgtggcatacctgctagctctagagaatgcaaacgaattgactgtatccccaacagaaaatatcgaatatgacaggcttattgagaatggggtatctgggtctgcggaatggaatttttgggatcaatcagctatttttgcctttcgaattatggggtgtctaacatacatgggactgcaaagaactttggaccacgagctttgttacaaggctccctgaactggaana

SEQ ID NO: 10729 - DNA, 448 bp, Arabidopsis thaliana
  unsure at all n locations
  Clone ID: LIB24-031-Q1-E1-B5
ncacgcgtccgcatatatataaatatatccacaaaatcatctcttttgcttcgctgtttctctcattattccatctctcttancgccgctacaaacgtttcttcttcaacctcgttcagagattatcctcccttcttttctcatcttacaaggaagttgggcagttaaagctgctgggatcaccagttttgtcaaaagtggagtgtgaagaatcttttatgtctgaacaggcttctctctttcaatcatctanccggcttttaggagaagtactgtcccatatctagganaaagtccactcatnaagttgggtgggttagcgttttgaggaagacntcacgagccggtaatggatttcagtttaagcaactgaagtgattatcaacggctcntctgangtcccctggttggttaantttggttggatccaagangggctttgccaaaa

SEQ ID NO: 10730 - DNA, 489 bp, Arabidopsis thaliana
  unsure at all n locations
  Clone ID: LIB24-031-Q1-E1-B8
cgtctgccggnccgtaccgatccanaaattcccgggtcnacccacgcgtccgnnagattccagctactccagaagattcttcgacttaatctgatgtgattaggaagagcaatagaggaagagaagaatcagaaaaaatggatccggcgactaattcaccgattatgccgattgatttaccgattatgcacgacagtgatcgttacgacttcgttaaagatattggctctggtaatttcggcgttgctcgtctcatgaccgatagagtcaccaaggagcttgttgctgttaaatacatcgagagaggagaaaagattgatgaaaatgttcagagggagattatcaatcatagatcattgagacatcctaatattgttaggtttaaagaggtgattttgacgccttcccatttggctattgttatggaatatgctgctggtgggagaactttatgagcggattttgtaatgccgggacggtttaagtgaa

SEQ ID NO: 10731 - DNA, 415 bp, Arabidopsis thaliana
  unsure at all n locations
  Clone ID: LIB24-031-Q1-E1-B9
nnnnnnnnnnnnnnnnnnnnnnnnnnnnnnnnnnnnnnnnnnnnnnnnnnnnnnnnnnnnnnnnnnnntggtcttatgatctcatcaaacggagctttaatcgaacaacaaccatcagtcgttgtgaagaaaccaccggcgaaagatcgacatagcaaagtcgatggaagagggagaagaatccgtatgccgattatatgtgctgctcgtgtttttcagctaacgagagagcttggtcataagtcagatggccaaacaattgaatggttacttcgtcaagcagagccttctattatagctgcaacaggaactggtacaactccagcgagtttctcaactgcttctgtctctatccgtggagccaccaattctacttctttagatcataaacccacttctttacttggtgggtacg

SEQ ID NO: 10732 - DNA, 409 bp, Arabidopsis thaliana
  unsure at all n locations
  Clone ID: LIB24-031-Q1-E1-C10
tatcgaagtttgagctaagaatccaatttagggttaactttgccggattctcaagcaatctccgagagagacagtgaggtttcgatggcgaggaacgggattgggagttcaggagggaagaagaatggggctgggcagtttttcttagcgacgctgcttctttggcttgtctccgtcgtgtttgagattgctttcaatctccggacggagcttctctgggtgatttgcggtggatgcttctttcaattgatgaattgggttgttcgttcatggatttctcgtgaccctatatttgttaatacctctgtctcgcttttgcactcaatcatcacctccgcatcagtggttttcatacttctcaatcaaatgcttagccaaaaggtttagacgaagatgttttgatnattcc

SEQ ID NO: 10733 - DNA, 412 bp, Arabidopsis thaliana
  unsure at all n locations
  Clone ID: LIB24-031-Q1-E1-C12
cggatcatcggaaacgacggacgttcttctctgtcttgtcgttccgtgatgcagagccagaggcttaatccttcttctcccttcggcacttcttcgacaaatctccgtcactccaagtcctgtgagctctgggaatcaacaaaacgacctaaaacacagttgattcgcagagcttttagcgcaaacgtcgatccgttttccgaggaagagtttgcgaaaaagatgcaggagctaactctcaaattccaagtctctaacgaagaanaagacaacgaatcggatacacgcattgacgattacactcgaaagatgggcatantaggaagccataataatttcaggtcagattcaatggaanccgccatggccagagatggtgcaaatgtcaaaacatccgaagaaggaaacanac

SEQ ID NO: 10734 - DNA, 479 bp, Arabidopsis thaliana
  unsure at all n locations
  Clone ID: LIB24-031-Q1-E1-C6
ccgnccgtaccgatccaaaaattcccgggtcgacccacgcgtccggcagagtgcagacattgttgattgaagaacgctaatcgtttgtttttttaattgtttgcgttaagttaaagctacttgttgggacgtcaaagcaacgcttctttcgattctgactttcatataaatactaaactccaactttttgatttctctgctacttttgttcttctcttttacttccccagatacatcaatcgatcaatttgcaaaacatgtctgttgagttatgttcggtgaggcctttgtttggtggcgctatttccaccgtcttccctcaaagatttcaggatgtgagtaatatccgacaagttccagatcatcaggaagtgtttgtggatccttcaagagatgagagtttgatttttgagttgttggattcaaggctgaggttggtgacattggcaantgcctcctgggttccttaaatgattctt

SEQ ID NO: 10735 - DNA, 480 bp, Arabidopsis thaliana
  unsure at all n locations
  Clone ID: LIB24-031-Q1-E1-C7
ccgtgccggtccaaaaattaacgggtcnacgcacgcgtccgaaaaaaattcattaattgctgaaactctctctctctctagtctctatctctcttcttcatccttgagctctgttagattctctctaactctaccatcgtttcatttcttaattctctgttttcttgttcctccagagtgatagatctggcagagaacaatgtcggaattagccaattaggtcgccgagataaaaacatggaagcgaggatgaagaagtatagcagagaagtgaagtccagagagagcanaagtctggactgagganatcancaanagttatcatcaanagatcangaaagtcaaaattgtttnanacctctccaagaantcgtcaactttgaggcatncctcacttcantggaangtgntgntttccgtccccaanattgggttannactaaagagaatgttancagnagaagggcttaantgttcctt

SEQ ID NO: 10736 - DNA, 490 bp, Arabidopsis thaliana
  unsure at all n locations
  Clone ID: LIB24-031-Q1-E1-C8
cccgnccgtaccgagtccanaaattcccgggtcnacccacgcgtccgcccacgcgtccgctttaagcaaagaggaaactgttttgcttctagatccgatccaatccaatcaaacaaaggatccgattgatcagaaaaaatccaccaaatttctcaagatcgaaacatataattgaagatgagcgacgtatttgaagggtacgagcgtcaatactgcgagctctcaaccaatctctctagaaaatgtcactctgcatcggttctctccaacggagaggagaagaaggggaagattgctgagatcaagtctggaatagacgaagctgatgtcttgatccggaaaatggatcttgaggcaagaagtttgcagccgagtgctaaagctgtgtgtcttctaaaactaagaaagtataaatcctgatctggaacaaattgnngnaagggaatnaaacgaatccccttccgcangatgcctaaaccgtnttcccgtt

SEQ ID NO: 10737 - DNA, 408 bp, Arabidopsis thaliana
  Clone ID: LIB24-031-Q1-E1-D10
acgcgtccgattatcgatacgatatcagcagtacatgctctgtatccgttgctcggtttactcaaagtcaacggaaagctcattgctttaggcttacctgagaagcctctcgagctaccaatgttccctcttgttctcggaaggaaaatggttggaggaagtgacgtgggagggatgaaggagacacaagagatgcttgatttctgcgctaagcacaacattacagctgatattgaattgattaagatggatgagattaacactgcgatggagaggcttgctaagtctgatgttaggtacaggttcgtgatcgacgtggctaactccttgagccctccatgaatgatccggatctaagaattgagcattgaggaggctttaaatctatgtcataatccttggtgtttg

SEQ ID NO: 10738 - DNA, 456 bp, Arabidopsis thaliana
  unsure at all n locations
  Clone ID: LIB24-031-Q1-E1-D2
ggtccanaataaacgggtccagcncgcgtccgcatttcntacatattctcttgacgatcatgagactgatttcgtgaaaatatcgtcattatatcaaattagaagttgatggaaaacatgggggattcgagcatagggccgggccatccgcatctccctcccgggtttcggtttcacccgactgatgaggaactagtagttcattacctcaagaagaaagcagattctgttccacttccagtctcantcatcgcagagattgatctttacaagtttgatccttgggagcttccaagcaaggcganttttgggngagcacgagtgggtacntctttaatcccccgggatccggaatttccaaatggggttaagccaaaaccggggcagcaancntccggttnntggnnaagcaacngggaaccgntnaaccgantatttacgngccaatagtccacc

SEQ ID NO: 10739 - DNA, 473 bp, Arabidopsis thaliana
  unsure at all n locations
  Clone ID: LIB24-031-Q1-E1-A5
aangggtccacgcacgcgtccgcncacgcgtccgctcacgtccgccggatttcnnnnnnnnnnnnnnnnnnnnnnnnnnnnnnnnnnnnnnccttttgagatatggacagcttctggcaattaggtgatgagctacgaggtcagacgagagcatcagaggatcacaaatggtctactgttgcaacgaagctagctgagcaaactagaatgaaaggggagaggatgaacaatcttgatctctccaaaggttacactgagtttagaccaagtgagaaattcagtttccaggagaacaatccttaacttcaacatgttgaantttggatggtaaatttggtgaaaagcatccangggggaaaacntccgatgccacaacaactgttnatantatgaaatacctggttttccagaanaaatgacctttaagaagttgganggcaacattgaaagttaacaagttanaatgggtaatg

SEQ ID NO: 10740 - DNA, 405 bp, Arabidopsis thaliana
  unsure at all n locations
  Clone ID: LIB24-029-Q1-E1-A10
gataaaacataagagagtctaaacactgtggtagaaaaaaatatagacttttagatatgtgtagtaaaataacattagtgttaactttattttccagttatttcatatcaacagatgctgtgaatggatcatttcctgcgcttttggcttttggagattcaattctcgatactggcaacaacaattttctcctgacttttatgaaaggaaatatctggccatatggaaggagtttcagcatgagaagggcgacaggaagatttggaaatggaagagttttctctgatatagttgctgaaggtttagggatcaagaagattttaccagcttatcgtaagttgttcaattctccaagtgaccttagaactggtgtttgcttcgcatcaggtggtgcangaattgacc

SEQ ID NO: 10741 - DNA, 405 bp, Arabidopsis thaliana
  unsure at all n locations
  Clone ID: LIB24-029-Q1-E1-A11
gatctaaaaactcctcctttcatttccaaacaaaaacttctttttattctcacatcttaaagatctctctcatggcgatgtctttctcaggagctgttctcactggtatggcttcttctttccacagcggagccaagcagagcagcttcggcgctgtcagagtcggccagaaaactcagttcgtcgtcgtttctcaacgcaagaagtcgttgatctacgccgctaaaggtgacggcaacatcctcgatgacctcaacgaggccacaaagaaagcttcagatttcgtgacggataaaacanaagaggcattagcagatggtgagaaagcgaaagactacgttgttgaaaaaaacagtgaaaccgcagatacattgggtaaagaagctgagaaagctgcggcgtatg

SEQ ID NO: 10742 - DNA, 462 bp, Arabidopsis thaliana
  unsure at all n locations
  Clone ID: LIB24-029-Q1-E1-A3
tacttttacgccgccaggtatcggtnaaacnattcacgggtcnncccacgcgtcnngntgagtgcatggttcttgatnaacgaagccttgtncnatatttgcttcaggaggctcaaactcantacccccanctttggtgatttgaaccatttgatatctgccactatgtctggtgtgacttgctgtctgaggttccctggtcaactcaactctgacctccgtaagcttgctgtgaatctcatcccattccctcgtcttcacttcttcatggttggttttgctcctctcacctcaagaggttcanagcagtagcgctccctcacagtccctgagctcacccagcaaatgtgggactccangaacatgatgtgtgctgcagacccaacgcacggacgctaccctcacancctctgccatgttccgtggcaangatgagcacaaatggaanttgaccgagcagat

SEQ ID NO: 10743 - DNA, 395 bp, Arabidopsis thaliana
  unsure at all n locations
  Clone ID: LIB24-029-Q1-E1-A6
gcccacgcgtccgatgaatctcgtctctgggttgatcggatgctggactacaatgtacgtggagggaaactcaatcggggtctctctgttgttgacagtttcaaacttttgaagcaaggcaatgatttgactgagcaagaggttttcctctcttgtgctctcggttggtgcattgaatggctccaagcttatttccttgtgcttgatgatattatggataactctgtcactcgccgtggtcaaccttgctggttcagagttcctcaggttggtatggntgccatcaatgatggggattctacttcgcaatcacatccacaggattctcaaaaagcatttccgtgataagccttactatgttgaccttgttgatttgtttaatgaggttgagttgc

SEQ ID NO: 10744 - DNA, 462 bp, Arabidopsis thaliana
  unsure at all n locations
  Clone ID: LIB24-029-Q1-E1-B12
accagccttaccggtcaaaaccggtccagnattcccgggtcgacccacgcgtccgccttatagtgaatgcaccaaccctgcccaaatatacaagaaagttacatcggggaagttgcctgactcattccatctaatccaacacacggaggcccaacgttttgttggtaaatgcttggaaactgtgtcaagaagattgcctgcaaaggagctcttagcggacccattccttgccgcaactgatgagagagatttggcgcctctttttagattgccgcaacaattggcaatccagaatttggctgcaaatggaacggtggtagagcatctgccgtcaacgactgatccaactagaacaacagatatgtcaataacaggaaagatgaactcagaagaccacaccatcttccttcaagtacagattctagatggcgatggtcacatgaggaacattcagttcccgtt

SEQ ID NO: 10745 - DNA, 410 bp, Arabidopsis thaliana
  unsure at all n locations
  Clone ID: LIB24-029-Q1-E1-B4
ggaaaaaaacttttcctttgaaacaaagaaacatggatttcttcaccgatcaagtaaagaagaaattctccgacaagaaaccggagagctctgatccggagccaaaccacaacaaaaacaaacccggtcacacggagccaacaacacataaacccggtcacggcgagccaacaacacataaaccggtctccaacaccgatccaacaacacacagaccggctacgaacgctgagctcatggctagtgccaagatcgtagccgaagctgctcaagccgctgctcgtcacgagtcagacaagcttgacaaagccaaagtcgccggagccaccgctgatatcttagacgccgcttctanatacggtaagctcgatgaaaagagcggtgttggtcagtaccttgaaaaggctgaa

SEQ ID NO: 10746 - DNA, 404 bp, Arabidopsis thaliana
  Clone ID: LIB24-029-Q1-E1-B5
gacaggcgtgctggtggtgaaaaagtgtacaacgtgtttgataaccagcttcctgcggctctgaagagactccaatttgacaagcagctagcgatggacaacatccggaagctggtcactgaggctgatggttaccagcctcacttgattgctcctgagcaaggttaccgtcgtctcattgagtcttctattgtctccatcagaggccctgctgaagcatctgttgacaccgtatgaactctttactttcatctctaaaaagatgtatcaaaaacctaacacaaaacaataagcttctctctccgtttttttttttttctatggttaaatattaggttcatgctatcttaaaggatctggttcacaagtctgtgaatgaaactgtggaactaaaacaataccca

SEQ ID NO: 10747 - DNA, 405 bp, Arabidopsis thaliana
  unsure at all n locations
  Clone ID: LIB24-029-Q1-E1-C10
gcttcctcaattcttattctctctcgcaaaggtttggttttttgaagacagagaggagatttgagattttgggtttcaatggcggtttcaagtgctttcgttggttgtccaaagcttgagactttattgaatcaccataannnnnnnnnnnnnnnnnnnnnnnnnnnnnnnnnnnnnnnnnnnnnnnnnnnnnnnnnnnnnnnnnnnnnnnnnncgaagaacaatagaaccagacgaggtttgatccaaaaagctcgttgtgagctctctgcttcttctgattctgcgtcnaatgcagctagcatctctgctcttgaacaactcaagaactctgcagctgatcgatatacaaaggaaagaagcagtattgttgtgattggacttagtattcacacagctcctgtt

SEQ ID NO: 10748 - DNA, 405 bp, Arabidopsis thaliana
  unsure at all n locations
  Clone ID: LIB24-029-Q1-E1-C11
ggaatctttagattcnatttctcactcggagctactttgaattggaatctttagattcgtcactctcaatttctgtcctgcgtttttcagatctgggggaatctccgaatttggaattggaaaattcacagatgtcgaaaccttggggtggaatcggcgcatgggctgatgaggctgagcgtgccgatgaagagcaagctgctgaagctacagccacggcggcagattcacagagtttcccgagtctgaaagaggctgcgactgctaagtcttctaagaagaagaagaagatgactttatcggagtttaccaaaggagcatacactgctccggagttctgctggattgacgagagagcagatgcttcagctacctactggtccaagatnacgttctgaggatgaa

SEQ ID NO: 10749 - DNA, 381 bp, Arabidopsis thaliana
  unsure at all n locations
  Clone ID: LIB24-029-Q1-E1-C12
tacagagtcgatcgtctaaagcgttgttgaagcacttgttagtggtgctctgtttcaagctggataaacccaatcctattgggatttggctggattttataccatattttagcatgattgtttgataaacgcttgataaattgcctcttgttgtcacctttgctacgaaaatgtctctggtttgctctttatcttgtgtngctcccttgccacagactaaacagtcncgtccaagttttctgaaactcgaaacatgtaccttaagtttatcttctcccgctggctatcctaattttaccaccggtattaggaagcatatcanttacttgttcactgaaccgatcaagcttcctaggctagcaaagagtcggatattagtta

SEQ ID NO: 10750 - DNA, 400 bp, Arabidopsis thaliana
  Clone ID: LIB24-029-Q1-E1-C2
gctaacgttgctttcttcccactccaaatggctcttgtgctctcagaacacacacagatataataaactcttaacgaagaagaagactttttcttttcttgagcaagctctgagaaactcacagagagggacagagagagaaatatttcattcgctactctctttaataccgccattgatgcaacctccttcgcgttaactgtcaaaatactccccaactgacaaaaattaaattcctttttttctctctcgattttaaaagctctaaaaggaacgagttgatcaagtcggtcggttctggttatcactgaatttcattcaactcggtttattccggtttaagtgtgattttcccggctaatggatctgacccaaggtttcagagctagatccggcgttg

SEQ ID NO: 10751 - DNA, 406 bp, Arabidopsis thaliana
  Clone ID: LIB24-029-Q1-E1-C3
tcaatcattatctttctttaattttgttggattttttgcatattgcaaagtttagaacgcgagcgaattctccgcggaattggggttaaaaggaagaacttttagggtttttgattcttcgggttttctcgtgctttgattcctttcaagtcaaagcaaagcattaccttttctcgtccatatcttttgacgacctaagtttctgctgtgaattgttaaacagccatcagcctgggcttgattagccaaccctgttaaggcagggtttgaactaaaagtgagatagtgagatggatgtctcagcacttttaacgtctgctgggattaatatagcgatatgcgtagtgcttgtatcgctttattccattctacgaaagcagccagccaattattgtgtttactttgg

SEQ ID NO: 10752 - DNA, 407 bp, Arabidopsis thaliana
  unsure at all n locations
  Clone ID: LIB24-029-Q1-E1-C4
cgcgtnctgcatatttttaaaattaggactttttgattttcgaaaattttggtgttaatggaaacagatagtatcgattccgtgatcgatgacgatgagatccatcagaaacaccaattctcatcaaccaagtctcagggaggagccaccgtggtaatctctccggctacaagcgtttacgagctccttgaatgccctgtctgcaccaattcaatgtacccaccaaatccancagtgtcaanaatgggacatactttatgttcaacctgtaaatcaagagtgcataatcgctcttgagaaagtagctgagtcgcttgagttaccgtgcaagtattacaatcttggatgccntgggattttcccttattacagtagactanagcatgagtctcaatgtaactttagac

SEQ ID NO: 10753 - DNA, 461 bp, Arabidopsis thaliana
  unsure at all n locations
  Clone ID: LIB24-029-Q1-E1-E1
ctgttacgccgccanttaccggtgccagaattcccgggaacgacccacgcgtccgctggtcagccatctttgtgatccacttgatttgtttgggatttgtgctcgcggtgcttggactcaataggtttagaatatcagataggttaaacatcgataggtacactcaagggttcttggagaatcataaaggtctaacagaggattactggcctctctatgctgttgctggtggcattggagtctttatcagttgggtttggtcattgctgcttggctcttacgccaatgagatgatgaaagtttcggttcacatcttaacaacctatctagctgtagttagtgtactatgtttctggtgcagactgttcttttggggcggtgcattcgctgttggatctctgttgcagttcttgtatgttatttcagttatagacagacttcctttcacaatgctggtccta

SEQ ID NO: 10754 - DNA, 400 bp, Arabidopsis thaliana
  unsure at all n locations
  Clone ID: LIB24-029-Q1-E1-E11
gcttcaagctcatctttttcttctacccaataacgaaagtctcctcctttactaatgggttgcttcagcagtaaacaccggaaaactcaaaacgacggcggagaaaaatcaatcccgatcaatccagttcaaacccatgtagtccccgagcatcgtaaacctcaaaccccaacaccaaaacccatgactcaaccaatccatcagcagatttcaacaccgtcttcaaatccagtctcagttcgagatccagatacgattttaggtaaaccattcgaagacatcaggaaattttacagcttggggaaagaattaggtcgaggtcaatttgggattacgtatatgtgtaaagagattggtactggtaacacttatgcntgcaaatcgattcgtaaagangaag

SEQ ID NO: 10755 - DNA, 425 bp, Arabidopsis thaliana
  unsure at all n locations
  Clone ID: LIB24-028-Q1-E1-H8
gcaaacgattcgantgtgatttcggggaaagaagtagatgacaagatcgtgctggttttactcagcttggtaacggttttggcattggtatatacagatgtgggcgaaaacgttctggtttcgctgatcattggtttgctcatcgtcggagctcacggcgcttttcgtaataccgatgatttgtttcttgatgaagaaagtgctcgccgtggtggcctggtgtctgccggttctggtaaccggccaccgtcgagttataccccaatttgagtaaaccggtttggagaattactcgtaatttcttgggtttttgattgaagaagctaagggaatcaatttaaggcntttgtnatttgggatttcccaaannatccctggnanttaaaaattttggcctngngggggttccaattttggtttgaaat

SEQ ID NO: 10756 - DNA, 412 bp, Arabidopsis thaliana
  unsure at all n locations
  Clone ID: LIB24-028-Q1-E1-F9
gcccacgcgtccggtgtattcgcagcagaaggatacgctcgatcctcaggtaaaccaggtatctgtatagccacttcaggtcccggagctacaaatctcgttagcggattagccgatgcgttgttagatagtgttcctcttgtagcaatcacaggacaagtccctcgtcgtatgattggtacagatgcgtttcaagagactccgattgttgaggtaacgcgttcgattacgaagcataactatcttgtgatggatgttgaagatatccctaggattattgaggaagctttctttttagctacttctggtagacctggacctgttttggttgatgttcctaaagatattcaacaacagcttgcgattcctaattgggaacaggctatgagattacctgggttataagtcnaag

SEQ ID NO: 10757 - DNA, 484 bp, Arabidopsis thaliana
  unsure at all n locations
  Clone ID: LIB24-028-Q1-E1-G1
ntgttaccctgccagtagcggtccagaattcangggtcgacccacgcgtccgcccacgcgtccgcgcaacattgttctttaacattttgcttcgcagcactcttgctagtaaaagagtgttggaagaatacaagctcagccgcgaggcttttgagtgggtcattggtgagattgaatcaaggtttttacaatcgctagtggccccaggggaaatgatcggttgtgttgctgctcaataattgaagaggactttgaatttgtgaggtcctacnatgaaatgccagatgaagatgtttccccagataagatatctccgtggctacttcgtatanagttgaatcgcgagatgatgggttgataaagaaattgagtatggcggataattgccggagaaagatnaaccttganttcgatgatgacctaacttgcataatcaantgatgataatgctcaanaaactggttccttcgaantcgcaataagg

SEQ ID NO: 10758 - DNA, 413 bp, Arabidopsis thaliana
  unsure at all n locations
  Clone ID: LIB24-028-Q1-E1-G11
gagctaggctgtagctgttcgccatgggagacgcagagagcacctccaaaactagcttgctgctcccggtggaaagagttgaaaacgtgacatggagagatctgcgagatggattattcaccgcagaactcaagaggcttatctgctttgccgctcctatggcggctgttgttatcgctcagttcatgttgcagatcatctcaatggtgatggttggtcacctcggaaatctctccctcgctagtgcctctctcgcctcctccttctgcaacgtcaccggcttcagcttcatcgtaggattgtcatgtgccttagatactttgagtggtcaagcttatggagctaagctatatcggaaagtaggagttcagacttacacagcaatgttctgtcctgcattagtatgtcnccct

SEQ ID NO: 10759 - DNA, 474 bp, Arabidopsis thaliana
  unsure at all n locations
  Clone ID: LIB24-028-Q1-E1-G2
tgttacgcttccggtgccgtccagaattcaagggtcgacccacgcgtccggagaaatggaggaaggtctaaagattcaatctttggtcatttatccgatcaaatcttgccgtggaatctctgttcctcaggctaccgttactcatactggttttcagtgggaccggtattggttagttgttaactataaaggaagagcatacactcaaagagttgagccaacccttgctcttgttgaatcggagttgcctaaggaagccttcttggaagattgggagccaacaaatgactcattgttggtgataagagctcctggtatgagtccgttaaagataccgttgactacgccaagctcggtagcataaggtgtgtcgatgtgggaatggtctggctctgcttttgatgaacgagaagaagctcgaaatgggtttcagagtatcttngaaaaaaaaannccntttggtccggttaaaaa

SEQ ID NO: 10760 - DNA, 418 bp, Arabidopsis thaliana
  unsure at all n locations
  Clone ID: LIB24-028-Q1-E1-G3
gatggttactcatcgtctctgtgtcttgaaggctcgttggatccgaatttagtgaagggaaagatcgttctttgtgatagaggaatcaattctagagcaaccaaaggtgagatcgtacggaaaaatggaggcttggggatgattatagcgaatggtgtgtttgacggtgaaggtttagtagctgattgccacgtgttaccggcgacatctgttggtgcttctggaggagatgagattcgtaggtatatctctgaatcatccaaatctcgttcatcgaaacatccaacggctacgattgttttcaaaggtacccgacttgggatccgacctgcaccggttgttgcatctttctctgctcgtggtcctaatccagagacgccggagaatcctaaancggatgttaacncaacctggtttg

SEQ ID NO: 10761 - DNA, 428 bp, Arabidopsis thaliana
  unsure at all n locations
  Clone ID: LIB24-028-Q1-E1-G5
gcccacgcgtccgaagaaaacaacaggtagttcggatcggagctacgcttgcaaaactcaaaacatggcgaggggtttgaagaagcatctgaagaggcttaatgcgcctaagcattggatgcttgacaaacttggtggtgcatttgccccaaagccgtcttctgggaccacataagtcaagggagtgccttcccctcgtccttatcatcaggaacagggtngaagntatgctcttacctaccgtgaantgatttcaatcttgatgcaaaggcatatccaatttgatgggaaantcaggacggncaaggacctaccctgctggtttcatggatgtngtgtcaatccccaagaccaatgagnaacttccgtcttcncnatgataccaagggaacntttccgtctccaanccatcaagggttanggaacca

SEQ ID NO: 10762 - DNA, 417 bp, Arabidopsis thaliana
  unsure at all n locations
  Clone ID: LIB24-028-Q1-E1-G6
ttcttccttgcttcttcgagtctcgatctcctctctcaatctcagtcttcagcttccaattgactttcaacatggcagatgatgaagttgttgatccaaagaagtaccttgaggaatcttgcaaaccaaaatgtgtgaagccacttctcgaatatcaggcatgtgtcaagagaatccaaggtgatgattctggccacaagcattgcactggccagtattttgactactggcaatgcattgacaaatgtgttgcaccaaagctgtttgcgaaactaaaatgaaaagaggtgaagctggagactctattgtcntgagtttgctacatgtggtttaaanattgatcgtagaaaatnncangtgngaagtttnacttttttttangggcgaancncgatntggcaaatgggggccngccct

SEQ ID NO: 10763 - DNA, 458 bp, Arabidopsis thaliana
  unsure at all n locations
  Clone ID: LIB24-028-Q1-E1-G9
ccggnacagtgtccaaaaactcncgggccaanagatnanttccaaagtncantcaaaaacctctaagctcaaaagatgttgttgagaacgatggcggcgacttccccgcggccaccaccgtcaacatccctaacatctcagcagccaccatcacccccctcacagcttcccctccgtacaatgccgggatcgtacggctggccgttggttggaccattatcggaccgtttagattccaaggacccgataagtttttccggacaagagctgagaagtataagagcactgtgttccgtacaaatattcctccgacgtttcctttcttcggcaacgttaaccctaacatcgtcgccgttcttgacgtcaagtcttttagccatctttttgacatggatctagttgataaaagagatgttctcatcggagacttccggcctaaccttggggttctacggcgg

SEQ ID NO: 10764 - DNA, 425 bp, Arabidopsis thaliana
  Clone ID: LIB24-028-Q1-E1-H1
gaaaattactagagaaaacaagaatggctgcgaatctaaggaacaatgcgttcttgtcttctctcatgtttcttctcttgatcggttcatcatacgcaatcacaagttcagaaatgagcacaatctgtgacaaaaccttaaatccatctttctgtcttaagttcctcaatacgaaattcgcatcgcctaatcttcaagccttggcaaaaaccacacttgattctacacaagcgagagctacacaaacgttaaagaaactccaatctattatcgatggaggagtcgaccctcgatctaagttagcttacaggtcatgcgtagatgaatacgagagcgcgattggaaacctcgaggaagcttttgagcatttagcttcaggagatggtatggggatgaacatgaaagtttctgccgcaattggtggg

SEQ ID NO: 10765 - DNA, 419 bp, Arabidopsis thaliana
  unsure at all n locations
  Clone ID: LIB24-028-Q1-E1-H12
gatcagcctgttccgggttctgggtttcactacttgaactctcctttcggtgatacaactttcacaaaggtgttcgtcggtggtcttgcttgggaaactcaaagtgaaactcttcgccagcatttcgaacagtacggtgaaatccttgaagctgttgtcattgctgataagaacactggtcgatccaaaggatatggctttgtgacattccgagatccagaatctgctaggagagcttgtgctgaccctacnccgattatagacggnagacntgcaaactgtaatcttgcttcccttgggaagacctcggnctccattgccctatgcagtgatacctaacatgcctggacgcttaagacctgcntccccgtacattggaaatgtgcaagggtcctcnaggttcacctaatgggaaanta

SEQ ID NO: 10766 - DNA, 440 bp, Arabidopsis thaliana
  unsure at all n locations
  Clone ID: LIB24-028-Q1-E1-H2
gttacccttcccgtagccgtccnnaattcangggtcgacccacgcgtccgctgatggtaattccgacttatgtaacggatcagtgtacaaggaaaaagagaatggaaagtgtggcagccaaatcaatggttattatgaatcatgtaaaccttgtaatggttctgatttgcatgataatttagctgaaagttccgatcggttcggggagctatcgattaatggaaacaagataagtattaagtctagcaaaatgagccataaagctgaggcacgttgcggaattagtgatgaatccaggaaaaataagaagtacaccatagcaagaatatcgggaacccattccataagtgtggattttcgactttctagaggcattgcacangtgaatgaaggaaactatacgaaaagctaattccaattttgataaggggctgaaagaa

SEQ ID NO: 10767 - DNA, 471 bp, Arabidopsis thaliana
  unsure at all n locations
  Clone ID: LIB24-028-Q1-E1-H4
taaacgttcngtgccaggctaaanttcaagggtcgacccacgcgtccgattccattgaacaccagagtgcacattgtttaccccatcttctgtcactctctgaggttcgaggcgcaaaatctgaggacacgcaaacccatgcttaccgtatgtacttcatgggtccaaacaatttcagggaaccttggcatctgccctactctcctcctggtgcaatcatagagatagtgtacgaagatgcttttaacagctttattaatgaaataaactctaccgcagcatatgattggtgggaagggtctgtgcacagcattctttcagttcttgcaaatccttgtgcctggtcgtggaaacaatggcgtcgcangagaaaaattcatcgccttcaagaatatgtcaaatctcaatatgancantcctgcctccggncaagcanattnaaagcccnccaaaaaagggatnaaggtttgg

SEQ ID NO: 10768 - DNA, 363 bp, Arabidopsis thaliana
  unsure at all n locations
  Clone ID: LIB24-028-Q1-E1-H6
gaaaacgtgttttttttttaccggtcaccggtttatggaatgactgattaccggctacaaccaacgatgaatctttggaccaccgacgacaacgcttctatgatggaagctttcatgagctcttccgatatctcaactttatggcctccggcgtcgacgacaaccacgacggcgacgactgaaacaactccgacgccggcgatggagattccggcacaggcgggatttaatcaagagactcttcagcaacgtttacaagctttgattgaaggaacacacgaaggttggacctacgctatattctggcaaccgtcgtatgatttctccggcgcctccgtgctcgggatgggganatgggtatta

SEQ ID NO: 10769 - DNA, 403 bp, Arabidopsis thaliana
  unsure at all n locations
  Clone ID: LIB24-028-Q1-E1-H7
gtttatgctgcgggagctatttaaaagatggtcaaaccataaagtaatggtcagatggctatcccgcttcttctactaccttgaccgttacttcattgctcggagatcacttccaccactgaatgaagttggcctgacatgcttccgtgacctggtttataatgagctacattctaaggtcaancaagctgtaatagctcttgttgataaagaacgggagggcgagcagattgatagggccctgctgaaaaacgtattagatatctatgtagagattggaatggggcagatggagaggtatgaagaagattttgaaagcttcatgcttcaagatacttcttcgtantattctcgcaaggcatcaagctggatcaaggaagatcctgccccgaattaaagttna

SEQ ID NO: 10770 - DNA, 422 bp, Arabidopsis thaliana
  unsure at all n locations
  Clone ID: LIB24-028-Q1-E1-F7
gctcttctcctcctcctcttcttcctcctctatcggtggagccgcgtgggaaaagcgcgttagacaatcctcaacagccaaacgaccacacggtctctccgtcctagtcaccggagctgccggattcgtcggatcccactgctcacttgcgctgcgaaaacgtggcgatggagtcttaggattcgacaacttcaacgattactatgacccatcactcaaaagagcaagacaagagctcttggagaaacaacaagtgttcatcgtcgaaggtgatctcaacgatggaccactcttacgtaaactcttcgacgttgtccctttcactcacatccttcacttaagccggctcaagccgggattacgtttacgcctatgaaaaaccctcaaatcttaaatcgcntccaaaaatcgcccggganttc

SEQ ID NO: 10771 - DNA, 391 bp, Arabidopsis thaliana
  unsure at all n locations
  Clone ID: LIB24-028-Q1-E1-C6
tcacttccctcattggacctctctaactctcctctcttaccttctcctgtttaaattcttctcctttctttccacaatttctgtctaaccaattccaacaccaaaaaattccatttcttgacgatgaaacgaagccatcaagaaacgtctgtagaagaagaagctccttcaatggtggagaagttagaaaatggttgtggtggtggtggagacgataacatggacgagtttcttgctgttttgggttacaaggttcgatcttcagacatggcagatgttgcacagaagcttgaacagcttgaaatggtcttgtccaatgatattgcctcttcnagtaatgccttcaatgacaccgtncattacnatncttctgatctcccggttgggctca

SEQ ID NO: 10772 - DNA, 409 bp, Arabidopsis thaliana
  unsure at all n locations
  Clone ID: LIB24-028-Q1-E1-C8
gagagttttaggtcaagtgattgatactttgggtttagctcctgtgcatttggttcttcatgattcagctttagggttagcttcgaattgggtttctgagaattggcaaagtgttcgaagtgtaactcttattgactctagtattagtccagctttgccgttgtgggttttgaatgtaccggggattcgagagattttgttagcgttttcgtttggttttgagaagctagtgagcttccggtgctcaaaggagatgactttatcggatattgatgctcataggatacttttgaagggaagaaatgggagagaagctgttgttgcttcgttaaacaagttaaaccatagctttgacattgcacaatggggtaattcagatgggaataaagggtattcccgaangcaagtg

SEQ ID NO: 10773 - DNA, 412 bp, Arabidopsis thaliana
  unsure at all n locations
  Clone ID: LIB24-028-Q1-E1-C9
gcccacgcgtccggcacagtggccagtgtgggaatttttgctggacgagagagcaaaaccctactgcgatttatcgactactaggagaagaagaagaagaagacgatgcggagattcggggctgggaacagatccgtttccaagctcgtactcaccatttgtgtanctatcctgttcataccatctctatcgtatggagcttcacaagggaaccggaagacggcgaagtcttcngtgttttccttgttcaatcttagggataaaagcagattttggagcnagtctgtttttcgtactgattttgatgatttggagtcttccgttcactcnaattctggtgtgctgaattacactaagtcaggaaatattgcgagttanntagancttangngaactcgattcggtcnaacct

SEQ ID NO: 10774 - DNA, 407 bp, Arabidopsis thaliana
  unsure at all n locations
  Clone ID: LIB24-028-Q1-E1-D10
aaacaaattataaacccattttccttcataaatttctaaaataaaaccccttaaactttcattcacatcatccaacccccaatgggtcgaatcttgaaccgtaccgtgttaatgactcttctagtcgtaacaatggccggaacagcattctccggtagcttcaacgaagagtttgacttaacttggggtgaacacagaggcaaaatcttcagtggaggaaaaatgttgtcactctcactagaccgggtttccgggtcgggttttaaatccaagaaagaatatttgttcggaagaatcgacatgcagcttaaactcgtcgccggtaactccgctggaaccgtcactgcctactacttgtcatcggaaggaccaacacacgacgagataagactttgagtttctggnaa

SEQ ID NO: 10775 - DNA, 451 bp, Arabidopsis thaliana
  unsure at all n locations
  Clone ID: LIB24-028-Q1-E1-D2
ctgtttaccttccggtgcccgtccanaattcaagggtcgacccacgcgtccgggaataatggagtttggattagccacttcgagttttctgggtactcaactaatcccggccactctgtttagcaaacgagctcgagctttgtctctcaccgtcacagcgaccggtggcagcagaaacaataaggtttacacgaggcttgattcttgtctagtgattcctcctcctcctaaattcaagaaaccgcgtgctattgttaaattcttgggaggtgccttcgtcggagctgttcctgaactcacttacagttaccttaaggagctactggcaaaggaagggtatttgatagtatctgtgccgtacaatgttacatttgatcatgaacaagctgctaangcaagtttangagaaggtttaattcatgcttggacncgatgtcccatcggaantcaa

SEQ ID NO: 10776 - DNA, 429 bp, Arabidopsis thaliana
  unsure at all n locations
  Clone ID: LIB24-028-Q1-E1-D3
gggagcgttctcttctctccttgagcttctcttaccgccattagagctccttcacaaactcataaacctatttgttgagccaggcttggcttaaccactggcctttttccagactaaattatgtattgctcttcttcgatgcatccaaatgcaaacaaagaaaatatctctacttcagatgtacaggagagttttgtacgaataacgagatcacgagctaaaaaagccatgggaagaggagtatcaatacctccaacaaaaccttcttttaaacagcaaaagagacgtgcagtacttaaggatgtgagtaatacctctgcagatattatttattcagaacttcgaaagggangcaacatcaaggcaaacagaaaatgtctaaaagagctaaaanaagcancaaaaggaaggggctaaaaagtgccatgg

SEQ ID NO: 10777 - DNA, 415 bp, Arabidopsis thaliana
  unsure at all n locations
  Clone ID: LIB24-028-Q1-E1-D7
tgcttcttcttcttcaaaatctctctcttcaccaaatcctcagaagatgagcaacgacaaggatagcttcaacgtctccgatcttactgctgctcttaaggacgaggatcgagctggccttgtcaatgctctaaagaacaagctgcagaatctggctggtcagcgttctgatgtgctcgagaatctgactcccaatgtgagaaagcgcgttgatgccttgagggatatacagagccaacatgatgaactagaggcaaaattccgtgaggagagagctattcttgaagccaagtatcaaacgctgtatcagcctttgtatgtcaagcgttatgagattgtgaatggcactactgaagttgaactggctccagaggatgataccaaggtggaccaaaggagaagagaaaactggana

SEQ ID NO: 10778 - DNA, 403 bp, Arabidopsis thaliana
  unsure at all n locations
  Clone ID: LIB24-028-Q1-E1-D9
gaagaaaatccaatctcacatcgattcaaaaactcccattttctctaactcgaggtacgaatgatctttctccattatctcttactcgaaaccctagcagcatcagtctgatggtgaaagctagtggagaaagctcagattcatcgactgatctcgacgttgttagtacgattcagaatgtttgggataagtctgaagataggttaggtcttattggtttgggttttgctggtattgtagctctttgggcatcattgaatctcatcacggcaatcgacaaattgcccgttatctcgagcggattcgaactagttggtatcttgttctccacgtggttcacatatcgatatctcttgttcaaaccggacagacaggagctttcgaaaattgtcaagaaatcnag

SEQ ID NO: 10779 - DNA, 471 bp, Arabidopsis thaliana
  unsure at all n locations
  Clone ID: LIB24-028-Q1-E1-E1
ttacgccttcnggtagccgtccgnaattcaagggtcgacccacgcgtccgaacaaaagcaatccaatcccaaacccatttgctcttaagattcttcacatagagaagtcacatgttccttcttcttcttccttcatcatccccaaacacacacaaactaaaaaaaaggcaaaaccctagatccaagatcagacctaatctaatcgaaactcatagctgaaaaatgaagagagatcatcaccaattccaaggtcgattgtccaaccacgggacttcttcttcatcatcatcaatctctaaagataagatgatgatggtgaaaaaaagaagaagacggtggaggtaacatggacgacgagcttctcgctgttttagggntacaaagttaggtcatcgggagatggcggaggttgctttgaaactcgaaacaattagagacgatgatgagttaatgttcaagaagatgggttan

SEQ ID NO: 10780 - DNA, 414 bp, Arabidopsis thaliana
  unsure at all n locations
  Clone ID: LIB24-028-Q1-E1-E11
gnacactttggttcatcaattgtttcaaaagaaactcaactaactgactcaaaagaaaatcaaataagcccccaaaatattttgagaatcatgctaaagatggagattaacggtggggtcgctacacctactgcttccgccgtcgccaaggtgacagaaaccaccannnnnnnnnnnnnnnnnnnnnnnnnnnnnnnnnnnnnnnnnnnnnnnnnnnngcaacagccgccacaaccaccggttgtactaagcccttgtgcggcttgcaagattttgcggcggcggtgcgccgataaatgtgttttggcaccgtactttcctcctacggacccggcgaagttcacaatcgctcaccgtgtctttggagctagcaacattattaagttcttgcangaacttccagaatcgcaaaag

SEQ ID NO: 10781 - DNA, 463 bp, Arabidopsis thaliana
  unsure at all n locations
  Clone ID: LIB24-028-Q1-E1-E4
ttaccctgcagtaccggtccngaattcncgggtcgacccacgcgtccggagtaatgtaatacacgtatctacatgaagatgaggatataaatatccatttatgagaaaagaaaaaaagggacaaacaaaagttggcaagtttaactaagtgaaaagtctatggcggagacaacgagttggatcccagtatggtttcctctgatggtgttgggatgttttggtctgaattggttggtcaggaaggtgaatgtgtggctctatgagtccagccttggggagaacaggcactatctgccaccaggtgatttgggttggcctttcattggcaacatgttgtcttttctcagagctttcaagacttctgacctgactccttcactcgcactttaatcaaaaggtatggacctaaaggtatatataaagcacacatgttccggaaaccnagttttaanagttaccaact

SEQ ID NO: 10782 - DNA, 421 bp, Arabidopsis thaliana
  unsure at all n locations
  Clone ID: LIB24-028-Q1-E1-E5
agagatatgggctacaatgttagtatgatggcagactcaacttcccgttgggcagaagcattaagagaaatttcaggacggctggctgaaatgcctgctgacagtggatatccagcctatctagcagcacgtttagcatctttctatgaacgtgctggtaaagtaaaatgtcttggtggaccagaacgtaacggaagtgttacaattgttggtgcagtttcgcctcctggaggagacttttcagatcctgtgacttcagcaacccttagtattgtgcaggtcttctggggtttggacaaaaagcttgcccagagaaaacattttccctctgttaaatgggttgaatttcttactcaaagtnattcaannggcactnggaatnctttccaatgaagaaanttccgattccaagaatttcanc

SEQ ID NO: 10783 - DNA, 381 bp, Arabidopsis thaliana
  unsure at all n locations
  Clone ID: LIB24-028-Q1-E1-E8
gggaatctttggtgatcaccgaccggatctggacgaagaatctcgttaacaaactcaacaagcattctccaaagcttcctcctttttcttcaacgatcgtcattgcattgtaatttggagagtttagctacaaagtctgtcttcatcgaattaagatctatctgatttttctgggtggttctcatgtgtgagatttttgatgggtttagagttgtcggatatggaaggttcttcttatctttgatttgttttatatattaagcggcagaatttgaggttgacntgagcgagaatctggattctttcganggagtanttaatgttccctggagaattccctgtttttggcgtccaagttntccagttttccngagtggttaa

SEQ ID NO: 10784 - DNA, 413 bp, Arabidopsis thaliana
  Clone ID: LIB24-028-Q1-E1-F10
gcttatcctttcaatttaacagagtcatcagcttgaagacgaaagcctttctaattccaatcttcttcacttgtatgacacgttcgtctactcttgcgcttggtcggttttcttaggatttttgcacaagaatgatcaacgcatgattcggattccaggatagagaatccatggctactttcaatgttctttgtagcaatcgatttagattcaatggaggttattctccggagaaatttaatagaaaggtgtcttcgaggagtagtgagcttaatgtttgtgtctctagaatcaggactcaatcgtttagttgcaggagacttggtgggtttatggaaattggtgaaaccagattaggggttattagagttcatggcgattctcgtaatagattttcctgtaatagcgagatt

SEQ ID NO: 10785 - DNA, 405 bp, Arabidopsis thaliana
  unsure at all n locations
  Clone ID: LIB24-028-Q1-E1-F3
gngcagctggaataagtgtcaatgtcacgcttatattctcaatcgccagatatgaagcagtgatcgatgcatatttggatggcctcgaggcgtctggacttgatgacctctcaagagttaccagtgttgcttccttctttgtcagtcgggtggatactctcatggacaagatgcttgagcaaattggtacccctgaagccttagatctccgtgggaaggcggctgtggctcaagctgcattagcatacaagctataccagcagaaattctctggcccaagatgggaagctctggtaaaagaaaggtgccaagaaacagagacttctctgggcatcaacaaagtgtaaagaaccangcttactctgacaccttanaaggtcgctcctctcaacgggnctgaaactg

SEQ ID NO: 10786 - DNA, 428 bp, Arabidopsis thaliana
  unsure at all n locations
  Clone ID: LIB24-028-Q1-E1-C5
gaaacaaacactaacaatggtggtcgaagaagattcacgtctcataaatctccaacacaagtacaacccgacaatgcccgaggtggtggaggagctgaagagaatttgggacataagttttccggtggccgccatgagcatattaaactacctaaagaacatgacatccgtcgtgtgtatgggacgactcggtagccttgagctcgcaggaggagccttagccatcggtttcaccaacatcaccggttactccgtcctctctggtttagccaccggtatggaaccattatgtggtcaagccatcggttctaaaaacccttcactcgcttccttaaccctcaagcgaaccatcttcctccttctcttagcttctcttcccatatcaatccttttggctaaanctcgngcctcnaaaggctgaatgcccc

SEQ ID NO: 10787 - DNA, 435 bp, Arabidopsis thaliana
  unsure at all n locations
  Clone ID: LIB24-026-Q1-E1-F5
gcataagccaaatgggtgtgtggtggatagtgctggtggtggctgtcttgactcacacggcgtctgccgccgtgagagaatatcattgggaggtggagtacaagtattggtcgccggactgcaaagagggcgccgttatgaccgtcaacggcgagtttcctggtcccaccataaaagccttcgccggagacaccatcgtcgtcaatctcaccaacaaactcaccaccgaaggccttgtcatccattggcatggaatccgtcagttcggaagtccatgggcagatggagcancaggagttactcaatgcgcaattaaccctgganagacttttacctacaattccactgttnaaaanccggaaacacatttctaccatggacactatggcatgcagagatnagctgggctatacggatcgttgattgtggacntgg

SEQ ID NO: 10788 - DNA, 424 bp, Arabidopsis thaliana
  unsure at all n locations
  Clone ID: LIB24-026-Q1-E1-G1
gaagctgaggaggataaaaaccctagggtgagtgagacagagagaagcgaaaatggtgcagcgccttgtttaccgatcacgacacagttacgccaccaaatccaaccagcacaggatcgtcaaaactccaggaggtaaattgacgtaccagaccactaagaagagagctagtggacctaaatgtcccgttaccggcaagcgtattcagggtattcctcacttgaggccaactgagtacaagaggtcacgtttatcaagaaacaggagggaccgtgaaaccgtgccttatggtggggttttgtccgggttctgctggttanggaaaagaatcatccgtgcccttcctggtgggaggagcaaaaagantgttgaanaaaggttttgaaagcntcaagaaagnaaanggaaaaaggtgctccccaan

SEQ ID NO: 10789 - DNA, 502 bp, Arabidopsis thaliana
  unsure at all n locations
  Clone ID: LIB24-026-Q1-E1-G10
naactgtttttcctgccgcctagcgagtcgaaaaaatcccggggtcgacccacgcgtccgtgcacccggtcgatgttcccaatggggtggataaaagatgttacggtgngagattcttccaccgaaccctatatcgttgcgcataaccagcttcttgctcatgccacggtcgttgatctatacaggacgagatataagtaccaaggagggaagattggacctgtgatgataactanatggtttctaccatatgatgacactctagagagcatacaagcaacttggagggccaaagaattcttcttgggatggttcatggagccgctaacaaagggtaaatacccatacatcatgaggaaacttgttggtaatcggcttccaaagttcaacaagcacagaagctcgccttttaaagggttcaaaatgattttcctgggnccaactattactcactcaatanagcccannccccttgancccaagtcctccgggaaaaattcct

SEQ ID NO: 10790 - DNA, 478 bp, Arabidopsis thaliana
  unsure at all n locations
  Clone ID: LIB24-026-Q1-E1-G2
cccgcccgtaccggtccaaaatcccgggtccaccacgcgtccggatcatgtgaatacgtcgactggtaaagaaagaaagattgctgctttttagatttagattcgatgaatgtatggaagatctggtcttgacaggtttaagaagtcccaaacttcggaacccttctctgtatcagcaaatcctcctccggtggtacaacaacatctgtctccggaggcattgtcggggcaaaaaactcagattggagctggtcaatcaaactggcatccccctgattgggcgattgagcctcgtgccggtgtctactctctggaagttgtgaaanacggccagatccttgatcggattcatctacatagacgaaggcatatcttcgggagacaacatcagacttgtcattttgtccttgatcatcagtcngtttcccgccagcatnccgcanttgttcgcacnangaaaggcancacccctgtgatt

SEQ ID NO: 10791 - DNA, 197 bp, Arabidopsis thaliana
  unsure at all n locations
  Clone ID: LIB24-026-Q1-E1-G9
ggagacattgtgctattgctctcgcagggaggtctaggcatatcctccctgccttaaagagagcttttatcttagtaatgttgaactttatgtagtacttatgtaggagagactttataattctaatgctttattctggatcttactgctgtcgtatttaggtgatgtttgnnnnnnnnnnnnnnnnnnnnngggcg

SEQ ID NO: 10792 - DNA, 488 bp, Arabidopsis thaliana
  unsure at all n locations
  Clone ID: LIB24-026-Q1-E1-H1
cgccgncccgtaccggtccaaaaattcccggggtcgacccacgcgtccgggattcttcattgacggtaggagtcaccacttttggcggcgattccttgttctctattttttttgcacaagcaacatttagcttctgcaaactccagttcatctctcaaccctcatatcgccgtgttttctcgctctagtaccgcgagctcggacgaaccaggaagcaatccgttaatctagaagcggtgttgagaagatgacgattacatcaaatatctctgtacagaacgataacctcgttgttcaagggaagactatccttaccanaatccctgacancattatcctaactccggttaccggtaactggattcgtttccggttcatttataggcgcgacgtttgaananagcangagtcttcatgtgttcccatcggtgtattggcanggtcntcggttcatgtgccgtttcgggttaangccagggggggatgga

SEQ ID NO: 10793 - DNA, 485 bp, Arabidopsis thaliana
  unsure at all n locations
  Clone ID: LIB24-026-Q1-E1-H2
ttgcctgccacgtaccgggtccanaattcccggggtcgacccacgcgtccgtttctttattcctgggttgtagctggtttaatggttctgtagacatttgataatgaagtctctcacttcattttgtttgggtgatgtaaaatgttgtcagtggattttaggtgaggcttaatctcatggattattcttttgaaatcccctcaggtgaatcagtgaaaattgagaaagtgatgttcaacttcttatctcttaatccttcatttgctctgtcacacattgaagcctattttcggttgcagtttgttaagttttcatgggaagcgttgtctttggagtgttctgaagttgactttaatcctgaaagaagaaggatatgcttttactgaagttatcatgggaagcactttttgtggagtttacaggagtgtctatgccgttgcagtattcgagggatcgcctttgatctgccagtccgttccttggta

SEQ ID NO: 10794 - DNA, 423 bp, Arabidopsis thaliana
  unsure at all n locations
  Clone ID: LIB24-026-Q1-E1-H3
gcccacgcgtccgatacgtagagagatccaaaatacccaacctcgcagagtaaaagcaaaaagaagaagaaatcagagagaatgtcgtggcaagcatacgttgatgagcatttgatgtgtgatgtcggcgacggccaaggtcaccaccttaccgccgccgctatcatcggccatgatggtagcgtttgggctcagagcgctaattttcctcagttcaaacctcaagagatcacagacattatgaaggatttcgatgagcctggtcacctcgctcccacgggtatgttcctcgcagggctaaagtatatggtcatccaaagcgagcctaatgctgtcatccgtggcaagaaggganctgggggaatcacgatnacngannacaggacanttcantggtgtttgggctgtacgaaagagncagtt

SEQ ID NO: 10795 - DNA, 444 bp, Arabidopsis thaliana
  unsure at all n locations
  Clone ID: LIB24-026-Q1-E1-H5
gcaagcagcggcgcagaagttgaacacaagtgaagctcacaatggcgaggattaaggttcacgaattgagggagaagtcgaagagcgatcttcaaaaccagctgaaggaactcaaagctgagctcgctctcctccgtgtcgctaaagtcaccggaggtgctccaaacaagctctctaaaatcaaggtcgtgcgtaaatccatagctcaggttttgacagtgtcttctcagaagcagaagtctgctctaagagaagcatacaagaacaagaagttgcttcctcttgatctccgtcccaagaagacccgtgctattcgtaaacgcctcaccaaacaccaangcctcgtttgaagacagagcgtnagaagaagaangagatgtatttccccataanggnantntgcctntncaanttttaaatttttaccggcnaaaaaaaccggtt

SEQ ID NO: 10796 - DNA, 491 bp, Arabidopsis thaliana
  unsure at all n locations
  Clone ID: LIB24-026-Q1-E1-H6
ttacgcgcgccaggtaccggtcaaagaattcccgggcttgctgggttaaaaggtttcaatggccagcttgaatttttcaacgtggatgagctcgagacaatggccacagctgaacacttcatggccacggatatcgaatgggacccgactggaaggtacgttgcaaccgcagtgacatcagtccatgagatggagaatgggttcaccatatggtctttcaacgggattatgctttaccggatattgaaggatcatttcttccagttggcttggcgtccaagacctccatcattcttgactgcagagaaggaagaagagatagcaaagaccctgaagaagtacagcaagaagtatgaggcagaggatcaggacgtgtcgttgctgttgagtgaacaagacagagagaagagaaaggcattgaagggaagaatggggagaaatggggtaatgcagtggaagtctctgcatgaaaganggagaaacccgtgaag

SEQ ID NO: 10797 - DNA, 196 bp, Arabidopsis thaliana
  unsure at all n locations
  Clone ID: LIB24-026-Q1-E1-H9
ggagacattgtgctattgctctcgcagggaggtctaggcatatcctccctgccttaaagagagcttttatcttantaatgttgaactttatgtagtacttatgtaggagagactttataattctaatgctttattctggatcttactgctgtcgtatttaggtgatgtttgataaaananaaaaanaaaaaagggc

SEQ ID NO: 10798 - DNA, 407 bp, Arabidopsis thaliana
  unsure at all n locations
  Clone ID: LIB24-027-Q1-E1-A12
accccnaatctccgttgacctgaatcanacgatgtctcttctcngacgattcgtnaangatngcgancaattccagatttctgcttcantcaatctcgggangtncattctccaccgtgaatcccantccaactgcttcacctgatcgtcgtacttgcgtcgaattcgataacctcagcttcaaagccggaagctccggcgatttcgaagccgtacgtcgtctcctcaacagccgcgtcgtaaacgcgtgtttcaacacgacagctactttcaaattcctaacaaacacagactcttactcctcctccttagaagatctccgccgtattttgcctcagaccgacgccggngtacactcggaaacactcctacgaaactctcancgctcgtctctgnaaactcgggcg

SEQ ID NO: 10799 - DNA, 457 bp, Arabidopsis thaliana
  unsure at all n locations
  Clone ID: LIB24-027-Q1-E1-A2
ccggtccnagaattcccggggtcgacccacgcgtccgnccacgcgtccgccagaacactcttcgttnagacaacatngaatgataatgagaagaagtctaagtctgagaagcatcacgatgatgatattaatggctgttttggtctggtcagtgactctagagacctgcattgccagaagaggaagacattggngacatanccaccgaagctcttctgacttgtctgattccttgtcaaacaagaaaccgaagagccatgggaacagtcaccaccacagttctcacaacaacaaccatcaccacaagtctaaacctaaaccgaaaccaaagctgaaaacgccgccaaaagctcangacantaactctccggtggtttcagggccaccaanngtccaaccaacgcctcttccgcctcanaagggatctcaagttttcaatgtgatgggattttggngc

SEQ ID NO: 10800 - DNA, 409 bp, Arabidopsis thaliana
  unsure at all n locations
  Clone ID: LIB24-027-Q1-E1-A8
atcttttcctctccttactctccatcaatggcttctcttatctctttttctttgctcccaaaaccaaaagccgtaagaagttcaatttcagctcctcagacacagacaataaatactgaaaagcttgaagataaattcggacgaaaaggcataaaattctcggaatcaaacaacattcctatggtagagcttaaggtcagaaatggaagttcattaaaactgagtctatcagatgctcatgtactttcatataagccaaaggtatactggaaagacgagggattcgaggaagtcctttacacagttgatggtgatgagagcagangtggggttggtgttgttatcgtaaacggggaagaacctaaaggagggtcttcagtaatctcaggatgtgattggagtgtcaagg

SEQ ID NO: 10801 - DNA, 482 bp, Arabidopsis thaliana
  unsure at all n locations
  Clone ID: LIB24-026-Q1-E1-F4
ngttagctgccgtaccggtccaaaattccggggccaaccangcntncgnaaagannaatccccccccgaatccccccttttcccnccaaaaaatccttttcctcaantaaggnttcctcccgcttgccttttaaattcctctccaagctgatctgatctccgttaccgatggagtctactgctaacgcactcgtcgtcaaggtgagctatggaggtgtgcttaggcgtttcagggtgcctgttaaagctaatggacagcttgatcttgaaatggctggtcttaaggaaaagatcgctgctctctttaacctctctgcggatgctgaattgagtctgacttactctgatgaggatggggatgtggttgcccttgttgatgacaacgatctctttgatgttactaatcagcgtcttaagttcttaaagatcaatgtgaacgctggcgtgtccactaactctgctgctccaaagaataatgggaa

SEQ ID NO: 10802 - DNA, 397 bp, Arabidopsis thaliana
  unsure at all n locations
  Clone ID: LIB24-027-Q1-E1-A9
gataatatccaagctgatgatgtgacaaaggcaacagcccaaataagaaggaaaagcgagccttctccaagccccttgcgaaaggaaataacatctgcgcaggccgcccataatactttaaaagaagctaaagacttgaaacatacagctgaccgtctcaagaattctgtatcaaaccttgagcacattgagctctacttccaagcttgccttaagtttcttcacggtgcttttcttttggagatgagtagcaacgagagtgctagacaaggagaaacaatggtccaatctatgaagatttatagtangcactgcgaatctttgcggattttgtgcccatgagtatgagaagtctaaagatatgggaactgctgccctggcttacaaatgcatggng

SEQ ID NO: 10803 - DNA, 436 bp, Arabidopsis thaliana
  unsure at all n locations
  Clone ID: LIB24-026-Q1-E1-C7
gggccagaaacctgggacttctggactccgtaagaaggtgaaagtgtttaagcaaccaaattaccttgaaaattttgtccaggcaacgttcaatgctcttactacagagaaagttaaaggtgcgacacttgtggtttctggtgatggtcgttattattcagagcaagctattcagattatagtaaagatggcagcagctaatggtgttagacgtgtgtgggttggtcaaaacagtctgctatcaactcctgcagtatcagctattattcgtgaaagagtaggggctgatggatctaaagccacaggagcatttatcttaacagcaagtcataatcctggtggcccaactgaggatttcggaattaantacaatatggaaaatggtggaccagctcctgaatcaatcactgataagatttacgaagaacacaaagac

SEQ ID NO: 10804 - DNA, 513 bp, Arabidopsis thaliana
  unsure at all n locations
  Clone ID: LIB24-026-Q1-E1-D1
tgttttccctgccacgtaccggtccnanaattcccggggtcgacccacgcgtccggtgatacatcactcgatctcaagagctgaacagagtttggagtagacgactataatttctgtttctattgagagctatggcactacgatcagtaagcaggaggctcgggagcagaattttgaatcaacgttcctttgttgcttcgcttcactctcatgccacaagtttcgggtttcaagaagtaaaggaagaagagaaaagcanattggttggtaatgtattcaccaatgtagcttcgagtttatgatattatgaatngatgtgatgagtggtggtttgcataggctaatngaaaggaaanactcctttgggaaagccnaagtccaattngcaacgggatgaanncatcttngatgttggccggagggaacaaggtgatgttggccttttaggatctaatgattgctgtttacagttgtcaaacgaaganccattgcaggaaagttgattnaggcttc

SEQ ID NO: 10805 - DNA, 438 bp, Arabidopsis thaliana
  unsure at all n locations
  Clone ID: LIB24-026-Q1-E1-D11
gcttaagtggaagaaagttgcagccactaaatcagatccgacaatgccgaagcaaatccatgagatcaaggacttccttttgacggcgagaaggaaggatgcaaggtctgtgaagatcaagagaagcaaggacattgtgaagttcaaggtcaggtgctcaaggtacctctacacactatgtgtcttcgaccaagagaaggccgataagttgaagcagtctcttcctccangtttgagtgtgcaanacctttgaagatcttatgaaatcaggatctatcatggntttatatacccttgtcttagatgattttgttttttccctttctgctgtccttttgaatgacnatgattcaaacttccgttgagtttccttcntataacttcangacnanaatttatgaattgtggttgnaanntttttttgcaaaaaaaaaaaaa

SEQ ID NO: 10806 - DNA, 401 bp, Arabidopsis thaliana
  unsure at all n locations
  Clone ID: LIB24-026-Q1-E1-D12
gaaaaatctgagcacaaaagcattgctggcagagataanagagatctctgaaaagaagcgaggcgaagatgatgcacttcttgctcttgcggctggaaatagacgaactatttcttccaatatgagttttgattatccggatcctgatcttcacgangatctgtatcagctgatcaagtattcatgtggagaaatgtgttcaacanaacagttagataaggtaatgaaggtatggacagaatttttggaaccaatatttggtgttccttctcgccctcaaggtgccgaanaccganaagatgctgtcaagtctacaaaccatgaccgagaagaccaagaagatgctgtcagtcctcaaaatggagctantattgccaactctaagccgtcnaatgggcccc

SEQ ID NO: 10807 - DNA, 439 bp, Arabidopsis thaliana
  unsure at all n locations
  Clone ID: LIB24-026-Q1-E1-D2
ggggaagacggacgtgtttgatctaccttaccggatggctagaggtcaaatagaagaaagtttgcgtactaagatggcttccataaaggaaagcatggtccagttacaagatgcacctaaaagagcatctgttacatctgaagcaacagagagagagcttgaactcgaagctcagcttgtcgaggcaagaagcataatccaagaacaggagtccataatgtcgaaacatctcccaaaatcagagcagcgaagggaatctgtagcttcgttggcagctgagggagtatgaaaatgtctaggagctcaaaatcaagtggatccaagttgctaaaagagacttgtcgcaaaatgtagtcgtagtactgtantcactaccaccaaaactctccttggatatcnaagtgatgtctattcaacctttanttgtgacaaatcagga

SEQ ID NO: 10808 - DNA, 490 bp, Arabidopsis thaliana
  unsure at all n locations
  Clone ID: LIB24-026-Q1-E1-D4
gtttcgcctgcccgtaccgggtccnaaaattcccggggtcccaccacgcgtccgcattccttgtatttatttttcctcccaaaaaacatctttaagagtcctcatggcgatgtctttatcaggagctgttctcagtggcatgggttcttctttccacaacgtaggagcaaagcagagtggtgttggtaccgtcagagttggccggaagagtgagctcgtcgtcgttgctcagcgcaagaagtcgttgatatacgccgttaaaagtgacggcaacatcctcgatgacctcaacgaagccacgtgagtctatattcttttcttttaacaaattttctcgtgactaaggctatcttcatgtgtactcgcaaaaactgcgactgaggaagctaagaaagctttggattatgtgactgagaaaggaaaagaagccggaaacaaggcggctgaattcgtanagggtaaagcagaanaggctaagaatgccactgat

SEQ ID NO: 10809 - DNA, 434 bp, Arabidopsis thaliana
  unsure at all n locations
  Clone ID: LIB24-026-Q1-E1-D8
gccttttctacgtttcccgaattctgattagttgattcttcttcctcaatccgttcttcccaaacttgttgccgatttttggatccggtcatcaactttgttgtttatttgtcatcaatgcaaaaattgagagcgtctgtgttttcacttgcatgttatcaattcctaatgttgtttgccgtttcattaaccggattcgagactcttcccgctggatttctttttttcacgtcttcttttctattttttatggatttggtattttgacatgttaagcaaccttcgttaatcagtttaaaatcggtgctttccgaaatttttagaagaaacatggaagcttaaaattttgaaattgctatttggaaaagctatcanttcataggcttaagtcnttgtaattcntctttacntgttggtcaatgggaatgaaaaat

SEQ ID NO: 10810 - DNA, 436 bp, Arabidopsis thaliana
  unsure at all n locations
  Clone ID: LIB24-026-Q1-E1-E1
gnttgtggttaacggctctgctcaagtccaaattgtgtaaacaatttctcttcctaataattttccaagactttggatcaccctaacttcttcgtttcgtttcaatcaaatggcacatttctctgctagacttaagcttctctcaagcaacgatggattatcttttggtgtagattcgagagaccaatttcggcagagcctttacatggccggtggtggatctcctttggttccaatacgcatgagccgactaaagttttgtgctagaatcttctcatcttactcttttccttataagagaaagaaaattagggatctcgataacaccgagaaaaatcttgatattgacgaagacaacgatgagtgggattttgatgganacgatgatggtttagagactgatgatcaatcttcctgcttcanaaggcttgggtcc

SEQ ID NO: 10811 - DNA, 412 bp, Arabidopsis thaliana
  unsure at all n locations
  Clone ID: LIB24-026-Q1-E1-E11
gagctctttgttcatctctctatcttcttctccatcctcttcatcactctcncatcttcttacagctgcaccgaaaatgacaagaatgccctccttcaaatcaagaaagcacttggcaatcctccccttctatcctcctggaacccccgaaccgactgttgtaccggctggaccggcgtcgaatgcactaaccgtcgcgttaccggtctcagcgttacctccggcgaagtctccggtcagatctcgtaccaanatcggcgacctcgttgacctccgtacactagatttcagctacctgccacacctcancggaaacatcnacgcaccatcaccanactcaanaanctcaacactctctacttgaagcacactaatctctcnggtccgattcctgattaaatcaacganctca

SEQ ID NO: 10812 - DNA, 433 bp, Arabidopsis thaliana
  unsure at all n locations
  Clone ID: LIB24-026-Q1-E1-E12
gagttactgtatgtcttcttgtctgctgcaaccattccatacattggtttgctattcatttgcttgtgcaacgatgttccagtcccgagttatcggctaggagctgagggacggtttgggatctacctagctacaatggttgtcatttattgcatatcctacagcatcgaggactttgatgtgatgatggaagtgtcatttctggtgattatgtctataataggagcggttacaatcgttcaacttcattctcctgccgaggatttaaattccagccgaaccacattcatactatttctagggacgatgtctgctattctgggttgtgtagcgaangattcntggatgtccctttccggtancctctgtttcctcatggttgtcatgtgtatcatcaaaaccaactgcttggctgcngattaatttggaaaaa

SEQ ID NO: 10813 - DNA, 435 bp, Arabidopsis thaliana
  unsure at all n locations
  Clone ID: LIB24-026-Q1-E1-E5
gggccagaaacctgggacttctggactccgtaagaaggtgaaagtgtttaagcaaccaaattaccttgaaaattttgtccaggcaacgttcaatgctcttactacagagaaagttaaaggtgcgacacttgtggtttctggtgatggtcgttattattcagagcaagctattcagattatagtaaagatggcagcagctaatggtgttagacgtgtgtgggttggtcaaaacagtctgctatcaactcctgcagtatcagctattattcgtgaaagagtaggggctgatggatctaaagccacaggagcatttatcttaacagcaagtcataatcctggtggcccaactgaggatttcggaattaagtacaatatggaaaatggtggaccanctcctgaatcaatcactgataagatttacgagaacacaaagac

SEQ ID NO: 10814 - DNA, 384 bp, Arabidopsis thaliana
  unsure at all n locations
  Clone ID: LIB24-026-Q1-E1-F10
ncttctttctgcanattttantttcccgagaaaatcatcactgatgaaaaatgctcgctgtgtttgagaagacggtggcgaatagccctgaagctttacagagtccacactcgtctgagtctgctttcgcgttgaaagatggatctctcgctactcatttcgcttccgtgaatcccaactccgtcacgcttaacttcggatcttcnggatttgttgcttactctcgtgataatcctgatcctcgtgttcctagattanttgctgtggtggangatattttcngtcacttcnaaggnnacattgagaacctaccgtttcgagaagcaacagtatggactgaacatnatcacaaacgaggncatcattgtgattgaggcttanaag

SEQ ID NO: 10815 - DNA, 490 bp, Arabidopsis thaliana
  unsure at all n locations
  Clone ID: LIB24-026-Q1-E1-F11
ntgttttccgccgccacggtccaaaaatcccgggtcgacccacgcgtccgnataaataaaactaataaagaagaagaagaaaacagagcaattaaagtccttaaatcttcttcttctccaattcaatggctcttccgttgccattgatcttccttatcttctctcatttgttcgtttctggagttagatcaacgagcttcattatggtgaacaaatgcgaatacacagtctggcctggacttttatcaaacgccggagttccaccacttccgacgaccggattcgttctccaaaaaggcgaagaacgaacaatcagcgctccaacttcatggggaggaagattctgggggagaactcaatgttccaccgacaccgacggaaaattcacttgtctcaccggagattgcggatntggtaccctcgaatgctcccgggttcgggngnaaacaccagcaggcaacactangcggggattcagacctagacnggt

SEQ ID NO: 10816 - DNA, 433 bp, Arabidopsis thaliana
  Clone ID: LIB24-026-Q1-E1-F2
gattcaaagccaagtctcctgagcagtttaattacttataggaattgggagaagctggcctactatcctcggcggccaagcacattggacagttggacttgttgctatattgatttctttctgtggtataattgcctcagacacgtttgcttttcttggtggcaaggcatttggtagaactcctcttattagcattagtccaaagaagacatgggaaggagcttttgcaggacttgttggttgtatttccattaccattttactctccaaatcgttgtcctggcctcaatctcttgtcagcaccatagcttttggagttcttaacttcttcggatcggtctttggtgacttaactgagtcaatgatcaaacgtgatgcgggtgtcaaagactccggctcactcatcctgggacacggtggcatattggacaga

SEQ ID NO: 10817 - DNA, 436 bp, Arabidopsis thaliana
  Clone ID: LIB24-026-Q1-E1-C6
gaaaaagtagcttctccaagacgcggttcccaatatctgcgtttcccgtttgcgttttccggcaatggctctccaagccactactactacgttctgcttctccggtccaactttccgatcaactcctcactcactcacttcaaaacgtcctatctccatcaaagctactacttcttctccttcaagactctccaattcacgatctaatctcaaaggaagagcattgtctagtgatggttcaacacaagaatctccttatgtagtctgttttggagaaatgctaatcgattttgtaccgacgacaagcggactttcattagccgatgcaccggcttttaaaaaagctccaggtgggtgcacctgctaatgtagctgttgggtattgctcgtcttgggtggttcttcagctttcattggaaaggtggtgaagatgagt

SEQ ID NO: 10818 - DNA, 424 bp, Arabidopsis thaliana
  unsure at all n locations
  Clone ID: LIB24-025-Q1-E1-H1
gcagccgtttaacttgatcatcccaaagatgtttgagattattcaggcggtcttctccgccggggttgcactagctcttttgacattcgccggtataaccctcggcggctcagtggtcgcatgtatcataagcacaccactttttgtcattttcagtcccgttctcgtgccagcgactatagccactacattgctagcttcaggtttcacagcctccggttcctttggtgccacggctttcaccatcctttcgtggctctacaagaaacgtacagggagggactaccagggaattcaggantgacgccaccggctcccggcgtctannccagcaagttccgggcgtntaaaccaacagnaatcgggggaaatacgaatanggcggttccnaantttgggatgaatgtataaangaactttgata

SEQ ID NO: 10819 - DNA, 431 bp, Arabidopsis thaliana
  unsure at all n locations
  Clone ID: LIB24-025-Q1-E1-H10
gaaacacttgaattaaaactgtttttttactacttgtagtaaaaccatgaagcgatcatccttggtcgattcttgttcatattcgagaatatttcgcagtattttctgtctcttatccttttgtatcttcttcttgacaacgaccaatgctcaggtaatgcatagacggctctggccttgggcattgtggccacgggcgtatccacagccgtgggcaatgaatccacaacactgaccatcacaaagcctgtcgcacaactggccaacatcaaaaactgtngcacaacaaggccaactcaagccgttancaacaagcaaaggcttnaancnaggncccaacaaggcccttcccaattcangggcaataaccnccanctaaggntcnaacaaangncagtggnnacnacnnnatggcccccnaaaactcctaa

SEQ ID NO: 10820 - DNA, 412 bp, Arabidopsis thaliana
  unsure at all n locations
  Clone ID: LIB24-025-Q1-E1-H11
gaaaaaagaaaaaagtatgtctcttcttccccatctcatcctctacctaacacttttgacggtggttgttactggagaaactctccgaccaagattctacagcgagacatgccctgaagctgaatccatagtangaagagaaatgaagaaagcaatgatcaaagaagcaagaagcgtcgcttccgtcatgcgtttccaatttcacgactgtttcgtcaatggatgtgacgcatctctgttgcttgacgacacaccaaanatgcgtggtgaanaactagcnctttccancatcgattcactaagatctttcgaagtcttgangacnttcaacgaagctctacananagcttgtccagctactgtttcctgtgccnanatcgttancatggccgctcgtgaagccnttgcccct

SEQ ID NO: 10821 - DNA, 434 bp, Arabidopsis thaliana
  unsure at all n locations
  Clone ID: LIB24-025-Q1-E1-H12
gctataacgcgtgatgagatacctaaaagaagcaaaagaagttcggtagttgaaacataaattttagtgctcaaacaaagtaaactcaaaggaaacagctcctgatcagatttagggctctatgagtaggttttaagtctacaaagataacnnnnnnnnnnnnnnnnnnnnnnnnnnnnnnnnnnnnnnnnnnnnnnnnnnnnnnnnnnnnnnnnnnnnnncntcccnttacaagtaaatccttcantttttactcctgtataatcatattttccttggtgttagttccctaagtttcaacaagccattaataatttctgtaaanggatttgggtagatagcatccaagtgatgcanccncaaatttaaacttcacnaggccttccaccttaaaagccngacttcaaacnaccaaccctttgggaaggtnaacc

SEQ ID NO: 10822 - DNA, 424 bp, Arabidopsis thaliana
  unsure at all n locations
  Clone ID: LIB24-025-Q1-E1-H9
gagtaggaatgggaccttgtggagaattgagatacccatcataccctgagagcaacgggacctggagattccccggaattggagagttccagtgctacgacaagtatatgaaatcgtcacttcaagcatatgctgagtcaatcgggaaaactaactggggaacaagtggacctcatgatgccggcgagtacaagaacctcccagaagatactgaatttttcaggagagacggaacatggaatagcgagtatggaaagtttttcatggaatggtactccgggaagctgctagaacatggagaccaactcctatcttcagcgaaaggtatctttcaaggaagcggaacanagctatcangaaagtanctggaattcactggcactacaacaccangtccaacgcagctgaactaaccgctggatac

SEQ ID NO: 10823 - DNA, 390 bp, Arabidopsis thaliana
  unsure at all n locations
  Clone ID: LIB24-026-Q1-E1-A12
gggcaccagaaacagcttgctangattcactacgacgtcgtttcnggttcgtctccagctgtggataatggctattctctgaaattgattctattcactattttgttactggggattttctcagcanaccaaaacaggatttattttttctggggatttctgagattggaagaaaatgttcagcttttcaaagaggcgcatgagacttggcagagttaagaaggtacagctctcggattctgttcaaggatataagagtcctttacgaagtgaccaaacgcnctgatagctctagtaatgaagctgctgttgctgcaactanttattctgatgaacttgatttccagccttcatnagggaattccgaaaattggatggngttatcggtta

SEQ ID NO: 10824 - DNA, 453 bp, Arabidopsis thaliana
  unsure at all n locations
  Clone ID: LIB24-026-Q1-E1-A3
nccaaccaagccttcggaaggncccttgggtgactacaagggttttggtgttgaagattcagatgctgagtctcctagagatatccattgttcagtcgagagtacagacttttccgctagagtgaaaaaacatattgaagaacctattaaagatatagaagtttctagcgtttcacctactgaaaactgttatcaatcagggagagaggctataccctcagttactcccagtactcctctcacggcccttagatacacaacatcagctgagaaacctgcaagtaaaactactggctcatcaacagtaaattcgaagcgttcttcgtcctggggaagaggcaacggcaagaaaacacctgctaaaggatcatttgattcctcaggaaatgacgagcttcttatacagaggctcgagcacatgaaagatgaactgcgacaacgaatcgctaaagg

SEQ ID NO: 10825 - DNA, 498 bp, Arabidopsis thaliana
  unsure at all n locations
  Clone ID: LIB24-026-Q1-E1-A4
ctgtttacgcctgcccgtaccggtccnaaaattcccggggtccgaacccaacgcctnccgngtcccgcttcttccttcaactgaagtccgactaagttgactcgttctctcgtgttttcgatagacacaaactatgacggagatcgatcgttcacgcgcgttcgccaaagacgttaagcgtatcgtcgtcaaggttgggactgcagttgttactgggaaaggtggaagattggctcttggacgtttaggagctatctgtgaacagcttgcggagttaaactcagatggatttgaggtcattttggtgtcatctggtgccgttggtcttggtcgacaaaggcttcgatacagacaattagtcaacagcagttttgcagatttacagaagccacaaatggaacttgatgggaangcttgtgctggtgttgggcaaagcaagtctcatgggcttactatgagactatgtttgaccaattggatgtgacggntgcccaaatg

SEQ ID NO: 10826 - DNA, 413 bp, Arabidopsis thaliana
  unsure at all n locations
  Clone ID: LIB24-026-Q1-E1-A7
gcccacgcgtccggtcaagatggctgtcccgtgtttctacttttctctgtaaacactagtggacaatttgttggtttagccgagatggtaggccctgttgatttcaataagactgttgaatactggcaacaggacaaatggattggttgcttccctgttaagtggcatttcgttaaagatatccctaatagctcctggttctttcacgaacaggaatgttgggaagactcttgtttccaggactcanggtaccaanattgcctctganggactgaaacacanggtgtttnanggttcncctgctgatctacaaaatgatgaggataatgcctacangaagatccgtcttagagctgaaaatgttcaagggaangaatgtgttgacccaattctggggtaaggattcacaancg

SEQ ID NO: 10827 - DNA, 481 bp, Arabidopsis thaliana
  unsure at all n locations
  Clone ID: LIB24-026-Q1-E1-B11
gttatttctgccgnccagcggtccannanacncgggtcgncccacgcgtccgttcancatcatcatctactctttctgcgtttttcccagctgaataatctaaacaaggaaaagtaaaacagagtaccaatctcagattcatcagctccacttgaatttaaagtagccataactgttcgatcataggatggaagaagcaactcaagtaacgagttctgaggtccctgtagtgaaaggtgatgttgatgaccttaagacagctgatatttccgtcaaggctgtgaatgggagaagtgccaaaggaggagaaagaagaggaagatggggaattcataaaagttgagaaggaagcttttgatgccaaggatgatgcggagaaaagcagatcatgttcctgttgaagagcaaaaaggaagttattgaaaagaagctcgagtgggttcacangagaggaactacattgaatcccaaaganaagggg

SEQ ID NO: 10828 - DNA, 414 bp, Arabidopsis thaliana
  unsure at all n locations
  Clone ID: LIB24-026-Q1-E1-B12
gaaaattttctttctacaaatactttgacttaagagttgcaganatatcaagttaanaaataaaacagaaggagaaatggcaataagttttagaactctagctcttttgaccctctcggtgttactaatttccatatctctcggngtcgtcacagcaacagagtcgcagaggaatgaaggggangtgcttacaatgtacnancaatggcttgtagagaatgggaagaactataacggtcttggagagaaggagagacggttcaagatcttcaaagacaacttgaagcgcatcgaagaacacaattcagatccaaaccggagttatgaacgcgggttgaacaagttttcggatctaacggctgatgaatttcaagccaattacttaagtgggaagattggaaaanaaaagcctat

SEQ ID NO: 10829 - DNA, 483 bp, Arabidopsis thaliana
  unsure at all n locations
  Clone ID: LIB24-026-Q1-E1-B4
ngtttcccgcccgtaccggtccaaaatcccggggtcgaccacgcgtccgcangacgcgtgggttccgatcntgccctcccccgagagagagagtcnnnnnnnnnnnnnnnnnnnnnntctcttacgaagctacgtgtgacctaacattctccagattgttgtttatagcctcttcttagatttacgatttgtgagcttgtgaagatttcttggtagaattagagttctctgtttcgagatcgagatgaataataataataataatagaggaagatttccaccggggattggtgcggcgggtcctggtccggatcctaattttcagtcacggaatccgaatccacctcagcctcaacagtaccttcagtcacggactccgtttccacagcaacctcagcctcagcctcctcagtatctcnagtcgcaatctgatgctcagcagtaggttcagcganggtatccccagcaggatcaacagcancc

SEQ ID NO: 10830 - DNA, 416 bp, Arabidopsis thaliana
  unsure at all n locations
  Clone ID: LIB24-026-Q1-E1-B7
gctttatcaggggggtgtatggaagataaaagtggaacttcccgaagcttatccatacaaatctccatctgttggatttgtcaacaagatttatcaccctaatgtcgatgaatcttctggtgctgtttgcttagatgttataaaccagacttggagcccaatgtttgatcttataaatgtgttcgaatccttccttccgcaactgcttctatatccaaacccatcagatccatttaatggagaagccgcttctctgttgatgcgagaccgtgcagcctatgagctcaaagtgaaagaatattgtgagaaatatgcaaaaccagaggagattttaagnnnnnnnnnnnnnnnnnnnnnnnnnnnnnnnnnnnnnnnnnnnnnnnnnnnnnnnnnnnnnnnnnnaatcgttggggaaa

SEQ ID NO: 10831 - DNA, 478 bp, Arabidopsis thaliana
  unsure at all n locations
  Clone ID: LIB24-026-Q1-E1-C1
ntgttacgcctgcacgtaccggtccanaattcccggggtcgacccacgcgtccgnccacgcgtccgcccacgcgtccgcacacacccactcatggcgtctcgaagagttttatcatctcttctccgttcatcttccggtagatctgccgccaaattagtcaaccgaaaccccaggcttccttctccttcacccgcgcgtcacgccgctccatgtagctacctcctcggccgcgtcgccgagtatgcgacctcttcaccggcaagctctgctgcgccatcctctgctcctgctaaggatgaggggaaaaagacctatgattacggtggcaaangtgcgatcgggcgtgtttgtcanggtcatcggtgccattgtcgatgtgagattcgaggatcaggaaggattgcctccgattatgacatctcttgaggttcaggntatccnacaaggntgggtncttaagggttccaaaaantttgg

SEQ ID NO: 10832 - DNA, 428 bp, Arabidopsis thaliana
  Clone ID: LIB24-025-Q1-E1-G8
ttttgtttctatcgtaagctcggaatcgcagtgccggaacttcgagtcgatcatcagtttcggcgattcgattgccgacactggaaacttgctaggtctctcagatcataacaatcttcctatgagcgcgtttccaccgtacggagaaactttcttccaccacccaaccggtcgtttctctgacggtcgcctcatcattgacttcatcggtacttctctttatttatgtgtaaattgactgttttggcgcagttttgttaggttaaatttacataaaagcattctaattttgtgtgttctgttcactgaattcttaggtttcttatgtcaaatctttctctgtttttctattttcttgaacagcaagttaacattgtgaaacctcaagtggatgctccaaatttggttttccttgcaactgaaatttt

SEQ ID NO: 10833 - DNA, 444 bp, Arabidopsis thaliana
  unsure at all n locations
  Clone ID: LIB24-024-Q1-E1-D10
gaaaaagtagcttctccaagacgcggttcccaatatctgcgtttcccgtttgcgttttccggcaatggctctccaagccactactactacgttctgcttctccggtccaactttccgatcaactcctcactcactcacttcaaaacgtcctatctccatcaaagctactacttcttctccttcaagactctccaattcacgatctaatctcaaaggaagagcattgtctagtgatggttcaacacaagaatctccttatgtagtctgttttggagaaatgctaatcgattttgtaccgacgacaagcggactttcattagcccgatgcaccggcttttaaaaaagctccaggtggtgcacctgctaatgtagctgttggtattgctcgtcttggggggttcntcancnttcaatgggnaaggttggtgaagatgaatttgggnt

SEQ ID NO: 10834 - DNA, 439 bp, Arabidopsis thaliana
  unsure at all n locations
  Clone ID: LIB24-024-Q1-E1-D3
gctctgccgaaatccataaatctcttcctctctctctttcttatttaatcgtcacttgaccgccggtaagaaactcgagagtttgaatcgttttttaaccctcgccggtgattattgactggaaaacaccaaacgaatcgaagcagttagtttacaggtagagcagtgacagctgagcaaaaaaaaaggcggcggaaaaaaaagtagtagtagttgatgatgatgaagatggtgaaacagattcgtatagggttttctaatcggcggtgttcgctgttcgtgaactctttattggagtaagtaaaaagcgccagagagagagatattgtgtatttgtcnttttggttctgttttgggatggggaaagtggcgggttgccttttgcggccgttgctgttgttgccggcttgttctgttgccgcggtgatggntgggaaga

SEQ ID NO: 10835 - DNA, 434 bp, Arabidopsis thaliana
  unsure at all n locations
  Clone ID: LIB24-024-Q1-E1-D4
gaggaataacatattggcagctaaaaagaaatgggaagaagctggttttacaatgtcaagaatgactgatattcacggtaatgaagaaacaaacgaggaagaagaagatatctgggaggaggatgatggcaaggttaaaactgattcagtcaagaacgtggctcatgtgatgagaactcagcagagtgagaattcatctttaccatcatcaggtgaagcaaagaagtctacatcagaagctaggtccaataaagtgtcgaacactaaaaaagttggaagcagtggaaactctcttagagacaagctaatttctgaagcgcctgtgatgaattggggatcacagttgactaattgggaatcaactacggaagttcgagctaattaccggggtttagagatngagaaccactggggcaaggtngattaaagatgcc

SEQ ID NO: 10836 - DNA, 432 bp, Arabidopsis thaliana
  unsure at all n locations
  Clone ID: LIB24-024-Q1-E1-D8
gggcatccattgattctctccaattccattctctctgcaatctccagtcgtcgattggaagagccaagctccagaatccttcaagtttggttattttcagacggagacccgtaaatctgaattgggttcaattcgaaactaaaggaagtttcgtgtgtaaagcgattggtgattcctcgactccagatgaagatattcagaacactcaaagtgatgataatgttgttgttgttactgctacgactcagagtgacattccccatgattccgagtattcaatttcgaggtttcgaagtatggttaccacactccctcctgttgtcttcctgatgaagaagtgctcagtgaacagcatttggattggggtctgcatcacggctactgttttggtcgctgcnatagggctatgtantcagaaagtcaagagataat

SEQ ID NO: 10837 - DNA, 434 bp, Arabidopsis thaliana
  unsure at all n locations
  Clone ID: LIB24-024-Q1-E1-E1
gaagggcttatcgctttgacgaagagctagggttctaatcaagtcagacgaagagatattgactgccgccgatgaagttcccaccattgatctcctccgtaagatcggtttctccgaaacgattcttgatcggttcttccgaccattcttcggcggaattttcttcgacagagacctcgagacgacctcgaagctcttcgatttcgttttccggtgtcttgctctcggagaaaacacacttccagccatgggaatcggagaaatctcgaaccagttggcagcgaagttacccgctaagtccgtcttgttgaacacaagggtcgcttctattgagtatccaaatggatcgggttcggatcacctagcgtgaggctccaagacggcagcgttatgaaggcagagctangtgtcataatcgccgtccaacaaccgga

SEQ ID NO: 10838 - DNA, 441 bp, Arabidopsis thaliana
  unsure at all n locations
  Clone ID: LIB24-024-Q1-E1-E10
gctaccgaaggatcttttagacctaatttcaaaatctctagaatcttccttcgatctcatccaattccgttccgtttgttcntcatggcgatccgccgccnagccgaaaagtcctcttccaacacatcatctcccgatcctcccngannacggggggagtctcttcnctgattccgccgttggtttccgtctctcgcagcggagtatcttacttatcaagcctcatgaaccgtgtatcgaatcngattcgtttggatggttgatcaaagtcnaggaagatcttaatgttcctcgtaaggtgacncntttagatncgttatgtgatacaagaaactcaattccngagaanttccctcgtgttcncnacaggtcaaagtttaacggttccagaattgggtcntgaattcaagcttcannaatncacaactggtggggaggant

SEQ ID NO: 10839 - DNA, 437 bp, Arabidopsis thaliana
  unsure at all n locations
  Clone ID: LIB24-024-Q1-E1-E4
gcacacttgtataccaaccgtttgcgcttggaacaatcttgattctcgcataccacgaatcgaaaatcaatactcgaaaacgtaacctcattggttacattctattcacaanatccacattcttgctcatagttttggatttggcaacaaaaggacgtggtggaatcggtccttatatcggtttatgcgctgttgttgcttcttttggcctcgcggatgctacagttcaaggaggaatgatcggtgatttatcattgatgtgccctganctagttcagtcattcatggggaggtttggctgtatctggtgcgctaacatcagcacttcggctaatanctaaagcagcctttgagaaaacaaacgacggtccacgaagaaggagcaatgatgttcttagctatctccacatgcatagagttactctgtgtgtttccan

SEQ ID NO: 10840 - DNA, 433 bp, Arabidopsis thaliana
  unsure at all n locations
  Clone ID: LIB24-024-Q1-E1-E6
ggttctcttttattgttttgatactgtgctctgcttcggagagtgtagaaagagacagagctaaagtctctgtgtttcttctcagcaggactaaaaggaaaaaaggaaatcgattgctaatgtcgggtgagaaacaagcggaggagtcaatagtagtctccggggaggatgaggtggccggtagaaaagtggaagattcagcggcggaggaggatattgacggcaacgggggcaatggatttagtatgaagagcttcctctggcatggcgggtccgcttgggacgcctggtttagctgtgcatcaaatcaagtggcacaagtgctgttgacgctgccgtattcgttctcgcagttgggaatgttatcaagaatattgcttcaaataatccaatgggttaatggggatcttggactgcntaacgcaacaatgtc

SEQ ID NO: 10841 - DNA, 435 bp, Arabidopsis thaliana
  unsure at all n locations
  Clone ID: LIB24-024-Q1-E1-F1
gagaagaaggaggaggtatagcaatgggggtcgattattacaaggttcttcaggtggatcggaatgcgaaagacgacgacttgaagaaagcttatcgcaaactcgccatgaagtggcatccagacaagaaccctaacaacaaaaaagacgccgaagccaaattcaagcagatctccgaagcttacgatgttttgagtgatcctcaaaagagagccatctatgatcaatatggagaagaaggtctaacaagccangctccgcctcncggagcaggcggcgggttttcggatggaggggcttcgttccggttcaacggtagaagcgcagatgatatcttctcggagttctttggcttcacaagaccatttggtgactcacgtggtgcangtcctctaatgggttccggttcgcggaagacgttttctcgtcaaatgt

SEQ ID NO: 10842 - DNA, 444 bp, Arabidopsis thaliana
  unsure at all n locations
  Clone ID: LIB24-024-Q1-E1-F10
gcggacncgtgggccttaatttgcgttcgttgtgaaaccatagatccaggtgaattctggaaaacatcttgaagcgaaatcgagacatcgttggaggatcaaaacgttaattcgattgatcgatgaatcctanaagggagcctcgtggtggtagaagttctctctttgatggcatcgaagagtgaggaattagagctgcttcttcttactctcatgagatcaatgaacatgagaatgagcgtgccttggagggattgcaagatagagtcattctcttaaaacgactatctggcgatataaatgaagaggtcgatactcataaccgcatgcttgacagaatgggcaatgatatgaattcatcaagggggatttctctcaggaaccatggaccgctttaaaaacggtgtttgagacananntcaagccgaagaaaggctgacgncc

SEQ ID NO: 10843 - DNA, 502 bp, Arabidopsis thaliana
  unsure at all n locations
  Clone ID: LIB24-024-Q1-E1-F11
aactgtttatttctgcccgnccccgggtccgaaanancccgnggtcnacccacgcgtccgaaaanagagaggctctgataaaaaaaaaaacaaaaaaaaatgacaaaggcttattcaacacgtgtcctcacgtttctgatattgatctcgctaatggcggtgacactgaacctttttcccacggtagaggcaaagaagcggagtagagatgctcctatagtgaaaggtctctcatggaacttttaccagaaagcatgtccgaaagtcgaaaacatcatcagaaaagagctcaagaaagtcttcaagcgagatattggtttagccgctgccatccttcgtatacatttccatgattgcttcgttcanggatgtgaagcatcagtgctgctagctggatnagccagtggaccaaggagaacaatcatcaatcccaaatctgacactacgacaacaagcctttgtcgtcattaanaacttcgtgccctcgtccaaaagaantgcg

SEQ ID NO: 10844 - DNA, 501 bp, Arabidopsis thaliana
  unsure at all n locations
  Clone ID: LIB24-024-Q1-E1-F12
ntgttatttgccggcccggtccgaaataaccgggtcgacccacgcgtccgcngacncgtgggcggacgcgtgggcggacgcgtgggcggacgcgtggggaagatcgtgacattggtactcgtcgtcttcgtcatactttcgacatcattcccggctgccatcaaagccgaagacacgggagatacaggaaatgtgggagtgacatgtgacgcaaggcagcttcagccttgccttgccgcgattacgggaggaggacaaccctcaggtgcatgttgtgcaaagcttacagagcaacagtcatgcctctgtggtttcgctaagaaccctgcgttcgcacagtacattagctctccaaacgctcgcaaagtgctccttgcttgcaaatgttgcctaacccaacttgttgaaaactttatctagaaganttttanaaatannttaaacgnaanggaattaaatttcattaatnncaaaccgttanggtccanttcaacccggttt

SEQ ID NO: 10845 - DNA, 413 bp, Arabidopsis thaliana
  unsure at all n locations
  Clone ID: LIB24-024-Q1-E1-F2
ggaanaaganagatgccaggagcaattgtggnggaagagaaatcncagattgaatccatcaaagagcaattgaaactcgagaaggaagatgatgttgttgtggnggatgtgaaagacggngaggaagaagacgatgatgaagacgatgaggacgtcgaagttgaaggggaatgtggaaatgagaatgcanagcaaagtanaagcgagaagaaaagtcgcaaagctgttctaaagcttggcatgaaacctgtctcaagatgtcagcanagtgacaatcaaaaganccaagaatgtgttatttgtcatctcgaagccaagatgtttacangagtcccaatgcagagacttacgtcatttttggagaagccaatgtcgacgaatttgagctctcagctacagactcaagctgcnca

SEQ ID NO: 10846 - DNA, 436 bp, Arabidopsis thaliana
  unsure at all n locations
  Clone ID: LIB24-024-Q1-E1-F4
gggcaaatctcagagatgaggatggtgcaaaacgagtattctttggcggagaacgctttttagaaggaatttctggccaagcatatatcacggttcagagaacagcactaaacagtccacttgggcttgaagtccagttgcacattccagaagctgtttgtccagccttaagtgaaccagggttgcgtgctcttctccgctttctaactggaatgtacttatgcctaaaccgaggagatgtggatccaaaatctcagcagtctgctgaagcagctggacgttctcttgtctccgttcttgtggatcatgtatttctttgcattaaagatgctgaattccaactggaactgctgatgcaatcactccttttttctcgggcctgtgtttcagacggagaatcagctaactatttaactaagattttgattggngggct

SEQ ID NO: 10847 - DNA, 423 bp, Arabidopsis thaliana
  unsure at all n locations
  Clone ID: LIB24-024-Q1-E1-D1
gacagacgatgagggagatatgatgcttgtcggtgatgacccatggcctgagttctgcaacatggtgaagagaatattcatatggtcgaaagaggaagtgaagaaaatgacgcctgggaaccaactccggatgctgttaagggaagttgaaacaacactaacaacaacttccaaaacagataatcattccaactaatttttattctattctctatcagtcttcgtctccttcttatttgctttgtctttcggaattatcttgtttgtgtctgtgttttgttgcgcatggcttaaacaagaaactacatcccctgaggcaaaaaaaatggctccgttttttttggngccccttatggagaaagggggtttatggggagaagggttttctacttttanaataggcttttggnagttttccttttc

SEQ ID NO: 10848 - DNA, 425 bp, Arabidopsis thaliana
  unsure at all n locations
  Clone ID: LIB24-024-Q1-E1-A6
gatttccattacccaatcccgctccttttctctgattttgaatcgaacccttaatacccagaaatctcacggttccgaggagtgggtttttgggggttagggttttcgagagatgttgaatgtcaggttcattgatgaatctgttttctctctgcttcaagccattcgggcacgtctgtgataattccgaagctggatcgggtggtggtggtggcgtttctggtggaaccggcggtgaaggcaaagacggattgctttggttccgtgatctcggtaaatattgcggcggagatttctccatggctgtgattcaagccaatcaggttcttgaagatcagagccaggtcgaatccggtaattttgggacttttgttggtgtttacgaaggtcatggtggtcctgaagctgcnccttaagtccggtga

SEQ ID NO: 10849 - DNA, 427 bp, Arabidopsis thaliana
  Clone ID: LIB24-024-Q1-E1-A7
ctgtctgcttaggtccctgcagagatttcgaaatcgctacttccaatttctccagaaactttctttctcggcaaaattcccggaaaaagccactcgatcagcagatggtcaggaaggaagatgtggatttctattgcggattttcaaggaaagagcttcagagtttatgcaagaagtataatttgcctgccaatagatcaagttccgatatggctgaatcattggcttcttacttcgagaaaaataatttgaacccggtaagttttggggtccctgggaatcaagatagttcagcgacaacttctagagcaccagcgattagaacatggaatgtgaaaagagattcttatggtaacaaattgggatgtacctagagaggattatgttcaaggtgcagtggctagagaaccaagcattatccttggga

SEQ ID NO: 10850 - DNA, 442 bp, Arabidopsis thaliana
  unsure at all n locations
  Clone ID: LIB24-024-Q1-E1-A9
gcnaatgtgtttataaatctttttattttctatctgtcttgatttagttttatcttttttggaatcggtctgaagttggacaaaagaatccgccattttctcctcggtctctctgctcttctcttcagtatcggatctgggtctccttcgctttcgtttcaagattattttgggagacgaggaggcgttagctgtaattcattgtatacttgctttggctattaaagccgtcacacaaaaaaagtaaaagcaacacacacacataaatagacacacttttttacgtatatgtgtgtcttctttcgtctctgttgggaatagatcttgtcctaagagatnacttcnaagtctgatctaaaagtgaagaaactttggntccctggtttgggttttttggaacctggcnaaacctgggggaaaataatgggaaatgagtccncca

SEQ ID NO: 10851 - DNA, 486 bp, Arabidopsis thaliana
  unsure at all n locations
  Clone ID: LIB24-024-Q1-E1-B10
tancgccgcacggtccaaattccgggtcnaccacgcgtccggccggatctgccggagagaaaaatgacgacgagtattcacatcacagctctcgacggaatcgtcaacgtgaactcactcttcacactcgccgtattcatcggattagcttggaaccctaccgatccagacaacagcctcgtaaccgaccctaattgcgtccccacagctcgtatggctgagaatctcgtcgccttccatgtgtactctttcgcatcattcctattctcaagtctcatcgctctaggtctcaaacaagcaatgaggctcaacatagcttcttcgtttcacatctctactcgaatcgattcctgtgtttactatgtgaacaaagacgggctccttagatttggggatggttacatcccggtttggggatcggtttgtggatgttgggtttctcaagtttggctttgantaatggttgttcaaanttaagcttgggga

SEQ ID NO: 10852 - DNA, 476 bp, Arabidopsis thaliana
  unsure at all n locations
  Clone ID: LIB24-024-Q1-E1-B11
gccaggtcgaaaanccggggtccacccacncgtccgtnctcntcnttcttcttcctgattggaattttagggcttttgaaagcacgaacgcgtgaagctctaatcgagaaaaaaatggaggttttggataggagagacgatgagatcagggactcgggaaacatggacagcatcaagtcacactatgttaccgactctgtttccgaggaacgccgctctcgtgagctcaaggatggagaccatcctttacggtacaagttttcgatatggtacactcgtcgcacaccaggggttcggaaccagtcttatgaagataacatcaagaagatggtagaattcagcacggttgaaggattttgggcctgctactgtcaccttgctcgttcttctctcttgcctaatccaacagatnttcaattccttaaggatgggaatcgtccaatgtgggaagattgtgccaactgcaatggaagaaa

SEQ ID NO: 10853 - DNA, 431 bp, Arabidopsis thaliana
  unsure at all n locations
  Clone ID: LIB24-024-Q1-E1-B12
gnntcaganatctttcagtgctgacggtaatgtttccccgaagaaaccaaccactttaaccgaggttgcaaagcaaaganagctgagcgggaacttgctaaccgaggcggatttaaanagcaacaagcagatatcaagtgctaagattgaagagatcagcggtcatgacatctttgcacctccatctgagattcagcctcnatctttggttgcngcacagcaagaagctagaggtaacaganacatgggagagcctgcaccaaggaacttacgcacttctgttaaagtttccaaccctgcatggaggacaaagcaacatactattcaatgaagaacctgttgtgaagacatcaaagaagatncntaaccagaagtttcaagaactcacaggcaanngnattttcaaangngataatccctggtattgcggg

SEQ ID NO: 10854 - DNA, 431 bp, Arabidopsis thaliana
  Clone ID: LIB24-024-Q1-E1-B4
ggtccacagcattgtgagtaagatgatgattaatgaggaactgcatgcaagctgggatcagccaacacgatgcatcgtcttccatgaagtgcaacacagcagattacaatcattggctttccagttaacggagaaactctcgattttggcagaaagcaatgagagggcaatggaatctagaaccggtggaggtggtctggatctgagttcaaggagaagggacaacaatcaggactatgcaggagcagcatcaggtggtggtggatattggcaagacaaggcgaattacggacaaggaagacaaggcaacagatcaggttatggtggaggaagatcatctggacaaaatggtcagtggtcagggcagaaccgaggaggaaggtatgcaggaagaattggttcaagaaacagaggtatgcaaatggatggct

SEQ ID NO: 10855 - DNA, 434 bp, Arabidopsis thaliana
  unsure at all n locations
  Clone ID: LIB24-024-Q1-E1-B5
gcggacgcgtgggcggacgcgtggggcaagagctcgttcagactatgattatctcatcaagcttctcctcatcggtgatagcggtgtgggaaaaagttgcttgttactgcgtttttcggatgatactttcaccacgagtttcattactaccattggaatcgacttcaagataagaacagtcgaacttgatgggaagcgtatcaaattgcagatatgggacactgctggacaagaacgttttagaactataaccacagcatattacagaggagcgatgggtatattactcgtctatgatgtaacagatgagtcatcattcaacaacattaggaactggatgaaaaacattgagcagcatgcgtccgatagtgtcaacaagatattggtcggtaacaaagccgacatgggacgaaaagcaaaanggctgtcccaac

SEQ ID NO: 10856 - DNA, 445 bp, Arabidopsis thaliana
  unsure at all n locations
  Clone ID: LIB24-024-Q1-E1-B9
gagaaaactccatggatgatacacaagttaaagctctagaagagaagctgaagagtcagctaagtcagcttgaactcgagcaagcggtgttcgagagaatggtttacaagaataagaaccagcatcggagatgctcttattttcaataccttctcaaggtgagaagagaattgagacttttacgaacagcaaacatggagggtatgttgagaccttgctttcatgttatatctgggagaataagtaaacagaaaatccatgttttggagagcttgaagttgaaaaaatctgatactgggaaaccaaatatcttggaacggcttcctggagctcctcgtttactctcacagatgactgaacccatccttaaaggcaacctagtgggaatatctactctactaaccccgntcaatcctcataaggatttccggtgacanttttggcg

SEQ ID NO: 10857 - DNA, 435 bp, Arabidopsis thaliana
  unsure at all n locations
  Clone ID: LIB24-024-Q1-E1-C1
gcccacgcgtccgttctcatctccagagattatggacactaaactagagagctacaagggaattggcgactcaaactgtgctctctctcttctgtnnnnnnnnnnnnnnnnnnnnnnnnnnnnnnnnnnnnnnnnnnnnnnnnnnnnnnnnnnnnnnnnnncatggcgagcttcttcaggttttggcccgatgacggttacaatggctcaaccaccacctgcacctagccagcatcagtatctgaacccgccttgggtattcaaggacaatgataatgatatgtctcctgttttgaatttaggtcgatacaccgagccagataattgtcagataagtatggcacggcaatgggtgagttcgagttatctgatnaccatcatcaaagttaggagacagtacatgggaagatgagaacacaagggcttatgactcct

SEQ ID NO: 10858 - DNA, 437 bp, Arabidopsis thaliana
  unsure at all n locations
  Clone ID: LIB24-024-Q1-E1-C10
gcggatcactagttctgtattttgaagggttttcttgggaaagaagaaaacaaagctaagaatgaggaattcaacaaccatcatgatgataatgatgattgtgatgatggtggatgattgggttggagcagcggacaataatccggtgnnnnnnnnnnnnnnnnnnnnnnnnnnnnnnnnnnnnnnnnnnnnnnnnnnnnnnnnnnnnnnnnnnnnnnnnnnnnnnnnnnnnnnnnnnnnngtccagctttctccctgtgatactcgtctcggtttagctgcgaaaatggcgcagcttgcgctttttagacctaaggttgacgagatctctcttctctcatcgacacaagtaagtttaacccgagtgaagcangtggattcatggtgggattcgcgggctcaaaatatgcagcaagatnatatcctgtgaaggttca

SEQ ID NO: 10859 - DNA, 413 bp, Arabidopsis thaliana
  unsure at all n locations
  Clone ID: LIB24-024-Q1-E1-C3
gcttctggctctctctcttcctaagtttcctctctctttagaactgtagagagagaaaagcctccatttttctcaaggcaatctctctctctctgcctcatctcataaacccattacaccaaaacctcatcgtagagagagaaacacaccaaccattgttacactctaagagaagagaagagagaaggaaaaatggacggtgtatcaccaaagtttgtgttgccggagacattcgacggcgtgaggatggagatcacaggccaactaggcatgatctgggagcttgtaaaagcaccagtggattgtccctcttcttcaattagctgtttacatctgtttgcttatgtctgtcatgcntttatgtgagagggtttacatgggaatccgtcatcgtcctcgtcaaactcntctgg

SEQ ID NO: 10860 - DNA, 439 bp, Arabidopsis thaliana
  unsure at all n locations
  Clone ID: LIB24-024-Q1-E1-C6
gagtttttatcnnnnnnnnnnnnnnnnnnnnnnnnnnnnnnnnnnnnnntttgtgttaagaacttaattgaaacattacaatggcaaagaattcttatgcactgtctgggttaattgtggccctagtcatcgcattggtatgcaacattgatgacgctgcagcgagagacgtgaagctagtgaagctccgcgatgtaaaacccgaaactttgaacaagttgaaaggagaaaaagaaagtgaactcatgcaagcagaggagaaaaacaatcttctaaaggaaattgagaaggcaaagaaattgctcggagaattgaaaacgttaaagaagcaatcaactggtgatatgaaaagcgaattgaaatctttgggtgaaatctgaatcgttacttaatgaaatttcagattctctgaagaatggaacgtncaaccatattaaag

SEQ ID NO: 10861 - DNA, 490 bp, Arabidopsis thaliana
  unsure at all n locations
  Clone ID: LIB24-024-Q1-E1-C9
aactgttactctgccggcccggtccaaatacccgggtccacccacgcgtccgaaaaccgcttccgtcgtcaatggcgtgagcctaaacaagaaagaaaatttatcagcatgttattgctaaagagaggaaaggagattatttgggaaagactgttcaggttgttcctcatgtcactgatgcaattcaagattggatcgagagagttgcggttattccnnnnnnnnnnnnnnnnnnnnnnnnnnnnnnnnnnnnnnnnnnnnnnnnnnnnnnnnnnnnnnnnnnnnnatccgcgccttttatcgaggcgcttggtcaattctcttaccgtgtaggcccagggaatttctgtctggtccatgtcagcctcgtgcctgtgcttaatgttgttggtgaacagaaaactaagccgacacagcataatgtcaaggggctacgangattgggcttgacccngatatcctancntgtaggagcacaaagccacntgaa

SEQ ID NO: 10862 - DNA, 444 bp, Arabidopsis thaliana
  unsure at all n locations
  Clone ID: LIB24-024-Q1-E1-A11
gatttatcttcactacaaaaaaaacaagtaaaataaagccaatcttcttaaatatctccagaagatctatcagcatttacgtattcaggtcctccaatttcttctcacaaagaaaaaggaagaaaaaaaagaagttgtgagagcaaagaaaaaatggcagtggataaagtgattgtgaagcagaggaacattatattggttggattccaattgatgaaagtggcgtagaggttttaaaatgggcacttgaagaagttgcaaaacatggagattgtgttgttgttgtccatgtttgttttacttattaccgtgccttgaaaagcaagtcatcgctggatcggtacttaaaaccatacattgaattctgctcaacaaagaagattgagctcaaaggngaaantgttaaagggaaatccatttcaaggggttttagttaaagaanca

SEQ ID NO: 10863 - DNA, 429 bp, Arabidopsis thaliana
  unsure at all n locations
  Clone ID: LIB24-023-Q1-E1-F5
gcctcgaacaaacaaattataaacccattttccttcataaatttctaaaataaaaccccttaaactttcattcacatcatccaacccccaatgggtcgaatcttgaaccgtaccgtgttaatgactcttctagtcgtaacaatggccggaacagcattctccggtagcttcaacgaagagtttgacttaacttggggtgaacacagaggcaaaatcttcagtggaggaaaaatgttgtcactctcactagaccgggtttccgggtcgggttttaaatccaagaaagaatatttgttcggaagaatcgacatgcagcttaaactcgtcgccggtaactccgctggaaccgtcactgcctactacttgtcatcggaaggaccaacacacgacgagatagactttgagtttcctggnaatgaaacaaggaaa

SEQ ID NO: 10864 - DNA, 408 bp, Arabidopsis thaliana
  unsure at all n locations
  Clone ID: LIB24-023-Q1-E1-F7
aattgagacttctctctgtanagtaaagtagtgaggaacatanaangatcgccgacgacgatgagaagtggcttgncgccgnantcgccgccgttaagcaaaatgcnttctatatgcancgcgctatcgactccaacaatctgaaagacnctctaaagttttctgctcaaatgctcancgagcttcgtacttccaagctttctcctcataaatactatgaactctatatgcgatgtttttaatgaattggggactttggggatattcttcaaggaagagacgggacgtggttgctccatcgcagagctctacgagttagttcagcatgccggtaacattttgccaagattgtagcttttatgtaccatangatctgtanatntcaaatccaaggatgttactgctacn

SEQ ID NO: 10865 - DNA, 423 bp, Arabidopsis thaliana
  unsure at all n locations
  Clone ID: LIB24-023-Q1-E1-F8
nggactgctgttcttgcacttggatttgtcttatactctgatccagagcagactccccgtattgtatcccttctttccgagtcgtacaatccacatgtccgctatggcgcagctcttgcagttggcatctcttgtgcaggcactggtctgagtgaggcgatatctttgttggagccacttacatcagatgttgtagactttgttcgtcaaggtgctctgattgccatggccatggtgatggtccaaattagtgaagcaagcgattctcgcgttggagcatttangcgtcaacttgagaagataatacttgacaagcatgaagatacaatgagcaagatgggagcaattttgggcttcaggtattcttgatgctggtggaaggaatgtgacnataagactgctgtctaagacaaaacatgacaa

SEQ ID NO: 10866 - DNA, 425 bp, Arabidopsis thaliana
  unsure at all n locations
  Clone ID: LIB24-023-Q1-E1-F9
gcttttcacatcaccgattcagagagaacaccgaatatgaccgccgattcaaccgtcgcactcgttcatagcgtcgtttctaacggtgatgtctccaacggaaacacctccgcttcctctaagaaatctcgtgagattgaccgtcgccgccgcagacggaagcagaagaagaacaacaaagcatcccaagccgatgtagatgcatcggacgtttctgctgcttctgaatccaaagagaatacagattcccagccacaggtttgtgancaaantgtgatagagatgttccaaagcaaagctgaaatttgaagaatggtttaacgaatannttaaaggaatccttcgagaagttcaacttccgcgaacctcttgcctctgaaagaagacggtacgaaagatgantctgaggaaaaagaaanttcaaa

SEQ ID NO: 10867 - DNA, 418 bp, Arabidopsis thaliana
  unsure at all n locations
  Clone ID: LIB24-023-Q1-E1-G11
gcccacgcgtccgattatttcctcctctccgtatctgtgtctctcttctcttgatcttttagtgttcttgctttgtcgcttcaacgcttaagtttggatttgtgtgagtctgcataatcatggcgaggaagatgcttgttgatggtgagattgataaggtggcggctgatgaagccaacgcgacgcactatgattttgatttgtttgtcatcggtgccgggagtggcggtgttcgtgctgctaggttttcggctaatcatggcgctaaggttggtatttgtgagcttccatttcaccctattagctctgaggagattggaggcgttggtggaanctgtgttatccgtggttgtgttcctaaaaaagattctcgntcnatggagctacttanggtggtgaacttgaggatgctaaaaan

SEQ ID NO: 10868 - DNA, 475 bp, Arabidopsis thaliana
  unsure at all n locations
  Clone ID: LIB24-023-Q1-E1-G2
cccttcangtagccgtcaagaattcaagggtcgacccacgcgtccggtctgcngttcgattggttttttcaacctcagcgtcaccgtcgagattttgtctcaatgttccggtggtgaagcagggttggaagaattcgtgccggagaagggttttaagagcaatggtgcaggaaacagttcaaggatctcctttggtttacgccagagaaatggagcgcctttctgctaaggaatcgctacttctcgctttgaaggatgctggaggctttgaggctttagttacagggaaaacaactaatatgcaaaggatcgatgttaatgagaggattacgagtctagagcggcttaatccaactccgagaccaancacgtctccttgtttcgaaggcaggtggaattttgagtggtttggatctggaantcctggtttactcgctgctccaagttanattcgagaggttccctcaacaattgg

SEQ ID NO: 10869 - DNA, 482 bp, Arabidopsis thaliana
  unsure at all n locations
  Clone ID: LIB24-023-Q1-E1-G4
ctgttacgccntcaggtagcngtcnagaattcangggtcgacccacgcgtccgcatcccannaaatttccgatttcactttcacatctccctctctcttacaactctctatccgtagtttcagtttcgtcctanaatttcttttcttgtctgttccagatgaaattgtgagttctccgagttanatgcatccgttagaatcaaagcggtaatcaaaagcagaatttanaggantganaaagatggttttggggtgtttccctttgaaaagcancaagaaacgtggctctgtttctatgaagcggttggatcttgaagaaagcaanccanctgctttacctgagccaccaaagattccaagtcgtaatttacaatcagctcntccgagtttcagaactcntgtgaagccaattcaatctaacaacggtggaaccggngagatgagtanccgancaagatcatgtccgctccgtcaagcnacca

SEQ ID NO: 10870 - DNA, 417 bp, Arabidopsis thaliana
  unsure at all n locations
  Clone ID: LIB24-023-Q1-E1-G7
ncgtcgttggttcttcgatctccgatttgcagatttaagcgataatacgagatcccaaggggctcacaagcctttctacgcttaatctgtaactatgccgctcagactcgagatcaagagaaaattagcgcaaaggtctgagagagttaaatctgtggatcttcatcctacagaaccatggattcttgcaagtttgtattctggaaccttgtgtatttggaactaccagacgcaggtgatggcaaaatcctttgaggtgactgaattaccagttcggtcagccaagtttgtagcacgaaagcaatgggttgtcgcaggagctgatgagatgtatatccgtgtatacaattacaacaccatggacaaggttaaagtgtttgaggctcattcagactacattangtgtgtggctggttc

SEQ ID NO: 10871 - DNA, 416 bp, Arabidopsis thaliana
  unsure at all n locations
  Clone ID: LIB24-023-Q1-E1-G9
gcttcttccaggaaacgatcaaaggttccaaaaacccatcagaaacaggaaaagttgattgaagctggtatgagcgagaagatcatgaaacaagctcttgcccaacaaaaggaagttgctgatgaagagaacgccgagagaaaccctagtagcgccgcttttgctgttgccggcgctgcgactgctggagaggagcagaaaattctggaggaggaagaagatgatattgatgattttgatgggaaccttnnaaaccaanagcaattncataaancagaagnaaattatngnggatnatnaaaattngttgagtcnatcctaaataagaaatgcnccccccaaacgtncgctaacnganancatttccaagaancccaaagataaaggtgccgacttacctaaaaaaaaccgtncca

SEQ ID NO: 10872 - DNA, 466 bp, Arabidopsis thaliana
  unsure at all n locations
  Clone ID: LIB24-023-Q1-E1-H1
ccgtcnaagaattcaagggtcgacccacgcgtccgtctctctctttcattcactacataaaaagcttcgagctcccatcactatataccctccaaagatgcaattttcaagaaactcaatccttaggcaactaagccgaaaagaaggttggagatcggcttctaaaaggtggacttccggagatagctcaacagccttcaacgacgacacaagtggtggtggttactcatcaatggagggtctttatggagtttactccggtggagacacggcggcgagaagtaagagagtgatggttgtagttgatgaaagttcgaggtctaagcatgctatgatgtgggctttgactcatttgactaacaaaggagatttagtgactcttcttcatgttgtgtctcctgatgatgaagctactccttctttgggctcaatctcctgggtctctttgcaaaagcntgttaaaccc

SEQ ID NO: 10873 - DNA, 407 bp, Arabidopsis thaliana
  unsure at all n locations
  Clone ID: LIB24-023-Q1-E1-H10
ggattttaactttgagctctctgagaaancaaagcttcactctgattcgctctcnnnnnnnnnnnnnnnnnnnnnnnnnnnnnnnnnnnnnnnnnnnnnnnnnnnnnnnctcncttaagcttttcttaattattantataattttctcttcttaatccccaaatcncctgatggattcatgaaccangatcggctgatttgagtttccgggtttgatttttttccctttttgtgaaattgggttggaatctggagatctggatcttataaagctggaaactttacgtgtgcntgatgaaccgattttgattaggtgattggttagattcggaaatttgaagacttgttaatttgggtttgggattgggattgatctgaaaatttgtagtttttgggaanatatgttg

SEQ ID NO: 10874 - DNA, 416 bp, Arabidopsis thaliana
  unsure at all n locations
  Clone ID: LIB24-023-Q1-E1-H11
gtttattgcttgaagacggcttcntcttctcacanacctcatctctgctaatcaaaatgtctctggttgcaaatgaggagtttcaacacattcttcgtgtgttgantactaatgttgatggtaagcagaagattatgtttgcccttacctctatcanaggtattggtangcgattggctaacattgtctgcaagaaggctgatgtcnacatgaacaaaagggctggtgagttatctgctgctgagattgataacctcatgacaatcgttgcaaacccacgtcaagttcaagatcccagactggttcttgaacaggcagaangattacaaaggatggcaagnattctcaagttgtcnccaaatgctccttgacatgaaantgagaaatgatnctngaacgtctcaagaagattaagn

SEQ ID NO: 10875 - DNA, 428 bp, Arabidopsis thaliana
  unsure at all n locations
  Clone ID: LIB24-023-Q1-E1-H2
gcccacgcgtccggtttttggttttggatttggtaaagcttctcggtcacttgctcggtgattgaaactgaatcgattgtgattgtgattgtgattgtgattgtgattgtgagggaattatggctcaagccgtagaagagtggtacaagcagatgccgattataacccggtcgtatctcacggcggctgtagtcaccaccgtcgggtgttcgctcgagattatatctccttanaatctctacctaaatcctacccttgtggtgaancaataccagttctggcgtcttgtcacaaatttcctttanttccgaaagatggatttggactttttgttccatatgttttttctagctcgatactgcaaactgctcnaagaaaactccttcangggaaagaccgcggatttcctttanaagctcctaatccgg

SEQ ID NO: 10876 - DNA, 431 bp, Arabidopsis thaliana
  unsure at all n locations
  Clone ID: LIB24-024-Q1-E1-A1
gaacttatctagggtttgtaccagaagagctgggagatttcaattgggaaatgctgaaactagggtttcggttagcgattggcattcaacatcatcgcctcttccgtattccatgggcgaagagacactctgtacctagaatcttgtgttctgagcagcgggattactgttcatcaggtctgacaaagtatgttcctaagaagtctcggaagattactgaagatttgacatctcagcaatttgatgttactagagtggatcatagtgtgttggggatttcaagttaagggtaacaagcaaagaggctagagatggctcatttttggatctgcaagaggaaaaatggatactggaaagttacacgaatgtgtccntgtgatgaccctgaannaaggttttaatgagttttggacaaagggtaatanaatgcc

SEQ ID NO: 10877 - DNA, 468 bp, Arabidopsis thaliana
  unsure at all n locations
  Clone ID: LIB24-023-Q1-E1-F4
agccgtcnagaattcaagggtcgacccacgcgtccgcggacgcgtgggtgggaacatcatgatggatgaagagaccaaagcaataaccatcattgattatgaatattcatgctataatcctgtggcttatgacattgccaatcacttctgtgagatggctgccgattaccacactgaaacacctcacatcatggattatagtaaataccctggtgtggaggagcgacaaagatttctgaaaacatatatgagttattcagatgaaaagcccagcgatactatggtcaaaaaactcctagaagacgttgagaaatatacacttgctagtcatctaatttggggtttatggggaattatatcggaacatgtgaatgaaatcgactttgactacatggagtatgcaagacaaangttcgagcangtattggttaacnaagccgaagggctccttgcagccttccgaaaana

SEQ ID NO: 10878 - DNA, 367 bp, Arabidopsis thaliana
  unsure at all n locations
  Clone ID: LIB24-022-Q1-E1-C11
acgttctccacgaanctttccgatgcccagtcgtcggagacatagctacaccgtcggatctcctgcaaccacatcttccaattacagtaacactactttcaccgatcgttccttcccgacaacccctgcccgtacatccaccgacacaaccacctccatcgctcgtcgcatctccggtatcttcatcaactgcttcactcctcccgattccgtttccnccaantacatcgacaattcaaagtcctcttccgacaataatatccgtagtagacgtagctcaacaggaagtagtantgtacaagaggagttatgggaatgcaaancganacaaagcatacaagattcagcttcgatganaatcctacga

SEQ ID NO: 10879 - DNA, 418 bp, Arabidopsis thaliana
  unsure at all n locations
  Clone ID: LIB24-022-Q1-E1-C2
ttacgaaagttcttgaaatttgaagagatctcacagatgagaagtgctataggaagaagattctcaaaccctaatggcttcaccattgcatccttagtcaaacaaactccatttctcacccaatccacatctcatttctcctcttcctccgactcctccggccgtggtcgtggacgcggttccggtgaagatggaggatttcccgccgctggaagaggacaattcggtgtaaatcgtgaaccggtggttcctggacgtgaaccgtcatctgccggaggttatggtcatggtcgtggtcgtccgatccaatctgattcgatttctcctgcgtttacgtcatttgtcaaatcagattctcctagtattggncgtggaagaagatccgttggatnagacancgtttcaactttcgctgctg

SEQ ID NO: 10880 - DNA, 445 bp, Arabidopsis thaliana
  unsure at all n locations
  Clone ID: LIB24-022-Q1-E1-C3
cnaaggtcgacccacccgtcnngcatttctntggtcagcatggtggggttccaacttttggaatggctcttccaggttatttccaaccagaacatggtaccggaaatcctgagatgacatggctgccaattttggctggccctggagcattagggggttcatattgtccaccttatactgtccttgatggttcttaccaagcagacaaaccagggttaccttcctctgccggatcgtccagccaagagaacagttccaataatcctaatgatgaagagcccatggagagacctgaggttacgaacaatgggaattctcaacggtcaaatagcaaccccaaacaagcagcctcgtagatactcggaagatgagctttaacaagtgagtaaaagaagatggaaaaggaagaaagtcatcctaattttgactaagtggaattgaaaag

SEQ ID NO: 10881 - DNA, 424 bp, Arabidopsis thaliana
  unsure at all n locations
  Clone ID: LIB24-022-Q1-E1-C4
angctacgccataaatggcgtatcgttcgtgccttcggatactccgctgaagcttgcggatcatttcaaaataaaagatgtttttaaagttggaaccatccctgacaagccgagaagaggaggaggaataaggctagacacagcagtgatgggagcacaccacaatgcttttcttgagatcatctttcaaaaccgcgagaagatcgtccaaagttaccacctcgatggatacaacttttgggttgttgggatcaataaaggaatatggtcacgtgcgagcagacgagagtataacctcaaggatgctatatctcgctccactactcaagtatatccaaaatcttggacagctgtatatgtggcattgggacaatgtggggatgtggaatctaaaggacccagttctggggcgagacatacttaa

SEQ ID NO: 10882 - DNA, 416 bp, Arabidopsis thaliana
  unsure at all n locations
  Clone ID: LIB24-022-Q1-E1-C6
ggagaactctggcttcgtctctatattattgacccttttgatctctctctgtctcgctttcttcctcgcgtggacctctttcgaaaaatatcaatcccagaatttcgcttcattttggattataaactcccagatctgctactctctatctccgattttgtgatttttcaaacccnanatttctccggaagagtttatttttttctctgtaactaaaccgagatttttttttcaaaattccganattaccctaggttgtgtantaccgtagaaaaccctagttcctttttggtattcttggtgtacagatcccttccttagtcagagtttttggntattagtgtttagaggtttgtgatgaacaatcnaggaaagtatcctcctggnaatggngctgggccgtggagccttaaacc

SEQ ID NO: 10883 - DNA, 374 bp, Arabidopsis thaliana
  unsure at all n locations
  Clone ID: LIB24-022-Q1-E1-C7
agaanatanaacaatcccaagattctcctcttatttgatcaaccatgtcgaatgtcttgctatccccaaacggctacgtatttgcatcgcctaaacctcttggcagattcatcaattcaaagtccggcggacggaaacttttcttctccgtcgttagagcttcttccgatgatgctgattgtaatgccgaagaatgtgctcccgagaaggaggtaggaacagtgagtatggaatggttagctgganagaagacgaaagtggtgggaacatttcctcctcggaagccgcgtggttggactggctatttgagaanaganactgctggtcagactangtgtttactccattgagccctggcagtaatatgttgcagn

SEQ ID NO: 10884 - DNA, 418 bp, Arabidopsis thaliana
  Clone ID: LIB24-022-Q1-E1-C8
gcttcctctgttgtactttccttcttactttctcagcgtgagccatcatgggaccagaatctaaaggacgagcatggtttagtaaaatctacaacaagttggaaaatttgcttgttgaggttgactctttcacttctcagagcacgctttgtttgaaatcaagtgaacctccgagattcgaatatgttagaggtgaatcaaaggaagttgcagaggaccattcttctaatgtacaaggacgtcatgatcgtgttgcttcaccgcgaagtgaaagtccttctgatccaccgtcacatcagaactttgacattccaggacatgttttggttgagaaacgagttcaaggcgatattttgaaagagaatgtagttcaaagagatagttttgaggataattcatcagcttcctcttcgtcctg

SEQ ID NO: 10885 - DNA, 417 bp, Arabidopsis thaliana
  unsure at all n locations
  Clone ID: LIB24-022-Q1-E1-D1
gggttcccacactctgtatcgccgatggaatctaccccactgcttttttctaccggaattcagtccgacgactgacctccgtcgcgcatgatcggtttacgaacccgaaattcggaatcgatggacgtctacggaacggaccgaaggtgacggcaacggtgaatccatatacgtacacggaggcggcgcagcccgaagagcggaagagtttgacggattttttggtggaagctagagatttcgttagatctgacggcggagatggtggtccacctcggtggttctctcccttggaatgtggcgcacgcgctccagaatctcctcttcttctctacttacctgggatcgatggtactggattanggctcattcgccagcataagangcttggagagatattgacatatggtgccntca

SEQ ID NO: 10886 - DNA, 419 bp, Arabidopsis thaliana
  unsure at all n locations
  Clone ID: LIB24-022-Q1-E1-D3
ggagggaatggagagttgctgtcggagcgtcatagcttcaaggacgtttcatctgcggtcaagtggccgtctatttccctctcttagcttaactcatctcaagggcaagctatctctctccatcaactcgttttcctccaagattcagtctcatgctctccgaggagttggtataggcgagtcagataagaaaaatcccctgccgcgaggggccggagaaggagtcaaggaagatgcgaggagtaagctgcttcatgtagttttggtctctcctcagattcctgggaatacaggttgcattgcaagaacatgtgctgcctcagctgttggtctgcatttagtcgggccattaggttttcaagtggatgacgccagagttaancgagctggtttggattaatggccctttgtggttgtca

SEQ ID NO: 10887 - DNA, 469 bp, Arabidopsis thaliana
  unsure at all n locations
  Clone ID: LIB24-022-Q1-E1-D4
agccgtcagtagcctctanaattccaaggtcgacccacncgtccgcggacgcntgggctcatgtttggggtttccgagacgcctgtgctgaacaccatctgcagaagggacaaggtgttgctgggagggcgtttcagtctggaaatctatgcttctgtagagatgttactcggttctgcaaaaccgactacccattagtacactatgcacggatgttcaagttgacgagctgtttcgcggtctgcttaaagagcacatatacaggggatgatgagtacgttcttgaattctttcttcctccagccatcacagacaagagtgagcaagattgtctattgggttctctgcttcagacaatgaagcagcactattcgagtctcaaggttgtctctgaaactgaactctgtgaaaacaacatgtctcttgaagtcgtggaagcttcggaggacggaatggtttactcgaaaac

SEQ ID NO: 10888 - DNA, 458 bp, Arabidopsis thaliana
  unsure at all n locations
  Clone ID: LIB24-022-Q1-E1-D9
gtaccgcctccagaattcccaggtcgacccacgcgtccggtttgtatgggatgtgaggagtccctatcaaaacacgtcaatggttggaatttgtttccaaatttcaaatcgggaagagtagtaactcaacatcttgtatgcattcagatattaagtctttcttgttcaaagaggaaaactgaaacaacagtatttgtttgatgaaatcgatggtgaagaagttgaagcagagtctgagatctggatcgttagagaaaaggaaggaaaaggaaaaagacattcaggaagaaaagtggttcttagacaacggaagcatcttcttgaaagaacttattgctgattgtaacggtaaatccattcctatacgtaacttttcctctgaccagatnntgaaaagctacaagtaacttcngttccagtttgtttgtaaccgcanaagggttttaagtangggacaa

SEQ ID NO: 10889 - DNA, 411 bp, Arabidopsis thaliana
  unsure at all n locations
  Clone ID: LIB24-022-Q1-E1-E11
ttcagatcgacaaatctttctctttctctttccccgatcggaatcatgctaaagatctgaactttttctcagatccgtgaataagtaagtacggagagacagaaacatactcagactgatctgaggaaaacaaagttgatggtcgcaaacctgtaagtgaaatctatagagagagacgttgaagaagaaaatgggtcaagatggttcgccggcgcataaaagaccatccggaagcggcggaggacttccgacgacgacgttaaccaacggtggaggaagaggtggtcgtggtggtttgttacctcgaggtanacaagatgcagaagacgtttaacaacatcaaagatnacaattctccgtggnttccgtcacaattctccgtcctaaggtgggactaatccgtgtttggna

SEQ ID NO: 10890 - DNA, 465 bp, Arabidopsis thaliana
  unsure at all n locations
  Clone ID: LIB24-022-Q1-E1-E4
angtaggcgtccgagaattcccnggtcgacccacgcgtccgggaagaaatcatgatgataaagtgattaatttggatgaagatgaacctctgtctccaatggtagtagaggaagcatgtgaacttcctgaagggttaccagaagatatttactacccatcaagtgatcaaagtgatgggcgagaccttgttcaagtatctcttaaagatctgaaatgcctttcacctggggaatatcttacatcgccagttataaatttctacatcaggtacgtgcaacatcacgtgttttcagctgataagactgctgctaattgtcatttcttcaatacgtttttctacaagaagctcacagaagctgtttcatacaagggtaatgacagggatgcatattttgtgaagttcangcggtggtgggaagggttttgatcnatctgtaaatcatatatatttataccaatacatg

SEQ ID NO: 10891 - DNA, 414 bp, Arabidopsis thaliana
  unsure at all n locations
  Clone ID: LIB24-022-Q1-E1-E5
naaaatacttaactttcttttcactaaagctattcgaaaatgtcaagcaactcccagaacattagcttccaagctggccaggccaagggccaaactcaggagaaggctagcaccatgatggacaaggctagcaatgctgcccaatctgccaaggagtctctcaaagagaccggccagcagattaaggagaaggcacaaggagctaccgaatcagtgaagaacgccaccggcatgaacaaatgaatacaataatcatatgattcattatgttattttttttacgaataaaaacaataattcattttttgaaacctaaagattangttcaacggtttgattannnnnnnnnnnnnnnnnnnnnnnnnnnnnnnnnnnnnnnnnnnnnnnnnnnnnnnnnnnnnnnnnnnnnnnnng

SEQ ID NO: 10892 - DNA, 475 bp, Arabidopsis thaliana
  unsure at all n locations
  Clone ID: LIB24-022-Q1-E1-B9
gttacgcngttcgtaggcctccggaattcccaaggtcgacccacgcgtccgagcaaatgctatccgtgtcctctgccggataatagacggaacccttctcactcagattgagcgatacttgaaacaagccattgtggataagaatcccgttgtttcaagtgcagctttagtcagtgggcttcacttgctcaagacaaacccagaaattgttaaaagatggagcaatgaagttcaagaaggtattcaatccagatcagcccttgttcagttccatgccctagctttgctccatcagatacgccaaaatgatcgcttggctgttagcaaattggttggtagcttgaccaggggatctgtccgctctcccttggctcagtgtcttttgatacgttacaccagccaggttatccgtgacatggccaaccacggtcaatctggagaacgtccgttctaagaanttttggagaattgcccg

SEQ ID NO: 10893 - DNA, 421 bp, Arabidopsis thaliana
  unsure at all n locations
  Clone ID: LIB24-022-Q1-E1-E8
gcggacgcgtgggcggacgcgtgggcggacgcgtgggcggacgcgtggggtgaagttgaaagcatcgatatccaaagtaacgagcatagtgcttatgtcacatttaaagaaactcaaggagcagagactgctgtgctcttatctggagcgagtattgccgatcaatcagtcatcattgagttggctcccaactacagtccaccagcagcccctcatgctgaaacacagagcagcggtgcagaatctgttgtccagaaggcagaagatgttgtgagcagcatgttagcaaagggtttcattcttgggaaagatgctgtcggcaaagcaaaagcttttgatgagaaacatggtttcacctcaaccgccancgcaggagttgcttcactaagaccaaaaaatcggtcttaancagaaacttaca

SEQ ID NO: 10894 - DNA, 447 bp, Arabidopsis thaliana
  unsure at all n locations
  Clone ID: LIB24-022-Q1-E1-A11
ccacncgtccggagaaacgaacagttttgggtgattggaggtgtttcagctcatctctttgctctcttccaaggtctcctaaaggttttagccggtgttgagacaaacttcacagttacatctaaagcagcagatgatggtgaattctctgagctttacatcttcaaatggacatcactcttgatccctccaaccacactactcatcataaacgtaatcggagtcattgtgggaatatctgatgcgatcagtaacggatatgactcgtggggtcctcttttcggaagattgttctttgccttttgggtcatcctccatctatatcctttccttaaaggtctgcttgggaaacaaagacaagaatgcctaaaatcattccttgtcctggtcgattcttctcgcctccnanccntaacncctcctttggggtacgaaatcaatccgttt

SEQ ID NO: 10895 - DNA, 480 bp, Arabidopsis thaliana
  unsure at all n locations
  Clone ID: LIB24-022-Q1-E1-A12
tgtttgacgccgntaggtacggcctccnagaattcccaaggtcgacccacgcgtccgattgaatccttctcaaaactgggagattccatatattttcaagaagatggtgcaactccagctctttatgtcacccaatatatatcaagctcacttgattggaaatctgctggtctttcaatatctcagaaagttaatcctgttgtgtcgtgggatccgtacatgcgtgtgacattcactctttcttcttccaaagtgggagtggcgaaggagtcgactttgaatctaagaattcctgtttggactaactctataggtgccaaagtatctttgaatgggcgacccttaaacgtaccaacttcaggtaatttcctatcaatcaaacagaaatggaaatctggtgatcaagtaaccatggagctaccaatgagtatcagaaccgaagctataaaagatgatngggcagagtacgcatctcctcaa

SEQ ID NO: 10896 - DNA, 454 bp, Arabidopsis thaliana
  unsure at all n locations
  Clone ID: LIB24-022-Q1-E1-A3
ttaactgtcagcggcccgtacggtcaanaatccgggtcgacccacgcgtccgaaagaattacgctaagttaccaataagaaaggacacgcttgaggttaagaacataccaaatgaggcatctcgagccactacaacaacacatggaaactactacaaagtatctgacctcccaatgaccacaggaccagccagcggctttgcatgggctgtgaaaagacggaaagatcctgataatatctctactcttacctactatcaacccagctcgaagagtcaattgagtggaacaagtgttgcatttgcaaagaacacttttggtttgaacctgaaaccagacaatgactcagtttgggaaggttcagggaaacaactatgatgatgttatcnagggtggttccnaagncatgatagtaagcttaaccgtttgggaaaaacaatcggttncctcgacgg

SEQ ID NO: 10897 - DNA, 454 bp, Arabidopsis thaliana; identical to SEQ ID NO: 10896
  unsure at all n locations
  Clone ID: LIB24-022-Q1-E1-A5

SEQ ID NO: 10898 - DNA, 420 bp, Arabidopsis thaliana
  Clone ID: LIB24-022-Q1-E1-A6
gaagaagcgatgttcctggtggattggttctatggagttctggcaactctgggactatggcagaaagaagcgaagattctgtttctaggtctcgacaacgccggcaaaaccaccttgcttcacatgttaaaggacgagagactggtccagcatcagccgacacagcatccgacatcggaagagcttagtatcggcaaaatcaagttcaaagccttcgatttgggaggtcatcagattgctcgtagagtctggaaggactattacgctaaggttgatgcagtggtatacctagttgatgcatatgacaaagagaggtttgcagaatcaaagaaagagcttgacgctcttctctctgatgaatccctagcaaaatgtccctttcctcatccttgggaacaaaatcgacattccgtacgcctg

SEQ ID NO: 10899 - DNA, 410 bp, Arabidopsis thaliana
  unsure at all n locations
  Clone ID: LIB24-022-Q1-E1-A7
gaaagaattacgctaagttaccaataagaaaggacacgcttgaggttaagaacataccaaatgaggcatctcgagccactacaacaacacatggaaactactacaaagtatctgacctcccaatgaccacaggaccagccagcggctttgcatgggctgtgaaaagacggaaagatcctgataatatctctactcttacctactatcaacccagctcgaagagtcaattgagtggaacaagtgttgcatttgcaaagaacacttttggtttgaacctgaaaccagacaatgactcagtttgggaggttcagggaaacaactatgatgatgttatcgangaggttcctagtcatgagagtaagcttaaccgtattggagaacgacacggatnacttgatggttctggtttg

SEQ ID NO: 10900 - DNA, 421 bp, Arabidopsis thaliana
  unsure at all n locations
  Clone ID: LIB24-022-Q1-E1-A9
gcctgggatggttatggatgctccctgttttgaactacgtgaatctttccaacaacactttcatcggtttcgaaagatcaacgaaacttggactcacctctatccaagaaccaccagctatgaggcaattgttttgctccaacaacaatttcacgggaaacattccatctttcatatgtgagttgccttatctcagcactctcgatttttctaacaacaaattcaatggttcaattcctacttgtatgggaaatattcagtctccatatcttcaagctctaaatcttcgacataatccgtctttagtgggacttcttccagagatatatttgagagtctaaattctcttgacgtcggcataaccaactaatgggaaagcttcaaagatcgttaagtcanacccctccccttggcttctgaa

SEQ ID NO: 10901 - DNA, 341 bp, Arabidopsis thaliana
  unsure at all n locations
  Clone ID: LIB24-022-Q1-E1-B1
ctgttacaccgtnagtaggcctcnggaantccagggtcgacccacgcgtccgcaaagatcacactgaagaaatctccttggaaggttccagacgttttcaacttcccattcggagagatcgtccctatgtttgctggagaaacccttcaatggcaaccgttgaaataatgtggtgatttgaagttgtcanattttttctcccaaataagtgaactcgtgtaccttttggattgaattttcttacggctganttatgccctgcattttttgaggaataaaagcaagatactgaccaataatgtttattttgtgtttgaatcannatnnaancaaaaagggcg

SEQ ID NO: 10902 - DNA, 464 bp, Arabidopsis thaliana
  unsure at all n locations
  Clone ID: LIB24-022-Q1-E1-B10
gtacngctccgagaattcccaggtcgacccacgcgtccgctcttcctaagtttcctctctctttagaactgtagagagagaaaagcctccatttttctcaaggcaatctctctctctctgcctcatctcataaacccattacaccaaaacctcatcgtagagagagaaacacaccaaccattgttacactctaagagaagagaagagagaaggaaaaatggacggtgtatcaccaaagtttgtgttgccggagacattcgacggcgtgaggatggagatcacaggccaactaggcatgatctgggagcttgtaaaagcaccagtgattgtccctcttcttcaattagctgtttacatctgtttgcttatgtctgtcatgcttttatgtgaganggtttacatgggaatcgtcatcgttctcgtcaaactcctccgggaaaaaancagacnaacgttacaagttc

SEQ ID NO: 10903 - DNA, 467 bp, Arabidopsis thaliana
  unsure at all n locations
  Clone ID: LIB24-022-Q1-E1-B11
ttgtacgcctccagaattcccaaggtcgacccacgcgtccggagcttgaatccgaggtacaagtgcgaacacctgtggaagaagaaccgattcaagagattgagaccatagttgatttaggaaatccagacaaagtatttgtgagagatcttcttgtggcttctggtttgtatgaaggcacatcagatatatcattgtctagatgggatccattagcaaagcttataaaaaagtctgttcttgaagaaacaaaagagaatctcaagaaaagaagcaatcagaatcaagaagacgacgacacaggagagactactataagtgaagaaaatcacaacatactgtttgatcttctgaatgaagtacttacggtggtgcttggaccattgacaaagtcaggtttcaagaacaaacttttgagttcatctgtgtctgaatcaacgactatacgaggtaaatatctgtttana

SEQ ID NO: 10904 - DNA, 423 bp, Arabidopsis thaliana
  unsure at all n locations
  Clone ID: LIB24-022-Q1-E1-B2
ggaagagttttatcatctcttctccgttcatcttccggtagatctgccgccaaattagtcaaccgaaaccccaggcttccttctccttcacccgcgcgtcacgccgctccatgtagctacctcctcggccgcgtcgccgagtatgcgacctcttcaccggcaagctctgctgcgccatcctctgctcctgctaaggatgaggggaaaaagacctatgattacggtggcaaaggtgcgatcgggcgtgtttgtcaggtcatcggtgccattgtcgatgtgagattcgaggatcaggaaggattgcctccgatcatgacatctcttgaggttcaggatcatcccacaaggctggtgcttgaagtgtctcatcatttgggtcaaaatgtcgttaggaccantgctatgggatggtactgaaggtct

SEQ ID NO: 10905 - DNA, 417 bp, Arabidopsis thaliana
  unsure at all n locations
  Clone ID: LIB24-022-Q1-E1-B4
tcttctttggatcaaaggcgaagtcaaggcggagaaagaaaagagagggtcgtgagatatggttgagacgagacgtagcnnnnnnnnnnnnnnnnnnnnnnnnnnnnnnnnnnnnnnnnnnnnnnnnnnnnnnnnncaaaggcctaacaagcgatctaaggttaagatcgatgccgctgcttcttctctcgaacctgcgacggcggaaccggctggttcttcatcagcgagcgaagttccgatcgagaatcaaggacctgcttcggatcctggatcggaatctggagagccggaacttggatcttctgatccacaggctatggatgcggagaagcctgttgttacaactgatgtccctgtgatggagaactctcctgaaaccgacgctaancctgaagtcgaagtcntggccacacc

SEQ ID NO: 10906 - DNA, 415 bp, Arabidopsis thaliana
  unsure at all n locations
  Clone ID: LIB24-022-Q1-E1-B6
gcccacgcgtccgatttcaacaccgctattacagaagaagagtgaaaagggagagggagcttcctgctttcacttactatgcctcctcctccttctagttctagagcaggtctcaacggcgatccgattgctgctcagaaccagcagccgtattaccggagctactcatcgtcgtcgtcggcgtcgctgaagggatgctgctgctgcttgttcttgctgttcgcgttcctggcgctgctggtactggcggtggtgctcatcgtaatactggcggtgaagccgaagaagccgcagttcgatctgcagcaagtggcagtggtgtacatggggatctccaacccaagcgctgttctggatcaaccaccgcctcctctccctcaacatccggatgctcttcancgccgtcaaccaaaca

SEQ ID NO: 10907 - DNA, 411 bp, Arabidopsis thaliana
  unsure at all n locations
  Clone ID: LIB24-022-Q1-E1-B7
gcccacgcgtccgtacactttttattgcagtaactctggctctcgctctctcctctttcacaagaggccagagagtgatacagattccaccaccacgtccactatgcgcgtctcaatacgccctagctaactacgcctgctcacgtctcccaatgcacactgtcccaccacctgcccccattaccccacctcctgctcccatcgctcccccgcctcctgaacannnnnnnnnnnnnnnnnnnnnnnnnnnnnnnnnnnnnnnnnnnnnnnnnnnnnnnnnnnnnnnnnnnnnnnnnnnnnnnnnnnnnnnnnnnnnnnnnnnnnnnnnnnnnnnnnnnnnnnnnnnnnnnnncgatgaccgtgaccgtgaccgtgaccgtgaccgcgaccgtgaccgtgaccgcgatcatg

SEQ ID NO: 10908 - DNA, 454 bp, Arabidopsis thaliana; identical to SEQ ID NO: 10896
  unsure at all n locations
  Clone ID: LIB24-022-Q1-E1-A1

SEQ ID NO: 10909 - DNA, 370 bp, Arabidopsis thaliana
  unsure at all n locations
  Clone ID: LIB24-021-Q1-E1-E9
cgttacgagcatgttgcaaaggtatcaagatcgggaagatcctaattcacagagaaggtgacaatggtcaacagcttgtttatgagaaattgccaaatgatatctcagagaggcatgtcctattgttggatcctattctcgggacaggaaactcagcggttgaagctatcaacctccttataagcaagggcgtacctgagggaaacatcatatttctaaaccttatctcagcacctcaaggtgttcatgtggtctgcaaaaaattcccaagaataaagatagtgacatctgaaatcgataatgggttaaacgaagagtttcgtgttattcctggtatgggggaatttggggacagatattttggcacana

SEQ ID NO: 10910 - DNA, 416 bp, Arabidopsis thaliana
  unsure at all n locations
  Clone ID: LIB24-021-Q1-E1-F10
aataaaaacccgaaataatttgaaaaaatattgttatatatttttggataaatttttgttgatcggatggggttcctacacaagctgtgggatgaaacggtggccggaccgacgccggacaatggtctcgggaaattgagaaagcacgattcattatccaccgtccgatcttctcctccttctctctcaagcgaccaagtcaccagaagcatcatggttaccaaggggaataacaatgttcgtggtctccgtaaattgaaaatggatccggattctccaacctgttcaagcagcaaccctgggacacctttaacccctgggacaccatgctatgctttgggaccattcactgccggcaaaatcccttcctctggcgaagacgatgcagcaagtctaactacttatgaatggngtgt

SEQ ID NO: 10911 - DNA, 419 bp, Arabidopsis thaliana
  unsure at all n locations
  Clone ID: LIB24-021-Q1-E1-F11
tctggttgtcccaagtataaaggctaatcaacaacttgcaaggactttgcaagacaaagaggaacaggcacgtccatcagctctggttttaccaagtactaaagctaatcaaaaccttgtttctgccggtactcttggagaaactcttgatgcaactggtaaatggggaaaaaatctggataacgatgatcatgtggaggaaatgaaacaagaggttgagaaagtgagatctgcaaaacttgtcaggaagttggaaaggaaacttgctttcgctgagaaaaagctgctgaaagctgaacgggctttagctaaggtggaggaatctctgaagccagcagagcagagaacagaccttgagggcataacagaagaagagagatttatgttccaaaagctccgattgaaaatgnaaactttct

SEQ ID NO: 10912 - DNA, 419 bp, Arabidopsis thaliana
  unsure at all n locations
  Clone ID: LIB24-021-Q1-E1-F12
gcctttgtcaatctccgaaatcccttgctccctcttcaccaattcctcanatttagaccaagcttctcttcgaaaaaatccttaacctaaccatgagtcatcttcctcttctccattttactctcgttgcaaaccctagccgccgtcaaagcaagcgagacatgtacccactcgatactcatggtccagacaaagatccgtcttagtttgaaagatgccagngccctcatgttcctctgattcttcctcatcttactcctattccttcagatctataatcaatcaatgtattttcttattttattcaatcgatttatcaanctcttttgttggtaaattgatgtctgtgttacagatcaaatgttgtgaactaattagcctaatgattcgattgattttggtgaaccngaggattgtac

SEQ ID NO: 10913 - DNA, 432 bp, Arabidopsis thaliana
  unsure at all n locations
  Clone ID: LIB24-021-Q1-E1-F4
nggccgacccacgcgtccanganagcttctcaaatcatggttcagcaaatatgggagacgttgaaggaaacaatcacagcttacactggactttctccagctgcgtttttcaccgtacttgctctcgctttcgccgtttaccaagtcgtctccggtttcttcgtttctcctgaagttcaccgacctcgttctttggaggttcagcctcaatcggagcctcttccaccgccggttcagctcggagaaatcactgaggaggagcttaagctttatgatggctccgattctaaaaagccccttcttatggcgatcaagggccagatctatgatgtttctcagagcaggatgttttatggaccaggtgggccatatgctctgtttgcagggaaagatgcaagccgagctctgggcaaagatgtcatttgaggacaa

SEQ ID NO: 10914 - DNA, 425 bp, Arabidopsis thaliana
  unsure at all n locations
  Clone ID: LIB24-021-Q1-E1-F5
ttcgcnggccgacccacgcgatccaaacaaatatctctcagattgttgggagtccgaatcgttgttcgagtttttatcagggaagatgcaaggaggtggtggtagagatcctttnnnnnnnnnnnnnnnnnnnnnnnnnnnnnnnnnnnnnnnnnnnnnnnnnnnnnnnnnnnnnnnnnnntcctttggtggatttggtggccctaatggtcctccgagtctcatgtctaattttttcggaggaagagatccatttgacgaccctttcttcactcanccttttggtggtggcatgtttcaatccaacttctttggtcccagcatgaatccttttgcagaaatgcatcgtctgccacanggttttattgagaataatcagcctccaagaccgagtagatnacgcngaccggttattgaaganattg

SEQ ID NO: 10915 - DNA, 460 bp, Arabidopsis thaliana
  unsure at all n locations
  Clone ID: LIB24-021-Q1-E1-F7
gnacggtaccgaacaggaattcncgggccgacccacgcgtccaatggattttgacatctcgggttgctgctggtgatcatctgggggatcttagaatcaaaggacggaaagtagtaagaccaatgctgaagcccagcaaagaaaatgatgtatgtgtcatcggggttggtatgcctgtggatgtgtggtggtgtgatggatggtgggaagggatcgtggtgcaggaagtttctgaagagaaatttgaagtttacttgccaggcgaaaagaaaatgtctgctttccatcgtaatgacctcagacaatctccgggaatggttggatgatgagtggctaaaacataagatnaaagatctgataattgttaattccgtcctaaccttgaanaaagaaaaaagaaaatggaggtaaacaataataagaatcctccgaagtttgngtttggaaagggaagaattcn

SEQ ID NO: 10916 - DNA, 410 bp, Arabidopsis thaliana
  Clone ID: LIB24-021-Q1-E1-F8
aaaactaaaaattgaagaaaaaacatgagtctcaccaccgacgaaatcgaagtgagagatttcgtggtgaaccaaaagaatggagtgaaaggactcgtcgactttctaaccctaaccacacttccttctccatacattcaacctcctcaagaacgcttcacttccgacaagatcctcctcggatcacctgtcccggtcattgacgtgtccaattggaatgaaccgcacgtggctagagagatctgccatgcagcgtcaaagctcggcttgtttcagatagtgaaccacgggatagctccggctgagttcaagggtgtgattgctgcggcgcgtgggtttttcgagttgccggcggaggagagaagaaggtattggagaaggagttcagtgtcggagacggcgtggttgaa

SEQ ID NO: 10917 - DNA, 419 bp, Arabidopsis thaliana
  unsure at all n locations
  Clone ID: LIB24-021-Q1-E1-G12
ggatcaaggaaggtttcaagagagttttttctgccccttggcctgagaagttacgttaccaggtccctaaatgcatggagatggaagaccattctggaagcttgttgtttcggaagctactggttgttctgataatgactacttcgaagacgtctaccaatattatgcgaatggcgaggcatggcatctcccagaaggagcttatgagacaatgtcactactgaaagatgctggagttaagatggctgttgtgtctaatttcgataccaggctaagaaagctattgaaggatcttaatgtcatagatatgttcgatgctgtgattgtatccgcagaagtcggatacgagaagcctgatgaacgaatcttcaaatctgcgttagaacaaatcancgtanatgtnaacagagcaatgcatg

SEQ ID NO: 10918 - DNA, 470 bp, Arabidopsis thaliana
  unsure at all n locations
  Clone ID: LIB24-021-Q1-E1-G3
gtaattctatcgttcggcacaggtctccnnnatcnngggncgacncacgcntcnagctttngncanngaagctgctcgtccaacctttaaaggagatgagatgttgaagggtgtcttttttgatatcaagaacaaattccaggctgctgttgatattctccgtaaggaaaagatcacccttgatccagaggacccagctgccgtaaaacagtatgcaaatgtaatgaagaccatcaggcaaaaggcagacatgttctcagaatctcagcgcattaaacatgacattgatactgagactcaagacattccagatgctcgtgcatacttgttgaagttgcaggaaattcgcaccanganggggcttactgatgagcttggtgctgangccatgatgttcgaggctttggagaaagtcnagaaggacataaagaagcctctcctgagaagtgacangaaaggaatggatcttt

SEQ ID NO: 10919 - DNA, 440 bp, Arabidopsis thaliana
  unsure at all n locations
  Clone ID: LIB24-021-Q1-E1-G4
ncaaccggggccgacccacgcgtccnanccangcgtccgcggacgcgtgggattcgagattcttacatgcatccacaatttatgtcggatgtgatgaaaccacttcagattgagcagttgatggatcaagaagttgtcaatctctcaggaggagaattgcaaagggttgcattaactctgtgcctcggaaagcctgcggatatatacctgatcgatgagccaagtgcatatctcgattctgagcaacgtattgttgcttctaaagtcataaagcgatttattctccacgcanagaaaactgcatttgtagtcgagcatgactttataatggcgacctatttggcagaccgggtcattgtgtatgaaggacaaccatccattgattgtactgcaaattgtcctcaatcactgctcagtggaatgaatctcttcttanctca

SEQ ID NO: 10920 - DNA, 422 bp, Arabidopsis thaliana
  unsure at all n locations
  Clone ID: LIB24-021-Q1-E1-G9
gnacagattgatacaattcactcctttctttctgttttttcctttccctttctctcatctctctctttagctacttcctcctcccataaaccctctaccaagtaaactctcagctccaccattaacacatctcggtctcaattccgagctctgtattccaatcctttgttgcatttactttctgggtttttgtttattttgattttcttccatttgggtacccacccaaagagtaaagtttcaagctttcgtggtacttgctatgctttccctcacaaaaccctaatttcatatccttatccaattccatgttttgctctgctcaactctctgtttctacttctgaatcgtcgttttccttcatataaccaaaccaattctgttgaatcatcttggcacattcattgttttgagaaagaaca

SEQ ID NO: 10921 - DNA, 411 bp, Arabidopsis thaliana
  Clone ID: LIB24-021-Q1-E1-H1
aagctctttgttcatctctctatcttcttctccatcctcttcatcactctcccatcttcttacagctgcaccgaaaatgacaagaatgccctccttcaaatcaagaaagcacttggcaatcctccccttctatcctcctggaacccccgaaccgactgttgtaccggctggaccggcgtcgaatgcactaaccgtcgcgttaccggtctcagcgttacctccggcgaagtctccggtcagatctcgtaccaagatcggcgacctcgttgacctccgtacactagatttcagctacctgccacacctcaccggaaacatcccacgcaccatcaccaaactcaagaacctcaacactctctacttgaagcacactagtctctccggtccgattcctgattacatcagcgagct

SEQ ID NO: 10922 - DNA, 464 bp, Arabidopsis thaliana
  unsure at all n locations
  Clone ID: LIB24-021-Q1-E1-H7
tnttaagccgccaggtaccgaaacaagaattcncgggtcgacccacgcgtccgattctttatacgtataataacatcccttgtgatcaacaagtaaaccattcaaaagatgaaaggaagaattttgattttgagtttgctcataatgagtccggtcatggnacaaagttcaagtagaagcaaagatntgctgcccttccaaccaagctagaaatggctataatgtatgccgtataangntttccaagggaangtgtatgcaagtgagtggatgccaaaactctgatacatgccctccangttgggtaaacgccattctcgaaaactcaactgatgctaacaatgaacactgcaagttanggtgtgaaacttcngtgtgtggtgccatgaacactctccaagaactccgatgcaagtgaaaattgtgaatggagcctccggaacaatgtgccaaagggatgttcn

SEQ ID NO: 10923 - DNA, 421 bp, Arabidopsis thaliana
  unsure at all n locations
  Clone ID: LIB24-021-Q1-E1-H9
gcggacgcgtgggggtatggctgtgattggtatcgccatcctctattctacattttatgtgtggttgggcgtgggttcaccaggctcaatgaatgttactgacctacctcttcttcttgtcggatatggttttggtgcttcgtttgttgccttatttgctcagttgggtggtggaatatatactaagggagctgatgttggggcagatctcgttgggaaagttgagcagggaattcccgaggatgatcctcgaaatcctgctgttattgctgatttggttggagacaatgtgggggactgtgctgctagaggtgctgatttatttgaaagtatagctgcagaaatcatcagtgcaatgatactangtggaacaatggctaagaagtgcaaaattgaagattcatcangctttatccctttt

SEQ ID NO: 10924 - DNA, 413 bp, Arabidopsis thaliana
  unsure at all n locations
  Clone ID: LIB24-021-Q1-E1-E8
nctctgtccctctctcgtaaccaaaagccgtctcagaagaaaactcaactgcgaagaatatggcgaccgatgatgtgaacgagcctctcccggcggcggcggaattaccggcgacagaggcggagaaacaaccacacaagctcgaaagaaagtggagtttctggttcgataaccaatcaaagaaaggcgccgcctggggagcttctcttcgtaaagcctatactttcgacaccgtcgaagatttttggggattgcacgagactatatttcagactagcaaattgacagcgaatgctgaaattcacttgttcaaagctggtgttgagccaaagtgggaagatccagagtgtgctaatggaggaaagtggacttgggttgttactgctaataggaaggaagctttagacaaaggc

SEQ ID NO: 10925 - DNA, 415 bp, Arabidopsis thaliana
  unsure at all n locations
  Clone ID: LIB24-020-Q1-E1-D4
tacaanctgaggcatacaattgaantcattaataaccacatancngcggcttcaanaacngcngganacttaccncttatagaccctgcagctggaaatgtatgttttgccagtggtacagccggatggtccttcacattacaatcttttgctaaaatgtatgccaagcttcatggtgtggccatggacgtggataagtttgcatctcgactttggggagatgtatattatcactctgatactagggtattcaagagaagtcctccagtaggtggtggagaaagagcatttgttcagtttattctggagcccctatacaagatatacagccaagtgataggtgaacataagaagagtgtagagaccacccttgcagaattaggagtgactctgagtaatagtgcatataagctga

SEQ ID NO: 10926 - DNA, 422 bp, Arabidopsis thaliana
  unsure at all n locations
  Clone ID: LIB24-020-Q1-E1-D5
tttggtcaatttggtgaacttcttcatgtgaaaatacctccaggaaaacgttgtggattcgttcaatatgccaacaaggcgtctgcagagcatgcactttcggtgctgaatggaacacaattaggtggacaaagcatccgtctttcgtggggacgtagtccaaacaagcagtctgatcaagcgcaatggaacggtggtggatactatggataccctccacagccacagggcggctatggttatgcagctcaaccaccaactcaagaccctaatgcgtactatggtggttacactggctatggcaactatcagcagcaacgtcagtgaaacatcaacatcagctatttctaccaatgtcttggaacaaaagatgaacgattgtgtcctaataaggacttcnaaattaaaaatgcncccctttt

SEQ ID NO: 10927 - DNA, 416 bp, Arabidopsis thaliana
  unsure at all n locations
  Clone ID: LIB24-020-Q1-E1-D6
cgtccgtaaatctcgacctcaaaccctgaaccatggctgaaggactcgtgttgaaaggcacaatgtgtgcccacactgatatggtcaccgccattgctacaccggtcgataactccgacgtgattgtaacttcgtcgcgtgacaaatcaatcatcctctggaaactcacaaaggaagacaagtcatacggtgttgctcagcggaggatgactggtcactctcacttcgttcaagacgttgttctctcctccgatggacaattcgctctctccggatcttgggacggtgagcttcgtctctgggatntcgctaccggagaatctactcgtcgtttcgttggtcacacgaaagatgttctctctgttgctttctctaccgataaccgtcanatngtctctgcttctcgtgatcgtacg

SEQ ID NO: 10928 - DNA, 427 bp, Arabidopsis thaliana
  unsure at all n locations
  Clone ID: LIB24-020-Q1-E1-D7
ggaaaaaccatnnnnnnnnnnnnnnnnnnnnnnnnnnnnnnnnnnnnnnnnnnnnnnnnnnnnnnnnnnnnnnnnnnnnnnnttatccttatccgataaacccacaaataaagacagactcttttgttctttaaacagagattgtaaatccagagccgccggaaaatacaaccgccggtttactctcaggattagttgatattattcgattttaaaaatcagtaggaagaagatgaagtacgtgcttgtaacaggaggtgttgtgagtggattagggaaaggagtaacagcaagtagtattggtgttctccttaaagcttgtggtcttcgagttacttctatcaaaatcgattcttatctgaacactgatgctggaactatgtctccatttgaacacggtgaagtttttgtcntggacgatggtggt

SEQ ID NO: 10929 - DNA, 427 bp, Arabidopsis thaliana
  unsure at all n locations
  Clone ID: LIB24-020-Q1-E1-E1
gtccaaaaattcaagggtcgaccnacgcgtccgagttcaaggtgtatgagattgacttccaatttattcccaactctgaagaagattgcgtctgcaaaatcactatgatatgggagaagcgcaacgatgatttccccgaaccaagcagctacatgcaactcctcaagagtatggttattgatatggaggaccacgtccttaaagcttannnnnnnnnnnnnnnnnnnnnnnnnnnnnnnnnnnnnnnnnnnnnnnnnnatatatttattaaattgttttcatttatatataatagactagataagaacctgtataatgtgcgggataaaatgattgaaataaattattatgtataaaattattatatgagatatcatatatgtttgtatacaagaaaatatgtaactaaaaaaaaaaaaaaagggcg

SEQ ID NO: 10930 - DNA, 459 bp, Arabidopsis thaliana
  unsure at all n locations
  Clone ID: LIB24-020-Q1-E1-E10
caaaattccanggtcgacccacgcgtccgaaacctacttcctttccttgcttcagctccccttttcttatccggaaaccaaaaacttccggtgataaaacctccttcgtcatctctctacttcttggataaaatggcgtcaactttcactgccacatcttctantggttcaatggttgctccgaatggtcacaaatctgataagaaacttatcagcaagttgtcttcaagctcatttggaaggagacaaagtgtgtgtcctagacccagaagatccagttctgcaattgtgtgcgcagcaaaggaattacatttcaacanagatgggactaccattaggagacttcangctggtgtcaacaagctcgcagatcttgttggtgttacacttgggacccaaaaggacgaaatgttgttcntganaacaagtntggatnancacnaaatgtttaaagagggg

SEQ ID NO: 10931 - DNA, 469 bp, Arabidopsis thaliana
  unsure at all n locations
  Clone ID: LIB24-020-Q1-E1-E11
ttacgcctgncggtaggcgtccanaaattccanaggtcgacccacgcgtccgcccacgcgtccgcggacgcgtgggaattttctctcatttcttcatcttcctctccacaaaacccattttaatggcggacgttagaaaccctacaaaaannnnnnnnnnnnnnnnnnnnnnnnnnnnnnnnnnnnnnnnnnnnnnnnnnnnagggcatgtaaacccatttgtacacttagccatcaagctcgcgtcacaggggatcaccgtcactttcgtcaacactcattacatccaccaccagatcacaaacggctccgatggagatattttcgctggagttaggtcagagtctggccttgacataaggtacgcgacggtttccgatggtttaccggtcggattttgaccggtcgttgaaccatgacacgtaccaaatcgtcgctgttgcacgtgttctatgcgcatgtggnaaaa

SEQ ID NO: 10932 - DNA, 476 bp, Arabidopsis thaliana
  unsure at all n locations
  Clone ID: LIB24-020-Q1-E1-E12
tacgccngccggtaggcgtccnaaattccanggtcgacccacgcgtccgcccacgcgtccgataaaccataccataaaaaacatgaaaatcctctcactttcacttctcttgctcttggccgctacggtctcggcatccgttccagggctcatcgaactcgtcgattcgaaaaccatctttgggaacgtagccgaactcttagagaaagagaaactttccatcaactacgccaactgcagaagctggcaccttggtgttgagacctctaacatcatagacttcgacacggtgcccgcaaattgcaaagactatgttgaagactacttgatcacttccaaacagtaccaatacgactccaaaaccgtgtgcaaagaggcttatttctatgccaaagggacttgccctaaagaacgacaccgtcaatgtttggatntttgacctaaatgntaacctcctctccaagnattccctaaaa

SEQ ID NO: 10933 - DNA, 462 bp, Arabidopsis thaliana
  unsure at all n locations
  Clone ID: LIB24-020-Q1-E1-E4
gtgccgtccacaaattcaagggtcgaccnacgcgtccgatcctactctcttaacctttgaaaatggctgattcaattgcngcngaaacaacaaacnggngcttctncnccccccgcggcttcngataanaacccaacnagattcaaccgatccggatnccaaccatcnaaggagatccgagctcaagaaggtttggaacaactgcgccgttcgtgctgtaactagtggagtcatgggangangactcgggttgatgatgggtttgttcctgggggcattagataatcctattacgcatgatactatgacggctangtagcagtttgtgttcacggcaaaacaaatggggcaaagganttggaattcctgtaagacatttgcagttatgggtttggttttctctgctgcanaatgcattgtcgaaaangcaagaactaagcatgacactgtaaacancgctat

SEQ ID NO: 10934 - DNA, 424 bp, Arabidopsis thaliana
  unsure at all n locations
  Clone ID: LIB24-020-Q1-E1-E5
tctatccatctctgtatgaagctgaagaacaatgggtgatggtaacctcaagaaaagcaagctgtcatggcccaaaacgttggtcaagaaatggctcaacatcaagagcaaatcaagaagattttcacgcagacgacttggacagaggtgaaggtggtggagattggaggaacaatgtcattgaaagagaggaagcatgctctgtccgtaaaagcaaaactgagactcggagcaaaaggaacagcggaagagccagacgaaacaaactcgatgtcgattcaacgcttgatcatcttaaggtttttactgccacatggaatgtcgccggcaaatctccgccgagttatttaaatctcgacgattggcttcacacttctcctccttccgacatttacgttccttggcttccaagagatngttccct

SEQ ID NO: 10935 - DNA, 430 bp, Arabidopsis thaliana
  unsure at all n locations
  Clone ID: LIB24-020-Q1-E1-E6
cgcgtccgnttgagtggagcgaatatccaaaagagttccgagtttctttcatccttcacgagcttatactttttcttctccattcgtttgtttttaacgatcaaaaacaacggcgaaggtattggaaataagacagaagctgttanctctgtttctccatggtgtcaagatcttgtgctaattttctagacttancatcttgggaccttttagattttcctcaaactccacgaactcttccacgcgtcatgactgttccgggaatcatcaccgacgtagacggtgatacaacctccgaagtaacttctacctccggtggttcacgtgagaggaagatcattgtagctaacatgttaccactccaatctaaaagagatgcagaaactggtaaatggtgttttaactgggacgaagactctctccagttaca

SEQ ID NO: 10936 - DNA, 473 bp, Arabidopsis thaliana
  unsure at all n locations
  Clone ID: LIB24-020-Q1-E1-F10
ctgtctacgcctgntcggtacgnctccanaaattccaaggtcgacncacgcgtccggagaatttcaaatttcatttctgangcaatcncataattcccaccggcgatcggagatgagcagcgcgaagactgtgctctcttgtggcgganctaggttacgaaggcgccggaaaattggatcccgatagcttcgaatggccgtttcaagtacgacgatgctcgacctatcctctactggatctgttcctctcttcgtccttccaatgtcctctctctcgccgaactatcactatatgagcaatttcaacnagatgggaaactcttagagggcgatgatctanaccaggcatatgatagcatatcagcattttcttccangagaaataaccaggaagccgtttttggagcataatanagcattaaagaagtnagatatcaactttggcgcataaagctgaanccctaaaatttcaa

SEQ ID NO: 10937 - DNA, 479 bp, Arabidopsis thaliana
  unsure at all n locations
  Clone ID: LIB24-020-Q1-E1-F11
aacttctacgcctgncccgtanncgtctaaaattccanggtcgacccacgcgtccgnggacgcgtgggattgggaagacagataaagtcactgatctgggtataacagttaagcttccagaatcttcgcaacctgatgattctctggatanagtgtcaggcgaggatcatgaaccgtctgctactgaacagagtttcacagatagtagaatacaagaaggtcctgaaggttccctccaatcagagatgaagagtgataaacctagacgaggtagaggtagaggtagaggtaggggtaagtctgttagaggaagatcgcaagcaacaaaagctgtgtccagagattcaaaaccatctgatggggaaactccaaggaagcggcaacgcgaacagacttctagaatcacagaaagtgaacaagcagctggtgatagtgatgaaggtgtagacagtattacaactggtggacgtntggaaaaa

SEQ ID NO: 10938 - DNA, 471 bp, Arabidopsis thaliana
  unsure at all n locations
  Clone ID: LIB24-020-Q1-E1-F2
cgtagcccgtccaggaattcaagggtcgacccacgcgtccgngctccgtcgcgccgtgtttctccgtcgatttccggcggtggtttctccgatcaaaagggctttcagcagtagaattgacgatgaattcgattcccaaatcatgaatataaatgagctgaatcanggagatgcagtcaatctttgggacaagaaccttctcccgatggtcctgggacaatggatttctctgagttgaaatcatccaaaatcgaacctttgagatcgaagaatattgattttagacaacaaattgagtatcataaatctacacactcgagcaagaatgattcgcaagctatagaacaatatgcaaaagtggctagtgatatgtctaagctaacacatgttggtatcgcangggaagctcaaatggtggatgtttcttctaaggacaattccaagagaactgcattggcctgttgtaaagtt

SEQ ID NO: 10939 - DNA, 466 bp, Arabidopsis thaliana
  unsure at all n locations
  Clone ID: LIB24-020-Q1-E1-D3
gtccaaaaattcaaagggtcgaccnacgcgtccgcggacgcgtgggttcttctcctacctaaaccctcataaaccctcctctctccctttctctccagattanaatttccatgacgattcttcgatctngcgaaatcccatctgtctcacccangccantccctaaagaatccgacactgagccgtcgactcncgctcgtacactagagcccgaacttcaacgctcgccggatgagaccgctcntgaattgggtcttgttgatgaanccactcacactacccggagacgtagtcttcgtcttgcacaccaatttgacggcgatgattgtgtcactgagaaagaggttagtgtggatgaaaagtttttgagtttgcgttcanggaagagagttgctaagagaagtgtcgattatggaattgaaattgagtctaacaagtttgatttcgatttanaagttaggagaaa

SEQ ID NO: 10940 - DNA, 521 bp, Arabidopsis thaliana
  unsure at all n locations
  Clone ID: LIB24-020-Q1-E1-B4
tcnaacggggggccccccaaaaacccccctancaaccgnaaaaccaataggaattacgaattangaaaaacctttctccctttctttctggcctttcttttnatncatccgggaagaaatccgaaatccttccttttncctcctttttggaagaattcccctaaattnatnccttttgggaaanaatttccgtgttgaagaagaagaaagccgttaatggggctgctttggttgttgtgggtgggtgggtgagggatttccgtagagtttctgaaactggaccaaagccagtgcataacactggaggttacaatggaggtcaccatcaaagggcagatncacccaaaaaccttccagtcattcagatgcagcctatctctgttgcggccattccagctgatgaattgagggatataacggataactatggttcaaagtccttgattggtgagggttcatatgggaagagtcttttatggtattcttaaaagtggtaaagcagctgccattaagaaactgga

SEQ ID NO: 10941 - DNA, 144 bp, Arabidopsis thaliana
  unsure at all n locations
  Clone ID: LIB24-020-Q1-E1-B6
ttcttaggctttatcttagtagtaccttcttcatccccaagaaaacttatgaacttantgctgtttcttgttatatttgatatgctagttataaaatgcatctatggctttttnnnnnnnnnnnnnnnnnnnnnnnnnngggcg

SEQ ID NO: 10942 - DNA, 469 bp, Arabidopsis thaliana
  unsure at all n locations
  Clone ID: LIB24-020-Q1-E1-B7
acggtaaaggtcanaaattcccgggncgacccacgcgtccgaacatctttggttatgagaccaagaaaattatcccatttgctgaaatatcttgtgttaaacgagccaagactgctggtatttttcctaatgccattgagattttagctggagggaagaagtacttttttgcatcgtttctttcccgcgatgaagctttcaagcttatccatgatggatggttggaatatggtagtgctgtcaaatcagaaggcgagattctggtgaccgaaccgcaggtaagcgatggagttgttaaaagggcacgcagttccatggatttggccaatgaactagatattccagtaagggatgaaactcttcatctttccagcagttccagtcttcctgtcattagtcagaatggcgttccaccttcatccgttcagcggcacgctgaaccaagatgtagatgttgtggcgggcaata

SEQ ID NO: 10943 - DNA, 441 bp, Arabidopsis thaliana
  unsure at all n locations
  Clone ID: LIB24-020-Q1-E1-C1
ncgtccggaggagaaccctaattttcaattgtggtcgaaaattggaagaatgaggaggaggaggtgcgatcttcaaccgaagagaacgagaatgtgcgatcttcaaccgaagagaacgagtatgtgcgatcttccaccgaagctggtaggggagaagatcctcacgaggattccgataacatctctgagagcggtgcgatccacttgcaaattatggaacgctttaaccaaagatcgggttctgggtaaagcagcggcgcagtttttggggtttatgacgatggattcaaaggtctgttcagttagattccatctccgtcgcagcaaggaggaagaagaagacacgatggatctatctataaagcaggtagatttgcttaatcaagtcgagatatctagagtgtatcactgcgacggcttgttgttatgcntggctaaaga

SEQ ID NO: 10944 - DNA, 466 bp, Arabidopsis thaliana
  unsure at all n locations
  Clone ID: LIB24-020-Q1-E1-C10
ngtagccgtccaaaattctanggtcgacccacgcgtccgcacaaatgtgatgaaatgcgggcacacaatgcacgtagaatgctacaacgagatgatcaaacgtgacaagttttgttgtccaatttgctcgaggtcagtgattgatatgtctaaaacatggcagagactcgatgaagagatcgaagccactgctatgccttcagattaccgtgacaagaaggtttggatactttgcaacgattgtaacgacacaacagaagtgcacttccacataatcggacagaaatgtggacattgcagatcatacaacacacgagcgattgcgcctcctgttcttcctcaatgacaaaaccaagatcttcccatgttattgcctccagaaagcaaagcaaagaacnttttggtgctaaaaaaactgangcataaattgatgatcataacaaagnaagaaaaaggaaaagttttt

SEQ ID NO: 10945 - DNA, 482 bp, Arabidopsis thaliana
  unsure at all n locations
  Clone ID: LIB24-020-Q1-E1-C11
ctgttacgcctgctcngtacgcctccaaaaattccaaggtcgacccacncgtccgcngacgcgtgggttacgatcctcaataccacatagtcagaaatattaaaagaagctaagagatcaacaacaatggctgttggttcgatgaatgtcgaagaaggcactaaagcttttcctgcgaagctgacaggtcaagtctttctttgctgtgtcattgctgctgttggtggtctcatgtttggttacgacatcggaatctcaggaggtgtaacgagtatggacactttcttgttagattttttcccacacgtgtacgagaagaaacacagagtacacgaaaacaactactgcaaattcgatgaccagctcttgcagttgttcacttcctcactctacttggctggaatcttcgctagctttaattcntcctangtttcnaaggcttttgggaaaaaaccacaatcaagctcgcctccanatttttt

SEQ ID NO: 10946 - DNA, 476 bp, Arabidopsis thaliana
  unsure at all n locations
  Clone ID: LIB24-020-Q1-E1-C3
cgtanccgtccacgaaattcnagggtcgacccacgcgtccgggaggagaaccctaattttcaattgtggtcgaaaattggaagaatgaggaggaggaggtgcgatcttcaaccgaagagaacgagaatgtgccgatcttcaaccgaagagaacgagtatgtgcgatcttccaccgaagctggtaggggagaagattctcacgaggattccgataacatctctgagagcggtgcgatccacttgcaaattatggaacgctttaaccaaagatcgggttctgggtaaagcagcggcgcagtttttggggtttatgacgatggattcaaaggtctgttcagttagattccatctccgtcgcagcaaggangaagaagaagacacgatggatctatctataaagcaggtagatttgcttaatcaagtcgaagatatctagagtgtatcactgcgacggcttgttgttatgcntggctaag

SEQ ID NO: 10947 - DNA, 473 bp, Arabidopsis thaliana
  unsure at all n locations
  Clone ID: LIB24-020-Q1-E1-C4
actctagctntcgtgccgtccaaaaattcaagggtcgacgcacgcgtccggtttcantgctttgtanttggccctaaaaaatctggaaagtctgcactcctcgattctttcttaggaaggaaatttncacacagctatnangcaacaatgggtgaacgatatgcagcaaatgtcattgatcagcctgggggttctaanaaaaccctcatattgcgggaaataccagaggacagagttaaaaagtttctgacaaacaaggaatcgttggcancatgtgatgttgctgtggttgtctatgacagttcggacgtatactcatggagaaaggcgagggaaatactgatggaggtagcaaggatgggagaanaganaggttacgggaccccttgtcttctggttgcggccaaagatgatttggattcatatccaatgtcagtgcacgagtctgatagggtttgcatggaantggggat

SEQ ID NO: 10948 - DNA, 430 bp, Arabidopsis thaliana
  unsure at all n locations
  Clone ID: LIB24-020-Q1-E1-C5
gagagtttcactctcaacatttcattctctctctctctctcaacaattagatctgtttcgataatcacgaggtttccctcacttcctttccattgctaaaccaggatttgcctcctgcatttggaaatggacgcttctatgattaccaattccaaatccattacttctccaccctctttagccttagggaagtcaggangaggaggagttatcaagaagttcactaagtaacttaatgatgccaagcaaagttaacttccctagacaaagaactcaaactctaaaggttagccagaagaaactcaagagagctactagtggtggtcttggtgttacatgcagtggtggtgataagattctcgtaacgaatcnaggtgaaattgcagttcgtgttatcaaaactggtcaagaaatggggaatccttgtgtt

SEQ ID NO: 10949 - DNA, 424 bp, Arabidopsis thaliana
  Clone ID: LIB24-020-Q1-E1-C6
gagagtttcactctcaacatttcattctctctctctctctcaacaattagatctgtttcgataatcacgaggtttccctcacttcctttccattgctaaaccaggatttgcctcctgcatttggaaatggacgcttctatgattaccaattccaaatccattacttctccaccctctttagccttagggaagtcaggaggaggaggagttatcagaagttcactatgtaacttaatgatgccaagcaaagttaacttccctagacaaagaactcaaactctaaaggttagccagaagaaactcaagagagctactagtggtggtcttggtgttacatgcagtggtggtgataagattctcgtagcgaatcgaggtgaaattgcagttcgtgttatcagaactgctcatgaaatggggattcctt

SEQ ID NO: 10950 - DNA, 466 bp, Arabidopsis thaliana
  unsure at all n locations
  Clone ID: LIB24-020-Q1-E1-C9
aactgtctacgccgntcggtacggcctccanaaattcccaggtcgacccacgcgtccgnggacgcgtgggtcgccggattgagttttcgtcttccatggntattcctctcgggaagctcaccatcctcatcggtgcaggtcttgttgggtcagtacttgctaaagaagggagtttaccagatgtctcgagttttgtctccggtgctcttaagatggtatttaggcagctgaagcaagaagaacctgccaaatcagccagcaagccccgcaatgatacactaatggcccaggttaacagtcttaggcatgaattgagcttgctttcttcaaacagacctatcactattgttaccacagcaggatcaggtggtaaaaagtatggttacatcattataattggggtgataggctacggatatgtatggtggaagggctggaaacttccggatcttangtttgcaacaaa

SEQ ID NO: 10951 - DNA, 458 bp, Arabidopsis thaliana
  unsure at all n locations
  Clone ID: LIB24-020-Q1-E1-D1
gcagccctccanaaactcgaanggtcgacncacncntccaaaanctttctgtgaaaaacaaaaatgtcaggaagaggaaaaggaggaaaagggttaggcaaaggaggagcaaagagacacagaaaggttctaagagacaacattcaaggaatcacaaagccagcgattcgtcgtcttgctcgtagaggaggtgtgaagagaatcantggattgatctatgaagaaacgagaggtgtgttgaagatttttctggagaatgtgattagagatgctgttacttacactgagcatgcgaggaggaagacggtgactgctatggatgttgtttatgccttgaagagacaaggaagaactctatatggatttggtggttgatcaatttgagatctgggttttctggtgaatgatgatgatttaagtcttgcgatcaagaaattccagaaattgggttgaanttt

SEQ ID NO: 10952 - DNA, 461 bp, Arabidopsis thaliana
  unsure at all n locations
  Clone ID: LIB24-020-Q1-E1-D12
gcctgntcggtaggcctccaaaattccaaggtcgacccacgcgtccgcttcgtcntctttctcagttctgttgtcaaattanggttttcgtttcaggggaaagagagagagagagagatgtggtttctgtgtgtcttctatcacangctattagacttcagaaagccanaagtggaagctttanctgaactcctcgganaagagattgcagagaatgagtctctccaatggcgtctacctgaaaatcaccatagacgatactccattccatttcgttcaactttcatctgaagaaatcgctcgtaacattgctaaangaaccatattggtgaaaagaatgtatgagctttggggtgaangaacttgttatgaagaacttaaagactcgantcaaagctaacctgaatccccaaaagcttccaatttccaactttcggaatcaaccttttaaaancccccgt

SEQ ID NO: 10953 - DNA, 465 bp, Arabidopsis thaliana
  unsure at all n locations
  Clone ID: LIB24-020-Q1-E1-B3
tctaactcacngcnggtctctagnnnctcgaaggtcgncncacccctcnngcggtcctngtnggattcanatgatggaccgatcaaccccaaccttctcatatcangcttggaggcgagatcctgagaatgggcctccccagtaccgtancagaactgtgtttgaggatgccactcccgagatggtcagggacttcttttgggatgatgagttccgttccaagtgggatgatatgcttttgtattcttctactctcgagcgttgcaaggacacgggcactatggttgtgcaatgggtgcgaaagttccccttcttttgtagcgacagggagtatattataggccgtcgtatatgggatgctggccgagtcttttactgcattactaagggagtacaatacccgtctgtacctagacnaaacaagccaaggcgaatcgacttgtnctaatcaagctggtgtatccn

SEQ ID NO: 10954 - DNA, 477 bp, Arabidopsis thaliana
  unsure at all n locations
  Clone ID: LIB24-020-Q1-E1-D2
cttctagccnctcgtgcccgtccacaatcaagggtcgacnnacgcgtccgagcgatgaccatggcagcaaatctagcgcgacggctgatcggaaaccgatcgactcagatccttggagccgtgaactctagctcaggtgcggctagttctgtcnctaaggcnttctgctcctccaacactccgatnaccgcaactctcttccctggcgatgggatcggtcccgagatcgccgaatctgtcaaaaaggtgtttacaacagctggtgtaccaattgagtgggaagaacactatgttgggactgagatagatncgagaacacagagtttcttgacatgggaaagtctcgaatctgtgcgtaaaaacaaagttggtttgaaaggtccaatggctactccaattgggaaaggtcaccgttctttgaacctgactcttangaaagagcttaatctatatgccaatgttagancttgttacagt

SEQ ID NO: 10955 - DNA, 432 bp, Arabidopsis thaliana
  unsure at all n locations
  Clone ID: LIB24-019-Q1-E1-G9
tcttncgcacgccgcggtccntcantncccgggnccacccacgcgtccgcattattgaaaaaaatgggaccgagttggaaaagaacaaaacgaaactcgtcgtcttctaccacttaaatatttttcagtagctccnnnnnnnnnnnnnnnnnnnnnnnnnnnnnnnnnnnnnnnnnnnnnnnnnnngtagtgtctctaccgtgatttttatttttttctatatactgtttaaacctcagtttttttgttgttgttataagatccttgtcattttttgtcgtgattagatgtaatttgtataattttagtaactcttcagtttttttttgttttaaaaatatattttctctctctctgtcttcctgcaatctatcgccggccgattcaataatttcgctttactcctgccaaaaaagtttgttcntttgtttt

SEQ ID NO: 10956 - DNA, 463 bp, Arabidopsis thaliana
  unsure at all n locations
  Clone ID: LIB24-019-Q1-E1-H1
gngtaattcctacagcncccncannnccagnactcgtgggtccacgcaagcnctctagactgagtcgtatgacatacccatggaagaagatcaccaagtgcttatacaggagaacacatctcaatcatcttctcctgtaccggaaatcaacaacttctctatacatccggttatgcaagtctttcccgagttcccggtaccaacagggaatcaatcatacggacagcttacttcatcgaatctcatcaatttggttccattaacttttcagtcaagtccagcaccgctttctctcaacctctcactagcttcatctaatcttaatgaaccatctccttcaatgcatccagcattcaacacgattggagtcgcttagagcttatcctaaaggtgaaaatctgcaacacaccctgtttgtttctttgctgtacagataaggtctgactttgttataaaaaaattc

SEQ ID NO: 10957 - DNA, 417 bp, Arabidopsis thaliana
  unsure at all n locations
  Clone ID: LIB24-019-Q1-E1-H11
anaggatagagagatagcgaggctaatggatcagtgactcantgagtcagattttaccgattcattgcctccattgaagcctcttttctcagattctacgcttcactgtcncttcnccatgtgcgtctcctcntcctccgtttcttcagatcttgctttccggtgacggttttaatcttcntcnctctggtaacacgtaataagcatggcttatctgaagtagacatgtagtgttangctaaagactcctcttttcacttctgtcgtgttnagtttgtgttggtttaangctttaagccaaaagcgttgttggtctgacaagatggcantggccgtgttttaaaggctcctcctaaaaangggaaatttcaanggggccaanaaataatggaanggaaacaattttnggcaccatct

SEQ ID NO: 10958 - DNA, 452 bp, Arabidopsis thaliana
  unsure at all n locations
  Clone ID: LIB24-019-Q1-E1-H5
gccnacggcacaggtaagcngnctcgngggtcgacgcangcntctacactnactcntactatgtcaagttagcttagccgtctcaccagaaagctaaccttacctcacaaacattgattgtgttacactaatctcttaaatagagagccgtaatttctacacactctgatcgctagatggaaacggagatatcaggaatggataatccagctatgaccttggacgaggtttccatggaacgcaacaagagcttcgttaaggcattgcaggagctcaagaacttgaggcctcaactttattcagctgctgattactgtgaaaagtcttatcttcatagcgagcaaaagcaaatggtattgggacaatttgaaagactacactgtgaaggctctagttaatgctgttgatcaccttggaactgtagcttccaagcttactgatctttttgatca

SEQ ID NO: 10959 - DNA, 430 bp, Arabidopsis thaliana
  unsure at all n locations
  Clone ID: LIB24-020-Q1-E1-A1
agggagatgaattgaaagtganagtaaacaagttgacatctataaagactcagcttccanattcgtantactctcttcctttttgtcgtcctaagaagattgtggacagtactgagaatcttggtgaagttcttcgtggtgaccgaatcgaaaatgctccttattcgtttaaaatgcgtgaggcgcaaatgtgtaatgttctcggtcgtgttatgcttgatgcaaagtctgccaaagcgtttaaagagaagattgatgatgagtatcgagttaacatgatccttgataatcttcctctagtggttccgatcgaaagaattgatccgggtcagggttctccttctgttgtgtatcagctaggatatcatgttggtcttaaaggccagtatgaagggagcatagagcaaaagtatttatgcacaatcacntg

SEQ ID NO: 10960 - DNA, 467 bp, Arabidopsis thaliana
  unsure at all n locations
  Clone ID: LIB24-020-Q1-E1-A10
tttacgcctgncggtaggcgtccaaaaattccaaggtcgacccacgcgtccgcncacgcgtccgcaaaaaaaaccttcgtgtgcgtctctcgtcctctaaattgtcgaaaatgctggctangctcgctgcgaagcgtcttctcgagatccgtcaagttttccgtcaaccaacctctcaggtgactcgtancttatcgacggccttaaactaccatctggattcncctgataacaaacccgatcttccatgggagttttcagaggctaaccaatctaaggttaaggagattctctcttactatccatccaattacaagcagtccgcagttattcctctcctagatcttgcacaacagcagaatggangctggctccctgtttcaacaatgaatgcggttgctaaagttatagaagttgccctatccgtgtttaagaaggtgcaacattttaccaatgttnaacaaagc

SEQ ID NO: 10961 - DNA, 485 bp, Arabidopsis thaliana
  unsure at all n locations
  Clone ID: LIB24-020-Q1-E1-A11
ttacaactgcnacgccgcccggtaacggtcnaaggnccacgggccgtccnaanttncaacagatatgttgctgactgctgtaaactctgagacaaatctctcacagactgcatcaactgcagaaggaataaaaatggaggcaaaaagccagataactttgacaactgagtctctagggtctggaaactccgacattccctctcagcaggatctacaaacttctcgtgaagtttcagttatatcaatttctgaagctcagagactgatttctctgttctttgctttgtgtaaaaagaaacctagtctccttcgacttgtctttgaagtttatgggagagctccaaaaatggtaaaccaggcttttcatcgacatatacctatcctaatacgagaattangttcatcttatacggnactactccaaataatatccgaccctcctaaggggaantgnaaattattgncaaaatgtgtttccaanaatt

SEQ ID NO: 10962 - DNA, 406 bp, Arabidopsis thaliana
  unsure at all n locations
  Clone ID: LIB24-020-Q1-E1-A3
acaagcaccggaaccacctcttcaccacccaaaacccaccgagcaatctcacgatggtctcgatctctccgatcaagcccgtcttttctcctctatcccaacctctgatctcctccgttccaccgccgtgttgcatgcggcggcgataggtcctatggtcgacctagggacgtgggtcatgagctctaaacttatggacgcttcggtgacgcgtggcatggttttagggcttgtgaaaagtacgttttatgaccatttttgcgccggtgaagatgccgacgcagccgctgagcgcgtgagaagcgtttatgaagctactggtcttaaagggatgcttgtctatggcgtcgaacacgccgatgacgctgtatcttgtgatgataacatgcaacaattcantcgaacc

SEQ ID NO: 10963 - DNA, 489 bp, Arabidopsis thaliana
  unsure at all n locations
  Clone ID: LIB24-020-Q1-E1-A4
caactgtttacgcctgcccgtgccggtccnaaaattcaaggggtccgacccacgccgtcngccgcgcncgggccggctccaagtccaactccctccgcccgctcccgccttctgcggccngttccanctcccgcaaccnacgcccgctccaagctncaagctccncctaacanagtggaagctctaggaggaaatggtggaacaatatttgaccatggtgctttcgatcatgtaagaaaggtttatattggtcaaagtgattctggtgtagcttatgtnaagttcgaatacagnaaagatgggaaaagaganacacgggagcatggaaaaatgacagtgttaggaacagangantttgaggttgagtctgatgattacatcacatcaattgaagtttctgtcgacaatgtctttggntttaagagtgaaatcgtcacttctcttgtcntcaagacctttaagggaataacctcacaaccttttggnatg

SEQ ID NO: 10964 - DNA, 415 bp, Arabidopsis thaliana
  unsure at all n locations
  Clone ID: LIB24-020-Q1-E1-A6
gncctcactctctctcgcgtcagtcgttactgctgcaacaaatctgtatttgatttctccattaacaacgaatctaaatggccgctgcttttgcttccagattaacccgaggaggacgttcattgcttggaggtcttaacaatggtggttcgatgaattcttctaatggaatgatgaatgaaagtatcctctctcagcagcagcagagaaggacatttattcagatggggactgttctcaaagtcgtggacaattcaggtgcgaagaaagtgatgtgtattcaagctctaaaggggaaaaaaggagctagacttggagatactatagttgcttcagtgaaaagaagcgatgccaaacggtaaagtgaagaaaggagccggttgtgtatggtgtggttgttcgtgctgcgatgcan

SEQ ID NO: 10965 - DNA, 410 bp, Arabidopsis thaliana
  unsure at all n locations
  Clone ID: LIB24-020-Q1-E1-A8
gctagaggctatcanaagaaaggattcaaggatcnattagacgaanaggttaatgttattctcaaagtagaagacactttgaatttggtgtctgctttgaatgaggaggttgagantccgtgttttgaggaatattgtgtacaagtaattgaagtggaanaagaanatcatgaagttgttgtggggagctgttttttgggaaatggagatggagactcagtgttggcatcagagacaatagattctcatgactctagtgtatggaaggtctactgggattcgttctatggacgangttatttttacaattttaagacacaaggagtcaaaatgggagccgccacttgggaatggagcatccgancttatacccgatgaangtcacaacttgagttaattggtcatatnaa

SEQ ID NO: 10966 - DNA, 386 bp, Arabidopsis thaliana
  unsure at all n locations
  Clone ID: LIB24-020-Q1-E1-A9
gcccacgcgtccggctaaaatctttttcacactcttcttcatgttcaagcaatgggaaacctctgttctttgtttactccgccaaaacccgtgaagaaaagaaaacccatcacaaaaagacaatcttctatcggagcttcttcttccgggtcgggtcttaatagtaaccgttggaacaaccgggtcagatcatcttcttctagaagagacaacaagttcgaagatgctttgattcaagaacatgctcttgctgctgctgctgttttgttccgacagcaaaacggtggtggaggatcgttgccgtttgatcggtcggcttcacaacgttatcaaggttcttgttcgaagaagaaccagttgcctcgaagctcgagttcgangtcaaa

SEQ ID NO: 10967 - DNA, 468 bp, Arabidopsis thaliana
  unsure at all n locations
  Clone ID: LIB24-020-Q1-E1-B10
tacgccgncgtagcctccaaaattcaaaaggtcgacccacgcgtccggctttgcaaaaaatccaagaggcgatctttttttgaagtaacaattgaaccctaattttctctctttcgatctcaccaaatcttccgatttcgtgtttanattcctcaatcttggtacctcggagctcaaaaaaccctaagagaaaccccaaatttggttgtcaggggaatgtcttctgaacatatatcaggtggtggagcttcaaagacgaagaaacataagtggagctcaagccagaaccgacccaaaccaatgggagtttctagacaggaacgatctgttcctcttgtatctccttcgaactcgtttgcgtcggaggacgatcatcacatgttgaagataagtctgagctccatttcgaaagcttganggtaaggaacttgaagccggaactaaaatctgagccttgaanaaggtttg

SEQ ID NO: 10968 - DNA, 455 bp, Arabidopsis thaliana
  unsure at all n locations
  Clone ID: LIB24-019-Q1-E1-G7
taattctaagcgnanactcannaanccgnctcgtgggncnncncaannctctaaattnagtcatattatcccgctccttttctctgattttgaatcgaacccttaatacccagaaatctcacggttccgaggagtgggtttttgggggttagggttttcgagagatgttgaatgtcaggttcattgatgaatctgttttctctctgcttcaagccattcgggcacgtctgtgataattccgagctggatcgggtggtggtggtggcgtttctggtggaaccggcggtgaaggcaaagacggattgctttggttccgtgatctcggtaaatattgcggcggagatttctccatggctgtgattcaagccaatcaggttcttgaagatcagagccaggtcgaatccggtaattttgggacttttgttggtgtttacgatggtcatggnggtcctgaa

SEQ ID NO: 10969 - DNA, 471 bp, Arabidopsis thaliana
  unsure at all n locations
  Clone ID: LIB24-020-Q1-E1-B2
acggcaccggtccacaaactcacgggtcgacccacgcgtccnngggacgcgtggggaaagaaccaagtgcatcttgttaggatgttagtaagatgctggangagatttgctaaatacaagaaatctacttttgtcntggctagagcatatcatgagttggggatcaatgaaaaatccattgagtcagtaccatttgagcagtttgccattcaantgaactcagtttctgtaattcaaatggtcaaagcattgcttgatcgcttggagatccgactcactctatctaaggcatccaatgtggagaacattaatcatcttcttaagcacatctttccgcctgttcgaagagggaaatcacccagtcccatgagtaaaggcgagcanaantcacccaattccaagatgggatatcaaaaacttaaaaanattgcgagatatccagctagaatttttctttgtgcctacatgatc

SEQ ID NO: 10970 - DNA, 558 bp, Arabidopsis thaliana
  unsure at all n locations
  Clone ID: LIB24-017-Q1-E1-G5
tgttagccgccggtaccggaccaaaattcncgggtcgacccacgcgtccgagaggataaaaacgcatggttaagagatgacgaattcgcacgtcaagccatagctggaatcaatccagtgaacattgagagagtcaagacttttccaccggtcagcaatcttgaccccaagatctacggtccacaacactccgctcttactgacgaccatatcattggtcacctcgacggattctccgtacaacaagcgttggaagagaatagattgtatatgttggattancatgacatattcttaccgttcctagaccggattaatgcgctagacggacgcaaagncctaatggctaactccgaactaaccntccttccttggactccgtcctaaggnaacaacnttaaagcccnggttaanccnaattgganncctaaaagnccttccccttcccccaaaggggtcccaaaaaancattccggttcccaaagnccgttntggcctttaaaacccttccaannttcnaatgggcaaancctccnnaaaatttggggatgtttgggc

SEQ ID NO: 10971 - DNA, 548 bp, Arabidopsis thaliana
  unsure at all n locations
  Clone ID: LIB24-017-Q1-E1-G6
tattagccngcccggtaccgaacaaaattcncgggtcgacccacgcgtccggaacaaannnnnnnnnnnnnnnnnnnnnnnnnnnnnnnnnnnnnnnnnnnnnnnnnnnnctaacaagttcccggagaggcaacccatcggtacatcggctcagtccaccgacaaggactacaaagagccacctcctgcgccactgttcgagcccggcgagctcagctcatggtctttctacaagagcccggaatagctgagtttaaccgccaacttcctttgtttcctcctaacatcaactngtttttgactgttaatgggggaagtttaagaagaancaaccaaaacaatngttgttgccttcccngtttgggnaatccnaaagggtaaancccccttnggggcctttttgggttggnaaatgaattcntttggcccccttgttccaaaatggtnactggcttgggaaaattttcaaaggttgggancaacaattaaaacccctggcctgttaaaaaattcggttccggttccttgggctccggaaanttaaaccc

SEQ ID NO: 10972 - DNA, 499 bp, Arabidopsis thaliana
  unsure at all n locations
  Clone ID: LIB24-017-Q1-E1-H10
ggtcnaaacaaccgggtcggncacgcgtccgacanacgtccggagcaaacttttattatgatcaagcctgacagcgtcnagaagaggactcatcggtgaactcatctgcacggtttgtgaaagaanggtttcactttgaaaggtctgaagttgatcantgtaganagatcttttgcnganaagcactacgaagacttatctnnaaagtcnttcntcaatggactcgttgactacattgtatccggccctgttgttgctatgatctgggaaggaaagaangttgtcttgaccggaanaaagatcattggngctaccagcccagcagcttctgagcctggaactatccgtggggactttgctattgacattgggcaagggaacgtgattcatgggtaattgactcctgtccaagaattgcaaagaaaaggagaattgccctttgttgggtcccctgaatgggancctgtcaacctgggcaaaaacaacctttaaccccntt

SEQ ID NO: 10973 - DNA, 438 bp, Arabidopsis thaliana
  unsure at all n locations
  Clone ID: LIB24-017-Q1-E1-H2
gnatttccacacgattttccctgtgatttcttcatttccggcgacttaaaacggtgtctagcagaatgagccgancacaagatccaccccgaggtttcttcccatttggaaatccctttcggatgttatcatcaangggatcagatttatcgccatggctactttctctattgaacggctttgagctacgtttggaagagagactgaagaaacttatgcctaagaacaaagatgacatcctcactttatcctggatgaagctagctatggagtcactctgcgagactcataagaacattaacactctcattactgatctccagcttcctgtctctgattgggaagagaaatgggttgangtttaactcaacatangcgttaggttactaaatttccgtaatgcctttacctctgaactcaaaagtctcaacaagggag

SEQ ID NO: 10974 - DNA, 487 bp, Arabidopsis thaliana
  unsure at all n locations
  Clone ID: LIB24-017-Q1-E1-H9
tgttattctgccggccccggtccaannaacccgggtcnacccacgcgtccgggcaataatggcatcgttcaagtctttcgcagccgttctcagtgtcctttttcttgccatgactgctatagaaacggtagttcaagcccaagaatgtggcaacgatctagcaaatgtgcaggtatgcgccgccatggtgctgcccggttcaggcagaccaaattcagagtgttgcgccgcacttcaatctactaatagagattgtctatgcaacgctctccgtgcagccacctctcttccttcgctttgtaaccttcctcctgtggattgtggtataaatgcttaagttaagctacgagtcaattccaagatgatcaaggaaaacgggaaaataaagaataatgagaaatatccaagtcctaagttttttcctcnaacttccgcttttacnataatnaaattctagtangntttgctaaaaatttagatactacta

SEQ ID NO: 10975 - DNA, 467 bp, Arabidopsis thaliana
  unsure at all n locations
  Clone ID: LIB24-018-Q1-E1-A11
accgaanccaaaaattcccncggtcgacccacgcgtccgaccatgtttgatgtaccggtgcagctccatcgattggaagccatctccggtggtagctctggccaccagcgccgacggttctcangtcgccgcagctcgtgaggatggttctcttgagctctggctcgtctctcccggtgcttcctcttggcactgtcagctcatcattcatggagatccaaaatcgagaatctcgcaccttgcgtggtttggtactggttctaaaggttcttcttccgctagattgttttcttcgancattgatggctcaatttcagagtgggatcttttcgacttgaagcagaaggtcgtcctagattcaattgggttttcaatctggcaaatagctctggcccctatctctattgaagcagaaaagtaaaagaanctaaagctgattcaagaatggatacttgagtgnaaaatca

SEQ ID NO: 10976 - DNA, 483 bp, Arabidopsis thaliana
  unsure at all n locations
  Clone ID: LIB24-018-Q1-E1-A12
tttagccgccngtaccgaaccaaaattcgcnggtcgacccacgcgtccgaccacgcgtccgcccacgcgtccgaaaggaagctcctttttggtatgtatgcattgcctctgttatctatttgcgaaaatctgaagattggtttctctaccgagtgttttatactttgatacttcatctaaagctctaggcttttcttattttccttgtttggattgtttgttttcgctctagggtacgccaaagaggacgctctctgaaaaaagaagaagtggttcgtaacataatctgaacccgaggacacacacacgatgatgcattcgacggtgcagcatgggggaaacaagagtggcaagtcaaatgtatgggctaatactaacttggcanagacagtggcagctgtanatgagttcaaatttgggttcccatcaagcgggttaaccactgtgtcaaacaaattgtnggggaaaggcacaggnaacgcg

SEQ ID NO: 10977 - DNA, 476 bp, Arabidopsis thaliana
  unsure at all n locations
  Clone ID: LIB24-018-Q1-E1-A3
taccgcgcctgtaggtctaaaaatctcgggggccnccaancgttcngaanacgcgtccgctttgaaccggaggtttcctccaccctttgaaaattccatcatcgattgacctatagctacgagatctgcttttcaatttgatgctcttccattagttagaaaagttgcttttgatcggagcaactatggggtcgtcttttgagaccatcgatatcgctaccagtgctcggagaattggcgtagataatcgtatttctctcaaattttacttcaggatcgctgataatatcctcaaacaggccaacatatttcgggcagagaagaatgttattgatttatatgtcatgcttctgcggttttcaagcttggctctcgagactataccgtcccatcgaagattacagaacatctctaaaaagccataaagagtanttgagaatgggactactagatgtcctgaccgngctggagaagtt

SEQ ID NO: 10978 - DNA, 428 bp, Arabidopsis thaliana
  unsure at all n locations
  Clone ID: LIB24-018-Q1-E1-A4
gcacaccactcagaggaacagagcttaacggcgactatggaagggattggactgcgaagttgcggagatgatattctccgtctcggattcaagctacgcggtggtaccggtggccggattcagattctccagcgagctatggtgataaaaatgagagaccgtagcaagaacaggaaaccattgcagagaggacgaatgctcagtatcnaagcgattcaagcggttcaagccctgaagcgagccaannnnnnnnnnnnnnnnnnnnnnnnnnnnnnnnnnnnnnnnnnnnnnnnnnnnnnnnnnnnnnntgatcgtgtantcanttcnaaattccgtcggctcttganaattcgatattggtcgccnttccangagaactttntacggccaaaannnagngctctccangccctcanaggttttttgga

SEQ ID NO: 10979 - DNA, 437 bp, Arabidopsis thaliana
  unsure at all n locations
  Clone ID: LIB24-018-Q1-E1-A7
tgattactgattcttcattgacggtaggagtcaccacttttggcggcgattccttgttctctattttttttgcacaagcaacatttagcttctgcaaactccagttcatctctcaaccctcatatcgccgtgttttctcgctctagtaccgcgagctcggacgaaccaggaagcaatccgttaatctagaagcggtgttgagaagatgacgattacatcaaatatctctgtacagaacgataacctcgttgttcaagggaagactatccttaccaaaatccctgacaacattatcctaactccggttaccggtaaatggattcgtttccgggttcatttataaggcgcgacgttttgaacaaagcaaagaagtcctcaangtgttccccaatcggtgtattggaagggtcctcgggttcaaggtgctgtttcccggt

SEQ ID NO: 10980 - DNA, 404 bp, Arabidopsis thaliana
  unsure at all n locations
  Clone ID: LIB24-018-Q1-E1-A8
gccacatttctctttaacctcatctcatctcttagtcgagatcttcactttctgatgacaatagggtcgtttttctcttctctcttattctggcgcaattctcaggaccaggaggcgcagagagggaggatgcaggagatanatcttagtgttcacactataaagtcccatggaggaagagtcgcttctaaacacaagcacgattggatcatactcgtcatcttgattgccatcgagataggcttgaanctcatctctcctttctaccgctacgtgggaaaagacatgatgactganctcaagtaccctttcaangacaacanccgtaccgtatctgggtctgtccctggngtancgcngtgcctgcntcccaatcanacgngtttcgtctggcttcgacctgn

SEQ ID NO: 10981 - DNA, 465 bp, Arabidopsis thaliana
  unsure at all n locations
  Clone ID: LIB24-018-Q1-E1-A9
gtttcgttgcccggccgngccanaccaaaatnggccggtcnacccacgcgnccgcacattttctcattctctcctacaacaagtttccgccgctaagccactcactacgcagccatggcaaatcctgaccatgtttcagatgtgctacataatttgtcgattgatccaacaaccaaggctttagctcctgattctgaaacaaagttgcagggggcttatggcggaaacggtaatgacttcttgctcaatgatgagttagtggaggctaccaaaattggtaaacctagtcttttgtctaaagatggaggtgtgaccaaagacaanggatccacccttaagaaactcgggtaccaaagtgcancttataacgcaaaggggttcatatgggaatggtgcctatgcttatgggtactatcccccagnatatcagtacccaacacatggttacactgggaactatgctcn

SEQ ID NO: 10982 - DNA, 438 bp, Arabidopsis thaliana
  unsure at all n locations
  Clone ID: LIB24-018-Q1-E1-B11
actcgcgggtcgacgcacgcgtcngnatannntnctccgacactctccttctctttctccgaactcttcgatggccggtctactcaaaacgccgtctttacatctcacaccaactcttcttcatgctccttctgtaccctttaagcccttttgcgtatctttcgccggaggaagaaacgttagcgtctcactctctcgccgagcttctctccggtctgtctctagcggctatcctctccgcttacnaaacctcgtaccctttgcttcgggagaagctgagacgacggagacggaggtggaatcgaacgaacccgaagttcaggagacggatggtgctgttgatgtcgagaatgaaaatgccagtgctgaggagggtgaagctgangaagaagaagcagctgttatcacaagcgttgctgaaatccnataaagaaacct

SEQ ID NO: 10983 - DNA, 493 bp, Arabidopsis thaliana
  unsure at all n locations
  Clone ID: LIB24-017-Q1-E1-G12
agtcgccggcccggtccaaataccgggtcgacccacgcgtccgnangacgcgtgggcttgtaactcgcacaaccttatcgagtgaaagaagattgggtcagtagtgaaaaatggcgtcgattgcagcttcttctacctttcactcgttttgcagaaccaaaagccctaatctttcttcgacccaccttcttcctttgtcgaaaaacctcaactttcggaccagagctatcggaaatagccgcaattgcagttttgctgggtttataaaacaaaatcgccttggattgaggaagctttcgtctattggagaaggaggagaaggtgtcgctgtcgcagaggagcaaccgcaagagactgtctctgttcctgtctctccttcagacatgctcaacatgtttttccangcctgatgggaacttgaaccaaagcaactattnccaaatgtgacaaagggccttaaaaggataattgaanggagttcccaatttaaagg

SEQ ID NO: 10984 - DNA, 711 bp, Arabidopsis thaliana
  unsure at all n locations
  Clone ID: LIB24-017-Q1-E1-E4
aaaagccctggggnttttttaaacgttcccccngggggcccccnaggggccctaaancccgggggggttcccccgaaaaaaannaaatttcccccccgggggggggttcccggaaacccccaaacgggcccggttccccgggggatttntttccccgggggccaaaggggaaaggggaagccaaaaaacctnccgnaaccgaacaatttaaagcctttcctcccggaaaacaacaaatttttccctcccggggcttttcaataaaaattttcgggggggttaacaatccggtccctaaattccgtcctggataanggttgccgaaatttgtggttctcccgggtcaaagtcaaatgtcaggaatcacatatcaaatattgttcctcctccttctcgcctctgtctccttgtcgccggtcaaggttatggagcaagtagtgaanaagagaacattggctatgataaagccagatggagtctctggtaactatactgaagaaaatcaaaaaacgattcgtccgttgaanggctgggtttcaaatatccgtcaaagggagaatgcttaactcaagctngggacaaaggganaaaaaagctttccggcgtttttaacgaaagggagcaactcnatccaaaggganccnttttttccctcaanccttggtttacaataacnattgaacnaaanggnttgttggggcccccggtggt

SEQ ID NO: 10985 - DNA, 404 bp, Arabidopsis thaliana
  unsure at all n locations
  Clone ID: LIB24-017-Q1-E1-E6
gcaagattcgcattacctttcttataatcgccgagattgttcgagcctgaataatcaaaatggttgtgcttgctgctgccattgtggtcaagtctgggaaagtgattgtttccagacactatgtggatatgtcccgtatcagaatcgaaggtctacttgcagcttttcctaagctggttggaatgggaaagcagcatacctatatccgagacggagaatgtgcgataatgttatcagcctattgaagctctgttcctggctccttgttacaactaaagcagagtaacattcaagaagactggccacccttactttgctctcaaaacttgtacctgagtatccatgtcttagatgangaaggattccaggcatcttttgagccaatttgcattgatgaatcatan

SEQ ID NO: 10986 - DNA, 438 bp, Arabidopsis thaliana
  unsure at all n locations
  Clone ID: LIB24-017-Q1-E1-E7
gcttaaaatagaaccaaagagtaaacacttaagcaaaacaattttgtcctactcttaggttatctccaatgaagaacttaaagatggttttcttcaagatcctctttatctctttaatggcaggattagccatgaaaggatctaagatcaacgtagaagatctccaaaagttctccctccaccatacacagaacaacctccaaaccataagccttctattgtttcttgtcgtttttgtgtggatcctctacatgttaacccgacctaaacccgtttaccttgttgatttctcctgctaccttccaccgtcgcatctcaaggtcagtatccaaaccctaatgggacacgcaagacgtgcaagagaagcaggcatgtgttggaagaacaaagagagcgaccatttagttgacttccaggagaagantcctgaacgttccg

SEQ ID NO: 10987 - DNA, 438 bp, Arabidopsis thaliana
  unsure at all n locations
  Clone ID: LIB24-017-Q1-E1-E9
gaacgatttagatttaatcgggaaaaagttcagtcagtgacactaatgttcgaatcgaacatggttcttcaaacactatcttcttcttctcctccaattcaccgtctctatcttcaccattctcagattctcccttcttctgggtcacccagcaagatttctcttcagatacatggaaggactttggccattcgatcttttcatgaaatttctgctagaggtttaccggctttgaacaaagcttccttgaagaagctaccaatcaaaggatctacctttctgctggggcagagcttgttgatggtttctgctcacccacagttggcagcaagcagcaagaaatcataaagcctgaaccgatttacgaagttggngaattatttgaacntaagtaatcanctttcctacntgcngtacaaanggggttccctggagttt

SEQ ID NO: 10988 - DNA, 452 bp, Arabidopsis thaliana
  unsure at all n locations
  Clone ID: LIB24-017-Q1-E1-F10
gaaaaagaagagaggaaagagataagtgaaagcaacttttaatctgatttttgcgagtgaggagaggatcatcatttcataggagtgagagaccccattaataccagaagcagtcagagtttctcaagtaattgtaccaaattctctctattcttcttctctttcattttagatattttctcttacgcagactcattgctttcctctctccatggaagctactgagttatgatccttaccctcaccggtctttaactatgcttagaaacaaacctagagcagccgtgacgactaagaaacaaacatctctgttaatggctgatnaacctccacctccaaaagcctaacactttgccactgcncaacaatctctctttaagctcctccccaaagttttaaggttttcaacttcnnaagaatgaattgaatggactccccctttgggctccnga

SEQ ID NO: 10989 - DNA, 373 bp, Arabidopsis thaliana
  unsure at all n locations
  Clone ID: LIB24-017-Q1-E1-F11
cgccacgtcagcttatcaagtcgaaggcgagactcatcaagacggtcgtggcccaagcatttgggatgccttcgtcaagattcctgggaagatcgccaagaatgccacggctgagataacagtggaccagtatcaccgttacaaggaagatgtggatttgatgaagaaactgaacttcgatgcttacagattttccatttcatggtccaggatattccctganggaagtggtaaagtcaactggaaaaggattgcctattacaatagattgattgatacatggttcaaaaaggggattacaccttaagctaatcctgtaccactacgatctttccaatggctttgggaaaacaagtttaaagggctgccttgg

SEQ ID NO: 10990 - DNA, 441 bp, Arabidopsis thaliana
  unsure at all n locations
  Clone ID: LIB24-017-Q1-E1-F2
gatgaactctaagaatcgcataaacaatgtcggggaaggtgttgatatcgaaatccctgacactgctcatcagattagcagcgattcatggtttcaggcagcgttcgttctgacaacaagtataaacagcgcatacgtgttgggatattcaggaacagtcatggttcctttaggatggattggtggtgtggttggtcttattcttgctactgcaatctcactctatgcaaacactctcgtagccaagcttcatgagtttggtggcaaaagacacattcgctatagagaccttgcgggattcatttacggtagaaaggcttattgtcttacatgggtgttgcaatatgtcaatcttttcatgattaatttgtgggttcatcatactagctgggttccgccttaaaaggctgttangtgcnttttagggatgatnaaggccat

SEQ ID NO: 10991 - DNA, 442 bp, Arabidopsis thaliana
  unsure at all n locations
  Clone ID: LIB24-017-Q1-E1-F4
gaccacgcgtccgcccacgcgtccgcgctacactcctcttcctctacgtcaccgtcgctactgtcatcggccacaagaagcaaaccggtccttgtgacggcgttggtttacttggtatcgcttgggctttcggtggtatgatcttcgtcctcgtctactgcaccgccggtatctctggtggtcacattaacccagctgtgactttcggtctgttcttggcccgtaaggtctctttggtgcgagctcttggttacatgatagctcagtgtcttggagccatttgtggtgtgggtttcgtgaaagctttcatgaaaactccttacaacactcttggtggaggagctaacaccgtaactgacngttacagcaaaggaactgctcctcggggctgaaaataatgggaactttcgtccntggttaanaccggttttctcctggaaan

SEQ ID NO: 10992 - DNA, 484 bp, Arabidopsis thaliana
  unsure at all n locations
  Clone ID: LIB24-017-Q1-E1-F5
gcttgaattaaaactgtttttttactacttgtagtaaaaccatgaagcgatcatccttggtcgattcttgttcatattcgagaatatttcgcagtattttctgtctcttanccttttgtatcttcttcttgacaacgaccaatgctcaggtaatgcatagacggctctggccttgggcattgtggccacggccgtatccacagccgtggccaatgaatccaccaacacctgacccatcaccaaagcctgtcgcaccacctggcccatcatcaanacctgtcggcaccancagggcccatntccatgcncggtcaancaacnaccnaanggcctcaaagncagggccccccaaccaagccaccctaagnccaatcntccaatggcccancnaacgaaccaaccctaaaggccttcaacccgnnaanccaagnaaacnaaccgggccagaaaccaaaaaggccaaggggccaatcaaccaagcngc

SEQ ID NO: 10993 - DNA, 462 bp, Arabidopsis thaliana
  unsure at all n locations
  Clone ID: LIB24-017-Q1-E1-F6
tnnnnnnnnnnnnnnnnnnnnnnnnnnnnnnnnnnnnnnnnnnnnnnnnnnnnnnnnnnnnnnnnnnnnttatccttatccgataaacccacaaataaagacagactcttttgttctttaaacagagattgtaaatccagagccgccggaaaatacaaccgccggtttactctcaggattagttgatattattcgattttaaaaatcagtaggaagaagatgaagtacgtgcttgtaacaggaggtgttgtgagtggattaaggaaagggagtaacagcaagtagtattggngttctccttaaagcttgtggtccttccgagttacttcnaanaaaaatccgattccttaacntggaacactggatgcctgggaactaaaggtctccaattttgaaacannggtgaaagtttttggccttggaccnaangggtggttnaanggtgggattcttgggatcctt

SEQ ID NO: 10994 - DNA, 429 bp, Arabidopsis thaliana
  unsure at all n locations
  Clone ID: LIB24-017-Q1-E1-F8
tcagagcaaaagtggaattggacaaggtcatttttactactttctctgggttgggggttctatgatacttgtactggattgataatgagtatcaacagagatgaggctcttagagccaaagatcttgcggagggtttgatgaaaaagaccgattttactgctgctcgtaagcttgcaatgaaggctcaaaaaatggattccagcctggagaacatatctcgtatgataatggtttgtgatgttcactgtgctgcaacggagaagttgtttggaactgagatggattggtatggtattcctcangttgagcagatcgctaatgatgttatcatcaagaaacatacaagaggcttgcgcttcttctccaccctgacaaaaataagctccccggtgctgaatctgcttttaaattgaattggtgaaacccaa

SEQ ID NO: 10995 - DNA, 479 bp, Arabidopsis thaliana
  unsure at all n locations
  Clone ID: LIB24-017-Q1-E1-F9
ngttactctgccggcacggtccaaaataccgggtcgacccacgcgtccgatttatttttccctttcactgtagatccttttttccgactcacacactttcgatattttcttttgttttcttcaaaaaagacatattttttttgctgggactatcaattggggtccgtcgccacgccacgcgccgagctcgcaatatatcgaaagcaacgatctaggaaggatcttaaaaatcctacttggccacaaatttttgctatttttattattttccgtgtttaatttctgattcagacaggaagattaatattaagcactagttgtgcaaattcacaattttttttttgtggatggaaacaaatttctggcacacgtattccaatccaaatcgacaatatacgcgtctccgaaggatangttttggggttcaatgagaaacanagattggtttggggttcccntaaacnagggggggccctaag

SEQ ID NO: 10996 - DNA, 448 bp, Arabidopsis thaliana
  unsure at all n locations
  Clone ID: LIB24-017-Q1-E1-G1
gccaaatcaacaaaagttggagacattatgactgaagagaataagcttatcactgtgacaccggagaccaaggtcttgcgtgctatgcaactgatgacagataaccgaatcaggcatattccggtaatcaaagacaagggcatgattggaatggtgtccataggagatgttgtccgtgcagtggttcatgagcatagagaggagcttcaacgcctaaatgcgtatattcagggaggttactagatcttgaataatggaaagaaaagagttccctgttgtgtcgtctgggtcttgtgctgctgaatctgaaaagcntccagatcagtgtaatatgcagtcctccgtgttaatgttggttgttggttgtgttttgatgttttggtgtttgtttccgttggttaacttgtcaaaaactaaaggccttgttgctgcttcccctccttgcccc

SEQ ID NO: 10997 - DNA, 367 bp, Arabidopsis thaliana
  unsure at all n locations
  Clone ID: LIB24-017-Q1-E1-E12
cgtggggaagatcctctcattcttatccacgagaagaaaatttccaatataaacgcaatggtgaaagtattagaactggccctcaagaagcaaaggccgctgctgatcgttgctgaggatgtggagagcgatgctcttgccaccctaattctgaacaaacttcgtgctaatatcaaggtctgtgctgtgaaggcccctggttttggagagaaccgaaaggccaatttacatgatctagctgccctcactggagcccaggtaataacagaagagttgggtatgaatctagacaacattgacctcagtatgtttggaaactgcaangaaaggtaacggtatccaaaagatgatactgtttgttcccnaa

SEQ ID NO: 10998 - DNA, 439 bp, Arabidopsis thaliana
  unsure at all n locations
  Clone ID: LIB24-017-Q1-E1-B6
gcctaaaccctagctgagtagcttcttcctccccaattgctatttctctgcctccgtgtgctgagaaccagaacgaaaccctagcaaaatatcgccatgggtaaggtcaaaggaaagcatcgtttggataagtactatcgtctcgctaaggaacgtggattccgttctcgagcttcctacaagcttcttcagctcgacgccaagtactctcttctccactcagctcatgccgttctcgatctctgcgccgcccctggtggttggatgcaagtcgccgtcgagaaaattccccgtcggcagcctcgttctcggtatcgatcttgtcccgattctccctgttcgtggctgtgttacnatgacgcaagatatcacaaggactgagtgtaaatcgaaagattaagcangtgatggagcaacatgggtgttagtggctttaatt

SEQ ID NO: 10999 - DNA, 447 bp, Arabidopsis thaliana
  unsure at all n locations
  Clone ID: LIB24-017-Q1-E1-B7
gggaagaggtcgaaaacatcaaggaaaggaaaaaaagcatggagggctaacattagctccgaggacattgaagatttcttcgagaaaactaccagagatgctctctccggtggcaatctctccgctgctcccagcgaagacttgttccacgtcgataaatcccatgaccttccggtgaagcgaaagattgagaaacatanagagagagtgctccgtgttgacagtatcttaaagaagaatccatttgtccagttagtgccatcttcaaagccaaagttgaagaaaagtaagaaagacaatcgttataagaagacaaagcacctaaacaaggttcaaaaaaagtgttggtgacgaatctgtaatgggccgactttgttggggtgatgatataaanggagaacatganagcaatcctagaagntttcaaaaatcctcgattaatttcag

SEQ ID NO: 11000 - DNA, 434 bp, Arabidopsis thaliana
  unsure at all n locations
  Clone ID: LIB24-017-Q1-E1-B9
agatgtttacgtaatccatggacggtgggtgttggttttcttgctcaatatatgatcaagccaattctaggttttctcattgcaatgactcttaagctttcggcacctcttgcgactggccttatcctagtctcatgctgccctggaggacaggcgtcaaacgttgctacttacatttccaaggggaatgtagcgctctctgtactcatgacaacgtgttcaaccattggggctattataatgactcctcttcttactaagcttcttgctggtcagcttgttcccgttgacgctgctggacttgctcttagtacgttccaagtagtgttggttcctaccataattggagttctggcaaatgagttctttccnaaatttacgtctaagatnataacagtgacgcctctaancggagtcantctgactaaactgct

SEQ ID NO: 11001 - DNA, 429 bp, Arabidopsis thaliana
  unsure at all n locations
  Clone ID: LIB24-017-Q1-E1-C11
cgactacgtttccactgttctgcttcttcttagcctccttatcttcttgagtcagcgtactgattctgcctctatcgtcaagtctcttcctggttttgatggccctcttccctttgaactcgaaaccgggtatattggtgttggtgaggaagaggaagtgcagttgttttactactttatcaagtctgagaggaatccacaagaagatcctcttctactctggttaagtggaggacctggttgctcttctatctctggtcttctttacgagaatgggcctgtgaatgtgaagattgaggtttacaatggaactcttccttccttggtctctactacatattcatggactaaggtttcgagtataatatatttggatnaacctgttggnactggnttctcctantcaagaactaaacttgttacaaaccc

SEQ ID NO: 11002 - DNA, 542 bp, Arabidopsis thaliana
  unsure at all n locations
  Clone ID: LIB24-017-Q1-E1-C2
gaatcaaaaagcttttaacctcagccgttaaatctttctccgatcatgccgaccagaaacatcgccattggtggagtccaagaagaggtctatcaccccaacgcacttagggcggcgctcgctgagtttatctcgactttgatcttccgtcttcgccggctcaagctccggaaattgctttcaacaaagattactggacaatgggangcaaccaactcccttcccgggcctcngtccgcccggctggccttaagctcaatgcntttcnggtccccctttggtccgnccggtccccccggttnggcggctaaacaattttcccggggtngggccaacggtttaanccctggcccgtttaaacctttccgggnngtccttaaaccccgggtgggttaaaaaannaattcctnccttccngttggggaattcccccnaanngggggatttggccccaanncttncttggggtncccntttnccgcgcctttggntttccccccccntaaaccctttnggccaaccgggtggggcnaaagcccaaa

SEQ ID NO: 11003 - DNA, 429 bp, Arabidopsis thaliana
  unsure at all n locations
  Clone ID: LIB24-017-Q1-E1-C4
ggcttctccgatggttaccaatcgcgtagacgtcttctggcacgaaggaatgctccgacacgacgccgtagaaggcgtcttcgacactggatacgaccctggattcctcgacgtattggagaagcacccggagaacgccgatcgcgtcaggaacatgctttcgattctccgacgcggtcccatcgctcctcatgtcaattggtttaccggtcttccagcaatcgtttcggagcttctaatgtttcacacttcagagtacattgagaagctagtggaggcagataaatcaggagaaaggtgtgaaattgccgcaggtactttcatgagcccaggctcgtgggaagctgctctcttgcagctggaacaactctttcagcaatgcaacatattcttgattgccatgggaaaattgcatatgctctggtacnc

SEQ ID NO: 11004 - DNA, 480 bp, Arabidopsis thaliana
  unsure at all n locations
  Clone ID: LIB24-017-Q1-E1-C6
tttagcctgccggtaccggncaaaattcncgggtcgacccacgcgtccggcgaagccggagaatccttacagtaggaggaggaggaatctcctctgccatcagatttgggaaaataacaagacgactccacgtggtgggatctcgaagaaacacgttatgagttctagcagaagcgctttgacgctagctatggctgttgcggctggtgtgatgaccggagaaggatcttcttccggaggtgactcgtcgccgggatnaagtccgacgacttctggatctcctccgaggcagctacatcatcattcaacancagatgaaganncttcctccgttgtacccnaggattcaagggccttttgnnaattggactncgcccnatccgccttngggttttggtgcctgganaatcntttccggntggctggatttccnaaggggtttcccgggaacggcaattggaattgggtttaaaggncccc

SEQ ID NO: 11005 - DNA, 431 bp, Arabidopsis thaliana
  unsure at all n locations
  Clone ID: LIB24-017-Q1-E1-C7
ccggagaatccttacagtaggaggaggaggaatctcctctgccatcagatttgggaaaataacaagacgactccacgtggtgggatctcgaagaaacacgttatgagttctagcagaagcgctttgacgctagctatggctgttgcggctggtgtgatgaccggagaaggatcttcttccggaggtgactcgtcgccgggatcaagtccgacgacttctggatctcctccgaggcagctacatcatcatcaacatcagatgaagaagcttcctccgttgtatcctaggagtcaagggtcttttggtaatttgacttcgtctcagtcgtcgttgggtttttgtgcctggagatcgttttcggtggctgattttccgangtgttttccggctacnggcaaatgggattgggtttaatgactcntaagaaatga

SEQ ID NO: 11006 - DNA, 433 bp, Arabidopsis thaliana
  unsure at all n locations
  Clone ID: LIB24-017-Q1-E1-C8
gaaagttctctcctttcctttctaaaggaagaagaaaggctttatctctcaaaaccctcatccacaaaatcccctttaatccgctaatcagagggtttttctgtttttgtgttgcttcgttactacggttacattcttctcttccccttttgatttcaaagaaccctcttgataccttaagaagaggcaatttgaagttttcttcacagatccgtcttagctctttctagagaatggcggatttgataccattttatctgaatatggtggcgtttctatgtactggttggagctattgctttggcgatatttcaatatctacaggcatcttttgaattacacggaaccaacttatcagagatatatgtacgcattatccttcatggtcccggtttaagccntcaagtcatcctggtccctgggttaccaaaaa

SEQ ID NO: 11007 - DNA, 446 bp, Arabidopsis thaliana
  unsure at all n locations
  Clone ID: LIB24-017-Q1-E1-D1
gagcgatggaacaagaagaacgttatcagtctcgtctcaaagtctcatcatcttccggcgccgattacgccaccgttacctgagatttaccgaatacctaatcctccaccaaagcttccggagatctcaattcctccgacacttacgctctctccatctcccaaacactccaatttcgtcaatttcctcgagaacaatctccctcaccatcaaacactaacgccacaaactcttcttggattcctccgttccaagatccgtaaccatccgctctacgctcattatgacttcgccgtctttaattgggcaagctacactcgacactttccgtcatgatcacgattctttcctctgggatgtcgagatnactcgccgccacgcaccggtttgacgatctttatcgtcctccccncttttgtanctgcgaatccaaggtccttgttccc

SEQ ID NO: 11008 - DNA, 450 bp, Arabidopsis thaliana
  unsure at all n locations
  Clone ID: LIB24-017-Q1-E1-D2
aactccgtgacaaaagatagtactttcatgtctgttttggtttcatccaaaagtatcaaatttgtgtgatcttctccagaagaaacttgaggaactttaagctaaacctctgtagttttcagattgattcgttggtggaaagcgtctaaattttgcgtaaatggcggcagctcttgtacgcagattctgccggggatcatcttttccggtctctggtcatggatataggatgctatcgacggttgaaaatgtatctgaaagtggtaaatcgatgaatctatactctgctattaatcaagctcttcacatcgctttagagaccgatcctcggtcttatgttttttgggggaaagatgttgggatttgggtggtgtcntcccgatggtacaaacaaggattaagctgaaaccgtttttggggaaaatccccgaanttttcaaacaactccct

SEQ ID NO: 11009 - DNA, 437 bp, Arabidopsis thaliana
  unsure at all n locations
  Clone ID: LIB24-017-Q1-E1-D7
gnaaagctcctctttctctatctaggcttgtggagttcatgactggcaaggaagataagattgccgtcttggttggaactataactgatgatttgagggtacacgagattccagccatgaaagtgactgccttgaggttcacagagagagcaagggctcgcattgagaaagctggaggtgaatgcttaacctttgaccagctcgctctcaagagctccattgggccagaacacggttcttcttagaggacctaagaatcacgtgaagcagtgaagcatttcgaacctgacattgaagaactttgaaggtcttgaccttggaaagatggacgaaggcaatgactctggcttggcttcgtaagttgcctggtcaaaattgaccgtaccttganctggaaggtatcaantggctccaacaatcacaacatgccaattctt

SEQ ID NO: 11010 - DNA, 444 bp, Arabidopsis thaliana
  unsure at all n locations
  Clone ID: LIB24-017-Q1-E1-E1
aataacttttagaaacacaaataaaagtttaattacttttaagcccaacanaaatgggttatgctaaatcagccatgctgatcttcttactagcattggtcatcgcatcttgtgccacggccatggacatgtccgttgtttcctccaacgatanncaccacgtgaccgccggtcccggccgccgtcagggtattttcgacgctgaagccaccttgatgttcgantcatggatggtcaaacatgggaaagtgtacgactccgttgccganaaggaacggcgtttaactatttttgaggacaacctccgttttatcacnaaccggaacgctgagaaactcaattancgggcttggtttgaatccggtttgcggatttancctcnccatgaataacnggagaaattttgcaatggggcctgattcaaggacctcctanggaaccacg

SEQ ID NO: 11011 - DNA, 448 bp, Arabidopsis thaliana
  unsure at all n locations
  Clone ID: LIB24-017-Q1-E1-E10
gaagagatcggaaatatccgaacgggtcaagacccaatanagtagccgggtcgggttattggaaagcaacgggtactgacaaaattatcacggcggatggtcgtcgtgtcgggattaaaaaagctctggtcttttacgccggaaaagctcccaaaggcactaaaaccaactggattatgcacgagtatcgcttaatagaacattctcgtagccatggaagctccaagttggatgattgggtgttgtgtcnaatttacaagaaaacatctggatctcanagacaagctgttactcctgttcaagcttgtcgtgaagagcatatcacgaatgggtcgtcatcgtcttcttcatcacaagctttgacgacgttctttgattcgttccccggngaataaaagaccantcctttaatcttcctccgggatgaattcgctcnaggaccattctt

SEQ ID NO: 11012 - DNA, 480 bp, Arabidopsis thaliana
  unsure at all n locations
  Clone ID: LIB24-017-Q1-E1-B4
gagaaaagataaagaaaatgggtttgagaagaacatggttggttttgtacattctcttcatctttcatcttcagcacaatcttccttccgtgagctcacgaccttcctcagtcganacaaaccacgagactctcccttttagtgtttcaaagccagacgttgttgtgtttgaaggaaaggctcgggaattagctgtcgttatcaaaaaaggacgacgtggaggangtggaggacncngaggctgtggagcacgaaacggcggtangagcaagggaagaggaggttggcaacagtattagccgcancccttgactggaaaacgnccgcgggaaggggttggttcccgattcataacgggttggtgggnaaatgggcaaatcctgggggtgggtgggattcgggaaaagggntnacnattngatttaagcngggcaagcaattggaatcccttcccaaggggaacaaagttttttccggtnc

SEQ ID NO: 11013 - DNA, 422 bp, Arabidopsis thaliana
  unsure at all n locations
  Clone ID: LIB24-016-Q1-E1-B11
gcccacgcgtccggttgttttgtccaagaacacagcaaggttctcttcctcagagaatctgagccttcttgctgcaagttctgcacctagcccaacggtttctgctggaggaaatggagatgtgatctcctttggagcaatttacaatgcttcacagcatatggcagattatggtcttggtgatatagttttctcatccgaaggagtgatttcgagctatggggatgcgtttcatattcctgacattattgaaagcactgttggtcttttcgcagatgctgatgttacattacatcatcaccaaattggagattcttgtgaagatattttggataacatcttgattcgaaatggagtggctgaagaaatgaatggtgatttgatggaaactagttgccaagacgaaacccaaaaagcaanag

SEQ ID NO: 11014 - DNA, 429 bp, Arabidopsis thaliana
  unsure at all n locations
  Clone ID: LIB24-016-Q1-E1-B12
gcagacaaaaaaaagctgcggagctagcgacttcgcttctctctttctctcaaatctcttatccgtttgattttttctgtgtcgcaatctcttcttcttattaattcattcaaaacagaaaagtacgggaaaaaggaattgagacggtgggtttcgatggggtcaggtgcatcgaagaatactgaggaagatgacgatggttccaatggcggaggtggtcagctctacgtttcactcaaaatggaaaactctaaggttgaaggagagctcactcctcatgtctatggctctcttcctctcatcggttcctgggatccttccaaagctcttccgatgcaacgtgaatctgcgttaatgtcggagctaagcttcgttgttcctcctgatcacganactttggacttcaagtttttgttgaaaccaaagaac

SEQ ID NO: 11015 - DNA, 434 bp, Arabidopsis thaliana
  Clone ID: LIB24-016-Q1-E1-B2
gcttgtttgctctgtttctggttctgtctcttacgatagcagagccattaccatcaatggcaaaagaagaatccttatctctggatctattcactaccccagaagtactcctgagatgtggccagatctaattcggaaagcaaaggaaggaggcttagatgtgattcagacttatgtgttctggaatgggcatgagccatctcctggaaaatattatttcgagggcaactatgatttggttaagtttgtcaagttggtccaacaatctggactctatcttcatctaaggattggtccttatgtctgtgctgaatggaacttcggagggatttcctgtttgggcttaagtacattccagggattagcttcagaacaagataacggtcccttcaaggctcaaaatgcaaagattcacaacgaagattgttaacatg

SEQ ID NO: 11016 - DNA, 425 bp, Arabidopsis thaliana
  unsure at all n locations
  Clone ID: LIB24-016-Q1-E1-B3
tctctctctctcnnnnnnnnnnnnnnnnnnnnnnnnnnnnnnnnnnnnnnnnnnnnnnnnnnnnnnnnnnnnnnnnnnnnnnnnnnnnnnnnnnnnnntcaatagctttgttaccatgtgggactatctctggtcatttcattcagatgcctagctctatctgttatggcctccatggcactgaactagcttgtgagactgagtgtagccgcggtgaggattatcggttgatcaaactcactatcatagactacaatagaaagaaggaacaaacagttgtagtggagtgcaaaggccatgatgctgctcgaattaatgatgtcgagcatgctcacgggtgggaggaagatgtgataggattagtcgaagaaaaacacggggaaagaagaaagtaccggtttcgttcgaatgtgagacattgaagg

SEQ ID NO: 11017 - DNA, 482 bp, Arabidopsis thaliana
  unsure at all n locations
  Clone ID: LIB24-016-Q1-E1-B4
ngttactttgcaggcccggtccagaataaacgggtcgacccacgcgtccgaagctgcagttttatcaannnnnnnnnnnnnnnnnnnnnnnnnnnnnnnnnnnnnnnnnnnnnnnnnnnnnnnnnnnnnnnnnnnnnnnnnnntctctttgcaaccaaagaagttaaatcgtcttcaaagtcacttattttcacctcaacatctctcattctctcagtctaatgtctctcgttacagagcgttttgtgtttcttcaagctctcctccagagggaacagtctccgtagtcgatttccatgagaaagattggtcctttctcgaatctatggaaattgactccactgaacatactcagaagattgaganggatcataaaggctggaagaattatccgaatcttcgaagggttttgggttcaattagctcccgaaaacaatccgttgatngtttgggaanatcctcaaccttcncaagcgttttgg

SEQ ID NO: 11018 - DNA, 426 bp, Arabidopsis thaliana
  unsure at all n locations
  Clone ID: LIB24-016-Q1-E1-B5
gaaacaaatccactccaaacactccaaattacttgtctctcttctcttccccaccaccactaccttacaaaaaccctaaccctaatttctccacccccaaattcttttcctcaatctctgcgatggaagacgaagaaggcatcgggttaattttagccagagccaccgagctcagactcaagatcagcgattgtatcgataactccagtaccaccgtcagcgacaacggcgatggaaacgaggatctttctcccggagaaggaagaaaaagcgagattattgggaatcaagacaaggattttgactcaatcagctctgaggatgtagatgaagcagaagctgaacggcttttgcgtattcgtgatgctcttgaagctcttgagtctcagcttgctctttacagaatctaaggcanagacaacaata

SEQ ID NO: 11019 - DNA, 430 bp, Arabidopsis thaliana
  unsure at all n locations
  Clone ID: LIB24-016-Q1-E1-B6
gaaaactccaaagactccatcgaacaaaaccttcagagagaatcaaacagcttaagggcagtttcttagttaaaagtaaccaagtttacatggttgagctagacattcagattccatcagcatacgatccatttgcagaagctaaagattcagatgcaccaggagctaaagagaacattcacattcgaatccagcagaggaatgggaaaaagagcttgacgactgttcaagggcttaagaaagagtacagctacgagaggattttcaaggatttgaagaaagatttctgctgcaacggtaacgttgtgcaggacaaagaactaggcaagatcatccagcttcaaggtgatcaaaggaagaaagtgtctcagttcttggtccaaactgggattgctaagaangatcagatnaagattcacggtttccaaac

SEQ ID NO: 11020 - DNA, 418 bp, Arabidopsis thaliana
  unsure at all n locations
  Clone ID: LIB24-016-Q1-E1-B9
atcgcgtttcacagatcaacatcacccgcgccggagcagaaactcacactcttcgctctccgccttgcaatcatcgagaaaatcgccactaatctcggaaccctaggtttcatttgggccacggtggttcttctcggtggattcgctatcacgctcgaaaaatccgatttttggttcatcaccatcattctcctcatcgaaggcactcgaatcttcagcagaagccacgagctcgagtggcagcaccaggccacgtggactgtatccggcgtcggaatcagtagcttccgcgtgctccaatcaagctcaatttcacttctcagaaatttaaaacgaatcagcgatgggatctttaagccgattctcgacaatggattgagagaagcgacgacgagaatcggacgacaagagatntttg

SEQ ID NO: 11021 - DNA, 426 bp, Arabidopsis thaliana
  Clone ID: LIB24-016-Q1-E1-C12
tgcgagacctagctcttcatttaagcaatgcagggaaagtaaacagaagaaagcggttgctgatgccgaaaagagagttagatcttccaggagattgggaaaggaacaatgatgagcattacattgcccagattgtctctattcatactggggaaatgaatgaaatgcaatggtttgacatggagttccccaaggcagagattctaatattgaacttctcttcagacaagtatgttcttccgccttttatcagtaagatgagccggcttaaggtcctagtgattatcaacaacggcatgtctcccgcggttctccatgacttttcaatatttgctcatttgtcgaaactaagaagtctctggctagagaaggttcacgtccctcaactctccaactcaaccaaccccttgaaaaatctccacaaga

SEQ ID NO: 11022 - DNA, 431 bp, Arabidopsis thaliana
  unsure at all n locations
  Clone ID: LIB24-016-Q1-E1-C3
gggaaaaacgaaagggaacaaaaagaaataggggatannnnnnnnnnnnnnnnnnnnnnnnnnnnnnnnnnnnnnnnnnnnnnnnnnnnnnnnnnnnnnnnnnnaacatcggagaagcttctagcgtctagtgatcttcaaggagcaaagacatttgcgatccgcgcatgcgaagctgacccgacccgagcagaagctgcagactacatcctcgcaatctgcgacattcttctcgccggagagactcgtttaggtgattccaacttgccagactggtacgccgttctccgactcggtcgtttagctcaaaaccctgaacacgtcgcgactcagtaccgtanactcgctcttctcctcaatccttccgttaatcgtctcccattcgccgattgaactcttaaaatcctctccgatgcctggttcgttctccc

SEQ ID NO: 11023 - DNA, 442 bp, Arabidopsis thaliana
  unsure at all n locations
  Clone ID: LIB24-016-Q1-E1-C4
gcgggacgcgtgggaaacaggaacataactactactactaccatgtcttgactctgttgagaatcttaaatcctacctaacctccaatgggtaagaagagcggttcttcttcttcttggctcactgccgtgaaacgagctttccgatctcccaccaagaaagaacacaacaacaatgctcatggtaatgaagtcgacgaagatgaagacaagaagaaagagaagagacgttggttatttagaaaatctacgaatcatgactctccggtgaagacctccggcgtcggaaaagacgctccggngcagaaatccacagaaacaacgacgatnatcaacccaaccgttttatcctcctgttacaagaacagagggtacgacgcatctacaccgccgggcaaccgtntcccgccggatcgggaaactcatcctccnttcgaaaaagg

SEQ ID NO: 11024 - DNA, 427 bp, Arabidopsis thaliana
  unsure at all n locations
  Clone ID: LIB24-016-Q1-E1-C6
ggatcattcgaaatcaactcgaagatcttcaattccatcaaactcaaggagtttcgtttctctgatttcttcgattgagataaggagtaaatggcgacagatgatttttttagcttgcagagagaatattggcgacaagtggcggaatccgatggtttcgatattgagagtgttcaaataccaccatctatgtatggaaggatcaatggactgattccccacaactgtgaaatcaatacgccgcttccttaccgtgtcttgggcaagcactatgctaagcttgggcttcatcgttacaatatgttgaaggggactaaattcgagttcggtcgcctaatgaaattcaacatgttacaaaactgtgtggctctttctacataactttggaagcatacgantacngtgttcctggcacatcacatcctca

SEQ ID NO: 11025 - DNA, 408 bp, Arabidopsis thaliana
  unsure at all n locations
  Clone ID: LIB24-016-Q1-E1-C7
gaaaccttgaaaatccgagacatccacaatgccgccaaagttggatccgagtcagatcgttgacgtgtacgtccgagtaaccgggggagaagtcggagcagcgagttctctagctcccaaaatcggtccgctaggtctcgcaccaaagaagatcggagaagatatcgcgaaagaaaccgcaaaggaatggaaaggattacgtgtaaccgtcaagctcacagtgcagaatcgtcaggcgaaagtgacggtggttccatcagcagcagcactcgtcatcaaggcgttgaaagagccggagagagataggaagaaggtgaagaacattaagcataacgggaacatctcgtttgatgatgtgactgagattgctaagatcatgagacctanatctattgctaagggaattga

SEQ ID NO: 11026 - DNA, 419 bp, Arabidopsis thaliana
  unsure at all n locations
  Clone ID: LIB24-016-Q1-E1-C9
tctactctaccactatctcacagagattcatggatacgatgcgaatctccggtgtatcaaccggagctgaggttttaatacaatgcaattccttatcaagcctcgtttctcgtcgttgcgacgacggaaaatggcgaacgagaatgtttccggcgagaaacagagacttgcgtccatcgccgacgagaagatcctttttgtcggtgaaatctatctctagcgaaccgaaagccaaagtaaccgacgcagttctcgattccgaacaagaagtgtttattagctcgatgaatccgtttgcgccagatgctgcttcggtagcttcgagtatcaagtaccacgcggagtttacgccattgttttcaccggagaagtttgagttgccaaaggngttccttgcgaatgggcaaagtgtaanagat

SEQ ID NO: 11027 - DNA, 430 bp, Arabidopsis thaliana
  unsure at all n locations
  Clone ID: LIB24-016-Q1-E1-B10
gatttgctaatattaaacactttttcttttagaaaaaaaaacaaatatggccgttgattcacctcttcaatctcggatggtttcagcgacgacttctgagaaagatgtgaaagctctcaagttcattgaagaaatgactcggaaccctgactcggttcaagagaaggttcttggagagatactgactcgtaactctaacaccgaatatctgaaacggttcgatcttgatggtgtcgttgatcggaaaacgttcaagagcaaagttccggtggttacgtacgaagatttgaagccggagattcaacgtatatccaacggcgattgttctccgatcttgtcttcgcancccancacngagtttctcacaagctcaggaacatctgctggtgagangaaactaatgccaacaattgaagaagacttanaccga

SEQ ID NO: 11028 - DNA, 436 bp, Arabidopsis thaliana
  unsure at all n locations
  Clone ID: LIB24-015-Q1-E1-G2
gagtaatgccagatccgcggtaacgcaagtcagtgacctactccggcgttnatcactgaatccgattatggctagtcttcttcgatccttaatccttttgctaatcgtgcaatcatttttggttgcgatcgctttcgggtcgaaagaagttgaagaattcagcgaggcattgctcttgaagcctttacctgatcgaanagttttagctcacttccacttcgagaatcganctcctccgtcaaactcccatggccgccatcaccatctcttcccgaaagctatttctcagttggttcagaagtttcgggtcaaggagatggagttatcntttantcagggtcgatggaancatgaacattggggaggatttgaccctctatcaagtatgaatgcgaagcctgttggtgtgganctgtggggctgtgtttgangttcc

SEQ ID NO: 11029 - DNA, 437 bp, Arabidopsis thaliana
  unsure at all n locations
  Clone ID: LIB24-015-Q1-E1-G3
gattcgaaaagtctaaacaaaagtcgccgtcatgaaagtagaacttgtgttcataccatcgccgggcgttggccatatccgagcaacaacggcgttagcaaagcttctcgttgccagcgacaaccgcctctccgtcactctcatcgtcattccttcacgagtctccgacgacgcttcttcctccgtctacacgaactccgaagaccgtctccgctacatcctcctccccgcccgagatnaaactactgatctcgtatcttacatcgacagccagaaaccacaagtaagagccgtcgtgtccaaggncgctggagatgtttcaacacgttcagactcacgggctaactgggaattgtcgtagacatgttctgcacgtccatgatagacatcgccgatgagtttaacctctcggctanatcttctacacgtccaacgct

SEQ ID NO: 11030 - DNA, 426 bp, Arabidopsis thaliana
  unsure at all n locations
  Clone ID: LIB24-015-Q1-E1-G8
gcgaatgaaccagctatgaaaagcttgaaatccaatccttcaggaccgataccgaactttttcgtatcgctctcttcggcatttacgcaaacacctcttgtgcgttcgaacaaacccaatttgcttcttctaccaccagttgcagactccgtcaaattgattcaagactttcatcagtctctgatttctgctactgagaaatttaaaggattcctccattcgctcgcctctaagaaccctctctttcaggaagcggttcgcctatcttccgaatttcacattttgtgcgacgagattcgtttgagaaacactacaagggtgaggtttgcgatgtctaatcacggatttgcagcggttctgcctggagattcagttgcangattggtggttgctaatggttgatnaatttcctcaacatatataaca

SEQ ID NO: 11031 - DNA, 431 bp, Arabidopsis thaliana
  unsure at all n locations
  Clone ID: LIB24-015-Q1-E1-H1
gataatcgggttttatgtccagcatctccgacttccggagttgtgatggctggccctctgtttggcatcatccggcttctataaggagcgttggccagcttcgtcgttttttctagtcgtccggtgtatgaggttcgtatcacgtttaatattcgctgtttggttattataaatccagtagatccggttatgtctctacttttgttcaattatttcgaggattaatagttctgctccggtggcctctaacaaggttatgtgttgatagctttgttggatctagatgtttctttcgatttagttgtcaagacagttctgcgcctaagttagctggttaaaagctcagtatattgatgttttgtcctccatactcgtgattgccataatcggtgagaaaaaagaagatcgttgttcggcttcgttttccgacn

SEQ ID NO: 11032 - DNA, 454 bp, Arabidopsis thaliana
  unsure at all n locations
  Clone ID: LIB24-015-Q1-E1-H2
ttattcnccgccagtgtccaaaaatcccgggtcgacccacgcgtccgctcatcgtctcctttacttcattcgtcttcttcctctctttcccacaagctcccattgatatagagagagagatttaaggaaggaatcatggcagggggtggagctccagnanccaaagcagacgaaccacaaccacatcctcctaaagatcaacttcccaacatttcttattgcatcancagtcctcctccttggcctgaagctattcttcttggattccaacattaccttgtgatgcttgggacaacggtgctcatacctactgctcttgttccccagatgggangtggatatgaagagaaggcaaaggtgatccagactattctctttgttgctggcatcaacacattgctccaaacactgttcggtatgtanaattgcctgccgttgttggagcttcctanac

SEQ ID NO: 11033 - DNA, 435 bp, Arabidopsis thaliana
  unsure at all n locations
  Clone ID: LIB24-015-Q1-E1-H3
ggaaacggtaacaatggttacgccatcgttgagattagtattcgtcaagggtccaagagaaggcgatgctctagattacaagcctggatctacgattcgtgttggtcgaatcgttcgtggtaatgaaatcgcaattaaagacgctggaatctccactaagcatcttcggatcgaatcggattctgggaattgggtaatacaagatcttggatcttccaacggtactttattgaattcgaatgctcttgatccagagacgtcggtaaatctcggagatggcgatgttatcaaactaggtgagtatacatctattttggtgaattttgtgattgatgattttcaggagaagaagcttacgangaacaataggcgtcaggctaatgcgangaancgaattaaggttttaaaaagtacaanttgggggatatcactgaa

SEQ ID NO: 11034 - DNA, 438 bp, Arabidopsis thaliana
  unsure at all n locations
  Clone ID: LIB24-015-Q1-E1-H4
gatccttaccaaaatccctgacaacattatcctaactccggttaccggtaatggattcgtttccggttcatttataggcgcgacgtttgaacaaagcaagagtcttcatgtgttccccatcggtgtattggagggtcttcggttcatgtgctgtttccggtttaagctatggtggatgactcagagaatgggaagctgtggaaaagacattcctttggagacacagttcatgctactggaaagcaaggatgaggttgaagggaatggggatgatgctcctactgtttataccgtctttctccctctccttgaaggccagttcaaagctgttctgcaaggaaatgagaagaatgagattgagatttgttttgagagtggagataaggcgtggaaactaaccaaggaactcancttggttaagttcaagctgggaacaat

SEQ ID NO: 11035 - DNA, 437 bp, Arabidopsis thaliana
  unsure at all n locations
  Clone ID: LIB24-015-Q1-E1-H5
gcttttaccttctctccaagaaatcttcactttctctctagaaaaaagttggaagctgactcgataaagactctctttttcttcttcttcctgcaaatggcgatcgaggatcaagagaacacaatccgtgaaatcaaacctaagaacagaagaatcatgggagctggtggtccggaggaagaggagaaccggtggccgccatggttgaaacctttgcttaaagagcaattctttgttcattgcaagtttcatggagactctcataagagtgaatgcaatatgtattgcttagactgcaccaatggcccactttgctctctttgtcttgctcatcacaaggatcatcgcaccattcagataaggagatcttcttatcatgatgttataagggtgaatgagatacaanagtatccttgatataaggtgggattcaaaac

SEQ ID NO: 11036 - DNA, 439 bp, Arabidopsis thaliana
  unsure at all n locations
  Clone ID: LIB24-015-Q1-E1-H8
gcacaatgatgaagttgaaactgccagtatcatgccctttgttcaagaagcactcgacggtatcgagtttgcccgaggagatgccaattctacttggggatctgttcgagctaaaatgggacgccaagaaccttttgaacttaaatacgttgctattggaaatgaagattgtgggaaaacttactacagaggaaactacattgtgttctatgatgctatcaagaaagcctatccagatatcaaaatcatctccaactgcgatggatcctctcatccactcgaccacccagctgattactatgactatcacatttacacttctgctagcaatttgttttccatgtatcatcaatttgatcgcacttcacgcaaaagtccaaaggcttttgtcagtgaatatgctgttactgggaaaagatgcctggtacaagganccctc

SEQ ID NO: 11037 - DNA, 445 bp, Arabidopsis thaliana
  unsure at all n locations
  Clone ID: LIB24-016-Q1-E1-A11
cgtaaangtcaaaaattccggggcnanccacgcgtccgnccacgcgtccgggaaatatagagctgagattgatgctagtgtcaatgttagtgatggagctagtggagtttctaataaaggattagatgagaagggtcnttggacaaggatgcgagttgctaaagttagccttgtgatttgtccgttttggtttttggcgcagcttacatttaatgtctctctcaagtacacaacagttacgtcaaataccatattaagcagtgcatcaagccttttcacctttcctgtttcactaatattcctgggtgagaagttcacatgggtgaaactcctcaancgtcctccttggaangtctgggactaaaattggnaatatgggtgactcanagtccaagtcaaatgcagttagctaagaacccncctttgggaaaaaatccttcnctgg

SEQ ID NO: 11038 - DNA, 437 bp, Arabidopsis thaliana
  unsure at all n locations
  Clone ID: LIB24-016-Q1-E1-A4
gcacccttcttaccttcagtttccctccccacaaaaacacgatcttccgttacgggtttccgggtaaagcccagaatcatcccaattcaagcaaagatccgagaaatcttcatgcctgcactaagttccacgatgaccgaaggcaaaatcgtctcttgggttaaatcagaaggcgataaactcaacaaaggagagagtgttgttgttgttgaatctgataaagctgatatggatgttgagactttctatgatggttatctagctgcaatcatggttgaagaaggtggtgttgctcctgttggttctgctattgctttgttaactgaaactgaagatgagattgctgatgctaaagctaaagcttctgggtggtgggtggtggtggtgantctaangctcctccgggcttctcctcccaagggtgcaatttgaaagca

SEQ ID NO: 11039 - DNA, 429 bp, Arabidopsis thaliana
  unsure at all n locations
  Clone ID: LIB24-016-Q1-E1-A6
gctggtgccatcattgtaagtgatcaatatcttgacaatgctcagattttcatggcacctgccaccagtgttaatagctccgttggcgatattatctaccgatatatcaactccacaagatcagcgtcggctgtgattcagaaaactcggcaagtgacaatccctgctccatttgttgcttctttttcatcaagaggtcccaatccgggatcaatacgtcttctcaagcctgatatcgctgcacccgggattgatatattggcggccttcactctaaagagatcactgactgggttagatggtgacacccaagttctcaaaattcaccatcctgtctggcacctcaatggcctgcccncatgttgctggtgtagctgcgtacgtcaagtcntttcatcccggattggaccctgctgcatcaaatccgnc

SEQ ID NO: 11040 - DNA, 426 bp, Arabidopsis thaliana
  Clone ID: LIB24-016-Q1-E1-A8
gatttagatttgaggactctctgtcttttcttatttcggagaatgttctttttctagggttttgaaattctaagagattttctgaagaagaaaacaaaatgggtcctcttgtcgaagcgactgagttctcgaaagaacaagcactcaccgacgctgcagaaaatctccttaaacctcatttctcaactgatgcgactctcagtcttctcgaggtaatggagtctctgctcgccactgtcgagcaagatctttcttcatcagtacaaaaggccctacatccaccaatgagggctttggtatccgctgatcttttgagaaaccctgattctgatgttagggtttctgttgtctcttgcttgaccgaaattatgaggattactgctcctgaggcccttacaacgatgagcaaatgaaggacatcttcaa

SEQ ID NO: 11041 - DNA, 457 bp, Arabidopsis thaliana
  unsure at all n locations
  Clone ID: LIB24-015-Q1-E1-G12
gcttaganaaacaatccacttttgtttttaaggttcaatttttgaaattttcaaaaaacaaagcctatttcatacactcaccagtgcttcacaattcatcataattcataagccacgcaaaagaaaataaagtgaaagattccatggcggtaattgtgtggtggctactaacggtggttgtggtggcgtttcactcggcgtcggcggcagtagtagaatcaacgtgggaggttgagtataagtactggtggccggattgtaaagaaggaatcgttatgggccatcaacggccagtttccagggccaacgatagacgcagtcgccggagacacggtcattatccacgtcgtcaacaaactcccccaccgaaagtgtttgttatccnattggnaanggcatnacgttcagaaaaggggactccaatggggctggaanggagcaancaagggtgtttaac

SEQ ID NO: 11042 - DNA, 434 bp, Arabidopsis thaliana
  unsure at all n locations
  Clone ID: LIB24-015-Q1-E1-D6
ggaccccactccctcctttatcgcaactaaccccaaatcctactcccgccgccgccgtctcttccgctattccggcgccagttaagagcgtagccgttcagcaaccgatcgatggatctccacgcgccgttgctactgataccggaggtattcctgagccacttgcggctgttcccggcgctaagcttcgtcttatgtgcagttttggtggccacatcatgcctcgtccacacgacaaatcgttgacgtactccggcggcgagactcgtattgtggttgttgatcgacgtgcgtcactgtcttcgctccgatctcgtctctctagtatgcttctcaacggccgggtcctttactctcaagtaccagctccctancgaagatctcgattcactcgtcancatcactaccgatgaagatctggagaacatgatcga

SEQ ID NO: 11043 - DNA, 433 bp, Arabidopsis thaliana
  unsure at all n locations
  Clone ID: LIB24-015-Q1-E1-D8
gcccacgcgtccgtcggctttatccaaaggttccttcgtttactccgcttctatggaagaagcttgaannnnnnnnnnnnnnnnnnnnnnnnnnnnnnnnnnnnnnnnnnnnnngagaagcaacatggccctcggtggcttgatttcaaatcggaacttcggttccttcatcggctcaggcaatggttgtcagagacttggaaaaagtggtgcagaggtttccaagctttttccaaatgcattgttgtgccgtaatcatcaacctctgcaagctagtttacatcatgaatcgggacacatgagaagaagttttggatgtttccttcaaccaagaatggacagtgtaattaggtttaggaacagtatcaagatcaacagatctcgtgcttactacaaatcaagaggancagatatcacggaaaggagttgtgcc

SEQ ID NO: 11044 - DNA, 482 bp, Arabidopsis thaliana
  unsure at all n locations
  Clone ID: LIB24-015-Q1-E1-D9
ctgttacgcttgcngtaccggtccanaattnacgggtcgacccacgcgtccgctcntccttanctcttggnaaccaanangcatggatcgtgtggtcttcttcttcctcancgcagnnacgttactagcaggttctcncggatctaccgtcatctccggcgaggttaccgacggtttcgntaacccgatcaggcaagtcgtcccggaggagaacgatgaacaactcctcaacgcagaacatcacttcactctattcaaatccaagtacgagaagacttacgcgactcangtagaacacgatnatcggttccgtgtcttcaaagctaacctaagacgagctangcgtaaccagcttcnanatccgtctgcngtccaaggcgtcacgcagntctcaaatctactcccgaaaagaattccgccgcangtttttaagantgaaacgccnaaggtttcgtcctcctactgatatcaaaaggggggct

SEQ ID NO: 11045 - DNA, 427 bp, Arabidopsis thaliana
  Clone ID: LIB24-015-Q1-E1-E3
tgagtctcggagtgaaaagggtccggtttagtgaagccaagtaagcaaagccccttgtttttgacggacattatatctcctcctcttctcttctataaattgggcacctttttccaattttacgcacagtcacggagatagatagtaagagagagctatggcggaggagcacttcgacgttctgactaaatccggtgagaagaccggtgtgtccaaacccaggggagaggttcacagagatggagattaccatcgtgctgttcatgtctggatttttgtggagactactcaacagctacttctccaacttcgatctgatgataaagattcttggcctggtcaatgggacatctctagtgctggccatatatcagctggtgatacatcgcttctatctgcacagcgggagcttgaggaagagcttggc

SEQ ID NO: 11046 - DNA, 488 bp, Arabidopsis thaliana
  unsure at all n locations
  Clone ID: LIB24-015-Q1-E1-E4
aacttcnatccgntcgcacggtcacnaatcccgggtcgacccacgcgtccggggnnnnnnnnnnnnnnnnnnnnnnnnnnnnnnnnnnnnnnnnnnnnnnnnnnnnnnnnnnnnnnnnnnnnnnnnnnnnnnnnnnnnnnnnnnnntaattcaacagttaaacatgatggattttatgtaaatagaggcaagttggagcggatggaaccttcaacaacatctaaccagcaacccaaaaaacggcgacgaaaagattcagcaaaaccctgtcgtgatgcagttgacgtatccgataaacacaccaagttgtctataacagctaggaaaaaggatcaatcaactgctcctgggtcctggaaaacacaggagtcacctttgccttctggagcgcaagatgcaaatacttcagtacctctggatgatgtgaagcattctgatagagcaaatcatcagtctaggaatgatacaagtcacaaagtcaagggaaa

SEQ ID NO: 11047 - DNA, 433 bp, Arabidopsis thaliana
  unsure at all n locations
  Clone ID: LIB24-015-Q1-E1-E5
tagttttgtcttcaaattctggagctttgaagctagatcatcaagttatcgaaatctttgttaggattttaggtagagaatctcagtactctgttgcagctaagttgctcgataaaattcctctacaagaatatctcctcgatgttcgggcttacacgacgatcttacatgcgtattcacggactgggaagtatgaaaaggctatcgatttgtttgagaggatgaaagagatgggtccttcacctactttggtgacttacaatgtgattctcgatgttttcgggaaaatgggtcgatcttggcggaaaattctaggggttttagatgaaatgagaagcaaaggattgaagtttgatgagtntacttgtagtactgtgctctctgcttgtgcaaggagaaggtttgttaannagaggccaaaggagtttttcgc

SEQ ID NO: 11048 - DNA, 479 bp, Arabidopsis thaliana
  unsure at all n locations
  Clone ID: LIB24-015-Q1-E1-E6
ttntttaggccgcccggtaccgaaaccaagaattcncgggtcgacccacgcgtccgctctgtctctcaaaccctcaggtctcagctcagaacaatggcagctaaacctggagccgcaactccaacgtattcacctaaaatcgtcggaagaagtcggcttcctatattcaaagattccgacctcgattggtctcgtcctgatggccgtggcttccaccaatgccgacccgcattacttcaaactggtgctgtgagttctgcttctggttctgcttatgctgagtttgggaacactaaagttattgtttcagtatttgggccaagggagagtaagaaagcaatggtttatagtgatgtangtagattgaattgtaatgttagctatacaaattttgcttcccctactcttggccagggaactgatcacanagaatattcatcaatgcttcacaaagcattggaaggtgtaattantgatgg

SEQ ID NO: 11049 - DNA, 436 bp, Arabidopsis thaliana
  unsure at all n locations
  Clone ID: LIB24-015-Q1-E1-F11
gcagcaagacacataaatcgtaatccattttctctcaactttaggaatctcaaatctccgatttggaaatccggcgacaatggtgagagatattgaagatgagattagagacgagaagaatcctcgtcctcttgatgaagatgatatcgctctcctcaagacttatgggttagggccttactctgcacctatcaagaaagtggagaaagaaattaaggatctcgccaagaagatcaacgatctatgtggtatcaaggagtctgatactggtttagctcctcccagtcaatgggatcttgtatctgataagcaaatgatgcaagaagagcaacctctgcaaggttgcgagatgcacaaagattataagtccaaacactgaaggacgccaaatactcataaatgtcaancaaattgncaaatttggttgttggncctt

SEQ ID NO: 11050 - DNA, 410 bp, Arabidopsis thaliana
  unsure at all n locations
  Clone ID: LIB24-015-Q1-E1-F12
gcccacgcgtccggaaacccaaaaactccggcgtctgtttaccgctatcatcattcttccgggaagaggaaaaggtttcttcgatcgtcgaagagattctttggacaagtcccctccttcctggttcaatcttcgattcagctctcttttaatttttttggttttgggaagctgctatgttatttgagaggcttaccaagaaaccaccttcgcttgttgatctttgcgtaaggaaagcgattgataatgtaaagtacattggatatgttggtggggttgattttcagctccttgagcagattctgcaacactgtacactangaanaggtgaagcacatacaaggatgctactggacgacacagatctantccaatcaccgataaacttttgggagggaatctaataanaa

SEQ ID NO: 11051 - DNA, 431 bp, Arabidopsis thaliana
  unsure at all n locations
  Clone ID: LIB24-015-Q1-E1-F2
cgtccgaataaatgttggtactcatcatacatatataactaactcacctttttggtgtgtagataaatatatctaactaactccattacatattccagtcatttgcttataaattataaccgtcacacttaccaattcagtcacttaaccaaacatgtctgaaaaggggttgataaaaaaagaagaccacatgtttcaagaggagaagagaaagacaaactatggagcaattggcttggcttgcttcatttcttgtttctttgcattccaattcatgaaaatcgtaacaacacaaccttcaacaacaacaacatcatccattgccgttatcgatagcccaatgtcctcccataagctatctgataggagagaaatatggagagttatcccaccatctanctattgtctcaaaatcgaatcctttcataaaa

SEQ ID NO: 11052 - DNA, 439 bp, Arabidopsis thaliana
  unsure at all n locations
  Clone ID: LIB24-015-Q1-E1-F3
ggagctatcaaactccagtcaatggcgatgatgacgacgacgacgacaacattcttccatccactacttcctgctaacacttacaaatccggagctgtagcttcttcctttgtctcagttcctcgttcgtcgtctctccaatttcgctcacttgtgtcagattctacgtcgatttgtggtccaagtaagttcaccgaaaaaaacagaagagtatcggttaccgtttccgccgccgcaacaactgaacctctcaccgtcctcgttaccggtgccggtggaagaacagaaattgaaggagaggtcggagcagttcgtggcaaggggtttagtgaggacnaaggagagtaaggagaagatcaatgganaggatgaantattcantggagaatattagagatnctgcatcaatttgctcctgctgtttaaagggattgatgct

SEQ ID NO: 11053 - DNA, 432 bp, Arabidopsis thaliana
  unsure at all n locations
  Clone ID: LIB24-015-Q1-E1-F4
actcatggtgacctcgttgaattgggggaagctgtaggtattatcgcgggtcaatcgatcggcgaaccggggactcaactaacattaagaacttttcataccggcggagtatttacaggaggtactgccgaacatgtacgagccccttataatggaaaaatcaaattcaatgaggatttggttcatcctacacgtacacgtcacgggcatcctgcctttctatgttatatagacttgtctgtaattattgagagcgaagatattatacatagcgtgactattccaccaaaaagttttcttttagttcaaaatgatcaatatgtggaatcagaacaagtgattgctgagattcgcgagggaacatacacttttcattttaaaganagggttagaanaatanattattctgactcagaagggcgaaatgcactg

SEQ ID NO: 11054 - DNA, 441 bp, Arabidopsis thaliana
  unsure at all n locations
  Clone ID: LIB24-015-Q1-E1-F9
gcccacgcgtccgctgtggtggaaaagctcttcgcttgtggaatggaagagctgatggatgatacatgcacaccattgtttggcaaacataaagttcttctcaatggagactgggttggattatgtgcagattctgaatcctttgtcgcggagttaaaaagcaggcggcgccaaagtgaattacctcgtgagatggaaatcaagcgagataaagatgacaatgaggtaagaattttcactgatgctggtagactactccgacctctcttggttgtggaaaatctccaaaagttgaagcaagaaaaaccttcacagtatccttttgancatcntccttgaccatggggattctcnaactgatcgggattgaggaaagaaagaagactgtaatacagcaanggggaatcaaacaagctttctgaaaggaaccaaaagatatnc

SEQ ID NO: 11055 - DNA, 499 bp, Arabidopsis thaliana
  unsure at all n locations
  Clone ID: LIB24-015-Q1-E1-G10
actgttacgcttgccggtgcccgtccnaaattcaangggtcgacgnacgcgtccgcccacgcntccgaagaatggcgacgaaggtgagtttggaagggaagagagtggttttggtaccgtacatggcggaacatgtaccaaagtaccatcaatggatgcaagattcggctcttcttgaagctacgggatctgagccgttgagtcttgagcaagagtntgagatgcagctttcttggactcaagatcccaataagcggactttcattgtcttggacaaggatttcgttaagggagacctggctcatggccaacctcatgtagaagcaatgacaggtgatgttgaacatttacatgaatgatgtggatgatccanagggttgcagaagttganataatgataactgagcccanaagccgtnggtaanaggactaaggaaaggaatctgttgttgataatgatggcttaatgtgtcaagnaacttggaggattcacaagntt

SEQ ID NO: 11056 - DNA, 437 bp, Arabidopsis thaliana
  unsure at all n locations
  Clone ID: LIB24-015-Q1-E1-D4
gngcttccaatctatacatacaacgcttctcaatcggaagcgtaagcgatgtcgtacgacgatgttgagatagaggatatggagtggaacgaagagattcaagcgtacacgtatccttgtccttgtggtgatttgttccagattacgaaagaagatctccggctcggcgaagagatcgcgaattgcccaagttgttctctttatatcaccgtcatctacaatatggaagattttcaaaacgatacgaagaagaataacgaacctaaaactcgtcaccctgtggccgttgcctaaggatagtcatggaattgattagaagattgttcaacaaccactgcagaagagatttatctgctgttttgggaaagcatatgaaagtgtgttacattaaccacatatagagagaaggaaagagaatgttgtgttactgatttata

SEQ ID NO: 11057 - DNA, 400 bp, Arabidopsis thaliana
  unsure at all n locations
  Clone ID: LIB24-013-Q1-E1-H11
ttccttactatatcggatttcgaccaaatggctcaaagcggagcagctttcgctagacaattcaagaaagatgatccagtactcgacatggtcgatagagagatcctgaaacgtggacgttacagagtcactcctggcgcttggtgctcgagccacagtagctggtggacagatccttgctcggagtgggatgaagtaaacattgtcaaagctggacctcaagctaggaagctagacgaancaataangnaattttccttgatgattttgatttccanatccgattcaattgcaaattgattataccgaccacaacgaaaacnnnaattgggttttacatccccccggttaangggttaaaatnctttggggaaanaaancaaatngggtggccgtattt

SEQ ID NO: 11058 - DNA, 691 bp, Arabidopsis thaliana
  unsure at all n locations
  Clone ID: LIB24-013-Q1-E1-H12
aaaagatcccgaanaaaatttccccccggggggtcccgnaacccccaaacnggcnnattcccnggcntttcctttcaaacccccaaaananaaacccccccctaaaaaaaaaggcccctttaaatccccccctttccctttcctttcccccaaatgggggcctggccttttcaaaagncctttccggtccctccttcgggcctcctcctccctttccnttttcaaaacccccctaaaaaaatcctcctttccccttttccggggggggtcctcccaaagaacccttggcccttccngtttttcccctcctttaatcctcccctttcccctcctccctttaaaaactcaaatttccngaactcccggtttcccttcctccaatcggccggcccaaaaatgggaaactcctcccccggcttctccgctttcgcccggttaaacggtttgcgaattaanctcaagaagtttcggaanggtgggaaaagaaagatgggnttccgcctgganggtccggctcccggcaaaaaaaggaagcaaatcctttcctcccggnctggaaccttaaaaaactccctccggtttgggtaaancctttcccttttcaaacggtttggacaagttggctcnaagcctccggcctcaaaagccttcttttggaagaaagntggcccgggggaaaaatggnttggaa

SEQ ID NO: 11059 - DNA, 443 bp, Arabidopsis thaliana
  unsure at all n locations
  Clone ID: LIB24-013-Q1-E1-H2
gcccacgcgtccggagagaaaatgtcgtccagtaaaatccaggtacgagggcagccacttcttagggttccggcaagaaaccaccgtatgacacacttggttgtttgcggcgtttccacaaaacgccaccaccgtgaaatcaatgcactcagcagtaatagtggtccatcgttggattcggtcccaacaagaaccgacaagaggcagtttcttcgtggtgacggtaacggtaaattcgggaggttcggtgggaagtttgtaccggagacattgatgtctcgcctgatagaacttgaagacgaatttaactttgttaggtgcgatcacgaatttcaggaggagcttaccacagcgttaagagactacgtaggaaagagaaacgcctctctacttcgccgaacgtctaaaccgaacactacaagaacatagttccaaccatncga

SEQ ID NO: 11060 - DNA, 418 bp, Arabidopsis thaliana
  unsure at all n locations
  Clone ID: LIB24-013-Q1-E1-H3
gcgggacgcgtgggatttttttttttcatttcttcctccnnnnnnnnnnnnnnnnnnnnnnnnnnnnnnnnnnnnnnnnnnnnnnnnnnnnnnnnnttctggaatagtcatcatcttctctgtttctaggctttgtttatttgtctctaaagtttctggattcaacttctgaagaagatagtagtagtccacaagaaggatcttctttaccaagaaagttgatttggtcagagccaaggaagatgggttacatgtgtgacgtctgtggtgaacaaaggatctanggngtactggtcgatccgatgcagcttgtttgtgtctctccctgtgaccgggagtgttcantccgctaaatgcaantgtccanaacgacattctccngacactgtctggcgagaagatgcaantgctcaacctg

SEQ ID NO: 11061 - DNA, 471 bp, Arabidopsis thaliana
  unsure at all n locations
  Clone ID: LIB24-013-Q1-E1-H4
cgtagtcganaatcccgggnccacccacgcgtccgcnaacncgtccgcggacgcgtgggcggacgcgtgggcaacaatatccacattcntcttcttttgagtattacatccaacgaaacgtctctttctttctctctgatangcaacaatggcgcagaggaagatgattgtgtttcccaccaagaatgaattgtccgaagcaatggctgagtacactgccaatctctccgccaagttcatcaaagagaaaggncttttcaccgttgttctctccggcggtgacctaatcgattggctctgcaanttggtgcaacctccttatattgattcaaatcgaatggncaanatggcacgtcttttgggtcatgagagggtttgtgcatgggaaagatcaagacanttactacaaactcgccatggaggggtttctcccnaaaggtccgaattccgggataaagaacatctaancaa

SEQ ID NO: 11062 - DNA, 445 bp, Arabidopsis thaliana
  unsure at all n locations
  Clone ID: LIB24-013-Q1-E1-H8
ncggacgcgtgggcggacgcgtgggcggacgcgtgggcggacgcgtgggtggaaacacaccagtttcggaaaatgggcgaagctcgtttgggaaaaagagcactagttattcttactcggacactgcaagcatatccattgatgatcaatctgatggagagaaactttcgggatgtttaccttctacttctagttttaagantgaagttggtggattctatgtctcacgttactcctgaagccaacaaagtgtctcatgacttgaatgttcaggaatcagttagtagcagcaatgtanatggccagacatcattaagttcgaaatggtacatgttcaagtcccaagggcagtctctcaaaatgatcaatcatgttcactgacaattcaatcctttagcatcaggaatcgttgaaacntctccanaacntgttaagcttgatctaa

SEQ ID NO: 11063 - DNA, 485 bp, Arabidopsis thaliana
  unsure at all n locations
  Clone ID: LIB24-014-Q1-E1-A1
ccctgccgtancggtccgaaatcccgggtcgncccacgcgtccggttgcggttaagcgtttatggacaggttctgttaaggaaactggagattgtgatccagagaaaggttacaaacctggagttcaagatgaggcttttgaagctgaagttgagacattgggtaagattaggcataagaacattgtgaagctatggtgttgctgttctacaagagactgcaagctcttggtttatgagtacatgcctaatggtagtttgggagatttgcttcatagcagtaaaggaggaatgttgggatggcaaacgangtttaagattatcttagatgcggctgaggggctttcgtatcttcaccatgattctgttcctccgattgtgcatagaagatattaagtcaaacaatattttgatcgatggacattatggtgcaagagtttgcctgaatttgggtgtggctaaaagctgtcgacctgaaccgggnaa

SEQ ID NO: 11064 - DNA, 518 bp, Arabidopsis thaliana
  unsure at all n locations
  Clone ID: LIB24-014-Q1-E1-A10
ctgttacgcttgccgtaccggtccgaaaattcncgggtccacccacgcgtccgcacggctatggtgggaaagattattgataggggtataaagactctccagagagaaggggttgttattgaccgagaaaattggatgagtgaggctgaggcatgtgagagagttggatctgtcgctacatgccaggccattattaagaacacaatangtattggagtggaagaagangatagaaagagaacttgggttgctgatgcagatgagtgcaagaagaggggttccattgagaccgcaagagcaatatacgcccatgcncttagtggtattccttgaccaaagaaaaanttatctgggcttaaaagcggcgcaaccttngagaaagaagcccatggggaagtcccgggaagtccccctttgaatncccttggtttgccctttaanggcctgttaaacaataatgttcccccgccaaanccctgaaaggtttcctcctggggctccaatggggttgcccaaaa

SEQ ID NO: 11065 - DNA, 468 bp, Arabidopsis thaliana
  unsure at all n locations
  Clone ID: LIB24-014-Q1-E1-A11
ctgtttaccttgcccgtgccggtccaagtctaaaantcccgggtccacncacgcgtccgctnactngtgtggacgcgtttgaaggagaaaggtcaaagggatctgatcctatcactttcgctgggaaaaacacgaaatcgaaggaagaatcaatcatgggtttcatcggagaaactgtagattccatcaaatctatcaagatccgtcaagttctcactcaggctatcactctcggtatgatcgttacatctgcattgataatttggaaggcattgatatgtgtcactggcagtgaatcaccagtggttgttgttctctctgaaagtatggaacctggctttcagagaggagatatattgttcttgcggatgactgatgagcctattcgagcaggcgagattgttgtgttcaatgttgatggtcgtgaaattcccattgttcatccagcaatcaaagttcatgagagaa

SEQ ID NO: 11066 - DNA, 473 bp, Arabidopsis thaliana
  unsure at all n locations
  Clone ID: LIB24-014-Q1-E1-A2
ccggtccgaaaatcncgggtcgncccacgcgtccggnnnaccgtctctaccctcctacgctccggtaaccaaagcttccgtatcgccgccgcagcttccacctcccgttcttccccatctgccacggatgtcaagagaagtgacactgaatcgagatggtactcatctttaaccaatggacaatctaagaatantgggtcatttgctcaattgaacatgaaaaccaattggtttatgggataccggaacgaatccagtgcagcagcatcagattcttcctcacaagctcctccaccggctgagaaattcgagtatcaagctgaagttagtcgcctcanggaccttattgtcaacagcttanacagcantaatgatgtgtttcttcgggaagcttattagtaatgcaaagtgatgcatttggataagnnntcgttatttgnagcgttaccannccctgancctctcaaaaggat

SEQ ID NO: 11067 - DNA, 416 bp, Arabidopsis thaliana
  Clone ID: LIB24-014-Q1-E1-A9
gggaggttactggattcacttctgatgtaagagagcagatatacaaaatggcttctgtgaatctttgttccaacatctctggtcaaattcttgctagcctcatcatgagcccacccaagcctggtgacgactcctatgaatcatacatagcagagaaggatggaattctctcatctttggcaagacgtgcaaagactcttgaagaggctctgaacaagctagagggagttacatgcaatagagcagaaggagctatgtatctattcccttgccttcaccttccacaaaaggcaattgcagctgctgaggcggaaaagacagcaccagacaatttctactgcaaacgccttctaaaagctactggaatagtcgttgtccctggttctggctttagacaggtacctggaacatggcat

SEQ ID NO: 11068 - DNA, 460 bp, Arabidopsis thaliana
  unsure at all n locations
  Clone ID: LIB24-014-Q1-E1-B1
gccncnctttcgtcttcttcagattctctctgacggttgttaaaaatccgattataacgacgacgacacccaaatcctcacaaatatataattattaatttaagcttctctgtcaaaataaaaaggagtcatgacgactctttcttctataaatctctctatacctcctcatttgcttcctagcacgactaacacttgttcttcttcctctgcaacctcttgttctcctcccaggtcttcttcttttgttcttcattcccctctttcgtttggtcaccggagattacccattagcaagaaaagcaagctccgcttctgtggagtgattacaaaggaaagctgtttctgggtccaacgatatgactaattactcaagtcagagaagatgacgaatcggagattgatgcgccggttctcgatcctggagtcggctctnctaagcctaaggagaaattgctcc

SEQ ID NO: 11069 - DNA, 464 bp, Arabidopsis thaliana
  unsure at all n locations
  Clone ID: LIB24-014-Q1-E1-B7
cgcgtccgaacanacaacaaatggctctttcaatcgttcttcttcccttcattctcattctcataccgacttttctcagttcggttttcgccgtttcaccactcaaaactgatacgttaaaaccggggcagcagctcagagactgggagcagttgatctctgcggatggtatcttcactctcggattctttacacctaaagactcatctacttccgaactcgggtcagctggtcttagatatcttggtatttggcctcaaagtattccaataaatctagtttgggtgggtaacccaaccgaatcagtttctgattcatctggttctctatccattgacaccanatgggggttctaaagataacacanggcaanacgctattccaatcttggtgaaaccaaagaccagccgccgcagctttcattgggtcgggaaatgtgtcggcaattttantcgataccggga

SEQ ID NO: 11070 - DNA, 387 bp, Arabidopsis thaliana
  unsure at all n locations
  Clone ID: LIB24-013-Q1-E1-G9
gcnctctctgtgtgtcttctacaaagaccagatctctcatctgtgttttgttggtttatctcgaccaaagcccacacgtcacgttacgttaggttacaaaacaagttttttcccttataaaaaaaacattgataaaatcgaaaaatcaattcctattttgtttccaaagcaaatctatatatctattacccatctcgaattcgaccgaacccatgttctaatctccttcgcaacattggaaatctattttaaaaatccgttgagatatagttatataagtagtttggtgacncatttaggttacacacaaagacatgggattggntggtgtancgagttctcctcctgatgttgcgatctcagctttgcgtgaagaagcatganaaa

SEQ ID NO: 11071 - DNA, 486 bp, Arabidopsis thaliana
  unsure at all n locations
  Clone ID: LIB24-013-Q1-E1-E7
ttgtttaggcggncgtaccggtaaganaattcccgggncnacccacgcgtccgaaacactccgccgaatttttacccttctccactggtcatccgcgttttttttccgggtctaaggtcaccggaaaaatggctttccggcgagtgttaaccactgtaatcctcttctgctacttactaatttcatctcaatccattgaattcaaaaactcccagaaaccccacaagatccaaggaccaatcaagactatagtcgttgtagtcatggagaatcgctccttcgatcacatcctcggttggctcaaatcgacccgacccgaaatcgacggattaaccggcaaagagtcaaatcccctcaacgtctccgatccaaattccaaaaagatcttcgtctcagacgacgccgtcttcgtagacatggattcgggtcaatcattcnangcgatccgagaacaagatattcgggtcctaacgatacaatncggcg

SEQ ID NO: 11072 - DNA, 498 bp, Arabidopsis thaliana
  unsure at all n locations
  Clone ID: LIB24-013-Q1-E1-F1
gtatnctggccgcaccggtccgnaaaancccggggtcgacccacgcgtccgatcaantcccctttttgactaaaattccgcgacttgggctttgatccattcccagtgaatctcactgcttttctcacagaaaaaaatcactcctttttcctggattttgttttctcgactgatttggggaaaagctatggtggtctgattaatctctgtctgtctttggtgagatgggtttggatgctgttaaagctaaagggaattggaaatcnnnnnnnnnnnnnnnnnnnnnnnnnnnnnnnnnnnnnnnnnnnnnnnnnnnnnnnnnnnnnnnnnnnnnnnnnnnnnnnnnnnnnnnnnnnnnnnntggttgctgggtcaaatttangtttatgattggttgcataccttcaaaatcagaccttgatgcttctcctcctctatcctaaggctcctaactgcactgttacaacaatgggaaagtaaatcggcaaatgagaaaat

SEQ ID NO: 11073 - DNA, 407 bp, Arabidopsis thaliana
  unsure at all n locations
  Clone ID: LIB24-013-Q1-E1-F10
gatcagcacatgtgatgcagttcaagtggtctgattttaggattcttgatcgtgttagcattggtcatggcggcagggctgatgagcttgtgtttgaagctatagttcaggttccagatagccctttgtttaaccaaggagttgttcttcggaaattgaataccactcgagctcaaagacgaggaagaagagctatagaagtttttaagaagctagttcgtcggagacttctctaccattcttactcaatgcaagttcacggttatatcaccaataacttaagcgatgatcagtactcatttacccttgtacatgggtgccatggaagtttctcgattaggcactggcttcaacaatctgattggattccaacattagnagctactcttgcattanctgaagaatcc

SEQ ID NO: 11074 - DNA, 432 bp, Arabidopsis thaliana
  unsure at all n locations
  Clone ID: LIB24-013-Q1-E1-F2
gctctcagattcctgattttgatcagttatggtggctttccattgtcgctgcggtcatgtcttttgcttattctgccattggacttggccttggtgtctctaaagtggtagagaacaaagaaattaaaggtagtctcactggagtcactgttgggacagtgacactgagtgggacagtgacatcgtcgcagaaaatatggagaacatttcagtctcttggcaacattgcgtttgcgtactcttactcgatgattctcatcgaaattcaggacacggtgaaatcaccgcctgccgaagtaaacacgatgagaaaagcgacttttgtaagtgtggcagtgactacagtcttctacatgctatgtggctgtgtanggtatgcaacatttggggataacgcacccggaaatctcctcgctcatggagggtttanaa

SEQ ID NO: 11075 - DNA, 493 bp, Arabidopsis thaliana
  unsure at all n locations
  Clone ID: LIB24-013-Q1-E1-F4
tgtttttctggccccacggnncggaaaaaaccggggncnncccacgcntccgctnaaatacaagaacttgctcattcctcaaagcatccacacataatcacgatgaagctctttgttcatctctctatcttcttctccatcctcttcatcactctcccatcttcttacagctgcaccgaaaatgacaagaatgccctccttcaaatcaagaaagcacttggcaatcctccccttctatcctcctggaacccccgaaccgactgttgtaccggctggaccggcgtcgaatgcactaaccgtcgcgttaccggtctcagcgttacctccggcgaagtctccggtcagatctcgtaccagatcggcgacctcgttgacctccgtacactagatttcagctacctgccacacctcaccggaaacatccacgcaccatcaccaaactcaagaacctcaacaatctctacttgaagcacatagtctctccggtccgatt

SEQ ID NO: 11076 - DNA, 444 bp, Arabidopsis thaliana
  unsure at all n locations
  Clone ID: LIB24-013-Q1-E1-F5
gggaagatttgatcggacgaggaagctgagaaaaaaacaaaaacgacaagagattcattcaaacttgcacgccaacgccggattattcccggtgtatacgtattttatacggttctatttnnnnnnnnnnnnnnnnnnnnnnnnnnnnnnnnnnnattttaaggaaagagtttttgtttgaattggaatggagggtgttttcttaaaaatgtcggtggttggagtatctccgatgataccggtgggaccttcttctttcatatgcgccatcggaggctctgttgaggagaaatcaacggctgcttctctgccgcgttgggtttcccttcgtcgtcttcgtccgcttgagtttcntcggatcggtggtaagagaanaggaaaagggaacggtaagagacgacnacccgtttttgttggagagaagggaccggaaccgcaacgaaa

SEQ ID NO: 11077 - DNA, 397 bp, Arabidopsis thaliana
  unsure at all n locations
  Clone ID: LIB24-013-Q1-E1-F6
cgctcactttgttttagctttctcctctacttcgataatgccgtttgctccttccttgttgtcatcgtcttcctcagtctctcaatttcttcccagattccccaacgcgactagattcaatgtaactccacggagcagagccgccaccgtcgtcgcggcatccgtcancganctagccggggtcgacagtacaacaatcgccgtactcggtggaggatccgtagcancactcgcggcgatggtttccttaacggatccggagaggaggcggaaattgcaggcggangaagttggcggaggcgataaggaaggttgtgagggagtatttcaatagcacggggttcnagaaggtggaggaagatctacggtgagactgatgaagtgaatcnagtacagg

SEQ ID NO: 11078 - DNA, 443 bp, Arabidopsis thaliana
  unsure at all n locations
  Clone ID: LIB24-013-Q1-E1-F8
gaaaaaaaatatgtannnnnnnnnnnnnnnnnnnnnnnnnnnnnnnnnnnnnnnnnnnnnnnnnnnnnnnnnnnnnnnnnnnnnnnnnnnnnnnnnnnnnnnnnnnnnnnccgctggacgtcgaaacaacctgcctcgtccaaacctcagaagacgatgtaaggtcaccgcttcacgggctaatattgaacaagaaggtaacacagtgaaagaacccattcagaatattaaagtaaagggatacataacggcccaagaagagtttctggagggcataacttggtcgagaggtctcgatgacattgctgatatccgcggcagatcattgctcgtcgagcttattagcgccaagactgaccagcggattacggtagaagactacgcacaacgtgtatgggccgaagcccctgatgagaagtacgagtgcgaatttgagatgcctg

SEQ ID NO: 11079 - DNA, 408 bp, Arabidopsis thaliana
  Clone ID: LIB24-013-Q1-E1-F9
atctaccaacaaatcctcaactccttcttcttcactaatagtataccacaaaacctcaaaattgtaatttattagattatcgtgatggccttagctaaagagttaatgggttatcctctcatcacagaaaggtcatcacttgtctcgtcggcgtcgcatttcaagaagaggacacagtcaacacagttctcgatcaacccttttgaccggagaccaagaaaaaccaaatccggcgtcgttgcagccatcagcgaggatttggtcaaaacgctgcgtttttccacaacgaccggagacagaaagagcgaagaggaggagaaagcggcggtgaagttcaaggtgagagctgtggttactgtgaggaacaagaacaaggaggatttgaaagagactcttgttaagcatttg

SEQ ID NO: 11080 - DNA, 444 bp, Arabidopsis thaliana
  unsure at all n locations
  Clone ID: LIB24-013-Q1-E1-G1
gctagatggcacgagcacttgcagtgctggtgtctgaacttccatgggacgagttactgttgcttcggtcaagaactttcagctggttgcgaccgttgaccaaagtcaaccgagcggtaaaggcgatgaagaaacagttcttctacagtttggtaaagtgggagatgacactttcactatggattatagacagcctctctctgcatttcaggcttttgctatctgtctcacaagtttcggcactaaacttgcctgcgagtgaaacccaacanaaggcaacagaaaagaaaaagtgaactggctttgcaaaaatgtaatgttttgatgtatcatgtgtaagtgttaacacaaaggtatgtggaaagggagaagcacataagtattaatatgtangaaacattatttaaacccataatcataatgtatctctaagttaaaaaaaaa

SEQ ID NO: 11081 - DNA, 384 bp, Arabidopsis thaliana
  unsure at all n locations
  Clone ID: LIB24-013-Q1-E1-G10
gnacacgcgtccgcaaaaaccctagaatatcttanagcttcgcttcactttcaagctcgagactttgagaaagatgcctccgaaagccaaagctaaagatgcaggtcccgtagagaggcctattcttggccgtttctcttctcacctcaagatcggaattgttgggttaccaaatgttggaaaatctantcttttcaacactcttacaaagctttcaattccagctgagaatttccccttttgtaccattgagcctaatgaggcacgtgtgaatatccccgatgagaggttcgattggctttgccaaacttacaagcctaagagtganattccagctttcntggaaattcatgacattgctgggcttgttagangagctcatga

SEQ ID NO: 11082 - DNA, 415 bp, Arabidopsis thaliana
  unsure at all n locations
  Clone ID: LIB24-013-Q1-E1-G4
ctgttcttctgcncgccacggtccgaaanncccgggtccacccacgcgtccgcntctcgtcgatgccaagtttggcgcagacttcgaagtttatggccgtggttgatactttgtcgacgcattcgccggatgaggagtatattggagagagacaacagccgtcgatttggacaggagatgcggagattgttgaagcgttttatggatttgcggcagagatcggacggatagagaaagagattgagaaaaggaacgctgatcctgaccgtagaaatangtgtggggctggtgttttgccttatgagttgttggttccgagttctgancctggtgttacgtgtagaggtgtacctaatagtgtatccatataattaagaaggaaattatttataagaaaaaaaaaanaaaaagggcg

SEQ ID NO: 11083 - DNA, 441 bp, Arabidopsis thaliana
  Clone ID: LIB24-013-Q1-E1-G5
caacaaaaccacaaagacgactctcttcagagagttttgagagggtgagagagccgtgctcggcgttgttagaaagaaagctgagaattgcaactgcttacaagagcaatgtcgacaagctgatcaagagtctcttggatttgtgcttctgtacttcttaagaggaaggtcccgcaagataccatcttctcaaaagtccaatcaatctacgcttttcaattcgccacgtcacagaatcctgaccgttagatacaaacgcgccaactcgtttgtacccaggcggaaaatgactatattacccttattcattatcatctttatccatttgacggtaaactaaaattctctctcaggtcaaactttgctttctggtacggcggcgatgtcgacgatttcgatcatcgggactgagactcctacgaatcactcaggctcggtcac

SEQ ID NO: 11084 - DNA, 445 bp, Arabidopsis thaliana
  unsure at all n locations
  Clone ID: LIB24-013-Q1-E1-G8
gaaaccgttgaaaaaagcagctcggacgtcaccaatgtgaaaaaggatggctcagctaaattgcatgaagatatccagaacattttctctcagaatcagccatcctctgttcttaaaccacctgcaactaccactggtgacattcaaaatggaatgaacaagaccgcttcagcgacaaatggaatattccgtggaacacaagcagcaagtancggtggtaacgcactccaatatgagtttgggaagcctaagggttctctttccagaagcatgcatgatgagttgggtacttcttctcaggacgctgcaaaagctgttccctattcttttggaggggaaactgcaaatctccccaaaccancatctcactcactgggaaataacaaaccggtacttccatcgatntcagtagccaaagcccttccaaaaatgggcaatcccttcc

SEQ ID NO: 11085 - DNA, 408 bp, Arabidopsis thaliana
  unsure at all n locations
  Clone ID: LIB24-013-Q1-E1-E11
gcnctctgattccaattcctcctctctctctttcgtctctctacttcgaattgattgttttaaccgccggtgatcggagcaaactctctgacggtgaccgccggtgatcattttttgtgaacttcacttttggtgtataaagcatagttcgttgggaacttttttttacagctttggagtaactacctttcatggtttttggttccaacaatggggtcaaaatcatttggaaatctattagacttggcctctggggatcttttggacattcctcagactccgagatatcttccaagagtgatgactgttcctggcattatctctgacgttgatggatatggaattagtgatggcgattcagatgtcatttcattaccttgccgtgagcggaaaatcattgtggccaat

SEQ ID NO: 11086 - DNA, 448 bp, Arabidopsis thaliana
  unsure at all n locations
  Clone ID: LIB24-013-Q1-E1-A4
gctttcntcttcttcctctacagcttcttcataaatctctctctcttctcctctcttctcaaagatcgaacctttcgatttcagtctcttcagagttctttcgttttcatcgaaacaatggcgaagaacgttgggattttggctatggatatctatttccctcccacctgtgttcaacaggaagctttggaagcacatgatggagcaagtaaagggaaatacactattggacttggccaagattgnttagctttttgcactgagcttgaagatgttatctctatgagtttcaatgcggtgacatcactttttgagaagtataagattgaccctaaccaaatcgggcgtcttgaaagtaggaaagtgangactgttattggacaaaagcaagtccatcaagaccttcttgatgcagctctttgagaaatggtggaaacactgatgtcga

SEQ ID NO: 11087 - DNA, 444 bp, Arabidopsis thaliana
  Clone ID: LIB24-013-Q1-E1-A7
gctgtctctcacttcttcttcctcacggcggcgacaatggcgacgttcactcatcaaaccccacaaacccatttcctctctcgccttcctctcagagctaaacctagacacttctccgcaagagtcaaaatgtctctccaagaatctgcgccttcactcgccgtcgttggcgttaccggagccgtcggacaagaattcctctccgtcttatccgatcgagacttcccttatagctccatcaagatgcttgcatcgaaacgctccgcagggaagcgtgttgccttcgatggccatgaatacacggtggaggagctcacggcggatagcttcaacggtgtagacatagctttgttcagtgctggtggatccataagcaaagagtttggtcctctggcggcggagaaaggaaccattgttgttgataatagctcggcttttagaatg

SEQ ID NO: 11088 - DNA, 438 bp, Arabidopsis thaliana
  unsure at all n locations
  Clone ID: LIB24-013-Q1-E1-B5
cctttcttttaacgttgatagcgctcagcttgctcagctctttgagagcgctggaaatgttgagatggttgaggttatctatgacaaagtgactggccggagcaggggtttcggatttgtgacaatgtcaaccgcagcggaagttgaagcagcagctcaacagttcaatggctatgaatttgaaggcagacctttgagagtcaatgctggccctcctccacctaaaagagaggaatccttctccagaggaccaagaannnnnnnnnnnnnnnnnnnnnnnnnnnnnnnnnnnnnnnnnnnnnnnnnnnnnnnnnnnnnnnnnnnnnnnnnnnnnnnnnnnnnnnnnnnnnnnnnnnnnnnnacggttctcaacgtantggtggtggttacggagggtctcaaanttccagttatggttcggggtcagggtccggttcn

SEQ ID NO: 11089 - DNA, 446 bp, Arabidopsis thaliana
  unsure at all n locations
  Clone ID: LIB24-013-Q1-E1-B6
ggaaaaggtgttaagtgttcaagtgaaagtgcagcagcaacaacaacctcctccagcatggcctgggagagctgtccctgaggcgcctcgtcaatcttgggatggaccaaaacccatctctatcgttggatctactggttctattggcactcagacattggatattgtggctgagaatcctgacaaattcagagttgtggctctagctgctggttcgaatgttactctacttgctgatcaggtaaggagatttaagcctgcattggttgctgttagaaacgagtcactgattaatgagcttaaagaggctttagctgatttgggactataaactccagattattccaggagaacaaaggagtgattgaggttgccccgacatcctgaagctgttaccgttgttancggaataataagttgtgccgggactaaaacctacgggttgc

SEQ ID NO: 11090 - DNA, 447 bp, Arabidopsis thaliana
  unsure at all n locations
  Clone ID: LIB24-013-Q1-E1-B7
ggaattcttgacgtcttctactccattttccatcaatacccatttcttctatcgctctcgtttccaagaaaaaagagggttttagagagaagcaaaactcaaatggcgacgaacatcggaatgatggatagtgcatacttcgtcggaagaaacgagattctgacttggattaatgatcgtcttcacctcaatctctctcgcgtcgaagaggctgcatctggtgctgtgcaatgtcagatgcttgatatgacatttccaggagttgtgccaatgcacaaggttaactttgatgcaaagaacgagtacgatatgatacaaaactacaaggtcttgcaagatgtgttcaacaagctgaaaattacaaagccattggaaattaacangcttgtcaaaaggccgggncactggataacttggagtttccgcaatgggctgaaacgtttccgg

SEQ ID NO: 11091 - DNA, 480 bp, Arabidopsis thaliana
  unsure at all n locations
  Clone ID: LIB24-013-Q1-E1-C1
tgttattctggccgccccggtccgaaaaacccgggtcganccacgcgtccggtcttcttctaccaaaattgttgcgcgacaatggagaaatacaacagtttatcagattttctcaaggagttctacatccctacgtacgtcctctcggcggaaacagaagaggaggaggaggaggagagtcgtcctacacctgcgagccccgtccttgtcttcatcaactccaaaagcggtggtcagttgggtggcgaactcattctcacctaccgatctcttctcaatcacaatcaggtctttgatctcgaccaggagactccagataaagtgctccgcagaatctatcttaacctggagaggctcaaagatgatgatttcgctcgtcagattcgggagaaattaaaaatcantgttgcaggangtgatggcactgctgggttggctcctggagttgtatgtgacctaaaattgtcacatcntcctcca

SEQ ID NO: 11092 - DNA, 413 bp, Arabidopsis thaliana
  Clone ID: LIB24-013-Q1-E1-C11
gctctttccttttctcacgccgagatttctgcgactgctctaatcttacgaccttataagaaacgacgcttattttcactctgcttgagctcttcatcgtgtcacacagcacgatcttggacgtcgttttaagcgcaaaacaaaggaaaaagactgacgtttatacatactaaatactggtttggagttttgccttttggactcagaaaactcaaaagagagagagagacatttctgtatcttatcgggttttgtgttgtcagaaagaagctcaaggacaaaaaaaaaagcaattatttttagggttcaaacgaagcaaaatttggaactttcagaagttgtgggtggtggcttcttgaacaataaagctttttcttagactcttcttccaatttgtgactcctacctatctc

SEQ ID NO: 11093 - DNA, 445 bp, Arabidopsis thaliana
  unsure at all n locations
  Clone ID: LIB24-013-Q1-E1-C8
naaacagagagcattatcaattattaacaattacacannnnnnnnnnnnnnnnnnnnnnnnnnnnnnnnnnnnnnnnnnnnnnnnnnnnngctttggccacgacggcaccgttagctccggtcaccagtcagcgaaaagtacggaacgatttggaggaaacattaccaaaaccatacatggcaagagcattagcagctccagatacagagcatccgaatggaacagaaggtcacgatagcaaaggaatgagtgttatgcaacaacatgttgctttcttcgaccaaaacgacgatggaatcgtctatccttgggagacttataagggatttcgtgaccttggnttccaaccaatttcctccaacctttgggncctactcataaacttagcgttcagctacgttacacttccgagttgggtgccatcaccattattgccggtttata

SEQ ID NO: 11094 - DNA, 441 bp, Arabidopsis thaliana
  unsure at all n locations
  Clone ID: LIB24-013-Q1-E1-D3
tcccgagattggggagctgaagagactaacccatttgtacttgagcttcaatagcttcaagggagaaattcccaaggaactagctgctcttcccgagcttcggtatctataccttcaagaaaaccgtctcattggtagaattcctgccgaactggggactctgcaaaaccttcgccacctagatgttggtaacaaccatttggtgggaactatacgggagctcatccgttttgatggaagtttcccagctcttcgcaacttgtacttgaataataactatttgagtggagggattcctgctcagctgtcaaatcttacaaacttagagattggtttacctgtcttacaacaaatttaatgggaacattccttttgccattgctcatattcctaaactgacatacctgtaccttgatnacaaccaatttancgggagaatcc

SEQ ID NO: 11095 - DNA, 496 bp, Arabidopsis thaliana
  unsure at all n locations
  Clone ID: LIB24-013-Q1-E1-D4
aactgttctcctggccgcacggtccgnaaaaaccggggtcgacccacgcgtccgngtnagatgtggnttcganatttgtatgcnaggttgtctccgacgttgaaccacaaggattgantcttaatgacaactattgcaagcctctttcaggttgtgttgcacggcgtagtgaatatgcaagttgccgaaccantggttgtggganatggtggatgagtttgtctaccagttccaaagtttctgtcaattcanagcaaagctcaagaacaaaacagaggaggagattgcattgctcagacagcacnataaggcctggaatgtctatggcgtgctcaacttcttgcaagcacttgtggagaagtcttgtntcatccagatccttgagcatgacaaggatngccttgagttcactgagactgatggctacnatttcagcggtggcaacaacgtcctgaaggtcctcggttactcacaatggccngccccttgcctgtca

SEQ ID NO: 11096 - DNA, 442 bp, Arabidopsis thaliana
  Clone ID: LIB24-013-Q1-E1-D5
gcccacgcgtccgcttttatgttgcgatggcgattgagctctgtgacgttcatcaactcacgcatttttgttcatcaaatcattccattatattgatggaattcgtttatcatccaccgtcctcaacctttcaaccgccggtggtcaacttgaacgagtttggtgaagcaaatcggaaagtactgtgaaccaaatcagagattggtgtgaagccatggtccaatcgctttctaaaggtatgaatctaaccgtttaattagacatcaccgaagaaactcgtcccctttccgacggtgctcaacatctgcgacttcgatgaactaaatcagagactttgatgaaccaaatcgttttctgaaggtatgatgctatctgtttggtgtgtggttgtttgatttgtttctggagatttaaattctgttgatgtgattgaactttgaaa

SEQ ID NO: 11097 - DNA, 439 bp, Arabidopsis thaliana
  unsure at all n locations
  Clone ID: LIB24-013-Q1-E1-D6
cttatagtgcacaaaagactgatttgaatataagtttgactgccattggcctgttgtggactttgactgatttcgtagcaaaaggactccaccatgggtctctagtggagaaaggatcgggattcaataatgcagattccactccacagcaaacaaatggcgaggacggggaaaagcatatgggtagcaattcgggcaagtcagattatgaagctccaatacaagtggtcaatcatgagaaattactgttcttagtcttttcgttaattcagaaacttgttgatgacgaacgaccagaggtcaggaattcagctgtcaggacattttttcagattttgggaagtcatggaaacaaactttcaaaaagcatgtnggaaggattgtccatggaactatatcctccaatgttggatggcgcctctcacaaggctgcaacatc

SEQ ID NO: 11098 - DNA, 501 bp, Arabidopsis thaliana
  unsure at all n locations
  Clone ID: LIB24-013-Q1-E1-E1
ctgttcttctggccgccccgggtccgnaanacccggggtggttctttagagagagaganatttataagcttctctttgggcattacaattttttttgtgaacatagaaacactcaaaacttcaaaccaaaaaaaataaatgggagaggaagannnnnnnnnnnnnnnnnnnnnnnnnnnnnnnnnnnnnnnnnnnnnnnnnnnnnnnnnnnnnnnnnnnnnnnacaagaaagtggatgctgagaaaaaaggagaagattctgacaagaaagcctcaagaangagaatctaacaaagattccaaagaagattctgctccggcggcgcctgaggctccagcaccgcctcctccgccgcaagangttgttcctaaggtttacatgcactgtgaangatgtgctanaaaaatccgcccgttgtctcaaaggcttcnaaaggaggtngaaagatgtnatgaccgnnttttaaaccggggaaaattgtgggggaaaggngagaaaac

SEQ ID NO: 11099 - DNA, 395 bp, Arabidopsis thaliana
  unsure at all n locations
  Clone ID: LIB24-013-Q1-E1-E10
gctctcatttcgccatagctgagagcttcttctactttcccttagcttcttttttccttcatttttgttctacccttgcgaatctctgaaatgaaccctcaagctaatgaccggaaggagtttcagggagattgttcggcgacgggagatctcacggcaaagcacgattcagctggaggaaacggaggtggaggtgctaggtataagctgatgtcaccggccaagcttccgatctcgaggtcgactgatatcacgattcctcctgggttgagtccgacttcgtttttggaatctcctgttttcatctccaacatcaagccagaaccttcccctactactggttctttgttcaagcctcgaccagtgcacatttctgctagctcaagttcntatac

SEQ ID NO: 11100 - DNA, 496 bp, Arabidopsis thaliana
  unsure at all n locations
  Clone ID: LIB24-013-Q1-E1-A3
gttatggccgccccggtccgnaatanacgggtcganccacgcgtccgctagggttttctttgcacactactcgctccaatgggaaagggaacagggagtttcggtaagaggaggaacaagagtcacacactctgtgtgagatgtggtcgtcgtagtttccacatccagaagagtcgttgctcggcttgtgcttacccagctgctcgcaagaggacttacaactggagtgtgaaggccatcaggaggaagactactggtaccggaaggatgaggtatctccgtaatgttcctcgtcggttcaagactggattcagagaaggtactgaagccaagccaaggagcaaggcatcagcttcatcaagcttaaagagccagttcgagtagtctctcaggaaagactaaagcttaacatttttttgcattcaactaanttgaagattacctttcaatgtggatctcaaacattangttaaggtgggttttgttccttggtaaa

SEQ ID NO: 11101 - DNA, 426 bp, Arabidopsis thaliana
  Clone ID: LIB24-011-Q1-E1-G8
gctcccatttaatggtttcctcttaaaccattcccttcccttcctcctaactgcaatctactctccacctaacattgctccgttttgactcgctcgactcggctaagtgaccacagttcctttcgagccaataaaatggctacgggacagctattttcacgcaacacacaagcgttgttctacaattataagcagcttcccattcagcgtatgcttgattttgatttcctctgtgggcgagaaactccttctgttgctggtatcataaacccaggttccgagggattccaaaagctattttttgggtcaggaggagatcgccatccctgtccacgcagccattgaggcagcatgcgctgcgcatcccacagcagatgtatcatcaacttcgcatcgtttagaagtgctgctgcttcatccatggct

SEQ ID NO: 11102 - DNA, 430 bp, Arabidopsis thaliana
  unsure at all n locations
  Clone ID: LIB24-011-Q1-E1-G9
ggaaaatgtgattatccattcgattttttcgcagaagaagacgaaagagagaagaagagaaagagatttgaaatcatggcgaatgtagtgggacagctaaaacgaggaatctcgagacaattctcaactggatcgcttcgtcgtacgcttagtcgtcaattcacgcgtcaagcttcacatgatcctcgccggaacaatatgcgatttagttttggtcgacaatcgtctttagatccgattcgtcggagtcctgatggttctaacggtccgcagcttgctgtaccggataatctcgacgctactatgcagcttctatttgtggcttgtagaggtgatgttgaaggtgttcaggatctgcttgatgaaggtattgatgttaatagtatcgatcttgatggtcgtacggctcttcatatcgctgcttgtgaan

SEQ ID NO: 11103 - DNA, 423 bp, Arabidopsis thaliana
  unsure at all n locations
  Clone ID: LIB24-011-Q1-E1-H5
gcccacgcgtccgaagannnnnnnnnnnnnnnnnnnnnnnnnnnnnnnnnnnnnnnnnnnnnnnnnnnnnnacgattctcgctcactgttcatcgaatccgtcattggatcgattcgaatttggtgtgtgttttctttccaatacctctgattagagatttcagcagatctgaacggaggagcgtcagatcggaatcgtccgtcggtggtttggtaaaaaaaaaaatggaggaagctttagaaatggcgagagccaaggatacaaaagagcgcatggctgctgttgaaaggctgcatcaacttctcgaagcttctaggaagagtttgagtcctgcggaagtgacgtcacttgttgattcttgtttggatctccttaaggatagtaattttagagtctctcaaggtgctcttcaagctcttgct

SEQ ID NO: 11104 - DNA, 424 bp, Arabidopsis thaliana
  unsure at all n locations
  Clone ID: LIB24-011-Q1-E1-H6
gcnaatttccccaaatttggtaatacgatttcgtcaatttacttcgcaatcgattcaattcaattatgtctctattactggaagagatcattagatcagtagaggctttgctgaagctcagaaatcggaatcaggaaccctatgttgacccgaatctaaacccggttcttctagttccaggaatcgctggatcaattctaaacgccgttgatcatgagaacgggaacgaagaacgtgtttgggttaggatctttggtgctgatcatgagtttcgaacaaagatgtggtctcgatttgatccttcaactggtaaaacgatatctcttgatccaaaaacgagtattgttgttcctcaagacagagctgggctacatgcaattgatgtcctagancctgatatgattgttgggcgtgagtccgtgta

SEQ ID NO: 11105 - DNA, 426 bp, Arabidopsis thaliana
  unsure at all n locations
  Clone ID: LIB24-011-Q1-E1-H7
gcccacgcgtccggaaaacgatacctaagctcaattatcttctctgcaacaaactccaaaggatccgagagagagagctctggaacgatattaacatatatcatgaagaaaaagattgaagtattgatatgggaataactaaaacttctcctaatactacaattctcttgaagactttnnnnnnnnnnnnnnnnnnnnnnnnnnnnnnnnnnnnnnnnnnnnnnnnnnnnnnnnnnnnnnnnnnnnnnnnnnnnnnnnnnggattcgaccgatcagattctcccaatttaacaactcagcagaagcaagagcatcaaagggtagagatggacgaggaatcttcagtcgccggaggtaggattccggtctacgaatcagccggtatgttatccgaaatgtttaatttccccggaagcagcggtggga

SEQ ID NO: 11106 - DNA, 435 bp, Arabidopsis thaliana
  unsure at all n locations
  Clone ID: LIB24-011-Q1-E1-H9
gattctctctcgacaatggtgtcggaccaggatctagcgaaaggagtcgagactttgcttcgacaatccgaccctagctctctcacatcgttaagcagtattgttcagcagcttgaagctaagttagggttagacctcacggagaagacgactttcatcagagatcagatcaatatcctcctccgtgctcaccaaaacnnnnnnnnnnnnnnnnnnnnnnnnnnnnnnnnnnnnnnnnnnnnnnnnnnnnnnnnnnnnnnnnnnnaccagcagcagaatttgcattccggcgtcaatgttcctccgatggcgaaagggcatttcacacttagccatccttcgcaattctctgtttcttctcaatcacaacaatatccttcacatttcgctcttcagcctccttatcactcctaagacctaaattttcgggaagcc

SEQ ID NO: 11107 - DNA, 450 bp, Arabidopsis thaliana
  unsure at all n locations
  Clone ID: LIB24-012-Q1-E1-A1
gcggacgcgtgggcggacgcgtgggcggacgcgtgggcttttgcaggattggaaaactgagaggtataaagaaatcataaaatcaggaagtgtagaaccaagacctggtgtaataagactaatggatgaagcaaaagctgctgggaaaaaactagctgtttgttctgcagctacaaagagttcagtaatcttatgtctcgagaatctaatcgatatcgtaagttgtttcctttcgccaatctctgatctaccatgcttctttcaagttttttctttatcgattatactttatgtcgtttaggagcggttccaaggacttgattgcttccttgcaggtgatttcatcacattctctctcttcnnnnnnnnnnnnnnnnnnnnnnnnnnnnnnnnnnnnnnnnnnnnnnnnnnnnnnnnnnnnnnnnnnnnnnnnnnnnnnnnnnnnaagga

SEQ ID NO: 11108 - DNA, 483 bp, Arabidopsis thaliana
  unsure at all n locations
  Clone ID: LIB24-012-Q1-E1-A10
ntgtttacgcctgcctgtaccggnccnanaattcccggatcgacccacgcgtccgcggacgcgtggggtgtgatgacgatttctctctacttggagacgatcagtcaaaccctaatcaacatcaccaccaccaccaagttcttcatcacacgccctacgctcctagacgattcaacccgaaaccatcgaatcagatccttttaccgcatcaccagaggaacggcgacgaggacgacgagaacgatgtcgttgtagaagcgtcttctgctttccacggtcacggtgttaatcctttcacggcggacgaaaattcgaatccgtatgatgataataacgcagctgtagacgaagacgaagacgaagatctcggtgccaacagatctagaatcggaggtgttcgtgttgagaagaggcagagtcaggaggagctaagtgacggaggaacaacaaatggcggtgagattactccctacggnagcttca

SEQ ID NO: 11109 - DNA, 455 bp, Arabidopsis thaliana
  unsure at all n locations
  Clone ID: LIB24-012-Q1-E1-A2
ggaaagttgcaaagactgttgacaccgatgagcttactgtcgaagagagaaacctcttgtctgttgcttacaagaacgtcattggtgctaggagagcttcctggaggatcatatcttccattgaacagaaggaagaaagcagaggaaacgatgatcatgtttccattatcaaggactacagaggaaagatcgaaactgaactcagcaaaatctgtgatggaatactcaatcttctggattctcaccttgttcccactgcatctttggccgagtccaaagtcttttacctcaaaatgaaaggagattaccacaggtaccttgctgagtttaagactggagctgagaggaaagaagctgctgagagcactctggttgcttacaagtcagctcangatattgcacttgctgaattaactcctaatcatccgattagactggggacttgctcctaactt

SEQ ID NO: 11110 - DNA, 447 bp, Arabidopsis thaliana
  unsure at all n locations
  Clone ID: LIB24-012-Q1-E1-A3
ntactgattcttcattgacggtaggagtcaccacttttggcggcgattccttgttctctattttttttgcacaagcaacatttagcttctgcaaactccagttcatctctcaaccctcatatcgccgtgttttctcgctctagtaccgcgagctcggacgaaccaggaagcaatccgttaatctagaagcggtgttgagaagatgacgattacatcaaatatctctgtacagaacgataacctcgttgttcaagggaagactatccttaccaaaatccctgacaacattatcctaactccggttaccggtaatggattcgtttccggttcatttataggcgcgacgtttgaacaaagcaagagtcttcatgtgttccccatcggtgtattggagggtcttcggttcatgtgctgtttccggtttaagctatggtggatgactcanag

SEQ ID NO: 11111 - DNA, 289 bp, Arabidopsis thaliana
  Clone ID: LIB24-012-Q1-E1-A4
gcggacgcgtgggcggacgcgtggggagaaacagcagaaaatggatgtgcattggtatcattgtgctgcttttgatcattctcattgttgtcatccccatcattaccagtttcagctcttcttgagatactggctatgttcactccttttgttttgtttcgctcttctttgtaccaatggatgtcttaatccttttgtgttcttcaaggatgtcttaatcctttcgtgtcttgtatccaatttcaatgaaatggtgaatgtttacaaagaaaaaaaaaaaaaaagggcg

SEQ ID NO: 11112 - DNA, 443 bp, Arabidopsis thaliana
  unsure at all n locations
  Clone ID: LIB24-012-Q1-E1-A5
ggcgcttctctgctgcaaattgcctttactgtgtttctctcttcccctttataaaaccgcttccgtcgtcaatggcgtgagcctaaacaagaaagaaaaaccatnnnnnnnnnnnnnnnnnnnnnnnnnnnnnnnnnnnnnnnnnnnnnnnnnnnnnnnnnnnnnnnnnnnnnnnttatccttatccgataaacccacaaataaagacagactcttttgttctttaaacagagattgtaaatccagagccgccggaaaatacaaccgccggtttactctcaggattagttgatattattcgattttaaaaatcagtaggaagaagatgaagtacgtgcttgtaacaggaggtgttgtgagtggattagggaaaggagtaacagcaagtagtattggtgttctccttaaagcttgtggtcctcgagttacttctatcaaaatcn

SEQ ID NO: 11113 - DNA, 450 bp, Arabidopsis thaliana
  Clone ID: LIB24-012-Q1-E1-A6
gcaaacattaagtagcactctttttcctctctatatctctcactcacactttttctctatatcttctcctcaacttggatatgggtgaagccgtagaggtcatgttcggaaatgggttcccggagattcacaaagccacatcacccactcaaaccctccactctaaccagcaagactgccattggtatgaagaaaccatcgatgatgatctcaagtggtcttttgccctcaacagtgttctccatcaaggaactagtgagtaccaagatattgctctgttggacaccaaacgttttggaaaggtgcttgtgattgatgggaaaatgcaaagtgctgagagagatgagtttatctaccatgaatgtttgatccatcccgctctccttttccatcccaaccccaagactgtgtttataatgggaggaggtgaaggctctgctgcaaagagaa

SEQ ID NO: 11114 - DNA, 446 bp, Arabidopsis thaliana
  unsure at all n locations
  Clone ID: LIB24-012-Q1-E1-A7
gctcttccccagatcctcctctctcttcttcactcttttaacggacacttttcactgatctattcactcactcaaatcgccgccggagctaaatcaatcaacaatgacgtcgacctacacgagattcgataccgtatttctcttttctaggttcgccggcgctaagtattcgccgttattgccgtctccgtcgtttactttatctacttccggcattcatatcagaaccaaaccgaattctcgttttcactcgattatagcatcctcctcatcttcatctgtagtcgccggaactgatagcattgagattaaatcgttgccgacgaagcctattgaaggacaaaagactggaactagcggactccggaagaaggtgaaagtttcatgggaagataattatttagccaactgggattcaggcattgtttaattcattgccacttgan

SEQ ID NO: 11115 - DNA, 429 bp, Arabidopsis thaliana
  Clone ID: LIB24-011-Q1-E1-G6
gaaaaaacagcgataaaaccgaaacatcaagcaaacaaaaaaaaaagagaagagaaattatttttttttgttttcgttttcaaaaacaaaatctttgaattttatggcaacccgtcttctccgaacaaactttatccggcgatcttaccgtttacccgcttttagcccggtgggtcctcccaccgtgactgcttccaccgccgtcgtcccggagattctctcctttggacaacaagcaccggaaccacctcttcaccacccaaaacccaccgagcaatctcacgatggtctcgatctctccgatcaagcccgtcttttctcctctatcccaacctctgatctcctccgttccaccgccgtgttgcatgcggcggcgataggtcctatggtcgacctaaggacgtgggtcatgagctctaaacttatgga

SEQ ID NO: 11116 - DNA, 424 bp, Arabidopsis thaliana
  Clone ID: LIB24-011-Q1-E1-D7
ggaattttactattggttatcagttcgagattgtgcaaacattgctgtttcgtgtctatgatattgacactcagtttcaaaattctaaggaggagctcgacgaacagcaatttctcggtgaggcaacatgtacattgtccgaggtggttaccaaatcaaataggacgattgctttagaacttatgcgtaaagaaggtgttgctgcacagactcagccacaacataatggaaagcttattgttcatgctgaggagtctttagcttctaagaccaatacagagattgtatttagggggttgaatttggaatcaaaggatactttctctaaaagtgacccgtttttggtgatatctaagattgtagagcacgggactccaatcccggtctctaaaacagaagttttaaagaatgatccaatccactt

SEQ ID NO: 11117 - DNA, 431 bp, Arabidopsis thaliana
  unsure at all n locations
  Clone ID: LIB24-011-Q1-E1-D9
gctgagtaccttgcctctcgagctcccaatcttaagtagaggattgagcttaaggcaagatggtaagaatcagtgttcttaacgatgctctcaagagcatgtacaatgctgagaaacgaggcaagaggcaggtcatgatcaggccttcctccaaagtgattatcaagtttctgattgtcatgcagaagcacggttacattggtgagtttgagtatgtcgatgaccacagatctggcaagatcgtcgttgaattgaacggaaggttgaacaagtgtggtgttatcaacccacgttttgatgttggtgtcaangaaattgaaggttggactgcccgtttgctcccttctaaacagtttggttacatcgtgcctgactacatcctgccggcantatggaccatgaaanaaacctaagaaggaanaatgtttggg

SEQ ID NO: 11118 - DNA, 485 bp, Arabidopsis thaliana
  unsure at all n locations
  Clone ID: LIB24-011-Q1-E1-E1
ntgttacgcctggccgtagcngtccgaaaattcaagggtcgacccacgcgtccgctcccgcactatctacttcttgctcctccgtcatggctttctcaacatcaaacgcgcttcgttaccatcatcctcaaatttctctcaggaactctcttcgcgctcccaaatcgccttcttttgtcaggcttcccctcggaaaggtgttacagagcaggattgtgatacgtgctgcttcgtctgcggctggtaatccacagtctgatgctgactttaatccgtatgaggttcttggtgttaaccctatagagggatttgacaagatcaagcaaacttatggaaggaaacttaaagatgctcagaggagcggtgatgaagccactgctgctctagtaagttacgttacctctctctttctttgggagtcctgtaaagtgatttttttttttttttttttcctgttaacacgtctctgttttaccttttgataa

SEQ ID NO: 11119 - DNA, 436 bp, Arabidopsis thaliana
  unsure at all n locations
  Clone ID: LIB24-011-Q1-E1-E10
ggccaacgagaagagaaaaagtatcttcctttgagaagtgcaagtccatggcagctctctgttgttgtcccaccaccatcatcgtctccgggaaggtttcttcacggattaaaaccgcaggcccattaccccgaatcaacccttttaagaatcagaaacgattgattacagagagaagaaacttgatcgttaaatcgatcattgaagacagagaagcaatcgatgttaaaaatgacaatttcaaggcagaggaagaactatcagaagataaagtagaagatacagatcggctgatgagtcgaggtatcaacgcagctatagttctcgccgccggtaccgttgcggttactaagcttttaaccattgatcatgactattggcaaggttggactctctacgagatacttangtatgcacctgaacataattggtttgc

SEQ ID NO: 11120 - DNA, 472 bp, Arabidopsis thaliana
  unsure at all n locations
  Clone ID: LIB24-011-Q1-E1-E2
tagcccgtccgnaaattcaagggtcnacccacgcgtccgccnacgcgtccgcttctctcaagaacaaaaaagaaagaaagccctcacattgctttgtccaaagagagtcttagaatctcaaacctatctcttagggagaaaccctgattctatattcttacttgctttcctttaagtttctgtctcgtccagagggacaaagccccccaattccagtcaatttcctttgtttttgatggattgagtttctttctgttggagaaagaaaaagaaaagagctacacatacacttgcagagaagaagcaacaatgagagaagagaaatccaagactaataagctggcatggtccaagaagatggtaaggaaatggttcaatatcaaaagcaaaacagaaggagtttcaagcagatgatccttcttctgctggaaattgaagtagagcatagaagtagcttttcagctgagaaagc

SEQ ID NO: 11121 - DNA, 425 bp, Arabidopsis thaliana
  Clone ID: LIB24-011-Q1-E1-E8
gcgtctttcttcctcagtcgccctacaatggctttgcctttgtctggcacgcgccacctcacgcgcgctctcctctctaatgtcactcttatggctcctcctcggattccttcctctgttcactacggtggatctcggttaggttgttcgacccggttcttctcaattcgatgtggagctaaccggtcaggttctacttactcgccgcttaactctggctctaactttagtgatcggcctccgacggagatggctcctttgtttccgggatgcgattatgagcactggcttattgttatggataaacctggcggggaaggcgcgactaagcagcagatgattgattgttacattcaaaccctagcgaaagtcgttggaagtgaggaagaggcgaagaagcgaatctacaatgtttcatgtgagaa

SEQ ID NO: 11122 - DNA, 476 bp, Arabidopsis thaliana
  unsure at all n locations
  Clone ID: LIB24-011-Q1-E1-F2
gcctngacgtagccgtccgatattcaagggtccncccacgcgtccggaaaccggtggctcagctgaaaccggtggtgaaagcgctagtggtggagctgcatccggtggagaaagtgctagtggtggagctgcttccagtggctcggttgaaagtggtggtgaaagcactggagctacttccggtggctcagctgaaaccagtgatgaaagcgctagtggtgganctgcatccggtggtgagagtgctagtggtggagctgcttccggtggctcggctgaaaccggcggtgaaagcactancagtggagttgcttctggtggctcaactggtactgaaagtgctagtgctggagctgcttccggtggctcgactgacgccaatgggtggagccgctgccggaggctcaactgaaaccggtagtgganctagcaccgaaacgagttcaatgggtggtggaagcctgctgccggtggcg

SEQ ID NO: 11123 - DNA, 428 bp, Arabidopsis thaliana
  unsure at all n locations
  Clone ID: LIB24-011-Q1-E1-F7
gcaaacacaaaaatactgctgaggaaaagcaatccacacgattcgattcaaagttttcaatttttccccaaaagtttgggttttggattccntnncgnannggaaaagaancnactccnttcaatttaagggtttgggnttccgnttgggccccaacaaangangtntnaagnnantcctcctccgnttgngtctgtttcagatggaagacaatgataagtctccccctaaggattactataagattctagaagttgattacgacgcaactgaggaattgatcagactcaattatcggaagcttgcattgaagtggcatcctgataagcacaaaggcgatagtgcagctacagaaaaatttcaagagattaatgaagcttataatgtgctgatggaccctgctaaacgttttgagtatgatttcactg

SEQ ID NO: 11124 - DNA, 436 bp, Arabidopsis thaliana
  unsure at all n locations
  Clone ID: LIB24-011-Q1-E1-F8
gaggaaatttactccataaagttgcctggggacccgaaacttggcgaaggcaaacctgagaatcaaaaccacgccattgtgtttactcgcggaaatgctatccaaactattgatatgaatcaggataattattttgaagaagccttaaagatgagaaatcttttggaggaatttgaccgggaccatggaattcgaccacctactattctggagttagggaacatgtctttactggaagtgtctcctccttggcatctttcatgtccaatcaaagaaaccagctttgtaactcctaggtcaacgaantattggcaaaaccccttaaggntccgcatgcattanggccaccaagaatgtcttngacagantattccanaattacacgttggtgggaacaacnagggctccccggtcaaccataattattgaagatata

SEQ ID NO: 11125 - DNA, 480 bp, Arabidopsis thaliana
  unsure at all n locations
  Clone ID: LIB24-011-Q1-E1-G1
ngttacgcctgccgtagcggtccgaaaattcacgggtcgacccacgcgtccgaaagatcctcactctccttctctgatctcgccatggaacctgacgtcagtatcgagactttgtcgatcattcggatcgccgtccttccgatcggcactattccgccgacgcttctccgggactaccactcgatgctgctccgtcatcacacgatcgcgctctcagctattagctctttctacactgaacatcagaaatctccattcacgaatcagccgtgggattccggctctctccggttcaaatttgtgcttggtggttctcctccgagtccttgggaggattttcagtctaatcggaagatgctcgccgtgatcggcctttgccactgtccctcgtcccctgatcttgattctgtcactgaaaaattcaatgtcgcttgtaagagttattcctcggctcttgtccggcgctgcttcgctttctcc

SEQ ID NO: 11126 - DNA, 435 bp, Arabidopsis thaliana
  unsure at all n locations
  Clone ID: LIB24-011-Q1-E1-G10
gcttattacatanaaataatggctcagggacaccaaggcttatgctttgggtttatcttcttactatgcttcttcagctctacttttgcactcaggattcttaaggacctccctatgatggagccaagaaagctagatctgaaccatgaaatgatgcctgggatggttatgctacagccagatcatgaggtccaacctgagcacacggtcaagcctggccatacactccagtccatgtccggtgcattagaacatcctgagcacaaggaaaagcctgaccataaactccagtctatgttgggagaacatcctgagcacaaggaaaagcctgaccataaactccagtctatgttgggagaacatcctgagcacaaggaaaagcctgaccataaactccagtctatgttgggaaaacatcctgagcacaagggaaan

SEQ ID NO: 11127 - DNA, 434 bp, Arabidopsis thaliana
  unsure at all n locations
  Clone ID: LIB24-011-Q1-E1-G11
gcccacgcgtccgctttctctctcgttttctaacgcatacactttgaatggcgcccatgagtttgcctccaggattcaggtttcatcccactgatgaagaactggtggcttactatcttgataggaaggtcaacggccaagccattgagctcgagatcatcccagaagttgatctttataaatgcgagccatgggacttgcctgaaaagtcatttttgccgggaaacgacatggaatggtacttttacagcacaagggataagaagtatccaaatggctctaggacgaaccgtgcgacccgagcgggttactggaaagccacggggaaagatcgtacagtagaatcaaagaagatgaagatgggaatgaagaagacactggtttaatatagaggaaaggntcctcaagggcctccgtacaaattggtcaagcan

SEQ ID NO: 11128 - DNA, 435 bp, Arabidopsis thaliana
  Clone ID: LIB24-011-Q1-E1-G12
gcccacgcgtccgatttacggaagtgtttcaatgtatgttcgattacattgataagctttttgttatggttcgacctcggaagctcttattcatggctattgatggtgttgctccaagagctaaaatgaatcaacagagagctagaaggtttagagctgctaaagatgcagctgaagcagcagctgaagaagagcagctgcgggaagagtttgagagagaagggaagaagttgcctcctaaagtggattctcaagtttttgactctaatgttattactcctggaacagagttcatggctactctgtcctttgcgttgcgatactacattcacgttagactaaattctgatcctgggtggaaaaatattaaggttatactctcggatgctaatgttcctggcgaaggggaacacaagatcatgtcatacatacgtt

SEQ ID NO: 11129 - DNA, 487 bp, Arabidopsis thaliana
  unsure at all n locations
  Clone ID: LIB24-011-Q1-E1-G2
ctgttacgcctgcncgtagcccgtccgaaaattccngggtcnacccacgcgtccgcgagacgcgtgggcggacgcgtgggggagtttccgataaccgctatccgggagatcaaaattctgaagaagctgcatcatgaaaatgtcatccatttgaaagagattgttacttctccaggtaataaggaactcttatcttagcttgtaattgctttagaaattttgtcaaaaggggtgttaagtttgatatgtagagttttgtgactgtttttgtctttaaaaggtcgagatagggatgatcaaggaaagccagataataacaaatacaagggtggaatctacatggtctttgagtacatggatcatgacttgactggacttgctgatcgtcctggactgagatttacggttcctcagataaagtgttacatgaagcaactgctgactgggcttcactaatgtcatgtgaatcaagtgcctcancgtgata

SEQ ID NO: 11130 - DNA, 429 bp, Arabidopsis thaliana
  unsure at all n locations
  Clone ID: LIB24-011-Q1-E1-D5
gatcaaatgtttgaattcttccatctctcataattcttaagtggtcgtggtgtgtactatctcctaagctctctgtttttttttttgtttgttcattggctatatttcaggtcttcttcttcttcttcaagaatgagctaatactcacagaanaagaagatttttctttggatttttcactactgaggcattgttgtgaaattggatggtagtagcattggaatggcagaacaaaagagtagtaacggaggaggaggaggaggagatgttgttatcaatgttccagttgaggaagcatcaaggcgttccaaggaaatggcttcaccaagagtctgagaaaggagttccctttagtaaaagcccttctcctgaaatctctaagcttgttggtagtcctaacaaagcctcctaagagctccaaatcagaac

SEQ ID NO: 11131 - DNA, 477 bp, Arabidopsis thaliana
  unsure at all n locations
  Clone ID: LIB24-011-Q1-E1-B2
tttcgctgnacgtagcggtccganattcangggtccacccacgcgtccgcagacgcgtgnnnnnnnnnnnnnnnnnnnnnnnnnnnnnnnnnnnnnnnnnnnnnnnnnnnnnnnnnnnnnnnnnnnnnnnnnnntttgaattttcaatattgatttctcccatggcgagtagcagttgcagcagatctatctctgtttcaaattctgattctctcggtgttttttgtttgagctagggctaaattagtttccttcttgggtttttattcgtaatccgattcaaagtttgtatctttgggagggatgggtaagaggcaaatatcacaagatgaagtaggtccgcccataaaaccaagagctggtttacgaagggaacaagctggaagaggttcttacagaggtagttaagttactttgtatctcatcgaaaacgaatcaaaagaagcttctttttttttttaatanaggttgggggaa

SEQ ID NO: 11132 - DNA, 483 bp, Arabidopsis thaliana
  unsure at all n locations
  Clone ID: LIB24-011-Q1-E1-B3
aactgttagcctgccgtagcgtccgaaattccngggtcnacccacgcgtccggccacattcaccggtactcatctgaccaagctagggtttcgcagtcatcatcatgtaccgtacggcagcttctcgagccaaggcccttaagggcattctaaaccacaattttcgagcttctcgttatgcaagttctagtgctgttgcaacgagctcttcttcctccagctggctaagtggaggctactctagttcacttccttctatgaacattcccttggctggtgtctctcttccaccaccactctctgaccatgttgagcctagcaaacttaagaccactactcttccaaatggtctgactatagccactgagatgtctccgaatccagcagcttccattggtttatacgtttgactgtggttctatttatgaagaccctcaattccgtgggagcgacgcacttgcttgaaaaggatggcattcaaag

SEQ ID NO: 11133 - DNA, 476 bp, Arabidopsis thaliana
  unsure at all n locations
  Clone ID: LIB24-011-Q1-E1-B4
ttaccctgcccgtancggtccgaaattcacgggtcgacccacgcgtccgcggacgcgtggggtcctccgaagcagaagactcaggccgaatnnnnnnnnnnnnnnnnnnnnnnnnnnnnnnnnnnnnnnnnnnnnnnnnnnnnnnnnagatctcgtggccgtccaccgaagccgaaagatccatcggagcctccccaggagaaggtcattaccggatctggaaggccacgaggacgaccaccgaagagaccgagaacagattcggagacggttgctgcgccggaaccggcagctcaggcgacaggtgagcgtaggggacgtgggagacctccgaaggtgaagccgacggtggttgctccggttgggtgctgaattaatcggtacttatgcaatttcggaatctttagttactgaaaaatggaatctcttagagagtaagagagtgctttaatttaacttaattagatttatttgga

SEQ ID NO: 11134 - DNA, 424 bp, Arabidopsis thaliana
  Clone ID: LIB24-011-Q1-E1-B5
gcggacgcgtgggcagaatcgctgcttctgcagcctctcgtctcttttcccattctaagtctgtgcttccttttggatcatctaaacgtcaagacaacgaagaagcttctctactggctactgctgattcggttactgcagtcgtggcagccaaagaggaagttaagcaggccgtcgcagatgatctcaaatcaaaccgttcaccgccttgtgagtggtttgtatgtgatgatgataaaagcggcaccaggttcttctttattcagggatcagattcactggcctcatggcaagctaaccttctgttcgagcctgttccatttgaggaccttgatgtgcttgttcacagaggcatatacgaagctgcaaaaggaatatacgaacagatgttaccagaagttcatgcccacctcaattcccgtgg

SEQ ID NO: 11135 - DNA, 422 bp, Arabidopsis thaliana
  unsure at all n locations
  Clone ID: LIB24-011-Q1-E1-B7
gcccacgcgtccgcgtttttgaaaaaactcaaattannnnnnnnnnnnnnnnnnnnnnnnnnnnnnnnnnnnnnnnnnnnnnnnnnnnnnnnnnnnnnnnnnnnnnnnnnnnnnnnnnnnnnnnnnnnnnnngattgttgattacgtcggtggatctttgttctcctctgtgttgttttcattgctagatttcgtcaatgattggcttctcacgattcgatttttccggctcctgttcttaatttcctctgagagaatgatggatgagggatcagtaggggatgtgagtaggattgatgaagctgatgttgctcaccttcaattcaagaatagtgagcagtcgtttaaaccggagaacattgaagtccgggaagtaaaagaagtgcangttcagagagaagctggttctcctgattgttctt

SEQ ID NO: 11136 - DNA, 427 bp, Arabidopsis thaliana
  unsure at all n locations
  Clone ID: LIB24-011-Q1-E1-B8
gaaagattcttcaagggaattccatgttgaaaagggaaaagggacacctctcaaagatattcccaatgttgcttacaaggtatcaaggaagaagtctgatgaagttttcaagcagttacacacaattctattcggtgggaagagagtaaaagctactcagctcaaggcacacatattacgcttttctggttacaaatggcaaggagatgaggaaaaggcaaaattgaaagtcaaagaaaagtttgagaaaatcaacaaagaaaaattgctggagttttgcgatttatttgacatatcagttgctaaggctaccacaaagaaggaagatattgtgacaaagctgggttgagtttttggagaaacctcatgcaacaactgatgttccaatcaatgagaaagagaagggattgaancgcaaaagaactcc

SEQ ID NO: 11137 - DNA, 437 bp, Arabidopsis thaliana
  unsure at all n locations
  Clone ID: LIB24-011-Q1-E1-B9
gcttatatactactgagaatcttcaatttctgcancttttgtatctcttcctgatcaccaaataagaaaactcttgtggttctattgaattgggtttccactatctttattgtanagatggagtcttcaagtccccaccatagncacattgttgaggttaatgttggnaaatctgatgaagagagaataattgtggcgagtaaagtctgtggagaagcaccatgtgggttttcagattctaagaatgcttccggggatgctcacnaacgctctgcttctatgcggaagctttgtatcgccgtcgtgctgtgtctagtgttcatgagtgttgaagttgttggtgggattaaagccaatagtttagctatattaaccgatgcagctcatttgctctctgacgttgctgcctttgctatctccctcttctcaaatgtggg

SEQ ID NO: 11138 - DNA, 435 bp, Arabidopsis thaliana
  unsure at all n locations
  Clone ID: LIB24-011-Q1-E1-C10
tcacatcaccgattcaagagagaacaccgaatatgaccgccgattcaaccgtcgcactcgttcatagcgtcgtttctaacggtgatgtctccaacggaaacacctccgcttcctctaagaaatctcgtgagattgaccgtcgccgccgcagacggaagcagaagaagaacaacaaagcatcccaagccgatgtagatgcatcggacgtttctgctgcttctgaatccaaagagaatacagatccccagccacaggtttgtgagcagattgtgatagagtatgttccaagagcaagctgaatttgaagatggttttaacgatgagtttaaggaaatcttcgagaagttcaacttccgcgaacctcttgcctctgaagaagacggtacgaaagatgagtctgangagaaagaagatgtcaaaaagaanggtaactct

SEQ ID NO: 11139 - DNA, 422 bp, Arabidopsis thaliana
  unsure at all n locations
  Clone ID: LIB24-011-Q1-E1-C11
ctcatcatctgcgacgaaattcatcactcgctctctctctgctcggaacgattccctcttcgctagccttatttgattcgtatttgtctgatttcgtttaatcttctagannnnnnnnnnnnnnnnnnnnnnnnnnnnnnnnnnnnnnnnnnnnnnnnnnnnnnnnnnnnnnnnnnggtgataatggatgcaggtatgaacaacacttcttctcactacaagacgcaggctcgttgccctcttcaagaacactttcttcccaggaaaccttctaaggaaaacctggacaggttcataccgaacagatcagcgatgaattttgactatgctcactttgccctcactgaaggaagaaaaggtaaggatcanactgcancggtaagttcaccatccaaaagaggctacangaagcaattggctga

SEQ ID NO: 11140 - DNA, 422 bp, Arabidopsis thaliana
  Clone ID: LIB24-011-Q1-E1-C7
gagttgcttctccagcaacggtcaaaaacaaaggttactttcccacttgtgtggacaaacacttgttgcagccatcctctttaccgtgaatccgagcttattgaagagaatgtgcttggtgtaagaaatgccgcacaaaggaagcttttcgatgagctcggtattgtagcagaagatgtaccagtcgatgagttcactcccttgggacgcatgctttacaaggcaccttctgatgggaaatggggagagcacgaagttgactatctactcttcatcgtgcgggatgtgaagcttcaaccaaacccagatgaagtggctgagatcaagtacgtgagcagggaagagcttaaggagctggtgaagaaagcagatgctggcgatgaagctgtgaaactatctccatggttcagattggtggtgga

SEQ ID NO: 11141 - DNA, 488 bp, Arabidopsis thaliana
  unsure at all n locations
  Clone ID: LIB24-011-Q1-E1-C9
tttttacgccgnccggtaccggncaagaattcccgcggtcgacccacgcgtccggatcaagaacatccgggacagtgtgaagcatgtgaaaacgtcagagtcccatgaggagaggtttactgagctcaaggaacagcttcaagttccaagcgagaaggtgctttctcttgatgatcagacgcaatggaacacaacatatatgatgcttgtggctgcttcagaattaaaggaagtgttctcgtgcttagacactgctgatcctgactacaagaaacctccttcagcagaggattggaggcatgtggaggcactttgcacattcctgaagcctcttttcgaagcagtctccactcttcaatctactggaaacccatctgctgttaccttcttccatgaagtgtggaagacacagtcagatttgtctcgggcgatagctggagaggattcttttgtcacaggtattgctaaaaccatgcaaganaaagttt

SEQ ID NO: 11142 - DNA, 432 bp, Arabidopsis thaliana
  unsure at all n locations
  Clone ID: LIB24-011-Q1-E1-D12
gaaccatgccaatctcaattccccttaacgccactctacaatacnnnnnnnnnnnnnnnnnnnnnnnnnnnnnnnnnnnnnnnnnnnnnnnnnnnnnnnnnnnnnnnnnnnnnnnaaccantgtttcccttancggaattcgccancgatgcctcangatggncanttcntgcgtctccaacgctcanaaatccgtcctgaatggtgccancgattccgtctctgtcgtcgggcgggancagattcgtcttggtcttcctagcaaaggacgcatggccgccgattcgctggatcttctcaaggattgccaattgtttgtcaaacaagtcaatccacgacaatatgttgctcaaattcctcaattaccaaatactgaagtttgggttcaacgaacaaaaggacaatgtcaagaaaagttgcaacaanggaatt

SEQ ID NO: 11143 - DNA, 464 bp, Arabidopsis thaliana
  unsure at all n locations
  Clone ID: LIB24-011-Q1-E1-D3
ccgaaaattcangggtccacccacgcgtccgnnnnnnnnnnnnnnnnnnnnnnnnnnnnnnnnnnnnnnnnnnnnnnnnnnnnnnnnnnnnnnnnnnnnnnnnnnnnnnnnnnnnnnnnnngtgtccattttattaggcatgttggtgatctttgtttcaccaatggtgttcgcagatgatttgacaccaatcccagagggcaaaccccaagtggtgcagtggttcaatacccacgttggtccattggctcaacgtaaaggcttagatcctgctctcgtagctgctgaggctgctccacgtatcatcaacgtgaatccaaagggaggtgaattcaaaacactaacagacgcaataaagagcgttcccgcagggaacacaaagcgggtgatcataaagatggctcatggtgaagtacagagagaaggtcactatcgacaggaacaaanccttcattacattgatg

SEQ ID NO: 11144 - DNA, 462 bp, Arabidopsis thaliana
  unsure at all n locations
  Clone ID: LIB24-011-Q1-E1-D4
cgtccganaattcaagggtccacccacgcgtccgcnnacgcgtccgagaaattcaaaaaacaacatggatgatcatgaaacccctcttttgtccaaggacnnnnnnnnnnnnnnnnnnnnnnnnnnnnnnnnnnnnnntgtggtggtttcatctttgaaatggatattgaaagttgtaatgtctgtgatttttgtgacttgggttgtgttccttatgatgtatcctggatcactcggtgatcaaatcctcacaaactggagagcaatctcctccaacactctctttggcctcacangaagcatgttcttaattttcagtggtcccgattcttgtcatcgccatcttggcttctctctatctgataatctcangggaagagacggttttcactaaagaagaagataacgaaattcccgaggtttaggctatggacattcctgttcctgtggatggaacatttg

SEQ ID NO: 11145 - DNA, 435 bp, Arabidopsis thaliana
  unsure at all n locations
  Clone ID: LIB24-011-Q1-E1-B10
gagtggatccgccgtagctggaggatccgtcgttacaaaatcatgtcatcttctcccaagctgtttcacgcgcgtccatcattcttcacgcgccgatcgacgcctttgatcgtcttcacctctctcgctatcggtctaaccggtttccttttcggattatcaacgatccttttccctggtctccggttatctggccggtcctgcctcaccaacttgccaccgaagactgttaaaatcgtctgggacgtcgctggtaatagtatcgttaatggcgaagtcaagaggcacaaagtgatgggattcgtcggaatccagaccggattcagatctgctggccggagacgagctctcaggaacacatggatgccgtccgattccgaaggccttcgaagattggaagaatcaacangattaaccaataagatttattatagg

SEQ ID NO: 11146 - DNA, 430 bp, Arabidopsis thaliana
  unsure at all n locations
  Clone ID: LIB24-009-Q1-E1-B5
gcggacgcgtgggcggacgcgtgggcgactcagagcttttgagtcttctaaatctctatcgaatttttctagggttagggctcctgatcgatttcgcgagctctgcgattattttaagtattaggatccgaaattagaaatgggtggagagggagattcaagtcagccgcagagtggtgaaggagaagctgtggctgtgaacatcaggtgctctaatggcacnaaatttagtgtgaanacgagtctcgattcancggtggagtctttcaaagagttggtggctcagagcagcgatgttcaagctaatnaagcagcngcttgatttacaaggggtcgtaatcntcangggacgatcaaaantctcctnnngctatggtttgcaggctgattcacacaattcatangggttagaagcctctgcaccttcntc

SEQ ID NO: 11147 - DNA, 423 bp, Arabidopsis thaliana
  unsure at all n locations
  Clone ID: LIB24-009-Q1-E1-C12
cctcgcactttcaggctgaacaaagtactgacagatgctaataaatacacggaggaagaatatgctcctttaattattatctgagatttttcaattcaagttcgtgtggattcagaatcaaaatggaagaagatttgttgggcatttgtgggtttgattcgtcgaagaaatatcgattagaagaacttgccaagtatcagtcgggttcatgtattgagtttgaagatgatgatgaaatggcagtggattatccatgcccgttttgctcagatgattatgatttagttgaattgtgtcaccatatcgatgaggagcatcaactagacgccaacantgggatatgtccggtttgtagcagacgagtgaagatgcatatggttgatcacattaccactcancatanaaatgtcctcaagagacctt

SEQ ID NO: 11148 - DNA, 432 bp, Arabidopsis thaliana
  unsure at all n locations
  Clone ID: LIB24-009-Q1-E1-C7
tgcataagcacacagtggtattaatgcaaaggctgacaaagaagaatctgcaaagaaacanagtggctctgctataccagaggttcttggactangacagtcaggtggttgtagctgttctaaacaagacgaagattcctcgattgttataccaacaaaatatagcatagaagatatcctctctgaagaatctgcagtccagggaacagagacttctagtctcaccgcgtctttgactcaactcgttgagaatcacagggaaaganaaggaatctctactcgggacacagagttctcacttctccttctatagcttcttccacaaagcgaatcatctgctacatcaagagactgtanaaaaccctaagggctaaacctgaatganttcgcggcttaaccgctcgtgaacttgtgacacgtaaagattcggtc

SEQ ID NO: 11149 - DNA, 428 bp, Arabidopsis thaliana
  Clone ID: LIB24-009-Q1-E1-C8
gggagctcctcttgaggatattgttagaggtgttgaggaagtcgatgcagtcccaggaaggtgtgagttgattgatgaggaacaagcttttggtgttattgtggatcatgcaaacacacctgatggcttgtcaaggctgctagattcaattcgagagcttaaaccgagaagaatcattaccgttattggttgtgagggtgagaatgaaagagggaaaagaccgcttatgacgaaaattgctactgaaaagagcgatgtgacgatgttgacatctgataatccgaggaatgaagatccattggacatcttggatgacatgttgtctgggattggatggacgatgcaagagtatttgaaacatggcgaacacaattactatccgcctttggcaaatggtcatagactcttccttcacgatattagacgtg

SEQ ID NO: 11150 - DNA, 430 bp, Arabidopsis thaliana
  unsure at all n locations
  Clone ID: LIB24-009-Q1-E1-D10
ctcctcctccactatagctgcctgtattcgtcttctctatcaccctcgttatctggatctgaaatattaggtgatacgaagccatgacagtttcagaagcttatagtccacctctgttcagtatagccccgatgatgggatggacagacaatcattacagaactctagcgcgtcttataacaaaacacgcatggctctacactgaaatgttagctgctgaaaccattgtctatcaagaagataacctggacagctttttggcattctctccagaccaacatcccatcgttcttcaaattggtgggaagaaacttggaaaatttggctaaagcaaccaagacttgctaatgcttacgcctatgatgaaattaattttaactgtgggatgtcctaacccaaaagttaaggggangaaggttgtttttgggtg

SEQ ID NO: 11151 - DNA, 472 bp, Arabidopsis thaliana
  unsure at all n locations
  Clone ID: LIB24-009-Q1-E1-D12
ggngaangttttacggccccaggtaccggaanagaattcgcgggtcgacccacgcgtccgctcgaanaaaaacaacatacgcagagaaactcaaaactcgaagaacgtttcatatagcaacgatgctttcttcatctccaacttcctttactcatccatttctctcttcatcnccgcctctatctccgatatctccgccgtctcgcacggntcggatntctccacctctcgtctccgcctcttgctcatacacctacacggaagattcgccgagactgcatcagatnccgcggcgattgacgacggtgccagcttcgctttacgatgttcttgaggttcctttangcgcgacgagtcaggatatcanatcggcttaccgggagattatccaaggatntgccatccagacgtggcgggaactgatcggacttcntcctcatcggcggangaattcatgaaagattcatgcngg

SEQ ID NO: 11152 - DNA, 489 bp, Arabidopsis thaliana
  unsure at all n locations
  Clone ID: LIB24-009-Q1-E1-D3
cttttattcagcccgccacagtgtccannaatcccgggtcgacccacgcntccagnatcnctccttgaagatattgttagaggtgttgaggaagtcgatgcagtcccaggaaggtgtgagttgattgatgaggaacaagcttttggtgttattgtggatcatgcanacacacctgatggcttgtcaaggctgctagattcaattcgagagcttaaaccgagaagaatcagtaccgttantggttgtgagggtgagaatggaagaaggaaaagacgncttatgaacgaaaaattgctacggaaaaagaagcgatgttgacgatgtttacatcctgataatcccgaaggagatgaagatnccatttggacatccttgggatgacaangttgttccggggantgggattggacnaatccaangagttantntnaaacattggcgaaanacgatttactaancgccttttggcaaatggtcntagactccttc

SEQ ID NO: 11153 - DNA, 460 bp, Arabidopsis thaliana
  unsure at all n locations
  Clone ID: LIB24-009-Q1-E1-D5
nttagccgccggtaccggacaaaatcncgggtcgacccacgcgtccgaaaaagagcacaaggaacagttaaaagtcgggatttttgggtatttgagaagcaatcggaacaacaacggcgtttgtaacgcggatttatgtcggctgtgtctgaannnnnnnnnnnnnnnnnnnnnnnnnnnnnnnnnnnnnnnnnnnnnnnnnnnnnnnnnnnnnnnnnnnnnnnnnnnnnnnnnnnnnnnnnnnnnnnnnnnnnnnnnnnnnnnnnnngcttctgctccgaacagaggcttattcttgangttccttcnatttccatggggcttaagactaacaggaaatcctactaggcaagtttaagtatccctgtggganttanggccgaagccatcanggcaaatttgctgctgannatttgaacccattcactaaaactaagaaatggttgggtacntaagaaaa

SEQ ID NO: 11154 - DNA, 450 bp, Arabidopsis thaliana
  unsure at all n locations
  Clone ID: LIB24-009-Q1-E1-D7
gcaaactctttgagacctaaagagagagagagcgatagtgagatttagatcaacagatttgaatcgatttctgaaaacatgcagtacaagaatctggggaaatcgggtttaaaagtgagcacgctctcgttcggagcgtgggttacgttcgggaaccagctcgatgtgaaagaagcgaaatcgattcttcagtgttgtcgtgatcatggagtcaatttcttcgataacgctgaggtttacgctaatggtcgcgctgangagattatggggtcaagcgattcgtgaactgggttggcgtcgattccgatatcgtcatctctaccaaagattctcctgggggtgggcctggtccctnaacgaatnaangggtttatcctagggaaaacatantcgttgnaagggcactaanaccttctctcaaaacggacnttgatatgggaattaangttg

SEQ ID NO: 11155 - DNA, 424 bp, Arabidopsis thaliana
  unsure at all n locations
  Clone ID: LIB24-009-Q1-E1-E11
gggcagttacttatgcgtacagctggaaaaacgcctccggtttttctcagaccataaagaattggtttgggggacacagccataattcaccttctcttttcatagtggcaattcttatctacttatccccgaacatgctttctgcgttgctgtttttgtttccattcattcggcgctatcttgaaaggtctgactataagataatgatgctgatgatgtggtggtctcagcctcgtctgtatataggaaggggtatgcatgagagcgctttgtcacttttcangtacacaatgttttggatngttctgctgatttcaaagctggcattcagttantacgctgagattaaagcccttgttggtccaaccnaagatataatgcgaatcatatatccgtctacagctggcatganttttcccctcac

SEQ ID NO: 11156 - DNA, 425 bp, Arabidopsis thaliana
  unsure at all n locations
  Clone ID: LIB24-009-Q1-E1-E12
cgtccgctcactttgttttagctttctcctctacttcgataatgccgtttgctccttccttgttgtcatcgtcttcctcagtctctcaatttcttcccagattccccaacgcgactagattcaatgtaactccacggagcagagccgccaccgtcgtcgcggcatccgtcaccgacctagccggggtcgacagtacaacaatcgccgtactcggtggaggatccgtagcagcactcgcggcgatggtttccttaacggatccggagaggaggcggaaattgcaggcggaggaagttggcggaggcgataaggaggttgtgagggagtatttcaatagcacggggttcgagangtggaggaagatctacggtgagactgatgaagtgaatcnagtacanaaaggatattcgactcggtcaatggcn

SEQ ID NO: 11157 - DNA, 428 bp, Arabidopsis thaliana
  unsure at all n locations
  Clone ID: LIB24-009-Q1-E1-E2
cgttacctttttgtttctcagactgttaccttacctgtaaagaagagagttaaagatctattgcaaaaaaactcaacctttaatctctctgcttcttctaattaagtaatttcaactacccttttggcgaaacctctcgatctattggtttggtactgaagaaaccgacttgagtctgatttgtttttggtgaaagccanggaagctataanaaagcacgctgcgaagctcanagagcaagtcgcgaggcancagcaancggttttgaagcatttagggcatgttaatgctgatgctgttgttgttgatnaacaacagcttcattgtcancanaaacttcaagatctttatagctccacgaaaagctgctaancgtttncanangaacattgttcgtggaacacgaangtttcaatgcgactggcaca

SEQ ID NO: 11158 - DNA, 429 bp, Arabidopsis thaliana
  unsure at all n locations
  Clone ID: LIB24-009-Q1-E1-E6
gcaagctccaatctctctctctctccctctcccaaaatctcacgatgcaacctcagccgcatatttctccgaacaccgcaactgccgcgatctcagccgcgcttgaatctcagcgcagtagaaaaaaccgaggaagttacaattgcggtagatgtggtcaacctaagaaaggccatgtctgtcttttaactgctccacctgatattcccactantccgatcgcttctgagccagtgagctgcatctccgccgccgcatcttcttcccgttctactgtcttatctttaacagcggcgccgtcatcgcgacagaccttcactcacttacgccgagctttatcgttcgatgacgtcgatgcgcgtaattcactcgatgaatccgatctggatgctgcatcgatggatntggatctacaattggatacgggat

SEQ ID NO: 11159 - DNA, 424 bp, Arabidopsis thaliana
  unsure at all n locations
  Clone ID: LIB24-009-Q1-E1-B10
ttgtgtaataaagcatggaatccaacagaggtcaaggttcgatccaacagttgcttgctgctgaggtagaagctcaacacattgtcaatgctgcaaggaccgcaaaaatggcaagactgaagcaagctaaggaagaggcagagaaagagattgccgaatacaaagctcaaacagagcaagacttccagaggaaacttgaggagacaagcggagactctggtgcgaatgtgaagaggctggagcaagagactgataccaaaatcgagcagttgaagaacgaagcatcgaggatttccaaagatgttgtcgaaatgcttctgaaacatgtgaccacagtgaagaactgagagatatttttataagaaagtaaaaaaaaagtttatgaaaaaantgggagtcattttgagttgatctgctcnccttc

SEQ ID NO: 11160 - DNA, 197 bp, Arabidopsis thaliana; identical to SEQ ID NO: 10791
  unsure at all n locations
  Clone ID: LIB24-008-Q1-E1-H10

SEQ ID NO: 11161 - DNA, 427 bp, Arabidopsis thaliana
  unsure at all n locations
  Clone ID: LIB24-008-Q1-E1-H11
gaaannaannanaanactctctcagatcngagaannnnnnnnnnnnnnnnnnnnnnnnnnnnnnnnnnnnnnnnnnnnnnnnnnnaaagaacaatggcgacacnaggagcttcctcagcaagagatgaattcgtatacatggcgaaactcgccgaacaagcagagcgttacgaaggaaatggttgaattcatggagaaagtcgcgaaagntgttgacaangacgaantcaccgtcgaagaacgtaatctcctntccgtcgcttacaaaaacgtcatcggagctcgtcgtgcttcgtggagaatcatttcatcgatcgaataaaaggaggagtctcgcggtaacgatgaccacgtntcgttgatccgtgactacagaagcataatcgaaacggaacgttcngatatctgtgacggaatccntaagctt

SEQ ID NO: 11162 - DNA, 491 bp, Arabidopsis thaliana
  unsure at all n locations
  Clone ID: LIB24-008-Q1-E1-H2
gtgttgtttggccggcccggtccgnaataaacgggtcganccncgcgtccgagaagacatttttatttagatttccctctgatcctctcttttagatttcgaatcgagaccagatctgcgtgaagatgatagagaagtgtataggagcgcatcggtttcggagattacagagattcatgcgtcaagggaaagtgacgattctttgtctcgttctcaccgtcatcgtcttaangtggcacaatcggagccggtaagtttggtacgccggagaaagatatcgaggagatccgtgagcatttcttctacacgcgtaaacgcggcgagcctcaccgtgtcctcgtcgaggtctcttccaaaacgacgtcgtccgaagacggaggaaatggtggtaacagctacgagaccttcgatatcaacaagctattcgttgatgaaggagacgaaagagaaatctcgagaccggantantaaacctaatcctcctgggccca

SEQ ID NO: 11163 - DNA, 483 bp, Arabidopsis thaliana
  unsure at all n locations
  Clone ID: LIB24-008-Q1-E1-H4
ttgtttgccgcccggtccgaaataaacgggtcnacccacgcgtccgacngaatcgctcttatggccgccatggctaggaacgtagctcaagctgatgcgtctgttaaggctggagagtggaagaggaacaagtatgtaggtgtttcacttgtgggaaagacccttgcagtgttgggattcgggaaagttgggacggaagttgctcgtcgtgctaagggtcttggtatgcgtgtcattgctcatgatccctatgccccagcagaccgtgcacacgccattggtgttgacttagtgagctttgatgaagcccttgccaccgcggatttcatttctcttcatatgcctcttacgccaacaacatcgaagatactaaacgacgaaacctttgccaaaatgaagaaggagttcgaattgttaatgttcctcgtggaggtgtcatanacnaanatgccttagtgaaagctcctggatgcctggtattgt

SEQ ID NO: 11164 - DNA, 442 bp, Arabidopsis thaliana
  Clone ID: LIB24-008-Q1-E1-H5
gcggacgcgtgggcggacgcgtgggccttttcccggaaaatttatttgctgatttttcttccttccatcgccactttcctggaaaaaaaaactaaatttcgtctctttctttaagctaaaggagctttctgtgatcaattttttctatatttctgtagttgcgttcttatttcacgcgctttgtgatttgattatttaagccactaatggcttaggatctgtatattatcacttcatgaattctcgttttctcggataagttgttaagtttctaaattagggaattttaggaattagggcttttttgggtttgtatgtgtgcttgattgggtaagaagatggctgcagttataagaaagttattacctttcccatcaccgaatcctaaaagggataatcgagaaagtgacgaatgatgatgaaacaagtagtgggctaatcg

SEQ ID NO: 11165 - DNA, 438 bp, Arabidopsis thaliana
  Clone ID: LIB24-008-Q1-E1-H6
gattctctacctctatctctctcttctctgggaggaaaaatggagatatcggttgcatcggtaacaatatcagtagttctagctgttgtgtcatggtggatatggagaactttacagtgggtttggtttaagccaaaagatgcttgagcattacctgagaagacaaggtcttgccggaacaccttacacgcctctagtcggcgatttgaagaagaatttcaccatgttgtcggaggcaaggtccaaacccctcaaactaacggatgacatctcacctcgtgtcgtgccttatcccttgcaaatgttcaagacttacggaaggacttactttacatggtttggacctatcccaaccatcacaataatggatcctgagcaaatcaagggaagtgttcaacaaaggtttatgatttccaaaagccgcatacatttcctttg

SEQ ID NO: 11166 - DNA, 438 bp, Arabidopsis thaliana
  Clone ID: LIB24-008-Q1-E1-H8
ggaaaaattaaatatccatccaactgtgtgaattagatattttctcttatctcttctctttgttcgatcaaaaattcaattttcccgagatttttgtttctctcgatcgattcaacacctaaagattgaagcttttgctcgtgggttatgtaaagtttccacctttcgtcttctttctgatctgtgagcaaaaatgggacaacagcaatcaaaaggggaattgctgtatcagcaagttagttatggtaactctgaaggaattcgagctcttcatcgagatggtggagaccttgagtggatggatagagaaggaaaaactccgttgatcttggcttgtatgaactccgagctatttgatgttgctaagactttgattgagttgggttctaatggttaaatgcctaaccgtcctggtcgtcaatgctggggactcctctg

SEQ ID NO: 11167 - DNA, 425 bp, Arabidopsis thaliana
  Clone ID: LIB24-008-Q1-E1-H9
cctgggaattttcgttacctccttcgttcttctctgatctcgaattcaataccaaattcttcaatctcccgaatctgattttcttatcactatccctggataacaaaagcccccaaagtaaaaacccaattgcgattccctcgtaaaccaatctagggttttcgcgagttcgtctctgagcttgtttgtttgtgatcgtgtgagaatgtctcggtgttatccgtttccaccacctggttatgtttggaaagaaagtctgatcgaatcgatcaagggggcaaaggaggaagtgaagaaagatagaaaacacaagaggaatgaaaaagatagaaaggatagggataatgaggcggggaggagcaggaagcatcggcataagagacggcggaaagatgaaggcgccattgctagtggcaaattagtaa

SEQ ID NO: 11168 - DNA, 427 bp, Arabidopsis thaliana
  unsure at all n locations
  Clone ID: LIB24-009-Q1-E1-A11
gggagaagagaacgactgtgtatccttcagagtcagacgagcctatgaatcaacaaatgatcgaaggagccgaagttgttatagatggaaacgtgattacaagtttggggctcgcaactgttaccaaattttccctggctattgttagcaagctgttcggacatgctagagcaaggagtgtttcagaagggcttgtgcatgagtatccaaggcagtaaccgtttgaaagcatcttgttcaagaaacacagttagaagatgtctcattactgatcttaaaccgaagtataacggtccgatggtatcaaaccacctcaactccagagacttttcacaagtatcatctgttcaacgttgatgcaccttatcctgaaagcnggatgctatctgcaagaaatttgccaatttagtagtgtagctaaattttg

SEQ ID NO: 11169 - DNA, 432 bp, Arabidopsis thaliana
  unsure at all n locations
  Clone ID: LIB24-009-Q1-E1-A12
gctgacattggtaaaggcatagaaaaaagaaaaaaaaaactgttcttcatcatcatcgtctctcccaagaaaaaccatgaaaatgaagaagaaaggaaaagtnnnnnnnnnnnnnnnnnnnnnnnnnnnnnnnnnnnnnnnnnnnnnnnnnnngaaccatctcaacgaagaagatgatgattctctctctgtgttgaagcttcttccagcgacgattttggttcttgtttctgttctctcctctgaagaaagagaggttcttgcttacttaatcacaagaggaaccaccatttccgatagaggaaactcttcttcaaagaataagacgaagaagaagagcaacaaatctagcanaaatcacaagccaccagttttcgattgtgagtgtttcgattgttacactaactactgggtttcgttggggattcttcg

SEQ ID NO: 11170 - DNA, 475 bp, Arabidopsis thaliana
  unsure at all n locations
  Clone ID: LIB24-009-Q1-E1-A3
cattngtcggcccacgcgtccgagataagctttcgtcggaaaacttggagacgacgagttcggtcatatgttggctgggattttgaggaagaacggtgttgatgatcaggggattaacttcgatactggagctagaactgctttagctttcgttacgttacgtgctgatggagatcgtgagtttatgttttaccgcaatcctagcgccgatatgcttcttcgtcctgatgaactcaatctcgacctcatcagatccgcgaaagtgtttcactatggatcaataantttgatagtggagccgtgtaggtcagctcaanttgaaagccatggaagtggccnaangaangcanggagnctcctctttccctanggaacccaaacccncangggaagcctcctggtngggccaatccannaaggaaaganagcccananccaccgnatncatngatcatttngggaaccaaaagcctgg

SEQ ID NO: 11171 - DNA, 450 bp, Arabidopsis thaliana
  unsure at all n locations
  Clone ID: LIB24-009-Q1-E1-A4
gctgtgatatcccacctactggtctgaagatggcttccactttcattggaaactcaacatcgatccaagagatgttcaggcgagtgagtgagcagttcacagctatgttcaggaggaaggctttcttgcattggtacacaggtgagggaatggacgagatggagttcacagaagcagagagcaacatgaacgatcttgtgtcagagtaccagcaataccaagatgcaacggctgatgaagaaggtgactacgaggatgaggaagaaggtgaataccaacaggaagaagagtactgagagtaatttagttataaaaaaccgcttgaaaaaaatccaatttagtccgtttggctacntttttttccttanaaaaanaaaaatgggaaacctccaactaccaatttgccaggtttatntccaatgccttgtattttgaccttatccnggatga

SEQ ID NO: 11172 - DNA, 430 bp, Arabidopsis thaliana
  unsure at all n locations
  Clone ID: LIB24-009-Q1-E1-A5
gagcttaaaccccattttatattttagtcggagctccggtgaaataaaatggcggcaaagattattggtggatgctgctcatggcgacgcttttacaggaagagaacatcatctcgatttctgattttctctgttcgagcctctagttccatggatgacatggacaccgtctacaagcaattgggattgttttcactaaagaagaagattaaagatgttgttcttaaggctgagatgtttgcaccggatgctcttgagcttgaagaagagcagtggataaagcaagaagaaacaatgcgttactttgatttatgggatgatcccgctaaatctgatgagantcctctcaaaattagctgatcnagctaaagcantccgantccctcaaaganctcaaatacaagggtgaagaaactaagccgattntaca

SEQ ID NO: 11173 - DNA, 386 bp, Arabidopsis thaliana
  unsure at all n locations
  Clone ID: LIB24-009-Q1-E1-A7
caaccacaagaacacaaaacacacaaaaacaaagaggttctttctttgaagaagaaatggaaaaagttgatgtttatgatgagattgtnggaaagagaaccagataccgtcttgatggcaccaagatcatgaaggtatttttggatagtaagctaangaacgacactgagtacaanctggagacaatggtgggtgtgtacaggaaacttacagggaaagatgtagttttcgagtacccagtcatagaagcttgaagagatgaatgtttgtttcattcttttttgtcggntaggagagcttttgantctgtntggggagtanaactcttgcnaagatttngtnnttcagcattccncatctcctcntcaaagttcgatttatcgnta

SEQ ID NO: 11174 - DNA, 419 bp, Arabidopsis thaliana
  unsure at all n locations
  Clone ID: LIB24-009-Q1-E1-A9
gggtccaattgagaaaaacgcgtatcgtcgtcttcttcatcaaaagcgaacaanttntcgaaacacacctatancgacacaaantcncatcttctctctntgnaaatctcacnnantanagaaaagctttgttttttccaattaaagttacattttttgtttgaacaaatcactttctgtgatctacatttgtgtggtcgtgaaatcaatgacggaaccagaaagattaggaggaatctccctgagttttccggtgaatgaagaagatacggtaacgacaacatcaccaaagactcttccacggaggctccgtcgtcgtcttctcgaaccgaagagtcctgtctccgccgcaagagatngattccaaaactcaagagaagctgatctccgtcgtcagcaatattatgaatcactatcga

SEQ ID NO: 11175 - DNA, 398 bp, Arabidopsis thaliana
  unsure at all n locations
  Clone ID: LIB24-008-Q1-E1-G9
tgatctctgataacatcaattcgtttagagatcgaaccagagatattcttagcgtcgtcgtcgcgcttttgttcggtgttggttgtggtgctttaaccgctgctactatgtatcttgtttgggctcttgttgtgaatcgtcaaagctatgattttgaggaagaagaagatgattatgagaatgatgaatctgatgctgctagcttgaagaaattgggttatgttaagattccagctccagctcctgctcctgtgaaggaagctgcttgatttgaggttgtgaatttcagtttctgcatattatcatgatttacgttgttgctatctatgttgttgcgtacaagtaaattcgtctctgttanggattaancnaaacttactatactctaagtatcagtg

SEQ ID NO: 11176 - DNA, 494 bp, Arabidopsis thaliana
  unsure at all n locations
  Clone ID: LIB24-008-Q1-E1-E1
gttctttggccgcccggtccgaaataaacgggtcgacncacgcgtccgatnaaccttctcctctttcttacgcaattacaacttcaacgcctctctatctcttcgccgtgaatgtcgagatagtcgtaagctctctgcttttcaaatttctctcaaattgaggtagagagagagggcacagagatagagagagaggggcataggaaacggtgattttcccagttcccggaggaacaatcggctganttctctgtaatcgaagaatctaaacctcacccactcgaaatcagctcgtgggttttggggggtctctattaatttccaaattctggagaaaaatcttgtatttcttcaagatgtttgggtgtgattgtttttactggagcagaggaatctccgagttggattcggaatcgtccgagccaaaagcccttctcaacttccgggtcctcttcctagttggccgcaaggtaaaggttttgccacaggaagaa

SEQ ID NO: 11177 - DNA, 433 bp, Arabidopsis thaliana
  unsure at all n locations
  Clone ID: LIB24-008-Q1-E1-E11
cgattccggataagaacatctacgcaatcgacaagcacttggcggctgatggtaacgccgagcactgcgcgacgctctacgaggagtgtctaaagaatctggtgaaagaaaagattatcccaatatcgaaaaagacagggtatcctgagtttgatctacaacttctagggatgggtcctgatggccacatggcgtctctcttcccaaaccatccacagatcaatgagaagcagaaatgggtcacttacatcaccgactctccaaaaccaccaccaaagagaatcacattcactttaccggtcatcaactctactttgtacaatcttatggccatttgtgacaaagcaccggccaaatcccgtggctgagatcatgaagcacaacaacctctcgttaacttctgcncatcctantgctcaagtcgaaaatgttt

SEQ ID NO: 11178 - DNA, 425 bp, Arabidopsis thaliana
  unsure at all n locations
  Clone ID: LIB24-008-Q1-E1-E12
tgcagcaactgccgatagtggagatgctgctggtgccgatagnnnnnnnnnnnnnnnnnnnnnnnnnnnnnnnnnnnnnnnnnnnnnnnnnnnnnnnnnnnnnnnnnnnnnnnnnnnnnnnnnnnnnnnnnnnnnnnnnnnnnnnnnnnnnnnnnnnnnnnaaaccggtggtgaaagtgctagtggtggagctgcttctggtgctggagctgcttccggtgcctcagctaaaaccggtggtgaaagtggtgaagctgcttctggtggttcagctgaaactggtggtgaaagtgctagtgctggagctgcttccggtggttcggctgaaactggtggtgaaagcggtagtggtggaactgcatccggtggttaaagcgctagtggtggaactacatccggtggctcacctgaaancggtggctcaa

SEQ ID NO: 11179 - DNA, 450 bp, Arabidopsis thaliana
  unsure at all n locations
  Clone ID: LIB24-008-Q1-E1-E2
tccgaaaanaaacgggtccacgcncgcgtccgcccacacgtccgcccacgcgtccggaaatcttgcagttgtctgcagattcttattcagtggcgtcatctgatagcacaagcagctgcagtgaagatgataattatgattctgaatctgagtattcaaatcataaagaggggcggttgactgatcttcttaatgtgaatagacttgggaaggagatcctggaatgtacaccganaggaacaagatttcttggttctcaaccggagaatggtagcacaataaaaactttgagaacagatgaatcaatgaaggaaactaccactanctttccttctggattgcataatggtaaacatggtgttaaccagacagaccgtttggttgagaaaagganacctatacanagatttgtttccttccaagaangaaggaaagttgcattaccaangg

SEQ ID NO: 11180 - DNA, 455 bp, Arabidopsis thaliana
  unsure at all n locations
  Clone ID: LIB24-008-Q1-E1-E4
ccaggtccganacaagcgggtcgncgcacgcgtccgcananactacgttttatacttttcttcttcctttcatttgggttaagagaagccatggataccgagtttctccgaaccctagatcgtcagattcttttgggtgtcttcgttgctttcgtcgccgttggtgctggtgctgcttattttcttacatcctccaagaaacgcagagtgtgtttggatccagagaatttcaaggagttcaagcttgttaagagacatcagcttagtcacaatgtggccaagttcgtttttgaactcccaacttctacttctgtgttgggtcttcccattggacaacacatcagttgcangggaaaggatggtcaangagangatgttattaagcatacancccgactacgttagactctgacgtnngacntntcgaacttgtcattagatgtatccccaaggga

SEQ ID NO: 11181 - DNA, 365 bp, Arabidopsis thaliana
  unsure at all n locations
  Clone ID: LIB24-008-Q1-E1-E5
gctnnnnnnnnnnnnnnnnnnnnnnnnnnnnnnnnnnnnnnnnnnnnagatccagttttagggttttcttctctgtgagcgaagatgcgtgagattcttcatattcaaggaggtcaatgcggaaaccaaatcggttccaagttttgggaagtggttaatctcgagcacgggattgatcagacgggacggtatgtangagattccgagttacagcttgagagggttaatgtatantacaacgaggcgagttgtggaaggtacgttcctcgcgctgttctcatggatttggagcctggaaccatggacagtgtcagatctggtccgtanggtcagatcnttcgacgggataactccgtcttcnggtc

SEQ ID NO: 11182 - DNA, 427 bp, Arabidopsis thaliana
  Clone ID: LIB24-008-Q1-E1-E9
cgtccgctcttcttctggtgtaaaagcttttcttccacacacatttgagaaagaagacgaagaagaagagagaataactattccttcttcgccaagttctctgagctatagaagaaggagggatttcttcagaccgccattgttgcccaccttctctcctttctatttttcgccgcattttactcgcttactgacaaaagtcttctactcaagtctctctctcgctctctttggaggctcaattagggttttgttgtcgtgagatttgattacacaaattgctgaatttggtttcgattattggtgttattgttttcgaagatttccagtgagtttccgtttatggatctgactggaggattggagctagatccggcggtgttgggaccgtgccgggaaccaataggccttgaatcgctacatctcg

SEQ ID NO: 11183 - DNA, 432 bp, Arabidopsis thaliana
  unsure at all n locations
  Clone ID: LIB24-008-Q1-E1-F11
gcccacgcgtccgcccacgcgtccgcggacgcgtggggtttcttctcattcgtcatctagtcccattctctgtccataacaatgaatatcaattgttctccattagggtttctaatttcactcttcttcattgttacttttcttgcaccacaagtcaaatctagggctttctttgtctttggtgactctctcgtcgacaatggaaacaacgactacctcgtcaccactgcccgtgccgacaattacccgtatggtatcgactacccgaccccgtagacccaccggacgtttctctaacggccttaacattcccgacattatcagtgaggctatangcatgccgtcgactttgccgtaccttagcccgcatctcaacggagaaaatcttctagtcggtgctaatttgcctccgcangaattggatctcaacga

SEQ ID NO: 11184 - DNA, 436 bp, Arabidopsis thaliana
  Clone ID: LIB24-008-Q1-E1-F12
ggatctctctctgatcacaacaatcataagcgatgagaggagctagacccgatgaattcaattttagtacgaatccatcaacgccaaacactggtcagccgacaccgacgtaccccgccggtgttggcggcggcggcggtggaaggaaaaaaggcgttggcgtgaggacgtggttggtacttaactcgtcagggcaatcggagccgaaggaagaagggaaacactccatcatgcggcgaacgggattaccggcgcgtgatcttaggattctcgatccactgttgtcgtatccatctactgttttaggtagagagagagcgattgtcatcaatttggagcatatcaaggcaatcatcactgctcaagaagttttgttgcttaattccaaggatccttcggtctcaacctttaatgatgaattgcagaagcggattct

SEQ ID NO: 11185 - DNA, 483 bp, Arabidopsis thaliana
  unsure at all n locations
  Clone ID: LIB24-008-Q1-E1-F2
tgttctctgccgcccggtccgaaatancgggtcgacccacgcgtccgcccacgcgtccggccttctgcagacgttatttggaccgccttggtgaaacaaaatacttgatggctttaaagaatctttgtgattctggcataattgagccatgtcctccagtgtgtgatgtcaaaggaagctatatttctcagtttgagcatacaatcctgttgcgaccaacttgcaaagagattatttccaaaggagacgattattgaaatagtgattttcacagaacttgaagcagttgttcttcttgagtttgtataatagttttggaaggctttttaagtcttgtgctcaaatatttgtatgttcttcgaagatgattctaagtataagagcttaagggatccttcatcaattataagctacatgttagcttaaaaaaanaagnnnnncnnnnnnnggnnaaaaaaaaaaaagggcggccgctctaaaagg

SEQ ID NO: 11186 - DNA, 435 bp, Arabidopsis thaliana
  unsure at all n locations
  Clone ID: LIB24-008-Q1-E1-F6
gctggttattctcagaatcttggatctggctatcctggaagttcagtgagtggtggcgcagaaggaggctctcagatttctttgagttctcgccatccatcaattacaggtgctcctcaagagactgacattggtggtggatacagatctcatttatctacagctgctagtcattacggaacacaatatggctctgtgtatggatcaacttctcttagcagctctcagcctttaagcaccaatggtttaggttcatcagttttggataaccgctcgggatatgtccctactttacctgattcaccaaagtttgcatctggaagctatttgtctccctcgagccatggttatggtcaaaagacggacgatttgtattccgataagctgtctggttacattcccgttgatanaangcagtatggtgaacaatcaagc

SEQ ID NO: 11187 - DNA, 433 bp, Arabidopsis thaliana
  unsure at all n locations
  Clone ID: LIB24-008-Q1-E1-G11
gctttatcaggggggtgtatggaagataaaagtggaacttcccgaagcttatccatacaaatctccatctgttggatttgtcaacaagatttatcaccctaatgtcgatgaatcttctggtgctgtttgcttagatgttataaaccagacttggagcccaatgtttgatcttataaatgtgttcgaatccttccttccgcaactgcttctatatccaaacccatcagatccatttaatggagaagccgcttctctgttgatgcgagaccgtgcagcctatgagctcaaagtgaaagaatattgtgagaaatatgcaaaaccannnnnnnnnnnnnnnnnnnnnnnnnnnnnnnnnnnnnnnnnnnnnnnnnnnnnnnnnnnnnnnnnnnnnnnnnnnnnnnnnaatcgttgggaaagccgatcnatgactgtt

SEQ ID NO: 11188 - DNA, 428 bp, Arabidopsis thaliana
  unsure at all n locations
  Clone ID: LIB24-008-Q1-E1-G12
gattcaaggtgtcccatttcagatacgtggtggcaaactgaaactggtggcttcatgataaccccattgccaggtgcttggccccagaaacctggttcagccactttccctttctttggtgttcagcctgtcatagttgatgaaaagggcaatgaaatcgaaggcgagtgtagtggttatctttgtgtcaaaggttcatggcccggggcgtttcgaactctgtttggggatcatgaaagatacgaaaccacatactttaaaccttttgccggatattatttcagtggtgatggttgcagcagagacaaggatggttactactggcttacagggagggttgatgatgttatcaacgtcagtggccatcgaatcggaactgctgaagtagaatctgctctggtttacaccctcaatgtgcaaaaacanct

SEQ ID NO: 11189 - DNA, 440 bp, Arabidopsis thaliana
  Clone ID: LIB24-008-Q1-E1-G5
gcaaaaatctgaaacggaagctcagagagacaaggatgagatttttctcttcctttgataaatcccaatacctaattcccaaattcccttacttttaggcgccgaaagatagagagaaacatagatacgcattggttttttcttttttgaagattctcgcttcttactacatgtgtatcaatcgatctctacccagattctccggaggagctttgagtcttgtcgtatagatgcagtgaaggtcctttgttagatgggaaaacttgttcttgagttgtcaaaaggtattttctatgtttttggagtagaactgtttacaaggaagcagccaatatggagtttgattttggagaaatgtttttagtgttgttgtgaagaaatatcagttttgattgtttttggatttgatgggtaaagagaatcagttggagactaccgat

SEQ ID NO: 11190 - DNA, 436 bp, Arabidopsis thaliana
  unsure at all n locations
  Clone ID: LIB24-008-Q1-E1-D9
ggaatttcattgttgacattcaagacaagaaagggaatgttatcaacactattgctgccaaacttgcatctgatggaagtggcgtttatgagtactacacctgggctagtcttggtgaaaagattagctttgttcctcaagattctaggggtaatgtagagaagaagatgttgttttaccctaaagagattcatgctgtagtgtcaaaagatggatgtcaagcttctgtttctccatttactggtcggcttggtctttacatacaaggatcagtctctcctcctcttcctggtgttaatattaagatttttgcggcaaaggacagccttaattcctcacttaaagaaaggggaaatagctattgaaacaagcactttaccanctggttcatttgttgctgggcctttgtatgacgatataccatatgccactgaaa

SEQ ID NO: 11191 - DNA, 419 bp, Arabidopsis thaliana
  Clone ID: LIB24-006-Q1-E1-H7
gaagaaatctgaagagactgaatccgaagaggagaaagagacatggggcttgctgaaaatcatgttcgaagaggaaggaacttcaaggacaaagttgatcagccatcttggctttactttgcctgttgcggaaaaggatcaggcagtagatgggctctcatcagatctcaatggcattagattagaggatactgcggcagatgcactggatcttgacgacagtaacgaggcagctgcatttgcgatggataatggagaagacttctttaacaactttcctgctaaaccggatacacctgtatctacatctgccaaagattttatgccttctgacacagatttttctaccaaaggagaagaaacgcaagaaatgcaagaagaagaggaagaaagttctgacccagtttttgataatgcca

SEQ ID NO: 11192 - DNA, 438 bp, Arabidopsis thaliana
  unsure at all n locations
  Clone ID: LIB24-007-Q1-E1-A1
cttactatctccacaaaatggcgtcgacggtaggagttccatcactataccaagttcctcaccttgaaatctccaaacccaattccaaaaagaggtctaattgtttatctttatctctcgataagcctttcttcaatcccttatctcttgttcgtagaactcgtcgtatccattcntcttctcttcttgttccttcggctngttgctactccnaattctgttctcagtggaagaagctttcaaaagtcttgggcctttctgaccatgacgaatatgaccttgncggngacaacaacaacgttgaagctgatgatggtgaagaactcgcnatctctaaacttagtttgcctcaacgtcttgaagagtctcttgagaaacgtggnatcactcatcncttccccantcagaagagctgtnttgggnacctgcactggaaag

SEQ ID NO: 11193 - DNA, 490 bp, Arabidopsis thaliana
  unsure at all n locations
  Clone ID: LIB24-007-Q1-E1-A10
gaactgtttcttggcccggcccggtccganattaacgggncgccgcacgcgtccggaagaaagttatcaaatcagtttttgtggaattttgaatctcgtcgcttctgtgttggctatgactgaagttgcgagctcagtggtgtatgaagtgctcggacgcagagctcaggatgtggacgagccgattatggactacatcattaatgtcctcgctgatgaggatttcgacttcggtgaggaaggtgaaggcgcctttgatgccgtcggtgagctcctcgtcgctgctgaatgcgtttccgatttcgaagagtgccgtttggtttgtagcaaactgtcggataagtttggaaagcatggattggtgaagcctacacctactggtgaagagtcttgctatgcctgtgcggatgaacgatggggatgggatgaatggacctgttaagaagaagaaaccanagcctgtggatgggcctttgctcactgaacgtna

SEQ ID NO: 11194 - DNA, 447 bp, Arabidopsis thaliana
  Clone ID: LIB24-007-Q1-E1-A2
gcatttccaaaaggtcttaaccgccattggtaacttctgtatctgttcaatcggaataggaatgttgattgagataattataatgtatccgatccaacatcgaaagtatagagatggaatcgacaatcttcttgtccttctcattggaggaatcccaatcgctatgcccactgtgttgtctgtcacaatggctattggatcacataggttgtctcaacaaggtgccatcacaaaacgaatgaccgccatcgaagaaatggctggtatggatgttctttgcagcgataaaactgggaactctaaactctcaaacaaacttacagttgacaaagaacttgatttgagggtattctccaaaagacgttagacaaggactatgtgatactactttcaagctaagggcttcaaagagtagagaaaccaagatgcgaattgatacttccaatt

SEQ ID NO: 11195 - DNA, 429 bp, Arabidopsis thaliana
  unsure at all n locations
  Clone ID: LIB24-007-Q1-E1-A5
angcttacnctgtttttcaggcgaactctgtttatcttctccgagctcgtacgagaatattcgtaaaggtttcttgtgagcttaaacgatgagtacccttgagaccacaagagctgagcttggtctggtagttgtgtatttgaataaagcggaggcgagagacaagatttgtcgagctattcantatggttccaagttcttgagtgatggccaacctggcactgctcaaaatgtcgacaagaacaccagcttggctaggaaagttttccgtctcttcaagtttgtaanatgatcttcatgctctcattagccctgttccaaagggactccactcccgcttgttcngctcggaaagtctaaaaacgcgttgctgtcaacnttncttgttccctanattaaattgtgttggcttggcanggactgggattt

SEQ ID NO: 11196 - DNA, 489 bp, Arabidopsis thaliana
  unsure at all n locations
  Clone ID: LIB24-007-Q1-E1-B1
tggtattctgccgccaccggtccgnaaaaacccgggtcnacccacgcgtccgcttcgatcttaatggccaaattatcttttggaactcgatggcggagaagctttatggattctcagctgcagaagcgttagggaaggactcgattaatatactcgtagatggtcaagatgctgctgttgcaaaaaatatctttcagcgttgcagcagtggagagagttggactggagagtttcctgttaagaataaaatgggagagaggttttcggttgtgactacgatttctcctttttatgatgatgatggtttgcttattgggattatatgtatcacgaatgattcggcactttttcaacggccgagagttcctcccgctaaaaacangtggcaagaanggggattcaagcttttgccgggggactaatggtgttgcttctangcttggttttgattccaaagaaactgttgtgtccaaacttgggccttgattc

SEQ ID NO: 11197 - DNA, 476 bp, Arabidopsis thaliana
  unsure at all n locations
  Clone ID: LIB24-007-Q1-E1-B12
aacgttcttgccggccggtccgaaataacgggtcgacncacgcgtccgcggacgcgtgggtcgccatcgtcgctaccgattgtcttgaggtttacgacttttggactaatctcctctgtggagagcaatgactaaaactcgtgggactgatatgacaaagaaaaagggtaaacatgtttctgaaatggatttcaagactcatcagcatactgaatttttcgataagttgatagagctcacgcctgctagattctacttacctgatgagacagaaaggaaatggtatccaaggtcttagcaaggctcaaaaagctagagccaagaaaaaaacaaatgacaacctaaagaaggcgaagagagataagttggacccagagaagtctgctttgacgactctcgatttactgaagggagaagatagagaangaaagattggcttcacagaagcagaagcttaagaagaaacacgcggntta

SEQ ID NO: 11198 - DNA, 492 bp, Arabidopsis thaliana
  unsure at all n locations
  Clone ID: LIB24-007-Q1-E1-B2
tgtttttcctgnccccacgggtccgaaaaacccgggtcnacccacgcgtccgaaaaatcgccagctttatctctctctttttcacatcccatggctagatggtgacgacgattcacgcataaactagggttcccccacaaatcatcttacacgtatcctctattccttccttcctttctccgtcatcatcatttttcccaccgacaacaatctctcggagtttggatcaataatggcgttgaagtctagttctgctgatggtaaaaccagaagctctgttcagatcttcattgtgtttagtttacgttgcntcttttacattttgggagcatggcaacnaagtgngttttggtaaaaggagacagtattgctcntgagatgaccaacagtgggagctgattgcaacattgttcctagcttgaagttcgaanactcatcnngctnggcgaaatcaagtctgtttggtgccttcngaagctgcaaagggtcaag

SEQ ID NO: 11199 - DNA, 479 bp, Arabidopsis thaliana
  unsure at all n locations
  Clone ID: LIB24-007-Q1-E1-B3
ccaccgggtccgnaaatcccgggtcnacccacgcgtccgcacgtggtaaatctattgattttagattttgatatgtgtaaaacaaaattttcatttttatatagaaaaaaataattgtaagtaattataaatatcaaaaagttagttactaactttcaaaaccgtactttatataataagatatgaaaattcactaaaaaattccatacaactttaggcatatagagcttatttatactaaaacccctaaaatatcctaaaacaaactaaaccagcaagactcatgttgcatgtgtcgtcattttactgtgacgcatgagtaagcagcactgagagattttagtcacncacatataanaatatggtccattgggtgtggattagtgtttcaaggagccatacaaaggattgtatgtcactgtgaaattgtatagccctcctaagtctaanaagtanaaggacttccccatcatcctgtc

SEQ ID NO: 11200 - DNA, 470 bp, Arabidopsis thaliana
  unsure at all n locations
  Clone ID: LIB24-007-Q1-E1-B8
gtacagtgtaagaaaattcgcgggtcnacncacgcgtccgcattttgtcgattcntcttgcggagagatgcaatcgattcgtggcagtacacggttgcttcagaggcatcgtttctccatctccaacactcttcgtttcacttcttcttcttcttgtggaagctggtctgaaaatgaatccagaaaactagggtttgattcttgcccttctagcagagctgcgacatatctcattagctcgttgaaaaatgcaggcttttcctcttcagctatacctaaacaaaactttacgtatgcgtcgaggtgtttttccaccactggagattcttctgttcaaggatctcctgagtcagattgtgttgtgcctcacagaatcaagtttaagcggcttgataaanccgctaagcatatnntgcagattgtanacaangaaacggttgaggaagtgaagatccttagaggagatncct

SEQ ID NO: 11201 - DNA, 493 bp, Arabidopsis thaliana
  unsure at all n locations
  Clone ID: LIB24-007-Q1-E1-B9
aactgtttcgtttgccgtgcccggtccgaaattaangggtcgacccacgcgtccgcggacgcntgggcggacgcgtgggttcgcattgttaattaaggtcgccggacttttggccactgtcaccgttggagccaacgtagtttcctactctcgtttccgtcgccagaatctcgcgaagtttcgctctccaatcgacgaatctaaagaagttctcgctgatttcaattccattgaacacgaggaaggaaaattcttctttgggttagctactgcacctgctcatgcggaggatgatttagatgatgcttggctccagtttgctaaagaaacaccatgttcagcagaagaagcagaggctgctgataagaaagctangaggaagaaggttaagcttgctgtgggagctataaccaaangcttggccaagaacactcatggcaaagaagataagaatgcaactgataagccaacctcctaaaaatgttgccgcgtg

SEQ ID NO: 11202 - DNA, 438 bp, Arabidopsis thaliana
  Clone ID: LIB24-007-Q1-E1-C1
gaagaaaaataagataccactcaccaaaaacttcctcaaaactaacaaatggatactaataaagcaaaaaagcttaaagttatgaaccaactcgttgaaggccatgacttaacaactcagcttcagcaactcctctctcaacccgggtccggtctagaggatctagtggctaaaatcttagtgtgtttcaataacaccatctccgttcttgataccttcgaacccatctcctcctcctcatccctcgccgccgttgagggatctcaaaatgcttcatgtgataacgacggcaagtttgaagattccggcgatagtcggaaaagattgggacccgttaagggtaaaagaggatgctacaaaagaaaaaagagatcggagacgtgtactatagagtcgactatacttgaggacgcattttcttggaggaaatatggacaa

SEQ ID NO: 11203 - DNA, 492 bp, Arabidopsis thaliana
  unsure at all n locations
  Clone ID: LIB24-007-Q1-E1-C10
ctgtttcgttagnccggccnggtccganaactaacgggtccacgcacgcgtccgcntttgtacaancggtgaccggaaaagctgtgacgtacggtgatgtagtgagggacacaaagaggctagccaaagcgttgacatctctcggactaaggaaagggtcaagtgatggttgtggtcctaccaaacgtcgccgagtatgggattattgcccttggtattatgtctgccggtggagtcttctccggtgcaaatccgacggctcttgtttccgagatcaagaagcaagttgaagcttccggtgctagaggaatcatcactgatgctactaactatgaaaaggtgaaatcactaggtttaccggtgatagtgttaggtgaagagaagatagaaggagcagtaaactggaaagatcttctagaaacangaagacaaatgcggagataccgacaatgaaganattcttcaagacagatcttgtgcacctcccttttc

SEQ ID NO: 11204 - DNA, 412 bp, Arabidopsis thaliana
  unsure at all n locations
  Clone ID: LIB24-006-Q1-E1-H6
gnnnnnnnnnnnnnnnnnnnnnnnnnnnnnnnnnnnnnnnnnnnnnnnnnnnnntcgaagatctctattgtcttcttgttgcttcttctcttctcaatcttcatcagttccantcaccaggcaaatgaggtattaccagctgaaggagataatgagatgatgatggtgccattgggggaggagaagtttatggtaatgaatgaaacaagaaggaaacttggaagttttcagatatgttcagtttgtacttgttgtggtggtgctaaaggtctttgcttgccttctccttgttgctangctattaantgnaatatccctaatanaccctttggntactgttcnttcactcccaaaacttgcaattgctttggttgccatatcngagatcttctacttcatngtaatttgggag

SEQ ID NO: 11205 - DNA, 427 bp, Arabidopsis thaliana
  unsure at all n locations
  Clone ID: LIB24-006-Q1-E1-E9
tcatcctcttaatctcaaactctctaggactacactaaatctaactttttgcanagagcaaaagattcaataattgagattgatctcaaaaccaaagctctcgtgctcttgtcgttgatgttggttgtgtatactttgtatacaatgatgaanagtttggcgaatgctgttggagcgaagacggcnagggcttgcgacagctgcgtgaagagacgtgcacggtggtactgcgcggccgacgatgcttttcnttgccagtcttgcnacagtttggnccantcagcanaccctcttgctcgcngccacganagagtccgtttgaagacggctancccggcngtcataaagcatagcaaccactcatcaagcttctcctcnacatgaggtcnccacgtggcatcacggggtttactcgtaaagctcnaac

SEQ ID NO: 11206 - DNA, 428 bp, Arabidopsis thaliana
  Clone ID: LIB24-006-Q1-E1-F10
ggatcttgtgaaccactacacacactaacacaatgagagagatccttcacattcaaggtggtcaatgcggtaaccagattggttccaagttctgggaagtcatctgcgacgagcacggcatcgattccaccggacgttacagtggagacactgcagatctccagcttgaacgtatcaatgtctattacaatgaagcttcaggtggaagatacgttcctcgtgctgttcttatggatcttgagcctggtactatggatagtatcagatccggaccgtttggtcagatcttccgtcctgataactttgtctttggtcagtctggtgctggtaataattgggctaaaggtcattacactgaaggtgctgaacttattgatgctgttcctgatgttgttcgtaaagaagctgagaactgcgattgccttcaa

SEQ ID NO: 11207 - DNA, 416 bp, Arabidopsis thaliana
  Clone ID: LIB24-006-Q1-E1-F7
ggattgcgtcactgtagtagtagtagtaatgtctcttcttcttctcttctgttgcttctttacctctctttctatttctcattctcatggagcttccactattcacatttctcctactcagcctcccgcagcttcttcggagaaaaccggttctgtaatgaaatttatagtagcagaggcaccattattaggacctgcaggtttcaacaaccctcaagtaattgaagttgcttcagtagctttagctgctcaaagaacatatagaaaagatcctctcaatggttttgagaaatatactggaggatggaatatcagcaaccaacattactgggcttcagtgagctatacagctgttcctctctttgttcttgctgctgtttggtttcttgggtttggatctgtttattaagtcatct

SEQ ID NO: 11208 - DNA, 422 bp, Arabidopsis thaliana
  Clone ID: LIB24-006-Q1-E1-F8
gctctgtaacagtcctaccgggagagtcacgcattgtcacattttctctggcttgggactgccctgaagtgcagtttcctagtggtaaaatatattctaggcgttacacaaagttttatggcaataatggtgatgctgcagcacaaattgcacatgatgctattcttggacatagtcaatgggagtcctggatagaagattggcaaagaccaatacttgaagacaaaagactgcctgcatggtaccctgtcactctcttcaacgagctttattaccttaattcaggaggaactctttggacagatggatcatccccagtacatagcttggcaggagtcagagaaaagaagttctcacttgataaatcccaactcggtctaaagaacgatatcgatgtaccgcatcaagaatgatacagctgt

SEQ ID NO: 11209 - DNA, 430 bp, Arabidopsis thaliana
  Clone ID: LIB24-006-Q1-E1-G10
gcccacgcgtccgcggacgcgtggggcaaattaagatcataaaaaggtttagagcttttctaacaaacgtcaaagcaaatcatcatcggagcaatcttcaaatcatcatgataacagtagccatcgcagccgagttgcttgaagaatatacggcggcgctcacacgcatcaccgccacactcctccctccaccacctacaagtcaccgtcgaagtgtccgagctcctactagcggccgagctgactcttccttgcctcgtaacgataacaactcatcatcatgcgctccaaattacaccgcttttctcttaaatttctgagtatttttttaatagacgaagagattttcgaattttctttgtcttgactgtaataatgtttgtgttattcaattggaactttctatttattttcgatattaaaaaaaaaa

SEQ ID NO: 11210 - DNA, 418 bp, Arabidopsis thaliana
  unsure at all n locations
  Clone ID: LIB24-006-Q1-E1-G2
gatagcatctagnnnnnnnnnnnnnnnnnnnnnnnnnnnnnnnnnnnnnnnnnnnnnnnnnnnnnnnnnnnnttttaagtttctttataattctctaatcgagagagggagattggcagtgatgactcggaaatttcaagctcaacagaccggaattaggcgtttcttccaatttattggttgagtcgtttctgtgtcgataaccccgctgatctgagccttcctctcttttcatttgattctgatttgtttgcgttttcgaatttgaaattctctggtaatcgatttatacgtttttatcgattttgaaatcggtgtttgcgcttttttaatgatgatggggattttggagattacgatgaggatgtacagctccctcttctgattaagctgaagagaantgctggcaaaatcgaac

SEQ ID NO: 11211 - DNA, 466 bp, Arabidopsis thaliana
  unsure at all n locations
  Clone ID: LIB24-006-Q1-E1-G4
gtttccgcgcctgcggtctagaatccgggtcgacccacgcgtccgcatnaatcctcacaactctctatctctctctcgccccattctctatcataatgacaggtgccacaccggaaaaccgaacggccccgtcgccaccaccggtgaaacatgtgccggagtcagttctgccggctaaaccaccaaagaggaacaattatgcattcgcgtgtgctatcttagcttccatgacttctatcctccttggttatgatataggagtgatgagtggagcaatgatttatataaagagagatttgaagattaatgatttacaaatcgggattctcgctggaagcctcaacatctattcacttataggatcttgcgccgccggaagaacctctgactggattggtcggcgttacactatcgtgttggctggagccatattcntcgccggagctatccttatgggattgtcccc

SEQ ID NO: 11212 - DNA, 418 bp, Arabidopsis thaliana
  unsure at all n locations
  Clone ID: LIB24-006-Q1-E1-G5
gnggttttctctctctttgcaatcatggagtctctagggaagctacagcttcatcagcaaccaaatcacctctctttcactcatttctcttcatctttccccaaaaagccttcgtctttctctctcagatccttacccagatcaacatcatccttcaaatgcatttcaatcaaagcttcctcatccaagtctcaagactcgaagctctcaatcctcaaatccacatgcgtcagcttcactgcggcagcagcactgttccttgtgaatctccagctcaaaccttcaccggcgattgcggctcctgtggcggcgacgccgttaatggaatctctcaaacaaagtaacggaaacgtttcatttgaagaagaagagagatcactcgaagagtatcttgcttctcaccctgatgatgttgaag

SEQ ID NO: 11213 - DNA, 420 bp, Arabidopsis thaliana
  Clone ID: LIB24-006-Q1-E1-G6
gcttccttatcaccaatcagatcacaccacgtggcagttatcggcgccggagccgccggattagtcgcggcgcgagagcttcgtcgggaaggtcactcggtggtcgtcttcgagagacaaaaacaagtcggaggaacctggatttacaccgatcatattgaacccgatccattaagcgttgacccgacccgatccgttgttcattcgagcgtctatggatctctccgaactaatctcccccgtgagtgtatgggatacagggacttcccgttcgtgattcgttccgatgtatcggaatctagagatccgaggaggtttccgagtcatggtgaagttttggcgtatttgcaagatttcgctaaggagtttgcgattgaggagatgattcggtttgatacggcggttgtgaaggttgctccg

SEQ ID NO: 11214 - DNA, 417 bp, Arabidopsis thaliana
  Clone ID: LIB24-006-Q1-E1-G7
ggcacaagcgatggcctttgaggtctcttgtctgcagcttcagctcctctgcggcggagacagttactacttcaacggcagcttcagcgacggcggcttttccgttgaagcatgtgacaaggtcgaacttcgagacgacgctgaatgatctacgctcactcgtaaaggctgcagatttcgtggcgattgaccttgagatgactggcgtgacaagcgctccgtggcgagactccttagagttcgaccgctacgacgtcagatacctcaaagtcaaagactccgccgagaaattcgccgtcgttcagtttggtgtctgtccctttcgttgggattctcgtactcagtcattcgtgtcctacccgcacaatttctttgtatttcctcgtcaagaactcacatttgatcaaccagctcatg

SEQ ID NO: 11215 - DNA, 433 bp, Arabidopsis thaliana
  Clone ID: LIB24-006-Q1-E1-G9
gcaacaactgcatactgcgaggcaagagctaagtcacgctttgtatcagcatgatgctgcttgtcgtgtgattgctaggcttaaaaaagaaagagacgaatcacgacaattgcttgcagaggctgaaaggcagttgcctgcagcccccgaagttgccacatcgaatgctgctcttagtaatggtaaacgaggtatcgatgatggtgagcaggggcctaatgcaaagaaaatgcgtcttggaatttcggctgaagttatcacagaactcacagattgtaatgctgctctttctcagcagcgtaaaaagagacagatccctaaaacattggcttcagtcgatgctctggagaagttcacccaactctcaagccacccccttcacaagaccaacaaacctggaattttttcaatggacatcctacattctaagggt

SEQ ID NO: 11216 - DNA, 418 bp, Arabidopsis thaliana
  Clone ID: LIB24-006-Q1-E1-H1
gcccacgcgtccggcttcttctaagataaatctctccccgattctctctttttctcgctagatactctttttcttcaattagggtttcttctcgcttgccttttaattctctccagctgatctgatctccgttaccgatggagtctactgctaacgcactcgtcgtcaaggtgagctatggaggtgtgcttaggcgtttcagggtgcctgttaaagctaatggacagcttgatcttgaaatggctggtcttaaggaaaagatcgctgctctctttaacctctctgcggatgctgaattgagtctgacttactctgatgaggatggggatgtggttgcccttgttgatgacaacgatctctttgatgttactaatcagcgtcttaagttcttaaagatcaatgtgaacgctggcgtgtc

SEQ ID NO: 11217 - DNA, 431 bp, Arabidopsis thaliana
  Clone ID: LIB24-006-Q1-E1-H12
gagttcccaaggaaaatattctgccaaaagaacctgctgctgcatatctggctttggctgaaggtattcctgaccaaaaagtattcttggatgatgccgcacttttgttatttgcagaagctattttcgatcaaaagttttcaccagaagttccggattccacgtatccttctttgaaagaaccagaaatgcatgttgccgcaccatgtgtagtaacagatcttcctgctaaaaacatcaaggtaaaagaaggtgaagtacataatgagccctacacagcatctgatgtttctatgaatcagaagagtggtttattggaaccagaatctactgaaagaacatttccctcgagcggtggtactgttacgatttctccagatactcagaattctcttccaaatggtacaagtgttgaatcaataagtatatgg

SEQ ID NO: 11218 - DNA, 418 bp, Arabidopsis thaliana
  unsure at all n locations
  Clone ID: LIB24-006-Q1-E1-H3
ggcaaagtttagaacgcgagcgaattctccgcggaattggggttaaaaggaagaacttttagggtttttgattcttcgggttttctcgtgctttgattcctttcaagtcaaagcaaagcattaccttttctcgtccatatcttttgacgacctaagtttctgctgtgaattgttaaacagccatcagcctgggcttgattagccaaccctgttaaggcagggtttgaactaaaagtgagatagtgagatggatgtctcagcacttttaacgtctgctgggattaatatagcgatatgcgtagtgcttgtatcgctttattccattctacgaaagcagccagccaattattgtgtttactttggtcgattgctttctgacggaagagttaaacgtcatgatcctcgttggtatgagang

SEQ ID NO: 11219 - DNA, 419 bp, Arabidopsis thaliana
  unsure at all n locations
  Clone ID: LIB24-006-Q1-E1-H5
gnaaacctaactctttctctatacaagagcgcaagctcgaaggcgctcttgttctttcttcattttctccttaacaatcaccctcatagtaactttaaaactctctgtttctagtaattcacacacaaaatggctattaaactagcaattctatttaccacatttgttctttttagcctcgccgacgctagaatccccggtatttactccggcggcgcatggcaaaacgcacacgccactttttacggtggcagcgacgcctccggcacaatgggaggagcttgtggttacggtaacctatacagccaagggtacgggaccaacacggctgctttgagtacggcgctgtttaacaatggtatgagttgtggagcctgctttgagcnaaaatgcgccaacgangctcaatggtgtcactc

SEQ ID NO: 11220 - DNA, 422 bp, Arabidopsis thaliana
  Clone ID: LIB24-006-Q1-E1-E6
gcccacgcgtccgcgaagcagcaaccttcgcgccgccgagagataacgagaaaaaatggggaagaggtcgaaaacatcaaggaaagggaaaaaagcatggagggctaacattagctccgaggacattgaagatttcttcgagaaaactaccagagatgctctctccggtggcaatctctccgctgctcccagcgaagacttgttccacgtcgataaatcccatgaccttccggtgaagcgaaagattgagaaacatagagagagagtgctccgtgttgacagtatcttaaagaagaatccatttgtccagttagtgccatcttcaaagccaaagttgaagaaaagtaagaagacaatcgttatagaagacaaagcacctaaacaagttcaaaaaagtgttggtgacgattctgtaatggccg

SEQ ID NO: 11221 - DNA, 417 bp, Arabidopsis thaliana
  unsure at all n locations
  Clone ID: LIB24-006-Q1-E1-B8
gaaactcttttccacactcttcttagattattactattcgtagccatctctcatactctgtcccctctcgccggttctttccggatttctaatgactttccggcggttttcaacttcggagactctaactctgacaccggagaacttagctcgggtcttggattccttccacaaccttcctatgaaataaccttctttagatctccaacttccggaagattctgcaatggacgtcttatcgtcgattttctaatggaagcaattgatcgaccatatttgaggccttatttagattcgataantcgacaaacttaccgaagaggctgcaattttgctgcggctgcgtcaacgattcagaaggcaaatgctgcatcctataacccctttggttttggngttcaaagtcnctcaattcaa

SEQ ID NO: 11222 - DNA, 430 bp, Arabidopsis thaliana
  unsure at all n locations
  Clone ID: LIB24-006-Q1-E1-B9
cgtccgcgaattttctatttccgaataacaaaaccgatcggcggagacatgacggcggcacaagggaactctaacgagactctgttttcttcttacaagatgggaagattcgatctctctcatcgagtggttctggcgccgatgacgcggtgcagggcgttgaacggagtaccaaacgcggcgttggcagagtattatgctcaacggaccactcccggcggttttctcatctccgaaggcaccatggtctctcccggatccgcagggttcccacatgtgcctggaatctattcagatgaacaagtagaagcatggaagcaagttgtggaagcagttcacgctaagggaggtttcatcttttgtcaattatggcatgttggacgtgcttctcatgcaatgtatcaacctaatggagggtnaccaatatcgt

SEQ ID NO: 11223 - DNA, 406 bp, Arabidopsis thaliana
  unsure at all n locations
  Clone ID: LIB24-006-Q1-E1-C1
gacaaagtctcatttctcgttaatttccattttcgttatctctctctctcgccgatcaaaccctaggtgtatcaattcgttcagattcccggcggttggtctcactgtcatgtaggtttgattcatcttctcttctggatcttgagtgacgaagagagaagagatctgagtttttctgagagagagatttttctccctcgttgacccgatcagttttttttcgtcgctggggattttcaaattttttttgagggatcggttttgatttgttacgtanatggcggattcttcacccgattcgtgtttcaaaggaggcaaatttagtgctccagggtttcgatttcatccaactgatgaagagcttgtgatgtattatttgaagaggaagatttgtaggaagangctt

SEQ ID NO: 11224 - DNA, 428 bp, Arabidopsis thaliana
  unsure at all n locations
  Clone ID: LIB24-006-Q1-E1-C3
ggagaaatggctcttcnnnnnnnnnnnnnnnnnnnnnnnnnnnnnnnnnnnnnnnnnnnnnnnnnnnnnnnnnnnnnnnnnnnnnnnnnnnnnnnnnnnnnnnnnnnnnnnnnnnnnnnnnnnaacacccatcaccatcgtcaccacttggccaagcacaactacaaagatgctctcactaaatcaatcctcttctttgaaggccaaaggtcagggaaacttccttctaaccagagaatgagttggagaagagactctggtctctctgatggctctgctcttcatgtggatttggttggagggtactatgatgcaggagacaatatcaaatttggtttcccaaatggcattcacaaccacaaatgctttcaagggagtgtaaattgaatttcggtgggactcaatgaaatccggaattaaaaaaacgc

SEQ ID NO: 11225 - DNA, 416 bp, Arabidopsis thaliana
  Clone ID: LIB24-006-Q1-E1-C6
gcttaatgttcctcgtaaggtgactcttttagatccgttatgtgatacaagaaactcaattcctgagaatttccctcgtgttctcgatatgtccaagtttaaggttcgagaattgggtcgtgaattcaagcttcattatttcaatactgttggtgatattgtagagagtttgtatttggagaaagctgttgttaagtatctagattgtgatggagattataaatttgtgttgcttacgattcatgtttcggggaagttagctgtgtttaggtcttgggatcgagcatggactgtgattaatgacatgccttctccttatgatgatgtgatgttgttcgatggacgtttctttgcggttgataacaacgggaggactgtgggttgtggattacagttccttgaagttgacgttggtt

SEQ ID NO: 11226 - DNA, 419 bp, Arabidopsis thaliana
  unsure at all n locations
  Clone ID: LIB24-006-Q1-E1-C8
ggggagtgggtgctttaaagaagcagagaagcgggagaagagtgtgcagcagcaacagccaacagaagaaaatggcaaaagagaaagatctggagaagcaaatcggcggttgcatggccggcttcttcaacatcttcgatcgccccagtctcctctctcctaataagcgtctctcttcctctccgagcgctgaatctgaatctgcctcgggtaggacgaatcagcagagtgtgtactctacccctgagctacgctctcctgcgccggctcaacaaagannnnnnnnnnnnnnnnnnnnnnnnnnnaggccttggaggttctctaaagaagctccgaggctctccctcgatagcagagccgtcgtggatgccaagggctgcctcaaacacagacagattcgagccgatgcggttgaggct

SEQ ID NO: 11227 - DNA, 420 bp, Arabidopsis thaliana
  Clone ID: LIB24-006-Q1-E1-D1
gcggacgcgtccgcccacgcgtccgcttcgtctctctcttgtagcaatgccgcttcttcatccacagtcgttgcggcatccttctttcgagattcagacccaaagaagaagcaattccacaacaagattgcttctttctcacaagtttctccattctcaagcttccattatctcaatctccaggacaagaatcctcaaacgggtctctcagaatctctctgtagctaaagctgcttcagctcaagctagtagtagtgttggtgagagtgttgctcaaacatcagaaaaagatgtgttgaaggctctgtctcagattattgatcctgattttgggacagatattgtttcttgtggttttgtgaaagatttggggattaatgaagctttgggtgaggtttcgttccgtttgggagctgacaa

SEQ ID NO: 11228 - DNA, 416 bp, Arabidopsis thaliana
  unsure at all n locations
  Clone ID: LIB24-006-Q1-E1-D11
gcttctgtgggttgtaaaaggcattcgctttcgagtgttggttgtcgatttcgatgccccaatctgggacctgggtactgttcccaagctccacctggattcttattgatgtgaagctcgtataacttgtgaatcgatgcggcctttttaatttcgcttgggatttcttaggtatttattctctgtatccggatctctatctataatcggatcttgtacctattgggttagtactcttgatctgaatgtaataagaagcgtgtttttttttttttaataatttggaggagcttgtgttttagttcgttgagatctcgttcgttccgaatgtgggtttantaaggttcttgaaaaagtctgcaactttgaattangtgcattaccaagaaatatatagagactgcttcnagttcgtt

SEQ ID NO: 11229 - DNA, 428 bp, Arabidopsis thaliana
  unsure at all n locations
  Clone ID: LIB24-006-Q1-E1-D3
gacggtgccnnnnnnnnnnnnnnnnnnnnnnnnnnnnnnnnnnnnnnncttgttcttgctcccatggttcgtgtgggaacgctctctttcaggatgttggcggcggaatacggcgccgatatcacatacggtgaagagattattgatcataagcttgttaaatgcgaacgccgactcaatgttgcttctgggacatctgagtttgtggagaaaggaacagataatgtagtctttagcacatgtgatgaagaaaaaagtanggttgtttttcagatgggaacttctgatgctgttanggctctaaaggcttctgaaaattgtgtgttaatgaccttgcaaactattgntaattaatatggggttgccccaaagggcaatctccaatcccaaaggtgggaatgggtngctgcctttgttaangttaaacc

SEQ ID NO: 11230 - DNA, 418 bp, Arabidopsis thaliana
  Clone ID: LIB24-006-Q1-E1-D6
ggaatcgagcagcttatcttggccactgttcctgatcccaaaagtggcagggcgcctagtattgtaacagatgaaaatattcttttgctttttgacatacaacagaaggttgatcaaattcgtggaaattattcaggttcagaggtctctttgcccgacatatgtttgaagcctttgggagaggattgcgccactcagagtattctgcagtatttcaagatggactctggaacttttgatgattatggaggagttgagcatgctgagtactgtttccagcattacacttcatcagagacgtgtttgagcgcttttcaggcgcctgttgatcctaagtgcaatgttgggaggattctcggggaataattactcagaggctactgcgtttgttgtaacatatccagtcaacaacgtcatt

SEQ ID NO: 11231 - DNA, 196 bp, Arabidopsis thaliana
  Clone ID: LIB24-006-Q1-E1-E10
gcggacgcgtgggttcgaattctcagtattttgaatcattcgttgggttgatgtagtttttaatctaatggtagtagtgttgcttagagcttaatggattgttgtttcttctttatgttccttgagactgctttcaaacaagtttaagtattcaacgcttttcttttcaagggaataaaaaaaaaaaaaaagggcg

SEQ ID NO: 11232 - DNA, 421 bp, Arabidopsis thaliana
  Clone ID: LIB24-006-Q1-E1-E12
ctcaaatctgaatggaggaagtgatgatttctccggtggagcacgaccctcagggccaggttaagcagcagcaagcggccggcgttggtatactgcttcagattatgatgctcgtgctttccttcgttctcggccatgtcctccgccgtcatcgattccactatcttcctgaagccagcggttcgcttctcattggtttaatcgtcggtatacttgctaatatctccgatactgagactagcattaggacgtggtttaatttccacgaagagttcttcttcttgtttttgttgcctcccatcatattccagtcaggtttcagtcttcaacctaaaccattcttttctaactttggagccattgttacctttgctatcatcggaacttttgtcgcttcagttgttactggtggtctgggtta

SEQ ID NO: 11233 - DNA, 430 bp, Arabidopsis thaliana
  unsure at all n locations
  Clone ID: LIB24-006-Q1-E1-E2
cacgcgtccgcccacgcgtccgcggacgcgtgggctcatacttcaacattctagctttctaagctttaacatggagaagaaaaaaaagacgccataaaattaactatgttttttaaaactccttaaattgcggtaaattggtgaaaaaagattgcggtagatttagcatttatccagtttttcaatacanaattagtagattcttttttttactttctctaaacaaataattaggattgtttttttttgtcaacaaatattaattttgttataaaagcanaannaaaatgacaatctggcaatcaaattaacgcgtctccttgtcccctaaccccacctgtatatatacntctccgtctcntcctcttctccttagcagatgcttttgggaaaaaaaatatntaccacagataaaagatctgatctgtct

SEQ ID NO: 11234 - DNA, 411 bp, Arabidopsis thaliana
  Clone ID: LIB24-006-Q1-E1-E3
acctcttgtagtagattcgtgacgggtttgatcatctcttcgaggtcggttctagggtttcactacgagaatggacggagatgagctcaccgagcaggaaactgctctttatgaccgtcaaattagggtatggggagctggtgctcaaagaagattgagtaaatctcatgttttggtatctggaattaagggcactgttgctgagttttgtaagaacattgtgttggcaggagtaggtagtgtgactctgttggatgatcgattggttacaacggaagtcttcaacgcaaacttcttgattcttcctgatgaaaatgcttatgtaggcaaaaccgtagctgagatttgttgtgattcacttaaggattttaaccctatggttcatgtttcaatagagaaaggtgatttgtc

SEQ ID NO: 11235 - DNA, 413 bp, Arabidopsis thaliana
  unsure at all n locations
  Clone ID: LIB24-006-Q1-E1-E5
attactcaagattttgattctgactttcaggaagtaaaaatatggactttgatgatgatgacaaaccaaaagaggttaccaaaacccgtagattcgctcctggccgtgccggaaagtctaaacccaaacctaaaccggaacccactgctgataaaccggtacagccgccgccgcagtcacaaactgagtccgtgagcaagactgagcatgacgttgatgctaaattcgttggcactaaggttgaaactgaggtttgtaatggctctgtgaagatggagatcgattcaaaagtcgataaagagcctgagatcatggaaactgagttgatggaggaagatcagcagcttccattnnnnnnnnnnnnnnnnnnnnnnnnnnnnnnnnnnnnnnttgttgttcgtgaaaatttgatg

SEQ ID NO: 11236 - DNA, 415 bp, Arabidopsis thaliana
  unsure at all n locations
  Clone ID: LIB24-006-Q1-E1-B4
gagnacctctaatggctttatctccgtcgtctcctccatgtctcagatctctttcgccttcnttttctcgccaaattggcttccttgttccacgcgtacagtctctagtctttggtagcgtccggaagcatgagttgcggaggccgagcgcactcanggaatggcgggagtacgaagatgctgtgaagagaaaagatctcgccggggctcttagattcctcaaatctattgnaaatgatgaacagcgtgattcggttgaatcnattgtcacggctaanttaagcggcttgggaanctccttgaattgggnaagggattggcaagtttnagatgcttgtttgaatgcagatgatatgaaacttgttggaantgccgtttangtttcntaaggganagagtcctttggncaacttcg

SEQ ID NO: 11237 - DNA, 418 bp, Arabidopsis thaliana
  unsure at all n locations
  Clone ID: LIB24-004-Q1-E1-G11
ttctcactctgaaagattctctgacgatcagagatctcaatcaccggaattaaactctaaaccggtaanacgagaagaagaggcaacggcggatatcaagattcttacggagaggctctctgcagctcttttaaatgtcagtttaaaagaanatcttgntaaacagcatgctanagttgcagaggaagctgtctcangttgggaaaaggcagagaacgaagctgcggctctgaancaacagcttgatgcttctacaagtaaggtttcggctctcgaggatcgaaatagtcatcttgatagtgcgcttanggaatgcgtgaggcaactctggcaangaaggagaagagcanaatcagaagatcgaaagaagctattaacaataagatgcaaagaatgggaaactacaanatctcaactt

SEQ ID NO: 11238 - DNA, 407 bp, Arabidopsis thaliana
  unsure at all n locations
  Clone ID: LIB24-004-Q1-E1-G2
cgcntccgctcagactcnnnnnnnnnnnnnnnnnnnnnnnnnnnnnnnnnnnnnnnnnnnnnnnnnnnncaggatttgttttttccgtttgaggtaaagcagctttgcagttaaagaaaccttgagtatccaatgtccccggaagaggagctacagagcaatgtatcggtggctagttcttcacctactagcaattgcatctccaggaacactctaggaggacttaaagagcataactacttgggtctctctgattgttcttctgttggaagctctactctctctccccttgctgaagatgacaaagctactatcagcctcaaggctacggagctgacacttggtcttcctggatcacantctcctgcgagagacacaggagcttaacnttttgagcccagcaaagc

SEQ ID NO: 11239 - DNA, 443 bp, Arabidopsis thaliana
  unsure at all n locations
  Clone ID: LIB24-004-Q1-E1-G9
cgtgggcggacgcgtgggcggacgcgtgggatctagatctagatctaggtttttttctttctcatcggaaatttggcttagaggcttgttttgatctagggtttggtttttgggaattttgaaaaaaaaacaaaattaggaatgaatctatgagctactcaatcctgtttcgtcggattcgaattctacactctttctccgtcgtttacctctactacacctacgttttctcatgaagtaatcgttcncgatctcagttttcgtttttgatctaacttantctttggatagatttagaaatcggggattttcagattggtgttttttgagaaggtttttatagggaaaataatcccctaagaaagaaagaaggaaataaannnttaatnantggaatttttaaatttttggggtggaagaangaagttccaaaaaagtncaaa

SEQ ID NO: 11240 - DNA, 426 bp, Arabidopsis thaliana
  unsure at all n locations
  Clone ID: LIB24-004-Q1-E1-H11
ggagaatttcaaatttcatttctgaggcaatcgcataattcccaccggcgatcggagatgagcagcgcgagactgtgctctcttgtggcggagctaggttacgaaggcgccggaaaattggatcccgatagcttcgaatggccgtttcagtacgacgatgctcgacctatcctcgactggatctgttcctctcttcgtccttccaatgtcctctctctcgccgaactatcactatatgagcaanttcaacgagatgggaaactcttagagggcnatgatctagaccaggcatatgatancatatcagcattttcttccaggaaganataaccaggaaggccgtttttggaagcaanaanannagcattaaagangtnaggagatgcaacnttggcgcataaggctgaaaccttagagttgcagaag

SEQ ID NO: 11241 - DNA, 484 bp, Arabidopsis thaliana
  unsure at all n locations
  Clone ID: LIB24-004-Q1-E1-H3
tgtttacgcctgccngtacccgtccaaaattccngggtcgacccacgcgtccggtaaagaaacacaaaaatgaagtgtccgtactgttcatcggcgcagggacggtgtaccaccacgagctccggtagatcaataacggagtgctcatcttgcggtcgcgtaatggaagaacgacagacgcaaaaccaccacctcttccatctccgagcccaagacactcctctctgcttagtcacttccgatctccaaacggcggcgcaaccgtctcctgaagacgaggaagatccgttcgaacctaccggattcattaccgccttctctacctggtccctcgagccaagcccgattttcgctcgctcttccctctctttctccggtcatctcgctgaactcgaacgaaccctagaactcgcttcgtcaacatcgaattcgaattcgtcgactgttgtggtggataatcttanggcttatatgcagatttatc

SEQ ID NO: 11242 - DNA, 426 bp, Arabidopsis thaliana
  unsure at all n locations
  Clone ID: LIB24-004-Q1-E1-H7
gagttgagtatgaccgagcagggaggattataaaaggacaggaggtgatattgccaaagagtaaatatgaagaagatgttcatgctaacaatcacactagtgtgtggggatcatattggaaagatcatcaatggggatataaatgttgccagcagatcattcgcaatagttactgcacaggttctgctggaattgaagctgcagaggctgcccttgatctgatgaangctaatattgctcgcaaagaagcaactgaanagagcccaaanaaggttgaagagaagagaatggcgtcatggggaactgatattcctgaagatttggagttgaacgaggaggcacttgctaatgctcttaaaaaggaggatctcagtaggagggaagagaaagatgagangaaacgcaaatacaatgtcaaatacaaca

SEQ ID NO: 11243 - DNA, 485 bp, Arabidopsis thaliana
  unsure at all n locations
  Clone ID: LIB24-005-Q1-E1-A10
ttacgttgccngtgccggtccaaaaattaacgggtcgacccacgcgtccgagactacaccgtcttgatcggtgactggtacaccaagagccacacccagttgaagaaattccttgacagcggtcgtactcttggccgtccagatggtattctcatcaacggaaagtccgggaaaggcgatggatccgatgcacctctctttaccttgaaacctggaaagacctacagggttaggatctgcaacgtgggtctcaagacatctcttaactttaggattcagaatcacaagttgaagcttgttgagatggaaggatcgcacgttctccagaacgattatgactctctcgacgttcacgttggtcagtgttacggaaccatccttaccgctaatcaggaagctaaagattactacatggttgcatcctctaagttcttgaagtccgttataaccancactggtcctctccgctatnaaggaagcaaaag

SEQ ID NO: 11244 - DNA, 474 bp, Arabidopsis thaliana
  unsure at all n locations
  Clone ID: LIB24-005-Q1-E1-A12
gccggtccaaanattaacgggtcgacncacgcgtccgnntgacgcgtgggcttacaagcgcgctagaatctgaatctggccatggcgaagattcgagtctttcgtggtctatttcccgctcacgctcccgctccagttcaagatcatcgtcgtcttcttcttattcttctccaatttgattaattagagattggatttggcgattttggtgaaatcattcatgttcaacttgcgatagatcgagctgctaatctttcaagaggagatgcatatgttgaattcaaggcaaaaatagctgatgctgagaaaccacagctgtacatggatggtgtatgtttcaagtgatccaaagggagatgctttaaaatctgataatgttggtactgacattgagaaatatgataatcacctctgcctaagaattggtgggttaacccatacgcaaggcaaatgtcctcctctaaccgggcgttn

SEQ ID NO: 11245 - DNA, 413 bp, Arabidopsis thaliana
  unsure at all n locations
  Clone ID: LIB24-005-Q1-E1-A3
ggaagtgtaacggtggaaacggaggaagtgacaaagaagagaaaagaagaagtgaggaagaagagagtagaagatattggtcaagaggatgcttggtttaagaacaacactcaacaaaaacaagttgaggtttctgttacacctggtggtcgatggaatagattcaagacttactcaactattcaaagaacattggagatttggggttttgttgtacagtttattttcaggacttggttaagcaataagaagttctcttataaagggggaatgactgaagagaagaaggttttaagaaggaangttttggctaagtggttgaaagaaaacattttgagattangtcctacatttatcaaaattgggcaacagttctctactacagtggtattcctcctcaagagtagttgtca

SEQ ID NO: 11246 - DNA, 417 bp, Arabidopsis thaliana
  unsure at all n locations
  Clone ID: LIB24-005-Q1-E1-A4
actcgaaaaatggctcagattcagcatcagggtcaaaatgccaatggtggtgtagctgttcccggtgctgctgcggctgaagctgcggcggctgccgctggagctgcggcggcngctgccggagctgcgcaacaagggacgacgtctttatatgtcngtgatctgggatgcgaccgtgacggattcacagctgtttgangcgtttacccaaacgggtcaagtggtttctgtccgtgtctgcaaagacatgacgactccgagatntcnaagctatggctacgttaactaatgcaactcctcaaagatgcntccaanggcactgaantgagcttaatttcaagggtccctaaatgggaagggctataaaaaanttaatgtattcccgttccnggatttcaaaatctcccgttaaaaaac

SEQ ID NO: 11247 - DNA, 410 bp, Arabidopsis thaliana
  unsure at all n locations
  Clone ID: LIB24-005-Q1-E1-A7
taatcgggttttatgtccagcatctccgacttccggagttgtgatggctggccctctgtttggcatcatccggcttctataaggagcgttggccagcttcgtcgttttttctagtcgtccggtgtatgaggttcgtatcacgtttaatattcgctgtttggttattataaatccagtagatccggttangtctctacttttgttcaattatttcgaggattaatanttctgctccggtggcctctaacaaggttatgtgttgatagctttgttggatctanatgtttctttcgatttaagttgtcaagacagttctgcgcctaagttagctggttaaaagctcagtatattgatgttttgtcctccatactccgtgattgccagaatcggtgagaaaaaagaagattcng

SEQ ID NO: 11248 - DNA, 441 bp, Arabidopsis thaliana
  unsure at all n locations
  Clone ID: LIB24-005-Q1-E1-A9
gacctcctccaccgggtggcgtgacaagatccgttacaatacgcctcttcacgtcgtcactatcacagaactcggcgccattattgctctcatcgcttcgtttatctatctcctagggttttttggtattgactttgttcagtcatttatctcacgtgcctctggtgatgcttgggatctcgccgatacgatcgatgatgatgaccaccgccttgtcacgtgctctccaccgactccgatcgtttccgttgctaaattacctaatccggaacctattgttaccgaatcgcttcctgaggaagacgaggagattgtgaaatcggttatcgacggagttattccatcgtactcgcttgaatctcgtctcggtgattgcaaaagaacggcgtcnattcgtcgtgaggcgttgcaaaanagtcaccgggagattattgaaagggt

SEQ ID NO: 11249 - DNA, 469 bp, Arabidopsis thaliana
  unsure at all n locations
  Clone ID: LIB24-005-Q1-E1-B1
ctgttttgccgcccctaccggtccanaantcccggggtcgacccacgcgtccgccgctcggcgacaaagacgaagaagccgaggaagcaccgatacgacgattgagacttagttttgctcagattcatttaaccaccggcgccaagtgacgacgacgacggagggagcagattcgaattgtgtgaagacagcaatggagtctactgagtcatatgcggcaggttcaccggaagagctggctaagagatcccctgaaccgcatgattcttccgaagctgattctgctgagaagccaacacacattcggtttcttgtatccaatgcggcagctggttccgtcattgggaaaggtggctcgaccatcactgaatttcaggcaaantctgggggcaaggtncacctttcacntaaccaaangtttttcccggggnacnaactgacagaattattatganatcgggattaacca

SEQ ID NO: 11250 - DNA, 486 bp, Arabidopsis thaliana
  unsure at all n locations
  Clone ID: LIB24-005-Q1-E1-B12
ctgtttaccttgcccngtgccggtccaaaaattaacgggcntcaatccaaagcttncctcttcttggaaccaatctgctctcttttttattctgagtttgacaatggcggttggtgaggtcatgaggatggagattcccgccggtggagatttgactgttactantccggagttgcatgttcntgccgtcnatgatantantgtggatngtaaagtcatcnaaangttgcttaaaatctcttcntgtaaagtgacgactgtagagagtggaactanggctttgcantatcttggcttanatggaggcaaaggggcttctaatcttaaggatttgaaggtgaatttgatagtgacggattactcaatgccaggactttcaggatatgatctccttaaaaagattaaggaatcttcagcattcagagaagtaccagtagtgattatgtcatctgagaacatcttacctcgtatacaagaatgtccaaa

SEQ ID NO: 11251 - DNA, 469 bp, Arabidopsis thaliana
  unsure at all n locations
  Clone ID: LIB24-004-Q1-E1-G1
gtagccgtccaaaattcaagggtcgacccacgcgtccgcaaaaactataagtcccacactcaagtcaattaaagcactccaatggtccaacaagtttcgtcgtctaccttgaaactcaacctttggatgattgatatacaaaaatacaggatctaaaaacacctaccgaacttgaatagtaggtgtgttgtgtttgagtgtctctctaggtaaacatggtagcagaagaagcaagaaaagaagccatggctaaatcagtatctggcgggaagattacttattttgtggtggcttcatgtgtcatggccgccatgggcggtgtcatcttcggctacgacatcggggtttcaggtggagtgatgtcaatggggccatttctaaaaagatttttcccaaaagtgtataagctccaagaagaagatagaagaaagaagaggcaatagcaataancactactgccttttcaata

SEQ ID NO: 11252 - DNA, 420 bp, Arabidopsis thaliana
  unsure at all n locations
  Clone ID: LIB24-004-Q1-E1-D7
tgaaacccaacttaaagcattactcttgtcttgtggatcttctttccaggtctggtaatttggaggaagctgaaagcacagtcatgtctatgccattctcaccagacggggtcatatggggaacattgttgagctcatgcatgacccatggggagtttgagatgggaattcgaatggcagaacgtgcggttgctagtgatccgcagaacgatgggtattatataatgcttgcgaacatgtacagtgctgcaggtaagtgggaagaagcggaaagggcacgagagatgatgagggaaagcggagttggtaagagagctggtcatagtgtagtctaataatctttgatacaatgaatatccttgtgattcatctgtttgaaacacatgttcaatggacaatgatgcatagattanaagatta

SEQ ID NO: 11253 - DNA, 476 bp, Arabidopsis thaliana
  unsure at all n locations
  Clone ID: LIB24-004-Q1-E1-E1
ctgttacgccttcagtagccgtccagaattcaagggtcgacccacgcgtccggtctcctctgagagtccgtacgcatcgacgattctctcatcttctctcaaacacgacgacactgggttggtaaattagagttgaaagatgtacaacggaatagggttacagacagcaagaggatcaggaactaatggttatgttcagacgaataagttttttgtgagacctagaaatggtggtaagcctgttaaaggtgggaaaggttttgaggatgatgaaggtactgctggtttatctaagaaacccaataaagctatccttgagcatgaccgtaaacgtcagattcatcttaagcttgctattcttgaggataagcttgctgatcagggttattctgatattgagattgctcagaagcttgaggaagctagagtgagtcttgaagctgctgctgctgctaatgaagaagagagtgattcna

SEQ ID NO: 11254 - DNA, 429 bp, Arabidopsis thaliana
  unsure at all n locations
  Clone ID: LIB24-004-Q1-E1-E12
gaccggattaaacactaagaaagggtttgatgtaaagatcgctgctgcagtagctgaagaaacaaacttgccattcgtcaccgcagaaaacaagtttgaagctctggctgcacacgatgcttgtgttgaaacaagtggatctcttaacacaatcgccacatcattgatgaagattgccaatgatatacgttttcttggaagtggtccaagatgtggtcttggtgaactttctctgcctgagaatgaaccaggaagcagtattatgcctgnaaaggtaaatcctacacagtgtgaggccttgactatggtttgtgctcaagttatggggaaaccatgtagccgtgacaattggtgggtcgaatggtcattttgaattgaatgtattcaagccggttatcgcaagcgctctcttacattccaattanacta

SEQ ID NO: 11255 - DNA, 481 bp, Arabidopsis thaliana
  unsure at all n locations
  Clone ID: LIB24-004-Q1-E1-E2
antgttacgccttcagtagccgtccagaattcnagggtcgacccacgcgtccggccctcantatcctctctctcaaatcgcggagtctccgaagtttctctgtcagacaaaatgcagtcgtcaacgtatgcggttaaaggaaacgctgcgtttgcgtttcagagacggaccttctcttctgacagatcgacgacttctaccggaattcgcttcgctggttataagagcttagccaccaccgggccactctactgttctggttctgaagccatgggagcgacgcttgctcgtgctgataacgggatccagagcgttatgagtttctcttctgtcaaagctcgatcggtcagagctcaagcctcatctgatggagatgaagaagaagctatacctctgagatctgaagggaaaagctctggaacagttttgccttttgttggtgttgcttgtcttggtgctatactccttgggtaacatcgcn

SEQ ID NO: 11256 - DNA, 468 bp, Arabidopsis thaliana
  unsure at all n locations
  Clone ID: LIB24-004-Q1-E1-E3
ngtagccgtccaaaattccagggtnttgagatgacgatgaaatcgattaaagagagagaagttgaacaacttgcaactacttatgtgactgtccaagagctattatacgccctacaatttgttgtttttcaagtcacacccgctattcaagaaggtccttatccaaggagacagtcgattctgagtcggaagaagaggttgttgatctaaatcctcactaggtggttccgtttaagcttagcaacgccaaagatctagacaataattgcaagttaccgcgttgatcctatcttccgtcccgaagccgtccttgatccagcccangatgttttgtggtcagatgacaaagtagatccacggggtatatattatggtaaagttggcggccgaaggattgaagttcaataatgatatgttttctggtgggttgcatcccatctgaagtggttatagcccccanaaacaaaa

SEQ ID NO: 11257 - DNA, 466 bp, Arabidopsis thaliana
  unsure at all n locations
  Clone ID: LIB24-004-Q1-E1-E4
tacgccgnccgtagccgtccaaaaattcaagggtcgacccacgcgtccgngtgatcnanccgccgccgtcttcaccaccatcttcaatgactagtcaagattccggcgtttcttccgatgatcagaaccatcactctaggatcgatcaagttctccggcacgatcaaggtctttacagcaagatcnggtcacacgtggcgagatccgacggcgttgacggtggtgagagctttaagcgtgatatganagagcttcaggagcttttctctaagcttaatcctatggctgaagagtttgttcctccttctctgaataaacaaggaggtaacngtgttaacngtggtttcntcacctctgcctggttncttcttccgcaacaaatggctttgctggtacnggaaatggcggatacgggtaacgaaaaacggtggtttccgacgganaaagatttttgggcaangggaaa

SEQ ID NO: 11258 - DNA, 461 bp, Arabidopsis thaliana
  unsure at all n locations
  Clone ID: LIB24-004-Q1-E1-E6
aggtcaagaactcgcgggtcgacncangcntccncntcctcnnnnnnnnnnnnnnnnnnnnnnnnnnnnnnnnnnnnnnnnnnnnnnnnnnnnntggcaagagttcaactattgttatgcttcaccattctatttgcatctgtgacccttcttgacctagtatcagcacacctgaaatttaagccatctttgcctcaaatcgaagatccaaagacggtgaaggatgtagagccttacaccgttaaagtagtaatggtctttgtggccgacctcgagaaggaatgtcccaagacaaacaagttcaaggccttctttgagaaacttagaggattcgccaagtatgtttgcccaataggaaggattggccaagtagattacgaccgggacatgaaggccaaagccgggggtatcttcaaggccatatcttcttttgcgattggaaagattangggaggaaattc

SEQ ID NO: 11259 - DNA, 421 bp, Arabidopsis thaliana
  unsure at all n locations
  Clone ID: LIB24-004-Q1-E1-F10
gntttcagcgtgatgtgcgctctcgtcctcgtgatactctctctgacgaaccgggtgtctttgtcaacgatccgccacccacgcagcctacccaagcaccacctccgatgggtcataaactccttcttgaagacattaatgatcttcttgagatagggaagcgcatacgacgtcgcttgacaggtaagttgttttcttgcttcatgtggtgctttgcttattgtgttcttgccttgtgttttctggaattttgatgttgtggctcctgtagttgaggaagaacctaggaagaggaagaggaagaatttgatcctggctgagttactatagcttggggtcnagtaataangggangaaatgtgtagtgtagctttgtntttgttttgtgtgcactactaaaactctgtgttgtccctttgtt

SEQ ID NO: 11260 - DNA, 420 bp, Arabidopsis thaliana
  unsure at all n locations
  Clone ID: LIB24-004-Q1-E1-F11
gcccacgcgtccgcaagaagctcactgtctcgagtcttgtcaagtctcaggacgaattcgaaagagaggtgaagaaacttggaaaactcaggcattcgaatctggttaaactcgaaggatattactggacaacttctctccagcttctgatctatgagtttctctctggtgggagtttatacaaacagttgcacgaagcaccaggaggtaatagttcgctttcttggaatgatcggttcaacattatccttggtacagcgaaatgcttagcttacttgcaccaatcaaacatcatccactacaacatcaaatcgagcaacgtgttgctagacagctctggtgagcctaaagtangagactacgggattagcgangctgttacctatgctaagatagtacgtgctgagtagcaagatacan

SEQ ID NO: 11261 - DNA, 413 bp, Arabidopsis thaliana
  unsure at all n locations
  Clone ID: LIB24-004-Q1-E1-F12
ggagcactctcttctctttgtctctgtgactcacattcatccaatccaggaggcatgtcgacatctgaggataaaccggaaatcatcagtagagtagttcatcaggagggtgacgtggaaatcgtcgatagaagtcagaaggataaggacgaggaaaaagaagangggaaaggtggattcctcgataaggtgaaagatttcantcatgacattggtgagaaactcnagggaaccattggctttgggaagccaactgctgntgtcnctgcnattcatatccctaagatcantcntgagannggcagntattgttgtggntgtgcttgtcaagancccgaatccaagttcctatcctctcatngatgtcaantacctggtcgacanccatggggagggaaactgggnttcggggt

SEQ ID NO: 11262 - DNA, 469 bp, Arabidopsis thaliana
  unsure at all n locations
  Clone ID: LIB24-004-Q1-E1-F3
ngtagccgtccaaaaattcnagggtcgacccacgcgtccgatcgttgacgatcctctttacgtttttcggagctggagattcgacgacgagactccttgctcttggcgtggtgtcacgtgcgatgcatcttcccggcacgtgactgttctgtcacttccaagctcgaaccttaccggcacactaccttcaaatttgggttcactcaattcacttcaaagacttgatctttccaacaattccatcaatgggtctttcccggtttcgcttctcaacgcgacggagcttcgatttcttgatctgtccgataatcacatctccggtgcactaccggcgagttttggcgcgctttcgaacctccaagtgttgaatctctccgataattccttcgtcggcgaattaccgaacacattaggatggaaccggaacttaacggagatttcacttcagaaaaactatttatccgggcgg

SEQ ID NO: 11263 - DNA, 487 bp, Arabidopsis thaliana
  unsure at all n locations
  Clone ID: LIB24-004-Q1-E1-F4
ntgtntacgccggtcggtaggccgtccaaanattccangggtcgacccacgcgtccgngattgtaagcagagggaaggcgaagaattatgataacctctcatcaacgataagacaaaatccataaactagtaatatcatccaatcctctcacttcttccttattccctcactttcactctcactatctgttgacttcacatggcttccaccgccgcaactgcagctctttcgatcatcaaatccaccggtggcgccgccgttacacgctcctcccgcgcctcctttggacacattccctccacatctgtctccgcacgtcgccttggcttctccgccgtcgttgactctcgtttctcggtccacgtggcgtccaaggtccactccgtgcgcggaaagggcgccaggggagtgattacgatggcgaagaagagtgttggagatctgaattctgtagatttgaaggggaagaagtgtttgttagagctg

SEQ ID NO: 11264 - DNA, 426 bp, Arabidopsis thaliana
  unsure at all n locations
  Clone ID: LIB24-004-Q1-E1-F8
gcccacgcgtccgcccacgcgtccgcccacgcgtccgagccggttgaagttctaccactgttgccatattttgataggtacgatgagcagtttgtggtagcgaattttgatggtgctcctatagctgattctgaattctttggcaagttggacccttcaattcgtgatgcacatgagtcacgggccattttgaaaagctatgtggtggctggatcagacactgccaatccagaaaaatttctggcgtacatggttccttccttggatgagttgtctaaggatatccatgatgaaaacgaagaaatctcttacacttgggttcgcgaatacctctgggatgtacaacccaatgcaaacgatcctggcacatacctggtatcatttgacaatgggaccgctagctatctgcccctaaccatgangttg

SEQ ID NO: 11265 - DNA, 424 bp, Arabidopsis thaliana
  Clone ID: LIB24-004-Q1-E1-D6
gcccacgcgtccgcattgctaatctaacatctcattctccaaaaactcaggaactcgaactatcttccacaactcacgaaaatgtttctcttaaagacatggagatcaaccgcttttggggtttatggctacatgaatttcaccaagagtggtttcttagatcattcaaagaagtttaaacctgaagatatgcagttacaaattgaaggaaagaattgtgtagttactggagctaattcaggtattggttttgctgctgcagagggtcttgcttcacgtggagcaactgtttacatggtgtgccggaacaaggaaagaggacaagaggctctttctaagattcaaacctcaacaggaaaccaaaatgtgtacttggaagtatgtgatttgtcttccgttaatgaaatcaaatcatttgcttcga

SEQ ID NO: 11266 - DNA, 427 bp, Arabidopsis thaliana
  Clone ID: LIB24-004-Q1-E1-A6
gcggcttgtgacctctctatcttactagttataaactaaagccagtcaggtgcctctttagctcttccccaccactccgattcatctttatcctctctctcatctcgtccgttgttgcataagtgctatggatctcgcgtcgaatcttggtgggaagatcgataaatccgatgttctcaccgccgtcgaaaagtatgagcaatatcatgtcttccatggaggaaacgaggaagagagaaaagccaattatactgacatggttaataagtactatgaccttgctactagcttttatgagtacggatggggagaatccttccattttgcacaaagatggaaaggagaatcgcttcgagagagtattaagcgacacgagcactttcttgctcttcagcttggcatcccaaccaggacaaaagggtactgg

SEQ ID NO: 11267 - DNA, 471 bp, Arabidopsis thaliana
  unsure at all n locations
  Clone ID: LIB24-004-Q1-E1-B1
ggtagcctccaaaattccaanggtcgacccacncgtccgatcgttgacgatcctctttacgtttttcggagctggagattcgacgacgagactccttgctcttggcgtggtgtcacgtgcgatgcatcttcccggcacgtgactgttctgtcacttccaagctcgaaccttaccggcacactaccttcaaatttgggttcactcaattcacttcaaagacttgatctttccaacaattccatcaatgggtctttcccggtttcgcttctcaacgcgacggagcttcgatttcttgatctgtccgataatcacatctccggtgcactaccggcgagttttggcgcgctttcgaacctccaagtgttgaatctctccgataattccttcgtcggcgaattancgaacacantangatggaaccggaacttaacggagatttcacntcagaanaaactatttatccgggnggga

SEQ ID NO: 11268 - DNA, 422 bp, Arabidopsis thaliana
  unsure at all n locations
  Clone ID: LIB24-004-Q1-E1-B12
gcctctataccatagctattggagccggtggaacaaaacctaacatttccacatttggagcggaccaattcgacagttatagcattgaagaaaaaaagcaaaaggtttcattcttcaattggtggatgtttagctctttcttaggcgcgttgtttgcgacattggggctcgtctacatccaagagaatctcggatggggtttaggttatggcatccctaccgtaggactcttggtttctctcgttgtgttctatattggaacaccattttacaggcataaggttatcaaaacagacaatttggcgaaagatttggttcaagttcctatcgcggcattcaaaaacngaaagcttcagtgtcctgatgaccacttgggagctttatgaacttgactctcattattacanaaacaatgggaaagc

SEQ ID NO: 11269 - DNA, 472 bp, Arabidopsis thaliana
  unsure at all n locations
  Clone ID: LIB24-004-Q1-E1-B3
ngtaggcgtccaaaaattccanggtcgacccacgcgtccgagagaatggagcaataacaaggattggacggacaatgtctgatcttccactagaaccatcattgtcaagaacattgatagaagcgaatgaaaccggttgcttatctcaagctctaacagttgttgctatgctgtcagcagagacaactcttcttcctgctaggagtaaacccagtgaaaagaagaggaaacatgatgaagattctaatcttcctaatggatccggatatggtgatcacattcaactgctacagattttcgaatcttgggaccgtactaattatgatcctgtatggtgcaaagagaacggcatgcaggtgcgagggatggtgtttgtcaaagatgttagaagacagttatgtcagattatgcagaaaatatccaaagatcgattggaagttggggcaatggtangaagagttcaagccgagac

SEQ ID NO: 11270 - DNA, 464 bp, Arabidopsis thaliana
  unsure at all n locations
  Clone ID: LIB24-004-Q1-E1-B4
agccgtccanaattcaagggtcgacccacgcgtccggagagatagagttatggctttggcgatgatgatccgaaacgcagcttcgaagcgaggaatgactccgatctccggtcatttcggtggtttgagatctatgtcttcatggtggaagagcgttgagcctgctcctaaagatccgatcctcggagttaccgaagcttttctcgctgatcctagtcctgaaaaagttaatgttggtgtgggagcatatcgtgatgataatgggaagcctgttgtcttggaatgtgtcagagaagctgagaaaaggcttgctgggagcactttcatggagtaccttcctatgggaggaagtgccaaaatggtggacctaacattgaagcttgcctatggggacaatagtgaatttatcaaagataaaagaattgctgcagttcagactctgtctggcactgggagcctgccgg

SEQ ID NO: 11271 - DNA, 424 bp, Arabidopsis thaliana
  unsure at all n locations
  Clone ID: LIB24-004-Q1-E1-B6
ggacctgggtttttccttactctctaagaaaaaccactactttggtnnnnnnnnnnnnnnnnnnnnnnnnnnnnnnnnnnnnnnnnnnnnnnnnnnnnnnnnnnnnnnnnnnnnnnnnnnnnnnnnnnnnnnnnnnnnnnnnnnnnnnnnnnnnnnnnnnnnnnnnnnnnnnnnnnnnnnnnnnnnnnnnnnnnnnnnnnnnnnnnnnnnnnnnnnnnnnnnnnnnnnnnnnnnnnnnnnnnnnnnnnnnnnnnnnnnnnnnnnnnnnnnnnnnnnnnnnnnnnnnnnnnnnnnnnnnnnnnnnnnnnnnnnnnnnnnnnnnnnnnnnnnnnnnnnnnnnnnnnnnnnnnnnnnnnnnnnnnnnnnnnnnnnnnnnnnnnnnnnnnnnnnnnnnnnnnnnnnnnnnnnnnnnnnnnnnnnnnng

SEQ ID NO: 11272 - DNA, 422 bp, Arabidopsis thaliana
  Clone ID: LIB24-004-Q1-E1-B7
ctctccaacagaatcgatagatcgagtttgaaacctggagatcatatctactcctggaggactgcttacatctatgcccatcacggcatctatgttggagatgatagagtcatccatttcactagacgaggccaagaagttggaaccgggactgttctagatctcatactagtcagctcaggtccatcccgaaaccacacccactgtccaacctgtgttccacctaacgaaggtcacggtgttgtttcctcatgccttaactgtttcctagccggtggtgtcttgtaccggtttgagtactcagtcaacgctgctcacttcctcgtcaaagccagaggaggaacttgcacactcgctgtcgctgaccctaatgagattgttgttcaccgggccaaacacctccttcaaaacggatttggatg

SEQ ID NO: 11273 - DNA, 417 bp, Arabidopsis thaliana
  unsure at all n locations
  Clone ID: LIB24-004-Q1-E1-B9
gcccacgcgtccgcccacgcgtccgcccacgcgtccggcagctgatttagatggttctgaggaatcctctgaaacaggggatgagaatggctcctctgattatgactctgaatcttctaatggttcggattttagcagtgaaggtgatgaaagaacagtgtctaatgacgccaatgacccagctgctcctttaattcaaatttcagagacttctgtttccgctgaccaggaagaactaaggtccagaagggccctggatttgtggttagatgatcagcctagtacatcaaaccaaactccatctgcattaaatagtaatcagagctcttatgcgaagatatccattggtgatgtaggaagccgagttaagcctaaaagctatagtctcgtagancctggaaatggcaattggttgaa

SEQ ID NO: 11274 - DNA, 450 bp, Arabidopsis thaliana
  unsure at all n locations
  Clone ID: LIB24-004-Q1-E1-C1
tcgacccacncgtccggtatgcctggacctgaatacttcagtaacattcattacggggcaggtgatgatcgtggaacagaaggtgactttctaggtagcttttgtctggaaagaaagattgatctaacaggatacataaagtggtggggagccaacaagaaccgtcaaccagaatcttcatcaaaagcatcagaggatgcaaacgtcgaagatgctggtactgagcttaaaacactggaacacacatcccatgcaacagaaccatacaaggcgccaaaccttggcgtcctttgtggaactcagagaaaagaaaaagaaatatcatcaccatcaagctcttctgctttaagcatcttgtctcagtcgcctgccttcaagagcctagaggagaaagtgttgaagattcaagaaagctgcaataatgaaaacgatgagaatgcanaccgtaac

SEQ ID NO: 11275 - DNA, 400 bp, Arabidopsis thaliana
  unsure at all n locations
  Clone ID: LIB24-004-Q1-E1-C10
naaagaaacaagaaaacgaaaggaaaaaatacagaaatgggtggtttgaagtttcatgtacttatgtatccatggttcgcaacaggccatatgaccccgttcctttttcttgccaacaaattggctgagaaaggtcatacggtcacttttttgattcccaagaaagctctgaaacagttggaaaatctcaatctgtttccacacaacattgtctttcgctctgtcaccgtccctcatgtggatggtctccccgttggcacagagacagtctctgagatccccgtgacatcagctgatctcttgatgtctgctatggatctcacacgtgatcaagttgaaggtgtggtccgagccgtggaaccggacctgatcttctttgactccgctcattggattccan

SEQ ID NO: 11276 - DNA, 414 bp, Arabidopsis thaliana
  unsure at all n locations
  Clone ID: LIB24-004-Q1-E1-C11
ggagaaatcttttgaactcgaggttaaagctgcagataatcgcatcattcagcaaacactcaatgaaaagacatgtgaatgtgaagtgttgcaagaagaagttgcaaatctaaagcagcagctctctgaggccctggaactagcacagggaactaagattaaagagctgaaacaagacgccaaggaactaagtgaatcaaaggagcagttagaactcagaaacaggaaacttgcagaagagagttcatatgcaaaaggtcttgcatcagcagctgcagttgagctcaaggcattatccgaagaagttgcaaagcttatgaatcagaacgagagactagcagctgagctggcaacacagaagagcccaatcgcacaacgaaataaagacaggaacaacaacanatgttaggaaca

SEQ ID NO: 11277 - DNA, 459 bp, Arabidopsis thaliana
  unsure at all n locations
  Clone ID: LIB24-004-Q1-E1-C3
taacctccggtagnctccaaaattccaaggtcgacccacccgtccgattcacttcacaaaccgctcggcgacaaagacgaagaagccgaggaagcaccgatacgacgattgagacttagttttgctcagattcatttaaccaccggcgccaagtgacgacgacgacggagggagcagattcgaattgtgtgaagacagcaatggagtctactgagtcatatgcggcaggttcaccggaagagctggctaagagatcccctgaaccgcatgattcttccgaagctgattctgctgagaagccaacacacattcggtttcttgtatccaatgcggcagctggttccgtcattgggaaaggtggctcgaccatcactgaatttcaggcaaaagtctggggcaaggattcagctttcacgtaatcaagagtttttcccggggacgactgacagaattantatg

SEQ ID NO: 11278 - DNA, 402 bp, Arabidopsis thaliana
  unsure at all n locations
  Clone ID: LIB24-004-Q1-E1-D10
gngagacgcgtgggcggacgcgtgggttgtgcttctgttaatgccggggacgtcgacgtccgtctctgtcatcgagtacacgatgaaaaaccacgagggaggttccaattcgaggggtccgaagaattacgctgtgatttttgatgctggaagttctggaagccgtgtgcatgtttactgtttcgatcagaatttggatcttgttcctttggagaatgagctcgagctcttcttacagctaaaaccgggtttaagtgcatatcctaatgatcctcggnaatcaacaaactctttaataactcntctggacaaagnagaagcttcccgttccccntnagtttgngtccaaagactcctgtcaaagttggggcaactgcncggtttagaaccttggggncacaa

SEQ ID NO: 11279 - DNA, 412 bp, Arabidopsis thaliana
  unsure at all n locations
  Clone ID: LIB24-004-Q1-E1-D11
tgtaaccaatctcagctctccctctcaaacaatccaggattcttcagattcctctcctttgatcctctctttaacaatctctctctctctgttttcttcgatccgttgtaggagaaaatggtcgttatcaacagtctccgacgcttggcgcgtaccactcaggttcatttgcacagtaagtatgccacttgcatgtctgggaactccacttccaggaggattttcactactgaggcagcacctgagaagaaaaacactgttgggtctaaagggcatgatatgcttgcaccttttactgctggatggcanagtgctgatttagatccttggtcattgcaaaagtctgagggaagttatgtgtatgatgatactgggaaaaaatatcttgactctctcgccgggttaagggtgt

SEQ ID NO: 11280 - DNA, 425 bp, Arabidopsis thaliana
  unsure at all n locations
  Clone ID: LIB24-004-Q1-E1-A5
gcccacgcgtccgcccacgcgtccgcggacgcgtgggggtttacttaatcttctttctagttaagtatattcttgttgctcatcaccaaagcttgtgatggaggctctcttcttgagttcttcttcttcctccattgtagcgtcaaacaagcttactaggttacacaaccattgtgtctggtctacagtgattagagataagaaaaggttcggtcccacttggtgccgtgtaggtggtggtggtgatggtgggagaaacagtaacgcagagaggcctattcgggtttcttcgcttttgaaagacagaggtcaggtactgattagggaacagagttcgccggctatggatgctgagacattggttctgtctccaaacgggaatgggagaaccattgagatcaatggagtaaagactttgatgccnt

SEQ ID NO: 11281 - DNA, 447 bp, Arabidopsis thaliana
  unsure at all n locations
  Clone ID: LIB24-002-Q1-E1-F2
ggncgacccacgcgtccaaaaaaagaaagaaatccagatctactaaaatccccaaattcaattttcaaaatttgaactcctagaaaaccctagcctttgcaattgggtgctacatcttccaaatcgttccgggatcgaaatctctcgaattggggacgttgtacattgcacacgatgggcgatttcaacctcgctctcgtgattgtcgcgatcgttgtttgcgtcatcgtattcatctctagcatctatcttctcgtcaactatcagcatccagatgatgcaaaccaggcttatttccccaaattcgtcgttgtttttggcctttctattgctatgatctcgattctcatgttaccggctgatgtggccaatcggcatgcttgtcgacatgctatatacaatggagcttgcaatctcaacttgcccatgaangatttttgggcttgc

SEQ ID NO: 11282 - DNA, 470 bp, Arabidopsis thaliana
  unsure at all n locations
  Clone ID: LIB24-002-Q1-E1-F5
ggtactganctgtgaattcgncggccaaattcttaatggaaaaggattctcggactaccttgatgattaaaaacattccaaacaaatacacctcgaagatgttgttagctgcaatcgatgaaaagaaccaaggaacttacaactttctctagttgcccattgatttcaagaacaaatgcaatgtgggctatgcattcatcaacatgctcaatccagaactcatcattccattttatgaggcttttaatgggaagaagtgggagaagttcaacagtgagaaagtagcttcattggcatatgctcggatacaaggaaaatctgcccttatagcccattttcagaactcaagcttgatgaatgaagatatgcgttgtcgtccaattatcttcgacactcccaacaatccagagtctgttgaacaggttgttgatgaggaatctaagaatatggacctcctcgactctcagctc

SEQ ID NO: 11283 - DNA, 426 bp, Arabidopsis thaliana
  unsure at all n locations
  Clone ID: LIB24-002-Q1-E1-F6
anttagctttaaagggcacacacacacagtcgcgagtttctctctggtgcgctctttgtggcggctcgtcttcttcttcttcttccacgggactctctctgaatcggtgattttcgatcttcctagggtttcgatctgaaaccttgcgatctacttgaaagagagattcagaaatttccaagtaataataatgtttgcgcctgcgactcaaccgcaacagcaacatgagcagaagaagcaatcagagactgtttcatctgctgaagaagatgctttgaagtggaacaccgattgcgtttactttctcgcttctcctttaacctgcaagaagggacctgaatgcgagtatcgccacagtgagtatgcgcgtatgaacccganggattgctattattggttgaatggaaactgtttgatcccaaatgt

SEQ ID NO: 11284 - DNA, 474 bp, Arabidopsis thaliana
  unsure at all n locations
  Clone ID: LIB24-002-Q1-E1-F9
ggtgtctnaatacacgggtccgacccacgcgtccaaanatctctcaataaccatgtgtgctccgcagccctccaacgagtttccgctgatttttcgcaaggatggtaagacatgtgtgttttgggatgtggaggattacccaatnncagctgatctccatcctcgttcgatccggcggagaatcgtaaaggatgtgaagaaatatggttgtgatgcggaggtgtcgattcatgcttatgctaatgataatacggtctcggtaacaatgaggcgtcaattttcggctgctggaatcaaattggaagtgttcacccaagcaggggataaatatgcgaagacattgttccttgtatggtgacattatgctgtggtcactgggaaaatcctccaccatcaaatattattgtcatcgcaaaaataatcgatgacnactttggctgatcgtattggatgtttgactaccgtctgggncaa

SEQ ID NO: 11285 - DNA, 447 bp, Arabidopsis thaliana
  unsure at all n locations
  Clone ID: LIB24-002-Q1-E1-G1
cgggtngcccacgcgtccaggaagagctctttgcttctgaatattattattttcttaaattcttccgttttttttttttaatccaaccacaaggatcgataacgaaatcatcagatcgccagannaanagggnaaaattgcgaaatggagaatctgagctgcagatctgcgtcaatctccatctagatgttgttgctacttcttcctctatagaaccataatttcatcanatctcgctgattaatcatccccatttggatctgatcgaaactcttagggaanaacatggcaggagctgcctccgcgctgtttctgcttgatatcaagggacgcgttctcgtctggcgtgattatcgtggcgatgtctccgctgctcaagccgagcgattcttcantaanctcatcgagaaagagggtgattcacagtcangatgatcaagttgctta

SEQ ID NO: 11286 - DNA, 487 bp, Arabidopsis thaliana
  unsure at all n locations
  Clone ID: LIB24-002-Q1-E1-G10
gccncggtcagacaacccgggtccacccacgcgtccnaacanatacagtttgctcttgagcgtggtgttcctgcaatggtggcagcattcacaacacgggagattgttgtatccaagccaagcttttgatttggtacattgttcaagatgtagaatcaactgggactcgtgatgatgggatcctgctccttgaagttaataggatgcttcgtgccggaggatattttgtttgggcagcacaacctgtatataagcatgaaaaggcttggaagaacagtgggaagagatgctaaacctgaccactangctgtgctgggttcttgtaaagaaggaaggatatatagctatctggcagaagcctgtaaataacacttgttacctaagtcgtggtgctggagtcagtcctcctttgtgcaaattctgaagatgacccagataatgtttggnacntggattttnaaggcatgcatccctaanaatttaagaa

SEQ ID NO: 11287 - DNA, 479 bp, Arabidopsis thaliana
  unsure at all n locations
  Clone ID: LIB24-002-Q1-E1-G2
cccctaggtggtcggtatcagnttacacgcggccgcccacgcgtccaacaagttcttgtaatggaaatctacaccatgaaaacgaattttcttgtactggctttgtctttgtgtatccttctttcaagcttccatgaggtttcttgtcaggatgatggtagtggtttgagtaatttggatctaatagaacgtgattatcaagatagtgtcaatgctcttcaaggcaaggacgatgaanatcagtctgcaaagatacagagtgaaaaccagaataacactacagtgactgataagaacactatttctctatctctatcagatgaatctgaggttggatctgttagtgatgaaagcgttggacgttcgagtctgttggatnaaatcaaacttgaattcgaagctcatcacaatagtattaaccaaactgggatctgatgggtgtcaatggctgaatccangggatgatgatgaaggaatta

SEQ ID NO: 11288 - DNA, 416 bp, Arabidopsis thaliana
  Clone ID: LIB24-002-Q1-E1-G5
cggcgaagagagattctcgggtcacgccttgcactctccatccgcttcccattcatgacatgccgaaagctgaagaaagtgctgacttgcagtgactttgagcatgaaatagcatcaaagcttgttctagaagctcttttcttcaaagcagaagccccacacatacaacgtagcctagcctccgaagaatctgcatccctgaaccgccgcctgatagagagggcttacaaatacagacccgtcaaagtggtcgagtttgagcttcctagaccgcagtgtgtagtctacctagacttgaaaagagaagaatgtgggggactgttcccgtcgggtagagtgtattcgcaggcctttcacttgggaggtcaagggttttttcctgtcagctcactgcaacatggaccaacagagctcgt

SEQ ID NO: 11289 - DNA, 447 bp, Arabidopsis thaliana
  unsure at all n locations
  Clone ID: LIB24-002-Q1-E1-G8
ttcgcnggccgacccacgcgaccanaattttctcttcggtttggtttgttttcacgcatttcctagctcggagtaagctaatcgaagaaaacaagcttgttattgatcgatctttcggtttttgttttgacgttttgtgtgaacgagttacttttggatatgagctctgtctgtggtgggttggatttcaaagatgcagagagcagctctgcttccagtcccattatatgttctactggcgtaaagcatatctcttgtgttggatctgatgatgctcaagagtctgatggtgatgatagtggttatatacaccaaactgtgattgaagaatccaaagacaaggcgatcagcgaacccatccctgagtctttacctctcaattctttggatgatgaaagtgaagataagaaccttgctactgcattgcaagacatgttctccgaaaat

SEQ ID NO: 11290 - DNA, 484 bp, Arabidopsis thaliana
  unsure at all n locations
  Clone ID: LIB24-002-Q1-E1-G9
gccacggtcngcacaacccgngtccgacccacgcgtccaaatngtgagagttcaagtgttccaacgatggcgaaatccccggtagaggtgaaactgatcccgatcgaagctactcctgagaatttcgcagactatggtcaagtcatcgnagcctctcgtgacggtgcaggtttcggtcccaacgacgctcaactggatctctccagaggaatcccacggttctatataatgcggatcagagatacaccctttgacttttccgtactcactcaccacgcgagcgtgacacagtgtctaggatcaataggaggtcatgtttggtaccttggagtggctaaaccgacacttattgaagatggtgatgatggaaaagatggtaagataaattgaaatcaaggtctggtcacttgtacgcctcctcctgcgggttgaagaagattcncgtcntcaagggtccccgggaaccaaantttaattaaactga

SEQ ID NO: 11291 - DNA, 462 bp, Arabidopsis thaliana
  unsure at all n locations
  Clone ID: LIB24-002-Q1-E1-H10
acgcgtccgangttattgttgcatcgatctccaaatccaagattgattcgtcacgaaatctgctcaccggttgtttcgtcgccgtcctctgttcacccaacgaagatgaacggcggtccctccggtttccataatgctccggtaacgaaagccttcgttattacgagcgctcttttcactgtcttcttcgggatccaaggtcgttcttctaagctcggtttgtcttaccaggacatttttgagaaatttcggatatggaagttaatcatgtccacttttgccttctcctccacaccagaaattgatgttcggattgtatttgctatactacttccgagtttttgagagacagattggctcaaataagtactcggtttttaacctggtcccaagggaatggtatccnccaataacccaaggncaatttggtaacacggcttaaagattccacagcaaaacntt

SEQ ID NO: 11292 - DNA, 438 bp, Arabidopsis thaliana
  unsure at all n locations
  Clone ID: LIB24-002-Q1-E1-H11
gnttncctctctctctctatctctacctggctttgtaatttgtttaccgactacaatggtcaaaatttctctactcctataaaaatgggtcgccttgtttttgatcaacggatttgattcatctttctttttacctgtggaggtctttgtcctggccttaataccgtgattagagaaatagtgagcagtctatcttatatgtatggagtgaagagaatactgggaatagatggtggatatagaggcttttatgctaagaatactgtctccttggactctaaagttgtaaatgatatccataagcgtggagggactatccttgggacctcacgaggtggtcacgataccacaaagatagttgacagcattcaagatcgaggaatcaatcaggtttacattatangaggagatggaacacaacgaagagcaactgtcata

SEQ ID NO: 11293 - DNA, 478 bp, Arabidopsis thaliana
  unsure at all n locations
  Clone ID: LIB24-002-Q1-E1-H12
attcgcnggtcgacccacgcgatccnnccanncgnctttggcaattgcnaaattnnagagaactggattngtngcaacctnaaaaacggccaantncaatngtngtggcggatgaaatgagggatgctanctgggttgangaattttctgaatgcctgtctctggccacggtcagatcagcaggctcgttctgcctcagattctggtggccgccaagagggtttgctctggttcagagactccggccagcacgtctttggtgacttctccatggccgtcgttcaagccaacagcttgctagaggaccagagccagctcgagtctggctctcttaactccacgactctgggtccctttggcacctttgttggcgtctacgacgggcacgggtgggcctganacatctcgcntcatcaaatgatnatatgttccaacaacctcaagaaggtttactggcaaaagcaacaatgtntgtcca

SEQ ID NO: 11294 - DNA, 478 bp, Arabidopsis thaliana
  unsure at all n locations
  Clone ID: LIB24-002-Q1-E1-E9
nttctatcgttcgcacggtcttacatcccgggtcnacccacgcgtccnaaaacggcacagcgtttggtcaccggtgacccaaacgacgaagcatgcttgacgaatctccgtcagagtttagaagatccagctaataatctccgtaactggacaaaatccttcttcataaatccttgctccggcttctcttcttatcttcatggagtcatttgcaacaatggcagaatttacaaactctccttaacaaannnnnnnnnnnnnnnnnnnnnnnnnnnnnnnnnnnnnnnnnnnnnnnnnnnnnnnnnnnnnnnnnnnnnntccaaccagatctccggcgagatcccgccgcaattacagtttttcgttaacctagccgttcttaatctctcttctaatcgtctctccggtcaaatctcaccacaaatcgctctctgcgcttacttaaacgtcatcgattttcacgataaacaantctccg

SEQ ID NO: 11295 - DNA, 480 bp, Arabidopsis thaliana
  unsure at all n locations
  Clone ID: LIB24-002-Q1-E1-D12
ncgcggtccaccacaatccggggncngacccacgcgtccnaatnatccctctgctgagtatctccagtttgtggacatnggcnatttcccggtnganggggtcancaccgatttccngcnaaaagcatcacaatcaatcacttgcttttctcaccaaaacggcaatctccccaaagcagggcatgcattggttataactcacaatggagcaagcggagactatccaggctgcactgatctggcttaccagaaagcaatcgacgatggagcagacataattgactgctctgttcagatgtccaaagacggaatcgctttctgccatgatgctgcagacctctcagcaagtaccaccgccaggactactttcatgtcccgagccaccagcgttcctgagattcagcctaccaacggnatcntctcttttgatcttacatgggccgagattcaatctgtgaaaccacaaatttgnaaaacccc

SEQ ID NO: 11296 - DNA, 447 bp, Arabidopsis thaliana
  unsure at all n locations
  Clone ID: LIB24-002-Q1-E1-D2
ggncgacccacgcgtccagttaaaaaaccaatggcgctagttgtgatttgtgggcaaccttgtagtggtaagtcaatagctgcagtaactttagctgaaacattgaaagagtctgaaacgaaacagagtgttaggatcatcgatgaggcttcgtttcatctagaccgcaaccaaaactatgctaacatgcctgctgagaagaatctgagaggaaagcttaggtcagatgttgatagatcagtttcgacaggcgagattgttattgtagattccttgaatagtatcaaaggttacagatatgagctatggtgtatcgctcgtgctgctgggattaggtattgtgttgtttattgtgatgtanatgaagctcattgtangcaatgggaatnaaggaacggatgatagangtgaagatggatatgacgatgggatattccgaagatctgg

SEQ ID NO: 11297 - DNA, 462 bp, Arabidopsis thaliana
  unsure at all n locations
  Clone ID: LIB24-002-Q1-E1-D3
gtcagnatatcacgggccgacccacgcgtccaaacacgcgtccgcagtttcgtttatggaattcctgaacacgccactagcttcgcgttgaagcctaccaagggtcctggagttgaggaatctgaaccctacaggctttttantctagatgtgtttgaatacgatcatgaatcaccgtttgggctttacgggtcgattccgttcatggtttcgcatgggaagtctggtaaaacttcaggatttttctggttgaatgctgcggaaatgcagattgatgtgttggctaatggttgggatgcagagagtggtatttctttgccttctagtcacagtangatcgacacattctggatgagcgaggcanggattgtggatacattctttttcgttgggcctganccaaaggatgttgtaaagcagtatgcaagtgtgacangtacttcagccatgcctcaatttgtt

SEQ ID NO: 11298 - DNA, 417 bp, Arabidopsis thaliana
  unsure at all n locations
  Clone ID: LIB24-002-Q1-E1-D7
tatagttatttggcaatggtggattatccgtatcctgctgacttcatgatgcctttgcctggacatcccattagagaggtatatttgggaagtaacactttatgagtttatacgaatattgtagaagaaatctgagaatgcattcgctagatcatttggattttcatctttacatcaacgatccggggaggctatgctttaaagatttgcttgttgcgtcaggctattgttcaaccacgtccgttaaagtctttgttcaatgtggtgtatctttctataggtctgcagaaaaattgacggtgctggtagtaatgctancatcctanatngcatatatgcaaggataaagtgtgtactacaactatactggaaatgttgactgcttcaaatttgatgaataaccccaatggtttggtn

SEQ ID NO: 11299 - DNA, 442 bp, Arabidopsis thaliana
  unsure at all n locations
  Clone ID: LIB24-002-Q1-E1-D8
ggncgacccacgcgtccaattttcttcgcacaagaatcctgtttcacgacctcaagtttctgcgcctccaggattttctgctcccaacaggctacctcctcctggcttctcgtcacatgaaagagtgggcctatcatcagatactacactaggaaatcgatttcttgactctacttcattgaggaatgcatatcaagtaccacctccagttggtaattcaaatggtgcaagtgatatcgactttgtggatcctgcaattctagctgttggaagagggatggtaaatgctgacttggacatgagatcaggattctcatcacaactgaattcttttgaaaacgaaacaggactccatatgttgagacagcagtctctgtcttctgcacaacaagttaatgggtttcatcatgatctcagaaacttatctccttcacttaacgac

SEQ ID NO: 11300 - DNA, 476 bp, Arabidopsis thaliana
  unsure at all n locations
  Clone ID: LIB24-002-Q1-E1-D9
tacnccacggtccagtacatacacggggccacccacgcgtccgaattancgttgcttgctatctttcgccgtcgtctctttagcttcttgcgaagatggttcttcaaaacgatatcgatctgcttaacccacctgctgagcttgagaagaggangcacaagctcaagcgtcttgtccagtctcccaattccttcttcatggtaatcaaaattttaaagctttctccttctcttgaaccctttagcaaataagtctctgtgattagaactgtatgttaatttggagtttaatgattttctcataatccctagctttgacagtgtgttatgtgatggcgatttttggatgtaagtttgagaatctatgtaactagtttcgagtttgtgaattgtatgtatgttttgagtttgtgaatttgatttgtatctgattctcatttactcctttaaggaccctgatggtgttcctttcctgga

SEQ ID NO: 11301 - DNA, 454 bp, Arabidopsis thaliana
  unsure at all n locations
  Clone ID: LIB24-002-Q1-E1-E1
atcccgggncgacccacgcgtccnaagngatactgtgagagaatctctgtgtggttctgaattcttaggctggaattgaattctgaaatggcggaggagtacaaggaagcgttgttggagaagcagaactatcacgacggatgtcccggctgtaaggtggagcagatgaagcagctccggcgaggatatccttacctcgagctttccttcgtttggattatcgtcctctccacttctctaccaatttcctcactctatcccttcctctactatatgattgaggattttggtgtcgcaaagacggagaaagatattgggttttatgctggttttgttggttgctcttttaagcttggaagagcactgacttctgtgttctggggaatgtggctgatcgttatgggaagaaaaccattatactcctgggaactatcctcaantgcaattttcaacg

SEQ ID NO: 11302 - DNA, 473 bp, Arabidopsis thaliana
  unsure at all n locations
  Clone ID: LIB24-002-Q1-E1-E10
gccacggtcatacaacccgggtcnacccacgcgtccnaacangcgtccggcgacagagaagaagctgcgaactttaaatgtcacaggctgtaattttcaagccgtttgtttcagttccatcaagtaatcacagccagaggaaactacagaacaatattatcaatgttggtgttaaaatccaaaaccgattcagagttgtttgtatgggaatgttggctccaaggaaattcctgcaaaagaggaggaaaatggaggttttcaaggatgcagctgacgagacggatcagaagagatggagagggcttatgctagagattgaatcgacgggttctgctgttccggtgcttaggcaatacaaaactgacggtgaccaaggtcttccaagggatcttgttttgggtactttgggttagatttaagcagcttaagaaatggaaccttgtcaatgagattcctgaatggcttaaatancc

SEQ ID NO: 11303 - DNA, 448 bp, Arabidopsis thaliana
  unsure at all n locations
  Clone ID: LIB24-002-Q1-E1-E2
ggggnccccaaggcttcgaaaaaaanccctacttcaacccngcgattcattcatcattcacagagtttgaagaaaacgccgaaatcggaaatggcgtctattgttcttcgatctcgcctgttgccaagattagcaaagctcagatctcgtaatctgagatgtttctctgcggaagcatcttcgacgaattctacatctaggtattcgggagtcacctctacccagtcgatgttttctgattttccaccgccaaatcagccgccacctcctcctcctcctcaagtggaagctgctgccgcggctgcgacgggaaaggagaggaaaggtcttaagtatcttgggtacgcactcctctgggcactcactgggtgctaacgctgctactggttacgcaaagttttgcntacacgatagatgaaantgaatgaaaagactaaaggngtttcga

SEQ ID NO: 11304 - DNA, 384 bp, Arabidopsis thaliana
  unsure at all n locations
  Clone ID: LIB24-002-Q1-E1-E4
gtgcccccatcatactactcaggctctttgttttgctgcgacctacttatggcctctataagggaactttatgagaaggtttgtgctttgacaggggtaccacaagaaaaggctcatatctgggattacttcgataagaggaaaaacggactcttggattctttatcttacaagagcctggaagagtcaagccttcatatggaccaagatattctacttgaagttgatgggtcgtcttcctctcagtctgctatgagctcgacaggaaatgagttagctctggtacctctggaaccttccaggtcgagtgttacaattgctggggggcctaccctatcaaatgttcnattcnactacttcaaantttaatccctttccganaat

SEQ ID NO: 11305 - DNA, 458 bp, Arabidopsis thaliana
  unsure at all n locations
  Clone ID: LIB24-002-Q1-E1-E5
gtgaattcgggggtcgacccacgcgnccantnnnnnnnnnnnnnnnnnnnnnnnnnnnnnnnnnnnnnnnnnnnnnnnnnnnnnnnnnnnnnnnnnnnnttatccttatccgataaacccacaaataaagacagactcttttgttctttaaacagagattgtaaatccagagccgccggaaaatacaaccgccggtttactctcaggattagttgatattattcgattttaaaaatcagtaggaagaagatgaagtacgtgcttgtaacaggaggtgttgtgagtggattagggaaaggagtaacagcaagtagtattggtgttctccttaaagcttgtggtcttcgagttacttctatcaaaatcgatccttatctgaacactgatgctggaactatgtctccatttgaacacggtgaagtttttgtcctgggacgatggtggtgaagtggatcttg

SEQ ID NO: 11306 - DNA, 429 bp, Arabidopsis thaliana
  unsure at all n locations
  Clone ID: LIB24-002-Q1-E1-E6
anggacgcgtgggcggacgcgtgggcggacgcgtgggtgcgtacatcgagaagttgaatgatgtcaaaaagctcatcgatcctattgaaaaccggttcaaagatggagaagagcgagttcaagcatcaaaagatcttctgaaaactattgcagataaccgaatggctgcagagtctcttcctcctccaagaaagaatgcggttctcgatgaatgccataaagctgagaggtggctccacgagaaaaccacagaacaggaatctttacccaaagacgctaatccagagctgcaatctgctgaaatcaggagaaaagctgatgctctaaacgcgacatgcaagtacattgggaaatcaaactctccccccgcgaaaccggaacataacggatcatacggaagtagaaaatcagatgatatggaacttgatt

SEQ ID NO: 11307 - DNA, 417 bp, Arabidopsis thaliana
  Clone ID: LIB24-002-Q1-E1-E7
cggtctccctctcttaaactctctctttctctttctcttttggtttctgggttatttcaaagaaaagaatcaagaaacccctctttctctcttacaagaatcccatcatggtgtttggaaaagggtcaaaccttgacagattccttcattgcacaacacctgtagtgccaccccaatctctatccaaggcggagattaggagtttgaataggatttggcatccatgggagagacaaaaggttgagtttttcagattgagtgatctatgggattgttatgatgaatggagtgcttatggagctggtgttccaattcgtctctctaatggagaatctcttgttcaatattatgttccctatctctctgctattcaagattttcacctctcgttcttccttgatccgctaagggatgatt

SEQ ID NO: 11308 - DNA, 467 bp, Arabidopsis thaliana
  unsure at all n locations
  Clone ID: LIB24-002-Q1-E1-E8
ggtaccganctggaattcgngggccgacccacgcgtccaaaaaaaagtataaacaaaattcaaaactattcagtattgatatttgtttacattgaaaaaaaaattaacttaaaaaatatagtttacacaaaaaaagaaaaaccaaannnnaaattgttagagattttttcagagtagtgagaggaaaatggcgcagatgcagcgagaagaagtagagtccgtcacgacggagaagaaaagattagacggaggcggtggatcttccggcgctcaggcaacggcgttcaaattcaacgctcaagcgccggaatttgtaccgcgatcacataccaccgcaccagcaccgcaggtttctcctgtctccggttacttttatccttgttttcattacaacggtggttgcataggangatgtggcggcggagtctgcggtggtgganggaccggcgttggtactcagtctcgga

SEQ ID NO: 11309 - DNA, 470 bp, Arabidopsis thaliana
  unsure at all n locations
  Clone ID: LIB24-002-Q1-E1-D10
gccacggtcnccacaatcccgggtcnacccacgcgtccnaacangcgtccgattgacattgttatcgagggaacaggagtgtttgttgatgggccaggagcagggaagcatatccaagccggagcctcgaaagttatcatcactgcaccagccaaaggtgctgatatccctacctatgttatgggagtcaatgagcaagactatggtcacgatgtcgctaacattattagcaatgcatcttgcaccaccaactgtttggcaccttttgctaaagtcttggatgaagaatttggaattgtcaaggggacaatgacaaccacacactcctacaccggagaccaaaggcttctagatgcatcacacagggacctaaggcgtgcaagagccgcagcactgaacatagtgcctaccaacacangagcaaccaaggcggtgtcattaatgttgccgcaactnaaagggttaacctt

SEQ ID NO: 11310 - DNA, 465 bp, Arabidopsis thaliana
  unsure at all n locations
  Clone ID: LIB24-002-Q1-E1-A9
cgggtccanaattcccgggncnacccacgcgtccnattcgggaccataccgtaaagggagaagctgggtgggaacgtgggatctctgtgcaaagctacaatggagatctattgtatgaaccgtgggagatatactgcgaaaagggcaaaccttttacgagtttcaattcttactggaagaaatgcttagatatgtcgattgaatccgttatgcttcctcctccttggcggttgatgccaataactgcagcggctgaagcgatttgggcgtgttcgattgaagaactagggctggagaatgaggccgagaaaccgagcaatgcgttgtttaactagagcttggtctccaggatggagcaatgctgataagttactaaatgagttcatcgagaagcagtttgatagattatgcaaaagaacagcaagaaaagttgttnggaaatccaacttcactacnttcccccgt

SEQ ID NO: 11311 - DNA, 424 bp, Arabidopsis thaliana
  Clone ID: LIB24-002-Q1-E1-B1
ggaggagtcataaaccacctgaatctccctccgctgtgtctcagaagcctgtgatggcaccaccggttcttcctccgccgcagcagtttaaatcggtggcttcttctgaccaggacggctcagttttggggttctttaaaaacgccgtcacaaaggttcaaaatgcacattcaagtgtggatgatcatttggtgaggtggtttgggttaaaccaatctaagtatcagtgggctttggatgagtactacgaaagcaaagaatcagatatgaagaccgtgaaagcaaaggagatgccggggaaagtacagagtgtataagcaaccatgtataaactcatttcccctttggccaattctaaaatctgtttttctgagagagttcaaaaaagcttgagtcctgaggaaagttctcttcaaatgatatt

SEQ ID NO: 11312 - DNA, 396 bp, Arabidopsis thaliana
  unsure at all n locations
  Clone ID: LIB24-002-Q1-E1-B10
tcctgtgtttgaaacaatgggtgttgaagttgtnaactctggtggatttgaggttgctccggctcctttcgaggggaaacctganaagaacgggaagctggagcaaggaaaaggagatgatgcccccatcaattttggttcagtcggtgagctaccanagaatgccgaagagaataataacaaantggtcaactctgatgcacccaaaaatgcagcagaagagtggcctgtggctaancagatccactctttctaccttgttaaataccgttcttacgctgaccccaaaattaaagctaagcttgatctagctgataaagagcttgaaaagttgaacaaagctcggactggagttttggacaagttgagaactaanaaggccgagagatnagagtt

SEQ ID NO: 11313 - DNA, 434 bp, Arabidopsis thaliana
  unsure at all n locations
  Clone ID: LIB24-002-Q1-E1-B11
ccacgcgtccgatggaatctggaagtatgaaaacacctctggtgaataatcaagaagaagcaagaagctcttcttccatcacttgtggtcttcttcttagtacctccgtcgctgtcactggctctttcgtttatggctgcgctatgtcatattcatcgcctgctcagtccaaaatcatggaagaactgggactttccgttgcagattattcgtttttcacatcggtaatgacattgggaggaatgattacggccgcgtttagtggaaaaattgctgcagttattggtcgtcgacagacaatgtggatcgcggatgttttctgcatctttggttggctcgctgtagcctttgcacatgataaaatgctgttaaatattggtcgaggcttcttggggtttggggttggtctcaataattaagtgggtcctgtanat

SEQ ID NO: 11314 - DNA, 444 bp, Arabidopsis thaliana
  unsure at all n locations
  Clone ID: LIB24-002-Q1-E1-B12
ganangaaagccaaagagagagagagagaaacaaaaatggcgtcacagagttgctacaatggaatccatcgtataaaaagggttcatcctctgattcactctctcacatttcatcgattctcctcatcttctcttccattcaaatctcacattccctcttcacaacaacagcttcgtattcgctcatcttcttcgctttctgatcttggaaatcgcaggcattgttcgtctactcgaggatttcaattttggtcatnnnnnnnnnnnnnnnnnnnnnnnnnnnnnnnnnnnnnnnnnnnnnnnnnnnnnnnnnnnnnnnnnnnnnnnnnnnnaccggcggttcgtatttccgacgggaatctaatcatcaaaaaccggacgattctaaccggtgtaccaagataatgtcatcacgangtnagcatccggaactggggccgggta

SEQ ID NO: 11315 - DNA, 469 bp, Arabidopsis thaliana
  unsure at all n locations
  Clone ID: LIB24-002-Q1-E1-B4
ccggtccagnaaatcccgggncgacccacgcgtccgagaaactttgattacgaaagctacaccaattttacaaaattgccatcctcccaatggggtgatcagttcctcaagttttccattgctgattcggattttgatgtccttgaaagagagattgaagtactaaagcctaaagtaagagagaacatattcgtgtcgtcttccacagacaaagacgcgatgaaaaagacaattctttctattcattttctggacagtcttggtctctcttatcattttgagaaggaaatcgaagagagcctaaaacatgctttcgagaagatagaagatttgatcgctgatgaaaataaattgcacacaatctccaccatcttccgagttttcaaggacatacggttactacatgtcctccggatgttttcaaagatattcaaaggagacgatgggtaaattcaagggaagttaatag

SEQ ID NO: 11316 - DNA, 463 bp, Arabidopsis thaliana
  unsure at all n locations
  Clone ID: LIB24-002-Q1-E1-B8
tcngtaccgatattacattcgncggccgacccacgcgaaacaagatcgtgttacgtctctctctctctcagtctctcatcaccgacgaagatcacggctcttttctctgtttaatcggcggaatctctcttcntattttatttttcttngggtagatcgatccagctccgngatcantcatgantcctgaatatgactanttgttcaagcttttgctcattggtgattctggtgttggaaagtcgtgcttgcttctaaggtttgctgatgattcctanntggatagctacatcagnaccattggtgtcgactttaanatccgaanagtcgaccatnatggnaagacnancaanctccagatttgggatacggcangccaaggacgtttcagaacgantactagcagttnctacagaggagtcatggattattggngnctatgatgtatagattctagaaagct

SEQ ID NO: 11317 - DNA, 478 bp, Arabidopsis thaliana
  unsure at all n locations
  Clone ID: LIB24-002-Q1-E1-C10
gccacggtcacaaatcccgggtcnacccacgcgtccnaacangcgtccggaaaattgcaggtacttcatcttatgattgcttcttcaaacactggttctgttatttatttcgtggctgcggttatagcgacttgcacaaggtggcatcattggtccaacgcattaggttttctactcatggcctttcccaaaattctgtttctggcaacttttctcctgcttctctctttctggtatgtatattctcaatactctgatcatattgtgttgtccctgattattttatcttaataatgatctgagataagacannnnnnnnnnnnnnnnnnnnnnnnnnnnnnnnnnnnnnnnnnnnnnnnnnnnnnnnnnnnnnnnnnnnnnnnnnnnnnnnagcatccaacaagtgttgcttgaaaaaagcaagagcaagccaagttcttcgaatgcaagtgatcnttaaaagtgtttgccccttcca

SEQ ID NO: 11318 - DNA, 477 bp, Arabidopsis thaliana
  unsure at all n locations
  Clone ID: LIB24-002-Q1-E1-C12
agnacgccacggtcagacaacccgggnccgacccacgcgtccnaacangcgtccgtaggattctgattccgagtctctagttccaaagagaagagaacatctgtgagagatctgagacgtctggaaatgtgaagaaaacaaaaaaaaaaaagatctgagagagagagtttcgaaattctcgtgttcgtaagcaaaaatggtttgggagaaagagaagatcgtcggaagttgtatagtcggaggagctgcgttcgccgtcggagcttctttccttcatcttttccttaaaggtgagcttccgttaggattaggtttaggtttgtcttgtccatggcgcattttgagaaaacgaaaacctgttcgcgtttacatggatggttgcttcgatatgatgcactatggccactgcaacgctcttcgtcaagctcgtgctctcggtgaccaattggtcntccgtgttgtttccgacgaagaaan

SEQ ID NO: 11319 - DNA, 443 bp, Arabidopsis thaliana
  unsure at all n locations
  Clone ID: LIB24-002-Q1-E1-C3
acccacgcgtccnaaaaaaagcaaatttttttgtaacgatgcctatcaacagaattgcgattggaacgccgggggaagctagtcgtcccgatgcgattagagcagctttcgcggagtttttctcgatggttatattcgttttcgcgggtcaaggctctggaatggcttatggaaaactaactggagatggtccagccacacctgccggtcttgtggccgcgtctttgtctcatgcgtttgcgttgttcgttgcggtttccgttggagctaacgtttcaggtggtcatgtgaacccggcggttacatttggggcttttattggtggaaacataacgttgttgagagctattctttattggatcgctcaattactcggagcagtcgtagcttgcttgttgctcaaggtaancactgggcgggatggnaacgggtgcgttttcgct

SEQ ID NO: 11320 - DNA, 458 bp, Arabidopsis thaliana
  unsure at all n locations
  Clone ID: LIB24-002-Q1-E1-C7
ttnaattcgccggccgacccacgcgnccanaacgatactatccatccccaatgatagtaacaccaacaatgtcaaatgctcaggctgtggaacggagatggtctatgactcaggttctcgtttgatcacattaccagaaggagggaaagcttaaatctaagagccaagggttatgtanaagtgtatgtaaaattaatactaacaaatgaagaaggtggagaaattgaagaagaaggagaaaaaccaaagtttgtatgctgttttgtataatcttcagatcttttcatgtagctctcattggcttgtgttgtgtttgtaagtaagtgtgaggcacattcaaagaaaaacatcatatgattacttctttgagaaactttgctctcattaggaaagtaaaataattcaagaantaagcacaancttgtgtagttttgaaataatacntgtattttttttgt

SEQ ID NO: 11321 - DNA, 475 bp, Arabidopsis thaliana
  unsure at all n locations
  Clone ID: LIB24-002-Q1-E1-C8
ttctagcngtcggtaccgaacatnaattcgcgggccgacccacgcgnccaaatttatcttgggtcaatgataatagtggacgacgagtcggtgtcttagggtttactttttgtaaagaaaattttcttgttgaattattggctttttgtgaattcgattttctcttatttatataaaacattattgaatttcaacgctattttgaaaattttatttttaatattcatgttgtattagaatctggaatgtcagaagaacgtgtgcaggaacaagaacttggggttggtgtaatagtttaaataaattcttacaaagaataaaaaaaaaatcaggttctctgcaccaaatttttaaaatcattatttaacatattttgctaaattctctaaaaacaaatttgataatgatgaaaattttgattaagttctgtgttgtgtttggtgattgcttgaattaagtctgattgaattttaag

SEQ ID NO: 11322 - DNA, 483 bp, Arabidopsis thaliana
  unsure at all n locations
  Clone ID: LIB24-002-Q1-E1-C9
gggtggagctcntccgttcgntccggtcctctgcataccgggccacccacgcgtccnangacgcgtggggactagttctagatcgcgagcggccgcccnnnnnnnnnnnnnnnnnnnnnnngaacaccaataaggcaagaactagcgaatctatcagatccaaccagagttcctgtcctaaaacacattgttcatcattacaaatacgagccaaaagaacagagagtttaatactcaaaaagactgaaaccaaccagggactctattacagacacatgaacctcttcatatttcatccattactatccaaattttttagtacatgaaaacatagagatgattacaccaacaaactctagagaacctgtccgagatttctacaattccaatctaataatgattcccgacaaaaggaatcgaacacaaatcagttctgtctataggcaatgttattagccaaagccaacaaaggngcaacctttc

SEQ ID NO: 11323 - DNA, 456 bp, Arabidopsis thaliana
  unsure at all n locations
  Clone ID: LIB24-002-Q1-E1-D1
atcncgggcccacgtgggcagtgaataaaacttcgtctccgtgtctgttcaagctcccattcttgtggccttcacgcttcaggaacaaagaccagtatctctctgaaagactacttctcggaaattttcgtctccatggcacccgtgagggggattcttggcttgcaaagggcagtgtccatttggaaggaaagtaacagactgactccagctttgagatcattcagcactcaagctgcatccacttccaccactccacagcctcctccanctcctccgcctccgttagccangtgagaatccttaagcgcggcgaagaaatccccaaggagacttcanatctgggtgtggaaangtcatatntgggatatacncctcngatttttgnanatttnggnttttcccgggcaaattcgtttatcagggcgcaaatcnaaatcaacaacgtttttttcc

SEQ ID NO: 11324 - DNA, 428 bp, Arabidopsis thaliana
  unsure at all n locations
  Clone ID: LIB24-002-Q1-E1-A7
gacggagttctacctgagatactatgtcggtcacaaagggaaatttggacacgagttcctggagttcgagtttagagaggacggtaagctccgttacgccaataactctaactacaagaacgatactattatccgcaaggaggtatttctcacccccgccgtgctcaaggaatgcaagcgtatcgtctccgagagcgagattctgaaagaagacgataacaattggccggaacctgaccgtgttggaaagcaagagctcgagatcgtcttgggtaatgagcatatctcattcgctacatctaagattggatctcttgttgattgccagagcagtaatgatcctgaaggacttcgcatcttctactatcttgttcaggacttgaaatgtcntgtttttcgctcatctctctgcacttcaaaatcaancc

SEQ ID NO: 11325 - DNA, 462 bp, Arabidopsis thaliana
  unsure at all n locations
  Clone ID: LIB24-001-Q1-E1-B2
gcncgcgtccgaaaacattgagatcttcacccttatcanttgatccaaccatggctcggctccttctcctctgtcttcttgcntccttagtctagtccgattacgcttcttgttccaganacgaanatgngaacagaccgaatctttcaacttcccggtgnnncaaannatgtctccttctctcacttctctggttanattacggtcaacgagtcagcaggaagagcactattctactgggtcactgagtcaccaccgagtgaaaaccctgagtctaaagcctcttgtcctctggctcaacggtggacctgggttgttcctccgtngcttacggtgccgctgaagaaatcggaccttttngaatcagntcctgatggggaaaactctttaacaanaancnttactcttgggacaaattggngaatttgctcttccntgaatctnctgctggtgttgggtttc

SEQ ID NO: 11326 - DNA, 462 bp, Arabidopsis thaliana
  unsure at all n locations
  Clone ID: LIB24-001-Q1-E1-B3
acggggccgccacgcgtccgcantgaagaaggagcgaattgctcttcggcagtggaaagaagcgtaagccctctcacaaattgcagcacattgtcttctaatccttcttctgttgaagctgagtccaacancgattacattgtcccaaagaagccatcttcaaagaacgangacaacaattctccttcagtcgatgaaagtgctgcgaaaaggatgaagaggacaaccgactcagacattgtncagattgagaaggacgttgagcanattgtgttgttggatgatgaanaacangaagctgttctggataagacggaatctgaaactccagtcgtggttactacgaaaagtcctgttggtaatcgaaacagttcanatgcgagtttgccaattactcccttcaggtcagatgaaatcaagaancgtcaagctagaatcgaantatcgatgaaagacaactgg

SEQ ID NO: 11327 - DNA, 492 bp, Arabidopsis thaliana
  unsure at all n locations
  Clone ID: LIB24-001-Q1-E1-B4
aactgtccatcctgnacgcaccggtccgncnattcccgggnccacccacgcgtccgcacgtctctctctatctccttagattttcaaagttttcaacattcaacaaaatcattattttaattttgcagagacgaatcgaatcgatctcatctccaaaaatcttgtattcaaagtttgattttctgggtttcttctgtattatctcgatatttgaaaaaaatggcgaaggaaattgaatcagcgacagatttaggtgatactaacatcaaaggagttcttgttcatggaggaagatattttcaatacaatgtttatggaaacttgtttgaagtttctaataagtatgttcctcctattcgacctattggtagaggagcttacggttttgtctgtgctgcagtagattcggagacacacgaagagattgcgataaagaagataggtaaagcctttgataataaagtagatgcaaagagaacattgagagagatt

SEQ ID NO: 11328 - DNA, 485 bp, Arabidopsis thaliana
  unsure at all n locations
  Clone ID: LIB24-001-Q1-E1-B5
aangtctttctgcccgcccggtccnnnagacaattcccggntccacccacgcgtcaagcacacgcgtccggaaaaatattgcggggattacaaaaatcattatcaagattctaggtagtaatccgagtcccggtggctcttacgtgatttttaataactatgactggtggaaagatatgacaatgctcgactttctgaacaaagtcggtaggtttgctagggttggtactatgatggcaaaggagagtgtgaagaanagattataatcagagcaaggtatgagctacaccgagttcacttatcagttgttgcaagcctatgattttcttcacctgttcaagaacgaanggatcaatgttcagataggtggcagtgatnaatgggggaatataacagctggaactgatttgatcaggaagattctccaancanaagaagcggcttacgggctaacatttcctcncctactgaaaaacgatggnacg

SEQ ID NO: 11329 - DNA, 481 bp, Arabidopsis thaliana
  unsure at all n locations
  Clone ID: LIB24-001-Q1-E1-B7
ntgccgctcgtaccggaacacaatcccgggtccacccacgcgtcaggaagcaaataaattatcgaagcccactggtttcggagctgatcggtctctatttctctcttcatacatatctcaagcagataaagttgatcggatactagaatgggaggaggatttagagttttgcatttggtgaggccattcttggcttttctgcctgaggttcagagtgctgataggaaggttccattcagagagaaggttatctacactgtcatctctctcttcatctttcttgtctgcagtcagcttcctctttatggaatccattccaccaccggtgcggatccattctattggatgcgtgtcattcttgcgtccaaccgtggaactgtcatggagctcggtattactcctattgttacatctggacttgtgatgcaactcttggctggttccaagattattgaggttgacaacaatgttcgtgaggatc

SEQ ID NO: 11330 - DNA, 460 bp, Arabidopsis thaliana
  unsure at all n locations
  Clone ID: LIB24-001-Q1-E1-B8
cccgggnccacccacgcgtcngcacattatgactaccgaagagaaagagatcctcgccgccaaattggaagaacagaagatcgatctcgataagcccgaagttgaggacgatgatgataacgaagacgatgactctgatgacgatgataaggatgatgacgaggctgatggactagatggagaggcaggaggtaagtcaaaacaaagcagaagtgagaagaagagtcgcaaagccatgctcaagcttggcatgaaacccatcactggtgttagccgagtcaccgtcaaaaagagcaagaatatcttgtttgtcatatcaaagcctgatgtgttcaagagtccagcatcagacacatatgtgatctttggagaggcgaagatcgaggatttgagctctcagattcagtcgcaagcagcaagagcaattcaaggcaccaagatctcagcaatgtgatttcaa

SEQ ID NO: 11331 - DNA, 477 bp, Arabidopsis thaliana
  unsure at all n locations
  Clone ID: LIB24-001-Q1-E1-B9
gtaccggnccacaattcccgggnccacccacgcgtccgtattttttcgatcttgtctgtggcaaaaagatgaatttcattggtgattctgtagccagaaaccacatggagtctcttctctgcctcctgtcaatggaagaaactccgaaagatatctacctcatggcaaagtttctagtggccggactcgaaaggactcatgctaagaagaccggaacaggaatctatgatctcgacattgacaagcgagcaatgggcaattgatctgctaaatacagacattgccattgccattggaaatcttaacatctcagatagaacagcttgaagatatttaaacgtgacagcttaaaaaagaagaagtttgaggttttggatgtgactanggttatgctaatgagaccaagacgggcacccgaattcttactggggaaataaatggatgaagggtttcaatgactgtactcactgggtgcnt

SEQ ID NO: 11332 - DNA, 478 bp, Arabidopsis thaliana
  unsure at all n locations
  Clone ID: LIB24-001-Q1-E1-C1
ncgccacggtccacaaacccgggnccacccacgcgtccggagttttcttcttccttcttcttcatcctctttgctgctatgattgagctccatggatctgcaatcatagttcttcgatttaggattcgtttagatcgcggtttttgagctcggttggtgaagacatatgcttgaaaacagaagtcttgtactgaagcatggctcttcggctaccagcttctaaagcagctgaagttgcgattggatctattggctgtggttatgatctagctattgatttacggttgaagtattgcaaaggaggttccaaagattctaagattacttgacattaaagaaggtgatgataattgtgaaaatgttttaactggtggaatctccantcctaatgtttccaaagtctatcaaatgcgataaaagggaacntatgccgtttaagtccgataatcctcccttccaaaaaatgggaaaacaattc

SEQ ID NO: 11333 - DNA, 158 bp, Arabidopsis thaliana
  unsure at all n locations
  Clone ID: LIB24-001-Q1-E1-C11
ttgtcttgccgnacgtaccggacctccattcccggggccacccacgcgtccgcaaaagtccatgagataatactaaggagtttctggcattgtgtaatatataattgactgattttgatgatcaggttcnnnnnnnnnnnnnnnnnnnnnnnngggcg

SEQ ID NO: 11334 - DNA, 452 bp, Arabidopsis thaliana
  unsure at all n locations
  Clone ID: LIB24-001-Q1-E1-C2
nccacgcgtccgaaagaaacaaacccactccattaaaaaccaaagctttaagcttagattcaatcccaagtcagtaaaaatagggttaatcgaagaaccccaccggaattccactgaggaattgcatcagtcgcgttcttgttgcggcttgaggaagaaaaagaacacctacactaaccaaaacaagaacaaggacgaattgaaaccgaagatgacaacaacgaatgaagctactacacagcctcctcagcagatgatgagcttgagttttagtagtcagatgtctaaagaagacgaagagatggctcgttctgctctctctgcttttagggctaaagaagatgagattgagaagaggaaaatggaagttcgtgaaagggttaaggctcagcttgggtcgtgttgaggaagagactcgtcgtcttgctagtatccgcgaggagcttgagaca

SEQ ID NO: 11335 - DNA, 468 bp, Arabidopsis thaliana
  unsure at all n locations
  Clone ID: LIB24-001-Q1-E1-C3
cgggnccccccacgcgtccggaaaattaagattcccaangaaaacntggttggggtgtgttttgtaccccatgatcttactggccagaagactgtgatgggacaagtttacgccggatttgaagggtgattacaaggcaatcatccaaaatccaaacccgctgatcccgccaatatttggtaccgatgagtttggatggtgcacagagtggaatccagcaatgtcaaagttaaccggtttgaagcgagaggaagtgattgacaaaatgctcttaggagaagtatttgggacgcagaagtcatgttgtcgtctaaagaatcaaagaagcctttgtaaaccttgggattgtgctgaacaatgctgtgaccaatcaagattcaagagaaagtatcgtttgcnttccttacaanaagtggcaaattatgttggaantgtctgttgtgtgtgaataagaaactggacaaggaa

SEQ ID NO: 11336 - DNA, 496 bp, Arabidopsis thaliana
  unsure at all n locations
  Clone ID: LIB24-001-Q1-E1-C5
ctgtctttntgcccgcccgtaccgganacacaattcccgggnccacccacgcgtcagcaagatttttctgatcgatggcggttcccacactctgtatcgccgatggaatctaccccactgcttttttctaccggaattcagtccgacgactgacctccgtcgcgcatgatcggtttacgaacccgaaattcggaatcgatggacgtctacggaacggaccgaaggtgacggcaacggtgaatccatatacgtacacggaggcggcgcagcccgaagagcggaagagtttgacggattttttggtggaagctagagatttcgttagatctgacggcggagatggtggtccacctcggtggttctctcccttgggaatgtggcgcacgcgctccagaatctcctcttcttctctacttacctgggatcgatggtactgggattaaggctcattcgccaacataaagaagcttggagaaatctgtgaagctcaattgag

SEQ ID NO: 11337 - DNA, 465 bp, Arabidopsis thaliana
  unsure at all n locations
  Clone ID: LIB24-001-Q1-E1-D1
gtccanaaaccggggccacccacgcgtccgcancnggctcctttagcagaattgtccggtgtcgccgtcctccatcggttggttcctctaccaacggtggttggctcttgtctagcttctccgtcgtccgtctccggcggtttaggctagcttttggccggatttctttttcggttttgttttatgttctcgttttctatagatccagtttgattttgctcctttgtgttctaactcttagagggctcaattccttgaacctcctttgtttaaagggctcaatttgtttttcaagcttatcgatttcaattatataagaacaaattagagttgtggattggggttttctctaatgcctttgagttgggttttaagcaattgagtcaattgtcatattggtttttggaaacnagtgtttttaatttactttangtgttcaatgggaagttcaatgggctaaagttc

SEQ ID NO: 11338 - DNA, 479 bp, Arabidopsis thaliana
  unsure at all n locations
  Clone ID: LIB24-001-Q1-E1-B1
ccgcggtccanataccgggnccacccacgcgtccgcanacacgtccgggaaaagcttcaaacgatgtttacttgctggagaagatctggaaaattttagcggagattgaagatcttcatatgttgatggatccggaagattttttgaaattgaagaaacagttacagatcaaatcgacgggtaaaaacgatgcgttttgtttcagatctaaaggattagtggagatgatgaagatgtcgaaagatctgagacagaaagtaccggcggtcttggcggttgaggtagatccaaccggaggaccaagattacaagaggcggcgatgaagctttacgcgaggaagacagagtgcgataagattcatttgcttcaagggatgcaaacngtggaagcngcggcgaaaaatttcctcttgggtataagcaattaatggcggctatgatgggaaattccgganaanaaccccaacnggcaagtcaaa

SEQ ID NO: 11339 - DNA, 417 bp, Arabidopsis thaliana
  unsure at all n locations
  Clone ID: LIB24-015-Q1-E1-H9
aagtaccgtaaggcgatatgcgggtctcagctctcagttggtatgagatttggaatgatgtttgaaactgaagattccgggaaacgaaggtacatgggaactattgttggaatcagcgatttggatccgttgagatggcctggttctaagtggcgtaaccttcaggtagaatgggatgagcctggatgtaatgatccatgggaagagtttgtgggatgcgtaaggtgcataaggatattgtcgccaactgaggtccancagatgagtgaagaagggatgaagcttttgaacagcgcaagcattaacgatcttaangactccgtttcanaaatgtnaccatatnagaatgatctcaancctggatttngttaggaaaaaaaaagagaatnaagaaatggtcctttctccaaactnggg

SEQ ID NO: 11340 - DNA, 476 bp, Arabidopsis thaliana
  unsure at all n locations
  Clone ID: LIB24-026-Q1-E1-E3
tcccgcccgtaccggtccaaaatcccggggcccaccaaccgttccaaaaanaaacaaaatggcttcgatgggtggattacacggtgcatctccggcggttcttgaaggaagcttaaagatcaatggctccagccgtctgaatggctctggaagagtggcggtggctcaaaggtctagacttgtcgtcagagctcagcagagtgaggagacttctcgccggtccgtgattgggcttgttgctgctggtttagctggtggctcgtttgttcaggctgtcctcgccgatgctatttcnatcaaagttggccctcctccagctccttccggtggccttcctgggacagataactcagaccaagcangagactttgcattggcattgaaagacaggttttacttacaaccattgccaccancaagaagctgcagctagaagccaaagaaatctgcaaaggatatcataaaatgttaanccc

SEQ ID NO: 11341 - DNA, 493 bp, Arabidopsis thaliana
  unsure at all n locations
  Clone ID: LIB24-001-Q1-E1-A1
gtnccggtccgacattcacgggnccacccacgcgtccggagagagacagagagagattcaaaaatccgattccagatccattcctgggcaaacaaaggttggtgtttctctaatctcaaagcttttttcaaattcggaaaaagcaaatcgtgggaagagattcatcttctctctgtgcgttcatcggatctcggagcttttggttcgtcgtcaatggcggaagagacggagaaaaagtacattacgaacgaagatcttaaaaaacacaacaaatctggagatctatggatcgcgattcaaggcaaggtctacaacgtctccgattggnttaaaaactcatcccgggaggcgacacggtgattctcaatctcgttggtcaagacgtcaaccgatgcctttcatccgcatttcatccccggaancgcntgggcaccatctccgaacatctcctcancgggttaccacatcaagagatttcaaagtctccgaagtc

SEQ ID NO: 11342 - DNA, 439 bp, Arabidopsis thaliana
  unsure at all n locations
  Clone ID: LIB24-001-Q1-E1-A10
gcagacgcgtgggcggacgcgtgggcggacgcgtgggttcacactcgtgtattcatgatcagattatagagcagaggaagagaccgggtcggaaagtgtattcggttactcctcaggtttatcatgagccaaggagtgttgaaaaagcttttcatcataatggaagggttttgcttagtgtttttgatgaggagaaggatgtgaaacaacctattaggatttatttgaattatgatgctgttggtcattcgcttgaccgagattgtcaacgagttggcaatattgtgaagttgggtgagcctccttcaagtacttttcctgctgttcctgcttgtaatcctaatacaaaacctccggtttctggtgattgttggtaaaactgcacttagatgacatatctggcaaggacaaaaagcatccgcctacgcaaaggctttan

SEQ ID NO: 11343 - DNA, 472 bp, Arabidopsis thaliana
  unsure at all n locations
  Clone ID: LIB24-001-Q1-E1-A11
gtancggacctcaattcccgggnccacccacgcgtccgcacctggtgaatacaaagagaaggtcactatcgacaggaacaaacccttcattacattgatgggacaacccaatgccatgcctgttatcacctatgacggtaccgccgccaagtatggaaccgttgatagcgcctctctcattatcttatccgactatttcatggccgttaacatcgtcgttaagaacactgcgccggcaccagatggtaaaactaagggagcacaagctttatccatgagaatctccggaaattttgctgctttctacaactgcaaattctacggtttccaagacacaatctgtgacgatacaggaaaccatttcttcaaggattgttacgttgaaggaacattcgatttcatcttcggaagtggaacctctatgtacttgggaacacaattgcacgtggttggagacggtattanagtgata

SEQ ID NO: 11344 - DNA, 469 bp, Arabidopsis thaliana
  unsure at all n locations
  Clone ID: LIB24-001-Q1-E1-A12
cccgggnccacccacgcgtccgcanacgcgtccggatccacaaggataagggtgttgcaccaacagagtttgaagagcaagttactcaggctttgtttgacttggagaacaccaaccaggagttgaaaagcgagttgaaagatctctacattaaccaagctgttcagatggatatttctggcaaccgcaaagctgttgtgatctacgttccattcaggctgaggaaagctttccgcaagattcatcttcgtctggtcagagagcttgagaagaagttcagtggaaaagatgtgatctttgttgctaccaagaagaatcatgcgcccaacaaagaaagggctcaactgttcanagaacacgcaacaaaactcctacttctgtccatgaagccatgctccaaggatgtcncctaacccgctganaattgtnaggaaagagaaacaagattaccgtccttgatggcaccaag

SEQ ID NO: 11345 - DNA, 485 bp, Arabidopsis thaliana
  unsure at all n locations
  Clone ID: LIB24-001-Q1-E1-A3
gcccggtccganacaaacgggnccngccacgcgtccgaaaanacatctccatgaccaaaatctccacttctaccgtggtaatttcgatggttttgaaagcggatatgagcagcgtcgcaaggagatgaacaaaaaatttgatgtctacgacaaacagatgaaagcagcgaagaggactggaaaccggggtcaacaggagaaggtaaaggacagggccaagtttactgctgcaaaagaagcatccaagagtaagtcaaagggcaagacagtggatgaagaaggcccagcaccagaagctccaaggaagtggagagattacagtgtggtgttccacttcccagaaccaactgagctcactcctcctcttctgcagttaattgaggttagcttcaactatcccaacaaggcaaatttcaaactctccgaatgttgatgtaagtatncgatatggggaacaccggntnccaataatttggnctaaccgg

SEQ ID NO: 11346 - DNA, 462 bp, Arabidopsis thaliana
  unsure at all n locations
  Clone ID: LIB24-001-Q1-E1-A4
aggtcnggtccaaaataacggggccgccacgcgtccgtantancctctcacgcttatcgccgcatctccgtcaaccttcatctacagaatggattctcagatcaagcacgctgtggtggttaaggtcatgggtaggactggttcaaggggtnaggttactcaggttcgagtgaagtttaccgactctgatcgttacatcatgaggaatgttaaaggaccagtgagggaaggtgatatcctcaccttgctcgagtctgagagagaagctaggagacttcgttgatcttcttcttcatactccaaaatgcgganacaagaaaacatttggntatttctcttttgctttctttgattggattagtggattatgcatttggagtcttaattttgttgttgcntttaagacaaattgctgctgggatttataanttgtttgggtatcaaaatctcctcatccaataa

SEQ ID NO: 11347 - DNA, 472 bp, Arabidopsis thaliana
  unsure at all n locations
  Clone ID: LIB24-001-Q1-E1-A6
cgtaccggtaagataattcccggggtctttgattttttaggataaaggagattcctttacctcgattttttgcttttcatttttattaaatctccgatttttgatttttggggnnnnnnnnnnnnnnnnnnnnnnnnnnnnnnnnnnnnnnnnncttctctccaactcgcggagctcttcgtgagctctattgtgcatttgctttatgggttttatatatttagctccgccgttgccggagatatctctcagacgttgaatgattacttgtttaagtccaatgtcgctttcggagaaaccggtcaaaatcaaaccaatgttgagggtttgcctcctattgtattggttcatggcatctttggatttggcaaaggagattaggaggcttatcttactttggcggtgctgagaagaaagatgagaaggttcttgttcctgatttggggttccttaacaagcatctaagacaggg

SEQ ID NO: 11348 - DNA, 489 bp, Arabidopsis thaliana
  unsure at all n locations
  Clone ID: LIB24-001-Q1-E1-A7
ttgccgntcgtaccggaaacataattcccgggnccacccacgcgtcaagaacttactctcctttggttttgctgaagatgttgctcggaaggcactaaaagcctcgggaggagacattgagaaagcaacagactgggtattcaacaaccctaatgcatctgtttcagacatggatgtatcctctagcaattcagcgcagactccggctcaaagtggattaccagatggaggagggaaatacaagctgtttggaatagtaagtcacatgggaacatcagtgcactgtggtcattacgtggctcacatattgaaagaaggccgctgggtaattttcaatgacgacaaagttggtatctcgactgatcctcctaaagacatgggttatgtctacttctttcancggcttgattgattcgatggagccagttacagagacaaaaactaatccttttttttttaaatagaaacttttaaggtcataagggtttt

SEQ ID NO: 11349 - DNA, 473 bp, Arabidopsis thaliana
  unsure at all n locations
  Clone ID: LIB24-001-Q1-E1-A8
gtaccggtanacaattcccgggnccacccacgcgtcngcaagacgcgtgggcttcaaccctatgatcgagcttgctggaatattccacaaccgtggcttctccgtcacgatactccacacttctttcaacttcccggatccttctcgccatccacagtttacttttcgaactatcactcacaaaaacgaaggagaagaagaccctctctctcaatcagaaacttcttcgggtaaggacctcgtcgtccttattagtctgctgaaacaatactacaccgagccgtctcttgcagaggaagtaggcgaaggagggacggtgtgttgtttggtctccgacgctctatgggggaggaacacggagattgtagcgaaagagattggagtgtgtacaatggtgatgaggactagtggtgcggcaacgttttgtgcttatacaagctttccctctccttatagataagggttaccttcct

SEQ ID NO: 11350 - DNA, 478 bp, Arabidopsis thaliana
  unsure at all n locations
  Clone ID: LIB24-001-Q1-E1-A9
ccnacggacgacaatcccgggnccacccacgcgtccgaattaattagactcgccttgtggaataaaggcattttcgacgagaatttctgtagagatgaggccttcttgtgcttcttcctcctcctcctctgcttctccttcgttgaggctatcgtcagtgacagtggcggtggacaaagccacgagcgagcttctccgcactcctgattggaccatcatcatcgccatctgcgattctctcaattctaatcgctggcaatgcaaagatgccatcaaagccgtgaagagaagattgcagcacaagagttctagagttcaattactcactttaacgttgttggaggcaatgctgaagaactgcggtgactttgtgcattctcatatcgctgagaaacatcctcctgaaagatatgggtaaacntgtcaaggaaaaaaggtgatttgaanttaaggaacaaactccttgaattttgttgga

SEQ ID NO: 11351 - DNA, 443 bp, Arabidopsis thaliana
  unsure at all n locations
  Clone ID: LIB24-015-Q1-E1-A1
acgcgtccggtcgttaaacaaatttcgccgacctacgtatgagccgtcgcctccaatataaaccaaagccatccctaatcctcgaattcttcctctctgagtttttattctgagatagagaaagatgtcaggtttagcttgtaattcgtgtaacaaagacttcgaagacgacgctgagcagaagtttcactacaaatccgaatggcaccgttacaatctcaagcgcaagatagctggtgttcctggagtaacagaggcactatttgaagctagacaagctgctatagctcaagagaaggttaaagctgttgaagcaccgatgctttatagttgtggaatctgtaacaaaggttacaggagttccaaggctcatgagcagcatccttaagtcgaagaagtcatgttttgaagggcttcgacgantactgggaaaggaggntaaa

SEQ ID NO: 11352 - DNA, 404 bp, Arabidopsis thaliana
  unsure at all n locations
  Clone ID: LIB24-014-Q1-E1-D9
tnacaagaaataatctcaaatctcttacactcatagtcttcaagcaacttctcagattcagctcttatggatcatttgttacaacaccaggatgtttttgggaattataacaaagcaagagaagcaatgggactatcatattcatcaaacccaacaccgttagataacgaccagaagaaaccttctcctgcaacggctgtgacaaggccacagcctccggagctagctctcaggtgtccacgttgcgactcaacaaacacaaagttttgttactacaacaactacagtctcactcagcctcgctacttctgcaaatcatgccggagatattggactaaaggtggaactctaaggaacatccccgtgggtggaggctgccggaaaaacaaacgattcacatcttc

SEQ ID NO: 11353 - DNA, 415 bp, Arabidopsis thaliana
  unsure at all n locations
  Clone ID: LIB24-003-Q1-E1-C5
acgcgtccggtgaaatcgaaaaaaaaagcgagatcttcttctctaatggcgacgaccttaagcagagatcaatatgtctacatggcgaagctcgccgagcaagccgagcgttacgaagagatggttcaattcatggaacagctcgtaagtggagctacaccggccggtgagctgaccgtagaagagaggaatcttctctcggtcgcgtataagaacgtgattggatctcttcgtgcggcatggagaatcgtgtcttcgattgagcaaaaggaagagagcaggaagaacgaagaacacgtgtcgcttgttaaggattacagatctaaagttgagactgagctttcttcgatctgttctgggattctcangttacttgattcgcatctaattccttcagctactgccagtgatctaa

SEQ ID NO: 11354 - DNA, 437 bp, Arabidopsis thaliana
  unsure at all n locations
  Clone ID: LIB24-004-Q1-E1-D8
acgcgtccgagagacagaaagaggacatatacagtaagannnnnnnnnnnnnnnnnnnnnnnnnnnnnnnnnnnnnnnnnnnnnnnnnnnnnnnnnnnnnnnnnnnnnnnnnnnnnnnnnnnnnnnnnnnnnnnnnnnnnnnnnnnnngcgtcatattgttacttggtcacaagaggaagatgttatactaagagaacaaataactctacatggaactgaaaattgggcgatcattgcatcaaagttcaaagacaaaagcacaagacaatgcagaagaagatggtatacatacttaaactctgatttcaaaagaggaggttggtcccctgaagaagatatgcttttgtgtgaggcacaaagagtatttggtaatagatggactgagatagcaaaggtggtttcaggcagaactgataatgctgtgaagaacangttt

SEQ ID NO: 11355 - DNA, 416 bp, Arabidopsis thaliana
  Clone ID: LIB24-006-Q1-E1-A2
attctctctttgattcctatcttcttctctttattttcactttgtgctttctctgtctctcctattatgagtctaaaagtctactagctgttcaatagttttgtctttctgtgtttcttcttcttcaaaaccgaaagaaattcaaaaagagtctttcgctgcttgttagtggggtgaggaacaaatgggaagaacaccttgttgtgacaagattggtttgaagaaaggtccttggacgcctgaagaagatgaggttcttgttgcgcatatcaagaaaaatggacatggaagctggagaacacttcctaaacttgctggtttacttcgctgtgggaagagttgcaggctgagatggacaaactatctgagaccaagacataaagagaggtcctttcactgctgatgaagagaaactt

SEQ ID NO: 11356 - DNA, 747 bp, Arabidopsis thaliana
  unsure at all n locations
  Clone ID: LIB24-020-Q1-E1-B12
aaagcttggtttttaacggcccccgggggncncccggggtttaacccgggcgcttccccgggaaaaaaaganttttcccccggaggggggntnccggaaaccccccaaaccggcccggnttccccgggccccccaaacgggcccggttttcccgggcccttccaaaaaaaaaaaccccaaanannanaattcccaacccttaaaaannagggaaangggggaaagnaaaaaggaaatttgggccttaaaaaaaggtttttttgganttaaaaaaaacaaattttcccaaaaaaanattccaaaatnggggcctnggaattnaangggaatttaaaaaaggggtnccaattgggaaggtnccttgaaaagaaagaacgaagcaagccttncgttanggctttgtttngttnaaaattacgggttccaaaggaaaaactngggacaagttgaattaagcaaaaatcctaattccccgggttagattcggggggaaaaatccgttgttcgtttaacgggtgggttgcaaacccaagccttttcgcccgcaaagtttgaagcaatcnggnccgtttttcgggcttgaagggaaaagacgaagacgatcgcaacgtgctcacgctcaagttcgggtaataaatggggcgacgattgctcgtcttctcaacggtcgtacggacaacgccgtnaagaatcactgggnactccacgctcaaanaaggaaatnccggngggtacgaacatccgggg

SEQ ID NO: 11357 - DNA, 389 bp, Arabidopsis thaliana
  unsure at all n locations
  Clone ID: LIB24-021-Q1-E1-A12
atattgtggacagtaacctcgaattagttccatatcagggtgacatatctgttgatgaaccttcatcagattcaaaagagcttgtcccacttccagagttggaagtcaaggcgcttgccatagttccgttgaaccagaaacctaagcgtactgagctagcccagaggagaactaggagacccttctctgtgacagaggtagaagctcttgtacaagcagttgaggaactcgggactggaagatggcgtgatgtaaaattgcgtgctttcgaggatgcagatcatcggacttacgtggacttgaaggacaaatggaagacgctagttcacacagcaaagtatatccccacagcaacgaaganganagccggtgccacaagaactgctana

SEQ ID NO: 11358 - DNA, 419 bp, Arabidopsis thaliana
  unsure at all n locations
  Clone ID: LIB24-027-Q1-E1-D10
ataagttgctcttctggagtgatgtttccccgtcgtacgtcggggcggagatagttcagccaccggagccggcaacttttcccggttcgttttagacctatatacattcatattatcaatcatcacaatcaatatgactcttactacgtggatatatattcacataattataattagtagtagcacatatgacatatgagtataaaaatacgtgtatcatttatttttgatgttttaaaaaagtattttacattattttactctaccactaggccatcattaaagcatcatatatccaagtatccaacacatgaaaacgttttaatatttagattgattctttaacaaagaacgaatataatagagcatatatatatacacgtttaaaaaaaaaatctagttatgaaaatataattaan

SEQ ID NO: 11359 - DNA, 428 bp, Arabidopsis thaliana
  Clone ID: LIB24-004-Q1-E1-G3
tctcacccaatttgtgtttcttctttctgctaaaaggttataatttttgtttcttggtttggtgagaatcttcaagaaactgaaacaaagaaaatggattctagttgcatagacgagataagttcctccacttcagaatctttctccgccaccaccgccaagaagctctctcctcctcccgcggcggcgttacgcctctaccggatgggaagcggcgggagcagcgtcgtgttggatcccgagaacggcctagagacggagtcacgaaagctaccatcttcaaaatacaaaggtgttgttcctcagcctaacggaagatggggagctcagatctacgagaagcaccaacgagtatggctcgggactttcaacgagcaagaagaagctgctcgttcctacgacatcgcagctttgtagattccgtggcc

SEQ ID NO: 11360 - DNA, 473 bp, Arabidopsis thaliana
  unsure at all n locations
  Clone ID: LIB24-004-Q1-E1-G4
ggtagcctccaaaaattccaanggtcgacccacncgtccgntctctcacccaatttgtgtttcttctttctgctaaaaggttataatttttgtttcttggtttggtgagaatcttcaagaaactgaaacaaagaaaatggattctagttgcatagacgagataagttcctccacttcagaatctttctccgccaccaccgccaagaagctctctcctcctcccgcggcggcgttacgcctctaccggatgggaagcggcgggagcagcgtcgtgttggatcccgagaacggcctagagacggagtcacgaaagctaccatcttcaaaatacaaaggtgttgttcctcagcctaacggaagatggggagctcagatctacgagaagcaccaacgagtatggctcgggactttcaacgagcaagaagaagctgctcgttcctacgacatcgcagcttgtagattccgtggccgcg

SEQ ID NO: 11361 - DNA, 398 bp, Arabidopsis thaliana
  unsure at all n locations
  Clone ID: LIB24-005-Q1-E1-C2
gagaagagatctcagctgttagatctagatcttaatttgcctcctccatcggaacaggcctgagcttttaacggtgtcgtttcaattcgaagcgcatgcgtttcttcttctttttgagctgtgaaaattcgttttctcatagtttttcctctctctctctctcagtctaaatttattaccagtttttagaaagaaaaaacagattaaatctgagagagaaaaatataattttagctgacatggatcgttatgtacatattattacataaccggagatctgaacttttgttgtgtgcttttaattttttgcgacttggtttcaccccaatgttgtntctcnattttttttactacnttttttttttggtcctncaaantttcaatcaaatantttgggg

SEQ ID NO: 11362 - DNA, 452 bp, Arabidopsis thaliana
  unsure at all n locations
  Clone ID: LIB24-029-Q1-E1-C1
angtaccggtgcagaattcccgggacgacccacgcgtccgcccacgcgtccgcccacgcgtccgctcatggacgcgcttgtaccttttatcaaaagcgtnnnnnnnnnnnnnnnnnnnnnnnnnnnnnnnnnnnnnnnnnnnnnnnnnnnnnnnnnnnnnnnnnnnctccctcctctccccggttattacccggattcaacgttcttgacccaaccgttttcatacgggtcggatcttcaacaaaccgggtcattaatcggactcaacaacctctcttcttctcagatccaccaagatccagtctcagatccatcatcctcttcctccgacgcatcacaacaacaacaactctttctcgaatcttctcagcccaaagccgttactgatgaagcaatctggagtcgctggatcttgtttcgcttacggttcaggtgttccttcgaaaccgacg

SEQ ID NO: 11363 - DNA, 417 bp, Arabidopsis thaliana
  unsure at all n locations
  Clone ID: LIB24-003-Q1-E1-A11
tatctccggtcatgcctccattaccgtcctccacggcgccttcgtcttcgagacatcttcgatcgccggaaagtatcgcgaaatttgcagggagagcaatatttcctgctttacaggggaaatcgtgtccgatatgcctcgaaaatctaaccgagcgaagatccgccgccgtgatcacggtgtgcaagcacggatactgccttgcttgtattcggaagtggagcagcttcaagaggaattgtcctctttgtaacactcgttttgattcctggtttatcgttagtgattttgcttctagaaaataccataaggagcaattaccaattcttcgtgatcgtgagactttaacttatcatcggaataatccttccgatngccggaggataattcaaaggtcganggatgttttggaaaact

SEQ ID NO: 11364 - DNA, 453 bp, Arabidopsis thaliana
  unsure at all n locations
  Clone ID: LIB24-013-Q1-E1-E6
cccacgcgtccgagcagcacaagtctgcgaagatttggattagatctgattcaggttggattgatcatcgttcggagctccgggaaacatggcggcgacgagacaattacgaactctccaatctcagcctgaaaacaaggtatgtgtcgattgcgctcagaagaatcctcaatgggcgtcggtttcgtacggaatcttcatgtgtttggaatgctccgggaaacaccgaggcttaggcgttcacatatccttcgtcagatccgtaaccatggattcatggtctgcgatccagattaagaaaatggaagctggtggtaacgaacggctcaacaaattcttcgcgcaatacggaatcgctaaggagacagatattatctccaagtacaattcgaacgctgcttctgtgtatcgtgaccggattcaagctttanctgaaggtagacatggaatgat

SEQ ID NO: 11365 - DNA, 428 bp, Arabidopsis thaliana
  Clone ID: LIB25-002-Q1-E1-A8
aaagaaagaaggcgcaaggaggatggtgacgaaagaatccattgaagtgatagctcagagcattggactctccactctttctccggacgtctcagccgctcttgctcccgatgtcgagtatcgcgtccgagaggtcatgcaggaagctatcaaatgcatgcgtcatgctcgacgcaccactttaatggctcatgatgtcgattctgctcttcatttcaggaatttggagcctacctctggctccaaaagtatgcggttcaagagagctcctgagaacagagatctatacttcttcgatgacaaagatgtcgagctcaagaatgttatcgaagctcctctaccaaatgcacctcctgatgcatctgttttctctcattggttggcaattgatggtattcaaccttccattccacagaattctcctctca

SEQ ID NO: 11366 - DNA, 419 bp, Arabidopsis thaliana
  Clone ID: LIB25-073-Q1-E1-E3
aatatatctcgtgaatgttctctgagaattctctagatcttcaatcaaaagttatctctctctctcacctattgtaaaaatcaccagtttcgtatataaaaccctaattttctcaaaattcccaaatattgacttggaatcaaaaatccgaatggatgtgagcaaagtaaccacaagcgacggcggaggagattcaatggagactaagccatctcctcaacctcagcctgcggcgattctaagttcaaacgcgcctcctccgtttctgagcaagacctatgatatggttgatgatcacaatacagattcgattgtctcttggagtgctaataacaacagttttatcgtttggaaaccaccggagttcgctcgcgatcttcttcctaagaactttaagcataataatttctccagcttcg

SEQ ID NO: 11367 - DNA, 343 bp, Arabidopsis thaliana
  Clone ID: LIB25-104-Q1-E1-D7
acttcaaactaaaactcgagagacaagaaatcctcagaatctttaacttaatggcgctcgaggctcttacatcaccaagattagcttctccgattcctcctttgttcgaagattcttcagtcttccatggagtcgagcactggacaaagggtaagcgatctaagagatcaagatccgatttccaccaccaaaacctcactgaggaagagtatctagctttttgcctcatgcttctcgctcgcgacaaccgtcagcctcctcctcctccggcggtggagaagttgagctacaagtgtagcgtctgcgacaagacgttctcttcttaccaagctctcggtggtca

SEQ ID NO: 11368 - DNA, 306 bp, Arabidopsis thaliana
  Clone ID: LIB25-006-Q1-E2-A7
gcctattgttgccgttgcttgctatctttcgccgtcgtctctttagcttcttgcgaagatggttcttcaaaacgatatcgatctgcttaacccacctgctgagcttgagaagaggaagcacatgctcaagcgtcttgtccagtctcccaattccttcttcatggatgtgaagtgccaaggctgtttcaacatcactactgttttcagtcactcgcagactgttgtggtgtgcggaaactgccaaacaactctgtgccagcctacaggaagtaaggcaaagctcaccgaaagatgctcattcatgat

SEQ ID NO: 11369 - DNA, 407 bp, Arabidopsis thaliana
  Clone ID: LIB25-066-Q1-E1-C10
accacgcgtccggaaaaagccattctttttgccccttgagtgctttcagctcttcccacaaggttacagaagtaatgtcacgtgtgtacgtcggaaatttggacccgcgagttactgagcgtgaacttgaggatgagttccgtgcctttggagttgtcaggagtgtttgggttgcccgtagaccacctggttacgcttttctagatttcgaagatcctagggatgcccgtgatgctatccgtgctttagatggcaagaatggctggagggttgaacagtctcacaatcgaggtgagcgtggtggcggcggtcgtggtggtgaccgtggaggtggtggcggcggccgtggtggtcgtggtggctctgatttgaaatgctatgaatgcggtgagactggtcatttcgca

SEQ ID NO: 11370 - DNA, 427 bp, Arabidopsis thaliana
  unsure at all n locations
  Clone ID: LIB25-007-Q1-E1-G11
aaaaaaaaagaactctttcgtcgactaatgtgatttattgttcaccggagtattaaagaagatgatgatcggagaaactcgcaggacttatcccactgttgaaatacctccatggccggtacttgaagagcttacaacgtcggagtttttttctccggtgatgaatagtccagattgtagcatgcttgaagctttggcggggttgcagcgttatttgccgtctaacgaaccggatccggagtcatacccggatctattgggtccggattcaccaatcgatgcttactcatgcgaccatttccgtatgtacgatttcaaagtcaggaggtgtgctcgtggccggagtcatgattggacggagtgtccgtacgctcatcncggagaaaaagctcgccggagagattcgaggaagttacattactctggg

SEQ ID NO: 11371 - DNA, 391 bp, Arabidopsis thaliana
  Clone ID: LIB25-078-Q1-E1-G1
cccacgcgtccgcccacgcgtccgaaatctagaaagagaaaaagtcttaaatttgtctcatttatgcgataagaaccacaattcctctatcaaaatctctctctctgacatacccagttggaaaaattcaatcttttatccctaagattcgatctttcttcttgggaagttgataaatgttcaaggaaacataaaaaagagaagatttttgaataaaggttgaagaaaaatgcaggatccagcagcatattaccagacgatgatggcgaagcaacaacaacaacaacaaccacagtttgcagagcaagaacagttaaagtgtcctcgttgtgactcaccaaacactaaattctgttactacaacaactacaatctctcacagcctcgtcac

SEQ ID NO: 11372 - DNA, 412 bp, Arabidopsis thaliana
  Clone ID: LIB25-068-Q1-E1-B4
cggacgcgtgggcggacgcgtgggcggacgcgtgggcggacgcgtgggcggacgcgtgggctcaatttggattggattttctgcatatcatcgctctagctttcgcgggttttggattcgattccttacccttctccaatcgaagtttttggctttgaattggatttgggtttcgttccaaaatcagctctttttgttaatcagatatgcaggaccagctggtgtgtcatggttgtaggaatttattgatgtatcctagaggagcatctaatgtgcgttgtgcgttatgtaacactatcaacatggttcctcctcctcctccacctcacgacatggcacacattatatgtggtggttgtagaacaatgcttatgtatacgcgtggggctagtagcgtaagatgctcttgctg

SEQ ID NO: 11373 - DNA, 430 bp, Arabidopsis thaliana
  Clone ID: LIB25-112-Q1-E1-C8
cctcaaactctctctttctctctctctctctggttccctagaatttgagcaaaatttctaccataattgctaattattaaaaggaaacataagtaatcgttgcttcgatcctttgttacatggatggatcctgaacaggaaatctcaaacgagactttggaaactatattggtaagttcaacagaaggaagcaataataacaataagaaaatggaagaagaaatgaagaagaaagtatcaagaggagaattaggaggtgaagctcaaaattgtccaagatgtgaatctccaaacacaaagttttgttactacaacaactatagtctctcacaacctcgttacttctgcaaatcttgtcggagatattggactaaaggcggtactcttcgtaacgttcccgtcggtggtggttgccgtcgaaacaaacgat

SEQ ID NO: 11374 - DNA, 416 bp, Arabidopsis thaliana
  Clone ID: LIB25-016-Q1-E1-E12
acggacgactcaaccgagtgagttctctctactgagtcttgcatacatctccgctctcagctctttcccagattccacaaattccatcgccggagcttcttcgatctcaaaggctcgtatcctcggccacgttgccgcctgaatcggacgcagagacgacgaaaaaggtaacctaactgcagatctcatcggagaactccacgaacaaccacctccgttcaattgcattttcctcatcgacgcaataagttcaccggtactcggagaaagcggcggagattccgacggtggtgaaaacgaaggagaaacaagaatcgaagtcggagaagtagctaatcctgagaagaatccaagatctggatctaacgaacaaggtaatacacgtaactgctccgtcgtatgagcgaagagacaga

SEQ ID NO: 11375 - DNA, 360 bp, Arabidopsis thaliana
  Clone ID: LIB25-007-Q1-E1-F1
acggacgcgtggggttctccgatgagatctgcagttaggttacctttttcgtcgtctctgcgtcggattcacgcggcaacgtggccgaggataagagagtttgagatcgaagaagctccggtgatggaatttgtggaatctgggaaagagctgagagcggagatgtatgcaagactcagtagagagaactcagtcggttgagtcgacttggatcgagtctgtgatgacgtggcgactcgatctgattttgtggatattctagagatgtttaaggtgttgtggagaaatgacctggcgggtcgatcttagtgacggtacaatcggacgatgaagacatcagcgttaagagtatcatactca

SEQ ID NO: 11376 - DNA, 214 bp, Arabidopsis thaliana
  Clone ID: LIB25-086-Q1-E1-F5
cggacgcgtgggcggacgcgtgggcggacgcgtgggttcaggtttcttttctaacaagcaaaaactccaacctttactttatttttgttttgttttgtaaccctctcagatcttaattctcaaagaagtatgaagagagaaagatctgatttcgaagaatccctcaagaatattgacattgctaaatgtctgatgatactagcacaaacctcca

SEQ ID NO: 11377 - DNA, 444 bp, Arabidopsis thaliana
  Clone ID: LIB25-039-Q1-E1-D12
acattctgtttttaattcccctaaaaacccattttaaaatattttatctctcttctcttaaaaaaaactcttccctgtttttgtttgtgtgttactaaatggaatcgtcgtcgtcgggaacaacttcgtcgacgattcaaacgtcgtcaggatcggaggagagtctcatggagcagaggaaacgtaaacggatgctctcaaaccgtgaatctgcaaggagatcaagaatgaagaaacaaaagctcctagacgatctaacggctcaggttaatcatctgaaaaaagagaacacggagatcgtgacaagtgtcagcatcacaacgcaacactacctaaccgttgaagcagagaactctgttctcagagctcagcttgatgaacttaaccacaggctccaatctctcaacgacatcatcgagttcctcgacagtaacaacaacaaca

SEQ ID NO: 11378 - DNA, 218 bp, Arabidopsis thaliana
  Clone ID: LIB25-112-Q1-E1-E7
aatttgcttctgcaactcacagtcaatggcggctgaaatggcgttagtgaaacccatctccaagttctcttccccaaagctctcaaacccgagcaaattcctctccggccgacgtttctccaccgtgattagaatgtcagcctcgtcctcatcgcctcctccaaacaccggcaactcgaagtccaaaaagggaacgaagaaagagattcaagagtcgc

SEQ ID NO: 11379 - DNA, 444 bp, Arabidopsis thaliana
  Clone ID: LIB25-039-Q1-E1-D6
cgctacttctgcctctcggtttatgtgacaatgtacctcaatgactgccaaagaactaatttctacgagggtatcgggttaaacacaaaggagttcgatatgcatgtcatcatcgagacaaaccgaaccacggcaagaatattccctgcggtgctggatgttgagaaccctgagttcaagaggaaactggatagaatggttgtgagctatgagaagctgctggctataggagaaacagatgatgcttccttcatcaagaccctcaagaggattcctttggttacttctttagcctctgagatcttggctgcttatctcatgcctcctgttgagtctggctctgttgatttcgccgagtttgagcctaatcttgtctattagtagctgcaatgtcaagtcttgagtttacggctggttcttgatttcttgtaattgaatgatcga

SEQ ID NO: 11380 - DNA, 408 bp, Arabidopsis thaliana
  Clone ID: LIB25-091-Q1-E1-G10
cactctaactcactctttgcttctgcaactcacagtcaatggcggctgaaatggcgttagtgaaacccatctccaagttctcttccccaaagctctcaaacccgagcaaattcctctccggccgacgtttctccaccgtgatcagaatgtcagcctcttcctcaccgcctcctccaaccaccgccacctcgaagtccaagaagggaacgaagaaagagattcaagagtcgcttcttactccgaggttctacacgacggacttcgaggaaatggaacagcttttcaacacggagatcaacaagaaccttaacgaagcagagttcgaggctctgcttcaagagttcaagaccgattacaaccagacacatttcgtgaggaacaaggagtttaaagaagctgcagacaaat

SEQ ID NO: 11381 - DNA, 396 bp, Arabidopsis thaliana
  Clone ID: LIB25-077-Q1-E1-E11
acaaacccttttttctgggttcttcggagaggtgatttatcaccaaaaaaaagattttaaaagtctaaatccttttttctttctttccttcaacatgcctttaccttggaagaaatctaaatctagtcggatctctagattcgtatcagactttcaacaatctcctaaacatggtggatctctcgttgttgaaactggtttcccaacttctttaatcgatctctttgttaagaatcgcgatcgtctcaaaaaacaatcttcaaaacgtaacaacaagaacaacaaagcccagactgaaacgcgtgttttgtctccacctcctcctcatatgtctttgcagcgtcgtatgtctcttccttccaagcttgatccagctttggttacagaggattctcc

SEQ ID NO: 11382 - DNA, 197 bp, Arabidopsis thaliana
  Clone ID: LIB25-094-Q1-E1-H12
gttcctactcttcaaaatattgtctcaacagtgaacttagactgcaagcttgatcttaaagccatagctttgcaagctaggaatgctgaatataaccccaagcgtttcgctgctgtaatcatgaggatcagagagccaaagaccacagcgttaatttttgcttctgggaaaatggtgtgtaccggagctaaaagtga

SEQ ID NO: 11383 - DNA, 403 bp, Arabidopsis thaliana
  Clone ID: LIB25-076-Q1-E1-D11
caaaaaaaccagatcttaaaactctctctacccaccaagaggatcaaccagtctcttccccttcagattctcctttccacagtgaatggatcaacaagaccatggacagtctggagctatgaactatggcacaaacccataccaaaccaacccgatgagcaccactgctgctactgtagcaggaggtgcggcacaaccaggccagctggcgttccaccagatccatcagcagcagcagcagcaacagctggcacagcagcttcaagcattttgggagaaccaattcaaagagattgagaagactaccgatttcaagaaccacagccttccccttgcgagaatcaagaatatcatgaaagcggatgacgatttccgtatgatctcggctgaggcgcctgtcgtg

SEQ ID NO: 11384 - DNA, 436 bp, Arabidopsis thaliana
  unsure at all n locations
  Clone ID: LIB25-051-Q1-E1-D11
gaaagcggatgaagatgtccgtatgatctcggctgaggcgcctgtcgtgtttgcaagggcctgtgagatgttcatcctggagctgacactcaggtcgtggaaccacactgaggagaataagaggcggacgttgcagaagaacgatattgctgctgctgtgactagaaccgatatttttgatttccttgtggatattgttccccgggaggatctccgagatgaagtcttgggaagtattccgaggggcactgtcccggaagctgctgctgctggttacccgtatggatacttgcctgcaggaactgctccaataggaaatccgggaatggttatgggtaatcccggtggtgcgtatccacctaatccttatatgggtcaaccaatgtggcaacaacaggcacctgaccaacctgaccangaaaattagcaagaaact

SEQ ID NO: 11385 - DNA, 416 bp, Arabidopsis thaliana
  Clone ID: LIB25-016-Q1-E1-F11
cagacgcgtgggcttttgttcttgaaattagggttaatttcttttttccaaataccatcaattctccagaccataaaaactcaaaaagatcagatctttcctctgaaaaagagatacccaacttatgtttttgtgtgtctgtatatagataaacattacatacccatatttgtgtatagacataaaaagtggaaattaaggtaacaaaaagaaatgggaagaggaagagtagagctgaagaggatagagaacaaaatcaacagacaagtaacgtttgcaaagcgtaggaacggtttgttgaagaaagcttatgaattgtctgttctctgtgatgctgaagttgctctcatcatcttctccaaccgtggaaagctctatgagttttgcagctcctcaaacatgctcaagacacttga

SEQ ID NO: 11386 - DNA, 393 bp, Arabidopsis thaliana
  Clone ID: LIB25-111-Q1-E1-C9
aagatttcacaacctccacacacttccaaacacaattaaagagaggaaaaagaatcaataaccctataaataaaaaatcagacaaacagaagtttcctcttcttcttccttaagctagtaccttttgttcttgaaattagggttaatttcttttttccaaataccatcaattctccagaccataaaaactcaaaaagatcagatctttcctctgaaaaagagatacccaacttatgtttttgtgtgtctgtatatagataaacattacatacccatatttgtgtatagacataaaaagtggaaattaaggtaacaaaaagaaatgggaagaggaagagtagagctgaagaggatagagaacaaaatcaacagacaagtaacgtttgcaaagcg

SEQ ID NO: 11387 - DNA, 412 bp, Arabidopsis thaliana
  unsure at all n locations
  Clone ID: LIB25-013-Q1-E1-F5
gaaatcttgagaactcaggatcaatggaggaaggtgggagtagtcacgacgcagagagtagcaagaacctaaggagagggaaaatagagataaagaggatagagaacacaacatatcgtcaagttactttctgcaaacgacgcaatggtcttctcaagaaagcttatgaactctctgtcttgtgtgatgccgaagttgccctcgtcatcttctccactcgtggccgtctctatgagtacgccaacaacagtgtgaggggtacaattgaaaggtacaagaaagcttgttccgatgccgtcaaccctccttccgtcaccgaagctaatactcagtactatcagcaagaagcctctaagcttcggaggcagattcgagatattcagaattcanataggcatattgttggggaatc

SEQ ID NO: 11388 - DNA, 456 bp, Arabidopsis thaliana
  Clone ID: LIB25-051-Q1-E1-D10
gttaaaacgtgttgatggtttctgaacagctgagcaattattcatcaatggaaggagtggtgtattgtaggcctcattttgagcagcttttcaaggagtctggtagtttcagcaagaactttcagtcacctgcaaagccattgactgataagccaaccccggagctgaataggacacctagtcgacttgctggtatgttctctggaacgcaagacaaatgcgctacttgcactaaaaccgtgtatcctatcgaaaaggtaactgtggaaagccagtgttaccataaatcttgcttcaagtgttctcatggaggctgtccgatatctccatcgaactatgcagctctagagggaatattgtactgcaagcaccatttcgctcagcttttcaaggagaaaggaagttacaatcatctcatcaaatctgcttccatcaaacgcgctaatgctgctgcta

SEQ ID NO: 11389 - DNA, 420 bp, Arabidopsis thaliana
  unsure at all n locations
  Clone ID: LIB25-001-Q1-E1-G12
accacggacgcgtgggttcccatcctcacttctctttctttctgatcataattaatcttgctaagccagctagggcttatagaaatggagggtggtgcgagtaatgaagtagcagagagcagcaagaagatagggagagggaagatagagataaagaggatagagaacactacgaatcgtcaagtcactttctgcaaacgacgcaatggtttactcaagaaagcttatgagctctctgtcttgtgtgacgctgaggttgctcttgtcatcttctccactcgaggccgtctctacgagtacgccaacaacagtgtgagaggaacaatagaaaggtacaagaaagcttgctccgacgccgttaaccctccgaccatcaccgaagctaatactcagtactatcagcangaggcgtctaaactc

SEQ ID NO: 11390 - DNA, 436 bp, Arabidopsis thaliana
  Clone ID: LIB25-001-Q1-E2-G12
cggacgcgtgggttcccatcctcacttctctttctttctgatcataattaatcttgctaagccagctagggcttatagaaatggagggtggtgcgagtaatgaagtagcagagagcagcaagaagatagggagagggaagatagagataaagaggatagagaacactacgaatcgtcaagtcactttctgcaaacgacgcaatggtttactcaagaaagcttatgagctctctgtcttgtgtgacgctgaggttgctcttgtcatcttctccactcgaggccgtctctacgagtacgccaacaacagtgtgagaggaacaatagaaaggtacaagaaagcttgctccgacgccgttaaccctccgaccatcaccgaaactaatactcagtactatcagcaagaggggtctaaactccggagacagattcgggacat

SEQ ID NO: 11391 - DNA, 422 bp, Arabidopsis thaliana
  Clone ID: LIB25-056-Q1-E1-B4
catctctcgtgttttgttttctttgtctccgatttttttcgcgacgaagaagaagacgagagatagagagagaagtagagaaatcgaaggaatctgtaaccgattttaagatctcaatttttagggttgttgatttttcaatttctgggttaattttttttagggttttcatttggaatcatgtcggatgcgtattgtacggattgtaaaaaggagacggagttggttgtcgatcactcagccggagataccctttgctccgagtgtggtttggttttggaatctcactccattgatgagacctctgagtggcgtaccttcgctaatgaatcttccaacagcgattccaatcgtgtcggtggtccaaccaacccgcttctcgctgatagtgctttaaccactgttatcgctaagcccaaatg

SEQ ID NO: 11392 - DNA, 407 bp, Arabidopsis thaliana
  Clone ID: LIB25-105-Q1-E1-C1
actcatgttttgttttctttgtctccgatttttttcgcgacgaagaagaagacgagagatagagagagaagtagagaaatcgaaggaatctgtaaccgattttaagatctcaatttttagggttgttgatttttcaatttctgggttaattttttttagggttttcatttggaatcatgtcggatgcgtattgtacggattgtaaaaaggagacggagttggttgtcgatcactcagccggagataccctttgctccgagtgtggtttggttttggaatctcactccattgatgagacctctgagtggcgtaccttcgctaatgaatcttccaacagcgatcccaatcgtgtcggtggtccaaccaacccgcttctcgctgatagtgctttaaccactgttatcgct

SEQ ID NO: 11393 - DNA, 451 bp, Arabidopsis thaliana
  Clone ID: LIB25-037-Q1-E1-C5
aacggacgcgtgggcggacgcgtgggctgatctcctcttctctctgtcttctgagttctgtctacgcttcgtcgccgatcccggccagactccgtcttaccggcacaaaccctagattcccggaggacgaaattcgttttttcgccggaactaaattaaggagatttgagaggctatgggtacaacaacgacaacaagcgctgtgtatatccatgttatcgaggatgtcgtcaacaaagttcgtgaggagttcattaacaacggaggtcctggcgagagtgttctcagcgagcttcaaggaatttgggagacgaagatgatgcaagccggagtcttgaatggaccaatagagaggtcatcggctcagaagccaacacctggtggtccactgactcatgatttgaatgttccttatgaaggtacagaggagtacgagactcccactgctgaa

SEQ ID NO: 11394 - DNA, 452 bp, Arabidopsis thaliana
  Clone ID: LIB25-046-Q1-E1-D6
cccacgcgtccgcccacgcgtccgcccacgcgtccgcccacgcgtccggttctagatcgcgagcggccgcccttttttttttttttttttttttttttttttttttttttttatttttttttttttttttttttaaaaccaaataatctgcgaatcaaattttaagttgtaaatgttagaatttccgattcacttgcatgacacaaagagcactagtcattgatttgatgtaagaatacactgaaatttggtacaatcaaaagcgaaagagttttatggtttaaggtgttgggggctttttggattgaaattagaatctcccaaggttcccttcgctgtgtgcagttgtatcaatatagccaaaaaaaaaatctgtatgactaaaaagccagctcgtgctttcttaacctacttgtcacgccggtccttggggagtaaatcagccttcctca

SEQ ID NO: 11395 - DNA, 370 bp, Arabidopsis thaliana
  Clone ID: LIB25-114-Q1-E1-A6
agtttcttttcgttttgtttcactttcttatccccgcacactcttcgaacaaggaagaaccctaatctcacaatgaatacggagaagttgatgaagatggctaataccgtccgcactgacggaaagggtactgtcacaagaaagaagaaggctgtgcacacgaccactacaactgatgacaagaggcttcaaagcactcttaagagacttggagttaactccattcccgctattgaagaagttaacatcgttaatgatgacgttgttagtcagttcatcaatcctaatgttcaagcttcacttgctgcaaacacatgggttgttagcggttctccgcagaccaaaccattgcaagatatccttcctcaga

SEQ ID NO: 11396 - DNA, 388 bp, Arabidopsis thaliana
  Clone ID: LIB25-083-Q1-E1-D11
ctctgctcagcttttccgaccaaaagatccaagcgcaagatcaactcaaaatcaatggattatctcggaatcgacatgagctgcgcgatcggatctctccggaacggtgacttcccggagaaagattgtcttcttcctctaatttcaaagcttctcggttattgcctcgttgctgcttcaatcaccgtcaagctccctcagataatgaaaatcgttcaacataagagtgtacgaggcttaagtgttgtggcatttgagcttgaagttgttggttacacaatttcacttgcttattgtttgcataaaggtcttcccttttcggctttcggcgaaatggcttttcttttgatccaagctttaatcttggtggcttgtatctattattatt

SEQ ID NO: 11397 - DNA, 447 bp, Arabidopsis thaliana
  Clone ID: LIB25-032-Q1-E1-E9
ttaaaaaccacaggcgagagaaagatattcactctccccttatataagcacggaattataaatctttttccctcttcgattctcacttctttgtataaaaggcttctccttttctcaattcttcggcttcctttcgcccaaactcttccctcgaatctttccttctcgtcttaaagctacaataccctacatgtcggatatcttcgcaatgcacataagattgactgatcaatgattggaatggagtaaacaagttgatcttagcaagcatccttcagggattgttcgtactcttcaaaatattgtctccatagtgaacttagactgcaagctagatcgtacagccatagctatgcatgctcggaatggtgaatattatcacaagcgttttgctgcagtgataatgaagatcagataaccgaatactacagcattaatattcgcctc

SEQ ID NO: 11398 - DNA, 408 bp, Arabidopsis thaliana
  Clone ID: LIB25-073-Q1-E1-E8
catcaacttaatcgtttctctcaaatttagggttttctcttttctcgaaagtcttgcggttttctgaatcatctctatctggtttgagggtttcgtttgatatctggagaaaggggtttctggaaacaaggagttcataattcgcgatcttgatctatcgatcttcatttatatataaaagcgtgaatgagattatgatggagtcgaaaggtggtaaaaagaagtccagcagtagtagttccttattttacgaagctcccctcggttacagcattgaagacgttcgtccaaacggtggaatcaagaaattcaaatcttctgtctactcaaactgctccaagaggccatcctgagtaacagcgtgcaccgatcttcataatatagttatagctttctttactttccagt

SEQ ID NO: 11399 - DNA, 422 bp, Arabidopsis thaliana
  Clone ID: LIB25-077-Q1-E1-D8
atgagactaagaaatggcatgtctatgctgcctctgcccaggactccagcaactgcaacaacaatgtctacactctcgagatgtgcatgactggtctggacagagagaaagctgctgtcttctacaaggatgaagctgacaagactgggtcaatgactgataactctggaatcagaaagatccttcccaagtctgagatctgcgactttgaattcgagccctgcggctactctatgaactcaattgaaggggatgcaatctccacgatccatgtgacccctgaagatgggtttagctacgctagcttcgaagctgtgggttacgacttcaacacccttgaccttagccagctggtgacaagggttctctcttgcttcgagcccaagcaattctctgtagctgtgcactcgagcgttggagcg

SEQ ID NO: 11400 - DNA, 433 bp, Arabidopsis thaliana
  unsure at all n locations
  Clone ID: LIB25-041-Q1-E1-C12
accaaatcatcaacttaatcgtttctctcaaatttagggttttctcttttctcgaaagtcttgcggttttctgaatcatctctatctggtttgagggtttcgtttgatatctggagaaaggggtttctggaaacaaggagttcataattcgcgatcttgatctatcgatcttcatttatatataaaagcgtgaatgagattatgatggagtcgaaaggtggtaaaaagaagtccagcagtagtagttccttattttacgaagctcccctcggttacagcattgaagacgttcgtccaaacggtggaatcaagaaattcanatcttctgtctactcaaactgctccaagaggccatcctgagtaccagcgtgcaccgatcttcataatatagttatagctttctttactttccagtgtataattttcttctttc

SEQ ID NO: 11401 - DNA, 219 bp, Arabidopsis thaliana
  Clone ID: LIB25-096-Q1-E1-E6
cccacgcgtccgtccctctctacttccttcaacagaaatggaaacgttcctatttacctctgaatccgtcaatgaaggacacccagacaagctttgtgaccagatttctgatgcgatccttgatgcttgcttagagcaagatcctgaaagcaaagtggcgtgtgagacatgcaccaagaccaacatggtgatggtgtttggtgagatcactaccgctgc

SEQ ID NO: 11402 - DNA, 344 bp, Arabidopsis thaliana
  Clone ID: LIB25-024-Q1-E1-H6
caaaaacgttcgagccacagagatctgagtttctcttcgtcgatatctgcttgccgattcgcataatctctcatcgaagcacactggggacttttctagtcacatctgagtccgtatccgagggagacccagacggactctgtgaccagctctctgatgaaatccccgatgcatgccttgatgaatgccctgacagcaaagttgcttgtgagatatgctgtaagacctgcatggtcatggtcattggcaagatcactagcaaggttactgttgacgataagatgattgtccatgacacctgtcgtgccattggacttgtcactgatgatgtcgctcatgatgct

SEQ ID NO: 11403 - DNA, 417 bp, Arabidopsis thaliana
  Clone ID: LIB25-067-Q1-E1-A8
attcttcgctcgctgttcagattttgctttgaggctttaggctccccagatctctaatcgccgcagctttaagaaatggagactttcctattcacatctgagtctgtgaacgaaggacaccctgacaagctttgcgaccagatctctgatgcagtccttgatgcctgccttgagcaagaccctgatagcaaagttgcttgtgagacatgcaccaagaccaacatggtcatggttttcggtgagatcaccaccaaggctacgattgactacgagaagattgtccgtgacacttgccgttccattggattcatctctgacgatgttggtcttgatgctgacaaatgcaaagtccttgttaacattgaacaacagagcccagacattgcccaaggtgttcacggtcacttcaccaaacgt

SEQ ID NO: 11404 - DNA, 371 bp, Arabidopsis thaliana
  Clone ID: LIB25-009-Q1-E1-E12
atctctccgtcgctcctctaggaaatcacataggaacggttgtatcagttaatggctcatatcagaatcgtcatcatcggacatgccgaaatcctcggcgactaacatcttcgcaggtaaacacgtcgtcatgtctcgcaaacgattctgacaccacagttgcctgagaaactcggtccatcaccaacaaggacatagatcttgagtcaaggaatatcagggcaaacgttgctcactaacacaatgttcgcatcacataccatgtgactgtatgcattcctgcagacgtcggcctaaagtgtgataactgcacagttcgagtcagcatttagcaacggagacgagacaatgcacgaggagggaatagtaat

SEQ ID NO: 11405 - DNA, 445 bp, Arabidopsis thaliana
  Clone ID: LIB25-044-Q1-E1-G7
gttacgctatctcttaaacacaaacagctctgtccgaataatctctcttcaagtacctcttttttctgattctgtatatcgccatgaattactgatttccctctctataaacccatcaaagtaaaccaatttctcctgtgacttgtacctaactcgatcttaccagactggtgatggcgtctttgaaccctttcgatcttctaggagatgatgctgaggatccaagccagctcgctgtggctttgtctcagaaagtcgagaaagctgctgctgctgttcagcctcctaaggccgctaagttcccaaccaagccggctcctccttctcaagcagtgagggagtcgaggaatgctcctcaaggaggtcgtggtgggactggtggacgtggtggattttcccgtggcaggggtaatggtggatacaaccgggacaacaggaacaatga

SEQ ID NO: 11406 - DNA, 429 bp, Arabidopsis thaliana
  Clone ID: LIB25-027-Q1-E1-D7
cacatatcggagatttgaagccatgggaagaagaaaaatcgagatcaagcgaatcgagaacaaaagcagtcgacaagtcactttctccaaacgacgcaatggtctcatcgacaaagcgcgagaggtttcgattctctgtgaatcctccgtcgctgttgtcgtcgtatctgcctccggaaaactctatgactcttcctccggtgacgacatttccaagatcattgatcgttatgaaatacaacatgctgatgaacttagagccttagtaagtaattagctaagaacgtcattctaatattcttctggatgcggtttttggtgttatgaaggatagaagcgctgttcaagccggagaaacctcaatgttttgaactcgatcttgaagaaaaaattcagaattatcttccacacaaggagttactagaaaca

SEQ ID NO: 11407 - DNA, 385 bp, Arabidopsis thaliana
  Clone ID: LIB25-085-Q1-E1-B10
cttcttcttctacttcgtcctcatcatcgtcacatagatcctcctttttcgttaattggggagagatatactttcttttgaggatcagatcgtgacagggtttagctcaaggagagggtgagaaaaagaagaagaaggtgagaaaagtgaaggcaaggctttgaggatgtcttttacaggaactcaacagaaatgcaaggcttgtgagaagactgtttatgctgttgagcttctctctgctgatggagttggatatcacaagtcttgcttcaaatgcactcactgcaaaagcaggcttcagctgagtagttactcatcaatggaaggtgttttgtactgtaagcctcattttgagcagctctttaaggagagtgggagtttcaac

SEQ ID NO: 11408 - DNA, 387 bp, Arabidopsis thaliana
  Clone ID: LIB25-003-Q1-E1-H3
accacacgtccgctcaaaaccaaaatcactaaagaggagaagattgctaaagtttgataaaacattccaaaatcaatggctgataggatcaaaggtccatggagtcctgaagaagacgagcagcttcgtaggcttgttgttaaatacggtccaagaaactggacagtgattagcaaatctattcccggtagatcggggaaatcgtgtcgtttacggtggtgcaaccagctttcgccgcaagttgagcatcggccgttttcggctgaggaagacgagacgatcgcacgtgctcacgctcagttcggtaataaatgggcgacgattgctcgtcttctcaacggtcgtacggacaacgccgtgaagaatcactggaactcgacgctcaag

SEQ ID NO: 11409 - DNA, 390 bp, Arabidopsis thaliana
  Clone ID: LIB25-114-Q1-E1-B5
agggagaagattgctaaagtttgataaaacattccaaaatcaatggctgataggatcaaaggtccatggagtcctgaagaagacgagcagcttcgtaggcttgttgttaaatacggtccaagaaactggacagtgattagcaaatctattcccggtagatcggggaaatcgtgtcgtttacggtggtgcaaccagctttcgccgcaagttgagcatcggccgttttcggctgaggaagacgagacgatcgcacgtgctcacgctcagttcggtaataaatgggcgacgattgctcgtcttctcaacggtcgtacggacaacgccgtgaagaatcactggaactcgacgctcaagaggaaatgcggcggttacgaccatcggggttacgat

SEQ ID NO: 11410 - DNA, 252 bp, Arabidopsis thaliana
  Clone ID: LIB25-084-Q1-E1-E6
cccacgcgtccgcggacgcgtgggcggacgcgtgggctcaaaaccaaaatcactaaagaggagaagattgctaaagtttgataaaacattccaaaatcaatggctgataggatcaaaggtccatggagtcctgaagaagacgagcagcttcgtaggcttgttgttaaatacggtccaagaaactggacagtgattagcaaatctattcccggtagatcggggaaatcgtgtcgtttacggtggtgcaaccag

SEQ ID NO: 11411 - DNA, 410 bp, Arabidopsis thaliana
  Clone ID: LIB25-111-Q1-E1-B3
accctaactctttgctcttctcttcccggcgatctatctctccgatttgggtattgaaatggcaactcctatggttgaagatacgtcaagcttcgaagaggatcagcttgcttccatgtccaccgaagatatcactagagctactcgtcttctcgacaacgagattcgaattctcaaggaagacgcgcaaagaacaaatctagaatgtgattcttacaaggagaagattaaggagaatcaggagaagattaaactcaacaagcagctgccttacttggttggcaacattgtcgagattttggagatgaatccagaagatgatgctgaggaagatggtgcaaatattgatcttgactcgcaacggaaaggaaaatgtgttgtgttgaaaacgtctacacggcagaccatct

SEQ ID NO: 11412 - DNA, 410 bp, Arabidopsis thaliana
  Clone ID: LIB25-066-Q1-E1-C8
ctcctctccctttgagaaatccctaactctttgctcttctcttcccggcgatctatctctccgatttgggtattgaaatggcaactcctatggttgaagatacgtcaagcttcgaagaggatcagcttgcttccatgtccaccgaagatatcactagagctactcgtcttctcgacaacgagattcgaattctcaaggaagacgcgcaaagaacaaatctagaatgtgattcttacaaggagaagattaaggagaatcaggagaagattaaactcaacaagcagctgccttacttggttggcaacattgtcgagattttggagatgaatccagaagatgatgctgaggaagatggtgcaaatattgatcttgactcgcaacggaaaggaaaatgtgttgtgttgaaaacg

SEQ ID NO: 11413 - DNA, 392 bp, Arabidopsis thaliana
  Clone ID: LIB25-115-Q1-E1-B9
gaaatccctaactcattgctcttctcttcccggcgatctatctctccgatttgggtattgaaatggcaactcctatggttgaagatacgtcaagcttcgaagaggatcagcttgcttccatgtccaccgaagatatcactagagctactcgtcttctcgacaacgagattcgaattctcaaggaagacgcgcaaagaacaaatctagaatgtgattcttacaaggagaagattaaggagaatcaggagaagattaaactcaacaagcagctgccttacttggttggcaacattgtcgagattttggagatgaatccagaagatgatgctgaggaagatggtgcaaatattgatcttgactcgcaacggaaaggaaaatgtgttgtgttgaaa

SEQ ID NO: 11414 - DNA, 413 bp, Arabidopsis thaliana
  Clone ID: LIB25-018-Q1-E1-H10
ctcattgcttcatcattaccaaatcatcaacttaatcgtttctctcaaatttagggttttctcttttctcgaaagtcttgcggttttctgaatcatctctatctggtttgagggtttcgtttgatatctggagaaaggggtttctggaaacaaggagttcataattcgcgatcttgatctatcgatcttcatttatatataaaagcgtgaatgagattatgatggagtcgaaaggtggtaaaaagaagtccagcagtagtagttccttattttacgaagctcccctcggttacagcattgaagacgttcgtccaaacggtggaatcaagaaattcaaatcttctgtctactcaaactgctccaagaggccatcctgagtaccagcgtgcaccgatcttcataatatagttata

SEQ ID NO: 11415 - DNA, 445 bp, Arabidopsis thaliana
  unsure at all n locations
  Clone ID: LIB25-117-Q1-E1-B3
cacacncatggcttcttcttcttcttcttcttcctccatcacaatcatcaccaccttcctcttccttctcctccacacaaccgccaaaaaaacctacatcatccgcgtcaatcactccgataaaccggaatcattcctcactcaccacgattggtacacatctcaactcaattcaagaatcatctcttctctacacttacacaacctccttccatggcttctccgcttacctcgactccaccgaagccgattctctcctctcctcctcaaactcaatcctcgatatcttcgaagattctctctacacacttcacactacgcgtactcctgagtttctcggtctcaattccgaattcggtgttcacgatntcggttcntcntctaacggngttatcatcggagttttaagatactgggcgtttggctgaatctagaagcttcgatg

SEQ ID NO: 11416 - DNA, 371 bp, Arabidopsis thaliana
  unsure at all n locations
  Clone ID: LIB25-117-Q1-E1-B5
tcnagngnnngnctnntnagataacgagtggggttacagccaaagagtggtggatttggctcacctagtggctagcaagtggccgggagcggaagctgttggaagtggagatcctttggaggatttctgcaagacaaacccggctgatgaggaatgcaaagtctatgactgaacaactttgatcatttctttctttatttttcaccaaaacaatactttgtatcatgagttacttattcgaaatcgtactatgcatacttgtttttctcataagattttcttgtctgatgaacaactatatgttaagactgagagaattgtatttgagaaaaaaaaaaaaaanaaaaaanaannannanaaanaaaaaana

SEQ ID NO: 11417 - DNA, 518 bp, Arabidopsis thaliana
  unsure at all n locations
  Clone ID: LIB25-117-Q1-E1-B6
ngngnannttaaacttctcccgntcggnaacggtcacagnattcccgggncgacccangcgtcangttgaaannaaaacaataaacagtcgaaattctccggcgaagatgagaaccggaaaaggaaatcaagaggaagaagattacggagaagaagactttaactctaaacgtgaaggtccttcttccaacactactgttcatagcaacagagattcaaaggaaaatgataaagctagtgcgatacgttctaaacattcggtcactgagcaacgtagaagaagcaaaatcaatgaaagatttcagatattgagagaactaattcccaacagtgaacaaaaacgtgacactgcttcattccttttagaggtgatagattangttcaatnattacaaganaaagtgcaaaagtntgaaggntngtatccangttggagtcaggaaccaacaaagttgacgccatggaggaataatcattggcgaattcaaagtttggggaaccacccagtagctataaat

SEQ ID NO: 11418 - DNA, 419 bp, Arabidopsis thaliana
  unsure at all n locations
  Clone ID: LIB25-117-Q1-E1-B8
aactgtcgacaaaaacaccagcttggcgagaaaagttttccgtcttttcaagtttgtcaatgattttcacggtcttatcagccccgtgcctaaagggactccacttcctcttgtcttactcgggaagtcgaagaatgcgctcttgtctacctttttgtttcttgatcaaatcgtctggcttggtagatccggcatatacaagaacaaagaacgaactgaattgcttggacgtatatcacttttctgctggctgggatnatccgtttgtacaagtgcagtcgaagattggtgagcttggaaggntctcttcatctatgaagaagatggaaaaggaactcaaagctgatgatgagctgtatcgtgctaagcttcagaaatcaaacgacagaactctagctttgattaaatcaagcatggac

SEQ ID NO: 11419 - DNA, 498 bp, Arabidopsis thaliana
  unsure at all n locations
  Clone ID: LIB25-117-Q1-E1-C1
ttagccngtctagtcgggtctganacnttccacaggccgaccnacccgtcnaatggcttctgattcttctctcggcaacaccaacgacggtcctccttctcccggagaaaacgtttcaagccctatcgaaaacacattatccttccccggcgnacttcaacgtngccggcgaggaagatcctctactcccacgcaattcgcaactcctccaccaccgccttcacgtctcgcatcatccaattccactcctccaacatctcgtccttccgccgccagatctaaaggaagaaatggacacggaggtggcggtggtggcggtggtggcggagaccaaggacgccaatgtccactgacgagccactgccttcttccgatgacggtgaagaagacggaggcgacgatactactccgactttcgtttggggaactaacatcaatgtgcaagatgttaaatccgcgantgaaatgtttgttaagcanttcanagaaactagagaa

SEQ ID NO: 11420 - DNA, 465 bp, Arabidopsis thaliana
  unsure at all n locations
  Clone ID: LIB25-117-Q1-E1-C2
ggcaangcatatgcacagattgcaataggcacagatgatgtgtacaaaagcggtgaagttattaaagataagtcaaaccaagagctaaggaggaaagatcactagagaaagccggacctcttcctggactcggcaccaaagattgtctcattccttgatccaagatggctgggaaaacggttttggtggacaacaaagattttctcaaggaactggaatgagaagagcgatgaatgaaggtcgagatcacaaaaccataataataaaaatgtgatcataaaataaaaggaagacttagagtttgatctaaaataagaagatgtggtttantttgtgtcntgcnangtgtgtgtgcncctttcctttgtccttgagcctaaaagttaaaactccnagtcnatatggacctgaataaaaatatttccaccaccttgaggttttggtgtttgcggttatggacggttt

SEQ ID NO: 11421 - DNA, 511 bp, Arabidopsis thaliana
  unsure at all n locations
  Clone ID: LIB25-117-Q1-E1-C4
gacttcnanctgctcggcagccgtcacagactcaagggtcganncacgcctctaaatcgagncanntnaaataacatcccttgtgatcaaacaagtaaaccattcaaaagatgaaaggaagaattttgattttgagtttgctcataatgagtctggtcatggcacaagttcaagtagaagcaaagatctgctgcccttccaaccaagctagaaatggctatagtgtatgccgtataaggttttccaagggaaggtgtatgcaagtgagtggatgccaaaactctgatacatgccctcgaggttgggtaaacgccattctcgaaaactcagctgatgctaccaatgagcactgcaagttagggtgtgaaaacttctgtgtgtggtgccatgaacaccctcaagaaccctgancaagttaaaatgtaaaggancctccggacaatgttccaanggatgttccaatttccgtaccaagagctatgtaatcccacctgggccgcctaaactgttg

SEQ ID NO: 11422 - DNA, 477 bp, Arabidopsis thaliana
  unsure at all n locations
  Clone ID: LIB25-117-Q1-E1-C5
ccggaacnggncaccaggncncgnggnncnntncaannctctacaatnagtcgtattacttctttttttttctctttctctcttggcttctctttagaaagtgactcaccagaaaaaaaaaagggtttttgcttttcgggtttagctaagaaaaatctttcaatcttccttaaatctttcaaaaccccaaaatgggacctcgttgctctaagctctctctctgttggtggccgacccatctcaaatcaactcacaacgaagcttctgatctagataacggaacggacgatttgccgtcgtttacggagtttagtttcgaccaactacgagctgctacttgtggattctctacagacagtattgtctccgaacatggtgttaaagctccnaatgttgtgtataaaggcagacttgaagatgaccgatggatccngttaaacgattcatanattcgcttggcccggaaacccnnaantt

SEQ ID NO: 11423 - DNA, 163 bp, Arabidopsis thaliana
  unsure at all n locations
  Clone ID: LIB25-117-Q1-E1-C7
taangcgatgaaccagttgaagacaangangccttggtcgttgtctttctcctttggaagggcgttgcaggcagagcactttgaagacntggggaggaanagaggagaatgtgaagaaggctcaagaacgttcttggtcagatgcanagctanctctgaagna

SEQ ID NO: 11424 - DNA, 508 bp, Arabidopsis thaliana
  unsure at all n locations
  Clone ID: LIB25-117-Q1-E1-D1
ggngaantgtttaancttnnntgnaggntctcaaagaattcanagggtcgaccnacgcgtcaactctatctctctcaatttcctcatctgggtcttcctcgtttgctccgcttaagcaccatgaaggtcaccgtcgtctcccgcagcggcagagaagtcctcaaagctccccttgacctccccgattcggcgactgttgctgatctgcaagaagcgtttcataagagagctaagaagttttacccgtcgaggcaaagactgactcttcccgtgactcctggatcgaaggacaaacctgttgtcctcaatagcaagaaatcactgaaggagtactgtgatggaaacaacaactccttaactgtagtcttcaaagacctgggggcacaagtttcctaccgcacactcttcttcttcgagtatcttggccctctccttatctaccctgtcttttactacttccctgtttacaagtttcttggttatggagaggactgtgtgattcatccgg

SEQ ID NO: 11425 - DNA, 481 bp, Arabidopsis thaliana
  unsure at all n locations
  Clone ID: LIB25-117-Q1-E1-D11
nnnngnnnnttngnaagctctacgccgcccanacacnggtcanggnntcncgggncgacanacgcntcnaaaatnantcgtantataataaaacaaaaaaatatcttttttttttctaataaaaaaaaaataataaataaatatgagatacacaaatgtgtccattttattaggcatgttggtgatctttgtttcaccaatggtgttcgcagatgatttgacaccaatcccagagggcaaaccccaagtggtgcagtggttcaatacccacgttggtccattggctcaacgtaaaggcttagatcctgctctcgtagctgctgaggctgctccacgtatcatcaacgtgaatccaaagggaggtgaattcaaaacactaacagacgcaataaagagcgttcccgcagggaacacaaagcgggtgatcataaagatggctcatggtgagtacagagagaaggtcactatcgacaggaacaaa

SEQ ID NO: 11426 - DNA, 495 bp, Arabidopsis thaliana
  unsure at all n locations
  Clone ID: LIB25-117-Q1-E1-D2
ttgangcctcctggccatnccgcccaatngaaangcctggtttngggntttttngccttccggctttacaattcctaaacaatttagccttatnccgaangaaatccnggtgatnttgacnagaatttgcnngatttgggtggtttaagttncaaagccctcaagaaaattgtgatctccaaggctcacaaaagggggataagatcaagggttcactatcggggaaagttaactgatggaactgtctttgattcaagttttgagagaggtgaccctattgagtttgagcttggaactggtcaagtcatcccaaggatgggaccaagggttattgggaaccttgtgttnggtganaaaganaaagttngaaatccccatccaaagccttgggttatgggtgattacggntcnncaccaaaaatcccggggtggggcnacactgatattcnacaccgaacctgttgctgttaacggagaaccatccagcgaagcgaa

SEQ ID NO: 11427 - DNA, 341 bp, Arabidopsis thaliana
  unsure at all n locations
  Clone ID: LIB25-117-Q1-E1-D3
ggnattananncagnancctncnattgttcgncncgtcaggcctactcgtcctgataanggctcgtcgtttgggttacaaggccaagcanggctttgttgtgtaccgtgtacgtgtgagacgtggtggacgcaagaagccaattgcctaagggtantgtgtatggtaaagccaacaaaccaagggaagtgacacaactcaagttccaagcgtaacaaagccgttccgttgcctgaaggaaccttgctggcaaggaaaanttgggttggtctcaagaanttgtcaactccntaactgggctcaaatgaaggattccgacctacaaagttactaacgaagaat

SEQ ID NO: 11428 - DNA, 502 bp, Arabidopsis thaliana
  unsure at all n locations
  Clone ID: LIB25-117-Q1-E1-D5
gnnannttaananccntangntcnnaacaanacataggncncgtngtncnttncaannccctanantgagtcgtattagcttttggaacgatttacgaatccagatttgttgaatcgtcacaagcagactccgttaatgttggctgcgatgtatggaagaatctcttgtgtgaagaagctagctgaagttggagctaatattttgatgtttgattctgtgaatcgaagaacatgtttgcattacgctgcttattatggacatgctaattgtgttcaagctattctctctgctgctcaatcaagtcctgttgctgtccattggggatatgcgagatttgtgaacataagagatgataaaggagcgactccgttgcatttagctgctcgacagagacgacctgaatgtgtgaatgttttgttggatagtggttctcttgtttgtgcatctactagtgtatatggttctccaaggaagcacacctcttcatttagcagctagaag

SEQ ID NO: 11429 - DNA, 428 bp, Arabidopsis thaliana
  unsure at all n locations
  Clone ID: LIB25-117-Q1-E1-B2
cnanattcaacnaacgccaaaaggtttccgnccgccaaggccgntancgggtttccttccnattcttaacnttnaactncaaattaaattnggaaaatcctccttgatncccnatgacaagggattcaaaggactgtatttgatctaccagaagagatcgcgaaagagctcctagagaaagatgtccccgaaggcaacagtttatccatgataacaaagttacctccacttcaagatgacggaccatctagtgataactacggacggttctctagcagagacangatgcctaaaagaagaagaagttccaaaaggtcaanaagcgtaaaagaagatnatcacnaagccntnataattggggaagtnatgatgacagaagtaataaaaagancaatggtggaagaaacaactggtcccgaagtggtaat

SEQ ID NO: 11430 - DNA, 487 bp, Arabidopsis thaliana
  unsure at all n locations
  Clone ID: LIB25-116-Q1-E1-H11
nngnnnngngnnngtanttcnacgccggtttgtaccgnccacnaattcccgaggtcgacccacgcgtccnatgagcttaagctcaaggctctcaangaaaagagcacattgctcactaccctttaccagtccaccggtttgggccaacagcaaaacggtttcctcaactgcaccaaatctaacggaaagatttactttggttctggtgtgaaaggcgctcctcaaaccgctgaatacatcacaaccgttttccgtaacccgtacaatctctctgtggtccagatcagcatgcccattgtggcacctggactcggggtctccggttaaggttcctccaccaccacccatgtcttcaccaccggccccatctcccaagaagggtgcagccactccagctccagctcctgctgatgaangggattatgcagatgctcctcctggtttagctccagaaaccgcacctgcatctgcaacatcagaaagtgat

SEQ ID NO: 11431 - DNA, 490 bp, Arabidopsis thaliana
  unsure at all n locations
  Clone ID: LIB25-116-Q1-E1-H3
anttctacgcnnccggtgccggtcanaaattcaangggncgacgacgcgtcaanggacgacgtgggccggngttaaaagcttcggtggnggncncttgacttcncnganaaaaagaaaaggaagctgagtcncattttagattcagctcacgaggaagtgacgacgatgtctcattctagaagactttcgttggaacctgctatagattcaatcactggtcgatttcgtgatttacagagaaatgatgatgacgtcaacaaacctgattttcgagaactcgatctaggttctcctgtttctaccttaatgccacgtggctctgcttcttcttccgctgctgcgactcctactagcagctctggctcttctggctctgcttctggtaaaccgtcggtgagttctcagatggctaaacngttagatgatgcctacaagantcattcccggggaactttcaanccccggnttcggaatgccgacaacaaccng

SEQ ID NO: 11432 - DNA, 466 bp, Arabidopsis thaliana
  unsure at all n locations
  Clone ID: LIB25-116-Q1-E1-H4
tgtgcccntcaagnntcanaggttcncgggccgacncacgcgtcnagtantcnnaanannttccctgcgacgcacccaacctccgtctctctctctctcagatcggcggccatctccgtcgagtaattgaaatctctctcagccgttggattcgaattccgccgcatcttcatatacctcgtttcaatcctgcggaaccctagttgctctgaattgtggtttgctactgtgataagttcttcagtggtagattaggaagcaccaccaatggagattgtgtaagacatattcattacaagctctcttttaaggattatggggtctgtttgctgtgtggctgcaaaggacagaaatgttccagtggagctattgataattcagtgtgttcacatgcnggantttncncggacaacaggangcgtgttctgntgagattaaaattctctaatcanangttggagnaatg

SEQ ID NO: 11433 - DNA, 486 bp, Arabidopsis thaliana
  unsure at all n locations
  Clone ID: LIB25-116-Q1-E1-H6
gttcagcggcccngtaacggtcacaggactcnngggcccgacccacgcgtcanaggaatctgcgtgttgtttgaaatagcaacatcatttaacagctagcagataaagtggagttttctttcagttctggggtttgaaaggtgagtatgtttttgagtggcatgtaactccggcagtggagtttgggtcagccaaaagcagttgttggcgtatacataaaagtaggagagttagcaaagaattcatcatttctatcttggttatttgtgttgtgcaggtgtgcttatatgggtcatgatggccagcctgcttctatctcctgatttctcgtgtttgatccctgaagttctacttctgaaaatctttactgatatattgtgtataattgctagaaatcctcaattcctctgaaacttggttttgcacaataatanggtgattgcattgacagagggaantcttgcaactgcaaagcaaaatgagatt

SEQ ID NO: 11434 - DNA, 494 bp, Arabidopsis thaliana
  unsure at all n locations
  Clone ID: LIB25-116-Q1-E1-H8
tccnngtngcccntcaaagnntcacaggattcncgggccgacncacgcgtcnaagtattcttaaaagcaaccattggtgtgattgactctataagagaattcgtcagcgtgaagcaatctccaatctaatcgcagcatatcttctccgattcctattcgtctctgcaattgaatcttccggtaggcgaagatggcgacgtctgcgaggatttgttgcggaggaggaagtgcatgcgccgttcgttgtgatcgtcgcacgttaaatttgaattctcgatcgtcatgtgttgttccagtgacgaatcgacggaatatgtgtgcgatcgggaagatttcgatgtcgatggaggatttgtcaccaccgtctgcggcggtgaagattgaaaggatcggtggaagggaaacgcggtggatntgttgtgtccaagggaagaanctanatgtngtggttganaaattcggtgggttgaaattcgtgaaagaatcttaaaaga

SEQ ID NO: 11435 - DNA, 55 bp, Arabidopsis thaliana
  unsure at all n locations
  Clone ID: LIB25-116-Q1-E1-H9
ttgctttctgnaaaacnttttcgaattttcaaaacaacatcccttgatttggcat

SEQ ID NO: 11436 - DNA, 483 bp, Arabidopsis thaliana
  unsure at all n locations
  Clone ID: LIB25-117-Q1-E1-A2
ccgncanngnccaagggncgnngcacnccncnagattnactcctataanccccnaaaggcaangtcctncggtgtgatgtgacggggaaggttttaatgaaatgttnccttncgggaatgcctgatttgaagttggggttgaatgataaaattggtcttgagaaggaatcagaaatgaaatctcgcccagctaagagtggtaaaaccattgagcttgatgatgtcacatttcaccagtgtgtgaacctgaccagattcaactccgagaagactgttagttttgtaccaccggatggagagtttgaactgatgaagtatcgaataacagagggtgtaaatccgnccttccgtgtataacaacnatcnaagaactggtcgtacacgtntggaagtnaatgtcnaggtcnaaagtgtgtttggtgccaaaatgtttgcccctggggtcgtggttaaaattccagtgccaaaacaaacagccaagac

SEQ ID NO: 11437 - DNA, 492 bp, Arabidopsis thaliana
  unsure at all n locations
  Clone ID: LIB25-117-Q1-E1-A3
tanccggnncggcncgcctcacacagtcaaaggactcccgggncgacccacgcngncaacttntnaatttggttnctnccnacctnanaaccnccntgttgaacctncaattncgttttttngncnaattncgancncgattttgacgattcgttttgtttgtgatctgattttgagttgtttctccattacgcttggattttgacgttttagatctcaaaaggaagtacgatcatggaggaaggttgcaactgtgtttactcaaggatggcctcaaaattcagcattggtttattgattattttggcgatcgttcttctaatggttcgtgtactgtatgttatataccgatgtggcaaaccacttccaaaaggagcttcacagtcttttactactcttattgttcttggttctgggggacacacagcagagatgttgagtctcctctctgttttgcgggaaggatagatttacaccaaaggttttacattg

SEQ ID NO: 11438 - DNA, 506 bp, Arabidopsis thaliana
  unsure at all n locations
  Clone ID: LIB25-117-Q1-E1-A4
aangttacgccnccggtagccgtcaaagaattcangggtcgacccacgcgtccgatttgggcttagctttttcgtccccaaatattgcgcttcatcgagattgctagggtttctcctcttcgatcttcgctgctcatcaacatctattgattcaattttcgtgctattgtttccctctctgatttcttaatcggaaatttcgtctcgattcgattcattaggttccatcactcttttctgatcggtgaaaggaggagaagacctgttgttttcttatgtaagtgattctgatattcgttatctgttggctggtttgatgaggaagaagcggaaaggtagtgaaactgaagggtgggaaaaattaacaaatgaattancatgttcaactgcatcacgatnaaccaacttcaagncccacttttcactaaaagggtatgcnaaacttaagaaacggtgttaggagactgaaactgtcnantcngttgggtcccttaaganacgaaatg

SEQ ID NO: 11439 - DNA, 517 bp, Arabidopsis thaliana
  unsure at all n locations
  Clone ID: LIB25-117-Q1-E1-A6
ngnnnnnnnttnaacttctcacgccgcncagtaacggtcacagaattcccggggncgacccacgcgtccnctattttctcagtctctctctcagataatggcaatgttgggcttggttttatctgttcttactacaattcttgcattgtctgaagcaagaatcccaggagtttacaatggtggtggttgggaaactgctcacgccactttctacggtggctctgatgcttctggaacaatgggaggagcttgtggttatggtaacttatacagccaaggctatggtgtgaacacggcggctttaagcacggctctgttcaacaatggttttagctgtggtgcttgttttgagctcaaatgtgctantgatccaaaatggtgccaatccggtaatccttcaatcctcancaatgcgaataaattcngtcctccgaactttgctcaacctaatgacaatggtgggtggtgttaacctcccaaaactcaacttgatcttgcaatgcctaaggttcccaaa

SEQ ID NO: 11440 - DNA, 502 bp, Arabidopsis thaliana
  unsure at all n locations
  Clone ID: LIB25-117-Q1-E1-A7
tnngnannttanaacgntnacncgccganagcggtcaaaganctcccgggccgacccaancgtcnacgatgaaaagaaattgtttggtgttaccactcttgacgtcgtcagggccaggactttctatgctggaaaggcaaatgtcccagttgcagaagttaatgttccggtgattggtggtcatgctggggttactattctccctctcttctctcaggcaactcctcaagccaacttgtcaagtgacatacttaccgcccttactaagcgtacccaagatggaggtacagaagtcgtggaggcaaaagcaggaaaaggttcagctacattgtccatggcctatgccggagcattgttcgctgatgcatgcttgaaaggactcaacggtgttccagatgtcatagaatgctcatacgtgcaatctacaatcaccgagcttcctttctttgcctcgaaggtgaggttggggaagaatggtgtggaggaggttcttgacttggac

SEQ ID NO: 11441 - DNA, 521 bp, Arabidopsis thaliana
  unsure at all n locations
  Clone ID: LIB25-117-Q1-E1-A8
ngnnnnnnttnaacttctcacgccgctcggtancggtcacagnattcccgggncgacccacgcgtcnaagaatggctagatactcaagaaccgcgagtctcataaccatagttagagaccgcgggtcaggagaagttaaaaccgaaggcagaataaactacaccgtggacaaaaccgacagagataatctcaaagctgggcttagagagtcgctaaggatactaatagcagctggagcagaggaagtgggaactcacagaagcgacgggcagagactaatatgcaaaggtgtcaatgagaattcgatccaagagtttttagactcggtgagtacagaggaaggagcaaagggaatgactgagaaatggaacgtttataagctcaactcatcagatgggaagctgtnnaattggngaaaatgaaaaagaaagtgcaatanatttgaatgganaaaatttggaaanaaaanaatttgtttgtttccaatgcaattgcnttgccnaatgccggttggngtnaac

SEQ ID NO: 11442 - DNA, 488 bp, Arabidopsis thaliana
  unsure at all n locations
  Clone ID: LIB25-117-Q1-E1-B11
ngnnnnggggngggnnnttngnagccnaagcgncgaccnggtcaggcnctcgcgggncgnnncacgcntctaaaatggttcatctgntggagaaaagcttcgagacagagaacaagctagagcctgaacgcaagactcagcttgccaagaagcttggtctacagccaaggcaagtggctgtctggtttcagaatcgccgagctcgttggaaaacaaaacagcttgagagagactacgatcttctcaagtccacttacgaccaacttctttctaactacgactccatcgtcatggacaacgataagctcagatccgaggtacttatacatgggactattatttatctcaacaagattacaaattgaatgatttaccttaattggtccaaaggagaaaaataaaanaagcatcaagtgaaaagagaatatgcttttcctatttttcaacacaagctgatagagagaatcccatccatccatntatatata

SEQ ID NO: 11443 - DNA, 487 bp, Arabidopsis thaliana
  unsure at all n locations
  Clone ID: LIB25-117-Q1-E1-B12
ntgnnggttnngtaacttccacgaagnncacgcgnccgttacaggtcanaggnctcgcgggncgacccangcntcnacccacgctncngcggacgcgtgggatttgttgtgttcccggcgacttctacttttcacctttcttctcggcgtcgtctaatttctagggttcccctgtatttcaccgtcangagcaaatccaacatgtcgtcgctgcgtaatgctattccacggcctgctcataatgagcgatctcaaccggaagcgaggaataggtttggcatcctcgagaagcataaggattatattatccgagctnatgcttatcacaaaaagcaggaaactttaaagatacttaggcanaaggctgcattcaagaatccagatgaattcaactttaagatgattaatagtaaaacagttgatggacgtcatacaccaaaagatgangtaaataaatactctgcggaagagcttaagantatgaata

SEQ ID NO: 11444 - DNA, 203 bp, Arabidopsis thaliana
  unsure at all n locations
  Clone ID: LIB25-116-Q1-E1-H10
aaccggaggaaacgaatccntgggnctcctncgcaacggtaancattggttggggtgaaaaantcctgaatgaaggtggttgaacggtcaagaaaaacccccattgcttcatgcaaagggtttaagncantttaagaggtagatttaaggtaactttcctaacggggacatttacgtttccaatcctaatncgtgggacanac

SEQ ID NO: 11445 - DNA, 423 bp, Arabidopsis thaliana
  unsure at all n locations
  Clone ID: LIB25-116-Q1-E1-E5
gctctctcgtgtctgcccaaccctccgctataatcgtatctggtctgctcatgcgcgtgaaatgccacgcgccaccctccttctcctccaacccaacttcttccactcttcccccaaaactgctcttgtgaatcgtctcgatgttacttcatcggagttttcttccatgttccgtcggagcttccacgctttacgcagcaccgtaggagactggagaaagcttccgaaaccgccgggtcaggtttttgcggagaggagagaatacaggaagattagaaggagagctccgaagaagaaacaggaattggagcttagtgttagtatctgcatcgaagaacagcttcctgatgatttcgagattcagaatattgcagaaatgcttcgtcccaatgtactaangcaatgacattggctttcaatggt

SEQ ID NO: 11446 - DNA, 422 bp, Arabidopsis thaliana
  unsure at all n locations
  Clone ID: LIB25-116-Q1-E1-E6
gcccacgcgtccgcccacgcgtccggtcagcaacagtctcagcaaccaagcagtggtggtagctcagccccaccaacagataccacagggtacaattactaccagcatgcttctggttatggccaagctggtcagggataccagcaagatgggtatggagcttacaatgcctcgcagcaatcgggatatggtcaagctgctgggtatgatcaacagggtggttacggcagcaccactaatccaagtcaagaggaagatgcatctcaagccgctccaccatcgtcagctcagtctggacaggctgggtatggtacaactggtcaacagccgcctgctcaaggtaatactggtcaagnaaggtatgganntctccaacttctcaggctggttacagcagccagccagcagcagcttacattctg

SEQ ID NO: 11447 - DNA, 489 bp, Arabidopsis thaliana
  unsure at all n locations
  Clone ID: LIB25-116-Q1-E1-F10
nngnnnnnggnnnngnaacttctacgccggnntgtaccggccccacaaattcccanngncgacccangcgtccagctcggcttcttgatgaagaaaatgcattctcagctaccacaaccacccttggctcaggttcaggttccaccggaattggttttggtgcaggaacagggtcaagtggttcaggttccacgggattcggttttggtgcaggatcagggtcatctggttcaggttctactggaagcggtctcggtgcaggtacagggtcaataccatcaagtggttcaggtcctggtcttctaccaactgccagttctgttcctggttctttagcgggtggtggttcaggttccttgcctaccactggttcagccactggtgcaggtgcaggtaccggttcagctcttggaggtggtccaggtgctggctcagctcttggtggtggtgcgggtgccggtccanctcctggtggtggtgccggttgcc

SEQ ID NO: 11448 - DNA, 486 bp, Arabidopsis thaliana
  unsure at all n locations
  Clone ID: LIB25-116-Q1-E1-F11
tgnnnnntggnnngtanttccacgccgnnntgtaccgcccananattcccnaggncgacccacgcgtccanngtttttcatgggaaaggctgtgttaccaggaagagaagtgcctgcagtgttcgatcacagagccaaaggatattcattgaccattcgtccagacggtaacccttacaccagctttgtattttgcgttgtggtttcccgtaaccaaaaaagtgataaaaccattcctccctcactattgtggcgtcgcatcatagctcaagatgagggctatcccgttgaggtctggaaccgcataggagatgtcttcaaatatcgaacggaacatctattaatatttcacttcgactttctagaattcgacaacagggatatagtgttcgaattcagcagcgaatcccacgacttcgacattattgaatgtggtgctaaagtcttggccgaaaagagcatcaaagaaagctatgaatctgggtt

SEQ ID NO: 11449 - DNA, 502 bp, Arabidopsis thaliana
  unsure at all n locations
  Clone ID: LIB25-116-Q1-E1-F4
nngnaanttttaaactctcacgtgnccgtcaaagnattnaacgggncgacncacgcgtccnagcgccaagctcaaatgcagcgtagggaccctaatcatccttctcttggcggtccaatgaatgctattggttctgaagggatgattgggcagtctaatgctagtgctttggctgctaaaatgtacgaggaacgcatgaagcagcctaatcctatgaattctgagacatcccaacctcatcttgatgcaaggatggcccttcttaaatcagcaacaaaccatcatggtcagattgtccaaggaaaccatcaaggaggtgtttcggcagcgctgcagcaaattcaatcacgaactcagcagcccactgaaatcaaaactgaagttaatttgggtacatctccaagacaactgccagtggattcttctacaatttaatggcaagggaattctgcaatcaaacctggggatggggaatgcaggattaaaccctggaatnaantgg

SEQ ID NO: 11450 - DNA, 431 bp, Arabidopsis thaliana
  unsure at all n locations
  Clone ID: LIB25-116-Q1-E1-F5
acgaggaaagccaaagagagagagagagaaacaaaaatggcgtcacagagttgctacaatggaatccatcgtataaaaagggttcatcctctgattcactctctcacatttcatcgattctcctcatcttctcttccattcaaatctcacattccctcttcacaacaacagcttcgtattcgctcatcttcttcgctttctgatcttggaaatcgcaggcattgttcgtctactcgaggatttcaattttggtcatacaagagaagcgaagcagcgtcgccgttcaagacgaggtacagagaaaacgaanaagaagaagatatgacgattaaaccggcggttcgtatttccgacgggaatctaatcatcaaaaaacnggcgaattctaaccggtgtaccagataatgtcatcacgacgtcagcatcggaag

SEQ ID NO: 11451 - DNA, 410 bp, Arabidopsis thaliana
  unsure at all n locations
  Clone ID: LIB25-116-Q1-E1-F6
gttcttccgacttgtttaagataatttttcgactttgttcggatcttttgtagccttttgcagctttgaaacccagtttttttgaagctgtaaaattccaggagtttagatggattcttgcattgttggatggttgattagtctaccaagagaaggtaaatccccgcttgtcctaatagatcgttaaaagcgtcggttctacttttggttgattcaatcaagtggttgcggttgatggaaacgaaatatgaagatttggagttctcatcgtgttttgatgattctctcaagaatattttggatctggtcaactgaggtcaaatttccggtgagcgagtttaaatccaaccaattcttccggtgatnaatcccaaaangnaataagtaccataanaaggcaaaaggagtga

SEQ ID NO: 11452 - DNA, 273 bp, Arabidopsis thaliana
  unsure at all n locations
  Clone ID: LIB25-116-Q1-E1-F7
aaggagaacaagaacatttggatacagaagaattgacacaaacaactaccccatgacacaatacacattcttgttgtatcttcttcttttttcacacgagattattcttctatgtaaccatggcgaataattattgtaaagtctatacgcacgcagctatatcaaaagatataagcagtatctatatctacaagttaccgttaggtttaattaaaaaaaaaaaaaaaaaaaaaaaaaaaaaaaaaaaaaaaagggnngnnnnacaanaggntc

SEQ ID NO: 11453 - DNA, 496 bp, Arabidopsis thaliana
  unsure at all n locations
  Clone ID: LIB25-116-Q1-E1-G2
ggnngnanntttaaacnctcccgntcnnganangnccnagggncnntgcacnncnctagnntgaatcgtattataagaaacctccttaaagaacaaagaaaaaacttggtgaaatcgattctcttcaaagatcgtcttcctaatcactttcaacaactcgatcaatccttactgagacgatgccgaagaacaaaggaaagggaggaaagaacaggaagagaggaaagaacgaagctgatgacgaaaagcgagagcttatattcaaagaagatggacaagaatacgcacaagttcttcgtatgctcggtaacggtcgatgcgacgttatgtgcattgacggtgttaagcgtctttgccatatccgtggtaagatgcataagaangtttggattgctgctggtgacatcatacctgttggnccaagagattacaaggatgattaaancgatgttatacccaagtatagtcgatgaggctaggcttcttaaggcgtatg

SEQ ID NO: 11454 - DNA, 503 bp, Arabidopsis thaliana
  unsure at all n locations
  Clone ID: LIB25-116-Q1-E1-G3
aacttctacgccnnccggtgcccgtcananaattcaacgggtcgacgcacgcgtccacccacgantccgctttgtcgagaacaagatgggtttcagttgaanaggatcaaacagttcactgatattccctcagaatccgagtgggagagaaaagaaacccttccaccttcgaattggcccttccatggcaatgtacatctcgaagacctcaaggtgcgctacagaccgaacactccacttgtgctcaaggggatcactcttgacatcaaaggaggagagaaggttggtgtggttggacggacgggaagcgggaaatcgacattgatccaagtcttgttcaggcttgtagaaccatcaggagggaagataatcatagacgggattgatataagcactctanggctacatgatctcaagtcaaagattcggaatcattccgcaaagaaactgtcctcctttgaanggaaccgttaanaancaacatcgaccccgacaggancaat

SEQ ID NO: 11455 - DNA, 487 bp, Arabidopsis thaliana
  unsure at all n locations
  Clone ID: LIB25-116-Q1-E1-G4
nnnnnnntttnaacnnctcacgcgggtcatgtaancggttcaagggnccgacggaccgcgtncgaccaancctncnccggcccctngggttaaggaaatttncacantttncaagggtttggtgggtnggcaagttagatgatcttcccgaacaatccgttttacatgggttggaggtatccatgaggtggttgcaaaggcagagaagatcgctaaagagtcagcagcttaagagattgattcagatcttgcatgcttaatacttctcttttttttcctgacaataacgaaaaaaaaaaaccaatgcgtgcgactctccgaccaaacggaatctgagttccgtaattatagtttcttttggttcaaattccatgagagctgggcaaagatgatactgaacaagattcattcactgttaatccaatttttgggtgttttgcctcctttgttgaaataaagntgaaaatcttgcaaaaaaaaaaaaaag

SEQ ID NO: 11456 - DNA, 413 bp, Arabidopsis thaliana
  unsure at all n locations
  Clone ID: LIB25-116-Q1-E1-G5
atggaacatatggtagaatgttgagtttggctactgatgctttggcagagaacaaacttgagaccaaagacttatggcaggagccgaaggaacaagcttcggcgtggaagccttgtgcggatcaacgttctttgactcctgacgatggcaaaaatggatatattatggtaactgcaaacggagggattaatcagcaaagagttgctgtatgtaacattgttgttgtagctcgattgctcaatgcggctctcgtcattcccaaattcatgttaagtgacgtttggacagatgcaagtttggagatatctaccaagaggaacattttatggagtacttgtcgcccgataatccgataattaaagnaccaacaaaaagagcttcaacctctnaaccttgaagaatcgggtacgtct

SEQ ID NO: 11457 - DNA, 481 bp, Arabidopsis thaliana
  unsure at all n locations
  Clone ID: LIB25-116-Q1-E1-G9
ngnnnntgnnnngaanttnacccgncctgtaccgcccanaaattcccaggtcgacccacgcgtccgatttgtanagcgattcggtcttttgttaacccggaaaatcaagcttggtgtcttcctcctcacactcgtaaagtcgcaatgcccgatacacgaactctgtacacggtgctaagatcgcctcacgtcgataagaagtctaggagaacagtttgagatgaggttcangaaacggtttcttgtcatcaaagctcanagtcatgacttgagcangaagctgttttggttaaaacgttatcgtattcttggagctcaatatgaactccagttccattgcaagacccgtttggatatgactcaagtgttaggcaacatcaatgggtccaccaccaatgcttactgagatggntaaagacatcattttgtanaagtttcaagacccatccgggtactaagcaataattttnaancttacggt

SEQ ID NO: 11458 - DNA, 493 bp, Arabidopsis thaliana
  unsure at all n locations
  Clone ID: LIB25-116-Q1-E1-H1
ngnaantttacctgnccggngccgtcaaggantnnagggncgacgcacgcgtccacggtaaaangttctatggaaccataccgggagattgtatgcgagattgcttgtctccaaaacgtttctctctcgaataattacttcactcaggttggtccgaaatgtagaaaactcatcaagagaaaaattatggacgttagtatgaattgtatacttgatcttccaaaccagaaacgccatcggagtgtgctaagttcttcatgcggaaacagacttgtcctaattccaagtctttgtttactgtcccttgtgataagaatccaaaccggggtaaaccggatcaagaacgattggaggaggaaaaagctcaagtttctcatccggtaacttacaacacacttaacccggaccggcttcggaatcctataacccntgggcgttttttcctaacaagttacgatatatatatatatatatatatagccaaagccaantt

SEQ ID NO: 11459 - DNA, 509 bp, Arabidopsis thaliana
  unsure at all n locations
  Clone ID: LIB25-116-Q1-E1-E4
nnnnngnaacgtntacgccnnccngtgccgtcanagaattcaaggggncgacgcacgcgtccnactttttacgtcaagcaatgggagggttctgatncaanctacatccaagcancaagagcatagattaagattcgaatttcatccctaaccaaccagaagaaatacccgtgattgatctctcgcgcctcgatgaccccgaagatgtccaaaacgttatctcagagatcggtgatgcttgtgaaaaatggggattttttcaggtgcttaatcatggtgtgccttctgacgcaaggcaacgtgtggagaagactgtgaagatgtttttcgatttgcctatggaagagaagataaaggtgaagagagacgatgtgaatcctgtagggtatcatgatggagaacacaccaagaacgttaaagattggnaagaagtgtttgataattaattcaaaagattcaaatgggncattccntcaaacaactgatcctgaagatgaaggcttaagact

SEQ ID NO: 11460 - DNA, 453 bp, Arabidopsis thaliana
  unsure at all n locations
  Clone ID: LIB25-115-Q1-E1-D2
cangncnagngggncgagcagcccncnatattaattcgtagaaggaatgaaaanaaaaggaanccgtgtccctggnattggtcacaggataaaggagcagagacaacagagacaaaagagtggagctgcttcagaaatttgcacggtctaacttccctgcagtgaagtacatggaatacgcagtccaagtntagacatacacactgtctaaagccaacaacctggtactcaacgtcgatggagccattggatctctcttcttagaccttctcgctggaagtgggatgttcacanaacaagagatagacgaaatagttcagatcggttatctcaacggcctcttcgncctcgctcgatccatcggtttaatcgggcacacattcnattagaaaanactgaagcncccnctgttacnanacccgttgggnaaattcttgtttaccccagtttncc

SEQ ID NO: 11461 - DNA, 87 bp, Arabidopsis thaliana
  unsure at all n locations
  Clone ID: LIB25-115-Q1-E1-D3
gaggtacaagttagcgggagcatcnanacgatcgttaacttccgttggagtccaaccnaggcgaacgcaccaggtggtcttncgtct

SEQ ID NO: 11462 - DNA, 366 bp, Arabidopsis thaliana
  unsure at all n locations
  Clone ID: LIB25-115-Q1-E1-D4
agcntcnaanttgactccnggaacncaaactgaactccgcttctaagatccttcgacgganagaaagatatttcagatctgatcggagagaatcattctcanaatttctccattctaatttctctttctcganagagtgaanagagacaacanggaaggaagaggaaaaatggaggaattcttagataagttgccgcagatggatctgatgcgttcggagaagatgacncttgttcagcttatcatccctgttgaatccgctcancgttccatcacttatctcggcgagctcggacncntgcagtttcgcgacntaaatgctgataanagtccctttcaacggggcatttgcnaatcaggtnanac

SEQ ID NO: 11463 - DNA, 518 bp, Arabidopsis thaliana
  unsure at all n locations
  Clone ID: LIB25-115-Q1-E1-D6
gnnnnnnnanngttaactcnccgccgcncaggtaaaggtcacgagaattcccggggncgacccacgcgtccncggagagagatctgcgagagaaagagagatcagattccggtgttccaaggaagcacatattttaagatccagaatcgcctgagagatgtctaccttcagtggcgatgagaccgctcctttcttcggcttccttggcgctgccgctgcgctcgtcttctcatgtatgggagctgcgtacgggacagcaaagagtggtgtgggagtggcatctatgggtgtgatgaggccggagttggtgatgaagtctattgtcccagttgttatggctggtgtgttgggtatctatggtttgattattgctgttatcatcagtaccgggattaaccccaaggctaaatcctactacctcttcgacgggatatgctcatctctcttctggtcctgcctgtgggctaactggtccttcaactggnatgggcataagtatcctttgggnaanccggggg

SEQ ID NO: 11464 - DNA, 438 bp, Arabidopsis thaliana
  unsure at all n locations
  Clone ID: LIB25-115-Q1-E1-D7
aaatcctcanttcnctgaaactttgtttttgcaccatataggtgattgcattgacagaggaagttcttgcaactgcaaagcaaaatgagatttctctatcagatgccggagttagtgctgaagcaactcctggctcacccgatttagagggtgcttgggaaaagacgggtttaaggaatgacccaatccatgagggtaagttccctgttggaactaaagttcaagctgtctttagtgacgatggcgagtggtatgatgcgaccattgaggcacatactgcaaatggctattttgttgcttatgatgagtggggaaacaaggaagaggtggatccagataatgtgaggccaatccaagcaaaatgctattgtccaancngaaaaattaactcaancntcnaaaattgccccaaaaanaaatttgaaaaanctgcnattt

SEQ ID NO: 11465 - DNA, 382 bp, Arabidopsis thaliana
  unsure at all n locations
  Clone ID: LIB25-115-Q1-E1-E1
cnananggancannccattnccnacggtaaaggaaacaaganaaaggttgacgggaangcacnagacagctattattgaccaagttctcatggggcgtggctaaccgtggatgctctattcgtgtgggacgtgacaccgangcgaaatgaaaaggttacttacaagatcgccgtccagcatctaacatgggacccatacattgtgacctcacttttggcagagaccacactcctgtgggagccaactcttgaggctgaagcccttgcagctcaaaagctttctttgaatgtttaaaattagtcnaaactttcaagaatccgatgaacacacgtgtcaangtgggcccccaaattgtnttaaaantccnggtntaaaaanttt

SEQ ID NO: 11466 - DNA, 422 bp, Arabidopsis thaliana
  unsure at all n locations
  Clone ID: LIB25-115-Q1-E1-E11
aaatctagatcacttacaaatgctggataaattcgaatccagtaatggacacaaacattcccctagtgagagagcagagatatgtcaaagagatcagaagggtaacaaaaggaatgttggtgatgcaacatcagtagtttcagtccctaagcgccggagatcatcttctggccatagtccttacaagttctcaaacagtggtcctaaagttcaactgaaagcttctgaagatgagttgcatctagagagtgacatggacaaaaatgtctctttggactcgcacgatgaaaattctgaccaagagaaaatgttagaaagcatctctccccggaagagaaagaaaagcttatcatcaaaattaaagattacagaatccgaatgggccccaacgatttgnaaaggcaaattnggtcnccaggggg

SEQ ID NO: 11467 - DNA, 419 bp, Arabidopsis thaliana
  unsure at all n locations
  Clone ID: LIB25-115-Q1-E1-E12
aaggtttanattttcagagccgagctctgcagatgagcaaggttantctttcttgggatgaagatgaaccgcaccggattaagaccttaaatcaganattcaatcctgaacagttggcaaatcttgagatgaaggagtttttagcttctgatgagagtgattctgatgaggaagacgacttgggcaatgaagttattaaccagagtaaaaaaaaggacaataagaaagataagtaccgagctttaatanaagccgaagatgttgattctgataaagacctgnaggaggagaatgaccaggatatggaggtaacattcaataccggtttagaagatcttagcaaagagattcttaaaaagaaagacaaccantcaaaatccgtgtgggaaacatatctnaggcanngacgccaaganaat

SEQ ID NO: 11468 - DNA, 440 bp, Arabidopsis thaliana
  unsure at all n locations
  Clone ID: LIB25-115-Q1-E1-E2
tncctgggggaattctnaattangcctgtgaattctgngccnatttngccggggcctttgtttancctgngggtnatttngtttccaattagtttgttaagccttattggtgaacaaatcaanggagttgggttcaaatccgtgatttttgggttctgctgggctggtatcntttctgggccttgggttgccaaatggagaaggacaanacgattaaagtgaagaaagtgaggggaaataaggtgtgcacgcaaggatgggaatgcagctggtggtctaaatactgctgtaaccagacgatatcagattactttcaaggtttatcaagtttgagcaactcctttccaaaangggacaacttcccaattgctcaatgcctggtttgggtttctggggaacttancaanttctttcaanttannggggtggntggnccccnc

SEQ ID NO: 11469 - DNA, 502 bp, Arabidopsis thaliana
  unsure at all n locations
  Clone ID: LIB25-115-Q1-E1-E3
ttcnacctnnacggtgccggtcacagaattaacgggncgacncacgcgtccncgaagataagcgganagagagagagagacagagagagattcaaaaatccgattccagatccattcctgggcaaacaaaggttggtgtttctctaatctcaaagcttttttcaaattcggaaaaagcaaatcgtgggaagagattcatcttctctctgtgcgttcatcggatctcggagcttttggttcgtcgtcaatggcggaagagacggagaaaaagtacattacgaacgaagatcttaaaaaacacaacaaatctggagatctatggatcgcgattcaaggcaaggtctacaacgtctccgattggattaaaactcatcccggaggcgacacggtgattctcaatctcgttggtcaagacgtcaacgatgctttcancgcaattcanccccggaacgcttttggaacaantcnanaaaaatcctttacccgggttacaaaancagag

SEQ ID NO: 11470 - DNA, 523 bp, Arabidopsis thaliana
  unsure at all n locations
  Clone ID: LIB25-115-Q1-E1-E4
naactgtctacgcctgntcggggaccgggtccacaaaattaaacggggtccgacccaacgccgtccgatgaaaattttgaggtggaatttcaaganaaatttggagggatnaactggtngngatncaactncccganttgaaatagaanattngggncataancgcatatccttgncttcngtcatgtattcncngattcgccatggaagaagtttggtcgagttacagaaatggcgtcatttgagagttttagtgcaaaaggcgtctcctttgtccaattccttctcctctgcttctgctgcgcgtttgagtcctagagttggtcgaaaaggtaagagctttacagtctcttacctcgttgattcattgggtttacccaaaaagctcgctgaatcggtctcaaggaaggttagcttcnaggacaaggacaaccctgactctgttctgaatcttttgagaatcatgggttcactgattctcaaatttccaccatcnttacngggtttcncaaatgtttgtngt

SEQ ID NO: 11471 - DNA, 433 bp, Arabidopsis thaliana
  unsure at all n locations
  Clone ID: LIB25-115-Q1-E1-E5
gctacaacttagaaaatggcggcggctacttcatccatcgctccttctctttcatgcccatctccttcttcttcatccaaaaccctttggtcttccaaagccagaaccttggctctacccaatatcggtttcctctcgtcttcttccaagtctctgaggtcgcttactgccaccgtcgctggaaatggcgccactggatcctcccttgccgctcgcatggtttcttcgtctgcggtcaaagcccctgtttctctcgattttgagacatctgtcttcaaaaaggagaaagtttctcttgctggttacgaagagtacattgtgagaggaggaagagacttgttcaagcatctcccagatgctttcaaggggattaagcanattggtgtgattggctggggatttcaaggaantgtccnangncanaaattttagg

SEQ ID NO: 11472 - DNA, 448 bp, Arabidopsis thaliana
  unsure at all n locations
  Clone ID: LIB25-115-Q1-E1-E6
agcttctcagatctctaactatagctcaaggcggaggagactgagatcgatcatctgaatcgccgaaacatgtcgagcgatagcaatgatcttgacgaagatgagcttcttcaaatggcgttgaaagagcaggctaagagagatctcacctatcagaaacctccttcatcttctgctcgtaagcctgttgccaatttagtgcagcagcctcgacagcagaagcctgtggctgcggctgccgctccgccgaagaantctgctgcggcggttaggaagccttccatggatgaggatgaggagtcggaggtggaattgcttaacatttcgaacggggatgatgatttggagagggaaagggaaataggtggntccantggttggtncngggaaaangaaaaagtanccattttcaaaanaaagggaaaacccanggaagganatttttntg

SEQ ID NO: 11473 - DNA, 432 bp, Arabidopsis thaliana
  unsure at all n locations
  Clone ID: LIB25-115-Q1-E1-F12
gaaaaaaaatggggaggaagcggaagcacagtgagacggaagctccggcgccggtgaaaaagagcgatgagcctgctccggatagacccaaaaggactctattgggatggaaagataagagtgaaggtgaagctgagaaagctaaagctttgacttcatctggattcaagaacaaagagaaggttttggtgacttgttctcgtcgtatcagtttcaggtatcggagtttgatgttgaacattgtttcacttctaccacactgtaagaaagacagtaaagttgaagcaaagagtagcaaaggcgcgactttgaatgagctcattgagcttaagaattctaattcctgcttgttcttcgagtgtaggaaacataaagatcttacatgtggatggtcaaatcccctaatggacaancgttaagtttttggttaaa

SEQ ID NO: 11474 - DNA, 385 bp, Arabidopsis thaliana
  unsure at all n locations
  Clone ID: LIB25-115-Q1-E1-F3
tctcagatccattcancaatctacaaagaananggaaccagtctcttcatggggtnncaactctcncgtcgccgtagatccagagatccacgacctaatcgagaanganaaacgtcggcaatgtcgangaatcgaacttancgcttccgagaatttcacttccttcgccgtcatcgaagctctcggaagtgccttaaccaacaantactccgaacgtattcctggtantcgttattacggaggtaacgaattcatcgatgagatcgagaatctttgccgttcaagagctctcgaagctttcnaattgtgatccaacaacgtggggccttaaagttcaagccgtatcnggatttccggnaaaattngcggcttagnacgggttgcg

SEQ ID NO: 11475 - DNA, 422 bp, Arabidopsis thaliana
  unsure at all n locations
  Clone ID: LIB25-115-Q1-E1-D10
gtcgtctccaacagccaagagaagcagaagcttgaagaatctctgtaatctaaaaaatgggaaaggtccacggttcattggctcgtgccggtaaggtgagaggtcagacacctaaagtggctaagcaggacaagaagaagaagcctcgtggtcgtgctcataagcgtctgcaacacaaccgccgtttcgtcaccgccgttgttggttttggcaagaagagaggaccaaactcatcagagaagtagatagaagaaggttttacccttttcagattttatgggatgtttttgatattgtgtcattagttggtccaaactcatcgatatcaaagtggtttaaccttggttatctacaaatcagtggatgttgtgtcaattttcctgtcaanttgattttggttccccccaanattaaacttaant

SEQ ID NO: 11476 - DNA, 498 bp, Arabidopsis thaliana
  unsure at all n locations
  Clone ID: LIB25-115-Q1-E1-A12
gnnnnngtaattcnaattngtcncngccggcnacagtccannaagtcccgggtcnacccacgnntccgngangatnngaagaagagcaagtttaggattgtggtgttgatgatggcactatgggcggctataaagagagctatagagaaggtaatggagtgggaatggttaagctggtggcctttctctcgccaggagaagcggctcgagaaacttattgctgaggctgatgctaatccaaaggacgcagctttgcagggtgctttattggctgagctcaataagcatattcctgaggctgtagttcaacggtttgaacaaagggaacacacagtggatagtagaggagttgctgaatatattcgagctcttgtcattacaaatgctatctcggagtatcttcctgatgaacaaacggggaagccatctantcttcccgcactgctgcaagaactgaagcatcctgcatcangcaatattggacaatccnttgtaacc

SEQ ID NO: 11477 - DNA, 333 bp, Arabidopsis thaliana
  unsure at all n locations
  Clone ID: LIB25-115-Q1-E1-A5
taccggnnaccatttcttcaangattgttacgtcgaaggaacattcnatttcatcttcggaagtgnaacctctatgtacttgggaacacaattgcacntggttggnnacggtattacagtgatcgcancgcatgcaggaaagagcgcanaagaagagactggatactctttcgtgcactgcaatgtgactggaactggaggangaatctatttgggaagagcatggatgagccaccctaaggttgtcnatgcctacaccgagatgaccaccgttgtcaatcccaccggatggcaanacaacaagactcncncacatgacangaccntgttcta

SEQ ID NO: 11478 - DNA, 510 bp, Arabidopsis thaliana
  unsure at all n locations
  Clone ID: LIB25-115-Q1-E1-A7
nnnnggnaanttntaccnnccggtgcncggtaaaggnnaaaggccnngggccgacccacgcgtcnnattcccttaactctatctctaggtgacttaagagtaaaaaatggtanaggcagaggttgaagtanatgtggaaatcaaatctacggctgataagtttttcatgttctctagaagatcacaacatgcctccaaagccactcgctatgtacagggatgtgatctgctcgaaggcgagtggggcgaagttggaagcatactcttgtggaaattaactgttgatggagagccaaaagtgtcaaaggatatgattgaggcgattgatatgaagatgaatatgatccagtggagggtgttagagggacctctgaaggaagagtacaatattttctcgaaaacgatgaaagtaagccctaagcaagganggtctggaagtgtggtgaatggaacttgaagtatgagaaaantgatganaaaggggtcacccananaagggcccttacattt

SEQ ID NO: 11479 - DNA, 434 bp, Arabidopsis thaliana
  unsure at all n locations
  Clone ID: LIB25-115-Q1-E1-A9
ganctcctcctcagtgttccgtctagccaacgaccttgtaacctcaccggatgaattggcgagaggagacgtctgcaaatccatccaatgttacatgagtgaaactggagcatcagaggataaggcgcgttcgcatgttcgacagatgatcaatgacttgtgggatgaaatgaattatgagaaaatggcacatagctcttcgatactccatcatgattttatggaaacagtgataaatttggcacgcatgtctcaatgcatgtatcaatatggcgatggccatggctctcccgaaaaagccaaaatcgttgatcgtgtcatgtccttactcttcaatccgattcctttagattgaacttcatattgattacattaaatatcatatggttttttgaattccaagncaaaagggttcnagnaacctatatatattt

SEQ ID NO: 11480 - DNA, 433 bp, Arabidopsis thaliana
  unsure at all n locations
  Clone ID: LIB25-115-Q1-E1-B12
gaagaactcttgctgactacaacattcaaaaggagtcgacccttcatttggtgcttcgtctcagaggtggtatgcaaatctttgtcaagaccctcactggtaaaacaatcacccttgaggttgagagttcagacaccattgacaatgtcaaagctaagatccagngataaagagggaattcctccggatcagcanaggcttatctttgccggtaagcagctcgaagatggacgcacccttgcagattacaacatccanaaggagtcgacacttcatcttgtgcttcgtctccgtggtggtatgcagatctttgtgaagacccttaccggaaagaccattactctggaggttgaaagctcagacaccatcgataatgtcaaggctaagattcangacaaggaagggattccaacagaccaacaaagactcatct

SEQ ID NO: 11481 - DNA, 430 bp, Arabidopsis thaliana
  unsure at all n locations
  Clone ID: LIB25-115-Q1-E1-B5
aaaataaaaaatgtcatctcttcactggtttcccaatatcttcatcgttgtcgtcgtcttcttctccttgagaagttcacaagttgtactagaagaagaagaatccacagtcgttggatacggctacgtcgttagatcagtgggcgttgattctaaccggcaagttttgacggcgaagcttgatctgataaaaccatcgtccgtttacgcaccagatattaaatcgcttaatcttcatgtcagcttggagacaagtgagcgtttgagaatcagaatcacagactctagtcaacaaagatgggagataccggaaaccgttattcctcgtgccggaaaacantcccctcggcgtttctcaanggaggaanacgggggaaanctccngggaaaaatttttaaaaatttccccaanngnantgggtttcacccc

SEQ ID NO: 11482 - DNA, 439 bp, Arabidopsis thaliana
  unsure at all n locations
  Clone ID: LIB25-115-Q1-E1-B6
tggtacaagggaccaactcttcttgaggctcttgaccagatcaacgagcccaagaggccatcagacaagccccttcgtcttccacttcaggatgtctacaagattggtggtattggaacggtgccagtgggacgtgttgagactggtatgatcaagcctggtatggttgttacctttgctcccacagggttgaccactgaggttaagtctgttgagatgcaccacgagtctcttcttgaggcacttcccggtgacaatgttggattcaatgtcaagaatgttgctgtcaaggatcttaagagaggatacgttgcctctaactccaaggatgattcaactaagggtgccgccaacttcaactcccaagtcatcatcatgaaccaacctggtcnaaattgggaanggtttaccccaanttccaattggcaaaactcnaaat

SEQ ID NO: 11483 - DNA, 429 bp, Arabidopsis thaliana
  unsure at all n locations
  Clone ID: LIB25-115-Q1-E1-C10
aaaactaacctttgtctaaaacccagaatctggtaaaccttcacactcaaaaatgttttactcgcattgtctagtatcgagaaaaggacctttaggagctatttgggtcgctgcctatttcttcaaaaagcttaagaaatctcaagtcaaagctactcatattccttcttccgttgatcaaatcttgcaaaaagagttagatgcgttgacatacagagttttggcgtatcttcttcttggtgttgtaaggatatattccaagaaggttgactttttgttcgatgattgcaataaagcgttgatcggtgtaaaggagtttgtggctaaggaaaggaacagagaaaagacaggtgtatcattgcctgcatctatcgagtgtttttccattgctttacctgagagatttgaactagatgcntttgatcntgg

SEQ ID NO: 11484 - DNA, 68 bp, Arabidopsis thaliana
  unsure at all n locations
  Clone ID: LIB25-115-Q1-E1-C11
tccttcttccgttgntcaaatcttgcaaaaagagttggatgcgttganatacagagttttggcgtatc

SEQ ID NO: 11485 - DNA, 507 bp, Arabidopsis thaliana
  unsure at all n locations
  Clone ID: LIB25-115-Q1-E1-C12
nngggnnngngnnnnttaanttcccgccggtcggcaaaggtccacaaagtcccgggtcnanccacgngtcngnagtnattnanattggagtttctgatttctagggcacaaaatctttagattcggtgaagtcattcattacttcattgccaaagcttgtanccaaaactcccatggccgacgaatcttcttctccggccacgggggatcccaattcacagaaaccagaatccactactccgatttcaattcncaatccaaatcccaatccttcactaacaccaccgccgcctcaacaacattcgcaaccaccaagtcgctcctctggttccacctggtccgccttatgctcctccggctcagattcctagctcgcttctccccancaatctcccgccgccaccagcattccgtcccggtatgcagttcactcccgttgcgaattttcaaaaccctagctctggagttcctcctccaggatttatgcctcaatatcaancgcanncg

SEQ ID NO: 11486 - DNA, 68 bp, Arabidopsis thaliana
  unsure at all n locations
  Clone ID: LIB25-115-Q1-E1-C2
ttgtnattagccatgtttgncgattnccggcatcaaatgctattgcatgtgcgtgaatggaagagcag

SEQ ID NO: 11487 - DNA, 380 bp, Arabidopsis thaliana
  unsure at all n locations
  Clone ID: LIB25-115-Q1-E1-C3
ngnngtaattctacgtngcgggccggtcaagaattaacgggtcgacgcacgcgtccnattttncngccattgttagtancagaactctctgggccgccgcgtctccgtcgtcgtggctatctacagatggcggataagaagaagcgaaagcgatcaaaagatgacgaggcggaggaacttcctttcaaaagcattctggaatcatacgacgttatcatgggagcttctcaaancgtatatttcctcntctancaaanccgccgccggagccggnggtgccncctcctcttcatcgaaanctctaaccctanctgacctctctcnatcatcttcctgtcgtgaagtcgcagatctctnactctcctccgtgcatacagaga

SEQ ID NO: 11488 - DNA, 440 bp, Arabidopsis thaliana
  unsure at all n locations
  Clone ID: LIB25-115-Q1-E1-C5
aagaagagtgatactgagaagatctgtgagattattatattcgattttgatcagtttctaaaaagctttcaacaatggattcgtcttcaaatttgaatcctcttcgtgaagatacctcagaggaacatttagaacccatagaagctccggcgtctgtcttcgccgctcgtcctcttcgtcctccttctacgaattcgtcggagaagtattcgcctgtagaatggaaaagctattttgataaagaagatgatatatcaatcactggctctgatgatgtgtttcatgtgtatatggcaggaaatgaaggacctgttgtcttttgtctccatggtggtggctactctgggctctcgttttctatagtagcaagtaaaattaangagaaagcacgtgtggttnnnanagnctttnnaanggacnggnaaaccgnttntnggaaa

SEQ ID NO: 11489 - DNA, 502 bp, Arabidopsis thaliana
  unsure at all n locations
  Clone ID: LIB25-115-Q1-E1-D1
nggnggtacttcnacntnncgggccggtcanagactaacgggtcganncacgcntctacatttngtccttttnaacaatggagtcatcacaagcaacgacgaagccaacgagaggagcangaggaaggaaaggtggagataggaagaagagtgttagtaaatctgttaaagctggtcttcaatttcccgttggtcgtatcgctcgttacttgaagaaaggtcggtacgctctccgatacggttccggtgctccggtttacctcgccgccgttctcgaatacctagccgccgaggtacttgagctagctgggaacgcagcgagagataataagaagaacaggataaaccctaagcatctatgtttagcgataaggaacgatgaagaattggggagattgcttcatggagttactattgctantggtggtgttcttccaaacattaatccaattcttcttnccaaaaaatnnaaagatttttntttcnnannggggaaaanttt

SEQ ID NO: 11490 - DNA, 502 bp, Arabidopsis thaliana
  unsure at all n locations
  Clone ID: LIB25-115-Q1-E1-A11
nnnnnnggnannnttnaacttctctgcagntcggcaaaggtcacnaantcgcgggtcnanncacgcgtcngaattntctctcaccacccccattatcttcggcgaatcatgaatctagggttttgttttctcccataaccctagattttcttccatcaatcttatatttttctcatttcttcttctccgttttagctcatctcccgattcatctcgatttccatggagggagcgggagagacgacgacgtcggaggggcatttgacttcggcagcagcttttgtggaagggggaattcaagatgcttgtgatgatgcttgtagcatttgtcttgaatccttctgcgaaagcgatccttctactttgactagttgcaagcatgagtatcatcttcaatgcattcttgagtggtgtcaaagaagctcacagtgccctatgtgttggcaatcaattagtctcaaaagancccaaaanttaagggnttgctttaggntgtgnaana

SEQ ID NO: 11491 - DNA, 495 bp, Arabidopsis thaliana
  unsure at all n locations
  Clone ID: LIB25-114-Q1-E1-G10
aacttcnanacttcgacggcagcnctccagnactcaagggtcnacncacncntcnnanattcnttntncgtataataacatcccttgtgatcaaacaagtaaaccattcaaaagatgaaaggaagaattttgattttgagtttgctcataatgagtctggtcatggcacaagttcangtanaagcaaagatctgctgcccttccaaccaagctagaaatggctatagtgtatgccgtataaggttttccaagggaaggtgtatgcaagtgantggatgccaaaactctgatacatgccctcgangttgggtaaacgccattctcgaaaactcagctgatgctaccaatgagcactgcaagttanggtgtgaaacttctgtgtgtggtgccatgaacactctccaganctctgatgcaagtgaaattgtgaatggaacgtcggaacaatgtgccaanggatgttcnattttctgtaccaagaactatgttatnccc

SEQ ID NO: 11492 - DNA, 506 bp, Arabidopsis thaliana
  unsure at all n locations
  Clone ID: LIB25-114-Q1-E1-G11
nntgggnnnnngnaantgtcnacgcctnnncgtanccggtccacaaattcangggtccacccacgcgtccganggattacacagaccctagcctcttccccaaatcccaattctccattgctttagaagaatcacacaatggatctagagattgttggtcgtcacgctctctttttcgacgatgattcgatggcaacgtttgtcaactctccgacggcgctcgttgactggaacagcctctttattgaccgctacgatgttcgtcatctcctctcttctcctcctcctccacgtatcaaacgccgtcgtccgaattcaaacgatgctgacttggaatcggagctcgatcacgagcgttatctagatttaccgtcggaatctccatctccgtcggatgatgatgaacacgatatgaatgaggattcagcaaatacaaatgcggatgggtatcgtgctgtcccttttcanatggaaactcnantgatgtnaatggncaaaaaaaatng

SEQ ID NO: 11493 - DNA, 519 bp, Arabidopsis thaliana
  unsure at all n locations
  Clone ID: LIB25-114-Q1-E1-G12
nnnnnngnaactgtnnannctnnncgcagccgtccacaaattcnaagggtcgacccacncgtccgaaanaagatagagatggagaatcacacgaccatgaaagtttcatctcttaattgtatcgatctagccaacgacgatcttaatcattctgttgtttccctcaaacaggcatgtttggattgtggatttttctatgtgatcaatcatgggataagcgaagagttcatggacgatgttttcgagcagagcaagaagctttttgctcttcctttagaagaaaagatgaaagtgttgagaaacgaaaaagcatccaaggctatacanctggttcntgatgaacnttttagattcccaagaatcaaatcaatgggggatnacaaaagangggttattacattgggaattgaaagttcccaaagatgattctcaattgggataaagccantctaaggtccctaanccntggcctgaagcctgatgttttacctgggttggcgaagaaacaatggggaaata

SEQ ID NO: 11494 - DNA, 385 bp, Arabidopsis thaliana
  unsure at all n locations
  Clone ID: LIB25-114-Q1-E1-G4
naaacnangaaaaaaacnatgggtggcntngccggtnagttnacnggtngcttacaagaagcaagggccgagatatccgatcgattgggttcacgaaacttgctgctcgaaccggtcagcacaaatcagcttgggatgttggtactggcaacggtcaagcagctattggtcttgcagagtatttcgagaaagttacagcaaccgacataaacgaagcacagttaaaacgagcggtaaaacacgaaagaatcagttaccatcacactcccacaacaatgtccgaagaccaaatggntgctcnantcngcgggagataactccgttgatttaatcctggnaacacaaagccgttcancacttcgattccgcacaattctanaacgta

SEQ ID NO: 11495 - DNA, 424 bp, Arabidopsis thaliana
  unsure at all n locations
  Clone ID: LIB25-114-Q1-E1-G5
naacgcctctctatctcttcgccgtgaatgtcnagatagtcgtaagctctctgcttttcaaatttctctcaaattgaggtagagagagagggcacagagatagagagagaggggcataggaaacggtgattttcccagttcccggaggaacaatcggctgatttctctgtaatcgaagaatctaaacctcacccactcgaaatcagctcgtgggttttggggggtctctattaatttccaaattctggagaaaaatcttgtatttcttcaagatgtttgggtgtgattgtttttactggagcagaggaatctccgagttggattcggaatcgtccgagccaaagcccttctcacttccggctcctcctcctanttggccgcaaggtaaaggtttgccaaaaggaagnattancctagganaata

SEQ ID NO: 11496 - DNA, 274 bp, Arabidopsis thaliana
  unsure at all n locations
  Clone ID: LIB25-114-Q1-E1-G6
tatctggcctgctaagtcntttggtgctcctggaacccgtattgctgaattggtgtttaacacttccttgacagggtatcaanaanttttaactgatcctagntangctgggcagtttgtgctaatgacaaacccacaaattggnaatactggtgtcaatcctgatgatgaagaatctgggcaatgctttcttactggtttggtnataagaaacctaancattattacctcaaactggagatgcannangacacttgctgattatctaaccnaa

SEQ ID NO: 11497 - DNA, 503 bp, Arabidopsis thaliana
  unsure at all n locations
  Clone ID: LIB25-114-Q1-E1-G9
ggnnnnggaactgtcnacgccngntcgnancccgtccacaantcangggtccacncacgcgtccggntttcangtatatnagagaagaagagagtgaagtcctagtcaataaactctcgaaatctgctgagacacgaactatggtagacttgagaaaagctcttttctcttataccgctagtatcgtatgtatgactcgcttttggacagaacttccatgagtgcgattttgtcgatatggataaagttgaagatcttgtgctcgaatctgagaccaatcttggctcattcgcgttcactgacttcttccccgcangtcttgggtgggtnatanaccggatctctggccaacattcggaattgcacaaagcctttgctagactaagtaatttctttcaacatgtgatcgatgatcacttgaagcccnggcaatctcaagatcattcagacatcantggtgtcatgttagatatgatnaattnnngagaattaagtccggttnc

SEQ ID NO: 11498 - DNA, 493 bp, Arabidopsis thaliana
  unsure at all n locations
  Clone ID: LIB25-114-Q1-E1-H1
nnnnnngnaanntctacntnnncaggcctggtcanaggactancgggccganncacgcntcnacccacactncngganagatcatctccgttaaaccctagcgattggaatacggatatactccaaatggctttcttaagtaaagttggaaggttattcagtcagaccagcagccatgtcactgcctctagctcgatgctacagagcatccgttgcatgtcttcatcaaaaatctttgttggaggtatctcctacagcactgatgagtttggcttaagagaagcttttagcaaatatggagaagttgttgatgcaaagattattgtggaccgtgaaacaggcagatctaggggctttgctttcgtaacatttacttcgactgaggaggctagtaatgccatgcaattggatggacaggaccttcatggtcgaagaattagggtgaattatgcaactgaaagaagaaatngggtttggangaaagggaatccgg

SEQ ID NO: 11499 - DNA, 451 bp, Arabidopsis thaliana
  unsure at all n locations
  Clone ID: LIB25-114-Q1-E1-H12
cgttanggccanangncctccctaaaagtgngncgtattagcagcanctgctcaaagccaagtctctgtgggaatgggtttgcttgctggttccactgttatgcttctcactgttatctggggaacttgtactgtggttggcangtgtgatcttcgtgattcanttgctgtanacaaccaagacaccaaaggctttcacctaaaagattctggtgtaactgttgatatttggncnaanctatgctgcangaatactggctatatcagttattccgttcgtcattgtccagcttccgcagatgttgggctcaacctctggaanacaattgtccgtgttgattgctctaatcctttcaattcttatgttgatctcttactgtgtatatcangtattcnaancatggattcaaaggagacggcttgcttttgcaaaacacaagcatgtgatnnc

SEQ ID NO: 11500 - DNA, 378 bp, Arabidopsis thaliana
  unsure at all n locations
  Clone ID: LIB25-114-Q1-E1-H3
gccctnanacggncttnannaccccnccngcnacnccnaaacnacctgaanctccctcngctgtgtctnagaagcctgtgatggnaccaccggttcttcctccgccgcagcagtttaaatcggtggcttcttctgaccaggacggctcagttttggggttctttaaaaacgccgtcacaaaggttcaaaatgcacattcaagtgtggatgatcatttggtgaggtggtttgggttaaaccaatctaagtatcagtgggctttggatgagtactacgaaagcaaagaatcagatatgaagaccgtgaaagcaaaggagatgccggggaaagtacaaagtgtataaagcaancatgtntaaactcaatttccctttggca

SEQ ID NO: 11501 - DNA, 499 bp, Arabidopsis thaliana
  unsure at all n locations
  Clone ID: LIB25-114-Q1-E1-H5
nnnnnnnnggngnnngnaacgtttacttgcccgntcaggccaagtcacngnncncccgggccganncacgcntcanagatgtttncgtttgattatatataccttagtcatgttatctatttatgatgtagctcgttcttacttgagattgcactagtagtcttgcttaatgacatataaatcttgatttaaactccctctggatattctttcatagagaaaaaattcttatgatgattttattgttgttgttacttgttttctcagcattgatccatctctgctcaatccttacaccaaattttgatggtataagaggattcagtgacaatgcttatattaaaaatggagtttatagtctctctgaactatctatgtccaagttcttgggagttcggaagcaccttacatcgttgacatttgttctaagttttcctatgacaattcttttcgtttgcacattcagagatcagtttgagattcactaaagttgntgtgg

SEQ ID NO: 11502 - DNA, 424 bp, Arabidopsis thaliana
  unsure at all n locations
  Clone ID: LIB25-114-Q1-E1-H6
naattatattcaagagaaaaaggaaaaaatgaatttcatctccgatcaggtaaagaaactctcaagctcaacaccagaggagccagaccacaacaagccagtcgaaggaaccgaaacagctacaagaacaacttacaacngccaanntcatggnanttgccaaggttgtacctgaagctgctcaagccgcagctcgtaacgaatcagacaaactcgacaagggtaaagtcgccggagcctctgctgatatcttagacgctgccgagaaatacggtaagttcgatgaaaagagtagcactggtcagtacctcgacaaggctgagaagtatctcaacgactacgagtcgtcacactccaccggtgctggtggtcctcctcctccgacnaatnaaggttaaccaacaanttaccttaanccgggggt

SEQ ID NO: 11503 - DNA, 414 bp, Arabidopsis thaliana
  unsure at all n locations
  Clone ID: LIB25-114-Q1-E1-H7
aaatcccgattccgagagagagagagcgatagcggaagacgatggctttgacggtggcgaagagtgcgttggaggcgattagagagaaaggtctcggcggtttcatgaggatgatccgagaagaaggcttcatgagatgcctaccagatgggaacctcttgcaaactaaaatacataacataggagcgacacttgttggtgttgacaagttcggtaacaaatactaccagaagctaggcgatactcaatacggtaggcacagatgggtagagtatgcttcaaaggatcgttacaacgcatctcaagtaccagctgaatggcacgggtggcttcatttcatcactgatnacactggcgatgaactcctgaattttgaancaaaaaagnatgggcttaacataaagagaacttccc

SEQ ID NO: 11504 - DNA, 475 bp, Arabidopsis thaliana
  unsure at all n locations
  Clone ID: LIB25-114-Q1-E1-H8
agcgnncgggccgggaaagcaaagggcccgggccgacccaaacgtcaggcaaaacaaaactaaacangaaacagaggagaaaaaaggaaacgacgaggaaaancaaaancannataaaaacaagcctcgtncttcccttttctctcgtcaaatcttttcctttacatattttcttttcttttntttgtctttaatacaaatttactaactaatcagaataaaaatgggttcgagtaagtttaaacgagccataggagccgtaaaggaccaaaccagcgtcggtctagccaaagtcaatggtcgaagcgcttctttatctgaacttgacgtagccatcgtcanagccactcgtcacgaagagtttccagcagaagaganatacattagagagattcttagcctaacttcttactcacgcagttacatcaacgcttgcgttagcacgctttcgagacgccttaataaanccaantgg

SEQ ID NO: 11505 - DNA, 496 bp, Arabidopsis thaliana
  unsure at all n locations
  Clone ID: LIB25-114-Q1-E1-G1
nnnnnngnaaatttntacgctgcncangnnccggtcacagaattaacggggncgacccacgcgtcnnggagagttgctgtcggagcgtcatagcttcaaggacgtttcatctgcggtcaagtggccgtctatttccctctcttagcttaactcatctcaagggcaagctatctctctccatcaactcgttttcctccaagattcagtctcatgctctccgaggagttggtataggcgagtcagataagaaaaatcccctgccgcgaggggccggagaaggagtcaaggaagatgcgaggagtaagctgcttcatgtagttttggtctctcctcagattcctgggaatacaggttgcattgtaagaacatgtgctgcctcagctgttggtctgcatttagtcgggccattangttttcaagtggatgacgccagagttaagcgagctggtttggattaatggncctttgtggntgtcaaagcccanaactcaatggg

SEQ ID NO: 11506 - DNA, 500 bp, Arabidopsis thaliana
  unsure at all n locations
  Clone ID: LIB25-113-Q1-E1-E2
ngnnnnnngganttnttgcgncccgtanggtcaaaaatcncgggncnaccacgccgtcagggaanaaagaacttgttttcctcttcagcaagacacataaatcgtaatccattttctctcaactttaggaatctcaaatctccgatttggaaatccggcgacaatggtgagagatattgaagatgagattagagacgagaagaatcctcgtcctcttgatgaagatgatatcgctctcctcaagacttatgggttagggccttactctgcacctatcaagaaagtggagaaagaaattaaggatctcgccaagaagatcaacgatctatgtggtatcaaggagtctgatactggtttagctcctcccagtcaatgggatcttgtatctgataagcaaatgatgcaagaagagcaacctctgcaggttgcgagatgcacaaagattataagtccaaacactgaagacgccaaatacgtcataaatgtcaaacaaattgcta

SEQ ID NO: 11507 - DNA, 487 bp, Arabidopsis thaliana
  unsure at all n locations
  Clone ID: LIB25-113-Q1-E1-E3
gnnnnnaattntgcngcnctacggcaaaatccgggcnaccacctcaaaggactaagacatcacgaggaacacgatgggtgaagcggtcaaggatgggagagaagaagtgattcaagcttggtatatggatgatagtgaagaggatcagagacttcctcaccacaaggatcctaaagagtttgtatcgttggacaaacttgcagagctgggagtacttagctggagacttgatgctgataactatgaaaccgatgaggatttgaaaaagatccgtgaatctcgtggttactcttacatggacttttgtgaggtatgcccggaaaagcttccaaactatgaagtgaaagtgaagaacnttttcgaaagaacattacacactgatgaggaatccgttactgcgttgcaggaactggtactttgatgtgagaaatcgtaatgaancttggattaaggtattggtaaagaanggaagtatgatagtcctanc

SEQ ID NO: 11508 - DNA, 434 bp, Arabidopsis thaliana
  unsure at all n locations
  Clone ID: LIB25-113-Q1-E1-E4
aaaccacaacaaaaaatctcgagacaaagatacaatggcgagccgaaacagagcactcttctctgtttccactcttttcctctgtttcatcgtctgcatctccgagcaatcgaanaatcagtcttctccagtcttcgcctgtgacgtcaccggaaacccttctcttgccgggcttanattctgcaacgcggggttgagtatcaaagcccgagtcaccgatcttgtcggaagattgacgttggaggagaaaatcgggtttttgaccagcaaagctatcggcgttagccgccttgggattccgtcttacaaatggtggtcggaggcacttcatggcgtcnctaacgtcggaggtggtantcggttcaccggtcaagtccctggcgccactagcttcccacaagttatactcacggncgcntctttcaatgtgtctt

SEQ ID NO: 11509 - DNA, 70 bp, Arabidopsis thaliana
  unsure at all n locations
  Clone ID: LIB25-113-Q1-E1-E5
taaanctgattcacanatgcggaaattcttgattaaccaagctaaaggtctcgtcaancattctcgtcgt

SEQ ID NO: 11510 - DNA, 432 bp, Arabidopsis thaliana
  unsure at all n locations
  Clone ID: LIB25-113-Q1-E1-E6
gattgatttctaccgtcgccggagattttgtcgtgtaatcacctccatggctgaagcgggatcggtttacgtcgatgtagctggggaatcgaagtcggagcatgttactgggaagtggttttcggtgccggagctccgactgcgtgaccaccggttcatagttcctcttgattattccaaaagttctcccaaaattaccgtctttgctcgagagatcgttgcggttgggaaagaggagcaagcaatgccgtatttattgtatttgcaaggtggtccaggatttgaaggtccaaggcctantgaagctagtggatggattcaaagagcttgtgaagagtttcgagtggtcttactcgatcaacgaggaacaggcttgtccactcctttaacatgttcctctatgcttcaattcaaatcagcaaaggaattagc

SEQ ID NO: 11511 - DNA, 425 bp, Arabidopsis thaliana
  Clone ID: LIB25-113-Q1-E1-E7
ggtgtctgtgtactgcgtagggtttagtgagtccatttgcaaagatgactcgtgagttctaatctatcgacctctctcgttttctcgcagttgcagagtctcaggattatataataggacaaagagagagagacaacatgcactctcttaagactacttgcgttgggcaaatatttgctctagctaagcctcacgattctgtaggcaagaggactcgtaatcggattcctaaagaagagagaaagacactggttgaatcttttataaagaagcatcagaaactaaacaatgggaattttccttcacttaacctcacacacaaggaggttggtggatctttctacactataagggagattgttagagagattatccaagaaaatagagtccttggtcctggtgacttgctacttgagggaaatggc

SEQ ID NO: 11512 - DNA, 422 bp, Arabidopsis thaliana
  unsure at all n locations
  Clone ID: LIB25-113-Q1-E1-E8
tgttcccttaaagtggtatgaagatgagaaacatattggttatgacctcactgggaagaagattactaagaaagaaaaacaagataaactcgactcttttcttgcaactatagatgactctaagacttggcgcaaaatttatgatgaatataatgacgaggacgttgagctgactaaagaggagagcaagatcgttcagagaatactcaaaggggaagctccacatgcggactttgatccatatgcaccttatgttgagtggttcaaacatgatgatgcaatacatccactctcaagtgcaccaagagcccaagcgaaagattcatcccttcaaaatgggangccaaaaaggttgttaagattgttagagcaatacgtaaggggtggatnaagtttgataagcctgaagaagagcccaatgt

SEQ ID NO: 11513 - DNA, 497 bp, Arabidopsis thaliana
  unsure at all n locations
  Clone ID: LIB25-113-Q1-E1-E9
nngnnnnnggnnnnngnaactgtcnacgccnntcggtagccgtccacgaattcaagggtcgacccacgcgtccgncgattttttcgttctggcttaaccgtaacccgaaagatccagaaggcggtgagattgttttcggtggagtcgacccgaagcacttcaaaggagagcatacttttgttcctgtgacacataaaggttactggcagtttgacatgggtgatctccaaattgctggcaaaccaaccggatattgtgctaaaggttgttctgctattgctgattccggaacttctctgctcaccggtccatcgactgtcatcacgatgatcaatcacgcgataggagcacaaggaattgtaagccgtgaatgcaaggccgtggtggatcatacggaaaaacatgttgaattctcttcnactcangagattcgaagaaagtatgctcacaaattggagtctgcgcttatgatggtacacagagtgtgagtatgggga

SEQ ID NO: 11514 - DNA, 305 bp, Arabidopsis thaliana
  Clone ID: LIB25-113-Q1-E1-F1
ttttagttttcttttataaaatgcccttaaataaactaaaaaagaaaacgacaaaaaaaaacagggcgttgagtttgttttcattatgtttgatttctctgtcattttctttaatgtgtctagcgagtctgcctttgtcccaatggtttagtatctgcatgtatccacggatctctatttgtcgacgaatgttatttacaataaaaaaaaaaaaaaaaaaaaaaaaaaaaaaaaaaaaaaaaaaaaaaaaaaaaaaaaaaaaaaaaaaaaaaaaaaaaaaaaaaaaaaaaaaaaaaaaggggggg

SEQ ID NO: 11515 - DNA, 483 bp, Arabidopsis thaliana
  unsure at all n locations
  Clone ID: LIB25-113-Q1-E1-F10
gnngnantttangcgncagtagccctcaaaaattcaanggtcgaccnacncgtccgatcctgaatcttacntgctacctttcttcttccttcttcatcattcatcattcatcattcatcattcatcattctcatatctctcttcttttactggggatcacaatatctatctanttgtaaattgtgaatgatagatcctgagccttcttgccgccacctcttgaacttaatgtacttgaaaccagtctccacatagcgatagagagagagatctgttatgtgtgtattcatcaagttctctttttttgggctcaaagtgtaaaaggaganattttcaattctganttcttttgttttcttataataaaatctgggttttctgagattttcgtcacatcgtccgaaacgtggacacattttgatcttttgggtgtcactgtgtcantanaggttgaaacttggannacattnctctcaaaaggat

SEQ ID NO: 11516 - DNA, 494 bp, Arabidopsis thaliana
  unsure at all n locations
  Clone ID: LIB25-113-Q1-E1-F12
nnnnngnaactgtttacgcctctcagtagcctccaagaattccaaaggtcgacccacccgtccgagcgatcaaattcaatccgaaggtttcggctctggtgcgttttctgacgttgttgttaaagctatgggatccagttaccatctccaccgcttgattctatctcgcagctcctacttcaggactatgctgcaaggtccatggaaagaagctagctctcctgttgtgaacttacttgtggatgataaaaatgttaatggagacgcaatttctgttgctttagcttatctgtatgggtaccatcctaagctggatgatgataatgcctttcgtgttttagctgctgcttcttttcttgaccttcaggatttgtgtgcgatatgcactgattttantaattctgaactgaggacttcaaacttcctggcatatcaggtatttgctgagaaccaagactatgggattcatggagaacgtgtaaggaatgcctgct

SEQ ID NO: 11517 - DNA, 409 bp, Arabidopsis thaliana
  unsure at all n locations
  Clone ID: LIB25-113-Q1-E1-F4
gcacagagatctctcgtttcgtttttcccggaaaatctgaggaaataaaattaagcaaaagtttccatcgatcctctgagaaaaaattcgactctctagtccacgagttttttttttgttcacctctctctttttcgttaatctctctcaaacaacgcctcttcatcatttccttgtaattcactttcttctccgtttttttttttttgaatcnctcttcgtccttcgccgtttcnatttcntgtttcctctacttgatgatgaaattttgatcagatctagtgtanaatagttaggatttacccagagagattatgtttatggatcgagagagacggagttctggtcgtaatgggactcctgaatatagcaatggcaaattccgaaatgataatggttttggattcta

SEQ ID NO: 11518 - DNA, 434 bp, Arabidopsis thaliana
  Clone ID: LIB25-113-Q1-E1-F6
aaggagaaacaagctgagttaactgaacagtgggagcacgagaggtctgttatgtcccgtcttcagtcgattaaagaggagattgatcgagtaaacctcgagatccagcaggcggaacgtgaatacgatctcaaccgtgcagctgagctcaaatacggaagcttaaactcattgcagcgacagcttaatgaagcagagaaagagctgaacgagtacttaagctctgggaaatctatgttcagagaagaggttttgggtagcgatatcgccgagattgtgagtaaatggactggaatcccggtatcaaaacttcaacagtctgaacgagataagcttctacatttggaagaagaattgcataaaagagtagtcggtcaaaacccagcagtgactgcggtagctgaagcaatccaacgatcaagagctggtctttc

SEQ ID NO: 11519 - DNA, 432 bp, Arabidopsis thaliana
  Clone ID: LIB25-113-Q1-E1-F8
agatgttgtttcaggtgggaggtgaaggcacacgccccaccttctttgagatggctgctgctcagcaacttcctgctagccttcgcgccgctctcacctattccctcggcgtttttgctttgagacgatcgtttctccataagattttagactatgaggatgaattctttgctgctctgatgcttattcttgaaggacacagcttacgaaccacagatggttcctttgctgaatcattgtatggtttaaggaggaaatcagcgagattgagattgaggaaagacagtgccaggaaggattctagcgaagaagttcaacattctggtttagagaagcgtcagagaatcctttctgttgtgtttctggttgtgttaccgtatttcaagtcaaaattgcatgctatatataataaagaaagagaggctaggctcc

SEQ ID NO: 11520 - DNA, 428 bp, Arabidopsis thaliana
  Clone ID: LIB25-113-Q1-E1-F9
gacgcatgggcgggacgcgtgggcttctgtctttgtcgtataagagcaagagagtggtttgattcaatttttaaaattctaaataaaactccaaccgtgaatccagccatgaaactctttttagaaaatccttttttataacaaataattcctctgcttcttcttcttcttcgtttatttcaccttttttggtttctttagctcagaaaaagcccattctttttttctattcttgtttattttaatcatactgtgcgtttctacaaagtttgttcctttcttcttcaactctctcactcacagtcacagagatctgtttcttttctttttttgctttcactcttctcttccagtgaagagagagtgagagaaaatggtgaaacttttggttagtaagggttgttgtggctggtataatactggggaac

SEQ ID NO: 11521 - DNA, 266 bp, Arabidopsis thaliana
  unsure at all n locations
  Clone ID: LIB25-113-Q1-E1-E10
anntcagtnannaagcaaatccgaagaaagagagagagagaaggtgattttgaaatttcagataacgcataatttttttattctcgccggagttttctcctcncaccgtctctgattctcgtcgccgccgtacacagttgttgttctctgccgtttctgcaanangattggatcgtttcttacaatatgattggtgatggtgttgggctatgcttaccctgcgtacgantgttacaacgactgtnganaagaanaggcctgaaanc

SEQ ID NO: 11522 - DNA, 420 bp, Arabidopsis thaliana
  unsure at all n locations
  Clone ID: LIB25-113-Q1-E1-B7
agtcacctcacttctctttcgatttatagaaacaacttctccggtgaatttccggttaacatcggccggttctcgccgctcgacacggttgatatatctgaaaacgagtttactggtccatttccaagattcttatgccaaaacaagaaactacaattcttgctcgccttgcagaacgagttttccggcgagattccgagatcttacggcgagtgcaaatctctattgagactaaggattaacaacaaccgtctaagtggtcaagttgttgaaggattctggtctctaacgcttgctaaanatgattgatctcagcgataacgaactcaccggagaggtttctcctcagattggactttcaacagaactgagtcagctcattttacagaacaacagattttccggcaagattcctcgtga

SEQ ID NO: 11523 - DNA, 434 bp, Arabidopsis thaliana
  unsure at all n locations
  Clone ID: LIB25-113-Q1-E1-B8
ttgttaacgttgttgcaaccggtggatacagtgaagacatgatccctacggttggtttcaacatgaggaaagtgacaaaaggaagtgtcacgatcaagctttgggatctcggtggtcaacctaggttccgcagcatgtgggaacgttactgccgttctgtttccgcgattgtgtatgtagttgatgctgctgatcctgataacctcagtgtctcgaagagtgaactccatgatttgttgagcaagacgtcgcttaatggtatccctctcctagtccttgggaacaaaatcgacaagcctggagctttgtccaaagaagccctaaccgatgaaatgggtctcaagtcactgacagatagagaagtctgttgcttcatgatatcttgcaagaactctancaacatcgatcaatcattgattggcttgtaaancacc

SEQ ID NO: 11524 - DNA, 503 bp, Arabidopsis thaliana
  unsure at all n locations
  Clone ID: LIB25-113-Q1-E1-B9
nngngntnnnnggnaacttntacgccgcccngtcgggtctcgnaannttccacaggtcgacccgcccgtccgtggaagcanccatcggcggatagtttgctggtggaagaaatagatgtcggggaggataaagtgagacaagtagttagtggcttagcaaagttctgcagtcctgaggatctaacgaaccgcctcgttgcactcatcacaaatgtcaaacctggaaagctaagagatgtaatgtcacaaggactggttctttgtgcttcaagtgaagatcactcggtggtagagccgttgctaccacctgctggtgctaaaccaggagagcgtgtttcattttcagggattgaaggaaagccagaagatgtactgaacccaaaaaagaagcaactagagaagataacaccgggtctctacactgatgaaaatggcgtnnccacatncnaaggnatncaattcatgacctccggtgggccttgcacttcaacatccccanggga

SEQ ID NO: 11525 - DNA, 434 bp, Arabidopsis thaliana
  unsure at all n locations
  Clone ID: LIB25-113-Q1-E1-C1
aaaangaaggcgcgtcagtgatggagaagattattgacgtagcttatggcgcatcagtgaaggtgggtttgacgttgttggagatgaatctgttgccggatattgtcattaggcggctcacacgtctgcttctggccggtcgtctccgttccggttacaaacccacggcggagatgcaactctccgatctcctccgttttgttgactctataaagaagatgcctatagctatccataccgagaagccaaagactcaacactatgaattaccgacagctttcttcgaacttgtccttgggaaaaacatgaantacaactcctgttacttctcaaacgattcaagtagcttanaagatgcagangaagcaattttggctctttattgtgaaagagctaaagtggaagatggtcaaagtgttcttgatatcggatgt

SEQ ID NO: 11526 - DNA, 498 bp, Arabidopsis thaliana
  unsure at all n locations
  Clone ID: LIB25-113-Q1-E1-C12
nnnnggnnnngnaantgtntacgccgnncggtagccgtcacnaattcaagggtcgaccnacgcgtccgaaaatatatatattgaatcttcattcattaaaaaaacaatttttatttttccctattcatcttcggttcctcaccgtccgatgctttgactctgaccaatcagtcaatttgagcttcacaatcaacggtcatgggtcattgttacagccggaacatctccgccgtcgaggacgacgagatncccaccggtaacggcgaggtttcgaatcaaccatctcaaaatcaccggcatgcttcgattcctcagtctccggttgcttctggtactcctgaagtcaactcatataacattagccctttccaaagcccgttaccggcgggagtatctccatcancggcganaactccgggacggaagttcaaatgggcgtttcctccaacgtnaactgcgaaaccgattaatggcggctttgagacnacaacttggcgc

SEQ ID NO: 11527 - DNA, 347 bp, Arabidopsis thaliana
  unsure at all n locations
  Clone ID: LIB25-113-Q1-E1-C3
ccaagggnggcacaatanaccccanagnaanggaaanganagggggngaaangnaccnggttaattgggtgggaccatcaaggagttccatcaatgaantccactacanngaaattacgaaagctgggggctggatcccatgggcctcccaagaattacacttgcagcttctgcaggagagagttcaagatctgctcaagcacttggagggccacatgaatgttcatngangagacagagcanaactcaggcagatcccttcttggctcttcgaacctcaccaccacacacctattgcaaaccctaaccctaattttagctcttcttcttcctcttcaacaacaaca

SEQ ID NO: 11528 - DNA, 65 bp, Arabidopsis thaliana
  unsure at all n locations
  Clone ID: LIB25-113-Q1-E1-C4
aatgtngaancttcccttgttnggttgcaccgactccgctcatctgttgaatgaagtgtaagagt

SEQ ID NO: 11529 - DNA, 428 bp, Arabidopsis thaliana
  Clone ID: LIB25-113-Q1-E1-C7
taggtttcttcttcatttctcctttctctggccaaagttccgactttttgcttctcccagaggctaatcatggacgctgtggcggcgaatttgtttcaatctccttccttactgcgtcaaacttccgaaaggttgatattttcgacgcccaactgtcctggcttcatgcgaattagctccggacctcaatttcgtctcagacaaaactcttctcttaaattctcgagaccatttcaaagcggaacaacttgtgttaaatctcggagaagctttgtggttaaagcttcagcttctggtgatgcttcaacagaatcaaaccgcgcggcttcagttgaagtctcctgtgggacagtttctgtcacagatattagtgagccatcctcatcttgttccagcagctgttgaacagcagcttgaacagctccaaa

SEQ ID NO: 11530 - DNA, 496 bp, Arabidopsis thaliana
  unsure at all n locations
  Clone ID: LIB25-113-Q1-E1-D10
ggnnnngnaacttttacgccnntcggtagccgtcanaaattcaaagggtcgacccacncgtccggtttcttnttgcttttgagaaaaaataattatatatttttatataggaaagggttantttattantaaaatgcaaataaaaagaatcatanaacagatantgcagggtggtaggcttttgacggtgttggtgtgccncgcctccacggtggcgttggtgagcgccggtgacccttacttctactacacntggaacgtaacctacggaaccgccgcgcctctcggaattcctcaacaggtgattctcatcaacggacagttccctgggtcctaacctaaactcaacctccaacaacaatgtcgtcatcaatgtcttcaacaacctcgacgagcctttcctcttgacctgtagtggactccagcacangaagaactcatggcaagatggtgtgactggggactcatgcccatcccaacangaacatcttnactt

SEQ ID NO: 11531 - DNA, 496 bp, Arabidopsis thaliana
  unsure at all n locations
  Clone ID: LIB25-113-Q1-E1-D2
nnnnngnaatttttgcgcccgtaccggtcaaaaatccgggncgaccacgcgtcagatattgttgttgttttcttctgcgacagcttcgaagtcgtctcttggatttttacaagtcaaaagctgagtaagacgttaaccacgagtcttctcgccggcgaccgtcgtcaacggcggagattttgttagttatgtcccgcatttccaccacctccactactccttcacgcgtgagagctgcgaattcgcactactcagtgatctctaaacctagagcacaagacgataacggtctcaccggaggtaaaccgaaatcgtcaggttacgatgtgaaaaatgatccagcgaaacggcgatcaattctgctgaaaagagcgaaatctgcaaaaggaggagatggcggttttggctcctcagagagctcggtctgtgaatcgtccggcggttgtagagcaattcggttgtccgaggcggccgatttctcgaaaaagcgaagaga

SEQ ID NO: 11532 - DNA, 440 bp, Arabidopsis thaliana
  unsure at all n locations
  Clone ID: LIB25-113-Q1-E1-D3
gagtggccgccctttttttttttttttttgatttaagtagattttaagaccaaagcaaagagacataatccttcaaacaaaacaaacagtcacgcctaagaaaacatcacaaactctcgacttaatactccgattacaaataagagactgacaaactttcaacccttcactcagttgctagattgacgcaactcaggtcgaacaaagtctgcatcagcaggcacagagatatcaacggtaggcctgagctgtgcgcagacctcaatggcaccatggactggatcagagaagaagttactgattangtcnctgttgantgctgcaccactgtccacagccacaagagcttgttgggtcaggatgtagtcaaaccgtggcgcccatttcctcgaacccaatcttgctgtggttgagcagttgtcaaccatgaaggacactcc

SEQ ID NO: 11533 - DNA, 253 bp, Arabidopsis thaliana
  unsure at all n locations
  Clone ID: LIB25-113-Q1-E1-D4
caanactgctgctgccttgtgcntgaccactgtcatgaangangacaagcttganttcancaaaatcntcgaggccatcaaggctaacttcaacgacaagtactaggagtacaggaagaactggggaggtggcataatgggatccaantctcaagccaagaccaaagctaaggagagggttattgctanggaagctgcccagagaatgaactaagcatcataccttatgttctctgctannaaacatntgata

SEQ ID NO: 11534 - DNA, 434 bp, Arabidopsis thaliana
  Clone ID: LIB25-113-Q1-E1-D6
tttgtcgacagtcttcttcttcttcttcttcttcgattggatctggaactgaactcaaattgggaagaattttgacatggaggaggaccggtgttcgatcaaggatgatgcaactcaattgataggtaacaccccaatggtatatctgaacaacattgtggatggttgtgtagctcgtattgcagctaagcttgaaatgatggagccttgctctagtgtcaaggagcgaattgcttatggtatgattaaagatgcagaagacaagggattgattactcctgggaagagcacactgattgaggctacctctggtaacaccgggattggtttagccttcatcggtgcagctaaaggttacaaagtggtcctcacaatgccctcatcaatgagccttgagagaaaaatcattcttttaacaataagtgcggagggtc

SEQ ID NO: 11535 - DNA, 433 bp, Arabidopsis thaliana
  Clone ID: LIB25-113-Q1-E1-D7
agaatttgtatatcaaaatcgagcgaacgaagatctccggattgctgcactctgctacatgcctttcgaatccgtttactgcatcgccggagaagtaggaatctgtttacttacctttggaatccatcctcatccctctccgtctagtgtgatgcagcagttaggcactagtgcagtgacatctaagtttaaacagacttttttcttcaaaatgcgacattttcttctgatgtctgcagtacggttgtatacctctttctctccccccattcaccctcttcgatcgtgttgtttcttgcatcgccttggcagtaatccccgggggtttctttcttaaagtttgtgcaaaatggtggactggctttcactattaccctggaataaaatcttcactgctgcatgtggctgctttttaagcgatagcaactacatt

SEQ ID NO: 11536 - DNA, 434 bp, Arabidopsis thaliana
  unsure at all n locations
  Clone ID: LIB25-113-Q1-E1-D8
cttcttgcttttgagaaaaaataattatatatttttatataggaaagggttaatttattaataaaaaaaaataaaaagaagcagaaaagagataatgcagggtggtaggcttttgacggtgttggtgtgcctcgcctccacggtggcgttggtgagcgccggtgacccttacttctactacacgtggaacgtaacctacggaaccgccgcgcctctcggaattcctcaacaggtgattctcatcaacggacagttccctggtcctaacctaaactcaacctccaacaacaatgtcgtcatcaatgtcttcaacaacctcgacgagcctttcctcttgacctggagtggactccagcacaggaagaactcatggcaagatggtgtgactgggacctcatgcccaatcccagcangcancaacttcacttaccatt

SEQ ID NO: 11537 - DNA, 438 bp, Arabidopsis thaliana
  Clone ID: LIB25-113-Q1-E1-B4
agatctctcttcaaagcttccaccatgtttctccgatcactcaatctctgtacaatactactcttcctagcgatttcatcacaagtttctcaatctctccacttcgaattgcaatctggtcgaacaaaatgtatatcggaagacataaaaagcaattcaatgaccgtcgggaagtacaccgtcgttaaccctaacgaagctcatccttctcctcaatctcacaagatctccatcagagtgacatcgagttacgggaacacgtatcatcacgcggaagatgtagaatcgggacaattcgcgttcacggcggtggagtctggagattacatggcttgttacacagctggttgatcataaacctgaggttacattgagtattgatttcgattggagaactggtgttcaatctaaaagctggagtatgttgctaagaagagc

SEQ ID NO: 11538 - DNA, 439 bp, Arabidopsis thaliana
  Clone ID: LIB25-112-Q1-E1-H10
gcccacgcgtccgaaaaaaacaaaaaaataataaaacaaaaaaatatcttttttttttctaataaaaaaaaaataataaataaatatgagatacacaaatgtgtccattttattaggcatgttggtgatctttgtttcaccaatggtgttcgcagatgatttgacaccaatcccagagggcaaaccccaagtggtgcagtggttcaatacccacgttggtccattggctcaacgtaaaggcttagatcctgctctcgtagctgctgaggctgctccacgtatcatcaacgtgaatccaaagggaggtgaattcaaaacactaacagacgcaataaagagcgttcccgcagggaacacaaagcgggtgatcataaagatggctcatggtgagtacagagagaaggtcactatcgacaggaacaaacccttcattacattg

SEQ ID NO: 11539 - DNA, 434 bp, Arabidopsis thaliana
  Clone ID: LIB25-112-Q1-E1-H2
tacacaagagcgttcgcttgttttcaaccagcccgtatttgacacttggcagcgttgttgaagacttgcctgaagaagacggcagctacatcggagatatcctcttgttcgatccggccaaggaagagttagtcacagtccgggacaaaacaattcccgaaaagctcgttaactcgagagtggtcggagcttcacatggatggacatttttctctgaccgatgcaatcataattctgtatgtatcagcgacctttttactcccatggcttccaaatcaaacacaaagataattcctctgcctctgcttactactatgatctatggccaaacagaagctgtctgggaacgtggcaatgtcgtcatcttctcctcaccaagacaatgaagaagaagactgtgtcgtgggctatcaatttcttgggtagccaactga

SEQ ID NO: 11540 - DNA, 95 bp, Arabidopsis thaliana
  unsure at all n locations
  Clone ID: LIB25-112-Q1-E1-H5
cannactgttggtggaggtgatgatgctttcaacaccttcttcagtgacaccggngcaggtaagcacgtcccacgtgctgtcattgttgntcttg

SEQ ID NO: 11541 - DNA, 443 bp, Arabidopsis thaliana
  unsure at all n locations
  Clone ID: LIB25-112-Q1-E1-H6
cttttgatctcgatggtggttgcggttaccgttggtgtcagcctcaataagcatgacggtgactctaaaggtaaagcagaggtaaatgcttccgtcaaggccgtcaaggatgtttgtgcaccaactgattacagaaagacttgtgaagacactctgattaagaacgggaagaacacaaccgacccgatggagttggttaagactgcgtttaatgttacgatgaancagatcacggacgcagctaagaagtcgcanacgattatggagcttcagaaggattcaaggactaaggatgggcgcttgatcaatgcaaaggagcttatggattacccgttgggacgaactaagtaactcctttccaaggagcttgggaaaatttgacgttccacctgctcgacgaagctttgatcaaatctgaaggattttggcttaacgcaancgat

SEQ ID NO: 11542 - DNA, 425 bp, Arabidopsis thaliana
  unsure at all n locations
  Clone ID: LIB25-113-Q1-E1-A1
tttctctatacaagagcgcaagctcgaaggcgctcttgttctttcttcattttctccttaacaatcaccctcatagtaactttaaaactctctgtttctagtaattcacacacaaaatggctattaaactagcaattctatttaccacatttgttctttttagcctcgccgacgctagaatccccggtatttactccggcggcgcatggcaaaacgcacacgccactttttacggtggcagcgacgcctccggcacaatgggaggagcttgtggttacggtaacctatacagccaagggtacnggaacaaacacggctgctttgagtacggcgctgtttaacaatggtatgagttgtggagcctgctttgagctaaaatgcgccaacgaccctcaatggtgtcactcaggtagtccttcgatcct

SEQ ID NO: 11543 - DNA, 489 bp, Arabidopsis thaliana
  unsure at all n locations
  Clone ID: LIB25-113-Q1-E1-A3
ttnccggcccctagnggtcaaacagtnttngngggccgnaccacgcnaganntgaanccaatctgttcatangatgaagaagtttctctcgttctcctccaacgcgtagaaaattctgacggctttaacgatgtggcgaagatctgttgtttatcgtttctcttcaagaatctctgtttcttcttcgttaccaaaccctagactgattccttggtcccgcgaattatgtgccgttaatagcttctcccagcctccggtctcgacggaatcaactgctaagttagggatcactggtgttagatctgatgccaatcgagtttttgccactgctactgccgccgctacagctacagctaccaacggtgagaattccgtccnanagttgcggctttggctggattagggcatcactacgctcgttgttattgggagctttctaaagctaaacttagtatgcttgtggttgcaacttctggaactgggtatatt

SEQ ID NO: 11544 - DNA, 504 bp, Arabidopsis thaliana
  unsure at all n locations
  Clone ID: LIB25-113-Q1-E1-A5
nnnnnnnnnnactgttacgccgccacnnnnnnnaaaaaannntcgggggccgacccacgcgtcagcaaggaatggcannggaagggggcttgggagagaactcaagatggagtcttggaggcatgaccgctcttgtcactggtggctctaaaggcatcggggaagctgtggtggaggaactagccatgttgggagcaaaagtccacacgtgtgccagagacgaaactcagcttcaagaacgcttacgtgaatggcaagcaaaagggtttcaggtcaccacttctgtctgcgacgtctcttctcgtgaccaacgagtgaaactcatggaaactgtttcctctctctaccaaggaaaactcaacatcctcgtcaacaatgtnggaaacttcaatattcaagccgaccacagagtatacagcagaagatttctcttttgtaatggctacaaatctcgagtcagctttccatctctcacagcttgcccaaccattgttaaaagcctct

SEQ ID NO: 11545 - DNA, 436 bp, Arabidopsis thaliana
  Clone ID: LIB25-113-Q1-E1-A6
ggttccttctatctcttctctctcttcttctacttccttgtctccgaccttgctttcctgctaaaggatctctgaaaaacaaaaagaagattgacaagggaacttatgtggtcggagaggaggagacacctaaagagcttcagagagagctgatgccgagacacgtggcagtgataatggacggaaaccggagatgggctaaacagaccggattgttgacgtcacaaggctacgaggctggagctaaacggcttctcgagttcgctgacctctgcttcaaactagggataaatactgtctcagcttttgctttctccactgagaattggggaaagacacaagattgaagtcaaatgcttgatgtatttgttccaacgttacctcaagtcaaagattcaatttttccagagcaaggaaatccgagtttctgttatcg

SEQ ID NO: 11546 - DNA, 429 bp, Arabidopsis thaliana
  unsure at all n locations
  Clone ID: LIB25-113-Q1-E1-A8
gaaaaaaatatgtattgtagagagtccttgtcgagtctccagactttgaacgtagcaaagagtctcagctctttgttccctaaacaatcagctctcatcaacccgatctccgctggacgtcgaaacaacctgcctcgtccaaacctcagaagacgatgtaaggtcaccgcttcacgggctaatattgaacaagaaggtaacacagtgaaagaacccattcagaatattaaagtaaagggatacataacggcccaagaagagtttctggagggcataacttggtcgagaggtctcgatgacattgctgatatccgcggcagatcattgctcgtcgagcttattagcgccaagactgaccagcggattacggtagaagactacgcacaacgtgtatgggccgaagccctgatgagaagtacgaantgcaat

SEQ ID NO: 11547 - DNA, 147 bp, Arabidopsis thaliana
  unsure at all n locations
  Clone ID: LIB25-113-Q1-E1-A9
cnctgggatncgtcnaactctctgcntacctcttgcagagaaaggagttttgtncagtcgctgatttttcggaggagaaaggacaccgatgactacgtcgcttgtncaagaagcgaatgccatagtttcatcanggcttacgctttc

SEQ ID NO: 11548 - DNA, 501 bp, Arabidopsis thaliana
  unsure at all n locations
  Clone ID: LIB25-113-Q1-E1-B1
ggnnnnnngaaatttcnacgcnnncggtngtcaaanattcncgggnccacccacgcgtcngaaaaaacttaagcctcaagaaatcaaacccacaaaaaatcaattcaacaaaacctctttctgctctctctctctttttcattcccatatgttgcttccttgagtttatctcttcccaaagaatgggaagcaacatctgaggatccatttgattaccatacatatattaaaaacaaaaacatatatctttgtgtgtgcgcgttaatgatgaaatagcagattgagagcaagaaagaggtcatagctgataaccacaatggagattcagaggatgaggcagttgatgtctctttggtctaatttgaagagtaaccgcgnttcctctcaccggtgggaatcatacagccgcaaggttctgcactcgctangctcgcctcttctctcgctagctttttctttcttctttctcttcttcttacttccttttgattctcttttagc

SEQ ID NO: 11549 - DNA, 507 bp, Arabidopsis thaliana
  unsure at all n locations
  Clone ID: LIB25-113-Q1-E1-B11
nnnggnnnnnngnaactgtctangcngntcggtagccctccannaattccaagggtcgacccacgcgtccgntgatttccaacaaattgaaaacaagagagagattttcagtaatatatttttgtttatttttcgtgttcattgaaatttttaacgaaatggcagtaaatatggaaggttcacagacacacttttacgatgaaatcgaacccttttgtcgatggagaagaacggaagacatcgacattcttgagctacatcttccttcaggtttgaagaaagagcatcttaaaatacagatcaacaacagtggtgtactaacaataacaggaggctgtccagtggaccaaaccaaaacaatcaggttcatgaaagaaacaaaagttgcaaaagattgtaaaagaaatgagattccgtgcaaagttctctaagggaattttgtangtgacgatgccaaagacaatccccaaagcaactggtccccccaanttcctttgaagggaanca

SEQ ID NO: 11550 - DNA, 501 bp, Arabidopsis thaliana
  unsure at all n locations
  Clone ID: LIB25-113-Q1-E1-B12
nnnnggnnnngnaacttctacgcctnncggtagcccgtccaaaaattcangggtcgacccacgcgtccgaggaaagangagtaggggaatcaacgaagatggtattaactactacagcggtctcatagatggcctgatcgcaaggaacataacgcctttcgttacactctttcactgggaccttcctcaatcattgcaagatgaatatgaaggtttcttggacagaacgatcatagacgatttcaaagattacgcggatctatgtttcgagagatttggtgatagagtaaagcactggatcaccatcaaccagcttttcacaagtgcctacgaaaggctatgcattgggaacaagatgcacccggtcgatgttcccaatgggtggataaaagatgttacggtggagattcntccancgaancctatatcgttgcgcataaccaancttcttgctcatgccacnggtcttgatcaaacaggacaaatntaanttccanggng

SEQ ID NO: 11551 - DNA, 500 bp, Arabidopsis thaliana
  unsure at all n locations
  Clone ID: LIB25-113-Q1-E1-B2
gnnnnngnaattntcgccgcccgtaccggtcaaaaatcccgggncgaccacgcgtcagngagatttcgaaaccctagtcgatttcgagatccaactaactctgctccttatctcagcttgttgaatttgcgaagtatgggagacgctagagacaacgaagcctacgaggaggagctcttggactatgaagaagaagacganaaggtcccagattctggaaacaaagttaacggcgaagctgtgaaaaaagggtacgtgggaatacacagttctggattcagagacttccttttgaaaccggagcttctcagagctattgttgactcaggatttgaacatccatctgaagtgcaacacgaatgtatccctcaagctatcttgggtatgggatgtatctgccaagcaaagtctggtatggggaagactgctgtgtttgtcctgtctactctacaacagattgaaccatctcctggccaggtttctgcacttgtcttgtgcca

SEQ ID NO: 11552 - DNA, 498 bp, Arabidopsis thaliana
  unsure at all n locations
  Clone ID: LIB25-113-Q1-E1-B3
gnnnnnggaaaattcnacgcngcctacggtcaaaattcccgggnccacccacgcgtcagaacacgcgtccggggacgatgtttgggtgttgcagttatcccttccgttctattggccataggaatggctttttctccaaaaagcccaaggtggctcgttcaacaaggnaaaagtctctgaagctgaaaaggcgatcaaaactttgtatggtaaagaaagagtggttgaactagttcgcgacttatcagcctctggccaaggttcttctgagccggaggcangatggtttgatctattcagcagccgctactggaaagttgtaagcgtacgtgcggctctcttcttgtttcaacagttaaccgggataaacgcaattgtgtaatacncaaatcggtattccgtantgcgggaatccaatcagatgttgcagccagtgctctcgttggagcatcaaatgtctttggcactgctgttgcttcatcgttgatggataaaatg

SEQ ID NO: 11553 - DNA, 409 bp, Arabidopsis thaliana
  unsure at all n locations
  Clone ID: LIB25-112-Q1-E1-G9
ggaaaggagagaaatgagtggtcacnattcgaaatacttctccacgacgaagaagggagagatccctgagctcaaggaagagcttaattcccagtataaggataagagaaaagatgcagttaagaaggttattgcggcgatgactgttggaaaggatgtttcatcacttttcactgatgtagtcaattgtatgcaaacggaaaatttggagttgaagaagcttgtttacttgtatctcataaattatgcgaaaagccagccagatcttgctattcttgcagtaaatacctttgtaaaggattcacaggatccaaatccgctgattcgtgctttggctgtgcggacaatgggctgcattcgtgttgataaaatcacagaatatctatgtgatctcttcaaaagtgcctaa

SEQ ID NO: 11554 - DNA, 444 bp, Arabidopsis thaliana
  unsure at all n locations
  Clone ID: LIB25-109-Q1-E1-E7
tgtaagtgaagaagaaaaataaggaagaagaagaagcagcagcaatggtggagaagtcaggaggagaagtcaatttcccaaaattggagaaaccaacaggcaagaaacagacagcgacggttgttgtgggagtgttggcggtgggatggctggcgatagagctcgtgtttaagccattgttcaagaagctgagctcctccaaggacaaatccgattccgacgatgccaccgtccctcccccgtcgggcgcctgaatatggtgagtgagaatttaacaaaagcctctgcgggagacacgtgtgttgaagctcattttaataacaaatccntgtgtttccttttgtaanancnttccggacttttacgttacnggctttgangaangtcccntttttaaatttaaccccccccctttcaaataaaaatccccgacaaangggataa

SEQ ID NO: 11555 - DNA, 417 bp, Arabidopsis thaliana
  unsure at all n locations
  Clone ID: LIB25-109-Q1-E1-E8
agagaaatataaaaacttagacaaatattgccacaaccggtgaaaatggagatcccggttcgagaggagagaagatcctcctcatcctctgccggaccattacaacaaaccatctccttagcagctgacgacgccatcgatagcggtccatcctctccgcttgtcgtcaaagtctctgtcttcgaaacagagcatgagacgaccaagcttatccacgcgccgtcaactctgctcggtgaaaccaccggagacgctgattttcctcccattcaaagctttagagatgctaaacttgtttgtgtggttgaaacgtctaaancttgggaaatanntgcanctanagcctttnaaaatcctttgnaattacgggggttaaancctttaaaaggcatcttccgttgggcaanatcgggngat

SEQ ID NO: 11556 - DNA, 626 bp, Arabidopsis thaliana
  unsure at all n locations
  Clone ID: LIB25-109-Q1-E1-F1
naaaactgtnttacgcttggcncgggggccccgggtccanagnatancccgggggctcgaacccaacgncgntccgagccctcaatccctccctcgntctcttctcgtttaggcctctctcaaaattgaagggaagccccggaatttagggggtttcctccaatttggggtttataatcnaaatttcggaattcaatcctcccaacaaaaaaggcttctccgaaaagaactccttttcgggtggaattctcaatccttccttcttcctttgntttaagccctnccttgggaagggttactttttgttttggttactaagttccaaaaaacaatgcccggaaaaggaagaaggggaaaagaaacgggtcccggttatcctccttggataaaagttattaaaaccgaattcggcccaactggtggtttggttgaangggcaaaagnccctttggccttttggaaaancccggaanttgangaaaancaaaggtttaaagggggaaatttgggggnaaaagaaaggggctcccgtttggtnccccnggtttttggttaatnggggaaacnaattcccnttccaacaaaattngggggaaatttccctttcccncnaaatttttgggntt

SEQ ID NO: 11557 - DNA, 506 bp, Arabidopsis thaliana
  unsure at all n locations
  Clone ID: LIB25-109-Q1-E1-F10
ggnngnacnttaaattcnacgcgntccgtaacggtctccaaattcncgggnccatccangcgtccaaaagtttgttttcagaaanaaagaacccaananaaactgcnacatgcttcactacgaatgctacatngggcatgggaanaagacanaactcgacaccganacttgtgctaaggncgttcaacgaaacaagaacttgggtcttgaagagtacaggtttctccttcgtactatggctagttccgggataggagaagaaacgtacggnccaagaaatgtgcttgaaggtagagaagactctcctactctccttgacgctcactccgaaatggacgatatnatgttcgacactctcgacaagcttttccacaatgacaaaaggntcaatctcctccttcagacattgataatccncgttgtcaacgtctcantcctcggctccatctccttcctaanctcacgagtcatcaacaagatacaaagatgagaagaagacatccnat

SEQ ID NO: 11558 - DNA, 496 bp, Arabidopsis thaliana
  unsure at all n locations
  Clone ID: LIB25-109-Q1-E1-F2
gnggnnnggnaacntntactcncncgggccgggtcacagnatnacncgggccgacccacgcgtcnncccangcgtccgcggacgcgtgggcaactacatactgcaaggcaagagctaagtcatgccttgtatcagcatgattctgcttgtcgtgtgattgctagacttaaaaaagaaagagacgaagcacgccaattactggccgaggttgagagacatatacctgcggcccctgaagctgtgacagctaatgctgctctgagtaatggtaaacgagctgccgttgacgaggaactgggtcctgatgcaaagaaattgtgtcctggaatttcagctgaaattattacggaattgactgattgtaatgctgctccttcccaaaagcgaaaaaagcgacaagattcctcaaacattggcgtcaataanatactttgganaaggttantcaactatcaagccanccanttnacaagacaacaaacaagcattgttcgat

SEQ ID NO: 11559 - DNA, 446 bp, Arabidopsis thaliana
  unsure at all n locations
  Clone ID: LIB25-109-Q1-E1-F3
aacgcaaaaatcagtttctctttgagtaagtgtttattacaattaaactaactcaggcaagtctatgatcatggcttcttctgctgctgcatcgatctctatgataactctaaggaacctctctcgcaatcatcaatctcaccaaagcacttttctcggtttctctagatccttccataaccaaaggatctcatctaacagtccaggtctctccacacgagcaagatccaccacttcctccactggaggtttcttcagaaccatttgcaacaagcaantagcaattgactaactccaagacaactaaagattcaaagagcttaacgtctacgagttcaacgaaagggattgaaacaatccaancggttttaaaactagggaaaaaaaccagattaagcnttggccccgganatnttgtccccctcaanaaacaaactccnaaacag

SEQ ID NO: 11560 - DNA, 408 bp, Arabidopsis thaliana
  unsure at all n locations
  Clone ID: LIB25-109-Q1-E1-F5
acagaagcagagcaatggaatatgcgagacaacgggaccatttgagaatggactggaaatgggttgttgtaggaggtgtcgcattggcttgtggccttcactctgggatcattggcaaggctttactggctggagctggccagagactggctcgtaggtgagaaaccttgtcgtattcttattatatcttcccttgacagaaaagagaaacatatgcatataattaanggaaaatgtattatttttgcaactcctctgagaaaggcatgtggttttgggtgggtgaaccatgtanagtagtagctttaaactatggagtcataagttatttgagttctatcttgtaccacangataatgagatatgtatttaataaccaatatgaatccacatancttctaaaaaaaa

SEQ ID NO: 11561 - DNA, 411 bp, Arabidopsis thaliana
  unsure at all n locations
  Clone ID: LIB25-109-Q1-E1-F6
ctcctccgtcaccgagggagagcaaccatgccaatctcaattccccttaacgccactctacaatactcgtctccttcttcttcttcttcttcttcttctctcgtaccttcttcccctcttttctctccgattccttcaaccactgtttcccttaccggaattcgccagcgatgcctcaggatggtcacttcttgcgtctccaacgctcagaaatccgtcctgaatggtgccaccgattccgtctctgtcgtcgggcgggagcagattcgtcttggtcttcctagcaaaggacgcatggccgccgattcgctggatcttctcaaggattgccaattgtttgtcaaacaagtnaatccaagaaaataagnttgccaaaattccnaagttacnaantacngaantttggtttca

SEQ ID NO: 11562 - DNA, 554 bp, Arabidopsis thaliana
  unsure at all n locations
  Clone ID: LIB25-109-Q1-E1-G1
aaaggagcaaaaacgaaaccacagagagaaagcctccgtctcccttatcaaagaagaagaagacgtgtataacaaaacactaagacacattgtgaagatagaaaaaaatggagagagcagcaattctcccgagtgttaatcaaaattacctactttgtccttcacgcgccttctccacgcgcctccactcctctactcgtaactttatcgccgccgtcatttngcctcaatcaagcttcagcattcttcttccctcctgtttccttctaatgggtgggaatctctccttaactccgatgcaaacgctggtttccgtcccaaatttccttcccaaagttaacggtttgggtaaacctggaaantttaanccccggaacaattaagaaatttggggggaataanccggttttggggaatttttggggggcctttaaaagncccaaagccctggaaatttaaanaangggttaangggttgaaatggnaaaaantggtttaaccaantttggaattgggganaaaagnttttcctccaaaaaaaaggggggggangg

SEQ ID NO: 11563 - DNA, 401 bp, Arabidopsis thaliana
  unsure at all n locations
  Clone ID: LIB25-109-Q1-E1-G11
ggncgcntgggttnttctctctctctctgcaaattcaaaacagtgaaaaaaacctctcttcattttttaactccctctctctctctctctctatggagagacgaacgagacgagtgaagttcacagagaatcgtacggtcacaaacgtagcagctacaccatctaacgggtctccgagactggtccgtatcactgttactgatcctttcgctactgactcgtctagcgacgacgacgacaanaacaacgtcacggtggttccaagagtganncgatacgtgnangagattaagattctgccaangtgaatcttcttcctctancgcgggcgaggaanngtaagcanaatggaggangaaagccttatgggttgaagatgacgtgtcgacntcggtgaancc

SEQ ID NO: 11564 - DNA, 462 bp, Arabidopsis thaliana
  unsure at all n locations
  Clone ID: LIB25-109-Q1-E1-G12
ggngtaantcaaanggnctgtagntctgaacggtcagaggnccacgggccganccangcgtccaaatgaaactggaanagtcacgggtgaaagtttcccgggtaaggttaaatccccgggagtagaaagaggaggaagtgagtcatggtcgttttctggtgggttttgggacaaagttataccaaaanaaaaaaggtttcatggaacatctcataatacattcttgttttttcttttctctcatatgttcttcaaccccttgaggagggagaggtctcaggtttttatcaagtgggggcattattagaggacaatcccttgattttttcntttgttttcntttaatatttggttanttgcaatccttgcatcatcattttgtcctttgggggggttgtangtttgatttaaaccattattcacaattttaattttaagaanaaangaaaccnnnnggnanna

SEQ ID NO: 11565 - DNA, 428 bp, Arabidopsis thaliana
  unsure at all n locations
  Clone ID: LIB25-109-Q1-E1-G5
tgcttttcccggtgccaccagcttccctcaggtcatcaccaccgcagcttctttcaaccagtcactatgggaagagatcggacgggtggtgtctgatgaggcaagagctatgtacaatggtggcgtggccggtctgacatattggagtccgaatgtgaatatcttgagggacccgcggtggggccgaggccaagaaactcccggagaagatcctatcgttgccgcaaaatatgccgccagctacgtccggggacttcagggtactgctgccggtaaccgccttaaagtcgccgcatgttgcaaacattacactgcttatgatcttgataattggaatggcgtcgancgtttccacttcaacgctnangtcaccaacaagatttagaggacacatacaacgtgccatcaaatcatgtgtttacaaagga

SEQ ID NO: 11566 - DNA, 427 bp, Arabidopsis thaliana
  unsure at all n locations
  Clone ID: LIB25-109-Q1-E1-G6
ncattttctctgtaaaaatgggaactaggttccaatcattcttgctcgtgttcttgctttcatgtttaatcctcatatcaactgcctcgtgtgagcgaaatggtgatggaacgattagaattggattgaagaagaggaaactagaccggagcaacaggctagcttctcagctttttttgaaaaaccgagggtctcattggtctcccaaacactattttcgcctgaacgatgaaaatgcggatatggttccgctgaaaaactatttggatgctcaatactatggtgacattaccattggtactcctcctcagaagttcactgtgatctttgatactggtagctccaatctctggatacatctactaaatgttacctaacgggtgctggtaattccannccaagttnaaggtaacccatccancncaaa

SEQ ID NO: 11567 - DNA, 412 bp, Arabidopsis thaliana
  unsure at all n locations
  Clone ID: LIB25-109-Q1-E1-E5
tgaggaatggctgcgaagaaggtttttggatcggcggaagcgagtaatttggtgacggagcttcgtcggagttttgatgatggtgtgacacgtggttatgaatggagagtgactcagcttaagaaactgatgattatttgtgataatcatgagcctgagatcgtcgcggctcttcgcgatgatcttggtaagcctgagcttgaatcttctgtttatgaggtatctctactgagaaactctatcaagttggctcttaagcagctaaagaactggatggctccggagaaggcaaagacttctctaacaacgtttcctgcatccgcggagattgtgtccgaacctcctggtgntgttccaatgatcncggnttggaacnaccctttccggtggccaattgatcctgttattggtc

SEQ ID NO: 11568 - DNA, 454 bp, Arabidopsis thaliana
  unsure at all n locations
  Clone ID: LIB25-109-Q1-E1-C1
anctcaagaaaaccctaaatcaaaagtcgagatcgaaggggtccttcgctcgccgtgccatgagcttagctcagatcccatctgctcgtatttcctctggagccgcttctattggtcagcgtcgttgcctcgccggcgccgctgatcaccatggatctaccaaggttgacttctggaaacagcccacgaacccaggaaactggaaagaggagcattttgtgcttatttctctgtctggctggggcttacttttctacagtggatacaagctcgccactgggggaaaaaaagagacgcctgtggagagtacacaatgagtttcattgtcaccaaggaagaccttttatggngaaaaactcccaattcccaangaacttgggtttncccttttaccaaattgggaacngggccttgngtttcaattttgaaaaataattttgaancacttttggng

SEQ ID NO: 11569 - DNA, 424 bp, Arabidopsis thaliana
  unsure at all n locations
  Clone ID: LIB25-109-Q1-E1-C10
agaagaagatggtgtctgggtcagggatatgcgcgaagcgcgttgtcgtcgacgggcgacaccacatgcttggtcgtctagcttccaacactgcgaaggagttacttaacggacaggaagtggttgttgtccgatgtgaagagatttgtctctcgggaggtttggttcgacaaaagatgaagtacatgagattccttaggaaacgtatgaacactaagccttctcatggtcctattcactttcgtgctccttccaagatcttctggcgcactgttcgcgggatgattccacacaagaccaagcgtggtgctgctgcacttgctcgcttgaangtttttgagggaatcccaactccttacgacaagattaagagaatggntantcctgatgctcttaaaggttttgagacttcanantggtcaca

SEQ ID NO: 11570 - DNA, 120 bp, Arabidopsis thaliana
  unsure at all n locations
  Clone ID: LIB25-109-Q1-E1-C12
gatcatnaggcatgaggaatgggcattggtcaagaaagatgaagctgtagctgctaagaanaacagtgttgaggcccgcaagcttatcttcaanagagctgagcaatatnccaaataata

SEQ ID NO: 11571 - DNA, 420 bp, Arabidopsis thaliana
  unsure at all n locations
  Clone ID: LIB25-109-Q1-E1-C2
atctccccgccggtgacttcaatcccagttgttgaagggaatgaagaattgaggaagccacagaatctgattccgccgttttcaaaggtggtgtctcattttggcattagcggaatctccgtcgcattggccactggcgtgactcatcctctcgatgtagtgaaagtgagattgcagatgcagcatgtcggccaaagaggtccgttaattggaatgactggaatctttcttcaactgatgaagaatgaagggcgtaggtctttatacttggggttgactcctgctctcactagatcagtgctttacggaggtcttagattgggattatatgaacccaccaanggttcctttgattgggcatttggattcaacaatgtcttggtcaagatanaacaggcgcattnccggggcttttcactg

SEQ ID NO: 11572 - DNA, 290 bp, Arabidopsis thaliana
  unsure at all n locations
  Clone ID: LIB25-109-Q1-E1-C3
aacttctactttgcncgggccnggtcanagaataaccgggtcganccacgcgtcnacggangcgtgggcggacgcgtgggcggagaagcggtttggttcaaggctggttcacagatcttcagcgacggaggattggactacttgggcaacccgagcttggtccacgctcagagcatcttagccatttgggctactcaagttatcctcatgggagctgttgagggctacagagtcgccggagaatggccaatnggaaaaacaaaaganttnnnttaaccaagtngganctt

SEQ ID NO: 11573 - DNA, 376 bp, Arabidopsis thaliana
  unsure at all n locations
  Clone ID: LIB25-109-Q1-E1-C5
ttgttctctcacacagtcttcttcacttggntctaccttgaatttctactttggtgctantcttcttcacatacctagctgctgtatactatacgtgaaccaactccgtattctactttagaggccatgggaaaagcttctcgagacaanagggatatctattatcgtaaagctaaagaanaaggatggcgtgcaagaagtgcttttaagcttcttcagattgatgaagaattaatatttttgaaggtgtgaagagggtcntagatttatgtgctgcacctggtaactggagtcangtcttgagtcntcaantagatcttcctgcaaaatcctcanctgaatcnaaagattgggatnttcccctatantacccntc

SEQ ID NO: 11574 - DNA, 425 bp, Arabidopsis thaliana
  unsure at all n locations
  Clone ID: LIB25-109-Q1-E1-C6
tgagtggatgccaaaactctgatacatgccctcgaggttgggtaaacgccattctcgaaaactcagctgatgctaccaatgagcactgcaagttagggtgtgaaacttctgtgtgtggtgccatgaacactctccagaactctgatgcaagtgaaattgtgaatggagcgtcggaacaatgtgccaagggatgttctattttctgtaccaagagctatgtagtcccacctgggccgcctaaactgttgtaatggtcgtatatgtgaaaaaacaaatgctagactcttgctattctgggtttgtgtgtgtgtgtgtgcatgtgtcgtanaaggtttgttcgatnactanattgtacatgccctctacttcctataanctaaattaaaganttaaacgtactgtcntttattgaaaaaaaaaaaaaa

SEQ ID NO: 11575 - DNA, 284 bp, Arabidopsis thaliana
  unsure at all n locations
  Clone ID: LIB25-109-Q1-E1-C7
caagtcaaaantgngtgnntgccaanactctgatacatgccctcgaggttgggtaaacgccattctcgaaaactcagctgatgctaccaatgancactgcaagttagggtgtgaaacttctgtgtgtggtgccatgaacactctcnagaactctgatgcaagtgaaattgtgaatggagcgtcggaacaatgtgccaagggatgttctattttctgtaccangagctatgtantcccacctgggccgcctaaactgttgtaatggtngtatatgtgaaananca

SEQ ID NO: 11576 - DNA, 494 bp, Arabidopsis thaliana
  unsure at all n locations
  Clone ID: LIB25-109-Q1-E1-D1
aattttactcgncgggcccggtcanaaataaccgggtcganccacgcgtccncccaagcgtccgagctgctgaagaagaaacctcatccttcgaacgttaagaggaagaagaataagagaaatcgattcgtggttttgggaaaattcaatggcggtttctactgtatcgtcgtttctattgccatctttcggcattccaagctcttcgccttcttctaccanactcaaagtctctctgctgccttcatcttctacccatggcggccttagttcctgcgtccttacgaaaccatccgtctcgcttacgaangtcttcgctgttcccgataccctagatccaactccagaaattctcgatgaacccgcctctgaggttccgagctcttcatccatcagtgtagacgcggnttaaaaggngncaaanccaaaggattaggntnaagcttaattatacngggtgcctcttattgaggactcatgcaagcagatacttg

SEQ ID NO: 11577 - DNA, 152 bp, Arabidopsis thaliana
  unsure at all n locations
  Clone ID: LIB25-109-Q1-E1-D11
ctcatccacccaaacncacatgtcttgtantccttctcttatctttctccttgtgattcctttttatattcctctgatattttctctcagtttgatctcatttgctctgcaatggcgactaccatgantgctgcngtttctctcacatcttc

SEQ ID NO: 11578 - DNA, 501 bp, Arabidopsis thaliana
  unsure at all n locations
  Clone ID: LIB25-109-Q1-E1-D12
nnnnnggnnnnggnaacttttaaacttctcacgcagctccgtaacggtcacaanttcccgggncgacccacgcgtccgggcgcttgcgtttctcgatgtctcgagggatgctatggcattggntccacctgattttataactggttatgagtttgttgaggaagctttgaagcttttacaggaggaaggagcangtanccttgcaccggntttacgtgcacaanttgatgagactttggcagagatcactccgcgttatgtcttggagctacttggcttaccgcttggtgatgattacgctgcgaaaagactaaatggtttaagcggtgtgcggaatattttgtggtctgttggaggaggtggagcatcagctcttgttgggggtttgacccgtgagaagtttatgaatgangcgtttttacgaaatgacagctgctgaacangttgatctttntgtnctaccccaagcantattccancagngtcatttgaagttacaag

SEQ ID NO: 11579 - DNA, 425 bp, Arabidopsis thaliana
  unsure at all n locations
  Clone ID: LIB25-109-Q1-E1-D4
agtaacaggccacgttttggctctttctctacaaatgtacggctgcagggttatccaaaaggcgttagaggtggttgaattggagcagcaagctcgaatggtgaaagagcttgatgggtctgtcatgaaatgcgttcatgaccagaacggtaatcatgtgatccagaagtgtatagagcgtcttcctcaggattggatacagttcatcatttcctcattctacggaaaagttttagctctttcaacacacccttatggatgccgtgtaatccagagggtactggagcatattgatgatatagaaacccaacggatnattatggaagaaatcatggaatcagtctgtactcnaacacaagattaataccggaaataagttatccagcatatcatacacatggtaaacccatgaacggtcagaaatt

SEQ ID NO: 11580 - DNA, 412 bp, Arabidopsis thaliana
  unsure at all n locations
  Clone ID: LIB25-109-Q1-E1-D5
gcttcaattcaataaaaggcgaaaaatctctcactgcactttatctcgagagctcagatctccgatctagagcctttcgcttctcctcttctgttcatataacaactgaataatgtcgatctccgcccaaaatccggatatttccggcgatagacaatccggccaagatgttcgtactcagaacgtgatggcttgtcaagctgtttctaatattgttaagacctcacttggtcccgtcggcctcgacaagatgttggtggatgatattggtgatgtgactattacaaatgatggtgctactattcttaggatgttggaggtcgaacaacctgctgctaaaggtcctgtcnaagtaactgaacttcaagatanaaaattcggtgatgggacaanatcggttgtaatgtaccgg

SEQ ID NO: 11581 - DNA, 491 bp, Arabidopsis thaliana
  unsure at all n locations
  Clone ID: LIB25-109-Q1-E1-D8
gnngnngnnngttattcgcccgntcggcacangtcanganntcccgggncgacncacgcntcnacaantgttngnggaaatcctggtgctggaacacttgacttcttgcgcaacagccaacagttccaagctctgcgagcaatggtgcaagcaaaccctcaagttctgcagcccatgcttcaggaactgggaaaacagaacccaaacttgatgcggttgattcaagaccaccaagctgacttcttacgcttaatcaatgaacccgttgaaggagggggagaaagtggcaacctccttggccaaatggcggcgggaatgccacagccacaggcgattcaagtcacacatgaggaacgtgaagccattgaacggcttgaagcgatgggatttgagagagcattggtgttggaagtgttccttgcntgcaacaagaatgaagaatttggctgcaancaatcttcaaattacatgcatgaattcnaggaataact

SEQ ID NO: 11582 - DNA, 498 bp, Arabidopsis thaliana
  unsure at all n locations
  Clone ID: LIB25-109-Q1-E1-E1
ngnnngnaggttnntngccggnncgggtcaaagnnaacccgggncgnnccacgcgtccntcacattctctttcagataaacaaacagtttcttagtttcgttcgagatgagcggtgaagtttgggagatggaacaagcaagcagagatgaattcgataagagattgtttgaaacattgtaattccatcgctatcgacacagagtttcccggatgcttaaaggagactcccatggacgcaagtgatgaaattcgttatagagacatgaaattcaatgtggacaacacccatctcatccagttagggttaacgctattcggcaaaggaatcactaaaacctgggagatcaacttgtcagatttcaacgaatctaagagcttgaaaaatgataaatctatagcgtttttaaaaaacaatgggttggatncggataagattangagaagaaggtttggaatcaaaaattcttcatggagttttctcagattctcaatgagaa

SEQ ID NO: 11583 - DNA, 253 bp, Arabidopsis thaliana
  unsure at all n locations
  Clone ID: LIB25-109-Q1-E1-E4
gtgggaganaatggaangtgtaagatcgagattgagccngacgtcatcgagatacantggtccngcggcgacagnggtgttcagtggccgtgtaatgaaatggaagaagaatgggtacntgtctcaacctcatccgtcggtgttttcagagcatctaaatccaacggtcntaataacancatcaacagtnactcaccacaccatctacttctccataantgggactccacttactcagcgacngttactgctc

SEQ ID NO: 11584 - DNA, 431 bp, Arabidopsis thaliana
  unsure at all n locations
  Clone ID: LIB25-109-Q1-E1-B8
tttctcactctctcgtcttcttcgtctgagctatcaaactccagtcaatggcgatgatgacgacgacgacgacaacattcttccatccactacttcctgctaanacttacaaatccggagctgtagcttcttcctttgtctcagttcctcgttcgtcgtctctccaatttcgctcacttgtgtcagattctacgtcgatttgtggtccaagtaagttcaccggaaaaaacagaagagtatcggttaccgtttccgccgccgcaacanctgancctctcaccgtcatcgttaccggtgccggtggaagaacagganatattgtgtataataaattgaatganaagtccgagcaattcgtgggaaaggggttaattnaggacaaangganaattaaggagaagattaaatggaaaaggatgaantatcattgg

SEQ ID NO: 11585 - DNA, 436 bp, Arabidopsis thaliana
  unsure at all n locations
  Clone ID: LIB25-108-Q1-E1-H10
atacaaacactgataattcaagtttgtattcaaggtcaagtatctttagaggcttatcagcagaagcagtagaagcagctgatcctgctactactagggtcaccgtctcagatgtgaatagaacaggtcctcttgttgagtatgagagaagaatcagtaatggtgaactcatgactggtgatatctgccaaattagtgcattgagagagcttcagagactatatgatgagcttgtggattcagtagatacatgtcgtttagatcggtataatacttctgataaatcctcaagaagtcgttggttttggtctcggctcatgccacagacttcttactcacccgtcaaangattatacctttatggaggtgtangtacaggaaaaaccatgttgatggacntatccttgatnaactgccntgtacttggnaaaaacaa

SEQ ID NO: 11586 - DNA, 435 bp, Arabidopsis thaliana
  unsure at all n locations
  Clone ID: LIB25-108-Q1-E1-H11
tgtggatcaagaaacaatgcaaattcaatgcaaaaccctaacttttacagtttcntcgattccttgtaacccaaagctaccattcccatcttccctcactttacggtcatggaatccttcantcccgagtttcaaggagctccgctgtttccggnccaaagtcatcactgaaactgaacanggttttaaagaaactgtgcaagtacgaatcaaggagcttgttgttgatggagaaaccggaaatgggtcgatttcggagctccaaggagatgcagcaaatggttcgatttcgccggtgggaagtggaagcagaagtagaagaagtgaaggtagatgatttggcgactcagagcatttggggacagatgaaagagatcgtcatgtttaccggacctgccgcgggaatgtggctaagtgggccgttgatgaatccca

SEQ ID NO: 11587 - DNA, 424 bp, Arabidopsis thaliana
  unsure at all n locations
  Clone ID: LIB25-108-Q1-E1-H3
atgtgtcgattgtcccaaataattttaaaaataatttcacgtgtcnccattttgctgacgtcattattcccctttttcctttttattgtcacatcagaattttttctaactcattcatttcaatcaatcttctncttcttcttcttcttcttcctcagagaaattctgtgttgttgtatacagagagatgttctcancttctacactcgnttaantctctatctctcttcctctctctttctcttctcttcttcctcttcatcctcncaacacacatccttctctcttcctctaccctcatttccaccgccgatgacctagacgacctctctctcttccancgcgccgtcgtcgcttcntccaacaaacaanaaccgtcgtctcannnncctctnngcaaaagcaancccaaaaggttggngtc

SEQ ID NO: 11588 - DNA, 441 bp, Arabidopsis thaliana
  unsure at all n locations
  Clone ID: LIB25-108-Q1-E1-H5
tcctctctctttcatctttcagatccagagagagagaaagagaacaaaacatgaagctttattctgtttccatcatcatcttcgtcttaattgctctctccaccatagttaatgctcaacaagctgctacagattcctgcaactcaactctacctctcaacgacctcaccttcaacaccagcctccttcaatgcaccgaagcttggactccccaaaatttcatcctccgatatgcaagaacggcagagaacacatggagctttatcttatcggcgccggattcaagcgctttcatcgggatcggattctctaccaacggtcaagatgattgggaagcaacgcgatngttgggtggntancttccgaacggngggttccnggaacngtgaaaccgttacttgcccgggggggaaatctcccggggnaaggttaaaccctgac

SEQ ID NO: 11589 - DNA, 488 bp, Arabidopsis thaliana
  unsure at all n locations
  Clone ID: LIB25-108-Q1-E1-H8
ccgccccngnnnaaacaaaatcgccggtcgacccacgcgnccgatttacctcaccatgcctgccgctgaatacggcaagctcanagttcctagaactatctccgatcttcgattgctcaaagagaatcttgggtcttatgcaagtgagtaccaagcacggttcattttangttactgttcgacgtatatctttatgcagacatttatgatacctggaacgatctttatgtcattgcttgctggagctcttttcggtgtggttagangttttgttcttgttgtccttaatgcaactgctggagcatgttcttgcttcttcttatcgaaattggtcggtaagccattggttaactgggttatggcctgaaaaagttgaggtttttccaagctgaanattgcgaaaagaagagatangctgccaaaactacatgcctgttcctaaggntaacaccaaaaacttccaaaactccttaanaaattggtcttcc

SEQ ID NO: 11590 - DNA, 451 bp, Arabidopsis thaliana
  unsure at all n locations
  Clone ID: LIB25-109-Q1-E1-A1
ccgnacaggncaaaaactcncgggtcganncacgcgtcnacaccagatcacgtttntcttcttctcgtcacaaattccttatctctctctctctttctctcttatataaagagagaaatatacaaaacctccaagtacgtttcatcgatcctacctaattcatcaaaaaattgtgtgaggcttatttgatcaataattatgaattctggtcgtcgatcgttaatgtccgccacggcgagtctgagtttgctgttgtgtatcttcaccancttcgtcgtggtgtcnaaaggtgagcttcagagattatanagccggctaaaagcgacggtccgttaagtttatagcaccgagattgggtcntctggtcctcaacatcnccgtgctanccnagggaaaattgnaaaantgctaaattcgngggtcacggaaaaattcacacatgatgttanga

SEQ ID NO: 11591 - DNA, 127 bp, Arabidopsis thaliana
  unsure at all n locations
  Clone ID: LIB25-109-Q1-E1-A10
gatccangtcntgtcaanacatttgtaggagaccatttccacttacataanagcattgagagagatgtcctgaccgatgnctctttcatgatcattcccgtgttgataaccaagttggaanattctc

SEQ ID NO: 11592 - DNA, 486 bp, Arabidopsis thaliana
  unsure at all n locations
  Clone ID: LIB25-109-Q1-E1-A11
nanntcttgcggccggaacggtcntnnantcccgggncgacccacgcgtccgnccacgcgtccgcccacgcgtccgggatctccaaccagaagagcttcaattcttgacaatacctcaactacttcaagaatcaatctcaatcaagaaacgatctccaagaaccttctacctcataaccctctccttcatcttccctctctccttcgctatcctcgctcactcactcttcactcaaccaatcttagccaaactcgacaaatccgacccaccaaactcagatngttcacgtcatgattggactgttcttctaatcttccagttcagttacttgatcttcctctttgccttctctcttctctcaaccgctgctgttgtcttcaacgtcgcttctctttacaccggnaaagcctgtttccttctcgtcaactctctctggngaatcccaaaaggtcctttaaacgaatcctttaaaaactttcctttgg

SEQ ID NO: 11593 - DNA, 419 bp, Arabidopsis thaliana
  unsure at all n locations
  Clone ID: LIB25-109-Q1-E1-A2
aagacgcattggcgcatcaaaacacatcttgccatcagtcatcttgatgtcagcaaaattaataatatcgtggctgatatgcgcaaggtgttgtctaaaaatcctcaaatcgagcagcaaaaaatacacagaagagtctttctggaggatatagatccagagaaccaagcccttaggattctaatatcctgttttgtcaagacttcacgttttgaagaatacctgtgcgttaaggaagcagtgctcttggatcttcttactgttattaggcatcacggggcacgtctagcaactcccattagaacagtacagaggatgcgtaatgangctgaagtggacactgcaaggatttcaagacatccgtttcatcaaancagcaatgaaccgccgatacatgctgattgagccatcttataaaa

SEQ ID NO: 11594 - DNA, 453 bp, Arabidopsis thaliana
  unsure at all n locations
  Clone ID: LIB25-109-Q1-E1-A3
ttgnngtaattcttatggtnttttggtgtgtgtctgacnggcctngccattctctaaaagtnaagtcgtgntatgggnagtctcgaagggatggatctgtcagaatctgaaaacctgacagaaattccagatctttcaaaggccaccaagctcgagtctttgatactcaacaactgcaaaagtttggtgacacttccttctacaattgggaatcttcatagattggtgaggttggaaatgaaagaatgcacagggctggaggttcttccgaccgatgtcaacttgtcatctctcgaaaccctcgatctcagtggttgctcangtttgagaagttttcctctgatttcaaggtaatattgttggctctatctggnnaaacaccgccattgngngaanttccttcgncaanttgggaaatccttccangagnttngtgncagggtttanaagntg

SEQ ID NO: 11595 - DNA, 484 bp, Arabidopsis thaliana
  unsure at all n locations
  Clone ID: LIB25-109-Q1-E1-A9
aacttntnccngtctgtagctctgnnnnggtcacnantncacgggtcganccaagcgtccnacaaggcacaagttgtgggatggccaccggtgagatcataccggaagaacgtgatggtttcctgccaaaaatcaagcggtggcccggaggcggcggcgttcgtgaaggtatcaatggacggagcaccgtacttgaggaaaatcgatttgaggatgtataaaagctacgatgagctttctaatgctttgtccaacatgttcagctcttttaccatgggcaaacatggaggagaagaaggaatgatagacttcatgaatgagaggaaattgatggatttggtgaatagctgggactatgttccctcttatgaagacaaagacggtgattggatgctcgtcngcgacgttccntggncaatgttctccatacatgcaancgtttactccaagaaagggtnggttccaatggtcnccccnccaaggg

SEQ ID NO: 11596 - DNA, 515 bp, Arabidopsis thaliana
  unsure at all n locations
  Clone ID: LIB25-109-Q1-E1-B1
nnnngnangtttattcnnccggcggtcaancnnacgggtcgagcacgcgtccgcacaanttgtaaccaaagaacctatatcaccaaagcctctttcatccccacgtaagcaacaacaactacaaacagagaccaaggaagcaaaagcaagcgtgtcacaaaccaaactcactactctaactccaccaggaccaccaccaccaccaccaccaccgccaccatcgcccacaaccgccgcgaaacgaaacgctgatccagcacagccatcaccaacagaggcaagaagaagcgtcacagactgtcgcagctttaccaagaaccagcgtctgagattcagcgagcgtcatcgtcgaaagagactataatggaggaaacactaaggntnactcgtgggaatccganaaaagctccntccggcgggaagcaccgcncctangannatggattaaaaangaaaaggggaacacataattttaaatctctaaccccttttgattggtttcnctttaaaacaga

SEQ ID NO: 11597 - DNA, 367 bp, Arabidopsis thaliana
  unsure at all n locations
  Clone ID: LIB25-109-Q1-E1-B10
ncgcnttcngtaacggtcttaaattcccgggncgacccacgcgtccgntagctgtaaacccgtccgcagtgggtgggtgcagttgtaaaagctccttcatggtgaaactctgaatcattgactcaactttcttctttacatggactagaaaccanatttgatcatttgtttattacatgtatnatgtcagaagttttgctatgtatcaaaanngcataactagggaaatatacataanctctgtaggcttctagctcatcaaatgatttgtccatcctatttttaatcacataatggaaagatttatgcaatncnttgggagnanatncacccggtcnatgttcccaatgggtngataagggangtc

SEQ ID NO: 11598 - DNA, 102 bp, Arabidopsis thaliana
  unsure at all n locations
  Clone ID: LIB25-109-Q1-E1-B12
ntctcttgtcctancaccctaacatcgttcaaatcnatgattcatcnacactgattcgactctctccatcttcatggagctcgtccatccctctgtttcgnt

SEQ ID NO: 11599 - DNA, 509 bp, Arabidopsis thaliana
  unsure at all n locations
  Clone ID: LIB25-109-Q1-E1-B2
nnnnnnngnaantttnacgttgnncgggcctggtcanaggataaacgggtcganccacgcgtccngaaaaacgcgtctccgagaggaaaatttagagaaaagcttctcgcgatcgcatcgggctcgtagatcgatctcctcctccatccaatcttccgttttcgtattcaccgtccggtaagaccttccggtacttgtgaatcggagaagaggaaggagaaaaattatcgcgttcctggaaattgaatttctagggtttcgtttttttctgaattattctgattctgatttcgtcaagggtgtttttcttaattggttgattgatcgtctttctaagttcaaattgttgaaaaagtaatttgaacatcctattggaaatcctgcttctcgttgaatttgaattctgggtttccgttgattggtttttttccaanggggttggttgttttaaccctttttaattccaanaagatnaatttccaattgagaagaatncaatggcancaagg

SEQ ID NO: 11600 - DNA, 429 bp, Arabidopsis thaliana
  unsure at all n locations
  Clone ID: LIB25-108-Q1-E1-H1
ccgctctgaagcagaagaaaaggtaattctgaatgtctggaagaaaccggattcacagagatatccgagacagctatcatgatcatcgtgatttacctccggagagaccttttctccgaggccctccattgttacaacctccaccaccatctttgttagaagatcttcagatacaggagggtgaaatcagaaggcaggatgctgaaatcagaaggcttttgagtgataatcatggactaagctgacgaccgaatggttctggagagagaactcgttgctgctaaagaagagcttcaccgaatgaatctgatgatttctgatcttcgtgctgagcaagatctgcaattgagggagtttagtgagaaaangcataaacttganggggatgttcccgctatggagtcgtataagaaaggaggctcacaattc

SEQ ID NO: 11601 - DNA, 473 bp, Arabidopsis thaliana
  unsure at all n locations
  Clone ID: LIB25-107-Q1-E1-G11
nnngnngtaactttanttcnccncgttcggcaaaggtctcaganctcncgggccganncaagcntcaaggcngtgtnatacgacggcacgagcttcaccgaagagcgaaaatggtgaacattccgaaaactaagaacacttactgcaagaacaaggagtgcaagaagcataccttgcacaaggtgacgcagtataagaaaggtaaagatagccttgctgcccaaggaaagcgtcgttatgatcgtaaacaatctggttatggaggtcagaccaagcccgtcttccacaagaaggctaagacaactaagaagattgtgctgaggcttcaatgccaaagctgcaagcatttctcgcaacgcccgattaagaggtgcaaagcactttgaagatcggtggagacanaaaggaaagggaacatcctctnctttaaatttgnttggttccatccaaccnactttttttggttttggttt

SEQ ID NO: 11602 - DNA, 399 bp, Arabidopsis thaliana
  unsure at all n locations
  Clone ID: LIB25-107-Q1-E1-G12
gctanacgcctgcctccttgcacctcttttctttctctcgttctcatctttctctctaanagattttgtaggtgacaatcaaaagtttgacaaaatggtgaagtttacagcngatgagcttcgaaggattatggactacaaacacaacatccgtaatatgtctgttattgctcatgtcgaccacgggaaatccactcttactgattctttggttgctgctgctggtatcattgcccaanaggttgctggtgatgttcgtatgactgataccagagctgatgaggctgaacgtggtatcactatcaagtccactggtatttcctcncctactaagaaatgatggatgaatcccttgaaaaantttaactggganccagaagacggaaacgagtacctcat

SEQ ID NO: 11603 - DNA, 517 bp, Arabidopsis thaliana
  unsure at all n locations
  Clone ID: LIB25-107-Q1-E1-G2
nnnnnngnnnnnnttnnnttncccgggnacggtccaanattaacgggtcgacncacgcgtccgggaacatcttggatgtttgaaaatcgtgttccgcacatgctggataatgattacacaccatactcctgctcttgatatttttgtcaagggatttgggaattgttaccccgaagaagggtcatcccgtaaagttccaactccatatatcaacaagtggcacaccaagctattcctaagcccggctctgctggcggggctggggaacgggataagatgatgcctgggagtggtgaaanggtttatgaaaacccttgcctgggaattnaaagtcgaaggggagacttcctgttctgaagaaaacaaagacctactgaaatctcttccaactgaatggccttcagaccctacaactgacatacatagactaaatatgggaaactcnaaagacattggttgntcctgatgaatgattcaactgggnaacacaaaactggttcatgacgttaaaggtttt

SEQ ID NO: 11604 - DNA, 495 bp, Arabidopsis thaliana
  unsure at all n locations
  Clone ID: LIB25-107-Q1-E1-G3
nnngggnnnngnacttctacgttnttcggggncggtccacanattaacgggtcnacncacgcgtccggatggcncgtactaagcaaacagctcgtaagtctactggaggaaaggctcctaggaagcagcttgctacaaaggctgcacgtaagtctgcaccaaccactggaggagtcaagaagccccatcgttaccgtccaggaactgttgcactacgtgaaattcgtaagtaccagaagagtaccgagttgctgatcaggaagctccctttccagaggctagttcgtgagattgcccaggatttcaagactgacttgcgtttccagagccatgctgtgcttgcactccangangctgctgaaagcatacttgtgggtcncttttgaggacactaacctctgcgccatccatgccaagcgtgtgaccataatgcccaaagacattcaactcctcgcangattaanagggagaacttgcttaaatgtnaattgggaa

SEQ ID NO: 11605 - DNA, 493 bp, Arabidopsis thaliana
  unsure at all n locations
  Clone ID: LIB25-107-Q1-E1-H1
nnnnngnaangttacgttnnccnggnncggtccanaaattaacgggtcnacgcacgcgtccgnggacgcgtgggtccggacagtatcgccggtggttaaggagctttgtaagaagcataatctaccgtataggagtctttcgtggtgggaagctaatgtgtggacgattaggactttgaagaacgcggcgattcaagctagagatgcgactaatcctgtgttgaagaacttgctttgggaagctgtgaacacgcatggctaaatatgtagttttttatcacggtagagttacacctaaaacagttcaatctaattaaaaagtacatatttattttgattttctgctgaagtttataattttctaaatcgccaaaccctaaagaatctatttttgataaacaaatttgtcagacatgcgtgcttgttctacgtttaagacggatcgtgccgggtcaatatacatggacaaangtactccaccggaaaaaaccgg

SEQ ID NO: 11606 - DNA, 261 bp, Arabidopsis thaliana
  unsure at all n locations
  Clone ID: LIB25-107-Q1-E1-H10
annatnantnnggncnttcaaaagaacttgcttccgcttcctggcttttgcatgactccaactgaaagattacttgtttanccctacatggctaatggaagtgttgcttcttgtttaagagagcgtcctgaaggcaatccagcacttgattggccaaaaagaaagcatattgctccgggatnagcaanggggcttgcgtaattacatgatcattgcaaccaaaaatccattcaccgggatgttaangctgctaatatattg

SEQ ID NO: 11607 - DNA, 428 bp, Arabidopsis thaliana
  unsure at all n locations
  Clone ID: LIB25-107-Q1-E1-H4
tcngaattcgacgtaaacagattncaacaatggcgggcanttcaacagcaacaagcgatgcagaagaacactttatacgtaggaggtttagctgatgaagttaacgaatcgatccttcacgccgcgtttatacctttcggcgatatcaaagacgtgaagacgccgttggaccaagcgaatcagaagcatagatccttcggattcgttacttttcttgagagagaagacgcttctgctgctatggataatatggacggtgctgagctttatggtcgtgttctcactgttaattatgctctccctgagaaaattaaaggtggtgaacanggttgggctgctcatccactttgggcagatgcagacacatggtttgagangcagcaacaaggagaaggagantctnaagaancaagctgagaacaaggctg

SEQ ID NO: 11608 - DNA, 325 bp, Arabidopsis thaliana
  unsure at all n locations
  Clone ID: LIB25-107-Q1-E1-H5
taanntnantcatatnattgataatctcttcaaacccgtcaatggcaaagacgaangaatgttcagggaactcttgttagacttttactacagttcagagaataggannccagagcacatcattattttcagggatggtgtaagcgagtctcagttcaatcaagttcttaatattgaattggatcagatgatgcaggcatgcaagtttcttgatgatacgtggcatccgaagtttacagtgatagttgcncagaagtaaccnncacacgntngttcttccagtctcnaggccctgataatgttcctccaggaacaatnattgana

SEQ ID NO: 11609 - DNA, 454 bp, Arabidopsis thaliana
  unsure at all n locations
  Clone ID: LIB25-107-Q1-E1-H9
nnntnccgcgnncaggtnaaggtcacagantncccgggccgacccangcgtcagctcatttctcttttgcatttctttctttttttctgcattgcattcttttgaggggtttaattttctgcatagctttgtctaatctcttagagctcaataagagaagatggatgttccacggccagctttcaaatgttttgatgacgatggccggcttaaacgttcagggacggtttggaccgcgagtgcgcatatcataaccgccgtgattggatctggtgttctatcgcttgcgtgggctataggtcaactcggttggatcgcaggtcctacagtgatgttgttgttctcttttgtcacttactactcttccacgcttcttancgactgctacaagaaccggagattctggtctctgggaaagagaaactatacntaacatggacgccggtccgattaa

SEQ ID NO: 11610 - DNA, 438 bp, Arabidopsis thaliana
  unsure at all n locations
  Clone ID: LIB25-108-Q1-E1-A1
ttactgattcttcattgacggtaggagtcaccacttttggcggcgattccttgttctctattttttttgcacaagcaacatttagcttctgcaaactccagttcatctctcaaccctcatatcgccgtgttttctcgctctagtaccgcgagctcggacgaaccaggaagcaatccgttaatctagaagcggtgttgagaagatgacgattacatcaaatatctctgtacagaacgataacctcgttgttcaagggaagactatccttaccaaaatccctgacaacattatcctaactccggttaccgggtaatgggattcgtttccggttcaattaaaggcgcgacgtttggancaaaagcaagagtcctcatgtgntccccatccggtgtattgggagggtcctccgggtcnatgtgncggtttccgggnttaagg

SEQ ID NO: 11611 - DNA, 437 bp, Arabidopsis thaliana
  unsure at all n locations
  Clone ID: LIB25-108-Q1-E1-A11
annnacncttncggacnntgattccccggngccgttttcngnaacnggtngggggtttggggtcgacgccgtcgtttgcagttccatccaagttcccttcgtccattaccttcccggcatattcgcttctctcggagctttgatgttcaattgcgtcaagaaaagaagacattgattactctccttacgacgaaggcgagtggagattgaagctgtggcttttcatagcgtatgtcgtagcatttgtttccttagctgcttctgttggcttgctgattcaagattcggttgtgaagactgggccttcaacttggactgggtgtggctggtgtctttcaatgtgtatttgtattgataagtgggctaatgtattggacatcgcactcaagagtaacgcacaagcacatacttcatctcccgactcagantcatactgg

SEQ ID NO: 11612 - DNA, 434 bp, Arabidopsis thaliana
  Clone ID: LIB25-108-Q1-E1-A12
gcaaagttgtatttggagcttaaaaccctaaacccaagaaatccccaactcttaaacttgagaagatgatggctgatgacactgaactcgtcagtaacactgaccagaagatggaagacgcttcagccgaaaaccctgcccgaagctgattccccctcatcggatgattccggcgattctgattccgactcagaagatgaagccgagtcgaatcagcagattgtaaccttggagtcggagctctccgctaatccttacaactacgatgcttatgtccaatacattaagcttctcaggaaaacagccaaccttgaaaagctaagacaagcaagggaagctatgagtgccatatttccgttgagtccttccttgtggcttgaatgggcaagggatgaagcgtctttaaccgctagtgagaatgtgcctgaaattgt

SEQ ID NO: 11613 - DNA, 499 bp, Arabidopsis thaliana
  unsure at all n locations
  Clone ID: LIB25-108-Q1-E1-A2
cttttttcctgccgccaccggtccaaaaaatcccgggnccacccaagccttcnaagaaacacaaacagaacaaacaannanatcaatttgaagagtctctcaatcgttaggggaaacaaatagagaaatggctaactttaactggcctccgcttccaacgtctccgccgctcgtccggctctccttctcaagcctaccgtcgccatctctgctcctgttcttggtttgcctccaatgggtaagaaagaagggangagtgagatgttcaatggagacaaagcaaggaaacgtctcaatcatgggggctggagtttcagctgcaacaacagctgctttgacggcggtgatgaagcaatccccgcgatggctttggttgatgagaggatgtcaacaagaaggaacaagattancctttggtctaagcaacaacctcttgggttggattctgtttggagtccttggtttgatctggacnttcctcctcgtccaaacttcatct

SEQ ID NO: 11614 - DNA, 426 bp, Arabidopsis thaliana
  unsure at all n locations
  Clone ID: LIB25-108-Q1-E1-A6
ggccgccactgcatccttggactccttcggaagcttgatactgttcttcagcttctctctcttgctcgccaccgacggcgactcctctagcatcctctgaagacctccgccagctcttggatccaccatctccgccacaatctccttctgaaactaataattcacgagattcttcactgacagctgaagatacagagcaagactgtccacaatccttcgtaagactatcgtccagtaagatgctatcctcatcttcatatcgaaggcttgctgcaggagatgagcatgatacttccgtaggtgagagatcttcacaattccaccaaatccagtcaacgagaagtgctcaagnntttttccaatcngncaacacaagcataaatgaaantttggttgttcaancagtcatccggatccaagacgtca

SEQ ID NO: 11615 - DNA, 150 bp, Arabidopsis thaliana
  unsure at all n locations
  Clone ID: LIB25-108-Q1-E1-A7
tnaagatcttgtgttccagtanctcgccangaangtcctccaccgtccaatggatttcgatctccctganctccgttcttgcaatgttgatccatgggacttgccatganagaagaacaaggaagtgtattacttcgggaaaaaggaana

SEQ ID NO: 11616 - DNA, 458 bp, Arabidopsis thaliana
  unsure at all n locations
  Clone ID: LIB25-107-Q1-E1-F9
tnactgnccgccgnccaggtanaggtcanaganttcccgggccgacccaancgtcnnccagactactcatatctaaagagacttttccgagacttgtttatccgtgaaggttatcagtttgattatgtattcgactggactgcattgaaacaccctcagagtagtgccaggtcccattccagtacacatgaaaggcatcgtaccggtaaaccagggatgggtgcgggaccgtctgctgaaaaacctgaaaggatttcagtagggaacatccgcgataaattctcaggtgcggtcgaagcatttgcgagaaggaacgttagaggacccagtccccatcaaaaccataccagacatcgaactcttgacgaaattccttcaatgaaacctgctgtgaatatggtatctgaganngggagaaacncttccnanatncggcaatncttccgaggaaaagcatt

SEQ ID NO: 11617 - DNA, 490 bp, Arabidopsis thaliana
  unsure at all n locations
  Clone ID: LIB25-107-Q1-E1-D3
nnnnnngaacgtntaanctcnncgtgntcggtccngaattancgggtcnacgcacgcgtccggagtgacnctcgtgagtctgatgaagagagatttatcacagacgcagagagagatggttctggctccgttcttggctttcagctcactcctcctggtgatcaacaaacagttagcactagcacaggagaaattacacatcatgaagagaagaaagaggctattgatcaaaattgtaatggctgactttggcgtacctggaaatagagctgttgaagaaggagctgcaaaggttgggattccgaagtggaaaaagctgaagttgtcaataaccttgttttcgttacatccgangcggctccttactcgaaaacaggaggattaggagatgtttgtggttctttgccgatagctttagctggtcgtgggcatcgtgttatggtcatttctcctcggtacttaaatggaactgctgcaagacaagaactat

SEQ ID NO: 11618 - DNA, 146 bp, Arabidopsis thaliana
  unsure at all n locations
  Clone ID: LIB25-107-Q1-E1-D4
tngcagatcctgatattcaaattgatntgtgacgataccaacatattcaaatggaccgntcttatcaaaggaccttcggagactccttacgaaggcggtgtttttcangcttgctttttctgttcctgaaaccttatnctttgcaa

SEQ ID NO: 11619 - DNA, 393 bp, Arabidopsis thaliana
  unsure at all n locations
  Clone ID: LIB25-107-Q1-E1-D6
gatttcgagatccaactaactctgctccttatctcagcttgttgaatttgcgaagtatgggagacgctagagacaacgaagcctacgaggaggagctcttggactatgaagaagaagacgagaaggtcccagattctggaaacaaagttaacggcgaagctgtgaaaaaagggtacgtgggaatacacagttctggattcagagacttccttttgaaaccggagcttctcagagctattgttgactcaggatttgaacatccatctgaagtgcaacacgaatgtatccctcaagctatcttgggtatggatgttatctgccaagcaaagtctggtatggggaagactgctgtgtttgtcctgtctactcctacaacanattgaaccaatccnc

SEQ ID NO: 11620 - DNA, 79 bp, Arabidopsis thaliana
  unsure at all n locations
  Clone ID: LIB25-107-Q1-E1-D8
cngcattttcaacacttgagctatggngttggagtggaatctttgttgtgtcgtntgttggtgctctgttttaccctaa

SEQ ID NO: 11621 - DNA, 395 bp, Arabidopsis thaliana
  unsure at all n locations
  Clone ID: LIB25-107-Q1-E1-D9
ctctttacgatatctgtttccgtaccttgaagcttgctaatcctacatttggtgaccttaaccatctcatctcagctacaatgagtggtgttacatgctgtcttcggttccctggtcaactaaactctgaccttagaaaacttgctgtgaaccttattcctttcccacgactccacttcttcatggttggttttgcacctttgacatcaagaggatctcaacaatacagtgccttgagtgtccctgagctaactcaacagatgtgggatgccaaaaacatgatgtgtgcagctgatcctcgtcatggtcgttacttgacagcttctgctgtcttccgtggaaagatgaagtaccaaagaggttgatgaacagatgaaggaacgtccagaaanaaa

SEQ ID NO: 11622 - DNA, 447 bp, Arabidopsis thaliana
  unsure at all n locations
  Clone ID: LIB25-107-Q1-E1-E12
antnncgcgnccaggtanaggtcanagantncccgggncgacccaagcgtcngctcaatctcaattgtttcaggagcttcgtaaaaatgtctgcttcagcgactcaaacggccggagaagtttcaatggggatcaagcctccttcacaccctacttacgatttgaaagctgttatcaaactagccctagctgaagatgctggtcatacaggagatgtaacgtgtatggctacgataccgtttgatatggaagtggaagcttatttcttggccaaggaagatggtattgttgctggagttgctcttgctgacatgatttttgaacatgttgatccctccttgaaggttgaatggatgcgaaaggatggagaattatgttcanaaagggnttgangtttgggggaaatnnccaggnaangcacanaaanttgttngnggcggnaaagga

SEQ ID NO: 11623 - DNA, 492 bp, Arabidopsis thaliana
  unsure at all n locations
  Clone ID: LIB25-107-Q1-E1-E2
ntngngnaacttcnacnctnctcggngccggtccannnantaacgggtcgacncacgcgtccgnccacgcgtccgcaaaatacctttaattttatttgattccataccctaatttttgtatattccatgtcaatgaacgtttcaggagaaatgggtcaaaagttttgggagaatcaagaagatcgagcgatggttgaatccaccataggctctgaagcttgcgactttttcatctcaacagcttcagcttccaacactgccttgtccaagcttgtctcaccaccaagtgattccaatctccaacaagggttacgtcacgttgttgaaggatctgattgggattatgctcttttctggctagcgtccaacgttaatagctctgatggttgtgtcctgatctggggagatggtcattgccgtgtcaaaaagggtgcttcaaggnaagattactcctcagcaaagatgaagatnaaaaagacgtttgcctccgca

SEQ ID NO: 11624 - DNA, 504 bp, Arabidopsis thaliana
  unsure at all n locations
  Clone ID: LIB25-107-Q1-E1-E4
gntngngnaactgtntaccttggncgggcccggtccaaaaattaacgggtcnacncncgcgtccgnttctcantttangggattgtttttttaacaaatttttgccttgccataagcaatacanccatggcaagggattctccncngttgttcncattagcctttggttttagccctcgggctcagtgttcctttccgtttccggtcacgctcctcccgtgacaccgaagaaaatcagcatgtccaaaaacagtatccgaactccagaccttaccttttaccgaaatcactgagatcctaaaccgaaaagagcggtctgccccgaaaacccctgagttcaaggcaatgttcacaatgtgcaaaggctacgtgacatacctcgagagcctctacaagtttgagaatcccattgtagatgttttaggaattgccaagaccaagatacaccctgatgaacaaaggcaattccttgctgcgcaaagctaagtgttgggcnggtaaatt

SEQ ID NO: 11625 - DNA, 422 bp, Arabidopsis thaliana
  Clone ID: LIB25-107-Q1-E1-E5
gaccacgcgtccggagaaacgaggcaagaggcaggtcatgatcaggccttcctccaaagtgattatcaagtttctgattgtcatgcagaagcacggttacattggtgagtttgagtatgtcgatgaccacagatctggcaagatcgtcgttgaattgaacggaaggttgaacaagtgtggtgttatcagcccacgttttgatgttggtgtcaaggaaattgaaggttggactgcccgtttgctcccttctagacagtttggttacatcgtgctgactacatctgctggcattatggaccatgaagaagctagaaggaagaatgttggaggcaaggttctcggcttcttctattgaagttttattttatggggaaacagattttcattgagttatttttaacttttgtcctccattttcccct

SEQ ID NO: 11626 - DNA, 419 bp, Arabidopsis thaliana
  Clone ID: LIB25-107-Q1-E1-E6
aaagacaaaaatatatataaaaaagaaaaaaaaagaaaaaaaaataattgtcttgctctgttctatttaacttttcttatatataaaaaaaatggcgaaaaatttactagcaatatgtctggtgtttatggttgcatcaagtgtggtttatgaagtgcaagggactttcttgttaaagctttacttgaggaggaagtttcccagacgttgtatcgactttgccccttatgctggcaaaggtatgttgatgctcgtgagcaaccttgaaggtggatgtcccgcaactagagagttcaaacaattcttttcaacgttcaagtcttacatgagctttatcagctcagcatcgatatccgcatcgaaaaacatcgatgtggagatgaatgggagatgtgaattgctttccaaggctatgtctg

SEQ ID NO: 11627 - DNA, 489 bp, Arabidopsis thaliana
  unsure at all n locations
  Clone ID: LIB25-107-Q1-E1-E7
ggngngcaactctacttccnncgngtacgtncanatcancncttcccgggtcnacccacgcntccgaaccgtcgttgtattcgtcttccgcctcctctcccatcggttttgaacagcttggcagaagaagtgaaacttgagagagtaatggagaacttggaagatctgaaaattcnggctgagcactggtcgcatcanggaattgaatatcttcagaagataccaccgantcagctgtatgccgccattggtgttttgttgtttacaaccatcttgctcttcctatccattcgcctggtcagacgtancagatccaacactgtactcctttctgggctgaccggaagtggaaagactgtgctcttttaccaactccgagatggatcgtcgcatcagggcactgtaacatcaatgggaaccaaatgaaggcacttttgttcttcanagtgaaaatactaagaaaggaaannatcaagcctgttcatcttg

SEQ ID NO: 11628 - DNA, 416 bp, Arabidopsis thaliana
  Clone ID: LIB25-107-Q1-E1-E8
gaaggaagggttaagagagaaaggtaaagtaacaagtctctcgagtttcctttttgctttcccttttgtgtggttcatctctcagtcttcttcttctgctataacgctcttctccatcaccgtataatcgagtttcgattgtctccgacgaagagaagctgacacttctggtttcgtcaatttctactgggataaagctctctactacctttttgctcagagaaaatggtttgattttcgaggatgataaaggcttcaggttgttgtagaggtgtttttgccagccttggtgctggtcatggattttatctgactatcgtatgtgcctttgatgaaactaaataatgccccggggagagttagctatgggctctttagagactgtttgttggcttaagggctgcttgggttaaccg

SEQ ID NO: 11629 - DNA, 456 bp, Arabidopsis thaliana
  unsure at all n locations
  Clone ID: LIB25-107-Q1-E1-E9
aactcgccgcgntcggnaaaggtctcgaantcncggcccgacccanncgtcaaaaagtagantaataactcttaaacacacaaagtttctttattttttagttacatccctaattctagaccagaacatggatttgatctatttcttggttatgtattcttgatcaggaaaagggatttgatcatcaagattagccttctctctctctctctagatatctttcttgaatttagaaatctttatttaattatttggtgatgtcatatataggatcaatggaggaaggtgggagtagtcacgacgcagagagtagcaagaaactagggagagggaaaatagagataaagaggatagagaacacaacaaatcgtcangttactttctgcaaacgacgcantggtcctcnnaagaanagccttaatgaactcnctgtnctggtgttaaggccgangttng

SEQ ID NO: 11630 - DNA, 400 bp, Arabidopsis thaliana
  unsure at all n locations
  Clone ID: LIB25-107-Q1-E1-F1
ggaaaatgatactggaagttacacgaatgtgtcttgtgatgactctgatgaaggttttatgagtttggacaagggtatagatgctagtagattggatcatagtgtattggggtctaaagtgaaggctaacatcaaagagactggagaggatactgattttcatctgcgggataaaaatgatgctgatatgtactctgatgtttcttgtgatgactctaatgatgaaagcagcaacgaagttagatctacaggctataagtcgacgagacaacacaaacaagcttatgataaaatcaaactacatttggaaagctgaacangccaagagttacaaagaaagcctgcaaaaccacgcaagatgcagagcacaatggctattcgctatctcggtttaagaaca

SEQ ID NO: 11631 - DNA, 383 bp, Arabidopsis thaliana
  unsure at all n locations
  Clone ID: LIB25-107-Q1-E1-F11
aanaaangccgtttgggatttcttttacacgaacacattcttccgatctttcttgtttttaacttaccggtantaacgaagatatgcagaggtttttctccgccagatcgattctcggttacgccgtcaagacgcggaggaggtctttctcntctcgttcttcgtctctcctatncgacgacactcagttacagtttaaagaaagtgtatccacagtttgcgcangataanancgcncctcatgcagaacganttgataaaactaattcatttccaaaggatgtaaacttatggaagctaatgggtgaagtttaatctccatggaatcactgcgccagaggaatatggagggctaggtcttggtnctttngcantgngttgcc

SEQ ID NO: 11632 - DNA, 350 bp, Arabidopsis thaliana
  unsure at all n locations
  Clone ID: LIB25-107-Q1-E1-F8
aagaaaaaaaactaataanncaaaatcaatanaaagagaataaaaaatggtgggttctcacaaagcaagcggagtgcttcttgtgctactagtggttatggccaccacaatancaaacgggacaccggttgtcgataaagcaaaaaatgcagctacagcagttgaagatacagcaaaaaatgcagctacagcagttggcggtgcagctgcatcagttggtgctaaagtatcaggtgccanaccaggcgcagcagttgatgttaaancatcaggangccaaaggaganancaaanctgatgatagntgnggcatttgcngctgcatgggaaaagaagcttgtgcagcangg

SEQ ID NO: 11633 - DNA, 395 bp, Arabidopsis thaliana
  unsure at all n locations
  Clone ID: LIB25-107-Q1-E1-D10
caaatccattaagagaccctcccgtgcccggaaagcaacaatctgtcatctccttcaccaagaaaaacatcaaaggactgaatattcccgaaggcgacggtttcccaacaaagcttttcttcaatggagaagaatgtgcgcttccaaaacatttccctaagaagagctcagggcatagacgcggtatcagtgtctcaatgtcctttgttttcgcaacaatcgcggcttttgcactaatgatgattaattactgaggagataactatacttaccattcttgatcagtttttttgatcttcaaattcttaagattggtgttttgatgatgttgccgaacananggaaggttnaaaaggagcagatggttatatgattgatctaagttgggaaaaata

SEQ ID NO: 11634 - DNA, 428 bp, Arabidopsis thaliana
  unsure at all n locations
  Clone ID: LIB25-107-Q1-E1-A2
gtttccagtccagaagaaatttctcaggcaattaatatcccaagcccagttggcactgctctgtgtatggctgcttctataaggaaagatcatgaaaaggaaggtagagagctggttcaagatattgcttgcagctggggcagatccgactgcgcaagatgctcagcacgggcgaacagcgttgcatactgctgctatggctaacaatgtggaacttgtgagagtcattctagatgctggtgtgaatgcgaacatccgcaatgttcacaatacaattcctcttcatatggctttggccagaggcgcaaactcctgtgttagcctacttctgggagtctggttcaaactgcaatatacanggatgatgaaaggagataaacgcatttcatataacaacaagatgcagcgaanatgatacntgaaaaacc

SEQ ID NO: 11635 - DNA, 422 bp, Arabidopsis thaliana
  unsure at all n locations
  Clone ID: LIB25-107-Q1-E1-A3
gannccggtaacancaggaaaatttgctttgactcgcacacatcaaggttactcatannccagggctgtgaaattgagcttgtgatgtcgcatagtangtcccatttcagtnataacaatcagtctgcatgaaaaattaagctactgttttgatacgattgccaacgtgagagtgagaaactaagatgtgtgtctacattaaaacataacaaattnaaaacgggtctacgcacgtccaaagtatcantaacctatcttcatttggttccccatgatatccacatctcagattaggacattaccactttgtgttgcaactttgcnttgatgcatactccatgcatgttttatttgatttttcagtcatctgctgcaaccccttgtggattgtactccgacacttggaagaatactcnaaaaaa

SEQ ID NO: 11636 - DNA, 494 bp, Arabidopsis thaliana
  unsure at all n locations
  Clone ID: LIB25-107-Q1-E1-A4
nnnnngnaantgtntacgcttgnncggtnccggtccanaaattnacgggtcgacccacgcgtccgnnggacgcgtggggtcgaacttgatatgcgttccagcaatcttcggaagctatgggaaggaactaaacaacttagaaatctcaagtggatggatttgagttattctagttatctgaaagagcttcccaatctttcaactgcaactaatctcgaagaattaaagcttagaaattgctcaagtttagtggagctcccctcctctattgaaaaactcacgagtctccaaatattagatcttgaaaattgttcgagtcttgagaagctccccgctatcgagaatgcgactaagctccgtgaattgaagctccaaaattgctcaagtctaataagagctccctctttctattgggaactgccacaaatctgaagcaattgaatattagcggatgctcaaagtctcgtgaaaactccccatcctcaattggggga

SEQ ID NO: 11637 - DNA, 417 bp, Arabidopsis thaliana
  Clone ID: LIB25-107-Q1-E1-A6
aaacaaagttttgttcttgtcttcttcacaagagaagagatatgtctctcttactctgtttttcttctttctctcaataaaccagcagatacggcgacaagggcatctgaccagtagcgaagggttggaggaaatggctcgatatcttcttctgggtcttcaggcactccttcaagatctctcccgtcccacacatcgtttctagttgcacatttggaatggacagcataatgacattctttattacaagaatattgcccgtagttgatgtcaacggtttggcgacaaactccgcaagagaaatcaccaagaaggaagggaggatgtgagagagagacgatgagagtgtcgggtgatctgaatgacacgaggtaaatagatacatgatctgtggaccatgtggctgcaagggaaaca

SEQ ID NO: 11638 - DNA, 421 bp, Arabidopsis thaliana
  Clone ID: LIB25-107-Q1-E1-A8
ggcttcttcgcaacgttctctctcaaactcgcagagtaacagattcgataatgggaggaggatttagagttttgcatttggtgaggccattcttggcttttcttccagaagtgcaaagtgctgacaggaagattccatttagagagaaagtgatctacactgtcatctccctcttcattttccttgtttgtagtcagcttcctctctatgggatccattctaccaccggtgctgatccgttctattggatgcgtgtcattctcgcatcgaatcgtggaacggtgatggagcttggtattactcctattgtcacatctggattagtgatgcaactcttagcagggtcaaagattattgaggttgacaacaatgttcgtgaggatcgtgctcctcttgaatgggtgctcaaaagcttcttggg

SEQ ID NO: 11639 - DNA, 476 bp, Arabidopsis thaliana
  unsure at all n locations
  Clone ID: LIB25-107-Q1-E1-B1
taacttcggacgcgnnncgnccatagttatagggtccacgcacgcgtccgaacacgnatccggagaaaactaaagaagctagaagatggagaaaagtaatgatcatgacaaggctagccacggcggctccggtggtggtgccacggagaagtgggaggagactagcctcggaatccgaactgccgagacaatgctccggttagctccggtgggcctttgtgttgcancacttgttgtcatgcttaaggactctganactaatgagttcggttcaatttcttagtccaatctcacagcctttaagtacttggtgcacgcaaatggaatatgtgcatgctactctcttctatcagcanccattgcangcgatgcctcgttcttcttcgacaatgcctccgtgtttggaccttcttttgtctcgaacagcttctgaccnacctggttcttgctgctggagctgtatcaagcngaangnt

SEQ ID NO: 11640 - DNA, 396 bp, Arabidopsis thaliana
  unsure at all n locations
  Clone ID: LIB25-107-Q1-E1-B10
agtttccgtgctctattaccgatgggaaccaaagtaaaatgtctttcagatgctggtttttttctcaacacaagagacgtctcaggagttcaatacattaagnacatacttcgaagatgttgttactcttcatggatcagcaaagaacttgccgaggtcatgcacatcaagattaactcctgcaatgtgtttctttccgcaatatgtggctcgccagattagaactcctctgttcattcttaatgccgcttatgactcttggcagataaagaacattttggctccgcgagcagctgatccttacggaaaatggcaaagttgtcaactagacatcaaagaattgcaaccaaagtcagattaaaagttatgcaggatttcaggttagagttcttgagt

SEQ ID NO: 11641 - DNA, 466 bp, Arabidopsis thaliana
  unsure at all n locations
  Clone ID: LIB25-107-Q1-E1-B11
gtgggnggnggtaactttacgctcccngcggncaggcanaggtcanagggtncccgggccgacccaagcgtcagcaagtgttcaggaccagggtcacacaaagccaagagagtgccattcacacaagacatcgacgacaaagaagctaactgtttcctatccctcggctacatccaaggatccaagtggcttctcccaccacccgctttgtaaattctttaatatcaacctattaaaattaaaattaaaacgtaaaactaaaattaaaacttctacttacatccttttttcaccgaaatatgtttatcggtgtatattatttttgtcgatattttctttcaatttccaagaaatcctctcttctttaaatatcatggaggagttgagatttatgtaattttggtttcattataataaaatgttgtttccgttcaagannngnncngnnnntnctngncnggntttg

SEQ ID NO: 11642 - DNA, 369 bp, Arabidopsis thaliana
  unsure at all n locations
  Clone ID: LIB25-107-Q1-E1-B6
cccttnnaannctctaaagtgacgtngtattaaanaagagcgtcttcataaacgcccttcgtcttcttccctgcaaatctattttctagatctttctttcttccgcgaaacgacaatgagagagtgnggntcgatncacattggtcaggctggtattcaggtcngaaatgcttgctgggagctttactgtcttgaacatggcattcagcctgatggccagatgcctggtgacaagantgttggtggaggtgatgatgctttcaanaccttcttcagtganactgggtgnaggtaagcacgtcgcacgtggtgtcnttgttgatcttgagccaactgtgatngacgnggtcaggactggtacttacnttc

SEQ ID NO: 11643 - DNA, 392 bp, Arabidopsis thaliana
  unsure at all n locations
  Clone ID: LIB25-107-Q1-E1-B9
attggataacagttattcgtctgggttcagtgaagatggagcagaacgagttcatggaggcaataatgtacgttaatggtgttcgtagagttttgcctgatggattagctcacatgacgcttctcgaatatctcagagatttaggattgaccgggacaaagctcggatgcggcgaaggtggttgtgggtcttgcaccgtgatggtgtctagttatgaccgagagtcaaagacatgtgtgcattatgctgtcaacgcttgcctagcacctctctactctgtagaagggatgcatgtaatatccattgaaggagttggtcatcggaaacttggcttgcaccctcttcaggaagtcattgggcatcttcgcatggttccnaatgtgggttttgta

SEQ ID NO: 11644 - DNA, 241 bp, Arabidopsis thaliana
  unsure at all n locations
  Clone ID: LIB25-107-Q1-E1-C11
ttggttgcttcntctctgatctttctntcttttttttttttntgnaagaatcaatttccctcncaaatcagaaatcnaaaaatgggaacaacgatcntggttctctccaagatcctgaactttcttactaacaacagtgctgattggatccagtgtgatgcagtgtagtagtgtaaccnacgataagaaagctatcgtcatcaatggccaccgtanaatcctcctctcnggntctantcag

SEQ ID NO: 11645 - DNA, 394 bp, Arabidopsis thaliana
  Clone ID: LIB25-107-Q1-E1-C12
cgtccgcccacgcgtccgtatatttgaagctactaaaatcccatgccagagcaatgagtttgttcttgagcttctcagaggtgttcgccagcattttgataggtttatcaaggacttaaagcctggtgatcttgaaaaatctcagcttggattagctcacagctacagcagagccaaggtgaagttcaatgttaaccgagtggataacatggttattcaagctatcttcatgcttgacacgcttgataaggatatcaattcctttgccatgagagtcagggaatggtattcgtggcacttccccgaactaagtgaagatagtcaatggacaaactatcttacgcccgttgttcaaaagatgattgatgacaagtcaaagttgactgaaagatta

SEQ ID NO: 11646 - DNA, 417 bp, Arabidopsis thaliana
  unsure at all n locations
  Clone ID: LIB25-107-Q1-E1-C4
gcgggacgcgtgggtttcgtttccgatcgcacttcttctcaagtaaatttaatagacgtttgttgggtgatttaagaagatgggtcaagatccaagtactccgacanntatttcgatgatactttcgaatacaggcacgttgtacttcctccggaagttgctaagcttttacctaagaatcgtattctttcggaaagtgaatggagagccatcggagtgcagcaaagtcgtggatgggttcattacgcgattcatcgtcctgagccacatatcatgctctttaggaggnctcttaactaacagcaagagcaccaagctcagattgctaaagtagaagaattatgcaaaattctccctaatctctgtttatgtctctcgtaaacgaaggttttaaaatacnactctgatgttttgttc

SEQ ID NO: 11647 - DNA, 466 bp, Arabidopsis thaliana
  unsure at all n locations
  Clone ID: LIB25-107-Q1-E1-C9
gnnnngnaactcnananntcgccgccaggtacaggtcaaagagtccccgggncgacccaagcgtcngccgaagtagagacgttgggtcgggtcagacatggaaacatcgtgaaacttcttatgtgctgcaacggcgaggagtttcggttcttagtgtacgagttcatggaaaacggcagcttaggtgacgttttgcattcggagaaagaacatcgtgccgtttctccacttgattggacgacacgattttcgatcgcggttggtgctgctcaaggactttcttatctacatcatgactctgttccgcctattgttcaccgtgacgtcaaaagcaataatatattgttggaccatgagatgaagccacgtgtcgccgatttcggtttagctaaaccgttgaagagagaagacaatgatgggtgtctccgatgtttcaatgtccttgtgttgcctggttctacggcta

SEQ ID NO: 11648 - DNA, 471 bp, Arabidopsis thaliana
  unsure at all n locations
  Clone ID: LIB25-107-Q1-E1-D1
nnctnccggtgccctccaaaaattaangggtcnacncacgcgtccgaaaatgtcttttcttgcgccttgtcaaattttggagctgaatattatttcggcccaagaattggcgcccgtggcacggtgtatgaagacatatgcaatcgcttggattgatccagagcgtaaattgacgactcgggtcgacaatacgggcggaacaagccctacatggaacgacaagtttgtgtttcgtctagatgaggaagcactctacgatgccacatcaatagttgttatagagatctatgcattgcattggttcaaagacattcatgttggaacggtacaagccttaataagtgaccttgtaagcccttcttcggctatgagattcgttaccctagaggttcttcgtgcctcgggccgcccccacgggctcctaaacattgccgtgggggcttatcgataactcaagncaaaacatgcctc

SEQ ID NO: 11649 - DNA, 380 bp, Arabidopsis thaliana
  unsure at all n locations
  Clone ID: LIB25-107-Q1-E1-A12
ctaattgattgatcttattaagaaatcgatgtcttactccatgacttttttttaggaaaaaagaggagaacaacagcctgacattaggtcctattaaagtaccccgttaggtagggaatgaatagaacccatcattgatttgagatattgatagggtgaatacccagtctactcaatgctaggtagaatgagtataaggaactcaaaaatgatcttttcgtcctatgaaccttaaggtgtatcaagtttcatgtttgattttttaatcaggatgttagagactatatttaacttaagttgatctagaccaaaagcaaacctacgtcaagagaaaccctcctttgaacactttggnagttctncggtattgtattanaatt

SEQ ID NO: 11650 - DNA, 317 bp, Arabidopsis thaliana
  unsure at all n locations
  Clone ID: LIB25-103-Q1-E1-G6
aatttttagcatggggagtgaagtcaaccgtccactagctgattttccagcanatatctgggaagatccattaacttcttncgnggngtcngacctcggaactgagacgttcaaagagaagcatagtacgctaaaggaggcggtgaaggaagcttttatgtcttccaaagcgaatccgatagagaacatcanattcatcgatgctctatgtcgccttggtgtctcctatcactttgagaangatatngtagaacaattggntaagtcatttgnttgtcttgattntcctcagatgggtnagacangagggatgcgat

SEQ ID NO: 11651 - DNA, 504 bp, Arabidopsis thaliana
  unsure at all n locations
  Clone ID: LIB25-103-Q1-E1-G8
gtnngtanttccatcnagntcgnnccgnacanatngcncnattcgcgggccgacccacgcntcnaagagatctctcccccaatcatgcctgcgatacaatccccatcggggaagatcttgcagcttgagatggagaatttcaaatcttacaagggtcatcaattggttggtcctttcaaggatttcactgctattattggtcccaacggttctggcaaatctaacctaatggacgctattagcttcgtcctcggcgttcgtaccggtcaacttcgtggttctcagcttaaggatcttatctacgcttttgatgatcgtgacaaggaacagagaggtcgtaaagcttttgttcgactcgtttatcagatggacgatggagtagagcttcgtttcactcgttctattactagcgctggtgggagtgaagtaccgtattgataataaggttgtgaatttggntgaatncaatgggaagctacgattccctgggaaaacttgtaaagg

SEQ ID NO: 11652 - DNA, 457 bp, Arabidopsis thaliana
  unsure at all n locations
  Clone ID: LIB25-103-Q1-E1-G9
aattccacttngnncggcccaggtcanagtatcncgggccgacccacgcntcaacacacacttcnggtgctcaaaatcaccgctgatcncganaancgcactaatctccagccttccggtggctgcnacgattccaacttcccttacctcttcaagttgaaatgtgaaanatgtggagaggtgactccnaaagaaacatgtgtgactttgaatgagacttttactcctccgggaggtaagggtacttgtcatcttgttcagaagtgtaagttctgtggaagggaanggaangtgactatgattccgggcaaaggtcgacctttaactctggaanattctgangctggataacatgcccctcttatggtgtntgactgtcntggctatgaanccattgaattccggatttggtggaaattgnaaagctcaagctgaatctgnaaccaaatttgatgag

SEQ ID NO: 11653 - DNA, 469 bp, Arabidopsis thaliana
  unsure at all n locations
  Clone ID: LIB25-103-Q1-E1-H1
gncccaggtcanaganacgngggtcngtccaancctctacggnaaactngngnaangcagcaggctctggttaaaggatcaggtgcaccgatcagacatggttcagtccacgttaagttccctgagccagacaccgaaggcaacaagatcttcgagaccttagaaaatgagttccagaagcttggaaatgaccagaagatctgagtgatctacaacccttataacacgaattgcccataagaaaccggaatttgtctctggttgatgancantatttaagataagaatcaatcacctttacntgtattactagtttcgcttgcatcagctcgatgcaggttttgtttaaaaagaagatggaacacaatttcctcggaatggatnntttgatctagnaccattatatatatngaactccaaaaaaaaaaanaaaggngggcccnccaaaagggttcnaccttntttgccc

SEQ ID NO: 11654 - DNA, 456 bp, Arabidopsis thaliana
  unsure at all n locations
  Clone ID: LIB25-103-Q1-E1-H12
nnttnccttgccccgtcaanacanangacgcncggnccantncncnacccnatcgtgngnnnngnngagcacttcgacgttctgactaaatccggtgagaagaccggtgtgtccaaacccaggggagaggttcacagagatggagattaccatcgtgctgttcatgtctggatttttgtggagactactcaacagctacttctccaacttcgatctgatgataaagattcttggcctggtcaatgggacatctctagtgctggccatatatcagctggtgatacatcgcttctatctgcacagcgggagcttgaggaagagcttggcgtaaaactcccaaaggatgcatttgaaaagatcttccgtttttctgcangaatgtgtcacaaacgatggcaaattcataaaataatgagttcaatgatgtgtatcttgttactattctgcatccaatcc

SEQ ID NO: 11655 - DNA, 503 bp, Arabidopsis thaliana
  unsure at all n locations
  Clone ID: LIB25-103-Q1-E1-H2
gnnnngnanttcnatcnagnacgnnccaggncacnagacncnngggncgacccangcctctagaganattcttncnaccggagctaaatcgctattagggctttcgatggcttctccaaaagggattttcgatagcaattcaatgagtaattcaagatctgttgttgttgttcgtgcttgtgtttctatggatggatctcaaactctgagtcataacaaaaatggatctattcctgaggttaaatccattaacggtcacacgggacaaaagcaaggacctttgtctacggtcggaaactcgacaaatataaagtggcatgaatgttctgttgagaaagttgatagacagagattgcttgatcagaaaggatgtgtgatttgggtcaccggtcttagtggttcagggaagagtactttggcttgtgctttgaatcaaatgttgtatcaaaaagggaaaccttggtaaaatcctgaagggtgaataatgtaaggcatggcttaac

SEQ ID NO: 11656 - DNA, 72 bp, Arabidopsis thaliana
  unsure at all n locations
  Clone ID: LIB25-103-Q1-E1-H3
tgaggtatctctctactttgtacagttgatcaaggantcanagctatctagggacttnagtcacaagataca

SEQ ID NO: 11657 - DNA, 469 bp, Arabidopsis thaliana
  unsure at all n locations
  Clone ID: LIB25-103-Q1-E1-H4
ngttcnttggcccgntcngtaccanatcatacacgggncggnccacgcgtccnanccaagcgtccgctctgccaatctcatcttcaacctctctctaactctcgttttcgattctacaagtggctgacaagaagattaggatcggaatnaacggattcggaagaattggtcgtttggttgctagagttgttctccatagggacnatgttgagctcgtcgntgtcaacgaccccttcatcactactgagtacatgatctacatgttcancgtactacagtgttcactgtcaatggaaanacaatgaactcaagatcaaggatgagaagacccttctcttcggtgagaaaccagtcactgttttcggnatcatgaacccngangatatcccatgggccgaggctgnaaactgactacattgttgaatctactggtgtcctcactganaaagacaaaggntgcaggncacnt

SEQ ID NO: 11658 - DNA, 500 bp, Arabidopsis thaliana
  unsure at all n locations
  Clone ID: LIB25-103-Q1-E1-H6
nnnngnanttctatcngntcgntccggncanacacacnatncgcgggccnacccacgcatcnagagaacatagtttcntcttgcttttgagaaaaaataattatatatttttatataggaaagggttaatttattaataaaaaaaaataaaaagaagcanaaaagagataatgcagggtggtaggcttttgacggtgttggtgtgcctcgcctccacggtggcgttggtgagcgccggtgacccttacttctactacacgtggaacgtaacctacggaaccgccgcgcctctcggaattcctcaacaggtgattctcatcaanggacagttccctggtcctaacctaaactcaacctccaacaacaatgtcgtcatcaatgtcttcaacaacctcgacgagcctttcctcttgacctggagtggactccaacacaggaanaactcatggcaagatggtgtgactgggaactcatnccaatcccaacaaggaacaatntna

SEQ ID NO: 11659 - DNA, 213 bp, Arabidopsis thaliana
  unsure at all n locations
  Clone ID: LIB25-106-Q1-E1-A10
caagaagaaggnttaanccaagaacgctctccanaactacgcntataacatgaggaacaccatccaagacgagaagattggtgagaanctcccggggtgcagacacagaagaagatctaggattctattgagcacgcgattcanatggctcnaggggtaaccaatttgctgaaagggtgatgantttcaaagacanagatttaanggaattgg

SEQ ID NO: 11660 - DNA, 461 bp, Arabidopsis thaliana
  unsure at all n locations
  Clone ID: LIB25-106-Q1-E1-A11
tcacgctgnccaggctccgtcanagnatacgacgggncgaggcncgcgtcnncccanacgtccgggagcaaacacggcaaggtacctatccacatgcgaaaactgtgtatggattgaatatccaaaggcactcgctgcaaggagatggtactcaacacaagccactcttcctgatggaactttcatcgttgttggaggccgtgacgctctcaactacgagtatatccttccggaaggacaaaacaacaagaaactctatgactcacaacttcttagacaaacagatgatccagaagaaaacaatctttacccttttgtttggcttaacactgatggtaacctcttcattttcgccaacaaccgatncattcttcttaacccganaacanacaaagttgctcaaaagagttccctcaaacttcccgggtggtgcccgttaactaaccctgggttccgcctcc

SEQ ID NO: 11661 - DNA, 396 bp, Arabidopsis thaliana
  unsure at all n locations
  Clone ID: LIB25-106-Q1-E1-A12
tcttccttttgctttcgcatcttcttcttcgtcaacgaatcctcggactctccggcgatgccccgtcgattaaacgacggcgagcctggccgttttaccgccaccgttcttcttttaatcggtttaatctcttgtgttatcgtctacgctgttttctcttctgtcctccgtccatcccaagatcctacactcgttgattccgcggttcgattcaaagaggagccgcgagatcacgatgcaactgaagacggtgaaggtgggtgttgccgtggaattgataatctggagctttggggtccggcggtgaagtggggcacggattttaagtttaattcgtccgaaggatgttgtaaaacttgtaaagttaaggtgtattggnaacaatggaccttgctt

SEQ ID NO: 11662 - DNA, 475 bp, Arabidopsis thaliana
  unsure at all n locations
  Clone ID: LIB25-106-Q1-E1-A3
nnnnnnngnaannttnnnttgccnngnacggtcaaggtcatnnagncctagncacncgtccncgaaatctcgacactaagaatttctctggggtttctctcctcaaactcgatctgattcttttgttctagggttttcactcaattggatctttctcaatctcctctctctcaatttgattattttgttctccgtgatggttgctggaaaggggaaatcaagtagaggccatggtgggagaaccgaangaggtgagagaactggtgggagaaccggaggaggtgagagaaccgaatgaggatcgtcatctcatgcctccaacccttattcttcgaacgcgactaattcagtgactcaatcatctagagcaacgcttccttctcaagtacccagcgaggtcacaaacaccgactcctaattccttgccatcaacggcaagtcgctcaacaacatcctcttaattacaacagccgct

SEQ ID NO: 11663 - DNA, 81 bp, Arabidopsis thaliana
  unsure at all n locations
  Clone ID: LIB25-106-Q1-E1-A7
agatgcancatctcttttcacttagtcaatcaagattattcgangacatggatttgtgtcattaattcaganttatatnta

SEQ ID NO: 11664 - DNA, 480 bp, Arabidopsis thaliana
  unsure at all n locations
  Clone ID: LIB25-106-Q1-E1-B1
gnnnnnngnanctgttactcgccacgntcaggtnaaggtcanagcgggncganccacgcgtccggtgaaacgcttataaaaataaaccggtttaatttcaccggtttaccttccgccgtagatatcaagccgcaatgtacattctcgacaccggagctcgattctccgccgtcagattctcaccggtattcaatcctcctccaacatctctccgtagacgatacttcatcgtaagagctaatcttccattcccaaagcatcaagctaagtatcataaagagcttgaggtcgccattgatgctgttgatcgagcttgtcgtctctgtgttgatgtcaaaagatctcttttttcttctaaagagaagattgttgagaagaatgatcaaactccagttacaattgcagattttggagttcaagcnttaatcaagcntgggagcctttcaaaatgttccctcaataccattaagtggctgagga

SEQ ID NO: 11665 - DNA, 421 bp, Arabidopsis thaliana
  unsure at all n locations
  Clone ID: LIB25-106-Q1-E1-B10
gggccganncangcctcnaagtgnnaagncgncttntatagacaccttatcaaaatatcttgatttttatttacattattaatttttttcttgttttttcactaccggccacgccatttaaaaagtttggtgactttattttactggttgttttattattgaataatatttcttagttaattttgtcactactaatccggtaatcccaaatctacttaagtatttatgtaagattcantgttttttttcttcttanaatctgaagattccanagttaaaataanttttgaacttaantttaggatcacaggaagaaaaggagtggggagggtgtgcaaataaaaaaaagtgctagatggaatgtgacacaaaatcctagataaagggntgangaagtcagtngacntggggancttatana

SEQ ID NO: 11666 - DNA, 441 bp, Arabidopsis thaliana
  unsure at all n locations
  Clone ID: LIB25-103-Q1-E1-G4
tttggnnaaaaccacttctaccagaaatttttagcatggggagtgaagtcaaccgtccactagctgattttccagcaaatatctgggaagatccattaacttctttctcaaagtctgacctcggaactgagacgttcaaagagaagcatagtacgctaaaggaggcggtgaaggaagcttttatgtcttccaaagcgaatccgatagagaacatcaaattcatcgatgctctatgtcgccttggtgtctcctatcactttgagaaagatatcgtagaacaattggataagtcatttgattgtcttgattttcctcagatggtaagacaagagggatgcgatttgtacacggttggaataattttccaagttttcaagcaatttcggcttaaactttccggcgaagtgtttgnagaagttcaagggcgnaaattgggaantt

SEQ ID NO: 11667 - DNA, 468 bp, Arabidopsis thaliana
  unsure at all n locations
  Clone ID: LIB25-103-Q1-E1-D9
gnnnnnnggtanttcnattgttcggcccaggnctccngtancgnggnccganncaagcntcaagtangnatcgntctacgtttcaaagagcagcttctcacatcgctgaagctctcctctcactcatccacaacgaatcatcaccaccgttaatcacgccggagaatctgattctccgaatcgccgcttacagatccttctccgaaacctcgccgtttctccaattcgttaacttcacagcgaatcaatcgattcttgagtcctgcaacgaatcagggtttgatcggatccacattatcgatttcgacgttggatatggaggacaatggtcgtctctaatgcaagaactcgcttccggagttggaggaagaagaagaaacagagcatcgtctctgaaattaaaaagtcttggctcctcaaccttctanagtctccgacgagttcgagcttcgtttcacaagaggaaaa

SEQ ID NO: 11668 - DNA, 467 bp, Arabidopsis thaliana
  unsure at all n locations
  Clone ID: LIB25-103-Q1-E1-E1
aattcntcngngancanccaggncngcactgcacgngggccgncccacgcntctanggagtttcangttatacaccggagaaaccgtatacgccttcgcagacgcgcttacctacactaaattcgaccatcagctaatcaaagcgccaagactcgtctctctcagtctcgacgagaaccacccttgccgatcatcggagtgccaatctttggacgcgatcggacctcactgcgagaacgccgttgagggaggatcggatttcgaggttcatttgaatgtaaagaacaccggagacagagcgggaagccacacggtgtttctgttcacgacgtcgccgcaagtacacggatctccgattaagcaactactaagatttgagaagattcgtctgggaaagaatgaanaaacggtgggtaagtttaacgtccangtgtgttaagnttnnaatntgggttaannnanacngg

SEQ ID NO: 11669 - DNA, 345 bp, Arabidopsis thaliana
  unsure at all n locations
  Clone ID: LIB25-103-Q1-E1-E10
cnattcagacgatcaacanacatttttatcataatcataatnagaaaaaagtgttaaactttctcgtgagtttatatantctgctangggngcngtttataatggtttntggttgtttcttangtttctgtttaaatttcggattcttcgatctggatcgttgttgttagcttctcaacatctaaaaagatggattcttcttantcctttgccttggggacanggtagttctattttgccaggattcagtttcaggaatgtaggngaacagattttacggtgagaagaacaacnacaatggtttgtgtcaaggttttggatnagattggggcncaaggantttna

SEQ ID NO: 11670 - DNA, 460 bp, Arabidopsis thaliana
  unsure at all n locations
  Clone ID: LIB25-103-Q1-E1-E11
nnnnnngtanttctattgncgcccaggtcaaggatcgcgggncgacccacgcntcnngaanttttgcttttngctgctagagcttcaagagttgagaaccaagatgctattgatgctgctatggttggaatgctcgctgatccaaaagaggcaagagctggaatcagagagattcacttcctaccattcaatccagttgataagcgaaccgctttgacgtttatcgacagcaacggaaactggcaccgagtaagcaaaggagctcccgagcagattcttgatctctgtaacgcgagagctgatctgaggaagagagtccactctacaatcgataagtacgctgagcgtggacttaggtcattagctgtttcaagacagactgtaccaaganaaaacaaaagnaaactctggtagtccatgggaatttgttggtgtgttgcctctgtttgatcctccaaga

SEQ ID NO: 11671 - DNA, 91 bp, Arabidopsis thaliana
  unsure at all n locations
  Clone ID: LIB25-103-Q1-E1-E3
gataaatcttcgtgatgagcttgaanagcgtgagangagacatttctcatcaaaagacatgatcatancatgatgatagagatngcagaaa

SEQ ID NO: 11672 - DNA, 439 bp, Arabidopsis thaliana
  unsure at all n locations
  Clone ID: LIB25-103-Q1-E1-F1
ccgagnngatggattagtgaatcgagaggttgatatcgttaaatgcggggattttgcaatctagggttcttaagcattgtaatcgatgaaggctcaaaagggaagctcgaagaagaaaggtacgaattctgggttagtcgctgtagcagtggataacaataaaggaagccaacatgctctcaaatgggctgctgatcatcttgtctctaaaggacaaaccattatcctcctccatgttatccttaggtcatcctctgattcaggtgagattactgcagagaaacataagcaagctgaaaatctttttgtgacatttcattgctactgcagtcnaaaagagatacaatgccttgatgtcacgcttnangatgacaacattgtcaantcccctnggggaaaaattttccccggggtgtnattgaaatttntnctnggggcc

SEQ ID NO: 11673 - DNA, 308 bp, Arabidopsis thaliana
  unsure at all n locations
  Clone ID: LIB25-103-Q1-E1-F2
tacactgagtnntnttaaccgggtccataaattaaagtcgcttgtccaccataaatccatccaatctggtgaagacgctttgattagggtgcgatgaanaaattttgcantatttttttgacatanaaattatatggatattttatagataagacggagtccattcaggattggagtttataanctgaagagtgactcgtgaattgggtagtaattgttgtgtggattcgcatttatgcgagaatgttttaataattattcnanaagtaataatatcantgaaattttgaagttttatttaaannant

SEQ ID NO: 11674 - DNA, 441 bp, Arabidopsis thaliana
  unsure at all n locations
  Clone ID: LIB25-103-Q1-E1-F3
caaancntctcagcacggtgagagattccggtgataacgtcctccgatggcgacaactcaaccatgtcttatcggccaaataatcgctgttcctcaatttcacatcctcttcagccccagaaattctctaaagccggagctctcgaccaacaaacgcacaaatttctccgtatctatcggtctacgacattccttcgcttcttctatatcaacctgtaaccctaaagccccatctttaagctgtctgcgaaattgcgccgctgttgatggagctgatactagttcgagtgaggataagtgggattgggattgggatcgttggaaccgtcacttctccgagattgaagaagtcgagaacgttgtttcncctctcaaagtctcaacttnangatgcngtttaaaaaanaaaaanttnganaaaccattcantttgaaanaggc

SEQ ID NO: 11675 - DNA, 441 bp, Arabidopsis thaliana
  unsure at all n locations
  Clone ID: LIB25-103-Q1-E1-F4
tcaccaacatcctaaaacccttttgatcaaaacatggcttccatttccagaatcttaccaacagatggcagattaagtcaatgcagaatcaacacctcgtgggttccttctacaaccagaactcaaactcacttagattttcccaagttagtttctgttagtaactctgggataagtttgaggattcagaatagtaaacctattagccctgtctttgctcttgaagcaacttcctccaggagggttgtttgcaaagctgctgctggtgtgtcaggtgacttacctgagagtactcctaaggaacttagtcagtatgagaagattattgagcttttgacaaccctttttccactttgggttattttgggaacacttgttggcatcctcaaaccaaccttgggtaaaanggttggaacaagtttccttaanccaagggcctgg

SEQ ID NO: 11676 - DNA, 491 bp, Arabidopsis thaliana
  unsure at all n locations
  Clone ID: LIB25-103-Q1-E1-F6
aattcctctagntcgntcaagtaccanacacagaattcgcnggncgacccacgcatccacccacgcgtccgcggacgcgtggggccaaagacaccatccactcctgctgctggaggatcaaanacactctttgctgccaatctctcttttaacattgaaagagcanatgttgagaatttcttcaaanaagctggtgaanttgttgatgttanattctctaccaacagagacgatggttctttcangggatttggccatgttgagttcgcatcttctgaagaagcacagaaggcgcttgaattccatggtaggccattgctcggtcgtgagattcgtcttgatattgctcaggagagaggtgagagaggcgagagacccgcattcactccanatagcggcaacttcanaantggtggtgatggtggtgatgaanannaaattttccgtaanggatttgancctcaanttctaaggatnttaccannacaatt

SEQ ID NO: 11677 - DNA, 436 bp, Arabidopsis thaliana
  unsure at all n locations
  Clone ID: LIB25-103-Q1-E1-F7
gagtgttacgtctggtacaagagagcggtatgactgctgattgcaaactttacacaactttaatatcaagttgtgctaaaagtggaaaagttgatgcaatgttcgaggtgttccaccagatgtcaaattctggagtggaagccaatcttcacacatttggtgcacttattgatggctgtgctagagctggacaagtagctaaggcatttggtgcgtatggaattttaaggtctaagaatgttaagccagaccgggttgtattcaatgccctcatctctgcatgtggtcaatcaggagctgtcgaccgtgcttttgatgtgttagctgaaatgaangctgagacgcaccctatagaccctgatnatatcncnatnggtgcaatnannaaancaatccgtnaancccnggacgggtcaancgaccaaaaaaattttcc

SEQ ID NO: 11678 - DNA, 482 bp, Arabidopsis thaliana
  unsure at all n locations
  Clone ID: LIB25-103-Q1-E1-G1
nganaaaatggctgcttcatcttcctctttcactctccgtaatcacaaccaacactttcgtactcctcccctcctggaagaaaaggaacccttggtcaaccaaaaaacccaaatttttcaagtttcccaacaaaaaatccatcaaagaaatcctaaactttctttgggctcccaacaactcaactcaactcaatccgtatatctcccccaagtctccttcctcttctctcaaaagggcttaaatcttttgccaaagcaggttaacaaggggtcagggctgcaccaagacttcacactaaagggatcaaaacggaaagccggtgagcctcaaaaagtataaagggaagcctgttgttctctacttctaacctgcanatgaaacccctggctgcaacaancaagcttgtgctttcanagaatcctatgagaaantttaagaaancttgttnaaaagggtcattggnattaatnggaaatnacnc

SEQ ID NO: 11679 - DNA, 458 bp, Arabidopsis thaliana
  unsure at all n locations
  Clone ID: LIB25-103-Q1-E1-G11
aattctatnngnncggcccangncnnaggtaacgcggnncgacncangcctctacncaccctcatctgananaggattcaagcccatctattgctgctgttgtggcatctcaggattggcctgaaatcactaaatatgctggattagtttgcgctcaancgcataggcaggagctcattcaggatctgttcaaagagtggaaggatcctcagaaaggtgtggtgactggtggcatgataaaggagttgctcatagccttccgtagatcaactgggcataaaccactaaggatcatcttctacagggatggagtcagtgagggacaattttaccaagttttgctctatgaacttgatgccatccgcaangcctgtgcttcgctggaagcaagttatcaaccaccaagtgacatttgtggtggtgcanaancgtcatcacacgaggctgtttgctcaaaa

SEQ ID NO: 11680 - DNA, 464 bp, Arabidopsis thaliana
  unsure at all n locations
  Clone ID: LIB25-103-Q1-E1-G12
gnnnnnggtaattnnactnnnccgccangtcacagnaacgnggntcnanncaagcctcaacagnnactngnngtaatattcattctctcttttctctttccattttggctcccaccgacgtcatcaatctctaccggagacttccgccgattctcacaccgttcttcttctctccttccgattccggattccaatttcgttccttttttgttttctctcaaaacccctaaattttcttcctttcttcgatctggattttttgtgttccccaaatttcaagactttgatctgattccttctaagatttctccaaagcaaagatcttttttttgttttttgggatctctgtattgttgatgggcacaactagggtctgctcggaggtttcttctggatcttcgaaatcgcttaaccaatctctcaaaggtatcgacctctaccacagaaacagtcaatggtttcca

SEQ ID NO: 11681 - DNA, 433 bp, Arabidopsis thaliana
  unsure at all n locations
  Clone ID: LIB25-103-Q1-E1-G3
actgatctccaatggcgaaaaccctagctcgctccacagcgtcacgcatcaccaagcgcttaatctccacctccggagccaccactccttccccttcttatatcctctcccgtcgatcaaccccggtgttctcccatgccgtcggattcatctcttccttgaatcgtttcacaacgattcgaactcgaatggataggtccggtggatcgtactctcctctaaaatccggttcgaatttcagcgaccgagcacccactgagatggcgccgttgtttcctggctgcgattatgagcattggttgattgtaatggacaaacctggaggcgaaaacgctactaagcagcaaatgattgattgttatgttcaaaccctaactaaaattntcggnantnanggaaaaacttannaagaaantttaaanggtnccggngg

SEQ ID NO: 11682 - DNA, 249 bp, Arabidopsis thaliana
  unsure at all n locations
  Clone ID: LIB25-103-Q1-E1-D8
nggccganacacgcntcnaagttcnnctccaacgaccaatcttatgttgcatcaatttcacaacagaagccttaccttttcattacacgcatattgcttcttcaaagtttccttttagataaattcttagtctgagtaacatctctttcttgtcttgggggtttctctgtaantgcagctgaatcggatcttgggcaatttttaaattccgantcaacgantttctcanctaanggtttgattcctttt

SEQ ID NO: 11683 - DNA, 309 bp, Arabidopsis thaliana
  unsure at all n locations
  Clone ID: LIB25-103-Q1-E1-B8
ggatcatcngtttgtacangtgcagtcganattggtgagcttggaaggctctcttcatctatgnggaagatggaaaaggnactcagagctgatgatgagctgtatcgtgctaagcttcanaaatcanangacagaactctagctttgattaaatcaagcatggacattattgtanccattggtctccttcagttagctccaaagacgattagtcctcntgtcactggtgctttcgggtttaccacctcacttatctcttgttatcagttgcttccattgcgcnccaagttgangacncttgtncaaggg

SEQ ID NO: 11684 - DNA, 372 bp, Arabidopsis thaliana
  unsure at all n locations
  Clone ID: LIB25-103-Q1-E1-C1
nctctccnccacacaccantttcttcatgaccntcntcttctagcagagaanattaaagaaacccccaaatccaagcttatactaaatgggtcatgataacatcacaaagctcgggagtctactcgtaaagctacacaaaggtccttcaagttggctttgtcttcatcctcgaccagancgaancagnaacggcggacgaatcaagctcgtcagatccgacggttctttacaagtctacgatcgtcccgtantagtctcaagagctaacanaagacttcccaaancacanaatctgtagatnagacttactctacatcggacaagaaaaccctgttctgtctgaaaccgaaacactttaaccaagnntcnaa

SEQ ID NO: 11685 - DNA, 545 bp, Arabidopsis thaliana
  unsure at all n locations
  Clone ID: LIB25-103-Q1-E1-C2
gnnngcttttcnaggcnnnaccaggtcacacagntcacgggncgacccacgcgtccattnacntgnanagttacaaaatgtccttttggctaagtttgatctttgctttttcaaatttgcttccctcaatcctccaaccgggattgattcctgtccaactggttgaaattcnggaaaacaacaatgttgcaacgggttgaacgaaactccgttacgggcgccctttccctggaccggctcctatatgcaaaaggcaagcaaaagggtgggaagttacccaaagggacgggagggcttgaagctgggtctcctataagtgggctgcaagccactaagagccggccaaaaaatgcggggtcgtgactaggtactctcacagcttccccaagctggtttgtactgatggtaaagacgggactctcataagcaccaagtttctaaaccatgtggtgaccaccaacccggagggcaagacttgaccgttnaaaaccgngttactccnaagnaactgatttaanaancancnantttggtttgggctttgc

SEQ ID NO: 11686 - DNA, 430 bp, Arabidopsis thaliana
  unsure at all n locations
  Clone ID: LIB25-103-Q1-E1-C3
aggtcatngtcganataaaaacatcttttccatccaatatttaccggtttcgtttcaccggatttgggctctccggcgacggagaatagccaccatctccgtagaaaacagtatacttgatagctgaggaacaagagaagtgacaagggtgattgaaaagttgaaggactcagatgggaagcagaagcggagaacaaggaaagcgaatggcggaactgagcaaaaatcttaaagaaggtgagaggattctggagcccacacgtagacctgatggtactctccggaaacccattcggattcgacctggatatactccagaagatgaagttgtcaaatatcagtccaaangttctctgatgaaaaaagngattggctcacaaagggccccaaaggtntngaaccctgttnaancccnnaancnaagnnntaa

SEQ ID NO: 11687 - DNA, 387 bp, Arabidopsis thaliana
  unsure at all n locations
  Clone ID: LIB25-103-Q1-E1-C5
cttctctgtgtgtgatctccgttggtcaacaacaactacgacagcttattgagcagagatggatcatcaatttggatatggtgttgaagttactgggttatctccatctgttactcataatgatcttatcgatttcttctctttctctggtactatccaagatattgatattgtcaggtcgggtgagcaagcttgtactgcttatgtgatgtttaaggattcttattctcaagaaactgctgttttactcactggcgcaacgatattggatcagcgtgtttgtataactcgttggggacaacatcacgaagagttcgatttctggaatgcgacttcnccaagttttgaanaanaatnggnntcnnaannatntggncaaannaancc

SEQ ID NO: 11688 - DNA, 467 bp, Arabidopsis thaliana
  unsure at all n locations
  Clone ID: LIB25-103-Q1-E1-C7
tcnagccgttcggcacaanttgtggactcgcnggccganncacgcntcnaacnctcnctcantgaacctttanaagttaaatctgtttcatcaccggaaagtttcactaactcttcttctctctctcggagtattgattcccggcgtttagcaatggaagaaagtagacaactcgagacgtcgattgatcggctgctgaacgaagagaaacagatgaggctcgcagaaaatgtcgccggaactagaaaagcagctaccgagattcttaagctttgtttcgaagctaaggattggtaanttctcaacgaatagattttgaatcnctcgaagaaacgtggtcagcttaagcaggctgtacaatccatggtgcaacanncaatgcaagtatattgatnagacactagacatagaaactcngattgagcttatgnaagactccnaanaatgtnnctgccggggaagatata

SEQ ID NO: 11689 - DNA, 392 bp, Arabidopsis thaliana
  unsure at all n locations
  Clone ID: LIB25-103-Q1-E1-C9
gattggaggagatgttaaagccaacaatctttgtgagattcccaatctcaggaggaatttcaccagtaaaattgttgttagctagacgcagtctttccaaattcttcagctttcccaggtctgcagatatattccctgataaccagttttggtgaagctctaatgcagtaaggttctgaagattaaataattcaatgggaaggcttcctgttagctggttatcgcctagcattagctttgtcagtgacttgcaggttttcagatcacgagggatgtttcctgataacttgtttgaaccaagactcagaagtattancgtccgaaaacctgcaaaaantgggcaggaattgggaccagacagagaattggcanacatgtcaagaacagaaaaa

SEQ ID NO: 11690 - DNA, 375 bp, Arabidopsis thaliana
  unsure at all n locations
  Clone ID: LIB25-103-Q1-E1-D1
gccacaaaccatagaatctctaaatcttttgaggatgaggaatacanagttcattgttgcattgaataaggtggatangctatatggatggaaaacatgcaagaatgctcctatcgtgaaggcaatgaagcagnaanataaagatgttataaatgaatttaacttgaggctgaaaaatattataaacgagttccaggagcaaggacttaacactgagctttattacaagaataaagacatgggagacactttcagtattgttcctactagtgctattagtggagaaggggtcccagatttcttgctgtggttggttcaatggggcncaagnaaacaatgggtngagaaaattncatatgttnacnaaatntnatg

SEQ ID NO: 11691 - DNA, 234 bp, Arabidopsis thaliana
  unsure at all n locations
  Clone ID: LIB25-103-Q1-E1-D10
nnngagtcgtnataatatatataaaatatgcttttgtaggatcgccttaaaggcgacagagatgaagatgcaaacagtaaaaaaaaagggttttcttttcanctatttcttcttgaatgttttttttctttttcttttggtttcttattgaaattgttgtatttttgttggcttttttctaataatatcagcnagtttttcttaaaaaaaaaggtnngatnggatnaaaattat

SEQ ID NO: 11692 - DNA, 461 bp, Arabidopsis thaliana
  unsure at all n locations
  Clone ID: LIB25-103-Q1-E1-D11
nngnnngnaanttccatcagnacgcccaggtcacagaacgcgggccgacncacgcntcaacntcnccnnctgccaaaatccccacttcacgaatcgcaaaagatcaaggtttattgatctattgcgaaattagggtttgtgaattcgaatcggagattaataatagattttgtgatggagtgttcatcacgcatagaagaatcttgatttcgatctcgatgaaattaggaatcgagggattttatttataattgagatggtgaatattaaaagccctttacggctattcatagaggagtcgattaaggaattaattaggggtttcaggagacaaaggatcaaatggagaaatgcgtttcttcttggttctataatgactaccattgttgttctgcttcaaacaacaaccttttcagtcttcnctgatgaagaagaaaccgagtcttcttcttcttcgccta

SEQ ID NO: 11693 - DNA, 491 bp, Arabidopsis thaliana
  unsure at all n locations
  Clone ID: LIB25-103-Q1-E1-D2
tgcnnncccnngncagganacgngggccgacccangcntcnacncannacgtnctgccaacgcgtccgggaaagcgccttgatgctggatttggatagccttggtttcaatgttaaggctactcttcaagggaacaccttcaaactccgagttccgtttccaagacgcgcacaagacagaaaggatgtaaagacattgattgtggaaatgcttcaagctgccaagtccaattagttgctaaaataaagatggaaaagctcttccatctgaatcctgctacaacangaaaagcttcctccaatacacattttatcttatctatcanttgcaaaaagaacactcatttagtcctgtatatatctcaacangactagaactaagatgtatacatgaaaaaaagttatcaataaagatttctgaagttgtattggcaaaaaaaaaaaangnnaaaaaaaaggggggnccgctccagaagnttcaagccttagttt

SEQ ID NO: 11694 - DNA, 487 bp, Arabidopsis thaliana
  unsure at all n locations
  Clone ID: LIB25-103-Q1-E1-D3
ggggtaattcnattcgttcggccaggnctgtagaacgngggccganccangcntctnagactgngtccnatcaagtaaagtgttcgtagctgagaaaaaccctaagctctcgtttttcgtcttctccgattctgcaagtatgagtcgatcaggtcagcctccagatctcaagaagtacatggacaagaaactccaaattaagcttaatgccaacagaatggttgttggaactctccgtggctttgatcagttcatgaatcttgttgtggataacactgttgaagtcaatggtgatgacaaaactgacattgggatggtggtgataagaggaaacagcattgttactgttgaagctctcgaaccagttggaagatcttagcttatgacttttcacccccaagtaatcatcntctgtaatatgagacttgncttnantttgnccccggncgggnannaancaaccctgggattnnattgggaannnccc

SEQ ID NO: 11695 - DNA, 444 bp, Arabidopsis thaliana
  unsure at all n locations
  Clone ID: LIB25-103-Q1-E1-D4
ccangcgtccgcccacgcgtccgctcctccctcctgacgctctccttgttccgttcgataaccgaaccttaaaagctaaagcttgggctaaacaaaatcacatgccagtaccaaagaaacttccttgtccagataactgcggagtcagcattaactggcacgttagcacggattacaaaaatggttggaccgcaaggttaaccgtttttaattggagagatttcgcgtttgaggattggtttgtggcgattgatatgggaaaggcaggtccaggatatgaaaacgtttactcctttaatggaacacgtgttccaccaagcaatcgaaccgttatcttccaaggcttgcctggtatgaactaacctgttaggtcaaagtttatgggacnaattcaattananaacctnccgtngcccggaaagcaaaatccgntaaccncttnaa

SEQ ID NO: 11696 - DNA, 455 bp, Arabidopsis thaliana
  unsure at all n locations
  Clone ID: LIB25-103-Q1-E1-D5
cttatcnagncgntcggtaccaatcttnaattcgcgggccgacncacgcntcnacggncncgtgggcttccctcatcgtcgtctctttcttcgccaantctcttttctcctcgtctctgcntagccgataaattcgccgttctccatcggtaaacgcagctgaggagctagataattctctgatatctgcgttacgccggtgtggaagcaaaatttaggttaatcggatctcaattatggacgaanaggcagcaanacctagagactccaccgtgaatcagcaacatcaatactattacggaacgtttcaaggcgttgcnaattttcctantcctactccacnaccgcaatttatgcaaccacagcatccgattactacgtttcctggacatgcttancaaaatctncaaggtcaaggtggtggtgttaaattangcncaaagggttnnccaatt

SEQ ID NO: 11697 - DNA, 233 bp, Arabidopsis thaliana
  unsure at all n locations
  Clone ID: LIB25-103-Q1-E1-D6
aangaagntgctgagatgaacaaaangtccttcaagtacgcatgggtgttggacaaacttaanggccgagcgtgagcgtggtattaccatcgatantgctccaaggaagttcgagaccatcaagtactactgcacagtcattgatgccccaaagacatcgtgatttcagcaaagaacatgattactggtaacttccaagccgatttgtgcnggtcctaacaattgannccncc

SEQ ID NO: 11698 - DNA, 55 bp, Arabidopsis thaliana
  unsure at all n locations
  Clone ID: LIB25-103-Q1-E1-D7
ttgaagctctcgaaccagttggaagatnttagcttatganttttcaggcccaagt

SEQ ID NO: 11699 - DNA, 403 bp, Arabidopsis thaliana
  unsure at all n locations
  Clone ID: LIB25-103-Q1-E1-B6
cggncnatgcatgcaacnannttcttctctgcantctctcttctctctgttttgccttgctctgttctctcttcctctcatcgtctcctccatcggnatcaactatggccaggtcgctaacaaccttcntccccctaaaaacgtcatccctctcctcaagtctgtgggagctanaaaagtcaagctctatgacgccgatccacaagccctacgtgccttcgccggctccggcttcgagctcaccgtggccctcggtaacnagtacctggctcaagatgagcgaccctattaaagcccaaggctgggtgnaggagaangtccaagcttanctcccaaacaccaagatngtggccatcgtaatgggaaatgaagtnctcanctcantaccagtcagncctcangg

SEQ ID NO: 11700 - DNA, 476 bp, Arabidopsis thaliana
  unsure at all n locations
  Clone ID: LIB25-101-Q1-E1-H4
cccgananggccaaggactncggggcgtcngangngncagntnnaaaacctaaaacccgattagattttcttagatacgaaacctctcttacgacgctccttcctcaatctctctcgatcgtcggagattctttcttcaagagtcatcttcttcttcttctccttctccctaaaccctaatttatcgcgtttggatcgaatcagctgtcaattcttgttttggttttcacggncagggccatgtctgccgtatattgcggaaccaagagatcttacttcgacgataattcttctccgccctcttctaagaggttccgatgtttttcgccttccaattctccaatctggtcctctcctccttcctcatcgctcgatnagcttcactctgcgtttcctcaaaatgaactcangggtctcgtcnanggactanaanaaaaagggaatggttttaagggcgncaaanaaaannttaancc

SEQ ID NO: 11701 - DNA, 401 bp, Arabidopsis thaliana
  unsure at all n locations
  Clone ID: LIB25-101-Q1-E1-H7
acncctcnagntngactcgnnataaactanagatgaggttgataacgcacaacatgctttcctgcaacatcaaaggagtcaccagtggatttcctctacggatcnaagctgggaacgtgattganaaggaagtcgatttcaatcccgattttatcaggcacatgttcgcgaagattgantggaaagctctggtggaaggtgcgcgttccatgggatacgctgagttaccggaggaatctccggacgccgcggtgctgaaatcagatgagcccttccttaagaaactccaccacgcgttgctcgagctccaccttgaggaaagcgcgcttgtttgccctgaaactggacngaagtttccggntaataaanggatcccaaatntgnntccccnannaaanaaa

SEQ ID NO: 11702 - DNA, 458 bp, Arabidopsis thaliana
  unsure at all n locations
  Clone ID: LIB25-102-Q1-E1-A11
antttactngcccgntcggccaaannaanggcctggccnnntacannncncaagactnagtcgtatnatggaaagggaacccttttgttgcatctccttcaagagaagatctcctcacttgcaatttatcctcactacatgattggnattctagaattttcattcaggattggatatcagaaggacaaagaggatttgagaattcgaatgtagcaaatcaatgcacttacaggtacaagatctatatagaagggtatgcgtggtcagtgagtgagaaatacatattagcatgtgactcagtcacattgatggtgaaaccttattactatgatttcttctcaagaactcttcaacctctccaacactattggcccattagggataaagataaatgtngattcaaccaaatttgcngttgattggcttaataatcacactcaaaaggctcaagagatagg

SEQ ID NO: 11703 - DNA, 495 bp, Arabidopsis thaliana
  unsure at all n locations
  Clone ID: LIB25-102-Q1-E1-A2
attcnannccgnanggctcgcctcagggnctcganggtcganacanccntctataatttttnntnttatcattttatctctctctctttttcttctatccaaaacaccatttttgagatcagagcttctagcagcgtaaaaaatgcagacgaggtatatggagaggactaatagtatgagagagaagagaaaattggaggaagatgataatcagcagcagcagcaacagcctgagcgtaaaaggccagctcttgcaagtgtaattgtggaagccttgaagatggatagtttacagaggctttgttcttctttggaaccgattcttcgccgagtggtaagtgaagaggtggagcgggcattggcaaagcttggccctgcaagacttagtgaaaggtcgtctccaaaacgaattgaangnatcngtggaanggaattncaacnanaattnaagncaaaatggccgggccccttgttaanggggggaaanataaaggg

SEQ ID NO: 11704 - DNA, 64 bp, Arabidopsis thaliana
  unsure at all n locations
  Clone ID: LIB25-102-Q1-E1-A3
cattggttactatccctgctcnagccgtttgtcttttccggttcgncggagatgctgcnggtgg

SEQ ID NO: 11705 - DNA, 451 bp, Arabidopsis thaliana
  unsure at all n locations
  Clone ID: LIB25-102-Q1-E1-A4
nctcgaaggtcganncncncntcnaaannttttnggaagntcattgcgcagcacggttctttcgtctctgatcttgcaaagttacgggtagagctagaaggaacccgattgttggttctagaagctgctgatcatcttgataaatttggaaacaaaaaagctcgaggaattctcgcaatggccaaggttgcagctccanacatggcattgaaggtactagacacggcaatacaagttcatggagcatccggtgtatcctcggacacagttttagcgcatttgtgggctacagctagaacactgacgattgctgatggacctgatgangttcatcttgggaccattggcaagttanaactgcaaagncttcnaagctttaaaacgntttgggaaaagngaattccttctcaaaattnggntcccattttttttttttancccntaaaaaact

SEQ ID NO: 11706 - DNA, 441 bp, Arabidopsis thaliana
  unsure at all n locations
  Clone ID: LIB25-102-Q1-E1-A6
tttgtcccaccattttcaccgcttctcctccaatcactcagatctacagattcctttaaaacaacaatggttggatctttggaatctgatcaaactctttcaatggccaccttaatcgaaaaactcgacatcttatctgacgacttcgatccaaccgccgtagtcaccgaaccgttacctcctccggtaactaatggaatcggagctgataaaggaggaggaggaggagaaagagagatggttctcggtaggaatatacacacaacgtcactcgctgtaacggaaccggaggttaacgatgaattcaccggagataaagaagcttatatggctaatgttcttgctcgttaccggaaaactttgggtgaaanaaacaaaaaaccattaaggtaaccctaaaaacttgggnttcnaanaangggccccttggggcaanttaaa

SEQ ID NO: 11707 - DNA, 463 bp, Arabidopsis thaliana
  unsure at all n locations
  Clone ID: LIB25-102-Q1-E1-A8
gaacaggtcatggnctcgcgggncgacncangcntctaaanncgttnccntcattaatttgcgttcgttgtgaaaccatagatccaggtgaattctggaaaacatcttgaagcgaaatcgagacatcgttggaggatcaaaacgttaattcgattgatcgatgaatcctanaagggagcctcgtggtggtagaagttctctctttgatggcatcgaagagggaggaattagagctgcttcttcttactctcatgagatcaatgaacatganaatgagcgtgccttggagggattgcangatacagtcattctcttaaaacgactatctggcgatataaatgangaggtcgatactcataaccgcatgcttgacagnatgggcaatgatanggantccacaaaggggaanttcccccaaggaaccanggaacnctttaaaaacgggtntttgaaanaaantcaa

SEQ ID NO: 11708 - DNA, 463 bp, Arabidopsis thaliana
  unsure at all n locations
  Clone ID: LIB25-102-Q1-E1-A9
nttntanttgnccggntcangtcanaggttnagtggcccggtccaanccnctagtcantgtngnantatggcatctcagccngnaggtggcagtcctcctaaaccttgggaaaaagaaggaaatacatctggtcctaatcctttcaggcctccttctaatactagcacggctggttcagttgaggcttctggcacagctaatcctggtgaagtanttcctccgcccgtgaacaggcctaatacagctgctaatatgaattcactcagtatgcctgtaccggctagaccttgggaacagcanaattatgggagcactatggggggaggttatggttcaaatctangtatgacctctgggtatgggtcangtacatatggttcagcattaagtgggtaaggttcaacaanatggtggtgggatgtatggaggtagtagcatgtatagaggangttatggtggtgg

SEQ ID NO: 11709 - DNA, 511 bp, Arabidopsis thaliana
  unsure at all n locations
  Clone ID: LIB25-102-Q1-E1-B1
gnnngnaacttttanaaggntcncgcgntcnanncagtccacnggtcgacccacncgtccacttttgggaaaaagtttcagcatttggttcttgtcaattcttatcaatgctatcttaactcttctttgtgcatttctgtttgagttctgtggctaagctgatttaggaagttggtgatcaaattacatctagtgtttgtttccgccagctgaagtgaatcaaaatgtttagttttggccgagcaagaagccaanggaggcaaaacagatctatgtctcttggaggactggattatgcagaccccaanaagaaaaacaattacttgggaaagattcntttgacaacttctcctacagccttgtgcattttcatgctcaagcaatctccaacattcaatactcctaacgtgttttcctcgaaattagccaaggggtacacaanttttgggcacagggggggcccggttaaatnggttcaaatncanctcnaaggcttcnaagggatcatacc

SEQ ID NO: 11710 - DNA, 465 bp, Arabidopsis thaliana
  unsure at all n locations
  Clone ID: LIB25-102-Q1-E1-B11
taanttnactctgcccngntcggactcnaagncanaggncncnnggtcnnntacaacncccnanagtgantcatattaacattgactgaaccagtggataatcaagggagaagaggtgatcaaataaaggagatggatcttaatctacaccctgagcttaaagggcccttaaaggcattatgcagtgatccaagtacaaccatagttgttctgagcggaagcagcagaagtgttttggacaaaaactttggagagtatgacatgtggctggcagcagaaaatgggatgttcctaaggcttacgaatggagagtggatgactacaatgccagaacacttgaacatggaatgggttgatagcgtaaagcatgttttcaagtacttcactgagagaactcccangtcaaaactttgaaactcgcgatacttcgcttatttggaactacaaatatgcagatatcgaatt

SEQ ID NO: 11711 - DNA, 517 bp, Arabidopsis thaliana
  unsure at all n locations
  Clone ID: LIB25-102-Q1-E1-B2
nnngtanttctacgccgnacggtacgncctcannaattcnagaggtcgacccnnccgtccanggacgcnatgggcggacgcgtgggttggaatctgacttcagaacgctctgagacaagaatgaataagtactcccgggcgtcgtttcatcctatcagccagaagattcacttcttctcatttctcaactcgataactgttgttgttttgttaattggacttatatcttttctcttcatgcgccatctcaagaatgaactaagaagttactctatcggagatgaagaagagagaaaggaagcaggttggaaactcgtacatagtgatgtatttcgatgtcctcggaacatcagctggctttgtgcaatcttaggaactggtactcagttgctaatcttgattantgctcnaattgcattgggcttcaacnggttttccctacccaatacaaatcctggggaangccggttgaaattnccccgggnaacaaagttnacaccccaaaattnnaanggng

SEQ ID NO: 11712 - DNA, 306 bp, Arabidopsis thaliana
  unsure at all n locations
  Clone ID: LIB25-102-Q1-E1-B3
cnanaggtcgnnncggccgtctaaacagacnatgcccactacttcattccctccttgttttgatttcatcgtctttgttagctctcctctgttttttttttcttagtcaatcgatggcgaaggagcttgctgataaggctaaagaggctttcgtagacgatgacttcgatgttgctgttgacttgtactccaaagccattgacttggatcctaattgcgctgagttcttcgctgatcgtgctcaggccnatatcaaantcgaaagcttcantgaggccgtggcagatgcnaacanngcatttgant

SEQ ID NO: 11713 - DNA, 507 bp, Arabidopsis thaliana
  unsure at all n locations
  Clone ID: LIB25-102-Q1-E1-B4
ggngaagttctacgccgntcggtaggcctcaggaattccagggtcgacccncncgtccnntctcacactctctgttcttcatcacaccgagaattcgaaaattccgatgaacaagaaacttctcaaccctcttgaagatccaccaaccgcttcttcaagcgaagacgtcgacgangagatttcatcaggagaagatgaaaaagaacatatctccaattcttcttcttctgaagaagaaaacgaactcaaagatctctccactcaaaccctaaattctccttccaccgaggctccaactctcgattctggatctgagacaaattccgactcagataagccaatcgtcttaaccagtcagaagaagaaagaaggtactgattcatcagggacgaagcgagctagtgaaggaactaactcaaaggggcatcnanagggggnaangnaagtttnangggatgngcnngtgccnaaaattncaaggttttnggggccnanggaattgattnc

SEQ ID NO: 11714 - DNA, 314 bp, Arabidopsis thaliana
  unsure at all n locations
  Clone ID: LIB25-102-Q1-E1-B9
nttttttttttgctcttgacgaagaaancannaaaaaanacaatganagagatccttcanatccaaggcggtcaatgtggaaaccagatcggagcaaagttctgggaagtgatctgcgacnaacacggcattgntcacaccggtcaatacgtcggcgattcnccgttacagcttgaacgtatcgatgtcnatttcaacgaanctagcggtggaaagtacgttcctcgcgctgttcttanggatctggagcctggtaccatggattctctcagatctggtccgttcggtcagattttccgtnccggaaancttcg

SEQ ID NO: 11715 - DNA, 490 bp, Arabidopsis thaliana
  unsure at all n locations
  Clone ID: LIB25-101-Q1-E1-G8
aaagnnagcgccacaaccggncaaggncganacanncntctagnatnntncgnnctntcaagagagataggacgaccaagtttgttcgatctcgttgccgcaaaaaggtaacagcagtcatcaagatcaagaacctgagaaacttctcttttgcgctgtttttcttcttctccaaaactcgtaaaacctataaaccacaatggctcgttctctcgctaacgctaagatccaatccgtcttcggctccgaaaagctctcgaacgccgttttcagacgagggtttgccgccgcagccaaaacggcgttagatggaagcgtttcgaccgcggagatgaagaagagagctggggaagcttcaagcgaaaaggnaccatgggttccaaattctaaaaccgggtattaaaaaacgggaaacgttttcgaagggnaattgacccgggtggacctacnancaattcccttgaanaanaancantaantttattaaaac

SEQ ID NO: 11716 - DNA, 362 bp, Arabidopsis thaliana
  unsure at all n locations
  Clone ID: LIB25-101-Q1-E1-E5
tctgccnacgcgtccgccnacgcgtccgcggacgcntgggctcaganaccaattctctcaatctccgtcgtgcgcttttgcttgattttgtaataaggaatctgaggaattgatacaagtgggctctgatgggaaccanatactttagaacngctgcagatgaaaactccantgtggatctcancagtcaagttcaccagctcccttgctgcattagatttgatggtcctgttgaagtttcccactanttcaagcctaaatctancgatgttgaaatcgatggagtaaaaacggaagaagctcatttcnagacgaangaagttgcanggagcaactaantcantcccnaatgggtaatcngg

SEQ ID NO: 11717 - DNA, 377 bp, Arabidopsis thaliana
  unsure at all n locations
  Clone ID: LIB25-101-Q1-E1-E6
naagantnagncanngtactgctacaaagctancaagaaaccgtcgttccacgttctctacccaacggaanactagagagagtttactggaaaggtgcagcgaagaagccagtcagtgttgtgtacagtttatgtgatcgtgtctactcgtgaacaccgtanctgcatcaacaatgacttctctntaaaaaagcnatttatccggnatttttaacatggatttcttcacctgtggagggagagagaaggcaatgagtttgtacagtttgaagattggctttttatgagatgcttttcttaagattatgaagtanaanatgaacactnagcacaagcagcattnaaacatatattaccnttgtcctttgtaaagggna

SEQ ID NO: 11718 - DNA, 343 bp, Arabidopsis thaliana
  unsure at all n locations
  Clone ID: LIB25-101-Q1-E1-E8
tcacttaanacagcagaaancctttcttcagtcttctcctgcgttctccttcttcacttcccaactaantctcgccggacgatcgtaaccggagagcttccgtcgaccggtcaagtgtttgatatctaaagaagatgttgangtttctatcanaagtaagaattgagttcaacacattagatccaagacttgcgtcgtgtgttgaantcttagctcantgcaatgcaaggaaggccaaagaatcgaatcncaattgtcaggttttggtgaaacgtagaaccgatgagcaggcggcgcaaatnactgtnacttttggtaanggtgtttaaggaangttttngtt

SEQ ID NO: 11719 - DNA, 424 bp, Arabidopsis thaliana
  unsure at all n locations
  Clone ID: LIB25-101-Q1-E1-F1
aactccaatgttacggcgagatggtctacagcttcgtcggtcaggatctgcttggggaatgcagccgccgtgatcttcccattgaacggctcaaatcagtggtgacgtggaacatctccacactccgtccggtggtctttggcatgtctccgtacaactccgttctcggcgagactcaccacgtatcgaacggtcacatcaacgtcatcgccgaacaagtagtgcatcatcctccggtttccgctcttcatgcgactcacgaacaagaaaatatcgacgtgacatggtgtcaatatttcactcctaaatttccgtggtactcacgtngacgttgaagtaaaagggtaaaaaggttatgaancctctnaancccatnaanacctntnagaaagaacnaccagaacnannangaaattcttccggg

SEQ ID NO: 11720 - DNA, 473 bp, Arabidopsis thaliana
  unsure at all n locations
  Clone ID: LIB25-101-Q1-E1-F12
tanttctaaacgntcggcgcccangaanngtcannggnctcncgggncgacccangcntcnacngacncttgggttngagacgaactctttttctttctcgtgacgaatgtttctgtctagaagcttttaaggattaagactctccaaaattttgacgccgtgttattctcttcccgtctctcatggatccttcaagacgaccaccgaaggactctccttacgcgaatctattcgatctcgagccgttgatgaagtttagaattccgaaacctgaagatgaagttgattattatgggagtagtagccaggatgaaagtagaagcactcaaggtggggtagtggcaaactacagcaatgggtctaaatcgagaatgaatgcgagctccaagaagagaaagcggtggacagaanctgangatgcagangacgatgatgatctctacaatcaacatgttactgangagcactaccg

SEQ ID NO: 11721 - DNA, 510 bp, Arabidopsis thaliana
  unsure at all n locations
  Clone ID: LIB25-101-Q1-E1-F2
tggnnnngnaanttntacgccgntcggtagccacgaacaggtcangnactcncgggtcgacccacgcgtccncgatcntggancatgctcgagaattcatgatccaaagttgaaagaaagcttcgagaactctccgaggcatgattcctatgtgcctaaattcgaggctgagcttgcacagttttgcgagaagttggtgaatgatcttgataggaaagttaggcgtgggcgagaacgtcttgcacaagaagttgaaccggttccaccaccttctctatcagcagagaaagctgaacaattgtctgtcttggaggagaaagttaagaaccttttggaacaagtggaagcacttggtgaagaaggcaaagtggatgaagctgaagcgctaatgangaangtggaanggctaaatgctgagaagacagtgttgttacaacgaccaantgacaaagggtacccgaaagngcacnggaaaaaaanaggcattgtgtaaggtttggnggccattcc

SEQ ID NO: 11722 - DNA, 354 bp, Arabidopsis thaliana
  unsure at all n locations
  Clone ID: LIB25-101-Q1-E1-F3
gctcaagtatagagaagaagagctagtgagtttgagaggaaccggcgaaggagagcttaaggaatgggacagagtatatgactatgcttactacaatgatttaggcgtcccaccaaagaacccacggcctgtacttggagggacacaggagtatccttacccaagaagaggaagaaccgggcggaaaccaactaaagaagatcctcaaaccgagagcaggctaccgatcacatcgagcctagacatatatgttccacgagatgagagatttggacacttgaagatgtctgatttccttgcttatgctcnaaaagcgantgcccanttnaaccaanctnnanatntagggcnttt

SEQ ID NO: 11723 - DNA, 416 bp, Arabidopsis thaliana
  unsure at all n locations
  Clone ID: LIB25-101-Q1-E1-F4
acgacggcacnagcttcaccgaagagcnaanatggtgaanattccgaaaactaanaanacttactgcangaacaaggagtgcaatgaagcataccttgcacaaggtgacgcaagtataagaaaggtaaagatagccttgctgcccaaggaaagcgtcnttatgatcgtaaacaatctggttatggaggtcagaccaagcccgtcttccacatcnaaggctaagacaactaanaagattgtgctgaggcttcaatgccaaagctgcaagcatttctcgcaacgcccgattaanaggtgcaagcactttgaagatnggtggagacaanaaaggaaanggaacatctctcctttaagttgggtgngtcaaccaaaccaatttttttgggntgngtttggaancgtgccgggtntcaaaa

SEQ ID NO: 11724 - DNA, 458 bp, Arabidopsis thaliana
  unsure at all n locations
  Clone ID: LIB25-101-Q1-E1-F5
actgtncggcagcctcacngnctcaagggtcgacncacccntcnagcgncaatcatnggnttgccacaggcgtatctgggaangggaatgatgtgaaggagacgattcgttggttactgaactctgccgtcacttttatactcaaggttggggtgtcnggcactgggcggtagcataacgatgaaagttcatgatgcttcgattcctaaaccggagcaacttatcgtcatgtctccttcaggtgttcaaaaggagaggatgcaacctgaggatatgtacatcttatctgctaatggatccatcatatctacaccctctccaaagccatacccaaataagcctcccaagtgtaccgattgtgctccacttttcatgaangcatatgagatgcnaaatgccggaactgttattcacagtcctggnnaagaaaccttcncgtgnnaanacctnaanccgca

SEQ ID NO: 11725 - DNA, 434 bp, Arabidopsis thaliana
  unsure at all n locations
  Clone ID: LIB25-101-Q1-E1-F7
caagnactcgagggtcganncacgcgtcnncnttcnctctcnctnctctcttctctttgtgtaagcaaagaaccaatctttagataatttaggaaactcttcattattcctcttgcaagctcgaatgatcgccgccttgttcccttgatacctcgaatccttttcttcttccagcctcaagtatcacttcaatcttctcggnttgatagttaaatggatcctgttcctgttcgatgtcttcttaacaagtatatctcggtatcttcatctggttgcgtgccagactataagatttaatcctattcaaacatgtattggaaatatggttctcttgttgaagctcttgaaaccgttgctcgatgaagttgttgattgcaaganaccttctgaagaatgnttaaataaaagnngtgaaaaacntnagncngngntgt

SEQ ID NO: 11726 - DNA, 420 bp, Arabidopsis thaliana
  unsure at all n locations
  Clone ID: LIB25-101-Q1-E1-F8
tcnnagngngtntngtacngtttgaagacaaaccangattattcatacctaaagaggcttttcagagacctatttatccgagaaggttatcagtttgactatgtattttctctatgtgcgttcactacggtttgnagacanaccagattattcatacctaaagaggcttttcagagacctatttatccgagaaggttatcagtttgactatgtatttgattggacaatattgaggtatccacagttcggctccagttccagctcgaattccaaaccaagaccaactttaagaccagctatgaatattccagtaccatctgccgacaaagcggaaaagcctccaattggacaggacagccntnanaaggtcncaagngttttcnaagnatanacccnaaaaaaaaggggccagggaacggg

SEQ ID NO: 11727 - DNA, 471 bp, Arabidopsis thaliana
  unsure at all n locations
  Clone ID: LIB25-101-Q1-E1-G11
ttaacnnccacggccggataggtcananggccgngggncgncccaancntcnatcnttttnntnannactcagtgacgaccctctcctaaaaaacactcataaataaactcgctggagacgccggaaccaaaaacagagttctaatggagaagagggaaaatggtctcgatggaaagcaatcgggtcgggtcattaacggacccactaacccgatggtcacacctctgctcaacgatctttaccanttcaccatggcttatgcttattggaaagctggnaaacaatctgagcgatctgtgtttgatctgtnttttcgtaagaatccttttggtggagaatacactatctttgctggtttagaagaatgcatcatntttctcgccaatttcaatttgactgatgangagattggtttcgttccgtgatttcgttacctgggnatggtngagggaagcctttcggtgaatttg

SEQ ID NO: 11728 - DNA, 484 bp, Arabidopsis thaliana
  unsure at all n locations
  Clone ID: LIB25-101-Q1-E1-G12
ntngnggtaattcnntacgntcggctgcccangnnaangtcnnaggnctcgnggntcnanccaagcctcnatnatnattcatcacatctacaccggtgtatcggaatacttctccagaaagttaatgatagagcatatgttcgtgacaagattgactggatgtacgaacaggctgacatttctatacctgcaaatagactgggtttggcgaaggccatggggctggtcgcggcttctcacttggacactgtactggaaaagctgaaaatcatcgtggataatgttgggcagagtattttccaaaggatcttatctctcttctctgagagctataaaacagaagacagtgatgatatacacgctgctttggctttgatgtatggatatgctgcaaaatatgcaccctcatcagttattgaagccagaatagatgcacttgtcggcaccaatatgctttcacgggntccttcatgtggggnaaaaa

SEQ ID NO: 11729 - DNA, 142 bp, Arabidopsis thaliana
  unsure at all n locations
  Clone ID: LIB25-101-Q1-E1-G3
natnaaggtgtggncaccanttggaaagaagaagtttgagactctatcctacctccctgaccttagtgacgtctaattggctaacgaagttgactaccttcttcagcaacaagtggattccntgtgttgaattcgngttana

SEQ ID NO: 11730 - DNA, 389 bp, Arabidopsis thaliana
  unsure at all n locations
  Clone ID: LIB25-101-Q1-E1-G5
nnattgtctcaatttttagggttcatcaaaatttgaacaaaagggacctgttttgctcaatttttgatagcagaagacgaatctggatctggggtcacttcaagattgaattaagaggtttttaagtaagttgagatgtcagttaaagcaaggagaatttctggtagattagagactgtagtaactaaggttaattatgcatttgatcctgttgacgatgacaaaatcataagaaaccggcttctaacccgaaccacgaccactcgaggcgagcctccattgaagaaacttcagaagaagttcacttcntttgtactcnangtggataaagaagaanagaactatnacgactgnggtaaancttgcnaaaccttttttanagggangng

SEQ ID NO: 11731 - DNA, 386 bp, Arabidopsis thaliana
  unsure at all n locations
  Clone ID: LIB25-101-Q1-E1-E4
tttccatttccncgacaaactcctttttttctctcacttttctcgaattctttttttttttttttctctcaacgaaacataaatcctctgttttggtttaagagatggatatagaagcaagcagacaanaaaccagngtaccggtttcagtcggcggtgggaattttccggttggtgggttaagtccgttgagtgaagctatatggagagagaaagctccaacggagtttgncggagacgtgtcagcgaggcttacgtggcaanatctgacggtgatggtgactangggagatggtgagactcaaaatgttcttgaaggtcttaccggttangctgaancgggatntngcangggntctcaagggccccttncgggtccgggaaat

SEQ ID NO: 11732 - DNA, 75 bp, Arabidopsis thaliana
  unsure at all n locations
  Clone ID: LIB25-101-Q1-E1-B4
gcatccntctccgtgatngccgtcgangaatcctccggtgaaagcgtttcggtggcaagatcttggatcgtgtga

SEQ ID NO: 11733 - DNA, 505 bp, Arabidopsis thaliana
  unsure at all n locations
  Clone ID: LIB25-101-Q1-E1-B6
ggngnanttctaccggtcggtagccctcanagaattcaagggncgacccacncgtccngattcttctgagttcttgcatggttcagggtcaaaccaacaaatatggaaagaaaagtattatttagttacaacgtgaaaacacaggcttattaattctctgcagataactgcagaagaaagaagaaagaagaagaagaagagattagagcttgagccataatatataatcccttgatcattagtctaaagaaccacatanaaagatgggattctggtcgttgttggaggtggcttctatgccggttattcaagttcttttcatgagtcttgtgggagctttcatggcctctgatcgttgcaagctcttccctgttgaagcccgtaattccatgaacaangtggtgtttgtaccantttcaccggggctcaagnttggcaatccnacncanaaaagggttacntttnaaanttcanccccagggggggtttaacccggtnaaaaagg

SEQ ID NO: 11734 - DNA, 449 bp, Arabidopsis thaliana
  unsure at all n locations
  Clone ID: LIB25-101-Q1-E1-B7
gggatttaaacgccancgnaccaanctcagggtcgacncncccgtcnngggatggantcngtncgacgcacttacaccattatgcgaggtcgtcacatanacaagcgtgttccttctaaagagtttctctctgctttggataaagctgaaactgcagtacgtcttcctactgggacgggaaaagactgcgggaatccttcctggaagcgatctctgcctcacgtgctcgttgcttctctgacttcgcttttattcggctatcatctcggggttgttaatgaaactctcgaangcatatcanttgaccttggctttagtgggaacaccatagctgaangtcttgtggttaacacctggttaagcggcgcctttattgggtcnctgttcagtgggttngtagctnacggtgtttggcgccctanaacttttcnnatttggggccntnaaca

SEQ ID NO: 11735 - DNA, 443 bp, Arabidopsis thaliana
  unsure at all n locations
  Clone ID: LIB25-101-Q1-E1-B8
cgctctcaaacgaaatggtggttttgatttcaagtacagtgacgatttgcaatgttaaaccaaagcttgaagacggaaactttcgcgttagccggttgatacacagacccgaggttccatttttctcaggattgagtaatgagaagaagaagaaatgtgcagtttcggttatgtgtttagctgtgaagaaagaacaagttgttcaaagcgtggagagtgttaacgggacgatttttccgaagaaatcaaaaaatcttatcatgagcgaaggaagagatgaagatgaggactatgggaagattatttgtccaggttgtgggaattttatgcaagacaatgnttcaaatttaacccgatattntcccaaaagaaaagggcctntgcaaaaactnggaagggtgatnaacatgtggaaaatnatnaccttgcngggtttgaaatgg

SEQ ID NO: 11736 - DNA, 256 bp, Arabidopsis thaliana
  unsure at all n locations
  Clone ID: LIB25-101-Q1-E1-B9
anctctgtcgactcagagcccatggcacanggantatacccgtatcnagatccttactgacatgaagcgtcnttgcacagcaagcgtatcgnccacatccctatcctggggtccaattgcaagttaatgggaatgcaccagccaggagttccattgcaatgtgatgcngtcnaggaacctgtttttgttaacgcaaagcaataccatggtatactcaggcgcaggcaatcccgggcaaaacctnganggacgannt

SEQ ID NO: 11737 - DNA, 313 bp, Arabidopsis thaliana
  unsure at all n locations
  Clone ID: LIB25-101-Q1-E1-C11
gngttaancannaacctcctcgccctaaacctgaacctgtcgatcgngaaaagacatgtccccttcttcttcgtgttttcantaagagtggtggtcatcatactantgaagattatgctgtgagaggcaaagaaccaaaggatgaagttcaaatctacacttggaaagatgccagtcttcgcnagctaacagatttggttaaagaagtttctgtancanctaggagaaggaatgcnagattgtcntttgcgtttgtttatcctaacaataaangtggctataatgtgagagangttggggagacgangggtta

SEQ ID NO: 11738 - DNA, 102 bp, Arabidopsis thaliana
  unsure at all n locations
  Clone ID: LIB25-101-Q1-E1-C3
ggnacattcggtgttgtcgcttcacgcggactgcttacaanacgggtcatcaagttcgtatntgtgacaagtgttgtaggatatagacattnaaaactctng

SEQ ID NO: 11739 - DNA, 450 bp, Arabidopsis thaliana
  unsure at all n locations
  Clone ID: LIB25-101-Q1-E1-C5
ctttggnctcgnnnggncgatacanccntctanacnnacgtnctgcctaacgcgtccgcccacgcgtccgatggactgtggaatcatcaagggaaatggaacagaatctggacggattattaccaccaaaaagaagggtttgaatgatcaaaaagacaagacaatctcttacagagctgaacatgtaattggcactggctcattcggtgttgtctttcaggctaagtgcttagagacggaagaaaaagtagcaataaagaaagtgttacaggacaagagatacaaaaacagagaacttcagatcatgcgaatgcttgatcatcctaatgtcgttgagctcaagcattctttcntttccacgactgagaaagacnagctttancctaaaccntgttcntgaagtangtttccccngaacntntnaccggccttccaattttttaccccang

SEQ ID NO: 11740 - DNA, 62 bp, Arabidopsis thaliana
  unsure at all n locations
  Clone ID: LIB25-101-Q1-E1-C7
tcgctataaaagggaatttccaacttccaataaaaaggcaangcgtaaatncctgcccgttg

SEQ ID NO: 11741 - DNA, 102 bp, Arabidopsis thaliana
  unsure at all n locations
  Clone ID: LIB25-101-Q1-E1-C9
gtnngatctacagaggatgatttccaacngtggaacaagttgccgtcgacgaaattttatgtcagccgtgcgtacacgaggcgaggatcccatcgggaaatt

SEQ ID NO: 11742 - DNA, 512 bp, Arabidopsis thaliana
  unsure at all n locations
  Clone ID: LIB25-101-Q1-E1-D1
ggngnaatttnanaacgntcgggccgnacgganaccggtcacagnantcccgggncgacccacgcgtccncttcttctctgttctatcgcagacatttttgtttatatgcatacataataataatacactcttgtcaggatttttgattctctctttggttttctcggaaaaatgtctgcgatactccaaggagctggagctgcaacggctctctcgccgtttaattctatcgattccaacaaactcgttgctccttctcgctcttctctttcagtgaggagcaagagatacattgttgccggatctgatagtaaaagctttggttctagcctcgtagctcgtcgctctgagccgttgataccaaatgctgttacgacgaaagnggacactgctgcgaactctacttcatcaaaagcctggacatgagctantanntttccaaggncttnaaaaaagngtataaaaaaaanattgngacagatttccaantgtatgttccagggggnnaaaa

SEQ ID NO: 11743 - DNA, 479 bp, Arabidopsis thaliana
  unsure at all n locations
  Clone ID: LIB25-101-Q1-E1-D10
ngtaattcnaaacncgtcgacgnccnggtgcanagtcanaggncccangggncgacccaagcgtcnnncttacaatnnnaaaaatgggagcttcgaaactttccgggatgcaaaagcaagtcttgagtctctacagaggatttctaagagcagctcgttcaagaccaatanaagacaggaagagaatagagatgattgtgtcaacagagttccgccacaactctaaggaggtcgaccgtaagaattttcagtacatcgagtatttgcttcggttaggtactaaacagcttgatcaactcaaaagccctgccatagttagcctctcctcgatcaaggtcgttncatctaaaacctgataccttattttatagcttgttgctctagtgaccatacgataacaaagctgaggaaattgattcgttttcctccttttanattgagttaagtaggtnnaatgatnggangttcaaggtcaatta

SEQ ID NO: 11744 - DNA, 400 bp, Arabidopsis thaliana
  unsure at all n locations
  Clone ID: LIB25-101-Q1-E1-D12
cgtggnncnttnnaannctctanactgngtcgtnttaagctaaacaaataatcagaggaacgaaggagacagcttctgcgaaatcagcatgagagccaaggttagtaatgggttttgattgtttaatggattttttagtgatgagaaattgaagtagtgtgtaggatctttatggtttgtgtgtttgtgtgttgcagtggaagaagaagcgtatgaggagattgaagaggaagagacgaaagatgagacagcgatctaagtagattcgggagtttgttttgtctttcttctttttagaaccaactcttatgtgagttttgttggttttgcaattttcaatttgaatgttttgttggngcanatccaaatctatgttttccaagtanaattanggtttaat

SEQ ID NO: 11745 - DNA, 488 bp, Arabidopsis thaliana
  unsure at all n locations
  Clone ID: LIB25-101-Q1-E1-D2
ggggnganttaaatnctacgcggcggaaaggtcaggnactcncgggncgacccacgcgtccncggacncntgggcgaaaatggttgcctcagccgccgcacgacctcttgtcaccgtccaaggacttgacggtgacatgagcaccgatcaatccaccaccgtcactttaccagacgtcatgactgctccagttcgacctganattgtcaacttcgtccacgcccaaatctccaacaacagccgtcagccttacgcagtctccaaaaaggccggtcaccaaacctccgccgagtcctggggaaccggaagagccgtgtcacgtatccctcgtgttcctggtggtggaactcaccgtgccggtcaagcagcgttcggaaacatgtgtcgtggtggtcctangtttgctccgactaagatttgggaaanncnggnaacgtcgtnttaaagtnnacnnttaaaagggcncncnattgttttgcaatcgcngc

SEQ ID NO: 11746 - DNA, 355 bp, Arabidopsis thaliana
  unsure at all n locations
  Clone ID: LIB25-101-Q1-E1-D3
ngcntcnatatcnngncantttnggtaatgtgcttgtgcctcctcagctcaagggaaggagcaatgttgctacagaggatatgagcaggctttttgtgaaaaaacggcaagactccaccaaggcaaaatctccagatcaggaatagtttggtcaaatttgaatggttttatttctctgactaattacgtaacattttgtgcaacataatagtggtatcttagcagaaataacagagtatgcaactttttttgttttttcatttatttggtactatttatacaaaagaaacaaaaaaagttctgatatttccattaaaaaaaaanaaaaaaaacaaaaaacccaaaaanatnanna

SEQ ID NO: 11747 - DNA, 478 bp, Arabidopsis thaliana
  unsure at all n locations
  Clone ID: LIB25-101-Q1-E1-E12
anttntnannngtcatacggtcaggcaaaggtcacnggncncgnggnncnntncaancctctagncngnntcgtattaccgccaacagcatcacaatcaatcacttgcttttctcaccaaaacggcaatctccccaaagcagggcatgcattggttataactcacaatggagcaagcggagactatccaggctgcactgatctggcttaccagaaagcaatcgacgatggagcagacataattgactgctctgttcagatgtccaaagacggaatcgctttctgccatgatgctgcagacctctcagcaagtaccaccgccaggactactttcatgtcccgagccaccagcgttcctgagatccagcctaccaacggaatcttctcttttgatcttacatgggccgagatncaatctgtgaagccacaaatagaaaaaccccttaatggccaacgggcttcaanagaaaaccccgcaa

SEQ ID NO: 11748 - DNA, 505 bp, Arabidopsis thaliana
  unsure at all n locations
  Clone ID: LIB25-101-Q1-E1-E3
gnngnannttaaangctacgcggacaggaacnggtcacagaantcncgggncgacccacgcgtcnngtcggtgatcggagatggagttccgggagaagcttttgaagttcaagttgcaaatcgtgtttgcctttgttttatctctcctcaccgtagctctcgtcgcttattctcccggtttcctcaccgttctatcttacttctggccactttttctctccacggctctctttctcgctgccgttttcttcttcgcacgcacctccgatctcccggtttcgtctaccatcatcccaggcgaaggcgcaggcttaaaagtggcggcggaagggattcttgactatgtcgtcggcggacaacacgaagacattctctttgatagcttcaccaaacttgactaagtatgagacctctctgttcntaattccttaagtanttccgttaantaanttgttccctttttaaaacnanagaaaatnnaaattttccaangttnaaanttncc

SEQ ID NO: 11749 - DNA, 517 bp, Arabidopsis thaliana
  unsure at all n locations
  Clone ID: LIB25-101-Q1-E1-B3
ggngnaacnttgnanctcntgccgntcggnaccggtctgggaantcacgggccgacccacgcgtcnaagagaaattgaagttcacagctgaagaaattgagatgggtcttatcgagtccaacactacaaatgctcagcttcacattgcacttttgaaggggataccaccggtgaataaaacgcttgacgatgcaaatgcatggatcacggtgttgtgtaagaaactagctccatggtggccatggattgctaagggtgaaattcatattactgttaacaaaggggaggaaatatctgaataccaaggacttgactctattaaccgcctgaagattttgaaggcactttgtgagcttcgagttcaacaagatgatgcacgttcgtatattcaagaaaataccaaggaangagactgggattctagtttacgccanaggaaactttgaggagattggnaaaaaacntctcataggggttnnaggggnaanngatnnccaagggttaaaagtttatangg

SEQ ID NO: 11750 - DNA, 474 bp, Arabidopsis thaliana
  unsure at all n locations
  Clone ID: LIB25-099-Q1-E1-H6
nnnnnnnnnagtttattngncgncacggtcaaacaanccggccggccgacccacgcntccngtgttaccgcgtcgaaggagtcaatcactatcagaaatgtcgtcatcttgttcagcagtatctcgattccactcgcggcgtcggttggggaaaggatcatcgtcctatttcgctccacggtcccaaaccggaggctgttgaagctgaataatgttgtgtgcctcattgagatgtctgaggttttgatatgggacatagaatggaatcatttcacaagctaatggctccctgatatcttccaaactctgtagatttctcttgttcttagaaacttgtcggtctttggaccaacggattcatgtaattgagctttgagtattgttacactccacagtatcaagtttctgatgatcaaataagtcccattttcattaanaaaaaaaaaaaagggcgggccgctctaaangattcaa

SEQ ID NO: 11751 - DNA, 400 bp, Arabidopsis thaliana
  unsure at all n locations
  Clone ID: LIB25-099-Q1-E1-H9
agtctctctgacactctcaccaacctaatttctcacaaaaacctaaaaagttatcgcccatggattcagatttcggaatccccagagaactctctcctcttcaacaactccgatctcagtaccaccctgagcttcctccttgtctccaggggactactgtccgtgttgaacttggtgatggaaccactgtggcaaaggctggtgatgctcatatcattgcccgtgccttcncacatactctaggccagcctttggctcatttcctcagggcaactgctaaagttgctgatgctcagatcattactgaanatccagtgaagagggtcggaattgtgttctgtggaaggcaggctcctggtgggcacaatgtantttggggtctatacgaagctctcaaagt

SEQ ID NO: 11752 - DNA, 410 bp, Arabidopsis thaliana
  unsure at all n locations
  Clone ID: LIB25-100-Q1-E1-A1
gagatctangcttgaatatgagtctccattgtcggcagagaagggtagatatgctgagactctgattcgccctggaaaaaagcaagtgcagaaaagagaggctcatganattatctacattgatgaagatgagccattcaactgtcctgatccagactttcacgattttaacaacacaatgagctctttcgctgtaggtcaagtatgggctctatatgatcctgtagatgatatgcctagatactatgctgagatcaggaaagtattgcaacctcagctgagtttacgggtgacatggctcgaatcattacagaccacagaggaaccaattcctgcttgtgggaagattccaacatggnaaatcngngaccaattnccnnntntaggttttcccnanggaaatttntcac

SEQ ID NO: 11753 - DNA, 430 bp, Arabidopsis thaliana
  unsure at all n locations
  Clone ID: LIB25-100-Q1-E1-A3
aatatggctaccancactgcagcaacnacctcaggtattnttgggatccggattcaagatcctagacctgnaaccggtanggtccaagcccggttcgggttcagtttcggaaaaaagaaaccggctccaccgccaaagaaatcaaggcaggtccaagacgatggagacagactagtttggttccccggcgcaaacccgccggaatggttggacggatcgatgatcggagaccgtggatttgatccgtttggtttaggtaaaccggctgagtatcttcagtacgatttcgatggacttgaccaaaaccttgccaagaacgtggcgggtgacatcatcgggatnatccaagaatcctccgagattaaaccgacnccntttnaaacctntaacnnaatcccttgggnatcaaanggttcaaaaaatgtnaanc

SEQ ID NO: 11754 - DNA, 470 bp, Arabidopsis thaliana
  unsure at all n locations
  Clone ID: LIB25-100-Q1-E1-A4
cgncnacngncncgaaggtcgntncaaccctctanantgactcgtattancgcgtccggtttcagattccccacagattttttagcacatatcaaaatgtttctttttcgaaaatttatttaaatgataacgaaatttacatctccatttcgattgattcgcttcttcaactctctctcttcttcttcttctanttgcttctgtgaaaccctagattttggtgtgaggaagaagacttcaatggcggaagaagtagcatagaacgttaacgcagtcccggtttcggaagacgagctttacggatttaaacgatcggagatgtacagtggtactctcgccggttccgttggtccgtacggtcgtcatgttttcctttgttacangagtcatgagacttggcttcctcgtgttgaaactgnnnggcctccncaanggtttcccnnaatttgtttaagggntcgnaangctga

SEQ ID NO: 11755 - DNA, 489 bp, Arabidopsis thaliana
  unsure at all n locations
  Clone ID: LIB25-100-Q1-E1-A5
acgttancngcctgnacggccaannattcncgantcgacccaggcctccncacncgtccngtataganagttatcatctagggtttatagattggagattttagccgcaacaaggaggaagtgtttttaatttaattttattgttaagagttattgttgctttagggatttttagaatttgggtgttcttttaaatggctcggttgataattccttgtcgaagttcgtctctggcgagagtcaatcttctgggtttgctctctcgtgctcctgttcctgttagaagcagttgtcttcgtanttcggcaaacagacttactcaacacagaccgtttcttacttccgaggccatttgtttgaggaagaatcggtttctaccccattctgttgatacacatnagcaaaacagcaggaggctcatttgttctgttgccacaaaatcantttccgatnaaagctgaaaanttcccaatngggnnncccnaaana

SEQ ID NO: 11756 - DNA, 493 bp, Arabidopsis thaliana
  unsure at all n locations
  Clone ID: LIB25-100-Q1-E1-A7
nngnannttnngcagcctccaccgnacaannactggtcanagcattcccgggncgacncacgcgtccncgaggtcacaagtcagtacacaaaggaagttccttttttgggttttggggtctgctttgtgtcagtgattttaggattgcttcatttgccacacatttccaatctcttaagtagttggcggcgaagatgggtttcctgatagggggctcttgcttcgtcccttctgttcctctacactctcgattcctttcatctccttcttcttcttcttcttcttctccttcttcgtctcagtttgggcttctgtgttcgagtaatgtcgccaagttcaagcgccgacgaccaacattggcttctttaaaccaggaagatgggtacgagtatgacgttgcttccgccaaaaggagggctttccttcctgtgggtanctccgttcctcccnttttggaanntntattaacccccttgggntnanaaaanaggca

SEQ ID NO: 11757 - DNA, 484 bp, Arabidopsis thaliana
  unsure at all n locations
  Clone ID: LIB25-100-Q1-E1-A9
gntnnggtanttttntactgntcgactggtcatgnngtagtctagggtttcntggnccacnctacgcgtgantcntagntanngtagaactaccttttcgtaacctcccctcctcgtgacttccacatacaaaacatgcaaatctagttcttttcctccaatcacaggaatcatgaacttagtggacataattgagtgaaaccgcctgagagtatcccagaagacanaagaatccttgacgacaacttcatgtaaagccaatggttctggatactctttaatcttcgccggcgaagtcgccatcatttctaccgtcgcttgagacggtgtcnattcgttgtccgatgacatcgctatagagagacttttagtagagacagatatcttttttttgttggggaagtcacgaggaggggaggttacgaaaaggtagtcgtanagaaaaaatgganggaaattggaggaatgtttanattctccggga

SEQ ID NO: 11758 - DNA, 398 bp, Arabidopsis thaliana
  unsure at all n locations
  Clone ID: LIB25-100-Q1-E1-B12
agtgngtgtnngagctgtctctataggcaaagaaacgataattggggaccatatgttcttctttttccagatgancgacgaagccttttagtccacgaagaagacaatgtcttctaagtggtggaacattttcctttcttcntctttaaatctttctgnttgcctcttaaattttctgggtccatggcaagtttgcaccttggaggtgcttcgttgatcaatgaggtcgtttttggctcctccttgattggtttcagaagtaaacggtttaaacgagcttcagagagatgtaggttttgtgttcaacaaatgtcagagaatgancagagaactaaacacgaactggctcggttcctgctaaaagaagcgagtccttgagaantnatttnaangccant

SEQ ID NO: 11759 - DNA, 71 bp, Arabidopsis thaliana
  unsure at all n locations
  Clone ID: LIB25-100-Q1-E1-B3
gnatcactcgtttcctgatngaaaggacgatagtctcaggtgacctggtggtggtgctccggtttacntgg

SEQ ID NO: 11760 - DNA, 492 bp, Arabidopsis thaliana
  unsure at all n locations
  Clone ID: LIB25-100-Q1-E1-B5
nnnatttancagncttaccgncaaagactggtanagcattcgcgggccgatacangcntctacagggnttctanttatctagggtttatctatctcattccgcaatcatggagtctctggggaagctacagctacatcaccagccatttcacctttccttcactcacacctcttcttcaacattccccaaaaacctcttcaaatcctcaattcaaccaatttcatctctcaaatccgcttcaattaaagcttcgtcctccaaatttcaaaactctatcacccctctcccaaagtccacacctttccgtctcttcaaatccacatgcatcactctaacaaccgccgcggctctgcttttggcgaatctccatctcaaatcgccggcgattgcagctcccatcgcgcctccgccgtcagttgaaagcaaagaaaacgttaccttggaagaagaanagagagcgcttntgtnanccattttgnnnacnccccttt

SEQ ID NO: 11761 - DNA, 496 bp, Arabidopsis thaliana
  unsure at all n locations
  Clone ID: LIB25-100-Q1-E1-B6
ngnngtacttnacatgcnnacncgnacgaaacaggtcngnggncncgcgggncganncangcntctacacantatnctcttnctgaatccattacttttactccaaaatcattaacaatggactcaggaagtgcagtggacatcatttcgacgctttcagacttcctgctcgtcctgatcatttcgaacctttccttcaaggaggctttgagcaccagtcgcctttccacccgctggagacacatatgtcgcgaaacgagaaacatctctttcagagaggacgagatcgtgacattcgctgatgattccgttgctcgctattaccaaagggctgcattagttgcctatatggttggttgggttaacaattttaccggtggagttgttgaaagcttcgagcttcgtctctctaattcgtaagcttttgaagaaggggtcaccacactgatnnaattcgctgtctccaaaaaagtcaaacanctttttctggaccccc

SEQ ID NO: 11762 - DNA, 495 bp, Arabidopsis thaliana
  unsure at all n locations
  Clone ID: LIB25-100-Q1-E1-B7
ggnaacttagaagnncnatcagntcnaaagactggtcacagcantcgcgggccgacacacgcntcnacngncncttgggttncgatactttcaatctctctaaactctcaatttcagtaatcgataaccgtagcaatggaatccaccggaaaagtgaagaaagctttcggaggaagaaaaccacctggtgccccaaaaaccaaatcggtttcgaaatcgatgaaagccggtcttcaattcccagtgggaagaatcactcgtttcctgaagaaaggacgatacgctcagagacttggtggtggtgctccggtttacatggccgccgttcttgaatacctcgccgcagaagttctggagcttgctggtaacgctgcgagagataacaagaaatcaaggataattccgaggcatcttcctctcgcgataaggaacgattaaaaaattgggaaactntgantggggttcaaaancgcaaaaggggggtnttttgccaaa

SEQ ID NO: 11763 - DNA, 126 bp, Arabidopsis thaliana
  unsure at all n locations
  Clone ID: LIB25-100-Q1-E1-B8
acaancgtgtcattganaggttcgagaaggaggctgctganatgaacaataggtccttcaagtacccatgggttttggacaaacttaaggctgaccgtgancgtggtatcancattgacattgcnc

SEQ ID NO: 11764 - DNA, 433 bp, Arabidopsis thaliana
  unsure at all n locations
  Clone ID: LIB25-100-Q1-E1-B9
cnngggncganccangcgtcaatctnnnatngganaacagcatcgcgtgctactcacgtgggatccttcccccaagtgtctcttctcaacgatcctctacattggtctctcctccttcctacnccacatcctccagcttcaagcgtctaaaatcgagctcaatcttcggagattcactacgattagcaccaaaatcgcaacttaaagccacaaaagctaagagcaatggtgcttcaactgtgaccaaatgtgaaattggccanagcttggaagagtttttggcacaagcaactcctgacaagggattgagaactttgctgatgtgtatggganaagcattgaagaataatagcttttanagttagaacagcttcttgcggtggaacannttgtgttaattcccttggggaanaacnaatccccgnttnganat

SEQ ID NO: 11765 - DNA, 399 bp, Arabidopsis thaliana
  Clone ID: LIB25-099-Q1-E1-H5
ctgctgtagagcttactactcttcccctaatactgaaggttttataattctacactgaccctatacttttgtgatgttttatttctttaaaacagtattctttacctatcccatgtctggggaaaagtgcaaaatatttatgaaggcatcattttattgttttcgcctctcgaatgttttgtggtgccttttttccattattattggcctttttactgtctggaggattaatattatttgacaaatctacttctatccatttgtgactcccagaattagaatggtctttctcactgttatatttatcctctcagtgtgtatcagtctgtggaagtttcttgtttactaataatgtctatttatgctctgaatttgatcctgggaattgtttcccaaaag

SEQ ID NO: 11766 - DNA, 407 bp, Arabidopsis thaliana
  unsure at all n locations
  Clone ID: LIB25-099-Q1-E1-F12
tttctcagaccacaatagcagaacccgataaagagctacagcggtttgcaatctggaaatactcattcctcaaaacctgtgaagctgttgatctggagcttgagcatcaccgaaagatagattctttcaacagcggtacgaccgctctaaccattgtgagacagggtgatgttatttatatagcaaacgtcggggattcacgtgcggtattggccacagtttcagacgaaggaagcttggtcgcggttcagctcaccgtagatttcaagccaaacctgcctcaggaggaagagcggataatcggatgcaacgggagagtattttgccttcaagatgagccaggggtccaccgtgtatggcaaccaagtagatgaatctccggggctcgcaatgtcaanaacattcgg

SEQ ID NO: 11767 - DNA, 389 bp, Arabidopsis thaliana
  unsure at all n locations
  Clone ID: LIB25-099-Q1-E1-F2
attgtggctgatcgttatggaagaaaacccattatactcttgggaactatctcaattgcaattttcaacgctctttttggcttgagctcaaatttttggatggcaattggcacaaggtttcttcttgggagtttcaactgtttgcttggaacaatgaaggcctatgcatcagaaatatttcgtgatgaatatcaagctaccgcaatgtcagctgttagtactgcttggggcattggactgatcattggccctgctcttggagggttttttagctcagccggcagacaaatatccaaatgtgttctcccaagaatctctttttggcagattccggtatgcattgccttgctttacnattcancctttgccttgccttgtgaaaatactag

SEQ ID NO: 11768 - DNA, 468 bp, Arabidopsis thaliana
  unsure at all n locations
  Clone ID: LIB25-099-Q1-E1-F4
ggnnngnaatttattcnncgccacggtcaacatccgggccgacccacgcgtcntcncttctgagttctgacctgagcacacacacagagattttgattgtgtcactcatgggaacccaatatttaccaacttgccctcgcggctctattcggagcttccttcgttgctgtttctgggtttttcatgcatttcaaggcactgaatctagtccttgagcgtggtaaggagcgtaaagagaaccctgatggagacgagcctcaaaatccgaccttggtgaggcggcggagccaagttagaaggaaggttaatgaccaatatggtcgcagtcctgcttctcttccagatgccactccttttaccgatggtggcggcggcggcggcggtgatacaggacggagcaacggtcacgtttaagtcgatgaaattcctcctggtcctccctaagcttcatacgccatctgaagggaa

SEQ ID NO: 11769 - DNA, 397 bp, Arabidopsis thaliana
  Clone ID: LIB25-099-Q1-E1-F7
gaggacaccgactctgaggaagagctcaaggaagcattccgggttttcgacaaggaccagaacggtttcatctcagcagctgagctccgccatgtgatgacaaaccttggtgagaagcttactgatgaagaagttgatgagatgatcaaggaagctgatgttgatggtgatggtcagattaactacgaagagtttgttaaggtcatgatggctaagtgatgctgttttagaaccaaacaatggctctataaacttggtttgcatctcttacatataaattcttatgttatgttctataatttttattcatgggactcgaggtatgttttctgcttgtttaagacgcgaatgttttaacccctttaagcccaattttgcgtcgaacattttcaaaagc

SEQ ID NO: 11770 - DNA, 377 bp, Arabidopsis thaliana
  unsure at all n locations
  Clone ID: LIB25-099-Q1-E1-G1
ttcgagagatnaaccggaccagaccggcaattgtatatccactggaaagtccggtctaagtccggttcaagactgtggttangctattcggagtcaacattttcaatgtgagtaacgagaaaccaaacgacgtcgcagtagagtgtgttggcaagaagagatctcgggaagatgatttgttttcgttagggtgttccaagaagcaggcgattatcaacatcttgtgacaaattctttttttttggttttttttcttcaatttgtttctcctttttcaatattttgtattgaaatgacaagttgtaaattacgacaagacaagaaaaaatgacaactagacaanatagtttttgtttacatccnaatttaggattctg

SEQ ID NO: 11771 - DNA, 124 bp, Arabidopsis thaliana
  unsure at all n locations
  Clone ID: LIB25-099-Q1-E1-G11
aaggatgtcatgtcacaacanaacatgtacncccaattattaccactggctctagccgcaccaccgatgccaggaatgggangtggcgggtatggtccaccancatatcatgggtggaatgcna

SEQ ID NO: 11772 - DNA, 380 bp, Arabidopsis thaliana
  Clone ID: LIB25-099-Q1-E1-G12
cttggttcttttccataagcttataacatatattttttttaaaatctactctgcgttaaaaaaatgaaaacacgtagcagcagtgtgggtaagatcaaagggtgtttctcgatcagtttcatattcagatgtatcagagttctcattaacagatctgtttctttttccttatctgattaaacaatttccttcagaattttacttttttgaacatatatagtttttctctgttcctatatcttgagttttgtgagaggttaattatatgaaattttacgcattattgttcatctatatcgaaaaacaatgtcaagaaagccatgttgcgtcggagaaggcttgaagaaaggagcatggaccaccgaggaggacaagaaact

SEQ ID NO: 11773 - DNA, 455 bp, Arabidopsis thaliana
  unsure at all n locations
  Clone ID: LIB25-099-Q1-E1-G2
gatggtgtctgggtcagggatatgcgcaaaccgcgttngncgccgacgggngacaacaacaatgcttnggtccgtcctaagcctttccaaacaactngcgaaagggagtttactttaacgggacaaggaaagttggtttgttgtccgatggtgaaagaagaatttgtctctcggggaggtttggttcgacaaaagatgaagtacatgagattccttaggaaacgtatgaacactaagccttctcatggtcctattcactttcgtgctccttccaagatcttctggcgcactgttcgcggggaatgattccacacaagaccaagcgtggtgctgctgcactttgctcgccttgaaaggttttttgaggggaatcccaacctccttacgacaaggattaagaagaatgggntaatccctggatgctccttaaaggtttttgagaacttccagagtgg

SEQ ID NO: 11774 - DNA, 410 bp, Arabidopsis thaliana
  unsure at all n locations
  Clone ID: LIB25-099-Q1-E1-G5
atctttgaattttatggcaacccgtcttctccgaanaaactttatccggcgatcttaccgtttacccgcttttagcccggtgggtcctcccaccgtgactgcttccaccgccgtcgtcccggagattctctcctttggacaacaagcaccggaaccacctcttcaccacccaaaacccaccgagcaatctcacgatggtctcgatctctccgatcaagcccgtcttttctcctctatcccaacctctgatctcctccgttccaccgccgtgttgcatgcggcggcgataggtcctatggtcgacctagggacgtgggtcatgagctctaaacttatggacgcttcggtgacgcgtggcatggttttanggcttgtgaaaagtacgttttaagaacaatttngcgccgggg

SEQ ID NO: 11775 - DNA, 410 bp, Arabidopsis thaliana
  unsure at all n locations
  Clone ID: LIB25-099-Q1-E1-G6
gcttagcctcgtaatagaaagagaaaaacacaagcggagcaatttacgccttttccttccaccatcgttttttcaggtttatcattgtttatcgcatctttctggaggatctagccgctgctatcatgaagttcttggagtacactaacctagacagattgaatgtttttctgggtcatcttaatctcggggaaaggactatcaaaggttgcttggaagcttattcttgcaaacatgcaggaagtgataaaagattgtctcttagtttggagaatgagatgcttgattatcttgggaaatcttctgacaccgactcttcttcacccgttgatctcttgttaagcagatnaagtcgaaaggcttgatcnacttgggtcctaaagcccaacaaatgtnacccggactacnat

SEQ ID NO: 11776 - DNA, 408 bp, Arabidopsis thaliana
  unsure at all n locations
  Clone ID: LIB25-099-Q1-E1-G7
cataaatactaatggagcaccaccaccagcatcaccgtcaccaccaacgcgacgacggagaagacgatcgtcaatcctttggagtaccaccgccacacgtcgatgctccgccacaacctcatggtctttaccagtcacagcctcattttgatccttacgcgcctactcctcaagctccggcgccttaccgatcagaaactcaattcgaaccccacgcgcctccgccttaccgatcagagccttactttgaaactccggcaccaccgccttcatttggtcatgtgagtcatgttggtcaccaatcacccaacgaatcttacccaccggaacancaccgttacggagggttatcaancagccgttctaattccttactgggaaagtcatggagattacagtggngtcacg

SEQ ID NO: 11777 - DNA, 411 bp, Arabidopsis thaliana
  unsure at all n locations
  Clone ID: LIB25-099-Q1-E1-G8
gacttctctcttctacaccggcgatggcttcgccgcctatgactgccgtggtgatatcatcttcagggttgattcttatggacctgacacaagagataacgatgagattgtcctcatggacgcgaccgggaagtgtctccttaccgttaaacgaaagagaccaactctacaccaaagatgggaaggttttctcggcgagagatcggaaggtcagaaaccgatattcagcgtccgtagatcgtcgataatcggacggtgtacgatggaagtagaagtttacgacggaacaggagaagagtacattatcgatggagacttctcgcaacgaagctgtctcatatacgacacgaagaaatgtactgtggctgagatnaaacgcaaagttagacgcgtcaacgaacgttgatgctt

SEQ ID NO: 11778 - DNA, 386 bp, Arabidopsis thaliana
  Clone ID: LIB25-099-Q1-E1-H1
aacgttttcctctgtggtaactccggcggcttttgagataggcagcctcccgacaaccgagataccggtggatccggtggaaaatgattcaacagcaccgccaaaaccggtgagaatcacctgtccaacagtcgccggaacttatcccgtcgttttattcttccatggcttttatcttcgcaactacttctactctgacgttcttaaccacatcgcttcgcatggttacattcttgtagccccacagttgtgcaaattattgccgccgggagggcaagtggaagtggacgatgctggaagtgtgataaactgggcatcggaaaactcaaagctcaactaacaacttcggtaaatgctaatggaaaatacacctcactcgtgggcca

SEQ ID NO: 11779 - DNA, 310 bp, Arabidopsis thaliana
  unsure at all n locations
  Clone ID: LIB25-099-Q1-E1-H10
tgctggaaacagggagaatttcatcaacgagcttgtcaggagaatgaattgatgaaagcttccttctttatctttgcaaatttcaaagattttgggaccgagttttttttttttttttgttcaagttatcagagacttgtgatcttttatccgagataggctttttatgactaatcatgttattttccaatggcgggcttttaaattgatcttgaatttttattggctgttaaaaaaaaaaaaaaaaaaaaaaaaaaaaaaaaaaaaaaaaaaaaaaaaaaanccaaaaaaaaaaaaaaaaaaggggngg

SEQ ID NO: 11780 - DNA, 412 bp, Arabidopsis thaliana
  Clone ID: LIB25-099-Q1-E1-H11
tgagaaatcgtcggaggacggtggagatgacgccggagagaatgaagttgagtctccgtataaaggtcctcttgaaatgatggaatctctcgaacaagtcttacctgttaggaaagggatatcgaagtattacagtggaaagtcaaagtcttttactaatttaacggcggaggcagcttcggcgttgacttcttcttcgtcgatgaaagatttagcgaagccggagaatccttacagtaggaggaggaggaatctcctctgccatcagatttgggaaaataacaagacgactccacgtggtgggatctcgaagaaacacgttatgagttctagcagaagcgctttgacgctagctatggctgttgcggctggtgtgatgaccggagaaggatctcctccggaggtgactcct

SEQ ID NO: 11781 - DNA, 356 bp, Arabidopsis thaliana
  unsure at all n locations
  Clone ID: LIB25-099-Q1-E1-H2
nggggtnancccngaaaaanncnaaannccnaccaanggttaccccaancccgncaaccnnatcgaacctatgaaagctttccactggggaaaagatgtgagcattgagaatctgcatcaaggttacacacaacatcnttgaatccacatttgagagtaaagaagctgttgcagagtacattgctcatcctgctcacgttgaattcgccaccatcttccttggcagcttggataaagttttggttattgactacaagcctacctctgtctctctctaattatcttgtagcaacattttcatcattgatctttttccccgggtatgcatcctggtatgttgaataaagtataatcct

SEQ ID NO: 11782 - DNA, 416 bp, Arabidopsis thaliana
  Clone ID: LIB25-099-Q1-E1-F11
ttttgtcactcaccgaataataaagctttcatttttcaatctcatcagagagaaattaagctatggcgaagaagattggagtaacgatggaagttgggaacgatggtgttgctgtcatcaccatttctaaccctcctgttaactctttagccagtccaattatttctgggttgaaggagaagtttcgtgacgccaatcaaaggaatgatgttaaggccatcgtgttgatcgggaacaatggaagattttcgggtggttttgatatcaatgtctttcagcaagttcataagactggggatttatcgcttatgcctgaagtatctgttgagcttgtgtgtaacctgatggaagactccaaggaagccggttgttgctgcagttgaaggattaactccttgggtggtggtttggaactt

SEQ ID NO: 11783 - DNA, 410 bp, Arabidopsis thaliana
  unsure at all n locations
  Clone ID: LIB25-099-Q1-E1-C5
ggnanagnancattttctagncnttggtaccgaaactgtaaattcncgggccgacccacgcgtcnaaaatctttgaattttatggcaacccgtcttctccgaacaaactttatccggcgatcttaccgtttacccgcttttagcccggtgggtcctcccaccgtgactgcttccaccgccgtcgtcccggagattctctcctttggacaacangcaccggaaccacctcttcaccacccaaaacccaccgagcaatctcacgatggtctcgatctctcngatcaagcccgtcntttctcctcnatcncaacctctgatctcctccgtnccatcgccgtgttncatgcggcggcgataagtcctatggtnnacctaaggacgtgggtcatgangctntaaacttatggang

SEQ ID NO: 11784 - DNA, 381 bp, Arabidopsis thaliana
  unsure at all n locations
  Clone ID: LIB25-099-Q1-E1-C6
gttcaagttcagacatggacattgcttctgattcagatgaagagatattcnagaggcaacactctcctcaagattataggaattcatcttggtttgcctcacgtcgcagctcaaaatggacttggacgtaatggtgctaaggtctttggtgctnctgatgatttatctgactcagctactagcactgaagtttcatannaancagangcttgtggtgtgcggaacaatatatcttcacatantgaatttgaaagacgaaatgttgaggctggaacttcaggaangactctgaacgggacaagcacttcaacaagttcattgcctcgtttccccaanntttcatgcgagttaagcaanggtccatgggtctgccnatgattg

SEQ ID NO: 11785 - DNA, 414 bp, Arabidopsis thaliana
  unsure at all n locations
  Clone ID: LIB25-099-Q1-E1-C7
cacatacatacgtagagagatccaaaatacccaacctcgcagagtaaaagcaaaaagaagaagaaatcagagagaatgtcgtggcaagcatacgttgatgagcatttgatgtgtgatgtcggcgacggccaaggtcaccaccttaccgccgccgctatcatcggccatgatggtagcgtttgggctcagagcgctaattttcctcagttcaaacctcaagagatcacagacattatgaaggatttcgatgagcctggtcacctcgctcccacgggtatgttcctcgcagggctaaagtatatggtcatccaaggcgancctaatgctgtcatccgtggcaagaagggagctgggggaatcacgatcaagaanacaggacaancaatgggtgtttggtctgtannaagnagccag

SEQ ID NO: 11786 - DNA, 401 bp, Arabidopsis thaliana
  unsure at all n locations
  Clone ID: LIB25-099-Q1-E1-C8
aacatgaacatgtattagagagagacgtacaacagtgtgagaccatagaatctgaggctgttgagacaaaagaagacacacaaccaagtctggacctgaaagaggataaagaaacagaggaagcagagacattcaagaccgtcttttcgtctgatgaggtaagatcttctgctgttcaagaagaacaatttggtgaacatacggaaccttgtagctcggagattaaagatgagagccatggaaaagaagaatctgttgaggtcaaatctcaggagactgttcaagacgaaaacactgaggacaagcatgatgtacttaaagttccatctacagaatcagagaagtatcaaggcaangaaccccgagacagttctagtctccaatacaggaagctatgagaa

SEQ ID NO: 11787 - DNA, 422 bp, Arabidopsis thaliana
  Clone ID: LIB25-099-Q1-E1-C9
ggcctcaaccaaccaacatgatggttcctacctcagggcaacagtcttatccttggtcaagagcttcttttattgccagccctcgttggcaagatccgtctagctacgcttccttaatcatgcctcaaggagttgtcccggttcaaggatggaacccttacagtggtcagctcggctcagtttctccttcaggtaccggaaatgatcaaaactacagaaatttacagcagaacgagacaatagagtcaggctctcagtctcaaggatcattctcgggttacaatccgggatcctctgttccgctaggagggtattatgcattgccgagggaaaatgtgttcccggagagaccaagacaaccccgaatgccaattctacatgaagacaggtgactgcaaatttggcacagtttgcaaatttca

SEQ ID NO: 11788 - DNA, 420 bp, Arabidopsis thaliana
  unsure at all n locations
  Clone ID: LIB25-099-Q1-E1-D10
tattgaaatgacattcttcccagtagtaaacgaggcgtgtagggtttttgctgaaggtatcgctgtcaaagcagcagaccttgacattgctggcataatgggaatgggttttccaccttacagaggaggaatcatgttctgggctgattccatcggatcgaaatacatttactcgaggctggatgagtggtcgaaggcttatggtgaattcttcaagccttgtgcttttttggctgagaggggatctaaaggagttcttttgagcgctcccgtgaaacaagccaagctcacggttgtaaggtcagcgtttcagtggaaccatttctccattggtgnatcttctgtgttttcctnangttcacatttancttagcccgggaaagtggggtanccgttngggcngccaagaanggtttttag

SEQ ID NO: 11789 - DNA, 310 bp, Arabidopsis thaliana
  Clone ID: LIB25-099-Q1-E1-D12
tgctggaaacagggagaatttcatcaacgagcttgtcaggagaatgaattgatgaaagcttccttctttatctttgcaaatttcaaagattttgggaccgagttttttttttttttttgttcaagttatcagagacttgtgatcttttatccgagataggctttttatgactaatcatgttattttccaatggcgggcttttaaattgatcttgaatttttattggctgttaaaaaaaaaaaaaaaaaaaaaaaaaaaaaaaaaaaaaaaaaaaaaaaaaaaaccaaaaaaaaaaaaaaaaaaggggcgg

SEQ ID NO: 11790 - DNA, 393 bp, Arabidopsis thaliana
  Clone ID: LIB25-099-Q1-E1-D4
ttctgagtcattacaactatacaagagggccttgcaagtatttcccggttgtcctgcagctgtgagactgggaattggtctttgtcgttataagttggggcaactagataaagcacggcaagcgtttgatcgcgttttgcagctagatcctgataatgttgaggctcttgtggcacttgggattatggatttgcaagcaaatgattctataggaatgaggaaaggaatggacagaatgcagcaggcattcgagatttatccctattgcgcatcaagccttaaattatttggccaatcacttttttttcaccggccaacactttcttgttgagcagctgactgaaacagcattagccgtcacaactcatggggccaacaaagtcacattctttt

SEQ ID NO: 11791 - DNA, 478 bp, Arabidopsis thaliana
  unsure at all n locations
  Clone ID: LIB25-099-Q1-E1-D7
ngnnnngnagnatttatcnagccgntcnggtaccgaacagagaattcncgggtcgacccacgcgtccncggacgcgtgggcggacgcgtgggcggacgcgtgggtgacgcaggtgaagaatctacagaagataaacgctagggaatcagatttaggaatatctgatgaagcttcatggcacgctaagtacaaaaactctgcatatgtctacgtcggaggcataccgttcgatctcaccgaaggtgatcttctcgccgtcttctctcaatatggtgaaattgttgatgtcaatcttattcgagacaagggaacgggtaaatctaaaggttttgcttttcttgcttatgaagatcagagaagtaccattcttgctgttgataatctgaatggagctcttgtgttgggacggaccattaaggtggaccattgtggggcatacaaaaagcacgaagaagaggatgaaagagacgcgacgcca

SEQ ID NO: 11792 - DNA, 408 bp, Arabidopsis thaliana
  unsure at all n locations
  Clone ID: LIB25-099-Q1-E1-D9
ttgattcattggctctaaaacgaaaatgggaattctcaacgacgacgccgttttaatcgaaccgggaaaaatctccggagatcccaccgtcgttaccgtcaattgtcctgatgaatccggtctcggttcaactctgtgtagaatcatcctcgaatttggtctctccattacccgagcagatttttcaacagatggaagatggtgttatatagtgttttgggttactccagatattagctctcctaaaattgattgggacagcttaaagaatcgtcttttatcaagcttgtccttcttgcttaggctctttcnacttctgccttcaatccaaagtccccaaacctccttccctttaacctcctcaaagttcctttgccgtgatangaaaaggattgccttcatgaatgt

SEQ ID NO: 11793 - DNA, 411 bp, Arabidopsis thaliana
  unsure at all n locations
  Clone ID: LIB25-099-Q1-E1-E10
gggattggtaggaactttcttaggtgttggcatggtcgtaaagactctcctctcgaagttgttgtacttaacgacagtggtggtgtcaagaatgcatcccacttgcttaagtatgactccatgcttggaaccttcaaggctgaagtgaaaattgtggacaatgaaactattagtgttgatggtaagctcatcaaagttgtctccaacagagaccctcttaagcttccatgggctgagctcggcattgacattgttatcgagggaacaggagtgtttgttgatgggccaggagcagggaagcatatccaagccggagcctcgaaagttatcatcactgcaccaagccaaggtgctgatatcctacctatgttatgggagtcaatgancaagactatggtcacgatgtcgcng

SEQ ID NO: 11794 - DNA, 411 bp, Arabidopsis thaliana
  Clone ID: LIB25-099-Q1-E1-E2
acaattctgagaggttccttcatctgcaaatgctactactgattcggtgatggaatcgatcggcgacgacgatgagctccgaagcaaaacagtttctcttccgagaagaatctcgtttacgattcttcttcttcttctgttaatctccttgagtacaagggtctctggttcgttagacaaatctggaagaagagtgattgaagcgagaactgggcaagacttgatttgggttgttcagctatccgatctccatttcagtgtccatcatcctgaaagagccattgatttcaaaaacattgtgggtcctgctctggctcttatcaacccttctctcgtcttaatcaccggtgatctcacagatgggaaaagcaaagacatgtttaacaatgaagttaaatgaagatgagtggt

SEQ ID NO: 11795 - DNA, 369 bp, Arabidopsis thaliana
  unsure at all n locations
  Clone ID: LIB25-099-Q1-E1-E5
agaaaaaaaaaaaaaaaggcaaagagagagcttcaatggagttagcttctttccttggtagagctctgtttgtttccgtatttcttctctccgcatggcaagagttcaatgattttggtgaagatggtggccgatcagctaaatctttgaaaccaaaattcaatgcctttgtaaaccatgtgacaactcacactggccagcaattgccaccagtcgatatgaagattcttgttgctgctgctatagccttgaagggtattgggggactattgtttgtctttggcagctcattgggagcttatctcttgcttctgcatcaagccgttgccancccaattctgtatgaattctacaactacnatgttgaca

SEQ ID NO: 11796 - DNA, 477 bp, Arabidopsis thaliana
  unsure at all n locations
  Clone ID: LIB25-099-Q1-E1-E7
ggggtgnngaannnctaggncgtanggtaccggacaggaaattcccgggncgacccacgcgtccncccacgcgtccgcggacgcgtgggcggacgcgtgggnggacgcgtggggatagtataagcttctttggggttctcagannagcngtatcagaatcgnatataggagtaatgggaggtaccggaaagtatgtgaatgcgaggggattcgcgattctgaagacgtttacaggatctatcgggacgcagcagaatcagncgcatcagttcactgatgggcttganactgttgttgagtgtaccgtttatctttcttactanttttatttttcttcttttgttggggtttgggaatgtttggtgtgtatgttatgtgtgtcatttgtaatctaaatatgaaatttgtgtaanaaaattgtatgtaattttgtttcgtntcttgaangttactgatttgttttgggaacannaaant

SEQ ID NO: 11797 - DNA, 486 bp, Arabidopsis thaliana
  unsure at all n locations
  Clone ID: LIB25-099-Q1-E1-E9
gggngcaatnccatctgtacggcncgcggtcnnncntagaattcccgggccgacccacgcntcagctgagaaccaagaaaacaaaataataataaaaaaccctaattccccgctccacttctctctctcacgctctctctgtgattttagtatggaagcaacggcggaggaatcagttagtactcttgttacgacgatggttgatgagacgtatgagttcttagcgcctcgatggtttgatttcgttaatggagagactgaagatgagtctcgccgagcagaactctggtttcaatcggccttaagctgcgctccttctccttcggttcctagaatcaaagcaaggagatcgttcaaggtagaggccatgtgcaacttcaatgaagctgaagaagagacgctcaaggataatagagccgttagaaccagtagttccaattgtttctttacaatcgcagccttctnaggccaagaaagcagangttg

SEQ ID NO: 11798 - DNA, 393 bp, Arabidopsis thaliana
  Clone ID: LIB25-099-Q1-E1-C4
aataccaaaaacaagtcataagaatcaaatggagttctctatcaatccttcaactctaaagatgattcggacaagtttttgtatattagtagttttggcaattagtagtttttcgatgatggaagctcgggatctagctagcaaaggaaagacaaatattgaatatatggcgttgaattgtcgaaaacataccgcagttttgacagaatttggagcagttggtgatggaaagacctcgaacacaaaagcgttcaaagaagccataaccaagcttgctccaaaggcagccgacggtggagtgcaactcattgttccaccaagaaaatggctaaccggaagtttcaacctcaccaagccatttttactttgttcatccaaaaaaggtgcaactaa

SEQ ID NO: 11799 - DNA, 490 bp, Arabidopsis thaliana
  unsure at all n locations
  Clone ID: LIB25-098-Q1-E1-B1
nnngngnagnttctcnagccgggacggtaccgnncngncncgggtcgacccacgcgtccgcccaagcgtccgcccacgcgtccgcaaactcagtgagtgagtcaccgaaaacctcttgtagtagattcgtgacgggtttgatcatctcttcgaggtcggttctagggtttcactacgagaatggacggagatgagctcaccgagcaggaaactgctctttatgaccgtcaaattagggtatggggagctggtgctcaaagaagattgagtaaatctcatgttttggtatctggaattaagggcactgttgctgagttttgtaagaacattgtgttggcangagtaggtagtgtgactctgttggatgatcgattggttacaacgggaagtcttcaacgcaaacttccttgattcctccctgatgaaaatgcntaagttngcaaaaccgttactgaaaatttgttgtgantcacttaanggattttaaccc

SEQ ID NO: 11800 - DNA, 264 bp, Arabidopsis thaliana
  unsure at all n locations
  Clone ID: LIB25-098-Q1-E1-B11
tgccaaggaagaantcattgaaaagagctcagattcatcgtcaacctaaacatgtttgtnctattttatgagcagagtgatgtaaatcataccgtgatttaattacggattacaacgaagagcttggncaaaatgtttgcacggaagcattgttaatttattgtacaaggtgtgatacttacagaaaggcanaacagtgtaacaaatgtagtaagtgccttgcatttcacggttttgcaaattgttggagaatantnnnaataa

SEQ ID NO: 11801 - DNA, 422 bp, Arabidopsis thaliana
  unsure at all n locations
  Clone ID: LIB25-098-Q1-E1-B2
ttctgtacgtctctctgggtaagaaagaaaaantgaaggacgaaacgggaaaccctctgcatatcaagtctttgaatcacatctctcttcnctgtcgatccgtcgaggaatccattagcttttaccannacgttttagggttcctccctattcgcagacctgactcttttgatttcgatggcgcgtggttgtttggacatggaattgggattcatcttcttcaatctcctgaacctgagaaattactcaagaaaacaagagattaatcccaaggataatcacatttctttccantgcganagcatggaagcagtggataagaagctcaaggganaaggagatagaagtnatgtgagaacaatgggttgaagaaaggtggcaaccaaagttggancaagctcctccttcangnancctggatg

SEQ ID NO: 11802 - DNA, 490 bp, Arabidopsis thaliana
  unsure at all n locations
  Clone ID: LIB25-098-Q1-E1-B5
gnnnngnannnttatcnagccgnncngtaccgatcngaaattcncgggncgacccacgcgtccnctttcatccataaacttctatttttctcatcgcaaacttgaaccgtcgtaaccctaaatcgccatcttcatcatcggcaaatcgaatctccgattatatatcaaatagcttaccaaatccgacatgacccaggccctcgttttcggaggactataatgatcggactcttcgtgtcccgtctcgattgcatggggtttgagctatgccggagcttcgccgtggagtccgccgtggccgtgttactgatgctgtagctcccaatcaagcttccgcaaacacctacagaaaagaaaccgaagaagagtancgttaaagctccaaaancggttgccggcggagttacaggagttgcagagangccgaggactaagattagcggcgangaaattaaaggaggaagataaagagatactcaaggagattccg

SEQ ID NO: 11803 - DNA, 421 bp, Arabidopsis thaliana
  unsure at all n locations
  Clone ID: LIB25-098-Q1-E1-B6
aaaaatagttgtaaatagagagaaaaataaggcggggaaaaggatcacgattcacaaaattagtggaaaaatcataagtgtttcgtcttcttcatcggagatctcgtgctctgaattcgagaattgaggtttgagatttctgggtgatttggtctaggctatataagtttttagaacaagacggagctgaaggaatcattgtgtttttggttgatgagtttagatttagattagtgccttagtggtttgtttctatatcttattttgaggagcatatgggaaagagaaacacgtcttgggctagaaattcnaatanaaaggttanatctaaggataagggttcagatgagtcanatgaggattangtgatttccgacgaggatnaanaatntccgaaggctgatttcaagggnggantttc

SEQ ID NO: 11804 - DNA, 487 bp, Arabidopsis thaliana
  unsure at all n locations
  Clone ID: LIB25-098-Q1-E1-B8
gggnggngcatttcnagccgntccgtaccgaacacaaattcncnggtcgacccacgcgtccngtgctggaggactgagtttgctgcaattctgcaacctgaatagcttcaggacattattcatactgggcttctcaatcttcctaggcctatcaattccacaatatttcaacgagcacacagccatcaaaggctatggtccagttcataccggggcaagatggttcaacgacatggtcaatgtgcccttctcgtccaaggcctttgtgggaggatgtgtggcttacttgttggacacgacgcttcacaagaaagatggttcgatcaggaaagaccgaggtaaacactggtgggacaaattctgggactttcaagaacgacccganaacagaagagttctatgctcctccgttcaacctcaacaaatattcccttcgtcgaaaaaaaatccntccaaactttaaggnaatgcggttttngcnantttt

SEQ ID NO: 11805 - DNA, 402 bp, Arabidopsis thaliana
  unsure at all n locations
  Clone ID: LIB25-098-Q1-E1-B9
atcgagttaagtggaagcgatggatactgccagagcatggctgaagaaattaaagtctaaagggaaagagaaatcttcgaataagaaggaaacttctagaggaaatgttaaggagggatcaaaaacagctggaggtgaagaagctgtgtctaatgtgacaaagcagaaggctgctgctgcgaaacagtatattgaaaatcattacaaaaaacaagttcaaagtcagcagcaaagaaaagagcggcgtgatatgctggaaaataagttagctgctgcagaagtctctgaggaagagcaaaagaatctgcttaaggatttaagagaaagaangaaactgaatacatgcgccgtcagagacataaaatggggaactgatgactttcaagccattgacaatgatag

SEQ ID NO: 11806 - DNA, 408 bp, Arabidopsis thaliana
  unsure at all n locations
  Clone ID: LIB25-098-Q1-E1-C1
tgacagcaaatagttttggcgtctttctaactcaacccatcatctctgttgcattttatcgagagaatatttgaggtggatatggcctcgacccttttctccagaactttcttggctgctagtcaccgactgattactccttctcttccgcaaaagatctttaatccagccacctttctcagtaggtcactccactctcagttaggctccgcttctacagcctataaatcaactacttgggctcgtcgagctatggcttctacgggagttgagacaaaagccggttactccacatcatcngtatcaaccantgaacctgttgtttccgtngattgggttnaggcaaaccttaaaaaacctgatttgaaattttggatgctcaagggnaaagcccgatnaacaaaaaaa

SEQ ID NO: 11807 - DNA, 414 bp, Arabidopsis thaliana
  unsure at all n locations
  Clone ID: LIB25-098-Q1-E1-C10
cttcttgagagagctgcggaagtagtggtggttcctcgagtcatgcatgggaattctaatgatggtctctggagagcgtcatttgatgaattcttcaaccttcttaccaaatactgcagaagcaagtatgacacaatccgtggacagaaccaagggagtgcagcggatgttttggagctggcgataaagagggaaatgcccgctgagcttttacgtgcgagtctgcgtcacaccaatgacgaccagaggaactatttattaaactttggtcgtaaaccatcagcaattagtgagtcggcatctcatgcaaggggtggacagatcaactctgaatctgtgaggggttaataaaaaagaaagagaaaccatgtgcttggaagattccaattcctggnttcatggctgtggtgntgg

SEQ ID NO: 11808 - DNA, 411 bp, Arabidopsis thaliana
  unsure at all n locations
  Clone ID: LIB25-098-Q1-E1-C12
acttcctctttctctctcacacacatatacacattctctatatatatagaagagaaccaaaaagtaggagaagaagaagctaaaacatataagaatggtttcgagagaacacaagagaggttcctctctgcgtgagaagtttcatttgcttcgttcaatcactgattctcatgctgagagcgaaacatctatcatagtggatgcatcaaaatatatcaaaaagcttaagcagaaggtagaaaaaatcaacaatgcgaccacgtctgagcaatctttccgtgaatcttccgatccaaatcctatggttacagtggaaaccctagagaaggggttcatgataaaggtaatgtcaaggaagaatgaggcaagcatgttggtttgtgttccttgaaancntttgaanaatctngg

SEQ ID NO: 11809 - DNA, 428 bp, Arabidopsis thaliana
  unsure at all n locations
  Clone ID: LIB25-098-Q1-E1-C2
gatcngtggagccgtcaactacgtagctatatcaaatgctcttggagttacaccatcggttttagctgctggactggctgctgataatgttatatgcgctgtatatttcacgacattgtttgctttgggctccaaaatacctgcagaagctgtaccgccaccgactactattgtagatgcagagacgaacgaagcttctgaaactaaaaataaaattcctgtgctactgatagctactggaattgctgtgtcattagctatctgcaaggctggggctttgctaacaaagtacttcggaatttcgggtggtagcttaacggctataacagcggttgttgtnaatttagcaactgtcttccgtccaattggtcgtccttgctccaatctggagaaaccaagggtccnaattttgatncaagtgttctcca

SEQ ID NO: 11810 - DNA, 260 bp, Arabidopsis thaliana
  unsure at all n locations
  Clone ID: LIB25-098-Q1-E1-C3
aaactttcnacataatatngaaagtcacacattctctctattaattaaacatgttgcttgttgcgtttgtgactcttttggtagcantagctttgcagccactaccgtcagtgttgtctttggacgttcanncttcttcggcagctagccgcaaagcacaatgtgacatcgatacttgtgtttggagantctagtgtcgattcanggaacaataatttcattangnaccgaaatgaaagggaantttccaccttanggtg

SEQ ID NO: 11811 - DNA, 391 bp, Arabidopsis thaliana
  unsure at all n locations
  Clone ID: LIB25-098-Q1-E1-C6
tcagcacatgatcctcgtctctctttctttctctctctcaatcacaagtttcagttacacagctgaacccaaagtatctcacattctgatctaatcagaacactgttttgtctgtgtaacataaacaaacgatcctgtttttatggaaaatttaatgaaacagtgacgattcttctacacttctttataatgacaaacatttcatagtaccaaaatacacaaataccttttctttatncttctcanccttctctgtttctttatcattcatggntccaaattcagtagcantgacaatggganaanccagacaacttccctttactagagatnaacggntcaaattcatnctcaatccccgaaaaacgttaatccaaacantccaaaaana

SEQ ID NO: 11812 - DNA, 53 bp, Arabidopsis thaliana
  unsure at all n locations
  Clone ID: LIB25-098-Q1-E1-C7
gagaggttccctactatgtggacgtnatcgttgtaattgctttancggcaaca

SEQ ID NO: 11813 - DNA, 438 bp, Arabidopsis thaliana
  unsure at all n locations
  Clone ID: LIB25-098-Q1-E1-C8
aaagggtaaagcagcaaaaccctaataaaatcacaacaaattaacacaaaaaaaccagatcttaaaactctctctacccaccaagaggatcaaccagtctcttccccttcanattctcctttcnacagtgaatggatcaacacgaccatggacagtctggagctatgaactatggcacaaacncataccatnccaacccgatgagcancactgcngctactgtagcaggaggtgcggcacaaccaggccagctggcgttccaccagatccatcagcagcagcagcagcaacagctgggcacagcaacttcangcattttgggagaaccaattcaaaagagattganaagactaccggatttaaggaaccacagcctttcnccttgcgaaaatcnaggagnatccatggaangcgggnttnaanaatttccgnttnatt

SEQ ID NO: 11814 - DNA, 435 bp, Arabidopsis thaliana
  unsure at all n locations
  Clone ID: LIB25-098-Q1-E1-C9
ganttaccagctgcagagatcaaaaacttcgtgattcattcgaacaatctaattttaccaagctgcagagatcaaaaacttcgtgattcattcgaacaatctaattcagatttattattgggtctggttatctttttcttaccatattttttgtttcctcgttaagacgattgtttggtaatgtcgtcaccagacattgtcggaattttggaaaacacgaaggaacttgatcggttaaggaaagaccaagaagaagttttggttgagatcaataagatgcataaaaagcttcaagcttctcctgagataattgagaagcctggtggataattcatagcaaaagcctaaagaaattgtacantcaaagccgaaaagagctctcanaaaaatgaaagntaaccgtatcgaacattttggctacncaattngggtttg

SEQ ID NO: 11815 - DNA, 311 bp, Arabidopsis thaliana
  unsure at all n locations
  Clone ID: LIB25-098-Q1-E1-A9
atttncgncggttnggaaacnanattcctngtnaattannacggtnacggncnaaccacngttacacaantgcatcattctccgggatttggccatgtttcaagaaactgcagactcccattttcgccgggacaccaatgcagaaagtgtttgaactctggcatcacttaccttcgtaatctcataggtgcaagagactaataacattactctgtgtacttgtcgtgatgcgacttatgctacattagcaagccgaatagacgatacatcagctcttgaactccttaattgtttcnttcaagtgacagagc

SEQ ID NO: 11816 - DNA, 314 bp, Arabidopsis thaliana
  unsure at all n locations
  Clone ID: LIB25-097-Q1-E1-G8
ttcttattctcctgtcttgtctaaagaaaaaagagagaggaagaaatggagactttgaggaaagcctgattggtgtatacagaaacatctattgaagacttgatgatcctgatggttcattgaagatttgccttgtgaacgctttgctccgganctggctctaaaccttaaccattccnaactggactantcactgtctgtcaatcnatncaaaatctnaatggacagacacacacacacacacactactagtgannccaacggaaaaaaaagtgagacaaatcaaggntaaaganatggaatnacaaaatcaa

SEQ ID NO: 11817 - DNA, 403 bp, Arabidopsis thaliana
  unsure at all n locations
  Clone ID: LIB25-097-Q1-E1-H1
ctaccatttcctcctctttctccttctatctgtgaacaaggnacattagaactcttcttttcaacttttttaggtgtatatagatgaatctagaaatagttatagtggaaattaattgaagagagagagatattactacaccaatcttttcaagaggtcctaacgaattacccacaatcaaggaaacccttattgaaattcaattcatttctttctttctgtgtttgtgattttcccgggaaatatttttgggatatgtctctctgtttttgctttcctttttcataggagtcatgtgttcttcttgtcntcctagcttcttctaataaagtccttctcttgtgaaaatccccnaaatttcaatttgtccantggagnatctatagatcacaccagagaaaat

SEQ ID NO: 11818 - DNA, 202 bp, Arabidopsis thaliana
  Clone ID: LIB25-097-Q1-E1-H10
tttgttcttgtcttctttacaagagaagagacaaatgtctcttactctgtttttcttctttctctcgataatccaacatggtatcagagccaatggttgtctttggttgtctctacaaaaataagatgagttccgctgcgaaaagaaaaagagagatttagacaacaaatctatggtgagaagaagaggaagaagaagaaga

SEQ ID NO: 11819 - DNA, 256 bp, Arabidopsis thaliana
  unsure at all n locations
  Clone ID: LIB25-097-Q1-E1-H12
atttgntacccngcaggtacaagtcctcccgnccncgactcanacgtcngtanggatatagaaaatggcagatggtgaagacattcagcctctcgtctgtgacaatggaaccggaatggttaaggctggatttgctggagatgatgcaccaagagctgtattccctaacatcgttggtcgtcctcgacacacaggtgtcatggttggtatgggacaaaaagatgcttacgttggtgatgaggctcagtctaagagt

SEQ ID NO: 11820 - DNA, 419 bp, Arabidopsis thaliana
  unsure at all n locations
  Clone ID: LIB25-097-Q1-E1-H3
tctttgggaaccctaatcaacttgtgttttatgttgacgatacaccgatcagggtgtacagcaagaatccagatgtttactacccatcggtgcagacaatgttcctaatgggaagtgtgcaaaacggatcgataattgacccgaagcagatgccttacattgctaagttccaggcatcaaagattgaagggtgtaagactgagttcatgggaatagataaatgcactgatcctaagttctggtggaatcgcaaacagctaagctctaaagagaagacactgtacctaaacgcaaggaagacgtacctggattatgactattgttctgacagacagcgatatccaaaggtgcctcaanaatgtggaagttacacntagagaaaagtnaatacctgtcacanggttaancctacaaaaaat

SEQ ID NO: 11821 - DNA, 377 bp, Arabidopsis thaliana
  unsure at all n locations
  Clone ID: LIB25-097-Q1-E1-H4
cancgaagaccggcncactcagcantgngtctaccagtntaaatcgtaatatggtgtnagntggngnctggaaatntgggcccaagacgtntgacacatctcctgtgatgcaattctcgcaggataagtcctggcgtgtgcgttatatggttgcaaatcagctctatgaactttgtgaagctgtaggaccggagccaactangacggatctggtgcctgcatatgctcgtctactttgtgataatgaggcagaagtcggtagaactgctggaaaagttacaattttgtccattaaacctgaactcgcatcaacaaatctcccgtgtaaggattacacanntctccacactcagtntgatggatcantataatggaag

SEQ ID NO: 11822 - DNA, 390 bp, Arabidopsis thaliana
  unsure at all n locations
  Clone ID: LIB25-097-Q1-E1-H5
attttgaaaccctaatttctcttcttttccccaaaaaaaaatgtctgaagttgagtaccggtgctttgtcggcggcttgcctgggccaccaatgatgaagtcttcaaaggacgttctcacagttcggcgacgttatcgattctaagatattaacgaccgcgagagtggaagatcaangggattcggattcgtcaccttcaaggacgagaaagccatgagnggatgcattganaagatnaacgtaagaacctcaanggnnttgtcatcaccttnaacaaggnnantcganaggtancggcggtggcngaggagncntggtggaaccggtggtggttacccaccngaggcggtgggggaactcaagaancggtggcggngntacccaanaag

SEQ ID NO: 11823 - DNA, 385 bp, Arabidopsis thaliana
  unsure at all n locations
  Clone ID: LIB25-097-Q1-E1-H7
gaattgttgcgcgacaatggagaaatacaacagtttatcagattttctcaaggagttctacatccctacgtacgtcctctcggcggaaacagaagaggaggaggaggaggagatcgtcctacacctgcgagccccgtccttgtcttcatcaactccaaaagcggtggcagttgggtggcgaactcattctcacctaccgatctcttctcaatcacaatcaggtctttgatctcgaccagagactccaataaaagtgtccgccagaatctacttaactgagaggtcaagatatgattcgncncagatcggagaattaaatcattgtnagnagtntggactgtggtggtccttgagttnatngactaattgcaaatcnccccaatna

SEQ ID NO: 11824 - DNA, 362 bp, Arabidopsis thaliana
  unsure at all n locations
  Clone ID: LIB25-097-Q1-E1-H8
gcagaaagtctccantgngaaacatttgaaatttctgaggatgcgaatttcactgagganaaaatcttactgcaggtgctgtgcaacgttgaccataggcttggtactggaggaggagcccagcaaatcaaggatcatccttggttcaaggatgttgtgtgggaaaactctatgaaatggagntgcgtacaaancagaantgaacgacgagctaganacacaaaattttatgaantttgtgaaatgaatctcctgcactgaaagactaatcagacccccaggaaatcctctgctccaagattaantttgttggnacaatcaaaacttgcnctgtaaagatngncatcctgaatgcagacant

SEQ ID NO: 11825 - DNA, 190 bp, Arabidopsis thaliana
  Clone ID: LIB25-097-Q1-E1-H9
gatttgggtgatgtctttcatcatagcaggagctattttaggaggaataatccctggagttactacaacaaagacagcgatcgcgtgtcctctctattgcttacaagtagagtacatgacatgtccttcctccggcgctgacaagcttcctccaagatgcaactgttgtcttgctcccaaaaattgtact

SEQ ID NO: 11826 - DNA, 76 bp, Arabidopsis thaliana
  unsure at all n locations
  Clone ID: LIB25-098-Q1-E1-A1
agtatganagtgngattcaagagtttgatccttacatcaattataagagtcactcaagttcntatcgaagactgga

SEQ ID NO: 11827 - DNA, 406 bp, Arabidopsis thaliana
  unsure at all n locations
  Clone ID: LIB25-098-Q1-E1-A10
aacatacataaaaaatgggtgaatcttttagattattcaatcatcatcacttcctcacaacttttctcataatcatagccatgctcaaattggttcatacaacaacaacaacaactacaacaacaacaacaaacaccgagttcgtaaaatcatcatgcactttcacaacgtacccaagactctgtttctcttcactctcaactcatgctagtctcatccaaacaagccccaagctcatggctcatgcggctctcaacatcacattagcctcggctaaagtaacttcagcaatgatggtgcgtctctcgaatagtcggctcaagcctaaagaagtctcggccatgagagactgcgtcgaggagttaggtgacacgttggagggagcttangaaatcgatttggtgag

SEQ ID NO: 11828 - DNA, 290 bp, Arabidopsis thaliana
  unsure at all n locations
  Clone ID: LIB25-098-Q1-E1-A11
ctaagatttgctgcttaagctggtaagaatgtntgggtcacaaatttactcgtcgctttccgctccctcatctgttggtgtagatattgaagctgancaaaggatggagcggtacagttgttgctttgtcnagttcgagaaaatcaaggcttgccttccctctttagcaagaagaggaaatttggtggccaanactctccatgaacncaacttnacatttnaagaaatttcaacgtgataccttttggangtggaattgggntcaangtggagtttaaaagtacnaaaag

SEQ ID NO: 11829 - DNA, 472 bp, Arabidopsis thaliana
  unsure at all n locations
  Clone ID: LIB25-098-Q1-E1-A3
gncggtncagacnnnaattngtcggtcgacgcatccgnggaagcgtgggttagtcaccanaanacttataaactccacananagtttcaatggccgcctccacantggctctctcctcccctgccttcgccggaaaggctgtgaacctttcccccgcggcatctgaagtcctcggaagcggccgtgtgacaatgacgaagactgttgccaagccaaagggtccatcangcagcccatggtacggatnnnaccgagtcaagtacttgggtccattctctggcnagtcaccganctaccttaccggaaagttccccggagactanggatgggacaccgctggactttcagctgattccgagacattcgcaaggaaccgtnaagctaaaaagttttccacancaaggtggggctattgctccggagccctaagggtgcgtcctnccctgagcttttggctaagaacggggtcant

SEQ ID NO: 11830 - DNA, 501 bp, Arabidopsis thaliana
  unsure at all n locations
  Clone ID: LIB25-098-Q1-E1-A5
nnnnnnnnnaatgttacgccgccnggcnncggtcnaaacanaaatgggcccggccgacccacgcgtccngtctctttctccgtcgccaccgttcctaaaacgtctcccgtcttcttctaatggcgatcaatcgtagctccgatcatgaatccgacgaaaacacccgtctttaccatccttaccaagaactaccaggtcccgatnaaatctcagtatctatacaagcttccgacttctccggaatttctattcacggaagagtctctcaagcagcgtcgatcatggggagaaaatctcactttctacacagggacggggttatctaaccggctctgtaaccggtgcttcaactggggatctcctccggtatcaaagagtttccaaaatggagacacgacgaanctgaaaatcaacaaggattttgaattcgtccgggcaaggcangtcctaacttgggtaataaggtttggaatggttggtttatnaacncagggaattgaa

SEQ ID NO: 11831 - DNA, 421 bp, Arabidopsis thaliana
  unsure at all n locations
  Clone ID: LIB25-098-Q1-E1-A6
ttttcctcatatcccttttttctcaatataaatactctgcaaaaaaacacccacaaatcctcacacaaaaacgttttcgaaatccctaatctactctctcttctctatatctctactcttgagaaatggctcttagaactgtgctcgtctccgacgtccctagcctcccggattctgtctacggtttatccgaaggtttagagttgagcaaaccgacgtcgtttaggttaccggggttttcggtgattggacatagaggaatcggtatgaatgtgttgcaatcgtctgatcggagagcgagaggtgttaaagaaaactcgattctttcattcaattccgccgctaagtatccgattgaattcaatgagttccatgttcaaggtgacaaaangatgatggcccggcaattttcaagaaggat

SEQ ID NO: 11832 - DNA, 433 bp, Arabidopsis thaliana
  unsure at all n locations
  Clone ID: LIB25-097-Q1-E1-G7
attctccacgtagaatcaagagtacttcttttccttaaatctctacaaaaaaaaaatcgatctatatactaagagatcataaatatagattcatagacctatttaagaaacgacttaagaagctgttggatcatataccatataaaatagcaatggatatgataacgaagatggtgatggagagaccggtggtgatttacagcaagagctcttgctgtatgtctcacacgatcaagactttgctctgcgatttcggagcaaatccagcggtttacgagctggatgaagatatctagaaggaagggagatngagcaggcgtttgttnccggctcggggtgtagcccccgccagttccggggcgtttttcaatgggtggaagagttggtccggtgggagnccaacgaaggtcatggagtccaacatncttaacgg

SEQ ID NO: 11833 - DNA, 414 bp, Arabidopsis thaliana
  unsure at all n locations
  Clone ID: LIB25-098-Q1-E1-A8
tgatcaaacaagtaaaccattcaaaagatgaaaggaagaattttgattttgagtttgctcataatgagtctggtcatggcacaagttcaagtagaagcaaagatctgctgcccttccaaccaagctagaaatggctatagtgtatgccgtataaggttttccaagggaaggtgtatgcaagtgagtggatgccaaaactctgatacatgccctcgaggttgggtaaacgccattctcgaaaactcagctgatgctaccaatgagcactgcaagttagggtgtgaaacttctgtgtgtggtgccatgaacactctccagaactctgatgcaagtgaaattgtgaatggagcgtcggnacaatgtgccaagggatgttcnantttcngnccaagaactatgttatcccanctgggg

SEQ ID NO: 11834 - DNA, 422 bp, Arabidopsis thaliana
  Clone ID: LIB25-097-Q1-E1-D6
gaaaaaatatgtattgtagagagtccttgtcgagtctccagactttgaacgtagcaaagagtctcagctctttgttccctaaacaatcagctctcatcaacccgatctccgctggacgtcgaaacaacctgcctcgtccaaacctcagaagacgatgtaaggtcaccgcttcacgggctaatattgaacaagaaggtaacacagtgaaagaacccattcagaatattaaagtaaagggatacataacggcccaagaagagtttctggagggcataacttggtcgagaggtctcgatgacattgctgatatccgcggcagatcattgctcgtcgaagcttattagcgccaagactgaccaacggattacggtagaagactacgcacaacgtgtatgggccgaagcccctgatgaaaaagtacg

SEQ ID NO: 11835 - DNA, 71 bp, Arabidopsis thaliana
  unsure at all n locations
  Clone ID: LIB25-097-Q1-E1-E1
nccgggtttcctnaaaatcccggtttttaaatttgggtccctaaacaaaccggttccanaaattttaataa

SEQ ID NO: 11836 - DNA, 165 bp, Arabidopsis thaliana
  Clone ID: LIB25-097-Q1-E1-E11
gatcgtcagattcttttgggtgtcttcgttgctttcgtcgccgttggtgctggtgctgcttattttcttacatcctccaagaaacgcagagtgtgtttggatccagagaatttcaaggagttcaagcttgttaagagacatcagcttagtcacaatgtggccaag

SEQ ID NO: 11837 - DNA, 407 bp, Arabidopsis thaliana
  unsure at all n locations
  Clone ID: LIB25-097-Q1-E1-E3
tgttcccanngacggaagatccggtcaccagcncgccagctcgctcatcttggactnaaagtagatnatgccnttactaagntggtgctgcnccgtgacgngccacgttcataacgtccacatctcccgacgctcccctcgaacattacagagacctgacatgataactccagtgtggttctcagggacagccgttagacccgagtaagatccaagaccactttgaggatttctacgaagatattttcgaagaactcaacaagtttggtgaagtggagagtctcaatgtttgtgacaatcttgctgatcatatgattgggaatgtgtatgttctgttaaggaggaggtcacgcactgctgcgttgcangcttgcanggaaanttaatccgncnnccancattgctga

SEQ ID NO: 11838 - DNA, 436 bp, Arabidopsis thaliana
  unsure at all n locations
  Clone ID: LIB25-097-Q1-E1-E5
tttcaagtgggggctaaacggtgcagcggctgcatttgatgtctcggcttggggaatcgcgatcgcgcaggttgtttatgttgtagggtggtgtaaagacggttggaaagggctgtcttggttagcgtttcaagacgtttggccgtttttgaaactgtcgtttgcgtctgcggttatgctttgtctagagatttggtacttcatgacgatcattgtcttaactggacatcttgaaagaccctgtcataacccgttggatntcctctcaatctgtatgaacattaatggaatgggaaaggaatgttgntcaaaaggaatcaatncagccataagtgttaangggtgtcnaaatgannctaaggatnggggacatccaccgaanctgcgaaaataactcccgttnatncgttaacggnggaaaaaantccccncccnc

SEQ ID NO: 11839 - DNA, 449 bp, Arabidopsis thaliana
  unsure at all n locations
  Clone ID: LIB25-097-Q1-E1-E7
nccccaganggaagatccggncaccacctnactgttangtctacacnaatttgtcaaagggtgcggttagagntcacgaaacataaacttcattctctagctcttgattgctcttaaaggtgcatgttgaagtgattgaaagcgatttacatgtgacttgcagctcggtcaagacattatacattacactcaacacgaagattgggaaagggatgcttgagaatccaaagttcgattttgcacgctgttggcaatcacaacaaacgacaacaattactaatgccttcaaccaaagacttttatcaaaagctccggggaagaaaggacaaacatgtccggttgacagtaatgcaagacaaagtaatgctggaagggtcngtgtcaaatgtctgtcgataacagtaaccgttgggttcnaantgatgcncctaattggccaatcctggntt

SEQ ID NO: 11840 - DNA, 329 bp, Arabidopsis thaliana
  unsure at all n locations
  Clone ID: LIB25-097-Q1-E1-E8
ttttagggctttttgcttatcatcgtcgtctcagatcctgctaaaaggaaaaatcttttgttctagatttcttcactctcgtcttttgatctcttgggtttttccctgttggtgtcaccatcgttctcgtttctcgatcgatcgttgagtcaccggcgttaagcccgacttgagtcctagataatttaagattagntgtaaaattgatttggtgggttggttntgatttgaccaaactgtggggttgataaatggattgaaatacaaganaaatatnccttaatcgccaactcaacatgaggttgcggaaacacgatgccccgaangaa

SEQ ID NO: 11841 - DNA, 373 bp, Arabidopsis thaliana
  unsure at all n locations
  Clone ID: LIB25-097-Q1-E1-F1
aatttgatgcatcccttaagaaggttgttgagatgggnttgatcccaccaccactaaattgtttagnttgcggatgcttaccaaatgagcgagaaaacgattgaagaaaaantgtagtcttanaatttangtttactgtggtgatgtatgggaaatttcaagaagactccttctntttgaaagtcccaagaagaaatattgaagtcggtgaacgttctaacctagntatacagactgattctntatggtaacgtatcctcctgcattgatatctgtaganctgtaaaaagaanatgatttctgggaagaaatgaatggcacgaaacgcttggtttgcacctcaagtgtttggtacagcatggagaaaagnata

SEQ ID NO: 11842 - DNA, 202 bp, Arabidopsis thaliana
  Clone ID: LIB25-097-Q1-E1-F11
tcaaacagtggcttaaacccaaaaaaggaacatggatgttagtatgagtttttcacaagatatggataatgagtatgagaagctgataagaagaatgaatccaccaagggttgtgattgataatgactcttgcaagaaggcaactgtgataagggtggatagtgcaaatgaatatgggattcttcttgaagttgtacaaatc

SEQ ID NO: 11843 - DNA, 202 bp, Arabidopsis thaliana
  Clone ID: LIB25-097-Q1-E1-F12
agaagaaaataagaaaaaacaaaagatgaaaaccattatcctttttgtaacatttcttgctctttcttcttcatctctagccgatgagacagagactgaatttcattacaaacccggtgagatagccgatccctcgaaatggagcagtatcaaggctgaatggaaaatttgcgggacagggaagaggcaatcgccaatcaac

SEQ ID NO: 11844 - DNA, 349 bp, Arabidopsis thaliana
  unsure at all n locations
  Clone ID: LIB25-097-Q1-E1-F3
ttatcccantaccgnaaagatccggtcgaccagctcagcgcacttctccggctcgcaaggtcctcaccaccggcggcgaagtcccgtatcagagcctccacgagcgacacacacccagcttagaagtcaaggaacagagcagcacccacatgaggaggactcatttcacgctgcactgcagcggttgtcttggtaagnagcatggtgagaaaaagccaacgaggaanaggggcaaaaaataccaaattntaatncacgcaaattncnnatgtnaaacccactctnancacccctcattcnnaattccatattgcgtactaattgtacattacaaaccttactcaaaaac

SEQ ID NO: 11845 - DNA, 438 bp, Arabidopsis thaliana
  unsure at all n locations
  Clone ID: LIB25-097-Q1-E1-F4
tgatcgccagnacggaaggatccggncgccagcnccgagggttcanttcctcatgtgaatttttccctctccaattcaatcatctgggatcgaaatctcggaagatgaaacgcgattcgacgaaatctccgaggaagagtggctcaacactcgttaacgctcgcgagtcttaaacgaccacggactccgaagaagactcgcgcggcgacgaatccaacgccgtcgattgagtcttttgcgtttaggagaccttcgacggcgatgacgattgagagtaatagcagcgatggtgattgtgttgagattgangatttgggagattccgattcggatgtgaagattgtgaatggtgangatttgttgttagaggatgaanaagaagtgggagagactaanggtgtgatgcncgctgcnanagttggtaggagaattgtgatg

SEQ ID NO: 11846 - DNA, 504 bp, Arabidopsis thaliana
  unsure at all n locations
  Clone ID: LIB25-097-Q1-E1-F7
actntttttacnncggccccccaaggggttaccnaggggtnaanggggaaattccccccggggggtcccgnaacccccaaaccgnccgntccnccggggcgnaagaaagncaaatggtgntttggcccctaaaacctttacctggaacctttaattccaaanccttttggattccgaaatggggggtaaacctccgaaaaaggggggggggggttttggtaataaaaaagaaagggcaaaatggggaggaataatttaagggggaagtttaaagaaagccgccggggattaaagagctgatgttgttttgtacagtgcattgattgatgcattgtgcaagaatgggttggtgggttctgctgtttcttgatcatagatacaaaggaggatanctatttgaactatatcatatcagcttgnctctnacatgncatacntaacatggtgtctctcctctcgnctatntnctnaaagggacgtataatatgcatacactnatacaca

SEQ ID NO: 11847 - DNA, 328 bp, Arabidopsis thaliana
  unsure at all n locations
  Clone ID: LIB25-097-Q1-E1-G1
aatncccgggccaaccaagnctcccnaaagaanccaaacaccgggggannaaaaaatatagactttagatangtgtantaaataacatagtgtaacttatttcagtattcatacacagatgctgtgaatggtcattcctgcctttggctttgggatcaatccgatactggacacaattccctgactttatgaaggaatactggcatatggagggtcacatgaaaggnnacaggagaattggaatggagagttcctgaatagtctgangtaggatcagaaattacactacgtagtgtcatccatnactanactgngtntccacaggggg

SEQ ID NO: 11848 - DNA, 177 bp, Arabidopsis thaliana
  Clone ID: LIB25-097-Q1-E1-G10
attatcatagaattacaagatgtgttccagagattcatgtttgatacttcttcaattttgatgactggttacgatccaatgtcactatccatcgaaatgctggaagttgagttcggtgaagctgcggatattggcgaagaagcaatctattatagacatttcaaaccggtgatcttg

SEQ ID NO: 11849 - DNA, 168 bp, Arabidopsis thaliana
  unsure at all n locations
  Clone ID: LIB25-097-Q1-E1-G11
taaatgcnanctctcaattctgtggtgtagcananatggttggacctgttgattttgataagagcgttgattactggcaacaagatanatggagtggncagttcccagtgaagtggcacattatcaaagatgttccaaacagccagttccgccacattatattggaac

SEQ ID NO: 11850 - DNA, 193 bp, Arabidopsis thaliana
  Clone ID: LIB25-097-Q1-E1-G12
ttttttcccttttacaattcttaagctagttttatacttttcttcttcctttcatttgggttaagagaagccatggataccgagtttctccgaaccctagatcgtcagattcttttgggtgtcttcgttgctttcgtcgccgttggtgctggtgctgcttattttcttacatcctccaagaaacgcagagtgt

SEQ ID NO: 11851 - DNA, 473 bp, Arabidopsis thaliana
  unsure at all n locations
  Clone ID: LIB25-097-Q1-E1-G2
ttattgcccagcnacggtaaggaatccgggtcgacccacgcgtccgcacaattcggaggacttcctcaatgggctgttgttggtgacacattccctgttggatgtgcatttgatgaatctaacgtacatcacaagtactttgtggaaaacccagattttcacaacgaaacctacaacactaaaaatgggatttactctgaagggtgtggattaaacaatgtcatgatgtcttggggccatgacgactacatgtacctggtggctaaagaaaacggaagtaccttgccgtcggctgggacagtttatcataagataccattccttttaccctttgcacacggctggagaatacacccatcttatgaacgaaggaagacaaggagaatctgaagtggctacacgttttcaacaagtacgacttgtacagtaagagcaaagttcacgttgatgttggagaaggtcaagccntacta

SEQ ID NO: 11852 - DNA, 421 bp, Arabidopsis thaliana
  unsure at all n locations
  Clone ID: LIB25-097-Q1-E1-G6
tgcgataatgagagaacggattattacattcgtttcgctgcttcttgtagctttgctttcgtttcccagtgttagctactgcgacgaccaaacgatcctgtatgaatcgtttgacgagccttttgatggtcgctgggtcgtttcagagaaagctgaataccaaggtgtgtggaagcacgagaagagtgaagggcatgatgattatggacttctagtgagtgagaaagctaagaagtacggaatagttaaagagcttgatgttgatgagcctctaaaccttaacgaaaggaactgttgttcttcaatacgaaggctcgtttccaagaagggcttantgtggtggtgcttactttaaaagtaatcttccgtcctcaanaancctggaatggttcctcaaagggttttgataatgantcnccct

SEQ ID NO: 11853 - DNA, 345 bp, Arabidopsis thaliana
  unsure at all n locations
  Clone ID: LIB25-097-Q1-E1-D4
ttatagattcaacatgaggaagaagtatgcaatcgaggttcaagaagctgggcaactattcagctgtttacgaagttacactgaagtgggcaagtgtgcgttaagaagaagacctatatttcaagctattcaactgtttacaagttacgctgaaatcacaagctgagcaagtgtgtattaactctcttattatttttcctaggattaagtttgtaattatgcttgatattatcatcataacacaaaaattcaatggtaaataatatattattctgaggttgaaaaaaaaaaaaannangnnagnnnnngggannnnngnnaaaaaaaaaaagggnggccgctcta

SEQ ID NO: 11854 - DNA, 179 bp, Arabidopsis thaliana
  Clone ID: LIB25-095-Q1-E1-B1
tcaaaaaactcaaaataaactttcctcatttttttttttctttcttttgttttgttttctttataaaggagaaagaaagagaaagagagtttccgaaagctgaattgagttgggtgaagcaaattctcaggatgggaagaggaaagatagaaataaagaggatagagaactcaacaaaa

SEQ ID NO: 11855 - DNA, 222 bp, Arabidopsis thaliana
  Clone ID: LIB25-095-Q1-E1-B3
aatttctaatcaccgaccaaaattgatcggaaacctagagctcttcgtattgctccgccaccatgcatatccggcgccagatcttcgttaaatctcctgactgtcaaaaagtcgtcgctctgcaattggatcctgcgcaatctctattaactctttcgggtatcacttccttactcgaatcgtcgcagcgtatatcgttttcggcttgctcgattactctat

SEQ ID NO: 11856 - DNA, 219 bp, Arabidopsis thaliana
  Clone ID: LIB25-095-Q1-E1-B4
aagaagagaagaaagatgggagcaaagggttgtgttaacgttctcctcaagcttctagtgtttcaaggtcttttcgtttcacgtcctcaagaagactttgatttcttctacttcgttcttcagtggcctggagcctattgcgatacatcgcgtgcttgttgctatccaacatccggtaaacccgctgcagattttggtatccacggtctatggcctaac

SEQ ID NO: 11857 - DNA, 222 bp, Arabidopsis thaliana
  Clone ID: LIB25-095-Q1-E1-B5
gcagaagctccttcattctccaccatgagctcgttttacctttcttcttctccaattttcaaacttcagtggcacgcaaaccataaacctaaacccaatcgtgcaatagtttcttttccaccttctcgtcttcatgccaactgctattcgtggagattatcttgtaaccttgctcaacatggtattgagttggaggaaactgtggaggaagatgaaatcctg

SEQ ID NO: 11858 - DNA, 215 bp, Arabidopsis thaliana
  Clone ID: LIB25-095-Q1-E1-B8
ctttatacgtataataacatcccttgtgatcaaacaagtaaaccattcaaaagatgaaaggaagaattttgattttgagtttgctcataatgagtctggtcatggcacaagttcaagtagaagcaaagatctgctgcccttccaaccaagctagaaatggctatagtgtatgccgtataaggttttccaagggaaggtgtatgcaagtgagtgga

SEQ ID NO: 11859 - DNA, 200 bp, Arabidopsis thaliana
  Clone ID: LIB25-095-Q1-E1-C10
aagttttccatatactaatggggaggtttcataaatttcctctcctaggtttagttctgttcctcggtctgaccggctcacttatcgccgccaatgagtatgcctgttctagtaccgatatacactttactcgtgccaatttccctaaaggtttcatttttggtaccgcaactgctgcttttcaggttgaaggagctgtc

SEQ ID NO: 11860 - DNA, 204 bp, Arabidopsis thaliana
  unsure at all n locations
  Clone ID: LIB25-095-Q1-E1-C11
nggaaaatnaagggtgagtttttcacattgatggcaataatgtctctcctcttagccttctcgttagtccatggaggaggagagtctggaacaccttctaatgcagccgctaccccgactagcccaaccgaaggatccagtggttcaagtggttcagctcatggacctaattggggatatagttggggatggggttcagccccg

SEQ ID NO: 11861 - DNA, 193 bp, Arabidopsis thaliana
  Clone ID: LIB25-095-Q1-E1-C2
tcataagaggtgaagaaggctaactaaaccatgagcagtaagaaaacttgtgtttcagtcaaacatcttccgtctgtttctgatctaaaaaacaaaaaaaaagctagaaaagctttgttagggttttaactttattaactctcgtgtttaatataattttacagatttaataaaaaaaaaaaaaaaaaaaaag

SEQ ID NO: 11862 - DNA, 224 bp, Arabidopsis thaliana
  unsure at all n locations
  Clone ID: LIB25-095-Q1-E1-C4
ctttgcatttgcgctcaagagttgtagattttgattttggaaacgttgtttcttactaaacatgtctctcttcttattaaaaaaaaaaaaaaaaaaaaaaaaaaaaaaaaaaaaaaaaaaaaaaaaaaaaaaaaaaaaaaaaaaaaaaaaaaaaaaaaaaaaaaaaaaaaaaaaaaaaaaaaaaaaaaaaaaaaaaaaaaaangggggggcnncccaaangnnt

SEQ ID NO: 11863 - DNA, 211 bp, Arabidopsis thaliana
  Clone ID: LIB25-095-Q1-E1-C6
atgcagaaatcaggaggttctgtctgcgtctgtaaggcttcttccggttgggcgacaaaccacaggattcggagctgcgaagaaagtcttatatagattcgagggacatagattgtcatcatcagtagaaaagggagagaaacagagaatgagatgtagagttagctcaaactctactgaaactgaagacgattctgctacaaaaaccaag

SEQ ID NO: 11864 - DNA, 221 bp, Arabidopsis thaliana
  unsure at all n locations
  Clone ID: LIB25-095-Q1-E1-C7
gctttcttctactctgtgatcaaactatcgaagaaaaaacanaccctagatttatccgcccctcttcttcctctgatgataagaaagtcnaagactttgngaatctaaagctgaaaaattttgttttttttcattgagggaatcgaatcgagttatgtacaaggatcggagtggaggaggaanaatgggtggtggnggatcatcgagatcgganatccttg

SEQ ID NO: 11865 - DNA, 201 bp, Arabidopsis thaliana
  Clone ID: LIB25-095-Q1-E1-D11
attacagacagagaagagagagatcactatggctgtcggagatgatgatctggagaacagaatgtcggcgaaagatcgaggaatcggaagcagaggcggtgatcggaatcgaatcggaccaccgcctctgccggtagccttgtcgtcgtctactgaatttggcgataacgcgttgtcgtcgcggtggacgtcgtggcttgt

SEQ ID NO: 11866 - DNA, 204 bp, Arabidopsis thaliana
  Clone ID: LIB25-095-Q1-E1-D6
aaaaacaaaaaaaaaacaaaaaaaagaaaaagaaaaaagaatctataaatatactgttcaattttttttattttttttttattaatatcccaacggtcgtggggaagaaaatattctgattttgtaatgtcacgtttggtgtatgtaatatttttgcttgtagtggtagaaggtagcaggaacactttagaacgaaatactgaa

SEQ ID NO: 11867 - DNA, 163 bp, Arabidopsis thaliana
  unsure at all n locations
  Clone ID: LIB25-095-Q1-E1-D7
tcctgntcactttccatnctttcgctctgtaaaattcngagcccgtttagtctctcctctgtntttcgccggnaatcangttcatgtcacttccggtagtcttccaatcggaaaaggaagtttattgaacctcaagagtgaaagacctcagagatttgttatc

SEQ ID NO: 11868 - DNA, 214 bp, Arabidopsis thaliana
  Clone ID: LIB25-095-Q1-E1-D8
caagaactgagactcgagagaagcctactatatcgacggttttggttccggctagactggctcaggtcctgaatctgaatttaggcgaaccggtccggtctacggctactctcaacgatgtgtcgtggagacagaggagcaacaatggtgggttctcgagccagatggtcggtggcgtgagggcggagcagtcagtgcaagagcctcggttacc

SEQ ID NO: 11869 - DNA, 201 bp, Arabidopsis thaliana
  Clone ID: LIB25-095-Q1-E1-D9
ataaatagatagtcataactagtgtattacaaaaaaaaaataaagtaaataaaagtaatcactagctagtgactaaactaaatcccaattatgggtcgtgtacattttggtgtatcagcattctttgttttttgtttgttaggtttatcagctaatgcaaagatcttcaatattaattctcctccaggttctgatatcact

SEQ ID NO: 11870 - DNA, 217 bp, Arabidopsis thaliana
  Clone ID: LIB25-095-Q1-E1-E1
attggcctctactgagagtgatgaaaggaatatttgaaggaggacttgagagtgcaaacagaggggctgttgatgaagaagaagaagatgttgaaggcgactggggtgagggacttgacaaattcgatgttgatggaatggagaacacagacatcgaagccatattggatggtgcagaagcaggtgaagaagaagacgacgaggaaggtggatgggg

SEQ ID NO: 11871 - DNA, 54 bp, Arabidopsis thaliana
  unsure at all n locations
  Clone ID: LIB25-095-Q1-E1-A9
tttccttctcactgangttcttcttcttctttgcaggatcantcggagagttca

SEQ ID NO: 11872 - DNA, 201 bp, Arabidopsis thaliana
  unsure at all n locations
  Clone ID: LIB25-095-Q1-E1-E10
cgctatttttatttttaattgatactttttttttactatcattcccagatnaaggtttgtntcgcgatngaattcatgcttctctgatctgagatcagttagagacgactgcgtnttcctcctcgaatttgatcatcggacattctctttttgtttcctgggtttatagtgccgcacgtcaatggcgtgaaccgcggtcac

SEQ ID NO: 11873 - DNA, 96 bp, Arabidopsis thaliana
  unsure at all n locations
  Clone ID: LIB25-095-Q1-E1-E12
ttttttttttttctcccaaatcgcaacccctttttcnctctctttctcancctctctttcgcaactcgcngttgttgatgttgttgtngttaggaa

SEQ ID NO: 11874 - DNA, 203 bp, Arabidopsis thaliana
  Clone ID: LIB25-095-Q1-E1-E2
ttttcttctttccttttttctctctctcaacgaccaccaccatgcccggagttgccttctcctgtgttcctgcctccgatctgggaatcttcatctccgaatccaccaccttctcacgctccatctccgcctccctctcatcttcctccagttcaccctcctcctttcgctgttgcaccccattgaacctcaaatcgctgcgt

SEQ ID NO: 11875 - DNA, 192 bp, Arabidopsis thaliana
  Clone ID: LIB25-095-Q1-E1-E4
attagaccaaagtccagacaatggaactcaattgtgttcaatttcttcgaaacaagacgattcttgtcaccggagctaccggtttccttgcgaaggtttttgtggagaaaattctgagagtgcaaccaaatgtgaagaagctgtaccttttggtgagagcatctgacaatgaagctgccactaaacgcttac

SEQ ID NO: 11876 - DNA, 210 bp, Arabidopsis thaliana
  Clone ID: LIB25-095-Q1-E1-E8
tcctaagagtagccgaggcatacagttttctttctccattggagatcatattatcatagagggaaacaaaaggacgcctccaaggtttgtcggacgcatagctgttataatgacacaatgcttaaatggatggtacgttgtgaagacagtggacaattcagagtctatcaagttacaacattgctcacttgccaagatttcagacaattc

SEQ ID NO: 11877 - DNA, 207 bp, Arabidopsis thaliana
  unsure at all n locations
  Clone ID: LIB25-095-Q1-E1-F10
naaaataaaataaaaagaaaaaaaaacaaaaaaaaaaaacaaaaaaagaaaaagaaaaaagaatctataaatatactgttcaattttttttattttttttttattaatatcccaacggtcgtggggaagaaaatattctgattttgtaatgtcacgtttggtgtatgtaatatttttgcttgtagtggtagaaggtagcaggaacac

SEQ ID NO: 11878 - DNA, 187 bp, Arabidopsis thaliana
  Clone ID: LIB25-095-Q1-E1-F6
gattgcgaagaaagattgggagaagctgcatctgcacattgcttctcataacaacttccctactgctgctggcttagcatcttctgctgctggttttgcttgcttagtttttgctcttgccaagttgatgaatgtaaatgaagatccaagccaactttctgctatagcaaggcaaggttcaggaagt

SEQ ID NO: 11879 - DNA, 180 bp, Arabidopsis thaliana
  Clone ID: LIB25-095-Q1-E1-F9
ccttatcattatcactacactctccttctcttcaattaacataaccttcgccgtcgatgaagctttcccttcaattcccactaccttcagcgtcgcaacgaaacaacactacgacgtaaaaccaatccaccatgaagtttatgacggagaaaggaagatatacgacatcagccaccagta

SEQ ID NO: 11880 - DNA, 224 bp, Arabidopsis thaliana
  Clone ID: LIB25-095-Q1-E1-G1
gattttagttttatattaccaaaagaaaaaaaccttatcccttctctctctctttcttctttcctctattgtctgccatggcgatttctactattctctgagtctgtgatcttaaagatttgatgagacagaaacccagaaactgaaaaacaaaaacccaactcgtgatatttcgttccgaccaaatctgtctgatttgtgatctgaacaaagtacggtaatgg

SEQ ID NO: 11881 - DNA, 185 bp, Arabidopsis thaliana
  Clone ID: LIB25-095-Q1-E1-G10
ttagaagaggtgttgagattgtaattgctacacctggtcgtttgattgatatgttggaatgtcaacacactaatttgaagagagtgacttaccttgtactggatgaggctgacagaatgttagacatgggatttgaaccccaaattagaaagattgtatctcagatccgacctgatagacaaaca

SEQ ID NO: 11882 - DNA, 135 bp, Arabidopsis thaliana
  unsure at all n locations
  Clone ID: LIB25-095-Q1-E1-G11
ttggttcatataaatttggagatganaattcctaggtgaatattgagaacaacanagaagaaattactcacaacaaggtacttgtcaccatactcacattatgattcaataaaaataanggttgagtctaaaaaa

SEQ ID NO: 11883 - DNA, 213 bp, Arabidopsis thaliana
  Clone ID: LIB25-095-Q1-E1-G2
aagaaagagataagctttcacatcaatttttgaaggcgcgaaatggggaatacttcatcgatgctgactcagtacgacatcgaagaagttcagagtcattgtcatgatctatttgagcagcaggagattttatctctgtatcaacggttttgccagttagatcgaaacgcaaaaggatttatatctgctgatgagtttctctctgtgcctgag

SEQ ID NO: 11884 - DNA, 218 bp, Arabidopsis thaliana
  Clone ID: LIB25-095-Q1-E1-G4
tcatcatcatctgagatcaaagggacagagaacgtgtctgggccacctactaggatggataacagttctgatgaagagtcagagatcagtgagtctgagatagatgtctattatgaaaaaccttacgagaaactgatgaatggggattacaaggttaaggtgaaggacacattcaggtgtcccttttgcgctgggaagaagaagcagcattacaagta

SEQ ID NO: 11885 - DNA, 62 bp, Arabidopsis thaliana
  unsure at all n locations
  Clone ID: LIB25-095-Q1-E1-G5
cacttncaatggctttgantatcacctgcgccgctctacccatatccgagcatcttccggat

SEQ ID NO: 11886 - DNA, 213 bp, Arabidopsis thaliana
  Clone ID: LIB25-095-Q1-E1-G6
aaagtgagtatctctctctgctctcatgtcgattctggtttatgtagcaaaatcagtagattgggacccatgacatgattgtcttgccaacagttgggatgaatgggttagtgcggatagattgttgaaacataccgaggagaatcttgtcaaacagaaagctctagacaaaaagcaaggagttgaaaaaggtaccaagtctggccgttccgc

SEQ ID NO: 11887 - DNA, 200 bp, Arabidopsis thaliana
  Clone ID: LIB25-094-Q1-E1-E1
aggattaacgtagcttctctcaacaaagcttcgaaattgatccgtaattagtgttcaatttcgtgttttttcctacattggattctcacttttagattttgtggggagggaaagataaaaggttggatttttatttttccggtgaggaaaaaatgacgacgagaggaagcagatcggagaaagtcaagagaattttccag

SEQ ID NO: 11888 - DNA, 196 bp, Arabidopsis thaliana
  Clone ID: LIB25-094-Q1-E1-E10
tttgcttatttgggttctgggttttgattatttctacaaagtaaccacatttttcactttccggagatggagctgcaaacgatgaagataacgaaagattgtgtagttgaagtcagttctgaagaggaagggttcgaaggagcttggttcagagctgttttagaggaaaacccagggaactcatctcgcagaaagc

SEQ ID NO: 11889 - DNA, 187 bp, Arabidopsis thaliana
  Clone ID: LIB25-094-Q1-E1-E3
gtgatagttaaggatcttgtaaagcagaggattgcaaccattgggagaaaacatcaaagtgaagagatttgtgaggtacactctcggagaaggccttgagaagaaaagccaggactttgctgctgaggttgctgcccaaactgcagctaaaccgaaagctaaagaagagccaaaagctgaagaggct

SEQ ID NO: 11890 - DNA, 196 bp, Arabidopsis thaliana
  Clone ID: LIB25-094-Q1-E1-E5
gaaatttcaaaaacttttgaatgttttcatttggaatctgaggttgtctgctcgagaattttggtgggtttgtgctgaaatctggaataggattagggttttttcgtgaatttgaaaatggcggagcagaagagtaccaatatgtggaactgggaggtgactgggttcgaatcgaagaagtcgccttctagtgagg

SEQ ID NO: 11891 - DNA, 198 bp, Arabidopsis thaliana
  Clone ID: LIB25-094-Q1-E1-E7
gctttaatctaataaagcctctccctctccgattaaccttaataaatccggagggatcggagagaaaaaagaaccaaaaaaaaaaaaaaaacagaaaaaaaaaaatgattggaaaagttgtggtctcggtggcctccatcctcttaatagtcggagttgccataggagtcgttgccttcataaacaaaaatggcgatg

SEQ ID NO: 11892 - DNA, 196 bp, Arabidopsis thaliana
  Clone ID: LIB25-094-Q1-E1-F10
ccttctggttaactgaaaatggagtgtagttcagtgagtgtactaggaatattactggtatttcctctccttcataaccttgtcaccatctccgggcagaatcttccggcggtgggtttgttcactttcggagattccaacttcgacgctggaaataaaaagttcctcacaagtgctccacttcctcaaaactttt

SEQ ID NO: 11893 - DNA, 185 bp, Arabidopsis thaliana
  Clone ID: LIB25-094-Q1-E1-F12
aggttctattgaaccagaaagagataagtggagaagcaatagacttcatacttgaccattaccctcctcagactccgttaaattctctcttacaagagcaaaatccgggaagtcttccttttgtccctgaacatctccggcgtgaatccggcgactttgtccttgttaatcactctaccgacgtc

SEQ ID NO: 11894 - DNA, 195 bp, Arabidopsis thaliana
  Clone ID: LIB25-094-Q1-E1-F6
ggggtaaggcgcatccaaggacccttaaaggcaagaaaattgccattacagggaagaagaaagtttccaagtaatcactttcttgttctttaatactctttttagtttgtctagtctctctgtttatattgtgaatttttatcttcgtacaacatctgtattatcatcagacacattgatatgcaaactggtttg

SEQ ID NO: 11895 - DNA, 196 bp, Arabidopsis thaliana
  Clone ID: LIB25-094-Q1-E1-F7
ggagatattctctgtcttgcttcttctttacccttttcttgtttccaatcaaatcctctaaagtttcgttctttgttctaagttttctgaaggagtgatatttgtttgtggtgtggttagagaaatgaatcggagacagcaagtgaaacgtagagtaggtaaatatgaagttggaagaacaattggagaaggaacg

SEQ ID NO: 11896 - DNA, 206 bp, Arabidopsis thaliana
  Clone ID: LIB25-094-Q1-E1-F8
ttggaaaagaaagcaaatgcagaaaaagtcctggcggatctggagaatagagagagtcctcaactttctgatattgacaaggagggtattactaatgatgaaaagtacatgctccggaaaattggcttgaaaatgaagcctttccttttactaggtagaagaggcgtctttgatggaacaatagagaacatgcatcttcactggaa

SEQ ID NO: 11897 - DNA, 200 bp, Arabidopsis thaliana
  Clone ID: LIB25-094-Q1-E1-F9
ggaaatgcgcaatcgcaaagaggtactccagcttttgtaagacatccatcaccaactgtgcagccaattcctcagtttatggcagctcagccttttcccagtcatatacccttccctactgaattggcacagtcgtcgtattatccccgtatgccttacatgacacctattccgcatggtccgcagttcttctaccatta

SEQ ID NO: 11898 - DNA, 199 bp, Arabidopsis thaliana
  unsure at all n locations
  Clone ID: LIB25-094-Q1-E1-G10
gaaccaataaaaaatgctactaatcccaatttcttcttcttcgtcttcgtcnatccctcctcctaattcatatccatcgaatcatcactctctgtttttctccaatctcacattcccaattcaacatggaagtagaaagttgaagactttgcgactcagagccaatttctgggagtcaatccgatcngggtttgtgaaa

SEQ ID NO: 11899 - DNA, 196 bp, Arabidopsis thaliana
  Clone ID: LIB25-094-Q1-E1-G11
ttaagagagcaaaatgagcataaataggaatctgttgaatatcataataatcctttgtatatgtctcaatttgggttgtaacgatggagctcaagaaagagagactgattctcatactatccaagtcagctctctcctcccttcatcatcatcatcttgtgttctttctcccagagcgtctactacaaagtcttcc

SEQ ID NO: 11900 - DNA, 200 bp, Arabidopsis thaliana
  unsure at all n locations
  Clone ID: LIB25-094-Q1-E1-G12
gnatttgncngacncgcttnatgttttcacagcggaacagatccctctaaatatctgttacttttgttcatatctttttacttttcaaactactaattttcctttcgcttcttctattaataacaacactctctctcncagacttcttttcttttttttctacggcgttgattcattcncaatgacctcagtttctgtgt

SEQ ID NO: 11901 - DNA, 178 bp, Arabidopsis thaliana
  Clone ID: LIB25-094-Q1-E1-G5
ttctctttcaagttttcgatcacgatctctggaaaattaagagagaaattcaaaaacttcgggagttcaaagtctcattcagacattccagaaggtattctagtcgactgagtaaacaatcatgagaatcagaaaaggaagtagagttgaggtatttagcaacaaagaggcgccttat

SEQ ID NO: 11902 - DNA, 188 bp, Arabidopsis thaliana
  Clone ID: LIB25-094-Q1-E1-G6
gtggccaagcaaggcttaggctatagcacgacgactcaaccagctaattaacaagttttaaactttttctccggagctctgactcttcttctctccggatccaaaaatgaatcgtctcttttctctcttctccatagctctgatcgctttcctctgcctccaccatcatgttctcgcttcttcctctt

SEQ ID NO: 11903 - DNA, 191 bp, Arabidopsis thaliana
  Clone ID: LIB25-094-Q1-E1-G7
tggagatggttcgatgagacctgaaggcgaaacaagttcgggtggtggtggaagcaaagcaacggaacagaagaacaaacctgagccaccaaaggattatattcatgtgagagcaagaagaggacaagctactgaccggcatagtttagcagagcgagctagaagagaaaagatcagtgagaagatgacag

SEQ ID NO: 11904 - DNA, 185 bp, Arabidopsis thaliana
  Clone ID: LIB25-094-Q1-E1-D6
accacttctcaatgtcgtcttccaccaccacaacaaccaccgtccacggcgagcctgaacgacgaacttactggtgtcatgaatgcgatatgagtttatccctcctctcctcctccgattccgattccgattcctctcctctgttatgtccccaatgccgtgtcgatttcctcgaacgtatggat

SEQ ID NO: 11905 - DNA, 181 bp, Arabidopsis thaliana
  Clone ID: LIB25-094-Q1-E1-G8
cgacaacgacgaagacgatggtggtgccgtatcctgcaacaagtgtcgacctcaccactctcaccgtgacaaattctccgtcgtacctctcgaaagccacaacaacccttctttcatctctagccccaatctcataatcaaatccatcttccaatctctcacacggagaagccccaaacct

SEQ ID NO: 11906 - DNA, 202 bp, Arabidopsis thaliana
  Clone ID: LIB25-094-Q1-E1-H1
gcctacacggaattttagggagcgggaaaaactggggcacttttgctcgtagattggctcatgaattcccaacgtggcagtttctattggtagacctgcgttgccatggggattcaacatctctcaagaagagaggtccacactcggttgctactactgcttctgatgttctaaaacttgttggtcagttgaggttaacacc

SEQ ID NO: 11907 - DNA, 197 bp, Arabidopsis thaliana
  Clone ID: LIB25-094-Q1-E1-H10
aaatgtcttcgataatccatggagctggagctgctacgacgacgttatcgacgtttaattccgtcgattccaagaaactcttcgttgctccttctcgcacaaatctttcagtgaggagccagagatatatagtggctggatctgatgcgagtaagaagagctttggttctggacttagagttcgtcactctcagaat

SEQ ID NO: 11908 - DNA, 185 bp, Arabidopsis thaliana
  Clone ID: LIB25-094-Q1-E1-H11
agtgcgaatgaaccagctatgaaaagcttgaaatccaatccttcaggaccgataccgaactttttcgtatcgctctcttcggcatttacgcaaacacctcttgtgcgttcgaacaaacccaatttgcttcttctaccaccagttgcagactccgtcaaattgattcaagactttcatcagtctcg

SEQ ID NO: 11909 - DNA, 196 bp, Arabidopsis thaliana
  Clone ID: LIB25-094-Q1-E1-H2
caagttcttctctccctcctctttgcgagaagatctcatacaaaaactattttctaagagttgtggatctcacgattctaggctttctcttttctcttctcttgtaccgaattctacttatgaaccaaaacaactccgtttgggttgtggctttcctctgtgaatcctttttctctttcatatggcttcttattac

SEQ ID NO: 11910 - DNA, 197 bp, Arabidopsis thaliana
  Clone ID: LIB25-094-Q1-E1-H3
ttttagattttgagctctggaatggagaaaagtatcaatggatcatgcagactcatcaagagactcgtgattatactttcttgtctttcatattcctttgttcgatcagactttacagagagaacaaatatcaattatgtatcagctgtgggagatcccgggatgagaaacgataacttaagggtggctatagaagc

SEQ ID NO: 11911 - DNA, 191 bp, Arabidopsis thaliana
  Clone ID: LIB25-094-Q1-E1-H4
agattatttaaaaaaacgatgtctcaactgaaaattggatcttcacaatgcttatggacaagtatttgcattgtgttatttgtattgtcgatggctcgtggagctgtctctagaaattatggagacgctctcacaaagagtcttttgtatttcgaagctcaacgttctggaaaattgccttcgaaccaaag

SEQ ID NO: 11912 - DNA, 195 bp, Arabidopsis thaliana
  Clone ID: LIB25-094-Q1-E1-H9
tcttcttgatccctaagcaagtctcttcgttaacttttgtctttctccttaaaatggctacagaggagatagacatgagttattgggacgtgtcatggggagaattcaatgaagacaagaactcgtctatcttctgcgagtcacaccctcacatagtaaattcgcacgggatatgggaggttatgactttcaaga

SEQ ID NO: 11913 - DNA, 204 bp, Arabidopsis thaliana
  Clone ID: LIB25-095-Q1-E1-A10
gaccttcttccttcacagtgaatcaatggcgtcttcttctctatcaactctttgcagctcaacttcttcttctctacatcccaactccaaactctcacattctctttcagctaaattatcctccaaagcaaatgtttccgtccaatttctgggaaagaaacagtctccgcttctctcctcaactccgagatttctcactgttat

SEQ ID NO: 11914 - DNA, 200 bp, Arabidopsis thaliana
  Clone ID: LIB25-095-Q1-E1-A12
tcctctcggtctcggtggtgaagacaatggggtcagacgaggaagatttcgtgtttcatggaacgccaatagagcgcgaagaagaaatcgcaagccggaagaagaaagcagtcgctggggcttctggcaatcttagaactctccctgcttggaagcaagaggtgactgatgaagaaggccgtagaaggttccatggagca

SEQ ID NO: 11915 - DNA, 207 bp, Arabidopsis thaliana
  Clone ID: LIB25-095-Q1-E1-A2
tcatggtgaccaaccaagaccagatgtcagtttctactcaatgaagaccgcacaaaacactggaagggtttcaaagctcgcaactttgaaggccaaacaagctaatgccctcttctggtcgcccacaggcaagtacataattcttgctgggttaaaaggtttcaatggccagcttgaatttttcaacgtggatgagctcgagacaat

SEQ ID NO: 11916 - DNA, 218 bp, Arabidopsis thaliana
  unsure at all n locations
  Clone ID: LIB25-095-Q1-E1-A3
atagggacctgttctancctcaaaagtggcttatgttgtgaaagaactctangncatgggctgctttganatttctctgggtgatacaattggtatcggcactcctggntctgtggttccaatgcttgaagccgtgatggcaattgtgccagcggacaagctggntgttcacntccatgatacctatgggcaagctcttgcaaacatattggtgtctc

SEQ ID NO: 11917 - DNA, 218 bp, Arabidopsis thaliana
  Clone ID: LIB25-095-Q1-E1-A5
agttgagattttgatcgtcttcttcctctggaaatttcaatcgaaactatatcttcagagatgcagaatctgtgaaattgtagaaacgaatttcacatttttttttgaagaaatgacgacgcagatatttcagttgccgttaaagtactgtgcttcgagtttttcttccaccggccaacggaattacggtgcttcttcttcgccgtctccgattgtaa

SEQ ID NO: 11918 - DNA, 91 bp, Arabidopsis thaliana
  unsure at all n locations
  Clone ID: LIB25-095-Q1-E1-A7
aaaaaaaaaaaaaaaaaaaaaaaaaaaaaaaaaaaaaaaaaaaaaaaaaaaaaaaaaaaaaaagggggggcnncccaaanggttcaanctt

SEQ ID NO: 11919 - DNA, 187 bp, Arabidopsis thaliana
  Clone ID: LIB25-095-Q1-E1-A8
ccaagtggaagaagaagcgtatgaggaggcttaagaggaagagacgaaagatgagacagcgttctaagtaaatttgcctttgaagacaatgcgactctgtttcttgcttctctccctttctctcttgcaaacattgttcttactataagcttccttttatgtttcagacttgtttaagattttaatc

SEQ ID NO: 11920 - DNA, 74 bp, Arabidopsis thaliana
  unsure at all n locations
  Clone ID: LIB25-093-Q1-E1-G11
natacacgattcatcatgnaatcaatcaggtgtatcacgctacncatgggtagatcaagaaggacgaccgagac

SEQ ID NO: 11921 - DNA, 252 bp, Arabidopsis thaliana
  unsure at all n locations
  Clone ID: LIB25-093-Q1-E1-G2
tgttgcccgccaggtaaaggtaaggaattcccgngtcgacccangcgnccggctaaggcttctctcaggctccgtgctacatgcgagaaactgaaaaaggttctaagcgctaatcctctggcaccgttgaatatcgagtgtttgatggatgagaaagatgttaggggtgtcatcaagagggaagagtttgaagagatcagcatcccgattttggagcgtgtaaagaggcctctagagaaagctctctctgat

SEQ ID NO: 11922 - DNA, 199 bp, Arabidopsis thaliana
  Clone ID: LIB25-093-Q1-E1-G5
gaaaaaaaagggggaacaagggagtttcatgttaaaaagaaatgaagctctcttgtttggtttttctcatagtatcgtctcttgtttcgagttctcttgccaccgctccgcccaacacatctatatatgaaagctttctccaatgtttcagcaatcaaacaggtgctcctcctgagaagttatgcgacgtcgttctgcc

SEQ ID NO: 11923 - DNA, 195 bp, Arabidopsis thaliana
  unsure at all n locations
  Clone ID: LIB25-093-Q1-E1-G6
caattagcttctttctgtaaaacctcactcgttggccaattcttttggttttcatacacataaatctcagattccaaatgggttttcttagctctttctttcaaatgangaacatttgttagcagaatcttcctctttccctaaagttttgatctttttttcccccttcaattttgtattttctcaccaaataac

SEQ ID NO: 11924 - DNA, 51 bp, Arabidopsis thaliana
  unsure at all n locations
  Clone ID: LIB25-093-Q1-E1-H11
gatttttccgggaaagtctccgttttgtttcacctaancancccaatggac

SEQ ID NO: 11925 - DNA, 204 bp, Arabidopsis thaliana
  Clone ID: LIB25-093-Q1-E1-H2
cggaaaaaaggaaacgacgaggaaaaacaaaaacaaaataaaaacaagcctcgttcttcccttttctctcttcaaatcttttcttttacatattttcttttcttttttttgtctttaatacaaatttactaactaatcagaataaaaatgggttcgagtaagtttaaacgagccataggagccgtaaaggaccaaaccagcgtc

SEQ ID NO: 11926 - DNA, 178 bp, Arabidopsis thaliana
  Clone ID: LIB25-093-Q1-E1-H6
cggaggagaacggtggcttctcaaaccagttggcgatggagacacaagacacattggttacaaagtggcaatgcctgctccttttgagatctcctctggccaagttaccatcggacggctaccggaaaaggctgacgtcgtgattcctgttgccaccgtgtcaggagtccatgcgaca

SEQ ID NO: 11927 - DNA, 198 bp, Arabidopsis thaliana
  Clone ID: LIB25-093-Q1-E1-H7
gcgctgacagtgcttgctcacacactaatcgcaattgttgctgcattgccgactctgattcgttcgatttcagcattttgttcttccgaagcgatgcctcgtcgatccggagattgcatgagatgtctggtgattttcgcggttgtatcagctttagttgtgtgtggacctgctctttattggaaattcaacaagggt

SEQ ID NO: 11928 - DNA, 115 bp, Arabidopsis thaliana
  Clone ID: LIB25-093-Q1-E1-H9
gggcaatgacgcagctaatgaggtactaaccgaggcgcgtctattgctggttgaaaactatttccaaaccccctcctgggcctaagcttgtaaaaaaaaaaaaaaaaaaaaaaag

SEQ ID NO: 11929 - DNA, 202 bp, Arabidopsis thaliana
  Clone ID: LIB25-094-Q1-E1-A1
agactcagcctttaagtatccccagaagtcgtatgaccttacgtagcttaatccttgagatgcgttcgagaccgcatcgtgtggtccacgaccttgccgccgccgcagctgccgattccacttctgtgtcatcgcaagattatcgctggtcagagattcctgaagagcttcttagggagattctgattcgtgttgaagcggc

SEQ ID NO: 11930 - DNA, 199 bp, Arabidopsis thaliana
  Clone ID: LIB25-094-Q1-E1-A11
gcttaagcataggtatggatgctcaagttgcatatggcttccaccatcttcgcaacactaaaccatatcttgctcaaggccctatttcaaataagattatatattcaagttttggttgcagtcagggttggttttgcacgccttgtgtcaacgatccaggtttaaggggacttaggaacataatgaaaattcacatcaa

SEQ ID NO: 11931 - DNA, 179 bp, Arabidopsis thaliana
  Clone ID: LIB25-094-Q1-E1-A12
aaaaggcgaaaaatctctcactgcactttatctcgagagctcagatctccgatctagagcctttcgcttctcctcttctgttcatataacaactgaataatgtcgatctccgcccaaaatccggatatttccggcgatagacaatccggccaagatgttcgtactcagaacgtgatggc

SEQ ID NO: 11932 - DNA, 181 bp, Arabidopsis thaliana
  Clone ID: LIB25-094-Q1-E1-A4
aaagattgttagatcaacggcttttagcgatggtctcaccaagaggtacacagagaagacactcaagtgattattctgaagattttctaagatcttgctctctttgtaaacgtcttcttgttcatggccgtgacatctatatgtatagaggagatagagcgttttgtagtttagagtgcag

SEQ ID NO: 11933 - DNA, 199 bp, Arabidopsis thaliana
  Clone ID: LIB25-094-Q1-E1-A5
gctctggcggtggtggtacccgttgggattctggtggtgggtttggtgggcgtggtggtgggtttagtggccgtgagggtgggtttggaggccgtgagggtggatttgggggccgtgagggtggatttggaggccgtgggggaagatttggaatgagagatgactcatttggacgtggcgggaatcgtggtcggggttt

SEQ ID NO: 11934 - DNA, 157 bp, Arabidopsis thaliana
  Clone ID: LIB25-094-Q1-E1-A6
cgtttctctctcgccggaagatttttgctacttcatctccttatcgccccaccaccgtcacatattcactggtttcgcattttctcaagtttctcgttaatttcggttaaagaagatgccagacgttcaatcaacggtggtggaatttgttaacaag

SEQ ID NO: 11935 - DNA, 185 bp, Arabidopsis thaliana
  Clone ID: LIB25-094-Q1-E1-A7
tcaattttgcttcttacttctttccccggctgattagaaacttgaccgcttgattctcttaaaggaggtcttgcgatggattccgctattgatatcagttctgatagtgatgtcgagatacaagaaactagaaccaggcctcaacatcccccacggatagctgaagagatctctctacgctgaga

SEQ ID NO: 11936 - DNA, 170 bp, Arabidopsis thaliana
  unsure at all n locations
  Clone ID: LIB25-094-Q1-E1-B1
agaaactccgttcaaatccggagccaatctctaaaggataaagcttccaactttatccattaagttggngaaaattctcagagagactgaagtcgacaaagtcagagggtttcgttttttggcttctgggttttttatttcaagtgttcaatttccgaattaggtaagaa

SEQ ID NO: 11937 - DNA, 196 bp, Arabidopsis thaliana
  unsure at all n locations
  Clone ID: LIB25-093-Q1-E1-G1
tcaaggataaggattggtactaggagaaaattatcanttcaataaggaggaggaatagagagctaaagaaaaagaaaaaagactacatttctacaaggacgttggttcttttagtcgtcgtcggtcgtcgaanaaagatcttctccttctttcttcgccgtacgatcgtcgtctaatgggagaatcatcaaatcct

SEQ ID NO: 11938 - DNA, 182 bp, Arabidopsis thaliana
  Clone ID: LIB25-094-Q1-E1-B10
ttccttatctgtgtgaatggaagaaggattcatctatctgagtcatgctaatgtgcttctgggttacgattctttcagctgccaatcgtcgtctctctcatcttcctcctatcgcgtgttccagaggtattgatcaggaagatgaagtacagagaaggagagcagagaacttctaccacaca

SEQ ID NO: 11939 - DNA, 192 bp, Arabidopsis thaliana
  Clone ID: LIB25-094-Q1-E1-B11
agcgtgtataaactgtggtgcaatgactcacagttctaaagcatgtatggatagacctcgtaagattggagctaaatacacaaacatgaacattgctgctgatgagaaaatcgagagttttgaacttgactatgatgggaagagggacagatggaacggttatgatacttcaacctaccgtcatgtggtaga

SEQ ID NO: 11940 - DNA, 199 bp, Arabidopsis thaliana
  Clone ID: LIB25-094-Q1-E1-B2
gatttaagtccatcacagcttaaggtattcacaaaacattcaaacagaacctgcaaacacactcttgccaagaatccgggaaacttgaactacccggcgatatcagctttgttcccagagaacacacatgttaaagctatgacacttagaagaacagtgaccaatgttggtcctcacatttcaagctacaaggtttctg

SEQ ID NO: 11941 - DNA, 184 bp, Arabidopsis thaliana
  Clone ID: LIB25-094-Q1-E1-B3
ttcaattttgagtcagattccccccaattgagagattctagggttttaagatgattgaacatgggaactctacctttgattaccggagtattagagaagtcgctgcaaacgccggcgccggagccaccgcaggggctatcgcggcgacttttgtttgtccattagatgtgatcaaaacaaggtt

SEQ ID NO: 11942 - DNA, 197 bp, Arabidopsis thaliana
  Clone ID: LIB25-094-Q1-E1-B5
aaagagagaagaaagtccactaaagaaaagagaatagatatagatcaatggcgtttgaagctcttaccggaatcaatggtgatctaatcaccagatcatggtcagcctcgaagcaagcttacctaaccgagcgctatcacaaggaagaagcaggagcagtcgtaatcttcgctttccaaccatctttctcagagaaa

SEQ ID NO: 11943 - DNA, 184 bp, Arabidopsis thaliana
  Clone ID: LIB25-094-Q1-E1-B6
aaaatattatccaatttgtctccatccttccgttttttttttccattaccgtacgccgaagaatctgccccaagaagtttaaaggtattgatggaacaaccgaggaacaacaagacctctcaagaacaagctcgtgaatcgctcatcgaaatctcctacacttcacccgaggaagacgaggtta

SEQ ID NO: 11944 - DNA, 188 bp, Arabidopsis thaliana
  Clone ID: LIB25-094-Q1-E1-B7
ctagaaacaaatttcccaacttccttcttagagctctcttgtcagtttaagctatcattatgtcaaacgaaccggaatcctccgactcgaaaactaagaaggatttcagtactgcgattctagagaggaagaagtctccaaaccgacttgttgtcgatgaagctattaacgatgacaactctgttgtc

SEQ ID NO: 11945 - DNA, 194 bp, Arabidopsis thaliana
  Clone ID: LIB25-094-Q1-E1-B8
aaaccgatcgagaactgctcgatctgctgtgaagaccgtcagtctgagatgatgctatcattgaaatgcactcacaaattctgttcgcactgcatgaaaacgtacgttgaagggaaagtaaagacttcagaggttcccatcaggtgtcctcaagtgcaatgcaagcattatctctcagcagcggaatgcaaatc

SEQ ID NO: 11946 - DNA, 198 bp, Arabidopsis thaliana
  Clone ID: LIB25-094-Q1-E1-C2
tcaatgacgtcatcatcttcttcatcaaaatccaaattctcaagtccactctcagaaaaaagctgactttctccaccaatcactatgacttcctctcgccgtcttcttcttcctctcggagcatcgctcactagaggaagattttcttccgatcaaatccgaaatggatttctaagaaacttccgtggattcgccacc

SEQ ID NO: 11947 - DNA, 188 bp, Arabidopsis thaliana
  Clone ID: LIB25-094-Q1-E1-C3
agacattgggagagttaatcccaatttccaggttcttcttttctcggcaacttttaacgaaactgtcaaagattttgttgcgcggacagtcaaagatcccaaccaattgtttgtcaaaagagaggatctggctttggactcggtgaagcagtataaagttgtttgcccgaaggagcaaaacaagatcg

SEQ ID NO: 11948 - DNA, 198 bp, Arabidopsis thaliana
  Clone ID: LIB25-094-Q1-E1-C4
ttgtttaattctcttcttaatctcctccttcatctctacttctcttgccgtcgaacctccgcctgaaacaatctaccaaaactttctccaatgtttcacaaaccaaacaaaagctcctcctaactcattagccgacgtcgttttaccaaaaaccgctgccgctttcacccccgtcttacgcgcttacatccgtaacgc

SEQ ID NO: 11949 - DNA, 198 bp, Arabidopsis thaliana
  Clone ID: LIB25-094-Q1-E1-C7
gctgaatcagagaattggtaagtagtaagaaccctagctttagattcgtcagattctgattactcgaatcaaagcagggtttttgacactaaaaatccgatctcgtgaagtgtgttttgcatcgaatcggaaaatatgaaagaagggaaatcatcgaagtcgtcgagtcaacaagagcagcatgaacagatttatcat

SEQ ID NO: 11950 - DNA, 200 bp, Arabidopsis thaliana
  Clone ID: LIB25-094-Q1-E1-C9
gagaaatcgaatcttatcgccgcgttaatatgccaccggccggagaactccgacatcaatctccatcaaaggagaaactatcttccgttacccaatccgatgaagcagaagcagcgtcagcagcgatatctgcggcagctgcagatgcggaagctgccggattatggacacagatcaaggcggaagctcgccgtgatgct

SEQ ID NO: 11951 - DNA, 201 bp, Arabidopsis thaliana
  Clone ID: LIB25-094-Q1-E1-D11
gaagaaagaaagaaagacgagcccttttttctttctaaaaatagaaatatgtctctaaaagccattcatgtctcggaagtgccaagcctcgaccacttccctgagaacccgtcgctcatttgctcctctcgcaaagcgaataacaagtttgtggtggttggccatagaggacacggcatgaacatgtcgcagtcgccggag

SEQ ID NO: 11952 - DNA, 197 bp, Arabidopsis thaliana
  Clone ID: LIB25-094-Q1-E1-D4
tgatttaaattccggggaggaattagggtttatgaaagtaaaagaagaaactttgaagaatttgggagatggagtggttttaagacctgttgatcattgttctagcatttggagtatgaagatgaacatgaagaactttcttaagaaacttcatatctcgcccaatcaatcagatgaagctgaaggatcaatttcat

SEQ ID NO: 11953 - DNA, 196 bp, Arabidopsis thaliana
  Clone ID: LIB25-094-Q1-E1-D5
gcggacgcgtgggagattatatagtgagcgattgttagaagccattaattacttgagtcggaaggtttatttgtttgttatttgtctctcggactggttgattgggttaaacttgtcaatgagtaaccctttgaatctgtcgttttgtttggtcggtcgaattatatagaaatgtattattggttataaaatggta

SEQ ID NO: 11954 - DNA, 365 bp, Arabidopsis thaliana
  unsure at all n locations
  Clone ID: LIB25-091-Q1-E1-D11
ggttttgttttcctttaaccatcncccanaatactcttccctttaacgtgggtccttcaatctttttgaangaccccgccattgtcaatcanctttcaaagggatcgttattctttttggttttaggctatttagattattgaattgattttgaatgataancatgatgaattgtnttccgtgtttcacttcacaaangagcagaaacgctccatgcacgacgaacgagactaacgatgataacgttgancacgangaattcanaccacctgttgttgcgacgacgaaacggactgaagaaagagaacctgcagagcancaaccaccggtgannacattcaatttccgggagttagcgacggnna

SEQ ID NO: 11955 - DNA, 394 bp, Arabidopsis thaliana
  unsure at all n locations
  Clone ID: LIB25-091-Q1-E1-D12
caaaaccgctccaaatgtcctgcgcctacctcgcctgggtccttgatcatgtttctgcagctgtgaataggcagagagggtagaagaaccgtggcgggatctttaccgctggatttggtcaatgacatccaatacttcatgaaatgactgaaggtgactccatctgctacaacatgtgtagctgagttgcctatacagattccagctccagggaagatggtgacttgcatagccattattggtcgcatctgaattccttccggagagacgtgaggaggaggtaacttgggcaagacgccatgcaacacactgatatctttaggggaatcagacttcagttggtcnaagtcggtttcagtanactctgctacggtgaaaacaaganagtcttggc

SEQ ID NO: 11956 - DNA, 431 bp, Arabidopsis thaliana
  unsure at all n locations
  Clone ID: LIB25-091-Q1-E1-D2
nnngnaactgtttactttgcccgggcccggtccaaaaataaacgggtccacncacgcgtccgaaaaaaaacaaanaantaataaaacaaaaaaatatcttttttttttctaataaanaagaaataataaataaatatgagatacacaaatgtgtccattttattaggcatgttggtgatctttgtttcaccaatggtgttcgcagatgatttgacaccaatcccagaagggcaaaccccaaagtggtgcagtgggtcaataccacgtttgggtccaatnggctcaaacgttaaagggctnagattcctggccctccgnagcttcctngaagggctngctccaacgttatccatcaaacggttgaatccaaaaagggaagggtaaatnnaaacaacnacnagaanccattaaaaaccttccccgcagggaac

SEQ ID NO: 11957 - DNA, 270 bp, Arabidopsis thaliana
  unsure at all n locations
  Clone ID: LIB25-091-Q1-E1-D6
gatttttcaggccaatttttttcagtgtcttcactgttttatattgacaagtgtgaaaatataataaagtttccttggtaatcagaaatccgttagactaatcaaaaagacctcgtgtcgaatatcatcataaattaataaaataatattctgctggagctggtcatttttttttttttttttaattaggaaatatctagatttttatatngaccaattagncaattacggattnacccaaattctnattttnanananaccnaagaana

SEQ ID NO: 11958 - DNA, 145 bp, Arabidopsis thaliana
  unsure at all n locations
  Clone ID: LIB25-091-Q1-E1-D7
aacatnnagccaaaanagaacttatgtcagcctaagactggggaatttaccaangctgctcaaggataagggtctacggcaggtttaagctggcganatttgcctatcaatctcatcataaagganaacttctttggcttccctg

SEQ ID NO: 11959 - DNA, 419 bp, Arabidopsis thaliana
  unsure at all n locations
  Clone ID: LIB25-091-Q1-E1-D8
ggacagtgctaataaacctgatgcttgggcgtttgaggaaggtcctcattctgattttgctggacctaattctgggagcacggcatgcgtagctgttgttagagacaagcagctatttgttgcaaatgcaggtgactcacgttgtgtgatatccagaaagaatcaggcttataatctttctagaagatnacaaaccaagatcttgaagctgaagaaagaaaggatattgaaagctggtggctttatacatgcaaggccaatcaatggaagcttaaatctatcacgaagctatcggtnacatggaattcaagcaaaataagtttttgccaacctgaaaaacaaataatttacgccantccaanatgttaacactngttgaaccccgtgaataatgaatnatttccctggtccttgcccng

SEQ ID NO: 11960 - DNA, 484 bp, Arabidopsis thaliana
  unsure at all n locations
  Clone ID: LIB25-091-Q1-E1-E1
tgttacttttgcngggcccggtccgaaaataaacgggtcgagccncgcgtccgcatacnctctttttttctcggacaagaaggctacagaaagatatgtcgctgtcgtcttacctcagcccgacgcgccttctagaaggctacctccgccgttgtctcagggcggcaggactgacgtcgcagacgctttccatagactctgaaacaaccatccacttctggggcccaccacctctagaccaccggagcgacgatgacagaccggttatgcttctcctccacggcttcggtccgtcgtccatgtggcagtggcggcgacagatgcaagccttctctccctccgctttcagggtttattctcccgatcttgtcttcttcggcgactctacctcttcctccaccaatcgcaccgaagtcttccaggttttataaacctatgtctctatctctctatttattatangtaangtttgattccacaantt

SEQ ID NO: 11961 - DNA, 415 bp, Arabidopsis thaliana
  Clone ID: LIB25-091-Q1-E1-E10
ctttctgaagcagatcagaaagcgttgggtctaattgtgaaggctgcaaaaattatggacgatatattctatgagcaggtttggaacagcaatccagccctaagagattggctgaaggatcatgccaatgcatcaaaactggacaaactaaaatgggattacttcacgatcaacaaaagtccatggtcgtctcttgatgaaaatgaagcattcttgagtactgcggattcagctgtaaagttgcttcctggagcaacaaaagccatagctggctggaagggtcttgaatatagagcagcctttccagtgactaaaccacctggtgccaatttctatcctcccgatatggataaaatggagttcaccttatggctcaatggccttacggaagagcaaaagcatgctgcaacaagat

SEQ ID NO: 11962 - DNA, 288 bp, Arabidopsis thaliana
  unsure at all n locations
  Clone ID: LIB25-091-Q1-E1-E2
cctcttcgatctctcctgaatcctcanaccctggagagagagagagagagtgacgggggaagaagatgacttctgctttgtangcttccgatttgtttaagcagntcaagtcaattatggggacagattcgttatccgacgatgttgtacttgtgattgcaacgacgtctttggnactagtagctggatttgtggtgttgttatgggaagaaaaacnanggcngattcgggaccggggaagctgaaccctttgatgatcccnaattccctnanggctanggacaacgg

SEQ ID NO: 11963 - DNA, 429 bp, Arabidopsis thaliana
  unsure at all n locations
  Clone ID: LIB25-091-Q1-E1-E3
tgagagtaattcactacacacacacaaaaaataaattgagtgcctcccccaaaaacaaaattggtagataacgagcaattgttttttttcagatttgatcctgaatttttacattttttttttttgcaatctccccctaatctgttgtttctcgcttcttcttctgttaatcatctgtctttcaaaaagaaagaaaaaagaaaaattcgatttctgggtttgtttttgtcatacagaaaaaaatcaagcttatgaatttgtgtttaattttttgttttaatttgaaaggcaggttttttcagaacgagatcgttttttcaaatttcttccgattttacctctttttttcttcttagattttagtgaatcgaggggtgaaatttttgattccctcttttcggatctacacagangttgcttaattcaaaa

SEQ ID NO: 11964 - DNA, 461 bp, Arabidopsis thaliana
  unsure at all n locations
  Clone ID: LIB25-091-Q1-E1-E4
tgcttctcctttccctttttcaaaatctctctctctctctctctttttagatccagttttagggttttcttctctgtgagcgaagatgcgtgagattcttcatattcaaggaggtcaatgcggaaaccaaatcggttccaagttttgggaagtggttaatctcgagcacgggattgatcagacgggacggtatgtaggagattccgagttacagcttgagaaggggtaatgtatactacaaacgagggcgaagtttgtgggaagggaacttcccccgccgctgttcctcaatggatttgggagccctggaaaccaanggacaagngtnaagattctgggccgtnanggnaagattcttncgaacgggataaattncgtcctccggcaattccgggtgctgggaataactnggccaaaaggtcaacaacacngaaaggngccnnacctaattgattccggtc

SEQ ID NO: 11965 - DNA, 425 bp, Arabidopsis thaliana
  Clone ID: LIB25-091-Q1-E1-E5
tgttatccccttctctctctgaaactagggtttctatttctctgagtgatgtgaaatgctcgtgtaaacggaaacgatgcagaagattctgtgcaaaagtaccacttcttcaacccctgttctctctacgccggtgaactctctcgccgccggttttatctctctagggtttaagacccccgttaaaaatctccctccttgttctactactaaacctctctccacttgtttcttctctacttccgctatgccgaccacaacggcttctgtttcttcaggcggtgttggtttctctgcttatctacagaggactgttcataaaccggcaccggcgtctgttcggttctcaacagctggttaccggacttgccggtgttcaattgacggtacgaaccgggcttgggttgggccaactgggtcctggg

SEQ ID NO: 11966 - DNA, 480 bp, Arabidopsis thaliana
  unsure at all n locations
  Clone ID: LIB25-091-Q1-E1-E6
aaatcttttttcttcctctccttgatcggagggtcnccgtgttgaaaaggatggatggtggtggagagacgacggcgacggctacgatggatgggagagggttgaanaaagggccgtggacaacgacngangatgcgatcttgacggagtacgtgagaaaacacggtgaangtaattggaacgccgtgcaaaaagaactcangtttgctcccggtgtgggcaaaaaagtttgcccgtctaacggtgggccgaaatcaatctccgggccaaatcctaaaagaaagggttcttttaactccctgatgaaagaaaangattaatccatccgaaccttnaacgccttaaccttggaaaacaaaatgggccccgtaannggttcccaanttacctggaaanaacaagncaaatgaagattcaaagaactaattgggaacaacgaaggattgaagnagaaanacaaaagagcttgttcccaaaanc

SEQ ID NO: 11967 - DNA, 401 bp, Arabidopsis thaliana
  unsure at all n locations
  Clone ID: LIB25-091-Q1-E1-E9
aagctaaggaaggtcgtgagaaaagaaaaacacttctcaatctttctacagtcttcttcttccaaaagaacaccatcttccttcgtaatgtcagagaaccagtccgaagaagtccagcaaatcgagaagctctatgagttcagtgagcgtctcaatgcctccaaggacaagtctcagaatgttgaggattatgaggggatnattaagatgtccaagactagtatgaaggcaaagcagcttgcgtcgcagctaattcctcgctacttcaagttcttccctagtctctctactgaggctttcgatgcgcatatggactgtatcgatgatggagatcttggggtacgtgttcaagccatccgtgggctcccgctgttttgtaaggatacgccaagatattttat

SEQ ID NO: 11968 - DNA, 488 bp, Arabidopsis thaliana
  unsure at all n locations
  Clone ID: LIB25-091-Q1-E1-F1
ntgttactttgccngcccggtccgaaataaacgggtcgacncacgcgtccgatggcagcaaccgccgcaacaacgacgtcgtctcaccttcttctctcaagctcacgtcacgtggcatcatcatcccagccttcaatcctttcaccgagatctctcttctccaacaacgggaaacgagcaccaactggagtgaggaaccatcagtatgcgagtggagtgaggtgtatggccgtagcggcggatgctgctgagacgaaaacggcggcgaggaagaagagtggatacgaacttcaaacgttgacgggctggttgctgagacaagagatgaaaggagagatagatgcagagctgacgatagtgatgtcgagtatatcattggcttgtaagcagatcgcttcacttgttcaacgtgccggaatctctaacctgaccggagttcaaaggcgccgttaatattcagggaaaaggatcagaanaagccttgacgg

SEQ ID NO: 11969 - DNA, 417 bp, Arabidopsis thaliana
  Clone ID: LIB25-091-Q1-E1-F11
atcttcgtcttcctttcctccttcattcctcttttcttcgtctcccaccatttctgcagaagaagacaaataaaaaagctctcatttatcttcgtggagatctaaaagaaggaggaagacatttcttccctctggatctccaaaagtaagaacatttacaagaaacgagaggtttgggtggggaaggaaagaaggaggaagaggcaatgtcagctaggtattggtgtcacatgtgttcacaaatggtgaatccagttattggtgccgagatcaaatgccccttttgccaaagcgggtttgtcgaggaaatgagccgtgagattaatggcggcagcagtagcagtctaagggaggttcaagaccctgagattgattttggtacagaccggtgcattgtcctccaaggggtccaatctt

SEQ ID NO: 11970 - DNA, 437 bp, Arabidopsis thaliana
  Clone ID: LIB25-091-Q1-E1-C8
atttctaacaagatatataacaatggcaagagttcagctatttttatgctttaccattctttttgcatcagtgactcttctggacatcgtttcagctcatttgaagcttaagccaactttgcctcagattgaacctccacaaacgttgaaggatgttgaaccttacaccgttaaagtagtgatagtctttgtgtccgacctcgagaaagaatgtcccaagacaaataaattcaaggctttctttgagaaacttagggcattcgccaagtatgtctgcccaataaaaagaaaagaccaagtagattacgaccgaagacatgaaggccaaggctggaggcctcttccaaagtcatatcttcctttgcgattggaaagataaaaaagggaattcaagaaggataaaatggaagttataataacctttaagttaatgaaga

SEQ ID NO: 11971 - DNA, 380 bp, Arabidopsis thaliana
  unsure at all n locations
  Clone ID: LIB25-091-Q1-E1-A6
cattttaagtaagaacagctagctttgccatctccctaaaggcaataaatctcggatccactttcacgatattttgatattttttctatttataatctttctgggttttgagtcttttgaaggctgaattgctctgaaatctcaattgtataatcatctcctgggtcgtcgttatcgtgatcatctagaagaaagcatgactacactagatttgaccagagccgagcttgctcttattgttctctatttgaacaaagctgaggctagagataagatatgcagagctatccaatatggttccaaatttttgagccggtggncaacctggtactgctcaaactgtcgacaaaaacaccaagcttggcgagaaaagttttccg

SEQ ID NO: 11972 - DNA, 430 bp, Arabidopsis thaliana
  unsure at all n locations
  Clone ID: LIB25-091-Q1-E1-A7
aaagatggtgaaacggagtaaaaagagtaagagtaagagggtgaccttgaagcagaagcataaggtcctgaaaaaggtgaaggagcaccacaagaagaaggcaaaggatgctaaaaagcttggccttcaccgtaagccaagagtagagaaagacccaggtatacccaatgactggcctttcaaggaacaagagcttaaagcccttgaagttcgacgtgcccgtgctcttgaggagattgaacagaagaaagaagctcgcaaagaaagggccaaaaagaggaaacttggtttggttgatgatgaggataccaagacagaaggagagaccatagaggacttacctaaagttgtcaatgttcgagataactcngagaaggctttccacaaggagctagtttaagtccattnaattgtccgaagtccattttgg

SEQ ID NO: 11973 - DNA, 426 bp, Arabidopsis thaliana
  unsure at all n locations
  Clone ID: LIB25-091-Q1-E1-A8
tacataaaatagagggttttattgtaagtaactcgctatctttcggttatcttcggtttgtaatttttcatgatcttcttcgacttgtagatttaagttttgaattcgttcaccagaattcagaacttgatactgatcaattgaattttcactcatcaatttgcaacgatttgatctacggaggcttgacgaggtggattggagccagaggaagggcggatcatctcgaagtagaagatctcgattttggatcgctcggaaaactgatcaaatggaggagaaaaacggatcatcagaggtagagatcggagagaaagacgaaacgaagaagcaatcaaaggatcttgagttcttaagctgtatgatgcagccaaaaacagctgattcagatccacactacatcggaatcccgccnggantccttct

SEQ ID NO: 11974 - DNA, 392 bp, Arabidopsis thaliana
  unsure at all n locations
  Clone ID: LIB25-091-Q1-E1-A9
gccttttagatagttccgtctgcgaaccctaaaatcattcaataaacttcgaacaaaaacgaatgcttttgttcaatcatcttctcagtttctgattccgaagaaaccctaatcaaataaatcatggactgctcatgcagtactcgtccttcgtctctgcttatctcttccgaaccatcttttcgctttcctcactctaatttctcctcgaatctcagctttcagataccgaaagatacgaagttggtgaagcaagcgtttggtagtgagaagttcctctggttctgattatcaaaacggcgacgttaatgggtttcctctcaaaccaaacaaactctttatgcaagaggcgattggagctgagtatgggagaagggtttgagacntttaaa

SEQ ID NO: 11975 - DNA, 493 bp, Arabidopsis thaliana
  unsure at all n locations
  Clone ID: LIB25-091-Q1-E1-B1
ntgttcgtcancccgnncgtaccganctnaacgggtcgacgcncgcgtccganttccntctctctctctttttatctcaccgtctgatcgcttagaagcaaccatgcctcagggagattacatagatttgcacaggaagaggaatggatatcgcctcgaccacttcgagagaaagcgcaagaaggaggcgcgtgaagttcacaagcactccaccatggctcaaaagtctctaggtatcaagggtaagatgattgctaagaaaaactatgctgagaaagctctcatgaagaaaacattgaaaatgcatgaagagtcatcatcaaggcgtaaggctgatgagaatgttcaggaaggagctgttcctgcttatcttcttgatcgtgaagacaccactcgtgccaaggttcttagcaacaccattaaacaaangangaaaganaaagctgggcaaatggggaaggtccctcttccaaagggtccgtccantttgctg

SEQ ID NO: 11976 - DNA, 412 bp, Arabidopsis thaliana
  unsure at all n locations
  Clone ID: LIB25-091-Q1-E1-B10
cacaatcgaagaaatcttttgaaagcaaaatggaagagatttcgacggatccggttgttccagcggtgaaacctgacccgagaacatcttcagttggtgaaggtgctaatcgtcatgaaaatgacgacggaggaagcggcggttctgagattggagcaccggatctggataaagacttgctttgtccgatttgtatgcagattattaaagatgctttcctcacggcttgtggtcatagtttctgctatatgtgtatcatcacacatcttaggaacaagagtgattgtccctgttgtagccaacacctcaccaataatcaagctttaccctaatttcttgctcgataagctattgaagaaaacttcagctcggcatgtgtcaaaaactgcatcgcccttggatnagtttcggg

SEQ ID NO: 11977 - DNA, 412 bp, Arabidopsis thaliana
  Clone ID: LIB25-091-Q1-E1-B5
gccaaggaagctttcctcagatcgtctctccgaaattttccggttaatcgtcagttaaggggaaaattaggctatggcgatgttaggtgcacagcaagttccagcagcagcttgtactccagatatggttgggaatgcttttgtgccccagtattatcacatattgcatcaatcacctgagcatgttcacagattttaccaagagattagcaagttaggtcgtcctgaagagaatggtttaatgagcatcacttctaccttgcaagctattgacaagaagataatggcgcttggttacggtgtaatcagtgcagagatagctactgtggacacacaagaatctcatggaggtggttatattgtactggtgactgggtattttgacgggaaaagacagtgtcaggaggacgtt

SEQ ID NO: 11978 - DNA, 434 bp, Arabidopsis thaliana
  unsure at all n locations
  Clone ID: LIB25-091-Q1-E1-B6
ctctttcttctatagcttctagtttctcccacttctcacttcctttttcccgaatcttgataatgtaaattcacaagaaatctgtttaaaaacaaccaatcaaaacccaacattgcttctcaacaaaaaagcaaagcaaaagattttgcgagagaaaaaaaagaaaatggatttgttcaagatccttcttcttgtgttcttcgtgaacataagtttctgcttcgctgcagatccatattctttctataacttcgaagtctcttacattactgcttctcctcttggtgtccctcaacaggtcattgctataaatggaaagtttcctggtcctacaatcaatgtnacaaccaatgaaaatctggttgttaatgtcaagaaacaagttagacgaagggacttcttcctcaatgggatgggatccaacaagagacgtg

SEQ ID NO: 11979 - DNA, 429 bp, Arabidopsis thaliana
  Clone ID: LIB25-091-Q1-E1-B8
aaacttggctagtttttctccacaaggttttttctgcaaacatgtctgaacttgcattgtcatctcaagaagagtctccaagtagtaataagattggtttatcttctcttcttctctctgactttcatctcttttgctcatttatcctcactcaccctttctatttttcttacttgctcttcttttcaccttacatcttcaagattctctcttttctttcaccactctttgtcaccaccacactcttgcttcttgccttattgagtactttacatgttcaagacacttgtctcgactctgaatcactagaaacacaaccaagcttccttttctccttttgtagtaagcttggaagtgtcttggaacacaagtttgatgtcaacaatgagggttttaagtcattggaggagttggaagcgtataagatgg

SEQ ID NO: 11980 - DNA, 498 bp, Arabidopsis thaliana
  unsure at all n locations
  Clone ID: LIB25-091-Q1-E1-B9
nnnnnnggnngngggnntgnngnaantgtntcgcctnnccgtagccgtccnnaattcaagggnccacccacgcgtccgcanagagaaagagagctttgactttagatccaatcatggagacaactacaactcctctgctccccggtgatcgcagcagatgcgggtggctccgtcgccgtctccgcctcaaaaaccctctttcttctgaactctccggcgctgtcggtgatctcggcaccttcatccccatcgtccttacactaactctagtctccaatcttgatctctccaccactctcatcttcactggtttctacaacatcgccaccggtctcctctttgacatccctatgcccgtccagcccatgaaatccatcgccgctgtcgctgtctccgaatccccgcatctaactccttctcaagattgccgccgctggtgcatccactgccgccacgctcctcctccttggcgccaccggagctatgtctttctctana

SEQ ID NO: 11981 - DNA, 264 bp, Arabidopsis thaliana
  Clone ID: LIB25-091-Q1-E1-C1
atttacatgatgatgaacttagttccagaagtggcaccatcagtgttgtaagcagtgtaagcacagaagcaaatggagctacgctgagtagagagataagaaacaatgatccaatgttgtctcattgtagaaactcttatgctccaagccaaggtagtcgggacgagtacgacacagggacccatagtatgagcagtctcagcagtccaagtcatgttcatgagaccgtcacacttagtcctctccctcagcatcatacagctg

SEQ ID NO: 11982 - DNA, 406 bp, Arabidopsis thaliana
  unsure at all n locations
  Clone ID: LIB25-091-Q1-E1-C10
gcttatgtacgccaaacgtgctttcgttcactggtatgtgggtgagggtatggaagaaggagaattctcagaggcacgtgaggatcttgcagcattggagaaggattatgaagaggtcggtgctgaaggtggtgacgatgaagatgatgaaggagaggaatactaagaagaatgtttctaaaaactttggatttgtgtgggtttctctataatctcgtcttgtgagaatgggctcaaaactcttgggagtctttaatcgtgtgtgttttaaaacctacttctctatcttttcgtagccatgttatctctctattatctatttcctttgtgtgttaaatcgtttctgcctttctggtaatatcttatcactactatcaanaaaaaaaaaaaaaagggcggccgctct

SEQ ID NO: 11983 - DNA, 416 bp, Arabidopsis thaliana
  Clone ID: LIB25-091-Q1-E1-C11
agactctgttgattagtcaacacagatcagaatctgaggctttggccgagacgagagaagcagaagaagaaaatggcggagactgtacattctccgatcgttacttacgcatcgatgttatcgcttctcgccttctgtccacctttcgtcattctcctatggtacacaatggttcatcaggatggttctgttactcagacctttggcttcttttgggaagaatggagttcaaggacttatcaacatatggccaagacccactttgattgcttggaaaattatattttgctatggagcatttgaagctattcttcagctgcttctgcctggtaaaagagttgagggtccaatatctccaagccggaaaccgaccagtttacaagggcaatggtcctggcttgcttacttttgtgaca

SEQ ID NO: 11984 - DNA, 516 bp, Arabidopsis thaliana
  unsure at all n locations
  Clone ID: LIB25-091-Q1-E1-C2
gnnnngnaantgttactttgccgncccggtccgaaaatnaacgggtcgacncacgcgtccgcncacgcgtccggcagaccagatatcaatagaagttgtgttcttgctgagcttcttcttggtcagccattatttcccggagaaaatgctgtggatcagctcgttgaanattataaaagttcttggtacaccaactcgagaagaaatccgttgtatgaatccacattacacagatttcangtttccacagataaaggcacatccctgggcacaagattttccacaaaaggatgcccccanaaacgattgattttgcatcaaagnngcttcaatactctccaangtccaaaatgcacagcnctccgantcctgtgcaaatccgttccttgatgaactcaanaagaaccaacacgctcgtttaaccaaatgggacgggcctttcccgcctctccttcaacttcaancaatgaanttanctggattaatcaacctgaactggtcaacaagnttgantcc

SEQ ID NO: 11985 - DNA, 490 bp, Arabidopsis thaliana
  unsure at all n locations
  Clone ID: LIB25-091-Q1-E1-C4
aaaaaacaaaaacaaaatggaggccaaaacattttttctcttcatgcttttcatcttttctcagtcttggctctcaacttctaaaaggatcctaaacaatccctctgttttctcatcgtctttgaatttttcgagtggtaatgcagagagacttataaaatcattcaatctaatgcctaagtatgacgttaatgtcatcccaaaagggaagccttggatgctccaaagactcaattggagaagacaaattggattttcctgggcgaacaagccgggttccaaaaaaacgccttcccgttgggtccttcctggtcaaagaatttgggccaactaacgcctgggttaattaacaaggcctcctcaattcaaaaaatcaagcccaaagaatgttcctaanttcccttttttgaatccacgggaacaaaaaacaaaccgattccgggttggtgattctgggttaaaccgggttggaacccgggctgcaattaat

SEQ ID NO: 11986 - DNA, 190 bp, Arabidopsis thaliana
  unsure at all n locations
  Clone ID: LIB25-091-Q1-E1-A5
annagagaacanattcgtgtcgtcntccacagacaaagacgcgatgaaaaagacaattctttctattcattttctggacagtcttggtctctccgtatcattttgagaaggaaatcgaagagagcctaanacatgctttcganaagatagangatttgatcgctgatgaaaataaattgcacacantctc

SEQ ID NO: 11987 - DNA, 430 bp, Arabidopsis thaliana
  Clone ID: LIB25-090-Q1-E1-G7
tcttccccattctctctctaaaaccatttcttttttctcagctacaaaaatcgaaactttccgacgagtttttaacattaggacttcattcggcaagaagcattaccgtagtatgtcggatttgatttaagatgacatgagatatggctgcattgaatctatcaaagaggtcaatttgtgaaacatgcggacatcaaggatggaagaattcacttgtaacttgctctaaatgccgcatagcctgtgaacactgttattgcatgcgggagagttcatttgagacctcaatacattttgtctgtgctgattgttcgatgagacctgttcaaaacaaatttacttcagattctatcaaaggagtccctagaagtattaggaataaagtgcgggtggaatcttcaaatccagttcctaaatgggaaaaaaattc

SEQ ID NO: 11988 - DNA, 432 bp, Arabidopsis thaliana
  Clone ID: LIB25-090-Q1-E1-G8
gtttagagattttttgaaagaacaaacagatatcgaattcgagttttgcaaaaatggtatcggtggaggaacctttatctcattccaattccactcgctttccgttaacaaccgatttctacggttcatcatcgccgtcggcggcgaggttacaccgtcaagctggccggtcgatgagaacagtgagatctaacttctatcaaagcggagatcaatcttgctcattcgtcggctcaatcggcgataaatcagagtatgcgtcggagtttctctcggattccgtcatcgacatgagactcggcgagcttgctttgaaaaacagtaattctctcaattcaaacgcttcctcaatgaaagaaggaagcgtttctcgacatttctcaaggcgttaagtgattttccgccttgtaagtagtgataacctccggggag

SEQ ID NO: 11989 - DNA, 482 bp, Arabidopsis thaliana
  unsure at all n locations
  Clone ID: LIB25-090-Q1-E1-G9
tactgttncccccggcccggtacatatccanaaattcccgggtccacccacgcatccgcaaaaccgcaatccgcgccgagaaaacagattcctccgccgccgctgctgcagcccccgccacgaaagaagctcccgtgggattcacgccaccgcaggctagacccaaacacaccgtctccgatcttcgctggaagcaccggtggtcttctatgtaaagcgcaagtggaagagttctacgttatcacgtggaactcaccgaaagaacagatctttgagatgccgacaggaggagcagcgatcatgagaagaaggtccgaatcttctgaagctagcgaggaaaggancaagtgtttagctttggggacaaggcttagatncangtanaagntnanttatcagttttanangagtgtttcctaacggtgaggttcaannncttcatccnanagntggtgtttanccangagaaggggnaatccatg

SEQ ID NO: 11990 - DNA, 438 bp, Arabidopsis thaliana
  unsure at all n locations
  Clone ID: LIB25-090-Q1-E1-H1
agccaacggaagtgtttcttaattcattttttgtttgttttggtttaaataattcagtgtctcacgagctgtgtcgagattggatccatacaaaatctgcacgacgcctgcttcttcactctctcccactgttccagcttcaactctcttgatatacagagagagatagagataaagagagagagagtgagagtgatagctctcggagaaattgaagaagacacaatctgattantattctccaatattccatcaantttttgctgagggaaatctccanatttataatcgtttgtatatatatatatacagagcagcgtanaaaaggatcttagatttatagcagcaacangaaaatgtcaatgccactacaacgtgggatctctgggagtacgagtttccggatagcaagtgatgattttgagagactccgcanat

SEQ ID NO: 11991 - DNA, 123 bp, Arabidopsis thaliana
  unsure at all n locations
  Clone ID: LIB25-090-Q1-E1-H12
ntcaacgatcctctcnggagcgccanatgccttgtcacctctcctcacctcattcacacngtgcatctcgattaccttgaagctggtgccngatatcatctccagcgcttcttancaggccac

SEQ ID NO: 11992 - DNA, 496 bp, Arabidopsis thaliana
  unsure at all n locations
  Clone ID: LIB25-090-Q1-E1-H2
ctgtttacgcttgcccgtgccggtaccananctaangggtccacgcacgcgtccggattcacacagttacaacgctcanttggggagttgttgggtgatcggtccgaggcgacatacaagatgaccggaaactcttttaactcgatgaaagatttcctgaagcagacaggcggctatgcggtaatagacggngggcttgcaacgganttcgagagacatggagcagatctcaacgatcctctctggagcgccaaatgccttgtcacctctcctcacctcattcacaccgtgcatctcgattaccttgaagctggtgctgatatcatctccagcgcttcttatcaggccacgattcaggggtttgaagcaaagggattttctagaagaagagagcgaatctttgcttaaaaagagcgtagaaatagcgactgaagctcggaactcgtattatgacaaatgcggaactagctcttccatggatgataagattctcaaa

SEQ ID NO: 11993 - DNA, 433 bp, Arabidopsis thaliana
  unsure at all n locations
  Clone ID: LIB25-090-Q1-E1-H3
tcacaaacccgaaaccctaattttctcgggacactgaaatttttacagcttctttcctcttcttcaccggggagatttgtcggtactaaatctagggtttttgggtatcaccggagggttgaagagagagaaaaaaactcacaatggaatcagatcagggaaagctatttatcggcgggatttcatgggataccgacgagaatcttctgagagagtacttcagcaatttcggcgaggttttgcaggtcactgttatgcgagagaaagctactggtcgtcctagaggattcggattcgtcgcattctcggatcctgctgttattgatagggttcttcaggacaagcaccatattgataatagagatgttgatgtgaagagagcaatgtctagagaggagcagagtcctgctgggagatnagggacttttaatng

SEQ ID NO: 11994 - DNA, 158 bp, Arabidopsis thaliana
  unsure at all n locations
  Clone ID: LIB25-090-Q1-E1-H4
ttactgtgtttaagaagggttatgctgaaacgaagcaggattctgtttctangacgaangcaactgcctcggttgattcccaagacnggatgctatgattcaagcagatcntcatggaagntttctcggactgctacattagnaagcattgctcatna

SEQ ID NO: 11995 - DNA, 434 bp, Arabidopsis thaliana
  unsure at all n locations
  Clone ID: LIB25-090-Q1-E1-H5
cgaagatgagaaatcgatcatctctgaagaaaaaccggtgaaatctgcttcagtttcatctcatcacgtctcacctgaagacgacgagacaacagatattttactgtctgagattctagcatcaaagcgaagggaagggaaatctattattcccgataagaatctagtgaagacagaacaagcttcaattgaggaaggtccatcaagacctgtaaggaaaagaacaccgcgcaatcgtgaaatcattacgaaggaagagagtaacccaaagaggcgtcgggtttcaagagagaagccaaagtctaatgctgtgatggcttctaggttttccaacaggaagagaaagcgaggaaaacgaaggtcaggctctgccgggttacgaagaagattctgaagaangtttgggaaactttcaagtaactaatccggatttt

SEQ ID NO: 11996 - DNA, 505 bp, Arabidopsis thaliana
  unsure at all n locations
  Clone ID: LIB25-090-Q1-E1-H7
gnnnnggnnnngnngnttctgtcnaccccgctcgtaccgntccacnaattcncgggtccacccacgcgtccgaaaatcttccggagcttctaactttttttctgcatggcgtttcctcttcgtgtctaagagcgcttcatttctgtttccttttctgcttgcctgggtagatattttatatccttaaaaggagaaaatggatgaaaacaacgcggcaaagttaaccgggatcaagcagattgtgagactaaaggagattcttcaaaaatggcaaactgtcacaataggttcaaagtcagatgatggagagttgggagctagaaaacacacagctatcatttcaccggttatcaacaagaggctattggatttgaagacttgtgactcggacgaggaaactacttgccaaagccctgagccaccgcctgatgtccctaaaggatatttggcggtttatgttggacccgagctccggagatttatcatacccacaaactttcttagg

SEQ ID NO: 11997 - DNA, 489 bp, Arabidopsis thaliana
  unsure at all n locations
  Clone ID: LIB25-090-Q1-E1-H8
nnttgccnnnggccctnnnaancnanaaatcccggggccnnccacgcgtccgcacacgcgtccggaaagtttgcgtttatactcttcgatagcgtcaagaaaactgtctttgctgctgctgacgccgatgggagtgtgccgttcttctggggaaccgatgctgaagggcaccttgtgttttctgataacaccgagatggtgaagaaaggttgcgccaaatcttatggtcctttccctaaaggttgtttctttacgtcgtcgggtggattgaggagctttgagcacccaaagaacgagttgaagccagtgccgagagtggacagctcaagtgacgtgtgtggtgcaaccttcaaggttgacgctgagactaagagagaaggtaccaaaatgcctaaaatcgatagctcccaaaattgggccggtcatatctaaaccggaaatcatacacaatcacaagctcaacatccttctccctccttgtcttgtccc

SEQ ID NO: 11998 - DNA, 428 bp, Arabidopsis thaliana
  unsure at all n locations
  Clone ID: LIB25-091-Q1-E1-A1
acgtatgaaccaagaacaaagccttttagatagttccgtctgcgaaccctaaaatcattcaataaacttcgaacaaaaacgaatgcttttgttcaatcatcttctcagtttctgattccgaagaaaccctaatcaaataaatcatggactgctcatgcagtactcgtccttcgtctctgcttatctcttccgaaccatcttttcgctttcctcactctaatttctcctcgaatctcagctttcagataccgaaagatacgaagttggtgaagcagcgtttggtagtgagaagttcctctggttctgattatcaaaacggcgacgttaatgggtttcctctcaaaccaaacaaactctttatgcaagaagcgattgggagctgagtatggagaanggtttgagacttttagacaggatggtcctcttaa

SEQ ID NO: 11999 - DNA, 491 bp, Arabidopsis thaliana
  unsure at all n locations
  Clone ID: LIB25-091-Q1-E1-A12
nnngngggnnngnngnaantgtttacgcctgccggtagcggtccanaattcacgggtcnacccacgcgtccgggaaaattcttcgaatctgaaatccgatcggtgagcagaaaccctaatttcgtacagtctcatgattgagatttgcgtcttctacactctctgttttcactcctcctgattcttctctcaatctcttgttttctagggctcgcttgttctgatttcgtgagggtgaacatggatggaaacaaagacgatgcgttgaagtgcttgaaaatctgcaaaagtgctatggaagctggagatcgacctcgcgctttgaaattcctggctaaagctcgtcgtcttgatccaaatctcccgatcgatgatctcgtatctgagcttaacaacaacaaatcagacgaaccaggatctgcaaaatcgcctggatctgcagcagcaaaggattcttccaattcttcagattgggcttctttacgtcaaag

SEQ ID NO: 12000 - DNA, 484 bp, Arabidopsis thaliana
  unsure at all n locations
  Clone ID: LIB25-091-Q1-E1-A3
tgttagttgcccggccgtaccanaccaacgtctcgngtcacgcgtccgcacacgcgtccgcaaatatgttcctcttgatctccttcagggtgcatcagtggtggtgctggctaatctgaagccgaggaatatgagaggggttaagtcatgtggtatgcttttagctgcatctgacgcagctcatgaaaatgttgagcttcttgttccaccagaaggctctgttcctggagatagagtttggtttggtaacgaagaagatctcgagcagcttcctgaacctgcacctcctaataaggttcaaaagaagaagatgtgggaattggtgcaaccacttttgaagacagatgcgtctggtgtttcaatgcttaaggagcatttgatgcggacatcttctggtcttgttacttccaagtctttaagaaatgccaacatttcttgatttctgttaaaagctaatttgtgatgttgtttttgacacaagaaa

SEQ ID NO: 12001 - DNA, 427 bp, Arabidopsis thaliana
  unsure at all n locations
  Clone ID: LIB25-091-Q1-E1-A4
ggcagaccagatatcagtagaagttgtgttcttgctgagcttcttcttggtcagccattatttcccggagaaaatgctgtggatcagcncgttgaaattataaaagttcttggtacaccaactcgacgaagaaatccgttgtatgaatccacattacacacatttcaggtttccacagataaaggcanatccctggcacaagatcttccacaaaaggatgcccccataagcgattgattttgcatcaangctgcttcaatacnctccaagtctaagatgcacagcgctcgaagcttgtgcacatccgttcnttgatgaactcanagaaccaaacgctcgtttaccaaatggacnggctttcccgcctctcttcancttcanacaanaagtagntgngatnatcacctgaactggtcaacaagttgat

SEQ ID NO: 12002 - DNA, 439 bp, Arabidopsis thaliana
  unsure at all n locations
  Clone ID: LIB25-090-Q1-E1-G6
taatttattaataaaaaaaaataaaaagaagcagaaaagagataatgcagggtggtaggcttttgacggtgttggtgtgcctcgcctccacggtggcgttggtgangcgccggtgacccttacttctactacacgtggaacgtaacctacggaaccgccgcgcctctcggaattcctcaacaggtgattctcatcaacggacagttccctggtcctaacctaaactcaacctccaacaacaatgtcgtcatcaatgtcttcaacaacctcgacgagcctttcctcttgacctggagtggactccagcacaangaagaactcatggcaagatggtgtgactgggacctcatgcccaatcccagcangcaccaacttcacttaccatttccaagnctaaggaccaagattgggtagcctagttctactaaccatccaacgg

SEQ ID NO: 12003 - DNA, 414 bp, Arabidopsis thaliana
  unsure at all n locations
  Clone ID: LIB25-089-Q1-E1-D7
acacgatcttgttcggagagattcgtaggggaccgatctatcaaggcttcaagggcaaacagaaatggaccacgacaagacaggatgccaaagcccacctgaaggtcccaagctatgtactaacaactgcggtttctttggaancgctgccacaatgaacatgtgttctaagtgtcacaaaggatatgttgttccaacaaggagcaaggcgctaagtttgcatctgcaattgtctggaacatcgtcatccaacaacatcataaaagggaaanctttaacgctgcgttggtcnatatttaaaccaaatccgttnaaccnatgactgtttctgtacanccatcctctgtccaantcnttncaaaagtagtancaccanaagaanctgcgaaaccaaaaggaccaaaccnatgtttt

SEQ ID NO: 12004 - DNA, 78 bp, Arabidopsis thaliana
  unsure at all n locations
  Clone ID: LIB25-089-Q1-E1-D8
ggcntggacttaacgtttggggaagggttcactcaaccgatacccagaagaaaggtgganccgattttgggcaatggg

SEQ ID NO: 12005 - DNA, 368 bp, Arabidopsis thaliana
  unsure at all n locations
  Clone ID: LIB25-089-Q1-E1-E1
cgcaagtttctcggattcaggtctcggtccaattccatctacctggaaaggngaatgcgagatcggacctgattttcctgcctcatcttgcaatcggaagcttatcggagctcgagcgttttacaggggatatttaacgcaacggaatggaacaaaaaagcatgcanccaaggaatcnagatcgccgcgtgatacaaaangtcatggcacgcacacngcatctacggcaagctggatcgtgggttgcaacgccaattttgtacaantacgccgcccggaacaactaatgggaatggcntccaaagncaagaatccncgcttaacaaaatccgntggaacggccgggatgttaccantccnaatatcct

SEQ ID NO: 12006 - DNA, 489 bp, Arabidopsis thaliana
  unsure at all n locations
  Clone ID: LIB25-089-Q1-E1-E12
gngnnngaangtttgttagccggccggtccgaaatancgggtcnaccacgcgtccgcnccgctttttcttcgatcacatcgctcctatgccgatcaggtaatcgacacgcagaagcaggttctctctctgatccgcgatttcactctgaaagatctcgtggaggtaagatacttcatacattttgtttgttttctaagagatttcgggttttgaacgattctactattcaatccctggagacacaggtgagttgtctttgaacgattttactattcaatctctggaggttttgatttttctttgatcttacttggtttttgggatgattaacaagttttggtgcctaatgagattgaaactgtgcctctttttttttttttttctcaggcaaggattagtcttcttcaggatgaagtttctactaatggcattgaagatgatgctcttaaggtttggccacacattgtttanttgagtttttaagtgct

SEQ ID NO: 12007 - DNA, 551 bp, Arabidopsis thaliana
  unsure at all n locations
  Clone ID: LIB25-089-Q1-E1-E2
gngnnngnaactgtttaccttgcccgtgccgggtccaaaaattaacgggtccacccacgcgtccggntgcgtttgagtccgtacgaaaacanaagaaaagagagagatggcggaagagaagaaagctccaatcagtgtctggactaccgtgaagcccttcgtcaatggcggtgcctctggtatgctcgctacttgcgttatccagccgatngacatgattaangtgaagattcaaccttggtcaaggatntgcaaccaatataaccaacaacatgcctaagaattaagggcgtttggtgccctccaaaaagggaataacctgccggggttgnctgaaggcaaagcaaccttacaccaanagcccgtcctggattnaatcaaanttgccgaactgcaaaaggaaattgaatcccaaatgaanggaaaancctccaaccggctgtatcaaaaanggaactaatgttggtccgaacanctgggtgccaattgggtgccttgcgttcggtagtccaanccgattntaagccaccttatcaaaaaatggcaaggcc

SEQ ID NO: 12008 - DNA, 247 bp, Arabidopsis thaliana
  unsure at all n locations
  Clone ID: LIB25-089-Q1-E1-E3
gcccgtccanactaannggtccacncacgcgtccgcnaacgcaatccgcccacgcgtccgcgggacgcgtgggctgtggtgggacctctggtgtttagctatgangataatgatatttctgatcaggatcttcttcttgatgtgccgtcgaacggctcattccctcaagcagagcttctaaacatgatatgaaagangataaagtttctcaaactcattggttaaactcattgtgtttcncaganna

SEQ ID NO: 12009 - DNA, 545 bp, Arabidopsis thaliana
  unsure at all n locations
  Clone ID: LIB25-089-Q1-E1-E4
gnggnnnnaacngtttcgtcgcccgggnccggtccaaaaattaacgggtccacncacgcgtccgngngaactgaaatctgcaactaggaatttccggcctgatagtgtggttgggtgaaggtggatttggttgcgttttncaaagggctggattcgaatgatccctcctcctccgctcccttctaaaaccgggggaaccggggattgtcatttgctggtgaaaaaagaccttaaccaaagaaaggtttcaaaggtcatcnaagagtggctgggctgaagatnaattatttaagccaactgggatnatcctaaccttgtgaaactgattggatactgcttgggaagaagagcacaggcttcctgtttaacaagtttatgactcntggtagtccctgagaatcactgattcangaaagaagaacattctatcaagccactttcatggaacacccgggttcgtaaggctcctgggtgcaacctagaggacttgcttttccttcacaatgctcaaccgcaaagttatataccgaagacttcaaaagcat

SEQ ID NO: 12010 - DNA, 356 bp, Arabidopsis thaliana
  unsure at all n locations
  Clone ID: LIB25-089-Q1-E1-E5
ctctctcctcctccctccgcttctctttctctctgtaaccaacatgagcaggatcagcggcgatggcggctctagggtttctattccggctgatntgcttcaaaccattnaaaacatnagagaggttaacggtaaacaanattccgacgaggatatcttccctgtccttaaaggatgtttcattgattcaaatgagaacaactcaaaaagncttctcctatttanatacatttcaatgaagggtnaagaagccaaacggggaagaagaatannanagagaatttaagtngcnaaaatacacaaatgaaaggggcccngantgggaacgggaagaacttttgcntcaaagttacaca

SEQ ID NO: 12011 - DNA, 473 bp, Arabidopsis thaliana
  unsure at all n locations
  Clone ID: LIB25-089-Q1-E1-E6
gaatagatctctgtgtcattttattcgtaagaatgagatctagtgtagaagataacaaaggatggataggaccagcgacaccggagatatcgaacggttttgagtttcagaaaggttcgaaccggacaccaaaccatcaacggtctactaaggggaanccagcgccgtnaaaatggganatgctcaagaaatggctttctgggntaaggtttgcctccgttggaacgttggtggaagttgtgacaaagaagttatcatcaactcaaagaagttaataaagcccganaaactcctaaacgccggattattcntaagacttaaaagccttcaancttcacaagaanagaaccntnaanggagaaagattcagttacgtttgaattatgaaggattaaagaaaatggccngccggnaaataaccggaagttgaaaaccaaanaaagttgaatttgtgggttaanccggtttgggag

SEQ ID NO: 12012 - DNA, 436 bp, Arabidopsis thaliana
  unsure at all n locations
  Clone ID: LIB25-089-Q1-E1-E7
tagtgagagaaggacnaagaatagatagaggaggaagaagaataaagagaaaagatgaacaagaaggagatcttcaagctagcgaagggtttcagaggaagagctaagaattgtataagaattgcgagggaaagagtcgagaaagctctgcagtactcttacagagataggcgcaacaagaaacgtgagatgagaggtctctgggatcgagcgcatcaacgccggttctcgtcagcacggtgtgaactacgggaacttcatccatggactgatgaangagaacatccagctgaancgcaaagtcctctccgagttatctatgcatgaancttacagtttcaaagcacntgtggatgtctccccgcaaagtcgttccctggaaacaaagaacgtggtccaaagcatctccggaaaagtnaacntttcatccatcaag

SEQ ID NO: 12013 - DNA, 433 bp, Arabidopsis thaliana
  unsure at all n locations
  Clone ID: LIB25-089-Q1-E1-E8
ttctctctctcataattcttgagtttcacgtctcaagatttgatcacttctgccaattttccagattgatctctctaattatggcttccatgagtttcgccttgaatcgcttctctggactctcctctaaaaccaccttatcagctgacttcgatccatcctctcgccggagttttctaccgccgactagagttggacttaagatctcttccgccgccgaatcggagcctgatctcagtgtcactgtaaatggcctgaaaatgcccaatcctttcgtgatcgggtcgggtccaacgggtaacaactacaacgtcatgaagagaacctttgatgaangntggggggccgtnatcgccaaaaccgtatccttaaatgcatccaaaggtatcaacgtgacacctanatatgctccgntacnaaacggattcaatgg

SEQ ID NO: 12014 - DNA, 436 bp, Arabidopsis thaliana
  unsure at all n locations
  Clone ID: LIB25-089-Q1-E1-F1
aactctactctgacgccatacatanacaattcttaactttatcctctcatccttatcactcttcctcaaaacttcgaaaatgcatgcgatcgatttcaaagagattcaggagaagctctctgatggattccggccttggcaacgatcgtttcagttctgggctcgtgccactgatatctacaccggatacaaggtttctctttgattgatgggtatttcaacttcgtatgaacttcgtcaaggatgttaataagcacgangagatgtnggaaganacaacatgaaacttgctgctcaaaaagtttaatctatgtgctctgaacttggtggtttcatccttaagattgcacaagttctanggaaacctgactggctccagctggcntngggtgagaaaaactcgtcactttgtgtgaataaagctccctgccaaacg

SEQ ID NO: 12015 - DNA, 483 bp, Arabidopsis thaliana
  unsure at all n locations
  Clone ID: LIB25-089-Q1-E1-F10
tgtttagnccngnccgggtccganaataaaacgggncnacncacgcgtccgaattttttgatctctctctctctcttcncttgtantaanaaagctcacaacataaagaaattattacagaacaagcaagcaagaagaagaagaagaagcaataaaaattagtgcttttttatttagtgagagagaaaagctctgaagaagaaggaagttgttttcgagatgcgagctagtaaaggaaccttctctgtacntcttctctttctccttttgattctcattctgcccagtctttaattttttttcctttttcttcttcttctttcttcttcttcaatttcactcntgttgggtaagtcaagaatcgtccaaagtcttttttttttttcttgggttgtttggtattggatctgtttcttggttcttttaaagattggntaatactttgattttggggggttttgatttgatctagggtttctagtt

SEQ ID NO: 12016 - DNA, 474 bp, Arabidopsis thaliana
  unsure at all n locations
  Clone ID: LIB25-089-Q1-E1-F2
nngnngnaatgttacttcgcccngnccgtccaaaattanagggtcnacncacgcgtccgcacctccactgtcttaaatttcactatcttcttcttcattttccttccttctcacttcaaatccataatcgctctacttctctctctctctctagattcgaaaaaatggcgaaactggtgangttgttggttctctgtatcttaccggcgatagccatggcggcaaggacgggaaatattggaaagaatacaatggtggttcaaggtancacctactgtgacatttgcaaattcggttcgaaactcctgaatcctcctacttcatccccggtgcaaacgtgaagctatcatgcaacagacaggangacnatggaagaagtttacanagacnaanctgtatcagacatagaangaaantataagttcaattgtccacgaacatnacaganaccagatgtnccaangttttgcttgt

SEQ ID NO: 12017 - DNA, 374 bp, Arabidopsis thaliana
  unsure at all n locations
  Clone ID: LIB25-089-Q1-E1-F6
gcaaggaggaacctgccaaagaggaacctgccaaggagaagagcagcgaagccaccgaggccaaggaggctgttgcaatcaaggaggctgtcgcagtcaaagangcggcctaatcagctcagcttcagcagataaaagagacccgaatttttaagtgtacttcaagaatttgaacaaatcatggaaaattagtgtttcccactggctccaaactaacaatgtnntaacctaacctnaccaactttgttncctggcttggttttnacctggtaattaagaattatcaaatatcatccttgttccaacttaaaaaaaaaannaaaaaaaaaggggcgggccgcctctaaaanggattcaaagctttacgttacgcc

SEQ ID NO: 12018 - DNA, 379 bp, Arabidopsis thaliana
  unsure at all n locations
  Clone ID: LIB25-089-Q1-E1-D6
tagttgtggcgacttgcanacctgaagaacagattacttgcgangagaacgttccattcacatgtagccaaacagatcgtttcaacanacaagatttcgaaagcgacttcatcttcggtgttgcatcttctgcntaccaagatcgaaggcggcagaggtcgtggacntaacgtttgggatggcntcactcaccgataccananaaaaggtgggagccgatttggggcaatgggagacactacttgtgactcataccggactttggcaaaaanatcanaantgatggaagaacttggngttaaaggntacaagattcccccttgcntggtcnagaatccttccaaaaggnaagaggaatntgggaatcaacnaaagatgg

SEQ ID NO: 12019 - DNA, 502 bp, Arabidopsis thaliana
  unsure at all n locations
  Clone ID: LIB25-089-Q1-E1-B3
ggnnngnnngnaactgttactnttgcccgtgccgggncgaaaaattaacgggnccaccnacgcgtccgaaaagtcacaatttcngatttnaccgctaancccnaattcganagccaanggatatanatgggtcgataagtgcnanggattcttacataacacggttctcgttgcggcttctctcttcttcgtcgcttacttagcttacgaagcgaagaagagtctgtctaaactctcgaatcggagatcttatatcatgattgcttaataagggtgtccttggcttgttagcttgctcaatcttgcttggtgctgtctccaaggttgggaatgtactcctgggaaagaagttgtttggaatctgttaactttgttcacaacatctggaatgttgtttctgggaaataagcttggtggcttttctcttccaaggaaactatgcaagcggtgcaaaagcattaactaagaacgttcctaatctcgggttttantgttgctcttg

SEQ ID NO: 12020 - DNA, 128 bp, Arabidopsis thaliana
  unsure at all n locations
  Clone ID: LIB25-089-Q1-E1-B4
ttntaacaactcaaccttgcccgaatcaaactaancccccgaaaaaatnggattggcgccnttaagccgccgccgaacctataacccnggccgttccggggcaaagaagccaaagncctcnaattgaa

SEQ ID NO: 12021 - DNA, 428 bp, Arabidopsis thaliana
  unsure at all n locations
  Clone ID: LIB25-089-Q1-E1-B5
aaatgtaacggaccatactctgaagattggtttgcgatgggctggcaaagggacaacaggcattccgattagaggggtatatggtcctatgatttcagctatatctgtggaacccaatttcaaacctccggtatattatgacacaaaggatatcatactaaaagtgggggtacctgtcgctgcaagcaacacttcttttgtttatcatagtgggtgtattctggaaaaaaaggcgtgacaaaaatgatattgacaaagagctaaggggtctagatcttcaaactggaacttttactctacggcaagataaaagcagccactgataatttcgatgtaacaagaaagattggtgaaggtggatttggctctgtttacaaagggtgaattatctgaagggaaattattncagtttaacaactgccgcaaaa

SEQ ID NO: 12022 - DNA, 419 bp, Arabidopsis thaliana
  Clone ID: LIB25-089-Q1-E1-B7
ggggttgggaagacttctttaatgaatcaatatgttaataagaagttcagcaaccagtataaggcaactattggggctgatttcttgactaaggaagttcaatttgaagaccggcttttcactttacagatctgggacacagctggtcaagaaaggtttcagagtcttggtgttgcgttttatcgtggtgctgattgctgtgttcttgtatatgatgtcaactccgcaaaatcattcgaggatctcaacaactggagggaagagtttctgattcaaggcaagtccttcggatccaagagaactttccctttgttgttatcggtaataagatcgatgtggatggtggaagcagccgggtggtatcagagaagaaggctcgagcttggtgtgcctcgaaaggaaacattccatactatgaa

SEQ ID NO: 12023 - DNA, 403 bp, Arabidopsis thaliana
  unsure at all n locations
  Clone ID: LIB25-089-Q1-E1-C1
cntnaaaaggnatttcaaananacattnnnncaggnnatnaggcngcccctgttgtggttccnccccccgttgctganccancggccatcccagaggacatggncttaatgactgcattggagttgactcctaagaaagctcgtgcttatggtggtgttgttcgtggtctccatgagtgtgctnagcttaatgaagaaaccgtgtggctcaactcgttgtcntggctgaagactgcaaccaacctgattatgtcaaagcctgtgaaggctctctgtgctgatcacgaaagtcacggttgctaaacaattccaagtgccaagaaccttggcgaatgggctggtctctgcaaaattgattctgaaggtaatgccangaaagttgttggatgctcatgtcttgttg

SEQ ID NO: 12024 - DNA, 338 bp, Arabidopsis thaliana
  unsure at all n locations
  Clone ID: LIB25-089-Q1-E1-C11
tggtaactcctcctcngtncttgatttcatgtttttgatgatttanantgtttgtatccacatgttnaangttgtctttggtttggtttttaagttctttggatcanatacgattaangcagtgagaaagatgataatggcggtaacaacagagcattaggaaagcttctctcgacatcttgcttccttaccaacgttcggatttcgaagggatcttccgtgctatggatggtaaatgttttgagtcgtctctctaaaatgtancacatcttaaaacatgcctaaacctttttagttttcaangtttaccggtnnnaatncgtntgttaaaccctacg

SEQ ID NO: 12025 - DNA, 546 bp, Arabidopsis thaliana
  unsure at all n locations
  Clone ID: LIB25-089-Q1-E1-C2
gngnnnggaatgtttatgtntgccggcccgggtccgaaaattaacgggtcnacggcacgcgtccgcacaatcanaatggcgattccaatgtccatggcaatggcgactcctacagattccgtgagcagatccnggagtatgtcntctcctcanatcaagtcttccctccaacgcatcactccgaattaccttcctcgtcttctcgccgttcgggttactcctcggtctcccaatctcttctccttcactcccatctttctccgggtctcctctccgggtcaatcctctcctctcaatcggacttccagattggcaaaagcnttngagaaatgggattcaaaaattgttgacggtgggtgggtcgtatctacgcgaatgaagaacacnggacgaacgtgtttccgaaagctgaacaagaacaaccgggaccaagcgcaaaagctcttctggcgaanggactcaacgaactcaagctttcttaaagcatgggaagaatcaangaacgaactccgagctaagagctanttgcgaanaaggaagttcgtt

SEQ ID NO: 12026 - DNA, 391 bp, Arabidopsis thaliana
  unsure at all n locations
  Clone ID: LIB25-089-Q1-E1-C5
ggtggtggacgagctgccgctagctattgtgcgccgggtggtgaagaagaatctgtcggagtgttcgccggattatnacgtcagtattcacaaggaagctttgctcgcattctcagagagtgcnaggatcttcatccactacctctccgccacggcanatgattgttgctataactactctagtggcgaccgttcttgtgagaagcggtttttaagcttttcttaangttattacggcattgttttgtgttttgttgaagaatttccatnggcagccantgtcacanccaagctccaacaatgccgcatcaacagtctnctantcggcctaaaattagggcnnaggnaaggcnagccaaccggttcataatancatngctgaaaagcctcc

SEQ ID NO: 12027 - DNA, 438 bp, Arabidopsis thaliana
  unsure at all n locations
  Clone ID: LIB25-089-Q1-E1-C6
ataagtaaggttttgatctttttcaagatcaaacaaaaacaatggagttagagagtacgagcaatggccgacgtccgccgccaccggcagagattggccgtggggcgtacttggcgtgggaagatttgacggtggttataccaaactttantggtggtccgactcnaanattgctcgatggattaaacggtcatgctgaaccaagtcggattaaggccattaagggtccttccggattcggcaagtccacgcttcntgattctctcgcaggtagactcncaagaaacgtgattatgaccggtaatcntcnattgaacggaaagaangcaaagactaaactacggtcccntcgcttaagttacacaaagaggacattttgatgggaacactaacngtgaaggaaacaataacatactcaactcaancnacgggtatcaa

SEQ ID NO: 12028 - DNA, 67 bp, Arabidopsis thaliana
  unsure at all n locations
  Clone ID: LIB25-089-Q1-E1-C7
gcnacggtcttaagtgctccggcacttctgcagccgacaaagnctttttnagtcatttcctgatgag

SEQ ID NO: 12029 - DNA, 86 bp, Arabidopsis thaliana
  unsure at all n locations
  Clone ID: LIB25-089-Q1-E1-C8
ccttgattgactcacgcacaactctcacatctaaaaatgcaactggtcatgctcctggtccaacgttcaagggaaccaagttnnta

SEQ ID NO: 12030 - DNA, 365 bp, Arabidopsis thaliana
  unsure at all n locations
  Clone ID: LIB25-089-Q1-E1-D1
tttncaccatnncggctncgggattnctaccccgccttgcncancttcttccacggtagtcccaatggtgggcttgaancggactgattcgaaaaagctccgttcagatttcctccggccagattggttacnaagattcggagacaagtaagacacaagttactgtagaagctcattagctgtgaaaatgtcntgggacggtcctcttgcttccgtcaagttgattatccnnggaaaaaacctccgaagtttatcaagagcccaattnaagcaagcatgttgaaagaagaaanttagcaaatccgttcaagaaaacacaagtcaatcttggtgagannaatttgatggtaaggactccnctgttc

SEQ ID NO: 12031 - DNA, 493 bp, Arabidopsis thaliana
  unsure at all n locations
  Clone ID: LIB25-089-Q1-E1-D10
nnnnnngaacgtnagtngccggaccggtccgaaatncgggnccaccacgcgtccgcggattgttcacaacttcaaagcatcgaaaaggtttaaactttacgtttttctctggaacccgattcgaagaaatcatcaagaagtttcctttcactgatttctcaatctattcgtagctttcgcgcttatggaagattctggagtgaatccaatggattcaccatctaaaggcagtgactttggagtctatggaatcataagaggtggaatcgtggctttacttgtgcctgtgttactctctgtggtgttgaatggaaccaaaaaggggaaaaagagaggtgttcccatcaaagtaagtggcgaagaaagttacacaatgcgtcatgctcgagctcctgaattggttgatgtaccttggggaaagaactgctactaagcctggcttgtttgaancatccttgtaagaagttatccaaagattcggttacnaggaaac

SEQ ID NO: 12032 - DNA, 419 bp, Arabidopsis thaliana
  unsure at all n locations
  Clone ID: LIB25-089-Q1-E1-D11
tgttcatgccggtgaaagattaggccgtggtatagtgacggatgctatcactactcctgtagtcaacacatctgcctacttcttcaagaaaactgctgagcttattgacttcaaggagaaaaggagtgtgagtttcgagtatggtcgttatggtaaccctacgactgtggtacttgaagataagataagtgcacttgaaggggctgaatcaactttggttatggcatctgggatgtgtgcaagcactgttatgcttttggcattggttcctgctggtggacacattgtcactactactgattgctacaggaagactangatcttcatggagaattttcttcccaagttggggatnactgtcactgtgattgattctgctgatatcgcaaggcttgaanctgcantgaatgaattcaaag

SEQ ID NO: 12033 - DNA, 435 bp, Arabidopsis thaliana
  unsure at all n locations
  Clone ID: LIB25-089-Q1-E1-D12
gctagctagacaagatcctttttgtaccatatcaggatttatcatatatcatttctgttatgaaggaagtttctcatgaagtcgccttgatttatcgtctttgatgattanttctttgcaggcttttcctgatgctgcaacgatttccagtagagtctaaanggcggcgcaagaagctacaagaggttggctacgtgacaaccatatgctttacatgtttcctcatcaagatgtatcatgatgtgctttgatgcgtttgacgatgcagcagatcttgatgtcttaagatcatccaatcctaaacttcatatattacttgttggtggagatattgccatcgtctctggtcctctttatcctaagaaagcttccgccaaaacgcggtatcacacaagtaccatcaaatccaatgaacatgttcaagagaatccgaaa

SEQ ID NO: 12034 - DNA, 494 bp, Arabidopsis thaliana
  unsure at all n locations
  Clone ID: LIB25-089-Q1-E1-D3
gngnnggaacgnttntgtttgcccgngccggtcnaaaattaangggggcccggacncgtnngggaaanggaaaattcttgnggcattggnggcttcaagtccaacaggaggatggagtggtaggagtttaagtttacttgatccaacttatgcaagcaagtatattccaattattgcaagtgtcagtgaacatcaacctccaacttggccatcttatttcatggatatcaatgttttggctttcttggtccctgctggcatcattgcgtgcttttcgcctctatctgatgccagctcttttgtggtcctttacattgtaatgtctgtatacttttctggagttatggttcgtcttatgctcgtgcttgctccagcagcatgcatcatgtctgggattgcgctctctcaagcttttgatgttttcacgggttccaacaaataccagttaggcgcatcgtctaattccacagatgatgcagaggacaacacttcca

SEQ ID NO: 12035 - DNA, 526 bp, Arabidopsis thaliana
  unsure at all n locations
  Clone ID: LIB25-089-Q1-E1-B2
gnnngnngnaactgtttacgcttgcccgtgccccgtccgaaaaattaacggggtccacccacgcgtccgaaaaaacttttccttcttctttcctcaacctttgcttcaatccttcaacaaacttttctttttataaaagattttgcaagttaagttgtaaacctacaaaaaaccaaacatgggtgggttttgccacaagccaagtcactttagataaccacatctcccctaatcccccacatacaaaccggttccggttctcacttccattcaatccccgtcgtcaacctagccgattcgggaagcgaaaaacccgaatcgtaaaagcctggcgangagttcgggttcntcaaagggccgtaaancaaggagtccgaaccgaactcatgactcngttaaagcaagangctattggcttcctcggcttgcctcaatctcttaaaaaccgggccggtccaactgaaccgtacggttatggtaataaacggattggnccaaacggtgacgttggttggattgagtatcc

SEQ ID NO: 12036 - DNA, 523 bp, Arabidopsis thaliana
  unsure at all n locations
  Clone ID: LIB25-088-Q1-E1-H1
ngnnngnantgttactttgccgcccggtccgaataacgggtcgagcacgcgtccgcccacgngtccgcccacgcgtccggatgttttgaaagagttagctgggaaagtttctgctgaatacgactttatgggatgatgtctcagatatttctctggaagaagttgttgaggatgatgatgtagaaacatcaagaaacacaaaagtccaagacagatgatgaaaccgacacatctgcttatggaacagcatatgttgcatttgggagggggtgaaaggggaaaggaggcatgtcatgctattgcctcattatgtgaagtttgctctatagactctttgatctcaaattttattcttccgttacagggaagtaatgtatcaggcaaagatggtcgcgtccattgctcccttaatatcaatacaagaaactgggcgcttatcagctanaaggccaaatttgcanaaccaacctgcantggagaaagatcggtacaagattcgtaagggctttgtagcaaccccctg

SEQ ID NO: 12037 - DNA, 474 bp, Arabidopsis thaliana
  unsure at all n locations
  Clone ID: LIB25-088-Q1-E1-H12
cccccnnaannnaaaaannnnnnggcccccacgcgtccgcatttaacaatggcnttctcttctctatctcctctacctatgaagtcacttgacatttcgagatcctcatcttctgtctcaagatctccttaccattttcagagatacctattgagacgtctacagctaagttcccgttcaaacttagaaatcaaagattcatcaaacactagggaaggttgttgttccagcgctgagtcaaatacatggaagaggattttgtctgcagcaatggcggcggctgttatagcctcgagctccggcgttccggccatggcagagcttaacaggttcgaggccgatacacgtggcgagtttgggattggctcggctgctcagtacggttctgctgatttcagcaaaacagttcactccaatgaaaatttcagaagagccaactttacttccggccgacatgaagaaagtctganttca

SEQ ID NO: 12038 - DNA, 482 bp, Arabidopsis thaliana
  unsure at all n locations
  Clone ID: LIB25-088-Q1-E1-H8
gaatttcgtcttaaattcgctttctcatcttcttttacttctcggtttcaagatctctttcagagatttctcattttacttatcctcctgggcttgcgtgagtttaaacgtgcgacattgnttcctcaaccgtaatcaataaggttaacgttttcctggattcccgtaaagggaaagaaccntccctcaacaanggctccngatctttgcgggtgggaaagattggcttcnttcctttgggtaacaaaattttaaaagttgggattgaagtcctaaggttttatcatctgaggtttagatgtatcttctttctttgcttatgcttggttttactactgattatgattatgctggttaattggtgttgctttagggatttcacgttacacttgctcccatgggacaatgatgttttccagattcgccggtccatgcganacgctatcttcgtccaattaagagaagcgaaanccantttcgaa

SEQ ID NO: 12039 - DNA, 502 bp, Arabidopsis thaliana
  unsure at all n locations
  Clone ID: LIB25-088-Q1-E1-H9
nnnggnnnnnnggnatcttcnacgcctgnacgtaccggtccnngattcccgggnccacccacgcgtccggagaaatacagcattttgcccatcattgaagcacttgaacagggtgtgagggtggttgaactagatctgtggccggatggtagaggcagcatctgcgttaggcctagctggaactttgagaagcctctgaaattgcaagagtgtttggattctattaaagaacatgcctttaccaaatgtacatatcccttgataattacgttcaaggacggcttgaaaccggaacttcaatccaaagctactcagatgatacaacagacatttaatcatatggtatatcaccatgatcctcatagtttggaggtttttccttcgccacaacaactgcgaaataagatactaatatcaagaagacccccaaaagagttgttatatgctaatgatgatgatggaaaagttggcgtacggaatggggntgagataaagacaacac

SEQ ID NO: 12040 - DNA, 331 bp, Arabidopsis thaliana
  unsure at all n locations
  Clone ID: LIB25-089-Q1-E1-A1
nccaattcgggctnctggatcancnancagatcctcaagctctaggtatggtggaagatccaatcagcttgcatattctanggaaggtgntctgacaaatgaggggcattcanatgagggttagatnacatggagctgaagaanttacacatganatcacagaaacaatgcgtgtggaaatgggaatatcagtcagatcgtgcatggtatgatacagacnangggaactcactgtttgatgcggacagtgcatccttttttcctggnagatgatgcttctccacaagaagaagggaaactgaaactgggcaaaagaanactgggttatnaa

SEQ ID NO: 12041 - DNA, 503 bp, Arabidopsis thaliana
  unsure at all n locations
  Clone ID: LIB25-089-Q1-E1-A11
nnggngnnnnnngnantntttnttgccngccgtaccgaaccacaattctcgngnccgccacgcnnnagnnattgggcggacgcgtgggtggagagttgctgtcggagcgtcatagcttcaaggacgtttcatctgcggtcaagtggccgtctatttccctctcttagcttaactcatctcaagggcaagctatctctctccatcaactcgttttcctccaagattcagtctcatgctctccgaggagttggtataggcgagtcagataagaaaaatcccctgccgcgaggggccggagaaggagtcaaggaagatgcgaggagtaagctgcttcatgtagttttggtctctcctcagattcctgggaatacaggttgcattgcaagaacatgtgctgcctcagctgttggtctgcatttagtcgggccattangttttcaagtggatgacgccagagttaagcgagctggtttggattattggccctttgtggttgtcaaaac

SEQ ID NO: 12042 - DNA, 446 bp, Arabidopsis thaliana
  unsure at all n locations
  Clone ID: LIB25-089-Q1-E1-A12
agctatcaagccacccacttcacaagaccaacanaccaggcatttgttcgatngacattctaacattcctaagggatgtcatttgctactgggagggagtttgatgcaaactggctggttcctcctttgattcgcccttctgggacaaatcttgtcaacactgactggtcactccgaagaaggttacaagcgtaaaatttgtaggcgactctgatcttgttttgactgcttctgctgacaagacagtccgtatctggcggaatcctggggatgggaattatgcttgtgggtatacattgaatgatcattctgcggaggtgcgagctgtaactgtgcatcccacaaataaatactttgtctcggcatctcttgatggtacatggtgcttctacgatctgtcctctggctcatgccttgcacaggtatcagatgattcaaagaatgta

SEQ ID NO: 12043 - DNA, 498 bp, Arabidopsis thaliana
  unsure at all n locations
  Clone ID: LIB25-089-Q1-E1-A2
gnnnnnngnaactgttaccttgccgtaccgggtccgaaattncgggtcgacccacgcgtccgantggtantgctattgctattcagattcttagccgtggcttcttgcctctttgggctggtgttgttattacngcttccgattgtttttnatttttgttccaaagaaattacggtgtgaggaaattanaagctgtttttgcagttttgatcgcaactaagggtttgtcctttgcttggatgtttggtgaaacaaaaccgagtgggaaagaacttatgatangtattttactaccgagacttagctcaaagacaattaagcaagctgtaagtgttgttggctgtgttaaaatgcctcacaatgtgtttttgcaatccgntcctgtacaatcnaaggaaaatcnattccaagaagaaatccccggttcaaagaagcgcctaaatactaattgatngaatcaaccgtcccacttttcaaccccttcaagaataacntgtt

SEQ ID NO: 12044 - DNA, 440 bp, Arabidopsis thaliana
  unsure at all n locations
  Clone ID: LIB25-089-Q1-E1-A4
ccanttttattacngttactatcatccaaacccttggtatttgtanccatgagtcttgtttcagatctcatcaaccttaacctctcagactccactgacaaaatcattgctgaatacatatgggttggtggttctggaatggacatgagaagcaaagccaaggactctacctgnaacagtgactgacccttcgcagctaccaaagtggaactatgatggttcaangcacaggncaaagctcctgggtgaagacagtgaaagtcatcntataccctcaaagccataatcaaggatnctttccgtagaggaaacaacattcctgtcatgtgcgatgcgtacactcccgcnggttaaacaatcccgaatnacaaaanacacgctgcggctaaagtctttancaaccctgatgttgcanctgaagtgccaaggtatggtattga

SEQ ID NO: 12045 - DNA, 454 bp, Arabidopsis thaliana
  unsure at all n locations
  Clone ID: LIB25-089-Q1-E1-A6
gcncacgcgtccgcacacatcgataccatcaccagtttacagattcggatagggacccacatagtcctaacgaangattttggttcaagtcacctcctanggctatttgataccggttatcttgtagaaaagtgtggaanaaggacanatgtggaggacttaanaganggcagtgggtactataaattccctcccaaagaaanaagtccctttaccaacaatttctaacaatttgggttcctccctnctattaactttggtgggttggtcctttccttaactttggggaaatgggtatattttaataattccgttcccttttatttttaaaaaatttcctacaannaacataaaagntagttacaaatnataaatgaaannntgaaagaattccaatttttccaaggagtgtaaggtattggggtngcnatggagcatcnngtganttgcctca

SEQ ID NO: 12046 - DNA, 442 bp, Arabidopsis thaliana
  unsure at all n locations
  Clone ID: LIB25-089-Q1-E1-A8
cttcttgcttttgagaaaaaataattatatatttttatataggaaagggttaatttattaataaaaaaaaataaaaagaagcagaaaagagataatgcanggtggtangcttttgacggtgttggtgtgcctcgcctccacggtggcnttggttagcgccggtgacccttacttctantacacgtggaacgtaacctacggaacccgccgcgcctctcggaattcctcaacangtgattcccatcaacggacagttccctgggtcntaacctaaactcannctcnnacaacnaatgtccgtcatcaatgtctcaaaaaactcgaacaagccttcccccttgaactggaattggactccaagcacaaggaaagaactcatgggcaagatggtgtnaactgggaactcantgcccaatcccaacaanggaacaacttcaattac

SEQ ID NO: 12047 - DNA, 421 bp, Arabidopsis thaliana
  unsure at all n locations
  Clone ID: LIB25-089-Q1-E1-A9
aagaagaacaaaaaaaaaaaggaagaaaactttgcgtggatgaaaaaatggagatcggagaagaaaattctcgatgaccattgaccttcagaagagttgggaagtgaggactgatgtgttctggtggagaaggaaaacaatggagctgtggaaaagcgggtgtagtgagtttgcagaaagttggatctttggttcgagatttgagcgagccttgtctttcacagtcacggatacaggttgttataactatcggcaaaatgcttaagccagagaagtggcaagcgtcttttgatagcgacggaagagtttctggtttccagaangcgcttaaattaattattttaaggggaatcganccatcctattanagctgaagtttgggaaattcctccntgggttgttaagcctttaacaaacaccc

SEQ ID NO: 12048 - DNA, 96 bp, Arabidopsis thaliana
  unsure at all n locations
  Clone ID: LIB25-089-Q1-E1-B1
ccaggaatagtccttgcgctgcttgtgcttatcccgccgcncggcantaggacttacanctggagtgtgaaggcaatccgtagaaaggantactgg

SEQ ID NO: 12049 - DNA, 423 bp, Arabidopsis thaliana
  Clone ID: LIB25-089-Q1-E1-B10
ggagagaagcgtaagtcttgccggagagtcgagtgagctgaatggttggtactcaccattttccttcagtaattttctcagagagagctctttaatcgggaaaaatcttcaaatgcgtctggttttgttctctttttaatttttttcttgtgatttcattcatggagattgcaatttcgtataaaccgaatccgcttatctcttcatcgactcagttgttgaaaagatcaaaaagttttggtcttgttcggtttcccgccaagtatggactgggagctacccggaaaaaacagctctttcgagtctatgcgtctgaaagtagtagtgggtcttcatctaatagcgatggaggcttttcgtgggtgagattggctcagtctattcgccttggtgccgaacggattggggagaagattggagaat

SEQ ID NO: 12050 - DNA, 490 bp, Arabidopsis thaliana
  unsure at all n locations
  Clone ID: LIB25-089-Q1-E1-B11
anngttntgttgntcggccggtccannataacgggnccacgcacgcgtccgcactcaaatctctccttcctacttcctcggtttcatcgtccactgtctcaacaatggcgtcattgtcngtaccttgcgtcaagatctgtgctctgaacaggcgggtcggatctctccctggaatctctacncaaagatggcagncgcaacccaatgggatctcctttccctccgatgtttctcangaatcattctgcattctggaggttgcgtgcancaactaatgangttgtttctaantccactccaatgacnaatggtgggtanatgaacggnaaagcganaaccaatgttcctgaacccgccgagctctctgaatttatggctaaagtctctggtcttcctaagcttgtggattcaaaagacatantggaacttgaactaaagcagntcgactgtgatatngttattcgaaataaggaagccttacagcaaanct

SEQ ID NO: 12051 - DNA, 124 bp, Arabidopsis thaliana
  unsure at all n locations
  Clone ID: LIB25-088-Q1-E1-G8
gatggtatcnggaatacgatctagtctaanccccgacncacctctttttttccggcagctgtncgacgagtggacgatttctcaccggantggtggcaactggtgacttntcgacgtgggtngc

SEQ ID NO: 12052 - DNA, 94 bp, Arabidopsis thaliana
  unsure at all n locations
  Clone ID: LIB25-087-Q1-E1-C10
anaaagatatanagagaacacagatgaggcgaagagcgacgtatggttggtgtttcgtacggattttctcggtcaatctnagtttctccggnga

SEQ ID NO: 12053 - DNA, 165 bp, Arabidopsis thaliana
  unsure at all n locations
  Clone ID: LIB25-087-Q1-E1-C4
ggaatgataatatcgaagttgggaaaatcaggccaagcctttttgatgcgtttggtgatgattcgagcccgaaagtgaagaagtttatgaaagtgatcttagggtaagcttcaggctggaaatggagaagaaggtgganttaatgggaaatgcctttgggccaaa

SEQ ID NO: 12054 - DNA, 182 bp, Arabidopsis thaliana
  unsure at all n locations
  Clone ID: LIB25-087-Q1-E1-C5
gcggacgcgtgggcggtttcctccgatacatctcctcgtcgccgttcttcggattttcactcttctgctcgaaagggcagtgcttgagaatcattgaagaaggtgatcgctggtgctgttttgataactcaaagccgttttgctgaaaggagggttaccaaaaggttangaaggcntcaaag

SEQ ID NO: 12055 - DNA, 154 bp, Arabidopsis thaliana
  Clone ID: LIB25-087-Q1-E1-C6
atcatcatcatttctctctatctctttctaaaacacaaccatgactgtttcttcatctccatgggctctcatggctctctttctaatggtttcttcaacaatgggtaatgggctaattccctcccaacggcaaaggggcccaaattttggaatt

SEQ ID NO: 12056 - DNA, 184 bp, Arabidopsis thaliana
  unsure at all n locations
  Clone ID: LIB25-087-Q1-E1-C8
tttgcccgaaatcgttcgnnaaacccanaatccaancccttgtcnaattcatcgatgcccaaaccaaaattgaaaactttatcctcaagagattaggaaaatctcattcattagtgttagagaaatcccttttggggattatatttatcaagagataaaagattcgaaacttgnaagatgctcc

SEQ ID NO: 12057 - DNA, 201 bp, Arabidopsis thaliana
  Clone ID: LIB25-087-Q1-E1-D12
gtacctttaccggatccagaagcaagaagaggaatgttcgagatgcttataccgtcacaaccaggtgatgagccattgcctcatgatgtgttggttgagaaatctgagggctactctggttcagacattcgaatactttgtaaggaagctgcgatgcaaccactgagacgcacattggctattttggaagacagagaagat

SEQ ID NO: 12058 - DNA, 191 bp, Arabidopsis thaliana
  unsure at all n locations
  Clone ID: LIB25-087-Q1-E1-D2
gggcaatcgcataattcccaccggcgatcggagatgagcagcgcgagactgtgctctcttgtggcggagctaggttacgaaggcgccggaaaattggatcccgatagcttcgaatggccgtttcagtacgacgatgctcgacctatcctcgactggatctgttcctctcnttcgtccnttccaaantggtc

SEQ ID NO: 12059 - DNA, 161 bp, Arabidopsis thaliana
  unsure at all n locations
  Clone ID: LIB25-087-Q1-E1-D3
ctggtggaatgctggtctatgcgctggtattttaaccgcggtgactgtaattgtctatatcgaagaccggattggttggggtgtggctagcatcatactcacaatagttatggctacttcgttttttatccttcccggtatcgngcaaaacccggtttttt

SEQ ID NO: 12060 - DNA, 193 bp, Arabidopsis thaliana
  unsure at all n locations
  Clone ID: LIB25-087-Q1-E1-D4
taattcagatcacattcaagaatcttcttcactcacatctctgaaaaaatggcgagcaacatggaagttttctgcgagatcttaatcgcgatccttcttccacctcttggagtttgtctcaaacgtggcctgttgcactgtagagttcttgatttgccttgggtgcctgaacaatccttaagngaattaccat

SEQ ID NO: 12061 - DNA, 165 bp, Arabidopsis thaliana
  Clone ID: LIB25-087-Q1-E1-D5
aaaccaaaccaaacccatagggttgtgttgttgctgttctgttcctatcgaccacggcggcgacgaggcggagaagaccgacaaagcggagaagccagcttcgaaaccctctagcatttattttttaaaaagcgaaaattcattttaaaggggttttgggtcaat

SEQ ID NO: 12062 - DNA, 177 bp, Arabidopsis thaliana
  unsure at all n locations
  Clone ID: LIB25-087-Q1-E1-D6
gcccacgcgtccggtttacagggattggtattggtaaagaagatgattggatcgttgtagtcctcactaccaacacaccagaaggaagctattctacagctactcctacaaaacaagagtctaantggcttcacctttggtattggntcctccgnttagnttaattttaggtcnant

SEQ ID NO: 12063 - DNA, 186 bp, Arabidopsis thaliana
  unsure at all n locations
  Clone ID: LIB25-087-Q1-E1-D7
gcttttgccttctctaaccagtgtttcgtgattttgggtgatcctagaaatgggagatggggctgagattgtaaccaggttatatggggatgagaagaagcttgcagaggatggtanaattangtgagttggtgggatctgatgaagtgaaaggatagatgaaaganaggnagggtcnttntggaa

SEQ ID NO: 12064 - DNA, 193 bp, Arabidopsis thaliana
  Clone ID: LIB25-087-Q1-E1-E1
ggtctcatctacaacatcttagtacttaacttgccacttggctcgtttctcttctcgggtctcctcgctggcttcctctacgatgcagaggcaacaccaactcctggtgggggcaacacgtgcgtaggagctcattgctaccgtctcatcttcaatagtcaatgggccaatttaagcctttcctggtttaatt

SEQ ID NO: 12065 - DNA, 267 bp, Arabidopsis thaliana
  unsure at all n locations
  Clone ID: LIB25-087-Q1-E1-E11
ggnngccttgngtgcaaanggnngaacccggaatgccggnncgacccacaantccgcttctccggaagcttttgttcaatcttctggctgaagaaacgaggactcatgcctggattaacattctcaaacgaattgatctcacgtgacgaaggtttacactgtgatttcgcttgtctactctacacgctactcaaaacaaagcttagcgaagaacgcgtgaaatcaatcgtctgcgacgcggtcgaaatcgagagagagtttgtgtgc

SEQ ID NO: 12066 - DNA, 189 bp, Arabidopsis thaliana
  unsure at all n locations
  Clone ID: LIB25-087-Q1-E1-E3
agttctcttccggaaaagataggaaaggtaaagacacttgagaaaatcgacacgagggaatgcagcttatcgagcataccaaactctgtggttttattgacttctctacgccatgtaatatgcgantagagaggctttatggatgtgggaaaaggtccangaaagggcgggttggcaggggacctttca

SEQ ID NO: 12067 - DNA, 188 bp, Arabidopsis thaliana
  Clone ID: LIB25-087-Q1-E1-E5
gcggacgcgtgggctgttttatccgcttcaagtggtaacggcggctctgataacaacggaggaggtcttagtggtggtggtggtggtggcgatggaggtaagaatgatggagatggacacgggtgacgaggacagggataggaacaaggaaacgaagggcgaatgcctttttggttgaaaagggaagt

SEQ ID NO: 12068 - DNA, 179 bp, Arabidopsis thaliana
  unsure at all n locations
  Clone ID: LIB25-087-Q1-E1-E8
aaagatttctttgtaaagttggaggactatatggcctgcttcaagttggtatcacccgaatcaaaattcgagatggcagtgaaatcggataagctcttcacggctatgatttcattggatggtactaaaggcggatcagtggattcgtggnagggatgncttgcantgngtaatgattg

SEQ ID NO: 12069 - DNA, 198 bp, Arabidopsis thaliana
  unsure at all n locations
  Clone ID: LIB25-087-Q1-E1-C1
tggtgcaaaggtttaccaatgtgaaagatgcaagcagaaagttaaggctaaaaaacagctaactgtttctaaagcaccttacgttctaaccgtacatctgaagcggtttgaagcacacagatccgaanaaaatcgataggaaagtagattttacctcctggcaantttggaccantgaaaaacccctttttccgntct

SEQ ID NO: 12070 - DNA, 186 bp, Arabidopsis thaliana
  Clone ID: LIB25-087-Q1-E1-F1
cttggtcccattcattagttatttgcttaaagacaacatttttatatgcttccgttagctaaatccatcactccccccttcaatcatttccctgctctgctggccccagaaacagcttgctaggattcactacgacgtcgtttcgggttcgtctccaagctgtgggataatgggctaatttcctcc

SEQ ID NO: 12071 - DNA, 205 bp, Arabidopsis thaliana
  Clone ID: LIB25-087-Q1-E1-F12
tatctctccactcacaaatattttgatttgttttgtaactgtttctctttctctggagctttcttcttcttcttcaataatcgatttaggtttttcaaagctaagtgtttgtgttgtgataatgactagtagcgaggaagtagttgaagtgacggtggttaaagcacctgaagctggcggaggaaagttatcacgtcggaagatt

SEQ ID NO: 12072 - DNA, 186 bp, Arabidopsis thaliana
  unsure at all n locations
  Clone ID: LIB25-087-Q1-E1-F2
gctccgcttaagcaccatgaaggtcaccgtcgtctcccgcagcggcagagaagtcctcaaagctccccttgacctccccgattcggcgactgttgctgatctgcaagaagcgtttcataagagagctaagaagttttacccgtcgaggcaaagactggactccttcccggtgnactcccntgggna

SEQ ID NO: 12073 - DNA, 190 bp, Arabidopsis thaliana
  unsure at all n locations
  Clone ID: LIB25-087-Q1-E1-F4
ttctttttttttttttttttggtttttcatttaagtctattcaatcatggaaaccggtttaaacatcttaaagctatcgctatgcgtcagcctagtcgtggttggatcatatgctcaggctcccgcaccatggaatccatctaatgggtttcgtccggggaacantggtgaaccacctancggaaggtgg

SEQ ID NO: 12074 - DNA, 112 bp, Arabidopsis thaliana
  unsure at all n locations
  Clone ID: LIB25-087-Q1-E1-F5
tcagccgcacccaaatccggagctattccggtgccgttgtactgctgaaatcaccaaaaccgatgcttttgtcgaaggattccgggcgnaanatcaaacaangcctttccct

SEQ ID NO: 12075 - DNA, 166 bp, Arabidopsis thaliana
  unsure at all n locations
  Clone ID: LIB25-087-Q1-E1-F6
ctctacttgctttcacccttggtgtcaagcagatgatctgctgttgtaacaagatggatgccactacccccaagtactccaaggccaggtacgantgnaaatcatcaaggaggtgtccttcctacnttggaangaaaagggtttgggtntaacaaaacncccccgg

SEQ ID NO: 12076 - DNA, 156 bp, Arabidopsis thaliana
  unsure at all n locations
  Clone ID: LIB25-087-Q1-E1-F8
tttaacttcgaattagggtttatcaggattcagtcgcctgctcacttgaatttcttcgcaagctcaaaaagttccganatttttgaaggaaagatggtgaggccgtatgggattaanngtgaacaagaagaagaggaggaggagganagggaggag

SEQ ID NO: 12077 - DNA, 189 bp, Arabidopsis thaliana
  unsure at all n locations
  Clone ID: LIB25-087-Q1-E1-G1
ttttctcccttctcttcccgccgtgaatctggtgtctgtgtctgcatctccttccgacgaaaacagatacactcgagtgaagaaagtatgaaatttaactttaacgagacagaggatgcaccagattcacgacgatctccgacgcccaaaagagccggnttaagggtgggnttccctcctcccaaggaa

SEQ ID NO: 12078 - DNA, 176 bp, Arabidopsis thaliana
  unsure at all n locations
  Clone ID: LIB25-087-Q1-E1-G4
cgggcaatgtcagggtctggtaatgttatggtgacatcttcaccagagagcagcttagactcgcatgacattcacccgtttagagtttcgtctgaagcagaggatgcagccgcagcttaatgggttctcttctgctgtttgggtctgaatgggggtcaaaccaggaagnaggggac

SEQ ID NO: 12079 - DNA, 171 bp, Arabidopsis thaliana
  Clone ID: LIB25-087-Q1-E1-G5
catcaacctatagatctcactcacataatcaacctacaaaacaaaaacaagaatgggtagatccaacgagcaagatctgctctctaccgagatcgttaatcgtgggaatcgaaccatccggtcctaacgccggctcaccaaacggttctcggggttaagggggttcaaggg

SEQ ID NO: 12080 - DNA, 188 bp, Arabidopsis thaliana
  unsure at all n locations
  Clone ID: LIB25-087-Q1-E1-G8
tgatgtttggtatgtagcttttggatgagctacaaagtgatcagtggcctgttaagccaggtcatcggtcccaacgatgtacaggcgtggcattgagtgtagctgcaggattgcttggaagcttgcttgcctggaactggggctaagaattgtaagccttttggantcggggagnggtcccaantggt

SEQ ID NO: 12081 - DNA, 188 bp, Arabidopsis thaliana
  unsure at all n locations
  Clone ID: LIB25-087-Q1-E1-H1
gcaaattataatccttgaatactttggctatggcggtgtttatgtttaatgatcaaaaagctctgttttttatgcaagcgtgggtataaaatccagttccttttccgattttttgttcttccttcttcttcacttcctttttttcttctccatttctcaaaanaggccactcctttgccttaatcctt

SEQ ID NO: 12082 - DNA, 168 bp, Arabidopsis thaliana
  Clone ID: LIB25-087-Q1-E1-H10
tggttgttgtgtggggatttgcagctatctgtttcttcatagcattacctacacactcttggctatggctcatttcaatcttcaattcgattcaggtcttcatgacatgcgtcaagtacatcccacaggcaaagatgaacttcactaggaagagcacagtcgggtgga

SEQ ID NO: 12083 - DNA, 162 bp, Arabidopsis thaliana
  unsure at all n locations
  Clone ID: LIB25-087-Q1-E1-H3
ttgacactagcgatgataatagaacaccagttcaagaaaagaaaggcttgccagatcaatgcagtagtggtgcattgagccctgctgttgacactagcgatgacaggccaccagtttctgaaaagaaaggcataccangatcaacacagnttgccgggtgct

SEQ ID NO: 12084 - DNA, 195 bp, Arabidopsis thaliana
  unsure at all n locations
  Clone ID: LIB25-087-Q1-E1-H4
tncgaacagnngncatcnttancccggnagcaaactacactattgaattgcctgcttctgaggcttgcacgctttcatgggagcttagggttttgggtgctgatgtnagctacggagctcagtttgagccaaccacccgaaggaagctatgctgtgatcgtctctaagacacggaaagattgggactcaaacccg

SEQ ID NO: 12085 - DNA, 94 bp, Arabidopsis thaliana
  unsure at all n locations
  Clone ID: LIB25-087-Q1-E1-H7
ctcactcgtatctaccagcangctttanaagcttcaattgcccggaacttcacagatnatggtatgcattatcgttgtcatggtggtcatcaaa

SEQ ID NO: 12086 - DNA, 214 bp, Arabidopsis thaliana
  Clone ID: LIB25-086-Q1-E1-E3
ctccaacactaatctctttatgttcaacactatgatcagaggttactcgattagcgatgagccggagcgagcattttctgttttcaaccaattgagagctaaaggtttgaccttggaccgattctcgtttatcacgactcttaaatcatgttctcgtgaattgtgtgtttcaattggtgagggattgcatgggattgctttgagatctgggttt

SEQ ID NO: 12087 - DNA, 211 bp, Arabidopsis thaliana
  unsure at all n locations
  Clone ID: LIB25-086-Q1-E1-E7
ctatctctctcnaagtatcagcaganaaacaggagatttataganagagaaaaaaactatggctcacataaagatctaacagagacagtagtatagtcccacttccccaccaccaaagcttcgatcatcatcatcatcatcatcatggatccggatccggatcataaccatcgacccaacttccctctccagcttcttgattcttctaccc

SEQ ID NO: 12088 - DNA, 176 bp, Arabidopsis thaliana
  Clone ID: LIB25-086-Q1-E1-E8
atacacaactctctcttgtttttctttttctgtagattttctgtttattcaaaaacttatttttttcgtccaaaatttgactttcctgagaactaatcatcatcatcatgtccgatggttatcgtagttctaagaagacggatactatctgcgaagatgtttgtggacaggaagga

SEQ ID NO: 12089 - DNA, 63 bp, Arabidopsis thaliana
  unsure at all n locations
  Clone ID: LIB25-086-Q1-E1-E9
ncttgcnactaaggatgctcggtaaatctgcgaccaactactggtgcaagtcncagaaggaat

SEQ ID NO: 12090 - DNA, 217 bp, Arabidopsis thaliana
  Clone ID: LIB25-086-Q1-E1-F1
tcgctattttatcaccaatcttcttgaatcctctcatccaatcgtctgattctcatctttctccgttacttgtggatcttacgcaatgtatagagtttttgcgagccgagcactgagagctaagtctctctgtgacaaatcatccacctcgcttgcttctttgactctctccagattgaatcattccataccttttgctaccgtagatgccgaggag

SEQ ID NO: 12091 - DNA, 212 bp, Arabidopsis thaliana
  Clone ID: LIB25-086-Q1-E1-F10
tgatatatccggccagggtttgattctccgatctgcttgttttcgtgtacccttctttaaagttttaatctttcactcgaattttgagaagctaagctcgattcaagagcaagttcctagcttctgtttagggttttaggacttttgtaggattctggtacagttttcagtatctataggctttgttgtgttctacgtggtgtagatatgga

SEQ ID NO: 12092 - DNA, 203 bp, Arabidopsis thaliana
  Clone ID: LIB25-086-Q1-E1-F11
tgttcaaaacaagttcattcgatctatagagacgaaacaaaaagagagatcgtacgcaaaagtttccgatatggctcgctcgtttggagctaacagtaccgttgtgttggcgatcatcttcttcggatgtttatttgcgttgtcctctgcaatagaagaggctacgaagttaggatcagtgatagggatagatcttggtacta

SEQ ID NO: 12093 - DNA, 203 bp, Arabidopsis thaliana
  Clone ID: LIB25-086-Q1-E1-F3
tcgcttgtctgatttcaaaaacaatgagaagatagttctgattatataacacacaaaccctacttcattccttcatcatcgtctccaatcattacccaaagatccgtctttttctttacttcatgtcgaagcaaacgtacaaagtgtgtttctgctttcgccggaggtttcgttacactgcatcggaggcaccgcgtgagatc

SEQ ID NO: 12094 - DNA, 254 bp, Arabidopsis thaliana
  unsure at all n locations
  Clone ID: LIB25-086-Q1-E1-F4
cgngtcganccangcgtccgctgcaatcgcttcnatggnctaccaacattcagtgnnttcacctganattaatcttttgatcnctcacgcaatatgactgcctcgagttctcagtatcgtagaactcgaaactggagaattagaagttcgtcggaagataatgtancaatttcgagtgacggcggagatttgaagaattctctgtccggtantgtgggaaatcaagtggaaggagctattgagcaganaagaga

SEQ ID NO: 12095 - DNA, 210 bp, Arabidopsis thaliana
  Clone ID: LIB25-086-Q1-E1-G10
attgacggtaggagtcaccacttttggcggcgattccttgttctctattttttttgcacaagcaacatttagcttctgcaaactccagttcatctctcaaccctcatatcgccgtgttttctcgctctagtaccgcgagctcggacgaaccaggaagcaatccgttaatctagaagcggtgttgagaagatgacgattacatcaaatatc

SEQ ID NO: 12096 - DNA, 266 bp, Arabidopsis thaliana
  unsure at all n locations
  Clone ID: LIB25-086-Q1-E1-G12
gtangccttcaggtagcagtccggaattancgggtcgacccacgcgtccgcccacgcgtccggacacgtatagatttggttgcagcttcccatctttacttgaagtatgtggtgcagagaccgttaccatagaagacattagctccatgagtcaggattctcagtttggagagattaatcgcatgatatgtgtcatcccaaaaagtgcaggagacaaatttggccgtttcaagcatctcagtttgttatctagagtgaacgagatg

SEQ ID NO: 12097 - DNA, 218 bp, Arabidopsis thaliana
  Clone ID: LIB25-086-Q1-E1-G3
acaaatagaggcagagagcagaagaaagacgaaacagaggattttcatagagaatcctctttcttcctcctttcttcgccttcttctgttcttcttcttctcctgggtcttgaagatacatgaaacaacatctcattgttatgaatgttgatgcattcttttatgtaaacttaactttttacaggtgacctctctgaaagattgtaaggttccttaca

SEQ ID NO: 12098 - DNA, 215 bp, Arabidopsis thaliana
  unsure at all n locations
  Clone ID: LIB25-086-Q1-E1-G6
catttattaagctttcttcacgctttttaagataattaacagtcacgggttctaaaagctaaagggttttgcttcnaattcaagtgtctcccttcactttctcgctctctattgctgctctgtttctgctgtcaattccctaagaaagtcctgatttttagggtgatcgagagaagttgnagaatcatgttnattgagtttccttttttgatcca

SEQ ID NO: 12099 - DNA, 85 bp, Arabidopsis thaliana
  unsure at all n locations
  Clone ID: LIB25-086-Q1-E1-G7
gagttatgacctgacnccactnatagcgcctaacctggacagacacttggagtttcctatattcgagttccttcaagagngtcag

SEQ ID NO: 12100 - DNA, 212 bp, Arabidopsis thaliana
  unsure at all n locations
  Clone ID: LIB25-086-Q1-E1-G8
atctggtgctgtgcaatgtcagatgcttgatatgacatttccaggagttgtgccaatgcacaaggttaactttgatgcaaagaacgagtacgatatgatacaaagctacaaggncntgcaagatgtgttcaacaattctgaaaattacaaagccattggaaattaacaggcttgtnanaggccggccactgnnnaacntggantttctgcaa

SEQ ID NO: 12101 - DNA, 190 bp, Arabidopsis thaliana
  unsure at all n locations
  Clone ID: LIB25-086-Q1-E1-H4
nccggaatncccgggtcganccatncgtccgctgttttgtatctctctctctctctcactctttgtctctcncctaacctttattgtactagcataaccattaccatacatactcattcactatcacgccacatncgcagattcatcanatcttcttcttgttcatagcatcgnccatcactatntgggc

SEQ ID NO: 12102 - DNA, 217 bp, Arabidopsis thaliana
  unsure at all n locations
  Clone ID: LIB25-086-Q1-E1-H5
ggggacttaaggtcgagtcaccgtggagtgcaacctgcacatctttccggttaaagtaattctcggcataactttcagtgcatggatcgtacccggccggaaacttgtcccacaaatcgtcaaaantaaggagacgaggtccacaccancatccatggctcntgcagttttgaggaagataccaccaanaaaaccnaacaatgntanaanaatttnt

SEQ ID NO: 12103 - DNA, 217 bp, Arabidopsis thaliana
  unsure at all n locations
  Clone ID: LIB25-086-Q1-E1-H6
gagagtgcgatttggttggcggttttgaaccaagaggaatctttgattcagcagcctagcagtgacaatggaaactccaatgtgactgagacacatcgtaggggtaataacgctgacaggaggaaanctgtggtcaacagtgacagtgactatgatgttgatgggacagaggaagcttcaggttcagtttcatctaaagacagtagaagaaatcaga

SEQ ID NO: 12104 - DNA, 212 bp, Arabidopsis thaliana
  Clone ID: LIB25-086-Q1-E1-E11
cctagttttggtttctctggatctgaagaatctccatgactattctcatagatcgccactctgatcagaacgatgcaggagatgagattgtagagaagaatcaggggaatggtaaagaggaagaaacagagttggtgttagatgcaggtttcgaggctcctcacaccaactcttttggtcgcaccttcagggattatgatgctgagagtgac

SEQ ID NO: 12105 - DNA, 173 bp, Arabidopsis thaliana
  unsure at all n locations
  Clone ID: LIB25-086-Q1-E1-H7
atctttgattcancagcctagcagtgncaatggaaactcnantgtnacnganacacatcgtaggggtaataacgctgacaggaggaaacctgtggtcaacagtgacagtgactatgatgttgatgggacagaggaagcttcaggttcagtttcatctaaagacagtagaagaa

SEQ ID NO: 12106 - DNA, 196 bp, Arabidopsis thaliana
  Clone ID: LIB25-087-Q1-E1-A12
agtcaaaaagtctttcttctcaaatggatcaaaagcctcttggattgctcacgatccacgtcaagagagggattaatctcgccattcgcgaccatcgtagcagcgatccttacatcgttctcaacgtcgccgatcagacattgaagacacgtgtggtgaaaaaaaattgtaacccagtatggaatgaaagaaatga

SEQ ID NO: 12107 - DNA, 183 bp, Arabidopsis thaliana
  Clone ID: LIB25-087-Q1-E1-A2
agcttttagaggcttgtgctatgaattgcgagaaggttttctctgaagttgcttctgagaaagttcttgatgagatggtttggttaatcaagaacggagaagctgattccgagaacagaaagcgagcttttcagcttattagagcttggggacaatcccaaggatcttacttaatccttccct

SEQ ID NO: 12108 - DNA, 254 bp, Arabidopsis thaliana
  unsure at all n locations
  Clone ID: LIB25-087-Q1-E1-A3
tggtagcctgtnggaaantcgggagtnccaggntcgaattacgnggtccgcgcacntgnntcttgccantgctgtttcgagctctcctcaaagccctaattttctcctcttcttcttcattctctcaccatgaagctcgtcaggtttttgatgaaattgaacaacgaaacagtttcaatcggaggcttaagaacggaaccattggttcaatgggaacccaatttacctggntggtangaattggttttaaggca

SEQ ID NO: 12109 - DNA, 185 bp, Arabidopsis thaliana
  Clone ID: LIB25-087-Q1-E1-A4
gaaagtgacaaggagaggaagaagaagaaaaaaaacataatttgaggaagaagaaaaaaaattcggatttgttttttcaataaattgactaattgagtactcgtttaaaggaagtgaagagcggttttttggtagtggtggtcgagaaaagagagagtttgtctctgtgactcaggagtgaaaat

SEQ ID NO: 12110 - DNA, 180 bp, Arabidopsis thaliana
  unsure at all n locations
  Clone ID: LIB25-087-Q1-E1-A5
tttgtacacatacattatcactggggaggaattggtcaagcttgcaagggattacattaggtttcttatgggaagacctaagactgttcgattgacccgagccatggatagttggaacgggattcttggagaagatgtcgaggcaaagaagtggtatgatgaggtattgggcctagnaaa

SEQ ID NO: 12111 - DNA, 192 bp, Arabidopsis thaliana
  unsure at all n locations
  Clone ID: LIB25-087-Q1-E1-B1
acatttccttatgattgtttctgcactgagaaacgagctgaaccaggcctttgttattttaaggagcattgccttaggaagggacttgaagaaatttctcatggtggtttttgggctgtggataatctcggttgtgggaaactggttcaacttcttgaactccttggtantaccaatcctggtttttttggt

SEQ ID NO: 12112 - DNA, 202 bp, Arabidopsis thaliana
  Clone ID: LIB25-087-Q1-E1-B10
ctcgagagacgaatcgctctcagcttcttctagaaccttctccttctccttcgacgcatcgtcgccttcaagatcacactacctcgcacaacaatggagttctggggtgttgaagttaagaatggcaaaccacttcacctagatcctgggctagacaggctcgtgcacatctctcaggttgctttgggagagagtaagaact

SEQ ID NO: 12113 - DNA, 202 bp, Arabidopsis thaliana
  Clone ID: LIB25-087-Q1-E1-B11
gacttgaggtcgctgggaggcagcttaaacttgcaccaacctgtccagagggtacaagtttctggccacagttcgcttcagatgatggtgaggggggtctacctaaaatggcttttaataacctatcatcagctcacatggggagacatttcccaggaatattagcttcaacctccattgatggtggatctattcgaggtat

SEQ ID NO: 12114 - DNA, 197 bp, Arabidopsis thaliana
  unsure at all n locations
  Clone ID: LIB25-087-Q1-E1-B2
aaatctgaaaaatgtcacaagcagagaggagatagattaccgaggaagatgatgaagtggtcgatcgttaagagaatccccgtctatggaggttccttcatttctatgaaacatatgatgttagttccaagctgatttgagctgggagctgctcgtttctctgggtaatgccacctccttttgganttaaaaacaac

SEQ ID NO: 12115 - DNA, 157 bp, Arabidopsis thaliana
  unsure at all n locations
  Clone ID: LIB25-087-Q1-E1-B5
gtcttttgaagaagaagatcctgttttttggagatgcctgctgctgtanttgatggacatgatcaagtcactggtcatattatttccaccaccaatcggtggcaaaaatggatgaaccaanaacaggacaattaaggttaacaatgggcgggnagnc

SEQ ID NO: 12116 - DNA, 169 bp, Arabidopsis thaliana
  unsure at all n locations
  Clone ID: LIB25-087-Q1-E1-B8
cgattcgagagtagcaatggggattctatcatggttcacgggaagtcctaagccatcacagtccgagacgtctaagccggagatgattcagatgccgaaatcagaanactccagccccggggatgaatggagccaatagaagttcctcgggcccggattcggcgncgga

SEQ ID NO: 12117 - DNA, 385 bp, Arabidopsis thaliana
  Clone ID: LIB25-085-Q1-E1-G9
tctccggcaatccctaaacacggcggcattcccacggtggttcacttgcacggaggtatccacgaaccaactagcgatggaaatgcagattcatggttcaccgctggtttcaaagaaactggttccaaatggaccaaaaagactacacattacgtcaacaagcaacaacctggaaacatgtggtaccatgaccacgcggcagggttgaccagagtcaaccttcttgccggtttgttaggctcttacattctccgtcatagctcagtcgaatcgcctcttcggttacctaccggacgcgaattcgatcgtcctttggtcatctttgaccgatcttttcgtaaagatggttccatttacatgaacgctacagggaacaatccaacga

SEQ ID NO: 12118 - DNA, 409 bp, Arabidopsis thaliana
  unsure at all n locations
  Clone ID: LIB25-085-Q1-E1-H3
caagtgatccttcactctctatactgcgatttaccgttcttctgactcttgttgcgaattcggatcggctgacgcagctccgattgcacaacaatggcttctcgtatcatcaatcattccaaaaagttgaaacatgtttccgctttactgcggcgtgaccatgctgtggcagtccgctgtttctccaacagtacccacccctctctcgttggaagagaagatatcttcaaggcccgcctgaattattcctctgtagagaagaatttcaaaatgtgggtactggcaatgtaacaatgcttaagtgggtatttcaacaacgaagcacaaanactaagcagcccaatggcanggaccaaaaactantttaaggaatttataagctcccaaatgcgattagtgagaaggattt

SEQ ID NO: 12119 - DNA, 402 bp, Arabidopsis thaliana
  unsure at all n locations
  Clone ID: LIB25-085-Q1-E1-H7
agataggagaagggaacggagatgatccctacttattcactactaacaacttcgccggacgacaaacatgggagtttgatcctgacggaggctcgccggaggaaagacactccgtcgttgaggctcgccggattttctacgacaatcgttttcatgttaaagcaagcagcgatctcttgtggcgcatgcagtttctgagggagaaaaagtttgagcaacggatagctccggtgaaagttgaagactccgagaaggtaacctttgaaacggcgacgagtgcattacggagaggtattcatttcttctcggcgttgcaagccagcgacggtcactgggccggcgggnaaatgccgggccctttggttttccntccgccaatnggtgtttttgnccttananaaa

SEQ ID NO: 12120 - DNA, 385 bp, Arabidopsis thaliana
  Clone ID: LIB25-085-Q1-E1-H9
atccttctcgaacgaccccgagctcctggtaccaaagcggatgaatcaaaggcaacaggagatggcttgtctcagctgggtaaaggtggtgcagttctcatggtgtgcaggatatgccacaagaaaggagatcactggacatcaaaatgtccatacaaggatctagctgcaccaaccgatgtcttcattgacaagccacccacaggggaatcatctaccatgtctgctgcacctggaactggcaaggccgcgtatgtcccgcctagcatgagagcaggtgcagacagaagcgctgtgggttcagacatgaggaggaggaacgatgagaactctgtgcgtgtaaccaatctgtccgaggatacccgtgaacctgacttgatggagc

SEQ ID NO: 12121 - DNA, 215 bp, Arabidopsis thaliana
  Clone ID: LIB25-086-Q1-E1-A10
actatcagtctctcacctaacagcttccacgtgtcttcctcgcgaaagtaatggcattgccattgtatggttgcgttaagaattctacagatcattcattccccaattcaatacgaagacgaagttgtgtgataatcattcattaatcacacatttgatctgagcgagggagagagagaaagagatcttgtccgaacgatgaaggcggagaagaa

SEQ ID NO: 12122 - DNA, 218 bp, Arabidopsis thaliana
  Clone ID: LIB25-086-Q1-E1-A4
atagatagagggagaagaagaagacgaacacggagctgaaacaatgattacgatcccataccttaccgctgtatcaacgtatttcagctacggcttgcttttcgcgtttggtcagcttcgcgattactctcgcctaatcttcgattggtggcgcaccaacaatctccagggatacgctccgatctgcttggcgcatgaggatttctacatccgacgat

SEQ ID NO: 12123 - DNA, 194 bp, Arabidopsis thaliana
  Clone ID: LIB25-086-Q1-E1-A6
aaacttcgtctccgttaattcgcactctcgttctcgtcttcgtcgccggaggtcgtatcaagtcagccctcaacgatccgatttgttttttcagacaaaggttgattctctgggtatgagttttcttctatgagacagacatgttgtatttggtgcttaatgactaggtaatgaaggctatatgtgatagattt

SEQ ID NO: 12124 - DNA, 209 bp, Arabidopsis thaliana
  Clone ID: LIB25-086-Q1-E1-A8
atgttctacttcagcacgcattctctactcgataagaagatgatgtcaactacgatacaagccatcaagatatcaaagcaactaggcaatgtcattttttatgacttgaatctccctttaccactatggcactccagcgaagaaaccaagtctttcatacaggaagtgtggaatcttgcagacgtcattgaaatcacaaaacaggaaca

SEQ ID NO: 12125 - DNA, 222 bp, Arabidopsis thaliana
  Clone ID: LIB25-086-Q1-E1-A9
ttttttttggtcaaagtcttttttagaccccctttatttctaattttcccttaataaaatagtagagagtaaactataaaagcaaacaattaaattcattagcattaaaaacataacaagatctttagaaccacaataatagtttgatactaaataagtaaactcttagagaggtaagtatatataaccaactactactagagaggtaaacaaaacattcct

SEQ ID NO: 12126 - DNA, 214 bp, Arabidopsis thaliana
  Clone ID: LIB25-086-Q1-E1-B2
gccagattctctgaaatggtgttttgaggctgcatggatacttgcgctttcttatttcattgcatacttggagactattgctatcgcaaattttccttactatgagtttgtggaccgaagtgccatgtacagagttggatgtcttttctatgccatttacttcattgtgagcttcccaatgttcttcaggatggatgagaaatcaactgatgaa

SEQ ID NO: 12127 - DNA, 224 bp, Arabidopsis thaliana
  Clone ID: LIB25-086-Q1-E1-B4
agagcttcatcatccatgtattagtagaaatgtggggatgcttcttcagcagtataagtgttttggatcatcagcagcttctttaattcagagaaaccctttgttttcgtcgttggattcgaaagatgttagctactttaaggagatattaggtgaaaaaaacgtggttgaagataaagaaaggcttgagactgctaatacagattggatgcataagtacaaag

SEQ ID NO: 12128 - DNA, 214 bp, Arabidopsis thaliana
  Clone ID: LIB25-086-Q1-E1-C11
gttgagaagaagaacatcttccccactctctcccttcttcttcttcttcttcaactcaaaaaacttctctctctctctctctctctctctgaatcaattaaaaaacggttttgggttcttgtcctctgttctctagtggcttctattattctcattggtggctgttccagctctcttaaggtctccttagtgtgatctcagatctgattggtcc

SEQ ID NO: 12129 - DNA, 270 bp, Arabidopsis thaliana
  unsure at all n locations
  Clone ID: LIB25-086-Q1-E1-C12
ttggtagccttcaggtanccaatccggaattaccgggtcgacccacgngtccggaaaataagaaaaaacaaaagatgaaaaccattatcctttttgtaacatttcttgctctttcttcttcatctctagccgatgagacagagactgaatttcattacaaacccggtgagatagccgatccctcgaaatggagcagtatcaaggctgaatggaaaatttgcgggacagggaagaggcaatcgccaatcaatcttactccaaaaatagctc

SEQ ID NO: 12130 - DNA, 216 bp, Arabidopsis thaliana
  Clone ID: LIB25-086-Q1-E1-C3
gctaaatcttcaattcacatataccaaagaaaaaaaaacttcagattcattaagtaaaacagaaaaatttctaccttcaagaagcgtcctcttctgttctcaccgatatcgaagtaaaacacctgaataaagcaacaacagcagaaattaaagagagtggaaaagtcaacgatcgccagaagagagtgatgataaagttgaaaccttggaatcaac

SEQ ID NO: 12131 - DNA, 220 bp, Arabidopsis thaliana
  Clone ID: LIB25-086-Q1-E1-C4
cacccctgattgcttagctggattgacatttgtaattagcggaacacttgacagtttagaaagagaagaagcagaagatctgattaagcggcatggtggtcgtattacaggctctgttagcaagaaaacgacctaccttttgtgtgatgaagacattggcggaaggaaatctgaaaaagctaaagagctgggcactaagttccttacagaggatggccta

SEQ ID NO: 12132 - DNA, 281 bp, Arabidopsis thaliana
  unsure at all n locations
  Clone ID: LIB25-086-Q1-E1-C6
ggtagcctgcattncgnaagccggaatncacgaatcnggacatnccgggncgacanatccatcagcccacgcgtccgataaaatcaatanangagagcttttctaagaaaggcacaatcgttgcctcgtttcaagagcttttctctctctcttgaagaaaattttctagatcnagatttagttttctgggtagtgttcttcatcgcaggccaaagtctttatacgatggttcaggagtgagctcgttactcttcgccgtcaacggtggtnaggtntgnctc

SEQ ID NO: 12133 - DNA, 220 bp, Arabidopsis thaliana
  Clone ID: LIB25-086-Q1-E1-C7
cattgtccggttctccaccgttatccatgagcgtggaagtcccgagaccttgagagaccctcgtggttttgcagtcaagttctacaccagagaggggaactttgatcttgttggaaacaactttcctgttttcttcatccgcgatgggatgaagttccctgacatggtccacgctcttaagccgaacccaaaatctcacatccaagagaactggagaatc

SEQ ID NO: 12134 - DNA, 405 bp, Arabidopsis thaliana
  unsure at all n locations
  Clone ID: LIB25-085-Q1-E1-G6
gtatggagtctancttgcatagtgtgattttcttaggtttgcttgcgacgattctggttacgaccaatggccaaggagacgggacggggctaaatgcanaagaaatgtggccagtggaggtggggatggagtatagagtatggaggagaaagctgatgacgccattggagctgtgcttggagtgcaaatgctgctcctccaccacttgtgccaccatgccttgctgtttcggcatcaattgccagcttcccaacaagccatttggcgtttgtgcctttgttcccaagtcatgccattgtaattcttgctccatttgactgtatttttgcttctaccaacatgatgctataaactaanattcangnaaggangaagcacannnccnttgangnatgggnnnaccng

SEQ ID NO: 12135 - DNA, 254 bp, Arabidopsis thaliana
  unsure at all n locations
  Clone ID: LIB25-086-Q1-E1-C8
cgantcnagncatcccgtggncgacacaggngtccgcccangcgtccggctctgcgaatcttcgaaaatgggtgcgtacaantatgtanctgagctaagaagnaaaaaatagtcctatgtgataatgattcctccanagggttaggtgctgggagtacagacagcaaccttcgantgttcgtctcgtcaggcctactcgtcctgataaggctcgtcgtttgggttacaaggccaagcagggctttgttgtgtac

SEQ ID NO: 12136 - DNA, 200 bp, Arabidopsis thaliana
  unsure at all n locations
  Clone ID: LIB25-086-Q1-E1-D1
ccctcgtcttcacttcttcatggttggttttgctcgtctcacctcaagaggttcacagcagtatcgctccctcacagtccctgagctcacccaatanatgtgggactcnaagannatgntgtgtgctgcanagccaaggnacggacgctacntcacaggctctgccatgttccgtggcaagatgagcacanaggaagntg

SEQ ID NO: 12137 - DNA, 197 bp, Arabidopsis thaliana
  Clone ID: LIB25-086-Q1-E1-D12
gatgatcaaagtggtgatagattgtcctcttttattatggtattcttttcgaaattggtggaaaacagagacaatttataggtcggtgacttgcaagtcgtcgtttaaaatgttaagaaaaatcttgtaccattgttgtgttatgtttcctctttgagtgtctgtgttttatctaagtcttgagctataagctgtgg

SEQ ID NO: 12138 - DNA, 224 bp, Arabidopsis thaliana
  Clone ID: LIB25-086-Q1-E1-D3
gcggacgcgtgggctttccttgtgttccctccaccgaacgaggccgcggcattttgatctccggcgattccaaatccgacaccattctctactgcaacggccgctctgtcttcatccggagcctccgccaactccaagacgtccaagtttacggcgaacatggctatgctgttaccgttgctcgctactctcccaacggcgaatggatcgcttccgctgatgtc

SEQ ID NO: 12139 - DNA, 210 bp, Arabidopsis thaliana
  Clone ID: LIB25-086-Q1-E1-E1
ctttgatcgaaatggcgtcgtcttctccaactcagctagctcacgtcccgattcctccagaaccaggaggaaggtcgccgacacaagaagctaatgagccaccagttccgatttacattgtgacggatccgtttcaacttcctgctgatttcctaaacccttctcctgaaaagaaattggttatcggttttgactgtgagggtgttgacc

SEQ ID NO: 12140 - DNA, 194 bp, Arabidopsis thaliana
  Clone ID: LIB25-086-Q1-E1-E10
aatactttgggaactagcaacattgagattaccatggagaggaatgaacccaatgcaagtagttggagcagttgggttccagaatcggcggcttgagatccccaaggaacttgatcctgtggtgggaaggatcatcctggaatgttggcaaacggatccgaatctgcggccgtcatttgctcagctgacggaag

SEQ ID NO: 12141 - DNA, 245 bp, Arabidopsis thaliana
  Clone ID: LIB25-084-Q1-E1-A1
ctgtagagtgaagtttgatttatttagagagataagttaaaaaaaaaatggtcggtatggatttgttcaaatgtgtaatgatgataatggtgttggttgtctcttgtggtgaagctgtttctggagctaagttcgatgagctttatcggtcaagctgggctatggatcattgtgtcaacgaaggcgaagtcacaaaactcaagcttgacaattactctggagctgggtttgaatcaagaagcaaa

SEQ ID NO: 12142 - DNA, 283 bp, Arabidopsis thaliana
  Clone ID: LIB25-084-Q1-E1-A11
tcgtcctctaaattgtcgaaaatgctggctaggctcgctgcgaagcgtcttctcgagatccgtcaagttttccgtcaaccaacctctcaggtgactcgtagcttatcgacggccttaaactaccatctggattctcctgataacaaacccgatcttccatgggagttttcagaggctaaccaatctaaggttaaggagattctctcttactatccatccaattacaagcagtccgcagttattcctctcctagatcttgcacaacagcagaatggaggctggc

SEQ ID NO: 12143 - DNA, 249 bp, Arabidopsis thaliana
  Clone ID: LIB25-084-Q1-E1-A3
ttgatttgttttgtaactgtttctctttctctggagctttcttcttcttcttcaataatcgatttaggtttttcaaagctaagtgtttgtgttgtgataatgactagtagcgaggaagtagttgaagtgacggtggttaaagcacctgaagctggcggaggaaagttatcacgtcggaagattcggaagaaagacgccggtgttgatggtttggtgaagtgggagagatttctcccgaaaatcgcgctt

SEQ ID NO: 12144 - DNA, 242 bp, Arabidopsis thaliana
  Clone ID: LIB25-084-Q1-E1-A5
ttgattttgatttcagtctatgaagagaaagaagaatatgtttgttcatttcattctagatcctatttcgattagtgagactgcaacagaagcttcttttgctgctagatatggttgcttggtacttattgaaaacgttgagagattggatgttggtgcacttgtttcgataagaggcgcgggtcgtgtgaagatttcgaggtttttaggggcagatccttacttgtccggagaggtcagat

SEQ ID NO: 12145 - DNA, 280 bp, Arabidopsis thaliana
  Clone ID: LIB25-084-Q1-E1-B11
ttttgttataacgcacgacgccgtttcaaacaacttccttattagctagctccctcccggcggcaaacaccagaagatccaccggttttgatctggttgtttgtcgtcgatatggcgaggatctcgtgtgacttgagatttcttctcatcccggcagctttcatgttcatctacatccagatgaggcttttccagacgcaatcacagtatgcagatcgcctcagttccgctatcgaatctgagaaccattgcactagtcaaatgcgaggcctcatagata

SEQ ID NO: 12146 - DNA, 195 bp, Arabidopsis thaliana
  unsure at all n locations
  Clone ID: LIB25-084-Q1-E1-B2
gcgtcagcggncgcgtgggcggacgcntgggtgnnnaacccgttaatctctctctgtccctttcttcttcttttttcaagaacaataaanaaatgtctcaagattctgcaactactactccgccgctacctttaacctccgacgtttcaatgccttccggtgaanaagatganccatagcatgttcatcggaaga

SEQ ID NO: 12147 - DNA, 244 bp, Arabidopsis thaliana
  unsure at all n locations
  Clone ID: LIB25-084-Q1-E1-B4
aactgttgagggattttcgcatgttatgtttgcaactggtcgcaagcccaacacaaagaacttagggttggagaatgttggcgttaaaatggcgaaaaatggagcaatagaggttgacgaatattcacagacatctgttccatccattcggtcagtaacatccccaacagcccagatggatggaacagatgtctgtgaatattcgtctgggctgttggggatgttactgaccgaatcantttga

SEQ ID NO: 12148 - DNA, 246 bp, Arabidopsis thaliana
  Clone ID: LIB25-084-Q1-E1-B5
ttgcagaaagaggttataaaaggctccgaaatatttcatccgaaccataaacttgttaacacacctaaagaacaatgatgcagtaatgggaatgaatacacacgtccatttgactgctgtgatggaaaggattttataagcaaatagtcgtaaatactggcggaagaaaatgatattttacggctgaatcatcaccggagaatgagaggaagatgttcgcttacaggactctgtttaggattgacc

SEQ ID NO: 12149 - DNA, 244 bp, Arabidopsis thaliana
  Clone ID: LIB25-084-Q1-E1-B7
tggtctcataattctctctatatcttttatcactttcgaagattcctcttctcgcccacaaatcaaaatcatttcttttgccgactaattgaatttcttagaattcaacatacgcaatgaaaatgttctcgtcacaaagattagactaatccgactgtgtttttaatcaatcatcattttatttaggggagagaagttgtaaagttttgatttttttttctgggttttttctgtgagacccaga

SEQ ID NO: 12150 - DNA, 283 bp, Arabidopsis thaliana
  Clone ID: LIB25-084-Q1-E1-B9
ttgccaattttcttgtaaattcacctctttccttcgtctatctatcctcccttccgcaacattgattttgtttgatgatcgttgggttttgaaagaagagcaatgagcaattatgcagccggactcggtaagcctggctcaggtaaaaggagaatcagagatcttttaaatcaacctgataaccgagtctgcgctgattgtggcgcttctgatcctaaatgggcatcagcaaatatcggagtattcatttgcttaaaatgttgcggtgtgcacaggagcctct

SEQ ID NO: 12151 - DNA, 67 bp, Arabidopsis thaliana
  unsure at all n locations
  Clone ID: LIB25-084-Q1-E1-C10
ngctctctcatncctttcgtcatctactctacacacaaccatcnctgcattgaaatctcctcatcgg

SEQ ID NO: 12152 - DNA, 276 bp, Arabidopsis thaliana
  Clone ID: LIB25-084-Q1-E1-C11
acttcgccagcgttattgttaacaagaatcatcagattagtcgccgtagatctgaatcaacgtcgtaacagtagcagaattttgcggtgaaacgatggttttggttacgtctgtgcgtgattacattaaccggatgcttcaggacatctccggcatgaaggttctcatactcgactccgaaacggttagcaatgtaagcattgtgtattcacagtcagagctgcttcagaaagaagtgtttctggtggagatgatagattcaatatctgtgtcaaa

SEQ ID NO: 12153 - DNA, 245 bp, Arabidopsis thaliana
  Clone ID: LIB25-084-Q1-E1-C2
agtctcaaaggtatgactgctcttgtgaccggtggagccagtggaatcggttatgccatagtagaagagttggctggttttggagctagtatccatgtatgtgacatctctgaagctaagctcaatcaaagtttaagcgaatgggaaaagaaaggttttcaagtaagtggctcagtttgtgatgtagcctctcgtcccgagagagaagaactgatgcaaaccgtctcctcgcagttcgatggcaa

SEQ ID NO: 12154 - DNA, 251 bp, Arabidopsis thaliana
  unsure at all n locations
  Clone ID: LIB25-084-Q1-E1-C3
aatcacatttttatataactgttaacataataatctcagcctcatcaacacacatatatagatagccaacatcacacaaacatagagattccaaaaaataaaaataangaaaacataaatcctctgaggaaaaattccgatgagatgacagaaggtggagaatattctccggcgatgatgtcagcagagccattcttgaccatgaagaagatgaagaagagcaaccacaacaagaacaatcagagaaggtt

SEQ ID NO: 12155 - DNA, 224 bp, Arabidopsis thaliana
  Clone ID: LIB25-084-Q1-E1-C6
ggctcagacccaccaataccaattttttaaagagatttctgtcacaagtaagaaagaagcactaattacaaaaaaaaagaaaaagaatcaatcttttgttcttcgattcgatttctaatcaattagattgtttttgttttgtttaacatcagttgcgaatcgagctggattcttgggctcgctttttctttcaatcaaaagtttcgatattagtgaaggataac

SEQ ID NO: 12156 - DNA, 230 bp, Arabidopsis thaliana
  Clone ID: LIB25-084-Q1-E1-C8
acaaaaaaactcttttctttttgtctgctcgtttttcttttcataatgggagccttggaagcagaaagagccgccaacaatgctacggcgttagagacacagtcgtcaccggaagatctcggtcaaccatctcctctgcgtaagatcatctccgtcgcttcaatcgccgccggtgtacagttcgggtgggccttacagctttctcttctgactccttacatacaactcct

SEQ ID NO: 12157 - DNA, 282 bp, Arabidopsis thaliana
  unsure at all n locations
  Clone ID: LIB25-084-Q1-E1-C9
cgagnccattcacgatgatnaacagcttggtanctccaatttcgccgtcgtcctcgtacaaatccccatgttcancgaacganaggtttataagctatcaataggagcggcgtgtggactttcctggccgtccgatcgtctcgtgattcaagtgttanatgactctacagatcctactgttaagcaaatggtggaagtggagtgtcaaagatgggcaagtaaaggaatcaatattaggtatcaaataanagagaataganttggttacaaagccggtgcttg

SEQ ID NO: 12158 - DNA, 232 bp, Arabidopsis thaliana
  Clone ID: LIB25-084-Q1-E1-D1
caatttctcgtttttttttgtttatcatcaaaagttttaatctaaattacgtatcaaattccgagcaagatgactattcttgttgaacattttgttcctgattcaagagtggatgaaaagaaagtgatagaggagagggataatgaattggtgttggatggaggttttgtggttccaaaatcaaaggaaactgatgcattcgatgctcctgatatgaatttcttgggccatt

SEQ ID NO: 12159 - DNA, 279 bp, Arabidopsis thaliana
  Clone ID: LIB25-084-Q1-E1-D11
ggaggctgatgatgaagctgtggaaacgggcttccggtgctctcaaagaccggaaaaccttgtttaccatcggcttctcccggaaaacctccttccgcaaccctgaccttgattctgccatcatccacgcaacctctcacgatgactcatctgtcgattaccacaatgctcaccgtgtctacaaatggatccggtcctctcccgccaatctcaagccgcttgttcatgctctttcatctagggttaaccgcacaagaagctggattgtagccttgaaag

SEQ ID NO: 12160 - DNA, 248 bp, Arabidopsis thaliana
  Clone ID: LIB25-084-Q1-E1-D3
agatataactttgcaccttcttcgtttggtgcggtcagtaaattagaagtatcaagtggtggtgataaagaacgggtctttaaatcatttggattgatttatagcaaacctcaaggtttagtcagactttattccgcaagagatgtgttttcacggttctttggcatccacaagctttcttctatagctgatgctaaagataaaggagatgaggtagttagggaagaggagctgtctgaatcagagga

SEQ ID NO: 12161 - DNA, 63 bp, Arabidopsis thaliana
  unsure at all n locations
  Clone ID: LIB25-084-Q1-E1-D4
tttggtgttcggtgaanccacttttttttttgttaattcctctgtttccttggaattgtnttc

SEQ ID NO: 12162 - DNA, 233 bp, Arabidopsis thaliana
  Clone ID: LIB25-084-Q1-E1-D5
ttctataatatatcaaccgttacaaagttttaattacataaagctataacgttttgtctgaattcgaaaaaaatggtgaagttgttttagccaccaccggatttatagatggcggcgtggaagtcatggattgtggcggagaaagcacgaagatgtttaaggacgatgttctttgtggcagcaatgacggcgtctctgttagcttcttcattaccggttctgatcacggtggc

SEQ ID NO: 12163 - DNA, 224 bp, Arabidopsis thaliana
  Clone ID: LIB25-084-Q1-E1-D6
ttgaaatcgttaatcgggtgtttacatggagttgcttcaatggagaaagataacaaaaccaagaatggtttacatgtaggagaagaatcagatagagagaaaggaatgaatttgcacattcatattcctgatggtttaccaaaatctgaacaagagttggaggaagaagagaaatcgaaaatgccggattcagctttcactagattgcttagaagtaaaggaac

SEQ ID NO: 12164 - DNA, 233 bp, Arabidopsis thaliana
  Clone ID: LIB25-084-Q1-E1-E1
tcttaaacccctctccgattttgatttctgcttgaaattgttttccccgagatctcaatttcgataatcggaaaacgaaaaagatggtttggtttcaatgcgaagactgtggagagagtctgaagaagccaaaggtcccgtctcacttcaagatgtgcagagccaacaagttatcgtgcatcgattgtggagaaatgtttgggagagatactgtgcaaggacataaccaatgc

SEQ ID NO: 12165 - DNA, 283 bp, Arabidopsis thaliana
  Clone ID: LIB25-084-Q1-E1-E11
gcccacgcgtccgctccgatgataccggtgggaccttcttctttcatatgcgccatcggaggctctgttgaggagaaatcaacggctgcttctctgccgcgttgggtttcccttcgtcgtcttcgtccgcttgagtttcttcggatcggtggtaagagagaggaaaagggaacggtaagagacgacgacgccgttttgttggagagaagggaccggaaccgcaacgaaaacgataacggaaactgggttttgaaaattttggaggttggatcaatctggaaat

SEQ ID NO: 12166 - DNA, 396 bp, Arabidopsis thaliana
  unsure at all n locations
  Clone ID: LIB25-083-Q1-E1-H8
accaccaataatgtcttcttctccggcgattcttcccgtcaccaaccagcaagcagccactcaatctcaacctccaatcaattctcacgccttccgtactttcctctcacgcctctcgtcctctctccgcgaaagcctctctcaacgccgtccatggctagaactcgtagatnggagctccttcgctagacctgactctctcancgattccttctcccggatncgtaagaatctcgcttacttnaaagtcaattactccgcaattgtctcgttagtccttgctttctccctcctctcgcatccattctcgcttctcgtcctcctctctctcttangntcctggatgtttctctacctcttccgatnttcaagattagcctttggggtctctttggg

SEQ ID NO: 12167 - DNA, 248 bp, Arabidopsis thaliana
  Clone ID: LIB25-084-Q1-E1-E8
ggggaagagggtatattctctgttttgattcgcttctgtcttaacacattgaaattttccatagaagattccattgtgctcttttaatcctcttctctttctctctgttttaaatacctgtctttaatcgcttctctctatctctctctcttgttaaatctcatcggagttcaatttcaggactctcggcgctcttatgaagtgattgtgaagatttgcgtacactaagcctttgcttcagaaagtta

SEQ ID NO: 12168 - DNA, 66 bp, Arabidopsis thaliana
  unsure at all n locations
  Clone ID: LIB25-083-Q1-E1-F6
ggtacngatctgaccgtntcaagtacttgggtcaagtctctggcgatncaccgatctatgttatcg

SEQ ID NO: 12169 - DNA, 392 bp, Arabidopsis thaliana
  unsure at all n locations
  Clone ID: LIB25-083-Q1-E1-F7
tctgctcaccaacgtctctttcctcctccttcgctctctcttctgctcttttagtccctcgttcgttctccatgccagggacaaggagattcatggttctgtgtagttcccagaaggaaagtcagatgacagtgtcagtaactggagcaactggattcatagggagacgattggttcagagacttcgtgctgataaccacgctatccgggtcttaacacgctctaaatccaaagctgagcaaatatttcctgccaaggacttcccaggtattgtgattgcanaagaatcggagtggaagaactgtgtacaaggctctactgctgttgtgaacttggcaggactgcctattaagtacaaggtgggtctcccgaagatnaagaaagagattaac

SEQ ID NO: 12170 - DNA, 406 bp, Arabidopsis thaliana
  unsure at all n locations
  Clone ID: LIB25-083-Q1-E1-F8
gcttcttctctcatctccgtctctcagagagtgtacacttctccttctgcttccgtcatgctcgagtaccgttgcagctccgttgactggaaaccatcaccggtggtagccctagctaacagctccgacgactctcaagtcgccgccgctcgcgaggacggttctcttgaaatctggctcgtctcccccggcgccgtcggatggcactgtcaactcactatccatggcgatccaaattcgagaatctcgtctcttgcgtggtgctgttctccttctatagggcttccttctggtcggttattctcctctagcatcgatggctctatttctgaatggggatcttttcgatttgaagcagaagattgtgcttgagtcnanntggaatctcgaatatgggcaaaatggg

SEQ ID NO: 12171 - DNA, 379 bp, Arabidopsis thaliana
  unsure at all n locations
  Clone ID: LIB25-083-Q1-E1-G1
agagagtcaatgatgaggcatgccgatcaagacaagatgatcctagagccaatttctgcaaaaccgatgataccgatgatgtctggtacaagaaaatggaggcatgtattacaccgtatccggagacaagtagctcagatgaagtagctggtggtgagcttcaggctttcccagataggctcaatgcagtgccgcccangatctctagcggttcgatctctgggtgttactgttgatgcctatgaagacgataacagacagtggaaaaaacatgtgaaagcctacaagagaatcaacagtctacttgacactggaaggtaccgtaacatcatgggacatgaacgcaaggtttggtggatttgctgctgctcctgaatcg

SEQ ID NO: 12172 - DNA, 386 bp, Arabidopsis thaliana
  unsure at all n locations
  Clone ID: LIB25-083-Q1-E1-G10
tattccaaaatttggtgaaagcaacgcctaaagcaaaaatgtctcttctctaaccttttttttttttttttttttttgctctccaactttcccttcattttctggggaaaagcgagccaaagaacgcaaaagcaatccacaagaagcaattgttcgatatcaatggggaagaacaataagatcggaagcgttgttcggatccgtcagatgcttaaacaatggcagaaaaaagctcacatcggatctancaacaacgatcctgtttccgatgtacctcctggtcacgttgctgtttccgtcggtgagaatcgtcggagatacgttgtccgtgctaagcatttgaaccatccgattttccgacggcttctagctgaggctgaggaaga

SEQ ID NO: 12173 - DNA, 405 bp, Arabidopsis thaliana
  Clone ID: LIB25-083-Q1-E1-G2
aatatcacagcaaaaattttctcgagaaaatccgaagaagacaaaaaaaatggcggatcagctaaccgatgaccagatctccgagttcaaggaagcttttagcctattcgacaaagacggagatggttgtatcaccacaaaggagcttgggactgtgatgagatcacttgggcagaacccgacagaagccgagctccaggacatgatcaacgaagtggatgcagacgggaacgggacaatagatttcccagagttcctgaacctaatggcacgtaagatgaaagacactgattcagaggaagagcttaaggaagccttcagggtttttgacaaggaccaagaacggtttcatctcggcggctgagcttcgtcacgtgatgacaaatcttggggagaagttgacgg

SEQ ID NO: 12174 - DNA, 434 bp, Arabidopsis thaliana
  unsure at all n locations
  Clone ID: LIB25-083-Q1-E1-G3
gcnnacncgtccgcggacncttgggaatctccacattctgaggcatcaatcgtgaatggtagtatcnatttgaatggcagtggtgaaaccannacaaagaatatagtcatgtcgtctgattcagacagtttcatcggtgtgcttgaggtttttgttcaccaagctagggacatccacaacatctgtntctatcataaagcangatgtgtatgctaaagctttgtctcacaaatgatncccgaaaaactccttgtccacaaaagatnatcaaatgggtgggaggggcaaaaaaccctgtcntccnacgataacccttcaagttcgaccgtttaaagaacctgggattgttcnccttaaggtgtgangatatttatgatgaagccgcgtgaaagaaattatccntgaaggattaagttaacttgggagtccccctg

SEQ ID NO: 12175 - DNA, 397 bp, Arabidopsis thaliana
  unsure at all n locations
  Clone ID: LIB25-083-Q1-E1-G6
aagcaccgatacgacgattgagacttagttttgctcagattcatttaaccaccggcgccaagtgacgacgacgacggagggagcagattcgaattgtgtgaagacagcaatggagtctactgagtcatatgcggcaggttcaccggaagagctggctaagagatcccctgaaccgcatgattcttccgaagctgattctgctgagaagccaacacacattcggtttcttgtatccaatgcggcagctggttccgtcattgggaaangtggctcgaccatcactgaatttcangcaaagtctggggcaaggattcagctttcacgtaatcaagagtttttcccggggacgactgacaganttattaangatatcgggatnaatcanaggaantngtgg

SEQ ID NO: 12176 - DNA, 382 bp, Arabidopsis thaliana
  unsure at all n locations
  Clone ID: LIB25-083-Q1-E1-G7
tctatctgcaacaaaaatggctaatcgtttcagatcagggatctccttcttcaagaccatcgccgtaacagattctgtctcctccgttagatccaagtcgcttttcccagcgttgagaacttatgcaactgcttctgctcaaacaaccgctaatgttaaggtgcctattgctttagttggtgaaaatgggaactttgcttcatggctatacattgcanctgtgaaaatgaattccttggaaaagattganannggttnttccgaaangantnnaggaatnaagacanctccnaattttgcccaatttanaaanggttcctccggtcctaaaagggacaagattggctgctaattaaggatgcctgtgatcaagcaaagttgg

SEQ ID NO: 12177 - DNA, 386 bp, Arabidopsis thaliana
  unsure at all n locations
  Clone ID: LIB25-083-Q1-E1-G8
gatatcgtggagatcaagcatatcatgcttcctccttgtcgcaaggaattcaaagatatatatgttgtttttgagttgatggagtctgatcttcaccacgttcttaaggtaaatgacgacctcactcctcagcatcatcaattcttcttgtaccaacttcttcgtggcttaaaattcatgcactcagctcatgtgttccatagagatctgaagcctaagaacatcctcgctaatgctgattgcaaaatcaagatctgtgatttaggacttgctcgtgtctcctttactgattccccttctgctgtgttttggactgactacgttgctacaagatggtaccgtgcgccaagagctccgtggttccttccaatccaactaanacgcgg

SEQ ID NO: 12178 - DNA, 391 bp, Arabidopsis thaliana
  unsure at all n locations
  Clone ID: LIB25-083-Q1-E1-H10
gcggacgcgtgggtccgtttattttctgtataaggcgggtgatttcggctccttcatcggaaattatgagcaacgttatcggcgatcgcactgaagacggcctttccaccgccgctgcggcctctggctctacggctgtccagagttctcctcccactgatcgtcctgtccgcgtctacgccgatgggatctacgatcttttccactttggtcatgctcgatctctcgaacaagccaaattagcgtttccaaacaacacttaccttcctgttggatgttgcaatgatnagactanccataagtacaagggaaggactgnaatgactgcanaagancgatatgaatcacttcnaaattgcaaagtgggtngatgaagtcatccctgaangca

SEQ ID NO: 12179 - DNA, 373 bp, Arabidopsis thaliana
  unsure at all n locations
  Clone ID: LIB25-083-Q1-E1-H11
gaagttatctcaggcggtcaatgctgcttcccaacagcttcaatgtgctgctcctactaaaaaagagcggcctgacatggaagctgttgggaagcagctttgggctataagatcaagttatctcaggcggtcaatggaataagacaagtgttcacacgttacaaccaccaaaatgctatagtctctctgttgttagataatatcacctcttttacattttgctatccaaccacttcttcttcagatttgaaatgagatgtcttattcatgacttcagattctcgaatgacgcatgtaactatgtgcattcattaaaaaaaaaaaaagnnanaanaacgnaangaaaaantgnaannnaanaannagnannana

SEQ ID NO: 12180 - DNA, 68 bp, Arabidopsis thaliana
  unsure at all n locations
  Clone ID: LIB25-083-Q1-E1-H12
gtcttcnacaatggagccatanaggtagttgaatctggaggtcttctcatcggcgaatcntgttttcc

SEQ ID NO: 12181 - DNA, 408 bp, Arabidopsis thaliana
  unsure at all n locations
  Clone ID: LIB25-083-Q1-E1-H2
ggagcgttcattgagatttgtaactccgggaaatgcggacttttcggctcaggaggactcattatgttcgatgtgagtcatgtagaggttaggtaccacgcagcagatataatcccagtcacattgattggagtctttggtggcattcttggaagcttgtacaatcatcttctgcataaagttctccggctttacaatctcatcaaccagaagggaaagattcataaggtgcttctaagtcttggggtatctctattcacatcaagtttgcttgttcggtcttcctttcttagcggaatgcaagccttgtgatccttctatagacgagatatgtccaacaaacggaagatnaggaaatttcaagcaattcaactgtccaaatggttattacaacgatctatccactcg

SEQ ID NO: 12182 - DNA, 477 bp, Arabidopsis thaliana
  unsure at all n locations
  Clone ID: LIB25-083-Q1-E1-H3
ngaatttggtagccctgcaggctacnannccggaaattcccgggccaaccnacccgnccgacgatgacanccataaccngcagcnggccncaacgtcncgactccacgagtggtcgttcgacctgtggctcgtgtattaggtccggtccggttgaattacccgtggaaattcggttcgattgaagcggatgggttgtggttaangctacatcnggaaggagagatatcggagaaggtggagaagagtatacaagaagctaagggagacatgcgctgatgatccggtgaacggggaatgtgtagcggcttgggacgaggtggaggagctgaagtgcggcggccagtcatgctaagggacaagaagaaagctggtggctcccgattctttgggaaagantattgcaaatgaataatcctganaactgatgaatgtcgtacttatgataantaaaaaatatgtttttgnngttcgaattt

SEQ ID NO: 12183 - DNA, 459 bp, Arabidopsis thaliana
  unsure at all n locations
  Clone ID: LIB25-083-Q1-E1-H4
gtannttggtagccctgaangtagcaatccngggtngccccacccnnccggaaattgcncanggcggctntnattgaaccnanttggaccgatcnacaaaagatatgtagtcagggagatttatcggttatgtcgggtttaggaccatttggtttgatggttttggcatccaatgacatggaagagtacacgtccgtttacttcagaattttcaagtcaaatgacgatactaacaagaagactaaatacgtggtgttgatgtgcagtgaccaaagcagatcatcgttaaatgatgaaaatgataaatcaacctttggtgcttttgttgcgatagacccttctcaccaaacaatttctcttaggactttgattgatcactcgatagtggagagttatggtggaggaggcagaacatgtntaacctcaagagtgtatccaaaattggcaatccggagnaag

SEQ ID NO: 12184 - DNA, 401 bp, Arabidopsis thaliana
  unsure at all n locations
  Clone ID: LIB25-083-Q1-E1-H7
aatctcaaccgtccgatcaaacaacttacacaacttccgtgctggagaaataaaaaaattaggtatttaataattcatcattgccattggattgtgtgtggctgcgtcagtaaaacgtattcttaaaagcaaccattggtgtgattgactctataagagaattcgtcagcgtgaagcantctccaatctaatcgcagcatatcttctccgattcctattcgtctctgcaattgaatcttccggtaggcgaagatggcgacgtctgcgangatttgttgcggaggaggaagtgcatgcgcccgttcgttgtngatcgtcgcacgttaaatttgnagntcncgatcgtcatgtgttgntccagtgacgantcgncggatatnatgtgtgcgatcgggaagatc

SEQ ID NO: 12185 - DNA, 406 bp, Arabidopsis thaliana
  Clone ID: LIB25-083-Q1-E1-F4
gctttggagaaactgcatcaatggcgttgagattgacatcgctaaaacgcgccgcggttgagtcctgtcgcattttggaaacccgaagcttaagtcatgtcgctgcgatgccttcccccttgaacggagcttttgatcgcccgatttctatgccgccgctggttttacctgagttcgatcagaatcaaccgggtttgatcgaagaaaagagcttcgggttcgggcttcctagttttgcttttaatggatccatggagctaatggctgtgcctaagaagaagatttctaaacacaagagagggataagaaatggtccaaaggctcttaagcctgttcctgtgatcatccgttgcaagagttgcgggcgaatcaagctgccacatttcttccgttgcagcggtgaagg

SEQ ID NO: 12186 - DNA, 458 bp, Arabidopsis thaliana
  unsure at all n locations
  Clone ID: LIB25-083-Q1-E1-C4
ttggtagnntgcagccgcaaatccggaatcccgggtngccccacnagtccgcacttcctctggctccggcgaaaaaccccttttcgatttcattgataaaacgcaaatcgatctctcgtgtggaagaagaagaanaacacgatgggaacaatgggtaaagcattcnacagcgtaggattctggatccgtgaaactggtcaagcacttgatcggctcggttgtcgcctccaagggaaaaatcatttccgagaacagctatcanggnaccgcacactcatgaatgtttttgacaaaacccctaatgtggataagggggcttttgtggctcctaacgcttctctctccgggtgatgtccatgtgggaaaangttcttccatttggtatggangtgtcttgagangagatgctaacagcattagtgtngganctggggaaccaatattcaaggacaacgccg

SEQ ID NO: 12187 - DNA, 380 bp, Arabidopsis thaliana
  unsure at all n locations
  Clone ID: LIB25-083-Q1-E1-C5
agcttcccctaccaatttgacgacaagaagctgtgaatcttctcaattgtgtttcggaatcgaaattcgatcaagagaaatgtctaattctactgcaatctctctgagaatgtgttctatctaagaaagtaaaaaagttttcagtaccaagtgaagaagaccataaacaagttggagcagcttgattgagcaagaaaccttgataacgttattacgctgattcagtcctaagctatgtacaatgataaagcatttcaaagattacttttgtgaacattcaacaaaaaacgatgcatttaaagtttttaaaaagaaaaacgaagatttttcttaaaaaaaaannangganagnnngggagannggggaangnnngngnggg

SEQ ID NO: 12188 - DNA, 229 bp, Arabidopsis thaliana
  unsure at all n locations
  Clone ID: LIB25-083-Q1-E1-C6
ggagagagagagagagagagataaagggtcgataaggtctttttccgtttccttgacctctctgggatttggatttcgatttggatttcgatttcctcatctcatcgatttgcttctcaatctctccaattcgattctcctctggaaatttcaatcctttttatattttccttggtgatttcnaagataattaagattnaaaaaaggggaantttnnnaaaaaaannaa

SEQ ID NO: 12189 - DNA, 387 bp, Arabidopsis thaliana
  unsure at all n locations
  Clone ID: LIB25-083-Q1-E1-C9
gttgctatcgtctctctctctcgggtcaaaattagggtttcgtttcactatccagagtgtatacaaaggttgttgtggagcttttatcagatcacaggaataagatggaggtatttggaaaatctcccatggttgttacatctgccaatgttatttacttgtctgcaattctgggtcgcgattgcgatggacacaaatgtgattggaaatgtgagaatgaaaatgtttgtgggaatatgtatcgctgcaaactaactggactaactcatgtctgcgacaagaactgtaaccagcggattctctatgataaccatanctctttgtgccganccaagtgggaggattttccctctctcgtccgtcgaggagcaagcggttaaaggtgtt

SEQ ID NO: 12190 - DNA, 409 bp, Arabidopsis thaliana
  unsure at all n locations
  Clone ID: LIB25-083-Q1-E1-D2
caagctccaatggcgagagttctagtctcgtctccatcttcattcttcggttcaccgttgattaaaccgtcgtcatctctccgtcacagtggagtaggaggaggaggaaccgctcaatttcttccataccggagtaataataacaaactcttcactacttcaaccaccgtacgattcagcttaaacgagattcctcctttccatggcttggnttcatctgtagacatcggagcgattttcaccaagagctgaatctcttctcctaatacaaataagctggacgccgnccgtttgtttggtggctgaattccgtcgtaaactactgattcatccgccgtgcagaagagtggtggttgggtttggttttatctccgatgctatgggaattggttcttaangattttgaagg

SEQ ID NO: 12191 - DNA, 398 bp, Arabidopsis thaliana
  unsure at all n locations
  Clone ID: LIB25-083-Q1-E1-D5
cgtcttcacttccgccatgagaaaaacctgcacacacgcctgaaaaaccaaatcatcctcatcatcttctgatctaatgtctaccgacactatcccttccctctcatctccaccggcgccggagtttccttccaccacaccagacacggcgacgtcaccagctccgtctcagccatccatcatcggaccttcttcgttggctccgtttccggagacaacaacaaacattgatggaggctcgagaaatgtagcattaactggacttattactggagtagttctcggagctacgtttgtcctactcggagtttgtatctttgtctgtttctataanagaaagaagaggaagttaangaagaagaagaaagangatatcaaggcttctatnacaggngang

SEQ ID NO: 12192 - DNA, 53 bp, Arabidopsis thaliana
  unsure at all n locations
  Clone ID: LIB25-083-Q1-E1-D6
gacttcgctggnaaatgctccgacgccgccaagatcgtcggttttgctcnaac

SEQ ID NO: 12193 - DNA, 385 bp, Arabidopsis thaliana
  unsure at all n locations
  Clone ID: LIB25-083-Q1-E1-D8
ctctgttgtttcgtgccctgagaaaccttgaagcagccatggctcccaaatcgaaagaaaaccccaaaacctcgactccagcaatcgaagatctcttcacttccctccacaaacatatcaaggatactaaatatgaagaagccgtcaaggtcgctgatcaagttttgtcgattgtacctaccgatgaggatgcgatccgatgcaaagttgtggctctgataaaagacgataagttcgatgattatctaatcaaagacgttaagatcaatggtgctctctccgtcattaactcgtttccaatcgatctaggttttcacaaggcgtattgtttataccgtgaaaacaagttagatgaggctttggtgtgtttaaaangtctcgaang

SEQ ID NO: 12194 - DNA, 377 bp, Arabidopsis thaliana
  unsure at all n locations
  Clone ID: LIB25-083-Q1-E1-D9
tttttctctcttgtgaattcgtttattgttgtatcgtcggcccgagtttatcggaactccgggtctgacgtgagttttccaaatggcggcgtcagagagatcgattgacaaagaagtcgacatgggttcttcctttcttcaaaaattcaggctttacgagacccgctcgagcttctatatgattggaagagataaaaatcgaacgtcttggagggtcctgaagttagataggacagagccaagcagaggtcaatatctacgaagattcaacggcttacacagaagctgaatgctttgaaactttgagaaggatacacgaagggaaacagatnatctggtggtttgaaatttgtcancacctgctacgggatcatcgg

SEQ ID NO: 12195 - DNA, 376 bp, Arabidopsis thaliana
  unsure at all n locations
  Clone ID: LIB25-083-Q1-E1-E10
tcttctctaataattgaaagcaaaagaaaacagttttttttttttagaaaggtaaagaaatggaggaaacaaaggagagaaagatagtagtagcagtagacgaaagcgaagagagcatggaagctctgtcatggagtcttgacaatctttttccatatggttccaataatacactcatcctcctctacgtcaagccccctcttcccgtttactcttccctcgatgccgcagggtttatagtgacaggagacccggttgcagctttgaagaagtatgaatacgagctcgtggaatcggtcatggctcggtctcnaacngtgtacaangatnatnatncgganatnaanataaaanaacaatttggaaaagnaaatnc

SEQ ID NO: 12196 - DNA, 389 bp, Arabidopsis thaliana
  Clone ID: LIB25-083-Q1-E1-E12
gcggacgcgtgggtttgtggcggctcgtcttcttcttcttcttccacgggactctctctgaatcggtgattttcgatcttcctagggtttcgatctgaaaccttgcgatctacttgaaagagagattcagaaatttccaagtaataataatgtttgcgcctgcgactcaaccgcaacagcaacatgagcagaagaagcaatcagagactgtttcatctgctgaagaagatgctttgaagtggaacaccgattgcgtttactttctcgcttctcctttaacctgcaagaagggacctgaatgcgagtatcgccacagtgagtatgcgcgtatgaacccgagggattgctattattggttgaatggaaactgtttgaatcccaaatgtgga

SEQ ID NO: 12197 - DNA, 410 bp, Arabidopsis thaliana
  unsure at all n locations
  Clone ID: LIB25-083-Q1-E1-E2
ggnanacggtgaagatggnantgagacaaaaagcaatggcgacgttgccgaaactgattcaaagcatgagaaacgaagttacgaagcagcccagtcttgtcttaccatctctcagaagagctttctctctctacgatcagatcaatctcatcgataacgttcctgaggatcagctccgatttcaggagtttgatgagacgagtttcactgtgaatggggttaaatacgaaggaagcttgctctgtgttgggaatttgctaatgtcatggagcccctcgttacttctccgacatcacaacggatagcttgtcaatcttccagacggttcgaccaaattccagagctcttgattgtcnggtgtggaagatacaaccacccactggaaatccccaaagtccgtcagttcgtag

SEQ ID NO: 12198 - DNA, 403 bp, Arabidopsis thaliana
  unsure at all n locations
  Clone ID: LIB25-083-Q1-E1-E5
naattatattcaagagaanaaggaaaaaatgaatttcatctccgatcaggtaaagaaactctcaagctcaacaccagagganccagaccacaacaagccagtcgaaggaaccgaaacagctacaatcaccagctactaacgccgagctcatggcaagtgccaangttgtanctgaagctgctcaagcngcanctcgtaacgaatcanacaaactcgacaagggtaaagtcgccggagcctctgctgatatcttaagacgctgccgagaaatacggtaagttcnatgaaaanagtagnactggtcagtacctctacaatgctgaaaagtatctcnacnactacnaagtcgtcacactccaccggttgctggtggtcctcntcctncgacgantcaagggtgagg

SEQ ID NO: 12199 - DNA, 361 bp, Arabidopsis thaliana
  unsure at all n locations
  Clone ID: LIB25-083-Q1-E1-E8
tgattattaaccttttggctactagcctccctaagagcgcaactttcttcctgacctacgttgctctcaagttctttatcggttatggccttgagctgtctcggatcatacctttgataatcttccacctgaaaaagaagtatctctgcaaaaccgaancggaggtcaaagaagcttggtacncgggagacttaagctatgcgagnagggttcccggagacatgctcatcgtcacagtcacgttcngcgattcantcattgctcctcttatcctcatantcggcatcanctactttgngtttaggctggngangtcctcaagaatcaggcgtttgaaagtntacngttccatcagnggaga

SEQ ID NO: 12200 - DNA, 408 bp, Arabidopsis thaliana
  unsure at all n locations
  Clone ID: LIB25-083-Q1-E1-F1
taatagaaaaagccctaactttctccgtcgatggctttcttcttctactttttcttcctcttgactctttcttctccttcttcttctgcttcctcttcaaactccttgacttacatcgtccacgtcgaccacgaagctaaaccctcaatcttccccactcattttcactgggtacacttcctctcttgcntcactcacctcttctcctccctccattatccacacatacgacaccgttttccatggcttctccgctaagactcanttcacaagacgctaagtcaactcttagaccatccntcatgtcatctctgttatcccggaacaagtccgtcacttgcacacnactcgttcccctgaagtttcttgggtcttaggtcnaacggacaaagcggggtctactncgng

SEQ ID NO: 12201 - DNA, 390 bp, Arabidopsis thaliana
  unsure at all n locations
  Clone ID: LIB25-083-Q1-E1-F11
aagaagatcgtagtagcccgataatgaagctacgattgagacatcacgagacgagagaaaccctaaaacttgaattggccgatgcagacactctccatgatctccggcgacggatcaaccccacggtgccttcctccgttcatctctcgctcaatcgtaaagacgagctcatcacgccttcgccggaggatacgctccgatctcttggtttaatatccggtgacctaatttacttctctctcgaggctggcgaatcttcgaattggaaattgagaaaatctgaaaccgttacttcctcaatccggagaatnatnaagacaagtngttaatgattccgatttggggttcgcaaaaggttgatgttgtccccgattaaagcgaaaatctaat

SEQ ID NO: 12202 - DNA, 423 bp, Arabidopsis thaliana
  unsure at all n locations
  Clone ID: LIB25-083-Q1-E1-F3
aagtcttggtggaccagaacgtaacggaagtgttacaattgttggtgcagtttcgcctcctggaggagacttttcagatcctgtgacttcagcaacccttagtattgtgcaggtcttctggggtttggacaaaaagcttgcccaagagaaaacattttccctctgttaattggttgatttcttactcaaagtattcaacggcactggaatccttctatgagaaattcgattcaagatttcatcaaacatcaaggacaaaaggccaagaagaaggtgtttgcaagaagggaaagacgatctaatgaaattggtccaaccttgtaaggaaaaagatgccgcctaacaagaaagggggacaaaatcacattgggaaacagctaaagctattgaagggaaaantanccttgctcaaaaacgcgtttg

SEQ ID NO: 12203 - DNA, 372 bp, Arabidopsis thaliana
  Clone ID: LIB25-083-Q1-E1-C11
agcttcacccatggctgatttcattgctttcagaaagattagagacaaattgggaggtcgcatccggttgctagtatctggaggagcacctttgagccctgagattgaagagtttttgagagttacttgttgttgctttgtcgttcaaggctacggtctaacggagacacttggaggaacggctttgggtttcccggacgagatgtgtatgctagggacagtcggtattccagcggtttacaacgagatacggcttgaagaggtgtctgaaatgggctatgacccgctcggagaaaatccggcaggagagatctgtataagaggacaatgtatgttttcagggtattacaagaaccctgaactcactgaaga

SEQ ID NO: 12204 - DNA, 54 bp, Arabidopsis thaliana
  unsure at all n locations
  Clone ID: LIB25-082-Q1-E1-B9
aaggttgttctgtggactagatgggatctactgtangtttcnagggaagattga

SEQ ID NO: 12205 - DNA, 451 bp, Arabidopsis thaliana
  unsure at all n locations
  Clone ID: LIB25-082-Q1-E1-C10
tggtagccttttnggtgnccagtccggaatanangggtcgggccacncgtccgctcaangtttatctctccgacgtaaccatggatagcgatactctctcaggattattggaaaacgtcgccaaaaaattccccgatcgccgagctctctccgtttctggaaaattcaatctcactcacgcgcgtcttcacgatctaatcgaacgcgccgcttcacgccttgtctccgacgctgggatcaaacccggcgatgtcgttgctctcaccttccctaacaccgtcgagtttgttataatgtttttagcggtgataagagctagagccacggcggcgccgttgaacgcagcgtacacggcggaggaatttgagttttacctctccgattcagattcaaaggctattgttaacctctaaagaaggaaacgcaccggctcaagaagcancttcaaagc

SEQ ID NO: 12206 - DNA, 402 bp, Arabidopsis thaliana
  unsure at all n locations
  Clone ID: LIB25-082-Q1-E1-C3
ttttcatcgttgatcagtcgtcgatcctcttgagtgatttgattttagactttctagttatcaaactcgaaagatggattctgtccttgtagtgggcattgcatcggttattctcggtgcgttgatcgctgtactcttcttcggtagctacttccggaagcggacatcggaggtgcaatccatggccaaagcggagcctcaggatccgatccggaatccaaagtcgaatcatcctgctccgaagaagaatcatcccaaatctcaagcgtccgataagaatcagaacaaacggcatcatcctttagatttaaacacgttgaaaggccacggtgatgctgttactgggactctgtttctcgtcccgatgganaagagcctggccacagccttgcgcctgatggg

SEQ ID NO: 12207 - DNA, 399 bp, Arabidopsis thaliana
  Clone ID: LIB25-082-Q1-E1-C4
ttgatgactagagcccctggaataggagagacatcgacccaacagtcttgatgaaagatttgaagaccaccgatttggtcctggagaagaatggtgaggaaggagttgtctgaatgattatttgtgccgatggttagatcaggttgtggacatggaggataataatggcagagcaaaagcaaacccttcatgcaatccatgcttttaagcttatcaagatctcaaaccaagagcttctgagagaagctcaaagagcaaatcacctaatctcatcatatgctttgagtattcgaacatagcaaccctgagccaatatttcataagatcgctcaacggttcataagatttctcaatgaaaaaccgtaagttacttacctgcaaggccacaggggagattct

SEQ ID NO: 12208 - DNA, 395 bp, Arabidopsis thaliana
  unsure at all n locations
  Clone ID: LIB25-082-Q1-E1-C5
aatggctatggggctaatgtctccacatggcctgcacgtcttcatgatccgccagagaggctacaaagcattcaaatggatgcgtacatatcccgaaaggaaattatgaaggcagagtctagattttggttanaagtagtagagagttatgtgcgggttttccgctggaaggagttcaaactgaggaatgttctggacatgagagctggttttggagggtttgcancagcattaaacgatctggggcttgactgttgggttatgaacattgttcccgttagcggnttcaacaccttgccagttatttatgaccgtggactacaaggggctatgcacgantgggtggtgagccatttgacacctacccaagaacctatgntctgatacnatgctgt

SEQ ID NO: 12209 - DNA, 389 bp, Arabidopsis thaliana
  unsure at all n locations
  Clone ID: LIB25-082-Q1-E1-C6
tttttcaccaatttctctccacttaaaaccaaccccaattctcaccaaaaatcgcaaaaaagatttcaactttcgataaacccagatcgaaaaatcagatttttccagatcaatcagagagttagagatggagtataataacaacaatcagcaatctttttggcagttcagcgaccagctgagagttcagacaccgaatctagcgaatctgtctctcaacgactcgatctggagcacaaactctgtcttcaaagagcgtcgaaacttagacatagccgccaccaccgacaagaacaacaaccagatcgactattatcagaaggaagacaacttccgacaacatcaattccaactgggactggaagtcntctgggttcaaacaacgacag

SEQ ID NO: 12210 - DNA, 408 bp, Arabidopsis thaliana
  unsure at all n locations
  Clone ID: LIB25-082-Q1-E1-C7
tgnnnggctttggtagcccnacaggtacnaaacccggaaattcccggggtcgacccacgacgtccgctgggaatcgacaagcaaagatgcatcantttgctgcaacggtaacgagttgcaaaccccctgaaccttataagggcaaaggcataatgtacactgatgaagtcgtcaagaagaaacaangaaagaagtccaaatgatctctctttgtatgcttcttcntccttcntactctgcagagacaactttcatctatctgtggtagattatggttggatttttatcaataanttttanttggttgtatgagacatcattttgttgttaagtctctttcantgaaacaaaatgaagaaaganttcgtcttggaaangnaaaatcgctgngtngnaaggggnncaaaa

SEQ ID NO: 12211 - DNA, 376 bp, Arabidopsis thaliana
  unsure at all n locations
  Clone ID: LIB25-082-Q1-E1-C8
attatcttgttaattcagcctaattagttaccgggttttcttcgatttagactgttttagctggttgaatcgtcactttatagatcattagccaatttaagctattaaagttttaaactttttcttctgattcgttgaacgtcattgtccaattcagaccactttactgatttgatcagagagaattgtctttcttcaaagtaattttctacactgatctcattgattacgtcactctctctattgatgtttctttctcntnatattggccttaagtttctttgttaaacctctccanttgangatatggggggaactaaaacnggagtcatcaattcngactaagagacttgggaaagaaggttcctggaaaaga

SEQ ID NO: 12212 - DNA, 314 bp, Arabidopsis thaliana
  unsure at all n locations
  Clone ID: LIB25-082-Q1-E1-C9
ggtgnnnagtccggaatanacgggtcgngccacacgtccgtcaanacttgcatatttcacttactcgctacatttgcgtaagatgacgctgcctcatttttttttcatattcnattgacataattaatattcttgtgtgtttatctcanttgccaggagcattataaggatcttagtgctaaatcattctttcctaacctgattgagtacatcacttcaggtccagttgtgtgtatggtatgggtataactangctctaatttgatttttacttgttntcanggttgtagttaganganttaantgcatgtnat

SEQ ID NO: 12213 - DNA, 416 bp, Arabidopsis thaliana
  unsure at all n locations
  Clone ID: LIB25-082-Q1-E1-D1
gccacaacgtcactttcttcccggataattgaaatcggtgatcggaatccctagaaatgtcggataatcgtgcactccgacgagctcatgttctcgccaatcacatactccaatcaaatcctccatcttcgaacccgtccctgtcgcgcgagttatgtttgcagtactctccaccggagctcaacgagagctatggattcgatgtcaaggagatgagaaaattacttgacggacacaacgtggtggatcgggactgggatttatggactcatgatgcagagcantctgtttaatcgggagggagagaggagggtaagattttccgtgtcgccgggattacaatcagacgatgggagcagcaagcgntgngatcacaatgaaaacgggatctgggtactttgcttgagaaatggggg

SEQ ID NO: 12214 - DNA, 141 bp, Arabidopsis thaliana
  unsure at all n locations
  Clone ID: LIB25-082-Q1-E1-D10
ctaggaactcctcattgcantctcctcnactgaggaatctacagagccatnggttgcgngatttcgggtttgcatcattatctccatnatactgattcaccgagccacgcaatgtgtcacacacaagtcaaatggnaaccg

SEQ ID NO: 12215 - DNA, 399 bp, Arabidopsis thaliana
  unsure at all n locations
  Clone ID: LIB25-082-Q1-E1-D12
gaanattgttcnatgttcctgaaatgggattaaacgagcaacaaaatgttccaagtcagaggaagatcatagtttttatagtcttagcttttataccaatagctctgtttcgactctgttttaataatccattctcctccattaaagacacctctcttcaagactctgcagctaacgttgtgatcactagcttctcttcatcttctcaagaagaagaaagccaagagagttttgatcatatacaagatgaacctttatgcgattatacgcaagggaactgggtcagagacgagattggtccactctacaatggttcaacatgtggaacaatcaaggatggtcagaattgtttccgccatggtagacctgattccggttatctttactgggaaatggaaa

SEQ ID NO: 12216 - DNA, 198 bp, Arabidopsis thaliana
  unsure at all n locations
  Clone ID: LIB25-082-Q1-E1-D3
gacncacttcnanatcgaagtaaaacccgacgattcggttgttgatgtgaagaagaanatagagagtgtgcagggcgcatatgtgtancctgctgcaaaacagatgcctattcaccaaggtaaagtgcttaaagatgagacnacctattgnngaaaacacagttgctgaagaacagttttattgtcnttagtnatgaa

SEQ ID NO: 12217 - DNA, 402 bp, Arabidopsis thaliana
  unsure at all n locations
  Clone ID: LIB25-082-Q1-E1-D4
tccgttactcatcgaaatcgcaaagaacatggggatccatcctttgctcttgatggttccaggagccattggggctcagttcgctttcttgcttcccacgggaacaccctctaacgtcgttgggttcacgacagggcatatagagatcaaagacatgatcaagacaggcttgcctctcaagatcgctggaaccatctttctctccatcttgatgcccactcttggggcttacgtttttgcatcaatgggaggagtttaattctacaagccaagcacaagaccatgtncacaaattgatttattgtaccaatattgtttactacccgtaatacatatgtagatatataagtcaatgggaatgggaaattttagaatgangtcaaaaaaaaaaaanaaaaagag

SEQ ID NO: 12218 - DNA, 378 bp, Arabidopsis thaliana
  unsure at all n locations
  Clone ID: LIB25-082-Q1-E1-D5
caccaccaaagagaaaaacagttctttagagagcatcaaagctccgaggaagagagagagagacgctatggaagcattgaactaacacaactctaaatttctaatttacggtttgttttagttctatacattatggggaagtctacaaaatggttgaagaatgtattgcttgggaaaaaaacttctaaatctagtggttccaaagacaaagagagagttgtgagtggaaaagaggtactggttacttcaaaggtggaagaatcagatgtggtatcagatcttccatcttttgaagttgcaagagaccaataccgttgatagaagtggtggtatgttagagactcaaaatgtangacctgaaagagatctcaagatgat

SEQ ID NO: 12219 - DNA, 386 bp, Arabidopsis thaliana
  unsure at all n locations
  Clone ID: LIB25-082-Q1-E1-D6
aatggcatcttccaccggtctcaccgtcgccggagctctgcttgccggagattttcgattaccagctgtatcgtctctaatacccagaaagacttcttcttcattgtcatgccttagcaacagagatttatcgtctccttataattgctgttggcgactatccagaggcaaaattttgacttctctcagtaactcacggaaatttgctgtgggaaaggaagcagaagatgggtttctatcgaatgtgagcgaagatactgatgagatgttcgacgacttgttcaacaaatatgggaaggttgtttttagaagcactgatgttaagtctccaacagctgaggttgacgatgatgcaanaagtttancatttgccngttgaattggnt

SEQ ID NO: 12220 - DNA, 393 bp, Arabidopsis thaliana
  Clone ID: LIB25-082-Q1-E1-D7
attttcgcttcaattcaataaaaggcgaaaaatctctcactgcactttatctcgagagctcagatctccgatctagagcctttcgcttctcctcttctgttcatataacaactgaataatgtcgatctccgcccaaaatccggatatttccggcgatagacaatccggccaagatgttcgtactcagaacgtgatggcttgtcaagctgtttctaatattgttaagacctcacttggtcccgtcggcctcgacaagatgttggtggatgatattggtgatgtgactattacaaatgatggtgctactattcttaggatgttggaggtcgagcaccctgctgctaaggttcttgtcgagttagctgaacttcaagatagagaagtcggtgatgg

SEQ ID NO: 12221 - DNA, 399 bp, Arabidopsis thaliana
  unsure at all n locations
  Clone ID: LIB25-082-Q1-E1-B7
tcatctctttacttctctcttcacatcatctttcttgaattctttatatacacagtttaaagatgcaaatgctaagaagcttgagcacgaggacaagaagccgtcgtggaggatacgagagagtgagtgatgattcaactttcagtttactcggagcaaagctaaggagatcgacgagtgttccttactacgcaccatctataaagcttggagctggtggtgttccgaccattcttgaggagcttcctcgtcagaaatcanagaaagtcanaaccaaacagggcaaattttagtcanccaaatcctttaagtccttttctacgggaaaagaagaagaagtcgaacgacgaacgaaaccctgaggttttccaaggnnatcttgangtatttaaaggggag

SEQ ID NO: 12222 - DNA, 387 bp, Arabidopsis thaliana
  unsure at all n locations
  Clone ID: LIB25-081-Q1-E1-H1
tctctatcgtcttttgttttgatttaaatgcctcaagtcgttgcttcagcatgtaccggtgggtctgaccggaaaatctcatgtgaaactctggccgacgataacgaagactcacctcataactcgaagatccgacccgtatccatctccgccgtcgattttccaccggaatcttactctttatcaaaagaagctcagctcgaatggctaaacganaacgccttcttcgaacgcaaagaatcacaaagaaggaaactcttcngctccaatttcgaatcccaatacaaagcctaattcgagctcncatcgaatctcacncaaatcaaaagcgtcgatcatcaagattancgnaaccgcagnaagacgtgtttcaacgaagcgaangaa

SEQ ID NO: 12223 - DNA, 406 bp, Arabidopsis thaliana
  unsure at all n locations
  Clone ID: LIB25-081-Q1-E1-H10
cttgtacangntgtgnggccgnaannnngaaggccttcngggtcgacncacgcgtncgcccacgcgtccgcaatgacaagctccgatcaatctccatcgcacgacgtcttcgtctacggcagtttccaagaaccagccgttgttaatttaattctcgaatgtgctccggtcatggtttccgctcaactccacggctatcacttgtatagacttaaaggtcgtttgcatccatgtatttctccttccgacaatggattaatcaatggcaagatactaactggattaacagattctcagttagagagtttagatatgattgaaggaactgaatatgtgaggaagactgttgaagttgttttgactgatactttggagaagaagcaagttgaaacaattgtatgggcaa

SEQ ID NO: 12224 - DNA, 390 bp, Arabidopsis thaliana
  unsure at all n locations
  Clone ID: LIB25-081-Q1-E1-H2
ctttacacgnccaagtcgnccgtaaggaattanagggtcgacgcacgcgtcngctcacaatgttttttctcacanttctccgaacatgcgtttgctttctttattctctaataaacctagtaaactcntcttcttcgttactactatatantanancggagagttttggnaccagagagaggtttnacgtatttcttantttatttctctccatggggattctttgggattcgttgctcttgtcacttgtgtcaacgtttgctctgttcttaatnaggatcctgttaatcaatcctggattgatttacactggacaagttacggcgtaggaagatcatcgagtggtttcatgtntaccaattcnacangnntcccataattcaacganaa

SEQ ID NO: 12225 - DNA, 374 bp, Arabidopsis thaliana
  Clone ID: LIB25-081-Q1-E1-H3
taagaaacacgaaaatctctgaaagtctttttgtttgaagaagatgacgcatgttgaagatgataaggaattcaaggagaaacctttggttcaggttctgagcgacgacgacagtgaagtgaaggaagccaaagacggaggaggtgaagaagttaccggcggcgacggtgaaggagaggctaatgtagaagaggaagacgacgaagcagaaaatgaagacgatgatgatgatgatgatgatgatgatgacgacgacgaggacgaggacgatgaagaaggggaggaggatcttgggacagagtacctagtgaggccggttggtgaggttgaagatgaggatgatgcaagtgattttgaccctgaggagaatggct

SEQ ID NO: 12226 - DNA, 443 bp, Arabidopsis thaliana
  unsure at all n locations
  Clone ID: LIB25-081-Q1-E1-H4
gcccaggtanccgtaaggccnttcangggtcgacgcacgcgtccgagaattgagacttttgggaggaagaagaaagaaatttgttttctgaagaaggtggaggtgccaagagaattatcttaatccttgttcctcctcctcctcttcttcttcctcattggttgtttatgtttttatatataatctaaggttttggtaagtccaactcctatccttctctcctccttgattcaacaaacttggtttcaagttcataaacaaggagagagaaaggaattgttaagtccncaatgagtaggttatgttatcccataaccccaattgggctaccnatttatcacctccatccatttatactcctagaaacaacaaatctaaaggcaacacaacacaaatagtaccttccaaatgcttccatacttgctcatcacttgtctctcctt

SEQ ID NO: 12227 - DNA, 111 bp, Arabidopsis thaliana
  unsure at all n locations
  Clone ID: LIB25-081-Q1-E1-H7
accanaaggttttattttagacaatgggncgtgnaaacagctgtggcggaggtcaaagctcattggattatctcnttggnggagacgctcctgctcctaagccagttccag

SEQ ID NO: 12228 - DNA, 172 bp, Arabidopsis thaliana
  unsure at all n locations
  Clone ID: LIB25-081-Q1-E1-H8
tcgactttgccaaactctgttacgaangttgaatactttggacgtaaaacgttctgattttgcttttcgttatgtatttctgttttanataagggttgaaatttggttttgatgaacttttcatatncaaattgcattaaggctacacaagaanaaggangncttgaangat

SEQ ID NO: 12229 - DNA, 386 bp, Arabidopsis thaliana
  Clone ID: LIB25-082-Q1-E1-A11
aaatcttcgagggaacattcagaaaccctaacttcaacgggaactcaaaaatcagaatctccagatcgagagcttaaaaagtcgatttcaattcccctttaagattttttgcttttggaatgtagtgtgaagaagaaaccctagttttttctcacttgaattctctgccttctttagtaatgtcaagtgagcagcgagaaggttcgcaagagacgacgacgacgacggtggaaggtaacggaacaattgcaggtcagaattctcattcggcggctcccacgacattgagagctacctctacgatggtttcttgccagagactaaggctaaaccctaacaacgagcatagacccgatagttatgaagatctgcagcttgatttccaa

SEQ ID NO: 12230 - DNA, 400 bp, Arabidopsis thaliana
  unsure at all n locations
  Clone ID: LIB25-082-Q1-E1-A3
gtcngggaatcggtgacttttgaatctttgcgactctcttgtagtgataaattgatcgttatctactttgatactctccggtcgtttttctccggtgctggagatccgattccttatcttttctgtcttggctcgagatccgagccaagcagtananaagacgactttgtttcacgatttggaanttgattcctgcgatcacagatggcatcgggtgagggaantttgacggatggacagtggaaaaagcttgagatagcaactcagaattctggaagtttgtcatcatcgcctaaatctcatantctccttgccgatctgaacatnaantctcccactgggnggcaaaaggacaagttgctgggattccccaanaaggaatgtgcnacnntcncactca

SEQ ID NO: 12231 - DNA, 418 bp, Arabidopsis thaliana
  unsure at all n locations
  Clone ID: LIB25-082-Q1-E1-A4
ggagacggcgacaatggcgantttgatgatgagattaccaattagcttgagaagcttctctgtttcagcttcttcatccaacggttcgccgccggtgatcggaggatctagcggcggtgtangaccgatgattgtggaattaccgttggagaagatacgangaccgttgatgcgaaccagatccaacgatcagaacaaagtgaaagagcttatggatagtatccgtcaaatcggtcttcangttccgattgatgtgattgaagttgatggaacttactatggggttctcgcggatgtcacangatacnaaggcgcatcaagaaanctagggcttccaanctatacggttgcaaaaatcccgttaanangaacaaagggaaaccattaaaggcatcatccttccgcnggaagnagaatt

SEQ ID NO: 12232 - DNA, 394 bp, Arabidopsis thaliana
  unsure at all n locations
  Clone ID: LIB25-082-Q1-E1-A7
tctctctctataacaaaattggacagaattgggcaatcgagagagaaagatgcaagccatctccaaagtttcttctgcagcatcattctttagatgttctaggaagctagttagtcagccatgtgtgaggccttgcgtgagacagcttcacgtcagaaagggtcttgtctctggtgtcatgaagctgttctcttcacctcttaggactttgcgtgatgctggtaaatccgttcgcatttcaagattctgcagtgtctccaatgtctcttcctcantgcaaattgaactggtgccatgtcttacggacaactangcttatatcttacatgatgaggataccggtacaagttggtgtggttganccttctgaagctgtacctgttatggatgccct

SEQ ID NO: 12233 - DNA, 392 bp, Arabidopsis thaliana
  Clone ID: LIB25-082-Q1-E1-A8
cttcttccttctctctttcccagaaagtatcatcgaaagataacccttttttcacttttcttctcctctgacttttttcttctcgaatctttagttttcgtttatagattctgttttcttcgtatatataataaaggtttgattttttcgatctgagagcaagagaaaaccctttccatggcctcagcggcgatattctcatcgttacgacggaggagatcgccgtctttggaagcattcttagcccccgttgacctttccggcgtcgcacttgttcaaaccctagcttcaatctcttcggaggttgtttcttgtttcacctctgttcgattctcgtttcaacgcaagaacgctccgttctttgattcgtaagatcgaagatctttggtcgt

SEQ ID NO: 12234 - DNA, 418 bp, Arabidopsis thaliana
  unsure at all n locations
  Clone ID: LIB25-082-Q1-E1-B1
ggagctaatcggaaaacaaaaaagcaacggccaaagcaatgaggaaagatgatctctgcatcactgttcctaccttcttccgatgtcctatatctctcgacgttatgaaatctccggtgagtctttgcaccggcgttacctacgatcgagctagtatccaacggtggcttgacggcgggaataacacttgtccggcgacgatgcagattcttcagaataaagatttcataccgaatcggactcttcaacgtcttatcgagatttggtctgattctgttcgtcgtcgaacttgtgttgaatccggcgggaatttactgctcccaacgaagaagaacgaaaatngnccgatgngattcgatananntgaagnttngagaaaagnaagaaaagngnatganngccaanggttttgtcnaaa

SEQ ID NO: 12235 - DNA, 451 bp, Arabidopsis thaliana
  unsure at all n locations
  Clone ID: LIB25-082-Q1-E1-B10
tggtagccctttangtgccagtccggaataancgggtcgagccacncgtccgcggangcgtccgcccacgcggtccgacttaantaagatacgatcatggcgtcgtttgtctttgtgatttctcttcttcntctctctttttcgtcggntgttttctccgaggatgcttcttttcagaaacttccggtgcctgacaagaggtcaggccctgaatctttcgcctttgactctaccggcggattctacaccggagtctccggtggtaaaatcctcangtacgttcctgggaagggttatgtcgattttgcccagatnacanattcctcgaactcggcatggtgcaacggngcattatgaaccgctttcgccggaaagtgtggtcgaancaagcgggaatagccttaaacagcaaaacaggtggatctctatgtcgccgaatgctccgttgggt

SEQ ID NO: 12236 - DNA, 451 bp, Arabidopsis thaliana
  unsure at all n locations
  Clone ID: LIB25-082-Q1-E1-B12
tttggtngnccttnaggtgccnaatccggaataaccgggtcgncccacacgtccggaaaaaacccgatccttcgatatatattacagctgccgagaanctaggtgtttcagtgaaagactgtttggtcgtanaggacagtgtgattggcctgcaggctgctacaaaagcagggatgtcatgtgtgatcacgtacacttcttcaacctctgatcagaatttcaatgatgcgattgccgtataccctgatctcagcaatgtgaaattgaaggacttggaaactctgcttcaaacaatagtcactgcagcttaagacatttgtctcctattcatttctgactgttcttctgcaactgtacatttgttgtttatgtttgataaaattttcattaataagaaaagaagattcaaatgtataanaaaanaaaaaaaaagggcggccgctctanaaga

SEQ ID NO: 12237 - DNA, 401 bp, Arabidopsis thaliana
  unsure at all n locations
  Clone ID: LIB25-082-Q1-E1-B3
ttcttcttcttcttcttctcgatctctgtatctctcgatcatttccttctaaaggaagcgtctttgatcttaatcgtcgtgtcgttcgtttctaactttatattgaaagatggaaacagaaacggaacatgatagaactgtctctgtcgatgacaacgacagccttgtacctgagccaagctcaacgaaagaaagcttttttgaagatctctcgcttactgggcaagttatgaatcctcaactttcaagtgcaggcgaagttttgacaaaagttgaattgggattttgcttttgtctctgagaaattggtcaaatcctaagccntcttactatgcaaactccggcaagaagggaaaaatggatttttgaagtcctttggttctaaagaaaggnaanaagag

SEQ ID NO: 12238 - DNA, 398 bp, Arabidopsis thaliana
  unsure at all n locations
  Clone ID: LIB25-082-Q1-E1-B5
atcaagattgctggaacatcaagaggctttgaaaagggaagggagaacctgctaatggaaacagaggattcaagtagcagcattgcaattgggaagaacattacaaatctccagagtttcagcccatcaacacctccacttactacatctagtaactgcagaatcgtcaagcgaanaaagggaattcctcaccgatctccaatgggataagaaccgagattacacacaggttttagctaatacagaggcttcttctgtctcttatctttcctcgtataccaaaagaaatggtcttttgcttgtgttaagcaaaaaaagaaaggccttaagttagngttttgttgtcctactacttgggcaaatatgtgaatatgtaatgtgcnttgtatatgangcag

SEQ ID NO: 12239 - DNA, 354 bp, Arabidopsis thaliana
  unsure at all n locations
  Clone ID: LIB25-081-Q1-E1-G9
cgcaacaatcaaatctcgaaacacctctcaaaacccaacacgaccaccgaanaatcaccacttcaaaccctgaatcatctccgcctcgacctttcccggaatccagccggaaacatgattctcctcctccccgagcctccaccaacgagccaatgaagaaaatcggaactccggagcgtttaagagtcccaatagctttcatngtacccagagagggtacangagcccaactgatgcaatgatgtctccaagttactaaaggtcttctcgcaaggaccagaaagtcttccggttctcttattccacccagctttaaccaaaccaagattcaagaactacgcaaaccggaatcgg

SEQ ID NO: 12240 - DNA, 359 bp, Arabidopsis thaliana
  unsure at all n locations
  Clone ID: LIB25-081-Q1-E1-D4
caactctttgtcgcgaaccttagctatcgtgtcctctactatctaacccgacccttgtatcttcctcctttcgtagctcagatcctctgtggattattatttagcccaagtgtgctcgggaacacacgtttcataatcgcacatgtattcccctacagattcacaatggttcttgagacattcgctaacttagctctcgtctacaacatcttcctccttggtctagggatggacctgaggatggtgcggatcaccgagctcaaaccggtcatcattgcttttacagggcttcttgttgctttaccggttggtgcctttctttactatctcccgggaaatgggccatccagacaagatna

SEQ ID NO: 12241 - DNA, 374 bp, Arabidopsis thaliana
  Clone ID: LIB25-081-Q1-E1-D8
ttcaagaagaggatcttacaagcctcaggcataggcgacgagacatacgtcccaagatccatctcttcatcagaaaacataacaacgatgaaagaaggtcgtgaagaagcctctacagtgatctttggagcactagacgaactcttcgagaagacacgtgtaaaacctaaagacgttggtgtccttgtggttaactgtagcattttcaacccgacaccgtcgttgtccgcaatggtgataaaccattacaagatgagagggaacatacttagttacaaccttggagggatgggatgttcggctggaatcatagctattgatcttgctcgtgacatgcttcagtctaaccctaatagttatgctgttgttgtgag

SEQ ID NO: 12242 - DNA, 150 bp, Arabidopsis thaliana
  unsure at all n locations
  Clone ID: LIB25-081-Q1-E1-E1
natggttaantgctgctctctccaacnaagccacttgtatcgaaggcttcgatggtacctctggtctcgtaaaatcccttgtcgctggcagtctccgattaactatnttctangcttagggaantgttaccacttgtgcaaccagagcag

SEQ ID NO: 12243 - DNA, 342 bp, Arabidopsis thaliana
  Clone ID: LIB25-081-Q1-E1-E10
tcccaagattcgaactatctcgtcctgtctcggctttgtctcgtaccaaatgtcacttgagtctcctgagagctcgtgggaaatccagcttcctcactcgcagcaccgctactgatgaagctgttgaaactagtagtaacagtggattggatttggttgaggttggattcttgtctggtgttcatggccttcaaggcgagatttgcataaaaccaaacactgattttcctgatttacgtttctctaagcctggtagaagatggttaaaacaacaattgttgggacaagataagattgatgaggttgaattagtcgaaggaagacctcatcctgcgcagaaga

SEQ ID NO: 12244 - DNA, 109 bp, Arabidopsis thaliana
  unsure at all n locations
  Clone ID: LIB25-081-Q1-E1-E11
ggtctatctaaaattcttagaangncggtaatcggaatcctaaccggagctctatcgctcatcctcgttttctcgtcgtcgatttcatccgttgctgcnngtaatgatc

SEQ ID NO: 12245 - DNA, 345 bp, Arabidopsis thaliana
  Clone ID: LIB25-081-Q1-E1-F12
attcttgaacctcagcagtacgaggtaccagatccgactcttgaaccacagcagtacgaggtaccagatcagactcttgaacctcagcagtacgaggttgatgatcagttagagtatcatcaataccagttgcaggaccaggctaatgaagatgtccaagatcattcgcaagatgacctacaatatcagccacaaaatcaggagcagtttcagttacaagacgaggctcatgatcaggctcagtatcaggcgcaaggtgatgtacaagatcacaatggtgatgaagtgcaagataaagtagaagatgaggaaggaattcctgagcatcttgagtctctacagaaa

SEQ ID NO: 12246 - DNA, 452 bp, Arabidopsis thaliana
  unsure at all n locations
  Clone ID: LIB25-081-Q1-E1-F2
ntggggnnngnggnaactttaangcccnagtgnccgtaaaggaattanaggntcgacgcacgcgtcagcacattaatgggtcaaaccttttgctcttccttttgattaatttagtgtttgacaatctcctcctccttctccttcttcttcaaagttttgtcgcagtatctattgttcttacagagagaaaggaaagctttagtcttttaccagtttgatccaattctgggtttcactgaaaaaaagttgggagtttgattcttctaactgtagaagaaacagagtcaacagaagaaaactaaaaaagttgagatttttctctcacgcgctcaagaacttgagtatgtcttcttctgtagcagtgttatgggttgctacttcttctctaaatccagacccaatgaacaattgtgggttggtaagggttctagaatcttctagactgttctctc

SEQ ID NO: 12247 - DNA, 386 bp, Arabidopsis thaliana
  unsure at all n locations
  Clone ID: LIB25-081-Q1-E1-F4
gctgcttctgcggcgatcaaaaacgccgtcgacgataataacctcaccggcgccaccaacaccgcccattctatcaaccaaacaaaatctcgccgctaatttctctctctatggcgctttattgccgtgatacactaatcatcatcttccaaaagctcaccgtcgccgatctagcgcgtgcgagctgcgtctgtaaggtttggaattctgtagccacagaagacgatcttgttgtatctgctttcacggctccatggcggatcaaagaacttgttggaagaccagcttctgtttccgttttggagagataacggaatctggaaatttgctatttctcatcggatttgtcgtggtgatantgtgactaacctcgccgtcaantacgc

SEQ ID NO: 12248 - DNA, 375 bp, Arabidopsis thaliana
  Clone ID: LIB25-081-Q1-E1-F5
ttcacaaacaacctctcgtcttctaggttaatccaatttcgtcgattcatgaagttcacaattctcccatcggaaaattcttcgtaatcgacgacgaagagatcatgagtaccgtcggaggtatagagcagttgatacctgattccgtttcaacgtcgttcatcgaaacggtgaacggttcgcaccagttcacgattcaaggttactctctagccaaaggcatgagccctgggaagtttatacagagcgatatcttctccgttggtggatacgattgggcgatttacttctatcctgatgggaagaaccggaggaccagtcctcgtatatctctttgttcatcgctttagcgagtgattctaatgatattagggc

SEQ ID NO: 12249 - DNA, 231 bp, Arabidopsis thaliana
  unsure at all n locations
  Clone ID: LIB25-081-Q1-E1-F6
ggatnanaaatggcttcntttggaatggnagattttgctaaaaagtttggaaatttgggancagcacaatttgttggtatcatcgcccttgctggagacaagtctgataacattccagtaggttgatggtattgggaatgtgcacgcagtggaactgatatctaaatttgggacgttgganaatctgtngcagtctgtngntgagatcanagagggaanaataaaggagtc

SEQ ID NO: 12250 - DNA, 290 bp, Arabidopsis thaliana
  unsure at all n locations
  Clone ID: LIB25-081-Q1-E1-F8
gatcaccaagaagataacacaagagcccacacatcgtacgccacgtggcagattcacctctttataatcctctctccctcacggtttctacgacattttcacaaagccacaccaactcactcacanaatctgtagaatcatctttcaacaatggcttccactgctctctccagcgcaatcgtaagcacctctttcctccgccgtcaacagacaccaatcagcctcagatccctcccgtttgccaacacacaatctctcttcggcctcaaatcttccaccgctcgcggcgg

SEQ ID NO: 12251 - DNA, 382 bp, Arabidopsis thaliana
  unsure at all n locations
  Clone ID: LIB25-081-Q1-E1-G1
aagtttgcatatgaattgcngactctgaatttctcanaaagataagggcattgcttcattgatatggttaagaaatgttagttgcgtatcctgcgggaactatcaacaaattccaaatccctattagctgctatgccgctttgcgcagattcaagacctcgccttttggtcctctgattagttgttctgtctccccaagatcaatagttccttgtnagcaatgtagagtgttatcattcatcnttttctanaanatatcatattcagcctcaaatgagatggatgttttgtaactcacgcancaaactcganttcatcggatgatgagtaccgttcaacaaccaacataactanaatcttttaacacgttacaggaccgtga

SEQ ID NO: 12252 - DNA, 350 bp, Arabidopsis thaliana
  Clone ID: LIB25-081-Q1-E1-G10
gcacatttgcatcgataataactcaccaacactctctctgtctccatcgaatgtttcctctaactctcaacaaaaatgcgcaaacaatttgtttttcttctgcctttcttgtcacgtctctaccatgtagttatagccggaggagaacggttaactaacggcggtttttcaccggagataaatccgttcacacccaaagcgtctttagtacgttactggaacaaacagatccatcaccaatcacccggctcagcctttctcctctccaaggcttcaccacttaccgccgtcgcctccgccaccttcgccaaactcgcctccgaaaacgctcttccggatcgcctccccga

SEQ ID NO: 12253 - DNA, 349 bp, Arabidopsis thaliana
  unsure at all n locations
  Clone ID: LIB25-081-Q1-E1-G11
tggagaacccncctgatctggatccaactagcgggtcgggtcatgtcgagaaactcggtaaccttgacacctacgtctgtggttccactcattcaaagcttgctgttcttcttgtccctcatgttttcggatatnacactccaaacctgaggaaacttgctgacaaggttgcanaagctggattctacgcggtggttcctgatttcttccatggagatccttataatcccgagaaccaggatcgtccgtttcctatttggatgaaagatcatgaactagagaaagggtttgaggagtcaaagccaatagtggaggccttgaagaacaaaggnataactagtataggagc

SEQ ID NO: 12254 - DNA, 410 bp, Arabidopsis thaliana
  unsure at all n locations
  Clone ID: LIB25-081-Q1-E1-G12
cttttacagctatgtagccgtaannacggcaaaggnattcccggntcgacncacgcgtnngtccaatccttcatcggagctcgttgtcgccgcctcactgtatatcgttgccgtcgttgtatcaacatctcaaggaagcttcgttagatgcggaaaacgtcatggacgcgaacaataccttcgattctgatctgattcacgccatttttaagcacatttgggcccgaagatttcgcgaaagggagaggagcgatgccattgatgctacggaagctgaggttgctctgggaacaaccaagaagaacagacttgcttctgcaaacgcaaatgctttaaaactcanctgtgaacttctcaagagttttgtctcagaggctgtgcagcgcgctgctataatcgctgaagctgag

SEQ ID NO: 12255 - DNA, 388 bp, Arabidopsis thaliana
  unsure at all n locations
  Clone ID: LIB25-081-Q1-E1-G4
cacatttgcatcgataataactcaccaacactctctctgtctccatcgaatgtttcctctaactctcaacaaaaatgcgcaaacaatttgtttttcttctgcctttcttgtcacgtctctaccatgtagttatagccggaggagaacggttaactaacggcggtttttcaccggagataaatccgttcacacccaaagcgtctttagtacgttactggaacaaacagatccatcaccaatcacacggctcagcctttctcctctccaangcttcancacttaccgccgtcgcatctgccaacttcgccanactcgcctccgaaaacgctcttcnggatcgcctcnccgacntctgctccgccgcanacgtcatctgtnttccagantt

SEQ ID NO: 12256 - DNA, 441 bp, Arabidopsis thaliana
  unsure at all n locations
  Clone ID: LIB25-081-Q1-E1-D2
gnnngngnaactttaccgccagtgccgtaaggaattaanggntcgacgcacgcgtcagcccacacgtccgcaaaacaaaaaaaagagcgtggctttatctatcatctggtatccactatccacaactggggtcagcttctggttctctctctcggtaactttctgagctgaagaaccctaattcttatcttcaccggattccgggtatagggctttgtaaagttgttgaatttacaaagaaagatatgctggtttgtctgggttttgtagaagaatctgtgttgttgctttgagattaaagtccgaacaatgttgggtttgattcatgtccttgatgagctcgtcaatggtcttatgccactgcttatcattcagtagtcaaaacccagatcctgaatcatcatcatcttctcttcttcgttataagccttgtgattcgat

SEQ ID NO: 12257 - DNA, 378 bp, Arabidopsis thaliana
  Clone ID: LIB25-081-Q1-E1-G5
gatgacaataaagatgctcagatggaagagcttgagaaagaggtcaaggagcttcgttcacaagagcaggatatattgaagaacttgaagcgtgataagggtgaagatgctgttaaaggtcaagcggtgaagaatcagaaggctctttgggataagattctggagttcagattcttacttcagaaagcatttgatcgttcaaacagattaccacaggagcctgtgaaatcgttattttgttcagaagatgaggatgtctcaacagcatatacagatctagttacttcatctaagaagacattagattccctcttggagttgcaagaggctttgtttgagaagaacccctcggttgatcaacaagtgaatgcaacagct

SEQ ID NO: 12258 - DNA, 376 bp, Arabidopsis thaliana
  unsure at all n locations
  Clone ID: LIB25-081-Q1-E1-G6
tcaacaacttggnangtactgcgtggngcaattcaatcaacaagcacannncgagcaaggaancatangatccattgcgannacagacacggcaatttcgaatccattgcaatttanccgagtagtgtctgctcaganacaggtcgtcgctggactcaaatactatctanggattgaagtcactcaacccaatggctctaccaggatgtttgactctgttgtggttattcaaccatggctccattctaagcanttgctcggtttcactcctgttgtcagtcctgtctactaactttatttcttcttactcgacttaantttccataatatgatcaaagaaaagactaaaangtgtatgatacaaagctattaagaa

SEQ ID NO: 12259 - DNA, 171 bp, Arabidopsis thaliana
  unsure at all n locations
  Clone ID: LIB25-081-Q1-E1-G7
nacatgatgtganantgaacatcttgttctgtggagtttgcgacactgatttacacaccatcaggancgactggggatactcgtattacccagtagttccagggcatganctcgttgggatcgctacacagagttggtaccancgtgactanattcatagnaggagatcgt

SEQ ID NO: 12260 - DNA, 404 bp, Arabidopsis thaliana
  unsure at all n locations
  Clone ID: LIB25-080-Q1-E1-A4
ttttacgcngnccagggcccgganaggaataacngggtcgnnccacgcgtaacggaanaaaatgggatctataacggtagctccgggaaccaccgtcttattctccagtcggcggctagatctttgcggtcgtcgccatgagaatctatccgtcgtttcgtcctcacaaccgtctctgatgccaaagcagagatggctttatattcccgagacgaggttgaaaagagaggttttaaagctcgatgtcgtcggaagagctgctgattccacgagctcttctccatcagtagcttccggtgatagaaccttaattcctgatgatgaattcactttagccaagatttcatttggtgttattgggctaggtctcggggtttcgctactctcgtatgggttttgggggc

SEQ ID NO: 12261 - DNA, 343 bp, Arabidopsis thaliana
  unsure at all n locations
  Clone ID: LIB25-080-Q1-E1-A7
attatcacactttcataaagctcataacatacataaaaaatgggtgaatcttttagattattcaatcatcatcacttcctcacaacttttctcataatcatagccatgctcaaattggttcatacaacaacaacaacaactacaacaacaacaacaaacaccgagttcgtaaaatcatcatgcactttcacaacgtacccaagactctgtttctcttcactctcaactcatgctagtctcatccaaacaagccccaagctcatggctcatgcggctctcaacatcacattagcctcggntaaagtaacttcagcaatggtggggggtncnctcgaataagtcg

SEQ ID NO: 12262 - DNA, 342 bp, Arabidopsis thaliana
  Clone ID: LIB25-080-Q1-E1-A9
gaagaaacagagcaattaaagaaagagtatgtaactttcatgaaaggagttgtctctgctcctctaaatctaccaggaactgcttatcataaagctcttcagtcacgagcaacgatattgaagttcattgagaggaaaatggaagagagaaaattggatatcaaggaagaagatcaagaagaagaagaagtgaaaacagaggatgaagcagagatgagtaagagtgatcatgttaggaaacaaagaacagacgatgatcttttgggatgggttttgaaacattcgaatttatcgacggagcaaattctcgatctcattcttagtttgttatttgccggacat

SEQ ID NO: 12263 - DNA, 404 bp, Arabidopsis thaliana
  unsure at all n locations
  Clone ID: LIB25-080-Q1-E1-B10
ctcntacgcgctcgaggtgccggtacaggaattaacggntcgacncacgcgtcagcccacncgtccgatnaagcttcacctaattagtgtattcccccaaatttctcaattctcactaatggctttggtcagcttacttgaaatctccattgctttcttttgtttccttatctttcgaattttcctgatcagcaagaaaccacaccgttcatttctcacaaactggccgctcctgggcatgcttccgggtttacttaccgtgctccctcgagtttacgactttataaccgaggttcttgaggacggcaacttaaactatcttttcataggcccttttttagggggcatcgacatgttgttcaccgttgatctgctaatatcatcacatcatgagctcaaaactt

SEQ ID NO: 12264 - DNA, 409 bp, Arabidopsis thaliana
  unsure at all n locations
  Clone ID: LIB25-080-Q1-E1-B11
nttgtacncgnccaggtgcccgtaaggaattcanggntcgacncacgcgtcagcttcantccagtagcagtagcctgcgtgttttaccaagagatattacacaccaacagcaagagaactgtcacgcatgtcaggagtagaaagagctccaattctccaccatttcgctgaatcgcttgctggtgcaacaacaatacgtgcttttgatcaacgagatcgcttcattagctcaaaccttgttctaatagatagccattcaaggccatggttccatgttgcatcagcaatggagtggctttccttcaggttgaatttgctgtctcatttcgtcnttgctttttctttggtgttacttgtgactctccctgaaggtgtcatcaatccaagtattgctgggtcttgggggtca

SEQ ID NO: 12265 - DNA, 403 bp, Arabidopsis thaliana
  unsure at all n locations
  Clone ID: LIB25-080-Q1-E1-B5
nttgtaaagtctnangtgccnnaaaanggaaaggnattccggggtcgacncacgcgtccgcttcgtttactccgcttctatggaagaagcttgaatccttctctcttcttcttctccttcttcccttgacatttttgttctgagaagcaacatggccctcggtggcttgatttcaaatcggaacttcggttccttcatcggctcaggcaatggttgtcagagacttggaaaaagtggtgcagaggtttccaagctttttccaaatgcattgttgtgccgtaatcatcaacctctgcaagctagtttacatcatgaatcgggacacatgagaagaagttttggatgtttccttcaaccaagaatggacagtgtaattaggtttaggaacagtatcaaagatnaa

SEQ ID NO: 12266 - DNA, 330 bp, Arabidopsis thaliana
  unsure at all n locations
  Clone ID: LIB25-080-Q1-E1-B6
gtgctgacttacaaaacctgatgaatgaancggcgattcttgcggctaggcgtgagcttaaggaaataagcaaggatgaaatctctgatgctcttganaggatcattgctggacctgagaagaagaatgcagttgtctctgaagagaagaanagacttgttgcataccatgaggctggtcatgctctagtgggtgctcttatgccagaatatgatccggttgcaaagatttctatcattcctcgtggncaanctggtgggctcactttttttgctccaagcgaagaaagacttgagtctggattgtacagtaagagctacctttgagaaa

SEQ ID NO: 12267 - DNA, 399 bp, Arabidopsis thaliana
  unsure at all n locations
  Clone ID: LIB25-080-Q1-E1-B8
naatnctacggccccagnnaccggnacggaattccngggtcgacccacgcgtccgcaaagcctctggagaagatctgtaggtacgtacaaatgtctgaacatgttatggttttgggtaaaggtaacaaaggaatcagcaagaattcttcagtcaatccatatgaatcagcttggttaggtcgttggactcagtcaggtagtgaagtgaagtttcatgatggtgagaccaattgctctaagcagttgataagacctgaagatgagaatcatggagtcgaggtcttgccgtttcctatgttcaaggtttctcaaaagagagagactactactactactactactaaaccgtctttccatgaagatgttggttcaagctcgagagctatggttaatagaatg

SEQ ID NO: 12268 - DNA, 350 bp, Arabidopsis thaliana
  Clone ID: LIB25-080-Q1-E1-B9
tcgtaccctctttactcaggtattttctgaagttaaaagatagaaataatgtctgaaaaggtgggagcgatgggtggtaacaagggtggagcattcgacgatggtgtttttgatggtgtgaagaaagtaattgttggaaaagacttcaacaatgtaacttatatcaaggttgaatacgaaaaggacggaaaattcgaaattcgtgaacacgggactaatcgcgggcagctaaaagagttttcagtggattatccgaatgaatatatcacagccgttggtggaagctacgacactgttttcggttacggatcagcgttgatcaagtcattactcctcaaaaaccccttatg

SEQ ID NO: 12269 - DNA, 401 bp, Arabidopsis thaliana
  unsure at all n locations
  Clone ID: LIB25-080-Q1-E1-C1
nttgtaaagcncaggtgccggtaaaggaatnacgggtcganccacgcgtncgcggcaaacgcagagtagcttgaagaaatccgttgctcattctcttctccgatcgtttttttcttcgcatcccaaggtctctcagttacagaagatggagaaaacgccgttcgttctctgtttctcagtttctcggaatcaaattccagattacaatccggacgaagcgaattggagtgagaaaattctggatcatgtgggtgatttcaaaagtctggaagaagtggtgtctaagctgacagagaatctgaatctgaccgagtctcagattgcgagtatttggaagtcattgattaaggcaagaagaagaagctcaacaagttccaacaccaacaacancaacgaagtgc

SEQ ID NO: 12270 - DNA, 405 bp, Arabidopsis thaliana
  unsure at all n locations
  Clone ID: LIB25-080-Q1-E1-C10
tcntacngntcaggtgccgtagaagaattaanggctcgacncacgcgtnaagctctcnccgtagatgttgacaagttctactctttatgcgatccggaaatggagaatctgtgtttgtacggacacccgaatgggacatgggaagtgaatcttccagctgaggaagtgcctccggagctacctgagccagctcttggaatcaatttcgctagagatggtatgcagcgtaaagattggctctctttagttgctgtccacagtgattgttggttactctctgtttcttcttacttcggcgctcgtcttaatcgcaatgagaggaaacgtctatttagtctgatcaacgatctcccaactctcttttgaaagtagtgacggggtangaaacccatcaaaagacggtaa

SEQ ID NO: 12271 - DNA, 425 bp, Arabidopsis thaliana
  unsure at all n locations
  Clone ID: LIB25-080-Q1-E1-C11
nggngnnnnngnggnnaatcntaccgcngaggtgccggtncnggaattaacggntcgacccacgcgtcanggaaaaggaaccatcacgggcaagtttgtgccaattctatgtggttcagcctttaagaacaaaggagtgcagccattgctcgacgctgtggtcgattatctgccttcgcccgttgaagtcccgccgatgaatggaacagatcctgagaacccggaaattaccattatacggaaaccagatgatgacgagccatttgctgggctagcattcaagatcatgagtgatccttttgtgggttctcttacatttgtgagggtttactcagggaaaatctcagctggttcttacgtgttgaatgctaacaaaggaaagaaggagagaatcggaaagactccttgggaatgcacgcaaacag

SEQ ID NO: 12272 - DNA, 337 bp, Arabidopsis thaliana
  Clone ID: LIB25-080-Q1-E1-C7
ccacactcacaaagggctcacaagtctcaaatacaaaacaatgaagaacatactagcttgcatagttaccatcataaccctctcaaacctcataaccatttctcaaggaagaagggtatcacagtcatttgaaacatttgagtacacagcaattatttgcagatcccacagtgcctccataacagagtacggtggtgtaggagacggcaagacgctaaacacaaaggccttccagagcgccgttgatcatctcagccaatactcatctgaaggcggagcacagctctttgtacccgccgggaaatggctcaaccgggaagttttcaacctcacaagc

SEQ ID NO: 12273 - DNA, 409 bp, Arabidopsis thaliana
  unsure at all n locations
  Clone ID: LIB25-080-Q1-E1-C9
nttntacgcggtccaggtagcggtacgaggaattaacggntcgacgcacgcgtcagctccgtcaccgagggagagcaaccatgccaatctcaattccccttaacgccactctacaatactcgtctccttcttcttcttcttcttcttcttctctcgtaccttcttcccctcttttctctccgattccttcaaccactgtttcccttaccggaattcgccagcgatgcctcaggatggtcacttcttgcgtctccancgctcagaaatccgtcctgaatggtgccaccgattccgtctctgtcgtcgggcgggagcagattcgtcttggtcttcctagcaaaggacgcatggccgccgattcgctggatcttctcaaggnttgccaantgtttgtcaaacaaagtcaatc

SEQ ID NO: 12274 - DNA, 405 bp, Arabidopsis thaliana
  unsure at all n locations
  Clone ID: LIB25-080-Q1-E1-D10
cttgtaccgctccaggtagcngtaaggaattcacggntcgacccacgcgtcagctcatatttaaccgggctaaacagtactccaaggagtaccaggagaaagaaagggaattaatccagctgaagcgtgaggcaaaattgaaaggaggcttttatgttgacccagaagctaaactgcttttcattatccgtatccgtggtatcaatgccattgacccaaagacaaagaagattttgcaacttttgcgtttaagacagattttcaatggtgtgttcttgaaggtcaacaaggcaaccattaacatgcttcgccgtgttgaaccctatgtaacctatggatacccgaacttaaaaagtgtgaaggaattgatttacaaacgaggttttggaaagcttaaccaccaaa

SEQ ID NO: 12275 - DNA, 424 bp, Arabidopsis thaliana
  unsure at all n locations
  Clone ID: LIB25-080-Q1-E1-D11
nngggnnnnnnnngnnaacttttacgcgnccaggtgncggtaaggaattacgggtcgacccacgcgtcngtttatctctctatacacaacaatggcggtcttcgttttatctctactcatactctcttccttctcagccattccattcacttatgcagattctggaatgatcggagttaactacggccgtatagcagacaatcttccggcaccggagaaagtagttgagctactgaaaacacaaggaatcaaccgcatcaagctttacgacaccgagacaactgtactaaccgcactcgcgaactccggaatcaaagtcgttgtctctctccccaacgaaaacctcgcttccgccgccgcagatcagagctacaccgacacttgggttcaggacaacataaagaagtacattccagcgacggga

SEQ ID NO: 12276 - DNA, 400 bp, Arabidopsis thaliana
  unsure at all n locations
  Clone ID: LIB25-080-Q1-E1-A3
tgtacgcgcccangtgccggtaaaggaattaacgggtcgacgcacgcgtccgcccacncgtccgcttctttatatgagcgaagaagatgcattctggttattagttgcattactcaaaggagctgtccactccccaatagaaggattgtatcaggcagggcttcctcttgtacagcaatatctgttacagtttgatcagttggtaagagagctaatgcccaaactaggagaacatttcactcaagaaatgatcaatccgagtatgtatgcaagtcaatggttcataaccgtcttttcgtattcacttcctttccattcagcgctacgaatttgggatgtgtttctagctgagggtgttaaaatcgtgttcaaagtcggtttaacaataatgaagcaatgc

SEQ ID NO: 12277 - DNA, 198 bp, Arabidopsis thaliana
  unsure at all n locations
  Clone ID: LIB25-079-Q1-E1-B6
gaatggtagaagaagaggagttgcagtttcacgaggagtatatgaacgaaagagatcctagcatccttcactttcttttagcttcaggagatgatgtctctagtaagcagcttcgtgatgacttgatgacantgcntanagccggacatgaaacatcggcggcagtattaacatggaccttttaccttttaacaacga

SEQ ID NO: 12278 - DNA, 186 bp, Arabidopsis thaliana
  Clone ID: LIB25-079-Q1-E1-C4
agcacccttggttaacttttctggtcacaaagatgaaggctatgctatagactggagtcctgcaaccgctggaagacttctttccggggactgcaagagtatgattcacctgtgggagccagcttctggttcatgggctgttgatcctattccgttcgctggacacactgcaagtgttgaagattt

SEQ ID NO: 12279 - DNA, 324 bp, Arabidopsis thaliana
  unsure at all n locations
  Clone ID: LIB25-079-Q1-E1-C9
aaatcttttttttttttttgttgtctttcttctcgagagagataagtgaccaaagggtttcgatttctggaaatagtttgaataaaaaagtaatttttatgtgattattggcaaagaaaagttttagttttttttagtttgtgagagatgtctggttctgtatctggttgtggttctggtggttgtagtattgtatggtttagaagagatcttagggttgaagataatccagctttagcagcagcagtaagagctggtccagtgattgctctgtttgtttgggcaccagaangaagaaggacactatcatccaaggtagggttt

SEQ ID NO: 12280 - DNA, 302 bp, Arabidopsis thaliana
  unsure at all n locations
  Clone ID: LIB25-079-Q1-E1-D12
gttttagctttctcctctacttcgataatgccgtttgctccttccttgttgtcatcgtcttcctcaagtctctcaatttcttcccagattccccaacgcgactagattcaatgtaactccacggagcagagccgccaccgtcgtcgcggcatccgtcaccgacctagccggggtcgacagtacaacaatcgccgtactcggtggaggatccgtagcagcactcgcggcgatggtttccttaacggatccggagaggaggcggaaattgcaggcggagtaagttggcggangcnanaangagg

SEQ ID NO: 12281 - DNA, 185 bp, Arabidopsis thaliana
  Clone ID: LIB25-079-Q1-E1-D2
atttcggatttttgcatcttctccgatcatcttcaccactatgggtgcttcatcttctacagacgacaaagaatcatcggagaaacgagaaatcgaaagccttgctgcttcaaccggagctcttcctctgcttaaacgatccttctccaaactcgtcgattctcaaaccaatactgttccttttt

SEQ ID NO: 12282 - DNA, 210 bp, Arabidopsis thaliana
  Clone ID: LIB25-079-Q1-E1-D6
aaaaccaccaaatcagtttcgttgtcccaaatccaaaattcctccttcttcttcgctgtaacgctttatacctaatcggagataaaacaatgcaatcgtcgaaaggacggcggaaagttggctccacaaccgccggagccggtatagattcggcggagaagctcgacgagctcttgatatcgtctgccatttgtaacggtgaagatttaa

SEQ ID NO: 12283 - DNA, 209 bp, Arabidopsis thaliana
  Clone ID: LIB25-079-Q1-E1-D7
aaaaccaaaaaatcctttgaaacttttttagcctgtcgcttctctttccatcgtcttcctcgtgaacgaaacttctcgatcttcttttcttttttttcacctgtttttcggtatcacgagaatactacacttcccactccactttatcggatatatttccttgattttctccgattgtggtcaatctggaaaattattgagaatctctt

SEQ ID NO: 12284 - DNA, 207 bp, Arabidopsis thaliana
  Clone ID: LIB25-079-Q1-E1-D8
tcaagatcaaaagagatgtcatcaatagcttctggcacagtttcaacaaccagatcgacactttgtttcagaaaaatcccaaagtctgcaactgttttatctatgcttcatcgatcttcttcttcttctccacgaatgttattattgttgtcttcttcatcagctaactctgcaaaactactgaactctaacaatggtctcttaatt

SEQ ID NO: 12285 - DNA, 323 bp, Arabidopsis thaliana
  unsure at all n locations
  Clone ID: LIB25-079-Q1-E1-D9
ttctcttttagggattgtttttttaacaatttttgccttgccataagcaatacaaccatggcaaggatctctctgttgttcncattaggcctttgttttagccctcggctcagtgttcctttccgtttccggtcacgctcctcccgtgacaccgagaaaatcagcatgtccaaaaacagtatccgaactccagaccttaccttttaccgaaatcactgagatcctaaaccgaaaagagcggtctgccccgaaaacccctgagttcaaggcaatgttcacaatgtgcaaaggctacgtgacatacctcgagagcctctacaagt

SEQ ID NO: 12286 - DNA, 325 bp, Arabidopsis thaliana
  unsure at all n locations
  Clone ID: LIB25-079-Q1-E1-E12
gcggatttcatcttagtttgcttttctttgttttcttttgantccggtattttgccggtttaaatttccgacttgttcggaatttcttccggttttattgccggttttttgataagatcttttgcaagttgcaaatcaccacttccaatcttggnagatgtttaattccgggagagttttagatggatctttgttcattggatgcntganttttcttccatgtgaaggtaaattcctcgctttgctaataagagcgtaagggcgtcggttcttcatgggtgacagatcaagatgtttgcggttgattggagaggagtatgaagag

SEQ ID NO: 12287 - DNA, 168 bp, Arabidopsis thaliana
  Clone ID: LIB25-079-Q1-E1-E2
tctagatttctaggattaaacccgactaaagacctcggttcgcgggccatcagagggttcacaaattacccggacgaccatggattccgacaagagtttataatgaatcaagatggacaacgtcgtaagcggacgacttcctataactcacaaactcgtcttttggtt

SEQ ID NO: 12288 - DNA, 54 bp, Arabidopsis thaliana
  unsure at all n locations
  Clone ID: LIB25-079-Q1-E1-E3
cncncaccagaacgtttgttgagaagaattacaaagatttgaagtctcnaaggc

SEQ ID NO: 12289 - DNA, 208 bp, Arabidopsis thaliana
  unsure at all n locations
  Clone ID: LIB25-079-Q1-E1-E7
ctcgctcgctttcgccgccgtgaaatttgantctccgatcactacaacgattccgatctgtcctccgttgatttcgatcccgattttgatattgtntcgacangaaattggtgtgatctcgtttcgagtttcgtggcgtatttgcttantttaagtgtgtggaatcgatttttaatgggggaataattctggtagaagtanaaactct

SEQ ID NO: 12290 - DNA, 125 bp, Arabidopsis thaliana
  unsure at all n locations
  Clone ID: LIB25-079-Q1-E1-F1
tganngcaatcanctgggaacatgaatcatctccggtttatcaggattttcgngttcttcctctcttcgctgtgttcttcccttcgattcnatttctcctcgatagattcgtcntcganaaattg

SEQ ID NO: 12291 - DNA, 195 bp, Arabidopsis thaliana
  unsure at all n locations
  Clone ID: LIB25-079-Q1-E1-F3
atttcaatttctatcaaggaggaatcccggaggaaatcactaggcttccganancagatatactttgggtgcccagagctacgttanaaggtagatttccaggagattggggttcatgtcaaaacttggagatggttaatttgggtcagaacttctttaaaggcaaaaattcctgtcggtcttagtaaatgcaat

SEQ ID NO: 12292 - DNA, 180 bp, Arabidopsis thaliana
  unsure at all n locations
  Clone ID: LIB25-079-Q1-E1-F5
ttgcagactttcccaggaccaaaattannttaanaaaaagttccttttttctgatcaaattgtgaaattcgcttgcttgctttcttcacagtcaattaattctctaacaaaacattcttcgatcgttcgttttcatcttctatgcttctctgatcagacanaagaanacaaccaaagaaa

SEQ ID NO: 12293 - DNA, 203 bp, Arabidopsis thaliana
  Clone ID: LIB25-079-Q1-E1-B5
atccagattctctctacttctcttatcttcgatagagaaatttgtatcttcagatttattcgaggaggaagacgaaccctacttgattgatttaggaggtggagagatctttctgaacaagtttgattctgttggtaattgatctgaaatcctaggttttagccgtagatctgctgcttgtttcgatcgatttgggataccgc

SEQ ID NO: 12294 - DNA, 204 bp, Arabidopsis thaliana
  unsure at all n locations
  Clone ID: LIB25-079-Q1-E1-G12
gncggnaaaatcgtttggggctcgaaaacttcctcggctcgcctcacttgctccgncaattctcnagctttcgctctccaggatncaaaatctcgtttggaaatcngattttccacctttacccagtancatttcttcttacaagggttcttcagangactttattgantgctaatatacaactggccgtgactgttgttcgca

SEQ ID NO: 12295 - DNA, 212 bp, Arabidopsis thaliana
  Clone ID: LIB25-079-Q1-E1-G3
gtgtaccaatctctcccgctctgtctctctctctctctttcctccatctctctgtgttcttcttacagacaccgagaatggcggatcctgatctgtcttctcctttgatccaccatcaatcctccgatcaacctgaagttgttatctctatcgccgacgacgacgacgacgagtcaggactcaatcttcttccagccgttgttgaccctcga

SEQ ID NO: 12296 - DNA, 208 bp, Arabidopsis thaliana
  Clone ID: LIB25-079-Q1-E1-G4
ttctaaggcttgcagagagacgtgctattagtttaggggacagtcctacccttgaacgaaggcgagacgacctaagtcaagcagttttacaggccaagaatgcgagtaatagcgatggtttagtaggttctgctcaaggtgtttctgacagtggattgcttgatctgcttgaaggaaaactcgcagttcttcagttccaaattaagat

SEQ ID NO: 12297 - DNA, 180 bp, Arabidopsis thaliana
  Clone ID: LIB25-079-Q1-E1-G5
ttctgacactaccctcatcgggtctccaagaggccaagaaagacctctttctcggcttctaggagtctcatcattctcttttttcacatttgcttcctccacacgcaacctccaaaaagccctaaatttattaaaacaaatggattccacggagctgaaccgtgtgttccaaatgttcga

SEQ ID NO: 12298 - DNA, 208 bp, Arabidopsis thaliana
  Clone ID: LIB25-079-Q1-E1-G7
aaatctcgagacaaagatacaatggcgagccgaaacagagcactcttctctgtttccactcttttcctctgtttcatcgtctgcatctccgagcaatcgaacaatcagtcttctccagtcttcgcctgtgacgtcaccggaaacccttctcttgccgggcttagattctgcaacgcggggttgagtatcaaagcccgagtcaccgatc

SEQ ID NO: 12299 - DNA, 58 bp, Arabidopsis thaliana
  unsure at all n locations
  Clone ID: LIB25-079-Q1-E1-G8
tatcntatggnccatcctccggagacgtgtatccgtcagagtatatcatnacatggca

SEQ ID NO: 12300 - DNA, 197 bp, Arabidopsis thaliana
  Clone ID: LIB25-079-Q1-E1-H1
tttctttcttatttcagtaaacgagagatatgttttcaatctcaatctgattctttctcgcagcggctaattctagtgtcgctaatagggtctctgtttcttcaaatttagttctttaaattcactacgaagatttttgttatggcgagtagaaagctggttcgagatttactgatcacaaagcagcctcttctcca

SEQ ID NO: 12301 - DNA, 128 bp, Arabidopsis thaliana
  unsure at all n locations
  Clone ID: LIB25-079-Q1-E1-H11
aagtcatcaaanggcttaagggtagggatgcttccaaggacgggcttgtctgcactgctcgtaagccctgnatcgctgttggaatgattgaaccttgactanaacagagcccngcatttcgangttga

SEQ ID NO: 12302 - DNA, 197 bp, Arabidopsis thaliana
  Clone ID: LIB25-079-Q1-E1-H2
atgtcatgatcgaccatgagctgcgcaaacttcgcctaatagattggggtctcgctgagttttatcatcctggaaaagagtacaacgtccgtgtggcctcaagatacttcaaaggtcccgaacttctagttgatttacaggactatgactattccttggacatgtggagcctcggttgcatgtttgctgggatgatt

SEQ ID NO: 12303 - DNA, 95 bp, Arabidopsis thaliana
  unsure at all n locations
  Clone ID: LIB25-079-Q1-E1-H4
ggagagacaccctctccataaatttagttntgatccctcgtgggttccttgatggaanaaaacaccaattccacttcatattcttcntcagtacg

SEQ ID NO: 12304 - DNA, 180 bp, Arabidopsis thaliana
  Clone ID: LIB25-079-Q1-E1-H5
actcaggatggactcagggtgttgacacctcgtgtagatggaattgattcatctgtcagtcatcgtgggaaccactttttcatccagagaaggagcactgaattttacaactcagaactgatcgcctgtccagttgatgacacatcaaagacaactgttctgcttccacatagagaaagc

SEQ ID NO: 12305 - DNA, 207 bp, Arabidopsis thaliana
  Clone ID: LIB25-079-Q1-E1-H7
aaagacatgtctgggttggcagtaatgcttttgcttctcttctttgcaaatcccggggtgcttctatactaacattgtacgtaagaaggaaaaaaaaagaacgctgcatttctcgaatgtgtaagaatcccggtttcaaggaggttttagggtgggtttattatgaatcaaaattccgtttgggggtatgtgatgatggttttagct

SEQ ID NO: 12306 - DNA, 341 bp, Arabidopsis thaliana
  unsure at all n locations
  Clone ID: LIB25-080-Q1-E1-A10
tcatctatatatacctaagaaagaaaagagttaaagaagtatattttcgattcaaagaagaaaaatgaattctcaccagaatcaaaccggagtgcaaaagaagggaataacggagaaaatcatggagaagctaccaggtcatcatggacctactaacactggtgttgttcaccacgagaagaaagggatgacggagaaagttatggagcagctgccaggtcatcatggtgctactggtancngnnggtgtnnacaacgagaagaaaggaatgacggaaaaagttatggagcagctgccaggtcatcatggatcacaccaaactggaaccaacacaacttat

SEQ ID NO: 12307 - DNA, 406 bp, Arabidopsis thaliana
  unsure at all n locations
  Clone ID: LIB25-080-Q1-E1-A12
cttttacgcgnccaggtnncggtaaggaattcacggntcgacccacgcgtcagcaaaaccgaagctttactgaagcttctgacatggcggtatccgagttccaatgactttgggtctgaaattattcctgcagctataaaagatcacaatgttcaaggatacatctacagagactattgggaagacatcggaactattaagagtttctatgaagctaatattgctcttgtcgaggagcatcccaagtttgagttttacgatcagaatacacctttctacacttctcctcggtttctaccacccaccaaaaccgagaagtgccggattggnaattcggtaatctcacacggatgtttcttgggagaatgcagcatccaacgttccattattggtgaaagatcacgtc

SEQ ID NO: 12308 - DNA, 396 bp, Arabidopsis thaliana
  unsure at all n locations
  Clone ID: LIB25-078-Q1-E1-G10
agcagtctcgtcttggtgttgtgcagacagcttacgcgaatggtgcgtctactgattacctaaagcatttgggtttagatgttgtttttgctaaaactggagttaagcatttacacgagaaagcagcagagtttgatattggaatctactttgaagctaatggccacgggactattctcttctcggaatctttcctatcttggttagtttccaaacaaaaggatcttacggctaaaggtcagggtggttctgaagagcacaaagctgtttctagactaatggcggtgagtaatctgattaaccaagccgtangtgatgcctctaagtggaagtgctcctgggtgaagtgattctacaaacacctggggatggtcgaatngaagaaattgganntga

SEQ ID NO: 12309 - DNA, 412 bp, Arabidopsis thaliana
  unsure at all n locations
  Clone ID: LIB25-078-Q1-E1-G2
tgaagaagacatcaatgactggcttccataaacttttaaagctctctctttcagattcctctctatccatttcattaacaccaaaacctttttcttctctctaaccaaacaagaagaggactccattttcgcaagaatggggaggcttaagcaatgttggtcaagtctgctantattggcagtgttggtgatcggaactggagccgttcccatcacttatctccaaagcgccgtcgctaaaggagccgtgtgtttggatgggaagtgcaccagcttaccattttgacnaagggtttggttcgggtgttaacaattggatcgtcnacatgggagggacgaaggatgggtgtaccgacgttgcttcatggtantgaacggtanngggnacaattgaaaggggttccttccaaag

SEQ ID NO: 12310 - DNA, 477 bp, Arabidopsis thaliana
  unsure at all n locations
  Clone ID: LIB25-078-Q1-E1-G3
tggtatnncctgcgcctaccganaccggaaattcccnnggtcnacccacgcatccgcacagaanaacctanaaagctctagagagaaagagagagagagatggaaggtaaagaagaagatgttagagtcggagctaacaagtttccggagaggcaaccgatcggaacttcggctcagagtgacaangactacaaagagccaccacctgcgccgttgttcgagcccggcgagctagcttcatggtccttctgganaagctgggattgctgagtttatagctacgtttttgttcctgtncatcactgttttgactgttatggggtgtgaagaagtcaccnaancatgtgttgcttcccgtcnggnaatccaaaggtatcncttggggcttttcggtgggtatgatncttcgctcctccgtcctactgcaccgctgggtatctcccgggtgggacacatncaanccaacgggnttacgtt

SEQ ID NO: 12311 - DNA, 336 bp, Arabidopsis thaliana
  unsure at all n locations
  Clone ID: LIB25-078-Q1-E1-G4
acngatccttaggaaggnaccnccctgaatacaaatacatctacttcaatggtgagcgggttagagtcaaaagatatttctctgaagatagttgatttcattcntatgaacacacacaaccacacacatgtatatgtagaagttacccccaagttttttacccntgattgtaatttctaatttgtgaattcatcaagaagatggtaaaatgaatctccatttataaagttatcttttattctcgaggaaaacaaacgaantgtcaaatgttcaatgacactcatgctttatagtgttcanaantcccntgcaaaaaaaaaaaaanaaaagggnggg

SEQ ID NO: 12312 - DNA, 415 bp, Arabidopsis thaliana
  unsure at all n locations
  Clone ID: LIB25-078-Q1-E1-G8
agcttcagaggaagaagaagaagagagtgagaaacaatggcgtcnacgactctctcaatcgcaacaacaatccgttcctcttctcctctcacttccgcttccactcatcacttcctttccaaacccancgcaatcgaattcccatttcgtctcagctcttcttctagccaccgtgcaatcaacctccgtcctatctccgccgtcgaagctccggagaaaatcgagaaaatcggatncgaantctcctccttaaccctcgaatnaaagctcgtatcctcggtcgactatctccaagacaaattcggtgtctccccaagtctccttancccccggcagcagccggtcgttgcagctccaagcncgacgggtggcccggcngctngtngtggagggagcaaancagnagttcgnatnt

SEQ ID NO: 12313 - DNA, 372 bp, Arabidopsis thaliana
  unsure at all n locations
  Clone ID: LIB25-078-Q1-E1-H10
ccaatggcgggtttcagttctctaattcctagaacgcttctgaaacgcgccgttagtagcgcaacaagaaatctaacggcgccgttagcttctatttcagcagcaagaaatctcttcattggaggangatgtgacgaaaattatggtgagccaggaagtgttttctcattccaatggaataaggaaagtacaacaccgttggtaatgctggngcactaactggtccatttcatcatcttcttggggtcaaccagacaaacaagcccgcctttttaagggtccaatctangagctatcagtttgtcgctgattctcattcatctcctaaacgtattgtgaanaatgaggatgagggaanatttttctgantca

SEQ ID NO: 12314 - DNA, 400 bp, Arabidopsis thaliana
  unsure at all n locations
  Clone ID: LIB25-078-Q1-E1-H11
tttagggtttccatttttctttccgttcttccttcaatcaaatactcgaaaccctaatctcttcttgatcaggccttgtcgatttactgtcccttgtancaacttaaggttcatgtctgatcttgaagttcaagtccccactgcctttgatccgttcgctgatgcaaatgcngaggactctggggcgggaacaaagggaatacgtgcacattcgtgttcagcagcgtaatggtagaaaaaagcttgacaactgtccaggggcttaagaaagagtatagctatagcaagatacttaaaggaccttaagaaaagaattctgctgcaatggcaccgtcgtccaaggantctgaattaggacaaggttantcagcttcaaggtgatcaagaggaagaanngtnt

SEQ ID NO: 12315 - DNA, 403 bp, Arabidopsis thaliana
  unsure at all n locations
  Clone ID: LIB25-078-Q1-E1-H2
gcncacgcgtccgaaaaagcttttaacctcagccgttaaatctttctccgatcatgccgaccagaaacatcgccattggtggagtccaagaagaggtctatcaccccaacgcacttanggcggcgctcgctgagtttatctcgactttgatcttcgtcttcgccggctcaggctccggaattgctttcaacaagatcactgacaatggagcaaccactccttccggcctcgtcgccgctgccttagctcatgctttcggtctctttgtcgctgtctctgttggngcnaacatttccggtggccacnttaaccctgccgttaacttngggggcntaatcccgnngnnaaaatcantctccnccgtgggantctccactgggattgctcnancntctttggntcc

SEQ ID NO: 12316 - DNA, 385 bp, Arabidopsis thaliana
  unsure at all n locations
  Clone ID: LIB25-078-Q1-E1-H4
gtcccngccngacatccggttnaacggnaanttaaaatcancttcanaaancttctcaaatctcttcnaattttctagaaaaaacatgtcttgctgtggtgggaagctgtggttgtggatctgcctgcaagtgcggcaatggttgcggangttgcaaaaggtaccctgacttggagaacaccgccaccgagactcttgtcctcggtgttgctccggcgatgaactctcantacgaggcttccggcgagactttcgttgccgagaatgatgcttgcaanatgcggatctgactgcaagtgcaacccttgtaccctgcaaatgaaagaacttcataanacccnaangtctggtnntaacccnaatgttaangttaagtttgcctana

SEQ ID NO: 12317 - DNA, 401 bp, Arabidopsis thaliana
  unsure at all n locations
  Clone ID: LIB25-078-Q1-E1-H6
tgctaactttctcagcttccagatatctctctctctgaggagatatcaaaggttgatccaaagaaggtgtttcacgttgttgaaattggataattcagaaaaaagcacctggaatcaatcactcaagaggagttgaaggaaccaaagccctaataaactagggaaagtaatctatcctcgccggagtcgttgtctcgccgataaggaacgaaggacgaagctgtcttcgatttccgggattgaagattcggttttgagctcaaatcgtcgactgagtaatgggggttgatccattcaaaactacggaaacgttagaagccgacaaggaaaccaatggtggtgtccctgtgaaggataaattgacttttaaagctcctgagagaaagtcccgtttangtttg

SEQ ID NO: 12318 - DNA, 214 bp, Arabidopsis thaliana
  Clone ID: LIB25-079-Q1-E1-A1
caatcactctctcttctttagcgtttttattttgtcttcctcgttttcttctacctttttatattttctctcttttcagttttctctagaaaaaaacactagtaatcagtttgcgtttgataaatatttgatgtggcaaaactcttgtggatcttgatgttcaaacattcatgtctccggtgattagtgaaatccttagatctggtttaactat

SEQ ID NO: 12319 - DNA, 337 bp, Arabidopsis thaliana
  unsure at all n locations
  Clone ID: LIB25-079-Q1-E1-A10
ttgttcgttctctggcggccgatcccgtcgctcgctaccttttaagatattttttttatctaatgaacctgaaattgtaattaggcatataattggggattatttgctgaaattctcatttctagatcgaaaaaagcgaataattcgttttcatttgattcttgcctaatcttagggtgtctttatttatctaccaaaagaatgtctaattatcngaaggagatgatgctgangtacatggaangacgtagatnatgagatggaagatgttgaaggatgaaatggatgagggaggtttcngtgggtgagtgatcntggggtgctttcaagattnctg

SEQ ID NO: 12320 - DNA, 213 bp, Arabidopsis thaliana
  Clone ID: LIB25-079-Q1-E1-A7
gcccacgcgtccgcccacgcgtccgcccacgcgtccgcccacgcgtccgagagcttatcttggtttgttgtgaaggttttggtactagtggtatctctattgttgccaacaagtgcagaaagctgaaagtgcttgatttgattgagtctgaggtcacggatgatgaagtggattggatctcttgtttccctgaggatgtaacttgtttggagt

SEQ ID NO: 12321 - DNA, 333 bp, Arabidopsis thaliana
  unsure at all n locations
  Clone ID: LIB25-079-Q1-E1-A9
atgaggaagagctgaaagattcgcgacgaagcaaaacgacagtgttatctatcgccgccttgttgttctgtttaacaagtgtanaggaaccaaagttgaaaactttgaacttcccattgattttaatgttaattactgatcattcgaatctgaaattgaagcatatgagtgcttaatctgtgagtgttagaagaagtagaagaagatgcagagggttagggtttcatctcaaagagcagttgtgcataaagcttggggattctcagatgacattatctcccaaaatttaagaggtagctgcatcgatacaatcgacaattgttcgatagatca

SEQ ID NO: 12322 - DNA, 311 bp, Arabidopsis thaliana
  Clone ID: LIB25-079-Q1-E1-B11
aagaagaagaggaagaagaaaatggcgaatcttaactcagctattgattcagtgttttgggatcagaacgtttcttcacctcaaacccttgaaggcactgctcgctctgttcccggtgagccatttcccttagacggagcacgagcaagccgctctcaccggattcaacagctctctctgcttcgcgaaggctttcctcttggaatcattccttctttggctcctgcttctgacaagagactcggctctttctctctcaattctctcttgctcagtccttcctctaacaactggtggttaggtttagttgg

SEQ ID NO: 12323 - DNA, 325 bp, Arabidopsis thaliana
  Clone ID: LIB25-079-Q1-E1-B12
atagggtcttatcaatattttgcaaataaaccaaaattaaatacagacttgtttaatttctgaatctctctcttcctctttctcgcgagctttttctctctgggtttagggttccggtaattttgcgacgacaccgagcgattcgtgcctccctccccttcctttgacttcggttctaacttgattaccagtgagaagtaggctaagatggaaatcatgtcaagagagaatgagactgctttgtcaggtcctaggccgatggaatggtctaccgtcccacacagtgcttctcaaggacctggtcccaatggcaagaaccggaccg

SEQ ID NO: 12324 - DNA, 216 bp, Arabidopsis thaliana
  Clone ID: LIB25-079-Q1-E1-B3
acaatggtttggttaatgaaagtttttgtctttgtgacattactctctttagtgtttgtaataacagaatcagctcctgaatctgctcttatcaccaaacttcctggtttcgaaggcacttttccttcgaaacattactccgggtatgtgacaattgataaggaacatggaaagaatctatggtattactttattgaatcggagaagaatccatca

SEQ ID NO: 12325 - DNA, 398 bp, Arabidopsis thaliana
  unsure at all n locations
  Clone ID: LIB25-078-Q1-E1-F8
cagaaaaaaaataacaacaacaacaataatggcgtcttttgcaacccatcttgttgttgttgttacaatgttgtttgtagccatggcctccgcggagatgcttcaagatgtttgtgttgctgatttgtctaatgcggtcaaggtcaacggatacacttgcaaggactcaacacaaataacaccagaagacttctacttcaaaggcttagccaacattgccgccacaaacacctctaccggctcagtcgtgaccggagccaacgtagaaaagctaccgggactcaacactctcggcctctccatgtcccgcatcgactacgccccaaacggcctaaacccaccccatgtcnacccacgtgcctccgagcatcattttccgtccttggaggtcaagctct

SEQ ID NO: 12326 - DNA, 433 bp, Arabidopsis thaliana
  unsure at all n locations
  Clone ID: LIB25-077-Q1-E1-A2
aaatcaaaaattcgccgagagcacaaaccctaatggcttctctctcaatggcttccgttaacgttagcttctgtcatcctttacgctcttcttctccaaaggtctcacttcgcagttccgttcatttcgcgacgagtctttcctcaagtcactccatttctgggcttcgcgctgttttgcctctgaagatttctacagttgcttcccccaattctcaaaagcttcattcttttaccgttttcgctcataagggctacaagatgaagacccacaaggcctcagcgaagcggttcagagtgacgggtagagggaagattgtgaggaggagatctgggaaagcangcatttgttagctaagaagaacaacangaggaaattacgtctatccgaaaatgacggnagtgaaccgggagcgactatgacaacgtgattg

SEQ ID NO: 12327 - DNA, 493 bp, Arabidopsis thaliana
  unsure at all n locations
  Clone ID: LIB25-077-Q1-E1-A4
ttggtagccngcaggccaccganccggaatncccgggncgacccacccntncngcggacncttgggcggacccttgggcggacccttgggcggacncttgggaaaaancgtctctcgcttgagctgcgangatgcaagcagtaaaaagatccaggagacatgttgaagaagagccaacaatggtagaacctaaaaccaagtacgatcgtcagctcangatttgggggggaagtaagtcaagcggncttggganaagccgagtatctgtttactcaattgtggncctactggttccgangctttgaagaatctcgtacttggtggtgttggtaacatcaccgttgttgatggatntaaggttcaatttggtgaccttgggaacaatttcatggtcgatgccaagaatgttggccaatcaaaaanccaaaatctgtttggtgccgtttctccaagagcctaatgattccgttaaacgccaaagtttaantgaagg

SEQ ID NO: 12328 - DNA, 426 bp, Arabidopsis thaliana
  unsure at all n locations
  Clone ID: LIB25-077-Q1-E1-A6
tcagtttctgctatgatgaacatcananaaacatatggtttaagcaaaangataanctggcaaggagatccgtgtgctcctcagctttatcggtgggaaggtttaaattgtanttatccggactccgagggatcaagaatcatatccttgaacttgaatgggagcganttgacaggttctataacatctgacatatccaagctaacactgttgacagtattagatttatcacataatgatttatcaggagatattccaacattttttgctgagatgaagtcgttgaagctcatanacttaagtggaanacccgaaccttaatctcacagcaantcccagactctcttcagcaanggggtaaaacagcaaatcctttaacactaattttgggtggnaaacctgactccgactcccanannacnagag

SEQ ID NO: 12329 - DNA, 429 bp, Arabidopsis thaliana
  unsure at all n locations
  Clone ID: LIB25-077-Q1-E1-B1
gtgttggattatacaattggtggatcagccattgcccgtggcataactccaaatctggcatctttttttggtggtttggacaatcttcctgtgttcttagctcgacaaactatacccggggttggtattgtggttgatccatgtgctgcacttttgattatgattgtcacgatactactatgttttgggataaaggagagttcaacagtacaagcaattgtaacatcagtgaatgtttgcaccttggntttcatcanagtaagttggtggatatttagcttgcaagactggatgggttggatatgatctccccaatgggtactttccttttggactaaatgggatactgccgggatnctgccgtannantcctctcanacattggaatttgatactgtaaccaagtacggctgangaanggtgaaaaaa

SEQ ID NO: 12330 - DNA, 425 bp, Arabidopsis thaliana
  unsure at all n locations
  Clone ID: LIB25-077-Q1-E1-B3
tgctggttacttatccgagtcctatgtattctacgaagcaatactcactagggagtacttcaaagatggattgtttcaggatctcaatattgcaaacaagcagcttcggtttcttgcaaggtttcttatggtgtgtttggttcttggccgccgtgagatggtgcatcaactcgttgatcagtttaaacggttgattgatgaatgcaagaggacattccaggaaaccgattttaaggaatggaaggtggtggcgcaggaaatagttagatttctgaaatcggacactgcattcatgaacattagacctctaagatacagtcttgtattggatcctaatctggatgctggtactccgcgtgcaagtangtccttaangttgacggatgctaatcntgagcaattaattactgtaacgaggtcaagta

SEQ ID NO: 12331 - DNA, 431 bp, Arabidopsis thaliana
  unsure at all n locations
  Clone ID: LIB25-077-Q1-E1-B4
ttaactttcctaaaacaatggctttaaaacatatgcaaatctttctcttcgtcgctatattttcatcattctgtttctccatcactctttctcgtccactcgacaatgaactcatcatgcaaaagaggcacatcgagtggatgactaaacacggccgtgtctacgcggatgtgaaggaggaaaacaatcgctacgttgtgttcaaaaacaacgtcgaacgcattgaacatttaaatagcattccctgccggaagaacttcaaacttgcggtaaatcagtttgctgattaancaaatgacgaaattccgtccaatggtaaactgggttcaaaaggttccncggnaataaccaaccaaaaggcaaaactaaaatgtcgccgtttaggtaccaaaacgtttcttctggtgctttgccggtttctgttgactggg

SEQ ID NO: 12332 - DNA, 401 bp, Arabidopsis thaliana
  unsure at all n locations
  Clone ID: LIB25-077-Q1-E1-B6
tgaccacgctccgattctccatttctttcccttttgacttttcacttccaatttttcggtatcagatctggacgatggcttcacaaatctctcagcttgcttgtttctcatccaccaatcgccaatttcacttccaaagccgatcgtttccatgccctatgattcgtccccagtcttttgtagttaaaagtgttgatgggaatagctctgaaacaccaagcttctctaagctatacanctgaggtttcaaaacctgttgttganaaaacatccaaaccgtattccactgttgatgaaactgctaccaataaagagagcatcacagagncaagtagaggaagatgttgccacacaancantaagagcagcaaagatccacgacntctgtttcggcattcctt

SEQ ID NO: 12333 - DNA, 391 bp, Arabidopsis thaliana
  unsure at all n locations
  Clone ID: LIB25-077-Q1-E1-B7
ntaanggaaaaggattggananttcnancgggcnattggcttcacnagacattgtccattttgtggnactacnanatgtccaanagggaaanatctcangggtacaaccgcttcaaccagaattgccttcgcantttttgacgtanatganaatccgtaatatgaaaccgattcctccatgaatgatctcgtctcgtgtgtaaatgaagtgtgtacatattatacattacataaaccactgcggcggttaaaaatcgctgtcgttttgcgcgattacataagctttttccatttttaaaataaaaatgtccagaatgtgggatgtaagttncgaatgaagaagccggatgttaancatttggcctgatttccttttacatcaatacttggg

SEQ ID NO: 12334 - DNA, 423 bp, Arabidopsis thaliana
  Clone ID: LIB25-077-Q1-E1-B8
cttcttcttcttcttcttcttcttcttcttcttcttcttcttcttcatattttccctatgatttggatctctaaaatcttcaatccccatgttctaatttaaaaaatcacaacactctctttatcatataccctattataaaccaaactttgatcctcgaatatattttattaaaaagataatattcgtgtttctcatgttggagtcataataaagaaacctttgtgttttaatttaatcccctccaagaaacctgaagattctaagaagctgccattaaaactaataaaggaagagagtccaaagaagaagaagaagaagagaaaatgtcacgtcttgacgacataccttcaagcccaggcaaattcaagatggagaaatcttcctacttgcatcgtctcagattccaatcttctctcacaa

SEQ ID NO: 12335 - DNA, 435 bp, Arabidopsis thaliana
  unsure at all n locations
  Clone ID: LIB25-077-Q1-E1-C1
aaagcaagatggatcagacgtaacgtgagtacaactacacaaggtagtagaagcaacactaagagcagtgtgttgggaggaacagttcctgtaaccaggattatagatgaagagagtagaaccaaggtacagccttttggtaatcttcagcaacggcttgcgcaagataaagatctgtctaagctcctcacggttatagtctctgatcttgagacaactggtttgcatcggaaaaatgagcggataattgaaattgcagctcaggatatagctggtggtggggtacagcacatttcaaactcttgtcaacccgggtgttgttcctataactaacgcacatatccatgggaatcacgaatgatatgggccgtccanccnnaggttccaaaggattggaananctgataccgatatttccgncggnatgttgaaaag

SEQ ID NO: 12336 - DNA, 403 bp, Arabidopsis thaliana
  unsure at all n locations
  Clone ID: LIB25-077-Q1-E1-C11
tttctctcactttctcganaaaatataacttcagaacttttcanagttaggtttgacttcaaacgtgggaaaaaatggccggaagtcttgtaaaatgcagcaagatccgtcacattgtgagactcagncaaatgctccggcgatggcgtaacaaagcgcggttatcttcggtcagccgttgtgtaccgtcggatgttccatctggacacgtggcagtttgtgtgggtagcggttgcaggagatttgtggtgcgtgcgtcgtacctgaaccatcctatcataagcaatcttctggttcaagctgaggaagagtttggttttgctaaccaaggaccgttggttantccttgcgannaatcggttttcgaanaagcgatncggtttatatcccggtctgattcntc

SEQ ID NO: 12337 - DNA, 464 bp, Arabidopsis thaliana
  unsure at all n locations
  Clone ID: LIB25-077-Q1-E1-C12
ttggtacgccctgcaggtcccnaaaccgganttcccgggncgacccacgcatcnggaaaattcnnacnaantccncngttgaanatgacgattaancctaaatcgccggcgagattcaagctaggtaggcagtcttcgcttgcgccggaatcaagaaccccgattgatacgttaacggaagatgaggacgacgacttggctgcggcggctacagctgggatcggggatccgacgattcgtttaatgtatttagccaacgaaggtgatatcgatggcatcaataagatgcttgattcgggtactaatgttgattaccgtgacatcgatgcccgtactgctcttcacgtcgccgcttgtcaaggacgaaccgatgtcgttgagctgctgcttagccgtggtgctaaggttgatacgaaggaccgatggggtagtacgcctcttgcagatgcagtgtattacaaaaa

SEQ ID NO: 12338 - DNA, 433 bp, Arabidopsis thaliana
  unsure at all n locations
  Clone ID: LIB25-077-Q1-E1-C2
cattcaattcccaaaccaaacagagcagaagaacaacaagttttgattctaaaaaaggaagcttcccaagtatggatccgtcggagtattttgccggcggcaatccttccgatcaacagaaccagaagcggcagcttcagatctgtggtcctcgtccttcacctcttagtgttcacaaagactctcacaaaatcaagaaacctccaaaacaccctgcgccgccgccaaatcgtgaccaaccgccgccgtatattcctaagagagccggtggttatctacgccgtatcccccaaggttgtanacgcaaccgcgtctgagttcatgaacgtagtccaagcgactcacagggatctcctcctggtgttttcctcgaatctggcggcggtggagatgtttcaccggcggcgaggctagcgtccacggaaaatgctat

SEQ ID NO: 12339 - DNA, 446 bp, Arabidopsis thaliana
  unsure at all n locations
  Clone ID: LIB25-077-Q1-E1-C4
agcctncgggttncacaaagagtggngggaaaagattcatgtcacattgaacagtaatccttacatgataacttttggattagtccaagattctattctctcagattccagattttgatcaactttggtggctctcaatcctcgccgccgttatgtccttcacttattcctcagccggtctcgccctcggcatancccaagttgtcgttaatgggaaggtgaagggaagtctcactgggattagcataggagcagtaacagagacacagaagatatggaggacctttcaagctcttggagacattgcttttgcttactcctactccattatcctcatcngagattcaaggacacagtgaagtcaccaccatcagaagagaagacaatgaagaaaggaacacttgtgagcgtcagtgtaacgactatgttcaanaagttgggtgggg

SEQ ID NO: 12340 - DNA, 404 bp, Arabidopsis thaliana
  unsure at all n locations
  Clone ID: LIB25-077-Q1-E1-A10
cctcttctccacgttctcagagttagttacacagctttcaacgatgaatcagctcgcgctttcaagatccggttacaccgccgccgtgaggtttctccctatgctttccgcagctgttccgaagatcttatcatctctcgccgccgcatccaccgtccgcaacttcagctctaccggaagtcctctcaccagctaccaaatcantaaaccttcgccgtcaaaatccttcacttccaggcttctccaccaatcctcctccgccggtactcctccgcaacaacttttcggcgcccgtagcttctcanctcccagcagtgatttcaacagctaccacattaatccgncgtctaactgggggaatccgnatcgtgccggagaggaaagcntgtgtgagttgancgggg

SEQ ID NO: 12341 - DNA, 391 bp, Arabidopsis thaliana
  Clone ID: LIB25-076-Q1-E1-F10
ccggcgagttcgactcggtgattgattttttcctagaaaaataaaatttcttcttaacgattgatcgattttggttttctatctttcgattctagatctagaattcaatttgtgaggtttggagatggcgagcgagctgatcaatcggcgacacgagacggatcaaccaaccgccgatgcttattacccgaaaccaatcaaaccatggttcacggtgactcgtccgatgcgttacatgctccgtgaacagagacttatcttcgttctcgttggcattgcaatcgctactttggttttcacaattttccctcgctccacacaatcaaccccttactcggatcctttctccggttacggaatccgaacccgacgaatcgtacgttccggctaa

SEQ ID NO: 12342 - DNA, 361 bp, Arabidopsis thaliana
  unsure at all n locations
  Clone ID: LIB25-076-Q1-E1-F2
aggacacagcatctgaaatcgtacaagtatctgaagaacataaattaaaaatctttactttgtaataatggcatcagagttttgatcggagaatctaaaagtctcgacttttcgaattttgttggtcgctttcttaaggacatgaatctcgcggtggctagttttcgcggcaatttcggcgtcttgtcgcaatgcagctcatgttgtagtcttcagtttcaagccttttgtagctgctacttccagtctcaaatttttggggcaaacaaggaacatctccaaagggaaagaaggattctgaaancttgaaaaaagtttcaagaaagagaagagacctttgggntaagaggtgacgggagac

SEQ ID NO: 12343 - DNA, 356 bp, Arabidopsis thaliana
  unsure at all n locations
  Clone ID: LIB25-076-Q1-E1-F4
tctttcattcttggctggtgttatgacatggtcacagatcactgatttgccattttctttgtactcaactttcgtgatcgagtctcggcatgggttcaacaaacaaacaatatggatgttcattagggacatgatcaaaggaacattcctctctgtcatactaggcccacccattgttgctgcgataattttcatagtccaagaaaggaggtccttatcttgccatctatctgtggggattcatgtttatcctgtctcctaagtgatgatgactatatanccgggtcttgatancaacgctcttcaacaagttcantcctcctccaaatgggngacctccgggganaagaattgag

SEQ ID NO: 12344 - DNA, 245 bp, Arabidopsis thaliana
  unsure at all n locations
  Clone ID: LIB25-076-Q1-E1-F5
gatcgtagagaagtctacctcgtagacatctctctcacaaatccaattcaattaccattgtttgttattatctgatgtcgaatatgcaattctctcgtggttttaatccctttgttatcctcttctgtcncgccgtggttgcaccaattatatcggntgatgtcgctatcttgagaacggactattaccangnaacatgtcctgatttcnacanaattggtgcngtngaancnggtnacnancca

SEQ ID NO: 12345 - DNA, 365 bp, Arabidopsis thaliana
  Clone ID: LIB25-076-Q1-E1-F6
aaaaaaaatcgacaacagtgcagacacacgccgatttgcgagatacacacagtctcacctaaaaatcgcaaaagaagaaaaattcggatcaaaattgtcttcaagcatcatggatccatacagggttcgtccttcaagcgctcatgattcccctttcttcactacaaactcgggtgctcctgtctggaacaacaactcttctttgactgtcggaactcgaggtccaatccttctggaggactatcatctgcttgagaaactcgctaactttgacagggagcggattcctgagagggttgttcatgccaggggaaccagtgctaagggtttccttgaagtcactcatggacattgccaacttactt

SEQ ID NO: 12346 - DNA, 330 bp, Arabidopsis thaliana
  unsure at all n locations
  Clone ID: LIB25-076-Q1-E1-F8
acggtagcgtctgggctcagagcaacaattttcctcaggtgaagcctgaggaaattcagggcatcaaagacgattttactacacctggaacacttgccccaacaggattgttccttggtggtaacaagtacatggtaatccaaggagagcctaatgccgtcattcgaggaaagaagggagctggtgggtgttaccatcaanaagaccaccttagctttggtatttggtatctatgatgaaccantgactcctggacaatgcaatatggttgtggagaatctcggtgagtaactgattgaatcngggctctgaaacttaagctgctactat

SEQ ID NO: 12347 - DNA, 388 bp, Arabidopsis thaliana
  unsure at all n locations
  Clone ID: LIB25-076-Q1-E1-G2
tacaaaaaataaaaatccttaaaaatatatccttatcttcaaccaagaatgggagaggtccaagaaggtcccaaagttgaacaagagaagaagccggctgccaccgtagtcccagttgagactactgacggcaagccaaagagcggcggaggagattccgcggcagcagcagcaccaccggtcgccgcggttgtctctgcctttgtttacaaagtggatatgcactgtgaaggctgcgctaaagaagataaaagcnaatggttaangcactttgatggagtgaaagatgtgacggcangatactgggtggaaannaagcttttgggtggtcggaaaagattgaatccaagtgaaaactccaggnagaanttggganngangaaanccg

SEQ ID NO: 12348 - DNA, 378 bp, Arabidopsis thaliana
  unsure at all n locations
  Clone ID: LIB25-076-Q1-E1-G4
gacaagcttagatctctccacagttctttcgttatcttccttccacattgacacttgccttaagaagagggccaaagaaaggatctggaattctttcttcttcaagatttgtaaatgggtgttagttcttcaaagatctaaaatatcaagatcaggaagaaatgggaggtgacttgaaaagccagctatctagagagagccatgtgtttggacttaaggtgtgggaagtaattggtatagctgttgcattgctcatcatagctatcctctctgttcnttcgtgttgtcntacttcgaaaaagaaatcaagaagatngaaaaccggtcttccggttaaccaaactcctcccggtgggtctccaaagagatcagagaaag

SEQ ID NO: 12349 - DNA, 368 bp, Arabidopsis thaliana
  unsure at all n locations
  Clone ID: LIB25-076-Q1-E1-G6
tgtgtangtttttgaagcattaggcaatatgaaattcccttacgtttatcctgatccacaaagtcgtagacttcgtgatgcactggctcaagactctggtttggagtctgaatacatacttgtaggctgtggtgctgacgancttattgatttgatcatgagatgcgtgttacatcctggggagaagattatagattgtcctccaactttctcaatgtatgtgtttgatgcggctgtgaatggancaggtgtcattaacagttccaaagaaaccccgatttcagcttgaatgtagaccgcatcgctgaagttgtagaactanaagaaccaaatgcntactcntancntctcccaacaatccagatggg

SEQ ID NO: 12350 - DNA, 426 bp, Arabidopsis thaliana
  unsure at all n locations
  Clone ID: LIB25-076-Q1-E1-H10
tcgttcttcacttttagacaagcaaatatgagacccccagttacaggaggacgtggtggtggaggattcagaggtggaagagatggtggtggaagaggttttggaggtggaagaagctttggaggangccgtaatggtgacagangccgtactgggcctcgcggcagaggacgtggtgcgcctccttggtccttggaggaacaacctcgtggaggaatgaaanganggaaancaaaagtgattgttgagcctcaacagacatgnngggagtgtttaattgctaagggtaaagaanatgcncttgtcactaaaaattttggttccgggtgaaacctgtttacaatgacganaanaacccctngttcaaaatgaannatggaactangggtttnaattacagaagntttnggnacccngtttaaantt

SEQ ID NO: 12351 - DNA, 53 bp, Arabidopsis thaliana
  unsure at all n locations
  Clone ID: LIB25-076-Q1-E1-H11
ggangggatttcaccggttaaatcgttgnagtcgaggatcagagtctctatng

SEQ ID NO: 12352 - DNA, 408 bp, Arabidopsis thaliana
  unsure at all n locations
  Clone ID: LIB25-076-Q1-E1-H12
ttcttcatcgtctcancttcttcgtcttcttcattattaaccctaaatctagccgcaactacctctctctctaggtctctttctctatctccctctgtttactcccacagctctaaaancgttttcgaatcgtcacanctggagaaggaagctaatcactttctcattttggaactttgaggaganatctgaaagttttttnttttttgttgttgttctggatcgttcctgttccactctcttcatcttccgatcatcgttattttcgaagctctctacaaacaaaatcgattttttttctggttaatctaaagaggtgaccgaaagaagaaaacttttacgttttgcatgggggtaagaatggcagangttaagaacntggangcangggagatcgagacgccttgg

SEQ ID NO: 12353 - DNA, 390 bp, Arabidopsis thaliana
  unsure at all n locations
  Clone ID: LIB25-076-Q1-E1-H2
tgctccgcttaagcaccatgaaggtcaccgtcgtctcccgcagcggcagagaagtcctcaaagctccccttgacctccccgattcggcgactgttgctgatctgcaagaagcgtttcataagagagctaagaagttttacccgtcgaggcaaagactgactcttcccgtgactcctggatcgaaggacaaacctgttgtcctcaatagcaagaaatcactgaaaggagtactgtgatggaaacaacaactccttaactgtagtccttcaaagaactggggggcacaaatttcctaancgcanantcttcctccttcgaagtaatccttgggncctctccttaannctacccctggtccttttaactaacnttcccctggtttaacaaatg

SEQ ID NO: 12354 - DNA, 369 bp, Arabidopsis thaliana
  unsure at all n locations
  Clone ID: LIB25-076-Q1-E1-H4
aacaatagagagagcgagtgaggattagccacaatgtatcttcctctcctctatcttctgtttctggcttcttgcttgacacatcaagctttaggccgtggtcgtggccggccatcaccggaaggaagcttggatccttcttctcgcatcaccgtagtcggagttgtctactgtgacacgtgttctatcaacactttctcaagacaaagctatttcttacaagggtgtgggaagttcatgtgacatgtagattcaaaagcaaagnttaaccaaagnacaacnanangggangtgaacatatcaantanncaagaacaancaagacangaaantggccgttgtacaagctcnaagattccctcacgtaag

SEQ ID NO: 12355 - DNA, 393 bp, Arabidopsis thaliana
  unsure at all n locations
  Clone ID: LIB25-076-Q1-E1-H6
tgtaatgctgctgcgagataaaatgaacaatgaagaagcggagacctgttgacttcaaataattttaattagtttcttctgtgcgatagagatcgatcgagagatgggtgcttcatcatcatcatctgtgtcggagaaatcaatccatcaattcaccgtcaaggatagctccggcaaggaggttgacctaagcgtgtatcaagggaaagtgctgctccgtcgtcaacgtcgcttccaaatgcgggatttcacgggagtccaatttacacccaagctgacggaactttaaccgggaaatnattaaagattaagggtttggtggtaattggggggtttcccttgcaaccaagttttctggtccccaangaagcctgggcaccaagcgaaagaagg

SEQ ID NO: 12356 - DNA, 367 bp, Arabidopsis thaliana
  unsure at all n locations
  Clone ID: LIB25-076-Q1-E1-H8
ttcaattaactctcttcttttttttttttttttggnttttcatttaagtctattcaatcatggaaaccggtttaaacatcttaaagctatcgctatgcgtcagcctantcgtggttggatcatatgctcaagctcccgcaccatggaatccatctaatgggtttcgtccggggacatgtgancactacgagtgtcccacctanaaattggtanaggccggatacggntttgagatncgcaagtncgangctgccctaaggatatctactantcctancccctccctatccatgactcaagccancaaaaccggtttccgacgattaaataggtacatagaaggngataacaaagagcaacgttaaga

SEQ ID NO: 12357 - DNA, 370 bp, Arabidopsis thaliana
  unsure at all n locations
  Clone ID: LIB25-076-Q1-E1-F1
aagaggaactttatcttgctgacggctgttataaaaagacgtggcatttcttctctgattgtgtttatttttatgacgganaagatgaacacacttgtaatctatcagactctaactgttactgttggtgttttctaatgctgtcggcaagacactatctttaggactgctagggagtttagaggttacacagttgactttttctatcaaggttataggtttagtattgttaatatatagaaatggaagccaagatcgtcaaggtgttggatagtagtaggtgtgaagatggaattcggaaaaaagaggaagcgcgcagcaagctatgcctgcatatgttactgggangtttcctgtgcaaaancctgca

SEQ ID NO: 12358 - DNA, 447 bp, Arabidopsis thaliana
  unsure at all n locations
  Clone ID: LIB25-077-Q1-E1-A1
gataacaaaacgctttcacacgatcggataaaatggcggagaagagctttaagtacatcatcctcggcggcggcgtctctgccggatacgcagctaaggagtttgccaatcaaggggttcaaccaggagaattggctgttatctcgaaagaggcggtggctccatatgaacgccctgcacttagcaaggggtatttgtttcctgaangggctgctaaacttccaaggtttccattgctgtgttggtagtggtggagaaaaactgcttcctgaatcctacaagcagaaaggaatttgagttgatactaagcacagaaataagtgaaagctgatntcctctgncaaagaatccttgtcaattgcaactggggggaatgtcctcaagtntcaanacgccncanaantnccaactgggttcaacnggttcncaaaattgcccgaanttttg

SEQ ID NO: 12359 - DNA, 371 bp, Arabidopsis thaliana
  unsure at all n locations
  Clone ID: LIB25-076-Q1-E1-C2
aaaattcgtctctctctttcaatcggaggttaattgtttttctgtttgggggtcaaagcgaagatggtgaacgctatggtggagagagcgacgagcgagatgctgatcgggcctgattgggctatgaacctcgagatctgtgatatgctcaatagcgatccagcgcaagcaaaagatgttgtgaaaggcattaaaaaacggattgggtagcaggaatccaaaagctcagcttcttgccttaaactctgcttgagacaatagtgaaagaactgtggtgacatggttcatatgcatgtggctgaaaaaggtgttattcatgagatggtccggatagtttaagaaaaagccggacntccatgtcaaaganaaaa

SEQ ID NO: 12360 - DNA, 378 bp, Arabidopsis thaliana
  unsure at all n locations
  Clone ID: LIB25-076-Q1-E1-C3
aaaaatggcaaccatttcgaatctcgctaatcttccccgcgccacctgcgtcgactccaaatcttcttcctcttcctccgtcttacctagatccttcgtcaatttccgcgctttgaatgcaaagctttcctcttctcagctttctcttcgttataaccaacgatcaataccttccctctctgtgaggtgttcagtgtctggtggaaatggaactgctggaaagagaacgactcttcatgatntatatgagaaggaanggtcatgagtccttgggtatgaaaaanctttggncgtccaagtcacagatnntncncccgttgaagtggcccgtgggggttangaggtgttnnggaggccaagccccngngaatttttttg

SEQ ID NO: 12361 - DNA, 370 bp, Arabidopsis thaliana
  unsure at all n locations
  Clone ID: LIB25-076-Q1-E1-C5
aaactaaaaaagagaaccccaaagaatcgaatatttattatttcgccccgaagattctatttctgatcatttacacccctaaaaagagtagagctttcgtgaagccaccatgtgtggaggagctataatctccgatttcatacctccgccgaggtccctccgcgtcactaacgagtttatctggccggatctgaaaaacaaagtgaaagcttcaaanaangagatcnannaancgatcnggatttcttcgatcttgacgatgatttcgaagcctgatttccaaggggtttaanggatgactcnggcttttgactgcgaagacgatgatgatgtcntcgncaatgttgaaagccnttcgtcttcaccggcg

SEQ ID NO: 12362 - DNA, 368 bp, Arabidopsis thaliana
  unsure at all n locations
  Clone ID: LIB25-076-Q1-E1-C6
aaatgttgaacttatgagctaaaaaagcttctcctccttaccaaagactcgacggtctaccggaaaaaatggctgccaatttctggaattcatctcactataaacagcttttggatccagaagaagtcgacgtagttcatgatctcgataaagaacgtggaatctcaattgatgattttaagctcatcaagttccatatgtctaatcatattatgaaattggctcagcacattaaagtgaggcaaagggttgtagctactgcaattacgtatatgagacgggtttatatcagaaagagtatggtaagagtttgagcctcgacttgttgctcttacgtgcttgtacctgncaatctaaagctgnangag

SEQ ID NO: 12363 - DNA, 369 bp, Arabidopsis thaliana
  unsure at all n locations
  Clone ID: LIB25-076-Q1-E1-C7
tcagaagagagagatttanatattgtagagtgagattctaaaganagagagagagagagatatggctagtggaatcgctcgtggtcgtttagctgaagagaggaaatcgtggaggaagaatcatcctcatggttttgtggcaaanccgganacggggcaggatggaactgtgaatctaatggtgtggcattgcactatacctgggtaaagctgggactgattgggaaggtggattctttccattaancgatgcacttcagtgnaggattatccgatgcaaacctccganantgtanagtttccacanggggtttttcnaacccctaantgtccnanncccgtcangnnaaantgtctgtcctctcnntg

SEQ ID NO: 12364 - DNA, 366 bp, Arabidopsis thaliana
  unsure at all n locations
  Clone ID: LIB25-076-Q1-E1-C8
ccaacttcttgtgacggagctcaagtcgagagagagaagactgtactagtagtagtagctgtggatttttgtgtcatcatcggagatcggaatcttcttcttcttcttcttcttggagcttctagaagtgganagaagggggaagatcaagcgacggatactgatangttttgctgtatgtcagtggattgtgttgaaactgattttggtggatttggaggaacttgtgaaccctattcaatggnctcagcttcgaaaaagacgtcgggatgtcctcaccacggtggggtctcttccgcctcccaaactcgtctcccgctgctcncgataccgttgctgtanggtcctgacgcngaccgatcancg

SEQ ID NO: 12365 - DNA, 291 bp, Arabidopsis thaliana
  unsure at all n locations
  Clone ID: LIB25-076-Q1-E1-D1
aaagatctctcttcaaagcttccaccatgtttctccgatcactcaatctctgtacaatactactcttcctagcgatttcatcacaagtttctcaatctctccacttcgaattgcaatctggtcgaacaaaatgtatatcggaagacatannaagcaattcaatgaccgtcgggaaggtacaccgtcggttaaccctaacggaaggctcanncnttctcntcantctcacaagatctccatcaggagtgancatcgangttacggggaanaacggtnannaancangcggga

SEQ ID NO: 12366 - DNA, 402 bp, Arabidopsis thaliana
  unsure at all n locations
  Clone ID: LIB25-076-Q1-E1-D12
agagagcattatcaattantaacaattacacannacancgagattgnaanagagtangagagagagaatggcaggagaggcagaggctttggccacgacggcaccgttagctccggtcaccagtcagcgaaaattacggaacgatttggnggaaacattaccaanaccatacatggcaagagcattagcagctccagatacagagcatccgaatggaacagaaggtcacgatngcaaaggaatgagtgttatgcaacaacatgttgctttcttcgaccaanacgacgatggaatcgtctatccttgggagacttataagggatttcgtgaccttggtttcaacccaatttcctctatcttttggaccttactcataaacttagccgttcaacctacgttaca

SEQ ID NO: 12367 - DNA, 361 bp, Arabidopsis thaliana
  unsure at all n locations
  Clone ID: LIB25-076-Q1-E1-D2
aaatactctgaagatgatgcaaaagcagtgcttatacagatccttaacgtcgtagctttctgtcatctccaaggagttgttcatcgagatctaaaaccagagaacttcttgtacacttccaaggaggagaattctatgttgaaagtcatagattttggcttatcggactttgtcagaccagacgaaagactaaatgatatagtgggaagtgcatattacgtagcccctgaagttctacacagatcttataccacagaagcggatgtatggagcataggagtcatagcatacattctcctatgtggaagccgtcctttttgggcaangaactgaaatcagggaattttcagagcagttctag

SEQ ID NO: 12368 - DNA, 360 bp, Arabidopsis thaliana
  unsure at all n locations
  Clone ID: LIB25-076-Q1-E1-D4
ctttctctgtaattcgtagcttccgaaatcttttctcaagaatctcataaccatggcgaatcctgctccgaatctagaatgtcgtatgtacgaatcgagataccctgatgtagacatggcggtgatgattcaggtgaagaccatcgctgacatgggagcttacgtatctctccttgaatacaacaacatcgaaggaatgatcctgttctccgagctctctcgccgtcggattcgtagtatcagtagcttaatcaaggtcggtcgtaccgancctgttatgggccttccgtgtccataagagaanagaggttacattgatctcagtaaacgtagggttagtgatnaaggacnaangaggct

SEQ ID NO: 12369 - DNA, 364 bp, Arabidopsis thaliana
  unsure at all n locations
  Clone ID: LIB25-076-Q1-E1-D5
gtcttatgctgttcttgggcaagtggagcgacctttctttgccaatatatggaatactttaaccaccttggaggagcaaaggctttcagaacagtatagggaagatgtcatgtttgcttctcaggtgtatcttgtgaatcagtgcttgaagcttgagtgcccccaccttcagttgtcactttgtcaagaactcgaagaanaaataagccgcgcaggaaaaaccaaaagattcaatcaagaaaataacctcatcgtttcaagaaaagaagttggacgccttcttanaagtacagggcttgattgggctaaagaacatgatgtggatggctacaccgtgggatgttgctctggtncgagaagaaag

SEQ ID NO: 12370 - DNA, 358 bp, Arabidopsis thaliana
  unsure at all n locations
  Clone ID: LIB25-076-Q1-E1-D7
caatccaaagccaataaccaacagcaacgtaccacttcaagatgaaaagaagcaggatgcatcgagaaccctagctatttttcangctcacaatcagaaatggcatccctttgtttcaatttgtggtcgatgataacagcagcagcagcaggagcattctcggggctacaatgaaaagctcagattcatcgttcaaagatgattctgttcagtactgcacattctactctgttaatgaagtcaanangaanaanagtggaagctggctaatccatggacacaganagaancattgngggttcgtctacaacatanncgtgtncnaatgncanttggggagaantcgntggagncgtag

SEQ ID NO: 12371 - DNA, 360 bp, Arabidopsis thaliana
  Clone ID: LIB25-076-Q1-E1-D8
cttcaggttaccggcacggcgactccggctatgcctgcggtagtgtttctcaattcatggagacgaccacttagtattcctctccggagcgtaaaaaccttcaagcctctagcattcttcgatctcaaaggaggcaaaggaatgagtgagttccatgaggttgaactcaaagttcgtgattatgaattggatcagtttggtgttgtgaacaatgctgtttacgcaaactactgtcaacacggtcgacatgagtttctagagagtatcggtatcaactgcgacgaagtagcacgttctggggaagccttagcaatttcagagttgacaatgaagttcctttcacctttacagcggagacaa

SEQ ID NO: 12372 - DNA, 347 bp, Arabidopsis thaliana
  unsure at all n locations
  Clone ID: LIB25-076-Q1-E1-E1
ttgaagaagaagagatcacgtgcgctctacaatcagatctcgttaagcatgtgttcaccttcaacaatctcaagggaggagataagagcagattctccaccgtattcaccgagaacgatgcggatcagtactctctcgtcttcgctaattgtctccaacaggtcaaaatcagtatggatgttagatccgctatgtataaccttgaaggtaaaaagggaggtcgtgattatctctctgctggaagaantgttcttcctaaggtcaatttcttattcccggttaacgaatttctgnngnnngngcnaggtgngnnngnagcnttccncagatnganaagccgtgcnnna

SEQ ID NO: 12373 - DNA, 390 bp, Arabidopsis thaliana
  Clone ID: LIB25-076-Q1-E1-C12
aaatgacagacatttccagtctctttagaaaccgaagtcgcaaggaccaacttgactatggtttaactgtgatagttatatcaactctttgttggtgtctttggctctacgccaaatgcaaacggcggtctccaccgttgccgccgggaccttggggccttcccattatcggaaaccttccattcctccaaccggagcttcacacctacttccaagggctggctaaaaagcacggtcccattttcaaactctggctcggggccaagctcacaatcgtggtcacctcttctgaagtagcgcaagagattctcaaaacgaatgacatcatcttcgcgaaccacgatgtccctgctgtgggccctgttaacacgtatggtgggtacggagata

SEQ ID NO: 12374 - DNA, 226 bp, Arabidopsis thaliana
  unsure at all n locations
  Clone ID: LIB25-076-Q1-E1-E11
agattttaaaagtctanatccttttttctttcnttccttcannatgcctttaccttggaagaaatctaaatctagtcggatctctagattcgtatcangactttcaacantctcctaaacatggtggatctctcgttgttgaaactggtttcccaacttctttaatcgatntctttgttaagaatcncgatngtctcaaaaaagaatcttcaaaacntaacaacag

SEQ ID NO: 12375 - DNA, 235 bp, Arabidopsis thaliana
  unsure at all n locations
  Clone ID: LIB25-076-Q1-E1-E5
ttcttctaggcttctttctaccacaaacacaanagcgcgttttcttcacgccggcnaacaacgtcaggagtcatggccaccggagatgggaaatcggtgatggtcgtcggagttgacgacagcnagcagagcacttacgccttggagtngacgctcgatcgtttcttcnctccttacgctcccaagntagccntttaagcncttcatcgcnccaggccaaanctaanacngtctc

SEQ ID NO: 12376 - DNA, 367 bp, Arabidopsis thaliana
  unsure at all n locations
  Clone ID: LIB25-076-Q1-E1-E7
ctctctatcacactactactactcacatcatggctttctccactagaggctccctcttattcttcttcactacacttgttcttctctccacccaaatccatgcaagagacagttacttctttggaaaattccacagagaatcccccaaagatcaaaaccctaacagtttcatccctcttgagactagcgagaaaaccacagtagaagaatccgtcctcaacaagaaagagcaagaacaagatcctacctttgtccccgagtccggaaacgggtatggcttgtaaggtcacgaagaccacatacancaacaacaacgacaacaaagaagagttcaaacaacaacaaacaagaacgatgaagnaagtcg

SEQ ID NO: 12377 - DNA, 353 bp, Arabidopsis thaliana
  Clone ID: LIB25-076-Q1-E1-E8
tcgttgttgtctcatggagagcacggagcagccgaggaacatctccggatcgatgcagagccctagatctccgtcttcgcatccgtatctgtcagtctccgtcacagatcctgtcaaattaggcaatggcgtacaagcttatatctcttacagagttatcaccaagactaacttgccggagtaccaaggacccgagaagattgttattagacgatacagtgatttcgtctggttacgggatcggctttttgaaaagtacaagggcattttcattcctcctcttccagagaagagtgctgtagaaaaattccgctttagtgccgaatttattgaaatgaggcgagcagcattgg

SEQ ID NO: 12378 - DNA, 411 bp, Arabidopsis thaliana
  unsure at all n locations
  Clone ID: LIB25-073-Q1-E1-G5
tcttcttcgtattcgcctttgaattcgcagagtgagaagcaatgaaggtgagatcatctgtgaagaagatgtgtgagttttgtaaaacagtgaaacgtcgtggacgtgtgtatgttatatgctcttccaatcctaagcacaagcaaagacaagggttcagttcctttgcttatgaaggaattacaccttcccctttgtttgctgagccgattgctagtcaggagttggtgaggctgcctggtcagggggtatcanccggactggcatcacttttacacaaanggcctatgccaacagcgtatttcggatggaggtctggtcttgcatccattctcttcaaacaaggaaattaggatgtcagcatttccctttttattcttcagatttgtaatcgcagttttcttccaattc

SEQ ID NO: 12379 - DNA, 66 bp, Arabidopsis thaliana
  unsure at all n locations
  Clone ID: LIB25-073-Q1-E1-G6
ccttcaaaattgtcnccantggcgtcaagaatatcaagaccgacaagcccttcggaattaacngca

SEQ ID NO: 12380 - DNA, 401 bp, Arabidopsis thaliana
  unsure at all n locations
  Clone ID: LIB25-073-Q1-E1-G8
gccatanaagacatacacaagaacgagattctcttcagaggttcatcccccgagttactgatgttggatcaatccggatatctacagattgtagacttcagattcgccaagaaattgtccggggaacgaacatttacaatctgtggaaatgcangattatttagccccanaaattgttcaaggcaaaggccatggttatgcagctgactggtgggctcttggagttttgatctactatatgctaagaaggagaaatgccattcgggtcatggacagagagcgagctcgacacgtttcanaagattgcaaaangccaactaactttccctccaattctaagctcagaagctgaagatntcatcacaaagttgcttgaaagttgatgaaaactgcggtttggt

SEQ ID NO: 12381 - DNA, 424 bp, Arabidopsis thaliana
  unsure at all n locations
  Clone ID: LIB25-073-Q1-E1-H1
acatttacgctttcttgcaatcaaattttccgatcttaagttcagaagacgatgtcagaggtggaaatagagaacgctgctacgatcgaaggaaacaccgctgcggatgcgccggtgacggatgcggccgttgagaagaagcctgcagcgaaaggacgaaagacgaagaatgttaaggaagtgaaggagaagaagactgttgctgccgctccgaagaagaaaantgnttcaacccaaccnaattnncaagagannantaangggtgccaatgntaccttgaaagagagaantgggtntaaccaatacgcgantcacaaanttcatccagggngaancntaangngncttccctccaacattcacaaaactgttgcttctcaatctnaagagaccnctgcttctgggaancttttgaaagtcana

SEQ ID NO: 12382 - DNA, 416 bp, Arabidopsis thaliana
  unsure at all n locations
  Clone ID: LIB25-073-Q1-E1-H10
tttttaaaatacaaaaaataaaacttattaagcaattctttattaggtttctcgtggcgatggagaattcttacgactcaagcaagtggtctgattctacaactccatatatggtctcgtggtcactacaatctgagtcctctgattctgattggaaccggtttaatcttggcttctcttcttcctccttcggtggtaatttcccggctgatgattgtgtcggtgggatcgaaaaagctgagtcactttcaagaagccaccgtctagcggagaaaagacgccgtgaccggataaattctcacctcactgctctccggaaacttgtccccaattccgacaagttagacaaagcagctctattagcaacagtgattgaacaagtgaaagaactcaaacaaaaagcaagangaatcacg

SEQ ID NO: 12383 - DNA, 415 bp, Arabidopsis thaliana
  unsure at all n locations
  Clone ID: LIB25-073-Q1-E1-H12
ctctcaatgattttcacaacatgctttcaactgaaccagatcgggcatgctatggaccaaaacacgtggaagttgcaaatgaacgaatggcaattcaaacgcttctcataacggacgancttttcaggaattctgacgtgaaaacaaggaagaagtatgtgaatttggtggagtcggtaaaagattcgggaggagatgcttttatattttcggcgatgcatgtgtcaggagaacaattgggcacagctgactggaatagcagctcttctcaggttccctttancaagaactcggaagacattganatgtaaaaaaatcttcggcttatagaaaacantacancangatcatacacatctctcataanttatagtttatttgtactcagtgtccataaangagattggaacccant

SEQ ID NO: 12384 - DNA, 113 bp, Arabidopsis thaliana
  unsure at all n locations
  Clone ID: LIB25-073-Q1-E1-H2
actccccnccgcattcaangtagtccaactactaanatcccaaggaatcacgcgagtcagaatcttcgacgcagacncatcagttctcaaagcattanccggatctggaatca

SEQ ID NO: 12385 - DNA, 418 bp, Arabidopsis thaliana
  unsure at all n locations
  Clone ID: LIB25-073-Q1-E1-H3
naggttaaggagcagactggagaatcaaatgtaactgaggttggggaggcggataacacatgtgttgttcctgacagagaacagtacaataaagaagatttcccagtggattatgcaaatgccatgttctttatcatcaagtcatacagtgaagatgatgtgcacaagagcattaaatataatgtttgggctagcacaccaaatggaaacaagaagcttgctgcagcataccaggaagctcaacagaaagctggcggcngtcccatctttctgtttttctcggtcaatgcaagtggacaatttgttggtcttgctgaaatgacaggaccagttgatttcaacacaaatgtggagtactggcagcaagataagtggaccggctctttccccctcaagtggcatattgtgaaggatgtgc

SEQ ID NO: 12386 - DNA, 427 bp, Arabidopsis thaliana
  unsure at all n locations
  Clone ID: LIB25-073-Q1-E1-H4
ttctccttctccggtgtcgaatcnccgagggaaggtgatttttccgggaaagtctccgttttgtttcacctaatcatctcaaagactcgtcctttataaatggcgacgacggtcatggcccttgcagagaaagtacncganagagtttacggaacttccanatccgccgtttccgtancaancggcgacggcgaaaagactcaccgtcanacccatcatcacattcaccgtatcaaaagctacgacgacatcgacgaggatgaatcatcattgggagcttatccagatcggtgctgagaggactaagaacgtcttgatcctcatgagcgatactggtggcggtcaccgtgcttccgctgaagccattcgtgacgctttcaagatcgaattcgggggacanatattgactaanngtgaangatgtgtg

SEQ ID NO: 12387 - DNA, 412 bp, Arabidopsis thaliana
  unsure at all n locations
  Clone ID: LIB25-073-Q1-E1-H5
gcgatggctaagattcaaggcgtttagtggtcagaggtccgattgggaacttaaatttcagttttggcgtgatttgatcatcaaggtttcgcgtcagtttgggttgttcatcattgatcctgtccaggtgaagaaggcgtggtttgatcgaggaggaatgacgcctttatgcattgatgatgttgtgttattgatgcatagtgaaggtgatgttgtgcggattagtgatctcgatgatcccggtagtggtcgtattgctcgtttattgaggacagtgaagaacttaatggttcaacagccagtgaagcaggaagagattctggaaaatacacttgttcttgttccactcttgaaggagaaggcggctgacgtggtgaagatattatctgangggacactggacttctacttg

SEQ ID NO: 12388 - DNA, 331 bp, Arabidopsis thaliana
  unsure at all n locations
  Clone ID: LIB25-073-Q1-E1-H6
cgtttacgttgcccngnccggtacaaaaactaaacnnggcccggtcnacccacgcntccgcccacgcgtccgatgaattcttgcgtgtttcaaatttttatgttgtaatatatattgttggattctagattcgattcgtgattcttgtttttgattcttaatgtggtatcatagtttggatcgttcaaaaagttgtaagtcaaaaaaaaaaaaaaaaaaaaaaaaaaaaaaaaaaaaaaaaaaaaaaaaaaaaaaaaaaaaaaaaaaaaaaaaaaaaaaaaaaagggnggccgccctaaaggntcnaancttanttacncntnnangcaac

SEQ ID NO: 12389 - DNA, 426 bp, Arabidopsis thaliana
  unsure at all n locations
  Clone ID: LIB25-074-Q1-E1-B1
gcggacatcgacatcggaaccgcagcaacaacaggaggaaacgaaggaagaggaggcacacgagaacgtctaataaaccgagaaaacaagttcacacgtagcgtatctcacgcacaagacgagctccacagtttccggaaatatctccgatggatgtgcgtagatcagtcgagtccttggacggcggttctatcatggtctatgttcgttgttttcacgctcgttgttcctgccacgtctcacttcatgctcgcttgctctgactgcgatagccatcactctaggccgtacgattccgttgttcagctttctcttagcagtttcgctgctctttcgtttctttgtctctccagattcgttagcaagtatggtctccgacggttccnaatccttgatnagctttgggatgananccagaaccttcgg

SEQ ID NO: 12390 - DNA, 442 bp, Arabidopsis thaliana
  unsure at all n locations
  Clone ID: LIB25-074-Q1-E1-B2
aaactgaaacctttctctatttatctctctatacacaacaatggcggtcttcgttttatctctactcatactctcttccttctcagccattccattcacttatgcagattctggaatgatcggagttaactacggccgtatagcaagacaatcttccggcaccggagaaagtagttgagctactgaaaacacaaggaatcaaccgcatcaagctttacgacaccgagacaactgtactaaccgcactcgcgaactccggaatcaaagtcgttgtctctctccccaacgaaaactcgcttccgccgccgcagatcagagctacaccgacacttgggttcaggacaacatannngaagtncattccancgacggatatcgaagcaaatcgccgttgggaacgaaagtgttcgtcgatccgagggaacacgacgacgttatctcg

SEQ ID NO: 12391 - DNA, 451 bp, Arabidopsis thaliana
  unsure at all n locations
  Clone ID: LIB25-074-Q1-E1-B3
ttgttttnccacntctacggtanagtgaaagagaganagagagaggaananaaaggggaaagcttaagatattggagaagtaacaatgccttcaaattcaggagatgataatgttcttcaagttcncataaagaactttgatgtccttgctctcccattggttacactcgtctatcctctatatgcatcagtgaaagcaatagagacaagatcattaccacaagatgaaacaatggcttacttacngggttctttacgcacttatcgctctctttgnactcactttctccaaacctctcgagtggtttccnatatggccatacatgaaattgtttgggatctgttggggangtgttaccacaagtcaatggcgcagggaccatttcctacnancatttcagtaggaccaattctacaggagattccncnaangangcttcncaaccnaana

SEQ ID NO: 12392 - DNA, 427 bp, Arabidopsis thaliana
  unsure at all n locations
  Clone ID: LIB25-074-Q1-E1-B4
agcaggggaggagagagccattgttgaggcggccatgtgacaatgangaagactgttgccaagccaaagggtccatcacgcagcccatggtacggatccgaccgagtcaagtacttgggtccattctctggcgagtcacccagctaccttaccggagagttccctggagactacggatgggacacagctggtctatccgctgaccccgagacattcgcaaggaaccgtgagctagaagttatccacagcaggtgggccatgctcggagccctangctgcgtcctccctgagcttttggccaagnaacggagtcaacgtttgggagaggagtttggttcaangctggttcacaaattttcaacgaangacggctccgattacttggggaaaccctaaccttgggttcaacgctcnagancantttggg

SEQ ID NO: 12393 - DNA, 445 bp, Arabidopsis thaliana
  unsure at all n locations
  Clone ID: LIB25-074-Q1-E1-B6
aattcgaaaaaaaagcttcccagagagaagagaaaaaacttctctgaggcggccatgacgttgcagagaggtttacctcttctcttgcaacagtacacggcgttgttcaagaaaaaccttttgctttcatggcggagcaaacgagccacgtttcttcagctcttcgcttctttcttcttcatccttctcatcttctgtatccaagcagccatggagaagagtttcgcttcctccacggctctcaaaactgttacggatccgacggcgctgatatcgccgccgattccgccttgtgaagataaattcttcgtngaatcttccgttgctaggacnttgtntgggancggtaatcggtagctccaagggtcacgcaaattgttaagtgncnattatgaangaantaatcctggaangaagttantcctanttgangaaaggtnccgat

SEQ ID NO: 12394 - DNA, 413 bp, Arabidopsis thaliana
  unsure at all n locations
  Clone ID: LIB25-073-Q1-E1-G10
taccacatggcaagggacttgttatctcactcctctcattggagctgttctggctgatgcttactggggacgttactggaccatcgcttgtttctccgggatttatttcatcgggatgtctgcgttaactctttcagcttcagttccggnattgaagccagcggaatgtattggtgacttttgtccatctgcaacgccagctcagtatgcgatgttctttggtgggctttacctgatcgctcttggaactggaggtatcaaaccgtgtgtctcatccttcggtgccgatcaagtttgatgacacggactctcgggaacgagttagaaaagcttcgttctttaactggttttacntctccatcaatattggagcacttgtgtcatcnagtcctcgaatttggattcaaganaag

SEQ ID NO: 12395 - DNA, 231 bp, Arabidopsis thaliana
  unsure at all n locations
  Clone ID: LIB25-073-Q1-E1-D7
cttttttttttttttttttttttttttttttttgttgctttggtggttgtttgttgtctttttaagttttagtttctttgttgctttttaagttaaaaaaaaaaaaaaaaaaaaaaaaaaaaaaaaaaaaaaaaaaaaaaaaaaaaaaaaaanaaaaaaaaaaaaaaaaaagaaaaaaaaaaaaaaaaaaaaaaaaaaaaanggggggccncccaaannnntcaaancnaa

SEQ ID NO: 12396 - DNA, 437 bp, Arabidopsis thaliana
  unsure at all n locations
  Clone ID: LIB25-073-Q1-E1-D8
tgagagagaagccattagggtttgtgctctcaatggcttccgttaacgttagcttctgtcatcctttacgctcttcttctccaaaggtctcacttcgcagttccgttcatttcgcgacgagtctttcctcaagtcactccatttctgggcttcgcgctgttttgcctctgaagatttctacagttgcttcccccaattctcaaaagcttcattcttttaccgttttcgctcataagggctacaagatgaagacccacaaggcctcagcgaagcggttcagagtgacgggtagagggaagattgtgaggaggagatctgggaaagcaagcatttgttagctaaagaagaacaacaaagaaggaaaattacgttctaatccgaaaaatgacgggaagttgaaaccggaagcgactaattgacaaccgtngatcgggagg

SEQ ID NO: 12397 - DNA, 406 bp, Arabidopsis thaliana
  Clone ID: LIB25-073-Q1-E1-D9
aaaaaaaaactctctcagatctgagaatcatttcttcttcttcttcctcactttgttcatcatcttcttctccgatctaaacaacaatggcgacaccaggagcttcctcagcaagagatgaattcgtatacatggcgaaactcgccgaacaagcagagcgttacgaagaaatggttgaattcatggagaaagtcgcgaaagctgttgacaaagacgaactcaccgtcgaagaacgtaatctcctctccgtcgcttacaaaaacgtcatcggagctcgtcgtgcttcgtggagaatcatttcatcgatcgaacaaaaggaggagtctcgcggtaacgatgaccacgtttcgttgatccgtgactacaagaagcaaaatcgaaacggaactttccgaaatctgtgaag

SEQ ID NO: 12398 - DNA, 56 bp, Arabidopsis thaliana
  unsure at all n locations
  Clone ID: LIB25-073-Q1-E1-E1
ttgtgattgtggccgaattccaaagaatataangacagaataaagacngatttgca

SEQ ID NO: 12399 - DNA, 412 bp, Arabidopsis thaliana
  unsure at all n locations
  Clone ID: LIB25-073-Q1-E1-E12
aatttacttcaactgccgctatacctaaaaacttcatctttctcctctgagctatgataaagattgcagatttcactctcttcttctttatcttcgtcttctctccctcgttgcctctagctcaatctcagcttcccgatctcgacccacaagacaaagcttctttattgatattcagagtttcgattcacgacctaaatcgaagcttatcgacatggtacggctcatcgtgttctaactggacaggtctagcttgtcagaatccgaccggaaaagttctctccctcactttatccggtctgaatctctccagtcagattcacccatctctttgtaagctctcttctcttcaaagcttggacctttctcacaacaanttctctggaaacattccttcntgcttcggttcggg

SEQ ID NO: 12400 - DNA, 405 bp, Arabidopsis thaliana
  unsure at all n locations
  Clone ID: LIB25-073-Q1-E1-E4
ccatttcagcaatctacataaacgaccttactggggaaattgtaaccgctgctggaactgtccttgcggtttggagcatcaatggcgattgccttgctgtggctaacacatcgcagttaccatctgattcggtattatcagtaacaggctcaacatcttccgactggcttgagacaagctggtatgtaactggtcatcanagtggagcanttaaagtatggcggatgattcattgtactgatccggtgagtgccgagagcaaaacaagtagtancaacagaacaggagggctgaatttgggtgatcaagtgccagaatacaagttgattctacacaangtgttgaaattccacaagcaaccaagtcaccgcgctccatctcacaagcgacctgaagcagttacta

SEQ ID NO: 12401 - DNA, 389 bp, Arabidopsis thaliana
  Clone ID: LIB25-073-Q1-E1-E5
ggaccgggaaggacgcaatatataggatactagatagagagtgactgaaggagagaaaaacaaaaatggcgattgtttccgtctctaactcttttctcactttcaattctcccaatcagctccgatttagccgaagaagattctctgccatggcttcttcaactactggagtgagagtcgctgaaggagaaggcaatttgccaaaacttgtccttacttctcctcagaacagcgaggctgagatatatctcttcggaggctgcattacttcttggaaagttgcgagcggtaaagatcttctttttgtcagaccagatgctgtcttcaataagattaagcccattagcggagggattccacattgttttccacaagtttggacctgggcc

SEQ ID NO: 12402 - DNA, 417 bp, Arabidopsis thaliana
  unsure at all n locations
  Clone ID: LIB25-073-Q1-E1-E6
ttatgggagaaacacttgaagactaaatggggaaaaatccttggaccttctgctcacanagaatggcaatgctatctatcttctccatatcatctcgattctcctcatcacaaaactagtcatcttggtttggccaaaatcatatctcttatgcgatcgctttcatccatttttcgagatgatgatcataggaggagatatccatcttcaatccctcttgactctaccatgaacttctacctatccctcgaaacaggtcgcttttggtttccaagctcaagtttacaaccgtgagaatggacatgtagggttcatgttgtcatgctatgatgctgagctcagctatgacactgacactaatacttttcaagctangtatccaccacatggtaaaagagcaattgcggttgaaaaaga

SEQ ID NO: 12403 - DNA, 113 bp, Arabidopsis thaliana
  unsure at all n locations
  Clone ID: LIB25-073-Q1-E1-E7
tngcagctcctacgaccgagaggttattgggtatcacaccgttntatgagtgtcgaggaacatatccattgatgagcttancattcccgtgccttgatgacgatnaatcaaat

SEQ ID NO: 12404 - DNA, 410 bp, Arabidopsis thaliana
  Clone ID: LIB25-073-Q1-E1-E9
aaatacataaataaatatcaataaaatggcgggccgcgacacattccagctgcgttttgcagcagtcgcggcatccgccgccgtattgatctttctcatggctggtcaagtcgcggagtcgcgtatgatcaatatctgctctcacaccgcgtatccatctttgtgccgacctctggtgaaacgtgtcacgagccctagaaaagccacgcaccgaaccatccaagctttggaggctaagacgaaactagctctagccgaaacagctaggttcaaaaacggtaaccaagcggtcagcacgtgttacgagacattgggcgacgcggtttacaatttggcaagcgcgagaaagagcataaggaaacgtgatgtgccggcgatgaacacgtatctaactgccggctgtgtctgat

SEQ ID NO: 12405 - DNA, 392 bp, Arabidopsis thaliana
  Clone ID: LIB25-073-Q1-E1-F1
ctcttaaccggtgtaacatttgcttctggtggtgctggttatgttcctttgacaaccaaaatagcgggaggaatacctttaccacagcaattgatatattttgaggaatatatagagaaattgaagcaaatggttggagaaaagaggacaaagttcataatcaagaatagcttgttcgttgttatatgtggtagtaacgatatcgccaacgacttctttactctccccccggtccggctacactacaccgtcgcttctttcaccgctcttatggccgacaatgctcgttcttttgctcaagacactctatggatatggagcaagaagaatacttgtatttggtgcaccaccaataggatgtgttccttcgcagagaaccgtagcaggaggac

SEQ ID NO: 12406 - DNA, 416 bp, Arabidopsis thaliana
  unsure at all n locations
  Clone ID: LIB25-073-Q1-E1-F10
ggaagtatctggtgatgacgggaggcttgcataatgaggaggcgggttcactggctacgccgactagtgctaggcacattgggaagagagctcgcaagaacaaaagcctcaccgtctcttttgacgagaaagatctcaaggattttgtgactggttttcacaagaggaagaagaaaagaagaaaggaagctcagaagcagcaggaggaagcttttaggcggaaacgaatcgaggcccgtaagaataggaaattggaagagctaatggttgctggtaatggcgaggataatgaagatggggaagctgaagatgaagtggatgcagaggatgaagaagcagagcctgatgcttcaacatctgccacgacgatgtatgatacaggcgagttgaaagtaactgtgacaacaaatnnagat

SEQ ID NO: 12407 - DNA, 420 bp, Arabidopsis thaliana
  Clone ID: LIB25-073-Q1-E1-F2
acatccacgcgtttgttggcactgccacaaacaggaaattttggtagtttcaattggtaaacatgtactgcgtattgatactacaaaagttggcagaggtgaagtattctctgctgaggctcctctccagtgtccccttgataagctgatcgatggtgttcagattgttggtaagcatgatggagaagtgacagatttgtcaatgtgccaatggatgaccacgcgtctggtttcttcttcagttgatggcacgattaagatatggcaagatcgtaaggcacaaccacttgtagttttgaggcctcatgatggacatccagtcagttcagccacgtttgtgacatctcctgagagacctgatcacatcatacttatcacggggggtcctctaaatcgagaaatgaaaatctgggtctctgc

SEQ ID NO: 12408 - DNA, 413 bp, Arabidopsis thaliana
  Clone ID: LIB25-073-Q1-E1-F7
tgttttttcttgcattttccccagaattccttcacattctctccttttcctctttctaattcctcaccacctcaaattcttcataaacaaatccacttctgcatggttgggagaatctgttagagaatttttgttgttgttgggttcagatttggaaaatttcctttttttcgagtttcttctgaattattcatcgtggagattctcggatcgggaagggctgcgagaggtggttttcacggcggggatagattcatcttctgtcttctcctgagggggtagccgaggctccggcctcggcggtttttaaacccctacctttacaaattctgggaaattagaaaaaaaaaggtttgatttttcagtttttgctctgttcttctctcgaaagtttttgttttgttcgagaattt

SEQ ID NO: 12409 - DNA, 412 bp, Arabidopsis thaliana
  Clone ID: LIB25-073-Q1-E1-D5
aaaaaaaaaaaaaagggatagagtctccgttgattcaggtagctcagcgtcctctgagatgaaacgattgttgttgtttgtttgttgattttagtttttagtttagtggaagatgatcggtaatagcgtctacatctcaccgtcaccgtcaccgtccgaccactctctctcgcccaaccctaatctctgcatctcggcgatggaagagcagctggttgttgatgatgatgatgatgaccttgctcctcctccaatccctgatctcgatattgaccttgaagatgatgatgacgcctgttgtcacggcttgcttcatatcgcacctaatcacgaagaagaaactggatgcgacgaaaacgcttttgctaatgaaaagtgtttgatggctcctcctcctactcctggaatggag

SEQ ID NO: 12410 - DNA, 418 bp, Arabidopsis thaliana
  Clone ID: LIB25-073-Q1-E1-F8
caaaaaaaactcttcttttttctatctttcacgcgttgaagattcttgattttctttcttctccttccttacacgaccactgatatgtgtcggtgactgaaaccatctgttctcttttgcctctgatttatcgatatgttttaaagaaaaacggtgtttgaaacttttgtaatttaaggttcatcaaatactcagatcttgtctgagaaattaagctgaaatctgataaatgggtttgtttaaattcatcttcttgttatctcttctatggagtttctacagtttaggctcatctcagctacaagcttcacaagcacaagttcttcttcagctgaaaaaacacttaagaatatccacaacagctagaatcttggtatgatcacagaaccaatttctgctacttacaagcaacaccatc

SEQ ID NO: 12411 - DNA, 404 bp, Arabidopsis thaliana
  unsure at all n locations
  Clone ID: LIB25-073-Q1-E1-F9
tattttctcttttagggattgtttttttaacaatttttgccttgccataagcaatacaaccatggcaaggatctctctgttgttctcattagcctttgttttagccctcggctcagtgttcctttccgtttccggtcacgctcctcccgtgacaccgagaaaatcagcatgtccaaaaacagtatccgaactccagaccttaccttttaccgaaatcactgagatcctaaaccgaaaagagcggtctgccccgaaaacccctgagttcaaggcaatgttcacaatgtgcaaaggctacgtgacatacctcgagagcctctacaagtttgagaatcccattgtagatgttttaggaattgccaagaccagatacaccctgatgaacaaggcaattcttgctgngc

SEQ ID NO: 12412 - DNA, 424 bp, Arabidopsis thaliana
  unsure at all n locations
  Clone ID: LIB25-073-Q1-E1-A5
gcagaagagctgggagatttcaattgggaaatgctgaaactagggtttcggttagcgattggcattcaacatcatcgcctcttccgtattccatgggcgaagagacactctgtacctagaatcttgtgttctgagcagcgggattactgttcatcaggtctgacaaagtatgttcctaagaagtctcggaagattactgaagatttgacatctcagcaatttgatgttactanagtggatcatagtgtgttgggatttcaagttaagggtaacagcaaagaggctagagatggctcatttttggatctgcaagaggaaaatgatactggaagttacacgaatgtgtcttgtgatgactctgatgaaggttttatgaatttgggacaanggtatagatgctagtagattggatcatagtgtattg

SEQ ID NO: 12413 - DNA, 428 bp, Arabidopsis thaliana
  unsure at all n locations
  Clone ID: LIB25-073-Q1-E1-A6
tctaaaaccttggcttccttcgacttcttctgttttctccggcaatgtcgttaaaactcaacactccttttccaattttcgcgccatctctatttcctaatcataacccaagagcacccagcgagatccgattctctagatggggcaacgctaatgccgaacggttcgagcagcgtcnccggagccaagaagaactcgaggctgagattcgtcgggaccgccgattcgacgccgctactaaaatcgtccatacccatgattcccgaagcagcagctgctgagcctaaaacgtcaccgtttanatnaagangcactccttcactttccctctgctcgttcgattccggggtcnaaagatncaaaatactccaanaccgantcaaggaccccantngaacccaaagaacnaaccttagagntacccgant

SEQ ID NO: 12414 - DNA, 416 bp, Arabidopsis thaliana
  unsure at all n locations
  Clone ID: LIB25-073-Q1-E1-B10
ggatctatggaagagggcaaaatcgttcgcagaagaagcgggtaagaagtctcagacgataacacaatcatcctccgcgaccttcgtcaatctcgtcaccgagactgctaagaaatccaaggaactcgctctcgaagcttcgaagaaagctgatcaattcaatgccgccgatttcgttgctgaaacggctaagaaatccaaagaattcgctgctgaagcttcaaagaaggcggatcagttcaaagtcgccgcgctgaaacaagctgatcagatccagaacatcaaatcgatcgctgatataatcgggaccgggaccgggtcaggatccggttcagaagcggagcttctcgaattcggtgtaacggatgatttgagagagttcgctgaaggcttgacctctgctanattccaaactt

SEQ ID NO: 12415 - DNA, 409 bp, Arabidopsis thaliana
  unsure at all n locations
  Clone ID: LIB25-073-Q1-E1-B11
tgtttgaatagcaacatatccaagatctatgttcttactcagttcaattccgcgtctttgaatcgtcatctttcacgagcttatgctagtaacatgggaggttataagaatgaaggattcgttgaagttctcgctgctcaacagagtcctgaaaaccccaactggttccaggggacagctgatgccgtcaggcaatacttgtggttgttcgaggagcataatgtcttggagtatctcattcttgctggggatcatttgtatagaatggactatgagaagtttattcaagcacatagggagactgatgctgatatcacagtagctgcattaccaatggacgagcaacgagccactgcttttgggctgatgaagattgatgaaggaaggacgtattantgaatttgctgaa

SEQ ID NO: 12416 - DNA, 396 bp, Arabidopsis thaliana
  Clone ID: LIB25-073-Q1-E1-B2
gcgagcgatccggaatcgagagagagagctaccaatttttccaacttgttcggttccttataaagctgtttactttcccttgcgaattctctctctctctactataaagcaatacccttttctttcttttttggtaacccccaaaccctactttgtccagcgagaaaggaagaggggtttcgtctgattccgctaaatctctagtctttatctaaagatcatggattccgatgatgatatgcacgatatggactcggtagattatgattattacagcggcggcacctatgatgacaacgatagtgatgaaactgatttcgggtttggtgaggctgacaccgacgatgccgccatcatcgcctcctatcgctctaagagtaattatgttgttctcaa

SEQ ID NO: 12417 - DNA, 414 bp, Arabidopsis thaliana
  unsure at all n locations
  Clone ID: LIB25-073-Q1-E1-B3
gtcactttttcctcttgtgctctaattcttatccggatccgatttctctcatacaaagattctgtttttcttcttgggttattgttcttgctctgtttccgtatctcaaagtttcagctgctgaattgaatttgcattgatcgtagatgagaccaatcattaggttatcatctctcagtagaattagatgggctctaaggaacaatcaagaacgttattcttcaactttctactccaaaagccgcaaacttttgatcggtgtcaatcaaaatcaagctctgctgaatacaaacactgataattcaagtttgtattcaaggtcaagtatctttagangcttatcagcagaagcagtagaagcagctgatcctgctactactanggtcacccgtctcagatgtgaataagaacaag

SEQ ID NO: 12418 - DNA, 416 bp, Arabidopsis thaliana
  Clone ID: LIB25-073-Q1-E1-B5
aaatcgatggcggggatactagtgaacaatatcctccctcaacctccgattctccgatcgctttcttcttcttcgcgaagaagttcaattcgaaccctagttatggtcaaagcttcttcctctgaaccttccgagtctgtttcagtctccacgaagaccagtgacgacactggagctgttgttgtgttcactgctcctcctggtttcaagccaccggagccaaaacggttcgccgtcaaatccggaaaactcttcgatgtcttgggtgcagcaattggattgtttttccgattcggcactggtgttttcgtttctgggtactctgcatcttttgtgtctaaggaagagattccagctgatcagtatgcgttgcgtttaggcgggatcacggtaaaggaaactgctaaggtcgggcc

SEQ ID NO: 12419 - DNA, 382 bp, Arabidopsis thaliana
  unsure at all n locations
  Clone ID: LIB25-073-Q1-E1-C10
atgtcacaaaaagtctgatcctttctctttagatttggcttcgagaaatggctcgcgatcggcgggaaggtctggagatcaaggtggtgaatccaccggcggcggcgacaaacaatgtggctgtagaaacgtctccggcgacggcgacgaggagacggagacaacaacaacgagcttcgttcgctgagtttagaccgtttaagctttggtttccatggcttgttccagctatcgtggtggctaacattgcccttttcgccatttcgatgtttattaacaattgtcctaagaactcggcttattgcttagctaggtttcttgggagatttgcttttcagcctatgaaagagaatcctcttctgggtccttcttcnttgacant

SEQ ID NO: 12420 - DNA, 415 bp, Arabidopsis thaliana
  Clone ID: LIB25-073-Q1-E1-C11
gagagagagagatagttggcccagcggatcgacgtcgacgatgatgatgatgatgatcatttgattcttaagctaaaagctttcttcttcttctctctcccatcccatggagttcgtgatttagtctctcctcttagatttttctctctttccgctccttatttttagtattattatctcagcagaaaaacaaaaacacttttcatttctttatttttctttctcatttcgcataaatctttgtcgccgagacgatttgtgtctgagaaactgagaagaggaatgggagaaacagttcattgtggaagcttcttgtcctcaatgagggatctaagtgaagatatttccaatacttgtagctattcaatgtattgtggaggtgataaaactttgccttaaggggcagtaacaagag

SEQ ID NO: 12421 - DNA, 426 bp, Arabidopsis thaliana
  unsure at all n locations
  Clone ID: LIB25-073-Q1-E1-C3
agccaagctctgatcatttcgatttttttccggtgaaaagggaggagaaacatggttgtacgtatcagactgtcgagatttggatgcaaaaatcggccattttttagggttatggctgctgatagcagatctccaagagacgggaagcatcttgaggtcttaggttacttcaatcctttgccaggccaggacggtggtaagangatgggtctcaagttcgatcgaattaagtactggttatctgttggtgctcagccatcagacccggttcaacgtctcctattcagatccggtttacttcctcctcctccaatggtggccaatgggacgntaaaggtggancacgagacacacgcccnatttgattccgataactgggncgctatgtggatgcanagaaataaancagttaatgccaaatgantg

SEQ ID NO: 12422 - DNA, 357 bp, Arabidopsis thaliana
  unsure at all n locations
  Clone ID: LIB25-073-Q1-E1-C8
ctttctagaccaaaaaaacaatacgtatatagattgtaccataaataattaaaccatagtaagagatgtactttaagagaatttttttgaagttttcaaaattaatcgaaccaaacctaactagttagttattatgagtgtggctttttagtgactggatttgatgtcaagtgattttactataaattgatcttaaattgttttggaaaatcttaagcggactaatgggattttatctcangatttggagaattcatttttgaggcaattaagtttttctgatattagtatattgctgaaaaaatgaaaaacaataattataaaaaaggaaactataagttaaaaggaaaaaaaaag

SEQ ID NO: 12423 - DNA, 417 bp, Arabidopsis thaliana
  Clone ID: LIB25-073-Q1-E1-D1
ctctctcggtagccgatcttcttcttctccgttacgtgccgccggagatgaggattcttcatcgcctcatgtacacgatcactctcctaacggcggagacgacgaagatggtcgcccacgtcatccttctagagatcgagaccgtccgatctggtttcactctttgtttcctttcttcggtgatgatcctagggtttctcctcagaagaataaaatctcgcttctattgattttgattctctctattgctagcttgatctcagtttatgggattattaatcacttgaatgctccttatttatgtaaaaaagatgggattgtgctaaactgtcctcatgtaaaagagtcaccttctccttgggagaatcctttatctgcaacaacttcttgggaaagccttgtgctgagcggcggatt

SEQ ID NO: 12424 - DNA, 391 bp, Arabidopsis thaliana
  unsure at all n locations
  Clone ID: LIB25-073-Q1-E1-D10
aatatctccgttgccggcgaaatcactttgctcactctctcaactttgaaaggagactcaagtttctcactttctctcttccatggctttctcatactctttaacttctccgtcaccaaattcgactctctcctattccagtacccatcaatttctcaacccgtcttcttcgtttcccgtctcgttatcagtctcatctccgaagaatacccgccatcttcgtctcctcatcacctccgctttgaatccacagacgggacagccgacgaagaaggcctccaccggtagtgataagagtagtacgaacaagaaacgtaagaaaaaggggaaaattgcgaaacctgtggaggattgggaattgagagattcanaagacgcttttgagggaaga

SEQ ID NO: 12425 - DNA, 411 bp, Arabidopsis thaliana
  unsure at all n locations
  Clone ID: LIB25-073-Q1-E1-D2
ggacgcntgggtgcttcaccaccaganagatacatccaaaaattcatatctttccttcatttttattggcgtttttaagaaaacaaagcttccccaattagggttttgtattagaagaatgggattgtggaatggaaaatgcaccggaggatttatcctctaccttctcgtggctttctccgtcgccgtcttctctgtttcttacgtcggagacacaacaaaccctattcatcatcatctctcttctctctctgccaccgaaaaaatttggccggatttgaagtttaagctggaancttgtgttggntacagtgatagcgtttctangatcagcttgtngggactgttggtggtgttggacgtggtgngatttttgttcctatgctcactcntagacncgggttcgatang

SEQ ID NO: 12426 - DNA, 415 bp, Arabidopsis thaliana
  Clone ID: LIB25-073-Q1-E1-D4
tgacatatgcaaaggatttggttgatgtcatgtatcgtgacaatggaccggatttcggagcagcaagtgatggtgatggtgacagaaatatggttttaggaaacaaattctttgtcactccttcagactctgtagctatcatcgcagccaatgcacaagaagcaattccatatttccgtgctggtcctaaggggctggcacgttctatgccgacaagtggtgctcttgatcgtgttgccgagaagttgaagcttcctttcttcgaggttcccactggatggaaattttttggaaatcttatggatgctggaaaattgtcaatctgtggagaagagagctttggcacaggttctgatcacatccgtgagaaggatggaatatgggctgtgttggcgtggctttcgatccttgctca

SEQ ID NO: 12427 - DNA, 424 bp, Arabidopsis thaliana
  Clone ID: LIB25-073-Q1-E1-A3
acttattgttattcccatttcgcccctatccgaaaaatggttgaagctcaatcatggacaacgcggcggatgagcaatcctagattcgacgccgccgcaaccgccgcaccaaccatcgtagacatccccggaacaccaccacactcctccgcttcttcaccactcaaacccttcttcctctcttcccccaccgtatcaccaacaatcctcacggcggctataatcgccgcctggtttggctcaaatataggagtcctcctcttaaacaaataccttctcttctactacggtttccgttacccaatcttcctcaccatgacacacatgttatcatgcgccgcctatagctccgccgtaatcaatatcgccggaatcgtgccacgtcagcacatcttatctcgccgtcagtttctaaagattctcc

SEQ ID NO: 12428 - DNA, 399 bp, Arabidopsis thaliana
  unsure at all n locations
  Clone ID: LIB25-070-Q1-E1-G1
acaaaggatactgcttcgtcatcttcaaccttcgtcatcttccgacgcctctctctctgcctcagcttgcttgtccaaagacagtgctgcatatcaatatggagatgatgttgtcattgtcgcggcacaaaggactgcactttgcaaggcaaaacgtggcagcttcaaggatacatttccagacgagttgcttgcctctgtattgagagcattgatagagaaaactaatgtaaacccaagtgaagttggtgacattgtantgggtactgttttgggaccaggatctcagagagccagtgaatgcangatggctgcgttctatgctggnttccccgaaactgttcccatcagaaccgtgaacagacagtgttcatctgggcttcaagctgttgctgaant

SEQ ID NO: 12429 - DNA, 469 bp, Arabidopsis thaliana
  unsure at all n locations
  Clone ID: LIB25-070-Q1-E1-G3
ntgttaccttgccggtgccggtccgaaattacgggtcgacccacgcgtccgattcgatcacacaagaaaaattacaattcttcttaatcctcattattatatatataaataaacttcaatctaagcttcttcgtaatttctctttcgttcaatgttattcttttagatctcgaacaaaacaaaatctccagaagaaaaaaccaaattccatggcgtctaaatcgaagcagcatcttcgttatcagccgcgaaaatctgtgtcacgatcaacacaagctttcacggtgcttatacttcttctcgtagtgattctgattcttctgggtctcgggattttgtcactacctaatgctaatagaaactcttccaagacgaatgatttgaccaacattgtacgaaagagtgagacgagttctggagatgaagaagggaatggtgaacgttgggttgaagttanttccntgggagc

SEQ ID NO: 12430 - DNA, 410 bp, Arabidopsis thaliana
  unsure at all n locations
  Clone ID: LIB25-070-Q1-E1-G8
gactctctatctgaaatctcaaancggagaacgcgagggaacaagagattaaagcatagtgagaccctaagagagagagctttaggtctagaggggatcttcacaattcacacaacaactacgagataggatcgtgcgcgtcaaaagaagctggtactgctgattccagccgaagattagtctccgcttctggttgttccggtggagactcgtcggaaatganaggtcttttcaaatccaaaccgcggactcccgctgatattgttcgtcagactcgcgatctcctcctctacgccgatcgatncaactccttccctgancttcgagagtccaaacgccganggaaaagatggtggaactaagtaagagcatacganatttgaagttgattctatatggaancagtgagg

SEQ ID NO: 12431 - DNA, 472 bp, Arabidopsis thaliana
  unsure at all n locations
  Clone ID: LIB25-070-Q1-E1-H2
actgttgcccctgccggtccaaaattcangggtcgacgcacgcgtccgcttcngnatatccccatttctctgaaaaccctaacaaatcctcctcttgttccgccactgccgcngccgctactcaacggtggtgaattttctatacggncagttcgntgntctttttatcgacantccnacananatccatgatcatgggcgccactgcttcctccgaagcttctgaaggaccagtgatgggtctcatcaacaagcgtctccgtgctctccgtaagaaatacaaccgantcactcaaatggaanaatcgatttctcaaggcaaaaccctaaacaaggagcaagaagaagtcctccgctctaaaantgccgtcgtcatccnaatcnacgaacttgaaaagatccgtgctcntctctccgccgcnngtgacagangaaatcatcctcnctaatcagctttaaccggtgcntcatg

SEQ ID NO: 12432 - DNA, 400 bp, Arabidopsis thaliana
  unsure at all n locations
  Clone ID: LIB25-070-Q1-E1-H5
cantgaagtgaactaataacacttccatttgcaatttcacgacctccantttcgtgctgagattctctaagctcgatggatctaacgacgacgcgtcagaggcgtccacttanatctgactcttcttcttcgtcttcnacgaaatcttactcgaagaccgataancctggccgatntaatggcggtgatgcggaggatggtggtctccgatggttcttgccgtttatangcgctttgttatcttcgtnacatgagngcgacttctaatatcantcatgactgcgatgaangtgttcaattacngggagcctcttcattatnntctctacaagtccngatttcagacntggggaatanagtncacctttggctcttcgggtcggactntatacattctatt

SEQ ID NO: 12433 - DNA, 414 bp, Arabidopsis thaliana
  unsure at all n locations
  Clone ID: LIB25-070-Q1-E1-H6
ttattgggagttgtctttctcttgcactctctctagttccaaaccctagcaattcctctgttttcaccattttcggagattatcaccttctccccgattcgccgccttgtgattacatctacgtaaagagtttctggtagaaattttccctcttttaagctgcagattggcatcagattccgttctggatgtgtcggtgatcgattttccgcgtcggtgatgatagctaacggattcgagagtatggataaagaacgagtcaggaaacgtcctcgtatgacctgggacgaagccccagctgaaccagaggctaaaagggctgtgattaaaggacatggaagcgatgggaggatttgtcaccaccnntanggggacatgaatcngatggncaataaggttttcagttngangggg

SEQ ID NO: 12434 - DNA, 405 bp, Arabidopsis thaliana
  unsure at all n locations
  Clone ID: LIB25-070-Q1-E1-H9
acgccttcnngtagccgtccanaattcaaaaggtcgacccacccgtccgcccacgcatccggagagaaagaaagaaaaagataaagatggatcacgcagcagatgctcaccgtacggatttgatgaccattacaagattcgtgttgaatgaacaatcaaagtatccagaatctcggtggtgatttcaccattttgcttagtcacatcgttttgggttgcanattcgtttgcagtgctgttaanaaggctggtttggctaacgttaattggncttgcaggggaaacaaacattcanggtgaagagcacnaganacttgatgtgctctctaagngatgtctttggtcaacnctttggttangcaagtgggnngnacttctggtncntgtctcgggnnganaggattg

SEQ ID NO: 12435 - DNA, 56 bp, Arabidopsis thaliana
  unsure at all n locations
  Clone ID: LIB25-071-Q1-E1-A10
ctctncagacagtttcttgcacaacttgaggttgcatccaanatcttgcaagattg

SEQ ID NO: 12436 - DNA, 487 bp, Arabidopsis thaliana
  unsure at all n locations
  Clone ID: LIB25-071-Q1-E1-A11
ctgttaactnntacgccgnccgtccaaagattaangggtcgacggcacgcgtccgcnttcantggctctgagctactctttattgcttaggccttagtgtgtgtgtgtgaatcttctcagcgaaagccaagttcttttctttgttggtgtttctgggtttattgcgacaatgggagctgagcattttagcctggtgaagttcantagaggtttctttgtgtgtttatgggtgatgctctcgctatcttgcgcagcaagcgagctatggctcttcaaggcaaaagtttgaggtgaagaaacatttgaataggctcaacaaacctcctgttaagactattcanagtccagatgggagatataatcgactgtattcctatttcaaaagcagccaagcttttgaccaccccttcctcaaagaccanaagattcaagatganggcctagttaccaaccaagaanggntccttganganaatnaggggannng

SEQ ID NO: 12437 - DNA, 475 bp, Arabidopsis thaliana
  unsure at all n locations
  Clone ID: LIB25-071-Q1-E1-A12
tacgcttgccnggccggtccaaaattaacgggtcgacncacgcgtccgctttcctttcgtttgcaaaaacccatcccatcaaaaataaacaagagggcctaaagaagaatcctaaagactttacgggtcttgtttaggataaaagaaatgcctgccggtggattcgtcgtcggggatggccaaaaggcttatcccggcaaactcactccctttgttctcttcacttgcgttgttgctgccatgggcggtctcatcttcggatacgatatcggaatctccggtggtgtgacgtctatgccgtctttcctcaagcgattcttcccgtcggtgtatcggaaacaacaangaggacgcgtcaacgaaccagtactgtcaagtacgatagcccgacgctaacgatgttcacatcgtctcnatatctangcggnggctaatttcgtccctgggggcttccancgtngacnagaaaattngg

SEQ ID NO: 12438 - DNA, 416 bp, Arabidopsis thaliana
  unsure at all n locations
  Clone ID: LIB25-071-Q1-E1-A2
gaaacaaggcgcctgattttgaggcagaggctgtgtttgatcaagagttcatcaaggttaagctctctgattacattggaaagaagtatgtgattctctttttctacccattggactttactttcgtctgcccaacagagattactgccttcagtgaccggcattcagaatttgngaagttgaacaccgaagtattaggtgtttctgtccatagtgtgttcnctcaccttgcatgggtccaaacagacaggaaatctggagggcttggtgatcngaactatccccttaattcagatgtcactaantcaatctcaaagtcgttcnggagtgctcaagccaatgntnagggnatancactgngagggacnttttngaaggcgaaaaagnaagggnntgggttganaattccccccntg

SEQ ID NO: 12439 - DNA, 400 bp, Arabidopsis thaliana
  unsure at all n locations
  Clone ID: LIB25-071-Q1-E1-A3
tagccgccgcttcaatcgtttttagaaaacgcgatcctgcttattccaagacttctacttgaccgtgccactagggtattcgcgtttgctaacagatatcgcggcgcgtatagtaacagtctctaccacgcggtttgtcctttttactgtgatttcaacggttaccaggatgagttactgtggggagcggcatggctacacaaagcctcgaggaaacgagcgtacagagaattcattgtgaagaacgaggtcattcttanggctggagataccattaatgagtttggttgggacantaagcatgctgggattaatgncttaatctccanggaagtgttaatgggaaaagcagngtanttgngtctttcaagcangaaggcnanatnggnttnnntggttg

SEQ ID NO: 12440 - DNA, 439 bp, Arabidopsis thaliana
  unsure at all n locations
  Clone ID: LIB25-071-Q1-E1-A4
tgctctctctctgaaccggagacggtgtcacgggacgaatctaatcgccgggaaaccgttttttttttctctcggaaaatcgatttgaatctccggcgatctgatcgggatgagtaacatcgatctgattgggatgagtaaccgcgatctgatcgggatgagtaacagcgagcttctcaccgtcgagcctctcgatcttcaattcccttttgaattgaagaagcagatctcttgctctctctatttgacgaacaagaccgacaataatgttgcctttaaggttaagacgacgaatccgaaaaagtattgtgttaggcctaatactggagttgttctcccgaggtctacttgcgaaagttcctgtgaccatgnaaactcaaaaggganctccctnccganaatggnantgnaaggggaaatttnngggtnnaaagggnng

SEQ ID NO: 12441 - DNA, 355 bp, Arabidopsis thaliana
  unsure at all n locations
  Clone ID: LIB25-071-Q1-E1-A8
ctctctttctctttttttttttttttattttcttctcttccatgtcacttccttgacgaattctatatacctagttcgttttttcttcctcaaatatatctttttcaatttatttggtttttctttgggtgcaacttcacctcacaaaattttctctctttttttatattaatttgagttaggcctttttgatttcatagatgagtcntcnagtcgtctggatttgatgtggttatagtcttacagagacctttgattgaaataagaacaaaagcaagaanacatacatcctcntcatcttanacncatccgtttttangttntcnangggtttnanngttttttaangttanng

SEQ ID NO: 12442 - DNA, 417 bp, Arabidopsis thaliana
  unsure at all n locations
  Clone ID: LIB25-071-Q1-E1-A9
ctgagcttgagaagagaaaacacaagctcaaacgtcttgttcagtctcccaactcctttttcatgaaatatggaattggatactcaaaacttggttcaaatataatattctgaatcgattgaccagtaaggaaaacttgactcatgtgcgtgataagatggttcaactatttggagcttataaaagaaccacatgcaacattgcagcaagcacttctcaatcttcacgaaaggatatcccatttggatatgatgggttttactcttacttttctcaaagaaatggaactggaaaatcaccattagatatgtacttggaanagcctgtgttagatatggtctcttttagagatatggatgttattgcatattgggaaaanaatgtctcncgntttaaangaantggcaacnatggnag

SEQ ID NO: 12443 - DNA, 410 bp, Arabidopsis thaliana
  unsure at all n locations
  Clone ID: LIB25-070-Q1-E1-F8
ttcttgtaatggaaatctacaccatgaaaacgaattttcttgtactggctttgtctttgtgtatccttctttcaagcttccatgaggtttcttgtcaggatgatggtagtggtttgagtaatttggatctaatagaacgtgattatcaagatagtgtcaatgctcttcaaggcaaggacgatgaagatcagtctgcaaagatacagagtgaaaaccagaataacactacagtgactgataagaacactatttctctatctctatcagatgaatctgaggttggatctgttagtgatgaaagcgttggacgttcgagtctgttggatcaaatcaaacttgaattcgaagctcatcacaatagtattaaccaagctggatctgatggtgtcaaggctgaatccaanggatga

SEQ ID NO: 12444 - DNA, 412 bp, Arabidopsis thaliana
  Clone ID: LIB25-070-Q1-E1-B4
ctttccgtcttcatcgtcctcccggcttctgcgattttgtttaagtagcgccggaccggagtagttaaaaccctagcccagtctatttaaagattcaccgagtagtcttctagtcctgcgtatacttcttcttcttcgtttatacttagaagatgaattgtgcaatttccggcgaagttccggaggagcctgtggtttctaagaagtcgggtttgctttacgaagaagcggctaatccagacgcatatatccgattatgggaaatgcccggttactggtgagccacatactcttgatgacattgttcccatcaaaactggggaagatcgtaaagccgaaaccattacacacagctagcatccctggattgcttggaacgtttcagactgaatgggacagtttgatgctatca

SEQ ID NO: 12445 - DNA, 411 bp, Arabidopsis thaliana
  Clone ID: LIB25-070-Q1-E1-B6
aaacgagccagcctcttcttccttcgtctactagatcagatccaaagcttcctcttccagctatggctgcttcagtacactgtaccttgatgtccgtcgtatgcaacaacaagaatcactctgctcggccgaaacttccaaactcgtctttgttacctggattcgatgttgttgttcaagctgctgctactcgattcaagaaggaaacaacaaccacaagagccactttgacgtttgatccaccaaccactaattctgagagagctaagcagagaaaacacaccattgatccttcttctcctgattttcaaccaattccatcttttgaagaatgctttcctaagagcactaaagaacacaaggaagttgtccatgaagaatctggtcatgttcttaaagttccctttccgt

SEQ ID NO: 12446 - DNA, 394 bp, Arabidopsis thaliana
  unsure at all n locations
  Clone ID: LIB25-070-Q1-E1-B8
tgtaaagcagtggacagagacgacnatgagtacgatgaagccaagccggagcgacgaaatatccgacccggaacagcagatcaagaacgcgaaccagatcagagctgatttcgattccttggctcccaaacgacccactaaacccactcgaagcgaaccgggatttcctggatctttctctgcttccgacaaaatcaccgaccatcctgaagctgacnaattccaatctctccagtcacaaactcatgggtaaanttctaggtgagggagattcatctgcagttcacgatgagttcctggaagacagagtnttactcaaatctcatcgccattgatnaggcaacatcanacgacnggaagttgggtttaatnaaatgtggtgaacgatgacanc

SEQ ID NO: 12447 - DNA, 409 bp, Arabidopsis thaliana
  unsure at all n locations
  Clone ID: LIB25-070-Q1-E1-C1
gaagaagaagaanaagattgacaaacaaaaaggattcacctttagtgactgagtgagagaaagagattgaaggaaaaaaaaaaaaaagggtgaagctttggngagaggataaccacgtagaggattctaatccgtggttgcaaacgaaggacccagaatttcaatctttttcagtttctggaatctcttgcttcgatcgaatcactctcatgtctaacgaagactctcttccgcctttcactttgtttggtttggatgatgtcgaaaattacggtctggtcactgaagcagacaattcgttacctttagatatacacaatcaggtttttcaacttgtggagaagggaaaccantcattcaaagagtctcgctttgaagangctantaagcaattattcnanagggcaat

SEQ ID NO: 12448 - DNA, 85 bp, Arabidopsis thaliana
  unsure at all n locations
  Clone ID: LIB25-070-Q1-E1-C12
ccagtngctaggtaantcgtttcgttcgcaacgttttacacatcnacccgtcccagtgacatgtcacccantctggatgactctg

SEQ ID NO: 12449 - DNA, 418 bp, Arabidopsis thaliana
  unsure at all n locations
  Clone ID: LIB25-070-Q1-E1-C4
aaggcgggaccgatccgccattaatgctaccacccaactacaaggcttttctcacacactctcttctctcaatctcttggctcagaacaaagaagataaaaaaaaaagtgtgatatattgtgagaagattgcagaagcgtgtccaacttggttccctctctctctgaaattactcaatcatggggatttgcttgagtgctcaggtcaaagctgagagctcaggagcgagtacgaagtatgacgccaaagatataggaagtcttgggagcaaggcttcgtctgtgtctgtaagaccaagccctcgaactganggtgagatcttacagtctccaaatctcaagagttttagctttgctgaagcttaaatcagcaaccaaggaattttagaccanacagtgtgcttggtgaaggtgggatc

SEQ ID NO: 12450 - DNA, 411 bp, Arabidopsis thaliana
  unsure at all n locations
  Clone ID: LIB25-070-Q1-E1-C8
taataatcttttatcatacaatttgttctctctctctctctctctctctctaccataaagcaaatgtgatcagagacaaagcatacaaagaagttcctcattcaaaaaagatttctcagccatcaaaattctctttctcttcatccaacaaaaaaaaagcatacctctttttcttccatatagataagttaattaagaaaacgaattatcaggttttgtttcggctgatctgaggaagttcatctatggatacggctcagtggccacaggagattgtagtgaagcccttggaagaaatagtaacaaacacatgccnaaagccgcaaccgcaaccgcttcaaccgcaagcagccaccgtcggtgggtggagagaggaaggcaaggccagaaaaggatnaagctgtaaactgt

SEQ ID NO: 12451 - DNA, 398 bp, Arabidopsis thaliana
  unsure at all n locations
  Clone ID: LIB25-070-Q1-E1-D12
gagtaatttgagatatacaacttgggcagaagaatcagatgatcgacaacaattgtttatataaagaagagctgantcgcaattcttactcaggtctggncaangaggcttctgagtcgattttgctccctagtgaatccggatttgacggttctcggagtccggtttgctcctcgccggatccgaacctcaactacagacctgtcancggtatcctgagtcaccctgnagatggtgcgtctggtcggttgaccaatgatacgangcncgacgtanatcgctgccntcgtatgtgaagttcgctgaggcaggtggtgcctcgtgttatcccactcanctacaaaggancctgaaggaagttgcnccttccannaccgagnaantttggtcancggtng

SEQ ID NO: 12452 - DNA, 474 bp, Arabidopsis thaliana
  unsure at all n locations
  Clone ID: LIB25-070-Q1-E1-D2
ctgttacgtttgcccgtgcccggtccgaaaattaacgggtcgacgcncgcgtccgaaaaagacaaaaatatatataaaaaagaaaaaaaaaagaaaaaaaaataattgtcttgctctgttctatttaacttttcttatatataaaaaaaatggcgaaaaatttactagcaatatgtctggtgtttatggttgcatcaagtgtggtttatgaagtgcaagggactttcttgttaaagctttacttgaggaggaagtttcccagacgttgtatcnactttgccccttatgctggcaaaggtatgttgatgctcgtgagcaaccttgaaggtggatgtcccgcaactagagagttcaaacaattcttttcaacgttcaagtcttacatgagctttatcaagctcaagcatcgatatccgcatcgaaaaacatcgatgtggagatgaatgggagatgtgnattgctttccaaggncaa

SEQ ID NO: 12453 - DNA, 412 bp, Arabidopsis thaliana
  unsure at all n locations
  Clone ID: LIB25-070-Q1-E1-D7
tttttgttctctttgatgtctctagtcttgttgggatgtgaaacacatgattttcgaggagtagagagagacagagagaaattaagggaaagagctcacttgtgtgacttgttctgtgagaaaattctctaancaaaattctcaattttttcagcttctttctaattnatgcatattaaaattcagagcttttacacttgaaagttgtcatctttgtctcagtcnctctctctctctctcgtttgcatagaagaaacaatttttgtgttganttagtcagttcacctaatctgaagagaanttaaaaagtttggctaaanatttgtcaaaaanttaanacttccntttcatggaagctcaacancttaatctctttgggcngtttccttanctnaggttcctttggatcngc

SEQ ID NO: 12454 - DNA, 399 bp, Arabidopsis thaliana
  unsure at all n locations
  Clone ID: LIB25-070-Q1-E1-D9
attagagcagctgctaagaaccacaaagacgttctcattgttgtcgattcaggagattatcaagctgttttggagtatctcaaaggaggacagagcgaccaacaattccgcagaaaacttgcgtggaaggcctttcagcatgttgctgcatatgattctgcggtttcagaatggctatggaagcagactgaaggaaaagagaagttccctcccagctttacagttccgcttgtacttaagagttctcttcgttacggtgaaaatcctcatcaaaaagctgcattttatgttgataagagccttgctgaagtgaatgccggtggtatcgcaacagcgantcagcatcatggaaagganatgtcntacaacaactatcttgatgctgacgctgcatggaac

SEQ ID NO: 12455 - DNA, 246 bp, Arabidopsis thaliana
  unsure at all n locations
  Clone ID: LIB25-070-Q1-E1-E1
ttcccaatggnccanggagttttgaccccatgccgtgttcgccttttgcttcacngangaactccttgcttcagangacatggaaggagaactggtgacgaggagaanaaagtctgttcgtggntgcattgtgagccctgatctctctgttctgaaccttgtcattgtnaataanggtgagaacgatcttcctgggcttaccgatactgagaagccaagaatgngaggaccanagagangcctcca

SEQ ID NO: 12456 - DNA, 415 bp, Arabidopsis thaliana
  Clone ID: LIB25-070-Q1-E1-E2
tttttaaacaatttctgtgtctgtggatttctacttggacggcgatggcgagaattggggctaaacccagaaattgaggatttgaattctgctgctgcggcgtctctgtggtggtttggtttctcgtttctgaaaatctacggtgtagtaagtcggagatgcagttgagatttagcaatggacagggaggataaccttccggttcaaccggataaacctccgaagagtctggttcgtcccattttaaacctggaaacaacttcgtcttcttcatcctcttcctcctcctcaccggaacttctacggcatttgcaagccgctttcaaacgccatcgcccactcagtaaaatgcagacgaccaagtatcgggcctcgacgaagtgttgctccacaaaagacaagcttcaagaaaata

SEQ ID NO: 12457 - DNA, 401 bp, Arabidopsis thaliana
  unsure at all n locations
  Clone ID: LIB25-070-Q1-E1-E5
ccgccaaatcaaccttcttcttcttcttttccttctctcttcgattctttttcgaatttgggtgattctcagattcacaagcttttagagctcgaatttgattggcgagctagaaatgtcgaggttttgaggaagaagcaaccacaaaagaggattgattttaagggcttttttgtttgtttccgatcttgcggcagagatggcgtcaaggtttataaagtgtgtgaccgtcggagatggtgccgtcggaaaaacttgcatgctcatttcttacactagcaatacttttcctactgattatgtgccaactgttttcgacaacttcagtgctaatgtggttgttgatggcaacactgtcaatcttggattgtgggaaactgctgggtcaanaaggacacaac

SEQ ID NO: 12458 - DNA, 76 bp, Arabidopsis thaliana
  unsure at all n locations
  Clone ID: LIB25-070-Q1-E1-E9
gttttgattagatctttgantccaagttcctaattctngctaactcttcgatccggtgcagtanctcatcttttgt

SEQ ID NO: 12459 - DNA, 473 bp, Arabidopsis thaliana
  unsure at all n locations
  Clone ID: LIB25-070-Q1-E1-F2
acgtttgccnggnccggtccgaaaattaaangggtcgacgcncgcgtccgaaagaangaaaaacacacaaagcaacttcttcttcttgttcggcttttatcatctctgaaaattgctttatttggttgaattcattggattgttgatcgagattggtttactgaggtgatcgaaagtatggaggaagatcgtggggaagcgatcgttttagatatttcgccggagattaataatactccggcggtaatgatgagagttccacggaggattcgtgagaggcttttgtctgactgtagtaataagaagacagtatcttctgttcaagatattgaaagacaagcttcttcatgcncatctaacgaagacagcaattttatcataacgtttccgangaaaggctcgtgcnaaaccctagaagtccttcacgatcatctgatgaagaacttgggccaacgaatcgaagcaagacttct

SEQ ID NO: 12460 - DNA, 414 bp, Arabidopsis thaliana
  unsure at all n locations
  Clone ID: LIB25-070-Q1-E1-F7
aaacgagctgttcatatatattttaaagaacaaaaactaaaaaaaaaaaaaaaaaaaaaaactttgacaaaaaaaaaaaatgtcatatggatacgacgatgaggatgcaaagaggaaaaagagatatgtaattatctctatctcctctgttcttttaatctccatggttgtcgctgttaccataggtgttagcgtcaacaagtccgataacgctggtgacgaagaaatcacaacttctgttaaagccatcaaagatgtttgtgcaccgacggattacaaagagacttgtgaggatacactaaggaaagatgcgaaggacacatcagacccgttggagctggtgaagacagcttttaacgcancgatgaaacaaataagtgacgtggcaaagaagtcacaaactatgattgagcc

SEQ ID NO: 12461 - DNA, 413 bp, Arabidopsis thaliana
  Clone ID: LIB25-070-Q1-E1-B2
ctctttcgaagaaatagcttagcaatggcttggggaataaggatgaagatagctctcggagccgccaaaggtttagcttttctccatgaagcagagaaacctgtcatctacagagactttaaaacctctaacatattgttagactccgactataacgccaaattatctgacttcggtctagccaaagatggacctgaaggcgaacatacgcatgtaactacccgagtgatgggaacacaaggttatgctgcgcccgaatatatcatgactggtcatttgacgacgatgaatgatgtatacagttttggagtagttttgttagagctgataaccggaaaacggtcaatggacaatacccgaacacggagggaacaaagcctagtggaatgggcgcggcctatgttaagggacca

SEQ ID NO: 12462 - DNA, 81 bp, Arabidopsis thaliana
  unsure at all n locations
  Clone ID: LIB25-069-Q1-E1-F9
taagatcgggacgaacttcctaagatgttggcatggtcncaaggactctcctcntgatatcattgccattaatgacacngg

SEQ ID NO: 12463 - DNA, 431 bp, Arabidopsis thaliana
  unsure at all n locations
  Clone ID: LIB25-069-Q1-E1-G1
gtagttcanganttaaggaanagagcttctccgttaaagtatagtgagagaatatggaagtcaccaatgggcttaaccttaaggacacagagcttcgtttgggattacccggagcacangangaacaacaactagaactttcttgcgtcagaagcaacaacaagcgcaagaacaacgactcaacanaagaatctgctcctcctcctgcaaanacacaaatcgttggatggcctccagtganatctaaccgtangaacaacaacaacaaanacgtgagttatgtgaaagtgagtatggacggagctccatatctccgtaatgatagatctcangatgtacaaaaactatccanagcttctcaaagcactaaganaacatgttcaagttcacagtaggtgaatattccgaagagaanangntacnaaagggtt

SEQ ID NO: 12464 - DNA, 417 bp, Arabidopsis thaliana
  unsure at all n locations
  Clone ID: LIB25-069-Q1-E1-G10
ctatgaactaagaggattcttgccactgcttccagctcagacgattctcaacttctcaaggaaacattcgtttggaactgaaggtcccaaggaaaagaaagctcgtataaagaggatctttgcagcagggaaagctttgaccagtgtgatcaaagttgatcagaatcatgtatattttgattcaaagaanaagaagtttcttgttggtgtaaaaccggcagatgactttctggattctcattcaagcccacctanagcttgtaatgctttgcaagataaccaggtaatgatanatcataactcgccaataatgcagcttgatcaacagatttatatgggtgaggaagatnatgatgatgaantaattgttttcaagccgcttgttactgaaangaggaaanangcttctgaccaaat

SEQ ID NO: 12465 - DNA, 490 bp, Arabidopsis thaliana
  unsure at all n locations
  Clone ID: LIB25-069-Q1-E1-G2
aagctttccggtgnccgtccnaaattaaagggtcgacgcacgcgtccgcganaaaatagttagttccangaccaattctacaacanaaacaaaagagagaaaatgtctttttcaggttatagcttcatcgtactaacattattgtccatcgtcttaactcaaatctatggtttgagaagctttagccgaatggacgatctccaaccggcagaaacactagcggttcacaaccagattcgagctgcggtcggggttgctccattggtgtangaccaaaaacttgctgcccatgcacagangtacgctaacgtacgttcccaagactgcgccatgaaatattccaccgacggaacgtacggagagaatatagccgccgggtgggtccancctatggacaccatgaagcggtccgatcgcaacaaaagttttggnttacnggganaagccttattacaattangccacccaacgananncngtgagaccgntg

SEQ ID NO: 12466 - DNA, 420 bp, Arabidopsis thaliana
  unsure at all n locations
  Clone ID: LIB25-069-Q1-E1-G7
ttcgaatgttgaagaaaacctanacccagaaacaaaatccgcagaagaacaaaacccacttgccattttccattcttctctaccaatcgcatctctttctctgaccttgttcccatcctcgactcaatttctcaaattgtttgctcatcatccaaacaaggttaagatccctangcaggcttcttctctcactcatctctctctttcttctgtctctccttttccttcttccagaatctctttcanatccaccatcgctgctaaccctcttcaatcccctctctccatcgtcnctcgtcgtcgcgttgatccttcctccgcngcngctctccgccgtgctgctgtcgtctgggttccgcaatgacctccgtgtccacgacaacgaatgtctcaactccgccaacgacgagtgcgtctcgg

SEQ ID NO: 12467 - DNA, 101 bp, Arabidopsis thaliana
  unsure at all n locations
  Clone ID: LIB25-069-Q1-E1-H1
ntccctaanctaggcaaaagaagcggcantgaaggccatcaaggagtggggccagcccaagtcnaaggatcactcatgtcgtcntctgcactacctcccgg

SEQ ID NO: 12468 - DNA, 344 bp, Arabidopsis thaliana
  unsure at all n locations
  Clone ID: LIB25-069-Q1-E1-H10
cttattcgatgactaagaagctgtttccggccggggtttttgctgtcatcagtgcttgcatgttgtgtttctattcatatgtggtgctctctggaggaaacccacctccaaagaaattgaaaccatctgcgactagtccttcatactgaagggactttacataggtttagatttaaaaaagtggagatcttctctcttttgataactctggtctgttggattactggtgtaattttatactctttacgaattgatacacttggttttgtttgtgacctgttctttccagtgtcataatctaaagttttgattttcttaaaaaaaaaaaaanaaaaaaagggcgg

SEQ ID NO: 12469 - DNA, 205 bp, Arabidopsis thaliana
  unsure at all n locations
  Clone ID: LIB25-069-Q1-E1-H2
angagattgangaggaanagacgaaagatgagacagcgatctaagtanaccaaatctactccacaagtctttcgcttttcccctcngcattttgtgtttcatttgcttcagtttgttcccagaatttgtcttantttccanatattgctgttgttggantaatggattttcagtttgatcttccnttgtctaaaaaaaataangg

SEQ ID NO: 12470 - DNA, 70 bp, Arabidopsis thaliana
  unsure at all n locations
  Clone ID: LIB25-069-Q1-E1-H3
gangataagaatntaaggctactgccgtggctgcgaaacctgaagancacaaaccaaactccaataacat

SEQ ID NO: 12471 - DNA, 425 bp, Arabidopsis thaliana
  unsure at all n locations
  Clone ID: LIB25-069-Q1-E1-H6
cggtccacctttatactttgttctgaagaattataacnacagctcagaatcaagacatacaaatcaactttgttccattaacaagtgtaatcctaactctcttttaaatgagattgcaagggcttctttgactccggaactaagctacatagctaagccagctgcttcgtggctcgatgactttcttgtgtggttatctcccgaggcgtttggatgttgcagaaagtttacaaatggtaccttttgcccccctgatgaccagcctccttgttgccctcctggtcaaacgagctgtggcctaagtgaagtatgcaaagattgtaccacgtgcttccggcatgcagatttaagtagtgaccgcccttccacaacacaattcaaagagaaacttccttggttcctcaacgcgctcccttctgctgaat

SEQ ID NO: 12472 - DNA, 414 bp, Arabidopsis thaliana
  unsure at all n locations
  Clone ID: LIB25-069-Q1-E1-H7
tctttttctaattttttaaagtttctttcatcttcttcagatccgaattgtcgccgcgaaattcgtcagtgcagcttcttcttcttcgcgtactttattcgatcggctgtctgaagaacatgaagccgatgatcgtagttgctgctagttacggtggattgatgtttggatggacgcagaaattttgatgtgggtttagtctaaaaggtgaagaacaatgctcgggaatcaatccgcggattttagtgagaagggggaagatgagatcgtcagacagctttgtgctaatgggatttgcatgaaaacaactgaagttgaagcaaagcttgatgaaggaaatattcaagaagctgaatcttctttgagagaangattatctctcaatttcgaaggaagcaagagcactcctggaag

SEQ ID NO: 12473 - DNA, 403 bp, Arabidopsis thaliana
  unsure at all n locations
  Clone ID: LIB25-070-Q1-E1-A12
ctctttttctccacccgcgagaagataatgagagtttcgccggcggcaacactctcagtctctttgactactccactacctataactttaaccaaagctcgtttctccggcgaaccattgcgactcaaacaatatgttttgagtaatcanatttgctcccgaccaaaacatctcctctcagagtttaaacccaccagaagatggaccttctcctgcaaatgccgtaacagaggaagaaatggttaccgcgaaattcgatgacgaagganaagatttcattgttgttaacttctancggtttgtatcaatcggagatcctgangctgagattgagaagcaactctcattcttaaaaggatttgaatatacgaaggcgaatgatatnctcaantgaanaangggg

SEQ ID NO: 12474 - DNA, 421 bp, Arabidopsis thaliana
  unsure at all n locations
  Clone ID: LIB25-070-Q1-E1-A5
ggagaatttgcgcgacaacaacgatcgatcagtcgtcgtcttctcagatcttgttcttcaaaggattctatgccgcaagagcttcgattgtatcctctctgaggattgggtaatacccaataccatggataacaatagcgagcgcaaaggaaaacgaatcgataaggataatattcgtgtcaagcggaaaactttgcaagctttgctcaatgattgccagagagccctcgagttattaaacttagccgaagtcagttctgaagacgatgaagatgataaaagcaccggcgagggaagtgggtcacaagagagcaggggagaagtttcttcttccgatcgagaagatcctgaagctgatgaattatatgatctcatcaaatccaagggttgaatgtgatgacntcccttgaaaagattgatg

SEQ ID NO: 12475 - DNA, 224 bp, Arabidopsis thaliana
  unsure at all n locations
  Clone ID: LIB25-070-Q1-E1-A7
aaattagagttgttgtatctgcaaaaattttggtanagacacgcgaacccgtttggattttgttatggtgtaaagaaatttcaatcaaaaaactgttgtaataattgttaccaaaaagaaatgcttttctggaaaaaaaaaaaaaaaaaaaaaaaaaaaaaaaaaaaaaaaaaaaacaaaanaaaaaaaaaaaannaaaaanannaaaaananaaaanaanaaa

SEQ ID NO: 12476 - DNA, 391 bp, Arabidopsis thaliana
  unsure at all n locations
  Clone ID: LIB25-070-Q1-E1-A9
tttccatttttctgtacagccagtcctcgtcttgctggcctgcaataataatgtctctgatcggccgcctcaatcttggtcggcgcttctgcaccgccgtgccaagaagatcggaagacataatgtcaaacccagattgccgcccttctgatctatgcttgagggtctcgtacttgatcagatgcgttggggatctcgacacggcggcgaagtacgctcgtttggctgttttcaccagcatcaaatcggagtcaacaacaacaatatgtcaatccatcatcggaggcatgttacgggataaaaggctcaaggacgcttatgatctctacgagttcttcttcaatcagcataacctcaagacccaacaagccattggctgggnactacatca

SEQ ID NO: 12477 - DNA, 428 bp, Arabidopsis thaliana
  unsure at all n locations
  Clone ID: LIB25-069-Q1-E1-F8
tttgtgttgtgtaatgggttctactancctggtcggagttcgctcaaaatgtgtctggcgaatgggacggtttcggagcagattttacatgcnaagggcaaccgctacaactacctgaatcagtggttccagaagcctttanagaatgggaagtgaaggtgttcgattggcagacgcagtgtcccactcttgcccagcccanctcactatcctttctttacaagtccatcanactccnccccaccnttggatgtnaagctgatncatccacncgttacagcatcgaccagaggatcatcgggggaggcaaatcctctgcatnanccttttcgtatnctgtcacnggctcctaatgtcnctgtgtngcctttgcngaacaancaacttgaagtggaacatttgtccgatnnanccaaaaggacaaggag

SEQ ID NO: 12478 - DNA, 466 bp, Arabidopsis thaliana
  unsure at all n locations
  Clone ID: LIB25-070-Q1-E1-B10
gtttacgcctnccggtagccgtccaaaaattcaagggtcgacccacgcgtccgcaggttaatcgttaattaccctctgattcccaagatatcccaccgggtttgtagtaacagtagtagtaagctcgggagttactatgattcttcgtcgatcataaaatatggcggaatcagcgatgttgttggtaagaagcaggagctttttctaagtgtttcggtgaaancagtggaagacaaaggtaacaatggaggtggaagcatgagtttctcgggtcaaagctgggattctagttccgagattgaagttccttnaaaccaaagacccgtgantgagtattcgtctcnanaggaacgaatgttgtantcatgggggagaattggggtccaagcgaaatcnttagtcntcgaaagtggtccttngggttgggtcactttcacggnttncctgggangttccctgttngcag

SEQ ID NO: 12479 - DNA, 455 bp, Arabidopsis thaliana
  unsure at all n locations
  Clone ID: LIB25-070-Q1-E1-B11
aactgttccgcctgcctgtaaaggttcaanggtcgaccnacncgtccgcagagagagaagtcgaagcttcacgatcgtataataatggcgacggcttcagttgcttttaagtctagggaagaccataggaagcaaattgaattagaggaagctcgtaaagccgggcttgctccagctgaggttgatgaggatggaaaggaaattaatcctcatattccgcagtatatgtcatctgctccatggtatcttaattctgaaaaaccgagtttgaagcatcaaaggaaatggaagagtgatcccaattacactaagtcgtggtatgatagaggtgcaaagatctttcaagctgaaaaataccgcaaggggancgtgtcaaaactgtggtgcaatgacgcatactgctaaagcttgtatgggataagcctcgtaaagattggggcgaagtacacaaacat

SEQ ID NO: 12480 - DNA, 382 bp, Arabidopsis thaliana
  unsure at all n locations
  Clone ID: LIB25-070-Q1-E1-B12
gagatggagaatggagcaacgacgacgagcacaattaccatcaaagggattctgagtttgctaatggaaagcatcacaacagaggaagatgaaggaggaaagagagtaatatctctgggaatgggagacccaacactctactcgtgttttcgtacaacacaagtctctcttcaagctgtttctgattctcttctctccaacaagttccatggttactctcctaccgtcggtcttccccaanctcgaagggcaatagcagagtatctatcgcgtgatcttccatacaaactttcacaggatgatgtgtttatcacatcgggttgcacgcaaagcgatnnntgtagcattgtcgatgttagntcgtcccaangggctaataatc

SEQ ID NO: 12481 - DNA, 426 bp, Arabidopsis thaliana
  unsure at all n locations
  Clone ID: LIB25-068-Q1-E1-C5
atagagagctaaagaaaaagaaaaaagactacatttctacaaggacgttggttcttttagtcgtcgtcggtcgtcgaagaaagatcttctccttctttcttcgccgtacgatcgtcgtctaatgggagaatcatcaaatccaatggctacaagttcttcttcctcctcctcctcaattcctccttcgtctccaacaccctctccgacgtccacaaccactccgccacgtcaacatcctctcctccagccaccatcttcaaaaaagaagaaaaacagaacaaacgttttcagagtcttacgcaccgtgtttcgatctttcgcaatctttacaannancatccgtagcatgcaaaatcccggttananatccccggtttaaggcttaacgggatcacatcacnancaggtcanngaatcaacgggnag

SEQ ID NO: 12482 - DNA, 390 bp, Arabidopsis thaliana
  Clone ID: LIB25-068-Q1-E1-C7
acaatgcatcactaaatggaatggtgacattatggacttcaagaggcaccttaaggctaaagccggacttgaagattgaagatagagagtcgagtcttcttctcttgatggaaaatggaaaagactcagattggggtcacatgctaagagagagagagggaaggctttggtttttttgatgggtttgggaatggtttttaacgagttctaaagccacacacttgagagacagagaaaccatactcactaatctctgcatttccttaagaggtcagagattctttctatattaagtattatcattatcatgtgcaccttctttttttttcgttattgttgttgaacgtttttttgaaggcgaaacagagagaaaagtaatattttttggtg

SEQ ID NO: 12483 - DNA, 53 bp, Arabidopsis thaliana
  unsure at all n locations
  Clone ID: LIB25-068-Q1-E1-C8
naatcgaattcccatttcgtctcaagctcttcttctagccancgtgcaatcaa

SEQ ID NO: 12484 - DNA, 427 bp, Arabidopsis thaliana
  unsure at all n locations
  Clone ID: LIB25-068-Q1-E1-D1
caatataagcctgggatccaattttcttatttccccaaccaaaacaggggaagaaaaaaaaagaaaacaaaaaaatcaaaaaaaattagaaaatgaaagcctcaacaagagtcatatggacaatatctgtccttatgctcgctgctgtgtccgaggccatcttccctctaccgtttctaccgttcctccctgggttcaacaacggctttagggacaatgaggctgtcaaggttgcgaaaccacagcctgcaggagcagttggtggaaaagccgcaagaaggcagcgtggcggcggtttagacgctcagacaacctggggtgggtaagtgggaagctcttcttggaaaactcgggtgtgtcagggatgcatgngatccttatgccanttatcaacaangtccagttctatgacgccancatttgggtg

SEQ ID NO: 12485 - DNA, 468 bp, Arabidopsis thaliana
  unsure at all n locations
  Clone ID: LIB25-068-Q1-E1-D10
acgcctttnngtacggccccgaaaattccaaaggtcgacccngcncgtccgaagcaatcaccgcaagtatcagcagaggaaagctagtttccggcggtgaatccgtcgctcacggcggagcaaccaccaacaccacaaccctagccgttcctgcattcgcgaatccaangtggatcgaaatcaaaactctctcgaaacgatcaatgcncaattcacgaagacaaccagagctattcggaatcagaatcgcctctgttgttatcaccggnttcattctcgccaccgtgttctggcgattagataattcgcctaaaggagttcangagcggttanggttcttcgccttcncgatgtcgacaatgttcnacacttgcgccgatgcgttaccangtttttctccagggaacgttanatcttcactgngagaaantgcttacaaggcntancgggnnntcgnccatnnggttc

SEQ ID NO: 12486 - DNA, 422 bp, Arabidopsis thaliana
  unsure at all n locations
  Clone ID: LIB25-068-Q1-E1-D2
tgaaaggagactcaagtttctcactttctctcttccatggctttctcatactctttaacttctccgtcaccaaattcgactctctcctattccagtacccatcaatttctcaacccgtcttcttcgtttcccgtctcgttatcagtctcatctccgaagaatacccgccatcttcgtctcctcatcacctccgctttgaatccacagacgggacagccgacgaagaaggcctccaccggtagtgataagagtagtacgaacaagaaacgtaagaaaaaggggaaaattgcgaaacctgtggaggattgggaattgagagattcagaagacgcttttgaggaagatgatgatgccgattattcttcttcttcgagttctctaagcaacttttaactctcctcctaacatanccaaancanctg

SEQ ID NO: 12487 - DNA, 414 bp, Arabidopsis thaliana
  Clone ID: LIB25-068-Q1-E1-D3
ccaattttcgattcacgatggaaatggcggaaggggaaggaactacagaggagaactacgacgtagacatcgcgaccaccgcttcttcattaggcggctccggcgtcttccatatcatcaatgacatagtcggattcgtcctctatatgcaccagcagatcccttcggtattacaagacatgagccttgaatttgaaggattgcaaactgaatttatggatttggagacgaatcttgcagaacctcaagtgaaaccactggttagaagaaaactgatgagtagaaagagagaggtgaagaatgagattaagaaactggagaaactgatgaaaaccatctctagtctccgaagtgcgctgcagttaatgatccgtgaagctcctggcattcagaaagttgtgttgattccctggg

SEQ ID NO: 12488 - DNA, 423 bp, Arabidopsis thaliana
  Clone ID: LIB25-068-Q1-E1-D4
tcttcttgcttttgagaaaaaataattatatatttttatataggaaagggttaatttattaataaaaaaaaataaaaagaagcagaaaagagataatgcagggtggtaggcttttgacggtgttggtgtgcctcgcctccacggtggcgttggtgagcgccggtgacccttacttctactacacgtggaacgtaacctacggaaccgccgcgcctctcggaattcctcaacaggtgattctcatcaacggacagttccctggtcctaacctaaactcaacctccaacaacaatgtcgtcatcaatgtcttcaacaacctcgacgaagcctttcctcttgacctggaagtggactccagcacaggaagaactcatggcaagatggtgtgactggggacctcatgcccaatcccagcaggcaccg

SEQ ID NO: 12489 - DNA, 409 bp, Arabidopsis thaliana
  Clone ID: LIB25-068-Q1-E1-D5
gcaaaggagcaacccggagctctatcatagttccttctgttcaagagatggtgaaggagaagatgatcacgacggttcctccgaggtatgtacggtctgatcaagacgtagctgagatagccgttgattctggtctaagaaaccagatcccaatcatagacatgagtcttctgtgttcttcaacctccatggattctgagattgacaagcttgactctgcttgcaaagagtggggattttttcagcttgtaaaccatggaatggagtcaagtttcttgaacaaagtaaagtcagaggttcaagacttcttcaaccttcccatggaagagaagaagaatttgtggcaacaacccgatgagatcgaagggtttggacaagtatttgtggtttcagaagagcagaaactcga

SEQ ID NO: 12490 - DNA, 419 bp, Arabidopsis thaliana
  Clone ID: LIB25-068-Q1-E1-D6
gccagaccgaacatcaaacaagaaaacacatttgtccgaatttcatcttgagagctgtttgtgcccttcaagaaatcgaaagagagcttctttcccccattttctgcgattcacgatatttcttcttctataggacaacgtttttttacacattgaggctaaaagagagatggctgatgatcagagttcaagtactgaccgtctcgtgaaacctgaaagtttaaactcagatagaggatccaatcaatctattgaatcttctggagagagttctagagctcagggttccacaagcctgtctactactaaatctatggatggtaagaaaaccgaggaagaagagacaacggaacaacgcgatgttgatgatgaagaggaaccgctcatccaatcggttgaatgtcgtatatgccaagagg

SEQ ID NO: 12491 - DNA, 379 bp, Arabidopsis thaliana
  unsure at all n locations
  Clone ID: LIB25-068-Q1-E1-D7
ccgtcatggctttggagcgtgttcctgctgatatccgcgctcaaggaggcgtcgctcgtatgagcgatccacaaatgattaaagaaatcaaacaagccgttacgattccggtgatggctaaggctaggattggtcatttcgttgaagctcagatccttgaagcaattggaatcgattacatcgatgagagcgaggttttgactcttgctgatgaagatcatcacatcaacaagcataatttccggatcccgttcgtttgcggttgccggaatcncggcgaggctctgaggaggatccgtgaaggtgcggcgatgattaggaccaanggtgaagctggaaccggtaacattattgaagctgtganggcatgtgaggtcnt

SEQ ID NO: 12492 - DNA, 365 bp, Arabidopsis thaliana
  unsure at all n locations
  Clone ID: LIB25-068-Q1-E1-D9
gtcgacccngnccgtccgcncacgcgaccggtaatcccttanatcttcttttcaaatttcaatggcgtccggtgatgttgantatcngtgcttcgttggaggtctagcatgggccactgatgncagaagctcttgggactgccttcnctcaatacggcnacgttattgattccaagatcattaacgatcgtgatactggaagatcaacgggattcggnttcgncaccttcaaggatgataangccatgaaggatgcgattgagggaatgaacggacaagatctcgatggncgtagcatcactgttaacgaggctcantcannaggaagcggtggnggcggaggccaccgtgnaagtggtgncggt

SEQ ID NO: 12493 - DNA, 425 bp, Arabidopsis thaliana
  unsure at all n locations
  Clone ID: LIB25-068-Q1-E1-E4
agctccaataattgcaacaaatcactctcacccaaacaaaacttttcaaaagccctaatccgagaaatcattcgacaacaacacgaaggagatggatctagaagattgggaaatactccccaaaatcaactacaagggtctcgaacttgatctcggtcatgaagaggatcatgaagttacgaagatgatgagaaacaccgcaaaaagcttcgacagtgattacttcatctgcccaattcaagattctgtcggaaagacagagtttcttcatcagagatctagcgtggtccccacacaactcctccagattccaataacttgggaacctttgtcccccgtggacgacaaagatnacaataaagtacctgggattcggatttctcggaaccaagacccggaactttttgacggagtcntttccgtng

SEQ ID NO: 12494 - DNA, 395 bp, Arabidopsis thaliana
  unsure at all n locations
  Clone ID: LIB25-068-Q1-E1-F10
ctcttactctctccaagagcaacaatggctgcgactgcttcttctcttacaatcgcgtcgtcattctccgaaccacggactcaagatccattccncgagacgtttgaatctccctcttcaatattcaatcccgtacaaggtgttacggngtaggagtagaagattangactcgtcgtcagttctgtttcagctcccaacgttnnactccgtactggacctgatgatctcatttctaccctcctctctaaggttgcgaatagtgatngangtgtgacgctaagcccctgannaagcaaaanggaggtggcagaagtgncggntagagcnttcaaaantacngtgtcaaaggagnctgtcnaaaatcctcccaanttntggcagattgggaangtgg

SEQ ID NO: 12495 - DNA, 479 bp, Arabidopsis thaliana
  unsure at all n locations
  Clone ID: LIB25-068-Q1-E1-F11
acgcctttcngtacgcctccgaaaattccaaaggtcnacccacncgtccgtgtaatcaatatcggcggtattcaagagcaatcattgtcgtgctacagccactgcatctaactatcttaatctcaattcncatcttattctccgtacttccaancttcttgntgatgaagatcctggattggttgggaatctccttgtccgagcgtctcgttgganctaatgttcatctaatctctaaagaagagtattcttccattgggantgaggctcttactaagtgctctgaaagagaaactggaaaaanaaggaaagaaaccctatgttattccagtcggtggatcgaactctttgggaacttggggttatatagaancagcaaggggaaattgaggaggcagctgaattanagaccccggnacctgaaaattttgancgatagtgtngnaagcncgtnngcagtngggtgggnanaantntgc

SEQ ID NO: 12496 - DNA, 484 bp, Arabidopsis thaliana
  unsure at all n locations
  Clone ID: LIB25-068-Q1-E1-F12
acnccgttcngtacgcctccnaaaattccaaggtcnacccacncgtccgcaatttttataaccaatgaaaatggggtatgctcagagtggnacaacgcantgcagaagctctctgggataaanagagaagaagttgtcaataaaattcttctcggggaggtttttaccacagatgattatggttgctgccttaaagaccatgacactttaacgaagctgagaataggtttcaatgctgtgatttctggccaaaagaacatagagaagcttttatttggcttttaccatcgtgatggtagcttcatcnangcattgctttctgcaaacaaaaggactgatattganggaaaggttaccggggttttaagctttttgcaagtacctagtccagaactccaatatgctctacaggttcagcaaatatcaanagcnatgcaantgcctgtgccctcaaanaaantggcaatnatctcccgccantgng

SEQ ID NO: 12497 - DNA, 423 bp, Arabidopsis thaliana
  Clone ID: LIB25-068-Q1-E1-C3
atgggatcgtctgcggatacagagacggcgatgataatcgccacaccggcgtcgaaccataataatccggcaaccaacggcggagatgcgaatcagaatcatacttctggtgcgatactcgctctcacgaattcagaatcggatgcttcgaagaagagaagaatgggggtgcttccgctcgaggttggtactcgcgtgatgtgtcaatggagagacggaaaataccatccggtgaaggttatcgagcgccgaaagaattataatggtggtcacaatgattacgagtactacgttcattacacagagtttaataagaagattggatgaatggattaagcttgaacagcttgaccttgattcagtagagtgtgctttagatgaaaaagttgaagacaaggtgactagcttgaagatgacacgaca

SEQ ID NO: 12498 - DNA, 408 bp, Arabidopsis thaliana
  unsure at all n locations
  Clone ID: LIB25-068-Q1-E1-A4
taggatcactaaagaggactgtgatggaggctgtcagtgttttactcagcggaggaatacgtgttggggtgttaatgcatgggaagaaggttagagatgaaaggaaaactctgtcccagactgggatctcatgtgatgaaaatctagacaaccttgggttcaccttggagcctagtcccagcaaagttcccctacctttgtgttctgaagatcctgctgtgccaaccgaccctacaagtttgtctgaacggtctgcggcgtctcctatgctagattctgggaattccacatgcaagatgacgtgattgattcaagaaatattgtggacagtaacctcgaattagttccatatcanggtgacatatctgttgatgaaccttcatcagattcaaaagagcttgtcccact

SEQ ID NO: 12499 - DNA, 397 bp, Arabidopsis thaliana
  unsure at all n locations
  Clone ID: LIB25-068-Q1-E1-A7
gttgcgttgtagtagaaagtttccaggagaaacagttactgaagaaacatcaacaggagtcaatgagtttggtgtggaggatcgtgatggagtagttgttgcagccgaagagaaaaactcgaatagtgaagctcctcaagctgaagatgaggaaactcaagccctagagtttttgaacgatattaagctggactcagacaagacatattcaatcctgctctatgggagtggtgcgatagttgctctctacttaacgtctgcaatcgtcagttcactcgaagcaatccctctgtttcctaagctaatggaagtagttggtctcggatacacactctggttcactacccgttatctgctatttaagaggaacaagagaagaactcaagacaaaagttng

SEQ ID NO: 12500 - DNA, 417 bp, Arabidopsis thaliana
  unsure at all n locations
  Clone ID: LIB25-068-Q1-E1-A8
tttcttattctcggagctcgttcagtacaatcaaacccaggttgacaatatagctgaacttgaaagaagactagaggatgctgggtatgcagttggatctcgagttctagagcttctttgcaaccgggaaaagggaaacagaagagagacacggttactgggaattctgtctttcgttcacagtactgtgtggaaagtgttgtttggaaaggttgctgattcacttgaaaaaggaacagaacatgaagatgagtacatgatcagtgaaaaggagcttcttgttaacaggttcatttcgattccaaaagacatgggaacattcaactgcggagcgtttgttgctggcatantgaanggagttctggataacgcagggtttcctgctgtggtaacggctcattttgtacccaattgaag

SEQ ID NO: 12501 - DNA, 415 bp, Arabidopsis thaliana
  unsure at all n locations
  Clone ID: LIB25-068-Q1-E1-A9
aagtggacagagtagtttcacatttgatttcagtttcattccgcacaatcaaatcggttgatgatttgtttgacttctttcagagagcaggatgagctgaagaagaaactgatcgcgtacgatgacttcacatggaagttatcttcatcaacggaactgtctcagggatcggagatacttaagtatgttggaggtgtagacatgagcttttgcaaagaagattcttccgtcgcatgcgcttgtctcgtcgttcttgagcttccttctctccgtgtagtccaccatgacttctctcttctccgcctccatgttccttangtccctggatttcttgccctttcgtgaaggctccggttcttttgcagattccgcaagaagatgagaaaatgagaagcatccaatccaancctcaagg

SEQ ID NO: 12502 - DNA, 431 bp, Arabidopsis thaliana
  unsure at all n locations
  Clone ID: LIB25-068-Q1-E1-B10
tttggaagtcacttgaagcgcaataaatttagaggctcttggatgccacganatgatgctcttaaaaaacttgaggaaagaggagttgtcatacgcnttgtgattggtcggagtgctaaccgaggtgatagcctacatagaaaaattgacgancaaaatcgtgcaacnaaagactttttgattcttgagaatcacnaggaagcccaagaagagttaccgaagaaagtgaanttcttctacantgctgctgttcagaattgggacgcagagttttatgtcaaangttgangacaacgttgacttggatcttgaggggatgattgcgcttcttgaaaagtcgtcggnaatcaagatggtgcttacattggggtgcatgaaatctggacatgtgattacgtgaagaaggaagtccaatnggtaataagcctgag

SEQ ID NO: 12503 - DNA, 419 bp, Arabidopsis thaliana
  unsure at all n locations
  Clone ID: LIB25-068-Q1-E1-B12
gtctcttcagagaatttcaccttctagggtttgttcaagagaagtcttgggaaaatgagtcgtggaggtgcagctgttgccaagggaaagaagaagggagtttccttcaccattgattgttcaaagcctgtcgatgacaagatcatggagattgcttcccttgagaagtttcttcaggagaggatcaaggtcggtggcaaagctggtgcacttggtgattctgtcacaatcacacgtgagaagagcaagatcactgtcactgcagatggccaattctccaagaggtatttgaagtacttgacaaagaagtacctgaagaagcacaatgtaagggattggctcagagtgatttgcagcaaacaaggaccgtaacctctatgagttgaggtacttcaacantgcctgagaaacnnaaggng

SEQ ID NO: 12504 - DNA, 421 bp, Arabidopsis thaliana
  Clone ID: LIB25-068-Q1-E1-B2
agcttttcgcttccaacgttctcatctctgggatgcagggccttggtgttgagattgccaagaatattattctagctggtgtgaagtcagtgacccttcacgatgaaaatgtggttgagctatgggacctatctagtaactttgttttcacggaggaggacattggtaagaatagagcacttgcttctgttcacaagttgcaagaactcaacaatgctgtggctgtctcaactttgactgggaagttaaccaaagagcagctttctgatttccaggttgtggtatttgtggatatctcttttgagaaagcgacagagattgatgattattgtcacaagtcatcaagcctcctattgcattcatcaaggctgatgttagggggctgtttggggtcttgttttgtgattttggacctcaattt

SEQ ID NO: 12505 - DNA, 425 bp, Arabidopsis thaliana
  unsure at all n locations
  Clone ID: LIB25-068-Q1-E1-B3
tgcttatagcttctgagcatcaatggatccaaatcataataatcttctcatctttgtagccttttttgttctctgcttagccaccaatggtgtaaccggatatgccacggtcacaggctcggtgttttgtgaccaatgcaaggatggagagagatctttgtttgattttcctgtctctggaatcaagattagtgtcacatgtgctgatgaaaatggacaggtctatatgtcaagagaagagactactaattggcttggaggatatgtaatgagatttgatgggacaccggatctaagtaactgttatgctcaagtttcaagacaatggagttcaacaagacccaagtagctgcagcattgcttcangtcctgcacagaaacttaaactaatgttcagcttttttggggaatgaaacgtttgctgc

SEQ ID NO: 12506 - DNA, 412 bp, Arabidopsis thaliana
  unsure at all n locations
  Clone ID: LIB25-068-Q1-E1-B6
cgacgagagatgcttcttcaggcggcggtgcagaaccgcaatgttccactggcttcttccgcctcctactctcgtctccttcgctgcagatctcctgtcgtctccgtagctgctctctcgaagaagacggcagcaatcgtgtgctccatctcccaggtttatggctacggcacggtggactacgagagaaggccgattgtccagtggaatgccatctacaagaagatttcgctgatggagaagccagagcttggcgctgcttccgtcttgaatcagtgggagaaagccggccgcaagcttaccaagtgggagctctgtcgggtcgtcaaggagcttcgcaagtacaagcgtgccaaccaagctctcgaggtgtacgactggatgaacaacanaggcgaaaggtttcggttgt

SEQ ID NO: 12507 - DNA, 417 bp, Arabidopsis thaliana
  Clone ID: LIB25-068-Q1-E1-B8
agatatgtcactggtcgactacgacgattcttcatccgacgacgatgttttagccgccgaggagaaacctctcccacagacgcaaaagcgtctggtttctccagctcaatcttttcctccaaagaggcagagatttgagcaggacgagagtgttgagaagctaccagatgctctgcttcttctggagtcaccgacactcgctcaggtgactggcggagaccatgcttccgttgttgcagctgcaatggctgagagtgcattaaggaagagagacttgagtgggaatgcttcttctcttcctcgtcgtcccaagctaccaagaggaaatttgcctcattcaaagaattatcctgaaactttgggtaatgtgcttgtgcctcctcagctcaagggaaggagcaatgttgctacagaagg

SEQ ID NO: 12508 - DNA, 474 bp, Arabidopsis thaliana
  unsure at all n locations
  Clone ID: LIB25-068-Q1-E1-B9
acaactgnctacgccgccccgtaaatgcccaaagtcnacccaggcctccgcgaagaccaaacanaacccacaagtcgaaatctcgaaatccgttgagagtttgttcctttttttgtttgctcggagatggaggctttgccggaggatgaagagtacagtttcanggaagtantgttgccgtctttgattccggtagtgccggagccggaacttgagagagacagcggnganaggagaagaggaaganatgttatcgtagccgttgatcatggtcccaatagcaaacacgcttttgattgggctcttgttcatttctgtcgtctcgccgatactctccatcntgtccacgccgtctcaactgtnaagaacgatgttgtgtatgagacgatccaanccctcatggagaaacttgctgttgaggcgtancaagttccanggtaaacactgtggccncngtttgttgaaaggngannc

SEQ ID NO: 12509 - DNA, 411 bp, Arabidopsis thaliana
  unsure at all n locations
  Clone ID: LIB25-068-Q1-E1-C1
ctcaatcattcgagctccaattttggtttcgccatcgattccaagaagagaaaagagtttatcgctaaagctgaagagagtactgaaggtgaaactgaggctgttgtggagaatgctgttgaaactgaagcggaaggagaaggagaagccactgttgcggcggaggaagctaaacctccgtggaagacgagagtcaagctcggagatatcatggggctactgaacaagaaagctattgaggttgcagagactgtaagaccggttcctggacttaggactggggatattgtagaaatcaaactggaagttcctgagaacaaacgtaggctatctatctacaaaggtattgtgatgtctagacaaaatgcaagcatccacactactatcccgtatccggaggatattgcangg

SEQ ID NO: 12510 - DNA, 493 bp, Arabidopsis thaliana
  unsure at all n locations
  Clone ID: LIB25-068-Q1-E1-C10
nnanggaactgttagcctnncgtacgcctccgaaaattccaaggtcnacccacgcgtccgcagacttccaagatcagtagcttctacaacattaacatcaacacctatgttgttgtttgtaagatttgtgtgaagtcatgttcttgattcccaagggtatcaagaacatgacttcactcaaacatctagacatatccaacaacaacatttcaagtcttcctccagaactgggtttgcttgagcctacacttgaggttctacgacttgacgggaacccattaagaagtatcaggaggccaattctanaaagaggaacaaaagctgtgttgaactacctgaaagacagacttccagatcagtagcttctacaacattaacatcaacacctatgttgttgtttgtaagatttgtgtgaacaccagantgattttattgatganaaatgcgtgtgtcccgtgtccgaagatagtttcaacttttggtggggggtgng

SEQ ID NO: 12511 - DNA, 474 bp, Arabidopsis thaliana
  unsure at all n locations
  Clone ID: LIB25-068-Q1-E1-C11
caactnccagnccgncccgnanaattcccanagtcgacccaggcgtccgagaaaaaaaaaaaagtaaatgcaattgaaacggagggaatattcgccggcgaatttccggtaaatgtctgagtggtttatcagtaggaatcctactttttcgacggcattcccaagtagttgtattacagttgtaaatcccaattttattctcctttcttcagaattcgattcgtatactcctcaatgcctatttaatagtttaaccaccaccatgcgtctctctaaacgccaactctcgcttcctctttctctctgcttctctactttctctcctcgttcccgtttccatcattttcctggaaaatatccagctcctcgaagagaatttctccacactactgggacaagccanctgtgttttaagagttcgatgnnaagatcagaaaccgagtgctctcagtgaaaaatgtgttgcagtttcag

SEQ ID NO: 12512 - DNA, 414 bp, Arabidopsis thaliana
  unsure at all n locations
  Clone ID: LIB25-068-Q1-E1-A3
tccaaatctcatactttccagaaaatcattttcccaagaaaaataaaactttcccctttgttcttctccccccaacagcaatcacggcgtaccaatcggagctaggaggagattcctctcccttgaggaaatctgggagaggaaagatcganatcaaacggatcganaacacaacgaatcgtcaagtcactttttgcaaacgtagaaatggtttgctcaagaaagcttacgagctctctgttctttgtgatgctgaagtcgcactcatcgtcttctctagccgtggtcgtctctatgagtactctaacaacagtgtaaaagggactattgagaggtacaagaaggcaatatcngggcaattctaacaccgggatcggtgggcagaaattaatgcacagtatttaccncaaagng

SEQ ID NO: 12513 - DNA, 420 bp, Arabidopsis thaliana
  unsure at all n locations
  Clone ID: LIB25-067-Q1-E1-F5
gaaacaaagcgtgcctcttctctctttcttcatcattctcatcaagctttcttcttcaccaaattcccaacactatcattcccttcttcctctataaagaatcatcacttcttcttcttctcaatggatccttgggatacttataacataccactagaccaccaacaccgtctccgtaaccgccgtgaccaccgtcatccttccttctcctctactctcctcgaccaaatttaccgctccatcgacgattcctctactaactcctcatccatgagaaaaancaaacatcagaaccgcgaggacacgcgtgtttctgctaaccgccgcgacgatttcaacagatccaagaatcttaannccatagaanctgttttcntcaaanattcaaggctcangctccnctggactcaaggggattcg

SEQ ID NO: 12514 - DNA, 412 bp, Arabidopsis thaliana
  unsure at all n locations
  Clone ID: LIB25-067-Q1-E1-G11
gcttcttccttcctcttccatcttcttcatatctcccttagtcacctctactctactctgcaggcaaaaatagttatggcgacttcttcgatcactatcccgancattagaactccgattcatcgatcaaaatttctaggccaaacacatcaattttcaantgtaaaccggtcggttttcccgcctccaaaacagcagtcaaaactgtatcaagtaaaggccatgggtaaattcaatctatgggaagtgatgggaggaagaggattatgcancggagagaaaaggnattgagaaangagctccagangaacattgaaggacgnggcaagagacatnnaanggctggaggnnaacgaggacatggganagaganggatgtncaggtgnggntgggnatttannaggtangntg

SEQ ID NO: 12515 - DNA, 69 bp, Arabidopsis thaliana
  unsure at all n locations
  Clone ID: LIB25-067-Q1-E1-G2
tatngataaaggtgttcancggatggatcgtcatccttccgatgggattcctctcaggcgacnaccatc

SEQ ID NO: 12516 - DNA, 420 bp, Arabidopsis thaliana
  unsure at all n locations
  Clone ID: LIB25-067-Q1-E1-G3
ctgtttcaagaagtgagtaacaacaacgtcgaaggtatcaaatcacttcaccatgaaggagcaggactcgagggggtggataaattagggagaacaccattaatcttagcttgtacgaacgacgatctatatgatgtagcaaaaactctgcttgagttgggctccaatgtcaatgcttatcgttctggttgcaatggtgggactcctctgcaccatgctgcaaaaagaggtctcgtacacacggttaagttacttctgtctcacggtgcaaatccattggttcttgatgatgatgttaagacagctctcgaggttgctagagatgaaggttacagtaatgtcgtacgcgcaatcgagagtcatatctgcttgttctccggttgtatgcgtgagtaatccggctccaacntgcttaattta

SEQ ID NO: 12517 - DNA, 426 bp, Arabidopsis thaliana
  Clone ID: LIB25-067-Q1-E1-G4
gggttcaagtcttcttccaaccgcaatgtgcagtatccacttcaccggcgttattaacttctatgcttgatgtcgcaaagcttagactaccctctttcgatactgattcggattcccttatatcagacaggcagtggacttatacaaggcccgatggtccttccactgaggcgaagtatttagaagctttagcctctgagacacttctcacaagcgatgaagcagtagttgtagcagcagcagctgaagcagtcgcccttgcaagagctgctgtcaaagttgccaaagatgcaacattatttaagaacagtaacaacacgaacctattaacttcgtcaacggccgacaaacgctccaagtgggaccaagtttactgagaaggaacgtgctggcatattggggcatctagcggtttccggacaatgg

SEQ ID NO: 12518 - DNA, 423 bp, Arabidopsis thaliana
  unsure at all n locations
  Clone ID: LIB25-067-Q1-E1-G5
ggcagtgacacgaaccacagcggtaaccctacacaacgaagaaccaggacgaaaaaagaactagcagggagcacagcttaagaactagacaacgtagtttctgttgccanntcgntntttcatnngcctcttctgccttcctccatatagactggtgggtgaaaactgtgggcgtatttcacaagcactccatatccatgataactatgctatggtttcaagcagtagagtcaacctctgttagacagaagaagctggagaagaagataaatggtgatcttagtttatatgaagaagcgtctatatgaaaatctcaagtaagtagccaactaagtgttttgatggattgttagacccatgattttgcagccataggattttttttcgtttttttttccattcaactatgtttttggttactat

SEQ ID NO: 12519 - DNA, 393 bp, Arabidopsis thaliana
  Clone ID: LIB25-067-Q1-E1-G7
tgtccactgtcgctgggaatctagctgctccttactacaaagacatcgttgtgaacgcaacacttatgggccctgagctccaagtccagattggtcccatgggagaagatacagggaccaaaaacgcgatcttgaacggtgttgaggttctgaagatgagcaattccgtgaacagccttgatggagagtttggagtggatggtagaaccactggcatggggaagcatggtatggtagcaaccgcggggtttgtgatgatgtttggagctttcattggtctgggagccatggtttacaagtggaagaagaggccacaagattggcagaagagaaatagtttctcctcttggttgctaccaatacatgcctggtgataacactttcatggacaag

SEQ ID NO: 12520 - DNA, 426 bp, Arabidopsis thaliana
  unsure at all n locations
  Clone ID: LIB25-067-Q1-E1-H1
tggtcagcagacttagctttcgaatataggctaagaacgagcatgtcttcttgtcttcttcctcagttcaagtgcccacctgattctttctctattcacttccgaacctctttctgtgcccctaaacacaacaagggttcagtcttcttccaaccgcaatgtgcagtatccacttcaccggcgttattaacttctatgcttgatgtcgcaaagcttagactaccctctttcgatactgattcggattcccttatatcaagacaggcagtggacttatacaaggcccgatggtccttccactgaggcgaagtatttagaagctttagcctctgagacacttctcacaagcgatgaagcagtagttgtagcaagcagcaagctgaagcagtcgcccttgcaaagaactggctgtcaaagttgncaaaa

SEQ ID NO: 12521 - DNA, 401 bp, Arabidopsis thaliana
  unsure at all n locations
  Clone ID: LIB25-067-Q1-E1-H12
aattattagggacttgctgtcacacacacttttgttctcggctcacctgctgaaggcagttaactttgttgcagaacttgattgcattttatcgttggcttgtgtagcccatcagaataactacgtaaggcctgtcctgacagtagaatcattgcttgatattcgaaatggaangcatgttttgcaggaaatggctgtagatacttttatcccaaacgacactgaaatcaatgataatggacgaattcatataattaccgggcctaattactcaggaaaagagcatatatgtaaagcaggtggcgttaattgttttcctatcccatattggnaancctttgtaccancaagatncancaacctgttgggttaactggacagggatcctttgtgcaantggg

SEQ ID NO: 12522 - DNA, 483 bp, Arabidopsis thaliana
  unsure at all n locations
  Clone ID: LIB25-067-Q1-E1-H2
ctgttacgcttgccngtaccggtccanaattnacgggtcgacccacgcgtccgagccagagaggtgaggcggtttatggctggtcattttgaccgacagcagatggatactgcttatagagatttgactttcagggaatcaaacgctagccatgttcccaatttccagaggccacttttgaggaagaatgtagggggaagaatgtctgcaggccggaggaggagttttgatgatagccaactgcaaattggtgacatatcaaattttgttgatggtccagcttccctgaacgaggcccttaacgacggactgaactcaagttctgattggtgtgccagagttgcagcttttaattttctccaaactctgctgcagcaaggcccaaaaggtgctcaagaagtaattcaaaagttttgagaaagtaatgaaactatttctccggcatttggatgatcctcancacaaggtcgcacaaagcaacaa

SEQ ID NO: 12523 - DNA, 420 bp, Arabidopsis thaliana
  unsure at all n locations
  Clone ID: LIB25-067-Q1-E1-H3
tagctctgtaactgacgatgaagatttcttctttaaacctccaaagaacaaatcttcaagtggtggtttctcactttctagattctcctctgttttcaagaaagatcccaaaaccaatctccaccaccactcctcctcctcttccaccgcaacaaccgccgcagctccgtcgtcggtgaagagaatgagctcaacagctaaagaagtaatacggaaatacatgaaaaaagtcaaaccattatacgaaaaattatctccaaaacagagctccaatataaaaacagagtcatcatcatctctcaaagattccggtaacaacatccgtggggaccaccaancgtaaccaccgtcaacggcgctccaaacgttgtctcctccggtgggtgggtttaacaatccctttctccgggaaactaaang

SEQ ID NO: 12524 - DNA, 420 bp, Arabidopsis thaliana
  unsure at all n locations
  Clone ID: LIB25-067-Q1-E1-H5
gggcagaccttgagtcggctatacaaaattgcatgggctaccaagatgacggtgaaggtttcatggttggggtgcagataaatcctgtatcaggattgccttctggatatccagacttgcttcgtttcgtcctagaacatgttgaagaaaagaatgtagagccacttcttgagggtttgcttgaagctcgtcaagagctaaggccacttctgctgaagtcccatgaccgcctcaaggatctgttattcttggacctcgctcttgattctactgtcagaacagcgattgaaagaggatatgagcaattgaatgatgctggacctgagaaaatcatgtacttcatcagcctagttcttgaaaatcttgccctctcttcagatgacaatgaangaccttatatactgcttnaaagggatgggg

SEQ ID NO: 12525 - DNA, 328 bp, Arabidopsis thaliana
  unsure at all n locations
  Clone ID: LIB25-067-Q1-E1-H6
catcagccaccaacaattcttcgctctctctgctctgatctctctgctcgaatttactaacgatcccttctctgcaggctcatctttatctaatttcgtttactcattatatcttctaatccgtttcgtatactatcgcnantcttgttttctgtttgtttgtattttgggattttctttgtgtttacgtgataanggatgcaggtttgnancggtgcccagntcaanaanactttcttcncagaaaaaattccaanggaanntctggacaggttcanaccgaataggtngagcgatggacttttgactatgctcantgggncntcac

SEQ ID NO: 12526 - DNA, 304 bp, Arabidopsis thaliana
  Clone ID: LIB25-067-Q1-E1-H7
gcagggactactccaggaactgtctctaacaaagaatggtgggcagcaacggatgagaaattccaagcatggccaagaaccgctggtcctcccgttgttatgaatcccattagccgtcagaatttcatcgtcaagactcgtccggaatgagaaaataataagttcaatgctttgattttcagaataagatgaacgatgacgatgttttctaaatccgagcttgtactaaataacaatacattacaacacggtttgcggaactaaaaaaaaaaaaaaaaaaaaaaaaaaaaaaaaaaaagggcgg

SEQ ID NO: 12527 - DNA, 410 bp, Arabidopsis thaliana
  Clone ID: LIB25-067-Q1-E1-H8
cgaaaccctagtcgatttcgagatccaactaactctgctccttatctcagcttgttgaatttgcgaagtatgggagacgctagagacaacgaagcctacgaggaggagctcttggactatgaagaagaagacgagaaggtcccagattctggaaacaaagttaacggcgaagctgtgaaaaaagggtacgtgggaatacacagttctggattcagagacttccttttgaaaccggagcttctcagagctattgttgactcaggatttgaacatccatctgaagtgcaacacgaatgtatccctcaagctatcttgggtatggatgttatctgccaagcaaagtctggtatggggaagactgctgtgtttgtcctgtctactctacaacagattgaaccatctcctggcca

SEQ ID NO: 12528 - DNA, 443 bp, Arabidopsis thaliana
  unsure at all n locations
  Clone ID: LIB25-068-Q1-E1-A1
gcggacgcgtgggtgggtatctgctggtggccaagagttggcacaagaatcccctcggatttactggctgtctattgtctttcttggtttcgatgtgttctttgttgtcttctgtgttgcgttggcctgcgttattggaattgcggtttgctgttgcctgccatgcatcattgcagttttgtacgctgttgctgatcaggaaggggcttcaaaagaagacattgagcagctcaccaaattcaagtttcgcaaactaggtgatgccaacaaacacactaatgatgaagcccaaggaactaccgagggaataatgactgagtgtggtacanaattcacccattgaacatactctttttgcaggaagatgcacaantgtttcatcctgtctctctgccataatgaangacngaacaaganctnaaagggaanctaccttgntggng

SEQ ID NO: 12529 - DNA, 427 bp, Arabidopsis thaliana
  unsure at all n locations
  Clone ID: LIB25-067-Q1-E1-F3
atcgattaacaaaatcgaatcgaaaaaaaaaattagggttcttctctcttccgtctctcgttatcgatttcgttttgatttcgcgccacaaagaagaagtttcattaggcgcgaatctgaaacctaggttcgatttagttctgtccgaattactgtccgttgtcttgtccgttagtcgattcgatctgagaaagaaagaaagagaagaagaaaaaacgatgtcacgatatttcacatccccaccgcctgtgtatgcgaggaactgggcgaacggtcaaaacttggtcgaatggactaagatcgaaaggaccaatagttgattctaaaaagctgcatcggaaagagaagaaggagaaaaagaaagaaagggaaattatngaangagaagaaatcccctttgaacaagnagttntccacaaccaagacg

SEQ ID NO: 12530 - DNA, 403 bp, Arabidopsis thaliana
  unsure at all n locations
  Clone ID: LIB25-066-Q1-E1-B2
atgaagtgaanaagatcacattgcttaggtgaatgaagtctccgangaatctctcaaaactatcttcgtcttctcttacannttccgaccaacagagatttcnattctctctccaagtccgacgagttcaagcgtccgatcgatgagttagcttggagctcgcagtctgttcttgagacgattggtggtaagaaatcgatgagatttgatgatnccatggatnagttcaagaggaatcnanagatggaggaagattcgaagaaggtaatcgatgtgaaagtggctgagagtgataagggattcgcgaaatttggcaaggnagatgttccgtttcatatancgacgttaacgaagcctcaagaggagtataagattttggtanacaatgctaataatccttttg

SEQ ID NO: 12531 - DNA, 414 bp, Arabidopsis thaliana
  unsure at all n locations
  Clone ID: LIB25-066-Q1-E1-B6
atcacatacgcagacctgtatcagcttgctggtgtggtagcagttgaggttactggtggacctgacatcgtgttcgttcccgggagaaaggattcaaatgtctgccccaangaangaagacttcctgatgccaaacaaggtttccaacatctcagagatgtcttctaccgcatgggactatctgatanggatattgtggcactctcagggggtcatactctgggaagggctcacccgganaggtcaggctttgatggaccatggacccaagagccgctgaagtttgacaactcctacttcntggaactgctgaaagganaatcagagggcttgttgaaacttccaactgacaanaccttattggnagacncggagttccgtcgtcgtgttganctttatgcaaccgattnaaga

SEQ ID NO: 12532 - DNA, 406 bp, Arabidopsis thaliana
  unsure at all n locations
  Clone ID: LIB25-066-Q1-E1-B8
ggtggtgagaggagatccggcggagaagaagaccgatggttcaactactccggcgtacgctcacggccaacatcattctatcttttctccggctactggtgctgtcagtgatagctccttgaagtttactcacgtcctctacaatctttcgcctgcagagctttatgagcaagctattaagtatganaaaggttcgtttatcacttctaatggagctttggcgacgctttctggtgctaagactggtcgtgctcccagagataagcgtgttgttagagatgctactactgaggatgagctttggtggggaaagggttcgccgaatatcgaaatggatgaacatactttcatggtgaacagagaaagagctgttgattacttgaattccttggnaaangtcctttgt

SEQ ID NO: 12533 - DNA, 417 bp, Arabidopsis thaliana
  unsure at all n locations
  Clone ID: LIB25-066-Q1-E1-C1
cgcagacgcagacgcatggaccgcactcgctggccttcagggtgatgcgactctgcaaaccgtctttccacgtcgatcctcccctccgcattgaccctttcgatcttctcgccggcgaggatttctccgacgatccctcttccgcctccttgttccgccgccacgtatcttctgccgacgctgtcgactccgatctcagctaccgaaatagattcctcctcaaccatcctaccgatccaatcggtctctctggtcttctgcttcttcctcagtccttcggagcgatctatctcggagaaacattctgtagctatatcagcgtcaacantagttccacttcaaaagttcgggatgttaccattaaggcagaaattcaagacanagaagcaagaggattctacttcctggatacatcca

SEQ ID NO: 12534 - DNA, 408 bp, Arabidopsis thaliana
  Clone ID: LIB25-066-Q1-E1-C11
atttgaaatcgccaacgagagaaacaaaaagaagaaaaaaatgaagacatttatgataatcttgttggtgatttgtagcatcttgattgtaggacgagttgaggctaacgataacaagagaaaatatctactactcgatccatgcttgcgtcctaatgctccaccaggatgtcatcgtcagccatataaaccccgtactccggttaacgtatatagtcgtggttgcaccacaatcaaccgatgccgccgagtgcagaatccgtgagatctaatgacatattttatggacttatgcaaccacataagtcatattatgtatatgtttccaaaaatttcataggattgatcttcagtattgttgaggctcatgggggtttgaatttaattgattcatgtgtaatagtaact

SEQ ID NO: 12535 - DNA, 413 bp, Arabidopsis thaliana
  unsure at all n locations
  Clone ID: LIB25-066-Q1-E1-C12
aaagcaaaattcgaagagacacaaaaaaaccttcgtttgtgtctcagaatttacaaagttttgagtcagtagagaaatggcgggaatcgtgacagagccgtggtcagtagctgagaacggaaacccaagcataacggcgaaaggatcgagcagagaactaagacttggaagaaccgctcacaacatgtcttcttcttctttgaggaaaaaatcagacctccgagtgattcagaaggttccatacaaaggtcttaaagattttctctctaatctccaagaagtcattctcggaacaaagcttgccattctttttccggccattcctgccgccattatttgcacctaattgtgggcgtcagtcagccttggatatttggacttaancttgctanggactgacacctttggctgag

SEQ ID NO: 12536 - DNA, 468 bp, Arabidopsis thaliana
  unsure at all n locations
  Clone ID: LIB25-066-Q1-E1-C4
tgttantcngccgccacggnccgnaaaaacccgggnccaaccaagcntccgnccaancctncgcggacgcntgggcncnaacagtcntgttgggttttgggttttgagaaacagagangttttggcttccgggtcgttagtgtttgatcatcttcgtatctcagaagggtgaactttgttgttttggcttttgcgtactgttgaatcagcttttccagatgcctcgaagaccatcatcaggaagaagagtgttaaagcatcagcctttaacattttcaccgtttatgcggttactttcctttgcttcaatggctaggcgtgatttgtctcatcctgaagattgtcaatgttctgatgaagatatatcttttgatgaaaagcaaaagatccctaatttaccaagaaaagggaaagaagaacaagtctcggactcgtctgatgaagaagattctcaggaagatgtccaag

SEQ ID NO: 12537 - DNA, 409 bp, Arabidopsis thaliana
  Clone ID: LIB25-066-Q1-E1-C5
cggttcctgttagaagcagttgtcttcgtagttcggcaaacagacttactcaacacagaccgtttcttacttccgaggccatttgtttgaggaagaatcggtttctaccccattctgttgatacacataagcaaaacagcaggaggctcatttgttctgttgccacagaatcagttccggataaagctgaagattccaaaatggatgcacctaaagaaatatttctcaagaactacacaaagcctgattactactttgaaactgtggatctgagcttctctctaggtgaagagaaaacaattgttagctctaaaatcaaggtttctcctcgagttaaaggatcttctgctgcattggtcttggatggacatgacttgaagctactttctgtcaaaggttgaaggggaaa

SEQ ID NO: 12538 - DNA, 376 bp, Arabidopsis thaliana
  unsure at all n locations
  Clone ID: LIB25-066-Q1-E1-D11
aaaaaaaaaaacgctcgcctacttctcttctctctcaccatagagatagtttcaagctccaaaagttcttcaatcagattctggaaactaggttgttggtagaagttatggtgagaaatgaagcttagattgagatttaagttatgggttgtgtatttggccgagaggcggcgacaacaacaacagctgaagctaaacaagctaagagctctaaagctagtagtggagtagtagtagtagganagagtagtgtgactaagagtaatggagttattgctgatgatgtagaagaagaagaagaatgagganggcaaatggtgataaagaaaggaaatcatccaaaggagatcgaagaaggtcgacaaagccgaatccg

SEQ ID NO: 12539 - DNA, 473 bp, Arabidopsis thaliana
  unsure at all n locations
  Clone ID: LIB25-066-Q1-E1-D2
ntgttatttgccggcccggtccaaactaaacgggtcgacccacgcgtccgnngacgcgtgggcggacgcgtgggttttgcacaacttcaattttgtccctcaagattctccttattacaaaacgtccccttttcccacatcatccttcttcaacgttcgctttcccatcaagaacaancaaatctcttgtaacaaagcaaagaatttgagaatggatccgtctaagggaatccaagaacagaggattgtgattccaaacagacacaanganaagctggttggtctgcttcatgaaactggttctacagacatcgtagtcttgtgccatggctttcgatcaaacaanagtaaccaaanaatgaataatgtggctgctgctatacaagaaagaagggatcagcgcttttcgttttgatttctccgggaatgganaagagtgaangcagtttcnattaaggtaactaataccaatg

SEQ ID NO: 12540 - DNA, 336 bp, Arabidopsis thaliana
  unsure at all n locations
  Clone ID: LIB25-066-Q1-E1-D9
ttatcgcaggaggtaagagtaagaanaccanaaggactgctcctaagtccgatgatgtctacctaaagcttctcgtcaagctttaccggtttttggtgaggagatctaacagcaacttcaatgctgtgattctgaaaaggcttttcatgagcaaagtcaacaaagctcctctttcactctctaggcttgtagagttcatgactggcanggatgacaagattgtngtgttggttggnactatcactgatgatttgagagttcatgagattcctgcnattgangggtacnngccttgangtttactgagangggctatggggctaagaattgnagaaa

SEQ ID NO: 12541 - DNA, 94 bp, Arabidopsis thaliana
  unsure at all n locations
  Clone ID: LIB25-066-Q1-E1-E2
gancagcatttctggtctcaacccaagtctagcctctggccntcctgagaaagtgcggtgttcncaatccatatccactctccatgagcttngg

SEQ ID NO: 12542 - DNA, 415 bp, Arabidopsis thaliana
  unsure at all n locations
  Clone ID: LIB25-066-Q1-E1-E4
gtaagtttacccagatccttttctcctctgttttttctttcgcattgttatcttcagtgtctgtctcattgntcccttttcccagaagctgaaacaaatctgttttttttttttttgttttgtttctgtgaancttcagatcttgatctgaggagaccctacagattctcttagtgttttggttcactggaatgatcaaggatctaagttatgtagaaatttcntagtttgggagatttcangaanattgctaagagttgagtgatactaagttcaggattaatattgtttttgagaanaacacagtcaaagatttagaaagtgatgtgatnttttgggttcanatatgttacaccgtcttagatggtttactggattgagtaaaagaagtagagaagccatgacgccttgatgg

SEQ ID NO: 12543 - DNA, 411 bp, Arabidopsis thaliana
  unsure at all n locations
  Clone ID: LIB25-066-Q1-E1-E6
ccatctcacaaccctaatctctcccacacaagagagatagagagaaacaatgaaactttttcttctccttctttttcttctccacatttctcataccttcaccgcaagccgaccaatctccgagttccgtgctctcctctcactcaaaacctctctcaccggcgccggagatgacaaaaactcgcctctctcttcctggaaagtctcaacaagcttctgtacatggattggtgtcacgtgcgatgtatctcgccgtcacgtgacttctcttgatctctcnggtctcaacctctccggtactctttccccagatgtttctcatttacgtcttcttcagaatctatcactcgctgaaaatctaatctccggtccgattcccgccgggaaatctccgangccnttccgggtctt

SEQ ID NO: 12544 - DNA, 463 bp, Arabidopsis thaliana
  unsure at all n locations
  Clone ID: LIB25-066-Q1-E1-F1
ctttgccggcccggtccaanctaaacgggtcnacccacgcgtccgnaagatgacgtggaggatttggagatgttgttggaggcatacttcatgcaactggatggaatgcggaacaagattcttacagtgagggagtacattgacgacacanaagactacgtgaacattcaactggataatcaacgaaacgaactgatccagctgcagctgacgctgaccatancctcgtttgcaatagccgcagagacattgttggccagcttgtttggaatgaacataccatgtccattgtanatcntacatggcgtctttggttactttgtgtggagtgttactgcactttgcattgtgcttttcatggncactcntggttacgccangtggaanaanctgctangctcataatctccctctctcttanaaaccaatgtgccncttgtgtnataanntatacatangttag

SEQ ID NO: 12545 - DNA, 414 bp, Arabidopsis thaliana
  unsure at all n locations
  Clone ID: LIB25-066-Q1-E1-B12
gagctgttgagcctactatcatcgaaggaaaagtgttccgtgagctatctgagaaagagagagaacaagtagccaagaaaataacggtgatgggtaggtcatctcctaacgacaagctcttacttgttcaagcactacggaaaaatggagatgttgttgcagtcactggtgatggtactaatgatgctcctgccctccatgaggcagatataggtctctctatgggtatatcaggaactgaagttgcaaaagagagttctgacatcattattttggatgacaattttgcttcagttagtaaaggttgtccgtttggggccgttctgtgtatgcnaacattcaaganatttcanacaatttcaagccttnacngtgaatggttgcccgcaacttaataaatcaatgttggtagca

SEQ ID NO: 12546 - DNA, 408 bp, Arabidopsis thaliana
  unsure at all n locations
  Clone ID: LIB25-065-Q1-E1-G9
taactttcctaaaacaatggctttaaaacatatgcaaatctttctcttcgtcgctatattttcatcattctgtttctccatcactctttctcgtccactcgacaatgaactcatcatgcaaaagaggcacatcgagtggatgactaaacacggccgtgtctacgcggatgtgaaggaggaaaacaatcgctacgttgtgttcaaaaacaacgtcgaacgcattgaacatttaaatagcattcctgccggaagaactttcaaacttgcggtaaatcagtttgctgatttaaccaatgacgaatttcgttccatgtacactggtttcaaaggtgtctcggcattatctagccaaagccaaactaaaatgtcgccgtttangtaccaaaacgtttcttctggtgctttgcg

SEQ ID NO: 12547 - DNA, 417 bp, Arabidopsis thaliana
  unsure at all n locations
  Clone ID: LIB25-065-Q1-E1-H10
aatccaaattgggggtatcaacaacaacaaggtcacacccctcaagctaatagcaacgtcgaggactgggctgtgaaagccaaagaatgggcagctgcgaacaaggatcagcaatcacagcagtctgcaccgaaccaacctagcggacaagtctaccagcagcagtatcctactcatggctatcaagattttcatcaacaggcagttccaggagtaagctatcagcagcatcagcagtttccagttccacccacaacacagcccgagagatatccaaattacgcaacaggaaacgagagctttcctggagttggattgccccaagaaaacctgcctaccagttctgcaattcatcagcaggaggtaccttatanttattcttctgtagcagggtaancatttacntagaacatagct

SEQ ID NO: 12548 - DNA, 442 bp, Arabidopsis thaliana
  unsure at all n locations
  Clone ID: LIB25-065-Q1-E1-H4
agtgcaattgtattgtcccgttgaagccatggaagtagagagatcgagcaacccaacggctgattcgagattgttgttctctctcaagtttaatcagcttgaaggtgtgatgcagttcaatcacaaagttgtagttagagacaattggatcgatgtgatcgtgaagatagacaacatcagatacgatgtaataaagcttgtaaacgagaaactgatgtcgagaagaggagcaggggagcacgaaaagcatttcccatcaaggatctctctgcaactaactcctactcctccaaaaccgatttcattaaccgtttccggttagcaaaatcatcaaaacaatcccggggaagaaaagtttgaaagtcnanaagattctaattgaaaggntccgttccgattcaaccaaacctcaccaaaggcttaanaanttngcngggcccaa

SEQ ID NO: 12549 - DNA, 133 bp, Arabidopsis thaliana
  unsure at all n locations
  Clone ID: LIB25-065-Q1-E1-H5
tancacaccgatnaaccaaaacgccgccgctgcttttgccgccgtctccgaggangagcttcagaagattcagcttcantctatcagtgcatcgttagcatcgttaacgacagagtcacggaccatnggtggt

SEQ ID NO: 12550 - DNA, 417 bp, Arabidopsis thaliana
  unsure at all n locations
  Clone ID: LIB25-065-Q1-E1-H6
aaaaaaataantcantggaaggangaggaagaggaccaaatcanacgattctcagtgaantanaacatatgcctgaagctccacgtcaacgtatctctcatcaccgtcgagctcgctctgaaaccttcttctccggcgaatcaatcggcgatctcctcttattcgatccttccgatatcgatttctcttctctagacttcctcaacgctccaccaccaccacaggcaatcacaacaacaaccgcangcttctcccatgtccgttgattcggaagaaacctcatcgaacggtgttgttcctcctaattctcttcctccaaaacccnaagctangattcngtcgccatgttcgtagcttctcggttgattccgatttcttcgatgatttgggtgttacngaggagaagtttatngccag

SEQ ID NO: 12551 - DNA, 406 bp, Arabidopsis thaliana
  unsure at all n locations
  Clone ID: LIB25-065-Q1-E1-H7
gctggaaccctagtagttattatagcatccatcgctttcttcaatcgccgtccatcagagtttcaagggatttgctttaaagatcaatcctttcctaagaaaatagcgacaattcatcagcttttcctttcccatccttcagtaccttaacttactcgagattcatcttccagctgaaattgtgaaacttcgtttctgggtttttatcagaaaacactctgtgacttattgtgtggtgatcgaggaaagaaaaaagatggttggtggtggnaacaggagagatgagggatcgatgccgattcagaacacgaacttgtttgctgctttgggtacctcgaggaagaanaagaagtctgataaggctggtaagagcanagcttcctctannagagaagattcacagaag

SEQ ID NO: 12552 - DNA, 399 bp, Arabidopsis thaliana
  unsure at all n locations
  Clone ID: LIB25-066-Q1-E1-A11
cgttctaaatgatccattatctccatttcatcggtgaattttgtttctccagtgctgttaaagtagttgagtggttctcggagaatctgtttctcaaaagaagcacaatggcgttatcnaagagagggttcgtgatgacctctaatcctagatttcacggcgaggaagangaattagagttaggattangatcagtgangttcacgcgaggattagggaggaaaaggattttgatttcgagttgtgtgcgtgaatctctatctagatcggccgttgagattccggtagtatctgaatcgccgccggtgaaaagttcgttgaagagacaacnaagcagaataacaattgtttcttcttcatcctccgaaaaatctcgacttgagtgtcnccctcaaagat

SEQ ID NO: 12553 - DNA, 414 bp, Arabidopsis thaliana
  unsure at all n locations
  Clone ID: LIB25-066-Q1-E1-A2
cgaagaagagcttagatccagttccagaaaccctaatttcagcaaccgatcaaatcgccggaggaattcaaattctgaagacgacgacgatgagaggagagacaaaaagcatcggcttttacacggattgaattcacacgagggtcgtgattcttctaattccaaatctggcggcggcgatttggactccgatgcacgcaaccgccggaaaattgacggatctgacaatacgggagaaaaggcttcgaaagcgacagacattcttcttcaaagagggtcacttgtggagtctacacctttgccaagacaaaaagttgttgttcttcattcttgatagagttcaaaagaaggatacttatggagtgtactccgattcagctgattcagangagcttccctgattattatganatt

SEQ ID NO: 12554 - DNA, 351 bp, Arabidopsis thaliana
  unsure at all n locations
  Clone ID: LIB25-066-Q1-E1-A3
gtgatntgtttgacgcagnnatntgcaaangacattantcctgatgacaaacaanaactcgatgaagctctgcaacgagagattcaagctgcttttcgcacanatganatccgaagaactcctcctacaccgcaagatgaaantgagagcagggatgagctacttccatgagacaatctggaaaggagttccaaagttcttaagacgtgttgacacagctttaaagaacattggnatcaacgngcgtgttccttacaatgcgnctctcattcagttctcttcttgggatgggcggagaccgtgatggaaacccgcgagtaactcctgaanttacangangatgtntgctta

SEQ ID NO: 12555 - DNA, 489 bp, Arabidopsis thaliana
  unsure at all n locations
  Clone ID: LIB25-066-Q1-E1-A5
nnnnnnnngnanttccagctgnncgngcccgtccanaactaaaaaggcccgggccacncacgcaatccgaaaaaaatgagagagaggtggcaaagatgaagtggaggtgagagacggaaagcaaaaacaatagtcacgagaatcaacaccaactcttaaaccaagatagaccaagaaaccaaacagagtaaataaatggtggccttgacaacattgaaatccccaaaaatctcaactttttagggttttcgagctctgaaatctctctatctttcttcttcagatttctcacttttttcttcttcataagatcctcgtgattccactttataacgtacgcctcctttcaagaaaaatctctctctatattatctacgtttctctcgccttgtctccttttgaggttccatttctacttctctccaaaattcgaaacttttcccactctctctctctctctactagtttgacatgaacagcgacggtgtt

SEQ ID NO: 12556 - DNA, 414 bp, Arabidopsis thaliana
  Clone ID: LIB25-066-Q1-E1-A7
tggaaactgaatcttaaacccttcactcacattcatcttcaccgtcaaatctctgaaactgagcttcgacgatgttgggtttacgaagatctgcgacgaccttgttcgacatcagccagtctctgcttcgtaatgttacgtttcatgggttacgagtccaaggaattcgtgtgggaaacgcagaggttccaaacaataagccactcaaaaccggtcttcaagaagtttatggaatcggccgccgtaaatctcaccaggttctctgtcaccttggaatcactaacaaacttgccagagacttaactggaaaagaactcattgatctccgtgaagaagttggccagcaccagcatggtgatgaactgaggaggcgtgttggatcggaaatacagagactggtcgaagtagattgct

SEQ ID NO: 12557 - DNA, 409 bp, Arabidopsis thaliana
  Clone ID: LIB25-066-Q1-E1-A9
tcattcttcttcttcagcattattttggttcacgctgctttgttccccgtcagatgctaccagagaaatacaactaccaccgaagatttaatcgggatgtaagccgcaccactgattgtgttatctgcatgaccgctattgatctcagacagcataccagtgattgcatggtaactccatgtgaacatttctttcactcgggatgcttacagagatggatggatataaaaatggagtgtccaacttgtcggcggtctcttcctccagcatagaggatgttttcggtttgttaggatgtacagacttcactcagattattgcgggtggggctggttctttaatttcaggtccttgcagaggtttagaagatttttagatgaaaacagagcaaaggtggaatctgtaactg

SEQ ID NO: 12558 - DNA, 477 bp, Arabidopsis thaliana
  unsure at all n locations
  Clone ID: LIB25-066-Q1-E1-B1
ttcncntaccgnntcgggnccaancnccncgggtcgaggcncgcgtccggtactatcttcagagcttcgagaatgtcgatgttaatggcggccaaatccacttcactctttagctcaaaccctacaatttcagctaaaatagggcaaaaccctcgcggcgtcagatcggtttatccgacggtgagaatgcagtcacgtgttcaccgtctgattgaagagcaaggtgctgtgcttattcccggagtctacgacgcattatctgcggctattgtgcagcagaccggattctccgccgcattaatctccggttacnccctctccgccgtaactttgggaaaaccagatttcggtttgataacacctccggagatggcagcaacggcgagatcagtgttgtgctgcngctccaaagattccaatcagttgcagatgcagatactgggtggaggaaattgctcctcaatgttcaaaagnacc

SEQ ID NO: 12559 - DNA, 408 bp, Arabidopsis thaliana
  unsure at all n locations
  Clone ID: LIB25-066-Q1-E1-B10
cttcttcttcttctgcttttgtctcaaaccattacaaagagaacattttttgtttagtaaagaaaaaacaacaaaaagacatgataacgagagagagtttaacgctgagaagcatcacaatgatgactttagtgacaatcctggtctggtctgcaactctagagacctgcattgccagaagaggaagacattggagacaccaccataggagctcctcctctttgtctgattccttgtccagcaagaaaccaanaangccatgaagaacaaccaccaccacatgtcccataagtcanaacaaaacgaagatgaaaactcagccggccaaaatccaacgaagggttcacctgttgtgtcacangccancacaagttcaacaaccaccaccaccacatgtcnaaccaccag

SEQ ID NO: 12560 - DNA, 417 bp, Arabidopsis thaliana
  unsure at all n locations
  Clone ID: LIB25-066-Q1-E1-B11
atattaccaagccaagaagttggagttagaaaatgtcaaatcagaagaacttggagtaaaggctttacctcctcttccatgttatactcagaaaacccgactcatgaagaggaaaacgagaaagcgagttgaagagaccgctgatgttacatcctatgcatcaaaccataatctcttctcttattatgattgtcggaaatctttggccgatattgctcttaatgacaactcccgcaacctagataagaagaataagagcgccaaggatgagacagctttctctgaagagacaccgcctctccgagtttagagaaggcgatgcgtacttgggacaagatacttttggaaattgaagcaagcaaagtcagaangccggtnaactttgaagattcgcgtagacaagggntttgaggtgaa

SEQ ID NO: 12561 - DNA, 416 bp, Arabidopsis thaliana
  unsure at all n locations
  Clone ID: LIB25-065-Q1-E1-G8
tcgttctcatctttctctctaagagattttgtaggtgacaatcaaaagtttgacaaaatggtgaagtttacagctgatgagcttcgaaggattatggactacaaacacaacatccgtaatatgtctgttattgctcatgtcgaccacgggaaatccactcttactgattctttggttgctgctgctggtatcattgcccaagaggttgctggtgatgttcgtatgactgataccagagctgatgaggctgaangtggtatcactatcaagtccactggtatttctctctactacgaagatgactgatgaatccttgaagagtttcactggagccagagacggaaacgagtacctcatcaatcttattgattcacctgggcacgttgacttttcctctgaggttactgctgctctcg

SEQ ID NO: 12562 - DNA, 402 bp, Arabidopsis thaliana
  unsure at all n locations
  Clone ID: LIB25-065-Q1-E1-D9
cgaagggtataagcgatccatcaagtggcctaagagcagagaaaagatctggtacaccaatattccacacaccaagcttgcagaagtcaagggacatcaaaactgggtgaagatgagtggtgaatacttaacattccctggtggaggtactcaattcaagaatggtgctcttcactacattgatttcctccaagagtcatatcctgatattgcttggggaaataggactcgtgttatattggatgttgggtgtggggttgctagctttgggggatatctttttgacagagatgtactcgctttgtcatttgcacccaaagacgaacacgaggcacaggtgcaatttgctctgggaacgtggtattcctgcaatgtcaaatgttatggggaaccanggaaatt

SEQ ID NO: 12563 - DNA, 65 bp, Arabidopsis thaliana
  unsure at all n locations
  Clone ID: LIB25-065-Q1-E1-E12
nggaccggcctctttggtacccaggcgccatttctcctgantggcttgatggttccttggttgga

SEQ ID NO: 12564 - DNA, 417 bp, Arabidopsis thaliana
  unsure at all n locations
  Clone ID: LIB25-065-Q1-E1-E2
atggtcccttgctattctattgaatcgtttgcatcacttgttaaaccatccatcagtgttgactgtgggattcttcgagactgctatgaatcctttgccatgtactgttttggtagataccttgttgcctgcattggtggggaagaaaggactatcgagtttatggaaagacaagggcgtaagagctttaagacgccactcttagatcacaaggatgaaaagggaatcatcaaacatccttttcctatgaatttattcttaaaaccgtggaggctcagtccctggttttatcaagttgttaagtttggtattgttcantatatgataataaagtctttaactgccctcacagctctgattcttgaanccttcggtgtgtactgtgaaggagagtttaaatggggatgttgggtaccc

SEQ ID NO: 12565 - DNA, 411 bp, Arabidopsis thaliana
  unsure at all n locations
  Clone ID: LIB25-065-Q1-E1-E3
ggttcgcttatggccatgggggtttctcttacttcccacaataaccctcttcttcgccacttatctccttcctcttcctgggtttctcgttcctcctctcgcctctcttcttctccactcccttccttcctctttccttgccgtcgaacccttcttcaaaggaaactagcttccactgatggaaatgtcggttattgtactactacagtttgtcagggatttcaagcattcggttcatcaacggtcgtcttctgttgtgtttaacggagagtgggaacttcgatcggaatctaacaaggtaaggatggttcctaagattatcaaggttgggnaatcaagacggaggtagccgaaactcatcaagttcctggaactgtaagtgcntggngggaagaagctaanaagcttnag

SEQ ID NO: 12566 - DNA, 416 bp, Arabidopsis thaliana
  unsure at all n locations
  Clone ID: LIB25-065-Q1-E1-E4
cgctcaatcctttttgtaccgctccgtttgcgccctctctcttcttccccttcctctctctaagcggcgggagttacattgtcggccgccggggaaaccggcgacagtggattctctaaactcttaaactcgctacgtcgattcttaaaggattcatcgccgataacttttatacctccttcttttccgataggatcgggactcattttgtttccaacaccccggatccggtgatttagggcgctttttgatgcttatcgagtaaaggatttatcgatttagtgatcgtttatggaaggaggtggtggttctggtgagcgttcacggattgcttcgaatactcctcgaagcttgaaggagaagagcgatggggttggtangactgtgtcttctactgaaactangcanaattatca

SEQ ID NO: 12567 - DNA, 417 bp, Arabidopsis thaliana
  Clone ID: LIB25-065-Q1-E1-E6
tgattttggaatctccattacgatggaaggtgcggctgatcaaactacgaaagcgttatctgaattagccatggattcttctaccaccttgaatgctgctgagtctagcgctggtgatggagctggacctcggagtaaaaatgctttgaagaaggaacagaaaatgaagcagaaagaggaagagaagagacgaaaggacgaagagaaagctgaaaaggctaaacaagcacctaaagcaagctcccagaaggcagtggcagcagatgatgaagagatggatgcaacgcaatactatgagaacagattgaaatatcttgcggctgagaaggctaaaggggagaatccatatcctcacaagttcgctgtgtcaatgtcgattcctaaatacattgagacgtatggtaatttgacaatggg

SEQ ID NO: 12568 - DNA, 92 bp, Arabidopsis thaliana
  unsure at all n locations
  Clone ID: LIB25-065-Q1-E1-E8
accntcaccggagantaaatgttctgtactcgccggtggtacgattcattggatcgagttcggaggaacggtcggcgcttgtgncattgnca

SEQ ID NO: 12569 - DNA, 409 bp, Arabidopsis thaliana
  Clone ID: LIB25-065-Q1-E1-F2
gcgaaattgctgatgtggttaaaatcccaataataaatgaagctgatcaaataagtacttgttgtctgatctgacgtggctagatagcttctccaacgctttatctcggaaactccgtgacaaaagatagtactttcatgtctgttttggtttcatccaaaagtatcaaatttgtgtgatcttctccagaagaaacttgaggaactttaagctaaacctctgtagttttcagattgattcgttggtggaaagcgtctaaattttgcgtaaatggcggcagctcttgtacgcagattctgccggggatcatcttttccggtctctggtcatggatataggatgctatcgacggttgaaaatgtatctgaaagtggtaaatcgatgaatctatactctgctattaatcaag

SEQ ID NO: 12570 - DNA, 476 bp, Arabidopsis thaliana
  unsure at all n locations
  Clone ID: LIB25-065-Q1-E1-F3
ngttatttnccgncccggtccaaacnnaacgggtcnagtcacgcgtccgntttaaacgtataataacatcccttgtgatcaaacaagtaaaccattcagaagatgaaaggaagaattttgattttgagtttgctcataatgagtctggtcatggcacaagttcaagtagaagcaaagatctgctgcccttccaaccaagctagaaatggctatagtgtatgccgtataaggttttccaagggaaggtgtatgcaagtgagtggatgccaaaactctgatacatgccctcgaggttgggtaaacgccattctcgaaaactcaggctgatgctaccaatgaagcactgcaagttagggtgtgaaacttctgtgtgtggtgccatgaacactctccagaactctgatgcaaagtgaaattgtgaatnggagcgtcgggaacaatgtgcccngggatgtncnactttcctgtnccaanag

SEQ ID NO: 12571 - DNA, 417 bp, Arabidopsis thaliana
  Clone ID: LIB25-065-Q1-E1-G10
gcccgaagctgaaagttttctctgacaagtctgatgatgtttctgatacaactatggacgaaatggtagagaagctagatttgaatgaaggcgtcaaagcaaagttcttccttaacttgataaacctgtgcgactcagctggtgaaaagctcttggttttcagccagtatctcattccactaaagtttcttgaaagactagctgctttagctaagggatggaaactagggaaagaagtttttgttcttacaggcaataccagttctgagcagcgtgagtggtcaatggaaacgtttaacagttcgccagacgccaaaatattctttggttcgataaaagcatgtggagaaggtatctcgcttgttggagcatctcgcatactaatattggatgttcccctaaacccttctgtgaccc

SEQ ID NO: 12572 - DNA, 403 bp, Arabidopsis thaliana
  unsure at all n locations
  Clone ID: LIB25-065-Q1-E1-G11
ataactctttctggggtttttaattctctcaacgaacaaaaaaaaaaactcaactaatattctccatcctctttcttcagatttaagagaaaccttatcgttatattctctcttctcttttctttttgactcccacaagaagaaagcaaatttctttttctcaggattgcttgaaaactgtagaaatctttanggtttttttacaccaataagagtcagagagagagagagagagagaaagagagatctantcataaaaaagacaggtaatcncaactcngaggagataantgnnataanaatttgcgaggantaangannaaganaganagaagaagancaaagctaanngaatggttgcttttttatcaggcntgnccttggggaaaanttttggcaaatc

SEQ ID NO: 12573 - DNA, 405 bp, Arabidopsis thaliana
  unsure at all n locations
  Clone ID: LIB25-065-Q1-E1-G2
gttcttcagctctttttgagttcccccagaccagtgttgagatttgccgctgtccggactctgaacaangttgcaatgactcatcctatggctgtcaccaactgcaacattgatatggagagtttaatctctgatcaaaatagaagcattgctacactcgcaataaccacactattgaaaacagggaacgaatcaagtgtanaacgtttgatgaagcagataactaattttatgtcagatattgctgatgagttcaaaattgtggtcgtggacgcaataagatcgttgtgtgtgaaattcccactgaaatacagatccttgatgaccttcttaagcaacattcttagggaagaaggtggatttgagtataaaagagcaatantagattctattgtgaccantatc

SEQ ID NO: 12574 - DNA, 468 bp, Arabidopsis thaliana
  unsure at all n locations
  Clone ID: LIB25-065-Q1-E1-G3
tacttagcacggcccggtccatcantaccnggggccanccacgcgtccgaactcnttttctcctccacctctcctttgtcctcaatagccgacgatggcttcatcgtcctcttccattttcaccggtgttaagttctctccgatcttagctccctttaactccggagatagccgccgctctcgatatctaaaagatagccggaataaagttaggtttaatccatcgtcgccgcgtctcactcctcatcgtgttcgcgtcgaagctccgtctttaattccctataatggtctttgggcggcgcagccaaattcgcataagggacgtttaaagaggaacattgtttcgggaaaagaagctaccgggatatcactttctcaaggacgtaatttctgtcttacttgtaaaaggaatcaagctggaatcagaagagcattacctagtgcctttgtggatagaactgcatttaa

SEQ ID NO: 12575 - DNA, 391 bp, Arabidopsis thaliana
  Clone ID: LIB25-065-Q1-E1-G5
agaagaagaagatgaagaaaccatcgaaaaagagcgaaatcgagttctgcacggtgtgccggtttcatcacgaccaaggctcgcgccacaagtacttccctcgccacaaaagttccctctcttccttactcgatcgattcagatcgaagatagctgacgtcagattcttcctgaagaaccctagcgttctacggccacaagagcagtcgcaaaaccgtgtttggtgtgtcttctgcgatgaggacattgttgagctcggtagctccttcgcctgttctaaggctatcaatcacttcgcaagttccgatcatcttaagaatatcaagcaatttctgtcgaaaaatggcccggcaatggattgcatagacgagttccgaatttcagaagctga

SEQ ID NO: 12576 - DNA, 416 bp, Arabidopsis thaliana
  unsure at all n locations
  Clone ID: LIB25-065-Q1-E1-G6
acttgccgttgaaggtaggatggagactgatgctcggaatcggagccgtaccttccgtgatactcgctatcggcgttctcgctatgccggaatctccacggtggctcgttatgcaaggccgtctcggtgatgccaagcgcgttctggacaaaacctctgattcccccaccgaagcaactctccgtctcgaagacatcaaacacgccgctggtattcccgccgattgccacgacgacgtcgttcaggtgtcgaggaggaacagtcatggagaaggagtttggagagagcttttaatccgaccaacaccagccgtgcgtcgtgttatgatcgccgcaatcggaatccatttcttccagcaagcttccggtatcgacgcggtggttctcttctcaacgcgaattttcaaaaccgccngg

SEQ ID NO: 12577 - DNA, 400 bp, Arabidopsis thaliana
  Clone ID: LIB25-065-Q1-E1-D7
ctcagatgggtttgctctgaatcgattggaaaatcaaaccggtgtggactctgcaaagttggttgatatgaacagtcttgtgagaagaaaacaagttgattctgttcatcttatcaaaaacgatggacctcatcagcttgccaagaaactatccgccgttgatcttgttgctattggagttgggacaacaattggagcaggagtgtatattcttgtgggaacggtagctagagagcacacaggacctgctcttgctgtatcattcttcattgctggagtagctgctgctctctctgcctgttgttatgctgagcttgcttctcgttgtccatctgctgggagtgcttatcattatgcgtacatttgtcttggagaagggattgcttggttggtggttggg

SEQ ID NO: 12578 - DNA, 488 bp, Arabidopsis thaliana
  unsure at all n locations
  Clone ID: LIB25-065-Q1-E1-G7
ggnnnngnngnaatgtntcgtttggnccggnccggtaccgaaaccaaaaattcgcgggtcnacccacgcgtccgctttgttttctttgcttcttctatcttcttcttctttcttcttctcgctttaatactctttgattcctctgttcgtttgatganaattanattttaaatggcnaaagtttcgtttaaggattctctgaaagctcttgaagctgatattcaacacgctaacactgtanctttagattatcctcgggagaangatggagcgcgtgttcaaatgaggctatcgtacactccanctgctcagtttttacnttttcttgtacaatggactgattgccatcttgctggtacactcggtctgctcagagttctgatttacatgacctatgcggatgggaaaaccacaatgtcggtttatgagaganaaacaagtattaaagatttctatgccgtgatatttccgtcgttgttacaactaga

SEQ ID NO: 12579 - DNA, 394 bp, Arabidopsis thaliana
  unsure at all n locations
  Clone ID: LIB25-064-Q1-E1-B12
gcaacatatattgttgaaggaggaacaactcgaacatatacagtcataaagaatatgtgccacactgcaccagatgtattgagagctctattatctcatttaaccaaggccattaccgagtatgtggtttaccaagttgagcacggagctcactgcatacaaatattcgattcctggggtggccaactgactccggagatgtgggagcgctggtccaaaccatacattgaagagatcatacatgctgtaaagaaaagatgtccagatacgccgatagttttctacatcaatggaaatggtgggccttccttgagcgaatgaaaaggaactggagctgatgtttantgggacttgactggactgtagatatggctgatggaaggangcgattggg

SEQ ID NO: 12580 - DNA, 488 bp, Arabidopsis thaliana
  unsure at all n locations
  Clone ID: LIB25-064-Q1-E1-B3
aacgntcgtagccgtccaaaattcaanggtcgaccnacncgtccgantcgtgancgtatatagttggacacttgacaaatctgagcaatttcctttttgcttacagcgggaatatctgaaccaacgcnatgccgtcgacgcagtccttgaccgtcgcancgaanacgctacgaaatcggatcttctctaggtctggatctacatccgccggtccgagtcggtgggcgacgccaaggtcacgaggagcgacctaangggttactttatgaaccgtactcctccggcaccaaggacagtcgcnnaaaatgggaagattgggagcttccttgttacatcaccagcttccttacaattgttancctcggcgttggactcantgccaaacctgatcnttcaatcgagacttgggctcatcagaaagctttaaagcgtcctgagatggganaagctcccgaccgctgggaaaattcntccnnaattaaancnng

SEQ ID NO: 12581 - DNA, 424 bp, Arabidopsis thaliana
  unsure at all n locations
  Clone ID: LIB25-064-Q1-E1-B4
cctcaanggcctcctccccctgaatttnactccttggcaatggtgaaaccttggagttaaaacaaagcaaagattttccctactgggagtancgatgaaaaagtttgttagcacaaagaaatgtcaaagcaagaaagaatctaaaaagagatcgccaagcattatagcgaagattgatgggtctcgatgttttgccttctcagagttcttctcataagcaacaaaagtctatggagaatcagcaaggcaggagtggtggaggcacttcttataaatctcttgggaaagcgctcaaagggtgagcagaagtttaaagatgttttcgaagttttggatgcaaagatggcagagagtaacagaaacttatatcatcaggggaaggtgaatgctaatctaacacaagcgggagatngcantcatacgg

SEQ ID NO: 12582 - DNA, 348 bp, Arabidopsis thaliana
  Clone ID: LIB25-064-Q1-E1-B5
tcccctaatctggcactgatttttggtggtgaagatggtttgcctgcaattttagcgcgccaccagatcccaggccttgatattgttgttgatccatgtgctgctattcttgtgtttgttgtaactggccttttgtgcatgggaataaaggagagcacatttgctcagggaattgtaactgcagtcaatgtgtgtgtcctgttatttgtcatagtagctggcagttatctcggcttcaagacaggttggcctggttatgaacttccaacagggttctttccattcggagtagatggaatgtttgctggttctgctacagtcttttttgcattcaatgggttttgaatc

SEQ ID NO: 12583 - DNA, 389 bp, Arabidopsis thaliana
  unsure at all n locations
  Clone ID: LIB25-064-Q1-E1-B6
ctcaggtgggcagtgattataacttcgtctccgtgtctgttcaagctcccattcttgtggccttcacgcttcaggaacaaagaccagtatctctctgaaagactacttctcggaaattttcgtctccatggcacccgtgagggggattcttggcttgcaaagggcagtgtccatttggaaggaaagtaacagactgactccagctttgagatcattcagcactcaagctgcatccacttccaccactccacagcctcctccacctcctccgcctccgggaaaagactcatttcggtggtcctcaagggatgaagatcggatttttactaaatcctctaaggtctgcatganccatttctcaaaaggcgcgatgaaagagangtgattgg

SEQ ID NO: 12584 - DNA, 288 bp, Arabidopsis thaliana
  unsure at all n locations
  Clone ID: LIB25-064-Q1-E1-B7
atcgtctcctttacttcattcgtcttcttcctctctttcccacaagctcccattgatatagagagagagatttaaggaaggaatcatggcagggggtggagctccagcacccaaagcagacgaaccacaaccacatcctcctaaaagatcaacttcccaacatttcntantgcatcaccagtcctcctccctgggcctggaagctaatcctccttnggatttccaaanatttaccttgtgaatggcttgggnanancgnngctaatnacntacngctcttgttcccaa

SEQ ID NO: 12585 - DNA, 466 bp, Arabidopsis thaliana
  unsure at all n locations
  Clone ID: LIB25-064-Q1-E1-B9
caantnctacgcnntncggtagcngtccacagtcgacccgnccgtccgcncacgcgaacngtttttttttttttttagccaacaagctttgatatgactttataactggcatcgcagcaccttatcgagtaatgcagttcatatttacacctttcttttacacaaaaccaatcccactccctttctcatcatccanacaaagtagccggtaaagcaaaaaagctcttanacacaaagaangcaagaattgtcccaaaaganaactctcatacatcactttgctgtntctttcttancttcgggattcgtccagactacntgctccagagaattagngaagcttctatagaacngtgaaatcgagagtggtccccttccgactcgatacttgaaccatatgaaagacttggcgctacttggaatacctcnggtcgctaaattgagaattccccttcctccaagcctt

SEQ ID NO: 12586 - DNA, 103 bp, Arabidopsis thaliana
  unsure at all n locations
  Clone ID: LIB25-064-Q1-E1-C1
tggctccatatnaacgccctgcacttagcaagggggtatntggttcctggaaggggctgctangacttcangagtttccaattgcctgtgtttggnaggnggg

SEQ ID NO: 12587 - DNA, 410 bp, Arabidopsis thaliana
  unsure at all n locations
  Clone ID: LIB25-064-Q1-E1-C10
ttactcaggtattttctgaagttaaaagatagaaataatgtctgaaaaggtgggagcgatgggtggtaacaagggtggagcattcgacgatggtgtttttgatggtgtgaagaaagtaattgttggaaaagacttcaacaatgtaacttatatcaaggttgaatacgaaaaggacggaaaattcgaaattcgtgaacacgggactaatcgcgggcagctaaaagagttttcagtggattatccgaatgaatatatcacaacccgttggtgggaaagctacgaacacctggttttcnggttaacggttaacngttgatnaaagtncattaactcctcnaaaacctccttatnggaaagaaactcctccaaatcccntggtcacaacgaacaattactangggaatccaagc

SEQ ID NO: 12588 - DNA, 435 bp, Arabidopsis thaliana
  unsure at all n locations
  Clone ID: LIB25-064-Q1-E1-C11
cgcctnncngtaggcntccaaaattccaanggtcgacccacncgtccgaagcttcactcttttcttgcttcagagagacctagaagagttatcaacatgagtcttcttctacatctctttgctctgtctctgctcatctctgtttcaggagcaaagttctccggccggccaggaatcaactatggccagctcggaaacaacctcccgtcaccgtccgactcagtcaacctcatcaagtccctaaacgcgaaacgcgtcaaactctatgacgctaanccanaaatcctcgccgcgttnaacgggcaccgacattaccgtctnccgtcatggggcccaanncaagctccncgtcaaanatctccanaatcggnatcaacnctcggacgaactnggattccgattcaaacaatnctccccgttttacccanccagnga

SEQ ID NO: 12589 - DNA, 371 bp, Arabidopsis thaliana
  unsure at all n locations
  Clone ID: LIB25-064-Q1-E1-C12
ttacgccnncggtacgcctccaaaattccanggtcgacccacncgtccggtcagttgattatggtaactacaacaatagatcttcttctcatcaatccgcagaagaagtaaaacctggctctgaaaacatagaaagctccaatctttatgggattgaaactgacaatcaanacgggcagaacaagacatctgatgtcactacaagcaccaggtcttgaaaccgtggatcatcaanaggaagaanaagagcanngacncggtgattcnatggctggtggtgcgcctgcagangatggntataactggaggaaatacggggcaanagttggtcanaggaaatgagtatcccgcnaagctattacnangtgcac

SEQ ID NO: 12590 - DNA, 420 bp, Arabidopsis thaliana
  unsure at all n locations
  Clone ID: LIB25-064-Q1-E1-C2
ggcaagagactctccttccatctacccttagagggcgcgcctcccgtgcgccttcttaactggttatggaatccaaatgtctcatgttcgtttccattgtatctgtcttcttcatggttgttaatggcgtatcagagaccgaaactctcttgaaattcaagaattctcttgttattgggagagcaaatgctttggagagctggaataagaaggaatcctccatgcaaatggactggtgtcttgtgtgatagaggctttgtttgggggttacgactagagaatcttgagctctctggctctatcgacatcgaggcgttgatgggtttgaattctctaaggtctcttagtttcataaacaacaaatttaaaggtccatttccagagttcaaagaaaacttgttgctttgaaatcacnttact

SEQ ID NO: 12591 - DNA, 536 bp, Arabidopsis thaliana
  unsure at all n locations
  Clone ID: LIB25-064-Q1-E1-C4
ctgtttacgcctgcccngtagccggtccnaaaattcaacggggtcccacccaccgccgtcccgaattgaaaaccaaagggccgattaaaaaaagtttgcagttaattgggtgggcgggtcctgatggggttcaagggcatcnctacgggctcctacttcctaaagcaataataaagagttgtgcctcaaaagaaaataaaactcaagaattcccttaatgaaaggggaaataaaaatccagtttgaaangcaaattattgaaaaagcttggtatctaagggggaaactgacacaagataaagcaggaaaggccctctctttgttcaaggggagtacttgattacacagaattcaatgatgtggacatggtcataagaggcagtgattgaaaacattcaattgaaacaaaacatattcaaagaaatcgaaaaggtttgttcaccccactgcattttggcgaataatacatctactaatcgacctcgaatgttaattggtgaaaaagactaactcaaaagatcgcattgnttggcccc

SEQ ID NO: 12592 - DNA, 404 bp, Arabidopsis thaliana
  unsure at all n locations
  Clone ID: LIB25-064-Q1-E1-C7
tccaggcttgcctaaagatagagaaatttggtgacctgattttgaaggctacagaaccgcagatggtcttgtttaatatatatgatgattggttgaagagtatttcttcttatactgccttttcaagacttattttgatccttcgtgcgcttcacgtgaataatgagaaggctaagatgttgttgaagcctgacaagtccgttgtcactgagccacatcacatctggccctctctcactgatgatcaatggatgaaggtggaggtagcacttanagatcttattctttctgactacgcaaagaaaaacaatgtgaatacctcagctctgacacaatcangngatccgagatattaatcttgggagctgagattactccaccctctcaanaagagggaanaaggt

SEQ ID NO: 12593 - DNA, 488 bp, Arabidopsis thaliana
  unsure at all n locations
  Clone ID: LIB25-064-Q1-E1-D1
gcctnccgtagccgtccaaaattcaagggcccaaagcncatttacaatgcgggcccggacaaaagatcaccaccgtgaagtttgctagtttcgggacacctgaagggacttgtggtagttaccgtcaaggaagctgtcacgcccatcactcctangacgctttcaacaaactttgtgttgggcagaactggtgttctgtaactgtagcaccggagatgtttggtggagatccgtgtccaaatgtgatgaagaaactcncggtggaagccgtttgtgcttaaatgaaagcagacgcaacagcaatcaaaagactgtaaaggtggttacttacgcattcttacaggtttcngatggtattaagtatgttttangaagacaacagaaagaagttggtacttttccaagctccttattttatcaccgggnggaaattgtnccanaggggacgccagcaangccgttcaacaaanttgcnnaattttggnttg

SEQ ID NO: 12594 - DNA, 455 bp, Arabidopsis thaliana
  unsure at all n locations
  Clone ID: LIB25-064-Q1-E1-B11
acgcctgtnctgtacggcctccaaaattccaaggtcnacccacncgtccggttcataaacaaaatcaaaacttgagtgaatcataatcgtcgtctcgtcgccggagaaaatgatcggcggtggtagggtttattgggggaagaagttagataaagagatggaagatgcggcggttgttgacggtggtggatctaacggtgttgttgtgatctttgtttggagctcgattaacnagaaccagcttatnaatttcgttgatctttattcttctcntggntggaattcctctttgtttgccnccgcagaattttcncaccggcggtttaacntgaaaatggncccttcnttancattccaancttccttcngaacttgttngaggagttaaacnagtagaccangtcccgttaaactttcnagctttctctggtgcncccaaaagccttggtanggta

SEQ ID NO: 12595 - DNA, 420 bp, Arabidopsis thaliana
  unsure at all n locations
  Clone ID: LIB25-063-Q1-E1-H11
aatatgaagcacatacgacacggtcatgggaatttgtaggattggaggaggaagaaaccgacagtgatgttccacgtcgaaaaaatgatgccgatgatcggtttcgtgtgggaagaaattttttgaagaaggcaaagcatggtgatggaatcatcgtcggtgttctcgacagtggtgtgtggccagaatcaaagagtttcaatgacaaaggaatgggaccaagttccaaaatcatggaaaggaatctgccaaaccggagttgcctttaactcttctcactgtaaccggaaaattattggagcgaggtattacgtgaaagggtacgaaaagatattacngagcgttcaacgctacagcaaacaaagacttcttgtctccaagagatnccgacggacatggggtcccacacagcttctactg

SEQ ID NO: 12596 - DNA, 421 bp, Arabidopsis thaliana
  unsure at all n locations
  Clone ID: LIB25-063-Q1-E1-H12
acccacncgtccggcaaagaaaacagaccaacatggaagatcggtgcttgatcaagaacgatatcactgaattgattggtaacacaccaatggtgtatctgaacaatgttgttgatggttgcgtggctcgtatcgctgcgaagcttgagatgatggagccttgttctagcgtcaaagacagaatcgcgtatagtatgatcaaagatgcagaagacaaaggattgattactcccggaaaggttaatatgaacatttaaagttatcataaaagtttctccataatttataaagaatacatagatgngaatttaattgtttttgattanagagtacattggatagagccaactgctggtaacaccggggattggtttancttgcatggggangctgcnanangctataaantggattcntgngg

SEQ ID NO: 12597 - DNA, 309 bp, Arabidopsis thaliana
  unsure at all n locations
  Clone ID: LIB25-063-Q1-E1-H2
gtttcgtnnccggcccggtcanannaacgggtccanccncgcgtcngaccacacgtccggaaagcggctgcggctgcggctgctgcttctggatctaacaacgcctgattgaagaaatcacactccgatatcaaattcaatggagatcacagttttgaaattcatttgatggtaataaagattctatagaagacagaaaacattatgtaaacagttgttttttttttgtcaaacatttttgttgtcagttaaaaaaaaaaaaaaaaaaaaaaaaaaaaaaaaanaaaaaaaaaaaaangganaannnnc

SEQ ID NO: 12598 - DNA, 449 bp, Arabidopsis thaliana
  unsure at all n locations
  Clone ID: LIB25-063-Q1-E1-H4
nncccggccggtnnanatctaacgggncnangcncncgtccgatttcantctctccgtggagcaccgctcatctttcccggagctgtagtcagtgaggtgaccggactaaatctccgccatggaatctcgaaacgacgaggaggcgccgttgatctctgcctctggtgaggatcggaaagtcagagctggaaagtgctacacaagggatgttcatatcctcagcatctcctttctgctaatcttcctcgcttacggtgctgctcagaacctcgaaactaccgtaaataaggatttgggaacaatctctctggggataatgtatgtgtccctcangttttgctccaatgggtgcntcctttggntgtcccggntaatgggatttaagaaatgccccggntttaagaacnaacggggtaaatggnncccttgttgccgcgaatctnnancc

SEQ ID NO: 12599 - DNA, 414 bp, Arabidopsis thaliana
  unsure at all n locations
  Clone ID: LIB25-063-Q1-E1-H5
ctcctcctcctccactatagctgcctgtattcgtcttctctatcaccctcgttatctggatctgaaatattaggtgatacgaagccatgacagtttcagaagcttatagtccacctctgttcagtatagccccgatgatgggatggacagacaatcattacagaactctagcgcgtcttagaacaaaacacgcatggctctacactgaaatgttagctgctgaaaccattgtctatcaagaagataacctggacagctttttggcattctctccagaccaacatcccatcgttcttcaaattggtggaatgaaacttgggaaaatttggctaaagcaaccangacttgctaatgcttacgcctatgatgaaattaattttaactgtggatgtcctaancccanaagtaagtggg

SEQ ID NO: 12600 - DNA, 411 bp, Arabidopsis thaliana
  unsure at all n locations
  Clone ID: LIB25-063-Q1-E1-H7
tcaacgttgcgaatccaactactggatgccagaagaagctcgagatcgacgatgaccagaaactacgtgcgttttacganaagagaatctctcaagaagtcagtggagatgctttgggcgaggagttcaaaggatacgttttcaagatcaagggtggttgcgataagcaaggtttcccaatgaagcagggagttttgactccaggccgtgttcgccttttgcttcaccgaggaactccttgcttcagaggacatggnaggagaactggngagaggagaanaaagtctgttcgtggttgcattgtgagccctgatctctctgttcngaaccttgtcattgtgaagaanggtgngaacgatcttcctgnggctacccgatactgatangccacgaatnaaagganccaangng

SEQ ID NO: 12601 - DNA, 65 bp, Arabidopsis thaliana
  unsure at all n locations
  Clone ID: LIB25-063-Q1-E1-H8
aagctggcnccttggtgttgaggacctctaacatcattgncttcgacacggtgcccgcagattgc

SEQ ID NO: 12602 - DNA, 423 bp, Arabidopsis thaliana
  unsure at all n locations
  Clone ID: LIB25-063-Q1-E1-H9
tttcccgtcgtctctgaattttccctttttctcttcttcactccaccgccttccccgaatcacttcctctgcctgatctaattcaatctccttcctagctcaaagaagtcaatttacacgagcagatctctgcactcaaaactcctggatcttcatttctgggcttcaatttagagtttttttatattaaatgggttggagatacaaagctggtctgttcttgattggcactgttgttatcatatgggtcacctccgctgaagttactcaggatatctttacaagcctataagcaagccatttgcaagtcacatatcttggagcttctcttaatgattgtttaccttcccgttgcattcctcaaaagactggctttgtcgatatttagattgacgctccttccaaaatccaaanaaaattccg

SEQ ID NO: 12603 - DNA, 432 bp, Arabidopsis thaliana
  unsure at all n locations
  Clone ID: LIB25-064-Q1-E1-A1
aagaaagcaaataaaatctagagaagcttgtttctagggtttcgactctcgacggccggtacgatttttcaactgcttgttctaaggaatcatgaagcctgtcttttgcggaaactttgagtatgatgctcgtgagagtgatcttgagcggcttttcagaaagtacggcaaggttgagagggttgatatgaaagctgggtttgcttttgtctatatggaacatgaaagggatgctgaagatgcaattcgagcgcttgatcgntttgaatatggtcgcacangacgcanactcccgtgttgantggacaanagaatgancgtggangtgccggnnanatcaggtgggtccnaggagattatcttctggctttgagaaccttcccaannacccngttngtggattaancnttcganggcacnaaaanactnagg

SEQ ID NO: 12604 - DNA, 497 bp, Arabidopsis thaliana
  unsure at all n locations
  Clone ID: LIB25-064-Q1-E1-A10
nnnnggnaactgttacgcctnncngtagncctccaaaattcanaggtcgaccgacccgtccgcacactaanatgtcaacgggacaagcgccggagaagtccaatttttctcagagatgtagtctgctcagccggtacttgaaggagaagggaagttttgggaatattaatatggggttggctcgaaaatccgatcttgaactcgccggaaaattcgatctcaaaggacaacaaaatgtgattaagaaggtagagacctcagaaactanaccgttcaagttgattcagaagttttctattggtgaggcctctacttctaccgaagacaaagccatatatattgatctcagtgaaccgggcaaaaagtagcaccgggagtctgggaaattcacaagttgaccatattcctttggagggnaaaagttnangggctttcaaccnagtttccctgaanacaatngctaacggagattactggaacgtncctnaatnaaagcc

SEQ ID NO: 12605 - DNA, 479 bp, Arabidopsis thaliana
  unsure at all n locations
  Clone ID: LIB25-064-Q1-E1-A12
gggngnnaantgttacgcctccngtagnnctccnaaattcataggtcgaccgacccgtccgcatctctaaggtaaaaaaactgagtcgagatttggtgacgtgatgaatcatttggtgataatctctgtgttcttgagctcagtattgttgttatatagaggagaatctggaatcacaagtagttttattcgatctgaatggcctgcggttgatataccacttgatcatcatgttttcaaagtcccaaaaggatataatgcaccacaacaagtacacataactcaaggtgattatgatggtaaagctgttatcatctcttgggttacacctgatgaacctggttctagccaagtacattacggtgcggttcatgggaaatatgantttgttgcctcaagggacttaccataactacacgttttacaagtataagtctggctttaatcatcactgccttgtctctgaaccttgagcaang

SEQ ID NO: 12606 - DNA, 436 bp, Arabidopsis thaliana
  unsure at all n locations
  Clone ID: LIB25-064-Q1-E1-A2
aagtgcaaggatgttggtgctacgcctggttattttgccaatgggggattccgatgatgangcaaaaccatctatttgatgcacangaatttgcctgctgtcagatgggtagggggtgttgaattagaacttatcgcaatagccacaggcggtagaattgttccaagattccaggaagttgaccccagagaagttagggaaggctggcgtggttcgtgagaaatcttttggcacaacaaaagaaccaatgctgtatattgagcactgtgcgaactcaaaagctgtcactgttttcatccgtggaggtaacaaaatgatgatanaaagagacgaaacgtagtatccacgatgctctgtgtgtggctaggaatctcatccgcaaacaaatcaattgtttaanggangtggggcaanctgaaatcnccttgcccacntt

SEQ ID NO: 12607 - DNA, 425 bp, Arabidopsis thaliana
  unsure at all n locations
  Clone ID: LIB25-064-Q1-E1-A6
tgcagagctcgagattctccttccctatacaactctcatctgtaatcgatacagatggcagcttcatcagcttgtcttgtgggaaatggtttgtcagtgaacacaacaaccaaacagaggttaagtaaacatttttccggcagacagacaagcttttcttcagtgattaggacatctaaggttaatgtagtgaaggcttctttggatgggaagaagaancaagaaggaagaagagattttctcaaaatcntgttaggaaatgctggggtcggtttggttgcaagtgggaaagcaaatgctgatgaacagggtgtttcttcgtcgacgatgtcgtantctanggtttctagagtattggntcaggataggggtgaataaaagttgatttgtntcatgaatggggactatagctanngtgggaatgc

SEQ ID NO: 12608 - DNA, 432 bp, Arabidopsis thaliana
  unsure at all n locations
  Clone ID: LIB25-064-Q1-E1-A7
tcccttaactctatctctaggtgacttaagagtaaaaaatggtagaggcagaggttgaagtagatgtggaaatcaaatctacggctgataagtttttcatgttctctagaagatcacaacatgcctccaaagccactcgctatgtacagggatgtgatctgctcgaaggcgagtggggcgaanttggaagcatactcttgtggaaattaactgttgatggagagccaaaagtgtcaaaggatatgattgaggcgattgatatgaagatgaatatgatccantggagggtgttaaagggacctctgaaggaagagtacaatattttctcgaaaacgatgaaagtaagccctaagcaaggaaggtcctggaaattgtggttaaantggnacttngaanttatganganaantnattgaaaaaggnggcnccacc

SEQ ID NO: 12609 - DNA, 235 bp, Arabidopsis thaliana
  unsure at all n locations
  Clone ID: LIB25-064-Q1-E1-A8
acaaaatcananacgaggccatcatctgtgattgaggcttanaggacactacgtnatcnaggtccttaccctgtggacaaagttgttaggagatttccatggnacagtttgcgtttatactcttcgatanacgtcaagaaaactgtctttgctgctgctgacgccaatggggaagtgtgccgttcttctggggaaccgatgctgaatggnaccttgttgttttcgngataanacc

SEQ ID NO: 12610 - DNA, 499 bp, Arabidopsis thaliana
  unsure at all n locations
  Clone ID: LIB25-064-Q1-E1-B10
ggngngnnaactgttacgcctnntgtagncctccaaaattcanaggtcgacccncccgtccgggcatttacttgcccatcatcaagtctctatcgctctcggctggaagtaaaccgaatgattcttcttcgaggaaactaggctcttacttgattcaatctcaattccagtgcgccggaaactctagtgcgcttttcttgactgctgcagctcaaaatttgctgtgtctcaagttagcanaggagcttggagtagtgatctcaaacccgtgggtttcttggtttaaggctgctantctacctgcaatcatatcacttctttgtactccacttatcctcnataangctttatcctccagaaacaaangganacnacctgagggctccaggttanttgctgcaacnnaaactcaagcaaaatggggcccctgtcaactaaaaaaccaaatggattnatggtcgggtaaaattgccntccttgnctgtcactcctttggggg

SEQ ID NO: 12611 - DNA, 425 bp, Arabidopsis thaliana
  unsure at all n locations
  Clone ID: LIB25-063-Q1-E1-H10
aggttttgcatttgcaacctttctcaaattgggttctgtgcatttccttgcactttggataataggaactaaatctctttctctggttcatcaatggcggatcaaacgaagaagagatacgttacaagcgaggatttgaaaaaacacaacaaacctggagatttatggatttcgattcaaggtaaagtttacgacgtttccgattgggttaaatctcatcccggaggcgaagcagcgattctcaatctcgccggccaagacgtcaccgacgcgttcatcgcttaccatcccggaaccgcatggcaccacttagaaaagcttcacaatggctatcacgtgagagaccaccacgttgtcagacgtctcacggtgactaccgtcgtttagccgcccgaattctccaaacgcggnctcntcgacaaaaa

SEQ ID NO: 12612 - DNA, 475 bp, Arabidopsis thaliana
  unsure at all n locations
  Clone ID: LIB25-063-Q1-E1-E10
ctgttacgcctgcccttaccgggccaaaattcccggancgacccacgcgtccgggatctgttcnataggctcgtacctctgtttccttgatttctaaggagacaggcccttaaccctggttgatgaaccatggccgtgcgatcagagcgtgattgacggctacgatcgtcttaggacgcatctggtgctgtagaggatcgttactcggctcggttctaccttgccggggtggttgcacggcggtctgacaggttccattttttttcactccttatattgtcttgtgggatgttttgagatgaccaccaaatttgatattcgagcacgatttttaaaattttacagtaatgtgggtatttcgtcccaagtcaaccactttatatgtacaactctacattccctctacgaagataagtgcatcccaataatgagcagactatgagaagctagcagaagatantcntcnttttttggg

SEQ ID NO: 12613 - DNA, 423 bp, Arabidopsis thaliana
  unsure at all n locations
  Clone ID: LIB25-063-Q1-E1-E12
ttcttcaaacttcgcgtctctgtctcgtctcaatcacaaatcatcttcgagattgcgaagctcttctctttacaaaggaagcttcttctctgtttcgacaaagaccaggaggaacacttgtaaagccaaatcatggaatctcggtcttgttatcaactctagaagctctgaggcttcggtttttgatccgttggggatcaatccagatgaaacttctggtttaagtagcatttgggaaagctttgtgagtcttttgtcaccancatttgaaagctcttcnggtaacaggcgagataagccgtcttctggtagaggcgtggcantgctantgaggacagttccattgattttggnganttcttcaaaggggncatttgccaanggaagtttctgaaagcttcctggggttttttancntctctg

SEQ ID NO: 12614 - DNA, 409 bp, Arabidopsis thaliana
  unsure at all n locations
  Clone ID: LIB25-063-Q1-E1-E3
tcattttcgtgacatacggggtttctatgtgattactgagaactttgcctttcgcgccggttctcgttgattttttttttcgatttaggtatttccatgtgagactaacatttgtggctcgtttactcgcagatcaaagggacagagaacgtgtctgggccacctactangatggataacagttctgatgaagagtcagagatcagtgagtctgagatagatgtctattatgaaaaaccttacgagaaactgatgaatggggattacaaggttaaggtgaaggacacattcaggtgtcccttttgcgctgggaagaagaagcagcattacaagtataaggagctacttgctcatgcgtctggtgttgccaaaggatctgcnaatagaantgctaagcaaaaagcaaatc

SEQ ID NO: 12615 - DNA, 232 bp, Arabidopsis thaliana
  unsure at all n locations
  Clone ID: LIB25-063-Q1-E1-E7
ttaccataacagaaaataaacaaatctcattccggaaaacgctcataaattgtccgaaagccctaaaaatctgagtctcgcattaagtccaaacactttcatttgtctcctttcgtcaactccacaagaagatctcctcatggctccaattgctgtcggcgatgtcgtaccagacggaactatctccttnctnnnagngaaaggttaaatttnaaacggctncnttnaatcc

SEQ ID NO: 12616 - DNA, 415 bp, Arabidopsis thaliana
  unsure at all n locations
  Clone ID: LIB25-063-Q1-E1-E8
agaagagaaaaanaaanaagtttgtgtaaattttttttgcacactccacagcctaaacccaacccaaaatcacaaaaaccaaaaaaatatataataatgggtggctgtgcgagtagacccaaggaatcagacatgcaaaacgaagaaggctctgttcctaacaagcctgtctctgaaaacgtagtagccaaggagaacaacacagaaagcggtgagaaacagaaccagacagtggctgagaccactgaaacaacttctgtcgaagctaaggagacatttccggtcgagccgaccaaggaaacaactcctgctgttcanccagaggttgcagccgtcgaagagtcttcttctgctgatgctggtgaggctgcagtagttgcacctgagaaagtggaagaacgctgcaacacgaaaa

SEQ ID NO: 12617 - DNA, 417 bp, Arabidopsis thaliana
  unsure at all n locations
  Clone ID: LIB25-063-Q1-E1-F1
atactactcagctgcttctgccttctanggttctttctccgttcaccctccgccgcacgagttgtccagctccgccgcattcttctgtctcccagatcaccggctttaagcaaatccggctgcttttcactctaattcgtaaaccacttgtgggatttgagcatcttttacattctccaaaatctctgctttctagggttttgtgagttttggtgggatgagtagtgtgttcagtgatcagatcctgattgataagctcgctaagctcaatagcangtcaacagtctatcgaaactctgtcacattggtgtatattcaatcgggagcaaagcagaattgatcgttacgacatgggagaaacagtttcacantacagagatggatnagaaaagtccctcctttggtattttggncnaa

SEQ ID NO: 12618 - DNA, 487 bp, Arabidopsis thaliana
  unsure at all n locations
  Clone ID: LIB25-063-Q1-E1-F3
nnnnnnnnngnaactgtttacgttgnccnggcccggtccaaaaattaacgggtcgacncacgcgtccgatcaanatgggagtgatgagtttgagcaagacgatggtggtggtggtattacaggtgatgatattgttgggacaagagattggtaaagtgtcgtcgactctatacaaagttggggacttggacgcttggggcatcccaattgatgctaaagtctattccaaatggcccaaatctcactctttcaagatcggtgactccctcttgttcttgtacccaccaagcgaagactcactgattcaagtgacgccctccaatttcaagagctgcaacaccaaagacccaatcttgtacatgaacgacggcaactctctcttcaacctcacccaaaacggaaccctatacttcacaagtgcaaaccccggccactgtaccaagtaccanaagctcctaantctccgttcggaactantccgccgaaa

SEQ ID NO: 12619 - DNA, 418 bp, Arabidopsis thaliana
  unsure at all n locations
  Clone ID: LIB25-063-Q1-E1-F4
agnaaaaaaagaacggcttttnccaaaaacctaaaatccccccccccgggttcaattncccgaacaatgggcgtcctaatggtcaaccaatcgccctaactttccccgggcgctaaaatctccgggcgttcttctctgattcgtccgccttcttccgttcgatttcctcttaagtgtaacgcggcggatccgtacaagttcgacggcggaaactctgccggtttccatctgcttactggcgacaccgttccggctagcttttcgaggacacgtttggaagattcgatttatcaagaacaccacacgacttcgtatcttttccggcactgctaatcctattttgggctcaggagatttcttgctatttgggtctgggaccttgggaaaatcaagattaaactctttgctgatgggtgag

SEQ ID NO: 12620 - DNA, 414 bp, Arabidopsis thaliana
  unsure at all n locations
  Clone ID: LIB25-063-Q1-E1-F7
ttttattcaaagaaaatacttaactttcttttcactaaagctattcgaaaatgtcaagcaactcccagaacattagcttccaagctggccaggccaagggccaaactcaggagaaggctagcaccatgatggacaaggctagcaatgctgcccaatctgccaaggagtctctcaaagagaccggccagcagattaaggagaaggcacaaggagctaccgaatcagtgaagaacgccaccggcatgaacaaatgaatacaataatcatatgattcattatgttattttttttacgaataaaaacaataantcattttttgaaaccctaaagattaggttcaacngtttgattattcagactggttgtttctttctttcttaatantattacttcntcccctgggattttggttct

SEQ ID NO: 12621 - DNA, 418 bp, Arabidopsis thaliana
  unsure at all n locations
  Clone ID: LIB25-063-Q1-E1-G10
ccttgctttctcagctattcttagcaataagaaacaatataatcctgatttttacaattggaatagagtgaaagttagatactgtgacggggcatcattcacaggagatgtagaagcagtgaaccctgctactaatcttcacttcagaggtgctcgagtttggttagccgttatgcaagagctgctagctaaaggcatgataaacgccgagaatgctgttttgtctggctgttctgctggcgggttagcttcgctgatgcattgtgatagtttccgtgctctattaccgatgggaaccaaagtaaaatgtctttcagatgctggtttttttctcaacacaagagacgtctcaggaagttcantacattaangacatacttcgaaagatgttgttactcttcatgggatcaacaaagaa

SEQ ID NO: 12622 - DNA, 409 bp, Arabidopsis thaliana
  unsure at all n locations
  Clone ID: LIB25-063-Q1-E1-G11
gcgatttctaccatctctaaatctcaaccgtccgatcaaacaacttacacaacttccgtgctggagaaataaaaaaattaggtatttaataattcatcattgccattggattgtgtgtggctgcgtcagtaaaacgtattcttaaaagcaaccattggtgtgattgactctatangagaattcgtcagcgtgaagcaatctccaatctaatcgcagcatagcttctccgantcctantcgtctctgcaattgaatcttccggtaggcgaanatggcgacgtntgcgaggatttgttgcgggacgaggaaatgcatgcgccgttcgttgtgatcctcncacgtnaaanttgaantcgncgatcgtnatgtgttgttccagttgaccaaatcnacggaatatgtgtgngat

SEQ ID NO: 12623 - DNA, 85 bp, Arabidopsis thaliana
  unsure at all n locations
  Clone ID: LIB25-063-Q1-E1-G2
gnaatttacagttcatgcaagtcgatattttgcnactacgcaagcatnagatctgataggagacatgttcacatcatccggtgtc

SEQ ID NO: 12624 - DNA, 490 bp, Arabidopsis thaliana
  unsure at all n locations
  Clone ID: LIB25-063-Q1-E1-G3
nnnnnnnnngnaactgtttacgctngnccgnaccgggtccaaaaattnccgggtcgacccacgcgtccgntcacacaaaaatggcgtctcttcttgggaacatcttcttctgcaatctggggcttctccttcactctcttctccttcctcaaaaccttcctcctcccccatttgcttcaggccaggaaaattgtttggaagcaagttaaatgcaggaatccaaataaggccaaagaagaacaggtctcgttaccatgtttcggttatgaatgtagccactgaaatcaactctactgaacaagtagtagggaagtttgattcaaagaagagtgcgagaccggtttatccatttgcagctatagtagggcaagatgagatgaagttatgtcttttgttgaatgttattgatccaaagattggtggtgttatgattatgggagatagaggaactgggaaaatctacaactgttaagatnattaattgatctgt

SEQ ID NO: 12625 - DNA, 415 bp, Arabidopsis thaliana
  unsure at all n locations
  Clone ID: LIB25-063-Q1-E1-G4
acttgcagcagaanttncacctttgaaggngcaaaaaaaaaaggaggtacaatcctncagggangaaaccaaganccccaagtcacaactaagagatactgctgaagctgttcaagcagcangagagttacttgttcgatttaaagaagctgaagaaggattgacatttgcacanaaacgagcaatggatgcagagtatgaagcatcagaagcatataaaaaggtggacaagttgaagaggaaatacgaaaccgaaatcagcactgtaaaccaacaacataatgcagagccacaaaatcccatagaatctttgcaagcttcttgtaatgacgatgctatggccaaatatgatgaaccatcagctagtgatggtgataaccaatggagagaagaattccaaccattttacaagaaa

SEQ ID NO: 12626 - DNA, 418 bp, Arabidopsis thaliana
  unsure at all n locations
  Clone ID: LIB25-063-Q1-E1-G6
ctgctcctttagtcatcttctcttttgagaaaagatagatcttcttcaccttcttcattgatctcagatcccgatcccgtctccttatcttccgccggcgacttcttcatttttctcttctacctaccacctcttaatcattctctctccccccgcagatctagcgaatcgaattcgaatccttaagtagtagtggaatcatggngctaagcatgcgaaaagcgatcggagttgttaaggatcagactaagtatcggcatagcgaaggtagctagcaacatggctcccagatctgggaagttgcgatcgtgaaagctacaangccaacgacgaagattaantctantgacaagttatatccggcgaagattccntaagctaaacttnactctccggtggctacgtttnacgccngtgg

SEQ ID NO: 12627 - DNA, 273 bp, Arabidopsis thaliana
  unsure at all n locations
  Clone ID: LIB25-063-Q1-E1-E1
angcaaacnatctcgaaagcttcntctgcnancnccntttttcnatgttctaagaagctatcaaaccagccatgtgtganacagcttaacanaagaaagagtcttgtgtgcagagtgatgaagctggtctcttcacctcttaggacttgtgccatggtgctggtaaatctatccgagtttcaaagttctngcaagtgtcctccaatgtctcctcantgcaaattgaactgggttgcctttgccttaaggataactatgcttatatccttgcnt

SEQ ID NO: 12628 - DNA, 408 bp, Arabidopsis thaliana
  unsure at all n locations
  Clone ID: LIB25-063-Q1-E1-H1
ggacgaggaagacaagagatccatacatcattgtcaaagctagggatttgattaagcttctttccagaagtgtccctgctcctcaggcaattaagattctcgaagatgaggtgcaatgtgatatcatcaagatcggtaacttggttacaaataaggaaagatttgttaaaagaaggcagcggcttgtgggtcctaattcttctaccttgaaggcgctggaaatattaaccaactgttacattctagttcagggaagtactgtagccgctatgggtccatttaaaggtctcaaanagctcanaaggattgtggaagactgcgtacagaatataatgcatcctgtataccanataaagactctcatgatgaaaaaagaactggngaaaggatncaactcctggaaatgag

SEQ ID NO: 12629 - DNA, 425 bp, Arabidopsis thaliana
  unsure at all n locations
  Clone ID: LIB25-062-Q1-E1-B2
gcaatcagaaaggctgtcggggagaagataattccttcaacggataatcgaaagcagtatcacagtaaagctcagcgagtaagattgtctttgctctttttgagaaaatctcatgttgttactatgatataacgttgcagaagcatgaagacatacatcagttttttccttttttcttgagcgaaactaggaaggacaaaatacatttaaatgatcttataaggcactttactccatttatacctttttgtactctcgtttccctttcagttttgaatataatgactttgatgtttttttgctgtgcataacaggaaatatttgaaaacaacaggaaagacataactgtggccatgatgaanaattatccacagcttctacgttaaattcatggctgacaaagcaaaagtgtcatcctttggtcg

SEQ ID NO: 12630 - DNA, 322 bp, Arabidopsis thaliana
  unsure at all n locations
  Clone ID: LIB25-062-Q1-E1-B6
gaacccatgtttcgtttcgttttggaaagataagagagataaaggtttcgacttttttaggtttttctgtgtgttttgtgattcatttcgctgattgatatcaattctctctgtttgttgtcccttctcttcaatttcacctgacttttgtttttgttttggataaagttttcacctttgtgtcttctctctgctctcttgtgtgatctatctgaaaaagggctgatttttttttggtgggttncnaaatnagggttngtgtaagttnatngccttncnnatccaatgaaantnaanantnatanaggatcgttaaantgat

SEQ ID NO: 12631 - DNA, 413 bp, Arabidopsis thaliana
  unsure at all n locations
  Clone ID: LIB25-062-Q1-E1-B7
gatacaacttacatacatacacgtcttccacaagactcaaactccacagcatgggattctcacggtcgctcaaccgcaccgtgggcgtcttcgtcttcttcatcctcgacattgttgatttcctgctttgctttacctacaagactcttgatttcttcttcgagtccgagtggaaaccctgctactgctgtccgccgcccgaggccaaaccaatctcggctggagggaacagaggcggtaagatgatagtgtcggaaagatcaggagactactcgaaggtggtctcactcacaaggacaaagatctatctggatgagatctccgacacactctactctcgcccttcactcctcaccaagctcactaagctggtgaagttgcttcaaagaaagatgttgttaaatngctgttga

SEQ ID NO: 12632 - DNA, 440 bp, Arabidopsis thaliana
  unsure at all n locations
  Clone ID: LIB25-062-Q1-E1-B9
atctcaatggctcttaacgtgagcaaggttgttcccaatagtccaattttagttaagagtgttaatgcttcaagatctcgaagagttctgttggcgtatgttcatcatcctttagctgctaataagggttcatctattgaagagttaaagcaaggtctttgttgtacaaagactgtcacttttgttagttctcggagatgttctacattgtgctttgttggaaagtctcaagacactgaaactaattcccaagttgtacaaaaagaaggtgagaagcaagtgatgccgaggaggaaaagtagtaactcaagccaacttttggtggaatatgtgtctaatgatgctaagtttgtgaatgaaaagagctcgtaatgactttgttcctctanctcgtggnaattatgagacntgaagccncgtgcaccacaaaggatgttncc

SEQ ID NO: 12633 - DNA, 445 bp, Arabidopsis thaliana
  unsure at all n locations
  Clone ID: LIB25-062-Q1-E1-C10
cggtgaacaatcaatctcgaagaagacgaacataaaattttcaatttctctgtaatcttcgcttcttgcgaaaccaattctctatgtcaggtaatcaagaaccaatcttggtgaaagaagagagtgtggttggtataccaacaccactcttgaagcttaaaagttggcaatggtgggttcttgtatccgttaacatctttttccttattggtggtcaagctgcttcggttcttcttggtaggttttactatgatgaaggtggaaacagtaaatggatggcaactcttgttcaaacggctgcttttcctatactctatatcccgcttttgctacttccgtcttcgggctaantgtanagtcctcgggagagttcgtgttcactcaaagtacattggtttgatcnaagtttttgcnccggggtggatcaatgccgggnaanaanatg

SEQ ID NO: 12634 - DNA, 444 bp, Arabidopsis thaliana
  unsure at all n locations
  Clone ID: LIB25-062-Q1-E1-C12
ggagcatgtattcgactttgtaacatctcacaaagacaggaatgctatatctcttgtatgcaaatcatggtacaagattgaaagatacagtaggcaaaaggttttcattggaaactgttatgccattaatccagagaggttgcttcggagattcccatgtctaaagtctttgactttgaaaggaaaacctcattttgcggatttcaatttggttcctcatgaatggggaggttttgtgctaccttggattgaggctttggctagaagccgtgtaggacttgaagagcttaggttgaagaggatggttgttactgatgagagtcttgagctgctttctcgttcttttgtcaattttaagtctttggtccttgttaactgtgaanggtttaccactgatgggccntgcctcctaatgccgctaaatgcaagnaacctccgggattt

SEQ ID NO: 12635 - DNA, 391 bp, Arabidopsis thaliana
  unsure at all n locations
  Clone ID: LIB25-062-Q1-E1-C2
atttcgattctcttgctcgtaaaagcttcttttgattctctttgactctgttttgtggatagctcctgaagaagaagaagatgatggtagtgaacagctttgatctatggcaaaaagatgttttcttctctgcagctgaagaggttcaaaaatctacagatataatggagtctgcttatagattgtggattagagagaagaaagatgagatttgtaaggaacttcaagcagctttaggtacagctaaatggcagttggaggagtttgagaaggcagtgagattgagtcataaacggtgtggggataatgattcttcatccacacggcataaacagtttgttaccgctattgaaaaccaaattcatccgcgtagaaacttctccgcaaanaa

SEQ ID NO: 12636 - DNA, 408 bp, Arabidopsis thaliana
  unsure at all n locations
  Clone ID: LIB25-062-Q1-E1-C6
agaggtatgcttatactttccagaactatgtgtttgtcactcggctgatgcaggagaaagagtctgcttctggggttaaacctctcaggttgatggaaaggagtgtcttcagtgaccgaatggtgtttgtgcgtgcggttcatgaagcgaaatggatgaatgagatggagatcagcatttacgactcttggtttgatccggttgtctcttctttacctggacttgttcctgatgggtttatatacttaagggcgagtccagacacttgccacaagcgaatgatgctcaggaaacgagcagaagaaggcggagtctctctgaaatacctccaagatttgcacgaagaagcacgagagctggctgcttccctttgagagcggaaaccatggtgtattgtcngttantaag

SEQ ID NO: 12637 - DNA, 423 bp, Arabidopsis thaliana
  unsure at all n locations
  Clone ID: LIB25-062-Q1-E1-D10
gaaaggggtatgcatttgtaacattcagaagtaaggacttagctgctgaagcaattgatactctaaataacactgacttcagaggtaaaaggataaaatgttcgactacccaagcaaagcatcgtctctttcttggtaatgtccctagaaattggatggagtcagacattaagaaagcagcaaatagaattggtccaggcgttcaaattgtcgaactcccaaaggaaccacaaaatatgggccggaatcgtggatttgctttcatcgagtattacaaccatgcatgtgctgaatactcgaaacaaaaaatgtcaaatccgagttttaagcttgatgataatgccccaactgtaagctgggctgaatcaaggagttgangaagaggagaatcctccggcttccaaggtcaangnantgttcaac

SEQ ID NO: 12638 - DNA, 439 bp, Arabidopsis thaliana
  unsure at all n locations
  Clone ID: LIB25-062-Q1-E1-D11
tttgagccgaagctggaaaagctcatcaaccagttgagggaagttggtgaagagatggacgcgtggctaactgaccatttaactaatagattttcctctttggcttcaccagatgatctattaaatttctttaatgacatgcgaggaatacttgggagccttgattcaggagtcgtgcaagatgatcagattattttggatcccaacagcaacttgggaatgtttgttcgtcgttgcattttggcattcaaccttttatcgttcgagggagtttgtcatcttttttcaagtattgaagattactgcaaagaagcccattcaagctttgctcagtttggtgcacctaataataatccggaggtcattaatacaatatgatcagatggatatggnggaattatgcaatgggtaaaccaactgaaagaaatanagtttcang

SEQ ID NO: 12639 - DNA, 439 bp, Arabidopsis thaliana
  unsure at all n locations
  Clone ID: LIB25-062-Q1-E1-D12
catctctcaggtaaaaaaactgagtcgagatttggtgacgtgatgaatcatttggtgataatctctgtgttcttgagctcagtattgttgttatatagaggagaatctggaatcacaagtagttttattcgatctgaatggcctgcggttgatataccacttgatcatcatgttttcaaagtcccaaaaggatataatgcaccacaacaagtacacataactcaaggtgattatgatggtaaagctgttatcatctcttgggttacacctgatgaacctggttctagccaagtacattacggtgcggttcangggaaatatgagtttgttgctcaagggacttaccataactacacgttttacaagtataagtctggctttattcatcactgccttgtcccgaccntgagcatggtacaaaatactaatnccaggnttg

SEQ ID NO: 12640 - DNA, 392 bp, Arabidopsis thaliana
  unsure at all n locations
  Clone ID: LIB25-062-Q1-E1-D2
aacagatccgaattttatctttaatcagccggaaaaaatggagaaagcgatcgagagacaacgcgttcttcttgagcatctccgaccttcttcttcttcttcgcacaattacgaggcttctctatctgcttctgcttgcttggctggggacagtgctgcatatcanaggaactctctctaaggagatgaagttgtcattgtcccngnacatangactccaatatgcaaagtccaaacgtggnaatttcaaggntacatatcccgaatgatttgctcgcaaccggtttgaaggcaattgatnnanaaagacgaatncaaaanccaagtgaantaagngacantggtgngggtaacgttttggnnacctgggantccaanaannccanttaaat

SEQ ID NO: 12641 - DNA, 421 bp, Arabidopsis thaliana
  unsure at all n locations
  Clone ID: LIB25-062-Q1-E1-D4
tggatcagttcaaaggtgagcctcgtctacccaagttcgccgtccccaagcgctacgatctccgcctcaatcccgatctcatcgcctgcaccttcactggaactgtagccatcgatctcgacatagtcgccgatactcgtttcatcgttctcaacgcagctgatctctccgtcaacgatgcctccgtttccttcactcctccttcctcctctaaggcgcttgcagctccaaaagttgtcttgtttgaggaggatgagattctcgtgcttgagtttggtgagattcttccccatggagtgggagttctgaaacttggtttcaatggagtactaaatgacaaaatgaagggattctacagaagtacttaatgaacataacggtgaagaaagaaagaataatgggcagttaccaantttgnaac

SEQ ID NO: 12642 - DNA, 418 bp, Arabidopsis thaliana
  unsure at all n locations
  Clone ID: LIB25-062-Q1-E1-D7
tcgtagggttttactctctcacctccgccgatctcaccacacttgctcctctctctctcctcaccatgtctccgccacaacccaaccttcaatcgcgctcgctcttttccaatcccgcttcttttccactccatctgacctagattctgagctaactcgattcagagacgattcaatcgctggcgttggaagcaatgatcatggcttagagttcgacgattcaatcgctagcttgggaagcaatggtcatggcttagagttcggcgattcaatcggtagcttgggaagcaatggttatggattagagttcggtgacttgagccaggatttgtcaaactatgattacttgactcaacctgtgatctcgttgcttgattcataccatgacatcactggattgccttggtgggtnggttaa

SEQ ID NO: 12643 - DNA, 434 bp, Arabidopsis thaliana
  unsure at all n locations
  Clone ID: LIB25-062-Q1-E1-D9
cttcttcctttcctgaataagttttctctacgcgttcgctggtgatattcttctaaacgcgtctctgatttgtttgaatcgatcatcgttccttcttctggattttccatcgatatttgatttttctagggtttgtttctaaattgcatcgatggctttttatgttcatgcgatttacttttccctctgttattctagattgttgttcgatgatttgatcgttcagggatggatttgatggatcttatgttttcacggggcttctctatgctgctacgtcttcagggggtgttcttcttccttacgcgtctctganttttgttttctncnctacgtttcttaatcgtctcgtctcgcagtttttttggaagctaattatgatccgatnatcgctttcgaatcngttggttggtagantgtggaagaagncaana

SEQ ID NO: 12644 - DNA, 439 bp, Arabidopsis thaliana
  unsure at all n locations
  Clone ID: LIB25-062-Q1-E1-B12
ggaaaaaacacaaggaaaaaaatggctcaattggctgctttgtcgggaaagcaagctgatgagtacttgaacgcaaggccgaaatatcctacaatatggtacaaagtgttggctggtcgaaccagcaaccataaggtggcttgggatgttgggaccggcaacggtcaggctgctattggggtcgctgagtactaccagaaagtggtggcaactgatataaatgaatcacaactccaacgtgcaatgaagcacccaaaagtcacttactatcacactccatcatcaatgtccgacgacgatctantgactctactcggtggngaaaactccatagatatcataatagccgctcaagctcttcactacttcgacctaaagagattctaccccatantgaaacntgttcttcgnnaacaanggngtatcaccntantttggg

SEQ ID NO: 12645 - DNA, 430 bp, Arabidopsis thaliana
  Clone ID: LIB25-061-Q1-E1-H2
cctccgggagaaacaattcagagtcgtcaacgaaggagaattcggtgaatacatcactgagtacgacgcaagttacagattcatcgaatcatcaaaccagagcttcttcacatcaccattccagctcttgttttacaacactacccctagcgcctacatcttagctctccgagtcggactcaggcgtgacgagtctaccatgcgttggatatgggacgcgaatcgcaacaaccccgtcggagaaaacgctacactctcactcggccgtaacggcaacctcgtcctcgctgaagctgacggacgagtcaaatggcagactaacacagctaacaaaggcgtcaccggattccaaatcttacccaacggaaacatcgtcctacacgacaaaaacggcaaattcgtatggcaagagtttcgatcaccccaccgg

SEQ ID NO: 12646 - DNA, 430 bp, Arabidopsis thaliana
  Clone ID: LIB25-061-Q1-E1-H4
ctatataatggacaaatctggtataatgtaaaatagggacttgacgcagatcttgttgggtctcgaaccttcctcttcgtttgcatcaggaaagagcgagaatggcgggaggaggaaactttattgcgagagtgatctcatacgttgcgaacgagttcatagttaatggtttggcaaacagccatgctttccagagatttgctgtgaggacttcaaagagaatagaaaacctctctaaaatggctgcagagaacagggagaaagtcgctcagcaaatggaagaatttgccaagaacattgactccacgaagaaaccctgatcattcctagtgtggaatcctaaaacctcagtaaatcacatgggtcagctcaagtagggaagtccgtttatctttgtataaagaatgttaaaaagtaataagcttgtgga

SEQ ID NO: 12647 - DNA, 386 bp, Arabidopsis thaliana
  unsure at all n locations
  Clone ID: LIB25-061-Q1-E1-H6
ctggattcaccaaatggaacagggattcgtcacggaaaagcagcttctgctcttgagctagctcaagcctattctcctttctctgaccctaaatctggaattggaagcagcaacagttttaacaaaagccgcaacaaccaaacgcagcagcaacccttctctcggttggtaggatcgacaacaacaggaagacagattaatgggtactgagtcatcgttcgtttgttctctcgaattggttttagtcccgattaattggatcttaataacacatcttatgtggtttgggatcgttattggagatttgaatgtgatatgttcccttanaaaannanangnnnannnnnnnnaaaaaaaaagggnggccgctctanaggatcaagctt

SEQ ID NO: 12648 - DNA, 428 bp, Arabidopsis thaliana
  unsure at all n locations
  Clone ID: LIB25-062-Q1-E1-A1
gnacagggttttgggcggtcccttctgaagcgaaagttgccatggttggacgatggaaggtaggacctggaaagtcattatttgatgccatttccaaaggcgttgggaagatcaaaatcatagctgaagatttgggagttattactaaagatgtagttgagctgaggaaatctatcggagcacctggaatggccgtcctccaatttgcttttggaggaggcgccgataacccacatttacctcacaatcatgaagtaaaccaagttgtatactctggaactcatgacaacgacactattcgaggctggtgggacactctggaccaagaagaaaagtctaaggcaatgaaatacctgtcgatagctggagaagacgatatatcatggtcagtcatccaagctgcattctcctcaaacgctcaaaacgca

SEQ ID NO: 12649 - DNA, 433 bp, Arabidopsis thaliana
  unsure at all n locations
  Clone ID: LIB25-062-Q1-E1-A11
acaagtttgactcagttgacaaaaacagaccaggggatcaaagtcatatcgtcccatggggaggaattcgtggcagatgtcgtcctatttgctactggcagaagtcctaataccaaaagattgaatttagaagctgttggtgttgaacttgatcaggctggagctgtgaaggttgacgagtattcacgaactaatatacctagcatatgggctgtangagatgccacaaaccgaattaaccttacacctgttgcgttaatggaggccacctgttttgcgaacactgcttttggtggaaagcctactaaagcagaatacangcaatgtcgcctgtgctgtattttgcataccaccactagctgtagtgggtctcaacnaaagaagaanccgttggnacaagcaaaccgggnganaaatcnnggncctccccccc

SEQ ID NO: 12650 - DNA, 430 bp, Arabidopsis thaliana
  unsure at all n locations
  Clone ID: LIB25-062-Q1-E1-A12
aaaagtaggtagattatgaatctttctgggtttgtagtgagtttataggaaattcctttgtctagtgttccaaaatttgagtagatcttgaacaactttgcaaatcttgttgatcgatatgtttgggaattgaaaatttactagattttgaatttctgaggttttgtgtaagcagttgaatgaagcagtaggtggttgagtcatgtttggtctgtgatgtcctgtcacacgcatcacatgaaccttggctttggatttaacggccgttgttagtattaggctaattattaacatggcttttgttcattgtagttaattttcacagagtaaagagattttgatacattggacccaaagtgcaattttcaaaaatgttccctggaaaaantcctcccaaaaccgaacaagagcanaaaaganggcancccca

SEQ ID NO: 12651 - DNA, 422 bp, Arabidopsis thaliana
  unsure at all n locations
  Clone ID: LIB25-062-Q1-E1-A2
tctctctccctcattctcttccatgtcctcctctctgttattctttagctaaacacccacaattctggccttctctgatgcctctttaagccaatttgtatctctgcttccttacaagatatatctgaagcttaaagggcagtgacaatggctggctcggttaacgggaatcatagtgctgtaggacctggtataaattatgagacggtgtctcaagtggatgagttctgtaaagcacttagagggaaaaggccgatccataagtattttgatagctaacaatggaatggcggctgtgaagtttatacgtagtgtcaagaacatgggcttatgaaacatttgggtacggaaaaagccatattgttggtggggatggcaacccctgaaagacatgcggattaatgcggagcatatcaanaatc

SEQ ID NO: 12652 - DNA, 408 bp, Arabidopsis thaliana
  Clone ID: LIB25-062-Q1-E1-A3
tctgtttactataaagcagtgagtagaagaacctgaaagaactcgcctttgtctctcattcttcttctccatttcgaaaagaagatgaaggtgatagataagatccagtcattagccgacgaaggcaaaacagcgttttccttcgaattcttcccaccaaagacagaagatggagtcgacaatctctttgagagaatggatcgaatggttgcttatggtccaacgttttgcgatatcacttggggagctggtggatctaccgcagatctaacgcttgatatagcttcgaggatgcaaaacgttgtttgtgttgagagtatgatgcatcttacgtgtactaacatgcctgttgagaagattgatcatgctcttgagactattagatctaatgggattcaaaatgtgctt

SEQ ID NO: 12653 - DNA, 415 bp, Arabidopsis thaliana
  unsure at all n locations
  Clone ID: LIB25-062-Q1-E1-A5
gaagtttgatttatttagagagataagttaaaaaaaaaatggtcggtatggatttgttcaaatgtgtaatgatgataatggtgttggttgtctcttgtggtgaagctgtttctggagctaagttcgatgagctttatcggtcaagctgggctatggatcattgtgtcaacgaaggcgaagtcacaaaactcaagcttgacaattactctggagctgggtttgaatcaagaagcaaatacttgtttggtaaagtctctatccagattaagcttgttgagggtgattcagcaggaacagtcactgctttctacatgtcttcagatggtccgaaccacaacgaattcgattttgagttcttagggaacactaccggcgagccttacatagtccagaccaatatctacgtgaacgggng

SEQ ID NO: 12654 - DNA, 418 bp, Arabidopsis thaliana
  Clone ID: LIB25-062-Q1-E1-A6
aaaaaaaaactctccgactcggaagaagagggagagagatgaagaagccggtcggagccgagaagaagagggttaaacgatcatcgggatctgcatctacttccgttagagattctggttctgattctcaacctaggaagcaagctgtgaagaaggatagttttcagttgtttgctgagaaagttagagaccacaagggattagaatccagatgggctgttatggagcaagcacgagttgaatactttagagggaaagattttgtgagctttatgaagaataaccctgactttaaagatattctggaagaagataaagaccttgacacagacgatattgccaatgttttgttgggaaagaaccttttggtccgctgtgatcgtgttactaaaactcttcgtcccgggaagaaaaagct

SEQ ID NO: 12655 - DNA, 403 bp, Arabidopsis thaliana
  unsure at all n locations
  Clone ID: LIB25-062-Q1-E1-A7
ttctgagagttttaggaaaaaatgtcgtctttgagcagagagttagttttcttaattctccagttcttagatgaggagaagttcaaggaatctgttcacaagctagagcaagaatctggcttcttctttaacattaagtactttgaagagaaagctcttgctggagagtgggatgaagtggagaagtatctttctggtttcactaaagtcgatgataatcgttactctatgaaaatcttctttgagattaggaagcaaaagtatctcgaagctctagatcgaaatgacagagcaaaagctgttgagatattagccaaagacttgaaagttttcgctacatttaacgaggagctttacaaggagattactcagctgcntactctggagaattttagggaaaatg

SEQ ID NO: 12656 - DNA, 417 bp, Arabidopsis thaliana
  Clone ID: LIB25-062-Q1-E1-A8
cctctcttctctctcccgccacccccaccgccacctccgccgcatttcattcctgctccaccgccggattctccactcccactcacatttcatcccagaacagcagcctgtccctcctcagccgccggggttgtatgatgagatgcagtttttctccgcaggacattcctgttgattccctctctcatctccctcctttccttgactttcagaactccctcgccacattttcggatacccagaaatgggggttctttgtctccgccggaatcgtctggttttacctcacggcgaggcctggtgttctcatcggcgccattgacgcctaccttctcgctcccctccagcttggcctcgacactctgattggaaggaggttgaaagaagtccgatttctcggaaagcttttgttcgccg

SEQ ID NO: 12657 - DNA, 439 bp, Arabidopsis thaliana
  unsure at all n locations
  Clone ID: LIB25-062-Q1-E1-A9
gaaaaaaacatcatttcttctcgcactcttcacctgctccaatggacgaaagacccgagacagagctaatatcaataccaagccacaccacgagtttcaacaccggagattctaactccctccggtcaaagatcacctcgtccggncaccaaaccatcgtcggggacatggactccgacttcgttcanatcaacgaggntcttgagtccgattggnacaccaatgaaacgagttcttgtgaacatgaaagggtatcntgaagaagttgggcatctcactaaagctaaacccacaagatgcttggnttccaatcactgaatcncgtaatggganacgctcaantacgctgcntttcacaatctcaaagctggtgttgggtttcaagcccctggtcctcccgtcccggtttgngtttccttggctnggagtttggggnaaa

SEQ ID NO: 12658 - DNA, 421 bp, Arabidopsis thaliana
  unsure at all n locations
  Clone ID: LIB25-062-Q1-E1-B1
aaaccctagacctaagggttttccagttttcgattcctcgaatatgagtttaccaagctccgatggatttggttcgattccggccacgggacggaccagtacggtgtcgttttctgaggatccgacgacgaagattcggaagccgtacacaatcaagaagtcgagagagaattggacagatcaagagcacgataaatttctagaagctcttcacttattcgatagggattggaagaaaatagaagcctttgttggatcaaaaacagtagttcagatacgaagccacgctcagaaatactttctcaaagttcagaagagtggtgctaacgaacatcttccacctcctcgacctaagaggaaagcgagtcatccttatcctataaaggctcctaaaaatgttgcctanacctctcccccgtct

SEQ ID NO: 12659 - DNA, 431 bp, Arabidopsis thaliana
  unsure at all n locations
  Clone ID: LIB25-062-Q1-E1-B10
agagtaatgggcatcacgagactagcccatcaatcccaagctatatgcaagcaactaaatcggcgaaagcaaagctaaggcttcaaggctcaccaaagtctgcggagcaagatggaactgagaaagccactgttcccagacgtcactctctaccatctccaggtaatggtaggatcacttctcactctccaagaacaacgagactcgcaaactcaggtgacaaaaccgggaataagaaggagaaacctcttctgtcgtcccgagaaggaaacgccaagacaactccagcagagcggaagaggtgattggttccagcggaaagtgaangcctttatcgttcttgattctatagcagcgacaataccaaacatgaaagaatgcaaccatccttatccaatttaaaagctagagaatattaantccgtggatnt

SEQ ID NO: 12660 - DNA, 441 bp, Arabidopsis thaliana
  unsure at all n locations
  Clone ID: LIB25-061-Q1-E1-H12
tgaagttgagagacgactatggcgacgaacaatggtgatgtcttgatgttggaggcgacgccggaggctgcgaggccctgggctagtgcggcgaatgcagaagttatcgatgcgcttccttatatagacgacgactatggcaatccattgattaagtcggaggtagaccgtttggtggaggaagagatgcgtcggagctctaagaagccagctgactttctaaaggacttgcctcctcttccgaagttcgattttaagaactgccctgttcttggcaaagagtatgagcgtgttagagctgggaagcctcctgtgcggatagatttcgaatcccgatacaaacttgaaatgccacctgccaataagaggaatgatgatgctgcccngggaagcaattatctcaagaaggaatcaacgggcattggcaacaggaaaccggat

SEQ ID NO: 12661 - DNA, 418 bp, Arabidopsis thaliana
  unsure at all n locations
  Clone ID: LIB25-061-Q1-E1-E5
caaattttctccattctctcgttccaattattatttacttttttcacccaataaaaaaaaaaccatgcattcacttccggtgaatctcgtcctcaccgtacttacggtgttcctaacatcaccggcgcaagttatcggataccgtccatatccaccaaaaaccaacggctccgatcaaatcttcgacgcttcaaaaaaattcgaaggctcatcgaatctcgtccgcctccgttaccacatgggtccagtcttaaccaacaacatcaccgttcacccaatctggtacggcacgtggcaaaaatcccagaagaaaatcatccgtgagttcattaactcaatctcagccgttggatctaaacacccttcagtctccggttggtggaaaaccgtacagctttacactgaccaaactggatnt

SEQ ID NO: 12662 - DNA, 413 bp, Arabidopsis thaliana
  Clone ID: LIB25-061-Q1-E1-E7
atctttcacccataatgggtttacaaatattatgtttatttcgcaaaatattcatcatcacatacatcttccatgcctcgtgttctccagataaagttttatgaaagatgcaacattagcaccaatgttcgctcggtttgattacataatcatcggaggagggacttcgggttgcgcgttagccgcgacgctatctcaaaacgctagcgttttggttcttgaacgcggtggtgctccctacgacaatcctacggcaacagatatcgaaaactttgccaccacactctcaaacacatcaccgaaatcttggtcgcaactttttatctccgaggacggcgtttacaacactcgtgcacgcgtcctcggtggtggctccgtgttaaacgccgggttctacacacgtgcgggagata

SEQ ID NO: 12663 - DNA, 412 bp, Arabidopsis thaliana
  unsure at all n locations
  Clone ID: LIB25-061-Q1-E1-F1
aaatctcaactttttagggttttcgagctctgaaatctctctatctttcttcttcagatttctcacttttttcttcttcataagatcctcgtgattccactttataacgtacgcctcctttcaagaaaaatctctctctatattatctacgtttctctcgccttgtctccttttgaggttccatttctacttctctccaaaattcgaaacttttcccactctctctctctctctactagtttgacatgaacagcgacggtgtttggcttgacggctccggtgaatctccggaagttaataacggtgaagctgcgtcttgggtcagaaacccagatgaagactgggttcaataacccaccaccaccacaacacactaatcaaaacgacttcagattcaatngggnggctttcc

SEQ ID NO: 12664 - DNA, 438 bp, Arabidopsis thaliana
  unsure at all n locations
  Clone ID: LIB25-061-Q1-E1-F11
aagaacacaaaatcgaatctctctgtctccctcttcttcttccagtaaacttggatgacactgtgaatttcataatttgcccttctccggaatggctaatcactctcggcctcacatctgccagtgtttgactcggctagcctccgtcaaacggaacgccgtcgtcacagtctacggaaaccggaagcgcaccggcagggagttcgttgacggcgtactgagccttgccgccggactgattcgtctcggcctccgaaacggtgatgtcgtctctattgctgcttttaacagtgatttgttcttggagtggttattaagctgttgcattggttggaggagtagttgctcctttgaattacagatgggagcnttganagaancaaaaatggcaatgccgctagtangaaaccggngctttgggtaactgaataaaaaant

SEQ ID NO: 12665 - DNA, 439 bp, Arabidopsis thaliana
  unsure at all n locations
  Clone ID: LIB25-061-Q1-E1-F12
acaaccaaggaggacctaggaattacaatccacagggagctggaaactttggtcctgcatctggagctggaaacttaggtcctgcacctggagctggaaatcctggctatggtcaggggtattctggaccaggacaagagcagaatcagacattcccacaggcagatcagaggaatcgagactggaacaacaataatccagcaggccagcccgggtctgaccaatttccacagggaagaaggtactagacagagagcatgctgcagtgaattgagctgaataaggagagaagtgtcaaaggccttttattaagttttacagtaaatagtatttagtcatctttctactttgtaagacaatagttaagtccttttttctcttaagttgagcntgttaacgttgttggttgcccctgtgaaanttgaaacactccttccna

SEQ ID NO: 12666 - DNA, 397 bp, Arabidopsis thaliana
  unsure at all n locations
  Clone ID: LIB25-061-Q1-E1-F7
ttgccctagagataccgagcgggagattccagattgagagcagcttcgagtctctctctcctcgccgttccttttcgcttcttcaagtttcgttgccagagagattctaggtattgaagttatagaatggactttgatgagtatgagtacttagagaagacagttgaaaatcctcacctggagaatgaagttggtaatggtggtggtgatgagaaagtcaaatctgaagggaaagagaggagtaggagctcaaggcataggggtgacaagaagaaggagagggatgaagatgaggatggtcggcgttctaagcggtcgagatcgcatcaccgttcacgttctagggacagagaganggatangcatagaagtagcaagggaacacagagatagagat

SEQ ID NO: 12667 - DNA, 172 bp, Arabidopsis thaliana
  Clone ID: LIB25-061-Q1-E1-F8
aaacaaatctgtatttttaattcacacaagtaacaacaaaatcttgaaaatgttcagagagattgaaacaaatagacatgatacataatcaagattttgttgttacttgtgtgaattaaaagtaaagaaaacaaatctgtatttttgctaaaaaaaaaaaaaaaaagggcgg

SEQ ID NO: 12668 - DNA, 440 bp, Arabidopsis thaliana
  unsure at all n locations
  Clone ID: LIB25-061-Q1-E1-F9
caaagcaacaagcaagattcatcaaatccttatcttctctctttcactcacaaccaattgctcatcccacctacttgttccccacaaaacactctctccctctttgttctttcatcttctctaagctctttctctgaacctacgcttctgctaagctattctaagagaagccagactagcaataaacccttcattttaagcattctgtttccttcttgagaaacctagatattttggtttcttgtatccggtgatgaagatacagtgtgatgtgtgtgagaaagctccggcgacggtgatttgttgcgccgacgaagctgctctctgtcntcaatgcgacatcgaagattcacgccgctaacaaactcgntagcaaggcaccaacgtcntcatcngtaattccctctccagcaaanttccctcngtggggnaaatctggg

SEQ ID NO: 12669 - DNA, 435 bp, Arabidopsis thaliana
  Clone ID: LIB25-061-Q1-E1-G10
aatgtctactcttgttttattcctccaacttttttccatcctaccattagcacttgggttgaaccacccaaattgtgacctgaccaagactcaagaccaaggctctaccctaagaatcttccacatagacagcccttgctcccccttcaaatcatcatccccactctcatgggaagcgcgtgtgctccagacgctggctcaagaccaggcccgtctccagtacctgagcagcctcgtcgccgggagatctgtagtccccattgcctcagggcgtcaaatgttgcaaagcactacatacattgtcaaggctttgatcggtactccggctcagccgctgctcctagccatggacacgagcagtgacgtggcttggattccttgctccggctgcgttgggtgtccttctaacaacggcttttccctggctaaatctaa

SEQ ID NO: 12670 - DNA, 435 bp, Arabidopsis thaliana
  unsure at all n locations
  Clone ID: LIB25-061-Q1-E1-G11
gtttcttcttgcttttgagaaaaaataattatatatttttatataggaaagggttaatttattaataaaaaaaaataaaaagaagcagaaaagagataatgcagggtggtaggcttttgacggtgttggtgtgcctcgcctccacggtggcgttggtgagcgccggtgacccttacttctactacacgtggaacgtaacctacggaaccgccgcgcctctcggaattcctcaacaggtgattctcatcaacggacagttccctgggtcctaacctaaactcaacctccaacaacaatgtcgtcatcaatgtcttcaacaacctcgacgagcctttcctcttgacctggagtggactccagcacaggaagaactcatggcaagatggtgtgactgggacctcatgcccaatcccaacaagcaacaacttnacttac

SEQ ID NO: 12671 - DNA, 431 bp, Arabidopsis thaliana
  unsure at all n locations
  Clone ID: LIB25-061-Q1-E1-G12
gcccaaattctccacttgttcacttaatctttctcactacctgatcgtggaaatggcgattggnccatcaagtgtgatcattattgttgggataatcttggcgttgacttatcagtcaatcttgaaacctcctccaccgaatctatgtggctcccccggtggtccaccgatcacagcaccgcgtataaagctgcgagacgggagacatttggcatacaaggagtatggacttccaagagagaaagctaaacacaaaatagtcttcatccatggatccgatagttgtagacacgacgccgttttcgccactcttctttctccggtacgttcntaccaactcttggnactaaggttcataataatttcctgatcngttttcactttanaaggatttagtcaaanaacgaaggcgtgtataagggttcntttga

SEQ ID NO: 12672 - DNA, 430 bp, Arabidopsis thaliana
  Clone ID: LIB25-061-Q1-E1-G4
gagagtcatagacaggagacgtttgagattgatgaacagcgaattcgaaacaaatcacatggaagaagagctctctttcgctaccgttaccttctccacttttctccttcattagggttttctctcttatttagctgcgcagctctctctctttcttacggattcacttcttaaaactcgttaatttcttgtgggtttttgtctcttttgcgatctgattccgaaagttgagtgagagtgagagaatcatggaggaaggaagtatgttcagatctctattagcgattcttcagtggtggggtttcaatgttaccgtcatcatcatgaacaaatggatctttcagaaactgggattttaagtttccactatcggtttcatgtgttcacttcatatgttcgtcgattggagcttacatcgttatcaaagttc

SEQ ID NO: 12673 - DNA, 418 bp, Arabidopsis thaliana
  Clone ID: LIB25-061-Q1-E1-G7
gggaacaggatcgcttctacagatatttcacccatgtcaagtttaacagtgagaagggtatcgcgcgaagatatacaactggtataattttgttacagagggatgcgttgaatcagtgaaaggaaataattttgttagccatgagatcttctctttttttttgtgtgtttctcttcacctgtgcattggaattattaaggaaggccttcagcttttgtgtgtaaacctctttagaatatgtgacatactattctttctggcctgtccttgtttctttgcaggttcagaatctaattgaacgatgcctccagctttacatgaaccaagaaagaaattgttgacactccttcctaagaacaaggctaagatcgaacctgggttttacagaactaggtaacctccacacttccctggattt

SEQ ID NO: 12674 - DNA, 431 bp, Arabidopsis thaliana
  unsure at all n locations
  Clone ID: LIB25-061-Q1-E1-H1
tttctctcctttaaacctttctcaatcatctttcttctgccttggaatcctgatcatggcgtcgtcttctctcacttcgaaatccattctcggatccaccaaactcggttcttcttctcttccctcggagctccgtcgtctctcttctcccgccgttcagatctctctccgtacccaaaccaggaagaacttccagatacaagctactggaagttcatatgggactcattttcgaagtttcaacttttggagaatcacatggaggaggagttggttgtatcattgatggttgtcctcctcgtattccacttactgaatctgatttgcaattcgatctcgatagaaggaggctggtcagagcangatnacaactcctaagaaaangagactgatacttgccgggatatcgtccgggagtctcctgaaaggaa

SEQ ID NO: 12675 - DNA, 437 bp, Arabidopsis thaliana
  unsure at all n locations
  Clone ID: LIB25-061-Q1-E1-H11
aaagacaaaaatatatataaaaaagaaaaaaaaagaaaaaaaaataattgtcttgctctgttctatttaacttttcttatatataaaaaaaatggcgaaaaatttactagcaatatgtctggtgtttatggttgcatcaagtgtggtttatgaagtgcaagggactttcttgttaaagctttacttgaggaggaagtttcccagacgttgtatcgactttgccccttatgctggcaaaggtatgttgatgctcgtgagcaaccttgaaggtggatgtcccgcaactagagagttcaaacaattcttttcaacgttcaagtcttacatgagctttatcagctcagcatcgatatccgcatcgaaaaacatcgatgtggagatgaatgggagatgtnaattgctttccaaggctaatgtctgcattgaccgggaagcaa

SEQ ID NO: 12676 - DNA, 427 bp, Arabidopsis thaliana
  unsure at all n locations
  Clone ID: LIB25-061-Q1-E1-E3
gtcaattcacatacttgtttaacggcaacaaaaacctaccgataaatgctaaactaacgaaatcggatcatagctcgacgaagtctcgatcttttctattctctctttctgggtattcgtgggttttacccagatttcgaaattgaatggcggacgaactggaattgtcgccgttggttccaccgtcgccgatggtcgagccttccgagatcgatctcgaagctggaggacctggtgaacaaattcagtgccgaatctgccttgaaactgatggtagggatttcattgccccatgcaaatgcaaaggaacatcaaagtatgtacatcgtgattgcttggatcattggagagctataaaggaaggtttcgcgtttgcgcactgcacaacttgcaaggntccatattatccgagagttcacaatgctgg

SEQ ID NO: 12677 - DNA, 492 bp, Arabidopsis thaliana
  unsure at all n locations
  Clone ID: LIB25-060-Q1-E1-C4
gnnnnnngnaactgttacgccnncgtagcctccgaaaattcaanggtcnacccacncgtccgcnggacgcgtgggcaaatccaggaagcctattctgttttgaatgatgagaataagaggtcaatgtacgatgttggactatatgatcctcatgaagatgatgacgatgacttctgtgatttcatgcaagagatgatctcaatgatgaacaatgtcaaagacgcgggagagagcttggaagacttgcaacgaatgttcacggatatggttggtggagatggcgtgagctatgactgtaacaataatccaaagggcaacaaaagaccacgtgtcaatatctcgaggagtagtgctgcgatgcgttaaggcttacttcttttgtgtatgagtgtcgtgttgtatcaaaatttcaattccatgttcaattgtctagaccataaaataaattatctgtgaaaaccaactaagaactaggtagaatctttgggatcc

SEQ ID NO: 12678 - DNA, 432 bp, Arabidopsis thaliana
  unsure at all n locations
  Clone ID: LIB25-060-Q1-E1-C6
tcatttctcagaaacaactcaaacatgggttccttcgacttgcctcacagttcatcgttcaagggagaaagtgaaatatttcttcggaatgtgttcgagaatatattgaaaacgtacctaaggaagaacccgacggcgaagacaatatgggaactggttcagtcgttggacaacgaaaagatctgctacgaccacttcactttcaggacactaaaggtcgatggttatggaatagactccttgtcgagttttttcatggcttatggatataaaattggtggtggacttgattttcccaagaagaaactacganttctttgggtttctccaactgatgttcacgttcctaaatgatgggtcacggtctaaggcaacgggccctttgccggcgacttgtttataacctgagggttcttgttgggaccnaactaa

SEQ ID NO: 12679 - DNA, 419 bp, Arabidopsis thaliana
  unsure at all n locations
  Clone ID: LIB25-060-Q1-E1-C8
gcaacatcaacgacttattcgagagaaaatgaatcggaatcttagaaacgccattgtcgcatttcttgctccacttccttctatcgtattctacctcacctttctcagtaattactcttcatcttccgattcagagctctcttctattcaatcatggtgtttgaatcatcctcttctattagcaaaccttctcttcttcttaaacgtcaatgtgctcttctgggtcatcggtttactccaatctagccactggatgatcgatgtgtattgggacagtgatacctgtaatgctggttcattacttcgcttcgcatcnattgtcacagttcaataagctngagatcaaggattgtcataaactctgacatggattttgggagcattaggttgacgncataantacttccggcggggaaaag

SEQ ID NO: 12680 - DNA, 422 bp, Arabidopsis thaliana
  unsure at all n locations
  Clone ID: LIB25-060-Q1-E1-C9
tgtcgagtacaatggcttcgagacctctaacggtaacgtcgaccatggttggaagaaagtcgtgtacccgaaacgtcaccggaagcaaaaacaagcggatcaagcgacggcaaatggtggcaaaactgttgcttcaaatggaaccgtagctaacggcggagataacgttttccgttcgttggaagagcaagctgaggatcgtcgacgacggatcttagcggcgaagatgactgctattgattcagatgatgatggtgttgttagatctaaacatcgatctaatggttacggtgatgatgggtatgattttgatggtagtgatgatgagatcgcaacgctgaaggttgangaagttaagaagccaaagcctaagaaggagaagaagcctaaagtttccttgcctgaanctgcnannaanattt

SEQ ID NO: 12681 - DNA, 483 bp, Arabidopsis thaliana
  unsure at all n locations
  Clone ID: LIB25-060-Q1-E1-D1
acgcctgtncgtacgcctccgaaaattccaaggtcnacncacgcgtccgcncacgcgtccgcccacgcgtccggacaaagtagctgatgtccttggggctcttccttctacagatgcctcatgggacgatctaancaatgtttctgtgcaacttcgtttgaacaagaaatgggattcnatnatcttggtgtgtgagtggattttaagggaagagctcctttcagcctgatgtaatctgcttcaatttgcttanncatgcttaagganagaanttccagtacaaggangcggaatcactctangtacancttcttgaatcccgctatgtgcctacggggagacacatacgcncttcttataaangcatactgtatggcatggctcataganagagctgaagttgttttagtccaaatgcanantcatcatgtttctccaaagtgtaactgtatacaatgccctatattgaanggngttaatgaa

SEQ ID NO: 12682 - DNA, 153 bp, Arabidopsis thaliana
  unsure at all n locations
  Clone ID: LIB25-060-Q1-E1-D11
anatattgcnagctcggttcancggtcagcctctggtgaatttatgagaaaatgtgaaggancaggtgattccgagtctgtgttggacaantacaatctccatgatgaggcacagtctaagacangttcctcgagtgccgggaaagatatngt

SEQ ID NO: 12683 - DNA, 431 bp, Arabidopsis thaliana
  Clone ID: LIB25-060-Q1-E1-D2
atgtggagtgtattcctccaaataaaataaagtttgattttcttggtaaggattcaatccagtatgtaaacaagaggctcaacctcgactgtgttcacatactggattgagcctcttgtttacaaggccattggacagttccaggcgggaaaatccaaaacagatgatctttttgatgagttagacacaagtaaactgaatgctcatttgaaggaacttgtgcctggtctcacagctaaagtattccgtacatataatgcttccatcactttggatgaaatgctgagtcaagaaaccaaagatggcgatgttactcaaaaaatagtagtttatcagaaagcaaataaggaggttgccataatctgcaatcatcagcgttactggttcaaaagacacatggtgcgcaaattgaaaaaattgactgcgaagaa

SEQ ID NO: 12684 - DNA, 422 bp, Arabidopsis thaliana
  unsure at all n locations
  Clone ID: LIB25-060-Q1-E1-D4
gacaagagagtttctccctggatncacacaacaacaacaacacaagagattccaaatccggaaagatatcttcttctctcataactcagtttactcaagattcactgaaacatacaattaagttaaccgtcaagtctctcacctgcagcaaaattcactcttctgctaataatgttctccacagagattcatctattgatcattttgactttttcaggtaaagtaaatttttatttctcttttcggtctagtaaagttttactcaaacatagaaagttacgantttntttttgttttgttttccatggaaaaattctcgggcatgcaaaaacntttttttttttttttcctaaaaaaggtanttaccttttcctttttttctcangtcctttttccntanagtggaaattttttttcctncg

SEQ ID NO: 12685 - DNA, 426 bp, Arabidopsis thaliana
  unsure at all n locations
  Clone ID: LIB25-060-Q1-E1-D5
atctctctctctctctctatttcttttgcttccttttggtatttgctttgtatgtttgttttgagatcaaaatggcttcaagtgcttcaaagttcatcaagtgtgtgactgttggtgatggtgctgttggtaaaacctgtatgctcatctgctacaccagcaataaattccccactgactacataccaacagtttttgacaactttagtgcaaatgttgttgttgaaggcaccactgtcaatttggggctttgggacactgctgggcaagaagactataacagattaaggcctttaangttacaggggagcagatgttttcgtcttgtccttctcattaagtcagccgagctanntacgagaatgtttttaaaaangtggatncctgaaactccaaacactttgctccangnagttccccttgtcc

SEQ ID NO: 12686 - DNA, 405 bp, Arabidopsis thaliana
  unsure at all n locations
  Clone ID: LIB25-060-Q1-E1-D6
aaaacacaaaaatgatgtcatcaatggcactctcttctacttccctctgctcttctttcatctctcaacatccaaaactctccatcactgcttctcctccattgttccatacccaaacaaccaaacccatctctgtaaaacggaaaatcataactctagcagctccagagacactcaccgctgaaacagtcaccggaattgatacttccgacaacactccacaacanacaataaaggtggtgaagccagatgagaaatcaagagtggtactcaagtttgtgtggatggagaagaacatangattaggattggaccaacatgtacctggacatgggcacaaatcccactttagtccttacttcttctggcctaaggaaagatgcttggggaanaagcttaagtcta

SEQ ID NO: 12687 - DNA, 421 bp, Arabidopsis thaliana
  Clone ID: LIB25-060-Q1-E1-D7
tctcagtttgcggaggagacgacggagaaggaccaagtaacaacaatcaccaatcccggaaaaggcaacgacttccttcaatcgatgaaaatgaagaagacgccgagacctccgacgccggaagttccggtgaagaagacgaagacgaaactcagaatcaaggaatgagaccagaatctgaggatcgaggatcaacgagcgatgatagcgatcgtgaagttgtgattgaggagagacgatttggtaaatttgtaaatagtcagagttcttcttctagcaaagattcgcctctttctgtaacgttattggatccagatgttcttgattgtcctatttgttgcgagccattgaagattcctatctttcaggttttgcttcttcattgattacacaatccattgaagcactctgattttaagtt

SEQ ID NO: 12688 - DNA, 435 bp, Arabidopsis thaliana
  unsure at all n locations
  Clone ID: LIB25-060-Q1-E1-D8
gaccaagctcacattaagcctagctcatacaccactgcttggcctcagagttacaggcagtcgattgatctttatagtagtgtaccgtctcccggtatcggttttcttgggaataattcgatgacgagattcggaagctctttcttgtcttctggtttgataagaagacatactccggaatcattacctactgttacaaaacctttgttagaagaacaagcagatgaacaagcactaccanaacatagacttagctctcagggcttactctctcctattccttcgaggaggggttcgatgcgaaaggatgaganatcatccatggtgtctcatgagattccaatgtctcgttaatagctcatacgggacaaagctgttactaanatgggtcagttcatncttaaatgcttgagnttaaaatatccgtgtcttctc

SEQ ID NO: 12689 - DNA, 426 bp, Arabidopsis thaliana
  unsure at all n locations
  Clone ID: LIB25-060-Q1-E1-D9
ttttgttcattcatcttcagttgactccaatggacatagcatgntcaaaacattcctctcagatgaatcagctatggtgacggcctatggttttccagatattgaattcaacaaatactctactgtaaatagcaaagatggctcttcttactttttcgttcctcagattgagttagatgagcacgaggaggtctctatattagcagttacattggcatggaatgaatctctctcttacacagttgagcaaacaattagttcatatgagaaatcaatttttcaggtttcttctcatttctgcccaaatgtagaggatcactggttcaaacatctaaaaagttctttagcgaagcttantgttgaagagatacatccacttgagatggagcatatgggctttttcancttttccgggaaaaatttagg

SEQ ID NO: 12690 - DNA, 320 bp, Arabidopsis thaliana
  unsure at all n locations
  Clone ID: LIB25-060-Q1-E1-E1
cttatgaccatngctnaaanatggcaacaaagaagcagccctccacaggaaaaggaatctcatttcagagatcaaatgtctttactancanctcttctactgtannaaagggttgtntcgtggtctacacggcngataaaatccgctttgcttttccaataagttatctgagcaactctattgtccaaggagctcttgaaaatatctgaaagaagagttcngtctcccaacggaaaggnccaatcacattgccgttcgattcggttttcttggagtatctcatcaaactgatccaaangacnanatggatgggcgatnca

SEQ ID NO: 12691 - DNA, 423 bp, Arabidopsis thaliana
  unsure at all n locations
  Clone ID: LIB25-060-Q1-E1-E10
acgaaatctcttctccgtctctctctctctttccctcgtccattccacgatcttcttccaatctcaaatctcccattttctagtgtttcattttgatccttcttccttcctctggagatttctcaaatctcttcaactattttgatttgccgccatgtatcgacgcgccacttccggcgtgcgttctgcctccgcaaggctttcttcttccctctccaggatcgcctctagcgagacagcttcggtttcggctccatctgcgtcgtcgcttcgcaatcagacgaaccgatctaagagtttctcctcggctctccgctcctttcgagtttgctctgcttccacgcggtgggagccaaggtggggaagctggggattgcctgcaacccntcgggctcaaagctaaggaattcanntccnggttag

SEQ ID NO: 12692 - DNA, 429 bp, Arabidopsis thaliana
  unsure at all n locations
  Clone ID: LIB25-060-Q1-E1-C11
tcacgaccaagtagcattagttccatacgcaagagtccgacgaattcatcatcggagaatgctcaaacgcagagtgccctacacgattccacatcgaaagaggaanaaaacgctctcgaggcagtctcaaagagtacaagagcgacgagtatttggaatatagactgtattggtgttcatttggtcctgagaactatggagaaggtggtggtgtgttacccagtaggaaatatcgtctcaacactagaaatcgagctgcgagacctcaatctatgagaggatgtacatgtcattttgtggttaaacgactctatgctcgtccttcacttgcgcttcttatatacaatgagagacgacatgtcaacaaagctgggttcgtttgtcatggaccctcctgataganatgcgaatggncccggttcnaaanaa

SEQ ID NO: 12693 - DNA, 497 bp, Arabidopsis thaliana
  unsure at all n locations
  Clone ID: LIB25-060-Q1-E1-A12
nnnnnnngaantgttacttctgccggccccggtccnaaatacccgggtcgantcacgcgtccgcccacgcgtccgatttcaatagaagacgaagaacgtttcagaatcatcaaccaaattcagaaaatttcagccatgacaggatcacaagaagaccaacctaagatcatcattgatcaagagcaacccaaaactctagaaacagagcaccaaccataaccttcttcatcgtctccggatcagaagaaatggggtactcacgtgatgggagctccggcagctccagttgctcatcccgataaccaacaggcggcggcgtgggtcgctgganataancagcagacgcagtaccaaccggtacgtcatctactcncctgtcgaacatccaacaactaanaaccctctcgagccagtcatcggnatgttccacacctggagtctcaaagggngaaaccgttcgcaagtaacctctgggnaaaatntgaaacacaagggng

SEQ ID NO: 12694 - DNA, 347 bp, Arabidopsis thaliana
  unsure at all n locations
  Clone ID: LIB25-060-Q1-E1-A2
cccntccgtaggcctccanaatccaaggtcnacccacccgtccgnanaatagacgctctgtgatagctctctggtccaataatcgagaaacctatcttgaccaccttctccgacgccggtgtagcccacgcttgccagcgtcgggatttttccntccctgcntctctctatttcacattgcnatctgtttcccctcttgtgcggccgtttcctcaatcatctagtgtaatcaagcgtcttaaaagtgganaacggcatttcatcctccatcatactcagatctatcgacgcnggttcttcctcgatctccctttaaaccttcttccanngtnnctcgccgcngggna

SEQ ID NO: 12695 - DNA, 432 bp, Arabidopsis thaliana
  unsure at all n locations
  Clone ID: LIB25-060-Q1-E1-A6
tgattcagattctgaatctgaggaagaggagaaggctaagaaagtcccagccaagaaggctgcttcaagcagtgatgagtcatctgatgactcttcttcagatgatgaacctgcacccaagaaggccgttgctgctactaacggaactgttgcaaagaagtctaaggatgactcatcatcatctgatgatgattcttcagacgaggaagttgctgtcaccaagaagcccgcagctgctgctaaaaatggctctgtaaaggccaagaaagagagttcgtctgaagatgattcatcttctgaangacgaaacctgcnangaaacctgctgctaagattgccangccanctgctaaaggattcttcatcctcctgatggatgactcatatgaanggattccgaaggatgataaactgctaccaanggaaggcagg

SEQ ID NO: 12696 - DNA, 423 bp, Arabidopsis thaliana
  unsure at all n locations
  Clone ID: LIB25-060-Q1-E1-A7
ttccgtgataaacaagggtggactgctcttcattgggcagcatactacggaagggagaaaatggtggctgctcttctctctgctggggcaagaccgaacctggtgacagactcgacgaaggataatcttggtggatgcatggcanctgatttggcacagcaaaacggatatgacggtttagctgcttatcttgctgagaaatgtttggttgctcagtttagagacatgaaaattgctggaaacatcactggcgatctggaggcttgcaaggcagagatgttgaaccaaggcactctaccggaaagatgagcagagtctcaaggatgctcttgcagcatacagaacagctgcagaagcagcggctcggattcaaggtgcgtttangggaaaaagcgctaangggcancacggtcaaagcgtgat

SEQ ID NO: 12697 - DNA, 423 bp, Arabidopsis thaliana
  unsure at all n locations
  Clone ID: LIB25-060-Q1-E1-A8
gttcaagtctttcgcagccgttctcagtgtcctttttcttgccatgactgctatagaaacggtagttcaagcccaagaatgtggcaacgatctancaaatgtgcaggtatgcgccgccatggtgctgcccggttcaggcagaccaaattcagagtgttgcgccgcacttcaatctactaatagagattgtctatgcaacgctctccgtgcagccacctctcttccttcgctttgtaaccttcctccctgtgggattgtgggtataaaatgcttaagnttangctacngagncanantccaagatgatcaagggaaaancgggaaaaattagagagaataatggagaantattcnaagtccntaatgttgttnttccttcnnaaacttcctggcttttacnaaagntanaaggttctaantagt

SEQ ID NO: 12698 - DNA, 93 bp, Arabidopsis thaliana
  unsure at all n locations
  Clone ID: LIB25-060-Q1-E1-B1
atagccaccgaagctcttctgacttgtctgagtccntgtcaancatgaaaccgaagagccatgggaacagtcaccaccacagttctcacaaga

SEQ ID NO: 12699 - DNA, 419 bp, Arabidopsis thaliana
  unsure at all n locations
  Clone ID: LIB25-060-Q1-E1-B10
gggaaagtagataaaaaatttcggccattaaaggacaaaatcacaagaaagtagaaaccctagagattttgaaaccgaaaccccaaaaacccctttgacgcctccttcttcttatctctttataaaaaaccatttctttcctgcaanatcgttgcttatcatcagacgcacatcacctgttcgataaaattcctctganagtgttttttttgttttccttctgacaaagaaatatgtatgtantgaagcgtgacggaagacaggaaactgttcatttcgataagattactgcgaggcttaagaaacttaagctatggggcttagcagtgaccattgtgaccctgtcctcgttgctcanaaggtccgtgnccggtgtcaataaaaggngtcactacgagtccaactttgaanangntggg

SEQ ID NO: 12700 - DNA, 481 bp, Arabidopsis thaliana
  unsure at all n locations
  Clone ID: LIB25-060-Q1-E1-B11
ctgntaccctggccggtaccgaaccaganttcgtcgantcacgcgtccgcgcctctctggatttcgaagagctgagagattagggtttctcgattttcgagattagagtctaatccccaccaccagcatagctgatatcctggaggagagaatgacggattcgggtctaatgatgccggcggagattgctggaattctaaccacggcgattacgagttggtgggatgatgttaatgagtcaactcagtggcaagatgggatctttttcgctctttgtggtgcttangctcttgtttccgccgttgctcttgttcaactgataaggatccaaatgagagtgcctgaagtatggttggactactcagaaggtgtttcatcttatgaactttgtcgtcaatggaggtgattattttccgtgcggttccgtttgggatttcacatcaaagtattccctggttcatcccaaggctcnttgctgggg

SEQ ID NO: 12701 - DNA, 254 bp, Arabidopsis thaliana
  unsure at all n locations
  Clone ID: LIB25-060-Q1-E1-B2
cnanntcngngaagcatcacgatgatgatnttaatggctgttttggtctggtcagtgactctagagacctgcattgccacaagaggaagacattggagacatangccaccgaagctcttctgacttgtctgattccttgtcaaacaagaaaccgaagagccatgggaacagtcaccaccacagttctcacaanaacaancatcaccacangtctaaacctaaaccgaaaccaaaagctgaaancngccgccaaa

SEQ ID NO: 12702 - DNA, 410 bp, Arabidopsis thaliana
  unsure at all n locations
  Clone ID: LIB25-060-Q1-E1-B3
cgtactgttgtgagcattccaaatggaccctctgctttggctgttaaagaagcagcttggggacttgctcgctacgcagctatttctcaagacagcggtctggtgccgattgtggagccagagattatgttggacggagaacacggcattgacaggacatacgacgttgcagagaaggtttgggctgaggtcttcttctacctcgctcagaacaacgtcatgttcgaaggtattctcctgaagccaagcatggttactccaggagctgaggccacagacagagctactcctgagcangttgcttcctacactctcaagctccttcgcaaacagaatccctcctgctgtccccggaatcatgttcttgtctggtggacaatcccgangttnggaaggccnaccttnnaact

SEQ ID NO: 12703 - DNA, 419 bp, Arabidopsis thaliana
  unsure at all n locations
  Clone ID: LIB25-060-Q1-E1-B4
gatcttcatttccatggaggcttaaaaaccctagaagatattcttttacacatcactcatccgctagtgaagataaaaatcatttctagagcttcctctttctctctctgtatgatctgaagcgaatcgtctttagattcttcaccaatcactatcaaaaggacctctttttaaagcttttcgagacgagctgggtttcggatcctgtgagcttcagagacgcttactgggtttatcaacaaggctttccctttgaatcaagctttgattgagaaaggagtgaaaagattttgattttgatcagatacacaaagtgttcttgcgttagttaagcgactangtgtgtgttgttgtagtgaaagcttccttactgttgacaagtatctccganatggaaacgcttattgtagccgtgggaa

SEQ ID NO: 12704 - DNA, 432 bp, Arabidopsis thaliana
  unsure at all n locations
  Clone ID: LIB25-060-Q1-E1-B5
aaagcaagaagtcggttattcgacttgttgacatggaatctgcgtatctaaccgctgagttcttccggaaacttcctcaagaaatagaaagaccagtaaccaacagcaaaaaccaaaccgcttctccttcgtctgcaacattagaccagtatggagacggacatttcagaaggatagcatcaaatgtatctgcgtatgttaatatggtttcggacacacttcgtaacaccattccaaaagcttgtgtgtactgtcaggttagacaagccaagctcgcattgctcaattacttctactctcangatcaagcaagagagagggggaaacangttgggacagttactagantgaagatcgggcattgatggaccgggngactagagtgcgcnaagangctagagttntacaaggaangcaaggagatgangattg

SEQ ID NO: 12705 - DNA, 415 bp, Arabidopsis thaliana
  unsure at all n locations
  Clone ID: LIB25-060-Q1-E1-B7
gggcgtgcaaatcaggtatacgtcatcgactttggtctggcaaagaagtacagagactcaaatcatcagcatattccatatagggaaaacaaaaacttgactggaactgctagatacgctagcatgaacactcaccttggcattgaacaaagtcgtagagatgatttggagtcacttggattcgttctcatgtacttcttaaaaggaagtcttccttggcaaggactgaaagctggcaataagaagcaaaagtatgagaaaatcagtgaaaagaaagtatcgacatctattgaggctttatgccgaggttatccatctgaatttgcatcttatttccattattgccgttctccgagatttgacgacaagccannctaatgcctacctgaaacggnttttcccgcgacctgttatt

SEQ ID NO: 12706 - DNA, 425 bp, Arabidopsis thaliana
  unsure at all n locations
  Clone ID: LIB25-060-Q1-E1-B8
gcctaactaaacccaacgccggcctctctttctctctctccccgcttctctcgtcgatcgctgaccatggccaaggacaaactcaagcctcttctctcctctgatgctgcaggtgatatcgctgatactcctctccgagagaagaagcataagaagaagagcaagaagcgagctgaacctgaacctgatataccctctacacgagattccggtcttgatgaagatagagatggagtattggtagatgatactctaaatgagccaacgataggtgataaacttgagagtcttgacttattaaatggcgaaaaggttaacagtgaggagagtantagagattccggctcctgggcgaagataagnctcctnactggctgcttccggtttaacgttcntcctgaagacaaagcattgcatgccngatg

SEQ ID NO: 12707 - DNA, 491 bp, Arabidopsis thaliana
  unsure at all n locations
  Clone ID: LIB25-060-Q1-E1-C1
aacctncngtacgnccccaanttccanagtcnacccgnccgtccgatattaanaanataaccccggagggaagaaatgganacatggagggaaatgagtttacggacaacggttccatcaaagagactgtagatgctgctgttggaatgctcaacgaaaaaagagctcatgagggagaagtttctggtgaagaaaaacgaagcaacgagaattgggattcatttcanaatattttgatgaggcacgatgatggctcacatgtgcattcaatggatgtcatccgtcaggagcatttcacacataagaggcnctagtgtgggtgcaaattctaatggcttgcaaacaaaagaacactgcctcgggtgattccatcatcacaacgcataaatacatagaaanatgggacgganatagccnttgatcatttttgnaaagttaangaatantgctccncagggcttcccaagaaccgaggggactccnacnganna

SEQ ID NO: 12708 - DNA, 435 bp, Arabidopsis thaliana
  unsure at all n locations
  Clone ID: LIB25-059-Q1-E1-H7
aatggaatctttatcgaatccaagctgattttgtttctttcattgaatcatctctctaaagtggaattttgtaaagagaagatctgaagttgtgtagaggagcttagtgatggagacaaattcgtctggagaagatctggttattaagactcggaagccatatacgataacaaagcaacgtgaaaggtggactgaggaagaacataatagattcattgaagctttgaggcttatggtagaagcatgggcaagaaagaattgaaagaacatgttagcaacaaaaaactggctgtccaagaataaagaaagtcacgcctcaagaaatttttcctccaaagggnngaagaaangaaggctgaaagccaaagggtgtaacctatggggtcaaagccgctnagacataagctaatnctcctccaacgggcctaaagccgt

SEQ ID NO: 12709 - DNA, 388 bp, Arabidopsis thaliana
  unsure at all n locations
  Clone ID: LIB25-059-Q1-E1-C11
aagttcttcaaattcgcngttgaattttgtttctcggagaaattancanaaccctatacgatcacattatcgcttctganatcaangacgatgcagcanttactgttcgctgttgttctcttcgaggttgttgtgataatggcgctttccttcaagacgccgattaggaagctgttgattatgagcttggatcgttccaagcgtggtcgtggaccggtggtgattcagacggtttctgcgacggttattgtgcttctggtgacgagcgtgtacaatatgatggggatccagaagcgttggatcgaanatggtgtagtgaatcctacagatgangttatcatggctaagcatctccttgaatccgactcttaagggtggttttctattc

SEQ ID NO: 12710 - DNA, 70 bp, Arabidopsis thaliana
  unsure at all n locations
  Clone ID: LIB25-059-Q1-E1-C8
ctctttanttaactaanttattcaataagtaaaccatagataggatggtgtttttangtttggtttaagt

SEQ ID NO: 12711 - DNA, 412 bp, Arabidopsis thaliana
  unsure at all n locations
  Clone ID: LIB25-059-Q1-E1-D10
aagtggaactgacattgatgcagttatctctggatttttgtcgcctctgcacaaggtccatgccccatctaagattcataacggaagtgataatggccaccttgctgatgctactgttgaccaagcatccggaattttatcatccccagataccgagatagacaatgcatctgatagagagttatccttcaggatattcttgacagatgaacgtggtttgaacattaaaccactgcagtctgaatcttctataagcccgggtaccgttacaagagttttaagtcgagtggaatgagggtgagcatgaaagatatgattccagctacttgagtgatcttccagangttcataaaacaagtttctcctgcaaagaagacaaggcaagaatcgatatccctgttttcgtgtttgg

SEQ ID NO: 12712 - DNA, 426 bp, Arabidopsis thaliana
  unsure at all n locations
  Clone ID: LIB25-059-Q1-E1-D12
aaaccanaagacaaacaaaaacgccgtcgtttcacgatgctttcttcttccccaaccttcttcgctactccatttctctcttcttcttcttcttcttctccgtcgttctcttctacttcaccaccgtcacgcatttcccggatctcgccgtcgctttctacaaccaccgcgtcctacacctgcgccgaagatctaccgagattacgccaaatcccgcagcgattttcaagcaaccgcgtctctctacgagatccttgaaattcccgtcggctcgacgagtcaagagatcaaatcagcttaccggcgactagccaggatcngtcatcccgatgtagcgagaaaatagtcgggataactcgtcgggcgggacgaattcatgaagattcaagcaagcgtaatggcacgcnttcnggttcccgagaaaag

SEQ ID NO: 12713 - DNA, 421 bp, Arabidopsis thaliana
  unsure at all n locations
  Clone ID: LIB25-059-Q1-E1-D9
gtcggctggtttatccataagattttgaaacaacgtaaggtgcctgagaagatatgtacatattctgtaatggtttggcttttcaatccgtttacattcactattggaaccagagggaactgtgaacccatcgtttgtgccatgatattatggatcattctctgcctaatgcaaggtaatttgttacaagctgcattttggtacgggcttgttgtgcatttcagggtctatcctattatctatgccttgccaatcatcctggttcttgatacccaggtatttagatctggtcaaaagccggctcttttgtattggaataccggtcaggccaagacacctgccagtaacatggagagaaaaacattcctcttcaatctcttgaccaccttgaaaagtttantttccanggagagaatcatgt

SEQ ID NO: 12714 - DNA, 415 bp, Arabidopsis thaliana
  Clone ID: LIB25-059-Q1-E1-E11
gcactgaagccctaggacttccttcaggcagtgtatctccaaggactattgatgagctagagaagattttggagaaatctgcagctcgaggacttcccatgatcgtagctaatccagattacgtgactgttgaagcaaatgtttttcatatcatgccaggtacactagcttccaagtatgaagaactgggaggagaagtgaagtcgatgggaaaacctcataagatgatctatgagtctgctatagcaattgcgggagtcaatccgtctgagtctatcgcagtaggagattcgctacatcatgatataaggggagcaaatgtttcaggaattgaatcaatattcatcactggagggattcatggtaatgagcttggtctcacttcttttgatgaaactgcaagtctagactcagg

SEQ ID NO: 12715 - DNA, 418 bp, Arabidopsis thaliana
  Clone ID: LIB25-059-Q1-E1-E12
attctttctaattaagcaataataatttaatgttttttttaattgaattttatgattttttttaggtaattgaagcaaagaagtcgcattttgattatagcacacctaaaaagagattgccatttcgagacgcaatactaatccttgattcaaattcgaattccagtagtcaagatgatgaaatggagcctcctaatgcaccaattcgaaggaggtttattaatcgagaatcggatttgtcgaagatctctatggtattgtttaaatgaagaagaaaggtaaaaaaaaagaatcagctaattgtgcagaagatgaggaaagaacaagacatagaagagtttgcttttgcttcaattctttatcattgaagctttttattatatttactgaccatgtgaatataaccaattatttgcag

SEQ ID NO: 12716 - DNA, 427 bp, Arabidopsis thaliana
  unsure at all n locations
  Clone ID: LIB25-059-Q1-E1-E2
ctcccttttctatctctaagggaaaatgggtagcaagatgttgtttagtttgacaagtcctcgacttttctccgccgtttctcgcaaaccttcctcttctttctctccttctcctccgtcgccgtcttcgaggactcaatggactcagctcagccctggaaaatcgatttctttgagaagaagagtcttcttgttgcctgcnaaagccacaacagagcaatcaggtccagtaggaggagacaacgtcgatagcaatgttttgccctattgtagcatcaacaagggctgagaagaaaacaattggtgaaatggaacaagagtttctccaagcgttgcaatcctttctattatgatggnnaanngatcangtctaaggaagaatttgataanccttaaannaagagttaatgtggggaanggaagcatt

SEQ ID NO: 12717 - DNA, 432 bp, Arabidopsis thaliana
  unsure at all n locations
  Clone ID: LIB25-059-Q1-E1-F1
aaaaacatgaaaatcctctcactttcacttctcttgctcttggccgctacggtctcggcatccgttccagggctcatcgaactcgtcgattcgaaaaccatctttgggaacgtagccgaactcttagagaaagagaaactttccatcaactacgccaactgcagaagctggcaccttggtgttgagacctctaacatcatacacttcgacacggtgcccgcaaattgcaaagactatgttgaagacgacttgatcacttccaaacagtaccaatacgactccaaaaccgtgtgcaaagaggcttatttctatgccaaaggactttgcccnaanagaacgacaccngtcaangtnttggatctttgacctanangatacccncctctctaagtanttccctaacnaaggccanaatatggatnanggnancag

SEQ ID NO: 12718 - DNA, 490 bp, Arabidopsis thaliana
  unsure at all n locations
  Clone ID: LIB25-059-Q1-E1-F12
gnntgnggaantgtttngttgnccngccggtaccganaccaaaattcncgggtcgacccacgcgtccgctcattttcccgagcgatcgtccatggcggacatcgacatcggaaccgcagcaacaacaggaggaaacgaaggaagaggaggcacacgagaacgtctaataaaccgagaaaacaagttcacacgtagcgtatctcacgcacaagacgagctccacagtttccggaaatatctccgatggatgtgcgtagatcagtcgagtccttggacggcggttctatcatggtctatgttcgttgttttcacgctcgttgttcctgccacgtctcacttcatgctcgcttgctctgactgcgatagccatcactctaggccgtacgattccgttgttcagctttctcttagcaagtttcgctgctctttcgtttctttgtctctncanattcgttaacaagtatgggctccgacngttcccaatccttgg

SEQ ID NO: 12719 - DNA, 340 bp, Arabidopsis thaliana
  unsure at all n locations
  Clone ID: LIB25-059-Q1-E1-F3
aagttagagctcttctctcatctccaatttctctctctctctctccttcgctcttatcctctggcgattttttccagagattctccgattctcgaggaggaggaggaggaggaggaggagggagagaaggagaaggacattttcgattcgattgatgtgaaacgctcctacttgattcncgtcgtctgagatgggagttatcatcnaggattgataatggttcccgaatcatcatccgagggatannganttnttctggcgatgatttcgaattcnaanagttgatttcganattcgatgcaccggaggttnnnagaatttctcnagacctganncttta

SEQ ID NO: 12720 - DNA, 400 bp, Arabidopsis thaliana
  unsure at all n locations
  Clone ID: LIB25-059-Q1-E1-F8
cgccgtatgtatgctgctactactctatcatctgccaaatcaatctctgcagaatccctaaatcttcgttccgattccaattcagaggcagcgcatggtgcttctgagtctgagactcgagtctctttaaggaagaagaggataaagcaggatgatttggagcctgtaaagaaatgttccgccaganaaaccaaggcccgcaaggacatgtgtggantacctgatatagaagactctccttatangaagactaatggaactgcttcatctaggacgangaaaactaaactcatacatagggatcnncagaanctagcccttcngcatcgtcgatcaangacagcaggggcctanggcatancaccctgaaaancngggangaaggtgctcgaagggttnt

SEQ ID NO: 12721 - DNA, 424 bp, Arabidopsis thaliana
  Clone ID: LIB25-059-Q1-E1-F9
aaagaagatcccattacttccacagacttaatctggaacagagattttatggatcaaatgaagaaattgtttgatgatcctaatgattcttctctcgacccatctccttcaaaggaaaagtcttctgggtttctgagctttagcagagttatgagtcttgacagtatggatgttgatttaagtaaagagcttgcatcgtcttctaaatccgttgtgaaaaatcgtcttgacacctccaagtcagaagctaaaaagcaaatgagtaaggctattgtgtctcctaaatggaagctggcacctacacgtcgtgagcaagagaaatgggatagagcaacgaaggctgcaactggtggcagtgatgtgatgtttagggagctgagacggccacgtggtgacccaagaagtacaagctgctaaagacaag

SEQ ID NO: 12722 - DNA, 412 bp, Arabidopsis thaliana
  unsure at all n locations
  Clone ID: LIB25-059-Q1-E1-G10
accgttttagtcttcctctcccgccgaagtgttctctccgtacttttagcgtcctcgccaatggnaagcgcactcaatctctgctaccacatcacttctccgtattcaaccaaagtcaccgacttgttacctccttgagtcacaatgtttccaacaaatctgatgcagaggcagagcgttcctgtgatgaaggagaaatgttggataagaataggataagcaagaaaaacccgtttgtttcggaaagagcttctcaagaagttgaagagatatggactctctggaatattatcctatggggttacttaatacagtctattactccacagctttcctcttgggtctggttttatgtggctccagcaccggggaaaaatgggttatcttgctgcggctgagagatttcttaaag

SEQ ID NO: 12723 - DNA, 402 bp, Arabidopsis thaliana
  unsure at all n locations
  Clone ID: LIB25-059-Q1-E1-B12
accaaagcagcttccaagcatctagagaaaacagaatctacaatacttgtccttagtaagcaaaaatgtgtgcattagtacctccattgtttccaaactttgggtggccatcaacgggagagtacgacagctactacctcgccggagatatcctcaacaacggcgggtttcttgattttccggtaccggaggagacttatggagctgttacagcggtgactcaacatcagaatagctttggtgtttctgtttcgtcggagggaaatgaaatagacaacaatccggtggtcgtcaagaagcttaatcacaatgctagtgagcgtgaccgtcgcaggaaaattaactctttgttctcatctctccgttcangtctcctgcctccgggcaatccganaaacctaa

SEQ ID NO: 12724 - DNA, 420 bp, Arabidopsis thaliana
  unsure at all n locations
  Clone ID: LIB25-059-Q1-E1-G12
taaactatgtgaaggaggagaacctccataacaagaagcggattctctcagttttccggcggcggaggaacacaaagccaccggtttttagacacacagatttcattttcagttgttaaatggtaactanagaaacgaagttgacgtcagagcgagaagtagagtcgtccatggcgcaagcganacataatggaggaggtggtggtgagaatcatccgtttacttctttgggaagacaatcctctatctactcattgacccttgacgagttccaacatgctttatgtgagaacggcaagaactttgggtccatgaacatggacgaagtttcttgtctctanttggaacgcatangagaataataacaatcaacaacaaagcaagcaacaagctgcaanggttcaaaantcccgtttcggg

SEQ ID NO: 12725 - DNA, 382 bp, Arabidopsis thaliana
  unsure at all n locations
  Clone ID: LIB25-059-Q1-E1-H1
agtttctacctttttcttatcttcaagtgtgatatattgtgagaagattgcagaagcgtgtccaacttggttccctctctctctgaaattactcaatcatggggatttgcttgagtgctcaggtcaaagctgagagctcaggagccnagtacaaagtatgacgccaaaggatataggaagttcttgggaagcaagnctccgtccgtngtnctggtaagaacaaagccccccaactgaaggntaagattttaaaatccccaaatcccaaganttttancnttncngancttaaatcngcaancnnggaattttagaccagacantgtncttggtgaangtggattccgttgtgttttcaaanggatggattgaagaagaagtc

SEQ ID NO: 12726 - DNA, 91 bp, Arabidopsis thaliana
  unsure at all n locations
  Clone ID: LIB25-059-Q1-E1-H12
anaatctatncgctgctcacntcctggttttcttcaaggcctcaaagcagaacatgattcagcaatggggtgcgattaatcaaccnaatgt

SEQ ID NO: 12727 - DNA, 440 bp, Arabidopsis thaliana
  unsure at all n locations
  Clone ID: LIB25-058-P1-E1-B2
agtttcttcttgcttttgagaaaaaataattatatatttttatataggaaagggttaatttattaataaaaaaaaataaaaagaagcagaaaagagataatgcagggtggtaggcttttgacggtgttggtgtgcctcgcctccacggtggcgttggtgagcgccggtgacccttacttctactacacgtggaacgtaacctacggaaccgccgcgcctctcggaattcctcaacaggtgattctcatcaacggacaagttccctggtcctaacctaaactcaacctccaacaacaatgtcgtcatcaatgtcttcaacaacctcgacgagcctttcctcttgacctggagtggactccagcacaggaagaactcatggcaagatggtgtgactgggaactcatgcccaatcccaagcaaggnnccaantnacctttacg

SEQ ID NO: 12728 - DNA, 417 bp, Arabidopsis thaliana
  unsure at all n locations
  Clone ID: LIB25-058-P1-E1-B3
cttcttctgatcaaccatggctgctgctataagtgctgcagtctctttaccttcctccaagtcatcctctctcctcaccaaaatctcctctgtatcccctcaaaggattttcctcaagaagagcanagtgtgttacanaagagttgtgtcagtgaaggcncaggtgacaacanatactaccgaggcaccancagttaaagtagtcaaggagtctaagaaacaggaanaagggattgttgtcaacanattcaaacctaagaacccttanactggtccctgccttttgaacaccangatnacccggtgatgacgctcccggtgagacttggnacattgtcttcaccanccgaatgtgaggtnccgtagagagaangacantcgataggaagngattgcagcagggaangggancngcag

SEQ ID NO: 12729 - DNA, 432 bp, Arabidopsis thaliana
  unsure at all n locations
  Clone ID: LIB25-058-P1-E1-B8
atctacctcatcttcctcctccaccgcagttgcaaccgcccgaaacgccatcatgggaaacaccatcgtctgtatggtatactccaagaaccacaccatggagaacaccacagagcacacaatccacaccagttggccaaatggtcttaacaaagccagcaacggttagattcaacggtcttgatgcagagccgaggaaagatagggtgattctccgtcagccaaggagtagcaggaccagtctctggatatggtgtgttgccggtttctgttttgtgttcagccttttgcttatcttttttgcgattgccactttgatagtgtttcttgcgattagaccaagaatacctgttttcgacatcccaaacgcaaacctacacacgatctacttcgacacgccggagtttttcaacgggngaanttgnccnaagg

SEQ ID NO: 12730 - DNA, 420 bp, Arabidopsis thaliana
  unsure at all n locations
  Clone ID: LIB25-058-P1-E1-B9
tcgcgaaagagatatcttacgaatctccacaagtgcgaatttcgaacggagctacgattccatggcgaccaacggagagaaggtcacggctacggtggtgaatggcggagggctatctactggtgaaaaccctaagaaaattgtagacctcaacactacggagttagatcgtactgacgacattctcgacggagaagtcaagggattttcagattctggtgaaaagaaggaagaaaccgactctaatggtattggatcgacggctggtgttgattctggggatatctctccggtcgatgatatccaagaagaagattcgacgtgctgagaggtttggtgtttcggtgaaattgaccgaagangagaagcgcaattctcgtgctgagaagtttgggtactggtacctgcaancaattggtg

SEQ ID NO: 12731 - DNA, 487 bp, Arabidopsis thaliana
  unsure at all n locations
  Clone ID: LIB25-058-P1-E1-C1
tgntaccctgcagntacggtccgnaattcccgggncgacccacgcgtccgctcggatcgctttcccaagcggcgattccacggcggaccgtcgcgtcgtcgtgcgccaccacgttcctgtgtaactgttcggcggaccacctgagatctttgcttagcagatctcccgcagacgccaacgtcggtatgctctgtatcgcgtttccgaagtagtacggatccatcttcggctcaagccggtgccggcaattaaccgccattcgaaacgtcgtcgtcttgctcggatcgagattcctcgctcgtgtaacggatcgccatagctgagcgctgagagattggaacgatgaaatctcaagccgtccgatcataactcttcttattattcaaaaaactatccaaaacgtttggtaatcgcctctctgctgaaatgaaaaattctctccccgtagaaggtggtccggggtcnaaagtgaaaacgtgggccnacg

SEQ ID NO: 12732 - DNA, 417 bp, Arabidopsis thaliana
  Clone ID: LIB25-058-P1-E1-C10
ggatttgcaccattatgatgttaccattactccggaagttacatcaaggggtgtcaatcgtgctgtgatgaaacaacttgttgataattatcgtgattctcaccttggaagtcgtcttccagcgtatgatggtcgaaaaagtctttacactgctggtccacttccctttaactccaaggagttcagaatcaatcttcttgacgaagaagtaggggctggaggtcaaagacgagaaagggaatttaaagttgtgatcaagctaagttgcacgtgctgatctgcatcacctaggaatgtttttggaggggaaacaatcagatgccccacaagaagctctgcaagttcttgacattgttcctcgtgagctgccgacctccaaggaaaatcccggtgggccgtccctttaatcccccggaa

SEQ ID NO: 12733 - DNA, 420 bp, Arabidopsis thaliana
  unsure at all n locations
  Clone ID: LIB25-058-P1-E1-C11
aaccctaattcangctaaagtttgatcgttgatctaaaagctcgagtgatgaagggaaattggtcgatcgtacgaaaggttcttcatcgccagttctccactctccgttcctcgacaccatcgtcgcgattatctacttccatccgaccgcttgttctggccccaaactcgatatcgtcgctaatcgctagaaattcgttgttcactgcctccaacattggtccatccatcgattttaacttctccaacacttcgcttcctcatcggagaagcctctgttcggaagctggaggtgaaaatggtgttgttctagtgaaatcaagaggaagagttcatcaatgcaatgagcaaagctcaaagatggatttttaacatcggtcctccaattcaacggccgcccgggtgttggaccaagcaagg

SEQ ID NO: 12734 - DNA, 428 bp, Arabidopsis thaliana
  unsure at all n locations
  Clone ID: LIB25-058-P1-E1-C12
ggagatggaggcacttaaggtatggagtctaacggcgacgccactgaaacaattactccgtctatcctcttcttctacacgtctcgccaccacaatatatggacgaagatcctaccacttatcacctgcgctacgatgtgcctccgcagcttcttcttcttcttccagtgccacgacggctgaaacttctaaaccctccggccgcaatcgccggtctgcgtcatcttccaattccacctctgatcgtgaagctatccgctccattcgccttaaaaaggttgaagaattgagaggccaaggtcttgaaccttatgcttataagtgggaaaaatcccacagtgcaaatcaagcttcaagaagatatataagcatttaactaacggtgaagaatcaagccatggagattgantgggttccaaaagctgggg

SEQ ID NO: 12735 - DNA, 441 bp, Arabidopsis thaliana
  unsure at all n locations
  Clone ID: LIB25-058-P1-E1-C2
aacttcctaagaaaaaaaaacagagagattttttttctctttctaaagcttttttatagagtaaagatgttttcagagcacttaccttcttcttcatctcaagttttccaagaacacttcatcgacagtttcgtctccagaaaattgcttcagcagatcccatttgcccacaacgctcaacaagctcatgtacctgataagaacaacttgagcggcaatgttctcatgctgctctctatccttttgtgcggtatcatctgctccctcgggttgcattacataatacgttgtgcatttatacgttctcgaagtttcatgatctctgatcccatctctatcccatccacaccaagagattcatcaagtaaacagagggatcaagaagaaagccccangatgttaccaanttgggaattncncncccgggaagtaaccnggggg

SEQ ID NO: 12736 - DNA, 431 bp, Arabidopsis thaliana
  unsure at all n locations
  Clone ID: LIB25-058-P1-E1-C3
ggacgcgtccgtcttctcatgctctttctaccaaggagaagattttctcgttaattttgtttgacttgcctcttcgaagcaacctgattctgtggtctgaatcttttcaagggaagagaagataagctaaacaagagaatggtgacaggttgtgttgatcttcatcaatctttcaaatctgcagattcaccttctgtgccaattcctcctcctcttccatcaaaatctgatggactcaagaaaaaacttgggcatancagcgtttcgacagccacaagagatatgtgggatcgtcttttcaatgacngntacaaagctgatgtagtcatctanacagataatgggcangtatccatccatgcncatgccaacatcctttgggaactggctccaccggncnttcanacggcaatgttgnaagccaagccnng

SEQ ID NO: 12737 - DNA, 419 bp, Arabidopsis thaliana
  unsure at all n locations
  Clone ID: LIB25-058-P1-E1-C5
agagagatctagaagaagaagaagaagaagaagaagggggaataatggcattgcaatggctgattctgtcgtatgtggttgccgccgaggtagcgatcgccgtcatcttgactctcccttacccaatgctcctgaagaaacgcatcgtatcacttatctcgctcatactcaatcctgccgcttccatcgtcgccttcgctggatttcaactcctcgatatttactggaagaatgagcataggctattgtgctcatctgaagtttgcactactacagagcgggatcgtcacgagaaatccgtctataaggctcagaggaatggggttctgtgtgcggctgggatccttctctactggtgcatcttccgcatctgcaagtaccacaaagaccttgagcgtttggagcaattnnagaaaaaa

SEQ ID NO: 12738 - DNA, 425 bp, Arabidopsis thaliana
  unsure at all n locations
  Clone ID: LIB25-058-P1-E1-C6
aggttccaagagaacttagcttcttgttctacgtacgacaccaaaaattaattcaaaaaagaaaaagaagagagttcaatgagaaaacattctcttgatcgatggcttttaacagctgttcttgtcgttctcctctcgtcttcttcctccttcgcggccaagaaggacgccaagaagaagaagaagagtaataaggaggtgacatatgatggaacctctttgatcatcgatggcaaaagagagcttctttattctggctctattcattacccgagaagcactccggaaatgtggccaagtatcatcaagagagccaagcaaggcggtttgaacacgattcagacatacgttttctgggaatgtacatgagcctcaacaagggnaagttcaacttttcggggacgagctgaatttggggaagttcg

SEQ ID NO: 12739 - DNA, 384 bp, Arabidopsis thaliana
  unsure at all n locations
  Clone ID: LIB25-058-P1-E1-C7
gagagcaagcagcggcgcagaagttgaacacaagtgaagctcacaatggcgaggattaaggttcacgaattgagggagaagtcgaagagcgatcttcaaaaccagctgaaggaactcaaagctgagctcgctctcctccgtgtcgctaaagtcaccggaggtgctccaaacaagctctctaaaatcaaggtcgtgcgtaaatccatagctcaggttttgacagtgtcttctcagaagcagaagtctgctctaagagaagcatacaagaacaagaagttgcttcctcttgatctccgtcccaagaagacccgtgctattcgtagacgcctcaccaaacaccaggcctcgttgaagacangagcgtgaagaaggangaaaggggtt

SEQ ID NO: 12740 - DNA, 426 bp, Arabidopsis thaliana
  unsure at all n locations
  Clone ID: LIB25-058-P1-E1-B11
aatttgaggtgtcttctacagatcaatattgatctccaacactctctggttcccagatcttcttcaaccttataccctagtttcgcaatttcattctcattttctccgctcttcatctctttcgatcaaccaatttacgacatggatgaggttgttgttgaagtggagaagacgaagagagaatgggaagaagcgtacgagaagacgattggacatattatctcgattcaacagtacggtaaatcaaggaggggagatggaggagaagagaagttttcgttacagaggctcaacggattggctcaggatggtctctctcttctcaattcccttcaattcaatttggatctgctcgcacctcaagcttccntccgaangatcagggtcaatccaatccagtcactcccttggaaacgttgggaagga

SEQ ID NO: 12741 - DNA, 433 bp, Arabidopsis thaliana
  unsure at all n locations
  Clone ID: LIB25-058-P1-E1-C8
aaaaaaaagtttaaaacaaaaactaaaaaaatagaataatggcaagagttcaactattgttatgcttcaccattctatttgcatctgtgacccttcttgacctagtatcagcacacctgaaatttaagccatctttgcctcaaatcgaagatccaaagacggtgaaggatgtagagccttacaccgttaaagtagtaatggtctttgtggccgacctcgagaaggaatgtcccaagacaaacaagttcaaggccttctttgagaaacttagaggattcgccaagtatgtttgcccaataagaaggattggccaagtagattacgaccgggacatgaagggcaaagccgggggtatcttcaagggcatatcttcttttgcgattggaaagattanggagggaaattcangaaggaaaaacaggaggctantngg

SEQ ID NO: 12742 - DNA, 432 bp, Arabidopsis thaliana
  unsure at all n locations
  Clone ID: LIB25-057-Q1-E1-H1
agaaccaaactcagaccgagagatagagattgagggagagctctagctctgtagaaaagaaggattcattcatcatatccagaaatggctctaaagtttaaccctttggtggcatctcagccttacaaattcccttcctcgactcgtccgccaactccttctttcagatctcccaagttcctctgcctcgcttcttcttctccggctctcagctccggccccaaggaggttgagaagtttgaagaaaccatttacgccacccagggaagtgcatgttcaagtcttgcactccatgccacctcaaaagatcgagatcttcaaatctatggaaaactgggccgagggagaaccttctgattcaccncaaggatgtggagaagtctnggganncccagganttcntgcctggaccctgnatcaagangngttttg

SEQ ID NO: 12743 - DNA, 403 bp, Arabidopsis thaliana
  unsure at all n locations
  Clone ID: LIB25-057-Q1-E1-H12
ttcttctacagaaccctaatttcatgttctaggtgtctctcgaatggttctcatctcattgattactcaatctctagggtttagtggttcanccaaattcgtaccctaatgggtgccgtagcgatcaatcgtaaacgcagcgacgaatccttcaatttcattaatcaacaatcaaccaaccctttangaagttcaccgtatttccaaggcttccaagaaacgaagattctcattcgctatgtctgaagattctggtaagccagcgtcttcaancccaacaatttcgaggatttcaaggtacccctgatgctnaagctcctctnagacnagnagattcatgcgcctantagaaggaattcntanaatatngnaanggcaanatcctaaatgcnttacnggcgaa

SEQ ID NO: 12744 - DNA, 429 bp, Arabidopsis thaliana
  unsure at all n locations
  Clone ID: LIB25-057-Q1-E1-H3
cttgtttacaagcatccatgaattctctgcttccacgctcttcttctttttctcctcatcctcctctatcttcgaattcatccgggagaagaaacttgaagacttttcgttacgcctttcgcgccaaagcctctgccaaaatccctatgcctccgataaatccaaaggatcctttcctctccacgctcgcttctattgccgcgaattctccggaaaagcttctcaatcggccggttaacgctgatgtgccgccatatcttgacatctttgactcccctcagctcatgtcttctcctgcacaggttgaaagatcagtggcttataacgagcaccgaccgaagaactcctccagcaagacttgncaactaagcttcntgacggggagaaattgtttacattgggaatggcctccttgttgccngggaatgg

SEQ ID NO: 12745 - DNA, 520 bp, Arabidopsis thaliana
  unsure at all n locations
  Clone ID: LIB25-057-Q1-E1-H4
gnnnnnnnnnngnaactgtntacgcctgcccgtngcccgtccaaaaattcaagggtcnacccacgcgtccgcacacgcgtccgctaaaatcgcgaaagagatatcttacgaatctccacaagtgcgaatttcgaacggagctacgattccatggcgaccaacggagagaaggtcacggctacggtggtgaatggcggagggctatctactggtgaaaaccctaagaaaattgtagacctcaacactacggagttagatcgtactgacgacattctcgacggagaagtcaagggattttcagattctggtgaaaagaaggaagaaaccgactctaatggtattggatcgacggctggtgttgattctggggatatctctccggtcgatgatatccagaagaagattcgacgtgctganaggtttggtgtttcggtgaaattgaccgaagaaggagaagcgcaattctcgtgctgagaagtttggtactggtanctgcaacaatggtgaatggctcaaaagg

SEQ ID NO: 12746 - DNA, 87 bp, Arabidopsis thaliana
  unsure at all n locations
  Clone ID: LIB25-057-Q1-E1-H6
cttccgtttcttcaanagtggaggaagtgcctatctancgccacggagcagcctcctcctgcctctccgtnaccaccgcctccggga

SEQ ID NO: 12747 - DNA, 366 bp, Arabidopsis thaliana
  unsure at all n locations
  Clone ID: LIB25-058-P1-E1-A1
atgtatacacacatatagttacaaacacacatacacaaaacacaagatatataaaaatgtcttgttataataaagcactattgatcggcaacaaagtcgtcgntatacttgtattcctcctatgtttggttcactcgtcagagtcacttcgancactgnttgcatgtgattcancaaacgggttaaccggacgctccggttctgtcnggccaatgtaccgattcatgtgngagttcaaagatttgctccnggaaagntcacnttgcacggagaagatccgnaacctcntcaaaaatgcngccgccgnnccaangtctcgggnattggnggccaatnantgggggggnccnaagggcccccacgggg

SEQ ID NO: 12748 - DNA, 427 bp, Arabidopsis thaliana
  unsure at all n locations
  Clone ID: LIB25-058-P1-E1-A10
cattgacaccaagtggttcaagatcttgggcaatttttctcttcatcaccacctgggttttcttcttcatagcacaagtgtgtttacttgctggctctgtacgaaacgcttaccatacaaagtaccgtgtctactttggtaacacttccccttcttgtcgatcactgaggaaaggcgtgtttggggctggagcagcattcatagtgctcacggggattgtctccgaagctttactatgtgaccctttcgagggccaaagactttcaaccttcaagagatcccggtatccgaatgagtagcctgtagaacttacacctgctttgtagatttagaataattatgttcattgttggttatcaacctactaacctanggtcaantgggtgttaaggaatntaatnagtaatggagggnaaaccaacatttt

SEQ ID NO: 12749 - DNA, 419 bp, Arabidopsis thaliana
  unsure at all n locations
  Clone ID: LIB25-058-P1-E1-A12
cttcctcaagtcactttttgagtcgcagcaatttggcgtttggtatctctcaatctgctgcttctccttctcagtcatggtcatggatatcgatttcaacgagtacaagctcaggtgcgagcttcatggccacgatgatgatgttcgtgggatttgtgtgtgtaatgatgagaatatagctacttcatcaagagataggaccataagggtttggtcactggatccatctgataagcgcaagtatacctccgagaaaattctgctgggtcatactaagctttgttgggccacttgcatggatcccaccaactgatgaataccctgaaggaagacttgtctctgggagtatggatactttcgtttttgnttgggatctgatgaatggngaagnatattcngacantnaaaaggnccacaaa

SEQ ID NO: 12750 - DNA, 416 bp, Arabidopsis thaliana
  unsure at all n locations
  Clone ID: LIB25-058-P1-E1-A4
agaatgtgggcgaggcttttgtcttcgacgaaccaaccgagtttcatgaagcaagctgacaagatccactcaaaccagttggttggtgaaccagggaccatgaaatggtgatcaacactgtctacaaaaacattcgtttgtgttttgacttgaggacatctttgtttgggaagtaaggtttcttaatttaatagaaagcttttcaaaaattgttttataatattcttcaagcaaaganaagagagagagataactcntgtgagaataatgtaacaactcttggttccaactacaactttgcttctgtatatatcccacgctgantctttgaggctcatgttacttacaacngccgcgntngnnntccgccattaaccnnggancgncgcccnccanggagggntnccccagancna

SEQ ID NO: 12751 - DNA, 423 bp, Arabidopsis thaliana
  unsure at all n locations
  Clone ID: LIB25-058-P1-E1-A5
tctcttccgtcaatatggaaggcgtcaccgtcgtgtctttcttccttcttttcatcgccaccgccatggccgccaagtccaccgtctccttccgtgacggcatgttaccaaacggagacttcgagctangaccaaaaccatcagacatgaaaggaacagaaatactaaacaaactagcaataccaaactgggaagtcacaggattcgtcgaatacattaaatcaggacatnaacaaggagacatgcttctcgttgttcccgccggtaaattcgctgtaagacttgggaacgaagcatcgatnaaacaaagactaaaagtggttaaaggaatgtattactcactcacttttaagtgctgccaaaaacttgtnnaacaagnacgaagagaacttaacatatctngttagncacctgantcccngg

SEQ ID NO: 12752 - DNA, 404 bp, Arabidopsis thaliana
  unsure at all n locations
  Clone ID: LIB25-058-P1-E1-A7
gcgaaaccctagtcgatttcgagatccaaccaactctgctccttatctcagcttgttgaatttgcgaagtatgggagacgctagagacaacgaagcctacgaggaggagctcttggactatgaagaagaagacgagaaggtcccagattctggaaacaaagttaacggtgaagccgtgaaaaaagggtacgtgggaatacacagttctggattcagagacttccttttaaaaccggagcttctcagagctattgttgactctggatttgaacatccatctgaaggtaataaacgatatttcaatctattggtttggagtgagcttaaacatgtgctaaagccaccaatttaaaaggatatggaggttatcatctaccntataaaggntttcctcggntanaatt

SEQ ID NO: 12753 - DNA, 436 bp, Arabidopsis thaliana
  unsure at all n locations
  Clone ID: LIB25-058-P1-E1-A8
gaagctcttgaaggtgttgcaatggaactggaggattcattgttcccattgttgagagaagttgatataggaacagatccaaatgaagtgttccaagatgtggagtgggctattctgattggagcaaaacctcgaggccctggaatggaacgtgctgacttgttggacatcaatggccaaatctttgctgagcagggcaaagctctgaacaaagctgcctctcctaacgtcaaggttcttgtagtgggaaacccttgcaacaccaatgccttgatttgtcttaaaaatgctcccaacattcctgcaaagaacttccatgccctcacgaggttagacnaaaatcgtgccaaatgccagcttgctcttaaagccggtgttttctatgacnaanttgttgnataatgaccntatgggggaaatcacncccncgnancng

SEQ ID NO: 12754 - DNA, 428 bp, Arabidopsis thaliana
  unsure at all n locations
  Clone ID: LIB25-057-Q1-E1-G7
tgagatnagattaatctctctgtgaagtcgaagaacgaaaccctagttcccatggatctctcttcacgcttctcatcgatccttagccttctcttgatctccatctccatagcttcggctgagattcgtaaatcagagatccgatccgatgatcgtccaatcanccctttagacgaattcggtttcactcacagcggtcgtcttgagcttgacgcttccaagatctggntttccaacagcaatcccgatctcgatctctccaaagtgggcttctttcnctgcactagagacgcttgggttcatgtgatccaacagcttgaagaagaagagatcacgtgcgctcnacaatcagatctcgtnaagcatgtgttcaccttcaacaatctcaagggaggagatnagagcagattcnncaacggtnntcnagg

SEQ ID NO: 12755 - DNA, 393 bp, Arabidopsis thaliana
  unsure at all n locations
  Clone ID: LIB25-058-P1-E1-A9
cgattcacactgtgggtaatcggattcgtggaactgcccaagcccaagctcgcgttggttctcttcttcaaggaagccaccacatcgagaaacatctgtcgaggcatcggacgttgattactgtggctccgaacgcttctgtgattggtgatgttcagatcaataaaggctcgttcatttcgtatgcaagtgtttctcgtgatttgcagtatcctcgtgcaatgggaatgggacaggtccggagatttagcgaagatgtttctcacatgcctgaaatggaagactctgatgttctgaatgcattcaaaggacttgatggctgcagattgggctgaagcttccttctgctgttgttnaaagatgctaaaaaccgcgatatcnnnaaaacaacag

SEQ ID NO: 12756 - DNA, 424 bp, Arabidopsis thaliana
  unsure at all n locations
  Clone ID: LIB25-058-P1-E1-B10
ttcctctctctcgcggaaaaaaaaaccctagtttttctctcttctcaccgatttttcattccgatgcttctggtcgcatagcccatccccgcagatctgttaattccggttacatatgaaataacattgaaacatttgatggatgatgactttacagatggataaaactactgcttcctcttcatgggagcgagccaagtccatatatgatgagattgctgagttagcaaacaagcgtcagaaggctgggaaatccacctgacccaaatttgttgcaagctcttacgtgagaagtatgaagcaataattcttgaaaagtcataccttttctgagcaagcacaacattggaaattcctccggggcagttgcattacaaacggggttgaanaatttagnntacanatcaaatcggggtaatnggct

SEQ ID NO: 12757 - DNA, 427 bp, Arabidopsis thaliana
  unsure at all n locations
  Clone ID: LIB25-057-Q1-E1-D1
cgtggaggacaaggcaaaattcggtgtgcaaggcactggatattgggacccttgtttcctcgtgagagaattttcaatcctagggcttaaagagcacgttcctagtataaagctgattcacagatgcggngattcttgattaaccaagctaaaggtctcgtcgaccattctcgtcgtcaacatcaccacaaaagtccaagctttctctctcctcaacctcgtccccttgcttcttctcctcctgctctgtctcgtttcttctcttctacttcggagatgtctgcttctgattccacttcttctcttcccgttactcttgactccatcaatcccaaggttctgaaatgtgagtatgctgttcgaggagaaattgtcaacattgctcagaagttacaagaagacttgaagacaantaaggntgcntatc

SEQ ID NO: 12758 - DNA, 423 bp, Arabidopsis thaliana
  unsure at all n locations
  Clone ID: LIB25-057-Q1-E1-D2
ctttggatctaagtctacagatgaagggtgaagatagacccatatcctttgtgcgtgaggaggatagagatgacaaaagaagaagagcggagttcattttgagacagtgtatggagaacccagtagacctcaatcagttgtaaaataagtgattcattacagtctgtgtagcgtactattaatcttgtgatttgtaacctttctttatacaggcctatgttatgattatgattttgtgactgaaagaatgagaatttctaacctatcttttaggcaattgatatgatgtctttctcatgagattcttgttacataacttaatgttagtttcaaaaaaaaanngcgnnggnnacgggnnnaaaaaaaggggcggccgctctanaaggatncaaggcctaacgntaccccgtgnatgncnncgtt

SEQ ID NO: 12759 - DNA, 283 bp, Arabidopsis thaliana
  unsure at all n locations
  Clone ID: LIB25-057-Q1-E1-D3
nattaanccctcacactcacagagaccggagaanangcagagagaaagagagagagagagattcaccgggtgataacattgangcagaaagattctccggtgataacattgangctgangagcaatgtatccgactggtcaacagatttcgtttcagancactccgttgaatgttcaggatccaacaangatgatgaatttggatcaatcttcaccagttgcaaganatgaanctcagaatggaggaggcattgctcacgctgagtttgcnatgttnaantcc

SEQ ID NO: 12760 - DNA, 56 bp, Arabidopsis thaliana
  unsure at all n locations
  Clone ID: LIB25-057-Q1-E1-D9
aattcccgaaaattggatgggtgttatccngttaaanggcgaaaaaaccggcgcca

SEQ ID NO: 12761 - DNA, 366 bp, Arabidopsis thaliana
  unsure at all n locations
  Clone ID: LIB25-057-Q1-E1-E2
antggatggtgatnaacggaatgcntgttggtaagtacgagcttgggaggacactcggacagggaaattccgcnnaanttnaatttgcnatngatacncttaccggcgaatcattcgccatcaaaatcatcgagaantcgtgtatcacacgtcttaacgtctcttttcaagattaagagagagattcgaacactcaaagttttgaagcatccaatcattgtccgattacatgaggtcttggcnagcaaaaccaagatntacatggttctggaangtgtcactggagganacttatttgacagaattgtctcgaaangataactttcggaaacacattgacgaaaaatgttcaagcagttnaantga

SEQ ID NO: 12762 - DNA, 406 bp, Arabidopsis thaliana
  unsure at all n locations
  Clone ID: LIB25-057-Q1-E1-E4
ttttcnttcgccngccgggtcaaaactaccgggtcnacccacgcntccgggaacantggcgtttggagtagctgcaagccaaggagcacttcttcttgctggaggtgaaaaangaatgcnctatgcaatgccaaatactcgtgtcatgatacatcaaccacaaactggatgcggaggacatgtaaaggacgtnaggagacaggtcaatgaanccatcgaagcccgacaaaaaattgacaggatgtatgcagctttcactgtgacaacctctgggagaaaagtgcagcantacactgaaagagattcgntttccctatcancatctgatgccgctttgagttccgggctcactgganngtcctattgggaaacanaatacctgaancancctanaaggacaatgnnc

SEQ ID NO: 12763 - DNA, 430 bp, Arabidopsis thaliana
  unsure at all n locations
  Clone ID: LIB25-057-Q1-E1-E6
tttttaaanttattttttattttttggtaatcgtttctaagaaatctctcctcccgttgcctgtggactgcctgaatcaaaagacaatggcaacatgttcttcaagcttattggtgttaccaaatttgagattgagttctaaccaaagacgcaatttcaaggtaagagctcaaatctctggtgaaaacaagaaggcgacatcattggaaccagtgaacaacaacggttcggtctctttgtctactactgttcaaaaccaaaaaggggcaaatgaagtgaatgggaaagggaaatccaagagaaagatagtgagtgatgaaattgagttgttatgggatgatgggtatggctccaaatctgttaaagattactttgctgcggctaaagagattttgaaggctgatggtggtcctccacggggggtttaatc

SEQ ID NO: 12764 - DNA, 425 bp, Arabidopsis thaliana
  unsure at all n locations
  Clone ID: LIB25-057-Q1-E1-E7
ctcttaagctctacgctcctgaatctgcccctgctcttgctctcaatgctcanatcgagaaaaccaaacgcaggttcgacaactacgggaagtacggattgttatgcgggtcagacggtttaccgcacttgatagtgaacggagaccagcggcattggggagagttcattactccagggattcttttcctctacattgctggatggatcgggtgggttggaagaagctacttaatagctattagtggtgagaagaaacccgcgatgaaagagatcatcatcgatgttcctttggctagtcggatcatcttccgtggtttcatttggcccgttgctgcctacagagagtttctcaatggtgatctcattgctaaggatgtttaaaaagggaacttgttttccgcttttgggttactcnnccctaaa

SEQ ID NO: 12765 - DNA, 423 bp, Arabidopsis thaliana
  unsure at all n locations
  Clone ID: LIB25-057-Q1-E1-E8
tcacaaaaagtctgatcctttctctttagatttggcttcgagaaatggctcgcgatcggcgggaaggtctggagatcaaggtggtgaatccaccggcggcggcgacaaacaatgtggctgtagaaacgtctccggcgacggcgacgaggagacggagacaacaacaacgagcttcgttcgctgagtttagaccgtttaagctttggtttccatggcttgttccagctatcgtggtggctaacattgcccttttcgccatttcgatgtttattaacaattgtcctaagaactcggcttattgcttagctaggtttcttgggagatttgcttttcagcctatgaaagagaatcctcttctgggtcnttcttcnttgacattggagaagatgggggctttagatgtatcaatgggtggttcataag

SEQ ID NO: 12766 - DNA, 419 bp, Arabidopsis thaliana
  unsure at all n locations
  Clone ID: LIB25-057-Q1-E1-E9
agagagagagaaagaggcgaaaataatggcgtcgatccctccgccggagcttgacaacgactcactggcgtcatcgccgagatcggagtacgatagtcagccacgcgtacggttcatgtgtacttttggaggaaggatcttgccacgtccgccggataatcagctctgttacgtcggcggcgataatcgcatggtcgctgttcatcgtcacactactttcgcctctctccttagtanacttgccnaanctctccggtaanaagcaacataagcgtgaagttaccagctnccanncgaagatcttgacgcgttgatttccgttgcaacggacgaagatttgnangaacatgatggacgaatacgaccgccntcgcacagaatcaaaagcccacgnggcctctcgtcttcgtcctttttcc

SEQ ID NO: 12767 - DNA, 108 bp, Arabidopsis thaliana
  unsure at all n locations
  Clone ID: LIB25-057-Q1-E1-F10
tgggctgcancgtatgaaagaancancgttgagtcttcacaagaattactggatagagcattccgctgatctgactgntgaagctatgatgcttgactcgagagcttc

SEQ ID NO: 12768 - DNA, 487 bp, Arabidopsis thaliana
  unsure at all n locations
  Clone ID: LIB25-057-Q1-E1-F3
tacgcttgccggtgccggtccganaattnacgggtcgacncacgcgtccgcacctantcgcttaactaacgcaagaacactttgtgtatctgatcaaaattatgggaagaaatctcttggncatgatcgttttagatcagctccttccaaaacttttaggcagatcaattgcagaacttttcaatctggtgtgggtttgcttccaagacctaagagaacttcttcaacacctttaaccaaaggagctctttctcaagttcagtctcctcgttctcctaagtccgttttaccggtttttcatcatccatctgttgacagtggtagaaccagtcccattccaattgctaattgcagaggttctcaagatccgtaggtgttctaagtgagtttgttgacaaaaggagaagcctttcttattctgagctatgggcangacctacttactccaactcacctccaacgtgcntcngtgcccgaatcccaangt

SEQ ID NO: 12769 - DNA, 236 bp, Arabidopsis thaliana
  unsure at all n locations
  Clone ID: LIB25-057-Q1-E1-F6
aagagagcnaaccgtcacanangaaangtgaaggcgttccctaaggatgaccaaaccaagccttgcaagttcacagctttcatgggttacaaagctggtatgactcacattgtcananaagtggagaaacctgnatccaagcttcacaagaaggagacatgtgaggctgttaccatcattganacacctgctatggtggttgttggngntgttgcctatgtgangactcctagagg

SEQ ID NO: 12770 - DNA, 438 bp, Arabidopsis thaliana
  unsure at all n locations
  Clone ID: LIB25-057-Q1-E1-F8
ccatatnaancatgaaaatcctctcactttcacttctcttgctcttggccgctacggtctcggcatccgttccagggctcatcgaactcgtcgattcgaaaaccatctttgggaacgtagccgaactcttanagaaaganaaactttccatcaagtacgccaantgcagaagctggcaccttggtgttgagacctctaacatcatagacttcgacacggtgcccgcagaattgcaaagactatgttgaagactacttgatcacttccaanacagtaccaatacgatgtccaaaaccgtgtgcaaagaggcttatttctatgccaaaggacttgccctaagagaacgacaccgtcaatgtttggatccttgncctagatgataccctnctctcctaggtattccctactnacgncgggnatntggaanagggaacanng

SEQ ID NO: 12771 - DNA, 55 bp, Arabidopsis thaliana
  unsure at all n locations
  Clone ID: LIB25-057-Q1-E1-F9
tctanggcaaganctctccgatcacttcacttctcctagagcagaatctgatgaa

SEQ ID NO: 12772 - DNA, 144 bp, Arabidopsis thaliana
  unsure at all n locations
  Clone ID: LIB25-057-Q1-E1-G1
nganntnaacgcgcctttgttttcagtgttctaccagatcccttgcatcattggcacgttcaggcgacatgaatcgtggacatccgtacctaaagtgcaacgactgtgtgcacacgtttcgtgganagtcactgtgattnnact

SEQ ID NO: 12773 - DNA, 53 bp, Arabidopsis thaliana
  unsure at all n locations
  Clone ID: LIB25-057-Q1-E1-G10
gtcgcctctanctcaagtgagcttaatgggattcgtttngtttctgttgtcca

SEQ ID NO: 12774 - DNA, 435 bp, Arabidopsis thaliana
  unsure at all n locations
  Clone ID: LIB25-057-Q1-E1-C9
aaacatttattttatcttcttcttgttctctctttctctttctctcatcactatgaagagtttcaacacagaaggacacaaccactccacggcggaatccggcgatgcctacaccgtgtcggacccgacaaagaacgtcgatgaagatggtcgagagaagcgtaccgggacgtggcttacggcgagtgcgcatattatcacggcggtgataggctccggagtgttgtctttagcatgggctatagctcaacttggttggattcgcatgggaacatccgattcttactcaattttcctcgttcantaacntacnttaanctccaancatggccttgcccgaattgctaaccgttgcgccggattcccgntcaaccgggaaaacgggaatttacaccttacaatggaagtttggttcgattcttacccccggnggtg

SEQ ID NO: 12775 - DNA, 124 bp, Arabidopsis thaliana
  unsure at all n locations
  Clone ID: LIB25-057-Q1-E1-G11
cccaatcnctgcnacccgatctcctctctcttctgaccaggaggaaggacntcttggagttcgatctatctcaactcaagtggtgcgtaaccggcatgaagagtgttnagancagccagaagat

SEQ ID NO: 12776 - DNA, 423 bp, Arabidopsis thaliana
  unsure at all n locations
  Clone ID: LIB25-057-Q1-E1-G3
gcccacncgtcngtcctcccttcgcttcttcccaactngggattttccttttcttctccttttttctctacccatcgatctacacatcctgatcttcntagaagccccaatccttatacattccgggaacaaaaaacctagctttttttttattccggcttaaccagttttcgaaaaaccctagcttccatggcgaaaactcgacctggtgtcgcctccaaaattaagacgggaaggaaggagctggactcttataccatcaagggcaccaacaaagttgtgagagcgggagattgtgtgttgatgcgcccatcagatgctggtaaaccaccatatgtggcccgtgttgagaagattgaagctgatgcgaagaacaatgtgaaaggtgcactgtcgatggtantaccgccctgangagtcact

SEQ ID NO: 12777 - DNA, 427 bp, Arabidopsis thaliana
  unsure at all n locations
  Clone ID: LIB25-057-Q1-E1-G5
aaaaatcgacaacagtgcagacacacgccgatttgcgagatacacacagtctcacctaaaaatcgcaaaagaagaaaaattcggatcaaaattgtcttcaagcatcatggatccatacagggttcgtccttcaagcgctcatgattcccctttcttcactacaaactcgggtgctcctgtctggaacaacaactcttctttgactgtcggaactcgaggtccaatccttctggaggactatcatctgcttgagaaactcgctaactttgacagggagcggattcctgagagggttgttcatgccaggggagccagtgctaagggtttctttgaagtcactcatgacattacccaacttacttctgctgattttcttcgaggacctggtgttcaagactcctgttaacgttcgtttcccaactngtca

SEQ ID NO: 12778 - DNA, 726 bp, Arabidopsis thaliana
  unsure at all n locations
  Clone ID: LIB25-055-P1-E1-H9
cggccgcgggaattcgattattggaaatcgtagtacatattgtggcactatccgagggatttcggtgagtcctcgaaataaaaatcggatgatgtcagaaagaatttttatccaaacattaattggtcgtgtcttagcagacgatatatatataggttcccgatgtgtcgcctttcgaaatcaaagatcctgggattggacttgtcaatcgattaataacctttgggaacacaatcaatatccattcgaactccctttacttgtcggagtacatcttgggatctgtcgattaagttatggtcggagtcccactcatggtganctccgttgaanttgggggaaagctgttaggtaattatcgccggtcaatccgatccnggcgaaaccnggggactccaactaacaattaaagaaacttttcaaaaccgggcnggagttatttacaagganggtactggccgaaacaatgttccaaacccccnttataatngggaaaaatccaaattccaatggagggattttggntcaaacccnaaaacgtnaaacgttaacggggnatcccngccctttccaaaggntaaaaaaaaacttgncggtaanttattgnnaaccnaaaaattttgttcaaanancggtgaccaattnccaccaaaaaaanttttcctttaantcaaaaangggccaaaantgttccnacnaantttccaanaaacccccnangggnnt

SEQ ID NO: 12779 - DNA, 424 bp, Arabidopsis thaliana
  unsure at all n locations
  Clone ID: LIB25-056-Q1-E1-A11
ttttttctttctctttcgctctggagactggaatcaatcgagtaaagtgttcgtagctgagaaaaaccctaagctctcgtttttcgtcttctccgattctgcaagtatgagtcgatcaggtcagcctccagatctcaagaagtacatggacaagaaactccaaattaagcttaatgccaacagaatggttgttggaactctccgtggctttgatcagttcatgaatcttgttgtggataacactgttgaagtcaatgggtgatgacaaaactgacattggggatgggtggtgataaagaggaaacagcattgttaactgttgaagctctcgaaccaggttgggaagatnnnaagcttatganctttcacccccaaagtaatcatccntctggtaaagatgagaacnttgactntactttgcncg

SEQ ID NO: 12780 - DNA, 233 bp, Arabidopsis thaliana
  unsure at all n locations
  Clone ID: LIB25-056-Q1-E1-A2
aaagttgattcttcgcttaggcttgaaatctctccaatccanatctcaaattaaccttccatcgtcatctctttccctttttttttcccactttcnttgcgaatcgcgagatctcggaatcgcatccntgattttgggatactgttttttttttttttaatcttgtntcattttcacgtgaaattcntanctgcnanaactggacttgaatttcaacgagaattttgganatt

SEQ ID NO: 12781 - DNA, 422 bp, Arabidopsis thaliana
  unsure at all n locations
  Clone ID: LIB25-056-Q1-E1-A4
ttcgcttctcctctctcgctctctactcaggactcgtttactctttcaaagctaagctttcaagatgcaaaacgaagagggtcaggtcactgagctttacattcctaggaaatgttctgctactaaccggttgatcacatccaaggatcatgcctctgttcagctcaacattggtcatttagatgctaatggcttgtacaccggacagttcacaacctttgctctctgcggttttgtccgtgctcagggagacgctgacagtggtgtcgacaggttgtggcagaagaagaaggttgaagccaaacaaaactaagagcttaatctgtcttgttttttgtcgaatcttgtttttttttttccgaaagattgcctcatactgaagtaatgattttggcnttgggtcgtgggaacttaactaaatg

SEQ ID NO: 12782 - DNA, 418 bp, Arabidopsis thaliana
  unsure at all n locations
  Clone ID: LIB25-056-Q1-E1-A5
cacaataagatacagtcaaccaagaaagtcgagccaactgcagtgttggacaccaaagataaaacgagtaggcctaaatctacatctgtcgagaagaaatctgttgcagagaatggattgcctgggaatttggtcaaagtctctgttaatggtaaaagattagcggcggccaatatccaatggagttcactccctccatctctttcgaggatgggacaggaagtattgaggcatagagaagctgctcaagtagtcgcaatagaggccctgcaagaagcctctgcttccgagagcttacttcagtgcctcattatgtactccgatcttttgtcaacggcgaaggaagatgatcattgccagtcgttgagcagttcttgaaagccccattnccgggtttgaaaaaaccnccnaagttntg

SEQ ID NO: 12783 - DNA, 426 bp, Arabidopsis thaliana
  unsure at all n locations
  Clone ID: LIB25-056-Q1-E1-A7
gaaacaaaaatcaaaatacagttatccctggcttagggtttaaagcccgttgctgagtcttttgtaatctgacacacatcacaacaatttctctttacgttcttttggtacgatgcttttgtgttttcagtttatcttaactttgttttatttctcaattttacgattcatggttctgtaaatccatattgggcagtcttttcataaacaaaacgaggtgtgatgctaaatttcattgggacaacgctatattgtagaagacggtgaagattgttatacgttttgcaaggcagggatttatgatgacactcctccgggtcgttttgcttccttgaaggcaattggtttttccaanttangttttgaattantactccctannnttatcagggggtagcaacattaccngaangtgtcnccgnaacg

SEQ ID NO: 12784 - DNA, 410 bp, Arabidopsis thaliana
  unsure at all n locations
  Clone ID: LIB25-056-Q1-E1-A9
actgagaaactacggcgacgacgaagaatacggtggaggaggaagtacaatgagaatattaagctacggaatcgttattctctctttactcgttttctctttcattgaatttggcgttcacgctcgtcccgtcgttctcgtcctcncaaatgacgatctcaatagcggcggcgatgataacggagtcggagagtcctctgacttcgatgagtttggagaatccgaacctaagtccgaagaggagcttgatcccggttcatggcgatcgatctcgagccagatgactcaanagtccanggcagcctcgccgcagtactactccggcctcaaaaagattctatcggcggccaagttgagggaaaattttcaggttganggaaggaagcagtgggatgaagatnnaaggctgg

SEQ ID NO: 12785 - DNA, 414 bp, Arabidopsis thaliana
  unsure at all n locations
  Clone ID: LIB25-056-Q1-E1-B3
ccaaattcccccaattcccattccaactttaccttcngaantagaagaagaanccatagaaatgctttgaagtttctgtaaagagaaagatcnacaattgttttgaatatgccgaggcagaatcaaagcgtagagaatctacttctacttggcaaaatcaggaaacgtggttgttcttcgccgacatcgtcgacttcttcgattcctccgtgaaggtatagattcaaaagagcgatagttgttgggtaaaaagaggaaggatccactactcctgtacctacatgggagacttatggggtcgatctccttctccacgagcttccggtgctttacacgctgctgcttctccgtcgtctcactgcgggaagcaaaaccgggtaaagtatcaactcccggcnccngttcanctaagga

SEQ ID NO: 12786 - DNA, 423 bp, Arabidopsis thaliana
  unsure at all n locations
  Clone ID: LIB25-056-Q1-E1-B5
aaaactgagtcgagatttggtgacgtgatgaatcatttggtgataatctctgtgttcttgagctcagtattgttgttatatagaggagaatctggaatcacaagtagttttattcgatctgaatggcctgcggttgatataccacttgatcatcatgttttcaaagtcccaaaaggatataatgcaccacaacaagtacacataactcaaggtgattatgatggtaaagctgttatcatctcttgggttacacctgatgaacctggttctagccaagtacattacggtgcggttcagggganatatgagtttgttgctcaaggggacntaccataactacacgttttacangntnnaantcnggcttantcatcactgccttgtcccngaccttgagcaagganncncannccantaccaggg

SEQ ID NO: 12787 - DNA, 56 bp, Arabidopsis thaliana
  unsure at all n locations
  Clone ID: LIB25-056-Q1-E1-B7
agcagctgaacgagctcttgcctttganattgganggcatcgtgatcgattcattc

SEQ ID NO: 12788 - DNA, 395 bp, Arabidopsis thaliana
  Clone ID: LIB25-056-Q1-E1-B8
gctaatcctcgttggttgattctctaccggaagcctaatcaaaccctaactaagaagaagaagaagaaagaggattcaagtgttcatcttttggctccaattccaattctcaattctccaactgtggaatggtcaagtctagtcgctgttggttcttatctgtacgccattaccgcagacatcaaagattctccatgctctaacgtttggtaccttgactgtcgaacgcacacttggcttgattctccaagattgcgactggctcacatcaatagtgactttaatgggaggacgtatttcccaggaagctctgaaaagccagattctttgaactgtgttgaagtgtacaacacaaatactcagacttggaatccgtgcctccccaaaaacgaaag

SEQ ID NO: 12789 - DNA, 400 bp, Arabidopsis thaliana
  unsure at all n locations
  Clone ID: LIB25-056-Q1-E1-C11
ttctcttctcatcttccctttttatgattttcttttcccattttcctctgcgtttgattatctgagagagagagagaagaaacttgttgaaacaaaatcaacaacaacttatagaagaccaaaaaaagattcataggatcttttgcttgacaatgaaagaaggaaaggatgggtttgttcgagcagatcagattgatctaaaaagcttagacgagcaactagagagacacttaagcagagctttgactttagagaagaacaagangaaagatgaagaagacacaaccgccgtcgccatcggtggctctgcttcgtcttcccctgtcactctaaacggcggcggatttgttggcaagaggaaacagagacttgagtggggagatngattcttcngaaactt

SEQ ID NO: 12790 - DNA, 391 bp, Arabidopsis thaliana
  unsure at all n locations
  Clone ID: LIB25-056-Q1-E1-C12
attccggtgcagctaagaaccagagatagagagatagagatgcggaggatcaattcactgtacggaagaattggtctcctaaaacgagtacccgagaaatctacgaagcaagctcatacatttctcgcatctctctccttctctacggaaggtgcttatggcggtgacggtgagtttcagcaagaacagctccaaagtcaagatctttgaccgagacctcaagcgaatacatcgtgatcgagcggcgtggctttctcgccaaaaagaacgattcttttgttgacgctgttgcagataatctacttgatcgcttagaggattgtnaagaagagttttcccactgcattttgtttggganggatttcctggtgctgttaagagattaccnant

SEQ ID NO: 12791 - DNA, 477 bp, Arabidopsis thaliana
  unsure at all n locations
  Clone ID: LIB25-056-Q1-E1-C2
gttacgttgccnggccggtccanaataacgggtcganccncgcgtccgataaacacaggtccacgaggtgtgacacgccttgtccaaggtgttcaagcctttgtacgggttggaggagagtggctaaatgatttatctaagtctacaagcgcgtctggtggattaccaagtgaattgcagcttggtctactgtctcctctatatttgaggaaactctttgaacgcatgggagctacttacattaagctgggccagtttatagcatctgcgccaactttgttcccaccaagaatatgtcaaagaatttcagaactgctttgacaaagctcctcctgtgccatttgaagaaattcgtaaaatcttgcaagaggagcttgggagacncattgaaagtgtatacgaatatgttgaccctacgccaantgcatcagcctcaatagcacaaatccatgggtgcaaggcttcnangctcccaag

SEQ ID NO: 12792 - DNA, 728 bp, Arabidopsis thaliana
  unsure at all n locations
  Clone ID: LIB25-055-P1-E1-H8
ggacgcggagaaggctactgataagactaatgtccatctctcctcggaccatgagcgttgtccggtggaggaagtggctcttgttgtgcctganacggatgatccaagcctaccggtgatgacattcagagcttggttcttgggtctgacctcttgtgttctgctcatctttctcaacacgttcttcacataccgtacgcagccactcaccatctcagccatcctcatgcagatcgctgttttgcccatcggcaagttcatggctcggactcttcccaccacttctcacaaccttcttgggtggagttttagcctcaatcctggtccttttaacatcaangagcatgtcattancaccatctttgctaattgtggcgttgcttacggtggtggtgatgcttactctattggggctatcactgttatgaaagcttacgatagacaganccttaagcttcatctgtggtctcatcatcgtcntgaccactcaagattttggggttangnttgggctggggattctagngaggtaccgttgtttgattctggttgacaatgttgggtgggccttcaanatctccgcntccaagnttccgccccntncangangcggntggcaacnangaaggggaaancnnntccaanagggcttgnccanggatnaggttnctttcgaagttagcccctnggtggcaaaggcntnattttnctagncanttcnanggcga

SEQ ID NO: 12793 - DNA, 154 bp, Arabidopsis thaliana
  unsure at all n locations
  Clone ID: LIB25-055-P1-E1-G8
gttaccngaaatgattttgatatgccagaatcttngtaataaccttcagcatcctaatgagtacatccgtggagtgacacngaggtttctctgncggatgaagganacngaaattgtgggatcctttaaccncaacagtgttacaaaaatctgg

SEQ ID NO: 12794 - DNA, 666 bp, Arabidopsis thaliana
  unsure at all n locations
  Clone ID: LIB25-055-P1-E1-G9
gtnnanttgccantcacttgtaatacgacnnactatagggcgaattgggcccgacgtcgcatgctcccggccgccatggcggccgcgggaattcgattattggaaatcgtagtacatattgtggcactatccgagggatttcggtgagtcctcgaaataaaaatcggatgatgtcagaaagaatttttatccaaacattaattggtcgtgtcttagcagacgatatatatataggttcccgatgtgtcgcctttcgaaatcaagatcttggggattgggacttgtcaatcgattaataacctttggaacacaatcaatatccattcgaactccctttacttgtcggagtacatcttgggatctgtcgattatgttatggtcggagtcccactcatggtgacctccgttgaattgggggaagctgttagtattaacgcgggtcaatccgaatcggggaaacgggggactcaactaacaattaagaactttcaataacggggnggngttattnaccagggaaggtactggccaaaanangttccaaaccccccttnataagngggaaaaatcaanttcaatgaggatttggttcacccnanacgttaaacgtnacggggaatccngcctttcaaggttaaaanaaacnttgccgggaaatttttnnaa

SEQ ID NO: 12795 - DNA, 725 bp, Arabidopsis thaliana
  unsure at all n locations
  Clone ID: LIB25-055-P1-E1-H10
gccatnctanttgcnntgacactatagaacactcaagctatgcatccaacgcgttgggagctctcccanatggtcgacctgcaggcggccgcgaattcactagtgattattggnaatcgtagtacatattggagaataatgacctacttgaaaaattattgcatcattttgatcatcaaattgaaatagtccatctcttttttcttttcttttttcgtctaaaagaaatagtccatctcaaaactttaatatanaagcttgcttgataggcttaagggtgtgtgttctttgttgcccaaacaaaaagttctaagttccaaatatagcggattcattgggctccgaacaaatgagaagagatctattacatacaagtttaggttttaaaaagtaccaaaataagtccataaggtaatgtanaacaatatgaaactgataattaattccggttttaacttaaaagaaacctttgaatttaaaagtagagataagtaactttgtagtancgtgttatcagctctaagttaccagaaacctttaaattttgtanaaagataagtaaatttgtagtaatcattnccatttancaanaangtacacgatttccaaaaaatngaaattccccngccgcaaagggnggccggaanaatgnaaattcgggnccaanttcccccaaanggggncctattaaaattcanggncgtcgtttaaaaagtccnnanngg

SEQ ID NO: 12796 - DNA, 596 bp, Arabidopsis thaliana
  unsure at all n locations
  Clone ID: LIB25-055-P1-E1-H11
attacgcctttctatttgnncgacactatagaaaactcaagctatgcatccaacgcgttgggagctctcccatatggtcgacctgcaggcggccgcgaattcactagtgattgtctttacggcgagttctgttagctcaataaccggagaatcgccacagaagaaactgcttcaatcggcgtcttcttcttcttctctggcaatacttcatgacgaaatcgctgtgagttgcttcgcangcgtcccgaagatgttactanccggngatttcactcgtctgcaaggaacttcangggtttaaatgggttcgccgggagatctacatcgaacgggcaagttanttcgtccgcactgaaaatatccctaatatggttgcaanttagatcaagaagctanaaaaaaccccttaactngggaacaaaactccaatcctaaaaacccctttgggaacaacaagggattaanccattagattaanttccgggttccatcattcccttcaattcccngggatatgggaacaactattaancncgtccgggttctgaaacttacgntcattgggnggntgcattgacggganaattaanncccaa

SEQ ID NO: 12797 - DNA, 405 bp, Arabidopsis thaliana
  unsure at all n locations
  Clone ID: LIB25-055-P1-E1-H3
aantcttatggtataacagatgtctacgaagttgagcatttgaagttttgtggaatcttacgatcattgggctttaaaaagagagctgctgcgttccagcgggctttgtgtagagcaaagagttttgccacggaatgtttttgttgtcaaagtagtagtatatctggttatgggaaagtgacagatttagtttaattaagttgaatcccttattagtcatatgcattaagttaagtaaacttaataagttgtgtggcttagaaataatattgttttgtctatttttggagtgggttgctcttggggtgtagaaaaatgtcactcttcattggattaagtaatatacatttttttgttcaaaanaannaanaaanggnnncaaagnnnannnngnatcntaagcnc

SEQ ID NO: 12798 - DNA, 811 bp, Arabidopsis thaliana
  unsure at all n locations
  Clone ID: LIB25-055-P1-E1-H4
tggttgcccgggcntacggaaancgnaaggtcgncccangcgtccgaaaatatttctcttacttacactttcttcatcttcttcacataaaccctaaacccctttttctcgctctcttcctggtttaaaatgttctctccattgacgaagagagctaagcaaagctcacgcaacgaaaaaactccacgcaatcgagtccctccgccggattctccagtaactccggcaactcaaaatcggaacaatttcatctcagatcgtcccgccactggaactcctgctccttgggctcctcgtttatcggttctagctagagtttctcctggaaacaatggtgacaaaggagttgattcagatcaattaaagcctgtattcgttggagagtttcctcaattgttgcgcgatgaacaaagttatcctgggtgatgcttgtgtatccggtggaatggataaagagacctgtctttcttggtttattactgggaagtaaagtttttgtatgggaagtcatttgacgactttaccgtcgagaaaatgtgttgttcttgaacttcctgttgttgttttggttaatgaagagtccggtagtggtttacaaagatggggaaaagttggtggttaaatgttggtaatcttggggaaaacttctngcnggtgcaagctacgaaggggcttctcggtcctccgtaagtccctggttggggngttggttaaggtgtaatagaaaaaactccgaagcctgttggtggtaattggggcaagnacataatttttctgggtcaaggaaacctggaacntggttatcaagtng

SEQ ID NO: 12799 - DNA, 750 bp, Arabidopsis thaliana
  unsure at all n locations
  Clone ID: LIB25-055-P1-E1-H5
aacaaagtttgaaccttttcttcatccatctctctccgtcgcttcttcctaacgattccttcactcgaatcaggtttgtgaaggttttttctagggtttcgaaaagatgccggcgacagcaggaagagtgcgtatgcccgcaaacaatcgggtgcatagtagtgcagcgcttcagactcatggaatatggcagagtgcgattggttatgatccttatgcaccaactagtaaagaagagcctaagacgacacaacagaaaaccgaagatcccgagaactcgtacgcgagttttcagggacttttggctcttgctaggattacgggttcgaataacgatgaggctcgtggttcttgtaanaagtgtggccgtgttgggcatttgacgtttcagtgtangaatttcttgagtactaangaggataaggagaaagatcctggtgcgattgaagctgcggttttgtccgggttgganaagattagggagaaggtgttggtaaangtgaaggttgacggangtgaggtanttgaataaaggangaanggagaattgagaagttcctgatttccgaangtttgaattcctgaanaatgggagagggattaattgnctganaagggttnnggaangaancaanaggtggggagtnntgtttaannaagnccaatttccggttaagnaangnatcaactaaccggngttttccggangaantccggattcngaattcnggnttctggcgaannnggana

SEQ ID NO: 12800 - DNA, 750 bp, Arabidopsis thaliana
  unsure at all n locations
  Clone ID: LIB25-055-P1-E1-H6
ccccaaaattctttcaacacttgctctccattaatcttttagataataaacctaattgtttctgttttgtttttgtttctgtgagattcttccgaggcttgaagctcaatagctatggcttctctttcagtctcttcctcttcaaccatcatcgattcaagagctcctccttctcgactagcctccgcctccgcctcttctccgtcgtgcatttcacttcccacacttccgattcagtctcatacccgtgccgctaaagccactgcttactgtcggaagattgtgaggaacgttgtgacgagagctactactgaagttggtgaagctcctgccactactaccgaagctgagactactgagttacctgaaatcgtcaagactgctcaagaagcttgggagaaagtggatgacaagtacgctattggttctcttgcctttgctggtgtagtggcctttggggttcctgctgggaaatgatttcgggcaatcgatangcttccattggtttcctgggtggtccttgaacttggtaggcatccggttacacaggatgggnttaagtttacnangaancttggncttcaaacccagaccanggaangnctttggtttgagnaaaggtcaanggagcacanttcnanggnccttattaggggnacagctggaattaaaagggagggaangaaagangnagaagaacctttttgnngggcaattcangaaattggaatgaangganatcaaaagnat

SEQ ID NO: 12801 - DNA, 744 bp, Arabidopsis thaliana
  unsure at all n locations
  Clone ID: LIB25-055-P1-E1-H7
gattatgatggtaaagctgttatcatctcttgggttacacctgatgaacctggttctagccaagtacattacggtgcggttcaggggaaatatgagtttgttgctcaagggacttaccataactacacgttttacaagtataagtctggctttattcatcactgccttgtctctgaccttgagcatgatacaaaatactattacaagattgaaagcggtgaatcttctcgagagttttggtttgttacaccaccacatgtacatccagatgcttcctacaagtttggtattataggcgatatgggtcagacattcaactcgttatccacgttggaacattacatggagagtggagctcaggctgttttatttcttgggagatctttcttatgctgatagatatcagtataatgacgttggtgtgagatgggatanctggggtcgtnttgtggagcgtantacccgcttatcaaccgtggccttggtctgcagggaatcatggaagnaagattaacatgccatacatggggggaggtgacacctttcagggaattacctcagcggtacacgaacgncctaccntannctcaanaagttnngantccctcntttgggtacgctggntagggcgttnaaccggcncanatcnantnntcctctcnagcgaatnncccttttgggaaangtaaaacnncngcattggcactggncttnngtgaacagctnacaagnatttnagnagtg

SEQ ID NO: 12802 - DNA, 757 bp, Arabidopsis thaliana
  unsure at all n locations
  Clone ID: LIB25-055-P1-E1-G7
aancagactctcagattcttttcaagctgggggtaattactcacagtgtcgatctgctgcactaacaatcttgcaagatggaaatgagaaatgctcgtatcagcattgttctattggatcaactttcacgcctaagcttcgaggaagatttttagcgacagaaaacttcttttacacctctaagttctttgggttgggagaaaaagcgtggctatctaatatgatttcagccggagagagattctgtggagaagattggtcaaagttgagagtaaaagacccatcactccatgaagaggatcttcttcggtattgtttctcatctgcatatattgtgtcattgcttcacgatacccttggcattcctcttgatgatgaaagaatcggatatgcgaatcaagcangagacataccgctcgattgggctttaggtgcattcattcaacagactgcaacagagacctctcaacatgcagcctccggtaatctccattggttcnatgctccttttcagtaantcacccngangacgcttnactaatctcaatcgggataccgatcccttaaggacagnttttggtaaaatttgggnaacttaagntggngaaanacggcaanctgaaaaaccgatttacgaaccntgaagaaaaggtccgggnacaanaagtggactcngaaatnaagaagaatccttgggttantaaancnggttttccgcnaaagcttcccgggccnccncnaaatgncttaaggaatt

SEQ ID NO: 12803 - DNA, 719 bp, Arabidopsis thaliana
  unsure at all n locations
  Clone ID: LIB25-055-P1-E1-F3
aacaagaaacttctcaaccctcttgaagatccaccaaccgcttcttcaagcgaagacgtcgacgaagagatttcatcaggagaagatgaaaaagaacatatctccaattcttcttcttctgaagaagaaaacgaactcaaagatctctccactcaaaccctaaattctccttccaccgaggctccaactctcgattctggatctgagacaaattccgactcagataagccaatcgtcttaaccagtcagaagaagaaagaaggtactgattcatcagggacgaagcgagctagtgaaggaactagctcaaaggacatcaaaagagctaagaaagtttcaggagatgacgataacaaaaaatttcagagtttatggactaaagaagatgagatctctctgttacaaggtatgattgatttcaaagctgagacaggtacaagtgctcatgatgatatgaatgggttttttgatattgctaagagatacataagctttgatgttagtaagattcaattcggtgacaagattaganggtttaaagaagaagtatttggnggtagggaagaagaaanggttaaacctgggtnaaggntaaggaaatgttggggaatnggctaaagtccaattgggggacttgatnggnaaggaanttggtgggtccntggagggnaatccggngacgtcnaantgggtttggagaaancctttttgggtccggg

SEQ ID NO: 12804 - DNA, 738 bp, Arabidopsis thaliana
  unsure at all n locations
  Clone ID: LIB25-055-P1-E1-F4
agctctgttcagtataagcaagaagagagagcgaaaatggagctctgtgttatcagcacgactacgacggtgaaggcaattaatccgtttcttccgtctattacacgtcgtgttagttcccgtctcttccaatcagatagtgtgctacagtttggtgggaggttgaagaaaccaattagcaggcctttggacatgtcttgtgtctctagaaaaattggatttttcggagattttatgtcacatggtgggtaattttaggctattcgcggcggcttctccagcggttgaaactagtgtaaaggaanacaaacttccagctgatcttaaggtcacggagactgtacaggcgaattcaagtgtgaaattgagtgtggaagttccagaaattgtctgtgaagattgttaccancgagtccttaccgaattcatgaaactctcaaaggtgcctggattccgtcctaaaacaagagttccagagaatattattgttggttttcgttgggaagnaanatgttctgagaagcaactggttgnatccatncttaaaggagaacacttcctcaagccaanggaatcaagtgaactggaaaggggctttaaangacncgannacagaattgttnagcaggttttnccagaannnggngaaagggtttatcctaaccncaaagaacccttangntnangaaggggggttgnttganggttnnancnngaacctnnaattggaatnctttg

SEQ ID NO: 12805 - DNA, 753 bp, Arabidopsis thaliana
  unsure at all n locations
  Clone ID: LIB25-055-P1-E1-F8
gcttagaaacatagagagtagcttaatcaagctgaagcaagatggatcggttacagtggcacagtgaatcaggaaccaagggcacacttctgagtattgaatatatttttatacaacaaaacatctatttagaaccaaggggacaagtgaatctaacacttttttctttattgaacaatttggttcgttgtgttgtaactgttgttcattgaaagcttcggttcgttttcaaaaaaaaaaaaaaaaaaaaaaaaaaaaaaaaaaaaagggcggccgctctanaggatccaagcttacgtacgcgtgcatgcgacgtcatagctcttctatagtgtcacctaaattcaattcactggccgtcgttttacaacgtcgtgactgggaaaaccctggcgttacccaacttaatcgccttgcagcacatccccctttcgccagctgggngtaatagcgaanaggcccgcaccgatcgcccttcccaacagttgcgcagccctgaatggcgaaatggggacgcnccctggtacggcgcattaancnccggcggggttttggtgggttacgcccaancgtgacccgcctaacnttgccanngcccctaacgcccggctccctttcgcctttcttccccttccctttcccgncacgttcgccgggntttccccggttcaagccnctaaaatcggggggcncccctttaangggttcccgnnttantgcctttangggaaccncgaaccccnaaaaaaattg

SEQ ID NO: 12806 - DNA, 621 bp, Arabidopsis thaliana
  unsure at all n locations
  Clone ID: LIB25-055-P1-E1-F9
gtanaantttgccannnacttgtaatacgacaaactatagggcgaattgggcccgacgtcgcatgctcccggccgccatggcggccgcgggaattcgattcatttctctatattgcaaggaagatgttaggaggaaagttcatggagtgattgataagtttgctgagcgtggacttcgctctttggctgttgcaagacaggtcttttcggttactatatatcgtgaaagtttatgtgtccttgtttctttattgtgattcatatcgatttgaatggtgcaggaagttctcgagaagaagaaagatgctcctggtggcccatggcaacttgtangtcttttacctctttttgatcctccgaggcatgacagtgccgagacaatcanganggctttaaacctccggtgttaatgttaagatgataaccggtaagaatcataagttaagtccttggctctctgcacttcatattgcntgaaactaattttctcntctgactgaaaccaggggaccagcttgcaatatagaagaatgaatcactaagtggaantcccggncgccctgnangtcaaccaaatnggnaaaantcccaaagcctttggatgccaaaccttgagttaat

SEQ ID NO: 12807 - DNA, 65 bp, Arabidopsis thaliana
  unsure at all n locations
  Clone ID: LIB25-055-P1-E1-G10
taatccaccaaaangttttcttttagttccagggtggtcattttgtaccnccatttccggggnaa

SEQ ID NO: 12808 - DNA, 768 bp, Arabidopsis thaliana
  unsure at all n locations
  Clone ID: LIB25-055-P1-E1-G11
nnnnnnnnnnntgattacggtttntagtgggncganactgggaaaacncaagctangcatccaacgcgttgggagctctcccatatggtcgacctgcaggcggccgcgaattcactagtgattgtctttacggcgagttctgttagcgttaaggtttcatttagcgcctcaaatagatcctgttcaggaaccggatcaaggagttcctccgccgctggacctaccaaggcaacgctatgttctcttgcttttgtcagcaagatagccagatcaatgtcgatcgtggctggctcgaagatacctgcaagaatgtcattgcgctgccattctccaaattgcagttcgcgcttagctggataacgccacggaatgatgtcgtcgtgcacaacaatggtgacttctacaagcgcggagaatctcgctctctccaggggaagccgaagtttccaaaaggtcgttgatcaaagctcgccgcgttgtttcatcaagccttacggtcaccgttaaccagcaaatcaatatcactgtgtggcttcaggccgccatccactgcggagccgtacaaatgtacggccaagcaacgtcggttcnanatggcgcctcgatgacgccaactacctctgataanttgagtcgatacttcggggaatcaacggcttcccccaaaggatgtttaacntttgttttagggcaactgccctgctgcgtaacaatcgttgcngcnccataanatcaaacnatcnacccaanggggttaanncgcntgng

SEQ ID NO: 12809 - DNA, 705 bp, Arabidopsis thaliana
  unsure at all n locations
  Clone ID: LIB25-055-P1-E1-G2
tcgttggttgggttaatagaagctctctttctctgtctgtctttctctctcagagaaatggctcttcttctagtttcttcttcctcctcctatgccctcagagtcaccattttcttgtctttcttcttctttctctgcaatggcttctcttaccctactacttcttctcttttcaacacccatcaccatcgtcaccacttggccaagcacaactacaaagatgctctcactaaatcaatcctcttctttgaaggccaaaggtcagggaaacttccttctaaccagagaatgagttggagaagagactctggtctctctgatggctctgctcttcatgtggatttggttggaggggtactatgatgcaggagacaatatcaaatttggtttcccaatggcattcacaancacaatgctttcatggagtgtaaattganttcggtgggactcatgaaatctgaantacanaacgctaaaaatagccgattcgttggggctaactgaattatnctncctcaaaggcnacttcaaaancttgaagacaattctaggttcaaggttggtgnatnctnnatanaagncnanttcttgntggggaaangancctnaanaacatngnntactggtatagaantgtgttttaaaaggttgatagagaaccantcctggnnttctggntgttngncgnntaaaaacgccggntng

SEQ ID NO: 12810 - DNA, 708 bp, Arabidopsis thaliana
  unsure at all n locations
  Clone ID: LIB25-055-P1-E1-G3
cttcccgcgccgataagccaggagctacgaaggcctccgacgcattccaggagaagaaatctgtgtctgtgaactacgaccgtggtgagcatgaggtctcggtcaacatcggcgggctcaggaaagctgatattccgagacgttaccgaattcgggttgagaacgaccggtttcagaaggattggagtgtatcggaggttgtggaccggcttatggctctcaatcgttgggaagaagttgatggcgttcttaattcctgggtcggccggtttgctaggaagaatttcccggttcttatcagggagcttagtanaagagggtgtattgagctttgtgtgaatgttttcaagtggatgaagattcagaagaactactgtgcaaggaatgatatatacaatatgatgattaggcttcatgctangcataattgggttgatcaggctcgtggtctcttctttgaaatgcagaaatggganctgcaaaccgggatgctgagacgttcgaatgctccntatcaatgcccaatgggccaagctggtcaaatggcgcttgggcctatgaatccttaatggatgacattgttacgtngcngccaantgcncccantncgttcaacctaaaattaacctgatnaatgncntgtgggtccnagtggnaaactgggnaaaaangntcnnggantttnccagnaaantggccnnttaactg

SEQ ID NO: 12811 - DNA, 734 bp, Arabidopsis thaliana
  unsure at all n locations
  Clone ID: LIB25-055-P1-E1-G4
catttctccaaaatctccgagttctacaattgtgtgatcaatcaatcttctccgatttcaagcttctcgatcaaaagaatcatcatgggaggaggaagagctatggcgacggcggcgaaggttgctggaatcggagttggtaaaggaggattcaagggatttggatttcctccggcgactgagcagtttcgtgttaaaaccgcggcggctgcggcgtcgtctaaaccggtttcggcttcgattacatcggcggttcatccttctgttgaagaagatgggatgattatgcagagaccggtttgggatgattgggaatttgctgaagaagaaccgattcctagggttgtttttagcaaacctcctaagtcttgaagaagctaaagaagctactgaagatcttaaagaagcaattaatttggtgtatatgtcatctccaaagtcgtctgctgctatggaaggatcaaatgatggtggctctgtttccaaaatgctctctggttttcaatcttctgagaacagagctgttgaatcagctgttccacaagttgctccntcaaagcaatttgcttttccaagtgagaacactgctgcgcanactggttgttgccttcaattgcgaantgacccaaaaagttatggggatgcctgttatgggngaataanggntntcaagaaaatttcctcagaccaacaaaaaccggcngtttccccccaaagttgaaanctganaatga

SEQ ID NO: 12812 - DNA, 682 bp, Arabidopsis thaliana
  unsure at all n locations
  Clone ID: LIB25-055-P1-E1-F11
attacncttctagtncnctgacactatagaaaactcaagctatgcatccaacgcgttgggagctctcccatatggtcgacctgcaggcggccgcgaattcactagtgattttagcttgagcttggatcagattgtcgtttcccgccttcagtttaaacttattcgtaatatcaggatatattgtggtgtaaacaaattgacgcttagacaacttaataacacattgcggacgtttttaatgtactgaattaacgccgaattgaattcggatcgatcctacgtaaggatattaaagtatgtattcatcattaatataatcagtgtattccaatatgtactacgatttccaatgtctttattgtcgccgtatgtaatcggcgtcacaaaataatccccggtgactttcttttaatccaggatgaaataatatgttattaaaatttttgcgatttgggtccgttataggaattgaagtgtgcttgagctcggtcgccaacactcccatttcataattttacatgtatttgaaaaataaaaatttatggtatcaatttaaacacgtanacttgtaaagaatggatatctcgaaaagaatctaggtaancnaattnccgcggccgccaagggcggccgggaancaatgcaaanttngggccaaattnccccccaaaggagantncga

SEQ ID NO: 12813 - DNA, 727 bp, Arabidopsis thaliana
  unsure at all n locations
  Clone ID: LIB25-054-Q1-E1-B9
gttttttcctccaacttgcaaaatgttaaaccttaaaccttaaaccttagcttctctgttttgaaatcngtatcacggcccangtatgaagcatcgtcttcttcttcgtcttgttcgtccnaagncaaattacattctcagaaggagcttccttttccantccggcaagaccacaccatcgccgttggacccttacgacactctgcancgtcgggtcgcgagatncggagatccctctgcttcgattatcaaagtgttggatggatggcttgatcaagggaatctggttaagacttcggagctccatagcatcatcaagatgcttcgaaagttcagccgtntctctcacgctctcnagatatcagattggatgagtgagcatagagttcatgagatctctgaangagatgttgcgaatcggcntgatttgattgctaaagttggtggtttgggagaagcaganaagtttttcgaaaactattcctaatggnnaaggangaactaccatctctacggtgctctccttgaactgctangctancaaagaangtgttgcacaaaagctgaagcaagttgtttcaaggagatgaaaanaagcntgggcttcccntaaaaggttgtccttccccacaaangtgaaancctnaatccccnaagtcccgggactggggaaaatacactatgggtttaaaaaagccggctgcnccnaaattggaaggattaaaaa

SEQ ID NO: 12814 - DNA, 65 bp, Arabidopsis thaliana
  unsure at all n locations
  Clone ID: LIB25-054-Q1-E1-C10
tanccagccctantctgctccgttctaatccgnaacgccttccaaagttatggtttgattatnag

SEQ ID NO: 12815 - DNA, 769 bp, Arabidopsis thaliana
  unsure at all n locations
  Clone ID: LIB25-054-Q1-E1-C11
gnnnnnnngacggttgtttgcncngcnctaccggtaangaaatcncgggncgacccacgcgtccgccttgtangcaatcatggcagggaaaagagaaaactttgtgagggtggatgatttggactctaggttaccatcatcatctgtagccttccaacagaactacgcctccaatttcagtggacaacttcatcctattcatgcaagcaatgaaacttctagatccttcaagaaaggtatccatgaagggttccaaagggcttaagtcgatcggacgttcacttggtttcggtgtttatcgagcagtgttcccagaanaccttaaagtatctgaaaagaagatatttgatcctcangataaattccttttgtattgcaataaattattcgttgcgtcatgtattctttcagtgtttgtggacccttttttcttctatcttcctgtgattaatgctgagtccaagtgcctgggtattgacaagaatactggctatcacagcaagtacattgcggncttttatcgatgtgttttatctcgctcacatggctctccagcttatgactgcttatattgcaccttcatcacgggtctttgggcgaagtgaactcgtgaatgatcctgcacagatagcaaagagatatctacaacgttggtttaatantgactttctctcagtacttcctctccctcaaaatgtantttggagggtcctgcaaagttcaaatgggtcngatgtattgggtacaaancangccttgcntttcatnt

SEQ ID NO: 12816 - DNA, 678 bp, Arabidopsis thaliana
  unsure at all n locations
  Clone ID: LIB25-054-Q1-E1-C12
gnnnnnnnngaantgatttggtttggcccgccctaccggtnaaagaaatcccggggtcgacccacgcgtccgggtcncaagaagcctcttttcacctctgcccgcttgaagaaaggggaagttttgtacttanaaantcattcatgcaggtatgagctctgtttcgcaggagagaagaccatcanagcantccaagcctcacaacaacaatcatcacatgaagctatgganacagataataataataacaagtcacagaaccatctgacaaacggtgacaaancagattcagacancagtttaattgatgttttccgctggtcacgatgtaagaaacctctcccacagaagcttatgcggtctatcgggtttccactcccagcagatcatatcgacgtgttggagganaatcttgattgggaagatgtacagtggtcacaaactggtgtttggattgctggaaaagagtacactcttgctcgtgttcattttctctcccccaactaaaaaaaacctttcatgctttgcttctatcttacaaaactttttatattttatttatggattanagactacagttactttggcctatcttgtcttgtgtacntcttccttgtaacatttatttatatatcgtcangaaacatccttggcacannnnnaaanaaaaaagggcng

SEQ ID NO: 12817 - DNA, 464 bp, Arabidopsis thaliana
  unsure at all n locations
  Clone ID: LIB25-054-Q1-E1-C2
ttggccgccggtccggaatcaagggtcgacccacccgtccggaggatnaaaaccctanggtgagtgagacagagagaagcnaanatggtgcagcgccttgtttaccgatcacgacacagttacgccaccaaatccanccagcacaggatcgtcaaaactccaggaggtaaattgacgtaccagaccactaagaagagagctantggacctaaatgtcccgttaccggcaagcgtattcagggtattcctcacttgaggccaactgagtacaagaggtcacgtttatcaagaancacgaggaccgtgaaccgtgcctatgggtggggttttgtcnggttctgcngttanaggaaanaatcattccgtgccttccttgtggacgagcaaaanattgngacnaaagttttganacctcanaagngcaacngaacanggttgctcccaagctnatgnanaccccnact

SEQ ID NO: 12818 - DNA, 580 bp, Arabidopsis thaliana
  unsure at all n locations
  Clone ID: LIB25-054-Q1-E1-C9
gnnnnnnngactgtntgtntgctcgntctaccggtaaaaganatcccgggccgacccacgcgtccggcttanagagcaaggacaagatgtggcacgaagcgagaagatcggagaagaaggttcacgatatgatggacgctgctcggaaaagagcacagcggcgagctatttacttagctaaacgccgtggagatcctattcagtcgattcaagccgttggttcccgctaccgagtattccgtgatgatggtctttaccaagccaccgaagatcaacagggcttgattccttggaatgggaagcatgatgttatgattganagatttgatggtcgtgctcttctggattttgtgcgtnaggctggttcgagaagtntacgtccacataagaanacggaagaggaataagancttgaagagtttgttaattttgagcgttatcgggatttgattaagcatcggcgtncaagatgtcgtanctttttaactacantttcctccgacaaaattgtttcctttttccatcnttgaatccannttaaggggaaaanacnntcctttaatcnaaaattcnaattctg

SEQ ID NO: 12819 - DNA, 805 bp, Arabidopsis thaliana
  unsure at all n locations
  Clone ID: LIB25-054-Q1-E1-D10
gnnnnnnnngangatttgtttggnncgccctaccggtaaaagaatcccgggncgacccacgcgtccgtaggcgattatctttcggatgaatttcatgggaacgatgatggtatagtgccagactcagcgtatgaggatggaggtcagtttccaattctagttagtaacaggaagaaacgaagaaatgatgatatgggtagtggaacaaaccatctaaagagtaatacttttatcaagagagaggcaaacatgttaggaaaaaatccatggcctgagaaagatagtggtggctcttcggtttctcgtgatacgggaacaggaaaagatgttcaggatatgacattggaggatacaaatacttcagatcatggtttcaatggtggccacgtagatgtggttgaaaatttctccactggggatcccatgttgtgtgacacttccgctgcaacgaatgatggcgtatataattantccctcaacagcattccggatgctgaaaatgatcttanctttttccgacaatgggagattaangaaaaaaaatgatcncttccnatggctgggggtgaccataaggaaatttttganggatgttggaacaaacatgccttanggaatttgtgattccaacattccggcttgggatagtccttaataaatgaanggtgaccttangggtggttccccttccngcccaacccaaanttagggagaacagcaaggcnccaatgacanatgattcccaanccagacaaaatgttgggaaatccaangaaccgctattttncaggtttaaanacttttt

SEQ ID NO: 12820 - DNA, 693 bp, Arabidopsis thaliana
  unsure at all n locations
  Clone ID: LIB25-054-Q1-E1-D11
tcgcagagattcagcttggcatgaggatgaacatgttggatttggttctcnaaggtggttctccggttggtactgataacggnaaaactccaaggcttggagtgattcctaagtacgccggagatgagtcggagatgaaatggttcgaagttcctggattcaatatcattcacgctattaatgcttgggatgaagatgatggaaacagcgtcnttttgattgcaccnaatattatgtcgattgaacatactttngagaggatggatctggttcatgctttggtggacaangtgaagatcgatctcgtcaccgggattgtgagacgtcatccgatctcagcgaggaatctcgatttcgctgtgattaatccggcgtttctcgggagatgtancangtacgtttacgcggcgattggagattcgatgccnaagatctccggtgtggtgaancttgatgtgtctaaaggagatcgggatgattgtacngtggcccgtanaatgtacggttcangttgttacngcgganaaccgtttttcgtaacctanggatcctggtaatcccggaggccggnngaaggatgatgggttangttggtgacnttatgttcacgatgaaattgactgggngaatccaagttcctggtgaatggacgctaaatcnccggancttgaaatcctccccgccnttaaggtt

SEQ ID NO: 12821 - DNA, 623 bp, Arabidopsis thaliana
  unsure at all n locations
  Clone ID: LIB25-054-Q1-E1-D12
gggggtacgcanaaattctgtctgcgtcnccganccaactctatccttctctcaatccgatccgttccgttcactacttgtctcaatttcgaaccaattggatcgcatcttttaggggctcaaacctttggtgacgaggaccangannaagattgtcgcatctgatttatatcggaaaaaggtctcttgccggaaaggacacgatccgctttcataanggagagattttgacagattcagtagacgccatggatgtgcctatctcntgggatgctttacggaaacangctagatcgattgaagctcagcttgacgagcagatgcattcatntccgtacacttgtttccacaaacgctttatcaaaatcaagatggtaatgagagtgatcttgaanctgggattgacttacttcttangcaactgcaacaagttaatgctcanatgcaagcatgggtatcctccggtgggtcaagaaatggtcncccatactttaactccacatcaagagattcttcaagatctgacacangagtttatcganacggntccaantcttanagcaagacaangagcatgcntcacttcttgaggacnttagggnaatttggttcggnctanatta

SEQ ID NO: 12822 - DNA, 430 bp, Arabidopsis thaliana
  unsure at all n locations
  Clone ID: LIB25-054-Q1-E1-E1
aaaaaacacttcttcttcttcttcaacaacaacaaaacccaatttcgcggctaaatcaatcgcttcttctactggtcttggaattgagagaagagaccagtttcgctggatctttgaatgaagctggatttggattaagttcaggtgtaaatttgttggaagatggggtcagatcaatgtttttcgagattgaattcacttgagattaaagccctaatttatcagaaaattgggcatcagagagctgacacttacttcgaccagctcggaaaattccttacctcgaggataagcaagtccgagttcgataagctatgtagcaagacggttggtanagagaacatttctctacacaaccgtcttgtacgttcgattctgaagaatgcaagtgttgcctaagtctccaacgccgaggtatccggaagaaatc

SEQ ID NO: 12823 - DNA, 454 bp, Arabidopsis thaliana
  unsure at all n locations
  Clone ID: LIB25-054-Q1-E1-B7
nttttctcggccaagttttctctagctcaggtgtttgatgtgaattttttgagggaggggaatgagttcaatgagcagaagcagaagtcgaagtagaagtcgtagtcgggatcggtttcgtagtcggagtccgagagacaggagaatgagatctgaacgagtttcttaccatgatgctccttctagaagggagagggagccacgtcgtgccttcagccaaggaaatctctgcaacaactgcaagcgacctggtcactttgcaagagactgttctaatgtttccgtctgtaacaactgtggtcttccagggcacattgcagcagaatgcactgcggnatcacgttgttggaactgtagagaaccgggccacgtagcctcaaactggttcaaacgaaggaatctgccactcctgtggtaaatctggacatcgaaccananactgctctaattcggg

SEQ ID NO: 12824 - DNA, 331 bp, Arabidopsis thaliana
  unsure at all n locations
  Clone ID: LIB25-053-Q1-E1-G7
aattcccttaactctatctctaggtgacttaagagtaaaaaatggtagaggcagaggttgaagtagatgtggaaatcaaatctacggctgataagtttttcatgttctctagaagatcacaacatgcctccaaagccactcgctatgtacagggatgtgatctgctcgaaggcgagtggggcgaanttggaagcatactcttgtggaaattanctgttgatggagagccaannntgtcanaggatangattgagngccantnanatcaagatgaagtatgatccaggtncanggtgttaagagggaccgcgncaagngaagagtcnncnag

SEQ ID NO: 12825 - DNA, 433 bp, Arabidopsis thaliana
  Clone ID: LIB25-053-Q1-E1-G9
ggatcaatgaatagaaacttaggtacaaatgtagacaacgtgtatcacttgcactaactggagatccatggaatctccagctagaaatggacgaagcttttattcattgatccctctagaagataacgatctctctgtgtagaagaataaaacatttgcttatatcctcaatgcctgtagtgttgttctcttatgttccattcttaggaagaggatctactaaatccgatccagccttagcagcagcagctgctttatcctcttcataagctgcaacatgaactccaagagccgcacggcctgacggatcaagattctttgaccaagttgcatcccattctacagctttcgcggtactgcaagctatacttggacctcctggtacagtcgctctagcagcactcttcgggaagaacttctcgaagatggttct

SEQ ID NO: 12826 - DNA, 432 bp, Arabidopsis thaliana
  Clone ID: LIB25-053-Q1-E1-H11
atgaagagcttattccacgaagacttttgataccgcaggttagtcagcttggatcggcagctcagaaatatcaacaagctgctcaaaatgcaacaacagattctgctcttccggagctacaaaataattgcaatatgtttgttgcatctgctagacaattggcaaaggccctggaagtaccacttgtgaatgatttgggatacacaaagagatatgttcggtgtttgcagatctcagaggtggtaaatagtatgaaggacctgatagattatagcagagaaacacgaacaggaccaatcgagagtttagccaagtttcctcggagaacaggcccttcatctgcactgcctggtccttctcctcagcaagccagcgaccagcttaggcagcagcagcaacaacaacagcagcaagcagcaacagcaacaacaa

SEQ ID NO: 12827 - DNA, 417 bp, Arabidopsis thaliana
  unsure at all n locations
  Clone ID: LIB25-053-Q1-E1-H5
tcttcctcactctcttattaggttcagttccttttcgattcttcgtgtggatcgctgtcggtagatttccgatttctttaggttctgctcgaaatcgtggtttagtgtttattatcatcgattcagaaaacggtgggtaaacttgtagcggaagatgaggcggtggccggtggatcaccggcggcgaggtagaaggagattgtcgagttggatatggtttctccttggttctttctctgtcgctggtttagttctcttcatcgttcagcattatcaccatcaacaagatccatcccagcttttacttgagagagacacgagaaccgaaatggtatctccnccccatttaaacntcacnggagaagtcacaaagtgcttcctccttccccnaggcagtttagnaaaagcaaaatgana

SEQ ID NO: 12828 - DNA, 453 bp, Arabidopsis thaliana
  unsure at all n locations
  Clone ID: LIB25-053-Q1-E1-H6
gagaagatcgagaaaactgtgatagagatactcagtgaatcggatatgaaagagataacagagttcaaggttcgtaaactcgcttcggagaaactcgcaatcgatctctcggagaaatctcacaaagcatttgtacgaagcgtcgtggagaaattcctcgacgaagagagagcgagagaatatgaaaactcacaagtgaataaggaagaagaagatggagataaggattgtggtaaaggaaacaaagagtttgatgatgacggcgatcttatcatttgcangttatcggataagagaagagtgacgattcacgaatttaaagggaagagtttggtttctatcagagaagtattacangaaaagatgggcaaaagaacttccctacttctaaaagggaataagcctttaacangatggaacaatgggtcaaaccttcaangaaaaaacatgccg

SEQ ID NO: 12829 - DNA, 410 bp, Arabidopsis thaliana
  unsure at all n locations
  Clone ID: LIB25-053-Q1-E1-H7
gcagccaaaagcaagggacaaatccaaagagaacttcttgacttaaaaagaaaggcacttgccttcaagcgtcaagggaaaactggagatgctgatgaattatacagtanggccantgttttgggaggcacagctagcanaactggcaacccccaagatggagatgaaaggctcagcttctgcaattaaacctgaaaactacatggatgttgatttattanttggatcgcaaattngnggtcaaagcnatcagatctgcctantgttttctcatgntcctcaacgatagtttatnacttggttagggagaactttatctccncctggctanatccgggttcctcngggcgttgtttcccaaacctggccanncagcaancaagtnatgattggantngctggnctggntg

SEQ ID NO: 12830 - DNA, 452 bp, Arabidopsis thaliana
  unsure at all n locations
  Clone ID: LIB25-053-Q1-E1-H8
ttgtttttgcagaaagtctctcatctgaactcagaaaatctccgagttcgtatatcttctccgtttgagcaatggcgttggtcatgcacacatacaanggaaacaaaggtgccaataaggcacttattgctgcanagtatgcgggtgtgaagatcgaggagtccgcagactttcagatgggcgtcactaacaagtcacctgagttccttaanatgaaccctattggaaaggttcctgtgcttgagactcctgaaggtcccatatttgagagcaatgccattgcccgatatgtgagncgtaagaatggtgacaactcnttgaaatggntccncccttaatgnatncgctcacaattgagcaatgggattcgagttctccntcantgggagaattgaatgctaacatgttngaaaatgggtttgnccccaagnaatggggcnanttgccccctt

SEQ ID NO: 12831 - DNA, 434 bp, Arabidopsis thaliana
  unsure at all n locations
  Clone ID: LIB25-053-Q1-E1-H9
cnctagttttttaaaagcaggagattttccttttcccagaaaagaaatttcccaaatcaaagtttcgagctttcacttctcgacttgcaaattctcgtcctttttactgaattcgatctgggtttttgtttttgattagtaaaataacaaaaaaaaaaaaaaggatttatcagaaatggctgcgagcgatgaagttaatcttattgagagcagaacagtggttcctctcaatacatgggttttaatatccaacttcaaagtagcctacaatatccttcgtcgccctgatggaacctttaaccgacacttagctgagtatctagaccgtaaagtcactgcaaacgccaatccggttgatggggttttctcgttcgatgtcttgattgatcgcaggatcaatcttctaagcagagtctatagaccagcttatgcag

SEQ ID NO: 12832 - DNA, 430 bp, Arabidopsis thaliana
  unsure at all n locations
  Clone ID: LIB25-054-Q1-E1-A1
attcaagggtaaagaagaagatgagtggtgaagttgttttagctgctagagtttatcgtgaccttctcaaagcagtggtgaaacatgttggtaaagaagatcacaagtctcatttcttagactttgttaagcaagaatttcgaaagaatgcaaactcagagaaaataaaccttgctcgaaattacacatatcttctcaatagcattcactctcacaaggatctgctgttctcatacaacattgcggttgatagaactgaagaaatgaaacgagtgcttaataaatctgcagccagtgtaggggcttcgtcctcctgaagtttacganccttggtnatgcattcantcctccttggccttccnggggatgaatcnntatgaattcctcaattctgtgggccaggccttggntaatttttgantanaagaag

SEQ ID NO: 12833 - DNA, 704 bp, Arabidopsis thaliana
  unsure at all n locations
  Clone ID: LIB25-054-Q1-E1-A11
gcctaatttccccaaatttggtaatacgatttcgtcaatttacttcgcaatcgattcaattcaattatgtctctattactggaagagatcattagatcagtagaggctttgctgaagctcagaaatcggaatcaggaaccctatgttgacccgaatctaaacccggttcttctagttccaggaatcgctggatcaattctaaacgccgttgatcatgagaacgggaacgaagaacgtgtttgggttaggatctttggtgctgatcatgagtttcgaacaaagatgtggtctcgatttgatccttcaactggtaaaacgatatctcttgatccaaaaacgagtattgttgttcctcaagacagagctgggctacatgcaattgatgtcttagaccctgatatgattgttggccgtgagtcngtgtactaattccatgagatgattgttgagatgatcggatggggatttgaagaanggaaaacccnttttggntttggtaaganttccgccaaagcaacagactgcaggaaacgtttggncaatttgctaaaaagttggaaactgtttanaaagcctcanggagaagaaagaagattaatggttattaagtccattccaatgggaaggactaattgggtgaaatgtttcaagggtccgcataagggatanaatcnaaaaagttangttcagaaattggattgcca

SEQ ID NO: 12834 - DNA, 146 bp, Arabidopsis thaliana
  unsure at all n locations
  Clone ID: LIB25-054-Q1-E1-A12
atgnaacagagccaagcatgaaagggaaatcnaacatnagtaacacagagacatcttcagaaattcagaaacaagattacatcatgttagggctaaacaaggtgnagccaccgacagacatggcttancatatagggcntgataga

SEQ ID NO: 12835 - DNA, 457 bp, Arabidopsis thaliana
  unsure at all n locations
  Clone ID: LIB25-054-Q1-E1-A7
aaaaagaacatggatttgcattcttgtcnaaactcatactttcttttgctcctcctctgtcttcttaatattaccaccattaactcaacgaagccattagaacaagaaacagtgctttttggcggcaactttccggctttttatgttattggagattcattggttgattcaggaaacaataatcatcttacaacgatggtcaaatcgaattttccaccttatggttcggactttgaaggtggcaaanccaccggccgtttcagcaatggcaaaacaattgctgattacattgctatctactaaggtcttcctttggttcctgcttaattgggattatctcaagaaganaagaataatatctcaaccgggtantaactacgcttctgctggctgtgggattcctcctcaagacaaggaaggnaaatagggaacatgtcncncgttaagtggtccaagt

SEQ ID NO: 12836 - DNA, 394 bp, Arabidopsis thaliana
  unsure at all n locations
  Clone ID: LIB25-054-Q1-E1-A8
gcanggaatggcganagcancagcaccagcagtganttcatggncangatcaggcattgtgtccaaatccggacaaacccagaagaaatctgagatgaaagtttcttacataactggncttaactcatatggtggtctcaaggcacagaacaacanggttgtctcaatgggatcaccactctgcacagaacagtgttttgctaacgttgtgatgtctctcaaaggaagaagaggtaatggaggagccttatccaccacgtgtaacgctgtcggngagattttcatgattgcagcaatcangnacgctctnactcctgntggtgttgcagttggnttcgtcntcttccgaatcgaaacttctggttgaagaanctganncagagtanatagagta

SEQ ID NO: 12837 - DNA, 83 bp, Arabidopsis thaliana
  unsure at all n locations
  Clone ID: LIB25-054-Q1-E1-B1
tttgtangaacattgtgttggcaggagtaggtagtgtgactctgttggatgatcgattggttacaanggaantcttcancgca

SEQ ID NO: 12838 - DNA, 310 bp, Arabidopsis thaliana
  unsure at all n locations
  Clone ID: LIB25-054-Q1-E1-B11
cancttcgtcatcatcctctgcctcttacaaccaaattctctgtcttctcaacgattcagacgaacaatgccancacatcantganctaacttccttcataaacgctcttcancaaganatatcatcggatgaccaatacgccgtcgtttcagaaacctccaacgtcgaagactcgttttcttcatgtgtttcctcaaaggaanaagaagtggaanatgacagctnggagaaagtgatgcagcatcntttggaagcttccgatgacgaacttgggattcctaacacagattttggcgangagtnatntga

SEQ ID NO: 12839 - DNA, 294 bp, Arabidopsis thaliana
  unsure at all n locations
  Clone ID: LIB25-054-Q1-E1-B3
canagggtngaccnacccgtcngcccaagcntccgcatcttcttcgtgaactttttgttttctcctttttttgattttcaccgccggagatttttgtatttttccgattattcgccggcggtttagagataatgaangggaggatatcanaaataggaagctatgcaatctcgtcttccattagagatcagcatcagcaancttgtatttcttgtactactttcaatatccttgctccgatctagaaangtctctctcacaangatnaaagtcttcntgaaagtgataacngag

SEQ ID NO: 12840 - DNA, 436 bp, Arabidopsis thaliana
  unsure at all n locations
  Clone ID: LIB25-053-Q1-E1-G5
tccctgatcgtgtcgaaatcctgtgtttaactggaaccgagtcttttgatgtaaaaggtcaacaactcataaagacacttcaaaaaggttttccgacaaanttcttatcttctcagatgtcttccaaattcgggttagcgggtggaataccggagcgacgtgttcgacccatctgggatgcaatcgattctcgtcagttcaagaatgctcnaaagcttgtcacntcgcttctcgctaagtaccctaaatctccttatgctttaccgctnaaagctctgattcatgagagaatgggggaaaacagatgangcactctctgtttggtttgggatgctaaaagagctttttgtnccanagatganttaacgnngnnnggattgatcntannccgtangtacattgncaaatttgtattgcaatagaacgtggattnccg

SEQ ID NO: 12841 - DNA, 427 bp, Arabidopsis thaliana
  unsure at all n locations
  Clone ID: LIB25-053-Q1-E1-D12
gcaacatcgtacttatcgccttcctctctctctcaatacctctctcaatttctggatccaccatgcaagctcttcaatcttcatctctccgtgcttctcctccaaacccacttcgcttaccatcaaatcgtcaatcacatcagctaattaccaatgcgagacctttgcgaaganaacancgttccttcatctccgcatcagcatccantgtctccgctcctaaacgcgaaacagatnngaagaaacgagttgtcattactggtatgggtctcgtctctgtgtttggtaacgatgttgatgcttacnacgagaaattgttgtctggtgagagtggaancaggtttgattgattngttncgatgcttccaagttncgggangcgattcngtggtnangattcgtgggttgagctctgaaggntaaactg

SEQ ID NO: 12842 - DNA, 315 bp, Arabidopsis thaliana
  unsure at all n locations
  Clone ID: LIB25-053-Q1-E1-D2
cggcaagaactcgantgaaaaaattgtatccaagcttcgtgaaaggagtctctctgtatttagtggcgttttgttctgttgttatttctgaaatattgaagcttttgatttgggtttcaagagagcagngatgtgtagtttgtcggcgattatgttgttaccaacgaagctganaccagcttattcagacaaacngagtaacagtagcagcagcagctcactcntcgtcaacaatngangatccangaanaagnaccaatcganggttccccgttgcaaggttgtttgggaccggcgattttcgaaancatccaa

SEQ ID NO: 12843 - DNA, 388 bp, Arabidopsis thaliana
  unsure at all n locations
  Clone ID: LIB25-053-Q1-E1-D5
aaaccctttcgacgacgagtgaagaagaaagcgagacgaagaagcaaagatgttcagaaaccaatacgacacagatgttacgacatggagtccaacaggtcgtttattccaagtggaatacgccatggaagcagtgaancaaggatctgcagcaattggactcagatctcgttctcatgtcgttctcgcttgtgttaacaaagctcaatcggagctttcttcgcatcagaggaagatctttaaagtcgatgancatancggtgttgcaancgctggtctcanagccgacngtcngtgtagtgtctcggtanatganatcggantcgattagngantctttttactnnncangtcgcctcntcnggttngggtcggcccctnggcnnaa

SEQ ID NO: 12844 - DNA, 437 bp, Arabidopsis thaliana
  unsure at all n locations
  Clone ID: LIB25-053-Q1-E1-D8
tttcagaccgaaacctaaataatattgagtaagtttattcgaagaagagatgaagagacaaagagcaatcgagttagatcgagtgaagaagacaatgttgaacatagattgggacgatgctttgggcgatgaggaagttcccgagctcgagatcatcgctactgacaaaattccgccgcgtgaacctactctttccggctatgaacccgccgtctctgtgcgatccctcagggataacgaactcgacgatnatctgaagcgtcagagatcacttcttactcgtctcggtgataagtttggcagacaaagggcgaagaaaatccgnaacagatccggagancctcgagttacgagaagcanccnaaggatgtttccaaacaaccgggnccaaattggatgcagacaaacggntgtcagattccccgaaaaaaccaaaa

SEQ ID NO: 12845 - DNA, 432 bp, Arabidopsis thaliana
  Clone ID: LIB25-053-Q1-E1-E11
aaaagtacagttcccgcattgttcagattctctaagattcattcatcaatctgacttttcccgggaaaattcactgtctctgagtccaaacccgaatccagcgatgatgtcgaacttggtagagccatcgtggcgccttctggcagcgagcggcggagatacggttaagcttttcgacgtttctgccgattccggcgatccctgcgttttgagctatactccgtcacctggttgtgctgtcaactccgtcaagtggaatcatacgaatttagtggtggccagtacgggagaagataagaagatatccctgtggcggaaaaatgggcagagtttaggaacagttccagttactgggaaggacggtggtgatagtgctgaggaatgtttatcggctattagcttcagcaaaaaaggctccaggtacatttgttc

SEQ ID NO: 12846 - DNA, 400 bp, Arabidopsis thaliana
  unsure at all n locations
  Clone ID: LIB25-053-Q1-E1-E2
ggctcagtatatcccgatgcttgagtactatagcggcgggttaccgatggcttgcacgatgtatgcatcgtccgagagttactttgggatcaacttgaaaccaatgtgtaaaccttctgaggtttcttataccattatgccaaacatggcatacttcgagtttctccctcatcatgaagtcccaaccgaaaaatccgaacttgtggagctagctgatgtcgaggtcgggaaagagtacgagcttgtgatcacaacctatgctgggcttaaccgttatagagttggtgatattcttcaggtgactgggattctacaattcccgctccacagttcaaagtttgtgcggaaggaagaacgttttgcttancattgagtcggataaaacngatgaagcctgagc

SEQ ID NO: 12847 - DNA, 421 bp, Arabidopsis thaliana
  unsure at all n locations
  Clone ID: LIB25-053-Q1-E1-E4
atctccatttctcacactcaaaggttaagaagaaaagatggcgaaaaagttggaagctcaaggtggtcgtggaggagaagaatgggacgatggtggtgcttacgaaaacgtcaagaaagtgtatgttggtcaaggtgattctggtgttgtttacgtcaagtttgattacgagaaagatggaaaaatcgtatcacacgaacatgggaagcagacactacttggaacagaggagtttgtggttgattcagaagatacataacatcagtgaaaatttactacgagaaagctcctttggatnaaccgatagagattgtaangntccaatccttaangacattcaanggggaaaacttctcaaccctttgggactaanctctgggagaaagaaactgaanctaggaaggtgggcaaaatccgtttg

SEQ ID NO: 12848 - DNA, 245 bp, Arabidopsis thaliana
  unsure at all n locations
  Clone ID: LIB25-053-Q1-E1-E6
caaatataangctgaaaccangaaagcncccnatttgacnggcctttccttaaagttgttcgttaatttgcttgaagcaccacttataggctctttgattgttgattatttgaagaaagacaatggcatgacaaagatttttcgcaacacanttataccagaagagcccatgtttagaccggagttcccatcncaanaaccggagcattgatgttgtcantgaatggcnaaagatgaaangtccg

SEQ ID NO: 12849 - DNA, 430 bp, Arabidopsis thaliana
  unsure at all n locations
  Clone ID: LIB25-053-Q1-E1-F12
tgctttcttattttgtcttctcacaatctgttcctatcaatcacacagataataatcctcagcttctctctcgctggatttcaacattcttccactcatcgcttctctttaccaaatcaaactcannacttcactcaactcttatcggaccttccaaactatatccttcaatggatctatggactcttcaattaaaagacgtcacgatccgaaaccctatcttctcatcatcgatccctgagaaatcatcgtcgttttctaggaaactttgtgaattggagtttaggtttctcaatcgtaaggtttctgcttctccgtatcgttccttggttgttcgaagctacctcgangaagagtaacgacgattcttcttcgcctggagatgnttctcaggaaaacaaaccttccaacgggcaacnagtccggcgat

SEQ ID NO: 12850 - DNA, 413 bp, Arabidopsis thaliana
  unsure at all n locations
  Clone ID: LIB25-053-Q1-E1-F2
tctctttctctcgatcgctgcttcttcgtcgctcaatctcaagctccgttccgttagttcttcgtcggagagacggggtggagagaatcctgctgcaagtggtagctgtttgatacttgagtcattttgtcacagcaacatgaatatgccgctgttggatattcaaccacgaacgttgcagtttgcagttgacctgaagaagcaaacttcctgcgtggtacagctaaccaatactacccatcattatgttgcatttaaggttaaaaccacatcaccaaagaagtactgtgttcgtccaaatgttggtgttgttgcacctaaatcaacctgtgaattcactgtcattatgcaagctttttaaaggaaccacctccagatatggtttgcaaaagacaaattcttaaanccagagg

SEQ ID NO: 12851 - DNA, 441 bp, Arabidopsis thaliana
  unsure at all n locations
  Clone ID: LIB25-053-Q1-E1-G1
atacacacatagaagacgaagaagaagaagaagacgatacagatccacaacgccatgggtttaggcatcttagcttctcgaacaattcgaccagcttcacgtcttcttcaatctcaaacctccaatttcttcctccgcacaatcgtctcaaaaccagagctccaatctcctgaatccgctgctgtctctgagcctgagccgccgacacagattctccctcctagaaaccctgtaggtggagcacgcgtccacttctcgaatcctgaagatgcgatcgaggtctttgtcgatggttacgcggtcaaagtccctaaaggattcactgttcttcaggcttgtgaggtcgctggagttgatatcccgaggttttgttatcattctcgtttatctattggctggaaattgcangatgtgtcctgttgaggttgagaaaatctccta

SEQ ID NO: 12852 - DNA, 431 bp, Arabidopsis thaliana
  unsure at all n locations
  Clone ID: LIB25-053-Q1-E1-G11
tctctctctaatcgccgatcggaatccgccatgggagtaccggcgttctacagatggctcgctgaccgatacccgaagtcaattagtgacgtcgttgaagaagaacctaccgatggaggtcgtggtgaccttattcctgttgatatcaccagacctaaccctaacggcttcgaatttgataatttgtatctcgatatgaatggtatcattcatccttgtttccatcctgaaggaaagcctgcacctgccacgtacgatgatgtatttaaatcaatgtttgagtacattgaccatctttttactttantgcgtccgangaagattctttatttggctatagattgagttgcgccgagagcaaagatgaatcagcagcgttctcgacgtttcagagctgcattatgacgcagcacantgctgaagctgatgag

SEQ ID NO: 12853 - DNA, 430 bp, Arabidopsis thaliana
  unsure at all n locations
  Clone ID: LIB25-053-Q1-E1-G12
cagagcagagagaaagagattccgagagagagagagaaggagggagagaaggagcttagtggtctcattaccattaccagctccatacgaaccgaaacgacgccgttcgctcaacccttttctctgcaatctctcttcctcccacgagtttctcagcttttctcggatcatctaattaagagaggagatcttgtctcacggtgggattgatttttctcttcacgaagatcgtgttccaggcaattaactgcagaaaatggtgatgtgggtctttggctatggctctcttgtgtggaacccaggatttcactacgatgagaaagtgttaggtttcatcnanggatataaacgtgtctttgatcttgcttgcattgatcatanaggtacaccanaacaccctgnaaagaacttgnaccctcgagaaagctgg

SEQ ID NO: 12854 - DNA, 431 bp, Arabidopsis thaliana
  Clone ID: LIB25-053-Q1-E1-G2
gaaagatatcagaagaagagagaagtctcctcccaaaaaaaccaaaaaaaaaaaaaaaaaaaagagaaagaaaagaactcgagtgcaaaaagcttctctcttccttcccatggggtgcatttgaactaatctcctccttgaaatcgcttgattgattgttataaatcgattaatcgattcaaaccgttggatattattccaaaacaacccaaaaagagaatcccatgggaagttgtgtttcgtcgccattgaaaggctctccttttggaaagagaccggtaagaaggcgacacagtagtaatagcagaacatcctctgttcctcgtttcgattcttcaactaatctttcccggagattgattttccaagccaccaagccgcgttctccccgaagcctatcggtgatggaattcacctcaaagtatgatttg

SEQ ID NO: 12855 - DNA, 427 bp, Arabidopsis thaliana
  unsure at all n locations
  Clone ID: LIB25-053-Q1-E1-G4
ggtgctttgtggattgcaagaaagtctcaagattttctcatgggagccaattagatgtcatgatggagtggatgttggatggtcaagattgtcagatatgaatgttcacgagggaaagcttcttggttgctcatacaatcagagttgtgtaggcgtgtgggttgtagatctctcgcgtactgagccatgtatggctggagacactgcgcaatcaaatggtcatccagagaaacgatcttgctcaggaagagatccagtagttctcaatgataataactcaaagacagttctcgggaagctgtccgtttcccaaaatgtagatcctttattgaaggaaacaaagtctctangaagattatctgtttctcanaactctgattcttcgacaaaagaaacaaagtccaattggaaaggtcatcaacatcaa

SEQ ID NO: 12856 - DNA, 433 bp, Arabidopsis thaliana
  Clone ID: LIB25-053-Q1-E1-C9
atctctttctctccctttctcaccaaatactctctcaatttctctctgccactctctttctctagagattttcataatgaaaggtaccaagaagaagacgccatgcaacaaaaagcttggaggatacttgaaagagcaaaagggaaggctttacatcatcagaagatgtgtggtcatgctcatttgttggcatgactaatttacaacttatatgtgttatatatacatgcatatgcacatgcatattatagacaatatctacgttgtactacaacggtttgattgaagaaagggatcggatcttcgtggttgtggcgatttgtgatgtgagcggagttcgcaagatagagatataagggcttccaaccattcatatcatgtatatgagtttttactcgtatatgagttaagataataatttttgagttagtat

SEQ ID NO: 12857 - DNA, 324 bp, Arabidopsis thaliana
  Clone ID: LIB25-052-Q1-E1-A5
atgtcgattggattctacaacttcaccgccaagttcaacaaaactaagatagctcacaatgacaactcgggtgctaggatgccacctctttgtaaccattgaagaactcttgagctcaaaaatcttctacttaagcaggatcatggcggccttcttccttgggccataatgtgttgttttggataaagaagtgctactttttgatttttcttcatttgtttttctatatagaccttttttctcaagattaggcttttatttgcctaaccagaatggttatctccgtaagattagtcgttttttaaaaaaaaaaaaaaagggcgg

SEQ ID NO: 12858 - DNA, 438 bp, Arabidopsis thaliana
  unsure at all n locations
  Clone ID: LIB25-052-Q1-E1-A7
aaaaatggaggagctgaaaattctgacatcaaaggagtctaaaacagaaaacacccaatattctctccaactttggcctgataggaaagtgcaacagattacaaactttcctcatccgtatccgcaattggcttcgttacagaaagagatgatcaggtatcaacggaaagacggggttcaacttactgcaacactatacctaccaccaggctatgatccatcaaaagacggtcctcttccttgtctgttttggtcttatcctggtgaattcaagagtaaagatgctgctggtcaagtccgtggctcgccaaatgaatttgcaggcattggatcaacttctgcccttctttggcttgcctagaaggtttgctatattatctggacctactatncctataattggtgaaggtgatnaagnaggctaatgataggtatgta

SEQ ID NO: 12859 - DNA, 471 bp, Arabidopsis thaliana
  unsure at all n locations
  Clone ID: LIB25-052-Q1-E1-A9
aaagccatcttactttctttttttttctctgaaaaacctcttttgattaggtttaaagatggcatcaaaaaaagcaagaaaaccaaaccgagccgaaaagaaantcacaagaagctgtttcaagaaacaagttcctcaacacaacaacatcaacacaagtataactctcgatcaaacatctacatctactantgtctctacatgttcttcttcatcaacgantttgtcttctcctctaagacacaatctactctgttccctctccatccccagcagcggtgctgacgtcaccaggcggttgttgtaccccgaaagccaangaagtctaggataccggagatggctgacggtgtccaccggngcccaangaanccgaagggnttccgaaagaaccgtgntgttgnnaccngagaacngatngttntctntnccccgcccggagatagagcncttcttnctgcacccncattg

SEQ ID NO: 12860 - DNA, 533 bp, Arabidopsis thaliana
  unsure at all n locations
  Clone ID: LIB25-052-Q1-E1-B1
nnnnnnnnngaactggtttgcnttttcctacgcctccggaaatcccangtcgacccacgcgtccgagatcatgagtgatccttttgtgggttctcttacatttgtgagggtttactcagggaaaatctcagctggttcttacgtgttgaatgctaacaaaggaaagaaggagagaatcggaagactcttggaaatgcacgcaaacagcagagaagatgttaaagtggctttgacaggtgacattatcgctcttgcgggtctcaaagatacaatcactggtgaaaccttgagtgatccagaaaaccccgttgttcttgaacgaatggacttccctgatcccgtcatcaaggtagcgattgagccaaaaacaaaaagcagacatcgacaaaatggcnacaggggttgatnaagcctcgcctcaagaaaaaccctcctttcaattttccccgtgattaaagaagatgaaaccaaaaccgtcaattnaaaggaatgggaaaaacntccatccccaagaattaaccgtttgaacagna

SEQ ID NO: 12861 - DNA, 429 bp, Arabidopsis thaliana
  unsure at all n locations
  Clone ID: LIB25-052-Q1-E1-B10
ctcattttattgagcaccataaaagtgatctatttgctgacgaaagcaatccagctgcaacagaagtggcatacaaggcagtcaagcatagtgcagcattggtggctgcttgtatctccanaatcgagcattctacttggaatgaaagtaatcatgggaaagttccatcgatatggtattcgaatcctccttttagggtccatcatgaagccaaacaaaccattgagctagaatggaataatgaatgcgagggaactggctctaacctcatatcactcggtgtaagatatcanccagatggaagctatctcattgangaaggcaatgattctccaagtttaaaactcagagtaacacgaacaggaaagtgcgattttagagttgaagccggcggattgagcatgaatgttagtcnaactgcgtacttga

SEQ ID NO: 12862 - DNA, 500 bp, Arabidopsis thaliana
  unsure at all n locations
  Clone ID: LIB25-052-Q1-E1-B3
nnnnnnnnngaactggtttgcctnncctaggncctccggaaatcccaagtcgacccacgcgtccgctcgttttggtgagaaaacgatgaccgatggatttcgctataatggtttctctggaatagcgtacccgttttggctctcatctccaccaccgcctacacctccacatcatccagcttctgcgccgccgtttcaacaaagcaatccggttgaatcctatgatccagccaaagaagtgtttgatccgatgatgttgtatcatgactcttatcaacgatcgccggctaattggtcaaataacccatcgtatcgtgaaaattctcgctctcagactccttcttcatcgttttatgctgacaacactcaacatggaaatagtggtcctcgangtgaagattcctcctaaaaaagatatgttatcacgagttgatttaccctcaagggaatcacctctgatttgtgtcactcctccactagaattccagagagcacnttga

SEQ ID NO: 12863 - DNA, 430 bp, Arabidopsis thaliana
  unsure at all n locations
  Clone ID: LIB25-052-Q1-E1-B5
gagagagtccatcgctttctttctttctctctctcgctctctcttcatctccaacagagacttctttctagagaaagagatcttcacaaatatgactgtgatgaatcaccgacacaagcaatgtcattttctcctcctccttctgatcactgtcttctctgccgcgttggatggtgtttcttccgagacagacgtcggagggtttgactacggtgaagcattgtctaaaagcttactctactttgaagctcagagatcaggaagacttccgtacaaccagcgcgtgacttggcgtgatcactctggtctcaccgatggtcttgaacaaggggttgattagtgggagggatatcacgacgccggagacaaggttaaatttggacttccganggctttaacgggtnacatgttgtnntngaattgtataaag

SEQ ID NO: 12864 - DNA, 463 bp, Arabidopsis thaliana
  unsure at all n locations
  Clone ID: LIB25-052-Q1-E1-B7
tcttcttccttctccagttactttggtctccgccatggctacacagagtttactttcctctttcgtcacttgactatgactgacctaccatagttagttagatagggagagatacgaagaccaagaagatattttctcagcttggtttctcttatatccttctgggtttcgcnaaactgcaagcaaaattgtctctttttacgatttgcggcggcgttagggtttcgtttagattttgtgattcgtgagtgtgttcaagctttgggaggaagcaaaaatggtgaggaaacatggttggcaacttcctgctcacaanattcaagtggttgccnantaacnggtgttcctggcttaactggaagttgtaagcaataatantgcgntttgntacggcccccctttttggtnggggaagggancncantccgggggaagntntgnatgnatnctccgggtgnttana

SEQ ID NO: 12865 - DNA, 53 bp, Arabidopsis thaliana
  unsure at all n locations
  Clone ID: LIB25-052-Q1-E1-B9
acaancacggttacantggtgagtttgagtacgttgatgaccacaggtctgga

SEQ ID NO: 12866 - DNA, 506 bp, Arabidopsis thaliana
  unsure at all n locations
  Clone ID: LIB25-052-Q1-E1-C2
nnnnnngnngaactggtctgccttnncctacggcccccggaaaatcccgnatcgacccacgcgtccgctggcnccatcncaaagtgcttcgttctggtacagcgaccatggcagtttttgttcttgtgatgattttgttggccatggctggtcactcaagtgggacatggtgtgtatgcaaagaagggttaagcgaggcaatgctgcagaagacattggactacgcatgtggtgcaggagctgattgtggacccattcaccagaccgggccttgctttaaccctaacaccgtcaagtctcactgctcctacgccgtcaacagcttctttcagaagaaaggtcagtctctgggcacttgtgactttgctggcacagccaccttctcagcctctgatcccagctacactacttgtcctttccctgcaagtgccagtggaagtgggacaacgactccagtgacgacaacaccttcgacaagagtccctacancaactaatacaagaccc

SEQ ID NO: 12867 - DNA, 449 bp, Arabidopsis thaliana
  unsure at all n locations
  Clone ID: LIB25-052-Q1-E1-C3
gttttgtnctgttgttatttctgaaatattgaagcttttgatttgggtttcaagagagcagagatgtgtagtttgtcggcgattatgttgttaccaacgaagctgaaaccagcttattcagacaaacggagtaacagtagcagcagcagctcactcttcttcaacaatagaagatccaagaagaagaaccaatcgattgttcccgttgcaaggttgtttggaccggcgattttcnaatcatccanattgaaagtactcttcttaggggttgatgagaagaagcatccttcaacgctccctaggacttacacactcactcacagtgacattacagctaaactaaccttagctatttcccaatccntaaaccactctcagttgccaaggatgggcaaataaggctantaccgggatgaagttgtggcanaatggaagaaagtnnaanggaa

SEQ ID NO: 12868 - DNA, 441 bp, Arabidopsis thaliana
  Clone ID: LIB25-052-Q1-E1-C5
gtttcttcttgcttttgagaaaaaataattatatatttttatataggaaagggttaatttattaataaaaaaaaataaaaagaagcagaaaagagataatgcagggtggtaggcttttgacggtgttggtgtgcctcgcctccacggtggcgttggtgagcgccggtgacccttacttctactacacgtggaacgtaacctacggaaccgccgcgcctctcggaattcctcaacaggtgattctcatcaacggacagttccctggtcctaacctaaactcaacctccaacaacaatgtcgtcatcaatgtcttcaacaacctcgacgagcctttcctcttgacctggagtggactccagcacaggaagaactcatgggcaagatggtgttgactgggactcatgccaaatccaagcaaggcacaacttcacttacaattcc

SEQ ID NO: 12869 - DNA, 451 bp, Arabidopsis thaliana
  Clone ID: LIB25-052-Q1-E1-D12
gatcatattttgtggatcacatcattgtcttatttttggaattgcttatcctcgcactagttcactgatttgagatctgtgcagttaattttgtgctccatagcgattccatggcttctttaatgttatctctcggttccacttctctgttaccgcgcgagattaacaaggataagctaaagcttggaacttctgcttcgaacccgttcctaaaagcaaagtcttttagcagagtgactatgacggttgcagtgaagccttctcgtttcgagggtataactatggctccaccagaccctattcttggagtcagtgaagcattcaaagctgacactaacgggatgaaactcaatcttggtgttggtgcttatcgtactgaggaactccagccttatgtgcttaatgttgttaaaaaggcggagaatttgatgttggagagaggagataacaa

SEQ ID NO: 12870 - DNA, 106 bp, Arabidopsis thaliana
  unsure at all n locations
  Clone ID: LIB25-052-Q1-E1-D4
aaancgtgttgtgatatcnagtatttattcgtttacggggaagaaacatttcaagtgagaaatgggagtgtctcaaaccgacggaanaatggaaggttggctttnt

SEQ ID NO: 12871 - DNA, 75 bp, Arabidopsis thaliana
  unsure at all n locations
  Clone ID: LIB25-052-Q1-E1-D6
tgtggtanaagagaagcaattattggttttggtttcnctattggcttgcttgataatgtttctgcatnagccgat

SEQ ID NO: 12872 - DNA, 446 bp, Arabidopsis thaliana
  unsure at all n locations
  Clone ID: LIB25-052-Q1-E1-E1
cancaacactaccacatctcaaaggtcttcaaaacggcgatattgcaacaagtgctatcaagcaggttgcttcagggcgttttggagtcacaccaacgttcttggtcaatgcagatcaattggaaatcaaagttgcacaaggtgccaagcctggggaaggtggtcagcttcctggaaagaaagttagtgcgtatatcgctaggctaagaagctctaaacctggtgttccgcttatatctccgcctcctcaccacgacatttactctattgaggatcttgctcagttgatctttgatctacatcagattaatccaaatgcaaaagtatcantcaagctagttgcagaagctggaatcggaactgttgcttcaggagttgcaaanggtaacgctgatatcatccagatatcaagccatgatggtggaaacggggctagtccaataagc

SEQ ID NO: 12873 - DNA, 440 bp, Arabidopsis thaliana
  unsure at all n locations
  Clone ID: LIB25-052-Q1-E1-A4
aaaaaggagctcccttttctatctctaagggaaaatgggtagcaagatgttgtttagtttgacaagtcctcgacttttctccgccgtttctcgcaaaccttcctcttctttctctccttctcctccgtcgccgtcttcgaggactcaatggactcagctcagccctggaaaatcgatttctttgagaagaagagtcttcttgttgcctgctaaagccacaacagagcaatcaggtccagtaggaggagacaacgtcgatagcaatgttttgccctattgtagcatcaacaaggctgagaagaaaacaattggtgaaatggaacaagagtttctccaagcgttgcaatctttcnattaagatggcaaagcgatnatgtctaatgaagagtttgataaccttaaagaagagttaatgtgggaaggaagcaatgttgtgatgc

SEQ ID NO: 12874 - DNA, 425 bp, Arabidopsis thaliana
  unsure at all n locations
  Clone ID: LIB25-051-Q1-E1-F8
gaaaaaaggctttaggtcaaacagaaataacgacctaaagctatgtttaaagcttagcagttctccacatatatttcaatatataaaaagattacccctttttaaaaaataaaatagatatttgttttccgtaaaagaaaggggtaatcaaataaaatggagacggctaggcttttcaaattagtgtgtgtgatatgtattgccagtttgattccgaccatacgagccaatgttgctgatgagaccgatgagtattgggtaaacaaggccaatgaagctcgtaaacatacccttatggcttatcatcccgacccttatgagatngtcgaccacttccacgagcgtnattacgacaactcgactgactcgaagggaccgaagaagaaaangcgtcgctttcgaagaagaagactcattgagatgat

SEQ ID NO: 12875 - DNA, 450 bp, Arabidopsis thaliana
  unsure at all n locations
  Clone ID: LIB25-051-Q1-E1-G1
agacttcaacatactccattctctatatacaacctttttaagaaaactttgattaatcagatcaaatatttataaattaaaacacacacacactttctcaacaatgagattctctctttctcccgtacgtccgcatagtgtagtagtaccttcactaccaaaacaggacgtcgtttcttatataagtggtacgacgtcgaatcgtcaatgtcgatgtgtacttacacttccttctccttcagtttccacttcccgaccaccggttttacccaaaccggaaacctgggagagtttgctgctaaaccatgatcaaattccaggcgaattctcaccactgggtcgaagtacccggtaagctgggcgggagaatggatggagttacangggctccaaaatgggacggtctttnaaacccatggnacaacatccccgggcnaagatccccgntcg

SEQ ID NO: 12876 - DNA, 457 bp, Arabidopsis thaliana
  Clone ID: LIB25-051-Q1-E1-G10
aaagctgagtaaaaccgtgcagccctgaacttcgacgctttctcctctttcaaccaatccgttgaacgtcgtcgtaataagcttcatcttcatcaatcatcatcactttcttctttctcccacagatccttccttttctccttcatcttccccttcttccttttccctcatcgcccaggaacacatccgatctgcaccctcttcgttcgattctcacaattaatatctagggtttgcgaggaccccccctctctattcaaaaaaagagagcagattttctctataatcccctttggtttcaagtggtgtaattggatcgtgtagctgcttttataatgacctctagcacgacaggagatcgaagatggggtactacaagaagaagtggcatgactatattgggaaaggttgctgttccaaaaccgattaacttaccaagccaaaggtagaagaacca

SEQ ID NO: 12877 - DNA, 440 bp, Arabidopsis thaliana
  unsure at all n locations
  Clone ID: LIB25-051-Q1-E1-G12
atatgaaaggtttggatggattacaagggcctatatacgtgggaaccgggtgtgtttttaggagacaagcactttatggatttgatgcgccaaaanagaagaagactaagcgtatgacttgcaattgctggcctaagtggtgtttgttttgttgtggtctaagaaagaatcgtaagtcaaagacaacggataagaaaaagaagaacagggaancctcaaagcagatacacgcgctagaaaatatcgaanagggcaccaaaggcactaatgatgcggcgaaatcaccagaggcggcacaattgaaagttggcgaagaagtttggacnntctcctgtttttgttgcgtctgcnggtatggagaatggtgggcttgccaaggaatgcgaatccancttctctgcntaaagaaagncatccnantccagtangtgttggnacaa

SEQ ID NO: 12878 - DNA, 449 bp, Arabidopsis thaliana
  unsure at all n locations
  Clone ID: LIB25-051-Q1-E1-G2
ttgcagcaaaggaaatcatcttctaaacagtctgtttctgtacccagaaaggcacctggtctgaatactcagtttgaaggaaaatctggtcgatcttttgatatagacttcgatgaacggctggaaaacatcagaaggtcagctcttgagcagaaaaagacagaagtagttaaagaatttggtccaattgactatgatgcaccagtcaagtctgaccaagaaaacaattggtcttggtactaaggttggagttggcatagctgttgttgtatttggtttggtttttgctcttggtgactttcttcccacgggaagtgatantccaactaagaacacaacagtagttaaaaatcaaatttcagaagaaganaaagccacgcctcagcaaaggctcaaagatttgaaacaactctcaatggcacgcctcaagatnnaactgctccggangg

SEQ ID NO: 12879 - DNA, 455 bp, Arabidopsis thaliana
  unsure at all n locations
  Clone ID: LIB25-051-Q1-E1-G3
gtatatatattctgcttactttttgttgctcatgctgttttcagaactaagaatgtgtttgttcttgtacgtaggaatatttacacgagttgaatatcaagaagatcaagaatatactaagtgcaaacgtagatgttccatccgagaacctggagatgatcgatgtcattcaaagtttaggcattgatctccattttcgacaagagatcgagcaaacccttcacatgatttacaaagaaggcctccaattcaacggtgatctccatgagatagcgcttcgctttcgattgctgagacaagagggtcactatgttcaagaaacttctgagctccgtgtagaaggtgaagaaacactcgacggtgcgagagaattcacatatagccgccttaatgaactttgctcaggtagagaaagtcatcaaaagcaagagataatgaantccttggcgcaaccg

SEQ ID NO: 12880 - DNA, 442 bp, Arabidopsis thaliana
  unsure at all n locations
  Clone ID: LIB25-051-Q1-E1-G8
ttttagattttgagctctggaatggagaaaagtatcaatggatcatgcagactcatcaagagactcgtgattatactttcttgtctttcatattcctttgttcgatcagactttacagagagaacaaatatcaattatgtatcagctgtgggagatcccgggatgagaaacgataacttaagggtggctatagaagcttggaaccaatgcaacgaggtcggtgaagaagctacaaacatgggaagccctcgaatggcagattgcttcgatatcgataactctagctttcccgtgaagataatccacaaagtcgacgaaagagacacaggcttgggggtaggaaatggacctacggaggataagcgctggagacaacgcagatatctacgcnaccgcaaaaggagnttacttaggaacaatgtncagttgttgacaagccaat

SEQ ID NO: 12881 - DNA, 88 bp, Arabidopsis thaliana
  unsure at all n locations
  Clone ID: LIB25-051-Q1-E1-H10
tccggntttctcctccggccggttagnttaaacaatccgaaacccaacttttanccctccccttttttccctncccaaaccctttcaa

SEQ ID NO: 12882 - DNA, 110 bp, Arabidopsis thaliana
  unsure at all n locations
  Clone ID: LIB25-051-Q1-E1-H12
ttctccggcaaaantcctagacttcccggcgaaaactctctccgacttccnctctcatcaccaaaacatggctttctctatnaacttcggcgactccgccgtcttaggnt

SEQ ID NO: 12883 - DNA, 363 bp, Arabidopsis thaliana
  unsure at all n locations
  Clone ID: LIB25-051-Q1-E1-H2
tggttttggtngccctggacctaccgganatggaaggtcgacccangcgtccggtgantttgaaatttcagataacgcagaatttttttattctcgccggagttttctcctcccaccgtctctgattctcgtcgccgccgtacacagttgttgttctctgccgtttctgcaagatgattggatcgtttcttacaagaggattggtgatggtgttgggctatgcttaccctgcgtatgaatgttacaagactgttganaagaaanaggcctgaaatcgagcaacttcgcttttggtgtcagntcttgganantgggtgncntgcctgacagnttttgaacacanntgtgangcggntggtnnca

SEQ ID NO: 12884 - DNA, 447 bp, Arabidopsis thaliana
  unsure at all n locations
  Clone ID: LIB25-051-Q1-E1-H5
ggaaaaagagctttttcccggaaagttgttctcatcttggaaaatcaaatctcggaaacgcagtcttcagctaaatcatgancaacgagtacgattatctgttcaagcttttgttgatcggtgactcctctgttggaaaancgtgtcttcttctccgattcgctgatgatgcttacattgacagctacataagcaccattggtgttgacttcagaattaggacgattgagcacgatgggaagacgattaagcngcaantttgggatactgctgganaggagcgtttcaggancatcnctagcagctattananaggagctcatggaaacattangtgtttaagactgnactgaagatggaaagnttcaacaanngtgaagcagtngggtgagtggnatcatananatgccatgagagtgtttggcaagctttanccggtagcagnng

SEQ ID NO: 12885 - DNA, 445 bp, Arabidopsis thaliana
  unsure at all n locations
  Clone ID: LIB25-051-Q1-E1-H6
aaaaaattcacccaaaaaaaaaaaacctcgttgccttcttcttcgccgttacagtcctctttctttcttcaattcgccgtcaaaatcttctctttctcttcccccgccggtccttcaccaatcctctgatctctctacacacgaacctttgattttgaccaacgtcgatgcatgttcatgactagtctcttcctcaatccttcaanttcatcaattcacgtcgatttcgtatccgattcgttgttctagctctttgtgtggtgttagggttttaagattttggaattggggtttggagtttgtgatgtttgaagtcaaaatggggtcaaagatgtgcatgaacgcttcatgtggtangacttcnactgttgaatggaagaaaggttggcctcttcgatcnggtcttctcgncngatctcngtaatcgttgcgggatctgcgtata

SEQ ID NO: 12886 - DNA, 454 bp, Arabidopsis thaliana
  unsure at all n locations
  Clone ID: LIB25-051-Q1-E1-H7
caacttatccccatttctctgaaaaccctaacaaatcctcctcttgttccgccactgccgccgccgctactcaacggtggtgaattttctatacggtcagttcgatcctctttttatcgacaatcctacacaaatccataatcatggccgccactgcttcctccgaagcttctgaaggaccagtgatgggtctcatcaacaagcgtctccgtgctctccgtaagaaatacaaccgaatcactcaaatggaagaatcgatttctcaaggcaaaaccctaaacaaggagcaagaagaagtcctccgctctaaacctgccgtcgtcatcctaatcgacgagcttgaaaagatccgtgctcctctctccgccgctgtgacagaggaaatcagcctcgctactcagcttaaccgtgcttcatccgatcaaaccaccgcatctgagcanaaggaagtcat

SEQ ID NO: 12887 - DNA, 418 bp, Arabidopsis thaliana
  unsure at all n locations
  Clone ID: LIB25-051-Q1-E1-H8
aaattatactcttcttctccaaaatatctcagactctcttatttttgatcgtcttcttcttcttcgttgtgagcttccatttttcatccaggatttgttttttccgtttgaggtaaagcagctttgcagttaaagaaaccttgagtatccaatgtccccggaagaggagctacagagcaatgtatcggtggctagttcttcacctactagcaattgcatctccaggaacactctaggaggacttaaagagcataactacttgggtctctctgattgttcttctgttggaagctctactctctctccccttgctgaagatgacaaagctactatcagcctcaaggctacggagctgacacttggncttcctggatcacaatctcctgcgagagacacagngcttaaccttttganccag

SEQ ID NO: 12888 - DNA, 418 bp, Arabidopsis thaliana
  unsure at all n locations
  Clone ID: LIB25-052-Q1-E1-A11
aggcgtcccgatattgaggttcgttacgccggcgaagattttcatcggaaacttatctgatcgtttacgccggcgaagatttccatcggaaacttaatctgatcggaaggaagaaggctcgatgaagagcagattgaagagctacaggaggaagaagctagggttagccacagttatcgtcttctgttctctctgtttcctcttcggtttctatggctccactctactttctcagaatgtgcctcgtgttaaacccaggttgagaatgttggatatngttgagaatggggaacaagaatctagctcnatgcctcaggggtgttacngganaagaatcgattggatngatnncttttcnggtncttaagttngacacctntggctanagcttttccggnatttngannctgcngaacca

SEQ ID NO: 12889 - DNA, 522 bp, Arabidopsis thaliana
  unsure at all n locations
  Clone ID: LIB25-051-Q1-E1-F7
tnnnggaactggtntgcgtntggcgngggncntccggnnntcgaaagntcgnggtcgacccacgcgtccgcccacncgtccgcccacgcgtccgaaagatctctataaataccatcattcactttctatcacatgaaaactaaaaaacacaaacatcacatgtatacacacatatagttacaaacacacatacacaaaacacagatatataaaaatgtcttgttataataaagcactattgatcggcaacaaagtcgtcgttatacttgtattcctcttatgtttggttcactcgtcagagtcacttcgaccactgtttgcatgtgatccagcaaacgggttaacccggacgctccggttctgtcgggccaatgtaccgatncatgtgagagttcangatttgctcggaangctcacgttgcacgagaagattcgcancctcgttaacaatgccgccgccgtaccacntctcggtatnganggcattaatggtggtcgangccctcanggntttccgacntt

SEQ ID NO: 12890 - DNA, 398 bp, Arabidopsis thaliana
  unsure at all n locations
  Clone ID: LIB25-051-Q1-E1-D3
tttttgtagagagaggaggcaaagtgcgaaagctaaacgcagatccacgatcaatctcctccaccttcaaaagccttcaaaagtgtttcttcttcgtcttcttccttttattatctgtgccttgacagatccacgatccgattctggtcaaattttacatttctgcagactccatngaaggtgacatttgtttaagatactcttgttcctggaacacatacnaagatgaagaaagtcttcggncaaactgttagaagaccttaagagaaaggtcaacangaaagtgctcaaagttcctggaagtagaacagaangttctaagatgctacnagtaatgagccatngggtccanatggatnactcctgctgatctgcgccagcttcagaaantannangg

SEQ ID NO: 12891 - DNA, 56 bp, Arabidopsis thaliana
  unsure at all n locations
  Clone ID: LIB25-051-Q1-E1-D5
gacacgctttcagtggatcgtccagttaccacataaccccccgtcctannatggag

SEQ ID NO: 12892 - DNA, 449 bp, Arabidopsis thaliana
  unsure at all n locations
  Clone ID: LIB25-051-Q1-E1-D7
gnttttaccgtagatcgtttcgagtctctttaatctttggcgggttccgtaaaaaaaaaaatggcctcttctagattccaatctgggttttgtcctatctcttcgtgtccctctcttgagaatttcatcgaaaggattaaagacgcatgtcgtttcaccctctccgctgttctagggacaattctctcggcggtcttgactttcttcttcgctttagtgggcacattgcttggagcacttactggagctttgataggccaagaaaccgaaagtgggtttatccgaggagcggcggttggagccatttcgggagctgttttctcatcgaagtctttgagtcatctcttgttctttggaaatctaatgagtcacgttttggatgtctcctctacttgattgatgtcattgtnagtctgataagtggtanacttgtgcgggaacnaatangg

SEQ ID NO: 12893 - DNA, 446 bp, Arabidopsis thaliana
  unsure at all n locations
  Clone ID: LIB25-051-Q1-E1-D8
tgacagttgtttccgcggcgaagaaggctgttgcagtgcttaaaggtacttctgatgtcgaaggagttgttactttgacccaagatgactcaggtcctacaactgtgaatgttcgtatcactggtctcactccagggcctcatggatttcatctccatgagtttggtgatacaactaatggatgtatctcaacaggaccacatttcaaccctaacaacatgacacacggagctccagaagatgagtgccgtcatgcgggtgacctgggaaacataaatgccaatgccnatggcgttggcagaaacaacatantggaacatcagaatcctcctgactggtcctaattctgttgttggaaaaacccttgtggttcacgaacctaaagatnactccgaaagggttgncataacctaatccgaacaatggaaacccaggcggaaaattgc

SEQ ID NO: 12894 - DNA, 153 bp, Arabidopsis thaliana
  unsure at all n locations
  Clone ID: LIB25-051-Q1-E1-D9
ctaagagtgatgattccagctttcttggaaattcatganattgctgggcttgttacaggagctcatgaaaganaaggtccttggaaacaaacttcctgtcccaaaatcntgcaatttgatggaantttcccggttttacctgcctttgaanga

SEQ ID NO: 12895 - DNA, 460 bp, Arabidopsis thaliana
  Clone ID: LIB25-051-Q1-E1-E10
tttctctgcatcagagattccggtgtccttcttcctttcactcgcgtataacctcttttccttgacgttgtctccgtgagctctctgtgctttgactgcaaccatgtcgactattatgcagaagatcaaagaaattgaagatgagatggctaaaacacagaagaataaagctacttctcatcatctgggtttgttaaaggccaagcttgctaagcttcggagggaccttcttgcaccgcctaccaaaggtggcggtggtggtgctggagaaggttttgatgtgactaaaagtggagattctagagttggactggtcggatttccttcggttggaaaatctacgctattaaacaagctgactgggacattttccgaagttgcttcctatgagttcacgactttgacatgcattcctggtgttatcacataaccgtgggagctaaaatccagttattaaatt

SEQ ID NO: 12896 - DNA, 466 bp, Arabidopsis thaliana
  unsure at all n locations
  Clone ID: LIB25-051-Q1-E1-E11
ttctggaaaaggggaagaggggtcttctcctccagagagttcacttcaagatgttgtttctcggtacagttacatggatctttggccatgcacttctaacgaccttgatcatttagccagacaagagttgcttgtgaagaatctgaataagaaagcagggaaaacaaatctacctcatgttcctgcggctataggtagtgtagcttcttcgtcaaaagttgtttatccagatacatctcagatggttgttcaagacccgacaaagaaatcagagtttgctaagttctgcaaacccaagtggcagcttctgcttcgaacaccttcccaagtactgtgactgcaactgcaactcatggatnagccancacattttgacgaaaataccnaagactactccacctgcattggnaacattttaagctaacttgccnaatgttgaccgtccaacacccaatgnnggtgtttt

SEQ ID NO: 12897 - DNA, 449 bp, Arabidopsis thaliana
  unsure at all n locations
  Clone ID: LIB25-051-Q1-E1-E2
cacaagaaacanaaacaattctctttttcctctagaaaaagagattaaaaaaaaaatggaggggaggttattgacggtgttggtctgcctcgtctctacggtggcgatcgtgaacgccggtgatccttacttcttccatacatggaacgtgacttacggaactgcctcacctctcggtgttcctcaaaaggtgattctcatcaacggtcaattccctggtcctaaccttaactcaacctctaacaacaacgtcgtcatcaatgtcttcaaccacctagacgaacctttcctcttgacctggagtgggattcagcataggaagaactgctggcaagatggtgtggctggaacttcatgccccatcccangctggacagaactttacttagcatttccaacctaatgaccagattggttcctacttctantaccaannactctctcancgg

SEQ ID NO: 12898 - DNA, 74 bp, Arabidopsis thaliana
  unsure at all n locations
  Clone ID: LIB25-051-Q1-E1-E3
ggccagatgccgaatgacaagactgtttcngacgtgangatgccttcaacaccttcctcagtganaccggtaca

SEQ ID NO: 12899 - DNA, 430 bp, Arabidopsis thaliana
  unsure at all n locations
  Clone ID: LIB25-051-Q1-E1-E4
tccaatgatgcagcccatgtatcaacaacaccagctctctatgtctgggccacatggacatccttcaatgatgatgagtcgaccaccacaaatgcaacctgttatgcgtgtgccgcctccaccgggatctcagttttctcatatgcaagttcctcaaccttatggtcagcttccaccgctttcgatggggatgatgcaaccaccacctatggctgagatgcctcctcctccaacaaccggggaggcaccaccgcctcttcctgaggagccagaaccaaaaagacagaagctcgatgagtcagcccttgttccaaaagaacagtttcttgctcagcatccgggtccggctacaatcanggtttcnaagccaaacgagaatgatggacaagtcatggagatnacagtgcaatcgttatccgaaaacgtggga

SEQ ID NO: 12900 - DNA, 438 bp, Arabidopsis thaliana
  unsure at all n locations
  Clone ID: LIB25-051-Q1-E1-E7
tgactatttcaccactactccggaaatgaaagctccggttgatgtggcggctgcagctggtaactatacttcttaccaggtgcctgtggacgtggaggcttcagggcattaccagcaaaaggaagaagatgcatcaaattccaaagaagtagaatcagttgttaatgatnaatctcaacaagatgagcatcaaaaggttgagttagtgaccgaaggagagtggtccatggacagcaagaacaggggctatactcaggtnggaaggagcaganaatgctaaaagaaactatgttncacttggtcctaacaagaaccaagaagtctncaagttctccaaaaagttgttgttgctaacaaaattggccaagaagacaagttgttgttgttgntaacaaaatgggccgtnccaatcctangatnaanccggttgaaaccgtt

SEQ ID NO: 12901 - DNA, 439 bp, Arabidopsis thaliana
  unsure at all n locations
  Clone ID: LIB25-051-Q1-E1-E8
agagaatggtcattcctgatgctctcaaggtgttgaggcttcaggctggtcacaagtactgcttgttgggacgtttgtcttctgaagttggctggaaccattacgataccatcaaggagcttgaggtgaagagaaaggagaggtcacaagctttgtatgagcgtaagaagcaactcaccaagctcagggcaaaggccgagaaggttgcagaggagaaacttggatcccagctcgatgttcttgcatcgatcaagtactgaagaaaatcagcatctatcttttggtttaactccttgtttggtttttatctattcagattttgttttcctcccttgtatcactgttgaaagtttaatcacctcattcagtttaatttancanttgatactccaaccctaaggaatnattcnaatacctccnaacctnccaattaaggtta

SEQ ID NO: 12902 - DNA, 79 bp, Arabidopsis thaliana
  unsure at all n locations
  Clone ID: LIB25-051-Q1-E1-E9
gatgttgtctgtgaaatttttcgcggagaagaaagtaatttaggaagacggagagtggcaagaacgaaatatacggnaa

SEQ ID NO: 12903 - DNA, 73 bp, Arabidopsis thaliana
  unsure at all n locations
  Clone ID: LIB25-051-Q1-E1-F1
ttggctgngttctccaacgtgggtgtctctcccccaagtgtgttgctccggcgttaaaaancccaacagcant

SEQ ID NO: 12904 - DNA, 448 bp, Arabidopsis thaliana
  unsure at all n locations
  Clone ID: LIB25-051-Q1-E1-F10
ggccatgggtatcgatcttatcgcaggaggtaagagtaagaagaccaaaaggactgctcctaagtccgatgatgtctacctaaagcttctcgtcaagctttaccggtttttggtgaggagatctaacagcaacttcaatgctgtgattctgaaaaggcttttcatgagcaaagtcaacaaagctcctctttcactctctaggcttgtagagttcatgactggcaaggatgacaagattgctgtgttggttggaactatcactgatgatttgagagttcatgagattcctgccatgaatgttactgccttgaggtttactgagagggctaaggctagaattgagaaagctggtgganagtgcttaanctttgaccagcttgctctcagagctccaatgggacaagancacagttcttcccagangaccaaagaactcgcgttaancatt

SEQ ID NO: 12905 - DNA, 354 bp, Arabidopsis thaliana
  unsure at all n locations
  Clone ID: LIB25-051-Q1-E1-F12
tttctttanttattcgggagaggttaaaagccacagaaacttattggctagaattggttatttataacaacaacacatgagcaaaaagctcaaaacatctacatactctttggaatcctcgattttttgtacgtgtaaagaagtcacacaagaaaatcttgggttgttgtaatcttcatcacactagtatgtcaacgggacaagcgccggagaagtccaatttttctcagagatgtagtcctgcncagccggtacttgaaggagaagggaagttttggaaanattatangggggtnggtncnaaanncngntcttggaccncnccggaaaatcnatncncaagggccaccanat

SEQ ID NO: 12906 - DNA, 52 bp, Arabidopsis thaliana
  unsure at all n locations
  Clone ID: LIB25-051-Q1-E1-F2
agggccanaggcggcggcaagacttccgacggtgactccgtctactaagtgt

SEQ ID NO: 12907 - DNA, 526 bp, Arabidopsis thaliana
  unsure at all n locations
  Clone ID: LIB25-051-Q1-E1-F3
nnnnnnnnnggaactggtttgcctttgcnctagccgtccgggaaatccanggtcgacccacgcgtccgngaaaggaaaaaaatctctttgtctttgcagatgcnacacgcaaaacgacgattctgatctcgcttgtctgatttcaaaaacaatgagaagatagttctgattatataacacacaaaccctacttcattccttcatcatcgtctccaatcattacccaaagatccgtctttttctttacttcatgtcgaagcaaacgtacaaagtgtgtttctgctttcgccggaggtttcgttacactgcatcggaggcaccgcgtgagatcaagaccattttcgaaaagtactcagagaatggagttatgaccgttgatcatctccacaggtttctgatcgatgttcagaaacaagataaagccaccagagaagatgcacagtcaattatcaattctgcatcctctcttcctcatcgtaatggtcccatcctgatgccttcntcaagtacctccttggtgataata

SEQ ID NO: 12908 - DNA, 460 bp, Arabidopsis thaliana
  unsure at all n locations
  Clone ID: LIB25-050-Q1-E1-B8
gtcatctctctacttcttggataaaatggcgtcaactttcactgccacatcttctattggttcaatggttgctccgaatggtcacaaatctgataagaaacttatcagcaagttgtcttcaagctcatttggaaggagacaaagtgtgtgtcctagacccagaagatccagttctgcaattgtgtgcgcagcaaaggaattacatttcaacaaagatgggactaccattaggagacttcaagctggtgtcaacaagctcgcagatcttgttggtgttacacttggacccaaaggacgaaatgttgttcttgagagcaagtatggatcacacgaattgttaatgatggtgtgactgttgcaagaagagttgagttggaagaccgggttganaacantgggcgctaaaccttgtgaaggcaaccggtgccaaaancaatggacttggctgggngncggtaca

SEQ ID NO: 12909 - DNA, 473 bp, Arabidopsis thaliana
  unsure at all n locations
  Clone ID: LIB25-050-Q1-E1-C1
tgaagacgaagaangactaagacatcacgaggaacacgatgggtgaagcggtcaaggatgggagagaagaagtgattcaagcttggtatatggatgatagtgaagaggatcagagacttcctcaccacaaggatcctaaagagtttgtatcgttggacaaacttgcagagctgggagtacttagctggagacttgatgctgataactatgaaaccgatgaggatttgaaaaagatccgtgaatctcgtggttactcttacatggacttttgtgaggtatgcccggaaaagcttccaaactatnaantgaaagtgaagagctttttcgaagaacatttacacactgatgatggagattcgttactgcgttgcaaggaactgggntanttngangtgagaagatncctaannanccttgggttatgggnatgggtnacaaanggangtttggnaactcntacctgctgggatnna

SEQ ID NO: 12910 - DNA, 454 bp, Arabidopsis thaliana
  unsure at all n locations
  Clone ID: LIB25-050-Q1-E1-C10
tttctgcagaaactatccaaaaatctcttcgttttcacaatttctcattattaaaaaaaaaactttaaattcttcttcttcaagaaaaaatggcggtggatcttttatcggaaaattctaatatgagtccaagaatctcattttcacgtgacttttgtcaatcagacgcaataccaatcgagaaacgtcccttaagatcatcaaactcgaaaccatcaagcctcaattcaagcatagatttcgatttctgcattcccggcggcgtaaattccggcgaaagcttcgatcaaggttcttggtccgccgatgaactcttctctaacggcaaaatcttaccaacggaaatcaagaaaaaaccagaaccgggtaaaaaagaaccagaaccaaaaccggttaaatctaaaccggattcaagaaaacagaggaaacaaccaaacgangaacaacaagaaga

SEQ ID NO: 12911 - DNA, 451 bp, Arabidopsis thaliana
  Clone ID: LIB25-050-Q1-E1-C11
aagatgtatcacatgatgatatacatgtacaagaaggctggcaactatgagaaagctcgaaaagtattttcttcaatggttgggaaaggagttccccagtctacagtcacttacaatagccttatgtctttcgaaactagttataaagaagtttctaagatctatgaccagatgcaaagatctgatattcaacccgacgttgtaagttatgctttacttatcaaagcatatggaagagccagaagagaggaagaagctctatctgtttttgaagagatgcttgatgctggtgtaagttatttgtctttttatctttcaggccaacacataaagcttataacattttgctggatgcatttgctatttctgggatggtggagcaagcaaagactgtctttaagagcatgcggcgggacagaattttcccggacctctggtccgtacacaacta

SEQ ID NO: 12912 - DNA, 453 bp, Arabidopsis thaliana
  Clone ID: LIB25-050-Q1-E1-C12
agagcttcgtcttcttcatctccatcattatctccattgacattgttctcaattgcgaataataatcataattattcacacaaccaaagcattcatctctcagattctcttaaaaaaatggagaaatcagatcctccaccagtcccaaagcccggcgccactattatcccctcctccgatccaattcctaatgccgatccgattccatcttcttccttccaccgccgatctcgctccgacgatatgtccatgttcatgttcatggatcccctctcctccgccgcaccaccttcctccgacgaccttccctccgacgacgatctcttctcttctttcatcgatgtcgatagcctcacctctaatcccaatccctttcaaaatccttccctctcctccaactccgtttccggcgctgctaatcctcctcctcctccttcctctcgtcctcgccaa

SEQ ID NO: 12913 - DNA, 524 bp, Arabidopsis thaliana
  unsure at all n locations
  Clone ID: LIB25-050-Q1-E1-C3
tggtttttttggggcgcnccgggtccggaaaanacgggtcgacgcacgcgtccggcaaatcaaaaccaaagttctccattttcgtagcttctttaagctttttcagtatcatagagacacttttttttttttgattagaaatggctttagctgttacttcttcttcaactgcaatctctggatcgagtttctctcgttctggagcttcttctgaatctaaagctcttcaaatatgttcgattaggttatctgatcgaacccatttgtctcagagacgttactctatgaaanctttaaacgctgagtcacattcacgaagcgaatcttgggttacncgtgcttcaactctaattgctcntgaagttgangagaaaggaggagaagttgaagacntngagcancttgcnaaaaangcttgaagatgcttcnncacgngagatcaggnnaaagctctngagagatccggagaccgaatcgcatntnctttaagnggagcngaaagaagttgcnttggatggannatg

SEQ ID NO: 12914 - DNA, 480 bp, Arabidopsis thaliana
  unsure at all n locations
  Clone ID: LIB25-050-Q1-E1-C4
gcaaaaccaagtcgaagcttttaaaaccctaaatccccaaatcgggaactgagattccgattcgaagatgtcgtcgtcttctccgagtggaagcggtagtgatttgactgagagaagagggatccctgccgccaaattcatccaagatgtggagacttatctctctcagtctggtctcgatcctaactctgctctcgcctttcaccaagaaaggnttcagcaatataaagttgttgagatgaagcttcttgctcaacaaagggatcttcaggctaaantcccagatattgaaaagtgtttagaggttgttgctactttggaagcacaggaaagggtactgggtgaaggcgctcttancctgaattttgaaggtgtccngnaagggantatattccacngggccctgcattgaaagacacaggactccagttgtttttgggnggttngggaanctaantggtccatgccnggaaaaaatnc

SEQ ID NO: 12915 - DNA, 369 bp, Arabidopsis thaliana
  unsure at all n locations
  Clone ID: LIB25-050-Q1-E1-C8
agaagatgaagcggacggtgatggacaacgcgattcgatcatcggtggtggtgttgggatcattggcctttggttacttgtcactggagcttggttacaagcctttccttgaaaaggctgaacaatacgaaagatctcttcagtcttctcaacaacatcaacaacangatgaacaagaagaagcgaggtgggacaatagcaatgtcgaggggtgggaggagaaaaggtagtcttataatcggtttcaatacagacatatcaaagtgtgtaaggaannangaaccttatcnaaaattttcttcntantcaacccntanagttcaantcgggtnanctancaaccaatcggcctgtttttnncnntaagcc

SEQ ID NO: 12916 - DNA, 451 bp, Arabidopsis thaliana
  Clone ID: LIB25-050-Q1-E1-C9
ttcttctcctctcgattcgaaaatttcacatctccggaattttcatttctggagaatattgtttcacatccctacaatggcgtctgagaatctgaatgacaagatctctgtttttaagaaactcaaagccaaatcagataataagatttgttttgattgcaatgcgaagaacccaacatgggcttccgttacttacgggatctttctctgcatcgattgctcagctgttcatcggagtcttggcgtccacattagcttcgtcaggtcaaccaatttagattcatggagctcagagcaattgaaaatgatgatatatggaggaaacaacagggcacaagtctttttcaaacagtacggatggagcgatggaggtaaaaccgaggctaagtataccccaagagctgctgatttgtataaacagatacttgctaaaagaagttgctaaaagcaa

SEQ ID NO: 12917 - DNA, 459 bp, Arabidopsis thaliana
  unsure at all n locations
  Clone ID: LIB25-050-Q1-E1-D1
ggaaaggagccgcctagagagaagaaggcgatccatggcggaatctgtcttctcttgtataccagaagacgtagtcttcaacatcttcttcaagctccaagatgatccaagaaactgggctcgtctcgcttgcgtctgcaccaaattctcctcaattgttcgaaacgtttgttgtaaaactcagtgctactccgctatccccaccgtcatctccgatctcctccctcttcctccctccgccgccgcatccgcttcttcatccaccgcggcggattcgtctcttactcctcccggtggttgggcttctttatacaaactcgctgtttgttgtcctggtctcttccacgccggaaattctcctcgaaaactccgatttcggttaanaagtnagctaggtccgattaaaaccncgattcnnaacctaatacgacggnttcaagcncttaacgannaaagaag

SEQ ID NO: 12918 - DNA, 446 bp, Arabidopsis thaliana
  unsure at all n locations
  Clone ID: LIB25-050-Q1-E1-D10
ctcaccatgnagacaccttagctcacctccatggcctctcctccttctcctcctcctctcttctttcacctccggcgaatcctctctgtccgcagaaaaaaacanattgcacaccggtggtctcagtagacagagttttcctaaaggattcgtgtttggaaccgccacgtcagcttatcaagtcgaaggcgagactcatcaagacggtcgtggcccaagcatttgggatgccttcgtcaagattcctgggaagatcgccaagaatgccacggctgagataacagtggaccagtatcaccgttacaaggaagatgtggatttgatgaagaaactgaacttcgatgcttacagattttccatttcatggtccaggatattccctgagggaagtggtaaagtcaactggaaagganttgctantacngtagattgantgatacatggtt

SEQ ID NO: 12919 - DNA, 152 bp, Arabidopsis thaliana
  unsure at all n locations
  Clone ID: LIB25-050-Q1-E1-D2
tnganganccactgtttcaaaggctgagcttaatgagaaattggcgacgatgtatgangttaacgacccaaatgcgagcttcngtttcaagttcacaactcactttgtgcngtggtaaatcttctggatatggtttgatctatgatactntc

SEQ ID NO: 12920 - DNA, 460 bp, Arabidopsis thaliana
  unsure at all n locations
  Clone ID: LIB25-050-Q1-E1-D3
acatctcacatccccctatctctctctctcttcaaacgttttagttccccaaaaaaatatcaaaagaactaaaagaaaaaccctagaagccgaagaatctcctactcgttgtcgatcggatcacctaactaattactcgttgataatcattatatcgagaaatatgattaattttgaggccacggagctgagattanggctaccgggtgggaatcacgggaggagaaatgggctggaanaaataatggtaaaagaggattttctgagactgttgattccaaactgaacctttcatcgnacgggtaagggattcagttttccaagttcaanttagangnantnngagggncaaggntcntaaaancccccangcccagggcacaaanttgtgggaatggccaaccgggtncgntttttttccnnaaggaaacgttnnngtccngggcgaaaaaaccggcgc

SEQ ID NO: 12921 - DNA, 55 bp, Arabidopsis thaliana
  unsure at all n locations
  Clone ID: LIB25-050-Q1-E1-D4
attcaagctcgggagaancaagacgaccagcgacnaaggttaaagtttaggcggt

SEQ ID NO: 12922 - DNA, 400 bp, Arabidopsis thaliana
  unsure at all n locations
  Clone ID: LIB25-050-Q1-E1-D7
ttggggaaaggcattgataccgaatgggtcaaaaccgttaatctggctttcacaaagttgagtacaagcccagaagagaatacagaggtggaagcattcaattcatcattggcttctcttatcacatcagtgaacaagaacgatatagagtcatcgaagctcgctttcgtttcatcagctggtgcatttgagaaaatggactactttgacaggtcttttgggaacagcttaagggactgtgataggctggctacaaattctttactctttttttgtattttccaacagatttgtcaaaaganggtcttttttttctccaaataatcctttgaataatcatcattcactttcttaacttctttggttattaattacctttaaaaaaaaanaaaaagggcgg

SEQ ID NO: 12923 - DNA, 470 bp, Arabidopsis thaliana
  unsure at all n locations
  Clone ID: LIB25-050-Q1-E1-B7
tctctctctctctagattcgaaaaaatggcgaaactggtgatgttgttggttctctgtatcttaccggcgatagccatggcggcaaggaggggaaatattggaaagaatacaatggtggttcaaggtagcacctactgtgacatttgcaaattcggcttcgagactcctgaatcctcctacttcatccccggtgcaacggtgaagctatcatgcaaagacaggaagacaatggaagaggtttacacagacaaagctgtatcagacaaagaangaaagtataagttcattgtccacgacgatcacagacaccanatgtgcgatgttttgcttgtgaaaagctcggataaanacctgctctaaaatctccgttggaccttgaaagtctcgtngtgatctnganccattacaagnggaattgcctcgcaacnttagacatgctacncacatgggatttncgnaaaaaagttgg

SEQ ID NO: 12924 - DNA, 464 bp, Arabidopsis thaliana
  unsure at all n locations
  Clone ID: LIB25-049-Q1-E1-H12
atttaatttggagccatgatgaattcaagaatttctattatcattgcgttatcttgcattatgatcacttcaattcgtgcatacgatcccgacgctcttcaagatctctgcgttgccgataaatctcacggaaccaaactgaatggatttccgtgcaaggaaacattaaacatcacggagtccgacttcttcttcgccggaatctcaaaacccgccgtcataaactctacgatgggttcggccgtaacaggagccaacgtggaaaagatcccaggcctcaacactctctccgtctccttagcacgtatagactacgcgccgggaggtttaaacccaccgcacactcacccacgcgccaacgaaagtcgtctacgttctagaangagaacttgagggttggatttatcacaacaagcgaataagcctttcactaaaaccataaagattggggaaattttcgtttt

SEQ ID NO: 12925 - DNA, 531 bp, Arabidopsis thaliana
  unsure at all n locations
  Clone ID: LIB25-049-Q1-E1-H2
nnnnnngaantggtttnctggttcctacggcccnggaatcccgantcgacccacgcgtccgctcnnccgccgatattctcacgccgggtatgattcgaacaacattcgcgaccgccatccgctcatttccacacgcattctcatgggaggagctcaagctcgtcctctacagaacaacacacgagaagtaatccattgtcctgaagcttggttaagtcaaaatcgtatctactttgttcgtgtacagagttccagattcagatctctgtttctgttacttaagcaagaatctaaatccgtttatctcctttgaggttgtgaagaaattggataacaatcctcacatagggtttcgattttgggagtttagtagattcaaattgaacattcgtcattcgttttggacttataatttgctaacgagatctctttgtaaaagccggtttgcacgatttanccggtcagatgtttgagtgtatgaagaacgatnggggttccccgaataatccggttataagggttctaatggnc

SEQ ID NO: 12926 - DNA, 115 bp, Arabidopsis thaliana
  unsure at all n locations
  Clone ID: LIB25-049-Q1-E1-H3
atcancacngcaggtgtgagcgnctcaactgtgcactgttgagggagaattattactggtcggaaacagcatatcatattcgcagttttgattgggggangaanacgttgtgatt

SEQ ID NO: 12927 - DNA, 540 bp, Arabidopsis thaliana
  unsure at all n locations
  Clone ID: LIB25-049-Q1-E1-H4
nnngnnggnnnnnnnnngaantggtttgtggtgtncntgggcntggantccggaatcgacccacgngnccgcatcatctctanattcgtctttcatcgcagacaacaaatcttcaatcttcgtcaattccaaaccaccacaatccttcgcaacccaatctccatcgctccgatccagattccgatggacgccaccgagcagtctctccgtcaatctctttccgagaaatcctcatccgtcgaagctcagggtaacgccgtccgagctctcaaggcttcccgtgcagctaaaccagaaatcgatgctgccattgagcaactcaacaaattgaagctcgagaaatctaccgtcgagaaggagcttcagtctattatcagtagctccggtaatggttcgcttaaccgtgaggcttttcgaaaagctgttgtcaatactctcgagcggcgtttgttctatatcccttcgtttaagatntacaagtggcgtcgctggactttttgattatggtcctcctggctgtgctattaaatccaatgttct

SEQ ID NO: 12928 - DNA, 153 bp, Arabidopsis thaliana
  unsure at all n locations
  Clone ID: LIB25-049-Q1-E1-H6
acntgatggttccacacnanancttgaccactactcaagggatcctaatttacaaagcctacatgatatgtccttgagtgcattaacatgtctcggatttgcatactcagatgttccancaaattttgcnacttatgacggnactgaagacca

SEQ ID NO: 12929 - DNA, 443 bp, Arabidopsis thaliana
  Clone ID: LIB25-049-Q1-E1-H7
actctctcaaagctccccaaaaaaccctagttctgaatggaatcggcggattccggacgatccgatccggtaaaaggagacgacccgggtccatctttcgtctcttcaccaccagctacacctagcaggtatgagtcacagaagcgacgcgactggaacacgttcttgcagtacctcaagaaccacaagccgcctctcgcgttgtcacggtgtagcggagcgcatgtgatcgagtttctcaagtacctcgaccagttcggtaagaccaaagtccacgtggcggcttgtccttacttcggccatcagcaacctccgtctccttgctcatgccctctcaagcaagcttggggatctctcgatgctttgatcggacggttgagagctgcctacgaggagaacggtggacggccggattctaacccgttcgccgcacgtgcggttcg

SEQ ID NO: 12930 - DNA, 458 bp, Arabidopsis thaliana
  unsure at all n locations
  Clone ID: LIB25-049-Q1-E1-H8
tcatcaatggnggcgaggataaacacttcgcttcataacgccctctcttttttaaagccttttaacactcccctcaataccaaaccattctcttttagaagaaacagnttcagattttccaaaaagcttccttattattctcagttttcctcagggaagagagctctctattgcacttccagttcccaggaaagtaccgtcnatgaaggcgagacatttgtcctcaccactcctctttattacgttaatgcccctccccacatgggtagtgcttacaccactatcgccgccgattcaattgctcgtttccaagagactgcttgggtaagaanggtatctttatcacangaacagatgaacatggtgagaagatagctacttcagcagctgctaanggacgtaatccncctgaacattgngaccncatttccaatcttatagancnnnttggaaanatc

SEQ ID NO: 12931 - DNA, 465 bp, Arabidopsis thaliana
  unsure at all n locations
  Clone ID: LIB25-049-Q1-E1-H9
tcaaacagattaccacaggagcctgtgaaatcgttattttgttcagaagatgaggatgtctcaacagcatatacagatctagttacttcatctaagaagacattanattccctcttggagttgcaagaggctttgtttgagaagaacccctcggttgatcaacaagtgaatgcaacagctantgaagaatccaataaatcaagatgcagaagatagcgatgaatggcagcgaatatctgacttgcagaaaagaatgtctgtgttccgaaacaaggctgtggacaaatggcaganaaaaacacaagtcacaactggtgcagctgctattaaaggaaagctccacgcctttaaccagaacgttagtgaacaagttgcttcctacatgaagggattcaagtagaatgattaaacagatgcaacaatcaagatctactgttgctgttttggaactgtccctcaagaaac

SEQ ID NO: 12932 - DNA, 477 bp, Arabidopsis thaliana
  unsure at all n locations
  Clone ID: LIB25-050-Q1-E1-A1
tggtggacctgctccgggaatgatgcagcctcagatctctcgtccaccacagctttcagctcctccgattattcgacctccgggacagatgttgccaccgcctccttttggtggtcaaggtcctcctatgggaagaggtcctccaccgccttatggtatgaggccaccgccacagcagttttctggaccaccaccgcctcagtatgggcaaaggccaatgattcctcctcctggtggtatgatgagaggacctcctcctccaacctcatggaatgcaaggacctcctccgcctcgccctggaatgcctcctgctcctggtggttttgctccaacgcgtcctggcatgccaccacataatcagcaacagtgattaagttaacaattgaatgaacaggactccttgtctcggctttttactggttttggnncnggttttcctgaaaattanaaaggcttaaaangtttgattgaaactc

SEQ ID NO: 12933 - DNA, 405 bp, Arabidopsis thaliana
  unsure at all n locations
  Clone ID: LIB25-050-Q1-E1-A10
ggctatggcttccactttcgtctgctctctaccaaatcctttctttgcttttccggtcaaagcaactactccttcgacggctaaccatacgcttctcggaagtcgaagaggttgtcttaagaatcaaagcgatttccactaaatgggaaccgacaaaggttgttcctcaggcagacagagttcttgttcgtcttgaagatcttcctattaaatcctcaggtggagtattgttgcctaaagcagctgtgaagtttgagaaaatacctaccaggaaanataaaaccgggtnggtccnaagnttgggcnaaaagnttggccctggaaaaaggtttggtcccccgaagnttaacnctaanaaagggncaatttggnaacnnntnncnaggaatgnctnctntaanaaaa

SEQ ID NO: 12934 - DNA, 585 bp, Arabidopsis thaliana
  unsure at all n locations
  Clone ID: LIB25-050-Q1-E1-A3
catttcaagtaaaaaatactttgagaaacaaaaagagaaaactagtatgagaaacaaatccttaaaaaaggaaataacagtaatgcacgtgatgatataacaaaaggttttgttttgtttgtttttttattgtttttttcttcttttatttgtctgttataataatcaaaaaacaagaagaaaaaacgagacgttcatgcatttaatctcgcaccttacgacaaagagtgagagagaggatcgctcaggtttgttcatcttcaccgggacgattagcttttgcggtgggagaaaagaacnggcctgtcctcaacctcctgaaaacaagaaggaacaagaagaagggttaaggaaagggagaacnaatnggnttggganccccgccgccggggcctccaagaatttcgttttttgggttttngggantttcttncccnanttgggttccaaanaattgaaanccctttttggggnccaaattggggtnggggttttggggggggccnccccaaanttnccntttttccccnaaaggggtcccnaaaaggccctcccgtttaaaagggggccccgaaaaaaattnna

SEQ ID NO: 12935 - DNA, 479 bp, Arabidopsis thaliana
  unsure at all n locations
  Clone ID: LIB25-050-Q1-E1-A4
attcgaaatctttgcgagctcgtctcgcccagaatctcgatttctccacctttcctcttcaattcatcttccaaatccctaaaaaaaagactcaaactttttaattttggtccaaaaaagactcaaactttcttcatcaatggcggagaaaatcacgagagagacgtcgttacctaaagagagaagcagcccacaagctctaatcctgggacgatacgaaatgggtaagcttctcggncatggtaccttcgctaaagtttacctcgcacgtaacgtgaaancanacgaaagcgtagcantcaaagtaatcgacaaggagaaaagttctcaaanggaggttaaatcncacaacntcnaaancnganntttcgaatcctcgaacttttccggtaacccaanacaatcgntaagctaattcgaaggtcaagggggaacgaaaaggctaagattcaaatttcggtgaagggngttaagttccg

SEQ ID NO: 12936 - DNA, 452 bp, Arabidopsis thaliana
  Clone ID: LIB25-050-Q1-E1-A9
gggttttcttccatacacaatcagactcaacgataagtaccaatcggagaagagatcacaagtggatgatgagttacgaaggcaacggagatggtgtcgctatctccaccgaaaaccacaacgagaactacatatctctagagagctcgccttttcatgaagactccaagtctcgagaatctcatgatcttaaaaaggattcttcgaaaatcagtgagaaagacaatgaaaatggacgtgataaagacggaaacaaagatcgtgatcgtgagaaggatcgtgatagggagaagagcagagacagagatagggagaaaagcagagatagagatagggatagggagagaagtaaggataggcaacgagaccgtcatcatagagatcgtcatagggaccgtagcagagaacgtagtgagaaaaagagatgatttgggatgatgatcatcatcgca

SEQ ID NO: 12937 - DNA, 313 bp, Arabidopsis thaliana
  unsure at all n locations
  Clone ID: LIB25-050-Q1-E1-B3
gaagattgcatcaatgaagaagaagaaatcaagcaaggaggttgatggtgcttcaacagctgctgcaaaggaagcagctgcgaggaaggcaaagttggccgcagcgaagaaaaaagaaaagaaaaactacaatcagcaacctgtgaggtgacnaaatcaatccacccaccgttgtgatatgaacataggttttgttcatatcagacttacttgccttgaacaaatcttttgntggggaatgtggttgggtcgtgttttagagttanganaactttggatcncttnatcctctcnaatngancctgncnngnna

SEQ ID NO: 12938 - DNA, 461 bp, Arabidopsis thaliana
  unsure at all n locations
  Clone ID: LIB25-050-Q1-E1-B5
taacgctgatgtgccgccatatcttgacatctttgactcccctcagctcatgtcttctcctgcacaggttgaaagatcagtggcttataacgagcaccgaccgagaactcctccaccagacttgccatctatgcttcttgacgggagaattgtttacattggaatgcctcttgtgccggcagtgactgagctagttgtcgctgagctaatgtatcttcagtggctggatcccaaggaacccatttacatttacatcaactccacagggaccactcgtgatgatggagagacggttggaatggaatcagaagggtttgcgatctatgactctttgatgcaacttaaaaacgaggtacatacagtatgtgtgggaacagccatangtcangcctgtccaatactttctgcnggaaacaagggtaaacggttaatgaagncacatgccaaagngaatgatcagc

SEQ ID NO: 12939 - DNA, 459 bp, Arabidopsis thaliana
  unsure at all n locations
  Clone ID: LIB25-049-Q1-E1-G9
gcaagaattaagggaacgtgcacggaanaagaaagaagaggaagaaaaacggatggaacgtgaaagagagaaggagcgaattangattggcaaggaactcttagaagcaaagcggatggaagaagtaaacgaaagaaaacgtcttatgtttttgcgtaaagctgagaaagaagaagaaaaacgggctagggaaaagatccgtcaaaagcttgangaagacaaggctgaaagaaggcgaaaactcggattgcctccggaagatcctgcaactgcagctgcaaaaccctcagtgccagttgtggaggagaagaangttacattgccaattaaaccggccacaaagactgaacaaatgaganaatgcttgaggtcccttaagcaagcccacaaggaggatgatgctaanntgaaganagcgttccanactcctgctgacntacatgggaaatgtccnaaaaa

SEQ ID NO: 12940 - DNA, 465 bp, Arabidopsis thaliana
  unsure at all n locations
  Clone ID: LIB25-049-Q1-E1-E9
tcatgtcttcatatctctaaccataagataaaactcaagatttctgaagaggacagctctggaattcatatacgttttgcctctccatctgattctcagcttatggaattggagcaaatctgcattttgaaacccgatgatgaggaagaaatggagtcaccatcaccatcgaaaacagaggaaaatttaggcgtggttcctctgtcttgcgcgtttacgagacaagaacattgcgtttccgagacgaaagaacgcgaagaatcgactagaagactaagcagccttatttttctttacctcatcgttatgtccgtacagattgtgggangttttaaggcgaatagtcttgcggttatgacagatgctgcgcatttgttgtcggatgtggccgggtttgtgtgtcncttgttgggcaatnaaggtcccaagctgggaaactaatccgcgaaactcgttcgggtttaa

SEQ ID NO: 12941 - DNA, 531 bp, Arabidopsis thaliana
  unsure at all n locations
  Clone ID: LIB25-049-Q1-E1-F11
nnnnnnnngaantggtttgcctgcgcntaccgggtccggaaatcccggggccaancctctctcagattcatcttcttcctcgcagatcgatttttttttgaagctaaatctcaaaaatggagaacgacgcaggtcaggtcacagagctctacattccaaggaaatgctcggcaacaaacagaatgatcacatcaaaggatcatgcttcagttcagcttaacattggtcatcttgatgctaatggtctctacactggccaattcaccacttttgctctctgcggatttgtccgtgctcagggagacgcagacagtggcgtggacaggctctggcagaagaagaaggtcgaagctaaacaacagtgagagacaatctgacaatgtcataagctcttgtttgttttttgaggtttcgatttattagctatgtggctttgtcattgaattgaaaatgttagtttctccttaagcgaattcatgttttcgattttctgcnttattaaagataattantaagctttgagggcaatgg

SEQ ID NO: 12942 - DNA, 463 bp, Arabidopsis thaliana
  unsure at all n locations
  Clone ID: LIB25-049-Q1-E1-F12
tcgtacaaaatacaaatgaaccgcagaaagtgaatgggtttttgctggtggcctctactgctggatatgcatatagcgataaagatagagcctggattggagctatggctgagaaattcagaggatgacatgagctgttcatgatgatgttatctttgactggtgaaacacttcagttcctacagaaatttctcgaggccataaaccagattctggaaaaccaaagagaataatggcaagtgattacataacagtaagagattaatggatggagaattcttgcttgtttccatgttaccttgaggcgtaccacctttctgattgctaagagtangccgggcattacggaccttacgtcaattatgtcatgtttaacagtgtaaacctgtggacagcattttgtatcagaagaattttaatgagctaagtancctaaattttaaaatagagtatccaantttca

SEQ ID NO: 12943 - DNA, 534 bp, Arabidopsis thaliana
  unsure at all n locations
  Clone ID: LIB25-049-Q1-E1-F4
gnnnnnggaactggtcngcctggncnctaccggccccggacntcccgngtcgacccacgcgtccgaagattatagataacaaggttagatacgggagttgtctttgggaatcaaaagcatcttccatcccgtgtcatgaagaatgtcattgaagtcgagaaatctgaagatagaaacgaaaagtattggtttcatgaagcacgcgttcccttatatttgatcaaagaatatgaagaaagtttgcatagggtggtacacataccttttatcaagaagccatcaagaaaaatatcaaagctccagaaaaggcaactaaaagcttctcgagcaaacatattttcttatctagcctctcggagggacaacacggagaagtgttcttgtgcatcatgccatctcgatgtttttttgagggattcaataacatgcagtacttgccaaggtttctgtcacaaggaatgtactatgagttcacaacacacaactgggcagttggaaattttggtaacctgcaaacggtgctancntgcaaaa

SEQ ID NO: 12944 - DNA, 454 bp, Arabidopsis thaliana
  unsure at all n locations
  Clone ID: LIB25-049-Q1-E1-F5
ctcgcgctgaaatctatctttgtgcaagcaaactctcgaagaaccttagattgaagatggtactgatcgaatcaagtgagagtgaagacgagatcctcatcaaaaacgaaccaaagccagcgtcttcatcctcaccgcaacccacggagacgaaacaagtcgacggagatgattccgatgggttcgaaactgccagcgaacgtgaaattagcgatgaagaaggagaggaagatggtaccaaaaatgacgccgtcacgaagtcaggaggaaccacagcactcggagaagaagggaagagcagattgagctaatgagtgaaggagaagccatagtcgacgacggatnaaacaagggagaaaagctttggcaagaaagcaaatgaaggctaaagccggaaggaaataaactgtttcgttaatggcctttatgaagaagcattgtcaaagtatgcttt

SEQ ID NO: 12945 - DNA, 453 bp, Arabidopsis thaliana
  Clone ID: LIB25-049-Q1-E1-F7
aaacaatggcgataattccgttagcacagcttaatgagctaacgatttcttcatcttcttcttcgtttcttaccaaatcgatatcttctcattcgttgcatagtagctgcatttgcgcaagttctagaatcagtcaattccgtggcggcttctctaaacgaagaagcgattcaacaaggtctaagtcgatgcgattgaggtgttccttctctccgatggaatctgcgagaattaaggtgattggtgtcggtggtggtggtaacaatgccgttaaccggatgatttcaagcggtttacagagtgttgatttctatgcgataaacacggattcgcaagctctgttacagtcttctgctgagaacccacttcaaattggagaacttttaactcgtgggcttggcactggtggaaacccgcttcttggagaacaagctgcagaagaatcaaaagatg

SEQ ID NO: 12946 - DNA, 534 bp, Arabidopsis thaliana
  unsure at all n locations
  Clone ID: LIB25-049-Q1-E1-G10
nnnnnnnnngaantggtctgcctgcgnnctaccggcccgganatcccggntcgacccacgcgtccgacacaacgcagctaagaaacctccttaaagaacaaagaaaaaacttggtgaaatcgattctcttcaaagatcgtcttcctaatcactttcaacaactcgatcaatccttactgattctgattctgtatcgaatttgatacagagacgatgccgaagaacaaaggaaagggaggaaagaacaggaagagaggaaagaacgaagctgatgacgaaaagcgagagcttatattcaaagaagatggacaagaatacgcacaagttcttcgtatgctcggtaacggtcgatgcgacgttatgtgcattgacggtgttaagcgtctttgccatatccgtggtaagatgcataagaaggtttggattgctgctggtgacatcatacttgttggtctaagagantaccaggatgataaagctgatgttatactcaagtatatgtctgatgaaggtaggcttcntaaggcgtatggg

SEQ ID NO: 12947 - DNA, 463 bp, Arabidopsis thaliana
  unsure at all n locations
  Clone ID: LIB25-049-Q1-E1-G11
aaaagaagagaaaaataaaaaagtttgtgtaaattttttttgcacactccacagcctaaacccaacccaaaatcacaaaaaccaaaaaaatatataataatgggtggctgtgcgagtagacccaaggaatcagacatgcaaaacgaagaaggctctgttcctaacaagcctgtctctgaaaacgtagtagccaaggagaacaacacagaaagcggtgagaaacagaaccagacagtggctgagaccactgaaacaacttctgtcgaagctaaggagacatttccggtcgagccgaccaaggaaacaactcctgctgttcaaccagaggttgcagccgtcgaagagtcttcttctgctgatgctggtgaggctgcagtagttgcacctgagaaagtggagaacgctgcaacagaaaacgctgaagcaaangtggaagcggttgcgtanctgcanccgaaaaggt

SEQ ID NO: 12948 - DNA, 470 bp, Arabidopsis thaliana
  unsure at all n locations
  Clone ID: LIB25-049-Q1-E1-G12
tattcgcagtacagagtcaaactgtgtgacagacctaccatatgttctgatgaattctctcaattccatcgagaagggttcatactctccctgactttggaggatggaagcattggctatggagaggttgcacctctgaacagtaatgtagagaacttaatggatgttgaggggcagcttcagttagttcttcacctcatgaatgaagctaaatttagttacatgcttcctttgttaaatggctcgatttcttcctggatttggagtgaacttggaattactgcatcatcgattttccctagtgtcagatgtggtctggaaatggctcttctaaacgcnaatggnaagtaagacatgattcctccttctgataatgaagtatccccaacaaaactaagaatcatgtcntactgccattgcgtttaaaaagaaaatnggttctgctcanccaaactccgttcaaaanantg

SEQ ID NO: 12949 - DNA, 459 bp, Arabidopsis thaliana
  unsure at all n locations
  Clone ID: LIB25-049-Q1-E1-G2
ttatccttcatcggcgttgtcttttcgctggatttctcaaagccctagctgaagaatctctgaacaagtggaaatgccgttttggtggccactgatcgtcctcgccttcgcttacgcgatctgcaagttccttcttatgctcattcctcccaatgttccttccattgacgttgacgcatccgatgtgttggctcatgggaaagatacggaggagaatagcttcatctatattcctcccagaggaaggagccaacagtctgacaaaaaagttcaatgttatgaacctgccacaatgaaatatctgggatatttccctgctctgtcgcctactgaggtcgaggagcgcgtaacactatcaaggaaggctcaaaagacatgggctcaaagtagcttcaagcttagaaggcagttcttgcggattcttcntaagtacattattgaacaccaagagcttatatg

SEQ ID NO: 12950 - DNA, 539 bp, Arabidopsis thaliana
  unsure at all n locations
  Clone ID: LIB25-049-Q1-E1-G3
nngnnnnnnggnnnnngaactggtctgcctgtcnctaccgccccggaaatcccgnntcgacccacgcgtccgggagaagacggagtttaaaattgagattcaatggtggagaaaggtcacgaagcgttatagcttccgctgaacggagcagtgaagggattgagaagacaacagacaccgtcggtggcggaggaggaggaggagcaggcagatttgctggtactgccatggaggttactacacttgatcgtggttttgctaactccaccaccgttgattttccgatctgggacaaaatcggcgccgtcgttagacttacttatggaatcggaatatatggagcaatggctgtagcaagaagatttatatgttcagtgactggaattgattcatcctggtggaatttgattcttctccttgatgcactacttgctggacttggctatgcaacaccaacaatcatggctcctcctcttcatactcgacgatgaagttgtgaagctatcaccgcatgctcgggccattagagatgtggaant

SEQ ID NO: 12951 - DNA, 461 bp, Arabidopsis thaliana
  unsure at all n locations
  Clone ID: LIB25-049-Q1-E1-G4
tgcgaaaatggcgtcttcggtttttctatccagtttctcgtcatcgtcttctttgcaactctgctcttcctttcacggcgagtacttagctccgtcgagatgctttctcggagctccggtcacttcctcttctttatcactctccggtaagaagaactcatattctccgagacagttccatgtttctgccaagaaagtttctgggttagaggaagccattagaatcagaaaaatgagagagcttgaaactaaatcaaaagttaggagaaatccaccattaagacgtggaagagtatcgcctcgtcttcttgtacctgatcacattccaaggcctccttatgttgagtctggtgtattaccggatatatcaagtgagttccagattcctggtcctgaaggcattgcgaaaatgagaactgcttgcgagcttgctgctcnggtttaaactaagctggaacttt

SEQ ID NO: 12952 - DNA, 454 bp, Arabidopsis thaliana
  unsure at all n locations
  Clone ID: LIB25-049-Q1-E1-G7
aaattcttctagatcagctttaccactaagattcccaaaattctcgggattttcttcttcctctccattcgctagatcttacagatttggacgacgtaatctggaaccactttccaacggaatgctttcgtcgggaagtagagccgacggtgctacggcggcggctgcatcgatggaaggagtgatgacggaggcgatgaaactgattcaatcggcgtcaccaacttggaaatcagctgtggctaacaatttattgatttttgttctcggttcancgcttcttgttaccggattgtccgcttctgggatcgccgccgcgtttttgcttggtactttaacttggagagcttatggctctgctggtttcctcttagtcgctgcttacttcgtcataggaacagcggcaacgaaggttaaaatgacgcaaaaggaagcacaaggtgtggccgaaaaa

SEQ ID NO: 12953 - DNA, 549 bp, Arabidopsis thaliana
  unsure at all n locations
  Clone ID: LIB25-049-Q1-E1-E8
ngnnnnngnnggnnnnnnnnnannnnttaactggttccctgggcnctaccgagtccggacnttcccggggtcgacccacgcgtccggagaaaagggaaaattaccaagacaagagttcttctttcttctctctgcctgcttctttttcctctcttttctctctctctctctttctttgtgaaaatctagaagaagagaaagctacaaaaatctcaacatcgaggtaagagttttggctacagagcaaccatgctaacttgcgccttctcccaaaatcttatccactaatctcggtaaggaaagtgatgttggcaaaatggtgaagaaaggaagttggttttctgctatcaaaagggtttttactccacattccaaagagaagctagccaatgaaccagagagaaagagtggcaaagaaaagaagaagaaaggttttgggaagctaaggcatggcgagaccaattcatttcttcccatcttcagagagcctagtagtatcgaaaaagatcttgggcaaggctganagagatnacaatcttgtcttcaggc

SEQ ID NO: 12954 - DNA, 451 bp, Arabidopsis thaliana
  unsure at all n locations
  Clone ID: LIB25-048-Q1-E1-D7
gttctatctctctcttctccattctctctctctatagagacacacaaaagtagaaagacgaagaagaagagagaacgggtttgtagttggtggttgcgtttctttctcgtttatattcttctttcttttttgttttcatctttcaattcctttttttcttttttgtttataatctaatcgacgcacgaacagagcaatctcaagctcttcttcttccccacaattgaatctgattctgagatcctcttaccttctgtttgatctctctgtttcctgacgaaggagatattgtagagaaagaaaggggttctcatgattctcgtgttttgagtctctttccagtananattaaaacttacacttgtctttctttgtctttntggtgganatctactagatcngttccgtttttccatnaaactttgggtncangttccgtacaangaaatag

SEQ ID NO: 12955 - DNA, 442 bp, Arabidopsis thaliana
  unsure at all n locations
  Clone ID: LIB25-048-Q1-E1-D9
atcgtctttggatctgctttttgaaatttgaaattttgaaagtttttggtcggagaagtaatggcggaagcgatgaattcgtcggagaagaaagatgagagctcggaggagaagggaggtgagcttttgttctgtggtgctacggcttgggatatcattggaaaacgaaaaggtgcgatggaaggtaacttggtctctcctactcggctaaggccactcgtcggcgttaacattcgattcgtcgccactggttgcgcttcgtttcattgtgtggcattggacgttgaaggtcgttgttacacttggggacgtaatgagaaangtcaattaagtcatggtgatatgattcaacgtgataagccaacagttgtgtcangactctctaagcacaaaattgtgaaagccgcaacaagaaggaaccacacngtaattggttantgat

SEQ ID NO: 12956 - DNA, 456 bp, Arabidopsis thaliana
  unsure at all n locations
  Clone ID: LIB25-048-Q1-E1-E11
tttggcaacatagatcgtggatggacagagaagctactgctttcaccatctccaattgatggagaatggctaccaaaaagtgccatcgatgctttggtccatcttatggttgtcatatcgggacgtccaaagggactctttaaagagtgttcaaaacgtatcgagtctggactgcagatcattcaagatgaactgatcaagcttggaattactgacgaagttagagaggctgatttgcggcacacagctatctgggatgtctanggtttttcttatgctacaagatgcagtttcctgagaatagagtggctttggaacttacaaggtctgattatgtcnaaagctgaaaaagctttggttgatatgaaaaattggtttacacgatttccaaacgaatttacaagcttctgaatgtatgaattganatgctcaagggggcaataatcctcaatccgt

SEQ ID NO: 12957 - DNA, 531 bp, Arabidopsis thaliana
  unsure at all n locations
  Clone ID: LIB25-048-Q1-E1-E12
cnntnnnngaactggtttgcctggncctaccggtcccgggaaatcccggntcgacccacgcgtccgcagaaaacaagtagaaactttaaaacgagagagagagaaagaaatggcgacatcgggaacgtacgttgacggaggttccgttgaaaggatcggcggagaaacactacaagagctggaagagcgaagaaccatgtcttcgctgacgccattggccaccacatccaaaatgtcgttgttcacgaaggcgaacatgactctcacgggtctatcangagttgggactacacatatgatggaaagaaggagatgttcanagagaagagagagatagatgatgagaatanaacattgacgaanagaagactggatggtcacgtgatggaacatctcaaagtatttgatatcatctacgaatttattcccaaatctgangatagctgcgtctgccaaatccctatgatatgggaaaagcgcaacgatgacttcccgaancaagccggctacntgaaaatcntccagcnantg

SEQ ID NO: 12958 - DNA, 470 bp, Arabidopsis thaliana
  unsure at all n locations
  Clone ID: LIB25-048-Q1-E1-E2
tcttnntcttctctctattccatggctttagtacgtgaacgtcgtcagctaaatctccgtcttcctcttcctccaatctccgaccgccgcttctccacctcttcctcctcagccaccaccaccaccgtcgctggctgtaacggaatctccgcttgtgatctcgagaaactcaacgttctcggatgcggaaacggcgggattgtttacaaagtccgtcataaaaccacatcggagatctacgctttgaaaacagttaacggcgacatggatccgattttcacaagacagttgatgcgagagatggaagattctccgccgtacagattcaccgtacgtcgttaaagtgtcagggaatcgtcgagaaacctgtcntcggtgaagtatcgattctaatggagtatatggacggcggaaccctanaatcactaagncggcggtgtaacggagcanaaactcgccggattcgctag

SEQ ID NO: 12959 - DNA, 523 bp, Arabidopsis thaliana
  unsure at all n locations
  Clone ID: LIB25-048-Q1-E1-E4
ttttgcacgnccggtccggnaanaaangggtcgacncacncgtccgggctgccantttcgatttccaaaggttttgagctttgaaaaatggtgagaatcagtgtgcttaacgatgctcttaagagtatgtacaatgctgagaagagagggaagaggcaagtcatgatcaggccttcctctaaagtgatcatcaagtttcttatcgtcatgcagaaacacggttacattggtgagtttgagtacgttgatgaccacaggtctggaaagatcgtggtccagcttaanggaagacttaacaaatgtggaagtcatcantcctcgtttccgatgttggagttaaggagattgaangctggaccgcncgtcctcttccttccagacantttgngtacattgttcttaccacctcggcggggtantatgggaccacgaagnacccaggagaanagaatgttggnggccancgttcntggctcctttnctgantcaaagtcttnaaggaggagaanccttangggtnggg

SEQ ID NO: 12960 - DNA, 467 bp, Arabidopsis thaliana
  unsure at all n locations
  Clone ID: LIB25-048-Q1-E1-E5
gactatttaccgcgcttccagatcttacaccaagatgaatcagcatatgcctttgatttatattcagctctacacctatcagatttgccgtgctatgaattatctgcatcaagtggttggagtgtgtcaccgtgacattaagccgcagaatctgttggtcaataatgttacgcatgaagtaaagatatgcgattttgggagcgccaaaatgctgattccaggagaaccaaatatatcttacatatgctcaaggtattacagagctcctgaactcatatttggagcaaccgaatacacaagtgcgatcganatgtggtctgtaggttgtgtcatggctgagctttttcttggacatcctctattccctggagaaaccaagtgttgatcaattggtggagatcattangnttttagggacaccagcaggagaagagataaagaacatgantcctcgttacaatgaantt

SEQ ID NO: 12961 - DNA, 225 bp, Arabidopsis thaliana
  unsure at all n locations
  Clone ID: LIB25-048-Q1-E1-E9
ttccgggaatcccaaaatcgtccaagagggtttttagcaactcatttctttcaaaggactctactggagctaatggactattgtttcgcttccgaancccgnaagcaagtatatgtacggaagctcgtccaaagaacatcaactcatcttactttaccagatcttttgaagttcttgatgcanaagatctggtanagttagatgagttgcnttncgannttcnaa

SEQ ID NO: 12962 - DNA, 470 bp, Arabidopsis thaliana
  unsure at all n locations
  Clone ID: LIB25-048-Q1-E1-F10
caaatgtgggatgctaagaacatgatgtgtgctgctgacccaagacacggtcgctacctcactgcttcagccatgttccgtggaaagatgancaccaaggaggtcgatgaacagatgctgaacgtacagaacaagaactcctcctactttgtggaatggatccctaacaacgtcaaatcaaccgtctgtgacattccccctactggtctgaagatggcttcaacgttcattggtaactcaacttcgatccaagagatgttcaggcgtgtcagtgagcaattcactgctatgttcaagagaaangctttccttgcattggtacacangtgaangtatggatgacatggagttcactgaagctgaanagcaacatgaacgatcttgtctctgantatcagcagttatcaagaatgccaacggctgatgaaagaaaggagaattatgangaaggaagaaacctgagtnacgaa

SEQ ID NO: 12963 - DNA, 473 bp, Arabidopsis thaliana
  unsure at all n locations
  Clone ID: LIB25-048-Q1-E1-F2
gnaaacaatttacacagctatatatatatttttagggtttttgagtatctcgcgaggttttacatagatttctccattatggattcgatgatgaatcagaagactgttttggctgtgacggatgatgtggtgttacctgttagctctgttttagctataatgaaagagcttggaaaggaagtgattgagagttttgatcctctgattattactcaagcatccacaataaatcagtttcctttggatgcttcctctgtggaggcggtattagccatttccaaaacatctgatttcccaagtgataaaatatgtggtgagttctcaaagaatcttgaagcctggcggcacggtttccgtgtgcaaangttttggganggtgaaacgggagaaattcaacaagaccattcaaaggagaantgacattgggctgggtttcttganccacagtgtccntgatttgaaatccattaaag

SEQ ID NO: 12964 - DNA, 463 bp, Arabidopsis thaliana
  unsure at all n locations
  Clone ID: LIB25-048-Q1-E1-F6
aaatgcgagggaacttgacttccagtattcacctttctcagctcaacagtctatgcaatcaagaactagcaacaatgcctcatcacttggtggccaaagcatttcaatgccagaggcgctccgaggcagtggaattccggcaacacagccaacccagcaaacactacctggtgctaatatcgctactggacctgctcttcctcagcagcttccaatgcattactctcaacccacattacctctaacacactatgcaaacatgatcggttatcctctaatgcctcagaattatccatacatgccatctgctttccagcaaacatttgctggtaatagtgcataccaccagcaactagctgcattgcttccgcagtacaaaaccaatgtctctcccggtaatttgcctcagtctgcaacagcgcctgcctctgcttaaggatttggnaactcgaacaatgtccgg

SEQ ID NO: 12965 - DNA, 531 bp, Arabidopsis thaliana
  unsure at all n locations
  Clone ID: LIB25-048-Q1-E1-G12
gngnngnnggaactggtttgcctggncntacgggcccggaaatcccggaacgacccacgcgtccgaaagtatttggtgtgataaattccctctccagcttctcggtgacacagatattttgcttccaaataaaacgagtccggtcactggcgctcantgacttcgtcttcctccatctccgatccattggtttaacaagcgcgtgagggcnagatagaccgagaatcatgggaaacggaaactcaacggagacgaaagagtcgcgccgatnaaagatgcgtaagaagattcaaaactttcgcagccgccgccgtcntagtcgtccaggatccggaagcgtctctggattggctagtcagagatctgtgagcgcagatgatttcgccggcattgctcttctcactcttatccggcgcggagatgaagttcaagggacaagttggctcgcctgtgtttccttcggggaacaaactttccgtncggaaatttcagaatccacnagagaagccgatttggaactcggaaaagaag

SEQ ID NO: 12966 - DNA, 445 bp, Arabidopsis thaliana
  unsure at all n locations
  Clone ID: LIB25-048-Q1-E1-G3
actatggatgaagagtacgaagtcatagttctgggtactggtctcaaggagtgcatccttagtggtcttctctccgtcgatggtcttaaggtacttcacatggacaggaatgactactacggtggagagtcaacttctcttaatctcaatcagctgtggaagaagttcaggggagaagagaaggctcctgctcatttaggttctancagagactacaatgttgacatgatgccaaagtttatgatggctaacggaaaacttgttcgtgtccttaatcataacggatgttaacaaattacttgtcctttaaaagcctgttgatggaaagctaatgttttttgtccaaagggcaaaggtccaaaaaaagtgccaancaaactcccaatggganggccctcaaatcctcctccttaatggggtaatttttgagaaaacgttcaaacct

SEQ ID NO: 12967 - DNA, 454 bp, Arabidopsis thaliana
  Clone ID: LIB25-048-Q1-E1-G6
gctttgcaatgcgtgttgcatatggtttgtgtctgtgttgagtatcggaggaggaacaggaggagaaccaataggacgacgacgacgactcctccacggtcacgttcttcttcttcctcttcatcttcttcttccttggaggaagaagctttgggttccaggaggaattcaggtgtgcaggacttgtcgcttggccacttggataccgaaagcagcagtgttgctaagcatctggaatctgccaatacgatgttttcttttatatggtggatcattggattctactgggtatctgctggtggccaagagttggcacaagaatcccctcggatttactggctgtctattgtctttcttggtttcgatgtgttctttgttgtcttctgtgttgcgttggcctgcgttattggaattgcggtttgctgttgcctgccatgcatcattgcagttttgg

SEQ ID NO: 12968 - DNA, 433 bp, Arabidopsis thaliana
  unsure at all n locations
  Clone ID: LIB25-048-Q1-E1-D5
tcgacgacgagtgaagaagaaagcgagacgaagaagcaaagatgttcagaaaccaatacgacacagatgttacgacatggagtccaacaggtcgtttattccaagtggaatacgccatggaagcagtgaagcaaggatctgcagcaattggactcaggatctcgttctcatgtcgttctcgcttgtgttaacaaagctcaatcggagctttcttcgcatcagaggaagatctttaaagtcgatgaccannncggtgttgcaatcgctggtctcacagccgacgggtcgtgtattgtctcggtatatnagatcggaancgattangcacncntttacntangaactcncgtcgtcnnngttgggtcgtcccggttgtncagcgtgctgnnaagccctcacggtccggtnncnnaccgatcanggganaacgacc

SEQ ID NO: 12969 - DNA, 452 bp, Arabidopsis thaliana
  unsure at all n locations
  Clone ID: LIB25-048-Q1-E1-A7
agaatgggtactttctgttgaatgaaaagggtgagaaaatgaaggagcagcttggtgttgtccgatcaaactgcatacattgcttagaccgtacaaatgttacccanagcatgataggtcgaaagatgttagaagttcaactcaaaaggattggagtttttggcgctgaagaaaccataagctcacatctgaattttgacgaacactataaaatattatgggctaatcatggtgatgaaatcagcattcagtactctggtactcctgcacttaaaggaagatttcgttangtatgggcatcggactgcccatgggtgtccttaaanatggttggagctccctcagacgcnattacctnaataactttgctgatggaacnaagcangatgcaattgatctcttgcaagggcactacatanctngctggtgagccganncatggctcctgtacc

SEQ ID NO: 12970 - DNA, 460 bp, Arabidopsis thaliana
  unsure at all n locations
  Clone ID: LIB25-048-Q1-E1-A8
ccctctaatttcggatttttgcatcttctccgatcatcttcaccactatgggtgcttcatcttctacagacgacaaagaatcatcggagaaacgagaaatcgaaagccttgctgcttcaaccggagctcttcctctgcttaaacgatccttctccaaactcgtcgattctcaaaccaatactgttccttttcaatccttgaagcanagttttggtttgagctacgatacaattactantgaaggagagcanaaagtttcagacttgtttcccaaattgttggagcatttaggatcatctttagtacatttgttcttcgtgcctgataaagangcgattgagttgggttgagtttgcnaagtggttacgtcaanatgttgtgggaagaatgttcgaagtcgatgtcnntcagnacnntgttgagagttnanatgtnacagctaaaaantcnggcttttcng

SEQ ID NO: 12971 - DNA, 545 bp, Arabidopsis thaliana
  unsure at all n locations
  Clone ID: LIB25-048-Q1-E1-B10
nnnnnnngnnnnnnnnggaactggtttgcctgggnnctaccggtcccggaaatcccggntcgacccacgcgtccgttcantgggttgagagagaaaagagtaaaaaagcacatggcctcattaccattggggcctcagcctcatgctcttgctccgccgctgcagcttcacgacggcgacgctttgaaacgccgtcctgaattggattctgataaggaaatgtctgcagctgttattgagggaaatgacgctgttactggtcatatcatttccactactattggaggcaaaaacggcgaaccaaagcagaccattagttacatggctgagcgggttgttggaacaggttcattcgggattgtttttcaggcgaaatgcttggaaactgganaatcagtaccattaaaaaggtcttgcaagatcgacgctataaaaaccgtgagttgcaactaatgcgaccaaatggatcncccaaatgtcatcctccttgaancaactgtttcctccnctacaacgaantnnaagaatgaactccttcctccanc

SEQ ID NO: 12972 - DNA, 469 bp, Arabidopsis thaliana
  unsure at all n locations
  Clone ID: LIB25-048-Q1-E1-B2
cgtgagcttattcttacctttctctcgaaggaagctctcatcttttcactcagatcacgttccctgggcttattcgcttgtatctgttgatatacaagatggcatctgcgactctgagaaggcggcttcatcacggtgatgtagatgggaggaagtatgaacgctatgatgcaacagactctgaaactttaagtgaacccttgttaggaagtagtagtactgataatagtanaaatgagtacattgaggagcgtactctggaggatatttgggaagaagaacggaanagacagcaagttcnctgggacgttaanccttttctcagttgattncacaagttgngctcaagtggaatagccaaaagtaagtcnnttggaatctgggntcaacttggttgggaagtttcctttcctctgccctaacatttgggtcaaatagggtcctgggtggggaagcttctngccaacca

SEQ ID NO: 12973 - DNA, 53 bp, Arabidopsis thaliana
  unsure at all n locations
  Clone ID: LIB25-048-Q1-E1-B5
ccancggtcgtttctgcaanggcaaattatccactgatataacgcgctgagac

SEQ ID NO: 12974 - DNA, 468 bp, Arabidopsis thaliana
  unsure at all n locations
  Clone ID: LIB25-048-Q1-E1-B7
aaaactctttcttgtatttattttcctcccaaaaaacatctttaagagtcctcatggcgatgtctttatcaggagctgttctcagtggcatgggttcttctttccacaacgtaggagcaaagcagagtggtgttggtaccgtcagagttggccggaagagtgagctcgtcgtcgttgctcagcgcaagaagtcgttgatatacgccgttaaaagtgacggcaacatcctcgatgacctcaacgaagccacacgaaggaggccttggcggatggcgagaaaacaaaagactacattgttgagaaaaccattgaagccaatgaaactgcgactgaggaagctaagaaagctttggattatgtgactgagaaaggaaaagaatccggaaacaaggcggctgagttcgtagagggtaaagcagaanaggctangaatgccncaaagtccngattcaaccactcagttnnnng

SEQ ID NO: 12975 - DNA, 530 bp, Arabidopsis thaliana
  unsure at all n locations
  Clone ID: LIB25-048-Q1-E1-B9
ngnnnngnnnnnnggnggaatggtttgcatggggtctgccgggccggaaatcccgggangacccacgcgtccgctgatccttccaaagaatctccaaaatccctaaacttcgaaaatggcagaaaccgccgagacaatcaacaccacgatctcatcgccgccaccggaatccgaaagctccaccactatttctgcaatgacagatccaacatctcaagaagcagcctcaaaagacacagatctgacgaaagaagccgaatcagagaagaaaccaggaggaatctctctccgaatctggccaccgactcagaaaactcgcgacgccgttctgaatcgcctgatcgagaccttatccaccgaatcaatcctctctaagagatacggtactcttaaatctgacgatgcaaccaccgtcgcgaaacttatcgaagaagangctatggtgttgcttcgaatgctgtgtcgagtgatgatgatgggattaagantcctgagcttantctaaagagattatnagaggatgcntgatc

SEQ ID NO: 12976 - DNA, 463 bp, Arabidopsis thaliana
  unsure at all n locations
  Clone ID: LIB25-048-Q1-E1-C10
gagtatagccatggaagtctcaaatcagaccagaaaacggaaagcaatcgacgccggacatggctcgcagccgacggcgtatcgaggctcagatggtgtagatctttctctccttgaagcacttgagaagtcttcgcataatggagtagaagcgcttgatcttaaaaccctaaaaaagcttgtcctctccttcgagcggcgtcttagagacaacatagctgctcgtctcaagtatgtggagaatccagaaaagttcgctgactcagaggttgacctacacgacgatcttcagaagctcaaggtgctcgctggagctccgggaactttacccggaccttgttgcttccaatacggttccttcgattgtcaatctcctctctcatgaaaactcccgatatcgccaacgatgttgttcaacctcctcangatntgactgacgaagatgcctttagangataacgat

SEQ ID NO: 12977 - DNA, 484 bp, Arabidopsis thaliana
  unsure at all n locations
  Clone ID: LIB25-048-Q1-E1-C12
gngnnnngaactggtttgcctgggctctaccggcccgggaaatcccggaatcgacccacgngtccgcccaagcgtccgacggacgcgtgggttgtgatcgcatagatcgattccttttgcggagaaatgcaattgattcgtggcagtacaaggttgcttcagaggcatcgtttctccatctccaacactcttcctttcacttcttcttcntgtggaagctggtctgctaatgaatcgaggaagctaggctttgattcnttccctagtactagagctgcgacatatctcattagntcgttgaaaaatgccggcttttcctctttggcagtagtacctanncaaaacttttcgtcgangtgtttttccaccactggaaattnctgttcaaaggatncccctggagtcncattgntgttggtgncctcanagaantcnantttaaagcgggcttgatnaaaaccgctaagcncattaagcccattgt

SEQ ID NO: 12978 - DNA, 468 bp, Arabidopsis thaliana
  unsure at all n locations
  Clone ID: LIB25-048-Q1-E1-C3
gcgtgttgttgaattcagcgtcgatcagcatggcagccggtttattcaacagaagttggagcactgctccgatgaggagaaggcatctgttttcagtgaggttcttccacaagcttcaaaattgatgactgacgtttttggaaattatgtcatccaaaaattcatagaacatggaactccggcacagagagaagaacttgtgaagcaacttgctggtcagatggtttcactaagcttacaaatgtatggatgccgtgtgatacaaaaggcccttgaagtgatagatgttgaccaaaagacagaactaattcgtgagctcgatgggaatgtgctgaagtgtgttagagatnaaaacggaaatcatgttatccaaaaatgtatcgagagtatgcctgctgggtangattggattcgtaattgctgctttccgtggtcaagtcgcactcnttctactcatccttatggatg

SEQ ID NO: 12979 - DNA, 68 bp, Arabidopsis thaliana
  unsure at all n locations
  Clone ID: LIB25-048-Q1-E1-C4
ngaagatgcagacaggcaaagcgccgctttcaagtttccttcanctccnctgaagtcttgacctgtga

SEQ ID NO: 12980 - DNA, 357 bp, Arabidopsis thaliana
  unsure at all n locations
  Clone ID: LIB25-048-Q1-E1-C5
tttcctttgctccttcgttctggccatggcaatggcaaaactcgcaattttcaccactcttatggccatactcgtaatgacatctcaaggaaggattccaacagaaggaggagagaaagaagcagaggctgacagaattacgtcacttccaggtcagcctaacgtcacgttcgancagttttccggctacgtcaccgtcgataaactctccggaagatcantcttttattggctcantgangcttctgacctccctctctccaaaccnctngtantttggctnancngaggaccgnggatgttcgtcngtagcgtacgcgtgccgtcngaggatattggancantcanggatanngc

SEQ ID NO: 12981 - DNA, 416 bp, Arabidopsis thaliana
  unsure at all n locations
  Clone ID: LIB25-048-Q1-E1-C6
acataacgttccggaacacggccggaccggagaagcaccaggctgttgcgttacggagcggcgcagatttctcaatcttctatagttgtagtttcgaggcttatcaagatacactctacacacattctctaagacagttttatagagaatgcgatgtctatggaacggtcgattttatatttggaaacgcggcagttgtgtttcaaaactgtaatttatacccgaggaaaccgatgccaaatcagttcaatgctatcaccgcccaaggccggtctgatccgaaccagaacactggtacatcaatccaaaactgtacgattaagccggcggatgatcttgtttcgagtaactatacagttaaaacgtatttgggtcgaccgtggaaagatattcaaggacggtttacatgcaatcnt

SEQ ID NO: 12982 - DNA, 464 bp, Arabidopsis thaliana
  unsure at all n locations
  Clone ID: LIB25-048-Q1-E1-D1
taaggttttatatctgggaaaaaactcgcatccgcttcaatgactaagggaacgggaagtttcggaaagagaagaaacaagagtcacacactctgtgtcagatgtggccgtcgcagtttccacatccagaagagtcgttgctctgcttgtgcttatcccgccgctcgcaagaggacttacaactggagtgtgaaggcaatccgtagaaagactactggaactggaaggatgangtatcttcgcaatgtgcctcgcangttcaagaacggtttcaagagaaggtancgaagccaagccaaangaacaanggaattgcntcatcagcttaaactttgtttttgagcatcaaagggaanagagaaatcctgantttgttggttcacaagattactactccnnaagtgtctgaattaangactanccttttggtgtgggtcctttgccgtttttaaagttttggacag

SEQ ID NO: 12983 - DNA, 432 bp, Arabidopsis thaliana
  unsure at all n locations
  Clone ID: LIB25-048-Q1-E1-D4
tccgagttatggctacatgttccctcttaccaccaccgtctttttctccgcgccggcgattctgtagtttttctcacaatcgccggtctctaccttcaatattcagtttcaacaaagagcgtgtctcacgaagagtcttctgtagctccaaagagaacgatataaacagagatcggaatcagtctacaggaattcaagtctacggcgaaatccgaagaggttattaacagagactgtaaaaaattctcangagtagctccggtgggatcctctgattggtcagaagttgagggagcatgggtgctgaaaccaagaaactcgaaaccgaagatggttgttcatttcattggcggtatatttgtcngtgcagcaccacagcttacntatcgaantgtttctcgagagattagnggagaaggatgttttggttag

SEQ ID NO: 12984 - DNA, 470 bp, Arabidopsis thaliana
  unsure at all n locations
  Clone ID: LIB25-048-Q1-E1-A6
caaacaaaaaaacaaaacaaaacaaaaaccaaaaaaacaaaaaaataaatggcaagaatttcactagggatatgtctgatgttagtagtagcatcaagtgtgatctatgaagcgcaaggaacgttcttactaaaccattacttgaagaagaattttccaaaaaaatgcaacgagtttacgccttacgctaacaagggtatgataacgttggtgaccgatctcgaaggtagcagtccggccactacagagttcaagactttctttacacagttcaagtcttacatgtccttccatccaagacaacatncggcctcaacaaaaaatgttgatgccgagatgacagctaaatgtgacggtcttttcaagggccatgtctgcattgagtgctataaagggcgtcaaatcagcggatgctgggagtatgaagatgaccatgttgtcgatgggaaagacttggttgagcagaanaa

SEQ ID NO: 12985 - DNA, 431 bp, Arabidopsis thaliana
  unsure at all n locations
  Clone ID: LIB25-047-Q1-E1-F3
taaatctaacttaaagcattgtactttcttttatctcattctcctttgctctgctttcttctggtcaacccccacgagattccttcttatgtgattgtaaagagaagatttttcagagatgggtctcttcgaatcggtgaaatcaatcgattgggaacaagaatcgttcccaacttatcaagatttagggtttttgcctctctttgcagtgttcttccctacaattcgatttctacttgacagattcgtcttcgagaaattggcangtcntgtgatctatggaaggatgaagtacgaaggaagagtgncannanangnngacagggnanaangaanagtccaaaagttcganangtttaaaggaatcagcttggnaagtgtagttacnaancngatcagccngagcctacttgcctttancctgtcacaat

SEQ ID NO: 12986 - DNA, 396 bp, Arabidopsis thaliana
  unsure at all n locations
  Clone ID: LIB25-047-Q1-E1-F5
tggtacggaagatctaactctggatgaagatttaactttaacaaatccaatagagaaactcgttaactttagcatgtccaacattgacnaggggctttcaatgagcgaaacaattctagagcaacttgaagactttcccaaacataaagtccgctcaanatatgtcaatantatcctagggaaggatgtgtataanggaaatgcttcaaaaggcgtatttcttgctaacaatggttcangacttcnctctgaaccaggaaccatcaactcactcagtaatgcnnnanangangatgataggtgctganaggtttgcttntacacaccnggtccaganatcaacatctgggncncnttaatttcaaanaggganaacccacctgagatcnacngcca

SEQ ID NO: 12987 - DNA, 457 bp, Arabidopsis thaliana
  unsure at all n locations
  Clone ID: LIB25-047-Q1-E1-G10
gacaacgaaatcaaatcccgattccgagaganagagagcgatagcggaagacgatggctttgacggtggcgaagagtgcgttggacgcgattagagagaaangtctcggcggtttcatgangatgatccgagaagaaggcttcatgagatgcctaccagatgggaacctcttgcaaactaanatacataacataggagcgacacttgttggtgttgacaagttcnggtaacaaatactaccagaagctangcgatactcantacggtangcacagatgggtagagtatgcttcaaanggttcgttacaacgcaatctcaanntccaanctgaattgggaacggggtggcttccatttnatcacnanttacacttgggaataaccnctngaatttggaaaccaaaaaaggtttgggccttganccataaggnaaacttncctgggnaaaaggggnatc

SEQ ID NO: 12988 - DNA, 73 bp, Arabidopsis thaliana
  unsure at all n locations
  Clone ID: LIB25-047-Q1-E1-G11
gcnttctcaacaccaccantcacagtctgatgatgctcctgagagagacctggcacatggttttcaagccatc

SEQ ID NO: 12989 - DNA, 431 bp, Arabidopsis thaliana
  unsure at all n locations
  Clone ID: LIB25-047-Q1-E1-G3
ggtttagcttttttgtaccgtacatcttcttcccagaaacatggctgaggcttctgatttgttggaatggcctaagaaggataaccgtcgttttctccangttgtctaccgcgttggtgatcttgatcgcaccattgagttttacactgaggtctttggtatgaacctgttgaggaaaagagatatccctgaggagaagtattctaangcttttcttggttttggncctgaaacatcnaactttgttgtggagctcacatataactatggtgttagctcatatgatattggaactggctttgggcattttgccatttcaactcaagatgtttccaaactgggttgaanaacgtccgtgccaagggtggaaatgtgactaagggaacctgngtccagtcaaaaggtgggaagcanttgtcaattgcgtttng

SEQ ID NO: 12990 - DNA, 446 bp, Arabidopsis thaliana
  unsure at all n locations
  Clone ID: LIB25-047-Q1-E1-G7
acactttttcagattccatcatcacttgttcttttcacacccaataaaaacttgcatctttcttctaaattgttgatgatcgcttctcatatttgaccctagagacaacatcatttctaccgacaaagatttgatatcgaatccaacaagtgaaagatgggtctatcaagtcttcctggtccatcagaaggaatgttatgtgtgatattanttaatacagcattatcgatctccattgtcaaaggcattgtaagatcattccttggcatagtaggaatcagtctcncgccgtcttcatcctcgccttcttcggtgacnggtatcgtcagagaantcatcaannttcaagagtcatttganttccgggtcggcnaanccaggngaagttaccntgaggaagntcaagganccgggctccgnnnactgaaggtttgaggagcttgtgg

SEQ ID NO: 12991 - DNA, 476 bp, Arabidopsis thaliana
  unsure at all n locations
  Clone ID: LIB25-047-Q1-E1-H1
ttttgaatanattatatataacaaaaatagtattttaagagatcgtcgcctacgatggcttcaaaagcattgctttttttaagtctcattgttgttcttcttatancttctgaggtggtagccagagacctcgctgagaaatcggcagagcagaaaaacaatgaaagagacgaagtaaagcaaacggagcagtttggcgggtttccagnaggagggtatgganggttcccgggagganggtatggaggaaaccctggtgggatgatatggaaaccgtggtggtggntatagaaaccgtgatggaggatatngaaaccgcggtggaangatatgggaaaccgaaggaagaaggatattgtcgctaatggntnctggctacaaganggctactaaccgggngggctgcctccaaggngttggtncntaancccgggtcaggctgttcaaanctcnagnccaggagaattnctngngng

SEQ ID NO: 12992 - DNA, 452 bp, Arabidopsis thaliana
  unsure at all n locations
  Clone ID: LIB25-047-Q1-E1-H10
agcggagaggtatcagtacaaagaaggagatgttttacctgatgaagttgattggagggagagaggagcagttgttccaagagtcaaaagacaaggagagtgtggaagttgttgggcgtttgccgcgactggagcggtggaaggtataaaccagatcacaaccggagaattagtatctttatcggaacaagaactcattgactgcgatagagggaacgacaactttggatgtgctggtggtggagcagtatgggcctttgagttcattaagggagaacggtggtattgtanccgatgaanttnanggttataccgntgaanatactgccncatncaaggccattgaaatgaaancaacccgggtggtaaccattaanggncatnaaggtntcccggtaacnaagaaattccttgaaaaaagccgttgcctaacaacctaataatgttatgaa

SEQ ID NO: 12993 - DNA, 448 bp, Arabidopsis thaliana
  unsure at all n locations
  Clone ID: LIB25-047-Q1-E1-H3
agggtttcagagatcggctgattttcacatccacaagtatggcgactcaaatcagcaagaagagaaagtttgtagcggatggtgtattctacgctgaattgaatgaggttctcacaagagagctagcagaggatggttactctggtgttgaggttagggttactccaatgaggactgagattatcatcagagctactcgtactcagaatgttcttggtgagaaggggaggagaattagggaattgacatctcttgtccanaagagattcaagtttccagttgacagtgttgagctctatgctgagaaggttaacaacagangtctctgtgccattgctcanggctgagtctcgacgttacaangcttctcggtggtcttgcctgttcgcanggccctgttatggtgttttgagatttgttaaggagagtggagnctaagggatgtgag

SEQ ID NO: 12994 - DNA, 54 bp, Arabidopsis thaliana
  unsure at all n locations
  Clone ID: LIB25-047-Q1-E1-H4
agttttttttttttttgagggggaangatttctgggtttgcncctagggttttg

SEQ ID NO: 12995 - DNA, 447 bp, Arabidopsis thaliana
  unsure at all n locations
  Clone ID: LIB25-047-Q1-E1-H6
atcgttcatcgtcttccttctctctctctgattctctcattcgcgaatttcaaagctatggcggatacggtagagaaagttcccaccgttgttgagtcatcttcatcatccaccgttgaagcatctaatagcgccgagaagactgagcccacgacggagaagaaaaagtggggcgatgttgaagatgatgatgatgaagaagaagctgtatcggagcttaattcattgagcattaaggaagaagagaaacctgattctattcttgaggaacctgaagattctaacatcaaagctgttacttctggtgacacaccatatacatcagcangtagatttgangacttgnacttgtcanctgaattgatgaaaggcttgtaggttgaagatgaaattcgaaaagcctagcaagatcaangntantaatttgccnaagagaatgacgccgcc

SEQ ID NO: 12996 - DNA, 377 bp, Arabidopsis thaliana
  unsure at all n locations
  Clone ID: LIB25-047-Q1-E1-H7
caatctccanaaaaggggagaagcaaaaatggtttctctgaagctccagaagcggctcgccgcatcagtgatgaagtgcgggaagggcaaagtttggctcgatcccaacgaaagctccgacatctccatggccaattcccgccaaaacatcaggaagcttgtgaangatggtttcatcatcangaagccanccaagattcactctcgttccagagctcgcaaaatgaagattgccaatatgaagggtcgtcactctggntacggtaanaggaagggtacccgtgaagctangttgccancanangtactgtggangcatangatgcntgttcctaggcgtctgttganganntaccagtnnagacgaagantatttg

SEQ ID NO: 12997 - DNA, 472 bp, Arabidopsis thaliana
  unsure at all n locations
  Clone ID: LIB25-047-Q1-E1-H8
gaaaacgttaaatgatcttctcctccgatcattagtctctttaatctttctcagcctcttcttgttcgtgatctctcttcctccggaaaaagatgtcggccggtaacggaaatgctactaacggtgacggagggtttagtttccctaaaggaccggtgatgccgaagataacgaccggagcagcaaagagaggtagcggagtctgccacgacgatagtggtccgacggtgaatgccacaaccatcgatgagcttcattcgttacagaanaaacgttctgctcctaccanaccgatnaaccaaaacnccgcccgctgcttttgcccgccgtctccgaggaaggagcgtcangaangattcaagcttcantctaatcaagttgcatccgnttagcatcggtttaacgannaagagtcaaggaccaaaaggtgggttgaaganggagattccggcgggaaaaagnaagaaccggg

SEQ ID NO: 12998 - DNA, 517 bp, Arabidopsis thaliana
  unsure at all n locations
  Clone ID: LIB25-048-Q1-E1-A11
ctggtctaantggtncgcctgggccctgannaaccgggaacgacccacncgtccgaacnactcggtcatngtttcntgaaattccactgttattagactcttgactctgttttgtttcccgccgatctcgtgatgatggccaccaccaccaccaccaccaccgctagattctctgattcatangagttcagcaacacaagcggcaatagcttcttcgccgccgagtcatctcttgantatccgacggaatttctcacgccaccggaggtatcagctcttaaacttctgtctaactgcctcgagtctgttttcgactcgccggagacgttctacagcgatgctaagctagttctcgccggcggccgggaagtttcttttcaccgttgtattcnttccgcgagaattcctgtcttcaaaaagccctttanccaacgtnaanngaacnaaaaatctccancaccggtgaagntncagctgaangnagatngccagagattacgaaatncggcttganccg

SEQ ID NO: 12999 - DNA, 479 bp, Arabidopsis thaliana
  unsure at all n locations
  Clone ID: LIB25-048-Q1-E1-A3
gatctggggcttacaacagaacactcacgccctttggtttccagaacgaggaccgaactctgtgggaagccactaacgtctatgtagagatgagcccattcatgtctgcnaataaaatcaagaagccaatcttacttattcatggtgaagaagacaataacccaggaactctaacaatgcagtcagaccgattcttcaatgcactaaaaggccacggcgctctttgccgtcttgttgttcttcctcacgagagccacgggtactcagcacgggaaagcattatgcacgttctctggggaaactgaccgttgggcttcnaaaatactgtgttcaaaacacatcaagatgcacgatacaantcccgnnncaagtccaanagaaaggtcaagattctgcagacaaagttatccaccanggaacnggtgggtggnaaanccggagntttggtnaagcatnnaagttcactccaancctccagg

SEQ ID NO: 13000 - DNA, 448 bp, Arabidopsis thaliana
  unsure at all n locations
  Clone ID: LIB25-047-Q1-E1-F2
cangcatggaagagatcaccgatggagtgaacaacatgaacttagccaccgattcgcagaagaaaaaccggattcaggtttccaacactaagaaaccattgttcttctatgtcaatctcgccaagaggtatatgcagcagtacaatgatgttgaattgtctgcccttggcatggccattgcaactgttgttactgttactgaaatactgaagaacaatggttttgctgttgagaagaagatcatgacttcaactgttgatattaaggatgatgcangaggacgtcctgtgcagaaagctaagattgagattacgcttgtgaagtcanagaagtttgatgaactaatggctgcagccattgaanaanaagaagatgcagaancccaggtgcagaactgaaaatngcctttaactaatttggggntccntgatgctnaatcnannaaang

SEQ ID NO: 13001 - DNA, 436 bp, Arabidopsis thaliana
  unsure at all n locations
  Clone ID: LIB25-046-Q1-E1-D4
ttcatcgccggagaactgattaacatataagaaaatggcgtttgctanancagtganaagaccaattggagtcttttattatagtgttagtantagatttagttctggaaatgagtattctactgtggcaagcaaattcgaaactttgtctcagtacaaaagctctgtaccgtctggttacacaagccttgttcgtggttttgggaatttcatacggagttttagttcggaagctcctcctgctgtatctgaccaaatgagtcttattaagcaacttagggaaagaactagtgctcctattaaagatgttaaggcttctttagttgaatgcaattgggatcttgaggctgctcaaaangatttngagaaangagagggaaaattttggctccaaaaaatcgtcacggactgctgcaaaaaggatgcntgccttttg

SEQ ID NO: 13002 - DNA, 459 bp, Arabidopsis thaliana
  unsure at all n locations
  Clone ID: LIB25-046-Q1-E1-D8
tctagatttangcactatctangaaaaacaaaancanactcataaagaataatgggagaaacagaagagaaagtgaagaaccatgataacaaagaagaggaacacaacanggctgagaaagctgagaagaaggagaagaagaaggataaagataanaaggataagaacgaggacgataaaaatggtggaggagaagaaggggaagatcaagagaagaagagcaagangaaagatangaaagcgangaaagagaagaaccctgaagataagaangatccagagaagttgaagatgaaagcttcagaagattgangaaaagattcaagctatggtcttaaagaaagatgagattgtgaagcttattcatgatgctgaacaagctaagcctagtactgctgcagtagatgcaccaccaccaactaactaattcaaatacacagattatanactacaatangt

SEQ ID NO: 13003 - DNA, 447 bp, Arabidopsis thaliana
  unsure at all n locations
  Clone ID: LIB25-046-Q1-E1-D9
ctctgaaagtctttttgtttgaagaagatgacgcatgttgaagatgataaggaattcaaggagaaacctttggttcaggttctgagcgacgacgacagtgaagtgaaggaagccaaagacggaggaggtgaagaagttaccggcggcgacggtgaaggagaggctaatgtagaagaggaagacgacgaagcagaaaatgaagacgatgatgatgatgatgatgatgatgatgacgacgacgaggacgaggacgatgaagaaggggaggaggatcttgggacagagtacctagtgaggccggttggtgaggttgaagatgaagatgatgcaagtgattttgaccctgaggagaatggcttggatgaagaanaangtgatgaagagatttgaanaagatgatgttgatgaagacatcaacctgaatgctggcaaatctgaancctctgg

SEQ ID NO: 13004 - DNA, 452 bp, Arabidopsis thaliana
  unsure at all n locations
  Clone ID: LIB25-046-Q1-E1-E11
cacanaggagagagttagtcttcttctctgtttttgtctctttggcnatatatattcaaacattgtgtgaacagaacacaaatcaacacaacacacacaactttgtgttctttaagttttgtttcagagatcaatggccgggactggattgtttgctgagattcttgatggagaagtatacanatactacgctgatggtgagtggaaaacttcttcctcaggtaagagtgttgccatcatgaacccggccacgaggaagacacagtacaaggttcaagcatgcacgcangaagaagtgaacgcggtgatggaactggcgaaatcagctcagaaatcgtgggcgaaaactcctctttggaaaagagctgagcttcttcacaangntgcagcaatccttaanggacaacaaaagctccaaggctgagtctcttgttaaagaaatcnctaaaccc

SEQ ID NO: 13005 - DNA, 449 bp, Arabidopsis thaliana
  unsure at all n locations
  Clone ID: LIB25-046-Q1-E1-E12
aagaatcatgacgagctctgttagagagaagaagatcaagaccaacgggatttggttaaacgttgctgagaaaggagacgaagaagggcctttggttctgttactccatggtttccctgagacatggtactcttggcgtcaccagatcgatttcttgtctanccatggttaccacgtggtcgctccagatctcagaggctacggtgactccgattctctaccgagccacgagtcttacactgtgagtcacctagtcgctgatgtcatcggtttactcgatcactacggcactactcaggcttttgtggctgggcatgactggggagcaatcatangttggtgtctatgcttgtttagaccagaccgagtcaaaggttcataagtctctccgttccatatttcccangagattcaaaaactcaaaccttcanantttttcaaaaattttg

SEQ ID NO: 13006 - DNA, 532 bp, Arabidopsis thaliana
  unsure at all n locations
  Clone ID: LIB25-046-Q1-E1-E4
nnnnnnnnnggaantggtttgcctgtggcnctacggctccggaaaatcccgaagtcgacccacgcgtccgcggtanctaaatgtcgaacaccgtcgaagatgacgacgacgacttccagatccctccttcctcacagctttcgattcgaaaacctcttcacccaaccaacgctaacaacatctctcaccgccctcctaacaaaaagcccagactctgccgttacccgggtaaagaaaatgtgactccgcctccttctccggatccggatctcttctgctcctcttctactcctcactgtatcttagattgtatcccatctagtgttgattgctctctaggagatttcaatggtccaatttcttctcttggtgaagaagataaagaggataaggacgactgtataaaggtgaatcgtgaaggttatttgtgtaattcgatggaggctaggttattgaaatcgagaatttgtctcgggtttgataagtggaatccatgaggatgatgaaggtttgttgagtctaactcctgaag

SEQ ID NO: 13007 - DNA, 448 bp, Arabidopsis thaliana
  Clone ID: LIB25-046-Q1-E1-E6
gagatagatcaagatgtatcttcacgcggaaatgcggcattgacagctttacattatgacagcaactcaagacttcttgtttctggtgatcataacggaatggttcgcctttataggttcaaacctgagccatacctaacagaaaacagttttatccctttccaaggaagcttaaagaaaggaaataaccatattgttcaaagtgttaagtacatcaagcttactggttccataacctgtattcagaagagccaaaactcaaaacatctcgctattggatcagatcaaggacatgtttctctggttgacattgaggaagcaaatgtgttatacacaaaacacattgcaagtgatatatgtccagggatcatctccttgcaattcgagagttgcattgtgcaaggcttcgagaagaacgtgttaagtggttgctatgagagactcgtcg

SEQ ID NO: 13008 - DNA, 450 bp, Arabidopsis thaliana
  Clone ID: LIB25-046-Q1-E1-E7
aaagaacaccaacaacaacaaaaacagaggaagaaaataaaaaccaaatttttcttgttgcaatcatttgaaattaaattcaattcttcgattcttccgagctggttctcgaattgggtttgctgcaaattgtgaatccaataaaatttgttcgtgttgttgtgttgatggtgatttgttagggttgatccgatcaaaatttcaattttgtatcgtaaaacgatgaggtttctaagcctcgtcggaaactcattcggttgttctgcgtccggcgaacgcttagtatcagcggccaagagacggtgatttacaggaagctaaagctctcttaagattacaatccaagactcgctcgttactctacttttggcgttcgtaactctcctcttcattactccgccgctcaaggccaccacgagatagtttctcctgttgggtgggatcaagagg

SEQ ID NO: 13009 - DNA, 456 bp, Arabidopsis thaliana
  unsure at all n locations
  Clone ID: LIB25-046-Q1-E1-E9
catcttcntcttcttcaaacaanaaatgggtttcttaaagttatctccaatgatccttctcctagcaatgatcggcgtttcatatgccatggacatgtcaatcatctcctacgacgaaaaccaccacatcaccaccgagaccagccgtagcgactcggaggttgagagaatctacgaagcgtggatggtggaacacgggaagaagaagatgaatcaaaacggtcttggtgcagagaaagatcaaagattcgagatctttaaagataatcttcgtttcatcgatgaacataacaccaaaaacctcagttataaacttggtttaacccggtttgctgatttaaccaatgaggagtaccgatctatgtaccttggtgctaaacccgaccaaaganggttttgaaaaccaatgatcgtatcaagcgcntgttggtgacgcgcntcctgaatccggttgac

SEQ ID NO: 13010 - DNA, 521 bp, Arabidopsis thaliana
  unsure at all n locations
  Clone ID: LIB25-046-Q1-E1-F10
ntgggtttgccttggcgtanggcgtccgggaaatcccaggtcgacccacgcgtccgctccantctctcatcagcaccatgctttctctaacngnaacaactctcagttcctccattttcacacaatccaaaacccatggattcttcaatacccgacncgtttaccgaaaacccttcaccaccatcacctccgctttaatccccgcttcaaaccgtcaagctccancanancancaactctatcaaccattccgtccaccaccatcaccantccctcgaangttccgatcactcgacaccgccggaaaantcgaagtcctcgctgatcgtcnnggtctctggttcgaatacgctccacncatntcctccttatacactgaaaggattcactcctccatcaatcgaanaactcaccggaatctccggtgtcgaacagaacagtctcatcgtcggngcgcaagttcgagactctttagttcantccgggtgccaaaaccgggggcttataactgcgtttggcaa

SEQ ID NO: 13011 - DNA, 454 bp, Arabidopsis thaliana
  unsure at all n locations
  Clone ID: LIB25-046-Q1-E1-F12
aacanatcattaacgatcgtgagactggnagatcaaggggattcggattcgtcaccttcaaggatnanaaagccatgaaggatgcnattgagggaatgaacggacaagatctcnatggccgtagcatcactgttaacgaggctcagtcacgaggaagcggtggcggcngangccaccgtggacgtggtggcggtggataccgcagcggcggtngtggaggttactccggtggaggtggtagctacggaggtggcggcggtagacgcgagggtggangaggatacagcggcggcggcggcggttactcctcangacgtggtggtggcngaaactacngtggtgnaagacgtnagggatgacgangatacngtggtggtgaatgatgaagttacggnngaagccgtggtggttggaggatggtnattcctttaattaagtttgggaataccaatna

SEQ ID NO: 13012 - DNA, 430 bp, Arabidopsis thaliana
  unsure at all n locations
  Clone ID: LIB25-046-Q1-E1-F3
tttttcctccttggtagaaaaaagttctgaaatttgcacattcttgtctctttttttcttcacaccgaaatcttctccctanttctccgacgtccttcttcttccttctccggtcaacaccgaccggttctccacggngactctcgtctcccantttttttttttgtacggctactttgatcgatcgccaatgctgaatttcaaagccttctccgtgtcantttttcnggaactgggaatgtgagcttccatcaattgagagttgaaaagttgactcctaantaaaacctganaaaagagaagagagatccttcntttaattaatagaacaagatttgggttttantcaagattaataagtcgagatcancgnggggcaactttaaaactaaaaatccnggggtttccaangnggggattaaagcnccca

SEQ ID NO: 13013 - DNA, 506 bp, Arabidopsis thaliana
  unsure at all n locations
  Clone ID: LIB25-046-Q1-E1-F5
atggtntccctggnccaccgaaccgganatcgcgnngtcgncccacgcgtcnggttcatttggacaatgaacgccatatacgatatctgcaggagatctttagacattgagaggcctacatactccaatttgaaccgcttgatctcccaaaccatctcttcgcttacaacttctctaagatttgacggtgccatcaatgtggacatcaccgagttccagaccaaccttgtaccttaccctcggatccacttcatgctctcctcttatgcacctgtgatttcatctgcaaaggcctaccatgagcagttttcggtccctgagatcacgacttccgtctttgaaccctccaatatgatggctaaatgtgaccctangcatggcaagtacatggcttgctgtttgatgtatcgtggtgacgttgtgcccaaggatgtcaatacagccgttgctgccatcaaagccaaacgagcnaantcagtttgttgactgggtgcccaactggattc

SEQ ID NO: 13014 - DNA, 447 bp, Arabidopsis thaliana
  Clone ID: LIB25-046-Q1-E1-D3
gtatcaagcttaaatttttacgattcgatttggggtactgcaaatttctactgtgtttcgttcttttctcccgtgatagaaatctgagatttgtaaattttcttcttttagcagcttttccaatctgggtactgcaaattcctactaaatcgtgctcaagaaccttacttgcggagatcctgatttagctcccagagtttgcttagttttgatcaaattcttggcctccgagcttatctcaagtttggttaaagtacttctttgcagatctctgttgttcagttgcgttaaaagtggtttctttaagattttaaaaatgatggagagaaaacgagaaatggggattgcttatttcgcgcgtaggattaaacagccacgagggatttgggtgaagatgacgttcataattgtttggggtctctgcttcgtccttcctctggtccttct

SEQ ID NO: 13015 - DNA, 459 bp, Arabidopsis thaliana
  unsure at all n locations
  Clone ID: LIB25-046-Q1-E1-B7
ttcttcttcaatggcgacgaanctcatactcaagaaaacgacaaaatccatcagccgtcaccaacgtaactacctccgccgtcancggaaatctcagatcggatgctcaccgtctccggccacaaccaccgtaatcgccaccatcaacaaatcgatctacagatgtcancgaacttttctctgtttgttttcncgtcacgcaacaaaaggattcaaaatcctcaaacctcgcgaagattttcagaattctccgtattcattgtttcacgaaagatctggtanatcattcgacgagacgaagaagacgatcgtgttagatctagacgaaactcttgttcattcatcaatggagaaaccanaagtaccgtatganttcgtcgtgaatcgcanggntcgacgggcagattnttaacgtttttcggtgatcaancggccagnaatcgaaggagttttttgacg

SEQ ID NO: 13016 - DNA, 451 bp, Arabidopsis thaliana
  unsure at all n locations
  Clone ID: LIB25-046-Q1-E1-B8
gtagggtatgaactctgtcaacaatatacagttcagagatcccaacacagcttatacatctgcaatggctcctgcttcactctccccaagccctagttccgttagcccgcatgagtacagttccatgtttcacccattcaacagtaaacccgangggttacaagaccgggattgttccatggatgtacatnagaggagatacgtctcttctgcaaccgaacatagtgcaataggcaatcacattgatcagcttattgagaagaagaacgaanatggctattcattatccgtcgggaaaattcagcaatctcttcaacgagaagccgctttaaccaaattccgaatgaagcgaaaggacagatgttatgagaaaaaggttcgttacganagccggaagaaatttagcagagcaacgacnacgaatcaaangccaattcgttcgtcaaagtca

SEQ ID NO: 13017 - DNA, 413 bp, Arabidopsis thaliana
  unsure at all n locations
  Clone ID: LIB25-046-Q1-E1-C1
tntggtcncctagggacccggnaatcccannancgacccacgcgctccgattaacacttaatttttcttttccttttcattattttcttttattttgtaacagaaataaaagaanataaaagaaaatanaaagatgggttacatttcaatgtccgtggttgcattccttgttgtttttgcttcgccggtggttctagccaccgatacagatccgattccagaaaacagagcccaaatcccgcantggtttanaanaaacgttaaaccatattcccaagagaaagggcacgctagaccccgccctcgaagctgctgaaancagcgcgacaaattatcaacgtgaatcanaaangtggcgctaanttcangacattannangacagctatcatgagcattccggacanggaaaca

SEQ ID NO: 13018 - DNA, 451 bp, Arabidopsis thaliana
  unsure at all n locations
  Clone ID: LIB25-046-Q1-E1-C10
tntctcantcaattcaatttttaatgtaatttcttgtttgatttttctattttcttcgagaaaacaaaattctcctgtaaaatttaatattataaaagtggtttctttttcanttatgttnatataattttcatctttaatcttaaattctggtaaccttaatgcgcgatccgcttttcaaaagttttgtgagagagaagagatctaaaaaaatccacaattttgttcaaatcttggagttaaatgctgaattttaggccttgttgcttaaatttatggcttaaagtttcaaacttttcattgggatatggtacaaatcttgtagttaaacactgaattgtgtccctcgtgggcgttgttgctttgatttaaggccaaaagtttcaaacttgggatatggtacaacctgtagttanacactgcattgtcccccctgggtgntgttgttgcc

SEQ ID NO: 13019 - DNA, 450 bp, Arabidopsis thaliana
  unsure at all n locations
  Clone ID: LIB25-046-Q1-E1-C11
tantatctgangttttagagaaaaacaacntanccggtgccatttttacggccatgtgtggtggtgctgaaattggtgaagcaatagccaaagacacacgcattcccttagtatcctttactggnagctccagggtgggctcaatggtacaacaaacagtgaatgcgagatntgggaaaactttgcttgagttgantggaaacaatgcaatcatagtcatggacgatgctgatatacanttagcggttcgatctgttctattcgctgcggttggnactgctggtcaacgttgcacaacntgccgtangctgcttttgcatgaagantgtctaagacaaagtactcnagcaaccgccttacctcatacaaacaagtcaaaatccngnaatcctccttgagaaanggacattgntaaggaccaattacatactcctgaaatcaaaaaagnac

SEQ ID NO: 13020 - DNA, 532 bp, Arabidopsis thaliana
  unsure at all n locations
  Clone ID: LIB25-046-Q1-E1-C2
nnnnnnggnnnnnnnggaactggtntcctgtgcccacgccccggaaatcccgagtcgncccacgcgtccgcccacacgtccggcgatcttcaaccgaagagaacgagaatgtgcgatcttcaaccgaagagaacgagtatgtgcgatcttccaccgaagctggtaggggagaagatcctcacgaggattccgataacatctctgagagcggtgcgatccacttgcaaattatggaacgctttaaccaaagatcgggttctgggtaaagcagcggcgcagtttttggggtttatgacgatggattcaaaggtctgttcagttagattccatctccgtcgcagcaaggaggaagaagaagacacgatggatctatctataaagcaggtagatttgcttaatcaagtcgagatatctagggtgtatcactgcgacggcttgttgttatgcgtggctaangacaactcnaagggtcntggtttggnacccttatttggggcaaacaagatggatnagacccagaacagaatccaac

SEQ ID NO: 13021 - DNA, 459 bp, Arabidopsis thaliana
  unsure at all n locations
  Clone ID: LIB25-046-Q1-E1-C4
aaattctgagcgtggaggacaaggcaaaattcggtgtgcaaggcactggatattgggacccttgtttcctcgtgagagaattttcaatcctagggcttaaagagcacgttcctagtataaagctgattcacagatgcggagattcttgattaaccaagctaaaggtctcgtcgaccattctcgtcgtcaacatcaccacaaaagtccaagctttctctctcctcaacctcgtccccttgcttcttctcctcctgctctgtctcgtttcttctcttctacttcggagatgtctgcttctgattccacttcttctcttcccgttactcttgactccatcaatcccaaggttctgaaatgtgagtatgctgttcgaggagaaattgtcaacattgctcagaaagttacaaagaagacntgaagactaataanggatgcntatcccnttgatgagataatcca

SEQ ID NO: 13022 - DNA, 456 bp, Arabidopsis thaliana
  unsure at all n locations
  Clone ID: LIB25-046-Q1-E1-C5
gctgattactgattcttcattgacggtaggagtcaccacttttggcggcgattccttgttctctattttttttgcacaagcaacatttagcttctgcaaacnccagttcatctctcaaccctcatatcgccgtgttttctcgctctagtaccgcgagctcggacganccaggaagcaatccgttaatctagaagcggtgttganaagatgacgattacatcaaatatctctgtacagaacgatancctcgttgttcaagggaagactatccttaccanaatccctgacaacattancctaactccggttaccggtaatggattcgtttccggttcatttatangcgcgacgtttgaacangagcangagtcttcatgtgttccccatcggtgtattgganggtcttcggttcatgtgctgtttccggtttaagctatggtggatgactcagagaat

SEQ ID NO: 13023 - DNA, 454 bp, Arabidopsis thaliana
  Clone ID: LIB25-046-Q1-E1-C7
acattccctcttcacaacaacagcttcgtattcgctcatcttcttcgctttctggcattgttcgtctactcgaggatttcaattttggtcatacaagagaagcgaagcagcgtcgccgttcaagacgaggtacagagaaaacgaagaagaagaagatatgacgattaaaccggcggttcgtatttccgacgggaatctaatcatcaaaaaccggacgattctaaccggtgtaccagataatgtcatcacgacgtcagcatcggaagctggaccggtagaaggagtcttcgtcggagctgtatttaacaaggaagagagtaaacacatcgtaccgatcggtacgcttcgcaattcccggtttatgtcttgtttccggtttaagctctgggtggatggcccagagaatgggagaaatgggccgagatattccctacgagacgcagttcttaatggg

SEQ ID NO: 13024 - DNA, 451 bp, Arabidopsis thaliana
  unsure at all n locations
  Clone ID: LIB25-046-Q1-E1-C8
tctatgagtctgatttgacaaaactcttcacttggacgtgcgaaagatgcaatggtttgacaaaggatttcgaagtaatagaggtcatatttgacgttgaacactgcttacaggcgtatgttggggtggctaaggatttgaatgctatcattattgcatttcggggaactcaagaacacaggttttattctagtcattgtaatctaaaagctactccttcgcataaacttggttaatgcttaatcaatccaaaacttgtgcagcatacaaaattgggtctcagacttgttctggaaacagctcgatctgaattaccctgacatgccaagatgcaatggtgcaccatggcttttacagtgcttatcacaatacaactttacggcctgcggttttggatgcaataacacgagtgaaaaaagtctacggggcgaacatcancatcatagtgacg

SEQ ID NO: 13025 - DNA, 527 bp, Arabidopsis thaliana
  unsure at all n locations
  Clone ID: LIB25-046-Q1-E1-D10
nnnnnnnnggaantggtttgccttgncctagncgtccggaaatcccaggctttgccttcgcagtagggttgaagcgggatagtacgccacctctatctctctctcaccctatcgaactcgcgaagaacatcttcttcttcttcttctccgtcttcgtcttcgcgagctctctcagtagcgcaataaaatgggggcttcgcttcctcctaaggaggccaacctcttcaagctcatcgtcaaatcatatgagactaagcagtacaagaagggactcaaggcagctgatgccatattaaaaaagtttcctgatcatggagagactttatcgatgaaaggactgactctaaactgtatggaccgcaaaactgaagcatatgagcttgttcgacttggagtgaagaatgatatcaaaagcatgtttgctgggcatgtgcttggtcttttgtaccggtcagacagagagtatagagaagcaatcaaatgctaccgaaatgctccttaagaatagattctggataaccntgaaa

SEQ ID NO: 13026 - DNA, 447 bp, Arabidopsis thaliana
  unsure at all n locations
  Clone ID: LIB25-046-Q1-E1-D12
gcaaaggaatgggttaagaggggagacttaggacacacgaaagtgtatctacacatcaaaccaatgtttggaggcactttcactgacattgtcgtgtggatattctaccctttcaacggtaacgcccgcctcaagtttttattcttcaagagcctgtcgctgggggatatcggcgaacatattggagactgggaacatgttacgttgcgcatcagcaacttcaacggagagttatggcgagcatacttctctgagcacagtgggggaactctagtggaggcatgcgatcttgagtttcaaggtggaaacaaacttgtgagctactcngtctcttcacggacacgcaatgttttcaaaaccaaggacttgtgttgcaangcgatgacngaaacgnataanggaacgacatggcaagaaattacaaantcnttgangcaagtgttgcct

SEQ ID NO: 13027 - DNA, 533 bp, Arabidopsis thaliana
  unsure at all n locations
  Clone ID: LIB25-046-Q1-E1-D2
nnnnnnnnnggaactggtttgcctgtncctacggcnccggaaatcccgnagtcgacccacgcgtccgcgaagcagaagcggcgcatctgaantcccaaacgaggtgacgatgacgatcgattcgcagcaaanaacgancaaattcagatggggggaaatggacgaagacgaagatctggatttcttgctccctcccaagcangtgattggtccagatgagaatggtttgaagacnacgatcgagtacaaattcaacgatgaataaaataangttaagataacgactatgacacgtgtccgcaagctagcttctgctcgactcaacaaacgagccatggagaggaggaactggcctaagttcggagacgcanccaatgaggaanctggtagccatctcactatggtttctaccgaagagatccttctcgaacgaccccgagctcctggtaccaaagcggatgaatcanagggaacangagatggcttgtctcanctgggtaaangtggtgcaattctcaagggtgtgcangata

SEQ ID NO: 13028 - DNA, 532 bp, Arabidopsis thaliana
  unsure at all n locations
  Clone ID: LIB25-046-Q1-E1-B4
nnnnnnnnnggaactggtttgcctgtncnctaccgccccggaaaatcccgagtcgacccacgcgtccgcccacacgtccgctgagtttgaggttggacggatgacacttggagggttgctagctttaggctataatgttgttgtnanttacaagagagcttcaactgctgtcanttatggtaatttatccctatcacgtgaaacgattgatactcttggagagactttcctggttctganagggacagataggaagagtgtgggagctgaagctctnagaatgggcatcactgggccctggatcacgaaatcatacctcgaactgatccttgaaagcaaaggtgtaccacgcttgaatacacctccacttttgcanccgtctcctgtaatcactaaccaanganaagcanattgttgcaccanaacctatccggaactancccaaacatcgttacccgccttgaggatttatcgcaaccttggactanatctcctacgaaatcccaantgggnaccgatnggtgcaactttg

SEQ ID NO: 13029 - DNA, 436 bp, Arabidopsis thaliana
  unsure at all n locations
  Clone ID: LIB25-045-Q1-E1-H9
ggacgccagcaaggaagaggttaatgagggatttcaagaggttgcagcaagacccacctgcgggtattagtggtgctccacaggacaacaacattatgctctggaatgctgtcatatttgggcctgatgacacaccatgggatggaggtactttcaaactctcactgcagttctctgaagattatcccaataaaccaccaacagttcggtttgtgtcacggatgtttcatcctaatatttatgcagatgggagtatctgcttggacattctacaaaaccagtggagtccaatctatgatgttgctgctatacttacctccatccagtccttgctctgtgaccctaatccgaattctcctgcaaactcggaagctgctcggatgtacagcgaaagcaagcgcgagtacaacanganantgcgtgatgttgttgacaa

SEQ ID NO: 13030 - DNA, 378 bp, Arabidopsis thaliana
  unsure at all n locations
  Clone ID: LIB25-046-Q1-E1-A1
gaatcgatccaagaatctcattactacacacataaactcttcctcactgcaaactacgtcctcctcggtgcatcgtcaagctgcatcttcctcactctcnctctccgtcaaatcccttcactctgcggtttcttcctcaacctccttcacgcnaccacgatcgcagccgccgtctcaggctgtgcanccgcatcttatggtaaanaccggtggtacncagctcacatgatcgcanttgtccttaacgccattttccaaggctcagtctctgttctcatcnttancaacacttcgagatttccncganagccttaactcttanntccgtgagaanaaatcgtcnatgatcttgnanctagctggcggggctctgtgttg

SEQ ID NO: 13031 - DNA, 525 bp, Arabidopsis thaliana
  unsure at all n locations
  Clone ID: LIB25-046-Q1-E1-A10
nnnnnnnnnngaantggtttgccttgccctanccgtccggaaatcccnaggtcgacccacgcgtccggggaatggagagttgctgtcggagcgtcatagcttcaaggacgtttcatctgcggtcaagtggccgtctatttccctctcttancttaactcatctcaagggcaagctatctctctccatcaactcgttttcctccaagattcagtctcatgctctccgaggagttggtataggcgagtcatgataagaaaaatcccctgccgcgaggggccggataaggagtcaaggaagatgcgaggagtaagctgcttcatgtagttttggtctctcctcagattcctgngaatacaggttgcattgcaagaanatgtgctgcctcaactgttggtccgcatttagtcnggccattaagttttcaagtggatgacgccatagttaagcgaactggtttggattattggncctttgtgggtgtcaaagcgcataactcaanggctgagtttcaaagaatanttcag

SEQ ID NO: 13032 - DNA, 529 bp, Arabidopsis thaliana
  unsure at all n locations
  Clone ID: LIB25-046-Q1-E1-A11
gnnnnnnnggaactggtttgcctttgccctaggcctccggnaatcccaangncgngccacgcctncgnanaattcccntaactctatctctaggtgacttaagagtaaaaaatggtagaggcanaggttgaagtagatgtggaaatcaaatctacggctgataagtttttcatgttctctanaagatcacaacatgcctccaaagccactcgctatgtacagggatgtgatctgctcgaaggcgagtggggcgaagttggnagcatactcttgtggaaattnactgttgatggagagccaaaagtgtcaaaggatatgattgaggcgattgatatgaanatgaatatgatccagtggagggtgttanagggacctctgaaggaanagtacaatattttctcgaaaacgatgaaagtaagccctaagcaaggagggtctgggaagtgtggtgaaatgggacnttgaagtatgagagaattgatgataaaggtggctcacctagagaggcccntcaatttctccgtccant

SEQ ID NO: 13033 - DNA, 384 bp, Arabidopsis thaliana
  unsure at all n locations
  Clone ID: LIB25-046-Q1-E1-A3
caaggaaaaattanaaaatgagnagcctcancaatagtcatatggncaatatctgtccttatgcccgctgcngtgtccnaggccatcttccctctacngtttctaccgttccnccctgggttcaacaacggctttagggacaatgangctgtcaaggttgcgaaaccacagcctgcacgagcagttggtggaaaagccgcaagaaggcancgtggcggcggtttagacgctcaagacaacctgnggtggtaagtgggagctcttcttggnaaantcgggtgtgtcanggatgcatgcgatccttatgccacttatcaacaangtccantactangatgccaccatttggggaatttcaaagattaagttgcctccaagccgtat

SEQ ID NO: 13034 - DNA, 459 bp, Arabidopsis thaliana
  unsure at all n locations
  Clone ID: LIB25-046-Q1-E1-A5
ttccagagagagttaanaagagtaacggtgaggtttggatctaatcgaatcaacgatggaggttgcttttccatcttcgccgccggtgaaatgcatcgccgatgaaagattaacagagatctccatggatttcaccanattaagattcccagaagaagatgaagaaattancaaattggagagatcgtggagtaagctcnaaaaatccgtcgaatttaacgaacgacgatgaagaagaanaanaagagttttcgtttgccttgtgtaaacgggngaaaggtttccaattancgctgangaagcttttgaagaatgggcagattcgtcctgtgtttccnccgtttaaancgttgaatctcccttccantnccaaaaaacgaaggaatngtcaaaacggcaaacnttttcgggcatcggnngataacagaacgncgtcnttanaaanattaanttgttgng

SEQ ID NO: 13035 - DNA, 65 bp, Arabidopsis thaliana
  unsure at all n locations
  Clone ID: LIB25-046-Q1-E1-A6
cctttggataacgttcnttccaagaagaaaggttcnaagggcctttggantatttaacccccana

SEQ ID NO: 13036 - DNA, 451 bp, Arabidopsis thaliana
  unsure at all n locations
  Clone ID: LIB25-046-Q1-E1-A8
tcatatagatcatgcagcatctctaccttattttctggagaagacgacattcaatgggcgggttttcatgacacatgcaacaaaggccatctacaagctgttgcttacagattatgtaaaagtgagcaaagtgtctgtggaagatatgttgttcgatgaacaagacatcaacaagtctatggacaaaattgaggtaattgacttccatcaaacagttgaagtgaatggcataaagttctggtgttacacggcaggccatgttttgggtgcagccatgtttatggtggatatagctggtgtccgaatcctctatacaggcgactattcccgtgaggaagaccgacatctgagagcagctgagcttcctcaattctcccctgacatatgcatcattgaatccacttctggtgtccagcttcatcaatctcgtcatattccgtgagaaacgcnt

SEQ ID NO: 13037 - DNA, 456 bp, Arabidopsis thaliana
  unsure at all n locations
  Clone ID: LIB25-046-Q1-E1-A9
atcatctcctatactctagctccaacaatggntaacaaanacccacttcaaaaaccctttcttttcataatcttatcaatcaatctcatctttcttcaagcanaaacaactactcaaatctctaccaagaagacttatgttatccacatggataaatctgccatgcctttaccttacactaatcacctacaatggtactcttcaaagataaactctgtaacgcaacataaatctcangaagaagaaggtaataacaacangatactctacacttaccaagactgctttccacggtttagcagctcagcttactcaanaagaagcagagaggcttgangaagaagatggtgttgtacctgtgatacctgagacaagatacgaacttcacactacaagaagtccaacgtttcttgggttagnaangacatgaaantgagaaactttggggctgataaa

SEQ ID NO: 13038 - DNA, 458 bp, Arabidopsis thaliana
  unsure at all n locations
  Clone ID: LIB25-046-Q1-E1-B1
gactccaaaaacgatgccgtattacaccaacgacgacaatgacgtcgacgatttcaccgaatacgatccgatgccttatagtggaggctacgacatcaccgtgacatacggccgttcaattccaccgtccgacgagacttgttaccctctctcctctctctccggcgacgcctttgagtatcagcgacctaatttctcttctaaccacgattcttctgcttatgacgaccaagctcttaaanccgagtacagtagctatgcacgacccggacccgttggatcnggatctgantttggccggnaacctaattctggatatgganggagaacggaggttgagtatggccggaaaactgaatcggancatggatctggctatggtggaagaantgncagcgattacgtgaatcctagctatggcggtcacgaggatgaatgtgacgatggtcacaaaaaaa

SEQ ID NO: 13039 - DNA, 458 bp, Arabidopsis thaliana
  unsure at all n locations
  Clone ID: LIB25-046-Q1-E1-B10
atctctaaactctcaacatgtcttgctcggccancgatctcgctgtcctgttgggtcctaatgccacggcggcggccaactacatctgtggccagttaggcgacgtcaacaacaaatttatcgacaccgctttcgctatagacaacacttaccttctcttctccgcctancttgtcttctctatgcagcttggcttcgctatgctctgtgccggttccgtgagagccaagaatactangaacatcatgcttaccaacgtccttgacgctgcaaccggtggtctcttcnantatctgtttggctacncctttgcctttggatctccgtccaatgggtttcatcggtaaacantactttgggctcaaaagacatcnncaacngccctctgctgaatactccaaacnttctctaccaatggggcctttgcaatcgctgctggctgggaatcacaactgggg

SEQ ID NO: 13040 - DNA, 73 bp, Arabidopsis thaliana
  unsure at all n locations
  Clone ID: LIB25-046-Q1-E1-B11
cttgtattttcncatgaaagancaagtctttgngcaaaagtactgccgttgtgaactcgggattgcttttgat

SEQ ID NO: 13041 - DNA, 526 bp, Arabidopsis thaliana
  unsure at all n locations
  Clone ID: LIB25-046-Q1-E1-B12
nnnnnnnnngaantggtttgccttgccctagncgtccggaaatccaaggtcgacccacgcgtccggcgtaaactangtgggtgcaaagccaaatatggatgaaaacgcaagcaaaataataagtgcgggacgagcaaagagatctattgctcagcctgacgatgctggcgaaagatttagacaattaaaagagcaagagaagcgcagcaagaagaacaaggcggttgcgaaagatacagttgaattggtagaagaatctcagtctgaatcagaagaagggtctgatgatgaggaagaagaggctcgtgaaggagcgttagcttcgagcacaacaagcaagccgcttcctgaggttggccaacgaagaagcaaaagatcgaagcggaaacgcactgtatagaaccaaagcaaacgaaattgcaagtaaggaanagaaaagagagagatttgaatcctgttccttagtttgatctttgatatatatttgcatacancatgtccngtaattatcctaatattaagggaa

SEQ ID NO: 13042 - DNA, 405 bp, Arabidopsis thaliana
  unsure at all n locations
  Clone ID: LIB25-046-Q1-E1-B2
cttcattttattttccctctacatctctcccaacgatttccaaatctcacttcactttggctcctccacctgaatccatggatattgcttcgtcatctctctcacaagctcacaaagtcnttctcacgcgtcaancttcttcccgggtcaacacctgctcccttgggtcggtctccgctatcgggattctctcttccgcangattaactctccaagctttaagtaaatgtccccggaaacaaagctcttctgggttcgtgaaaacttgtgttgctgttgancaaaaaaaccgaactggtatcatcagaaantgggacangggggaagtccctaacaaattgctcaaacntnccagacgngatgaaaagctcaagaannaacaccctgaactcntttgaanatgga

SEQ ID NO: 13043 - DNA, 469 bp, Arabidopsis thaliana
  unsure at all n locations
  Clone ID: LIB25-046-Q1-E1-B3
agcttcttgttctacgtacgacaccaaaaattaantcaaannngaaaaagaagagagttcantgagaaaacattctcttgatcgatggnttttaacagctgttcttgtcgttctcctctcgtcttcttcctccttcgcggccaagaaggacgccaagaanaagaagaagagtaataaggaggtgacatatgatggaacctcnttgatcatcgatggcaaaagagagcttctttantctggctctattcantacccgagaagcactccggaaatgtggccaagtatcatcaagagagccaagcaaggcggtttgaacacgattcaagacatacgttttctggaatgtacatgagcctcaacaaggaaagttcaacttttcgggacgagctgaattggtgaaagttcaaaanagntgattcanaaagaatgggaatgtggtntnaaccttaaaggctgggancgttcaanc

SEQ ID NO: 13044 - DNA, 393 bp, Arabidopsis thaliana
  unsure at all n locations
  Clone ID: LIB25-045-Q1-E1-H4
tctctctctctctctctctctctctctcnctctctctctcnttttacttcttcttcttcactttctctctgaatctgccgtcacgcngaagnntccgattgncnatactctctacatgcattgntgttgtacanctanaacactatatgacgagtcttcaagcttccgcgtcttcttcctcttttgagaatcgcttcttctttcctccatcgttggttcangantctctctgcaatgagtgatttcttcgatgaggggaagcagcanttcgcaagtgttgctgatgggaatgcaccacttaagtatccaagcttcaagctacctaagtcgactttcgganatactggnananatagcgccattggtacaagctaaataggggttangntcctc

SEQ ID NO: 13045 - DNA, 524 bp, Arabidopsis thaliana
  unsure at all n locations
  Clone ID: LIB25-044-Q1-E1-E9
nnnggggntggnggantggtcnacctnntctaggcctccggaccntcccgangtcgacccacgcgtccgcccaancgtccgcatatatagagaatatgagcaaaacggaagcaatcagcttgaccaaaaggggaatgttgccgccaagtagttgcaatagcctaatggaccgctctgagtcccttaagagggacagtgtgatgggcaatggtgcagccaaagtgagaggaagcttggagcgcaagaaatcaaagagttttaaggaaggagatagttattcttcgtggctcataacggaggctcctgggagtatagccgccgtgaggagagagcaagtggcggcacaacaagcactaaggaaactaaagattgctcattacggtagatncaaatcaaccattaatttcacttcttccaaagtcgtccctcttcttaaccctaaccctaaccctcatcctcaganatgcancttcctcanccccacttctgattctatttacgttgcctaccatgatgaanaatng

SEQ ID NO: 13046 - DNA, 525 bp, Arabidopsis thaliana
  unsure at all n locations
  Clone ID: LIB25-044-Q1-E1-F10
nnnnntggntggngaatggtcnccttgntcacggcccccggaggtcnnanagtcgacccacgcntccgcggaaactacgtcgtacgaagaaagattctgtctcttcctcagagaactctgatcatttaccaaaggaaatccgtgaggatatggactgtggaatcatcaagggaaatggaacagaatctggacggattattaccaccaaaaagaagggtttgaatgatcaaaaagacaagacaatctcttacagagctgaacatgtaattggcactggctcattcggtgttgtctttcaggctaagtgcttanagacggaagaaaaagtagcaataaagaaagtgttacaggacaagagatacaaaaacagagaacttcagatcatgcgaatgcttgatcatcctaatgtcgttgagctcaagcattctttcttttccacgactgagaaagacgagctttatcttaaccttgttcttgagtatgtacccgagactatttaccgcgcttccagatnttacaccaaag

SEQ ID NO: 13047 - DNA, 520 bp, Arabidopsis thaliana
  unsure at all n locations
  Clone ID: LIB25-044-Q1-E1-F3
nnntngnggaactggtcngctttggntctgcccgtccgcgacatcaagggtcgacccacgcgtccgcccaagcgtccgagaagatgatctcagagctcatgtccatgtacgacagaaatgtccagagcaaccaaacctctatggtcatggaaaatcaaagcgtgtcactgcttcaacccacagtccataaccatcaagaacatctccagttcccaggaaacatggtggaaggaagtttctttgaagacttgaacatcccaaacagagcaaacaacaacaacagcagcaacaatcaaacgttttttcaagggaacaacaacaacaacaatgtgtttaagttcgacactgcagatcacaacaactttgaagctgcacataacaacaacaataacagtagcggcaacaggttccagcttgtgtttgattccacaccgttcgacatggcgtcattcgattacagagatgatatgtcgatgccaggagtngtaggaacgatggatggatgcagcagangcanccg

SEQ ID NO: 13048 - DNA, 440 bp, Arabidopsis thaliana
  unsure at all n locations
  Clone ID: LIB25-044-Q1-E1-F5
gcaaaatccatggcttcagtgaattctcgaagtggtttctgcaactcaaactcaacattctacagcaaacgaacaccaatcccactcccgccaaatccatcactcgacgtcactactttcatttcttcacaagctcatcgtggccgtatcgccttcatcgacgcttccacaggtcaaaacctcaccttcaccgagctatggcgtgccgtggaatccgtcgccgattgtctctccgagatagggattcgcaaaggccacgtcgtcctcctcctctccccaaactcaattttattccccgtcgtttgtctctccgtcatgtcactaggcgcaatcatcaccaccacgaatccactcaacacttcaaacgagatcgctaaacagattaaggattcaaatcnagtcctcgccttcaccacatcgcagcttctccccgaaaatct

SEQ ID NO: 13049 - DNA, 74 bp, Arabidopsis thaliana
  unsure at all n locations
  Clone ID: LIB25-044-Q1-E1-F6
tttcaaagggngggaaatatacggngaagaatcttctgatgtaccatccagctgatcggggtgangcgccttta

SEQ ID NO: 13050 - DNA, 148 bp, Arabidopsis thaliana
  unsure at all n locations
  Clone ID: LIB25-044-Q1-E1-F8
antgggtancttagtggtggtgataataggtncctcccttgattggctccagctttaggtttttttttttanctttgtttcngcttcgattcccaaagtttaccctttcgattttggttctacctantcgagttgactcantagagtc

SEQ ID NO: 13051 - DNA, 508 bp, Arabidopsis thaliana
  unsure at all n locations
  Clone ID: LIB25-044-Q1-E1-F9
nnngggntgngaatggtttnctnttcagcctccggagctccaagtcgncccacgcntccgaanaaggcgtnggcgatttctctttctctcttaaacggagcaacgcctttgaaatcgaattcgctccacaaatctagactcactccacttcatcttcgaactatctcttgttctagactatcttactctccctcgngtcgcgaaatttctntcaaaactcaatctacngttcctatttcgtgtacgcgtagtangtttgacttcgttcctcgttgcggcatttcgtcgaacgatttgcctactgagaaaaagnanagctttggggagtgggttgagtttgtgggagangcggtttcgacggcgtttcngatatgggtttctctgggatgcttgttgggactgatgagaccaagtactttcaattgggttactccaaattggaccattgnaggtctacgatnactangctggaatgggaatgactttganccttgangatcttcgtggg

SEQ ID NO: 13052 - DNA, 454 bp, Arabidopsis thaliana
  unsure at all n locations
  Clone ID: LIB25-044-Q1-E1-G10
taaaatcnantacagtagcgttgtccgtttgttcttgcttccaaagtcaaaccaaccacacacgtttgttgttatctctcnagacccaccaatccggaaaggtcagacaatgtacccccacattgttatgcagtttgaaacagncaccgttgtcnaaagtgaactgtcaattagtgatgaacttatgaatacaaagttcaaggacaagctggagcgatcatataagggtctcattcatgaagtattcaccaccgtgttgcgttggctgtctggtgcaaagatcactaaacctgggaagttcccgcanttcccaagatgggtttgcattgaaatcgtctctcaaggcacaagatggggttctttatccactcganaaagggatttttcntcctacctaaacctccaacgcttatacttcacgatgagattgactaagtccagtttgaaangnatg

SEQ ID NO: 13053 - DNA, 521 bp, Arabidopsis thaliana
  unsure at all n locations
  Clone ID: LIB25-044-Q1-E1-G11
nnnnnnngnggntnnngaactggtctccttggtcaggccctccggatgtcccangtcgacccacgcctccggtcaaaacaaattcgtgataaacagattgttcgcattctcggaaaggcaccaacaattgcagcagctgcttatttgaggacggcaggcaggcctcctgttcttccttcggccaacctttcttattcagagaatttcctctatatgctggattcaatgggcaataggtcttacaagcctaatcctcgtttggctcgagtgctggacatcctcttcatactgcatgctgaacatgaaatgaactgctctactgctgctgctcggcatcttgcctctagtggtgttgatgtgtacaccgcatgtgctggagctgttggggcgctttatggtccacttcatggtggcgcgaacgaagccgtgcttaagatgttagcagagattgggactgctgaaaatattccagatttcattgaangcgtgaagaacanaaagangaagatgtcaggttttgg

SEQ ID NO: 13054 - DNA, 290 bp, Arabidopsis thaliana
  unsure at all n locations
  Clone ID: LIB25-044-Q1-E1-G2
gncccgtccgcacanaannncctcctcaaacancaatggcgangacggttacactcaaatccttcaccggacttcgtcaatcatcatcggagcaaacaaacttcgtctctcatgtaccgtcatcactttctctcgctcaaggacggacctctctccgagtaaccgcagccagagccactcccaatntctccaaccgtaaactcggtgtcgccgtcntcggtggtggactancaggnggggcanctgcaaagactntagcacaaggaggaatcgagacgattcncatcgag

SEQ ID NO: 13055 - DNA, 557 bp, Arabidopsis thaliana
  unsure at all n locations
  Clone ID: LIB25-044-Q1-E1-G4
tgtctgnncggttcgtccggacntcanaggtcgacccncgcgtccggaaaaatcnctctctctctctcttcatcgtcgccgtcgtcttctccgtctcctcctctctgtctcgctgctacttcttcttcatctcctgganaaataactcaacaaaaacgaaagaangggtctggtncaacaatcaatgattcttggattcgaacnggctggacaataactccgtcaaatcaaccaaccctcccaattcctccaaccaaccaaccaacgaaccaacaaattccgaaagtccgattcccggcgtttttctcctccccngggaattaataactccttcggctccttcctcccttcngggagaattctcccgggtctctccctcaagnacgangcaagaacgaattccccttaccgggaaaacccccaaaattgctgaattcgtcaaaattcnaggggtttcaattgcagggaananatggggcttttcatnagccccgattctcanatctcaanctcaagttctacanattcaacgcaagcttctnaatctctcaatgtgt

SEQ ID NO: 13056 - DNA, 443 bp, Arabidopsis thaliana
  Clone ID: LIB25-044-Q1-E1-G5
caattccattacccaatcccgctccttttctctgattttgaatcgaacccttaatacccagaaatctcacggttccgaggagtgggtttttgggggttagggttttcgagagatgttgaatgtcaggttcattgatgaatctgttttctctctgcttcaagccattcgggcacgtctgtgataattccgaagctggatcgggtggtggtggtggcgtttctggtggaaccggcggtgaaggcaaagacggattgctttggttccgtgatctcggtaaatattgcggcggagatttctccatggctgtgattcaagccaatcaggttcttgaagatcagagccaggtcgaatccggtaattttgggacttttgttggtgtttacgatggtcatggtggtcctgaagctgctcgttatgtctgtgatatctctttaaccattttc

SEQ ID NO: 13057 - DNA, 363 bp, Arabidopsis thaliana
  unsure at all n locations
  Clone ID: LIB25-044-Q1-E1-G9
tncnnatnaccnggggatncctnaaacccnctttaccggaaccgacngtgtancaanttcnccggtcnattatcgctcccaaaatttcagaattgttggcgggctgaaaaaatcnggagcctctggaaaaattatgatatcaaggagctcctgcttccnggtaaaaggtacacaaatgccgaagctgattactcacaaaatatgggtttggtgcatatctctgctggagattttgctgaagggctgaaatcgcntctgggaagtgaaaatggaagacgtgctaaaagaacatatgggagaaaggacaaattggtccctgatgaaatanttgtaatgatggtaaaagatctttatcacagacag

SEQ ID NO: 13058 - DNA, 515 bp, Arabidopsis thaliana
  unsure at all n locations
  Clone ID: LIB25-044-Q1-E1-H1
gnnnnnngaantggtttgtntngcccgnccgtccggaatcanaaggtcgacccacncgtccgcggacgcgnccgcccacgcgtccgcggacgcgtggggcgaaaatggtgaacattccgaaaactaagaacacttactgcaagaacaaggagtgcaagaagcataccttgcacaaggtgacgcagtataagaaaggtaaagatagccttgctgcccaaggaaagcgtcgttatgatcgtaaacaatctggttatggaggtcagaccaagcccgtcttccacaagaaggctaagacaactaagaagattgtgctgaggcttcaatgccaaagctgcaagcatttctcgcaacgcccgattaagaggtgcaagcactttgagatcggtggagacaagaagggaaagggaacatctctcttttaagttgttgtttcatctatctacttttttttgttttgtttggtacctgtcctgcttcaatactgtgatatactttgaatcctaccagaaatggtc

SEQ ID NO: 13059 - DNA, 500 bp, Arabidopsis thaliana
  unsure at all n locations
  Clone ID: LIB25-044-Q1-E1-E8
tgtctgcccgnncnaccggaaagnacatccgggncgacccacgcgtccnggaaaaccggactaatttcttcgggtatgaaggaagatgcggcttgcccacaaattttgatgccacatactgttatgcacttggttatggcgctggagtactcctcaacagtgggaagaccggactaatttcttcggttgggaacttggctgctcctgtggaagaatggactgtaggtgggactgctctcacagccttgatggatgtcgagaggagacacggtaagttcaagcctgtgatcaagaaagcaatggtggaacttgaaggtgcaccatttaagaaattcgcatcactgcgtgaagaatgggcattgaagaaccgatacatcagcccangtccgattcaattcactggacctggttcaaactctctcaaccacactcctacttccttgaactcggggctcaatagtctctcgactaaaccaccattcctttgccttttcctgccc

SEQ ID NO: 13060 - DNA, 411 bp, Arabidopsis thaliana
  unsure at all n locations
  Clone ID: LIB25-044-Q1-E1-D12
atngccaatncatgntnaanagnatnatncatccnccctannaagcatncnttagattcccatctagtnccacagancaaccttttgacnaaagaagaggtttcttggcgagcgtaagctaagacggcggagtcgccgaaagttcatagagaaagcattgttttgggtgatgagagaggaagtcggagagagtttcgccggggaagtttaggagttttgccggataaatgagaagccggactgttgagttcttccggtgggtgagcaaaagctttctgaaatattgccaatacggtttatctgggaagaactcaaacgangcaatgtttgtgatcgaagcttatcgaacacttcgtgatcgtggtccttacccagcagatnaagttcttagaggtcttganggaagcttcc

SEQ ID NO: 13061 - DNA, 520 bp, Arabidopsis thaliana
  unsure at all n locations
  Clone ID: LIB25-044-Q1-E1-D3
nnnnnnnngaactggtntgctttggncctgcccgtccgganatcaagggtcgacccacgcgtccgacgaaaacttctttatggggtctgtgcatttcaaggatgtggctttagctcatattcttgtatacgaggatccatattcgaaaggaaggcacttgtgcgttgaggctatctctcactacggtgattttgtagccaaagttgctgagctctatcccaattacaatgtccccaagttaccgagagagactcaaccgggtttacttcgagataagaatgcatcaaagaagctcatagatttggggttaaagttcatttccatggaggaaatcatcaaggaaggtgtggagagtcttaaaagcaaaggatttatctcttaatacctacctctgtaactctgtttgattgagcaattaacacaatctctaagcagcanaaacatttcatatgatatacgattttgcacttttgtaataaataanctggcctatggtatggtatgaacaaaaaaaaaaaaa

SEQ ID NO: 13062 - DNA, 371 bp, Arabidopsis thaliana
  unsure at all n locations
  Clone ID: LIB25-044-Q1-E1-D4
angatttgtntggnccgnccgtccgganatcanaaggtcgacccncccgtccgctccacgaanctttaatttctaatcaccgaccaaaattgatcggaaacctagagctcttcgtattgctccgccaccatgcatatccggcgccagatcttcgttaaatctcctgactgtcaaaaagtcgtcgctctgcaattggatcctgcgcaatctctattaactctttcgggtatcacttccttactcgaatcgtcgcagcgtatatcgttttcggnttgctcgattactccagatgggaagctttttgatggntccacacggnttcaagtntccaagctttcntncggtaccaangcccatccttttcctncncc

SEQ ID NO: 13063 - DNA, 384 bp, Arabidopsis thaliana
  unsure at all n locations
  Clone ID: LIB25-044-Q1-E1-D6
gagaantggtactcttcgtttgaccacaaggcagacgtttcagcttcatggtgttctgaagcagaatcttaagactgtgatgagctcgattattaaaaatatgggtagcacgcttggtgcatgtggtgatctgaacagaaatgttcttgctcctgctgcaccttatgtgaagaaagactatctctttgcacaagaaactgctgacaacattgcggctcttctttctcctcaantcagggttctantnatgatatgttgggttaaggaaaagcagttcatgactgctgaacctccagaggtantnaaggctcnaaanaataactccnatggaactaatttngtcnactctcctgaanccaatntatggaaccaattncttgccna

SEQ ID NO: 13064 - DNA, 512 bp, Arabidopsis thaliana
  unsure at all n locations
  Clone ID: LIB25-044-Q1-E1-D7
gnnnnngnnngattgtcnagccggggtntaccggtaaggagatcncgggtcgacccacgcgtccgcttnatttcgatttggattagaagctggttctaaacctgagatccttcttgctatgagctgcttgtgtaaaggtagccctgatgcctttcttgtgtgcaatggattcaaagatgctgagtatatatcattggctctgcttgggagaaaactggcgttgaatactgtgattgtgcttgagcaagaagaagagcttgatctggttattgagctgagccagaagatgaatgtgaggcctgtcattgggttaagggctaagctgaggactaagcattcgggtcatttcggatcaacttctggtgaaaagggtaaatttggattgactactactcagattgttcgtgtggtgaggaagctgcgtcaatctggtatgcttgattgtctccagcttctgcattttcatattggttcacagattccgtcgacttcgttgcctctgatggtgtcgc

SEQ ID NO: 13065 - DNA, 516 bp, Arabidopsis thaliana
  unsure at all n locations
  Clone ID: LIB25-044-Q1-E1-E11
nnngtggntgnngantggtctccttttcaggcctccggacatcccangtcgncccacgcctccgcccaaacgtcagccaaaaaccaatcccagatctgaatctcaacctaaacctcagattcatcatcatggcttcttcttctaactacgatggaatccttctcggtatgggtaacccactcctcgatatctctgccgtcgtcgacgacgaatttctcaccaaatacgacatcaagttgaacaatgcgattctcgcggaagacaaacatttgcccatgtatgatgagatgagtagcaagttcaatgttgaatacattgccggaggtgctactcagaactcaatcaaagtggctcagtggatgcttcaaattcctggggcaaccagttacatgggatccattggaaaggacaaatatggagaggccatgaagaaggatgctacagcagctggtgttaatgttcactattatgaagatgagtcggcacctactggaacttgtggtgtctgtgttgttg

SEQ ID NO: 13066 - DNA, 513 bp, Arabidopsis thaliana
  unsure at all n locations
  Clone ID: LIB25-044-Q1-E1-E12
gtgngaatggtctnctgttcaggcctccggagntccanngtcgncccangcctccggataangatcagcaacgagcattagctgcttccttggaagataacaacatgaaagagtcttcagatgatcaatcaacaataatacctgaagaagtagcagttgaagcagttacatccgcggtcctgccaacattcccaccactgccggaagaaccaaagggaggcgatcgcagcctacaatgcagagttgggatccgtttacctaacggacaaagactccagaggaatttcctcaaaacagacacaattcagcttctctgggtcattctgctattcccagcttgaggaatcaaganaggaagaanccattgaagctaacacaagcgattccaaggtgaatcanagacattggagtatgaatctaacttaancttggancantctggtgttgcaattccatgatctctgctacgtnggaatgaaatatcatcatatcnataaaattagctntatgggg

SEQ ID NO: 13067 - DNA, 510 bp, Arabidopsis thaliana
  unsure at all n locations
  Clone ID: LIB25-044-Q1-E1-E2
gnnnnnnngantggtttgtntggccgnccgtccggaaatcanagggtcgacccncgcgtccggaagnagccatggagatagccgccgttagcactgtctccgtcgcgccacaatcgcgcagagtgtcgaatgcgttctccaggaatctaggatccgtatcttctctttcgtttggtttctttgagaaagaatattgctttaagagccctagccttcgtgtgtctgcagcagcttccatggacgccgtcacagctgagaaattttctccggcgagttttctagacaaaaaagaaaccggagttcttcactttgtgaaataccatggcctcggcaatgacttcattttggtcgataacagagactcatcggaacctaagattactcaagaacaggcggcgaagctgtgtgatcgaaacttcggtgttggtgccgatggagtgatttttgcaatgccaggagtcaatggtactgattacgcatgcggattttcaattcagatggtantgaacc

SEQ ID NO: 13068 - DNA, 450 bp, Arabidopsis thaliana
  Clone ID: LIB25-044-Q1-E1-E3
aaagagaaatagaattttgcgtttcaagtactccatctccgtctcttttcctccgcatctaaaaccatctgagaaatatctccgacgaaggagaagaaacgaaaatgacggagactggagtaatcggatgtggctgtcgcggagtcaccggcggcaatttcttccatcccggaggattttctttgaaatcttgtttcctcgagcagagtacaaagcgtaatcgtaactttttccgaagcgtttctatgattcctcctttcaaacgcggtcgtttcatcactaagttgcgttccgtcgccgggaacagccgaatctttagcatggatgctcgagagaaatcacgatcgtttgtgttggtatcatcaaggcacaagagagttccagtttttgtgatgatgccgattgatacatttggaattgatgcttctgggtgtccaaagattaaaaggg

SEQ ID NO: 13069 - DNA, 449 bp, Arabidopsis thaliana
  unsure at all n locations
  Clone ID: LIB25-044-Q1-E1-E4
anacgaaacatggcttcttcttctacttctctgaaaagaagagagcaaccaatttcgcgagatggagatcaacttatcgttactccgttaggagccggaagtgaagtgggtcgttcctgtgtttacatgtccttccgaggcaaaaatattctgtttgattgtgggattcatcctgcgtactcgggcatggctgcgttgccttacttcgatgagattgatccttcttccattgatgtcctcttgattactcactttcatatagatnatgcagcatctctaccttaatttctgggagaaagacgacattcaatggggcggttttcatgacacatgcaacaaaggncatctacaaactgttgcctacaaattaatgttaaagtgagcaaagtgtcngtgggaaaaaagttggtccnatgaaccanaaatncacaagtccaaggggcaaaatt

SEQ ID NO: 13070 - DNA, 444 bp, Arabidopsis thaliana
  Clone ID: LIB25-044-Q1-E1-E5
ctgaccaagcacatgttcagttgtttaaaagctttcatggtagcttttcacatcaagtaatggttcgtgatctccactacattgaaggttctaaagccatgccaaaggttttgccaacgttggatcaaaatgaaggtgtgctaaagcattctgctagcgttcaaagaggaagagaatttggaactaatctttggtttgatcttgttgataaaccgaatgaatggtgtgattaccgtgaaatgaaacagaatggatcggttaatcctaaacaccctgatttcaagaagaaagacgggagtcaagcgctttggcttaacaatgctcctacagagatattgtccgagctcaaagacgtgaagtttgatattccaaaatacgcaaaacaaccaaaggccggagaggaatcatggaaggacttggtacataacatgaataagtggtggg

SEQ ID NO: 13071 - DNA, 443 bp, Arabidopsis thaliana
  unsure at all n locations
  Clone ID: LIB25-044-Q1-E1-E6
tgcatatgaaagactgcttctcgatgcaatcgaaggagagaggaggttgtttatcagaagtgatgagctagatgcagcatgggatctattcacaccggctttgaaggaactagaggagaagaaaatcattcctgagctctatccatatggaagcagaggtcctgttggtgcacattaccttgcatctaagtacaatgtgagatggggagatcttggagaagcttaagctttcgacagaaacaatatgatttggtgttaatatgagtaaactaacttgtcgatattatcaatgcgtagataaatccttgttaccaaaacttgctttttctctgacattttttgattgtttttggttctaaatcgagcatttcggangaatgtnccaaaactcctgcangaatagaccaattccatcattgcaaancaangggaaaaaatnaggg

SEQ ID NO: 13072 - DNA, 430 bp, Arabidopsis thaliana
  Clone ID: LIB25-044-Q1-E1-E7
ttagccaccatgtctttgagacctaacgctaagactgaggttcgccggaaccgctacaaagtggcggtggatgctgaggaaggaagacggaggagagaggacaacatggtcgagatccgtaagagtaagcgtgaagaaagcttacagaagaagcgtcgtgaaggccttcaagctaatcagctacctcaattcgctccttcttctgttcctgcttcatcaactgttgagaagaagttggagagtttgcctgctatggttggtggtgtttggtcagatgatagaagtttacagcttgaagcgactactcagttccggaaattgctttctattgagcgtagtcctccgattgaagaagtgattgatgctggtgttgtgcctcggtttgtggaatttctcactagagaggattatccacagcttcagtttgagg

SEQ ID NO: 13073 - DNA, 427 bp, Arabidopsis thaliana
  unsure at all n locations
  Clone ID: LIB25-044-Q1-E1-D1
caaaggccaccaatctgaagcatttatatctcaacaactgcaaaagtttggagattcccaatagtagaaggaagtgtcaccaaaaattggtgaggttggaaatgaaagaatgcacagggctggaggttcttccaaccgatgtcaacttgtcatctctcgaaaccctcgatctcagtggttgctcaagtttgagaacttttcctctgatttcaaagagtatcaaatggctctatctggaaaacaccgccattgaagaaattctagatctttcaaaggccaccaagctcgagtctttgatactcaacaactgcaaaagtttggtgacacttccttctacaattgggaatcttcaaaatttgagacgtttgtacatgaaaagatgcacanggctggaggttcttcaaaccgatgtcaacttgtcatctcg

SEQ ID NO: 13074 - DNA, 134 bp, Arabidopsis thaliana
  unsure at all n locations
  Clone ID: LIB25-044-Q1-E1-A4
tggggaagaanaaaaangaatgtcctggcctttggtccttcccggggtgggtccaancctggtttggcccaatgggtnggcctgggaaaggtttggttgggttggggtggggtngcctggcttttccgggnggg

SEQ ID NO: 13075 - DNA, 388 bp, Arabidopsis thaliana
  unsure at all n locations
  Clone ID: LIB25-044-Q1-E1-A8
ggaagnanccgggcgccacctccngaaccatacaagnatntggaggcaatggtgaaaantccagtaagcccatggtatagtanggcaattgaataaaatggctgggttttgctcctgatgaggaaatagaactttttgagggaaataaagntttgaacccttgccgtaaatggtgtgaacaagaattgataaagaaagaacntcctttcaaaggctggtgtccaaatttgaagaatgggagaataaccatttggntaatcnaaaaacctccttccnaaccaaggagaattggaattccantaccccanaagtggcaaccattttgggngtaangttcaaaatcccaaaacccggggccntttttcccacacctggggnaaaaccncaa

SEQ ID NO: 13076 - DNA, 443 bp, Arabidopsis thaliana
  unsure at all n locations
  Clone ID: LIB25-044-Q1-E1-B10
cgattaaacctactcaatctcagatctcgttaaacctagaaacctcnagaaaaaccgtatcaatggcgccgaaagcagagaagaagcccgctgagaagaaaccagcttccgagaagccggtggaggagaaatcaaaagccgagaaagctccggcggagaagaaacnanangccggaaagaagctcccgaaggaagctggtgccggaggcgacaagaagaaaaagatgnnnaataanagtgtcgagacttacaagatctacatcttcaaggtgcttaagcaagttcatcccgatatcggaatctccagcaaagcgatggggatcatgaacagtttcattaacgatatcttcgagaagcttgctcaagaggcgtccaancttgcgaagtncaataagaaacctacnatnacttctcgggagattcaaactgctgttagattggtt

SEQ ID NO: 13077 - DNA, 520 bp, Arabidopsis thaliana
  unsure at all n locations
  Clone ID: LIB25-044-Q1-E1-B11
nntgggtnnnggaantggtcctggtccgactagnantncggatcntccanngtcgacccacgcntccgccaaaacacaacaagaacagaactcagccatggcttcttcttcttcttctcttctaatcctagccgttgcttgtttcgtctcgctaatctcaccggcgatttcacaacaggcttgcaaatcacagaacttgaactccgccggtccgttcgatagttgcgaagaccttccggtactcaattcctanctccattacacctacaattcctcaaattcatctctctccgtcgctttcgtcgccactccatctcaagccaacggtggctgggtcgcttgggctattaaccctacggggactaagatggctggttctcaagccttcctcgcttacagatccggcggtggtgcggctccggtcgtgaagacgtacaacattagcagctacagcagtctcgtcgaangtaaacttgcttttgatttttggaatctacgcgccgagtcgttangcgggcng

SEQ ID NO: 13078 - DNA, 427 bp, Arabidopsis thaliana
  unsure at all n locations
  Clone ID: LIB25-044-Q1-E1-B2
cggntgngaatggtttgtttgggncgcccgtccggatatcaagggtcgacccacncgtccgcccaagcgtccgcccacgcgtccggttgagatgaattcaatgttatctaacttagcattcaacaacattattagaatggtgacgggaaaatgttactatggagatggtgcagaggatgatcctgaggctaaacgtgtgcggcagcttatcgcagaggcgatgagttgttttggtgcaggacatgcggctgatcatttaccgatgttgcgatggattacagatttcgagaggcgggtaaagaacattccngcaaggctngatgaanttttcccaanaatnggttgatgagaaaacttttgncaaaggagaacnagggacaacccnangattgatnactnncttcctttggcangnttncccancctg

SEQ ID NO: 13079 - DNA, 445 bp, Arabidopsis thaliana
  unsure at all n locations
  Clone ID: LIB25-044-Q1-E1-B7
nnaaaaacgagccagcctcttcttccttcgtctactagatcagatccaaagcttcctcttccagctatggctgcttcagtacactgtaccttgatgtccgtcgtatgcaacaacaagaatcactctgctcggccgaaacttccaaactcgtctttgttacctggattcgatgttgttgttcaagctgctgctactcgattcaagaaggaaacaacaaccacaagagccactttgacgtttgatccaccaaccactaattctgagagagctaagcagagaaaacacaccattgatccttcttctcctgattttcaaccaattccatcttttgaagaatgctttcctaagagcactaaagaacacaaggaagttgtccatgaagaatctggtcatgttcttaaagttccctttcgtcgtgtcatttgtctggtggtgagccancttt

SEQ ID NO: 13080 - DNA, 432 bp, Arabidopsis thaliana
  unsure at all n locations
  Clone ID: LIB25-044-Q1-E1-B8
gaaaagagccttatattanatctgctgaggatattgctttccatgccgctcttttcgttgcaaaaaatggaagttacatcaactattacatgtaccatggtggaacaaactttggaaggacttcatcttcgtatttcattacaggatactatgatcaagctcctctcgacgaatacggtcttttaagacagcctaagtacggtcatttgaaggagcttcacgctgcgataaaatcctctgcaaatcctctgcttcaaggaaagcaaacgattctctccttgggaccaatgcaacaagcttatgtctttgaagacgcgaacaatggatgcgttgcgtttctggtaaacaatgacgctaaagccagtcaaatacaattcagaaacaatgcgtatagcttgagtccaagtcaattggtattcttcagaactgcaa

SEQ ID NO: 13081 - DNA, 518 bp, Arabidopsis thaliana
  unsure at all n locations
  Clone ID: LIB25-044-Q1-E1-C10
nntgggtggnggaatggtccnctcgnacaggnctccggacgntccanngtcgacccacgcctccgacgaaacctgntgcactactcgctctgggaatgttcctctgtgctgagtctccacagtggctattcaagcaagggaagatagctgaagcagaagctgagtttgagaggctgcttggagggtctcatgtgaaaacagcaatggcagaattatacaaactagatctagacaagacggatgaaccagatgttgtgagcctctctgagctgttatatggtcggcattcaagaggtatgtagaactctttgcttttgtcccgcggaaggaactgcaaacatgtatgttgattgttgtgtctatttgtttcctgtatagtactttgttattcacttgttccttttgcagttgtttttattggatnaaccctgtttgctttgcaacagctatctggtataaatgctgttttttatttctcttctaccgtattcaaaagtgctggaagtaccatcggacct

SEQ ID NO: 13082 - DNA, 465 bp, Arabidopsis thaliana
  unsure at all n locations
  Clone ID: LIB25-044-Q1-E1-C3
aaatttcttttattgttcacctctttttcttcaatccttcaatttctctcaccaaccctaatttccccaaatttggtaatacgatttcgtcaatttacttcgcaatcgattcaattcaattatgtctctattactggaagagatcattagatcagtagaggctttgctgaagctcagaaatcggaatcaggaaccctatgttgacccgaatctaaacccggttcttctagttccaggaatcgctggatcaattctaaacgccgttgatcatgagaacgggaacgaagaacgtgtttgggttangatctttgggtgctgatcatgaagtttcngaacaaagatgtggtctcgatttgattcttcaactgggtaaaacgatatcctcttggatccaaaaaacgaagtaattggttggttcctcaaagacaagagctggggctacatgcaattganngtcttagaacc

SEQ ID NO: 13083 - DNA, 462 bp, Arabidopsis thaliana
  unsure at all n locations
  Clone ID: LIB25-044-Q1-E1-C4
aaagctctgtgttctttcttgcctcctcttatcgtgaaaataaacatacttaggatcgtagaagagagaaaataagaagaaagatggtaggaagcanagaaaaatcgaaagagaaacgagataagagactccaagagatntccctccttcgtactattccctattctgatcaccagaggtggtgggacctctgaaaccgtggcggtggtaacangtgcgaatagaggaataggatttgagatggtgagacaattggctggacatggactaacagttattctaacatcaagaagacgaaaatgtaggcgtcgaaaccgccaaagatncttcaagaangntggattcatgtttgaattccaccggnctccaanatccttgggactccttccctcaatccaaaaaanttttncnnaaangggtttanagnaanaatttgggatttantgggnggttttaaatana

SEQ ID NO: 13084 - DNA, 411 bp, Arabidopsis thaliana
  unsure at all n locations
  Clone ID: LIB25-044-Q1-E1-C5
actcagccatggcttcttcttcttcttctcttctaatcctagccgttgcttgtttcgtctcgctaatctcaccggcgatttcacaacaggcttgcaaatcacagaacttgaactccgccggtccgttcgatagttgcgaagaccttccggtactcaattcctacctccattacacctacaattcctcaaattcatctctctccgtcgctttcgtcgccactccatctcaagccaacggtggctgggtcgcttgggctattaaccctacggggactaagatggctggttctcaagccttcctcgcttacagatncggcggtggtgcggctccggtcgtgaagacgtacaacattangcagctacagcagtctcgtccaangtaaacttgctttgattttgggaatctacgcg

SEQ ID NO: 13085 - DNA, 442 bp, Arabidopsis thaliana
  unsure at all n locations
  Clone ID: LIB25-044-Q1-E1-C6
tngcagacagtcaccaaattggtgaaggaggctttggtgtagtctttaaaggcgttctagatgatggccaggttgttgccataaaacgagccaaaaaggaacactttgagaatctgcgaacggagtttaaaagtgaagttgaccttttgtctaaaattggccaccggaacctagtgaagcttcttggttatgttgacaaangagacgagcgacttatcataactgagtatgtcagaaatggtacactccgcgatcacttggacggtgctcgtggaacnaaacttaatttcaatcaaaggtngganattgttattgatgtctgccatggcttancctatctccantcttatgcagaangacagataattcaccgtgacataaaaccgtcnaacattctactcacanatacatganagccaaannaccagacttcggctttgcg

SEQ ID NO: 13086 - DNA, 437 bp, Arabidopsis thaliana
  Clone ID: LIB25-044-Q1-E1-C7
gctctcacattattttctgtttggaatcttggatctttctttctgagatcattcgtcttttgtactgattttgagagatttcatttttgtttgtttaccgatccgccgccgtggatttttgttttccgatgacgatcaaagatgagtcggagagttgcggtagcagagccgtcgttgcttcgccgtcacaagaaaaccctagacattaccggatgaaacttgatgtctatagtgaggttttacagcgacttcaagaatctaattacgaagaagccactcttcctgatttcgaggatcaactttggctccatttcaatcgtcttcctgctcgatatgctcttgatgttaaagtcgagagagcggaagatgttctcacacatcagagattgctaaaattggctgcagatcctgctactaggcctgtcttgaagttcgaa

SEQ ID NO: 13087 - DNA, 443 bp, Arabidopsis thaliana
  unsure at all n locations
  Clone ID: LIB25-044-Q1-E1-C9
gttnattgttgaatcttcccatttcctcatccaaattccgacataactatcctagccgccatttgttctccacattacaaaaccctcagcagcttcaaaactcttccgatctctccctcacgctcgcaattctctcgtctccattttaatagtttttcttctcggaatcacaaatcttcggcttcttgttccttggcgtgtgtgtgtgttgttgaatggctcttgttcagcggattccaatttcctcctccagtattcggaattggcaacaagcgaggaccaatttgactcctatttgttgtttacattacaatactgcatcttcttcttcttcaccctttacagagaagcactctgtggagagataccaaagggatcaatggctgtacaaagcggttgaaccaacgccaccatcgactccatctccatcgccatttgaagaa

SEQ ID NO: 13088 - DNA, 519 bp, Arabidopsis thaliana
  unsure at all n locations
  Clone ID: LIB25-044-Q1-E1-A3
nnnnnnnnngaantggtntgctntgncctgntctccggnnatcanngntcgncccgnacctcngcangactttaaatcatggcggatacaatggttgctcatatggaccgacataataagatagatgttgagatctcagaagatgacaagagattaacaaagctttgctctctaaagaagaaggctataaatgcgacgaacaagtttaagcactcaatgaccaagaaaggtcgaaggcatagccgtgtggcgtgtgtctcaatcgtcgatgaaatcgatacagaagagttgcaagcggttgatgctttccgtcaagctcttattttagacgaactacttccctctaagcatgatgatcatcacatgatgcttaggttcttgagggcaagaaagtttgatctcgaaaaggctaagcaaatgtggtctgatatgcttaactggaggaaagaatatggcgcagacacgatnatggaggactttgatttcaaagaaatccgaagaagtggttaagtnttatcc

SEQ ID NO: 13089 - DNA, 446 bp, Arabidopsis thaliana
  unsure at all n locations
  Clone ID: LIB25-043-Q1-E1-A12
nntcgtactctctctatctactactccatcaagattgtctggttctgttccgggtttgattgatttctaccgtcgccggagattttgtcgtgtaatcacctccatggctgaagcgggatcggtttacgtcgatgtagctggggaatcgaagtcggagcatgttactgggaagtggttttcggtgccggagctccgactgcgtgaccaccggttcatagttcctcttgattattccaaaagttctcccaaaattaccgtctttgctcgagagatcgttgcggttgggaaagaggagcaagcaatgccgtatttattgtatttgcaaggtggtccaggatttgaaggtccaaggcctagtgaagctagtgggatggattcaaagagcttgtgaagagttcgagtggtcctactcgatnaacgangaacaggcttgtccactcctttaa

SEQ ID NO: 13090 - DNA, 543 bp, Arabidopsis thaliana
  unsure at all n locations
  Clone ID: LIB25-043-Q1-E1-A2
ngngtnnnggaantggttctgtttagnccggcccgtccgganatcanagggtcgacccacncgtccgcccaancgnccggaaaaagatatcaatgcctgcacatttaatgtatgatggccaagatgataacctgtttgagcacttctcaaccgttgcccagaggctcggtgtctacactgccaaggactatgctgatattctggagtttcttgttgaacggtggaatgtggagactttgacagacctttctagtgaaggacacagggcccaggactttgtctgcggactacctgcaagaatccgtaaaattgaagagagagctcaaggaagagccaaagaagctgccaaaaacataccattcaagctgggatatttggtcgaaatatcanggcttaagaagtttactacacaattctctttccaattatcccaagtaagtcataaaggtcntcaacaaccatttcaccaatgaagggaccagtttttaagaccacgaaaagttcatttgaatgtgtttgttttatacngaacattggtgataa

SEQ ID NO: 13091 - DNA, 514 bp, Arabidopsis thaliana
  unsure at all n locations
  Clone ID: LIB25-043-Q1-E1-A3
tgcttgnccgnncnncgganananatccggcccgacccncgngnnaacgcanatacaaagaagcagacgacaacaccaaactccgatcatcatcatcaacaacaacaacaacaacaacgatgctgcttcgaatttctggtaacaatctgagacctttgagaccacaatttctcgctcttcgaagctcttggttatcaacttcgccggagcaatctactcaaccacaaatgcctccgagagtaccaaatcttattggaggttcttttgttgagtctcaatcatcttcgtttatcgatgttataaaccctgctacacaagaggttgtatctaaagttccattgactactaatgaagagtttaaagctgcggtatccgctgcgaagcaancgtttccgttgtggagaaacacgccgattactanccggcagcgtgttatgctaaagtttcangagcttatacgcaanaatatggataaacttgctatgaacatcacaaccgaagcaaagggaagact

SEQ ID NO: 13092 - DNA, 471 bp, Arabidopsis thaliana
  unsure at all n locations
  Clone ID: LIB25-043-Q1-E1-A4
aaanatggatactctctttagactagtcagtctccaacaacaacaacaatccgatagtatcattacaaatcaatcttcgttaagcagaacttcnaccaccactactggctctccacaaactgcttatcactacaactttccacaaaacgacgtcgtcgaagaatgcttcaactttttcatggatgaagaagacctttcctcttcttcttctcagcacaancatcanaaccacaacaatcctaatacttactactctcctttcactantcccaagccagtacatctcgcnacatcatcancccntcntcaanggccgcagccgcagcttagcctcgccntaatcctcctcnggcaacataattnacccttcgggntctccaatagtgaaaactccncgttccttcgacttctcagcaatggccaagttgggaagactcggtccttcttgaancggnaantggccttctcctg

SEQ ID NO: 13093 - DNA, 538 bp, Arabidopsis thaliana
  unsure at all n locations
  Clone ID: LIB25-043-Q1-E1-A5
gnnnnnnggaantggttttnnttggcccngcccnnnnnaaaacanaaancggcccngncccacgcgtcnaaggtaaaaaggagcatctgggttctctgctcgttccacagctgaagaagtcactcatggaatcgatggtactggtctcactgctatcgtcacaggagcatcaagtggtattggggaagagactactcgtgttcttgctcttcgtggtgttcatgttgtaatggcggtaaggaatacagattctggtaatcaagtcagagataagatacttaaggaaatacctcaggctaagattgatgtaatgaagttggatcttagctctatggcttctgtcaggagctttgcatcagagtatcagtctttggaccttcccttgaatcttctcatcaataatgcggggattatggcatgtcccttcttgctttctancgacaacattgaattacagtttgcaaccaatcatttgggtcattttctgttgacaaaaccttcttttggagaaggatgaagaaaacagctaatgaaagca

SEQ ID NO: 13094 - DNA, 520 bp, Arabidopsis thaliana
  unsure at all n locations
  Clone ID: LIB25-043-Q1-E1-A9
nnnnngantggttgcctgggcntaccggngcccgaaatctcgggacatcccgaggtcgacccacgcgtccgatttagaatcttgaaaaggactctggtttattcagaaacccaagaaacaacaaggctgggaagtttcttacattatccgagttcttgtttcttccaaaccgttacagctctctcttaggcctcttgatagaagtggagaatgcagcttatttagtggaacatcaaggaattagcgtggtcgatgcggtactagatgaattgaagagagctactactcaacaaaacaagacaagtgcaagaacaatactgatccagtctactgataagtctgtcttgatgaagttcaaggagaagaacaaaatgaatcatgacgagctggtctatagagtcgacgacaacatccgtgatgtagcagattcggcgatcaaagacatcaagaatttcgcaggctcgattgtcatcagtaagaaatcagtctttcctacaaagggttaacatccttgaaaang

SEQ ID NO: 13095 - DNA, 532 bp, Arabidopsis thaliana
  unsure at all n locations
  Clone ID: LIB25-043-Q1-E1-B1
ggngnnntgaatggtntctcnggnccggncntaccgganatcanaaggtcgacccnngcgtccgtctcactgnangccatattcaaagcagtttccacacatttaatgtgaacacgttttctcactaccaacaaaaaaaaaaaactcaaatcggaaaaaaaaatgtcggttcacggacgatttccggcgagtccaccgatttcattatctccgtcgtcttcttccacatctccgtcttcacagtcaccgtcaacaccacctgatctaaagcaacgagtcatcgcttgtctcaacaagctcgctgatcgtgacactttagctctcgcttccgctgagcttgactcaatcgctagaaaccttactcacgattccttctctccgtttcttaactgtatccacaacactgactcttccgttaaatctcccggtgaggaaacagtgcgttgctcttttaacggttctttctcgttaccacggagattctctaacactcaccttgctaagatggttcaactgtaatcccgtctccgag

SEQ ID NO: 13096 - DNA, 442 bp, Arabidopsis thaliana
  unsure at all n locations
  Clone ID: LIB25-043-Q1-E1-B10
cttctctctctctgaagcgatgtcatcgacgtttcgagctccggcgggagccgctactgtgtttacggcggatcagaagatcagacttgggaggctcgacgctctgagatcctctcattctgttttcttaggaagatatggacgcggcggcgtcccggttcctccttccgcttcttcgtcgagttcttcgcctattcaagccgtctccactcctgcgaagcctgagactgcgaccaagcggagcaaagtcgaaattatcaaggagaagagtaatttcataaggtatcctttgaacgaggagcttttaacagaggctccaaatgtcaacgaagtcanccgtgcagcttatcaagttccacggtagctaccaacagtacaacagagaanaacgtggtggaagatcttactccttcatgcttcgaactaagaatccatctgggaa

SEQ ID NO: 13097 - DNA, 530 bp, Arabidopsis thaliana
  unsure at all n locations
  Clone ID: LIB25-043-Q1-E1-B11
nnngnnnnnnnngtggngantggtntgantggttttcgnggncgaaanntcggnaaagcccgggtngacccacgcgtccgcaaaagttacaaaaggagagtatgtcaaaggtttcatatgcaccgttgctgcgtctgctggttatggtctagtcttatccctacaacagctagcctttctaaaagtcctaaagaagcaaaatttctcagaagttatggatatgataatctacgtgagtctagtggccagttgtgttagcgtggtggggctttttgctagcagtgagtggaaaactttgagcagtgaaatggataactacaaacatgggaaggtatcctacattatgaacctagtgtggacagctgttacctggcaggtattctccatcggtggcacaggactgatcttcgagctctcctctctattctcaaatgcaataagcgttttgggactcccagtggttcctatcttggctgtaatcattttccatgacaaaatgaatgggttaaaggtgatttctatgatcctag

SEQ ID NO: 13098 - DNA, 455 bp, Arabidopsis thaliana
  unsure at all n locations
  Clone ID: LIB25-043-Q1-E1-B5
atggaaagtttccgctgaaagctgttaacgtaatgcatactgtggcgttgagaaccgaggcaagtctacctgtcagaacctcggcatcccgtaccactgcttacaagggtcacatgggccaaatgtttgcttttcatgcttctataatggcaaatacactganctcaccgctaattgtatttacgagaaccggatccatggcagtgcttcnaagccactaccgcccatctgcaacanttttcgccttcacaaaccananaagaataatgcaaaggcttgctctttatcaaggtgtcatgcctatatatatggagttctcggatgatgcagaagatacatangcccggtctctcaaactcntacaggacgagaatatgccaagganggacaacatgtanctcttgtccaaagtggctcgcaaaccaattggccgtgaanaatcaacccatctcatg

SEQ ID NO: 13099 - DNA, 461 bp, Arabidopsis thaliana
  Clone ID: LIB25-043-Q1-E1-B6
gatcaaatgatgcttgttcgatctgtatttcgatctcagttgcgaccctctgtctcgggtggtctgcaatctgcttcttgctattcttcattatctgctgcttcagctgaagctgagaggactatcagagaaggtcccagaaacgattggagtagagatgaaatcaagtctgtttatgattctcctcttcttgacctcctcttccatggagctcaggttcatagacatgttcataacttcagggaggtacaacaatgtaccctcctctccataaagactggtggctgtagtgaagactgttcatattgtcctcagtcttcgagatatagcactgggagttaaggcacaaagactcatgtctaaggaccctgtcattgatgccggctaagaaggcaaaagaagctgggaacaacactttttgcatggttcctgctggcaagatacaattggacggaaaacaa

SEQ ID NO: 13100 - DNA, 460 bp, Arabidopsis thaliana
  unsure at all n locations
  Clone ID: LIB25-043-Q1-E1-B8
acaaaacagcgacattcgacgccaaatacataacatcgtcgtcaacagcaaaatggctaggtctggggttgatgagacatcagaatctggagcttttgtaagaacagcatcaacattccgcaactttgtttcacaagatcctgattctcagtttccagctgaatcaggaagataccatctttacatatcttatgcttgtccatgggcttgtagatgtctttcttacttaaagatcaaaggacttgatgaagcaatcaccttctcgtcggttcatgccatttggggaagaaccaaggaaactgatgatcatagaggatgggttttcccggattcggataccgagctccctggagctgagcctgactatcttaatggtgccaaaagttgtgagagaactctacgannattggctagcccaaactatgaagggaaattcactggttcctggtcctttgggana

SEQ ID NO: 13101 - DNA, 518 bp, Arabidopsis thaliana
  unsure at all n locations
  Clone ID: LIB25-043-Q1-E1-A11
nnnnganngnttgantgnnngcctggnncnaaangtcnccanagcccgggtcgncccacgcntccgcggaagcgtgggtaaaaaacaaaaaataaaaaaatccttcaaatctttcttttacatatctgacaaaacaatggctagatttcctatagcaatatgtctaatgttaatactagtagcatcaagtaccatatatgaagcgcaaggtgtattcttattaaggcattacatgaataaatttcctaaaaattcccaagactttgagccttttgcttacaaaggtatgcttagttttgtggataaccttgagaatatggctccggaaaaaggagagtacaaggatttcttctcaaagctgaaagctttcatgtccttcataaacacggcaaaagggtcgtcttcagagttccagtctcaaatgaaacaacaagctgagggcctcttcaaggctatctctgcattgggtgtcaaaggaggatcatcggctgatacgaagcaaattgatcganagtttg

SEQ ID NO: 13102 - DNA, 451 bp, Arabidopsis thaliana
  unsure at all n locations
  Clone ID: LIB25-042-Q1-E1-G4
aaaaannntccctngctnggnttttcaggataancnganatctatcngtanaagaagcagatacagaattcagaaacgatgaccgacgtcgatgaatccgttagacgccgtacagccgccgtttccgagtaccggaaaaagctcctccaacataaggaactcgaatcccgtgttcgaacagctagggagaacttaagaggagntaaaaaggaattcancaagaccgaggatgatctcaaagtctcntcaaagtgttggggcaaatttattgggggaaatgctttcgaccccctgggataaatgaaangattgattgtgaaaagcgagcaagtggtccaacgttatgtnggtggggttgcccgaaagcaanagtgggataaaggaaaagcctaanctcccggnactcnaagttggttctccgatatgacaacacctaaacaanttatgccga

SEQ ID NO: 13103 - DNA, 437 bp, Arabidopsis thaliana
  Clone ID: LIB25-042-Q1-E1-G5
cgtgggctcagatatcgtgattcttgacgataactttgcttctgttgcaacggttttgaaatggggaagatgcgtgtacaacaatattcagaagtttattcagtttcagctcactgtcaatgtagctgctctagtgatcaacttcgtggctgcagtttcagctggagacgttcctttgacagcggttcagttactgtgggttaatctgatcatggacacactcggtgcattggctttagctacagagaagccaacaaacgatcttatgaagaagaaaccgatagggagagtggcgccattgatcacaaacatcatgtggaggaatctactagctcaagcgttttaccaaatctctgtgctcttggtgcttcagtttagaggaagatcgatttcaacgtgactgagaaagtgaagaacacttgatctcaatacattgg

SEQ ID NO: 13104 - DNA, 463 bp, Arabidopsis thaliana
  Clone ID: LIB25-042-Q1-E1-G6
gcttcacacacctttgatcagactggacacacctataacattacccgtatcctcaatgagaagaatttcgatatcaatctagacgcttacaacggttacagcaagctctatttgagtgtgatgttcgcgttgctctatggactcagctttggttctctttgcgctaccatctctcatgttgccctctatgatggaaagtttatatggggaatgtggaagaaggcaaagacagcaacaaaggacaagtacggtgacgtgcattcgagattgatgaagaagaattatcaatcagtacctcaatggtggttcatcgcagttctaagttatttcctttgctttcgcactctatgcttgcgaagggctttgacaaacagcttcagctcccatggtggggacttatactcgcttgcgccatcgcctttgttcctcacattacctaaccggagttatccaagcaactaac

SEQ ID NO: 13105 - DNA, 441 bp, Arabidopsis thaliana
  unsure at all n locations
  Clone ID: LIB25-042-Q1-E1-G7
ttcttcaacttccatttttcgaaaggcgacgagaaaaagtatttctccagttttggaattcgccatggctgttgatagcagaatggatctgctaagcgaaagagctgtgttgatgagagcatctcttcaaaagagtcaaaccatcaccgataatgttgtttctatcctcggctccttcgatagtcgtctgtctgctcttgaaaccgccatgcgtcctactcagattaggactcatgctataaggaaagctcatgagaatattgataggactcttaaggctgctgaagttattttgtctcaattcgatctcctccgtcaggcagagactaaagtactcaaggggccacatgaggacctggaaagttatctggatgcaattgctcaactcagaaagatatcgttatttatgagcaacaaaagcnttaagagtagtgatggagt

SEQ ID NO: 13106 - DNA, 74 bp, Arabidopsis thaliana
  unsure at all n locations
  Clone ID: LIB25-042-Q1-E1-G9
gagaagggcaatatttttggnctatgatggcactctcgttcctgaaagctccatcatcagancccctaatgccg

SEQ ID NO: 13107 - DNA, 525 bp, Arabidopsis thaliana
  unsure at all n locations
  Clone ID: LIB25-042-Q1-E1-H1
tcctgcgnccacggtccggaanaccgggtcgagccccgcgtcccagctnaaactcctgcanaccatgtcgaagcgaangaagacgangaacctctggtaacaagttcaggatgtcactgggtcttccaantggcagccactgtgaactgtgctgacaacaccggagcnangaacctttacatcatttcggttaaaggaatcaagggtcgtcttaaccgtttgccatcagcgtgtgttggtgatatggttatggctactgttaagaaaggtaagcctgatctccntaagaaggtgcttcctgctgtcattgttaggcagaggaagccttggcgccnaaaggacggtgtcntcatgtatttcgaanataatgctggtgtcattgtcaatcccaagggtgaaatgaaaggatctgctaacactggaccaatcgggaaaggantgtgctgatnctgtggccaagaaatcncaantnctgcaaacgccaaccntttaancaanncttganatcccaangttttgngttgg

SEQ ID NO: 13108 - DNA, 444 bp, Arabidopsis thaliana
  unsure at all n locations
  Clone ID: LIB25-042-Q1-E1-H11
gcattaaactacaaatcaaaacaatggcctctctattctcttcagttctcttgtctctttgtttactctcttcactttttctctcaaatgcaaacgctaagccaaaactaggcttcaccgcggatctaatccaccgtgattctcctaaatcgccgttctataacccgatggaaacctcttcccagcgtctacgaaacgcgatccaccgatccgttaaccgtgttttccatttcactgaaaaggataacacaccacaaccacagattgacctcacctcaaatagcggtgaatatctcatgaacgtatccattggaacacctcctttcccgatcatggncatcgccgacaccggaagtgatctcctctggacgcagtgcgcaccatgcgatgattgttacactcaagttgatctctctttgaccctaaaacgtcttcnnatanaaa

SEQ ID NO: 13109 - DNA, 508 bp, Arabidopsis thaliana
  unsure at all n locations
  Clone ID: LIB25-042-Q1-E1-H12
ncctgggctttccgggnccgaaanntcnggttatcccgggcngacncacgcatcctgagnaggaggaagaagacnaagaagaagaggagcagctactaccatggttctcaagacggagctttgtcgtttcagtggacagaagatttacccaggaagaggaattaggtttatccgatctgattctcaggttttcttgtttcttaactcaaaatgtaagaggtacttccataacaagttgaagccatccaagcttgcatggactgccatgtacagaaagcaacacaagaaggatgcagcacaagaggctgtgaagacaatgagacgtgccaacangaagccatactcaangtccattgttggtgctaccttngtactnattcagnataaagagaactgagaaanctgaatttcntgatgcaagncanggaaactgctctgcctgagatnaaggaaaagatcactgagaccacagattgcnaanangctannaaggtggattttgcttcna

SEQ ID NO: 13110 - DNA, 538 bp, Arabidopsis thaliana
  unsure at all n locations
  Clone ID: LIB25-042-Q1-E1-H3
ggnnnnngacggtttccggnncacggtccgganaccgggtcgaccacgcgtccgncaaaacanaattacacanatgggaactaataagattcccaaaaccctcaacgggaaccttgttcttatacttatcatcaccataatgatggtgactcactcccatggatttcaactggagatcaggaacgagctatcaggaaggtacaggaagcttgtgtacaaatgctggtcccgcgataacgatttcgggtggcgacagaactggccaggccagtacaaggactggtccttcgccatttcactattccacacctacttctactgccacttccgtacagcgtatgngacgcgtggataagcagctagtagccgtcatgggagttaaaacaagagtgtggggacaggaganaatgcacttggggtcgttaaagaaaggacgggactctacttgagacaattggaagaccaaanttttttagtaacaangtatggtaacgaaaaggtggaatgtgnaaaattgaacntgaatgtccncangaaa

SEQ ID NO: 13111 - DNA, 309 bp, Arabidopsis thaliana
  unsure at all n locations
  Clone ID: LIB25-042-Q1-E1-H4
tgaacgttctnncgtatgngtggtgatcggntnnctagtgttcgtangctccatgctcgcgcatcgaactacctaccacctatccttctcagttaattcacgggcgatgttacgctcgatgatgagttccggggcctgtgtttcgtacctaatttgaangaattgttgagttcggtttacacccatgcccgcggttctccttcgtggggaagtcctggggcaacaaacatcggngccntgttcacctctcggcanncgcaatttgntgccttggctcgccattggntgaaatgaatttgccgggtttga

SEQ ID NO: 13112 - DNA, 463 bp, Arabidopsis thaliana
  unsure at all n locations
  Clone ID: LIB25-042-Q1-E1-H5
gggcagacatgtgagaggggagaggatcctataaacaatttaaatctaagatctctgcttcctccttctcatatatatattgcatatttacacatagttcctctatacagaaactgatcgagaaaactcacgaaacaagaggctaatcaaaagcatagaagaagaatggtttcaagggaacagaagagaggttctttgcaagagaagtttcaattgcttcgttcaatcactaattcacatgctgaaaacgatacatcgatcataatggatgcatcaaaatatatccaaaagcttaagcagaaagtcgaaagattcaaccaagaccctactgcagagcaatcttcaagcgagcccacggatcnaaaaacaccaatgggtaacagtgggaaaccctagacaagggtttatgataaacgtgtctcagggaaagaatcancaagggatgcttgtttcggtattagag

SEQ ID NO: 13113 - DNA, 464 bp, Arabidopsis thaliana
  unsure at all n locations
  Clone ID: LIB25-042-Q1-E1-H7
gtctgagaaatcagattcaggagcaaatgttgctgtaaatgagaacaatcaagagaatgaaagagctctaggtccatccatctatctaaagggtttaccccttgatgcaacacctgccttgcttgagaatgagttccagaaatttggacttattaggaccaatggaattcaagtgagaagccagaagggattctgttttggttttgttgagtttgaatccgcaagttccatgcaaagcgctatcgaggcatcacctgtcatgctcaatggacacaaagttgttgtgngaggaaaagcgatctaccgcaaganggaactatagaggacgttccacgtttggtgtaaacacacgctacacanacgaacngangaaggggtcntgggagctttggaagtggnatangangntanngccgggccganttcacggntatcgtantntaaggggaaacattccggcgngg

SEQ ID NO: 13114 - DNA, 259 bp, Arabidopsis thaliana
  unsure at all n locations
  Clone ID: LIB25-042-Q1-E1-H8
aacntcnccttccaaatctcgnggtcnaantcttcaccaatcccttcacttcactcctgtaagtcaaaactctaatccctcttctttgttccccgtggaagaagacagcacatacctcaatttagtttttgttttgtctttgctctgtcacaaaatcaaaaacttttcttctgtctttcaaaaatagtgggaattgataggttatagctcgaaatgcntcgtgtttttgccntaaaantggngngaanaagtgggcaaa

SEQ ID NO: 13115 - DNA, 456 bp, Arabidopsis thaliana
  unsure at all n locations
  Clone ID: LIB25-042-Q1-E1-H9
naaccttctaaggtttaagccttctccgttagatttagctttgatgtttaaaaatcttttcaaagttgtaacctttcgaatcttctgaagaaacccatgtccatgaatggtcagagaagctcttcaatttctttctcgcctgagaaaatcctcgaatctcccagacccattcacctgcaacaagcatattcatcagctaatcaattccaattgcggcattctatctctcaaattcttagcttacttagtctccagaggttacactcctcatcgttcttcattcaattcggtcgtancgtttgtttgtaaactagggcaagttaaattcgctgangatatcgttcactcgatgcctaaattcgggtgtgaaccaagatgttanatcttanaactctctcattgatgggcatttgtngaaatgganatatcannantgcnantttgggttttanagag

SEQ ID NO: 13116 - DNA, 191 bp, Arabidopsis thaliana
  unsure at all n locations
  Clone ID: LIB25-043-Q1-E1-A10
tctcttacccnnacggcggcnatgcgctccgcctagagctagttctcgcgccgacgattctccgcccttcgatatgtctgtggagacggcgcttantgttctcggagtctccgnaggagcttncttcgacgaaattcttcgtgccatngaaatcgattctggcttctcgtaaggatgancccaaacgctat

SEQ ID NO: 13117 - DNA, 533 bp, Arabidopsis thaliana
  unsure at all n locations
  Clone ID: LIB25-042-Q1-E1-G3
ggntgnngaatggtctctgggnccacggtccggatnaccgggtcgncccacgcgtccgacanaaacagctcttgacgttacctgaaaatggtgaacttcctgatgatattgagtatgangttgatcttaaggtgacatttgcaaaccataggcttaagagagcgtatattgctctccangcctgnaaaaangcggtgtattcanacncgtttaacaccacaggaaactggcatggccctcatgtgtgtggctatacgggtgtgttctgtgccccggctcttgatgatcctgacgtcgcggttgtggcgggggttgatttgaatggtgcggatatcgcagggcatttaccggctgaacttggtttgatgacangatgttgcgatgtttcatttgaattcaaaccggttctgtggtatcatacctaagagtttcgagaagttgagcctaatgcangactttgatgtcagcaacaancgngtttgtcngancnttcccttcngttgtcctcccntnggncggctgttaagttcant

SEQ ID NO: 13118 - DNA, 347 bp, Arabidopsis thaliana
  unsure at all n locations
  Clone ID: LIB25-042-Q1-E1-D10
aaagagcagnagagtactatcttcctcttaaaccaaccattcaaaatgttgcgtactatcttcctcttatctcttctctttgctctatcnaatgcctctgttcaagatttctgtgtcgcaaanctgaatcgcgctgaaacccctgcgggttacccttgcattcgtcccattcatgtcaaagctacagactttgtcttctctggcttaggcnntcctggaaacactacaagcatcancancgccgctgtcacaccccgctttcgcagctcagttcccgggtctgaacggtctaggnctctctacagcnanacntgacttaactcctaaaggtgtgattccaangcaca

SEQ ID NO: 13119 - DNA, 426 bp, Arabidopsis thaliana
  unsure at all n locations
  Clone ID: LIB25-042-Q1-E1-D2
nnnnngaatggtttcctggcgcacggtccggananccgggtcgaccacgcgtccgagagaacaaaaggttaggctttattgattactagccagctcaattttctttctttctttctttctttctctgggagtttgggattttcttaagggtctttttcaattctcgctccattttgtacgcatagaactgggtttgtgtttacacacataaagctcttatcttttttcttcnttcnaatcgaagaagattatagagcctgagtgactggaantggtnggnttccttggaggttttaatggggaaggttgtttcangcaaancggattaaancanatattgcttccantacatgggctaanttcgaaattcttgaagtagagatggnagcaagggctcgtcgaccgcttccttccctaaaangcccc

SEQ ID NO: 13120 - DNA, 70 bp, Arabidopsis thaliana
  unsure at all n locations
  Clone ID: LIB25-042-Q1-E1-D7
ntcttcntgttctccttctcaagcttttagtcttgacccttctcancaaaatcagttcttgtnaactaac

SEQ ID NO: 13121 - DNA, 463 bp, Arabidopsis thaliana
  unsure at all n locations
  Clone ID: LIB25-042-Q1-E1-E1
gcactttatcacattctctcaccagacacaaactccagattcatccgacaatggaaactttcagaacattccatctttttctcttcttcttcttcttcacattcactacnaccctgacgtcaccatctcagatcgcagactgtacaatgtgcacttcttgtgacaacccttgtcaaccaaacccttctcctcctcctccaccgtcaaatccatctcctcctcctccatctcccaccaccaccgcctgtcctccacctcctagctccagtggtggtggtccttactactaantaccctcctgcttctcaatctggctcttancgtccaccaccttcttcctccagtggtggctactactatccacctcctaaaagtggaggaaactacccttatacancgcctccaaagcctatcgttccatattttcgtttacagtacaacctccgccgcnaatctggttatg

SEQ ID NO: 13122 - DNA, 102 bp, Arabidopsis thaliana
  unsure at all n locations
  Clone ID: LIB25-042-Q1-E1-E10
ttgaaggaattgtcttccctggattctgattctctcaataacctcagnnccgtatacggtctgatntttcgtttcaaatggcatggcnggggaaaaggntga

SEQ ID NO: 13123 - DNA, 475 bp, Arabidopsis thaliana
  unsure at all n locations
  Clone ID: LIB25-042-Q1-E1-E8
ctatgttggagatgcttatgactctggcagcaagattgacgacaatcatattttaaggaagcttaaacccaaggaaatctggcatctgactgtgcttggttcgattgcaaccacacaaagggaatatgttgctttgcatgcgttttcccagcttaacccacagatgcaaaatgcaattctcaagcctagcccagagcagtttcctaattacggggagcagactcctacagtgcccgattgtttcactccgagctttgctggccatttacacagaagctttaatgctcctcagttggcagcaattcactgggccgcaatgcatactgcaactggtaacaagcaagtggggttaaagaagcnagatncaatnggcaattactcctggtcaaggggcctccaagaacangcaagacacncnccagtttggggaaatgttnaaatgttaccaatttggttcaantancagcanntnntt

SEQ ID NO: 13124 - DNA, 454 bp, Arabidopsis thaliana
  unsure at all n locations
  Clone ID: LIB25-042-Q1-E1-F1
acttttcaccaaaatgacattactttcctctctcggaagagcctctcgatctgctccacttgcctctaagctcctcctcctcggcactctcagcggtggaagtatagtggcatacgctgatgctaacgaagaagctaacaaaaaggaggagcataagaagaagaaagtagttgtgcttgggactggttgggctggtataagtttccttaaagatctcgacataacttcctacgatgttcaggttgtgtctccccagaactactttgcctttacgccattgttacctagcgtcacttgtggaactgttgaagctagaagcattgtggagtctgtccgtaatataaccaagaagaaaaatggggaaattgaattgtgggaagcagattgttttaagattgatcatgttaatcanaaagttcactggtccgaccagtttcaanggatgattctgaac

SEQ ID NO: 13125 - DNA, 452 bp, Arabidopsis thaliana
  unsure at all n locations
  Clone ID: LIB25-042-Q1-E1-F11
ttgagtncgacacattatcagggattctaacagctaaacatctcaaaaatgatgatgatggagaagaatcaagtatcgaattggatttccctgttgttccaacatatgaagtcaactacattgatgatgatctctctttgttctccaaagccttgaatggagctaccattcttgatgtcaaagccacaaagaaagacctcctcgttgtgctttcatcttgggaagctgttattgatttgaagccaagattagatgagatatcgaaatgcccttgtgaaggaatgatggtgactgccgctgcttctgatggatctacttatgatttctgtagtcgctactttgccccgagattcggaatcaatgaggaccctgttactgggaagtgctcattgtgctttagctcattactgggagcctcangatgaacaagtgtgaattcctcgcctaacaag

SEQ ID NO: 13126 - DNA, 539 bp, Arabidopsis thaliana
  unsure at all n locations
  Clone ID: LIB25-042-Q1-E1-F2
gggnnnnnnggaanggttttcctggngccacggtccggannaccgggtcgagccacgcgtncgcgtnnaaatgaattgaacagtcagcatcgttttgcttgcttgtgcgtttctctcgaactctctccatgggctgttgcgctccaattcagccgattatgcgttcgaccggatactttcgtgcgggagaatcatctctctggatccggatctctccgccgccggaaagctttatcagtccggtgctcgtctggcgatgagaacgctccttcgccatcggtggtgatggactccgatttcgacgccaaggtgttccgtaagaacttgacgagaagcgataattacaatcgtaaagggttcggtcataaggaggagacactcaagctcatgaatcgagagtacaccagtgatatattggagacactgaaaacaaatgggtatacttattcttggggagatgttactgtgaaactcgctaaagcatatggtttttgctgnggtgttgaagcgtgctgttcaaaantgcntaangaagcacc

SEQ ID NO: 13127 - DNA, 532 bp, Arabidopsis thaliana
  unsure at all n locations
  Clone ID: LIB25-042-Q1-E1-F4
ggnnnnnngaatggtttctggnncacggtccgganaccgggtcgagccnagcgttcggcttnnacttnnatttnaaatacccttttcctcnctttctccaaatctctgaaaattttcaccagaatctctgttctttttttcaccagaatctctctgtttaaaataataggtgatgatgatggatgagtttatggatcttagaccagtgaagtacacagagcacaagactgttatcagaaagtacactaaaaagtcgtctatggagaggaagaccagtgttcgtgactcggccaggttggttcgggtctcaatgacggatcgtgacgccactgattcatcaagcgacgaggaagagtttctgttccctcgaagacgtgtcaagagattgattaacgagatcagagtcgagcctagcagctcttccaccggcgacgtctcggcttctccgacgaaggaccggaaaagaatcaacgttgattctacggttcaaaagccctctgtttcccggccaaaacnagaagaagttaccgcg

SEQ ID NO: 13128 - DNA, 300 bp, Arabidopsis thaliana
  unsure at all n locations
  Clone ID: LIB25-042-Q1-E1-F5
gttgaaggaancagcgaacgcattattgcgactattnantctgagaaggaaganctggaggcancactgaacaaagagaggatgcagactctccaactaaggcaagagttagganaagcanaattacgaaacacagatttgtacaangaacttcaatctgttcgtggccaacttgcagccgaacaatcaaggtgtttcacactggaggttgatgttgcagagctaatacaaaggcttcanncattggaancactacagntaggaactcgaactcctgcaacgtcanactgctgcctcana

SEQ ID NO: 13129 - DNA, 531 bp, Arabidopsis thaliana
  unsure at all n locations
  Clone ID: LIB25-042-Q1-E1-G1
ggnnnnnngacggtttcctggcncacggtccggaaatccgggtcgaccacgcgtccgaaaggaacaaancaagcaaggatctgtttcagagagaaaaaaaagaggttccgactttttgttagctagcggctcactctactttgtctcccccaaaaaagccgttagggtttatcatatccaccgccttgctttactctcgccggagtcgtacggcgaagcacggttgttcggcgttgtctcagctttagattcttctcttcatagctagaattcgcgaaagctgactttagctgaaacgaatttctcctaattttcgagatatggcggaggtatcgatgggaagcagcagtagcagcacggatctgtctcccgaggaagagcgagttttcatcagagacattgctattgctgctgaggctaatagtaaagaaggcgatacattttatctcatcactcagagatggtggcaagaatggattgagtatgtgaatcaagaccaaccatgtaacacaaatnatgggtcctcactgg

SEQ ID NO: 13130 - DNA, 422 bp, Arabidopsis thaliana
  unsure at all n locations
  Clone ID: LIB25-042-Q1-E1-G10
gattttttcaaataaaataaaataacggaagctggtttanagaacaccgttganttctattttcccatangctgaaaanaanactaaatttttgtgttgcccaccanaaggtttgaaattttgatccgacgatacttgagctgatttacgttattagtgctatttcgatttcctcaaagatttcgttttttttttccttctaaatttcttaagttaacctccttgcgtgtgcaattggtgcacttaagcaattcctcttctggggctggtgatttggtttgcgattggttttttttttttagggtttgattgggtcgtgggcctgatttttcnnctaattgcnggcaacagagtctgtgggaggnttgantttggnntnaagtgttaccttttttgnntggggggattcacattcaatcngg

SEQ ID NO: 13131 - DNA, 526 bp, Arabidopsis thaliana
  unsure at all n locations
  Clone ID: LIB25-042-Q1-E1-G11
nngnnnnnnnnggggnganggtcncctgggttnccnggncgantcccggatagacccacgcgnccgaaagacctgagcaaaaactgaaagaaaaaaaaaaaaaaaaaaaaaaagacttctcctcaaaaatggcgtttacactaggtggaagagctcgtcgtctagtctctgcaacatcagttcatcaaaatggttgcttacacaaactgcaacaaattggntcggatcggtttcagcttggtgaagcaaaagcaataagattactacccaggagaacaaacatggttcaagaattaggaatcagggaagaatttatggatctaaacagagaaacagagacaagttatgattttctggatgaaatgagacacagatttctgaaattcaagagacaaaagtatctaccggagatagaaaagtttaaagctttggccatagctcaatcaccaaaggtaatggtgataggatgtgcagattcaagggtatgtccatcttatgtnctaggatttcaacctggtgaagcntt

SEQ ID NO: 13132 - DNA, 55 bp, Arabidopsis thaliana
  unsure at all n locations
  Clone ID: LIB25-042-Q1-E1-G12
gggaagatggccgcaccgattcgccttctcancagtttgcgcaccctgatntggg

SEQ ID NO: 13133 - DNA, 513 bp, Arabidopsis thaliana
  unsure at all n locations
  Clone ID: LIB25-042-Q1-E1-C9
ggngaanggtttganntgnncnccgagntcgaaatcccggganagannttttcnnacgatatngataatgantatgagaagctgataagaagaatgaatccaccaagggttgtgattgataatgactcttgcaagaaggcaactgtgataagggtggatagtgcaaatgaatatgggattcttcttgaagttgtacaaatccttactgatcttaaccttactatcactaaggcgtacatatcttctgatggtggttggtttatggatgtatttaatgtcactgatcaagatggtaacaaagtcactgatgaagttgttctanactatatccaaaagtctcttgggcctgaagcttgtttctccacttccatgagatcagttggtgtcataccatcaacagacagcacggttattgagttaactggatgtgacagaccaggtctgctgtctgaactgtcagctgttttgacccatctcaaatgcagtgtcctcaacgctgagatttggacacac

SEQ ID NO: 13134 - DNA, 82 bp, Arabidopsis thaliana
  unsure at all n locations
  Clone ID: LIB25-042-Q1-E1-G2
cggggaatgaagtcacgatctccggngaatcgaggaataaagtaactaacttgggagataacgatnccgttaaattggngaa

SEQ ID NO: 13135 - DNA, 510 bp, Arabidopsis thaliana
  unsure at all n locations
  Clone ID: LIB25-041-Q1-E1-D11
gnnngnnggaactgngtcngctttgnactgcccgtccggacgatcaaaaggtcgacccnngcgtccgtttantggtattgcctaaaccattggtgtttaagagtaataaggatcagtttaagtttgtggagccgcggctaacttatgggacgattggtggacggtttaggaaaggcgagaatccgtttgtcgaagaagcgtatcagcgagttgcgttggatcagttgcttaggattgctggtattcaagaagatgatttgttgataatgtctgatgttgatgagattcctagtgctcatactatcaatcttttgagatggtgtgatgatattcctccagttcttcaccttcagttgaagaattatttgtattctttcgaatactatgtcgatagcaagagctggagagcgtctatacaccgttacagtccagggaaaacgcggtatgctcatttccgtcagantaatgttatgttaaccgaatctggatggcantgttncctctgtttcc

SEQ ID NO: 13136 - DNA, 443 bp, Arabidopsis thaliana
  unsure at all n locations
  Clone ID: LIB25-041-Q1-E1-D12
nntctctccatctctctcaagacgccggcgaccattgtaatccgacgatctctctctttcttgttcttctccatcgtgatattcatctctctctctctctttcttgttcttctccatcatgatatttatctctcgcttctgccggcaaaatctctccaacatttcatccttcgaattgagagagttgcaagtcataattacttgtttgagccgctattatcatcatctgcatgataaatggttaaatggagaagtggatacagttgctagaatgattgatgtctgttgtgtaaggaattggatacaattaccgaatggaangctcatagaagctagactaaaggatggattacaagaacacacaaagacatggcttcttttaaggctgaactgctttaacactgggtaagaaactatctctcaatatcctaaaatcgattatg

SEQ ID NO: 13137 - DNA, 446 bp, Arabidopsis thaliana
  unsure at all n locations
  Clone ID: LIB25-041-Q1-E1-D3
taaaaatgacaactccagcagtgaagaccggtttgttcgttggattgaacaaaggacacgtcgtcaccagacgtgagctagctcctcgtcccaattctcgcaaagggaaaacgagcaagaggaccatattcataagaaaactgattagggaagtagctggaatggctccttatgagaagagaatcactgagcttctcaaggttgggaaagacaagcgtgctcttaaggttgctaagaggaagttgggtactcacaagagagctaagaggaagagagaggagatgtctagtgttctccgcaagatgaggtctcttggtggtgctgctgctgctgagaagaagatgtagacatcttattangcttctgtgttatggcatatttctttctattggaaatcaagttttggcttctgtatgctcaaaaagcgtttatgtgttgtgctttgt

SEQ ID NO: 13138 - DNA, 444 bp, Arabidopsis thaliana
  unsure at all n locations
  Clone ID: LIB25-041-Q1-E1-D7
aactacaacgctctttctccgtaggaaaggggaancaaataaattatcnanncccactggtttcgganctgatcggtctctagttctctcttcatacatatcncatcagataaagttgatcggacactataatgggangaggatttatgagttttgcatttggtgaggccaattcttggcttntctgcctgaggttcagagtgctgataggaaggttccattcagagagaaggttatctacactgtcatctctctcttnatcnttcntgtctgcaatcagcttcctctttatggaatccattccaccaccggtgcggatccattctattggatgcgtgtcattcntgcgtccaancgtggaactgtcatggagctcggtattactcctantgttacatctggacttgtgatgcaactcttggcngggtnccaagattantgagg

SEQ ID NO: 13139 - DNA, 432 bp, Arabidopsis thaliana
  Clone ID: LIB25-041-Q1-E1-E10
gctttgagatcttagccattaagttctcttgatgatgtctggttcaagattagcctctagactaataataatcttctcaataatctccacatctttcttcaccgttgaatcgattcgactattccctgattcattcgacgatgcatcttcagatttaatggaagctccagcatatcaaaacggtcttgattgctctgttttagccaaaaacagactcttgttagcttgtgatccatcagctgttcatatagctatgactctagatccagcttacttgcgtggcacggtatctgcagtacattccatcctcaaacacacttcttgccctgaaaacatcttcttccacttcattgcttcgggtacaagtcagggttccctcgccaagacctatcctctgtttttccttctttgagtttcaaagtctataccttt

SEQ ID NO: 13140 - DNA, 437 bp, Arabidopsis thaliana
  unsure at all n locations
  Clone ID: LIB25-041-Q1-E1-E11
gggtgaggtgctacaagcatgagaagctatgggaaggcatccagtcgcttggaagtctcgaagagatggatctgtcagaatctgaaaacctgacagaaattccagatctttcaaaggccaccaatctgaagcatttatatctcaacaactgcaaaagtttggtgacacttccttctactattgggaatctccaaaaattggtgaggttggaaatgaaagaatgcacagggctggaggttcttccaaccgatgtcaacttgtcatctctcgaaaccctcgatctcagtggttgctcaagtttgagaacttttcctctgatttcaaagagtatcaaatggctctatctggaaaacancgccattgaagaaattctagatntttcaaaaggccaccaagctcgaatcctttgatactcaacaactgcaaaatttggtgac

SEQ ID NO: 13141 - DNA, 510 bp, Arabidopsis thaliana
  unsure at all n locations
  Clone ID: LIB25-041-Q1-E1-E12
ngnnnngnnggaantggttctgcttggntctggccgtccggacatccangggtcgacccacgcgtccgcccaagcgtccgggaaacagagaggtttggttttgcgttgcgtgagctgtttcctctttaactctctcttcttctacctcttgaccctctctctctctctctggtgatgcggtttcttccttggaagccatgaaaacacaatcagcttcaccgttcttcttcgtctccttcttcttcttcttcttcttcttctcttctctgtttcttctctcctctgctttaaactctgatggagttctcttactgagtttcaaatactctgttcttcttgatcctctctctttattacaatcatggaactacgaccacgacaatccttgttcatggcgaggtgtgttgtgtaataacgattcaaagagttgttactttatctctcccaaactctaacctcgttggttcgattccttccgattctgggttcctccaaaacctccaaaagtct

SEQ ID NO: 13142 - DNA, 452 bp, Arabidopsis thaliana
  unsure at all n locations
  Clone ID: LIB25-041-Q1-E1-E2
aaagaagggtcttagtgacttggcctgtcactatttcagtaaagctggggtaagtgcaatccgaaggttgagaaaaactgacaacaacagaatcgccaaggcttgtggagcagtaattgtgaacaggcccgacgaactgcaggagtctgatatcggtactggggctggcttgtttgaggtcaagaaaattggagatgatttcttttctttcattgttgattgcaaagaacccaaagcctgtactgtactcttaaggggaccaagtaaagatttcatcaatgaagtggaaagaaatttacaggatgccatgtctgttgcaagaaacattatcaaaaacccaaagctagttcctggtggaggagccacagagctaaccgtttctgccacattaaaacagaagagtgcaacaattgaaggcatagaaaagtggncttatgaagcaactgccattt

SEQ ID NO: 13143 - DNA, 405 bp, Arabidopsis thaliana
  Clone ID: LIB25-041-Q1-E1-E4
caactgaaagacagagatacgacccaaacaaatctgacacttctcaccagttttgctcggcaaggaagaatttttctggggcttcctatctctggacaagacgaagattttttcaagggtctcgacgtcactgcagatcagaaaaagagttttaagaaagctttcaacacatattatgatgctcttgcagatctccttcagtctgagcacaagttacttctccaaatggagaaagaaaatgcaaagctggtaaatgctaaaggagagcttagtgaagacagtgcatcttcttatgaaaagctgaggaaatcatacgaccatctctatcgaaatatctcatctttgggccgaagcacttgatatgcaacctcctgttatgccagaggatggtacaactacgctcac

SEQ ID NO: 13144 - DNA, 429 bp, Arabidopsis thaliana
  unsure at all n locations
  Clone ID: LIB25-041-Q1-E1-E6
tcatctcttctccgttcatcttccggtagatctgccgccaaattagtcaaccgaaaccccaggcttccttctccttcacccgcgcgtcacgccgctccatgtagctacctcctcggccgcgtcgccgagtatgcgacctcttcaccggcaagctctgctgcgccatcctctgctcctgctaaggatgaggggaaaaagacctatgattacggtggcaaaggtgcgatcgggcgtgtttgtcaggtcatcggtgccattgtcgatgtgagattcgaggatcaggaaggattgcctccgatcatgacatctcttgaggttcaagatcatcccacaaggctggtgcttgaggtgtctcatcatttgggtcaaaatgtcgttaggancattgctatggatggtactgaaggtcttgtccgtggaangaaggtt

SEQ ID NO: 13145 - DNA, 446 bp, Arabidopsis thaliana
  Clone ID: LIB25-041-Q1-E1-E7
agagagaagatagaaacataaaatgtcggagaagaagggaaggaaagaggaggtggtgaccagagagtacaccatcaaccttcacagacgccttcatagctgtacctttaagaagaaggctccaaaggcgatcaaggagataaggaagtttgctgagaaggaaatggggacaaaggatgtgagagtggatgttaaattgaacaagcagatttggagcaaaggtatcagaggtcctccgaggagaatcagagtccgagttgctcgtaagagaaatgatgatgaagatgcaaaggaagagttcttctctcttgtcactgttgctgaaatccctgctgaaggactctctggcctcggcactaagatcattgaagaagaggattaaactatcttatagtaacaacaacatttgatcagatttttcgagttttgtttttcgaatccttatt

SEQ ID NO: 13146 - DNA, 445 bp, Arabidopsis thaliana
  unsure at all n locations
  Clone ID: LIB25-041-Q1-E1-E8
anagataaggatatggcctttacgaacgtttgcctatggacgctactcgccttcatgctgacttggacagtgttctacgtcacaaacagggggaagaaggcgacgcagttggcggatgcggtggttgaagagcgagaagacggtgctactgacgttatcatcgttggggctggagtaggcggctcggctctcgcatatgctcttgctaaggacgggcgtcgagtccatgtaatagagagggacctgagagaaccagagagaatcatgggtgagtttatgcaaccaggaggacgactcatgctctctaagcttggtcttgaagattgtttggagggaatagatgcccaaaaagccacgggcatgacagtttataaggacggaaaagaagcagtcgcatcttttcccgtggacaacaacaattttccttttgattcttcggctcgat

SEQ ID NO: 13147 - DNA, 444 bp, Arabidopsis thaliana
  unsure at all n locations
  Clone ID: LIB25-041-Q1-E1-E9
cacaatcattctctcttctctctccctctctgttctcaaactccattttagtagcaagcttagatctcctccttccacagtcactttctcttctttctctgcttttgtttcttcangcgatttgcttcagatttccccagattatatagaattcgatgtcaagacacagaattcacatgggttttgtctaaaaatcataaaaatcatatctttttacggatttgaagatgaatcagaattcctctgttgcggaggcgacgcttcagcttaattccggtgaaaaaccatcgccgggatngattccgtttaactcctctgggtcaacacggaaacataagcacttcagcgacgagttcgacaagcacaagctcangtantgctcttgccgtagttaaatccgncgtgaaaaaaccaaactanaagatnggnatactaaagtcgatg

SEQ ID NO: 13148 - DNA, 103 bp, Arabidopsis thaliana
  unsure at all n locations
  Clone ID: LIB25-041-Q1-E1-F1
tgtcngaacttcttggtgttgatgttgtaatggcagatgactctantggtgacggaagtccataagttggttgcaagactacctgaaggtngtgttttgcncc

SEQ ID NO: 13149 - DNA, 422 bp, Arabidopsis thaliana
  unsure at all n locations
  Clone ID: LIB25-041-Q1-E1-F10
attgacaaagtactcaattccaaaacaaagaataagcaaacaacaacaattttcacttccttcaaaaattataaaaatccagtttttatctttgcaagattcaaaagtttgaatttttacttgttttgatttctgggttttgtttgttttttgatttcggtaatgatacaattgagattttgatttcgtgtgatgttgagagattcttaaatgggtctatgtacttcgaaaccgaattcatctaattccgatcaaactccggcgaggaatagtccacttccggcgtctgaatccgtcaagccttcgagctcttccgttaatggtgaagatnagtgtgtaacaacaacgaacaatgaaggcaaaaagtctccgtttttccctttttatagtccaagtccaactcacnaattcctctccaaaaa

SEQ ID NO: 13150 - DNA, 443 bp, Arabidopsis thaliana
  Clone ID: LIB25-041-Q1-E1-C6
tgaacaaccaaagaagttgcagagcacacacacacactttcaagtttcaatacagagatggcgagcactgagccagagcgtgagaaccgtgaagatgaaaccgaagtcaacgaagatgaagacaccggagctcaggtagctccgatcgttaggcttgaagaggttgcagtcaccaccggcgaagaagatgaagacgccgtcctcgatctgaaatcgaagatgtatcgattcgataaagaagggaaccaatggaaggagagaggagctggaactgtgaagttattgaagcataaggaaactggaaaagttcgtcttgttatgagacaatctaaaaccctaaagatctgtgccaatcacctcatttcgtctgggatgagtgttcaggaacatagtgggaatgaaaagtcttgtttatggcacgctactgatttctccgacggcga

SEQ ID NO: 13151 - DNA, 446 bp, Arabidopsis thaliana
  unsure at all n locations
  Clone ID: LIB25-041-Q1-E1-B10
gaatctcatagggattcaaaattaagaagaaagggtaaaacaacaagaattgggtccgttgactaacttgtgtttttgctattccttgtttttgggcatcacaaatccattgtaggagcggaatacatgtttcaaaacgtttggaggggtcaaagcaaggagatggtaagtcaggtgatacgagcttcaatgtgcttcgtcgccgtgctttcgccaaaggagaaagatctaatcaagaagctccccggacaaccttccgggcgttagttttagacagtatggcggttatgtgcccgtaaacgaaccatccagtcngtttttgtactattattttgtggaagccatcaaacccaatacatctactcctctggtcatctggttcaacggangaccnggcctgctcatctctangtggggcatttctaaaagcttggtcccttccgcgg

SEQ ID NO: 13152 - DNA, 512 bp, Arabidopsis thaliana
  unsure at all n locations
  Clone ID: LIB25-041-Q1-E1-B11
nncggnnnnnnnggaactggtcntctcgctctgntctccgganatcgaaggtcgacccaggcgtccgcantatccanccaaaaccagttctctcggcctttgagttcagggcacttgcaatgactacagtgagatcccttttgatgttttatttgcctcttttggagcctaaaacggcttcagaggatgatgatgatttcctaaacaatgctgcagaagaaaaccgccacacagacttgattgttcctcttaaaaagtcagcaaagcaaattgcccgtgagaccacagttgtgaccactcggagagtccttgaaaggctggctctgagttatgtctcacagcgtatggcatggaaacttctaaaggatgtgcctcagtcggctttacgcaaggctcagagagggttgccgacacatgtatatatctttaaagtcagccaaacaactcttagaggtcacttcctgggaatcgcagcatcatgggtagttcaagtaggcattgaaatctacaga

SEQ ID NO: 13153 - DNA, 425 bp, Arabidopsis thaliana
  unsure at all n locations
  Clone ID: LIB25-041-Q1-E1-B12
tcctatccttgtttccaaacgggattacggttaacgacggcgatggcgccggaaattcacctgaaaccgaagaaccctagaattttatgccttcatggattcagaactagtggtcggattctccaagccggtataggtaaatggccggacacaattctccgagatctcgacctcgatttccttgacgctccttttccggccaccgggaaatcggacgtcgagcgtttctttgacccaccgtattacgagtggtaccaggctaacaaggggtttaaggaatataggaattttgaagagtgtttggcttatatagangactacatgataaaagaatggaccttttgatgggtcttcttggtttttctcaagggagcttttctaactgcagctattcctggaatgcaagaacagggatcggctcctaa

SEQ ID NO: 13154 - DNA, 450 bp, Arabidopsis thaliana
  unsure at all n locations
  Clone ID: LIB25-041-Q1-E1-B2
atttcaagggttttgttcttacagcccagtattcgcaaactcaggaccttttcacttctcgtcttcaaagccagatagagaaattgcccaaattggttgaggatatagttcagacatcgataaacacaggtccacgaggtgtgacacgccttgtccaaggtgttcaagcctttgtaggggttggaggagagtggctaaatgatttatctaagtctacaagcgcgtctggtggattaccaagtgaattgcagcttggtctactgtctcctctatatttgaggaaactctttgaacgcatgggagctacttacattaagctgggccagtttatagcatctgcgccaactttgttcccaccagaatatgtcaaagaatttcagaactgctttgacaaagctcctcctgtgccaattggaagaaattcgtaaaatcttgcaagangagcctggg

SEQ ID NO: 13155 - DNA, 452 bp, Arabidopsis thaliana
  unsure at all n locations
  Clone ID: LIB25-041-Q1-E1-B3
tngtttaantctcttcttaatctcctccttcatctctacttctcttgccgtcgaacctccgcctgaaacaatctaccaaaactttctccaatgtttcacaaaccaaacaaaagctcctcctaactcattagccgacgtcgttttaccaaaaaccgctgccgctttcacccccgtcttacgcgcttacatccgtaacgcgcgtttcaacaccacagcgactccgaaacccgcgatcgtaatcgcggcgcgttccgagagtcacgtccaagctgccgtcatctgcacgaaatcgctaaacatccaactgaaaactcgaagcggtggtcatgactacgaaggtgtttcctacatctctcacgttcctttcttcgtcctcgacatgtcaaatctccggtaacatcaacgtcgaccccgccacaagagtctgcatgggtcggtgccggtgcaacact

SEQ ID NO: 13156 - DNA, 529 bp, Arabidopsis thaliana
  unsure at all n locations
  Clone ID: LIB25-041-Q1-E1-B4
ntgnnnnnnnnggtngnggantggtctcctggtctctacggcccggacgtcccggatcgacccacgcgtccgatttgcctccttgaaaatttccaatgacgaagaaactcaatccactggaagatccaccaacggcaacttcaagcgacgaagatgacgtcgagacttccgaagctggtgaagcttcagacgattcctcttcatctgaagaagacgtaccaatcaaaattcgaatcaaatccccttccgccacaaccgccgccgctcctccagctaaatccaccgccgtctccaccgccgctgattcagattctggatccgagactgaaacagattcggattctgaatcaacaaatccaccgaattctggatctgggaagacaatcgctttaaacacagtgaatctaaagaagaaagaggatncaacgtcgtcgtcagctactttagctttaccggcgatgaaatcaggaacaaaacggccagcgagtgaagctgctgctacgacttcaacgaaacgaagtgaagaaag

SEQ ID NO: 13157 - DNA, 438 bp, Arabidopsis thaliana
  Clone ID: LIB25-041-Q1-E1-B8
taaaaattcaataattgaacctcctctctctctctctcttctctcccttcttcttctccgatttcgactttgaatcatttcttcgagagaggtagcgagaaagggatcgccttttctcactctctgcggattctcaattttgggcaagaaggcaagaacagtttttatcgcaattgagtcttgaagaccacaaggatttgatcacattggtgcttctgcctgtttatctgagtttgaggacaagaacttctggggcgtttataatttgccatgtaatgagaatctaccacccaatgttatcaagcagcttgccaaggagctgaagagtcttgacgaatcccctccagatggcatcaaggttgtggtaaatgacgaggatttctcacaaatatgtgctgatattgaaggacagttggtactccttatgagaacggactt

SEQ ID NO: 13158 - DNA, 515 bp, Arabidopsis thaliana
  unsure at all n locations
  Clone ID: LIB25-041-Q1-E1-B9
tgggngggaggaactgtcntcctncgtctngcctccggtgcntccaaggtcgacccacgcgtccgcgcaaacacaagaacgtgtatatatacacaatatatatacgtttccgtgtatctatcatacacacgatgtctatcaatccgtatgtgacaatcttcctcctcctcgccgctacctcaagnnaagcgttgagtatttctctagctgacccctgcacggtgtcggattttcctgcattgtgcagaagtaccattaagggtcaaactaatgtgaatgcagcgacggatgtggccataaaagagttgatgaagcggacgaggcaagccaagaaaatcgcggagaaagagctgaaacgcgatggaggagtcgcgacttgtttgtccaacttcaatagcgcgtttgataatttggaaaaggctcttacaaacattaaggaaaatgatggttttaacccttaacattaaccttagcgccgcccttgacggattacgaatactttgcaacngactcga

SEQ ID NO: 13159 - DNA, 516 bp, Arabidopsis thaliana
  unsure at all n locations
  Clone ID: LIB25-041-Q1-E1-C1
ggnnngactggttncctgnctctacgggcccggaaatcccganacgacccacgggcccggttncgcgtaaacactacgcgccgccgtaagcttgactatctagttcaagtcttccgtcatgtctacgacttcctccgtgcgtgttcgactagctttcgttgcgttactctcagcgacgactttnnactgtatccataaatatcgtcgcttgaaacatctgaaaaacctctcgttaaaccctagctctacattgaaagccagcagaggaaagatcttcttcatctcccaaactggtacagctaaagccttagctcaacggcttcacgagctatgcgcatctaacgacatagcatttgatatcgtcgattcacatanctacgaacctgaagatctacctaaagaaaccctacttttattcatcgcgtcgacttggggatggcgggaagccgcctaagaacggagagtttcntgtgaactgggcttgggtnagagccgctgaaagatttccgagtcggg

SEQ ID NO: 13160 - DNA, 445 bp, Arabidopsis thaliana
  unsure at all n locations
  Clone ID: LIB25-041-Q1-E1-C10
agtttcaacatttgtctcttgaaatcgatcgccgtttttctccatcctccgttcataattccggcaccgtttatccaaaatctacacttggctgaaaacatgagtcgtaatccggaggttctttgggctcagcgttctgataaagtttacctaactgtcgccttacctgatgcgaaggacatttcggtgaagtgtgagcctcagggtctattcagtttctctgctcttggtgcccaaggcgaacgctttgaattcagcttggagttatatgggaagattatgacagaatatcggaagaatgtagggactaangaacatcatattttcaattcanganagaagagagaagctggtggacacgactgctgaaatcggaagagaaacctggcancttacatcaaantcnactggaataaatgggtgtgatgaaggatgangaggtcaa

SEQ ID NO: 13161 - DNA, 508 bp, Arabidopsis thaliana
  unsure at all n locations
  Clone ID: LIB25-041-Q1-E1-C11
gntngnngaactggtccactccggactgntcgtccggttntcanaggtcgacccaggcgtccgtgaaacaacaacctccgtttgaggttttgccgggaaaatataaagttcacaggctttggtctctgcatttgcaatatatttaaaatggcagcagctttcttgaatcttggcggctatgttttcgttttcttctcttcgttcttagctatagtggccccacaggttcgaggcaatgttgctgtctttgatagctactggacgcaacgacaaagtgatgcattgaaacaaaccatcggctcttacgattctcatccacttaacgtcaccaaccattttaattaccatgtcaatatagcagtggatgcatcggaatcaaggaacgatacaaggagagagcttactcaggtgagaagtggtcgtaaaacgcacaaaancagcggaaaatgcctaacttataacccgatagacaactgctgggcgaatgcnatngtaactgggctaataa

SEQ ID NO: 13162 - DNA, 451 bp, Arabidopsis thaliana
  Clone ID: LIB25-041-Q1-E1-C2
ttttttcatttcttcctccagagagagagagagaagccacaacaagaagaagaagaagaagaagaagaagaagaagttctggaatagtcatcatcttctctgtttctaggctttgtttatttgtctctaaagtttctggattcaacttctgaagaagatagtagtagtccacaagaaggatcttctttaccagaaagttgatttggtcagagccaaggaagatgggttacatgtgtgacttctgtggtgaacaaagatctatggtgtactgtcgatccgatgcagcttgtttgtgtctctcctgtgaccggagtgttcattccgctaatgcattgtccaaacgacattctcggacacttgtctgcgagagatgcaatgctcagcctgctactgtcaggtgtgttgaagaaagggtttcactccgtcaaaactgtgactggtccgggccaca

SEQ ID NO: 13163 - DNA, 446 bp, Arabidopsis thaliana
  unsure at all n locations
  Clone ID: LIB25-041-Q1-E1-C3
aacgtgaacagagtctagagatggctaattcctcctccttctccccctctaccaccgtaacagatttaatctccaccgtccatgacgacatcatagagtctcacatcttgacacgtctcgacggcgcaaccttagcatccgtctcttgcgcctcctcacatcttcatcatctcgcttccaatgagatcctctggtccaaaatctgccgatccacgtggccttcttgctccggtggttctcgttctttcttctccgacgcttattctatggtggaaaccgccggtacagtctctgatctcgaccgtccgtttccggaattgatctccgccgtggatcttcactacagagggaagttgatttttagtagagtcgtgaagacggagactacgacggcgtggtttaaagagttcgccgttgangattgatctggtggatacaaaaggata

SEQ ID NO: 13164 - DNA, 421 bp, Arabidopsis thaliana
  unsure at all n locations
  Clone ID: LIB25-041-Q1-E1-B1
tgncaantnatnatccgncnangacccacgggcccgctnaaactccagaaaatgagtttcttcaatttctcgtctttctcgtccaattcgaacaggagactcgctaaccaacgtcgattcaacttgcccatctccaaattccactactatcgcgtttcnnttcggngagtctcggctcggttcggagagacctcgaggcgacgtaattcgctgaggaagaagatcatcggtgatgagtattggcgttcgactccgaaatcttctgaaccaggtacgaaacctctaaacgaaagccataagtttggtcactgtgatgatttaagtagcaccganggatttgcaanataggggttgctcaacgnttcacanttttgctgaantgagctttgaatgaattggggtntgctccngttagtnanaa

SEQ ID NO: 13165 - DNA, 457 bp, Arabidopsis thaliana
  unsure at all n locations
  Clone ID: LIB25-040-Q1-E1-G8
gcttcgatcgtagaaaccttgaaaatccgagacatccacaatgccgccaaagttggatccgagtcagatcgttgacgtgtacgtccgagtaaccgggggagaagtcggagcagcgagttctctagctcccaaaatcggtccgctaggtctcgcaccaaagaagatcggagaagatatcgcgaaagaaaccgcaaaggaatggaaaggattacgtgtaaccgtcaagctcacagtgcagaatcgtcaggcgaaagtgacggtggttccatcagcagcagcactcgtcatcaaggcgttgaaagagccggagagagataggaagaaggtgaagaacattaagcataacgggaacatctcgtttgatgatgtgactgagattgctangatcatgagacctanatctaattgctaagggaattgaattggaacagtgagggaaaatcctgggaacttgtgt

SEQ ID NO: 13166 - DNA, 160 bp, Arabidopsis thaliana
  unsure at all n locations
  Clone ID: LIB25-040-Q1-E1-G9
gtttgacgatngtgacccacnaactacgaatctgtntgttgggaatctgtccccaaaggttgatgangaatttccttctgcgcactttcggaagatttgggcccatagctagtgtcaggattatgtggccagagaacagatgatganaagangcnacaaa

SEQ ID NO: 13167 - DNA, 453 bp, Arabidopsis thaliana
  unsure at all n locations
  Clone ID: LIB25-040-Q1-E1-H1
atctaatcttaatgctcttcagtctggttgttgtaagccgtccaatgactgtaacttcacctatgtgaacccgactacttggacaaagactcctggtccatacaaaaacgaggactgtaatgtgtgggacaacaaaccaggaactctctgctacgactgtgaagcctgcaaggctggtctgcttgacaacatcaagaactcatggaaaaaggtggctaaggtcaacattgtcttcctcatattcctcattatcgtctactctgttggttgttgtgcgttcaggaacaacaggaaacgcagttggtaatagattctaatgcgttgaaaccaagactaaggccaagagaagatatctgaagtgtcatcatcttactgtcaaagtaagttaaagcancatttaagacaactcgttgatcgccttgtccttgtgtgtggggattgcaatttcaatgt

SEQ ID NO: 13168 - DNA, 75 bp, Arabidopsis thaliana
  unsure at all n locations
  Clone ID: LIB25-040-Q1-E1-H10
tcntccgcntctgtcgtcctccgcaactcgtgccatctccctcaccgtccgtgccgcttcctcctacgccgatna

SEQ ID NO: 13169 - DNA, 435 bp, Arabidopsis thaliana
  unsure at all n locations
  Clone ID: LIB25-040-Q1-E1-H2
gatcttatccttatcttcttccttgttctatttctcttctaactaatctcttctcttctcttaaaatcaaacgtaatcataaataaagatcttcttgttnaatttctcttgatcctcgcaaaatcacagattcttgaaattcttttttcttgtcttgaaattcttgagttcttgagttatgaaaagacaatggacagagttatgaaatgataaatctcaaccaattccttgtttatcattctatatcagttgtgattcttcattggttttacgttatctcttgaacaaaaaaacatggcaaacgcagagaagacaagttcaggttccgacatagatgagaagaaaagaaaacgcaagttntcaaaccgcgaatcctgcaangangtccgtttgaagaaacagaagtttaatgggangacacgantcatgagattc

SEQ ID NO: 13170 - DNA, 453 bp, Arabidopsis thaliana
  unsure at all n locations
  Clone ID: LIB25-040-Q1-E1-H3
tcagctttgtctgaagctggtgttatctatgttatgacccatgattccattggtcttggagaagatggaccaacccatcagcccattgagcacattgcaagtttccgtgctatgcccaacactcttatgttccgtcctgctgatggaaatgaaacagccggtgcatacaagatcgctgtcaccaagcgcaagacaccatctatcttagctctgtctaggcaaaagctgcctcatcttccaggtacatccatcgaaggagtggaaaagggtggatatacaatttctgacgactcttcaggcaacaaacccgatgtgatcttgattggaactggttctgagctagagattgctgcacaagctgcggangtgctcaaggaaagacggcaaaaaccgttaagagttggttccttccgttgtgctggggaactaatttgacgagcaatcaagatgaat

SEQ ID NO: 13171 - DNA, 435 bp, Arabidopsis thaliana
  unsure at all n locations
  Clone ID: LIB25-040-Q1-E1-H4
gaaaaaaaacaaaaaaataataaaacaaaaaaatatcttttttttttctaataaaaaaaaaataataaataaatatgagatacacaaatgtgtccattttattaggcatgttggtgatctttgtttcaccaatggtgttcgcagatgatttgacaccaatcccagagggcaaaccccaagtggtgcagtggttcaatacccacgttggtccattggctcaacgtaaaggcttagatcctgctctcgtagctgctgaggctgctccacgtatcatcaacgtgaatccaaagggaggtgaattcaaaacactaacagacgcaataaagagcgttcccgcagggaacacaaaagcgggtgatcataaagatggctcatggtgagtacagacagaaagncactatccacangaacaaaaccttcaattacatttgangg

SEQ ID NO: 13172 - DNA, 451 bp, Arabidopsis thaliana
  unsure at all n locations
  Clone ID: LIB25-040-Q1-E1-H5
cgtgcatagattaggaatctcgaaaccctaattctgttttctacacgaaacccatcaaaatcgaattttgatcgtttctaatttctgccatttgattctcttcatcagtcacatttaggggaaacgagaagccctaatctttgattctttaatcgccatggctaatagctctttcaagttggaacacccactagagaggagacaaattgaatcttctcgcatcagggagaagtatccagacagaattccagtgatcgtagagagagctgaaagaagtgatgttcccaatatcgacaagaagaagtaccttgttccagctgatctaactgttgggcaatttgtgtatgttgtccgtaaaagaatcaagctgagtgccgaaaagggctatcttccgtccttgtgaagaacacattgcctccaactgctgcaaatgatgtccngcatccaaaga

SEQ ID NO: 13173 - DNA, 441 bp, Arabidopsis thaliana
  unsure at all n locations
  Clone ID: LIB25-041-Q1-E1-A10
acagaagatgtattcgatgttttcatggaaaattgtgggaagtttgaccgtgatgatatatatggtttaatatctctttacgaagcatcatatctttcgacaaaattggataaaaacctgcaaatattcatcagaccttttgctacacaacaactcagagactttgttgatactcatagtaatgaagattttgggtcgtgtgacatggtggaaattgtggtccaagcgttggatatgccctactattggcaaatgagaaggctatccaccagatggtacatagatgtgtatggaaaaagacaaaattataagaaccttgtcgtcgttgaatttgccaagattgatttcaacatcgtacaagctattcatcaagangaactcaaaaacgtttccaactggtggatggagacaggtttaaggtaagcaactctactttgcaag

SEQ ID NO: 13174 - DNA, 435 bp, Arabidopsis thaliana
  unsure at all n locations
  Clone ID: LIB25-041-Q1-E1-A12
aatttggctttaatctaataaagcctctccctctccgattaaccttaataaatccggagggatcggagagaaaaaagaaccaanaaaaaaaaaaaaacagaaaaaaaannatgattggaaaagttgtggtctcggtggcctccatcctcttaatagtcggagttgccataggagtcgttgccttcataaacaaaaatggcgatgctaatctgtctccccaaatgaaagcggttcaaggaatttgccagtcgacatccgacaaagcctcatgtgtcaaaactctcgagccggtcaaagaacgaggacccaaacaagctgatnaaggntttcatgctcgctacaaaagacgaattaaccaaatcgtcnaacttcacgggtcaaacngaantaacatggggtcgagcatccgccaaacaacaaaagccgttcttgatt

SEQ ID NO: 13175 - DNA, 445 bp, Arabidopsis thaliana
  unsure at all n locations
  Clone ID: LIB25-041-Q1-E1-A2
ttgtntagctgagtttcttattgcttatctatatattatgtatcaaatctccttgtttgatctatgatcatctttctagggttttgctcgatttcccggattcgggtgggaaatcatcatctgatcgattatcgcggctggacatggaggggaaaaaaacaacatctgatcaactctcattgatccaatcatcaactctcgttgatcatagccacttatcatcaactctcgttgatcataaccacttatcatcaacgcttgttgatccaaccatcaacgctcgttgattcaaccatcaacgctccgttgatcaaccatcaaagctcgttgattcaaacatcaacgctcgttgattcaaccatcaacgctcgttgattcaaccatcaacgctcgttgattcaaccatcaacgctcgttgatcaaccatcaacgctcgttgatcaac

SEQ ID NO: 13176 - DNA, 513 bp, Arabidopsis thaliana
  unsure at all n locations
  Clone ID: LIB25-041-Q1-E1-A3
tgcctggtctctactggntctagaaagtccggacacgacccacgngtccgccccatcccatgatgatgtgaacaatctcactctctttctctatctctctttcgagtttctttggagtattatataacaaatcagtccaagacacctcttttctcacaccaatctcgctctcaccacanaacagagaatctcagatcgaagaagcaaagaaagagagaatgggtttcacttcccgaggaaacccttcttttctcttcttcttcttcttcttcctctgtctctccacagtctctgcttacatcaacagcacaagcagcaataatgatgaagtaagaagagagctagcttctgggagatgtaattggtttagagggaattgggtttaatgatgtaaagtacccactttatgattcttataaaatggtccattcataagattcacaagtttaactggtaagaagtatggtccgtcctgacaatgcntaaccttaagttacgaatgggcaaccatcc

SEQ ID NO: 13177 - DNA, 530 bp, Arabidopsis thaliana
  unsure at all n locations
  Clone ID: LIB25-041-Q1-E1-A4
gngnnnnnnggggnnnggaactggtccgcctggntctaccggccccggacatcccggaatcgacccacgcgtccgcgtcattgggaggggacgacgacggatctgtctttctgtctactgaaaatccaaatttcatcctctccatttatttaactttttcagatttagttttgtcaagaaaacacaaaatgtcttttcttgcgccttgtcaaattttggagctgaatattatttcggcccaagaattggcgcccgtggcacggtgtatgaagacatatgcaatcgcttggattgatccagagcgtaaattgacgactcgggtcgacaatacgggcggaacaagccctacatggaacgacaagtttgtgtttcgtctagatgaggaagcactctacgatgccacatcaatagttgttatagagatctatgcattgcattggttcaaagacattcatgttggaacggtacaagccttaataagtgaccttgtaagcccttcttcggctatgagattcgttaccctagangtt

SEQ ID NO: 13178 - DNA, 443 bp, Arabidopsis thaliana
  Clone ID: LIB25-041-Q1-E1-A6
ttgttgttgttatgtttcttgtcttacaagaaatgtgagttttgtttcaacaaaaccctaggttccaatctctgcctactatccagataacctctctttatcagcatggatgtgtttattcggaacaatacaatgtgcagtcgtcactttcttccttgagaaagacccaaacgcttggattctccattcctactccgagtttgccacatgtctctatgcaggaattggggcgtcagcactttcttttacggtccaagcttgggctattgcaaagagaggtcctgtgttttctgcactgtttaatcctctttgtacagtcattgtcacaatcttggctgctttgttcttccatgaagagatttacactggaagtttaatcggaggattgggcgtgatattgggactttacactgtgctctggggtaaagcaaaagatgtcatgg

SEQ ID NO: 13179 - DNA, 431 bp, Arabidopsis thaliana
  Clone ID: LIB25-041-Q1-E1-A9
gcccacgcgtccgcacagccccgggggcgtactggtcgtggttagagtccggagaatcaactccaggactcccggagaccttgcatctatacgaaaacctcttggaactcgggattgaacccatcataatctctgacagatggaaaaaattgtcagaagtcactgtcgagaatctcaaggctgttggtgtaacaaaatggaagcatctcatactcaagccaaacggatcgaagttgacgcaagtggtgtacaagtcaaaggttaggaatagccttgtgaagaaagggtacaacatcgttgggaatattggagaccaatgggctgatttggttgaggatactcctggaagggtttttaagctcccaaatccactctactacgtacttcttaattaagcatctatcttcatggcattgtcccttgtatccatt

SEQ ID NO: 13180 - DNA, 445 bp, Arabidopsis thaliana
  unsure at all n locations
  Clone ID: LIB25-040-Q1-E1-G6
aatgaggctgaaaagtgtttaatagaaacatctataaattcactccggataagcctcaaggtcaagcaagcggatgaacttgaaaacatactaaccaaaaaatttctcagattcttgtccatgagggcagaagcttttcaagtactgaggaggaagccagtgcagggctatgacataagctttcttataacaaactaccactgcgaagagatgcagaaacagaagctaattgatttcattattcagtttatggaggatatagagaaagaaataagggacttgaaggagtcagtgaatacaagaggaagactcgttgctacggagttcttgaaacagttcatgtaaagcagctcttgaagtagtataatgtaacccttcattgtatcaatcactcgttaattggtaaaatccatctactcctcattttgctacttccccngttaat

SEQ ID NO: 13181 - DNA, 440 bp, Arabidopsis thaliana
  unsure at all n locations
  Clone ID: LIB25-039-Q1-E1-D9
agggttttcctcggaacctaaaagagttatattttgctggcactacgttaagagaagtgccccaacttcctttaagcctagaggtcttgaatgcacatggttctganncggagaagcttcctatgcattacaagttcaacaattttttcgatctatctcaacaagtggtcaacgattttttattgaaaacgctgacttatgtaaaacacataccaagagggtatacgcaggaactcatcaacaaagctccgactttcatcttcagtgcgccctcacatacaaatcaaaacgccacatttgatctgcaatcaggatcttctgtaatgacacgactaaatcattcatggaggaacacgcttgtgggatttggtatgctggtgggaagttgcaattcccgaaggactactgtgatgctacagatgttggnataaattgtgttt

SEQ ID NO: 13182 - DNA, 292 bp, Arabidopsis thaliana
  unsure at all n locations
  Clone ID: LIB25-039-Q1-E1-E10
cagccgtagcnactcggaggttgaaaaaatcnacgaggcgtgnatggtggaacacgggaataagaagatgaatcaanacggtcttggngcagagaaagatcaatcgattcgagatctttaantgataatcttcgnttcatcgatgaacataacaccntcaacctcaattataaacttggtttancccggtttgctgatttaaccaatgatgagtaccgatctatgtaccttggtgctnaatcgaccangagggttntgaaaancagtgatcggtaacaagcncgtgttggtg

SEQ ID NO: 13183 - DNA, 427 bp, Arabidopsis thaliana
  unsure at all n locations
  Clone ID: LIB25-039-Q1-E1-E11
gcttctcatctcctanacaaangaaactcanganatgagaagaaaattttggnggntgtttataaactataatataatacacatcaaatctttgacangataccaacttgaagaanaagaagaagctgcattgatcttcccaaaagatcctccatggntcaaggcatggatggttcctgtgatgatgcttttcgttttctttgtattttcnattgtaggaatttgtcaangttgtcncaattgtcnccgtggtgaaaattctcccagcattcatcctattanctaattatttaatttagattttttttttcctttttgttttctttctagaatatgtaaatcattgttggtgaaatgtnaaagtttacagtttcaccatatccgatttcctatcgctttgatcaatgaaagcaggatngaatantna

SEQ ID NO: 13184 - DNA, 510 bp, Arabidopsis thaliana
  unsure at all n locations
  Clone ID: LIB25-039-Q1-E1-E12
ttacgcnccccgtaccggaantaaatccngngncnaccacgcgtnanancacgcgtccnggtttnaaattcaaagntcctttttttttaaccctggcatcaaatacaaccatggcaaggatttctctgttgttctctttagccttagttctagccancgggtccgtcttggctcacccacctacccacaagaaattacaaaagaccttgtgtccatctactttgtccaaagttcaagctttcccttaccttgaagtctctagcttcgtcgagaagaaggtcagttcgcaccaaaaaccattgcgttcaagtcctttggtcctccatctgcaagagctacatcgaactttccttgggggggcgttaagttttcctgctccanaagaatgttgtttcaagtccgttcatgtcnaaattcactttgatnaaccaaagggnaatgggtaattgcacaagccacnaaattggngttttaanggaaacctcccccngntnaatttgggcnaaaaac

SEQ ID NO: 13185 - DNA, 420 bp, Arabidopsis thaliana
  Clone ID: LIB25-039-Q1-E1-E5
ctttaagtatgcaggattggacaccgagaatcttcagaactttgagtgttgtctctttgtacttttcccgtatttttcatacatgcttgcagaaggtgttggtctctccggcattgtttctatactcttcacaggaattgtaatcgccgagtcattgtagcttttacatcttagttgatgttaatatcttggaaagacatatttaggctgcctaatatagtgctactgtaggttatgaagcgctacactttctcaaatctctcagaagcttcacagagtttcgtatcttctttttttcacttgatatcttcgctagcagaaactttcacgttcatttacatgggatttgatattgccatggagcagcatagctggtcccatgttgggttatccttttctctattgtatcctcatttactg

SEQ ID NO: 13186 - DNA, 434 bp, Arabidopsis thaliana
  unsure at all n locations
  Clone ID: LIB25-039-Q1-E1-E6
ggcttcgatagggttttagtaattttccgatggcttcaagctcananaanacacctcttattccttcagatgagaaaaacgataccaaggaagagagtaagagtactactaaaccagaatcangctcaggagctccaccttcaccttcaccgactgatcctgggcttgatttcaatgcttttgntttctccggcatggctggnatcctcaatgatccaagtatcaaggaattggntgagcaantagctaangatccttcatttaaccagttagctgagcagcttcagagatctgtgccaaaccggatctcatganggangtctacctaantttgattcacaacaagtatatgcagacaatgcagcatgttatggagaatcctgagtttagaacaatggctgagcgtcttggnaacgctttgntgcangattcac

SEQ ID NO: 13187 - DNA, 427 bp, Arabidopsis thaliana
  unsure at all n locations
  Clone ID: LIB25-039-Q1-E1-E8
gcgtcaatgtctgagaacgcagccaacaacatcatggagaccaanatttgtncagacgccatcgtgtctgaattacagaagaagaaagttcatctcttttactgcttanagtgcgaagaacttgctcgcaacatcgccgctgaatctgatcacatcactctccaatccatcaactggaggagttttgctgatggattcccnaatctatttatcaacaacgcacatgatatccgaggccagcacgttgcgttccttgcttcattcagttcccctgctgtcatctttgagcanatctctgtcatttacttgctccctcgattgtttgttgcgtccttcactttggtgttgcctttcttccccactggctcctttgagagaatggnagaggaangagatgtacaactgcttttancatggcaaggattgt

SEQ ID NO: 13188 - DNA, 439 bp, Arabidopsis thaliana
  unsure at all n locations
  Clone ID: LIB25-039-Q1-E1-E9
aacatgtccatggagctcaccgttctcggacccctcgccggtcggagtttcgcaatcgccggaaaacctaaacttctgcttcttcgaccaacaaacctccctcttctccgtctctcactcccgctttctcttcccaatttctcttcgtcctctcgttttaattcgcccatattcgctgcacaggagagtaacttgagtgtatccaacgaaaacgaaaccagtgagtggctgatgcaagatttttatacattgagaaaagatgtagaaatagcatcagctcgtgttgaagagattagagcttctgctaatttacaacaactaagaacaagagattacaaatctggaatcaaaagctactgatacatcgttttgggatgatngtactaaaagctcaagaaactttatcgtccttaaatgatcntaaaagatngtatgccgg

SEQ ID NO: 13189 - DNA, 429 bp, Arabidopsis thaliana
  unsure at all n locations
  Clone ID: LIB25-039-Q1-E1-F1
ngatctctgcttgaagattatggacggcgccgatggaaccgttcgcgtcaagcctggtcgcggattcgaaacggagacggatgttgcggtttcgtcgccagtgacacgtcagaaagctgctgcagctaagcaattcatcgagaatcattataagaattacttgcaaggcttgcacgaacgaatggagagaccanggagtttcaaaagaaagtgcaaagaagcccaattacctgttgangaacaagaccaagatgatgaagaatccggntcctcctgaaactgaatnaannaaanttnnaagancttaaattgggaatgnagaatttgaacctttgnncgttaatggcaaangngncnttggtgaaggtaaantaagtcctttgggattacanccgaagtttaagccaagnagaaatttgaaaaaacngg

SEQ ID NO: 13190 - DNA, 461 bp, Arabidopsis thaliana
  unsure at all n locations
  Clone ID: LIB25-039-Q1-E1-F3
gcaaaanggccgtagttttacgtggaggcatcaccggaggatttcttcaccatcgtcgtgacgcttcatccgtcatcacaagaagaatctcatccgtcaaagccgcaggaggaggcatcaacccaacggtggctgttgaacgtgccacgtggctacctggactaaaccctcctccttatcttgatggaaatttagctggagattacgggtttgacccactcgggttaggagaggatccggaaagcttgaagtggtatgttcaagcagagcttgttcactctcgtttcgctatgctcggtgttgcaggaatactcttcactgatctccttcggaccacagggattcgtaatttaccggtttggtatgaanctggagctgtgaaatttgattttgctagtacaaaaactctcatagttgtcagtttcnacttatggggtttgctgagactaaaaggtatatng

SEQ ID NO: 13191 - DNA, 441 bp, Arabidopsis thaliana
  Clone ID: LIB25-039-Q1-E1-F5
gataaaaaatgcctcgagtcatccctccggagaatctcggttgcccaccattccgtgctttaacttttgactctctcggcttaataaaagtgactgaagctcgtggtcaagagagagggattccgactgtagtgaacacatggggagagatgaatgcatctagaagtgttcttgctgcttccattgatgaccggttaaggaatccgcttttggctgttgcaagaaaagatggcaatgttgaggttattaacccttgtaatggtgatcttcacttctcatactctgtatttggtgatgatggttgttcccctgaggataacgaaatttctgccctgcacttattcaggaaaaagatagatgatcagacagaaagatcttgcacattgcttacatgtacgaaaaagggagatgtgagtctcagatcagttaaatttccagatg

SEQ ID NO: 13192 - DNA, 51 bp, Arabidopsis thaliana
  unsure at all n locations
  Clone ID: LIB25-039-Q1-E1-F8
tgttgaggtgaacggtaacgacaaaaccganntcgggatggtggtgattag

SEQ ID NO: 13193 - DNA, 514 bp, Arabidopsis thaliana
  unsure at all n locations
  Clone ID: LIB25-039-Q1-E1-G1
antggttgcctggccctaccggttnggaaatcccgggggagacctntgatctgtgcaatcaagggagatccagaagatgcctttaagaagactgtcgaaatcgatcggatgattgatgctcttagagatgcaaaccctagacaagttgagaagattgttgttgaaaatatccttgcttttgatgaggttttttggataagactagcagctaggtcggatacttgtaaatcagaagatgacaagaaggactatgaggagttagctacaactgtgatgactatagttgactgtgttgtgaataagactcgggaaaagatagagacgtctactgatattctgaaagggattttaagacctgctatagatggagtggaaagagatttcatggccgccaagagatcctgaagccatcaatctaatgaaaaaggaaattatacaacgggaaaaagaagggcaattagatgaaggatttctttcagaagttaatgctcagctccggcaagcaaaagaagat

SEQ ID NO: 13194 - DNA, 461 bp, Arabidopsis thaliana
  unsure at all n locations
  Clone ID: LIB25-039-Q1-E1-G3
gctctntgcgtgatcttaccggctgcttaattcgtcttcgcctgattcgttggtttcaaaattcgtctctctctttcaatcggaggttaattgtttttctgtttgggggtcaaagcgaagatggtgaacgctatggtggagagagcgacgagcgagatgctgatcgggcctgattgggctatgaacctcgagatctgtgatatgctcaatagcgatccagcgcaagcaaaagatgttgtgaaaggcattaaaaaacggattggtagcaggaatccaaaagctcagcttcttgccttaactctgcttgagacaatagtgaagaactgtggtgacatggttcatatgcatgtggctgagaaaggtgttattcatgagatggtccggatagttaagaagaagccggacttccatgtcaaagagaagattctggtccttatcgatacatggcaagangcctttgg

SEQ ID NO: 13195 - DNA, 448 bp, Arabidopsis thaliana
  unsure at all n locations
  Clone ID: LIB25-039-Q1-E1-G4
anaaagcataaccccccagagaaagagagagagtttctcccaacaagatcaaacttcgaactctacgagaactactattatccanaacgcgaaatagagagacagagatttcataaatttcttactttttaaccccaaagttcttttccagacagcgttttcctctgtcctttgctctttgtgggtttactccttcttccggtttggatatcccgagctagtaaagaagggatccagtagcagaagctgaagctaataaacccaatcatagagaaagctctctgaacaaaagacattttctgggtttgttttaattaaaaagaaatggccgattcgaccaaagtaagggctagttcgttgcccaaaaatgcgagaatccccttatcagagctgaagatcctcccttttccagttgcggtgggctggcttcaccgttccttcgtgcaaa

SEQ ID NO: 13196 - DNA, 475 bp, Arabidopsis thaliana
  unsure at all n locations
  Clone ID: LIB25-039-Q1-E1-D7
cgtgggaaaaatcatccggagctgttccctttgggnacaatgtttgctctgatcttcctctgggtttggaatctcggtccctcttgtctttgtcggcgcttacctcggattcaagaagccancgctcgatgaccccgtgaaaaccaacaaaatcccacgtcaaatcccggagcaagcttggtacatgaacccaattttctcaatcctcattgggaggaatcttaccgttcggtgcagtcttcatcgagctcttcttcatcctcacatccatctggctcaaccaagttctactacatcttcggnttcctcttcctccgtcctttggggattccttaagggtcacctggcgcccgagattaacaattggttccccngctaanttcnaccttttgcanttgaanaactaacctccngggtgggttggaaggntcctaaccttaancttcaaggctccttccngcgggtctaacccctt

SEQ ID NO: 13197 - DNA, 525 bp, Arabidopsis thaliana
  unsure at all n locations
  Clone ID: LIB25-039-Q1-E1-B4
gngnggggnnnnnnnnngganggttgcctggcctaccggtttggaancccgggtcgacccaancgtccgcccaagcgtccgcccacgcgtccgcttgttgaggcacctttgataccaactgataaaaagtatcagggaaccaacagtacctttgttttcacaaataaatcaggacaacccacaatataccgtcccacaggcgcaaatcggttctacactttatgctccaaggaattcctagctctgggcggtggtggacggtttgctctctatctagacagtgagctgctaagcggatcgagcgcttactcagagacgtatgggaactcttgtctcgcagactctcaggactttgatgttaaggaagtggagctatggggatttgtgtatggctcaaagtatgatgagattctagctcacagcaaaacaatggagcctggtctttgcagatggtcatgatcattataaagaaaacccaaatgaattcaactgagattcgtctttttgttgttgttgttgttgttg

SEQ ID NO: 13198 - DNA, 532 bp, Arabidopsis thaliana
  unsure at all n locations
  Clone ID: LIB25-039-Q1-E1-B6
gnggggnnnnnnnnnngngnnngntttnnnnggccgaantggttccaaggcntaccggtccggaattcccgggtcgacccacgcgtccgcgttctcatgttgttgcagaagataagattggtgtcttgcttttgaatttaggtggtcctgaaactcttaacgatgttcaacctttcttgtataatctctttgctgatccggatattataaggcttcctagaccatttcagtttcttcaagggactatagctaagtttatatctgttgttcgtgctccgaaatctaaagaagggtatgctgctattggtggtggctctcctttgcgtaaaataactgatgagcaagcggatgctattaagatgtctttgcaagcgaagaacattgctgctaatgtctatgttggtatgcggtattggtatccgttcactgaggaggctgttcagcagataaagaaggacaaaattactagacttgttgtactgccattgtatcctcagtattctatctctacaacgggttcaagcatacgcgt

SEQ ID NO: 13199 - DNA, 515 bp, Arabidopsis thaliana
  unsure at all n locations
  Clone ID: LIB25-039-Q1-E1-C1
antggttgcctgcgcctaccggtttnggaaatnccgggtcgacccaancgtccgtttanctaagcaggccaggttcctagtgtgccaactactgctactattccagggatgttctcaaacatgtttccaatggtccctggtcagcaactaggtgcgcttcctgtactgccagttcaggcaatgactcaacaggtacgatctatcaatctatcttattcttaggttcttcaccttttgtcacgattcccttcctaaaatatgtagtcgcaggcaactaggcatgctcggcgagtctatgttggtggccttccaccaactgctaatgaacaggtttgttacttttgttttgtttaaggttttgtgactttttgtttattattgtctatttaaaccacatttcaatatccattgtatgcctactgagaatgggttttcatgtcctagtcggtgtcaacgttctttagccaagtgatgtcggccattgggggaaacactgctgggccaagtgatgcggt

SEQ ID NO: 13200 - DNA, 438 bp, Arabidopsis thaliana
  unsure at all n locations
  Clone ID: LIB25-039-Q1-E1-C10
caaatttccgtttttgctaccgtcgtctctggtcagactcagaggaaacacggagcttgagcaactgacaagactgtttcgtgtttggggctttcgaagagagtanngagattcgcgggtttcgtcaattcctgggttttctctagattgctgtttcggtggtgttttcttttgaggatttaagggaaacatggaacccaacaaggatgataatgtttcattagcaagcaacagctcaaatttcaagcacctccagttctacaagatgcctcgtctctgccaggtttctctgccattccacctgtggttcctccttcttttcccccaccaatggctccaatacctatgatgccacatcctccagttgcccgcccaactacttttaggcaactgttcanaaaaaggggggattgaaaccaantgacnccggattcggga

SEQ ID NO: 13201 - DNA, 229 bp, Arabidopsis thaliana
  unsure at all n locations
  Clone ID: LIB25-039-Q1-E1-C11
tattgacangcgtgtcatcnagaggttcgacnaattgaggctgctgagatgaacangaggtcgttcangtacnnatgggtgttggacaaacttaaggccgagcgtgancgtggtattaccatcgatattgctctatggaagttcgaggaccaccaagtactactgcacattcattgatgccccangacatcgtgatttcatcancgaacatgattactggtanctccca

SEQ ID NO: 13202 - DNA, 262 bp, Arabidopsis thaliana
  unsure at all n locations
  Clone ID: LIB25-039-Q1-E1-C12
gtcattgaggctcaanatttgatacctcatgataaaaccaagttccctgaggtttacatgaaagcaatgctcggaaaccagactctgagaacacgtatttctcagggggggnaacattgaatccgatgtggaatgaanatctgatgtttgttgttgctgagccttttgaggaanctttgattccccccgtgggaaataaggttncaccnaattaagatnaaaccttaagccngtgtncaatcccgttncnaaacgttcaaag

SEQ ID NO: 13203 - DNA, 458 bp, Arabidopsis thaliana
  unsure at all n locations
  Clone ID: LIB25-039-Q1-E1-C2
gagatnacggcgatagtgtttgatcagtcatctatggaagcggtagaaaaacccgaagaaacaatcccagggaattcttcaagattagctggaaatcccaactggggaacagcaactgttgttggagtatttgcaggattgctatatggagggagcaaagaagcttctgcttctgtgagcaaagatgcagaagtgatgttgaagatgggtagtacacaggataagcgtgaacaacacaggttgatgcgagatgcaatggagaaaaggttcatccgagtaactcgtggctccctcattggagggatgcgtcttggnatgttcactgcttccttctttagtctacaaaactttttagctgagacccgaggagtgcatgatgttttcaatgtggttggagctggttcagctactgctgcagtttttggcctaatcatgccggggtctcctgcttggcgtng

SEQ ID NO: 13204 - DNA, 439 bp, Arabidopsis thaliana
  Clone ID: LIB25-039-Q1-E1-C5
tcactgtctctctatactccactcttcatcaagcgttgggtcatcgccgtcttccctttccttccctctctaacgtaaagcaggtaggatgagcatttctgatgaagaggctgagatcagcgagtcagagattgaggactattctgaaacaccctaccgccttttacgcgacgggacttacaaggtgaaggtgaatggacagctcagatgcccgttttgtgcaggcaagaagaagcaagattacaagtacaaggagttgtatgcacatgctactggggtttccaaaggttctgccaccagaagtgctttacagaaggctaatcatcttgctttagctatgtttttagaagaatgagcttgctggttatgcagaacctgttccacgccctccagttgttcctcctcagttagacgagactgaaccaaaccctcataaagt

SEQ ID NO: 13205 - DNA, 439 bp, Arabidopsis thaliana
  unsure at all n locations
  Clone ID: LIB25-039-Q1-E1-C6
ggagctactttgtaattataaagatttattgtttcccataaactggttaaatgattttagaaactaaagtaaaatgagcttgacactagagtttctgcttcttctgattgtacttatcttgagtcaccatgctcattctggctctattgtcaaattccttcctggttttgaaggcccccttccttttgaactcgaaaccgggtacattggtattggtgaggaagaggaagtgcaattattctactatttcatcaaatctgagaagaatccagaagaanaccctcttcttctatggttaagtggaggacctggatgttcctctcttactggccttctttttgagaatggtatatctataatatttcgctaagcattactanaatancttgtttaaagccgggggaaataaatangaccggtggctttgaanttcgaggtt

SEQ ID NO: 13206 - DNA, 432 bp, Arabidopsis thaliana
  Clone ID: LIB25-039-Q1-E1-C7
ttctccgtcgccgccgcctcttttattcacaatgtcgtgcttcaaatccaaattcgccgatgagctcatcgccaatgccgcttacataggaacaccagggaaaggtattctcgctgctgatgaatccacaggaacaatcggaaaacgtttcgtaagcattaacgttgagaacgttgaatcaaacagacgtgctcttcgtgagctcttgttcaccactcctggagctctccaatacatcagtggtatcattctcttcgaagaaacactctaccagaaaactgcttcagggaaactatttgttgatgtaatgaaggaagctggagtgcttccaggtattaaagtcgataaaggaaccgttgagctcgctggtacaaatggtgaaaccacaaccactggtctcgacggacttggtgaccgttgcaagaagtacta

SEQ ID NO: 13207 - DNA, 440 bp, Arabidopsis thaliana
  Clone ID: LIB25-039-Q1-E1-C8
taaaggcttgaattgcttagttccacctcctaaaggttaccgtcagccgattccatggcctaaaagccgtgacgaggtatggtttagcaatgttcctcatactcggcttgttgaagacaaaggaggtcagaactggatttcacgagacaagaacaagttcaagtttcctggaggtggtacacagtttattcatggggctgatcagtacttggaccagatgtctaagatggtttctgatattacgtttggcaagcatattagggttgctatggatgttggttgtggtgtggcgagttttggtgcttatctattgtctcgtgatgtcatgacaatgtctgttgcaccaaaagatgtccatgagaaccaaattcaatttgctcttgagcgtggtgtgcctgctatggcggcagcatttgcgacaaggcgtttgttatatccaa

SEQ ID NO: 13208 - DNA, 510 bp, Arabidopsis thaliana
  unsure at all n locations
  Clone ID: LIB25-039-Q1-E1-D1
aanggtttncctggcctancggttggaaaagccgggtcgacccaancgtccgagcnnctctccttcccatcgaacccagccattgcatgggtcctttacaacatcctccagccagctattaaccaggtcaacaagatgcgtgagagtaaaggtatcgttgttggtctaggtattggtggtggtcttgcagcgtcagggcttttgactccacctccggaggcttatgctgcggcagaagcggcggctgctagttcagacagcagaggacagttgttgttgattgttgtgacaccggcactactttgggttctgtacaatatcttgcagccagctttgaaccaaatcaacaagatgaggtctggggattaaaatcctatatatatataatattattataaatcatctttgggattcaaatgtaaaattaacccttgttttaagggcagttttaggttacaaaanaaaannnnaaaaaaaaaggggggccgccctaaaggntcaagcttactt

SEQ ID NO: 13209 - DNA, 520 bp, Arabidopsis thaliana
  unsure at all n locations
  Clone ID: LIB25-039-Q1-E1-D3
aactggtntgcctgcgccctaccggtttggaaatnccgggtcgacccaaacgtccggaagacgaaaactcgaaaaagctacacacaagaagaagaagaaaagatacgagcaagaagactaaacacgaaagcgatttatcaactcgaaaggaagagactttgattttcaaatttcgtcccctatagattgtgttgtttctgggaaggagatggcagtttatgatcagagtggagatagaaacagaacacaaattgatacatcgaggaaaaggaaatctagaagtagaggtgacggtactactgtggctgagagattaaagagatggaaagagtataacgagaccgtagaagaanttctaccaagaagaggaaantacctgcnaaagggtcnaaaaagggttgtatgaaaggtaaaggaggaccagagaatanccgatgtantttcagaggagttaggcaaaggatttggggtaaatgggttgctganatnagagagcctaatcgaggtaccaggctttggg

SEQ ID NO: 13210 - DNA, 458 bp, Arabidopsis thaliana
  unsure at all n locations
  Clone ID: LIB25-039-Q1-E1-D4
ggcattttttccgtagaggaaatattgggcaggcagaccagtgccagctgtatgtaatgcagagcttcacacagattatggtggtgctgcagtgagatgggggcttacacatcataaagagagtgcagctgattgttgccaggcttgcttagaccaggcaaagcgtgcgaaacctggagaaacgagatgcaatatttgggtttattgcccatctgagtttggttgtttctctccagatatttatgagcataaacatcaggagtgttggcttaaatacgcagagaagccaaaacaagaatttcaaagacagatattctgagacatacagaaacaaccacccaaaagcgccatctatcgttccatgggtttcaggtgttgtaacggcttgagcaaaacccatgtggacagattgatgggagaaatangagatagttttggnttttttttccagctgtgtt

SEQ ID NO: 13211 - DNA, 519 bp, Arabidopsis thaliana
  unsure at all n locations
  Clone ID: LIB25-039-Q1-E1-B2
ggggtgggngnngttggggagtgtcttcggctcancggtttgacacccggtcggcccaanntccgctcnanccatctctatctctnnatttgggggagttccgtcacggtggactaagtacgtctcgttgccgttggtggcgtagtcggaattaatttcctcggcgttgagattcacatggtctagngttctagctaagtggttgttgttgttgttacgatttccgatttctcgagttttttttttatatttagcttctgtttcgtttatccctcccggagacactccttggtcgaatctctcatgctgaggtgttttggncacttgttgtcangaggaaaccagttttggttctgattaatcgttggttggnaaatatactcaattccaggccatgccttcacttcaactattgcagttaactgagcggggtcggggtcttgtngcgtcaagacgganatctatactgcttgcggctgggattgtnctgcnggtggnactgctgtttacctgaaatct

SEQ ID NO: 13212 - DNA, 421 bp, Arabidopsis thaliana
  unsure at all n locations
  Clone ID: LIB25-038-Q1-E1-H5
aaccataaactgtgagtaaaaaagagaagaaagaaaaatggtgctaaaggtgtacggacctcactttgcttcaccaaagagagctttggtcacactgatcgagaagggcgttgccttcgagaccatccccgtcgatctcatgaaaggagaacacaagcagcctgcttatctcgctcctacagccttttggtactgttcctgctgttgttgacggtgactacaaaatcttcnagtcccgtgcggtgatgaagtactnaccnaaaagtncaagtcacaangacctgatctttggggaaaaccgttnaanacagaagtcaaantnaacaatggcttgatgtggaaccaacaactacaaccaaccgctattgaacttaacgctcaaaaatgttccatcnatccatgggaattcccanncgaatga

SEQ ID NO: 13213 - DNA, 290 bp, Arabidopsis thaliana
  unsure at all n locations
  Clone ID: LIB25-038-Q1-E1-H6
tcaaccgatatactgtttggattagtcaaggtcctttcatgtgcctcatccacaataacgacactgtagctggccaggtctggctcaccaagcagctcgcgcaaaagcattccatcagtcatatacttcagaactgttttgtctgaagtacaatcctcaaatcgaatggaatagccaacctcatgtccgagtttgacacccatctcttgagccacacnggcagcnacacncatagcngcaactcntcgnggcngcgtacaaccanactntccacgcttngtgtaaccanc

SEQ ID NO: 13214 - DNA, 424 bp, Arabidopsis thaliana
  unsure at all n locations
  Clone ID: LIB25-038-Q1-E1-H7
atcttcttcatcaattgatctactctgctctgctcaagatcagaaatcgtcggtttagttctccggttaaaagtttcgtctctgcgggaattggaacttcaatggagggattaaagctctcagaagcggaattgatgatttttattcatccttcccagagcagaaacgtttttcaaggaatttgtcgcgagctcagttctcttctattccagttcgttctttttcttcctcctatttacttcttctttggtttcaagttttgatttttaggttgtgttcttaaccttataggagaatcgaattganctttcttgatgcaatgtttggttgggganaattcggtttttcttaaaanaaattggggggancaaaccttggtggtaaaggnaaaangnaacccttgaanggnnttccaatggnntaa

SEQ ID NO: 13215 - DNA, 393 bp, Arabidopsis thaliana
  unsure at all n locations
  Clone ID: LIB25-038-Q1-E1-H8
aaagaatgttaagaaagatggagatgaagagtgaaagtgggttttggtttagattcaagtttatctttagttgtatctcttctagatcaaaagttgatagttccatgaatgctactgctgttattgcagaacctaagaaagttattgagaagcttgaaggtcatccagctccgactaaagacactggctgtgcggagagcggttcctcaacacctctaatgagcggggaattgaagtattcttctaagctacggattttcatgtttaacgaccttaagttanccactaggaatttcanccaaantccttcccggtaagggngttttggatgttttntaaggggggataggngaannggaagcgccctgnaacccggnnagggctaaagtgcgt

SEQ ID NO: 13216 - DNA, 52 bp, Arabidopsis thaliana
  unsure at all n locations
  Clone ID: LIB25-039-Q1-E1-A1
aagaaccatcaattcattgtgtcctccaaacgcgaanaganttggagtttta

SEQ ID NO: 13217 - DNA, 509 bp, Arabidopsis thaliana
  unsure at all n locations
  Clone ID: LIB25-039-Q1-E1-A11
gngnntntggcagcttnttttgccggtcggtaccggactaaattcncgggccgacccacgcgtccgagaaagcaaagactgagagaaccaaggctccgatctaacaatgaggaagaggacgctcgtgtccgttttgttccttttctcgcttctgtttcttcttccagatcaaggggggaaagttacacgcgaatgcagaagagagttccgatgatgttacagatccaccaaaagttgaggagaaaattggtggtcacggtggtttatcgacggattccgatgtagttcatagagagtctgagtcgatgtcaaagaagacgcttcgcagtaacgcggagaagtttgagttccaagctgaggtttctcggcttatggacattattatcaactctctatacagtaacaaggacattttcttaagagagttgatctccaatgcttctgatgccttgggacaaaaattangttccttgcactcactgacaaagacgttttgggtnaagggacac

SEQ ID NO: 13218 - DNA, 440 bp, Arabidopsis thaliana
  unsure at all n locations
  Clone ID: LIB25-039-Q1-E1-A12
aaagcagctctcaagagaagttcatcagttagaggaagcgggatcgagactcctttcagcgaaagaccttctccgaggtctgaatcgatgagatcatatgcagtgggngaggttcagtgcaatgcaccagactctcctactgagtttataagtagagatactagaaaacttttggcagagagattgaagaatgttttgagaaaagagatgactccttcacatgattctgtgaccaaatctagtagccgtttgcgacctactgtgtcggatgcagcgaaacaagctgaggaaatcaatcaagaagatgtttctaagaaagagtctttatcaccaagaaatctcaaaagatcactatctgctcctgtctcanggacatcgtttgggtaagcttttgttagaggaccggcatgttttgacaagcgcacangtnatgaggaanc

SEQ ID NO: 13219 - DNA, 527 bp, Arabidopsis thaliana
  unsure at all n locations
  Clone ID: LIB25-039-Q1-E1-A2
gggggggnnnnnttnnggaagtggtctcctggncctacggtttggatancccgggtcgncccaancgtccggttcantcttcgaccaccacngtcaaatccggcgacccatcaaccttcagatgactaaaggtggacttggaatagccgcgatgtcatacgtggtaatcgattacatgcgttacgtgtcaccggtgtggcattctcgtcttatgccagttctttggtctgttcttgctatcgccgtcgtcactcgtgttctgttctataaacactggtctaaagagctacgagcagctattcctttccttggttctatcgtattccttctctgtgctcttctctttgaagctctttgtgttcgctctgttactgctgttcttggcttagattggcaccgggaaacacctccacttcctgatacaggccaatggttcttacttgcactaaacgagagccttcccgggacacttgtggaaatcctaagagcacatatcattggattgcatcattttcttaagttgttta

SEQ ID NO: 13220 - DNA, 476 bp, Arabidopsis thaliana
  unsure at all n locations
  Clone ID: LIB25-039-Q1-E1-A3
ggnctccccgggaattctaaanccaaaantgggaanggggaaannaagggggaccggcctccnggtggggttncccgggtttttttgggtttccccctttttttcctccngccctttcccggggtttttcccnttcccntncccaaagaattcaaaggggggaangaaaaaaggtttacaacngccgaaaatggcaanaaaangaagaattnccgaatngaatggttnacaagattcaacaaaaagntngaaggagaaaattgggtnggccacgggtgggttaaccacggttcgatgtattcatagagatctgatcatgtcaagagacctccataccgggaattgatcagctgaggtccggtangcatatacactccatacatacaggcatttctaaaagtgttcatgctctgatgctggcaaataggtctgaccactgcaagactttggtgaagtgcactgctactgaatcaaat

SEQ ID NO: 13221 - DNA, 454 bp, Arabidopsis thaliana
  unsure at all n locations
  Clone ID: LIB25-039-Q1-E1-A4
cntccttagatatttttctccttcttcttcttctagattccagctactccagaagattcttcgacttaatctgatgtgattaggaagagcaatagaggaagagaagaatcagaaaaaatggatccggcgactaattcaccgattatgccgattgatttaccgattatgcacgacagtgatcgttacgacttcgttaaagatattggctctggtaatttcggcgttgctcgtctcatgaccgatagagtcaccaaggagcttgttgctgttaaatacatcgagagaggagaaaagattgatgaaaatgttcagagggagattatcaatcatagatcattgagacatcctaatattgttaggtttaaagaggtgattttgacgccttcccatttggctattgttatggaatatgctgctggtggagaactttatgagcggatttgtaatgccggac

SEQ ID NO: 13222 - DNA, 277 bp, Arabidopsis thaliana
  unsure at all n locations
  Clone ID: LIB25-039-Q1-E1-A8
ncnttcctttcaatgggggtcaacgccgctcatngggncacaacaccaacaaccaccggtccatggcttcctcaggcgtcctcgtcncggtcgcnccgttcctcaagctcntccctcttcttcagcctctgtttcttcaagctcatctttcacaagactactccaaatttctctcctttgcaaanccccanntcaagatttctcccggtcgtcaatctaaccgattcgtctcccccggcaccantaaccaacgtcngaacaggcanaagccaaacta

SEQ ID NO: 13223 - DNA, 506 bp, Arabidopsis thaliana
  unsure at all n locations
  Clone ID: LIB25-039-Q1-E1-A9
gnnnntnnnngnannntttnttnggccgccggtacggacaaaatcgcgggtcgacccacgcgtccgagacaaaacaattttgagtctctctattctctattctctctcctctccgcctctctttctctctctctctatctccgtcgtcgcaagagtgcatcatctttaacgccggggaccttcccgctgctctcttctaccaattctctcttagatcttctcatgcgtcttcttcttatatcttaatccttcgtcgtacaagctcgccggattgagttttcgtcttccatggctattcctctcgggaagctcaccatcctcatcggtgcaggtcttgttgggtcagtacttgctaaagaagggagtttaccagatgtctcgagttttgtctccggtgctcttaagatggtatttaagcagctgaagcaagaagaacctgccaaatcagccagcaagccccgcaatgatacactaatnggccaagttaacaatcctaagnatgaatt

SEQ ID NO: 13224 - DNA, 465 bp, Arabidopsis thaliana
  unsure at all n locations
  Clone ID: LIB25-039-Q1-E1-B1
gcttnaactgtttgtcgtgcaagtaacaaagatcaagatgatatcaagattttctcttcttctgttcttgttcttgggtcatagttcctctatcaaaatcttcaatcttcaaaaccttcatcaaatcctctccttcctcagtcgtcttccctctctccggcaacgtcttccctctcggatactactcagtcttaatgcaaataggaagccctccaaaggcatttcaatttgatattgataccggaagcgatctcacttgggttcaatgtgatgctccttgcagtggttgcactttgcctcctaatcttcagtacaagcctaaaggaaacattatcccgtgctcaaacccgatctgtacaagctcttcactggcctaacaagcctcattgcccaaacccgcaagaacaatgtgactatgaagttaaatatgctgatcaaggtcatcaatgggtgcacttgttaccg

SEQ ID NO: 13225 - DNA, 523 bp, Arabidopsis thaliana
  unsure at all n locations
  Clone ID: LIB25-039-Q1-E1-B11
gnnntnnngcaattttnttagccnccagtaccgaacaagaattcgcgggtcgacccacgcgtccgnacgaatcggtggggcccatcacgacgaggagaaaatgggtaagaactggttaacatgtgtctccgtggcttgtttatctccagggaaagacaaaaagaatcaaaaacccgngaaaccgaagaggaaatggtcgtttgggaaacaaaagagtagagaatcttttgatttccctctggaggagactccaccggttgacccttcaccttcttctgttcatcgtccatatccaccgcctcccccgttgccggattttgctcctcagccgttgttaccaccaccgtctcaacctcctccctcctccnggcatatacatcaatacaagaatctatggtgagtctaaagaatccaaagaattagacaagcctttagctccttgcatccggctggtttcaacccnaaancagctgttggtaacttgaaaatgctngcccccgganggttaaaacntnccaaanaa

SEQ ID NO: 13226 - DNA, 444 bp, Arabidopsis thaliana
  unsure at all n locations
  Clone ID: LIB25-039-Q1-E1-B12
tttggaggatccttggattcgaaatccattgctgattttgttgattccggtcgtgacttgatcttatcggcggatactgctgcatctgatttgattaggggtattggnacagagtgtggggttgatttcgatgaggattcttcagctatggttattgatcatactagcttctccgtctctgatgttgacggcgaccacaccttgattgctgccgacgatttagtgaaatccgatgtcattttgggaaaaaccaagattgaggctcccgtgctcttcagaggagttgcacattcgttgaaccctactaacaatctggttttgaaaagttctttcaacctccccaacaacttaatctgccaaaccaagcctcnaaattgtctaatcccccccanntcaacggggtcctcaaatttccctaatncncggtcaatcaanggcaannaa

SEQ ID NO: 13227 - DNA, 440 bp, Arabidopsis thaliana
  unsure at all n locations
  Clone ID: LIB25-038-Q1-E1-H4
ttnggcncctaccggtcnagacatcccgggtcnacccncgtccgcaccacaaccacttctggtaacgcagtgtctctgattttcacttggttaaagacctctagcttcacggtcaaacatcataaaccttttgccgccgtcactaataggaattaactgatctcgtcaatggcggaggtggaggagattgcgcacgaggagcagaatatcgagaagagggagaagaagaaaggtaaacacgagaagccgaagccatgggatgatgacccaaacatcgaccgttggacaatcgagaagtttgatccggcatggaaccccacnggtatgactgaacccagcacnttcncaacactctttcctcaatacangagaagatatctcntcngggagtttngngcctaatnttnanctcncctcnataaagtantngggtgncccca

SEQ ID NO: 13228 - DNA, 526 bp, Arabidopsis thaliana
  unsure at all n locations
  Clone ID: LIB25-037-Q1-E1-F10
ggngttgtngaagtggtcctttgggctccccgggtccggatgaanacgggtcgaccgacgcgtccgctanatcntagatcgcgagcggccgctcgcgatctagacccacgcgtccgcccacgcgtccgcccacgcgtccgaaaaaataatggcagctttggcatcaaacccccaaatgctaactagacangctcacggtaacaagaaggaacaattgtggaggaaagagagtttaaatttggagaagaagtgtgggttttgtgtgagcgtttacagtantgaaaagcttgggaggtcacatatggagaaagagtggagactannagccttttggtcaaacatagctcagcctacgactttggagatggaacccattaacaacgttgangaactcgatgctgttctctctcacgcacgccaactctctcagcctatcatcctcgaatgggatggcttcttggtgtcgaanntgtatttactngnagcctaggttggaganattagggggnagagnannntnnncgtg

SEQ ID NO: 13229 - DNA, 455 bp, Arabidopsis thaliana
  unsure at all n locations
  Clone ID: LIB25-037-Q1-E1-F11
catcntctctctattccatggctttagtacgtgaacgtcgtcagctaaatctccgtcttcctcttcctccaatctccgaccgccgcttctccacctcttcctcctcagccaccaccancaccgtcgctggctgtaacggaatctccgcttgtgatctcgagaaactcaacgttctcggatgcggaaacggcgggattgtttacaaagtccgtcataaaaccacatcggagatctacgctttgaaaacagttaacggcgacatggatccgattttcacaagacagttgatgcgagagatggagattctccgccgtacagattcaccgtacgtcgttaagtgtcacggaatcttcgagaaacctgtcgtcggtgaagtatcgattctantggagtatatggacggcggaaccctagaatnactacgcnggcggtgtancggagcaaaaatcgccggg

SEQ ID NO: 13230 - DNA, 432 bp, Arabidopsis thaliana
  Clone ID: LIB25-037-Q1-E1-F3
aaacagcgaaaatagttctttgtgattttcgagtgagagagacgacagcttccattatcccctgtctctctccctctcgaactacaaatcaaattcgagtgttttcatattgttaatctttttcttcaaggaaagaagagattttgttttccgtttctgggggtttttcttgattctgatctctgatctgatctcatcatcattgtccgtggattctccgatgggtttctgattgtgggttctttcaaatttcttcacttttggagcttttcttctctctgtcttttgttttccctcagctatggcttggaatgagaccaaactcaagaggctctatcaagtttggagaggaagcaataaatttctatgtggcgggaggctaatatttggtcctgatgcatcatctctatatctatcaaccatcttgatcct

SEQ ID NO: 13231 - DNA, 438 bp, Arabidopsis thaliana
  Clone ID: LIB25-037-Q1-E1-F6
tttcttatccggaaaccaaaaacttccggtgataaaacctccttcgtcatctctctacttcttggataaaatggcgtcaactttcactgccacatcttctattggttcaatggttgctccgaatggtcacaaatctgataagaaacttatcagcaagttgtcttcaagctcatttggaaggagacaaagtgtgtgtcctagacccagaagatccagttctgcaattgtgtgcgcagcaaaggaattacatttcaacaaagatgggactaccattaggagacttcaagctggtgtcaacaagctcgcagatcttgttggtgttacacttggacccaaaggacgaaatgttgttcttgagagcaagtatggatcaccacgaattgttaatgatggtgtgactgttgcaagagaggttgagttggaagacccggttgagaa

SEQ ID NO: 13232 - DNA, 448 bp, Arabidopsis thaliana
  Clone ID: LIB25-037-Q1-E1-G1
aatcactctccattttgattttcgtatctctcgtgtcacactcacacaaaacacaatcttcctcaaaaaaaattttgtgcaatctgatttgattttcactgtctttctaagtttcgaaacggtggattttgtccgtacgtggttttgattctcgtagatgtcgaagctctgacgtaagattagagtttcgatttctaggtttcttataactatggcggtggaatatgaatgctgcgggaccagcttcttcatacacatcgctgtgatagtgttactagtcttgttcgctggactaatgtctggtcttactttgggtcttatgtctatgagtctcgttgatcttgaggttcttgctaaatccggtactcccagagatcgtatccatgctgcaaagattttaccaagttgtgaaaaatcagcatcttttgctttgtacttactgataagg

SEQ ID NO: 13233 - DNA, 523 bp, Arabidopsis thaliana
  unsure at all n locations
  Clone ID: LIB25-037-Q1-E1-G11
gngnnngnngaactggtcnttttggntgccccggtccggacataacggggtnancttcagctaagattcatantttcctctgttttttttccatattctctgaagcatgacaaaagattcacactttcctctgttttcttatgtcaaaattagaaccaataactgaaagatttggtcaagaagaggaaatgggaagaacatgtttgccgagatggcgattaggaagactaatggcaggattacaagtcatcttaggattactggtgatcactgtgagcctctcatgtctctaccgattccattccgtgggttacttcttgcaaaacgaagacacttgcaacaatatctacacaatcaaagaagtcagcagcgaaggattcgacctaaaggcgctgcacgatcgtgttgatgaagtactagaaaagatggacaacttgtacgagaagctagagaagacggtaaaagatatggagaagagcanagacggaagcaaaaangagatgaaagaagtttcttgaagatt

SEQ ID NO: 13234 - DNA, 519 bp, Arabidopsis thaliana
  unsure at all n locations
  Clone ID: LIB25-037-Q1-E1-G3
nnnnnnnngaactggtcnnctttgnnctgcccgtccggacgatccaaggtcgacccangcgtccgcccaancgtncgtggagaacattcttgttattggacacagctgttgtggtggaataaagggactcatggccattgaagataatacagctcccactaagacgtattaatctcaaaggctaatttaatcaaccatgagtttcttgtgattagttctcactaacttgatgtaaattcttgaaaagggtagcgagttcatagaaaactggatccagatctgtgcaccggccaagaacaggatcaagcaggattgtaaaagacctaagctttgaagatcagtgcaccaactgtgagaaggaaaccgtgaacgtgtccttggggaatcntttgtcttaaccattcgtgagagaaagagtggtgaagaacaagcttgccataagaggagctcactatgatttcgtaaaaaggaacgtttgatctttgggaacttgacttcaagactaaccctgcctttgcc

SEQ ID NO: 13235 - DNA, 523 bp, Arabidopsis thaliana
  unsure at all n locations
  Clone ID: LIB25-037-Q1-E1-G4
gnnnnnnnggaactgggtttgcctntgccctagccctccggaaaatccnaaggtcgacccacgcgtccggaaacagattgaaatttgtcaggaagagaatagaattatagacaagatgcacagacagaaggttgcagaagttgaaaagcttatgcagagtgttcgggaattagaagaagctgttcttgctggtggtgcagccgcaaacgcagtgagagattaccaaaggaaattccaagaaatgaatgaagagaggaaaatccttgaacgggaattggcccgtgcgaaggtaaatgcaaacagagttgctactgttgtagctaacgaatggaaagattctaatgacaaagtgatgcctgtaaggcagtggcttgaagaacgtagatttttgcagggagaaatgcaacaactacgcgacaaacttgccatagctgaccgagctgcaaaatctgaagctcagctgaaggagaaatttttactgcggcttagagtgttagaagagagtttaaaggggcctacgaac

SEQ ID NO: 13236 - DNA, 515 bp, Arabidopsis thaliana
  unsure at all n locations
  Clone ID: LIB25-037-Q1-E1-H3
nnggnnnnngnggaantggtcngccttgntctagccgtccggacatccanggtcgacccacgcgtccggagaaatttggtatgggcaacttctaagcacgacgtgtatcttatgtcaaattttctggttacacattattcttctctaacgtctggaaagcatgaagttctcaatgtccgtggtcatgttgcgccatctgagaaacatcctggaagtttacttgaaggatttacgcagactcaagtaagtacacttgcagtaaaagatgactttctggttgctggcgggtttcaaggagaacttatttgcaagcatcttgatagaccgggtgtcagcttttgctctcgtatgacttatgatgataatgctataaccaatgctattgagatctacaacaaacccagtggtgcacttcattttactgcgtcaaataatgactgtggagttagagactttgacatggagagataccagcttgttaagcattccgttttccntgggcatgaatcaccatc

SEQ ID NO: 13237 - DNA, 419 bp, Arabidopsis thaliana
  Clone ID: LIB25-037-Q1-E1-H6
gcccacgcgtccggaagaccaaagagaacataaagagaaaaagagaaagatgaggttgttcgatccatggccagtgttcttcaagagagaatggaaacgttgttggccgtttctcaccggattcgccgttaccggcgttctcatcaccaagctcaccgctggactcactgaggaagacgccaagaactccaagtttgtccaacaacacaggcggtgatctactgacgtgagttgtccaagctgagaagccgaagcgttcttatggaaactactgagagtgcttcagctttcaaacctgttctaataacatgaaagagaggattatagacactatcaatctctcgtttccttttctctgtgttttcacaactcttgaacagtgcaaattctactctgtttatccaaaaaaaaaaaaaaag

SEQ ID NO: 13238 - DNA, 404 bp, Arabidopsis thaliana
  unsure at all n locations
  Clone ID: LIB25-037-Q1-E1-H7
tgtccnnccggctccacggnnanggacgacccgggtcgacccacgcgtcngcaaaacgatcaaaaatggtctcataattctctctatatcttttatcactttcgaagattcctcttctcgcccacaaatcaaaatcatttcttttgccgactaattgaatttcttagaattcaacatacgcaatgaaaatgttctcgtcacaaagattagactaatccgactgtgtttttaatcaatcatcattttatttaggggagagaagttgtaaagttttgatttttttttctgggttttttctgtgagacccagangaagaacagagagaggaagaangagaaganannnnnatcgctttctctncggctttcaacaagaanctcgnnttttccgtcatcagtggtnaa

SEQ ID NO: 13239 - DNA, 64 bp, Arabidopsis thaliana
  unsure at all n locations
  Clone ID: LIB25-037-Q1-E1-H8
agaaaatgggtgatgaggcagagatnaagggacatttnaaggcacaagcttcatctgnaacaat

SEQ ID NO: 13240 - DNA, 448 bp, Arabidopsis thaliana
  unsure at all n locations
  Clone ID: LIB25-037-Q1-E1-H9
gctcaatctcaatctccctcttcgcgtccggagaacactggagaaatcgtggttgtgaaacagagaagcaaagcttttgcaagtatattttcttcgagtcgtgatcaacagacaacttctgttgcttcccctagtgtgcctgtgccaccaccatcttcatcaaccataggatcaccacttttctggattggtgttggtgttggtctatcagctttgttctcatatgtaacttcaaatttaaagaaatatgcaatgcaaacagctatgaagacgatgatgaaccaaatgaatacgcaaaatagccagtttaataattctggattcccatcaggatcaccttttccgtttccatttcctcctcaaacaagtcctgcttcctcgccattccaatctcaatcccagtcttcangtgctaccgttgatgtgacaagcgacaaaagtagagacg

SEQ ID NO: 13241 - DNA, 438 bp, Arabidopsis thaliana
  Clone ID: LIB25-038-Q1-E1-A10
caaaagcagaagcgagactatcgccgagagctctcactaactattgaattcatcgaagaagctctctcgttgtcgcagaatctcttcttctccgttctagaacaatggggaatgctcttgtcaaaaaagaaccaccgcctccggtggtactcgttcctccgctctttgattaccctcctctctccgcccgcactaggatgttggaatcatcatataatttgttgtttgggaagcttgcattgagatgtctatttgaggattactttgaagaagctaatcgattcacgggcaagtttttgttgaagcctactgatgatcctcatgtggatttggttgcatctgtttcgggtgctgtagatggtagagtggaaggagattttgttgggaatgcggagtttcgctggcaaagtgatgttgatgattctcatacttttgttg

SEQ ID NO: 13242 - DNA, 517 bp, Arabidopsis thaliana
  unsure at all n locations
  Clone ID: LIB25-037-Q1-E1-F1
ngnnnnnnggaactggtntgccttgnnctagccgtccggaaatcccnggtcgacccacgcgtccgattcnatctatagagacgaaacaaaaagagagatcgtacgcaaaagtttccgatatggctcgctcgtttggagctaacagtaccgttgtgttggcgatcatcttcttcggatgtttatttgcgttgtcctctgcaatagaagaggctacgaagttaggatcagtgatagggatagatcttggtactacttactcttgtgttggtgtttacaagaatggtcatgtcgaaattattgccaatgaccaaggaaaccgtattacaccttcatgggttggttttactgactctgaaagactcattggtgaggctgctaagaatcaagcagctgttaatccagagaggactgtcttcgacgttaagagattgatcgggcgaaaatttgaggataaggangttcaaaaggataggaaacttgtaccttaccagattgtgaacaaggatggtaagccatt

SEQ ID NO: 13243 - DNA, 447 bp, Arabidopsis thaliana
  Clone ID: LIB25-037-Q1-E1-C12
ctcctctacgcgaaattcgtattctctcatttcttctacggagatttgcatcgaagaaactgactcgcttgtggaatcaacaacaagacgatgtggcgctgcgtctctcgtggctttcgagctcctgcttcaaagacctcttcactctttgatggcgtctctggatctcgcttttccaagattcttctccactggttctaccgatacgagatcctcttatacgatagtggatcacacttatgatgcggttgtggtgggagctggtggtgctggtcttagggcggcgattgggttatcggagcatggctttaacaccgcttgcattactaagcttttccccacaaggtcacatactgttgctgctcagggtggtattaatgctgcactgggaaatatgtccgaagatgactggagatggcacatgtatgacactgtcaaaggaagtga

SEQ ID NO: 13244 - DNA, 312 bp, Arabidopsis thaliana
  unsure at all n locations
  Clone ID: LIB25-037-Q1-E1-C2
gnntngnggaactggtccgccttgttctagccgtccggagntccnaaggtcgacccacgcgtccgaaaaattattataatttttttggttggtgttggagagagatttcatgagcgtttggttgtgttttcaattattattgagaaaattgtatgttcttgagaggatttgtgatactatttaatcatctctggattccaaaaatttctggggattattggatgttgatgagaaaaaaaaaaaaaaaaaaaaaaaaaaaaaaaaaaaaaaaaaaaaaaaaaaaaaaaaaaaaaaaaaaaaaaaaangggcgg

SEQ ID NO: 13245 - DNA, 518 bp, Arabidopsis thaliana
  unsure at all n locations
  Clone ID: LIB25-037-Q1-E1-C3
nnntnnnngaactggtccgccttgntctagccgtccggacnatccaaggtcgacccacgcgtccggagaaaacttcttccaccacccaactggtcgtttctccaacggccgcctcatcattgatttcatcgctgaattcttgggtttaccgcttgtgcctccattctatggatctcataatgcaaactttgaaaagggagttaatttcgcggtagggggagcaaccgctttggaacgttcctttcttgaagacagaggaattcattttccttacactaatgtgagtttaggcgttcagcttaatagcttcaaggagagtttacctagcatatgtggctctccttcagactgtagagatatgatagaaaatgctttgattctcatgggggaaattggagggaatgactataactacgcgttcttcgtggacaaaggcattgaagagatcaaggagctgatgcccctggtgatnactactatttcttctgcaatcacggagttgatcggtatggggggga

SEQ ID NO: 13246 - DNA, 445 bp, Arabidopsis thaliana
  Clone ID: LIB25-037-Q1-E1-C6
aacctcttgtagtagattcgtgacgggtttgatcatctcttcgaggtcggttctagggtttcactacgagaatggacggagatgagctcaccgagcaggaaactgctctttatgaccgtcaaattagggtatggggagctggtgctcaaagaagattgagtaaatctcatgttttggtatctggaattaagggcactgttgctgagttttgtaagaacattgtgttggcaggagtaggtagtgtgactctgttggatgatcgattggttacaacggaagtcttcaacgcaaacttcttgattcttcctgatgaaaatgcttatgtaggcaaaaccgtagctgagatttgttgtgattcacttaaggattttaaccctatggttcatgtttcaatagagaaaggtgatttgtcaacacttggtgttgattttttcgagaagtttgg

SEQ ID NO: 13247 - DNA, 530 bp, Arabidopsis thaliana
  unsure at all n locations
  Clone ID: LIB25-037-Q1-E1-D11
gntnnngaatggtccttggntnccggtccggaccaaacgggtcgaccacgcgtccggctnaaaagangccgtgtaatagacgctgaagcatctgttgcagtgcttgatactgctgccggtgtatggttggatagaaatgggcaagttacttctgcacgtggaagtaagggacaaatcgatcaagatccgtcttttgaacttatgcgacgctgtcgccatggcgcggcatcagttggtatccggatctatgtgcatggtggtctaagaagagatgtgttacttgacgattttctagttgctgaaaattcaacattccagtcagacatcanttctcctttgctancatcagatagaaaccaacaaagttctactcccaagttttccttatgccgcacgaactccttcangctctgaancaagcttctccatgttctgaagggactgagccttgggatgaaaaattcccttgggagaaaattgacngaaggcttctgcagcctgaanccanaaggtaanctaagttctgtttt

SEQ ID NO: 13248 - DNA, 446 bp, Arabidopsis thaliana
  unsure at all n locations
  Clone ID: LIB25-037-Q1-E1-D12
ntggggaagaacatcttgacaaatgtttacgggaacaaggacaatgtagatgacacccttgtagagatcattgctggaccagcaaataccgaaggtgcactagatgcttttgtttcaatcttaacgggtcctcctggaccaaatccgattaagctgataccggaaataaccaaaccggttcttgtcttatggggagatcaagatggactaacccctcttgatggtccagtaggtaagtacttcacttcccttccggatcagttacctaacttcaacctctatgttctacaaggcgttggacattgcccgcaagatgatcgtccggatcttgtccatgagcgtctccttccatggctggctcaactttcttccacctagtttcgatttgtttanccgtgtacacttgtttataaatgtaaancaaatctatctaantggaaaaaaga

SEQ ID NO: 13249 - DNA, 449 bp, Arabidopsis thaliana
  unsure at all n locations
  Clone ID: LIB25-037-Q1-E1-D2
anattccctcttcacaacaacagcttcgtattcgctcatcttcttcgctttctgatcttggaaatcgcaggcattgttcgtctactcgaggatttcaattttggtcatacaagagaagcgaagcagcgtcgccgttcaagacgaggtacagagaaaacgaagaagaagaagatatgacgattaaaccggcggttcgtatttccgacgggaatctaatcatcaaaaaccggacgattctaaccggtgtaccagataatgtcatcacgacgtcagcatcggaagctggaccggtagaaggagtcttcgtcggagctgtatttaacaaggaagagagtaaacacatcgtaccgatcggtacgcttcgcaattcccggtttatgtcttgtttccggtttaagctctggtggatggcccagagaatgggagaaatgggccgagatattccctac

SEQ ID NO: 13250 - DNA, 523 bp, Arabidopsis thaliana
  unsure at all n locations
  Clone ID: LIB25-037-Q1-E1-D3
nnggnnnnnnnnggaactggtcngccttgntctagccgtccggacatccanggtcgacccacgcgtccgcccaagcgtccgctagatctagccaaaacttttgccatctctaaaatgtatctccattgacattttgagatctatctagctctgtttttctttttagaacaaaatggtggcgaaaccaaggtcaagatgttgttgttgtagtgtgttcatcggcgttatcatcttaatcgctataatcatcgctgtcattttcacaatcagacatagatcaaaccactccgatgatgatggctccaatgttaaaaactacgctaatgctctcaagatcgctatgcaattcttcgatatccagaaatctggtaagcttgaaaacaacgagatatcatggagaggagattcaggtcttaaagatggaagcgaagcaagtatcgatctttcgaaaggtttgtacgatgctgggagatnacatgaagtttggtttcccaatggctttcactgctacagttctctcatg

SEQ ID NO: 13251 - DNA, 426 bp, Arabidopsis thaliana
  Clone ID: LIB25-037-Q1-E1-D5
gcagtttgggcgatgtgctgttattggtaactctggtgatctcttaaaaacaaagttcggaaaggagatagatacttatgatacggttctaagagaaaatggtgctcctattcagaactacaaggaatatgtgggagagaaaagtacattccgtcttcttaatagagggtcagcaaaagcccttgacaaagtcgtggagttggatgaaaaaaagcaagaggtcctgctcgtcaaaacaacaatacatgatattatgaacaagatgattcgggaagtcccaataaaaaatcctgtgtacttaatgctcggtgcttcatttggctcagcagccaaaggaactgggctcaaggctcttgagtttgctctctcgacgtgtgattcagtggatatgtatgggattcacagtggatcaaggctataaagagg

SEQ ID NO: 13252 - DNA, 510 bp, Arabidopsis thaliana
  unsure at all n locations
  Clone ID: LIB25-037-Q1-E1-D9
gntnnnganggtntttggnnnccggtccgganaaacgggtcgaccnacgcgtccgctctntttgctcttagatcttccctctcatccggatcaagcttcaaaatttgtatgctttattcgatttaatgtctttgatacacttgttcttgttgttgggtctgctgagccttgaagctgcggcgtcgttttcaccgggatcgcgctcgattctccgggacatcggcagtaacgtcgccgatcagaaagacaacgctatcgaattgaacgctaccaactttgattcagttttccaagattcccccgccaaatatgccgttttagagttcttcgctcactggtcagttttctcattctctctctctctcgtaaaaaatctgaaaaaaattcaaactttaggcttttaagcactggatcttacacggaatttgtttgcaagtgttcntcaaattcgaacctgactttacgttatccaattctcngagatttatccggaaataacttaactttata

SEQ ID NO: 13253 - DNA, 446 bp, Arabidopsis thaliana
  unsure at all n locations
  Clone ID: LIB25-037-Q1-E1-E11
naacccccatacgaatcagacaagacactccttccaatataccatacttcatcctttgattcaaataccaaaaaaatttaaaccctaaaattcatttgagtctcttcctagtcatcaatctcttgaaaccctgattccatggtttctagattttccattgatcttgtttttaaataatgggaagctttcatcgccggactttttcttatgataaacttccgaacgaacccattaggctctccgttctcaaactagatggctcttcctttgatgtttacgtattgacctcggccaccgttggggatctcaaggttgctatagaaactgccttcagccatgtccccaagaagggaccctccaagatctcatggtcacacgtatgggggcatttttgtttgtgttcggangtcagaagttaattaccgatacggattgcatcggaaatt

SEQ ID NO: 13254 - DNA, 109 bp, Arabidopsis thaliana
  unsure at all n locations
  Clone ID: LIB25-037-Q1-E1-E3
ntaagcggatgatcnatttgggcgccaattggnttcacatggncattatggacgggcattttgtttctaacctaacgattggtgctcctgtcatcnagagtttgaggaa

SEQ ID NO: 13255 - DNA, 516 bp, Arabidopsis thaliana
  unsure at all n locations
  Clone ID: LIB25-037-Q1-E1-E4
gnnnnnggaactggtctgcctttgncctagccctccgganatcnaaggtcgacccangcgtccggcacaaccanggaggttgccaagttggaagagtggttgacaagaattacagagtcttaggcattgattccttaagggtcatcgatggatccacatttctcaagtctccggggactaatcctcaagctactgttatgatgctcggaaggtatatgggccaaaggattcttcaagagagggagatatacaacaaaccggataaagaagcgtgagatattacttgttttgagaaaatcttgatcttggaattgttttaatcaatgtatgattaacttaaagagtatgaatgtgtacatctgttcatgttctgtttctaatatgtataataatggtggaattatggtacttggggcttctagttttgcagaatttcggaatatgagtctagtattatccataanaannnnnnnnnnnnaaaaaagggcggccgctctaaaaggattcaagcttact

SEQ ID NO: 13256 - DNA, 446 bp, Arabidopsis thaliana
  unsure at all n locations
  Clone ID: LIB25-037-Q1-E1-E8
ttcccttaactctatctctaggtgacttaagagtaaaaaatggtagaggcagaggttgaagtagatgtggaaatcaaatctacggctgataagtttttcatgttctctagaagatcacaacatgcctccaaagccactcgctatgtacagggatgtgatctgctcgaaggcgagtggggcgaagttggaagcatactcttgtggaaattaactgttgatggagagccaaaagtgtcaaaggatatgattgaggcgattgatatgaagatgaatatgatccagtggagggtgttagagggacctctgaaggaagagtacaatattttctcgaaaacgatgaaagtaagccctaagcaaggagggtctggaagtgtggtgaagtggaacttgaagtatgagagaattgatgagaaggtggctcacctagagaggctccttcanttcct

SEQ ID NO: 13257 - DNA, 516 bp, Arabidopsis thaliana
  unsure at all n locations
  Clone ID: LIB25-037-Q1-E1-C10
gttgnngaatgtcttctggttnntcggtccggattatacgggtcgaccnacgcgtccggacnanancttcttgccgttaccaaaaccaaaatccctaaatttgccctcatttccctctgattagatcccttaccccgacaaagacaccaaaattcttgagggcgagagagctgattgatgtctttggtatctggagccagggacatggggttcgacgacaacaacaacaacanggaacaacaaggatggagatgatgagaactcctcctccagaacaagagccgacgacgatgctcttagtcgacagatgagcgaatcttctctttgtgctaccgaggaggaagaagacgacgattccaaattgcaattgggtcctcagtacactatcaagagaacatntcgagaaggacaaggatgatgagagtctgaggaaatggaaggaacagcttctcggaagtgttgatgtcaccaanattggagagactcttgatccggaagttaggattgatancctng

SEQ ID NO: 13258 - DNA, 454 bp, Arabidopsis thaliana
  unsure at all n locations
  Clone ID: LIB25-037-Q1-E1-A10
aaacaaggccatgtgcagagacagccgtattgttcccggggctgcagcgactgaaatagagttggctcaaaggttgaaggaatacgccaatgcagaaatagggttggacaaatatgccatcaccaaatacgctgagagttttgagtttgtacccaagacccttgcagataatgctggcctcaatgcgatggaaatcatagccgctctgtacactggacatggatctggaaacacaaaactaggcattgacttanaggaaggtgcttgtaaagatgtttcagagacaaaagtatgggatctttttgcaaccaagttatttgcccttaaatatgcttcagatgctgcatgcactgtacttcgtgtagaccagattataatggcgaaaccagcangtggaccaaggagagatgcagctcaagctgcangtgctggtgcngatgaagactaanccgng

SEQ ID NO: 13259 - DNA, 523 bp, Arabidopsis thaliana
  unsure at all n locations
  Clone ID: LIB25-037-Q1-E1-A11
gngnnnnnnngaantggtcctccggggngttctntccgtacgnacgannggtcggaccgacccgtccgcggaanaatgggcggacgcgtgggttcgtctcttctcatcctcctctcaagctccaatggcgagagttctagtctcgtctccatcttcattcttcggttcaccgttgattaaaccgtcgtcatctctccgtcacagtggagtaggaggaggaggaaccgctcaatttcttccataccggagtaataataacaaactcttcactacttcaaccaccgtacgattcagcttaaacgagattcctcctttccatggcttggattcatctgtagacatcggagcgattttcaccaagagctgaatctcttctctatacaatagctgacgccgccgttgttggtgctgattccgtcgtaactactgattcatccgccgtgcagaagagtggtggttggtttggttttaactccgatgctatggaattgggtctaagattttgaaggatggattatcaacg

SEQ ID NO: 13260 - DNA, 516 bp, Arabidopsis thaliana
  unsure at all n locations
  Clone ID: LIB25-037-Q1-E1-A3
nnnnnnggaatggtccgcctngntctagntntncggagntcganaggtcgacccaggcntccgccgcangttgccgttcagatgaccaccgctgagttaaatccatttccgtctcgctccgttttctcggtgtcgacgttggcactggaagcgcccgtgccggtttgttcgatgataatgggaagcttctaggatctgctactagtccaatacagatttggaaggatggagactgtattgagcaatcttcaacagatatttggcatgcagtttgtgctgctgtgaaatctgcttgctctcttgcaaatgtttcggatgtggaagtgaaaggaataggctttgctgccacgtgctctctcgtggcggttgatgctgagggatctcctgttacagtgtcgtggagtggtgattcaagaagaaacattattgtatggatggaccatagagctgtaaagcaggcagagagaatcaactcatttaattctccagtcttgcagtactgtggtggcggtgttt

SEQ ID NO: 13261 - DNA, 517 bp, Arabidopsis thaliana
  unsure at all n locations
  Clone ID: LIB25-037-Q1-E1-A5
gnntngnggaatgttcntaatgntctggcccnnncaaacggaaatccgggntcgacccacgcgtcngaagcncctagaggaaatctgagagcggtggctcttatcgccggcgataacaacgtccgaggctgtcttcaattcgtacaagacatttccggaactactcatgtcaccgggaagatctcaggactctctcctggcttccatggatttcatattcactcttttggtgataccacaaatggctgcatctctactggacctcacttcaatccattaaatcgagttcacgggccaccgaacgaggaagagcgtcatgctggcgatttgggtaacattcttgcaggatcaaacggtgttgctgaaatcttaatcaaagacaaacatataccgcttagtgggcagtattccatactcgggagggcggttgttgtgcatgcggatcctgatgaccttgggaaaggagggcacaagcttagcaaatcaactggaaacgcaggctcgagagttggatgtt

SEQ ID NO: 13262 - DNA, 445 bp, Arabidopsis thaliana
  Clone ID: LIB25-037-Q1-E1-A6
aaaaccttctttctgagccagaaagtttagttcgccttgttctgtctgtgtttcttcctcttcccctgaaatcgaacgatttataaaatcgtcgtctggctttcgacgatctgctgacgaagaccatggcgccgattttcagatccacttcccttatcgctttttctctcttcttcttcttctttgcttccactcttccgatctcatctgggtctgaggatagttacacgatcacgggtagagtgagggttccagcaagcaccgtgattggtcatgcagctaaattctcaaatatcaaagttatactcaacggtggacaagcatgttactttcctcaggccggatggatactttaccttccacaaagtgccaagcggggactcatctgattgaagtttatgcactgggctacttcttctccccagtgcgagttgatgttagtgcg

SEQ ID NO: 13263 - DNA, 447 bp, Arabidopsis thaliana
  unsure at all n locations
  Clone ID: LIB25-037-Q1-E1-A7
ttcagggtctttctagatgaatggaaacctgtaataatggaactctcaaatagagaacctgagttacttttgactctactcaaggaagtccttgatatgatccaaaataatgaacggagaagacatgaaaccgaaaagccagtggaagaggtttctcaagttgagcaggtccctttcttgtttgcatggcttgtgagtcttctcaatggatcaaagcattttcagagaaacagttctctagaagtgaaacctccaagcattttccttatggaacttatacgtagatgtcttgtcttgggagccttaggatatgagctggttttgaaatcagcatttctactcgcagagattgtgggaggccgtgtcttaaaggagaagctcataaaacttcctcttatgcataaaagctctgcaattgttccattgaaacagagttctactcntgtt

SEQ ID NO: 13264 - DNA, 522 bp, Arabidopsis thaliana
  unsure at all n locations
  Clone ID: LIB25-037-Q1-E1-A9
ggnnnngnggaatgttctgcttggntcaccggtccggancatcacgggtcgncccacgcgtccgcccaancgtccggttgaagcaccagaaccaacacccgtcaatccatcatcagtaccatcatcttctccttccactgacacatctattccaccaccggaaaacaacgacgatgatgatgatggggatttcgtcctaccaccacacattggattccaatatgcatcgccaccaccaccaatgttccaaggatattaaaaccaatgtagtagtgacagtgttacccatttttaacatttctgtccattttttccatgtgaattatttgtatcaaacgaaaaagatattacaaagatgaaaaacaacgacgatgatgatgatggggatttcgtcctaccaccacacattgggttccaatatgcatcgccaccaccaccaatgttccaaggatattaaaaccantgtagtagtgacagtgttacccattttnaacatttctgtccattttttccatgtgaatt

SEQ ID NO: 13265 - DNA, 451 bp, Arabidopsis thaliana
  unsure at all n locations
  Clone ID: LIB25-037-Q1-E1-B10
gnatctcacgatttcttatcaatggaactcgcttctctttctcagatccccatccaaatcgttttataggtagattagatagataaactacggatatactcgaactctatccatttacggtattgatttggaaatatggacaagtatgacgttgtcaaggatctgggagctggaaatttcggtgtggctcgccttctcaggcacaaggacaccaaagagcttgttgccatgaaatacatcgagagaggtcgcaagatagatgagaacgtggcgagagagattattaatcacagatcacttaaacatcctaatatcatccggttcaaggaggtgatcctgacacctactcatcttgctattgtgatggagtatgcttctggaggagagctctttgatcgaatctgtactgccggtagatttagtgaaactgangctaagtactctttcaaca

SEQ ID NO: 13266 - DNA, 452 bp, Arabidopsis thaliana
  unsure at all n locations
  Clone ID: LIB25-037-Q1-E1-B12
aatgtctttgatgaatgcaacgaccaaactgatatcggtcgggttatacgcgatggaagggaagtcattctccaagcatataattgggaatctcataaatatgattggtggagaaacttggatggtaaagttcctgacatcgcgaaatccggctttacttctgcatggttgccaccaccatctcagtctcttgcaccggaaggttatcttccacaggacctttattcactaaactcagcatatggctctgagcatctattgaaatccttactgcgcaagatgaaacaatacaaagttagagctatggctgatatagtcatcaatcatcgtgttgggacaactagaggacatggtggaatgtataaccgttatgatggaatttcattaccgtgggatgaacacgccgtgacttcttgtaccggangactgggtnaccgaaagcacaagggaaa

SEQ ID NO: 13267 - DNA, 444 bp, Arabidopsis thaliana
  Clone ID: LIB25-037-Q1-E1-B4
tgtaaataatcttctcacatccccgcacgattattctctagccgatcaacgaacacagagacgctaatgtatttgactcgattcgaatcattagtcctctaatcacaccgattgatttccacccacagatttcttgtctgaaatttagggttagcgaaggtttggatcaatgatgcaaggtgaagtacaattgcagccaccggattcacagaaactaagtgattccgctcctttgttaggagatcacaccaattcttcttcggcgtctccttctgctgcgtctgtggtggcaggaaatagcgatgagataaaggctgaagaagatttagagaacgatgcttcttcagctccttgttgtcgtatttgtttggaggacgatagtgaattgttaggcgatgaattgatttcaccttgtatgtgtaaaggcactcaacaattcgtgca

SEQ ID NO: 13268 - DNA, 506 bp, Arabidopsis thaliana
  unsure at all n locations
  Clone ID: LIB25-037-Q1-E1-B5
tantcgnccagtatncccgcatacntgncccccgngctgggccccacgcgtcngtgaaaaatttgactagagagcattaccagtttttcctgtatcagttattgcgtgcactgaagtacattcacacagctaatgtctaccaccgaggcctgaaaccaaagaacatattggcaaatgcaaactgtaaacttaagatttgtgattttggattggcaagggttgcattcaatgatacccccacaacaatcttctggactgactatgttgctaccagatggtatanagctccagagctttgtggatctttttactctaagtatacacccgcaattgacatctggagtatangctgcatttttgcggaggtgttgatnggtaaaccacttttccctggaaagaatgtggttcaccagctggatcttatgactgatctgctaggggacaccttccctggacancatctcacgggtgaggantgagaacgcccggangtacttnaccngcgg

SEQ ID NO: 13269 - DNA, 437 bp, Arabidopsis thaliana
  Clone ID: LIB25-037-Q1-E1-B6
gcaaaaatggctatctcaaagcttattcctactcttgtgctctttgttttgttctcttttgatgttagtgttgctcatccaggtctaggatttggatggggaagtaatagtcccattggaggatctttttactcaaatctttacccacaattttaccagttctcttgtccacaagctgatgagattgttatgacggtgctcgaaaaagccatagctaaagaaccaagaatggcagcatctttactcagacttcacttccacgactgcttcgttcagggctgtgatgcatcaatcttgttggatgatagtgcaaccataagaagtgaaaagaatgctggaccaaacaagaactccgttagagggtttcaagtaatcgacgagatcaaagccaaacttgagcaagcttgtcctcaaactgtctcctgcgccgacattct

SEQ ID NO: 13270 - DNA, 430 bp, Arabidopsis thaliana
  Clone ID: LIB25-037-Q1-E1-B8
atacgtataataacatcccttgtgatcaaacaagtaaaccattcaaaagatgaaaggaagaattttgattttgagtttgctcataatgagtctggtcatggcacaagttcaagtagaagcaaagatctgctgcccttccaaccaagctagaaatggctatagtgtatgccgtataaggttttccaagggcaggtgtatgcaagtgagtggatgccaaaactctgatacatgccctcgaggttgggtaaacgccattctcgaaaactcagctgatgctaccaatgagcactgcaagttagggtgtgaaacttctgtgtgtggtgccatgaacactctccagaactctgatgcaagtgaaattgtgaatggagcgtcggaacaatgtgccaagggatgttctattttctgtaccaagagctatgtatcccac

SEQ ID NO: 13271 - DNA, 453 bp, Arabidopsis thaliana
  unsure at all n locations
  Clone ID: LIB25-037-Q1-E1-A1
aagaagaaggcgagaagaggagcgacaagggcgaagctgcagaattcttcggtaattttcagattcggttgaataatggcggctgcggcttttgggcagttaaatctagaggagcctccaccgatttggggatctcgtagtgtcgattgcttcgagaagcttgaacagattggtgaaggaacttacggccaagtgtacatggctaaagaaattaaaactggtgaaatcgtggctctgaaaaagatccgtatggacaatgaaagagaagggtttccgataaccgctatccgggagatcaaaattctgaagaagctgcatcatgaaaatgtcatccatttgaaagagattgttacttctccaggtcgagatagggatgatcaaggaaagccagataataacaaatacaagggtggaatctacatggtctttgagtacatggatnatgacttgact

SEQ ID NO: 13272 - DNA, 289 bp, Arabidopsis thaliana
  unsure at all n locations
  Clone ID: LIB25-035-Q1-E1-E4
ccgtnaccttcgttacntcatcaacatgacacgtaaacccgtagcgattgtnnctgccgcggatgtcactcacatccaggctacaatnacttgtgccaagaaactcggnntccagctccggatccgcagtggaggacatgactacgacggtangtcgtatttatcaaccattgatttcgttgtnctagacatgttcaatctccggtctatcaatanagattctaaactcgacatgcgtgggtccaatccggtgctacncctggggaagtntaacnacggagtcgccaac

SEQ ID NO: 13273 - DNA, 70 bp, Arabidopsis thaliana
  unsure at all n locations
  Clone ID: LIB25-035-Q1-E1-E8
gtatcctcctccatcaaatccaacgttgnatcgtccctctcngtatcacctccgtgtcatcancatcgga

SEQ ID NO: 13274 - DNA, 477 bp, Arabidopsis thaliana
  unsure at all n locations
  Clone ID: LIB25-035-Q1-E1-F1
anacacaanttgtaacttcaaatagattactttcaaagaagagagagagaaagaaagatggacaagaacatgaagtttccagtagtagacttgtccaagctcaatggggaagagagagaccaagccatggctctaatcaatgaagcttgtgagaattggggcttctttgagatagtgaaccatggattaccacatgacttaatggacaaggatcgagaagatgacaaagggaccattacaagacatgccaagaacaaaagttcantgacatgctcaaagtccaaangtttggataatccttgagacaagaagtccaagatgtcgattgggaaaacactttccaacgttccgtcaactcccctcaatccantcncaatgacatttcaaatggtgtcngatnaatacaggacggggcatgaaagacttggtaagaaactggagaatccctggcgangatttgttgggntcaacngtgtg

SEQ ID NO: 13275 - DNA, 443 bp, Arabidopsis thaliana
  unsure at all n locations
  Clone ID: LIB25-035-Q1-E1-F10
catcaactcctgttagaggagagacagtggcgaaactgaaagttgcgattaacggttttggaaggattggtaggaactttcttaggtgttggcatggtcgtaaagactctcctctcgaagttgttgtacttaacgacagtggtggtgtcaagaatgcatcccacttgcttaagtatgactccatgcttggaaccttcaaggctgaagtgaaaattgtggacaatgaaactattagtgttgatggtaagctcatcaaagttgtctccaacagagaccctcttaagcttccatgggctgagctcggcattgacattgttatcgagggaacaggagtgtttgttgatgggccaggagcanggaagcatatccaagccggagcctcnaaagttatcatcactgcaccaaccaaaggtgctgatatccctaactaagttatgggaatc

SEQ ID NO: 13276 - DNA, 427 bp, Arabidopsis thaliana
  unsure at all n locations
  Clone ID: LIB25-035-Q1-E1-F11
ngtnnngactggtttgcctgggcncttcggtcggncanatcccgggtcnacccacgcgtccgcttcatgtcaagcaagcttgatcggtaggtccaaagattcctgcaacgttcctggcttcagaactacaacggagcaggttgtgtttaagtccaagatatctaatctctgtgtctatgggtttactgctttaaatttcagacctttagagaagaatcttcatttgtgtggcaagtaatagagaacaaactgcaataatctaagtctttgtttgtttctactctaactttgtccttaagacaagaacaggatcactctgttctgtcttcttgtcctctgtattttatctttagacttttgttattttatttatatatgagttttagtttgttaaaaacaaaacanntncannanncntgggcnanaa

SEQ ID NO: 13277 - DNA, 465 bp, Arabidopsis thaliana
  unsure at all n locations
  Clone ID: LIB25-035-Q1-E1-F2
tngctttcnttttttttttgtangaaagggttaattatacgtaacacanaaacaaaaacaattctctttttcctctagaaaaagagattaaaaaaaaaatggaggggaggttattgacggtgttggtctgcctcgtctctacggtggcgatcgtgaacgccggtgatccttacttcttccatacatggaacgtgacttacggaactgcctcacctctcggtgttcctcaaaaggtgattctcatcaacggtcaattccctggtcctaaccttaactcaacctctaacaacaacgtcgtcatcaatgtcttcaaccaactanacgaacctttcctcttgacctggagtgggattcagcatangaaagaactgctggcaagatggtgtggctggaacttcatgccccatcccaactggacagaactttacttaacaattcaaactaaggaccanattgggtcctact

SEQ ID NO: 13278 - DNA, 85 bp, Arabidopsis thaliana
  unsure at all n locations
  Clone ID: LIB25-035-Q1-E1-F3
cngactgtggcaacacgaccgtgttgaggatcatcactaatgatcaatgaancataancactccctcgtacgttgctttcacnga

SEQ ID NO: 13279 - DNA, 462 bp, Arabidopsis thaliana
  unsure at all n locations
  Clone ID: LIB25-035-Q1-E1-F4
ctaancttttcanagaaagaagaagaaaaaggcggaattcgatggtggatgcgattcaagtagctgagctgagaagattcgtcgagcagttgaaattgaatccttcgattctccacgatcctagtctggttttcttcaaagaatatctccgaagtttaggagctcaagttccgaagattgagaaaactgaaagagattatgaagataangccgagacaaaacccagtttctctcctaaacatgatgatgatgatgatgatattatggagtctgatgttgaactccanaactctgaagtagttnaaccaaacaatgagcctcctcagccgatgggaaaacctactgctnaagtgaccgatgnaaatacggatgatgctcagtcagagaagaacaaanctatggangcaatctccgaagggaagtttgaccaagctatagagcatctaacaaaagctgtcatgc

SEQ ID NO: 13280 - DNA, 84 bp, Arabidopsis thaliana
  unsure at all n locations
  Clone ID: LIB25-035-Q1-E1-F6
taacgaatcagatcaagtcgacaatggtccnctctccggaccncacctgatgtctatacgctgcccataancttggctcattnt

SEQ ID NO: 13281 - DNA, 451 bp, Arabidopsis thaliana
  unsure at all n locations
  Clone ID: LIB25-035-Q1-E1-G1
gttttcgttttgtctttctttatcgtctcggtttcgtcgtctgatgtcaacgacggcgatgatctcgtgatccgtcaggtggttggtggagccgagcctcaggttttgacctcagaggatcacttttcnctcttcaagcgggagttcgggaacgtctacgcttccaacgaggagcatgactatagattctccggntttcaaagcgaatctcaaggcgaacgaggcgtcaccaagaagttgggatccgtcngcgactcatggtgttacgcagttctcaaaatctgactcggtctgagttcngtaagaagcacttgggggttacaagtggtttaaancttcctaaaaatncaaaaaaggccccaattctccctaccgaaaatctccctgaggattttgattggaaaaatnatggggccgttactccctttaaaaacagggatttgcggccttg

SEQ ID NO: 13282 - DNA, 455 bp, Arabidopsis thaliana
  unsure at all n locations
  Clone ID: LIB25-035-Q1-E1-G10
cattttaacaaactataatttgaaattatttcaaattacgttttagggaaaattaatctttaatcatggcaaagatctcctttgcgcttgtcgttgtcgctcttattgtctttcaacaagtatctgaggctcatcgtccgatagatttcaacgaagaagtacttgaaaaggacttgcatgaagccaaggacttgatagaagaagacttgagagagaaagaaacgagcatcaggaacttggaaagcgaggttagtttgttaaccaaatctgagatgatgcttactcagctcgaacttgcttacaaaaatggtagaaatcttgagcatttcgggaaaaaactcaagaaattcaacaggaggatnaagcgggctcctgangaagtgagatacgtttccatcatccagtccattttgaanggatttgggattaaacngagggagacattaaaacaagaa

SEQ ID NO: 13283 - DNA, 94 bp, Arabidopsis thaliana
  unsure at all n locations
  Clone ID: LIB25-035-Q1-E1-G11
cagcancatcatcatcatcatcatcaacagcagcgtcacctgangttgagactgtctcaaaccggangtttgcagagacgtttgattanacgag

SEQ ID NO: 13284 - DNA, 235 bp, Arabidopsis thaliana
  unsure at all n locations
  Clone ID: LIB25-035-Q1-E1-G4
aaactaacacaagtagataaatataaagaaaaatgcttgataagcttattattggggttgccggagggattancggagggattcttggaacggtcgatgggtttgccaaaggggtcgggatatggcccaataattatcanagcaccggtcgcttcnagaacaacaatatgacgagtccgggaaactacggcaatggtaatggcggtgcagtgaaggcatccgagaactccggcgg

SEQ ID NO: 13285 - DNA, 131 bp, Arabidopsis thaliana
  unsure at all n locations
  Clone ID: LIB25-035-Q1-E1-G9
gtacagtagctanctccggaagantcacagcgccaaagttctcaacgcntcttctaaagttcttttccgagcaacgcttctcgtagctcttgtccgcgtccncatcttcgccntcaactaccctccantct

SEQ ID NO: 13286 - DNA, 453 bp, Arabidopsis thaliana
  Clone ID: LIB25-035-Q1-E1-H11
aagacagacagtcagttacatatcagaacatgttgttggtactggttcctttggcatggttttccaagctaaatgtagggaaactggggaggttgttgccatcaagaaggttctacaagacaaacgctacaagaacagggagctacaaataatgcagatgctagaccatcccaatgccgttgctttaaagcatagctttttctcaagaacagacaacgaagaggtttatttgaatcttgtccttgaatttgtgcctgagaccgtcaatcgtgttgcaagaagttatagtaggacaaaccagctgatgccattgatatatgttaaactctacacctatcagatttgcaaggcgcttgcttacatccataattcctttggtccttgtcaccgtgatatcaagcctcaaaacctgctggtgaaacccacacacgcatcaactaaaaatatgtgatt

SEQ ID NO: 13287 - DNA, 453 bp, Arabidopsis thaliana
  unsure at all n locations
  Clone ID: LIB25-035-Q1-E1-H12
gcgctctcctctttcaatctctcttctctattattcctcctcttcttcactccttccgttttctcgtattcgtatcaaccttctctaaaccctcatgaaacttctgctacaagtttctgcaaaaacacaccatatccagatgcatgttttacctccttaaaactatccatctccatcaacataagccccaacattctctctttcctcctccaaaccctccaaacagctctttccgaggctgggaaactcaccgatctcctttctggcgctggggtctccaacaacctagttgagggacaacgtggctctcttcaagactgcaaagatcttcaccacatcacttcttctttcttgaaacgatnaatctccaagatccaagacggtgttaacgattcacggaaactagccgacgctagagcgtanctaagcgccgctctcaacaacaaagattag

SEQ ID NO: 13288 - DNA, 51 bp, Arabidopsis thaliana
  unsure at all n locations
  Clone ID: LIB25-035-Q1-E1-H2
atnacgtcttggcatacantgggagatgggttcacgagtgcatcgttccag

SEQ ID NO: 13289 - DNA, 308 bp, Arabidopsis thaliana
  unsure at all n locations
  Clone ID: LIB25-035-Q1-E1-E3
gagagagaaggagacgccatggaaaggcttcttcaaccatcttcttcttcttcctcaatttctccttccaaattcccttcacgggacttctcctttccttccccgtctccgctcatcgggtctgagctttgtctcgactcancggcccgagtcacgccgagtcagctcantttcctgcaacagttcccagattccgtcantgtatacgcctataggatctaanacnnctaacaattccntcaatgggtctcccaaatcggatgaatcnaaagctaatcccggatttctcacacggatngcgangtcgg

SEQ ID NO: 13290 - DNA, 450 bp, Arabidopsis thaliana
  unsure at all n locations
  Clone ID: LIB25-035-Q1-E1-H3
gcgctctcagctatggtcatcaacaaatataagcttaggagtaatatcaagagcttcaatctttcggggatgggctgcagcgcgggcctgatctcagttgatctagcccgcgacttgctccaagttcatcccaattcaaatgcaatcatcgtcagcacggagatcataacgcctaattactatcaaggcaacgagagagccatgttgttacccaattgtctcttccgcatgggtgcggcagccatacacatgtcaaaccgccggtctgaccggtggcgagccaaatacaaagctttcccaactcgtccggacacaacgtggcgctgacgacaagtcttctactgtgtctacgaacaagaagacnaagaaggacacttggatcaacttgtcaaagattcatggcatcgccggtgaagcctcaaaggaaacatcaccacatagtcnttggtc

SEQ ID NO: 13291 - DNA, 344 bp, Arabidopsis thaliana
  unsure at all n locations
  Clone ID: LIB25-035-Q1-E1-H4
cttccttgaagtcgccggcgagacaaacaaananaacataatcccgacggttacacgtaccggagaattgtatttaaattgaanccgctttgtattttcctcanagccaaagatttttccttacnaggattttcattttctcntctgttttcgtttcaaattcaggaaaatcttccgtttcaatccggtttanatcggtttttaacaatgtcgatggtaactgtcaaagttaacaacgtttctcttgaagcaacagaaagagatntcaaggngttcntccctttttccggnganattgcctaactccangactcaangcgaagaatgatggntctaaattagna

SEQ ID NO: 13292 - DNA, 447 bp, Arabidopsis thaliana
  unsure at all n locations
  Clone ID: LIB25-036-Q1-E1-A12
nataaccaacggacanaaataaaatctactttttcttctgatattttatctaaacaccaaagaaatgggcggcttttggtttttaaagactgttgtttttgtttctgtcggtaaaacataaaagaaaattttattgctcttgaagatattaaaaatcagacaagctgttcaagaaaaatattattctgttgaataaagtaaactgatggggaagagaaggtttcagaaagcaaaggaaacgtcgtcagtagcagaagcttcatctccgacggagtctcaggctacaaggagacgaagaggaaggccaaggaagaatcttgagaacccagaagatttcaagaangaagaatctgaagaagacgaggattacgaaagagtacgaggacnaagaagaagaaagacgaagaaactgangtgggttantaacagagaagaanctgaanaana

SEQ ID NO: 13293 - DNA, 460 bp, Arabidopsis thaliana
  unsure at all n locations
  Clone ID: LIB25-035-Q1-E1-C3
gccaccagaggtttttcccctgcttcgagcgccgtcttggagaagctttttctcgataggctttgcagtgacagggacacagggtttgggattgaagcgaaaaaccctagcgtttacgcgtcttctcaagcgaaaaaatccntaatttccacagagaagaatggctatggagatcacacagttccttctggctgcccagtcagccgatgcaagagtccgtactgaagcanaggctagtctcagacagttccaaggaacaaaacttgccgctgttcttgttatccttgtcttttgagcttgaaaacaatgataaacctgctgaatcccgtcgactaaccggtattctgctaaagaattctctggacgccaaagattctgccacaaaagatnatctggtgaaacaatggtttgcaattgatgttgctcctaaatcccaagatnaaggatcgcntactaagaa

SEQ ID NO: 13294 - DNA, 454 bp, Arabidopsis thaliana
  unsure at all n locations
  Clone ID: LIB25-035-Q1-E1-C5
tgnngaantggtttgcgtgcccnngggtctagcgaatccggattatcgcgggtcgacccacgcgtncgcggaaacgtggggcgaagctaaaggagataggaggaaacaacatatttgcanatgggaaagtagaagcaagagactatttatgcggtgtccgtaaaccaccaggtggagagacaagcatcgcacttgtttaaaatcatctttttcggtaacaacttaactcttttataaaccgcggttgttcggtgtgtgttcttgtggtttcccatacacttcagctcaaagtgtgatttgtattttgcggtttcntggttgttatttttattgagttggtttttaagccgttagggctttctaatgtaagttcgagcttaaactgttgggagattatnagcattactacgggacaagatgatgttgcttgtttcagaaaagaanctgctaaaaa

SEQ ID NO: 13295 - DNA, 462 bp, Arabidopsis thaliana
  unsure at all n locations
  Clone ID: LIB25-035-Q1-E1-C6
gnctagtcggagagaagtacggtgccggtgcggcagacggatgtgggttcaaccagacgcccgtaccgtccaatgctcaacctgccacaccgtcacgcagctctactcgctagtggacatagctcgcggtgcaaaccgcataattcatgggtttcaacagctacttagacaacaccaaccgcaacatcatgaacaacaacaacaacaaatgatggctcaaccgccaccacggctgcttgagcctcttccctcgccgtttgggaagaagagagcagttttatgcggcgtgaactataagggaaaaagttatagcttgaaaggttgcatcagtgatgctaantcatgaaaatctttattggttcaacaaatgggtttccctattgactctaatctcatgctcacaagaagatnaaaccagcccgcagagaataccgacgaagagaaacattaggaaggngatta

SEQ ID NO: 13296 - DNA, 456 bp, Arabidopsis thaliana
  unsure at all n locations
  Clone ID: LIB25-035-Q1-E1-D10
catttcatcttcaccaaactctcatggacttcgattccgcagtgagtttttatttcctctcctaaccaaatctttactctacttattaattttgatataaacaaaccctttgaattcatttgttttacaaatttggaccgtaatttttgaacattacaaaaggaaaccctattatctgttttgttttctttaggacaaacgagagagtgtggaggagacagtgatgatggaatacgatgaagaaaccaatcaattcgacgttgaattttgtccggttgagcatcctattgaaccggaggaagaagatcgtccggttaaatgtcccgtaccaatatcatcttctctcatccacaaaccaaaggagaaatcgaaaccggggtgggttaaacacagagccagcagctacgaaactccnggttatccaacgccacgtcatcatgtacgttacgtacgaaa

SEQ ID NO: 13297 - DNA, 447 bp, Arabidopsis thaliana
  unsure at all n locations
  Clone ID: LIB25-035-Q1-E1-D12
gcagtagggttgaagcggatagtacgccacctctatctctctctcaccctatcgaactcgcgaagaacatcttcttcttcttcttctccgtcttcgtcttcgcgagctctctcagtagcgcaataaaatgggggcttcgcttcctcctaaggaggccaacctcttcaagctcatcgtcaaatcatatgagactaagcagtacaagaagggactcaaggcagctgatgccatattaaaaaagtttcctgatcatggagagactttatcgatgaaaggactgactctaaactgtatggaccgcaaaactgaagcatatgagcttgttcgacttggagtgaagaatgatatcaaaagccatgtttgctggcatgtgcttggtcctttgtaccggtcagacagagagtatagagaagcaatcaaatgctaccgaaatgcccttagaatana

SEQ ID NO: 13298 - DNA, 543 bp, Arabidopsis thaliana
  unsure at all n locations
  Clone ID: LIB25-035-Q1-E1-D3
nngnngantggtttgtgttnccctaggcctcngganatcccaagtcgacccacgcctcagcccanncgtcagcttttgagaaagaaaaacccaaacttgccatgttttagatctggtcctttttaagctccaaaagattgttgctttttctcttgcttaagtttttgatttattcttcttcttcganaagtctgtacctcgcaagagtttgattgtccttgtgttgcgatttccatgtttagtatctgcatttgatagccttcgatgctgcatgcaattcccaagactctttctgantgctacaacgccgtgatttctctctgccatttccttcgatttgatttctgggttctcttcttctcgtctctcttctgcatgtttcgccactctancttaagaaaaaaagttacgtttcgcctccgatttaaggctcgatttgatgaaattcngtccgtcntgtgggctaattancaanattgaacattaaagggtttcctgaatttgttgggttcaagaaattggttttaaaccaanccngtcctt

SEQ ID NO: 13299 - DNA, 460 bp, Arabidopsis thaliana
  unsure at all n locations
  Clone ID: LIB25-035-Q1-E1-D4
accancttctctccaatctggatctggttcctcttcttcttggtctcttctccatctcatcggagctgatctcgaattgttctccgttcanttgttacggtggagatnanctcggatcaccgcgacgctcttttctctctggaactggaatcgcctgatccggacgaaggaggtgtatcagacggaggagaatctgatancgacgaggatttgcgcgacaacgatgatgttgttatgccgggaacgaacgaagctgaagctgaagacgacgatcccgaagaggaagatctcaattctccgtctacatcatcactccccatggtttctacgaatctcagcgactgctgttgtttccgggaacccgacggcgacttcctctacangcgccgtgaccgttgcactttcggctggattcgccgtcctgtctncgtgaatcccgttgattccgattcgaaatggg

SEQ ID NO: 13300 - DNA, 441 bp, Arabidopsis thaliana
  unsure at all n locations
  Clone ID: LIB25-035-Q1-E1-D5
ccannngnangaagnaggangaaaanaggccgaangaatttcttaaaaaatcctaaatcctccggtggcctttccaantttcaaaanttgnattttgtcctccctttaagcgggatcgattcgttggattatnaaagctccgccgtcgcctccgccgcaatcgacgggcgggtgtctacgtcgctttcgtttcgtgcgtnacangaggagcagcagcaaaataagtcagcttaagtaacgccgtctttgatttgacttgagataagtattttggtgatatggcattgatgatgtttccgcatttgctcgacgttgacganaagttnaatgctggcgaattggnagaaaccacatncagattgatgctctcttcagtcgacctcttttgttaatttgttgaaacttacggggtcgaaggtgtgtacatatatgctataagga

SEQ ID NO: 13301 - DNA, 532 bp, Arabidopsis thaliana
  unsure at all n locations
  Clone ID: LIB25-035-Q1-E1-D8
nggnngaactggtttgcgtttccctaggncctagcgaanccgganatcgcgngtcgacccacgcgtcagggcnaactgcantctggtttcggtggatgaacaatgaacagaacgagagagatcctgataanatcaacaacaagaagaagaaaaaggaatctccattgttgatttactccgtctcgaaagcagagaaacgaatcgtgtctaagttcagaaggagacccttatcgccgaatacgtctccttcttctgggttttggaaaanagtctgcttttgtggaattgaacctgaccctgaagatgacaactttaancttagggttctgctacagaccaatgatttcttctccaaggattctaatccacatctctgtttgtaagttcagatatatatatatatatatatatatatagtgtagttttcatttagtataccaccaatatctgtatagatcttcctttaaacttcatcaanatcaanagtgtgttcatcaatgttnccaaanatttttgcagaacagagtgatta

SEQ ID NO: 13302 - DNA, 430 bp, Arabidopsis thaliana
  unsure at all n locations
  Clone ID: LIB25-035-Q1-E1-D9
caggagattatcaagctgttttggagtatctcaaaggaggacagagcgaccaacaattccgcagaaaacttgcgtggaaggcctttcagcatgttgctgcatatgattctgcggtttcagaatggctatggaagcagactgaaggaaaagagaagttccctcccagctttacagttccgcttgtacttaagagttctcttcgttacggtgaaaatcctcatcaaaaagctgcattttatgttgataagagccttgctgaagtgaatgccggtggtatcgcaacagcgattcaagcatcatggaaaggaaatgtcatacaacaactatcttgatgctgacgctgcatggaactgtgtgtcngaatttgaaaanccaacatgtgtagtcctgaaacataaaaatccttgtggggtggccnccctgaaaaaaa

SEQ ID NO: 13303 - DNA, 207 bp, Arabidopsis thaliana
  unsure at all n locations
  Clone ID: LIB25-035-Q1-E1-E1
ctctcnggaaactctcnggttgcactaccatctntgananantcattcgttcctctcgctctcttcaacctcattgtcaatctgctcctaataaggttganaagccgaacagcaaggttgatgatggcatctttggaacgtcnggtgggattggtttcacaaangcgaatgagctattcgttgtgtcgtgttgctatgattggnttc

SEQ ID NO: 13304 - DNA, 450 bp, Arabidopsis thaliana
  unsure at all n locations
  Clone ID: LIB25-035-Q1-E1-E10
aagataaagtggttcttgtgacaggtgcttcatctggtatagggagagagatctgtcttgatctatgcaaagctggttgtaagattgtagcagcagctcgtcgtgttgatcgtctcaactctctctgttctgaaatcaacagctttggtgcaatcggagtccaagccgcagctcttgagctagacgtttcatcagacgcagacactattcgaaaagcggttaaagaagcttgggaaatctttggaacgatcgatgttttgattaacaatgctggaatcagaggcaatgtcaagtctagtttggatttatcaaaagaagaatgggacaaagtctttagaaccaacttgaccggatcttggttaatatccaaatacgtctgccttttgatgcgtgacgctaagcgtggggggctcggtgantaacgtcnctcgatttcctgggcttcatcgc

SEQ ID NO: 13305 - DNA, 431 bp, Arabidopsis thaliana
  unsure at all n locations
  Clone ID: LIB25-035-Q1-E1-E11
gctttgcaagtctattaaccctgatgaggctgttgcctacggtgctgctgtccagggagctattctcagcggtgaaggaaacgagaaggttcaagatcttctattgctcgatgtcactcctctctcccttggtttggaaactgccggtggtgtcatgaccactttgatcccaaggaacacaaccatcccaaccaagaaggaacaagtcttctccacctactcagacaaccaacccggtgtgttgatccaggtgtacgaaggagaganagccagaatcaaggncaacaancttcttggtaaatttgagctctccggaattcctccaagctcctccgtggtgtcccccagatnanantctggntttgacatttgatgccaangggnatnctcaatgtcccctgctgnggacaagacaccgggccnaanaaaca

SEQ ID NO: 13306 - DNA, 455 bp, Arabidopsis thaliana
  unsure at all n locations
  Clone ID: LIB25-035-Q1-E1-E12
ntggccttctctatcacccgaagctgtagattttgtgaagagattgctaaacaaagattaccgtaaaagactaactgcggcccaggctttgtgtcatccctggctggttggctcgcatgaactaaagattccatctgatatgatcatatacaagcttgtaaaagtgtacataatgtcaacttcattgagaaaatcggctttagcggctcttgccaaaacattaactgtaccgcagttagcgtatcttcgggagcaattcacattgttggggccaagcaaaaatggatatatctcgatgcagaattacaaaacagcaatcctaaagagttcaacagatgctatgaaggattctcgagtgtttgattttgttcacatgataagttgtcttcaatacaagaaactanactttgaagagttttgtgcttcagcattaagcgtttatcagctcngaaaca

SEQ ID NO: 13307 - DNA, 532 bp, Arabidopsis thaliana
  unsure at all n locations
  Clone ID: LIB25-035-Q1-E1-C2
tgnnngaantggtttgcctttgccctaggccctccggganatcccanagtcgacccacgcctccgtctcancttcacctttccctttttcaaaatctctctctctctctctctttttagatccagttttagggttttcttctctgtgagcgaagatgcgtgagattcttcatattcanngaggtcaatgcggaaaccaaatcggttccaanttttgggaagtggttaatctcgagcacgggattgatcagacgggacggtatgtaggagattccgagttacagcttgagagggttaatgtatactacaacgaggcgagttgtggaaggtacgttcctcgcgctgttctcatggatttggagcctggaaccatggacagtgtcagatctggtccgtacggtcagatctttcgaccggataacttcgtcntcggtcantccggtgctgggaataactgggctaaaggtcactacactgaaggtgctgagcttattgattcggtccttgatgttgttcgcaaaaaagctgaaaaa

SEQ ID NO: 13308 - DNA, 461 bp, Arabidopsis thaliana
  unsure at all n locations
  Clone ID: LIB25-035-Q1-E1-A10
aaagaagaacaacaacaatggaggagatttcggagaagaagaaagttccattgacggagacatactcgagtcaatcctctcctatttaccactcctagacctcgattccgcttgccaagtctccaaatcatggaaccgcgccgtcttttactccctccgccgccttaaaaccatgccgtggttgttcgtctacanccagagaaattctccgccgtacaccatggcgacgatggcgatggcttatgatcccaagtccgaggcctggatcgagctcaagaccgcatcatctcccgtcgaacacgtctccgttgctcgatcctctcactccacgttgctctacgctttatctccggcgagattctctttctcaaccgacgcgtttcatctgacttggcaacacgtggcaccgccgaaaagtttggnnggatngatcaatccgtngctgttgtccggacggganc

SEQ ID NO: 13309 - DNA, 334 bp, Arabidopsis thaliana
  unsure at all n locations
  Clone ID: LIB25-035-Q1-E1-A11
gtnttcgtagncctttcgcntgggccntatcggtccnnnacccacgcgtcggctttntttgtctgttagtaatctatctacactaatgttgttactcttcaatgtattcagtatcatatttatgttttctgttcattgaattagtcaaaaagcatttggctttacaatccccaatttctcactaaaaacagatttcacaaaaaaaaaaaaaaaaaaaaaaaaaaaaaaaaaaaaaaaaaaaaanaaaaaaaaaaaaaaaaaaaaaaaaaaaaanaaaaaaaaaaaaaaaaaaaaaaaaagggggggccnccctannggttccanncttacttnc

SEQ ID NO: 13310 - DNA, 456 bp, Arabidopsis thaliana
  unsure at all n locations
  Clone ID: LIB25-035-Q1-E1-A12
tntaccttctagcttccgatttcccccgatgaccaagaagccacaatggtggtggagaactttggcttgcctgccttacctaatgccactgcatgaaacttggatgtatgcagaaaccgcttaccatctccacccattcctagaagattttgaattcttaacctacccatttctaggcgccataggaagattaccaagctggttcctcatggcttacttttttgtagcttatctagggatagtgcgaagaaaagaatggcctcacttcttcaggttccatgtagtgatgggtatgctgcttgaaatcgcactccaggttatagggaccgttagcaagtggatgcctcttggagtctattggggtaagtttgggatgcatttctggactgctgttgcgtttgcntatctgttaccgtccttgaaagcatacggtgtgcacttgccggtatgtacnca

SEQ ID NO: 13311 - DNA, 208 bp, Arabidopsis thaliana
  unsure at all n locations
  Clone ID: LIB25-035-Q1-E1-A3
ntctgatccttacgaangtttannacncttccacattttcactccttggttggtgataaatcgtttagatttaagtgtagacaaacgtcatgaaattggattctgaccttaaattgactaccttttctgaagctactgnattgtgttngantgttagtgtacaagtctcngaagttttggctacctagtaatgataatgtgtgtcnct

SEQ ID NO: 13312 - DNA, 87 bp, Arabidopsis thaliana
  unsure at all n locations
  Clone ID: LIB25-035-Q1-E1-A4
cacctgncatattgtggaagagtcngtaaccttgtcacagatangattgaaaaccncaggaagacaacgctgaaggaatgatagatc

SEQ ID NO: 13313 - DNA, 427 bp, Arabidopsis thaliana
  unsure at all n locations
  Clone ID: LIB25-035-Q1-E1-A6
ggatctaaactcgagcttttgttgatcgaaaaaatggaagaggatttgattaagcgccttgaagctgcggttacgaggcttgaggggatctcaagcaacggaggaggagtagtttctctttcccgcggaggagatttctcccccgccgccggaatcgatatcgcgtcgtcngattcatcgattctggcttatgaagatctgatttctcaatgtgttggtanggctctgancgccgctgagaaaatctgtggaactgttctagatgtgactaagatagtcnccgaagcttttgcttcccaaaangagctgcntgttcgcatcaagcaaactcangaaagcctnaactcgccggaattggctggaattctcaaaacnttnaatnaaggttncaatnnaanccnnangncattnntttaaggaaaaangt

SEQ ID NO: 13314 - DNA, 52 bp, Arabidopsis thaliana
  unsure at all n locations
  Clone ID: LIB25-035-Q1-E1-A7
gcgacgtccatgtcatcgatgaagaangttctgaggctccganactggtcga

SEQ ID NO: 13315 - DNA, 514 bp, Arabidopsis thaliana
  unsure at all n locations
  Clone ID: LIB25-035-Q1-E1-A8
attctctcacattcccatggaaggtaaagccatcgcgacgtctctcggtggtgatcgtgtattgatattcccgtgttctcctcgctcttccttcgtttttacatcccggctctctagcctgcctctaaagcgtgcgtctatcggtggtgctgtctcctggttccggcgtcaaagggcttgactcgggtgggaanttcaattggntttcnactccgcccgaactccgtttcctggttcggttcaaatttaactccnggaaatcggaactccggaactccggaatttccctcaacgaagaaatcaagcaaggggaaaatcccaaggttttggggggaaaattttaagggaattaccaagnaatggggaactcaatgggacgggcnaaattttcnccnggtgggancaaaaaattccgntttcncaangctccaanttgcctcaaattaaccctcaatacccaaaaatcctttttggcgggaaaacaattacggctctttcggntgtcccaagggng

SEQ ID NO: 13316 - DNA, 368 bp, Arabidopsis thaliana
  unsure at all n locations
  Clone ID: LIB25-035-Q1-E1-B10
gctccttcaaatcttcatctctctctccatctctcttctccacaagaagctgagtatggatctcctcacaccactcatcttcctcctcctcctcctctcaccattttcagtctcagatgctggttccatcggagtaaactacggccgaatctccgacgaactcccctccgcattcaaagtagtccaactactaaaatcccaaggaatcacgcgagtcanaatcttcgacgcagaccatcagttctcaaagcattatccggatntggaatcaaagtcaccgtagatntccccaacgagttacncttctccggccgccaaaggaactttccttnggcngttttcanggggtnnaannngcnanngntttc

SEQ ID NO: 13317 - DNA, 457 bp, Arabidopsis thaliana
  unsure at all n locations
  Clone ID: LIB25-035-Q1-E1-B12
tatcgatctccgccgtgatcgccgagaatgaatctatagacgagatccttctagcgaatggattacctttggggctatttcctaaaggcgtgaaaggatttaccgttaatggcgaaacgggacggttctcggtttatttgaatcagtcatgccaggctaagtatgagacagagctgcattacgatgagattgtttcgggaacgataggttatgctcaaatcagggatttatcgggaatctcagcgcaagagctgttcttgtggttacaggtgaaaggaatccgagtcgacgtgcctagctctggtcttatattcttcgacgttggtgttcttcgcaagcaatactctttgtctttgttcgagacaccaagagattgtgtcgcggttcgtggcgatgccgagtttantggtgaaaacaanggtcaatcntcgatgttgccaattgtatcaagtnaatt

SEQ ID NO: 13318 - DNA, 295 bp, Arabidopsis thaliana
  unsure at all n locations
  Clone ID: LIB25-035-Q1-E1-B3
tgaaagccattcatcaannatntacctaaccgatgtancaccanaagcattcnaggctatgatgaatttcatgtacactggaaagttgaacatggaagacactgtgaattttggcaccgnagttgattcatcttctctttctagctgaccggtttggagttgttccacttcatcaanaatgctgcaaaatgctcttggagtgcctctcanaagggatggcgttccgttttggnanaaggatctgtatgctcagttctccaantggtttcgtcaactcatcatgtnaactcattga

SEQ ID NO: 13319 - DNA, 68 bp, Arabidopsis thaliana
  unsure at all n locations
  Clone ID: LIB25-035-Q1-E1-B4
aatctccaactctcaantttctcacctgttgggcacttgctttaagcctctnagttcaataacntcaa

SEQ ID NO: 13320 - DNA, 69 bp, Arabidopsis thaliana
  unsure at all n locations
  Clone ID: LIB25-035-Q1-E1-B6
gggaagtcacaggattcgtcgaanacattaaatcaggacataaagaangagagatgcttctcgttgttc

SEQ ID NO: 13321 - DNA, 521 bp, Arabidopsis thaliana
  unsure at all n locations
  Clone ID: LIB25-035-Q1-E1-B9
gnnnnnnggtnnngantggttgcctngcccttccgtnggccaatcgctggtcaacccacgcgtccgnaacagtggaccacctgatcaacaatgctggagtacctcaaactgttatattcgaagatttcacacaaattcaagacgctaattctataatggtgagtttttaatgatattcttttacaagttcattaataatccatatatttacaaaaatgcttagctcttcttaaacatgatttgattgcttcaaacgcaagtattaatgaacttgtaaacttaggttttgaatggatgttgtggttagtgtggactaatccctcagcggtctagtctatactgtttttggggcggacaataaaccgctgcggagttagtttaaagacggtccacaattagcccgcaacggttttattttatttttttgggtctgcactgtagacggttttgttcgcttggaccgctgtaatcattcgaaaccttagaattanacatgtaggcaaantttgantgcctcaaac

SEQ ID NO: 13322 - DNA, 73 bp, Arabidopsis thaliana
  unsure at all n locations
  Clone ID: LIB25-035-Q1-E1-C1
caangaaggaaatgataatatatacatacacagacanacacacaatgctcatcagaangaagttttatatgat

SEQ ID NO: 13323 - DNA, 456 bp, Arabidopsis thaliana
  unsure at all n locations
  Clone ID: LIB25-035-Q1-E1-C10
tncttctctctttccccatcaaaaaaaacaaaaacaaaacacaactctgtttctctcatcttaaaattcatgtaaaaaaaatctacaaatcaaagagagaaacagagtaaagagaaagagaagaagatggcgcggaaatactttcagagagaagttttgccggtaacggctttggtaataatggaatgtgcaaacgttggtttaaacactctgtttaaagcagcaactttgaaaggcatgagctttcatgtcttcatcgtttactcttatggtctcgctgctctgcttcttcttccttctctgttttgctctttcagatcaagaactcttccaccgatgaatttctctattctctacaaaatcgtgctcttanggattattggatgctgttcaaacataatgggatacacagggataaattatagttctccaacacttgcttctgnaatcaacaac

SEQ ID NO: 13324 - DNA, 452 bp, Arabidopsis thaliana
  unsure at all n locations
  Clone ID: LIB25-034-Q1-E1-H8
tcctccttgctcaagcaaacctctttttatatatttgctctctctctctcagatccgattcaagctttccgatttgcgatggacggtggagcggaaggatctcagcagcctcaccttattctagccaacaagctcttcctcctcactcatccagatgttccagacatcgagaaagtccagctcaagtctgaggttttggatttcatcaagatcccatggtatggctcctttgtacgaaaccctaattgcctcttcggtgctggatttggatnaaagcttgttagagtctatgcgggccgctaatgaagaagagcttaaagaagctcgacgagaagattgcaagatgcagaagaaaatttgggtgaaagtgaagttcgtgaaanccanccttgctaaggcctgtanttcatcaaggattaatgataaggagaaagcnttggacaactaaaaac

SEQ ID NO: 13325 - DNA, 458 bp, Arabidopsis thaliana
  unsure at all n locations
  Clone ID: LIB25-035-Q1-E1-C11
atcgttttctcttttccgatggcaaaagcttgcctcttgcagtctactctactcccagcttantctccacttcacaaacttcgtaatcaaaacatcaccctctctttctcaccgcttccgctgtcccgatgccgtcccggnatccactgctcagtttcggccggtgagactacaatacaatccatggaggaagctccgaagatatcatggggatgcgagattgattcacttgagaacgctacttctcttcaagaactggctctctgattcaggtctccctccgcagaaaatggctattgatagagtcgacatcggtgagcgaggcctcgtcgcttcacaagaatctcatgaaaaggagagaaattgctcttcgttcctccttctcncgtcatcagtgctgattccatcaatgcaaggttaaagttnccggcnttcatgaatggtgaatatcnaatatt

SEQ ID NO: 13326 - DNA, 453 bp, Arabidopsis thaliana
  unsure at all n locations
  Clone ID: LIB25-035-Q1-E1-C12
cttcagcaccatgggatatttgatctctcctacaatagattgtctggccctataccagaagaacttggcgagtgtttggtattggtagagatttcactgagcaacaaccatctctctggagagattccagcttcactctctcgtttgaccaacctcacaatcctggatctatctggaaatgcactgactggatctattccaaaggagatgggcaactctcttaagttgcagggattaaacttggcgaataatcagctcaatggccatattccaagaaagctttggcttgttaggtagcttggtgaagctaaacttgactaagaacaagcttgatggaccggttcctgcttctcttgggaacttgaaagagcttacacacatggacttgagccttaacaacctaagtggcgaacttcatcagaactgtctacatggaaaaacttgtcnggcccc

SEQ ID NO: 13327 - DNA, 445 bp, Arabidopsis thaliana
  unsure at all n locations
  Clone ID: LIB25-033-Q1-E1-H7
gatgagaatgatgagaatgagaagatcaagaaaagttctttcttcaactggttttacttctccattaatgttggagctctcattgctgcaactgttctcgtctggatacaaatgaatgttggttggggatggggtttcggtgttccaacagtcgcgatggttatcgcggtttgctttttcttcttcggaagccgtttttacagacttcagagacctggagggagtccacttactaggatctttcaggttatagtagcggcttttcggaagataagtgttaaggttccagaggacaagtctctgctctttgaaactgcagatgatgagagtaacatcaaaggtanccggaaacttgtgcacacagataacttaaagttttttgacaaggcagcggttgagagtcaatctgatagcatcaaagacggggaagtcaatccatggagac

SEQ ID NO: 13328 - DNA, 425 bp, Arabidopsis thaliana
  unsure at all n locations
  Clone ID: LIB25-033-Q1-E1-H8
tcgaatcagttgaactaatcttagaagtgagaacaccgttgcttccataattcccggtgaatcatttgttgttcgatttctccggcggagatggtgagtccgacgagagacgctatccaatcttacatgagcatcactggcgcgtccgagtcactcgcgattcagagacttgaggaacatggcaataatctccctgaagcgatcaatgcccactttagagatgtcgaaagaagcatttatgatgactcaagcttagacactcgttcanactacaatgttgtggaagataacaatcacgttcgtggtagcgagactaggccagttaacgagtctangccaatccctgggcgcacttccatctatactctcggctgctcgggcttttaaaccgtccttgcntcnanattccaattacagacgggata

SEQ ID NO: 13329 - DNA, 471 bp, Arabidopsis thaliana
  unsure at all n locations
  Clone ID: LIB25-034-Q1-E1-A1
tctncatttctagttctctcttcctgactcatttccctcattagatcntcttctccactaaacccatnattgaaagaagctctttttttgcttacattgaagttaaaaaatcancacttgttttgtttttgnagaaacacacataaagtttgtctttttacttctcaaatttggttgttttcactcaatttcaatcttgctttctgattcagattctgggttttcttcagaattcccagagaaagttgttggaattgaatttttcacntttttggttcataaaagttctaagtcattntangatgaacatggggcaaaggggaacaagagcaannccctanaattacttaacctttggggtcaagaaccgattcccttggggaatggcaatnaaaggaacaattgggagaattcccttgggagatnctggaaacaacccccaaggnganttcaaccgtttaactcnaaaaa

SEQ ID NO: 13330 - DNA, 442 bp, Arabidopsis thaliana
  unsure at all n locations
  Clone ID: LIB25-034-Q1-E1-A10
nctaccacattgttgagaacaattcagctaaaccagttctcacttctcggaactagcttgttaagaaggagaaggagtaacaacttctccgtgaggtcttgtggaagccaaacaacgacgacccatgaagctaaacagtcttctccaacaagggttgctccaaaaaaccacaaaagcaaccaacttgatgagattctgagagattacgaagctgtattgggatagagactcatgttcagctctctacattgacaaaagccttttgtagttgctctaacaattacggttcttatccaaacacaagtatttgtcctgtttgtatgggtttgcctggtgctttgcctgttttgaattccaaagttgttgaatttggtgttagattgggtttaactttgaanttgtgatttgtccctaagtctaaattcgtaaggaacaatatttt

SEQ ID NO: 13331 - DNA, 429 bp, Arabidopsis thaliana
  unsure at all n locations
  Clone ID: LIB25-034-Q1-E1-A12
gacagagaaaaggagagagaacttgagctcgagagtgcaatgtacacaaactgtttgcttttaggtttggatccgaatgtgatcggactcggagcctccaatggcacgcctcgggtcgggttatttcgccattcgaatccaaagctcggtgaacagcttctctacttcatcctctcttctcttcgtggccctgctcagtcttcaaaggattttgataaggtttggccaattttcgattcggctcaatctcgcgattttcgtaaggttgttcaagcgattataagcgagcttgaatcacaaggggcattaccaaggagtaattcgagggtttcatcactaaccacttgctgtggaccaagatttgtggagctcctgtggcaactttcactgcatgcgttaagagaaattcataagcggacaattnctgct

SEQ ID NO: 13332 - DNA, 453 bp, Arabidopsis thaliana
  unsure at all n locations
  Clone ID: LIB25-034-Q1-E1-A2
gctaaaacaagttggtgacatgagtcggatatttactcgtagtcaaagattgaatagtgaagccataattgactttgttaaagccctctgcaaagtttccatggatgagttacgatctccatctgatccacgggtcttcagcctaacaaagattgtggaaatagcgcactataacatgaaccgcataagacttgtctggtcgagcatctggcatgtgctctctgatttctttgtgactattggctgttctgataacctctccattgcaatttttgcaatggattctttgcgccagctgtctatgaagttcttaaagcgggaagagttggcgaattataacttccaaaatgaatttatgaagccttttgttgttgtcatgcgcaaaagtggtgctgttgagatnagggaattgattatacgatgtgtctcacaaatgggtttatcccgtgttgg

SEQ ID NO: 13333 - DNA, 445 bp, Arabidopsis thaliana
  unsure at all n locations
  Clone ID: LIB25-034-Q1-E1-A4
gtccttgaagcagtcaaattcttctctgaactccaaacatcgccatgtccgagattctctcttcgttgaggtcactaatggcctctcactctcctcctcttgatgctttggttgttccttccgaagactatcaccagagcgagtatgtttctgcacgagacaaacgccgtgagttcgtgtctggattcagtggaagtgcaggtttggcacttatcacgaagaaggaagcaagactttggacagatggtcgatacttcttgcaagcattgcaacagcttagcgatgagtggacactaatgcggatgggagaagatcctcttgttgaagtttggatgtctgataatctacctgaagaagnaaatataggtgttgattcatggngtgtctcggtaaacactgcgaatagatgggggaaatcgtttgcaaagaagaatcaagaaactaa

SEQ ID NO: 13334 - DNA, 506 bp, Arabidopsis thaliana
  unsure at all n locations
  Clone ID: LIB25-034-Q1-E1-A5
atttcttnagccggctcgtaccggaacgagattcccggntngncccacgcgtcagcggaacgcgtgggcggacgcgtgggcggacgcgtggggtttgtgaaagggagagagaaatggaggaaggtctaaagattcaatctttggtcatttatccgatcaaatcttgccgtggaatctctgttcctcaggctaccgttactcatactggttttcagtgggaccggtattggttagttgttaactatnaaggaagagcatacactcaaagagttgagccaacccttgctcttgttgaatcggagttgcctaangaagccttcttggaagattgggaaccaacanatgactcattgttggtgataagaactcctggtatgantccgttaaagataccgttgactangncaagctcggtaacanaaggtgtgtccatgtnggaatggtctggctctgcctttgatgaaagngaaaaaactgccaaatgggtttcaagattaacctgggaa

SEQ ID NO: 13335 - DNA, 443 bp, Arabidopsis thaliana
  Clone ID: LIB25-034-Q1-E1-A7
ctctgtttttgtttttaccgtagatcgtttcgagtctctttaatctttggcgggttccgtaaaaaaaaaaatggcctcttctagattccaatctgggttttgtcctatctcttcgtgtccctctcttgagaatttcatcgaaaggattaaagacgcatgtcgtttcaccctctccgctgttctagggacaattctctcggcggtcttgactttcttcttcgctttagtgggcacattgcttggagcacttactgggagctttgataggccaagaaaccgaaagtgggtttatccgaggagcggcggttggagccatttcgggagctgttttctctatcgaagtctttgagtcatctcttgttctttggaaatctaatgagtcacgttttggatgtctctctacttgattgatgtcattggtaatccgataaagtgggtagact

SEQ ID NO: 13336 - DNA, 89 bp, Arabidopsis thaliana
  unsure at all n locations
  Clone ID: LIB25-034-Q1-E1-A9
ntgaacctaagaacccaaaggnggtntgagtcgtttcatatttacgggtgctcacttggcttctgatatcatcttcacggtgaaagatg

SEQ ID NO: 13337 - DNA, 456 bp, Arabidopsis thaliana
  unsure at all n locations
  Clone ID: LIB25-034-Q1-E1-B1
tgtcatctttcttctccttctcacttacttaacccataagccatcaatcccaaacacaccattacaatggcttcttctatcttcttcttcttccttatcttcctctccgtcgtctccgccgtcaaactacctctctctcccttctcccactccgaccaatcaccaaaagacccttacctctctctccgtcgtctcgctgaatcctcaatcgctagagctcataaactcaaacacggnacctcaataaaacccgacgaagatgctctctcctccaacancaccgcatccgccaacgtcgtgaaatctcctctctctgctaaaaagctacggngggtactcaagtctctctcagctttggnanaacgtcgcaaacaatcccattcgtttttgataacgggaagaagtctcgttttggntaccttgtactcaagatatctctgctcccgggttgcgaat

SEQ ID NO: 13338 - DNA, 441 bp, Arabidopsis thaliana
  unsure at all n locations
  Clone ID: LIB25-034-Q1-E1-B10
taattcactacacacacacaaaaaataaattgagtgcctcccccaaaaacaaaattggtagataacgagcaattgttttttttcagatttgatcctgaatttttacatttttttttttgcaatctccccctaatctgttgtttctcgcttcttcttctgttaatcatctgtctttcaaaaagaaagaaaaaagaaaaattcgatttctgggtttgtttttgtcatacagaaaaaaatcaagcttatgaatttgtgtttaattttttgttttaatttgaaaggcaggttttttcagaacgagatcgttttttcaaatttcttctgattttacctcnttttttcttcttagattttaagtgaatcnaagggtgaaanttttgattccctcttttcgggatctacacagaaggttgcgtaattcaaanccttttanattcaatt

SEQ ID NO: 13339 - DNA, 457 bp, Arabidopsis thaliana
  unsure at all n locations
  Clone ID: LIB25-034-Q1-E1-B2
aaagagaagaaaggttctaggtcttgtttgctttcccctcctgctaatcgaccaagcgaataatctccagctaaccaccgatgaagcgaacaatcaacgaagtcgtcggatctacctccgtcaatactctcgattcctccattgctaagaagcctgtcttcctcaccaaaaaacagcgggaagagttagccctaaaacgccgccaggatcaaatctccgagcaacgtgtccgtcgtgagcaacttggtcgccccgagcccgagacggaagatgtctccaatggagataccaatcgggataaggatcgagatagagatcgggaccgagaccgagaacgtgaccgagatanggagagagatagagggcgagatngaaaacgcgataaggatagagacagggataaggatagagaacgagagagaaaacgtnagcgtgancgtcgtgaaagaanattcgt

SEQ ID NO: 13340 - DNA, 451 bp, Arabidopsis thaliana
  unsure at all n locations
  Clone ID: LIB25-034-Q1-E1-B3
gtcatgagtgagttccccttggatccacagatggcaaagatgctcatagtcagtcctgaattcaactgctcaaacgagattctctcagtttcagctatgctatcagtttctcagttattctctctcatgaagcaaatggtatcagtctcatcgcctctatgcatctgctgacctcttccctggacctcttctgttataattaccaattctttctctagtaccgaattgctttattcggcctagagaggctcaaaaagcagcaagatgaagctaaagctangtttggacacattgagggagatnacctcacattgttgaatgtctaacangctttcaaagcaaaacaatgaggnttcaaattggtgctaangaaacttnaatcaacaatagaagcgatgaaaatctgcaagacaatgttaagacaacaagtaanccgggatnatgtcaagat

SEQ ID NO: 13341 - DNA, 517 bp, Arabidopsis thaliana
  unsure at all n locations
  Clone ID: LIB25-033-Q1-E1-H4
nnnnnnnnnngaactgatttgttngccggccggtcnggaattcangggtcgacncacgcgtccggagataactggattgactaaggaagatttgaaggatggtatgccacttgagcatgtacgagagagagttttttcgttcttgtgcggtggacagaatgatggggctggaaggcttcttcttgttggtcatgaccttaggcatgatatgagttgcttgaagcttgaataccctagccatttgttgaggtaactaactgacccgtttttgttgactctttgcttgaaatctaatgtaattgctatgcttcacctcagagacacagcaaaatacgtgccgttgatgaagacaaatcttgtaagccaatcgctcaagtacctcacaaagtcatatctcggatacaanatncagtgcgggaagcacgangtttacgaagactgtgtatccgcgatgagactgtacaagagaatgcgggatnaagagcatgtttgtagtgnnaaagcaagnaaggaatgg

SEQ ID NO: 13342 - DNA, 461 bp, Arabidopsis thaliana
  unsure at all n locations
  Clone ID: LIB25-033-Q1-E1-F12
tnttccganattttctcaccaagctcgaanacaaagatcggccatggntacgctcttcaccgtcgctcgtccttcttcactcctctatgtttcctccataaatccaagcaagaccttctctccttctatctccctaaaacttaactctctctctttctcttttggttatcgtcccaagccactccggttttctaaaatccgatcttctctgccctcggaatctgaatcggaatccgacctagatgcgtctgcagttacagatgaatggggtgagaaacctggagatgcanatgagcccgactctcagccagataatgtgaccgtgaatgtgattanggacgantgggggcgagaaatccgggacccgaaactttgaggaatcccggggacccggttttaangggatccngattcctccaaagggaacgaaanaaccaattgggggaanggagaaaatttgg

SEQ ID NO: 13343 - DNA, 457 bp, Arabidopsis thaliana
  unsure at all n locations
  Clone ID: LIB25-033-Q1-E1-F4
gcacnaatgtaccggagtggtccatggaatggaatccggtttagtggtgtaccggagatgcaaccatttgaatacatggttttcaatttcactacgagtaaagaagaagtgacttactcatttagaatcactaaaagcgacgtttactcgagattaagcataagctcctcaggattgttacaaagattcacttggattgagacagcacagaattggaaccaattctggtacgcaccaaaagaccaatgtgatgagtacaaagagtgtggtgtttacggttattgcgactcgaacacttcacctgtttgtaattgtattaaagggtttaagccgaggaatcctcaagtgtggggattgagagacgggtcggatggttgcgtgaggaagacgctactgaactgtggtggcggagatgggtttgtgcggttgaagaaaatgaaattgcccggatactacc

SEQ ID NO: 13344 - DNA, 438 bp, Arabidopsis thaliana
  unsure at all n locations
  Clone ID: LIB25-033-Q1-E1-F5
gtttcctcctctaggttatttgagctgcaaagacgcctccaaaatgttagcaaacgtgataaatctatggatgaatatcttaaggaccttaagactatttgtgaccaactagcctctgtaggaagtcctgtaacagaaaagatgaagatttttgctgctttgaatgggttagggcgagagtatgagcctatcaaaaccactattgaaaactccatggatgctctgcctggtcctagtctagaggatgttattcctaagcttacaggctatgacgatcgacttcanggttatcttgaagagacagcagtttcacctcatgtcgccttcaacatcaacacttcaaatgactccaatgcttctgggtacttcaatgcttacaatcctggcaaagggaaatctaacagangcagaaactcanttagtactcntggtccgtgg

SEQ ID NO: 13345 - DNA, 527 bp, Arabidopsis thaliana
  unsure at all n locations
  Clone ID: LIB25-033-Q1-E1-F6
nnngnnnnggnnggaattgtntcgncccggcccgtaccggtnngganattcccggggtcgacccacgcgtccggganaacgtggaagaagaagccatggactctatcgtctccagttcgacgattcttatgcgatcatatctcactcctccggttcgttcatgttctccggcaacctccgtttccgtcaaacctctgagctcagtccaggtcacctccgtcgcggctaaccgccacctgctttcgttaagctccggtgctagaagaaccagaaaaagctctagttcggtgataagatgcggcggaatcaaagagattggagagagtgagttttcgagtacggttctcgaatcagcccagccggttttggttgaattcgtcgctacttggtgcggtccctgcaaattgatctatccagctatggaaagccttatctcaaggaatatggtgacaaattgacgattgtaaagattgatcacgacgctaatccaaagttaataacggagttcaagggttatggtttaccgc

SEQ ID NO: 13346 - DNA, 443 bp, Arabidopsis thaliana
  Clone ID: LIB25-033-Q1-E1-F7
cccgcaaatctcaaccatccaccaccacaaccaccgcaccatcttcctcctccgccgcctcctctctccaccacctcatagacccaaaacacaaaaacccttcctccaaatccgaccgaatcggtctctcttaaaacactccatggaagtcgaagtcaagctccgtctcctaaccgccgctgctcatctccgtctcaccactctcctcactccataccacctcaaaacccttcaccaacgcaacaccttcttcgacacacccaaaaacgacctctctctccgccgcgccgtcctccgtctccgcttccttcaaaacgccgccgtttccgcggcttctccttctccgccgcgttgtatcgtctctcttaaagcgaagcaactctaagctaatgggattagtcgtgtggaggaagatgaagaggagattgagtattggattggta

SEQ ID NO: 13347 - DNA, 439 bp, Arabidopsis thaliana
  unsure at all n locations
  Clone ID: LIB25-033-Q1-E1-F8
tactcgccacgatccgtctttggagaccaatttatggagccgccgaagggagataccgtagtgaagactgaggtcccggtgaaggatccatcgctaagcgtcgtcgattcgaaaacgaagggagtcgaggatgcgaacactgagatagccttgtccgatgaggttgaaatcgagacgaagggaagcgattcgacaccggtgaaagctccgagtcgaacatcgtctggatcgaagaaatctgtacattggagccccgaattggtgtctggatctcaggaaccggatcagaaagctgcatcgtcttcttcggctggatctaatccgtatattgctcgttctccagctgagacttcagatgcttcgttgaaagatacgatggagactgtgaaaggantgcttggtagatggggaaaganggttgcagaancagcaaagaaga

SEQ ID NO: 13348 - DNA, 435 bp, Arabidopsis thaliana
  unsure at all n locations
  Clone ID: LIB25-033-Q1-E1-G10
ataagctttttttcgtttatcaatcttctcgattcagccacaattcttgtttctcagataattcatctcctttctttgattcgtttccttctcttctgtcactcagatctagatctagatctaggtttttttctttctcatcggaaatttggcttagaggcttgttttgatctagggtttggtttttgggaattttgaaaaaaaaacaaaattaggaatgaatctatgagctactcaatcctgtttcgtcggattcgaattctacactctttctccgtcgtttaactcctactacacctacgttttctcaaggaagtaatcgttcncgatttcanttttccgtttttgatcaaacttaatccttgataanatttaagaaatcggggaatttcaanatggggttttgggaaangntttananggnaaaaacnncna

SEQ ID NO: 13349 - DNA, 65 bp, Arabidopsis thaliana
  unsure at all n locations
  Clone ID: LIB25-033-Q1-E1-G12
cnacaattagttcgataattgtanatatcgaaggcaaaggagactacacttcggttcaaaagcnc

SEQ ID NO: 13350 - DNA, 445 bp, Arabidopsis thaliana
  unsure at all n locations
  Clone ID: LIB25-033-Q1-E1-G3
tgggtcacacagtttggcgagaaaccggagaaaggtcggtatcgctatgctggtcaatggaagcacagtcgaatgcatgggtgtggtgtctatgaagttaacgaacgcatcctatatggtagattctactttggggagctattggaggaggagcatggctgtaccgtagatatttgtgcgctgcattctggtttggcggaggtggctgcagctaaggctcgaatgtttgtaaacaaacccgacggaagtattgccccttttctttaccacttcttctgtttggttctgtgtattaagtataaaccaagacatattttagggatttgtttgattcctttagatnagtgcaagaccctctctagtaaccatcattctgtttcaaatatatatttcgcttttctttcaagcaatgtccaacntatgaaagtgaggaanaaaactggtc

SEQ ID NO: 13351 - DNA, 446 bp, Arabidopsis thaliana
  unsure at all n locations
  Clone ID: LIB25-033-Q1-E1-G4
accctagaattcgcctcctctttccaaaattcccaatttttgtaatgacgggatagaaaaattcccaatgtccgctttatctttcattctcgattagaattcttcaaccaaaggtcactctctctccgttccattgcttctggatttcgtttttaagggttttacatttttcctgccttcttttacccatcagaggaagtttcaagccattttgttaatcagctctctcataagctaagatgtcgtcatcgccttttccagtcttgggacaaccgaccaattgataagtggaaggttacggaattgaaagaagagcttaaaagacggagactaacaacaagaggcttgaaggaggaattggttaggcgtcttgatgaagcacttcgtgctgagcaagaagagtctgaaaggatnaatagtgctactgttgctgctgctgaaaaagc

SEQ ID NO: 13352 - DNA, 435 bp, Arabidopsis thaliana
  unsure at all n locations
  Clone ID: LIB25-033-Q1-E1-G5
gtttaaatctaaagtaacatacacaaggcataggataacagaggcatacttgtggtcacttggaacatatttcgagcctcaatattctcaagcacgagttataaccactatggcactaatcttattcacagcgcttgatgatatgtatgatgcatatggcacaatggaggaacttgagcttttcactgatgcaatggatgagtatagcatttgtaacatataatttagggagtattataaagggtaaggttgattttttttttgatggttttgacttctctctaacgtaggtggcttcccgttgttcctgatgagataccgatacccgatagcatgaagttcatttacaatgtgacngtagaattctatgataaactcgacnaggacttgagaanagaaggaagggtcanggtgcggtttcaaccttaagaaatc

SEQ ID NO: 13353 - DNA, 439 bp, Arabidopsis thaliana
  unsure at all n locations
  Clone ID: LIB25-033-Q1-E1-G8
gcgaagttagatctacaggctataagtcgacgagacaacacaaacaagcttatgataaaatcaaactacatttggaagctgancaggccaagagtagcaaagaagcctgcaaaaccacgcaagatgcagagcacatggctattcgctatctcggtttaagagcatattcagcagctgacctgaagaagaagctcataggaaagaaatatcctattgaagtcgttgacaaagtgatcgatgatttccagattcgaggttttgtcaatgatagcttgtacgcggagtcattcactcgatctangatggtcntccttaagttggggaccaaggcgggttnaaacaancattgnttaaagaaaggcataancancaanngactcagnngacggncataaagcctggtttttgagaanacgccaatgcaatgangggagatgaa

SEQ ID NO: 13354 - DNA, 447 bp, Arabidopsis thaliana
  unsure at all n locations
  Clone ID: LIB25-033-Q1-E1-G9
agttaggcgtgcatctgctcatatcattgtcctctccagctattcgccttttgtgaagtataccccgcaatggcactggcttagtgaanagcttacaagagttgatagggagaaancaccttggntaattgttttgatgcacgtcccaatatacaacagtaatgaagcacatttcatggagggtgaaagcatgcgagcagcttttgaggagtggtttgtccaacacaaagttgatgtaatctttgctgggcatgttcatgcctacgagagatcgtaccgaatatcaaatgtgcggtataacgtgtcaagcggagatcgttacccagttccangataagtcagcgcctgtttatatcacanttgganacggaggaaatcaagaaagtctggctggaaggttaacggancacagccagataatctgcatttccggaaantacctatggc

SEQ ID NO: 13355 - DNA, 125 bp, Arabidopsis thaliana
  unsure at all n locations
  Clone ID: LIB25-033-Q1-E1-H11
gctggntttaccgaatcacccttaacaacggttatgaanacagtcttctctctcttctcttctctcgccgatcaagtaatctcacacttanacacttcaagggatccagggtcgangccnggtcc

SEQ ID NO: 13356 - DNA, 484 bp, Arabidopsis thaliana
  unsure at all n locations
  Clone ID: LIB25-033-Q1-E1-H3
aaatcaaagagagacgattcgatcgcatcaatggcagaagaaaagagcttcaagtatgtgatcgtcggaggtggtgtcgccgccggatacgcggcgagagagttcttcaaccaaggtgtcaagcctggtgaacttgctatcatttccagggaacaagttcctccatatgagcgtcctgcacttagcaagggatatatccacctcgaaaataaagctacacttccgaatttctatgttgctgctggaattgggggagagagacagttccctcaatggtacaaagagaaaggtattgagctgattttgggcacanagattgtcaaaagcagatnttgctgcgaaagacactttgtcaatggggactgggacaaagtccttcaaagttaccaaaacttttgcctaanctgcaaactgggttccntccggtcaataaangggttgtcaagaatttttgggcgtccccaaaggttgcaanaatgccnaa

SEQ ID NO: 13357 - DNA, 455 bp, Arabidopsis thaliana
  unsure at all n locations
  Clone ID: LIB25-033-Q1-E1-F11
gttttaacttttaaaggataagagaagagtagctttcttcttcttcctctcggctactgcgacagagaagaagctgcgaactttaaatgtcacaggctgtaattttcaagccgtttgtttcagttccatcaagtaatcacagccagaggaaactacagaacaatattatcaatgttggtgttaaaatccaaaaccgattcagagttgtttgtatgggaatgttggctccaaggaaattcctgnaaaagaggnggaaaatggaggttttcaagggntgcaactgacganacgggttagaagagatggagaaggcttatgctagaaattgaatcnaccgggttctgcngttccggtgcntaagcaatacaaaactgaccggtgaccaangncctccaangggattnttgttttgggtactttgggtaaaatttaagcaaccttaagaaatggggacc

SEQ ID NO: 13358 - DNA, 436 bp, Arabidopsis thaliana
  unsure at all n locations
  Clone ID: LIB25-033-Q1-E1-C8
catcaatggcaagtctttgtttccaatctccttccaaacccatttcctatttccaacccaaatccaatccatcgccaccgttattcgccaaagtctccgtctttcgatgcagagcttccgtacaaaccctcgtcgccgttgagccggagccagttttcgtctccgtcaagacttttgcgccagccaccgtcgctaatttgggaccagggtttgatttcttaggatgtgccgtcgatggtctcggagaccatgtgactctccgtgtagatccctctgtacgagccggtgaggtctcaatctcggagatcaccggaaccacaacaaaactcagcacgaaccctctccggaactgcgccgggaatcgctgctaatgctacgatgaaagatgttaagggatnaagattcgttggtttaacattaagatttgcataaangg

SEQ ID NO: 13359 - DNA, 453 bp, Arabidopsis thaliana
  unsure at all n locations
  Clone ID: LIB25-033-Q1-E1-C9
atttcaccgcccttctcatagcagctctcgccgatcctgtgtaatcgggaatcggtaatcgtcagggtctgtttggggtacggcgacgcgattttctgattattagggtttaagatctcgaggttgaggagagcttgaaaagttgtttgtcaacatggagcgcaagactattgacttggagcaaggatgggactatatgcagactggaattactaagctgaaacggattctggaaggattgaatgagccagcatttgactctgagcaatatatgatgctttatacgactatctacaacatgtgcacccagaaacctcctcatgattactcacagcagctttatgacaaagtatcgggaagcatttganggatatattaactcaacaatttttccctgcgtttaagggagaagcatgataanttaagcctgcgggaagcaatttaaaagatggc

SEQ ID NO: 13360 - DNA, 460 bp, Arabidopsis thaliana
  unsure at all n locations
  Clone ID: LIB25-033-Q1-E1-D1
gaaaataaatagatagtcataactagtgtattacaaaaaaaaaataaagtaaataaaagtaatcactagctagtgactaaactaaatcccaattatgggtcgtgtacattttggtgtatcagcattctttgttttttgtttgttaggtttatcagctaatgcaaagatcttcaatattaattctcctccaggttctgatatcactaacgcattgttgaaagcattcaatgaggcatgccaattcccgacaaagagcaccgttatgatcccaaaaggtgaatacaagcttggggagatcgtgatgatggggtccatgcaaagctccctataaggattgctcctcctnngtacccgtgaaagctgaccgtaacgctaatgggaaanggaaaatgggtcgctttccgcaacattaatngggtttaagtttaaccggacgtggttgtttcgacggtgaanggaa

SEQ ID NO: 13361 - DNA, 517 bp, Arabidopsis thaliana
  unsure at all n locations
  Clone ID: LIB25-033-Q1-E1-D11
atattttntgcccgcccgtccggaaataaaggtcgnccaccntccggctnaacaatctcctcntttggnccccaatattaagtgaaatatgggtttcataatggaattcncggagaatttggggttaangntaatggnagaatccaaaggaacgaagacaagaaagcgagggaacacatatatgagatgcatganaggtgcaaagaagattaaggagatgtgggcattgcctantcgtccttatggattctggacatttgagcgtcacaatgctcaacttccgttgggatcctcaaatcagtcangttgctggtccaaaggattcttaatgatgatcttcccnaagacaactacactcctccttcntcctcctcctcatcctcaagactaatccaaacaatggaaagaagatgtgttaatgccgtccnggatnggatgcaagttttggtttcaaaccaatttttcnccggaatttgtccgccttccggtttccaaatttngtctnaaggngtccngg

SEQ ID NO: 13362 - DNA, 435 bp, Arabidopsis thaliana
  unsure at all n locations
  Clone ID: LIB25-033-Q1-E1-D12
tgaatttctcctgctaactcttgagctccccaaaggcggctacatcggttttgtcacctctactcgctcacttttctccgtccaattttgcagcttttgaagatcaagaggtgaacattcggagtgatgaatcggccaaaggttcagcgtcgtgttggaaagtatgaggttggaaagacgcttggacaaggcacttttgcgaaagttcggtgtgctgttaatactgagacaggagaacgcgtggctctcaaaatacttgataaggagaaggttcttaagcataagatggctgaacagataaggagagaaattttgtactatgaaactgataaaaccatccaaatgttantgccggctgtatgaaggttttggcgancaagactaagatataaaatggttcaagagttcggnacnggtgganaactttttgacaaa

SEQ ID NO: 13363 - DNA, 453 bp, Arabidopsis thaliana
  Clone ID: LIB25-033-Q1-E1-D3
agataataaatgcgaggacgtaactggtaaaatcacgaaactgcctgattcaccttcactattcagagtgtttccttataaatatctatcacacggcgcaaaacgaaacgctcaagccctcaagtttatcttcctcagccgtgtagttcaaatcccggcacaaaactctgtcgtcgcttccccgagaaaaggggtcacacttaaacttgtcgaaaccaaacaacaatggaagatgacaaggatatatacacaaaagatggaactcttgacattcacaagaaaccagccaacaagaataaaactggaacctggaaagcttgcagattcattcttggaactgagtgctgtgaaagattagcttactatggaatgagtactaatctcatcaactatctcgagaaacaaatgaatatggaaaacgtctctgcttctaagaatgtcaagtaactgggt

SEQ ID NO: 13364 - DNA, 449 bp, Arabidopsis thaliana
  unsure at all n locations
  Clone ID: LIB25-033-Q1-E1-D4
tttctttctgcagagattatggaggtaccggtgattaatagaataagagatttcgaagttggtataaactcgattaatgatccttcgtttctttctcgatctgttgctgtttccggaatcggaaagctacaccaagcttatggtttttggaaatggggagctttgattatcgcatttctagcttatttcaccaactttgttagtaaactcaacagtctagttgttaggttaagaaaaatagatgtctctgtttcctctccaactctttttgatgattacgatagcgattccgatgtttcttgttcctctaccgtctcctctgacgatgaaaaagacgaagaagatgaggctgaatgatgaaagatgagggatgttgactccatctttaatcgaagacnatcaacggangtttccgcgttagaggatctgataatacgaatgatgatgag

SEQ ID NO: 13365 - DNA, 450 bp, Arabidopsis thaliana
  unsure at all n locations
  Clone ID: LIB25-033-Q1-E1-D7
ttctcgatcacttgctaaaatcaaaattttaggcgggaattcgatacccaagcccaagacccaaacacttcccccctcacgtttcgctgctttcgttagctagctttctcaaacgagatctgggcttgtcgaaagaaacgtgatatatatgcagtgagccagtgatcatgcaaaagaaattcagagtgcgatagagaagatggagcctgaacgtttaaaatttggaggtccaagagagttgtgcggtgctgcggatcttatatctcaattcaaactagtgcaacaccatgaattcttttgcaagaaatctcttcctgtttctttatcagattcccattatcttcataatgtggttggggacacaagagatnagaaaangagaangaatgcaattagatnagcttaatggagagcatatcacaagagcccgggagactaatantcgcatcc

SEQ ID NO: 13366 - DNA, 428 bp, Arabidopsis thaliana
  unsure at all n locations
  Clone ID: LIB25-033-Q1-E1-D8
aacaagaaaaacctctaagctcaaaagatgttgttgagaacgatggcggcgacttccccgcggccaccaccgtcaacatccctaacatctcagcagccaccatcacccccctcacagcttcccctccgtacaatgccgggatcgtacggctggccgttggntggnccattancggaccgtttagattccaaggacccganaagtttttccggacaagagctgagaagtataagagcactgtgttccgtacaaatattcctccgacgtttcctttcttcggcaacgttaacnctaacatcgtcgccgttcntgacgtcaantcttttagccatctttttgacatggatctagttgataaaagattgttctcatcggagactccggcctagcnttgggttctacggatgcgttcgtgttggagttatctc

SEQ ID NO: 13367 - DNA, 452 bp, Arabidopsis thaliana
  unsure at all n locations
  Clone ID: LIB25-033-Q1-E1-D9
ntctcttccgtcaatatggaaggcgtcaccgtcgtgtctttcttccttcttttcatcgccaccgccatggccgccaagtccaccgtctccttccgtgacggcatgttaccaaacggagacttcgagctaggaccaaaaccatcagacatgaaaggaacagaaatactaaacaaactagcaataccaaactgggaagtcacaggattcgtcgaatacattaaatcaggacataaacaaggagacatgcttctcgttgttcccgccggtaaattcgctgtaagacttgggaacgaagcatcgatcaaacaaagacttaaagtggtaaaggaatgtattactcactcaacttttagtgctgctanaaattgtgcacaaagacgagaagacttaacatatctgtnacaactgantcccgtgtgaatccgaatcaaacggttaaaanaataangggt

SEQ ID NO: 13368 - DNA, 437 bp, Arabidopsis thaliana
  Clone ID: LIB25-033-Q1-E1-E12
gcgagtttagagattcttggaacaagaattggtatcaaaccttcaccagttgtagcagcgttctcttcaagaggaccaaattttctgtctttggagatcttgaaaccagacttgttggctccaggagtgaatattcttgcagcttggactggagacatggcaccatcgagtttatcatctgatccaaggagggttaagttcaatatactgtctggaacttcaatgtcatgtcctcatgtaagtggtgtagctgctttgatcaaatcaaggcatccagattggagtcctgcagcaatcaaatcagctctcatgacaactgcttatgttcatgacaacatgtttaagcctcttacggatgcatcaggagcagctccttcatcgccttatgatcacggtgcaagacatatagattctttaagagctacaagatcctggtt

SEQ ID NO: 13369 - DNA, 443 bp, Arabidopsis thaliana
  unsure at all n locations
  Clone ID: LIB25-033-Q1-E1-E5
gctcgaatagaaacggatagttggggtagaatcgcttttacacttctgggatttgttggttctgctcttcttgtattcgcattttctttgtcatgtattctgtgatactccatggaagaaggttggtacagttgcagaaatggcgtcatttgagatttgttgtgcaaaatggatcagctttttctaattcctattcttctgctagtgctactgatttgagctcaagagatggtcgaaaagtgaagaactttactgtctcttacctcgttgattcattgggtttagctacaaaactcgctgaatcaatctcaaagaaagtcagtttcgtgaacaagggcaatcctgatttagttctgagtctttttagaagttatggggttcacaaaattctcaagatctccagcatcaattacggattaacctagattgcttctaataaaang

SEQ ID NO: 13370 - DNA, 447 bp, Arabidopsis thaliana
  unsure at all n locations
  Clone ID: LIB25-033-Q1-E1-E6
agctccccttttcttatccggaaaccaaaaacttccggtgataaaacctccttcgtcatctctctacttcttggataaaatggcgtcaactttcactgccacatcttctattggttcaatggttgctccgaatggtcacaaatctgataagaaacttatcagcaagttgtcttcaagctcatttggaaggagacaaagtgtgtgtcctagacccagaagatccagttctgcaattgtgtgcgcagcaaaggaattacatttcaacaaagatgggactaccattaggagacttcaagctggtgtcaacaagctcgcagatcttgttggtgttacacttggacccaaaggacgaaatgttgttcttgagagcaagtatggatnaccacgaattgttaatgatggtgtgactgttgcaaagagangttgagttggaagacccggttgaga

SEQ ID NO: 13371 - DNA, 449 bp, Arabidopsis thaliana
  unsure at all n locations
  Clone ID: LIB25-033-Q1-E1-F1
cttcagcatcttcatcatcttcttctatatatacctctttaagcttgcttctctttgtctttatcttgtccgatggttcaaacagaaaccgatcaaaggatgggtcttaatctgaatttgtctatctactctttaccaaaacccttatctcaatttctcgatgaagtgtcgaggatcaaagacaatcattccaaactgtctgaaatcgatggttatgtcggaaaattagaggaagaaaggaacaaaatcgatgtttttaaacgagaactccctttatgcatgctcttattgaacgaagcgattggggcgttgaaggatgaggctagaaaagggttatcactgatggcatctaatgggaaattcgatgatgttgaaaaggnaaaaccggaaactgataagaagagctggatgaactctgcccagttatggatttcgaancctaantccaa

SEQ ID NO: 13372 - DNA, 444 bp, Arabidopsis thaliana
  unsure at all n locations
  Clone ID: LIB25-033-Q1-E1-C7
gtttctcaaggaaaaatttcaactttctttcttatttcagtaaacgagagatatgttttcaatctcaatctgattctttctcgcagcggctaattctagtgtcgctaatagggtctctgtttcttcaaatttagttctttaaattcactacgaagatttttgttatggcgagtagaaagctggttcgagatttactgatcacaaagcagcctcttctccagcaattggtgcaccaacggagagtgggcgcaagactaggtcttcttcagggaaatgggtttgcgagtcatcgacggtttagtgttttcaagtgagttctcgaagaagattagaggagaagctgatagcaatcctgaatttcaaaagacagtgaangagttcaaggaaagagcagangaattgcaaggtgttaaagaggacttgaaagttagaacgaaacaaact

SEQ ID NO: 13373 - DNA, 420 bp, Arabidopsis thaliana
  unsure at all n locations
  Clone ID: LIB25-032-Q1-E1-B12
aagaagaataagagaaatcgattcgtggttttgggaaaattcaatggcggtttctactgtatcgtcgtttctattgccatctttcggcattccaagctcttcgccttcttctaccagactcaaagtctctctgctgccttcatcttctacccatggcggccntagttcctgcgtccttacaaaancatccgtctcgcttacgaangtcttcgctgttcccgataccctatgatccaactccagaaattctcgatgaacccgcctctggaagttccgagctctcanccatcagtgtagacgcngataaagatggcgccaaagcaaaanattaagatnaagcctaaatnatactgggtgcctcctaatgacgactcatgcaancanatacattgatgctgcaaaaacncnatncaaaaacga

SEQ ID NO: 13374 - DNA, 530 bp, Arabidopsis thaliana
  unsure at all n locations
  Clone ID: LIB25-032-Q1-E1-B3
nnngnnnnaactggttcntctgcgtgnccgtccggaatcaanggtcgacccacgcgtccgcaaacactantctcttctgatttgtaccctaacgtttactcgacttatctaaagccgtgaacctcgccggaattcttaaagtcgcgatttttccttaacgccgtttgattcccttacggcctttgaggtccaggagatagcaaatttgttggtgagtactgaaaaatggaggaagagaacgaagtagtgaagacgtttgcagagcttggtgtgcgtgaggagcttgttaaagcttgcgagagattgggatggaagaacccttccaaaattcaagccgaagcccttccttttgctcttgaanggaaagatgtaattggacttgcgcaaaccggttctggtaaaaccggagcntttgcaattcctatattgcaaagcactacttgagtatgtttaanaatcctgaacctaaagaaaaggacgtagaccggattctgcttcctccgcctggggttttaaccccaactccaaaa

SEQ ID NO: 13375 - DNA, 438 bp, Arabidopsis thaliana
  unsure at all n locations
  Clone ID: LIB25-032-Q1-E1-B6
tggaaatgagagacgaaatgaagaacaaaggtgtcaaactcgatattccagcctatggtgctcttatcgatgggttctgcaaaaggagtaacatggaaagcgcatctgctctgttctctgaactccttgaagaaggattgaatccaagccaacctatatacaacagcttgatttctggatttcgtaatctgggaaacatggtagcagcccttgatttgtacaagaaaatgttgaaagacggtctacgatgtgatctgggtacatatacaacactgattgatggattgttgaaagatgggaaatttgatcctggncctctgagttgtacacagaaatgcaaggcnggtgggtcttgtccctgatgaaatcatttacacagtaattgtaaacggtcttancaagaaggggcattttgtaaaantggttaanatgtttgag

SEQ ID NO: 13376 - DNA, 407 bp, Arabidopsis thaliana
  unsure at all n locations
  Clone ID: LIB25-032-Q1-E1-B9
tcaccttatccaaaatcntnnccgnnannccnaaacaacngtctcgggnctgtctcttcctcagacccttttgcttctccgcttcagtctctcaatccaatcaccgtaacaagcctcgatttcaatcattctcctcaaagccgcttccttgtcattctgcttcactcgtagtgaaatccttctcttccatcgatgaaccagatctcgaagaagacgaagagagcgaggatgaagatttcagcgcagaagaatacgaatacgaagacgaagaaagaagaagatgancangacantggagtggtgggttcccgagagangaattgaagattcggaaacatctgangaagtttcggaaatagggagataaagaggngaaaacagagaatacgaagaagaanaanagtcna

SEQ ID NO: 13377 - DNA, 469 bp, Arabidopsis thaliana
  unsure at all n locations
  Clone ID: LIB25-032-Q1-E1-C1
ctctccaatggcttccttatccttcgtttcctcttctcaccttacgctacgcactccttctattgccctacgcagcactggctcttctcctcgaacctccgtttcattctccgtcaaggctcaatccgtcgcgctttcacaggacgatttgaagaagctcgcggcggagaaagctgtggaggcaattaaacctgggatggttctagggctcggaaccggatccaccgcagctttcgctgttgatcagatcgggaaactactctcttccggtgaactctacgatattgtcggtatcccaacgtcgaaacgaacggaggaacaaagcacggtcgttaaggaatcctcntgttgggttaagatacacatcccganaaatcgatttcgcctaattgacnggacaaaacgaaggtaagattcgnaaccttgattaatcaaaaggtccttggaaggtgctccttccccgtttana

SEQ ID NO: 13378 - DNA, 437 bp, Arabidopsis thaliana
  unsure at all n locations
  Clone ID: LIB25-032-Q1-E1-C2
tgcttccgtgaattctgaataaaaagatcatgaagctcacaagcttgagcaggaatgctaattccacagcaacagcagtaactgtatcttcaatacanaaactcccgtttctgtcnctgtctgaaactttgccttgtcngaagagttcgagaaaacccacgtttcttcctttaagatgtatacggagaccaaagttggatttgctctggggaaaatttagagttcgtgcatcagatgctggtgttggatctgggagttatagtggtggacaagangatggatctcagagtagttctcttgatcagtctcctgccacttcatcagnaagcttaaaacctcgaaggccatttcccttancnttgtcaatancgcttgtactactgagttgtggtttggtagttccccnancacttttgtgaaaggaggaccacntcatt

SEQ ID NO: 13379 - DNA, 474 bp, Arabidopsis thaliana
  unsure at all n locations
  Clone ID: LIB25-032-Q1-E1-C3
agttttgagtctcttgggattctgaacgtgggatctggggatttgaatagttacacttttttgtttatgaaaaaacatacgatgaagtctggtgtgatcataaccattgctctgttattatacacaagctttcttcttgtttgtctggcgaaagagtgtacagacattcctacgaagctctcatcgcatactctccgcagcgagcttctgcaatcacagaacgcaaatttgaagtcagaggagttctctcattaccatttaactccaactgatgactctgcttggtctactttgttgccaanggaagatgttgaaaagaagagactgatgaattttgcttgggactatgttgtatagaaagttcaanggactctaaatcctcctggtaacttcccaaaggatgtcncctttgcacgaacgtttaggctggaccnaantcctttcaattgggagggctcaacaaacaaaaccttg

SEQ ID NO: 13380 - DNA, 91 bp, Arabidopsis thaliana
  unsure at all n locations
  Clone ID: LIB25-032-Q1-E1-C4
tcacggggccaaggactacanggtctatcatctcnaactgctgcttactatcaacagggtgcgcgtttcgccaaatggcgtactgtcntga

SEQ ID NO: 13381 - DNA, 440 bp, Arabidopsis thaliana
  unsure at all n locations
  Clone ID: LIB25-032-Q1-E1-C6
gttcaaactcttttttttttttttgtttgatccaaattttaacaaaattatggatcgcaatttcctcctaacagttacattgatctgcattgtcgtcgccggtgtcggtggccaatctcctatctcttctccgaccaaatctcccaccactccttctgctccaactacttcccctactaaatcccccgccgttacttctcccactacggctccggcgaaaactccaactgcttcggcttcttcaccggttgagtcaccaaaatctccggctcctgttagcgagtcgtctccaccaccgacacctgttccagagagctctcctccggttcctgcaccaatggnttcttctccagtgagctctcaaccggttcaagcaccagtagctgattctcctcaagctccggtaaccgctccggttgctgagtaccggntccngctca

SEQ ID NO: 13382 - DNA, 450 bp, Arabidopsis thaliana
  unsure at all n locations
  Clone ID: LIB25-032-Q1-E1-C7
nttgtctatggagtctgcgatgagaaatcagcttggccttacaggaaagagagggaaaattcagaagaagtctacttcggtctgaaaaccggacaaggtcttttggagttcaagtgcaagagcaagattcacaagcagagatgggttgatggggttcagtctcttctccgccaagtaaattgctttgaggctgccaaatgctcgctgggatctctgaatctcactggtcacacgtgatgcaggatcctgtatatatttgattatattcatatatataatatccaaatttttgctgttgtgaggtatttgcaaaacctggcaatgtaacctcagaagacttttggataaaacaaagcaggttgttcaattgatcacaacaatgttaggancattgcatgtacagaangctcagagatgatgaacccaattgaacttttaattcaaaaaaaa

SEQ ID NO: 13383 - DNA, 458 bp, Arabidopsis thaliana
  unsure at all n locations
  Clone ID: LIB25-032-Q1-E1-D1
tggtatccactatccacaactggggtcagcttctggttctctctctcggtaactttctgagctgaagaaccctaattcttatcttcaccggattccgggtatagggctttgtaaagttgttgaatttacaaagaaagatatgctggtttgtctgggttttgtagaagaatctgtgttgttgctttgagattaaagtccgaacaatgttgggtttgattcatgtccttgatgagctcgtcaatggtcttatgccactgcttatcattcagtagtcaaaacccagatcctgaatcatcatcatcttctcttcttcgttataagccttgtgattccaatttcgttgtggggtaagagaaaggaanaacctttggaaatttgttccaattgcggagaaagaataacaatccatacgggtaataataattaagaaggagaagaaacctggtggcaaaaggttt

SEQ ID NO: 13384 - DNA, 520 bp, Arabidopsis thaliana
  unsure at all n locations
  Clone ID: LIB25-032-Q1-E1-D11
ggnnnnnggaangattgtttcggccggcccgtaccggnnncggaaattcccggggtcgacccacgcgtccgtcnggagaaacaaagtgcgaatttctttgacaagacctgagccttttcgtgaaattatagccatgtctgatgtgggatcctttacaggcattactggctctgcttgctttgtgtaaangantcttccatcaaggaaaggaggcttcgtatcatgaaaaggctcaggtcttgtcaaagaaattcgggagaaacaaagtgcgaataantcacgacagcgattctgggagcttgcaggttctaatcttggtaatatccttggtattgaaaaatcanccgagcagattgangccgatactgctgtanttggtgacgacggtgaagtanattttaaaggtgaggctaaatttgcacaacatatgaagaagggagaagctgtgagtgaatttgccatgtcaaagaccatggcagaacaacggcagtatcttcccatattttccgttaagagaaga

SEQ ID NO: 13385 - DNA, 399 bp, Arabidopsis thaliana
  unsure at all n locations
  Clone ID: LIB25-032-Q1-E1-D12
tccaagacgcggttcccaatatctgcgtttcccgtttgcgttttccggcaatggctctccaagccactactactacgttctgcttctccggtccaactttccgatcaactcctcactcactcacttcaaaacgtcctatctccatcaaagctactacttcttctccttnaagactctccaattcacgatcgaatctcannggaagatcattgtcnagtgatggttcaacacaggaatctccttatgtantctgttttggagaaatgctaagctattttgtaccgacgacaagcggactttcattaaccgatncaccggcttttaanaaagctccangtggtgnacctgcnaangtagctgttggtattgctcgtcntggtggttcttcagctttcantg

SEQ ID NO: 13386 - DNA, 462 bp, Arabidopsis thaliana
  unsure at all n locations
  Clone ID: LIB25-032-Q1-E1-D2
gggaacatcaacatcatatgccctgggcgagtgcgcaggagagagggcaaatgtttgtaggttctggagtggatgtatacaaaggtcagatagttgggatccaccagagacccggcgacttgggtcttaatatctgcaagaagaaggcagcgacaaacataagatccaacaaagatgtaacagtgattcttgacactcccttaacatatagtctggacgactgcatcgaatacattgaagaggatgagttggtggaggttacaccttctagtattaggatgtgcaagaatcagaaaatggcaaagaaaggcaggcagtaaaacccatttttgcaagctgggtttggaggaaattgaagaaaagcttctactaaaaaaaaatgaaagctagttccaatgttattatangcttgtttgattgttatacatagtctaatctatagcaaanggtgatcctgatgtt

SEQ ID NO: 13387 - DNA, 457 bp, Arabidopsis thaliana
  unsure at all n locations
  Clone ID: LIB25-032-Q1-E1-B11
gcggacgcgtggggcaaagcggatattccagactaacgcgatgaagaaattgagtctttcgacgaggctcggaatccctctgctttacgctgttgacgcggttcatggccacaatacttttattgatgcaaccattttcccccacaatgtcggacttggtgccactagggatcctcaacttgttaaaaagattggggctataaccgcgcangaagtaagggcaacaggagtcgctcaagcttttgcaccttgtgttgcggtttgcagagatcctagatggggaaggtgttacgagagctataagtgaagacctgcagttgtgaatatgatgaccgaaagttacatcnatgggantacaaaggaaatctcccttacctcgctgattcccaaagattaatgtggctgggttgccccaaacattttgtttggggacggaggcacaataaatggaatcaaa

SEQ ID NO: 13388 - DNA, 109 bp, Arabidopsis thaliana
  unsure at all n locations
  Clone ID: LIB25-031-Q1-E1-G1
gattggtanctcnncttattagaaagattctcggttccgaaatgacctcagattcctcaagatcnggtttctctatcttgaaggcagggaagattttgngagggtttat

SEQ ID NO: 13389 - DNA, 409 bp, Arabidopsis thaliana
  unsure at all n locations
  Clone ID: LIB25-031-Q1-E1-G10
tttcttttgatttcntctttttcattttcctctcttctttgttcttccctctctaaaatccttctcccaanaatcaaggagttgagagagggaagaactttaacaaaagaatttaagaactgaagaaggaggaataaacatcgaaatgtcgggctcgaggcttttcttcggagtttctacaattgtatcgataattttcgccattttgttgccgatggcacatgctcaatccgcagctcctgctccggctccaacaagcgacggaacaacgatagaccaaggcatancatatgtccttatgttggtggctttggtcctcacatatctcatccattgatctcttgttaatttaattttggtctctatttagtttaattatnttttgcatcctggattataacaaannnng

SEQ ID NO: 13390 - DNA, 288 bp, Arabidopsis thaliana
  unsure at all n locations
  Clone ID: LIB25-031-Q1-E1-G3
tnaanntcantcgccgtgtctctctaagcttcttcttcactgtgaaaacctcagatcgcaantatgcacgcaccggtactcgttctgagcgattcgttgaagcgtgaatctggaagtaaggttcatcatggtaatatccaagcttccaangntgttgctgatatcattcgtacaacattgggtcctcgttctaggttgaagatgcttcttgatgntggtgganggattgttgntactaatgatgggaatgctactcgtcgtgagccanatgtcgnncatnctgcagct

SEQ ID NO: 13391 - DNA, 83 bp, Arabidopsis thaliana
  unsure at all n locations
  Clone ID: LIB25-031-Q1-E1-G7
aggtgattctctgttccgtcgtatgnnagcaactccggtcgctgtgcgtgttcacgacgtgatcgtcaagggantcgntaagt

SEQ ID NO: 13392 - DNA, 423 bp, Arabidopsis thaliana
  unsure at all n locations
  Clone ID: LIB25-031-Q1-E1-G9
ggagctgaatagcggatttgtataaggttattattagtcttctctatcgttgcggcgttcataagttggagaaagtggtaaagactgcttaagtatgtctgtttctatgagagatttagatccagctttccaaggagctggacagaaagctggtattgagatatggcgtatagagaatttcatccctaccccaattccaaaatcttctattgggaagtttttcaccggagattcttacatagtattgaagacaacggcgttaaaaactggtgcattgcgccatgatatccattactggcttggtaaagatacctctcangatgaagccggtactgctgcagttaagacagttgaattagatgctgctctaagangtcntgcagtgcaantatcgggaaattcaaaggccaacaanactganaa

SEQ ID NO: 13393 - DNA, 516 bp, Arabidopsis thaliana
  unsure at all n locations
  Clone ID: LIB25-031-Q1-E1-H11
nnnnnnnggnnngantggttncgagccttccctggccaaacggtccggaaccccgggtcgacccaacgtccgcaaaatctctctctactaatatctctctctctctctctctattgttgaagaagactcataatcggagattgtttgtttttggtttgctctgtaaattggngaagttttgttagagatcaaatggctgggatttgttgcggtgttgttggagagactgaaccggcggcaccggttgattcaacttctcgagcttctcttagacggaggttagatctacttccgtcgatcaaaattgttgctgactccgccgttgctcctccgcttgaaaactgccgtaaacggcagaagcgtgagacagtagtgctctcgacgttaccgggaaatcctagatctggattcgaatgtgaggagtgaggaataannaaggnganattaacgggttangaattcaaaattctggttaacnggaagcnaaanaantttcctttccgnangttncctaaa

SEQ ID NO: 13394 - DNA, 447 bp, Arabidopsis thaliana
  unsure at all n locations
  Clone ID: LIB25-031-Q1-E1-H12
gaaaagagtgttggacttgttctttgagtatccctanaacanttttttgcatcaccatgtggagaatgtaattctctcatgtatgganagcaanaactctcaacttgttgaccancttctcagtgagtgcaatcttattgggagtatactagaggcggnaaaggactccanattaactgctggtgattctgataagcttcagcctacagtccctgcagagggtaanaagccantcaggattggtaacatcggtcatttgactcgtatctccaacaaacttcttcagctagctaatagcaatgtcnaaattcagtcacatttgcaggaaaataacatatgggtggactggcaaacangatgtcatgtcgaagcgtaatacattggaaaatgtctactcctgggcctgcgggaaggctactcacccaatgatcntngtaganatantng

SEQ ID NO: 13395 - DNA, 444 bp, Arabidopsis thaliana
  unsure at all n locations
  Clone ID: LIB25-031-Q1-E1-H2
aagtcctcggaagcggccgtgtgacaatgaggaagactgttgccaagccaaagggtccatcaggcagcccatggtacggatccgaccgagtcaagtacttgggtccattctctggcgagtcaccgagctaccttaccggagagttccccgganactacggntgggacaccgctggactttcagctgatcccgagacattcgcaaggaaccgtgagctacaagttatccacancaggtgggctatgctcggagccctangctgcgtcttccctgancttttggctacgaacggagtcaagttcggaaaggcggtttggttcaaggccggttcacanatctttagcgatggnggactcgattacttgggaaaccctancttggtcnacnctcagagcantttggccatttggggcaatcaattatcttgatnggaactgttnaagg

SEQ ID NO: 13396 - DNA, 70 bp, Arabidopsis thaliana
  unsure at all n locations
  Clone ID: LIB25-031-Q1-E1-H3
aatgtccgacactggtgggatttctcangtggcgacacaacaggcgtttggnaacctgctgtgtttgggc

SEQ ID NO: 13397 - DNA, 445 bp, Arabidopsis thaliana
  unsure at all n locations
  Clone ID: LIB25-031-Q1-E1-H5
tggtgtagtggcaagaactctttcgaatctgaacgccttaagctctgagagacgagcattttccagaaaattcccattacctaatccccaggattcgatgaacccagaaatgatggttttcgaaaggctctagctttctcaaatccagattttgctgaggagctcgttgaaagaatgcanaatagaccatctctctcttgtcctttgtctttcagatcgtttctctttcanggtgatattagagtataatactagatancgtgaggtcctttgtattantggaccttgagttgtcntgtctaagtgggataanctttctngtgaacattttcttggtcagttcatctagtgaactttttttggtctcgtgaataantaaaagttttcnttttcgggcttgatnggtaaaganaatcagttggaganaacaaantgtggantcaat

SEQ ID NO: 13398 - DNA, 104 bp, Arabidopsis thaliana
  unsure at all n locations
  Clone ID: LIB25-031-Q1-E1-H8
acgnttggngctttgatgacgtttcggttacggntattaanccctgtggactacattggtgttcagccatcgaancacgcaacctttgttccccaaactgctng

SEQ ID NO: 13399 - DNA, 474 bp, Arabidopsis thaliana
  unsure at all n locations
  Clone ID: LIB25-032-Q1-E1-A1
aagacccaaatgtagctgtccgaagaggttctgcacttgcactaggtgtcttgccatatgaactattgactgcaaaatggaaggatatagttttgaagctctgcagtgcgtgtaagatagaggtgaaccctgaagacagagatgcagaggcacgtgtgaatgctgtaaaaggactcacatccgtgtgtgagactcttactcagaaaagggctagcgatcctggaaatgatgacctgtctctttttcttcttatcaagactgaagtgatggatactttactgaaagctcttgatgactattcagttgataaccgaggtgatgtaggttcctggggttcgtgaagctgcagtccatggtccttgagaagtgtacatatatccctctgtaagaaaatggaaacatatccanaagggtgattataaccaatgaaacgtccccaacttttcgantccnaatccttgcnaacccttctaa

SEQ ID NO: 13400 - DNA, 437 bp, Arabidopsis thaliana
  unsure at all n locations
  Clone ID: LIB25-032-Q1-E1-A6
ctccgagcattctctctctctttctctttctccatcgccgcgactcggctcagctctgagaacggcgcaagcttagattgccggagaaaactttatgcaattttttttgtacttgggagcagcttcaacattggagcatcggcgatccaagtcggaagttcacttaccttcggataacgcgactctgacctatcggaaatatttcattgacctcatatggagtgtgtctaattgctagtggttttgtggcttattgaagtcttgggaatagtatattgaggatgctattgtataaagaaagtatggaagatcttcggntatcaccgctgaaattaggtanctttaagtcttcattgtcagggangtctactccaaggggttcacctanacttcggaaagtgcattcaggcaaggactccacntananagggtaaggg

SEQ ID NO: 13401 - DNA, 432 bp, Arabidopsis thaliana
  unsure at all n locations
  Clone ID: LIB25-032-Q1-E1-A7
gagaggatcctcttcgtcgccgtcgctcggaaaacacacgccttcaatttttctccgcggaatgcgatcgagtgccttggtaaactagattaatctctgctatgtcgaattggagacataaactatggagaaaattgagctcatttcagagagctagttactcaactacatcttcaagaaacaacaaattaaagcttgatgaccttagaaaactccggccaatgattctaaagagaatcgaaaatcgagctaaagattacccggttaaagagattgttcctgtagctgaagaaatccttatagctaagaaagaatctaatcagtaacatcgccgctcttcttaaggngtttccngtcttgaatgcaaattcggttcanaantgtttgttggcaaagaagggcatttgattgaaanatgtcgtanttaaaacg

SEQ ID NO: 13402 - DNA, 454 bp, Arabidopsis thaliana
  unsure at all n locations
  Clone ID: LIB25-032-Q1-E1-A8
tggttatggtggttgtagcagttgtagctgcggctcaaggccaagaagagactactggattcgtgacatggggtaacaattactaccagacatggggacatcaagctttggttattaataaaacctctgagctccagctcaccctcgataaaaactctgggtccgggtttgaatcccaattgatttacggatcaggatacttcaacgtaagaatcaaggcacctcaaactacgtctacgggagtcattacttccttctatttaatctcccgttcaagccgccatgatgagctctgtttccagatcttgggaaagaatgggccaccgtatttgctgaatacgaatatgtatctgtacggtgaaggaggcaaagatcagaggtttcgtcnctggtttgatccaacaaaagattacattcctacagttttctttggaaccctaatcaacttgtgttt

SEQ ID NO: 13403 - DNA, 445 bp, Arabidopsis thaliana
  unsure at all n locations
  Clone ID: LIB25-032-Q1-E1-A9
tttcttctgcacatcttctctctctctatttccgcagacatcaattcccctttttgactaaaattccgcgacttgggctttgatccattcccagtgaatctcactgcttttctcacagaaaaaaatcactcctttttcctggattttgttttctcgactgatttggggaaaagctatggtggtctgattaatctctgtctgtcnttggtgagatgggtttggatgctgttaaagctaaagggaattggaaatcggagaaacctaaagagactgagaataagaatcacaagaagaagaatggtgatgataataaaagtagaantgaanaagaagaaganggagaagcaagtggttgctgggtcaaatttaagtttatgattggttgcataccttcaanaatcaagaccttgatgcctcgtcntcntctaacnaanggnctaantgg

SEQ ID NO: 13404 - DNA, 465 bp, Arabidopsis thaliana
  unsure at all n locations
  Clone ID: LIB25-031-Q1-E1-F7
aaagcttcacgccggtttgtttcaccgccgttgtgcttcttcttcttcttctacctgngttctctctcaaacaancaaatctccgacgactcattcgttcctcccagaatcagaagatttagtgaaatggctttttgcaataagctaanccgtttcgtgaggangcagagtgagaatgcttccatgattggctctctcaggtctttctctgctgatgccactcancataagattccaccangagactcacaattttcttgagccatattactatattggtagctgggaagctccgagtgatccgaaagatgcanagagaaanttgctcagcttaagagagattatgctaataaaagttcgagtgtatcgtaaagaagtacattcatgaagattgagatgcttcgtgttgagaaacaacgttaaggatnaggctagattgtttggctgaaacaagctgctaattaa

SEQ ID NO: 13405 - DNA, 464 bp, Arabidopsis thaliana
  unsure at all n locations
  Clone ID: LIB25-032-Q1-E1-B1
acttcnatcgtagaaaccttgaaaatccgagacatccacaatgccgccaaagttggatccgagtcagatcgttgacgtgtacgtccgagtaaccgggggagaagtcggagcagcgagttctctagctcccaaaatcggtccgctaggtctcgcaccaaagaagatcggagaagatatcgcgaaagaaaccgcaaaggaatggaaaggattacgtgtaaccgtcaagctcacagtgcagaatcgtcaggcgaaagtgacggtggttccatcagcagcagcactcgtcatcaaggcgttgaaagagccggagagagataggaagaaggtgaagaacattaagcataacgggaacatctcgtttgatgatgttgactgagattgctaggtncatgagacctaattcaatgcnaaggaatnagttggacaatgangganaatctgggaacttgtgtgtccgttggttt

SEQ ID NO: 13406 - DNA, 87 bp, Arabidopsis thaliana
  unsure at all n locations
  Clone ID: LIB25-031-Q1-E1-C3
tntgagtcccttaagagggacagtgtgatgggcaatggtgcatccaangtgtgaggaagcttggtcgcangaaatcaaagagtttta

SEQ ID NO: 13407 - DNA, 455 bp, Arabidopsis thaliana
  unsure at all n locations
  Clone ID: LIB25-031-Q1-E1-C5
actctccactccttcataatttctctggcaacgatggctatgatatctcaccgtctccgacgagctttactcactgcgacttcctatgttaaccgatcaattagctcttcgatcacaccagcgtctgatttcccttctgtgtcggcggcggtgttaaagagatccgttatagggcgttcgacggaagtagctactcgagcaccggcgagactgttttcaacgaggcagtacaagctttacaaagaaggtgatganatcacggaagacactgtgttgttcgaaggatgtgattanaatcactggcttatcactatggatttctccaaagaggaaactcctaattcnccanaagaaatggtcgctgcttatgaanaaactgcgcccaaggacttgcatcancgtggnanaagntaancaaagntgtncgcntgaacanaactacttacaaggattna

SEQ ID NO: 13408 - DNA, 532 bp, Arabidopsis thaliana
  unsure at all n locations
  Clone ID: LIB25-031-Q1-E1-C6
tngnganntggttaantggtctccctggnnntacaagtccggccatcncgggtcgacccacgcgtccgaaaaatctccttccttcttctcnctanagatgtnttcaacaatatccctaaagccgacgcaccttatcctctcctctttctccacaggcaaagtcctccaattccgccgctcccgtttcagccacacaccgtcgtcgtcgtcgtctcgttatcggactctcgtagctcaactcgggttcagaccagattcttttgatttcatcaaggancatgccgagaatctgctgtanacgatcgctgatgccgccgtttcgtcctctgaaacctttgaatctgtcgccggcactactaccaaaacganccagagcaatgattggttctctggtattgctaattacatggaaactattctcaaggttttgaaagatgggttatcaactgtacatgttccttaatcctatgggnttcgctaacaantctaatgactgtgcttgttaagggtggctaactttcccaattaaana

SEQ ID NO: 13409 - DNA, 542 bp, Arabidopsis thaliana
  unsure at all n locations
  Clone ID: LIB25-031-Q1-E1-D1
nnnnnnngnggtgngantggtctacctgggctctacngggcccggatatcccggatcgacccacgcgtccgcccaagcgtccgcaacaacatggatgacaagaagatgcaagtcacagtggcttacaaccatttcggaaaaggacttgtgcagaggatgcctatggtccgatggggtttcgtccacgttgtcaacaatgactacactcattgggagctttacgcgatcggtggtagccaaggtcctaccattctcagccatggaaaccgtttcatcgctcctcctcacaaacaacactacagagaggtgacaaagagggattatgcttcagaaagcgaatggnaaaactggaactggagattcgagaaagatgttttcatgaacaatgcatatttcagacaatctggaaatcctcatttcaagtgttcccattctangnaacanatgataaagcccaaaaatggnatgggcgtttntaaacttntcaaatnngcccgggcantnggttgcccggtccggaaancatgctaaaaatattacnc

SEQ ID NO: 13410 - DNA, 446 bp, Arabidopsis thaliana
  unsure at all n locations
  Clone ID: LIB25-031-Q1-E1-D11
tttcttccaagtgatccttcactctctatactgcgatttaccgttcttctgactcttgttgcgaattcggatcggctgacgcagctccgattgcacaacaatggcttctcgtatcatcaatcattccaaaaagttgaaacatgtttccgctttactgcggcgtgaccatgctgtggcagtccgctgtttctccaacagtacccacccctctctcgttggaagagaagatatcttcaaggcccgcctgaattattcctctgtagagagaatttcaaaatgtggtactggcaatgtaacaatgcttagtggtatttcaacaacgagcacaaaactaagcancccaatggcangaccaaaactatttaaagaatttataagctccaagntgcgatnagtgagaggatttcatccagttcagattcttcctctcacaagagattgggaag

SEQ ID NO: 13411 - DNA, 517 bp, Arabidopsis thaliana
  unsure at all n locations
  Clone ID: LIB25-031-Q1-E1-D2
ngagtgtntncggttccacgccnagaaacccgaancggnccaacgantaggcnaaagctnangccnangctnncgcgnccgcttggggaanccncnattntaaagctccaccctttccctttcaacctctctctctccattgttgacngtctctcttccctcgtaaacatcgctgtctctaaagatggcctctctctcaggcctatactcttcttctccatctctcaaacctgccaaaaaccattcctttaaagcattgccggcgcaatctcgagattccttctctttcccacatacctccaaacccaccaatctaccgttgactctctcctcggctcgttctgtggcacgcgacatttctcatgcggattcgaaagaaagagcttcctaaaggattcggatgcgttgtggaagcgatacctcnattggtttatcagcaagaaagaacctgggttgtatctggatattaatccggtcgggnttaacgatnantttgtggctgaaaagggagccaagg

SEQ ID NO: 13412 - DNA, 449 bp, Arabidopsis thaliana
  unsure at all n locations
  Clone ID: LIB25-031-Q1-E1-D9
gatactcattaggaagaaaatcagacaaaggagaaactattttttgtcatctcttgtttggtggtttatattttggttgtgagtcctgtgttgacctataagccgatcaatttcgacatgcctcttttgatctttgtttgacttctgatcaacttctcaactttgtacttgcaaggcttgaaaaatgaggcgtgagtctccatggctatggaaagtagaaagcagacggcttctatggctattaggactcacatttgctctcattgttacctttcaatacatcgagctaccgtacgctatctcatccatcttttcttccaccaagattcccatttcaagaaactcaacttcacttataggtaactcgacttccgctatagcgccgagtcccgcgggagatgaaggaagaagttgaaggttgatnangatatatgataagtanccggaaa

SEQ ID NO: 13413 - DNA, 52 bp, Arabidopsis thaliana
  unsure at all n locations
  Clone ID: LIB25-031-Q1-E1-E1
tatgtgactatgcattgtggaatctattggataacgtatttgtnaancatca

SEQ ID NO: 13414 - DNA, 444 bp, Arabidopsis thaliana
  unsure at all n locations
  Clone ID: LIB25-031-Q1-E1-E10
gcatatggaacttttggttatgattcctggaaacttgggcgaggatggtatcccgttgatggttatagaaagaccagaagcttcaatcatgggcgtggttacagtgatgagaaagcagataggcttaatgagctatgtcgaggaccaaggagtagtgatttcaagaatccacaagttcttaactcttcaatgctagatgcaatgaagcaagacgtttcagcagtagatctccagcgctacaatggggagaatttccctgaatcatttgtgaaagcaaaattctttgtgatcaagtcatacagcgaagatgatgttcataactgtattaagtatggtgcatggtcgagcacaccaactggcaacaagaagttgaatgctgcatattatgaagccaaagaaaactcccaagaatgccctgtgtatcttctgttccngtgaatgcaa

SEQ ID NO: 13415 - DNA, 270 bp, Arabidopsis thaliana
  unsure at all n locations
  Clone ID: LIB25-031-Q1-E1-E11
anncaacaagaagtagtantggcttcctctatgctctcctccgccgctgtggttacatccccggctcaggncaccatggtcgctccattcaccggcttgaantcatccgctgcattcccggtcacccgcangaccaacaaggacatcacttccatcgcaagcancgggggaagagttagntgcatgaaggtgtgnccacnaattggtaatangaagtttgagactctatcttacctcnctgaccttattgacgtcgaattggctanggaa

SEQ ID NO: 13416 - DNA, 461 bp, Arabidopsis thaliana
  unsure at all n locations
  Clone ID: LIB25-031-Q1-E1-E2
aattctccttctctccgtcagacaaatctacgaacaagcgagcctgagcttaagaccaaactcatagagatgggtttcttcncttttcttggaagagttctcttcgcttctctctttatcctctccgcttggcaaatgttcaatgatggtggtcctgcagctaaagaattggctccaaagcttgatttggttaaggcacatttatcttctagattangagtaacattgcccaaaatagaggtgagacaagtcgttgctactattattgccctgaaaggagtcggaggcttactctttgttatcggaaacaccttcggtgcttatcttctggcttcctacttggtggttttcggtcctattctcctaagatttctacaactacggacctcangaacgtcaattctctcctctgtngacagaattcttgcagaacgttgcactcnttgggagcgttaatcntc

SEQ ID NO: 13417 - DNA, 104 bp, Arabidopsis thaliana
  unsure at all n locations
  Clone ID: LIB25-031-Q1-E1-E4
tctgaacgaatttnaagactgctgttcacagtcatatgngaaagatttgngggaagcatgtgtgggagaactaagtgtgatgttacagtacgggaaggatntga

SEQ ID NO: 13418 - DNA, 220 bp, Arabidopsis thaliana
  unsure at all n locations
  Clone ID: LIB25-031-Q1-E1-E6
aatcgtncttgtcgatggcgatcaaagngggaaaggtgttganaacggcnactgctgctgcnaggaagttccaacagaaacagttctcagcctcancttcggngtttccagagccaccaccggtgtctccatcttccggtgtaggancatttctgggtattcccaanattagtcgctcngaatccgatttattagtctccaagtacatcanaattgccca

SEQ ID NO: 13419 - DNA, 461 bp, Arabidopsis thaliana
  unsure at all n locations
  Clone ID: LIB25-031-Q1-E1-F1
cctgccttgtggncctccaagaattgtcaagaaccacttgacgtgagcagtgacttcacattcaaagtcattgatggcattctctctgatttcagcaagatctttaagtttanatttgtccacttgggtggtgatnaagtaaatacaacttgttggtctgcaacaccgcnaatagcccaatggcttaaaaaacatcggntgagtgnnaaagaagcctatcaatatttcgtgttgcgggcgcaanaaatcgccttgtctcacggatatgaaattatcaactgggaagagaccttcatcaattttggaagcaanttaaaccggaaaaccgtggttcacaactggcttaacacagggactgttgagaatgtgactgcgtccggtttaaggtgtatagntagtaaccaagaattttggtatttgggttatatggacncaccttggcaaggctttacccaacgaac

SEQ ID NO: 13420 - DNA, 460 bp, Arabidopsis thaliana
  unsure at all n locations
  Clone ID: LIB25-031-Q1-E1-C2
tttcatctgcacatcttctctctctctatttccgcagacatcaattccccctttttgactaaaaattccgcgacttgggctttgatccattcccagtgaatctcactgcttttctcacagaaaaaaatcactcctttttcctggattttgttttctcgactgatttggggaaaagctatggtggtctgattaatctctgtctgtctttggtgagatgggtttggatgctgttaaagctaaagggaattggaaatcggagaaacctaaagagactgagaataagaatcacaagaagaagaatggtgatgataataaaagtagaaatgaagaagaagaagaaggagaagcaagtggttgctggggtcaaatttaggtttatgattggttgcataccttcaaaatcagaccttgatgcttcttcttcttcnatctatggctctaactgcactgttacaacaat

SEQ ID NO: 13421 - DNA, 442 bp, Arabidopsis thaliana
  unsure at all n locations
  Clone ID: LIB25-031-Q1-E1-F11
gcggacaacatgttgaatatgatcaacgtcctgatatgtttagagggacagttagatacgcaagtgcacatgctcatttagggagaactgctagcagaagggatgatctggaatcattagcatatacactgatctttcttcaccgaggtagattgccatggcaaggatatcagggagataacaagtcattccttgtttgcaaaaagaagatggcaacatcgccggatatgctttgttgtttttgtccccctcctttcaaacaatttcttgagatcgtggtaaatatgaaatttgatgaagaacccaactatggaaagttagtatctctgtttcaagacctcttgggcgaaaatccggcaattaggcctataaacacagagggtgctcaaaagatcatatccaagttggccanaancnaagtaggttaacattggggaagaag

SEQ ID NO: 13422 - DNA, 455 bp, Arabidopsis thaliana
  unsure at all n locations
  Clone ID: LIB25-031-Q1-E1-F2
gctttatctgatcgcaccaaaccagttttttcgcatcggcttcttccttttgctactaagctctcctctcttctccgaaaatggcgttacaaaacaaagaagaagagaaaaagaaagtgaagaagttgcaaaagagttacttcgatgttctcggaatctgttgtacatcggaagttcctataatcgagaatattctcaagtcacttgacggcgttaaagaatattccgtcatcgttccctcgagaaccgtgattgttgttcacgacagtctcctcatctctcccttccaaattgctaaggcactaaacgaagctaggttagaagcaaacgtgagggtaaacggagaaactagcttcaagaacaaatggccgagccctttcgccgtagtttccggcttanttctcctcctaaccttcctaaagtttgtctactcgccnttaagttggntcgcgtgg

SEQ ID NO: 13423 - DNA, 429 bp, Arabidopsis thaliana
  unsure at all n locations
  Clone ID: LIB25-030-Q1-E1-A7
gcccaaatctgacgcttctctctctctttctggtatctgcgtttgattcggagaagaaaaanaaaaaaaaaggnaaagagagagcttcaatggagttagcttcttnnggtggtaaagctctgtttgtttccgtatttcttctctccgcatggcaagagttcaatgattttggtgaanatggtggccgatnagctaaatctttgaaaccaaaattcaatgcctttgtaaaccatgtgacaactcacactggccagcaattgccaccaagtcnatatgaagattcttgttgctgctgctatanccttgnaaggtattgggggactaatgtttgtccttggcagctcaatggggaacttaactcttgcntctgcatcaaagcccttgcnaaaccaaattctgtatganttntanaanctncgaaagttgnca

SEQ ID NO: 13424 - DNA, 603 bp, Arabidopsis thaliana
  unsure at all n locations
  Clone ID: LIB25-030-Q1-E1-A9
ngttttttnncccnnnnggggggccccngcnaaannccgggggttcccgggnaannaaattcccccggggggtnnggaanccccccaaaggccggtncngggcccaaaaggcnggtncccggtttaatcnaaatggaanaataacaactaatcaaaaatcctcctcctcctaatttcctaatcngctttctccctccttcctcaaatcctttcaacttcctaaaacaaatggttatggttcctttggttggggggatttgaaancctaagcaagcntcttcgtttggtgtccnttgggagttatttaatccatcatctgttgttttagcgggtggattagcagggatatagagttcctgatttgagatctcgattagcaagcagctcaagacatctccttagctcatgtttaaggatgatggcgctccaatttattgatcccctttgggtcgatctgagtttatctcacttgattcgtgttcccaagatctagcctcttaagggacagagatcgggttttctctgttgttgatgttcgattcgtcctgcggagttgcaatccttattggggtcaagtcaaggagatctcgatntcaaagcctg

SEQ ID NO: 13425 - DNA, 509 bp, Arabidopsis thaliana
  unsure at all n locations
  Clone ID: LIB25-030-Q1-E1-B1
gnntgtgnagcatttcnngcnnnngtancggtataagaccgtgnccgncgcgtccgctaaacancttctccaatcaatctcagagaaaaaaagaaatggcancaaaccctaaagtctacttcgacatgaccgtcngtgcaaatccgccggncgtatcgtgatggagctttangcggggncaacaccanaaaccgccnagaatttcagagcactctgtntcgganagagaggaatcggtnaacaaggtnagccattacactacaaaggatcaagctttcaccgagtgattccgaaattcatgtgtcaaggaggtgatttcacagccggggaatggtaccggaggtgaatctatctaaggatcgaagttcaaagacgagaactttatcaagaanacatacaggaccaggttatttgtctatggctaacgctggtgcgaacacgaatggatctcagtttttatttggtactgaagaaagacttcgtggctcgatgggaaacatgttgtgttt

SEQ ID NO: 13426 - DNA, 437 bp, Arabidopsis thaliana
  Clone ID: LIB25-030-Q1-E1-B10
gataaaattcctctgagagtgttttttttgttttccttctgacaaagaaatatgtatgtagtgaagcgtgacggaagacaggaaactgttcatttcgataagattactgcgaggcttaagaaacttagctatgggcttagcagtgaccattgtgaccctgtcctcgttgctcagaaggtctgtgccggtgtctataaaggagtcactacgagtcaacttgatgagttggctgctgaaactgctgctgctatgacttgtaaccatcctgattatgcatctcttgctgctaggattgctgtgtcgaatctccacaagaacactaagaagtcattttctgagacgattaaggatatgttctatcatgtcaatgatagatctggactaaagtccccactaataaccgatgatgtgtttgagaaaattatgcagaacgctgc

SEQ ID NO: 13427 - DNA, 511 bp, Arabidopsis thaliana
  unsure at all n locations
  Clone ID: LIB25-030-Q1-E1-B11
gnnnnnnnggggggacgtcncgtggtntctngtcgntcagtcccgggtnancccacgcgtccgccaaactccaatttnttttgtttctctcaataatatttgtgttcatactgtttcgctgtttccaatacatactaatggataacacaaaccgtcttcgccgccttcactgtcatanngaacccaagttcactcntagctctcaagaagtgagtagtatgaaatgggagtttatcaatatgaccgaacaagaagaagatctcatctttagaatgtacagacttgttggcgacaggtgggatttaatagcaagaagagtggtgggacgtgaggcaaaggagatagagagatactggattatgagaaattgtgactatttctcccacaaatgacgcaaaaagtcactctcnttaaaaaatctcgagaatctccctgtttttcnatttctcatcctcattaaataatttctgtgattgtggacaagaaaagcttattaagttgtcgagtgggg

SEQ ID NO: 13428 - DNA, 453 bp, Arabidopsis thaliana
  unsure at all n locations
  Clone ID: LIB25-030-Q1-E1-B12
nggaatgtctgcctgggcntttggtcggcactatccggggtatacccacgcgtgnccggaaaaaatcactaagagagacantctaaatggcgatgattacgcgcaaacaccgccangcggcctccctctcctcctccaatctcaacggcgccgtcgccgctgcctcggtctctcagctccacanngggcttggcgctctctctccctcnacatcaccgacttcctacaccagacctggtcctccttcgacctcccctcctcctcctggtctctctaaagcggcngaatttgtgatntccanggtcgaatgatctcatganactgggctcgtaccgggatcgatttgggcctaatgacctttgggtctcgcttgctgcgcccgtcgaanngatgnanacngggtgctgctccgcnnacgatntcgatngattcgggtancatcttcagggctaa

SEQ ID NO: 13429 - DNA, 514 bp, Arabidopsis thaliana
  unsure at all n locations
  Clone ID: LIB25-030-Q1-E1-B2
ggtnngaatgtcttnttgncggnccggtccgataatacgggtcgacgcacgcgtccgcggacgnntgggatcgaattaaagtcaatggcgtcacgtttatgtcttctccttctcgttgcgtgtatcgccggagcatttgccggagacgtcatcgaactcaatcgatctcagagggagttcgattatttcgctctatctcttcaatggcctggaacctattgccgtggaactcgccattgttgctccaaaaacgcttgctgcagaggctccgatgctccaactcaattcacaattcatgggttatggcctgactataacgatggttcgtggccttcatgttgttatcgatctgactttaangaagaangagatttcaacgttgatggatggtcttgagaagtactggcctagtctcagttgtggttccccatcanncatncaatgggtggggaaagggtcattttgggggccacgagtgggaaaaaacatgggacttgttcttcnccctggtttt

SEQ ID NO: 13430 - DNA, 72 bp, Arabidopsis thaliana
  unsure at all n locations
  Clone ID: LIB25-030-Q1-E1-B3
cgcttgcaacacctgcaaaccancaaaatganggttaggatggcagaaaagagttcacctttngttaccttg

SEQ ID NO: 13431 - DNA, 422 bp, Arabidopsis thaliana
  unsure at all n locations
  Clone ID: LIB25-030-Q1-E1-B4
ntnctagttttatatttcaagttcttttttttttaaccttgccatcaatacaaccatggcaaggatttctctgttgttctctttagccttagttctagccatcgggtccgtcnnggnncacccacctacccacaagaaattacaaaagaccttgtgtccatctactttgtccaaagttcaagctttcccttaccttgaagtctctagcttcgtcgagaagaaggttcagttcgcaccaaaaaccattgcgttcaagtctttgttctccatctgcaangagctacatcgactttcttgggggcgttaagttttctgcntccagagatgtgtttcacgtcgttcatgtcaaangtcacttntgatgaccaaggcnatnggttattgcacnaanccgcacnttgnagtttgaangagnaccncgc

SEQ ID NO: 13432 - DNA, 428 bp, Arabidopsis thaliana
  unsure at all n locations
  Clone ID: LIB25-030-Q1-E1-B6
gangtggaagaaattttnctngcctgagnggcggtanactgtatcncgggnggccccacgcgtccgntaaaaaatttatttaaatgataacgaaatttacatctccatttcgattgattcgcttcttcaactctctctcttcttcttcttctatttgcttctgtgaaaccctagattttggngngaggaagaanacttcaatggcggaagaagtagcanagaacgttaacgcagtcccggtttcggaagacgagctttacggatttaaacgatcggagatgtacagtggtactctcgccggttccgttggtccgtacggtcgtcatgttttccnttgttacnatagtcatganacttggnttcctcgtgttgacagtgaangacttnctcagccgtttcngcgagngttgtttaaggatcgtnacacc

SEQ ID NO: 13433 - DNA, 251 bp, Arabidopsis thaliana
  unsure at all n locations
  Clone ID: LIB25-030-Q1-E1-B7
natgggngagcnggggaagaaagcnaggnggatttgncnangaaaaatctccagtccgttgagaaacgagncagaaagctcaagccttttatcaagaagaaatttgcanagagaaatgagcgtcnccaaggcaggagataaacaggagaagaaggtagaagcancaacctaagaaagagatgtcaagaagaagaatttcaggatatagcaatagatgcagtattccggaaaggatgatgatgaaattctcc

SEQ ID NO: 13434 - DNA, 453 bp, Arabidopsis thaliana
  unsure at all n locations
  Clone ID: LIB25-030-Q1-E1-B8
ncttccgtaacgcagagctagagaaaacattggatcaagacttgtctaggttatatccagagcattggagttactttcaagctcctggatgtcaaggcatgttaaggcgtattctactcttgtggtgccttaaacatcccgagtacggttatcgacaagggatgcatgagcttttggcgccactgctttatgtacttcatgttgatgttgatcgtctctctgaagtgcgtaaaagttatgaagatcatttcatagacagattcgatggtttatcttttgaagaaagagatattacttacaactttgaattcaaaaagtttctggaggatttcacggattatgaaattggtggtattcanggggaattcaanagaaaataaagagtctagatgagctcgatcccgaaaatccaagtctantgtgangttaagtgatgcctaatggaactgaaag

SEQ ID NO: 13435 - DNA, 425 bp, Arabidopsis thaliana
  unsure at all n locations
  Clone ID: LIB25-030-Q1-E1-B9
atagccaaggaagctttcctcagatcgtctctccgaaattttccggttaatcgtcagttaaggggaaaattaggctatggcgatgttaggtgcacagcaagttccagcagcagcttgtactccagatatggttgggaatgcttttgtgccccagtattatcacatattgcatcaatcacctgagcatgttcacagattttaccaagagattagcaagttaggtcgtcctgaagagaatggtttaatgagcatcacttctaccttgcaagctattgacaagaagataatggcgcttggttacggtgtaatcagtgcagagatagctactgtggacacacaagaatctcatggangtggttatattgtactggtgactgggtntttgacgggaaaagacagtntcagggaggacntttatcagacct

SEQ ID NO: 13436 - DNA, 329 bp, Arabidopsis thaliana
  unsure at all n locations
  Clone ID: LIB25-030-Q1-E1-C1
gntctcaanatctccgttggtgaaagtggagatngtctcaccagagcctccaangngttggaacaattgantggnnagactcctgttttctccaangnncgatacactgttncgttcttttggtataagacgtaatgagaagantgcttgctatgtgactgtcaagggagagaangcaatgcanctccttgagagtggattgaaagttaaagaatacgaactcttgagaangaacttcagcgacactggttgctttggttttggtattcaagaacacattgaatttgggtatcaagtatgattcatcgactggaaatctacggatggac

SEQ ID NO: 13437 - DNA, 517 bp, Arabidopsis thaliana
  unsure at all n locations
  Clone ID: LIB25-030-Q1-E1-C2
ggtgnngaatgtcctnttgncnnnccggtccgataanacgggtcgacncacgcgtccgctcacancttcttcccaacatcaaagaagacctttacttctggttagaatagaccaagaacactgagtacgacaaagaaccatgatgaatctttcttctcgtcgcgcctcttccactctcacattgagcttcactgttctccttttagcttccacaggttcgtatggctcaacattcacattcgctaatcggtgcggctacaccgtatggcctggaatcctatcgaatgctggctcacctactctctccaccaccggatttgagctccctaaaggcanctctcgctctctccaagctcccaccggttggtccggtcgattctggggctcgtaccgggtttcaagttcgacagttctgggctccggtacatgcaaaaacggtgactgcggctcnaanngctgtcnaaatgcgccgggcttggtgcccgcaccgcntgtaactctcgcggagttaatctng

SEQ ID NO: 13438 - DNA, 466 bp, Arabidopsis thaliana
  unsure at all n locations
  Clone ID: LIB25-030-Q1-E1-A6
nggtgtagaggaattttcntngccgttgtagcggtaactgcgntcccgggtggccccacgcgtccgagcaaaactatgtaccggcaatgttcttttccaaaatgattctccggctactttacttgcaagggtcatcggtataatcggatcaattgaccaagaaatgcttgccaaaggacgtggngggatgcaagtacttcaccaaaaatcatttactatatgagaggaaccaggagagtaanaatttggagtanctaataccgaanaagtcatcgctnangcgtatactaccaatgggtgaccaaggcttcatatactttgtggcatanntgctccaagttnatcnntagaaacgcccgtctgcatttgaagctcttaagcanccttggttgacntatccctacnaacccatntctggctgatcttgtaagtgcatcaanaatcanntggatgacaanctttcaag

SEQ ID NO: 13439 - DNA, 206 bp, Arabidopsis thaliana
  unsure at all n locations
  Clone ID: LIB25-029-Q1-E1-G10
tcangagctcacctctantacaactgccctatcggnnactactttgnatatcnagcattcgctatcgggtctcgttcacaagctgcgaanacctatctggagcgcaaattcgagagcttccaagaatcatcaaaagaagatctgataaaagatgctattatggccataangggaaactttgcaaggggaaacactgaagantcgct

SEQ ID NO: 13440 - DNA, 433 bp, Arabidopsis thaliana
  unsure at all n locations
  Clone ID: LIB25-029-Q1-E1-G12
gtttgcagaagcgaaatgtttgtctctaggagtctctcgagacactgctggaggacttgtaaatggtctttattttctctcctccaatccgattcctgtgttaggnanctggtttcgtcatcgaatccggttacgagcattggtaactcaagtgaaggtaattcgaattcgtttcagccgttgatgaatcaagtgtttaaaggatggtctcgaggtatgtcaacatcgagaggaaggagtatgangagcaaagttgagagtanaatgcgtaaagagtctggtaagacgttaagagagattaggagagcgaagaagttgaagaagaaactcatgactgatgaagaaaggctcatttacaatctcaaaagggcgaanaagaaaagttgcgctttgttgcaaaagctcaagaagtatgatcttcctgagctgccat

SEQ ID NO: 13441 - DNA, 401 bp, Arabidopsis thaliana
  unsure at all n locations
  Clone ID: LIB25-029-Q1-E1-G5
ggaaaaaaggggtctccttcaaacattctgcagaggttgctggtatggacaaacaagaagatgaaaacaatgatggggaggctcttgcagattttgagaaaattatgactgtagaaaggagcacagttgttgatgatagtggtgatggtacaagtgaaggagatggagctaaagagctaaatgatactcagtgtaatgggaatacgttgcaccaacaaaactccaaactctctttgttangacatggaccgcacgggaaacagatcgtagaatatcctttaagggaacatgganaagatggtgtacgtaattctgtcaaanggtggagaaaatgttgttgatccgttcacctccgcatttactggtggttggatgttatcacaattggccaaaaaaacttt

SEQ ID NO: 13442 - DNA, 66 bp, Arabidopsis thaliana
  unsure at all n locations
  Clone ID: LIB25-029-Q1-E1-G7
nacagagancagatgtgcgatgttttgcttgtgaaaaactcggataaaacctgctctaaaatcncc

SEQ ID NO: 13443 - DNA, 255 bp, Arabidopsis thaliana
  unsure at all n locations
  Clone ID: LIB25-029-Q1-E1-G8
cgtttgttttccggtttgcgagacatattctatcggattctcaactgtctgatgaaataaatatgtaatgttctataagtctttcaatttgatatgcatatcaacananaaaaaaaaaaaaaaaaaaaaaaaaaaaaaaaaaaaaaaaaaaaaaaaaaaaaaaaaaaaaaaaaaaaaaaaaaaaaaaaaaaaaaaaaaaaaaaaaaaaaaaaaaaaaaggggnggccncccaaaaggntcnaannttanttaccc

SEQ ID NO: 13444 - DNA, 427 bp, Arabidopsis thaliana
  unsure at all n locations
  Clone ID: LIB25-029-Q1-E1-H1
tangcattggtagacatgcctttggtgaccagtatcgtgccactgatacagtaattaaagggccaggaaagttgaaaatggtttttgtcccagaagatggaaacgcacctgtggagctagatgtatatgatttcaagggcccaggtgtcgcacttgctatgtacaacgtagatgagtcaattagagcttttgctgagtcatctatggcgatggcattaactaagaaatggccattatacttgagcaccaagaacacaattctcaagaaatatgatggcagatttaaggacatatttcaagaagtttatgaggcgaattggaagcaaaagtttgaagagcactcaatctggtacgagcaccggttgattgatgacatggtggcttacgcagtcaaaagtgaaggtggctatgtctggggcntgcaaaa

SEQ ID NO: 13445 - DNA, 509 bp, Arabidopsis thaliana
  unsure at all n locations
  Clone ID: LIB25-029-Q1-E1-H10
nnnnnnnnaanggtntgtctgcctggtctanngatccacaatcccgggtggccccacgcgtccgcttacattgggacacacctcaccgagactaccattaggaaggntaagacacagacacntantgaggnttctcggattttgctcaaaccacgagacgaatctacttgtctatgagtacatgcctaatggtagtctcggtgaggtgcttcacggtaagaaaggaggacacttgcattgggacacacgttacaagattgctcttgaagctgctaaaggactctgttaccttcatcacgattgttctccattgatcgttcacagagatgtcaaatcaaacaacatcctccttgattcaaactttgaagctcatgttgctgactttggtctcgctaaattccttcaagattccggtacttctgaatgtatgtctgcaatcgctggctcttacggntacatactcccagagtatgcgtatacgttgaaggtagatgagaagagcgattgtt

SEQ ID NO: 13446 - DNA, 437 bp, Arabidopsis thaliana
  unsure at all n locations
  Clone ID: LIB25-029-Q1-E1-H11
cacagatacggcgtgtggtaataaataatgtcttctggcttgaaaatcatagaagaaccgcaaaaaccgattgagaagctgcagatttatccgacggctaatgctggtgtttctcccttttggcgagacaagtatgagcgagatgctaaaaagtattgggatatattttacaagcatcatggagacagatttttcaaagaccgccactacttggataaggaatggaatagctatttttccgttagtgggaaaagtgtcattcttgaggttggctgtggagctggaaacaccatctttccattgatcgccacatatccagacatttttgtttatgcatgtgattttcaccacgagccgtcgaattggtcaanggctcatgatgaatacacagagacacgcgtttgtcatttgccttgtgacttgacaggggatggtct

SEQ ID NO: 13447 - DNA, 436 bp, Arabidopsis thaliana
  unsure at all n locations
  Clone ID: LIB25-029-Q1-E1-H12
ncttttgatttggggagacttttgtttgcgttttcttagattttgaaactccctttttccaagattcactacttcgattttgaatttttatccaaaagttctctctctttaatttccaaattgcgtttcgattttatgtttgttttttttgtgcaaatcgaaaaaaccctcttttagatctgatttttgaggttcttgattttccaaaaacttgtaattcagaatcatagtttcaattgatttcttttatatcgctaatctaagaaaaaaaccgtcttttgtcttanggtttctaatttcaatcttgtattcctcttcaaaaattatacatatttgtggttaccaattaagggttcnaatctttgtttttggtccggtttaaatcagaaaccccctttaaaaacctgcnattcctaataaaacgttgggaaaaaat

SEQ ID NO: 13448 - DNA, 416 bp, Arabidopsis thaliana
  unsure at all n locations
  Clone ID: LIB25-029-Q1-E1-H4
aaaagatgatgttgatgagatatttaatcaagctagacaactaggagctgtagaaggacctcttgagccacctccgagttccaggagtttcactggaactggtagattgctttctggtgaaaatgtgcctactggtaatcaacagcctgagcctgttgttcacaacattgttttctggtctaatggtttcactattgatgatggtcctttgaggaaattggatgatcctgagaatgcatcgtttctcgagagcattcgaaagtctgagtgcccgaaagagcttgagcctgccgatagaagagctccggttcatgtcaacttgatgcgaaaggaagagaaatgccctgaaagacagaaacgtaggnttcaattcaaggtgtttggaaaactcnaaggggtaacaatgaaaggtgcgg

SEQ ID NO: 13449 - DNA, 247 bp, Arabidopsis thaliana
  unsure at all n locations
  Clone ID: LIB25-029-Q1-E1-H5
tttancttttgatttgggntganttggatganganaagaagatagatagataggtaattcggattganatctcgaatgaatggctcagattcaagcancagggtcaaaatgccaatggtggtgtagctgntcccggtgctgctgcggctgaagcagcggnggctgcagctggagcngcggaagaggctggcggagcagcacagcaagggacgactcttaaatgtcggtnattnggatgcgaacgtta

SEQ ID NO: 13450 - DNA, 400 bp, Arabidopsis thaliana
  unsure at all n locations
  Clone ID: LIB25-029-Q1-E1-H6
atgtntgtctggncgnncggtccgganattaagggtggccgaccccacgcgtcagcccacgcgtccggagttaagcagcacgttcaagcagttactcaactcaggcatggaacagctagtagcaaccgtgacaccaagaatccgtccggttctanacaccgtggctaccataagctacnanttaacagaaaccgagtacgcagagaatgaggtgaacgacccttgggtccaaagacttctccactcattcganacaaatgcnncgtggctccaaccantaatgncatccancaactacgactcgtttctgcatctcataattgatttcatacttaagagactcnaagtcataatgatgcagaaacggtttagccancttggtgggcatcagcttgatcna

SEQ ID NO: 13451 - DNA, 500 bp, Arabidopsis thaliana
  unsure at all n locations
  Clone ID: LIB25-029-Q1-E1-H7
nnnggnnnnnnnnggaattgtcnnggccgnnctaccggtaagcacattcccgggtngncccacgcgtccggaangctcttcaagaattagggtttcgttttgaatcttctctgattcccaaatccaaagatatgaagagatcttcagggagaaaggattcaaatttcatagaacaattgatactttacgtcgctagtgctgcattgagtagcttggttctctacgttggtctccgtcaacttgacccgaaccgtgacgccgctaaaaagtctctcgagcacaaaagagaaatcgccaaacgtttgggtcgtcctcttattcaaaccaatcaatacgaggatgtgattgcgtgtgatgtaataaacccattacacatagatgttgaatttggttctattggaggattggagtcaattaagcaaagctttgtatgagcttgtgattccaccattgaaaaagaactgagctttttggctaagggaaattactgggtccccaaa

SEQ ID NO: 13452 - DNA, 423 bp, Arabidopsis thaliana
  unsure at all n locations
  Clone ID: LIB25-029-Q1-E1-H9
agctttttcagcttctttgttgaattgcgagcagaggtagaaatcagcaggaaacaaaaatgttgttcttttcttacttcaaggatttggttggacaagaagtgacggttgagctgaagaatgatttagccataagaggaactcttcactcagttgatcagtatctgaatatcaagctcgagaacactagggttgttgaccaggacaagtaccctcacatgctttcagtgagaaactgtttcatcagaggatctgtggtaaggtacgtgcagttacctaaagatggagtcgatgttgatttgcttcacgacgcagctagaagagaagctanggggtggcttgattcctgaaatatctttgtatctcccaaaacttgaatactttcattcggcgtaatgggctttataatgaatattccctgag

SEQ ID NO: 13453 - DNA, 267 bp, Arabidopsis thaliana
  unsure at all n locations
  Clone ID: LIB25-030-Q1-E1-A1
caaancctttgagaaactcanaanggacacnacgagaatgtcaagaaagtcatcaaaaggcntaagggtanggatgcntccaaaggacgggcttgtctgcactggctcgtaagccctggatcgctgttggaatgaagaacgttgactacaagagagcccggcatttcgangttgacntggggggagttccgtaacatcccttgagatnaacaaaggagaaagatgactggctaaantggagccccctgttaacatgggaaaanantt

SEQ ID NO: 13454 - DNA, 506 bp, Arabidopsis thaliana
  unsure at all n locations
  Clone ID: LIB25-030-Q1-E1-A3
nnnnnnnnngaagtgtttnttngccgcccgtatcggtaagannttcgcgggcngacgcgtccgtaaaaanctacctcagtgaccatagtctcactttccaatcccacaaagtcattctaagtctttggagtgttgcatttgcaaagatgtttacaaatgggatgagtgaaagccattcatcanngatttacctaaccgatgtatcaccagaagcattcaaggctatgatgaatttcatgtatagtggagagttgaacatggaagacactgtgaattttggcaccgagttgattcatcttctctttctagctgaccggtttggagttgttccacttcatcaagaatgctgcaaaatgctcttggagtgcctctcaganggatggcgttccgttttggaagaaggattctgtatgctcagttctccaagtggtttcgtcnatccacatgtaaaccattgaggagatgtgcaagangaattctccatgcacttcgactattgtacactg

SEQ ID NO: 13455 - DNA, 289 bp, Arabidopsis thaliana
  unsure at all n locations
  Clone ID: LIB25-030-Q1-E1-A4
ccaatgccttcgtttcttttactatttgccctgatgtttccttggggtacaagcatgtcttttgggaattgagagcaactttgtttaaattttcggttgcaaaatttttagaagaagcctctgatattttgtttcttttattaaaggatccctctttgtacagcaaaactcttgttaattttggttcatcaccccaattatcaaatcttatttttggctaaaaaaaaaaaaaanaaaaaaaaaanaaaaaaaanaaaanaaaannaanaaaaaaannaaaaaaannanc

SEQ ID NO: 13456 - DNA, 432 bp, Arabidopsis thaliana
  unsure at all n locations
  Clone ID: LIB25-029-Q1-E1-G1
gctcaaaacaacttaagaagttgtctgcgatacaatcaagcttgaaaactgtgaagaacattatttacattgaagaagatggagtagatgttgcttcnagtgatgtcaatagtatgggtgatataactgtttcgtcgatctctgaagttgagaaacttgggcagaagaacgctgttcaaccgatcttaccttcgaagaatggagttgctgttataatgtttaccagtggtagtactggtctaccaaagggagttatgattacccacggaaatcttgtcgcaactgctgcangagttatgaaggtggttccaaagttggataaaaatgatacatatattgcgtacttacctttggctcangtgtttganctggaanctgaaattgtggcctttaccnaaggtatngccaccggttanggncaacnaatgnctt

SEQ ID NO: 13457 - DNA, 487 bp, Arabidopsis thaliana
  unsure at all n locations
  Clone ID: LIB25-029-Q1-E1-E10
agatttccccatacttagaggtcaagagaaataaaatatttttccggcgacgcaatggcttcttactccggttgtttcttcgtcgttactttggcagttctgtcacaatttctcttagccccagcttcagccttggtcaacagggaatacatcgattccaattgccaaagagtcaaaaacaaagccttctgcatccaaactttgaccacctatcctcctgccgctgctgccaccggcctgttaccattggctgaggccgtggttggccttgcaatatcccactgcgagaagacagctggtttcgcagcagagacagccaaaaaagggacgcaaacatttgaaagaactcaagtttcaacnaagttgccaacgaacgncctaaggnttgggtaanttttgggcggttctcctaaaagaanccgctcctaactgggaaactccaagggaactccaaccaagaacaactggnccaaacttaacgaacngt

SEQ ID NO: 13458 - DNA, 558 bp, Arabidopsis thaliana
  unsure at all n locations
  Clone ID: LIB25-029-Q1-E1-E12
nnnnnnnnaactggttccttttgccnggcccgtaccggnccgacattcccgggtngncccacgcgtccgctcagattcctattcgtctctgcaattgaatcttccggtaggcgaagatggcgacgtctgcgaggatttgttgcggaggaggaagtgcatgcgccgttcgttgtgatcgtcgcncgttaaatttgaattctcgatcgtcatgtgttgttccagtgacgaatcgacggaatatgtgtgcgatcgggaagatttcgatgtcgatggaggatttgtcaccaccgtctgcggcggtgaagattgaaaggatcggtggaaggaaacgcggtggatctgttgtgtcaagggagaaagctaagatgtgtggttgagaagattcggtggtttgagattcgtgaaanaatccttaananaattcgccgtttaatggatgcaattttaataacgccggnagggctaaatggggtgggttttggacnaacgaacgggnaaaccgaaatcccaaaagggccggaaggaattggggccaanaagaattgggaanggaaaagg

SEQ ID NO: 13459 - DNA, 500 bp, Arabidopsis thaliana
  unsure at all n locations
  Clone ID: LIB25-029-Q1-E1-E2
nnngnngaagtgtctctttggnnngcnccggtccggaaattaacgggtcgacgcacgcgtccgaaaaaaaatataacctttaaattttctctcatttcttcatcttcctctccacaaaacccattttaatggcggacgttagaaaccctacaaaaaatcatcatggtcatcatcatcttcatgctctcttgatcccatatccatttcaagggcatgtaaacccatttgtacacttagccatcaagctcgcgtcacaggggatcaccgtcactttcgtcaacactcattacatccaccaccagatcacaaacggctccgatggagatattttcgctggagttaggtcagagtctggccttgacataaggtacgcgacggtttccgatggtttaccggtcggatttgaccggtcgttgaaccatgacacgtacaatcgtcgctgttgcacgtgttccatgcgcatgtggaagaacntgtggcgaatcctgttggaggagang

SEQ ID NO: 13460 - DNA, 497 bp, Arabidopsis thaliana
  unsure at all n locations
  Clone ID: LIB25-029-Q1-E1-E4
ntgnngaantgtcnttttgnnngcccggtccgncataacgggtcgacncacgcgtccgggcntactcagcaccatcaatggaccgcccggagacgatcgccgtcaaatgcgaacccatgaccgttgactctccttctcgacctctaaagcttgtagttttagctgaccttaatttcaatcctcctgagactgatgatcttgactcatccattccaatccctactcctcctcccatcactaggttgagtaacgaggaaagtcatcaagagggaggtatattaacatgcaaggaggtggaaccaggagaagtagaagccaaaaagatcagcaaggtgggaaaatgccgctccagaagtaagattgagtcttcctctgattgtggagttgatgcagatggtgatctggctaatcaaggggtccctgcatcccgggaagaaaaaatcagtaacctcaaaatgggtttgattcatgttgcaaggaagatgcccaaaaaatgc

SEQ ID NO: 13461 - DNA, 430 bp, Arabidopsis thaliana
  unsure at all n locations
  Clone ID: LIB25-029-Q1-E1-E5
ggaanctggacgttcgtgtttaaaccgacgacgtatttgaaattggctttgaaggaaangtgaaattaatggcggaatcntcgtcgccgtcncctactgaagagatcgttcggttgattaagcgtttaancgcttacnttgctttcaaaatgtcaagccttttctccactacatcnattcgaaatctggattcaagatcaattggtgcgattgcngggcttgcgattgcggtgatatttacgtgganggcgataanaacgcccggagagcaacgtcagagaangcagccgaancgtatgattcacaatgctgaaacntctagtgctgcngctgctgcttctcagtcgaatctaacttcttcggttgctccggaagtttcctcgcctcntgaggataatncggtgcaagatgttgtngatcagttcnttca

SEQ ID NO: 13462 - DNA, 437 bp, Arabidopsis thaliana
  unsure at all n locations
  Clone ID: LIB25-029-Q1-E1-E6
aaagctcgtcgtcgtcttcaatggtgaatctcaaaccaattggataaataaaacaaaacaaaaaaaacttcacaaaaaaaaaaaaaagatccaaattacaaccatgccttcggagttaacaccagaagaacgatcggaactaaaaaactcaatcgccgagttccacacataccaactcgatccaggaagctgttcatcactccacgcgcaacgaatccacgcgcctccggaactcgtctggtcaatcgtacgacgattcgacaaaccacaaacatacaaacacttcatcaaatcctgctccgtcgaacaaaacttcgagatgcgcgtcggatgcacgcgcgacgtgatcgtcatcagtggattaccggcgaacacatcaacggaaagactcgatatactcgacgacgaacggnagagttaccgggattcagtatcat

SEQ ID NO: 13463 - DNA, 75 bp, Arabidopsis thaliana
  unsure at all n locations
  Clone ID: LIB25-029-Q1-E1-E7
tgcngacggctgttataaaaagacgtggcatttcttctctgattgtgtntatttttatgacgganaagatgaaca

SEQ ID NO: 13464 - DNA, 435 bp, Arabidopsis thaliana
  unsure at all n locations
  Clone ID: LIB25-029-Q1-E1-E8
gcctngtcgttcgctgcagccatgtacggcggagatgaagtgtcagctattgtggttgacttgggttcgcacacttgcaaggctggttacgccggtgaagatgctcccaaggccgttttcccttccgttattggggcagtagatggtgtagaggcaatggatgtggatgttgattctacaaagactaattcgaactctgaggattcgaagaccgagtctgaaaaggaaaagagcaaacgcaagctctatgtaggatctcaagccatgagctaccgcagagatcatatggaggttttgtcacctataaaagatggcatcgtttctgactgggatttggtggacaatatatgggaacatgctttcaattgtctgatgattgatcctacggagcatccaatgctgctagctgaacctcctttaaacactcaacagcag

SEQ ID NO: 13465 - DNA, 401 bp, Arabidopsis thaliana
  Clone ID: LIB25-029-Q1-E1-E9
taagaaaaaaaaacatcatcttctgagattttaaccttttaatactcgaaatagacaagaagaagaagagaaaaagatgtattgtcttcaagttgcagcatatcacgtgttcttcaacgcatctcggatatgttatcttcttgctctgattatttttgtctttctcagattcttcgctattttccagaatatctcaccagataatcgagtcggcgagccaagaacggcatcgtttatgaggtttagtgatacacaacaagctcagggagattttaatctaactttctctggtgttttcttagaatctgtaatcaaagatgtcgctgaaattgttttttaagttttattttgtagtattgtttaattatgtacttatcgttatattaattaccatgttaaaa

SEQ ID NO: 13466 - DNA, 435 bp, Arabidopsis thaliana
  unsure at all n locations
  Clone ID: LIB25-029-Q1-E1-F1
gtttgtgttcttgggatcatcaagagttaaaacaaaaaaaaaaaaacatttcttttttccttcttcaatttgagatttagtgtctcctttaacacccacaaagccagcagatgctttcctgatgactccttgtttgatctgatcataagaagaagaagactatggccacttattacaaaactggctcaagtgagatttattccagaccagaatttgtccctggaaacgcaatgaactacacaaattctttcacagagacatttcctagagattcaactaataatgtgtcaccttcaaaagagattcaagtgttgtcaagccttggtggagtttcacaaatggttgagattcaagattctggttcttggagagatcaagaagacaatgacaggaatcgcttcccggtgatgaagcgtcctggnctcagctcgcaaa

SEQ ID NO: 13467 - DNA, 436 bp, Arabidopsis thaliana
  unsure at all n locations
  Clone ID: LIB25-029-Q1-E1-F10
tactcaactatctgccacaggaaagctttgtgatgacaaggcagcaaaacagatcgtcgcatttcttagcgctccattggaaaagtataataatgtagtaactatcttgaagcttaccaactatcctctagtaatggaataccttgaccgtgagacaaacaaagcaatggcaatcattctagttcagagcgtttttaaaaataatactcacattgctactgctgatgaggtgtccgtttccttcctcgatttagtttcttcttttagcattctctattgatgtggagtttccttttattgtttgttacaggtcgatgcattgtttgaactgggcaaagggtccatgaaaggattttgacggaacaattgatgaagaaggtccaanaacctaaccctggtccgcaaatcctaatgcattggggtcaaagtatcctgg

SEQ ID NO: 13468 - DNA, 493 bp, Arabidopsis thaliana
  unsure at all n locations
  Clone ID: LIB25-029-Q1-E1-F4
gnntngaagtatcttcntgnncntcggtccgacatacacgggtcgacgcacgcgtccgcacacacngattaacgaatcaaagatcgatttggggatcaatcgaggaagaagatgacggaggcgatgataaggaagaagccaggaatggcgagtgtgaaggatatgccgttgcttcaggatggtccaccacctggtggattcgcgccggtccgatatgctcgccggatctccaacacgggacctagcgccatggctattttccttaccgtttccggtgcttttgcttggggcatgtaccaagttggtcagggcaacaaaatccgcagggcgttgaaggaagagaagtacgctgcacgtagagcaattctaccgattcttcaagctgaagaagatgaaagtttgtgtctgagtggaagaagtatctagaatacgaagcgggatgtnatgaaagatgttcctggatggaaagtccgtgaaaacnttacaattctgg

SEQ ID NO: 13469 - DNA, 425 bp, Arabidopsis thaliana
  unsure at all n locations
  Clone ID: LIB25-029-Q1-E1-F6
gtggtgtggtgactaactgggctcttgtggctcagaaccaccacacacaatcgtgtatggaccctaatgttatggaagcgaagattgtggttagctcttgtggtcatgatggtccttttggagctactggtgttaagaggttgaagagtattgggatgattgatcatgttcctgggatgaaagctttggacatgaacactgctgaggacgctattgtgaggttgaccagagaggttgttcctggtatgattgttaccggtatggaagttgctgagatcgatggtgcaccgagaatgggaccaacttttggtgctatgatgatatcgggacaaaaggcgggacaacttgctcttaaggctttggggctaccgaatgctattgacggaactctcgttggaaactaagcccgganctgtcctaaccgc

SEQ ID NO: 13470 - DNA, 428 bp, Arabidopsis thaliana
  unsure at all n locations
  Clone ID: LIB25-029-Q1-E1-F9
tctcatcttcttcatttcttcaccaccatcatcacacaccttcttcttcttcttcttctctctctatcacaagagagtcaaatccatggcttctacttcttccctcgctctctctcaagctctcctagctcgtgcaatctctcaccatggttctgaccaacgtggatctttaccagctttctctggactcaaatccaccggttcacgcgcctcagcttcgtctcgtcgacgtatcgctcaatccatgaccaaaaaccgatctctccgtcctcttgttcgcgctgcagctgttgagactgttgagccaaccactgattcgtcgattgtgggacaaatcggtcaactcgattaggtttttggctatcgatgcggtggagaaggcaaatcaggtatctggtcctcctaagggttgtgctccgatgntcana

SEQ ID NO: 13471 - DNA, 431 bp, Arabidopsis thaliana
  unsure at all n locations
  Clone ID: LIB25-029-Q1-E1-D9
aattcggtaaccttcttgatgcttggcatcctagtgatgtgtctgtccacactatcctttccccttggaagactgtttttgatgctgcaagctgggagcagcttatgcgtcgttacatagttcctaaattacaggtggccttgcaagagttccagataaacccagcagatcagaacttagacgagttcaatttggttatggggtgggtatcttcagtacccattcatctaatgactgatttgatggagagattctttttccccaagtggctggatgttttatatcactggttgtgttcagaaccaaagttcgatgagataatgaaatggtttttgggttggaaaggaacattcccacaggagctttctgcaaacaggaggatcgaaatccagttcaagcgtggtctanatatggcgagggaagcagttgaa

SEQ ID NO: 13472 - DNA, 388 bp, Arabidopsis thaliana
  unsure at all n locations
  Clone ID: LIB25-028-Q1-E1-C5
nnatggctgccatancttctactctctctctttcttcaaccaaacctcagagacttttcgattcttccttccatggntcagccatctccgcagctcntatctccatcggtctcaaaccacgatntttctccgttcgcgccacaaccgctggttacgacttgaacgcnttcacgttcgacccgatcaaggaatcnatcgtgtcacgtgagatgacgagaaggtacatgacggatatgatcacttangctgagactgatgtcgtcgtcnttggtgntggatcngctggtttatctgctgcatatgagatgagtaagaaccctaangttcaagttgcaantaatgagcaatcctgtaatcctggngtggtgcttggccgggtggtangctt

SEQ ID NO: 13473 - DNA, 454 bp, Arabidopsis thaliana
  unsure at all n locations
  Clone ID: LIB25-028-Q1-E1-C7
ggagcaacactatcagaagccgatactgttgctgttcttgatnatgattgacaaaggtcaagtagtccangatatttcgtcgacatcngcatgagaaaaaagtaacaacaaatgtgcactgggaagggaaaatgtcganagacttggttacattcgcgggcaggataccaantgactctgttacccggaggtatgtacatgggatgtccttgctacgtatcaaagtgtgttgctgatttaaagtctttccacttagaattctgctggcttgaatcgccgagctcaanacaaagactcatccgcacatatgaccatgaaggtttagctgtcgcatcaacttattttactgatacaaaaatgtgagcttcttcncatttatgttccttgttcaatgttcaaacctttgttaatgttgccaatccaacttttgcnccanaattatttgncttggaaa

SEQ ID NO: 13474 - DNA, 317 bp, Arabidopsis thaliana
  unsure at all n locations
  Clone ID: LIB25-028-Q1-E1-C9
accataacaatggtgtcgttttatcccttcaanatgggtctaaataaaaggttaataattccctctaaaaaaaaaagggcggncgctctagaggatccaagcttacgtnngcntgcatgcgacntcatagctcttctatagtgtcacctaaattcaattcactggccgtcgttttacaacgtcntgactgggaaaancctggcgttacccaacttaatcgccttgcancacatcnccctttcgccagctggcgtaatancnaataggcccgcaccgatcgcccttcccaacagttgcgcagcctnaatggcgaatgg

SEQ ID NO: 13475 - DNA, 441 bp, Arabidopsis thaliana
  unsure at all n locations
  Clone ID: LIB25-028-Q1-E1-D1
gattgatgctcttggtgcacattttgcccctcttcctgctcccactccagctcccgcgcccgcgcccgcgcccgctccagctccagctccctcgcccgctcccgcttctgcgcccgttccagctcccgcacccacgcccgctccagctccagctcctcctaacaaagtggaagctctaggaggaaatggtggaacaatatttgacgatggtgctttcgatcatgtaagaaaggtttatattggtcaaggtgattctggtgtagcttatgtgaagttcgaatacagaaaagatgggaaaagagagacacgggaacatggaaaaatgacagtgttaggaacagaggagtttgaggttgaatccgatgattacatcacatcaanttgaanttctgtcnacaatgtccttgggtttaaanagtgaaacggcaanttcccntgtct

SEQ ID NO: 13476 - DNA, 425 bp, Arabidopsis thaliana
  unsure at all n locations
  Clone ID: LIB25-028-Q1-E1-D10
gacccattttcatctcggagctccaccaagagaacccaacatggagcttctctgtcactacgtgtcacagcttctcgtngctccttcgatgttgttgttgtaggtggtgggatcattgggttaaccatancccgccaattccttaccgggtcggatctatctgttgctgttgtcgataaagccgtaccttgctccggcgccaccggtgccgggcagggatatatatggatgacacacaagaaaccaggcagtgatgtgtgggacttgaccttgaggagccatgaactctgggcacaaagcttgcagagagcttgactgatgatgggtcttgatcctgaagagttgcttggctggaaaaagacaggaagcttgctcattggtaggaccactgaggaatgtgttgctcngaancaaaaggttatgag

SEQ ID NO: 13477 - DNA, 418 bp, Arabidopsis thaliana
  unsure at all n locations
  Clone ID: LIB25-028-Q1-E1-D11
agcagctcggttgttgacgatggcttgataaacaaggaagagtttcaacttgctttgttcaagaacagaaagaaagaaaatttgtttgccaataggatatttganttatttgatgttaaacgaaaaggcgtaattgattttggagactttgtgagatcactcaatgttttccatcctaatgcttccctagaggagaaaacagactttacctttaggctttacgacatggactgcacaggcttcattgagcgccaagaggtgaagcagatgttgattgcacttctctgcgaatctgaaatgaaactggctgatgatacaatagagatgatacttgatcaagacatttgaggacgcagatgtggatcgggatggaaagattgataagacagaatggagcaatttcgttatcaaaaaccca

SEQ ID NO: 13478 - DNA, 475 bp, Arabidopsis thaliana
  unsure at all n locations
  Clone ID: LIB25-028-Q1-E1-D3
caaaagaagaagagaaacaacaagaagtagtaatggcttcctctatgctctcctccgccgctgtggttacatccccggctcaggccaccatggtcgctccattcaccgggcttgaagtcatccgctgcattcccggtcacccgcaagaccaacaaggacatcacttcatcgcaagcaacgggggaaagaatttagctgcatgaaagtgtgggcaacaatttggaanaaaaaattttgagactcnatcttacctccctgaccttantgacgtcnaattggctaaaggaattgactaacttctccgcaacaaagttggattcccntgtgttgaaattcnantttaaagcaacgggttttgtgttaccctttancaacgggaaacaactccccngggtaactacgaattggaccggttactgggnccaaatgttgggaaancttccnaatggttccggatggcaacccgnantnccgc

SEQ ID NO: 13479 - DNA, 456 bp, Arabidopsis thaliana
  unsure at all n locations
  Clone ID: LIB25-028-Q1-E1-D4
tcccttaactctatctctaggtgacttaagagtaaaaaatgggtagaggcagaggttgaagtagatgtggaaatcaaatctacggctgataagtttttcatgttctctagaagatcacaacatgcctccaaagccactcgctatgtacagggatgtgatctgctcgaaggcgagtggggcgaagttggaagcatactcttgtggaaattaactgttgatggagagccaaaagtgtcaaaggatatgattgaggcgattgatatgaagatgaatatgatccagtggagggtgttagagggacctctgaaggaagagtacaatattttctcgaaaacgatgaaagtnagccctaancaagganggtctggaaatgtggtgaagtggaacttgaagtatgagaaaantgatganaaagggggctcacctanagaaggtccctcaantnctccnccaaaa

SEQ ID NO: 13480 - DNA, 442 bp, Arabidopsis thaliana
  unsure at all n locations
  Clone ID: LIB25-028-Q1-E1-D5
ccacatgatagcatctccgatccatctcctaccgacgatttcttcgagcagatcctcgggctttccaacttctccggttcttcaggttctggtctctctggaatcggcggcgtgggtccacctccgatgatgcttcagcttggttcangcaacgaagggaatcataatcatatgggtgccattggaggaggtggacctgtaaggtttcataatcagatgtttccgttgggattaagtctcgatcaagggaaaggacatggctttcttaaacctgatgaaactggtaaacgtttccaagacgatgttcttgataatcgatgttcctctatgaaacctattttccatgggcaaccaaatgtcacagccaagctcnancaatgccgcatcaanaatctactaatcggcctanagttanggctaggcaagtcaangtaccgatcca

SEQ ID NO: 13481 - DNA, 430 bp, Arabidopsis thaliana
  unsure at all n locations
  Clone ID: LIB25-028-Q1-E1-D6
ttccaaagcttagttttttttttttttttcaatttctctcttgcgttttcgattttattacaanaactttgttttgggcttcatccatcgttcaaggttcgttgaaaactatgaagaaagttgagttttttatgctccttctctgcttcatcgcagcgtcatctctagtgtctgctgatccaccaacatgtcctgctgatttgggaggcaagtgtagtgattctgatgactggcaaggtgatttcttccctgaaatccccaagattaagtatgagggaccttcgagtaagaacncacttgcttacaggtggtataacgctgaagaanagattcttgggaagaaaatgaaggattggntaagattcagtgttgcgttttggcatacttccgtgggaactggaggtntcaattggtgctgcnacaaagtatt

SEQ ID NO: 13482 - DNA, 447 bp, Arabidopsis thaliana
  unsure at all n locations
  Clone ID: LIB25-028-Q1-E1-D7
taatcggccacgatgacnatggcgacgcctttcagtggggctgcgaactctattgtggcggcgaggaccgttctgataacgggagtgagcaaaggtctgggaagagccctagctctcgagctggccaagaggggtcacactgtgataggatgcgctcgtagtcaagagaagctcaccgctcttcaatcggagctttcctcttcgaccaatcatctcctcctcaccgctgatgtgaaatcaaacagcagtgtcgaagaaatggcacacacaattgtggagaagaagggtgtcccagatatcatagttaacaatgctggtaccatcaataagaacagcaagatttgggaagtctctgctgaagattttgacaatgtcatggatacaaacgttaaaggagtttcaaatgtgctgcgccantttacccctttgangcncccnncnaagnaa

SEQ ID NO: 13483 - DNA, 416 bp, Arabidopsis thaliana
  unsure at all n locations
  Clone ID: LIB25-028-Q1-E1-E10
aggacccaccgattttgtagtcggtctaacacatagagacaaaacatanacctgagcttcacaaatatagccgaatgaaccatggnaaattgtacaanagagaacacggtgngcaanggataagatgatacatggttgaggaagcagcggtaatccccactccttgganccganatcatagtgccgcgctgcctcaaccattgcaaacggccgtgataatgtaagctatccganagagtcttcttcaacctctgttaacgattctcctgctgttttggcacctcgaagagcnaatccttancaattatcccttatccttccaagctgcaacntatgggtttgctcttcncanatcnataaagtttggtacgctctcgactccctctgatgcacatcctcaacggaanntancggaa

SEQ ID NO: 13484 - DNA, 423 bp, Arabidopsis thaliana
  Clone ID: LIB25-028-Q1-E1-E11
agtctgcacaggatgagagaggcacagctaggcggtcacactctgaggtcccatggaatgactgttgcaaggactcacatgcatgattggatcattctcgtgttacttgttattctcgagtgtgtactccttataatccacccattttatcgctttgttggtaaagatatgatgactgatctaagttacccgttaaagagtaacaccgtaccaatttggtctgtcccggtatatgcgatgctgttacctttggtaatcttcatctttatctacttccgtcgaagagatgtttatgatcttcatcacgcggtgctaggtctcttatactctgttctggtgacagcagtacttaccgatgcaataaagaatgcagttggtcgaccacgtcctgacttcttctggcgttgttttccagatggcaaa

SEQ ID NO: 13485 - DNA, 330 bp, Arabidopsis thaliana
  unsure at all n locations
  Clone ID: LIB25-028-Q1-E1-E12
aaccctaaaaaaagtcctttctgattcatctatacagacacatactgtattctcaaaacaatggagattccttctctgaataagcagcaagagttcactctcgcctccgtnnntgntggcacttctccttcctcatctctttcgtcctctcctgttgtagctacgttttcatgcgttaatgaagtcaaggaactccgatttcaggaatcgaaatcgtctgatggtttcagttttgatcttagggnngactcagttgttcaagttggggccacttcagttcacttgtgtntcnggatggttcnatttcttctgnanaggannantccnnng

SEQ ID NO: 13486 - DNA, 450 bp, Arabidopsis thaliana
  unsure at all n locations
  Clone ID: LIB25-028-Q1-E1-E7
gagacggaggcagaatcacagtaccttaatgtactctctgctttcctcgccatcgaaccggtggactccgtcatcactctcgctanagggtgcactggaggatcaattactgagaangcccagagatttttctgggaaatttgcgttgaagctgctgcgaatggtaacggatcatacgcgaagaagttactgaagaaactcataaatgaagttgagttanagaatggtgaagtattggatgaagtgtatgaagagtatgctctttacatgttaacttctaaggaagatatattggtgaaagaaaacataaggataaccaaattcatttcttttcttttccctgaangttcgtacaaacacccgagttgtccaangtcgangaaattagttattccgctgcantgttcgttgaacatgcttgaaggagataccgggtgttcaaactnggca

SEQ ID NO: 13487 - DNA, 306 bp, Arabidopsis thaliana
  unsure at all n locations
  Clone ID: LIB25-028-Q1-E1-C2
aagatctttgggttctgtggttcataatcagaaatggctaatcacaggggaaagcttgacgagacaaacctatatggagtcttgtaggcatgaccgctcttgtcaccggtggctcaaaaggcatcttgagaagctgtggttgangaactatctacgttangggcaagaatccacacatgtgccacagacaaaactcatcttcaacaangcttagatacatggcaattancngggtttcaggttaccacttntgtcagccangtntcttctcgtnatanccaagatcaagncatggnaaaccgtttc

SEQ ID NO: 13488 - DNA, 503 bp, Arabidopsis thaliana
  unsure at all n locations
  Clone ID: LIB25-027-Q1-E1-H4
cnccgtancggtcaaaactcgcgggacccaagccttcnnttncaccttancccttgtctncttcattgtcccctttttctcactttaagatctttcttgttcttagcccatgacaagtcaccaaaatatcaaaatttcagaaaaaattatgatgtngggtgtggggggaanatgtcaaagcagccacgagcttgcgaactttgtctgaacaaacacgcagtttggtactgtgcctccgatgatgctttcttgtgccatgtttgtgatgaatcagtgcattctgcaaaccatgtagcgacaaaacacgagagagtttgtcttagaacaaacgagatatcgaatgatgtgcgtgggggaacaacattaacctcggtttggcacancgggtttcgaagaaaagcaagaactcctaaatntcngtatgagaaaaagccacaacaaaaagatagatgatgagagaaagaaagggaagatcctcgtgttcccgaagaatgggagggcga

SEQ ID NO: 13489 - DNA, 448 bp, Arabidopsis thaliana
  unsure at all n locations
  Clone ID: LIB25-027-Q1-E1-H5
tttactcagggatgtccatctacacttggtgccaataggaagtctcaagaattctttgaaagggtaccagctagggacaataatgtgagagttttgtttactgagaaagttatggaaagtattgaaagggagaccagctgcaagattaaattggatgagaagttcataattgttagtggcaaggacagattgatcttgaggaaaggtgttgatgctgttcacaaggttaaggaggatggtgagatgaaaagttcttctgtttctcacaggagcagatccaggtcacctaggcgaacttctgttggaccatcacgtgctcgaaactctgaacctcaaaggcagcagctgccatcacatggttcgtcaagtttcccagagcgctctggaangcaagataagtttgtggataatcctttccgcgaagagaccntgttcgtgagaatcaaaa

SEQ ID NO: 13490 - DNA, 405 bp, Arabidopsis thaliana
  unsure at all n locations
  Clone ID: LIB25-027-Q1-E1-H8
ttgcgtgaaatgcaagccaaggctgagaaagatatgggtgctagtcaagacccttcaggtggtgttagtgcggctgagaaggaagaagtggattcgcgttcaatatatgttggcaatgtggactatgcatgtactccagaggaagtccagcagcattttcaatcatgtgggacagtgaatagggttacaattctgacagataagtttggtcaacctaaaggttttgcgtatgtcgaatttgtggaagtagaagctgttcaaaattcgcttattttgaacgagtcagaactacatggtcgtcagataaaggtatctgcaaagaggactaatgtacctggaatgaagcaatttcnangaagaaggcgtcccnttagaccgatgaaggggaatcatgccaagaattcc

SEQ ID NO: 13491 - DNA, 435 bp, Arabidopsis thaliana
  Clone ID: LIB25-027-Q1-E1-H9
tttttattcctgaaacccacaaggaagaaatcgatgggtgattatcgtcttctacgaaactccggcgtcgttatcggaataatcttgctacatctctttactttcgcctctcttgtttcatccgatgaacttcagtttgttgtgggagaaagcggagagcttcaagtgactcctagtttagaggtaaaaggttctcctggattgaagccagatagaacctctctttgtgagaggattcatatccatggacttggaaggtttaaacatctaagacaagtatgcacattcgctcaagttgatagttaacgcgtcaatctctgggaaaacaaataacattgacgtttgctttcaccggaatttgtcgcgtggaattggaatgtgccctcatagtccatgggagaaagcctccaaagggtcatgggttcagacaatgtt

SEQ ID NO: 13492 - DNA, 449 bp, Arabidopsis thaliana
  Clone ID: LIB25-028-Q1-E1-A2
cacactctctacaatgttgtctatgctctggttccttctatctcttctctctcttcttctacttccttgtctccgaccttgctttcctgctaaaggatctctgaaaaacaaaaagaagattgacaagggaacttatgtggtcggagaggaggagacacctaaagagcttcagagagagctgatgccgagacacgtggcagtgataatggacggaaaccggagatgggctaaacagaccggattgttgacgtcacaaggctacgaggctggagctaaacggcttctcgagttcgctgacctctgcttcaaactagggataaatactgtctcagcttttgctttctccactgagaattggggaagacacaagattgaagtcaaatgcttgatgtatttgttccaacgttacctcaagtcaaagatcaaattttccaaaacaagggaatccg

SEQ ID NO: 13493 - DNA, 453 bp, Arabidopsis thaliana
  unsure at all n locations
  Clone ID: LIB25-028-Q1-E1-A4
tctcttcctgaatccattacttttactccaaaatcattaacaatggactcaggaagtgcagtggacatcatttcgacgctttcagacttcctgctcgtcctgatcatttcgaanctttccttcaaggaggctttgagcaccagtcgcctttccacccgctggagacacatatgtcgcgaaacgagaaacatctctttcagagaggacgagatcgtgacattcgctgatgattccgttgctcgctattaccaaagggctgcattagttgcctatatggttggttgggttaacaattttaccgggtggagttgttgaaagcttcgagcttcgtctctctaattcgtatgcntttgnagaangggtcaccacactggatcgaattcgctgtctccaaagaatgtcaagcatcnttttcctgaactcccaaaaaccccgttggggtttcaaaaaang

SEQ ID NO: 13494 - DNA, 445 bp, Arabidopsis thaliana
  unsure at all n locations
  Clone ID: LIB25-028-Q1-E1-A5
atttttagggatgttatgaatctcaactcatccgtggagtgagagacttgggagagtgaggatgtggatgggatttggctaatgtaatatccgtcaatgatgtttgttgctgacatagcttattctcttcaattcacaggctccggagggttatggtactcagcatgatccaaatcatcggtttggcgtatcatatgatgacggatatcctgatgaaaggttgatgcgggatgatgtctacaactatccacctggacataatactctgggtgacttgcctcaatctanaaagcgaaactatgaanaaaattatcccagtgaacttcgcacgcaagaaaagccttacatcgattcagattatgctgctgactattatcatgatagtgaanctgggagtcgtaatggacattaccgtgatcatgaacacgaaanggtcntccaaata

SEQ ID NO: 13495 - DNA, 70 bp, Arabidopsis thaliana
  unsure at all n locations
  Clone ID: LIB25-028-Q1-E1-B11
agtgttgaggnccgcacncttatcttcatgagagctgagcagtatgccaaagaatacgctgatnaaggat

SEQ ID NO: 13496 - DNA, 458 bp, Arabidopsis thaliana
  unsure at all n locations
  Clone ID: LIB25-028-Q1-E1-B3
naaagcctctcgttgctagaggaatcaancaatggtgtttgtgaagtccaccaagtcgaatgcttacttcaagaggtaccaagtgaagttcangagaagaagagatggaaagactgactacagggcaaggatccgtcttatcaaccaagacangaacaagtacaatactcctaagtatcgttttgttgtccggtttaccaacanagacatagtggcanagattgtatctgcaatcattgctggtgacattgttaaagcttctgcttacgcacatgaactgcctcagtatggtctcactgttggtcttacaaactatgctgcagcttactgtactgggcttcctttggntcnccgtgttttaaanatgttgggaatgggttgacgantatgaagggnaacgttttagggcactggganaaanacttttcccgttgagcccaactggattcaanggngac

SEQ ID NO: 13497 - DNA, 408 bp, Arabidopsis thaliana
  unsure at all n locations
  Clone ID: LIB25-028-Q1-E1-B4
ntcaatgctatgaagcgagcgangaggacggcagggagaggatnttcttncctctttctcttatctactttctcttctaaatctctaatcttttgaaaccctaaatcanggttttgtntttttttatcaactggggaagaagaaaggtgtaacctttatataaccatggattccggtgacgcnacatctttgcttttgacgaaaattcgangcttggagccagattatgctcctaanattattgggtatttgcttttacatgattttggtgatanagacttgatgcatctggctcgtggacctgaancgattttgcagtcgactatttcgaangtgangagtctcttggggaatttctccaacanctcgccntcttctangccgacntctccttcatccgttggancc

SEQ ID NO: 13498 - DNA, 313 bp, Arabidopsis thaliana
  unsure at all n locations
  Clone ID: LIB25-028-Q1-E1-B5
gaanataatcnacggcaaggcgattgctcataccatcagatcagngatcgccgaggaagttcgcggtctatctgagaaacacggnaaggtcccatgactagctgtagttattgttggganccganaggattcacagacctatgtgaatacgaagaggaaancgtgcgctgaggttgggattaagtcatttgacgtgggcctaccataggaagtttctgaagctgatnttantagcaaagttcatgaacnaaattcaaatccgnatgtncanggcatantagtttaactcccatttgcccgaaacattntaatg

SEQ ID NO: 13499 - DNA, 426 bp, Arabidopsis thaliana
  unsure at all n locations
  Clone ID: LIB25-028-Q1-E1-B6
agcaccacgaccttgggaagatccgagcacccttgcatcctcncanaaagaagatgcagattcagcacgcttaccagcanatacatcaggggtcaaaactgttgaagatggaccggatgatgttgagagggaccaaaagaangataggcgtgaggaaaggaaacctgcaaagagagagaaggaagaaagacatgatangcgtgaaaaacgcnaaaggcatgagaagcgaagcgctcgtgattcagatgatagaaagaagcacaagaaagagaagaaggagaannaaagaaggcatgactctgattctgattgaagcgaattgtcccaaggatggaacattttgctcttcagaggaanaatggtcngctaagtaccaaaatccaactaccanttctgcaanaattaaatccgttgcctaattcaatt

SEQ ID NO: 13500 - DNA, 434 bp, Arabidopsis thaliana
  unsure at all n locations
  Clone ID: LIB25-028-Q1-E1-B7
tctttttctctacacgattcgattgattcaagtatcaatcaatcgaatccgagataagtcatgagtttcttcaaatgggtttcttttgttttgatccttcacttgcttaatccgactctgatttcatgttcctcnaatgggttatctcaaataccttcaaagtttcttactttggctaaaaggaatgattttttcgattggatggttggaatcagaangagaatccatgagaatccagagttaggttatgaggaagtagagacatctaagcttgttagagcagagttggagaagatgggtgtttcttanaagtacccagttgctgttactggtgttgttgggtaagttggnactggncatgcnccttttggtgcnttaaaggctgananggatgnacntgcnatgcaggaaatgggggaatggaacacacaata

SEQ ID NO: 13501 - DNA, 435 bp, Arabidopsis thaliana
  unsure at all n locations
  Clone ID: LIB25-028-Q1-E1-B8
aaaggtttcttcgatcgtcgaagagattctttggacaagtcccctccttcctggttcaatcttcgattcagctctcttttaatttttttggttttgggaagctgctatgttatttgagaggcttaccaagaaaccaccttcgcttgttgatctttgcgtaaggaaagcgattgataatgtaaagtacattggatatgttggtggggttgattttcagctccttgagcagattctgcaacactgtacactagaacagctgaagcacatagaggatgctactgacgacacagatcttagtccaatcaccgataagttttggaanggattctataagaagcactatggagaagangacatgaaggatcttatagaggacctggagtggnataaagtaaatgattcaaatggaggaacttatatgagttgaagggtata

SEQ ID NO: 13502 - DNA, 431 bp, Arabidopsis thaliana
  unsure at all n locations
  Clone ID: LIB25-028-Q1-E1-C10
tctcattcctctctcgatcttactcaattttgcgtttctgcttttcattttctctcaagaagcgtaaatggcgaacaatggacctaactgggacggattactcaaatggngcctctcacattccgatggagcttcctcttctagccgtataagtgaggaagatcgacaatggtttgtggaagctatgcaagcacatacaatcgattcaatctctcgtatgaaagtaatatctcaaatcatgaagatgcctgaacaagtcttggaggctcaaggagttacacctgatgatcttgaaggaatgttggctgagctgcaggaacacgtcgagtcgatagatttggccaatgatcttcactccattggaggtttggttcctctccttagctatctcaagaactctaatgcgaaaattcgagcaaagtctgccgatg

SEQ ID NO: 13503 - DNA, 511 bp, Arabidopsis thaliana
  unsure at all n locations
  Clone ID: LIB25-027-Q1-E1-H2
ttctggccccgtagnggtcaaaaatcacgggtcnccacacgttcgaagcaacttggaggccacatgaaatgttcanagaagagacagagcaaaactcaggcagatcccttcttggctcttcgaacctcaccaccacacacctattgcaaaccctaaccctaatttgagctcnncgtcttcctcttcaacaacaacagctcatcttgagccttccctaaccaaccagagatccaaaaccactccttttccttctgcccggtttgatcttttggacagtactactagctatggaggtttgatgatggacagagagaagaacaagagcaatgtatgtagcagagagatnaagaaaagtgccatcgatgcatgtcattcagtaaagatgtgagataanccgttgggatctgatgaataaagaaagaangatnaaatcangggggttngagcctgggataatttgaagaatccccaaccaaanttcttgaatttggagccttcgactaaggctacc

SEQ ID NO: 13504 - DNA, 524 bp, Arabidopsis thaliana
  unsure at all n locations
  Clone ID: LIB25-027-Q1-E1-F4
ggntnnnnaaattttccctgcccgtacntccggaancccgggtttctcctcaaaaactacacacccgtaccacaccaccaccctcctcgtttcctcagagatcccctctctaacttctaaggatatagaaaatggcagatggtgaagacattcagcctctcgtctgtgacaatggnaccgggatggttaaggctggatttgctggagatgatgcaccaagagctgtattccctagcatcgttggtcgtcctcgacacactggtgtcatggttggtatgggacaaaaagatgcttacgttggtgatgaggctcagtctaagagaggtattttgacattgaaatatcctattgagcatggtattgttaacaactggggatgatatggagaagatttgggatcacactttctacaatgagctcccgtgntgcaacttgaagaacaaccctgtccttctcactgaaggntcctcctnaaacccnaagggcaaatccgttangaaaattggctncaanattatgntttg

SEQ ID NO: 13505 - DNA, 452 bp, Arabidopsis thaliana
  unsure at all n locations
  Clone ID: LIB25-027-Q1-E1-F6
aaacaaagtttcatttcttcttcttcttgaaatggcgacgagcaagtgctactatccacggccaagccaccgtttcttcaccactgaccaacacgtcaccgccacttccgaggncgagcgngacgaatgggatcttttcaataccggttcagattcctcttcaagtttcagctttagtgaccttacaatcacatccggtcgaaccggaactaaccggcaaattcacggtggttctgactccggtaaagctgcgtcttctctaccggttaacgtaccggactggtctaagattcttggagacgagagtcgacgacagaggaagatttcgaatgaggaagaagttgacggagatgaaattttatgcggcgaangtacacggcnagttcaaccgcatgaaattgcntgcgaaaccggaaggatggcctcgttttcngttcangaaaggtgtgggg

SEQ ID NO: 13506 - DNA, 460 bp, Arabidopsis thaliana
  unsure at all n locations
  Clone ID: LIB25-027-Q1-E1-F7
taacaaagaaaactgagaaaggttttcttataagatcccattcttgtagcaaaaacccagaagaacaaactttcgaagaagacgactaatcaattcatctgattatggagagagnacagggaatcttcggagctggtggcggtttaggtcacgcatcgcctgattctccgactctcgatacatcggagcaggtttacatctcttctctcgctctcctcaagatgcttaagcacggaagagctggtgttcctatggaagtcatgggattgatgcttggagagtttgtggatgaatacactgttagggttgtggatgtttttgcaatgcctcaagagttggtactggtgttantggtttaaagctgttgatcatgttttccaagactaatatgctcgacatgcttaaacagnncgggaagacctgagatggngggttggtttggaannatcacaaccntggg

SEQ ID NO: 13507 - DNA, 450 bp, Arabidopsis thaliana
  unsure at all n locations
  Clone ID: LIB25-027-Q1-E1-F8
ggccaacactctttggtggtgagatacaaatttggttagctatggcatatgaggccaataatcgccacgctgattgcattgatctttatcagcaattagagaagaaacatcnnagtccnggtattcgtcgtcaagcttctgagcttcggtatatcttgcaagctcctaagcttaagatatctcaggaggaaatggttactattcccatgatcggttcaagttacgacagctatgcagtgacatggagtgataaggaaagggataaggagcggcgaatgaatgcatcgactacgaatcagctcaactcgagtgatgattttctaggaaagctcttggtttggcgaccggtggtcggtatggagaagaaccgagtcctttggcttgctttgacactgtggtttggtttgggttggagcaacaatcatcttacaaaagataagtngaagacat

SEQ ID NO: 13508 - DNA, 453 bp, Arabidopsis thaliana
  unsure at all n locations
  Clone ID: LIB25-027-Q1-E1-G1
ctgtntcctggccccaccggtccgganaatcatcncgggcccacgagctcactaatctgcggccgccctttttttttttttttggagttaaaatgcnatgaattccaaaccagacaacattcaaataanncanagactaaaaaggctgttcaaacagtaataattcttgnacatgggncactaaaccagaacgataacaggaaacanagatacattcagtactcattactttgagggcacctacggaaagcaagtaanactacaganggtagacgttccagtgcttaatgatgaaacatcatcagtacaagcaaacgtgtttttcatcatacaccgtatcactttcacaagtggctgcagtcattccgcagcannaggagatttacttcnanaaacagcatcaactttgcncannagaacaaggctaccagcatatggggaactctcaantgc

SEQ ID NO: 13509 - DNA, 522 bp, Arabidopsis thaliana
  unsure at all n locations
  Clone ID: LIB25-027-Q1-E1-G2
gggnnnnnnnaatgttttcctgcnccgtaccggtcnaaaactcgcgnngccacccacgctctccgnaaaccntggggacagaancagctcatgttcagggtccagtaactacccaaggaactgttattattgatgaagagagtgatgatgatattccttttgcaccaatgggacgaagtnggcaagngngacctgctggttctgtagccaataataataatcaagattacaatgatatagaagaagaaatgatcagagctgccattgagacctcaaagaaagaggctgagggatcaagtaaccctttacttgaagagaggccacttcacatggaagatgatgatgacatagcaatagctgttacaatgtcattgaagtcagcggaggaagaagttttgcgcagtcaagggtataangcctcaacctccggaaatangagcntccgcaatgactgctgctcaaaggnctcaaggatacccaagnccctgaacnggaaaattggcancacctaattcaccattt

SEQ ID NO: 13510 - DNA, 456 bp, Arabidopsis thaliana
  unsure at all n locations
  Clone ID: LIB25-027-Q1-E1-G4
cgccnaancgtccgggatggatcatctgatatttcttttgttagttacaactatgtattttgggataaatgaagcttgcaaaaaaaatcatgtagtaattcataacgaaatcggtcctgggattgngggcaacattgcatgccggcaattcagcccaaaacgcacaccttcaatgtttcacaccctaaantacaaagatcctttttacatcattgagttcgcggacaacaatcanctacctcacggtgagaaatggtattgtctgattagtcacggaacaagaccaaaatattggtttgatattgaagtatatcgtcaaggctattatcctcgatgtggtcagctacgctcatggattgctanaaaggatgggatttggtttacaaganaattcataatccaccanggcacgtacttgattggaaaatccagtaatggtcctctngcnttaatcnc

SEQ ID NO: 13511 - DNA, 447 bp, Arabidopsis thaliana
  unsure at all n locations
  Clone ID: LIB25-027-Q1-E1-G5
ccgtcgtttttgcaaggcagatggcgaagcagattcgtgttacgacgccgtcgatgtccgcaacacgctttctctcaacgggcgacaatggtcaagtagacgagcagcagaaccctccagagcccttacccaacagacccttgcgaggggagagatcttccaactctcacagagaaccacccgctagacaagcccacaaccttggaaagagtgatactactctgtctgacgatggcttcctcgaacagttcaagcttggagtcaatcaggattcacgggaaacccccaaaccggaacaatacccgcangagcccttaccgccgcctgaggattccgatgagatcttcaagaagatgaaggaaggaggtctcatccctaacgccgtcgccatgcntgacggctctgcaaagatnggcntgtacaagaagccatgaagcntttcggatt

SEQ ID NO: 13512 - DNA, 525 bp, Arabidopsis thaliana
  unsure at all n locations
  Clone ID: LIB25-027-Q1-E1-G6
gngngnnnnnnnnanaacttttcgcggcnncacggtccggaaaaactccggtngnccccacacgcgtccgggaattctttcagccgccgtcccaattgctttgccgccaccgaagcaaagagtagagagataatggctgaggaagaagctaagggtttggattacataccggagatagtactgangaagaggnngaacagagatgagcttgcctttatcaggaagaagcaacttgagttgggtaattccggcaagaagaagaagaaagtctctgatatcaaacgtcctgaagattttgttcatgagttcagggctaaggaagtagatatgatccggatgaagcaaagagtaaagaggccaaagtcatctcctccaccagttaaatctgacctggttttcatcatacgcattcaaggcaagaatgatatgcacccaaagaccaagaggattcttaacaatttgcaactaaagagcgtctttactggtgtatttgctaaaagcaactgacagtttgttccaaaagct

SEQ ID NO: 13513 - DNA, 326 bp, Arabidopsis thaliana
  unsure at all n locations
  Clone ID: LIB25-027-Q1-E1-G8
gatcanaattcaancaggggaagaaatcangatgcactttatgcagcctgtnggtacagngcttgtcgccaagaggacancccacgagctattaanggtanatttcaaagatttctcatttganagagtcttgttacctcttgatatanctttgacataagtcaatcaaactcgtgaancttgtgaatagaaatatgcgttattgccaatggggcgacaaanaaggaaattggccgagcaaaagactacattgttaagacattgggactggagcctggtcantctgtggatttangaactatacacgctgngtgatttcatganaa

SEQ ID NO: 13514 - DNA, 435 bp, Arabidopsis thaliana
  unsure at all n locations
  Clone ID: LIB25-027-Q1-E1-G9
aaaaanaaaatcaaaacagaagcgagcgaagaggacggagggagaggatcttcttccctctttctcttatctactttctcttctaaatctctaatcttttgaaaccctaaatcagagtttngtttttttttatcaactggggaagaagaaaggtgtaacctttatataaccatggattccggtgacgcgacatctttgcttttgacgaaaattcgaagcttggagccagattatgctcctaagattattgggtatttgcttttacatgattttggtgatagagacttgatgcatctggctcgtggacctgaatcgattttgcagtcgactatttcgaaagtgaagagtctcttggggattttctccaacaactcgccttcttctactccgacgtctccttctcccgttgaatcctanctggtcgtcctcctctta

SEQ ID NO: 13515 - DNA, 445 bp, Arabidopsis thaliana
  unsure at all n locations
  Clone ID: LIB25-027-Q1-E1-H1
ctctcgttgctagaggaatcaaacaatggtgtttgtgaagtccaccaagtcgaatgcttacttcaagaggtaccaagtgaagttcaggagaagaagagatggaaagactgantacagggcaaggatccgtcttatcaaccaagacaagaacaagtacaatactcctaagtatcgttttgttgtccggtttaccaacaaagacatagtggcacagattgtatctgcaagcattgctggtgacattgttaaagcttctgcttacgcacatgaactgcctcagtatggtctcactgttggtcttacaaactatgctgcagcttactgtactggccttcttttggctcgccgtgttttaaagatgttggaaatggatgacgagtatganggaaacttgaggcactggagaagactttccgttgaccaactgantcaaggagaccttccg

SEQ ID NO: 13516 - DNA, 414 bp, Arabidopsis thaliana
  unsure at all n locations
  Clone ID: LIB25-027-Q1-E1-H11
gcgcgatactagcgttggccaataacaaagtggcagtggtgaaatactctctattgggttcaattctctcaaaccttctcttggttcttggcanttccctcttctttggtggtatcgccaatatccgccgcgagcagcggttcgaccggaaacaagccgatgtgaacttcttcttgctgcttatgggcctgttgtgtcatttgctgccattattgttaaaatatgcagcaaccggcgaagtatcgacctctatgattaacaaaatgtcgctcactctgtcgcggacaagcagcatagttatgcttattgcttacattgcttatctcatcttccagctctggactcaacgccaattgtttgaggcacaacaggatgatgatgatgcatatgatgatgangttagtgttgaanaaa

SEQ ID NO: 13517 - DNA, 459 bp, Arabidopsis thaliana
  unsure at all n locations
  Clone ID: LIB25-027-Q1-E1-F3
agattgagagagagcgaanaanaaaaaaaaaaagagagagcggagagaagaaaaaaaaccctagcgtgttgttcagtgactttggggggaaaatttctcgtantttcttcgctangtccgtngtctcatctctttccatttgtggaattcaatggaagctttaggtttttggtgctgagaattctctgttttcgaatctagggtttgtagaggagatctattcaattgtagatacgcaagatcgaaacgagtcanaaaactaggagaangagtcatgtcggattctgataaagagctcgagaatcagattattgaagctggggaaaagcttattgacccgccttcttcactcgatgaacttctctctttcctttgacaaaactttcntaaccctggccggaagtttaacaatcacctccccgactcaattgcanaatgccactcactcccantgannga

SEQ ID NO: 13518 - DNA, 59 bp, Arabidopsis thaliana
  unsure at all n locations
  Clone ID: LIB25-026-Q1-E1-B9
tacaanttggtttaagaattcacgttgatccctgagattgttnacacattcagctatnt

SEQ ID NO: 13519 - DNA, 492 bp, Arabidopsis thaliana
  unsure at all n locations
  Clone ID: LIB25-026-Q1-E1-C10
ngaatggtctncctggtgtntacggcccggatatcccggantcgacccacgcgtccgcccaagcgtccgcccacgcgtccggttgtggagccgtataacagtgttctctcgactcattctcttctcgancacacagatgttgttgttcttttggacaatgaagccatatacgatatctgcaggggatctttanacattganaggcctanatactccaatttgaaccgcttgatctcncaanncatctcttcgcttacaacttctctaagatttgacggtgccatcaatgtggacatcaccgngttccagaccaaccttgtaccttaccctcggatccatttcatgctctcctcttatgcacctgtgatttcatctgcannggcctaccatgagcagttttcggtccctgagatnacgantttcgtctttggaccctcnnatatgatggntaaatgtgaccctaggnatggnangtaatggcttgcngtttga

SEQ ID NO: 13520 - DNA, 538 bp, Arabidopsis thaliana
  unsure at all n locations
  Clone ID: LIB25-026-Q1-E1-C11
ggngnnnngnnggagtggtctgcctggntctaccggcccgganatcccggaatcgacccacgcgtccgcttnagtctctcttcagttcctgaccaacacctttatctccaaacctcagggtttctgcaacggaattgtgtcagcaccaagacccagaagcaatttattaagagacagacaaaatggtgtacganccatcaaagttgcgtctattgagacacaacctttccctctgtttcaatctcctgcttccgaagaatcttcctcgtccgagctggagacagcagatccggatttctacaaaattggctatgttcgaagtgtgagagcttatggagttgagtttaaagaaggtccagatggttttggtgtctatgcttctaaggatatcgaacctcgccgtcgagctagagtgattanggnagattccnccttggaactgatgatanncattagacagaagcaccttggntgttttccccngatantggtccaaattgggccatccctaattttcgntanccattaactcgnncng

SEQ ID NO: 13521 - DNA, 514 bp, Arabidopsis thaliana
  unsure at all n locations
  Clone ID: LIB25-026-Q1-E1-C3
nnnnaactgtntcgctctgcccgtgntcgtccgnaaattcagnaggtcnncccacncgtccgggagttgaanccacacaaagaacagaaaataagaaagataataaaaggaggcaaacacgaagagctcacaacaagattcaagattcaagattcatgctttcagatttcaactaatcangtaaangaccactttacctgcaaaatgacgagatcgtgggtgcttttgtttgttcttatgttcattgtgttgacttctcagtttgagtggaatgaacaagttgagaatgaaagtgagactagtagtcgtcctctgattctttcagataaagagcaacaacatatccctcaaggcaaagaatctgtacaagtaaagaaaattctatttcaagaaaagaaaattcagaagttaaacgagctggtcccgagatctaaggangcagttgctacaatgcagaaatgaaaatcangttgagtttacngagctagaaaccgagcttgatnaacctgctggg

SEQ ID NO: 13522 - DNA, 446 bp, Arabidopsis thaliana
  unsure at all n locations
  Clone ID: LIB25-026-Q1-E1-C4
aactcatccaaccgaagatgcgtgagattcttcacatccagggtggtcaatgcggtaaccagatcggcgccaagttctgggaagtggtttgcgccgagcacggcatcgatccanccggnnggtanaccggagactcagatctgcaacttgagcgcatcaacgtttactacaatgaagcgagttgcggtagattcgttcctcgtgcagtgctcatggatttggagcctgggactatggatagtctcagatctggaccgtacggtcagacctttcgacctgataacttcgtctttggccaatccggtgctggtaacaactgggccaagggacactacacggaaggagctgaactaatcgattccgttctcgatgttgttcgtaaggaagctganaactgtgaactgtctcaaggggtccaagtttgtcactcgtttgggaagaaggaa

SEQ ID NO: 13523 - DNA, 514 bp, Arabidopsis thaliana
  unsure at all n locations
  Clone ID: LIB25-026-Q1-E1-C5
nggnngtnnangnttctgtccngccctgnncgtancganccgtgtattcccgcggtcgccccacgcgtccgagaatacacgactccttgaaaggctccctgaacttgtctgcagacgtggctcgtattttcagaaaaatccatctacagacaagctaacaatcatccctgagcttgattggaaatatttctgtgacgagtggggagggctcatggagaatggaatatctgcttttattgaggttggcaatacagaccaaagttcatccccagacgtcattgaccttgagaaggattcttctccggatgataatatggacgttgatgctcaacagcttattctcagggcatccccagagatttgcgaggaatgcataggagagagagaaagctgtgagttgatgcagaaacttagttactctgagggagatgtatttgtctgttttgtgcgtggaaaggaagctccaaaagcaatgttagaggcatctgactctagcttttgaggtggatcggct

SEQ ID NO: 13524 - DNA, 509 bp, Arabidopsis thaliana
  unsure at all n locations
  Clone ID: LIB25-026-Q1-E1-C6
gatgatntttcncncccnggtngnncgantacnagtantcgcgccgtggccccacgcgtaacggcaaacaacaaatttcatagagaagcanaaatggcgaaatcactcctttgttcatcaaccttaaaccctttcttctccaccactctctcctcttcgaagaagaaccaaattgcatactngggngggcagcaagaaccanacatcgtcgtctctgttatggaaaagaagggaactgtcgcttggatttatgancagcttagttgcgattggtctcgtgagtaatgacagaagaagacacgacgcgaatgcagcgattcttgaagctgatgacgatgaanagcttctcganaaagtgaagcaaggatcggaaaaagaggattgacagacatgctgtncntaattctgctgtcaangaaaaggggtatttgcaggatcttgtttncaggttgagcaaggtangacatgccattgagancaatgatcnccactcangtttggttttgggg

SEQ ID NO: 13525 - DNA, 517 bp, Arabidopsis thaliana
  unsure at all n locations
  Clone ID: LIB25-026-Q1-E1-C7
nggnggggnngtnnatgttngtccgcctgcanggancgaatccgcnattcgcgggtngccccacgcgtccgctnttaagaccaaatctctctctacctctatctctctctccgccattaccagagctcaacgagctctcactttctttacgcacacttgttggaacgaaatatattcatagngaagangaatctcgaaactcttgaatctaaaacaactcggagactctgttttccctttccggagatcagatcggatcaagatgcagacaaccaacggctcagattcgacgttggcaacttccggagccacaccgccgaatcaacaaacccctcctccacctcagcagtggcagcagcagcaacagcaacagcaacagtggatggctgccatgcaatatccaccaagcggcggcgatgatgatgatgcagcagcaacagatgctgatgtatcctcatcaatatgttccgtataatcaaggnccttatcagcagcatcatcctcaagcttcaacaat

SEQ ID NO: 13526 - DNA, 515 bp, Arabidopsis thaliana
  unsure at all n locations
  Clone ID: LIB25-026-Q1-E1-D12
ggnnggnnngaatgtctnctgggtctncgccccggatatcccgaacgacccacgngnccgcccaagcgtccgcccacgcgtccggtcaaggtttgtgattttggtctctcgcgattgaaggccagcacgtttctttcctcgaagtcagcagctggnacccccgagtggatggcaccagangtccngngagatgagccgtctaatgaaaagtcagatgtgtacagcttcggggtcatcttgtgggagcttgctacattgcaacaaccatggggtaacttaaatccggctcaggttgtanctgcggttggtttcaagtgtaaacggctggagatcccgcgtaatctgaatcctcaggttgcagccataatcgagggttgttgggccaatgagccatgggaagcgtccatcatttgcaactntaatggncttgctaagaccattgntnanatcagcggttcctccggccancgctcggatttgtaanataccccggtcattcaaagtttgttnttatt

SEQ ID NO: 13527 - DNA, 436 bp, Arabidopsis thaliana
  unsure at all n locations
  Clone ID: LIB25-026-Q1-E1-D3
tccaacagagatctcttcatggctccaattactgtcggcgatgttgtaccagacggaactatctctttcttcgatgaaaatgatcagcttcagaccgtctctgttcactctatcgccgccggtaaaaaagtcattctctttggtgttcctggtgctttcactcccacatgcagcatgagccatgtgcctggattcattgggaaagcagaggagctgaagtcaaagggtatcgatgagatcatttgctttagtgtgaatgatccatttgtgatgaaggcatggggaaagacataccaagagaacaagcatgtgaagtttgtancagatgggtctggagaatacacacatcttcttgggactttgagcttgatttcaaaggacaanggtccntgggaataagtcaaaggagaatttgctcctgttgccttgataacct

SEQ ID NO: 13528 - DNA, 126 bp, Arabidopsis thaliana
  unsure at all n locations
  Clone ID: LIB25-026-Q1-E1-D5
aangnggaaaaaaaaaaaaaaaaaaaaaaaaaaaaaaaaaaaaaaaaaaaaaaaaaaaaaaaaaaaaaaaaaaaaaaaaaanaaaaaaaaaaaaaaaaaaaaaaaaaaaaaaaaaaaaangggggg

SEQ ID NO: 13529 - DNA, 444 bp, Arabidopsis thaliana
  Clone ID: LIB25-026-Q1-E1-E1
aacaatggcgacatggacaccaagctctctccagctcagaattgccctaaatcacggtatcttcaaagctccggagagagcgaagatgaccaagctcagtcgtcgtctccgtatatcatgcgtcgcgcagaacgcagagccaggtcgcgattcgggtgagagtaacgggtcggatcgttttcgtgggtgggctgattcgggagacgatgagaacaattctcgcggtggcgattggtttaaaggaaccttgttatctggagttgctggaatggttttgttcgttgggctaacttacgcagctttatcttccaaacgcaatgtcttaagaccaaaagtagaagtgatggtgaccacagttactaaaagttcaattgatcaaatcagcacggatgagaatgaagggaatattgtgactagtcaagataacaaggaaagctatagaaa

SEQ ID NO: 13530 - DNA, 541 bp, Arabidopsis thaliana
  unsure at all n locations
  Clone ID: LIB25-026-Q1-E1-E11
ggggnnnngnnggaantggtcttcctggtgtntaccggccccggatatcccggtatcgacccacgngncccgctttaaatctcncttgattccaatccattcttcttcaagtgccgggttctcgggtcggatcttctaagtctagctagggataatggctactgtcactactcatgcctcggcctcgattttccgnggttgtanttcaaagccaagattcctcaccggttcttccggtaggttgaaccgcgacttgtcgtttacatcgatcggttcatcggccaaaacgtcgtcgttcanggttgatgctaagaaaggagaatggttgcccggtttggcatcgcctgattatctcaccggcagtcttgccggtgacaatgggtttgacccgttgggtctagcagaggattcngngaacttgaaatggttcctccaggccagagctggttcancggncgnatgggctatgctccgtgttncttgggatgctttttgcccggaagtttccccanggattgggnatcnnnaaatgtttcctgtg

SEQ ID NO: 13531 - DNA, 381 bp, Arabidopsis thaliana
  unsure at all n locations
  Clone ID: LIB25-026-Q1-E1-E12
nnggantggtctcctggttctancggccccggatatcccggaacgacccacgngtccggttcnatcatcttgtatttcatttcaaccactcattgtttttagtttgttttacgaagaatcaactatggcgacgangagaagcgttggaactttgaaggaagcggatctgaagggaaagagtgtgttcgtgagggttgatctcancgttcctttggatgataactctaacatcaccgatgacaccaggattcgtgccgctgttcccaccatcangtacttgatgggtaatggntctagggtttgttctctgcagtcacttgggccgcccaaaaggngttncccctaagttcagnttnaangcctcctgtggccaggnttgnc

SEQ ID NO: 13532 - DNA, 514 bp, Arabidopsis thaliana
  unsure at all n locations
  Clone ID: LIB25-026-Q1-E1-B8
gggggnggattttcntgtttnnctgcccgtaccgacaccgaaaattcgngcgtcgncccacgcgtncggtcaaggattctgattgataacgatattcaagttcagcaatctcattgcagtagaaaatggaatcgaatcatcctcacttcaagctaattttgggatcttcttcgattgctcgacgtnngatactaacagatatgggataccaattcactctcatgagtgctgatattgatgagaaaagcatccgcaaggagaaacctgaagagttggttttggctttagctgaggcaaaggctgaagcaatcatgcagcggatccctgatggtgaaaacatagaggaggataagtcgaccttacttattacttgtgaccaagtggttgtctatgaagatgctgttagagagaaaccctcgagtgtcgaagaagcaagggagtacataagangctattccaaggggcatacagcaacagtgagttctgttggctgtgacaaatctcaaaacaggna

SEQ ID NO: 13533 - DNA, 334 bp, Arabidopsis thaliana
  unsure at all n locations
  Clone ID: LIB25-025-Q1-E1-H8
ggtgttgaanccgccnagaagaagaacgccnagaacaagaancttatcttcaaaagagccgangcaatactccaanganatatgccnagaaggagaangagttgatctcgttgaaacgcgaggccaancttaaaggaggtttctatgttgaccctgaagctaaactcttgttcatcatccgtatccgtgggatcaatgccattgaccctaagactaagaagattctccagctccttgcgtttgagacagattttcaaagggtgttttccttaaagtcaacaaggntaccatgaacatgcttcnccgtgtttgnagcccnanntcacttacgggg

SEQ ID NO: 13534 - DNA, 511 bp, Arabidopsis thaliana
  unsure at all n locations
  Clone ID: LIB25-026-Q1-E1-A1
nnnnnnngnaactggtctgcctngcncgtancgcgtccganaatcccgggtcgccccacgcgtccgctntgggaaagatggcagtcaaaaactgaaacacgacaaattcactaagtttatgaaagatctaactgaagagatgctgaggctggagtttgcacattatgactataaacgaagaggaagtatatcggccaaagattttgcattgtcgatggttgcagcggctgatgcaagccatttgagcaagctgcttgatagagttgagagtctgagcgaacacccgcatctccgggacatgcgtatctcactgaaggaattcaaacagtttgatgagctacgtagtaaacttggaccattctctctaacgctttttgcttatggcaaagctaatgggttacttacaatgaaagattcaaacgaaccgcctctcaagtatgtggaataacantgtcagacaatgtgatagaaantgcgtttcaagtgttgacccaaacaagatgggaaattt

SEQ ID NO: 13535 - DNA, 551 bp, Arabidopsis thaliana
  unsure at all n locations
  Clone ID: LIB25-026-Q1-E1-A11
nnnnggggnnnnnnnggaagtggtctgcctggggtntanggnccgganatcccgantcgacccacgngtccgaaaaaaaaacgaaagcgttagatattttttatcaatcgtgctccgtaatcattacctttcttcttcatcttcatcttcacgcagcgacttctttgattctctctttttattctcagctccaatttnaacctgcatttctctcttctcaattttgggtttctttttttgatatctcatttgatcagatcgacgaagagaggaagaaggtttgagctgagagatctttggaggtagaaagaagatctcaaaaacgatgtcgtttacaggaactcagcagaaatgcagggcgtgcgagaagacagtgtacctgtggagcttctctcagctgatggaatcccctatcacaaaggcttgcttcaaatggctctcactggnaaaangcagacttnaaactggagcaatttatccctcaantgggaagggattgggggtaattgtngggccccaattttgggcaanctttttcaagggggtccggg

SEQ ID NO: 13536 - DNA, 438 bp, Arabidopsis thaliana
  unsure at all n locations
  Clone ID: LIB25-026-Q1-E1-A2
gctcgcatagctgaatcagcaaaacatgaccgtaatgcaattctgcgagcaagatgttgtgaatatgcattgttaacacttgaacattggcctgatgctccagaaattcaacgatcagttgatttatatgaagatctgattagatgctgtgttgcagatgctatgagtgaggtgcgggcaactgctagaatgtgctacagaatgtttgcaaaaacttggccggatcgttctcgccggttgttttcgtcctttgaccctgtcattcaaaggctaataaatgaagaagatggtggaattcataggagacacgcctcaccatctgtccgtgagagacattcccagccttcattttctcagacgtctgctccttctaacctacctggctatggaacatcagctatantcgctatggatagaagttcaaantttatcatccng

SEQ ID NO: 13537 - DNA, 505 bp, Arabidopsis thaliana
  unsure at all n locations
  Clone ID: LIB25-026-Q1-E1-A3
aactgtcnagctcnntctgntcgganacnctctgtgggtcgccccncccgtccgagaagagcaagcagcggcgcagaagttgaacacaagtgaagctcacaatggcgaggattaaggttcacgaattgagggagaagtcgaagagcgatcttcaaaaccagctgaaggaactcaangctgagctcgctctcctccgtgtcgctaaagtcaccggaggtgctccaaacaagctctctaaaatcaaggtcgtgcgtaaatccatagctcaggttttgacagtgtcttctcagaagcagaagtctgctctaagagaagcatacaagaacaagaagttgcttcctcttgatctccgtcccaagaagacccgtgctattcgtagacgcctcaccaaacaccaagcctcgttgaagacagagcgtgagaagaagaaggagatgtatttcccaataangaagtacgctatcaaagtttaaagttttagctgctanaaacactgtttcaagct

SEQ ID NO: 13538 - DNA, 445 bp, Arabidopsis thaliana
  unsure at all n locations
  Clone ID: LIB25-026-Q1-E1-A4
aaagtcagcagttgattctaggacggcgacttgacttgacacctgaaaaatccttaccgtgtttgatagtttttcgaaaacccttcaaattgtttcattttttttaagtcttgagactttaaaaaatcctcgcttgctcttgttttaggtctcctgacaaggaaaaatttggaaacttgtgggagttgattgataagagttgttaagatggcaaatgatgcggctgcatgtgcagaaagggctacaaatgatatgctgattggtccagattgggctattaacattgaattgtgtgatcttatcaacatggatcctagtcaagcaaaagaagctgtgaaggtgctcaagaagcggttaggaagtaaaaactctaaagtccagattcctgcactttatgcattgggaaacttaaagtaaagaattgtggcgaaaacgtgtacaanct

SEQ ID NO: 13539 - DNA, 433 bp, Arabidopsis thaliana
  unsure at all n locations
  Clone ID: LIB25-026-Q1-E1-A6
gatcgtcttcttcaactaacaaaatccaactaatcatcatctgtctctctggctctggcttgtgtctgagctcgaacttaaagaaaaagaatctcaccatgtctttagctcngagcagttatccatctctgtattcttcgccttcactgccaagaacccagcaaaccaagcaaaaccctagtttgatcactcaatccagtttcatttccgccaaaagtctcttcctttcgagcaattcggcttctttatgcaatacccatgttgccaaacgccggaatttagctttgaaggcgtcggagacagagtcttcagctaaagctgaagcaggaggagacggagaagaagaagagaagtatgaaacatatgaaattgaaagtggagcagccttatggtttgaaattcangaaaggaagagatggtggcacttacattg

SEQ ID NO: 13540 - DNA, 111 bp, Arabidopsis thaliana
  unsure at all n locations
  Clone ID: LIB25-026-Q1-E1-A8
ganncccatttcaagatttcatcctccggagtgtttcaacgaagcttgggtacataaggtctgatatganaggtttcgtcatagcttgtcttctanggtangtttcctcac

SEQ ID NO: 13541 - DNA, 441 bp, Arabidopsis thaliana
  unsure at all n locations
  Clone ID: LIB25-026-Q1-E1-B1
gctcaaacaaagaaaacgattacaaaagagaagaggtatcaaaaagaagaccagaatcttttaacattttgaaacaaatggcgtccaaagccatcttcttcttctttgtctctgccgtgtgcctgtcctctctcgccggtgtggccatcgctgatgccgatgactttgaccgtttccaaattcagggatcggtttattgtgacacatgccgtgtccaattcgttacccgtctcagcaagttccttgaaggcgcgaaagtgaagctagaatgcaggagcagaacaaacggaaccgtaacattgacaaaagaagccgtaacggacaaaacaggggagctacagaatggaaattancggtgancatgaaggangaaattttgccaagcntgtgctcgtccaatcaccagacagtngttgcantgacgttancaaagangcttac

SEQ ID NO: 13542 - DNA, 534 bp, Arabidopsis thaliana
  unsure at all n locations
  Clone ID: LIB25-026-Q1-E1-B11
gnnngnnngaatgtcnncctgggtntaccggcccggacatcccggatcgacccacgcgtccgcgatttcagcaaaatcaaatcggattcagtgatcaaaagtcaatttggtcgagaagaaattgagcgttgaagatgacggaggcgatgataagaaataagccaggaatggcgagtgtgaaggatatgccgctgcttcaggatggtccgccaccgggtgggttcgcaccggtccgatatgcccgccggatatccaatacgggtcctagtgcaatggccatgttccttgccgtttctggtgcctttgcttggggaatgtaccaggtcggccagggaaacaaaatccgcagggcattgaaggaagagaaatatgctgctcgtaaacaatacttcccattcttcaagcagaagaagatgaaaggtttgtgtctgaattggaaaaagtntcctggaatatgangctggatgttantgaaangatnttccggggatggaaantttggccaaaatgttttcaantccnggnncnccggna

SEQ ID NO: 13543 - DNA, 434 bp, Arabidopsis thaliana
  Clone ID: LIB25-026-Q1-E1-B3
gatttttatttttctctctcaaagtttttcttgggagagcaacaatggcgatgaggaagcttttatcgaagaaactcttcaatatcacgaatgttgcttcacagagtcttatgaattgtcgcatttcgtcttcttcgttagccgtacgaaccagagttccgaatgattcaacagatacaaccaaaatcgcaccggagcctggagatttggcgatgtcgcgaaggttcatgcataacagtgctatgattaggccggcggagattatgcagatgccggtgggagagagtttgattgagaaactccgtgagattgatggaagcaaggatcggattcgattagacggactttctccgccggagaaggagacgagtttgacggtggcggatacgaagaaactgcttagagcggggcaaatcgagattgtgaatccaaac

SEQ ID NO: 13544 - DNA, 508 bp, Arabidopsis thaliana
  unsure at all n locations
  Clone ID: LIB25-026-Q1-E1-B5
gngnagtaatgtcttntcncncgtgnncgtaccanaccgnggttcgcnggtcgccccacgcgnccggaaaatatcacagcaaaaattttctcgagaaaatccgaagaagacaaaaaaaatggcggatcagctaaccgatgaccagatctccgagttcaaggaagcttttagcctattcgacanagacggagatggttgtatcaccacaaaggagcttgggactgtgatgagatcacttgggcagaacccgacagaagccgagctccaggacatgatcaacgaagtggatgcagacgggaacgggacaatagatttcccagagttcctgaacctaatggcacgtaagatgaaagacactgattcagaggaagagcttaaggaagccttcagggtttttgacaaggaccagaacggtttcatctcggcggctgagcttcgtcacgtgatgacaaatcttggggagaagttgacggatgangaatcgatgagatgatccgagangctgact

SEQ ID NO: 13545 - DNA, 421 bp, Arabidopsis thaliana
  unsure at all n locations
  Clone ID: LIB25-026-Q1-E1-B6
gggnggggangnttttgtcngccctgnatcggaccgaanccgtgcattcgcgcggtcgccccacgcgtncgatacaatgcaacgaatgttgatgaaagcaagccagatccaaaacttgagtgcttcaaaaactgttccataagttgtggcaaacaaaaccaaccttgttacgaagtttgtttgacgaaatgtggtctcccaaaacgtccttctacatcaacaccatcatcttcctccaccacggcgtaataagtttccatttgtgtgaaattgtgtgtcttttggtttatacgaagttttaatcttaatattgatgtgccaacaatgccgtgcccaggcttataagggcttaagacgaagttgaattttggagtctttccaatataatttttatttaaataaaaaaaaaaaaaaagggcgg

SEQ ID NO: 13546 - DNA, 508 bp, Arabidopsis thaliana
  unsure at all n locations
  Clone ID: LIB25-026-Q1-E1-B7
ggggnngnaatgtttnttcnccntgcncggancaatccnccattcgcgggtcgccccacgcgtccgctatattctccacctcaaaggaccatttctcatggcttctgttccggtgagacctctacctcttcttcgccggaacatcacctcgacgacggcttcgaaatcatctccaatgctcgccaacgnttcgagccggcattctctcgggatctctacgtatgatgaatttttgaagcaaataaaaactccggcaactgtgaaccaccggcggcgagtaagtacggtggtggcgtcggcgggaaacttgacggcgccgtcgtgggattcgtggaagcctgataagacggcggcggctacggctcttttgctgagtgacgtcatatggcctgctgctggagcgtttgcggcaatggcattattgggaagaatggatnaaatgctatctccgaaaggatttcaatgtcagttgcaccacttggcgcantctcccgccattcttttcatc

SEQ ID NO: 13547 - DNA, 492 bp, Arabidopsis thaliana
  unsure at all n locations
  Clone ID: LIB25-025-Q1-E1-H6
ntcntgcnngaccgngtcgacaataattcccgggncgccccacgcgtcnaaaaaagaaagaagaaataagtaaataaaaattcctcctttttctggncattgcttgtctaatgccaattcctaaattgggttctcttcatggntgattcntctctcattccagngggcatgggagctcagaagaatatccacgctggnngagccaanattgatgttaatgtggacttcactcacaaactttgtacttcnttaatgtttcctgctttcaaggacactagcaatcctctttctctagtgattggcancctctgtatcaaacatccaaatttgtttggaggaagcgagaagcttgatgtatcatgggataaaggattgtatgattccaatgtacttgtggcttttangagacctagacctgaatggcgtccacaacagtgtttcttcatacagcattctctctcaaccgagataaggggtccacggnaacccaat

SEQ ID NO: 13548 - DNA, 72 bp, Arabidopsis thaliana
  unsure at all n locations
  Clone ID: LIB25-025-Q1-E1-E3
tccatagctaangccgtcgatttcgacgacgcnggatccagcgacgaagaaagtaatgacngatgcagtggt

SEQ ID NO: 13549 - DNA, 537 bp, Arabidopsis thaliana
  unsure at all n locations
  Clone ID: LIB25-025-Q1-E1-E7
ggttaaaagcaattncnncgcgnntctaccggtanngnttcccgggcngccccacgcgtccnaaaaaagaggagaatgaagaaaccatgacactaacagctgaacaacaaaaggaaatcaaagaaggaatcttgaaatgggaaaccattattactcggatcacaaacacaatggtatcgngcacatcaacctctgcttcttccagtgaagagtctagtgttgggaaagaaagtgagacttccgctaaaggtgaaagtgagacttccgctaagaatgaaagtaagacttccgctaaaggcgaaagtgagacttccgctaaaggtgagagtaagacttccgctaaaggagaaagtgagacttccgctaaaagggtgaaagtganactttccgctaaaggttgaaaagttgagacttccntcctttnaaaaaactgccgaaagcctaggtcnagaagcanncagtttaacnagttgaccacaaagtngganggnagatacggtcaaanagatgttttcgnacatttccataaattgaanc

SEQ ID NO: 13550 - DNA, 516 bp, Arabidopsis thaliana
  unsure at all n locations
  Clone ID: LIB25-025-Q1-E1-E8
ggntgnngnaantgtcnttcggnacccgtaccggtannaaatcccgggccgacccacgcgtcnagttgagagtacctcaaacaaaaaaaaattgaaaaccaaattagggtttttaatttccagattgttttgtttatttgaataaatctccgcaagtttcaattaggttgcaaaaanngangaaattttcttcgattcaaaaaaaatgggaaaattttgttgcttcacttccgcttctgangttgtgggaggacaatcatcatcacgatcaggtaaaggaagaagtgatgaanggatgatcaagtatggttttagtctagtgaaaggaaaagctaaccatccaatggaagattatcatgttgctaactttatcaacatccaagaccatgaattggggtctttttgcnatttangatggtcatatgggtgatangtgtccctgcgtacttgcagnaaacgtcgcntcgncaagnatccnttaacggagggaaaatttttggggttggatcctccnag

SEQ ID NO: 13551 - DNA, 441 bp, Arabidopsis thaliana
  unsure at all n locations
  Clone ID: LIB25-025-Q1-E1-F1
aaaaatcaaaaaaaaaaatcaagaacaaatcgaaatctcaactctgtgaaaacctcgtccttgttcttcttctgcttctcccattccttcgatttttgcttcaatggatgtttgatttgctctctgactgcgtttggtgagcaacaatttactatactatggaccctgagagtatcatggctgctgatgggactgattctgctcctgcaaatggtggtttagcaatggaaaatgtatgtgttaaagaaaatggggctgtttctgtcgaaaccgtggacactacttcagaaagtcagaatgagaattcggcaaacagtttcaactttggatacaattgacaactnnaagggaggaanttgaggnacacaagttnaacatgtngatgaatcaaaatgtatgnaaagggaaaaaactcaaacggaagcaangnatgagaaacta

SEQ ID NO: 13552 - DNA, 452 bp, Arabidopsis thaliana
  unsure at all n locations
  Clone ID: LIB25-025-Q1-E1-F11
attttaacttttttaagcacagagtgctgatgatcggtgaagccttattttagaaagcaactgaggacgaaccttatccgtcacagtggcaatggaggacaaatcaccgacgttanngatttctgaagatttatcccggaaaataatctctcttgccgccggtgaagctcatacaatcgctctgaccggcgatggatgtgtttactcatggggaagaggaatgtttggccgtctcggtacgggtaaggagtcggacgagcttgttccagttctagtcgagttcccaaatcaagcggaaggagatcggattcgaatcgttggtgttgctgctggtgcttaccacagtctcgctgtctcaagtgggttcctcctattcatatgtctaaattccnctttccnattaacntgtgttgccgaatttaccataatganttaatttgagaaantggtgg

SEQ ID NO: 13553 - DNA, 505 bp, Arabidopsis thaliana
  unsure at all n locations
  Clone ID: LIB25-025-Q1-E1-F7
nggntnnnagcaattttcnccgcgnncgtaccggtaagatattcccgggnngccccacgcgtccncgataatggcgactcagatctgaagataatctcttcttcatttctggtgggcaaaatctaaagcttttcgaattcggagctagagaatttaaaggaatccaatggatgatttcacaggattgttagcgagagacttcggattgaaacctcagggaaaatcagctcccatggcgtctcaatcgaactcttctgccgctgatttcaacactttcgcttcttcttatagcttcgccaccgccgccggtaaaaagtccgattctttgccggtgtttgacgatcctggtcgagatggtgatgatcttctcttcaaagatgtgtttagtggaccaccaccaccaaagtacggatcttcttctgggtgattcacgttctccatctgctcctggcttttgactatgatgcaatgtcaanggaaccaaatcaaatcacgtcgtcaatgg

SEQ ID NO: 13554 - DNA, 168 bp, Arabidopsis thaliana
  unsure at all n locations
  Clone ID: LIB25-025-Q1-E1-F8
ggnatcacttacgaccgtcaaaacatcgttnaatggctcgaaaaggncccttcttgtcccgtcacgaagcaanctcttcccttagacnccgatcttacacctaaccacatgcttcgccgtcttatccaacactggtgcgtcgangaacgagacacgtggngttgtcag

SEQ ID NO: 13555 - DNA, 428 bp, Arabidopsis thaliana
  unsure at all n locations
  Clone ID: LIB25-025-Q1-E1-F9
cgtgttcgtggagcggaggacaacgtagttggtttccgcgtgctgtacgagacagataacttctacagagagaaacaaagatcgagacannggagaaacccttaaaggatttgaacggagaagacgaggaaaaacaaagacacaactctaacctttagagagagaaaaacaaatgtcgttccgtagcatagttcgtgatgtgagagatagtataggaagtctatcgaggcgtagtttcgactttaagttaagcagcttgaacaaagaaggtggtaaatcccgtggttcggttcaagattctcatgaggaacaacttgtagtaacgattcaagaaacaccgtgggcgaatctacctcccagagttantacgtgatgtgatnaaaagacttgagagaatgnaagtgtgtggcctgcncgtaacatgtttg

SEQ ID NO: 13556 - DNA, 444 bp, Arabidopsis thaliana
  Clone ID: LIB25-025-Q1-E1-G11
gaacatgcgatcggagaagccaccggaaaacgaaagaaacgcggcagagttgaagaagcagaagaatactgtaacgatggaatcgaagaacaagtagaggatgagaagcttccgttagaggttgggatgttctattacccaatgactccgccttcgttcattgtttccgatgctctggagccagattttcctttgatctatgtcaacagagtcttcgaagtcttcactggctatcgtgccgatgaagttcttggtcgtaactgtcgattcctacagtacagagatcctcgagctcaaaggcgtcacccattggttgatcctgtggttgtatctgagattaggagatgtcttgaagaaggtattgaattccaaggagagcttcttaatttcagaaaagatggtactcctttggttaacagactacggcttgctccaatacgtgac

SEQ ID NO: 13557 - DNA, 440 bp, Arabidopsis thaliana
  unsure at all n locations
  Clone ID: LIB25-025-Q1-E1-G12
ccctctctccccacttgcccactcctcgtcctcgatcgagagactcgcgacggttccggttcttctgctagaccgttgctccagtccggtttaatccagaaccagttgttctgccatggtggaaggaagaagaagaagaagattctcgctctcctctcaacagctagctctcctcttacttttactctccttcttcctctgcttctccgtcgcgtctcctcgagctatatctgattcggatctactggatgaaacagtcgccaactcctcctcttccgtcgcatctctcaacgcttcttcttcttcttctcttgttaagcctaaggaaggtagcttcgccgacatcatcgatcgtgctcttgaaaaagagttcaatgaaagcgaccaagaatgaagtggctgattctggaaacntcaataacagtgtanctggacaacaa

SEQ ID NO: 13558 - DNA, 221 bp, Arabidopsis thaliana
  unsure at all n locations
  Clone ID: LIB25-025-Q1-E1-G3
tgcganatacancctttatagtatacagctttctctccgcgcatcttcaanatatatccatgtgccattgcaattttctcgaganagtgacggacaatggctccgcanctgcaaanttgagattcggantctcccttctttcgtcactctcattcattctcgcctgtatcaggcgtacacgcggtgttancanctgttgcttatatttgaaccatggggca

SEQ ID NO: 13559 - DNA, 315 bp, Arabidopsis thaliana
  unsure at all n locations
  Clone ID: LIB25-025-Q1-E1-G4
atgtctccgcgaaaccttggaanaattttccgagactgggntcnatccgggnangaaactcctcnttcnanaaatncccacaaacgcgggactgcctccaatggccntgtttcncaatattttactacaaaaccntttgcttgtgatccctcaagcttgccaatatacccacctagcaaggagatagatacaaagcatcgggacgaagcagcaaggaaaaaaattancgggaatgggagacgtggtatagattcgaggaagccatcaaggaaaggccattcattcaataaattggcaccagatgtgcnggcacaa

SEQ ID NO: 13560 - DNA, 185 bp, Arabidopsis thaliana
  unsure at all n locations
  Clone ID: LIB25-025-Q1-E1-G6
gacngttacgctttnccngggaangnaaaatgggtcngtcttcgggaacattgatggctttaagttgaacggangaggagccttcgacggtgaaggcaatgcagcttggagagtcaataactgtcacaagactttcgagtgcaagaaacttcccatcagtntaangtttgacttcatattgaact

SEQ ID NO: 13561 - DNA, 454 bp, Arabidopsis thaliana
  unsure at all n locations
  Clone ID: LIB25-025-Q1-E1-G9
gctcaaagtccctcccttttccggcgtcgctattctcagtctcattctgtctcccccatggaagctcggattttgcagtcttcttcttcctgttattcgtctctttacgctgtcaatcgatnccggttctcttctgtgtcatctccgaaacctttctccgtcagctttgctcagacgacgagaacaaggactcgtgtattatccatgtcgaagaaagatggtcgcactgataaagatgatgacactgatagtctcaattacaaagattctggtgttgatatcgatgctggtgctgagcttgttaaacgaatcgcaaagatggctcctggaattggtggatttggtggtctctttccattangtgatagttatcttgtagctggtacggatggtgtagggactaaattgaaattggnaatttgaaactggaattcatgacaccaattggaatcga

SEQ ID NO: 13562 - DNA, 450 bp, Arabidopsis thaliana
  unsure at all n locations
  Clone ID: LIB25-025-Q1-E1-H11
aacaatggcgacacaaggcgcttggctacgaatgacctcatcagccaagtccatgaccaagtcaaccgtgacttcaaaggagcttggattcctcacctcccagctcagcggcttangaatctcatatactcccagtgacgtcatcaaccgtatctcccttccttcgttccccgggattcagccaatcgtcgcacgtagaatctgcccttttactgggaagaaagcaaacagagcaaacaaagtttcattctctaaccacaagaccaagaagttgcaattcgtcaacttacaatacaagagagtttggtgggaagctggcaaacgttttgtcaaacttcgtttatcaactaaggntttgaagaccattgagaagaacggactcgacgctgttgccaagaaagccngcattgatcttcgcaagaaatagatatgatgattgcaaagtttatt

SEQ ID NO: 13563 - DNA, 325 bp, Arabidopsis thaliana
  unsure at all n locations
  Clone ID: LIB25-025-Q1-E1-H4
taactcggcttgcctccatanactcnttcgattcacnatggnnacagtttctagaancgggagaatcngttctaatgntatcagcagtgaanaagctacagaaaatcacaagtnagaangtgcagctaatactcaccaacaaaccangactgntatacgttgacccatcaaagcttgtagtaaaagggaatattatctggtctgataactccaacgacctcaacgttcaagtctcaagtccttcccatttcaagatttgcacacccgaaagaaagttttatcgtttgaagatgcnaagcaaagagctttgcagtggaaaaangca

SEQ ID NO: 13564 - DNA, 441 bp, Arabidopsis thaliana
  unsure at all n locations
  Clone ID: LIB25-025-Q1-E1-E2
tttttcaacaatcgcttttttttttctcgatctccgtgaagctctcgaatctctggttttgagttttggagaatggtgtttttccgcagcgtatcggcctttactaggctgaggtctcgcgtcggccaacaatcttcactcagcaattctgtcagatggattcagatgcagagctctaccgacctggacctgaagtcgcagctgcaagagttaattccggaacagcaggaccgtctgaagaaactgaagtcagaacatgggaaggtccaactgggaaacatcactgttgatatggttattggtggaatgagagggatgactgggattgctttgggaaacctcattgcttganccggaagaaggtattccctttangggaatgtcgattccctgaatgccaaaaaagtatanctactggccantctggaactgaancantac

SEQ ID NO: 13565 - DNA, 388 bp, Arabidopsis thaliana
  unsure at all n locations
  Clone ID: LIB25-024-Q1-E1-D10
tnggatctgttaaaacagtttgctttggattatcagtatttatgttgttgtgagtctcttaaactactcgaatacaatctttcagcttcataatatcagatcttttgagcttaagngaaaaaagaaaaaaaaaaaaaanaaaaaaaaagggcggccgctctagaggatcnaagcttacntacgcgtgcatgcnacgtcananctcttctatagtgtcacctaaattcaattcactggccgtcgttttacaacgtcgtgactgggaaaaccctggcnttacccaacttaatcgccttgcagcacatccccctttcgccaactggngtaatancgaacangcccgcaccgttggcccttcccaacagttgcgcatcctgaatggcnaatg

SEQ ID NO: 13566 - DNA, 510 bp, Arabidopsis thaliana
  unsure at all n locations
  Clone ID: LIB25-024-Q1-E1-D12
ggggngantgtctctggcacactggttntgatagnccgganagcccnggtcgnccgatgcatccggttaagntncctgnnacgcattcnctctatttcattttctttctctaaagtttttanttctntgacaaggaaggatatccctttaggtggattcttgtttaaatttaaanatnctcaaggagaagaagaagaagaagaagatagtcaaatganantacattcttctgatcattcanggcttttactagccgttctcgtgattctcctctccttctctggagctctctcaagcgatnacaaagagaagaagacgaaatcggtcgataaaaagaaagaagtaacttatgatggaacgtctttgatcatcaatggaaatagagaactcctttactctggctccatacattaccctcgtagcactcctgaaatgtggccaaacatcatcaagagaacgaaacaangnggtttgaacacgattcaaacatacgttttttggaacgttcaa

SEQ ID NO: 13567 - DNA, 465 bp, Arabidopsis thaliana
  unsure at all n locations
  Clone ID: LIB25-024-Q1-E1-D4
ggcggcaacaacaacaacaacaacatcttcttcgatctccttctccaccaaaccatctccttcctcctccaaatcaccattaccaatctccagattctccctcccattctccctaaaccccaacaaatcatcctcctcctcccgccgccgcggtatcaaatccagctctccctcctccatctccgccgtgctcaacacaaccaccaatgtcacaaccactccctctccaaccaaacctaccaaacccgaaacattcatctcccgattcgctccagatcaaccccgcaaaggcgctgatatcctcgtcgaagctttanaacgtcaaggcgtagaaaccgtattcggcttaccctggaggtgcatcaatgggagattcaccaagccttaacccgctcttcctcaatccgtaacgtccttcctcgtcacgaacaaggaggtgtattcgcaacaaaaggatacgctcgg

SEQ ID NO: 13568 - DNA, 460 bp, Arabidopsis thaliana
  unsure at all n locations
  Clone ID: LIB25-024-Q1-E1-D6
atctcctcctgcaagccgggatagtaggcaacccccaattattgtgcttgtggtatgtcctactcgggaacttgccagtcaagctgcggcagaggcaaataccttactgaagtatcacccctctattggtgttcaagttgtgattggaggcacaaagcttcctacagagcaaaggcgtatgcaaacgaatccttgccagatccttgtggctacacctggaaggctcaaagaccatattgaaaacacttctggattcgcaacaagattgatgggtgtgaaagtccttgtgcttgacgaaagctgatcatctcttggacatgggtttccgaagggacattgagaagataaatgcccgctgttcccaaacagagacaaacatttttaatttccgccaccgtacctgaagaggttactggtcacnttccaagtacnaaaggctcccaatttttggggttgggaa

SEQ ID NO: 13569 - DNA, 452 bp, Arabidopsis thaliana
  unsure at all n locations
  Clone ID: LIB25-024-Q1-E1-D7
aaaacaaaaaatattaagaaagtaatattatgacttgcagccaaacactcggaaacaacaacaccaacaaataccagatctgcgaggagatcggccgtggccgtttcggcaccgtctctcgcgtctacgctccggccaccggtgatttcttcgcttgcaaaaccatcgacaaagcctctctctccgacgaccttgaccgtgcctgtctcgacaacgagcctaagctcatggctctcttgtcctatcaccctaacatcgttcaaatccatgatctcatccgacactgattcgactctctccatcttcatggagctcgtccatccctctgtttcgatntacgaacgtctcgtctcttctggaaacctcctttgagcctcagacggngtcgttcgntaaacagattctccaagcgcttcgcaatgtcacggatacggcgtcgtcaaagggatatt

SEQ ID NO: 13570 - DNA, 426 bp, Arabidopsis thaliana
  unsure at all n locations
  Clone ID: LIB25-024-Q1-E1-D8
ccaaaatgagaattcttttgttctttcttcatttgatttaatacctttcttcatctacttgtcaatatcactgactctttcacttttacaggtcccaggatcttcaaagagaggaacaaaaagaaaatcagatttcagtttttttttttttcatttctaacataacattccttggtccgatttattctttttttcaagatcatgaanactancagcgaagaacagatgataanactgtttggaattcctctttcngataaacccagatggcaacaanttcncatctgttcttctggtttcttcnttggtnacctcggnnactgggntctgcgaaggaatatgttgtacanacgggcttanaggcaggttatgggatggnatntcacggttntgcncaaaggattgggngnacattgccttgattna

SEQ ID NO: 13571 - DNA, 430 bp, Arabidopsis thaliana
  Clone ID: LIB25-024-Q1-E1-E1
atttccttcctctgcttcttctccggtggatgtcctctttcatcaatggcggcgaggataaacacttcgcttcataacgccctctcttttttaaagccttttaacactcccctcaataccaaaccattctcttttagaagaaacagcttcagattttccaaaaagcttccttattattctcagttttcctcagggaagagagctctctattgcacttccagttcccaggaaagtaccgtcgatgaaggcgagacatttgtcctcaccactcctctttattacgttaatgcccctccccacatgggtagtgcttacaccactatcgccgccgattcaattgctcgtttccaagagactgcttggtaagaaggttatctttatcacaggaacagatgaacatggtgagaagatagctacttcagcagctgct

SEQ ID NO: 13572 - DNA, 554 bp, Arabidopsis thaliana
  unsure at all n locations
  Clone ID: LIB25-024-Q1-E1-E2
ngnnnnnggngnntngnngnagtgtntgcctggcttgtaccggnccganattcccggatcgncccacgcgtccgctgtctgtctctctcctctaatcttttttatccgctagggttttgaagcaaggtttctcgcgattttctcgatatctctcgcccatggcgaaaccaagtcgtggccgtcgttccccctccgtgtctggctcgtcatctcgttccagttccagatctcgttcgggttcgagcccctccaggtctatttcccgctcacgctcccgttctagatcgctctcttcatcttcatctccttcgcgaagcgtcagttctgggagtcgcagtcctccacgtcgtggaaaaagtcctgctgggacctgctangcgaggtcgctctcctcctcctccaccatctaaagggagcatcttcaccttccaaagaaagctgtncaaagaatctcttgttctccaatggttggattctccttaacanggaaatgtgaatgaaagnccatctcaaangaaaatccttgggaaactttgggtgaagttnntacaatg

SEQ ID NO: 13573 - DNA, 464 bp, Arabidopsis thaliana
  unsure at all n locations
  Clone ID: LIB25-024-Q1-E1-E3
ttttgcagagattttaggaggaacatgattgtttgaattgggagagacattggttcgtgtaaaatgcgggtgcttggtttgagctcaagcttatgctctggtgaggataaggaagaagaagagattaatggagaaggctctctcacgcctgtttatctcaacgtctatgatctaactcctgtcaacaattatctctattggttcggccttggcatatttcactctggcattgaggctcatggtttcgaatatggatatggagctcatgagtattcgagcagtggggtatttgaggttgaacctangagctgtccaaggtttcatctttaggcgctcagttttgttgggaaccaccagcatgtctcgctctgatttccgctccttcaagganaagctttccgagaaagtatcatgggggacacataccattttgaattgccaaaaaactgttaccatttcactng

SEQ ID NO: 13574 - DNA, 438 bp, Arabidopsis thaliana
  unsure at all n locations
  Clone ID: LIB25-024-Q1-E1-E5
atatggctttattagtctgttttagtatagatgatcacacagtgaacacatgttggttaaattcttgtgatatatgtgccatagatattccttgtaacaatctgtcgatactttgcctgttgattgcagactgtgattcctccactcctgctgaaactagtgcaccgttcatatacgaacagccaaaacccaggcatgagaggggaagccctagtcaggacacggcgtggctgagatcggtgtgctcagataacccgcataatcagctgaaaaggtcagcgagcgtagctgatgcattccacagagagangcaagttgaaatatgtgcagtggagatggagttgggaaaggggttcaccaaangaacctcgtttcnaagaactaganagcaattgtgagaatgaaacaagcagangcaagaatgttccaagggcgggc

SEQ ID NO: 13575 - DNA, 447 bp, Arabidopsis thaliana
  unsure at all n locations
  Clone ID: LIB25-024-Q1-E1-E6
gtttagactcaagtctgatgtaagtgttcatgtttgtgtatgtatattgtttttgtcggaaaataattaaattggtgatataattcatatgtatgataattttaaagattgcaagcataagaagtaggattagagatgaggagagattattagggagcgatctatcgctagcaatgatgacgacgactgtcagatcggaaaagcagcaatcggacggtggaggaaatcgagtggtgggaatggcagcatcatcaggattctctcctcaaccttccccttaccgcattccctcgcaccttccacttctcctcgtccctgattcatcatcatcaacatcaactatcatcacaatcancatctgagctaatggtaaacaaagttatgccttnaatgaattttgagntaatcccgaactaattttnggnctcngttaaaccataanatgtg

SEQ ID NO: 13576 - DNA, 448 bp, Arabidopsis thaliana
  unsure at all n locations
  Clone ID: LIB25-024-Q1-E1-E7
aatatttctctttttgtttctttctccttttctctgttttttcttttcttttctctttgcgattcgctgagagcatgcctgaatgtcaagagaaagggagagatttgaagagatagggaagaagatcaaaagagaagcagatgcttggcctcatcaaatggctggaattagaagaccaatgtcgggtcctcccggaaccctcaataccattacgccttgtgctgcctgcaagcttttgcgccgtagatgtgctcaagaatgtcccttttcgccatatttctccccacacgagcctcataagttcgcttccgtccacaaaagtcttggagctagtaacgtctccaagatgctaatggaagtacctgagagccaagagagcagatgccgcgaaaaacccttgtgtatgaagcaaacgtgangctaagagatccggtgtacggatgcatgg

SEQ ID NO: 13577 - DNA, 53 bp, Arabidopsis thaliana
  unsure at all n locations
  Clone ID: LIB25-024-Q1-E1-E9
caggccacctaaggagacgatnctgctcgatggttgcgatttcgcgcacnggc

SEQ ID NO: 13578 - DNA, 539 bp, Arabidopsis thaliana
  unsure at all n locations
  Clone ID: LIB25-024-Q1-E1-F1
ngnnnnnnggnnnnnnnnggaantgtttgcctggctngtaccgggcccggnattcccggatcgncccacgcgtccgcccacgcgtccgaaaatggttcatgtgtcatcatctcatggagccaaagatggctctgaagaagcctatgattacagaggaaacccaccagataagtctaaaaccggtggatggttaggcgccggtttaattttagggagcgagctatcagagagaatatgcgtgatgggcatatcaatgaatctagtgacgtaccttgttggagatttacacatctcatcagctaaatcagcgaccatagtcaccaacttcatgggaactcttaaccttctaggggcttctcggtggttttttggctgacgctaaactcggtcgctacaagatggttgcaatctcagcttctgtcacagctctgggaatgttgcttttgacggtggctacaactatctcaaagcatgagaccancaatatgtgacgatttcangagacttcatcatcagttcatagaaacaaacggncacag

SEQ ID NO: 13579 - DNA, 524 bp, Arabidopsis thaliana
  unsure at all n locations
  Clone ID: LIB25-024-Q1-E1-D1
nnntgnnnggaactgtttcgcctgnttgtaccggcccgaanattcccggaatcgccccacgcgtccggganaatttcaaacaaagtttcaaactttgctcaccaacttttatttatttattttggtggtagaaaacagactttgatggctttgtaggaatactagatgtgtagatctaaagattataaccattttctgtgttcttgttctttcagaacataacttcatgtctttttgtctctctgttcactagctctctgtttccatggactccacactatcttcttcttacagatttatttcatacacatacactgatacacatgtgtgtatacgtatgtgtttatgtgtgcttattanactctttttggattcaagaaactaatctttaagtatttttgacattctggtagatttatgctcacttcttangccttgttgacttttacagtgatggattttgaaactcctggttgatttgatttcnttttggttgatgcantgaggagaagaaatgtccgatt

SEQ ID NO: 13580 - DNA, 420 bp, Arabidopsis thaliana
  unsure at all n locations
  Clone ID: LIB25-024-Q1-E1-B12
aaattaaatggaggaaaaagctaaactttcttaatcacagatgcagattgattctccatttttctcgggagaaaagttcctcnccggagatggggcatatgatgaaagaaggaaggtctcttgcagagacgccgacttactctgttgcttcggttgttactgttttggtctttgtttgctttctcgttgaacgcgccatttacagatttggaaagtggttaaagaagactagaagaaaggcactttttacttcacttgagaaaatgaaagaggagttgatgttgctgggacttatatcacttctgttgtcacaaagcgcgagatggatttcagaaatctgtgttaactcttccctttcaatagtaaattctacatttgctctgaagaggactatggaatccataagaaagttcttctgga

SEQ ID NO: 13581 - DNA, 507 bp, Arabidopsis thaliana
  unsure at all n locations
  Clone ID: LIB25-024-Q1-E1-B2
gtttccctgntctacggccganatcccggancgnccacgcgtccggtcaagaagtgagccatttgatgccctgagtgatatagaactgaaagaaagagaggaaggtgaaactttatatgcagaactagtatcaagaactagcgacattgctgtttcnaanaagctttgtgaggaccctcacgacattgattgtcatgtacatgacatccatgtagtgactgatgaagataacaaggggcaactgaatgttccctcngaccatgccactcnggatctgaaactggacagatnacaangtgtttcacnatacaagttatgcatttccacaaagggaaaagttacatgtctaccaataatgccanagaaaattcaaatgtcaanccattggcctatgnaaagaccnggaaaatnnaagagtggaaatttggtttccngaaaangtcnggtttaaaaanctgtnccaaaaggggaaaaanagaaaattcanttttttcccccaaaagatnt

SEQ ID NO: 13582 - DNA, 467 bp, Arabidopsis thaliana
  unsure at all n locations
  Clone ID: LIB25-024-Q1-E1-B4
acttccttcctctccgatctccgttcacatctctctctcatctttatcttcttctttttttgccttgtgggttgaaagtttctatattttctctttctcttctgtttacataanccattttcagctcaagcagctgaagaataacgatcaagaaccaaaaaagaagaaaacgaatctgttcttagctttgatgggttcttgcttcagttctcgagtcaaagcagacatcttccacaatggtaagagcagcgatctttatggtctaagtctctcaagtcggaaatcgtcntcgactgtagcggcggctcanaagacggaaggggagatattgaagttcgacccctgtcaaaagcttcacctttaacgaactcaaaactcgccacaaagaaacttcagaccagatagtgtgatngggngaaaggtgggctttgggttgtgtcnttaaaaggctgggtagatgaagccaa

SEQ ID NO: 13583 - DNA, 508 bp, Arabidopsis thaliana
  unsure at all n locations
  Clone ID: LIB25-024-Q1-E1-B5
tcaatgnnnngcctgncccgtanaggtccgatnantcccgggtcgccccacgngtccgtganaatttcgaattcaagagcattgctttaaacaatttgtctgatcttaaaccggaaatgctagacattagacccggtttagaatcagtggcggttaactcggtcttcgagcttcntcgcctcttagctcatcccggttccatcgataagtttttatcgacaatcaaatcaatccgaccggatataatgactgtggtcgagcaagaagcaaaccataacggtaccgtatttctcgatcggttcacggaatcgctacattactattcgagcttattcgactcgctcgagggcccgccaagccaagaccgagtgatgtcgganttattccnangacggcagatactaaaccttgtggcatgcgangganaagaccgggttananaggcatggagacttaaatcagtggagaaaacggtcggtttagganganttaaccggttangnancgg

SEQ ID NO: 13584 - DNA, 451 bp, Arabidopsis thaliana
  unsure at all n locations
  Clone ID: LIB25-024-Q1-E1-B6
cttgatctcgaaccaaccgtcattgacgaagtaagaaccggcacttacagacagcttttccatcccgagcaacttatctctggcaaagaagatgcagccaataactttgctagaggccattacactgttggaagggaaattgttgacacctgccttgaaaggctgaggaaattggcagacaattgcacagggttacaaggatttttggtattcaatgctgttgggggtggaacaggttctggtttgggttctttactgttggagcgcttgtccgtagattttggaaaaaaatcaaaactcggtttcancatctaaccttctcctcangtttctacagcagttgtggagccgtatnacagtgttctctccgactcattctcttctcgaacacacagatgttgttgttcctttggacaatgaagncatatacgatatctgcaggagatcttng

SEQ ID NO: 13585 - DNA, 440 bp, Arabidopsis thaliana
  unsure at all n locations
  Clone ID: LIB25-024-Q1-E1-B7
gcgtttcaccagtggtggttggactttgatttttccttgtagcatacttacaacagatgacatcggtggtctcaatgttggagatgggtttgtacagagtaaagcnatgttcaacatcctcattgcttctttcttcgaaaagcttgtaccgagatctggatccacgagttctagaagactcccttgttcttgcaagacatatgcccagtcaagaaggtaaataaactcttcttttggtctgtaatttgtgttgctctttccgctaacaatctctaaacagactacaccgaagctataaacatcctgctttgtctgttaagtaanctctcattgcatactcngganccatgtaacctctgcatcaatgaantattaagtcgggaagtgttaaccantcanaaggnnagggggncccnanngnccggnntnagcgcnngnnt

SEQ ID NO: 13586 - DNA, 424 bp, Arabidopsis thaliana
  unsure at all n locations
  Clone ID: LIB25-024-Q1-E1-C1
acgataatgggaagcgcaccagctcagattccgactagcttcggccatgagcttagggcttgtcttcgttgccgactcgtcaagacctatgaccagtttagagacgctggttgcgagaattgtcctttcttcaagatggaagaggatcatgagcgtatcgtggaggtcactacccctaatttcaatggtataatctctgtgatggatccaagtagaagctgggcggctaggtggttaagaatcgggaagtttgctcctggttgctacacacttgctgtctcagagccactccctgaggaaatgcagcacttatgccaagangagcgtgtacaatatgttctgccgaaacgcatgtgaagaaatctatcacgatgaaggctantagggaagaccaaagtattccactttttcaataaaaagcntc

SEQ ID NO: 13587 - DNA, 446 bp, Arabidopsis thaliana
  unsure at all n locations
  Clone ID: LIB25-024-Q1-E1-C10
gccagatccagatattttcctggctgctgcaaagatcttaggtgtgcctaccagcgagtgtgttgttattgaanatgcgcttgctggagtccangccgcacaagctgcgaacatgatatgtatanccgtaaaaactactttatctgaagcaattcttaaggatgctggtccttctatgatatgacacgatattggnaacatctcaatcantgncattctcantggtggctcagattctaccagaaattccacagcaatgcttgaagagaacacnntcagcgataaaaccagcgctaacgggtttcagggctctcgacgagatatactgangtangggagtcntggcattgctctttcttgtgtcnacttcgncgtcaccaactggtncgcaatgcattatgcttcnccgaaagctttgtggaatgcattggttggaacanntnccc

SEQ ID NO: 13588 - DNA, 370 bp, Arabidopsis thaliana
  unsure at all n locations
  Clone ID: LIB25-024-Q1-E1-C3
atttatcattagacaatgaaagtgtgatgttctgtcctgtgaagcttgtattaccacattgtaactaaatgttttatcttcattatcagtttaatttagccacaaacccgagaacaagganagcgagtcgaggataaattaaactgataatgagactcgaacatagacagaggcaatggtgatacgaagtggatcaaagacactaacaatttctactcacattattgtacctcaatcatttatcattagacaatgaaagtgtgatgttctgtcctgtgaagcttgtattaccacattgtaactaaatgttttatcttcattcatccaatcccgtaacgtaattgaacgccaaaananannnngngcgnng

SEQ ID NO: 13589 - DNA, 462 bp, Arabidopsis thaliana
  unsure at all n locations
  Clone ID: LIB25-024-Q1-E1-C4
agagagagaacacagacgataccaactttcttcaatctcgttgccgcagtataattatctcattcctcggatatatctctccttctgcggcggcgacaagaagctacagggaataaggaagtctgttttctctcttttcaagaaaccacttacttcgaaaatggctcgttctatctctaacgttaagatcgtatctgctttcgtctctcgtgaactctccaatgctatcttccgacgtngttatgcgggcacggcggcgcaagggancgtttcnagccggtggaanaagtggagcctgttgctccggctgtgaatgaagaanaaaggaantggnagaatcaaccaagaaaatttcttggggttcaagattccaaaaacgggttattacaagacccgaaaccggttccacgngattgacccggttgagctacgagcactctcttgaaaacaagncattgattg

SEQ ID NO: 13590 - DNA, 455 bp, Arabidopsis thaliana
  unsure at all n locations
  Clone ID: LIB25-024-Q1-E1-C5
gatnattagttcaaaataacaaaaacagaagaaaattaaaatctaaacacctgaaaaaaaaaatgaaatatctgtcagtgtttctatttttttatggcctatgcataattggtaatgtntatggacgagcaaacaagctccatatctggaacgatcttgatcccaatcagaagcactcagacctctttgtgcagtgtaaatctggaaaggccgacatgggaaaacattatgtcaagtatggaaaaatatatcaatttgatattagggataatttttggaagacgacacttttttggtgtacctttagacatgggcctgattataggactggccaacaatttgatgtgtatgaatatnaaccgggtgtggctcaaggaggcacatatgantggacagctagagaagatggnatatattttangttaaatcaaggtacgatncanaaaagtcatnat

SEQ ID NO: 13591 - DNA, 468 bp, Arabidopsis thaliana
  unsure at all n locations
  Clone ID: LIB25-024-Q1-E1-C6
gctcattccgacgaaaacagatacactcgagtgaagaaagtatgaaatttaactttaacgagacagaggatgcaccagattcacgacgatctccgacgcccaaagagccggttaggtgggttcctctccagagccacccggttttcgcttctcttccttcctcccaagatgaacccgccgtgtcgcagctgtttccgagaaatttcatggcttgggacggagactcgcgcgtatactactgggattcgagacgatatctccttcancgattatctctgcgcttgggtgaacctgaaccatcctccgtcctcgccgcagtcccgtccaaggtgatgcaaccagaccttcaggtgacattttctgttagcaaaatctccatcaataagtctgggattaagcngtacttcttgcccggctcaagatggggatangttgtgattgtacccaanttgggacgttgcttccgng

SEQ ID NO: 13592 - DNA, 451 bp, Arabidopsis thaliana
  unsure at all n locations
  Clone ID: LIB25-024-Q1-E1-C7
gattatgagctcattgttggggatcatgggaaacgattattggcgtttggtaaatatgcaggcagagctggtcttgttgacttcttacacggacttggacagcgatatctaagtctaggatactcaacacctttcctctcgctcggtgcatcgtatatgtattcctcattggctgctgcaaaagccgctgtaatttctgttggtgaagaaattgcaagccagggactgccattaggaatctgccctcttgtatttgtcttcaccggaacaggaaatgtttctctgggggcgcaagaaattttcaagcttcttcctcacacttttgttgaaccaagcaaacttcctgaactatttgttaaaagacaaaggaattaagtcaaaatgggatttcaacaaagcgagtctatcaagtatatggttgtattattaccaancaagacatggntgaaca

SEQ ID NO: 13593 - DNA, 393 bp, Arabidopsis thaliana
  unsure at all n locations
  Clone ID: LIB25-024-Q1-E1-C8
cattccgtgcaccctgctgcagagtatcatgcctctgctagggccatcagtggtgggcctctctatgtcagtgattctcctggaaagcacaactttgagcttctagggaaagnttgtattgcctgatggatcgattcttcgtgctcgactccctggtagaccaactcgcgattgtttgttcgctgatcctgcccgtgatggtgtcagcttgctaaagatatggancatgaanaagtncactggagttcttggcgtgtataactgccaaggagcagcttggaccagcacagagagacncgagattttccaccaggactannngctgagngccnacgtgggctccanttcggtgggtccgtgatgctgcattcnactatcgnggacgncttccnc

SEQ ID NO: 13594 - DNA, 59 bp, Arabidopsis thaliana
  unsure at all n locations
  Clone ID: LIB25-024-Q1-E1-C9
ggaaatattggantcaatacaatggtggttcaaggtngcacctactgtgacatttgcaa

SEQ ID NO: 13595 - DNA, 404 bp, Arabidopsis thaliana
  unsure at all n locations
  Clone ID: LIB25-024-Q1-E1-B11
cccnacatntcgggnaatcccaggncnccncatgaaatcntctggagatcagtgttttgtctctgtccnttatggtnggcaccatggnatcctaaactagtggaatccgccgtgttatgttgtgttcccgttgttatcgccgatgggattcaattaccgttctcggagacngtacaatggccggaaatctcactaacggtggcngagaaagacgtgaggaatctacnaaaggttttggaacacgtggcggntactaatttgtctgcaatacantgaaacttacatgaaccggtgtttanaccgggccctcttgtacaatgtgccgattaaaagaatgagacccacgtggcatattctcgaatcttgtggangaagctctatgatnggtcntacaanaaagtcaa

SEQ ID NO: 13596 - DNA, 505 bp, Arabidopsis thaliana
  unsure at all n locations
  Clone ID: LIB25-023-Q1-E1-G4
gnnnnnnnnacgtttctcgcnccacggtccgaaaaccgggtcncnccacgccgtccggaaaaagagagcattatcaattattaacaattacacaagacagcgagattgtaaaagattaagagaagagagattggaaggagaaggcagaggctttggccacgacggcaccgttagctccggtcaccagtcagcgaaaagtacggaacgatttggaggaaacattaccaaaaccatacatggcaagagcattagcagctccagatacagagcatccgaatggaacagaaggtcacgatagcaaaggaatgagtgttatgcaacaacatgttgctttcttcgaccaaaacgacgatggaatcgtctatccttgggagacttataanggatttcgtgaccttgggttcaanccaatttcctcnancctttggaccntactcataaacntaacgttcaactacgttacacnttcnaanttgggttgccatcacaattatgccnggttana

SEQ ID NO: 13597 - DNA, 428 bp, Arabidopsis thaliana
  Clone ID: LIB25-023-Q1-E1-G9
gcttgctcaagacaaacccagaaattgttaaaagatggagcaatgaagttcaagaaggtattcaatccagatcagcccttgttcagttccatgccctagctttgctccatcagatacgccaaaatgatcgcttggctgttagcaaattggttggtagcttgaccaggggatctgtccgctctcccttggctcagtgtcttttgatacgttacaccagccaggttatccgtgacatggccaaccacggtcaatctggagaacgtccgttctatgaatttttggagagttgcctgcgccataaggcagaaatggtgatccttgaggctgccagggcaattactgagcttgatggtgtgacaagccgagaactgactccagcaatcactgttcttcagctccttttgagttcccccaaaccaatgttgaga

SEQ ID NO: 13598 - DNA, 436 bp, Arabidopsis thaliana
  unsure at all n locations
  Clone ID: LIB25-023-Q1-E1-H1
gaagaagcaaagaattagactactctgcaacaatggctatttattctgtccataacggcgacaagaaacattggtggttcactcacaagaagattgttgataagtacattaaggacgcaagatctttaatggagagtgaggagcaaaacgacgttgcttcagccattcatttactagacgcggctttatcaatatccccgcgttcggaaactgcgttagaacttaaagccagatctttgctctttctacgtcgcttcaaagatgtagttgatatgcttcaagattatatcccaagcctcaagcttgccgtgaacgangaagatggatcttaatcatacgaaagggtcttcctactcntcctccctccttctcagctctcccgggaaacttctctccggactcatctcctcgccgtgactcaaccntcaaatgnntt

SEQ ID NO: 13599 - DNA, 429 bp, Arabidopsis thaliana
  unsure at all n locations
  Clone ID: LIB25-023-Q1-E1-H11
gctttccttccgccatttttttctttctaggttgcagagttaaaggagaaggttttcaattagggttttgtagagagaaagatgagccgaagtttgggaataccggtgaagcttcttcacgaggcctcaggtcatatcgtgacggtggagctaaagagcggcgagctttacagaggaagtatgattgagtgtgaggataactggaactgtcagctcgaggatattacttataccgccaaggatggtaaggtatcacagcttgagcatgtcttcattcgaggcagtaaagtcaggtttatggtcataccagacattctcaaacatgctccaatgttcaagcggttagatgctagaatcaagggaaagagctcatcactgggtgttggcagaagtagangtgcaatgcnaaggaaaccggctgccnggccc

SEQ ID NO: 13600 - DNA, 443 bp, Arabidopsis thaliana
  unsure at all n locations
  Clone ID: LIB25-023-Q1-E1-H12
ttaataaagaaaatgatgaaaatgagtatcggaacaacaacttccggcgacggtgaaatggagctccgacctggaggaatggttgtacagaaaaggacggatcatagctcaagcgtgccacgtggcattcgggttcgggtcaaatacgggtcggtccatcacgagatcagtatcaactctcaatctactttcggtaaacgacacaaaacattccgagttatacagtatttcctttatactattagtatgctctgtttttggaatttgattgttgttgttgttgaatttaacaacaggggaattaaagaagatattgtctggtgcgacaggagttcatcatcaagacatgcagattatatacaaagacaaagaaagagactcaaagatgtttcctgatctttccnggtgtcaaaagatcgttccaaaacttatcctaaanaaga

SEQ ID NO: 13601 - DNA, 442 bp, Arabidopsis thaliana
  unsure at all n locations
  Clone ID: LIB25-023-Q1-E1-H3
cttcctctcttctttcctcctccttggtcaactctcttttcgattaaagttgcaaactttcattagttgtcttaggctcttgtgaatttctctatctaggtgggtttagtttgaggaggaggaatcaagggagaggttttggaaaaggtgttaagtgttcagtgaaagtgcagcagcaacaacaacctcctccagcatggcctgggagagctgtccctgaggcgcctcgtcaatcttgggatggaccaaaacccatctctatcgttggatctactggttctattggcactcagacattggatattgtggctgagaatcctgacaaattcagagttgtggctctagctgctggttccaatgttactctacttgctgatcaggtaaggagaattaagcctgcattgggttgctgttaaaaacgagtcactgattaatgancnta

SEQ ID NO: 13602 - DNA, 405 bp, Arabidopsis thaliana
  unsure at all n locations
  Clone ID: LIB25-023-Q1-E1-H6
ctgctactgaaagtgaaatgatcgtagatgatgcggaacctcagtatgaaactgtatatagtcactgtgcagatgctgtggagaacagagagctggaaaagagttgtgaggttgatgagcagaaggagcagatgcaagccaccaattctatctcagtatctgagaacttttcacgtgaaaaattgaattcatctcctgcaaggggtactccaaattgcaactcagtatgccgaatttctaccgcagaaagtgaaaatgctatgcagaacaacagttattacagcaccaatgttcagtatggtgagaacantcattaatgttgacactgtcaaagaagaaacaangttgaacagnacactcaggtgaaaaantgtaattccgatgtcaatgcactgttgatccttt

SEQ ID NO: 13603 - DNA, 421 bp, Arabidopsis thaliana
  Clone ID: LIB25-023-Q1-E1-H7
ttctcaaaaaccaaaatcacaatcgaagaaatcttttgaaagcaaaatggaagagatttcgacggatccggttgttccagcggtgaaacctgacccgagaacatcttcagttggtgaaggtgctaatcgtcatgaaaatgacgacggaggaagcggcggttctgagattggagcaccggatctggataaagacttgctttgtccgatttgtatgcagattattaaagatgctttcctcacggcttgtggtcatagtttctgctatatgtgtatcatcacacatcttaggaacaagagtgattgtccctgttgtagccaacacctcaccaataatcagctttaccctaatttcttgctcgataagctattgaagaaaacttcagctcggcatgtgtcaaaaactgatcgccctgggttaatt

SEQ ID NO: 13604 - DNA, 486 bp, Arabidopsis thaliana
  unsure at all n locations
  Clone ID: LIB25-023-Q1-E1-H8
tttggcgnncgtaccggtccacaattcccgggnccncccacgcgtccggnaagatgcaaagattgattggggttggagctgagttgaagctgaaaagagctcacgcgattttcgatcgtgtttgctctaagtgcatagcttctaagagagatgagatcagccaagggattgattcttcttcttctaaagatttgttgatgtcttctataaatgttgacacgactaagtacaagttgttgaatccaagtgatgacagattccttagagacacaatcttgtccttcatgttagctggtagagacacaacaggctcagcgctcacttggttcttctggcttctatgcaataaccaagaagccatgaccaagattcgtcaagaaatcaacacaaatctatttccaagaaacaagaccgacgacggttctgttcctaagattccgantcattcaatccccaagaggtaaagaaattgggtanttacaccgg

SEQ ID NO: 13605 - DNA, 447 bp, Arabidopsis thaliana
  unsure at all n locations
  Clone ID: LIB25-024-Q1-E1-A1
ctttttatattcctctgatattttctctcagtttgatctcatttgctctgcaatggcgactaccatgaatgctgctgtttctctcacatcttcaaactcttcttcttttcccgctacaagttgtgccattgctcctgaaaggatcaggtttactaagggtgctttttactacaaaagcaacaatgtagtgacaggtaaaagagtgttttccataaaagcacaaatcacaacagaaacagatactcctactcctgcaaagaaagtagagaaagtgtcaaagaagaacgaggaaggtgtgattgttaacaggtacagaccaaaaagagccttacactgggaaaatgccttctcaacaccaaaatcacagctgatgatgctcctggagaaacctggcacatggttttcaaccatcaaggaggaaatccccgtncagagaangncaatctg

SEQ ID NO: 13606 - DNA, 64 bp, Arabidopsis thaliana
  unsure at all n locations
  Clone ID: LIB25-024-Q1-E1-A11
nagagagtgagaccggtgaaganggccctatggncacggagtcagacatccaacacattgtgtc

SEQ ID NO: 13607 - DNA, 505 bp, Arabidopsis thaliana
  unsure at all n locations
  Clone ID: LIB25-024-Q1-E1-A5
nnnngnntgcnngccgtaaaggtccgaaatcccngggnccaccaancntcttaaaagggntgttactcntggtgttggggctcaaggaattgaactcagtgaaacagtgcgtaggatggaagagtctattccccaagttgttgttcttcttgaagctgcagttgaaaggtgtattggctttactggagggtcagaggcagacgagctgatacttgcattagatgacataatgttgcagtatatctctatgcttcaagaaacactcaaatctttgagagttgtgtgtggagtggatggtacaggtgatggagttggctcaaagaaagatgcaagtgcagagaaaagggagagctctcgcaagatggatttgacttcaaatgaggaatggtccattgttcaaggagcacttcaaattcttactgtagctgattgtctcacgaagcaagtcttctgtctttgaagcctctttgagagcaactctaactagactaaactccaancttgt

SEQ ID NO: 13608 - DNA, 455 bp, Arabidopsis thaliana
  unsure at all n locations
  Clone ID: LIB25-024-Q1-E1-A6
agaagaagaagaagaagaactgaagaagcatattcgacggtcaccaccaaacctcttccgtcggattttcactctccgtttatcgaacatctgagatctctctccacttccgtcnccgaagatgcattccagtcatcttcttctcgaggagccgatcaggatggcttcaatcctcgagccttccaaatctagtttcttcccggcattgactaagatcgtcggaactctaggtcctaaatcccgatccgtcgaggctctctccggctgtctcaaagccggcatgtctgtggctcgatttgatttctcgtggggagatgctgattatcaccaaggagacacttgataattttgaaagttgctgtgaggagcactaagaagctttgtgctgttatgcttgatactgttgggcctggagctacaagttattaacaaatctgagaaagctattactttgg

SEQ ID NO: 13609 - DNA, 443 bp, Arabidopsis thaliana
  unsure at all n locations
  Clone ID: LIB25-024-Q1-E1-A7
ggtggagatatgatgacattacttatgaggaangacacacttactgaagatgaggcaagattttatgttggggaaactgtcttagctatcgagtccattcataagcacaattatatccacagagatatcaagcctgataatctgctactcgacagaagcggtcacatgaagttatccgattttggattatgtnagccattagattgtagtattctccaggaaaaagatttcgtatttgcacacaaccttagtggggctctacaaagtgatggccgccctgtggcaccgagacgtacccgctctcaaatggaacaattacaaaactggcaaganaaatagaangatgcttgcttattctacagttggnactcctgactatattgctccanaagttttgttgaacaaaggatatgggatggnatgtgattggtggtcacttggtg

SEQ ID NO: 13610 - DNA, 51 bp, Arabidopsis thaliana
  unsure at all n locations
  Clone ID: LIB25-024-Q1-E1-B10
catggtccttctggatagctgggattgctgncgtttatatctncgtttttg

SEQ ID NO: 13611 - DNA, 513 bp, Arabidopsis thaliana
  unsure at all n locations
  Clone ID: LIB25-023-Q1-E1-G10
gnngactgtttccctggccnntttngtcngcncatnncggtcgganaatcccgggnngccccacgcgtccgataatgatcacatgcatggaatgcctcgaccatcatcatcatcatcatcatcaccatcatccatgatgaacaatggatccatgaacgaaggaggaggacatcaccacatgaagatgatgatgcacatgaccttcttttggggcaagaacacggaggttctcttctccggttggcccggaacaagctccggcatgtatgctctttgtcttatctttgtcttctttctcgccgtcctcaccgaatggcttgctcattcctctctcctccgtggctccaccggagattcggctaatcgtgccgccgggttaatccaaaccgccgtgtataccctccgtatcggcctcgcctatctagtcatgctcgccgtcatgtcgtttaacgccggtgtgttctcgtcgctctggccggtcatgcccgttgggtttcatgttgttcggaagca

SEQ ID NO: 13612 - DNA, 99 bp, Arabidopsis thaliana
  unsure at all n locations
  Clone ID: LIB25-022-Q1-E1-D7
atcgttcaacataaagagtgtacgaagnttaagtgttgtggcaattgagcntgaagttgttgggtacanaatttcaattgcctaatgnttgcaaaaang

SEQ ID NO: 13613 - DNA, 537 bp, Arabidopsis thaliana
  unsure at all n locations
  Clone ID: LIB25-022-Q1-E1-E2
nngnnnnngggnnnnnnggaantgtntgcctggncctaccggcccgganattcccggatcgacccacgcgtccgattctcaccggagccgcttcaacatttcccatcgtcgctcgagttttgaacgctatgaatcgccgtatgtatgctgctactactctatcatctgccaaatcaatctctgcagaatccctaaatcttcgttccgattccaattcagaggcagcgcatggtgcttctgagtctgagactcgagtctctttaaggaagaagaggataaagcaggatgatttggagcctgtaaagaaatgttccgccagagaaaccaaggcccgcaaggacatgtgtggattacctgatatagaagactctccttataagaagactaatggaactgcttcatctaggacgagaaaactaaactcatacattanatcaacagaagctagncccttctgcatccgtcgattaaaacagcaaggaaaggcgantttatgtgctcataggaacacttcnttcaagtcaggactaaagagca

SEQ ID NO: 13614 - DNA, 116 bp, Arabidopsis thaliana
  unsure at all n locations
  Clone ID: LIB25-022-Q1-E1-E5
nggggggtaagctaancggggaagaaacaaaacggtggtaaagggcggggcaatcaaaccgcaaagcaacaaaccaacgggccttcnaagcggtnctcggacgaacnaaaattctt

SEQ ID NO: 13615 - DNA, 507 bp, Arabidopsis thaliana
  unsure at all n locations
  Clone ID: LIB25-022-Q1-E1-E6
aacgnctcgcctgccctaaaagtccgatattcccgggtngncccacgcatccgctgatttagggttttgccttgttcttgtggcgggaataacaaagacatcgccgatatggggaaagacgaagaggaaatgcgaggtgagatcgaggagcgactaatcaatgaagagtacaagatctggaagaagaacactcctttcctctacgatctcgttattactcacgctctcgagtggccttcacttactgttgaatggcttcctgaccgtgaagaaccttccggtaaagactactccgttcagaagatgattctcggtacccatacctccgagnagcgagcccaattacttgatgctagcccaagttcagcttcctcttgacgataccgagagtgaactcgtcagtacnatgatgancgctctgaatttggtggctttgggctgtgcaactggnaaagggtacaaattatccagccngataaacatgatggtgangttaatccanctccc

SEQ ID NO: 13616 - DNA, 477 bp, Arabidopsis thaliana
  unsure at all n locations
  Clone ID: LIB25-022-Q1-E1-E8
gaaaatgttgatcagtttcatgtgtctgatcagccatgggagatacttggcaatgctcttaacaagacttataaccgtatctctgatttgaggaaagatatatcaaacattacgaaaaatgttttggttgctgagaaagcttcagccaatgcacgagtagagttggaggctgctgagagcaaactttccctagtggaaggtgaacccgttcttggtgagaatccagcgaagatgaagcgtttaaaatcaacaatggagaagacaggggaagccgagttatctcctcgggagtcctaaaagcaaaagaggctccntcttaacaaaactctcccctgaanaccganggttttancggctccttgccggttcccaaangtttccttaaggngtnaccggaaaggaaacggntncccaagaatnncaaccttaaangntgaggatttagtngcaaggnttntaaaaatcccaaaanggggg

SEQ ID NO: 13617 - DNA, 181 bp, Arabidopsis thaliana
  Clone ID: LIB25-022-Q1-E1-F11
agccggcgcgttttccgccttctttcgttcgttatcttatagctaattaaatctaatacaaaggaacaggaaaacgaacgaaagaaggcggaaaaaaatgtcgaaatgtctcgttttgatgtacatatggatcataaaattttacatttttttctatcaaaaaaaaaaaaaaaaagggcgg

SEQ ID NO: 13618 - DNA, 463 bp, Arabidopsis thaliana
  unsure at all n locations
  Clone ID: LIB25-022-Q1-E1-F8
cttcgtctcttctcatcctcctctcaagctccaatggcgagagttctagtctcgtctccatcttcattcttcggttcaccgttgattaaaccgtcgtcatctctccgtcacagtggagtaggaggaggaggaaccgctcaatttcttccataccggagtaataataacaaactcttcactacttcaaccaccgtacgattcagcttaaacgagattcctcctttccatggcttggattcatctgtagacatcggagcgattttcaccagagctgaatctcttctctatacaatagctgacgccgccgttgttggtgctgattcccgtcgtaactactgattcatccgccgtgcaanaagaantggtggttgggtttgggtttatctccgatgctatgggaattggttcctaaagatttttgaanggatgggattatcaagccgggttaaangtaccttaatgg

SEQ ID NO: 13619 - DNA, 439 bp, Arabidopsis thaliana
  Clone ID: LIB25-022-Q1-E1-F9
gaaacgtggaccgtggttgtctcaacagggatgaacttggaggttccatctctggttggattcaggtgttttgagctaatcttcttctgggtttacttctctaccatactttctaccgatttgaagatttgtcttctgtacctttgatgatgattctcagttttgcagcaatgactcagtttttcgccttctagtcattaaactactttcccacaatgagatacttagtgtttttgtaggttctttcacacttgttagcaagggtatatgtatgttgccgttctcagaatttggtaggtatgaatcacagatgtcattgtttattattgataacataagtgattcttgctggtagtgtgacctcttgagggcaggctcatagaagatgaagagcctcttggttttgatgataatgctccctacttctgagttctgaagt

SEQ ID NO: 13620 - DNA, 511 bp, Arabidopsis thaliana
  unsure at all n locations
  Clone ID: LIB25-022-Q1-E1-G12
nnngnnnnttnnnnggcccnntttgccngccgtacggtccganaatcccgggnccacccacgcgtccgcanttttttgtccttccattaaaaacggaataaacagaatgaacggtggtgatgtcaccgtcgccggatccgacgatctgaaatctccgctcttaccggtcgtccataatgatgaaccattcgaacgacaaacggtgggacaacaacttcggacaatattcacgcccaaaaactgttacatcgctcttggtcctcttctttgcgccgtcgtgtgtctatgcgtagatctcgggggagatgaaacgacgacggcgaggaacatgctcggtgttttggtgtggatgttcgcgtggtggttgacggaggccgttccgatgccgatcacctccatgacgccgctcttcctcttccctctctttggtatatcggctgcggatgacgtagcaaattcttacatggatgacgtcatctcccttgtactcggcagcttcatacttgctccc

SEQ ID NO: 13621 - DNA, 520 bp, Arabidopsis thaliana
  unsure at all n locations
  Clone ID: LIB25-022-Q1-E1-G6
naactgtcnccctgncctaaaggtccgatattcccgggtngncccacgcntccgggtaaacattgactttgaaacggagcctattggcaaaggaaagaatggcaaggacgtcttcttaagagatatctggccaaccacggaagaaattgctgaggttgttcaatccagtgttttgcctgacatgttccgagcaacgtacgagtcaatcaccaagggtaaccccatgtggaataagctgtctgttcctgagaataccctctactcatgggatcccaactcaacttacattcacgagcctccatacttcaaggacatgaccatggatcctcctgggtccacacaatgtgaangatgcttactgtttactcaattttggggacagtatcaccactgatcacatctcaacaactggaaaacatccanaaagggncagtcctgctgcaaaagtttctcatggaagcnttggctttgaccgntanggacttcaactncatatgggaantccnccgnngggaaatna

SEQ ID NO: 13622 - DNA, 505 bp, Arabidopsis thaliana
  unsure at all n locations
  Clone ID: LIB25-022-Q1-E1-G7
aatgncngcctggncntaaangtccgnttatcccgggtngacccacgcntccggtnacaacgatcatcaattacttcaccgcacagatgaaaggaaacatcggatggagaatctctctcggattancttgtgtccctgcagtgatgatcatgatcggagctctgatccttnccgacactcccaactctctcatcgaacgtggntacaccgaagaggncaaggaaatgcttcagtccatccgaggaancaatgaagtcgatgaagagtttcaagatctcattgatgcaagtgaggagtccaagcaagtgaaacacccatggaagaacatcatgcttcctcgttacagaccacaattgatcatgacttgcttcattcctttctttcaacaacttaccggaatcaatgtcattaccttctacgccccggttttgttccaaancctcgggttcggtagcaaagcttccctcctatcagctatggtaacgggtatcatcgagctcttgtg

SEQ ID NO: 13623 - DNA, 445 bp, Arabidopsis thaliana
  unsure at all n locations
  Clone ID: LIB25-022-Q1-E1-G8
atccgtctttttctttacttcatgtcgaagcaaacgtacaaagtgtgtttctgctttcgccggaggtttcgttacactgcatcggaggcaccgcgtgagatcaagaccattttcgaaaagtactcagagaatggagttatgaccgttgatcatctccacaggtttctgatcgatgttcagaaacaagataaagccaccagagaagatgcacagtcaattatcaattctgcatcttctcttcttcatcgtaatggtctccatcttgatgctttcttcaagtacctctttggtgataataaccctcctcttgctctccataaggtgcatcatgacatggatgctcctatatcgcattaattcataatcactggtcataattcctatctgactgggaatcanctgaacagtgacngtagtganggtacctattattgatgccntgaaa

SEQ ID NO: 13624 - DNA, 434 bp, Arabidopsis thaliana
  unsure at all n locations
  Clone ID: LIB25-022-Q1-E1-H1
agcggcaaatagacaactaagtgccatgcatcccatttataggcttttgcatcctcatttccgctacaccatggaaatcaacgctcgtgcacgccaaagtcttgtcaacggaggtggaatcattgagacttgtttctggcccgggaagtatgcattagagctaagttcagccgtctatggtaaactatggaggtttgaccaggaaggcttacccgcggatctcatcaaaagggggttggctgaggaagataagaccgcagaacatggngtacgtctgacgataccaagactatccatttgcaaatgatggtctaatattgtggggatgcaattaaagaatggggtgacagactatgtgaaacattactatcctgatgaagaactgatnacatcggacganggaactccaaaggatggtggattaaattncggga

SEQ ID NO: 13625 - DNA, 542 bp, Arabidopsis thaliana
  unsure at all n locations
  Clone ID: LIB25-022-Q1-E1-H3
ngnnnnnnngngnnnnnnnggaactggtttgcctggntctaccggcccgganttcccggntcgacccacgcgtccgggcagaagaagaaacttcagatagatgagctagagagaatcgtgaggctgaagcaagcggaggcagacatgttccagcttaaagcaaatgaagcaaagcgggaggctgataggttgcagaggattgtactagcgaaaatggataagtctgaggaggaatacgcaagtaactatctgaaacagaggctgagtgaggccgaggcagagaagcagtatctgtttgagaagattaagctgcaggaaaactcaagggtggcatcacaaagcagtggtgggggaggagacccgtcacaggtgatgatgtactcaaagattcgcgatctgcttcaaggatacaatctctctcccaaggttgatcctcaattaaacgagcgtaatcctttcagatcantccctaaatgcttcctcctcccttanatatatatgttagtttttcatatcctaaaatttcnatcacctggtgtttt

SEQ ID NO: 13626 - DNA, 542 bp, Arabidopsis thaliana
  unsure at all n locations
  Clone ID: LIB25-022-Q1-E1-H4
nnnnngnnnnggaantgtttcncctggccctaccggcccgganattcccggatcgacccacgcgtccggttcttcctcttccagatttggtttctttttttgaaaaactctctagcttcagtttttttttttctctctctctctctctctaggaatgtttttgttcgtggatactggaatcatgagaatangattttgaaggagaaagcaagatccatgttctttgtcggagaatttagggctaatatgtggatttgagcttctttgattcccaatttgtgaaagttttganatttttgggaaagagagaatgtttangcagtttctgagtaaacgtcccganggaagtcttcaaaatctgattcaaggagagctngaatcgntcgaattcggggtccggtaatcgtcctccgggttcaagagatnccgggtaccaaatggtgggtgggntccngggtccgggntccgatttaaactcaangggaaagccttatgtcaatctggctggtgtttcccaanctangtgggttgttgccnggtaa

SEQ ID NO: 13627 - DNA, 445 bp, Arabidopsis thaliana
  unsure at all n locations
  Clone ID: LIB25-022-Q1-E1-D6
agttaagctgcctgtaaactatgagaaggctcttgaaatgattgacaaacacttgttgtactggcccaagttgttgcagcataaggttaaacaaagactgactaaaatgactcagatgcgtattcgtatgaggaaacttgctctgaaaacaagggaggtagtagtcactacgcctaggaggcaaataaagagggagtcgagaagagaggaaaaggctataaaagcagctcagttggataaggctattgaaaccgagttgatggaacgtttgaagaaaggcatttaccctactgaaatatacaatttatctgacagtgtgtttaacaaactgcttgataagagaaatcgaaaccaacgacgaagtttgagaaagaaagagggaggaggaangattgatttgaatatgttgaagggnnatgattgaaactccaaagcaaaaggaaga

SEQ ID NO: 13628 - DNA, 252 bp, Arabidopsis thaliana
  unsure at all n locations
  Clone ID: LIB25-022-Q1-E1-C1
aaaaccaaaaaaaaaaaaaaaaagagaaagaaaagaactcgagtgcaaaaagcttctctcttccttcccatggggtgcatttgaactaatctcctccttgaaatcgcttgatttgantgttataaatcgattaatcgattcaaaccgttggntaataatccaaaacaacccaaaaagagaatnccaagggaagttgtgtttcctncccaattgaaagggtcnccttttgggaagagancggnnagaaggnna

SEQ ID NO: 13629 - DNA, 444 bp, Arabidopsis thaliana
  unsure at all n locations
  Clone ID: LIB25-022-Q1-E1-C11
gatntattcaatatggccactctcctgcaaataggttcaggtgtgatttatagtaatgcccttaggaagacgcttcgacgtcctcagtcttctacatgcatcatagtgaccgaaaccacaccatgtaataagtctcccacagttcagcgtcgttctgcgaactatcagccttctcgttgggaccatcaccatctcctctcggtcgaaaataaatttgcgaaagataaaagggtacgagagagagatttgttgaaggaaaaagtgagaaagatgctcaatgatgagcaaaagacttatcttgaccaattggagttcattgacgatctacaaaaactcggggtttcttatcattttgaagcggaaatcgacaacattttaacatcttcttataaaaaagatagaacaaacatccaggagagtgacctacatgccancgcactcgaa

SEQ ID NO: 13630 - DNA, 542 bp, Arabidopsis thaliana
  unsure at all n locations
  Clone ID: LIB25-022-Q1-E1-C2
gnnnnngggnnnnnnngaactggtttgcctggntctaccggcccgganttcccggatcgacccacgcgtccgtaangtttgggctagcacaccaaatggaaacaagaagcttgctgcagcataccaggaagctcaacagaaagctggcggctgtcccatctttctgtttttctcggtcaatgcaagtggacaatttgttggtcttgctgaaatgacaggaccagttgatttcaacacaaatgtggagtactggcagcaagataagtggaccggctctttccccctcaagtggcatattgtgaaggatgtgccaaacagtttactgaagcatattactttagagaacaatgagaacaaacctgttaccaacagcagagacacacaagaggttaagttggagcaaggtttgaagattgtgaaaattttcaaaggngcataacagcaaagacttgcattttgggatgatttcctcattctacganggttccgacagaagactatccttggnggaagaaagccaagccaaaccccagaaacaaggt

SEQ ID NO: 13631 - DNA, 528 bp, Arabidopsis thaliana
  unsure at all n locations
  Clone ID: LIB25-022-Q1-E1-C3
gnntnnnnggaantgtntgcctggntctaccggcccgganattcccggatcgacccacgcgnccgcggacgcgtggggccaaattttctcatcattttctcgagaaaatagactaaaagcgattcccgagagaaagaaagaacaaaaaaaaaacatccgagtgaaaatgagagaaattcttcatattcaaggaggtcagtgcggaaaccagatcggagctaagttctgggaagttatttgcggcgagcacggtattgatcaaaccggtcagtcatgtggcgatacagatctacagcttgaaaggatcaatgtctattttaacgaagctagcggaggcaaatacgttcctcgtgctgttcttatggatctggagcctggaactatggattctctcagatctggggccgtttggtcanattttccgggctgataacttcgtttttggtcagtctggtgctgggaataactggggcgaaaangtcattacacggaggggagctgaattgattgattccgtggcntgaaggt

SEQ ID NO: 13632 - DNA, 537 bp, Arabidopsis thaliana
  unsure at all n locations
  Clone ID: LIB25-022-Q1-E1-C4
ngnnnnggngnnnggnngaactgtntgcctggntctaccggcccgganattcccggatcgacccacgcgtccgatcntcatcaanaccgcctccccaggctacttccaacaccagcaccaatgccaatgcaggctcgagtgtttctgctacctcatctgaaaacagtgctgttaataatagccagaggaaaccttttagacggaataacaacacatcatcttccagtaccagtagtaacgtctccaatgctgcgcctttaaacaccagagatcagaatcacagccaaaggggtggtggctcttttggttcagggaatttccgtaattctcagaggaatcgcaacagcagctcttaccctcgtggggaaggtcttcaccatggaaacaggcgcaattatgagcatggcaaccaaagcggcttttctcaccgtaactatagtgggagagacatgcacttgcaaccgcagaggggtgttgggatgatttaggccccatttatctanccaagattatgcacancatgtctttatgccacag

SEQ ID NO: 13633 - DNA, 490 bp, Arabidopsis thaliana
  unsure at all n locations
  Clone ID: LIB25-022-Q1-E1-C5
naactggcccgcctgnccctaaangtccgattattcccgggtngncccacgcntccgcaaaccctagttcctcctctctctcatttctcggagatattcaccagagcaataaccatggacgctaaagaaacctctgccaccgatttgaaaagaccgagagaagaggatgataacggcggcgccgctaccatggagacggagaacggagatcagaaaaaggaacctgcttgtttctccactgttattcctgggtggttctctgaaatgagtcctatgtggccaggagaggcacactcattgaaggttganaaagttttgtttcaagggaaatcagattatcaggatgttattgttttccattcngcancatntggaaaagttttgggttttgggnggngatttactccanctttanggganaagaatantgaagtgtcgctttatcagggaatgnnttncantcaattttcccctnttggggttnanancc

SEQ ID NO: 13634 - DNA, 449 bp, Arabidopsis thaliana
  unsure at all n locations
  Clone ID: LIB25-022-Q1-E1-C6
aatctgatttcgcttttgaatcgccattggttgaacaatttgacgccgatctagatttctgtcgctgtgaaggtagtgtcctgtttttccgatcaattggtttgttccgatcgtttctcgtttacgctttttgttatccttgagaaattttacgttgcaagagagatctttgattcatgggtgttgaagcattcgtgttaaaatgtatgattgatcttaatcagtgagatcggtgagctcaagttctgtgttttgtaattgagattcgaagaggtatgtcaacaaagttatggagatgggtgttagggctgatatacctatttgccgttgccacgatttggattgcggctagttttgtagtccaagtctgtggtggaagctggtgtttctccgttccttgatcactttcatttgtaatcattggtccgttgtttaacntcccctttttg

SEQ ID NO: 13635 - DNA, 392 bp, Arabidopsis thaliana
  unsure at all n locations
  Clone ID: LIB25-022-Q1-E1-C7
taaactggnccccgcctgnccctaanaggtccgntattcccgggtngacccacgcntccggaaatcagctggtggtggtgatgatgtgtcttatggaagtggaggaagtagcggccatggtaatctcgatagccaaggttgagctatggaaccagaagcttagagatttaatcatcatttcgaccctgcaagtgtctgattcttatatgtctatgattcgaatgacttactcgagagagagagagagatcaaacaaaacagaacaaaaaagctctttttcatttttcctgttaacttataagttattgcagcaaaactgcagacttgcttaactatatattaatctaaatgtgcagattctaatcaaaannnaannanngncnnngcnggng

SEQ ID NO: 13636 - DNA, 449 bp, Arabidopsis thaliana
  unsure at all n locations
  Clone ID: LIB25-022-Q1-E1-C8
attttgaatgtgaagttgcttctttcgtctcaagatctctctttatctctctatctgtttgattgacagtcaccatctaatgtggaggagatagatgataatccttcggtatcattagaggatgaatcagcacatgtgatgcagttcaagtggtctgattttaggattcttgatcgtgttagcattggtcatggcggcagggctgatgagcttgtgtttgaagctatagttcaggttccagataggtcagtttctacttcatatgtattacaagatttcaagatgaatttcagaggcttcatctgtggtgcttcaatttcacaagccctttgtttaaccaaggagttgttcttcggaaattgaataccactcgagctcaaagacgaagaagaagagctatagaaatttcgcctcccttttaatccantaagttacctaatggaatcccc

SEQ ID NO: 13637 - DNA, 515 bp, Arabidopsis thaliana
  unsure at all n locations
  Clone ID: LIB25-022-Q1-E1-D10
gnggnngntttcgnnggccctgtctcgcctgnccgtaccggtcngataattcccggggccccacacgcgtccgcnaacgcgtccggcggttctatttatgaggcgccttatttccatggagctacacatttgcttgaaagaatggctttcaagagcacgttgaacagaactcattttcgtcttgtgagggaaattgaggctattggaggcaacacatccgcttctgcgtctcgagagcaaatgagttacactattgatgctcttaagacctatgtccctgaaatggttgaagttcttattgacagtgttagaaaccctgctttcttggactgggaagtgaatgaagagctacggaagatgaaggtagagatagcggaacttgcaaagaaccctatgggtttcctcttggaggccattcattctgctggttactctggtccattggcaagtcctctgtacgcaccgggagtctgctttagatagattgaatggggaactcttgggaagattatgag

SEQ ID NO: 13638 - DNA, 443 bp, Arabidopsis thaliana
  Clone ID: LIB25-022-Q1-E1-D11
gcaaattgtaaatttagggaagagactttcgcaagcaatctagaagcaaatcgatcgccaaatctccggattatttgcaagaatcgttcccagataatcttccccagattctccacttctccagctctgatcggagtgttgctcgaacagcttgaagaagacgacgaagatatggctacttcgaagaaaatgatcacacgtgaagaatgggagaagaaactaaatgctgtgaagcttaggaaagaagatatgaatactttggtgatgaattttcttgtgactgaaggatatgttgaagctgctgagaaattccaaagggagtctggaaccaaaccagagatagatcttgcgaccattactgatcgaatggctgttaaaaaggctgttcaaaacggaaatgtcgaggatgcgattgaaaaagttaatgatttgaatcctgagat

SEQ ID NO: 13639 - DNA, 533 bp, Arabidopsis thaliana
  unsure at all n locations
  Clone ID: LIB25-022-Q1-E1-D3
nnnnnngnggnntgnnngaactgtntgcctgctctaccggcccganatcccggatcgncccacgcgnccgtgaagttacttgtttcagttcccgatgatcaattcttagtttttttggcttgttttcttcgtctctctttcatcaggcctttggagttttgtgttaccattttcgctcgcgtcattactggtgttagggttttcttcaaaagcttcttaatccgtcgaaattgctcttttctctccctcattgtcgacagagataaatggcttcaaagattattgctggcaagccggatgataccgagtatgaaatcattgaaggtgagtctgagagcgctttagcagcggggacaagcccttggatgaattcatcaacgttgaagcttcgacatccaattggaagaagtcccttcggtgatgtttggctggctactcatcanccagtcaactgagggactangatgnagcatcatgaaggtggccntcaanatgccttatcccatcaggggaagattcaaagaangggttgg

SEQ ID NO: 13640 - DNA, 464 bp, Arabidopsis thaliana
  unsure at all n locations
  Clone ID: LIB25-022-Q1-E1-D5
gganagacgacatcgaaccttctatcttcaaggctatgcttagcttcatttacaccgatgtacttcctaatgtgcatgaaattaccgggtcaacttctgccagttcgtttacaaacatgatacaacatctcttggcagctgctgacctctatgaccttgcaaggttaaagatattatgtgaagttttgctatgcgaaaaacttgatgttgataatgtggcaacaacacttgcgttggctgaacagcaccaattcttacagctcaaagcgttctgcttagaatttgttgcatctccaagcaaacttgggagctgtaatgaagtccgaaggggttcaagcacttgaaacagaagctgtcccacttggttaacctgagttgctgaacnactggttgcangcagcagntaagaagctcgacganttgggcaatcaaancaagnaaaagnaattgcgagcaantgtatt

SEQ ID NO: 13641 - DNA, 507 bp, Arabidopsis thaliana
  unsure at all n locations
  Clone ID: LIB25-022-Q1-E1-B8
naactgtcccgcctggncctaaaggtccganattcccgggtngncccacgcntccgattccaggtgctgctattaatcaagcagtttcttcacgatattttgctcgattttttggcactgaacgggcttcttcagggatgaaattctctcagtcgactggtaaatcaaattctgttgaaaaggagattgaagaagtgaaaatgaaaccaaatatggatatccgtctgagtgatatgaaacttgttttaggaccagagctgaggataatgtaccctttaattcttaattttgctgttagtggtgagcttgaacttgatggcatggctcatccaaaatttatcaaaccaaagggtgtcctaacattcgaaaacggagatgtcaatcttgtggctactcaggtacgtctgaaganggaacatctcaacgttgcaaagtttgagcctgaacatggactanatcctcgctaaattanncctaagttggttcaaaatggcaaatttaagggtt

SEQ ID NO: 13642 - DNA, 445 bp, Arabidopsis thaliana
  Clone ID: LIB25-022-Q1-E1-A11
gccaacgcgtccgagctacttcaccacccgcagattctgccatgtggcttctctctcttctacagctcacttcttctctctctgtctctctctaactacattgaaaccaaaccagagtgcttcaatgtcattgctgtgattctctttaagtccagacataactcccatatcttcttcttctgtctttttttatttctttgaaccggagaagaagaagaagaaggagaaggatatatgggaggctgtacttccaaaccttcctcctccgtcaaacctaatccttacgcacccaaagacgcggttctccaaaatgacgattctacccctgctcatcccgggaaatcaccggttcgttcatctcccgccgtaaaggcctctccttttttccctttttacacgcctagtcccgcccggcaccgccgtaacaagagccgcgacggggggg

SEQ ID NO: 13643 - DNA, 516 bp, Arabidopsis thaliana
  unsure at all n locations
  Clone ID: LIB25-022-Q1-E1-A12
nnngnntnntttnnnnggccctgtctngcctggntcgtaccggtcnganaattcccgggncgccacacgcgtccgctaagatcctccatttgagggtgagtcttgcggattctcgtgtcatcttgaatgtgctttcaacactgaaaaatccggtcttggaaaagacaagcaaagtgagggatgctgcttctattgtgtctcttgcggtaaagcaaacagtttgcttgaatgctggaagaagcaattgacgattgctaaagaaaccagaagggtagaagtgctttgttaccgtcttttcttagtccagaaactattgaagagctcaactaaataccgaaatctgtgtgaggttgtggatgaagctgtcaagactcttgaagctgatgtgggtcctctcactggtcttcctatgaaaatgggtagaggaattgtaaacagacttcattcgggacccgatgtgcagaaactttgctcttctgctcttgaatctcttgaaactatagcaactacacctcc

SEQ ID NO: 13644 - DNA, 467 bp, Arabidopsis thaliana
  unsure at all n locations
  Clone ID: LIB25-022-Q1-E1-A2
ngtctctcncttgtagcaatgccgcttcttcatccacagtcgttgcggcatccttctttcgagattcagacccaaagaagaagcaattccacaacaagattgcttctttctcacaagtttctccattctcaagcttccattatctcaatctccaggacaagaatcctcaaacgggtctctcagaatctctctgtagctaaagctgcttcagctcaagctagtagtagtgttggtgagagtgttgctcaaacatcagaaaaagatgtgttgaangctctgtctcagattantgatcctgattttgggacagatattgtttcttgtgggnttgtgaaagatttgggggattaatgnaagctttggggtgaggtttccgttccgnttgggagctgaacaacaacccgnatgtccagtcaaaggacatgttttgagnaacaanggnaaatgaaggtaatttgcagccctcc

SEQ ID NO: 13645 - DNA, 469 bp, Arabidopsis thaliana
  unsure at all n locations
  Clone ID: LIB25-022-Q1-E1-A3
atttctctcttcgaagaagaagaagaagaagaagatatgggtgttgatttggatttggaatccatctccgaagccacctccggagccattggatctcttctcagcancaccattttataccctcttgatacctgtaaatccaagttccaagccgagattcgtgttcgcggtcagcagaaatacagatatctgtcagatgtgttttgggaagcaatttcatcaggaaatgttctctccttgtatcaaggccttgggactaagaatttgcagtcttttagttcgtccttcatctatttctatagttatagctanttcaaagaagggtacattcccaaaaggatgggttctaaagtccattgggnancaaaagggctaatctccctcaantgctggcggctggcctggtggccttgtnccctcctggttttggactccaaacctccganaataaaaagcttcaatccgangg

SEQ ID NO: 13646 - DNA, 458 bp, Arabidopsis thaliana
  unsure at all n locations
  Clone ID: LIB25-022-Q1-E1-A4
agatggagtggtgaagaacaaaaccgtataaccgttcggttcagaggtgccgaaccgaaccgacccgtaaaccgaaatcctcaaaagaaattgccgatcggtttgctactgttcaaaacctcggtgccgagaaccgaaactgtcggttttttcggttcgggtttctcggtttcttccgaactcccaggcctagtttggttttatttttcacgagttttgcttctcttttcatcggcgacgacgacgtcgagtttctgtcaaaacgttaacgatccgactcgagcgtcgacagtaagagaagaagacagcgattgtgtgtagatcgacggcgaacgtgtgtccattcgtctcgatngacggagaatacgtttcgatccggtttcgattcaaatcngagagtttgaggatctaaatccggaaattgcattaatactcancctccaaanctcctcnggaag

SEQ ID NO: 13647 - DNA, 556 bp, Arabidopsis thaliana
  unsure at all n locations
  Clone ID: LIB25-022-Q1-E1-A5
tcantgtctcgcctggncctaaaggtccganattcccgggtngacccacgcntccgcttatatctctcacaattcagcaatggcttcttctatagttacctctagcttgaagcctttagccatggccgattcttcctcttctaccattttctcccatccttccatctcctctagnatctcttcctccagaattcgcagctccagtgtttccctccttaccggacgcattaacctgcccctctctttctctcgcgtctctctatctcttaanaccaaaacccaccttaaaaaatccccctttgtctccttcgttgcncagacttcggattgggctgaagaangtggagaaggaacgtcgctgttgangagaccgagaacangttttagagtcacaaggatgttgagcnnaagggagatgagangcgaangggagaatgccgaagccgaanggaagaattgttgaagccgaaagggagaatttaanaagccgaaanggggnaatgttaagccgaaaggggaanctgtttnaancngaaaanaaaccttgannttttcc

SEQ ID NO: 13648 - DNA, 450 bp, Arabidopsis thaliana
  unsure at all n locations
  Clone ID: LIB25-022-Q1-E1-A6
nagtctaagcgagagagcaaaagagaaggcactggaagttatcggaatttgcatctttttgattccgccgttttgcgtctgacgtgttcacggcggcaacctccatggacgacggtgacctcggtaacaaccaccataacttcctcggtggagctggtaatcgtttatcagccgaatctttgccgttaatcgatacgcgtcttttgtcccagtcagaacttcgcgctctctctcagtgttcttctctatctccatcttcttcagcgtctctcgccgcttccgccggtggagacgacgatttgacaccaaagatcgatcgctccgttttcaatgagtccgctggtagncggaaacagacatttctccgtctccgccttgcgcgccancctcaaacancgggaggaaantccntcgncgcaacgtcagagagacgantcttcccgttaaana

SEQ ID NO: 13649 - DNA, 437 bp, Arabidopsis thaliana
  Clone ID: LIB25-022-Q1-E1-A8
aaggtgttaagagtgatgggacggtgtctcacttcttccataaagcaatcaaagcttatagcacaggaactcgaaagcgtagaaagattcacgacgatgattttggcgatgtgcgctggcataagacaggaagaacgaaaccggttgtgttggatggtgttcaaagaggttgcaagaagataatggttctctatggcggaaaagctgtgaaaaccaactgggtgatgcaccaataccatttgggaatagaagaagacgagaaggaaggtgattatgttgtttctaagattttctaccagcagccacaacagctagtagtcaagcgaggtgataaagctgaacaggaagtctctgaggatatctttgctgcagtgactccaacagcggatcctgtcactccaaaattagctacacctgagcctcgaaatgctgtgcga

SEQ ID NO: 13650 - DNA, 538 bp, Arabidopsis thaliana
  unsure at all n locations
  Clone ID: LIB25-022-Q1-E1-A9
ggnnnnnnnnnnnngntngnggaagtgtcttcnnggcccgntttttctggcncgtaccggtcgganaattcccgggncgccanacgcgtccgcgacgtctccgttgagtctcctcagccaccgctatttcccgatgaagctctccccactaaatctggctacctcccggttaaacccgcacccggctcgtccatgttctatgccttctacgaagcccaagagccaaccacacctcttcctgacactccgctcctcgtttggctccaaggtgggccaggctgctcttcaatgattggcaacttttacgagctcggtccctggcgtgtagtttcacgcgccacagacctcgagcgcaaccccggcgcatggaaccgtctattcggactactttttgtggataacccaataggagtcggattcagcatcgcagcctcacaacaagacatacccacaaatcagagacaggtcgctgagcatctttacgccgctctcgtggagttccttgaacaaaacccaaagcttcgaaaaccggncgggt

SEQ ID NO: 13651 - DNA, 516 bp, Arabidopsis thaliana
  unsure at all n locations
  Clone ID: LIB25-022-Q1-E1-B11
gnnngnnnnntttnnnnnggccctgtctngcctgnccgtaccggtcnganaattcccgggncgccncacgcgtccgttntaataaagtccttctcttgtgaaaatctctcgaattttcatttttgttccattggagctatcttatagatcacaaccagagaaaaagatcaaatctttaccgttaatggaggaagtatctccggcgatcgcaggtcctttcaggccattctccgaaacccagatggatttcaccgggatcagattgggtaaaggttactgcaataaccaatactcaaatcaagattccgagaacggagatctaatggtttcgttaccggagacttcatcatgctctgtttctgggtcacatggttctgaatctaggaaagttttgatttctcggatcaattctcctaatttaaacatgaaggaatcagcagctgctgatatagtcgtcgttgatatctccgccggagatgagatnaacggctcagatattactaccgagaagaanat

SEQ ID NO: 13652 - DNA, 527 bp, Arabidopsis thaliana
  unsure at all n locations
  Clone ID: LIB25-022-Q1-E1-B2
gnnncgnngaantggtttcgcctgggctctaccggcccgganattcccggaatcgacccacgcgtccgctgaaaaatcacacaaaaacaaacaaaactttgcttacgtcacatcattatctgtgactaattcttaatcatcatcatcatcatcacttacttaaatctaaaaaaatctctgtttgtatatatattatctttgcgatttttatccaaatcttccaaagcttagttttttttttttttcaatttctctcttgcgttttcgattttattacaagaactttgttttgggcttcatccatcgttcaaggttcgttgaaaactatgaagaaagttgagttttttatgctccttctctgcttcatcgcagcgtcatctctagtgtctgctgatccancaacangtcctgctgatttgggaagcaagtgtagtgattctgatgactggcaagggtgattcttccctggaatccccaagattaagtntgaagggaccttcnnngtangaaccacttgcttacangtg

SEQ ID NO: 13653 - DNA, 461 bp, Arabidopsis thaliana
  unsure at all n locations
  Clone ID: LIB25-022-Q1-E1-B4
anagctttattcttgccctagagataccgagcgggagattccagattgagagcagcttcgagtctctctctcctcgccgttccttttcgcttcttcaagtttcgttgccagagagattctaggtattgaagttatagaatggactttgatgagtatgagtacttagagaagacagttgaaaatcctcacctggagaatgaagttggtaatggtggtggtgatgagaaagtcaaatctgaagggaaagagaggagtaggagctcaaggcataggggtgacaagaagaaggagagggatgaagatgaggatggtcggccgttctaagcggtcgaagatcgcatcaccgttcacgttctanggacagagagagggataggcatagaagttagcagggagcacagagatagagatcgtgaaaaggatgtagatnaagaagnaagaaatggggaaaggttngngag

SEQ ID NO: 13654 - DNA, 521 bp, Arabidopsis thaliana
  unsure at all n locations
  Clone ID: LIB25-022-Q1-E1-B7
taaactgnccntgcctgggncctaaaggtccgatattcccgggtngncccacgcntccggaaaagaggagtttgaggttgagtctgatgattacatcacatcaattgaagtttctgtcgacaatgtctttggttttaagagtgaaatcgtcacttctcttgtcttcaagacctttnngggaataacctcacaaccttttggaatggagactgagaagaaattggaacttaaagacggtaaaggaggaaaacttgtgggattccatgggaaagctagtgatgttctttatgctcttggcgcttatttcgctccaacaacaaattcaactacgccatcgactccttctacatctaaganactacaagcaagaggtggaaatggangagcttcttgggatgatggtgtttttgatggngttanaangatacttggtangtcaagggaaacnatngnggtagccttcngttaccttttgagttcaaaaaaanggggncccanaggcaatcccncggngaatttnt

SEQ ID NO: 13655 - DNA, 515 bp, Arabidopsis thaliana
  unsure at all n locations
  Clone ID: LIB25-022-Q1-E1-A10
gnngctgntntctnngncctgtctnncctgggtcgtacggtcggatattcccggggggcccaanacgcgtccgcnaatagctcagaaaaagcccattctttttttctattcttgtttattttaatcatactgtgcgtttctacaaagtttgttcctttcttcttcaactctctcactcggagtcacagggatctgtttcttttctttttttgctttcactcttctcttccagtgagagagagtgagagaaaatggtgaagcttttgttagtagggtttgttgtggctggtataatactgggaactcaggcaaatgaatatttagatttcaatgtgacagaantagatcgcattgaggaattagagtttggnttttccaaatatagctccaatttgaaccctttnatggttggnctcacccttatcagaggagctgattctggagctgtttgtttggatggaacattgcctggatatcacttgcaccgtngacatggntntngagctnatcgntgg

SEQ ID NO: 13656 - DNA, 442 bp, Arabidopsis thaliana
  Clone ID: LIB25-020-Q1-E1-G3
aatgaaacatttctctctacttttcatttttctggtcatcctcttggcaacaagctacagtgatgcctttaccaagaaacagttttccaaaggatttcctcttcggagccgccacttctgcttatcagtgggaaggagctgttgctgaagatggaagaactcctagtgtctgggatactttctccaactcttacgatacaggtaatggagatgtaacatctgatgggtatcacaaatacaaggaagatgttaagctgatggcaacaatgggcttagaatcattcagattctctatctcctggtcaagacttatacctaatggaagaaggactcattaatccaaaaaggactaatggtttacaacaatctcatcaaaagacctaaaaagccaagggatccaaccacatgttacacttaacactaagatcttcccaatcccttg

SEQ ID NO: 13657 - DNA, 509 bp, Arabidopsis thaliana
  unsure at all n locations
  Clone ID: LIB25-020-Q1-E1-G4
nnngggnnnnngnaatgtctcgtctggtcggncggtccanaattaacgggnccnccnacgcgtccgaaaaaagaagagaaaaggagttatatatggattgtattttacttattctgactactcttgttgccattttcatcgtcaagattgttctcctagtcactaaacctaacaaaaaccttccaccgtcgccaaatatatgttttccgatcatcggacaccttcacctcctcaaaaagccactgctacaccggactctcagccatctctcccactccctcggccccgtcttttctctacgcctcggctctcgccttgccgttatcatctcatctccaacggcagccgaagaatgcttcttgacgaaaaacgacatcgttttagcaaatcggcctcgtttcatcatgggcaagtatgtggcttatgactacacctccatggttacggntccttacggtgaccactggcgaaactccgtcgtatcaacgctttagaagtctctccacaaa

SEQ ID NO: 13658 - DNA, 437 bp, Arabidopsis thaliana
  unsure at all n locations
  Clone ID: LIB25-020-Q1-E1-G6
agggtttcgagtccttttgagttctttgggcttcctcccaaatttctccacgagctcgacccctttcgtatcttccttctcatttttttgccaaatttattcgatccgtctttcactatgtatccgatggattctgattaccatcgccgtggtctggtggcaaacgatcgttcaccagctcagtttgttaggctggataaaccgagagccgtagacgatctctatataggcaagagagaaaagatgcgtaggtggttgtgctgtgcttgccacgttgaagaaccttaccattcttctgaaaatgaacacctcagaagccctaagcaccacaatgattttgggcatcacactagaaaaccacangcggctgtgaagcctgatgctttgaaggagcctccatctattgatgtgcctgcattgtcattgggatgagttga

SEQ ID NO: 13659 - DNA, 513 bp, Arabidopsis thaliana
  unsure at all n locations
  Clone ID: LIB25-020-Q1-E1-G8
gnnngnnggaactgtttcgtttgcccgtgctcntanaaanccataattcccgggnccncccacgcgtccgcaagcggatgattcaaagagtgtggttctaaagggagtaacgcacggtgcggttgattaccttatcaagcctgtacgtatggaggcacttaagaacatatggcagcatgtagttaggaagaggagaagtgaatggagtgtaccggaacattctgggagcattgaggagactggcgagagacagcagcagcaacatagaggaggtggtggtggtgcagctgtttctggtggagaggatgcggtggatgataactcatcctcggttaacgaaggtaacaattggaggagcagttcacggaagaggaaagacgaggaaggagaagagcaaggagatgataaggacgaagatgcgtcgaatttgaagaaaccgcgtgtcgtctggtctgttgaattgcatcancagtttgttgctgctgttaatcagctccgcgtttagaaagcggg

SEQ ID NO: 13660 - DNA, 87 bp, Arabidopsis thaliana
  unsure at all n locations
  Clone ID: LIB25-020-Q1-E1-H1
caccgttcgctgangagtacatcagcttctgttgtcaccaccntcggatcaccgggtnaccgattctcgttcaggttcatntgaatg

SEQ ID NO: 13661 - DNA, 507 bp, Arabidopsis thaliana
  unsure at all n locations
  Clone ID: LIB25-020-Q1-E1-H10
nnnggnnnnnnnnnantattgttcggccgccnggtcngaaanaanggnnggcggccccacgcgtccgagaagaaataggctctgctctgcgccttttctacaagaaattcaccaaaaaagcttgaatatttatcggaatcaaagcttgggtttttaatcctggtaaagccatgtcacatatggtgtttcagagcgttgtcgctcccaaacccttatctcctctcaaaccctgtttacctatccctcgtccactcgttactctgccttgtaagctccgtcgtggcttcgttagagcttcttcgtcctcgtttcttgtcgatgattcagtttcaggactcgagcgttgcttacagttaccttctggagttgagttaggcacatcttcctctggctctttctctgcaagtactcagatgtgtcctgtgatgaaaggcaaatttggttcggtaggagctgttactttggnaaaagggaaacttgatatgacccaaaagattctgagaacaa

SEQ ID NO: 13662 - DNA, 72 bp, Arabidopsis thaliana
  unsure at all n locations
  Clone ID: LIB25-020-Q1-E1-H11
canacaacggcgaacttcctgatgatatcgaatacgaaggttgatctcaaaagntanctttgccaaacacca

SEQ ID NO: 13663 - DNA, 441 bp, Arabidopsis thaliana
  Clone ID: LIB25-020-Q1-E1-H12
tgatatcagttgcacacacataataagctataactaagatatcaaacggaattcaacggccacgatgtcttgggatgacggaaaacacacgaaggtgaagagagttcagcttacgttcgatgatgtcatccgatctatcgaggtcgaatacgacggaacctcccttaagtcccagccacgtggcaccgctggcaccaaaattgacggatttacactgagctctgatgagtatataacggaggtgaatggttactacaaaactacgttttcgggagaagtcataacgtcgttgacgttcaagacgaacaaaaggacatatgggacttacggaaataaaaccagtagctacttttctgttgccgcacccaaaggataaccaagattgtcggttttcctggaagtagcaaccatgctctcaactccatcgacgctcaatttgcc

SEQ ID NO: 13664 - DNA, 510 bp, Arabidopsis thaliana
  unsure at all n locations
  Clone ID: LIB25-020-Q1-E1-H4
gnnnnnngaactgtntcgtcnctcggntcgtccgaaaattanagggtccaccnacgcgtccggtgggataagaggttttggaggaatgtggagaaaaaaataagcaagaaagagtcaaagaagcgagccgctaaactggagaagttgctccgtaaacaggaacgagaagaagccacatcatcatctctttctctggaggaggaggatgaatcgtgttccagcaactacggtgacgtgactactaacgagttgcagtcggctgttgagggaaaagagctcactgatgtgagcaacttggttgaagagattgtggggtcagaggtttcgatcagaggtcgactgcacaagaatcgcttagtcggtaccaaattgtttgtgatcttgagggaaagtggattcacggttcaatgcntggtggangagaacanaattggtgcaaacatgattaaatttgtcaagcaactgantcntgaatccgttgttgaacctancggtgtcctcccctcaanc

SEQ ID NO: 13665 - DNA, 435 bp, Arabidopsis thaliana
  Clone ID: LIB25-020-Q1-E1-H5
ctttctaggtaggagggactcctctgagcaaatgccgttttgtgggtgcgctattggtgctgttgatgggggtctttatgttattggtggactttctaggtctaaaacagtgagctgtgtttggcggtttgatccgattttgaactcttggagtgaagttagttctatgttggcgagtcgggcttattccaaaacaggtgtattgaataagaaactatatgttgttggaggggttgatcggggacggggaggtttatctcctcttcagtcagctgaggtttatgatccaagcacggatgcttggtcagaggttccgagcatgcctttctcaaaggcgcaagtgttgccaaatgcgtttttggctgacttactaaagcctattgccacaggaatgacttgctacaacggtaggttatgtgttcctcaaagtttata

SEQ ID NO: 13666 - DNA, 418 bp, Arabidopsis thaliana
  unsure at all n locations
  Clone ID: LIB25-020-Q1-E1-H8
aacaaatggctgcatccctctttaggttgattgcttctgtgtgcagaaccatgatgattgctaatactggtggtgctctcactctacttcttgtgttcttgctcggaggcttccttcttccgaaaggcaagattcctgactggtggggttgggcttactgggtatctcctctcacctatgctttcaacggtctagtagtcaatgaaatgtttgctcccagatggatgaacaaaatggcttcttccaacaacacaataaaacttggaaactaatggtgcttaataacttgggangtntaacaacaaaagaactggtactggatttcaattgganccttgctttgtttcananncctcctcaacattccaatcaacttggnactaactanctcaaacctcctgggaaaaaagnaagttta

SEQ ID NO: 13667 - DNA, 94 bp, Arabidopsis thaliana
  unsure at all n locations
  Clone ID: LIB25-021-Q1-E1-A12
ccntgtctttcagaggacntagcatgccaaatgcaatatctggaatgggtgttgcanatgacagcataaccacatttctggagcttcaanggaa

SEQ ID NO: 13668 - DNA, 488 bp, Arabidopsis thaliana
  unsure at all n locations
  Clone ID: LIB25-021-Q1-E1-A2
gnngacgcgtgggatcaacagcaggaagcggctaagttatcatatagtcaatccgctaatacaatgtcatcattgatgccacctgcttcaattgaacccgtacatgagtggggtgggaacgggaggacaatggcagcacattctagaagtgtatcagagccagatttcagtaggacgccaatacaggatcagactgactcctcaaaagacaaaagctcctgatggggtgacacagggtgaaatcaactccggaaggtgccaaagttctccgggttaacccgctttggtaattgggcataattgaagnaacacttgtnagggaaaaggccttcccaanctccgattaatccnnaatngaaggcaaaacctgggttaatgnagaaatcaattctanctaatggacnaattaccctaaaagaaaatgggttgggaaaaaaggggtttggaacccccaaancttagggaaccctgnactaccncccncccnc

SEQ ID NO: 13669 - DNA, 523 bp, Arabidopsis thaliana
  unsure at all n locations
  Clone ID: LIB25-021-Q1-E1-A3
tnnngganctgtntncctgncctctcgcgtgnccnaaatcnnggganaccncacgcgtccnaanaaagagtcannccactatggatgatagttcttcaacttgttctaatgattctatccgatcgggggtaaccaatgggtcctaccaagggaattccttgaatttccgaaaccagaagtcgccgaacaaaggaaagaaccaacaagtgaaagcaatgactgatgcccacagtttagcgagtgaaacagatgatcaaccctcaacacttggaacagaccccaagggtcagaattattcttccgaggcaagcaacgttggtgaatctgattgggttgttgtctcccacatccaggagccagagggttctcgaaatcgtattcctgttgggagggaacgcaaaacggttcaatccattgtgaactcggtcgacatggatcgacctaaaagagaaaagcactgctgtactttcttctcccagaaaatgttgcccagaatccntcaacaattaactcagaccaancg

SEQ ID NO: 13670 - DNA, 509 bp, Arabidopsis thaliana
  unsure at all n locations
  Clone ID: LIB25-021-Q1-E1-A5
tnnnnngcccttttncnngncnnaagcggtccatactcccgggnccncccacgcgtccgcnaacgcgtccggctcatggtacggagccgtttgaagcggtggttatgatcgatgtgctacggcgaggcggagcggatgttacggtggcttccgttgagaatcaggtcggcgttgatgcttgccatggaatcaaaatggtcgctgatactcttctctctgatatcaccgactcggttttcgaccttattatgctccctggaggacttcctggtggtgagactcttaagaattgtaaacctttagagaagatggtgaagaagcaagacactgatggacgacttaacgctgctatctgttgtgcgccggcgttggcgtttggtacttggggactactagagggtaaaaaagtatgtgtgtagtgagtgatcagtatccaagaagttttcttttcttttgagtttgtaattttggtgtanaaatcacatacgttgccttgcaaggctacatgt

SEQ ID NO: 13671 - DNA, 507 bp, Arabidopsis thaliana
  unsure at all n locations
  Clone ID: LIB25-020-Q1-E1-G10
ggnnnnnnngaantgttttcnnngcngttctaccggtaagttnttcccgggcgggccccacgcgtccnagaaagatcctgtcgcttctgttctcacatcgtcagatgggagctacttattcaagaatattattccaggaacatacaatatccgtgcatcccatccagagctgcaagttgaagttcgcggttcaacagaggtggaacttggatttgcaaatggcatggttgatgacatattcttcgtccttggttatgatcttaaggggtcggttgttgctcaggggaatccaatcctgggtgtccatatatatttgcattcagatgatgtttccatggtagattgtccccaaggatctggtgacgctgctggagaaaggaaatctctttgccatgctgtatccgatgcagaaggaattttcagtttcaagtccatcccttgtggnaaatacgaattggtgccgcattataagggtgagaatacggtccttgatgttcactcccggta

SEQ ID NO: 13672 - DNA, 509 bp, Arabidopsis thaliana
  unsure at all n locations
  Clone ID: LIB25-020-Q1-E1-E4
ggnnnngnaantgtctngtttgtacgggccggtccgacaattaangggnccacnnacgcgtccgggntgatcctctctcttctatctctccaactgatcctcttcctcactctccgatccatcccttttcctcaccgtcacatccccgaaaacttcccttctcccgccgccgtcgtcaccaccaccgtcacaaccaccgtcatttctgccgcctcttccaatccccctctctcatcctcctcatctgacgaacgatgcgattcaggtcgagtcttcgtctacgacatgccaaagatcttcaacgaagtgattctacaacagtgtgataatctcaatccatggagctctcgctgcgacgcactttctaacgacgggtttggtcaagaagcgacgtcgttaagcaacgtgatccctaaagatttggttcaatcatggttttggactgaccaattcgtaaccgaaattattttccataaccggattttaaaccaacggtgtcggactttggg

SEQ ID NO: 13673 - DNA, 432 bp, Arabidopsis thaliana
  Clone ID: LIB25-020-Q1-E1-E5
gtttagtgaaaattgggttgtttaccactatttcaatcttcgagctcacaagtacgaggttacggtcgttgagatctatgatcagtcgagggcggagaacaaaaatgtgtggaaactcattctgggaaagcacaatctaacagcacccatcacttcgtactctaggccagaggtgtttacaaagtcacagtcatacttctttgctcagtctgtgaaaaccattgcggtgacatccacagcaaagggtataacttcaaagcagcttctcattggtaccatcggggatcagatattggcacttgataaacgatttgtggatccacgccggacacttaacccgtctcaagctgaaaaagaagaaggaatcatccctctcactgatacattacccatcattcctcaagcgtatgttacacactcccacaaagtaga

SEQ ID NO: 13674 - DNA, 507 bp, Arabidopsis thaliana
  unsure at all n locations
  Clone ID: LIB25-020-Q1-E1-E6
ggnnngnnngnttttgtccagcctgcncgtaccgaaaccacaattcncgggnccacccacgcgtccggnctctcttccctcgtaaacatcgctgtctctaaagatggcctctctctcaggcctatactcttcttctccatctctcaaacctgccaaaaaccattcctttaaagcattgccggcgcaatctcgagattccttctctttcccacatacctccaaacccaccaatctaccgttgactctctcctcggctcgttctgtggcacgcgacatttctcatgcggattcgaagaaagagcttcttaaggatccggatgcgttgtggaagcgatacctcgattggttttatcagcagaaagagcttgggttgtatctggatattagtcgggtcggatttaccgatgagtttgtggctgaaatggagccaaggtttcaagctgcgtttaaggctatggaggatcttgaaaaanggtctatagcgaatcctgatgaaggaagaatggg

SEQ ID NO: 13675 - DNA, 440 bp, Arabidopsis thaliana
  unsure at all n locations
  Clone ID: LIB25-020-Q1-E1-F10
ttgagaaaatttgacttcttcgaggagaaatacggaggcaagatacctgaggatgtaaccggagatatacaatgttgttccagtggccgtggcaaagtcgtcatcggctctaacgacggatccgtcagcttcctcgatcgcggtgtaaagttcgattccggtttccaagctcactcttcctccgtcctcttccttcaacacctcaagcaaaggaactttctcgtcaccgtcggagaagatgaacaaatatcgccgcaacagtcagggatgtgtcttaaggtttttgatcttgacaaagttcaggaggaaggtactaagttcctcggctcctgaatgcattggtattcttaagaatttcaccaatcagtttcctgaagctaagattacttcttttccaatccttgggnggaanttcaccaatattgcttaaanccattggg

SEQ ID NO: 13676 - DNA, 439 bp, Arabidopsis thaliana
  unsure at all n locations
  Clone ID: LIB25-020-Q1-E1-F11
gcaaaattcgaagagacacaaaaaaaccttcgtttgtgtctcagaatttacaaagttttgagtcagtagagaaatggcgggaatcgtgacagagccgtggtcagtagctgagaacggaaacccaagcataacggcgaaaggatcgagcagagaactaagacttggaagaaccgctcacaacatgtcttcttcttctttgaggaaaaaatcagacctccgagtgattcagaaggttccatacaaaggtcttaaagattttctctctaatctccaagaagtcattctcggaacaaagcttgccattctttttccggccattcctgccgccattatttgcacctattgtggcgtcagtcagccttggatatttggacttagcttgctangactgacacctttggctgancgaatcagcttttgacagagcaactagctttca

SEQ ID NO: 13677 - DNA, 437 bp, Arabidopsis thaliana
  unsure at all n locations
  Clone ID: LIB25-020-Q1-E1-F12
catctctcaggtaaaaaaactgagtcgagatttggtgacgtgatgaatcatttggtgataatctctgtgttcttgagctcagtattgttgttatatagaggagaatctggaatcacaagtagttttattcgatctgaatggcctgcggttgatataccacttgatcatcatgttttcaaagtcccaaaaggatataatgcaccacaacaagtacacataactcaaggtgattatgatggtaaagctgttatcatctcttgggttacacctgatgaacctggttctagccaagtacattacggtgcggttcaggggaaatatgagtttgttgctcaagggacttaccataactacacgttttacaagtataagtctggctttattcatcactgccttgtctctgaccttgagcatgatacaanatactantacaagat

SEQ ID NO: 13678 - DNA, 511 bp, Arabidopsis thaliana
  unsure at all n locations
  Clone ID: LIB25-020-Q1-E1-F2
nnnnnnngnaactgtcncgctttgctcgtgccggtccgacaattcaacgggtcgncccacgcgtccgaaacaaactggggaagatgaagatggagtggtgaagaacaaaaccgtataaccgttcggttcagaggtgccgaaccgaaccgacccgtaaaccgaaatcctcaaaagaaattgccgatcggtttgctactgttcaaaacctcggtgccgagaaccgaaactgtcggttttttcggttcgggtttctcggtttcttccgaactcccaggcctagtttggttttatttttcacgagttttgcttctcttttcatcggcgacgacgacgtcgagtttctgtcaaaacgttaacgatccgactcgagcgtcgacagtaagagaagaagacagcgattgtgtgtagatcgacggcgaacgtgtgtcgattcgtctcgatngacggagaatacgtttcgattcggtttcgattcaaatcnggagaatttgaggatctaaatccggaaatt

SEQ ID NO: 13679 - DNA, 497 bp, Arabidopsis thaliana
  unsure at all n locations
  Clone ID: LIB25-020-Q1-E1-F3
tnnngaatgtcncttgnncggccggtccgacattcacgggnccccccacgcgtccgagaaattgttcgatatcaatggggaagaacaataagatcggaagcgttgttcggatccgtcagatgcttaaacaatggcagaaaaaagctcacatcggatctagcaacaacgatcctgtttccgatgtacctcctggtcacgttgctgtttccgtcggtgagaatcgtcggagatacgttgtccgtgctaagcatttgaaccatccgattttccgacggcttctagctgaggctgaggaagagtatggattcgctaacgttggtccgttagcgattccttgtgatgaatcgttgtttgaggatattattgcgattgtgactcggtgtgagtcgtcatcatcatctggacnangtaatcctccggcggcgacgcntgangatctccggangtgtantcatgttggattggcgaagaacaacgttgaatccccgtccgttact

SEQ ID NO: 13680 - DNA, 511 bp, Arabidopsis thaliana
  unsure at all n locations
  Clone ID: LIB25-020-Q1-E1-F4
nnngnnnngnaactgtntcgtcngcncgtgcccggtccgaaaattcaacgggtccacccacgcgtccgcgagacgcntgggggggagtgctaatctatctggagaactggtgccacagcttgctcagcttccaaatttgcagtacttggaactttttaacaataatattactggggagatacctgaggagcttggcgacttgatggaactagtaagcttggacctttttgcaaacaacataagcggtcccatcccttcctctcttggcaaactaggaaaactccgcttcttgcgtctttataacaacagcttatctggagaaattccaaggtctttgactgctctgccgctggatgttcttgatatctcaaacaatcggctcagtggagatattcctgttaatggttccttttcgcaattcacttctatgagttttgccaataataaattaagggcgcgacctgcatctccttcacatcaccttcaagaacgtctgcaacaatantaatng

SEQ ID NO: 13681 - DNA, 196 bp, Arabidopsis thaliana
  unsure at all n locations
  Clone ID: LIB25-020-Q1-E1-F5
caagangaagatcgttgaaggagangaagatannanaggactagtggagaagatcaaggagaagctcccaggataccaccacaatacagcacangatgatgtaccagtttccactaccatcccggtaccactgtcngagagtgtggtggagcatgaccatcccnaggaatagaagaaaggttatntgagaagatca

SEQ ID NO: 13682 - DNA, 497 bp, Arabidopsis thaliana
  unsure at all n locations
  Clone ID: LIB25-020-Q1-E1-F8
tcgtcngccctgnncgtaccantccngnattcccgggnccncccacgcgtccggagaaaagcaagattctggtgatcggagggactggtcacatcggaaaactcattatagaagcgagcgtgaaagccggacactccacactggctctcgttagagaagcctcgctctccgatcccaacaagggcaaaaccgtccagaatttcaaagattttggcgtcacattacttcacggggatttgaacgatcatgagagcttagtgaaggccattaaacaggccgatgtggttatatcaaccgtttgggagcatgcaaatcttggatcaaaccaagatcatttcagctattaaagaancccggtaacgtcaagaagatccttgccgtctgantttgggatggacntggacaantcaantgcggttgancctgcgaaaaccggcttttggaaggaaactacngccaaggggangactttnaancgggaaggattccatccnctt

SEQ ID NO: 13683 - DNA, 431 bp, Arabidopsis thaliana
  unsure at all n locations
  Clone ID: LIB25-020-Q1-E1-F9
tgcttctctggttaagacttttctgtttcggtgcgactcgttttcatctttcaaattcaaatgcaaattcgaatctcccgcgaaaacgcgattgctctctccggcgaccgagaaacatgttgtcagatcgtcaagagcctggcgtattcgttgcttatccgatgatcctggttcgagtcatgttttcgttgcaagtagaaggaaaatggtagtcttgttgtcgacggtgcagcttctgtctcatatgcttccgcaaaacgggaacgcagctgagatttatccggtgatgcaaaacgaaataaggaaagtggtgacaaagggcaaggctgctggtgtgcttcgtttantgtttcatgatgctggaacctttgaactggacgatcattctggtggcatcaacggatcaattgcntaagaaccttgagaagact

SEQ ID NO: 13684 - DNA, 499 bp, Arabidopsis thaliana
  unsure at all n locations
  Clone ID: LIB25-020-Q1-E1-G1
ngnnnggaatgtccgttgcacggccggtccgactnttaacggggggcccnacgcgtccgcnaacgcgtccgcccacgcgtccgctaacctttctttgaaatcttgacctttcccttccttctccgctaaattcgttttaatttcatcttcttcttcttcttcaattcgatgcaataatagtcacttcaatctcaatctagggttttcaattttcttcatgtgaattttttttccccttcttctcaatttcaattcaatctgggattcgtaaattctcggaagatgaaacgcgatttcgacgaaatctccgaggaagagtggtctcaacactcgtttaacgcttcgcgagttcttaaacgaacacgggctccgaagaagactcgcgcggggacgaatccaacgccgtcgattgagtcctttgcgtttangagaacttcgacggngatgacgattgagagtaatagcaacgatggtgattgtgttgaaaatgaggattggg

SEQ ID NO: 13685 - DNA, 501 bp, Arabidopsis thaliana
  unsure at all n locations
  Clone ID: LIB25-020-Q1-E1-E2
gtnnggaactgtcncttgntcggccggtccgacattaacgggnccncccacgcgtccgaaatcgatcctgaggatgagaacattgatttcctgaggatgtgccaaagcataaaggagaaagaccctaactttaagttcgagtttactttggatgcaaatgataagttagaaaatattgcctggtcgtatgcttcttccattcagtcatatgaactctttggagatgctgttgttttcgatacaacacatcgcttaagtgctgttgagatgccacttggaatatgggttggagttaataactatggtgtcccttgcttcttcggttgtgtgcttctacgggatgaaaatttgagatcgtggtcatgggcactacaggcattcacanggttcatgaatgggaaggcacctcaaacgatattaacagaccataatatgtgtctcaaagaagccatagctggagagatgccaaccactaagcatgcactctgcatatggatggtt

SEQ ID NO: 13686 - DNA, 504 bp, Arabidopsis thaliana
  unsure at all n locations
  Clone ID: LIB25-020-Q1-E1-C11
agnnnntnngngnaattttcccagcgcctctaccggtaaaacattcccgggnngccccacgcgtccncgaagatttcaccgactaatcggagtttggatcggagattagatccgggaaatcactgacgaatcctttctggattttggatcggtctatgcttctctactctacttgatcttgatcttcgagaaatttaacttcgttttgcaattgatcgtctcgctttaagaagcttgcagatccgttgatctctttctgtgattttgcggggtttagggttagggttttaatttcgatttcggttgtcaattttgatggcttcgactgctgatttcctcctggatgatcaaacggacgaggatttcttcgacaaacttgttgatgattcctatactcctaccgcttcatcctctgccaaggagctgaaattcgatgacggtagtgattccgatgacgccaaaagctttgctaatctctccgtcgttgacgatgttttggggtng

SEQ ID NO: 13687 - DNA, 254 bp, Arabidopsis thaliana
  unsure at all n locations
  Clone ID: LIB25-020-Q1-E1-C12
tgaatggttaaggagtaatcggcattaggatttgcagacttgtttttttatcgtgaccattctctttagaaactaagttattatggtcacgaaggttaaagaaccctttggttgattttttgtcttgttcgtttggtatcggatcctatgatactactatttcggcttaaaggtgttattaacccanaaaaaaaaaaaaaaaaaaanaaaaaaaaaaaaaaaanaaaaaaaaaaaaaaaaangaanaaagnnaa

SEQ ID NO: 13688 - DNA, 503 bp, Arabidopsis thaliana
  unsure at all n locations
  Clone ID: LIB25-020-Q1-E1-C3
nngnnnggaatgtctagtttggacggccggtccgacaattaacgggnccacncacgcgtccgcnaacgcntccgctttttctccggagctctgactcttcttctctccggatccaaaaatgaatcgtctcttttctctcttctccatagctctgatcgctttcctctgcctccaccatcatgttctcgcttcttcctcttccgacttcgaaggtttcgatgctgaagacgacgatgtttcagaagattccactgagcttcaccactctctccgtcctcctcttctgactcagtctgagtcaacggttctggatctggacccatctcccgattctgattctactcctgcatctaaatctgatcctcccactcagaccgtgaagccttcgtcctccatctccttcgattactgggatgaagatgagttcgaaggattgccggaggacgaaaaatctacgggagtctccggttttttccgatgacgcctcctcctcctggccgaat

SEQ ID NO: 13689 - DNA, 434 bp, Arabidopsis thaliana
  Clone ID: LIB25-020-Q1-E1-C5
tatctctgtccaaataagaacaaaaaaagacaagattcagaaaaaaatggaggtttcgatgagaaagccttatttcatagaagaagaagacgatggttttgtttctttatctgagatggaagctggagtttcaagtccttcttgttacaactatcctcagagttattattataaccatcatcatcatcagtactctgtttcatctcccagatctggaaaatttcatgattttagattcgacaatagctattacggttatggacagcctcatttcttggactcttgcttcctctgcaagaaacgtcttggtgataacagagacatcttcatgtacaagaggagacacaccgttctgtagtgaagagtgtagagaagaacaagatagaaagagacgaagcaaaagagaagaaacagagtctgtctacatctgtgaa

SEQ ID NO: 13690 - DNA, 524 bp, Arabidopsis thaliana
  unsure at all n locations
  Clone ID: LIB25-020-Q1-E1-C8
tgtcctgcccgggtnctaccggaaccganaatcccgngtnngccccacgcgtncgcgaaaaaacaagagaatcgagtaatgcaacaacaaggtgaaccatcggttttgagtttgagacccggcggtggcggcggcaaaagcaggcttttcgtccctcgctttagctcctcttcctcttttgatcttaccaatggcggctccgaagaaaccccttttcccgtcaagagagaaaattctggtgaacgtgtgaggttttcccgagaagagatacttcaacacaaaaaatctgttcaagtctccgatgaaattcctagacgctgtaagggaatcncagttgagctttttggggaaaaacaaaatttggggggaatcatgcaagccgagaagtaaaattaccaaatcnatactcaagcatccgtcataaccgaagactgaataaccctttactnggnaaaaatncnttccccanaantccaaacccctnggggaaaaaaaaagggttaaagggaanaacccccccttaa

SEQ ID NO: 13691 - DNA, 443 bp, Arabidopsis thaliana
  unsure at all n locations
  Clone ID: LIB25-020-Q1-E1-D2
atctcttacaagactgtttttgtgttcaattttgagtagatatggaagtggttgctgttgggtcaatgaagacgcagagacaggagacatgggcttgctctgtcactgagtcttttctcctcctcgtcggaaagaatctggcttgtcttctccttgtggcagaatcattactgataggtttggttgctgttgaccagaggttgtctgtcaaggagggttacaaaagaggaagccgtattgaggaaaacaaagatgctaatgacaatgacgatgacgacgatgatgaaagacgctgatgaggacgacgatgatgangatgatgctaatgatgaagatttctcaaggggtnaaagggaataaaggagaaaaagaagctgattcaaangatgattctgtgaacaatggtggaagaagaaacnatgatgaagatgacgatgatgang

SEQ ID NO: 13692 - DNA, 507 bp, Arabidopsis thaliana
  unsure at all n locations
  Clone ID: LIB25-020-Q1-E1-D6
nnnnnngnnngnttcgtcngcctgctcgtaccganccgaaaattcccgggnccacccacgcgtccggaaacagagagcattatcaattattaacaattacacaagacagcgagattgtaaaagagtaagagagagagaatggcaggagaggcagaggctttggccacgacggcaccgttagctccggtcaccagtcagcgaaaagtacggaacgatttggaggaaacattaccaaaaccatacatggcaagagcattagcagctccagatacagagcatccgaatggaacagaaggtcacgatagcaaaggaatgagtgttatgcaacaacatgttgctttcttcgaccaaaacgacgatggaatcgtctatccttgggagacttataagggatttcgtgaccttggtttcaacccaatttcctctatcttttggaccttactcataaacttagcgttcagctacgttacacttccgagttgggtgccatcaccattattgccggtt

SEQ ID NO: 13693 - DNA, 523 bp, Arabidopsis thaliana
  unsure at all n locations
  Clone ID: LIB25-020-Q1-E1-D7
gangaaannnaaggatttagtctgcccnggttcgtaccganaccattaattcgcnnggccccccacgcgnccggaaaactttgtagttgaccggatcattctcacttcgccggccgacgttcttccttccgccgtcggtatctatatttacgatccacgatctctcttgctgtttctgtcttcatcgtgacgaaaatggctgctcgtatcgggatcttctccgtcttcgtagctgtattgttatctatttctgcattttcctcagctcaggatctccagatcgtaaatgccgagcgaaggattgatttaagctcacatatcgtgaaggccttcttgactctcaaggttgaaatattgggaaagattcctgctgcannaatngcttcttgctttcccacctacccaagattaaagaatttgggctatggtacaagcccctngcaactactgggcaaagaaagaagaagaaaaacttaatttgccaatttanattgtanaaaccaacttgancaacctgatgcac

SEQ ID NO: 13694 - DNA, 510 bp, Arabidopsis thaliana
  unsure at all n locations
  Clone ID: LIB25-020-Q1-E1-D8
ggaataaagntatattacggccgagtggtaccataccttantcggcccggccccccacgcgancgcaaangaccactgcacaggcatgcaccgtcttcctctctctcgctctctttgtcgcaatctctggaatttgtgtgatttttcggaattgcttttttaagtgtcactcgtggttgggttcatctcttagttcgaggagtgttctatttttggggctttattgattccatcttctcccttgccgtttatgggataaaatcaacatcaatgagggctttcatgtgagattttgtgtgtgaattttaattcanatggntgatatgcgtagacganatggaantgnaggttcctctaatcatgaaaggaatgangcaagatantgtttcnaaatccagaganctttggactttgatttgncctgcgatactctttnccntcatgnnatttggtgacaantgcnctnattcttctggtagttatgtttaagtccattgctggatttngatt

SEQ ID NO: 13695 - DNA, 425 bp, Arabidopsis thaliana
  unsure at all n locations
  Clone ID: LIB25-020-Q1-E1-D9
ctagttctcgtttcaccaacttaaatctgaatgcatctcatcccggaggcatcaaacaagaagttagaagacgacagtcacagcatggatggcttcacagactggatcctaatgaaccggtaatgctattcacaaaaccgctggttcccgataaactggcagctgcagggattgttcctccaacaccggattcatcaccaggtcaacctccaagtcggtttcaggggaggattgggcgtggtggccgaattattttcgatagatggaatccgttgatgcaatctcacattaattgtggaaactcttattacattgctccaaatcaccggtctaccaacttcgattgagatattttcacaatcttgctttgtaaagaattttccatcancaatggtgtatgcaataacgattctcanctaaataat

SEQ ID NO: 13696 - DNA, 449 bp, Arabidopsis thaliana
  unsure at all n locations
  Clone ID: LIB25-020-Q1-E1-E1
ggcgatttccccatacttagaggtcaagagaaataaaatatttttccggcgacgcaatggcttcttactccggttgtttcttcgtcgttactttggcagttctgtcacaatttctcttagccccagcttcagccttggtcaacagggaatacatcgattccaattgccaaagagtcaaaaacaaagccttctgcatccaaactttgaccacctatcctcctgccgctgctgccaccggcctgttaccattggctgaggccgtggttggcttgcaatatcccactgcgagaagacagctggtttcgcagcagagacagccaaaaaaggacgcaacattgaagaactcaagtttaaacgaagtgncaacgaagcctaatgttgggtatttttggcgtctctaaaagaagcgcctccaactgggaaactcaaaggactcaaccaagacaang

SEQ ID NO: 13697 - DNA, 438 bp, Arabidopsis thaliana
  unsure at all n locations
  Clone ID: LIB25-020-Q1-E1-E11
gagaacatcatcaatgaagaccaattgcgagatccgacaacaccgcttcttttgatttcgatcttactttcctggatctcatagttaatctggtttgagtctagaaatgtcgagtgatgcagctcgtacgccattgttacccactgagaagatagataccatggctcaagatttcaacctgaactcaagaacttcttcttcaagaaaacgaagattgcgtcgctctagaagtgctcctcgtggtgattgtatgtacaatgatgatgtcaaaatcgacgaaccacctcctcatccgagtaaaatcccaatgttcagtgatctaaacccgaatctcaggcgagtgatcatgttcttggctttatatcttaccattggtacgctctgtttcnactcgtgagagaccagatttccggtcataaaaccagtggtgtggtanat

SEQ ID NO: 13698 - DNA, 422 bp, Arabidopsis thaliana
  unsure at all n locations
  Clone ID: LIB25-020-Q1-E1-E12
catctctaaatctcaaccgtccgatcaaacaacttacacaacttccgtgctggagaaataaaaaaattaggtatttaataattcatcattgccattggattgtgtgtggctgcgtcagtaaaacgtattcttaaaagcaaccattggtgtgattgactctataagagaattcgtcagcgtgaagcaatctccaatctaatcgcagcatatcttctccgattcctattcgtctctgcaattgaatcttccggtaggcgaagatggcgacgtctgcgaggatttgttgcggaggaggaagtgcatgcgccgttcgttgtgatcgtcgcacgttaaatttgaattctcgatcgtcatgtgttgttccagtgacgaatcgacggnatatgtgttgcgattgggaanatttnatgttcatggaggat

SEQ ID NO: 13699 - DNA, 505 bp, Arabidopsis thaliana
  unsure at all n locations
  Clone ID: LIB25-020-Q1-E1-C1
gnngnnngnaactgtcncgcttgntcgtgccggtccganaattcacgggnccacccacgcgtccggaaaaaataaaaaaaataatgggtcatcgaacaagaatgatccttgtcctaaccctagttgtaatgtccatatggggttcggacgcatcagcaatgcaaaagacgaaattcgacgccccacttttgactgaaaaaatcgcgacaaatagatcgataattgtagatatcgaaggcaaaggagactacacttcggttcagaaagccatcgatgctgtccctgttggtaactctaattggattattgtccatgtccgtaaaggaatctacaaggagagagtgcacattccggagaacaagccgttcatattcatgangggtaatggaaaaggaaaaacggtgatngaatcctcncaaaattcggtccacaatgttgcctcaactaatttcaaagtccaaggtaatcacttgtcccctttgggaancancatccgaaatgatgc

SEQ ID NO: 13700 - DNA, 424 bp, Arabidopsis thaliana
  Clone ID: LIB25-019-Q1-E1-A10
tctctctatatcggagccgtcatgaatcatcgtcggagctcgatcgtactattgatcctctcaattttatctcccgtgacactctctatacgatacgagctactttctgggcacacgaaatgcatctcagaggagattcacgcaaacgcaatgaccatcggaaaatacagcattataaaccctcacgaggatcatcctcttccttcttcccataaagtcaccgtcagggtcacatcgccacaagggacggcttatcacgaatcggacggagtagaatcgggacaattctcgtttgtagctgtggaaacaggggattacataagttgcttctccgccgtcgatcacaaaccagagacgacgctgatcattgactttgattggaggacgggtattcataccaaggattggtcgaatgtggcaaaga

SEQ ID NO: 13701 - DNA, 487 bp, Arabidopsis thaliana
  unsure at all n locations
  Clone ID: LIB25-019-Q1-E1-A11
ttttagnnnnncggtaccggttaatacattccggccgtcnacccacgcgtnnganatccatctttttcccccaaattcatatccttccttagatatttttctccntcttcttcttctagattccagctactccagaagattcttcgacttaatctgatgtgaggnggaagagcaatagaggaagagaagaatcagaaaaaatggatccggcgactaattcaccgattatgccgattgatttaccgattatgcacganagtgatcgttacgacttcgttaaagatattggctctggtaatttcggcgttgctcgtctcatgaccgatagagtcaccaaggagcttgttgctgttaaatacatcnagagangagaaaagattgatgaaaatgttcatanggagattatcaatcataggatcatttgagacatcctaatattgttaggtttaaagangtgattttggcgcccntccnatttggctagtgg

SEQ ID NO: 13702 - DNA, 430 bp, Arabidopsis thaliana
  Clone ID: LIB25-019-Q1-E1-A12
ttcgcaccactaccttctctccgtcagttgaaaccgaaacacatctctatttccgccgcagcgccgaagaaaaaatcggagactgtcacggcgccgacaccggcagcgaagaagaattcgagcgtggaggaggaaacagaagaggaagtagaggaagatatgccgtggattcaagagaaggcgttagacctagtcgagttcactggatcggtgagtcaggcgattcctggtcctcgagttggaagtagcaaattgccgtggatgctcgccgttccgttagcttacgccggcgtcactttcgtcactgctttcgtcaaaaccgttcagaagttcccttctcctaaagctcagcgcaagaaactggtgaatcagaatgctatgctttgcagatctatagatgagctattaaggaaagctggaacagtgcata

SEQ ID NO: 13703 - DNA, 505 bp, Arabidopsis thaliana
  unsure at all n locations
  Clone ID: LIB25-019-Q1-E1-A2
nnnnnnnngnaactgttttcctgcncccaacggtccnaaaatcccggggtcnacccacgcgtccgcangttgaaggaggttggaaaattaatggacaaaagcgttggattggaaacagcacctttgcagatctgttgatcatctttgcgaggaatacaacaactaaccaaatcaacgggtaagtcagattattggctttcttagatctctcagattttgtatcttaggtgtagaggtcgttcccagaaaactgaaggtaatgaggtggctcttgatttcatcttatggtagtgctgtaaaaatccattttcataaagaatgctaaataggttgctacgcaattgaatgttctgaacaataaatttggtaaggaccgttatcaagtgcatactggactaatgtctggctcctcattcatcttatatagactatatttcctgcattagaaacttatcagcaaccctctttcagattcatagtcaagaaagatgcgcctggcctaaag

SEQ ID NO: 13704 - DNA, 428 bp, Arabidopsis thaliana
  unsure at all n locations
  Clone ID: LIB25-019-Q1-E1-A5
ttgttggtgtggcaagagttttggatcactggcgatgttgatggaagaggtgttccagtatcaaatccgaatggaccactagaccatgaattattcctcttatgtgctcgtgatactgtcaaacttctgagaaaccatccaagcctggctctttgggtgggtggaaatgaacaagttccgccaaaagacataaatgaggctctaaagcaagaccttaggcttcattcttattttgaaacccaattgttatcagacaaagattcagatcctagtgtttatcttgacggtactagagtttatattcaaggatctatgtgggacggctttgcagatggaaaggggaacttcactgacggnccttatgagattcatacctgaagatttttttaaagacacatattacaagtatggggttcaatccggaggcc

SEQ ID NO: 13705 - DNA, 429 bp, Arabidopsis thaliana
  Clone ID: LIB25-019-Q1-E1-B10
aaaatccagattttgtgtttagccgacgagaattgggaaaaatgtcgtgtacgcatgatcacaactgcgaagatcatgagtgttcttccgattggtctctctacaaacacattgatctctccaaggtttcagctctgaatgaatctgtttcgggaagtgcaaaatcagtcttcaaagcgtgggaacagcgattacactcttctggggagcatttggagagcaatgagggagaccctgaattgcttgtttttgtaccatttacatcagacgtcaagatcaagagcatatcaattgttggtggccctgaaggaacaagtccttctaagttgagagtgtttatcaatcgtgaagggattgacttctccgatgctgagagtatgcaagccgttcaggaatgggagttagctgaaaatttgcaaggagtcttag

SEQ ID NO: 13706 - DNA, 511 bp, Arabidopsis thaliana
  unsure at all n locations
  Clone ID: LIB25-019-Q1-E1-B4
gnnnnnnngnaacttcnttccgctccctaccggtccgaaanaatcccggggtcnacccacgcgtccgaagaaaatatcacagcaaaaattttctcgagaaaatccgaagaagacaaaaaaaatggcggatcagctaaccgatgaccagatctccgagttcaaggaagcttttagcctattcgacaaagacggagatggttgtatcaccacaaaggagcttgggactgtgatgagatcacttgggcagaacccgacagaagccgagctccaggacatgatcaacgaagtggatgcagacgggaacgggacaatagatttcccagagttcctgaacctaatggcacgtaagatgaaagacactgattcagaggaagagcttaaggaagccttcagggtttttgacaaggaccagaacggtttcatctcggcggctgagcttcgtcacgtgatgacaaatccntgggggaaaagttgacggatgaagaaatcgatgagatgattcgagaagntg

SEQ ID NO: 13707 - DNA, 427 bp, Arabidopsis thaliana
  Clone ID: LIB25-019-Q1-E1-B8
gatctttttttactttcctcagagctctctcctctccgcaacttccaccaccaccaaatcggaactctcggcgttctactccgtctccggcgttacctccgtcgatttcatcttctcagttggaaggagtgaattgagaaggtcgggccaatatggcgaacttacaagtttctgggatactcgaaaagtttcagatgacgggtaaagataaagattacagatacatggcaacctctgatttgcttaatgagttgaataaggattcctttaaaatcgacctggacttggaggtgagattgtcgagtatcatattgcaacagctcgatgatgtggctggtgatgtttctggattggctgttaaatgtcttgctccattggtgaagaaggttggagaagaacgaattgttgaaatgaccaacaagttatg

SEQ ID NO: 13708 - DNA, 407 bp, Arabidopsis thaliana
  unsure at all n locations
  Clone ID: LIB25-019-Q1-E1-B9
aacacaaaaaaaaataaaacctttctatttctcttcctcctttgagctttgacctctcctccatctcccccacccttttatgcaacaatgggaaattgttgctctcacggacgggactcagccgataacggagacgcattggaaaacggagcttccgcttcaaatgctgccaattcgactggtccaaccgcggaagcttctgtaccacaatcaaaacatgcacctccttctcctcctcctgcaaccaaacaaggccctataggccctgtcttaggtcgacccatggaagatgtaaaagcttcatattctttagggaaagagctcgggcgangccaatttggtgtcacacacctctgcacacaagaaggcaacaaggtcatcaatttgcttgcaagacgattgcaaaa

SEQ ID NO: 13709 - DNA, 501 bp, Arabidopsis thaliana
  unsure at all n locations
  Clone ID: LIB25-019-Q1-E1-C1
nnnnnnnngnaacngttttcctgccccaacggtccgaaaatcccggggtcgaccaacgcgtccgaaaaacatggccgaagtcaagtatcctctggaccattttaagacgttcaatgaattcttcgtacggggagttaaagcctggtgcaagaccaattgcgtgcatggatcaggatgatgttgctgtatctgctgctgattgtcgattaatggcatttcaatcggttgatgatagcacacggttctggatcaagggccgtaagttttcaatcaaaggcctccttggaaatgatgtgcagtcggatgctttccttgatggatctttggtgatattccgattggcgccacaggactatcatcgttttcattctcctgtctctggtgtcattgaaaagtttgtcaatgtttctggaagcttatatacggttaatccgattgctgtcaatagcaagtactgtatgtgttcactgagaataaacggaccatccgtaattatatcaa

SEQ ID NO: 13710 - DNA, 433 bp, Arabidopsis thaliana
  unsure at all n locations
  Clone ID: LIB25-019-Q1-E1-C11
tactctcaagtctaaagaagaataaaaaaaatggatgaagaagttgagaacaaagtgatactccatggatcattcgcgagtccttanagcaaaaggattgagttagccnnaaggcttaaatctataccttaccaattcgtgcaagaagatctccagaacaagagccaaaccctgctccggtataacccggttcacaagaagatcccggttcttgtccacaacgaagacccttatagaagatctaaagtccggttttgggctaactacatccaattacatctttacgatttggtgataaaagtggtgaaaagcgaaggagaagagcaaaaagaaaagctctcacangaagtaaangagaaantgagcgttatagagaaagaagggcttaaggagattttctctgacactgatggtgaancaactgtgacgaacg

SEQ ID NO: 13711 - DNA, 431 bp, Arabidopsis thaliana
  Clone ID: LIB25-019-Q1-E1-C12
aaacccattttttatttggatttttcatttgattttcccgggaaagttgtaatttttatttttttgagggagattgaaaaagttcgataaaaatgtggggagccgccgcagaaccagcagattcttattacctgattcgtcctgagtgcactgatgtccccaataccaaattcaagatcaaacctggtaaaactctaagtgtaagaaaatggcaagctgcatttacaacagaaggattccttgatattggcaagactctaagtcgaatccaacgaggggggatccatccatcaattagaggagaagtctgggaattcttacttggttgttatgatccaaaaagcacatttgaagaaagagagcaaatccgacaacgtagaagattgcagtatgcttcttggaaggaggaatgtaaacaaatgtttccccgt

SEQ ID NO: 13712 - DNA, 430 bp, Arabidopsis thaliana
  unsure at all n locations
  Clone ID: LIB25-019-Q1-E1-C7
gtggccagctcagactcagcgaatgcgaacttatacaaaggtgcaaaaacgaggctcagtggggagatcaatagacgtcaaccgttacagaggttacgatgagctgaggcatgatctagcgcgcatgtttgggatcgaaggacagctcgaagatcctcaaacatctgactggaaacttgtttatgtcgatcatgaaaatgacatcctcctcgtcggcgatgatccatgggaagaattcgtaaactgtgttcagagcattaagatcctttcatcagctgaggttcagcagatgagcttagacgggaactttgccggtgtaccagttactaatcaagcttgtagtggcggtgacagtggcaatgcttggagangtcattatgatgataactcagccacttcgtttaaccggtgatggcagaagaattctctc

SEQ ID NO: 13713 - DNA, 418 bp, Arabidopsis thaliana
  Clone ID: LIB25-019-Q1-E1-C9
ggcaattcttagtttctcttctatcccctttctgggttttgtttgaaccctagctcgctttggatccagtggttttaagttaaaggtaaatttatcgaaagtaagtagattcctaatggcagcttccaatcattcatctggtaaacctggaggagttttaagtgatgctttatgtagggagctctggcatgcctgtgctggacctcttgtaaccctacctcgtgaaggggaacgagtttattatttccctgaaggccacatggagcagctcgaggcatcaatgcaccaaggtttggagcaacagatgccttccttcaacctcccatctaagatcctctgtaaagttatcaacatccagcgcagggcagagcccgagactgacgaagtatatgcgcaaataaccttattgccagaactg

SEQ ID NO: 13714 - DNA, 382 bp, Arabidopsis thaliana
  unsure at all n locations
  Clone ID: LIB25-019-Q1-E1-A1
gtcatcatctctgacagcaaggttattcacataggcaaagaagtcattcttttgcatgctgttttccaataaagttaattctctaacagaacaagtttcgagattggatattgacgacaacgatatgggacttggaggtagtgaaacaatggaatgcaagtgtggtatgcctctgtgtatctgtgtagctcctcccaaatcaactgataaaccaaacccacctgctaccattgctcctgtggttcttcctcagttgaagtcagaggcttcagcaaaaagtaaaggttccacttccagcagcaatgctagatnagctctaaatgctggactagacaacccccaaagagactatgaaaccagtngggaaggattaagagaaacc

SEQ ID NO: 13715 - DNA, 436 bp, Arabidopsis thaliana
  Clone ID: LIB25-018-Q1-E1-E5
tcagattcgattctccgaccttcctcagttcaaaatgttcaacgtgaaggtcctacacgtgaagttttgagctggctgttttagcttttgtgctgtttggccataattgatgcagccttttttagaaacatagtacaaatatattatttttgattcttgattgttttggcttactttggtggatgttgtgtgatcatcgttcaaggcttctttcttctattatgcgccttgattcatctcacaaaacgcggaaccagcagctgtttgagagaggttaattatgtcagatagatgggctcgacaaaacgcggaacgtcctgcaactactttggctgagagaagaaatgtgaataaaaacgtttcacttcagactgggtgaagagttttcaatggagtttcttaaaggatcatactcctgtccaatcccctatcgttg

SEQ ID NO: 13716 - DNA, 511 bp, Arabidopsis thaliana
  unsure at all n locations
  Clone ID: LIB25-018-Q1-E1-E7
nggnnnntnnnggttatgtccaccctggtcgtacagtcctctattcccgggggcccccacgcgtccgganagaagccattttccgttccatcaagtctcttagccagagtgatggaagatggcgctacagctccaacaatcccgaatcaagcacttttgctgctggcttagcctatgaaacgcttgctgggagtgatttcattnagcaccttcaagagtttggttcatccttgattcaatccggtgaaagacngggtatccctggaagcntttctgacagtatccannnntatgatgatggggacattttattttgatgagaagtctgttgatgcaagtcaaggcccgatctcaacaactgcatcagttatanagggccacgtcatttgcagcttcagaatccacaggattgaaccttccaggtgataagatanttggtctggccaaattcttctgggtgttggaatccctggtgatgccaaggacttcttcaaccaatngatgcactang

SEQ ID NO: 13717 - DNA, 436 bp, Arabidopsis thaliana
  Clone ID: LIB25-018-Q1-E1-E8
agagagagaaacaatggaaacggaaggaagaagacgagaagtggttgtttcatctctccaattcgcttgctccgacgatatctccaccaatgtcgccgccgctgagcgattagtcagagaagctcacgctaaaggagctaatatcattcttattcaggaactttttgaaggatattacttctgtcaagcacaaagagaagacttctttaagcgagccaagccttacaagaaccatcctaccattgcaaggatgcagaagctggcaaaggaattgggtgtagtgatacctgttagtttctttgaggaggcaaatactgcacattacaattcgattgctataattgatgctgatggaactgacttgggaatttataggaagtctcatattcctgatggacctggttatcaagagaagttttatttcaatcctgggaga

SEQ ID NO: 13718 - DNA, 440 bp, Arabidopsis thaliana
  unsure at all n locations
  Clone ID: LIB25-018-Q1-E1-E9
ctncaattgcagctagagagccatggcctcctccttcaacgaagaaaccgccaagaagttgcttacccaggttgagttctacttcagtgacagtaatctacccacagacggatttctcaanagggaagtcaccaagagcaaagatggcctggttagtttgcctctggtttgttccttctctcgtatgaggaacctccttggcctcggtaacatcaatagagaagacatccctccgaggattgtggaggaagttgctaatctcttgcgcacctctgattttcttaaagtttccaataatggacaaaggatcggtagaggaactaaactctccaaaccggaagangtgcttgaacaagtccacaagaagaanccttgcggcttcancttttgagtacagcantaagatggaggatgtccaaccttcctctcccaataaaggc

SEQ ID NO: 13719 - DNA, 489 bp, Arabidopsis thaliana
  unsure at all n locations
  Clone ID: LIB25-018-Q1-E1-F6
ctgtnnncccgnacgtaccantccanaatcccnggnccncccacgcgnccgtanttttaaaatgaaaattttaatatagaaaaatatattcttaacaatttcagatttttgtgataaaaaccgaatctagtttgaattagtatgatacggttttggactcaacatcnttttttttatgaagacgcaatataacttcatttacatttcttaaaggaagtttaattttggtgtagtttttcttcatttattttggttgctcttcagttttgttattggttttttaagatgtgaatgtaaaaatattatttgtaattagaaaaaaaaaactatttaaactgaattaaaatcatccagttggccttttatgaatttcactacttaattaagattgaaccaattttacttaattaagattgaaccaatattatttggttagcctccctagtgaaacattttcataatgaaatgattgttacttaacattggtgg

SEQ ID NO: 13720 - DNA, 435 bp, Arabidopsis thaliana
  unsure at all n locations
  Clone ID: LIB25-018-Q1-E1-F7
ttttcttctctcaacgccgttgattcgccatcgtcgctaccgattgtcttgaggtttacgacttttggactaatctcctctgtggagagcaatgactaaaactcgtgggactgatatgacaaagaaaaagggtaaacatgtttctgaaatggatttcaagactcatcagcatactgaatttttcgataagttgatagagctcacgcctgctagattctacttacctgatgagacagaaaggaaatggtatccaggtcttagcaaggctcaaaaagctagagccaagaaaaaaacaaatgacaacctaaagaaggcgaagagagataagttggacccagagaagtctgctttgacgactctcgatttactgaaggagaagatagagaaggaaagattggcttcacagaagcagaagcntaagaagaaacacgccgg

SEQ ID NO: 13721 - DNA, 436 bp, Arabidopsis thaliana
  unsure at all n locations
  Clone ID: LIB25-018-Q1-E1-F9
aaaccagagaagaatcttctttagagagatgggtgtggtagaagaagctcacaacgtgaaggtgattggttcaggagaagccacgatcgtgttaggtcacgggttcggcacggaccagtcagtatggaaacacttggttccacatctggtcgacgattaccgcgtcgtcctctacgacaacatgggagccggtacgaccaaccctgactatttcgacttcgatcgttactcaaatctcgaaggctactctttcgattgattgcaatcttggaagatctcaagattgagtcttgtatctttgttggccactctgtttctgccatgattggtgtcttggcttctcttaaccgtcctgatctcttctccaaaatcgtcatgatctccgcttctcccgagatacgttaacgatgttgantancaangtgggattccaaca

SEQ ID NO: 13722 - DNA, 518 bp, Arabidopsis thaliana
  unsure at all n locations
  Clone ID: LIB25-018-Q1-E1-G1
nnnggggnnnnngaantgtctccctgntcgtnccggtccganaattcangggtcgacccacgcgtccgctctcttgcaacggcgaatccgccgtcgcaatctgcgatacttataactggaatcctcgtcgacgatctaaagtaccggagaaacgtcatcctcctaagcttcgggttttcaactacgacgaactcgccgtcgctactaacggcttctccgccaataacttcctcggaaaaggaagtcacggcagagtttacaaagcagttctcgacgacggaaagcttctcgccgccgtcaagagaacaacaatcaccactaccgttggtaataacaataacaacgtgagtcaggtagacaatgagatcgagattctttcacggggttcgtcaccgttggatggtcaacttaatcggttactgcgttgaccaccggagggaaaaacaaaagctgttagtccgtcgaagtacatgcctaacggtacgcctcacgatnagttacattctcgttagttcgtt

SEQ ID NO: 13723 - DNA, 109 bp, Arabidopsis thaliana
  unsure at all n locations
  Clone ID: LIB25-018-Q1-E1-G2
ctttaccagctctgaccgatncactatccggttatatgatgtcgcctcacgntggcgatccnatgatcctaatctcatccangagcccattatcgacaggttgantgac

SEQ ID NO: 13724 - DNA, 413 bp, Arabidopsis thaliana
  unsure at all n locations
  Clone ID: LIB25-018-Q1-E1-G7
gctcttctccgtactctcttaactttcaaaacctcacgaaatcatgcttttaaacatttcttcttctccaatttctcatcgaattcctcatttcctctctgattttaacaatcccacttcaaatttccctccgaaatccaaaacccatctcccaaaatctaatctctccactttatcgaaccatagcctctacggcaccaagaacagagctttctataaaaacaagagaaacccttataacagaacacaagctctcggtcgattcgatttcggaagtctcgaatcagttctcgaagcttccgctgttctcactgcgatcatcgtcgtacacgagaccggtcactttttagctgcttctcttcaaggtatccgtgtgagtaaattcgcgataaggttggtccgattcnactaaa

SEQ ID NO: 13725 - DNA, 428 bp, Arabidopsis thaliana
  unsure at all n locations
  Clone ID: LIB25-018-Q1-E1-G9
ggagagttcaaaggaagaagataactccaataccagagtgaaagcattcaggaaacatgcctcctcagaagattgaaactggtcatagcgacactattcatgatgtggtcatggattactatggaaagcgagtagcaactgcctcgtctgactgcacgatcaagataaccggagtaagcaacagcggtggatctcagcatctagctaccttaaccggtcatcgaggtcctgtctggcaagtcgcttgggcgcacccaaagtttggttcacttctcgcttcatgttcctatgatgggcaaattatattatggaaagaaggtaaccaaaaccaatggacacaagctcatgtcttcacagaccacaaagtatctgtcaactctatcgcttgggctcctcatgaacttngactctcccttaacttgcggagc

SEQ ID NO: 13726 - DNA, 463 bp, Arabidopsis thaliana
  unsure at all n locations
  Clone ID: LIB25-018-Q1-E1-H11
gagagaaaatcttcatcgacaaaattcgattcagctgctgcagctattcacttcgtccatagcacgtagatggcagaaaaggcctgtataaaacgtcttcaaaaggaatatagagcactttgcaaggaaccagtctcccatgttgttgctcgtccttccccaaatgacattctcgagtggcattatgtgctggaaggcagtgagggaacaccttttgcaggtggattttactatggaaagatcaagtttcctcccgagtatccttacaagccancaagggattacaatgactacaacaaaatgggtccgattccatgacacaagaagaaaaatttggttaaccnaatgaattggattttccatccaaaaaaagcctgggaatncnnatgttgggccggtatccaaagcaatactttanaagggnctttcccccaaatttaaggaangggtaaccaattcccgg

SEQ ID NO: 13727 - DNA, 496 bp, Arabidopsis thaliana
  unsure at all n locations
  Clone ID: LIB25-018-Q1-E1-H12
ctttcgnccgnncgtaccggtaangatactcccggnnggccgcatccgaaagggangcttttgctacacggaagataatgtctttgattttcgcacagatgatggccaagatgttgaaggcttgccaactgaaggggttgagattacgtgtttccatctggatggatcacactatatggtctacacaccttcagatccacttctctttgttgctgctaaggatcaaaatgggctgctgcaaatcgctgatgatgaactcttagacgatccagctgtgatcagcgccatagacgaggaaaccgaattcaatgccttggtggaggaagaggcggctctcctggaatcactgcttggggaaagaatttgatgttttcatagggactacntagctttctttttgtantccataantgcaatgccatgtaatcctaaattttctcctagnaaaactcatttttgccctttccaaatctccccntgttgacaaattgggttc

SEQ ID NO: 13728 - DNA, 356 bp, Arabidopsis thaliana
  unsure at all n locations
  Clone ID: LIB25-018-Q1-E1-H8
gagtatcgtgatcgttcttttgagggtcatcggtgaattcacaatctttgttttttatgtgttatcttctctagtgatagattcgctatgtgtaacttggaaattggaatagtcaaatctctgtgacatataatgctgataagagtgttcaatgaatcaagtatttatcaggttttagatgatagagttcgaatctaactcatgtagtgacttggttatatgatggttagaaattaacaatgaagtttcctgtgtattgatagaaaaaaaaaaaaaaaaaaaaaaaaaaaaaaaaaaaaaaaaaaaaaaaaannaaaaaanagnaaaaaggaannanngangnnnaanaannaaat

SEQ ID NO: 13729 - DNA, 511 bp, Arabidopsis thaliana
  unsure at all n locations
  Clone ID: LIB25-018-Q1-E1-E2
nggggnngnnggaactgtctccttgntcgtgccggtccgaaaattcaagggtccacccacgcgtccggcaatgttagctgctgggttgcagaacatcggcggtggagatcctttaagacagcagtttgtacagctgcaagagcctcaccaccaatatcttcaacaatcagcttcccataattctgatttgatgcttcagcagcaacagcagcaacaagcgtcacgccatctcatgcatgctcaaacacagattatgagtgagaatcttccgcagcagaatatgcgacaagaagttagtaaccaaccagctggacagcagcaacagctacagcaaccggaccaaaatgcatatcttaatgctttcaaaatgcaaaatggccatcttcaacagtggcagcagcaatcagagatgccatctccctcgttcatgaagtcagattttactgactcaagcaacaaatttgcaacaactgctantcccggcttctggagatnggaatcctttgaattt

SEQ ID NO: 13730 - DNA, 503 bp, Arabidopsis thaliana
  unsure at all n locations
  Clone ID: LIB25-018-Q1-E1-B11
ggnttnngaacngtcntntctgntgcccggtccgacannaacgggtngccgcacgcgtccgccnacgngtccgcaattcttttcaacgttcaagtcttacatgagctttatcagctcagcatcgatatccgcatcgaaaaacatcgatgtggagatgaatgggagatgtgaattgctttccaaggctatgtctgcattgactggaagcaaaagcagccaatcatcggagttaaaaatgaccatgttgtcaatgggaaagactttggttgagcagaagaggcaaggttcaaggatgatgtcattgaagcaaaagaaagagttggttgtggctatggtgaaatggactcgaatggttataacattccgtaaagagtgtcgccgagaagagaggaaagtcgattgatgaatcgtcttacggtcttgatgttgatgttaatgccagcattggaagttcaatggaatgatggctcctcntcatccgataatgagaagttctcaaaaca

SEQ ID NO: 13731 - DNA, 516 bp, Arabidopsis thaliana
  unsure at all n locations
  Clone ID: LIB25-018-Q1-E1-B12
gtgngnnnnnnggaactgtnttttctgntncccgcgggtccggaagancccggggtcgncccncgcgtccggttnantgcaaaggttgattgtgatgagcaaaagagtgtctgtactaaatatggtgttagtggatacccaaccattcagtggtttcctaaaggatctcttgaacctcaaaagtatgagggtccacgcaatgctgaagctttggctgaatacgtgaacaaggaaggaggcaccaacgtaaaattagctgcagttccacaaaacgtggttgttttgacacctgacnatttcgatgagattgttctggatcaaaacaaagatgtcctagtcgaattttatgcaccatggtgtggccactgcaaatcactcgctcccacatacgaaaaggtagccacagtgtttaaacatgaagaaggtgtngtcatcgccaatttggatgctgatgcacacaaagcccttgggcgagaaatatggactnaagtggnntcccnacaatnaaattcctcc

SEQ ID NO: 13732 - DNA, 319 bp, Arabidopsis thaliana
  unsure at all n locations
  Clone ID: LIB25-018-Q1-E1-B3
ctgttcgtccccccggtcgtncnaactaaagggtcnaccgacccgtccgagaagatngagatcagtgaagaagaagaagacgaaatcacgaaaccatgttcttgttcgattggttctacggaatcttaacttcgttagggttatggcaaaaagaagcaaagatcttgtttcncggtctcgataatgctggcaaaactacattacttcncatgctcnaagacgagagattagttcagcatcagccgacgcaacatccaacgtctgaagaacntagcattggggaaaatcnanttcaangntttgaattgggtggncntca

SEQ ID NO: 13733 - DNA, 510 bp, Arabidopsis thaliana
  unsure at all n locations
  Clone ID: LIB25-018-Q1-E1-B4
ggtggggntggngcaatntctnctgctgtgccgtccatcattcaagggggcccccacncgtccgcnaacgcatccgcccacgcgtccgcccacgcgtccgcggacgcgtgggaatcgttcctcctcctcctcatcttcctcacagctctcgcttctgatctcttacttgcacagaaatcganaagnttcnaaagcttttgttctattctcttcgttttcctctgagtttattanctttcactgatgggtttcggttctgtttatcgatctctaacggnaatatttcctcanattgatgcacgaattttgagggctgttgcaatataacacccaaaggatgctgatgaagctgctgctgtggttctttcaagagattangtccttccttttccncaggatttgttcnataattttactcaatcttcgtnnaagtcatctggaagcatttcagaggccgaagaanatggtttgggnagatgtttncttccaggggccgcgncttttcttggg

SEQ ID NO: 13734 - DNA, 436 bp, Arabidopsis thaliana
  unsure at all n locations
  Clone ID: LIB25-018-Q1-E1-B8
gagacaaaaatccttcgcaatcgagcaacggaagctcctgcatccaccgtccaaatctcttctaacgtcgccggagatcggtaaaccggttcttcatcccgtattcatctcttattgagatcgttggggaagtagagaatggcgacgtttgagctgtacaggagatcgacgatcgggatgtgtctgacggagactttggacgagatggttcagagcggtacgctgagccctgagctagctatccaagtccttgttcaatttgacaagtccatgactgaagctctggagagccaagtgaagaccaaggtgtccatcaagggacacctgcacacttacaggttctgtgacaatgtctgggaccttcatattacaggacgcaatgttcaagagtgacgatcgtcaagagaatgtgagccgggtgaagataatggcatng

SEQ ID NO: 13735 - DNA, 511 bp, Arabidopsis thaliana
  unsure at all n locations
  Clone ID: LIB25-018-Q1-E1-C2
nntgngnnnnnggaactgtctccttntcgtgccgtccgaaaattcangggtcgncccacgcgtccggtttaaaacaaacgttaaaccatattcccagagaaagggcacgctagaccccgccctcgaagctgctgaagcagcgcgacaaattatcaccgtgaatcaaaaaggtggcgctaatttcaagacattaaacgaagctatcaagagcattccgacaggaaacaagaaccgtgtgatcatcaagttggctcctggtgtatacaatgagaaggtcacaatcgacatagctcgaccattcattacattgcttggtcaacctggtgcggaaacggtcttgacttaccacgggacagccgctcagtacggaaccgttgagagtgcaactcttatcgtctgggctgaatatttccaggcagctcacctcaccattaaaaacactgctccaatgccgaaaccaaggttcacagggacaagctctaacaatgangatnaacgctgataaaggcag

SEQ ID NO: 13736 - DNA, 508 bp, Arabidopsis thaliana
  unsure at all n locations
  Clone ID: LIB25-018-Q1-E1-C3
gnngnngnaactgtctcctttctcgtgcccgtccganaattcaagggtccncccacncgtccgcgnaacgcntgggcggacgcgtgggcttgcttcctgttattgttggggatgctgctgttgagaaacttttagacgtaccactacaaggccacactgaggaatgccctgatcagttccagttcgtgtctgctgttgtcgacaaacttggatatgaagttaaaatggtgaaacttacaggtagaattgtaaacacttattatgcaagtctatgtcttggcaagcctggggacattgaggctatatgcattgattcacggccatcagatgccatcaatgttgcaagagcatgccaggctccaatatatgtgaacaaagcaatagtgctggaagaggctatcaaaattggttatggaggcagaccgcagagcgcaaagcctgttttcaatgttatccttgacaacgctcccgatggaccaaattctttatccngaagagcntaaattag

SEQ ID NO: 13737 - DNA, 510 bp, Arabidopsis thaliana
  unsure at all n locations
  Clone ID: LIB25-018-Q1-E1-C4
nntggnnnnnngnaactgtcnccctgntcgtnncggtccgacattcangggtccncccacgcgtccgcaaggctacttgaaaaagagcaccgggcttttgccttgttggctagagggtgcatgtcttcacctattgaaagctgtatagctgatgccattagagcttccagtactgataattacccagtagaaagcatcttaaacacactcgagaagagagatcggattggtcgaaccccttcttattggtcgagtactgggcaacacaaaactacggtgcccgaatcacttctttacaagttgattggtgatttgtgtctcattactgaagtcagcatccatcctttccaagcttattttcagcgcggtcatccgatatactcttcacattatgttcgtttccggttgggtcacgaaaaggacaattcacctcactacaacaattcacaggataaaaaaggtgagccaagaaagagttcaattgaaagcaactatgtatgggacttacac

SEQ ID NO: 13738 - DNA, 433 bp, Arabidopsis thaliana
  unsure at all n locations
  Clone ID: LIB25-018-Q1-E1-C5
agtcgttttctttcctctccccactttttcagcgtttcttagatctctctctctctgcaaatattcaccattgtcttcttcttcttcaacgacgcttttggattttcntctctaagcaatgaagtcaggaagttctacattgaatccttacgcagcagcttatgtaccactctcgaaaagagaaggttctttggttgatacaaagcctgtcacacaacaacacatgcagcagcagcaccaccagcaacaaccttattatgggtatggagttcaaggaatgggaagttatcaaggaactcaaatgtcacctaagaagtcaccatctgagatggtatacaatcatcagctgaaggatgaggatttggagatggacatggatattgagtatctattagctacataccctgggtcttcacaagagtctatcaatgng

SEQ ID NO: 13739 - DNA, 440 bp, Arabidopsis thaliana
  unsure at all n locations
  Clone ID: LIB25-018-Q1-E1-D11
gcgctcgttcgtcttcgtcgcccattgaaggaggtcagaccagaagtcgcacgcgagccttataattgtgtaatccttagggttttgctcgcgatttctggtactattaggtttccgtcgatttcttcgtcgggataaaaaccctcttcttcgccggagggagaacacggcgagaattacacagctatccttcgaattccgtcgctggttagcttaggactttctgattctgtcgctttaatcttcttctctccatgacacaacgggtattccaagtctggaaaggaagcaataaattcatcctgggtgggagattgatatttggaccagatgctangtcactgcctcttaccttgctattgatcatagttccggttgttttgttctgtgtanttgtancaaggnaccttcgcaatgaattctctccctacaatgcggga

SEQ ID NO: 13740 - DNA, 509 bp, Arabidopsis thaliana
  unsure at all n locations
  Clone ID: LIB25-018-Q1-E1-D6
ggnggnnnnnnnngttctgtctgccctgntcgtaccgatccganaattcccgggnccacccacgcgtccggttgaagaatcagatgaagcaagaaagaagttcacaaacgcaaagtccatatcttcagctcagtactttggggatcagaacaaaaacgctgatctggaatcaaaagctacgcttgagatagatgctgagcctgcaaacttctgaagcgctgatttttacggtcacgaccaagatgattccaatattgatataacagctagtgatctcattaaccgactttctttccaggcgcaacaagatctatcgtcgctggtgaacatagcaggagaaacaaagaagaagcttggaactttggcttctggtatcttcagtgatattcaagacagaatgctgtaagaagaccacgagtctctcacatgtttttgatattgacagagaaaaaaaagtaagaaagaagctttgtcggaaaacttccaatganggtcaagtttctctgttt

SEQ ID NO: 13741 - DNA, 505 bp, Arabidopsis thaliana
  unsure at all n locations
  Clone ID: LIB25-018-Q1-E1-E10
ngggngnntngagcattttcnnggtgntccggtccgnanacanncgggtngcngcccgcgtccgcccacgcgtccggttctcttctctccatctgtctgccgctcctttaacgtcggttcccattttcttattcacaatgaccccaagaaactcgaggagatggaaaaaagcaaaaggtannacaangncaaaaaagctttcttcgagaaccagagcacattgattccaagattgaatgctgtttctggtggattagtttctctgagttttggtgatagatcagattaacaggcagaattttgagaatgtcgacagtgggaaattcaacgaacatattttggcaagaatcccccattgggaaaactgaaaggcagaagttgttaaatcagaagggttgtgtggtgtggatnacagggctcagtggctcagggaaaagcacgttanccttgctcgcttantagagagctgacaaccgggggaagcttcatanattcttgagggngc

SEQ ID NO: 13742 - DNA, 497 bp, Arabidopsis thaliana
  unsure at all n locations
  Clone ID: LIB25-018-Q1-E1-E12
gnnnnngaangttttcggccncccggtccgaaaaccgggtcgacccacgcgtccgcccacgcgtccgcccacgcgtccgcggacgcgtgggtgagtttgaaaataaagtttctgcttctgcttgtcttgtatcatcatgttgattctgcctctatcgtcaagtttcttcctggttttgaaggccctcttcctttcgaacttgaaaccgggtacattggtattggtgaggacgagaatgtgcaatttttctactatttcatcaaatctgaaaacaatccaaaagaagatcctcttcttatatggttaaatggaggacctggatgttcttgtcttggtggtattatttttgagaacggaccggtgggtttgaagtttgaggtgttcaacggaagtgctccttctttgttctctactacatattcatggacaaagatggcaaacattatatcctggattaaccaantaggatntggcttccccaatcaaaaaaatccaat

SEQ ID NO: 13743 - DNA, 479 bp, Arabidopsis thaliana
  unsure at all n locations
  Clone ID: LIB25-018-Q1-E1-B10
actgtctttcngntcncccggtccgganaanaacgggtcgncncacgcgtccgcaanaaaatatcacagcaaaaattttctcgagaaaatccgaagaagacaaaaaaaatggcggatcagctaaccgatgaccagatctccgagttcaaggaagcttttagcctattcgacaaagacggagatggttgtatcnccacaaaggagcttgggactgtgatgagatcacttgggcngaacccgacagaagccgagctccaggacatgatcaacgaagtggatgcagacgggaacgggacaatagatttcccngangttcctgaacctaatggcacgttnagatgaaagacactgattcagaggaagagcttaaggaagccttcanggtttttgaccagggaccagaaacggtttcatctcgggcggcttgaaccntcgtccccgtnaatgnccaatccntggggggannaagtttnaccngg

SEQ ID NO: 13744 - DNA, 456 bp, Arabidopsis thaliana
  unsure at all n locations
  Clone ID: LIB25-017-Q1-E1-A1
tcatgaaattcgccgtcctttcaagcgacgacctatctccgatcaacagaaacgccgagagctttctcttatcgtcagactcagcatcgcagtgatgctcagcagcgagcccgaaacctcgcctcttccttaatctcgctccaatcctcctctcccgatgtcgacccagagatactatctgaagccgtgcctgagcttgtaggaaccgaatcggaatcgagtagctttgacgttcgtcaagcttcgaggctcagaggacctgaggcacgcaagtggttcgcaaagcagctaatgttacctgaatggatgatcgacgtccctgataatttaagccaagattggtatgtgttagcaagancagctgggaaaagatgttttgtagnttcaatctgatnggaacaactggttagtagagttacgaaatgggtccactttgcnaccttttcccttccggna

SEQ ID NO: 13745 - DNA, 521 bp, Arabidopsis thaliana
  unsure at all n locations
  Clone ID: LIB25-017-Q1-E1-A10
nnnggngggtnngagtggtcncctgggtctaccggcccggacatcccggaacgacccacgcgtccgaagaagaagaagaagagcttcaagaagacaaatacactattttttatcgtctgcaatgcccttaccctttgaagagtttcaagggaaggggatttcttgtttctcttctttctcgtcttccttcccccaaccancgtcgtctccgcttttgagccaccgcaaagcaagaggcggcgaagaagaagaggaagaagttcccgcggcggagcctacctctgttctggactccctcataagcccaacctcttcctccacggtgtcttcctctcacggcggaaacagcgccgtcngaggcggcggcgacgccaccaccgatgagcaatgcggagccattgggttgggtgattgggaggagcaagttcctcatgaccacgaacagagcattctcggactcatcatgggagattccacagattcctctcttganctcaacaagcattctccaaacatctccc

SEQ ID NO: 13746 - DNA, 65 bp, Arabidopsis thaliana
  unsure at all n locations
  Clone ID: LIB25-017-Q1-E1-A12
tccgcttacccggngttgcccntccggtgacattccaaagggtatttcggtaactaattcngctc

SEQ ID NO: 13747 - DNA, 423 bp, Arabidopsis thaliana
  unsure at all n locations
  Clone ID: LIB25-017-Q1-E1-A2
tcgnnntcngnnattttcncnccttcncntttcanncgncnnncnncgccgcaatcttcttcatcggcctccgttctacatcgacggtgtttgccgtaacttctgtcaaactctcagaatttgcttaagtataccacctaactcgagacgctatgaccgttttctcagttcagtccactatcttcagtcgagcctccgtagctcttctctcgagcaatggcttcaaacgattttcattcgtttcttcgttttcttcctccgccgcttactctccacctaaaatgaggaagcgtcgctaaccaatcgtctctgctgttgatattggtggcgtcccaatcgctaaaaatgatgtggtgagaaaaggatgattcaacaaataatgtnccaaantcgatttccccnaactaagaatgcagctacaca

SEQ ID NO: 13748 - DNA, 416 bp, Arabidopsis thaliana
  unsure at all n locations
  Clone ID: LIB25-017-Q1-E1-A4
ncagcngnngcnannnngaagttttgggtttttgggttatcaacaatggtggaagcaaaagatcaagatatgggtgatggtatgcaatgtataaaccatccatttactaaaaacccaggtgggatctgtgctttttgtcttcaagaaaagcttggaaagcttgtaacttcatctttcccacttcctaaacacctcacttcctcttcaacttcttcttctccttccttcagatctgactctgttgggtagcacaaccactgcctctgccgcaaatctctcaacgtctctttctctctctgtctccgggagcaacanaacaacaacaacagcaagcttccggtttttgttagcctaaagaaagaaagaagaaagatggcntacnngcntcctccctcctccntccgaacaannggnna

SEQ ID NO: 13749 - DNA, 502 bp, Arabidopsis thaliana
  unsure at all n locations
  Clone ID: LIB25-017-Q1-E1-A5
tnnnngntttttngccccanngtcngaaaccngggtcgncccacgcntccgcaaaaatcttccgttgtctacgtttctggtgcttcccccgaaatccccatttctcaggcttctccacgaatgggagctcaatccccaggacctcccattgttaaagtggtgcttcgccaggacttgaacaagaagattctaattgctcttatagtctcatcatctctgctctgtgtcacagtcatgttccttgtgtatctcttgctatggaggtacaggaatatgaagaacagcttcaccggtatcaaacgcaaatccgattcggtgaagagtgtaaccacgaaaccgactgtacacaagattgattctgtgaggaaaggaaccatccctgtgtatgaatatcaattgctggaatctgcaacaaacaagtttagtgatagtaatgtgttgagccgangtggtcgtggatgccnttaanagagcttgtccccaataaaaaatcccaancccg

SEQ ID NO: 13750 - DNA, 449 bp, Arabidopsis thaliana
  unsure at all n locations
  Clone ID: LIB25-017-Q1-E1-A6
natcctnagcagggagtggnnngcnaanganccaganggnccgcnnnnnctccttgacagcggacgtactctaggatcccccgacggtgttctcatcaatgggaaatctggtaaactaggcggaaacaacgctcctctcttcaccatgaagcccggaaagacttacaagtacaggatctgcaatgttggattcaaatccactcttaacttcaggatccaaggacacaagatgaagcttgttgagatggaaggctcccacgttctccaagaacgactacgactctcttgatgtccacgttggacaagtgcttcgcccgttctaagtgaccgctgaccaaagtggccaagaaactactacatnggttgcatccaactaaggttctcaaagaaaggaanttgaancactgtttgggtgtgatgangnctaacgaaagggaagcaaccnttca

SEQ ID NO: 13751 - DNA, 511 bp, Arabidopsis thaliana
  unsure at all n locations
  Clone ID: LIB25-017-Q1-E1-A7
tnnnnnttttttgccccnngtccggtaaccagggtcgacccacgcntccgcgctgctctacagaagaaatgggacaacatatgccaaagtatccatcacactccggcgtttcctaaacttggttttcagtcggtgagtccgcagttcccagttcagactgagaagagtgtgagaactcctacaagctatttggagacgcctaaactgctgaatccgccaatctcaaagccaaaacctatggaggatcttacggcatcggtgactaaccgcacagtgagtttgcctttgagctgtgttactacagattttgggttgggagtaatctatgcatccaaaaaccaggaatcaaaaacaacgagggagaaaccgatgctggtgactctaaactcttctttagaacatacatatcaagaaagatttcaagtctctcagagaaatactcctctccgtaaaagttgcctggcaagacccgaagctgttaatgccataagncaaaattaatctgcgggng

SEQ ID NO: 13752 - DNA, 543 bp, Arabidopsis thaliana
  unsure at all n locations
  Clone ID: LIB25-017-Q1-E1-B1
aaactcgatcgatcaattcgttgttcgtctacatcgattccttcagaacctantgatcctctgttttggttgatcgattaagctaaccatgtcttacaaaccaagcgcgaagactgaggttcgccggaacaggtataaagtatctgtggacgccgatgaaggtcgccggagacgggaggataacatggtggagatccggaagaacaagagagaggagaacttgcagaagaagcggcgtgaaggttttaatccttccaatggcgtcacaagccaagggcaaaggattttctcctccgtctctcccctaacgggaaaccaagaattgggngaaattattacaaacaagaatgaattgcctggggagttaaatgttcaanaangggattagaagaccnttacnaaattttggaagggccnaaacggggctaaacctttccangggagaaattggcctttcaaantttgaagccccaaaaatccctncccaaatncaaattggaaaattttngnttccaaaaccccnggggggttttgtttnccccc

SEQ ID NO: 13753 - DNA, 54 bp, Arabidopsis thaliana
  unsure at all n locations
  Clone ID: LIB25-017-Q1-E1-B10
acaacaatctccaccgtcttcantctgtttccttcgccgttaaagctccgtcna

SEQ ID NO: 13754 - DNA, 464 bp, Arabidopsis thaliana
  unsure at all n locations
  Clone ID: LIB25-017-Q1-E1-B2
nnacncgnnngcntcgtccgngtctgncggcntcncgcancnngtnccacctcnctcanggtcnntngcgcttcctcctacgccgatgagcttgttaagacagcganaactattgcgtctcccggacgtggaatcttggcgatggacgagtcaaacgcgacttgcgggaaacgtttggattcgatagggctagagaacactgaggcaaatcgtcaagctttccggactttgctggtctctgcaccgggactcggacagtacgtctccgggcgcaaattctatttgagggaagactctgtaccaagtctaccaccgaaggcaagaaaatggtcgacgtccctcgtccgaacaaaaacaatgtcccctggtatcaaaaagtccgacaaagggtttggtggccactttgttgggattcaacaatgagtcatgggtgncaaagggactaaaatgggccaacatcccca

SEQ ID NO: 13755 - DNA, 520 bp, Arabidopsis thaliana
  unsure at all n locations
  Clone ID: LIB25-017-Q1-E1-B5
tnntggttttctggcccccangtcnggaaacccgggtcgncccacgcntccgctcaatcacacacaacaacaagaacaaggacaagcttctacatttctcttaacataacagacagtttttgatctgggttttcaagtccggtgttgatcccattgagtttcggatctaaaagatccgaatattcagacggatcaacaagagaacaagaaaaaaaaaatgaatcttgagaatgttttggaattcaccagctttgattactggtttaattggagagtgttactatgtgctatatgggtaatagttccaatgattgtttctttattagtcttatggaagtatgaagatagttcagttcaaactcaaccatcacttaatggtaatgaagtttttgtgcaatgatgatgntttggagaccttgtttttgaacgaatccaatccggggttgggttggntgggttttccggggtcccccgggttttgtttcccntccttgccnaannaaataattggcccggggtt

SEQ ID NO: 13756 - DNA, 397 bp, Arabidopsis thaliana
  unsure at all n locations
  Clone ID: LIB25-017-Q1-E1-B6
ttcnnnantcnnnannnnnntncgttttctacctccaaaccactcgtcttcctcaactttcaaactcgtcttacgtcgagatcttccgatgtatcggtcaatctcaagaagaagaataatccgtggctcgacccgtttgatagcggtgaagacccggataacgaatacgggtccttgtttgccgacggaaaacaagacgaggatccaagaccaccggataatcctgataacccttacggcttcttgaagtttccaaagggttacaccgtcgagcttgcttctttaccgttgaaaatcagaggagatgttagacgatgttgctgcgttatctccggtggcgtttacgagaatctactcntttcccgactattcagctaatcaaagacaggtatcctgg

SEQ ID NO: 13757 - DNA, 436 bp, Arabidopsis thaliana
  unsure at all n locations
  Clone ID: LIB25-017-Q1-E1-B7
aaactcacattctcatttttttctcaaaagaacaacgaacagctcttatatttttttacaataattcttcagagctgtttaagttcaacaacaatttgattaagagaaaaccacataaatattaattagtgtaacgaaaaacacaaaacaaatatgtcgtacggatacgacgatgaatccaagaggaagaggaggtacattgttatcaccatctcctctgttcttttgatctcgatggtggttgcggttaccgttggtgtcagcctcaataagcatgacggtgactccaaaaggtaaagcaaaaggtaaatgcttccgtcaaggccgtcaaaggatgtttgtgcaccaactgattacagaaaagacttgtgaagacactcctgattaagaacgggaagaacacaaccgacccgatggaattnggtaaaactgcntt

SEQ ID NO: 13758 - DNA, 435 bp, Arabidopsis thaliana
  unsure at all n locations
  Clone ID: LIB25-017-Q1-E1-B8
ggnangnnttgagcnngttntanncttnagncntcnttttncnnccngactcttctggacatcgtttcagctcatttgaagcttaagccaactttgcctcagattgaacctccacaaacgttgaaggatgttgaaccttacaccgttaaagtagtgatagtctttgtgtccgacctcgagaaagaatgtcccaagacaaataaattcaaggctttctttgagaaacttagggcattcgccaagtatgtctgcccaataaaaagaaaagaccaagtagattacgaccgagacatgaaggccaaggctggaggcctcttccaagtcatatcttcttttgccgattgggaaaanataanaaaaggaaattcaagaaggataaaatgggaaagttaataataccnttaaagtttaatgagaattccttgcgactaaana

SEQ ID NO: 13759 - DNA, 129 bp, Arabidopsis thaliana
  unsure at all n locations
  Clone ID: LIB25-017-Q1-E1-B9
agtatctacctctcatgttgacaagcgagtacaggatctgtccggtgagcatcaatctccaagganatgttccttcngtagtgttaaaganagagcttatcctaccanatccggattantcacatcatg

SEQ ID NO: 13760 - DNA, 441 bp, Arabidopsis thaliana
  Clone ID: LIB25-016-Q1-E1-H9
tcttctccacgccatttccagaattttcaggtgttcgtgaaaagatgaattttaagaatgtcaaagttcccaaaggtcctggtggtggtgttatagctgcggtggttattggggggctcagtctttacggtgctacgcacactctctacaatgtcgatggaggtcatcgagccattgtctttaaccggcttgttggtatcaaagacaaggtctaccctgagggtactcaccttatgattccatggttcgaaaggccaatcatctatgacgttcgtgcaaagccttatctagttgagagcacatctgggagccgtgatctccagatggttaagattgggcttcgggttctcacccgtcctatggctgaccaattaccagaggtataccggtcccttggtgagaattaccgcgagagagtcttgccttctatcatccacgaga

SEQ ID NO: 13761 - DNA, 715 bp, Arabidopsis thaliana
  unsure at all n locations
  Clone ID: LIB25-016-Q1-E1-G7
gaactttctcctagctggtggtcgaagatctcgggtttcttgttcggaattcaccccgaacatgtagatactcggttgtgttcagcgctccgtaggacagaagggtacctgcacaatcttcccactgttaacaggtttaataccctcccgaaccctcgattaactatacaagacgcaatgccacacatgaggagttggtggccacaatgggatatcagaaagcatttcaatagcggcacgtgttctaatatgaaagatgcaactcttctctgtgaacgaattggtcgccgtatagctgaatgcaagggaaagcctactcaacaggaccagactttaatacttcgacattgtcacacctccaatctcatttggatagcaccaaacatcctctcacccttggagcctgaacatttagagtgcattatgggatatcaatgaacacacaaacatcngtggtggaaggttngctgaaagattgaaattgtttgattactgcttccaaacagacacattgggttacatctcccgtactcaagtcaagttccccaaggttaaaattttacacccntaacnggattggggtgcgnaattcattggnccttttggaaccaccaaaagggtanccngtaaacccgtggntnaccctaaanacgaaaaatggggaaattcggaaaacgtaccangaattnaaaatcaaacttaggaaangggggnc

SEQ ID NO: 13762 - DNA, 626 bp, Arabidopsis thaliana
  unsure at all n locations
  Clone ID: LIB25-016-Q1-E1-G8
gcgttctgattactgattcttcattgacggtaggagtcaccacttttggcggcgattccttgttctctattttttttgcacaagcaacatttagcttctgcaaactccagttcatctctcaaccctcatatcgccgtgttttctcgctctagtaccgcgagctcggacgaaccaggaagcaatccgttaatctagaagcggtgttgagaagatgacgattacatcaaatatctctgtacagaacgataacctcgttgttcaagggaagactatccttaccaaaatccctgacaacattatcctaactccggttaccggtaatggattccgtttccggttcaattatangcgccacgtttgaacaaagcaagagtcctcatgtgttccccaaccgtgtantgganggtcctccgttcaagtgctgtttccnggnttaaagctaagggtgggatgactcaagaagaatngggaaanctgttggnaaaagacaattcccttttggnngaacacaagtttaaaggctaactgggaaaagcaaagggattaanggntttaaaggggaaatggggggaatnaatgccncccnaacggggtttaaaaaccggttcnttttcncccctccnccc

SEQ ID NO: 13763 - DNA, 441 bp, Arabidopsis thaliana
  unsure at all n locations
  Clone ID: LIB25-016-Q1-E1-G9
aaaaacaaaggaaatcgccatggaagacgttaaccagttgttcgatgctgctttcgagttcgcacactatcccggcgctcaaaacgaaacttccgttaaggaattcctcgatcgcttccctcttcctgttatcttcaatgctttgcaaaccgatccggatataccaggatttgaaaacacgttggtgacttgcttggagaggttgtttaagactaagtatggcgcttcacttattcctcagtatatgcctgttctgcaagttggtctcaaggcagattctgcagttgtgaaatctctgggcttgcaaaactgttctgtgtctcttggaggattgcgatacaaacgacgtttcttctgttcagctagttgttaacaatggatataccctcttctacttgactatatcattaacagcgatgatgaanttgcaaatgctgcaag

SEQ ID NO: 13764 - DNA, 771 bp, Arabidopsis thaliana
  unsure at all n locations
  Clone ID: LIB25-016-Q1-E1-H1
gnntnnnggnaantgtttacgccntnccggtanncgtccanaattccanggtccacccacgcgtccgcacacgcgtccgctttatcaaaaccagagaagaccaagaagaaggcatggctagatcaccatactatggttcatcttacttagactacctctctctcccaaacccacatctctgtttcctcttcatcgtcgtcttcttcgtgttgtccttcacatggtacttgaacttcgagtccatcatcgaagacaccctggaccacctcaagctcgtctttatattcacccctctcttcctcctcctcctcgtccactttttctccggtggcctctccttctacgtcccctggcctgaacaagactccattcaccgtgctggttcttccccttggggcgtagcagccgtgctcgtgctcatattgttcatggtttcgtaccagtcagatttccaggagangtggttcccgtttggggctaagtanatnaatcaaagtttatgatgaccaagctttagttattctccaagctatatatgggaacatccaatggttaaatatcaaaagtancctggaagttaatcctgggtaataataagaattantttanaaggttattttttccttaaacttttaagncctttccaaggttnaaactttaaaatttaaaannaaggttttttgggnaaatggaaaaactttttttttccaaaaggggcccttaannaannaanaantttgggtnnaanngtttccntttaaannaaaangg

SEQ ID NO: 13765 - DNA, 435 bp, Arabidopsis thaliana
  unsure at all n locations
  Clone ID: LIB25-016-Q1-E1-H10
ggctaaatgacattcctggtgtgtcctgtcctgatgacatagttatgagattctcggtgctacagaatgaggtggttcaaagcactatgaagattggggaagcaagtacccgtattaaacaactggaggagacactggaggctatacaacttggcagacagaatgctgtaagtgaggctgcattagcgaaagagaaatctgaggctctcaaaacagacgtgaagagaattgaagtaatgctcactttggtcacggaggagaaagaacagttgaaagctgttgttaatgaattaaggaagtcaaacagtgaaggatctgtgtctggagccgcagatggagcccttaatcaagggtttgaatcctctccttgcaaagaaaggagaactatattaaggnttttagagcaaggatntaaatcaactgaaaggatntcaa

SEQ ID NO: 13766 - DNA, 722 bp, Arabidopsis thaliana
  unsure at all n locations
  Clone ID: LIB25-016-Q1-E1-H2
ngnntgnnggnaagttntaaaactgnncacgcctgccaggtnanggtcccnaggtcnacccacgcgtccgcaaaaacccagaggacatggagatacacatgggaagctcaatctcattctccaaaccttcgtctctttcttttcgattccaaaactaaccctaagatccactgcaaaagcctcaatgtagcaaccatcgtcggaaaatctcaacttctcgtcacatggatcaacgaagaagatgaagaagctgcaagcaaagaagagattgtttctcttctagttcctatccctagggtcttactagatactgaatctcctgtaaatttcaaagctttagacgatcacatcgaggttagacttgttctgttactccctgttgatcatcctttagtctcaagacttcaatttggtgactgattctaagagaaaagtcggggcctttaatgatgggttatgattcaaagactctatctttaatgggaaggagttcaattttactggtaaaagttgttcaaataaggttaacaaagaaaggnactttttanantttctcaagaaaatgccgttcaantaaattgggngaagaatcaagctggataatttgggtttgggnacttggttgttgttcaatttgggngggaattantgannaaanatggttgttaagtnnannnaattcgtaaannttgnnccaantgggttgtgttaacttagggcaa

SEQ ID NO: 13767 - DNA, 726 bp, Arabidopsis thaliana
  unsure at all n locations
  Clone ID: LIB25-016-Q1-E1-H4
tgttagctatgaccaacctttattttaagacggcttttcttctctccctcttgttactgtccttctcttatcagagtaaactaatcgaggctaaggaagacaaagaatgtaacgacagcaaatgtcttcctaatccgtcaaggataaatttagaagaagggaatataaaaagaatcgatgtgaatcatggagggatatgtgacacataccttgagtgtggagggttggcatgttctgattatcgtcgggcgtgttgcgtaaacggaaaatgtgtatgccgcaaacaaggccaaactctgcccgattgcccaaactaaattatgtattgacaacattccaattaataaaataagatgtcttaaaaacaannnaaaaaaaaaaanggngggcgctccaaaaggttcaaacctacgtncgcnttcaagccacgtcatanctcctccaanagtgtcanctaaantcaantcactgggccgttcgttttaaaacgtccntgactgggaaaancctggngttacccaacttaatcgccttgcaacaaatcccccctttcgcaaactggggttaataccaaaaaggccccaccgattgcccttccaaaaattgcccacccnaatgggaaatgggacccccctgtncgggcataacccggggtntggggtacccactnacgcnaatncaagccnagccgcccttcntntcctccttcccanttnggttccctaa

SEQ ID NO: 13768 - DNA, 706 bp, Arabidopsis thaliana
  unsure at all n locations
  Clone ID: LIB25-016-Q1-E1-H5
actcaaggtcttgacggtctcggtgacagatgcaagaagtactacgaagctggtgctcgtttcgccaagtggcgtgcagtcctcaagatcggagagaacgagccatctgagcattccattcatgagaacgcttacggattagctagatacgctgttatctgccaagagaacggtcttgtaccaattgtcgagcctgagatcctagtcgatggatcccatgacatccagaagtgtgctgccgtgactgagcgtgtccttgcagcttgctacaaggctcttagcgaccaccacgtcttgctcgagggtacactcttgaagcctaacatggttactcccggatctgacaagccccaaggtttcacctgaagtcatcgctgancanaccttccgtgcccttcanagaancgtccaacaagctgttcaancaattgcctcctaactggaggacaaaacgangaanaactacaagaacttgaacgccatgaaccanttnaagaccaagaaccaanggcattgtcnttccaatcggactncgttgcaacagtcaacntnaanacatggcaggttaanagggaattcanggaaccaanaggcttnttnttagggcaagggaatctgaaccaacccgaactaaaggngcccnaacttgggtgggcaantnaaccttcctgggggttaantttggcactcccggttaattggnttt

SEQ ID NO: 13769 - DNA, 660 bp, Arabidopsis thaliana
  unsure at all n locations
  Clone ID: LIB25-016-Q1-E1-H6
gctccttctcccgttgaatcgggtcgaaatagttgaactttaagccaaaccctaagcttgaggaggaagaggaatggtcggcgtgatgaacagattgaggaatctggacgcttaccctaaaatcaatgaagatttctacaggcgtactctttctggtggtgttatcaccctcgcctcttctattgtcatgcnaattctcttcttctccgagcttcagctgtacattcacccggttactgagactcagcttcgtgttgatacatcaagaggagagaagctacggattaattttgatgttacattccctgcgcttcaatgttccattaataatcctgaatccatggatatcaanttgggaaaagnancntgatgtncgacatgacantaattaaangngattaaacnctcctngnaatgtcatccaaggaaaacaagacggaattggcatactaagantggaaaaccttacaaaacatggnggaaggttggaaacatgaaacatacggggtccngttgggcaaaactcaaatgagcttgtgtatcaagtagganttnnaactacgaanaaagtgggctccggccgacaacacattaaaaaggttggcaaggaaataaaggagtgantcagtctgattaaatgggatttntcnganttcacgt

SEQ ID NO: 13770 - DNA, 71 bp, Arabidopsis thaliana
  unsure at all n locations
  Clone ID: LIB25-016-Q1-E1-H7
aagttcacgcacctccgggaaggangatatccttgggtaaacncttcactggggggcaattaaataanttg

SEQ ID NO: 13771 - DNA, 75 bp, Arabidopsis thaliana
  unsure at all n locations
  Clone ID: LIB25-016-Q1-E1-H8
agtttnccgttgggctcaanaaagaattcccttgaaactccgccaaaattttcaaaggaactggcnaactggtnt

SEQ ID NO: 13772 - DNA, 725 bp, Arabidopsis thaliana
  unsure at all n locations
  Clone ID: LIB25-016-Q1-E1-G6
gntnnngnangtcnagccnnncgtagcctntaaaggtccananttcccgggtcnacccacgcgtccggagaaatggaggaaggtctaaagattcaatctttggtcatttatccgatcaaatcttgccgtggaatctctgttcctcaggctaccgttactcatactggttttcagtgggaccggtattggttagttgttaactataaaggaagagcatacactcaaagagttgagccaacccttgctcttgttgaatcggagttgcctaaggaagccttcttggaagattgggagccaacaaatgactcattgttggtgataagagctcctggtatgagtccgttaaagataccgttgactaggccaantcggtancagaaggtgtgtcnatgtgggaatggtctggctctgcttttgatgaaggagaagaactgcnaaatggtttcagattancttggaaaacaaagccgtttggttcggttaataaagatactgaaactagaccttcactcctgantttcaccgggttacncacacatcatggatagttccgttttggttcacccaggtcttaacattgatacctctgcaaacggtgcanaacgtttaaccaatctgtgaaatggtcttcggtaaatnttggataacaaataacattactcagggttggaantcccganggcangtacanaccggtntggaacnacangaaccggaattnttna

SEQ ID NO: 13773 - DNA, 80 bp, Arabidopsis thaliana
  unsure at all n locations
  Clone ID: LIB25-016-Q1-E1-E8
ccatccnaataacctgggcactaaggaaaaaggtttttcctggattaacnattgtgcntccaaaaaccaatcccttttga

SEQ ID NO: 13774 - DNA, 440 bp, Arabidopsis thaliana
  unsure at all n locations
  Clone ID: LIB25-016-Q1-E1-E9
ttggggagaagagttgtttcagcttcgaaagagcttactagtattcaacaatggcggatccgaccaggaaccgattctcgtcccgatccttttcgaactttccggggactacaaaagggtttctgcgtgggcattttaccggacggagtcgacagaaattcggaggctttttctagcaattcgatcgccatggaagggatcttatcggagcttcgttcccatatcaaaaaggtattggccggaggtggagaggaagcggttaagaggaacagaagcagaaacaagcttttgcctagagaaaggattgatcggctacttgatcctggttcttcctttttggagctctctcagcttgcaggacatgaattgtatgaggagcctttgccttcangtgggataatcacanggatangaccaatccatggacgtattgtatgttt

SEQ ID NO: 13775 - DNA, 824 bp, Arabidopsis thaliana
  unsure at all n locations
  Clone ID: LIB25-016-Q1-E1-F1
ctcttttataatatctttctctcaatctatgtttagaagaatggtttcgtattctaataatcattttgcatacgcatttctacttcttctaacaatcggtaacacgcttgcattttcttcgagtttgccggatcatgttcaagatccaaatctagtcgttgacgacgttaacagaagtgtattcaatgcgtcaaggaggagcttggcctacctatcttgtagaaccggaaatcctattgacgattgttggcggtgtgaccctaattgggaaacaaaccgccaacggttagcagattgtgccattggatttggcaaaaatgctatcggagggcgcaaaggtcgaatctatgtagttacggatcctgccaacgacgattccgtaaaccctagacctgggactctaagatatgcaatgacacaagaaagaaccattaagggttaattttcaaagaagagatatgggccattaaggctcaaaaaaagaaacttatcaacaanatcctttcaaagaaccaattngaatggtaaaaagggctccaantggttcaaaanttaaccggaatggggcccaangcccttaaaaggatttccaactaanggcnaaacntaaacaatccannaaatttccaanggggaaatttaacaatnccaaaggaacnggtttaaacccaaggnntttaanggggggcaaangnnnttaaaaanaatngggnccaaaaatncaaaanccggggntgggtnggaattncaaatcccnaaatggggaaaaccccggggggggnaaaaantttgggnggggnaaaaaacctttttgggntttgacc

SEQ ID NO: 13776 - DNA, 436 bp, Arabidopsis thaliana
  unsure at all n locations
  Clone ID: LIB25-016-Q1-E1-F10
ttctaagcttttcatagaaagaagaagaaaaaggcggaattcgatggtggatgcgattcaagtagctgagctgagaagattcgtcgagcagttgaaattgaatccttcgattctccacgatcctagtctggttttcttcaaagaatatctccgaagtttaggagctcaagttccgaagattgagaaaactgaaagagattatgaagataaggctgagacaaaacccagtttctctcctaaacatgatgatgatgatgatgatattatggagtctgatgttgaactcgacaactctgatgtagttgaaccagacaatgagcctcctcagccgatgggagaacctactgctgaagtgaccgatgaaaatagggatgatgctcagtcagagaagaacaaagctatggaggnaatctccgatgggaagtttgacgaanct

SEQ ID NO: 13777 - DNA, 506 bp, Arabidopsis thaliana
  unsure at all n locations
  Clone ID: LIB25-016-Q1-E1-F12
ngnnngcannttcnnttngnnctgccggtaccganaccnnaattcgcnggtcgacccacgcgnccgattctctttggtgttcctggtgctttcactcccacatgcagcatgagccatgtgcctggattcattgggaaagcagaggagctgaagtcaaagggtatcgatgagatcatttgctttagtgtgaatgatccatttgtgatgaaggcatggggaaagacataccaagagaacaagcatgtgaagtttgtagcagatgggtctggagaatacacacatcttcttggacttgagcttgatctcaaggacaagggtcttggtattaggtcaaggagatttgctctgttgcttgataaccttaaggtaactgtagccaatgtcgaaaatggtggcgagttcacggtttccancgcagaggatatccttaaggctctctaagaaacattatcattcgcttgttgtantgtgaatctaaaccgctgtatgtgaagaaagagaaatat

SEQ ID NO: 13778 - DNA, 92 bp, Arabidopsis thaliana
  unsure at all n locations
  Clone ID: LIB25-016-Q1-E1-F4
aanctcagaatnctganctcgctgggattgggctgggatttcctcaaagcggttgaactgattgttacaaatgaacagctaatgcaatngac

SEQ ID NO: 13779 - DNA, 697 bp, Arabidopsis thaliana
  unsure at all n locations
  Clone ID: LIB25-016-Q1-E1-F5
atcaagtgtagaacgtttgatgaagcagataactaattttatgtcagatattgctgatgagttcaaaattgtggtcgtggacgcaataagatcgttgtgtgtgaaattcccactgaaatacagatccttgatgaccttcttaagcaacattcttagggaagaaggtggatttgagtataaaagagcaatagtagattctattgtgaccattatcagagatattccggatgcaaaggaaagtggactgcttcatctatgtgaattcattgaagattgtgaattcacatatctttcaacacagatccttcattttctgggaattgaggggcctaacacctcagatccaagcaagtatatacgatatatatataancgtgtgcatctagaaaacgccactgtccgggctgctgctgttccacacttcaaagtttgggtttatggttgaatccttgaanccccggattacngtccattgaancgttgcatctatgacagtgatgatnagnccgttataaggcaacactatattgagtgtcctgggggnnatggacggttacactntaanaaacaagggttccaattggtcccggangtccccaancaaanggaacnnnccgaaaatttnnccccgaaaactttnaacaaccctccaaggattacccaccccttnaaaaaaacccgggaaaacccggctggg

SEQ ID NO: 13780 - DNA, 63 bp, Arabidopsis thaliana
  unsure at all n locations
  Clone ID: LIB25-016-Q1-E1-F7
tggcaacaacngatttaattgccttaatgagnttgagaagacctgaagaacatagggttttga

SEQ ID NO: 13781 - DNA, 436 bp, Arabidopsis thaliana
  Clone ID: LIB25-016-Q1-E1-F9
agtagaagagaaatatcaaatttcccttcaaaagcctctcctctctttgttcaagtttttttccttggatgtgcatgtttcttgtggaacaaggcagttctgtttttaagtaaaattcatggcgacggattcgttcatcaagttaaatccaatttcctttaaccgtgcccgcttcgacctccgagattttgctggcataagtcctaaaagcatctcttctctgtgttgcattagcccaagattgatatcttgcaaccatttcagcccgagaacattgatatccggcgagaatggtaacatattgttttccaagaaaaagatccccgcgtttgtccgatgtcagacaagtcttgggatcggaaggaaccaaaaatggtgggagaaggaattgaaaccgaacatgaagtcggttacatcaccgcaagatcttgtctcc

SEQ ID NO: 13782 - DNA, 855 bp, Arabidopsis thaliana
  unsure at all n locations
  Clone ID: LIB25-016-Q1-E1-G1
nngngnnnnnnngnaantgtttacgccnncccgtagccgtccaaaattcnanggtccacccacgcgtccgcngacgcgtgggacgagtttccgctgatttttcgcaaggatggtaagacatgtgtgttttgggatgtggaggattacccaatcccagctgatctccatcctcgttcgatccggcggagaatcgtaaaggatgtgaagaaatatggttgtgatgcggaggtgtcgattcatgcttatgctaatgataatacggtctcggtaacaatgaggcgtcaattttcggctgctggaatcaaattggaagtgttcacccaagcaggggataaatatgcgagacattgttccttgtatggtgacattatgctgtggtcactggaaaatcctccaccatcaaatattattgtcatcgcaaaaataatcgatgacgacttggctgatcgtattggatgtttgactaccgtctggtcataagggcttctcatatcccaagttaagccagaatggctagaacggctttttccctgttggaaactatcctcgtttttggcancatanttgatggangattgccgaaatcatccgaaagcgaacaaggatngcttcccccccatgaantccgacnactaactttttgngtcaagttaatggntttgtgccaaaanttgaaaancaattttggattgaaaaggtttttaagaatggccaaaccaaaaaaatttaagttaattttgggcaaaaaaaaaaaaaaaaagggggggcccnccccaaaaggntncaaaccttactttncccttgaaaggaaaantaaaaaccctccaaaagggtncccnaaatttaattcccggg

SEQ ID NO: 13783 - DNA, 515 bp, Arabidopsis thaliana
  unsure at all n locations
  Clone ID: LIB25-016-Q1-E1-G10
nnnnnnnngnaantgtcnacttagnncggccngtgaccganaccgaaaattcncgggtcgacccacgcgtccgctttttttcgagattcagctgtaaaaccctaactagcgccatagccaaggaagctttcctcagatcgtctctccgaaattttccggttaatcgtcagttaaggggaaaattaggctatggcgatgttaggtgcacagcaagttccagcagcagcttgtactccagatatggttgggaatgcttttgtgccccagtattatcacatattgcatcaatcacctgagcatgttcacagattttaccaagagattagcaagttaggtcgtcctgaagagaatggtttaatgagcatcacttctaccttgcaagctattgacaagaagataatggcgcttggttacggtgtaatcagtgcagagatagctactgtggacacacaaagaatctcatggaggtggttataatgtactgggtgactgggtatttgacgggaaaagacant

SEQ ID NO: 13784 - DNA, 672 bp, Arabidopsis thaliana
  unsure at all n locations
  Clone ID: LIB25-016-Q1-E1-E6
gagaagtcgaaatgccagtttcagctccatctccgcctcgtcttcattctccgttcattcactgtcccatcaatttcactccttcttctttctcggcgaggaatctccggtcgccgtcaacatcttatccccgaatcaaagctgaactcgatcccaacacggtagtcgcgatatctgtaggcgtagcaagcgtcgcattaggaatcggaatccctgtgttctacgagactcaaatcgacaatgcggctaagcgagagaatactcaaccttgttttccctgtaatggcaccggagctcagaaatgcagattgtgtgtgggaagtggtaatgtgaccgtanagcttggtggaggagagaaagaantctcaaactgtatcaactgtgatggtgctggttccttaacttgcactacttgtcaagggctctggngttnaacctcgaaaaccttgatcnaagggaattcaangggcaatgactaaaataccttgctccaanggaaaanttcctttccttcncccttcnnaaaatttcttcaattggtcaaangccggttttggtttaaccaaacaatgtttgagnanaaaaatccnggnnaanggggnaattggtaanttggggaaaaggaaaancccccccggggntttaaaccaaaangggtttccttccctngtt

SEQ ID NO: 13785 - DNA, 689 bp, Arabidopsis thaliana
  unsure at all n locations
  Clone ID: LIB25-016-Q1-E1-G3
acagctagtcttgtctctgaagctgaatccaagcttcactcctctttctcctctcttccctttcactccatgttcttctttttcgccgtcgctccggttttcttcttgctactcccgccgcctctattctccggttaccgtctacgccgcgaagaaactctcccacaaaatcagttctgaattcgatgacagaatcaacggcgctctctctcccgacgctgattcccgcttcctcgaccgccaaaaggctttagaggcagctatgaatgacattaacagttcatttggtaaaggaagtgtaacaagattggggagtgctggtggagcattagtggagaccttttcgagtggtattttgactcttgatcttgctttangtggaggcctaacaaagggtccggtaatcgaaatatatggaccaagaaagtantggcaaagaccaagctaagcaatccaangctaattgctgaaattgcaanaaaccttgganggaaatgcaatggccttggttgaatgcaanaagcaatgccctttggattcaaaccgttattccnaaaagcnatttaagggggtttnaaggtttnaaaaaattttggaaaatngttgccaaacccaanantnaatgggnnaaaaatngggtttttanaaaaangggnaaancccnttannnttttccccccaaagggtnc

SEQ ID NO: 13786 - DNA, 62 bp, Arabidopsis thaliana
  unsure at all n locations
  Clone ID: LIB25-016-Q1-E1-G4
anaaggggggccctttggggcccttttgnttttgggccccccccaaaatttttggggggggg

SEQ ID NO: 13787 - DNA, 460 bp, Arabidopsis thaliana
  unsure at all n locations
  Clone ID: LIB25-016-Q1-E1-G5
cgttttgcaaggagttttccaagttttgggaagttgatgattcctcatcagctcccaaggagccttcaattctcatcggtggtaaaatgggggaccgaantagctcgtttaagattgagaaagctgganaaggagctagagcaaacgtttataagttgaccaccttttacggaaccgttggagccatcccaggggtttggttaagcgcaccacaactaattatcaccaaggatacggctaagaccttactcgtcaaattcaaaaaggttgatgatgctactacggctactagcaacttatacttcccgggttgataatttaggtctaaggatgttcccgttctactaatcaactggtanaaattagtgtatattaancctgagactcgtccatggcctaaaataatgaagttattttcaaatttcaaaancnannantccaangcnantgnngaantnna

SEQ ID NO: 13788 - DNA, 451 bp, Arabidopsis thaliana
  unsure at all n locations
  Clone ID: LIB25-015-Q1-E1-E1
gggcactccagaaccgcctaaagggaaagggaaggcatctttaaaaggaaggacggatgaagctatgcccaaaaagaaacagaagatagattcttcatcaaagagcaaggccaaagaggtggagaagaaggcctcaaagcccgaaactgagaaaaatggcaaaatgggtgatattggtgggaagattgtagcagcggcatcacgcatgagtgaaaggtttcggagcaaggggaatgtggatcaaaaagagacatcaaaggcctcgaaaaaaccaaagatgtcttcaaagttgaccaagaggaaacacactgatgaccaagatgaagatgaagaagctggtgatgatattgatacttctagcgaagaggcgaagcctaaggtgttaaaatcctgcaactccaatgctgattaaagttgctgaaaantctcctgatgaagatgaacccaaagt

SEQ ID NO: 13789 - DNA, 503 bp, Arabidopsis thaliana
  unsure at all n locations
  Clone ID: LIB25-015-Q1-E1-E12
ngnnnnnnggggngngancttcttgcaggntnngccggtccatnacggtccagggcncccgggtccacccacgcgtccgancggaacaaggattgagaaaaggaacctttcccttttaataagccgatatagatccttggaggagaatttgtagcagaccgatctctgtctgttgtctctgtttctacgantctctgtgtttgtcggaaatcgtaaattatgggtttgtgggatgctcttctcaattggcttcgcagcctcttcttcaagcaagaaatggagctttcattgataggacttcaaaatgcaggaaagacatcacttgttaacgttgttgcaaccggtggatacagtgaagacatgatccctacggttggtttcaacatgaggaaagtgacaaaaggaagtgtcacgatcaagctttgggatctcggtgggtcaacctagttcccancatgtgggaacgttactgccgttctgtttccgcaattgtgtnggtagtt

SEQ ID NO: 13790 - DNA, 435 bp, Arabidopsis thaliana
  unsure at all n locations
  Clone ID: LIB25-015-Q1-E1-E2
aatggcgaaaaccctagctcgctccacagcgtcacgcatcaccaagcgcttaatctccacctccggagccaccactccttccccttcttatatcctctcccgtcgatcaaccccggtgttctcccatgccgtcggattcatctcttccttgaatcgtttcacaacgattcgaactcgaatggataggtccggtggatcgtactctcctctaaaatccggttcgaatttcagcgaccgagcacccactgagatggcgccgttgtttcctggctgcgattatgagcattggttgattgtaatggacaaacctggaggcgaaaacgctactaagcagcanatgattgattgttatgttcaaaccctagctaaaattatcggcagtgaggaagaagctaagaagaagatttataatgtatcgtgtgaaaggtatttggg

SEQ ID NO: 13791 - DNA, 443 bp, Arabidopsis thaliana
  Clone ID: LIB25-015-Q1-E1-E6
gctggaactgttactcttgaagaggtaaacactgttggcgccaaggtgctagaatttatttctgatttcggaagacccactgcccctcttcccgcagcaatagttgcttgtgttcccactaaggtgcatgttgatggggttggtgagagtgatttcaatatatctcctgatgaaataatagagtctgtcaaatcaggattattagcacccattgaagctgagcctgagctcgaggtgccaaaagaattgatctctcaatcacaattgaaagagttaaccttgcagagaaatccatgttttgtccctattcctgggtcaggtttaaccaaattgcatgacaaagagactgggatcactcagcttcggttatccaatgggatagctgtaaattacaagaaatctacgaccgaatcccgggcaagtgtcatgcggctcattgttgg

SEQ ID NO: 13792 - DNA, 73 bp, Arabidopsis thaliana
  unsure at all n locations
  Clone ID: LIB25-015-Q1-E1-E8
ngaagttatccacngcaagtgggccatgctctggatcctaagctgcatcctccctgaacttttggctanaaac

SEQ ID NO: 13793 - DNA, 438 bp, Arabidopsis thaliana
  unsure at all n locations
  Clone ID: LIB25-015-Q1-E1-F1
attatactcaagcanaggcctgacgtggttgcctttggtggtatgtccctcttcttgtatggtangggcgtcnctgtctattccttcgaangcgttggnatggtcttgcctcntgaatcggggatgaaggacaaggacaagtttggcaaagtcttggctctcggtatgggattcatctctctcatatacatcgcatttggtatcttangttacttggcttttggtgaggacaccatggacattatcactgctaacttgggggcangacttgtcancactgttgtccancttggactgtgcatcaacctcntcttcaccttccccttgatgatnaatccagtgtttgagatagtggagaagcgtttctcacgcgggatgtactctgcgtggntcacatgggtactccntcntagcagtgactctggtggtctttttgtg

SEQ ID NO: 13794 - DNA, 491 bp, Arabidopsis thaliana
  unsure at all n locations
  Clone ID: LIB25-015-Q1-E1-F10
ggngatttcnacaaggataccngttngtacggtcagtggantcncgggtccacccangcgtccgaattttgtcaaaccctgctctcttttctccaagtgctctcatggtgcttccgctcttccggcgcgctgcgatcgcccggacttcctcgcttctcagagctcgtcttttcgcgnctgcctccgaattccattctcgcttttctaatggactataccacttggacgacaaaattagtagcagtaatggtgtgaggtctgcctctatagacttgattacaagaatggatgatagttctccaaagcccattctgcgatttggcgtgcaaaacttttcatctacaggacccatatcacagacggttcttgcaatgccagccttgtctcctactatgagtcatggaaatgttgtnaaatggatgaagaaagaaagtgacaanggtaaaaggtgggttgatgtnctaagtganatanagacaggcnangccact

SEQ ID NO: 13795 - DNA, 433 bp, Arabidopsis thaliana
  Clone ID: LIB25-015-Q1-E1-F2
gggtcacagtttcacagacacgcggctcctcgatggttgtcttccgccgacagccgccgcgtgtatgtccttcccatacggaatctgccacgttgcgtttgtataatctgcctgactagggctttagcagtgtataagagacgagacgagacgcgattcaccggagagtcaaagaggcaaggaggagaaagccaatggcacatgccacgtttacgtcggaagggcagaatatggagtcgtttcgactcttgagtggccacaaaatcccagccgttggactcggcacgtggcgatctgggtctcaagccgcccacgccgttgtcactgcaatcgtcgaagggtggctataggcacatagatacagcttgggaatatggtgatcagagaaaagtccgtcaaggaataaagaaggcgatgcacgctggccttgaaa

SEQ ID NO: 13796 - DNA, 429 bp, Arabidopsis thaliana
  unsure at all n locations
  Clone ID: LIB25-015-Q1-E1-F4
ttctctctctctctgtggagtgttcgaatctccaagctctctctcaaatggcagcgtccacatagtagagctgaagaagcactgtatctatctacagagaaagtgaagaggaagaaaaggaagagaggatatagaaattaagctggcgacttttagtccgaggcgagcaatggcagagttacggcactcgagctctctcggtagccgatcttcttcttctccgttacgtgccgccggagatgaggattcttcatcgcctcatgtacacgatcactctcctaacggcggagacgacgaagatggtcgcccacgtcatccttctaaagatngagaacgtccgatntggnttcantccttgnttccnttcctcggtgatgatcctaagggttctcctcanaaagaataaaatcncgcctcnaatgantttgg

SEQ ID NO: 13797 - DNA, 439 bp, Arabidopsis thaliana
  unsure at all n locations
  Clone ID: LIB25-015-Q1-E1-F7
atggtgggagaagtcaacaaatcacaacatgttagagattcaatctgccaatcatcttgttgactctttgttaaacgctggagatagattggttgttcttgatttctactctcctggttgtggtggctgcaaatctctccacccaaagatatgtcaattggcagaaacaaacccaaatgtgatgtttctgaaagtgaatcaagaagagcttagaacaatgtgtcatggtctaaacgttcatgtgctgcctttctttaagttctatagaggagcagaggggtaaagtctgtagcttcagctgcactattgcaactatcaataagttcaanaaancgttggataancacggtattgaaaaatgaacccccgggaatccaanggaattanccaaaaaggaatccccggttttggnancgtttggtaaattgaaatnaaattc

SEQ ID NO: 13798 - DNA, 430 bp, Arabidopsis thaliana
  unsure at all n locations
  Clone ID: LIB25-015-Q1-E1-F9
cccttaactctatctctaggtgacttaagagtaaaaaatggtagaggcagaggttgaagtagatgtggaaatcaaatctacggctgataagtttttcatgttctctagaagatcacaacatgcctccaaagccactcgctatgtacagggatgtgatctgctcgaaggcgagtggggcgaagttggaagcatactcttgtggaaattaactgttgatggagagccaaaagtgtcaaaggatatgattgaggcgattgatatgaagatgaatatgatccagtggagggtgttagagggacctctgaaggaagagtacaatattttctcgaaaacgatgaaagtaagccctaagcaaggagggtctggaagtgtggtgaagtggaacttgaagtatgagagaattgatgagaaggtggctcactananangg

SEQ ID NO: 13799 - DNA, 423 bp, Arabidopsis thaliana
  unsure at all n locations
  Clone ID: LIB25-015-Q1-E1-G12
agatggagagtggtatgggaacaacaacaattgatgctatgacaaacaacaacagcaagaaatttgtgtgagagtagagagtcttgcttcagttgaatcaaagattggtccttttttttttcgttttctctttcctgctttttttgtttgtagtttctgatctctcaggaaggctttttataaatttgccctcaatttctccgtccctactactctttttgatcaatttctacgggaaaaagcaccaatctttaaacccgggcatgtccttgtaatcgagtatgttgtgtaagtgatgaaattgtgggtgaattctggtgagaagtttccccctttttcctcagattgccggtaaaaaaaanagtttttaataaggganaagattgnnaattnantttaacccctttggttggggtganaagg

SEQ ID NO: 13800 - DNA, 431 bp, Arabidopsis thaliana
  unsure at all n locations
  Clone ID: LIB25-015-Q1-E1-D9
ttccagatcttcaagtgtatctagatcgagctctccttcttccttatcggattccatatctgtaagaggctcttggttttcttcttcggtctgatccctagactcttcttcggtaggaatggtttctgtctcagttggactttcttccactggttcatcagcttcattgtcttgttgtgcttccacatattcctctgttttctcctctgcattctcggcttctgtttcttcattgtcaccatcagttgtagttgtagcatccatcaattcgtctatggctggctcttttgcaaggttttcaccttcggaagtatcaggatgagactcagatccttttgccttcttcgatgcangaggtgcaatctcagaactgggtttccccttgagtcagactatcttgttgtggtcagaaacaacgaatcagctggggg

SEQ ID NO: 13801 - DNA, 433 bp, Arabidopsis thaliana
  unsure at all n locations
  Clone ID: LIB25-015-Q1-E1-G2
gttcgaattttccatctttcgattctcagtagtttcgtctcaatttcataattccattgtagccgataatgaattccgctttagattttgcttttccggctacatttccggttaaatcgagttctgttggcggacatcggattgcttcccctggattcagttcccgcttaagattgtgctctcttcctccttcttcatctatcaaggctgagtcatgtttaaaaagagacgtgcacaggcaaagaagcagtcttgagtcaatgttctgttatgataaaccaataccagaggaaataatcgaggagccagttggattatccatgtcagagagagagattggtgataatcagcgttgcacttgttgtgaagctaaaggtgcaatgccttgttccacttgttcctggaactggtccanaagtagattccaataagg

SEQ ID NO: 13802 - DNA, 432 bp, Arabidopsis thaliana
  unsure at all n locations
  Clone ID: LIB25-015-Q1-E1-G4
tagagaaggattgtctgtcgatagatgataaaaaaaatctttccactgcagccatttccaattcagatgttgccagtgtcatcagcttaaagagaaagcattcagattgcagtggggatgatggcaactcagaaactaaacctgagatttacgaatctctcaatgaactaaaactggaggaagaggaagaattaactaccgttcaccacgagagcagatccccttcaaacaatacaactgttgatatattcagcattgtcaaaggaactggccgtagaaaaaatctcatgcgttcaaatcctactgataagtcttcagaagcagagaatgctgctggtttgagggtaaagaagatnaagaggacaccggaggacganaaagagtcaatgggtctggttgagaaactaangaaaagaaataagagaaaccgtc

SEQ ID NO: 13803 - DNA, 451 bp, Arabidopsis thaliana
  unsure at all n locations
  Clone ID: LIB25-015-Q1-E1-G5
tactattagaataataagggtaataaacaaagacacccaaagatgggtctcaaggtctcctcttctctcctctgtctcaccatcttactcgctgtttcatccattgtatcagcggttaacataacccgagtgctcgagaaataccctgaattcagcaccatgaccgagcttcttgccaagaccgagctcacaccaattatcaacaaacgtcagaccatcaccgtgctggcccttaacaacgatgctatcggttccatctctggtagacccgaggaagaggtcaagaacattcttatgaaccatgttggttcttgactacttttgatgagcttaaagctcaangggctctcaaaggaaaaagaacacattggctcaataacctttaacaatncaacggtttggggcaacaagcaaaacggtttcctcaactgcaacaaatctaacggaaaga

SEQ ID NO: 13804 - DNA, 441 bp, Arabidopsis thaliana
  unsure at all n locations
  Clone ID: LIB25-015-Q1-E1-B3
ntagccatggaaggcgaagagaagaatgattatagaaacgaggaagaagatttcaatacaccacaacaactacaaaagaagcaaaggaaaggaaaaaaaaaatagcaacggaaacagaggatgaaaacgaagaagacaagagagttactctcaaagtcacgcaagtcgccgagagacccgatagaatctctccgatcgtcgcctatttctctacaggatacgatccttgtaaagtagatccaaaaacaggcaagagagttcatgaaactcccaaggttactgtttacaagcataaggatgattctaagaagaggattcaggttgttgtaagtcctccaggcgcaagagttgagttcgtcggaactaattacacaggcgagcaagctgctatgcagacgaatacttatagagttggngtttttaatagagaggntaaaactt

SEQ ID NO: 13805 - DNA, 437 bp, Arabidopsis thaliana
  unsure at all n locations
  Clone ID: LIB25-015-Q1-E1-B4
ctctcactttcttcacatctctgaagctcttcgtcacgcatctacaatggcatcgatgatgcaaccgcagatcatactgctgaaggaagggacggacacatctcagggcaaagcgcaactagtaagcaacatcaacgcttgcactgctgttggagatgtagttcgaaccacgctcgggccacgagggatggacaaactcattcacgacgataaaggatccgtcaccatttctaacgatggtgctaccatcatgaagctcctcgacattgttcatcctgctgctaagatcctcgtcgatatcgccaaatcccaagactccgaagtgggtgatgggacaactacagtggttcttcctgcaacanagtttttgaaggaagcgaagccatttattgangatggtgttcangctcaaaatctaattaagagttaccgcactg

SEQ ID NO: 13806 - DNA, 434 bp, Arabidopsis thaliana
  unsure at all n locations
  Clone ID: LIB25-015-Q1-E1-B6
tctccaactcctcctaaggaatcaccttatatctgtaacatgactgtcaaagaggatcttagaaggagaggaattgggtggcatttgttgaaggcgagtgaggaactgatatctcagattagtccatcaaaagatgtatacttgcattgtaggatggttgatgaggctcctttcaatatgtacaagaaggcaggatacgaggttgttaagacagatacagttttggtccttctgatgttacagcggcgtaagcatttgatgcggaagaaacttcttccactatgcaccaatcctatagtagaaatggtggggtctgataatgagctgacctcctctgcaaatgtgtaaacatgggagctaaatgtgacatgaccaagggtcgggttgataatcccgtttgcttcgacctatgttaaatgatcttagtanancac

SEQ ID NO: 13807 - DNA, 440 bp, Arabidopsis thaliana
  unsure at all n locations
  Clone ID: LIB25-015-Q1-E1-B9
gnntccttcacagtgaatcaatggcgtcttcttctctatcaactctttgcagctcaacttcttcttctctacatcccaactccaaactctcacattctctttcagctaaattatcctccaaagcaaatgtttccgtccaatttctgggaaagaaacagtctccgcttctctcctcaactccgagatttctcactgttatcgccatggctccacctaaacccggaggcaaagctaaaaaagttgtgggagttatcaaacttgctttagaggcgggaaaagcaactccggcaccaccggttggtccggcgcttggttctaagggagttaacattatggctttttgcaaggattataatgcaagaactgctgataaagctggttatatcattcctggttgaaatcacngtcttcgatgataagagcttaangttaatcccaag

SEQ ID NO: 13808 - DNA, 419 bp, Arabidopsis thaliana
  unsure at all n locations
  Clone ID: LIB25-015-Q1-E1-C10
gaaccatgctcctcagactattgtggcttgttgtgtgttgcataatctttgtcagattgctagagaacctgaaccggagatttggaaggatccagatgaagctggaacgcctgcaagagttttggagagtgagaggcagttttactattacggggagagtttgaggcaagcattggcagaagatttacaccagagactctcctcgaggtaaaagacatgaacagatcttggtcaaaaaatggagctttctatctttgttatcatgtaagaagcagatgctttcaagtgtttagaactttagatagcattgtagattcaatcctcttgagaagaaagtttgaggattcagaaatgttaaaaagctgactttgttgcctagccatccaactgtcantttgtacttaggatggttaatggtt

SEQ ID NO: 13809 - DNA, 448 bp, Arabidopsis thaliana
  unsure at all n locations
  Clone ID: LIB25-015-Q1-E1-C2
gcccacgcgtccgaagtcatttaactttcctaaaacaatggctttaaaacatatgcaaatctttctcttcgtcgctatattttcatcattctgtttctccatcactcnttctcgtccactcgacaatgaactcatcatgcaaaagaggcacatcgagtggatgactaaacacggccgtgtctacgcggatgtgaaggaggaaaacaatcgctacgttgtgttcaaaaacaacgtcgaacgcattgaacatttaaatagcattcctgccggaagaactttcaaacttgcggtaaatcagtttgctgatttaaccaatgacgaatttcgttccaagtncactggnttcaaaagggtgtcctccggnaataacctaagccaaaagccaaaactaaaaatgtccccgtttaanggtacaaaacgtttcctcccgggtggcttggccgggttt

SEQ ID NO: 13810 - DNA, 442 bp, Arabidopsis thaliana
  unsure at all n locations
  Clone ID: LIB25-015-Q1-E1-C3
aaaactcacagtctaaacagtgattcacctgttcttccagtatcagctgagatggcaaagttgcttcctcaacgcaaagagagtgcaagaggatctgatttaatgttagaggcggttcttgaagcggaagtagcacacaaggcgaaaagctttttcgcacaagccgagaaagaaactccagctttgaaagggaagtttttcagtgacaggaaaggagaaaattgaactcaaaagttttggggaccatcatcgatcacaagacaccggcaaggtacaaaagagtaggccttgttatttaactgtttttttttttatgttcgatgagccaagaatctgagggacctttgtttctgatgcggcaacaagtgagctaaacttggagcgaagtcagttcactctttcatcntgtaattaatgcttccgctttataagtttaaggttt

SEQ ID NO: 13811 - DNA, 434 bp, Arabidopsis thaliana
  unsure at all n locations
  Clone ID: LIB25-015-Q1-E1-C9
cgtccggatcttcagtaacaagaaggtctctggcgaggttccatggttcggcattgaacaagagtacactttacttcagcaaaacgtcaaatggcctttaggttggcctgttggagcgttccctggtcctcagggtccttactactgtggagttggagctgacaagatttgggggcgtgacatttcagatgctcattacaaagcttgtttatatgctggaattaacattagtggtactaatggtgaagttatgcctggacagtgggagttccaagttggcccgagcgtaggaattgatgcaggtgatcatgtttggtgtgctagataccttcttgagagaatcacagaacaagctggtgttgtcctaacacttgatcccaaaccgataganggtgactgggaacggtgcctggttgcaacaacaantacaatac

SEQ ID NO: 13812 - DNA, 442 bp, Arabidopsis thaliana
  unsure at all n locations
  Clone ID: LIB25-015-Q1-E1-D1
atncttccttcacagtgaatcaatggcgtcttcttctctatcaactctttgcagctcaacttcttcttctctacatcccaactccaaactctcacattctctttcagctaaattatcctccaaagcaaatgtttccgtccaatttctgggaaagaaacagtctccgcttctctcctcaactccgagatttctcactgttatcgccatggctccacctaaacccggaggcaaagctaaaaaagttgtgggagttatcaaacttgctttagaggcgggaaaagcaactccggcaccaccggttggtccggcgcttggttctaagggagttaacattatggctttttgcaaggattataatgcaagaactgctgataaagctggttatatcattcctgttgaaatcactgtcctcgatgataagagcttcacgtttaatcccaag

SEQ ID NO: 13813 - DNA, 506 bp, Arabidopsis thaliana
  unsure at all n locations
  Clone ID: LIB25-015-Q1-E1-D11
gggggngancttcttaacgcnnngccgntcgganacggtcacggtncccgggtcnacccaagcgtccgangaaaaaaaatatgtattgtagagagtccttgtcgagtctccagactttgaacgtagcaaagagtctcagctctttgttccctaaacaatcagctctcatcaaccngatctccgctggacgtcganacaacctgcctcgtccaaacctcagaagacgatgtaaggtcaccgcttcacgggctaatattgaacaagaaggtaacacagtgaaagaacccattcagaatattaaagtaaagggatacataacggcccaagaagagtttctggagggcataacttggtcgagaggtctcgatgacattgctgatatccgcggcagatcattgctcgtcgagcttattagcgccaagactgaccagcggattacggtagangactacgcacaacgtgtatggggccnaagccctgatganaagtacaatgggaatttgana

SEQ ID NO: 13814 - DNA, 507 bp, Arabidopsis thaliana
  unsure at all n locations
  Clone ID: LIB25-015-Q1-E1-D12
ngnnnnnnntggggngnatngtttntaaggtnttngccggtccgnaacggtccactanantcccgggtccacccacgcgtccgaacggtttcctcaactgcaccaaatctaacggaaagatttactttggttctggtgtgaaaggcgctcctcaaaccgctgaatacatcacaaccgttttccgtaacccgtacantctctctgtggtccagatcagcatgcccattgtggcacctggactcgggtctccggttaaggttcctccaccaccacccatgtcttcaccaccggccccatctcccaagaagggtgcagccactccagctccagctcctgctgatgaaggggattatgcagatgctcctcctggtttagctccagaaaccgcacctgcatctgcaccatcataaagtgattctccagctccagctccagatangtctggcaagaaaagatggcagcantgatgaggctgaacaaccttcttctgcttctacaccggtttga

SEQ ID NO: 13815 - DNA, 356 bp, Arabidopsis thaliana
  unsure at all n locations
  Clone ID: LIB25-015-Q1-E1-D3
ggacgaagtgatgaaaatcatgccggttcaaaaacaaaccagagccggtcagagaacgagattcaaggccttcatcgtcgtcggagatagtaacggtcacgtcggattaggagtcaaatgctccaaggaagttgcgacggcgatcagaggcgcgatcattctcgcgaaattgtctgtggttccgatacgaagaggttattggggtaacaagattggaaaaccacatacggttccgtgtaaggtaaccgggaaatgtggatctgttactgtacgtatggttccagctccgaaanggtctgggtaattgtggcggntaaaantcccaaaaanggtnctnnantncccngnantnanga

SEQ ID NO: 13816 - DNA, 437 bp, Arabidopsis thaliana
  unsure at all n locations
  Clone ID: LIB25-015-Q1-E1-D4
ggttgagcttccttcacgtccacacttctcacctacaacaacaactaaaagctaagctctatgttcacattttgatcgaaagttttagtaaattagagccaatcattggnttacccttttctccaatagaagctctctcttctgtctccaatcgacttcagctaaaccctccaagagacacaaacagaagaacgagaggttaatctaaccgaactttaccattcacaagatcgatacacaagatcgctctcgctctacaagttgtatacctgcaggtttggcaggtttggttgaagtgcattgaatcttaagcgttttgtgaccggaaaccattgctgccgatngaactccggcaagagaaaagaatgtttccgggagggattcaaacgcaaagcctgcgatgaanatgggtaaagggtggctaatgaagtaagtga

SEQ ID NO: 13817 - DNA, 441 bp, Arabidopsis thaliana
  unsure at all n locations
  Clone ID: LIB25-015-Q1-E1-D6
aagtggaagtagaagaagaagaagcgaaggggatatctggtggattcggtggtgagttcatgacggtggttcaggagatgataaggacggaggtgaggagttacatggcggatttacagcgaggaaacgtcggtggtagtagttctggcggcggaggtggcggttcgtgtatgccacaaagtgtaaacagccgtcgtgttgggtttagagagtttatagtgaaccaaatcggaattgggaagatggagtagagtgataagaacaagttttccctctgtttctcgggaaaataaaagtttcaggcttttcatgtatagagccagtagtagagacgacgaaaggaggaagcgaaatcaaaaaatgttttgttatcatcatcatatgatcttccttcgtgattcaattaaaagcaaagcaagatnatttattaacaatttaaaa

SEQ ID NO: 13818 - DNA, 433 bp, Arabidopsis thaliana
  unsure at all n locations
  Clone ID: LIB25-015-Q1-E1-B2
aactcctcctaaggaatcaccttatatctgtaacatgactgtcaaagaggatcttagaaggagaggaattgggtggcatttgttgaaggcgagtgaggaactgatatngcagattagtccatcaaaagatgtatacttgcattgtaggatggttgatgaggctcctttcaatatgtacaagaaggcaggatacgaggttgttaagacagatacagttttggtccttctgatgttacagcggcgtaagcatttgatgcggaagaaacttcttccactatgcaccaatcctatagtagaaatggtggggtctgataatgagctgacctcctctgcaaatgtgtaaacatgggagctaaatgtgacatgaccaagggtcggggttgataatcccgtttgcttcgacctattgttatatgatcttagtagagcacaa

SEQ ID NO: 13819 - DNA, 421 bp, Arabidopsis thaliana
  unsure at all n locations
  Clone ID: LIB25-014-Q1-E1-H1
aattccaaaacactgcgccgggaagacatggacaccgagatggagacagaacaaatataccaggtcgatgtcggaaatctcttggctttcaatcccaatcaccgcttcccatctgctccttcttcaaggggggagcttgtgaaggagatcctaacggagggaacaaaacttgttcaggaaatagccaataaacttttcaactttccttctactgaaacaaatgatggtcctattgtccaattgcctccgcctacaaccaaacttcctagagagaaacatattccaaggcctaagcctcctacgaagtgggaagagtttgcgcttaagaaaggtatacagaagcgcaagaaggaaaaagttgtatgggatgaacaaactaatcagtttaaagcgtcnccatggttatgaccgtgttaacgaa

SEQ ID NO: 13820 - DNA, 86 bp, Arabidopsis thaliana
  unsure at all n locations
  Clone ID: LIB25-014-Q1-E1-H10
gaancaaagattggtcggtttttttttcgttttctctttcntgctttttttgtntgtagtttctgatctctcaggaaggcttttta

SEQ ID NO: 13821 - DNA, 478 bp, Arabidopsis thaliana
  unsure at all n locations
  Clone ID: LIB25-014-Q1-E1-H12
accngntctgtacgcaccatacggtcacaatcccgggccacccangcgtccgaaantatcgtgttcgtgaatcgaanatcnangcttggagattcaatatttcttcgatctcgtgttcttcgtctcgtttcgtcggtccagtgttaatannaaatgagttcaactgtttcaaatccccaangaatcctgcaaccaggctcatttctgcttccagaatcagaatctatgattgaaagaggaancanagttagtttctgtgtgttggaatcaggattcaagttgttttgcagctggaacgagtcatggttttcgtntatataactgtgaacctttcaaagaaactttcaggcgtgagctaaaggacggtggttttaaaatcgtaganatgcttttccgtatcaatatactggcacttgttggtggtgggcctaactctcagtatccttcaangcaanngtactaattttgggatgatnat

SEQ ID NO: 13822 - DNA, 417 bp, Arabidopsis thaliana
  unsure at all n locations
  Clone ID: LIB25-014-Q1-E1-H3
tacttctgggttttcgataatctcttttgggtatttgcaaacccctcaaagattcttcctttctcctttaaatcgtctctgctttggctttgtactagccatcgcaattcancatcatctattgcaagtatctccaaggttttgatttccacaatggcaacaactactctcaatgacagtgtcaccactacacttgcttcagagcctcaaaggacttaccaagttgttgttgctgcaactaaagaaatgggtattggtaaagatgggaaattgccatggaatttgccaacagatctcaagttctttaaagacattactttgaccacttcagattcctctaagaaaaatgctgttgtgatgggtagaaagacttgggaatcnaatcccattaagtataaggcgcnttcgggtcgggtt

SEQ ID NO: 13823 - DNA, 383 bp, Arabidopsis thaliana
  unsure at all n locations
  Clone ID: LIB25-014-Q1-E1-H8
gctacgaacactgatttcttcaagactttgctttctcctttctcaaatgggaatgcggcgcaacgaagtagtagacagaacattgtttggttaaatcggaagcaatctggaaataataacagatctcttcgtgttaatggattattcggaggcggaaaaaaggacaataaagaggatggacaatcaaaggcaggaattctaggtaacatgcagaatttgtatgagacagtgaagaaagctcaaatggttgttcaagtagaggctgttagagtgcagaaggagcttgctgttgctgaatttgatggttattgtcaaggcgagcttgtcaangttacattatcangtaaccagcaaccaattcgcactgatatcactgatgcanc

SEQ ID NO: 13824 - DNA, 496 bp, Arabidopsis thaliana
  unsure at all n locations
  Clone ID: LIB25-014-Q1-E1-H9
aacttcncgcctgnnngtacgnncccagaaattcccanngtccacccangcntccgcaagacgcgtaggcggacgcgtgggtgctgccatcatttgggctgggtatccgggtcaagcgggtggagctgccatcgccaatatcatctttggtgctgctaatcccggaggaaaactacgaatgacatggtatccacaagattacgtggccaaagtgccaatgacggtaatggccatgagagcatccggtaattatccaggaaggacatacagattctanaaaggtccagtagtatttccatttgggttcggtttaagttacactaccttcactcatantttggccaaaagcccattggcccaactatcantttcactctccaatctcaactctgccaataccattctcaantcttcatcacactccatcaaagtgtctcanaccaactgcaantcaattccgaaaatgncccctcaagtnnaantntcaaacacangt

SEQ ID NO: 13825 - DNA, 430 bp, Arabidopsis thaliana
  unsure at all n locations
  Clone ID: LIB25-015-Q1-E1-A1
gcccacgcgtccggtcttcttcctttgctccgtcgtcgagatctcgtcgaacctcaaatctcaaatctcctgtaaccagatcgtctaattatccgatctgcgtttcgaatctcagatcgaagatgccggtggctgcttccgccatctattttctgaatctccgtggcgatgtactcataaatcgcacctaccgagatgacntcgggggaaacatggtggatgcatttcgtacgcatataatgcagacgaaagagttagggaattgtcctgtgcgtcagattggtggctgctcctttgtttatatgcgaatcagcaatgtctacatcgtcantgttgtnagtagcaatgctaatgttgctgtggattcaaatttgttgttgaggctgtagctttgttcaaatcatactttggtggagcttttgatgaaaac

SEQ ID NO: 13826 - DNA, 431 bp, Arabidopsis thaliana
  Clone ID: LIB25-015-Q1-E1-A12
gggaactcaaaaatcagaatctccagatcgagagcttaaaaagtcgatttcaattcccctttaagattttttgcttttggaatgtagtgtgaagaagaaaccctagttttttctcacttgaattctctgccttctttagtaatgtcaagtgagcagcgagaaggttcgcaagagacgacgacgacgacggtggaaggtaacggaacaattgcaggtcagaattctcattcggcggctcccacgacattgagagctacctctacgatggtttcttgccagagactaaggctaaaccctaacaacgagcatagacccgatagttatgaagatctgcagcttgatttcccaaactcggtatattctagtctggagaagtacttgcctccgaatatgctcgtctcgaatcgtgatgagaaatcaaattcatgact

SEQ ID NO: 13827 - DNA, 330 bp, Arabidopsis thaliana
  unsure at all n locations
  Clone ID: LIB25-015-Q1-E1-A5
actcagacaggagatatgaactgcggaggaaaggtggtctgcgttaccggagcttccggctacatancgtcttggnttgtcaancttttgctcctccgtggctacaccgtcaatgccactgttcgagatccanaggacaagaagaaaacagaacatcttcttgcactatgacggtgcaaaagaaagactcaaattgttcaaancagatcttttgnaanaatcttcttttgatcaagctatcgatggttgtgatgctgtcttccanantgcttctccagttctattcantgtcacacatcctcanacngagctgattgatccanccttaaa

SEQ ID NO: 13828 - DNA, 442 bp, Arabidopsis thaliana
  unsure at all n locations
  Clone ID: LIB25-015-Q1-E1-A6
tctctctgttcttttttcctctggttttgattttttcctggcattattattagggtttttttcatacgttgttgnaaatggcgtagttggagaaaggagacgaatcgatcatctacctacttgcccattctttgtcgtcgtttttcgattttccttgattcgccggagaaatagcgtttccggcaatgaaaacctctctccgacggttacgaggtgtgcttcacaagcatgaatctaaagaccggagagatcttcgagctctggttcaaaaagatgaacttgcccaaacttcctcaagggacgtnagaaagacaatgaagaaaattggcctaatgaataanccttggcnnaaatggcccgcctngcctggctaantggncaaataantgggcttaaaggaaatttttccggnaaacccttttgcnaagaaactaagggggct

SEQ ID NO: 13829 - DNA, 448 bp, Arabidopsis thaliana
  unsure at all n locations
  Clone ID: LIB25-014-Q1-E1-G9
ngnngaacttccngccggctcgtacgcccccacaattcccanngtccacccaggcntccgtagagctgaatggataagttcagataagcgggaagatgatcttggtggacgaataggtggtctagttcaggaatacgcagcgaaaggaagtcccgagtttttcttcattgtnnacatacaggtccctggttcggctatgtacagtctagcattgtactatatgctgaaaacaccattggaggagcatcctttgttagagagttttgtgaatggtgacgatgcttatcgaaactcgcgctttaaactcatccctcatatctccaaaggttcatggattgtganacaaagtgttggtaagaagcttgcttggttggtcaggtacgtnantttgtttnntcccccnncgggaaaaactacttagnnctnacaatnnagttngggtctcaac

SEQ ID NO: 13830 - DNA, 426 bp, Arabidopsis thaliana
  unsure at all n locations
  Clone ID: LIB25-015-Q1-E1-A7
ccactttaaacccttgtctacgctggtccgagtccagagtcctctactttgacagtctccctccatgtcgtcgttgtgtgcatctaattgctatccttcatcttcttctatcaatctcttctccaacaacaacaacccaactaaaccctttcttctctccctcagattcgcctcctccaattctcttccatttgttgctcctctcaaattctctactaccaatcacgtccttagtaactctcgtttctcttcgaaccgaatccaaagacgcctttttttgctccgatgcgtttcagaagaatctcagccgtctctttctatcggtaacggcggctctgaagagagagtgaatgttcttgtaattggtggangagggagagaacacgccctttgccacgccttgaagcggtctccttcntgtgantc

SEQ ID NO: 13831 - DNA, 438 bp, Arabidopsis thaliana
  unsure at all n locations
  Clone ID: LIB25-015-Q1-E1-A8
atctctgtctctcactctccactttccgatcaccgacgattcaacaaaacatagtaaaaaacaaagcaaattctttttttctccttagttacttcttctacagattatctcaatcttacagagcaccatggatcgttgtatctatggttgctccgtcattactatcttcttctccttcttcttcctcctcaatgcatccgctttagaatcgggtcaccacaacataactgggtcgggtcaaataaactcaaactccgtcctcgtagctctcctcgantctcgttacactgaactcgccgagctagttgagaaggtccttcttctccaaaccctcgaangacgccgttggtcgtcacaatattacnattttggccccaagcaatgaagcatcaagcgtgaccttgacccggattttaaacggttcttgcncnaacaagt

SEQ ID NO: 13832 - DNA, 510 bp, Arabidopsis thaliana
  unsure at all n locations
  Clone ID: LIB25-015-Q1-E1-A9
ngggnnnnnaatgtcntgcngntcggnngncccagannnnnnaaggccccgggtcnacccaagcgtccgnccacgcgtccgctcttaactcatcttatactttcttcttctattagtaaagatgagtactctctctaccaaataaataaggaaacataaaaaacatctctccttctttctcnacatgaaaaacaaaagattcctcaattttgttcttatttttcatttagtcacagtacctctctcactataaaccacactgtcttgagataaaatacaaaaagagaagagattaaaaacctcatccgatgatagactacgagagaagcaataccaccaagaacatcaacacccatcatcacaaccctcctccatcttcatcttcctctgatcttcttcccgacggtaatggaaccgccgtgactcagaagcggaaacggagacccgccgggacaccggttcgggaggcggaggtggtacctttacaacaaggaaggttncanaatcngg

SEQ ID NO: 13833 - DNA, 444 bp, Arabidopsis thaliana
  unsure at all n locations
  Clone ID: LIB25-015-Q1-E1-B1
gcaaaaaagggaggaaccactttaaacccttgtctacgctggtccgagtccanagtcctctantttgacagtctccctccatgtcgtcgttgtgtgcatctaattgctatccttcagngggcttctatcaatctcttctccaacaacaataatccaactaanccctttcttctctccctcagattcgcctcctccagttctcttccatttgttgctcctctcaaattctctactancaatcacgtccttagtaactctcgtttctcttcgaaccgaatcnaangacgcctttttttgcnccgatgcgtttcacaagaatctcagccgtcnctttctatcggtaacgggggctctgaagagagagtgaatgttcttgtaattggtggaggagggagagaacacgggctttgccacgccttgaagcggtctccttcntgtganttg

SEQ ID NO: 13834 - DNA, 430 bp, Arabidopsis thaliana
  unsure at all n locations
  Clone ID: LIB25-015-Q1-E1-B12
gcaagtactatggatagagattttccagcaacagtgaagataggaactatgagaacattcaaaggagtgtcactttacaaaggcagaacagttttgcctaagaatanacagtatcctctggtttacttaggaaggaatgcaagtagtcctgatccaacctcgttctgtctagatggagctttggatcggcgccatgtagcgggaaagatcgtgatatgcgaccgcggtgttactccacgtgtgcaaaagggtcaggttgtgaaaagagctggtggaattgggatggttttaactaacactgcaacaaatggtgaagagcttgttgcagattctcatatgcttccagctgttgcagttggagagaaagaaggtaaactaatcaaacagtacgcgatgacgagtaaaaaacgacagcgagtttagagattct

SEQ ID NO: 13835 - DNA, 439 bp, Arabidopsis thaliana
  unsure at all n locations
  Clone ID: LIB25-013-Q1-E1-E5
ggtttcatccaaaagtatcaaatttgtgtgatcttctccagaagaaacttgaggaactttaagctaaacctctgtagttttcagattgattcgttggtggaaagcgtctaaattttgcgtaaatggcggcagctcttgtacgcagattctgccggggatcatcttttccggtctctggtcatggatataggatgctatcgacggttgaaaatgtatctgaaagtgggtaaatcgatgaatctatactctgctattaatcaagctcttcacatcgctttagagaccgatcctcggtgagctttctcgcatttttcaatcctaaagtctaaagtacaatntgaattggtttttaataatgtatttgggagtcacttgagtgaaggncctaaggtttttgggggaaaaatgtttggatttgggtggtgtcctcccgaaggta

SEQ ID NO: 13836 - DNA, 428 bp, Arabidopsis thaliana
  unsure at all n locations
  Clone ID: LIB25-013-Q1-E1-E7
tctcacattccctcttcacaacaacagcttcgtattcgctcatcttcttcgctttctgatcttggaaatcgcaggcattgttcgtctactcgaggatttcaattttggtcatacaagagaagcgaagcagcgtcgccgttcaagacgaggtacagagaaaacgaagaagaagaagatatgacgattaaaccggcggttcgtatttccgacgggaatctaatcatcaaaaaccggacgattctaaccggtgtaccagataatgtcatcacgacgtcagcatcggaagctggaccggtagaaggatcttcgtcggagctgtattaacaagggaagagagtnaacacatccgtaacgattnggtacgcctcgcaaatcccnggttaagtcctggttcccggtttaaanccctggtggaatggccaanaaaa

SEQ ID NO: 13837 - DNA, 434 bp, Arabidopsis thaliana
  unsure at all n locations
  Clone ID: LIB25-013-Q1-E1-E8
gcacactccaaaagcggtagcaatgtcatgccaccgccgccgcctcctcctcgatcgccgttgccaccaactctctcaggaacgtgactctgtcttccagatcgccccttccatcanccatctccgtggctttcccttcccgtggacgcaatactcttcagcgacgcctcgttctcgtttcctgcagtactggagacggatctaagcctacgattctcgtggcggagaagctcggtgacgcnggtattaancttttggaggatgtcgcaaatgtcgactgttcgtataacatgactcctgaggagctcancattaagatctcgctctgtnncgccttgatcntgangagtgggactaaaggttggccgtgagtgttcgaatcgtctcacngacggctcaaggttgttggtcgcnctggagttgggatcacaanc

SEQ ID NO: 13838 - DNA, 445 bp, Arabidopsis thaliana
  unsure at all n locations
  Clone ID: LIB25-013-Q1-E1-E9
cncataatatcttctccacaatttcaactcttctaaagtctaaaccatgaagttactctcaaagacctttttgatattaactctcaccttcttcttctttggcattgcactagcgaaacagagctttgaaccagagatcgaagctttgaaatccttcaagaatggtatttccaacgaccctttaggagtattatcagattggaccatcatcggttcgttacgacactgtaattggaccggaatcacctgcgatagtaccggacatgtagtctcggtttccttgctggagaagcaacttgaaggtgttctgtctccagccatagcgaatctcacctatctccaggttcttgatctcacttcaaatagttttaccggcaaaataccggctgaaataagaaaagttaaccgagcttaancaagcttaatctgtacctaaactaattct

SEQ ID NO: 13839 - DNA, 442 bp, Arabidopsis thaliana
  unsure at all n locations
  Clone ID: LIB25-013-Q1-E1-F12
ttttgctctctgttccttcaaaatcatttctttctcttctttgattcccaaagatcacttctttgtctttgatttttgattttttttctctctggcgtgaaggaagaagctttatttcatggagtctctgctctctagttcttctcttgtttccgctgctggtgggttttgttggaagaagcagaatctaaagctccactctttatcagaaatccgagttctgcgttgtgattcgagtaaagttgtcgcaaaaccgaagtttaggaacaatcttgttaggcctgatggtcaaggatcttcattgttgttgtatccaaaacataagtcgagatttcgggttaatgccactgcgggtcagcctgangctttcgactcnaataacaaacaagaaagtcctttaanagactcgttaaatgcgttttacaaggtttccnaggctcaa

SEQ ID NO: 13840 - DNA, 443 bp, Arabidopsis thaliana
  unsure at all n locations
  Clone ID: LIB25-013-Q1-E1-F3
tctttcactttctctctaaaaaccagaaaaaaaaaaaatggagctttcatcgagaaagccttatttcattgaggaagaagaagaagagaatttggcttcttctttatcagaaatggaagctgggttttctggtaacaataataatagtaataaccatggaaatccccaaaacggtgtcgtttcttcaagccgtttctcttacggtagattaaacagtcttaggaacagtcagagttattattacaatcaatactctgtttcgtctccgagatctgttgtgtctggaagatttcatgatttcagattcgatattcaacaacctcatttcttggactcgtgtttcctctgtaagaaacctcctggtgataacagagacatctacatgtncagangagatacaccgttttgcagtgaagagtgtngacaagaacagatagagaaga

SEQ ID NO: 13841 - DNA, 505 bp, Arabidopsis thaliana
  unsure at all n locations
  Clone ID: LIB25-013-Q1-E1-F4
gnnnngnaangttagttaggccnggccnggtccgaaatnancgggtcnancacgcgtccgaaatcgataagtaataataatattatctcttcttctctgcttccattttgggtatcgataaaccaccacatccttccctgaaaccctaaccacaacaatcgccgccgtctctagaaatatccatccacctacttcggctttgtttatcaggttcgatatatctatcaccaccgccttcttatctcaatttctgtgtttgatttttgctttgttggtgtttgattttaccgcagattttgatgaaaccagatcgggtcttcctctagatccgttctaggttttctatttccaccgtcttatcattatcatcatcatcaattcatcatcatcatcaataatccagatgctcaacaaattcgtcattcatagacatgtctcggttctgaaagacgattcgattcaaattcgcgaagtctggaacgataaccttcaagaaagaaatgnt

SEQ ID NO: 13842 - DNA, 423 bp, Arabidopsis thaliana
  unsure at all n locations
  Clone ID: LIB25-013-Q1-E1-F6
gcaaattccctcattacctcaatcgaagtctcttcatcactggtgaaagttatgctggccattatgttcctcaactagctgagcttatgattcagtacaacaagaagcaccatttgttcaatctgagaggaattgctattggcaatccagttttggagtttgcgacagatttcaactcgcgagctgagtacttctggtctcatggcttgatatcggattcgacttacaaaatgttcacatcttactgtaattactcgcgctatgtgagtgagtactatagagggtcaatgtctagtatgtgctctaaggtgatgagtcaagttagcactgagacnantcgatttgttgataaatatgatgtcactctcgatgtttgcattcctccngtgcnacccatcaaagtantaagcccaatcaatggga

SEQ ID NO: 13843 - DNA, 447 bp, Arabidopsis thaliana
  unsure at all n locations
  Clone ID: LIB25-013-Q1-E1-F7
aaaaagcctctctctctcctctcctatttatacctctctcgatctctctcgccggcgctgcaaatccctaggtttttcaatcacacccaaaacatttgtagagccccaagtactcaatttcgcttattgatagagagagagagagattgagaatcgcgatttgattttatcaatcgatgccgtgaaaatctcgtaatcagattcaaaattgaggatggttagctgctaccgtaatccttgcgtgaagattgagaagaactaattttggtttgtgagcaactttcgaatcagctctgttagatttgatttgaactttatttgaagatgggttcggtgtgacanctcaagggattgtaagccggcggtggagatgcntataaggncctccaaactcctaataaaactggtgggtttaatccncttaaacccgggaagttggttgttgtc

SEQ ID NO: 13844 - DNA, 443 bp, Arabidopsis thaliana
  unsure at all n locations
  Clone ID: LIB25-013-Q1-E1-F8
attgcttgaagacggcttcttcttctcacaaacctcatctctgctaatcaaaatgtctctggttgcaaatgaggagtttcaacacattcttcgtgtgttgaatactaatgttgatggtaagcagaagattatgtttgcccttacctctatcaaaggtattggtaggcgattggctaacattgtctgcaagaaggctgatgtcgacatgaacaaaagggctggtgagttatctgctgctgagattgataacctcatgacaatcgttgcaaacccacgtcagttcaagatccagactgggttcttgaacaggcanaaggattacaaagatggcaaagtatcctcaagttgtccccaatgctcctgacatgaaacctganaagatgatcttgaacgtctcaaagaagatnagaaaccaccgtggnttgangcaatactggggccnc

SEQ ID NO: 13845 - DNA, 452 bp, Arabidopsis thaliana
  unsure at all n locations
  Clone ID: LIB25-013-Q1-E1-G1
cccatataatggagtatattatgaccctcctgaggaggataaatatgcgttcaaacatcctcgtccaaagaaacccacatcgctgcgtatatatgaatcacatgttggaatgagtagtacggaaccaaagataaatacatatgccaactttagagatgatgtacttccccgtataaaaaagctaggctataatgctgtgcagataatggccattcaagagcatgcctactatgccagctttgggtatcatgtgacaaattttttcgcacctagcagccgctttggaacacctgatgaccttaaatctttgatagacaanactcatganctaagtctgggttgttcctgatggataattgtgcacaagccatgcatcaaaaaacacactgggatnggcctggacattgttttgatgggtactggatgggcaataattccaactctggattngc

SEQ ID NO: 13846 - DNA, 87 bp, Arabidopsis thaliana
  unsure at all n locations
  Clone ID: LIB25-013-Q1-E1-G10
ttcncgttgctgatntaacaggttncactcaatggaccgtgttatccggttcgtgattctcttctcatgttcttctctctgtcangc

SEQ ID NO: 13847 - DNA, 433 bp, Arabidopsis thaliana
  unsure at all n locations
  Clone ID: LIB25-013-Q1-E1-G2
gtatcagtgtcattatctcatcataatctctggccaccggaatctggatctacggcgtttcgtggtttcgcaaccgccgcttccgtacacgcctgccaccatgttagccgtcacctccgccttgatttccatcttcgctcttcccttaagaaactgcagcatttttctgatgatgcaagaatgaagtttgcaagataccaaagagtatttgtattcaatggggctaattttctcaagtctagagttgatatccggttgtcccaatcttcgccatttgtatgtttctttaatggtggagagagtagattaaacctagangtggtgaggaangatnatcgaancccggagacttccaaagagaaacacaanttacggacggagatggaccaatgtccntccttgccaataacgttataatgtaaattgcacaaat

SEQ ID NO: 13848 - DNA, 439 bp, Arabidopsis thaliana
  unsure at all n locations
  Clone ID: LIB25-013-Q1-E1-G4
gcaggtattttctgaagttaaaagatagaaataatgtctgaaaaggtgggagcgatgggtggtaacaagggtggagcattcgacgatggtgtttttgatggtgtgaagaaagtaattgttggaaaagacttcaacaatgtaacttatatcaaggttgaatacgaaaaggacggaaaattcgaaattcgtgaacacgggactaatcgcgggcagctaaaagagttttcagtggattatccgaatgaatatatcacagccgttggtggaagctacgacactgttttcggttacggatcagcgttgatcaagtcattactcttcaaaacctcttatggaagaacctctccaatccttggtcacacgacattactaagggaatccagctgggaaagaattcatgctcgagtccaaaatatggaggaaagcntcntgggttcca

SEQ ID NO: 13849 - DNA, 442 bp, Arabidopsis thaliana
  unsure at all n locations
  Clone ID: LIB25-013-Q1-E1-G6
gcccacgcgtccgttctcagtgaccctgtacagcgtatggtttacgatgaaattcatgggtatacagtgactgccatcaatccttttcttgatgactccaccccaagggatcatgtttttgttgatgagtttgcttgtataggctgcaaaaattgtgccaatgtggctccagatatatttcaaattgaggaagactttggtagagcaagggcttgtaatcagcgtggcaacccagatttggttcagcaagcagttgaaacatgcccggttgattgtatccatcagacttctgctgcacagttgtcattgcttgaagatgaaatgcgaagggttgaaagagtgaatgttgctctgatgctttctggaatggggtcaggagcanttgatgttttcagaatggcaaatctcgatgggaaaagaggcaancaaaantttgaatcaa

SEQ ID NO: 13850 - DNA, 483 bp, Arabidopsis thaliana
  unsure at all n locations
  Clone ID: LIB25-013-Q1-E1-E3
cgagtcctcgtcgctcgtagacggtgccaagcttcagtccttagaccctacggcggtttaaagccctttctttccttctgcagcttanctaactccactgcgccgttccgggattcgttgagagcaaaatccgatggattggctcgggcctatgttaccggagcgccgcctatcgtggaagaaccagacccaaagattgaagaatccaaatctgaggctgaatcgaaggatttaattagttgggggcttctgtggagcttgatgagcaagcacaaagctcaaggctcaagttgttttgctaantggactcctccctttggattgcaagttacttngcaactcctcctncnaatggccctgggttttttttccnggggtaaaaantcccttttgaaannttaccggnaatttggggggtttaanaaaccngggaanccccntttttgtttggccggggnttggcttgaaaaccaaaaaaanttt

SEQ ID NO: 13851 - DNA, 517 bp, Arabidopsis thaliana
  unsure at all n locations
  Clone ID: LIB25-013-Q1-E1-B8
nnggaagnttttgtttaggnccggnccggtaccganaccanaaattcgcgcggtccacccacgcgtccgcatctctcgcttgacctacaacacccgattctctaatcgaaaccgtttctctctttttgatcagatctcagatctttccctctttgattcntcttccttagatcgattngctcnanaaacaacaatggcgtctgggcgtgaagagttcgtatanatggctaagctcgcggagcaagcggagaggtacgantagatggtagagtttatggagaaagtctccgccgccgttgatggcgatgaactcanngtagaagagcgaaatcttctctccgtcgcttataagaatgtgattggtgctcgccgtgcctcgtggcgtatcatttcatcgatcnaacaagaaggaanagagncgtggtaangatgaccacgtcacgggngatccgtgaatatagggccaaagatngagacggaantctccngggaatctgcgaagggaatccttaagttg

SEQ ID NO: 13852 - DNA, 445 bp, Arabidopsis thaliana
  unsure at all n locations
  Clone ID: LIB25-013-Q1-E1-B9
gaaatagctgctcagatttgtcgtcaggctggtctaagtcaagcgtttggnaaagacgttgatctacttgagggatcatggagaggacaattttgcaattgtgtttgcaagctatggggtgtgaacatggagacagctcagttcttcaagcgagattttgaagaaaatggatcaatggagagagttactcttttcctgaacctggccaatgacccaaccattgagagaatcatcactcctcgaattgccctcacaacagctgaatatctggcttatgaatgtgggaaacacgtccttgttatattgacggatatgagttcttatgctgatgctcctcgtgaaggttccgctgccccaaaaaaaggtcccggaagacgtggatatccaagtttatatgtacactgatcctgcaactaattatgaacgtnccgggcgtataaaaaga

SEQ ID NO: 13853 - DNA, 74 bp, Arabidopsis thaliana
  unsure at all n locations
  Clone ID: LIB25-013-Q1-E1-C10
ggtgaaatcccccaatgctcctcantctgagtaaccagcagataagacnctctcttaggtctcgatgtggttta

SEQ ID NO: 13854 - DNA, 501 bp, Arabidopsis thaliana
  unsure at all n locations
  Clone ID: LIB25-013-Q1-E1-C12
gnnnngnacgtnantcgnncgcccggtccaaatnccgggtccacccacgcgtccggtttttctgtgaagagttatgatgccgaaagctgcgtgggaaccagaataccacagagtatttgtggacttatgcgtcgagcaaaagatgttagggaatcaacctggaacgcagcatatattgaaaccttttctacaaagaactggcgctaggttcaccagaaaccagcttaagaatcactgggatacaatgatcaagcagtggaagatttggtgtagacttgttcaatgcagtgatatgcaatgggatcctcagactaacacttttggtgctaatgatcaagactgggccaactatttacatgtgaatcctgaggctgggcagtatcggttgaatcctccatccgttcctcgagaaacttgagcttatctttgaagatagtaacttanatgatgaangtacttcangtagcaaaaggaaacgaataaccaacatcntgatgaaga

SEQ ID NO: 13855 - DNA, 444 bp, Arabidopsis thaliana
  unsure at all n locations
  Clone ID: LIB25-013-Q1-E1-C2
aaaacgaaagggaacanaaagaaataggggatatggtangcggacgcggcggagttggcggtggtggtggtaacagagtggaggcggntcagtggcttgtaacatcggagaagcttctagcgtctagtgatcttcaaggancaaagacatttgcgatccgcgcatgcgaagctgacccgacccgagcagaagctgcagactacatcctcgcaatctgcgacattcttctcgccggagagactcgtttaggtgattccaacttgccagactggtacgccgttctccgactcggtcgtttagctcaaaaccctgaacacgtcgcgactcagtaccgtagactcgctcttctcctcaatccttccgttaatcgtctcccattcgccgatngaactcttaaaatcctctccgatgccttggtcgttctctctgattcgttcaagaaat

SEQ ID NO: 13856 - DNA, 589 bp, Arabidopsis thaliana
  unsure at all n locations
  Clone ID: LIB25-013-Q1-E1-C3
nnnnnanngttcgttgccggccggtccaaatncgggtcnacccacgcgtccgccgccattagagtcactggtgctagcagcagtagacgaagcagtcagaccaaatccaaggctgctcctactcccatcgataccaaggcctctaccaaacgccgaaccggctccatcccctgcggcaagcgtaccgattttggctactccaaagacttccacgatcactacaccatcggcaagttgctcggccatggtcaattcggctacacctacgtcgccatccacagacccaatggagatcgcgtcgccgtcaaaagactcgataagtctaagatggttcttcctattgctgttgaaggatgtcaagccgttganggttcaagattccntaantggctcctcctcctgggncaacgaagaaatggttgggttcaagtttttcaacnaatggcccctttttgaagggaattnaaccnaanttaaccgttccaaaaaaattgggtttaattgggaanttntnaagttcccccccnttttcccctccnaaattttccccttaaaaaaagttncccaaancccccntttccaaaagggg

SEQ ID NO: 13857 - DNA, 442 bp, Arabidopsis thaliana
  unsure at all n locations
  Clone ID: LIB25-013-Q1-E1-C7
ttatttttccctttcactgtagatccttttttccgactcacacactttcgatattttcttttgttttcttcaaaaaagacatattttttttgctgggactatcaattggggtccgtcgccacgccacgcgccgagctcgcaatatatcgaaagcaacgatctaggaaggatcttaaaaatcctacttggccacaaatttttgctatttttattattttccgtgtttaatttctgattcagacaggaagattaatattaagcactagttgtgcaaattcacaatttttttttgtggatggaaacaaatttctggcacacgtatccaatccaaatcgacaatataagcgtccnctgatgggaaagttttggnttcaattgagaaacaganattgatttnggtttccttaatcaangggggggcccttaagaananacgtaacaa

SEQ ID NO: 13858 - DNA, 54 bp, Arabidopsis thaliana
  unsure at all n locations
  Clone ID: LIB25-013-Q1-E1-C9
aaaaaacaaacccctggttttttaaaaggggggaaaacaccnttcnttttaaaa

SEQ ID NO: 13859 - DNA, 188 bp, Arabidopsis thaliana
  unsure at all n locations
  Clone ID: LIB25-013-Q1-E1-D10
tcacgncccggttttcttcatttcatctttactnctatctctagagcttnactctcgactacattttcgtcgngtcatatcacaatcgagtacaagtcgcttatcactcaagtcgacttgagcgcgactcatcncgagtcnctggtatcgtngctcatgatcagtttcgcngtcgacggagtnaatat

SEQ ID NO: 13860 - DNA, 396 bp, Arabidopsis thaliana
  unsure at all n locations
  Clone ID: LIB25-013-Q1-E1-D11
agaagaanaaaatgatatttcgccgaanggagaatgcgaangaacaaganagaggattacgnnntnanacaaagctcgaaaaactcataggttgtggtgagctaaattatgctatggaaaccggtgatgtaactctggaagcaactctacggaagatatcatcctctcttgangatgtggtcnaagttcctgactcccccgangagagttatatttcttcttccanaagaactggattagcatgcatatctgctcangaaaatgggtcanatgatgagattacacatgatgaacaagtggcaacttggtctgctataantaaaggatccangtcactaatccatttgaatggtgttgcttcaatcgcatcatcccatctatctggcttcanancca

SEQ ID NO: 13861 - DNA, 448 bp, Arabidopsis thaliana
  unsure at all n locations
  Clone ID: LIB25-013-Q1-E1-D2
gatttcaaggtttagggtttctgcaattcaaccatggcagagcagacggagaaggcgtttcttaagcaaccaaaagttttcttaagctcgaagaaatctggtaagggaaagaggcctggtaaaggaggtaatcgtttctggaagaacattggccttggtttcaaaactccaagagaggctattgaaggaacatacattgaccagaaatgtccctttactggtacggtttcaatcaggggtcgcatcttgtctggaacttgtcacagtgcaaagatgcagaggacgatcattgttcgtanggactatcttcattttgtgaagaagtatcgaaagatatganaaaagacactcaaacattcctgctcatgtttccccgtgcttcccgtgtcaaagaaggagatcgtgttaccantgggcaatgcangccaattgtcaaagacggtgaggt

SEQ ID NO: 13862 - DNA, 444 bp, Arabidopsis thaliana
  unsure at all n locations
  Clone ID: LIB25-013-Q1-E1-D4
tttttttttttttttttcctatcatctctgagagttttctcgagaaacttttgagtgtttagctactagattctgaattacgaatcatggaaggaattgatcacctcgccgatgagagaaacaaagcagagttcgacgttgaggatatgaagatcgtctgggctggttcccgccacgcttttgaggtttccgatcgaattgcccgccttgtcgccagcgatccggtatttgagaaaagcaatcgagctcggttgagtaggaangagctgtttaagagtacgttgagaaaatgtgcccatgcgtttaaaaggattatcgagcttcgtctcaatgaggaagaagcangaagattgaggcactttatcgaccaacctgcctaagtggatttgcactggggaaagtttgtgcctgctattaaagggcaaggtacanaggaacagcaaa

SEQ ID NO: 13863 - DNA, 438 bp, Arabidopsis thaliana
  unsure at all n locations
  Clone ID: LIB25-013-Q1-E1-D5
acttattttctcttgccctcttttctttttccttttgaatatttctgggttactaatatttaatttgttggttcttcggtttctccgactctttccccttgaacctagcttaacagaaaatcaaagagagaggaaaaatgagtggaggtggtggagaaatggaagagagactgttaaatgggtcagagacagaacaaaggagagagagtctctacttgagaaaaaaagatttggagtgaagtaaggaagatgtggagaatagctttaccatcaactttgttcagagttatgtcgtttggatgcgtagtggtggctcaagccttcattgggcactccagtgaaacggggtcccgctgcttatgctccccntcaaagcacttcatccgcntcanccnacggtataaggnaaggtagtcaatgcnaagagaacttatgtgg

SEQ ID NO: 13864 - DNA, 441 bp, Arabidopsis thaliana
  unsure at all n locations
  Clone ID: LIB25-013-Q1-E1-D6
attctctactctaaaactccttgtgaagactatgttgaagctgctgttaaacaggcaatgacgattcacataacaagcccacctggggacattctcatttttatgaccgggcaagatgagattgaggcagcgtgcttttcactaaaggagagaatggaacagctcgtatcatcttccagtagagaaataacgaacctactcattctcccaatatactctcagttacctgctgacttgcaagcaaagatattccagaaaccagaagatggagcccgtaaatgcattgttgccaccantattgctgaaacatcattgacagtcgatggaatatattatgtgattgacactgggtatggaaagatgaaaggtttcaatcctagaatgggtatgggatgctcctcaagtttccccataagtcgtgcagcctctgatnagcgtgct

SEQ ID NO: 13865 - DNA, 450 bp, Arabidopsis thaliana
  unsure at all n locations
  Clone ID: LIB25-013-Q1-E1-D7
ggtgtttacgaaagttcttgaaatttgaagagatctcacagatgagaagtgctataggaagaagattctcaaaccctaatggcttcaccattgcatccttagtcaaacaaactccatttctcacccaatccacatctcatttctcctcttcctccgactcctccggccgtggtcgtggacgcggttccggtgaagatggaggatttcccgccgctggaagaggacaattcggtgtaaatcgtgaaccggtggttcctggacgtgaaccgtcatctgccggaggttatggtcatggtcgtggtcgtccgattcaaatctgattcgatttctcctgcgtttaacgtcaattggtcaaaatcaanattcncccnaattantgggccgttggnaaaaaggattcgttnggtttanaaaaccggttttnaccttttcggctggcngaaacctccc

SEQ ID NO: 13866 - DNA, 439 bp, Arabidopsis thaliana
  unsure at all n locations
  Clone ID: LIB25-013-Q1-E1-D8
gctctttgctctaccaagaggagtttgataagatgaaagcaaaggcccccgagaacttcagggtggattacgcgataagcagagaacaagcgaacgataaaggagagaaaatgtatatccagactcggatggcgcaatacgcagctgagttatgggagttgttgaagaaagacaacacttttgtttacatgtgtggactcaagggaatggagaaaggaattgatgacattatggtctcattggctgcaaatgacggtattgactggtttgattacaagaagcagttgaagaaggcagagcaatggaacgttgaagtctactgatnaaaaagcctttgacatttctgtagcaaagtataactgaacaaaactgttaatttccgcntccgaaattcctgtaatttgaaagataagtttttagataagttatactaaaaaaa

SEQ ID NO: 13867 - DNA, 443 bp, Arabidopsis thaliana
  unsure at all n locations
  Clone ID: LIB25-013-Q1-E1-B7
ggggtgttactcgatgacttattggttgctgaagatcttgctgctgcggaaacaacatatgctgcttctcatgctgctgcagctgcggcaacaaattctccaccaggtcgattacctggaaggtatggtttttcagatgaaaggaacagggagttatctgaatcagctgctgatggcgctgtggtgctgggaagccctgttgcaccccctgtaaatggtgatatgcatactgatattagccctgaaaatgcattacttccaggaactcggagaacgaataagggtgtggagtatcttgttgaagcatcagcagcggaagctgaggcgatcagtgcgacnttggctgctgccaaaggcaagacaagtcaatggtgaaatttnaactccctgataaggaattgtggtgcaaaaggctacaaccaantgggaaacctacattttcc

SEQ ID NO: 13868 - DNA, 772 bp, Arabidopsis thaliana
  unsure at all n locations
  Clone ID: LIB25-012-Q1-E1-H8
cggccgnnnnnaanaaaaannnnccggcccccacgcgtnnggaaaaaagattcatccttatgatctgagatcaatccaagaaatatccacttcagacaactgttgtcctcggatctgtttttcagacaaaagtggagctcaaaacggagacaaatcttcaatctttgactccttgcagaaccagttatggcaagagaagagcaaaacattgaaaacagaggatccgtacatgtggtcgaaagagaaagtaatttacgtagtgtggtgtgtggtcctgtgcggtggctaaagatgttggcgtcaaagcttcactggagctatgtgtttgctgtggtctccaattgtggaataaaccaagggtttggttactcattgggtcatgtagctacagattattacatgaaagatgttcaaaagggtcaaccctcctcaatatcaagctcctctctgcaatcactaggattcatggtnaatattaagccccttttgggatcccacngaggtctcccaccttggttccaaaactccttactcattttacagggtattggatggntccttgtggttaaacactcaaataaccaaaccttactggaacggtttgggtgacattcaagtccgcaatggnaaaaccgatttanattgagcctggacaacttaaanngtaaaaaaaaccttccctgaaccggannccaanttaagtgttaancatcccantgggaattctngggtccttanaagggnnccnannaacctttggccanggggnttg

SEQ ID NO: 13869 - DNA, 143 bp, Arabidopsis thaliana
  unsure at all n locations
  Clone ID: LIB25-012-Q1-E1-H9
cctaccgattgggttcaaggggaccnttaatgagaccgttcccaaacaaactgaacaanttcaaaatgggaaccgcctcaaggattccccctaagggtttgggtgcccantcccntgcatccaaatccaaantttccnaaaca

SEQ ID NO: 13870 - DNA, 447 bp, Arabidopsis thaliana
  unsure at all n locations
  Clone ID: LIB25-013-Q1-E1-A1
tcaccttctacggtttgttcaagagaagtcttgggaaaatgagtcgtggangtgcagctgttgccaagggaaagaagaagggagtttccttcaccattgattgttcaaagcctgtcgatgacaanatcatggagattgcttcccttgagaagtttcttcaggagaggatcaaggtcggtggcaaagctggtgcacttggtgattctgtcacaatcacacgtgagaagagcaagatcactgtcactgcagatggccaattctccaagaggtatttgaagtacttgacaaagaagtacctgaagaagcacaatgtaagggattggctcagagttgattgcagcaaacaaggaccgtaacctctaagaatttganggtacttcaacattgctgagaacnaaaggaaaaggangaagactanacctcaagatccanttttgggttaanaat

SEQ ID NO: 13871 - DNA, 60 bp, Arabidopsis thaliana
  unsure at all n locations
  Clone ID: LIB25-013-Q1-E1-A10
tcanctntctatattggtacaggatcatatggaacatggattcatgtgcgtgttgagnat

SEQ ID NO: 13872 - DNA, 246 bp, Arabidopsis thaliana
  unsure at all n locations
  Clone ID: LIB25-013-Q1-E1-A11
gnggcnactattatgctttttccaaaaggancaactaccactggagactanttacttacattcannacaggtgcatttttggctggaactncagttcttccggtaatattaaantatccgtatgagcgcttcagtgtggcatgggataccatatccggggcacgccacattttattccttctctgtcaagtcgtanatcacttggnantcatacggttacctgtatactacccatcccaangaaga

SEQ ID NO: 13873 - DNA, 485 bp, Arabidopsis thaliana
  unsure at all n locations
  Clone ID: LIB25-013-Q1-E1-A2
gataaattgacttctgttactgagtttgatatgagcaacaataaccttggaggcgatttgccttatcagcttcctccaaacttggagcgattgaatcttgctaataaccagttcactggatctgctcaatattccatttctatgatggctcctcttaagtacctcaaccttgctcacaaccagttgaagcagctagctattgacttcacaaaactcacctctctctctatattggacctctcttccaatgctttatanggtctctccaaacacttgtagctctcttacgagtgcaaaaatcaatttatcntccagaacaatcaanttctcaaggcacaanttgataattccaaacccaacccnttcctcctcgnaaaaatctggaataattgccaaaanaaatccgggtttcacaangggctggganttncctggnnttccctttggaaaaagggaatttaaactttngcanaaaaaggaatggg

SEQ ID NO: 13874 - DNA, 521 bp, Arabidopsis thaliana
  unsure at all n locations
  Clone ID: LIB25-013-Q1-E1-A3
nnnnnnngaaangttnnnttgccnggccntacaatccaanattcncgggtccaccncncgtgaggggagatctttcagagtactgggtttcaaccagagtcaaagggccatttttgtacagactttgatgaggtatggagctggcaattttgattggaaggagtttgttcctcgcttaaagcagaagacctttgaagaaataaatgaatatggaatactcttcttgaagcacattgctgaagaaatagacgagaattctccaaccttttcagatggtgtgcccaaggaaggacttagaatagaagatgttctagtcagaattgctcttctgatactagttcaggagaaggtgaaatttgtagaagatcatccagggaaacctgtttccccctctcgcattcttgaaagattccccnggactgaagaaattggaaaaaatttggaanggagggaacattacaagattaatggataccntgccggttttaaaanccatggggtaacggaccggtgggcaancc

SEQ ID NO: 13875 - DNA, 369 bp, Arabidopsis thaliana
  unsure at all n locations
  Clone ID: LIB25-013-Q1-E1-A5
gcgagcggccgccctttttttttttttttaagtttaacctacaaattttataagttgtaattccttttggactctgaccagacaaatgctagaccaggcatgcttggttcgcagttcgcaaatcgttattgtctgtggttacaaaagagaactaagaagcaacaatttttattcaatatctcagtttctttaaatagtatatccgatgatctttaagctctccttcactcgtttctttataagtactgcaattaaaganggggagaaagatgctgtttttgggagtttgaaagaagtcactcaanggacttcctgggggncaagctgtccaactggggttactanaaaggaactggananaagttnnnt

SEQ ID NO: 13876 - DNA, 515 bp, Arabidopsis thaliana
  unsure at all n locations
  Clone ID: LIB25-013-Q1-E1-A6
nggnnnnggaagtgtttgtttagccggnccgtaccgaaccanaaattcncgggtcnacccacgcgtccganatttctctccactcagatttccaattcctaaagatagagagaatgactaaaatctctgttggattgcaacttgtgacaagagattcgagggaaaaactaaacaatatagtgatcaaatcttcactgagactaaaccgatccaatccaaacatcncggagctttgtttccttaaaacatgtcatctctgcaatanacaactccatcaaganaaagatgtttacatgtacanaggagatttgggattttgtagtagagagtgcagagaaagtcagatgttgattgatgatanaaaagaactanaggcttcgacgaagatgatgttggnttcgtaaagncgatgtaataaccggcgccggaaaaagcgantcccgggaatttgtttgatgatttccgggcgangaattcaattatttanagttccttgaggcttctttaagcaatat

SEQ ID NO: 13877 - DNA, 520 bp, Arabidopsis thaliana
  unsure at all n locations
  Clone ID: LIB25-013-Q1-E1-A7
nngtnnnngnaantgtttctgtttgcccngggcccngtnncaaanccanaaattnccgggtcnacccacgcgtccgcncacgcgtccgattatagcctcatgcttctactacgtcgccaccaattacttctctctcctccctcagcctctctcttacttggcttggccactctattgggcctgtcaaggctgtgtcctaactggtatctgggtcatagcccacgaatgcggtcaccacgcattcagcgactaccaatggctggatgacacagttggtcttatcttccattccttcctcctcgtcccttacttctcctggaagtatagtcatcgccgtcaccattccaacactggatccctcgaaagagatgaagtatttgtcccaaagcagaantcagcaatcaagtggtacgggaaatacntcagnaaccctcttggncgcatcatgatgttanccgtcaantttgtcctcgggttggcccttgttncttagctttaangtctctgggagacngttttg

SEQ ID NO: 13878 - DNA, 445 bp, Arabidopsis thaliana
  unsure at all n locations
  Clone ID: LIB25-013-Q1-E1-B12
aaacttcgaagaacaaaaaaaatccaaaaaaaggtgaaatcgaagaagaagaaaaaaaaggcaaaagcttgaattgattatggaagacgacgatcagcagaaggctgcagatctagtacaagagcttgttcttcgtctcgtctcacaaaaccctcaaacccctaatctcgatcccaattctcccgccttcctcaaaacccttcgttacgcttttcgtatcctctctagtcgtcttactccttccgtcctccctgacgccaccgctatcgctgagtctctcaaacgccgtctcgctactcagggtaagtcctccgacgcactcgcttttgccgatctctacactaagttcgcttccaaaactggacctggcagtgtcaataacaaatgggctcttgtttaattgcttaaaattgtttctgacgatngtaaatcggctataaatggc

SEQ ID NO: 13879 - DNA, 446 bp, Arabidopsis thaliana
  unsure at all n locations
  Clone ID: LIB25-013-Q1-E1-B2
tcgatcaacagactctaatcagcagcaaatgtggagcgtcaccggagcattgactgtggcggtgccgcctaccgccgccgcttgccgtacgaaaccctttctcatctcctcttcctttcccaagcagacaaagaaactccatctctcttcgccttctctgtctctaccatcatcacatttctcctcctctttcaaaaccgcagctacctccatcgagcaacagtcttctgttaacaagggagagagcaccaagtaccatttcctgggtagcaaacgctaaattcatgcttgacgaagaggagcacttccaggagcaattgtttgaacgtctccgttacttcggtgagcgtgaattaatgcaagacttctggcttgtcattgagcctaaaattccntgacaattttcccaaaattactcaaagacttcgtcgtcctgctgttgctct

SEQ ID NO: 13880 - DNA, 242 bp, Arabidopsis thaliana
  unsure at all n locations
  Clone ID: LIB25-013-Q1-E1-B4
ggcgctttcgcagactccgtcttgaattcggaatcagtcaagatctcaacaacatcaacatcccaagaaatcgaatcctgagtagcagacaaatgaggaacgtcgtgtgtgaccgagtttctccaaggaggaagaccaccattacctcgtaaatagttaccagatctagtcctaagcttaatcttagacccttctctaagcggttcccactcaacagacgaatcaacncganncngttncaa

SEQ ID NO: 13881 - DNA, 235 bp, Arabidopsis thaliana
  unsure at all n locations
  Clone ID: LIB25-013-Q1-E1-B5
gaggtggtggngctccngcngcngagtccaccaagggangagaagaaagaagagaaagaagaatccgntgatgacatgggtttcagtttgttcgagtaatgcggtatacttggcatttggttttgctgtaccctttcgaaatctttatgtcgttgtttagtttgttgtattcgactatcttcttagactttgctgaaattctcaagagatttttttactcanaaaaaaannatna

SEQ ID NO: 13882 - DNA, 522 bp, Arabidopsis thaliana
  unsure at all n locations
  Clone ID: LIB25-013-Q1-E1-B6
ngnnntggaagtgttttgtttagccctgnccgtaccganaccanaaattcgcnggtccacccacgcgnccgcanggaaactcccttgtcctcaaacctccaactcaaggagctgtttcttgccttcacatggtacattgctttcacttagccggtttcccaaaaggtcttatcagctgcatcaccggaaaaggatctgagatcggcgatttcctcactatgcaccctgctgttaactgcattagtttcacgggtggtgataccggaatctcaatctcaaagaaagctggtatgatccctcttcaaatggaacttggaggtaaagatgcatgcattgttctagatgatgctgatcttgatttagttgcttccaatatcatcaaaggaggattctcttacagcgggnaaanatgcactgcggttaangtaatccctantgatggaatcagttancggnntgagcttgttnaagaaagttaaaagctnaagtggccaaaactcaaggtgggaccgcccgaaaang

SEQ ID NO: 13883 - DNA, 782 bp, Arabidopsis thaliana
  unsure at all n locations
  Clone ID: LIB25-012-Q1-E1-H7
gctaaaccgaatgttcctggatcgggcaatgtatccgaggatactcagtctagtggtggtaatggtcagaaaggcagagaaacctcttccaacacaaagaagaggaaaagaaatgggcagaagaactctgaagcagctcaatcacacagatcccagcagtctgaggaagaaccagacaacaatggtgatgaaaagcgcaatgatgagcaaagtccaaattcacctggaaagaagtcaaacagtgggaaacaacagggcaaacaaagttctgatcctccaaaagatggatatattcatgtacgggcacgaagaggccaggccacaaatagccatagtcttgcagaaagagttaggagagaaaaaattagtgaaaggatgaagtttcttcaagattctaataccggggttgcaacaaggtgactggggaaaggaanttatgccttgacgaaaatcataaaactacgtncaatcactacaacgccaagttgagtttttatcgatgaaacttgcaactggtgaacccacaaatggacntttaaccttgaaggcctccttgcaaaagatgcacttcaactacnaacctgggtcttcacctanaacaacaattcccaccaatttgtcaatngggttaaccncccccaacccaangggttcatnnaaaaaancctttccacnntggaagggccattacnccccattggccccaagaaaggggggttcaaccnanggaaaaaanggtggganggggtttccaaangtntccattaannngggncnggggg

SEQ ID NO: 13884 - DNA, 716 bp, Arabidopsis thaliana
  unsure at all n locations
  Clone ID: LIB25-012-Q1-E1-B8
gcccacgcgtccgattgaatggctgtggctacagctccgtcgctaaaccgccatttcccccgccgcatctcgaacctttactcgagagttaagcaacgaaggccatggctgccaccaggagacgcgacccttttcaattctcgccggaattgggattcccatctgtttgtttacgcttcctcttcttcntctccgtcgtcgtcgcctccgtctccaaattcaccgacggatgatctcacggcagagttgtgcgtcaatactgggtcttgatctctttaaganaggacgggtgaaagatgctcttgttcaatttgaaactgcactgagtttggctccaaatcctantgantcacaagctgcttactataacaaagcatgttgtcatgcctaccggggcgaatgaaaaaaagctgtggattgcctgcgaaantgcgttganaaaatataatccgaaatttgccacgaatcctaaagattctgaattaacatcctttcgcncaataacccgagtttaaaggagctgcaagaaaaaggcaaggttaaggcngggaaanatattggcaataaatttccgggaaaatttgaaactnaccatttaaattcgaacacgntttcggggngttanaaaatcctttatttgcatttnnncnacaacgggtaaccaaagttctttnngtccnanangggtaagnaattaangggggnanggggccaaa

SEQ ID NO: 13885 - DNA, 419 bp, Arabidopsis thaliana
  unsure at all n locations
  Clone ID: LIB25-012-Q1-E1-C10
ggcgcctcagcttctctcctccagtaacttcaaatctctctttgactctgtcgataccttcctcttcgactgcgatggtgttatatggaagggtgaaacgctcatcgatggcgtctcccaaactctcgaccttatccgttctaagggtaaaaatgttgtctttgtgaccaacaattccgtaaaatcnaggaggcaatacgctgaaaagttccgatctttgggtgtcacttctattactcacgatgagatcttctcttcgtcatttgcggcagctatgtatctcaaagtcaataactttcctaaggacaagaagnttatgtgattggtggagaaggtgttcttgaagaactgcanattgccggttttacaatgtcntggtggtcctgaaagatggtgaatnagaatgnacaatggaaatc

SEQ ID NO: 13886 - DNA, 513 bp, Arabidopsis thaliana
  unsure at all n locations
  Clone ID: LIB25-012-Q1-E1-C11
ngnngnnnnggnaactgtntactncggccggccacggtccanaaatncccgggtcnacccacgcgtccgtnagaaaccaagaagcatggatcgtgtggtcttcttcttcctcatcgcagctacgttactaagcaggttctctcggatctaccgtcatctccggcgaggttaccgacggtttcgttaanccgatnaggcaagtcgtcccggaggagaacgatgaacaactcctcaacgcagaacatcacttcactctattcaaatccaagtacganaagacttangcgactcaggtagagcacgatcatcggttccgtgtcttcaaagctaacctaagacgagctangcgtaaccagcttctanatccgtctgccgtccacggcgtcacgcagttcccaagatnttaacccgaaagaattccgccgcaagtttttaaagactgaaacgccnanggtttcgtcctcccactgatactcagacggcgcctaatcctccgactaccgattttccgag

SEQ ID NO: 13887 - DNA, 797 bp, Arabidopsis thaliana
  unsure at all n locations
  Clone ID: LIB25-012-Q1-E1-C2
gntnnngaacgtcatttgnacgcccggtccganaanaacgggnccancacgcgtccggatcanctcatctacattcctcttcctgatgaggagtctcgttaccagatctttaagtcttgcttgaggaaatcacctgtggcgaaagatgttgacctgagggctcttgctaagtacacccaaggcttcagtggtgcggacatcacagagatttgccagcgttcttgcaagtatgcgatcagagaaaacatcgagaaggatattgagaaggagaggaagagagcagagtcgccagaagcaatggaagaggatgaggaggagattgcagagattaaagctggtcactttgaggaatccatgaaatacgctaggagatnagtgagtgatgcagacattcgcaagtatcangcttttgctcanactctccagcaatcacgtgggtttgggaagccaagttcaagtttccagatgcgccgacaaggactactggagctttccctggagctgctgccacaattggggggaattcaacccgttttgccaaatcccgganggancaaccggattgaataatgattctccnanaagttttaaaaaggtcctgaatttaagaacccctggttgaactaactccnccctttaaancccctttaaaccttttgggttcccngccnttnnaaaaaaaaactttttccnaaatggggncccttttggttnggggggtttttnaaattttaaaaaaaantncccntttttggnnaaaaaaaaaanccccntttnganaaaaanccctnnaaaaa

SEQ ID NO: 13888 - DNA, 756 bp, Arabidopsis thaliana
  unsure at all n locations
  Clone ID: LIB25-012-Q1-E1-C3
nnnnnnnngnaantgtnattctgcacgtcgcggtccgacaatncccgggnccacccacgcgtccggnagaagaaggataaggatgataacggtaagcgaagtttcctcttactcttcttcttcttcaaacttcgcgtctctgtctcgtctcaatcacaaatcatcttcgagattgcgaagctcttctctttacaaaggaagcttcttctctgtttcgacaaagaccaggaggaacacttgtaaagccaaatcatggaatctcggtcttgttatcaactctagaagctctgaggcttcggtttttgatccgttggggatcaatccagatgaaacttctggtttaagtagcatttgggaaagctttgtgagtcttttgtcaccatcatttgaaagctcttccggtaacaggcgagataagccgtcttctggtagaagcgtggcaactgctattgangacagttccaatgattttggagaattcctcaaaaggggcaattgccaaggaaatttctgaaacntcctggggttttaactccccccncggcttggaanttacatancaatccggcgggggttaacccaaaaacctttggttnggaaanttgggttaanaataacaatttttagcaacntttggnnaanaattttccnggggggganggnaaaaagttaaaactttgggaaaaagtttnnccccnggaattgttnccttttaanaaaancccaaaattgggntttaaactttctgggcnaaat

SEQ ID NO: 13889 - DNA, 870 bp, Arabidopsis thaliana
  unsure at all n locations
  Clone ID: LIB25-012-Q1-E1-C4
nnnntnnnggaactgtcncttctgccgcccgtgtccgacaatanacgggnccacccacgcgtccgccnacgcgtccgcaagcagtaaaaagatccaggagacatgttgaagaagagccaacaatggtagaacctaaaaccaagtacgatcgtcagctcaggatttggggggaggtaggtcaagcggccttggaagaagcgagtatctgtttactcaattgtggccctactggttccgaggctttgaagaatctcgtacttggtggtgttggtagcatcaccgttgttgatggatctaaggttcaatttggtgaccttgggaacaatttcatgtcgatgcgaagagtgttggccaatcaaaagccaaatctgtttgtgcgtttctccaagagcttaatgattctgttaacgccaagtttattgaggagaatccagacacgttgattactactaacccatcctttcctctctcagttcaactccccgttataaccactcagctggtgggaaagaatcaatgttgaaaacttgataanaatccgtccaagatgcaaaacnttaaatttggttttgggtccncncctaaanggccctngccnggggtttggttcccaaccnccngttaaaggagccacccccataaattgacnccaaaaacctggatnnattttccttgaanaaacttccgccctgaaataaanccaagggcctgnaaacccaaaanntttttgtgggaaaaccaattgntttgnaaagttnncaaaanccgggcccctnnanaaaaacccaanaccttaagttcgccatncctgttaaaaatgcctaaganattggcccaanccccaanngggaacctccccaaccnggggaa

SEQ ID NO: 13890 - DNA, 681 bp, Arabidopsis thaliana
  unsure at all n locations
  Clone ID: LIB25-012-Q1-E1-C8
tctgccatggatattcagcgcaacgtagcttcttcttctggcatgatgagtcgcaacatgaatgagtaatattttaatcagatttcgttaattttctcaactttcattttaatatatattacagcaactcacaccaggttggtttgatcaggatgcaaatggaagtgcagagaaggttgcatgaacagctagaggtgcaaagacatctgcaactgaggattgaagcacaaggaaagtacatgcaatctatcttggagagagcttgccaaaccctagccggtgagaacatggcagccgccaccgcagcagccgccgtcggaggaggatacaagggtaatctgggaagttcgagtctttcagcagcggtgggcccacctcctcatcctcttagtttcccgccgtttcaagacctaaacatcctatgggaaacacaaccgaacaagtcctcgaacatcacaacttccatcatccaaaacatagagaaccanttccacgggtaacaatgctgcagacaccaacatttacnttggggaaanaaaccgacctaaancctaaattttgggaaccaatnttanggaaagggncaattgangttggccggatttaagatttncgattnttttccgcaaaaccaaaccnatttnangnnnnacccnttnaanttccngntcccnanngggg

SEQ ID NO: 13891 - DNA, 880 bp, Arabidopsis thaliana
  unsure at all n locations
  Clone ID: LIB25-012-Q1-E1-D1
gnnnnnggaantgtnatncgnacgccgcggtccanaatacccgggnccanccacgcgtccgaatttagctccttgaaggctcataacgcataaagttcttggcttcatcgttttctctcttgattaatttggcattgtatatcttatgtctgattgtgtgaaaaaaccacaaatgaaaggagtttagacacaaatcacagtttaagacaaaattatagtcttgtttctttcaaattatgcaaaaaaatcaagaatctgagacataagagaaacgtttatgtctctctcttttaatcaatgctatgttgcttttctcaactgtttcaagcgttattacattactaagctaaaaatcttgatgtcttgttcttatttttgcagtttctcctcttgagctttggaattgaagctaagataagaaatttagagagaaatgggatgttctcattccaagtttgatgacgatgaagctgttcagatctgtaaagataggaaacgtttcatcaaacaagcagtggnacataaggactgggtttggcttccgggtcacaattggcttaaatccaagtcccctgaaggaaaggttcaaaaatggctcctccnggggaataatatcccaaagggagaatnaagcccacaatgaantttcaaggtttgggncaaaatgntgtcaantcccaatttaaanaaaaaatggnccaanntcnanggggggnttcnaattgggaaaaaaccccccccccttnnaaaaaaggggtcnaaantntngggcaaaatcccaaatttaaggtcaaaaantttcntttangggnaangggaacaaaacccggtttnggtttaaaaaaaccccccaanttaccgggnaattttcgggggggna

SEQ ID NO: 13892 - DNA, 433 bp, Arabidopsis thaliana
  unsure at all n locations
  Clone ID: LIB25-012-Q1-E1-D10
tctgataaaaaaaaaaacaaaaaaaaatgacaaaggcttattcaacacgtgtcctcacgtttctgatattgatctcgctaatggcggtgacactgaacctttttcccacggtagaggcaaanaagcggagtacagatgctcctatagtgaaaggtctctcatggaacttttaccaagaaagcatgtccgaaagtcgaaaacatcatcaagaaaagagctcaagaaagtcttcaagcgagatattggtttanccgctgccatccttcgtatacatttccatgattgcttcgttcagggatgtgaancatcagtgctgctagctggatcagccagtggaccagnagaacaatcatcaatcccaaatctgacactacgacaacaaagccnttgtcgtcattaataaccttcgtgncctcgtcaaaagaagtgcggc

SEQ ID NO: 13893 - DNA, 690 bp, Arabidopsis thaliana
  unsure at all n locations
  Clone ID: LIB25-012-Q1-E1-B5
aangtntntctagnncgnncgtancggaacagaattcgngggnccacccacgcgtnagcacacgcgtccgctttttctctcttattcttctatcttcctcctcctctatctttcgctcgagccattgagcaattatgtcgattccttgtctaaccgaagagacagccaaaactgttcttcgccaggtggagttctatttcagtgatagtaatctacccattgatgatttcctcaagaagactgttacagagagcgaagatggcttggtgagtttggcgttgatttgctcctttagtaagatgagaggatatttgaagttgggtgattctaaaggagatgatattcctgaagataccatcaaagctgttgctgatactcttcgaanctcttctgctctcaagatttctgacgatgggaaaaaggttggtaggagtactgaattgttgaagctggaagatttgattgagcaacttaatgctaanaacagtacctgcgtcacctttctcctangaatgttaaaaggggaaaaacgttggaaatcctttttcagtccnntaangggaaagggttaataattgttnanggaatgcctccgtcaaggttggcaaaaattcnaaggaaaanttttcngggggttgcccttgggttnaantttccccaaannaaanaagggatnccccaaaaatggtt

SEQ ID NO: 13894 - DNA, 670 bp, Arabidopsis thaliana
  unsure at all n locations
  Clone ID: LIB25-012-Q1-E1-A3
nnnnnnnngaantgtcnattagntcgcncgtgtcgacncnaacgggnccanccacgcgtccgaaacggaggcagaatcacagtaccttaatgtactctctgctttcctcgccatcgaaccggtggactccgtcatcactctcgctagagggtgcactggaggatcaattactgagaacgcccagagatttttctgggaaatttgcgttgaagctgctgcgaatggtaacggatcatacgcgaagaagttactgaagaaactcataaatgaagttgagttagagaatggtgaagtattggatgaagtgtatgaagagtatgctctttacatgttaacttctaaggaagatatattggtgaaagaaaacataaggataaccaaattcatttcttttcttttccctgaaggttcgtacaaacacccgagttgtccaaggtcgaggaaattagttattccgctgcaatgttccgttgaacatgcttgaaaggagaataccgggtgttcaacctgggcatccnagtccggttcccgtcaanaantttgttttggccatttcaanagtttantcccccaataaaancctggttttnaanggttggggtcctggaattttggnaaagggncnggaantttgcccttgcaaaattnttaaagggccaaaanaagggtg

SEQ ID NO: 13895 - DNA, 781 bp, Arabidopsis thaliana
  unsure at all n locations
  Clone ID: LIB25-012-Q1-E1-A4
nnnnnnnngnaactgtctactctggtcgtcccggtccganaatncccgggtccacccacgcgtccgaaaagaggagctcgagaccttacaaggcaagaaccgcgaggaagttggtgaatttaccaagtttgagcgcatttacgactatgatgtgtacaacgatgttggtgaccctgacaatgatcctgaacttgctcgtccggtaattggaggcctcacacatccatatccaaggcgttgcaagaccggtcgaaaaccttgtgagactgacccctcttcagagcaacgctacgggggagagttctatgtancaagagacgaggagttctctacagccaagggcacttcattcacaggcaaggccgtactggcaactcttccctccatcttccctcaaattcgaattctgttctantgaagttcccaaagaancttttccacacttcaagggcatacaaaatctccttgaaaaaagnattcaacctcccaaaggatctggcctccttaactctgctccccanaatcatcaaagctcttggcgaagctcaagatgataatccnccagtttgatgccccaattccaataacanggataaatttcaaggttacaanacaacaantttgccccccanaaacttgccggccttaaaccctaannccattcaccnantttaaaaattggccnttaanaancaaacttaaanccggccctttaaaggggattccaactcaanccatancttgggaaantnttgnaannaaantttaagggaaacttnna

SEQ ID NO: 13896 - DNA, 485 bp, Arabidopsis thaliana
  unsure at all n locations
  Clone ID: LIB25-012-Q1-E1-A5
agaagatgtctgagaaaaagggaaggaaagaggaagtgattaccangagagtacaccattaacctccacagacgccttcacaaatgcacctttaagaagaaggcaccgaaagccatcaaggaaatcaggaagttcgcagagaaagctatggggactaaggacgttagggtagacgtgaaattgaacaagcacatctggagcaagggaatcagaggtccaccaaggaggatcagggttcgtgttgcacgtaatgagaaacgacgatgaanatgcgaaaggaagagttcttctcccttgtcactgttgctgaaatccctgcagaaaggaccanttggtccttggnacaaanggccatcnaagaaggnggattaggagatcagtnnaacaantttgtttggtttttactttggtgccgtgttcaatanaatctgacttcattctcattgtntcactgattnctatccttatgagnaccattctctaaa

SEQ ID NO: 13897 - DNA, 710 bp, Arabidopsis thaliana
  unsure at all n locations
  Clone ID: LIB25-012-Q1-E1-A6
ctttatacgtataataacatcccttgtgatcaaacaagtaaaccattcaaaagatgaaaggaagaattttgattttgagtttgctcataatgagtctggtcatggcacaagttcaagtanaagcaaagatctgctgcccttccaaccaagctagaaatggctatagtgtatgccgtataaggttttccaagggaaggtgtatgcaagtgagtggatgccaaaactctgatacatgccctcgaggttgggtaaacgccattctcgaaaactcagctgatgctaccaatgagcactgcaagttagggtgtgaaacttctgtgtgtggtgccatgaacactctccaagaactctgatgcaagtgaaattgtgaatggancgtcggaacaatgtgccaanggatgttccaatttcctgttacaaagagctatgttatcccaactggggccgcctaaaactggttgtaaanggtcngtatangttgaaaaaaaccaaatggctaagaactccctggccaantcccggggtttggntgttgtngttgtggttnttncaaaggtngtccntaaaaaaaggggtttggtttccgaatttacccaaaaaattggtttnaaatggcccctcccaaaatttccccaaaaaaanccttaaaanttnaaaggnnnnttttaaaaccgtttccggtggncccctttttaaattgggaaaaaaaa

SEQ ID NO: 13898 - DNA, 812 bp, Arabidopsis thaliana
  unsure at all n locations
  Clone ID: LIB25-012-Q1-E1-A7
nnnnntnnnggnagtgtcnatttagntcgcccggtaccggaaccanaattccngngtccacccacgcgtccgcngacgcgtggggttcgagctcatccccgtcgatatgagagccggtgcccacaagcaagaggcccaccttgccctcaaccccttcggtcaaattcctgctctcgaggacggtgatttgacgcttttcgagtcaagagccatcacacagtacctagcagaggaatacagtgagaaaggtgaaaagcttatctcccaagactgcaagaaagtcaaggcaaccactaacgtatggcttcaagttgaaggtcaacagtttgaccctaacgcctctaagcttgccttcgagcgtgtctttaaaggcatgttcggcatgaccactgaccctgccgctgtccaagagctcgaaggtaagctccagaaagtcttggatgtctacgaagctangctcgccaaatctgagtttcttggctggtgantccttcactccttgctgatcttcaacaactcccaaccatccaattacttgttggggtactgactccaaaggtgctcctttgaantcctcgccctaaagggtttanccaaattgggnttaaagaaagantttcctggccaaaggccctggcctttggggccaaangggttaattggaccttccaaaaaaanccantttnttgaacccctccncccccttttccnttnaaattttcctttttccctttttcccctttttggnccccaaaattttaacnnaanttccaanttgnanttttnccnttttccctnggggnttaaangtt

SEQ ID NO: 13899 - DNA, 828 bp, Arabidopsis thaliana
  unsure at all n locations
  Clone ID: LIB25-012-Q1-E1-A8
nnnnnnnnngnaantgtntattagnccggcccgtaccggaacgaaaattcccgggnccacccacgcgtcnggacagatttgattccatttttattactgttactatcatccaaacccttggtatttgtagccatgagtcttgtttcagatctcatcaaccttaacctctcagactccactgacaaaatcattgctgaatacatatgggttggtggttctggaatggacatgagaagcaaagccaggactctacctggaccagtgactgacccttcgcagctaccaaagtggaactatgatggttcaagcacaggccaagctcctggtgaagacagtgaagtcatcttataccctcaagccatattcaaggatcctttccgtagaggaaacaacattcttgtcatgtgcgatgcgtacactcccgcgggtgaaccaatcccgactaacaaaagacacgctgcggctaaagtccttagcaaccctgatgttgcagctgaagtnccatggtatgggtnttgagcaagaatacactttactccagaaaagatttgaaattgcctgttggttggccaattggtggttancccnggcctcaagggaccgttcnaatgccggtattggagcagacaaatctttggcananaattttgttgatcccataaaaggcctgcttataccccggattacattantggcacaanggaaaatcatnccgggtncatgggaattccagtcggtcaaccgttgggaatccggggccnanaaatttgggcncccgtaaattttggaaggtnccnaaatncnggnnngggtcntttgcccnaacct

SEQ ID NO: 13900 - DNA, 443 bp, Arabidopsis thaliana
  unsure at all n locations
  Clone ID: LIB25-012-Q1-E1-A9
gcaagacgcgtccgcccacgcgtccggttcgttggagtcaactgaggagttcattgccatggaattccggtttactctgagagacaatggaatgcaagcggcttttcagctgcttcacatggtgcttgagcgtagtgtctggttggaagatgcatttgatcgagcaaggcagctatatctttcgtattttcgatcaattcctaaaagcttggagcgtgcgactgctcataaacttatgatcgctatgctgaacggtgatgagcgttttgttgagccgacacctaagtcactacagagcttgaatctagaatctgtgaaagatgcggtcatgantcattttgttggggacaatatggaggtaagcattgtgggggactttcacaaggangaaatccaaacgttgcatccntgantaccttggnacaatttaagctaaccatgaa

SEQ ID NO: 13901 - DNA, 431 bp, Arabidopsis thaliana
  unsure at all n locations
  Clone ID: LIB25-012-Q1-E1-B10
agtaatgcctatcatattctccacatcatctcttgctcttcctgctactttagcacgatttaccggcatatctgctttgaagaatgttgcttttgctttaacccctggaggttctttctatcttccaaccaatatacttctcatagctttcttcaactactactacactttcttgcaacttgacccggacgacgtgagtgaacaattaaaacgccaaggtgcatcaatccctctagtccgacctggtaaaagcactgctctcttcatcaaaaccgtccttggccggatatcggttcttggttctgcatttctggctgttctagctgctggtcctgctgtantcgaacagatnactcacttgacaacattcanaggatttgcaagcacttctgttccgattcntgtcgggtgtgccacaaatactgcaagaa

SEQ ID NO: 13902 - DNA, 872 bp, Arabidopsis thaliana
  unsure at all n locations
  Clone ID: LIB25-012-Q1-E1-B4
gnnnnnngnaattctattcgtacgcccggtccanntanccgggnccacccacgcgtccgcaatctcctcttttccttgtccttctctatcgcttctataaactttttcgatctaaggttcgtgatctccttcttctctacgaagtttacactttttcttcaaaggaaacaatgagccagtacaatcaacctcccgttggtgttcctcctcctcaaggttatccaccggagggatatccaaaagatgcttatccaccacaaggatatcctcctcagggatatcctcagcaaggctatccacctcagggatatcctcaacaaggttatcctcagcaaggatatcctccaccgtacgcgcctcaatatcctccaccaccgcagcatcagcaacaacagagcaatcctgggctttctagaangatgtcttgctgctctgtgttgttgctgtctcttggatgcttgcttctgaatggagtctctctctctctgcataaaacttcgggatttaattgtaagaaggttttggttaaacaaaaaccttaantgatttgtgggggcattaaaaatgaaaccccccaaagaatccccttccgtttaaaggtgtaaaggttcctccggttcaaaacaattttaaacaaatggtccaacnaaantttcgggccctaaatttgggnanttngantaanggggaaanntnaaattgggttngggaaaaaccnnnttccaaggcccaaaattttaaatggccttgggntttttaaaaannaaaaaaaaaaaaggggggggccccccccnaaaggggtttnaacctttanttncccntttaaaggaaantttnaaanccctncnaaaagngtnccccaaaatttnaat

SEQ ID NO: 13903 - DNA, 835 bp, Arabidopsis thaliana
  unsure at all n locations
  Clone ID: LIB25-012-Q1-E1-A2
nnnnnnnngnantgtctattcgnncgcccggtccganaatanccgggnccacccacgcgtccggatcgatttctaaagtcttcgtcttcttcttcttctgataactagctttttcaatcttctgaagctttaattttttcatacccatggctaatcgttatgatccaaatcctttcgctgaggaagaagaagtcaatcctttcgctaatgctagaggagttccacctgcgtcgaattcgagactttcgcctttgcctccagagcctgttggtttcgattatggtcgaaccgtagacattcctcttgacagagctggtacacaggatttgaagaagaaagagaaggaactccaagccaaagaagctgagctaaaacgacgagagcaggacctcaaacggaaagaagatgctgctgcacgagctgggaatcgttattgaagtgaaaaactggccgcctttccttcccactttatccaacaatggacattcgcaaaacgaaaatttccgggttcaacctnccaaaangaactaacaagttatggtttanccttttgccaaacggtaaattttggggggnttngggttnccntttgggccctttttcccggggaaataatcnaatcccgcccggttttaacnaacaaagcctttggggtttnaaaaagggganaaaagggaattngaacnaataaanggggctttccntgggcccttnaaanttttaactttcaaaaaanccggggtggnttcccaaggaangggcnaaangttgnttaagggggaatccgaaccaaatcctaaacgggtgccctttaanaaacnggaaaantgcaatt

SEQ ID NO: 13904 - DNA, 440 bp, Arabidopsis thaliana
  unsure at all n locations
  Clone ID: LIB25-011-Q1-E1-G6
cttgttttcgatagtgcaactccaattgcagggaaaggtgtagcagcagtgatcctagcccaaaagcctgatgatcttctttctcgatgcaatggtgtaccatgcatttttccagattacgagtttggaactgagattttaaaatacatacgtaccaccaggtctctatcttgaaacaaaaacactctcttaactacacaagtgcatgtatatatatacatcattgatcgtcgtgccaacagatctcccacggtgagaattactgcagctactacactaactggtcagcctgcaacaactaaggttgctgcattctcatgtanaagggcctaattcggtttcaccagccattctcaagcctgatatancagctccgggtgtgagcatactcgcggcaataagtccgcttaatccaagaaagaacagaacnggatttggac

SEQ ID NO: 13905 - DNA, 423 bp, Arabidopsis thaliana
  unsure at all n locations
  Clone ID: LIB25-011-Q1-E1-G7
aaatggtttccatgactacttcatcttcttcgtacggaacattctctacagtcgtcaacagttctagacctaattcctcagnancctttctcgtcccttccttgaaattctccaccggaatatcgaatttcgcgaatctgagtaatgggttttctctaaaatctccaattaatcctgggtttctcttcaagtctcgtcctttcactgtccaagctagagctgctgcagaaaaaaccgttcacgatttcaccgttaaggacattgatgggaaggatgttgctttgaacaaattcaaggggaaagttatgttgattgtcaatgttgcttcaagatgtggtttgacatcatcaaattactcagagctttcacatctgtacgaagaaatacaaaactcaaggatttgagattctagcttttccctgg

SEQ ID NO: 13906 - DNA, 444 bp, Arabidopsis thaliana
  unsure at all n locations
  Clone ID: LIB25-011-Q1-E1-G8
tacactcggagcttagaccttccaatctaccggcggcgaaaatgggtttcaagaggtacgttgagatcgggagagtagcacttgtgaactacggagaagatcatggaaagctcgtcgttatcgtcgacgttgttgaccagaacagagctttggtggatgcccctgatatggagaggatccagatgaacttcaagaggttgtctcttaccgatattgtcattgacatcaaccgtgtgccaaagaagaaggctttgatcgaggcaatggaaaaggctgatgtgaagaacaagtgggagaaaagctcatggggtaggaagcttatcgtgcanaaacgtagggctaaccttaacgactttgatangttcaagatcatgttgggcaagatnaagaaagctggtgttgtcangcaagagcttgcaaaactcaaagaaggagatnactgcc

SEQ ID NO: 13907 - DNA, 429 bp, Arabidopsis thaliana
  unsure at all n locations
  Clone ID: LIB25-011-Q1-E1-G9
atcaacaatggcaacttccatgatccctatattcgtcaccttcatgctcgtggccgcccacatggccctcgccgatacaaatatgcttcaagacttttgtgttgctgatctctccaacggtttgaaagtcaacggatacccttgcaaagacccagcaaaagtaacaccagaagacttctacttcataggcttagccactgctgcagccacagccaactcttcaatgggctcagctgttacaggagccaacgttgagaaagtgcctggcctcaacactctgggagtctccatctctcggatcgactacgcacctggcggacttaacccaccacatcttcacccaangagcctctgaagccatcttcgtccttgaagggcgtctcntcgtcggtttcttaaccactaccgggaaactcatctccaaacact

SEQ ID NO: 13908 - DNA, 430 bp, Arabidopsis thaliana
  Clone ID: LIB25-011-Q1-E1-H12
catttctcctccattgatctttctttactcagatctttcctcttcctctgagatgtggagctacgtttggttaccgttggtagctctatctctctttaaggatagcatcataatggccaaggctgcgacgattctcctccctagtcaaaccggatttgatatttctcggagtccggtatgctctgctccggatccgaacctaaattacagaccggttattggtattctgagccatcctggcgacggtgcgtcaggtcgtttgagcaatgctacagacgcgtcctccattgcggcttcgtatgtgaaattagctgagtctggtggagcacgtgtgatcccactcatctttaacgagcctgaagaaattctctttcagaagctagaattggtcaacggtgtgatactaactggtggttgggctaaagaagga

SEQ ID NO: 13909 - DNA, 502 bp, Arabidopsis thaliana
  unsure at all n locations
  Clone ID: LIB25-011-Q1-E1-H4
tttggccgncggtaccggaacannnntgggtcgtccaacnnntcngcaanatttgtgtggtcgtgaaatcaatgacggaaccagaaagattaggaggaatctccctgagttttccggtgaatgaagaagatacggtaacgacaacatcaccaaagactcttccacggaggctccgtcgtcgtcttctcgaaccgaagagtcctgtctccgccgcagagatcgattccaaactcagagaagctgatctccgtcgtcagcaatattatgaatcactatcgagtaaggcacgacctaagatgagaagtccgagatcaggaagtatagaggagcttagtcagagacttgaatcaaagcttaatgctgctgaacaaaagaggttaagtattttggagaaggagctggctcgtttggctaagatggatgaagctagacaagctgcgaagaatggacttgagcaacgagttgagaaagagcgtgatgaagttagagagtaagggtgaag

SEQ ID NO: 13910 - DNA, 454 bp, Arabidopsis thaliana
  unsure at all n locations
  Clone ID: LIB25-011-Q1-E1-H6
tttcaagtccgccaaaaaaagcgaagagagggttttaatacgattccactcttctcaacaaatttgacgtttttgttcttcgaaattcaaattcacccagaaaaaatctcaatccgcgatggttgaagaatcagcttctgcgtcggaagcttcggtgatacaaaccctaaccgagccggcgacggagattgcgcaaaccctagaacctaacctagcctcaatcgaagccaccgtcgaatcggttgttcagggaggcactgaatcgacttgtaacaacgacgctaataacaacaacgccgctgacagtgctgctactgaggtttgtgatgaggacgtgagaaagacgcttgagttcgctgaaggaaattgacggagaaagggtccgttgtttttgaaagaagaacgaatttcgctgaanccgtcaattgctcaancgtggtccccnaaatcaagg

SEQ ID NO: 13911 - DNA, 448 bp, Arabidopsis thaliana
  Clone ID: LIB25-011-Q1-E1-H7
aagcacacgaagttatcgatggttttgctgaacgtgggcttcgttctcttggtgttgctcaacagactgtgcctgagaagactaaggaaagtgatggtagtccatgggagttcgttggtctgttgccactctttgaccccccaagacatgacagtgcggaaactattagacgagcccttgagcttggtgtcaatgttaagatgattaccggtgaccaacttgccatcggtattgagactggtcgtaggcttggcatgggaaccaacatgtacccatccacttcactccttggcaattcaaaggatgaatcattagttggcatccctatcgatgagctcattgagaaagctgatggatttgctggagtcttccctgagcacaagtatgagatcgtaaagaagctacaagagaggaagcacatttgtgggatgactggagatggtgtaaa

SEQ ID NO: 13912 - DNA, 440 bp, Arabidopsis thaliana
  Clone ID: LIB25-011-Q1-E1-H8
ggggtttcgtctgattccgctaaatctctagtctttatctaaagatcatggattccgatgatgatatgcacgatatggactcggtagattatgattattacagcggcggcacctatgatgacaacgatagtgatgaaactgatttcgggtttggtgaggctgacaccgacgatgccgccatcatcgcctcctatcgctctaagagtaattatgttgttctcaaggaagaagatattcgcaggcatcagaacgatgatgttgggcgagtttccgcggtcctctccataaccgatgtcgaagcaagtactttgcttcttcactatcactggagtgtcagtaaagttaatgatgaatggtttgcggatgaggagagagttcgcagaactgttggcatattagagggacctgttgttacaacacctgatggcagagaatttaca

SEQ ID NO: 13913 - DNA, 431 bp, Arabidopsis thaliana
  unsure at all n locations
  Clone ID: LIB25-011-Q1-E1-H9
gagtagaacctaaagaaaaaagtggtcgtccaatggacctctcactaattcaaggcatgtctctgcctctctattttctcttaacattattctttttcttctttgctaccgcaaaaacgcggagaagctctagcaccggcacgcttccaccgggtcctccgatactgccattggtcggaaacatattccaactcggattcaatcctcaccgttcacttgctgccttttcgaaaacgtacggacctataatgagtttgaagcttggaaggttaaccgcagtggttatatcttcaccagaagcagctaaagaggcacttagaacacacgaccatgtcatgtccgctcgaacctttaacgacgctcttcgagcctttgatnaccataaacattctaatgtctggattcccccctctgctcgttggagggnttct

SEQ ID NO: 13914 - DNA, 685 bp, Arabidopsis thaliana
  unsure at all n locations
  Clone ID: LIB25-012-Q1-E1-A1
atctaaaaccctatcagagaccatttcgcgtgaacaaagatggcggggcctttgcttcgatctctttggtcaaacaccactcgaagatccttctcttctcattcatcaccttccaaattcggatactcgctctcctccttacgctccttttcagcagccaccgcttccacagctgcagccggagctcctaatagctcgcttgaccctaatcgactaagaaacgtggctgtgatagctcatgtcgatcacgggaagacaacacttatggacaggcttcttcgtcagtgtggtgctgatatccctcacgagcgtgctatggattctattaatcttgagcgtgaacgagggatcactatttcttcaaangtgacatcaatattttggnanggacaacgaacttaacatggtagacacacctggtcacgcaaaatttgggtggtgaaggttgaacnagtccgttgggaatggnttgaaaggaagctaaaattaanttggtttaangncngggaaaaaaggccccccnttgnaaaaaancnaaanttttggttcccttggccaaaaanccccttgnaaantttnnggggcntaaagcccccaaaaccccttttcccctttaaaancaaaggggtnaantttnnnancccttttaaanttccccnggggaaaaaaaaaangggtttnnant

SEQ ID NO: 13915 - DNA, 431 bp, Arabidopsis thaliana
  Clone ID: LIB25-012-Q1-E1-A11
ggagatagacaaatgtaaagaaaaacacagagagaaaattagtttaattaatctctcaaatatatacaaatattaaaacttcttcttcttcaattacaattctcattctttttttcttgttcttatattgtagttgcaagaaagttaaaagattttgacttttcttgtttcagatttcagcaaatgggatcgattttaagcttcgtctgggttaaaagcttggatcctatctgaagacagaacaaaggttcttgcttttgattcattgcccattttgagaagatgttcgaaggtcgtcctcgtgattcttgtctagtttcaacacttttcaccatgccaagccataaagaaacgaaatggagctttttggtttctgggaaacgatcttttctcaacaacgatgagtctgatcttcacttcaagaaagatgg

SEQ ID NO: 13916 - DNA, 432 bp, Arabidopsis thaliana
  unsure at all n locations
  Clone ID: LIB25-012-Q1-E1-A12
aagtgtagcaagttctgatttgttcgagattgagaacataacgagcagtgtctatgagccgagtgaggccancattggatggagtgtggtaacgggaagtatggcagatcaatcggtgatttcggatttcgatatgatgaagagggtcacgagaaatggtccggtggttaaaaccaaaccggtgattggtgagaaagtccggtcggctgggtttttgtcgggttgtaagagtcacaaagctgtctcggttgttgatagttctagaaaagtgaaagaaacagccaaggttgatcatcacgagatgtctcatcagaagaagtttaaaactgagattangattcaagacttgagctttcttaataaacaatgtttgtgtatgtgtgtgtcctaattaagtttcatcaaataattttgtatattcctcnngagtaa

SEQ ID NO: 13917 - DNA, 448 bp, Arabidopsis thaliana
  Clone ID: LIB25-011-Q1-E1-G5
ggagtatgatgagaagtggattaaggggttacaggagaggttgctgaatggggttagagagaagcttgatggtgttgtggtgaatggttcaatggatagtcgatatgtagggaatttgaatttgtcgtttgcttatgttgaaggagagagtttgttgatgggattgaaggaagttgcagtgtctagtggaagtgcttgtactagtgcgagtttggagccttcttatgtgttgagagctttgggtgtggatgaagacatggctcacacttcgattaggtttgggattggtaggtttaccacgaaggaagagattgataaagcggtcgagcttacggttaaacaagttgagaagttgagggaaatgagcccgctttatgaaatggttaaagaaggtatcgatatcaagaacattcaatgggtctcaacactgattcaacagttccactca

SEQ ID NO: 13918 - DNA, 52 bp, Arabidopsis thaliana
  unsure at all n locations
  Clone ID: LIB25-010-Q1-E1-C5
gatccacacagctaacncnctcgcatcacgtcacgaccgagtttggctatgt

SEQ ID NO: 13919 - DNA, 181 bp, Arabidopsis thaliana
  unsure at all n locations
  Clone ID: LIB25-010-Q1-E1-C7
gatcntccttcntngctcanatccttttgtctgagttgtgatactgctgtccccatttttctgcaagttgggaaatttctgtcaaagttttgtgggtctgttaaaaagatctgagctttgaanatggtgagctcaatgcacggagaangtggtggctgtgatcatggtcngtgggtccanc

SEQ ID NO: 13920 - DNA, 69 bp, Arabidopsis thaliana
  unsure at all n locations
  Clone ID: LIB25-010-Q1-E1-C8
atnacttccgatcacatagcaanggcggaaggnttaactgcatccatagtgtgtgcctccgattggaaa

SEQ ID NO: 13921 - DNA, 491 bp, Arabidopsis thaliana
  unsure at all n locations
  Clone ID: LIB25-010-Q1-E1-C9
taactgctccgcagggccggtntaggtcatnanggncccgggtcgacccanaangtccgaacgaaaaaaaaagatggtaggaagaagaaaagctttactcttttctctctgtttcttcttcctctctcttccttccttctcttcccttccatccttccaaacnngtattcgccaattctcattcccttccttgtgnntctcccgtctcattccaacccgactccgactccgagtcactgctagaatccgaatttgaatccggatccgactccgagtcttcttcttccattactctaaacctcgaccacatcgatgctctctcctccaacaaaacacccgacgagctattcagctcccgtctccaacgtgactcccggcgcgtgaaatctatcgccanactcgccgctcaaatccccggaagaaacgtgactcangcgccacgaaccggtggattcagcagctcaancgncncngggtcgctcnnaanggag

SEQ ID NO: 13922 - DNA, 432 bp, Arabidopsis thaliana
  Clone ID: LIB25-010-Q1-E1-D12
gcccacgcgtccgcgacggtacaaaggcgaacaccggcaagatcgatttgaacggtgacggcgaatgtggcggcgaagtaacttaccggggaatccagattccgatcagagcatatctgaggaagaagaagaaaatgatatttcgccgaaggagaatgcgaaggaacaagagagaggattactacttcaaacaaagctcgaaaaactcataggttgtggtgagctaaattatgctagggaaaccggtgatgtaactctggaagcaactctacggaagatatcatcctctcttgaagatgtggtcgaagttcctgactcccccgaggagagttatatttcttcttccagaagaactggattagcatgcatatctgctcaggaaaatgggtcagatgatgaagattacacatgatgaacaagtggcaacttggt

SEQ ID NO: 13923 - DNA, 358 bp, Arabidopsis thaliana
  unsure at all n locations
  Clone ID: LIB25-010-Q1-E1-D3
ccaaaganggggcgtgttcaatgggatgaagctaatatagtggagattgaatcgaacaaacctgttnggcanaagattactgaaccagngacaccataccacccgatgatggatgatgatggttctttgtctcctagaggaagagcgtttgatgaatgtgttgatgatatgcaacgagctgaagaactgaggaatgttctgaatgatgcagcancttcttccantngaaatagtanccagggttctggtggtggtggctggagctcgtctgatgaagaagaagaanacgcagatccaatggatcannatgaagaaggttctggaagtggtaaanatgaacgtttcancgcacacagna

SEQ ID NO: 13924 - DNA, 503 bp, Arabidopsis thaliana
  unsure at all n locations
  Clone ID: LIB25-010-Q1-E1-D6
gngnttngnggnaattcntcgcggttcngtaccggnctcanattcccgggccgacccacgcgtccaaccacgcgtccgggaaaacgatcaatctttgttatctctcactcttcctcttcttattttgatcttcctcacttctgtttgattcctaataatggaacacgagggcaagaacaacatgaatggtatggagatggagaaaggaaagagagagcttgggtcaagaaaaggagttgagttaactatgagagtgttggctttgatcctaacaatggcggctgcaacagtacttggtgtcgcaaagcaaacaaaggttgtgtctattaagcttattcccactttgcctcctcttgatatcactactaccgccaaagcctcttacttgtcggcatttgtgtacaacatttctgtgaacgctatagcttgcggttacacggcgatctcgatagcgattctgatgatcagcaggggaagaagaagcaagaagttgttaatggtng

SEQ ID NO: 13925 - DNA, 438 bp, Arabidopsis thaliana
  unsure at all n locations
  Clone ID: LIB25-010-Q1-E1-D7
cggtttanattaaaanagcaatgggaggtggtnaagacaagcatcatgatnagcanganannggatttcatggttttccaggaggtggacattacccanctgctcaaggaggttaccctcctcaaggttacccaccacaacaagggtatcctccagctggangctacccacctgccggatatcctcctggtgcttaccctgctgcgcccggtggttatcctcctgcacctggaggttaccctcctgctggctatcctncacctggagctcaccattcatgacattctggtggtggactcggnggcatgatagcaggtgcagctggtgcaagccgcagcaagcttatggganctcaacatgttggtcacgcctctcacaanccttaacnggcnngctgtnacgacctggaagntatggccatgcccctggtcaatggnc

SEQ ID NO: 13926 - DNA, 501 bp, Arabidopsis thaliana
  unsure at all n locations
  Clone ID: LIB25-010-Q1-E1-D8
ggatggaggcaattccttcgagtgnctagtggtctgngnnatcncgggccgncncacgcgtccaacnacgcgtccgaagcgacccaaatcggaaaccagaacgggcagaacccctaaatcttcttcttcttcttctccgatcagatcaatgctcgagccaccacaaagcttatttccttccaagggagagttcttcacactattgaaggttttgcttgtcgcttgtgctgtagcttttacctgcaatttcctctctaagtctctgagctcaaacccttctaaatctttctgcgatagtaactttaatcccatcgattcagacttggntatttgtgaancttgtccaattaatggagaatgttaccaagggaagttgcaatgtaatcttggatacanaaatcaaaggaatttatgtgtagangatggagaaatcaatgaatcaactaagaaattggttggggtantttgagagaanngttgtgaatcatatgccataatgaa

SEQ ID NO: 13927 - DNA, 484 bp, Arabidopsis thaliana
  unsure at all n locations
  Clone ID: LIB25-010-Q1-E1-D9
aactcccgcgggacggttnaggtcttaanttcccgggncgacccacangtccnataagagtctcttcaaagtttatctggtcgggttgggaaaaatccaactagagaagagcataaaagtagacatctgatcaacccgacccataataacctttttttgttggncgcgtaatatgttcgagcgcggccatcacactaagaacattcataaaaaaaaatccacaggattcaaagcccttaagctttgatcatagtctcttaaagaggtagtaaaaccataaactagagccccaatttgcattcacaagccacctaacacattagcttctggtcatttctgctttatatacacatcaagtaaaaaatggtgagaagaagagaangtcttacattgccaatcataaaaccggcgcttcccgaggtcagatnagcngccacaacgcnggtgggctcacagaaanccanaactcctttatcgaaacang

SEQ ID NO: 13928 - DNA, 434 bp, Arabidopsis thaliana
  unsure at all n locations
  Clone ID: LIB25-010-Q1-E1-E1
tctctttatctctcccattttttttttcttctctaaatttttattttttctcttttttatttttcatttctgtaacttcttctccgtcaaagacacagagagtagagaaaaaagaaaaacagaggaacagattaaaaaaaangnaaactttattaaacgatgatgcaactgggtggtggtactccgaccactacagcggcggctacaaccgtcacaactgctacagcaccaccgccacaatcaaacancaacgattcancggcaacagaagcagcggcagcagcggttggggcgtttgaggtgtcggaagagatgcacgaccgtgggtttggaggaaatcgttggccgcggcaggaaacgctagcgttgttgaaaatacgatctgacatgggaatagccgtttcgaagacgctancgttaaagggccccttang

SEQ ID NO: 13929 - DNA, 443 bp, Arabidopsis thaliana
  unsure at all n locations
  Clone ID: LIB25-010-Q1-E1-E3
ntctctgtttcttcctctactttttaaatttctcaaacgctcaatcatcgccggttttcgcctgcgacgtagctgcaaacccttctctcgccgcctatggtttctgcaacaccgttttgaagatcgaataccgagtcgctgatctggtcgcgaggctcacgttgcaagaaaagatcgggtttttagtgagtaaagctaacggcgtgactcgtcttgggattccaacgtatgaatggtggtctgaagcacttcacggcgtttcttacatcggacccggcacgcatttttctagccaagttcccggagctacgagtttcccgcangttatactcaccgccgcttctttcaacgtatctctgtttcaaagccattggcaaaggtcgtctcaacggaagcnagggcaatgtacaacgtgggattaacccggactaacgttattggtc

SEQ ID NO: 13930 - DNA, 405 bp, Arabidopsis thaliana
  unsure at all n locations
  Clone ID: LIB25-010-Q1-E1-E6
catcatgcttctatggagaagaagacaaatgttttagtagaggatctgattggtctctgtgagaatcctacgtggacnaatgatgcaaatcacgttgacaagggttttgaaacaaccggtttgtgtcaggaagattctcagtctggagtgacgactcagtcagatctttctcatcaatcttctggttcagatttcacctggaagccagtggaagatgtttatacttgtttgatgaatcaacctcctaggaaacaagttcttgttgggtctaatcatcaagcggatattcccgagtttgtcaaggaagagattcttgatcagtcagaggctcgaactaaggaggacttagaagggaagctgatgagaaagtgtgtgataccaatgtctgactctgactttgtgngg

SEQ ID NO: 13931 - DNA, 428 bp, Arabidopsis thaliana
  Clone ID: LIB25-010-Q1-E1-E8
cggcttgctcaaaaggttgatcagacgctaggatttgagaagcaatggcgaatagaatagatcatgagtacgattacttgttcaagatcgtcctgatcggcgattccggtgttggtaaatccaacattctctctcgattcaccagaaacgagttctgtctcgaatccaaatccaccattggcgtcgaattcgccacccggactttacaggttgaaggcaaaacagtgaaggctcagatttgggacactgcaggtcaagagcgttatcgagcaatcacaagtgcttactacagaggagctgttggagctcttcttgtctacgacataaccaagagacaaacttttgagaatgtcttgagatggttacgtgagctaagggatcatgctgattccaacattgttatcatgatggctggaaacaaatcagac

SEQ ID NO: 13932 - DNA, 483 bp, Arabidopsis thaliana
  unsure at all n locations
  Clone ID: LIB25-010-Q1-E1-E9
actctcgcgcncggtnangtctngagncccgggccnacccaaacgtccaaacacgcgtccgctaaagatctcactggccaggcttttggtaccggcatacgggagcttcatcggcaggttccaaaaccttggagacatagggaaaaacgcaganaagtanatcaagtatggagttgaggacatagaggcgcgtattaacgagctgttcaaagggactaccacgggaagaaaatgaaggtaacgaacacaaaaatagcctcttgtaacatcttcgtaacgaaccacctgctaaatgaccaatagcgaagtcttgcagggaggatttgtaacatgtattgtgtatccttttagacagttagctcagctctgttgtgttgttgtgtaatgttgtattgtaactgggatcactttttttgtcattgtanaacgagaacaaccgttgacagancnnncgngcccnntgcnccngcngacnnccctttg

SEQ ID NO: 13933 - DNA, 428 bp, Arabidopsis thaliana
  unsure at all n locations
  Clone ID: LIB25-010-Q1-E1-F12
nactctctctacgaaggcggatgcacgcttctctgtctccctccactctcgagtctcgtcccctctgtgtgtgattatcttctttggtgttgttgatgctggagatctcttattcagattgatcacgcctgaaaggtttattaggatttggcaaaaggatggatagaatcaacggtctatcagatctcttctgatttgaattctagggcgtttgtttggaagaatcattgcttctttggttgaggatctttgtgaaacgctgggattttgtgttctagacttctagggtttttgaagcaagctgtagcataaggaaaattttgagaatgaaaggtgaaagagaagttaagaatggtgtttctgaggaagagagagaagtgaagaggaagagagtgatggaacggtctgattcaccacctccaccacta

SEQ ID NO: 13934 - DNA, 508 bp, Arabidopsis thaliana
  unsure at all n locations
  Clone ID: LIB25-010-Q1-E1-C4
ggnntngaggcaattcntctagnctcncctagcngtctcnanatcccgggccgacccacgcgtccaacaanacacaaatgtcttgtaatccttctcttanctttctccttgtgattcctttttatattcctctgatattttctctcagtttgatctcatttgctctgcaatggcgaggaccatgaatgctgctgtttctctcacatcttcaaactcttcttcgtttcccgctacaagttgtgccattgctcctgaaaggatcaggtttactaagggtgctttttactanaaaagcaacaatgtagtganaggtaaaagantgttttccatanangcacaaatcacaacagaaacatatactcctactcctgcaaagaagagtagagaaagtgtcaaatgaanaacgaggaaggtgtgattgttaacaggtacaagaccantagagccttanactggaaaatgccttctcaacaccaanatcacngctgatgatgctcctggagaganc

SEQ ID NO: 13935 - DNA, 533 bp, Arabidopsis thaliana
  unsure at all n locations
  Clone ID: LIB25-010-Q1-E1-A1
aaaaaanaaaggcanttctcttagtntngcnacttgtctnncanancccggggcccacccaacgccttcaaaacaaaanccttcaagtanngagtggtgaatcggaaaatgtcgcagtcttccgtcgatataccgccaaaaggtgggtttagcttcgatctgtgcaaaaggaatgatatgctgacacagaagggtcttaaagcgccgtcgtttctcaagactggaacgactatcgttggattgatatttaaggatggtgtaatacttggggctgatacacgggcaactgaagggcctattgtggctgataagaactgtgagaagattcactacatggcaccaaacatttactgttgtggtgcaggaaccgctgctgacactgaagcagtaactgatatggtcagctcacaagctgcggtttcatagataccaagactgggccgagantctcgagttcgttactncanttgaccccttctcaaaanacatcntttcaagcctaccaanggccattgtctcaacctgcctccttg

SEQ ID NO: 13936 - DNA, 430 bp, Arabidopsis thaliana
  Clone ID: LIB25-010-Q1-E1-A11
gcaaacttgtagagatgtccatcctatcagcaaccaaaagccatgggagcgaccatgtgttttctcttgcttccacagtggtgaaatttgttcttgaaacaaaaggggcccacagtgcgaggaagatatacaagaggttcttggctcttcctggtcccagtcttgttctatacaaaggttgcattgaaatagagaccaacctcatatcagtaggtgataaagatggtctcagtaatgcccggaagctgtatgattctgctgttgcaagttacggtcaagacgtggagctgtggaagaattactactcattggagacaaagctgggaacatcagagacagccaatgggagtgtattgggcgtgcgagaaagactctgaatgaatccgcggattcatagtttgatctccgaattaaaaggtagtccaatatt

SEQ ID NO: 13937 - DNA, 505 bp, Arabidopsis thaliana
  unsure at all n locations
  Clone ID: LIB25-010-Q1-E1-A6
gnaatagaggcaattcttcnaggttccgtaccngntgtacattcccgggcccgacccacgcgtccaangagagatctgtgacattaatggaacctgtgtggatgctgcggaagatgagtttttcaggttaacgacaaaagaagggaaattgacagttgaaagagagacttttaggacaccaacagctgatttctcgccgatcttgcnattcgagcaagaccctgttcagattcttgatgctttgttgcctctgtatcttaacagtcagattcttagggcattacaggagtcattggctagtgagcttgcagctagaatgagtgcaatgagtagtgcttcggataatgcatcggatctcaagaaatcgctttcgatggtgtataatagaaagcgtcaagctaagattactgggagagattcttgagattgttgctggagctaatgcacaggtttgatttgttttgaaccctctttngaatcntctatatgagtccaaaaactctct

SEQ ID NO: 13938 - DNA, 339 bp, Arabidopsis thaliana
  unsure at all n locations
  Clone ID: LIB25-010-Q1-E1-A7
gaatatagngaatcccnngncccncnngtcanaatacatcggnngccgacccacgcgancaaagacggagaagagctttggcaaaagccgaaaccgggtctggtaaacttttatctgaatgtatatgtatataatgttttagagtagtagtaagtaatatagtgtaactatttcttggggaagtccatttctacttgcttttctttttatctgcatttggcttttggttcccaaaaactcttatttctgttgtacattcatgtctgaatttaataacctcttcttcaagaaatggctttcactcacaaaaaaaaaaaaaaaaaaaaaaaaaaagggcgg

SEQ ID NO: 13939 - DNA, 497 bp, Arabidopsis thaliana
  unsure at all n locations
  Clone ID: LIB25-010-Q1-E1-A9
tagcagctctgngggacngcntangtctcgagnccccgggccgacccacacgtccanccgaattctctgcgatttccatggagttatctcttctccgtccgacgactcaatcgcttcttccgtcgttttcgaagcccaatctccgattaaatgtttataagcctcttagactccgttgttcagtggccggtggaccaaccgtcggatcttcaaaaatcgaaggcggaggaggcaccaccatcacgacggattgtgtgattgtcggcggaggtattagtggtctttgcatcgctcaggcgcttgctactaagcatcctgatgctgctccgaatttaattgtgaccgacgctaangatcgtgttggaggcaacattatcactccgtnaagagaatggttttctccngggaagaaaggtcccaaatagttttcaaccgtcctgattctaatgccnnantangggtnggtaaataagtngttttgganggantnattttgg

SEQ ID NO: 13940 - DNA, 430 bp, Arabidopsis thaliana
  unsure at all n locations
  Clone ID: LIB25-010-Q1-E1-B10
tgcattcgaattgagttcctcctcggagcagcgtcaaagtcaacggccgtctgattcttgtttatctcctaaacccaaaaacaacgatttcactgtcacngttgtcaagctcgaatcacactagccgagacgatggcgagaccatcgatcgccacgtgtgatccaagcgcacgaccttgtttagcgacgcgtggctcacttcctcgtagccgtacatgcgcgccgcttttattcctctgcctcctcctaggtttaacggtcttttgtgcggacgcaaatccttctgactcgaagcttctctgctcccgtcntcttccatgtgagccttctattganatgggtgagacantgtnngaatcctgtggganactcttggnaccggaaagtgagtggttccttgcngtaagattaannctttgacgnagttant

SEQ ID NO: 13941 - DNA, 471 bp, Arabidopsis thaliana
  unsure at all n locations
  Clone ID: LIB25-010-Q1-E1-B11
ctcggtaanggtctccaantccccgggccgacccacncgtccnaatgacntncactttgggacacaagatcacaacaganaatattatatccaaangcatctcttgagtatgcacgacgccatttgcaaggacaangtgaacgttgcgggatactttgtgtggtctttgatggacaactttgagtggcaanatgggtncaaggcgaggttcggactttncnacatcgatttccacaacaacntgacccgtcaccanaaagtttcgggcaantggtattccgaattccncaaaccacagtttccaacctccaagctgagggaagaactctagatgatcaagaatcctatcgggacataataattgagtacaagantcntgaagatgttgttgaggataatatcagtttgtgtgttctatggattcntttcatctaccggtccttcctacgttagaangacttgtnacttgtt

SEQ ID NO: 13942 - DNA, 506 bp, Arabidopsis thaliana
  unsure at all n locations
  Clone ID: LIB25-010-Q1-E1-B12
gngnngngntggntttcaattcntagcgattnggtnactgtctntangtncacggggccgacccacagcgtccaaacaagaaaccatgaaactttctcttcatcaaccacttctcttcttcttcttagccagcgtcctcccattaatcctgaccgtccattctcaatcagacgactcagatttcatccgtactagctgcaacaccacattataccctgacctatgcttctcttctctttcctccttctctagctctgttcacaacgatccagccctcttggctcgagccgccatctccgtcactctcaccaagactctcgacttagcctcatacctcgccaatatcaccactctccagccagagagcaacgaagatggtgctcaccacccaaccgcagccgctgtttttcacgactgcttcgacaatcttaaagacgcggtcgaagaaatgaaangctcgatgaaacagatganggaagctggtctcgactgggctcgctcgaatt

SEQ ID NO: 13943 - DNA, 56 bp, Arabidopsis thaliana
  unsure at all n locations
  Clone ID: LIB25-010-Q1-E1-B2
cgttgntgaccaacagacgtaggcnccgttagcttctcttcaagcgcccctggtgg

SEQ ID NO: 13944 - DNA, 442 bp, Arabidopsis thaliana
  unsure at all n locations
  Clone ID: LIB25-010-Q1-E1-B3
ggaatgcaggtaaattcactgatgaccattgaagcaaaaaagaagtacgagttcttggaatctataagtgcaattatggattcccatttcaaatattttaagcttgtatgtttcttctcttattttgcatttagagatgtaaccaagtgtgaccaactaagggaaacatcagtacctcgttgtactccttaatgtggtctctttgttctccagggttatgatctattaagtcaattggagccttacatccatcaggtattgacatacgcacaacagtcaaaagaacagtctaagattgaacaagatcgatttgcacaacgcattcaagaattcaggactcaatctgaattagacagccaacaggcctctgctaaagcagattcctccgatgttggtggaaancatgtttatanagctatcccccgttaaaacgtnnaancaa

SEQ ID NO: 13945 - DNA, 505 bp, Arabidopsis thaliana
  unsure at all n locations
  Clone ID: LIB25-010-Q1-E1-B6
gngnngtggangnaattcttccagggacngtaccggtcaggacattcccgggccgacccacgcgtccanttttgctcttggctgattcgttggagcttgatctctccgtggaaatgggtggtttccggtttcaccagtatcaggtggttgggagagccctcccgacagagaacgatgngcaccctaagatctacaggatgaagctttggggtagaaatgaagtatgcgccaagtccaagttctggtacttcatgaggaaactgaagaaggtgaagaaaagcaacggacagatgcttgccatcaatgagattttcgagaagaacccaacgaccatcaagaactacgggatctggttgcgttatcagagccgaactgggtaccacaacatgtacaaggagtaccgtgacacaacactcaatggtggagtggagcagatgtacactgagatggcttctcgtcatagagtgaggttcccttgcattcagatcatcaagactgcgactgt

SEQ ID NO: 13946 - DNA, 442 bp, Arabidopsis thaliana
  unsure at all n locations
  Clone ID: LIB25-010-Q1-E1-B7
cagcgtacttangttatatctctgctggaggggtgattgcatcagtgctagtggttttatgtttgttttggattggtttggtagatgaagttggaattcacagcannggaactacactaaacttgtcaacattacctgtggctataggactctatggttactgctactcaggacatgctgttttccccaatatttatacttctatggccaaaccatctcaataccctgctgttctcttgacatgttttggtatttgtactctgatgtatgccggcgtcgctgttatgggttatacgatgtttggagaatcaacacagtcacagtttactctcaacttgcctcangatttantttgcaactaanattgctgtgtggactaccgtggggcaatccatttaccaaatatgctttgaccatatctccagtagcaatgantcctgag

SEQ ID NO: 13947 - DNA, 84 bp, Arabidopsis thaliana
  unsure at all n locations
  Clone ID: LIB25-010-Q1-E1-B8
ngtcacctcagaagcttcttcaaacctcatcctctgctgangaaaatgtacaaggttggntgaccatgttgcctgtgcngttgc

SEQ ID NO: 13948 - DNA, 419 bp, Arabidopsis thaliana
  Clone ID: LIB25-010-Q1-E1-C12
gcccacgcgtccgatcaaaaccgcctccatttctcattctctctctctctaaaaaaccaaatccagagtcagagaaaatctgtgatggctctttccaacgcctcctctctctccaccagatctatctacggcggtgatctttctcaccgtccaagcaaccgtcaatcatccttcacatttcatcccgccgtcaacaccaagcctaaatccgttaacctcgtcacggctgtacacgcggctgagccagctagaaacgctgtttcagtcaaagaatccgttgcgtcttcttcgtctggtgcattgaaatggactccagagagctggaaactgaagaaggctctgcaacttcctgattatcctaacgccaatgagcttgagtctgtgcttaaaacgatagaggcttttcctccgattgtgtt

SEQ ID NO: 13949 - DNA, 443 bp, Arabidopsis thaliana
  unsure at all n locations
  Clone ID: LIB25-010-Q1-E1-C3
aacacataaaaaattaagagttgtcattctttgaatccccgcaagcaagaagaagaagaagaagaagagagtcaatttgtgtgttttgtcatttgaagaagagagagaaagaggaagactttgactcgtcttcttcctctcttcttctctctctatcactgcatttgtttttcctcacagcgaaccttgagatttgattagatggggaattgttgtggcaatccgagttcggctacgaaccagagtaaacaagggaaacccaagaacaaaaacaatcctttttacagcaatgaatacgctacaacagatagatctggagctggttttaagctctctgtgctgaaagatcctacagggacatgatatatccttgcagtatgatcttggacgtgaggttggtcgangcgagtttggtataacttacttgtgtactgataangaaa

SEQ ID NO: 13950 - DNA, 416 bp, Arabidopsis thaliana
  unsure at all n locations
  Clone ID: LIB25-009-Q1-E1-H6
atctacaagatctcttgtgtatagctaatgttgctgaacagcatgaagtttgggattttctaagcgcagcctctaagaattattcttttggnaagtcttcatcagtgatgaaaactcttgcagtcaatgttgatgatgccatggacgatattgtacgtcagttcaaaggtgtctcagatggccttatgcgcaaggttgtaggatctccacttgatgaacatgatcatgctccnacccgccacctctcctgnagtgtaaatganntaagcactcagctctctagggaaagcgcaactgaatctatgcacagcagcatttctgngactgaangacatcgacanacntggagnanaacactcannngggaaggtanatttgattcanangccnatgggtgggacacnggataaggaatt

SEQ ID NO: 13951 - DNA, 507 bp, Arabidopsis thaliana
  unsure at all n locations
  Clone ID: LIB25-009-Q1-E1-F10
ngnnngggggntnngggnanttctngcagctcggtagcctcttnaattcnagggtcgacccacgcgtccgaaaaatgcatgtatccataattttcgtcttcaacgtcctcgtcgtttcatatccaaatccatgacaaaaacgatgccggatgctaatcctcttgacctccgtcgacgctcgggcaactatcaaccttcttcatgggaccatagttatctcctctccatcgagaacaaatatgtgaatgaaaaagaagtgataactagacatgtgttgaagaaaaaggtgaagaagatgctagaggaagtagagacgaagagccgtctcgagaaattagagctcatcgatgatttacaaaagcttggggtttcgtatcattttgagcaagaaataaataacattttgacaaattttcatcttgaaaatggaaaaaatatttggaaatgtgacaaggaagaagatttacatgcaaccgcactcgaattcccgactcctaaacaacatgg

SEQ ID NO: 13952 - DNA, 490 bp, Arabidopsis thaliana
  unsure at all n locations
  Clone ID: LIB25-009-Q1-E1-F12
cttctacgccgtctcngtagcctcttaaattctannggtcgacccacncgtccnatttccgtctctctctctttttatctcaccgtctgatcgcttagaagcaaccatgcctcagggagattacatagatttgcacaggaagaggaatggatatcgcctcgaccacttcgagagaaagcgcaagaaggaggcgcgtgaagttcacaagcactccaccatggctcaaaagtctctaggtatcaagggtaagatgattgctaagaaaaactatgctgagaaagctctcatgaagaaaacattgaaaatgcatgaagagtcatcatcaaggcgtaaggctgatgagaatgttcaggaaggagctgttcctgcttatcttcttgatcgtgaagacaccactcgtgccaangttcttagcaacaccattaaacaaaanaggaaagagaaagctggcaaatgggaagtccctcctccaaangtccttcaattgctg

SEQ ID NO: 13953 - DNA, 449 bp, Arabidopsis thaliana
  unsure at all n locations
  Clone ID: LIB25-009-Q1-E1-F2
ngntccggtccanaganttacgggtccaggcccncgtccgaccacnangtccggtcagtgaggaacataaagaactggggaacattttggatattttttctccaagtgaagttaaaaggaacaaggagacaaggttggagtcgaccaatcattgantngagctagagaaatctggctacaattcaatttcagatgaggttttcaaaancacagaagatgaatgttcaaatagcataagaagctgtgaattttcttcnttcgtttttgtccaatgggaacaatggnacaattgggaatcatgggaaaatttggagccatggcacaanaccagtaanttaaccagatgatcatggataaacaatcagtacaagaatggctatcgcncgtcaactcgctaatancatccgtcctcancaaggcaaganacgttaanangtttncaggaagat

SEQ ID NO: 13954 - DNA, 495 bp, Arabidopsis thaliana
  unsure at all n locations
  Clone ID: LIB25-009-Q1-E1-F4
angcctncagtagccgtcnagaattcaagggtcgaccnacncgtccgagcagcctngggtcttttccaaggtttttgttttagccatggctaaacctccgtcctttggctgctgcttcttcctcttattcttctccttcttatcttcttcctttgtctcatttgccctaaccgatacagaagctgccttcattgtgcagcgacaacttttaacgttaccagacaacggcgaacttcctgatgatatcgaatacgaggttgatctcaaggctacctttgccaacaccaggcttaagagagcttatatagctcttcaggcttggaaaaaggccatattttcagacccatttaacaccacgggggaactggcatggcccacacgtgtgcggctacaccggtgtggtttgtgcgccagctccttgatgattccgatgtcacggttgtagcctggtgttgacctcaacgggtgccggatatcccaagggcatttgcctgg

SEQ ID NO: 13955 - DNA, 425 bp, Arabidopsis thaliana
  unsure at all n locations
  Clone ID: LIB25-009-Q1-E1-F5
ggtcaaacatttccaccattttcgtttcttaaacctttcttcagctcttctcttcgtcaatctgcgatagtggaattgaagtctcttcggtgagtttctttactaatggagaccgccgcttcgagcgtagctacaactcgtggcggttcccttcagaatccgtcgccgacggctccgtcaagaaaagagtggcgcgccgtttcggattcacaagacaccacagattatgtggatttggaacagttaaagctgaacaggacagatgagagaacgatttatgagaatggaagagaacaggatggttattcaaatagtgagatgttgcagcaacagattcttaatgtttctagaaagaaaggagaattacagcagttggagattgagctcgagctcagatgantgcgagacatgagatnatggagant

SEQ ID NO: 13956 - DNA, 420 bp, Arabidopsis thaliana
  unsure at all n locations
  Clone ID: LIB25-009-Q1-E1-F9
acatagtttcttcttgcttttgagaaaaaataattatatatttttatataggaaagggttaatttattaataaaaaaaaataaaaagaagcagaaaagagataatgcagggtggtaggcttttgacggtgttggtgtgcctcgcctccacggtggcgttggtgagcgccggtgacccttacttctactacacgtggaacgtaacctacggaaccgccgcgcctctcggaattcctcaacaggtgattctcatcaacggacagttccctggtcctaacctaaactcaacctccaacaacaatgtcgtcatcaatgtcttcaacaacctcgacgagcctttcctcttgacctggagtggactccagcacangaagaactcatggcaagatgtgtgactgggaactcatgcccaatcccagca

SEQ ID NO: 13957 - DNA, 499 bp, Arabidopsis thaliana
  unsure at all n locations
  Clone ID: LIB25-009-Q1-E1-G11
gngnntngnngcaattctncgcannccgtagccgtcntanattcaagggtcnacccacgcgtccnaagagagaaggagggagagaaggagcttagtggtctcattaccattaccagctccatacgaaccgaaacgacgccgttcgctcaacccttttctctgcaatctcncttcctcccacgagtttctcagcttttctcggatcatctaattaaganaggagatcttgtctcacggtgggattgatttttctcttcacgaagatcgtgttccaggcaattaactgcagaaaatggtgatgtgggtctttggctatggctctcttgtgtggaacccaggatttcactacgatgagaaagtgttaggtttcatcangggatataaacgtgtcnttgatcttgcttgcattgatcatagaggtacaccagaacaccctgcaagaacttgcancctccaagaaagctgaagaagccatatgctggggtactgcattctgtgt

SEQ ID NO: 13958 - DNA, 493 bp, Arabidopsis thaliana
  unsure at all n locations
  Clone ID: LIB25-009-Q1-E1-G2
acgcctcnatgtagncctcnagaattcaanggtcgaccnacccgtccggtaacgaattcgaaatggttccgtgacttttggctcagtgctaactctgagaatgagttcctcggcggcgacgatttctcagttatggaagaagagttcgaggagatgatcgcatcgtctgatggtggatccatggctgatacagttacagaagcagatgtggctagttatttgaagatgcttttgaacatagcggagtctacgaaagagaagatttatagatcgaaggtttcgtcttgttcaccaaagtataatcagaagaagtacatgaatccgaactttaattgtcgccggaatcatcatatctatcagccacggtgaagcttctagaaggaacaaagctcttccttcttcttccttcgagatgataatcagagtcctgtccgtgtttatgggctgaatccgatctttccgccttccctgttttttggtaattcngtgaata

SEQ ID NO: 13959 - DNA, 423 bp, Arabidopsis thaliana
  unsure at all n locations
  Clone ID: LIB25-009-Q1-E1-G3
aattctatttgnccggccccggtcatatcataacgggtcgnggncacgcgtccnatttcacctttggtggcaaacacaacgacagatananagaaacgatggcgtcgaactcgcttatgagctgtggcatanccgccgtgtacccttcgcttctctcttcttccaagtcgaaattcgtatccgccggagttccatgtcccaaacgccgggaatgttggtcgtntcagaatggctgctcantggatgcntgncnagccacnaccancttaccttgacggttctgctcctggtgactttgggtttgacccacttggacttggagaagttccagcganccttgagagatacanagagtcagagctcatccactgtanatgggctatgctcgctgttcctgggattttggnaccagaagcantaaga

SEQ ID NO: 13960 - DNA, 496 bp, Arabidopsis thaliana
  unsure at all n locations
  Clone ID: LIB25-009-Q1-E1-G4
ggtgnngnaactttctcngcngtcggtcttancttacgggccgagcncgcgtccnagataagatactggttactgaaaacagagccaaatgagtggtcatggtcagaccaanaatcaaacggcggtatcagcaaatgggacggcgtcaagaacaaacaagcccagaagaatcttaaatccatgactttaggagatctctgtttcttctaccattcaggaaccaaatcaagatgcgtcgttggcgtggttgaagtatcacgtgaatggtacactgatgatgctgaangagtagaaggagaaggagcggttgatgtcaaagcgattggagaaatgaggaaatgtgtggatttgaaggaaatgaaaggagacaaagggattattactaaaggttttgttttgtttagacagccgangttgtctgttgttcctgttgaggaagatgtttggaatatgatttgtgaantgggaaatgggttttgtggnaattgntngggag

SEQ ID NO: 13961 - DNA, 506 bp, Arabidopsis thaliana
  unsure at all n locations
  Clone ID: LIB25-009-Q1-E1-G9
nnngngnnntnnnngcaanttnnacgccgnncggtgccgtcttnaattcangggtcnacgcacgcgtccgaaaattagtagtcaagcaaaacaaagatgcaccggcacgtatcatatatggcaaagagctagccgcagcatatactactggccggtattaaaaaatgtaaataactaacantcatatttatttttctttattttaaaagcatatttattttgtcgtgattatgttaattagatttcaaatttatatattttcacatagaccaattaacaactacaatgaaatacttgataacacataccccgatgaagtagttttttattgaataaaaaaaacaaattgaactggtgtagaaaacttgtgaataagagagtttaacattttgtcaaaaaaaaaaaagaagaagagagtttaacatattttttttcggttttaagtttagttaacatttttcatatccaaagttatacnctcaaaattataaccaacacgccttaca

SEQ ID NO: 13962 - DNA, 491 bp, Arabidopsis thaliana
  unsure at all n locations
  Clone ID: LIB25-009-Q1-E1-H2
tactcnncccggnccggtcanaganatacgggncgaggcccgcgtccggttttaaaaagggcaaattagagagatttctccttcaataacaaaaaatcgccagctttatctctctctttttcacatcccatggctagatggtgacgacgattcacgcataanntagggttcccccacaaatcatcttacacgtatcctctattccttccttcctttctccgtcatcatcatttttcccaccgacaacaatctctcggagtttggatcaataatggcgttgaagtctagttctgctgatggtaaaaccagaagctctgttcagatcttcattgtgtttaagtttatgttgcttcntttacattttgggagcatggcaacgaagtggttttggtaaaggagacagtattgctcttgagatgaccaacagtggagctgattgcaacattgttcctaagcttgaatttcgagactcatcancgcngggaatnaag

SEQ ID NO: 13963 - DNA, 422 bp, Arabidopsis thaliana
  unsure at all n locations
  Clone ID: LIB25-009-Q1-E1-H3
aggaggttgtgttccgagcangaagaanaagccggccaccaccggcgatggtcccggaatcgatgatgataacgacgctactaatgctccgatccaaattgacgatgatcaaaccaccattgacggcgatcgaacaacggcgacgaatactggnggaacaacaacaccagcgattactactacggctgctaagatctcgtcaccgctcaagatcttcgtcgtgttctattcgatgtacggacatgtgganagcttancgaanangatgaaaaagggantggatancntccaaggagtggangcgacgttgtacacagttccggagacgctttcgcaggaggttgttgnncagatgaaggcgccngttaacgatttggggattccgtggnaatancgnggttggaattncccgcgggctcagg

SEQ ID NO: 13964 - DNA, 399 bp, Arabidopsis thaliana
  unsure at all n locations
  Clone ID: LIB25-009-Q1-E1-H4
tatacgtgtggatggnaatgatgcacttgccatgtacagtgcggtacatactgctcgcgaaatggcaattagagaacagaggcnantcttgattgaggccttaacataccgtgtaggacaccattcaacatcagatgattccactangtaccgctctgcaggtgagatagagtggtggaacaaagcangaaacccactgtctangtttaggacatggattgaaagtaatggctggtggagtgataaaacggaatcggatctgagaagcagnatcanacgaagagatgttannancgctccgggttgcagagaagactgaggaaaccgaatctgcagaacatgttcncagatgtctacgatgttcctccatctnacctcaggggancaagaacttcnggt

SEQ ID NO: 13965 - DNA, 60 bp, Arabidopsis thaliana
  unsure at all n locations
  Clone ID: LIB25-009-Q1-E1-F1
ggataccggaggtattcctgaggcacattgcngctgttctcggngctaagcttccaccta

SEQ ID NO: 13966 - DNA, 497 bp, Arabidopsis thaliana
  unsure at all n locations
  Clone ID: LIB25-008-Q1-E1-B2
gntggngnaattccacgcttntcggtgccggtcatgaattcaangggtcgacncacgcgtccgaatctctctgtatcttctcttgagtggagcgaatatccaaaagagttccgagtttctttcatccttcacgagcttatactttttcttctccattcgtttgtttttaacgatcaaaaacaacggcgaaggtattggaaataagacagaagctgttagctctgtttctccatggtgtcaagatcttgtgctaattttctagacttatcatcttgggaccttttagattttcctcaaactccacgaactcttccacgcgtcatgactgttccgggaatcatcaccgacgtagacggtgatacaacctccgaagtaacttctacctccggtggttcacgtgagaggaagatcattgtagctaacatgttaccantccaatctaaaagagatgcagaaactggtaaatggtgttttaactgggacgaagactctctctg

SEQ ID NO: 13967 - DNA, 431 bp, Arabidopsis thaliana
  unsure at all n locations
  Clone ID: LIB25-008-Q1-E1-B4
tcccttaactctatctctaggtgacttaagagtaaaaaatggtagaggcagaggttgaagtagatgtggaaatcaaatctacggctgataagtttttcatgttctctagaagatcacaacatgcctccaaagccactcgctatgtacagggatgtgatctgctcgaaggcgagtggggcgaagttggaagcatactcttgtggaaattaactgttgatggagagccaaaagtgtcaaaggatatgattgaggcgattgatatgaagatgaatatgatccagtggagggtgttagagggacctctgaaggaagagtacaatattttctcgaaaacgatgaaagtaagccctaagcaaggagggtctggaagtgtggtgaagtggaacttgaagtatgagagaattgatgagaaggtggctcacctagagang

SEQ ID NO: 13968 - DNA, 499 bp, Arabidopsis thaliana
  unsure at all n locations
  Clone ID: LIB25-008-Q1-E1-B5
ntgnggcagttcnaancncncngcgncctgtnnaangtcnnaangtccccgggccgacccacncgtccgtttctcgtcaatctcaatcaatggcttcngaagatactctctcctcgaatcctctattgcanaattttgacttccctccgtttgactccgttgatgctcaccatgtcagacctgggattcgtgctctgttgcancagctcgaagctgaattggagcanctagaaaaagctgtanagccttcatggccaaaactagtggagccattagagaagattantgatcggttatctgttgtttggggaatgatcaatcatcttaaggctgtcaaggacacacctgagcttcgtgctgccattgaagaagttcagccggagaangtgaagttccagctcaggttgggacagagcaganccatttacaatgcatttaangctattccaagaatctccagactggaattcatttgagcgaaagctcgtcaacgattaat

SEQ ID NO: 13969 - DNA, 262 bp, Arabidopsis thaliana
  unsure at all n locations
  Clone ID: LIB25-008-Q1-E1-B6
gcggacgcgtccgcccangcgtccgctgagtctttcttggttcactttccttaaacacnatttgacatngatgcaatttcatctcttgggaccaattgtgttctttctggggtttctccattttcacaatagaatcaatcaaaatcgaaactttctccgtttangagtcttgatttgaaggaananccaatggcttcagcanatttcacnaaccaaaccttaaccgctttctcttcntcgtctgcgtctccttttcaggcaa

SEQ ID NO: 13970 - DNA, 502 bp, Arabidopsis thaliana
  unsure at all n locations
  Clone ID: LIB25-008-Q1-E1-B7
agnntngnggnaacttctanctgntcngcgnnccgtaanggtcnnagagtncccgggccgacccacncgtccgcaataagcagcatctctataatccctaagattcacaatggagcttggaggaaaatgcaatgcaattacaaccacaacaatgatctcaacagaagtaaagccacatacggatccggaaccagaagccaaacccgaatcagatccatccatggctttattcccgatcaagaaagaaaaccaaaaaccaaagacacgtgtcgaccaaggagctaagtaccgggaatgtcagaagaaccacgcggcctcaaccggaggacacgtggtggacggatgctgcgagttcatggccggcggagaagaaggtacactcggtgctttaaaatgcgccgcctgtaactgtcaccggagcttccaccggaaagaagtgtacggacacaggaacagtanacaagatcatcagctgatgataactccggcgttttacagcagt

SEQ ID NO: 13971 - DNA, 356 bp, Arabidopsis thaliana
  unsure at all n locations
  Clone ID: LIB25-008-Q1-E1-B8
gattttgaaggatggattatcagcggttcatgtaccttatgcttatggatttgcgattatcttgcttacgattatcgtcaaagcagcgacgtatcctttgactagggcaacaggttgaatcaacactagcnatncaaaatcttcaaccgaaaatcanagcgattcaacaacgttacgcaggaaatcaggagaggatacanctagagacatcgcgattgtataaacaagctggtgttaanccgttggcaggttgcttaccanctttagcanccataccagtttggattggtttatacnangctctctctaacntggccaacgagggantgtttacacgaangtttcntttggattcc

SEQ ID NO: 13972 - DNA, 496 bp, Arabidopsis thaliana
  unsure at all n locations
  Clone ID: LIB25-008-Q1-E1-B9
nngnnnngnaacttntaaacgtgtcagcngncctgtaagaggtcaagggtcgaccgacncgtccgcgtggaaccacatcctctttaagctcactagctgattgatatcgtcttatacctttggccgtttcgtctctctctctctcgtttaattacttgtacctatcaactcagtgatactctcgcttctgagagagaagagagaaagcgaagctcgtttcgtatcgtcttctttctcttcatccgacgctggattcataagggcattgataattggacttgttggttaagatttgaatcaacctggagctatgtcgagttttaatctgagtgtagatgtgaatcagaatgggaatatcaagaatgttgattctttatctacattggacgatattgatgacattgattttgccaagttgctagagaaagcnangggcattgaatattgatagactgagatcacttgacgaaaggtcccttacngaatnaactggttt

SEQ ID NO: 13973 - DNA, 110 bp, Arabidopsis thaliana
  unsure at all n locations
  Clone ID: LIB25-008-Q1-E1-C12
aaactcaggattgattcnttatgaatcngcaccaagttcgtacttttcgagtttcggtcaatcactctatcgagtttttanatctatccacaagtcttgangctgaacga

SEQ ID NO: 13974 - DNA, 490 bp, Arabidopsis thaliana
  unsure at all n locations
  Clone ID: LIB25-008-Q1-E1-C3
gngnnngnaacttntaccngtcggtgccgtcnnnaattcaagggtcgacncacgcgtccgcttcttcttcttctccgttcgtgctctggactcgctcgaaatcgatccgatgataatttatgcagctcgaaacttaatttagaatcatacctttttctggatttggctgacgaatccgttttcaattgcacgagttgcttcgccaggtttatcaacttaagaatgtctaattatcaaggggatgatgctgagtacatggaagatgtggatgatgaaatggatgaggatgatttagatgaggattttcgtggggatgatatggctgcctctgattccgatgtcgatgagtttgactactctaataataaaatagctgacacttcagctgaccaagcccggaaagggaaagacatccaggggattccttgggacangcttagtattacgagagagacatacagacaaactagactanaacagtataaaaatt

SEQ ID NO: 13975 - DNA, 502 bp, Arabidopsis thaliana
  unsure at all n locations
  Clone ID: LIB25-008-Q1-E1-C4
ngngtggnggaaacttcnacgctnttcggtnccggtcacnaattcacgggtcgacccacgcgtccgaggaaaaagaacgatctagaagaaagaaaaaaaaaggaaaagaaacccttatggaggttcccacaccactctatatataataacatccttctcctaaatcccgcatcagtacttctctctgctctcaagataattttgttctctcaatttcattcttaaaccctagttcttcgattttttccgatctacgacaatggcggacgctgaaacctttgctttccaagctgagatcaaccagttgctttccctcatcatcaataccttttactctaacaaggagatcttcctccgtgaactcatcagtaactcttctgatgctttggacaagattagattcgagtccttgacggacaagagcaagctcgatggtcagcctgagctcttcattcacatcattcccgacaagactaacaacaccttgaccattattgatagg

SEQ ID NO: 13976 - DNA, 70 bp, Arabidopsis thaliana
  unsure at all n locations
  Clone ID: LIB25-008-Q1-E1-C8
cntttgtggagttggtagtagtattggtagtcacagatcaagtnancatttggctgatcaataccatgat

SEQ ID NO: 13977 - DNA, 276 bp, Arabidopsis thaliana
  unsure at all n locations
  Clone ID: LIB25-008-Q1-E1-D10
ncgtcngcaaanngtagttgcganaaggagtggaanagttaaacggaagaggagcanaaggatatctcttgttgcagagggaaattatcaacaagtatctgcagctgaggctatagttgatatttctagaaagtctggtcgagaaactgctgcttgtatcacttccttaagcaaaaatctactttggttcgccgacatttcttcctcggttgctgaggacaacacaatagacacattgcagctgacagaanagaagctanaggancacganacnna

SEQ ID NO: 13978 - DNA, 482 bp, Arabidopsis thaliana
  unsure at all n locations
  Clone ID: LIB25-008-Q1-E1-D12
aactttacgccnncngtagccgtctaaaaattcnagggtcgaccnacccgtccgaggaatctnatgaangctcaaggattgattcatgaagcatacagttgttaccttgaagctgttcgtatacaaccaacatttgctattgcatggtcnaatcttgctggtcttttcanggagtcaggtgatctcaacagagcccttcantactacaaggaagctgtgaagttgaaacctgcattccctgatgcatatttaaatttaggaaacgtgtataaggccctcgggagacctactnaancnatcatntgttatcagcatgccttacacatgcggccaaattctgcaatggcatttgggaatatagccagtatatactatgancaangtcaactagatttagcanttcgacactacnatcatgctctctcccgggatccacgatttttgggaggcttagaanaacgtgggtaatgcattnaacgata

SEQ ID NO: 13979 - DNA, 496 bp, Arabidopsis thaliana
  unsure at all n locations
  Clone ID: LIB25-008-Q1-E1-D2
gntngngnaattctacgcnntncggtgccggtcacnaattcacgggncgacncacgcgtccnaacttttccttcttcttcctcaacctttgcttcaatcttcaacaactttctttttataaagattttgcaagttaagtgtaaacctacaaaaaccaaacatggtggttttgccacagccagtcactttagataaccacatctccctaatccccacatacaaaccggttccggttctcacttcccattcaatccccgtcgtcaacctagccgatccggaagcgaaaacccgaatcgtaaaagcctgcgaggagttcgggttcttcaaggtcgtaaaccacggagtccgacccgaactcatgactcggttagagcaggaggctattggcttcttcggcttgcctcagtctcttaaaaaccgggccggtccacctgaaccgtacggttatggtaataaacggattggaccaaacggtgacgttggttggattgagtat

SEQ ID NO: 13980 - DNA, 488 bp, Arabidopsis thaliana
  unsure at all n locations
  Clone ID: LIB25-008-Q1-E1-D5
ntgngnaattcnaactggcgcgncngtaaggtcacaantcccgggncgacccacncgtccncccacgcgtccgggttcccgcctcaaccaaatcaaaaaccctaatttccccaccaatcagatcctccacaattatcccaccgacgaatcctatcaatctctctagatagcagcaaatcagtgtcggaacaaacccgacccgttttgagtgatttgacgaatcttccaaagaaaagagggatttcatcgattttgggtgatttgcttgatgaatctggtaagaccgttgctcatgaagtttcaaaagagaagttttcaaagaggttgtgtttagtcgtagatgatttggttaaggaaaatgctacacctttggatacaattcaagggtcttgttcgtttgataagaatacttctggtgatgctgttgacaaagaagagtatcatgatgctgtaatggaattctccagtggagattgcaaagcattgaa

SEQ ID NO: 13981 - DNA, 501 bp, Arabidopsis thaliana
  unsure at all n locations
  Clone ID: LIB25-008-Q1-E1-B11
nnggngngnaacgttaaacnntcacgcagnnctgtaagaagtcnagggtcgacngacncgtccgctccctcanctccggttccacagtaaagaattgattcctcaatctcacgcggaagcaaaatccaaattctaaaattctaagaaaccactctaatcacatcgctctatcgatcaaaatcgaaacccttattcaaaaatctcttattttttccatttttctctcaatcatctgaatcggttttgagatgagctccgattcaccggcggctggagacggtggcgaacaagccgctgcgggaacaagcgtgccttcaccttcatacganaaacagaaggagaaggcacgtgtgagtagaacatctctgatactatggcacgcgcancaaaacgacgcagctgcagttcggaaactcttggaggaagatncggacgttggttcacgctagagactatgacaaaacgaangcctcaccacgtggcgtcgcttcatggaaggga

SEQ ID NO: 13982 - DNA, 371 bp, Arabidopsis thaliana
  unsure at all n locations
  Clone ID: LIB25-007-Q1-E1-G1
ttctcatgaagacagtcaaaaaatctctttttgtcttctcaaatttaaacctcacctttaatatttctccttacttttgaagctgtaataatattcttgaatctattcctttctttctctttctcatgtttaatcggtgaaggctttactctgtttctttcatcatgtttcaatcaaaagccttaactttttctttagctctttccattacaagagacctctagcttcatactttttanaananttctctctttttctcagtttaagtctcaaganatggtttcaagatngtattcagatctgttggagttagcttcangagactcacnaacgtttggacgcatgaaacctgananatccncacgannnca

SEQ ID NO: 13983 - DNA, 480 bp, Arabidopsis thaliana
  unsure at all n locations
  Clone ID: LIB25-007-Q1-E1-G3
ggntntngnagcatttctagccgggtcggtancggancangnattcgggggtcnacgcactcgtccgacgcgtgggggancctaaaaaagcttcctttttgggacgaagtttcttnganaatttgtgattccgattcttanggttttcaccaagcgttccttcgcgacgagctctcaatttttgaggttattgatttcttcttctgatcgaattttccgtatctgctagtgaattcttctttctcagctcagggtttctcaattctccgttctcgatctcttgatacgatcgatctttcgaattgaatccatttgtcaatttttcgttgcantctcnttggcggcgcaatcatcatagactttgggggatcgcttgtaatgngacgaatttcacngtttggtatcttttacttgcctgaattgaccaattcgacttttanatngaagactctaatnnggttttgtgttgccaanggangg

SEQ ID NO: 13984 - DNA, 285 bp, Arabidopsis thaliana
  unsure at all n locations
  Clone ID: LIB25-007-Q1-E1-G4
atagaanttctcgctttggtanaggaaacttgttgtctgcaaggaaatggttgagcngatggtagttganaactaacctcagttttcctcgtacttgttcagctcttttgttaacatataaggtttcacatgcccatggggaggtggtcttctcaatgaggtcttcnctttggagttggtcgacttcttcgagagcaagattatantggtttggattcattcctggaaggcttgcttntgttggatgacatcctcattcntcttgaatggtaannanangaacaa

SEQ ID NO: 13985 - DNA, 486 bp, Arabidopsis thaliana
  unsure at all n locations
  Clone ID: LIB25-007-Q1-E1-G6
nnngggnnnntngngcatttctacgccgnncggtaccggacnagaattcgcgggncgacccacgcgtccgcttcttcctagattccagcgacttaacaacaacaacaacaacatattctctgctgggtattagattcgaatttctctttttgtgatcagaaatggatcgagctccggtgaccacaggaccgttggatatgccgattatgcacgacagtgatcgatatgacttcgttaaggatattggttctggtaatttcggtgttgctcgtcttatgagagataaactcactaaagagcttgttgctgtcaagtacatcgagagaggagacaagattgatgaaaatgttcaaagggagatcattaaccacaggtcactaaggcatcctaatattgtcagatttaaagangtcattttgacgccgactcatctggctatcataatggaatatgcntctggcngtgaactttacgagcgggattnca

SEQ ID NO: 13986 - DNA, 486 bp, Arabidopsis thaliana
  unsure at all n locations
  Clone ID: LIB25-007-Q1-E1-G8
nnggggnnnntggnagctnttcnagccgctcngtaccgaactgaaattcgcgggccgacccacgcgtccnctttctccgatcgccggttagcagattcaagcgagatacgagatccgacgagcagatcttctgcttaatctgtanacatgcctctcagactagatatcaagagaaagtttgctcaacgatcagagagagtcaaatctgttgatctgcatcctactgaaccatggattctagcaagtttgtattctggaaccgtgtgtatttggaactaccagacacagacgattacaaaatccttcgaggtgacggaattgccagttaggtcggccaagtttattccgcgcaagcaatgggttgtggctggagcggatgatatgtacatccgtgtatacaattacaatacaatggacaaggtcaaagttanttgangctcaatcngattacattaggtgttgnagntgtcaaccgacccttccatt

SEQ ID NO: 13987 - DNA, 500 bp, Arabidopsis thaliana
  unsure at all n locations
  Clone ID: LIB25-007-Q1-E1-H10
nnnnnnnnnggnnnnnnngnancnttcaactttcccgcnccgtaacggtcaaaattcccgggncgacccacgcgtccgtgttgagttaactggggagacattattggatcttaagttgcttgagaaaggtcagataatcataagtactcctgagaaatgggacgctctgtcccggaggtggaaacagagaaaatatatccagcaggttagtttgtttatcgttgacgagcttcatttaattgggggtcaaggtggtcaagtgttggaggtaattgtctctagaatgagatatatttcaagtcaggttgggaataaaatcaggattgttgcattatcaacttcccttgcaaatgccaaagatcttggagagtggattggggccagttcatgtggcgtttttaacttcccgcctaatgttcgtcctgtcccactggagatccacattcatggggtggacatattgagttttgaagccangatgcaggcgatgactaaaccaa

SEQ ID NO: 13988 - DNA, 90 bp, Arabidopsis thaliana
  unsure at all n locations
  Clone ID: LIB25-007-Q1-E1-H4
tgtttctcccantcgatcccggtgttgttcttctccgacattgctttcgtccccgacgaagctanccgaagggttttacctggaacgana

SEQ ID NO: 13989 - DNA, 411 bp, Arabidopsis thaliana
  unsure at all n locations
  Clone ID: LIB25-007-Q1-E1-H5
gtggtatcagcaaggcctctcgggtcatcaatattagtgaagatatatttgctggtttcaacacaactctacgtcaagggaatgttactcatcatgagtatattcaggtgggcaaagggcgagatgttgggctcaatcaaatagctctgtttgaagggaaggttgctggtgggaatggtgaacaggttcttantcgagatgtatacagacttggccagctccttgatttcttccgtatgatgtcattcttctttacaaccgttggcttctatctatgtacaatgttgacggtgcttactgtgtatattttcttataagggaaggcatatctggcactttccggaatttggagctactaatcgagaaagaancaatcctcctgggacgatactgcacttaaccccgccttga

SEQ ID NO: 13990 - DNA, 484 bp, Arabidopsis thaliana
  unsure at all n locations
  Clone ID: LIB25-007-Q1-E1-H7
gnnnntngngcatttcnangccgntcggtaccggacacnaattcncgggtcgacccacgcgtccgcggacgcgtgggcggacgcgtggggttcaacatttggcggagtcaaagaaacagagtgattctctgatccgattccggcgaaagaggacgaaacaaacggaacttgttcatcatcttctccagaaatgacgtcgtttcaggtgatgcgttcttcaaattcgagaaactcggatctatctcgtcgcatctcttctgcttctacttcttcttcgtctataagacctcaacaacagttccggcgagatctaacaagtgtcggttacggcggaagaaacgacggattatacagttcaaattcgatgacggtcgaagggattttacacgatactttcgcatcaagatccaccaagcaccaacggaatcttcactccttaaatgcgtcgataaatctgatggatgcttctccaacaacaatggga

SEQ ID NO: 13991 - DNA, 491 bp, Arabidopsis thaliana
  unsure at all n locations
  Clone ID: LIB25-008-Q1-E1-A1
tangcnggnccggtagngtcaanaattcccgggncgacccacgcgtccgnccacgcgtccgcccacgcgtccgcccacgcgtccgctaaacctagaaaaacgaaaacacacgcggagttgttgttcctcctctacggtaacgggaatatcgtagttattgtaattttggaaagctataatggcgaagagagagattagtagcactctgagaaatctaaagtttatgcaaaggtcttctctgaaagtagagaagaagaaggctgatgaagaagagcctaatgggagttttccttcccttaggactgttgcaaagaagtgtgtggtcataacaagattgggatcctcagccaggagcattgttaggacgcatgtcttttcagtctttcaatccctctatcgagaaattacatgaagaagcaataaacggtgggaaatccctcaagctctaacaagtaatggaggaaaaaaagtcntttagtgaaccgggagag

SEQ ID NO: 13992 - DNA, 116 bp, Arabidopsis thaliana
  unsure at all n locations
  Clone ID: LIB25-008-Q1-E1-A10
catctggantatcacnaagttctccaggcntgaacaccaggaagcattactccgatgtatttgtcgttggaggttacaaatggcgcatattaattttcccgaaagggancaaangg

SEQ ID NO: 13993 - DNA, 491 bp, Arabidopsis thaliana
  unsure at all n locations
  Clone ID: LIB25-008-Q1-E1-A11
cnttacgcctccngtagncctgtaanggtcatagnttcacgggnccatccagcacgtccaccncaaaatcctctaatgacaactaacgcggttaacggaattaacccggaccggtttcgtgatccgaccaccgcgtggcttggacgtgacggagaatggcgagtaatcgtcggaagctcgacggacgatcgacgaggattagcgattctttacaaaagcagagatttcttcaactggacgcaatcaatgaagcctttacattacgaagacttaaccggaatgtgggaatgtcctgattttttcccggtttcgataaccggatcggacggtgtagaaacgtcgtcggttggtgagaatgggattnaagcatgtgcttaaagtgagtttgattgagacattgcatgaatattacacgattggggaattatgattgtganaaangatgttttacgtaccggatcntggggttttgtgccaaaaagaaatcagct

SEQ ID NO: 13994 - DNA, 500 bp, Arabidopsis thaliana
  unsure at all n locations
  Clone ID: LIB25-008-Q1-E1-A2
nngtgnngnaacttctacgctgntcggtgcccgtccannnattcaangggtcgacgcacgcgtccgnacgctttgggagtgaaaaagattgcagtaccatccctgcaaccgcttggttgtctccctcccttcacattcgtaacctcgttccagcgttgcaacgagacacaaaacgctttagttaacctccacaacaacttattgcagcaagttgtggcaaagctcaataacgagactaaacagtcgactttcatcatccttgatctctacaatgctttcttgactgtgttcaagaacaaaggatctaatccagggagtacaaggtttgagagtccattaaagccgtgttgcgtaggtgtgaagccgcgagtataactgtggaagtgtggatgagaagggagtgaagaagtatattgtatgtgataatcctaaaactgctttcttttgggatggacttcaccctacagaagaaggatggagatcggtttactctgttttac

SEQ ID NO: 13995 - DNA, 498 bp, Arabidopsis thaliana
  unsure at all n locations
  Clone ID: LIB25-008-Q1-E1-A4
gntnnngnaacttctacgcnnccggtgccggtcaanaattcangggtcgacncacgcgtccgnaagtatcttaaatgtcataatggacggtggagacagcgtcggaggaggaggaggagatgatcaccaccgtcacctccaccatcaccaccgccctactttcccttttcaactactcggaaaacacgaccccgacgacaaccatcaacaacaaccttccccttcctcctcctcctctctattttctctccatcaacaccaacaattatctcaatcgcaacctcaatcgcaatcgcaaaagtcacaaccgcagacaacgcaaaaagagttattacaaacgcaagaggaatctgcggtggtggcagctaaaaagccaccgttgaaacgagcgtcgacgaaagaccgacacacgaaagtagacggaagagggaggagaataaggatgccggcgttatgtgcagctagggtttttcagctaacgcgagagctaggtcataa

SEQ ID NO: 13996 - DNA, 94 bp, Arabidopsis thaliana
  unsure at all n locations
  Clone ID: LIB25-008-Q1-E1-A5
ngantaataccttctcgtcggctgagattcccgatgtggcagaccanccacgcgaccgatttaaccccgaagctacacaggatctacanaagaa

SEQ ID NO: 13997 - DNA, 173 bp, Arabidopsis thaliana
  unsure at all n locations
  Clone ID: LIB25-008-Q1-E1-A6
cccnaaaaagtacttaaaggtcaaaanttggngtcgagaaaaagtcaatggaaaagttccattgtcttgcttctttcgtcggagggctctctttgggctttccgaaaaggtatcacatgccatgtttggcctcacggtatanaagttanagagtcataaagttttanccaggg

SEQ ID NO: 13998 - DNA, 485 bp, Arabidopsis thaliana
  unsure at all n locations
  Clone ID: LIB25-007-Q1-E1-F8
nnntgggnnnntngngcatttctagcnntcggtaccggacncnaattcncgggncgacccacgcgtccgctttcattttccctctctctttcaagttccttgttatttaagaaagccatgaatccgattatctatttctaaccctgggccgaccagaaaactttttggacgacccaaacttcaagggttctaataaattcatcaccggaaaaagatacatataaaataaaaatctctcaccactgctgattcaaatggtgaatcttgggagctacgttttcgtctttgtcgcgttgtctctcaccgtggtggttccatcggttcaagcccacatcgccgaatatgatgaatactggacgcagcgtcaaaccaacgcattgcgagaaactttggaatcttatgacccgaacccagagaacgtcacggaccactttaactaccatgccgccttanctatggagacgacagggatagttnacaaacng

SEQ ID NO: 13999 - DNA, 56 bp, Arabidopsis thaliana
  unsure at all n locations
  Clone ID: LIB25-008-Q1-E1-B1
acaggtgattctcatcaacggacaattccctngtcccaacctaaactcaacctcca

SEQ ID NO: 14000 - DNA, 146 bp, Arabidopsis thaliana
  unsure at all n locations
  Clone ID: LIB25-007-Q1-E1-C7
aacacatatacngtcagtantcattagtttgagggcacctacggaaagcaagtaanactacagagggtanacgttccagtgcttaatgatgaaacatcatcaagtacaagcaaacgtgtttttcaacanacnccgtatcacnttca

SEQ ID NO: 14001 - DNA, 372 bp, Arabidopsis thaliana
  unsure at all n locations
  Clone ID: LIB25-007-Q1-E1-C8
tggtgttgtatatgttggatctacatcagtgtatctgaagctggagttcactgtgatataattgcccgtgaactcaggattccgctgcttcaagtcaaggaagcgttagaacagctctcaaacgatggttgcatatactcgactttggacnagacatgcttcaaatcgactgctaacgcttgatgaaaattgatttatatgtcaacacatatcaatcctcctctcatgttcaaaagtcttttgtatangccctaaggtangacaatatgtagttttaagactaaaantctttcttatggcttttggatttttttaaaggganctaaactcaaaaagttcaaaatcatttcgtcacttgaaaannnangntna

SEQ ID NO: 14002 - DNA, 423 bp, Arabidopsis thaliana
  unsure at all n locations
  Clone ID: LIB25-007-Q1-E1-C9
ctttcaccgccgcagttaaaaacctcgtgtgattcttcttcttcatatagattcccagaaacatcgaaactggtgaaccgtgtacgcttcgtcgttagtgatgcggagacgaaagatatcgccggaaaatcattggcctagattcaatccattagagactcatcggagacgtctacgttagcgtacccaatcctcctcctcttctgggttgtttgctgatcacacatatcttctttcttcgattctctctcagggcgtgtcctgtgtaatcgtttagtggatgtgcaatgcaaaggtcgtgtagaactagaagaagagtttctgtgaacaagtttaatggaaggaacagcttttacaaagtctctttgtctcttgtttttctcctttgggttcttctcttcttttccancttgttgaataatc

SEQ ID NO: 14003 - DNA, 384 bp, Arabidopsis thaliana
  Clone ID: LIB25-007-Q1-E1-D12
aaatttgtatgctttattcgatttaatgtctttgatacacttgttcttgttgttgggtctgctgagccttgaagctgcggcgtcgttttcaccgggatcgcgctcgattctccgggacatcggcagtaacgtcgccgatcagaaagacaacgctatcgaattgaacgctaccaactttgattcagttttccaagattcccccgccaaatatgccgttttagagttcttcgctcactggtgccctgcatgtagaaactacaagccacattatgaaaaagttgcaaggctattcaatggagcagacgcagtatatcctgggtgtcgttttgatgaccagagttgattgtgcgataaagatgaatgtaaaactttgtgacaagttcc

SEQ ID NO: 14004 - DNA, 411 bp, Arabidopsis thaliana
  unsure at all n locations
  Clone ID: LIB25-007-Q1-E1-D4
aagaatcatcagattagtcgccgtagatctgaatcaacgtcgtaacagtagcagaattttgcggtgaaacgatggttttggttacgtctgtgcgtgattacattaancggatgcttcaggacatctccggcatgaaggttctcatactcgactccgaaacggttagcaatgtaagcattgtgtattcacagtcagagctgcttcagaaagaagtgtttctggtggagatgatanattcaatatctgtgtcaaaagaatcgatgtcacatctgaaagctgtttatttcatccntcnaacttcagataatattcagaaantacgataccagcntgcgaatcctagatttggagantaccanttanttttctcaatctgttgaaggatactcagaanccnatttggctgattcc

SEQ ID NO: 14005 - DNA, 416 bp, Arabidopsis thaliana
  Clone ID: LIB25-007-Q1-E1-D5
tttttcgtttttatccgcttgtttgatcgttttctcacgtaatcaaaccaaaataacacagatctaccactaaaatacatattcatgatcaaaaagaagataattaagtagattctcatgaacgccgatttgttcaccgattgagccaaaatcgcggcggtccacgcagaaatagcgcttttttcgacgcctagtcgaccgattagtccgatgtttagaagcgtttgttttagagaataattatgccttcatttttgtcaagtttgtttggtttgggcattcaagcctcttttagaataggtttggttcttcctcgagtagtagcatctacagagagacagatttcctctacggttttaaaaagagcttctgaaagtgtctctttttcattcgctccgtacataaatgggtttggg

SEQ ID NO: 14006 - DNA, 409 bp, Arabidopsis thaliana
  unsure at all n locations
  Clone ID: LIB25-007-Q1-E1-D6
ccttctgcattgcttttccttccttttggaggaatttttaggtctcggagttttgatttcgacctttaaattttgcttcagaggagagattctatccgttacagttcgtgaatttcgcgtttgaagaacttgaacttgattctgaagaatgtcaggtcgagaacaaacaggagagaaactatcagattctgagtacatagaagaagagccacggcgttctagaattgggaatttgaagaagaaggcttttagttgttcaactaaacttacacatcctttgaagatgagaaaaggcaaacgtaaaatcgatttccagattcctttgattgangatgttagagatgagaaagaggagaagccttgtttctaaattgcgtcaacaaacttcttcagaaagatttgttgcctc

SEQ ID NO: 14007 - DNA, 89 bp, Arabidopsis thaliana
  unsure at all n locations
  Clone ID: LIB25-007-Q1-E1-D7
tgcngataaaccacagttttacgagaataangattctgtntctccggtggagggatccggcgcggcggcgatgaacgtcacatcncctg

SEQ ID NO: 14008 - DNA, 403 bp, Arabidopsis thaliana
  unsure at all n locations
  Clone ID: LIB25-007-Q1-E1-D8
aaaaccagatcaagcttctttcaccattttcactcttctttaagctttctttcttaatttctctcatttcgaattttaaacacaaaacctaaacgatgcctgaggcaccaaagatcgcagctttggaggtttctgatgagagcctcgctgagaagaacaagaacaaactccaattcatcgaagacgtgaccacgaacgcagatgatgttcagagacgagttcttgaagagatcctttcacgtaatgctgatgtggagtatcttaaacgacacgggctcgaaggacgaaccgatcgtgagactttcaaacatatcatgcctgtcgtaacttacgaagatattcaacctgagatnaacagaatcgccaatgggtgataagtctcaagtcctctgttcnaacccat

SEQ ID NO: 14009 - DNA, 428 bp, Arabidopsis thaliana
  unsure at all n locations
  Clone ID: LIB25-007-Q1-E1-D9
ncaattctttgttgtttatcattgagttgtatagtaaaagcatcagtctcttatgatcgtaaagctgtgatcatcaatggacaaagaagaatccttctctccggttccattcactatccacgaagcacccctgagatgtggcctggcctaatacagaaagccaaagaaggaggcttggatgttattgagacttatgttttttggaatggccatgaaccttctcctggacaatattattttggagacaggtatgatttggttaagttcatcaagttggtgcaccaagctggtctctatgttaatctcagaattggcccttatgtttgtgctgaatgggaattttgggggatttccggtttggctcaaatttgttccccggtatggcttttaagacggataatgaacctttcaaggctgcaatgaanaaa

SEQ ID NO: 14010 - DNA, 362 bp, Arabidopsis thaliana
  unsure at all n locations
  Clone ID: LIB25-007-Q1-E1-E1
gccgtaagaggtttcgaagaagcaaagtgagcaacaatggcgggaggcangatcaggaangagaagcccaaggcttcgaatagagcaccatcgaaccattaccaaggaggaatatcgttccacaaatcgaaagggcaacatatccttaataaccctctgcttgtggattcgatcgttcagaaagctggtatcaagagtaccgatgtgattctcgagatcggtcccggtactggaaacttgaccaagaagcttctanaagctggcaaagaagttatcgccgtcgaacttgactctcgtatggttctcgagcttcagcgccgttttcaangaactcccttctctaaccgcttgaatgtaantca

SEQ ID NO: 14011 - DNA, 68 bp, Arabidopsis thaliana
  unsure at all n locations
  Clone ID: LIB25-007-Q1-E1-E3
nagatcttcttaanccactcgctaaccttagggcgagagtcaaagagcaccttggagtcagtacncaa

SEQ ID NO: 14012 - DNA, 189 bp, Arabidopsis thaliana
  unsure at all n locations
  Clone ID: LIB25-007-Q1-E1-E4
ntttcttcacgcttctcccataccctcttacctatcttcttattcttcttatatttctccatcgatctcgaacaaaggattcacctttgcattcagattctttatcttgacttcanagtcncatctccgattcgataaacacattggggaatggatgcttgctttcgtcttnctcancagatcngaanc

SEQ ID NO: 14013 - DNA, 424 bp, Arabidopsis thaliana
  unsure at all n locations
  Clone ID: LIB25-007-Q1-E1-E9
ttgacatttctggtgggagatggggttcgaattacaggaatggctgttgtcactattgttttcgctgcacttggattcatgtcgcctgcctcaagaggaatgctactaaccgggatgattattctctatcttttcttgggtattgttgctgggtacgctggtgttcggctctggagaactgtcaaggggacttcagaaggatggagatcactttcctggtccattgcatgcttcttcccgggtattgcttttgttatactcacagtgttgaacttccttctctggagcagcaacagcactggagccatcccaatctctttgtattttgagctcttggctctctggttctgcatctcggttcctctcaccctatttggaggattcctaaggaacacgancagaagcaatccanttcccagtgaga

SEQ ID NO: 14014 - DNA, 419 bp, Arabidopsis thaliana
  unsure at all n locations
  Clone ID: LIB25-007-Q1-E1-F10
gaaaccttatcttctccgcccatggccgccttctccgtcaacgggcagcttatcccgacggcaacaagctccactgcttccacctctctctcttcccgtcggaaatttctctctccttcctcgtctcgtctccctcgcatctccactcaatctcctcgtgtcccatcgataaaatgcagcanaagcttacctaaccgagatacagagacttcctcaaaggattctctccttaaaaacctagctaaacctctagccgtagcctcagtctcctccgctgcttcattctttctgttccgaatctcgaatcttccgtcggttctgaccggtggtggaggaggaggagatgggaatttcggtggatttggtggtggaggtggtggtggagatggaaatgatggtggattttgggggaaattgtt

SEQ ID NO: 14015 - DNA, 416 bp, Arabidopsis thaliana
  unsure at all n locations
  Clone ID: LIB25-007-Q1-E1-F11
gaagaaatctcgtttcanccgccattaacgacctctcaagatttgtttccgtcgcgaagtatgtancggccgcggcagtctgggggaaacttggttatgttgtttaaaggatgcagacggtttgtgagaacaacgtgtcgcgtttcgatccctgntggttctttggggaatgantcaaaagcanctccaangtttcnganggataaaaagattgttccanatgctgatccccccaatatggaagatatccacaagttgtatcgactttttgagcaaagctcgagacncaccatcntgantggagctggggttagcacagaatgtggaattccggattacagaantcccaatggagcatacagttctggtttcaaaccaattacccatcangtgatctgaatgaatttactcnatca

SEQ ID NO: 14016 - DNA, 402 bp, Arabidopsis thaliana
  unsure at all n locations
  Clone ID: LIB25-007-Q1-E1-F12
cttcttcaagcttaaagattttgtgtatcctcgttcttgtaatggaaatctacaccatgaaaacgaattttcttgtactggctttgtctttgtgtatccttctttcaagcttccatgaggtttcttgtcaggatgatggtagtggtttgagtaatttggatctaatagaacgtgattatcaagatagtgtcaatgctcttcaaggcaaggacgatgaagatcagtctgcaaagatacagagtgaaaaccagaataacactacagtgactgataagaacactatttctctatctctatcagatgaatctgaggttggatctgttagtgatgaaagcgttggacgttcgagtctgttggatnaaatcaaacttgaattcgaagctcatcacaatagtattaacc

SEQ ID NO: 14017 - DNA, 418 bp, Arabidopsis thaliana
  unsure at all n locations
  Clone ID: LIB25-007-Q1-E1-C3
tctttcgacagatctcttctctctctcgtgtttcacgaaacaatggcgactcaattcagcgcttctgtctcattgcaaacttcttgtctggcaacaacaaggattagtttccaaaagccagctttgatttccaaccatggaaagactaatctanccttcaacctccgccgttcaatcccatctcgccgcctctctgtttcttgcgcggcaaaacaagagacgatagagaaagtgtctgctatagttaagaagcaactatcacttacaccggataaaaaagtcgttgcagaaaccaaatttgctgaccttggagcagattctctcgacacggttgagatagtaatgggtttagangaagagtttaacatccaaatggccgaagagaaagcacagaagattgccacagttgaacaagctg

SEQ ID NO: 14018 - DNA, 344 bp, Arabidopsis thaliana
  unsure at all n locations
  Clone ID: LIB25-007-Q1-E1-F6
gnnngggnnnntngngcatttcnacgccggtcggtaccggacncnaattcncgggncgacccacgcgtccggtcttggaccacatcgttaatcaatgttgtttgttgtttgatgtttactttttttttttactcagttttgaaaattcgataagtattctagctctagaattccatatctaggttttttgttttctcctagatagtctgaagaatcaattgtaatggtctgtggaattacacggaaacagttttgttgtaataatggagcatcagttttctttggttgaatgaaaaatcataatttttttgactaaaaaaaaaaaaaaaaantaaaaaaaaaag

SEQ ID NO: 14019 - DNA, 461 bp, Arabidopsis thaliana
  unsure at all n locations
  Clone ID: LIB25-006-Q1-E1-H8
gaaagagaagaacaaaacatcatcatatattctattgactagattaatttcntctaagtgcaaaagaggagaaatggagtcaatgaagatgaagctcatagtggtgttgatggtggctattgtggctttctccgccgtaggaaacgtggctgcncgtacagaggctccggctccaagtcctacttccgatgctgctatgtttgtcccgggattgtttgcatctgttgctgctttggcatcagggtttctcttctaaactnttctcaacattcattgagttaanggtccaaaatggtttggcctttnacttccgttaagtcctaatggcatgagcttttttgttaatttgttctgtaataatttgggactaactaatgttgttggtgttgtaataatgaattcaataaattaataacnataatttaaangggntttgaatttccctttcccaaaaaaaaaaa

SEQ ID NO: 14020 - DNA, 492 bp, Arabidopsis thaliana
  unsure at all n locations
  Clone ID: LIB25-006-Q1-E1-H9
gngangttctagcgggncttttncgnggcnngtatcggtggnacgattcacgggtcgaancacgcgtccgnaaatctctctttctctcaaactctctcaacaacaacaatggcgtctcttcaacaaactctattctctcttcaatccaaactcccaccatcctccttccanatcgccagntctctcccactccgaaaaaccttcccaatccgaatcaacaacggtggaaacgccgccggagcaagaatgtcagccaccgcagcatcangctacgcgatggcattagcagacgtcgcgaaaagaaacgacacaatggaattaacagtcacagacatcgagaagctcgaacaagtcttcncagatcacaagtactaaacttcttcgcgaatccaacaatcaccgtcgagaaagaangtcaagtcatcgacgatatagtgaaatncgtcgtcctncatctcaaaatctaattcctcangtctcgtcnangngaaa

SEQ ID NO: 14021 - DNA, 436 bp, Arabidopsis thaliana
  unsure at all n locations
  Clone ID: LIB25-006-Q1-E2-A10
ttctcttggcagttttttttgttgtttgaagatggtgtcacatgaagagaacacaagtattgtggaatggtttcttggtccacatccatacacgtatccgccttatggtattgagatgattcatgaggatgatgaagtancagtanctcatcancatcatcatcaccagagcggtgagtattacagagagtatgaagatcatcgtantagcgatgtngataacgatgagatcattgctanaactctccaagacgattttttgcagcttgaaatcgcagaaagtaacgattattcgcatcagaatcaacaacaacaacatcaacaagaaggttatactaacaactatacgtaataacaacaatggttatgcttggaatgatcagtctcctgctgtggattantcctcacaatggntaggaanatgataatgatcnag

SEQ ID NO: 14022 - DNA, 429 bp, Arabidopsis thaliana
  unsure at all n locations
  Clone ID: LIB25-006-Q1-E2-A11
gcgcttttctctcttcagtgatttcacagatctgttccgacatcaatggcttttttagcgttgattggtcggctctactccgaaatcgtctgactttcacagcagcgatgttcggctcttacgtcccgttttaatcgggctctcgttcggcacctccagctttttcagtgaagatgaccgactcttttcccgacagcatacggctccatcagcggtgttggtcggattttagttttactttggccatagatgagttactctcaccttttggtctttgttttcccttcaataatttcagcaattatgtgttggtgataacgatttaggtgctatgttgcttaaactgttgattatccgactcatgttgtttgaagcttggttttacaggaattattantaatatttgcagtttataattgaagagaagaa

SEQ ID NO: 14023 - DNA, 460 bp, Arabidopsis thaliana
  unsure at all n locations
  Clone ID: LIB25-006-Q1-E2-A2
ttttttgcatctttctcaaaatatatcaaaggagacttcataaagaaagaatctttagtgtggagagactaaaaggacaccacaagcttatttcataagaaacttcaaattagaatcagaaacaagagcatccttcttcatttacacaggtaaattaggtgtaaaaatggtgatgagaagtgtggatctacgatcagataccgttactagaccgacagatgcgatgcgagaagcaatgtgtaacgcagangtggatgatgacgtcctcggatatgacccaacggctagacgtcttgaagaaggagatgggctaagatgatgggggaaaagagntgctctgttcgtgccaacccgggacaatggggaatcctgatnangcgtgatgggtcaactgcgaacnttagaaggcaccnaaggtgaatcctgggngaacaaattgtcacaatccatgttttacaaa

SEQ ID NO: 14024 - DNA, 522 bp, Arabidopsis thaliana
  unsure at all n locations
  Clone ID: LIB25-006-Q1-E2-A3
nnnnnngacgttccttgcctgccgtccgnaactcaangntcgactcacgcgtccgaatagagcagacattcttgactctgctttgttgaggccaggacggtttgaccggcaggtaagtgttgacgttcctgacgttaaggggagaacagatattctcaaggttcatgccggcaataagaagttcgacaatgatgtttcacttgaaataatagcaatgagaacacctggatttagcggagcagatctcgctaacctcttgaatgaggctgctatattggccggaaggcgagcacggacatcgatatcatctaaagagattgatgactccattgatagaatcgttgctggcatggaangaacagtgatgaccgatggcaanagcaaaaanctgggtaaccttaccaatgaatttggtcatgcantgtgttggaacattgactccaaggaaatnatgctgttccaaaagttacgttgatancaanaaggcaaancaagaagtccgacttggtcaattccacaaaa

SEQ ID NO: 14025 - DNA, 539 bp, Arabidopsis thaliana
  unsure at all n locations
  Clone ID: LIB25-006-Q1-E2-A5
nnntngnggaantgttttccttgccctgccctcnggaaancaaantccngggtcgacccacgcgtccgatggactgtgggaacatatgagcaaccaagaagcagtagacatagtccagaatcatccgcgaaacgggatagcaaagcggctggtgaaagtagcgctacaagaagcggcaaagaagagagagatgagatactcagacctgaanaagatagacagaggagtgaggagacatttccacgatgacatatcagtgattgttgtcttctttgatacaaacctagtgagcagagggaagtatgttgaagaggacaagccgtgtcagttgagaaggagcggttgtgatctactcacancaccctggcgccttgcaccacgcccaacnccaagctgctgctgctggcgcctcctgacaattgaatttttaccggtgtccttaaaattcttccaagattccttcctggtacctanatggtannnttanatantttgnttnntaattatcattgactggggaaaaggattntccaccatcg

SEQ ID NO: 14026 - DNA, 452 bp, Arabidopsis thaliana
  unsure at all n locations
  Clone ID: LIB25-006-Q1-E2-A6
attgatcaggcttgtcaagtttttgaagatatgaagaagaggcattgtagaagagatgagtatacttacacgattatgatcaggactatggggaggattgggaagtgtgatgaagctgttggtttatttaatgagatgattactgaagggcttacgcttaatgttgttggttataatactttgatgcaagttcttgcgaaaggcaaaatggttganaaggcgattcacgttttctctagaatggtggaaacgggttgtcggccgaatgaagtatacgtataatcctcttttgaatcctttagttgctgaangtcaacttgtgaagttagatggagttgtgggagaattccaaaaggtataagactcaagggatanaatcctaattngttaaaacgttnaacaagttaaggcatttanttaagctcacaagctgttttgtganaagtngaacc

SEQ ID NO: 14027 - DNA, 71 bp, Arabidopsis thaliana
  unsure at all n locations
  Clone ID: LIB25-006-Q1-E2-A8
tccggtctgcgtatgattaatatcggtggggaagcatcgttcttcgatgctgtagctgcacaaatcagncc

SEQ ID NO: 14028 - DNA, 435 bp, Arabidopsis thaliana
  unsure at all n locations
  Clone ID: LIB25-006-Q1-E2-A9
gggaagcgatggatactgccagagcatggctgaagaaattaaagtctaaagggaaagagaaatcttcgaataagaaggaaacttctagaggaaatgttaaggagggatcaaaaacagctggaggtgaagaagctgtgtctaatgtgacaaagcagaaggctgctgctgcgaaacagtatattgaaaatcattacaaaaaacaagttcaaagtcagcagcaaagaaaagagcggcgtgatatgctggaaaataagttagctgctgcagaagtctctgaggaagagcaaaagaatctgcttaaggatctagagaagaaggaaactgaatacatgcgccgtcagagacataaaatgggaactgatgacttcgagccattgacaatgatangaaanggggctttggagaagttaggatatgtnagggagaagacacagg

SEQ ID NO: 14029 - DNA, 472 bp, Arabidopsis thaliana
  unsure at all n locations
  Clone ID: LIB25-006-Q1-E2-B1
tctctgactctctgagtaattaggttttttttttatctcatggccggcgccggaatccacccataccaccagcagtggccgccggcaggtgcgccgcctcctccagccgcagtatcancagctgctccaccacatccgccgcccattcatcaccatcctcctcctcctcctgttttagttgacaaccataatcgtcctccttatgacgagctgcggacaatcttcatcgcagggcttcccgatgatgtaaaagagagagagcttttgaatctcttgagatggttgcctggttacgaagcttctcaagtgaacttcaagggaaaaaagcccatggggtttgctcctttcnccanagctcagtttgcaatngcanccaanagataaccctcagcatatggtgttttgatgcnnaantccaaagttccgttganacattcnngagaatgggcccaagaaanaatncntttttgtt

SEQ ID NO: 14030 - DNA, 438 bp, Arabidopsis thaliana
  unsure at all n locations
  Clone ID: LIB25-006-Q1-E2-B11
tatccttcatcggcgttgtcttttcgctggatttctcaaagccctagctgaagaatctctgaacaagtggaaatgccgttttggtggccactgatcgtcctcgccttcgcttacgcgatntgcaagttccttcttatgctcattcctcccaatgttccttccattnacgttgacgcatccgatgtgttggctcatgggaaagatacggaggagaatagcttcatctatattcctcccagaggaaggagccaacagtctgacaaaaaagttcaatgttatgaacctgccacaatgaaatatctgggatatttccctgctctgtcgcctactgaggtcgaagagcgcgtaacactatcaaggaaggntcaaaagacatgggctcaaagtaacttcaagcttagaangcagttcntgcggattcctcctaagtacaataat

SEQ ID NO: 14031 - DNA, 429 bp, Arabidopsis thaliana
  unsure at all n locations
  Clone ID: LIB25-006-Q1-E2-B12
tagatttcctttgctccttcgttctggccatggcaatggcaaaactcgcaattttcaccactcttatggccatactcgtaatgacatctcaaggaaggattccaacagaaggaggagagaaagaagcagaggctgacagaattacgtcacttccaggtcagcctaacgtcacgttcgagcagttttccggctacgtcaccgtcgataaactctccggaagatcactcttttattggctcactgaagcttctgacctccctctctccaaacctctcgtaatttggctcaacggaggaccgggatgttcgtcggtagcgtacggtgcgtcggaggagattggaccattcangataagcaaaggtggttccggtttgtatctcaacaaagttcgcatgggaactcaatctccaatccccttgttcctcgaaa

SEQ ID NO: 14032 - DNA, 533 bp, Arabidopsis thaliana
  unsure at all n locations
  Clone ID: LIB25-006-Q1-E2-B3
ngnnnnnnggaantgatttcgtttgggccctgcccggtccggaaattcangggtcgacccacgcgtccgtttctctctcagcttacgaacaagaaaaaaagaagaatctttagccacctttgagatcaaaagatgaacatcgctcacactatcttcggcgttttcggaaatgcaactgctctgtttcttttcttggctccttcgataacattcaagagaatcatcaagaacaaatccactgaacaanttctctggtatcccttatccaatgantctcctcaantgtctcctctctgcttggtatggacttccctttgtgtcaaaagacaacacacttgtgagcacaatcaatggcacangagcagtgatcgaaacagtctacgtgttaatctttcttttctacgcaccatagaaggagaaaattangatctttggtatcctctctttgcgttttggctgtattcgcaanaataactcncgtctctcncctttgccctnaaggaaacggtggaaaactcntttggtggtcncga

SEQ ID NO: 14033 - DNA, 71 bp, Arabidopsis thaliana
  unsure at all n locations
  Clone ID: LIB25-006-Q1-E2-B6
gggattaatcttgctattcgtgatgccaccagcaantgatncttaagttgttatcacattggntaatcatg

SEQ ID NO: 14034 - DNA, 444 bp, Arabidopsis thaliana
  unsure at all n locations
  Clone ID: LIB25-006-Q1-E1-H6
tcatagtgctgcttcttcttctctctgagactctcacaaaatagaaacacaagatcgttnaaaagcttttagctccagatctgtggaaccgccatagctatggagttttatagnagttctagaagattacaaattcttggatctgtgattcttcggctctctcntcangtcgctcactctttttaccttcctggggttgctcctcaggatttcgncggagggagatgaattgaaagtgaaagtaaanaagttgacatctataaagactgngcttccatattcgtattactctcttcctttttgtcgtcctaagaagattgtggacagtactgagaatcttggtgaagttctcgtgngggaccgaatcgaaaatgctccttaatcgtttaaaatgcgtgaggngcaaatggggtantgttctcggncngtaagcttggatgcana

SEQ ID NO: 14035 - DNA, 415 bp, Arabidopsis thaliana
  unsure at all n locations
  Clone ID: LIB25-006-Q1-E1-G10
caccgttctccgtcacggtggcgctttattctctcatcggngcgcctcaccggtggcagacggtgtcgttgttcctctcctaaaacctccatcaatcacnatctctttacacagagctctaaccanaatcttcgagagatggggcagagtatgagctgtggaagtcgaccggagcacggaatattcgcctctgtacantgcggcgatatnatcacgatccgtcgtgtgatggcgacggagcctagtctgttgaatcaaactactccttatgatcgtcactctgttcttcatgtcgctgctgctaatggtcagatcgagattttgtcattgcttttggaacgatttacgaatccagatttgttgaatccgtcacaaagcaagactccgttaatgttggtgcnatgtttgggaanaa

SEQ ID NO: 14036 - DNA, 406 bp, Arabidopsis thaliana
  unsure at all n locations
  Clone ID: LIB25-006-Q1-E1-G12
ttttctctcttcagtgatttcacagatctgttccgacatnantggcttttttagcgttgantggtcggntctactccganntcgtctgactttcacagcagcgatgttcggctcttacgtcccgttttaatcgggctctcgttcggcacctccagctttttcagtgaagatgaccgnctcttntcccgacagcatacggctccatcagcggtgttggtcgggttttagttttacnttggtcataaatgagttactcccaccttttggtccttgttttcccttcaaataatttcaagcaagtaagtgttggtgataacgatttangtgctangttgcctaaactgttaataaccgactcatgttgtttgnaccttggttttacanggatttattnntnangatttgc

SEQ ID NO: 14037 - DNA, 433 bp, Arabidopsis thaliana
  unsure at all n locations
  Clone ID: LIB25-006-Q1-E1-G2
gtagtagcgaatttatcgatctctgtccgtaaagaatcagaagaaattcngggtcaattgacttgaagtagtagcagctctcctctcctctccattgttgttntgtgactcaatggcggttcctgtagaggaagcaatcgcagctctttccacattctccttagaggatgagcaaccagaagtccaaggaccggctgtgatggttcagctgaaagagcagcaaccgatagtcccatcgaatatagtgacgtcgctctataccggttgtctctatcagaagacacaaaagctcttaaccagctgaatacacttatacaagaaggaaaagagatggcgtcaattctncncacatatagaagttgtgtcaaagcactgcctcaacttcccgaatctatgaagcatantcaaaccgatttgtatcctanaaacatat

SEQ ID NO: 14038 - DNA, 458 bp, Arabidopsis thaliana
  unsure at all n locations
  Clone ID: LIB25-006-Q1-E1-G3
gtgtagataccaatgaggtagaaacacagaagtttgtggattctttggtggctttggctatggatangaagacaaagatgaattcatgtgagacaaatgtggtcttcagcgagtttcaggactggcttgagaaacatggagattacgaagctatagtagatggagcaaatattgggctctaccaacaaaattttgtagatggcagtttcagtctttcacagccttgaatctgtgatgaaggaactttaccgtgaaagtggtaataacaaatggccccnaattctattgcacaagagacgggtcaagaccctttagaaaacccaactcaccggaatcctggttgaaagaatgggttaataaccgtgtncgtgtatgcaactccaacaagttccaatgatgaattggtaatggctgtaagccgccggcaaacncaaatgttttgccttgtgacaaaatga

SEQ ID NO: 14039 - DNA, 442 bp, Arabidopsis thaliana
  unsure at all n locations
  Clone ID: LIB25-006-Q1-E1-G6
gcgtctttcctcaaacctctctgtctcttcttcttcctcgcctcgtctantcngntaatactactcttatatcacaaaatctccacgaaagcgctactcgaagatnctgtcttttcaggtcgtttatgtattttctcttgaaggaagagattagntcttaatacaaaatgtctgggtcaacaaaagtattggntcctgcgtttcaaggangggggcagaaaccaggtactgaaatctggagaatcgaaaattttgagccaggcgcagtaccaaagtctgaacatggaaagttctatatgggagatacctacattgtcttgcagaccanacagaataagggtggcgcttatctntttgatatacatttttggattgggtaaagatacaagccaagatgaaactgggaacaacaantgtcaaagaacagttgaacttgatgcag

SEQ ID NO: 14040 - DNA, 448 bp, Arabidopsis thaliana
  unsure at all n locations
  Clone ID: LIB25-006-Q1-E1-G7
agaactatagaagtgttgttctcttcgtatcgtcctcaatcctcatggagactattatcaggctgttttgagcaaacgctgtgataaagaggctttctttcttgctagcaagtanacacgagtgacatggcggcatcaacttcaacccgattccttgttctgctcaaagatttttctgccttcagaaagatatcatggacttgtgctgcaactaattctcaccgccaatctcgttttttatgccatgttgcgaaagaagacgggtctctnantcttgcaagccttgatttggggaacaaaccacggaaatttgggaagggtaaggcgatgaagcttgagggaagttttgttactgaaatnggtcaaggtaangtaagaacggtaaagaacgataaaatgaaagttgtcaaggaaaaaaagccagctgaaaataatgtctccnttggtt

SEQ ID NO: 14041 - DNA, 438 bp, Arabidopsis thaliana
  unsure at all n locations
  Clone ID: LIB25-006-Q1-E1-G8
ctctctctgtctctttctcaaaaatcatctgcaggaagtgaatcgtcaaaaccgagttcngaggatctgtcttgaggagtttttttttggttgagaaatggcttcgaaaagnctcttgaaagagctcaaggatctccagaaggatcctccaacttcctgcactgctggnccagttgctgaagacatgtttcattggcaagctacaataatgggttcntctgatagtccttattcaggcggtgtctttctcgtaaccattcacttcccngnggattatcctttcaaaccaccaaaggttgcattcaggacaaaagtgttccaccctaatgtcaacagcaatggaagcatttgccttncnattttgaaagaacatggantctgcactcacatatcgaaggttttgctttcgatangttcattgttaaanggaccaaacca

SEQ ID NO: 14042 - DNA, 414 bp, Arabidopsis thaliana
  unsure at all n locations
  Clone ID: LIB25-006-Q1-E1-G9
tagatttcctttgctccttcgttctggccatggcaatggcaaaactcgcaattttcaccactcttatggccatactcgtaatgacatctcaaggaaggattccaacagaaggaggagagaaagaagcagaggctgacagaattacgtcacttccaggtcagcctaacgtcacgttcgagcagttttccggctacgtcaccgtcgataaactctccggaagatcactcttttattggctcactgaagcttctgacctccctctctccaaacctctcgtaatttggctcaacggaggaccgggatgttcgtcggtagcgtacggtgcgtcggaggagattggaccattcaggataagcaaaggtggttccggtttgtatctcaacaagttccatggnactcaatctccaatctcct

SEQ ID NO: 14043 - DNA, 450 bp, Arabidopsis thaliana
  unsure at all n locations
  Clone ID: LIB25-006-Q1-E1-H1
ctctgccaatctcatcttcaacctctctctaactctcgttgtcgattctacaatggctgacaagaagattaggatcggaatcaacggattcggaggaattggtcgtttggttgctagagttgttctccagagggacgatgttgngctcgtcgctgtcaacgaccccttcatcactactgagtacatgacctacatgctcaagtacgacagtgttcacggtcaatggaaacacaatgaactcaagatcaangatgagaagacccttctcttcggtgagaagccaagtcactgttttcggcatcaaggaacctgaaggatatccccatgggcccgaaggctggaannggactaacgttgttgagtccaactgggtgtccntcaactgaacaaangacaaagggntgcaagctcaacttnnaaggggtggtggccaaagaaanggtttgttat

SEQ ID NO: 14044 - DNA, 95 bp, Arabidopsis thaliana
  unsure at all n locations
  Clone ID: LIB25-006-Q1-E1-H10
ccaattccaanaagaggtctaattgtttatctttatctctcgataagcntttcttcantcccttatctcttgttcgtagaactcgtcgtntccat

SEQ ID NO: 14045 - DNA, 112 bp, Arabidopsis thaliana
  unsure at all n locations
  Clone ID: LIB25-006-Q1-E1-H11
aacancaacnacatcaacaagaaggttanactaacaactatggtaataacaacantggttatgcttggnatgatcagtctctgccgtggattatcctcaaaatggtaaggaa

SEQ ID NO: 14046 - DNA, 501 bp, Arabidopsis thaliana
  unsure at all n locations
  Clone ID: LIB25-006-Q1-E1-H2
gntantgggcngtgcggccggaatccgggtcgaccacgcgtccgggcanctgtgcaaacatatcaagcgttgagccatgggtattanaaagtcggaaatttgaaagaagcnctngcggttaaagagtatatggaaaggaaaggaatcttccccaccatagagatncgtaacactctgatatctggtgctttcaaatatagacacttgaataaatcatcggatcttgtgatcgagctacgcgcaagaggattaactcctactgttgcnctcatatggtgctctcatcaacggctggtgcaatattggaatgatagataaaggtacgcnacatgtttcgaaatgataagagaaagggaatancttaaatgtgaatatttgcancaaagaatgcaaataatttggttccgtcctnataagaatgatgaagcttgtttgccaattgcaaaaaaattgtggattttgatctgcttcctcccgggtaccaaaaagcttgaaagantt

SEQ ID NO: 14047 - DNA, 438 bp, Arabidopsis thaliana
  unsure at all n locations
  Clone ID: LIB25-006-Q1-E1-H3
ggtttcagatataggcagattctcacatttgcaaacatgacgactcagatcagcaagagnagaaagtttgtagcggacggtgtgttctacgctgaattgaatgaggttcttacaagagagctagcagaggatggttactctggtgttgaggttagggttacgcctatgaggactgagattatcatcagagctacacgtactcagaatgttctcgntgagaaggggaggagaattagggaattgacttccttgttcagaagagattcngntttccagttgacantgttganctttatgccgaagaaggttaacaacaagangtcctcctgtgccatccgctcaaggctgaatccttacgtttnccgtccttccntggtgggccccnctgttccctaagggcntggctaatggtgttgtttaagggnttggttaatngga

SEQ ID NO: 14048 - DNA, 466 bp, Arabidopsis thaliana
  unsure at all n locations
  Clone ID: LIB25-006-Q1-E1-H4
cattaattaccaatatatttttactacttaaaaaagatattggtcttgaaatggaganctacttaacgaaatggtgtgtagtgcttgtgttgttgtgtttcgggtttagtgtagtaaaagcacaagcacaagctcaagttccatgtttctttgtttttgncgactctttggttgacaatggaaacaacaacggtcttatttctattgcaagatggnaattacttcccttacggtatcgatttcggcggccctaccggccgtttctcnacngcaagactactgttgatgtgatcgctgagctacttggattaaatgggcaaaatccctggcttaaaanaccggtgaagttggccgggaanctggctcctccgggagtttaaataacccnttccgcnagctggctgggaatnccggggaaaaaaancgggtccgaaaaanttgggaacaaanggntaaancntttaat

SEQ ID NO: 14049 - DNA, 443 bp, Arabidopsis thaliana
  unsure at all n locations
  Clone ID: LIB25-006-Q1-E1-H5
tttctctgaaaaccctaacaaatcctcctcttgttccgccactgccgccgccgctactcaacggtggtgaattttctatacggtcagttcgatcctctttttatcgacaatcctacacaaatccataatcatggccgccactgcttcctccgaagcttctganggaccagtgatgggtctcatcaacaagcgtctccgtgctctccgtaagaaatcnaaccgaatcactcaaatggaagaatcgatttctcaaggcaaaaccctaaangnngagcaagaagaagtcctccgctctaaactgccgtcgtcatcctaatcgacgagcttgaaaagatcntgctcctctctccgccgctgtgacanaggaaatcagcctcgctactcagcttaaccgtgcttcatccgatnaaacaacgcatctgagcaaaaggaantcactgatt

SEQ ID NO: 14050 - DNA, 455 bp, Arabidopsis thaliana
  unsure at all n locations
  Clone ID: LIB25-006-Q1-E1-G1
ttgtgttcttgtttagaagaagcaatggccacttcagcaatccaacactcttctttcgctggccaancgaccctaaagccatccaacgatctcctccgcaaaatcggagcctccaatggcggtggccgcatcatcatgcgtcgtaccgtcaagtctactcctcagagcagntggtacggaccagaccgtcccaaatacctaggaccattttccgaaaacacacnatcatacctaaccggagaataccctggaagactacggttgggacaccgctggnntctcaagccgatccagaaacattcgcaaagaatcgtgagctcgaagtgattcacagtagatgggcaatgttgggagctttaggctgcaccgtccctgaaattctctcaaaaaacggagtcaaattcggtgaaaccgtgtggntcaangnangatttcaaatcntctcaaaaaggngg

SEQ ID NO: 14051 - DNA, 474 bp, Arabidopsis thaliana
  unsure at all n locations
  Clone ID: LIB25-006-Q1-E1-E3
ggcaaggtctgtaactgcttcactggtcatttggagtttttttaaggttctaggaatgttcaaatttaatatgttctaggagttaagttaggcgttgaaggagggaggacagtgttcgtgtatgttgaaggttcttaatctggtccacttcctcactgttaatgtactcagaggtttgcttttggctttttcttttttctccagggtttgcttttgtatacatgggggatgaaagggatgcggaagatgccatccgagcacttgaccgctttgaattgggggcgtaagggacgcanacttcgtgttgaatggacaaagaatgaacgtggangtgataaaagatctggtggtggttcaanggagattcngngtccaacaataagaaccttcaagaactcccccttggtgaattaacntttgaatgccggataataactaaaggancccnggaattctaanaagaaaacaacnttt

SEQ ID NO: 14052 - DNA, 435 bp, Arabidopsis thaliana
  unsure at all n locations
  Clone ID: LIB25-006-Q1-E1-E5
ctctatcctcaaacaaagtatggccctttatcctttcttcatctcagtcttcatcttctctttgaccctcttcactacgacgacccattccctcaacgaagccgacccggattcgatttccaccgtttacgaactcctcccaaagtacgggctcccaagcggtctcttaccggacaccgtcaccgatttcaccctctccgacganggccgattcgtcgttcacttgcccaattcctgtgagattgaatttgactagggcgttcactacgataagacatatctggtcgtatcggttacggttcaatcaccgagctcaagggtatcaggtgaagaaattctttgggtgggctcgatgtcaatganattaaaggtcgatctccaaccttcngattcaatctaacttnaaaagtttggntttancaataaagaaagctt

SEQ ID NO: 14053 - DNA, 449 bp, Arabidopsis thaliana
  unsure at all n locations
  Clone ID: LIB25-006-Q1-E1-E6
ggctaaatcgtggtctctctgtggttgatagctacaagctgttgaagcaaggtcaagacttgncgganaaagagactttcctctcatgtgctcttggttggtgcattgaatggcttccagcttatttccttgtgcttgatgacatcatggacaactctgtcacactcttgtggccagccttgttggtttagaaagccaaaggttggtatgattgccattncggatgggattctacttcgcaatcatatccacaggattctcaaaaagcacttcggggaaatgccttactatgttgacctcgttgatttgtttaacgaggtagagtttcaaacagcttgcggccagatgattgatttgatcacganctttgatggagaaaaaagatttgtcnaantaccccttgaaatcaaccggcgtattgttgatnanaaaacaanctaatacnaatt

SEQ ID NO: 14054 - DNA, 442 bp, Arabidopsis thaliana
  unsure at all n locations
  Clone ID: LIB25-006-Q1-E1-E8
atttctttcttctttcttcttcttctcacgatcggtcaataacttgctcataacacctttcgaaatcctctgcttcatcatttgaacttcgatttaagggttcttgaatcttcgaataaaaatctcacctttaaatgggaaagccaacggngaagaanagaaatccggagacgccaaaagatgcttccggcggcggcggcggcggtggaggctngtcagggaaaacttaccatcgttctacttcgagggtatttgacgaagatncngagattttcattagcagagcacttgagctcaaagaagaaggtaacaagttgttccagaaacgcgaccacgaaggtgcgatgttgagtttngacaaagccttgaagctcttgcccaaagatnatatcgatgttacttatcttanaacgantanggcttcttgttaaatgcaaatgga

SEQ ID NO: 14055 - DNA, 502 bp, Arabidopsis thaliana
  unsure at all n locations
  Clone ID: LIB25-006-Q1-E1-E9
gnnnnnnnngggngnanntntnnngnncttaccngcncagtaccggtcaanaattcccgggncgaaccacgcgtccgggcgagtgcgaatgaaccagctatgaaaagcttgaaatccaatccttcaggaccgataccgaactttttcgtatcgctctcttcggcatttacgcaaacacctcttgtgcgttcgaacaaacccaatttgcttcttctaccaccagttgcagactccgtcaaattgattcaagactttcatcagtctctgatttctgctactgagaaatttaaaggattcctccattcgctcgcctctaagaaccctctctttcaggaagcggttcgcctatcttccgaatttcacattttgtgcgacgagattcgtttgagaaacactacaagggtgaggtttgcgatgtctaatcacggatttgcagcggttctgcctggagattcagttgcaggattggtggttgctaatggtttgatnaatttcctcaaca

SEQ ID NO: 14056 - DNA, 489 bp, Arabidopsis thaliana
  unsure at all n locations
  Clone ID: LIB25-006-Q1-E1-F10
gngaatttagcngccntctaagctgcaacgtaccggtcanaaattcccgggncgacccacgcgtccgcttcttgtgtgagaccgagaaaaaaagatgactaagaacagtaaccacgacgagaatgagttcatcagctttgaaccaaatcagaacacgaagatacgctttgaanatgctgatgaagacgangttgctgaagggtctggtgttgccggcgaggaaactccccaagatgagtccatgttcgacgccggngagagcgccgacaccgntgaagtaactgatgataccaccattgccgattactacttcgattcttactctcactttggnatccatgaagagatgttgacggntgttgtgagaacacanacttatcanaatgttatttatcatancaagtttcttaccanggacaaaattgttctgangttggacctggaaccggaantttggccccggtccgtnccaaggcangaaccgctcct

SEQ ID NO: 14057 - DNA, 419 bp, Arabidopsis thaliana
  unsure at all n locations
  Clone ID: LIB25-006-Q1-E1-F12
tatccttcatcggcgttgtcttttcgctggatttctcaaagccctagctgaagaatctctgaacaagtggaaatgccgttttggtggccactgatcgtcctcgccttcgcttacgcgatctgcaagttccttcttatgctcattcctcccaatgttccttccattgacgttgacgcatccgatgtgttggctcatgggaaagatacggaggagaatagcttcatctatattcctcccagaggaaggagccaacagtctgacaaaaaagttcaatgttatgaacctgccacaatgaaatatctgggatatttccctgctctgtcgcctactgaggtcnaggagcgcgtaacactatcaaggaaggntcaaaagacatgggctcaaagttanctcaagcttagaaggcanttcttgcggat

SEQ ID NO: 14058 - DNA, 453 bp, Arabidopsis thaliana
  unsure at all n locations
  Clone ID: LIB25-006-Q1-E1-F2
tcgcaagcctccactgctcgccgtcgcactcatcggaatattccattggcaccgtactaccctgagatcatctcatcagatcaaaacgggagtttaactagaattgcgtggattaatgctngaagaagcagagcgagatatctgcaatggagatcgacgatccgaaattgaaagctcggatcagatccttccaaggttctcgatcaatgttctgcagctgcggaaatcttctcaggcgcaacatggtctgcgtcatggtgactatgctcgctctcngaggtattgctccgcacgtttgaggaggttatacaagtccttgaaattcactcatgggccgtggnaaatacactcgacnaancaatnctngaatcaactgtcactgaagttaaggtccctcaagtngtttccaanatggcgggaaanaacaaggganccatgcaatgggaaaaaaga

SEQ ID NO: 14059 - DNA, 458 bp, Arabidopsis thaliana
  unsure at all n locations
  Clone ID: LIB25-006-Q1-E1-F3
tcagcttcccattcaatccaatccaattccacttctcaaacatatatataattctatatttttgagnngacagtttactttttctccttctctctctctctctctttctctttctctgtctctttggcttttctcctcctgttctcatggaagcttcacccaatgatcgggttcattttggcaaaatgggtttcgggtgtaagcattacaagaggagatgnnctnatcagagctccatgttgcaacgaagtcttcgattgtcgccattgtcacaacggagaagcactagcacattgcgcaatatctacgaacgtcacgatcttgttcgtcaagacgttaaacaagtgatttgttcctgtttgcgatacnggacanccgggagctcaagtttgttccaattgtggtgtcaacatgggaagaataattttggaagcatccgcataatccaagaatgatga

SEQ ID NO: 14060 - DNA, 450 bp, Arabidopsis thaliana
  unsure at all n locations
  Clone ID: LIB25-006-Q1-E1-F4
ataaaaaacgcaccgccggtaacaattttccggcgaatctgaaaactaacgatttttctctctgtttggtagagaaagagaaagagattgattcgttcctggttcgtggatcgatcnganaagaagaaagagtaagtgcaacagaatcaatggtatttcccggtgagatgacgacgacgacaacgagacctgagcaacgatcgaagactcttcacaatttccctctcccgaacttatgggggaatcaagagacaactcaagtgcacgaagncngactctatcagcaacaacaacaacaacggaggaagtcccggcggcgatnaccgactacgacgccgatntccgcctctggaattcgcttctntctcccgtttcgatgccgtttcgattcggtaactccgatnatccgcgaacgtttaaatccgggaaacgaagaaaggatnnaanagt

SEQ ID NO: 14061 - DNA, 463 bp, Arabidopsis thaliana
  unsure at all n locations
  Clone ID: LIB25-006-Q1-E1-F5
agctcaaaggggctcaacttctcagcactcgtgtcctctgctcgtgtattctctagaaaggtagatcgttcttgtaagaacatcgctctgagagttacttgtgaagcgggaagagtggagctgctagagagaaaagcctcagagactttcaagttaaacaaaagtgagaaaaaattgacctgtgtaatgaaattcggtggctcatcagtggcatctctataaaggatgatacaagttgccaaactcatactcagcttcccagatgagaaggtgttgttgtgctatcagcaatgggcaaagaccaccaataaccttttgatggctggggagaaggctgtttgctgcggtgtcaccaactnnggacactatccgaaagagttgagcctaatataaaagggaactccatataanggacngctcatgaancttggganttggaaaacaagcaantttanttgcaaga

SEQ ID NO: 14062 - DNA, 465 bp, Arabidopsis thaliana
  unsure at all n locations
  Clone ID: LIB25-006-Q1-E1-F6
ggagaggaggtcgcacgggttattattttttcccgggatctcttctcctctgtgtgtgtcgtcttgcctctgctctatctctctccctgctctttcacatttcatatctttcttaactgctcatatacactcaaaaaccgatcataagcagagtttgtaaccaatgtggagcagtgggcgattacaaatcttcttgcccaacaacctcgagagttaattctaggtactcatatccatattaaatcgaattcttaattagcataataaggtancnataanctgcaagaggaattctggatttaaataaaccataatccggttgccctaaattgttaacttgtatcaaacgcttatgcgattnattctntttttaatttaattgggttttggtgaacttaaccttannggattaaattaantggttttaaaaanntggtcatttaaatccaattgaaaaaangangg

SEQ ID NO: 14063 - DNA, 436 bp, Arabidopsis thaliana
  unsure at all n locations
  Clone ID: LIB25-006-Q1-E1-F7
aaccatcccaaccaagaaggaacaagtcttctccacctactcagataaccaacccggtgtgttgatccaggtgtacgaaggagagagagccagaaccaaggacaacaaccttcttggtaaatttgagctctccggaattcctccagctcctcgtggtgtcccccagatcacagtctgctttgacattgatgccaatggtatctcaatgtctctgctgaggacaagaccaccggacagaagaacaagatcaccatgaccaatgacaagggtcgtctctccaaggatgagattgagaagatggttcaagaggctgagaagtacaagtccgaagacgaaggagcacaanggagaaggttgaancccaagaacgctctcgagaactacgccttacaacatgaggaacacatccaangacgagaagattggtgagaagctc

SEQ ID NO: 14064 - DNA, 487 bp, Arabidopsis thaliana
  unsure at all n locations
  Clone ID: LIB25-006-Q1-E1-E2
tggtgttgagtgtggtggatctaatgtgcagtttgctgtcaacccggttgatggtgaagtcaggatcatagagatgaaccctagggtctcaagatcttctgctcttgcttccaaggctacagggtttcccattgctaaaatggctgccaagttgtctgttggncataccttggatcagattcctaatgatatcacgaggaaaacaccggctancttcgagccctccatcgattatgtggtgactaagattcctcgatttgcatttgaaaggtttccaggatttcaagccattgctaacgaaccaaatnaaatcctgttgggggaaaccaatgggctcctccggccgttacaattccaaagaatccttttcnagnaaaagctcctgaanggtcctctgggaanttgttggaattcctccngggtttgggggnttgttgcaaaaaaanttaaaangaanctaanaatttgggaactngggaatnaaacc

SEQ ID NO: 14065 - DNA, 514 bp, Arabidopsis thaliana
  unsure at all n locations
  Clone ID: LIB25-004-Q1-E1-E3
ggnggngncaattcctcccgntccgtaccggtctcgaattcncggggncccacccacgcgtccnaanttcaatctctctaaactctcaatttcagtaatcgataaccgtagcaatggaatccaccggaaaagtgaagaaagctttcggaggaagaaaaccacctggtgccccaangaccaaatcggtttcgaaatcgatgaaagccggtcttcaattcccagtgggaagaatcactcgtttcctgaagaaaggacgatacgctcagagacttggtggtggtgctccggtttacatggccgccgttcttgaatacctcgccgcaaaagttctggagcttgctggtaacgctgcganagataacaagaaatcaaggataattccgaggcatcttcctccccgcgataaaggaacgatgaagaattggggaaaacttctganttggtgtcacaatcgctcacggtgggtgttttgcctaaacatcaactctgttccaaattgcctaaagaagtctgg

SEQ ID NO: 14066 - DNA, 67 bp, Arabidopsis thaliana
  unsure at all n locations
  Clone ID: LIB25-004-Q1-E1-E4
taaancccttcctntccttcaaanaccaaagggggaaatcaatcaaactaaagcctccttcaaccaa

SEQ ID NO: 14067 - DNA, 442 bp, Arabidopsis thaliana
  unsure at all n locations
  Clone ID: LIB25-004-Q1-E1-E6
aagaaacagagagcattatcaattattaacaattacacaagacagcgagattgtaaaagagtaagagagagagaatggcaggagaggcagaggctttggccacgacggnaccgttagctccggtcaccagtcagcgaaaagtacggaacgatttggaggaaacattaccaaaaccatacatggcaagagcattagcagctccagatacagagcatccgaatggaacagaaggtcacgatagcaaaggaatgagtgttatgcaacaacatgttgctttcttcgaccaaaacgacgatggaatcgtctatccttgggagacttataagggatttcgtgaccttggtttcaacccaatttcctctatcttttggaccttactcataaacttagcgttcaactacgttacacttccgagttgggtgccatcacaattantgccggg

SEQ ID NO: 14068 - DNA, 428 bp, Arabidopsis thaliana
  unsure at all n locations
  Clone ID: LIB25-004-Q1-E1-E8
ctccatccttccgttttttttttccattaccgtacgccgaagaatctgccccaagaagtttaaaggtattgatggaacaaccgaggaacannaagacctctcaagaacaagctcgtgaatcgctcatcgaaatctcctacacttcacccgaggaagacgaggttataacctactcagatgtgaagcctgtcacctatatctcaaacggaagtgccaaaggaaacaaagatgatgcggagaagctcagagatgagctgatttcgatatcctacgacgagtcaccgtcgccttcaccggatgtggatgtagctgtttcgccgaccctgccgaacggtgtatgtcgtggataggaagttaatgtacagcttgaagaagtctttactttcntatgcaaaaagacttttggnttgggtccaaaaagttgacca

SEQ ID NO: 14069 - DNA, 365 bp, Arabidopsis thaliana
  unsure at all n locations
  Clone ID: LIB25-004-Q1-E1-E9
nnngaacntttcgcagcccnttnccgntcanaccggtccatanttcccgggnccncccacgcgtccgcaaacgcgtccggttacggaggcggtggtggcggctggtaatcaaagatagagttgtttgcgtgctgctgctctgtttttggtttagatttggttttgtgtcaccacttctggtttggttatcgttcgtttggtttacttttttgatgaaacagtttcgtttaagtcttctttgtctggaacgaaatgttaattcgcgtgttgtttactaaatttataacgtttccttttaaccaagattcgagattttccctcaaataatttatcttgttagacacaanaaanaaaaaaaagggcgg

SEQ ID NO: 14070 - DNA, 435 bp, Arabidopsis thaliana
  unsure at all n locations
  Clone ID: LIB25-004-Q1-E1-F1
ttgatttatttagagagataagttaaaaaaaaaatggtcggtatggatttgttcaaatgtgtaatgatgataatggtgttggttgtctcttgtggtgaagctgtttctggagctaagttcgatgagctttatcggtcaagctgggctatggatcattgtgtcaacgaaggcgaagtcacaaaactcaagcttgacaattactctggagctgggtttgaatcaagaagcaaatacttgtttggtaaagtctctatccagattaagcttgttgagggtgattcagcaggaacagtcactgctttctacatgtcttcagatggtccgaaccacaacgaattcgattttgagttcttanggaacactaccggcgagccttacatagtccaagaccaatatctacgtgaacggattggnaacagagaacaaagaccaacc

SEQ ID NO: 14071 - DNA, 513 bp, Arabidopsis thaliana
  unsure at all n locations
  Clone ID: LIB25-004-Q1-E1-F11
nnnnngnnttttngnagcctcttncctgntcnanaccggtccacanttcccgggnccacccacgcgtccggaacaacaagactcaaaaggtagaaagaatcggacatggaagaagcagttgtaacgaggtattggtgtcatatgtgttctcaaactgtgaatccagtcatggaagctgagatcaaatgtcccttttgtcaaagtgggtttgttgaagaaatggaagatgacgacgatcatgattcttctgatccggctgatgttagagcaaacaactctctttgggcgcctatcttgatggaacttatgaatgatcctgtgcgtcgtaggagaaaccagagtgttgagtctgttgaagataatcaaaacgaggtacagaccgagaacaatgaagacgatggagaaaatgatttggattggcagcttcaagagattctcaggagaaggagaagacattccgctgctgttttgcagttgcttcangggatacgaacanggttgtctgtanaatct

SEQ ID NO: 14072 - DNA, 442 bp, Arabidopsis thaliana
  Clone ID: LIB25-004-Q1-E1-F2
cgattcctttgctttagctaactagtagtttcgtcatgtcttggtgcacgattgagtcggatcctggtgtatttacagagcttattcaacaaatgcaagtcaaaggagtgcaggttgaagaattgtattccctggattctgattctctcaataacctcagacccgtatacggtctgatctttcttttcaaatggcaagctggggaaaaagatgagcgtccaacgatccaagatcaagtttcgaacttatttttcgcaaatcaggtcattaacaatgcttgtgcaacccaagcgatccttgctatcctcttgaactctccagaggttgacatcgggcctgaactatcagcgctgaaagaattcaccaagaactttccatccgacctcaagggtttggctatcaataacagtgattcaatcccgggctgcgcacaacagtttcg

SEQ ID NO: 14073 - DNA, 509 bp, Arabidopsis thaliana
  unsure at all n locations
  Clone ID: LIB25-004-Q1-E1-F3
ngnntgnngnaacttcnagccgnnccgtaccggtccacgaattcccggggtcnacccacgcgtccgaangacgcgtccgcccacgcgtccgcacaaatctgcaaatcttcttcttcttctgtcttcatgaatttcaagtctaacaattcctagccgtttacaatttgacggcacaattcttcattccttgtcgtgcccggaagtaaaaagatgatctttttggtttctgatgagataaaacagagatcttgttaacacttataagcagacccaactcgggaagctatggccgctattcgttttgcggcggcgattctgatttgctgtttattaccggcggcggttttgtcttacggtttcccggcggcgttgaaacttgaaagagttattccagcgaatcacgaaatggaacttagtcagctcaagggtcgtgatgaagctagacacggcagattgttacagtccttaagtgggagtcataaaattttcccgtgggaccggaacttttg

SEQ ID NO: 14074 - DNA, 501 bp, Arabidopsis thaliana
  unsure at all n locations
  Clone ID: LIB25-004-Q1-E1-F4
gnnnngaaattcnagccgnncgtaccggtccagaatccgggnccacccacgcgtccnnngatacagacagatgcagccattaaccctggtaacagcggaggacctcttctagatagctcaggaacgttaattggtataaacacagccatttattctccttctggtgcatcttctggagtgggcttttcgatcccagttgatacagttggtggtatcgttgatcagctggtgagatttggtaaagtcaccagaccaatcttaggtatcaaattcgcaccggaccaatctgttgagcaattgggagtgagcggtgtgctcgtcttggatgctcctccaagtggtccagccggcaaagccggacttcagtcaacaaaacgtgatggttacgggagactagtactangagacataatcacgtcggtgaacggtacaaaaagtctctaacggggagtgatctgtaccggattctcgatnaatgcaaagtcggcgatgangtgaccg

SEQ ID NO: 14075 - DNA, 434 bp, Arabidopsis thaliana
  unsure at all n locations
  Clone ID: LIB25-004-Q1-E1-F5
cttcctctctctctttctctcaccatatatctaaattgctcatcgattctcaattcagcttcatgctttcggatttgattcgtcgataaccccaatttctttanaaagttgaagtttttatgtcatttctggttcgaaattcgttgcaattggaatgagataaagtctctgaatttgctatcgctttgttttattcgttttctgttttttttgagatgccatcgatgcttgttctcgtcggcacaatgccgtccttggcttctctggttagtctaggtggtgcttgtgcaagcgtttctggaacgagttcttcggatgcatcgtatgctttagttaagaagggtttctttgtcaaggagaagtgttaaaggggactaaagaaatggctgtgtanaatattccgttccgtcctcaactactactacaacngctgg

SEQ ID NO: 14076 - DNA, 443 bp, Arabidopsis thaliana
  unsure at all n locations
  Clone ID: LIB25-004-Q1-E1-F8
tttctctctctacctaaccaatcctaagctcatctctctatctccaatggagtccgccgcactatcccgaatcggtctcgccggactcgccgtgatgggccaaaacctcgccttaaacatcgccgagaaaggtttcccaatctcagtctacaatcgaaccacttccaaagtcgacgaaaccctagatcgagccgccgtcgaaggaaacctcccagtctccggccaatactctccccgcgatttcgtcctctcgatccaacggcctagatctctcatcatcctcgtcaaagctggagctcccgttgaccaaacaatcgacgccttctccgaatacatggagccaggagattgcatcatcgacggtggaaacgaatggtatcagaacacagagcgacggatntccgaaagctgagcaaaaaggattgctctatttaggtatggga

SEQ ID NO: 14077 - DNA, 432 bp, Arabidopsis thaliana
  Clone ID: LIB25-004-Q1-E1-G1
taaaatcagattctagactaattaagaagaacaggcaaaacgaatttgctattggcccgttggaaaaaaataatcggatatggatgctctcaaggttcagattctacctgataaccaatcatcaccttcgtccacgcacatgctcactaagcccaagtcgaaaaaagcgacaaaatcgattgccatgctaatcgtcgcttccttggctatcacgttagggttattatttgttttcagttcaaattcagttatgttctctgcaagttttcttcggagaagttcacttcactacagcgtcattatcgatgccgggagttcggggacccgaattcatgtgttcgggtactgggtttgagtctgggaaaaccgttttcgatttcggagaagaacattacgctagtctgaagttgagtcctggtttgtctcgtatgc

SEQ ID NO: 14078 - DNA, 504 bp, Arabidopsis thaliana
  unsure at all n locations
  Clone ID: LIB25-004-Q1-E1-G2
gnnnnnggaantccnaccgntcgtaccggtccagaatcccggggcccaccaagccgttcgaacacattcaaaacactattcgcgaatctaatctctaacaacaataaacctcgcttgaagaagagtgtgatcgagccgatcaacggctctgattcatcagattctggtcgtcttcatcatgaacctgtgattacttcctcacgaagcaacgagaaccctaaatctgatcttgaagaagaagatgaaaaacagagcatgaactctgttttagatgttcaatgggctcaggggaaagcaggggaggatcgtgtacacgtggttgtatctgaagacaacggatgggtctttgtcggaatctatgacggattcagtggtccagatgcgccggattatctcctcaacaatctttacaccgccgtgcaaaaggagctcaatgggttactttggaacgacgaaaagcttagatctttaaggagaaaacggcatgaccaaaaccggaaaatg

SEQ ID NO: 14079 - DNA, 380 bp, Arabidopsis thaliana
  unsure at all n locations
  Clone ID: LIB25-004-Q1-E1-E2
gnaantcctcgccgtncgtaccggtccngcaatcccgggncccaccacgcgtccgaaacaatgggcgacttcttctactttctcgtcactactaccttcaccaccagctcttctttccgaccaccgttctcctccaccatccatcagatactccttttctcccttngctactccaaaatcgtctcgtttgggtttcactgtaccggagaagagaaacctcgctgctaattcgtctctcgttgaagtatccattggcggagaaagtgaccaacaacatcatcaaccgggttaaggaggagacaacaaggnaantggaattacnaaaacncaaattactnanggtanttccggaatnaaccagaggganttgtggcaatngt

SEQ ID NO: 14080 - DNA, 426 bp, Arabidopsis thaliana
  unsure at all n locations
  Clone ID: LIB25-004-Q1-E1-B3
gacgacggcgatggcgatggctatggagatttctcttcctttcgttggatcatccatggccttaagcgcgggaaaatcaaggaacagcgtttctaggattagtcgtgttggattctcttcggtctcggctgtacatgtacccagaaggatgtttatgcagctgtctggatttggttcggtcttgacgcttctggattttcctagtttagcggcgccggttcctcagatgaaggaacctgaagtgatcaggacattgaaactcccgagtggcgtgaggtatcaagagataattgaaggtgaaggacgagaagctcatgaaaggggacctggtcgaactaaactatgtgtgtcngcgtgcaaaatggatatttcgttcataacacggtggatnaantcaantggtgaaagtctcctgtcaaacttaat

SEQ ID NO: 14081 - DNA, 441 bp, Arabidopsis thaliana
  unsure at all n locations
  Clone ID: LIB25-004-Q1-E1-B4
ctaagcacattcttatctctttctgaaacgagttcccaaattagctctacaaaaaccaggatcttgatttctcatcagttaaacatgggaactcctgtcgaagtctctaagctccatttcttgctcttccctttcatggctcatggccatatgataccaactctagacatggctaagctctttgccaccaaaggagctaaatccactatcctcactacacctctcaatgccaagctcttcttcgagaaacccatcaaatcattcaaccaagacaacccgggactcgaagacatcaccatccagatccttaatttcccttgcacagagcttggtttgcctgatggctgtgagaatactgatttcatcttctccacacctgacctaaacgtaggtgacttgagtcaaaaagtttttactccgcaatgaaatatttcgaangag

SEQ ID NO: 14082 - DNA, 430 bp, Arabidopsis thaliana
  unsure at all n locations
  Clone ID: LIB25-004-Q1-E1-B5
gtctcttttcctccgcatctaaaaccatctgagaaatatctccgacgaaggagaagaaacgaaaatgacggagactggagtaatcggatgtggctgtcgcggagtcaccggcggcaatttcttccatcccggaggattttctttgaaatcttgtttcctcgagcagagtacaaagcgtaatcgtaactttttccgaagcgtttctatgattcctcctttcaaacgcggtcgtttcatcactaagttgcgttccgtcgccgggaacagccgaatctttagcatggatgctcgagagaaatcacgatcgtttgtgttggtatcatcaaggcacaagagaattccaantttttgtgattgatgccgattgatacatttgggattgatgcttctggggtgtccaaaagattaaaaaggtcaaggctttaactgt

SEQ ID NO: 14083 - DNA, 436 bp, Arabidopsis thaliana
  unsure at all n locations
  Clone ID: LIB25-004-Q1-E1-B7
ctctcgacgacgaaaatctcaaaaaccccaaaatctcctccaactccgagttatggctacatgttccctcttaccaccaccgtccttttctccgcgccggcgattcngtagtttttctcacaatcgccggtctctaccttcaatattcagtttcaacaaagagcgtgtctcacgaagagtcttctgtagctccaaagagaacgatataaacagagatcggaatcagtctacaggaattcaagtctacggcgaaatcgagaggttattaacagagactgtaaaaaattctcagagtagctccggtggatcctctgattggtcagaagttgagggagcatgggtgctgaaaccaagaaactcgaaaccgaagatgggtgttcatttcattgggcggtatatttgtcggtgcaacaacacaagcttactatcgaatggg

SEQ ID NO: 14084 - DNA, 316 bp, Arabidopsis thaliana
  unsure at all n locations
  Clone ID: LIB25-004-Q1-E1-B8
cccaaaagaccacctcaccgtcagaagaagaagttaaactacctaaccgctttcaaaggtcaatacccgcgcaagatcactctcgggtcggatctttccgtgtaagacccgtccggatctatcccggaccgatcaatttcacgaagtgttctccttcaatcgaataaagtcaantgctttcatcaaaatttacccgcgaattgaagaaggaagaggaaccaaacctccaatggagagaagtgagtccgttgatgaagatgtccaagcatctgnnnattaaagaannaacaaggtncttnaagaaantnttcaatgt

SEQ ID NO: 14085 - DNA, 491 bp, Arabidopsis thaliana
  unsure at all n locations
  Clone ID: LIB25-004-Q1-E1-C1
tgnnggaattctcccgnncgtacggtccannaatcccgggcccaccacgcgtccnnnccgcaacaatatcttttgctttctctctcattcttcaccagtaacaagcccatctctcgattcttcactctcaaggaaggagacgttttgaaaatcagaaatggtgaagatatgctgcataggagctggttatgtgggtggtccaaccatggcggtgatggctcttaagtgtcctgagattgaagtagtcgttgtggatatctctgaaccaaggatcaatgcttggaacagtgataggcttcctatttacgagccgggattggaagatgtggtgaaacaatgcagagggaaaaacctcttctttagcacagacgtggagaaacatgtatttgagagtgatattgtatttgtctcagttaacactccaacaaaacacaaggtcttggtgctggcaaagctgctgatcttacttactggganaatgctgctcggat

SEQ ID NO: 14086 - DNA, 515 bp, Arabidopsis thaliana
  unsure at all n locations
  Clone ID: LIB25-004-Q1-E1-C10
ngnggtnnnggantgtntngccagnnnctacgccgggtcaaaaccggtccanacttcccggggccacccacgcgtccgcanaaccgttttcatcggaagaagaacaagttggattgattttgctttggatctcacatctgagatcagattaatctctctgtgaagtcgaagaacgaaaccctagntcccatggatctctcttcacgcttctcatcgatccttatccttctcttgatctccatctccatagcttcggctgagattcgtaaatcagagatccgatccgatgatcgtccaatcatccctttagacgaattcggtttcactcacagcggtcgtcttgagcttgacgcttccaagatctggctttccaacagcaatcccgatctcgatctctccaaagtgggcttctttctctgcactagagacgcttgggttcatgtgatccaacagcttgaagaagaagagatcacgtgcgctctacaatcagatctcgttaagcatgtgttcacctt

SEQ ID NO: 14087 - DNA, 506 bp, Arabidopsis thaliana
  unsure at all n locations
  Clone ID: LIB25-004-Q1-E1-C2
ggntgnngnaactcnagccgntcgtaccggtccangaattcccggggnccaccaacgccgttccgaaaaccnctaggtgacttaagagtaaaaaatggtagaggcagaggttgaagtagatgtggaaatcaaatctacggctgataagtttttcatgttctctagaagatcacaacatgcctccaaagccactcgctatgtacagggatgtgatctgctcgaaggcgagtggggcgaagttggaagcatactcttgtggaaattaactgttgatggagagccaaaagtgtcaaaggatatgattgaggcgattgatatgaagatgaatatgatccagtggagggtgttagagggacctctgaaggaagagtacaatattttctcgaaaacgatgaaagtaagccctaagcaaggagggtctggaagtgtggtgaagtggaacttgaagtatgagagaattgatgagaaggtggctcacctagagaagctcctcaattcttcgtcga

SEQ ID NO: 14088 - DNA, 510 bp, Arabidopsis thaliana
  unsure at all n locations
  Clone ID: LIB25-004-Q1-E1-C4
gntgnngaaantctacccgtncgtaccggtcctccaattcccggggncccacccacgccgtccgaancatgggccaatttgcgatgcaaaacagagacatagtagccattgctaaaacaggctcgggaaaaactttgggttacttgattcctggtttcatgcatctccaacggatccacaatgattcacgaatgggcccaacgatcttggtcttgtcccctactagggagttggccacacaaatccaagttgaagctctgaaatttggcaagtcatctaaaatttcgtgtgcgtgtttgtatggtggagcacccaagggtcctcagctgaaggaaatagaaagaggtgtagatattgttgttgcaactcccgggcgactgaatgatatccttgaaatgaagagaatcagtctgcatcaagtatcttaccttgtgctggacgaagcanatagaatgctggacatggggttcgaacctcaagatcagaaaaattgtgaatgangttcccaac

SEQ ID NO: 14089 - DNA, 439 bp, Arabidopsis thaliana
  Clone ID: LIB25-004-Q1-E1-C5
tcttcttgttttctcattcttcttctaaaaaatcttgacaactttttgtttttgttttctttctctgaattttttaaagagagagagctatgtagctatgaaacagtggagagatatagatatagagagacagagaaagatgatgatcagtgaagttaggctaaacccactttctatttatgtataattaggtcaatcacatcaccaatctcctcctccaattctcctcctctccttccaaattctagggttttgcttgtatctcaccccctttctcaattccctagggaaactgtgaatttcatcaaattccattattttttggtcacacccttaaagagatctgagagttctaaagatgatgacagatttatctctcacgagagatgaagatgaagaagaagcaaaagcccttaacagaagaaagaaaggagcgcgt

SEQ ID NO: 14090 - DNA, 275 bp, Arabidopsis thaliana
  unsure at all n locations
  Clone ID: LIB25-004-Q1-E1-D1
gggtggngnnaattcctgccgntccgtaccggtcctcgattcccgggncccaccaacgccgtccaanngttaaacacgtcctgggtctgtgttcagtgttcttggtaaaacatttgcaggacatgaagttcctatatcatgtcctgagaatggaatctggatgtacagtttttgtctctcttaatgtaagaattctgtttaaatacagttcacctctaaaaaaaaaaaaaaaaaaaaaaaaaaaaaaaaaaaaaaaaaaaaaaaaaaaagggcgg

SEQ ID NO: 14091 - DNA, 517 bp, Arabidopsis thaliana
  unsure at all n locations
  Clone ID: LIB25-004-Q1-E1-D11
ggggggggngnnnttngnagctctgccgntcntaccggtcctcaattcccgggnccacccacgcgtccgaaaaatgatgtcatcaatggcactctcttctacttccctctgctcttctttcatctctcaacatccaaaactctccatcactgcttctcctccattgttccatacccaaacaaccaaacccatctctgtaaaacggaaaatcataactctagcagctccagagacactcaccgctgaaacagtcaccggaattgatacttccgacaacactccacaacaaacaataaaggtggtgaagccagatgagaaatcaagagtggtactcaagtttgtgtggatggagaagaacataggattaggattggaccaacatgtacctggacatggcacaatcccacttagtccttacttcttctggcctaggaaagatgcttgggaagagcttaagtctactcttgaagctaaaccatggatctctcaagaagaagatgatcattcttctaaacca

SEQ ID NO: 14092 - DNA, 418 bp, Arabidopsis thaliana
  unsure at all n locations
  Clone ID: LIB25-004-Q1-E1-D5
ttgtgaattcattaattcctgcgaaatggaacctcgaatcaatgaccttcaggtggaatctcgggttcatgagttgctcgattttccggttcatacaaaccagatatcctctgcaatctacgagtgtcccaacgaccacatcgaaaaccctaagaagaaaccgtacaattgtccacactcaggagccaagtgtgatgtcacaggagatattcaaaggctactactgcatctaaggaatgatcacaatgttgaaatgagtgatgggcgtagtttcagtcacagatatgttcatcatgatcctaaacatcttcatcatgctacttggatgttaacacttctcgattgttgtggtcgaaaattctgcttgtacttcgaagcgttcacctgaggaaaacaccaatgtacatggncttcatgc

SEQ ID NO: 14093 - DNA, 504 bp, Arabidopsis thaliana
  unsure at all n locations
  Clone ID: LIB25-004-Q1-E1-D7
ntggnggaaaatncnaccgctncggtaccggtatncnaattcccggggncgacccacgcgtcnnatttcaagttcttttttttttaaccttgccatcaatacaaccatggcaaggatttctctgttgttctctttagccttagttctagccatcgggtccgtcttggctcacggcacctacccacaagaaattacaaaagaccttgtgtccatctactttgtccaaagttcaagctttcccttaccttgaagtctctagcttcgtcgagaagaaggttcagttcgcaccaaaaaccattgcgttcaagtctttgttctccatctgcaagagctacatcgactttcttgggggcgttaagttttctgcctccagagatgtgtttcacgtcgttcatgtcaaattcactttgatgaccaaggcgatggttattgcacaagcacacattgggagttgaaggagacctcgctgttaagttgggcaaaagctacaccgtgaatggctng

SEQ ID NO: 14094 - DNA, 500 bp, Arabidopsis thaliana
  unsure at all n locations
  Clone ID: LIB25-004-Q1-E1-B1
nngnggaattcnnacagntnctaccggtcaccaaatcccggggnccnccacgcgtccnaaaggacaaagagtttttgttgtcagtaacttcaagctctaagctatggctgtcaccaagatttatattgtgtgagtctttaaagtttaaactaatcagtgccaagttaaacaactggcgatcaatttcccgatcaagagtaatctgcgattttgtactactgactcacacaggacgagattgaatcctcgtaccagtttggttttgacgaaaaattgggttcttggacttttctgttaggtactattccttgcacggccacgtcgagacaatggcacgagaggtacttcggggagtaaactctgttccagacgtggaagcaacactttggcaagtgccaagagacattaccggagaaaaatattggagaaagtgaanggcgttccaagaccggacgattgccgggatantcgaccagaacaactgggcggaagccnaacgg

SEQ ID NO: 14095 - DNA, 427 bp, Arabidopsis thaliana
  unsure at all n locations
  Clone ID: LIB25-003-Q1-E1-G7
aattgctcatcgattctcaattcagcttcatgctttcggatttgattcgtcgataaccccaatttctttacaaagttgaagtttttatgtcatttctggttcgaaattcgttgcaattggaatgagataaagtctctgaatttgctatcgctttgttttattcgttttctgttttttttgagatgccatcgatgcttgttctcgtcggcacaatgccgtccttggcttctctggttagtctaggtggtgcttgtgcaagcgtttctggaacgagttcttcggatgcatcgtatgctttagttaagagggtttctttgtcaaggagaagtgttaaggggactaagaaatggctgtgtagatattctgtttcgtcttcaactactactactactgctgacttcaatgcngancaaaacaacaactcaat

SEQ ID NO: 14096 - DNA, 434 bp, Arabidopsis thaliana
  unsure at all n locations
  Clone ID: LIB25-003-Q1-E1-G8
gcccacgcgtccgctctctctcaatccaacaaagaaaaaaaaagtcttcttctttttttacaagtctgagaattttctacagaaacaaaaatctgattgtttttcccactttgcatctgttttgaggatgccagctacggattttcaaggatcatttggaaggtcgttgctaagtttacggcgagaccaagttgactcatcaacagtcgtctccggaagtagtagccaccacgagccaagcaccatggaggttgagctagattcgtttcaaagacaagtcgctgagaaattcatcgatctcaacgcttcttcaaacgaccttctctctctcgaatggatcggaaagcttcttgattctttcctctgttgtcaagaagagtttcgagctatcgtattcaaccaacgatntcaaatttcnaaatccccgatgggng

SEQ ID NO: 14097 - DNA, 520 bp, Arabidopsis thaliana
  unsure at all n locations
  Clone ID: LIB25-003-Q1-E1-G9
nnnnngnaactgtttcgcctgnccntaccgggcccaaaattcccggggaacnacccacgcgtccgccnacgcgtccgctcctactgtgngagaagcatcatttgaggaacggaangcaaccctaagaatgnagcaagatatgcagagtgacaattttaatatgtatgatcttattgcctatcgaataaagttcgcacctcatcctaaggctggtgacaagtggtgtatctatccgagttatgattatgcccactgcactgttgattctcttgagaatataacgcattcgctctgtactcttgaatttgaaacccggcgtgcttcatactattggctgttacattccctgagtctctacatgccatatgtgtgggaatattcacggttgaatgtgacaaacactgtaatgtccangcgtnagttgaattacntagtgacaaacacgtatgttgatggttgggatgatccacgtcntttgacactttctggtttgagacgggangggtgtgacttcaactng

SEQ ID NO: 14098 - DNA, 440 bp, Arabidopsis thaliana
  Clone ID: LIB25-003-Q1-E1-H12
gagaactgtcctcattgtttcccaaccctctccgctattggaaggacgggttgggaaacaatgaggagagaactgtcctttctgtacagtcgtttctatgggatccttcttggaggcattttgataatgtaccagttccacaactacatgcagccgattctccttctcatgtactcattttggataccacaaatagtcgccaatgttgtccgggattcaagaaagcctctgcacccatattacatcttgggcatgacagctacacggttagctataccgttatatgtttttggatgcccacacaacttcatgcgtgtagagcccaacaaggtttggtgtatatgcttgtgcacattcatggggttgcaagccgtcattcttcttcttcagcattattttggttcacgctgctttgttccccgtcagatgctaccagagaa

SEQ ID NO: 14099 - DNA, 492 bp, Arabidopsis thaliana
  unsure at all n locations
  Clone ID: LIB25-003-Q1-E1-H2
gntgngnaattcnacttcntccgncggtcatggannacgggncnancacgcgtccnaggacncgtgggaatcaaaattcatttttttttcctctgatcatcatcgaaccctagtttcgtcttttgggtacgtttgatttcgcctctccactttgtcaatttcgagtttttgtggtttgggtttttttcccgatttagcctaacagataaagtttcgagttttgtttctcttaatcatcgtagatactaaccgaatcatcatggagaagaactccttcaagctttctaatcctctggagatgagaatggctgagtctactcgtatcagagcgaaataccctggaagagttcccgtgattgtggaaaaagctggacagagtgatgttcctgacattgacaagaagaagtatcttgtaccaagctgatttaaaccattgggncaatttgtgtacgttgtgaggaaaagaatcaagcntggngctgaaaaaaccat

SEQ ID NO: 14100 - DNA, 482 bp, Arabidopsis thaliana
  unsure at all n locations
  Clone ID: LIB25-003-Q1-E1-H4
tattnntcccgccggtcnnngacaacgggccgancncgcgtccancaaaatgggtctatggggaaactactctataccaaaagacaacccttttcgtgaagacaaagagcttgaacctgaaatatgggctgttggattgagaaacccttggagatgcagctttgattcttctaggccttcttacttcatgtgtgctgatgttggacaggacacatatgaagaggtggatctcataagcaaaggaggaaactatggttggcgtgtttacgaaggcccggatcttttccatcctgagtcatcccctggaggaaacacatctgttaaatcactaaacccgatatttcctgtgatgggttacaaccactcagaagttgactcaagcggaaaatcagcttcaatcactggaaggttacttttatagatctgaaaactgatccttgcataactggaangtacgtanatgccgatcnaaatggaaatgg

SEQ ID NO: 14101 - DNA, 311 bp, Arabidopsis thaliana
  unsure at all n locations
  Clone ID: LIB25-003-Q1-E1-H8
ttnangtgtctcaccatttgggtcaaaatntcnttaggaccattgctatggatggtactgagggtcttgtccgtggnaggaangttctcaacactggtgctccaatcactgtacctgttggnagagctacccttgnccgtatcatgaatgtgcttggagaacccattgacgacagaggcgatatcaagaccgagcattacttacctantcacagatatgctccngctttggttgatctaaccactgggcaaaacatcctgtccactggtatnaaagttgttgatcttcgtgctccttaccaangangacga

SEQ ID NO: 14102 - DNA, 434 bp, Arabidopsis thaliana
  unsure at all n locations
  Clone ID: LIB25-003-Q1-E1-H9
ggcgcaacttactaattccctcaattatctcttttctgtttctctcttattatttgtatcgttccactgcttatgttttcgtttttcgttggttgcagcttgttcaaactccactgacgatcaacagattcaacaccatcaccaccggaaatgggttggtccctcaggccacaaagtcatcaccgtctcacttaacggccacgctcagtttcgctccgtccaagacgctgtggattccataccaaagaacaataacaagagcatcacaatcaagattgctcccggattttacagagagaaagtggtggttccagctacaaaaccgtacataacgttcaaaggagctggtagggatgtgaccgctatagantggcacgaccgttgcgtccgaccttggcgctaacggtcaacagtttacgtacctaatcaaaccg

SEQ ID NO: 14103 - DNA, 532 bp, Arabidopsis thaliana
  unsure at all n locations
  Clone ID: LIB25-004-Q1-E1-A11
gggnngggngnngnanngtctngcagncttttttnnggcccaaaaacgtgtccanacntcccgggtccaccnacgcgtccgtaaattattttttctgatctgagaaaaaaaatggcgaatggagctaatagagtggatctcgacgggaaaccgatacaaccgttgacaatatgcatgatcggcgccggaggtttcatcggttcacatctctgtgaaaagctcttgaccgagacgccacataaggtgcttgcgctcgatgtttacaacgataagatcaaacacttgcttgagcctgataccgttgaatggagtggtcggatccagtttcatcgtatcaatattaagcatgattcgagacttgaaggtcttgttaagatggcggatctgattataaatcttgctgcgatctgtactccagctgattacaatacacgtcctcttgatactatctacagcaatttcattgatgcgcttccaagttgtgnaatactgttcctgagaacaacaagcgtctcaatcacttttctaactg

SEQ ID NO: 14104 - DNA, 223 bp, Arabidopsis thaliana
  unsure at all n locations
  Clone ID: LIB25-004-Q1-E1-A12
aggattggggcctttgggtgtgtcggaaatgcntgggactccccttaacttcangggcagtttcaagatcgtccgcggccgttggatcatgcccatccacgttcaagactgttgctctcttctctaagaaaangccagctcctgctaagtccaangctgtctccgagactancgatgagctcnccnagtgggtatggtcctgacaggagaantttcntgcctg

SEQ ID NO: 14105 - DNA, 503 bp, Arabidopsis thaliana
  unsure at all n locations
  Clone ID: LIB25-004-Q1-E1-A2
nntgnngaaacttcctcccgnncgtaccggtccatcaatcccggggcccaccaagcctncgnaaaaggttgcagccactaaatcagatccgacaatgccgaagcaaatccatgagatcaaggacttccttttgacggcgagaaggaaggatgcaaggtctgtgaagatcaagagaagcaaggacattgtgaagttcaaggtcaggtgctcaaggtacctctacacactatgtgtcttcgaccaagagaaggccgataagttgaagcagtctcttcctccaggtttgagtgtgcaagacctttgaagatcttatgaaatcaggatctatcatggttttatatacccttgtcttagatgattttgttttttccctttctgctgtcttttgaatgactatgattcagacttccgttgagtttctttcttataacttcaagactaaattatgaattggatttgtanttttttttgctatcaacttggttagtaatatatanggcccc

SEQ ID NO: 14106 - DNA, 502 bp, Arabidopsis thaliana
  unsure at all n locations
  Clone ID: LIB25-004-Q1-E1-A4
gtnggngnaattcncnccgcaacgtaccggtccaccaatcccgggggccaccaacggcgtccnaaaagtctcctctctcttctctctctatatcgctcctcatgatccgattttttatataatttataaaaaatttatgtgataattacagatacacgttatttgtgtgtatattgatagagacaataaccattggaatctgaccatggatctcttttcttcttgagatatttttcatttctttctcctgttctcgtctcccagatctgttcgtcaatcttaccattggaaagcttcaagcttcctttttttctctatctggggacgggaccgttgtataaaagagttagaccagacgacggcacaatgtatttcttcggtttgtccaaagaagaagtgttgtcacagaaacatgttgtatcatataaagagacttctaagcagaacccaatcaatatggtcactctgtttggcanacaggtgtatcaggtaaaagtgagag

SEQ ID NO: 14107 - DNA, 442 bp, Arabidopsis thaliana
  unsure at all n locations
  Clone ID: LIB25-004-Q1-E1-A6
ttaataaaaaagaagagaaaaataaaaaagtttgtgtaaattttttttgcacactccacagcctaaacccaacccaaaatcacaaaaaccaaaaaaatatataataatgggtggctgtgcgagtagacccaaggaatcagacatgcaaaacgaagaaggctctgttcctaacaagcctgtctctgaaaacgtagtagccaaggagaacaacacagaaagcggtgagaaacagaaccagacagtggctgagaccactgaaacaacttctgtcgaagctaaggagacatttccggtcgagccgaccaaggaaacaactcctgctgttcaaccagaggttgcagccgtcgaagagtcttcttctgctgatgctggtgangctgcantagttgcacctgagaaaagtggagaacgctgcaacaagaaaacgctgaaacaaangtgg

SEQ ID NO: 14108 - DNA, 440 bp, Arabidopsis thaliana
  unsure at all n locations
  Clone ID: LIB25-004-Q1-E1-A9
tcngnccttttgngncctancggtccatactcccgggnccccccacgcgtccgaaaaatcttagagaaaacaaaaatccantttttgctgtgaagatggcaatgtctgtaaatgtttcttcttcttcgtcttctgggatcataanctctcgtttcggtgtttcattggagccanaagtttcgnaaattggttcgttgaggttattggntcgtgttcatgttgctcctgtgtctctgaatctatctgggaagcgatcatcatctgttaaacctttanacgctgaaccaaagacaaaggattcantgattcctcttgcggcaacaatggtagcagnaattgcagaggaagttgnagtggttgngattgncggattttgaagagcttgctangnagttagngaatgcgtcacctcttgagattatggcctnagctcttgagaa

SEQ ID NO: 14109 - DNA, 499 bp, Arabidopsis thaliana
  unsure at all n locations
  Clone ID: LIB25-003-Q1-E1-G4
gnnnnnnggnaacgtntactnnnacggggnncggtcacnaattaacgggtcganccacgcgtccgaatttttaactccatatacatgattataaacgttcatatgttatttgatatgaattaaataaactaatttttgtttatgatttactatttttatttttaatagatttttgtatattgtgtatctaaaatatcatatttataatattgtatgttggaaatgcttaaaccacctaaaattgcatatgttttgattagacgttatatgttttaagtattgtgtcagtgcttgcttcgtgcctaacgctttcttaaacacaaacaagtcaatattttatactacacaaactcattaatagatattagtgctaaacttaataaagcatatataactattcaagtccacaaaatcttttaccaaaataaacttttaaaatataaacttttttacatgtctagcacgtatccgaacatttccaaaaagatactccatcctt

SEQ ID NO: 14110 - DNA, 425 bp, Arabidopsis thaliana
  unsure at all n locations
  Clone ID: LIB25-002-Q1-E1-C5
gaaatgaaattcacagattctccggtgatcgatctgacggtgaacggcacaaaactctcaatccaacaagacaatggctctatgcacgtcggaacttccgtctggccttgctcactaatcctatccaaattcgctgaacgctggtcaacactagactcatcatcatcaacaacatctccaaatccatacgccgaactcttcgatttccgtcgccgtcgaggaatcgagctaggaacaggatgcggagtcgccggtatggctttttacttactaggtctaacggagatcgtactcacagacatagcaccagtcatgcctgcgctaaaacacaatctgaaacggaacaaaacggcgttaggtaaatctctaaaaacctcgattgtttattggaacaatcgagattaagtttcggcgtttgaaancgg

SEQ ID NO: 14111 - DNA, 429 bp, Arabidopsis thaliana
  unsure at all n locations
  Clone ID: LIB25-002-Q1-E1-C7
ggataacagctggagagatgaacttccttctgacaggactggaaacttcgatacgatatataatttccttagagagaactggaagattgtaagatgggtagctctaggagcagttgttttcgaggctttactcttcttgcttgcccttatggtcagggcagctaatacaccagcagagtatgacagtgatgatgaatatcttgctccaaggcaacaaatcaggcagccattcatcaaccgccaagccgcccctgtcactggtgtcccagttgctcctactttggaccaacgcccaagccgcagtgacccttggagtgcacgtatgagggaaaagtatgggcttgacacatctgagttcacatacaatccctcaagagtcacaccggttccaagcaaatgccagcgcaancaaaacgaagaaaagggccg

SEQ ID NO: 14112 - DNA, 435 bp, Arabidopsis thaliana
  Clone ID: LIB25-002-Q1-E1-C8
agacagcttttgggagtcaacggccgcgacgatggacccattattacatcttgtattagggatggagttaacagaatatccttgagtggaggtgacgttcggattttttgttttggggtcagacttgtgaagcgcaggactctacaacaggttctaaatttgattccagaagagggtaaaggggagacttttgaagatgctcttgcacgtgtccgccgatgcattggaggtggaggtggagatgataatgccgacagtgatagtgacattgaagttgttgctgatttcttcggtgtcaatcttcggtgtcctatgagcggttctaggataaaagttgctgggagatttttaccctgtgtgcacatgggctgttttgacctttgatgtgtttgtggagtttgaatcaacgttccagaaagttggcaagtgccctaa

SEQ ID NO: 14113 - DNA, 72 bp, Arabidopsis thaliana
  unsure at all n locations
  Clone ID: LIB25-002-Q1-E1-C9
atcanaggcntattttcgccggcaagcagctagaggatggccgtacgttggctggttanaagtatccatcaa

SEQ ID NO: 14114 - DNA, 431 bp, Arabidopsis thaliana
  unsure at all n locations
  Clone ID: LIB25-002-Q1-E1-D1
atcaatggttatatagattactgttttttcttcttctccatttctcaaaacattattttcctacagagaatcaagaacccgaactacaagggaaaatggaagaacccatggatagataatccagaatttgaagatgatccagatctttacgttctgaagtctatcaaatatgcaggcattgaagtatggcaggtaagttctagagctttcttgaattccatcaaatattaacttttataatcactacatcatcaccagatatggatgaatatttatataatattcactgccaattagttcttttaacatatatatgctgcttgtacatatangtcatccaaatttttagggttgaaaacaaaaccaanagaaacagaaaagatctgataaaaagtcctcatttttagacgaagggattaaacttatcctag

SEQ ID NO: 14115 - DNA, 433 bp, Arabidopsis thaliana
  unsure at all n locations
  Clone ID: LIB25-002-Q1-E1-D11
angtttttccgntccgnacggtacantccaanaattcccgggtcnacccacgcntccgnctgagtacagagagaactaagttcagatccatggaacctgcaacttcttcaccattgccacgagacacgtcggagcaggatcccgcgctggcgcagagtgaagatcagtctcaaggaagacttagggtttctgcttatgaccttatggtagtagacagtgatttagagggattagatcaaagaaaggaagagatgcgtaacatttttgatgatattcaggataaagcttcattaattcttcagttctcacttaagtgggaagaaatcgacgacangtttggtttctaaagcaacgagccatgganaaaggaggtccctgtccgggatcannntctggganctggngaaagaanggaanaaccaactgaggnttt

SEQ ID NO: 14116 - DNA, 496 bp, Arabidopsis thaliana
  unsure at all n locations
  Clone ID: LIB25-002-Q1-E1-D3
nnnngnaacttcnacgctnnacgggccggtccacnaattaacgggtcgacgcacgcgtccgaaaaaactcaagagacaaaaaaaaaaggaaggcgcgtcagtgatggagaagattattgacgtagcttatggcgcatcagtgaaggtgggtttgacgttgttggagatgaatctgttgccggatattgtcattaggcggctcacacgtctgcttctggccggtcgtctccgttccggttacaaacccacggcggagatgcaactctccgatctcctccgttttgttgactctataaagaagatgcctatagctatccataccgagaagccaaagactcaacactatgaattaccgacagctttcttcgaacttgtccttgggaagaaacatgaagtacagctcttgttacttctcaaacgattcaagtagcttagaagatgcaagaggaagcaattttggctccttaattgtgaaagagctaaaagtggaagatgg

SEQ ID NO: 14117 - DNA, 228 bp, Arabidopsis thaliana
  unsure at all n locations
  Clone ID: LIB25-002-Q1-E1-D8
aangctttgtcggnngtaactgccgtggattccgtcgtcnttgcttctgcaccagacattgctgatctanccattctcatgcataattcaagctttgatcatcgtcgtntgtcacttcnttcttatctaatctgccgtacagtaccantgaagtaccgtncattacatgtgttctcaaataantctttgggatttgtgtgtttccggtttaaatgtaatgtnaaatca

SEQ ID NO: 14118 - DNA, 387 bp, Arabidopsis thaliana
  unsure at all n locations
  Clone ID: LIB25-002-Q1-E1-D9
atgttctntccggccnggtcggtacanntcataaatnncgggtccacccacgcntccgatttcttatccggaaaccanaaacttccggtgataaaacctccttcgtcatctctctacttcttggataaaatggcgtcaactttcactgccacatcttctattggttcaatggttgctccgaatggtcacaaatctgataagnaacttatcagcaagttgtcntcaagctcattttggaaggggacaaagtgtgtgtcctagacccagaagattcagttctgcaattgtgtncgcagcaaagggattncatttcaacaaagatgggactnccattnggggacttcangctggggtcaaaaagctccncagnttttgttggngttacac

SEQ ID NO: 14119 - DNA, 71 bp, Arabidopsis thaliana
  unsure at all n locations
  Clone ID: LIB25-002-Q1-E1-E1
atcgacgagacgaaaccaggtgtgaanggtctcattgatgctcacatcactganattcctcgaattttctg

SEQ ID NO: 14120 - DNA, 67 bp, Arabidopsis thaliana
  unsure at all n locations
  Clone ID: LIB25-002-Q1-E1-E10
ctgcttcantcancattattctcagcagcactgtgagctgccaatgctgtcaggaaggtgcntccac

SEQ ID NO: 14121 - DNA, 54 bp, Arabidopsis thaliana
  unsure at all n locations
  Clone ID: LIB25-002-Q1-E1-E12
ttcattgaataggatcatctctattctgctattaaggctgcannctcgtgtcag

SEQ ID NO: 14122 - DNA, 497 bp, Arabidopsis thaliana
  unsure at all n locations
  Clone ID: LIB25-002-Q1-E1-E4
ggngngnaattcnagtnnncgggccggtcacnnatnacgggtcnagcccgcgtccnataggnagtctcttcaatgtcacaaataatcgaatcacacaatattaaacactaaattattcacagttttcttggagaaaagattcaagtacaagtacaagcagagaaagtgagagagagagaaatgatgggtagcttgaaaataatatctccaccacctccggcgacaagattccggcaacgagtaacggcgaacggagatgggtttccgacatttcttccgaaggagatacaaaacataaaagatccattcgcaagagctttagctcaaaggattgtacgaattcctgttcctcttcagatgggaaactttagaggcagtgtaatgagtanctgtatcaaaccactgttcaattacacgacaaaagtccccgttgttcctccccaatggttcgacaagttcctgtcntgaatggagacgtacttatcctccggcttgaa

SEQ ID NO: 14123 - DNA, 175 bp, Arabidopsis thaliana
  unsure at all n locations
  Clone ID: LIB25-002-Q1-E1-E9
gagaaangagttccttctgatccgacanagaatcgncaagattcaggctcatgtgagaggacatcaagtccgaaaacantaccganccattatttggtccgtaagattgcttgagaaaatcatcntgcgatggaggcctaaaggtagtggcttacnccgtttcaaacgtgatana

SEQ ID NO: 14124 - DNA, 433 bp, Arabidopsis thaliana
  unsure at all n locations
  Clone ID: LIB25-002-Q1-E1-F2
aaagagtcaatgtgagtttgatgaggaaagtgatcattgtgttagctatgatgagattctagtgaattctgatgaagttattgagcttgatgaagaagaaggcggtggtgaccacgggagggttgctgatcttgttgagtgtgagaatcttggacctcctgagatgccacaagagattgtgattcaagattctgctttagttgaagaggcgggatcgaaactcgatgaacatgcttcaaaaaagccatctaattctatggaaacaccctcctcctctgtaaacgtgaaacctattattcctaatgatgttcgtgtgaccaaagcntccacaaanggacatgatgttacgccaaaagctgcttcaanggaggacaaangggtcctccttaagttctaattctaaaacaatgtnnatgccaagagccaaaaggaa

SEQ ID NO: 14125 - DNA, 429 bp, Arabidopsis thaliana
  unsure at all n locations
  Clone ID: LIB25-002-Q1-E1-F5
ggaaatccctaagctcaagacgagttttcatttctcgagcaatttcactcttccgagaacaaccctagattccgatgatgaggggtctcgtttccggcgccaagatgctatcatcaaccccatcgtcgatggcgacaagcatcgccactggtagaagaagctacagtctgattccgatggttattgagcactcatcgcgaggagagagagcttacgacatcttctctcgtttgctcaaggagcgtattatctgcatcaacggtcccattaatgacgacacatctcacgtcgtcgtcgctcagcttctttacctcgaagtctgagaatccttcgaagccgattcatatgtatctcaattcccctggcggncatgtcaccgccggtcttgcaatttatgatactatgcagtacattcgttctcctattaga

SEQ ID NO: 14126 - DNA, 462 bp, Arabidopsis thaliana
  unsure at all n locations
  Clone ID: LIB25-002-Q1-E1-F6
gctccgacaatggcgatagctatggcggttgtttctttcccatctctgctcaacaaaacaaccttatcctcttcactcttcactcccactttcctcccggcgaaatnctcttcacttctcatcaaatcatcaccaaaaaccagattcgtggtttcatcatccatggaagctggaatcggagtaatggggtcanaactcgggatgatgagtttcttcgaagaagacggcacagtagttcaagttaacagtcttcggatttccgcgaaagggtaaattcttaacccaattcaaaaccctaagcaacagacgggttacgannccgggttaaaatcnggttaaccgtncgtgttacgcnancaanaaagctaacttaaaccgggaaaaccggtcatcctccaaaaanagccgggtacaaatcccaaatgangacatttccaaagaagttcaagattaacaaancat

SEQ ID NO: 14127 - DNA, 493 bp, Arabidopsis thaliana
  unsure at all n locations
  Clone ID: LIB25-002-Q1-E1-C3
ntgnngnaacttcnacgtgnncgagcccgtcacanattnacnggtccgacncacgcgtccgaccacgngtccgcggacgcgtgggcggacgcgtggggtgagtagcgggaaaggttttaaaactgcaaaggcaaggaaaggactgaatttcaataatgttgatggaaaagaaataaatgctaaggttctttcagaatctgaacgcgcaagcaaagctgaggctgaaattgtggctttaaaagatgctctttctaaagtgcaggctgaaaaggaagctagcttagctcagtttgatcagaatttggagaaactgtctaatttggagtctgaggtatctcntgcacaagaggactctangggtgcttattgaacgagccacaagagccgaagctgaggtcgaaacgctcatagaatccctcagcaaagtagaagttgaaaaggagtccagccttcntcagtatcagcaatgtctgcaanacatanctgatttgga

SEQ ID NO: 14128 - DNA, 499 bp, Arabidopsis thaliana
  unsure at all n locations
  Clone ID: LIB25-002-Q1-E1-F9
gnnngnancnttttcnagcccgntcggtaccgaatccatnaattcncgggtcnacccacgcgtccgnnagagttctgtaggagatatgaaaagatgcgaagagatctatacagatatgttggaaggaggaatagatcctgatattcatgcatttagtatccttgccaaagggtatgctcgagctggggagcccgaaaaagcggagcaaatcttgaatcagatgagaaaatttggtgttcgcccaaatgtagtgatctacacacagatcataagcggttggtgcagtgctggtgaaatgaagaaagcgatgcaggtatataagaaaatgtgtggaatcgttggtttatcgcctaacttgactacttacnagactcttatatggggatttggggaagcgaancanccatggaaagcagaagagcttctgaaagacatggaagggaagaatgttgttcccacaaggaaaactatgcaactcatanctgatggatggaatcca

SEQ ID NO: 14129 - DNA, 508 bp, Arabidopsis thaliana
  unsure at all n locations
  Clone ID: LIB25-002-Q1-E1-A9
nnnnnnngnaantgtntacgcngnnccgtaccggtccaaaannaaaangggggnccgggcccacccacgcnatccgaagaactttcttttcccagtacttctcctctgctttttattacttgtcttcttctctctttaattttttataaatttaattttgggttgaaaaaaacgaggaagaagagaggagaggagactctttcttttagtatttatttatggaggaggagaggagactgtcttaatcgtttccgggtctcttattctgatccattcttctctcaagatctaagatttactgattttgaagtggagaagaaattagttgtctcgacaaaccccactagaaactttgtttagtgtgtcttcttaaagcctgcaagatgcagagaccacctcctgaagattctccttgaagggagacgagacctcatctaagtggaggaaaactcnctggagataagcttaacantacntaagaccttgttgagcaaatgcagtatctcna

SEQ ID NO: 14130 - DNA, 501 bp, Arabidopsis thaliana
  unsure at all n locations
  Clone ID: LIB25-002-Q1-E1-B1
nnntnnnngnaacttcnacgctctgtcgngntcgtcatcnagattanacgggtcgacgnacgcgtccgatcgtgnctcaacaaagtcattggttcgtgttaaaagtagagatgcccgaaagatcatatgcagtgcaatttctaacaccggatcacattttgcttactctgaccaaattggccccagtctgttcgagttgaagaaaaatgaatttacaaagtgtccatggagtgttagtagaaggcgacttcctgaacttccatttgcacattccatgattttcagttcggactgctctcgtctaataatagcagggcatgatagaaggatatatactattgacataagtagtttggaactagtatatgcatttacaccatctaagggaggagcatgaaggtgaagctccaacacctaangagcctccaataacaaaattgtttactaactcanatggtcaantggctaactgctatcaattgcnttgggggacatccatgt

SEQ ID NO: 14131 - DNA, 428 bp, Arabidopsis thaliana
  unsure at all n locations
  Clone ID: LIB25-002-Q1-E1-B10
cctttgtggagcaatactatcatattcttcaccaatctcccggtttagttcatcggttttatcaagattcgagctttttaacccgacctgatgttaccggtgctgtgactactgtcacaactatgcaagcgatcaacgacaagattctgtcgttgaaatatgaagactacacggctgagatagaaactgctgatgctcaggagtctcatgagagaggtgttattgtgctggttacaggacgcttaaccgggaacgataatgttaggaagaagtttagtcaatcttttttcttggctccacaagacaaaggatactttgtcttaaacgacgtgtttcgattccttgaggagaaagaggtgactgcacaagcccgctctgtccccatcaatggaaccactanggatgttcangctcctattgaaccanaa

SEQ ID NO: 14132 - DNA, 436 bp, Arabidopsis thaliana
  unsure at all n locations
  Clone ID: LIB25-002-Q1-E1-B2
gaacgccacacggtgctaatattatatctcagatccatgggtatactagcctgctagctcttaataaagagatcaacaaaaagtctgagaggaaacatgatcttgtcatcgcttcctatgtgttaggggagataccatctctgaaagacaggattactgtggttcgccagctctgggaccttacagatgatctcttggttttggttgaaccaggaacgccacacggtgctaatattatatctcagatgcggtcccatatactgtggatggagaagaggaaactgcgtaaactgggaaaagaaaatgaagaaagatggaaaggaggtgctcgatctcaaatctgggtgcgcatattgttgctccatgccctcatgatggaaagtgtcccgctggaaaacactgggaaagtactgtcantttgttcagcggttgcaaa

SEQ ID NO: 14133 - DNA, 410 bp, Arabidopsis thaliana
  unsure at all n locations
  Clone ID: LIB25-002-Q1-E1-B3
gggactcctcagctaacggattcgattgaaataccggaatccgtggaggttcttggtcagaaaatcgatctcaatcccattaaaggtttacttacatcagtccaagacactgcttcttcagtggctagaaccatttcaaaccaaccaccattgaagttttctctgcctagtgacaacacgcagtcgtggctgctcacaacttatctcgacaaggaccttcggatctcgagaggcgatggtggaagcgtctatgtgctcatcaaagaaggaagctctctcttaaacccttaaatcatcataactctcatcacatccatagtaacatatatacaagtatagacccatctgtctatgtttactaagtgttgtaactgttatatancttctttactgttggagagttataaact

SEQ ID NO: 14134 - DNA, 441 bp, Arabidopsis thaliana
  unsure at all n locations
  Clone ID: LIB25-002-Q1-E1-B4
aaatctcgatgaagaagaagatgattccgacgacgatcttactctcagctctcattttctctctatcaccgatctgtgaagctgtgtggcttactgtacctcacaccggatcaaagtgcgtctccgaagaaatccaaagcaacgtcatcgttttagctgattaccttgttatctccgaggaacattctatcttccctactgtctccgttaaggttacagcaccttatggcaccgtgttacaccacagggaaaatacaacaaacggtcagtttgcattcacaacccaagaatcaggaactttacttggcgtgtttttgaggccgatgctaaaaatcatgggaacaaaagattttaacatcaacatcgactgggaaaactgggaatcgcagctaaagattggggactccattgctaagaaaagaaaagattcganggtggtag

SEQ ID NO: 14135 - DNA, 421 bp, Arabidopsis thaliana
  unsure at all n locations
  Clone ID: LIB25-002-Q1-E1-B5
gcgtctttccttttactccggaaggaagatccagaaaggttttctttcgatcgttgcttttgactatgcatagatctggtacaacaatggcgtggaacgtattcaagttctgtactgccttacgaggtcttggatcgatcatgatccttttggttcttggtgttgtcggtgttacttattacgctgtcgttttgactaattatggtcctgcactctctcaaggtggccttgattctcttgctgctctcactatcttaatcctcttccatttcctcctggcaatgcttttgtggagctatttctcaagtggtttttactgatcctgggtgttgtgcctcctaattggagaccatctactgatgaagaaagangtgaatctgatccgttaaataatttgggactttgttggtttacaaaccga

SEQ ID NO: 14136 - DNA, 439 bp, Arabidopsis thaliana
  Clone ID: LIB25-002-Q1-E1-B6
aatggcaaagacgaagttgtgaaataatcctctgtttcttcttcttcattttaagcttcagggtcatttctgtttctgcacaacaaacttgtgacaacactgctggtagtttcaaacccaatagtacttatgacaacaaccgtcgtctcctcctctctaccttcgcctctaacgtcacggctcagaacggctacttcaatggttcgttcgggcttggtacagacagagtctacgccatggggatgtgcgctccaggtgctgaacctgatgtttgctccaactgtattaagaacacagcaagagggtttactacagattctgtctaaaccaagacggacggtttctcatggtcctgggtgaagaaaaccctttgcccttgttccgttactctaacaaatcccttctccgggctacttggcttgggagcccgtctaatgaa

SEQ ID NO: 14137 - DNA, 439 bp, Arabidopsis thaliana
  unsure at all n locations
  Clone ID: LIB25-002-Q1-E1-B7
gaaggtaaagagagaagatagaaacataaaatgtcggagaagaagggaaggaaagaggaggtggtgaccagagagtacaccatcaaccttcacagacgccttcatagctgtacctttaanaacaaggctccaaaggcgatcaaggagataaggaagtttgctganaangaaatggggacaaaggatgtganagtggatgttaaattgaacaagcagatttggagcancggtntcagaggtcctccgatgagaatcacaatcngagttgctcgtaagagaactgatgnttaagatgcaaanggaagattcctcctcnccttgtcactgttgcctgaaatcccctgcctaaaggactcctcctgggcctccggnactaaagattcattgaacaaataaggatttaaactatccttattagttancaaacaaccatttgtta

SEQ ID NO: 14138 - DNA, 500 bp, Arabidopsis thaliana
  unsure at all n locations
  Clone ID: LIB25-002-Q1-E1-C1
nnnggnnnnnnngnaacgtttactttgccggtgccggtccaaaaattnacgggtcgacccacgcgtccgnggacgcgtggggcggaggtgtacaaaggggttttaccggacggagagactgtggcgatcaagaagctgacgagacatgcaaaggaagtagaagaacgagtcagtgatttcttatcggagcttgggataatcgcacatgttaaccatccaaacgcagctaggcttcgtggtttcagttgtgatcgcggtttgcattttgtgcttgagtactcttctcatggcagtcttgcttctctactctttggatcagaggagtgtttggattgggaagaaacggtataaagtggctatgggtatagctgatggtttgagttatcttcataacgattgccctcgacggattattcaccgagacatcaaagcttccaacattttgctctctcaagactacgaagctcanatttcggattttggactaactaagttggctc

SEQ ID NO: 14139 - DNA, 420 bp, Arabidopsis thaliana
  unsure at all n locations
  Clone ID: LIB25-002-Q1-E1-C10
ggggaagaacaaaattgatatcactgtccctactggagcacaaattatctactccaaatacgcaggaactgaggtggagttcaatgatgtgaagcatcttatcctcaaggaagatgatattgttggcattcttgagacagaggacatcaaagatctcaaacctttgaatgaccgagtctttattaaggttgctgaggcggaggagaaaacagctggagggttgttgttaaccgagactaccaaagagaagccttctattggcacggtaagtgctcacttgatatcatgtccattcggggaatctgatactttcttagtagcttgatgtgatagtcagttcatacacaagttccaattatacatattctcctcttcattttatggcaggtgatagcanttggaccgggttccctagacaag

SEQ ID NO: 14140 - DNA, 492 bp, Arabidopsis thaliana
  unsure at all n locations
  Clone ID: LIB25-002-Q1-E1-C11
atntntntttggcccngccccgtaccanaaccanaaattcgccggtcnacccacgcgnccgcncacgcgtccgagagaacatcccagttcctctaaaactggagactatanagaacanaggacacgaacgattcctgcagcanatcaggacanacccaccatctcctcaatgcttctctgagaaccggacagctacattgaaacccttgaggaccaaacctacggtagtgttgaanagaaaggaagatgaagctgaagaaaaaaagaacagaaagagtggagaaagcaaagaancancanggggattggacgttctctggttcttaaagccttgcactttagccaactagannaccttcaccaaattctttctatattgattcattcttttgttaatttcattttattcaactgtaactaacgngatgattatcttgctcagntantaattctgggcaaatttgatcaatcgcttacttttacacatacaag

SEQ ID NO: 14141 - DNA, 491 bp, Arabidopsis thaliana
  unsure at all n locations
  Clone ID: LIB25-002-Q1-E1-C12
gtnngnantcnatctgntcgnacggtaccanaacannaattcgcnggtcnacccacgcgnccgntcaattgaaattcgttttcacgattcatccgccatttttccggggaaaaaacaaaaggtgagatcaaagaggaaaaatggcgcatagggtagaacaggattatgattatttgttcaagatcgtgttgattggtgattctggtgtcgggaaaacaaacatcttgtctagattcacaaggaatgagttttgtttggaatctaagtccactattggtgttgaattcgccaccagaactcttcaggttgaaggaaagactgttaangcccagatatgggacactgcatgtcaagagcggtacagagctatcacaagtgcttattacagangagcggtaggtgcacttcttgtctatgacatcactaaaagacaaacctttgacaatgttctgaggtggtacttgaactangagacatgcggattcaacatt

SEQ ID NO: 14142 - DNA, 433 bp, Arabidopsis thaliana
  unsure at all n locations
  Clone ID: LIB25-002-Q1-E1-C2
atcaacttaaatactacacggccaaaaacatttaacaaacgccactcagatcctgagtctttggatcaatggctatttcaaatgttatttctgtcttattattattgcttgtactaatcaatttaagcaatcaaaatatcaaaggaattgatgcatttcatcagatttacgaagaattgcaatctgaatcagtcgagtcagtgaatcatcttcacagacctagttttcactttcaacctccaaagcattggattaacgatccaaatggtccagtatactacaaaggtctctaccatctcttctaccaatataacaccaaaggtgcggtttggggtaatattatatgggcccattcggtttctaaagacttgggttaactgggaaggctcttgaaccggctcctaatccttcaaaatggntcgacatccggagg

SEQ ID NO: 14143 - DNA, 466 bp, Arabidopsis thaliana
  unsure at all n locations
  Clone ID: LIB25-001-Q1-E2-G1
gcttctcaantgcgtatgatctttctggggataaaattttccttgaaaaggctatggatattgcangacagattattgcctgcatggggacactcaatcgggtataccatataatattatcaacttgaagcatggaaatgctcacaatcctacatgggcggggggagacagtattcttgcagattctggtactgagcagcttgaatttattgccctttcccagaggacaggggacccaaaatatcagcaaaaggtagaaaaggttatttcaagtgcctnnaaaangtaaggancntccctgctgatngtttacttccgatatatataaatcccgatncagctaatccatcgccagtccaacangtancatttgggtgccatggggangacaggcntttaccgaaanatttgcntcaaaantttnggcgtgtttngggaannaancntcagccagtggngacnctgg

SEQ ID NO: 14144 - DNA, 502 bp, Arabidopsis thaliana
  unsure at all n locations
  Clone ID: LIB25-001-Q1-E2-G10
gnnnnngnaactgntacgcctgcnnttaccggggccnnaattcccgggacgacccacgcgtccggcgtttatactctgtaatgccagatccgcggtaacgcaagtcagtgacctactccggcgtttatcactgaatccgattatggctagtcttcttcgatccttaatccttttgctaatcgtgcaatcatttttggttgcgatcgctttcgggtcgaaagaagttgaagaattcagcgaggcattgctcttgaagcctttacctgatcgaaaagttttagctcacttccacttcgagaaccgagctcctccgtcaaactcccatggccgccatcaccatctcttcccgaaagctatttctcagttggttcagaagtttcgggtcaaggagatggagttatcttttactcaaggtcgatggnaccatgaacattggggaggatttgaccctctatcaagtatgaatgcgaancctgttggtgtggagctgtgggctgtgttt

SEQ ID NO: 14145 - DNA, 460 bp, Arabidopsis thaliana
  unsure at all n locations
  Clone ID: LIB25-001-Q1-E2-G2
gatagggctttaattttctctctgttttgtcataacatcactgactatatatccttcttaatcactttatattatctcgctatggctttcattgaatggtattttttttgtaaatttaanctttttgttttctcatcgttactacttatttgatttaaaaggtcttttgtgtgttctggtggtactattctgttcaaacttattacaatggatctatataaagttcgtttcaggaagctcttagataatcatgttatcatctttttttgttctagcttcccntaaaaangttgcaggtccctatgctaagttatgaataatgtagtttcanttaacctaaagccacagtcttaaaaagtgtcaagtaccaaattattgaacataatgngattccaggcaatacccngatgttttgtgaanantangggtaaggctaatancaaaccngttcctgtnnang

SEQ ID NO: 14146 - DNA, 465 bp, Arabidopsis thaliana
  unsure at all n locations
  Clone ID: LIB25-001-Q1-E2-G3
gaacaannttatattcantnanaaanaggaaanaatgaatttcatctccgatcaggtanagaaactctcaagctcaacaccagaggagccagaccacaacaagccagtcnaaggaaccganacagctacaagaccagctaccaacgccgagctcatggcaagtgccaangttgtagctgaagctgctcaagccgcagctcgtaacgaatcagacaaactcgacaagggtaaagtcgccggagcctctgctgatatcttagacgctgccgagaaatacggtaagttccgggaaantganaagagtancactggtcagtacctcgacaaggctgagaagtatctcaacgactacgagtcgtcacactccaccggtgctggtggtcctcctcctccgcngagtcaggctgaaccancangtcagcctgagccgnnngctaanaaagagatgaanagtctggtgggtgg

SEQ ID NO: 14147 - DNA, 455 bp, Arabidopsis thaliana
  unsure at all n locations
  Clone ID: LIB25-001-Q1-E2-G4
aaagcaaaaaaatctctgtaaaagcagaacgataatggagtcacaattatggaattggatcttacctcttttgatctcttctctcctcatctccttcgtcgctttctatggattcttcgtcaaaccgaagcggaacggtctccgtcacgatcggaaaactgtttctaccgtcacctccgacgtcggatctgttaatattaccggagatactgtcgctgatgtcattgttgttggagctggtgttgctggttctgctcttgcttatactcttggaaaggggaanttaaacgccgagttcatgtgattgaaagagatttatcggagcctgatcgtattgttggggagttgttacagcctgggggttacctcaagttactgggagttgggaattggagattgtgtgggaanaaatagatgctcngggtgtgtatggttatgcacttttaaaantggga

SEQ ID NO: 14148 - DNA, 451 bp, Arabidopsis thaliana
  unsure at all n locations
  Clone ID: LIB25-001-Q1-E2-G8
aaaccctaatattttcttgatttttttcaagaaaataaaaacataaagatgcttgaagttagatcaatggatatgactccaaaatcaccagaacccgaatccgaaactccgacccggatccaaccagctaaaccaatctctttcagtaacggaatcatcaaacgccaccaccaccaccaccacaacaacaacaaagtcacttacaaagaatgtctcaagaaccacgcggcggcgattggtggtcacgcgcttgacggttgcggcgaatnttttnaattgccgtctccttcgtcaacaccttccgatccaacttctctcaagtgtgcagcttgtggttgtcaccgtaacttccaccgccgtgaaactgacgattccngcggcgcgttgnaccaccgtggncttcttccatcttcanggggcaaccggcgcaattgagtatcaaccncaggca

SEQ ID NO: 14149 - DNA, 498 bp, Arabidopsis thaliana
  unsure at all n locations
  Clone ID: LIB25-001-Q1-E2-G9
nnnnngaactgttaccctgcccntaccgggccaaaattcccgggaacgacccacgcgtccgatggaaccgccggccaccgcatctaatcgctcttccagacggctactctttgaccgccgttacggctgggtgtaaattctctatctttatcagttaaattcattttccaatttaatggagacaaaatgattctgtgttggcttaacagggtcgacgaatggaaggacccatcggaggaagctctcgccggcggcagaggaatgttttgtgtagttcccttgacnaaaactctgtttcagacagcttcacaatcaatgaactcagctgtcaaatttctggatatgaagtttcagaaattggcaaatcctatgcacaatccaagtggagatttagggtcaaaatcaaatgtgttggattaacaagtacatgtgtttagtgttggattatacgtctaaatctcatctatgtactttgttcaaagtttttgcttgtgttca

SEQ ID NO: 14150 - DNA, 462 bp, Arabidopsis thaliana
  unsure at all n locations
  Clone ID: LIB25-001-Q1-E2-H2
gcaaaaaaccaaaaatcnaatctttggattcttacttctacgatttgtgtgtttcctcaaacccaaatgtctcgtctcccgattttaatcgcttcgtgtctcttcctctcttcactcaccgccgccgtcgtcaccgccgccgaatccgatactccgacggcttattcactcctccaaagctacaacttccccgtcggaatccttccaaaaggagtcgtagcttatgatttagacacaacaacaggcaaattccatgcgtatttcaacgattcatgtagcttccaaaaaaatcttgttggttcttaccaattgaattacaaatcaacaatcagtggttacatctccgagaacaagctcaagaaattgactggtgttaaagtcaaagttttgttcttgtggcttaacatngtcgaggttattagaangggtgacganatggagttttcccgttgggattaacat

SEQ ID NO: 14151 - DNA, 420 bp, Arabidopsis thaliana
  unsure at all n locations
  Clone ID: LIB25-001-Q1-E2-H6
gaaagatagagaaaaaaaatgggaggcaaaggtgtgatgatggtggcgatactttgcctttgggcactctctgcaacatctgaagcagtaacagaggctgagccaggtttgatgatgaacttctacaaggacacgtgtcctcaggccgaagacatcgtccgtgaacaagtcaaactcctctacaaacgccacaagaacaccgctttctcttggctccgtaacatcttccatgactgcgccggntttttgagtcatgtgatgcgtcgcttttgctggattcgacaagaagagagctaggagaagaaagaacacgacaggagcttcggacttanaaactttaggtacatcgagganatnaaggaagcnctcganaaggaattgtcngggtgttgtctcatgttctgacattccttgncttgt

SEQ ID NO: 14152 - DNA, 125 bp, Arabidopsis thaliana
  unsure at all n locations
  Clone ID: LIB25-001-Q1-E2-H8
ggttatnanatgcctgcanatattcttgctaaatggattgcatcataagtctcaggtttacacacaacatgcttacatgacaccccttggagtacttgccatggttctaggtattgatnaagaga

SEQ ID NO: 14153 - DNA, 499 bp, Arabidopsis thaliana
  unsure at all n locations
  Clone ID: LIB25-002-Q1-E1-A10
gnnnngnaagttnttctgcncgntcggtaccanacannaattcgcgggtcnacccacgcgnccgnngggttcttattattgaagtacatcaaagagttgcagatagagagaaacattcggtaacaaacatctgaactgttgttatgaaacgaggattctccgattctccttcaagctctgctcctcctccttcttccagattcaaatctaatcccgaaggtgattctcagtttctggaagatgagactacaaagaattttgcccggaaagttgctgatcattacagtaggagaacaaaccaaacattggaagagcgagaagctagtcccatcattcatttgaagaaacttaacaattggattaaaagtgttttgatccagctttatgctcgtcctgacgatgctgttctcgaccttgcctgtgggaagggtgggtgatttgatcaagtgggataaggcganaatcgggtactatgttgggaattgatattgctgaangg

SEQ ID NO: 14154 - DNA, 499 bp, Arabidopsis thaliana
  unsure at all n locations
  Clone ID: LIB25-002-Q1-E1-A12
ggggnntgnagttctttctgcncggtcggtaccanacanaaattcgcnggtcnacccacgcgtccgnncaggagcagggaagcatatccaagccggagcctcgaaagttatcatcactgcaccagccaaaggtgctgatatccctacctatgttatgggagtcaatgagcaagactatggtcacgatgtcgctaacattattagcaatgcatcttgcaccaccaactgtttggcaccttttgctaaagtcttggatgaagaatttggaattgtcaaggggacaatgacaaccacacactcctacaccggagaccaaaggcttctaagatgcatcacacagggacctaaggcgtgcaagagccgcagcactgaacatagtgcctaccagcacaggagcagccaaggcggtgtcattagtgttgccgcagctgaagggtaaacttaacggcattgcactccgtgtgccaacaccaaacgtctcagtggttgacttgttata

SEQ ID NO: 14155 - DNA, 499 bp, Arabidopsis thaliana
  unsure at all n locations
  Clone ID: LIB25-002-Q1-E1-A4
gnnnnngnaactctacttgnncgggccggtccannnattaacgggtcgacgcacgcgtccgatttttaaagtttcaatctttttaaaattattttttattttttggtaatcgtttctaagaaatctctcctcccgttgcctgtggactgcctgaatcaaaagacaatggcaacatgttcttcaagcttattggtgttaccaaatttgagattgagttctaaccaaagacgcaatttcaaggtaagagctcaaatctctggtgaaaacaagaaggcgacatcattggaaccagtgaacaacaacggttcggtctctttgtctactactgttcaaaaccaaaaaggggcaaatgaagtgaatgggaaagggaaatccaagagaaagatagtgagtgatgaaattgagttgttatgggatgatggggtatggctccaaatctgtttaaagatactttgcctgccggctaaagagattttgaaggctgatggtggtcctccac

SEQ ID NO: 14156 - DNA, 418 bp, Arabidopsis thaliana
  unsure at all n locations
  Clone ID: LIB25-002-Q1-E1-A6
gctttgtcacatgaaattcggactattcttcttcttcgccttctttgttgtcataatgacaatattcatctacttgatgttgcctgagacaaagaatgtgccaatcgaagagatgaacagagtgtggaaggcacattggttctggggaaagtttattcctgatgaagctgtcaatatgggtgctgctgagatgcaacagaagtccgtatgatgatgatcaagaatgaagttttctttgggcaataaagatttatgagaaaagagaaagtgaataattcttgggatgaaataaagaataatttgtcaaaaaatgccttacttcctaaaaagaaanctggctccgtccttaancttcaagagaacttaagcttcaattggtttccttcctttcttccnttttttaatggttcctntgttg

SEQ ID NO: 14157 - DNA, 436 bp, Arabidopsis thaliana
  unsure at all n locations
  Clone ID: LIB25-001-Q1-E2-F9
cttggctcaataactattaatgttgaacgtgaaggccaaacgggtccagtgtggcactcattagacagcccgtctgggcaggtttgccttaacattaatgcaatcaaactacccgtgaatgctcctagggctgtaactggatatgctggagccggtanaagaagggtcacattggatcagcaaggcccaacaattgtacatcaaaagccagggcctctgcagacgatatttgatctcctcccggatgaggttgtcgagcacagttattcatgtgccctggagaggtcattcctgtatcatggccgaatgtatgtttccgcgtggcacatatgtttccactccaatgttttctctaagcaaatgaaggttgttgtccctctcggagatatagatgagattcgtagaaatcaacacgcgttgataaacccagctatag

SEQ ID NO: 14158 - DNA, 426 bp, Arabidopsis thaliana
  unsure at all n locations
  Clone ID: LIB25-051-Q1-E1-A7
ncagaaacacacagagaaattaagaaccctaatttaaaacagaagaatggtacattcgaagaagttccgaggtgtccgccagcgtcagtggggttcttgggtttctgagattcgtcatcctctcttgaagagaagagtgtggctaggaacattcgacacggcggaaacagcggctagagcctacgaccaagccgcggttctaatgaacggccagagcgcgaagactaacttccccgtcatcaaatcgaacggttcaaattccttggagattaactctgcgttaaggtctcccaaatcattatcgggaactattgaacgctaantaaggaagaactgtaaagaccagacaccgtatctgacgtgtctccgcctcnacaacgacagctcacaacatcggcgtctggcagaaacncgccgggtcaaaaa

SEQ ID NO: 14159 - DNA, 463 bp, Arabidopsis thaliana
  unsure at all n locations
  Clone ID: LIB25-009-Q1-E1-E3
cgggtcganccacgcgtccgatgaaaagggttctgatctaacaagtttgagcgcacctgctattagcaatggtggccgggatgctgcatctctaaaaactacaaattttggttcgtccgcgctggatttggttaaaaagaaactacatgattctggaatgcctgtctcatctacgataacatctgaagcaaatagtggtaaaacaactgaggtcacacccagtggagaaagtggaaatagtacgggtaaggtgaaagatgctcctggagctggggccctttccgattcttcttcagattcggaagatgaagatagtggaccatcgaaggaagagtgttctaaacagtttaaggaaatgctgaaagagagaggaatagcaccgttttctaaatgggagaaggaattgccaaaaattatctttgacccccgccttaaagnaatancaagtcaatcccggtnaaaa

SEQ ID NO: 14160 - DNA, 445 bp, Arabidopsis thaliana
  unsure at all n locations
  Clone ID: LIB25-014-Q1-E1-A11
caaacgtcnaaggaaaagttgatgangatggctaacactgtccgcactggcggaaaggggacagtaagaanaaagaagaaggctgttcacaagaccactacaaccgatgacangaggctccagagcactcttaanagagttggagtcaattccattcccgccattgaagaagttaacatttttaaggatgatgtagtcattcagttcattaaccctaaagttcaagcttcaattgctgctaacacatgggttgtgagtggtacaccacagacgaaaaaattgcaagacattcttcctcagattatcagccaacttggaccagataacttggacaacctgaagaagctagcanagcaattccagaaacaagctccaggtgcaggtgatgtccaacaacaatccaagaagaggacatatgatgaagtccaaatnttgtagtgggaga

SEQ ID NO: 14161 - DNA, 447 bp, Arabidopsis thaliana
  unsure at all n locations
  Clone ID: LIB25-015-Q1-E1-A4
gggggacacttttgtttttataacttacgcttaaaatcctatgaattcgccgccggttgacgcaatgattaccggagaatcatcgtcacaaagatctatcccaacgccgtttctcacanggaacgtttaacctcgttgaagatagttccatcgacgatgttatctcatggaacgaagatggttcctctttcatcgtatggaatccgacagatttcgctaaagatttgcttcctaaacacttcaaacacaacaatttctctagtttcgttcgtcagctcaacacttacggattcaaaaaagttgtaccggatcgatgggagttttcaaacgatttctttaagagaggagaaaaacgtcctctccgtgagattcaacgtcggaaaataacaacgacgcatcaaacaattgttgcccctcgtcgggacaacgaaaccaagacgaagggtt

SEQ ID NO: 14162 - DNA, 855 bp, Arabidopsis thaliana
  unsure at all n locations
  Clone ID: LIB25-016-Q1-E1-A4
tagccgtccacnattccagggnccacccacgcgtccgancttcttcttctacttcgtcctcatcatcgtcacatagatcctcctttttcgttaattggggagagatatactttcttttgaggatcagatcgtgacagggtttagctcaaggagagggtgagaaaaagaagaagaaggtgagaaaagtgaaggcaaggctttgaggatgtcttttacaggaactcaacagaaatgcaaggcttgtgagaagactgtttatgctgttgagcttctctctgctgatggagttggatatcacaagtcttgcttcaaatgcactcactgcaaaagcaggcttcagctgagtagttactcatcaatggaaggtgttttttactgtaagcctcattttgagcagctctttaaggagagtggtagtttcaacaagaactttcagtcacctgcaaaatcggctgacaaatcaactcctgagctgacaaaggacgcctaaccgagttgctgggcaaggttccctggtacacaaagagaaaatgccccaactttgttagtaaaaactggtgttancctaattgaaaanggtaacaantcnaagaacccagacatttcacaagtcccngcttcaaattgctcaaaatggaaggnttgcccaaatttcaccnttccaaantaacgcaagctccntnaaagggaatcccggttacngcaaagcaancaattttcgcncaaaccccttcaangggnaaangggaaattttnaacccacnttaanccaaatcccgctttcaaanaaaaanccttttgaaanccgnaaaaaaattncccccccgggtnttccaaaaaaaccccccgnttccc

SEQ ID NO: 14163 - DNA, 434 bp, Arabidopsis thaliana
  unsure at all n locations
  Clone ID: LIB25-032-Q1-E1-H10
gcggaacgcgtgggcggacgcgtggggaaaaacaaaatggcttcgatgggtggattacacggtgcatctccggcggttcttgaaggaagcttaaagatcaatggctccagccgtctgaatggctctggaagagtggcggtggctcaaaggtctagacttgtcgtcagagctcagcagagtgaggagacttctcgccggtccgtgattgggcttgttgctgctggtttagctggtggctcgtttgttcaggctgtcctcgccgatgctatttcgatnaaagttggcctcctccagctccttccggtggncttcctgggacaagataactcagaacaatncaagaaaactttgcatttggcattggaaangacanggtttaacttacaagccatttgccaaccaancaanaaagcctgcaagcctaataagcccaa

SEQ ID NO: 14164 - DNA, 206 bp, Arabidopsis thaliana
  Clone ID: LIB25-033-Q1-E1-B8
gcttctatatgcaatagagaactatctatatctataaatctatatcgactgaggaagatacaaagcaattgttctctctctctagtagagccttttgtttctttttcaaatcttttttgaagtcctttgcttaagattcttgtaatggcgttaaaaaacttgaagaaaggaatattattattgttaaaaaaaaaaaaaaaagggcg

SEQ ID NO: 14165 - DNA, 466 bp, Arabidopsis thaliana
  unsure at all n locations
  Clone ID: LIB25-050-Q1-E1-H1
cgcggacgcgtgggatctgtagcgacggcgaaatcttcgacggcggtgatgagctccattccgccttttctgagcaaaacgtacgatatggttgacgatccattgacggacgacgtggtgtcttggagcagcggaaacaacagcttcgtggtttggaacgtgcctgagttcgccaaacagtttctaccaaagtatttcaagcacaacaatttctccagcttcgtcagacagctcaatacttatggttttagaaaagttgatccagaccgctgggagtttgcaaacgagggctttttaagaggccaaaagcanatactaaagagtattgtccggcganaacctgcacaagtgcaacctccaaaacaanctcaagntcaagcaactcaacctgtgggttgcgttgcgttggangtgggcaaanttggactccaaanaaggaantggaaaagagcttcagcgcgnataa

SEQ ID NO: 14166 - DNA, 439 bp, Arabidopsis thaliana
  unsure at all n locations
  Clone ID: LIB25-001-Q1-E1-A10
ttctttggacacggatggctcaagccttggctcaaccaccactggtggtcaccaccgtcgtcccagacccgccgccgccgccaccaccaccgcacccaaagccgtatgctctacgatacatggcggatcttcttggccggattggtataatggatacagacaaagatggtaacatcagcccacagagtccgaggagtcctaggagcccaagaaacaacattctcatggggaagtacgagcttgggaagcttctcggccacggaacctttgcaaaggtttatttagctcaaaacatcaaatctggagataaagtcgccattaaagtcatcgacaaggagaagattatgaagagtggtttggttgctcacatcaaacgggaaatctctatcctccgccgtgtccgtcanccttacatcgttcatctantcnagggtanngg

SEQ ID NO: 14167 - DNA, 502 bp, Arabidopsis thaliana
  unsure at all n locations
  Clone ID: LIB25-001-Q1-E1-A9
nnnnnnngnaacttctagccgcccggcccnnnnnaaacaaaaattcgccggtcgacccacgcntccgattcaaactggccggcacatgatttgcatcagggcattggaatggattgggattcgatcaacgatttgagggttgacatgggtagaatacagcaaaggatggataacctgcagaggatgctagaggcttgcatggaaatgcaactcgagttacaacggtccataagacaagaggtctctgctgcgatgcaccgctctactgaccaaccaggtccatccaaggacactgcgagttacgagtcaaaatgggaatatgtaaggaaagggatctgctgcgtatgctgcgagagcaatattgactctttattgtatagatgtggacatatgaacacctgcgagaagtgtgcaaagaagctagtggaagcgggaggaaaatgtcccatgtgtcaagcccctgtgattgaagtaattcntgcctaaaccaatcctttgaanc

SEQ ID NO: 14168 - DNA, 507 bp, Arabidopsis thaliana
  unsure at all n locations
  Clone ID: LIB25-001-Q1-E1-B10
ggngngnngnatcttcnagccgntcggtaccgnnacagnaattcgcgggtccgacccacgcgnccantgggttttagcttagggaagcttctagatctctccgatgatcccttgtggacaactggatggatttatgttagggtgcagaaccaacttgcatttgtatataacggtcaggttgtcgttgacacttcattgtctctaaaaagtcgtgattatagtcacatcattagcgttaaaccgcttgctatagctgcaacggagaaggctcaatttacagttaaaggcatgaatctccgtcagcgtggcacaaggttactttgttctgttgaaggaaaatacttgattcaggaaacaacacacgattcgacgaccagggaggatgacgatttcaaggacaacagtgagattgttgagtgtgtaaacttctcttgtgatatgcctatattgantggtccaaggattcatggngattgaanaccaaaggactcaattncaacttcttcc

SEQ ID NO: 14169 - DNA, 212 bp, Arabidopsis thaliana
  unsure at all n locations
  Clone ID: LIB25-001-Q1-E1-B11
tgttactttaggagtaacatttctcagactcggaactgaagacaaatggtatatttgatacatatatgtttattgtagcaaaaaaaaaaaaaaaaaaaaaaaaaaaaaaaaaaaaaaaaaaaaaaaaaaaaaaaaaaaaaaaaaaaaaaaaaaaaaaaaaaaaaaaaaaaaaangggcggccgcccnaaaggntcnaancttacttacncgt

SEQ ID NO: 14170 - DNA, 280 bp, Arabidopsis thaliana
  unsure at all n locations
  Clone ID: LIB25-001-Q1-E1-C11
gccgttcaagaagcgatgttcttggatctggtactggaacttatggacatggaagtataatgcgaggaggtggtatatctccggccaaacctaccaacaccggaggaggatccanctcgccggtaaatgtcggtagctctantataagtantagtactgttgctacgggagagactcctatatggaaaanagcgattttaggttcggattcanangaagtgaacagagtagggaatgaantgtatacgaaaggtttgtttaatgangctttgaanttgta

SEQ ID NO: 14171 - DNA, 432 bp, Arabidopsis thaliana
  unsure at all n locations
  Clone ID: LIB25-001-Q1-E1-D11
ataggctcggaggctaattgcgctgtttgcacggagattttcgagacggagacggaggcgcgtgagatgccgtgtaaacaccttttccacgacgattgcatcgtaccgtggctatcgattcgaaactcttgtcccgtgtgcagattcgagctaccttcagagcctaatcgacggngcaacaacaacgaggaggataacgccgtggggatgacgatttggagacttcccggtggtggattcgccgtagggaggtttaacgcagcaatgagagacggagagagagttttgccagtggtgttaacagaaatggatggtggtgggattggtaatagccaggatggtcctagacggatctcatgggttangtcacacggtacactcgaatcggatagtaacggtactggctcaagttccggntcccgngngaaaatt

SEQ ID NO: 14172 - DNA, 448 bp, Arabidopsis thaliana
  unsure at all n locations
  Clone ID: LIB25-022-Q1-E1-H10
cacgcgtccgcnaacgcgtccgattttttgaaacttcttctcttttgcggtttcgtgttccactcctctcttcttggcccacgtgttcatcaatctctccctccgcatgtaatcgcttcgccgtcaatatcacatctttcttcttctttatctttaaaatctctttagatcgattcttttgtggattcttgaaatctccggagaaaaccactatggagacggcgactgaagtggccacggtggtgtcaactccggcggttacggttgcggcggtggcgacgaggaagagagataagccgtataaagggataaggatgaggaagtgggggaagtgggtggcggagataagagagcctaataaaaggtcaaggatttggcttggctcttactctactcctgaagcggcggcgcgtgcttacgacacggcggtgttttatctcccanggtc

SEQ ID NO: 14173 - DNA, 429 bp, Arabidopsis thaliana
  unsure at all n locations
  Clone ID: LIB25-008-Q1-E1-B10
ccggtttcttaccaattcgccattctacaacagacanacaacataagcccaagaccaacaactaccggctttctctattccggcgccgganactactcccagatgtttgacgcantagaagacnacggaagtctagaggacctcggcggcgttggacacgcgtcttctanggcggcggagaaaaaacggcggttgggtgtagagcaagtgaaagcgttagagaagaatttcgagattgataacaagttagagccagagaggaaagtgaagctggctcaagagcttgggttgcagccacgccaagtcgcgatctggtttcananccgccgtgctcggtggaagacaaagcagcttgaacgtgattacggcgttcttaagtcaaactttgatgcactcanacgcanccgcgactcgcttnaacgcgagaac

SEQ ID NO: 14174 - DNA, 393 bp, Arabidopsis thaliana
  unsure at all n locations
  Clone ID: LIB25-026-Q1-E1-G5
gtgattgtgttgttaaagattcggcaaactacttggatcacataaatgggaaaaaacatcaaagggcattggggatgtctatgcgggtggagagatcgtcacttgaacaagtccaagagcggttcgaggttttaaagaagcggaaagcgccaggaactttcacagaacaaggtaagacttctgagaggaaccatctcttagttatgtantttgatgtatcttcagaaataagaaactattctctggaaaaaaagctagancanatctaagtaggttggaaaataacattgangttgcgacttagtcntcatctaatgcatgggtanatttgggataactgnattttggtcctgatctgggaacagatctggaataacgcatccgaanacagca

SEQ ID NO: 14175 - DNA, 439 bp, Arabidopsis thaliana
  unsure at all n locations
  Clone ID: LIB25-027-Q1-E1-B6
gcccacgcgtccgcccacgcgtccgctgagcagcacaagtctgcgagatttggattagatctgattcaggttggattgatcatcgttcggagctccgggaaacatggcggcgacgagacaattnggaactctccaatctcagcctgaaaacaaggtatgtgtcgattgcgctcagaagaatcctcaatgggcgtcggtttcgtacggaatcttcatgtgtttggaatgctccgggaaacaccgaggcttaggcgttcacatatccttcgtcagatccgtaaccatggattcatggtctgcgatccagattaagaaaatggaagctggtggtaacgaacggntcaacaaattcttcgcgcaatacggaatcgctaaggagacagatattatctccaaagtacaattcgaacgctgcntctgtgtatcctgaccgggtnca

SEQ ID NO: 14176 - DNA, 477 bp, Arabidopsis thaliana
  unsure at all n locations
  Clone ID: LIB25-041-Q1-E1-G10
gtccggancatcgaaaggtcgacccacgcgtccgatcaattctctctatctctttctaaaacacaaccatgactgtttcttcatctccatgggctctcatggctctctttctaatggtttcttcaacaatggtaatggctattcctccacgcaaggccattgatgtaccatttggtcgtaactacgtcccaacttgggcttttgaccaccagaaacagttcaatggcggttccgaacttcagcttatcctcgacaaatacactggcacaggatttcaatcaaaggggtcatatttgtttggacattttagtatgcacataaagcttccagctggtgacacagccggagttgtcacagctttctatctatcatctancaacaatgagcatgacgagatagacttgagttccttggaaacagaacaggacaaccagctatattacaagacaaatgtattcacaagaaggaaanggaaac

SEQ ID NO: 14177 - DNA, 450 bp, Arabidopsis thaliana
  Clone ID: LIB25-047-Q1-E1-C1
gccttaatataaaaccaaacatcaatctctcgccgttaaggttacatctgtcgccgccgctgagaccgccacttaaggccgtctcctccgctctatccatatccaaaacagctataaagataaacttccagagcttggtgaaggagcagcaaccctagttttcaatccctaaagatattagttctccagcgagttgacacaaaacccgattacgtttcatccggcgactcgctttgatattccatggattctcagttgaatccttccaagagacgcaagataagtgtcaggcacagatgcgttgcgtgctataagatgttcaatagacgagaacacctcgttgagcacatgaagatttcctaccactcacttcagcagcctcgctgtggggtttgcctcaagcactgtaaatccctccgaatccgtgagggaacacttaacgttcagacc

SEQ ID NO: 14178 - DNA, 463 bp, Arabidopsis thaliana
  unsure at all n locations
  Clone ID: LIB25-049-Q1-E1-E1
ggcagcacaagtctgcgagatttggattagatctgattcaggttggattgatcatcgttcggagctccgggaaacatggcggcgacgagacaattacgaactctccaatctcagcctgaaaacaaggtatgtgtcgattgcgctcagaagaatcctcaatgggcgtcggtttcgtacggaatcttcatgtgtttggaatgctccgggaaacaccgaggcttaggcgttcacatatccttcgtcagatccgtaaccatggattcatggtctgcgatccagattaagaaaatggaagctggtggtaacgaacggctcaacaaattcttcgcgcaatacggaatcgctaaggagacagatattatctccaagtacaattcgaacgctgcttctgtgtatcgtgaccggattcaagctttanctgaangtagaccatggaatgattcgccagttgttaaggaagcga

SEQ ID NO: 14179 - DNA, 507 bp, Arabidopsis thaliana
  unsure at all n locations
  Clone ID: LIB25-052-Q1-E1-D1
aactggtttgccttgcctaggctccggaaatcccgngtcgacccacgcgtccggaagagctggatgctgccagtttgcgtgaacacgaggagttcacgaaagtgaagaacatagctacgattgagcttgggaagtatgagattgagacgtggtacttctctccttttcctccagaatacaatgactgcgtgaagctctttttctgtgagttttgcctcagttttatgaagcgcaaagagcagcttcaaagacatatgaggaaatgcgatttgaagcacccccctggggatgaaatctatcgaagctctactttgtcaatgtttgaggtggatggcaagaagaataaggtctatgcacagaacctctgttatctggcaaaagttatttcttgaccacaaaactctttactaagacgttgattgttcctggttccataatccnctgtgaatggtgatgatngttggatgccacatngtttggatacntttcaaaaggganaaacactca

SEQ ID NO: 14180 - DNA, 450 bp, Arabidopsis thaliana
  Clone ID: LIB25-041-Q1-E1-C8
ggagacagtagtaagaaagaagaagaagaaaaatggaagatacgaagaagaaaaagaagaagaatattaacaacaaccaagattccaagaaaaaagagcgtcatattgttacttggtcacaagaggaagatgttatactaagagaacaaataactctacatggaactgaaaattgggcgatcattgcatcaaagttcaaagacaaaagcacaagacaatgcagaagaagatggtatacatacttaaactctgatttcaaaagaggaggttggtcccctgaagaagatatgcttttgtgtgaggcacaaagagtatttggtaatagatggactgagatagcaaaggtggtttcaggcagaactgataatgctgtgaagaacaggtttacaacactttgtaagaagagagccaagcatgaagctatgactaaagacagcaactcaaacacca

SEQ ID NO: 14181 - DNA, 448 bp, Arabidopsis thaliana
  Clone ID: LIB25-042-Q1-E1-B10
ctgaatcaagagattaaacaaaaattgaacggacttgctttgacacagcagaccgtaaatcgggatgggtgctcctaagcagaaatggactcaagaagaagagtcagctttaaagtctggagttataaagcatggacctggtaaatggcgcacaattctcaaagatcctgaatttagcggagtcttgtacctgcgttccaatgttgatcttaaggacaaatggagaaacatgagtgtcatggcaaatggctggggatcgcgcgaaaagtctaggttagctgttaaaaggacgttctcccttcctaaacaggaagagaactcactagccctaaccaattctttgcaaagtgatgaagaaaatgtggatgcgacctctggactccaagtttcttctaatcctcctccaaggagacctaatgtaaggttggtagccttatatggaagcaat

SEQ ID NO: 14182 - DNA, 495 bp, Arabidopsis thaliana
  unsure at all n locations
  Clone ID: LIB25-003-Q1-E1-D11
ttaccgggccaaaattcccgggancacccacgcgtccgctcatcacaacccttcaaaaagagaaaagatctaaagaataaacaagagccctaatatcaaatcacaaccaaaaaaaccaaagaaagctaattaaagttttctctctagctattcctcttcttttcttgttcttgaaaactagggtttacttcaccaaaagataagatctttccccagaaaaagcaatacccaagtcatgtttctgtgtgtctgtatatagataaaacattacataccctaataaggttacacaaatagctataaaagagggaaaataagatagggattttttggggtgaggaaagatgggaagaggaagagtagagctcaagaggatagagaacaaaatcaacagacaagtgacgtttgctaaacgtagaaatggtttgctgaaaaaagcttatgagctttctgttctctgcgatgctgaagtctctctcatcgtcctctccaaac

SEQ ID NO: 14183 - DNA, 474 bp, Arabidopsis thaliana
  unsure at all n locations
  Clone ID: LIB25-018-Q1-E1-C11
cccggtccgacaaaccgggtngncccacgcgtccgataaaaaagagtctttgagtttgttggttgcattgatcggatataagagacatgggtcgagtgaaattggagataaaacgaatagaaaacacaacgaatcgacaagttacattctccaaaagangaaatggtcttataaagaaagcttatgaattgtccattctttgtgacatcgacattgctctcctcatgttctctccctctgatcgccttagcctcttttcgggcaaaacaaggattgaagacgttttctctagatacatcaatctttctgatcaagaacgagagaatgctctagtattccccgatcaaagtcgacgcccagatttccagagcaaagagtatctactccggactttgcagcaactcaaggctgagaatgatattgctcttcaacttancaaccctacagctatcaactccgacgtcgaggaacttg

SEQ ID NO: 14184 - DNA, 466 bp, Arabidopsis thaliana
  unsure at all n locations
  Clone ID: LIB25-022-Q1-E1-G4
cggagagaaagatgggtagaggaaagatcgagataaagaggatagagaacgcaaacaacagagtggtgacgttctcaaagaggaggaatggattggtgaagaaggctaaagagatcacagttctttgtgatgcaaaagttgccctcataatctttgcaagtaatggtaagatgattgattactgttgtccttccatggatcttggtgctatgttggaccaataccagaagttatctggcaagaaactatgggatgctaagcatgagaaccttagcaatgagattgataggatcaagaaagagaatgatagcttacaactggagctcangcatttgaagggagaagatatacagtctctcaactttgaaaaatctgatggctgtccagcacgccaattgaacatggcctcgacaaagtcccgagaccaccagattggagattccttatatcaaagaggagaaattga

SEQ ID NO: 14185 - DNA, 452 bp, Arabidopsis thaliana
  unsure at all n locations
  Clone ID: LIB25-033-Q1-E1-F9
gcccacgcgtccgaaaatgtcatctcttcactggtttcccaatatcttcatcgttgtcgtcgtcttcttctccttgagaagttcacaagttgtactagaagaagaagaatccacagtcgttggatacggctacgtcgttagatcagtgggcgttgattctaaccggcaagttttgacggcgaagcttgatctgataaaaccatcgtccgtttacgcaccagatattaaatcgcttaatcttcatgtcagcttggagacaantgagcgtttgagaatcagaatcacagactctagtcaacaaagatgggagataccggaaaccgttattccccgtgccggaaaccaactcccctcgccgtttctcaagggggggaaaacgggggaaactccccggganaaaaatttcttancaaattccccaacggacttgggtttcacccccaaaaaaaaag

SEQ ID NO: 14186 - DNA, 451 bp, Arabidopsis thaliana
  Clone ID: LIB25-036-Q1-E1-C3
ttcgaattctacactctttctccgtcgtttacctctactacacctacgttttctcatgaagtaatcgttctcgatctcagttttcgtttttgatctaacttattctttgatagatttagaaatcggggattttcagattgtgtttttgagaggtttttataggaaaatatctctagaagaagaagaataatattatattgattttaattttggtgagaagaagtcaaaaagtcaacgagaaatggggtcgttgcaaatgcaaacaagtcctgaatccgataatgatccgaggtacgccacggtgacggatgagaggaagaggaagagaatgatctctaacagagaatctgctcggaggtcaaggatgaggaaacagaagcaacttggtgatttgatcaacgaagtcactcttctcaagaatgataacgctaaaatcactgagcaagttgat

SEQ ID NO: 14187 - DNA, 360 bp, Arabidopsis thaliana
  Clone ID: LIB25-104-Q1-E1-B12
gaagaatatggcgagagggaagatccagatcaagaggatagagaaccagacaaacagacaagtgacgtattcaaagagaagaaatggtttattcaagaaagcacatgagctcacggttttgtgtgatgctagggtttcgattatcatgttctctagctccaacaagcttcatgagtatatcagccctaacaccacaacgaaggagatcgtagatctgtaccaaactatttctgatgtcgatgtttgggccactcaatatgagcgaatgcaagaaaccaagaggaaactgttggagacaaatagaaatctccggactcagatcaagcagaggctaggtgagtgtttggacgagcttgacat

SEQ ID NO: 14188 - DNA, 420 bp, Arabidopsis thaliana
  Clone ID: LIB25-074-Q1-E1-F8
cggacgcgtgggcaacacatcaataacgcctggtggtcgaaaaagcatgctgaagttagctcaacgcatgacgttcaacttctgttcgggaatctcggcgccgtcggtccacaattggagcaagctcactgttggaaatgttgacccggacgttcgagttatgacccgtaagagtgtggacgatccaggagagcctccggggattgttttgagtgctgccacttctgtttggctacctgctgcaccacagcgtctgtatgatttcttgcggaacgaacggatgagatgcgaatgggatattctatccaacggtggtcccatgcaggagatggcccatatcaccaaaggtcaagatcacggtgtctctctgctccgctccaatgcaatgaacgcgaatcagagtagtatgctaattcttca

SEQ ID NO: 14189 - DNA, 366 bp, Arabidopsis thaliana
  Clone ID: LIB25-100-Q1-E1-G12
acgcgtccgtggagaactcgttaactgcaaaagagaagattatttcggagcttaatatggagattcacaatgttgagacagctttagctaatgagcgagaaagtcatgttgccgagataaagaaattgaattctttgctcaataaaaaggatactatcattgaagagatgaagaaagagcttcaagaaagaccatcagcaaaattagttgatgatttgcgcaaaaaagtgaaaattctgcaggctgtaggttacaattcaattgaggctgaagactgggatgctgctaccactggtgaagagatgagcaaaatggagtcgcttcttcttgataaaaacagaaaaatggaacatgaggtcactcagt

SEQ ID NO: 14190 - DNA, 432 bp, Arabidopsis thaliana
  Clone ID: LIB25-088-Q1-E1-C12
cacacgcgtccgcccacgcgtccgcccacgcgtccgcaaagagagaagaatatggcgagagggaagatccagatcaagaggatagagaaccagacaaacagacaagtgacgtattcaaagagaagaaatggtttattcaagaaagcacatgagctcacggttttgtgtgatgctagggtttcgattatcatgttctctagctccaacaagcttcatgagtatatcagccctaacaccacaacgaaggagatcgtagatctgtaccaaactatttctgatgtcgatgtttgggccactcaatatgagcgaatgcaagaaaccaagaggaaactgttggagacaaatagaaatctccggactcagatcaagcagaggctaggtgagtgtttggacgagcttgacattcaggagctgcgtcgtcttgaggatgaa

SEQ ID NO: 14191 - DNA, 403 bp, Arabidopsis thaliana
  Clone ID: LIB25-098-Q1-E1-F9
actctatctcactctttgcttctgcaactcacagtcaatggcggctgaaatggcgttagtgaaacccatctccaagttctcttccccaaagctctcaaacccgagcaaattcctctccggccgacgtttctccaccgtgatcagaatgtcagcctcttcctcaccgcctcctccaaccaccgccacctcgaagtccaagaagggaacgaagaaagagattcaagagtcgcttcttactccgaggttctacacgacggacttcgaggaaatggaacagcttttcaacacggagatcaacaagaaccttaacgaagcagagttcgaggctctgcttcaagagttcaagaccgattacaaccagacacatttcgtgaggaacaaggagtttaaagaagctgcagac

SEQ ID NO: 14192 - DNA, 349 bp, Arabidopsis thaliana
  Clone ID: LIB25-024-Q1-E1-B1
ggatcgccccacgcgtccgctgacggtgctggatgttgagaaccctgagttcaagaggaaactggatagaatggttgtgagctatgagaagctgctggctataggagaaacagatgatgcttccttcatcaagaccctcaagaggattcctttggttacttctttagcctctgagatcttggctgcttatctcatgcctcctgttgagtctggctctgttgatttcgccgagtttgagcctaatcttgtctattagtagctgcaatgtcaagtcttgagtttacggctggttcttgatttcttgtaattgaatgatcgaaactgagaaacatcgtctttttttttttgc

SEQ ID NO: 14193 - DNA, 419 bp, Arabidopsis thaliana
  Clone ID: LIB25-025-Q1-E1-A12
tgaaatggacaatggtgatgctacaattcaatctagaagagaagtctttgcattacagggacgaacctttatctcacatcttcgtcatgaacaatgtccattacatagttcagaaggtcaaaagctctccggagctaatggagttgataggagacaagtatttaaggaagcttaccgggatatttagacaagcagctaccaagtatcagagagctacatgggtcagggtgttgaatagcttgagagatgaaggattacatgtgagcggaagcttctcttccggtgtatcgaagagtgctttaagagagaggtttaaagctttcaatacaatgtttgaagaggttcacaggattcaatcgacatggtcggttccggatactcagcttagagaagaactcaggatatctctatcggagcat

SEQ ID NO: 14194 - DNA, 429 bp, Arabidopsis thaliana
  unsure at all n locations
  Clone ID: LIB25-013-Q1-E1-H7
aaaagatggaaaaagttttctccgacgaagaaatctccggtaaccatcactggtcggttaatggaatgacgtcgttgaatcgcagtgcttccgaatgggcattcaatcgtttcatacaagaatcctccgccgctgcagacgacggagaatctacgacggcgtgtggtgtttccgtctcctctcctcctaatgttcctgtagattcagaggaatacagagcatttctcaagagtaaacttaatcttgcttgtgctgctgtcgccatgaaaagggtactcactactctgctcangtttgaatttttttttttttcatagaacaagaaaaacaaaaactttttatctgttagtttgatgagttcacttgaagctaagaaactaatcttgttttgttatgtttgagtgttaagatcntattggaccttttgta

SEQ ID NO: 14195 - DNA, 383 bp, Arabidopsis thaliana
  Clone ID: LIB25-040-Q1-E1-F10
gctatatgacctttttagttagtgactcgagattacataaaatcttctatacactggatccacatctgtttcaatcatggcggagaatggtgaagagaagttacttgctgttgcgcgtcacatatccaatacacttgggcacaatgaatccatggtcgatgatatcttacatatcatctgcaacttcgacggcagattttctcgctagaagctcgccaaaggtcaagctggtgaatatggatccggagtcgccacactcgagcaagctcgaaattcaatatacggtcagatgactcgctttgttgctgcggactaatcaatttgggctgatcctgcagattcagctgctttcctcgatacagtcgatgagctcgttgcaatca

SEQ ID NO: 14196 - DNA, 410 bp, Arabidopsis thaliana
  Clone ID: LIB25-040-Q1-E1-E1
cggacacgtgggctcgaaacacaggttaatgatctaaaaggtgagcattcatcacttcttaaacaactgagcaacatgaatcacaagtatgacgaggctgctgttggcaatagaatactaaaggctgacattgagacattaagagctaaggtgaaaatggcggaagaaaccgtgaagagagtaacaggaatgaatccgatgcttctcggaagatcaagtggacataacaacaacaacagaatgccaataactggtaacaacaggatggattcttctagcattattccagcttatcaaccacactcaaacctaaaccatatgtcaaaccaaaacatcgggatcccaaccattctacctccaagactcggaaacaatttcgctgctcctccatccaaaacagctctccttgc

SEQ ID NO: 14197 - DNA, 397 bp, Arabidopsis thaliana
  Clone ID: LIB25-074-Q1-E1-H2
atcaatcactctctcttctttagcgtttttattttgtcttcctcgttttcttctacctttttatattttctctcttttcagttttctctagaaaaaaacactagtaatcagtttgcgtttgataaatatttgatgtggcaaaactcttgtggatcttgatgttcaaacattcatgtctccggtgattagtgaaatccttagatctggtttaactatagactcgtctcttagacgcaggacccatcttgttcaatctttctccgtcgtctttctctactggttctatgttttctcataaatcagctctcctttagcgctttattattagatattctataaccataataatatattaaaactatatactataatctttttacataataaactttgggtc

SEQ ID NO: 14198 - DNA, 432 bp, Arabidopsis thaliana
  unsure at all n locations
  Clone ID: LIB25-040-Q1-E1-D6
cccacgcgtccggctgagtgtgttggaagggagatagaggatgtttacagaggaagcgacaagggtatcttgagcgatgtagagcttctcaaagagatcactgatgcctcacgtggcgctgtttccgcctttgtggaaaaaacaacaaatagcaaaggacaggtggtggatgtgtctgacaagcttacctcgcttcttgggtttggaatcaatgagccatgggttgagtatttgtccaacaccaagttctacagggcgaacagagataagctcagaacagtgtttggtttccttggagagtgcctgaagttggtggtcatggacaacgaactagggagtctaatgcaagctttggaaggcaagtacgtcgagcctggccccggaggtgattccatcagaaacccaaaggtctntacaaccggtaaaaacatc

SEQ ID NO: 14199 - DNA, 210 bp, Arabidopsis thaliana
  Clone ID: LIB25-086-Q1-E1-D5
ctctcattaaaaacgtgtttttttttaccggtcaccggtttatggaatgactgattaccggctacaaccaacgatgaatctttggaccaccgacgacaacgcttctatgatggaagctttcatgagctcttccgatatctcaactttatggcctccggcgtcgacgacaaccacgacggcgacgactgaaacaactccgacgccggcgat

SEQ ID NO: 14200 - DNA, 202 bp, Arabidopsis thaliana
  Clone ID: LIB25-097-Q1-E1-H11
aacgtttacacgctttgattgaaggaacacacgaaggttggacctacgctatattctggcaaccgtcgtatgatttctccggcgcctccgtgctcggatggggagatggttattacaaaggtgaagaagataaagcaaacccgagacggagatcgagttcgccgccgttttctactccggcggatcaggagtacaggaaaaa

SEQ ID NO: 14201 - DNA, 407 bp, Arabidopsis thaliana
  Clone ID: LIB25-058-P1-E1-A2
cccgaatctggatccgactccgagtccggttcattctcagacccagaatccgaaattcaataacactttctcccgagaacttaatttttcgacgtcaagttctactttagtgaaaccaagatccggcgagatattaaacttcggcgatgaaggtaaacgaagctccggaaacccggatccaagttcttattcgggtcaaacacaattcgaaaacaaaagaaagaggtcgatggttttgaacgaagataaagttctatcattcggagataaaaccgccggagaatcagatcactccgatctagaagcttccgtcgtgaaagaagtagcagtagagaaacgtccaaagaaacgaggaagaaagccagcaaaccgtagagaagagccactaaaccacgtcgaagcagaga

SEQ ID NO: 14202 - DNA, 438 bp, Arabidopsis thaliana
  Clone ID: LIB25-019-Q1-E1-G7
agggaaaacgctcatcaacctcaacaatctctctcctctctctctctgtatatagaagaatctccattgtctttaatttctctccatttctctttctctcttccttcaaagttttctcttttcttgatgggtttaagagagtaaagatcatcaagtactatgcattaaattgagaagttattaaaaatttcgaaagtaattaaagattgttgatgatgaagagattaagtagttcagattcagtgggtggtctcatctctttatgtcctacaacttccacagatgagcagagtccgaggagatacggtgggagagagtttcagtcgatgcttgaaggatacgaggaagaagaagaagctatagtagaagaaagaggacacgtgggcttgtcggagaagaagagaaggttaagcattaaccaagttaaagctttggaga

SEQ ID NO: 14203 - DNA, 344 bp, Arabidopsis thaliana
  unsure at all n locations
  Clone ID: LIB25-110-Q1-E1-B12
ctcttttcttgatgggtttaagagagtaaagatcatcaagtactatgcattaaattgagaagttattaaaaatttcgaaagtaattaaagattgttgatgatgaagagattaagtagttcagattcagtgggtggtctcatctctttatgtcctacaacttccacagatgagcagagtccgaggagatacggtgggagagagtttcagtcgatgcttgaaggatacgatgaagaagaagaagctatagtagaagaaagaggacacgtgggcttgtcggagaagaagatanaggttaagcattaacaagttaaagctttggagaagaattttgagttaggagaat

SEQ ID NO: 14204 - DNA, 442 bp, Arabidopsis thaliana
  Clone ID: LIB25-045-Q1-E1-F7
agcccgcgcgtccgcccacgcgtccgcccacgcgtccgcccacgcgtccgctctgtttcctctttctctctgtttcctctttctcagaactcagaagtagttgttgttttatttctgttgatcaaaaatggaatccaattcgtttttcttcgatccatctgcttcacacggcaacagcatgttcttccttgggaatctcaatcccgtcgtccaaggaggaggagcaagatcgatgatgaacatggaggaaacttcgaagcgaaggcccttctttagctcccctgaggatctctacgacgatgacttttacgacgaccagttgcctgaaaagaagcgtcgcctcactaccgaacaagtgcatctgctggagaaaagcttcgagacagagaacaagctagagcctgaacgcaagactcagcttgccaagaagcttggtctacag

SEQ ID NO: 14205 - DNA, 381 bp, Arabidopsis thaliana
  Clone ID: LIB25-101-Q1-E1-H2
ctccctctctatctctctcttaccaatttccatttctcgggggaaaataataatacgacttttgaaatctctcactaatatttcccaagaaaacctgatgaattaaaagttcatattttcttggtgttgattggtattagatgactatttcttagtattagtcaattctctgtttccatcttatatggatagtctagacacagagcaaagatccttctttggagaaaaagaagatgagagacgagagaggatcgtttcttcacgtattggtcgtagatagatcttaatcgataaccatctaggccttgatctaaccattcaatataaactttatttccttcttcttttcgatctcaattgttccgaccaaacaagattaag

SEQ ID NO: 14206 - DNA, 417 bp, Arabidopsis thaliana
  Clone ID: LIB25-067-Q1-E1-A5
taaaaataaagaaaacataaatcctctgaggaaaaattccgatgacatgacagaaggtggagaatattctccggcgatgatgtcagcagagccattcttgaccatgaagaagatgaagaagagcaaccacaacaagaacaatcagagaaggtttagcgacgagcagatcaagtcactggagatgatgtttgagtctgagacaaggcttgagccaaggaagaaggttcaattagctagagagctagggttgcagccgaggcaagtggctatatggtttcagaacaagagggctcgttggaaatccaagcagctcgagactgagtacaacattctcagacaaaactacgacaacttggcttctcagttcgagtccttaaagaaagaaaaacaagctttagtctctgagaggctaaaaga

SEQ ID NO: 14207 - DNA, 219 bp, Arabidopsis thaliana
  Clone ID: LIB25-087-Q1-E1-A9
agaaaacataaatcctctgaggaaaaattccgatgagatgacagaaggtggagaatattctccggcgatgatgtcagcagagccattcttgaccatgaagaagatgaagaagagcaaccacaacaagaacaatcagagaaggtttagcgacgagcagatcaagtcactggagatgatgtttgagtctgagacaaggcttgagccaaggaagaaggttca

SEQ ID NO: 14208 - DNA, 421 bp, Arabidopsis thaliana
  Clone ID: LIB25-031-Q1-E1-D12
ctcactctttgcttctgcaactcacagtcaatggcggctgaaatggcgttagtgaaacccatctccaagttctcttccccaaagctctcaaacccgagcaaattcctctccggccgacgtttctccaccgtgatcagaatgtcagcctcttcctcaccgcctcctccaaccaccgccacctcgaagtccaagaagggaacgaagaaagagattcaagagtcgcttcttactccgaggttctacacgacggacttcgaggaaatggaacagcttttcaacacggagatcaacaagaaccttaacgaagcagagttcgaggctctgcttcaagagttcaagaccgattacaaccagacacatttcgtgaggaacaaggagtttaaagaagctgcagacaaattgcaaggacctctccgacaga

SEQ ID NO: 14209 - DNA, 449 bp, Arabidopsis thaliana
  Clone ID: LIB25-026-Q1-E1-C2
cgaacgcgtgggctcacttgagcacgagaactgtctccgtcgccgttattatctcgtcggctaatatctcagacgagaaatcgacgccggagaaaaagcaatttagttctctttcatctaccaaaatgacatcttctctgtcacttcactcctccttcgtaccttccttcgctgatctctccgaccgaggtttgatcagtaagaactctccgaccagtgtttccatttccaaggttccaacttgggagaagaagcagatctcaaatcggaactctttcaagctgaattgcgtgatggagaaaagtgtcgatggtcaaactcattctaccgttaacaataccactgatagcttaaatactatgaatatcaaagaagaagctagcgtctctacattattggtgaacttggataataaatttgattcctttgatgcaatgagcactccgctt

SEQ ID NO: 14210 - DNA, 392 bp, Arabidopsis thaliana
  Clone ID: LIB23-024-Q1-E1-F5
gtttagctcaaaggggctcaacttctcagcactcgtgtcctctgctcgtgtattctctagaaaggtagatcgttcttgtaagaacatcgctctgagagttacttgtgaagcgggaagagtggagctgctagagagaaaagcctcagagactttcaagttaaacaaaagtgagaaaaaattgacctgtgtaatgaaattcggtggctcatcagtggcatcttcttataaaggatgatacaagttgccaaactcatactcagcttcgcagatgagatagctgttgttgtgctatcagcaatggcaaagaccaccaataagcttttgatggctggggagaaagctgtttgctgcggtgtcaccaacgtcgacactatcgaagagttgagctatat

SEQ ID NO: 14211 - DNA, 417 bp, Arabidopsis thaliana
  Clone ID: LIB25-062-Q1-E1-F6
atttccttcggagcctggccggcgaatccgacaggtcgtttcagctgtgtccgaaggaaagttccaatttttatctgtttttcttcacggaaatccagttaaggtttccacattgcacagctgtaccatttgtcgagatcacaacacgcaagtctcttagatttagcaagcttatggcttcattgcagttgtacggagttaaaactccagggcttgctttaagttcaaagaggcttgagtttgcttcaaagggggcatgtttttcagttacgttgccctcaagtagtgctgtctttagagacgtagagcattcttgtaggaatataggtttgagagttagttgtgaagctctaagagtcgatttgcttcaaagaaaagagcctgagacgtgcgattcaagcggaactggcaaagaat

SEQ ID NO: 14212 - DNA, 277 bp, Arabidopsis thaliana
  Clone ID: LIB25-025-Q1-E1-E9
cggacgcatgggctggcgcttcgtagatggagagagatgggttcgggtcagtcattgtgaattgaggttgcattgagggtctcaccagtctagtgccctaccatcgtcacctcctccgcgggctccgggtttcactgccgttctgatccggatcacttctgttctcccgtctgtggatcagctccctgtcctgtccgttcctccgctgtgatttcctcctcattcatcggcgacgctggatcagccgccaagatcttaagatttctgccgaatttcg

SEQ ID NO: 14213 - DNA, 217 bp, Arabidopsis thaliana
  Clone ID: LIB25-086-Q1-E1-H11
ctcattgcttcatcattaccaaatcatcaacttaatcgtttctctcaaatttagggttttctcttttctcgaaagtcttgcggttttctgaatcatctctatctggtttgagggtttcgtttgatatctggagaaaggggtttctggaaacaaggagttcataattcgcgatcttgatctatcgatcttcatttatatataaaagcgtgaatgagat

SEQ ID NO: 14214 - DNA, 221 bp, Arabidopsis thaliana
  Clone ID: LIB25-096-Q1-E1-H8
tccttattttacgaagctcccctcggttacagcattgaagacgttcgtccaaacggtggaatcaagaaattcaaatcttctgtctactcaaactgctccaagaggccatcctgagtaccagcgtgcaccgatcttcataatatagttatagctttctttactttccagtttataattttcttctttcaaagctccttttctgctggttcccggatccaatc

SEQ ID NO: 14215 - DNA, 323 bp, Arabidopsis thaliana
  Clone ID: LIB25-040-Q1-E1-H8
gtttctctcaactttagggttttcacttattctcgaaagtcttgcggttttctgaatcatctccatctggtttgagggtttcgcatgctatctggacaaacgggtttctggcacacacgagttcataattcgcgatcttgatctagcttcatttaaatataataacatgaatgagattataatagactctacaggtgatacacagaagtccatcagtagtaattccttagtttacgaagctccccacagttacagcattgaagacgttcgtccaaactgtggcatcaacaaattcaaatcttctgtctactcaaacatgctca

SEQ ID NO: 14216 - DNA, 187 bp, Arabidopsis thaliana
  Clone ID: LIB25-093-Q1-E1-A10
gcatctcattgcttcatcattaccaaatcatcaacttaatcgtttctctcaaatttagggttttctcttttctcgaaagtcttgcggttttctgaatcatctctatctggtttgagggtttcgtttgatatctggagaaaggggtttctggaaacaaggagttcataattcgcgatcttgatctatc

SEQ ID NO: 14217 - DNA, 278 bp, Arabidopsis thaliana
  Clone ID: LIB25-084-Q1-E1-E10
cattaccaaatcatcaacttaatcgtttctctcaaatttagggttttctcttttctcgaaagtcttgcggttttctgaatcatctctatctggtttgagggtttcgtttgatatctggagaaaggggtttctggaaacaaggagttcataattcgcgatcttgatctatcgatcttcatttatatataaaagcgtgaatgagattatgatggagtcgaaaggtggtaaaaagaagtccagcagtagtagttccttattttacgaagctcccctcggtt

SEQ ID NO: 14218 - DNA, 371 bp, Arabidopsis thaliana
  Clone ID: LIB25-116-Q1-E1-A9
acagacgcttgggttggaagactatgggtgcagagagaggacatttgagtctctaggagaacagagtggaacagtgatgtaccagacgtttgagaagcttggtaagtactgtggatcgcctagatctaccttgaagtgtgaatggagcagcaacaatagctgcagcagcgaggacgagaacgacgagggaatctagcagaatttttcttcctaataactattttcgagctttctgtttttgttctttctttttaaaaaacttattaagttcttatgaataatgacttgtgaagtttgagttcgtcaccttcacaagcaagttgtattggtgttttctactttatgaatatgggttttatataacacataac

SEQ ID NO: 14219 - DNA, 353 bp, Arabidopsis thaliana
  Clone ID: LIB25-104-Q1-E1-B5
aattgcttcatcattaccaaatcatcaacttaatcgtttctctcaaatttagggttttctcttttctcgaaagtcttgcggttttctgaatcatctctatctggtttgagggtttcgtttgatatctggagaaaggggtttctggaaacaaggagttcataattcgcgatcttgatctatcgatcttcatttatatataaaagcgtgaatgagattatgatggagtcgaaaggtggtaaaaagaagtccagcagtagtagttccttattttacgaagctcccctcggttacagcattgaagacgttcgtccaaacggtggaatcaagaaattcaaatcttctgtctactcaaa

SEQ ID NO: 14220 - DNA, 388 bp, Arabidopsis thaliana
  Clone ID: LIB25-083-Q1-E1-C8
atcatcaacttaatcgtttctctcaaatttagggttttctcttttctcgaaagtcttgcggttttctgaatcatctctatctggtttgagggtttcgtttgatatctggagaaaggggtttctggaaacaaggagttcataattcgcgatcttgatctatcgatcttcatttatatataaaagcgtgaatgagattatgatggagtcgaaaggtggtaaaaagaagtccagcagtagtagttccttattttacgaagctcccctcggttacagcattgaagacgttcgtccaaacggtggaatcaagaaattcaaatcttctgtctactcaaactgctccaagatgccatcctgagtaccagcgtgcaccgatcttcataatataatt

SEQ ID NO: 14221 - DNA, 386 bp, Arabidopsis thaliana
  Clone ID: LIB25-083-Q1-E1-D10
ttgcttcatcattaccaaatcatcaacttaatcgtttctctcaaatttagggttttctcttttctcgaaagtcttgcggttttctgaatcatctctatctggtttgagggtttcgtttgatatctggagaaaggggtttctggaaacaaggagttcataattcgcgatcttgatctatcgatcttcatttatatataaaagcgtgaatgagattatgatggagtcgaaaggtggtaaaaagaagtccagcagtagtagttccttattttacgaagctcccctcggttacagcattgaagacgttcgtccaaacggtggaatcaagaaattcaaatcttctgtctactcaaactgctccaagaggccatcctgagtaccagcgtgca

SEQ ID NO: 14222 - DNA, 409 bp, Arabidopsis thaliana
  Clone ID: LIB25-091-Q1-E1-G12
cattgcttcatcattaccaaatcatcaacttaatcgttctctcaaatttagggttttctcttttctcgaaagtcttgcggttttctgaatcatctctatctggtttgagggtttcgtttgatatctggagaaaggggtttctggaaacaaggagttcataattcgcgatcttgatctatcgatcttcatttatatataaaagcgtgaatgagattatgatggagtcgaaaggtggtaaaaagaagtccagcagtagtagttccttattttacgaagctcccctcggttacagcattgaagacgttcgtccaaacggtggaatcaagaaattcaaatcttctgtctactcaaactgctccaagaggccatcctgagtaccagcgtgcaccgatcttcataatatagttat

SEQ ID NO: 14223 - DNA, 430 bp, Arabidopsis thaliana
  Clone ID: LIB25-038-Q1-E1-E1
cccacgcgtccgcccacgcgtccggcttcatcattaccaaatcatcaacttaatcgtttctctcaaatttagggttttctcttttctcgaaagtcttgcggttttctgaatcatctctatctggtttgagggtttcgtttgatatctggagaaaggggtttctggaaacaaggagttcataattcgcgatcttgatctatcgatcttcatttatatataaaagcgtgaatgagattatgatggagtcgaaaggtggtaaaaagaagtccagcagtagtagttccttattttacgaagctcccctcggttacagcattgaagacgttcgtccaaacggtggaatcaagaaattcaaatcttctgtctactcaaactgctccaagaggccatcctgagttacagcgttcaccgatcttcataatatagttat

SEQ ID NO: 14224 - DNA, 403 bp, Arabidopsis thaliana
  Clone ID: LIB25-031-Q1-E1-D10
attgcttcatcattaccaaatcatcaacttaatcgtttctctcaaatttagggttttctcttttctcgaaagtcttgcggttttctgaatcatctctatctggtttgagggtttcgtttgatatctggagaaaggggtttctggaaacaaggagttcataattcgcgatcttgatctatcgatcttcatttatatataaaagcgtgaatgagattatgatggagtcgaaaggtggtaaaaagaagtccagcagtagtagttccttattttacgaagctctcctcggttacagcattgaagacgttcgtccaaacggtggaatcaagaaattcaaatcttctgtctactcaaactgctccaagaggccatcctgagtaccagcgtgcaccgatcttcataatat

SEQ ID NO: 14225 - DNA, 444 bp, Arabidopsis thaliana
  Clone ID: LIB25-050-Q1-E1-F4
cggacgcgtgggcggacgcgtgggttgcttcatcattaccaaatcatcaacttaatcgtttctctcaaatttagggttttctcttttctcgaaagtcttgcggttttctgaatcatctctatctggtttgagggtttcgtttgatatctggagaaaggggtttctggaaacaaggagttcataattcgcgatcttgatctatcgatcttcatttatatataaaagcgtgaatgagattatgatggagtcgaaaggtggtaaaaagaagtccagcagtagtagttccttattttacgaagctcccctcggttacagcattgaagacgttcgtccaaacggtggaatcaagaaattcaaatcttctgtctactcaaactgctccaagaggccatcctgagtaccagcgtgcaccgattctcataatatagttatagctttccttta

SEQ ID NO: 14226 - DNA, 445 bp, Arabidopsis thaliana
  Clone ID: LIB25-041-Q1-E1-B7
cttatcttagcctaccctttttccttcctcctctccgattcttcctccgtcagtaaaagaaaatcaaaatggcttcacacattgttggatacccacgtatgggccctaagagagagctcaagtttgcattggaatctttctgggatggtaagagcactgctgaggatcttcagaaggtgtctgctgatctcaggtcatccatctggaaacagatgtctgccgctgggactaagttcatccctagcaacacctttgctcactacgaccaggttcttgacaccaccgccatgctcggtgctgttccacctaggtatggatacactggtggtgagatcggccttgatgtttacttctccatggctagaggaaatgcctctgtgcctgccatggaaatgaccaagtggttcgacaccaactaccattacatcgtccctgagttgggccc

SEQ ID NO: 14227 - DNA, 444 bp, Arabidopsis thaliana
  unsure at all n locations
  Clone ID: LIB25-117-Q1-E1-H1
aagccctatcaaacacataaagttcnttctcntactcatctcccgccgcgggcaagtaaaaaatatcacatcgttaggggtttcacggcggagattcaagttctttgacctangaagctttcactatcaccggagactatttcaatggcaaccatggctaggtcgtttctgcaggcgatatcgaaggatgaggcggtggctcctccgcttagagttgttcagatcgaaggactggctgtactaaagataatcaaacactgcaaggagttttcaccgacccttgtcactggacagcttcttggacttgatgttggtagcgtcctcgaagttaccaattgttttcctttcccggtcagggatgatgatgaanaaattgaaactgatgggtgcnaattatcancctganatgatgagatgtctgaaggaagttaatgttgacaacaa

SEQ ID NO: 14228 - DNA, 366 bp, Arabidopsis thaliana
  unsure at all n locations
  Clone ID: LIB25-117-Q1-E1-H3
ccggaaaanaaaannccttngaatnagnttnaatttttnaaaaaaaatttggngcctncggctttggctttttgcctnaaaggtaaaggtatattgttaagaacttctcccttcatacattacagcttcagagttgggagaaaactgtagactgttacagtcctggacagggtttgatgcctgcaagttttaaagtaagaactgtggcgcttgatgagaacactacggaagaagttttggattcggattttggtgaancaactaatgggcctgttgcncccgtggattccgggttgtggtggattaatcncctgaaggcatatggaaaagataactggagaattcncgttacaagaaaagatanat

SEQ ID NO: 14229 - DNA, 487 bp, Arabidopsis thaliana
  unsure at all n locations
  Clone ID: LIB25-117-Q1-E1-H4
nttnngccccaagnattccacaggnctcacgggtcgncccacgcgtcantaatttcctcttnatatntcancaaangatctgtnagcgaaagnagctgagttcccggagccatcggaagaagcaaancttttcgtcggaaatttggcttatgatgttaatacccaagctttggctatgctctttggagcaagccggtactgttgaaatcgccgaggtatatacaataggggaaactgaccaagagtcgtgggtttggatttgtgacaatgagttctgtggacgaagctgagacagctgtggagaagttcaaccgttatgatcttaacggacgtctactaactgtaaacaaggaactccaagangatnacgtcaaaactgcgccccggtaatgacctgcatcagatatatgtnnggaatcacaagggatgngaaatggcgtctaaaanctttcantaacatggaaattgtggagctaggtggttacac

SEQ ID NO: 14230 - DNA, 455 bp, Arabidopsis thaliana
  unsure at all n locations
  Clone ID: LIB25-117-Q1-E1-H5
ggaacaaagccttttagatagttccgtctgcgaaccctaaaatcattcaataaacttcgaacaaaaacgaatgcttttgttcaatcatcttctcagtttctgattccgaagaaaccctaatcaaataaatcatggactgctcatgcagtactcgtccttcgtctctgcttatctcttccgaaccatcttttcgctttcctcactctaatttctcctcgaatctcagctttcagataccgaaagatacgaagttggtgaagcagcgtttggtagtgagaagttcctctgggttctgattatcaaaacggcgacgttaatgggtttcctctcaaaccaaaacaaaactccttaagcaagagggcgaattggagctgaagtatggagaaaggtttgnagacttttagacaggatggtcctcctaaagtggatgtggatttccggaatgagaaactaca

SEQ ID NO: 14231 - DNA, 450 bp, Arabidopsis thaliana
  unsure at all n locations
  Clone ID: LIB25-117-Q1-E1-H7
agagaacaaaagaaacagaacaacaatggcgaaattaaatcgttccaacattggtctctcactgttactatctatgttcctcgcaaactttatcaccgatcttgaagcttcttctcatcaagatctcaaccaaccgtaccggaccggttatcactttcaacctctcaaaaattggatgaacgatcctaatggaccaatgatatacaaaggaatataccatcttttttaccaatataacccatacggtgccgtttgggatgtgagaatcgtgtggggacactccacgtcagttgacttaatcaactggatttcacaaactccaacttttaatccaacctcaaccgtcagatatcaacgggttgttggtcaagntccgtnaacgaatcctaacaaacggnaaacccggtgattccccaanaccgggcattggaccaaaaacaaaanggtcaa

SEQ ID NO: 14232 - DNA, 516 bp, Arabidopsis thaliana
  unsure at all n locations
  Clone ID: LIB25-117-Q1-E1-H8
nnnnncccnnnnnccnnaaannnnaaaacccnnnggcccanaacgcgtcnataatttcctcttcatatttcaagaaaactttaatctttttttgtgtgtagaattctatatttctggtaactaaatggcgagcgagggagttgtagttgtcggaggggagagagaaggggctgagatcgtgtacggggcggaggaatgttacaagcaatcattggagcttctagaggagctagggtttccaaaaggagtcatgcctttgaagaatcttgttgagtgtggaagagttagagccactggttacgtttggatgaagcaagacactccttacgagcatttcttcgaagccaccaacactcgtgtctcctacggtctcgaagtcaccgcctatgtccaacaaantgttgtatgaagaaaatgacaaggagttaaagagtaagcaaatgtttttgtgggtancgatcgtggagatgaantatggaggaaccaaaaagcaagaagatttacttcaagactcct

SEQ ID NO: 14233 - DNA, 399 bp, Arabidopsis thaliana
  Clone ID: LIB25-085-Q1-E1-F1
cccacgcgtccgcccacgcgtccgctctctctctgcctcctttcggattcaaatctcagatctagctcaaccatggcgttgctcgtcgagaagacctcaagtggccgtgaatacaaggtcaaagacatgtctcaagccgatttcggtcgtctcgaactcgagctcgccgaagttgagatgcctggactcatggcttgtcgtaccgaattcggaccttctcagccattcaaaggcgctagaatcaccggatctcttcacatgaccatccaaaccgccgtactcatcgaaaccctaactgctctcggtgctgaagtcagatggtgttcctgcaacatcttttccactcaagaccacgccgccgcagccatcgctcgtgactccgccgctgttttcgcctgg

SEQ ID NO: 14234 - DNA, 403 bp, Arabidopsis thaliana
  Clone ID: LIB25-062-Q1-E1-D3
atctcagatctagctcaaccatggcgttgctcgtcgagaagacctcaagtggccgtgaatacaaggtcaaagacatgtctcaagccgatttcggtcgtctcgaactcgagctcgccgaagttgagatgcctggactcatggcttgtcgtaccgaattcggaccttctcagccattcaaaggcgctagaatcaccggatctcttcacatgaccatccaaaccgccgtactcatcgaaaccctaactgctctcggtgctgaagtcagatggtgttcctgcaacatcttttccactcaagaccacgccgccgcagccatcgctcgtgactccgccgctgttttcgcctggaaaggtgagactcttcaggagtactggtggtgtaccgagcgtgctctaaattgggg

SEQ ID NO: 14235 - DNA, 426 bp, Arabidopsis thaliana
  Clone ID: LIB25-051-Q1-E1-D12
cccacacgtccgcttctctctctctctctctctgcctcctttcggattcaaatctcagatctagctcaaccatggcgttgctcgtcgagaagacctcaagtggccgtgaatacaaggtcaaagacatgtctcaagccgatttcggtcgtctcgaactcgagctcgccgaagttgagatgcctggactcatggcttgtcgtaccgaattcggaccttctcagccattcaaaggcgctagaatcaccggatctcttcacatgaccatccaaaccgccgtactcatcgaaaccctaactgctctcggtgctgaagtcagatggtgttcctgcaacatcttttccactcaagaccacgccgccgcagccatcgctcgtgactccgccgctgttttcgcctggaaaggtgagactcctcaggagtactggt

SEQ ID NO: 14236 - DNA, 429 bp, Arabidopsis thaliana
  Clone ID: LIB25-023-Q1-E1-B6
atatctctctctctctctgcctcctttcggattcaaatctcagatctagctcaaccatggcgttgctcgtcgagaagacctcaagtggccgtgaatacaaggtcaaagacatgtctcaagccgatttcggtcgtctcgaactcgagctcgccgaagttgagatgcctggactcatggcttgtcgtaccgaattcggaccttctcagccattcaaaggcgctagaatcaccggatctcttcacatgaccatccaaaccgccgtactcatcgaaaccctaactgctctcggtgctgaagtcagatggtgttcctgcaacatcttttccactcaagaccacgccgccgcagccatcgctcgtgactccgccgctgttttcgcctggaaaggtgagactcttcaggagtactggtggtgtaccgagcgtgctc

SEQ ID NO: 14237 - DNA, 224 bp, Arabidopsis thaliana
  Clone ID: LIB25-095-Q1-E1-A1
cccacgcgtccgcccacgcgtccggtcgttgaagtgaacgctttggccaaggctttggctggtcagaaggacgaggctcttttctctgccaatgctgcggctttggcttcaaggagatcttccccaagagtcaccaacgagggtgtccagaaggctgctgctgctttgaagggatctgaccaccgtcgtgcaaccaatgttagtgctaggctagatgctcagca

SEQ ID NO: 14238 - DNA, 387 bp, Arabidopsis thaliana
  Clone ID: LIB25-068-Q1-E1-B1
ctttttccttcctcctctccgattcttcctccgtcagtaaaagaaaatcaaaatggcttcacacattgttggatacccacgtatgggccctaagagagagctcaagtttgcattggaatctttctgggatggtaagagcactgctgaggatcttcagaaggtgtctgctgatctcaggtcatccatctggaaacagatgtctgccgctgggactaagttcatccctagcaacacctttgctcactacgaccaggttcttgacaccaccgccatgctcggtgctgttccacctaggtatggatacactggtggtgagatcggccttgatgtttacttctccatggctagaggaaatgcctctgtgcctgccatggaaatgaccaagtg

SEQ ID NO: 14239 - DNA, 380 bp, Arabidopsis thaliana
  Clone ID: LIB25-002-Q1-E1-D4
attttaccttcctcctctccgattcttcctccgtcagtaaaagaaaatcaaaatggcttcacacattgttggatacccacgtatgggccctaagagagagctcaagtttgcattggaatctttctgggatggtaagagcactgctgaggatcttcagaaggtgtctgctgatctcaggtcatccatctggaaacagatgtctgccgctgggactaagttcatccctagcaacacctttgctcactacgaccaggttcttgacaccaccgccatgctcggtgctgttccacctaggtatggatacactggtggtgagatcggccttgatgtttacttctccatggctagaggaaatgcctctgtgcctgccatggaaatga

SEQ ID NO: 14240 - DNA, 413 bp, Arabidopsis thaliana
  Clone ID: LIB25-012-Q1-E1-G10
gccttctcttagcctaccctttttccttcctcctctccgattcttcctccgtcagtaaaagaaaatcaaaatggcttcacacattgttggatacccacgtatgggccctaagagagagctcaagtttgcattggaatctttctgggatggtaagagcactgctgaggatcttcagaaggtgtctgctgatctcaggtcatccatctggaaacagatgtctgccgctgggactaagttcatccctagcaacacctttgctcactacgaccaggttcttgacaccaccgccatgctcggtgctgttccacctaggtatggatacactggtggtgagatcggccttgatgtttacttctccatggctagatgaaatgcctctgtgcctgccatggaaatgaccaagtggttcgaca

SEQ ID NO: 14241 - DNA, 410 bp, Arabidopsis thaliana
  Clone ID: LIB25-062-Q1-E1-A4
accacgcgtccgctttttccttcctcctctccgattcttcctccgtcagtaaaagaaaatcaaaatggcttcacacattgttggatacccacgtatgggccctaagagagagctcaagtttgcattggaatctttctgggatggtaagagcactgctgaggatcttcagaaggtgtctgctgatctcaggtcatccatctggaaacagatgtctgccgctgggactaagttcatccctagcaacacctttgctcactacgaccaggttcttgacaccaccgccatgctcggtgctgttccacctaggtatggatacactggtggtgagatcggccttgatgtttacttctccatggctagaggaaatgcctctgtgcctgccatggaaatgaccaagtggttcgacaaca

SEQ ID NO: 14242 - DNA, 456 bp, Arabidopsis thaliana
  unsure at all n locations
  Clone ID: LIB25-117-Q1-E1-G6
cgctatgatcgctatttatattcagacaaacaacttgttggccgagacgtttcacaaagtgaaanttgggttctagaacatgctaagctcaaggcaagagttgaggtacttgagaagaacaaaaggaattttatgggggaagatcttgattcgttgagcttgaaggagctccaaagcttggagcatcagctcgatgcagctatcaagagcattaggtcaagaaagaaccaagctatgttcgaatccatatctgcgctccagaataaggataaagccttgcaagatcacaacaattcgcttctcaaaaagattaanggagagggagaaagaaacnggtcaacaagaaggncaattaatccaatgctccaactcctcctcaattcctccgcctcaatactgcgtaacctcctccananatggctttgtggananaattgggggaaaaaacngtggtgc

SEQ ID NO: 14243 - DNA, 60 bp, Arabidopsis thaliana
  unsure at all n locations
  Clone ID: LIB25-117-Q1-E1-D9
tattcataaacccttgangaaacangactctctcctctctatctctgtccctttcttaca

SEQ ID NO: 14244 - DNA, 483 bp, Arabidopsis thaliana
  unsure at all n locations
  Clone ID: LIB25-117-Q1-E1-E2
tctcnagtgaagaatccgccatggctgttccatttctaaagctcttctctacaactcacacccanttctccgattcccttcactaaagtaacaccaacaccaataatccacaaccacagatnaacatgcactatacccacaaagcctcgtctacgtctcctccgccgctccgccgtcgctggaaccgccgtatctgatnaaacagaaggaggtggagatgttcttttaaaccctgaagaagagaaacgtgttgaggtggcggattatgattggacagangaatggtatccaattgtacttaactaaaaacgtccctgaagatgcgcctccttgggctcaacgttcnacgattgtcaaaattgnttttggtataaaagaccggtnaaanggaacacttcccttggttacnaaagattngggggtccccaaccngttggggtaaanttgtccggaaangggcaanttaattgaaggggaaaaatt

SEQ ID NO: 14245 - DNA, 426 bp, Arabidopsis thaliana
  unsure at all n locations
  Clone ID: LIB25-117-Q1-E1-E3
ancngncgttnnaaattcctcctccaaaaaannnttaaaagnnntancggnnaggttgggttcaaaccnancnaacganggaggttgcttttcnanctncgccgccggtgaaatgcatcgccgatgaaagattaacagagatctccatggatttcaccaaattaggattcccagaagaagatgaagaaattaaaaaattggagagatcgtggagtaagctcgaagaatccgtcgaatttaacgaagacgatgaagaagaagaagaagagttttcgtttgcttgtgtaaacggagaaggatctccaattaccgctgatgaagcttttgaagatggtcagattcgtcctgtgtttcctctgtttaaccgtgatctctcttcgagtacgaaaacgaagatgacaaaaacgacaacgtttcggtcaccga

SEQ ID NO: 14246 - DNA, 468 bp, Arabidopsis thaliana
  unsure at all n locations
  Clone ID: LIB25-117-Q1-E1-E4
gatcttctcacattaatgggtcaaaccttttgctcttccttttgattaatttagtgtttgacaatctcctcctccttctccttcttcttcaaagttttgtcgcagtatctattgttcttacagagagaaaggaaagctttagtcttttaccagtttgatccaattctgggtttcactgaaaaaaagttgggagtttgattcttctaactgtagaagaaacagagtcaacagaagaaaactaaaaaagttgagatttttctctcacgcgctcaagaacttgagtatgtcttcttctgtagcaantgttatgggttgcnacttcttcccaaaatcaagaaccaatggacaaattgtggggttgggaaaggggtccaaaatcctccaanactggtccccccctggtcaagaatcaagagactaaacaaaaggnaagaaagaaacaagataccaacttgggagttcctcctt

SEQ ID NO: 14247 - DNA, 446 bp, Arabidopsis thaliana
  unsure at all n locations
  Clone ID: LIB25-117-Q1-E1-E6
caacaaaaaatgttgatgccgagatgacagctaaatgtgacggtcttttcaaggccatgtctgcattgagtgctagtaaaggcgtcaaatcagcggatgctgggagtatgaagatgaccatgttgtcgatgggaaagactttggttgagcagaagaagaatacaaagataatgacattgaaggaaaagaaagagttggtcatagatatggtgaaatggactaaaatggtcgctacatttgtgaagtcggcctccgagcagaaaggaaagtctatcaatatagcatcttatggtcttgatgtcgatgttaacgatagttcnattgtcggtgganctgcaantagtgaatcatcctccactaaatcctggatcggtttccaattaccggaagtgttccnacaagtccnaaagaatccaantantaatgggaagttctgccaatgggaa

SEQ ID NO: 14248 - DNA, 76 bp, Arabidopsis thaliana
  unsure at all n locations
  Clone ID: LIB25-117-Q1-E1-E8
atcctttcactaagtgttatccttcanggaatgataattaccaagtatggagtaaaggaanagaattgcatcagga

SEQ ID NO: 14249 - DNA, 391 bp, Arabidopsis thaliana
  unsure at all n locations
  Clone ID: LIB25-117-Q1-E1-E9
nanagataanttcancctgacaacatggagaccangaatgagaattctgatgtttcacgggcagaggagtttaaaagtcaggccaacnaagcttttaaaggtcacaaatactccagtgctattgatntanatacagnagctattgaactcaacagcaacaacgctgtgtattgggcaaatcgtgcatttgctcacacaaaactggaggaatatggcantgcaatacangatgcatcgaaggccattgaagttgattcaagatactctaagggctattacaggcgtggtgctgcgtatcttgccatgggaaaatttaaggatgccttgaaggacttccaacangtaaaaaggctttctcctaatgaccctgatgccacaagaaagctanagg

SEQ ID NO: 14250 - DNA, 408 bp, Arabidopsis thaliana
  unsure at all n locations
  Clone ID: LIB25-117-Q1-E1-F10
aaaatggcggcaatcagaacgatgacgaacatgattctacgcgagttcatccatcatccacttctccttcactcttcatcgaaatcgtgtcaatctcttttaccatgtctccgtctcactcgcctaatttctccaattcactctaattcccggctcgtatccgtccgatgtgcggcatcgacctccggtggaagcggtggtgatcggaangtctcttcanggttgtcgcangtgcancanatgcttcatgaacccgaagagagagctagttccgctggcaatgagcctactcctcaaatcactctagacaatgttacacttaactttgctagaagtggtggtcctggaggccagantgtgaacaaattgaataccaaagtagatatgcgcttcaatgttangaacgcg

SEQ ID NO: 14251 - DNA, 513 bp, Arabidopsis thaliana
  unsure at all n locations
  Clone ID: LIB25-117-Q1-E1-F2
ggaanttaacnnncccgccgcaagaatcaagggtcgacgcacgcgtcanctcattggctcatcaataacaaatcaacaaattaatcngttcccccaaatttaagggtttcccctttcccnaaagtcctgcgggtttccgaatcaaccccaaccggnttgangggttcctttggtaacctgggaaaaggggnttccggaaacaaggagttcaaaattcncgatcttgatctatcgatctcanttatatataaaagccgtgaatgagattatgatggagtcgaaangnggtaaaaagaagtccagcagtagtagttccttaatttacgaagctcccctcggttacagcaatgaagacgttccgtccaaacggtggnatcaaagaaattcaaaatcctccggtcaatcaaaactgntccaaaaaggcancctgagtaacaacgtgcaacgatnntcanaatataagttatagctttccttactttccagtttaaaaatttctccttcaaagctcct

SEQ ID NO: 14252 - DNA, 455 bp, Arabidopsis thaliana
  unsure at all n locations
  Clone ID: LIB25-117-Q1-E1-F3
cacgcngtccgcngacgcgtgggcggacgcgtgggcttcctcagccgtgtagttcaaatcccggcacaaaactctgtcgtcgcttccccgagaaaaggggtcacacttaaacttgtcgaaaccaaacaacaatggaagatgacaaggatatatacacanaagatggaactcttgacattcacaagataccagcnaacangaataaaactggaacctggaaagcttgcagattcattcttggaactgagtgctgtgaaagattagcttactatggaatgagtactaatctcatcaaactatctcgaagaaacaaatgaatatgggaaacgtctcctgcttccaaagagtgtcaagtaactggtccgggaacatgttacgctactcctttgatcggtgcttttatccgccgatgcttatcccggtcgatactggacatcgcttcctttgtcgtcatc

SEQ ID NO: 14253 - DNA, 517 bp, Arabidopsis thaliana
  unsure at all n locations
  Clone ID: LIB25-117-Q1-E1-F5
ngngtaanttaaactnntcnnctgcccangaaacggtcanagnattcccggggncgacccacgcgtcnnacttcttcctctatgctgctgcttcggaacttctctacggtgggaagagttgctcaatctgttcgtgtgacttcgaggatcttcttctccaccggagaattgattagggttcttccttatactcgttctaaaagattgatctgttctactcgtgctgctcataatgaagaagccgccgcgaaagctgcggcttctgttgctgacaccggagctccgaccatatttgacaagattatagcaaaagagattccctcagatattgtctatgaagatgaaaacgttttggnattcagagacattaaccctcaggctcctgttcatgttttggtcattccaaattnaaaaaaatggnttgacctccccttggaaaggntgaancaaagaaaacttaaaggttcttggcaaacttcnanatgcaaccnaanattgttgctgaaaaaagaaggat

SEQ ID NO: 14254 - DNA, 410 bp, Arabidopsis thaliana
  Clone ID: LIB25-117-Q1-E1-G11
gcacttctctgcatatatttgcttctccgtttctcatttctcaactctcaaactcaaatcacttcctttgtctcagtgactctagtctatctccaatggctgaacgagtctatcccgccgattcaccaccacaaagcggacaattctccggcaacttcagctccggcgaattccccaaaaaaccagcaccaccaccatcaacatacgtaatccaagtcccaaaagatcaaatctaccgtataccaccgccggaaaacgcacaccgctttgaacaactctctcgtaaaaaaaccaaccgcagtaactgtagatgctgcttctgctcattcctcgccgcggttttcatcttaatcgtcctcgccggaatatccttcgcggttctctacctaatctaccgtcccgaagctcta

SEQ ID NO: 14255 - DNA, 730 bp, Arabidopsis thaliana
  unsure at all n locations
  Clone ID: LIB25-117-Q1-E1-G2
gnnnaaaangcnngggnttttttanaaaaacccngggttncccaaggggnnttaggggcccccggttnccnanaaaggggaaaanttttccaaaaaaggggggggttcccggaaaccgggcnaaaccggcccgggttccccngnaacggcccngggggttacaggtttaangttcccaaagggaaggaaangnaaggnaaggaaacccaaaaaaattgggggccttaantggnccccttnaaggggggggccaaaaccccttcctgggggtcccccggccttttaanccccggggaaggaagggtttctaacggcctgggcctggcaatcctttaatggttcgggtcctccgaacggggattctggaattccgtccgggngaaaaaaacgtcatctcgaaaattccccgatgatactgcactacttctctatgcgctataccaagcaggctactgtaggaccatgcaacactccgaaacctagtgcctggagaacantggagcaaagcaaatggaaaattggcaggggctcggaacatgccctccattganggcaatgcgtctctttgtgaaaattctgggagggaagatgattctggttggnaattcaanggnatctaatgatattccaaattctgttggtaaatgtccaaattaatcaagagagcaaaagatgagcctgttgttgagaatgggagcacatttagtgagacaaaaacaatttctacggg

SEQ ID NO: 14256 - DNA, 468 bp, Arabidopsis thaliana
  unsure at all n locations
  Clone ID: LIB25-117-Q1-E1-G4
ttagtcaccacaaaaaaaaaaaaacacaaaaagtttcaatggccgcctccacaatggctctctcctcccctgccttcgccggaaaggctgtgaacctttcccccgcggcatctgaagtcctcggaagcggccgtgtgacaatgaggaagactgttgccaagccaaagggtccatcaggcancccatggtacggatccgaccgantcaagtacttgggtccattctctggcgantcaccgagctaccttaccggagagttccccggagactacggatgggacaccnctggacnttcaactgatcccgagacattcncaaggaaccgtganccagaanttatccacaacaanggggggctaangcctccgaaccctaagntgcgtcctccctgaacttttggctangaacggagtcnagttcggagaagcggtttggttcaaggccggttcacaaatntttaccganggg

SEQ ID NO: 14257 - DNA, 509 bp, Arabidopsis thaliana
  unsure at all n locations
  Clone ID: LIB25-117-Q1-E1-G5
nngnannttnaacngncagccgccaggtaacggtcanagnattcccgggncgacccacgcgtccngttaaactttgcctcttcgtcttttgctccagagtttttgtgcggctgccattttcgatttccaaaggttttgagctttgaaaaatggtgagaatcagtgtgcttaacgatgctcttaagagtatgtacaatgctgagaagagagggaagaggcaagtcatgatcaggccttcctctaaagtgatcatcaagtttcttatcgtcatgcagaaacacggttacattggtgagtttgagtacgttgatgaccacaggtctggaaagatcgtggtcgagcttaatggaagacttaacaaatgtggagtcatcagtcctcgtttcgatgttggagttaaggagattgaaggctggaccgctcgtcctcctccttccaaacagtttgggtacattgttcctacgaactccgctggtaataagggncaagaagaaaccaagagaaanatg

SEQ ID NO: 14258 - DNA, 276 bp, Arabidopsis thaliana
  unsure at all n locations
  Clone ID: LIB25-117-Q1-E1-D6
gnncgatncaagnctctanantgagtcgnagcatcattcaacttgtttttcccggggaaacattttcgttgcttctgtttgaaaataaagacgagatcatatgcgtgtgaaaactcttttgtaatccagattttgtgctgtgtaattgaattgtttgtaaccaacctgactttgattttcggttcatgagttccggttaaaaaaaaaaaaaaaaaaaaaaaaaaaaaaaaaaaaaaaaaaaaaanaaanaanaaaaaananaaaaaanaaaaaaaa

SEQ ID NO: 14259 - DNA, 70 bp, Arabidopsis thaliana
  unsure at all n locations
  Clone ID: LIB25-116-Q1-E1-B5
gtgattttcgnggngctaaaggggaanacaattttcaaattttttcgagctgagtgtcacaaggtcctaa

SEQ ID NO: 14260 - DNA, 434 bp, Arabidopsis thaliana
  unsure at all n locations
  Clone ID: LIB25-116-Q1-E1-B6
aagcagcagtacactgatgtcgaattgtctgcactaggaatggctattgccactgttgttacggtcgctgagatattgaagaacaatggctttgctgttgaaaagaagatcatgacatcgactgtggatatcaaggatgattcaaggggtcgtcctgtgcagaaagctaagattgagatcacgcttgccaagtctgagaagtttgatgaactaatggctgcagctaatgaagagaaggaggctgcagaagcccaagagcaaaactagattgtttcaagttttttctgttcaacgatcttatttcttcgttccctatctctatctgcttaattttaagacacttctatttcgttaatttttggttcacttttttaattcaaccttggattgtgtctccgtacctctgancattttatttaaagatcgtaggaagt

SEQ ID NO: 14261 - DNA, 428 bp, Arabidopsis thaliana
  unsure at all n locations
  Clone ID: LIB25-116-Q1-E1-B7
gcagtcanagccggtatantaactgcattggttaagatgctcagtgattccacccgccaccggatggttgatgaagctttgacaattctctcagttcttgcaaataatcaagacgcgaaatccgcgatagtaanagcgaatactctacccgcgttgataggtattctccaaacggatcaaactagaaaccganagaacgcancagcnatattgctttcgctgtgtaaaagagacactgagaaactgatcactatcggtagactcggtgcggttgtcccgttaatggatttatcnaanaatggaacagagagaggcanaaggaaagccatatctttgttagagcttcttcgtaaagcatgncaataataactantcttctgacaaaaaanggtcaacaaagctcnaattttaatgaagttataaattat

SEQ ID NO: 14262 - DNA, 487 bp, Arabidopsis thaliana
  unsure at all n locations
  Clone ID: LIB25-116-Q1-E1-C1
ngnaacgttaaacnctccgcgntcntgcaaacggtcanagggncgacgaccgcgtcaaccaacgaagtcngcaataacaaaaccccccnggaaaaatncccaacgactnccccccgccgccaagcttgtnatggatcggagagagagatcagtgttctttggatcttccaatttctccacgtttgtgcttgaattgcagaagaagttttgtataggactctgttttgcttgttgatagaatttgggaatctagggtttatcgaatcgtttattttggttttcgtttagtttctcttcttcgagctggtgtttctcaactagttagagagtttctcgattggtcagagctgcttttattgaattttctttggatttcgtgcttatagatctttgaaaagtctgagaatcctgttttggagttactgcttcaagttattggaagaaatanggttccattcaaattttagaattgactcaaggaatccgg

SEQ ID NO: 14263 - DNA, 475 bp, Arabidopsis thaliana
  unsure at all n locations
  Clone ID: LIB25-116-Q1-E1-C10
tgngggtnngcattcntnagctncggcagccnncnggtccaaggccntncgcccctcnaaagtgtctcctatanagaagtcacatgttccttcttcttcttccttcatcatccccaaacacacacaaactaaaanaaaggcaaaaccctagatccaagatcagacctaatctaatcgaaactcatagctganaaatgaagagagatcatcaccaattccaaggtcgattgtccaaccacgggacttcttcttcatcatcatcaatctctaaagataagatgatgatggtgaaaaaagaagaanacggtggaggtaacatggacgacgagcttctcgctgttttaggttacaaagttaggtcatcgganatggcggaggttgctttgaaactcgaacaattagagacgatgatgagtaatgttcaagaagatggtttatctcatctcgcgacggatactgttcattanaatcccgt

SEQ ID NO: 14264 - DNA, 489 bp, Arabidopsis thaliana
  unsure at all n locations
  Clone ID: LIB25-116-Q1-E1-C11
nngnnnnnngggnnnnggaanttttaggtngccccttanggntcgaactcttcacagngccnncgcaggcgtccnctaccttcnatctctctcacccactctcctcggaaaccacagcgacggacggacggacggacgataaaacttttgcctctaatttgctcctacaaatctggaatcagccggagcgaatctcgaagcttatgatctcgacttgctgaagaggctgggaatggctggtaaagaggagactgatgtatctgcacaagggtctttaaccagggaggccactgagatatggaggagtgagttggaatctcgccggtttcaggtagatagtttagaagctgaacttgtggatgtcaaggcttaccttgagtttggctcagaagaagatgccagaaaggagttaggagttctttcgggtagggtcagatcgactgcaactatgttgcgttatttgagatnaaaagctagatcctggncatc

SEQ ID NO: 14265 - DNA, 406 bp, Arabidopsis thaliana
  unsure at all n locations
  Clone ID: LIB25-116-Q1-E1-C5
aagaaggcgagaagaggagcgacaagggcgaagctgcagaattcttcggtaattttcagattcggttgaataatggcggctgcggcttttgggcagttaaatctagaggagcctccaccgatttggggatctcgtagtgtcgattgcttcgagaagcttgaacagattggtgaaggaacttacggccaagtgtacatggctaaagaaattaaaactggtgaaatcgtggctctgaaaaagatccgtatggacaatgaaagagaagggataaccgctatccgggagatcaaaattctgaagaagctgcatcatgaaaatgtcatccatttgaaagagattgttacttctccaagtcnaagataagggatgatnaaaggaaagccaagattataacaatacaaggtgg

SEQ ID NO: 14266 - DNA, 438 bp, Arabidopsis thaliana
  unsure at all n locations
  Clone ID: LIB25-116-Q1-E1-C6
ngatctgacctcaaaatcaaacgagtttctttgataatcttcttgctaagtgttcttgttgagttttgctatggagggttcacaagtgaatatgtcagaggaagtgatttaccagatgacatgccactagacagcgatgtttttgaagttcctcctggtcctaattcacctcaacaggttcatgtaacgcaagggaaccatgaaggtaatggagtgatcatttcttgggtgactccggttaagcccggttctaagactgttcaatattggtgtgagaatgagaaatcgaggaaacaagcagaagcaacagttaatacttaccggttctttaattacacgtctggttatattcaacattgcctcatccatgaatttggaatttgataacaaattactactaacaaaattggaantggcaantggtccaaacnggttctg

SEQ ID NO: 14267 - DNA, 425 bp, Arabidopsis thaliana
  unsure at all n locations
  Clone ID: LIB25-116-Q1-E1-C7
cttatcgcttccttctcgatacgctctcttctccggctcgactcctgttcgcatcagcaggaggagcaacctctgcttcgccgtctccgccgcacgagcttctcgccgggattctatatcattcccccagcctatcttcctccgccacgtcatctctacccagtcgaatttcgagatcgatcgaaattatagagctcatgcgtcttctatcggatcattcgaggatagctcttcttctaacttactagaagacgccagttccgatggtttcgatttgggcagctttgtttctttcgcggaagcgctttgtattttatcatccgccgtgatttcagtggttctcgcggtgaattacgtggtggttggtgaaattgggaaaaangtttggccttaaggttcggttggattggttgntcaatcccaat

SEQ ID NO: 14268 - DNA, 500 bp, Arabidopsis thaliana
  unsure at all n locations
  Clone ID: LIB25-116-Q1-E1-D1
nggnaactgtttaaaccgcccagtgcccgtcaaagaattcaangggtccgacncacgcgtccncccacgnngtccgcccaaccaaagtttctcatcattcatttcagatcagccatggaggacgaggtaatcttacatcttttcgtatatatttattataaacacgatttagctctgtttttccgccggagattataatttgccggagacctttattcgagatctgattgatcatttcttatatgcctacattaactttgatacccattagatttctttttgatggaaatcgatttgatgtgaaattagctgctcgttactctggctttttccactcatcctctatagatgatctggtggagtgtttgtatagagaagaaagacatatgagttcattagaattgtagaaaagtgatggaaagattttccgtcaaatccgtttctcaaaaggcgtggtggtccaatgttgccccaactgggaattggttaatananttccc

SEQ ID NO: 14269 - DNA, 191 bp, Arabidopsis thaliana
  unsure at all n locations
  Clone ID: LIB25-116-Q1-E1-D12
acgtgggcncaancttcaatccnacgnatgcatttctatcgtgggcacntcttccacttatctccgtngtccgttctgcttcnctctcatcacattattcgccgtcgccagttctcttctcgtcacctatattncacctccgatgcatctctctccgtttgcaactctcgccttcacgcgaatctcaatct

SEQ ID NO: 14270 - DNA, 500 bp, Arabidopsis thaliana
  unsure at all n locations
  Clone ID: LIB25-116-Q1-E1-D2
aacttttacnctctcccgtgcccgtcanaanattanacgggncgangaccgcttcnaanactaaattcactcanttggnaccnttcaggtcaaatctgagggattcatggcgaaatggattgggtttaanaacactgctggtccattgggacaccaagcggtcgcactccgtgtgaacggagaccgtgcggtcatattcaactgtagattcgacggttaccaagacacactctacgtcaacaacggacgtcaattctacaggaacattgttgtatccggtacagtggatttcatcttcggaaaatccgcaactgtgatccaaaactctctcatcctcgtccgaaagggaatccccggacaatccaactacgttacggctgacggtaatgaaaagggtgcancgatgaaaatcggtatcctcctccatnactgccgtttcatacccggcaaaggantccaanctgacaagctaaccatcaaaatcntacctanggaaggcg

SEQ ID NO: 14271 - DNA, 435 bp, Arabidopsis thaliana
  unsure at all n locations
  Clone ID: LIB25-116-Q1-E1-D3
caagantncggcccttngaaaannnnggaannacgganntcaaaggngttgacccaacaaangcttgcnanggnggaacngnacctttgttaaactgtgtcaattgggttgagagtaactcttgggatggacgttatggcctcgtcatttgtactgacagcgcggtttatgcagaaggacccgcaaggcccactggaggagctgcagcgattgctatgttgataggacctgatgctcctatcgttttcgaaagcaaattgagagcaagccacatggctcatgtctatgacttttacaagcccaatcttgctagcgagtacccggttgttgatggtaagctttcacagacttgctacctcatggctcttgactcctgctaaaaacanttatgcaacaaagttcnaaaaaattcaagggcaaagagttctccataaa

SEQ ID NO: 14272 - DNA, 430 bp, Arabidopsis thaliana
  unsure at all n locations
  Clone ID: LIB25-116-Q1-E1-D6
atcaaaaatcattcccaacacatttcttcttcgttgtcaaaaatacatcagaacgttctgatttcgccgcgtgactcttatctccgtcaacgccgataaattctccggtaaagtaaccgccgcgatgtcgtttcttttccgtaagaacggtagtagttcacggaggaagatcaaagaaaaactccgtggtcgtcactcagatcgaggtgggaagagagaagaagatgagagatacggcggctccggctccgatttacctccaccaccgtctccttggggatttctcttcccggaggattttgtaagaatcgacgggaatctcaaagctgttaattgtagatgatgaaggattagatgtgatttactggaagaagcttctanagttgggaaatanccggaaaantnagaaaaacctaaacctagaagaagg

SEQ ID NO: 14273 - DNA, 502 bp, Arabidopsis thaliana
  unsure at all n locations
  Clone ID: LIB25-116-Q1-E1-E2
nnnngnaacgttacgctnccagtngccgtccaagnattcaangggtcgacgcacgcgtccnggacgaacaaagagtttcgtagtctcctcgacctcttcccagtcgtacgttctcgtgaccaccgtgctgaattagattcttcaaagcaatcaacttcacagtcagttgtggatcgagaggtaagtgaatggcacgatgcaccgactgttgctgagcctaaagacttgcaatatctgaagactgatcaagacaaattttgggaaaatctgaaagcggctgctgagaagaaggttggtggggttgaagcagagagattttgcaaggctttcgagaaactccacaagaaacttgtgtatgaagaattggatccagaagctgcaaagcgatatttactaaactcttaaacttctgtcctctatatgatgtgcntccaaaagtttgttaaatgtnggagacacttcnagtcctggccttttccttaancgtaattatgaatttang

SEQ ID NO: 14274 - DNA, 491 bp, Arabidopsis thaliana
  unsure at all n locations
  Clone ID: LIB25-116-Q1-E1-B4
cttntacgcctcccggtgccggtcaaagaattcacggggtccgacgcacgcgtccaacttaactccgggagctctctatctttggtcatcctcctatcggaatcggcagcgcagggaagagggcagattatgaataatgatacatcaaaaaagctgggaactttggtttctgatgatggaccagtgaatgtatatgtatgggacatggacgagactcttatcttacttagatctctgttaaatggaacttatgctgagtcttttaatggctccaaagatgttaaaagaggtgtagagattgggaggatgtgggagaaacacatacttaagatctgtgacgattttttcttctacgagcaagttgaggaatgcaatgagccatttcttgattcattgagacagtatgatgatggaaangatcttctcggtatgaagttcaaacaagacgacttagtacnctacngatacttgaacaagnaggaaacttgcnt

SEQ ID NO: 14275 - DNA, 397 bp, Arabidopsis thaliana
  unsure at all n locations
  Clone ID: LIB25-115-Q1-E1-H6
ctctctctctctctcattctcttccaactcttcctctccttcatattctccgtctgtcttctgctaatttaaggaaacaaaaatggtggatcttgaaagaagagtgtgttgcatgtgtggtgatgtgggattcttcgacaagctctttcactgcagcaagtgccttaatcgctttcaacactcgtactgtagtagctattacaaagagcaagctgatccaatcaagatctgtgattggtgtcagtgtgaagcaaaaagtcgaaccggagcaaaacacggtgttaatggtggatcgtctaanagatcgtaccggtcggaataatcttcaactcatcaacaaatcaaacaagnaagaganttancaaaccacntngtggnannnttcccccanaaaanc

SEQ ID NO: 14276 - DNA, 441 bp, Arabidopsis thaliana
  unsure at all n locations
  Clone ID: LIB25-115-Q1-E1-H7
naaactcgcaagttactctctcattcctcatcgtaccctctttactcaggtattttctgaagttaaaagatagaaataatgtctgaaaaggtgggagcgatgggtggtaacaagggtggagcattcgacgatggtgtttttgatggtgtgaagaaagtaattgttggaaaagacttcaacaatgtaacttatatcaaggttgaatacgaaaaggacggaaaattcgaaattcgtgaacacgggactaatcgcgggcagctaaaagagttttcagtggattatccgaatgaatatatcacagccgttggtggaagctacgacactgttttcggttacggatnancgttgatnaagtcattactcctcaaaaactcctattgganaaccctccaaacccttgggccacnnaaatttnnnnggaacccacnggggaaaaaattt

SEQ ID NO: 14277 - DNA, 505 bp, Arabidopsis thaliana
  unsure at all n locations
  Clone ID: LIB25-115-Q1-E1-H8
tanncttcccggtgccnggcanaagtcaaagngntcccgggccnacccaaacgtccaagttgcagaaaggttcggtgtcacaagagaagagcaagatatggctgcggtggagtctcacaaacgcgctgcagctgcaatcgcgtctgggtaaactcaaggatgaaatcattcctgttgctactaagattgtggaccctgagactaaagcagagaaggcaatcgtcgtatctgttgatgacggtgtacgtccaaactcaaacatggcagatttggcaaagctgaagactgtctttaaacagaacggttccaccacagctggcaatgctagtcagatcagtgatggtgctggagcagtactgctaatgaagagaagtttggctatgaagaagggacttcccattcttggagtattcaggagttttgctgttactggtgtggaaccatctgtaatgggtattggtccaactgttgccaatcccgctgcaantaaactcncaagggtcna

SEQ ID NO: 14278 - DNA, 258 bp, Arabidopsis thaliana
  Clone ID: LIB25-115-Q1-E1-H9
ggcaacatctcaaccgcagagactggccatggatacgaggtcgaagagagtaaaccggagttagagaaatgctaaaagcgccaagctaagaagctattagtaatttggtcttactttgagagattgttttctaggagacaaaaagagtttcaaaggtatttgaattgatttgtagtggtaatgatttgactaactttcgagtttctttcttcttttgttaaaaaaaaaaaaaaaaaaaaaaaaaaaaaaaaagggcgg

SEQ ID NO: 14279 - DNA, 393 bp, Arabidopsis thaliana
  unsure at all n locations
  Clone ID: LIB25-116-Q1-E1-A1
aagaangncnaaagaatnncaanggaancatntggggcnanggtgggaacaaagttncnttggtgccggnatggtcactcccggnacctcaaatctancgcgaatgcttctggggaacaactctatancgcaaatagcagaagcattctggaccatcttgagcatangactttgcaaaaaattcttttggttggaaacagtggttctggaactagcacaatattcaagcaggcaaagatcctttataaggacgtaccattcttggaagatgagcgtgaaaacataaaggtgattatccagaccaatgtgtaagggttatctccgtaagcctccttganggcccggaaccggtttgaanaaaaaaccccttgctcccaaggaacacaaancatt

SEQ ID NO: 14280 - DNA, 482 bp, Arabidopsis thaliana
  unsure at all n locations
  Clone ID: LIB25-116-Q1-E1-A12
ngnnnnggnnnngtanttccanaccgntcggcacaggccacngactcgcgaggncganacacgcctctaaactntntcanacaattttgcgtttctgcttttcattttctctcaagaagcgtaaatggcgaacaatggacctaactgggacggattactcaaatggagcctctcacattccgatggagcttcctcttctagccgtataagtgaggaagatcgacaatggtttgtggaagctatgcaagcacatacaatcgattcaatctctcgtatgaaagtaatatctcaaatcatgaagatgcctgaacaagtcttggaggctcaaggagttacacctgatgatcttgaaggaatgttggctgagctgcaggaacacgtcgagtcgatagatttggccaatgatcttcactccattggaggtttggttcctctccttagctatctcaagaactctaatgcgaaaattcgagcaaagtctg

SEQ ID NO: 14281 - DNA, 358 bp, Arabidopsis thaliana
  unsure at all n locations
  Clone ID: LIB25-116-Q1-E1-A3
gtgaattttcccgtgaattttcgcggtgctttttaangctanagctcctgggaanatnatacttgcaggggaacacgctgttgttcanggatccaccgctgtagctgccgncattgatctctacacttacgttactctccgctttcctcttccatcagctgagaacaatgataggcttacanttcagctcaaggacatttccttggngttttcatggtccttagccagaatcaaagaagcgattccttatgattcaagcactctctgccgttctacgncggcttcaggntcagaggganacccntngntcaattgcagntttggttgaagaanaaaatcttccaagggataaaantgt

SEQ ID NO: 14282 - DNA, 509 bp, Arabidopsis thaliana
  unsure at all n locations
  Clone ID: LIB25-116-Q1-E1-A4
tngggcaaangganggggatttngaaanggaaaaggccaatnctnnaaanggagggggctncaaaatgggcctccctnaaaggccaattgggggntngccttngaacaaaaaacttnggggtggggtngcccttnngcctncccaaaacccaatccttcctgggaccctcaacaaagttcgaaggggaagttgtccttccctccttgtcctgatnatcaggaacaggttgaagtatgctttgacttaccgtgaagttatctctatcttgatgcaaaggcatatccaagttgatggcaaagtcaggactgacaagacttaccctgctggttcatggatgttgtatccatccccaagaccaatgagaacttccgtcttctctacgacaccaagggacgtttccgtctccactccatcaaggatgaggaagcaaagttcaagcnttgcaaagggtnagatttaaccaattttggccanaagggganttccatacctgaacncttatgatggt

SEQ ID NO: 14283 - DNA, 427 bp, Arabidopsis thaliana
  unsure at all n locations
  Clone ID: LIB25-116-Q1-E1-A5
tgaattttcccgtgaattttcgcggagcttttctcgggaaaataatctaaagaagattcgagattaagacacgtcatctccggtttcgtagagagatctgaagaacgagtctcttctcttctccgatgggaacgctacagtcatggagaaaagcctatggagccctaaaagactccaccaaagtcggacttgtccgtgtcaacagcgaatacgccgatttagatgttgccatagtcaaagctaccaatcatgttgagtgtcctcccaaagatcgccatctcagaaaaatcttcgctgcaacatcagtgactcgtgctcgagcagatgttgcttattgtattcacgccctttcacggcgtttgcataaaaccaggaattggacggttgctttgaaaacactaattgtgatacatcggcttctaangga

SEQ ID NO: 14284 - DNA, 431 bp, Arabidopsis thaliana
  unsure at all n locations
  Clone ID: LIB25-116-Q1-E1-A6
ttccaaatctccccactctctctctctctctctctctctctctctctctctctctctctatctctctctatctctctctatcttctcttttctcctctctccaacttcttcactaatgggagctcaggagaaacggcgccgtttcgagcagatatcaaagtgcgatgttaaggaccggtccaaccataccgtggccgctgatctagacggaacactactaatctctcgtagcgccttcccttactatttcctcgtagccctcgaggcagggagcttgctccgagcgttgatcctacttgtgtccgtaccattcgtttatcttacgtacttgaccatctccgagactttagccatcaacgtatttgtcctcaacaagttcgcnggtctnannatcgagaagtttgagctagtgggccggttccgtcctccng

SEQ ID NO: 14285 - DNA, 409 bp, Arabidopsis thaliana
  unsure at all n locations
  Clone ID: LIB25-116-Q1-E1-B1
agntttnaactctccgnaggcctgtaaaaagtcaaanggtcnaccnacccgtccnatctctaatcaaaaagcttttaacctcaagccgttaaatctttctccgatcatgccgaccagaaacatcgccattggtgggagtccaagaagaggtctatcaccccaacgcacttanggcggcgctcgctgagtttatctcgactttgatcttcgtcttcgccggctcaggctccggaattgctttcaacaagatcactgacaatggagcaaccactccttccgggctcgtcgccgctgccttanctcangctttcggtcncnttgtcgctgtctctgttggngctaanattccggtggncacgttaaacctgccgttacatcgggtctantccggggnaanacacctccccct

SEQ ID NO: 14286 - DNA, 488 bp, Arabidopsis thaliana
  unsure at all n locations
  Clone ID: LIB25-116-Q1-E1-B11
nngnnnnnnggtggnngnanttccagcaggtntttgcgttcttgnncttcccatgccgacccaggcgtccaatagagaaaaccattacacgagaaaggaaaaaaatggtgaatccttcttcacctggaattgccatactcggagctgggatcttcgtcaaaactcaatacattccgagattagctgagatctccgatctcgtcgacctgaaagcgatttggagccgtactgaggaatctgcaaaaggagctgtggagatagcaagaaagcattttcctgaagtgaagtgcaaatggggagatgagggtctcaatgagatcattcaagacagttcaatagttggtgttgctgtagttgtagctgcagaaaccatggttgaattgtcactgaagatgctcaaggcaggaaagcacgtccttcaagagaagccagctgctgcttcaatcagtgagatagaaactgcaatgtcnagctntagaattttctng

SEQ ID NO: 14287 - DNA, 363 bp, Arabidopsis thaliana
  unsure at all n locations
  Clone ID: LIB25-116-Q1-E1-B2
ancatccncttcttccttcgngctactatatcaggatccanagcttcctcttccagctangggtgcntcagtacactgtancctgangtccgtcgtatgcnacancaggaatcactctgctcggccgaaacttccaaactcgtctttgttacctggattcgatgttgttgttcaagctgctgctacncgattcaagaaggaaacaataaccacaagagccactttgacgtttgatngaccaaccactaattctgacagagctaancagaganaacacaccantgatccttcttctcctgattttcaaccaattccatcttttgnanaatgctttcctaacgagcactatagaacacaangaag

SEQ ID NO: 14288 - DNA, 498 bp, Arabidopsis thaliana
  unsure at all n locations
  Clone ID: LIB25-116-Q1-E1-B3
nnnnngnaactntacnctcncagcgcncatgnananggtcanangnggncgacgacngcgtcnnaattggacccaacttctttgccngtgaacccttcccttaagcactttaaaccgcaaggtgggaatggagggagtgcttgggacgatggtgcttttgatggtgttagaaaagtgcttgttgggcgaaatggtaagtttgtgagttatgtcaggtttgagtatgcgaaaggagaaagaatggtaccacatgctcatgggaagagacaagaagctccacaagagtttgtagtggattatcctaatgaacatattacatcggtcgagggaacaatcgatggttacctttcgtcgctgaagtttacgacatcaaaaggaagaacctcccctgtttttgggaatgtggtcggtagtaaatttgtgttcgaagaaacaagttttaaaccttgttgggttttgtgggccattcggtgaaacnaattgatgcccttggggcaa

SEQ ID NO: 14289 - DNA, 423 bp, Arabidopsis thaliana
  unsure at all n locations
  Clone ID: LIB25-115-Q1-E1-H5
agttcaacgttgcgaatccaactactggatgccagaagaagctcgagatcgacgatgaccagaaactacgtgcgttttacgacaagagaatctctcaagaagtcagtggagatgctttgggcgaggagttcaaaggatacgttttcaagatcaagggtggttgcgataagcaaggtttcccaatgaagcagggagttttgactccaggccgtgttcgccttttgcttcaccgaggaactccttgcttcagaggacatggaaggagaactggtgagaggagaagaaagtctgttcgtggttgcattgtgagccctgatctctctgttctgaaccttgtcattgtgaagaanggtgagaacgatnttcctgggcctaacgntactgngaanncnngaatnngaagggcccannganacccccnna

SEQ ID NO: 14290 - DNA, 433 bp, Arabidopsis thaliana
  unsure at all n locations
  Clone ID: LIB25-115-Q1-E1-F7
tttaagctttcttaccattaggaccattaagagctttccataaaagcatcacaacggctgcaacagttaacaaatacaaggacgagtacagaaactggttcaggagtcatcatgcctcagaactgcatagcaccaaggcctgaagaagatggtggagtcatggttcaaggtttgccagatatgtcagacacgcagagcaagtctgtacnagccttccctacgattacttcacaacctggtctccagatgtctatgtatcccataactctcaagtttgaggaggttgtgtacaaggttaagatagagcagacaagtcagtgtatgggatcatggaaaagcaaagagaagacattttgaatgggataacgggaatggtttgtcccggagaattctaaccatgttangtccatcangnanttgnaaaaccacncct

SEQ ID NO: 14291 - DNA, 497 bp, Arabidopsis thaliana
  unsure at all n locations
  Clone ID: LIB25-115-Q1-E1-G1
gnngnaattcnacgtnncgggccggtcacaggantaacgggtcgagncacgcgtccaagatgacactggcgaagaacaaagtttgaaccttttcttcatccatctctctccgtcgcttcttcctaacgattccttcactcgaatcaggtttgtgaaggtttttttctanggtttcgaaaagatgccggcgacagcaggaagagtgcgtatgcccgcaaacaatcgggtgcatagtagtgcagcgcttcagactcatggaatatggcagagtgcgattggttatgatccttatgcaccaactagtaaagaagagcctaagacgacacaacagaaaaccgaagatcccgagaactcgtacgcgagttttcagggacttttggctcttgctaggattacgggttcgaataacgatgaagccntgggtcctgtaanaaatgtggcnttttgggcaattnacctttcaatgtanggaattctgagtttcaaggggggaaagg

SEQ ID NO: 14292 - DNA, 424 bp, Arabidopsis thaliana
  unsure at all n locations
  Clone ID: LIB25-115-Q1-E1-G12
tctgagatggtttcttcagtttctaattataaaagagaatttggttttaatttctctttattgtttatctcgtcctcgatttcaagagtttgatttctgtaactttgagcttccttcaaagcaaatgaaaggtgtcgtcgtgagtatactcgaattgtatttcccatggtgaataaaggataagaaagtgttgtgtcttcatttcaatagataaaacaatctaaacatggcgtattctgttgttcggcttcgaaaggtttcagctttggggatttctcgtgttcttcaagctgataaaggaagtttgtggcggtttcactttgaacctgagtttggtgaccttttgagattaagtgtcttgactangaattatagaaagaactcctggatccccaaagtttgattcactggnactggaacaact

SEQ ID NO: 14293 - DNA, 516 bp, Arabidopsis thaliana
  unsure at all n locations
  Clone ID: LIB25-115-Q1-E1-G2
gnngnnggtaacttcnagatngtcggcgcncggtcanaggatacncgggtcgacgcncgcgtccaagttttattntttttatgcattctaaggagaagaggtgatcgaaaccaaccacacgggaggagcttatgccattttcctccccgtggaaggtctaacaatcacacgtctcctaatctcgtacgtcttcttaggttttgaagaatggaaaatttaaggaggttgtcaaacccgggaaatttcggattcattggaagatcacaatcacgagttccccaaaaaaacatggaaaataacatttctcctcctaataatatgcaccaccatagtgcttctttagatgatcttttcacagaagaccaaccagcttggctcgatgagctcctaagtgagccagcatcacctaagantaacaaaagncataaacgttcaacctagtgacacaactggctanatnnaaccaacctttaaagcctncaaagggaaacncntntccnggttcccnctggaaat

SEQ ID NO: 14294 - DNA, 502 bp, Arabidopsis thaliana
  unsure at all n locations
  Clone ID: LIB25-115-Q1-E1-G3
ggnngnaattcnacgctnnacggtgccggtcagnaattaacgggncgacgcacgcgtccncggacncgtccgcccacgcgtccggagaaaattagcgaggaggtagctcacccggaaactctcctccagttctgtgtcgaggtctccaaagagatcgacgaacatctcttggccgaggaagaggaggtgaagacaccagagacgcctagtttggtgggaaagctagagacagacgtggagatcaaagcttccgctgagaagttccatcacatgttcgccgggaaaccacaccatgtctctaaagcatctccaggaaacattcaaggttgtgatcttcacgaaggcgactggggtcaagtcggctctatcgtcttctggaactacgttcatgatagagaggcaaangtggctaangagangattganggaatttganccnaataaaaactnatnacctttaagggttcccagggatntgggntaaaagnntaaaagaccttct

SEQ ID NO: 14295 - DNA, 511 bp, Arabidopsis thaliana
  unsure at all n locations
  Clone ID: LIB25-115-Q1-E1-G4
aacnccangctngncggtgcccaggcancnggtcaacgggncgacgcacgcgtccnaccgccnatatcaagangggtaaacctnccccctccntgcaaatttaactcctcggtttccccgcntggttgggnccaatgattctgcccaaggaacaatcttttaataagtacacatatatgttgtccttantgggaaatatgatcggctaacatatttgttattgttattaacaaaaaaaataacatttgttattgttcaccggagttgatagtagcaatagtacatattacatggtcatatatgcatatggctacatgtttgagttatattcgattatctggtgaaagatgagattgtgagtttgtaagtttttgacagtgtagaggaggattcaaaagaaaagaagaaaaaatggactatatgtatggaccanggagacaccanctgtttgttcaagaccagtgtaaaaanccngaacccggaaacccggggcnaanaccgggaaaaancg

SEQ ID NO: 14296 - DNA, 425 bp, Arabidopsis thaliana
  unsure at all n locations
  Clone ID: LIB25-115-Q1-E1-G6
tctctcaaaaaatcccataactttcccaacgaaaaatgttccgatcaatgattgttcgatctgcttccccagtgaagcagggtcttctccgcagaggattcgcctctgaatctgttcccgatcgcaaagtcgtcatcctcggtgccgccggtgggatcggncagccactttctcttctcatgaagcttaaccctctcgtctttctctctccctctatgatatcgccaacactcccggcgttgctgctgacgtcggtcacatcaacacccgatctcaggtttctgggtacatgggtgatgatgatttggggaaagctctagaaggcgctgacctcgtcattattccaactggtgtcccaaggaaacctggnaatgaaccgtgaagattttttnaanaacaaagnngggaatttnnnaaaaccccna

SEQ ID NO: 14297 - DNA, 261 bp, Arabidopsis thaliana
  unsure at all n locations
  Clone ID: LIB25-115-Q1-E1-G7
atttacttgacatttccagctgncagctccttcacagatgangatgtctccaattattttggcaattttggaccagtgcaagatgttaggattccataccagcatcaaacggatgtttgggtttgtcacttttctccantctgaaactgtgagaatcatattggccagaggaaatccncatttcatctgtgactcacgtntgcttgttaaaccgtacaagganaagggaanaatccttgaaaacangangcagcagnaaca

SEQ ID NO: 14298 - DNA, 435 bp, Arabidopsis thaliana
  unsure at all n locations
  Clone ID: LIB25-115-Q1-E1-G8
gcaaaaccaaaaagaaaaaaaaaaatcaaaacagaagcgagcgaagaggacggagggagaggatcttcttccctctttctcttatctactttctcttcnaaatctctaatcttttgaaancctaaatcaaagttttgtttttttttatcaactggggaagaagaaaggtgtaacctttatataaccatggattccggtgacgcgacatctttgcttttgacgaaaattcgaagcttggagccagattatgctcctaagattattgggtatttgcttttacatgattttggtgataagagacttgatgcatcnggctcgtggacctgaatcgattttgcagtcgactatttcgaaagtggaaagtctcctggggaatttctccaaaaanncgccntnttntaaaccnnnntttccttccccngtnaannctagggg

SEQ ID NO: 14299 - DNA, 492 bp, Arabidopsis thaliana
  unsure at all n locations
  Clone ID: LIB25-115-Q1-E1-H1
nngantttagttccnggccggtcaagataacgggtcgaggcncgcgtccncagcnattaacaaattcaccaagactcttgacaagaatcttgctaccagcctcttcaaggtccttctngaagtacaggccagaagacaaagctgccaagaaggagcgtcttgtaaagaaggcccaagctgaagctganggaaagccttctgagtctaagaagcccattgtagtcaaatacggcctcaaccatgtgacctacctcattgagcagaacaaggcccaacttgttgttattgctcatgatgtcgacccaattgagttggttgtctggttgcctgctctgtgcaggaagatggaagtcccgtactgcattgtcaagggcaaatctcgtcttggagcggttgttcaccaaaagactgcttcctgcttgtgtttgaccactgtcaagaacgaagacnancttaattnacanaatccncggaaantttcagggcaattta

SEQ ID NO: 14300 - DNA, 262 bp, Arabidopsis thaliana
  unsure at all n locations
  Clone ID: LIB25-115-Q1-E1-H10
agtgtntagttgaatcatttcgatcaangtttagagagtganaaancatggnatcancctttaccgcaacgtcgtcaatgggttcatctttggctccnccttcgaatcnattgtcatcgtttgtttcgatctcatcaagctcttttggaaggactcagagtattgctcagaggaaagcaaggtttcctaaantatatgcggttaagcaattgcatttcaataaggacgggactgcnattaagaancttcaagctggtgtgna

SEQ ID NO: 14301 - DNA, 421 bp, Arabidopsis thaliana
  unsure at all n locations
  Clone ID: LIB25-115-Q1-E1-H11
gcagctccccttttcttatccggaaaccaaaaacttccggtgataaaacctccttcgtcatctctctacttcttggataaaatggcgtcaactttcactgccacatcttctattggttcaatggttgctccgaatggtcacaaatctgataagaaacttatcagcaagttgtcttcaagctcatttggaaggagacaaagtgtgtgtcctagacccagaagatccagttctgcaattgtgtgcgcagcaaaggaattacatttcaacaaagatgggactaccattaggagacttcaagctggtgtcaacaagctcgcagatcttgttggtgttacacttggacccaaaggacgaaatgttgttcttgagaacaagtatggatnaccacgaanttgttaatgatggngtaacggttgcaaaa

SEQ ID NO: 14302 - DNA, 490 bp, Arabidopsis thaliana
  unsure at all n locations
  Clone ID: LIB25-115-Q1-E1-H2
aacgttacgctcccagnngnccaggcanagaattaacgggncnaggnncgcgtccncggacacgtgggcggacgcgtgggctctcctccctaaaacgcgtttccgtgacaccgccgttatcctcatgctcatccatcagtttataacgttcgggtttgcgtgtacaccattgtacttcgtatgggaaaaagcgatcggaatgcaccacacaaagagcttatgtctaanagcgctggtgaggctaccggtggtggttccgatatggtttttggcaatcatctttccctttttcgggccaataaactcggcagttggagccttactgttaccttcaacgtctanatcatccctgccttaagccacatgctcacgtancgcaacgcctctgcccgncgggaanccgcngganaaaacaaccgtttttaaccctaanctggggtngaggtttacntgngaaaccctttnaaaaagggtttggggccaaatntcc

SEQ ID NO: 14303 - DNA, 499 bp, Arabidopsis thaliana
  unsure at all n locations
  Clone ID: LIB25-115-Q1-E1-H4
ttctacgctncncggtgcccaggnanaggtcanaggggtcccgggncganccaancatgcaanagagatgagcgcgacggagctgccgacgaaggaggcacacatacttaaaggccacgagggggcggttttagcggcgaggtttaacggtgacggaaactacgctctcacctgtggcaaggatcgaactatccgcctctggaacccgcaccgtggaatcttaatcaagacctacaaatctcatggccgcgaagtccgcgacgttcatgttacttcagacaatgccaaattttgctcatgtggtggtgatcggcaagtttactactgggatgtttcaactggacgtgtaatccgtaaattccgtggtcatgatggagaggtcaatgcagtgaagttcaatgattcntcntcngtggntgtatcaactgggttccattnntcccnaanttttttggaactgcngattnccaangtntttgccccnttanattttcntgga

SEQ ID NO: 14304 - DNA, 293 bp, Arabidopsis thaliana
  unsure at all n locations
  Clone ID: LIB25-115-Q1-E1-F4
nnattngagagaagtcacgatatgcttagacaaanggattcactcatggcattttcgatgacctttgagaanaangatggttacgtcgccttcacaagccatcctcttcatgttgaattctcaagccgctttcaccgccgtcatcgacaagatcgttctcctcgatttccccgtcgccgctgtcaaatcttccgttgttgcaacaccatgaatcttgtgatggttacatatcgtcatatgactcatatcgaacttgtttcntaatttnnaacnaantttnagtttttggggna

SEQ ID NO: 14305 - DNA, 504 bp, Arabidopsis thaliana
  unsure at all n locations
  Clone ID: LIB25-114-Q1-E1-E10
nnngggnnnnngaantgtctcgcctnntcgtagccgtccagaattcaagggtcnacccacgcgtccggacaagctcagatgataaccgaggtttctggtcgattatccgagcttaaaaccacgatagatgctgggttaggtcagcgtaacattcttttgcagaccattggagataagtttgaactatggaacctcaaggtacgcaaagagaaagctatctatcatacattgaacatgcttagtcttgatgtgacgaagaagtgcctcgtggccgagggctggagtcctgtctttgcatcaagagaaattcaagatgcattacagcgtgccgccgttgactccaattctcaagttggatcaattttccaggtcctaagaaccaaagagtcgccaccaacttattttcgcacaaacaaatttacttctgcaatccaggaaattgttgatgcgtatggtgtggncaagtatcaaggaaccaatccaagtgtatcaacaatggttacc

SEQ ID NO: 14306 - DNA, 551 bp, Arabidopsis thaliana
  unsure at all n locations
  Clone ID: LIB25-114-Q1-E1-E2
nnnaaactgttntaangcctttcccanggggccccgggttcaaaagnnatnaaaccgggggcncgaangcccacgccgttcngagccgaaaaacttttattccggtttngcctttgaagcctnccgaaananntgggaaaacaanaaatngganggaaagaaagaagcaacgaaggtttaacgggtngggagaaatcccctggaaagtccggcgatacgggatgttcccgattcgggatatcgatatgtctgcaagccgatgaggacgccgttacggagcttgctgagatgaagaggagattaaaggagatggaggaagaagctgctgcgctacgagagatgcaagcaaaagtcgaaaaagaaatgggagctactcaagatcctgctagtatggctgcaaatcaagaaaggaaaggangangtggatgctcgattcagtttatgttggcaatgggttgttctcataaatgaagttcttaatanctctgggttctcaactaagttttgtgactgttttgctagtttcccttgttgtaatgttnaaatccatt

SEQ ID NO: 14307 - DNA, 499 bp, Arabidopsis thaliana
  unsure at all n locations
  Clone ID: LIB25-114-Q1-E1-E3
nnngnngtacttctactccnccgaggctcnggtcanaggtcnnagtggggtcggggccacgcgttcnactttaacntantctnatancttcccggtcaccaaattcgactctctccctaattccagtnacccatcaatttctcaacccgtcttcttcgtttcccgtctcgttatcagtctcatctccgaagaatacccgccatcttcgtctcctcatcacctccgctttgaatccacagacgggacagccgacgaagaaggcctccaccggtagtgataagagtagtacgaacaagaaacgtaagaaaaaggggaaaattgcgaaacctgtggaggattgggaattgagagattcagaagacgcttttgaggaagatgatgatgccgattantcttcttcntcgagttctctagcaacttttaactctcctcctaccatanncaaaccanctgctgggtttgtgattaatgaaactggtaaggttcctaagggctccna

SEQ ID NO: 14308 - DNA, 418 bp, Arabidopsis thaliana
  unsure at all n locations
  Clone ID: LIB25-114-Q1-E1-E4
gccaactccaagctccgccggcaacagtgtcngcacagatgaattgaccaaccttcccccggaggactcgccactcgacagcgagaaggatgatagcgttgacttcagccaggagcaaggatcggagtcaaatgaagctattgacactgagaatggttcaagatccgtagacaaganccaatactctgaaactgaagttgtagttagagcacaagatttacagacagaanctgattcactggatgatgatgtggagattgtgatcaaaaaccaacataagtattacatatactgcccttgctgtggtgaagatatcaccaaaacagtcaagctcgtgaagatatcagattccaaacacacaanagaccatgacaaagctgttgacagtnacactgagaatnggttaaaatcccaanga

SEQ ID NO: 14309 - DNA, 420 bp, Arabidopsis thaliana
  unsure at all n locations
  Clone ID: LIB25-114-Q1-E1-E8
gatggctggcgaagttaggtcgtgataaagaatgccgatcttcgttgcaacgccttaggggatctgacgtcgatatttctcgtgaagcaaacacaattagagataccattgacatgacagaaaacggtggtgaaactaagatgtctgaattgtttcagagacgatacgcatatccgttaattatcggagttggtttaatgtttttgcaacaattgtgtgggagctccggtgttacctattatgctagtagcctcttcaacaaaggaggatttccaagtgctattggcacatccgtaatagccacaattatggttccaaaagcaatgctggcaacagtcctagtcgataaaatggggaggagaacgctcctaatggcttcctgttccgcaatgggtttgaatgccttgcncctnaatggtt

SEQ ID NO: 14310 - DNA, 433 bp, Arabidopsis thaliana
  Clone ID: LIB25-114-Q1-E1-E9
gatattgttaggaactttctccttcatacattacagcttcagagttgggagaaaactgtagactgttacagtcctggacagggtttgatgcctgcaagttttaaagtaagaactgtggcgcttgatgagaacactacggaagaggttttggatccggattttggtgaatcagctattggtcgtgttgctcctgtggattctggtttgtggtggattattctcttgagggcatatggaaagataactggagaatttcccgttacaaagagaggatagatgttcaagacagggataaagcttatcatgaacttgtgtttagcacatggatttgatatgtttccaacacttttggtcactgatggttcttgtatgattgatcgtcgtatgggtatccatgggcaacctctcgaaatccaatccgtaatccaaccaa

SEQ ID NO: 14311 - DNA, 487 bp, Arabidopsis thaliana
  unsure at all n locations
  Clone ID: LIB25-114-Q1-E1-F1
gnnnnnnaanntntactttgcangncccggtcangaatanaacgggtcgaggccacgcgtccgcccaancgtccggaagtttttcagattactcaaagaccaaatttgcaatcgcagaaagttcctgaagcattagattttcctcaccttaacgaaaggctccttcgttgtatatctgatcaatcatatgaagttcgtcttgcaacactgaagtggtttctgcggtttttgaagtcagaagattccagtttctcagagtcgagcagtatttggaactgggcaaaaaacggtctccaggtgatattattagagctgttggacaaggagaaaaaccataaatgtgagaactacattttaaggattcttttccagtggaatcttcttatgttcaaaaaatcatgtaacaaggaatctgttgaaggcatttacgttggttcgttgaactatgattcggtgtttcanccttggggcaagctgactccccaaa

SEQ ID NO: 14312 - DNA, 449 bp, Arabidopsis thaliana
  unsure at all n locations
  Clone ID: LIB25-114-Q1-E1-F11
gaagctctgggattaaacctattttcaccttctaaggntcttcgtcgttcntantgatctgtgaaagatgtattcgggtcaagaacaagatncacaaggntaanggtgttgcaccaacagagtttgaagagcaagttactcangctttgtttgacttggngaacaccaaccaaggagttnaaaagccaattgaaagatncccaaaataaacaaagctggttcaagatggataattcctgggcaaccgcaaaancctgttggtgattctacgttncaattcaaggctgaaggaaagctttccgcaagattcatcttcgtctgggtcagagagcttgagaagaagttcagtggaaaagatgtgatctttgttgctaccagaagaatcatgcgcccaacaaagaaaggtcaactgttcaaagaccancccacaanantcctaatttntgcna

SEQ ID NO: 14313 - DNA, 90 bp, Arabidopsis thaliana
  unsure at all n locations
  Clone ID: LIB25-114-Q1-E1-F2
cgcgctattcacttcgggtacancacacgcgctccanaccgtcgttcttgaagagctgataangatctggtcgtcactggggaaaanggg

SEQ ID NO: 14314 - DNA, 395 bp, Arabidopsis thaliana
  unsure at all n locations
  Clone ID: LIB25-114-Q1-E1-F3
naattnnctnggtngccctnaacnaccccttccaatnttggacaaaatggcgtttgccccaatcaantgggatatcaatcaagatggggggtccttgggatcaaacccgcangtaaaagatttcaagagagaaatacaatttaccggcatgcctcaancgccaaaaggactttgcccaactttcatttgggaactgaangggagnatgctaaaatccttatccaaaaagccaaaactggttgggtttggaagcttttaccggggaaagatgggcggtctttttatactcaaactgggaaaaagcacataaggtcctaaactccggcggtcaagncctttccaaaacgntgccctttaaataagggcaaacggnttcaacnttaaccgantaaact

SEQ ID NO: 14315 - DNA, 411 bp, Arabidopsis thaliana
  Clone ID: LIB25-114-Q1-E1-F5
gggtcttcttctccaaaacccatttcctcacaaaatccatctgagaaaaagagcaacaagtttcattttcatggtggtgatgacgaacaaattcttcgaattaatcggcggagctccgtcgtattcttcagtatccgtcgctgttaaaggatccgtcggtgacgccgtaggaggaactgctagtcgtcgtgctcttcgttggacaatcgaaaatttccttcctaaaatcgatagattagttcttgttcatgtcatgcctacagttactactattccatctccttctggatcgaagattccaatagaggaattggatgagagtgttgtgtctatgtataaacgagatttgagaaaagaatttgaacaagtttttgttccgtttaagaagatttgcaaatccaacaaagttgg

SEQ ID NO: 14316 - DNA, 414 bp, Arabidopsis thaliana
  unsure at all n locations
  Clone ID: LIB25-114-Q1-E1-F6
ctgtanagtgaagtttgatttatttagagagataagttaaaaaaaaaatggtcggtatggatttgttcaaatgtgtaatgatgataatggtgttggttgtctcttgtggtgaagctgtttctggagctaanttcnatgagctttatcggtcaagctgggctatggatcattgtgtcaacgaaggcgaagtcacaaaactcaagcttgacaattactctggagctgggtttgaatcaagaagcaaatacttgtttggtaaagtctctatccagattaagcttgttgagggtgattcaacangaacagtcactgctttctacatgtcttcagatggtccgaaccacaacgaattccaatttgagttcctaaggaacnataacngccaancctaaatattcaaaacaatatcnantt

SEQ ID NO: 14317 - DNA, 418 bp, Arabidopsis thaliana
  unsure at all n locations
  Clone ID: LIB25-114-Q1-E1-F7
tcaangttatggtagtgataataagaagaggttggagcgcaagtattcgaaaatttctgatgattactcttctttggagcaggtgacggaggctcttgcacgggcgggtctagaatcttcaaatctcatcgttggnattgatttcactaagagtaacgaatggacaggggccaggtccttcaataggaaaagcttacacttcataggcagtagtcccaatccttatgaacaagcgataactatcataggaagaaccttagccgcctttgacgaggacaacttgattccatgttatggttttggagatgcatcaacacatgatcaagacgtgttcagtttcaattcaaaaggatagattctgttatggantttgaggaaatactttcccgtataaaggaattcnngcccaacttaagct

SEQ ID NO: 14318 - DNA, 416 bp, Arabidopsis thaliana
  unsure at all n locations
  Clone ID: LIB25-114-Q1-E1-F8
ctgttcttcatcacaccgagaattcgaaaattccgatgaacaagaaacttctcaaccctcttgaagatccaccaaccgcttcttcaagcgaagacgtcgacgaagagatttcatcaggagaagatgaaaaagaacatatctccaattcttcttcttctgaagaagaaaacgaactcaaagatctctccactcaaaccctaaattctccttccaccgaggctccaactctcgattctggatctgagacaaattccgactcagataagccaatcgtcttaaccagtcagaagaagaaagaaggtactgattcatcagggacgaagcgagctagtgaaggaactagctcaaaggacatcaaaagagctaagaaagtttcaaggagatgacgaataccaaaaatttaagantttanggct

SEQ ID NO: 14319 - DNA, 51 bp, Arabidopsis thaliana
  unsure at all n locations
  Clone ID: LIB25-114-Q1-E1-F9
atgcattttcgatgacctttgggaacnnagatggttacctcgccttcacaa

SEQ ID NO: 14320 - DNA, 421 bp, Arabidopsis thaliana
  unsure at all n locations
  Clone ID: LIB25-114-Q1-E1-E1
ggttataacagcgaaatcgtcactgctcttgtgttcaagactagtaagggtacaacctcaccgccttttggaatggtgactgagaagaaattcgaacttaaagatggtaacggaggaaaacttgccggattccatgggaaagctagtgatgttctttatgctcttggtgcctatttcgctccatcgacaacttcgactactccatctactaccaagaagctacaagcaagaggtggtaatggaggagcttcttgggatgatggtgtttttgatggtgttagaaagatacttgttggtcaaggaaacgatggtgtagcttttgtcacgtttgagtacaacaaaggctctcaagcaatcctcggtgatggtcatgggaagaaaacattacttggnactgaaacgtttgancttgattaancca

SEQ ID NO: 14321 - DNA, 274 bp, Arabidopsis thaliana
  unsure at all n locations
  Clone ID: LIB25-114-Q1-E1-B4
ganacactgcagatctccagcttgaacgtatcaatgtcnattacantgnatcttcaggtggaagatacgttcctcgtgctgttcttanggatcttgagcctggtactatggatagtancaagatccggaccgtttggtcacatnttccgtcctgataactttgtctttggtcagtcnggtgctggtaatanatgggctaaaggtcantacactgaaagtgctgaacttaatgatgctgttccntgatgttgttcgtaanagaagctgaaaaang

SEQ ID NO: 14322 - DNA, 420 bp, Arabidopsis thaliana
  unsure at all n locations
  Clone ID: LIB25-114-Q1-E1-B7
agactgagagaaccaaggctccgatctaacaatgaggaagaggacgctcgtgtccgttttgttccttttctcgcttcngtttcttcttccagatcaaggaagaaagttacacncgaatgcagaagagagttccgatgatgttacagatncancanaagttgaggagaaaattggnggtcacggtggtttagcgacngattccnatgtagttcatanagagtctgagtcgatgtcaaagaaaacgcttcgcagtaacgcggagaagtttgagttccaagctgaggtttctcggcttatggacattattatcaactctctatacagtaacaaggacattttcttaagagagttgatctccaatgcttctgangccttggacaaaattaagttccttgcactcactgacaaagacgttttggg

SEQ ID NO: 14323 - DNA, 107 bp, Arabidopsis thaliana
  unsure at all n locations
  Clone ID: LIB25-114-Q1-E1-C2
nngttgtatagcggttctcctcatgaccaaaggggttgcatcatatcttcctcatgatcatcatgcaacttggacgagtcancatggacatccngactncactagca

SEQ ID NO: 14324 - DNA, 482 bp, Arabidopsis thaliana
  unsure at all n locations
  Clone ID: LIB25-114-Q1-E1-C4
aattctacgtnnncaggccgggtcanagaaaaccgggccnnnccangcgtcaacggaagcntggggttttccttgttctccaagccagatctctctccataaatctctcttcatctctctctttcgaccaaacatccgcgatcctcgattctcaattccgtgtctgttttttttcttcacttagcgatggcgatgatagagcaaaggccgaagacgaagatcgtttgtactctangtccagcttccagatctgttccnatggtcggagaagcttcttagggctggtatgaacgttgctcgtttcaanttctctcatggatctcatgaataccatcaagagactctcgataatcttcatcaagctatgcttaacactgggattctctgtgncgtcatgctcgacaccangggtccagaaatccgaaccggggttcttgaaagaatgggaaacnaatcaagctgaaacaanggacaagagatta

SEQ ID NO: 14325 - DNA, 422 bp, Arabidopsis thaliana
  unsure at all n locations
  Clone ID: LIB25-114-Q1-E1-C6
tancanacattgaagaagatgggagtattcacattcgtatgcaagaatggaggcggcgcgtggagcgcgaagcaacacgaaggagaacttgaatcttcagcttcttctacctacaagntccancgtaagctcgttcaggtatctctctccgctgattcctccggtggcgttcagtcttcgntttctcttgtctcccctacctccgccgtattccaggtaattgttggtggtggtggtggtggaggattctctgctggaggagctgcctcaagtggaggtggtgcgggtgaagctgcanctgcccctaaggaagatgagaanaanaaagaagaatcatgaanaagaanaangagacttcggattcgattcccttgggttaagatttaaatagtaatttgggaggtgttgggtttgancttcca

SEQ ID NO: 14326 - DNA, 55 bp, Arabidopsis thaliana
  unsure at all n locations
  Clone ID: LIB25-114-Q1-E1-C7
taagctcgttcangtatctctctccgctgattcctccggtggngttcagtcttcg

SEQ ID NO: 14327 - DNA, 501 bp, Arabidopsis thaliana
  unsure at all n locations
  Clone ID: LIB25-114-Q1-E1-C9
nnnnnngnaactgtntancnnctcgtagccgtccanaaattcnaagggtcnacccacncgtccgaatttctctgttttttttcgttgggtggttcctcagtggttaccaaatctctcttcttcttcttcgtcagaagctaaaacctttcaaaaccctaatttcatctatctatctcaataagtctagatcaaaaattcgaatttcaaaatcccgttttgagttttaagtagattcggtttctgggttttcgtagaaacgggattaagggcggattcaagatcttgaaatttttgtgtgtttctcaaactgattataaattttggtttttttttttttaaatttcgtgtttgaaaaatagggaaaatttccngggttcttctganaaattcgaattttttggagatgggagaaggtgaagaaggagacaaattcccgccaaaaacggatgangttacacaagagtctatgaagtccgngaagnaactcnaatttantggggg

SEQ ID NO: 14328 - DNA, 436 bp, Arabidopsis thaliana
  unsure at all n locations
  Clone ID: LIB25-114-Q1-E1-D11
nactctctcaacaaggtgccatcaccaagaggatgactgcaattgaagaaatggctgggaatggatgttctctgcagtgataagactgggaactctaacccttaacaagctctctgtcgacaagtccttaattgaagtgttcccaaagaacatggatagtgactcagttgtattgatggctgcaagagcttccaaggattgaaaaccaagatgccattgatgcttccatcgtcggaatgttgggtgatcctaaagaaggcaagaacnaggaatcacagaggtgcatttcttgccctttaaccctgtagataaacgtacagcgatcacatacatcgatgaaagcggagactggcatcggagcagtaaaggagctcctgagcagatnattgaactctgcaatctccaangnganacttaaagnaaancccacaaattt

SEQ ID NO: 14329 - DNA, 496 bp, Arabidopsis thaliana
  unsure at all n locations
  Clone ID: LIB25-114-Q1-E1-D12
nnnnngtangtcnagccnnacgnagccgtccnggattcaagggtccacncacgcgtccgaatactttcttctcatacaggaaaaataagtcagtaatctccaagcataagaaaaatatggctaaactaatctcccatgttactgcgctattcattgttgtagttttggtgtgtgcgtttgttcctgctttttctgtagaagaagctgaagcaaaatcattatgggacacttgtctcgttaaaatcactcctaaatgtgcattgaatataatcgcggttgtttttggaaatggaaccctcattgagtcttgttgcaaggatcttgtccaagaaggaaaagtgtgtcacgataatctcattaaatatattgctgacagaccaagcttaattggccgtgaaacacaatacttgaagaagagggatgacgtgtggagtcattgtatctcaatctctaaaactgcttaaaanaaagtgnggttttaaaaataattccatnc

SEQ ID NO: 14330 - DNA, 295 bp, Arabidopsis thaliana
  unsure at all n locations
  Clone ID: LIB25-114-Q1-E1-D4
ncatcaacagaccancanatctcaacgccttatctctcgatttcntcatcgaattcngnaaagctctctcatctctcgacnaaaatcgagatgtctccgtcatcatcctctccggcgccggaaaacacttctgctccggtatcgatctcaattccctctcttcaatctcgacagaatcctcctccggtaacganagaggacgatctagcgagcagctacgccgtaagatcaagtcnatgcaagcggngattanagcnattgaacaatgccggaaacctgtaatcgnngctattca

SEQ ID NO: 14331 - DNA, 420 bp, Arabidopsis thaliana
  Clone ID: LIB25-114-Q1-E1-D5
aagtgattaattttggagaaaaccacttctaccagaaatttttagcatggggagtgaagtcaaccgtccactagctgattttccagcaaatatctgggaagatccattaacttctttctcaaagtctgacctcggaactgagacgttcaaagagaagcatagtacgctaaaggaggcggtgaaggaagcttttatgtcttccaaagcgaatccgatagagaacatcaaattcatcgatgctctatgtcgccttggtgtctcctatcactttgagaaagatatcgtagaacaattggataagtcatttgattgtcttgattttcctcagatggtaagacaagagggatgcgatttgtacacggttggaataattttccaagttttcaggcaattcggctttaaactttctgccgatgtgtt

SEQ ID NO: 14332 - DNA, 407 bp, Arabidopsis thaliana
  unsure at all n locations
  Clone ID: LIB25-114-Q1-E1-D6
gggagaataccccggagactacggctgggacaccgctggactctcggctgacccggagacattcgctaagaancgtgagcttgaagtaatccacagcanatgggcnatgttgggtgctctcggatgcacattccctgagattctctccaagaacggtgttaaattcggagaagccgtgtggttcaaggnaggttctcagattttctcagaaggaggtcttgattacctcggaaaccctaacttgatccangcgcaaagcatcttagccatctgggctgttcaagttgtgctcatggggttcattgaatgctanacaatcggaggtggacctctcgganaagggcttgacccgctttacccnggatgtccnttcnanccattgaanctggctnaagattccnaggctt

SEQ ID NO: 14333 - DNA, 421 bp, Arabidopsis thaliana
  unsure at all n locations
  Clone ID: LIB25-114-Q1-E1-D7
ttgtctaaaaatggcgatgctaggtttttacgtaacgttcattttctttcttgtatgcctatttacttatttcttcctccaaaagaaacctcaaggtcagcctattctcaagaactggccgttcctcaggatgcttccaggaatgctccaccaaatccctcgtatctacgactggaccgtcgaggtgcttgaggcgaccaatctaactttttatttcaaagggccatggcttantggaacggacatgttgttcaccgccgatccaaggaatattcatcacatactaagctcaaactttgggaattaccctaaaggacctgagttcaagaagatctttgatgttttgggagaaggaatcttaaccgttgattttganttgtgggaaggagaanaagaaattaaatcaacnccccaatccaaa

SEQ ID NO: 14334 - DNA, 475 bp, Arabidopsis thaliana
  unsure at all n locations
  Clone ID: LIB25-114-Q1-E1-D8
atctnccgcgntcaggcnaaggtacnggnctcgcgggccganncangcntcaaangnnnttcatnggaaactaccaccagagatctttgataaagatctcgacgccatcttcttgaacaacaatagatttgagtcgaccatccccgagacaattggtaaatcaacagcttccgttgtaaccttcgcacacaataaatttagcggttgcatcccaaaaaccattggccagatgaagaacctcaacgagattgtgtttattgggaacaacctaagtggttgcttaccgaacgaaatcggttcgttgaacaatgtgactgtgtttgatgctagcagcaatgggttcgtcggaagtttgccatcgaccttgtcgggcttagccaacgtggaacaaatggatttctcgtacaataagttcaccggatttgtcacagacaatatctgcaagttgcccaaattgtcaaacttcacattttct

SEQ ID NO: 14335 - DNA, 429 bp, Arabidopsis thaliana
  unsure at all n locations
  Clone ID: LIB25-114-Q1-E1-D9
ttgtatagtgttgtatctctctctctctctctctgtctgtttgtttcagagaaggatttttggcgtctccacgcacgatttaacgcatcgaagctctctgcacgcttcctgaaagagagagagaagagagagatcgcagatcgatttctcttaaatctctcgtgaatcccatttgccttctctctgctagattctctcttcttctcttcacccatttctcgctttctcctttgttctctcatctgggttcttctcaaagcctcttcctttttatgccatggtgggtgcgtcttcctcttacgcatctccgttatgtacctggtttgttgctgcttgcatgtccgtctctcacggtggaggagataaccgtcangctgttgctcctcaatctggtgggcggantccgcgaangaagnaacntaacaaatg

SEQ ID NO: 14336 - DNA, 505 bp, Arabidopsis thaliana
  unsure at all n locations
  Clone ID: LIB25-114-Q1-E1-B12
nnngngnnnnggaacttcnannccnnnacggcacnccgtccnggaactcnagggtccanacacncctcnngattantgccttcaaccgccgtcgccggattccattatcgaaggcgacggaagcagtatcttaggttttgtccgacgaagctccgtttgattgttatcggttccgttgtattcgtcgatcttccattttcgcatttgttttctatatccgaagatgggaagcagtccagctccgtttgccgatattggcaagaaagccaaagatctcctaaacaaggattacatttttgaccacaagtttactctcacaatgctgagtgctacaggaacggaatttgtggctactggtttgaagaaggatgatttcttttttggcgatataagcacactatataaaggtcaaaacaccattgttgatctgaaaatcgacagccactctaatgtgtcgacgaaagtaactctcaaaaatctcctgccaacccgcnaaaccgttaat

SEQ ID NO: 14337 - DNA, 444 bp, Arabidopsis thaliana
  unsure at all n locations
  Clone ID: LIB25-113-Q1-E1-G11
ggttccngnannggtcncnaaatcccgggcccacccacgcgtctaaaagtcgcgtgggttcttctctctctctctgcaaattcaagacantgaanaaaacctctcttcattttttaactccctctctctctctctctctatggagagacgaacgagacnantgaagttcacagcagaatcgtacggtcacaaacgtagcagctacaccatctaacgggtctccgacactggtccgtatcactgttactgatnctttcgctactgactcgtctagcgncgacgacnacaacaacaacgtcacggtggttccaagagtganccgatacgtgaangagattagattctgccaatgtgaatcctcntcctcnaccgcggcgangaaaggtaagcacaatggaggangaaagcgtacnggtttgaagatgacgtgtccacgtccggnga

SEQ ID NO: 14338 - DNA, 346 bp, Arabidopsis thaliana
  unsure at all n locations
  Clone ID: LIB25-113-Q1-E1-G2
ggnnnnnngggaantttttgccgcnccgtaccggtcaaaaattcccgggnccaaccaagccgtcggctaaaacctcatcacacttcttcactcggtgaatctttcttcaggcctcttcataacagaaaaaaaaaatgatgtcttacgttgctaacttggtcatcaagagttttgaccgtgcttccgtggtgtatgttgaagatgtggtggatagctctcgagcgacatgtgttgagaatggtggtgatgacgatgacagtggctatgattatgctcctgctgcgtgattgtctcctattagtataatgtaatttagaagaaaaaaanaaaaaaaaaaaaagggcgg

SEQ ID NO: 14339 - DNA, 438 bp, Arabidopsis thaliana
  unsure at all n locations
  Clone ID: LIB25-113-Q1-E1-G6
ctactctctcctcaaaaactcaaaagagcaaaaaaaagagaagaagaatcaaaatcccacacaatggcaacacactcttccttcaccgcaacaacacctctctttctcatcgttcttctatccctatcctccgtctcagttctcggcgcatctcaccaccacgcaacggngccggctccgtctgtagactgttcgactctcatactcaacatggctgactgtttatccttcgtttcgagcggaggcacggtggcgaaaccggaaggtacatgttgctctggtcttaagacggtgcttaaagctgactctcagtgtctatgtgaagcgtttangagcagtgcttctcttggagttactttgaatatcactaaggcttctactcttcccgccgcatgcaagcttcacgctccttctatcgctacttgtggattgtctgtt

SEQ ID NO: 14340 - DNA, 508 bp, Arabidopsis thaliana
  unsure at all n locations
  Clone ID: LIB25-113-Q1-E1-G9
nnnnnnnnnntggnnnnngnaantgtctacgccnctcggtagccgtccannaattccaagggtcgacccacncgtccggggagtttcatgttaaaaagaaatgaagctctcttgtttggtttttctcatagtatcgtctcttgtttcgagttctcttgccaccgctccgcccaacacatctatatatgaaagctttctccaatgtttcagcaatcaaacaggtgctcctcctgagaagttatgcgacgtcgttctgcctcaaagcagtgccagcttcactccaaccctacgtgcctacatccgtaacgctcgtttcaacacttccacgtcccccaaacctctgctcgttatcgcggcgcgttctgagtgccacgtccaggccaccgtcctctgcaccaaatctctcaacttcnagctcaagactcgcagcggcggccatgactacgacggcgtttcctacatctctaaccgccctttcttcgtcctcgacatgtcctatctccgtaaa

SEQ ID NO: 14341 - DNA, 474 bp, Arabidopsis thaliana
  unsure at all n locations
  Clone ID: LIB25-113-Q1-E1-H10
annttaaanncnngcgntcngaacggtcnggggtccacgggccgtccnnttatctaccatagtataaaacagtcagaagatgtcactgatgcaacaaagtcaaagaactcacatgcgatctgtgagcttgggctgtcaataatcaatcacttaactcagaaagagcctgatctacaaggggaaatcacacctgtatcgctgcctccgacgctgtanaaaccttctgaaaaagttgaaggagacaagtctcaggtaggtgaagaaaaattgtggctanctgatgagactgtcctgttacacttcagggctctcaagttggagagtcatgctgatgcatctgtgatnccccaaacttcataaaatgangttatgantgatggggaaagtgatggaaatgaaattcctccgggtaaaatattaaacgtttgaaantcagggaacaagactagaanggcaaaaggataatctttncag

SEQ ID NO: 14342 - DNA, 431 bp, Arabidopsis thaliana
  unsure at all n locations
  Clone ID: LIB25-113-Q1-E1-H3
gcaagcttctctcactcagcaatggcacccattgatccacactctttcaccgattcctctcatcctctcaccacgcatgtcgctctctccctctacctcgatttcaacacctccataatccatggctccgctctcctcantctctcctccgccttctccggcgaactctctcttgatactcgctgcatttccattgctatggtcctcgatnctctcactctcgagcctatcccttactccgtctccaccacaccggatcgaattcggggcaccgaagttgtcgtagtcctctccggtcaatcttcactgctaattgtctactccacttcgccttctgcttccgctctccagtggctttcgccgcttcaaactttctccaaattgcatccttatgtctacacgcagtgtcaagcgattcacgccagatccat

SEQ ID NO: 14343 - DNA, 427 bp, Arabidopsis thaliana
  unsure at all n locations
  Clone ID: LIB25-113-Q1-E1-H6
tcttcaaacccttcaagagacaatctttcctgcgaaaatggtggtctctgctgactgcagaatctccctctctgcccctagctgcatacgtagtagctccacgggattgactaggcacattaagcttggcagcttctgcaatggtgagctcatggggaagaagctcaacttgtctcagcttccaaacattcgtcttcgatcttctactaacttctctcagaagagaattttaatgtctctaaatagtgtagctggggagagtaaggtacaagaacttgagactgagaaaagggatccaaggacagttgcttccattattcttggaggtggagcaggaactcgactctttcctctcacaaaacgccgcgccaagcctgccgttcctatcgggggagcctatangttgatagatgtaccaatgagcaat

SEQ ID NO: 14344 - DNA, 430 bp, Arabidopsis thaliana
  unsure at all n locations
  Clone ID: LIB25-113-Q1-E1-H7
cccgtttcaactctttggatccagattctcctcctttttatgtaggtaacacgcatatcaagtgttaaagagtcaagatcacaaaaagttctatcgggtgatctgggctgctttcttttgtaatctaattgcagaaactttgctctgacttggatagcttcgtaaaaggttcaatctttctccgtttttcatcaatgagtagtaactaatctggaaatttgttgggagagaaagggcacattgcactgctattgctagagaacgtttctgcatccatgctggtagagagcatgcgtggatactgtgttttgggtgatgccccctggacaaaattagttcccgatgcattcggcgttgtgacgatatgtctagtcgctctgctagttcttttgggtcncctttgcatcgcttactcgttctatttccaatc

SEQ ID NO: 14345 - DNA, 478 bp, Arabidopsis thaliana
  unsure at all n locations
  Clone ID: LIB25-113-Q1-E1-H8
ccnnnnnnnnanaannattcncgggccgacccacgcgtcaggatgggtcatgctcgaactcgtaccggtatcatctccgtcgcttttaaattcttcaggtctctgttccctcgccatcaccgtactaacagcatgaagataaaaacaggaacgtttttgggggtttcgatatcattgattcttataaacttagctgcgatcatggaacgtgcagacgagaatctattgccttcggtttataaagaagtgagtgaagcatttaacgcaggaccatcagatttaggctacttaacattcgttagaaactttgttcaaggacttgcatcaccattagcaggagttcttgtcattacctatgatcgtcccattgttcttgcaataggtactttctgttgggctttatcaactgctgcagttggagccagcagctacttcattcaggttgctttatggagagcagtgaatggttttggattgg

SEQ ID NO: 14346 - DNA, 505 bp, Arabidopsis thaliana
  unsure at all n locations
  Clone ID: LIB25-113-Q1-E1-H9
nnnnngggnnnnggaanttttacgccntcggtgccgtcannaattcaagggtcgacccacgcgtccgatcggaagaagaaactcatatataccttccaaaaaatccatacgtcaagtatttgttctctatcctctctttgttgtcttataaattcttcaagcaggtttcgagatttcctcgaatctgttttgttcttgttcctcaaaaatgctgggtttttgaacgaacgaggatgacgatgctcagagtccgaagcagagatggattggagagagtgagtgtagatggacctcatatcacagtctcccaactcaaaaccctaatccaagatcagcttcagatccctatccacaaccaaaccttatccaccaatagaaaccttctcctcgctaagagcccttctgatttcctaangttcaccgacatggccgatcctaacctccggaatcctcgtctcctcaatccaagctcaacgggtctaagggtccnaccttgccttacgna

SEQ ID NO: 14347 - DNA, 499 bp, Arabidopsis thaliana
  unsure at all n locations
  Clone ID: LIB25-114-Q1-E1-A11
aantgtctatnccggtccgccgggtcggcaanaagtcctgganntcncgggtcgacccacgcgtccgngctcctcatcagtgttccgtctacgtcggcgganccntgggcantagaatcattttacctatantgtttcccgctttggagaaaaanggtagcagcnattggaatcaggctgtgaagancttgacagacaatgttctcaaggttttgtccgatncaaatcctgatttattcgaagaatgtttgcacaagttccaagaagatcagcaatnngcagaagatactaaaaagaagaatggagaaacctggagacagctagaggagattgttgcttcaatggcgaagtaagagttttttctgcactttacgtgattcaacaagaaatcggtttattgttttgttttgtttcctttacgcctgaaaggtatatacatttactttgccttgcctggctcnatttaatttccggggtttngnttttaagactantttaa

SEQ ID NO: 14348 - DNA, 449 bp, Arabidopsis thaliana
  unsure at all n locations
  Clone ID: LIB25-114-Q1-E1-A3
tncccggnccgagnaancctnaannncngctgngaagaaggancacgaagaaggntaangataagaaggatangaactaggacgataaaantggnggagganaagaaggggaagatcangagaagaagagcaagagnaaagataagacgccgaagaaagagangaaccctgaagataagaaagatccagagaagttgaagatgaagcttcagaagattgaagaaaagattcaagctatggtcttaaagaaaagatgagattgtgaagcttattcatgatgctgaacaagctaagcctagtactgctgcagtagatgcaccaccaccaactaactaattcaaatacacaaattatatactacaataagttaactaatatattttgtcaataacaaatgctgctgaatgttatttcagcgtanctgggaanaggcctttgttttgttttgt

SEQ ID NO: 14349 - DNA, 492 bp, Arabidopsis thaliana
  unsure at all n locations
  Clone ID: LIB25-114-Q1-E1-A5
nnnnnngnaactcnacctncncagtgcncggtcanaggtncacngtcccggnccgacgnacgcgtcangccatgactggagacggagtcaatgatgctcctgctctgaagttggctgatattggtgtggctatgggcatttccggcacagaggtagcaaaggaggcatctgacatggttttggcagatgataatttcagcaccattgttgcagctgtaggtgaaggcaggtccatctataacaacatgaaggccttcatcaggtacatgatctcttccaacatcggcgaggttgcatcgatatttttgacagctgctcttggaatcccagaaggcatgatcccggttcagcttctgtgggtaaatctcgtaacagacggtcctccagctactgctttggggttcaacccccctgacaaagatattatgaaaaagcctcctcntaagancgatgactcccctaacaatgcctggattctccttccgcaaaang

SEQ ID NO: 14350 - DNA, 494 bp, Arabidopsis thaliana
  unsure at all n locations
  Clone ID: LIB25-113-Q1-E1-G10
nnnngnanttntaaacnctcagcagnnctgaancggtcagaggtcgaccnacccgtccgtgcgtttnctgtatttgaagatatggtaaaagaaggcatgaaaccagatgttatactatacaacaacatcatctcagcattctgcgggatgggtaacatggntcgagcgatccagactgttaaggagatgcaaaagctgaggcatanaccaaccacacggacatttatgcctatcatacatggatatgcgaaatccggagacatgaggagatcactagaagtttttgatatgatgagacgatgtgggtgtgttccaaccgttcatactttcaatggtttgattaatggtttagttgagaaacgtcagatggaaaaggcggttgagatattagaccaagatgacattggcgggtgtnagtgcaaacgaacatacttacaccanagatnatgcaaggctatgcatcaatcggtgatacccggaaaaaccctttgagt

SEQ ID NO: 14351 - DNA, 226 bp, Arabidopsis thaliana
  Clone ID: LIB25-112-Q1-E1-F11
gtttcggcactaaacttgcctgcgagtgaaacccaacaaaaggcaacagaaaagaaaaagtgaactggctttgcaaaaatgtaatgttttgatgtaatcatgtgtaagtgtaaacacaaaggtatgtggaaaggagaagcacataagtattattatgtaagaaacattatttaaaacccataatcataatgtatctcttaagtataaaaaaaaaaaaaaagggcgg

SEQ ID NO: 14352 - DNA, 432 bp, Arabidopsis thaliana
  Clone ID: LIB25-112-Q1-E1-F12
agttccgactttttgcttctcccagaggctaatcatggacgctgtggcggcgaatttgtttcaatctccttccttactgcgtcaaacttccgaaaggttgatattttcgacgcccaactgtcctggcttcatgcgaattagctccggacctcaatttcgtctcagacaaaactcttctcttaaattctcgagaccatttcaaagcggaacaacttgtgttaaatctcggagaagctttgtggttaaagcttcagcttctggtgatgcttcaacagaatcaatcgcgccgcttcagttgaagtctcctgtgggacagtttctgtcacagatattagtgagccatcctcatcttgttccagcagctgttgaacagcagcttgaacagctccaaaattgattgagacctgaaagaacagagtaaaagatgcatcc

SEQ ID NO: 14353 - DNA, 432 bp, Arabidopsis thaliana
  unsure at all n locations
  Clone ID: LIB25-112-Q1-E1-F2
ttttcacgccggagatagagagagagaagtaaaaaagcgagaaaaagctagaaactttagaatacccaataatggntccgatcgaancngncgagtacaanggcttcnanacccctaacggtaacttcnaccatggttggaaaaaatncgtgtncccgaaacgtcnccggaagcaaaaacaagcggttcaagcgacggcaaatggtggcaaaactgttgcttcaaatggaaccgtagctaacggcggagataacgttttccgttcgttggaagagcaagctgaggatcgtcgacgacggatcttagcggcgaagatgactgctattgattcagatgatgatggtgttgttaagatctaaacatcgatctaatgggttacggtgatgatgggtatgattttgatggtagtgatgatgagatcgcaacgctgag

SEQ ID NO: 14354 - DNA, 427 bp, Arabidopsis thaliana
  Clone ID: LIB25-112-Q1-E1-F3
aagatgggtgtgaagcaggctctaaggagcattgatgcgtttccaagagcagaggatcatttgcttcagaagacacaatctggcgctgttgtatctattgttggacttcttataatggctactttgttcttacacgagctgagttattatcttaacacacttacagtgcaccagatgtcagtggacttaaagcgtggagaaactcttccaattcatgtaaatatgacgtttccatctttaccttgtgatgtactgagcgtagatgctatcgacatgtcagggaagcatgaagtggatcttgatacaaacatttggaagctccgtctcaacagtcatggtcatatcataggcacagaatatatatctgatctgttgaaaaggggcatgagcatggccactcacctcacaagcatgatggcaaagaaga

SEQ ID NO: 14355 - DNA, 424 bp, Arabidopsis thaliana
  unsure at all n locations
  Clone ID: LIB25-112-Q1-E1-F5
gctgctctcacacgcaaataatggctcatctcttcagggagctgtctctgggccactccaagagagagtctacgccgccgccgccgtcacattcggcgacttcacgttcttcttcaatgtcttccgatctacctccatcaccactcggacaactcgctgtccaactttccgattccgatctccgtctcactgcttacgagatcttcgtcgccgcatgtcgtagcgccaccggtaaacctctctcatcggctgtttcagtcgctgttttgaatcangattctcccaatggctctcctgcttcgccggcgattcaacgttctctgacctcaaccgccgctagtaaaatgaagaaagctttggggttaaggtcgtcttcttcgctttcacctggatntaataagantctggntctgcttcnggttca

SEQ ID NO: 14356 - DNA, 396 bp, Arabidopsis thaliana
  unsure at all n locations
  Clone ID: LIB25-112-Q1-E1-F7
ggttcggccggtggaggcagattcggcggcggaaattagtccggaacaagaccacgaaggaagatcggagccttcgtcgttgaaccaaggggagattttaaaaacacttgctacggtggagaaggattcgcaggcaatcgcggagagcttttcgtctctctttgtttccctccgatcaactctttctgaggctactggtagctcggttgatcacatggcttgctttggagaggcagcgggacggcttcaggaaaatgctctagatgcagccaccaaagggaaccggtacatcaactcttgcctcagattaaacgangaaattaaaggcgttgagaatttggcggctcggttaaagcacctgaggaaaaacgtggatgttcttgacacggctgtaaa

SEQ ID NO: 14357 - DNA, 431 bp, Arabidopsis thaliana
  unsure at all n locations
  Clone ID: LIB25-112-Q1-E1-F8
nagcgtttcaagacgtttggccgtttttgaaactgtcgtttgcgtctgcggttatgctttgtctagagatttggtacttcatgacgatcattgtcttaactggacatcttgaagaccctgtcatagccgttggatctctctcaatctgtatgaacattaatggatgggaaggaatgttgttcataggaatcaatgcagctataagtgttagggtgtcgaatgagctaggatcgggacatccacgagctgcgaaatactccgtgatcgtaacggtgatagagtctctcgtcattggagtagtgtgtgcaattgtaattctgataacacgagatgactttgctgtgatttttacggagagtgaagagatgagaaaggcggtagctgatcttgcgtacctgctcggtataacgatgattctcaacagtttacaa

SEQ ID NO: 14358 - DNA, 498 bp, Arabidopsis thaliana
  unsure at all n locations
  Clone ID: LIB25-112-Q1-E1-G1
gnnnnnntgnaagtgtttatnagccggcccncggtccaagganacccgggtcgncccacgcgtccnggaatcactcctgcacgcgtcttcgtctctggtgtctctgagacccagaatcgacggtagagattcgttcatcaacccgtcacgcgtgtgccttaatcctagtctcggccgcagaggatctaaacctcttccgttggtcgcggcggcgaagaagaagaaaagcaagaaagatgacaatcataacttttcagctagacctgacgaagccactggtccttttcctgaatccattcttctcaaagagaagaagattgatgaagaaggtgatcttcttcccgagtttgctgatgctgaagaaaaggagctatatcagtttctggatcttcagcttcagagtgacttgaatgaagaaaggatgaggcactatgaggtggtttacttgattcatgaaaaacatgctgaggaggttgaaagcattaaccagaaagtaca

SEQ ID NO: 14359 - DNA, 432 bp, Arabidopsis thaliana
  unsure at all n locations
  Clone ID: LIB25-112-Q1-E1-G10
aaattcgatctgatcactgagaaactacggcgacgacgaagaatacggtggaggaggaagtacaatgagaatattaagctacggaatcgttattctctctttactcgttttctctttcattgaatttggcgttcacgctcgtcccgtcgttctcgtcctctcaaatgacgatctcaatagcggcggcgatgataacggagtcggagagtcctctgacttcgatgagtttggagaatccgaacctaagtccgaagaggagcttgatcccggttcatggcgatcgatcttcgagccagatgactcaacagtccaancagcctcgccgcagtactactccggnctcaaaaagattctatcggcggcgaattgagggaaatttcaggttgatggaagaancagtggatganatagaggctgcttcctcagctggga

SEQ ID NO: 14360 - DNA, 226 bp, Arabidopsis thaliana
  unsure at all n locations
  Clone ID: LIB25-112-Q1-E1-G11
tctcnttcnggggatttttttttggnnaaatcgntctgttaccttttttttgcccattactcanacccgaaccctaattttctgaaatcgcacgagagagagagagagaggtttcttcggaattctttcancatcaattcgctaactttgtttttttggggttaaatcgattaatcgttattttattagatactgtcnatcggagctaancaacnctcncttaaca

SEQ ID NO: 14361 - DNA, 430 bp, Arabidopsis thaliana
  Clone ID: LIB25-112-Q1-E1-G12
ttcgccgcgtggattgatatgacgactctctttcgccggaagtcaatcggaatccgcgacaacttcttccttcaatccctttgatttttttttggctctacttatcccaaacccttcaaatcttcaggtccaatctcttcttctatttgttttttaattaaaaaaatccggcgaaaggtgaagctcttggattcgagtggtggctagtaatcgatttcggtagtttagaagtagtttataggttttatcagctttcgatttgatggagccgcgagtcggaaacaagtttcggctcggaaggaagatcggcggtggatcattcggagagatctatcttggtaccaatatccagacgaatgaagaagtggctaataaacttgaaaatgtgaaaactaagcatcctcaagttgctgtatgaatcaaagttgta

SEQ ID NO: 14362 - DNA, 431 bp, Arabidopsis thaliana
  unsure at all n locations
  Clone ID: LIB25-112-Q1-E1-G2
ctnctgntaacaacagatgttgtgattgctgacaagttcgctcctgatgccaacagcaagattgtgccagcatcagccattcctgatgggtggatgggattggacatcggtccagactcggtgaaaacattcaacgaagctctggataccacgcagacagtcatttggaatggaccaatgggagttttcgagtttgaaaagtttgcaaaaggaactgaggcggtagcgaataaactagcagagctaagcaaaaagggagtgacaacgataataggaggaggagactcggtggcagcagtggagaaagtgggagtagcaggagtcatgagtcacatctccacaggtggtggtgccagtttggagctcttggaangcaaagtgcttcccggtgtcgtcgctcttgatgaagcaacgccagtcactgtttaaca

SEQ ID NO: 14363 - DNA, 428 bp, Arabidopsis thaliana
  unsure at all n locations
  Clone ID: LIB25-112-Q1-E1-G3
tnattctctcgaactttctctctctaaatattttgtttcgttttctctctctctctctatttactttcgttctctctattttttttgtttggtttagcttatttgtgaagtgttaaatcttcttcagtttctggggaaattaggtggggaggtgaaaaagggggaaatataattgaaattgggttctctctgctgtgcaataataatttctgagaggattgtgaagaagcgcttttatgtaagaagatatctcattattagttatttacatgagaatctgacattcttaacaactgtctgtggggttagttttgtccaaagaactatacagagatgtctcagaccaactgggaagctgataaaatgttggatgtctatatccatgattatctgggtaaaagagatttgaaagctacagctcaagcttt

SEQ ID NO: 14364 - DNA, 438 bp, Arabidopsis thaliana
  unsure at all n locations
  Clone ID: LIB25-112-Q1-E1-G4
taatgatgagtccaccagaaatggagattccaagaaatcagggaatcggagcgggggcaattgcgggcataatcatttcatngttagtagttacagctccttctngtngcttcctcctngttcagaagaaaaaaatcaaagaggtcatcacccatggacattgagaaaaccgataaccagcctttcactcttgcttcaaacgactttcacgaaaacaattccattcagagttcttcatcagttgagacaaagaaactggacacttcattgtctattaatcttcgacctccaccaattgatagaaacaaatcatttgatgatgaagattcgacaagaaagcctattgctgtcaagaaatccacagtggtggttccttcaaatgtgagactctattcagttgcagatctccaaattgctactgggcagtttcagcgtana

SEQ ID NO: 14365 - DNA, 427 bp, Arabidopsis thaliana
  Clone ID: LIB25-112-Q1-E1-G7
ttgtgttcaatatctacaacaagaaggtcttgaacgcttatccttacccatggcttacctcgacgctttctcttgccgctggttcgttgatgatgcttatctcttgggctgttgggatcgttgagactcccaagacggattttgatttctggaaaactctttttccggttgctgtggcacacacaattggtcatgtggctgcaacggtgagtatgtcaaaggttgctgtttctttcactcacatcatcaagagtggtgaacctgcgtttagtgtgcttgtctcgaggtttattttgggtgaaaccttccctacttcggtttacttgtctctcattccaatcattggtggttgcgctctgtctgcccttaccgagcttaacttcaacatgattgggtttcatgggaactatgatttcgaacttggctt

SEQ ID NO: 14366 - DNA, 380 bp, Arabidopsis thaliana
  unsure at all n locations
  Clone ID: LIB25-112-Q1-E1-E9
tacgtttcggttttcaggccaatctctgaatctgcgtgacaaaagcaacaaattacatatctctctctctgcgcgacttcgaagatcaacatccatggcgtcacaggtaaggtcagtaaaagttggcaatctctcttcaggagcaactgagcatgatattaaagagtttttctctttctctggtgaagtttaaagcatcgatatccaaagtaaccagcatagtgcttatgtcacatttaaagaaactcaanggagcaaagactggcgtgctcctaaccngganccaattattgccgttaaatcattcatcaattattttgggccccaaattangntccaacaagnagcccncaangctgaaanacaaaanccaancgggt

SEQ ID NO: 14367 - DNA, 433 bp, Arabidopsis thaliana
  unsure at all n locations
  Clone ID: LIB25-112-Q1-E1-C4
caagattctcttctctctatctctctcgcgtaacgccgcaaccgtatcgacaaattgaatccacgaggaaatctcagtaaatactatggcgaccaacgaacccgancacgagcacaganacgangaagaggccggagctaacgaggatgangacaccggagctcangtcgctccgatcgttangcttgangaggttgccgtcactaccggcnangaanacgaagatgccgtccttgatctgaaatcgaagctttatcgattcgataaggatgcgaatcagtggnaggagagangagctggtactgtgaagttcttaaagcataagaacactgggaagattcgtctcgttatgaagcaatctanaactttgaagatctgtgctaatcacttcgttaaatcgggcatgantgttcacgaacacgttgggaatgaa

SEQ ID NO: 14368 - DNA, 420 bp, Arabidopsis thaliana
  unsure at all n locations
  Clone ID: LIB25-112-Q1-E1-C5
acctctctaagaagaaaggaggtaagcctaatctgaggattgctagtcttggccacgcgttgcatgtatggctcaatggagaataccttggaaacggacatggtagccatgaagagaagagtttcgtctttcagaagccagttactctaaaagaaggagagaaccacttaaccatgctaggtgttttgacgggatttccggatagtggatcttatatggagcatagatacacaggtccacgtagtgtttccatcttangtttgggctctggaacacttgatctcactgaagaaaacaaatggggaaacaaggtgggtatggaaggcgaaaggcttggtatccacgccgaagaaggattgaagaaggttaaatgggaaaaagcntcanggaaagaaccnggaatgacatggtancaaacat

SEQ ID NO: 14369 - DNA, 427 bp, Arabidopsis thaliana
  Clone ID: LIB25-112-Q1-E1-D2
ttgagtcttccattgacatgggcgcttagcttatgcttgagatattttgtttttacctccgagaaacggatttagattcgtaatcgtgagttttttggtgtaatggagatcgctactgtcgtaaaggctaatggcggttgtgaagcggatcgacgacggcttcgccgattgagatgctctgttaaggattacgattggggcaaaattggatcggattcactcgtttacagggtttatgcggcgaattcagattacgagatcgatcctacacgaccttacgccgagctatggatggggactcacgagtctggtccgagttacttggaggatgctgatggatccaatggcgtgacccttaaatcctggatcaccgaaaacctaaatctcttggaaataaggttttggagaaatggggttgcgatccccc

SEQ ID NO: 14370 - DNA, 54 bp, Arabidopsis thaliana
  unsure at all n locations
  Clone ID: LIB25-112-Q1-E1-D5
atacttcgggtattctcagnttcttggaagaaaggtagggnttgttgttcttgg

SEQ ID NO: 14371 - DNA, 431 bp, Arabidopsis thaliana
  Clone ID: LIB25-112-Q1-E1-D6
agcaaaatttggagaaatcgaacagacgatcgagatcgaggaaaatggcgtcgtggaattcgattccgctggagatctcgtacgaaatcgttggatggatcgcgtttgcttcgtggtcaattagcttttacccacagctgattttgaatttccgtaggagaagtgttgttggattgaacttcgacttcgtgatgttgaatttgacaaagcactcgtcgtatatgatctacaatgtctgcctctactttagtcctgttattcaaaagcagtactttgacacttatggcgataaagagatgatacctgtggctgcaaatgatgttgcattctcgattcatgcagttgtaatgacagctgttacactgttccagatctttatctatgaacgtggacctcaaaaagtatccagacttgctataggtattgtggtt

SEQ ID NO: 14372 - DNA, 495 bp, Arabidopsis thaliana
  unsure at all n locations
  Clone ID: LIB25-112-Q1-E1-D7
gnnnnnnnnnngnttntcnaccgntcggnaccngtcacagaantcccgggncgacccacgcgtcnncctcaacacaaaatgttgatgccgagatgacagctaaatgtgacggtcttttcaaggccatgtctgcattgagtgctagtaaaggcgtcaaatcagcggatgctgggagtatgaagatgaccatgttgtcgatgggaaagactttggttgagcagaagaagaatacaaagataatgacattgaaggaaaagaaagagttggtcatagatatggtgaaatggactaaaatggtcgctacatttgtgaagtcggcctccgagcagaaaggaaagtctatcaatatagcatcttatggtcttgatgtcgatgttaacgatagttctattgtcggtggagctgcaagtagtgaatcatcctccactaaatctggatctgtttccagtancggaagtgtttctaccaagtcnaaagaatcgagtagtagtggaa

SEQ ID NO: 14373 - DNA, 424 bp, Arabidopsis thaliana
  Clone ID: LIB25-112-Q1-E1-D8
cagctgttgtttcttagttgactccctctccgacgaaaatggtgtccacgagcaagatcaaatccgttgatttctataggaaaatcccgagggatttgacagaggcgtctctgtctggtgctggattgtccattatagcagccctctctatgatatttctatttggaatggagttgaataattatttggctgtcagcacttccacatcggtcattgttgacaggagcgctgacggagacttcttgcgcttagattttaatataagcttcccgtcactttcatgtgaattcgcatctgtggatgtcagtgatgtattaggaactaacaggctaaatgtaacaaagacaattcggaagttttctattgattcgaatatgagacccactgggttctgagttcatgccggggaagtttatcactcatt

SEQ ID NO: 14374 - DNA, 320 bp, Arabidopsis thaliana
  Clone ID: LIB25-112-Q1-E1-D9
acctttctctcccctgtatatgtagatgcttcttgatcaaatggagacctagctagcactccttctccatctcttttcatttttattgattttgtcacagcatcatctacttttgtattattcttttagttctctgatgcttcttctctttctttctttttttgggtgggggtatttgtatttctagtcataacctttctcgcctgcagatatgtgaaagatagagagagagttgataacttttttctttgtgtcatgagagtgagtgactcggagggctcaataatatcataaacttgcagaaaaaaaaaaaaaaaggg

SEQ ID NO: 14375 - DNA, 417 bp, Arabidopsis thaliana
  unsure at all n locations
  Clone ID: LIB25-112-Q1-E1-E1
tgaagatggagtggtgaagaacaaaaccgtataaccgttcggttcagaggtgccgaaccgaaccgacccgtaaaccgaaatcctcaaaagaaattgccgatcggtttgctactgttcaaaacctcggtgccgagaaccgaaactgtcggttttttcggttcgggtttctcggtttcttccgaactcccaagcctaatttggttttanttttcacgaagttttgcttctcctttcatcggcgacgacgacgtcgagtttctgtcaaaacgttaacgattcgactcnancgtccacagtnagagaagaagacagcgattgtgtgtanatngacggggaacgtgtgtcnattcgtctcgatngacggagaatacgtttcgattcggtttcgattcaaatcggagaatttgaggatctaaa

SEQ ID NO: 14376 - DNA, 498 bp, Arabidopsis thaliana
  unsure at all n locations
  Clone ID: LIB25-112-Q1-E1-E10
nnngnaacgttngcagctctnnncgctcgncacaggtcttagnctcgcgggccganacangcntctananngtntnctatcatctccggcgactccaggagcgcctctttgcacctctcttcttctctcgctctctgtttctgaggttctgcaagaagtaaancatgtcagttcttattgtgacgagccttggtgatatagtaattgaccttcactcggataaatgccctttgacttgcaagaacttccttaagctttgcaagatcaagtactacaatgggtgtctttttcacactgtgcaaaaggatttcacagcacanactggtgatccaactggtacgggagctggtggagattcaatctacaaatttctgtacngtgagcangctcgtttttacaaagatgagattcatcttgatttaaaacattcanagaccggcactgttgcaatggccaatggtggagagaactcantgcttcccagttctatttcacact

SEQ ID NO: 14377 - DNA, 427 bp, Arabidopsis thaliana
  unsure at all n locations
  Clone ID: LIB25-112-Q1-E1-E11
aaggagatttagaatagctagagatgagcttatgaatttgaaagatgcattggggattggtgatgagagagatgatgtgattgtcatcgcagctaaattctttgaaatggcagttgagcagaatttcacgaaaggccgcagaactgaactagtacaggcttcctgcctctacttgacgtgcagggaattgaacattgcgttgcttcttattgatttctcaagctaccttcgagttagcgtttatgagttaggttctgtatacttacaactctgtgaaatgctgtaccttgtggaaaatcggaattatgaaaagcttgttgatccttcaattttcatggatcgattctcaaacagcttattgaaaggaaaaaataataaagatgttgtggcaacagctagagacattatanctagtatgaagagagat

SEQ ID NO: 14378 - DNA, 54 bp, Arabidopsis thaliana
  unsure at all n locations
  Clone ID: LIB25-112-Q1-E1-E4
ttaattcatcgaattattcatgaattttcggtgttatcgcgtcatctnntggat

SEQ ID NO: 14379 - DNA, 396 bp, Arabidopsis thaliana
  unsure at all n locations
  Clone ID: LIB25-112-Q1-E1-E6
ggctctcaaattcatactacttggcaagcttgctcgatttccctcgtacagccaaattgtgctatgggaatcaaaattaacagtcgcagaagccagtaataatggagtcgttgcttcgagctgatcaaaccctaattccgggagcgatgtgtagccgcagagtttggacacactcagaactggctcttccctcagtgagcgtaactgaattggatctggtgaaaagtctattacaagctttgcaaagtccgtcaatcccttccttttctgggaaccaaactggacaaactttccgcgccaaaaatcatataagcgtcccccaatttgtcccaatcnaaccntcangttccttccccnctgggnttccggaatcccgctanaatggtttgnaaaccc

SEQ ID NO: 14380 - DNA, 490 bp, Arabidopsis thaliana
  unsure at all n locations
  Clone ID: LIB25-112-Q1-E1-E8
ctttgccgccccgtacgaacaaaaattcccgggncnacccacgcgtccntgagagttcatgagattcctgccatgaaggntactgccttgaggtttactgaganggctaaggctaagaattgagaaagctggtggagagtgcttaacctttgaccancttgctctcagagctccattgggacagaacacagttcttcttagaggaccaaagaactcgcgtgaagcaatgaagcatttcggacctgctcctggtgtgccacacagtaacactaanccatatgttaggcataanggaaagaagtttgagaaagctanangaaagcnaaaagaatccttggattcaangtccaaaaagatgttttcctgggttcnttttgcctgggttaagtaaccaagttttgggtaaggaaanccgggtcctccttaaccngttncagacttggtttaaattccggtttttcaatcccaaagacaattgggtaaaaaaaaa

SEQ ID NO: 14381 - DNA, 478 bp, Arabidopsis thaliana
  unsure at all n locations
  Clone ID: LIB25-112-Q1-E1-C3
ttcttgcccgcccnggtcaagcaacccgggccggcccacgcgtccngaaagacgcaatgatttagacagagacgatggaaacaaagagcctttggtcgtggatagtagcgatagtacagtgaacaacgaagctcctttgccgcaaacgaaactggttgccctgcagctaacaacagatcacagcacaagcatcgaggatgaagtaacaagaataaaaaacgagcaccccgatgacaaccattgcatagtgaatgacagggtgaaaggacggcttaaggtgaccagagcgtttggagcgggattcttaaagcagccaaaattgaacgatgctttgctggaaatgtttcgaaacgaatacattggtacggatccatacatatcatgcacaccttcccttcgtcactaccggctaacagagaatgatcagtttatggttctctcatcggatggattgtaccaatacttgagcaatgtggaa

SEQ ID NO: 14382 - DNA, 417 bp, Arabidopsis thaliana
  unsure at all n locations
  Clone ID: LIB25-109-Q1-E1-H1
ttnattttatttaggaaactttgtcttttttccttcctctgcgctgtcttcttcaaaaaacaaaatattttgttttttgttctattagtaactttgctttctccacaattcaaagctaatttagttctattcatttttccctctctcttttgcaaagatttggtagaagaagaaaaataaaaagagttataatcaatcagatcttgttttaaagtgcagactctttattctctccctcacctaaggcttcagaaccgtaantttaaaacnaaaancgaancaatnccnggagaataggaaagaaataattgatggttcaagtgaagacaannaaaaaaaagcgaagacttacatccgggtcatcganttgagaaagtctcttattgtaactcaagttccgcaatgggtaggnacaaa

SEQ ID NO: 14383 - DNA, 511 bp, Arabidopsis thaliana
  unsure at all n locations
  Clone ID: LIB25-109-Q1-E1-H10
nnnngnanttccacgccgctcagtagnnctganaanngtcatnagnccacggggccgacccaagcgtccanttctgcccaaaccaaaaaaaaaaagtttccaggatccaaaattacaacaaagattctcaaactcctaaaacttcatcttaaaaacttaacaaacaaaattctaattacgaaaaatcccaatcctagtgtttctcttgttggcttttttgtttgatctgtctgtaattttttttttgtttgatctgtggtttgttttgtaaaaattccactcgtcagcactcagattaatctcttgtccattgatctatctatcgacttgcttcgacttttgatttgagatttgcgaaaattaaggtttttgtttcgaaattagtgtttgtgtcanctaaatgaacgattaatctaagctggatgaatcccgccaactccaanagcaaaatggattggggcaagcctccaacggcaacagaagggatgaatcccgccggccggccgtnaaa

SEQ ID NO: 14384 - DNA, 545 bp, Arabidopsis thaliana
  unsure at all n locations
  Clone ID: LIB25-109-Q1-E1-H3
nnnnngnaacttcnacgcttgnacggtaccggtcncnaatncccgggncgacccacgcgtccacaacaagcagaagagattcgattctccattatcttccttctaaatgccttccctaatgttatctgataagaaagaggagaagaagatgaagaagaagatggctttggataccccagagcttgattctaagaaggggaagaaggagcagaagctgaaactatctgattcggatgaagaagagtcggagaagaagaagagtaagaagaaggataagaagcgtaaggcttccganggaggaggatgaagtgaagaagcgatcaagctccggagaaagaaagaaagaagcaagcaaagaanggttaaagtttgggccgtttgaagggattgtttgaaagtttgataanccctaatgcctgtttcctaaagttttccggattttctgccgccctttgaaggggaaaaagccttaaaggcnaaatnggtaattgaaagctcctttttcccgaattcaaggcttccaacgttttgataatgggttccnc

SEQ ID NO: 14385 - DNA, 493 bp, Arabidopsis thaliana
  unsure at all n locations
  Clone ID: LIB25-109-Q1-E1-H4
nnnttgccgngccggtcanagtcaancgggccgnggccnncgtccngtttcatcttgcttttgagaaaaaataattatatatttttatatangaaagggttaatttattaataaaaaaaaataaaaagaagcagaaaagagataatgcagggtggtaggcttttgacggtgttggtgtgcctcgcctccacggtggcgttggtgagcgccggtgacccttacttctactacacgtggaacgtaacctacggaaccgccgcgcctctcggaattcctcaacaggtgattctcatcaacggacagttccctggtcctaacctaaactcaacctccaacaacaatgtcgtcatcaatgtcctcaacaanctcnacgaagccttcctccttgaactggaattgaacccanccccagggaanaanccatggcaaaaatggtnttaacngggacctcatgccnaanccaacaggnancaaanttcacttacaatttcca

SEQ ID NO: 14386 - DNA, 432 bp, Arabidopsis thaliana
  unsure at all n locations
  Clone ID: LIB25-112-Q1-E1-A12
tagggttcgttgattctctttttgattacgaaagcttaagatctcttttggtggatttttgggtttatccatctatggtggatcgcagatcttttggctctataactcctcctctccaattanatatggaacagttgctgtcagaagcccaacacaggtggcttaggcctactgagatttgtgaaattcttcagaactatcacaagtttcatatagcatcagagtctcccacccgacccgccagaaggtactgagatattttaggaaagacggacataactggaggaagaagaaagatggtaaaaccataagagaagctcatgagaagctcaaggtaggaagcatagatgtgctacattgttactatgcacatggggaagccaacgagaatttccagagacgttgctactgggatgcttgaacaacatttga

SEQ ID NO: 14387 - DNA, 414 bp, Arabidopsis thaliana
  unsure at all n locations
  Clone ID: LIB25-112-Q1-E1-A2
tgtaagcggatttcatcagcattcagcagccagacgaaacttttaacgatctaccatcgaaccaggtctctcatatcttccgatcatcttctccgattacgattctttccttctcgtttttagattagctcagaaatttttctaaccttttcttctctgtcgatctaacacctgacctcgatttttcgttaccgataccaccattttcgaggtcagagctaccgttttcgtatctgtgttatcatatccggattaggttttgattttatgattacatttgttataatcagtgatttgttgtttattcgcgatcctcggattttcgctggatgatcttttgtgcttcctctatacgttttctaaacctagatttggatcgatttgggatatgagaagcgtgtttgtncactgttt

SEQ ID NO: 14388 - DNA, 402 bp, Arabidopsis thaliana
  unsure at all n locations
  Clone ID: LIB25-112-Q1-E1-A6
gattatctgagagagagagagaagaaacttgttgaaacaaaatcaacaacaacttatagaagaccaaaaaaagattcataggatcttttgcttgacaatgaaagaaggaaaggatgggtttgttcgagcagatcagattgatctaaaaagcttagacgagcaactagagagacacttaagcagagctttgactttagagaagaacaagaagaaagatgaagaanacacaaccgccgtcgccatcggtggctctgcttcttcttcccctgtcactctaaacggcggcggatttgttggcaagaggaaacagagacttgagtgggagatcgatccttctaaacttatcatcaagactgttcttgctcgtggcacttttggtaccgttcancgtggtactacgac

SEQ ID NO: 14389 - DNA, 501 bp, Arabidopsis thaliana
  unsure at all n locations
  Clone ID: LIB25-112-Q1-E1-A7
nnnntnnnggnaacttttactctgccccgcccggtncaaancanagnattcccgggccgacccacgcgtcnagcaatgtaatcatcctaatgttgtccgctacctagggagttaccaaggagaagattatctttggtgatggagtattgtggaggtggaagtgttgctgatcttatgaatgttactgangaggcgttagaggagtatcagatagcatatatatgtcgggangcgttgaanggccttgcatacttgcactcaatatataaagtccatagagacattaaaggtggaaatatcttgttaactgaacaaggagaggtcaagttgggtgactttggggttgcagctcaacttactcgcactatgtcnaagcgaaacacgttcattgggactccacattggatggccccagaggttattcaggaaaatcgttatgatgggaaagttgatgtntgggctcctgggtgtttcagctattgagatggcagangggctccc

SEQ ID NO: 14390 - DNA, 504 bp, Arabidopsis thaliana
  unsure at all n locations
  Clone ID: LIB25-112-Q1-E1-B11
nnngnnnnntttnnnnngcctctacgccgcccaagtaccggtcaagcattcccgggncgacncacgcgtccgcccacgcgtccggagcgttcagatttctcttcaacataatcatggcattgaccttcttcttcttgttatcgaatttgttcttctccggagttatgtcaaggagcttcacattttcaaacaaatgcgattacacagtgtggccgggaattctatctaacgccggagtttctccattaccaaccaccggcttcgtcctcctgaaaggcgagacgcgtacaatcaacgcaccgtcatcatgggggggtcgtttctggggaagaacactctgctcaaccgattccgatggaaaattctcgtgtgccaccggagattgcggctccggaaaaatcgaatgctccggcgctggagctgctcctcctgcgactttagctgaattcactctcgatggctccggaggactcgattctacgatgtcagtctcgtcgacgggta

SEQ ID NO: 14391 - DNA, 502 bp, Arabidopsis thaliana
  unsure at all n locations
  Clone ID: LIB25-112-Q1-E1-B4
gnnntnnnggnaacttttacttcgnccggccaccggtcanagnaatcccggggncgacccacgcgtccaacaaacaaaaagttgaagctgaattttttttgcaggttttaagttaaagatgatgcagaagaagctacttcttatagtatcaatcatcttgaatctcgtattcaccattcatattctttattatagttcaaccacatggaatccaacgtggaccaacagagctgcagcggaagcagaaactgtagcctctttttcatgctcaggccacggcagagcttttgtggatggtcttggtgtccttgacggccagaaacctccttgtgagtgcaacaattgctacataggaaaagattgctccgttcttctcaaagattgtcctgtcgatgctaactcaggagaccctttgttcttggagcctttctggatgcgacaagcagagagaagcgcgattttggtctcgggatggcacangatgagttatatatacgaagat

SEQ ID NO: 14392 - DNA, 227 bp, Arabidopsis thaliana
  Clone ID: LIB25-112-Q1-E1-B5
agtggaagaagaagcgtatgaggaggcttaagaggaagagacgaaagatgagacagcgttctaagtaaatttgcctttgaagacaatgcgactctgtttcttgcttctctccctttctctcttgcaaacattgttcttactataagcttccttttatgtttcagacttgtttaagattttaatcaaaaagaaagtttcagactttaaaaaaaaaaaaaaaagggcgg

SEQ ID NO: 14393 - DNA, 428 bp, Arabidopsis thaliana
  Clone ID: LIB25-112-Q1-E1-C1
caaagccagagatggagccttaaggccaagaccgtacttgtaaccggtggaacaaaaggcatcgggcatgctatagtagaggaatttgcaggatttggagcagtaatacatacttgtgctagaaacgaatatgagcttaacgagtgtttaagcaaatggcaaaagaagggttttcaagtcactggttcggtctgtgacgcatctttgagaccagagagagaaaagctaatgcagactgtgtcttcaatgtttggtggaaagctcgatatcctcataaacaatttgggagcgattcggtcaaaaccaacgctggattacacagcagaagatttctcgtttcatatttcgacaaacttagaatctgcttatcatctgagccagcttgcgcatctctgcttaaggcttcaggatgtgggaacataatttca

SEQ ID NO: 14394 - DNA, 427 bp, Arabidopsis thaliana
  Clone ID: LIB25-112-Q1-E1-C12
tctgtctgtctttctctctcagagaaatggctcttcttctagtttcttcttcctcctcctatgccctcagagtcaccattttcttgtctttcttcttctttctctgcaatggcttctcttaccctactacttcttctcttttcaacacccatcaccatcgtcaccacttggccaagcacaactacaaagatgctctcactaaatcaatcctcttctttgaaggccaaaggtcagggaaacttccttctaaccagagaatgagttggagaagagactctggtctctctgatggctctgctcttcatgtggatttggttggagggtactatgatgcaggagacaatatcaaatttggtttcccaatggcattcacaaccacaatgctttcatggagtgtaattgaattcggtggactcatgaaatctga

SEQ ID NO: 14395 - DNA, 498 bp, Arabidopsis thaliana
  unsure at all n locations
  Clone ID: LIB25-112-Q1-E1-C2
nnnnnnnngnaangtttattcngccaggccacggtcaagccancccgggncgacccacgcgtccncccacgcgtccgcaaagctcagtgtttaataattgtatagcttttttggtgaacgaagagtcagatcggcgagcctgagatgggttggggttcggtgttgctattactggcggtggctcttctttgtcagagggcaagttcaatcggagctaactggggcacacaggcgtcgcacccacttccaccggacatagttgtgcggatgctaagagagaatggtattcagaaagtaaagctctttgacgccgaatacgacactctcagagctttgggcaaatccggaatcgaagtcatggttggtattcccaatgagatgcttgcgactctcgcctctagcctgaaagctgctgagaaatgggttgctaaaaatgtctctactcacatctccaccgacaacgtcaacatcagatatgttggctgttgggaatgaacc

SEQ ID NO: 14396 - DNA, 413 bp, Arabidopsis thaliana
  unsure at all n locations
  Clone ID: LIB25-109-Q1-E1-G7
cagccgccgtcccaattgctttgccgccaccgaagcaaagagtagagagataatggctgaggaagaagctaagggtttggattacataccggagatagtactgaagaagaggaagaacagagatgagcttgcctttatcaggaagaagcaacttgagttgggtaattccggcaagaagaagaagaaagtctctgatatcaaacgtcctgaagattttgttcatgagttcagggctaaggaagtagatatgatccggatgaagcaaaagagtaaagaggccaaagtcatctcctccaccagttaaatctgacctggttttcatcatacgcattcaaaggcaaagaaatgatatgcaccaaangaccaagaggatcctaacaatttgcaactaaaganctctttactggtgtatt

SEQ ID NO: 14397 - DNA, 104 bp, Arabidopsis thaliana
  unsure at all n locations
  Clone ID: LIB25-108-Q1-E1-F2
nancagcaaaccgttggttcaattgagaaaggtggaaacaatgttnaagttctaaaaaggagttantggctgggattctgggaccgggactcaagggatctanc

SEQ ID NO: 14398 - DNA, 432 bp, Arabidopsis thaliana
  unsure at all n locations
  Clone ID: LIB25-108-Q1-E1-F3
tactgagaacgaatttgagaaaaaactgttgtcggatgtcattccacctagcgatataggtgtttcctttgatgatattggagctctggaaaatgtgaaagaaacgttgaaggagttggtgatgcttcctcttcagagaccggaattgtttgacaaaggccagctcacaaagcctacgaaaggtatactgttgtttggacctcctgggtactggaaagacgatgctggcaaaagcagtagcaactgangctggcgcaaatttcatcaatatctcaatgtccagcattacttcgaagtggtttggtgagggagagaagtacgttaaagctgtcttctccttagcgagcaagattgcgccaagtgtcatttttgttgatgaggttgatancatgtttgggtagacttaaaatccaggggaacatgaanctatgc

SEQ ID NO: 14399 - DNA, 427 bp, Arabidopsis thaliana
  unsure at all n locations
  Clone ID: LIB25-108-Q1-E1-F5
tttacttcattctctgtgaaactatactgcatataagcttactgggtttttcttggataagatttcaatttcgaaaaatgcagctttagcaataagataattcataggagttttgaggctagatttgttctttcaatctgaagtttctttctttttgtttgtctgaaatgagcagtgacagctttggttgctgtgaagaatgaattgaatgatccgtacaaagttcttgagaattgggatgtgaattcagttgatccttgtagctggagaatggtttcttgcactgatggctatgtctcttcactggatcttcctagccaaagcttgtctggtacattgtctcctagaatcggaaacctcacctatttacaatcagtgggtgttgcaaaacaatgcaatcactggncaantccgggaaacgattggg

SEQ ID NO: 14400 - DNA, 407 bp, Arabidopsis thaliana
  Clone ID: LIB25-108-Q1-E1-F7
cgccaataatggaactcttcttccaccattttcctggaaaatctcggtatcgagaagatgaatccctagacagataaatctagaatcactcaaatctctgctcttcttccgattcagatcgtatcgaattttgaattttgtatctcgctacactgttcgattgagaattctttttttccgattgattcgaatcggattttgtttttttcctcgatatagaatgacttcgaatcaacgtatgttgttctactcctgcattgcgaaaggaacagtgattctcgcagaattcgcttcaaaggaagagccaggaatcgaagatctagctttgagatgcattgagaacgtactccacatcattcgatgatctctcacacagtccataagagaactacgctttggattatcga

SEQ ID NO: 14401 - DNA, 437 bp, Arabidopsis thaliana
  Clone ID: LIB25-108-Q1-E1-G1
aagaagagtagacttcccatcatcctccgctataatgcgccactctccgcgttatctataatacgctagtattccgtgcccgctataatgcgcaagtctccgtctcagcctctcttcgccgtctgatgtctgatcttctaggtcacctccacaaattcgaacaagaatttgtctttatgtgcaaaaccaaaatgggagtcaatgcttcagagccaaaacgaacacgatcgcgaccaagtcaatcgcaggggaggcatccgtcgacgaagacgatctccgtcaacgagcaacaccggcacaacaacaaccacgacgacatcgaattctaacaaaactggtgcctcctcttcctcctccggtgcgggcttcttcctcaagtcgctagtcgaacatctctcgctagtctccggaaatcccttacgggaaatcctcacatg

SEQ ID NO: 14402 - DNA, 431 bp, Arabidopsis thaliana
  unsure at all n locations
  Clone ID: LIB25-108-Q1-E1-G10
gtgctctgctagatctatctttctttcaattcttcaccagagatcgtcgagactcaccattgaaatcgaagaaacagcaccaatttccacttcaccaccgaaagagagagacagagaggataataaaaggccgccatggatttagatcaatggatttccaaggttaaagacggccaacatctctctgaggacgagcttcaacttctctgcgaatacgtgaaagaaattcttattgaggaatcaaatgtacaacctgtcaacagtcctgtcaccgtctgtggtgatatccatggccagtttcatgatcttatgaaacttttccagaccggangtcatgttcccgagaccaattacatatttatgggggattttcgttgataganggtacaacagtcctgaagtttcaccaatcctttgcttcctaaagcaag

SEQ ID NO: 14403 - DNA, 506 bp, Arabidopsis thaliana
  unsure at all n locations
  Clone ID: LIB25-108-Q1-E1-G11
gnnngnaantgttacgcctgccttttaccgggccnagaattcccggaatcgacccacgcctccgcccacgcgtcnaagcccacgcgtccggnaganacacantnaaatggcgacggtacaattgtccacccantttagctgccanaccagagtttcaatctcaccgaactctaaatctatctccaancctccgtttctggtaccggtgacctcaattattcaccgcccgatgatctccaccggaggaatcgctgtttccccccgtagagttttcaaagtccgagccacagatacnggagagatatgatcagctctattggcggcggaggaagcaattgaagacgtggaagagacggagcggctaaagagatcgctcgtggattcgttgtacggaacanntcgaggtttaagcgcatcgagcganaccanagctgaaatcggagatctaatcacacagctcgagtctaagaacctactccagctccgacgggaagctcttttccttc

SEQ ID NO: 14404 - DNA, 507 bp, Arabidopsis thaliana
  unsure at all n locations
  Clone ID: LIB25-108-Q1-E1-G12
aantgttacgccagcctgtacgccggccgagtattcgcgganatcgatccacgncctccgaacagactctaaattgcacatgtccnagtaactacaaganatgtcaaactgtccaannacgcnactccttttaacgggcgttgccccatccaccaccgtgcgagttacaatcntccaatcctccaccgtctataacganactcctgccantatanacanagcggagnagtatattgtggnggcggcaagcaagggagcatanctagtgttgttcccggaggggtttatcggtggctatcctcgaggttttaggttcggtttagcggttggcgttcataacnaanaagggcgtgatgagtttcggaagtaccatgcttctgctattcatgttcctggccctgaagtagcaagattggctgacgtggctangaaaaaccatgtgtacttggtaatgggagccatanagaaggaanggtatacctctactgcacaattctttctttngcc

SEQ ID NO: 14405 - DNA, 440 bp, Arabidopsis thaliana
  unsure at all n locations
  Clone ID: LIB25-108-Q1-E1-G2
gactatttggaattttgataattgtgggatgtacgctaatttttgggntcactgggaacattatttatagttggaggttatttgttctctttgaatcacgcacgggtggtggttcttatggcgacaatgtatgcaatgtactgtgtcaaagtcagacttggatggcctggagttattctctcgatgaatcttgcattcttgtccaacgatatatttatttgtcttcttcaatggtgtgatactgttagtgaaaaaacacangtggaggagccaacnaaacctgaaactgtaatagacgaagagtttccaggagagtttgagtattcttctgttcctgctgaagaagcagagaaaaagttcatgaagataagtcgtccactaagccaacatcatcgtcaactgttgtcaataacatgaaagggnattcnaccggtaaaggg

SEQ ID NO: 14406 - DNA, 431 bp, Arabidopsis thaliana
  unsure at all n locations
  Clone ID: LIB25-108-Q1-E1-G3
cttttgagtattacatccaacgaaacgtctctttctttctctctgataggcaacaatggcgcagaggaagatgattgtgtttcccaccaagaatgaattgtccgaagcaatggctgagtacactgccaatctctccgccaagttcatcaaagagaaaggcttttcaccgttgttctctccggcggtgacctaatcgattggctctgcaagttggtgcaacctccttatattgattcaatcgaatggccaaaatggcacgtcttttgggtcgatgagagggtttgtgcatgggaagattcaagacagtaactacaaactcgccatggagggttttctctctaaggttccgattccggataagaacatctacgcaatcgacaagcacttggcggctgatggtaacgccgaacactgcgcgangctctacnang

SEQ ID NO: 14407 - DNA, 404 bp, Arabidopsis thaliana
  unsure at all n locations
  Clone ID: LIB25-108-Q1-E1-G4
acattgcaaatgttcacgacaaggcttatgtctttggcctagaaaagtgtaggcaatggatgaggcttcagattcgggactaattttcattgaaggctctggaccaacatatgccacttcaacgacattccaagattcacttatcgcagcaggagccggaatggctttagttgattcagtgatcgcagcatccagaaacagcgtagatccacccattggttttgcattgataagacctcctgggcaccacgccgtgccaaaaggtccgatggggttctgtgtttttggtaatgtggcaatcgcagctcgtcatgcccaacgcacacatggtctgaaacgcatcctcataattgactcgatgttcaacacnggnaatngnacaaatgangcatttaccggnggac

SEQ ID NO: 14408 - DNA, 434 bp, Arabidopsis thaliana
  unsure at all n locations
  Clone ID: LIB25-108-Q1-E1-G5
tctgcaactcaaaaaataagattgtgaaaaaccctaatcgtaatctctcggttgagtcagtcttaaggtatcaatggggaaaaacaagagagagaggaaagatggagaagagaaatctccacacgctgccgccactgtttgcgtctctggcttgccttattccatcaccaacgcacagcttgaagaagcctttagtgaagttggcccagtcaggcgttgctttctgggtcacaaataaagggtctgatgaacaccgcggctttgcgtttgttaaatttgctttacaagaagatgttaatcgtgccattgagttgaagaacggttctactgttgggggccgtatgattactgttaaacaagctgcacatcgaacttctcctcaaagagcgtcgaacaaaagcaactgaaagggattcccgtacccggataaatnc

SEQ ID NO: 14409 - DNA, 428 bp, Arabidopsis thaliana
  unsure at all n locations
  Clone ID: LIB25-108-Q1-E1-G7
gtganngagaacatttcatatacagttgtttctaataagaaaaaggagattagcganaactcaaaacaggaacaaagttaaaagagtgagagagaaagaaagagagaagatgaaggtacaggagggtttgttcgtggtggctgttttctaccttgcttatacgcagctagtcaaggggcaacctcgcaaggagtgccaaactagatgtggcaatgtcgcagttgagtacccttttggtacttctccaggttgttactatcccggagatgaaagtttcaatcttacttgcaacgaagcaagagaagctcttctttggcaacatgccagtcatcancatgtctctcagcgggcagcttcgtgttcggctagttaagatncaacagttttgcnccaannngtcaanggaaacngccnggactnacattgcc

SEQ ID NO: 14410 - DNA, 331 bp, Arabidopsis thaliana
  unsure at all n locations
  Clone ID: LIB25-108-Q1-E1-G8
ggnnnnnnngnaangtttattagccgccggtaccgaacaaaattcncgggtcgacccacgcgtccgcggacgcgtgggatcgttgcttactacatcttggctacttccagcaatggatacgacccaagcttctttggatgattcgtttcaatgtcaatctctcgtatatgtatatgtatatgtttgacttgtgttgcaagctatctaatctgttctctatctctgtttcttcttctgttgttgttgttgttgtctaagacttgtccctctttttgcaaatgttttatttctccatttacaaaaaaaaaaaaaaaaaaaaaaaaaagggcgg

SEQ ID NO: 14411 - DNA, 428 bp, Arabidopsis thaliana
  unsure at all n locations
  Clone ID: LIB25-108-Q1-E1-G9
atggaggtgttatctacttcctcacctctaacgcttcactcccaccgactcctctctgcttcttcttcttcttcacatgtcacctccatcgccgcttcttcactttcttcattcgcttcttcatatctcggaatctccctttctaaccgcacgatccaccgcttctccacaactccgacganncttaagacgatttcctcaaagaaaacggaagaaattcactccgatttcaagcggttttcgaacggttcaccgaacgagcgatcagagctataatcttctctcagaaggaagctaaatcgttgggaaaagatatggtttacacgcagcatcttctcttagggtttgatcgctganggatcgtgatcctcaaggcttccttgggattccgggtatcancatcgacaaggctcgtgaagcntttgggg

SEQ ID NO: 14412 - DNA, 517 bp, Arabidopsis thaliana
  unsure at all n locations
  Clone ID: LIB25-108-Q1-E1-F12
nnnngnaantgttacgcctgccttttaccgggcccnagaattcccggaatcgacccacgcctccgcacgtggcgnggggattccaagaaacaaacgatggnaaaaaggataaagacttttccaacaacnggcgggtgacggcgtcctgattcccgtccnataacacttggcaaatgtanagttatgtactattggttcaaaaagattcaagcttctgctggacccggttctgaaatgggtgggtttactcggatcttgcattccggtaaaccggatcagtatatggatgagattcctacttttgttgctcagcctttaccttctgggatggatcagggttatgttgtgttgaataggccatgggcatttgtacaatggcttcaacaaacagatataaaagaagattatattttgatgtctgagcctgatcatatcattgttaaacctataccaaatttggctaaagatgggcttggagctgcgtttcccttcctttacattgaaccgaaaaaagtat

SEQ ID NO: 14413 - DNA, 423 bp, Arabidopsis thaliana
  unsure at all n locations
  Clone ID: LIB25-108-Q1-E1-C7
acaaacccaagatctgaaaaagtttttgtcttttctctcccaatcgcctgattcaagcctaaagctcggtttttttcttctgggtatttaggggttaagtgtattgtagaaaagcatggcgagtttgagtgggagttggagagatgcgtataaaggaatgtcatcggataatataaagggtttagtattggctttatcttcaagcttattcattggtgctagtttcattgttaagaagaaaggtctcaagagagctggtgcttctggtctcagagcaggttctggaggttattcttacctgcttgagcctctctggtgggtaggcatgataacgagtgagttcccttcatatttaaagtgattgtaggggaaattgccaattttgctgcttaagcctttgcncctgcaatttaataactcccc

SEQ ID NO: 14414 - DNA, 430 bp, Arabidopsis thaliana
  unsure at all n locations
  Clone ID: LIB25-108-Q1-E1-D1
tagtttcttcttgcttttgagaaaaaataattatatatttttatataggaaagggttaatttattaataaaaaaaaaataaaaagaagcagaaaagagataatgcagggtggtaggcttttgacggtgttggtgtgcctcgcctccacggtggcgttggtgagcgccggtgacccttacttctactacacgtggaacgtaacctacggaaccgccgcgcctctcggaattcctcaacaggtgattctcatcaacggacagttccctggtcctaacctaaactcaacctccaacaacaatgtcgtcatcaatgtcttcaacaacctcgacgagcctttcctcttgacctggagtggactccaagcacangaagaactcatggcaagatggtgtgactgggacctcatgccaatcccaagcangcacaaact

SEQ ID NO: 14415 - DNA, 506 bp, Arabidopsis thaliana
  unsure at all n locations
  Clone ID: LIB25-108-Q1-E1-D11
nnnggaantgtttacgccngccttntaccgggcccaaaaattcccgaatcgacccacggcctccgggatcaccatnacttttgtaccttccttgtactacctatggcgtctgctagcttcgttaagcctaacaccctctcttctccatggatnggncaacgctcctttgctcacacctctgcttcttcttctcctcctcctcgagtctccttcgcgatncgcgccggtgcttactccgacgagcttgttaaaaccgccaaaagcattgcatcccctgggagaggtatcttggcgatcgatgagtccaatgcaacctgtgggaagaggcttgcttctatcggcttggataacaccgaggacaaccgtcaggcctacaggcaacttctgcttaccactcctggcctcggcgattacatctctggttccattctcttcgaggagactctttaccaagtccaccaaaggacngtaagacctttgtcgattgcttgcgcgatgccaaaatc

SEQ ID NO: 14416 - DNA, 427 bp, Arabidopsis thaliana
  unsure at all n locations
  Clone ID: LIB25-108-Q1-E1-D12
nnnggaantgtttacgccngccctttaccgggccaaaaaattcccgnagtcgacccacgcntccgcccacgcgtnacgcgggacgcgtgggtgccactgtacatgctgttgtggaaagtcaaggtttgaatgataaagtggtagtcttcaagtacaagcctaagaagaagtaccgtagaaatatcggtcacagacagccgaatacgaggattaggattaccggaatcncagggtatgaagaagtaccaacctcgcccaatgttgcagttggagaagtaaatccttgacacaaaaatgtttcttgaatgttaaaatttttctgatcttctctatgtaattttgtaaggaccctggtcatttcatttctgctgagattccttttattaatatgtaccttttgccaaaaaaaaaaaaaaaaaaagggcgg

SEQ ID NO: 14417 - DNA, 490 bp, Arabidopsis thaliana
  unsure at all n locations
  Clone ID: LIB25-108-Q1-E1-D3
ctgtttattccngccgccaccggtccaaaaatcccgggncngaccaacgcgtccgcattaatanaaaagaagagaaaaataaaaaagtttgtgtaaattttttttgcacactccacaagcctaaacccaacccaaaatcacaaaaaccaaaaaaatatataataatgggtggctgtgcgagtagacccaaggaatcagacatgcaaaacgaagaaggctctgttcctaacaagcctgtctctgaaaacgtagtagccaaggagaacaacacagaaagcggtgagaaacagaaccagacagtggctgagaccactgaaacaacttctgtcgaagctaaggagacatttccggtcgagccgaccaaggaaacaactcctgctgttcaaccagaggttgcagccgtcgaagagtcttcttctgctgatgctggtgangctgcagtagttgcacctgagaaagttggagaacgctgcaacagaaaacgctgaag

SEQ ID NO: 14418 - DNA, 432 bp, Arabidopsis thaliana
  unsure at all n locations
  Clone ID: LIB25-108-Q1-E1-D6
ccaaaaaaaactcttcttttttctatctttcacgcgttgaagattcttgattttctttcttctccttccttacacgaccactgatatgtgtcggtgactgaaaccatctgttctcttttgcctctgatttatcgatatgttttaaagaaaaacggtgtttgaaacttttgtaatttaaggttcatcaaatactcagatcttgtctgagaaattaagctgaaatctgataaatgggtttgtttaaattcatcttcttgttatctcttctatggagtttctacagtttaggctcatctcagctacaagcttcacaagcacaagttcttcttcagctgaaaaaacacttaagaatatccacaacaagctaagaatcctgggaatgattacangaaccaaatttcggcaacttacaagcaanaccaatcgatgnag

SEQ ID NO: 14419 - DNA, 419 bp, Arabidopsis thaliana
  unsure at all n locations
  Clone ID: LIB25-108-Q1-E1-D8
ctctccgcccatctctgctctcttttattttcccagaaagttttttttttttttttccgaattccgttaatctcattggggtttccattgatagcaatggcgacggctttcgctcccactaagctcactgccacggttcctctgcatggatcccatgagaatcgtctcttgctcccgatccgattggctcctccttcttctttcctcggatccacccgttccctctcccttcgcagactcaatcactccaacgccacccgtcgatctcccgtcgtctctgtccaggaagttgtcaaggagaagcaatccaccaataataccagcctgttgataaccaaagaggaaggattggagttgtatgaagatatgatactaggtaaattcttcgaanacaagtggtgcccaaagtantaccgggg

SEQ ID NO: 14420 - DNA, 668 bp, Arabidopsis thaliana
  unsure at all n locations
  Clone ID: LIB25-108-Q1-E1-D9
gnnnnnggcccngttcctanangnccggggcnnctaanaaanatttccccccggngnaanaaacccnannccccaaaggggcccctnccngggggacggaaacngggggcccaaaagggggnnaaaacccccttttttttcaaaggaaggtcctccaaccttttccggttcctaaaccttttccccggggtttttccccggcccggccccggtngaaccaatggtccggcctccggaatttccggaatttcccccccggttttnaaaaggaacccccggggtttccctccaacaacctttacctggaaacccggttnangcctggttataaatttngcccttacttncttccttccctccctcctttggtccgaacaaaaaagccggggttgggttattgggggtcttgggtggagaaagaaaaaagaaaagtgggatttaccgggagatagtgggcatctgggtgacccgggttctgcacgagaaggccgagaagttgacccgggagaaatcgggtcggagcgtattcagaagataattgatgatatgattaaaagttatgagattgggctcctggagttggnctcgctgctcctcaaattggtgttcccttaaggattattgtattgggaagatacaaaagagtatataagttacgcaccaaaang

SEQ ID NO: 14421 - DNA, 283 bp, Arabidopsis thaliana
  unsure at all n locations
  Clone ID: LIB25-108-Q1-E1-E10
cccaanctccttncaacaaaatnnacaggaacaaaccnccaaanaaagctncttgaaaanattcaatggnggattggctcttcnaacttcggttctaagcagtgcaacagctcctgctaaatccctgacgtacgaggaagctctgcaacaatctatgaccacttcttcatcttttgattcggatggtctgattgaagggatatccaattttgtcacagacaatcctttggntaatgccggtggagttgctgcantggctgttncaattgttccgtccaaggtc

SEQ ID NO: 14422 - DNA, 409 bp, Arabidopsis thaliana
  unsure at all n locations
  Clone ID: LIB25-108-Q1-E1-E12
nngnaangttagcagctntacgggcagaatccgaatcgaccacgcnccggagacaaagctcnagaagcactgatccatggacttcgtggaaactganaaaatccgacaacggtcctcagaggcncaantcaaaacttttctctctgggtcctacttctacttgggacaactgagtacgatcttatcttaaattcacggcgaagattagaataaagaattactttcttaactaaaatcaagcagaagatgctagttgcagtgtctctccttctcactccgtccaaatcgganacaatcttgncacggtcactcgtcggcantnctcctgctctcgtcgactcatctncgcnctacctctcncacgncaagtctggatntctttcccagaaacatgtcnctcaataaacgg

SEQ ID NO: 14423 - DNA, 432 bp, Arabidopsis thaliana
  unsure at all n locations
  Clone ID: LIB25-108-Q1-E1-E3
aacactattatagaagctcttacaaagaaaaaatatgaagaaagctacggcattgatgaaacatatcgttgcattgttgagttccatggcgaaggcaaaatctatagccataaagaacaaaacgagtgctttcaagacacgagtactcatgttgtctctagtgaaacacaagaaactcgggttccgttccatttccaacaagattcaccacctcttgggccatgcggatcaagacgacgataacgaccaggaccaagacaagaacaaggctatagtcctctacaacagcaaggcatccacaatggctcatcatgaggaatatgacgttcacgaggaggaaagcgacaagtatcctgatctgaggcacacgttgttcgaaggagaagangacttcgggggacttggaggaaggaaggtcaaggtaattctgtt

SEQ ID NO: 14424 - DNA, 445 bp, Arabidopsis thaliana
  unsure at all n locations
  Clone ID: LIB25-108-Q1-E1-E5
gctgactcccaaaatcgatcaagatttttagctacgattcaaccgctgccgttagattacaggcgaatgaatctctagagaagctatcggaatcggtgaatgcaatgatgacggagtttcaatcgtcgattacgaaggaatcgtcgaaatcggcgatttctggcggcggagttcatcagctcacgaggtatgtgatgaacttcatcgtcttcctcgcaggactacagcgattctctcgccaccattctcaaggagtcatcgntacctttaccggaggattacttcagtagcaacggcgannagaatccangatccggtgatcgttctccgatggcgggngagactcgcctgggttgattcacgncgtgctctgtanagatccaacggccnaatctcncgggnnagcnaanaantncgggnggggatcgagaggcntccttngcgg

SEQ ID NO: 14425 - DNA, 478 bp, Arabidopsis thaliana
  unsure at all n locations
  Clone ID: LIB25-108-Q1-E1-E9
agatacntcttttctttacatgggaagacttttagaaggctttggcgttgggatcatctcttacactgtaatactgaacttaactagctatttacttatggaataacggttcagtatattaatgcaactcggttcgtgattttaggtacctgtatatatcgctgagatagctccacaaaatatgagaggaggattgggttcggttaaccaactttctgtgacaattggnataaagttgggcgtaattacttgggcctccttggtnccatggagaaatccctgcanttccgggggaaaaatgccgtgtacaattaaatgggtaaccaaggtccccctttttcaancccccggaaatccccctcccctggggctngggnaaaaaatngggtaatggnccaanattnnaanttttgaaaancttcaaattaaaagntcctcccaagggattttggaaacgggaanttaaccgntttaaant

SEQ ID NO: 14426 - DNA, 212 bp, Arabidopsis thaliana
  unsure at all n locations
  Clone ID: LIB25-108-Q1-E1-F10
cnaaggnaaaanttcaanctccaattgaccccgccaattgaccaaattggaaaaaaaaccaaanccccccccttggccatatgcnagaaagttctgtctcttgatgggagcacttgcaatgaanctttgaagttgtttacagaaaccaaacgaattttgtcancaagcatgtctaacattggaagtggaacnccggaagaagtanagaggtc

SEQ ID NO: 14427 - DNA, 488 bp, Arabidopsis thaliana
  unsure at all n locations
  Clone ID: LIB25-108-Q1-E1-C5
ngttattnnggcngccnnngnnggacanaacattcccggggccgacccacgcgtccagattgacaagataaaatgtgagaacctagcgaaaagactactttcgttaatgctgaaactagctgcagtttttcgttatactccgcttgagcttctgagaagccagactacagtcagcccttcaagtctaacagaagatgacagtcggtgcagcctcatctcaccacctcctagagagcccacaatgaaagaccggattcttccatgtttggaacgtattcagaaactggagaaaagttatgaggatattcggaacaaacccgttgcaatacctgtagagaaggagagaatgttgatggattctttagatagaatcaagtcagttgagtttgatctcgacaaaacaaagaggcttttacacgccacggtgatgaaacaagatggagataactgaaatgctgcaaaatatacgangactccccaacttcana

SEQ ID NO: 14428 - DNA, 501 bp, Arabidopsis thaliana
  unsure at all n locations
  Clone ID: LIB25-108-Q1-E1-B11
nnngnantgttagcgcctcnacgccgntcantactggtcgnaccgacccacgcnnccgngaagagagtgagtagagttatatattacacacataaaacttagatatagtagtgttatattcttgattaagtaataaagatgaaaggtgggaagcatggagaaaattaagccgatattggcgataatttcactgcaatttgggtatgcaggcatgtacatcatcaccatggtctcgttcaaacatggcatggaccattgggttcttgctacataccgtcatgtcgtagccacggttgtcatggctccctttgctctcatgttcgagaggaaaattaggcccaagatgacactagcaatattctgggaggcttcttgctcttggaatattagagcccctcatggaccagaatttgtactacatangattgaaaaacacatcagcatcctncacttctgcctttaacaatgcacttccgccgtcaccttcattcccgcctcatt

SEQ ID NO: 14429 - DNA, 430 bp, Arabidopsis thaliana
  unsure at all n locations
  Clone ID: LIB25-108-Q1-E1-B2
tggcgagtaatcaacaaccaccgtcgaatctacagacctacggtgtaccaatttacgccgtcgactggattctagaggaagctgtcagatccaaaatcactaaggatcaggatgatgatgatgatgatggatcgtcgtcgtcgtcgtacatcgttttatccggcggaggaggagaaggacgaagtggaatacctaatgtcatcttaatctgtcgtgttgatctccacaccaattctctctctgaacaacctattggtaggcgtgtgattggcactgatctaccttatcgtatggctattcatcctcgtcaaggtggtcctatttgtgcattgcctaacagttgcanactgtttgattgggaaaacattatagaggatgataatgangaagagtcanagaaagttgttaaaagagttaaaaagatttgggg

SEQ ID NO: 14430 - DNA, 426 bp, Arabidopsis thaliana
  unsure at all n locations
  Clone ID: LIB25-108-Q1-E1-B3
cttcaagttttccatatactaatggggaggttcataaatttcctctcctangtttaattctgtccccggtctgaccggctcacttatcgccgccaatgaagtatgcctgttctagtaccgatatacactttactcgtgccaatttccctaaaggtttcatttttgggtaccgcaactgctgcttttcaggttgaaggagctgtaaatgaangatgtagaggtccaagcatgtgggacgtatacaccaagaaattcccacataaatgtaattatcacaatgccgacgttgctgtcgatttctaccatcgttacaaggaagatatcaagttgatgaaaaatctgaacactgatggctttagattttccattgcatggcccagaatattcccccatggtaagatgganaaaagggataagcaaagcaag

SEQ ID NO: 14431 - DNA, 416 bp, Arabidopsis thaliana
  unsure at all n locations
  Clone ID: LIB25-108-Q1-E1-B4
gggtgatggtgttgaggcaatggctgatgttggtggaagcgttctcaccggaattaatgggaatccgcttggggttttggcgaggcaacttggtttgcctcttcataaggttagagatatttgtcctttgtatcttcccaatggagagcttgctgatgctagtgttgattctaagattgaggcatcgtttaataagttgttggatagagtttgtaagcttagacagtcgatgatanaggagaataaatcagttgatgtgcctttgggaaaagcgcttgaaacatttcgattggtttaaggggttgctgaggatcagcaagagagaatgctcttagattggcatttaacaaacttgggatatgcaaatgctacattgtttggggaatctgtcaaanggcgtantgggntnaagaatg

SEQ ID NO: 14432 - DNA, 429 bp, Arabidopsis thaliana
  unsure at all n locations
  Clone ID: LIB25-108-Q1-E1-B5
gttcaacttcaatgactaccccaatggaatggtcacactcttcaatctgctagttatgggtaactggcaagtatggatggagagctacaaagatttgacgggcacgtggtggagcattacatatttcgtcagtttctatgtcatcactattttacttctgttgaatttggttgttgcctttgtcttggaggcgttctttactgagctggatcttgaagaagaagaaaaatgtcaaggacaggattctcaagaaaaaagaaacaggcgtcgatctgcanggtcgaaagtctccggagtcaagagagttgatacacttcttcatcacatgttggggtgatgaactcaagcanaccangagtgttccacttctgacacatangncaaganaagatcgntaagagcttatttagacgtttaaanctgtgaatc

SEQ ID NO: 14433 - DNA, 427 bp, Arabidopsis thaliana
  unsure at all n locations
  Clone ID: LIB25-108-Q1-E1-B7
taaatcaatcaacaaaacaaaaaaaactctatagttagtttctctgaaaatgtacggacagtgcaatatagaatccgactacgctttgttggagtcgataacacgtcacttgctaggaggaggaggagagaacgagctgcgactcaatgagtcaacaccgagttcgtgtttcacagagagttggggaggtttgccattgaaagagaatgattcagaggacatgttggtgtacggactcctcaaagatgccttccattttgacacgtcatcatcggacttgagctgtctttttgattttccggcggttaaagtcnagccaactgagaactttacggcgatngaggagaaaccaaagaaagcgataccggttacgggnacngnantgaaggcgaaacatncananggantgaggcaaaaaccctggggg

SEQ ID NO: 14434 - DNA, 682 bp, Arabidopsis thaliana
  unsure at all n locations
  Clone ID: LIB25-108-Q1-E1-B9
gnnannnnngntttttanggcnnggggccccgtcttaacgngcggggcncnaanaatatttccgccgcgnnaanccganntcccaancgggcgcctcccggatacggaaccttaattncacaanagggaatttcccctttccaaaatcctttcccctcctggggtttccggaatgggtttaagnaatggggtcccggggtttttggaatnccctccaaaatccccggccccggcctccaatttttccttccggggtggttttaaccggaacggggncccaatggggcggggtttcctccaaggggtaanccgaaactaattggttgagaagaaggggatgcatttggggctttgggcggggaggggaagaataagctaaagggggaaaacccgatgcctcctggccgaatgggtggataacgttgggctgggagaaagttgggaaagaaagctccntttcaaactccgttccctganaagtttgactccgggagaattgagtcagttgcgccgggagacggttggggtcaacgtcggtgggttgccgttgttttcccgtctcacatcttcgtcgctaactgcggtgactctagagccgttctttgccgcggnaaaactgcacttccattatccgttgaccataaaccgggatagagaagatgaanctgcgaaggattgaanc

SEQ ID NO: 14435 - DNA, 422 bp, Arabidopsis thaliana
  unsure at all n locations
  Clone ID: LIB25-108-Q1-E1-C1
gagagagagagacacacacacagcgagtgaaaatgtctccggagaagaagagtcaaaacttccctccaataacggaatgcagagacggagagtacgattcgatagccgccgatcttgacgggactctgcttctctcaagaagctccttcccttacttcatgctcgtcgctgttgaagctggaagccttttacgtggactaatcctccttctctcgttaccattcgtcattatctcttacctattcgtatccgaatctcttggtatccagatcctcatcttcatctcattcgctggtctcaaaatccgcgatatcgaacttgtctctcgcgcagttcttccacggttttacgcggcggatgtgaggaaagacagttttgaggtgtttgataagtgtaagagaaaagtgggtagtgacngggaa

SEQ ID NO: 14436 - DNA, 520 bp, Arabidopsis thaliana
  unsure at all n locations
  Clone ID: LIB25-108-Q1-E1-C10
ttcttcnattanccgccatggtgaagtactcncaagaacccgacaatcagaccaagtcntgcnagggtaaaagatncgatnttaaggntcacttcaagaatactanggaaacaacgcacgcaatcanggaagctaccattgatnaagggcaaanagggtacctttganggatggtgaataagctcaacaaagcaaagcaatttcccttcaacaacgttttcctngcaagaanggtgttttgggaagaaactggctcaaagcctaaagaaacaaggcaactcctaaatgggtccaanggaacgtttgggccaagcccaaagttctggctcaagttttggttccttgantttgctcaaagaaacgcctgaagaagcaaattgcttgaanggttgaaaaggtttgggatgtttgaattgccctccttcaatatcacaacatcccaaagtnaaaccaaggccgcaaaagcaaaagggagaaaggactttaccgtgcctcacnggaaagaatcaaacccnttaca

SEQ ID NO: 14437 - DNA, 504 bp, Arabidopsis thaliana
  unsure at all n locations
  Clone ID: LIB25-108-Q1-E1-C11
nnngnagtgttacgccngcctttaccgggccaagaattcccggaaacgacccacggnccccgagattantctcactgtgaagtcgaagaacgaaaccctagttcccatggatctctcttcacgcttctcatngatccttatccttctcttgatctccatctccatagcttcggctgagattcgtaaatcagagatccgatccgatgatcgtccaatcatccctttagacgaattcggtttcactcacagcggtcgtcttgagcttgacgcttccaagatctggctttccaacagcaatcccgatctcgatctctccaaagtgggcttctttctctgcactagagacgcttgggttcatgtgatccaacagcttgaagaagaagagatcacgtgcgctctacaatcagatctcgttaagcatgtgttcaccttcaacaatctcaagggaggagataagagcagattctcnaccgtattcaccgaagaacgatgcggatcagtact

SEQ ID NO: 14438 - DNA, 356 bp, Arabidopsis thaliana
  unsure at all n locations
  Clone ID: LIB25-108-Q1-E1-C12
cgncttcgtgnaatgaaacctagagagcgtgaggggagagaagaagaagtctgggaaccgggtttggggttgcnacnctngttnaaggggtaaagannaattcacctccgtgaatgaaaacctaaagaangtgagggagaaactgtagaagtttttcgggtgttgaaatgattgctggtttttaataaggtctcaaaagttactatgttttcagatgttcttaacttgttatgaaaagtaaaatcgtcaaaagttgaataaagtgggtactttgttttagtcgtgcaaaaaaaaaaaaaaaanaaanaannacaaaaaaaaaaaanaaaaaaanacaaaagcanaaaaaancaaat

SEQ ID NO: 14439 - DNA, 430 bp, Arabidopsis thaliana
  unsure at all n locations
  Clone ID: LIB25-108-Q1-E1-C3
atcttctacatctcttcccatctgtctctcatagatccatccaatgggcttccttcgtggaatctggttgggnagtaccttgtgacacattttagcgactttcaactggcatgtattgggagttttctcctccatgaaagcgtgtttttcttatctggactccctttcatttttcttgaaaaggcaaggctttctcagcaagtacaaaattcaggtttattctcttcttattatttatcttttacaagtgtcttctatgtatgcaatcatagctttgtgtgatggtttgaatatgatagtctagaggttgatccccaagaattcagtctcacgtgaaaagtgttttcttatgacaggctgatgtccatttcaagcgattactaataattgtgaatatganccttttccaaggctcccctaaccctttaag

SEQ ID NO: 14440 - DNA, 434 bp, Arabidopsis thaliana
  unsure at all n locations
  Clone ID: LIB25-108-Q1-E1-C4
tcgctcggaacttggaaagcagcgtaatcggtagggagtgatttgagttttggtgaggatgtctatggttgatgagcctttatacccgattgctgtgcttatcgacgagctaaaaaacgatgatattcagcgtagattgaactctattaaacggctttctatcattgctcgtgctcttggagaggagaggacaagaaaagagttgattccatttcttagtgagaacaatgacgatgacgatgaggtgcttttggctatggcggaagagttggggggttttattctgtatgtangaggggttgagtatgcatatgttctgcttccacctttggagactctatccactgttgaggaaacttgcgtganggaaaaagctgtggattcactttgtagaantggtgctcaagataaggganantgaccttggttgacca

SEQ ID NO: 14441 - DNA, 510 bp, Arabidopsis thaliana
  unsure at all n locations
  Clone ID: LIB25-108-Q1-E1-B10
nnnggaacttctacgccgncctgtaccggncccaaaaattcccgnagtcnacccacgcntccgancacgcgtccgctaacctttaacggttttcccatcttctctactcctctttctcttttctganaaacccaaaagacaaaaacnaagaanaagattaggaaatcatcttgagaaacaagaggtancaagagaatatgggggacaaagnaaaagtccttganggtgttttgaaaaaaactgtggattcggagaatgtncccaatggaaaaattttttgagaagccggagaatttaccagaaaaaggtctcactacagaaanctgctgatgaaaggctgggctcctttttggggcataacaagctcgaaagagaagaaggaaagcaaattcctgaaanttcntggttcatgtggaaccctccttcttgggttatggnagctgctgctatcatggctattgctcctgctaatggangaaggaaaccacctgantggcaagacttgttggt

SEQ ID NO: 14442 - DNA, 382 bp, Arabidopsis thaliana
  unsure at all n locations
  Clone ID: LIB25-106-Q1-E1-G11
gctcaggacgccaccggtaagtctggtggctctcttcggatacgcggagctacacgcgtccattactaagtatctccactcccagcagcctcccatcaacgctctggccttccccgacttctctcaaatctctctcctccttgctcatgatgatcagatcagccgaacctcctccttcagagatcctctcagcgtctccgattctgcttctcccattccttccagatgcggcggtattttgaaacgggactggttgcttaagcatcgcaccaaggtccctgcacttgtcgccgccttctttccctcacatcacatcttcngggattcaactcaaatgggtaacaaggtctgctccgattntcgaanagcctcaaaatccgtt

SEQ ID NO: 14443 - DNA, 474 bp, Arabidopsis thaliana
  unsure at all n locations
  Clone ID: LIB25-106-Q1-E1-G12
gngngngnaactttaantgncgggnccggtcanagaattnacgggncgagccacgcgtcanattcatctcctcctatcggactttgccacaccagatcggaaaatcccaatcctcttttcctttgttttttttgctatcttcaatcaaaaactctccgacagattcaatgaagcagcaaaagagataaaaccctaacaaaagtaaacaatcggagttttaatcttcttcttcttcgganccggagttttgtctgatctgtcggagangacgtgtcggcatctattaaaatcctagctggacttccanatcactttactcaattagaaactgttttgaggttacacaaagttagtnnnaaagcttataaaacaatgggaaacgancgaaagaccaagatgccnatttaagactaacaaaaccaaaaatntttcgggtcaaggaagttccccccaaaacgggtnaccaaaaattgg

SEQ ID NO: 14444 - DNA, 407 bp, Arabidopsis thaliana
  Clone ID: LIB25-106-Q1-E1-G2
actaatgagggatattttgatcggagtcaattacttgcacagccatggtctggctcacacagaactgagattggaaaatgtgcatattagccctgtggatagacatatcaaagtagggattctcggaaatgctgctgactttaacggggatgttccaagtactagcaacgcttacagtaccatggacagacgacaaatgatgatagcatttgacatgagatgtgttggattcatgatggcaaaaatggtacttcaagaattgatggatccattaatctttgcgaaattgaagtctttcctggcaaaggggaatgatccttcctcgctgcgggagttttttgtgacgacgctcaatacaaactctgaatctggaaataccggagtgcaaatacttgatagaaactggg

SEQ ID NO: 14445 - DNA, 412 bp, Arabidopsis thaliana
  Clone ID: LIB25-106-Q1-E1-G3
gagacagagagagtggatggatgtcttatagaatgaacaaaacatcctctgtttctcttgtccttgtccctttttccagatcttaaggttttccacattttatcatctgggtcctctccttaatgatttgaagacactcaattcctatttgatcggggactagaatttggattctgtttcagacaaaagtagatttccctgtctctttcccgtttgattttcaataagatgaatccggaggagcaaaagatggaatctgcatcggatctgggcaagctcttcattggcgggatttcatgggacacagatgaagaacgactgcaagagtattttggcaagtatgggagatttggttgaagctgtgatcatgaagagaccgtactaccggactgcccgtggctttgggttatcg

SEQ ID NO: 14446 - DNA, 407 bp, Arabidopsis thaliana
  unsure at all n locations
  Clone ID: LIB25-106-Q1-E1-H1
gtctcctaatcagaatctctgatttcccgatccggctaattcctcatcgtcggatcaattagattatcttatcccaaggagaggagtgtgtgtgantcggagagagcgagagacagagagagagagagggaaatgaacggtggtgatgaggtcgtcgcagcttcggcagacccatctctgcctttggaatggagattctctcaggtcttcggtgaacgaagcgctggtgaagaagttcaagaagttgatataatctcagcgattgaatttgataattctgggaaancatcttgctactggggaccgtggaggacgtgttgttcttttcgagaagaaccgatacaanaatagcagttggaaccagaagannactttgaaggangctgatttatcactngaggcatcca

SEQ ID NO: 14447 - DNA, 454 bp, Arabidopsis thaliana
  unsure at all n locations
  Clone ID: LIB25-106-Q1-E1-H10
cttacgntgncagntgncnggcanaganttaacgggncganccacgcgtcagctctttcaaccaatccgttgaacgtcgtcgtaataagcttcatcttcatcaatcatcatcactttcttctttctcccacagatccttccttttctccttcatcttccccttcttccttttccctcatcgcccaggaacacatccgatctgcaccctcttcgttcgattctcacaattaatatctagggtttgcgaggaccccccctctctattcaaaaaaagagagcagattttctctataatcccctttggtttcaagtggtgtaattggatcgtgtagctgcttttataatgacctctagcacgacaggagatngaagatggggtactacaagaaagaagtgggcatgaactaatatggggaaaaggttgcnggttcaaaaaccngattaacttaccaag

SEQ ID NO: 14448 - DNA, 304 bp, Arabidopsis thaliana
  unsure at all n locations
  Clone ID: LIB25-106-Q1-E1-H11
gaacggtttgcagttcatgggaggtcaagccgctggatacgcggctgcagactctgtccaggcacttcctcttgtaagcacattttggggtatagttttgttcggagagtatcgaaaatcgtcgaagcgaacttatgcccttttagttagcatgttggccatgtttgtggcggccgtagctattcttatggcctcttccggtcaccggaaatgatgatcttatcatagttgtattatacatgtaagattataagtgaatgaagaatatatgttctgtttcaaaaaaaaaaannnnnnnnnnnnt

SEQ ID NO: 14449 - DNA, 446 bp, Arabidopsis thaliana
  unsure at all n locations
  Clone ID: LIB25-106-Q1-E1-H12
tccagtgcccnggnaanggtcaaagggntccggcacgcgtcaagctganagctctcttacattgaagctactttcgaagatagcattcactgattggtaaagagttctagaagcgacgagcatcttctttagttcccgagttttctgcgtttgagaagtctgttctagaaagtaatgggtgacagcgaggccatggtttccgagggttatacttctgctccatatggagactataatgcttctgctgctactgtggaatcgaccgggcaagagactgcaccaattgttgatgcatcacactcggtcaacaatgattctttggtcaatggtactgcgccagttgaagaacggaagtgcaacagataatgtggctgttaactgctccaacaaccggaccatggaaacaatnacnggctctaaactctcaacggaanaaggagcctttg

SEQ ID NO: 14450 - DNA, 203 bp, Arabidopsis thaliana
  unsure at all n locations
  Clone ID: LIB25-106-Q1-E1-H2
nnnnnngnaangtaactcgcgcgnncggtacaggtcacngnngccgagtcctaaaagttggaanattagatttgaaattattttaatttttgtagagttttctggagatatttatgatcgtgattttgtacatataatatactccagaatgttaggggaaaatctttcttgtaagaacccttaattaaaaaaaaaaaaaaaag

SEQ ID NO: 14451 - DNA, 389 bp, Arabidopsis thaliana
  unsure at all n locations
  Clone ID: LIB25-106-Q1-E1-H3
cgtagaccgtcaaacgctcctccgtccgacggagaaaaaacgaagacggtgaagaagaagaagaagaagaagaagaagaacgactcaaagatctcatcgatcactctctccaagatctattcacgcatcgtcggaagaattttcgcttccgacgacgtttctctcgtctgattttgtctccgaacatcctacctaatcgtattcggtgctggatttgaatccggtgaactgaatctgacaatttcgttcccggaggtgtttaaaaatggccgggatcttgaataaattgcggaatctagatgcatatcctaagatnaatgaagatttttacagccgtacattatccnggcggagtttatcactctcctctcctccgtttgttatgttcc

SEQ ID NO: 14452 - DNA, 303 bp, Arabidopsis thaliana
  unsure at all n locations
  Clone ID: LIB25-106-Q1-E1-H4
ccngtacaggtcatagaattcccggncnnacgtccgcggaagcgtccgcccacgcgtccgcggacgcgtgggtaaattacttctgcaagctgcagatgcttcattcanaacattatagctttaatgggaaggggtagtttcacatctgtcanaacttaaaatggattcttgttaagtctctgagtcaatgcaatctttgtactgtatcattttctttatgatcaatgagagctttatttgctccaacaattttagtanangnggaagcggtgccccantngnagccgccgcacntgctgctgc

SEQ ID NO: 14453 - DNA, 404 bp, Arabidopsis thaliana
  Clone ID: LIB25-106-Q1-E1-H7
tagctttcttcccatacgtctctccgtttacgaccagtatacagaggctggagctggggaagaaaaggattgtctatggagggagacgtcggaataggtttggtatgccagaatactatggatgggaaggcgagtaatggaaatggtttagagaagactgtaccttcttgttgccttaaggctatggcatgtgtacctgaggatgatgctaagtgtcactccactgttgtttctgggtggttttcggaacctcaccctcgctctgggaaaaaaggcggcaaagcagtctatttcaacaaccctatgtgaacagaactttctcaactttcagtgagtgtgcttctcctggccacatagggttgttgaaatagaactcactgaaagttgagaaagttctgttcaaa

SEQ ID NO: 14454 - DNA, 406 bp, Arabidopsis thaliana
  Clone ID: LIB25-106-Q1-E1-H8
ctccctccgtcgtcggcctccgccgtaacgccactaggctcctccgtgattccgattgtgaacaagctccaagacatattcgctcagctaggaagtcaatcgacgatcgctcttccgcaagtagctgtcgtcggaagtcaaagcagtggcaaatccagcgttctagaagctctcgtcggccgtgactttcttcctcgtggcaatgatatttgcacgcgccgacctctccgtctccagcttgttcagacgaaacctagctctgatggtggatccgatgaagagtggggcgagtttcttcaccacgatcctgttagacgtatctacgatttctctgagattcgccgtgaagattgaggcggagactaatagagtatcaggagagaacaaaggtgtatcagatattccg

SEQ ID NO: 14455 - DNA, 396 bp, Arabidopsis thaliana
  unsure at all n locations
  Clone ID: LIB25-106-Q1-E1-H9
aaaaccaaaaaaaaaaaaaaaaaagagaaagaaaagaactcgagtgcaaaaagcttctctcttccttcccatggggtgcatttgaactaatctcctccttgaaatcgcttgattgattgttataaatcgattaatcgattcaaaccgttggatattattccaaaacaacccaaaaagagaatcccatgggaagttgtgtttcgtcgccattgaaaggctctccttttggaaagagaccggtaagaaggcgacacagtagtaatagcaagaacatcctctgttcctcgtttcgattcttcaactaatctttcccggagattgattttccaaccaacaagccgcgttctccccgaagcctaaccggngatggaattcactcaagntatgatttgggga

SEQ ID NO: 14456 - DNA, 391 bp, Arabidopsis thaliana
  unsure at all n locations
  Clone ID: LIB25-107-Q1-E1-A10
tgaagccagaagaccttgtgatgagagagctgattcaacaacaacagcaactacaacaacaagaatcaatgataggtgagtatgaaaagattgaagagtctcacaattataataacatggaggaagaggaagatcaggaaatggatgaggaagaactagacgaggatgagaagtccgcggctttcgagattgcgtttcaaagccctgcaaacagaggaggcaatggccatacggaaccacctttcttgacaatggttcagtaaaatcagaatcattgtttcaagaaaatgtacttatgtgtgcatagttttctaaacaaaacacccaaaaacacaaaacacaaacacacacacacacacntctgacaccacaactgaattacaaggtctca

SEQ ID NO: 14457 - DNA, 403 bp, Arabidopsis thaliana
  unsure at all n locations
  Clone ID: LIB25-107-Q1-E1-A11
ggaagtacaacaaagttctcaatgtctgttctcttgaaaaagacctacaaatgatggagtttggagataagactgagattggagaacgcggaatcaacctcagcggagggcagaagcaacgtatacagctcgcacgtgctgtctatcaggaatgcgatgtatacttgctcgacgatgtttttagcgcagtggatgctcataccggttcagatatattcaagaaatgtgtaagaggagctctgaaaggcaagaccgtattactcgttacccatcaagtggatttcttgcacaacgtggattgcatcttggtgatgcgggatggaaagattgttgaatcagggaaaatatgacgaattagtcagctcccgganttggattttggggaaacttggtggctgcacaa

SEQ ID NO: 14458 - DNA, 399 bp, Arabidopsis thaliana
  unsure at all n locations
  Clone ID: LIB25-106-Q1-E1-G10
agagactgtctgtacgcaaattgcactccttgtatcacggattgtgtcatggctgagttagagaagttaggtcagaagtatcgtgtagctctaaggattgcgaaagatcctcacttcgaaagactaccttgtatacacaaagggacatatgctgatgactgtctcgttgacagagttactcagcataaatgcttcatagtggctacatgtgatagagacttaaagcgaaggattcgaaagattcctggtgtgcccatcatgtatgtgactaatcgcaagtactcaatagagaagttgcctgaagctacacttgggggaactccaangtactgattaattaataagaaaccttatgaattccatgaanccctgaancctcaagcctganttgggtatcgg

SEQ ID NO: 14459 - DNA, 409 bp, Arabidopsis thaliana
  unsure at all n locations
  Clone ID: LIB25-106-Q1-E1-E1
actcttttttgaattttgattcttcttcttctccgtttctttcgctacttcctcagcttcgtcaccgtcgaaaattcttcacgttttcctcggaattttccaattgtcttctccaattctcttgcgatcgttgaagatctgaaaaattcgaagcgtttgatcatggcttcgtacactcccaagaacattctcatcaccggagctgctggtttcattgcgtctcatgtcgccaacagactcatacgaagctatcctgattacaaaatcgttgtgcttgacaagcttgattactgttcaaatctcaagaatctcaatccttctaagcactctccgaacttcaagtttgtcaaangngataacgccaagtgctgacttgggtgaatcanccttctcaacaactgaagggtat

SEQ ID NO: 14460 - DNA, 464 bp, Arabidopsis thaliana
  unsure at all n locations
  Clone ID: LIB25-106-Q1-E1-E11
gngngngtaanttctangtnccggggcggtcatagacaacgggncgagncacgcgtcnacncagacgtctgctaaacagcatcaatggcgacttctctctccgtttctagattcatgtcctcctccgccaccgttatctccgtcgctaagccgttactttcccccaccgtatccttcaccgcgccgctctccttcacacgctctctcgctcctaatctctctctcaaattccgcaaccgccgcaccaattccgcctccgccaccaccagatccttcgctacgacacccgtcaccgcctccatttccgtcggagacaagctcccagactccactctctcctacctcgatncatccaccggagacgtcaaaacagtaaccgtctcatccctaaccgccgggaagaaaaacaatcctattngccgttcccgggggcattcnnaacnaacatgctcnaaaaaanangt

SEQ ID NO: 14461 - DNA, 398 bp, Arabidopsis thaliana
  unsure at all n locations
  Clone ID: LIB25-106-Q1-E1-E12
tttgacagtggtggctacaacattaagactggacctggctgctcaattgagctcatgaaattcgacatgggcggttcagctgctgttcttggcgctgcgaaagctattggtgagattaagcctcctggtgttgaggttcatttcatcgttgcagcctgtgaaaatatgattagtggaaccggaatgagacctggagatgtcatcactgcctcaaacggaaagaccattgaggtcaacaacacagatgctgaaggtcgtctaacactcgcagatgctctagtgtatgcttgtaaccaaggcgtcgacaagattgttgacctcgctactttgaacgggggctggtgttaatgcccttgggaacttcaatggcaggaatctatacacctancgacaagctt

SEQ ID NO: 14462 - DNA, 390 bp, Arabidopsis thaliana
  Clone ID: LIB25-106-Q1-E1-E2
gcaaaaaaaaaaaaaaaaattcttcttttatggcattaacccttttgtctcacgaattatctgacctctgtatcggtaagccacctttacggtgtctctccgtcgccacagccaccgtagctgacgccatcgccgctctcaaatcctctgacgaaccgttcctcaccgtatggagctgtaatcacgatgagaaaacagatgataatgataagtgtgagtgtttgggtaagatctgtatggctgatgtaatctgttacctatccaaattcgacaacaatgttttgtctctttcctctgctttcgacgcatctgtctctgttcttcttcccaaatctcgtgccctcgtcgtccatgttcaatcttcttgcagtttgattgaagctattgatt

SEQ ID NO: 14463 - DNA, 279 bp, Arabidopsis thaliana
  unsure at all n locations
  Clone ID: LIB25-106-Q1-E1-E3
ctcgtctctccaanacgcttctcgacggtcgttccttcaccctcaagtaccagttacctagcgaagaccttgactctctcatctccgtcactaccgacgaagatntcgacaacatgatcnaagagtatgaccgtaccatttccgcttccaattccaccaaaccttcgcgtctccggttgtttctatncacctccaagcctgaggctactcaatctatgggtcagatccntgagagctctgncaanagcgannattggntcctcaacgcactcaatagng

SEQ ID NO: 14464 - DNA, 403 bp, Arabidopsis thaliana
  unsure at all n locations
  Clone ID: LIB25-106-Q1-E1-E5
atgccataanacattccaaanngggtttaacanaaatatgcagaactcaggtttggatgatctatttgttatcacaaaganaaagatgaaggttgctgttatgtggcaagatggnanctgcaatctgggagttgattcccaacagctgcttcctgttggtgctgttaatgctcatgatttttggccctaaaagtttgttgtggaaaaggaaacctgcaacagcaannnatggggagttgtgaaggntgtcaatgctaaggaacanactgtgaaggtacaatgnacaatacaggttgagaaagaagcaacangttgtgttgatnaagtgatggaagaaattgtcattgcatatgaactgccttagcaanctgaatttgggatccngttcaccnatgtggttgtg

SEQ ID NO: 14465 - DNA, 403 bp, Arabidopsis thaliana
  unsure at all n locations
  Clone ID: LIB25-106-Q1-E1-E7
cccattcggttggagaatccccatgttatatcctcaaatcagctatgggctggagttgtaagtactggtccatcagggtacgttcttaattctagctaccgcaatcgtgatgtcccagagtacaaacaagaacttgggaatgccatagttaacttttctcgagtcgtgcctgaaggactgctgatatttttcccttcctattaccttatggactcttgcattacattttggaaaaatgggtgttacagaaactcaatgacagtatgggaaagaatttgcaagctcaagaaacctgtcattgaacccaaggattcctccctctttcctgcagcaatgcgggacttttcagaaaaantgcaagacagaancaacttcgggtgtggtggttttttgccgttgtcgc

SEQ ID NO: 14466 - DNA, 412 bp, Arabidopsis thaliana
  Clone ID: LIB25-106-Q1-E1-E8
gatgatgtacgcgccgccgccaccgatgccgttctcaccttatcatcaatatccgaatcaccaccactttcaccatcaatctcgtggtaataagcatcaaaacgcttttaatggtgagaataaaactatttgggttggtgatttgcaaaactggatggatgaggcttatcttaattctgcttttacttccgccgaagagagagagattgtttcgctgaaggtgattcgtaataagcacaatggttcatcggaaggatatggatttgtggagtttgagtcccatgatgtagctgataaggttttgcaggagtttaacggggcgcctatgccaaatactgaccaaccttttcgtttgaactgggctagttttagcaccggtgagaagcggttagagaacaatggacctgatctc

SEQ ID NO: 14467 - DNA, 469 bp, Arabidopsis thaliana
  unsure at all n locations
  Clone ID: LIB25-106-Q1-E1-E9
gnngngtaantctacgcttcacgggccggtcacaaattaacgggccganccacgcgtcaancccaaaccaaaccacccttcaccctaaaaatcgtttcatcttttttccttcttctaattttttttaggtttttaattaacttttgcttcaagttttcttctatagatttcttactcagaaaagtttcgaattcgaccctgtagcttagttgttgtttataatttcttgtgatcattcacagtacaaaaaaactaattcacccaccgacttcttcttcttcttctcttctctgtggcccatccttaaacccacactgcttttgcttttcctttttttttccgggaaatttgatctctttacctttcgtcattattangtagggaatgatcntttagttttttttttgtntcccccaaatcncaatttttcccannttcctccnncaancntnnaanatttnaaaanaag

SEQ ID NO: 14468 - DNA, 476 bp, Arabidopsis thaliana
  unsure at all n locations
  Clone ID: LIB25-106-Q1-E1-F1
nnnngnaanttacttgccggcccggtcaagaatacccgggncgacccacgcgtccgcccacgcgtccggttcaactaataacgcaaaaatcagtttctctttgagtaagtgtttattacaattaaactaactcaggcaagtctatgatcatggcttcttctgctgctgcatcgatctctatgataactctaaggaacctctctcgcaatcatcaatctcaccaaagcacttttctcggtttctctagatccttccataaccaaaggatctcatctaacagtccaggtctctccacacgagcaagatccaccacttcctccactggaggtttcttcagaaccatttgcagcagcagtagcaatgactactccaagaccaactaagattcaagagcttaacgtctacgagttcaacgaaggtgattgaaacagtccaagccggtttttaaaactangggaaaaaaccagnttnagctt

SEQ ID NO: 14469 - DNA, 395 bp, Arabidopsis thaliana
  unsure at all n locations
  Clone ID: LIB25-106-Q1-E1-F12
ggtggaccaggacacggaatttccattggaagtcttggaagataccctaatgagcaaccagtaaaaggagtcaccgtgaggaaatgcctcatcaagaacactgacaatggtgttcgcatcaagacatggccaggatctccccccggcatcgcctccaacattcttttcgaagatatcacaatggacaatgttagccttcccgttctcatcgaccaagagtactgtccttatggccactgcaaagctggggtaccatcgcaagtgaagttgtcagacgtgactatcaagggcattaagggtacatcagcaacaaaagttggcttgtgaaactaatgttgcnancaaaanggattgccttgcaccaatattgctctctctgacatcaactttggtcc

SEQ ID NO: 14470 - DNA, 418 bp, Arabidopsis thaliana
  unsure at all n locations
  Clone ID: LIB25-106-Q1-E1-F4
ctgaaagcatctgttggactcttttaaatcagcaagatgagacagttgtctggaaaaagactatcaacaccaaatgttatagttcccggaaacctggagtgggcccttctgtgtgtaccaaagggcacgatgttgagtctccttattacaggccgcttcagatgtgtataggtggaacacgtagccggaggtggattcccattgaaggcaggacaagatggcctagccggtctaacatgaacaagactgaactttcattatatggtcttcaccccgaggtgcttggagaggatgctgagaactgggaagataacagtgagagaatactggtctctcntgtctcctctgatantctctgatcatccaangaagacccggcgatgaagatccntcaccgcccttataacaatgctcagag

SEQ ID NO: 14471 - DNA, 64 bp, Arabidopsis thaliana
  unsure at all n locations
  Clone ID: LIB25-106-Q1-E1-F7
tactttggctnactanaacatccataaataatctacacttcatcttgtgttgaggcttanagga

SEQ ID NO: 14472 - DNA, 416 bp, Arabidopsis thaliana
  Clone ID: LIB25-106-Q1-E1-F8
tccgatacaatcaaataatataaataccataaattgaattcctaatcggggttccttctataaatttatttatttgatttattggaaaaaataataataatatggggatgtcaaaaagtatcaaggttattgtatctcttgctctcatattatttttggcccttgcagcaaccaaggttgaagccacaagatacataagttatcgtggtatgaatcatggagatcatgctatacattgtgacaaagcccaccctaacacctgcaagaagcaagtagcaaatccttacaggagaggatgcggaacaatcgaacgttgccgtcgtgatacaggtagaaaatgaatcaaaccaaacccacccaagagcataaaataattgcatcaacacctttggttaagaatgtgttaacatgtttcc

SEQ ID NO: 14473 - DNA, 407 bp, Arabidopsis thaliana
  unsure at all n locations
  Clone ID: LIB25-106-Q1-E1-F9
tggccatgttcaaaaccttatcttttttgttccttttgtgctttcagatacatggaacggtggctgcagatgaaaattccttgttttcattcaatggttttgtaaaatctccgagctttgacaagagggttgctctgtttggagattcgaagctggtcaatgacagttctttgattcagctgactgactcagtgactcgaagcgttggtcgaagtcgtttacaagaaacccatcaatcttttcaaaggtaaacagaggaattcgagatctttctctactcacttctcgttttcttccatgtccaacgaagattggtgatgaatgtcntggcttttgtaatgggntccatccaatttggatcntagttcgtttngggtagaaaggacaacnanttccccngcttaagg

SEQ ID NO: 14474 - DNA, 425 bp, Arabidopsis thaliana
  unsure at all n locations
  Clone ID: LIB25-106-Q1-E1-G1
tcacccaagtttccctgcaaaaccctaaatccaagctcatcaaacactaaacaccaatcgaaatctccgatnctactaccgattaactcaataaatcggngatngggagattggagtctctgttcatcggncagatttcaaaatccgagcgacggncatcgacgacgaatggggtcaaagatggagtggagaagagtattgcctcatcttcaaaccgtatcggtagcaagataaagcaatcgaatccgtggagggagacggagaggctaaaagagatcactaacggattccgttgtacngaacagatngaaggnttaagcgtatcnagtgatacgaagagctgagatnagcgaagctcatcacaacagctcgagtctaagaaccctactccagctcctaacgaagctctgtttctcctcaacggg

SEQ ID NO: 14475 - DNA, 470 bp, Arabidopsis thaliana
  unsure at all n locations
  Clone ID: LIB25-106-Q1-E1-D9
nntngngtaactttacgctggncangtgccggtcanagaattaacgggncgacccacgcgtcanctcctggtgaagacagtgaagtcatcttataccctcaagccatattcaaggatcctttccgtagaggaaacaacattcttgtcatgtgcgatgcgtacactcccgcgggtgaaccaatcccgactaacaaaagacacgctgcggctaaggtctttagcaaccctgatgttgcagctgaagtgccatggtatggtattgagcaagaatacactttactccagaaagatgtgaagtggcctgttggttggcctattggtggttatcccggccctcagggaccgtactattgcggtattggagcagacaaatcttttggcagagatgttgttgattctcactacaaggcctgcttatacgctgggattaacatttagtggcatcaatgggaanaagtcatgccggggtt

SEQ ID NO: 14476 - DNA, 416 bp, Arabidopsis thaliana
  unsure at all n locations
  Clone ID: LIB25-106-Q1-E1-B3
gccatcaaaatcatcgagaagtcgtgtatcacacgtcttaacgtctcttttcagattaagagagagattcgaacactcaaagttttgaagcatccaaacattgtccgattacatgaggtcttggctagcaaaaccaagatttacatggttctggaatgtgtcactggaggagacttatttgacagaattgtctcgaaaggaaagctttcggaaacacaaggacgaaaaatgtttcagcagttgattgatggagtcagctattgtcataacaaggtcgtttttcacagggatctcaagctagagaatgttcttcttgatgcaaanggtcacattaagatnactgattttggccttantgctccgtctcaacattatnagggaagatgggttgcctacatacaacttgtgggtaatcc

SEQ ID NO: 14477 - DNA, 413 bp, Arabidopsis thaliana
  unsure at all n locations
  Clone ID: LIB25-106-Q1-E1-B5
nggtggtggttcgtacacaggacagatgttgaacgatcatagtggtgccacgtataatgttaatgggatccgacggcggtatttgatccagtggttatggagccacgttgttagttactgtaccggacccaatgcgcttgattagtgaatgaatggtatggtttgtgtttaaatttgggaagggtaattttgtcttttggaatttgagctcgacattgtggaattattatgatcaagaatgggtttgttgtgtcgatgcataattaaaattagttaatgatagttatgaggaaagtcacgtatgttgcttatctttcttcttcttgttaaaacaaagccaatcttaatgcataatataaccttgggttgtcaaaaaaaaaaaaaaaaaagggcggccgcccnaaaaggatcca

SEQ ID NO: 14478 - DNA, 461 bp, Arabidopsis thaliana
  unsure at all n locations
  Clone ID: LIB25-106-Q1-E1-C10
nnngngnaacttcnaccgnacngtccggtcacaaattaacgggccgacccacgcgtcangtgaaatggaagtttcagtgattggaaatcctcaagcgaggatctgcagagcagaattagcttacagagagcttggatttagatttggctctgatgtaatctccggtgaatcgagaaatagggttagtttctgcaaccaaagctctaaatggaaagagatcgcgatacgttgctcttcgagatctgtcaaatgtgaagccatcgtctccgatgacgcttctccgtttctcaaatccactccaaaatctaaatcgctcgagagtgtaaaattatttgttgggcttccgttagacacagtttcagactgcaacaatgtgaatcacttgaaagctattacagctgggcctaaagctttgaanncaccttggtntagaaggtattgagttaccnancttttggggg

SEQ ID NO: 14479 - DNA, 401 bp, Arabidopsis thaliana
  Clone ID: LIB25-106-Q1-E1-C11
cccacgcgtccggtccgtcgtctttcttctacctccgaccgcttcatctcttcagttcaactgcgaaagttcctttttgtccctctcttcccagacaatttcgattaagcccttctcgatcttcttcctttcgtcggatggaatcttctccggcttcttcttcgtctccgacgccggtaaccgattcatctgctgattctttagcgaaagatctgcagaatcaaagtctgggagctgttgatgaaggtgttaagattaaaaagaagctcgaagattttaactgggaccattcctttgttaaggaattgcctggtgatcctagaaccgatgttatctcgcgtgaggtattacatgcttgccaatcaaaagtttccccatcaagtagaaattgatgatcctca

SEQ ID NO: 14480 - DNA, 406 bp, Arabidopsis thaliana
  unsure at all n locations
  Clone ID: LIB25-106-Q1-E1-C3
agagcgccatcaaattcaacggcgggaggtcatgtcaaccattcgattttctggaagaaccttgctccttccagtgaaggtggtggagagccaccaaaaggatctcttggtagtgccattgacgctcactttggctcccttgaaggtctggtgaaaaagatgagtgctgagggtgctgcagtgcaaggctcaggatgggtgtggctcggactagacaaagaactgaagaagctagttgttgacacaactgccaatcaggatccattagtgacaaaaggaggaagcttggtacctctggtgggtatagatgtttgggaacacgcctactacttgcagtacaaaaatgtnaggcctgaattacctgaaagaatgttatggaaagttgattcaactggaaaataatcca

SEQ ID NO: 14481 - DNA, 62 bp, Arabidopsis thaliana
  unsure at all n locations
  Clone ID: LIB25-106-Q1-E1-C5
tcatcagctacgtgtactacgaagttatcggcaggntgttctacaaggattccaggcttcna

SEQ ID NO: 14482 - DNA, 413 bp, Arabidopsis thaliana
  Clone ID: LIB25-106-Q1-E1-C6
gattttcttcaagcaaaaagggagttatgagatgattggtcgtcctcgccggagaaaagatacgagacttgtctctcaatcctgaagcagactcgattcatccatcagtcaacaaatcttccttcacaatggatgaagaagaagcaatgttactgctaaaggaagaagatgaaggaacaagaagaactagtgttcctacacaactcatgaaactaaaacgaacccattggtggattcttgtctttataagtatcttcttcctcatctctgcacaagccattgctgttcttcttggtcggttttattacaacgaaggtggaaacagtaaatggatctctactcttgtccaaacttgtggttttccgattctctatctccctctttgtttccttcctgcttcacactcttcttca

SEQ ID NO: 14483 - DNA, 410 bp, Arabidopsis thaliana
  unsure at all n locations
  Clone ID: LIB25-106-Q1-E1-D1
aataagaaaaatatcattcaaaagaaacaataatcatgaaactcttagaacaaatggtatacgtagaatgttttatgataataatggctacattgttagtgtccatgagttacggtcatcgagcgatgattaatgatgtagccgaagcacccgtgattgacaatgtaggcagcccaaccaacggactcgacagttcttggtatgatgcacgagcaacattttacggtgatatccatggtggagaaactcaacagggagcctgtggatacggtgatttattcaaacaaggctatggtctagagacagcggcattgagcacagcactcttcaacgaanggtatacatgtggggcntgttancaaatnagtgttttgcacgaacccacaatggtgtttacccggaaccatcaa

SEQ ID NO: 14484 - DNA, 466 bp, Arabidopsis thaliana
  unsure at all n locations
  Clone ID: LIB25-106-Q1-E1-D10
nnnnnngnaactctacgctngncgggcccggtcacagaattaaccgggncgacccacgcgtcnancgcttttctccgtaaacaatttctcagtttccaatttcaacgtaaccggtccggttttctccgcgcaatggacggcgaatctcacaatcgagaatcaaaacacgaaattgaaaggctactttgatcgaatccaaggtttagtataccaccaaaacgcggtcggagaagacgaatttttagcgacggcgttttttcaaccggttttcgtggagaccaagaaatcggttgtgatcggagaaactttgaccgcgggagataaagaacaaccgaaagttccgagttgggttgttgatgagatgaagaaagagagagagaccggaacggtgacgtttaacctgaaaaaggcgtnttgggttacctttaagaaccaatggttgggcggcncgtganancgggcttaa

SEQ ID NO: 14485 - DNA, 399 bp, Arabidopsis thaliana
  unsure at all n locations
  Clone ID: LIB25-106-Q1-E1-D11
cntggttgtttgcgattgatccgtttaggattttctctgagtccatcgcttattgaatcgtcaaggctttttcttgtttgactttggaatatcgaatctgctcaatactccaccaaattatcaaacttggtgttctttgttgctcaatactccaccaaattatcaaaacttggatgttctttgtagctcaattaccaaattaataagttgcattcttctttgttgcttgttagccttttcatcgagtttcgtttctgcgatactattttgtttaggatagtatggctgaaaaggaagtggtttctgcctcaactttagaatctaagatcactgangatnatcatgacatctggattccgaggaacgatggaaaagancccgctcctccaacaatcagtg

SEQ ID NO: 14486 - DNA, 461 bp, Arabidopsis thaliana
  unsure at all n locations
  Clone ID: LIB25-106-Q1-E1-D12
gnnnnngtacttcacctnttcgggccggtcacagnncnacgggncganccacgcgtcnaaattcngnnacaatcaaataatataaataccataaattgaattcctaatcggggttccttctataaatttatttatttgatttattggaaaaaataataataatatggggatgtcaaaaagtatcaaggttattgtatctcttgctctcatattatttttggcccttgcagcaaccaaggttgaagccacaagatacataagttatcgtggtatgaatcatggagatcatgctatacattgtgacaaagcccaccctaacacctgcaagaagcaagtagcaaatccttacaggagaggatgcggaacaatcgaacgttgccgtcgtgatacangtagaaaaatgaatcaaccaaaccaccccaagaagcataaaattattgcatcaacacctttggttaaga

SEQ ID NO: 14487 - DNA, 411 bp, Arabidopsis thaliana
  Clone ID: LIB25-106-Q1-E1-D2
ccccgatgcaatgttcgacattcagatcaagcgtatacatgagtacaagcgacaactgctaaatatcttgggaattgtttaccgctacaaaaagatgaaggaaatgagtgctagtgagagagagaaagcatttgttccaagagtttgcatatttgggggaaaagcatttgccacatatgtgcaagctaagagaattgttaaatttatcacagatgttgcgtctacaattaaccatgatccagaaataggtgacctccttaaggttatctttgttcctgattacaatgtcagtgttgctgaattgctcattccagcaagtgagctttctcagcacatcagtactgctgggatggaagctagtgggacaagcaacatgaaattttcgatgaacggttgcgttttgattggaac

SEQ ID NO: 14488 - DNA, 411 bp, Arabidopsis thaliana
  unsure at all n locations
  Clone ID: LIB25-106-Q1-E1-D3
tttagaagaaatcaagacccgtatccaaaagaaactccatgtccctgatgaggactttgccaagtggaagtttgcatcgttttcaatgggacgtcctgattacttgctggacacagatgttgtttataatcgctttcagagaagagatgtatacggtgcgtgggagcagtatcttgggttggagcacattgataatgctcctaaaagggcttatgctgcaaatcagaaccgacacgcatacgagaagccggtgaaaatatacaattaggagagagacatggctatgcatgtaggaatcaagggtggtggttttggtgcgagggtangatgtanagagactcaattttagatttgataaactaaaatggataatatatccttttcaaggttaagggttttgatttttggccc

SEQ ID NO: 14489 - DNA, 417 bp, Arabidopsis thaliana
  Clone ID: LIB25-106-Q1-E1-D4
gttactctcgtgtttatctctccgacgtaaccatggatagcgatactctctcaggattattggaaaacgtcgccaaaaaattccccgatcgccgagctctctccgtttctggaaaattcaatctcactcacgcgcgtcttcacgatctaatcgaacgcgccgcttcacgccttgtctccgacgctggaatcaaacccggcgatgtcgttgctctcaccttccctaacaccgtcgagtttgttataatgtttttagcggtgataagagctagagccacggcggcgccgttgaacgcagcgtacacggcggaggaatttgagttttacctctccgattcagattcaaagctattgttaacctctaaagaaggaaacgcaccggctcaagaagcagcttcaaagctgaaaatctctcacg

SEQ ID NO: 14490 - DNA, 396 bp, Arabidopsis thaliana
  unsure at all n locations
  Clone ID: LIB25-106-Q1-E1-D5
gaagcactcccgatccgtctcagatctgagcgatccatccactcctcgcttccgagacgactctcgcactcctatttcgtatgcccaagtcatcccctttactttgtttgagcttgagaccatcaccaagagcttccgcccagattatatactcggagaaggtggtttcggtaccgtctacaagggttacattgatgacaatctccgcgtcggcctcaagtctctccctgttgccgtcaaggtccttaacaaggagggactccagggtcaccgtgaatggcttacagaggtcaacttcctcggccaactccgtcatcccaacctcgtcaagcttattgggttactgctgcgaggacnattaccgattacttgtttatgagttcatgctgcgaggca

SEQ ID NO: 14491 - DNA, 406 bp, Arabidopsis thaliana
  unsure at all n locations
  Clone ID: LIB25-106-Q1-E1-D6
aaaaacagcgataaaaccgaaacatcaagcaaacaanaaaaaaagagaagagaaattatttttttttgttttcgttttcaaaaacaaaatctttgaattttatggcaacccgtcttctccgaacaaactttatccggcgatcttaccgtttacccgcttttagcccggtgggtcctcccaccgtgactgcttccaccgccgtcgtcacgganattctctcctttggacaanatgcaccggaaccacctcttcaccacncaagaagccaccgagcaatctcacgatggtctcgatctctccgatcaagcccgtcttttctcctctatcccaacctctggatctctccgttccaagcgccgttgttgcatgcgggnggcnataggtcctatgggtcgaacctagggaa

SEQ ID NO: 14492 - DNA, 419 bp, Arabidopsis thaliana
  unsure at all n locations
  Clone ID: LIB25-106-Q1-E1-B2
gaatttcaagtttccgattctctaaatccaattgatttcactcttcctcaaatgaaaaagccctaattttgatcgtctaaatttcatacatgggtgcgaacgagtttcgtttcttcctctcctgcgatatcaattcgccggtcacttttcgtatcgagaagcttgatggaaacctccccgtcaagaaatcgtctgattcgggagttgtctccatcgcagaggagaaaaaaccagagctttacattgagtgtgcattgtacattgatggagctccttttggccttcccatgagaacaagattgaaaactacaggaccaccatactgctggaacgaaactcatcactctcaagttctaaatancggggacttgactgcccattcacaacttgcgattacaagtatgggatgtttcgtgtgg

SEQ ID NO: 14493 - DNA, 497 bp, Arabidopsis thaliana
  unsure at all n locations
  Clone ID: LIB25-102-Q1-E1-G4
nnggggnggaacgttacaagctcnggcgntccaacantccaaggtcgacccacncgtccgtgataaacaatacattgatgtgagattcactgggtagtgaatatcagtcgtctcgttcaatgattacggtcaatgttacagaagagtttcatcaatggcggattttttgtcttgtagcgggattgattgtgattttgttagcacctgttgttagcagttggctaccgttttactatacgagttctatggcggttggtgtttttctcgttgttttgattattatcttccaggttatgaggttattacctactgggaggaagaatgttatgtatcttgcgttttatggatctgttgttggtgctggatctttcattctacatcaattctcaatgatggtgaatatgattcctgntaattttgggttgaattangatatgtntaatccggtaaccaaacctgtgcctgttggggngggtaataacgggaccgccttttgg

SEQ ID NO: 14494 - DNA, 502 bp, Arabidopsis thaliana
  unsure at all n locations
  Clone ID: LIB25-102-Q1-E1-G6
nnnggaactttgacaaggccggncgctcggaaaccggtcagnganntcccgggccgacccacgcgtcnaagcaagtcttggttggaggaagtgcttgtctctggtcttcactccagcaattcttgttacactggtcactatgtcgtgatatgtggctatgatgctgttagggatgagttcgagatcanagatcccgccagttccaagtaatgttttgttatatctcattgcttcaatacttacaaatcggtgctctacagcattttcttggaaatgttatatctggttgccatgttcatcgatcagcaatacacattgaaactgtttagtaatgagttaaaatctaaacataatgggaagagagatttaggttggtttatactaagatattccatcttttanatgcnagttctcantactatttaagaanagagtttcgctaagtnagaaagaacacntntgcatcatcctggaactantaanaaatgatananaaatgttt

SEQ ID NO: 14495 - DNA, 270 bp, Arabidopsis thaliana
  unsure at all n locations
  Clone ID: LIB25-102-Q1-E1-G7
antagtttcccgtttaacatgattcttgcttttgatagtccaagaatataaagcataccaaggtttcagactatcaccattcccctgatgttaactctgttttaggttcagtataggggatccgaaaaactcggttcatgatgtaacaatcttatctccttgtaactgtagctgatgtacttaggctgtaaaaacaatcacttttcagacgttttaagtgatcttgtgggaagtttttttccagacaaaaaaaaaaaaaaaaaagggcgg

SEQ ID NO: 14496 - DNA, 499 bp, Arabidopsis thaliana
  unsure at all n locations
  Clone ID: LIB25-102-Q1-E1-H3
nnngaacttcnnacggtcggcacgcctcagggnctcgnaggtcgnnacanccctctanactnactnctgggagaatacagacggatgactaagattctgaaggaactccataagtcttgtcaaaaggaagatggaactgatgatcagaagaaaggaagtcagctgcttgaggtttatgcaattgaaattcagatttacactgaaacgaaggacaacaaaaagcttaagcaactataccataaggcacttgccatcaagtctgccatacctcatcctaggatcatgggtataatccgcgagtgtggtggaaaaatgcacatggcagaacgtcagtgggaagaagcagcgacagacttctttgaggcttttaaaaattacgatgaagctggcaaccaaagacgtatacagtgcctgaaagtatcntgttcnggcgaatatgccgaaggaatccaaatngaaccctttngnnngccaaaanggcaancnntaaaaaacgacc

SEQ ID NO: 14497 - DNA, 115 bp, Arabidopsis thaliana
  unsure at all n locations
  Clone ID: LIB25-102-Q1-E1-H4
anatacgctcatgcaacagatcganaatttagattgggagttagactcttacaagaagcagaacgagcgancaagagatactattacatgagcttactcangantatgctccttg

SEQ ID NO: 14498 - DNA, 436 bp, Arabidopsis thaliana
  unsure at all n locations
  Clone ID: LIB25-102-Q1-E1-H5
cttctcaangtggtttatatttgcagctttctcatactttgagtcataaaatacaagttggaagcagtgtgccgataaatctcccgattattaatgaactcttcaatagcgctcaagctatgcacatacctcattcttgtcctttggctaagattgggcctccggttgggagatattcacctcctgaggttgtttctgtccgtgttcctcttttacatctctctaatttccaaggcagtgactggtcggatctctctggcaaaggttacgctatcatggtcctgattctcccaaccgatggtgcaagaaaatggagagaccatgagttagagcttgtagaaaacgtggcgggatnangtggctgtggctctctcacatgctgcaattttgggagaatccatgcangctcgttaacaacntnttnggncanaanttt

SEQ ID NO: 14499 - DNA, 504 bp, Arabidopsis thaliana
  unsure at all n locations
  Clone ID: LIB25-102-Q1-E1-H7
ggnnngaattcnanaccgnacaccgnncggaaccggtcanggactcccgggncgacccacgcgtccntgaatagcttattanaggaggctaagaagcttgaagagcataaaggaatggattctggaaacaatgagatagatacgctaaagcaacagatcgaagatttagattgggagttagactcttacaagaaaaagaacgaagaacaagagatactattagatgagcttactcaggaatatgagtccttgaaagaggaaaattacaaaaacgtttcctcaaaattagagcagcaagaatgctcaaatgcagaagacgaatacttggattccaaggatattatagacgaattgaaatctcagatagagatattggaaggcaaactgaagcagcaatcgttggagtattctgagtgcttgattacagttaatgaacttgagagtcangtgaaagagttnaagaaagaactggaggattngnacaagnntntgatnaaaattnca

SEQ ID NO: 14500 - DNA, 374 bp, Arabidopsis thaliana
  unsure at all n locations
  Clone ID: LIB25-102-Q1-E1-H9
cgnntcantnctcnttccnnatntctttcgcgcataataataactgaggttgttgtttantcaatgaagagtgtgcaaaaattggaaggccagggaatgcagaaacatgtatttgaaagctgaactcaattgctctacaccaccctctcagatcctttgtccctttgggcccttgttctccctcatcccttatgtggacacccattttctaaacccctgcttccacaccttncanccttcctcncacaatgctngaaaatngagaagagctcttggttccgtaaaggcctacaagaggaggtgaaagaatcagttgaggaagagacagaagtggacncanaggcacagggaaacgcaattgcacagaanngaag

SEQ ID NO: 14501 - DNA, 427 bp, Arabidopsis thaliana
  unsure at all n locations
  Clone ID: LIB25-103-Q1-E1-A1
actcncgggtcgacncacgcntcnaanttcattcgtnttntgagataaaagtgagaggagaaatctaaattcgagagganaantttcaanttttctgagttagattcattggaagagatcacggaaggagttaacaacatgaacttggctgttgacacccaganagaagaatcggattcaagtttccancactaagaaaccattgttcttctacgtcaatctcgccaagaggtacatgcagcagtacactgatgtcgaattgtctgcactaggaatggctattgccactgttgttacggtcgctgagatattgaagaacaatggctttgctgttgaaaagaagatcatgacatcnactgtggatatcagggatgagtcaagggggcntcctgtgcnnaaagccagantgnattngnctggcnaatcc

SEQ ID NO: 14502 - DNA, 449 bp, Arabidopsis thaliana
  unsure at all n locations
  Clone ID: LIB25-103-Q1-E1-A11
ngtgncggccaggcanngagagtggcccggtccaanncacnagtcanngtngnantatggcanagacgccacgatggatgaatgatttcgcaaatcgtcgagattttggaattcgatgaagagcgtatcaacctgggctttgtctttcttctccgacgaactttctcggcgagctgtttccgattgttatttatggaccaccgcgatttcgcttctcttaatccttctccttcatatcttcttttccactaaatttcgcttcttcacttctgctccttcttcttcttcttcttcttcttcttcttcctctccctctacagaatcagttcccgcgaactctcaatcaaggatatccaaactagtctctgatgaagatttgaaaattccggatcnagaatttggaggaggaaacaaatgattccacggagatatgggaacatgttattcac

SEQ ID NO: 14503 - DNA, 442 bp, Arabidopsis thaliana
  unsure at all n locations
  Clone ID: LIB25-103-Q1-E1-A4
gganactngggctntgttcttcattctctcgctccatcatcttccccaacaaacccatcttcatcccccgctcttttcctcaaccactccgtcactcttctgctctctcgtactcctccttgaaaatgaccgatacccatatcccaggaaaccctaattcgtcccctatccaatctcccaccaaacccgagtcgcttcgttccctcgaatttcaattgggttcttctttcaccgccgatccaatcatcccgccgccgaatcagatcgtcatcgttattagcggtccaagcggagttggtaaagacgcagtgatcaacaagcttcgtgaggttcgtgaaggtcttcattttgttgttaccgccactaatcgtccgatgcgaactggtgaaattgaaggnaaagactaattccttggcccnaaaaattnatttcgtggnggngg

SEQ ID NO: 14504 - DNA, 451 bp, Arabidopsis thaliana
  unsure at all n locations
  Clone ID: LIB25-103-Q1-E1-A7
ggagttntntctncccgtgtccgcgccaaantataaaagggccgggccncgcntccaccctaanagtgagtcgtantaccgtttttgattcaattttaggttagaagaagattccgggcagattatctgttgattcgaagaataccgaatacgcgtttgaaatttctgangaattatgggatacttggacttggccttgtcgtattccaaccagccgcagactgttgaagctccagcgagcggaggaggtctcagccagaatggaaaatttagctatggatatgcaagctccgctggcaagagatcatctatggaagacttttttgaaactaggatcgacggtatcaatggagaaatagttggtcgagttggagtttttgatggccatggtgganccagatcaacctgagtangtnaancgccatcntttnaatnancgggtnacncnccc

SEQ ID NO: 14505 - DNA, 70 bp, Arabidopsis thaliana
  unsure at all n locations
  Clone ID: LIB25-103-Q1-E1-B1
aanagaaaacctcgtatctaagctcatgacanatgtcnaaggcacttgcagtggccgacatggatttgta

SEQ ID NO: 14506 - DNA, 405 bp, Arabidopsis thaliana
  unsure at all n locations
  Clone ID: LIB25-103-Q1-E1-B11
ganaatccatattcttcagatgtcataactctgttgatcgttcaaagcacttagaatctttagatggatctgctgttaaaggagaagttgtagtaccattagttgaagatctaaataaagaagcttctttggaagatgaagaagaaacttctgttgaaacgtcttctgagctgccacagatcatgaagttcgatagccaaacttctgagcatagtgattcaccttgcactgaagatgttgttattgaagcttcatctgatcctcctcgaggagacaatggttcgtcatccgaggatgtcacgatgggacttcagaatatgcttgttgttcgggaanggaaatgacactcccnggttgtggacgtttgatctcagatgcaactgagctgttagtatttcgatctcc

SEQ ID NO: 14507 - DNA, 87 bp, Arabidopsis thaliana
  unsure at all n locations
  Clone ID: LIB25-103-Q1-E1-B4
ggnttcgtctgngtccttcatcgcaaggaaggtcttanagatttgcttcngtttcttaggtcacttcgtggcttgatcttttgggta

SEQ ID NO: 14508 - DNA, 469 bp, Arabidopsis thaliana
  unsure at all n locations
  Clone ID: LIB25-103-Q1-E1-B5
ccnggtcanatcataanggccgggcccaccncgantccaantganagcngtttgtgcccttcaagaaatcganaganagcttctttcccccattttctgcgattcacgatatttcttcttctataggacaacgtttttttacacattgaggctaaaagagagatggctgatgatcagagttcaagtactgaccgtctcgtgaaacctgaaagtttaaactcagatagaggatncaatcaatctattgaatcttctggagagagttctagagctcaagggttccacaancctgtctactaccaaatctatggatggtaagaaaaccgangaagaagagacaacgggacaaacgcgatgttgntgatgaagaaggaaacgctcanccaatccggttnaaagggcgtanatggccaaganggaggattccgttaaaaaaccccnaatnccccctggntctgngtaggggaca

SEQ ID NO: 14509 - DNA, 430 bp, Arabidopsis thaliana
  unsure at all n locations
  Clone ID: LIB25-102-Q1-E1-G3
gctttttaatcaatattctgaattctccctggttaaggaggagggtctccgttaatggcggcggcaatgttcggcgtcaggagctttttcttctcggcggtgattgtgatactgttcgccggccgttatggagaagccaccgcagctgacagaggatacattaagtacaaagatcctaaagtagcggtcgaagaaagagtagaagacttgctgatacgtatgacgttaccggagaaacttggtcaaatgtgtcaaattgatcggttcaacttctcacaagttaccggtggtgtggccactgttgtgccagaaatcttcacaaagtacatgatcggaagtgttttgagcaatccgtntgataccgggaaagacattccaanncgntttccnaacnnnaccccnanaaaaaatttgacccttcnacgaggnc

SEQ ID NO: 14510 - DNA, 398 bp, Arabidopsis thaliana
  unsure at all n locations
  Clone ID: LIB25-102-Q1-E1-E11
agaatgaagccaatggaacagtgtatgccgataagaaatctggtgaagaggatgagagggaggggtttttcaaaaaattctttaaggaaaaatctgatgacaagaaagacattgtcaaggttgatgacgggaatgaaagtgagggtgatgaatctccagaattttctcttttcaaaagattattccgtatacatcccgaagatgcaaaacctacttcagaaaatgaaaatagcagcaatggcttagttgaaagcagtcctgggacagaaaactttttccgcaagttgttcagagatcgtgaccaatctgttgaagattctgaactgtttggattaaagaaacccaagggagaancggccaggctcacctaaacagcgggatgatactccatctggtaa

SEQ ID NO: 14511 - DNA, 498 bp, Arabidopsis thaliana
  unsure at all n locations
  Clone ID: LIB25-102-Q1-E1-E2
nnngaacttntacccgntcggcacgcctcaagaantcnanggtcgacccacncgtccngtttctctggtgganacaaagacataaccagaacacattctttgatgttaaagatgggaatcatcatgaggaagtttcacttggaaacctgaggagatttggtttcagggagcttcagattgcgaccaataacttcagcagtaagaacttattggggaaaggtggctatggaaatgtatacaaaggaatacttggagatagtacagtggttgcagtgaaaaggcttaaagatggaggagcattgggaggagagattcagtttcagacagaagttgaaatgatcagtttagctgttcatcgaaatctcttaagactctacggtttctgcatcacacaaactgagaagcttcnagtttaaccttaaatgtccaatggaancgttgcatctcnaattaaagccaaancngttccttaacggggcnatagggaaaanggatacc

SEQ ID NO: 14512 - DNA, 492 bp, Arabidopsis thaliana
  unsure at all n locations
  Clone ID: LIB25-102-Q1-E1-E4
gngaantnanccgnnggtagcctcaagaatccaaggtcgacccacncgtccgttgggacntgggagggaagaagatctcgttccctctaagccatgaatcgtcgtaatcgtggctcttcttcttcttcttctagggtttcgaatacttatgggaaccgccagttctctgataacccgaggactggatccggcggcggagttaatgaatcctttcagagaagatccgatgcaccgcacaaacgaaacaatgaaaaagacgaatcaaaacataaagacgaagatcctgctgacgtttcattgattgtaggaacttgttcttctatgtgcccagagagggaaagagtcacaagagaacgcctgcgtgatcttgcagtgtttgagangctttatggaaacccctcaaaatcatccacaagagatagctgtcnaaaagttttgcaaaaacccttnaacgggggatttnaaggcaccgnnnntanaacngccccaatt

SEQ ID NO: 14513 - DNA, 498 bp, Arabidopsis thaliana
  unsure at all n locations
  Clone ID: LIB25-102-Q1-E1-E6
nnnnacgttanaccgtnnccgctcggaaccggtcangaantcccgggncgacccacgcgtccngcagcttggtggatttatatgcattcgaacagtcgaggcatgggaatttcgctgatatcgataagaagatagtggaaactggtgaagatatcgttttctttggcaataagagtacttcatggtctggaaattctagtaaagggaactccgggtcgaaaataaaggaaccaaatgagattcatcggcttgttgaaaactctggaaagcatgacagctataagggtagcattcttttaagatctgaagatgtcgtagatacctcagcgaactggagagagtgttctgttaagactctttttcaatcttcgagaggggatgcgtcaaacagttacaatctggttagcagctcggacaagagagagggaaagaagaaggcagacattantgatgtnaaggtggcaatcaaggaacaaganaatnangtggcaaganctt

SEQ ID NO: 14514 - DNA, 474 bp, Arabidopsis thaliana
  unsure at all n locations
  Clone ID: LIB25-102-Q1-E1-E8
aacttttacncngntnggcgccgntcggaaccggtcacaggactcccgggccgacccacgcgtccaaanaagaacgatcganagcgagagagagagtgatggcggcagaagagggtaaagatgaggcgggattggatcaggtggaanaagagttctctatttggaaaaggaacacaccttttctcnacgatcttatgatctctcacccactagaatggccttctcttactctccactgggttccttcgacgccgattccgtactcnaaagatccttactttgccgtccataancttatccttgggactcatacctccggtggtgcccantattttctaatggtcgccgatgtcgttattccgacacccgacgctgaaccagnattaggtggaagacatcaggaacctatcgtccctaaggtggagattaagcagaagatacgtnttgatnganaantnaaaatancgaagtnta

SEQ ID NO: 14515 - DNA, 390 bp, Arabidopsis thaliana
  unsure at all n locations
  Clone ID: LIB25-102-Q1-E1-E9
ttaaaggagagacagtggcgaaactgaaagttgcgattaacggttttggaaggattggtaggaactttcttaggtgttggcatggtcgtaaagactctcctctcgaagttgttgtacttaacgacagtggtggtgtcaagaatgcatcccacttgcttaagtatgactccatgcttggaaccttcaaggctgaagtgaaaattgtggacaatgaaactattagtgttgatggtaagctcatcaaagttgtctccaacagagaccctcttaagcttccatgggctgagctcggcattgacattgttatcgagggaacaggagtgtttgttgatgggccaagaaccaggaaancatatccaagccgggagcctcgaaagttatcatcactgc

SEQ ID NO: 14516 - DNA, 435 bp, Arabidopsis thaliana
  unsure at all n locations
  Clone ID: LIB25-102-Q1-E1-F11
agncngcngncncgngnnncgntncangnntcnacactgngtcatnnnaagccgccgccgccgccaccgccaccgtgagtcttcgacatttccgcagcttccctactattgtcccatctcttctcttctcctcctcctcctccataccttttcactccccccgtctctgcgtcttcctccgccctcgccaactcttccttaaccgtccactcgccgcaagtttcagttcctcttcatcaggtgctacctctgattcgacctacgacgttattgttgttggtgccggacacgctggatgcgaagcggctttagcctctgctcgattaggagctagtactctgcttctcacattaaacctcgatngaatagcttgggaancgttgtaatccagcagtaggtggacaagctaaatcacaattagtacatgaagttgag

SEQ ID NO: 14517 - DNA, 503 bp, Arabidopsis thaliana
  unsure at all n locations
  Clone ID: LIB25-102-Q1-E1-F2
ngngnaacttcnacaccgnanggcacgcctcanggactcganggtcgacccacncgtccngaangacacacattanacaaaacaaaacanaaaccaaaaaaaacaaaaaataaatggcaagaatttcactagggatatgtctgatgttagtagtagcatcaagtgtgatctatgaagcgcaaggaacgttcttactaaaccattacttgaagaagaattttccaaaaaaatgcaacgagtttacgccttacgctaacaagggtatgataacgttggtgaccgatctcgaaggtagcagtccggccactacagagttcaagactttctttacacagttcaagtcttacatgtctttcatcgagacaacatcggcctcaacaaaaaatgttgatgccgagatgacagctaaatgtgacggtcctttcaagggcatgtctgcaatgaatgccantaaaagngtcnaatnaaccggntncgggaattttnaaaagccccagntttnc

SEQ ID NO: 14518 - DNA, 444 bp, Arabidopsis thaliana
  unsure at all n locations
  Clone ID: LIB25-102-Q1-E1-F3
gncncgcctcagggnctcgaaggtcgnnncnnccntctaaaatggntcatctgatatttcttttgttagttacaactatgtattttgggataaatgaagcttgcaaaaaaaatcatgtagtaattcataacgaaatcggtcctggtattgatctcaacattgcatgccggcaattcagcccaaaacgcacaccttcaatgtttcacaccctaaagtacaaagatcctttttacatcattgagttcgcggacaacaatcagctacctcacggtgagaaatggtattgtctgattagtcacggaacaagaccaaaatattggtttgatattgaagtatatcgtcaaggctattatcctcgatgtggtcagctacgctcatggattgctanaaaggatgggaattggnttaanagaaaatatcnnantccancaaggggnnnttcnt

SEQ ID NO: 14519 - DNA, 500 bp, Arabidopsis thaliana
  unsure at all n locations
  Clone ID: LIB25-102-Q1-E1-F6
nnggggngnangttaccngnnaccgntcggaacggtcagaggnctcncgggccgacccacgcgtcnngtcgagacagatagagagagctgaaatttctgtgagaagattttcttccgacattttctctttccaaacactgttctacacgtagtcggaaatctcggaaaaaccaatctccgagtcagagagagagagagaggcgttcactgttgtaaaggattaagctttgggtaagaagaagatgaagaacaagaccaatttaggtctctcagtcttcttcttctttatatgtctcgtttccgtgacatcagatctagaagctgatcgacgagctctaatcgcacttcgtgacggtgttcatgggcgtccattgctgtggaatctaacagcaccaccgtgtacttggggaagaatccaatgtgagtcnggtcntgtcanaacactccgattanccggtgtggggtttacgggtccaattacaatcnccanccggaaccnt

SEQ ID NO: 14520 - DNA, 433 bp, Arabidopsis thaliana
  unsure at all n locations
  Clone ID: LIB25-102-Q1-E1-F7
gtcnaaaataacanattttcttcttgcntttgagaaaaaataattatatatttttatatangaaagggttaatttattaatanaaaannataaaaagaagcagagaagagataatgcanggtggtaggcttttgacggtgttggtgtgcctcgcctccanggtggcgttggtgancgncggtgacccttacttctactacacgtggaacgtaacctacggaaccgccgcgcctctcggaattcctcaacaggtgattctcatcaacggacagttccctggtcctaacctaaactcaanctccaacagcaatgtcgtcatcaatgtcttcaacaanctcgacgagcctttcctcttgacctgnaatggatccancacaaggaagaactcaaggcaanaatggggttaccgggaacccnangnccaatnccancc

SEQ ID NO: 14521 - DNA, 287 bp, Arabidopsis thaliana
  unsure at all n locations
  Clone ID: LIB25-102-Q1-E1-F8
naagtctctaaattnagtcgantcatttcctttgtcttcaatccanagctttcctcttcttggaaccaatctgctctcttttttattctgantttgacaatggcggttggtgaggtcatgaggatggagattcncgccggtgganatttgactgttactactccggagttgcntgttcttgccgtcgatgatattattgtggatcgtaagagtcatcgagaggttgcttagaatctcntcntgtaaagtnacnactgtagagagtgganctagggctttgnagtatc

SEQ ID NO: 14522 - DNA, 387 bp, Arabidopsis thaliana
  unsure at all n locations
  Clone ID: LIB25-102-Q1-E1-G10
tttgtnaattanaaaaactaatgatgctaataaccaaaatcaagagttgataaaggaagtcacgtttggagattctgtcnatagtgtttcgctggaggcgttgaancagccctctttaacagctcacntcgtttcanattcctaanttcntctcaatcttcttcttacttaacttactatataagtctctgtttctctctgacaaaaatattccaccacntaaaaagatggntcaattcttagtagaaggcaacttcggctctcaagcgaanncaaagaatccgttacaagcaccgctgaatccgtcacggcttcncncactgatgctganaaaaccgttaancaaagcgccaaggagcactcnaactgacgccgagacaancgttg

SEQ ID NO: 14523 - DNA, 457 bp, Arabidopsis thaliana
  unsure at all n locations
  Clone ID: LIB25-102-Q1-E1-G11
tctcngcccgnncggcacnagtcacnggnctcncggnncganncacgcntcnncnctaantcatantaggcggtacggacgcgaaggacattctcgggttgccgaagactccactgtctttaactcaggagaagaaatctcgaccccagaaagagtcccatagaaaacccgatggcatttctcgcgaggtttatgcgcttaccgggggcgttgcacctcttatgccttcaattgatttaaagcgccgtcctcctgcagatgagaaggttgcttggaaatggctttccttcacaaattctgctaggaaagatgatttgcagctttaccattgggttagagtggttaatgatgttccaccaacaggtgactattcctttgccaaatataacaagtcagttnataattttgaantacacagacgaaggagtatgaagaatcattttaacggattctgtgt

SEQ ID NO: 14524 - DNA, 461 bp, Arabidopsis thaliana
  unsure at all n locations
  Clone ID: LIB25-102-Q1-E1-E10
angnttnctnggccngnncaggcacnaagtcagngnactcncgggccganncacgcntcancncacncgtcngganttcaaacgatcaacaaacatttttatcataatcataatcagaaaaaagtgttaaactttctcgtgagtttatatactctgctaacaatgctgtttataatggtttttggttgtttcttaagtttctgtttaaatttcggattcttctatctggatcgttgttgttagcttctcaacatctaaaaagatggattcttcttactcctttgccttggggacaagtagttctattttgccaaaactcagtttcaggaatgtagagaacagattttatggtgagaagaacaacaacaatggtttgtgtaaacgttttggatcagatttgggctccaagaanttaaggaatcaaaagttcaagcacggtgttgtttacgctgttgccactt

SEQ ID NO: 14525 - DNA, 455 bp, Arabidopsis thaliana
  unsure at all n locations
  Clone ID: LIB25-102-Q1-E1-C10
antcnnccagnnacgnctcacngactncngncncgtggnccnntncaanncncaacagtgagtcgtattaaatcgtttttttttttttttgccaggcttctctcactctccttcgccgcggaatcgtctctcggagccgcgaaaggactcttagggttaaagattcttccccaaatctccttctctcttcctcagctgatttcgactccgatcaattttctaggtgtttgaaggcatttgaaaggatgggagacaatggcaaagatgaaattatggtcgaggcatctcaatgcgctggtgctatggttgagataaagataaagacgttggattctcaaacgtacaccttacgtgtagataaatgtgtccctgttcccgcattgaaggaacaagttgcctccgttacgggngtcgttacggaacaacaacgcttgatatgtcntggaaaagttatg

SEQ ID NO: 14526 - DNA, 461 bp, Arabidopsis thaliana
  unsure at all n locations
  Clone ID: LIB25-102-Q1-E1-C11
tangtnantctgcccgncagncncaaatcacaggncncncggnncnanacangnctcnacacatgacgtnctnctattgtctaaaaatggcgatgctaggtttttacgtaacgttcattttctttcttgtatgcctatttacttatttcttcctccaaaagaaacctcaaggtcagcctattctcaagaactggccgttcctcaggatgcttccaggaatgctccaccaaatccctcgtatctacgactggaccgtcgaggtgcttgaggcgaccaatctaactttttatttcaaagggccatggcttagtggaacggacatgttgttcaccgccgatccaaggaatattcatcacatactaagctcaaactttgggaattaccctaaaggacctgagttcaagaagattcttgaaggttttgggagaaggaatcttaaccgttgattttgagttgtggga

SEQ ID NO: 14527 - DNA, 58 bp, Arabidopsis thaliana
  unsure at all n locations
  Clone ID: LIB25-102-Q1-E1-C12
ggncttctaagcggaagcttcagtgactcaggccttgatcatatctctgtgtgactgg

SEQ ID NO: 14528 - DNA, 92 bp, Arabidopsis thaliana
  unsure at all n locations
  Clone ID: LIB25-102-Q1-E1-C2
tgggtaatnagttgaaaacngcttttcctgctctgccgccggtacctcntgagaangctcttcgtgctgcaatactcaaagctcaatatgca

SEQ ID NO: 14529 - DNA, 506 bp, Arabidopsis thaliana
  unsure at all n locations
  Clone ID: LIB25-102-Q1-E1-C3
nnnnntggggaattctnanagtataccgttcgatgaagnccttggtccacccgnccgtccngatttganttagctccaatggtaattcaactcatgacagagaggaacattcacctgcggggtttggcacatcccatgctatttaagaatctccaagactcattagtcgacacgaagatgtttgacaaatataagataatgggtggagttccagtctcccatttcaatatctacaaactactgcgtgaaaaggctcatgtgcttctgtatcctggaggtgtccgtgaagctttgcatagaaaaggtgaagaatacaagctgttttggccagaacggtccgagtttgtgagagttgcatctaaatttggagccaaaattgttccttttggtgttgttggaaaagacnatatctgcnaaattgtcctggantccaaagattaaggnanatncctanccccaaagggntttantaaaaaggggcccangggaccctggcaacataggga

SEQ ID NO: 14530 - DNA, 502 bp, Arabidopsis thaliana
  unsure at all n locations
  Clone ID: LIB25-102-Q1-E1-C4
nngnaatnccacgccggnncggtacgcctcancnaattccaaggtcgacccacncgtccgaaacgtcatatggtttaagctctcaaatttctccttcgattccatcttcctccggcttcaagtcgccggatcttcttgatttccgattcacttggctttcctcttctcttccttttaacacacgacgacgcttcatagttttttgttgtgattcaggaagaggtatgtaattcaggattttccggtgattttggtgggaacgtttggagaaatttcgagcttagtagtattcgtaggaaagttttcttcttttatgatttgtagtttttgtggattaatggttgaaggtgagaaatggggcttcgatggatttgaaaagattttgtatcttcgtggaaatgaaatcgttggagaatgcancaagtcatcccaatcntaatcacagggtttgcntaagnacnttggnganattgagaaatttnggggggttaaacctnagaaa

SEQ ID NO: 14531 - DNA, 449 bp, Arabidopsis thaliana
  unsure at all n locations
  Clone ID: LIB25-102-Q1-E1-C5
gggggnnnttgnangctctgcgctcgnaaaggtcataaantcncgggccgacccacgcgtcnagcaatgggctcttcntctccattaacaaggagaaacagagcaccaccatcctctgtttcctctgtttatctaatctttctctgtttcttcctctactttttaaatttctcaaacgctcaatcatcgccggttttcgcctgcgacgtagctgcaaacccttctctcgccgcctatggtttctgcaacaccgttttgaagatcgaataccgagtcgctgatctggtcgcgaggctcacgttgcaagaaaagatcgggtttttagtgagtaaagctaacggcgtgactcgtcttgggattccaacgtatgaatggtggtctgaagcacttcacggngtttcttaaatcngncccggnangcaattttncaanccaattttcngggngnt

SEQ ID NO: 14532 - DNA, 520 bp, Arabidopsis thaliana
  unsure at all n locations
  Clone ID: LIB25-102-Q1-E1-C6
nnnngnnnngggngggtaattctacaacgtntacgccgctcgganaccggtcaagggactcccgggccgacccacgcgtccatataagcagccttgggtcttttccaaggtttttgttttagccatggctaaacctccgtcctttggctgctgcttcttcctcttattcttctccttcttatcttcttcctttgtctcatttgccctaaccgatacagaagctgccttcattgtgcagcgacaacttttaacgttaccagacaacgacgctcgagtctgagttcgatcataaggctcagatctctgaaccggagttagctgcggagcacgaggaagtgaaggagaacaagattactctgctagaggagcttcaagaaaagaccgaggaagatgangagaacaagcctagtgtcatccaaaagcttcaacgattcaacagctcctcctcccccttcanccaatnaanaaaggttanggaaannaagggaaanaanaanaaatttttttaagggaanggaaa

SEQ ID NO: 14533 - DNA, 415 bp, Arabidopsis thaliana
  unsure at all n locations
  Clone ID: LIB25-102-Q1-E1-C8
gncgnnncaagcgtctanncanacttctggggtttttgtgttcttcgatattatctcttattactattaggctattatnatcnccttattggggaaaaagcttcaaacttttatataaagtctcttcctttttctttctttctcggtggaatttgcagcaatggaanataaaccattagggattctcagggttcatgtnaaaagagggattaatcttgctattcgtgatgccaccaccagtgatccttatgttgttatcacattgnctaatcataanntgaagacgcntgtgattaataataactgtaatccactgtggaacgaacaactgancctttccatcaaanatgttaatgattcnaaccgtccgacagtgtttggaaaagaaaaaattcccggaaaanacaaaattggg

SEQ ID NO: 14534 - DNA, 455 bp, Arabidopsis thaliana
  unsure at all n locations
  Clone ID: LIB25-102-Q1-E1-C9
cggccngctcangcacnangtcatngnnctcgcgggccganncacgcgtcancggnnncttctgctaacgcgtccgctcaaaagcaccttccttttttttcctattctttctcatcatctttcttattatgaactaaaataaatgttcagacaaaggagccatttctaccatttataattttatattacacaactatatgtgtgtttgtgtgtgtgtgtagccgtggggatttatatatacatataacatatattgacaacctctactactgtcatttagcctgcaaagcccacaaacaaagggctacacaagtcttccttctctctctccctcttcctctctttagatggaataatggatcaatgcttgtaaaggtttgaaatttgatnaagttttgaangaancaanttgaagnaanaatnggaaaagagacgacatggaggtggagaanagg

SEQ ID NO: 14535 - DNA, 443 bp, Arabidopsis thaliana
  unsure at all n locations
  Clone ID: LIB25-102-Q1-E1-D1
gncgcttgggcaagcttttaatcgagcccaagcctcaagaacccaccaagcaccagtatgactgggatgctgcaacagctgccaatttcttgaggaaatatggtcttattgatgagtttaagctcaacattgagtgtaaccatgccacgctctctggtcacacttgtcatcacgagcttgaaactgcaagaattaatggtttacttggcaacattgatgcaaacactggcgatgctcaaactggatgggatacagatcagtttcttacagatgttggagaagcaaccatggttatgatgagtgtcatcaaaaatggtgggattgctccangcggnttcaactttgacgctaaactgcgaaaagagagttcngacctnggaaacctnntcnctgggcncanttaagngaaanggatanaanggcccgtggactgaaaaatncat

SEQ ID NO: 14536 - DNA, 498 bp, Arabidopsis thaliana
  unsure at all n locations
  Clone ID: LIB25-102-Q1-E1-D4
gngnanttagccgnnggtagcctcaagaattccaaggtcgacccacncgtccgcccacgcgtccggaaaaccttctctctaaacttcttcgaaaatctcacagagcttcttcttcttcgcttttagggtttttgctctattgtttcgagtgacccaacttcgaagcttatagatcgttaccttagaaaatggtgggtatgtcgatgcagccatatggtattcaatcgatgcttaaagaaggttacaggcatctctctggtctcgacgaagccgtcattaagaacattgaagcttgcaaggagctctccaccattactcgcacctctctcggtcccaatggaatgaataaaatggttatcaatcatttggacaaactgtttgtcacaaatgacgctgctactatagtgaatgagctccaagattcaacaaccgggtgctaaaacttctggggtttaactgnnaaaggncaaaccannaaaaattcggngaaanggnnct

SEQ ID NO: 14537 - DNA, 490 bp, Arabidopsis thaliana
  unsure at all n locations
  Clone ID: LIB25-102-Q1-E1-D7
agncntatanggatcgnnacaatantntggncncgtaggaccnttncaanaccctaatagtgagtcgtattacttttctccgtcactgagtaccttgcctctcgagctcccaatcttaaggtacaattgatcttcactatagtcgttcagaatctgatctgcttatagaaatattcagaagtgtgagatagctgctaattggtctttactttgtttttttctcttgcttcacatcagaaaatttaggatcttagagcttttcatagtgaacttaagaacgcttttcgaattagtcagtcttagctctattttgtctgtgtgtgtattttctggacacgagacctttgtttcaatttctataagtgatttcggtttacattttaaaagcttgatttaatcccattgaaataaataatcaangatgaataaatcngtgcaattggnacnaaatttttannggcnttgcnaanttaatttaacccnangcnct

SEQ ID NO: 14538 - DNA, 435 bp, Arabidopsis thaliana
  unsure at all n locations
  Clone ID: LIB25-102-Q1-E1-D8
ttgaaggaactcaactctatttacactcaaactagccgagatcttgctgaagcgaagttagagatcaaacagcagaaggaagaactcataagaactcaggagtgaattggactcgaagaactctgcgattgaggagttaaacacaagaataacaactttagtggctgagaaagagagttatatccagaagcttgatagtatttcaaaagattatagtgctttgaaattgacttctgagacgcaagcagctgcagatgcagagctcatcagcaggaaagagcaggagattcagcagctaaatgaaaatctggatcgtgcgctagatgatgttaataaaagtnaagacaaagttgctgacttaactgagaaatnccaagactccaagagaatgccggnttanaactggctacagttaaaanttngggaaaatgactt

SEQ ID NO: 14539 - DNA, 492 bp, Arabidopsis thaliana
  unsure at all n locations
  Clone ID: LIB25-102-Q1-E1-E1
nggtantttacacannncgtagnaccanaattcnagggtcgacccncncgtccncccacgcgtccgcttttgtctaaaaatggcgatgctaggtttttacgtaacgttcattttctttcttgtatgcctatttacttatttcttcctccaaaagaaacctcaaggtcagcctattctcaagaactggccgttcctcaggatgcttccaggaatgctccaccaaatccctcgtatctacgactggaccgtcgaggtgcttgaggcgaccaatctaactttttatttcaaagggccatggcttagtggaacggacatgttgttcaccgccgatccaaggaatattcatcacatactaagctcaaactttgggaattaccctaaaggacctgagttcaagaagatctttgatgttttgggaaaaagatcttaaacgttgntttganttttgggaagngatttnggaattcantcacncnatatccaaantcaant

SEQ ID NO: 14540 - DNA, 105 bp, Arabidopsis thaliana
  unsure at all n locations
  Clone ID: LIB25-102-Q1-E1-C1
atcaccganctancttaccggagagtttcccggagactacgggtgggacaccgctggactttcacctgatntcgagacattcccaagggaacgtnagctntaatt

SEQ ID NO: 14541 - DNA, 489 bp, Arabidopsis thaliana
  unsure at all n locations
  Clone ID: LIB25-100-Q1-E1-G3
aattttatactgncctnctcaggccnanagncncgtanagtcgttncagncctctaanagtgagtcgtattaactctttagctgtttatatttagagttgagactaattcggcgttgcgcaccaacctaacttcggttctacttcacacacaaaactcgtgtcgtctcttgttanaaanggtctctttgtttcagtgtctttggtctcgtgtttgtgtagagatggagaacaagaccgataatggaaacgaggatggtccaataatacatagccaagttgagaagataaagaaagagtttgagaatataagacaaccgtcgctgcagcaaccggagatgaagagggttcttagcgagatcaaaaggcgtcaacgttcacgttctcctcttggtttangggagagatntatttccgttgggaaatgnttcatgtttgnccttaaannncaaagaaaantggttgcaaaagnngagggtaaaggnggtttt

SEQ ID NO: 14542 - DNA, 414 bp, Arabidopsis thaliana
  unsure at all n locations
  Clone ID: LIB25-100-Q1-E1-G5
tcnnacaggtcatgggtctcgngggncganacacgcgtctnctattttncttcttnattatatcataattccanatttcgcaaactaattttttcactttcttcttcgttgatctctctgaaagcttctcttcttcttctcaccatgtctggttatcctccatcaagccaaggttacngttacggcggtaatctaccacctcctcagccaccgtacggatcaaccggcnatanncctcctccgtacggatcatccggcagcaatcctcctcctccgtacggatcatcagcctcctcaccgtacgcagttccctacggagctgatcccgctccttatggtgcagcatcgtcatcaccgtacgcgtctcttccangaggaccatattaagccgcatnanggaanaaanctcaagng

SEQ ID NO: 14543 - DNA, 219 bp, Arabidopsis thaliana
  unsure at all n locations
  Clone ID: LIB25-100-Q1-E1-G6
aaangcaacggacagatgcntgccatcaatgagattttcgagaagaacccaangaccatcaagaactacnggatctggttgcgttatcanagccgaactgggtaccacaacatgtacaaggagtaccgtgacacaacactcaatggtggaatggancaaatgttcactgaaaatggnctccccttaaaaaattggggttcccttgcatcccnnttnanc

SEQ ID NO: 14544 - DNA, 494 bp, Arabidopsis thaliana
  unsure at all n locations
  Clone ID: LIB25-100-Q1-E1-G7
ggngnancttagaangccccatncgntcgaanacaggtcatagaactcgcgggncganacacgcgtcaagagcttctctctgaaaangtcacttcctctgacccttttatctaagctcaacgctgcaactctcgccgtcggttacttccccattttccttccttcttccgattcaaagactcaatttttattctccggcgttgaggattcatctcctaaaaatctctgctttatcttttgatttgagctgatttggagaggagaagaagatagatagataggtaattcggattgatatctcgaaaaatggctcagattcagcatcagggtcaaaatgccaatggtggtgtagctgttcccggtgctgctgcggctgaagctgcggcggctgcggctggagctgcggcggcggctgccggagctgcgcaacaagggacgacgtctttanangtcggtgatntggaatccaacgttaaagggnccaaanttttntg

SEQ ID NO: 14545 - DNA, 455 bp, Arabidopsis thaliana
  unsure at all n locations
  Clone ID: LIB25-100-Q1-E1-H3
gcacgncccanncactcgcaaggncgacccaggccgtcnattctccnaannnattaagtccttttaagcaaattaatcccaangattganactttgttttcctgagattcttcttttacttcactgtttctgggttttgtaatttgatggtgatggatgataaagataaatatcgcgaagtagtagaacattggtcttgcgaaggtacttctccagctctaatggttggagattctactgagataacagaaatgctatcaccgagccaacatcaacgatggcnaggccttgtgttagatatacaatcgagagaagctcatggcgatttcttgagaagcaaatggttccttaattcatagccccgtttccaaaaggttcaagttttctccaatgtccaaccctaaaactggganacntgttggntnnatgagtcccttcccggccaanaacnnnna

SEQ ID NO: 14546 - DNA, 131 bp, Arabidopsis thaliana
  unsure at all n locations
  Clone ID: LIB25-100-Q1-E1-H4
tcggnttcnttcaattcattcatgaacagttacctcctcgttttcgtattgctgatggctggggattggcttcagggtcnttatgtgtantanctttacagcacttatggttttggaaatggagatnttgg

SEQ ID NO: 14547 - DNA, 481 bp, Arabidopsis thaliana
  unsure at all n locations
  Clone ID: LIB25-100-Q1-E1-H5
gcncnanncgntcgactcaggtcngggnctcgngggncganacangcctctaaaatnaggcntnaggtcaaacagaaataacgacctaaagctatgtttaaagcttagcagttctccacatatatttcaatatataaaaagattacccctttttaaaaaataaaatagatatttgttttccgtaaaagaaaggggtaatcaaataaaatggagacggctaggcttttcaaattagtgtgtgtgatatgtattgccagtttgattccgaccatacgagccaatgttgctgatgagaccgatgagtattgggtaaacaaggccaatgaagctcgtaaacatacccttatggcttatcatcccgacccttatgagatcgtcgaccacttccacgagcgtcattacgacaactcgactgacgtcnaagggaacgangaanaaaaagngggtccctttcnaaggaaaaggaattcntttnaaanat

SEQ ID NO: 14548 - DNA, 462 bp, Arabidopsis thaliana
  unsure at all n locations
  Clone ID: LIB25-100-Q1-E1-H7
ntccannggncncncgggncgtccnancnctcnagagtnagtcttannatacctgcactttgctctgtaacatcgtcaaatctaactggaggttcctgtccagtaacagatgtcacaacgttcgagaaagttgttaacagtagcaaattactggatgcctgtcgcacagttgatcctctgaaggagtgttgtaggccaatttgccaacctgcaattatggaagctgcgctaattatttcgggacaccaaatgacagttggtgataagatccctttagcaggatcaaataacgtcaacgcaattaacgactgcaanaatgtggtgttttcatatctttccaggaagcttcccgcagacaaagcaaacgctgcatttagaattttatcgtcctgcaaagttaacaaagcttgcccgttgggatttaagggncccaanggaantnnttaagggtngccntaaggt

SEQ ID NO: 14549 - DNA, 75 bp, Arabidopsis thaliana
  unsure at all n locations
  Clone ID: LIB25-100-Q1-E1-H8
ggcattgctggaagccctttaatgnctccaggntgtgaatttgtaaaagaattttagcatgctgggctganggaa

SEQ ID NO: 14550 - DNA, 517 bp, Arabidopsis thaliana
  unsure at all n locations
  Clone ID: LIB25-101-Q1-E1-A1
tgngtaattcnanncgnanggcacgntcgtccggnggcnacaggncgnncgggccgnctaaagcgtcnaaaaacacaagcgtanaaaacaaaactcaactaattgtgttatcacccaaaagagaagagcaaacacaatggctttcgctttgaggttcttcacatgctttgttttgacagtgttcatcgttgcatcagtggatgcagcaataacatgtggcacagtggcaagtagcttgagtccatgtctaggctacctatcaaagggtggggtggtgccacctccgtgctgtgcaggagtcaaaaagttgaacggtatggctcaaaccacacccgaccgccaacaagcatgcagatgcttacagtccgctgcaaaaggggttaatccaagtctagcctctggccttcctggaaagtgcggtgttagcatcccctatcccatctccacgagcaccaantgggccaacatcnnatnaattggggaaaaacacaanncttttcccnaaaaatttgggntt

SEQ ID NO: 14551 - DNA, 96 bp, Arabidopsis thaliana
  unsure at all n locations
  Clone ID: LIB25-101-Q1-E1-A11
ngctgagaacnatgcttgcaagtgtggatctgactgcaantgtgatccttgcagctgcacctgaggaagcctttttccanaacgcatgagataatc

SEQ ID NO: 14552 - DNA, 375 bp, Arabidopsis thaliana
  unsure at all n locations
  Clone ID: LIB25-101-Q1-E1-A2
agnccggntacggtcataggnccacgggccganccangcgtcnacaataaacccttcattttaagcattctgtttccttcttgagaaacctagatattttggtttcttgtatcnggtgatgaagatagagtgtgatgtgtgtgagaaagctccggngacggtgatttgttgcgccgacnaagctgctctctgtcctcaangcgacatcgagattcacgccgctaagaaactcgctagcaggcaccancgtcttcatcttaantcnctctccaccaaattccctcgttgcgatatctgccaagagaangcagctttcattttcngtgtagaggatatagntctgctttgnagggactgcgatgaatccanccacgt

SEQ ID NO: 14553 - DNA, 510 bp, Arabidopsis thaliana
  unsure at all n locations
  Clone ID: LIB25-101-Q1-E1-A5
aatttatactgnacggcacagcccanngnngccacaggnctcccnggccgnctaaagtnagncgnaanaaaacactttgtttcttctaaaagctctttgtcttctttgttttaatgtatgcttcacattagcttccgaccctgatcccatccaagacttctgcataccaaaacctgtgacatctccttaccatgaccatcacttctccaccaatctcccttgcaaaaactcctccgaagtaaccaccgaagattttgtcttttccggtctaaaaactgccggaaacttcacggagacggggttcgccaccgtcccagtaggcccagaaaacttccccggccttaatacattangcatctcgtttgtccgggctgatttcaaaaccggattcaataaaccancacattntcattcgcggggnnaaangaatttcccnnattgggtaaaggggaggggtnaacccggggtttggggaccccaaaaaatanggttaccccaaagttgatggaa

SEQ ID NO: 14554 - DNA, 428 bp, Arabidopsis thaliana
  unsure at all n locations
  Clone ID: LIB25-101-Q1-E1-A7
nncntctngnctnnnnccttctntctatcacactactactactcacatcatggctttctccactagaggctccctcttattcttcttcactacacttgttcttctctccacccaaatccatgcaagagacagttacttctttggaaaattccacagagaatcccccaaagatcaaaaccctaacagtttcatccctcttgagactagcgagaaaaccacagtagaagaatccgtcctcaacaagaaagagcaagaacaagatcctacctttgtccccgagtccggaaacgggtatggcttgtatggtcacgaagaccacatacaacaacaacaacgacaacaaagaagagttnaacaacaacaacaagaacganggaaaagtcnnnaggggngagtttttccaaacncaagncctgagcganacngaa

SEQ ID NO: 14555 - DNA, 471 bp, Arabidopsis thaliana
  unsure at all n locations
  Clone ID: LIB25-101-Q1-E1-B11
gnngtanttnaacnnncggcgntcangncagantcangggccgatggacnnntcnacnttgnatcctagtatccgttttactcgacatcgttccgacgacttttgacctggaatcgacgcagtgacttcaattcaactattgcacttggtttgttggcaatggacaaaggagcacctcctagtatttttgtgaatgatgggtcattcatggaaagattcanacagcttcaacaggagaaagataaagacaaggataaggttgtccaagttgaggattctaagccggtgaagattatatcaaatcccaaacctgctgctaataaaatttccattggattaaagcccaatgatgcccagaagaaaggtggtaagcttgctttcagcttgaagcaaaagtctaagcttcttgcacctcctgtgaagcttggtacagaanaagatgaagganaagaagaatgttaaacccatgac

SEQ ID NO: 14556 - DNA, 284 bp, Arabidopsis thaliana
  unsure at all n locations
  Clone ID: LIB25-101-Q1-E1-B12
anncaagcctctatngtgnctcgtnatanattnaagctngnnggcangcagatcanacaggattcaagcttacgtangcgtgcatgcgacgtcatagctcttctatagtgtcacctaaattcaattcactggccgtcgttttacaacgtcgtgactgggaaaaccctggcgttacccaacttaatcgccttgcancacatccccctttcgccagctggngtaatagcgaagaggcccgcaccgatcgcccttcccaacagttgcgcagcctgaatggcgaatgg

SEQ ID NO: 14557 - DNA, 67 bp, Arabidopsis thaliana
  unsure at all n locations
  Clone ID: LIB25-101-Q1-E1-B2
ggggtattaaacaangatttgccttcagcgattaaaaagttgggttctaanaaanagcctganaatg

SEQ ID NO: 14558 - DNA, 78 bp, Arabidopsis thaliana
  unsure at all n locations
  Clone ID: LIB25-100-Q1-E1-D9
nttgtgttatcgaaattgtcgtttttacaagggcgcgaaangtggaaaatgcgacggtcttaantgcttctgcgactt

SEQ ID NO: 14559 - DNA, 467 bp, Arabidopsis thaliana
  unsure at all n locations
  Clone ID: LIB25-100-Q1-E1-E1
ngnnnctctcagggncaaggnctcgtacagtcgtnncaggcctctagnttnaagtngnattagcttccgaggctgacatgttactgcaagatctccaaagtagccttaacaaacaggaagagaagcttattacatttgcacagcagcaacggaaggcacactcgcgagctgtggatacagcaaggtcagtttcaaaagtaacagtagaattcttcaagactctagacacacatgctaccaaattaaccgggatagtagaagaggcacagacagttaaccacaagaaattgagcgaatttgaaaacaagtttgaggaatgtgctgcaaatgaagagagacaattgctagagaaagtancagagcttcttgcaaattctaatgctangaagaaaaaccttgtccaaatggctgttcacgatttangccnaganacnattccccnngnaatttgttnccctanggcatga

SEQ ID NO: 14560 - DNA, 483 bp, Arabidopsis thaliana
  unsure at all n locations
  Clone ID: LIB25-100-Q1-E1-E10
nnntggnngngtaattccanncgctcggctgccgtcacggactcaagggccgatgcacgcntcnaagcttcnnncctatnatattgacccttttgatctctctctgtctcgctttcttcctcgcgtggacctttttcnaanaatatcaatcccagaatttcgcttcattttggattanaaactcccagatctgctactctctatctccgattttgtgatttttcaaaccctacatttctccggaagagtttagttttttctctgtanctanaccgagatttttttttcaaaattccgacattancctaggttgtgtattaccgtagaaaaccctaagttcctttttggtattcttggtgtacagatcccttccttagtcagagtttttggttattantgtttagaggtttgtgatgaacaatcgaggaaggtaccctcctggaattggcgctgggccgtggaagcctttaancccgaaaccta

SEQ ID NO: 14561 - DNA, 93 bp, Arabidopsis thaliana
  unsure at all n locations
  Clone ID: LIB25-100-Q1-E1-E12
ggncgaatctccgacgaactcccctcngcattcaaagtagtccagcnactaanatcccaaggaatcacgcgagtcaaaatcttcgacgcagac

SEQ ID NO: 14562 - DNA, 453 bp, Arabidopsis thaliana
  unsure at all n locations
  Clone ID: LIB25-100-Q1-E1-E5
agaggnctcgnnggncnatacaagnntctatntcgnnncctctcacatcctccaattcatcgtcctcacgttcccttttgtttattcatcttccttccttcttcacatttctgattttctctatttggggggtttgtttccacattatacatatctagggttttgagatggttaattgaaagataatggtcgaagtttcggaggaattggcttcacattgtgggtgtttctggcttcctcaggtttaaatctgaggttgatctcttttgttttttggtaaattgtgacatattttggctcgaagaagaagaanaagaggcaatgagcgcatcaaggttcataaagtgcgtcaccgttggtgaaggaactgttggtaaaanctggttgcnaatttctaanncaagcaacaactttncaaagggntaagttccnaatggttttcnaaaanttaag

SEQ ID NO: 14563 - DNA, 502 bp, Arabidopsis thaliana
  unsure at all n locations
  Clone ID: LIB25-100-Q1-E1-E6
ggnnannttgntagnnccntacgggtcgacncaggacngcnggactcgngggccgatacangcctcnanagtgantcgnatgagcgtgtgctctccgctggttccttagaacaatcggcacacgctttttcatttcaatcttcttcttctactcttaagtatctcaggtctgttgagagatggcagatcgattgacacgtattgctattgtgagttcagaccgttgcaagccaaagaaatgtcgccaagagtgcaagaagagttgtcctgtggtcaagacaggaaaactttgtattgaggtgactgttggttccaagcttgcttttatctcagaggagttgtgtatcggttgcggtatttgtgtgaagaaatgcccgtttgaagctattcagattancaatcttccaagagacttgganaaanatacgacccatcgttatgggggcaaaacacttttaagttacanaggntcccaatttcaanaacaagggaaggggcaagg

SEQ ID NO: 14564 - DNA, 485 bp, Arabidopsis thaliana
  unsure at all n locations
  Clone ID: LIB25-100-Q1-E1-E7
gcnaagcnncatacgggtcgactcanntacagncncgtggnncnntacaannctctanagtnagtcgtantactagccgctcatcttccctccgcttgtcatatcacggctcctaacatcactgactgtatttcgattctgcatctacctcgtaactcaacattggctaaagagtttgagaacttaggaaggattgaagacaactacaactccanatctcctacacaaattcataaagatgggacaggaggaggaaaagccgaaccagtgaagagtaatggatggaaggagaagagttggttgggtgttgagcttttaatatatttgctagtttctctcatcttcttttaattacttcctttctttaatgttcctttgctttattattacaataacttataanatatctatttaaatangagacacatgcatgtgttttgcatttaaantgcctgntaannngatttccggggtaaattttaaac

SEQ ID NO: 14565 - DNA, 496 bp, Arabidopsis thaliana
  unsure at all n locations
  Clone ID: LIB25-100-Q1-E1-F1
gggnactttancagnntgcacagncccaaggnntcgcnnngtcgncncaggcntcnncactcacnangtanaaaccttagctcacctccatggcctctcctccttctcctcctcctctcttctttcacctccggcgaatcctctctgtccgcagaaaaaaacaaattgcacaccggtggtctcagtagacagagttttcctaaaggattcgtgtttggaaccgccacgtcagcttatcaagtcgaaggcgagactcatcaagacggtcgtggcccaagcatttgggatgccttcgtcaagattcctgggaagatcgccaagaatgccacggctgagataacagtggaccagtatcaccgttacaaggaaagatgtggatttgatgaagaaactgaacttcgatgcttacaagattttccaattcaagggccaagataatcccctgaagggaattgntaantttcancnggaaagggatttgcttattacaatagat

SEQ ID NO: 14566 - DNA, 478 bp, Arabidopsis thaliana
  unsure at all n locations
  Clone ID: LIB25-100-Q1-E1-F10
gggngtaattctanacgctcgncggcgnnagngncncaaagggncgatgnacnnntctacagntganntngtgtcatcttcgtcttcttcctccgaaacttttttttgtttttcaaagtggtggagctaaccatgaaatcgactcaccatcacagagctccactaatatctgcttcttcctcatcttcatcttcttcccaaaaccattcattcgtctctaggctcctccttctccttactctacttccagtttcccttgcttgtctcgcctttatcctccaatggcgaggcggtggtctcgccgatcctgcctctgcttctgttcgttcctctacgtcggttcctggcggctccgatctcaatcacgaggtctttcccggcatggagactgtttcatctgtctccccaaagtctcaccaatcctcctccgaatgctcaaatctagctcgcaagctccttctccttcctttccctaaca

SEQ ID NO: 14567 - DNA, 62 bp, Arabidopsis thaliana
  unsure at all n locations
  Clone ID: LIB25-100-Q1-E1-F4
tcccttcaacgcctgagaaaccctcaaaaggtcccangtggangaggagtcatcgttgctta

SEQ ID NO: 14568 - DNA, 453 bp, Arabidopsis thaliana
  unsure at all n locations
  Clone ID: LIB25-100-Q1-E1-F5
caggnctcgtggnncgttncangcctctanagtnnctcgtactactgcttcatcatttgaacttcgatttaagggttcttgaattttcgaataaaaatctcacctttaaatgggaaagccaacggcgaagaagaaaaatccggagacgccaaaagatgcttccggcggcggcggcggcggtggaggcaagtcagggaaaacttaccatcgttctacttcgagggtatttgacgaagatatggagattttcattagcagagcacttgagctcaaagaagaaggtaacaagttgttccagaaacgcgaccacgaaggtgcgatgttgagtttcgacaaagccttgaagctcttgcccaaagatcatatcgatgtancttatcttanaacgagtatggcttcctgttatatgcaaatgggaatangttantntcccaatnccantnacnaaangnt

SEQ ID NO: 14569 - DNA, 175 bp, Arabidopsis thaliana
  unsure at all n locations
  Clone ID: LIB25-100-Q1-E1-F6
gtacnatgtcggtgtacgacgctgctttccttaatacacagctttcnanancgacatcgatttttggtctccggcgatgggtcgtgatcggaatcttacatggatctctaattgtcatcgcactctttcttctcnccctctgcttaacttcnggcnggaaaaatcgaaagccnag

SEQ ID NO: 14570 - DNA, 476 bp, Arabidopsis thaliana
  unsure at all n locations
  Clone ID: LIB25-100-Q1-E1-F7
cnnacggntcgaatcagntcncaggnctcgcggnncgnnacangcntctaggctanttncngntnctatgatggtcatggaggagttaaagcggctgagtttgcagctaagaacttagataagaacattgtagaagaagtagttggtaagagagacgagtctgagatagctgaagcggtgaaacatggttacttggcaacagacgcgtcgtttcttaaggaggaagacgttaagggtggttcatgctgtgtcacggctctggttaacgaagggaaccttgttgtgtctaacgccggtgactgtcgtgctgttatgagtgtaggaggtgtagctaaggctttatcttctgatcaccgcccgtctagagacgatgaacggaaaagaattgaaaccacgggaggatatgttgatacgtttcacggtgtttggagaatccaaggatttttaactgtgtcnananggaatttgnananccc

SEQ ID NO: 14571 - DNA, 475 bp, Arabidopsis thaliana
  unsure at all n locations
  Clone ID: LIB25-100-Q1-E1-F9
ggnngtaagntttnaacnctcaccgttcggnannggtctgggaactcncgggccgacccangcgtcnacacaaatgtgtccattttattaggcatgttggtgatctttgtttcaccaatggtgttcgcagatgatttgacaccaatcccagagggcaaaccccaagtggtgcagtggttcaatacccacgttggtccattggctcaacgtaaaggcttagatcctgctctcgtanctgctgaggctgctccacgtatcatcaacgtgaatccaaagggaggtgaattcaaaacactaacagacgcaataaagagcgttcccgcagggaacacaaagcgggtgatcataaagatggctcatggtgagtacagagagaaggtcactatcgacaggaacaaacccttcattacattgatgggacaacccaatgccatgcctgttatcacctacgaangtancgccgccaagtntngaa

SEQ ID NO: 14572 - DNA, 491 bp, Arabidopsis thaliana
  unsure at all n locations
  Clone ID: LIB25-100-Q1-E1-G1
gnngnanttntacncagnnctgcacagcccaaggantcgcaaggtcgacncangcntcnnctctttctctctttctctcgctctctatctctctctcctctgtttgttatatcaattaatcaagaagatttcttgtgtttttttttttttctgttaaagaagatttcttgggagaaaataaggtggattgaaggattagtctttaggaatggtggtggaggaggagaatagaagcatggaggaaggacttcttcagcatcaaaacgacagagatgatcgtcgtatcacagcttgtgtcatcctcagcacttttgtcgctgtttgtagtgccttcagctacggatgtgccgctggttatacttcaggcgctgagactgctatcatgaaggagttagacctttctatggcacaattttcaacgtttggctcctttccgaaagtnggaagttccgtngggggcctngtnaancggncaattgggaattcacccc

SEQ ID NO: 14573 - DNA, 481 bp, Arabidopsis thaliana
  unsure at all n locations
  Clone ID: LIB25-100-Q1-E1-G10
nnngngtaattcnaaactngncncgctggtcaggncanagtcaaagggccgatgnacgnntcnacangtgnttcttgttactcancttcttcttcttcttctccatcacagactcataacaaatgggagaagtttcagtggtggagaacaagaaagtgatactaaagaattatgtagatggtattcctacagaaacagacatggaagtgaaactcggagaaacaattgagctaaaagcaccaaaaggatcttcttgtttcctcgtcaaaaatctatacttgtcttgtgatccttacatgagaggtcgtatgcgtgattttcacggttcctatctcccgccttttgttcctggccaacgtatcgaagggtttggtttagcaagagtgatagattctgatgatactaattataagcccggcgatatagtctctggtatcattggttgggaanaatacagtttgctacgttatttaagataacc

SEQ ID NO: 14574 - DNA, 495 bp, Arabidopsis thaliana
  unsure at all n locations
  Clone ID: LIB25-100-Q1-E1-D6
gngnnttngctngntcntacgntcgaatcagntcngggnctcgtggntcgntacangcctctagnatgagtcatgtnataaagcttttgttcgactcgtttatcagatggacgatggagtagagcttcgtttcactcgttctattactagcgctggtgggagtgagtaccgtattgataatagggttgtgaatttggatgagtacaatgggaagctacgatctcttgggatacttgttaaggctcgtaatttcttggtctttcagggtgatgttgaatctattgcttcgaagaatccaaaagaacttactggactcctcgaggagatttctggttccgaggagcttaagaaagagtatgaaggactagaagaaaagaaggccagcgctgaagaaaaagcagctcttatataccagaanaagaaaacaattggaaatgagaagaaactgaanaaagcccaanagggagaaactganaaacnttctaagggtgcagg

SEQ ID NO: 14575 - DNA, 482 bp, Arabidopsis thaliana
  unsure at all n locations
  Clone ID: LIB25-100-Q1-E1-C10
nnnngggnngngtaattcnancnntcggcgncgtcagaggnctcangggncgangnacgcgtcnnctctcanactgactattcgtcgcttcagatctaaaagagaggaagataaaccatttggattcaatatcgattaaggaaaccttttgacttcacaagaatggcagtgacagaagcagaaaatcctcttcttggtgaaatcacttgtggcaccttactacagaagttgcaggaaatctgggatgaggttggggagagtgatgaagaacgagacaaactgcttctacagattgaggaagagtgtctgaatgtttacaaaaagaaagttgagctagccgcaaaatctcgtgcagagcttcttcagactttgtcagatgccactgttgaactttccaatctcacaactgctctcggggaaaaaagctatatcgacattccctgataaagacntcanggacgattaaaggacaactttcngca

SEQ ID NO: 14576 - DNA, 474 bp, Arabidopsis thaliana
  unsure at all n locations
  Clone ID: LIB25-100-Q1-E1-C11
ggngnaattntnaacnntcacgcgnncaggnacggtatggnactcccgggccgacccacgcgtcnancccacgcntccggagaactgagttcaacattttatcaggcacttcgatggcgtgcccgcacgtgtctggtctagctgctttgcttaaggcggctcatccggattggagtccggcggcgataagatcagcattgataaccacggcttacacggttgataacagcggtgagccgatgatggatgagtccactggcaatacatcttcggttatggattatggttcgggtcatgttcacccaaccaaagctatggatccgggattagtctatgatataacatcttatgattatatcaacttcttgtgtaattctaactacactagaaccaacattgtgacaataacccgtcgccaagcggactgtgacggtgcaagacgagcgggacacntccggaatttaaactaaccct

SEQ ID NO: 14577 - DNA, 474 bp, Arabidopsis thaliana
  unsure at all n locations
  Clone ID: LIB25-100-Q1-E1-C12
nngngtaattcnanccnntcgncgccgtcagggncncaagggccnntgcacnnctctacattgaatcntattatcgtttgaaagggctgccgcctgtatggcgcgcgccattatcatactaccaacgaaaggtgatcggtatgaagttgatacagacgcatttctttctgtattggcccttgaacctatacaaaagatggaatccatcccaaccattgtagaggtatcaagctctaatatgtatgatcttctcaagtccatatcggggttgaaagtggagccggttgaaaattctacatccaaattgtttgtccaatgctcacgtcaaaaggacctgataaagatctacaggcacctactaaattactcaaaaaatgtatttaacctttgcagcttccccaatctaactgggatgaagtatagacagttaagactggggttccangaaggttgttggccgttggaatttaaaaa

SEQ ID NO: 14578 - DNA, 367 bp, Arabidopsis thaliana
  unsure at all n locations
  Clone ID: LIB25-100-Q1-E1-C2
gaaggacttgccctaaagaacgataccgtcaatgtttggatctttgacctagacgacactctcctctctagtattccctactacgctaaatatggatatgggaccgagaacacagccccgggggcgtactggtcgtggttagagtccgganaatcaactccaggactcccgganaccttgcancnatacaaaaaccncttggaactcggnattgaacccatcataatctctgacagatggaaaaattgtcagaagtcactgtcgagaatctcaaggntgttggtgtaacaaagtggaaccatcncatactcaacccaaanggtttaaatttgacccaagtggtgtanattcaaanggttagggaana

SEQ ID NO: 14579 - DNA, 497 bp, Arabidopsis thaliana
  unsure at all n locations
  Clone ID: LIB25-100-Q1-E1-C4
aacttcnacnccgnnnggcacgnnccannggactcgannggtcgacncacccntcnacgagncncnngggcgnacgcgtggggttcgcttgctgaatttctcgtctagtggaaatgagtatcgcctgaaatggggagtctttcccccacaatcttccgagtacatttccaacactacggcattgaacataatgttgcttctgaaagaaaaccggttacgcctacctggacaatttggaagctacaagttgctagaatggaaagctgagcaaaagaagaaacagagctggtgggagaaacacttacttggtgtggtgggaggagcgatgatatcgttgcttgttacttcggtgatgatcaaacttgcattggtgtggagacggcgaaagcaagaagaagctacttatgaagcctgtaaatgctgctattaaagaacaagaacttcancctctctcctccgaaacattcaaangccnaaccccctnataattcatagng

SEQ ID NO: 14580 - DNA, 376 bp, Arabidopsis thaliana
  unsure at all n locations
  Clone ID: LIB25-100-Q1-E1-C5
ntacaanncnctanagtgagtcntatnagtaatttcccggcaacggaagagaggaggaggaagagtgtaagcaataaattcctcttcttctacgaaacatttgctcttctcctctttctcttctcttctcttctcntttgcttctccgattctcttccttttttttagtttgatccgactactcaagctttttttctgttcatggnttcctccatcatcgcagttgcagaaggcaaaaagatggagctagaacccaataaatcactatctgctgatatgccatctntgntgantacatnatcngaagcttttaaaggaggcactggatatcgttcttcangtgatctcancatgttctcaagctnattgcccaaac

SEQ ID NO: 14581 - DNA, 324 bp, Arabidopsis thaliana
  unsure at all n locations
  Clone ID: LIB25-100-Q1-E1-C6
gcctcctcgcaacctcgtctccacgatganggagtgacacgtttggtgatctttgtcttgtcnatgcttcttgtgatgcttctgtcatagtaccanaactaagccggatccagtcttctcttataccggtttactagtcaataggtgtgtttgtgtagatcaaactggtacagtcagntacaaaagtcggatgttgncatgaccggttcaagtgtatgagttgttgaggtataagtttcggaaagtctttttatctttattgatttangattcttgaaaanctttttaatgtanagaaaaggncctgnangggttaaaacntta

SEQ ID NO: 14582 - DNA, 495 bp, Arabidopsis thaliana
  unsure at all n locations
  Clone ID: LIB25-100-Q1-E1-C7
ggaattntagcagnnccnatncgnncgaactcaggncacngnnctcgnggnncgatacangcctctagattcanccttaatatcctctgttgatctatccaatcgaatcttacgaaaattttcgagtgaagatgaggtcgcttcaagcaccggttgtttgccctagtgttcgtcccagacaattgggtgtctctgctttacttgtcaactgctctgtttcgaaaactaggagtctcagaaaacaattctggggtaaccagaccaaaaatgacaagtctcaggctgctacagtgaatcttcgtctgcatcttcggaggtataagagtatcaaatgtcttttcagctcgcactctgatggtaccggaagcacagcagagaatttcaacgagaacgatgaggattatgtcaagtctagtgtattggaagctgttgaggtaaaaagtggaccaaatggnttcaaggngaaaatttaagggntggaagngaanttnctnt

SEQ ID NO: 14583 - DNA, 474 bp, Arabidopsis thaliana
  unsure at all n locations
  Clone ID: LIB25-100-Q1-E1-C9
aattcnaaacnntcggcgntcaggnnaangtctnnggnctcnngggccnanncaagcntcaatcnnaatanctgttnacttcacatggcttccaccgccgcaactgcagctctttcgatcatcaaatccaccggtggcgccgccgttacacgctcctcccgcgcctcctttggacacattccctccacatctgtctccgcacgtcgccttggcttctccgccgtcgttgactctcgtttctcggtccacgtggcgtccaaggtccactccgtgcgcggaaagggcgccaggggagtgattacgatggcgaagaagagtgttggagatctgaattctgtanatttgaaggggaagaaggtgtttgttagagctgatctcaatgtacctctcgatgacaaccangaatatcactgacgacactagaatcagagccgccattcccaacatcaaagtttttgattgaaaangggtgcc

SEQ ID NO: 14584 - DNA, 494 bp, Arabidopsis thaliana
  unsure at all n locations
  Clone ID: LIB25-100-Q1-E1-D1
nngtacttttanacaggcttngcncaggcccaaggnctcgnanagtcganncaggcctctacagtnactngngctagacttccagtattcacctttctcagctcaacagtctatgcaatcaagaactagcaacaatgcctcatcacttggtggccaaagcatttcaatgccagaggcgctccgaggcagtggaattccggcaacacagccaacccagcaaacactacctggtgctaatatcgctactggacctgctcttcctcagcagcttccaatgcattactctcaacccacattacctctaacacactatgcaaacatgatcggttatcctctaatgcctcagaattatccatacatgccatctgctttccagcaaacatttgctggtaatagtgcataccaccagcaactanctgcattgcttccgcantnnaaaaccnatgtctctccccgggaattntgccaattgggaaaaagcncntgcttnggtt

SEQ ID NO: 14585 - DNA, 477 bp, Arabidopsis thaliana
  unsure at all n locations
  Clone ID: LIB25-100-Q1-E1-D10
nnnngtaattcnacccnnncggcgccgtcacagnantcaagggncgacgnacgcgtccaaaaaaaaatctcagaatccaaaaatgggtcgtgtccgaaaatcagatttcggttccattgttcttgttctgtgttgtgtcctaaatagcttactctgtaatggaggcatcaccagtagatatgtcagaaaattagaagcaaccgttgatatgcctcttgatagcgatgtttttcgtgttccttgtggctacaatgctcctcaacaggtgcatataacacaaggagatgtagaaggaaaggcagtgatagtatcatgggtgacacaagaagcaaaaggatctaacaaagtcatttactgggaaagagaatagcaccaaaaagcacaaagctcatggcaaaaccaatacttacaagttctacaattatacttctggttttaaccatcaatggcccaaccagaaacttaagttatgacacc

SEQ ID NO: 14586 - DNA, 470 bp, Arabidopsis thaliana
  unsure at all n locations
  Clone ID: LIB25-100-Q1-E1-D3
gntnagnncanagccncgnaaagtcgnnncaggcctctagnctgcctnctntnacgcatactcacattccgtgaagcgtgttgagattggagcagtgagaggttcatattatggtggacaaacaataaagcaagaacaattcaagagaaccaagtctcaaactgaaagagtgcatgtcctggggagtcatggttcaccactatgtagcatagatttgaaggatgttttcaactttgatgagttcatagaacaattcacagaggaagaacagaagaaactgatgaacttgcttcctcagattgactctgatgaccttcctcatagcctcagaatgatgtttgaaagtgctcagttcaaggacaacttctctttgtttcagcagctcattgctgatggtgtcnttgatgtgtcntcntcctcgggggnaaaactcnaaaaaantcgggnttttaaaaaccttgctttganag

SEQ ID NO: 14587 - DNA, 502 bp, Arabidopsis thaliana
  unsure at all n locations
  Clone ID: LIB25-100-Q1-E1-D4
ggnnnnnnngggngtantccaccggtcgtacgnccagaaatccaaggncgacccncncgtccggtgactgaacttcaacctgttactgatgcccatgtcccagtcatgaaatttaagttccaaggaatatcaattgatcttctgtatgctagcatatcgcttctagttatcccacaggatctggatatctccaactcttctgtgctgtgtgacgtggatgaacaaactgtccgcagtcttaatggttgtagggttgctgatcagattcttaaacttgttccaaattccgagcacttccggacaacattaagatgcctgaagtactgggctaagaagcgtggggtctattcaaatgttactggatttcttggtggtgtaaactgggcacttctggttgcacgcctttgccagttttaaccaaatgctaatcccagtaagttgggttccccaatttttaaaattnnnncacaantggcccctggccgaaacccattcatgcttt

SEQ ID NO: 14588 - DNA, 493 bp, Arabidopsis thaliana
  unsure at all n locations
  Clone ID: LIB25-100-Q1-E1-D5
ngnacnttanacagccttgntgnggccaaacacaggtcanggactcgcgggncganacacgcntccncnaaaagncantttagggtttagtcatctctccgacatggttggtgccgcgattttggaatctcccggcgaaggaattggatctaacagcattctctcgcaaaagagacaactttcttctagtgatgcagctaagagagacgctaagaaacgctcgacaatgctaatggatctggagattctcgattgtcccatttgctacgaagctttcacaattcccatcttccagtgtgataatggacatttggcttgttcttcttgctgtcccaaactaaataacaaatgccctgcgtgtacttcgcctgttggccacaatcgctgcagagcaatggaaaagtgttcctgaatcgatcntgatcccgtgtccgaacgccaagttaaggtgcaaaaanaaagtttcctattggnaaaagtttaccccnnnaaa

SEQ ID NO: 14589 - DNA, 412 bp, Arabidopsis thaliana
  unsure at all n locations
  Clone ID: LIB25-100-Q1-E1-C1
cgtangtcnttacaggcctctaganngagtaatantancggcngntccaagatttcaccagacagaaagcaaaacactgcanaaactaaatcacgtatctgaatgattttgctgggagtcttttatcagaggacaagaacagagaaccattcaagtcttgttgtatcaagaagagtcttatttggttcgtanattttgaaaaatttgtttgtaatatatanagattaaaagattgttgttggcttataaaaagctaagctctgtggttatagagtgatgtgtataacatttatacagactcatcatagagtttggttcnttgtgtatattacatgtatgtacacttcttcatatattacaganatgtgtacataacannnaccaaagaangaacnntnaaaaaagggggggc

SEQ ID NO: 14590 - DNA, 94 bp, Arabidopsis thaliana
  unsure at all n locations
  Clone ID: LIB25-099-Q1-E1-A1
nttcatttcgttggaaaatgacttccaanattaaaactcccaagtcggcaggtggattctaaacaagaatcgatccccattggaaaaagntgaa

SEQ ID NO: 14591 - DNA, 312 bp, Arabidopsis thaliana
  unsure at all n locations
  Clone ID: LIB25-099-Q1-E1-A11
cngntcagnccggacanatcanagaatncccgggccgacccacgngtcngaaaaaaacaaaaaaataataaaacaaaaaaatatcttttttttttctaataaaaaaaaaataataaataaatatgagatacacaaatgtgtccattttattaggcatgttggtgatctttgtttcaccaatggtgttcgcagatgatttgacaccaatcccagagggcaaaccccaagtggtgcantggttcaatacccacgtnggccaatgggtcaangttaangnttaaattctgctctcctanctgctgaagcngcgcc

SEQ ID NO: 14592 - DNA, 412 bp, Arabidopsis thaliana
  Clone ID: LIB25-099-Q1-E1-A2
acaattctgagaggttccttcatctgcaaatgctactactgattcggtgatggaatcgatcggcgacgacgatgagctccgaagcaaaacagtttctcttccgagaagaatctcgtttacgattcttcttcttcttctgttaatctccttgagtacaagggtctctggttcgttagacaaatctggaagaagagtgattgaagcgagaactgggcaagacttgatttgggttgttcagctatccgatctccatttcagtgtccatcatcctgaaagagccattgatttcaaaaacattgtgggtcctgctctggctcttatcaacccttctctcgtcttaatcaccggtgatctcacagatgggaaaagcaaagacatgttaacaatgaagttaaatgaagatgagtgggtt

SEQ ID NO: 14593 - DNA, 209 bp, Arabidopsis thaliana
  unsure at all n locations
  Clone ID: LIB25-099-Q1-E1-A3
nggaaaaactgttccaaancaaangggtccaatcaaggaagccaatggggaacggttccgaccganttcaagttacttggggtncaattccctgggcnagtccacccaagcttacctttaccgggagaagttccctggaagaactacgggttgggaacncaagctggtctaatccgctgaccccgannacaattcccaanggaaaccgt

SEQ ID NO: 14594 - DNA, 353 bp, Arabidopsis thaliana
  unsure at all n locations
  Clone ID: LIB25-099-Q1-E1-A7
tccttcagngagaantggtgtaattaaagtgactaangttgntggaaagaangaaatggtgacccctgtgattagagcaagcttaacganncanggctataaaattatcnggtcgcatagtggggttaagatatgtacatggacaaagtcacaacttagaggcaggggaggttgctacaagcactccttttatggcattgagagtcacaggtgcatggagacaacacntagtttggcttgtgcaaacanatgtgtgttttgttggaggcatcacacanatcctgtgggaaaganctggcantggaanatggatgagccttcagtgattgtgaaanggcgctcctgatcntcat

SEQ ID NO: 14595 - DNA, 476 bp, Arabidopsis thaliana
  unsure at all n locations
  Clone ID: LIB25-099-Q1-E1-A8
gnngnngnancattatcaagccgccaggtaccgaacnngaattcncgggncgacccacgcgtccggaaccatataaatcatctcccatggcggaaatcgaagtctttaactaaagaagaagaagaagataaagctttgtaatttatagaatggcgtgtgtatcgacatgcttgattctctcccctaggttaactcaagtgggtttatcatcaaagaagccttttttgattcggctcagatctcctgttgatcgttactcttttcccagaatgttaacggagaggtgtttgagcactcgtcggaagtttaatcgccatggaatcgctgtggtgaaggctgcgagtttagataaggttagcggcgcaatcaaaccaggtggattggtggagagtgacaagttgccgactgatgtacggaaacgagcgatggatgcggtagatgagtgtggccggagagtaactgttggtgatgttgcc

SEQ ID NO: 14596 - DNA, 414 bp, Arabidopsis thaliana
  Clone ID: LIB25-099-Q1-E1-B1
tctttactacttttgggaattagggttatgatttctgggtattaagattaagataaatttgtttcctttttttgttaatcaatttaaaaatctcttatttctgttaaagacttgtaattttggagtttttaatgcatggacggaagagaagcaatggcatttccaggctcgcattctcaagtactatcttcaaagaggagcctttactaatctcgcaccttcccaagtcgcgagtgggcttcacgcgccgccgccacatacgggattgaggccaatgtctaaccctaacattcatcaccctcaagctaacaatccaagacctcctttctcggattttggggcacaccattcacatgggaatgggccccccctgcttctgaagctgaatgttgaaaccgccaacgccaccggcaa

SEQ ID NO: 14597 - DNA, 419 bp, Arabidopsis thaliana
  unsure at all n locations
  Clone ID: LIB25-099-Q1-E1-B11
tcgctaagattaggaaacgtgaaacatttgatcctctgtgtatgattttgtatacttgcnttgatgggaacttcagagattgcttcagagctttgtagctgtcaagggctcaccatcatcgctgaaactctacggacttcctcttccgttgggtctgtggaggattattggctcaagttacnggtttcgagaatctgtgttgaagatggttacttcctcaagctcttctctaaattatacgaagatgctgaaaatgagatattttcatcagagcaagcctttcttgtgaggatggtgtctgatattgctaatgagcggatagggaaaagtgtcaatccccaagggatacagcttgtncaatccccggattgttaaggcantccagttgatgttttttgatttgtttcgggttaaaanat

SEQ ID NO: 14598 - DNA, 411 bp, Arabidopsis thaliana
  Clone ID: LIB25-099-Q1-E1-B2
ttcgtttttagggtttttttttcttagcacagctctctcttctcaatttccccaaatgaaataaattcctccgaaagtttatagatttcactctcccccgaactatacaaaattccctcaaaaggaaaaactaaaaagccgatcttggctttttttgtttctgagtgcatctcgatacttggaagcattctttggtgaggctgattcattctcatctgtgaaagtctttggcttttgaagcaatactatggaaggaattcagcatcctatacctcgcactgtcgaagaggtttttagcgactttcgtggtcgtagagctggtctcatcaaggctctctctactgatgtacaagaagttttaccatcaagtgtgaccctgagaaggaaaacttgtgtctttaagggacttcc

SEQ ID NO: 14599 - DNA, 407 bp, Arabidopsis thaliana
  unsure at all n locations
  Clone ID: LIB25-099-Q1-E1-B4
aagttttaaagaatangaagaatataaagaagaagaagatggcgaaccacaaggatttaactgagatagtggatttagaatacgtgcctcgggttgataggaagagggatcgtggtaagttaagccaagaaatgtatatggaagacgaggattttgaactgtatgattttgataaggaccggatgccgaggagcttcaagaaagggcagatttgggcgatatatgatggtggtgatgacaaaatgcctcggagttactgtttagttagtgaagtagtctctttgaatccttttaaggtatggatcagctggttggattttgagagcgagaaactnagctcttggatnaagattatttctctcatatgcctttggtaagttccgggtttcananaaactttgtganna

SEQ ID NO: 14600 - DNA, 399 bp, Arabidopsis thaliana
  Clone ID: LIB25-099-Q1-E1-B6
tgaaaattagggttttttgggggattctcgtgtggataaagccatggctgaacgagaagacgcagcagaggtttctctttcagtgagaaacgaggaagatctttctcctgaatgtgtagcttgggctgattcttgcatcatcagttttctagatgattcagacaacaataattggggaacttttagagatgctttaacagaaatcatcgatatccatcccgagatgtttgttttttcatcaacaacgggaacaagaggtgtcctgtctccagacgaggttatgactgaatccgagactattgatctacggagatctgaaccagcagctggttcagcgaacagtagaactaattcatcgaatgaagaagttagcgaagattatcctctatgctaactttt

SEQ ID NO: 14601 - DNA, 408 bp, Arabidopsis thaliana
  unsure at all n locations
  Clone ID: LIB25-099-Q1-E1-B7
gtaccatgttatgacttcatatgttcaacctctgttactatggttaggagctctattcatctgcagggcattagatcctgttgtccttcctacagaagctagcaaaattgtgaaggatcgactgttgaattttgtgaggtcattgtcaacggtacttgcatttgcttactgcttatccagtcttatccaacaaacacaaaagctattctcaagaaacgagtaatccgagcgatacaagaaatatgggatttcaatttgctgggaaagcattgtattctgctgtatggggttgctgctgtatcacttttcatggagttgctgggtttctctacacaaaaatggctcactgctggaaggtcntgggacanttttgantactccttgccgggccganagattttgacaaac

SEQ ID NO: 14602 - DNA, 419 bp, Arabidopsis thaliana
  unsure at all n locations
  Clone ID: LIB25-099-Q1-E1-B8
gccaacactaagtcactgcaatatcgagcttggagaaatggagaaggaaagccatgaggagaacaaccacactatctcaggtgatttaacggcaaaacggaaacgaggtcgtccgaggaaacaattgaagctggaatcgaatgagcactctcttggtcattctccaagttttagcaggagtcagcagcagtctcgccagaggaatgacgatgaagctatggttggacagccgattagtggtgtgattgaggcgacatttgaagccgggttcttgctttctgttaaggttgggaattcagatagcatgcttagaggtgtggtcttcaagcctggtcactgtgattctgtatctgttgataacgatgttgctccctgatgtttccaatgataangaannagagcagnggggngggggggng

SEQ ID NO: 14603 - DNA, 467 bp, Arabidopsis thaliana
  unsure at all n locations
  Clone ID: LIB25-099-Q1-E1-C1
ggggattctccaattggcggcccttggaaatcaatcgccntgtnccccctnancctcctcctcaactggtgaaaacctcaagattgcaaatatgcacgcaacggtactccttcctgaagcgattccgtttgaagcgtgaatcctgggaaagtaaaggttcatcatggtaatatccaaagcttccaaagggtgttgctgatatcaattcgtacaacattggggtcctccgttctatgttggaagaatgccttccntgaatgctgggtgggaagggaattgttgttacctaaattgatngggaaatgccaaatncctcngtggaagcctaaaaatgttcgcccaatcctggaagcctaaagtcaaatganttgaagttnaagcccgtnacnccaanattgaaaaaaatttgggtgaatggggaaaaacgtccggttaattggttccnaacccngggggaaaaatgcttc

SEQ ID NO: 14604 - DNA, 414 bp, Arabidopsis thaliana
  unsure at all n locations
  Clone ID: LIB25-099-Q1-E1-C10
aaaaacataaggctttgttctctgcgtttctagagtactatcaggcatggcttgagatgacaatccaagtgagggaggagatggaaccatctcatgtgagagccaattgtgaagcacaacacaagtacctgacatggcgagcacaaaaggatcctggacatggtcttcttaaaagattagtaggtgaagcaaaggcaaaggagctgctaagggatttcctgttcaatggggtggatgagttaggcacaaaaacattcattgattactttccagagtaccaaacagaagatggaactgtaagcgataaacgaagtatcattgggaagtcatatgaaactcgtccatgggatttaacaggacaatttatcggctaacaatgatatatgttgaacaaagtcagattcagagtcnatc

SEQ ID NO: 14605 - DNA, 417 bp, Arabidopsis thaliana
  unsure at all n locations
  Clone ID: LIB25-099-Q1-E1-C11
tggaccgataaagagatcgagatagcggaagttgttgctgatcaagtagcggttgctatctctcatgcctcaagttcttgaagaatcacagttaatgagagaaaaactcggtattcaaaaccgagctttacttcgagcaaaacagaacgcgatgatggcaagtcaagcgaggaacacttgccagaaagtgatgagtcatgggaatgaggagaccaatgcacacaattcttggtctactctccatgtttcagtccgaaagtatgaagtcttgacagaaaatcatcgttgatgcgcctcatgaaaacaagcacaagttctnnganggggtgaatccaacgacgttgnttgacaatttcnccctaaagatnaacgggaaatctgcattaaaaggttaaaacggttccaanctacattccc

SEQ ID NO: 14606 - DNA, 125 bp, Arabidopsis thaliana
  unsure at all n locations
  Clone ID: LIB25-099-Q1-E1-C3
gatntgactcgatncatctgaatacgacgtcaagaanagctttcagacaatctcgcgaanaaagtatcaacncgatgtttgtacaggaaagcaattgtggggtacagtttcagacaataacngaa

SEQ ID NO: 14607 - DNA, 381 bp, Arabidopsis thaliana
  unsure at all n locations
  Clone ID: LIB25-098-Q1-E1-H9
ctactgttgccgcaactcttgttcacaaggcaattggagataggcttcattgcatctttgttgataacgggctattaaggtataaggagcaagaacgtgtgatggatacctttgagagagacttgcatctacctgttacttgtgttgatgcatccgagcggtttttgagtgaacttaaaggcgttgtggatcccgagacaaagagaaagataatcgggagggagttcatcaacatttttgatcaatttgcccaagagttagagaaaaagcatgggaagaaacccgcttttctaagttcaagggactctgtaccctgatgtgattgagtcgtgccctcccccgggtactgataggactcantctcacaccaatcaaaagtca

SEQ ID NO: 14608 - DNA, 410 bp, Arabidopsis thaliana
  Clone ID: LIB25-098-Q1-E1-G10
acgaagacggcgatgaattcgttaaccgttgaacaagtattgaaagagaagaagaccaatgacccagattccgtcaaggaacttaatctcggccataaagctctcaccgacgtgtcttgtttgagcaagttcaaaaacttggaaaagcttgatcttcgtttcaacaatctaacagatcttcagggactcaagtcttgtgtgaacttgaaatggctttcagttgtggaaaacaaattgcaaagcttaaatggaattgaagcactcactaagcttacggtgcttaatgctggaaagaataagctcaaatccatgaatgagatctcttctcttgtcaatttacgggccttgatcttgaatgacaatgaaatctcctccatttgcaagcttgatttactcaaaagacttgaaca

SEQ ID NO: 14609 - DNA, 420 bp, Arabidopsis thaliana
  unsure at all n locations
  Clone ID: LIB25-098-Q1-E1-G11
tgcaattgtcttcttctcttcaactccatcatctccaccaccggcattctcgccggaatccaatggagcttaccaagcttccatcgctcttctctcttattcctcatctcactaacattgatcattctcccgacgacaacaacttcaatcggagtaaactacggtcaaatcggagacaacctcccctccccaaccgacgtaatcccactaataaaatcaatcggagcaacaaaagtaaaactctacgacgcaaatccacaaatcctcaaagctttctccaacaccggaatcgaattcatcatcggactcggcaacgaatacctctccaaaatgaaagattcttcaaaagccttaacatggatnaaacaaaacgttactccatttttacctgcgactaacatcacatgcataactatcggt

SEQ ID NO: 14610 - DNA, 400 bp, Arabidopsis thaliana
  unsure at all n locations
  Clone ID: LIB25-098-Q1-E1-G12
ggagagagcgaaaatggagctctgtgttatcagcacgactacgacggtgaaggcaattaatccgtttcttccgtctattacacgtcgtgttagttcccgtctcttccaatcagatagtgtgctacagtttggtgggaggttgaagaaaccaattagcaggcctttggacatgtcttgtctctagaaaaattggatttttcggagattttatgtcacatggtggtaattttaggctattcgcggcggcttctccagcggttgaaactagtgtaaaggaagacaaacttccagctgatcttaaggtcacggagactgtacaggcgaattcaagtgtgaaattgagtgtggaagttccaaaaattgtccgtgaaagattgttancaacgaatccctaacgaaa

SEQ ID NO: 14611 - DNA, 254 bp, Arabidopsis thaliana
  unsure at all n locations
  Clone ID: LIB25-098-Q1-E1-G2
atanagtgtctccgatcttttggnggtttggttctgcctcnaccgttgtatggtgtgatgctaanagggtttagcttatcgantttcttggaaacanagtttatgaatgacnttcntggcaatggnggcttacccgtggaaccagttgagattggtgaacttggattcgtgctgatggttgatgatgatgttttcttctcnctctctttctcaaactcgtttancttcattttcantttgagaaagtttcaagc

SEQ ID NO: 14612 - DNA, 429 bp, Arabidopsis thaliana
  unsure at all n locations
  Clone ID: LIB25-098-Q1-E1-G3
aaacatagataaagggaagtgacacatccactgcagagtcaggatctgacgctgaagatatcggttctccgaaggctataaagagtttctctcatctccgcttgacacctgttcgtgaggaggcaaagatagctggtgaaacaagcttggctggtagttttccgggttatgacgagtatgtacctatggtggacaaagccgttgacgccacctggaaggtgaaacccgccatccagagagttgcctcaagaggagctttaatgtctcccaccgttccaaaagatnatgaaggcatcaaggctcgagtcctaagtaatgttcatggcattcctgatggcggttttcacattcctccgcactggnacaaagaaactttcaagcgactactaanttcttcccancangaaancccaaggaaacncaattaga

SEQ ID NO: 14613 - DNA, 302 bp, Arabidopsis thaliana
  unsure at all n locations
  Clone ID: LIB25-098-Q1-E1-G4
gggaagaatggaaggttggctttataccatccgacacaaccgatttggccttcaattttcccgtaaacgatacttcgttcttcacgangaacaaccttacaagttttaaatctgtaccatctgatcacaatgaggaacctgagagaagagcatctctagattgttgtattcgcgttaccgacaatggtatagagagtttccatagaaagattcctttcaaattcacgctttaaaacacttngaancanttggattaactaaagttnggaacnagtttnctnaaaaaactgncnaatggattc

SEQ ID NO: 14614 - DNA, 426 bp, Arabidopsis thaliana
  unsure at all n locations
  Clone ID: LIB25-098-Q1-E1-G7
aagataataccaatcctgttcattcaattccgtgagcttcgaatcaacaggattggtattatctttcttagtagcagtaggagaagatacggagagaggagccacgggagatgttgattcgaagctcacggaattgaatgaatcaagggctgagttactaaacaggatccagaatctgaaacaggacttgcaaagttggagaggtaaattggacactcaagttaaagtctaccgtgaggagctctctgggctaaagaagactctgaatcttgaagttgagcagcttcgtgaggaattcaaagatctgaaaactaccttgaatcaacagcaagatgatgtttccgctaacccgaaaagcttanggctacaagantccaaaagaacaaatttatnaanaagaattnaggtacngaagaaaaaantggg

SEQ ID NO: 14615 - DNA, 315 bp, Arabidopsis thaliana
  unsure at all n locations
  Clone ID: LIB25-098-Q1-E1-G8
tgatgagaagtagatcaccggttttgtaattctttcaacgactctttctctacatttctcccaaatctctgtctcttgagtttgatttagctaaatcaagcaatgtcgcttgacataaagaaaccgaacatcaccaagacgaagaagaagaagacaggtttcgtcgtaaaaatgcagcttaataacaacaagaggaggaaataaaagaaacatccttancctcctcctcctnanaaactaattaaacatggattctccgggtttgnctccccccggaattcctnaaannctaattncccgttcaagaacaancct

SEQ ID NO: 14616 - DNA, 425 bp, Arabidopsis thaliana
  Clone ID: LIB25-098-Q1-E1-H1
tacagagtcagaaaataaaaagtagaagaagcagaagcgagagtgcaaaaaggaaattaggttttgagtggtcatgtctgctcctatctattctccgatagatatgcaagagattgttcaaaatcctcctgggtttgatacggaaccagtcccaatcagtacttaccgagacaatgaacctgtcccgctttcaacttaccgagaaaatgattcaagatcatctcgacgccactcagcaagagaacgatgacttttgggaaaacggtttcagtagggaagaggccattgaagatccagagccttctcaggcaaaggaaaatgggaaagagaagtgtagacaacagcgctttcactcatggggaaactgatctcaatcaacttcctgcgaatcctccgggtttcaactgggccaagggtttgccgtt

SEQ ID NO: 14617 - DNA, 411 bp, Arabidopsis thaliana
  Clone ID: LIB25-098-Q1-E1-H11
ctctcctcttcttgttttaaaaacctatcaataatattcttcttcttcctcctctcaaatggcggctactagggttcgttgttgtcatagcaatgcagctttcaccagattgccacttacccgccaccgaaactcgccgacgctaccgatttctctaaatcgtgtcgatttccctacgctgaagaaattatcattacccattggagatggctcctccattagaaaggtttcaggttcaggcagcagaaacattgtgcgagctgtgttggaagagaagaagacagaggcgataacggaggtagatgagaagggtatcacgtgcgtgatgaagtttggtggatcttcggtggcgtcagctgagagaatgaaggaagttgctgatttgattttgacttttccggaagaaaagtc

SEQ ID NO: 14618 - DNA, 412 bp, Arabidopsis thaliana
  unsure at all n locations
  Clone ID: LIB25-098-Q1-E1-H12
agttttttttcctttttccggcgaagctctatttagcttgattccggcgtttaacacgcgttttaatcganacagacatttgagatcgaattaattttgtancgggctgtgtctttantatagatggagagagattttctcgggttgggttcgaaaaattctccgatcactgncaaggaggaaaccancgaaagctctagagattcagctcccaacagaggaatgaactggtctttctcaaacaaagtatcagcttcttcttctcagtttctatccttcaggcnaactcaagaagatagacatagaaagtctgggaaattatcatcttcctcactctgggttccttcatgccatcatcaagtagctgatgtttatgagtcaaccccgnaaagctccctaanagntttgnaaa

SEQ ID NO: 14619 - DNA, 298 bp, Arabidopsis thaliana
  unsure at all n locations
  Clone ID: LIB25-098-Q1-E1-H2
ggagaaagaagttcccgaaactgaacgaccctttactttccttagggattctgatgacgtcactccatcttcttcttcttcttccgtcagggctcgtttcgagactatgattagggctgctcaagacagtgtttgtgatgcaattgaagctatagaaggcggtcctaagtttaaagaagatgtttggtctcgacctggtggtggcggtggaatcaatcntgtgttgcaagacgggaaatgtncttnaaaaagctngngttaatgnccccgttgtttaaggggntaagcctcctgaanc

SEQ ID NO: 14620 - DNA, 433 bp, Arabidopsis thaliana
  unsure at all n locations
  Clone ID: LIB25-098-Q1-E1-H3
aacaaagctcaatcatggctagtcggagagaagtacggtgccggtgcggcagacggatgtgggttcaaccaagacgcccgtaccgtccaatgctcaacctgccacaccgtcacgcagctctactcgctagtggacatagctcgcggtgcaaaccgcataattcatgggtttcaacagctacttagacaacaccaaccgcaacatcatgaacaacaacaacaacaaatgatggctcaaccgccaccacggctgcttgagcctcttccctcgccgtttgggaaagaaagagagcaattttatgcggcgtgaactataagggaaaaagttttagntttgaaaaggntgcatcagttgatgctaagtccaatgagatcttantgggntcaacaaaaggggtttcccaattgaccctattcccatgntcaaagaanag

SEQ ID NO: 14621 - DNA, 425 bp, Arabidopsis thaliana
  unsure at all n locations
  Clone ID: LIB25-098-Q1-E1-H5
agcatttctcggggtagcgccgaccaatttgcatcaaatgctagtgcagcagaggagatggtcagagggagactttcagattatgctttcgaagtatagtccggtttggtatggaaaaggaaagatcagtttaggactgatacttggttactgttgctattgtctttgggctccatcttcactacctgtgctcatttactctgttttgacttctctctgtctcttcaaaggcattcctctgtttccaaaggtctcgagctcgtggtttattccgtttggatacgtcactgttgcagctaccgcatatagcctaaccgaattcctgtggtgcggangggacgttccgtngaaggtggnacgancaaaaggatgttggcttatgngaagaaacaanccngttcctttccggntttaaggggnaacaa

SEQ ID NO: 14622 - DNA, 435 bp, Arabidopsis thaliana
  unsure at all n locations
  Clone ID: LIB25-098-Q1-E1-H6
ccgtagttttacgtggaggcatcaccggaggatttcttcaccatcgtcgtgacgcttcatccgtcatcacaagaagaatctcatccgtcaaagccgcaggaggaggcatcaacccaacggtggctgttgaacgtgccacgtggctacctggactaaaccctcctccttatcttgatggaaatttagctggagattacgggtttgacccactcgggttaggagaggatccggaaagcttgaagtggtatgttcaagcaagagcttgttcactctcgtttcgctatgctcggtgttgcaagaataccctcactgatntcccttcggancacaaggaatcntaanttaaccggtttgggtatgaaactggaanctgttnaaatttgattttgccaagtacaaaaactcccaataanttgtacanttccaacttanggg

SEQ ID NO: 14623 - DNA, 170 bp, Arabidopsis thaliana
  unsure at all n locations
  Clone ID: LIB25-098-Q1-E1-H8
nacnattccaagancagaaagatcgaattgctcnccttttctctcctgtatccacgaaataaaaaaggcttcttcttccttttgtttgtttcttcnttttgttgtgggatctctttaagttttgggntgtcccttgtctgtttgtgtttganagtagctaanttcgaaga

SEQ ID NO: 14624 - DNA, 482 bp, Arabidopsis thaliana
  unsure at all n locations
  Clone ID: LIB25-098-Q1-E1-F8
gggngnaacatccatntagnacgncccgtnncaaacatgaattcgcgggccgacccacgcgtccntttcttctatagatttcttactcagaaaacttgaagcaaaagttaattaaaaacctaaaaaaaattagaagaaggaaaaaagatgaaacgatttttaggtttttaattaacttttgcttcaagttttcttctatagatttcttactcagaaaagtttcgaattcgaccctgtagcttagttgttgtttataatttcttgtgatcattcacagtacaaaaaaactaattcacccaccgacttcttcttcntcntctcttctctgtggcccatccttaaacccacactgcttttgcttttcctttttttttccgggaaatttgatctccttancnttcggcantattagtacgggaaaggtccnttaagntntttttttggtnccccnaaanctcacnttttccnanattttcnncaag

SEQ ID NO: 14625 - DNA, 402 bp, Arabidopsis thaliana
  unsure at all n locations
  Clone ID: LIB25-098-Q1-E1-D10
ttctctcttcccttctctcttcctctggttcacatggaacttcaataacattcactactttaaggtttctcatctccgaaaaagtcaggtgggtactactaaatttggattttcgttcacttagaacagttctgtttgatctttgattcctcaagttataacttttgtttttcttttatatcttatgacatgataatattaggtcttaaatcatcctcttcttttgatcctgttggaaaattctttgatttggtggttatgttgcttagataacctaaaaaggtatgaatttgtagctttgttggattcttaatctctgtttttatcaatagatttgattaatatatgtctaattatgtggttatttgcattanaattgtgttaagtatanacgaatataac

SEQ ID NO: 14626 - DNA, 402 bp, Arabidopsis thaliana
  unsure at all n locations
  Clone ID: LIB25-098-Q1-E1-D12
agcaaccgccgcaacaacgacgtcgtctcaccttcttctctcaagctcacgtcacgtggcatcatcatcccagccttcaatcctttcaccgagatctctcttctccaacaacgggaaacgagcaccaactggagtgaggaaccatcagtatgcgagtggagtgaggtgtatggccgtagcggcggatgctgctgagacgaaaacggcggcgaggaagaagagtggatacgaacttcaaacgttgacgggctggttgctgagacaagagatgaaaggagagatagatgcagagctgacgatagtgatgtcgagtatatcattggcttgtaagcagatcgcttcacttgttcaacgtgccgggaatctctaanctgaccggagttcaaaggcgccgttaataat

SEQ ID NO: 14627 - DNA, 321 bp, Arabidopsis thaliana
  unsure at all n locations
  Clone ID: LIB25-098-Q1-E1-D6
acncangcgtctanncacgcgtccgctcttcctcttcctcttcnttctctctctcttcncattctcctcatacgctataaggagaaaatctcaggagagagagtgatggntaanaatgagggagagatgcaatgtgggtccangttgtttaaacaataggagctataagagatgagtggggtcaatgttggtggcgattacgttgaggtcatgtgtggttgtaccagtcgcngatacggcgatgctgttgctatnacttagggttttccccaccggngaccttgatntcacctgcgaatgcacacctggntgnaatgatga

SEQ ID NO: 14628 - DNA, 425 bp, Arabidopsis thaliana
  unsure at all n locations
  Clone ID: LIB25-098-Q1-E1-D9
agcttttctctagcgtcggggcctcgatctcttgatttgagcttttcttaggtctgtctctctctgtacactctctccgccgtcgtatctcgccgtcgatttcaatttttccgacgatatgaagctcaccgttaaaactctcaagggcagtcattttgaaattagggttttaccctccgatacgataatggcggtgaagaagaatatagaagattcacaaggaaaagacaattatccatgtgggcagcaattgttgattcacaatggaaaagttttgaaagatgaaactagcctggtggagaacaaagttacggaggaaggatttctcgtcgttatgcttancaagagcaaatctgggaggttcagctggtcaagcttcggttcagacttcntctgtttcacaagcctgtttccgctaccacaat

SEQ ID NO: 14629 - DNA, 434 bp, Arabidopsis thaliana
  unsure at all n locations
  Clone ID: LIB25-098-Q1-E1-E1
acttctatcttctccgtcatcgttctctctctctcctctcccggagatttttactcaggcgttcttctgtggatcagaggtgaaaaagatgaatcattgcaaccttcagcagaacgccttcatgtctcgtgaggagatgatgggatttgaccgtaaggatcttgttgtttgtcctaagcctcgacgtgttggtttactcgccaacaacgttattcgtcctcttagattacatatgagtcaagctgcagccgacttgtgtgattctaaagctggtgctgagcttttggaaatcattcgtagaaaggagggataatggaacaataggggcagttactatcaacancnccaacgtaatttcccgggtcaancaccgaattnnaagcgggngaaanccattangcccaaggatgntcggttttcgangnanaanaaag

SEQ ID NO: 14630 - DNA, 417 bp, Arabidopsis thaliana
  unsure at all n locations
  Clone ID: LIB25-098-Q1-E1-E11
tccttctttctctcttctatctgtgaacaaggcacattagaactcttcttttcaacttttttaggtgtatatagatgaatctagaaatagttttatagttggaaattaattgaagagagagagatattactacaccaatcttttcaagaggtcctaacgaattacccacaatccaggaaacccttattgaaattcaattcatttctttctttctgtgtttgtgattttcccgggaaatatttttgggtatatgtctctctgtttttgctttcctttttcataggagtcatgtgtttcttcttgtcttcctagcttcttctaataaagtccttctcttgtgaaaatctctcgaattttcatttttgttccattggagctatcttatagatnacaaccaagagaaaaagatnaaatctt

SEQ ID NO: 14631 - DNA, 357 bp, Arabidopsis thaliana
  unsure at all n locations
  Clone ID: LIB25-098-Q1-E1-E2
gctccagatcaancccgcaaaggcgctgatatcctcgtcgaagcnttanaacgtcaaggcgtataaaccgtattcgcttaccctggaggtgcatcaatggagattcaccaagccttaacccgctcttcctcaatccgtaacgtccttcctcgtcacgaacaaggaggtgtattcgcagcagaaggatacgctcgatcctcaggtaaaccaggtatctgtanagcnacttcaggtcccggagctacaaatctcgttaagcggattanccgatgcgttgttagatagtgttcctcttgtancaancacangacnagtccctcgtcgtatgattgggaaanatgcgtttcaaagangant

SEQ ID NO: 14632 - DNA, 422 bp, Arabidopsis thaliana
  unsure at all n locations
  Clone ID: LIB25-098-Q1-E1-E5
aagaatgactaatatggccggaaccgccaccaccgagttccggtggaaatcaccaccacagcctccgtcacaagagcaacccatttcagattcagattcagactccggatctgattcagagaatcatcagcaccgtcacaatgatctatcaaactccatcttcgaagcttacctcgattgccactcatcttcgtccccttcctcaatcgatctcgctaagatncaatcttttctcgcctcgtcttcttccggtgctgtctcgtgccttatctgtctcgaacgcattaaacgaaccgattctacatggtcctgcacttcctcatgcttcgccgtctttcaacttttctgcattcaatcatgggctcgtcagtgcttagatttaaaagccgcgcntgcantnncgcgaacttctcgaatcccgg

SEQ ID NO: 14633 - DNA, 417 bp, Arabidopsis thaliana
  unsure at all n locations
  Clone ID: LIB25-098-Q1-E1-E6
tctcaatcccacatagagagaaagagagagagagagatgagtcggaggaacaagaacggccctaagctcgagctgaggctgaatctttcgccgcctccttctcaagccagccagatgagtcttgttcgatcaccaaaccgatccaacacgacttcaccaagctcatgcgtttcatctgaaactaaccaggaggagaacgagacaataacctcaatggttcttgtgggttgccctcgttgccttatgtacgttatgctttctgatgatgaccctaaatgtcctaaatgcaaaagcaccgttcttcttgatttcctccaagaaaacgcttttgccgctacaaccgctaacgctggcaataccaaacgcaagaangaagaactggtgggaatggantttattaatggttccaaccgngtt

SEQ ID NO: 14634 - DNA, 411 bp, Arabidopsis thaliana
  unsure at all n locations
  Clone ID: LIB25-098-Q1-E1-F12
gactctatatgtttggaagggaaagcaggatcagtatctgagatatcacgattaactggaacaagcgtacaaattctagctagggaagaaattccccgatgtgcttctatcaatgatgttgttatacagattactggcgagatcagagctgctcgggaagcacttgttgaattaacattactattgaggagtcatatgttcaaggagctctctcaaaaggagacaccaccagcttccacatccacaactggccctctcgaaggtgttgcaggagtaatggaggtagcttcatcaaataacacaattcaatctcgtgaaggtcctactagttcgaatctgaacttgcagcaagttagcacaatcttgccacaagtttaaggaaaggttccggtnaattttcaaaaggggggt

SEQ ID NO: 14635 - DNA, 420 bp, Arabidopsis thaliana
  unsure at all n locations
  Clone ID: LIB25-098-Q1-E1-F3
acacataacgctgattcggggagacttgcgtcgaggaaagcgagtgacctcgggatcgataaacagaacgggaagatagagtttgcacagctatatggtatgtcagatgcattgtccttcgggttaaagagagcagggttcaatgttagcaagtacatgccgtttggacccgtcgcaaccgctataccgtatcttctccgacgcgcttatgagaaccggggaatgatggccaccggagctcatgaccgtcaactcatgaggatggaacttaagaggagattaatccccgggattgcgtnaagagaaagtatggagccattaaatgaaattgggaaatgtnnatgaataaatttcctccangtaatttaaagaaantnaaaaccaaaaattttatatangaaatggattaggtaagaacat

SEQ ID NO: 14636 - DNA, 412 bp, Arabidopsis thaliana
  unsure at all n locations
  Clone ID: LIB25-098-Q1-E1-F4
ctatggatttgtgtgtgagtgagtanatcgcgcaaagaatctgaaaatggcgtcaacggaaggccttatgcctatcacccgggcttttctcgcttcttactacgacaaatatcctttctctcctctttccgacgacgtttctcggctttcctctgacatggcatctctgattaagctattgaccgtccaatctccnccttcacaaggggaaacttccctgattgacgaagcaaaccgtcagccccctcacaaaattgatgaagaatatgtggaannatagggagnatntggacgagatactgtntcttctgtcaccatctngcctggctgttcagccttcgggaaaccttccagatncgtntgatgccgnaattcgcttcaattttgcggactcncaaagganagttttgga

SEQ ID NO: 14637 - DNA, 484 bp, Arabidopsis thaliana
  unsure at all n locations
  Clone ID: LIB25-098-Q1-E1-F5
ggngngnatntctagccgntcggtaccganctgcaaattcgcgggtcgacccacgcgtccncccacgcgtccggtaatcgtcagtcaactgtagaaaccaaatttccggtagaaaaatcaaaatgcttcagctcgtggttgtagcgtggctcttgattttcacggcggagacggttgtacctcaccaggaatccggcgaatggagttgtgaatcggactcggagattcaggtcttagccgatttcagaccggggattatcaccctcgatggtcacaacgatgactggaaggacattnaagggctccgagttcccgctccgaactgcacttgattcggacccgatnacgaattatgacccgggaagatacagtcaaggcactacataatggtcgaagatatcaactttcttctggagattgatggaaattacccttatataaaggtgaaaacaacaantgtcctcagtggctctcaaggttccaa

SEQ ID NO: 14638 - DNA, 414 bp, Arabidopsis thaliana
  unsure at all n locations
  Clone ID: LIB25-098-Q1-E1-F6
gtancaggcaggnaattngcnggccgacccangcntcnnctctacttaacgctctctgtatcttcttctccgtcaacgatacgaacccanagacgtcggcggttaaaacaatcgtcggatctctctggattcgttagacgagaagtttccggtatctaatttctgtgcgtnagaganaaattagggttgttgctacgatggatgaaactttacttgacgatataatacgacggcttttggcgacgaataatggaaggacggtgaagcaagcacagattactganacggagatacgtcagctatgtttaacttcaaaanangtttttctcaatcaacccaatctcctcgaactcnaaggccctaanaaagaattgcggngangttcaaagggcaattttcaanacctccttgcng

SEQ ID NO: 14639 - DNA, 424 bp, Arabidopsis thaliana
  unsure at all n locations
  Clone ID: LIB25-098-Q1-E1-F7
tgcggataacaatacaaaccagagctacaagatctttgattctcctcggggagctctaatctcgggaatggcagtttcgatgatattatgtttaagatcatcattgcttgctactgaaaacgcagcttcttgtctccagagactattgaatttcccagagaagattgatgtgaggaagataatagagaaagctaagtcattacaaactttggctttggatgatgatgtacgatcatcagctctatcgataaatgatggctttgatcagagcatcagtccaagcagtaccggcgagaactaacagttttccttccggatncacatctcctaaatctccattgataattaccccacaaagttattgggaagatnaatgganaagttctacacaaagccgccgaaggaagagaaaaagaantccttc

SEQ ID NO: 14640 - DNA, 423 bp, Arabidopsis thaliana
  unsure at all n locations
  Clone ID: LIB25-098-Q1-E1-D1
gggttttctttgcacactactcgctccaatgggaaagggaacagggagtttcggtaagaggaggaacaagagtcacacactctgtgtgagatgtggtcgtcgtagtttccacatccagaagagtcgttgctcggcttgtgcttacccagctgctcgcaagaggacttacaactggagtgtgaaggccatcaggaggaagactactggtaccggaaggatgaggtatctccgtaatgttcctcgtcggttcaagactggattcaagagaaggtactgaagccaagccaagggagcaaggnatcaacttcatcagcttaaaagaaccaattcnagtaatccctcaaggaaggactaaaaccttaacaattttttgcattcaactaanttgaagattactttcaaggtggatntcaaacattangt

SEQ ID NO: 14641 - DNA, 197 bp, Arabidopsis thaliana
  Clone ID: LIB25-097-Q1-E1-B10
caatttatggacgtgatggttatgattttgatgggtgtcgacttcgggttgagattgcacatggtggtcgtagattttcaccatcagttgataggtacagcagcagctacagtgcgagccgtgcaccttcaagacgctctgactaccgcgtgcttgtgaccggattaccgccttctgcttcgtggcaggaccttaag

SEQ ID NO: 14642 - DNA, 432 bp, Arabidopsis thaliana
  unsure at all n locations
  Clone ID: LIB25-097-Q1-E1-B2
tnatcgccagcacggaaggatccgggcaccacgctccggcatgcatttatggcgtgatggtatgattttgtggntgcgactcgggtgagattgcacatggtggtcntagttttcaccatcagttgataggtacagcagcagctacagtgcgagccgtgcaccttcaagacgctctgactaccgcgtgcttgtgaccggattaccgccttctgcttcgtggcaggaccttaaggatcacatgcgcaaagctggaatgtctgcttctctgaattttccctgaccgtaaaggcatgtctggggttgtggttatancaactatatatatgaagtacccataaggaaacttgatgccactgaatttcaaatgcttctctagtgctatatacggtgaggaatatgatcgagagtgtnatcgaagccaatgatctaaac

SEQ ID NO: 14643 - DNA, 515 bp, Arabidopsis thaliana
  unsure at all n locations
  Clone ID: LIB25-097-Q1-E1-B3
tatttccagcnccggtaaggaatccgggtcgaccacgcgtccgcttntgatcacttgcagctatgggcacacatgcagctctcgccgtctcaagaatcccggtcacacagcgactgcagtctaagagtgccattcactctttcctgctcaatgctcctccaagaggctagaagtcgctgaattcccggtctgcgtatgagtagtatcggtggggaagcatctttcttcgatgctgtactgcacaaatcatccctaangctgtgacaacatcaactccctggtagaggagagacagtgggcgaaactgaaaanttnncaataaacggttttgggaaggattgggtanggaactttcttaangtgttggcaatggtcgtaaaagactcctccctcctccgaaantttgnttggnacttaaaacgaacaattgggtggggtggttccaaagaaatngccatccccaacttggccttnaagttanngaacctcccaaangncctttgggaaacccnttg

SEQ ID NO: 14644 - DNA, 432 bp, Arabidopsis thaliana
  unsure at all n locations
  Clone ID: LIB25-097-Q1-E1-B4
atgccagncggaangatccgggcnccaccnncggcggacaagaatctactcgacataatctcccgcctctctaagaggtccgatgttttcgcctccaatctccaatctggcctctcctcctcctcatcgctcgatcagcntcactctgcgtttcctcatattgaactcacggttctcgtcaaggcactagaagataatggaagtgattttaatgctgctatgaagacttatactctttcgcatcttctgaggagaagaaactgaagaattggccgccangaagtgtgctactcaagnaactgatgcgtttgtggtggaaaccccccgacaagtggtgatgactgggttgaattgttantcagggaantgttacaatcgtctggnnaaatgatgcaaaattacgtgcaacaagatccttganggcttananaa

SEQ ID NO: 14645 - DNA, 477 bp, Arabidopsis thaliana
  unsure at all n locations
  Clone ID: LIB25-097-Q1-E1-B6
gcccccaganggnaggatccgggcaccacgcnccgcacactgagagnantttctttaaattcctcaatttttttttgtgtgtaaagaataataatttattcgattgaatttgtttattcgtgtctttgtttttactcaatcccctgtttccggttctgttcgattcttctctgtctctgttttgtttttcgtcattttgcctaaagccacatgcaacaagtgattaactgaatttttattatccatatccattttgattcgccggaaagtttattcttttccggcgacaaatgcgaaagattcgaaaacccattttaaccaaatcaattctaagaacgaatgtccaatattcaatccctgaattcaaatcaaacaacgaagcctatcgaaaaccaaacatcggattctttggggtcccaaaagcctttgggggtccgtcaatncgggaaanttttaaccaangggattcccccttaa

SEQ ID NO: 14646 - DNA, 416 bp, Arabidopsis thaliana
  unsure at all n locations
  Clone ID: LIB25-097-Q1-E1-B7
taatgtcgtaaccgattcgttccggagatacagccgtaacgcggcgggtcacgacgataaattcactgtctacggtgaaaacagtaacgtggtagaggaaggattcaattcatacggaacattcggaaccggcggcgccggagatttcactaactaccaaaacaacgtgaacaatccaacgagtcgattcacggcgtattccgacggaggtaacggtcgatctcaaacattcaaaacctacacacacgaagctaacgccggtaacggtcaatcattcacaagctacggnaaaaacggaaacggagttcctaacgagttcacttcttacgggtctcctccaatgtatccgctccgggttctctaactacggngaaaagtggaaacgcggggaacgataccttcacaagctacgggag

SEQ ID NO: 14647 - DNA, 55 bp, Arabidopsis thaliana
  unsure at all n locations
  Clone ID: LIB25-097-Q1-E1-B8
aagggggacctccggttttttgaaaagnggggcaaccaatggnggttgcaacaac

SEQ ID NO: 14648 - DNA, 447 bp, Arabidopsis thaliana
  unsure at all n locations
  Clone ID: LIB25-097-Q1-E1-C1
ctngtatctcnagccaccggnaggaatccgggcgcccacgcgtccgaacaaatatatattagtagtaatttttttatttttttggggaaaaatgggtggtatttgganttctacaatttttattatctgtttgtgggaattcagccaatgctgaggtatcaccattggtcttcatcaggtctgatattactcaggcacttctgaaagcattcacatcggcatgccaatcttcgtcaccaagcaaagtggtgatcccaaaaggagagttcaagcttggtgagatcgagatgaagggtccatgcaaactcccattgaggncacccttcaangtactgtcaaagctgacggtaacgctatccaanggaangaaaatgggtctctccgcaacattgatggctttaantgacggaggaggagcctcgacgntnangnatgcancttgnnata

SEQ ID NO: 14649 - DNA, 200 bp, Arabidopsis thaliana
  Clone ID: LIB25-097-Q1-E1-C10
ctcttttagggattgtttttttaacaatttttgccttgccataagcaatacaaccatggcaaggatctctctgttgttctcattagcctttgttttagccctcggctcagtgttcctttccgtttccggtcacgctcctcccgtgacaccgagaaaatcagcatgtccaaaaacagtatccgaactccagaccttacctt

SEQ ID NO: 14650 - DNA, 206 bp, Arabidopsis thaliana
  Clone ID: LIB25-097-Q1-E1-C11
ggccactctagccgcagaagttcctctagctggtgaaaacgcattgcctaggtacgacgactatgcacacgagcagattctcaaggcctccgcgctgaaccttgatcaaaacaatgagggagaacctcgagagatgtgtgcatttacttacctaaggatgaatccggagttgtttcaggcggataactggggaaaattcgtagcgt

SEQ ID NO: 14651 - DNA, 205 bp, Arabidopsis thaliana
  Clone ID: LIB25-097-Q1-E1-C12
gcaatgacactgttcttgctcttgtccactctcctcctcacgacttctttagctaaagatctctgtcataaagatgacaaaactaccctcctcaagatcaagaaatccctaaacaacccttaccacctcgcctcatgggatcccaaaaccgactgttgctcttggtactgcctcgagtgcggcgacgctactgtcaaccaccgtg

SEQ ID NO: 14652 - DNA, 403 bp, Arabidopsis thaliana
  unsure at all n locations
  Clone ID: LIB25-097-Q1-E1-C2
aaaaaactaaaaatcanaaatctcatcaccttccttgcnctgtattttttctctctcactaaatcctccatggatccttctctctctgcaaccaatgatcctcancatcctcctcctcctcagttcacatctttccctcctttcaccaacaccaaccccttcgcctctccaaancacnccttcttcaccggacccaccgccgtcgcgccgccaaacaacatccatctctatcaangcagctcctccgnagcagncaacaaacatctcnagttcctcctcatccatctatttcccancctcggttactctggnnatgatttgcacgggggattgcagcgtttaagagcgnnacaagatggggtcaagcaagcaaagctaantttcgaagggnacaatagaagng

SEQ ID NO: 14653 - DNA, 292 bp, Arabidopsis thaliana
  unsure at all n locations
  Clone ID: LIB25-097-Q1-E1-C3
taatcatttttttttttcattgaatgaaacaaacaagacattcaaaatagaacaaaagttctacagagatagagagagaaagagagcttttcttcatgggtggtctacaagcaaggatgagagaacatataagaaccatcaagtgaacaatgacaagagggagacagacaactgtngaagaaatgtttgnttaaatgaaaaatgagaaaagaaacgaagatnaagtnacaagtgaaagaagagcacccatgatgnctgacatttaaaactagagactgnaggacccctcaca

SEQ ID NO: 14654 - DNA, 446 bp, Arabidopsis thaliana
  unsure at all n locations
  Clone ID: LIB25-097-Q1-E1-C4
tntttnggcccgaccgtnacggggaaaaaggaaattcccgggggttcgaaccnaagncgtccagangggacaactttagaagaacaaaagagcaagctccgtcaagctcaacccggtctggaaagtatctcgccaagccggcccgttctcaagcaagctcgtcaagatnacccgtctgaagcatctcgtcagccggtccgtctcaagtagctcatcagctcgcccgtctcaagcagctcgtcagctcacccgtccgaagtatctcgccagccggccgttaaattttcccgatggagattcttccgattccggcggagatttcaaggannttcatcggactggaaaatgggggatatactagagtgtggtgctccgggtgtctctaactaatgacgcttataactatcgcngttctcatcttgggcattctccacacaganttaaga

SEQ ID NO: 14655 - DNA, 396 bp, Arabidopsis thaliana
  unsure at all n locations
  Clone ID: LIB25-097-Q1-E1-C6
cagattgtgctggagctttggatataactgacgatctccagaacttgctggctggggatgagcttactggtctatactgcttccgccatcttcgggatcatgttactagttccatagattccataaacagtattctcacttcagaattcatgcgtatctccatacatgatactggggagatagatgtactgattttatctgcaagcaaatatacggggatccatttcatctaacggggaataccggcgaagaagttaagttagaagaagaggatacctctaccttatgtgatcggcttcctcctttaagttattgggattgctaagaacggcaaanttcccgtcaatttganggatgtaccgtgatacactcacatccgganatgaaaaatgcant

SEQ ID NO: 14656 - DNA, 166 bp, Arabidopsis thaliana
  unsure at all n locations
  Clone ID: LIB25-097-Q1-E1-C9
ttcttctctcactctccggngactgttacgagtttttaacacttccgtcgtcttctcagttgttgttgttgtttatgacaagatcttgttctatccattaaaaccaaagaaatggaggaaggtcataaagaaccattggtgctaagagttgaaggatcacattgtt

SEQ ID NO: 14657 - DNA, 416 bp, Arabidopsis thaliana
  unsure at all n locations
  Clone ID: LIB25-097-Q1-E1-D1
aaacaaaccaaaaatgggttcattggtaagagtgtattagtgattctcgtagcacttggtgctcacttctctgcctcactgaagaagtgaaccataagatcaaacccttctctagctcctgtctgtccttacaacacggcacaccaccacacctctcatcacacacctcacctcacctcancccaccaccggcaaatctcctgttaaaccccggttaangnacagtgtctccaacaagccaaactccggttaaagcccccggtttacccacccaacaaaagccccggtgaaaaccccaactaaaacccccggtcaaagccaacctgttttcccaacaagccaaaacctccgggttaaagccaccaagttttaaccctccaaaancaaaagntccangtttaaagnccccccaantc

SEQ ID NO: 14658 - DNA, 425 bp, Arabidopsis thaliana
  Clone ID: LIB25-097-Q1-E1-B1
taatgtcgtaaccgattcgttccggagatacagccgtaacgcggcggggtcacgacgataaattcactgtctacggtgaaaacagtaacgtggtagaggaaggattcaattcatacggaacattcggaaccggcggcgccggagatttcactaactaccaaaacaacgtgaacaatccaacgagtcgattcacggcgtattccgacggaggtaacggtcgatctcaaacattcaaaacctacacacacgaagctaacgccggtaacggtcaatcattcacaagctacggcaaaaacggaaacggagttcctaacgagttcaacttcttacggggtctcctccaatgtaatcggctccggtttctctaactacggcgaaagtggaaacgcggcgaacgatacctcacaaagctacgggagcgaacg

SEQ ID NO: 14659 - DNA, 453 bp, Arabidopsis thaliana
  unsure at all n locations
  Clone ID: LIB25-097-Q1-E1-D3
gatnnccnncacggaaggatccggtcgccacgctccgcatacanaaatatgaanctctcacttcactactcttgccttggcgctacggtctcccacgtccatctcggcatccgttccagggctcatcgaactcctcgaatcgaacaccatctttgggaacgaagccgaactcttagagaaagagggactgtccatcaactaccccaactgcaagaaagctggcaccttggtgttgagacctctaacatcataaacttcgacacggtgcccgcaaattgcaaagcctatgttgaagactacttgatcacttccaaacagtaccaatacgactccaaaactgtaaacaaagaggcatatttttacgccaaaggacttgccctaaagaacgataccgtcaatgtttggatctttgacctagacgacactctcctcctcctagtaatccctactacg

SEQ ID NO: 14660 - DNA, 217 bp, Arabidopsis thaliana
  Clone ID: LIB25-096-Q1-E1-F7
gctctaaatgatcttgcagagatggcatgtatgaagaaggcactaccattcattttaatggtattgttgcaaatagggtatgcaggaatggatattcttacaaaggatgtcctaaacaaaggcatgagcatttacgttctttccgtctaccgtcacggagttgccaccgttgttatggctccgttcgccttctacttcgacaatccagtgattgctc

SEQ ID NO: 14661 - DNA, 179 bp, Arabidopsis thaliana
  Clone ID: LIB25-096-Q1-E1-F8
cgaacaacaacaacaacagcaacaatagcaacaacaacaacacaaacacaaacacaaacaacaacaacagtagtttcgttttcctcgattcccacgcgccgcagccaaacgcgagccagcagttcgtcggaataccactctcaggtcacgaagctgcttccattacagccgccgacaac

SEQ ID NO: 14662 - DNA, 72 bp, Arabidopsis thaliana
  unsure at all n locations
  Clone ID: LIB25-096-Q1-E1-G1
acttcanggcagtttcaagatcgtctgctccgttggcatcangacgtatccacgttcagcactgtnnctcac

SEQ ID NO: 14663 - DNA, 198 bp, Arabidopsis thaliana
  Clone ID: LIB25-096-Q1-E1-G10
tgctgttataacacatggatttgtattggatgagaagggtatgaaaatgagcaagtctctaggtaacgtagtggacccacgtttggtcattgaaggagggaaaaattcaaaggacgcacctgcttacggagctgatgttatgcgtctttgggtttctagtgtagattacacaggggatgtactaataggtccccagat

SEQ ID NO: 14664 - DNA, 154 bp, Arabidopsis thaliana
  unsure at all n locations
  Clone ID: LIB25-096-Q1-E1-G11
ggcgacgcaatggcntcttactccggttgtntcntcgtcgttactttggcagttctgtcacantttctcntagccccagcttcagcctttggtcaacagggaatacatcgattccaattgcgaagatagtcaacancaaagccntctgcatcca

SEQ ID NO: 14665 - DNA, 256 bp, Arabidopsis thaliana
  unsure at all n locations
  Clone ID: LIB25-096-Q1-E1-G12
tncgngccacangagactcaaagtcnggganncgngggtcganacaagcctctncacatgagtnctgttatttttttgttatctttgtttcgtttttctggtagaagagagaagaaggagagacgaattggcagctaagcgattctctctctttctctctttctcttctcgtgtaatcttttggtgttcttgaaaccacttttttttttgttaattcctctgtttccttggaattgttttctgcttttttaagaat

SEQ ID NO: 14666 - DNA, 222 bp, Arabidopsis thaliana
  Clone ID: LIB25-096-Q1-E1-G2
cttcaagcactcaagttcgtgcaacaagctgtggggctcagaggatatgcgcaacgcgatccactcatcgagtataagctcgaaggatacaatctatttctggaaatgatggctcaaatacgaagaaatgtgatatactccatatatcagtttcaaccagtgcgggtaaagaaggacgaagagaagaagtctcagaacgggaaaccgagcaaacaagtagag

SEQ ID NO: 14667 - DNA, 216 bp, Arabidopsis thaliana
  unsure at all n locations
  Clone ID: LIB25-096-Q1-E1-G3
tgggagtctattgttgctggattactacatgacacagtcnaggatacaaatttcattacttttgaaaagatagaagaagagtttggtgcaactgtgcgtcacatcgtagaaggggagaccaaggtgtcaaaactgggaaagttaaagtgtaaaacggaaagtgaaacaatacaagatgtaaaagcagatgatttgcggcagatgtttctggcgatc

SEQ ID NO: 14668 - DNA, 221 bp, Arabidopsis thaliana
  Clone ID: LIB25-096-Q1-E1-G6
gcccacgcgtccgcccacgcgtccgatcagttggagtcgaagcacagcttactcatttggcttcaatcactcagattattgaccccaaacttcaccatcacttagagaaattgggtggtggtgactatctctttgctattcgaatgataatggttcagttccgaagagaattctccttttgtgactccttgtacctttgggagatgatgtgggcattagat

SEQ ID NO: 14669 - DNA, 210 bp, Arabidopsis thaliana
  Clone ID: LIB25-096-Q1-E1-G7
gaagaacaaaaaaacaaagcatcgaagagacaaaaagatgaacaataaatttggcgggaagaagccgacgggaacaccgtcactagcgtggtcgacagtcgtagttgtagcctctctgctcgccggagcctccgtcgttcacaatatatacaagccagatctcacattacctcagatcgaaaacgatgaaggagacgagaaggaggagtc

SEQ ID NO: 14670 - DNA, 202 bp, Arabidopsis thaliana
  Clone ID: LIB25-096-Q1-E1-G8
cttaactatttcaagttatttacttgtgaaggtgttgacattgatgctgctactaaacatgggattaaggtcgctagaattcctagtgagggtactggaaatgctgcatcttgctctgagatggctatatatctaatgctgggacttcttaagaaacagaacgaaatgcaaatatctctgagaaatagactacttggagaac

SEQ ID NO: 14671 - DNA, 201 bp, Arabidopsis thaliana
  unsure at all n locations
  Clone ID: LIB25-096-Q1-E1-H11
gctctggttcattttccatggacggaccttgacctctctgcttcccttcgtgcattttcnctctctcactatcctctctctttctactgtttgtttgatcctctgcgtactctgttcttcntctctcttcagatanaacangtcctgcatattgaagatctgaggtcttagcgattgctaagtgtggataaggangaacta

SEQ ID NO: 14672 - DNA, 223 bp, Arabidopsis thaliana
  unsure at all n locations
  Clone ID: LIB25-096-Q1-E1-H4
aagggcgtagaagaaccaaaacctaaacaaaagagcaataataactcattaaaaaaccaaaaccaaaaaaaaacaaaacgggtgtcaaaatgttattaatctttggtctcttgatcttagctatggtagctaaatccgtcaatgcaacctaccctttaaccaaatcttgcatcaacgggcaaggttgcatcggggaanacgatgagctcgaatctctannggt

SEQ ID NO: 14673 - DNA, 103 bp, Arabidopsis thaliana
  unsure at all n locations
  Clone ID: LIB25-096-Q1-E1-H7
gaaaaaaaaaaaaaaaaaaaaaaaaaaaaaaaaaaaaaaaaaaaaaaaaaaaaaaaaaaaaaaaaaaaaaaaaaaaaaaaangggnggccgcccnanaggntc

SEQ ID NO: 14674 - DNA, 202 bp, Arabidopsis thaliana
  Clone ID: LIB25-097-Q1-E1-A10
tcttcctcttcgaattttgtgagtttcttcgagagttgaggaagagagactcgagaatatggccaacgatactcacaccgatgacttagacgagcttctcgatagtgccttggatgatttcaaggatcttaatcttactcaaagaaatggaggggttaagaaagaagagggtgataaaaaagagacagagtcattgccaagt

SEQ ID NO: 14675 - DNA, 186 bp, Arabidopsis thaliana
  unsure at all n locations
  Clone ID: LIB25-097-Q1-E1-A11
aaacctaaagcattgcttttgccttcatggtatcanagctcatggaacatagatccatggaactctactctgttccttctctcaatatttcaaattgtgtcaccgtcactcttactgccaagaactatattctctggaaatctcagttcgaatcttttcttgatggtcaagggcttctgggttttg

SEQ ID NO: 14676 - DNA, 204 bp, Arabidopsis thaliana
  Clone ID: LIB25-097-Q1-E1-A12
gaaaactatctttctccttctcattcctttttctctcactctcctccattaaagctctgcactttctcaaagagaatgttcatgggtaagatgggtcttttgggaattgctctgttttgttttgctgcaatggtgtgctctgttcatggctatgacgctggatgggtcaatgctcatgctaccttctatggtggaagtgatgct

SEQ ID NO: 14677 - DNA, 204 bp, Arabidopsis thaliana
  Clone ID: LIB25-096-Q1-E1-F6
atttgcagaatcggaggacgtgaaaatttctttcactgttacaagtgtggctgttgttattcaatcctcctcaagaacggtcacccttgtgtcgaaggagcaatgcatcacgactgccccatttgctttgagtttctgtttgaatcacggaacgatgtgacggttttaccatgtggacacacaattcatcagaagtgcttggag

SEQ ID NO: 14678 - DNA, 435 bp, Arabidopsis thaliana
  unsure at all n locations
  Clone ID: LIB25-097-Q1-E1-A2
ccaaaccatttttgtttcgcaaaatcattctaccatggctacctcatcctcggtggtcagcagtgtacctcagcagcaccaagtgttcctcaatttccgtggggacgaacttcgtaataatttcgtcagccatctggataaggccttaagagggaaacagatcaatgtcttcatagatgangctgtggaaaaangtgaaaatctagataaccttttcaaggagatcgaaaaatctagaatccgcgctggctatcatttcccaaaangtacacagaggtcaaaatggtgcttgaangacctgggntaaaatgaaagaantccgaagggcaaactccntnacgattcccaancttcnaaaanggtgggaacnggctnacggttagggtatcacgaanggaaancttttggngcctgncncccngaaaaaancnaggg

SEQ ID NO: 14679 - DNA, 473 bp, Arabidopsis thaliana
  unsure at all n locations
  Clone ID: LIB25-097-Q1-E1-A3
tttttnacntttgcccccagggccnccgggtnaaagggnaattcccggggtccgacccacgccgtcccgcgaagantcaaacacgatggggacgaagacctgcgagatgttaccgtcagattaagggaaagcatacccgaaatcacgatactgtcgtggtgtgcagtccaaaatcaggtctacgatgttggtatgaagaggaangtgttgatgatttcattctgtgttcattggttcatgggaaaagaaatgttcaagtgaagcactgaagcagcacgtatgcttgcaacaagtatatggtgaaatctgctgggaaaatgctttcatttgaggttanggtcatcctttcatgttctcaggattaacaagatgctttcgtgtgctggagctgatangcttcagactggaatgaaaagtgctttggtaaancncttggtacttgtgctaaanttgcgattggacaggtccttttg

SEQ ID NO: 14680 - DNA, 376 bp, Arabidopsis thaliana
  unsure at all n locations
  Clone ID: LIB25-097-Q1-E1-A4
ttttttttttttttttttttagtccaaaaatgtaaacataaaactgtccataaaacaaaggattaattttacatttgaatcccaaagatganttataataatattatatatatataanattttaatccccagacctcancttgttgatttggttcaaagctggctgcaagatattgtacagaacccaaagtagtgccggtgtcacaacaatcaacaacaactgtcctctgctgtctgaactagcagccgccgcttctgccgcagcataagcctccggangtggagtcnaaaaccctgacgctgcaagaccancaccaatnccctagnccnaacnancgatacctttantctcaacgcatccntggtggaccnggtt

SEQ ID NO: 14681 - DNA, 384 bp, Arabidopsis thaliana
  unsure at all n locations
  Clone ID: LIB25-097-Q1-E1-A5
tcagaatcgtctgatattgatgcggttaggaggattgatctcacacacttgaaggtttatgcaattgatgttgatgaggctgatgagcttgatgatgccctcagtgcaacgagattgcaggatggacggataaagatctggatacatgttgctgatcctgctagatatgttacacctgggagtaaagtggacagagaggcaaggagaaggggaacttctgtctttctgccaacggctacttatccaatgtttccagaaaactgccatggagnatgacttaagacaaggaaaaactgtatgctgcctgtgctgttgcctgctctgatggctgtatacagatatcataataatcatcacagacgactattgtgctatgaantntct

SEQ ID NO: 14682 - DNA, 329 bp, Arabidopsis thaliana
  unsure at all n locations
  Clone ID: LIB25-097-Q1-E1-A6
gttgatcaaatggatactgaaanatccaaagaacctggnaccgagagtgctgatgtgtctttacaccaattagctgatatccagcccgggccatccattttggttgatcaaatggatactgaagaatcaaaaatcctgatgtgtctttacaccaattactgatantgagccctcactgtctatttcactgtgcaaanaatatgacgtaagataaagcacttgaactgctggtctgagtagtatgcctgcgatgtcanaaactcaatcantacgcactaacatggaaacctcataaggacatcnatantgcgagatgctcctnccccgnc

SEQ ID NO: 14683 - DNA, 405 bp, Arabidopsis thaliana
  unsure at all n locations
  Clone ID: LIB25-097-Q1-E1-A7
ttcgtcctccatctccttcgattactgggatgaagatgagttcgaaggattgccggaggacgagaaatctacggagtctccggttttttccgatgacgcctcctctcctgccgatccacagacgccggatcttgagtctgcttcagaaactccagatactgacattccgaagaagatgcaatcgtacactgtggagatcgtttgcgtctctatattgattggttacgctatcaattacttcactgggtaaacgtgaaaatgagaacctcgctttggcttgggcttccaaatttgggtcttaaagatacgatttttgagaagaacttcagtttgcttgggagttggtgaaggagaagactctcctttgttgctgaaagaagcgaagaatgtgtttaagttcaangc

SEQ ID NO: 14684 - DNA, 70 bp, Arabidopsis thaliana
  unsure at all n locations
  Clone ID: LIB25-097-Q1-E1-A8
gtccttnaagcgctcaagattcccctttcctnaataaaaactcnggtgctcctgtctggaacaacaactc

SEQ ID NO: 14685 - DNA, 207 bp, Arabidopsis thaliana
  Clone ID: LIB25-097-Q1-E1-A9
gctgattcttcgacgaaaggggaagaggttgttgaattcaaaatctctctctcttctctgtctctctcgcgtgagctagttgcagatttttccagatctcaacattgaaattcaaactcaaagctagagagggagagagatagatagatagagggagaagaagaagacgaacacggagctgaaacaatgattacgatcccatacctt

SEQ ID NO: 14686 - DNA, 217 bp, Arabidopsis thaliana
  Clone ID: LIB25-095-Q1-E1-H2
gaaatggctggaatggatgttctctgcagtgataagactggaactctaacccttaacaagctctctgtcgacaagtccttaattgaagtgttcccaaagaacatggatagtgactcagttgtattgatggctgcaagagcttccaggattgaaaaccaagatgccattgatgcttccatcgtcggaatgttgggtgatcctaaagaggcaagagcag

SEQ ID NO: 14687 - DNA, 212 bp, Arabidopsis thaliana
  Clone ID: LIB25-095-Q1-E1-H8
gaaatttacctaaatctctccgtaatcatcgatcaaaacgatgctcgagtgtcaatcaatgatggagaaattatcaccgttcgtagacgtcgcctctctggaaatcgagtctctgcgaagaatcaaacgcccgaaacgcttctctgaagaagaatcagaagaaaccgagaatacgacgaattcatcaaacgcggtattcggattccctaact

SEQ ID NO: 14688 - DNA, 148 bp, Arabidopsis thaliana
  Clone ID: LIB25-096-Q1-E1-A10
gtcaactcaaagaagctcaaagtatcaacaaatcactttctgcattaggtgatgttattggtgctttatcttctggcaaccagcatattccttataggaatcacaagctaacgatgttgatgagcgattcattgggcggcaatgccaa

SEQ ID NO: 14689 - DNA, 204 bp, Arabidopsis thaliana
  Clone ID: LIB25-096-Q1-E1-A11
gctgaaatctcaaaatcgaaactaaaagcttctcagatctctaactatagctcaaggcggaggagactgagatcgatcatctgaatcgccgaaacatgtcgagcgatagcaatgatcttgacgaagatgagcttcttcaaatggcgttgaaagagcaggctaagagagatctcacctatcagaaacctccttcatcttctgctc

SEQ ID NO: 14690 - DNA, 190 bp, Arabidopsis thaliana
  Clone ID: LIB25-096-Q1-E1-A12
agtttacttgagattacagagattaaggcccgagaagaagcttcatctgagttgaatctcgatctttcgcgagatccgtacaaaatcatcgtcagagaagccgtcgatagtttcatcgagaaggcgattatgacaatcgatactgagatgggaaagcttcatactcagattgtagaagatgttgatggag

SEQ ID NO: 14691 - DNA, 220 bp, Arabidopsis thaliana
  unsure at all n locations
  Clone ID: LIB25-096-Q1-E1-A7
gctacactgctggaaataaactcttatagctctaacaacaaggagtttccttacatcaccgcgacaanagtttctaggaatatgcacaaaggctatcctcatcatccaacgggcaagaacatttcaactaagcatgcttttggtctcactagctgcaaanaacaaaaagccaacacttggttcattgtanacaagaaccgtggacaaatttgttggaacc

SEQ ID NO: 14692 - DNA, 197 bp, Arabidopsis thaliana
  unsure at all n locations
  Clone ID: LIB25-096-Q1-E1-B12
ctttcnagttttatatttcaagttcttttttttttaaccttgccatcaatacaaccatggcaaggatttctctgttgttctctttagccttagttctagccatcgggtccgtcttggctcacccacctacccacaagaaattacaaaagaccttgtgtccatctactttgtccaaagttcaagctttcccttacctt

SEQ ID NO: 14693 - DNA, 191 bp, Arabidopsis thaliana
  Clone ID: LIB25-096-Q1-E1-B2
ttttcatagctagtgtctgatatcagacaaacacagacatgtctgtgtctctaagctacacttgtcttcttagattacccaccttttcagttccaacgaaacccattagtttcaatggacctctccctttttatctaccaagatctcatatttcctcatcttgttttggtttcaaatcaaacccattcata

SEQ ID NO: 14694 - DNA, 209 bp, Arabidopsis thaliana
  unsure at all n locations
  Clone ID: LIB25-096-Q1-E1-B4
gggagcggcttcaacatttccaatcgtcgctccgagttttgacgcaatgaatccncgtatgtatgctgctactactctatcatctgccaaatcaatctctgcagaatccctaaatcttcgttccgattccaantcagaggcaagcgcatggtgcttctgagtctgagactcgagtctctttaaggaagaagaggataaagcaggatgat

SEQ ID NO: 14695 - DNA, 185 bp, Arabidopsis thaliana
  unsure at all n locations
  Clone ID: LIB25-096-Q1-E1-C1
ccacnaanaacaggaaaaataaatggnaagaatttcactanggatatgtctgatgttagtagtngcatcaantgtgatctatgaagcgcaaggaacgttcttactaaaccattacttgnagangaattttccaaataaatgcaacgagtttacgccttacgcnaacaagggtatgataacgttgg

SEQ ID NO: 14696 - DNA, 187 bp, Arabidopsis thaliana
  Clone ID: LIB25-096-Q1-E1-C10
caaaagctcctccttataaaggaaagtttttagatgttaatcaagctattgaagttgctaggtttgatattcaatacttggattggcgtgctcgtcaagatcttcttaccattatgattcttcatgacaaggttgttgatgtacttaatcctctagctcgtgagtacaagtccatcggtacagggaa

SEQ ID NO: 14697 - DNA, 185 bp, Arabidopsis thaliana
  Clone ID: LIB25-096-Q1-E1-C12
tgtttgaagatgcaactcctgtgatgttaagagactttttctgggatgatgagtttagaccaacttgggatacaatgctttctaattccactactgttgaagagtgtcccagtactggaaccatgattgttagatggatacgcaagttcccgttcttctgcagtgatagagagtatgtaatcggt

SEQ ID NO: 14698 - DNA, 218 bp, Arabidopsis thaliana
  Clone ID: LIB25-096-Q1-E1-C2
cgtgatctctcaaattctctcccttttaaagtcctaaatcaaaaccctaaacccataaatccaatccctccattcgaattcttcattctctctctctctctctctcacaattactgatcggttctgaaatttgtagctatgcaggcaacggctttatcatctgggttcaatcctctaacgaaacgtaaagatcacagatttcccaggtcatgctctca

SEQ ID NO: 14699 - DNA, 218 bp, Arabidopsis thaliana
  unsure at all n locations
  Clone ID: LIB25-096-Q1-E1-C3
aatctctcttgcgtcacttaaaaagtcggtgcttcctacttaagtgttcttgagagtgagacgtttcatttctgggttcaagggtgtagaataaacacttgagtgaagtttaaagcttgagaaagacagaggaaagaaaaatgggtcaaagactgaatcnagtcttctggntttttgtctccattcntgccttttngaattttggtatggctagcaaa

SEQ ID NO: 14700 - DNA, 126 bp, Arabidopsis thaliana
  unsure at all n locations
  Clone ID: LIB25-096-Q1-E1-C5
tgttttactcacaaatatgcaaactagaacacaatcatcaggaataaagggtttgattacttctattggaaagaaaanaatctttggaaaatggatcaancanaggatnccaccactcancacaca

SEQ ID NO: 14701 - DNA, 219 bp, Arabidopsis thaliana
  Clone ID: LIB25-096-Q1-E1-C6
gctcactcaatcggtgactcgctatagtctgtgaagaaaggccaatttcgccataaagttcacacctttgatctcctttgtttctgggtttctcctaaatcatccaaattggtatcgaatttgcccttctccgattcaatttcttcacgatctcaaaacccagaagaaagaatcatgctttcgttatcatgctcttcttcttcttcttcgttgcttcca

SEQ ID NO: 14702 - DNA, 198 bp, Arabidopsis thaliana
  Clone ID: LIB25-096-Q1-E1-C8
tctttcagatatataaatggatcaaatcgttaacgtggatgagtttcaagagctggccaaacaggccctccctaagatgtactatgatttctacaatggaggagcagaggatcaacacactctcaatgaaaatgtccaagctttccgtagaatcatgtttaggcctagggttcttgttgatgtgagcaacatagataa

SEQ ID NO: 14703 - DNA, 69 bp, Arabidopsis thaliana
  unsure at all n locations
  Clone ID: LIB25-096-Q1-E1-D1
nacgaaaatgttggcaanatttcanaaagcttttgctcacccaccggaagaactcaacagtccggcttc

SEQ ID NO: 14704 - DNA, 203 bp, Arabidopsis thaliana
  Clone ID: LIB25-095-Q1-E1-G7
gtgctccattgacgaacaataatcattcttctttttcttaagttcaaccattttagctccttcactggagcttcacgtcgggtacaatggcggccagtaggaagatttgtcattctctgatcgttttcctcatagcgatttctacagtctacggtttccgcggattcgataaaaggctgcggtggttttgtcgaggcgagttc

SEQ ID NO: 14705 - DNA, 177 bp, Arabidopsis thaliana
  Clone ID: LIB25-096-Q1-E1-D11
tcaacattgcttcctaaccagaaatccaccatcatcttcccacgaatacaacttaaagctttaccagaaaatggagggtcagagaacacaacgccggggttacttgaaagacaaggctacagtctccaaccttgttgaagaagaaatggagaatggcatggatggagaagaggaggc

SEQ ID NO: 14706 - DNA, 198 bp, Arabidopsis thaliana
  Clone ID: LIB25-096-Q1-E1-D12
cttcttattaattcattcaaaacagaaaagtacgggaaaaaggaattgagacggtgggtttcgatggggtcaggtgcatcgaagaatactgaggaagatgacgatggttccaatggcggaggtggtcagctctacgtttcactcaaaatggaaaactctaaggttgaaggagagctcactcctcatgtctatggctct

SEQ ID NO: 14707 - DNA, 76 bp, Arabidopsis thaliana
  unsure at all n locations
  Clone ID: LIB25-096-Q1-E1-D3
tccnctcgtcccgtttcgccgctctctaaangggcaagtgagaggttactgtctctttcttctttcagacactcna

SEQ ID NO: 14708 - DNA, 214 bp, Arabidopsis thaliana
  Clone ID: LIB25-096-Q1-E1-D4
ctgtagagtgaagtttgatttatttagagagataagttaaaaaaaaaatggtcggtatggatttgttcaaatgtgtaatgatgataatggtgttggttgtctcttgtggtgaagctgtttctggagctaagttcgatgagctttatcggtcaagctgggctatggatcattgtgtcaacgaaggcgaagtcacaaaactcaagcttgacaatta

SEQ ID NO: 14709 - DNA, 210 bp, Arabidopsis thaliana
  Clone ID: LIB25-096-Q1-E1-D5
aaaggcctgaagatatggacactctccgtactgtttacaaaatcgatagagctcatcctggttctgacgtcgctggtgaaaccgcagccgctttagccgccgcttcaatcgtttttagaaaacgcgatcctgcttattccagacttctacttgaccgtgccactagggtattcgcgtttgctaacagatatcgcggcgcgtatagtaaca

SEQ ID NO: 14710 - DNA, 51 bp, Arabidopsis thaliana
  unsure at all n locations
  Clone ID: LIB25-096-Q1-E1-D6
atggcgatagctatggcggttgtttctttcccanctctgctcaacanaaca

SEQ ID NO: 14711 - DNA, 89 bp, Arabidopsis thaliana
  unsure at all n locations
  Clone ID: LIB25-096-Q1-E1-D7
tcaatccacactgttctccatnccagggttaattttacaacagcgttggncgcatttcgncctcagttccgtcttttctcncgcaattc

SEQ ID NO: 14712 - DNA, 217 bp, Arabidopsis thaliana
  Clone ID: LIB25-096-Q1-E1-D8
actttctctctcagcttacgaacaagaaaaaaagaagaatctttagccacctttgagatcaaaagatgaacatcgctcacactatcttcggcgttttcggaaatgcaactgctctgtttcttttcttggctccttcgataacattcaagagaatcatcaagaacaaatccactgaacaattctctggtatcccttatccaatgactctcctcaactg

SEQ ID NO: 14713 - DNA, 190 bp, Arabidopsis thaliana
  Clone ID: LIB25-096-Q1-E1-D9
tgaagaatcagatgtgagtggttctgatggagaggacacttcatggatatcttggttttgtaatctaagaggaaacgagttcttttgtgaagttgatgatgattacattcaagatgacttcaacttgtgtggactcagcagtctagttccctactacgagtacgctcttgatttgattttggatgttgaa

SEQ ID NO: 14714 - DNA, 58 bp, Arabidopsis thaliana
  unsure at all n locations
  Clone ID: LIB25-096-Q1-E1-E1
ggacccaattaagggaanttgcctccctaaaggttccggatngaatgtcctaactaaa

SEQ ID NO: 14715 - DNA, 193 bp, Arabidopsis thaliana
  Clone ID: LIB25-096-Q1-E1-E12
tgtgctcgaacagcatgggcctatgggaaggctggtggccgaatctcccatgctttatcggtttatagttgtcagattcgccaaccaaatctggttaagataatctttgacttcttgaaaaatggattccaagaaatcagtaattcactggatttatcttttgaagatgaaactgttgctgatgagaagattc

SEQ ID NO: 14716 - DNA, 207 bp, Arabidopsis thaliana
  unsure at all n locations
  Clone ID: LIB25-096-Q1-E1-E4
tgctgctaacgccattgtcctgaagatcatttatcacttttgctggntatgtatctgtcttcaacgaaacgcgaaatagttggtgttttgagtgttttaagtagaagacgacaatcttttgtgagcttcagacatatttccagtttctaagagattttgcttagaaaaaaaaaaaaaaaaaaaaaaaaaaaaaaaaaaaaaaaanng

SEQ ID NO: 14717 - DNA, 216 bp, Arabidopsis thaliana
  Clone ID: LIB25-096-Q1-E1-E8
attttttctatttactaaaacctcccaaggaccaaagaacatcgacaaaggaagacgacgaagaagatttcgagcttcgacaaatcatgcggattcttactgctcgcatagctaaccatttttgcagggcacgaaacgcgaatcctcgatctcgaaatttctcctcgtcgaacaagaaagatgaccttacattggaggaagaagctgagaggaaac

SEQ ID NO: 14718 - DNA, 94 bp, Arabidopsis thaliana
  unsure at all n locations
  Clone ID: LIB25-096-Q1-E1-F1
tttcatttagncacagtacctctctcactanaatgccacactgtcttgagataaaatacaanaagagaagagattaannncctcatccgatgat

SEQ ID NO: 14719 - DNA, 203 bp, Arabidopsis thaliana
  Clone ID: LIB25-096-Q1-E1-F2
ttcttcttcttctttattatttcctttctttcttattcttttttcatgtttaatctcggtttcatcgtcaagaagatcattaatcgaccgtactcttccgaaaaaccttccgagatccggttttcgattgagtcttcgacatgtggattccggtaaaaacctcaccaagatccaaaagattcagagagggattaaccgtggat

SEQ ID NO: 14720 - DNA, 185 bp, Arabidopsis thaliana
  Clone ID: LIB25-096-Q1-E1-F5
aagacaagaaaaaagaagatattgagcgattatgattcgcgcagctgccaaattctccagagaagcagcggcaacgattcgtggccgcacgatctccgttagaggaaaccttattcgatactcgacgccattgagattgattcacggtgaaatcagcgttccaaacgcgaatcatgttgctattt

SEQ ID NO: 14721 - DNA, 188 bp, Arabidopsis thaliana
  Clone ID: LIB25-092-Q1-E1-G9
ttttttccttaagcaaaaaagattttatctcactctcaatagtgttagtattgtcacagagaaagcttcagatctagaagaagaagcagagttcataaagagaaacccattttaaaccctagaaatcaagtgtcaatctcggaaaccttctgattccgcaacaatggcagttacagatactgaaagtc

SEQ ID NO: 14722 - DNA, 173 bp, Arabidopsis thaliana
  Clone ID: LIB25-092-Q1-E1-H10
taactgggcggttgcactgaaaactcttattgttattcaccgtgccttgagagaagtggaccagacatttcatgaagaagttattaattatagcagaagcagaagtcatatgctgaatatgtctcattttaaagatgattctggtccaaatgcttgggcttattctgcttggg

SEQ ID NO: 14723 - DNA, 110 bp, Arabidopsis thaliana
  unsure at all n locations
  Clone ID: LIB25-092-Q1-E1-H4
aaaaaaaaaaaaaaaaaaaaaaaaaaaaaaaaaaaaaaaaaaaaaaaaaaaaaaaaaaaaaaaaaaaaaaaaaaaaaaaaaaaaaaaaaagggggggccncccnangggt

SEQ ID NO: 14724 - DNA, 152 bp, Arabidopsis thaliana
  unsure at all n locations
  Clone ID: LIB25-092-Q1-E1-H6
ggaaacatcaaacatctttggtttgcttccctcgtacccgttcttcatacaagcacgcctttaattatggattgtcatagaaagacgttcttgttgaagtttttgtgcgtggcatttctgttaaactacagcaatgntnggnttggtaannc

SEQ ID NO: 14725 - DNA, 244 bp, Arabidopsis thaliana
  unsure at all n locations
  Clone ID: LIB25-092-Q1-E1-H9
ttggttcncctggccgtacaagtccaanaattcccgggncgacccacacgtcngcttcgaaattggagctggggttggtgacatgataaactggggactttgtgttatcttcgttttgtttgtgtttatctttttggtcctggcaatgtgagtgttgtatagaaaggggaaggagaaggaagtagcgggcctgtaaaactatcaaagtttttgaaccgcgacaaagacgatggtgaacgtagaa

SEQ ID NO: 14726 - DNA, 197 bp, Arabidopsis thaliana
  unsure at all n locations
  Clone ID: LIB25-093-Q1-E1-A2
agatatacatatgtgttatgttcttccttataatttaccgttggttatgggtttgtatatttcttgtanagaaaagaaaactggaaaatcttttgttgagaactcagcgatttggggtttgtctcgagattctattttaggacattttaatctctcatttgtattttcagaccttttatttgttatatccattggca

SEQ ID NO: 14727 - DNA, 204 bp, Arabidopsis thaliana
  Clone ID: LIB25-093-Q1-E1-A3
gcgccttctctcgcagccaacgatcccatccaaaaccaaaactcgctctccggtgatcgtctttcctttacctcgccgaccttctccgtcttctctataactcatttctcttcttttctcttttctagttatattgagattgtggctgcaagagaaacggcaaaatgctgctactgaagcaaatctcaccaccgttccatctca

SEQ ID NO: 14728 - DNA, 153 bp, Arabidopsis thaliana
  unsure at all n locations
  Clone ID: LIB25-093-Q1-E1-A4
tgttgccctgccggtacangtcaaagaattcccggccttcaatggacttacccagttgcaggccttcatgctctctatgtccttgctttaattgcattcacaagagcagttcgacatgtagagtttcgttttgnngagcttagnnatctnngg

SEQ ID NO: 14729 - DNA, 200 bp, Arabidopsis thaliana
  Clone ID: LIB25-093-Q1-E1-A8
gagaagaaacagagagcattatcaattattaacaattacacaagacagcgagattgtaaaagagtaagagagagagaatggcaggagaggcagaggctttggccacgacggcaccgttagctccggtcaccagtcagcgaaaagtacggaacgatttggaggaaacattaccaaaaccatacatggcaagagcattagca

SEQ ID NO: 14730 - DNA, 172 bp, Arabidopsis thaliana
  Clone ID: LIB25-093-Q1-E1-A9
gttctgttcctttcgttagactccgccgtgaatgtctccgaactaaagacaacggctctgttgctttggattgggtcgccggcgaagataggcactttcctcctgattcaccaatcctcattttgttgccaggtttaacaggaggaagtcaagattcgtatgttagacatag

SEQ ID NO: 14731 - DNA, 187 bp, Arabidopsis thaliana
  Clone ID: LIB25-093-Q1-E1-B1
aaatcaatacacgagagcttttctaagaaaggcacaatcgttgcctcgtttcaagagcttttctctctctcttgaagaaaattttcgagatctagatttagttttctgggtagtgttcttcatcgcaggccaaagtctttatacgatggttcaggagtgagctcgttactcttcgccgtcaacggtg

SEQ ID NO: 14732 - DNA, 195 bp, Arabidopsis thaliana
  Clone ID: LIB25-093-Q1-E1-B3
tcacggaagagctagaggcaaaagacctgaaatttctagtagcagggtggcgagtagagatggcttggaggggtgggttagtacgcgtaaccgaaatttaaatatggaacatgaaatgaatcatagggatgagagtaacacacgcggaatttgtagttctgttaccagacttgatgtgcgtgaaaccggtgtagt

SEQ ID NO: 14733 - DNA, 200 bp, Arabidopsis thaliana
  Clone ID: LIB25-093-Q1-E1-B6
gaagatcgtgagacttcaatcttcgtatgaagttcggttaaagaagagtccaaagttatcacctttggctgttctcggctgtattaacagaaaacttggacactgtgtttcaagaaaccgtatcattcaagtaaaaaaggtagaagctattgtattccggatcaaagcaacctccagacgtttcttgaaagcattccctc

SEQ ID NO: 14734 - DNA, 199 bp, Arabidopsis thaliana
  Clone ID: LIB25-093-Q1-E1-B7
gcgtagttgttcctctggttatcctcatcaacgggacccttgaaaccgtgtagccatcttgcttaatgattagagtcttaaagctgtgctctttcttcatcgatttgagcaagtgatcttggaaggctcttgagttctgaattccttgtaagcaatcatggcagggaaaagagaaaactttgtgagggtggatgatttg

SEQ ID NO: 14735 - DNA, 199 bp, Arabidopsis thaliana
  Clone ID: LIB25-093-Q1-E1-B8
gatataaattgtggaacatacatgcttcggcacacacaatctgcgattgagcaggggaaggtgagcgaagaactagtagaccgagctctgctaaatctctttgctgttcaacttcgtcttggactttttgatggtgatccaagaagaggacagtacggaaagttaggatcaaatgacatttgtagctcagaccacagaa

SEQ ID NO: 14736 - DNA, 187 bp, Arabidopsis thaliana
  Clone ID: LIB25-093-Q1-E1-B9
gagatcacaccatgaacctttcctctaacgaccaaccaagccaaggccgtatcaaggccaaggattggtcgactgatttgtgtgaatgttggatggacataaactcatgctgcttgacttgttggtgcccttgtgttgcctttggacgcatcgcggaggttgtagacagaggttccacatcgtgtgg

SEQ ID NO: 14737 - DNA, 126 bp, Arabidopsis thaliana
  unsure at all n locations
  Clone ID: LIB25-093-Q1-E1-C12
gctacttcatcactcatcacgagcttcgcatcttcttctccggcttgatcttctcncgtttctaagatcgccgacgatcggaatatgaantcngatcgattaattctgtcantcacacaanaancg

SEQ ID NO: 14738 - DNA, 194 bp, Arabidopsis thaliana
  Clone ID: LIB25-093-Q1-E1-C5
atgtcatcatcgaacaaagctggggtgcaccaaaggtgacaaaggatggtgtgactgttgccaagagcattgagttcaaggatagaattaagaacgttggtgccagtcttgtgaaacaggttgctaacgccacaaatgacgtagctggtgatggaacaacgtgtgccacagtccttactaagagctatcttcaa

SEQ ID NO: 14739 - DNA, 174 bp, Arabidopsis thaliana
  Clone ID: LIB25-092-Q1-E1-G8
gagctgtttcttccgtcggttatggagtctctgaaactggccaagacaaatatgctttcgaacacaagagaagtggagctaaacagagaaattcgttgaagagaaacattgatgctcaattccacaacttgtctgaaaagaagaggaggagcaagatcaacgagaaaatgaaag

SEQ ID NO: 14740 - DNA, 183 bp, Arabidopsis thaliana
  Clone ID: LIB25-093-Q1-E1-D4
ctatagagacgaaacaaaaagagagatcgtacgcaaaagtttccgatatggctcgctcgtttggagctaacagtaccgttgtgttggcgatcatcttcttcggatgtttatttgcgttgtcctctgcaatagaagaggctacgaagttaggatcagtgatagggatagatcttggtactactt

SEQ ID NO: 14741 - DNA, 198 bp, Arabidopsis thaliana
  Clone ID: LIB25-093-Q1-E1-D5
ggaaatcatgtacaacactatacaaaccggagtttacacacttatcctttactcgatgatcggatacgactggactgtggtcaaattcttctggttctactactacatgttaacatgcttcgtctacttcaccctatacggtatgatgcttgtcgccttgacaccaaactatcaaatagctggaatctgcttgtcctt

SEQ ID NO: 14742 - DNA, 199 bp, Arabidopsis thaliana
  Clone ID: LIB25-093-Q1-E1-D6
gcggacgcgtgggcagaaaaagagctcgaaacaaaaatggagggaaccttctcgccgctttgcttacgttcttcttcgaacctctgttacttctccagtaatgtttcaccagattctcaccgttctataggatttacattggttgattcgctccggccaacgaacttggtttccctgcgaacgggaaataaacgttcgt

SEQ ID NO: 14743 - DNA, 198 bp, Arabidopsis thaliana
  Clone ID: LIB25-093-Q1-E1-D7
ggcttcttaagcccaaatctctctctctttctctctttctcttcctctctcaatctactcgccggagatcggctcgattcctccgtcaccaccgcatccgaccggagatttccttccgttttctttacttcacaacgcagagcttcaatttctccctcgcagtgattgatcaaagatgggaagtcagaagaatgtgaa

SEQ ID NO: 14744 - DNA, 201 bp, Arabidopsis thaliana
  Clone ID: LIB25-093-Q1-E1-E3
gctctctctctctctctctctgacagttctttctgtctctctctctgctcgatgcgaagaatcgagcatttgtgtcgctctctggaacgtgtgtcttcatcgggaatataaccataatctccacgagctgcttgaatgcgtacccttcgttccctaatgttggcggcggctctagcagtggctttggccgtgactggtttt

SEQ ID NO: 14745 - DNA, 173 bp, Arabidopsis thaliana
  Clone ID: LIB25-093-Q1-E1-E4
gcctttttcagattacctccggtttctaccactctcgccgtcgccgtcaccggtactccgatcacctccgcacgattcatttcctatttgcatttttcacctctctagcggaaagtgagtcttctcgagaatgggagattgaagaagtaagagattcactgattgaggaagag

SEQ ID NO: 14746 - DNA, 199 bp, Arabidopsis thaliana
  Clone ID: LIB25-093-Q1-E1-E5
gctaaacctgaatctcaaccttcaccacctccaacatttctaccgtgtctcccaggtttcaagtttcctccctttcagtcccgaaagcctacgccgccgtaatcgtatatacgttgacggcatcaagtctaaaactgtaatgaaatattaaactatctactttaatgtattatctatctctatatatcaccgttgatca

SEQ ID NO: 14747 - DNA, 194 bp, Arabidopsis thaliana
  Clone ID: LIB25-093-Q1-E1-E6
caatggcttcagctacttccgtcatagcctggggttctggagaagatgggcaactaggacttggaaccgatgaagaaaaggaattggcttccgtcgtcgacgctcttgagcctttcaacgttcgctccgtcgtcggtggtagccgcaattccctcgccatttgcgatgatggcaagctgtttacatggggttgg

SEQ ID NO: 14748 - DNA, 198 bp, Arabidopsis thaliana
  Clone ID: LIB25-093-Q1-E1-E7
gccagaagtgaacacgatactctccctcccttcccttgttcaatttctttctttgttctcatcattaaatttctttgacccaaagtttcaatctttttcagtttctggaatctcttgcttcgatcgaatcactctcatgtctaacgaagactctcttccgcctttcactttgtttggtttggatgatgtcgaaaatta

SEQ ID NO: 14749 - DNA, 173 bp, Arabidopsis thaliana
  Clone ID: LIB25-093-Q1-E1-E9
gcggtcgtcacatttgagagtattgcaatcctcacacccaggggtcggtacaatgtggaacttcacctttctttcttacgattgcaaggacaagctaatgactttaaaatccagtacagtagcgttgtccgtttgttcttgcttccaaagtcaaaccaaccacacacgtttgt

SEQ ID NO: 14750 - DNA, 255 bp, Arabidopsis thaliana
  unsure at all n locations
  Clone ID: LIB25-093-Q1-E1-F1
ttgttgccctgccggnacangtcaaagaattcccggntcgacccangcgtccgcccacgcgtccgaagagagacatttgaaaactacttcgttagagattgagggaatttataaaaaaactgaggccgagcatcctagcattgtggtcacatatacacggcgtggtgtccttcagaaggaggtcattgcccaccccacagactttaggccaacaaatcccggaaacagcccaggcgttggacactctaacgggcg

SEQ ID NO: 14751 - DNA, 193 bp, Arabidopsis thaliana
  unsure at all n locations
  Clone ID: LIB25-093-Q1-E1-F12
cgcntccacatctttgnctgatcatggtnaangaaacagtntactangactgttcttggtgtcactccctctgcttctgaggaagagattcgcaaggcttattatatcanggcaagacaagttcaccctganaagaatcaangtgatcctctagctgctgaaaagtttcaggttcttggtgaagcttaccaga

SEQ ID NO: 14752 - DNA, 228 bp, Arabidopsis thaliana
  unsure at all n locations
  Clone ID: LIB25-093-Q1-E1-F2
gnnncgggnttcgnngcaanccactnggggnagtcgggannttcatgttaaaaagaaatgaagctctcttgtttggtttttctcatagtatcgtctcttgtttcgagttctcttgccaccgctccgcccaacacatctatatatgaaagctttctccaatgtttcagcaatcaaacaggtgctcctcctgagaagttatgcgacgtcgttctgcctcaatagcagtga

SEQ ID NO: 14753 - DNA, 198 bp, Arabidopsis thaliana; identical to SEQ ID NO: 14741
  Clone ID: LIB25-093-Q1-E1-F5

SEQ ID NO: 14754 - DNA, 221 bp, Arabidopsis thaliana
  Clone ID: LIB25-092-Q1-E1-A5
gcggacgcgtgggcttccccactccgccacctactttccttcccactctgaaacctcacttaaacctcactccgccgcttccttcaccgtccgttgcacctccgcctctcccgccgttcctccacagactccacagaaaccccgtcgttcacccgatgagaacattcgagacgaagctcgtcgccgtcctcatcaactccaaaacctctccgcacgttacg

SEQ ID NO: 14755 - DNA, 208 bp, Arabidopsis thaliana
  Clone ID: LIB25-092-Q1-E1-A8
aaaataaatagatagtcataactagtgtattacaaaaaaaaaataaagtaaataaaagtaatcactagctagtgactaaactaaatcccaattatgggtcgtgtacattttggtgtatcagcattctttgttttttgtttgttaggtttatcagctaatgcaaagatcttcaatattaattctcctccaggttctgatatcactaacg

SEQ ID NO: 14756 - DNA, 186 bp, Arabidopsis thaliana
  Clone ID: LIB25-092-Q1-E1-A9
ggatctagtagatccggaacgatggggaaaagaggaagggcttgtgtagtggtacttggagatcttggtcgaagtcctcggatgcaatatcacgctctttctcttgctcgtcaggcatcatttcaagtggacattgttgcatatggaggttctataccccatgaagctgttctaaatcacccatca

SEQ ID NO: 14757 - DNA, 178 bp, Arabidopsis thaliana
  Clone ID: LIB25-092-Q1-E1-B12
aaaccctaaacatagtcacttcatcgtctcctccactgtatcattcaatctctgtcttccttctttttagcgacctcgtctccaaagctcacaaattttctacctttccgagagaaagatgcaagcttgttgtggtggtaattcgatggcttctcttcagcaacctggacgggttcat

SEQ ID NO: 14758 - DNA, 215 bp, Arabidopsis thaliana
  Clone ID: LIB25-092-Q1-E1-B3
aatagtgcctccaggtgctggtcacaaaaggatactgcttagtatatcttctttgatagccattagtgctgctgcagccattgtggttggtgtaatagccatcacggtacttaatctgagagtgcgcgcatcaacggtttcaagatcagcagtaccgctcacgttctcaggcggagatgacttcagtcgatctcccactactgatagcaactcag

SEQ ID NO: 14759 - DNA, 211 bp, Arabidopsis thaliana
  Clone ID: LIB25-092-Q1-E1-B4
ttagatagccatcatgtaaagaaaaaaccctagccgcctaaagaggcaacgacttctctgatccattgttgaagatcgatgaagcagaatccaaagacgaaaatggaggaaatgaagatctcattttactcgcacatggacgagaagaacgaatccgattcagttgttagatctagaccaaaggcgaggagataaagcgaaggttagatct

SEQ ID NO: 14760 - DNA, 201 bp, Arabidopsis thaliana
  Clone ID: LIB25-092-Q1-E1-B5
caatctgctattcctctctctcttcttcacctatagtttatctctttttttttgttttggcttctcttaaattcactttctctaaaacataaacgacattgatgtttcttcatcagatcctttaattcttctccaattctcattctccttacatcaatgataaactttgtagttggagatttgttgtggatgaagattatt

SEQ ID NO: 14761 - DNA, 137 bp, Arabidopsis thaliana
  Clone ID: LIB25-092-Q1-E1-B8
aagattcagaatactgattgtgactcttttgtttaagctctgaaaaaaaagagtcacaatcagtattctgaatctttttgtgactcttttttttcagagcttaaaaaaaaaaaaaaaaaaaaaaaaaaaaaaaaaag

SEQ ID NO: 14762 - DNA, 176 bp, Arabidopsis thaliana
  Clone ID: LIB25-092-Q1-E1-B9
aaaccctaatcagcttctcgtctccataaattcagaaccaagaaacatctctgagagactaaacgaagatgtatcttcagtgctatatcaacgagaagggtgagaaggtttacacaactaagaaggaatcaccgctagggctagccactgaatctgcccatccagcccggttctcc

SEQ ID NO: 14763 - DNA, 217 bp, Arabidopsis thaliana
  Clone ID: LIB25-092-Q1-E1-C1
aaaaagacaaaaatatatataaaaaagaaaaaaaaagaaaaaaaaataattgtcttgctctgttctatttaacttttcttatatataaaaaaaatggcgaaaaatttactagcaatatgtctggtgtttatggttgcatcaagtgtggtttatgaagtgcaagggactttcttgttaaagctttacttgaggaggaagtttcccagacgttgtatcg

SEQ ID NO: 14764 - DNA, 187 bp, Arabidopsis thaliana
  Clone ID: LIB25-092-Q1-E1-C11
ggctgagtatatggacatgaagacccttttagaccgtacaaacgacgccatcaacacaatcatacgacttgatgagaccaccgaaacaggggaatttcttcagccttgtattgaagctgcattgcatttggggtgcacaccaaggagagcttcaaggagccaacggaacattaacccgagatgttat

SEQ ID NO: 14765 - DNA, 176 bp, Arabidopsis thaliana
  Clone ID: LIB25-092-Q1-E1-C12
ttttcagatttctgataatcagacagacagacacaaacaaacaccggtatcgacgaacggaactaactccgatatccaaaacccactccaagtttcacgaacgaagggcttagtatctgccatggctcctgatgcttctactgctcttgcagcgagggagaaagttcagcaaatcc

SEQ ID NO: 14766 - DNA, 220 bp, Arabidopsis thaliana
  Clone ID: LIB25-092-Q1-E1-C3
ggaacaaagaagaaattttgaaaatagtgaaaatggtaaccgtaagccaaagtcacacgacgacgtttctcttcttcaccacatttctcttgatattcggatcaatctcagccgtccgtttgcttccacgaccaaacactacaacaaccaacgatctagatttcatccgaacaagctgcaacgctactctatatccagacgtctgcttcacgtcactctc

SEQ ID NO: 14767 - DNA, 214 bp, Arabidopsis thaliana
  Clone ID: LIB25-092-Q1-E1-C5
gaatttagtccaaacagctgagaataacttggctacagagagaaagaaaattgaggtagtctctcaacagattaacgatctgcaatctcaggtggaacggcaagaaacagaaattcaggataagatagaagcactgagcgttgtttcggcacgcgagttagagaaagtaaaaggttatgagacgaagatatccagcttgagagaagagttggaa

SEQ ID NO: 14768 - DNA, 187 bp, Arabidopsis thaliana
  Clone ID: LIB25-092-Q1-E1-C9
aagcaatttctgagcgtggaggacaaggcaaaattcggtgtgcaaggcactggatattgggacccttgtttcctcgtgagagaattttcaatcctagggcttaaagagcacgttcctagtataaagctgattcacagatgcggagattcttgattaaccaagctaaaggtctcgtcgaccattctcg

SEQ ID NO: 14769 - DNA, 193 bp, Arabidopsis thaliana
  Clone ID: LIB25-092-Q1-E1-D6
tcgagttgtggaagttgttgcggtgatggtggtggtgaagcggtaacggcggttggtggtggttgtaaacggtgcggtgagagagaagcgagtgtgttggtgttaccatgtcgtcatttgtgtttgtgtacggtttgtggtggttcggctttgttacggacttgtccggtttgcgatatggtcatgaacgcta

SEQ ID NO: 14770 - DNA, 215 bp, Arabidopsis thaliana
  Clone ID: LIB25-092-Q1-E1-D7
gatttgttggaggtcaatggattgtgggaattattgacgagcttagaaaggcgtatgcagaagagtcttctgatagcggaccaatattgatagatacaaagactcgactccgtgatacacttccagctgagccacagaggaggaatggaaggcttcagctaatgctttacaagcttctatgggacactattgtgaaagaagggtttccaacggga

SEQ ID NO: 14771 - DNA, 193 bp, Arabidopsis thaliana
  unsure at all n locations
  Clone ID: LIB25-092-Q1-E1-A12
gctcntcctcctcctcctcctttantgatggtgagaaaaagattagcttccgagatgtcttctaaccctgactacaacaactcctctcgtcctcctcgccgtgtctctcaccttcttgactccaantacaatactgtcacaccacaanaaccaccgtctcttacngcggcggctactgtatcttctcaancaa

SEQ ID NO: 14772 - DNA, 213 bp, Arabidopsis thaliana
  Clone ID: LIB25-092-Q1-E1-E1
tctcctctctcttctctctctatatcgctcctcatgatccgattttttatataatttataaaaaatttatgtgataattacagatacacgttatttgtgtgtatattgatagagacaataaccattggaatctgaccatggatctcttttcttcttgagatatttttcatttctttctcctgttctcgtctcccagatctgttcgtcaatcta

SEQ ID NO: 14773 - DNA, 193 bp, Arabidopsis thaliana
  Clone ID: LIB25-092-Q1-E1-E10
gcggacgcgtgggtttggagatgcacttttacgagtcttgcccttacctgaagttcgctcatttcacggcgaaccaagcgattctagaagctgttacgacggcgcgtagagttcacgtcattgatttagggcttaatcaagggatgcaatggcctgctttaatgcaagctttagctctccgacccggtggacc

SEQ ID NO: 14774 - DNA, 189 bp, Arabidopsis thaliana
  Clone ID: LIB25-092-Q1-E1-E12
gtcttagcgatatcttctccttcaacgactctcatcaaaccattaaaacgaaatgggccaaaccggtcaccggttcgaaaaatcctttgcctgagccagaggaagcagagcaaaaccagtaccggcaaatcttggatcgtcccagtaagtctctctctttttggttcaggcttcgtcttgggtcctctc

SEQ ID NO: 14775 - DNA, 213 bp, Arabidopsis thaliana
  Clone ID: LIB25-092-Q1-E1-E4
aaaactcgatcggctgatacttaatcacccacttgattttgtatttttgtacctttttttgttgtaatttttccatacacccaatttcccgtggaagaaaaggagtcagctttttcgtttgctttaaagcttgaatctttacatagttccagttactttctatagagcttcataatccctagttgcccaaaaggattctgggttttgtgagac

SEQ ID NO: 14776 - DNA, 163 bp, Arabidopsis thaliana
  unsure at all n locations
  Clone ID: LIB25-092-Q1-E1-E5
ttggaacgaaactcgatcttcgagatgacaagcaattcttcatagaccatcctggtgcagtgcctattactacaaaccagggagaggaactaaagaaactgataggatcaacaactatacaatgttgcaggtgttcgtnttccttcagcntcgnttgtnannt

SEQ ID NO: 14777 - DNA, 214 bp, Arabidopsis thaliana
  Clone ID: LIB25-092-Q1-E1-E6
gctaaactaagagggacaccgttggacactgcaagcaaatcagattcatgtaatgatacccgagatagcaaagcgaacacaaatcctattcgtaaaagcaaccggatttctaaacgacgtgttctggatgaagaactcgatagtcttgatgatgatgacgaagaaattcaatttctcagaaggatgaaaatggctaaagttgtggctgtagaag

SEQ ID NO: 14778 - DNA, 208 bp, Arabidopsis thaliana
  Clone ID: LIB25-092-Q1-E1-E7
tagagaaatctggctacaattcaatttcagatgaggttttcaaaaacacagaagatgaatgttcaaatagcataagaagctgtgaattttcttctttcttttttgtccaatgggaacaatggcagaattgggaaccatgggaaaatttggagccatggcagaagagcagcaagttaaccagatgatcatggataaacaatcagtagaa

SEQ ID NO: 14779 - DNA, 273 bp, Arabidopsis thaliana
  unsure at all n locations
  Clone ID: LIB25-092-Q1-E1-F1
tctgattgccccncccnggtacaangtcaaagaattcccggctcgacccangcgtccggcgaggtctatctctcgctttcatgatcgccgtttgatctaagatccgaaaacggacggtgaagattcttgggcggtttggtaatttctgaaaatggtggggtatgtttagaaaattgagaaaaattgtgggccgttggatttgaagtancgaactagagttgtgtttatgttttttttttttcngtcttttgagttttgtcgatattagttcag

SEQ ID NO: 14780 - DNA, 188 bp, Arabidopsis thaliana
  Clone ID: LIB25-092-Q1-E1-F11
ggatccaattttcttatttccccaaccaaaacaggggaagaaaaaaaaagaaaacaaaaaaatcaaaaaaaattagaaaatgaaagcctcaacaagagtcatatggacaatatctgtccttatgctcgctgctgtgtccgaggccatcttccctctaccgtttctaccgttcctccctgggttcaacc

SEQ ID NO: 14781 - DNA, 189 bp, Arabidopsis thaliana
  Clone ID: LIB25-092-Q1-E1-F12
caatgaaaacctaaagcattgcttttgccttcatggtatcagagctcatggaacatagatccatggaactctactctgttccttctctcaatatttcaaattgtgtcaccgtcactcttactgccaagaactatattctctggaaatctcagttcgaatcttttcttgatggtcaagggcttctgggtt

SEQ ID NO: 14782 - DNA, 215 bp, Arabidopsis thaliana
  Clone ID: LIB25-092-Q1-E1-F5
gcttagcaatggcattacgtctagctttaagtctatgtgtttatctgctgtttacacaaggtgcacagggaaacactgatgattttgattgtgtggaaatatacaaacaaccagctttccaacatccattgttgaaagatcacaagatccaggaaacattcagcctagatggaaaaattgaaagaagcaacaaatataatacaaaagagcattgg

SEQ ID NO: 14783 - DNA, 110 bp, Arabidopsis thaliana
  unsure at all n locations
  Clone ID: LIB25-092-Q1-E1-F9
ccnaggatttcctnccaantnccggaaaaaccttcccaatccgaatcaacaacggtggnaacgccgccggagcaagaatgtcagccaccgcagcatcaagctacgcgatg

SEQ ID NO: 14784 - DNA, 187 bp, Arabidopsis thaliana
  Clone ID: LIB25-092-Q1-E1-G11
tctgctctcaagataattttgttctctcaatttcattcttaaaccctagttcttcgattttttccgatctacgacaatggcggacgctgaaacctttgctttccaagctgagatcaaccagttgctttccctcatcatcaataccttttactctaacaaggagatcttcctccgtgaactcatcagc

SEQ ID NO: 14785 - DNA, 190 bp, Arabidopsis thaliana
  Clone ID: LIB25-092-Q1-E1-G12
taatcaatattctgaattctccctggttaaggaggagggtctccgttaatggcggcggcaatgttcggcgtcaggagctttttcttctcggcggtgattgtgatactgttcgccggccgttatggagaagccaccgcagctgacagaggatacattaagtacaaagatcctaaagtagcggtcgaagaaa

SEQ ID NO: 14786 - DNA, 384 bp, Arabidopsis thaliana
  unsure at all n locations
  Clone ID: LIB25-091-Q1-E1-F4
gcgatcccaacacccgtcgagtcgccggcattacactccgaggtgaatccgaagacccgcttttccaaaaggcgaaacggagcggactaatgaccggctccatttcgccctctatatgtaagctcactcgtctctccggtatcatcatcgctgattggaanggaatctccggtgtgattcctagttgcattgagaatctccctttcttgagacatttagatctcgtcggaaataaattctcccggcgtgattccgggcgaatatcgggaanttactgaaggcttaaagtgttgaatccnanctgataatcacttatacgggngtgattcctccgtcanttacnaaattantgagtttantcncatttggggtttcnaggaataa

SEQ ID NO: 14787 - DNA, 106 bp, Arabidopsis thaliana
  unsure at all n locations
  Clone ID: LIB25-091-Q1-E1-F5
anaaacagaatggttcattgtctgctctttcttgtctgaatccctggcaatggngtttgcagccgcatgacactganaattgtacccagtggcatcctcttnggca

SEQ ID NO: 14788 - DNA, 491 bp, Arabidopsis thaliana
  unsure at all n locations
  Clone ID: LIB25-091-Q1-E1-G11
nngngggntggnggcaactgtcncgccngntcgtagcggtccaccnattcangggnccacccacgcgtccgcatttgggccaacaacaagagcgttcgcgaagctctgcaagtcaataagggaagtataggaaaatgggtacaatgtaactataaaaatatttcctacaattacgatatcaagagcagcgtcgcataccatatgaagaatagtattgatggctaccgatctcttatctacaatggtgaccatgatatgatggtgcctttccttgcaactcaagcctggataagatctctcaattattccatcactgatgattggaagccttggatgataaacgatcaaattgctggatacacgagaagttattccaataagatgacatttgctactatcaaaggaagtggacacacagcaagagtataaaccaaaagagacctctatcatgttcaaaagatggatnagtgcccagcctttgtaaaagaaga

SEQ ID NO: 14789 - DNA, 437 bp, Arabidopsis thaliana
  unsure at all n locations
  Clone ID: LIB25-091-Q1-E1-G2
gcccacgcgtccgcggtatattccccccaagagatattgtttgtaacttcttcgttttgcacagtaacggaggaacttgtttatatatatatatatataaatgtacaggtcgaatttctgaagctggtgagtgctggtgatcacaatggagccctaaaggtcgcatgctttcacttaggtcccttagccgccaatgaccagtctttactgaagacattgaaggagactttgttagttttactccaacccgacggaaccgcacctgggaaagatttgcctttgaatgatctggcanatacgctacaggtttctgtcggtaataggctccggatcgaaagaaccgaagttaatgaaaataatcaaangcgacgccttcacacgccataccgagtggtttaagcctcagatggtgttaaagaccgggttcaataatccnc

SEQ ID NO: 14790 - DNA, 438 bp, Arabidopsis thaliana
  unsure at all n locations
  Clone ID: LIB25-091-Q1-E1-G3
actgattcttcattgacggtaggagtcaccacttttggcggcgattccttgttctctattttttttgcacaagcaacatttagcttctgcaaactccagttcatctctcaaccctcatatcgccgtgttttctcgctctagtaccgcgagctcggacgaaccaggaagcaatccgttaatctagaagcggtgttgagaagatgacgattacatcaaatatctctgtacagaactaacctcgttgttcaagggaagactatccttaccaaaatccctgacaacattatccnaactccggttaccggtaatggattcgtttccggttcatttanaggcgcgacgtttgaacaaaagcaagagtcntcaatgtgttccccatcggtgtattgganggtcttcgggttcaanggtgcggtttcccgggtttnaagctanggg

SEQ ID NO: 14791 - DNA, 171 bp, Arabidopsis thaliana
  unsure at all n locations
  Clone ID: LIB25-091-Q1-E1-G6
ncctccggaaaanactcatttcngtggtctcaaggatgaagatcggatttttactaatctctatggtctgcatnactcatttctcaaaggcgcgatgaacataggtgattgggataggaccaaagatttggngctcaanggtactgantggattgtcaatganatgaacaa

SEQ ID NO: 14792 - DNA, 422 bp, Arabidopsis thaliana
  unsure at all n locations
  Clone ID: LIB25-091-Q1-E1-G7
cgagtgcaattcagaaatcactctgggtgataaaaaacggtgtcgtatggttctttagtctcatcactttcctaaagagcagtgaagcaaaatggcgaattggatctcgtcgaagctcaaagccgccgaaacaattcttcaacagcttgatcagcaggcagcagattctcttcggaaagatgagaagtcagagacccatgacgaggtgtttgagacctctccaaaatctggaagtagtcctgtttctttgaaagatcagttgaggaagaagacatatgaaggtagtgactctggtagtggatctcaagagaaactcaacagagcaaaagcctagctacttaagtagcagcaaaaaagtacgcaaaccaagatnaatcacacgaaaaggacaagtgcaccgtcacaaagtttgacacaagata

SEQ ID NO: 14793 - DNA, 432 bp, Arabidopsis thaliana
  Clone ID: LIB25-091-Q1-E1-G8
actttcctaacaaatgttgtttcaatcaaacctacaatcttctcattccagtccgaatccttcactcctttgcatacacgggtcaatgtattctcctcgaaacccttttccttctctcgctggaactttctcccggagctctagaacgagattcattccttatgctgtaacggagacggaagaaaaacccgccgctttggaccctagttcagaagctgccaggcgtgtgtatatcggtaacatacccaggacggtgaccaatgagcagctcactaaacttgttgaagaacacggtgctgttgaaaaagttcaggtgatgtatgataagtattcaggaagaagccgtcgatttgggtttgctacaatgaaatcagttgaagatgctaatgctgtggttgagaaattgaatggcaataccgttgaagggcgtta

SEQ ID NO: 14794 - DNA, 411 bp, Arabidopsis thaliana
  unsure at all n locations
  Clone ID: LIB25-091-Q1-E1-G9
gctaaaacatcaccagcgttaacacaagatccttccgttcccgaagttccttacatgacggcgagagttttccgatctcctttcacttacactttccctgtagcatcaggtcgtaaattcgtgcgtctctacttctacccaaactcgtacgacggtctcaacgctaccaactcgttattctccgtctcctttggtccttacactcttctcaagaatttcagtgcttctcagacggcggaggcgttgacttacgctttcatcatcaaggagtttgttgtcaacgttgaaggtgggaacgttgaacatgacgtttacaccggaatcaagctccgtctaatgcgtatgccntttgttaatgggattgaggttacntcaatgcctgatatgtatangtagtactggatgggactt

SEQ ID NO: 14795 - DNA, 486 bp, Arabidopsis thaliana
  unsure at all n locations
  Clone ID: LIB25-091-Q1-E1-H1
ntgttactttgccngcccggtccgaaatanccgggtcgacccacgcgtccgcggacncgtgggaacaggctatggctgtcacaagcttggctcctccatgggtcatcttgagactagctttccggtcagtagcagcttcttcctgtctccacacaaatcaaaaaaccctaatcacgaatctctccattcccacttcgtttcctctccgacagtcagctttgagaagatgttacagtgcagaagctataaaaggagatgtagattttctcctcaaaggagttggagaccaagctgttgccaaagaagtcaagcaaattcttgaaatggcaagacgtgcatcatcaaaaagagaagttcttcatacagattttctcacaccacctattgttaaggaatcagtttcactattggaaaaatttgctgatgttaagatagttgctcaagganggttaccctgangctgaacggtgtaggatttcnantgga

SEQ ID NO: 14796 - DNA, 469 bp, Arabidopsis thaliana
  unsure at all n locations
  Clone ID: LIB25-091-Q1-E1-H12
cgcntgccgtngccggcacaagtccaagggncccggnacgcgtccgaaatcagncaagtgtcttgtagtcgacagttagattccatagaagagtcaaaaggttcaacatcaccagaaactgctgatctggtagtccagtatcaaatgtttcttaatagacaggaagaagttcttgctgctactcgcattcagaccgcctttcggggtcatcttgcaaggaaagctctacgtgccttgaagggaatagtgaagctccaagcatatatcagaggtcgtgctgtgagacgccaagcaatgactacactaaaatgcctgcaatctgttgtgaacattcagtcacaagtctgtggtaagagaacacagattcccggaggtgttcacagagattatgaagagagcaatatattcaatgataacattctcaangtggacacaaacggtcaaaaagagatggggacgatagtccttt

SEQ ID NO: 14797 - DNA, 495 bp, Arabidopsis thaliana
  unsure at all n locations
  Clone ID: LIB25-091-Q1-E1-H4
cgtttgcccgnnccggnccgaactnnacgggtcnanncncgcgtccgaaacaaaaaacaaaacaaaacaaaaaccaaaaaaacaaaaaaataaatggcaagaatttcactagggatatgtctgatgttagtagtagcatcaagtgtgatctatgaagcgcaaggaacgttcttactaaaccattacttgaagaagaattttccaaaaaaatgcaacgagtttacgccttacgctaacaagggtatgataacgttggtgaccgatctcgaaggtagcagtccggccactacagagttcaagactttctttacacagttcaagtcttacatgtctttcatccgagacaacatcggcctcaacaaaaaatgttgatgccgaagatgacagctaaatgtgacggtcctttcaaggccatgtctgcattgagtgctaataaaggcgtcaaaatcagcggatgccggggagtatgaagatgaccatgttgtcgatgggaaa

SEQ ID NO: 14798 - DNA, 430 bp, Arabidopsis thaliana
  unsure at all n locations
  Clone ID: LIB25-091-Q1-E1-H7
cagggtgaagcttatgtcggatctgaagacggagacagataagatcacacaatcgatgtttaacaaaggcgtaaccgaagaggaagaggaacaaatcgacggttctggttctggttctggttccggtcaagagaaggagatgattcctccggtgaagccgtggaatctaaggaaaagaagagcagcagcgtgtaaagaaccggaatccaacagtttgatcaataaaggaattgtgattgaggagaaggtagtgaagaatccatctccggtgagaggcggcggcggagtggtcgaagcggagaagaagcgtcctatgttctctatgaagctatcgaagaaggagatggaagaagatttcattgggatggtaggtcaccgagcancgcgtcggcccaagaaacgtccaaaactgttcagaaaaaaactcgat

SEQ ID NO: 14799 - DNA, 405 bp, Arabidopsis thaliana
  unsure at all n locations
  Clone ID: LIB25-091-Q1-E1-H9
ttctctgtaaaccctttataaatctcacttccttcttcttcatcaatccttcctcagatctcttcttattcaaattcaattgagagatactctcttcttcttctttttctctatccagttccttctgtgcgaagttcttctgattaatttgagtttcttggaagcttttactcgatcttcatcggatcttagggttttgtttaaatccagatcttgggttttgttaaataatggcgactccttatcctggagcgacgcaggtgggttcgtactttgtggggcagtattatcaagtgttgcagcaagcaagccaagatcttantcatcaagttttattctgagcctagtaagagcnattcgtatcgatggtgantccaaccgangacgngnnaattctttggnggg

SEQ ID NO: 14800 - DNA, 217 bp, Arabidopsis thaliana
  Clone ID: LIB25-092-Q1-E1-A1
ggaaagtgcagctctgtggagtggcacaatatgggaatctgattggggtcactgttggttacaccatcactgcttctattagtttggtagcggtagggaaatcgaactgcttccacgataaagggcacactgcggattgtactatatcgaattatccgtatatggcggtttttggcattattcaggttattcttagccagatcccaaatttccacaa

SEQ ID NO: 14801 - DNA, 159 bp, Arabidopsis thaliana
  Clone ID: LIB25-092-Q1-E1-A10
tcacgagttgcagctgattctcaattccctttcaaggtactaatggaaatgcttgttggtgttagcgccaatgtacttggcgacatggcttcacgccctaatttcggattgaacgagctagatttcgtcttctccactctcgttgtaggttcgattctc

SEQ ID NO: 14802 - DNA, 191 bp, Arabidopsis thaliana
  Clone ID: LIB25-092-Q1-E1-A11
gaaagtttctagggtttacgaaatttgggtctctctccctctctctacttaacgctctctgtatcttcttctccgtcaacgatacgaacccagagacgtcggcggttaaaacaatcgtcggatctctctggattcgttagacgagaagtttccggtatctaatttctgtgcgttagagagaaattagggtt

SEQ ID NO: 14803 - DNA, 498 bp, Arabidopsis thaliana
  unsure at all n locations
  Clone ID: LIB25-091-Q1-E1-F3
gngnnnnnngnaatgtctagtttggncgtcccggtccagaataaacgggtcnacccacgcgtccggnaaaagctccgtcggttactccgccttgaggtccgtttcgtacctccgtcaatctgccgttacctctccacctccgattttctccgccgccgcttcaaccgttcgccagttcacttccgccggctatccttccaacagttttcaattgacgccgccgacgaattggggaatccggatagttccggagaggaaggcgtttgtgattgagcgattcggtaaatacgctacgacgttgccgtcggggattcatttcctcattccgttcgtggatcgtattgcttatgttcattctctcaaggaagaagctatcccgattccgaatcagactgcgattactaaagacaacgttagtatccacatcgatggtgttctctacgttaagattgtgggattctaagttagcttcctaaggggttgaaaatcctaaccaag

SEQ ID NO: 14804 - DNA, 488 bp, Arabidopsis thaliana
  unsure at all n locations
  Clone ID: LIB25-090-Q1-E1-D3
ctgttacgtttgcccggnncggtccgaaaattanacgggtcgacgcacgcgtccgcccacgcatccgcaatgatgctgttaatggttttgtggatgatggatggtcaccaatgggtagcgatggtgcagaggatgttactgtaatgataaacttgtcccctgggaagtttggtgggtctcagtacggtaattcattccttccaagctttggtagtggcgtgctttgtgccaaggcatctatgttgcttcagaacgttccacccgctgtgctggttcgattccttagagaacaccgatctgaatgggctgattatggcgtggatgcttatgctgctgcatcgctcagagcaagtccttttgctgttccttgtgctaagagctggggggttcccaagtaaccaagtcattcttcctcttgcgcagacagttgaacatgaagagtcacttgaggtggttagacttgaaggtcaccctactcacccgangag

SEQ ID NO: 14805 - DNA, 513 bp, Arabidopsis thaliana
  unsure at all n locations
  Clone ID: LIB25-090-Q1-E1-D7
gngnnnggngtggaacgnttcttcttcccnttngtaccggtccagtaattcccgggnccacccacgcgtccggaattgcagtgcattggagcgacaacattagatgaataccgaaagcacattgagaaagaccctgccttggaaagaagattccagccagtgaaagtacctgaacctaccgtggatgaaactattcagatccttaagggtctgcgagagcgatatgaaattcaccacaagcttcgttacacagacgaatctttagtagcagctgcacagttgtcataccagtatataagtgatcgtttccttcctgacaaggcaattgacttgattgatgaagctggttctcgggttcgacttcgtcatgcacaggtcnctgaggaagctagggagcttgangaaggagcttaggcaggatnacanaggagaagantgaagctgtccgtggccanggactttgagaagggctggggaacacttcggggatcgaganattgnnncncagnagct

SEQ ID NO: 14806 - DNA, 407 bp, Arabidopsis thaliana
  unsure at all n locations
  Clone ID: LIB25-090-Q1-E1-E10
catgggtctttcgggaatgatgggaagggtcaagctaatgtaaatagttctggtgttttactgatgaatggccaagtgaacaacaacaacaacacaaatattggaggtgctggtgggtttggtggtgggattggtcaatccatggcagcaaacggaatcaataatataaacggtaacaatagtctcatgaacggaagagttgggatgatggtgcgggatccaaacggtcaacaggatttaggaaaccaacttttaggagcagtgaatggtttcaacaattttgattggaacgcgtgaaatgaagaagaggaagaagagacactgaaagggtaatgttctgcttgcgcagcatcacacatcttcaaactcaggataaggataggccaataagccgtgatattgtgcnt

SEQ ID NO: 14807 - DNA, 409 bp, Arabidopsis thaliana
  Clone ID: LIB25-090-Q1-E1-E12
ttttttcatttgagcttctctctgataaggtcacttcctctgacccttttatctaagctcaacgctgcaactctcgccgtcggttacttccccattttccttccttcttccgattcaaagactcaatttttattctccggcgttgaggattcatctcctaaaaatctctgctttatcttttgatttgagctgatttggagaggagaagaagatagatagataggtaattcggattgatatctcgaaaaatggctcagattcagcatcagggtcaaaatgccaatggtggtgtagctgttcccggtgctgctgcggctgaagctgcggcggctgcggctggagctgcggcggcggctgccggagctgcgcagcaagggacgacgtctttatatgtcggtgatctggatgc

SEQ ID NO: 14808 - DNA, 272 bp, Arabidopsis thaliana
  unsure at all n locations
  Clone ID: LIB25-090-Q1-E1-E4
ngnnggngnaactgtttagttgccgtacggtccanaatncgggtcnacccacgcgtccgcngacgcgtgggcggacgcgtgggtggttgtgtactggtttaggcctctacacttcaggacaagagttcgactcgtatttggtaccaagtcgtgccatctctttctctctctctctttcgccttcacaatccaatatccatgtcgatgttgttgtattgaacttaaagagaggtaataaaaattacctttaaaaaaaaaaaaaaaaagggcgg

SEQ ID NO: 14809 - DNA, 432 bp, Arabidopsis thaliana
  Clone ID: LIB25-090-Q1-E1-E5
aaagccccccaaaaaaaaaaaaaagagttcaaaatgaaaaacgtgagaaatggatttgtcatcattcttctcaccgtccttagtctctgaaaataaattctgattttgatttcgaattttagggattttgagagagagtcagttatgagtagttcggagagagtaccgtgcgatttctgcggcgagcgtacggcggttttgttttgtagagccgatacggcgaagctgtgtttgccttgtgatcagcaagttcacacggcgaatctgttgtcgaggaagcacgtgcgatctcagatctgcgataattgcggtaacgagccagtctctgttcggtgtttcaccgataatccgattttgtgtcaggagtgttgattgggatgttcacgggaagttgttcagtttcccgatgctcatgttcgatccgccgttggg

SEQ ID NO: 14810 - DNA, 394 bp, Arabidopsis thaliana
  Clone ID: LIB25-090-Q1-E1-E8
tcggcatcgccttcgccgccgtggccacttctctctccgccactatcttcatcgtcgttaaacagagctgctccgtctattttttcccctttctctcgaatcaaccatggcttctcgtgctctttcatcgccgttcaacgcttcgctctaagccgcaagacaaggaagcagttacaggtggtggctatggctcctgaggaagagaagctcactcgtcgcaatcctctcgatttccctatcgaatgggagagaccaaagccagggaggagaccagatatattcccaaagtttaagtcctatgaagtcaccgttgcctcctcctatgccttatgattctccagaagaagaggaagaagaggaagagaagaaagaagaagaaactgaagatgacccc

SEQ ID NO: 14811 - DNA, 508 bp, Arabidopsis thaliana
  unsure at all n locations
  Clone ID: LIB25-090-Q1-E1-F1
gggnggnggaatgtttgttngcccgcccgtccganataaaggtnncccacgcgtccgctaattcaaattttctccattctctcgttccaattattatttacttttttcacccaataaaaaanaaaccatgcattcacttccggtgaatctcgtcctcaccgtacttacggtgttcctaacatcaccggcgcaagttatcggataccgtccatatccaccaaaaaccaacgggtccgatcaaatcttcgacgcttcaaaaaaattcgaaggngcatcgaatctcgtccgcctccgttaccacatgggtccaagtcttaaccaanaacatcaccgttcanccaatctggnacggcacgtggnnaaaatcccaggaaggaagaatcatccgtgaggttcattaactcnatctcaggcgttggntntaaacaccttcagtccccgggttgggtggaaaancgttcagntttacactgnccaaaatgggatntnanaattancnggttcnggt

SEQ ID NO: 14812 - DNA, 415 bp, Arabidopsis thaliana
  Clone ID: LIB25-090-Q1-E1-F10
gaaaaaaaaaacagagtagagattgataaaaaaaaaatgagtagctccgattctcctcagcttcacaatatcttcgtctatggtagctttcaagagcctgacatcatccatgtcatgcttaatcgtattcctgagattgtctctgcaacacttcctggctttaagagatttaggcttaaaggacgtttgtatccatgtattatcccctctgagaatggagaagttcatggaaaggtactaatgggattgactaatgatgaacttgagaatgtagattgggttgaaggaaacgaatatgaaagagtgtttgttgaagttgtaagaaaagacaattctgagaagatgagagtggaaacatatccatggatcaacaagaatgatcctgatattggtggagaatgggatttcgaggaat

SEQ ID NO: 14813 - DNA, 387 bp, Arabidopsis thaliana
  unsure at all n locations
  Clone ID: LIB25-090-Q1-E1-F12
tcagttgcaaggatgggcaaataggctataccgggatgaagttgtggcagaatggaagaaagtgaaagggaaaatgtcgcttcacgttcattgtcacataagcggtggccatttccttttagatctctttgcaaagtttcgatatttcatcttttgcaaagaactacctgtggtgttgaaggcttttgtgcatggagatgggaacttgttgaacaactatcctgagctacaanaagctcttgtttgggtctatttccattctaatgtcaatgagttcaacaaagtcgagtgttggggtccgctttgggaagctgtttcgcctgatggtcacaagactgagactcttcccgaggctcggtgtgcggacgantgtanttgttgttttcc

SEQ ID NO: 14814 - DNA, 332 bp, Arabidopsis thaliana
  unsure at all n locations
  Clone ID: LIB25-090-Q1-E1-F2
gtgttgcttagcttcgtgctgtgcgtcngcgacttgtggattatgctcgtcggtagcatcggggatatcnatgaaatcagcgaggatcgcttattgnggtctcttcggtgnctctcntgtcgtctcctggattcttcgtgagactgggtgctccgctcctcgagaaactcncttggatcaatacttctgattcanaataccaaanaatggtatcangcaaacaagctgttcttcntgtnagctttgggaatttcctcatctttgcaaaatatgctttgatcatgattggtgtcaaggaccagaatgacangcgtgactcntggcancatggt

SEQ ID NO: 14815 - DNA, 431 bp, Arabidopsis thaliana
  unsure at all n locations
  Clone ID: LIB25-090-Q1-E1-F3
gcgaaaaagttcttctttttcttccgcacatgtctgactctctcataagcgtaaatcgctctgtcaaatatctctgaccagagagacagagttgcctccacgtttcttcagacaagactcacgctcttccctttcaccacattcccttctccatttctcaatctcacttaccttctcgattcttgctccaatttcgaatcttccgagtgaaaaaagcttcaaagtttggaactttctagtgtttattaatctgggtctgctctgagtttcgtgtgtagctgcatatgagcttaaagctcgaagtttttccatctgggtttgggaattccanggctaagtgattgggagaatttggggaatttaagttgattttaagtaggtttgacttcaaggttgcggtaattaaggttgattttgattcgganttgggg

SEQ ID NO: 14816 - DNA, 75 bp, Arabidopsis thaliana
  unsure at all n locations
  Clone ID: LIB25-090-Q1-E1-F6
tgcggtgtcnccngtcggtacacattcgacagtcgcaactcgaggtcctattcagtgaggtgagcgacngggatc

SEQ ID NO: 14817 - DNA, 487 bp, Arabidopsis thaliana
  unsure at all n locations
  Clone ID: LIB25-090-Q1-E1-F7
ctgttngccctgcccgtaccgatccanaaattcccgcggtccacccacgcgtccgatccccaattcgtgaacaaattagggtttttgaagtttgaagaaggagagaaagatgagtgcttcaaggtttatcaagtgtgtcactgtcggcgacggtgctgttggaaagacttgtcttctcatctcctacactagcaacactttccccacggattatgtgccaactgtgttcgataatttcagtgccaatgtgattgttgatggcaacactatcaacttgggattgtgggatactgcagggcaagaggactacaatagactaagacctttgagctatcgcggtgcagatgtcttcttacttgcattctcacttgtcagcaaagctagctatgaaaatgtttctaaaaagtgggttcctgaactgagacattatgctcctgggtgttcccatcatcctcgttggaacaaagcttgatcttcgagatgataa

SEQ ID NO: 14818 - DNA, 433 bp, Arabidopsis thaliana
  Clone ID: LIB25-090-Q1-E1-G3
ctttttattttcctcttccttggccaaagaaaatcttatcgtagctgtgaaaaccctagtttctaatcatctcaattctctcattaacctatcaatttcgatagggtttgatcaagtatccgatttcatgatcggttgctgtatggagactaattgctggagtttaggttcgtgtgttttgaactgagcttttggttcttgtttgtgtctggtgttgaagacatggatttggaagctaattgtaaggaaaaactttcatattttcggataaaagagctcaaggatgtgctcactcagctgggactttcgaaacagggaaagaagcaggaacttgtcgaccggatcttgacccttctttctgatgaacaagctgccaggttgttgtcctaaaaagaatacagtggcaaaggaagcaagttgccaaattagtggg

SEQ ID NO: 14819 - DNA, 92 bp, Arabidopsis thaliana
  unsure at all n locations
  Clone ID: LIB25-090-Q1-E1-D2
tttgtcantgaatatttngtttgcaatggaaagagattttctgggtttgagcgacaccagtatctaagtaataacgttaagnatgangttaa

SEQ ID NO: 14820 - DNA, 429 bp, Arabidopsis thaliana
  unsure at all n locations
  Clone ID: LIB25-090-Q1-E1-G5
ccaatggttccatacataaatagtaccatgcctaaactatcagggctttgctcgcttaatttcagtgcgtctgagagtttgattcagactacttcacacaactgttggactgtttttgctccattgttggcaaatgtgatgtgttgtcctcagctagatgctacactcacaataatccttggtaaagcgagtaaagaaaccggtttgcttgctttaaacaagaacccagtctaagcactgtctctcggatttaagagcaaatcttggtangaaaaggcgcttcaggtcagcttantaagatctgttctattcactcgtcgaatctcacttcttccgtcgtgccctgttatcaatgtcgatgagtttgaaagcacggtggatacaacgaaaacttcttttggcctgtgaaaaaaattgatcccggtgaag

SEQ ID NO: 14821 - DNA, 430 bp, Arabidopsis thaliana
  unsure at all n locations
  Clone ID: LIB25-090-Q1-E1-A5
acaactagctccaatggcataatgagcattgtagtttgcaatttcttcttccgtgaagaagaagaagatggctttggagaaagaggaagaagcgtcacaaaacggtgcgttttgtgtccttgatgggctctattgcgaggaagaaaccgggtttgtggaggacgatcttgatgacgatggagatttagattttctcgagaaatctgatgagagtgttgtaaagtttcagtttttacctcttttggatatgttcttatgggatgacgatgagattctgagtttgatttcaaaggaaaacgaaacgaatccatgttttggggaacaaatcttagatggctttttggtttcttgtaggaaagaggctttagattgggttcttagggttaaatcccattatgggtttacttcattgacnggctatacttgccgg

SEQ ID NO: 14822 - DNA, 427 bp, Arabidopsis thaliana
  unsure at all n locations
  Clone ID: LIB25-090-Q1-E1-A7
tctagggtttcactacgagaatggacggagatgagctcaccgagcaggaaactgctctttatgaccgtcaaattagggtatggggagctggtgctcaaagaagattgagtaaatctcatgttttggtatctggaattaagggcactgttgctgagttttgtaagaacattgtgttggcaggagtaggtagtgtgactctgttggatgatcgattggttacaacggaagtcttcaacgcaaacttcttgattcttcctgatgaaaatgcttatgtaggcaaaaccgtagctgagatttgttgtgattcacttaaggattttaaccctatggttcatgtttcaatagagaaaggtgatttgtcaacacttgggtgttgattttttcgagaagtttgatgttgtgggtaacgggtacanntcccnttcca

SEQ ID NO: 14823 - DNA, 397 bp, Arabidopsis thaliana
  Clone ID: LIB25-090-Q1-E1-A9
agggtttctattccggctgatctgcttcaaaccattcaaaacatcagagaggttaccggtaaacaacattccgacgaggatatcttctctgtctttaaggagtgtttcagtgatccacatgagaccactcagaagcttctctatttagatacatttcatgaggtgagaagcaaacgggagagaaagaaagagaatttagtgccaaatacacaaggaaggggccggactggacggaagaactttgcttcaagttacacagatgccagtaatggaagaagtgcagcttttaaaaagcagagtggagctaatcacataataggaggttctggaactgcttcgtctgctcctaacaatgcaagaaacgacacaaaaccttcttccaataatgggcccgaac

SEQ ID NO: 14824 - DNA, 388 bp, Arabidopsis thaliana
  Clone ID: LIB25-090-Q1-E1-B10
attgattatgtgtcggacagagactatcgagtaatacccagtagtcaattatctggtttttgatcgattccatcaaaatttgatcttttttcttctctgaagcgaaagctctcgcctttacattttcgccaattgtgcaaatttactgttccacaagttttcaaaatgaaggcgatcttcaaccgtagagttgtcgtcgactcatcttcgcgtctcaccaagctgctcgcgaatccaactactcattctcacctgaatcgtcaaactttcacttctctctataaaccaaaccagagccgccattttcgaacacactatcttccttcaagcccgtcgtctcctcccgtgagccgctttgacccttctcagctatggcgatcgggagaaa

SEQ ID NO: 14825 - DNA, 404 bp, Arabidopsis thaliana
  unsure at all n locations
  Clone ID: LIB25-090-Q1-E1-B11
ctgtgttcaaaacaagttcattcgatctatagagacgaaacaaanagagagatcgtacgcaaaagtttccgatatggctcgctcgtttggagctaacagtaccgttgtgttggcgatcatcttcttcggatgtttatttgcgttgtcctctgcaatagaagaggctacgaagttaggatcagtgatagggatagatcttggtactacttactcttgtgttggtgtttacaanaatggtcatgtcgaaattattgccaatgaccaaggaaaccgtattacaccttcatgggttggttttactgactctgaaagactcattggtgaggctgctaagaatcaagcagctgttaatccagagaggactggtcttccgacgttaagagaattgatcgggcgaaaaattt

SEQ ID NO: 14826 - DNA, 395 bp, Arabidopsis thaliana
  unsure at all n locations
  Clone ID: LIB25-090-Q1-E1-B12
tctcgtcntactgatttctacaaagacgatcatcacaattcctccaccaccagcaccacacgcgatatgatgatcgatgtactcaccactaccaacnaancagtanatctacantctcaccaccaccacaatcacnacaatcatcatctccaccantctcagccacaacaacagattctcctcggagaaagcagtggagaagatcacgangttaaagcaccanagaaacgagcggagacatgggttcaagacgaanctcgtagcttaatcatgttccgtagaggtatggatggtttattcaatacatccaaatctaataatcatctctgggaacaagatttcgtctaagatgagagaaaaanggtttgatcgatctccgactangtgtaccggag

SEQ ID NO: 14827 - DNA, 448 bp, Arabidopsis thaliana
  unsure at all n locations
  Clone ID: LIB25-090-Q1-E1-B2
ctgtttacgtttgcccgtgccggtccganaattaacgggtcnacncacgcgtccgcnaatgttaatgcagacctagtantcaatgttctagatgcaaaccangtaatacctgnagcttgcatctccttgatgatccggggatctggtgctctcagagtcatgggcaataaccttggaggcagcgtaagtttagnagatttctccatgtctttgaaatggagcaacattggaaatctccatctgcatcttcttcagccaatatgtgtggncngntatacaancagtgtttgtgccatatgcaaatgaccacctaagaaaagggattcccgttgcccataatgcacggattcacacttcataatgcngaaatcatctgctcagaatctnaaatcacantttgcaacnatgtcccctacttggattcntcgcaanatnctcaatggnnttg

SEQ ID NO: 14828 - DNA, 431 bp, Arabidopsis thaliana
  unsure at all n locations
  Clone ID: LIB25-090-Q1-E1-B3
gggtgagaagttgagttgaagaaacaaagttcgtgttcgatgcaattgaccaacaagacaactactcaatgtgtcgcttttaaggttaaaacaaccaatcctcgcaaatactgtgttcgtcctaacactggtgttgtcttgcccggtgattcctgcaatgttacagtgacgatgcaagcccagaaagaggcaccacttgatatgcaatgcaaagacaagttccttgttcagactgttgttgtctctgatggtactacttccaaagaagtcctcgctgaaatgttcaacaaggaggctggtagaagtgattgaggatttcaaactgcgaattgtttacattcctgctaatcctccttcaactgtccctgaaagttctgaagaaagnaactcctcctaagggcttccctcaaccgatatttgcctcccaatcc

SEQ ID NO: 14829 - DNA, 431 bp, Arabidopsis thaliana
  unsure at all n locations
  Clone ID: LIB25-090-Q1-E1-B7
ttccaattctctctaatgtttcactaaagcgcatacataaccctaaccctaactctctcgtactgcacaaaaaaaaaaaaaaaattgaagaagagcgatacgatcgtaaccagggagcttgatttctcccctgatttttctaatggattctcaacagagcgatctctttgacaccgcatcgcagccggacacggtggccgacgagtatacctttttggaattcaatactcaaggcgattcagagttcgattaccaggattttggatcgccgacggcatggccgacaccgtctgattctatttccatcgctgacgttgccgatcgtggtgaaggaggagctgccgcggatcatcattctgaggcttcgtcaccttcgtccctctctgccggtgccgggaatggtgcgaaagtgggacgcgggtgganttggg

SEQ ID NO: 14830 - DNA, 427 bp, Arabidopsis thaliana
  Clone ID: LIB25-090-Q1-E1-B8
ttcttcacctttttaccaatttcctcgcttacaagattcaaagggtttgtgattgagagaagctttaaaaaacccatctttggtgtttgattctctgtttatttaattcataaaggaaggctcttttttttttgtttatttcaggctcattacgttgatggtcatctaaatctcaagaagacaaagttgcgatttttgcaactgggtttctctcttcagagatttaatctgtataagaagatctcaagatcagcttttgtgtattgaagaagaactaggaagaacgaggatagatacaggctttaatctaaactttgctctctgctttctgcgattaaaagatggtggcttttgggaaatacttgcagcggaaacaaatcgaagaatggagtggctattatatcaattacaaattgatgaagaagaa

SEQ ID NO: 14831 - DNA, 87 bp, Arabidopsis thaliana
  unsure at all n locations
  Clone ID: LIB25-090-Q1-E1-C1
tttcttggngtttggtctacgccatgacagcctcatgtggagctctctcaactanggaggncggactgtgtttcttgaagaagatga

SEQ ID NO: 14832 - DNA, 405 bp, Arabidopsis thaliana
  Clone ID: LIB25-090-Q1-E1-C10
tcatcacattaaactctgttttgttgatctctctttctgttccgtttctctttccactgccaaaagttaaagctctctctctcactcaatcacacactcatttctcactatttcacaacttccttgtggacaaaattagtcgacttctctgttctctccaacactgtttcgttttcactacccaaaattcgaatctgggttattgaaaaagttccaatttttttatctgggtttttcgaaagctgatatctttttagaatctgatctatctcttctacttcatttcccttgcatttttttaataagttgtagaatctgtcttgttctggaaaaatatggagtcttgctttcctgccatgaagctgaatcaagtgtacctttggtctcaacaacgaaattgtctcg

SEQ ID NO: 14833 - DNA, 301 bp, Arabidopsis thaliana
  unsure at all n locations
  Clone ID: LIB25-090-Q1-E1-C2
ccaanggtttctttgcgganaanctggnnaatattccgacgccggaagcaaccgtggacgacgttgatttcaaaggcgtnacacgtgatggantagattatcacgccnaggtctccgtcaagaatccttactctcaatccatccctatctgccagatntcttacatcctcaaagatttgccacaaggacnatctcgtcaggcacgataccnggacccgggttcgttggttgggaacngcacgacggttctggacgtaccgggttaaggtggcttatagcatagcggttantctgatgnaag

SEQ ID NO: 14834 - DNA, 408 bp, Arabidopsis thaliana
  unsure at all n locations
  Clone ID: LIB25-090-Q1-E1-C3
ctcgtcgcgcgggacggtccattactanaggggccctgnaccgcntccggaaagaaacccccataaanaanaaaaangagttcaaaatgaaaaacgtgagaaatggatttgtcatcattcttctcaccgtccttagtctctgannataaattctgattttgatttcgaattttagggattttgagagagagtcagttatgagtagttcggagagagtaccgtgcgatttctgcggngagcgtacggcggttttgttttgtanagccgatacggngaagctgtgtttgccttgtgatcaagcaagttcacacggcgantctgttgtcnangaagcacgttgngatctcaagatctgcganaattgcgggaacganccaagtcctcctgtncggtgtttcaccgatnatc

SEQ ID NO: 14835 - DNA, 437 bp, Arabidopsis thaliana
  Clone ID: LIB25-090-Q1-E1-C4
caaaaaacaaaacaaaacaaaaaccaaaaaaacaaaaaaataaatggcaagaatttcactagggatatgtctgatgttagtagtagcatcaagtgtgatctatgaagcgcaaggaacgttcttactaaaccattacttgaagaagaattttccaaaaaaatgcaacgagtttacgccttacgctaacaagggtatgataacgttggtgaccgatctcgaaggtagcagtccggccactacagagttcaagactttctttacacagttcaagtcttacatgtctttcatcgagacaacatcggcctcaacaaaaaatgttgatgccgagatgacagctaaatgtgacggtcttttcaaggccatgtctgcattgagtgctaagtaaaaggcgtcaaatcagcggatgctggggagtatgaagatgaccatgttgtcga

SEQ ID NO: 14836 - DNA, 502 bp, Arabidopsis thaliana
  unsure at all n locations
  Clone ID: LIB25-090-Q1-E1-D1
gnggngnnnnganngttacgtctgccggnncggtccgaaattaangggtccacgcacgcgtccggacgacggcaaattcgtggaagctgtttcatcgattccggcttcactgaagcggcgtcgctcgacgtttattattccgacgactaggcctttgaggcagtttctgattaacttcaggcgataatggcaaacagaacagatccgttggcaaagaatataagaggaacgaatccgcagaatctggtagagaagattgtgcgaacgaagatttatcagcacaccttttggaacgagcagtgctttggtctcacggcggagacattggtggacaaagctatggagctcgaccatctaggtggtacctttggtggtagccgcaagcctactccgttcctttgcctcatattgaagatgcttcaaatccaacctgagaaggaaattgtcntgggagttcataaanaatgatgactacanatatgttccgtantccttggtgcgg

SEQ ID NO: 14837 - DNA, 380 bp, Arabidopsis thaliana
  unsure at all n locations
  Clone ID: LIB25-090-Q1-E1-A3
anagggtcnagnnacgcgtccgcnnacgcntccgaaaaaagattcgtcgacgtcgccagccattggcgacttgttcttcttcgtcttcaaaccttgtcctcttcaattatcttccagatctctctctctctctctctttcatcaagtcttccttctcattcgtctccttcttcgtcttcgtctacccttgnagaagaaatangaaactccatttatttattancctctctctcnctctctctctcntctcgttatttctttatttgattcttcgtattgacgtantggcttgcgtcacctcaatctcgttctcttcaattccaaatttcctggggatagataganncatttttagcgcgcaaaaatgntanatccgggat

SEQ ID NO: 14838 - DNA, 113 bp, Arabidopsis thaliana
  unsure at all n locations
  Clone ID: LIB25-089-Q1-E1-G1
ngtccggaaaacaaacatccntgtccagattcacaagggaatgaattttggnttgggatccaactccaacaattggtgtttgaaantccgccagcaanaactcctcaaggttt

SEQ ID NO: 14839 - DNA, 67 bp, Arabidopsis thaliana
  unsure at all n locations
  Clone ID: LIB25-089-Q1-E1-G10
tntcgatgcccatcatggntgctccaactgccatgcaaaagatggctcaccctgatggggantatgc

SEQ ID NO: 14840 - DNA, 493 bp, Arabidopsis thaliana
  unsure at all n locations
  Clone ID: LIB25-089-Q1-E1-G12
gggngnnnnnngttngtngccggccggtcgaaataacgggtcnagcacgcgtccgcgaaaagaggtaagattgttcttgaagaatcgattctatagagcgtgttagcttcaatgctaacttgggagaccccagttatgcttgcaagcaacaccgcctcaaccaaaaagctagccttcattaccacctttctcatcatttgtgttatgtccggtcacaatgggtcatgtctcagccgcangcggatgttttgccactgccagcctcagacgcagattgcctcttgagatttaaagatactttggttaatgcatcgttcattagcagttgggatccttccatctccccgtgtaagcgaaactcagagaattggttcggtgttctctgtgttaccggtaatgtttggggcctacaactcgaaggaatgggcttaaccgggaagcttgaccttgaaccattaagctgcaatcaagaatctacgaaccttgagcntca

SEQ ID NO: 14841 - DNA, 463 bp, Arabidopsis thaliana
  unsure at all n locations
  Clone ID: LIB25-089-Q1-E1-G5
tgtgtgtgttctgtgttctctctctcgcgcgaagcggttctctttcttttgtttanttgtttttatttgtttttctcttaaacggaggagagaagatggtggcgcctgctttgttaacgggagctctgggacggagatccttgtaccgatttgtgcnggtgattggtaaccgccttttcgctttttcnaatggtactttgtatctcgcgtgaaaactcaacctcctgaacctcgggcgcaatccgtccttcccgggtggaagcctaaacaatggggaaagaaatggataacggtgaantaaccaaaccaanggaagaangaanggnttaatgaccaaantgntgttccctaaagtgcgctganattcaagactgctaattccgaaagtgcaacttcantcctaatcacgggagtacaaataatgttggtggtcctcaaagantttcctttgccngctggttaa

SEQ ID NO: 14842 - DNA, 527 bp, Arabidopsis thaliana
  unsure at all n locations
  Clone ID: LIB25-089-Q1-E1-G6
ggnnggnngnaatgttactgttncccgtgccggtccgaaaattcaagggtccanggncacccacgcgtccggtttaatatcttattgtttaaaaaagaanaacaagactatgggaagtgtacagttgagtggttccggcctagtagcttctctacctccaaatcatagctttagccacaagaccaaacttaataagccaaattcgtacttctttcgctcaaaacacaatgccgcaagaaccaaaaccgtccgagccataagcaccgcaccagcgagccagcctccagccgctgatgagcccgacgaacctcctgctgtcgattttgcgttcgtccattcggtgttgttgccggacgggacaccggacgtacattggagaaaagcgaacggtggacacaaactaatgaagacataatgttggnttccaaaatcnaactcnaagggtnccttaaantaagcccttgtcaaactgcgcaaggngttnggaacttgcgncaacttgcatggtccaanattggtaaatggga

SEQ ID NO: 14843 - DNA, 164 bp, Arabidopsis thaliana
  unsure at all n locations
  Clone ID: LIB25-089-Q1-E1-G7
tgggcccccaaattccnaaagattntccccaaaatgggtttccaaccgtnagggagaanaatttcttcaacaaccaaatgggccgttccccaaagggcggctcaacnattgatttaacgccgaaatcctggggtttaacgcntggtgnctccaatccanggggt

SEQ ID NO: 14844 - DNA, 503 bp, Arabidopsis thaliana
  unsure at all n locations
  Clone ID: LIB25-089-Q1-E1-G8
antgttcccctgccgtccgaaaattcaagggtccacccacccgtccgnatccgaaacacttcactctctctaatcaaaaagcttttaacctcagccgttaaatctttctccgatcatgccgaccagaaacatcgccattggtggagtccaagaagaggtctatcaccccaacgcacttanggcggcgctcgctgagtttatctcgactttgatcttcgtcttcgncggntcaggctccggaattgctttcaanaagatcactgacaatggagcaaccactccttccggcctcgtcgncgctgccttaagctcatgccttcggtctctttgtcgctgtctctgttggcgctaacatttccggtgggcacgttaaacctgccgttancttcngtgtcntaccggtggtaanatcantctcctccgtgggantccccaaagggattgctcaagctccttggttccttnnccgcttggttccccccttancctttgcaaccgggngg

SEQ ID NO: 14845 - DNA, 445 bp, Arabidopsis thaliana
  unsure at all n locations
  Clone ID: LIB25-089-Q1-E1-H3
agaancagcttcgatcaagagatggcttcacttacttcaatagccacgccttacccatcttcatcgcaggctttgcgtctgaaatcctccggaaacactcttttctctgccggagttcgatcggcagcaatggtttccgggtcacaaaacgcttaagattcaatgcacttcaaccaaacctgccaaacctgcagctgaagtcgattggganacagaagagagagcttctattggagaaaaagggtgagaaantgtggacgtgaaaggaagctcaacggttacaaaaagaaaacaaactttgtgattcctgatgtaagancaaaggcagagtacaaggcgggtcatcctccgggaagctatcaatgtggagatgtacaagactcataagggaatgggacggcatgggacataactcgcccgtcttggctttgctttccttggtaac

SEQ ID NO: 14846 - DNA, 455 bp, Arabidopsis thaliana
  unsure at all n locations
  Clone ID: LIB25-089-Q1-E1-H4
ttagggtttcaatctctctgctctgcttgtcatcaccaccaccaccaccancgtcgtcgtctctctgtatctctccggcgggttctctctctacttcccccggaggattaaaatatggaccaagtcttttattttgatattccgttagcttgttcagttattgtagaagctgtaccgtcaagacttttaatatctcaaatggatgatggtgggcatcgtgagaatggtcggcataaagcancagttcaaggccagtgggttgatgcaagcatcaaccgttcgatgaaacaangtgatgtcgataatagcaaagccgcgatgcaacgattcaagagaaaaatctgggcgatatcagntaaaaaagcagcagttanctgaaaagggacatgggcgtttcctcaanagggacaacgncattgcttaagngcaacnatggcgattatgggggagaaaca

SEQ ID NO: 14847 - DNA, 436 bp, Arabidopsis thaliana
  unsure at all n locations
  Clone ID: LIB25-089-Q1-E1-H7
tgattgatccacatggcttccgctgccgcaagttccgccttttcactccttaagtccaccggcgctgttgcttcctccgccggaactcgcgcacgtgcctcccttctgccaattccctctacctctgtttccgcgcgtcctctaagcttctccgccantctaaattcccgtcgnttctctctccangttgcttccaaagttgaatcggtgcgtgggaaagggaaganaggatggtttctatggcgaagaaaacgtcngagatntggactcagtgaatttgaaggggaaaaaagtttcctgaaanctgatttcaaaggtacctccccangaaaaacaagactaacactggacgataacaagaatccgtgncggccattccaaangattnnagtatntgagntgaaaatggngggaaaagttancctctccantcaaa

SEQ ID NO: 14848 - DNA, 495 bp, Arabidopsis thaliana
  unsure at all n locations
  Clone ID: LIB25-089-Q1-E1-H9
gngnnngaagtgttacttgccggcccggtccgaaataacgggtcgagcacgcgtccgcaaaaaacgaattctcgaagagaaagacactgaaatcgaaaaatctatagagagctcactcactagcaatggcgtctcttctcggaagatctccttcttcaatcttgacctgccctcgtatttcttctccttcctcaacatcttcaatgtcccatctctgcttcggaccagagaaactttctggaagaatccaattcaatccaaagaagaanagatctcgttaccatgtctctgttatgaatgtcgctacagagatcaactctgttgaacaagcaaagaagattgattcaaaggaaagtgcaagacctgtttatccgtttgctgctataagttggacaagatgaagatgaagctatgccttttgttaaatgtgattgacccgaagataggtggtgtgatgataatgggagatagangaactggtaaatcaacaactgt

SEQ ID NO: 14849 - DNA, 434 bp, Arabidopsis thaliana
  unsure at all n locations
  Clone ID: LIB25-090-Q1-E1-A1
tgatattactgttcttcagaacatgactgggtttaaaagaggtttggcttcactccaacaagttttcgggtcctttaccggacttttcgggtcttaaggagcttgagagcttgagtttgagagataactcctttacaggtccagttcctgcgtctttgttaagtcntgagtcacttaaagttgtgaacttgacgaatantcatctacaaggaccagtgcctgtgtttaaganctctgtttcanttgatttggataaagattctaacagcttttgcttgtcnantcctgggtgantgtgatcctagantgaagtcattgcttttgnaanctagctcaatcgattatccgncccngctcgctgananttggnaaggaaacgatcttgggctaactgngatgggatatcntgtnncannggggaacaatactngttt

SEQ ID NO: 14850 - DNA, 408 bp, Arabidopsis thaliana
  Clone ID: LIB25-090-Q1-E1-A10
ttttttcttttgttctctctttcttacatatttcttttggatttcgttgtcttttttttctctcttttcttctcctctctctcgctcgatttcaatttgggcgagaaaggagcggtcttttgtctttcctgggtttatcagctagatccctcttgcctaaagtttgtaactttcttagggttttcttctgatttcctctctctcggggttaattctgctcaaaaatggtttgattcagaggcaaatctggttttgtttagacaataaagttcgggactttttgacatactcacagctggtttttagctttggttcttatagagagtaatagtagtgaagggtttgtgccaatagttagaaatgatcaaacagatatttgggaaattacctagaaagccttccaaatca

SEQ ID NO: 14851 - DNA, 416 bp, Arabidopsis thaliana
  unsure at all n locations
  Clone ID: LIB25-090-Q1-E1-A11
ggaaaaagatatggttggaatcctgccgccagagttttgtcaagatgatttctgaaaaacagcttagagagatggaggaactgaaggcaaagacccaaacaactcatgctcaaccggatgatctaattgacttcttccatctaaagagtcggaagggaatgagtcaacttgagttggaagaccaggtacaagatgacctaaagcgtgcaactggagaattcaccaaggacgagaacgatgctaacaaacttaaccgcattcttcaactcacaggattcagtgacccagtctatgctgaagcatatgtaacggtacaccattatgatattgctcttgaagttacagtaatcaaccgaaccaaggaaacccttcagaacttgtgcttggngttagcaaccatgggtgatctcaaactt

SEQ ID NO: 14852 - DNA, 409 bp, Arabidopsis thaliana
  Clone ID: LIB25-090-Q1-E1-A12
ctgttgaaaaaaaattcagggaaaattggaaaaagtgatgatgatgacgagagatcaattcaaatcttaagtcctccaaattttaaaaatttcgatctccactaccttcgtcatcttcctctacttctgattctcttttctgggtttgtcgtttaatgggttgattttgtatcgtcaaaacggagaaaacaagaagacttcttttggttttcttattgcgaagaagatatttctagggtttcgagattttctgggttttctgggtttttgtgtgttctttgattggatttgattattgggcaatttccttggaattcaagaaacttctaaggttcttaaagtgtaaagctttgtgatttctcttattcatacattctaggactttgggttttggagttgtaatgggctt

SEQ ID NO: 14853 - DNA, 195 bp, Arabidopsis thaliana
  unsure at all n locations
  Clone ID: LIB25-090-Q1-E1-A2
cngngtcagaagagaanagcgcattgtttcccatttttatcntgacgatnatggcaattcctttggtgccttacaccatggtcaagttaagcggtgctctctccaagaatncaaaggaccattcattgtcagtgtctcgagtgtgaccgttctggnaaatataagagatccttgtttaaaaagatcncnaacttc

SEQ ID NO: 14854 - DNA, 382 bp, Arabidopsis thaliana
  unsure at all n locations
  Clone ID: LIB25-089-Q1-E1-F7
taccctaatcacattttgtaacaataatacanttatacattaaaactctccgacgatgcctcaggcaccgatgccagagttctctagctcggtgaagctcaagtacgtgaaacttggntaccaatatttggttaancatttcttgagttttcttttgatnccgatnatggctattgtcgccgttgagcttcntcggatgggtcctgaagagattcttaatgtttggaattcactccagtttgacctanttcaagttctatgttcctccntcnttgtcatcctcaactccaatggttaacttcaatgtccaaanccacgcanncaaccaactcgttgacnaatcctgttacaangccaactgtcacgtgtcgtgtccccntcg

SEQ ID NO: 14855 - DNA, 456 bp, Arabidopsis thaliana
  Clone ID: LIB25-088-Q1-E1-E5
ttttttttttttttttaacaacacgaacgatacaaatatattatttcttgcaatccatggtttctacttgtatttgaggaaaaaaaaagttacaatatcaatattcccaaaggagcttagaataggaacaagaatctggtgagtgattggtgctccattcttcaaacgcagaagacaatgatgaatgagttctggttctctttaaatggtaccatcatctgtctggaacacatagccagcctccttaaagtgagatttcaccaatgctaaagacttgtacctatgtgatatcttgttcttttcttcctttgccatctctgcatacgtttggtcatatccatcaggttgaaacactggatcccatccgaaatcagttggtcctctgggctggaactatcttacccggagttttccccaaaaatgtaagaggttcagcacctggaccacgcgagaaag

SEQ ID NO: 14856 - DNA, 530 bp, Arabidopsis thaliana
  unsure at all n locations
  Clone ID: LIB25-088-Q1-E1-E6
ggnngnggngnattttcnagccgggtcgtaccggaccataattcccgggnccacccacgcgtccganacctcccatttttcaaaccactctctctttctctttctctaagtctttaacaatggcgcgccttctcttccgtcttctccaagaagccaattctacatctccggctgaagcttctccgcctttcaactccgacctcgtcctcatccttgcggttcttctttgtgcactgacatgtatcatcggcttaatagccgtctctcgatgcgcttggctccgccgtatcgcctcaagaaacagatcggatcaaactcatccaccgccggtagctgcagccaacaaaggattgaaaaagaaagtcctccggtcgttaccgaaactcacctactcgccggattctccgccggcggagaaactcgtggagtgtgctatctgtttaacggaattcgccgccggagacgagcttaagggtgttgccgcagtgtgggacatggtttccangttatcgtgtancgacacgtggcnt

SEQ ID NO: 14857 - DNA, 467 bp, Arabidopsis thaliana
  Clone ID: LIB25-088-Q1-E1-E7
ttctttctttctttttttgctccacagctcttcccattgtaagttttgttttccaaactaatcctttcaatccaaaaaccatgggagcctgtgcgagcaaacctaaggaatctgacatcgtcgaaggctctgtctcgaccgaaaatgctgttgttgagtccaagaatgccgcgaccgagacagatgccacattaactcaggagaagaaggaagagtccattgaagagacaaagaaggaaggtgagacaaaagaggactcctctgaggcaaccaaggctgagccaactccagaagctgtgaaggcagaagaaaaaacatcctcctggagactggagcaacaagcacaaagaagaacaacacctggctgctaaaaacgaatgaagggccctccccgtgattcctttgatttcatttaacaaatctcaaaatcatgagtatgtgcaagtgcaagtgtttctcacattggt

SEQ ID NO: 14858 - DNA, 458 bp, Arabidopsis thaliana
  unsure at all n locations
  Clone ID: LIB25-088-Q1-E1-E8
cattatcaattatataaataacataaactgaactcctaagcagggttctttttataaatttattatttatttattgtggaaaaagaacaataataatatggggatgtcnaaaagtatcaaggttatcctatctcttgctcttgtagtgttcttggcacttgcaggaaccaaggttgaggcctccgtaagatacataacttatcctgctatcgatcgtggagatcatgctgtacattgtgacaaagcccaccctancacctgcaagaagaaanaagcanatccttacagganaggatgcggagtgctcgaaggttgccatcgtgaaacangtccaaagcccacctaacagcattannatatacatttggttgacatgtttctcattggaagtatttggntatctgtatacactcnttacatcctcatnttcatctgttaatnttggctntgtaattaat

SEQ ID NO: 14859 - DNA, 286 bp, Arabidopsis thaliana
  unsure at all n locations
  Clone ID: LIB25-088-Q1-E1-F1
gttgcngagaaagganacnannaagggcctttggctctgttactccatggtttccctgagacatggtactcttggcgtcaccaggatcgatttcttgtctagccatggttaccacgtggncgctccanatctcagaggctacggtgactccgattctctacggagccacgagtcttacactgtgagtcacctagtcgctgatgtcatcggtttactcnatcactacggnactanncatgcttttgtggcngggcatgactggggagcaatcatangttggngtcta

SEQ ID NO: 14860 - DNA, 429 bp, Arabidopsis thaliana
  unsure at all n locations
  Clone ID: LIB25-088-Q1-E1-F11
ctaactctttctctatacaagagcgcaagctcgaaggcgctcttgttctttcttcantttctccttaacaatcaccctcanagtaactttaaaactctctgtttctaagtaattcacacacaaaatggctattaaactagcaattctatttaccacatttgttctttttagcctcgccgacgctagaatccccggtatttactccggcggcgcatggcaaaacgcacacgccactttttacggtggcagcgacgcctccggcacaatgggaggagcttgtggttacggtaacctatacagccaagggtacgggaccaacacggctgctttgagtacggcgctgtttaacaatggtatgagttgtggagcctgctttgagctaaaatgcgccaacgaccctcaatggtgtcactcangtagtccttcgat

SEQ ID NO: 14861 - DNA, 505 bp, Arabidopsis thaliana
  unsure at all n locations
  Clone ID: LIB25-088-Q1-E1-F12
ggnntggnggaaattcttatttggncgggcggtaccgagaccacaaattcgcgggtcnacccacgcgnccggaagctctttgttcatctctctatcttcttctccatcctcttcatcantctcccatcttcttacagctgcaccgaaaatgacaagaatgccctccttcanatcaagaaagcacttggcaatcctccccttctatcctcctggaacccccgaaccgactgttgtaccggctggaccggcgtcgaatgcactaaccgtcgcgttaccggtctcagcgttacctccggcgaagtctccggtcagatctcgtaccaagatcggcgacctcgttgacctccgtacactagatttcagctacctgccacacctcaccggaaacatcccacgcaccatcancaanctcaagaanctcaacactctctacttgaagcacactagtctctccggtccgattcctgattacatcagcgagctcaagagcctcacgttcttgggt

SEQ ID NO: 14862 - DNA, 452 bp, Arabidopsis thaliana
  unsure at all n locations
  Clone ID: LIB25-088-Q1-E1-F2
ctagcaccttttgtagttttccgtttattttctgtataaggcgggtgatttcggctccttcatcggaaattatgagcaacgttatcggcgatcgcactgaagacggcctttccaccgccgctgcggcctctggctctacggctgtccagagttctcctcccactgatcgtcctgtccgcgtctacgccgatgggatctacgatcttttccactttggtcatgctcgatctctcgaacaagccaaattagcgtttccaaacaacacttaccttcttgttggatgttgcaatgatgagactacccataagtacaagggaaggactgtaatgactgcaagaagagcgatatgaattacttcgacattgcaagtggggtggatgaagtcatccctgatgcaacaagggtggtcaancaagaatttcctgacaagcancaagattgactaagttgnc

SEQ ID NO: 14863 - DNA, 71 bp, Arabidopsis thaliana
  unsure at all n locations
  Clone ID: LIB25-088-Q1-E1-F8
ctttcacttgacaaagctggaaaagaggttcntggtaatgcttcaaaggttntcctcacaaangagacctc

SEQ ID NO: 14864 - DNA, 429 bp, Arabidopsis thaliana
  unsure at all n locations
  Clone ID: LIB25-088-Q1-E1-G10
cctcccatttttcaaaccactctctctttctctttctctaagtctttaacaatggcgcgccttctcttccgtcttctccaagaagccaattctacatctccggctgaagcttctccgcctttcaactccgacctcgtcctcatccttgcggttcttctttgtgcactgacatgtatcatcggcttaatagccgtctctcgatgcgcttggctccgccgtatcgcctcaagaaacagatcggatcaaactcatccaccgccggtagctgcagccaacaaaggattgaaaaagaaagtcctccggtcgttaccgaaactcacctactcgccggattctccgccggcggagaaactcgtggagtgtgctatctgtttaacggaattcgccgccggagacgagcttanggtgttgccgcagtgtggacatggt

SEQ ID NO: 14865 - DNA, 433 bp, Arabidopsis thaliana
  Clone ID: LIB25-088-Q1-E1-G11
gaagagcagagcaaaatccctaaaattttaaactctgttttgctttccgacaatcaaaccctaggggttgctaaagggaaaggagagagatgggtggtgaagaggaagttgtttctgttgagctaccagcaccttcttcatggaagaaattgttttaccccaacaaagtgggttcagtgaagaaaacagaggttgtgtttgtggctccaacgggtgaggagattagtaacagaaagcagctggagcagtatctcaaatcgcaccctggaaaccccgcgatcgcagagtttgattggacgactagtgggacacctaggagatctgcaagaatcagtgagaagactaaggctacgccgtcaccaagataaagagccacccaagaagcgaggtagaaccaaatctccagtgtcaaagaaagatgcagaaggtgaga

SEQ ID NO: 14866 - DNA, 427 bp, Arabidopsis thaliana
  Clone ID: LIB25-088-Q1-E1-G12
tttttgggtaatagggtttctaatctctgggacaaactccaatcgtttcgaatccgcaatgcccagatggtcgatcaatagaaatatcaagagtctccaattccaaaggctaaatctttgagatctttttttttaaaaatttccctgaaattaataaactttgaggggaaatgagcgcttcgaggttcgtaaagtgcgtgacggttggtgatggagctgtcggaaaaacttgtttgttgatttcttacacaagcaacactttccctacggattatgtgcctaccgttttcgataatttcagtgccaatgttgtggttaatggaagcactgtgaatcttggattgtgggacactgcagggcaagaggattacaatagattaagaccactgagttaccgtggagcagatgttttcattttggccttctc

SEQ ID NO: 14867 - DNA, 114 bp, Arabidopsis thaliana
  unsure at all n locations
  Clone ID: LIB25-088-Q1-E1-G2
gcnaagctggcaanggcgacggnaaccgcggagagaatcaggagcgcagcaagcgaccagattgagctcgatgacnacgatttccaggaaacccgttccaaancccaagcgtta

SEQ ID NO: 14868 - DNA, 244 bp, Arabidopsis thaliana
  unsure at all n locations
  Clone ID: LIB25-088-Q1-E1-G3
cggcnagggttaaggcggaggaaananganccatcctgcgcctgaaaaaggaacaagatccngcttacgttccngcccttgaacccgttaaagcaggggancaacagngacaggaggagaaaagacctttaagagaaaaaaactgctgaaggcaganaggaaactcaaaagaagaaagaaagaaggctcngggagaaagcanccgcgtgaaagctgaaagaagaagacaaactgctanaagtgc

SEQ ID NO: 14869 - DNA, 333 bp, Arabidopsis thaliana
  unsure at all n locations
  Clone ID: LIB25-088-Q1-E1-G4
gtnnttnnggncggncggtccacaataacgggtccaccacgcgtccggaagaaaaagctgttcctgtgctttagcagaccttttggtagttgtcctggtcgctgatcatccctttccgacaactctgttgctctttctctcacgtttgagtcttaatcttcgattgtccttggtcatccttaagttttgtttttcgctttcgattcattttccagatttcnttttaaagaanacccgtcccttgatttgattccccccaagaanggaaagcaaaccagagantancagctgaatcaagtaaccttgntgggtgttttgaaattanccggannc

SEQ ID NO: 14870 - DNA, 434 bp, Arabidopsis thaliana
  unsure at all n locations
  Clone ID: LIB25-088-Q1-E1-G5
tgttggaacggtggatgcgtctaagtatccacttcctaagactaagttgactcttgagactttgagagatgtgcttcatcttcgttctagaactaactcgatctcagctgttgcaagaattcgtaatgctcttgcttttgcgactcacagtttctttcaagagcatagtttcctttacattcacactcctatcatcacgacaagtgattgtgaaggtgctggtgaaatgttccaagcaacaactttgatcaattacactgagangttggagcaggatctcattgataaccctccgcctactgaggctgatgttgaaactgcnangntcantgtcaattganaaangtaaagttgtaaccggaactgaaagctgccaaagcaagcaaaggaancgatnactgctggcgttgcctgaacttaaaataacaaaggng

SEQ ID NO: 14871 - DNA, 106 bp, Arabidopsis thaliana
  unsure at all n locations
  Clone ID: LIB25-088-Q1-E1-G7
tnactcgctcaaaaaccanngtctgctcctggttacatctcaagtttccaactaaaaatactccncaaaaaccttgaagtcaatggagctgatcaaagtcaangac

SEQ ID NO: 14872 - DNA, 583 bp, Arabidopsis thaliana
  unsure at all n locations
  Clone ID: LIB25-088-Q1-E1-E4
ngnnnngnaatgttacttttgccgcccgngtccgaaataaccgggtccanccacgcgtccgatcggaaaatcgtcgagaagagagagagagagagagaatgtcgnatcctcctncaacaatcctngcaactcccgggttggggctggtttgattcaagtccgaattcctgggccgaaggaaagaagccgtctccgtccgtcaattccgttttccgggccatgaactgggggattgaagacctggttatgcaagatgggatgangtgcttgcgtctgttgctgaagacgattaagaactttgcaagtcatttatctggtgggacatcactgaggttccaagacttcaacaccatggtacgaagctgtacgatccttctacggtcatgttcttcttcaggaacaagcacatcatgatcgattcttggaactgggtaacaacaacaagatnaactgggctctcaagggacaaagcanggagttcatttgatatcattgagactgtctaaccgtggtgcaaaggaaaggtccgtgggttggtgaattgctccaaaaaagantactccaaccaaaattaccgttacca

SEQ ID NO: 14873 - DNA, 555 bp, Arabidopsis thaliana
  unsure at all n locations
  Clone ID: LIB25-088-Q1-E1-C4
nnnnnngaactgtntcgtttgcccggnccggtccgaaaatancggggtcgncncacgcgtccgcntaagagcagatattattgaaaccggaagcaggaattaccctcctggcggaantnccccccggnatcctgatggggcctcaaaaaaacctgtgggaggagcatcctggtgatgggaaccgatgaagattgttgaagaaaggngacgattgattttcatgagccctggattctggatgaaagatctcaagcgataacaatgacgaacgcaancgcgacgaagattgggttcggtgggatgaggaatcgacaaagtcaagatgaagagtacgatgatctggcaatggnaagacaagagttactggacaagacaacgaagaagaaagagtctcgaagacacaatctccaaggtatcgcaaaacaaccacaacgaggcttcaaaagaccaacaaaggatgacaaatactcccaaaacctcgattcttttcctcaaagacaacgaancaagccantggactggaatcccttgagctcacaagtgaatacaagaaac

SEQ ID NO: 14874 - DNA, 437 bp, Arabidopsis thaliana
  unsure at all n locations
  Clone ID: LIB25-088-Q1-E1-C6
cctcgagattgaagaacgctacaccagtttcctacgcagaggaacctgaactgaagtaagggtaaagtgtctaangaagagattgttttgtgggtangataaggcgtaaggccaganatttacactgangagcatgagaaactgttaggtaacacanaacgaacttgggagctttttgttgatggttgtgacaaaaatgggaaacggatttatgaccctgttagaggaaagtgttgccaccagtgcaggcagaagacnctaggttatcatacccaatgcagccagtgtanccattctgttcgaggtcaattctgtggagattgtttatacatgagatatggagaacatgttcttgaanctctggaaaatccggactggatttgtccaagtctgtcgcaatatctgcaactgcaatttccggtcgtacaaaaaaaagg

SEQ ID NO: 14875 - DNA, 526 bp, Arabidopsis thaliana
  unsure at all n locations
  Clone ID: LIB25-088-Q1-E1-C7
gngnnnngnaatgttagttggccggccgtaccgaaccacaattcccgggnccacccacgcgtccgganaaaactttgcttctctttctataaggaaccagacacgaatcccattcccaccgatttcttagcttcttccttcaatccgctctttccctctccattagattctgtttcctctttcaatttcttctgcatgcttctcgattctctctgacgcctcttttctcccgacgctgtttcgtcaaacgcttttcgaaatggcgattttggattctgctggcgttactacggtgacggagaacggtggcggagagttcgtcgatcttgataggcttcgtcgacggaaatcgagatcggattcttctaacggacttcttctctctggttccgataataattctccttcggatgatgttggagctcccgccgacgttagggatcgggattgattccgttgttaacgatgacgctcaagggaacaagcaatttggccggagataataacnggtggttggcgataataa

SEQ ID NO: 14876 - DNA, 504 bp, Arabidopsis thaliana
  unsure at all n locations
  Clone ID: LIB25-088-Q1-E1-D10
gngnngnggaagtgtnttgtttagncggccggtaccgaaccanaaattcnngggtcnacccacgcgtccgcacacgcgtccgccagagatctttctctctctctcatccaaagacttcacgagtccccaaagaaaaaaaaaaacctattcccaaagatgaagaacaataacaacaaatcttcttcttcttctagctatgattcttctttgtctccttcttcttcatcctcctcccaccagaactggctctctttctctctctccaacaataacaacaacttcaattcttcctcaaaccctaatctcacttcctccacatcagatcatcatcatcctcacccttctcacctctctctctttcaagctttctccacttctccagtcnaacggcaagatgggtcaccgggagtttcacccagcgatgccacggcggttctttccgtataccccggcggtcctaaacttgagaacttcctcggcggaggancctcaacgacgacaaca

SEQ ID NO: 14877 - DNA, 355 bp, Arabidopsis thaliana
  unsure at all n locations
  Clone ID: LIB25-088-Q1-E1-D11
agaggcagagaacaagaaacgtgttgatgaagatgaaactatgaaagaagttccagaaccaagaagatggcaatgaagaaaaagtctctcaggaatcttcaaagcctggagatgcgagtgaagaaactaatgaaatggaagcagagcagaaaacacccaagttagagaccgccattgaagaaagatgtnaagatgaggctgacgaaaacattgctctgaaagctcttactgaancttttgaggatnttgggcattcctccacacctgaagcctctttttcccttgcnganttatgaaacctgtcatgggacnggnagcctttctactgangattggnangatntgatgttgccac

SEQ ID NO: 14878 - DNA, 426 bp, Arabidopsis thaliana
  unsure at all n locations
  Clone ID: LIB25-088-Q1-E1-D12
ccaaaaaaaaaatggactccaaaacaacttttctcacatttctcctctgtattttcattttctctcatttttcaccctcaacttccaaatctctgacagaaaagcccttatctttctcaccgtcggcgagtttgccgactctcacggcggagagacttatcaaaggattcaatttgatgcctacacgcgacgtcaatgtcatcgatgaagaaggttctgaggctccgagactggtcgagagagcattcgatttgccggcggcggttgaccgtcgtggctccggtggttctccgtcggttcaagattttggtcaccatgctggttactacaaactccctaactcaaaagcagcaaggatgttctactttttcttcgagtcaaggacgaacaaagccgattcaagtggtgatttggctaancggtgga

SEQ ID NO: 14879 - DNA, 62 bp, Arabidopsis thaliana
  unsure at all n locations
  Clone ID: LIB25-088-Q1-E1-D2
cncatcaattgctccgcntcctccatcaactgtcgatgtatgctccgtacaggtnaagacga

SEQ ID NO: 14880 - DNA, 526 bp, Arabidopsis thaliana
  unsure at all n locations
  Clone ID: LIB25-088-Q1-E1-D3
gngnnngnantgttagttngccggccgggtcgaaataaccgggtcnagcccgcgtcggcaaatntcctnctnctnctcctnctcctnctnctncctnaaacccnanaagcttcaacccaattgaaattttgattcnaagttnaaatcgattaatnggcgggacaanacctccgattcaacatctcccgtgggctcctctctcccgtatcttctcctactgctactaaagaaagataataccaatcctgttgattcgaagctcacggaattgaatgaatcaagggctgagttactaaacaggatccagaatctgaaacaggacttgcaaagttggagaggtaaattggacactcaagttaaagtctaccgtgaggagctctctgggctaaagaagactctgaatcttgaagttgagcagcttcgtgaggtatgaattcaaagatctgaaaactaccttgaatcaacagcaagatgatgtttccgctagcctgaaaagcttangcctacaagattcaaaangagcaaa

SEQ ID NO: 14881 - DNA, 458 bp, Arabidopsis thaliana
  unsure at all n locations
  Clone ID: LIB25-088-Q1-E1-D5
tttgagaaggttatctccgaaaaggcgaatcaggcggtgaacgataaattgctagtattgaagaaaactcttgatgagggagaccaaggtgctctgaaggaaatccggcagacactgttggggctagttgcacccccagaactggttgaagaactgaaaagtactatgaaaagttctgacatgccatggccgggtgatgaaggtgaacagagatgggagcaagcttgggcagccattaaaaaggtctgggcttcgaaatggaacgagagagcatacttcagcacgaggaaagtaaaactggatcatgactatctctgcatggctgttttggtccaagaagtcatcaatgcggattacgcattcgtcattcacacaactaatccatcttctggagattcatcanaagattaatcccaagttgtcaaaaggccttggggaaacccttgttggaacatatc

SEQ ID NO: 14882 - DNA, 344 bp, Arabidopsis thaliana
  unsure at all n locations
  Clone ID: LIB25-088-Q1-E1-D8
nancatcganatctcgaataatgcgaatctgaaggatctttacgaattccatanncttcagatcgaanggtttcnatcgattcgttggtcaaagangagattgtgcgtgtgattcgtgagcatgggctgttcgttttcaggagtgaacgcactttacgacgccgtcaacggtggaggtgacgtatggatcaatgagaatcnattcangatcgtgaggcaactcggcgaatgaggttccgcatgctccttttgggccangggaaatntcgccgaagccttctccgccgnatcccggtgggggccaacctaaaaaattccngggnccgggtcatctcnccgttnac

SEQ ID NO: 14883 - DNA, 530 bp, Arabidopsis thaliana
  unsure at all n locations
  Clone ID: LIB25-088-Q1-E1-E1
gngntgtgaagnatcttcnagccgnccgtnccgaactatacgggtccaggcccgcgtccgcgatcaacatcgagacaaagcatcaaagactgcattgatgcaaagaacaatataactacatttgacaacatctcttttaaaacagatagcagtaggcgaagatacatatccgaggagatagcaaaactcggtaaagggaacatcagtgctcatatttttacattcagagagctttgcgtcgctaccaagaacttcaaccccgataatcagctcggtgaaggcgggtttggaagggtttacaaagggcagatagaaaccccggaacaagttgttgcggttaagcagctagacaggaatggttaccangggaacaagagagtttcttgtggaagtcatgatgttgagtctcttacatcatcaaaaccttgtcaatttggtcggatattgcgcagaccgtgatcaaacggattcctgtccatgaaatacatgcaaaatggctcctttagangatnaatcctccaanaattggg

SEQ ID NO: 14884 - DNA, 428 bp, Arabidopsis thaliana
  Clone ID: LIB25-088-Q1-E1-E10
tttttgggtaatagggtttctaatctctgggacaaactccaatcgtttcgaatccgcaatgcccagatggtcgatcaatagaaatatcaagagtctccaattccaaaggctaaatctttgagatctttttttttataaatttccctgaaattaataaactttgaggggaaatgagcgcttcgaggttcgtaaagtgcgtgacggttggtgatggagctgtcggaaaaacttgtttgttgatttcttacacaagcaacactttccctacggattatgtgcctaccgttttcgataatttcagtgccaatgttgtggttaatggaagcactgtgaatcttggattgtgggacactgcagggcaagaggattacaatagattaagaccactgagttaccgtggagcagatgttttcattttggccttctct

SEQ ID NO: 14885 - DNA, 429 bp, Arabidopsis thaliana
  Clone ID: LIB25-088-Q1-E1-E11
cattgtttgtgtgtgattacagcgaagaagagagaatccttggagcattccatggattcgcttcgatttctccggattcttcttctatcatcttcgattttactcttatctctccgttctacagtcaccgccggtgatattgttcatcaagacaatttagctccgaagaaaccaggttgcgagaatgacttcgttttggtgaaagttcaaacgtggattgatggtgttgagaatgaggagtttgtgggggttggcgctagatttgggaagcggatagtttccaaggagaagaatgcaaaccaagactcaccttgtttttgcaaatcctcgtgattcttgtacaccgctcaagaacaagctttctggagatgttgttattgtggaacggggcaactgtcggttcacaacaaaggcgaataatgcagaacc

SEQ ID NO: 14886 - DNA, 307 bp, Arabidopsis thaliana
  unsure at all n locations
  Clone ID: LIB25-088-Q1-E1-E12
acacttcctgattgcctattgcttgtctttccttacaaagctttaaatactatcatcttgaaaagaatttgtgttacaaagttccctggatgatcaattttataactttggtgtattcttaatgatatattattgaaactgaatcaaaatttacttttaaataaaaaaaaaaaaaaaaaaaaaaaaaaaaaaaaaaaaaaaaaaaaaaaaaaaaaaaaaaaaaaaaaaaaaaaaaaaaaaaaaaaaaaaaaaaaaaaaaaaaaaaaaaaagggggggccncccaaangnntcaaanntnanttacnc

SEQ ID NO: 14887 - DNA, 468 bp, Arabidopsis thaliana
  unsure at all n locations
  Clone ID: LIB25-088-Q1-E1-E2
actctcttgtttatctctccgacgtaaccatggatagcgatactctctcaggattattggaaaacgtcgccaaaaaattccccgatcgccgagctctctccgtttctggaaaattcaatctcactcacgcgcgtcttcacgatctaatcgaacgcgccgcttcacgccttgtctccgacgctggaatcaaacccggcgatgtcgttgctctcaccttccctaacaccgtcgagtttgttataatgtttttagcggtgataagagctagagccacggcggcgccgttgaacgcagcgtacacggcggaggaatttgagttttacctctccgattcagattcaaagctattgttaacctctaaagaaggaaacgcaccggctcaaagaagcaagcttcaaagctgaaaaatctctcaagtnaacggtaagcctgcttgacnctggntccggaccnttgaanaaaccgttg

SEQ ID NO: 14888 - DNA, 427 bp, Arabidopsis thaliana
  unsure at all n locations
  Clone ID: LIB25-088-Q1-E1-A10
tcaggtgggcagtgattataacttcgtctccgtgtctgttcaagctcccattcttgtggccttcacgcttcaggaacaaagaccagtatctctctgaaagactacttctcggaaattttcgtctccatggcacccgtgagggggattcttggcttgcaaagggcagtgtccatttggaaggaaagtaacagactgactccagctttgagatcattcagcactcaagctgcatccacttccaccactccacaagcctcctccanctcctccgcctccggaaaagactcatttcggtggtctcaaggatgaagatnggatttttactaatctctatggtctgcatgacccatttctcaaaggcgcgaatgaagagaagtgattggcatangaccaaagatttggtgctcaaaggtactgattggattgt

SEQ ID NO: 14889 - DNA, 432 bp, Arabidopsis thaliana
  unsure at all n locations
  Clone ID: LIB25-088-Q1-E1-A12
ctatggtccctggctcgagaaatccaatgtggggtgaagagttcaattttcccacagatgaacttcctgctaagattaatgtaacaattcatgattgggatatcatttggaaaagtactgttcttggctcagtaactattaatgttgaacgtgaaggccaaacgggtccagtgtggcactcattagacagcccgtctgggcaggtttgccttaacattaatgcaatcaaactacccgtgaatgctcctagggctgtaactggatatgctggagccggtagaagaagggtcacattggatcagcaaggcccaacaattgtacatcaaaagccagggcctctgcagacgatatttgatctcctcccggatgangttgtcnagcacaagttattcatgtgccctggagaagtcattcctgtatcaatggccgaaa

SEQ ID NO: 14890 - DNA, 92 bp, Arabidopsis thaliana
  unsure at all n locations
  Clone ID: LIB25-088-Q1-E1-A2
ccaantagccctaaatttattaccnacatcatggattccanggagctgaaccgtgtgttccaggtgttcgacaaggaccgagacgggaanat

SEQ ID NO: 14891 - DNA, 543 bp, Arabidopsis thaliana
  unsure at all n locations
  Clone ID: LIB25-088-Q1-E1-A3
cgttagctggccggccgtnccgaacnaaanannctcgggtcaagccacgcgtcaggngtccngtggagtggacctttgaattggatgatnattatccatgtcgattctacttaggccgtcgtcctcctccttcactcctgttcttctctcaaagcttttccgattaatcctctccgggattctttaatcgacgcaagctgtcctcaaggaacaaggacaaagccgtcgcaagtcgtttcgaatggagggtcgtttcgaagtaattccacgtgtctttctaagtattagcgtcggtgaagattttccatcaagaatatgagcaagtggctaccggttccggatncaagagaagcangaagaagaagctgggcgttttgctacacccgacgtcgtttcgtggtcctcatggcattggtgatctcggagaaagaaaccttccgggtcaaccgattggcttcaatccnactggggttgctcccgtttggcaaggttctcccccttggttcctccaaaacgaaaggaaggtttcccttaagcanggaa

SEQ ID NO: 14892 - DNA, 456 bp, Arabidopsis thaliana
  Clone ID: LIB25-088-Q1-E1-A5
gttggacatggctcctttggtgttgtgtttcaggccaaatgtttagaaacaggagaaactgttgctataaagaaagttctacaagatcggaggtacaagaatcgtgagcttcaaacaatgaggctacttgaccatccaaatgttgtgtctttgaaacattgtttcttctctacaaccgaaaaagatgagctttatctcaacttggttctggaatacgttccggaaactgtgcaccgcgtcatcaaacactacaacaaacttaaccaacgaatgcctctcgtttacgtcaaactttacacttatcaagatttttaggtccttatcctacattcaccgatgtatcggcgtatgtcatcgagacatcaaacctcaaaacttgttggtaaatccacacactcatcaagtgaaactatgcgattttggaagtgcgaaaagtattgggtaaaggagaaccaa

SEQ ID NO: 14893 - DNA, 453 bp, Arabidopsis thaliana
  unsure at all n locations
  Clone ID: LIB25-088-Q1-E1-A6
gactttcttctctcttctcaaaaacccttccctcttcgtctccaaacaacaacaaacacaacaacaacaaaaatcttacaagaagatcanttttagaaaccctattaggataaaatggattacgaggcatcaagaatcgtcgaaatggtagaagatgaagaacatatagatctaccaccaggattcagatttcaccctactgatgaagaactcataactcactacctcaaaccaaaggttttcaacactttcttctctgctactgccattggtgaagttgatctcaacaagattgagccttgggacttaccaaggaaggctaagatgggagaaaaagaatggtatttcttctgtgtgagagaacgggaaatacccgancggtttaaggncaaaacggggcgaaagaancccggttattgggaagccacanggaaaagacaaagagatattcag

SEQ ID NO: 14894 - DNA, 353 bp, Arabidopsis thaliana
  unsure at all n locations
  Clone ID: LIB25-088-Q1-E1-A8
ctanaaggcgctgagctagaagagcaacttcttcagcctgttccaatccatgtgcctcaaggaaacaagcctgctcgtgctccagctcagaagcaacctactgctgaggaagatgaactcgctgccttacaagctgagatggctctctaagctgaagctagccttggaagatttcgattaagtggggagatttgtgtgtgcattatctaaaaacagaaagaaaagattttatgtatataaggatccgagtctaattgatcggaagattttttttttctttttcaatataattaacttattaaactgcaaaaaaaaacannnaanaaatcnanggnnaaaaaaaaaaagggcgg

SEQ ID NO: 14895 - DNA, 514 bp, Arabidopsis thaliana
  unsure at all n locations
  Clone ID: LIB25-088-Q1-E1-A9
nnggnnnnnnnnggaantgtttagcttgcccgngcccnnnnnaaannnaaantcgccgggccacccacgcgtccgcncacgcgtccgtagacccagagagagagagagagagagagagagagatcagtaacgagagagtcaaagagaggagatttcagtgaagatgaaggagatgcaggcaatagagacgtcgcagccgacgacggtggctccggcggtgcatagccgacaattgggagctcagttgtcgggaagtatgagtttcagcagccaaatgtcgaaggaagatgaggagatgtctagaactgcgttatctgcgtttagagcgaaagaagaagagatcgagaagaagaagatggagattagggaaagggttcaagctcagcttggtcgtgtcgaagaagagactaagcgtcttgctttgatccgtgaggaacttgaaggattagctgatcccatgaggaaagaagttgctatggttangaaagaagattgattccgtcaacaaagaatt

SEQ ID NO: 14896 - DNA, 499 bp, Arabidopsis thaliana
  unsure at all n locations
  Clone ID: LIB25-088-Q1-E1-B11
ngggngnnngaantgttagttgcncggccgtaccgaaccaanttcgcgggtccacccacgcgtccgantatgtggtgacgtagctgcgttgggatggtgggacttatttataaacttcggaatagcagagtgctttgcgtttcttgtctgtacaaagtggagcaatcagtcaattcataggtattcacatataccggaacctagctcatcttcaatggtagtaagatatctggattggaacagaggtctagtagtaaccgctgacgacgagcatcagcaaagcaacagaatatgtggtctccaagatattggtggacatgttatgaaaattccatttgtgacctttcaaatcatccttttcatgcgcttagagggaacgccagcttctgccaaaaacattccgattttagttctgtttgtacctctttttctgttacaaggagctggggtactttttgctatgtatagattggttgagaaatcagtcttattaataaat

SEQ ID NO: 14897 - DNA, 525 bp, Arabidopsis thaliana
  unsure at all n locations
  Clone ID: LIB25-088-Q1-E1-B3
gngnnngnagtgttcgttgccggccggccgaactaacggggtccancncgcgtcnggacccccnacaattnctcctcctcctncccccnaaaggaaagnganctnaacggntcctttttaataatccctnccaaattttcccggggaaatnaatcctttcccccctccttcctcctcacttgttgttgttccttaaacactctcttcctaagatctactattaactggatttcatttcacgactaaaccatcgaagtcttcggcaagatatgggatttgtttctgttctattaaacttgtttcaatcgagaagtaaaaaagaatccgattccacagatggaactatgtgctgtggatcagaccgattaaaccaagatcgtgtcatcaagatcttcgttgccaatttctttcgaggaagataacaatcttgttaccaacacagacatgaatcacttaacagtcgaaacaagangatacgtttgcgagcttgcttgagcttgcagctaacaacgaatgttgaaaggg

SEQ ID NO: 14898 - DNA, 496 bp, Arabidopsis thaliana
  unsure at all n locations
  Clone ID: LIB25-088-Q1-E1-B4
cgggaaaccttanggttttanacctngggaaaaaaccccatccggcttcatggactaaagggaaacggggaaatttccgggaaagaagaaagaaaacaaagagtcaacaacaactcctggtggtcaagaatgtnggcccgtcgcaatttccacatccaagaaagagtcgtttgctcctgcttgtgcttatcccgccgctcgcaagaggacttacaactgggagtgtgaaagcaatccgtanaaagactactgggaactggaangatgangtatcctcgcaatgtgcctcgcaagttcaagaacggtttcaagagaaggtanccaaagccaanccaaaggaacaaagggaattgcctcaacaacntaaaacttgtttttnngcatcaaaggggagaaaaaaatctgagtttgttgttcacaaanattactactcctaanttgtctggactatnactaacccttttgtgtgggcccttgcgtttttaaaaatttgggg

SEQ ID NO: 14899 - DNA, 445 bp, Arabidopsis thaliana
  unsure at all n locations
  Clone ID: LIB25-088-Q1-E1-B5
cgtactcgagtaggtctcagttacgtaaaggatcgagcttaaaagatgagtggagttgaagagaaagtttctggaacgacaaagacacctgcagatttcctcaaatccatccgtgggagacccgttgttgtcaagctcaattctggtgttgattatcgaggcactcttacttgtcttgatggatatatgaacatagcaatggagcagacggaggagtatgtaaacgggcagctcaagaacaaatatggtgacgcctttatccgtggaaacaacgttctttacatcagtacagtaaacatgactgtagcagacggagcctaggcccatcatgatcatcaacaacaacaacagtggtcatgttatggctgccatttttgttgtcctcttcnactcatattaaaagagtatagacatgtnccaaagaatggcatcctangtcctcagt

SEQ ID NO: 14900 - DNA, 451 bp, Arabidopsis thaliana
  unsure at all n locations
  Clone ID: LIB25-088-Q1-E1-B7
gcaaaaacttccggtgataaaacctccttcgtcatctctctacttcttggataaaatggcgtcaactttcactgccacatcttctattggttcaatggttgctccgaatggtcacaaatctgataagaaacttatcagcaagttgtcttcaagctcatttggaaggagacaaagtgtgtgtcctagacccagaagatccagttctgcaattgtgtgcgcagcaaaggaattacatttcaacaaagatgggactaccattaggagacttcaagctggtgtcaacaagctcgcagatcttgttggtgttacacttggacccaaaggacgaaatgttgttcttgagagcaagtatgggatcaccacgaattgttaatgatggtgtgactgttgcaagaaaagttgagttggaaganccggttgagaacattggcgccaagcntgtgaaggaagg

SEQ ID NO: 14901 - DNA, 60 bp, Arabidopsis thaliana
  unsure at all n locations
  Clone ID: LIB25-088-Q1-E1-B8
tnagccttagggaattcaggaggaggaggagttncaaaagttcactaggtaacttaanga

SEQ ID NO: 14902 - DNA, 520 bp, Arabidopsis thaliana
  unsure at all n locations
  Clone ID: LIB25-088-Q1-E1-C1
gnngnnnngaantgttagtttgccggcccggtccaaataacgggtcnagcncgcgtccgaaccccaatgcaccacagtctgatgcatccctcttatggagaccctcataggttcccgatacacggaagaggtcctcatccctacttctcgggacaatatgttggtaataataacaacggtcatgatctctttgacgcatacccgcagcaaaacgggcattttcatcactcatcttgctcttgttaccactgttatgataataaatactggcgaggttcagcaccggtggtccctgatgcaccctataatgctggtttttatcctcatgagagcgttatgggttttgctccaccgcataatcctagaacttatggttctcgtggtctacagcctcatggaagatggcctagtaacttcagtgatgctcaaatggatgctctttctcggattcgtcctcctaaagttgtattatcaggcggatntcgtcatatccgccctttggcaagtggtgcaacgttta

SEQ ID NO: 14903 - DNA, 467 bp, Arabidopsis thaliana
  unsure at all n locations
  Clone ID: LIB25-088-Q1-E1-A1
tcagatccaaaattttgcaaaatcccaagatcgtccttaccttctcccgaaatcgattgatttttcatggnngggacgacgaacaagattcagtcaattccatctccgggagattcttccctttcaacacaaagctcctccttctccgccgattttgccaacaaaacgacgtgacggtggccgtcgtgaagaaaccacaaccggggctttcttctcaatctccgtccatgaacgctttagcgttagtggttcatactccttctgtaaccggtggtggtggtaacggaaacagaaacggacgaagangaagaagaagaagcggtggtggtggangaagaagagatgattgttggagcgaagaagctacaaanggtctaatcgaagcttggggagatcgatcnccgaaccaagttaaaggaactttgaagcaacaacattgggaagaaatanctganantgtgaacaag

SEQ ID NO: 14904 - DNA, 380 bp, Arabidopsis thaliana
  unsure at all n locations
  Clone ID: LIB25-085-Q1-E1-D7
ctactcgatattcctaaatctcgagtaatatgtgccgtgctgcagctgataaatgaaattgtaaaagataataccgacttcctggaaaatgcttgtcttgttggtcttattcctttggtaatgagttttgctggttttgagagggatcgatcacgagaaattcgtaaggaagcagcctacttcttgcagcagctttgtcagtcaagccccttgacgttgcaaatgttcatatcttgccgtggaatacccgttttggtgggatttcttgaagcagactatgccaaacacagggagatggttcacttggctattgatgggatgtggcaggtatttaaanctcaaaaaatccanctccgaagaaaatgattttttgccgtatg

SEQ ID NO: 14905 - DNA, 405 bp, Arabidopsis thaliana
  unsure at all n locations
  Clone ID: LIB25-085-Q1-E1-D8
aaattaaaaagcatgtggcatacgaatacgcaaagaaaggagcatatttggctcttgttgctcgaagaagggatcgtctagagattgtaccagaaacatcacgtcaattaggatctggtaatgtcatcatcatacctggtgatgtttctaatgttgaggactgcaagaagttcatcnatgagacgattcgtcatttcggaaaactagaccacctgatcaataatgctggtgtatttcaaactgttcttttcgaagatttcacacaaattcaagacgcaaatcctataatggacatcaacttttggggtacaacatacatcacctattttgcaantcctcatcttcnaacagagtaaaggaanaaatcgtcgccgattacatcggggttcagcacnatntaccttt

SEQ ID NO: 14906 - DNA, 394 bp, Arabidopsis thaliana
  unsure at all n locations
  Clone ID: LIB25-085-Q1-E1-E12
gcccacgcgtccgtgcacgaaatgctcattgatcggtccaatttgctatcagaatcatttgagtacatagtgggcgcaagccctgaagcacttcatggtggactgttcatggaattcaagaatgaggaagctacaggtcctggtgttctacgagaatggttctatctggtatgtcaggagatattcaatccaaanaataccctcttccttcgatctgctgatgattttagaagattctctccaaacccancatccaaggtggatccattgcatcctgacttcttcgagttcacgggtcgtgtgattgccttacctttgatgcacaaaagttcaagtgggtgtgctgttcgatcgtgtttttcttcttacaattggcngggactngaaaatatct

SEQ ID NO: 14907 - DNA, 391 bp, Arabidopsis thaliana
  unsure at all n locations
  Clone ID: LIB25-085-Q1-E1-E2
gcagctgatgccatattaaaaaagtttcctgatcatggagagactttatcgatgaaaggactgactctaaactgtatggaccgcaaaactgaagcatatgagcttgttcgacttggagtgaagaatgatatcaaaagccatgtttgctggcatgtgcttggtcttttgtaccggtcagacagagagtatagagaagcaatcaaatgctaccgaaatgctcttagaatagatcctgataaccttgaaatactcagagacctctcacttctgcaggcacaaatgcgggacttatccggttttgtggagaccangcagcaagcttttgacattgaagcctaatcaccgaatgaactgggattggctttgcagtctctcagcatttaaacgcaaa

SEQ ID NO: 14908 - DNA, 409 bp, Arabidopsis thaliana
  unsure at all n locations
  Clone ID: LIB25-085-Q1-E1-E4
tcactctctctcattttcgactttagaaatggcgaccaacgcagatccagctccgacgaagaaaccaaggaacagtagaaaggcgttgaagcagaagaatgagctcgtggagacgccaccatcgcctgtctccgtcaaggggaagtcagcgaagtctttcgagcaagatctgatggagatgcagacaatgttggagaagatgaagatcgagaaggataagacggaggagttacttaaggagaaggatgagattctgagaaagaaggaggaggagctagagaccagagacgctgagcaggagaagctcaagggtggagctgaagaagcttcagaagatgaanggaattcanacctaacatgacttttgcttgccgggcagtcatcctctcacacaggctgaacaaanaag

SEQ ID NO: 14909 - DNA, 396 bp, Arabidopsis thaliana
  Clone ID: LIB25-085-Q1-E1-E7
tttcgagtcatggagagaagcgccgttgcctcaggttttcatagaaattacatcctctgtgcttcacgcgccgccacttccacgacgcgcctccactctttgtcctccctcagaaactttccctcttcctctctcaggattcgtcactgtccttctcccatctcttccaatttcatcgttagtgaagtttcccgaaaccgacgatgcgacgccgtttcttccagcaccaccgatgtgactgaattagccgaaattgattgggacaagattgattttgggcttaaaccaacggattacatgtacgccatgaaatgtagccgtgatggtgaattctctcaaggtcaattgcaaccttttggtaacattgacattaacccagcaagctgggtgttctca

SEQ ID NO: 14910 - DNA, 309 bp, Arabidopsis thaliana
  unsure at all n locations
  Clone ID: LIB25-085-Q1-E1-F10
ggaaagagagctatggaaaacagttattgcattctgttcaggacagtcaatttgttcattcgattaaagacagtggtgcgttacctgcggttttggggagcttgttcgttgtgtctgcaactgttggtacttctctgttcttcaaaggagctaataattgaaacagaagaaacaaaattttaaaaaattgttgggatttgttgttgttcttgaaagattgaaaangaactatgtgatactttgtactattcttttctaaaatttantgtgtgttttgttnttgaaaaaaanaaaaaaaaaaaagggcgg

SEQ ID NO: 14911 - DNA, 393 bp, Arabidopsis thaliana
  Clone ID: LIB25-085-Q1-E1-F11
gcagagacactgtgccgtcgcccgtcgccgccgccgccacactatcatctctctcaggtttttgattttccacggcaatggagtcttcgattctcaaaagccctaatctctcttcaccatcgttcggtgtaccttcaattcccgccttatcctcctcctccacctcaccattttcatctcttcatctccgatcacagaaccaccgtaccatctctcttaccaccgccggaaaattccgtgtctcgtattctctctccgcttcttcacctctaccacctcatgctcctcgccgtcgtcccaattacatccctaaccgtatatccgatcccaattacgtcagaatcttcgatacaactctccgagacggtgaacagtctcccggagctacactaa

SEQ ID NO: 14912 - DNA, 240 bp, Arabidopsis thaliana
  unsure at all n locations
  Clone ID: LIB25-085-Q1-E1-F2
gcgaggattaggattaccggaatcacagggtatgaagagtatccagcctcgcccaatgttgcagttggagaagtaaatctttgacacaaaatgtttcttgaatgttaaaatttttctgatcttctctatgtaattttgtaaggaccctggtcatttcatttctgctgagattccttttattaataaaaaaaaaanaannagaatanaaannaanaaanangaaaaaaaaaaaaagggcgg

SEQ ID NO: 14913 - DNA, 398 bp, Arabidopsis thaliana
  Clone ID: LIB25-085-Q1-E1-F6
tctcaagctttttgtttactattttactcttttcactgaatatttctcctcttgtttcagctcatggctccaaccatgaagactttcttaagtgtctttcttaccgaatgaacgacaacaccgtcgaacccaaagtcatacacacttccaaagactcttcctttttttccatattggattcttcgatacaaaatccaagattctcggtttccgaaacacctaaaccggtctcaatcatcactcccgttaaagccagtgacgttcaaactgtgatcagatgcgcacagctgcatggaattcatgtaaggactcggagcgccggtcactgctacgaaggtctctcttacattgcgtacaacaaaccattcgctgtcatcgatttaaggaatcttcggtca

SEQ ID NO: 14914 - DNA, 376 bp, Arabidopsis thaliana
  unsure at all n locations
  Clone ID: LIB25-085-Q1-E1-F7
gcatggctcttgtctgtgctcgctgtctttaatgctatccaatatatatatatgttgttggcaagaagtatataaggctttacccatccttcctgcaagacgaactttacccttactctgagacaatgctctgcaactctagtcaggttgatctagacaatatcgacgaaaccgagttcccaaaggccatggagttggagtttatggattgtattctanaagaaggtgaaatgttgtacatccctcccaaatggtggcactatgtcaggtccttaacaatgagtctctcggttagcttctggtggagcaatgaagcagaatcttctagctcgtagcgaatggatttaagttttaatccnctgtttcaaggttctag

SEQ ID NO: 14915 - DNA, 369 bp, Arabidopsis thaliana
  unsure at all n locations
  Clone ID: LIB25-085-Q1-E1-F9
aagaagaagagttgtcttgagagattgatagagatggacaacaatggagttaaacccgctgtttccgccatggaagcctttgaaaagcttgagaaagtaggtgaagggacttatgggaaagtttacagagcaagagagaaagctactgggatgatcgttgctttgaagaagacgcgtctccatgaggatgaagaangtgttcctcccactactcttcgcgagatctctatcttgcgtatgctcgctcgtgatcctcacatcgttaggttgatggatgttaagcaangaataaacacagaaggaaaaactgtactttaccttgttttcgaagtatgttgatactgatctcangaaattcatcagaagctt

SEQ ID NO: 14916 - DNA, 409 bp, Arabidopsis thaliana
  unsure at all n locations
  Clone ID: LIB25-085-Q1-E1-G1
gctccccttttcttatccggaaaccaaaaacttccggtgataaaacctccttcgtcatctctctacttcttggataaaatggcgtcaactttcactgccacatcttctattggttcaatggttgctccgaatggtcacaaatctgataagaaacttatcagcaagttgtcttcaagctcatttggaaggagacaaagtgtgtgtcctagacccagaagatccagttctgcaattgtgtgcgcagcaaaggaattacatttcaacaaagatgggactaccattaggagacttcaagctggtgtcaacaagctcgcagatcttgttggtgttacacttggacccaanaggacgaaatgttgttctgagagcnagtatggatnaccacgaattgttaatgaatgggggtgag

SEQ ID NO: 14917 - DNA, 96 bp, Arabidopsis thaliana
  unsure at all n locations
  Clone ID: LIB25-085-Q1-E1-G10
aaaatcnttcgccttcttcnttttaccacatagatcttcttgatcnacaatggattctgtttctctttctgaggttactgtcattantaggaacaa

SEQ ID NO: 14918 - DNA, 392 bp, Arabidopsis thaliana
  unsure at all n locations
  Clone ID: LIB25-085-Q1-E1-G12
gcaaacaagcatcatcatcacatccacttccttcttcttcctttctctgtctgtctcttaacccaaatgtggactctttgagccgttattagatctctgccgcttcaataatggggagcttatcttctgaggaagacgacgaagtctcttccgagagatgcggnagttacagtcccagcgccgacattagcgagtccgagagttccagcaacttctcctgccaccgcttcgacggcgagggtgcctctagctccatcccttcttcccctcgagttgtcgctggtagaggattttacttcccggccccagtcatgcttccggtgatcggcggcaaagatgtggtctgggatgacaanacaaccaagacaaacgattttatcngaaaatttggg

SEQ ID NO: 14919 - DNA, 405 bp, Arabidopsis thaliana
  unsure at all n locations
  Clone ID: LIB25-085-Q1-E1-D5
gctcacctccatggcctctcctccttctcctcctcctctcttctttcacctccggcgaatcctctcngtcngcagaaaaaaacaaattgcacaccggtggtctcagtagacagagttttcctaaaggattcgtgtttggaaccgccacgtcagcttatcaagtcgaaggcgagactcatcaagacggtcgtggcccaagcatttgggatgccttcgtcaagattcctgggaagatcgccaagaatgccacggctgagataacagtggaccagtatcaccgttacaaggaagatgtggatttgatgaagaaactgaacttcgatgcttacaagattttccatttcatggtccaaggatattccctgaagggaaagtgggtaaagtcaactgggaaaggagttgctt

SEQ ID NO: 14920 - DNA, 391 bp, Arabidopsis thaliana
  unsure at all n locations
  Clone ID: LIB25-085-Q1-E1-G3
ggccgtaggcaaaactgaggatccgacgcagccgaagctcaagcctttacattgggataagatgaaccctgatgcaagccgttctatggtgtggcacaagattgatggtggctccttcaactttgatggtgatctcatggaggctttgtttggatacgttgctcgaaaaccaagtgaatcaaacagtgtaccgcagaatcagacagtctcaaacagtgtaccgcataatcagacttatatccttgatcctcggaaatctcaagaacanagcanttgtgcttaaatctttggggatgactaaagaagagatcattgacttgttaacagaaggccatgatgctgaagtctgatacccttgagaagcttgcagggaatagctccaacgcccagg

SEQ ID NO: 14921 - DNA, 395 bp, Arabidopsis thaliana
  Clone ID: LIB25-085-Q1-E1-G5
gcggcccctgaaaatagtaataagaggtatgtgatacatataaaagccggagtttacagagagaatgtggaggttgctaagaagaaaaagaatataatgtttatgggagatggtcggacgagaactattatcaccggaagtcgaaacgttgtagacggtagcaccactttccactccgccaccgttgctgctgtcggcgagagattcttagctcgtgacatcactttccaaaacacggcgggtccgtcgaagcaccaagcggtggctctccgtgtgggttctgatttctccgccttctacaattgcgacatgttagcttatcaagacactctatacgtccactctaaccgtcaattcttcgtcaaatgtctcatcgccgggaaccgttgacttca

SEQ ID NO: 14922 - DNA, 124 bp, Arabidopsis thaliana
  unsure at all n locations
  Clone ID: LIB25-085-Q1-E1-B11
atcgagctcttcncanaagtcaatcgagatcaactcacgggacgattacttatgtttgcgatgctcangtttctttatccaattttatgttancggacgaaggtcctgttganaaacttncatg

SEQ ID NO: 14923 - DNA, 394 bp, Arabidopsis thaliana
  unsure at all n locations
  Clone ID: LIB25-085-Q1-E1-B2
tacaatgaagatggagaagagatgaagaggttcatcaagattctttatgggactcaaagcgttttggggaagatctttttctctgattttttcccatattgtggctttcttgatgatttatcaggcctcacagcttanatgaaagagtgtttcgaaagacaagacacttatattcaagaggttgtcaatgagacgcttgatcctaagagagtcaagcccgaaaccgagagcatgattgatctcttgatggggatctacaaagaacaanctttcgcttctgagtttactgtaagataatgtcaaagccgtcatcttggatattgtagtggcgggaaacagatactgcagctgccggcngttgtnttgggggatgacgttnccnaatgaaagtacc

SEQ ID NO: 14924 - DNA, 393 bp, Arabidopsis thaliana
  unsure at all n locations
  Clone ID: LIB25-085-Q1-E1-B3
ctcaatctatctgttcgtcgtcacaagatcaatcttcttctcctcgctctttgatcacaccangcanatcggcgacgaantttcaccgccgcagggggaggagtgtatttaacatgctggttcagagggaaatgtcaccaaaggctaagtttgtgccaaggaaacgatggggtaagagtagatggtatactgattcttcatgcggnaccaacaacgagtctatgananagacgggacaaagtcttacctcatgggttgaggcagagtcattgcagcatttatctgcaaaatattgtcctcttgggagctcctcnanggtcanctattgctgcggcttttaagtactgatgggaanaactccttgcntctacacatgggtgattatactgtgag

SEQ ID NO: 14925 - DNA, 385 bp, Arabidopsis thaliana
  unsure at all n locations
  Clone ID: LIB25-085-Q1-E1-B5
agagaagatgctaagatctcaanacagagtataacaacaccttgacctcgttgaagaagcctttgagattgtctcggggatctgaaaaatgtaatccttnaagtccctacttcnncnccttcctcctccantcctccctccaatanctcccaagaaaatcccgtctcatctaccaaggtcatgccgggatagttcgatgttccgtcnagggaactactgtaaccgagaaaaaantctcggnaaccaagcgaagccacttcttctgacagctgttaaaggtgaagttgttgatagacctccggtttggcttangaggcaagctggggangtacntgaagagttatcaaactctctggtgagaaagtanccnttctttcagagaaag

SEQ ID NO: 14926 - DNA, 403 bp, Arabidopsis thaliana
  unsure at all n locations
  Clone ID: LIB25-085-Q1-E1-B6
tgatcttcttgcttctgttcttaaggctgtagtggaaagaacatctttggatccaagtgaagttggtgatatcgttgttggtaccgtgatagcgcctggttctcagagagcaatggagtgtagagttgcagcttattttgctggttttcctgactccgtgccagttagaactgtcaatagacaatgctcatcaggactacaagcagttgctgatgttgctgcntccattagagctggttattacgacattggtattggtgctggagtggaatcaatgtcaactgatcatattcctggaggcnggctttcatggggtctaatccaagagcancaggatttcncaaaagccccgtgattgnttgcttccaatgggaattacntctgnaaaacgttgcaggaaang

SEQ ID NO: 14927 - DNA, 402 bp, Arabidopsis thaliana
  unsure at all n locations
  Clone ID: LIB25-085-Q1-E1-B8
cgtaacgcattttcgttgattcactttccagctttatctcaaactctctctctgtcgtctcgatcgatctcccaaatctcaaattctgaattgattttttttgtttataaacaaagcaaacaaaacacataattttggttcggtcttcttcaattttcaccgacacaaacccgtcttttcctcttctctctcatttctatcaatttttctctacaattccccagtcgtcgaagaagctacagcttgcaatttgctcgtgttctcttccatcattcctttgttaagagcctcttcatggcgttctacggttgattccaatttcttctcatccgtcccagctcttcacangtaanctcgggacttttgtcgcctgatcagatnggaactggncgaangatctta

SEQ ID NO: 14928 - DNA, 413 bp, Arabidopsis thaliana
  unsure at all n locations
  Clone ID: LIB25-085-Q1-E1-C1
agtgtgataatggtcatctggcttgtactttgtgctgcaccaaagtgaggaacagatgcccgtcgtgtacattaccgataggttatgttcgttgcagagctatggagaaggttatagaagcatctagagtctcgtgtctaaatgccaaatacgggtgcaaggagagtacctcctatggaaaccgttttagtcatgancaggtatgtgttttcaccccttgttcttgccccatacttgactgccactacactgggtattacaaggatctcaacaatcacgtccgttgctgaacacaaagatgatctgatctccgttcgtgtggaatactcgtttaaccattagcttggacctcaataannaangaccacaantcttcaaggaagaaaaaccatgggcaatgttgattgttagtc

SEQ ID NO: 14929 - DNA, 391 bp, Arabidopsis thaliana
  unsure at all n locations
  Clone ID: LIB25-085-Q1-E1-C11
gattcggtagctctcctctccgaatctaaaagttttccgaagaacttaaaacaaatatgactgatacgctcgagctcgactgacganttcggcgtagtgttcacttttcttcttctttcttggaaanccacactcgtctgagtcgtctctgttactgacacccattaaagccctagcctttggtttcttttctccaaatcttgcaagatctcttgagataattcacatggaggaaccgagagaggaaagtgaggctgttcgtgattgcagtgagcccatggaggaagctggtaagggatcaggtttatcttctaaaactgaaaccctagttgatgaggatgccaatacngacttaagcgtttctgataagaacccgaatgatggangttta

SEQ ID NO: 14930 - DNA, 404 bp, Arabidopsis thaliana
  unsure at all n locations
  Clone ID: LIB25-085-Q1-E1-C2
ttacgcggttacagataaaggatccggtcgaaccgtacttaaccggggttatcttgactattatcttgaagattactctggttggttgaaagatcgagtttctgatgatagctattggggtaaaattagttcttgtcttagagattctggtgcttgtagaaagattggaagaaattttaatggtgtacctgaaactgctgatatgttcttccttagaagacttagccctgttgagtccggttgttgcaagccaccaacagattgcggtttttcatatgtgaatgagaccggatgggacacgaagagganggatgataggaccgaaccaaggactgtatggtgtggagcaacgaccagagcatgctcctgttatcagtgtagntcttgttaaagcctggtgttct

SEQ ID NO: 14931 - DNA, 339 bp, Arabidopsis thaliana
  unsure at all n locations
  Clone ID: LIB25-085-Q1-E1-C6
ctctgaggaagacatgatttcgtctctctcagcttcttcttcattggtttcttctttcgtcgccgttaaagcgactccggtcaccggacctctgattccccgtcgcgatcttctttctattcgtatcagagctagctcgaatcagaatagttctggttattgttttccagaaaagtttaaatcttttgccaaatcagcgattctcatcggtgctgctgtttcaatgaccggaaagttttcaactttaccggttaaaagccgagtctcccgggttacgactatcgaaaaanacctacgaaggaagtgaaagaagagaaactgtctgangatnacgccatt

SEQ ID NO: 14932 - DNA, 401 bp, Arabidopsis thaliana
  unsure at all n locations
  Clone ID: LIB25-085-Q1-E1-C8
ccttctcttcgttactggatacttcactctaaacgagagatcgagaaggaaattcacccaaacttttttccttgccccgcanganaagggtttctttgttctgaatgacatcctcanatttgttaatgatgatgctaaggataatgttccagagaccatagatggggaagttgtttctgggataaactctacaacacccactattatcaatggcatgaagggttcggagcaagctgcatgtgtttcagtgaatcctgtttgtaaggaaagtgtccaaacccttggataatgagaatgctaaggataatgttctggtacctgagattgctaatgaagttncaangactgaagataacttgcaaaanaagttgcagatgattcacagaaaaantatgaccctg

SEQ ID NO: 14933 - DNA, 388 bp, Arabidopsis thaliana
  unsure at all n locations
  Clone ID: LIB25-085-Q1-E1-C9
ccaaggtagcggaaccagccaaaaaggcgacaaagaaaaacagggtttgggatgatgcggctcccaaacaatcgaaattggacttcacggattccatcgatgaaaatgggaacaatgatcatgtagatattgtggctgctgaccaaggagaaagtatgatggacaaggaagaggttttcagcagtgatagtgaaagtgaagatgatgacgaaccaggaagtgatgagaagcctgctcaggctaagaaaaagggatggttttcttctgttttccaagagtattactgggaaagcgaatcttgaaaggacagaccttggaccggcgttgaaagctctgaaggaacggctcatgaccaagaatgtggcagaanagattgctganaagcttt

SEQ ID NO: 14934 - DNA, 431 bp, Arabidopsis thaliana
  unsure at all n locations
  Clone ID: LIB25-085-Q1-E1-D1
ccccacaaagcttggaaagagccacaaataggtcaaagaatgggtgaagacaagaagacggcaagggagacggtggaggaggaaccacttagcccatgttcacggctgttcaattcgccggattttaactgtgcaataatccgttacaatgggatctaaaagtttaaggnngacacaccaagccatcaaccaacgggccttggaacacaccctcgtaaaccaaccctccgcttctcctaagcattttaaganaanaacaatnggaaaaanccncnttgggttccgncaaaagttnaagttanannncaatgtgnaatgttccctgaatgntggttcccgacattgnaaatccggnattagtatccttgaagactatatcccccaagnttaacgaccaantccctaatgggttttgtcctaaaccaattatg

SEQ ID NO: 14935 - DNA, 390 bp, Arabidopsis thaliana
  Clone ID: LIB25-085-Q1-E1-D11
acgcagtcaaaatagagagagagagagagagagagagagagagagagagtcacacatgtaataaaccttggtcgacaatctcgccctttccatgtgatttctccacttcctctctctctctactgcaacttcctcctcctgcttcaacttcattcgggtaatgatgaactagcgtagagatttggatcttcttcttcgtcctctcaccaactcttcaccggttagatctctttttcacgctaacgaatgaggagcgttgccgccgccgccgctgctgctgctgctgcttctaagccttctaatcctctcgtcgcctttgagcacaagagggatgcatacggatttcctgtcagacctcaacatgtgcagagatacaagagaatatgctgg

SEQ ID NO: 14936 - DNA, 398 bp, Arabidopsis thaliana
  unsure at all n locations
  Clone ID: LIB25-085-Q1-E1-D12
agccattatcactaccaatccaaaagagcttttattaatacaccttactcgtgaccggattcgcagagttcacgagcttccgagtcaaaaacactctanaacaaaaccatgactttgttccatagactcgatctcatcgatccgtacacgtgtacaccactcatcgtccgtgaaacctccattgttgaaccttcatcantgttcctagggtttccttccttcatcgacgaagacattgaagatctcttcgagttttcatcancnaatcctctcgatctattcgaaaccgtgacgnggtctgggttaagattnaggagatctcccgttcntcctggcaagtacaangtgatttcgtncggnnaattaggnncggggntagcnaagttgaacggtgatcg

SEQ ID NO: 14937 - DNA, 409 bp, Arabidopsis thaliana
  unsure at all n locations
  Clone ID: LIB25-085-Q1-E1-D3
gcttgaggaaacacagtaaaaacctaaaaagagaatgaaactcgcaggtctgaaatcgatcgagaacgctcacgaagattccgtttgggcagcgacgtgggttccggcgacggaagatcgaccggcgttgcttctgactggatctcttgacgagacggtgaagttatggcgaccggacgagctggatcttgtgcggactaatactggacactctttgggagtancagctttggctgcgcatccttctgggattattgcagcatcttcttcgattgataactttgtccgtgtgtntgatgttgatactaatgctacgattgctgttttggaagctcctccttctgaagnttggggaatgcaattttgaacctaagggtaacnttcnttgctgttgcaggtggaannaatt

SEQ ID NO: 14938 - DNA, 381 bp, Arabidopsis thaliana
  unsure at all n locations
  Clone ID: LIB25-085-Q1-E1-A9
acttggcccatcaacgtcttgccgtcatcgatcctgcttccggtgatcaacctcttttcaacgaggacaagaccattgttgtcacggtgaacggagagatttataaccatgaggagctgagaaaacgtctgaagaatcacaagttccgtactggtagtgattgtgaantcattgctcacttgtacgaggagtatggtgtggattttgttgatatgttggatggaatattctcctttgtgttgctcgacacacganataactctttcatggtggctcgtgatgcgattggtgtcacttcgctctacattggatggggactagacggctctgtgtggntatcttcaggagatgaaaggcctaanacnatnactgtgntgcatt

SEQ ID NO: 14939 - DNA, 94 bp, Arabidopsis thaliana
  unsure at all n locations
  Clone ID: LIB25-084-Q1-E1-F2
agcactggcagaattangtcaagacatggttcaaccagncctgccaggaaaaccagaattaagaattgcgaggcaaaagaangctgtnaacatc

SEQ ID NO: 14940 - DNA, 229 bp, Arabidopsis thaliana
  Clone ID: LIB25-084-Q1-E1-F3
caatttctcgtttttttttgtttatcatcaaaagttttaatctaaattacgtatcaaattccgagcaagatgactattcttgttgaacattttgttcctgattcaagagtggatgaaaagaaagtgatagaggagagggataatgaattggtgttggatggaggttttgtggttccaaaatcaaaggaaactgatgcattcgatgctcctgatatgaatttcttgggca

SEQ ID NO: 14941 - DNA, 246 bp, Arabidopsis thaliana
  unsure at all n locations
  Clone ID: LIB25-084-Q1-E1-F6
ttcggtgacaatgggaagctcgtcgaaggaagagacggcgagtgacggagatacggcgagcggtggcgcctcaccgtccaacgacggcagactcttctcggagggcgagcgtgttctcgcttaccatggtcctcgcgtctacggagccaaggttcaaaaggtcgagcttcggaaaaaggagtgggaatactttgtgcacnancttggttggaanaaaaattggnatgaangggtnantgcggnnaa

SEQ ID NO: 14942 - DNA, 240 bp, Arabidopsis thaliana
  Clone ID: LIB25-084-Q1-E1-F7
tgaagctctgaggaagacatgatttcgtctctctcagcttcttcttcattggtttcttctttcgtcgccgttaaagcgactccggtcaccggacctctgattccccgtcgcgatcttctttctattcgtatcagagctagctcgaatcagaatagttctggttattgttttccagaaaagtttaaatcttttgccaaatcagcgattctcatcggtgctgctgtttcaatgaccggaaag

SEQ ID NO: 14943 - DNA, 242 bp, Arabidopsis thaliana
  Clone ID: LIB25-084-Q1-E1-F8
gggccagcagcatgtcttgtatatggaaattgcatggagatattcagcttacatacgcaagatgctttccatggtctggtggaactgaaaactcagaattcactttgaagacatttagtgattcaattctttcttggagaagcatttgttactcagctgcattgtcagccaaagcttcttaccagcgagctctacacttagccccttggcaagctaatgtttataccgacatagccataact

SEQ ID NO: 14944 - DNA, 146 bp, Arabidopsis thaliana
  unsure at all n locations
  Clone ID: LIB25-084-Q1-E1-F9
acctgnaaanngtcccatcgtgcttcacgaccaaactcaagcccttctcgatcgtgaaacaggccttcctaagtgagcattctctctgcttcanactaattattatgatnagcatctcctttaactgcaagtttaagataccanat

SEQ ID NO: 14945 - DNA, 280 bp, Arabidopsis thaliana
  unsure at all n locations
  Clone ID: LIB25-084-Q1-E1-G11
aggtgctatgggttgtagtgattcacaaccatccacaaagctaccgttgcctacttttggactcgcatcttataagctgaaagtatctgtgtggaaccaaaatagaattcaagagtcccaaaagatgacttctttgctacaagctgcagataaatggctcaagcgtctgcaagttgatcatccagactacagattcttcacctctaacagtccacaaatgaggtgaaaatgaaagatacattcttgaccatggatttggctcnggtctgatcaaaagacc

SEQ ID NO: 14946 - DNA, 279 bp, Arabidopsis thaliana
  Clone ID: LIB25-084-Q1-E1-G12
cacataaccacttctgtctctgcgaatctccataagactctttgagaagctttcctctgtttctccgccgttatgggtagctccggcgacgttaactggaaacttgcggaccaccccaagcttcccaaaggcaaaactatcggtttgattgttctcgatggatggggtgaatctgatcccgatcaatacaattgcatccataaagctccaactcctgccatggattcccttaaagacgggaagcccgacacatggaggttgatcaaagctcatggtacc

SEQ ID NO: 14947 - DNA, 229 bp, Arabidopsis thaliana
  Clone ID: LIB25-084-Q1-E1-G3
tcacaacatgcctccaaagccactcgctatgtacagggatgtgatctgctcgaaggcgagtggggcgaagttggaagcatactcttgtggaaattaactgttgatggagagccaaaagtgtcaaaggatatgattgaggcgattgatatgaagatgaatatgatccagtggagggtgttagagggacctctgaaggaagagtacaatattttctcgaaaacgatgaaag

SEQ ID NO: 14948 - DNA, 254 bp, Arabidopsis thaliana
  Clone ID: LIB25-084-Q1-E1-G4
caatttctaatagcttcacaatggcatcgtctggatcagccgacgaagatttccagtctcgcgttgcgaagatcttcggatctctacccttctctcgtccttcgtcttccaagttttccacgtcgtcttctgctccggcgtcgcggcagcaatcggggtcggtgtggactctctccgacacagaggtagagaagcgggagtggaagcgagattcgtacgatagagacgagattccttgtgcttcatcctttgaa

SEQ ID NO: 14949 - DNA, 250 bp, Arabidopsis thaliana
  unsure at all n locations
  Clone ID: LIB25-084-Q1-E1-H1
gcatcgccaanancttgtcttttgcttcttatttggtctcagctctgatcttttgattcaacggctcccggagacgacggaagcantgnagttcttcggtggatctgagattagtccgtcgccgcnagttccgacggagagtggaaacaacgcgcacatgatgtacgttttcaatcgtaacggtatgtcttctctacanagaatggnatcgggctcntcatacacntaatcctcagcaagatcanaagcc

SEQ ID NO: 14950 - DNA, 284 bp, Arabidopsis thaliana
  unsure at all n locations
  Clone ID: LIB25-084-Q1-E1-H10
ccgcttctcgcttgccttttaattctctccagctgatctgatctccgttaccgatggagtctactgctaacgcactcgtcgtcaaggtgagctatggaggtgtgcntaggcgtttcaaggtgcctgttaaagctaatggncagcttgatcttganatggatggtcttaangaaaagatcgctgctctctttaanntctctgnggangcngaattgagtctgacttactcanatgaggatggggatgtggttgcccttgttgatgacaacgatctctttgatgtt

SEQ ID NO: 14951 - DNA, 250 bp, Arabidopsis thaliana
  unsure at all n locations
  Clone ID: LIB25-084-Q1-E1-H11
caagagatgatcncaatgatgaacaangtcaaagacncggtatgccctgttctgtttaccggttanaattgtttagtcaatttgtanatatgatttggattttgaccggttagaattgtttggtaaattcaattttggcgtccacgattanttgaagaaagatttgctcaacaatgtgtaaaccancatgaaccaggaaatantcntctggttatgtacatttttagatnagttttggnccttttggata

SEQ ID NO: 14952 - DNA, 246 bp, Arabidopsis thaliana
  Clone ID: LIB25-084-Q1-E1-H2
aacaactttaccaaatctgcaagtgttgaaattattttattctcttttttgtgttgatgacataattatggaggaactacagcgcttgaagcacttgaagattttaacagcaaccatagaggatgccatgattttggaaagggtacaaggagttgaccgattggcgagtagtattcgaggtttatgtctaagaaacatgtcagcacctcgtgtaatattaaactcggtagctctgggaggtcttcc

SEQ ID NO: 14953 - DNA, 233 bp, Arabidopsis thaliana
  Clone ID: LIB25-084-Q1-E1-H3
agacagagaactttctcgatacgaacgccaaagagaagaagacgaagacgaagatgatgggtgtgttgaagtcggcgattggggatatgttgatgaccttctcttgggttgtcctctccgctacctttggaattcagacggcggcgattatctccgccggtgattttcaggcaatcacttgggctccgttggtgattttgacgtcgttgattttcgtctacgtctcgatcttc

SEQ ID NO: 14954 - DNA, 222 bp, Arabidopsis thaliana
  Clone ID: LIB25-084-Q1-E1-H7
gcagctcacatttctctccaccgtctcctcgtcttctctcaccaaagatcagagcaaaagtggaattggacaaggtcatttttactactttctctgggttgggggttctatgatacttgtactggattgataatgagtatcaacagagatgaggctcttagagccaaagatcttgcggagggtttgatgaaaaagaccgattttactgctgctcgtaagctt

SEQ ID NO: 14955 - DNA, 251 bp, Arabidopsis thaliana
  Clone ID: LIB25-084-Q1-E1-H8
tctctctctctctgcaatgtcacaacctctcaccaccagacccaccgttaccggaatatctataatccctttccgacaaccgccgcctctctgttctttcctcttcgtcatcgttcttttcgtcgccactttctacactctccatcatccagacgccgttactcctcctcttctattttctcgaaatgcctataatgcccttcgtctccgccgcctcttcctctcctctgcttctaacgccaccatctcct

SEQ ID NO: 14956 - DNA, 426 bp, Arabidopsis thaliana
  unsure at all n locations
  Clone ID: LIB25-085-Q1-E1-A1
attccgtcgaacacttgagctgcgttttaaagttctccaaatggcgccttttgcctactaaaaaacctttaccttcttcacagagatctaacctctccttttcccaatgttcggcactccgtcttcatcgccgtcattcggcactccgtcatccacacccgcctttggcacatcttctccggcgttcggtacaccgtcagctacgcctgcgttcggtacgccatcgaatccttccttctcctccggcggatttggctcttcactcttctcgtctcccttctcatctcaacaggcacagcaaanagcaacaanaacaacagcangcagcaagccgaagttcaactggnttcnagcaacaagcaatccttcgaaantttgggttttcangtncaccaantcaagcnagnncgnctcancangnagnaa

SEQ ID NO: 14957 - DNA, 386 bp, Arabidopsis thaliana
  Clone ID: LIB25-085-Q1-E1-A10
gaaagatcgattctgtctttatacagacattatctcccactcattctctgtgtcgcttgaagcagcaagagagagagagagactgacagagacagagttaaatgcgaatttatgggtttgatctatacagatctgtgtaccctaatttatgtctctggcgtaacggtcatatttaaccccatttcaatttgagctcttcatcgctgcgtttctgtgatctcggagctcttccaagtggttcgagtagtgtcaaaagagaaggtgagagatgctgacgtgtatagcttgcacgaagcagcttaacaccaacaatggcggatctactccgagaagaagatgaagaacacgggagttattggtacccctaggactaagcaagcgattag

SEQ ID NO: 14958 - DNA, 386 bp, Arabidopsis thaliana
  Clone ID: LIB25-085-Q1-E1-A11
cttttctcgttcggcggtcgttttccaatcatcaactgccgcgtgtcagctcctgcttcggctcccttcgtcgcttccgttcctctcccgccgtcaacctcctccgactcactagcttgctctctccaatgtcctcatttccaatcgtgctcaggatgtacgcaagagttcaatctccatcgtccagctgttgtcgacgaagcttcagacttcttcaagcgttacggcgtcgatgatttcactttcgacagttgtagactgtggggatggagatgccgagcaaaattggctgttcgtggctcttcagataacgcattaattggattgtaccaagaaggaactcacactgttgttgatattcctgaatgcaaatctcatcatcctaa

SEQ ID NO: 14959 - DNA, 261 bp, Arabidopsis thaliana
  Clone ID: LIB25-084-Q1-E1-F12
atttttgctttctcaatttattattttttgtgtctctctctcgcccgatttggagtttttagggtttgatttttgtaatgtgagaaaggtttcgttatgttaaagaggcactctatcgccattctctccagaatcgcaagcttcgattcccataaaacccttatgtcttcctttaccgatcccctttttctgcgatcgctttactctcctcgatccatcgccatcagatttcatggagattttgctcatagactctacaaa

SEQ ID NO: 14960 - DNA, 392 bp, Arabidopsis thaliana
  unsure at all n locations
  Clone ID: LIB25-085-Q1-E1-A3
ttttctctttgcctttgttatttgctgcttttgctgcagctacagtanaatcttgtgtttttgtggtggggaggtgagatttcttatgacggggaagcgatcaaagactaattgcagatctgcttctcacaagctcttcaaggataaggctaagaaccgtgttgatgatttgcaaggcatgcttttggatcttcagtttgcgaggaaagagagtaggcctactgatgttactcttcttgaggagcaagtgaatcanatgcttcgtgaagtggaaatctgagctcaatgagccttctccaagcttcatccttgcaacaangtggtactcnggggtcnttctcaacaagatatttgtccggctgnctgcanctcctgtgatgaaggaaaataat

SEQ ID NO: 14961 - DNA, 400 bp, Arabidopsis thaliana
  unsure at all n locations
  Clone ID: LIB25-085-Q1-E1-A4
ggagaaaacttcgtctctcttctctgcttcgccctctcatttcctgtgagataaaggcggagtctctctccagttattttgctcatccatcgattcttagagttcaaaatggttgatcaagttcancaccccactattgcgcagaaagctgccgggcagttcatgcgttcaagtgtttccaaggacgttcaagtgggttaccaagaggccttctatgtatcaaagacatgcaacctanggnaactactccaatgctgcanttcaatttcctccnacatcccggatgttggcaacaactgnntctcccgtgtttgtcnaaaccccaggagagaaggggtttcactaactttgnccctnggactttctggatgggtgggggttnctggctgcggtctccaag

SEQ ID NO: 14962 - DNA, 395 bp, Arabidopsis thaliana
  unsure at all n locations
  Clone ID: LIB25-085-Q1-E1-A6
cttactctcctgcaccaagacgaagaggaggtcctcctcgtggggaagaagatgaaaattacagtcgtaggtcctactcccctggctatgaaggtgctgctgctgctgctccagatcgggacagaaatggagacaatgagattagagaaaaaccgggctatgaagcagaggatagacgtcgtggtggaagagcagtttcaaggtcgccatcaggatccaggtccaggtctgtggaggtatctccaagatgaaacttatgtgaanaagtggccgaccaaaactttgtgcaacgctttatgggttttgcatttctctagtaagtgcgtctctgtgtctttaaaaactccttactccgggcttgtcaaagatattttgtcntgtgatgtgatgttact

SEQ ID NO: 14963 - DNA, 407 bp, Arabidopsis thaliana
  unsure at all n locations
  Clone ID: LIB25-082-Q1-E1-H8
gctcaaagtcaattgctgttctgtgattccagagtgtttgtttctctgtcataatctcttctanttgcggtttgttgggctctcacnttctctttcanccgatttgatctttcgtttcttgtggtttgacttcacttgaancaagctcttttantgatcttattgtctcctttatgttctgatgattccgcattgtgaaatcactanagattttggggttgtgatatgaataatctggggaattttggggtttggggattcgggttcttctccttatctatttgggtttgcggttctgcaacaagctaatggactcagacccatnaggggaaactgctcggtccctggggcgatnaantggctcttttggcaaaaaaaagaaaaaagggtggcncaaggancgtttt

SEQ ID NO: 14964 - DNA, 405 bp, Arabidopsis thaliana
  Clone ID: LIB25-083-Q1-E1-A2
tcttctaaaattcgttttccatttttcttcactctctttccggtgacgccatgaacgccgccgtgtttagtccttctgctttatctctccctatctccttctctaaaacccgatcctcttttctctccagaaagaagggcgtgaaaggagaatttagggtatttgctgtgtttgggtgatgagagtggattagttgagaagaagagtcaatggagacctttgtttgaatgtggaggatcctagatcaaaagctcctcccttataaaggaaagtttttagatgttaatcaagctattgaagttgctaggtttgatattcaatacttgggattggcgtgctcgtcaagatcttcttaccattatgattcttcatgacaaggttgttgatgtacttaatcctcctagg

SEQ ID NO: 14965 - DNA, 244 bp, Arabidopsis thaliana
  unsure at all n locations
  Clone ID: LIB25-083-Q1-E1-A3
tacaatctctagaaaatggcgatcacttacttgcttcctctgtttctttctcttatcatcacctcctctgtttcagctaatttccaaagagacgttgagatcacttggggtgatggtcgtggacagatcaagaacaatgganagcttctcactttatctctanataaatcctctggttctggattccantccnaagacgantacttgnttgggaaanntcgcnatgnaaaagnnccttgtcnct

SEQ ID NO: 14966 - DNA, 458 bp, Arabidopsis thaliana
  unsure at all n locations
  Clone ID: LIB25-083-Q1-E1-A4
ggtagtccggcagccacnaacccggaattccngggtcccccaagncntcggcnnangcgncggcncaaanccaaanncactaangaggagaanattgctaaagtttgataaaccatnccaaaatcaatggctgataggatcaaaggtccatggantcctgaagaagacgagcancttcgtaggcttgttgttaaatacggtccaagaaactggacagtgattancaaatctattcccggtacatcggggaaatcgtgtcgtttacggtggtgcaaccagctttcgccgcaagttgagcatcggccgttttcggctgangaagacgagacnatcgcacgtgctcacgctcagttcggtaataaatgggcgacgattgctcgtcttctcaacggtcgtacggacaacgccgtgaagaatcactggaactccgacgctcaagaaggaaatgcggggggttt

SEQ ID NO: 14967 - DNA, 370 bp, Arabidopsis thaliana
  unsure at all n locations
  Clone ID: LIB25-083-Q1-E1-A6
acagagagagagagagattctgcggaggagcttcttcttcgtagggtgttcatcgttattaacgttatcgcccctacgtcagctccatctccagaaacatgggtgcaggtggaagaatgccggttcctacttcttccaagaaatcgggaaaccgacaccacaaagcgtgtgccgtgcgagaaancgcctttctcggtgggagatctgagagaaagcaatcccgccgcattgtttcaaangctcaatccctcgctcnttctccctaacttatcagtgacatcattatngcctcaatgcntctagtaagtcnncanccaattnacntctcctcncntcccntcagcntcgnctcctaaagntggcgttnggg

SEQ ID NO: 14968 - DNA, 399 bp, Arabidopsis thaliana
  Clone ID: LIB25-083-Q1-E1-A8
caataaaacaaagttttgttcttgtcttcttcacaagagaagagatatgtctctcttactctgtttttcttctttctctcaataaaccaacatggtatcagagccgatggttgtccttggttgtctctacaaaaataagatgtgttctgctgcgaaaagaaaaagagagatggagacaacaaatctatggtgagatgaagaggaagaagaagagggaagaagaagaaataagaggtggtaactacagagagtaccatcagttttcacaaacacattcacatgaagtaccttcaagaggaaggctccaaaagcgatgaagaagataggaaatcttctctagaggcaatggagaaaacgaatgtggatttgggagttgtggaaggagagttttgaaaattg

SEQ ID NO: 14969 - DNA, 394 bp, Arabidopsis thaliana
  unsure at all n locations
  Clone ID: LIB25-083-Q1-E1-A9
gctagacaaagccatccagttgcgcccacttgagcccgctcctattcagcatctagctcgggaattcatggtcaagacccgccgtagaaagggaatgagcgaagacgtcagcggaaataaattctttgatgaagcgatgatggtagagcttgcccagcaaanaggcgatctccatctgcagatgatttgatgatctctgcacttttttcatataaatcgtgattcaggactagtagtagtatcttctcttctctatatatgtgaaaggagaacaagaaaatgtggatcagttttgtaattgatgtgtcaaatttacgttgtnagttgagagattttaatgaactcaacagtccacatggtcacactcacacatgantcgcaaatanttgacagg

SEQ ID NO: 14970 - DNA, 396 bp, Arabidopsis thaliana
  unsure at all n locations
  Clone ID: LIB25-083-Q1-E1-B1
ggtccaataatcgagaaaacctatcttgaccaccttctccgacgccggtgtagcccacgcttgccagcgtcgggatttttccttccctgcntctctctatttcacattgctatctgtttcccctcttgtgcggccgtttcctcaatcatctagtgtaatcaagcgtcttaaagtggagaacggcatttcatcctccatcatactcagatctatcgacgctggttcttcctcgatctccctttaaaccttcttccaccgtatctcgccgccggtangtacntcttcacctccccttgcgattcaaccaaatccctcttgcctcgtcntcgaagctcccggggaatcctaatggtgggganttttcgggcaaagggntaatcccggtgaaagaagaaa

SEQ ID NO: 14971 - DNA, 389 bp, Arabidopsis thaliana
  Clone ID: LIB25-083-Q1-E1-B10
gcgtgatgtggcttgggcaccgaacttgggtctcccaaagtcaaccatagccagtggttcagaagatgggaaagtgatcatatggaccatagggaaagaaggtgagcaatgggaaggtactgttttgaaagatttcaaaacaccagtgtggcgggtctcgtggtcgttgaccggtaatttgttggctgtttccgatgggaacaataacgttacagtgtggaaagagtctgttgatggagagtgggaacaagtgactgttgttgagccatagattgttgtttgtttgtttggttatcttttgttttgtggtaatatcaaaatgtggtgtgttctgtatacaatttctagggacctgtttctctctatacgtttctcaggaaagtatattc

SEQ ID NO: 14972 - DNA, 393 bp, Arabidopsis thaliana
  unsure at all n locations
  Clone ID: LIB25-083-Q1-E1-B2
ggacgcntgggctctttctctcgatcgctgcttcttcgtcgctcaatctcaagctccgttccgttagttcttcgtcggagagacggggtggagagaatcctgctgcaagtggtagctgtttgatacttgagtcattttgtcacagcaacatgaatatgccgctgttggatattcaaccacgaacgttgcagtttgcagttgacctgaagaagcaaacttcctgcgtggtacagctaaccaatactacccatcattatgttgcatttaaggttaaaaccacatcaccaaagaagtactgtgttcgtccaaatgttgggtgttgttgcacctaaatcaacctgtgaattcactgtcattatgcaaagcttttaaagaaccacctccagatatggg

SEQ ID NO: 14973 - DNA, 93 bp, Arabidopsis thaliana
  unsure at all n locations
  Clone ID: LIB25-083-Q1-E1-B3
agaantcaacagtccggcttctcatttctccggnaaaactcctaaacttccccgggngaaactctctccgactttctctctcatcancaagac

SEQ ID NO: 14974 - DNA, 403 bp, Arabidopsis thaliana
  unsure at all n locations
  Clone ID: LIB25-083-Q1-E1-B4
acagacccaattcttgttttctgttttgctataacaaaccagggtcagggttttatcttccatattcttttcccactgattcttacaatcgatctaagggaatctacgaactgtttggtaatttctggtgggaaaagtcttgatcttgctgtttggtttgggagtaatggtgagtgcttggtttgttgttggctcaccggtgatggactcctcnaagcaatccatgtttatgtcctggatgctcacacgacgggtaccatcangaggaagaagatccttggcaaagcaagaaatctggaattaggaagctctttcactggctcacattgtttttangctttctccgaagcgtgtatcgagaattgcgaatcgaaagagcaaaaagctccttgattgtgaatga

SEQ ID NO: 14975 - DNA, 388 bp, Arabidopsis thaliana
  unsure at all n locations
  Clone ID: LIB25-083-Q1-E1-B6
ataaacgtttcttctcattcgtcatctagtcccattctctgtccataacaatgaatatcaattgttctccattagggtttctaatttcactcttcttcattgttacttttcttgcaccacaagtcaaatctagggctttctttgtctttggtgactctctcgtcgacaatggaaacaacgactacctcgtcaccactgcccgtgccgacaattacccgttatggtatcgactacccggaccgttaacccaacgggacgtttctctaacggccttaacattccccgacattatcagtgaggctataagcatgccgtcnactttgccgtaccttancccgcatctcancggagaaaatcttctagtcggtgctaattttgccctncngng

SEQ ID NO: 14976 - DNA, 392 bp, Arabidopsis thaliana
  unsure at all n locations
  Clone ID: LIB25-083-Q1-E1-B7
aaacttattgctttcttccttctggtagttccccaaaactcaaagtactctttttctgtgtaaacaaaaaaaaaatcaacgtttcaatctcggttccattcattctgtttcatgggattatnagatcaatgctccaatggtggagtgagcagcttcgtacagctccttagcaacctctctagctcccatggatcttgcttagaaataggaaatggagagcaagattcggtgactatgccgcttacncaacaagcgagtgtancgtgtgagaangttaaacanatgaaggatttgagtcaaggctacaacattgttgcacaagtctcanngaaacttggtaagctagangtcnaaatcgaagttttgtgacaatgctcctcccggtcttcang

SEQ ID NO: 14977 - DNA, 387 bp, Arabidopsis thaliana
  Clone ID: LIB25-083-Q1-E1-B8
cgaatcatctttgatttttttttccccaagcttttggccactctaatggcttcgccggccaatcatttgatctgacgaaagagagagaaagaagcagaaaagctttgagatggcgatgccgctgggcatggcgatgtatctgatgagaatggtttggttttctctgagtggttgggttttcacttgcgtggctatcgctgatgagatcgctggttctctgagaaacggagatattggtcctttccacgtcggatgattgaattcgagatccttagctctccttctgtgcgtatatgttcttctcttccccaaattttacgtttttttttgttttgctctgttgttttagattagagtcgcttcaaatttccctacaaactccgaaag

SEQ ID NO: 14978 - DNA, 389 bp, Arabidopsis thaliana
  Clone ID: LIB25-083-Q1-E1-B9
ctttcgtctctctttctacggttcaaacattaaaaagatagatggagaagaggagctctattaaaaacagaggagtacttagattaccaccagggttccgatttcacccgaccgatgaagagctagtggttcaatatttacgtcgaaaagtaaccggtttacccttaccagcttctgtaataccggaaaccgatgtttgtaaatccgatccatgggatttaccaggtgattgtgaatcaagagatgtatttttttagcacgagggaagctaaatacccgaacggaaaccggtcgaaccggtctaccggttcgggttattggaaagcgactggtctcgataagcagatcggtaagaagaagcttgtcgtggggatgaagaaaactcttgt

SEQ ID NO: 14979 - DNA, 404 bp, Arabidopsis thaliana
  unsure at all n locations
  Clone ID: LIB25-083-Q1-E1-C1
tattttgggttttagcagtgaagtttgcgaaaatggcgtcttcggtttttctatccagtttctcgtcatcgtcttctttgcaactctgctcttcctttcacggcgagtacttagctccgtcgagatgctttctcgganctccggtcacttcctcttctttatcactctccggtaagaagaactcatattctccgaganagttncatgtttctgccaataaagtttctgggttanaggaaaccattagaatcagaaaaatganagagcttgnaactaaatcaaaagttaggagaaatccaccattaagacgtggnnagagtatcgcctcgtcttcctgtacctgatnacattccaangcctccttaagttgaagtccggngtattaangggataaatcaagntgg

SEQ ID NO: 14980 - DNA, 409 bp, Arabidopsis thaliana
  unsure at all n locations
  Clone ID: LIB25-082-Q1-E1-H5
caacaacatttgggggtttcatttcaatcgcatttctagggtttctttctctacgattcaatagattcggacgaattgggggattctgaccagagagaagctatggaggaaaacgaagaggaagaagaattgcggccaacggcgctatacacggtcggtggttcagacgaatttacctttgtttctcccgatgggctctccggtcaatacacgggccctgatcacgacggcgtagttcttcagactgaaaatccggcgccgactaactgtcntgcttactacttcgaggttcaataatcatgaantnctgggnnananaaggagaaattcccgattgggtttctccaaacggaacacatctananncgaagggatattagtgtcaagaaacctgttcctaacatttggg

SEQ ID NO: 14981 - DNA, 450 bp, Arabidopsis thaliana
  unsure at all n locations
  Clone ID: LIB25-082-Q1-E1-G11
tggtngcctttaggggccaagtccggacaacccgggtcgncccacacgtccggtaaagagattgtgacgaacaaagacgacaaatgggcgattgagcgaagaagaaaccttcgttctctctcggaaatgacgaagaggaagaaggaagtaatagatgtcgattgctccgagaagaaagattttgtgattgattggtcttccgctatggataaggaagacgaagttcccgagctcgagattgttaataccaccaaacctactcctccgccaccgccaacgtttttctccgacgatnaaancgattctccgaaactcctaaccgatcgtgacctcgacgagcagctagaagcgtaaaaaaagcgatcctgacattaggtccgggcttacncgacaagggtgagaaaattcgactcaaaatcgctgatctcgaagaggagaagcancgtanag

SEQ ID NO: 14982 - DNA, 453 bp, Arabidopsis thaliana
  unsure at all n locations
  Clone ID: LIB25-082-Q1-E1-G12
ttggtngcccttcaggtngcaagtccggaattaccgggtcgacccacncgtccgattttcttctgcatcgccacatcgtctaaaaaaaatccccaaattcgtttctcttcgattcaaaatctctccgcaaaaaatccccaaacacgatctcaaccttgtgagatttccaatcgaaatcgagaagccatggataacagcagcagcatcaattccaccgcttccacggcctcaaatctgagcacggcttctctggaaaagctagatcaagcggcgagctgggtcagcaccaccgttatttccgccttcttcgcctccctcgagcgttgctcatgcgttaacctatctacctccgatgatgacgatgaaggggaaagaatctcacaaacgtccccttgntctctccggcgctcctcaaccagacgacatcgtttagattcccttcggttcgggaaa

SEQ ID NO: 14983 - DNA, 381 bp, Arabidopsis thaliana
  unsure at all n locations
  Clone ID: LIB25-082-Q1-E1-G2
accagatttagaggatttgtggatgtgatttcttcttttggtgagttttctcctctttttttattgtttctttcattctctttggatcttcatagtttcagaagcttcgagtgttttttaaaggtagttcctttgtcgctgaagaaacatagtttcaattttagagcttcttgaaacttattttcttatctggctcaatcttgagagttttgagattctgtgggagagacaatcttagggtttctgcatctagcaaaagtttgaatcttnaaatatcttttagcgtttgcgantgtgtaattgcctctgttcggtgtcaatngggaaatcttcccttttgggacagaatgattctctttctcgtttaagnatncctcggtt

SEQ ID NO: 14984 - DNA, 396 bp, Arabidopsis thaliana
  unsure at all n locations
  Clone ID: LIB25-082-Q1-E1-G3
gtcgatccanaatcgccactttcagatttccaggattctggggaaacatctctaaactcttcancgatggcgactgagaatctcaccgataagaatgttgttttcagaaagctgaaatcatnaatccgagaacaaggtttgctttgattgtnntgcgaagaatccaacatgggcttctgttccttatgggatcttcctatgcatcgattgttctgctgttcancaaagtctaggtgttcanagcagcttcgtcaggtcaacgaacttanactcgtggagtcctgagcagctaagaanaatgatgtttgganggaacantcnagctcaggtgttttttaagcnanatggatggaatgatggtggtaagattgaggntaattatacttcaaganctgg

SEQ ID NO: 14985 - DNA, 415 bp, Arabidopsis thaliana
  unsure at all n locations
  Clone ID: LIB25-082-Q1-E1-G4
atctccagctttctgcatagatccatgaccatgagagtctgtttcttagaacgaaaatgaaaaaaatatcttcacattattcggtagtcatagcgatactcgttgtggtgacgatgacctcgatgtgtcaagctgtgggtagcaacgtgtaccctttgattctggttccaggaaacggaggtaaccagctagaggtacggctggacagagaatacaagccaagtagtgtctggtgtagcagctgggttatatccgantcataagaaaaagtggtgggatggtttangcaatgggttcgatgcagcagttgtaatgnccncccttcaacaangntgcntcanncgatcgaaatgnangnttgtacnaagaacccngaatttggatngagtnacccanaangcnncctgggggtnca

SEQ ID NO: 14986 - DNA, 399 bp, Arabidopsis thaliana
  unsure at all n locations
  Clone ID: LIB25-082-Q1-E1-G5
caataaaacaaagttttgttcttgtcttcttcacaagagaagagatatgtctctcttactctgtttttcttctctctctcaataatccaacatggtatcagagccgatggttgtccttggttgtctctacaaaaataagatgtcttctgctgcgaaaagaaaaagagagatggagacaacaaatctatggtgagatgaagaggaagaagaagagggaagaagaagaaataagangtggtaacaagagaaagtaccatcagttttcagaaacacattcacatgaangtaccntcaagaggaangctccaaaagcgatgaagnagataaggaaatcctctctaganggcaatggganaaaacnaaatgtggaatttnggnnttgtnggaaaggannatttc

SEQ ID NO: 14987 - DNA, 331 bp, Arabidopsis thaliana
  unsure at all n locations
  Clone ID: LIB25-082-Q1-E1-G6
cccnanttggaaaatncnaaagnngttcccaacaatttgnntaaacanantactccaaantataatgagaataaacctgttctatcantatagacacacacaagaggttaagttggagcagggtttgaaggttgtaaagattttcaaggagcataacagcaagacatgcattttggatgatttctcgttctacgaggctcgacaaaagactattttggagaagaaagctaagcagcaacaatcccagaagcaaggcaagagaaagaaaaccgttaattccatagatataaagcangatgcanttacaatttgtnctcctccactccccnag

SEQ ID NO: 14988 - DNA, 391 bp, Arabidopsis thaliana
  unsure at all n locations
  Clone ID: LIB25-082-Q1-E1-G7
cacacataaaaagatcaggaaaatgagttccttacaaccactttctgtgcacagtaccaactccaaagtcataacagagaagagaaaatcggtgacaacccttacaaatggtagtcgtcatctagagagcaagcctaagattcatgatgtcgacaaatgcgccgaagctttcatccaaaacttccggcgacaactttctcttcagtgcgataacatcctccctagaggagctctctgatatattccacttacagaaaaaatagatgtctcatgtcacgtgtttcagataacatatgttacttatctctctaagcttcttaggcgatttcaattgtantataangtttcttantatcatataaccacatgtttttagangcataaaaaaaag

SEQ ID NO: 14989 - DNA, 395 bp, Arabidopsis thaliana
  unsure at all n locations
  Clone ID: LIB25-082-Q1-E1-G8
ttagggtgacaaacgcgggatgttgtggagttgggaggaacaatggacagataacttgtcttccgggtcaagctccatgtcttaacagggacgagtatgtgttctgggacgcgtttcatccaggagaagctgcgaatgttgtcatcggtagtcgatcttttcagagagaatctgcttctgatgctcatccttatgatatccangcagcttgctcggctctagttcatgaaatttcctccaagcaaacacagangttgaaaaannagaagggagacagatttnanccttttcttanttaaatggttggatcgatggttcctcctggctgcagnaagaattggnttgttttgttnaagtttangtnncanngggttctaanaggatngcatnaaatt

SEQ ID NO: 14990 - DNA, 390 bp, Arabidopsis thaliana
  unsure at all n locations
  Clone ID: LIB25-082-Q1-E1-G9
atttctacaaatgggtttccaaagatctatctcttcttcttctgcattaaaatggcttggatttgtaacagcggtttgggttcaatccatctccggcaacaactacactttttcaaactactccggtgctcttaagtctctcatgaatctcaancagctcgagctcaacaacctctctgtcgctaaagacgtcggaaaagcctttgggatcctggctggccttgcctctgaccgtcttcccactccggtcatcctccttattggttgctttgaaggtcttcttggntatggtgtacaatggctcgttgttagccgcancatccaaccaatcccttattggcanatgtgtacattcntctgtangggagggaanatcacaacgtngntgaa

SEQ ID NO: 14991 - DNA, 452 bp, Arabidopsis thaliana
  unsure at all n locations
  Clone ID: LIB25-082-Q1-E1-H1
ggtaccttgcaggcacagtccggaantcccgggctctcctcttcctctggntccggcgaaaaaccccttttcgatttcattgataaaacgcaaatcgatctctcgtgtggaagaagaagaagaacacgatgggaacaatgggtaaagcattctacagcgtaggattctggatccgtgaaactggtcaagcacttgatcggctcggttgtcgcctccaagggaaaaatcatttccgagaacagctatcaaggcaccgcacactcatgaatgtttttgacaaaacccctaatgtggataagggggcttttgtggctcctaacgcttctctctctggtgatgtccatgtgggaagaggttcttccatttggtatggatgtgtcttgagaggagatgctaacagcattagtgttggaactgggaccaatattcanggncaacgctctttgtccagg

SEQ ID NO: 14992 - DNA, 463 bp, Arabidopsis thaliana
  unsure at all n locations
  Clone ID: LIB25-082-Q1-E1-H10
ttggtggccccattcnggtagncagtccgggattaacgggtcgacccacncgtccgcggacgcgtccgcccacgcgtccgcggacgcgtgggtgcgaaaatggcgtcttcggtttttctatccagtttctcgtcatcgtcttctttgcaactctgctcttcctttcacggcgagtacttagctccgtcgagatgctttctcggagctccggtcacttcctcttctttatcactctccggtaagaaagaactcatattctccgagacagttccatgtttctgccaagaaagtttctgggttagaggaagccattaggnatcaagaaaaatgagagagcttggnaantaanatcaaaagttaggagaaatccaccattaagacgtggtaagagtatccgcctcgtcctcctgtacctgattacattccaanggctcctttatgttgaagttccgggtgtattacg

SEQ ID NO: 14993 - DNA, 400 bp, Arabidopsis thaliana
  unsure at all n locations
  Clone ID: LIB25-082-Q1-E1-H12
ggaaaagaagagaaacatcaaacatctttggtttgcttccctcgtacccgttcttcatacaagcacgcctttaattatggattgtcatagaaagacgttcttgttgaagtttttgtgcgtggcatttctgttaaactacagcaatgttggctttgtagacgcagcaacaaacattggcttgaactacggcctccttggagacaacctcccgcctccatctgaagttatcaacctctacaagtccttaagtgttaccaatattcggatcttcgacacaactacggatgtccttaacgcctttcgagggaatcgcaatatcggagttatggtaaacgtgaagaaccaagacttanaggcctttcggtcaagcgaagaaactgttaacacctgggttcgtgac

SEQ ID NO: 14994 - DNA, 424 bp, Arabidopsis thaliana
  unsure at all n locations
  Clone ID: LIB25-082-Q1-E1-H2
gctatgtctcagaccgttgttctcagagtggccatgacatgtgagggatgtgttggagctgtgaaaagagttcttgggaaaatggaaggcgtggagtcatttgacgttgatataaaggagcagaaagtgacggtgaaaggcaacgtgcagccagacgcagttttacagaccgtgacgaaaaccggaaagaaaacggctttttgggaagctgaaggtgaaactgctaaggcttaaggagaagcagatcttttatgtgattcccctgttttaaataaaatcctaatgttgaaatcnttttaattttcctcctccggttgccttggtgactttgtgggctgaagttgtaattgggaactatangatgaatacaaacacacnttttgaagntgaataaaataatgcactggggggcattatcctggtc

SEQ ID NO: 14995 - DNA, 394 bp, Arabidopsis thaliana
  unsure at all n locations
  Clone ID: LIB25-082-Q1-E1-H4
aaagtttctcangaaactcttcttcttcttctctgccaagctctgtaaacgttggagctctgtttacttatgattctttcattggaagagcggccaaacttgcgtttgtggcggccattgaagacattaatgctgaccagagtatcctcaggggcaccaagcttaatattgtcttccaggacactaattgcagtggatttgttggcaccatgggagctttgcagctaatggagaacaaggtggttgcagccattgggtccacaatcttcaggaattggtcacataatctcccatgtagctaatgagcttcatgtacctttcttgtcatttgcaacaacggaccccgactctttcttccgcttcaataaccttatttccttcgtancacacagaa

SEQ ID NO: 14996 - DNA, 390 bp, Arabidopsis thaliana
  Clone ID: LIB25-082-Q1-E1-F9
aaaaaatatgtattgtagagagtccttgtcgagtctccagactttgaacgtagcaaagagtctcagctctttgttccctaaacaatcagctctcatcaacccgatctccgctggacgtcgaaacaacctgcctcgtccaaacctcagaagacgatgtaaggtcaccgcttcacgggctaatattgaacaagaaggtaacacagtgaaagaacccattcagaatattaaagtaaagggatacataacggcccaagaagagtttctggagggcataacttggtcgagaggtctcgatgacattgctgatatccgcggcagatcattgctcgtcgagcttattaagcgccaagactgaccagcggattacggtagaagactacgcacaacgtg

SEQ ID NO: 14997 - DNA, 400 bp, Arabidopsis thaliana
  unsure at all n locations
  Clone ID: LIB25-082-Q1-E1-E1
aaaagcctccgtctcctcctctctctctattcatcagcctcaacctctctttcgtcgtcgactcagtttccgatttagggttacccaatcttcgccatgtatcgcacggcagcttcacgagccagggctcttaagggagttcttactcgtagtttgagaccancgcgttatgcnagttctantgctgttgcggagacganttcgtcaacgccggcttacttgagctggttgagtggtgggtctcgtgctgcgcttacntcattggatatgcctctacaagggtgtttctcttcctccngnngcntgctggataaaggtcgagccggagcaaacnttcaagatnaactantccttcnaaaatggtcttaaggananncctcatgncgangacgccggaatc

SEQ ID NO: 14998 - DNA, 449 bp, Arabidopsis thaliana
  unsure at all n locations
  Clone ID: LIB25-082-Q1-E1-E10
ttggtagcccttaggtacnagtccggaattancgggtcgacccacncgtccggaaaaaatgagcggcggaggaaacaacgtcgtgaacaaagtgttctacgcgacgtcgtatcatccgattcaagccggaagtatcgacggaactgatgttgctccacatgataacggcgtccgtcgagctcttctctgttataacgctggcttatatgatccttctggtgattcgaaggctgttggagatccttactgtactctcttcgtgggtcgtctctctcatcacactacggaggatacacttcgagaggtgatgagtaagtatggcaggattaagaacttgcgcttggtaagacacattgtgacgggagcttcacgangatatggttttgtggagtatgagactgaaaaggagatgcttcgtgcttatgaggatgctcatcattcactaatag

SEQ ID NO: 14999 - DNA, 443 bp, Arabidopsis thaliana
  unsure at all n locations
  Clone ID: LIB25-082-Q1-E1-E11
ggtnccttnaggngccagtccggatnacccgggncggcccacacntccggaaacccccaaaatcgctgaagaacgcctctcgagctcagatagggtttataggtttctagagagaatttcatggcgacatctgaagcggaatatgagagtgatcccgaggagctgaaccgctccttggcgacgaggaggagagaagcgagtgatgacgatagtgatgatgatgatgctgttagagatgtgaaaaatcaganggctgtggttgattctgacctatctgatgaagaagttggtactgtgaagtatgataatgacgaagatggggaggatagttatgaggatgatgaggacgaaagtggtggaggaatcgataatgataagagtggtgtggtgaangaggctggtgatatgaatggagaggaagaaaatgaaaaggagaagttaca

SEQ ID NO: 15000 - DNA, 450 bp, Arabidopsis thaliana
  unsure at all n locations
  Clone ID: LIB25-082-Q1-E1-E12
ttggtagcccttnaggtgccaagtccggaatanccgggtcgacccacncgtccgcccaatcttaaagacaaagccattagaaagagaaagtgagtgagagagagagagaaactagctccatgttcgaaacagagcatcatactctcttacctcttcttcttctcccatcgcttttgtctcttcttctcttcttgattctcttgaagagaagaaatagaaaaaccagattcaatctacctccgggtaaatccggttggccatttcttggtgaaaccatcggttatcttaaaccgtacaccgccacaacactcggtgacttcatgcaacaacatgtctccaagtatggtaagatatatagatcgaacttgtttggagaaccaacgatcgtatcagctgatgctgggacttaatagattcatattacaaaacgaangaangntctttgaatgt

SEQ ID NO: 15001 - DNA, 394 bp, Arabidopsis thaliana
  unsure at all n locations
  Clone ID: LIB25-082-Q1-E1-E2
cggcggcgaaaatgggtttcaagaggtacgttgagatcgggagagtagcacttgtgaactacggagaagatcatggaaagctcgtcgttatcgtcgacgttgttgaccagaacagagctttggtggatgcccctgatatggagaggatccagatgaacttcaagaggttgtctcttaccgatattgtcattgacatcaaccgtgtgccaaagaagaaggctttgatcgaggcaatgggaaaaggctgatgtgaaagaacaagtgggagaaaagctcatggggtanggaagcttatcgtgcaaaaacgtngggctaaccttaacgactttgataggtcaagatcatgttggccaaagatnaaagaaaagctggngtttgtcangcaaggaacctt

SEQ ID NO: 15002 - DNA, 407 bp, Arabidopsis thaliana
  unsure at all n locations
  Clone ID: LIB25-082-Q1-E1-E3
gcncttcttgattatcgtccagggattgcaacagagagaaagtaacgatgccggcgaaacagaggacagctaaggtcaacaggaatcctgatctgatcaggggagttggtaaatactcaangtctcagatgtaccataagagaggtttgtgggcaatcaaggccaaaaatggaggcgttttcccccgccacgacgctaaatctaaggttgatgctccggtggagaagccaccgaagttctatccagctgaagacgtgaagaaacctctccccaacaggcgcacggcaaaaccanccaagctcaagagctaacatcactccanngacagtgcttatcatccttgctggtagatttaaagggcaananaanttgtccntccttaancaaccttgcctccgggttngctt

SEQ ID NO: 15003 - DNA, 401 bp, Arabidopsis thaliana
  unsure at all n locations
  Clone ID: LIB25-082-Q1-E1-E4
gtgttaaatccatggctgctgaggaagaagaagtaatcgaacctcaagctaaagtgacaaacaaggtttactttgatgtggaaattggaggtgaagttgctggcagaattgtgatgggtctctttggagaagttgtgcctaaaaccgttgaaaacttccgtgccttgtgtactggtgagaagaaatacnggtacaaggggttcctctttccatcgtattantaangatttcatgatccaangaggtgatttcaccgagggaaatggtactggaggtattagtatttacggtgccaanttcgaangatgaaagcttcagccgtgaagcanactggncctggaatcttgagcatggcaaacgctggtcctaatacgaatgggaagccannttttttcaatttt

SEQ ID NO: 15004 - DNA, 375 bp, Arabidopsis thaliana
  unsure at all n locations
  Clone ID: LIB25-082-Q1-E1-E6
cgacgctataatgggttccaccgcaatcaccatctctaactctcatttcacccaccacaacgatgtgatgttgcttggtgcacaaaacaacaacatggatgacaagaagatgcaagtcacagtggcttacaaccatttcggaaaaggacttgtgcagaggatgcctagggtccgatggggtttcgtccacgttgtcaacaatgactacactcattgggagctttacgcgatcggtggtaagccaaggtcctaccattctcagccatggaaaccgtttcatcgctcctcctcacaaacaacactacagagaggtgacaaagagggattatgcttcagaaagngaatggaaaaactggnactggagatncgagaaag

SEQ ID NO: 15005 - DNA, 394 bp, Arabidopsis thaliana
  unsure at all n locations
  Clone ID: LIB25-082-Q1-E1-E7
aaactccagaaccctagaattcgaaatctccaaagaacccgacaaagcgccatgtcgctcactatcccggcgaatctcgttctcaacccgagatctaacaaatctctcactcaatccgtacctaaatcctccgcaagattcgtctgctccgatgacaaatcctcctcctccacacctcaatccatgaaagctttctccgccgccgtcgccctctcttccatcctcctctctgctcctatgccagctgtcgctgatatctcaggtttgactccttgcaagggatcaaaacagttcgctaaaagagaagaaagaanaagattaaagaagctttgaatcctctctaaagctctaanggctcctgaaatctggccctggctncttggctcctcaaatg

SEQ ID NO: 15006 - DNA, 133 bp, Arabidopsis thaliana
  unsure at all n locations
  Clone ID: LIB25-082-Q1-E1-E9
cttacnatnatggcgcattggaaccggccattattngagagatcatgcatgattcatcaccataatgcatnaacacagcttatgttaccaattacaataatgctcttgagcagcttgatcaagcngtgganaa

SEQ ID NO: 15007 - DNA, 457 bp, Arabidopsis thaliana
  unsure at all n locations
  Clone ID: LIB25-082-Q1-E1-F10
ttggtagcccctttnaggtgcnagtccgggaataaaccgggtcgacccacacgtccgattnaacaaggaatggcaaaggaagggggcttgggagagaactcaagatggagtcttggaggcatgaccgctcttgtcactggtggctctaaaggcatcggggaagctgtggtggaggaactagccatgttgggagcaaaagtccacacgtgtgccanagacgaaactcagcttcaagaacgcttacgtgaatggcaagcaaaagggtttcaggtcaccacttctgtctgcgacgtctcttctcgtgaccaacgagtgaaactcatggaaactgtttcctctctctaccaaggaaaactcaacatcctccgtcaacaatgtgggaacgtcaatattcaagccgaccacagagtatacaccaagaagatttctcctttgtaatggctacaaaatctcgagt

SEQ ID NO: 15008 - DNA, 293 bp, Arabidopsis thaliana
  unsure at all n locations
  Clone ID: LIB25-082-Q1-E1-F11
ttggtncccttcaggtgcnatccggaataaccgggtcgacccacncgtccggtgatctcttttgggttgaggtttgtactaagagtacgtctgtctagtttgggattgtactttttgttgttgttgttagtttgtaacttgtgatgcttccctccccctagctctcttattacatgggcgttgtaaactgtgtgtactactactactagtctctanggtatgtactttttttttcctcaccataataataccttctggttctaaaaaaaaaaaaaaaaaaaaaaaaagggcgg

SEQ ID NO: 15009 - DNA, 401 bp, Arabidopsis thaliana
  unsure at all n locations
  Clone ID: LIB25-082-Q1-E1-F2
caaattctctctccaatggacgaaatggagagatgaacatagggaaagatgaaaggtttcttgtgaaaaggtgcttatcagatggagattttctccatgaaagttgcactccgctgtcagccatgagtagcaatcatgaaagcatgccacaaaaaggtttctccgcaccattacagcatgtgagccatattctttcagagtcatcgtcngatataccaggtatctaatgatgtagcattatcaaggtgtactccttcaatgcccanggaaacagctcttcggagatgtgcaaanggttcatcgttttggtangcgaccaagtttactttggccggggangaagacatgtctaagtgtcnccaattttgttgatattgagtggctttcatcaggaaaancca

SEQ ID NO: 15010 - DNA, 411 bp, Arabidopsis thaliana
  unsure at all n locations
  Clone ID: LIB25-082-Q1-E1-F4
ggatggtttaagaactcacgcaccgttacgtgtgattcctatgagccatcaatctcagatcagcgacaagtacatcttaggacgagaactcggtcgcggcgaattcggaatcacgtatctttgtacagatagagagactcgtgaagctttagcttgcaaatcaatctccaagagaaagctccgaaccgccgtcgatgtggaagacgtccgtcgtgaagtcacgatcatgtcaactttaccggaacacccaaacgttgtgaaacttaaagcgacttatgaggataacgagaacgtgcatcttgtgatggactttgtgaaggagggtgagntttttgattcggattgttgccaagaaggacattatacagaancntgcgggcgggntacgggtcgccgagaaacaatngcggg

SEQ ID NO: 15011 - DNA, 329 bp, Arabidopsis thaliana
  unsure at all n locations
  Clone ID: LIB25-082-Q1-E1-F6
ggaagaatctggtcatgttcttaaagttccctttcgtcgtgttcatttgtctggtggtgagccagcttttgataattatgacactagtggtcctcaaaatgttaatgcacacattgggcttgctaagctaaggaaggagtggattgatcgtcgggagaagctaggaacaccaagatacactcaaatgtactacgctaagcaagggatcataactgaggaaatgctctactgtgctactaanggagaagctaanacccctantttgnnangaatcagaaattnccncaaggnngggncnattatcccttccaacaangaanncatttggg

SEQ ID NO: 15012 - DNA, 395 bp, Arabidopsis thaliana
  Clone ID: LIB25-082-Q1-E1-F7
atttctctttaacttcgcaaacttctcctcgataaaatttctctctctaaaaaaaaacaattagaatcttgccttttacagagtaacactacatgccgacaatggggaataagaattcgatgtgtgggttaaaaaggtttccgaactacaagaagtctccgatcggttcatttgcgaaaaactcatcatctcacgacggtattaaaacaatcgaagctgttaacagttgcagtttttctagaaaagcaagatctttgcatccgtatcatcacatggaacatgaatggaaatgtttcgtatgaggatttagttgaagcttgttggcaaagaaagggaagttcgatttgcttgtcgttggcttgcaaggaagctcccaaagcaaacgttgatcaact

SEQ ID NO: 15013 - DNA, 452 bp, Arabidopsis thaliana
  unsure at all n locations
  Clone ID: LIB25-082-Q1-E1-D9
ttggtagcccttcaggtgcnagtccggaataaccgggtcgacccacncgtccgcaaaaaaacanaaaaccaaaaaaaaaaacaaaanaaaaacaagaaataatggagatgaagaacatctttgtggccctctttatctcggccgtgttagtgagctcagtctccgcggctacaatggagtctccagcaccatcaccaggtgcttcctctgcctccaccgtagcttttccggtggttggctccattgttgctgcatcactctccgccttcttggctcttctcttgcagtagaaagacaagagtcctcaaaatatgagaaggagatatataacaaaactctttttttgttctgattttgttccttagaatctatgatgacaaataacccattttgatgtataatctcattgtgtaagttattacactaatatatatgagtatatgataataata

SEQ ID NO: 15014 - DNA, 75 bp, Arabidopsis thaliana
  unsure at all n locations
  Clone ID: LIB25-081-Q1-E1-A5
nattagaaggaacctattcaaagatggaagctcntcttagcctaaacattcaaccagttgagatcttgttgatnt

SEQ ID NO: 15015 - DNA, 374 bp, Arabidopsis thaliana
  Clone ID: LIB25-081-Q1-E1-A6
ttcgtgttcgccggcggtgacatttacgcgcagaaacgttgatactctctctctctcgacggaaaattcttcctcggagatatggtgacggagctggaagagcttgtcgaatttttgtcatctccttcaccgcctgtgaagaaagctgcggtggaaattgttagtggtttaactggttccgaggaaggtttacaatctctatcaaagtattccgagattcttcttccatcattgtctcagcttctaaatgaaagcaaggaggtatcagagccagcagctcaagctcttgttaatctttctcagaagtgtgaattggcaaagaagatgattcaaatgggtttgattaaagtggccatggacatgttgtataagcc

SEQ ID NO: 15016 - DNA, 330 bp, Arabidopsis thaliana
  Clone ID: LIB25-081-Q1-E1-B10
tacaatctctagaaaatggcgatcacttacttgcttcctctgtttctttctcttatcatcacctcctctgtttcagctaatttccaaagagacgttgagatcacttggggtgatggtcgtggacagatcaagaacaatggagagcttctcactttatctctagataaatcctctggttctggattccaatccaaaaacgagtacttgtttggtaaagtctccatgcaaatgaagcttgtccctggaaactccgcaggaacagtcacaacactttacttgaaatcacctggaacaacatgggacgagatagatttcgagtttttagggaat

SEQ ID NO: 15017 - DNA, 403 bp, Arabidopsis thaliana
  unsure at all n locations
  Clone ID: LIB25-081-Q1-E1-B12
taaagncgtacgcgnnccaaataccggacaggnattcccggntcgacncacgcgtcnggtggattgttttcatcggcgataagtctcttctcctctgggattgaggttggtggtgtgaggtaaagcttcggtagttagagatgaatgcgtccggcttaactgttactccgcccagatttcactttcgatggcgttctgatcgttttggtacatctcagagaagctctcaagcttttactgttcttagcaaattgaataatcgaaattccgcttggcctgttcttaaaagttctcgtttggcgcttcctacacaaagaagaaatgctatgatcactcgtgccatgagtgcttcctttggtgatatggcagacgattcagctgctatcttccctcggatcaatgt

SEQ ID NO: 15018 - DNA, 449 bp, Arabidopsis thaliana
  unsure at all n locations
  Clone ID: LIB25-081-Q1-E1-B2
ggntgggnngggnaactttagcgccaggtgccgtnaggaattaacgggtcgacncacgcgtcngcggacacgtgggtttctgatgcccgcccacctgggatttataaaccagattatattgatgctttatacactttttatcacgaaataaagcctgaaagtgttacttgcccaccaactcctgaatggaagaggtctgccgagcttgatcttaatggtgaagctgttcaagatgatgatgatgatgattctccgcctgaccctgttcaagaaatcaatcaggagaatgtgaagatgtcaaatgatgacactttgggtgatgaaataccccattatcaggaggaagcttaccggcaattctgttataaaatgcttatgatgaatgttgggggaagaggatttatgcaattcccaggttcgcaccctgtatcattagacagggagagttt

SEQ ID NO: 15019 - DNA, 458 bp, Arabidopsis thaliana
  unsure at all n locations
  Clone ID: LIB25-081-Q1-E1-B3
tggggnntgnnggnaactcttacacgctcnagtngccgtanaagaattcaacggctcgacgcacgcgtcaagtcagcaaaagataaaagaactgaaacagtctctaaacagcgagtttcaactcattcacgagttatgcctatatgtcctctcagcttcccaaagacaagagcttatacgtgctacactctctgcattgcatgcctatctttcttggattccgttgggatacatatttgagtcccctttgctggagatcctacttaaattcttccctgttccagcatataggaatctcacacttcaatgtttgtcagaggttgcatctcttaattttggggacttctacgatatgcaatatgtcaagatgtacagcattttcatgaatcagttgcaggcaattctccctttaaatttaaatatccctgaggcatattcaactgggaagtagtgaagaa

SEQ ID NO: 15020 - DNA, 459 bp, Arabidopsis thaliana
  unsure at all n locations
  Clone ID: LIB25-081-Q1-E1-B4
ggnnggggnnngnggnaactcttacgcgttcaggtagcncgtaangaattcanggntcgacncacgcgtcaagcccacgcgtccgcccacgcgtccgcccacgcgtccgcccacgcgtccgcccacgcgtccgcccacgcgtccgcccacgcgtccgcccacgcgtccgaagcatcgaggacgcaacattcgctcgttcctcttgcgaccctgattggtagggagctgaggagcgagaaagtagagaagccttttgtcaagtatggtcaagcagctctcgctaagaaaggagaggactactttttgatcaaaactgactgtgaaagggtacctggtgatccatcatcggctttttcagttttcgggatatttgacggacacaatggtaattcagctgccatatatactaaggaacatcttctggaaaacgtggtgagtgcaattctcaaggngcaagca

SEQ ID NO: 15021 - DNA, 380 bp, Arabidopsis thaliana
  Clone ID: LIB25-081-Q1-E1-B5
tcttccatcatcgaacaaggctatggagtgggtgatgtcatttcccttctatggttcaaacgtagtctacctcgttactgtacaaaattcattgagatatgcataatgctgtgtgctgatcacggtccatgcgtctccggcgctcacaacaccattgtaacagcaagagcaggcaaagacctcgtctcaagtcttgtctcaggtttattgaccattggtccccgatttggtggtgccattgatgacgctgctcgatacttcaaagacgcgtgtgacaggaatctcacaccttatgaatttgttgagggaatgaagaaaaagggaatccgagtccccgggattggacacaggatcaagagcagagacaacaagagacaaaa

SEQ ID NO: 15022 - DNA, 366 bp, Arabidopsis thaliana
  unsure at all n locations
  Clone ID: LIB25-081-Q1-E1-B6
agaatatatatttggaagttttctctgcttttttgttttcgtttgatagaatgggaacagttctcgattcgcattttctggctctcactgctattgtcactgtgatttaccaagttcatattcttcgtaatcacggctcttttcaaatttgatcaagtcactgactttgctggtagcacaaacttcgttatacttgctgtgttaacacttgttctcaaagcctcttggcattttcgacagatagtattgactttgctagttgtggtatggggtcttcgcttggggattttccttctaatgaggatctgcaatggggggaanatngtcccttgatgaacaacgtggaaatatagtgagactaatcat

SEQ ID NO: 15023 - DNA, 407 bp, Arabidopsis thaliana
  unsure at all n locations
  Clone ID: LIB25-081-Q1-E1-B9
ttaccgcnccgtagccgtaanaccggnaaaggcattcccggctcgacncacgcgtncgctaaatttgaagatgagaacttcaagttgaagcacactggtccagggattttgtctatggctaactctggtcccaacactaatggttctcagttcttcatctgcacagagaagacttcgtggcttgatgggaaacatgttgttttcgggaaagttgttgatggatacaatgtggtcaaggcaatggaggatgttggctctgacatgggaaatccttctgaacgagttgtgattgaagattgtggtgagctcaagaacccaagttcataagttcttaaaacattgggtgggttgatcttgacaggttattctatcatatgctgtgaagcagagacagcatcttaancgtt

SEQ ID NO: 15024 - DNA, 346 bp, Arabidopsis thaliana
  unsure at all n locations
  Clone ID: LIB25-081-Q1-E1-C10
cgtgggcanaagttcaccgttacaaccgatggtccaattaatactgctgctggcttgcagtcacgcgttgaatcactcctgcgcaaatctaacagtgaattcaccgtggttatatcacagatgaatggncaagaccatgcatcacgatcccatgtatttactgttggaaaggcgaggataaagctgtcccgaggatggatcacaaaggctagaagaaatataatcaaacctccatgcagctctgtggagtgagaggcaatgctaacgttcctgcaaagggcatttgttctgggcaccttanaaaggggtctaacttccttactaactttcgagtcanagcaagaaa

SEQ ID NO: 15025 - DNA, 404 bp, Arabidopsis thaliana
  unsure at all n locations
  Clone ID: LIB25-081-Q1-E1-C12
nttacatgcncntacagncccanataccgganaggcattccggnntcgacacacgcgtangaagagactctcgccgtctaatgggaagctgttggtctgatggctcttacgctggtggaggaatggtcggtgttggtggtggggctaattcctccgccgccactcctaacgacgccgttgactactatctcaagtctcgtggctacaatggcctcttttctcagatcgagttatctttctctgcttccaatttgcgagaccgggacgtgatttcaaagagtgatgcaatggtggttgtttatacaaaaggaagagatggaacacttgctgaattgtttcgtagtgaagttgttttgaattctttgaatcctaaatggattaagaattttactattggttatcag

SEQ ID NO: 15026 - DNA, 443 bp, Arabidopsis thaliana
  unsure at all n locations
  Clone ID: LIB25-081-Q1-E1-C2
nttttacgcgncnaggtgnccgtanaagaattanaggctcgacgcncgcgtcaagctcggaatcaatggcgagtctccgaagagtcctgctcaacgtaacttcctattgccaacgttctctcactcaatcgtcgtattctacgtcggggatgttatcccgatcggtggtcaagcatgcgaacaatctcggtcaaattcaagctagacatttcacgacaacgcttatgaaatcgggaccaaagcatagtggtacagagcaaggcgtgaagcgaaacagtgcagatcacagacgtagattgctcgcggctagatttgaactgagaagaaagctatacaaagcgttttgcaaangatcaagatcttcccaagcgaaatgcgagacaagaatcgttataagctctcgaaattgccgagaaacagtgcctttgcgagaatcaggaaca

SEQ ID NO: 15027 - DNA, 371 bp, Arabidopsis thaliana
  unsure at all n locations
  Clone ID: LIB25-081-Q1-E1-C7
anaaaanaanaaatgaagaaacttcttttgatatttctcttttctcttgtcnttctccaaactgcttgtggattcggattacgacnacaaggaaatagaaagcgaagagggcttatcaacgctttatgatagatggaggagccaccactccgttcctaggagtctaaatganagggagaanagattcaacgttttcagacacaatgtcatgcatgtccacaataccaacaagaagaaccgatcctacaaanttaagctcaacaagtttgcagatttaacaattaatganttcaagaatgcatacaccggttccaacatcaagcatcacagaatgttgcaaggaccaaaacgcggctcaaaanagttcatgt

SEQ ID NO: 15028 - DNA, 353 bp, Arabidopsis thaliana
  Clone ID: LIB25-081-Q1-E1-D1
tcctcatctttttgtaccgctccgttgcgcctctctcttcttcccttcctctctctagcggcggagttacattgtcggccgccggggaaaccggcgacagtggattctctaaactcttaaactcgctacgtcgattcttaaaggattcatcgccgataacttttatacctccttcttttccgataggatcgggactcattttgtttccaacaccccggatccggtgatttagggcgctttttgatgcttatcgagtaaaggatttatcgatttagtgatcgtttatggaaggaggtggtggttctggtgagcgttcacggattgcttcgaataccctcgaagcttgaaggaga

SEQ ID NO: 15029 - DNA, 348 bp, Arabidopsis thaliana
  unsure at all n locations
  Clone ID: LIB25-081-Q1-E1-D10
gaaccggtctgagcaagagattaagtttagagatgaacaagtcatcatcatcttgtgcctcgtgtgcaacggtggctttgaagtatcaaaggagagtttcaggttcacaacgtttgttcccaactcctatcattcactcaatgcttgcggttgcaacggtctgcgtttgcgtctgcgttttcatgcatgctttcccaatcgtcagacaagggtctcacttcagttggggaggtttggattatggctcaatctagagaactatactatataaaagtattataatttattcttttggtttctcgaanacaanaaaataagaaaaagagaagagactttggtacaaataaa

SEQ ID NO: 15030 - DNA, 130 bp, Arabidopsis thaliana
  unsure at all n locations
  Clone ID: LIB25-081-Q1-E1-D12
actngataccattcttcaagtgatnatatcaccntctttgcagctcttgcaaancccccaacttcacagtatgtgaacgcttctcgttggtacaatcacattgatgccctcttgaggatctcngntgtct

SEQ ID NO: 15031 - DNA, 455 bp, Arabidopsis thaliana
  unsure at all n locations
  Clone ID: LIB25-081-Q1-E1-A4
gntggggnnngnngnaactttaccgtccaggtgccggtnaggaattnacgggtcgacncacgcgtcngcaaattccctggagacaaagaagaggaagatgagctcatggaactacgttgttacggctcacaaaccgaccagtgtcactcactcgtgcgttggcaacttcacaagtcctcaagagctcaatctcattgtcgcgaaatgtactcgaatcgagatccatttgcttaccccacaaggacttcagcctatgttggacgttcctatatatggaagaatcgctactctggagttgttccgaccccatggcgaagcgcaagactttttgttcattgcaactgagagatacaaattctgtgttcttcaatgggatcctgagtcctctgagcttattacaagagcaatgggggatgtttctgatcgtataggccgggcaacagacaatggtcang

SEQ ID NO: 15032 - DNA, 415 bp, Arabidopsis thaliana
  unsure at all n locations
  Clone ID: LIB25-080-Q1-E1-G10
ctcttacgcggttaggnagccgtnaaggaantcaaaggntcgacncacgcgtcaagctgaaatcccagatccgaaaacccaacaatggcgtcagagaacaacggatccagatccgattccgaatccatcaccgctcccaaagctgattccaccgtcgttgaaccgaggaagatagctctgatcaccggaatcaccggccaggacggatcatacctgacggagttccttctcggaaaaggctacgaagttcatggtctgatccgtcgatcatcgaatttcaacacccagcgaatcaaccatatctacatcgatccacacaatgtcaacaaagctctgatgaaactccactacgccgatctcaccggacgcttcctctctccgtcgttgggatcgatgttgatcaaaacctgacgaa

SEQ ID NO: 15033 - DNA, 345 bp, Arabidopsis thaliana
  Clone ID: LIB25-080-Q1-E1-G11
aatgaggccatacgagatctgcttagctcggatggtacatcactgaggctacgagacgatcctgagaaagggacagttgttgaaaaagccacagaggaaactctgcgagactggaaccatctgaaggaacttctatctatttgtgaagcacagcgtaagataggtgaaacctcattgaatgagagaagttccagatctcatcaaatgatcagactgacagttgaaagctctgctcgtgagttcttaggcaaagaaaactccaccacccctcatggcgagtgtgaatttcatcgatctagcaggaagcgagcgtgcttcacaagctatgtcagctggtacaagact

SEQ ID NO: 15034 - DNA, 407 bp, Arabidopsis thaliana
  unsure at all n locations
  Clone ID: LIB25-080-Q1-E1-G12
ttacagnnntacggcccnaagatgccggctaggctcgacgcncgcgtcanggaagaaacaaaagtcattgtggagccnacggcaaatgggactagctctcttcaaaagacatcagatgcaatcagtggaaaggaagtgcaggagaatgctagtggaaaganagttgcaagaaggagaaganagagttgctaaatctcaaatgattgtaanacagagagaagatagggcaaatgaaagcgataagattatcangcantagggaaaagaactggaagaggcacaanagaagattgatgctgctancctcgctgtgaagaaactagaagacgatgtcagttcgaggataaaagatcttgctttaagggaacaagaaactgangtgttgaagattccataganacnaanac

SEQ ID NO: 15035 - DNA, 124 bp, Arabidopsis thaliana
  Clone ID: LIB25-080-Q1-E1-G3
aaaagttaaatttccattattttgtatagtaaaatggaatctaaaataatgaatatcaaaatctacggaaaaaaaaaaaaaaaaaaaaaaaaaaaaaaaaaaaaaaaaaaaaaaaaaagggcgg

SEQ ID NO: 15036 - DNA, 393 bp, Arabidopsis thaliana
  unsure at all n locations
  Clone ID: LIB25-080-Q1-E1-G6
ncgtgnccnanacnccggatagnccattcnggcgtcgaaccacgcgnccgccaaaataccatttccatgttaggatcagaaaacanagngctcnnangtccgatgatgtctacctanagcttctcgtcaagctttaccggtttttggtgaggagatctaacagcaacttcaatgctgtgattctgaaaaggcttttcatgagcaaagtcaacanagctcctctttcactctctaggcttgtanagttcatgactggcaaggatgacaagattgctgtgttggttggaactatcactgatgatttgagagttcatgagattcctgccatgaaggttactgccttgaggtttactgagganggctagggctaganttganaaagctggtggggat

SEQ ID NO: 15037 - DNA, 228 bp, Arabidopsis thaliana
  unsure at all n locations
  Clone ID: LIB25-080-Q1-E1-G7
gtcgacnnacgcgtccggnaagacagagagagagggagggntngagagtcaggggctatttgattcccctggaaaatttcagatatttgtttcttcatcttctttccttatttctctctttctcgtttttaccagatttgtcttacgaactcaattctcaattgatacccanaagtggtagggaagcaangtactgtnttantttgcntttgattctatcaanatcag

SEQ ID NO: 15038 - DNA, 412 bp, Arabidopsis thaliana
  unsure at all n locations
  Clone ID: LIB25-080-Q1-E1-G9
naantcntacgcgntcnaggtgccggtacaggaattaacggntcgacgcacgcgtcaagtcattacctttcttcttcatcttcatcttcacgcagcgacttctttgattcnctctttttattctcagctccaatttcaacctgcatttctctcttctcaattttgggtttctttttttgatatctcatttgatcagatcgacgaagagaggaagaaggtttgagctgagagatctttggaggtagaaagaagatctcaaaaacgatgtcgtttanaggaactcagcagaaatgcagggcgtgcgaanaagacagtgtaccctgtggaagcttccccagctgatggaatctcttatcacaaggcttgcttcaaatgctctcactgcaaaagcagacttcaactgagcaattat

SEQ ID NO: 15039 - DNA, 403 bp, Arabidopsis thaliana
  unsure at all n locations
  Clone ID: LIB25-080-Q1-E1-H10
ntacagnttntntagccgtaaatgccggcaagggtcnacnnacgcgtcagctcgtncctatatccgttttccgatttagggcaccaaattgaatcaaaatctccgcttcttcccaatttacgaaacttcacgaaaaatcttcttcggattcttcttaaccctttctctcaatttttcttccagagttttctaattgggcactgtttctcttcttcttcttcttcttcctccattgtaggcggtttcgcgtcttgtcaccgaatgatacattgtctcacgtgagaatgtcagtcagttagtgcaatgtcaaancttcaatcaactcccaatgggtcaacttcgaaattaacaaaagggtcnggnaaattgnttaacggctnctaatccnggaaaancnggtgca

SEQ ID NO: 15040 - DNA, 187 bp, Arabidopsis thaliana
  unsure at all n locations
  Clone ID: LIB25-080-Q1-E1-H11
ngttagggtnaagtgtcacgatgatgacacgatcggtgatcngaagaancttgtcgcggtacaaaccggtacactagccgagaagatcacgaattcanaagtggtacaacatctacanggatcacatcactctcaaagactacgganatccatgacgggcatggntccatgagctttactacancta

SEQ ID NO: 15041 - DNA, 406 bp, Arabidopsis thaliana
  unsure at all n locations
  Clone ID: LIB25-080-Q1-E1-H12
gtacgcgnncaggtngccgtaaggaattaagggtccacgcacncgatncnggnganaagggacanttcancacggtcacagccgatggaaacgaaaagggtctagcgatgaaaatcggtatcgtcctccaaaactgtcgcatcgttcccgacaagaaactagcggcagagagattaatcgtggagtcatacttgggaaggccatggaagaaattctctaccaccgtgattatcaactccgagataggagatgtgattagaccataaggttggaagatttgggatggggaaagtttccacaagtcatgtaggtacgttgagtacaacaaccgtggaccaggagctatcactaaccgaanagttaactgggttaagatcgccaggtctgcagctgaggtcaatgactt

SEQ ID NO: 15042 - DNA, 398 bp, Arabidopsis thaliana
  unsure at all n locations
  Clone ID: LIB25-080-Q1-E1-H4
ntaccgcccaggtaccggtaaaggaattcacgggtcnacccacgcgtncgcggaaccgtcnatntccgcanttcaaatcccgtccctcacaatgaatcatccgatcaggttgctgtggatattgattaccaccacaatatgttagcttcacaccttaaggtgaattcaaaggaaactattgtcggctggtattcaactggtgctggggttaatggcggtagttcgctgattcatgatttctatgctagagaagtacccaacccaattcacctaactgtggatactgggtttactaatggtgagggtactatcaaagcttttgtctcttcaaacctctcactcggtgatcgacaactcgttgcacattttcaagagattcctgttgatctccgcatggt

SEQ ID NO: 15043 - DNA, 318 bp, Arabidopsis thaliana
  Clone ID: LIB25-080-Q1-E1-H5
tacaccgtcgtccagatttttcaaacgccgacgaagctgatttagtgaatatggaatctaatggatcagtttcatcgatggttaacttggagaagtttctctgtgagcgattggtggaccagtcacaaccaatctcggagcgatttagagctctcttctctcttcgcaacttgaaaggcccaggacctcgcaacgctctaatccttgcatccagagactcatctaatttgttagcacatgaagctgcatttgcattgggtcagatgcaagatgctgaagccattcctgctcttgagtcggttctaaatgatatgtcct

SEQ ID NO: 15044 - DNA, 390 bp, Arabidopsis thaliana
  Clone ID: LIB25-081-Q1-E1-A1
ttgaggagcttcaccgacggctaaaagtgtttcctgagtacaaacttcatttaccgccaaagcatttcctatcaacaggcgtggacatacctgttatccaagagcgatgtgtactacttgacgagtatatcaagaagcttttgcagctacaacgaatttcaggatcaattgaagtttgggacttcctcagtgtggattctcagacttatgcgttctcaagttccttctcaatcattgagacgctaacagttaaacctgtcaataagacatctactgtcgctacaaatatagcaagtatgactcaggcagcaccaggtccgcttcctcggagggaaaatctgagttctgagaatgggatatcggggtcaaaatatgaggaataacgttatg

SEQ ID NO: 15045 - DNA, 344 bp, Arabidopsis thaliana
  unsure at all n locations
  Clone ID: LIB25-081-Q1-E1-A10
cgataatcacgaggtttccctcacttcctttccattgctaaaccaggatttgcctcctgcatttggaaatggacgcttctatgattacnaattccaaatccattacttctccaccctctttagccttagggaagtcaggaggaggaggagttatcagaagttcactatgtaacttaatgatgccaatcaaagttaanttcccnanacaaagaacncanactctaaaggttagccagaagaaantcaaganagctactantggtggtcttggtgttacatgcagtgntggtgataagattctcgtancgaatcgaggtgaaattgcagttcgtgttatcagaacg

SEQ ID NO: 15046 - DNA, 325 bp, Arabidopsis thaliana
  Clone ID: LIB25-081-Q1-E1-A11
gattttttctgtgtcgcaatctcttcttcttattaattcattcaaaacagaaaagtacgggaaaaaggaattgagacggtgggtttcgatggggtcaggtgcatcgaagaatactgaggaagatgacgatggttccaatggcggaggtggtcagctctacgtttcactcaaaatggaaaactctaaggttgaaggagagctcactcctcatgtctatggctctcttcctctcatcggttcctgggatccttccaaagctcttccgatgcaacgtgaatctgcgttaatgtcggagctaagcttcgttgttcctcctgatcacgaa

SEQ ID NO: 15047 - DNA, 341 bp, Arabidopsis thaliana
  Clone ID: LIB25-081-Q1-E1-A12
tgttcttcttcttctttgcaggatcaatcggagagttcaatctcaacagacgaccataccctcgatacagtagctgctccgctcatcaacgtccatttcgccgcctttagccgtcaacgttctctggttctgttgccgtacaaaattcttaaaggttaattagataagacctaaaacggcgacgtgtaagctgtcgtcttcttgacctttttggtgaactcctccttcctctctatcggctatcgctcgctgcgtctctgtgtcttgttgcttggagcaagctctccagcgctcaagaatagataaaataaaattatggattcagatgcatgggaaattat

SEQ ID NO: 15048 - DNA, 424 bp, Arabidopsis thaliana
  unsure at all n locations
  Clone ID: LIB25-080-Q1-E1-F9
nngggggnnngnngnnaantntacngntcaggtgccggtacaggaattcacggntcgacccacgcgtcaagacgaaactaacgatgtacgaagcaatcaaagacaatgatgataatgatcatcaatggcgagagaagaaagacattgagtctgctcttcagatttctcgttcttcctctcttcctcccgacaaggaacgattagtttcccttgatgtctttcgcggtcttaccgtcgcatttatgatacttgtggatgatgttggagggattttaccatctattaatcattcaccttgggatggtgtcacactagcggnttttgtcaatgccctttttcttatttattgttggtgtctctcttgcctttgcttacaagaacttgtcatgtaggtttgtcgcaanaagaaaagcttttgattcga

SEQ ID NO: 15049 - DNA, 384 bp, Arabidopsis thaliana
  Clone ID: LIB25-081-Q1-E1-A2
atcgtctcctttacttcattcgtcttcttcctctctttcccacaagctcccattgatatagagagagagatttaaggaaggaatcatggcagggggtggagctccagcacccaaagcagacgaaccacaaccacatcctcctaaagatcaacttcccaacatttcttattgcatcaccagtcctcctccttggcctgaagctattcttcttggattccaacattaccttgtgatgcttgggacaacggtgctcatacctactgctcttgttccccagatgggaggtggatatgaagagaaggcaaaggtgatccagactattctctttgttgctggcatcaacacattgctccaaacactgttcggtactagattgcctggctg

SEQ ID NO: 15050 - DNA, 439 bp, Arabidopsis thaliana
  unsure at all n locations
  Clone ID: LIB25-081-Q1-E1-A3
ctttacgcgnnaagtagccgncangcggtaaagggnccacggcgcgtcngctctctntcatttcctcttttcgttgacttactaaagtactcttgtttcaatcttcattctagagagattctgtttcatggatgctattttgccagtacccgttgatgggttcaagattcgacaccggttctggatcttgttgcaaaccgaggaacaatcttgaatctgggacgaccaatcgtttcacttgtttcaacgaatctgaatctcagagcaacccttctccgaccgagtctaaggtatgttcagattaccttcctgtctttaagtacatcaatgacatgttgatggaagaagatcttgaaggtcagtcttgtatgttggaagacagtttggctttacaagccgcagagagatctttcttcgaagtgcttcaagatnaaactcc

SEQ ID NO: 15051 - DNA, 349 bp, Arabidopsis thaliana
  unsure at all n locations
  Clone ID: LIB25-080-Q1-E1-D3
gaatcactggtgttagtggtggtgggttacatagtaagagctctctgctactagtagaagaagaagaagaagattgattataaagacttaagatggctgcggcgcattttagtaaggagagggtcttcagagggtttctggtttggttctgcttttggggactgatgtctctaacatgcgctgggagactcagtgtttcaaggcagaattttgaagtgcacaaacacttgaatcgattgaataaaccagccgttaagagcattcagagtccagatggtgacataatagactgtgttcacatatcgaagcaaccagcttttgatcaccctttcctcaaaagatnacaaga

SEQ ID NO: 15052 - DNA, 345 bp, Arabidopsis thaliana
  Clone ID: LIB25-080-Q1-E1-D4
aaaaagaaaggaggaagaagtatcgtttcgaaagaggggagtctcaggaaaaaaaggacagaatttttttccggtgacagtgtcggtgtctctgacgctcctctctgttttcaatctttctccgtctctccctgaatgccttcgtccgtattcaggaaaattgcggcgattcatggttggaggagcgaatacttaaagggcacaatggattcaagcgaagcaaaggacacaccatcttgtggctgtatatagatccaagttgatttgtaggtttttaaaaaaaaatacgaaattttgttttagttgtgtaaatatataaataggagtgccaaagagttttggcat

SEQ ID NO: 15053 - DNA, 344 bp, Arabidopsis thaliana
  Clone ID: LIB25-080-Q1-E1-D6
caaaaggttttgaacgagtgtgtggaagcagaagcatggctgcgggagaagcagcagcagcaggacacgcttcccaagtatgccacaccggctctcttgtcagctgacgtaaaaagcaaggcagaggcattggacaagttttgcaggcctataatgaccaaaccaaagccggcggctaaagcagaggcaccacaagccaagggaggtgagcaggcggatgagggcaagagtgagccagagcaaccagcttctgccgaagcaatggagactgagaatcccgcggaaggtagtacctaaatgaatgacgagagcgagatggtgtttgttgtatcgattttgtttta

SEQ ID NO: 15054 - DNA, 329 bp, Arabidopsis thaliana
  Clone ID: LIB25-080-Q1-E1-D7
atgaatgtttctggagaatgtgtaggccgtgaaagatgcgaggaattagccaagtcttcttcgttttaccggaaagtttactcggaggatgtgccatatatgtttacactagaatggtcaacaagttcaagattgaaggatgtaatgcaccaattccaaaagcatttggactatcttcaagaattttggtctgtcttggacaatatcgataaatctctatgtgttgttgatgtcaagcaaccagctcgtgcctctgctattcgccggattgatgctgggaatgattgtatcatcattgttcatatcgacttcaaagaccctaaatccct

SEQ ID NO: 15055 - DNA, 348 bp, Arabidopsis thaliana
  Clone ID: LIB25-080-Q1-E1-E10
caagatgtgcatgtccataatgccttgggtaaaattatcatagacagtaacaacaaccccgagcatttcctgaccaccaatccttactacgactctaaggttgtgggtaagtactgcgagaaacgtgatcccactctggctgttgtggcatacagaagaggacaatgtgacgaggaactcatcaatgtcaccaacaagaactctttgttcaagttacaagccaggtacgtagtggagaggatggatggtgacctctgggagaaggttcttacggaagaaaatgaatataggaggcaacttatagaccaagttgtgtctactgctttaccaagaaagcaagagcccaga

SEQ ID NO: 15056 - DNA, 325 bp, Arabidopsis thaliana
  unsure at all n locations
  Clone ID: LIB25-080-Q1-E1-E11
ttcttcttcttcctcttcttcctcttcctcttctctaatctgaatccaaagcctctctctttatgacacaagatcgctcagaaatgtctgaagatgacgatgaccaacaatctccaccgttggatctaccctctaccgccatagctgatccttgctcatcttcctcttcaccaaacaaatctcgtaactgtatctcaaattctcaaactttccctgaccatgttctcgaaaacgtacttgagaacgttcttcagttcctagattcaaagatgtgaccgtaacgctgcttctctagtttgcaaatcttgggtggcgtgttggaant

SEQ ID NO: 15057 - DNA, 406 bp, Arabidopsis thaliana
  unsure at all n locations
  Clone ID: LIB25-080-Q1-E1-E12
cttgtacgcgnncaggtgccggtaaggaattcacgggtcgacncacgcgtcangaattgctatgattttactctgagaatcagaagaagaaatctcggtgagcaaaatccctagttttgggatgatgtttccacgactacgattgacgaaggtcttcttctccccgatcatcgccgggaaatggatcgtctttgccgacggtagcagcggcggcggcgttggtagaaatggctactacggtggattgtggtcgtcggccgttattccttccaatgttggtttagctgtcgctgtcaccgtcatggccgtggccgtcgctttcaccgtctactctcgtagaggaagcattggatcaccgtggtcactaaggagaagaaagcgagttcttcaacctaaacaatggaat

SEQ ID NO: 15058 - DNA, 409 bp, Arabidopsis thaliana
  unsure at all n locations
  Clone ID: LIB25-080-Q1-E1-E6
ttttaaagnncntactgncccaannaccggttaggcattccngngtcgacncacgcgtncgcagaaaacaaaaaaaacaatggcggataagctcactgacgatcagattacagaatacagggaatctttcaggttattcgacaagaatggtgatggttccattacgaaaaaggagctcggtaccatgatgcgttcaatcggtgaaaaaccgacaaaagctgatcttcaggacttgatgaacgaagcggatttagatggtgatggaaccatcgatttccctgagttcttgtgcgtaatggctaagaatcaaggtcatgatcaagcgccgcgtcacactaaaaaaacaatgggcggataaagctcactgacgattcagattcagaagtacaagggaatcctttcaggttat

SEQ ID NO: 15059 - DNA, 400 bp, Arabidopsis thaliana
  unsure at all n locations
  Clone ID: LIB25-080-Q1-E1-E8
tttaaaggccgtacngncccaaataccggntaggnattccggngtcganacacgcgnccgacttgcttcatcttcattcgtcatgatttccctctttttttactttaccaatttcttgaattcttaaacccaaagacaaagcctttcgatttcctatagatactttcagatgtctaagaactcaaacgttgaagagaatggaggagcaaagccaatctgtgaagctttgaggagattcaaaaggtcgaggcttgtgttcgagccgtctttaggagtgttggggtttttcttggttggggtctgtttggtttgcagttttttcttctttgattacagaagcgttgctaaaagctatggcctttcggataaatctgagngattcgtntggctcnaggttgng

SEQ ID NO: 15060 - DNA, 311 bp, Arabidopsis thaliana
  Clone ID: LIB25-080-Q1-E1-E9
caacactaaacctgaaacaaacgtaaatccgccgcaacaacccagttttttccgacggcgtacaagcttcctccgccgtaacgccgtcgtttaataccaagaagcttgattaggtttccgtagtgtgtgatttttttaaggttctgaacactgatgtcaaacccattgaaagagtcaagagaggatattgcaaattctactcctcacatgagggataatgagtatgttcggctagttgtggctcatgaagcctccccagctgaaaccgtgttgtctctatcgcaatcagaggtgcagagtaagaaatttat

SEQ ID NO: 15061 - DNA, 208 bp, Arabidopsis thaliana
  unsure at all n locations
  Clone ID: LIB25-080-Q1-E1-F10
gntcatagtgcattctnganntttgcatcggttgcaaattgtggattacgggtaccgacncccctggtccatgagcaatgttcccggtccaacctctatgcctctagttggtcacttgcccttgatggcgtagctttgggcctgatgtcggtctccgttcctgctaatncactattgnccaagttncatagttcanacggngaaggga

SEQ ID NO: 15062 - DNA, 338 bp, Arabidopsis thaliana
  unsure at all n locations
  Clone ID: LIB25-080-Q1-E1-F11
aacgcaaaaatcagtttctctttgagtaagtgtttattacaattaaactaactcaggcaagtctatgatcatggcttcttctgctgctgcatcgatctctatgataantctaaggaacctctctcgcaatcatcaatctcaccaaagcacttttctcggtttctctagatccttccataaccaaaggatctcatctaacagtccaggtctctccacacgagcaagattcaccacttcctccactggaggtttcttcagaaccatttgcagcagcagtagcaatgactactccagaccaactaagatccangagcttaacgtctacgagttcaacgaag

SEQ ID NO: 15063 - DNA, 331 bp, Arabidopsis thaliana
  unsure at all n locations
  Clone ID: LIB25-080-Q1-E1-F12
ggaggatttcatcatttcaccaattccatctctccttttgggtcaaaccnaaacccaaatcnaaaccctgnangtgtcnctactggattcgtgtctcctcctttacccgttgactcttctccggntgattcgtcagcggcggcggcnggagctttggttgctcctccttcaggtgacacgtntgtgaagcggaanagaggacggcctagaaaatatggataagatggtggttcngtttcgttggcattgtctccntctatctccaacgtttccccgaactctaacaaacgtggccgtggaagacctcctggctccggcaanaancaacggg

SEQ ID NO: 15064 - DNA, 422 bp, Arabidopsis thaliana
  unsure at all n locations
  Clone ID: LIB25-080-Q1-E1-F2
ngntgggngnnnngnggnnanttttaangntnnngtgccggtnaaggaattaacgggtcgagccacgcgtccgctttcaaacaaataaactcagaaaaaatggccgaaaccgaaacggagtcgatcaccacctcttctccaccgccgatctcagaaaccgaaaactccaccacattaccaacaacggagacggagaagaatcccaatccggtaaccatttccctcagaatctggccaccgactcaaaaaactcgcgacgccgtgattaaccgtctgatcgaaacactgtcaaccgaatcaatcctctccaagagattcggatctcttgaatccgaagaagcttcctccgtcgcgaaatcaatcgaagacgaagcttacgccatcgcttctgccaccgtattcggtgatgacgacggggatng

SEQ ID NO: 15065 - DNA, 400 bp, Arabidopsis thaliana
  unsure at all n locations
  Clone ID: LIB25-080-Q1-E1-F4
tttgtacgggnncaggtgccgganaggaattaacgggtcganccacgcgtncgcccaagcgtccgattgtattttctcttttagggattgtttttttaacaatttttgccttgccataagcaatacaaccatggcaaggatctctctgttgttctcattagcctttgttttagccctcggctcagtgttcctttccgtttccggtcacgctcctcccgtgacaccgagaaaatcagcatgtccaaaaacagtatccgaactccagaccttaccttttaccgaaatcactgagatcctaaaccgaaaagagcggtctgccccgaaaacccctgagttcaaggcaatgttcacaatgtgcaaaggctacgtgacatacctcgagagcctctacaaagtttga

SEQ ID NO: 15066 - DNA, 337 bp, Arabidopsis thaliana
  unsure at all n locations
  Clone ID: LIB25-080-Q1-E1-F6
tcaaatgttgagttcttgactcaggtctctagggtttccaagctgaagcacgataattttgttgagctcttcggttattgtgttgaagggaatttccgcattcttgcgtatgagtttgctactatgggatctttacatgacatcttacacgggaggaaaggagtccaaggagcacaancaggtcctacgcttgactggatccaacgggtcagaatagcagttgatgcagctagaggacttgagtatttgcatgagaaagttcaacctgcagtaatacacagagatattcgatctagcaatgtgcttctctttgaagattttaaaagccaagatcgct

SEQ ID NO: 15067 - DNA, 65 bp, Arabidopsis thaliana
  unsure at all n locations
  Clone ID: LIB25-080-Q1-E1-F7
cggtcaatacgtcggngattctccgttanagcttgaacgtatcgatgtcaatttcaacgaancta

SEQ ID NO: 15068 - DNA, 330 bp, Arabidopsis thaliana
  unsure at all n locations
  Clone ID: LIB25-080-Q1-E1-F8
tttttctcgctttgccgtcntctccggngattttcagacactaattttctctccggttgttgcaatcanattttctgtcggaagatattgaaatcagaaaccgggaaaaatgacttcgtttcttagtttctccgccatttcagctcatccacctactttttccggcgcttcatttcgtcctcgctctttctctccccgantgttcaagtcttgtgttaagtgcacttatgctgaagctggattaagcagcncttcatggtcagcccctattgacattgtggcagatgtcaaatccgaaagggttgtagttcttggtgggaatggtttcgt

SEQ ID NO: 15069 - DNA, 345 bp, Arabidopsis thaliana
  unsure at all n locations
  Clone ID: LIB25-080-Q1-E1-D2
anagagagaagatggcgagtggcctcgaggatatcgtgaacgagaatgttgatttggagaaaatacctattgaggaagtgttccagcagttgaaatgcagcagagaaggtttatctggagcagaaggagaaaacagactccagatctttggccccaacaaactcgaggagaagaaggaaagcaagttactcaagttcttgggttttatgtggaaccctctctcttgggtcatggaagcagctgcaatcatggctattgccttggctaatggcggtggaaagccaccggattggcaagattttgtcggtatcgtttgtcttttggttatcaattcaactatcagtt

SEQ ID NO: 15070 - DNA, 306 bp, Arabidopsis thaliana
  unsure at all n locations
  Clone ID: LIB25-078-Q1-E1-C2
ctaaaacatccttctttactatatatatctttcgctccactacgaaggttattttcgtaattcgacacaattccttacagagaataagcgaacagatcaacaactactctgcncttacaggcgacgacgtcaacaacaacccanaataccaaaaaccctcaaaagtctcaaacaaaactcangacccaacaattaaagaaacaacatttcantatacagatttacttccttttacagnttttcctaaganaaccggnagttganacaaacannnccangnnggacggttaccttttttccagtnga

SEQ ID NO: 15071 - DNA, 401 bp, Arabidopsis thaliana
  unsure at all n locations
  Clone ID: LIB25-078-Q1-E1-C4
atcgatcntatcgcaggaaggtaagnagtaagaagaccanaagggactgctcctaagtccgatgatgtctacctaaagcttctcgtcaagctttaccggtttttggtgaggagatctaacagcaacttcaatgctgtgattctgaaaaggcttttcatgagcaaagtcaacaaagctcctctttcactctctangcttgtagagttcatgactggcaaaggatgacaatattgctgtgttgggntggaactatcactgatgatttgagagttcatgagattcctggccatgaaggttactgcctttgaggtttacnggngaagggctanggctacgaanttgagaaaactgggtggagangtgcttaaaccttttgaccancctttgctctcanangctcc

SEQ ID NO: 15072 - DNA, 394 bp, Arabidopsis thaliana
  unsure at all n locations
  Clone ID: LIB25-078-Q1-E1-C5
tctttttttttttttggtgtcacgaaaacgaacgaatcagtgtcggctcttgggttccgaacaaaaacaacattgtacgtcggatccaaaaaacgcgcgttatataaacgcttaatttctccaggattcttcttctgcttccgccattgctcgaaaatcgcgtcttctgacaatgtgctgaaactgagtcatcgtccgagttagcaaagtgaaacttcgaagtttctcttacactaatctcaggtttgggattttgtaangaaaccgcgtttacaaaatgttcaagttgaagcaatggttgatttatttgggtgtgttcgttagtaataatgaacacagaaggactgtttggtcaatattacatttgttcgaaacgcaatcgcctaaaggggcc

SEQ ID NO: 15073 - DNA, 384 bp, Arabidopsis thaliana
  unsure at all n locations
  Clone ID: LIB25-078-Q1-E1-C8
acaaaagctatctccgaggttagagcaatggcagctgtgaactgccatttcttccagctatcacgacatctcaaaccttctaggccttctttttcctgctctgcttctcaaccttcacaaaacaacattaaggtaatcataaatggagctgctaaggaaataggtagagcggctgtggtggctgtgactaaggctaggggaatggagttagctggtgctgtcgataatcattttgttggcgaagatattggcttgctgtgtgacatggaggagcctttagagatacctgtagtgagtgatctaacaatggtgttaggctcaatatctcagggaaaagaagtcggagttgtgatcgactttacagaccatcaacagtgtatgnga

SEQ ID NO: 15074 - DNA, 368 bp, Arabidopsis thaliana
  unsure at all n locations
  Clone ID: LIB25-078-Q1-E1-C9
ttgattcctttaattgaaaatccaataaacaagcgggacctcgatttgaaatctctttatccagatccatctctccgtcacaatcttccatctaccgtcaccggaaccggcgagttagtcgtcgggattccagatctgtttgtctacgtcttccttctgtctctgtgttcatcagagtaccaattcgctcgattgttgctgcatttcgcgaattgtattaggtttatagcgtctatgaactcctgttttcgctcgatttgagtaacctaggtatttctctacgttgattgtttggatttgaagaaaangcgcanagtatgagtagaaatttcggaaagtttcatgaagatttgagggattgagttatg

SEQ ID NO: 15075 - DNA, 93 bp, Arabidopsis thaliana
  unsure at all n locations
  Clone ID: LIB25-078-Q1-E1-D1
gannaatgtccnatgacgccattgagaagcctctccaagcttggctcagaactgccggccgtttctcgaataattccttcangggattagnta

SEQ ID NO: 15076 - DNA, 129 bp, Arabidopsis thaliana
  unsure at all n locations
  Clone ID: LIB25-078-Q1-E1-D10
aacntccgnttcggttaaatggagtctaaagagttggtagtcgaagaangctttgcaattgccggattatcctgataagaaggatgttgattcggttntaaaagangctttcttcatttcctcctaang

SEQ ID NO: 15077 - DNA, 399 bp, Arabidopsis thaliana
  unsure at all n locations
  Clone ID: LIB25-078-Q1-E1-D11
gcntcttctaaagttcggacacttaggatttatcgccggagttttgaacatggatgggattcttgcagctgttccatctgcagtgtgtgtctctctacgcatttcttgtcggaatctggataatgctgaatccatctatcattttcccggcaaatccttgaatcgagtttcagtgcttcaaactgggaactacgtctctcgtaaaggcaattcgttgcttaaaaaccgacattgtggtgaaatttcncgtgtgatcgtaaaatccgccgcttcttcagttgggaaatgcagaggactacgctgaagaaacggctacaagtgtaaaagtttaagagatcagtgacattaccgggttgttctagcccgttgtcnttgctcggcactggggtttaggganaa

SEQ ID NO: 15078 - DNA, 399 bp, Arabidopsis thaliana
  unsure at all n locations
  Clone ID: LIB25-078-Q1-E1-D6
tccctgcgacgcacccaacctccgtctctctctctctcanatcggcggccatctccgtcgagtaattgaaatctctctcagccgttggattcgaattccgccgcatcttcatatacctcgtttcaatcctgcggaaccctagttgctctgaattgtggtttgctactgtgataagttcttcagtggtanattaggaagcaccaccaatggagattgtgtaagacatattcattacagctctcttttaaggattatggggtctgtttgctgtgtggctgcaaaggacagaaatgttcccagtggagctattgataattcagtgtgttcaccatcgtggagttttcgacgcggacaacaangaggcnntgtangctgatgagattannagattcatctang

SEQ ID NO: 15079 - DNA, 326 bp, Arabidopsis thaliana
  unsure at all n locations
  Clone ID: LIB25-078-Q1-E1-D7
cttccgtggtgtatgttgaagatgcctgaagaaagattcaccaaactcatatcaacactaaaacctcatcacacttcttcactcggtgaatctttcttcaggcctcttcataacagaaaaaaaaaatgatgtcttacgttgctaacttggtcatcaagagttttgaccgtgcttccgtggtgtatgttgaagatgtggtggatagctctcgagcgacatgtgttgagaatggtggngatgacgatgacagtggctatgattatgctcctgctgcgtgattgtctcctattagtataatgtaatttagaagaaanaaagaaaaaaag

SEQ ID NO: 15080 - DNA, 398 bp, Arabidopsis thaliana
  Clone ID: LIB25-078-Q1-E1-D9
gcccacgcgtccgtgtctctcttcttcccgcggagctttcagtttttgtttggtattgcttggtgtggggaagattagatagtgtgaagaatggcagtagctacacattgtttcacttcaccttgtcatgaccgtattcgatttttctcaagtgatgatggtattggtaggcttggcattacaagaaagaggatcaatggcactttcttgctcaagattttacctccaatccaaagtgctgatctcaagaacaactggtgggagatcctcacgtcctttatctgcattcaggtcaggattctctaaggggatatttgacattgtgccattaccatcaaagaatgagctgaaagagctgaccgctccgctgttgctaaaactcgtggggtgttttaact

SEQ ID NO: 15081 - DNA, 395 bp, Arabidopsis thaliana
  unsure at all n locations
  Clone ID: LIB25-078-Q1-E1-E11
gagtcagaatatcatcagccgcctctttcacttcaaccctccttaaacctcatctctttcctactccgccgctctctccgtcgtctctcccgttactccatttctctcgacccctccaggtgaaaatggctgggaagtcgaacaaatcgaaggccaagagagcggctcagagcactaccaccaattccactactgatgttaaatccgatgctcctgctcctcctgttgctgctactgttcctgctactgctccggttactgctgctgctgctccggttgctactgctgctgctccggttactgctcccgataatggcaccctcactgctgttgactctgcggtgcctgaaagccaatgaagttgctcctacgattcctaanggtgacnaaagtga

SEQ ID NO: 15082 - DNA, 381 bp, Arabidopsis thaliana
  unsure at all n locations
  Clone ID: LIB25-078-Q1-E1-E6
gcggagagaggccgtgttcttgacggcaatgctggtggtcgaaaccagcgtcgtcggaataagtactttgtttaaatttgcaacttcaaagggactcaacatttatcctttcctcggctattcttatcttcttgcttctcttcttcttcttccttctcttttcttcactaacaggtcaagttcacttcctccactaagtgtctcaatacnttcaaaaattgggncttcttggatttctaggatcaatgtangtgatcacaggatacatacgcatcgaatacagcagcccaaccttangcctccgccataaacaatatcactcctgctcttaccttcatcctcgccattancttcanaatgggaaaaagtatcnttcaaagg

SEQ ID NO: 15083 - DNA, 193 bp, Arabidopsis thaliana
  unsure at all n locations
  Clone ID: LIB25-078-Q1-E1-E8
atggnttgaagattcagaacaannacngtgctgtgaatactccgcgtgccctcggtgacatcggggaatcttgtttctgttccgggagttcaaggaggaaaggntcaacctccgattantcgacccattactcgangtttccgtgcccagttattaggcgaatgcccaactcgagngaaagccaatcaangga

SEQ ID NO: 15084 - DNA, 399 bp, Arabidopsis thaliana
  unsure at all n locations
  Clone ID: LIB25-078-Q1-E1-F1
tcttgtggcattatcgggtgaagaagaagccaccggtnagatatacaaaaacactattttctcagctgttcctcctttgttccctantccaccacctccaccaggcaccatggaaaccttgagaaagctanacttgtgtgattctgtcgctgctgccaaaaaaaatgaatgaggtaaaaaggatttgggtgtgagaccatgaagattagaagctaaacacaagtcagccananccaaactacnaangatttcatttggcnttactatatacaaacacggggtgggttactttaccacacagcattgtcnttcntttcnttttttgggttgctgttttgttcttgtgagatatcatatntatctatgcgttttactccngtatatgtttgataccaaang

SEQ ID NO: 15085 - DNA, 389 bp, Arabidopsis thaliana
  Clone ID: LIB25-078-Q1-E1-F11
agcgagtgggatgagttcaagaaccttgatttccagaagatctttgacaacatgcagaaaccagctttcgtgttcgatggaagaaacattatgaatctgcaaaagctaagggagattggtttcattgtttactccattggtaagcctctcgacgactggctcaaggacatgcctgccgttgcctaatgatgttcattgctgactctttcgtcctccatcatttgtgcttttcttcttcttgtggtttgtctttaagacttgttatatttcttacaatatgtttgttatgttctctggtgtgtgttttgttttttttggtattactttcatatttttttggtcgaagaggacttgtattcgacaatgtcgcttcaattttgttgtttccc

SEQ ID NO: 15086 - DNA, 407 bp, Arabidopsis thaliana
  unsure at all n locations
  Clone ID: LIB25-078-Q1-E1-F2
ggaatcaaacaatggtgtttgtgaagtccaccaagtcgaatgcttacttcaagaggtaccaagtgaagttcaggagaagaagagatggaaagactgactacagggcaangatccgtcttatcaaccaagacaagaacaagtacaatactcctaagtatcgttttgttgtccggtttaccaacaagagacatagtggcacagattgtatctgcaagcattgctggtgacattgttaaagcttctgcttangcacatgaactgcctcaagtatggtctcactgttggtcttacaaactatgctgcancttactgtactgggccttcttttggctcncccgtgttttaaagatgttggaaatggatgacgagtatgaagggaaacgttgaaggccactggagaaagactt

SEQ ID NO: 15087 - DNA, 361 bp, Arabidopsis thaliana
  unsure at all n locations
  Clone ID: LIB25-078-Q1-E1-F5
gcacacgtctttctccgaaactcgtctganagaggctctgagattcgatgtcgttcgaggaagaanaagaggaggaaacattcgagcatacacttctcgtggtgcgtgaggtctccgtttacaagatcccgccgcgaaccacatccggcggatacaagtgcggcgaatggcttcaatccgataangatctggtctggtagactccgcgtcgtatcgtgcaaggatcnatgcgagatccgcctcgaggattcnaattccggtgatnttttcgcaacttgttttgtggatcctgaacgtanagagaactcngtatagccgtctctcanattcnnctangtatttcgttctcanagnttgntga

SEQ ID NO: 15088 - DNA, 52 bp, Arabidopsis thaliana
  unsure at all n locations
  Clone ID: LIB25-078-Q1-E1-F7
tnggctcccgtgggcctttgtgttgcagnnacttgttgtcattcttaatgac

SEQ ID NO: 15089 - DNA, 444 bp, Arabidopsis thaliana
  unsure at all n locations
  Clone ID: LIB25-078-Q1-E1-C12
ttggtagccttgnaagcccnaaacgngcaancccgggnccccgggtcgatccacgnntccgnngnnanattgaantcggcctttttcccgacaatctgagtttctcaggcagagaagacagagattttcaccgtaagggcaaaaaacgaaaaactctgtctctctgtttctgtttcgtccttccttggctttgatttcttacaccaaaagagacatctttaaagaatctcacattgttccctattgcttgtctcacaagagaatccttgatctagggttcttgcttccctcccctgtttttttctttaaattcctcctctgttttctttttgttctcgtcggagtaagaaagagatggagctaggagatacgacgtcggtgattccagactcgttcatgggatacagagacgacntaaacaatgcaaatgtcaatggttttggg

SEQ ID NO: 15090 - DNA, 429 bp, Arabidopsis thaliana
  Clone ID: LIB25-077-Q1-E1-G8
ctgctggcaaggcagtaaaagttgagcattgtgagagagttcatgtgattgtagctaccaaacgaatttgcatcgccaattgccgtgaatgtgtgttctttttgggagtcaatcagcgacctcttatagttggttataaccacaaactacaggttgctccatataatacattttactcacacttggaggagcacataaccgaggtaggaattcagccaactatcaacaaatggaacgaatccttggcgctcggagcaattgatccgcatgactcactatcacatccgactggtgcctctgataaacaagctgaaccggcttcttgtgtggaccctgaccagttcactacctttttgatcccaaactgggtttgcgggtgaggcgattggttccacgaaagacaatccatttccattgccagatgcatat

SEQ ID NO: 15091 - DNA, 90 bp, Arabidopsis thaliana
  unsure at all n locations
  Clone ID: LIB25-077-Q1-E1-H11
cntaggaacaacttctctccctcctgttaatcccgccgtttcttacattttcntcngtttttttcccgggaaacagaaggnaaattttcg

SEQ ID NO: 15092 - DNA, 456 bp, Arabidopsis thaliana
  unsure at all n locations
  Clone ID: LIB25-077-Q1-E1-H2
aaggatctccttcaaacgctcggaagtttccgctttggattcctgtcaccggcgatttcgtgggatgataacgacgccgagctatatttcgtgactgaagcaaagtgatgattcttcgattgaaagaccaaacgctcatcaaaatcaattcaactcgttcgtacttatcttccttagttttccgacgagattctcactcgcaggctcggacaaaacccgatcacgaccgccggagaagagggatacnananggatgtgagaatcgatgagaataagggacacgaatgggantgtttctgngcaangancaaagggcaacaacttcttaccaacacnagaagcctccgactccaattgntcngangctccgatatcaanggcggactgganacaagtccctgggagatntgggacctgggactggggnaatctcaacgatngnaacttctttganng

SEQ ID NO: 15093 - DNA, 286 bp, Arabidopsis thaliana
  unsure at all n locations
  Clone ID: LIB25-077-Q1-E1-H4
gcaacangacaccacaaaccctaaatttcgtcaactccacagngactcgattcgatcaaggaaatggcgtacgcttctcgttttctctccagatctaagcagctacaggggggtctggtcattttgcagcagcaacatgctattccagtccnagcttttgctaaagaagctgctcgtccaacctttaaaggagatgagatgttgaagggtgtcttttttgatancaangaacannnttccaaggnctgctgttganantctcccgttnagggaaaaagntnaccct

SEQ ID NO: 15094 - DNA, 295 bp, Arabidopsis thaliana
  unsure at all n locations
  Clone ID: LIB25-077-Q1-E1-H6
agcgattggaaacgcaaccaaagttgttgttacggtcggggcaacagagaatggtccggacgcccaagtttcgacctcagacgcattgctcgtggtccaagcagctgagctagccggcgtaagccacgtggcgatagtctacgacggcaccatcagcgggtccacatacaacgtgctcgactggattacttcgnttttcggnaatcntttcgcaagaatctcaggccattgantatctcngaccncaatcgngaaantacctcanaccggngttgcnntanacactcataangac

SEQ ID NO: 15095 - DNA, 148 bp, Arabidopsis thaliana
  unsure at all n locations
  Clone ID: LIB25-077-Q1-E1-H8
nttnaacctcctaaaggggggcaacgttaaagtccaaaagacgaatgaatcccctggcaacgtcgctgaatttggngtacaaagcaattggtgaantggggtttaactgaantgtttgggggatnaaaaaccttcaaattggtgcngg

SEQ ID NO: 15096 - DNA, 388 bp, Arabidopsis thaliana
  Clone ID: LIB25-077-Q1-E1-H9
acgattcgtcggtaccaaaaccctccgagaagtgtttcaggtgggaaggtatctctgtctacacgatgtccggcgaggaagaagccaccgtgagggagccactagatctgattaggctgagtctcgacgagagaatctatgtcaagctccggtcagaccgcgaacttcgcggcaagcttcacgcgtttgatcagcatttgaatatgattctgggtgatgttgaagaaactatcactacagtagaaatcgatgacgagacatatgaagagattgttcggactacaaagcggacgattgagtttctattcgtgagaggagatggagtgatattgggtgtctccaccgctgaggacagcagcctgagttcaaactcaaatcttttgtgtcc

SEQ ID NO: 15097 - DNA, 406 bp, Arabidopsis thaliana
  unsure at all n locations
  Clone ID: LIB25-078-Q1-E1-A1
cgacaaagcctcatgtgtcaaaactctcgagccggtcaagagcgatgacccaaacaagctgatcaaggctttcatgctcgctaccagagatgctataacccaatcatcaaacttcacgggtaaaaccgaaggaaacttgggttcgggcatctcgccaaacaacaaagccgttcttgattactgcaagaaagttttcatgtacgcgcttgaggatctcagcaccattgttgaggaaatgggtgaagatcttaaccagatcgggagcaaaatcggccagcctaaacaangggtaanccggtggttannaaataccaaaacctgantggccttgaccagntcnnagnaagatganttttagaaagaccantntggnaaggnaattncaagctccaanagtttncccncg

SEQ ID NO: 15098 - DNA, 385 bp, Arabidopsis thaliana
  Clone ID: LIB25-078-Q1-E1-A10
agaatccttacaagaccatttgtgtctgtctccaccaaacccttcttttctccatttttcttttttgctttgtttctgtgctacgatttgtcaaaaaaaagaaacccaaatcaaaagcttcgaaatttcataagatttctttgtttttctgaagatccaaggcacacaaaaaaacagctttttttgtttcttcaatcaaggattttccagggttttgataaccccatgggttcagggttctctctgtttcaaaagaatttatccgtccttgttatgggagatcgaagatctgttgcagcctgggtttaggagatttgcctgaaagttgtgtggctttgattctccagaatttggatcccgttgagatctgtagattctccaagcc

SEQ ID NO: 15099 - DNA, 400 bp, Arabidopsis thaliana
  unsure at all n locations
  Clone ID: LIB25-078-Q1-E1-A4
cgagtctcttacgcccagagagagagagagagagaggcttgtttgttttctctcctctaagaaacaatcagtctcataaagtggcaaagatggttgcagaacgatacacagtcgatttgaataagccacttgtgtttcaggttggtcatcttggcgaagaatatcaggaatggattcatcaacctattgtatgcgttgagggtcctcgttttttcgaaagtgatttttgggagtttttgactcgcacggtttggtgggcantcccaacaatctgggcttccagttgtttgctacgttctttcaatatcggcgaagtaagggacttacgtttccccagatcggtttaataagttgcttttggngtactcacgtggacactgctcgaagtacacgcttcatc

SEQ ID NO: 15100 - DNA, 363 bp, Arabidopsis thaliana
  unsure at all n locations
  Clone ID: LIB25-078-Q1-E1-A7
cgatattgccattctaactggagcaactgtgatcagagaggaagttggtctttctcttgacaaagctggaaaagaggttctgggtaacgcttccaaggttgtcctgacaaaggaaatgacaacaattgtgggtgatgggaccacacaagaagcagtgaacaagcgtgttgtacagattaggaatcttattgagcaagcggagcaagactacgagaaggaaaaattaaatgagagaattgcgaagctctctggtggagttgctgtaattcangttggagctcaaactgagacaaganctcaaagaaaagnaactgaaaatgggaaatgccctaatggcaaaaanggctgctgttnaaggaaggt

SEQ ID NO: 15101 - DNA, 119 bp, Arabidopsis thaliana
  unsure at all n locations
  Clone ID: LIB25-078-Q1-E1-A8
aattgccntgaatggnctcgcaacttcttcaccaancaattctccggcgttgatatcctctccggcagaaggtaatcttttcatcaaggtcagtaaagatcgagaaagtcngaangcga

SEQ ID NO: 15102 - DNA, 401 bp, Arabidopsis thaliana
  unsure at all n locations
  Clone ID: LIB25-078-Q1-E1-B2
ctctctaacaagaagaacaccgatgaagaaatcttcatcaagctgggatctgacaaggaaaaacgcaaagatgctactgagaaggccaaaaagtcgttgagcattaatgagttcttgaagccggctgatggaaagaggtacaacgggagaggtggaggctcccgcggaagaggaggtcgcggtggtcgtggtgaangaggaaaccaaaggtatgcanaagaagctgcagctccggcgattggagacacagctcagttcccttcgttgggctagtaaagacccctgggtccttcagcctcgctatctctgtctttcgtttctctttgggttgaattttgttagttttanaantttttgttacacnttctgaaggtcttttctgcgaaactattacntttttt

SEQ ID NO: 15103 - DNA, 401 bp, Arabidopsis thaliana
  unsure at all n locations
  Clone ID: LIB25-078-Q1-E1-B3
atctaacccatagtttttctttatatataatgtgaatatggaaaacacaagacttcatcttatattcatcaatcttattcttattttctctctgcagttttcaaaaactttctcactgttatctgcgtctcttttttggatcaatggcaaacgctgaacgtatgataacgcgcgtccacagccaacgtgagcgtttgaacgaaacgcttgtttctgagagaaacgaagtccttgccttgctttccagggttgaagccaaaggtaaaggtattttacaacaaaancagatnattgntgaattcgaagctttgcccggacaaacccgggaggaaaacttgnaangggggncctttccttgaccttctcaaatccactcaaggaagcaattggngttgcccacc

SEQ ID NO: 15104 - DNA, 581 bp, Arabidopsis thaliana
  unsure at all n locations
  Clone ID: LIB25-078-Q1-E1-B4
ggtatgcctgcgccgtaccgaanccgnaaattcccggggtccaaccaacccntncnggaaagaatcctggnatttganggcaattgacaancaaaatnaanggaactggtcnaananttatgggcaatttgaatgttaccgaagtcctagaaaanggggngaaaagccgaattaattaagtgggatttgacaaatgggttcccctcctggtttgggtggatatcctacagggaatttgttgaaaatcaaaagtcaaatgggctcccttatgggtgcattttgttagaagatagcgcctggggcggggaaaggtccttttgcccaatatcaagttgagccttgaagttgctgaaatggcctttgcaaaaaccaagaagggaattgcctataaaaagttatggaagaacccgcaatttggaccgttcaaaatttaaattaaganggtaaaaattgaaaaaaggggtcaagcttccgaactttaagttgttacggggctttaactttccccgaaatcaagaggaacaagaacaaaaggaccaagtccangaaaaccaaacaanccgggcaaggntgaattctac

SEQ ID NO: 15105 - DNA, 367 bp, Arabidopsis thaliana
  Clone ID: LIB25-078-Q1-E1-B7
aacttgaacacgaagttaatgaaactatcaggaagtgtgatttgtagagttgtatttggtatcaatcttaaaggaagtaaacttgagaatctttatgaggaagttattcaaggaaccatggaggtggtggggagttttgcagcagcagattacttcccgatcattggtagaatcatcgataggatcacagggttacatagcaaatgtgagaagattttcaaggcaatggatgcattttttgatcaatctataaagcatcatctagaagatgagagtattaaggatgatatcattgacttgctcctcaagatggaaaggggagagattgaacttggggagtttcaacttactcgagacaacaccaaag

SEQ ID NO: 15106 - DNA, 383 bp, Arabidopsis thaliana
  Clone ID: LIB25-078-Q1-E1-B8
aaacccagctctcttagctctcacgcctcgtcaattgttgacctgtaggatagatatgggcaacgagagcaaaacctcggctttggaatcggagcagaaggctcttcttctccgttcggtagctcaatacttggaacgatgtggtttttccaaatgcttcaagaaattgctctccgaagctgaaatcgagaagaaggaattgaacactagtttacctgatttagaggaaattttcagcgagtttttgaacaagagagatcatgaagctgcagctaatggaaataccgaggcgaatgtagtggaagctgtagagaatgtaaagaaggataagaagaagaagaagaacaaggaaacaaaggtggaggtaactgaggaagagaagg

SEQ ID NO: 15107 - DNA, 397 bp, Arabidopsis thaliana
  unsure at all n locations
  Clone ID: LIB25-078-Q1-E1-C10
gagaagaagagaataaacaaaagaagaaaaaaaactaataaaacaaaatcaataaaaagagaataaaaaatggtgggttctcacaaagcaagcggagtgcttcttgtgctactagtggttatggccaccacaatagcaaacgggacaccggttgtcgataaagcaaaaaatgcagctacagcagttgaaggatacagcacanaatgcagctacagcanttggcggtgcagctgcatcagttggtgctaaagtatcangtgtcaaaccaangcgcancaagtttgatgttaaagcatcaggagccaaagggagacagcaaaantgatgattagtgcgggcatttgcngctgcatggaaangaangccttgtgcangcangggnngcncaattntcagt

SEQ ID NO: 15108 - DNA, 431 bp, Arabidopsis thaliana
  unsure at all n locations
  Clone ID: LIB25-077-Q1-E1-G6
tcttttgattctctcgctctctctttcttcatcgcctcttcgagcttcgatggttgggaatattctggtgaccggtggtgctggttacatcggaagtcacacggttcttcagcttcttctcggaggctataacaccgtcgttatagacaacctcgacaattcctctctcgtttcgatccaacgcgtcaaggatctcgccggagatcatggacaaaatctcaccgtccaccaggtggaccttcgcgataaacccgcacttgagaaggtttctccgaaacaaagtttgatgcaataatgcattttgctggattgaaaacatttggtgaaagcgtgcgaaacacttctggtatataacaataacntggattgcgacaatnaaacttttggnagttaatgggctgcacancggatgntaaaaaggcntgtatttt

SEQ ID NO: 15109 - DNA, 426 bp, Arabidopsis thaliana
  unsure at all n locations
  Clone ID: LIB25-077-Q1-E1-C8
tcttcctcaaaaaaaanananaaaaaaaaagtttaaaacaaaaactaaaaaaatagaataatggcaagagttcaactattgttatgcttcaccattctatttgcatctgtgacccttcttgacctagtatcancacacctgaaatttaagccatctttgcctcaaatcgaagatccaaagacggtgaaggatgtagagccttacaccgttaaagtagtaatggtctttgtggccgacctcgagaaggaatgtcccaagacaaacaagttcaaggccttctttgagaaacttagaggattcgccaagtatgtttgcccaataagaaggattggccaagtagattacgaccgggacatgaaggccaaagccgggggtatcttcaaggccatatcttcttttgcgattggaaagattagggaggaaatt

SEQ ID NO: 15110 - DNA, 373 bp, Arabidopsis thaliana
  unsure at all n locations
  Clone ID: LIB25-077-Q1-E1-C9
tctcttgggaaccaatcaagcatggatcgtgtggtcttcttcttcctcatcgcagctacgttactangcaggttctctcggatctaccgtcatctccggcgaggttaccgacggtttcgttaacccgatcaggcaagtcgtcccggagganaacgatgaacaactcntcaangcagaacatnacttcactctantcaaatccaagtacganaagacttacgcgactcangtagagcacgatcatcggttccgtgtcttcaaagctaacctaagacnagctangcgttaaccagcttctanatncgtcngccgtccacggcgtcacgcagttctcaagatctactccgnaangaattcngccgcanggttttta

SEQ ID NO: 15111 - DNA, 424 bp, Arabidopsis thaliana
  unsure at all n locations
  Clone ID: LIB25-077-Q1-E1-D1
ttaattaactccggcgattgatcactccgtcttctttgtaacacagccggagaaaaatcgaaagtttcgtttttttcttctccttcgtagctaattcgccgtcgattttataattcggcagccatgagctcggttttgcagggttttacgaagtcacttgcnatgacctttgtatcggagattggtgacaagacgtttttcgctgcagcaattttggctatgcgttatcctangagacttgtgttggctggttgtttatcggctctgattgttatgactatcctctctgctactcttggatgggctgctcctaatctgatctctcgcaaatggactcatcacataacaacattgttgttccttgggtttgggctaaggtctttgtgggacgggttcaaagaaaggagganggggttccgaaaaa

SEQ ID NO: 15112 - DNA, 426 bp, Arabidopsis thaliana
  unsure at all n locations
  Clone ID: LIB25-077-Q1-E1-D3
aattggctcaaaggtacccgggactaatgtcgttgcgaagcgtagatctttccccggcaagttggatggcggtagcgtggtaccctatttaccatattccaatgggaaggaccatcaaagatttgtccacttgtttcctcacttatcacactctttcatcttctttccaagatatggagccanaagaaaatggcggggaaaaggagaggatccggaaggaaggagaaggtgtaactttgcttccttttgggttagccacttataagatgcaaggcaatgtttggctctcggaagacgatcaaggtcaagatcaagagcgagttctttcgcttctaagtgttgcggattcttggctaaaacagctaagagtccaacaccatgacttcaactacttctcaaagaatggctcaaccgttgctgaaacaa

SEQ ID NO: 15113 - DNA, 442 bp, Arabidopsis thaliana
  unsure at all n locations
  Clone ID: LIB25-077-Q1-E1-D4
cttccggcgagaaaacaaacgaaagagtgaaaaaaaggcgacttttttcttgtcccgggttataaagatgtcagctttgtgtcctgtctgcaatctcacgcttcctctctccctaatccaaagccatgtgaattcccacttcgaaggacgatgaaatcaatccacaaatcgaaaccgatcaccacttggctctgcaactcgcttctgatgatcattcttctgatgatccttcttcgtcttcctctgcttcatcatctaacaaagttgcctcctttggtcccagttaacaggnctaaagagtccaattcaatagngtangggtcaatgggtggttttgaattggtntgctgaaggaactgtctgggagtcaagaactgaaattgaagtcgaaacctttagaagtgtagtactagtttactatcaaggctttgttgatcanttt

SEQ ID NO: 15114 - DNA, 437 bp, Arabidopsis thaliana
  unsure at all n locations
  Clone ID: LIB25-077-Q1-E1-D6
gaatgcagagatccgcgagggtttgggttcgttcaatttatggaccctgctgatgctgctgatgcaaaacatcacatggatggttatcttcttcttggccgtgagttgactgtcgtgtttgcacgaagagaacagaaagaaaccgactgaaatgagagcaagggagcgtggtggatngaagatttcggggatanaangacgtactccacctcgttactactctcgctctcgttctcctcnccctcgacgtgggtagatctcggtcacggagcggtgactantattctcctccccctanaanacatcacncangatcnatctcgcccaagcgaagagcgatatgatgggatgaggtcatagtcgcgctcacctgcctccgaagggntcaaaggggggcncaattttanctccagtcnagagcgtaagagccgcnagct

SEQ ID NO: 15115 - DNA, 424 bp, Arabidopsis thaliana
  unsure at all n locations
  Clone ID: LIB25-077-Q1-E1-D7
agaaacacaaaacaaaatcgtcgatggctgttacaaaaaggcttttgtgagtgtcccaattccattcacaaagttttagtgtttaataatatctgacactctctttctttgaccgtcgccgccgcaatgaccgtcggagttttagctttgcaaggttctttcaatgagcacatcgcggctctgcggcggctcggtgtccaaggcgtcnagattaggaaggctgaccagcttctcaccgtttcttctcttatcattcctggcggcgagagcaccaccatggccaaactcgccgagtatcataacttgtttccggctctacgtgagtttgttaagatggggaaacctgtttgggggacatgcgcaggtcttatattcttgggcagacagaacagttggtcangaaanaaggaagtcangaattagg

SEQ ID NO: 15116 - DNA, 135 bp, Arabidopsis thaliana
  unsure at all n locations
  Clone ID: LIB25-077-Q1-E1-E1
gtnagggaatgcagagaganggtcggngtatcgccggtgaagactaagctgtgtgatcggtttaaccgatccgtcggcggcaggaattgccacctgggaacacgtcnaggacgggtgatccanttttctaanctc

SEQ ID NO: 15117 - DNA, 413 bp, Arabidopsis thaliana
  unsure at all n locations
  Clone ID: LIB25-077-Q1-E1-E3
tccttaagacccaaaaatccaaacctaaccctaatcgacattttctccgatttctaaatcctcctccggtgaaaatgtctcaccttgatgatcttccttctactcccggaaagtacaaaaccgataaagttccaccgtacgggattctccaccaccaccgttacctccgtctctcaaaactcaccctttgggcttctctcttcctcgctctcttcctcttctacctcgttttatctcctcctccgtcaccatctcgccggaatctcaacgattcttcctccatttccgccgcgaaatacggcggntctcactgggagaaacaagtccgtaaatccgctcgtcctaggtctcacggcggtttaaacggtantagtcacggagctttcggattcgtcggtaccacgtctcgattg

SEQ ID NO: 15118 - DNA, 445 bp, Arabidopsis thaliana
  unsure at all n locations
  Clone ID: LIB25-077-Q1-E1-E4
ccaaaatctctctctcgtttgactttccctctctcccgtcgtttcaccggaaaaaaacaacagaaaaaaaaccgacgggagagaagaacaaacaataatggggaaaggaggacgtgagaagatatcatcaaacgaagaagaaagagaaggagtcatggctacagatttcttttggtcttacaccgatgagcctcatgcttcgaggagacgtcaagattctgtcntgttaccctcaagattagacaactctttggtcctgatcatgggctttcctcaaggatnacaataagtantaattcttcaactctcaacaagctgcaaatccttcaanaactccnggatggntcaaagattctaaccaatgncttacttccttgggatnaatccccaaaccaaaatctcctccttancaatnccatgggnctnangtncanaaaccttggcc

SEQ ID NO: 15119 - DNA, 438 bp, Arabidopsis thaliana
  unsure at all n locations
  Clone ID: LIB25-077-Q1-E1-F2
ttttttttcatttcttcctccagagagagagagagaagccacaacaagaagaagaagaagaagaagaagaagaagaagttctggaatagtcatcatcttctctgtttctaggctttgtttatttgtctctaaagtttctggattcaacttctgaagaagatagtagtagtccacaagaaggatcttctttacaaagttgatttggtcagagccaaggaagatgggttacatgtgtgacttctgtggtgaacaaagatctatggtgtactgtcgatccgatgcaacttgtttgtgtctctcctgtgaccggagtgtcaatccgctaatgcaattgtccaaacgacattctcgggcacttgtccggcgangagaatgcaatgctcaaccctgctactggtcangtgttgttgaaagaaaagggtttcactccgtcaaaaa

SEQ ID NO: 15120 - DNA, 433 bp, Arabidopsis thaliana
  unsure at all n locations
  Clone ID: LIB25-077-Q1-E1-F4
gcgggaacnanggcccggaaacttacnanggatgcaggagtacttggctgcaaacttggtgaagcttgctgattacataaccattttggccccttccaacanacagccaaagcttttgccctgtttttgcttgttgttcaagaaaaacaatatggagagagaggagagaaaacgaaagagaatgtttttctaagaatggtgttttgtaactaagactgcatatataatgcgcagttttcggattaatattcnnaatagatncaagggtcccttttccacnggaaaatggggnaaatccaaaataccctagatccttataccaaagtatncaaatcnccnccgnntacttcnatcaattaggtcccctaacctggccnccnaangnttattaacctanatgggcccaaaacaatatccttggaggaaaaaaaaa

SEQ ID NO: 15121 - DNA, 424 bp, Arabidopsis thaliana
  unsure at all n locations
  Clone ID: LIB25-077-Q1-E1-F5
aatagggacttgacgcagatcttgttgggtctcgaaccttcctcttcgtttgcatcaggaaagagcgagaatggcgggaggaggaaactttattgcgagagtgatctcatacgttgcgaacgagttcatagttaatggtttggcaaacagccatgctttccagagatttgctgtgaggacttcaaagagaatagaaaacctctctaaaatggctgcagagaacagggagaaagtcgctcagcaaatggaagaatttgccaagaacattgactccacgaagaaaccctgatcattctagtgtggaatcttaaaanctcagtanatcacatgggtcagctcaagtagggaggtctgtttatctttgtataaaagaatgttaaaaagtantangcttgtggattanacaaccaagtgatcntttggg

SEQ ID NO: 15122 - DNA, 430 bp, Arabidopsis thaliana
  unsure at all n locations
  Clone ID: LIB25-077-Q1-E1-G4
agagacttggttgttacttctgcaacgacgtggttgcacctcaggattcaatgactgatcgaactctagaccaacaatgcactgttacacgcccgggtctagctcctattgcaggagctctcgccgttgaactcttagtcggagtcctacaacacccacttggtatcaatgcaaaaggcgacaattcgagcttgagtaatacaggaaacaatgatgattcgcctctcgggatattacctcatcagatacnaagctcaatttctcagttctcacagatnaagcctgcttggtcaagcttccaacagctgttccgcntgctctgaaaccgtgatatccggngtatagggagagaaggaaacagtttcatacttgaagctattaaccatcctacatacctggaaggatcttactgggnttaaccgagncttaa

SEQ ID NO: 15123 - DNA, 419 bp, Arabidopsis thaliana
  Clone ID: LIB25-077-Q1-E1-C7
ttcatggaacaggttcttcgtttatgtctgctaaggactactatagtgttcttggagtgagtaagaatgctcaagaaggtgaaatcaagaaggcttattatgggcttgctaagaaactccatcctgatatgaataaagatgatccagaagctgagacgaagttccaggaagtctcaaaagcatatgaaattttgaaagataaggagaagcgtgacctttatgaccaggttggtcatgaagcatttgagcaaaatgctagtggtggatttccaaatgatcaaggcttcggtggtggtggtggtggtgggtttaacccatttgatatctttgggagcttcaatggcgatatttttaacatgtaccggcaaggatattggaggtcaagatgtcaaggttttgcttgatcttccttcatggga

SEQ ID NO: 15124 - DNA, 265 bp, Arabidopsis thaliana
  unsure at all n locations
  Clone ID: LIB25-075-Q1-E1-E3
ggantctccgccgcctcacacgacgggcaacttcagttcctgccgtcgcgttagatcccgccgtcaatcggtcatggcgaccggtaaaacctcttccgccgcgaatcttttcactggctcgacgcgttttgatttatcatccgctgantcgcctccttcaaaactctctcnctcctccgatcagntcaaccactgccaccaagctctcggcgttttccggggaaagatccanaatcctgactcgatcnctcatgagtttacnggt

SEQ ID NO: 15125 - DNA, 253 bp, Arabidopsis thaliana
  unsure at all n locations
  Clone ID: LIB25-075-Q1-E1-E5
ggatcctgcgaagaccanccagtctgttaattttgtataaacantganacgaanaagatcttccgagaatattctctccttctcacgcataccctagaatattgtttcgtctctcttccttctaggtttgcttatttgccccaactcgacgcgaatcatcagcttttanaaattctgtcaactcaaagattgtttctgaattggaancttacagaggtttagcttgagatgatatgactantcagcaggagca

SEQ ID NO: 15126 - DNA, 253 bp, Arabidopsis thaliana
  Clone ID: LIB25-075-Q1-E1-F1
ggtacaataaaatcccagaacgaaatctctacgtcgaaaccatgtccagtttcttccctttgccgccagccatcgggaaatccactggatgtggagtgcgtgatgaatcacaatcattagttgtatgggccattgaggactactcaatccctgaaagtatcgatcctgatatgatcaacttgaaaatcgaaacagctattgtcaaaaaatttaatttaaggtcgtcggcggtagtgacaacctggattttcgg

SEQ ID NO: 15127 - DNA, 261 bp, Arabidopsis thaliana
  Clone ID: LIB25-075-Q1-E1-G1
ttatactcaaggttgggtgtctggcactggcggtagcataacgatgaaagttcatgatgcttcgattcctaaaccggagcaacttatcgtcatgtctccttcaggtgttcaaaaggagaggatgcaacctgaggatatgtacatcttatctgctaatggatccatcatatctacaccctctccaaagccatacccaaataagcctcccaagtgtaccgattgtgctccacttttcatgaaggcatatgagatgcgaaatgc

SEQ ID NO: 15128 - DNA, 256 bp, Arabidopsis thaliana
  unsure at all n locations
  Clone ID: LIB25-075-Q1-E1-G2
acttccaaanctctgacagaaaagcccttatctttctcaccgtcggcgagtttgccgactctcacggcggagagacttatcaaaggattcaatttgatgcctacacgcgacgtcaatgtcatcgatgaagaaggttctgaggctccgagactggtcgagagagcattcgatttgccggcggcggttgaccgtcgtggctccggtggttctccgtcggttcaagattttggtcaccatgctggttactacaaactcc

SEQ ID NO: 15129 - DNA, 262 bp, Arabidopsis thaliana
  unsure at all n locations
  Clone ID: LIB25-075-Q1-E1-G3
ttatctttgttgtcgagaatnacttgtgggccattgggatgtctcacttganagccacttctgaccccgaagatttggaanaaaggtcctgcatttgggatgcctgntgttcatgttgacggtatggatgtcttgaaggtcagggaantcgctaaagaagctgtcactagagctagaagaggagaaggtccaaccttggttgaatgtgagacttatagattcatgaggacactccttggctgatcccgatgagctccgtgat

SEQ ID NO: 15130 - DNA, 261 bp, Arabidopsis thaliana
  Clone ID: LIB25-075-Q1-E1-H1
catagtttcttcttgcttttgagaaaaaataattatatatttttatataggaaagggttaatttattaataaaaaaaaataaaaagaagcagaaaagagataatgcagggtggtaggcttttgacggtgttggtgtgcctcgcctccacggtggcgttggtgagcgccggtgacccttacttctactacacgtggaacgtaacctacggaaccgccgcgcctctcggaattcctcaacaggtgattctcatcaacggacaa

SEQ ID NO: 15131 - DNA, 266 bp, Arabidopsis thaliana
  Clone ID: LIB25-075-Q1-E1-H4
gatctgaattaccctgacatgccagatgcaatggtgcaccatggcttttacagtgcttatcacaatacaactttacggcctgcggttttggatgcaataacacgagtgaaaaaagtctacggggcgaacatcaacatcatagtgaccggtcattcaatgggaggagccatggcttccttttgtggtctaagacctagttgtaaatgaaggtgaagaaaacgtacaggttatgacatttgggcaacctcgtgttgggaatgccgctt

SEQ ID NO: 15132 - DNA, 251 bp, Arabidopsis thaliana
  unsure at all n locations
  Clone ID: LIB25-075-Q1-E1-H7
ctgaaggagcgttattttatataagaaatggatttaacaacttcaacttctgtttcantttggcaatgttggttggcncnataaaacctggtaacaaaaaggaattannaccgtgccctgctggttgtgatttccccgatgtatatttggctggcgttcatgtcacttcagccccacaaagaagaaaggttcctttatcctatataccctcttatttgtgtctctgcttctgctgttattgagaacatcct

SEQ ID NO: 15133 - DNA, 52 bp, Arabidopsis thaliana
  unsure at all n locations
  Clone ID: LIB25-076-Q1-E1-A1
catgtcganattcacaaantcgccggtaagctggccaagggacgaatgaagg

SEQ ID NO: 15134 - DNA, 396 bp, Arabidopsis thaliana
  unsure at all n locations
  Clone ID: LIB25-076-Q1-E1-A11
aaaaaacctagaaaaattctatcccacaaaatcttcaaagatccatggccgtaattatccctcgttcagatccaccgtcacgaatccatccggaaccaccacaaaccctagaaatcgaccatttcgatcatcttcctgactcaatcctcctcctcgttttcaacaaaatcggcgacgtcaaagctctcggaagatgctgcgtcgtttcnagaagattccattctctcgttcctcaagtcganaacgtcgttgttcgtgtcgattgcgtaatctccgangacgattcgtcatctttgtcatctatcaaatctcgctccggttcttccgctggttcgttctcggctanatttcgtcctgttgttgggtggcantgttaagccgttacaagctttaggg

SEQ ID NO: 15135 - DNA, 354 bp, Arabidopsis thaliana
  Clone ID: LIB25-076-Q1-E1-A2
tctgtttttttgtttagtttgatctgttgagagatgacgagcggtggcgacgataaaaacagatctgtggtgacagatcatcaacatcaacaacagcctcctcctccgtttcaaggcgtctctaactatccaccgcagcagcagcctcccgccaccggttatcctcagcctgctcagccctacgcccaaggttatgttgttaatggagtaagaccaacagaacacggtcgttgttgcggtatcggcattggctgggtattattcatccttggtttcttcttcgctttgccctggtacatcggtttcttccttctattattctctaaggaacccgcgtgagagaccaaggatata

SEQ ID NO: 15136 - DNA, 324 bp, Arabidopsis thaliana
  unsure at all n locations
  Clone ID: LIB25-076-Q1-E1-A5
tttcttcactcctaaatccaagccacaccatattgattctcttcactggtgcttgcttggagctaagttttaacctcacggaaggaatctttattctgcaatcactgcaaagagaaggagtctatattttggtggagaatgttgttggacgataataaacatatgatttcagtgcaacgcggctttaagagtcgtggtcagatgaaatatctgagttaaaagatttgatcaaatggctaatcgctggtctgcaaaataatttggtgatcgattcatcctttccgtcgggaactctgaggttcagggcgactanaccaaagggaa

SEQ ID NO: 15137 - DNA, 402 bp, Arabidopsis thaliana
  unsure at all n locations
  Clone ID: LIB25-076-Q1-E1-A9
gcttatcttcttcctcttttgcttttctaatctctcaatggctancttaaacnanancccngnaannttggcgngcttacgtttataatttgattattatattctcctcccatagttccacggcggagctccgcaggctactgcagccatcaaaaaccgatggtacagtgagctttctcgttatcggagactggggaagaagaggctcctataatcagtcccaagtagctcttcagatgggagaaatcggagagaaattaagatatcgattttgtgatttctactgggagataatttttacgacaatggtttaaccagcttgcacgattctctatttcaaagattcttttaccaacatttataccgctccgagccttgcagaaaaccttgggtaaagtgttt

SEQ ID NO: 15138 - DNA, 374 bp, Arabidopsis thaliana
  unsure at all n locations
  Clone ID: LIB25-076-Q1-E1-B3
tccatctgcaagagctacatcgactttcttgggggcgttaagttttctgcctccagagatgtgtttcacgtcgttcangtcaaattcactttgatgaccaaggcgatggttattgcacaagcacacattggagttgaaggagacctcgctgttaagttgggcaaaagctacaccgtgatggctgaaaggtttgtcaancntttggagatgatgtctacggtctcggccaagtanaagttcnatgctaatgctaagatnagcnctaggtgatagtgcngagattgaanaatgtgtgataaatttaanaagtgccngtancgtctnacctgaacgtgatctctcangtgcaggcaccganangtcctcngnggggg

SEQ ID NO: 15139 - DNA, 365 bp, Arabidopsis thaliana
  unsure at all n locations
  Clone ID: LIB25-076-Q1-E1-B4
gcaaacatggattgttgagcgtcacttctggtgcgaatcccgtttcactcaagaggggaattgataagactgttcaaggtctgatcgaagagcttcagaagaaagctaggcccgtgaaaggtcgtgatgacatcagagctgtggcttctatctctgctggaaatgatgaccttatagggtcaatgattgctgatgccatcgacaaagttggacctgatggtgttttgtccattgaatcttcatcttcttttgagaccacggtcgaagttgaagaagggatggagattgacagaagttacatctcgcctcagtttgttacaaaacccctgagaaaactactaanctgagtttgnnaaatgctaggg

SEQ ID NO: 15140 - DNA, 373 bp, Arabidopsis thaliana
  unsure at all n locations
  Clone ID: LIB25-076-Q1-E1-B6
ttgcatgccttgctaaggaacatgggaagaacaatgttgcctttctttgcttatttacgctgggtagattgnaagattgtctgcaagttattggtggacagtaaccggataccagaatctgctctgatggcacgttcttatcttccaagcaaagtttcgggagatagtagctctatggagggaanatctcancaaggttaatccaaanngcanctgaatctttagctgatcctgaanagtactcaaatctttttgaggantggcaagttggccctttctgttgaaggcaacactgcagagacaagggggaagtttataccgctggcagaaaattatcccatccccanngccgangnaaccttccaattnnccg

SEQ ID NO: 15141 - DNA, 170 bp, Arabidopsis thaliana
  unsure at all n locations
  Clone ID: LIB25-075-Q1-E1-E2
aatgttcaccgacttgacctcctggctgttgctgaatcgttctgcttctcttcgccgcctaaagtgaatctgaacatagaaagtggagctgggaaggtgaggaangcgagaaaagcagcaaggtcgcaatggcttcanncctnanatncccnatggaanttcaaaacnna

SEQ ID NO: 15142 - DNA, 360 bp, Arabidopsis thaliana
  Clone ID: LIB25-076-Q1-E1-B7
tctgcaatatttggagattatgttactcctgaaaccggggcagacgagggtcgtgtggacatggaaactcttgatattgtacaggaggaaggcaccaccagttcatatgtgcaacatactggaaagttgcaaccaaaacctagattactcgagactgtggttgaagaacctgagcctcattactccgctggtgatactggttattttccaatgggtacgaacgagtctgagtttatggccaatgtggaatcaagaaacggtttcagtacttatgaagatcttcaagaagaagaacttaatattcctgaagcccccagagaaacggttggtgagatggaggcgcaaaaatgcttctggcgg

SEQ ID NO: 15143 - DNA, 355 bp, Arabidopsis thaliana
  unsure at all n locations
  Clone ID: LIB25-076-Q1-E1-B8
actaaagttgcatcgtcatggctttcgaaanaaacaacgaaccttttcctcntcactttgttctcttccctttcatggctcaaggccacatgattcccatggntgatattgcaaggctcttggctcancgaggtgtgcttataacaattgtcacgacgcctcacaatgcagcaaggttcaagaatgtcctaaaccgtgccattgaatctggtttgcccatcaacctagtgcaaagtcaantttccatatcaagaaagctggtccggcanggaanggacnaagaaanntatgggatttgnnttaccacgnatggagccngntaacatctttcctttaaagcggtttancttacgca

SEQ ID NO: 15144 - DNA, 400 bp, Arabidopsis thaliana
  unsure at all n locations
  Clone ID: LIB25-076-Q1-E1-B9
agaaacaacagaagaaacctaaaccttccaaagaccaacagtctggggactcttcgaaacatgaggcagttggagacgaatggttaanaaccgggaattgtcctancgcnaagtcttttagagctgcaagcanagtcatgcctcttatttctaaagcattaacgctaccacctggtatgaaatatatatgtccagctcctatagtacctgctagagctgcactttcgaagactgctttggtcaaaagtcttcgccctcagcctttacctgaaaagatgcttgcaatcgctctcatgggaatggctgcaaatgtgcctcnangtgtntgganagancacacangnangttttcgcctgcatggggttttggcagtcnaatgctgctgtgccatttanaaca

SEQ ID NO: 15145 - DNA, 356 bp, Arabidopsis thaliana
  unsure at all n locations
  Clone ID: LIB25-076-Q1-E1-C1
tctctcttaaccgtaaacgaatctctcttctcaaagttttattttctctctgcgatggctcaagaagatgttactgctgttgctactaacggtgctggtccggtggagacgcatcttgtcttcactgagttcaagcagatgttgctcgttgaagctcaaaaggtcggtgacgctgttactttctacaaatctgcttttggtgcgatcgagtctggtcattctctttaccctaagcgtaaagcttgaccaaagagcttcctcatgttctctcttctgagcttaatcnccctggngcttccntcgntgtttggnangnttnccgcgccccnggggggttttcaaaggggtnaanggng

SEQ ID NO: 15146 - DNA, 443 bp, Arabidopsis thaliana
  unsure at all n locations
  Clone ID: LIB25-074-Q1-E1-F5
aaatcttcaacacttaatcacaaatctcaaagcttcggataccaaatggctcgtaccaagcaaaccgcaaggaaatccaccggaggaaaagccccaaggaaacaactcgcaacaaaggcggcgaggaaatcaagctccggcgaccggaggagtaaagaagccacacagattccgtcctggaactgttgccctaagagaaatcaggaagtatcagaagagcactgagcttctgatccgcaagcttccgttccagcgtttggttcgtgagatcgctcaggatttcaaaacagatctgcgtttccaagaagcagcgccgtcgcagcacttcaagaagcgggctgaagcatacctccgttggnttgtttgaagacaccaaatctttgcggcgantcatgntangangagtcactatcatcctaagggatatnccaattgggganggg

SEQ ID NO: 15147 - DNA, 431 bp, Arabidopsis thaliana
  unsure at all n locations
  Clone ID: LIB25-074-Q1-E1-F6
tctctcgagtgctgtgaagattcaggcagatgaattaagcaaagaagatttcacaggctctaagtggttggttcttagatatgctgttcttaatttacaagtaattcaagcagccattcgatttgccaagcaagaaggtctttctgtttccttggatttagctagttttgagatggtcaggaattctaaatcagagcttcgacagcttctggagtctggtaacatagatctttgctttgctaacgaggacgaagcagcagagctccttaggggtgagcaanaagcgggtccggaggcagctcttgagttcctaaggcagacattgcaaatgggctgtggtaactttagggtccaangggtgcattggaaaacatgataaagaagtgggtacatatatcagncataaggagangacagtngcaactgatgcc

SEQ ID NO: 15148 - DNA, 404 bp, Arabidopsis thaliana
  unsure at all n locations
  Clone ID: LIB25-074-Q1-E1-F7
cgtcctccctcgtcctgaatccatccatcatccactctcctcttaaaaatcctatctttgtggtttgcaatctctcccacgacgcgcttcatcattcatggctatttgaatctctcttctctctctctatcaaatatgcaaaacccttcaacggtaacccaggaatcagccgcaccggtctttgatttcttcccacggctcanaggtttaacctctagaaatcgatccccgtgttcgaattcagatgggtatgctctctcatcgtcnaatgccttgtacttcaatggtttccggactttaccctcccgaaggatgggaaaaancctagcttccttgagcttcaacactaagagcagtgctggttcgagtctccgtaagtttatcaagngatttcaagaagcttt

SEQ ID NO: 15149 - DNA, 423 bp, Arabidopsis thaliana
  unsure at all n locations
  Clone ID: LIB25-074-Q1-E1-G10
gtctgcttgttttgctttgatccgtcgtttatactttgttgtggtgagtggaatttgcttcaaaataaatcctgaaattattacganattctgaaccagttccatttgatataatataataatataaacaatacctgaatctttaagtcaatacttactacaggtttgttatcnaaacaagttcttctctgttttagtaaatgtntcttctgtctcagtctcactagaacgatctgtccangaaattttctcgnaaagggttattatggctgaaggagttgtgttgtttggngttcataagctttgggagcttctgantcgagaatcggcgcgantgaatngaattggtgaacangttgatggacnaaagcgtcagctgggaaggntncantcantgctgaaaggnnncnnacggcaagnnng

SEQ ID NO: 15150 - DNA, 493 bp, Arabidopsis thaliana
  unsure at all n locations
  Clone ID: LIB25-074-Q1-E1-G2
agccagccttacccgccnnnantggtggancgatccancgngtccgaaaagaaagaanaatgtcaacgttagnaaccgtaggttaagctttgctctcttatgcagtgatcaattattcacataaatgttttgtcaaatatttaagtgggacttcatgaattaaattagtgaagtgagcattgctcaaagttgtatatattaagccatgagctttcctcatgactcataatatctcagtaaaacanaataacatacaaatggatagcatttggattctatcacttctcttcttcatcatctttcttcttctggccgccttcaaacgcaaaaatcatgggaaacatcgacgaataccatctcctcctggttttccaatcatcggaaacttacatcagctcggagaattacaacatcagtctctatggaagctctcaaagaagtatggccctgtnatgcttttgaagcttggaaaagtccccacactcanactttc

SEQ ID NO: 15151 - DNA, 418 bp, Arabidopsis thaliana
  unsure at all n locations
  Clone ID: LIB25-074-Q1-E1-G3
tttttttctttttgttcaacgaatctctatctctctctagattttggggattttgctctctctccctctctgtctctctttggtgctcgtagctttctgtctcccaattgagagaaggagggagatagaaacgtcgatgggcttaattgtggatgatgataacgatggagaagttttgattccgccgccgaatttttcaatggtanaagatgaaatttaccgatctgggtttcctgagctggagaatttcggattcttatcaaccctaaaatcctccattcatcaattatctgtgtcctgagccataccctgaaggacaatctcaaagtctcntgcatccaacaacattaagccttttccagttcggggaattgaangcaaaaacggatctccaactcctatgccaaaaggatacagt

SEQ ID NO: 15152 - DNA, 386 bp, Arabidopsis thaliana
  unsure at all n locations
  Clone ID: LIB25-074-Q1-E1-G9
ttaccggcgatggttcctcctccgccgccgggagtttctccgattccaattacttcagctcattccgtctatttgcctacccatgtctcaattggagctcgcgatgaggttaggacgcttttcgtcgccggacttcctgaagatgtcaagcctcgggagatctacaatctctttcgtgagttcccaggatatgagacttcgcatctccggagctcagatggagctaagcccttcgcatttgctgtgttctcgagatctgcaatcagctgtagcggtgatgcatgctcncaatggaatggtgtttgatcntgaaaagcattctactcntcanattgacccttgccaaatcaaatccaaatctaaacgttnantaacaggatatngng

SEQ ID NO: 15153 - DNA, 259 bp, Arabidopsis thaliana
  Clone ID: LIB25-075-Q1-E1-A2
aaaacaaaactttactaattcaatttcaaagtctcttcttttctccagatactctgttttaccattcaaggaaaaaggataaatcttgtagaaagaagatgccaaaatgatttttttatttagaaattaaacagcgacgtcgttttgcagctacagtgcgatcatctaatcagtcagtgtcttcaagtttaaaccgcatctctagtctctctctacttctctctgtgtacaatattcggaaagtgaggaagatacactg

SEQ ID NO: 15154 - DNA, 250 bp, Arabidopsis thaliana
  Clone ID: LIB25-075-Q1-E1-A6
attcttaatttctcaaaaatcttatctttctccctcatttttcccgtcgagggttccttaatctccttcctaggaacgtttcatcgatttcatatttgctttccttaatccacaacgtttcttccttcgtttttttctgcaattttgttttcctttacaccaaattcatctcttagtcttgtccaattttcgattttttttccgacaatcctgattgtttgtttttttatctgtcgggatttcgaatggt

SEQ ID NO: 15155 - DNA, 256 bp, Arabidopsis thaliana
  Clone ID: LIB25-075-Q1-E1-A7
gcaacatgggctgaggctacaatgcgaacttcggggtttgatactacacgacgattttacattgatacacttcaggtttgcccattgcgaaggcctatcaagtgggagagcgcaccaactttcgcatctccgtctgctaaaagctttgtgttccctgtggttagtggtcaaacgatggaactagctatagctcaattttggtcaagtggcctcggaagtcgtgaaccaactatcgttgactttgagattgaattcc

SEQ ID NO: 15156 - DNA, 244 bp, Arabidopsis thaliana
  unsure at all n locations
  Clone ID: LIB25-075-Q1-E1-B2
tggtcggtctctctcgttacggtgaggctgaggctgaggcggagattgagagagaccaaccatgatacgacgaatcaccgagagagcttctggtttcgctaagaatattccgattctcaaatcgtctcgatttcacggggaatccctccattcctccgtntcccctggtcccantcccggggtccaagtnntccantgncangangctgttgggaatgtatccaaactatcncgattgncnagc

SEQ ID NO: 15157 - DNA, 93 bp, Arabidopsis thaliana
  unsure at all n locations
  Clone ID: LIB25-075-Q1-E1-B3
tctcattcntcgttcntccaaacgttcaactctccgttcctctttccgcggcgtctctctcaagnacaacaatctccaccgtctccaagctgt

SEQ ID NO: 15158 - DNA, 440 bp, Arabidopsis thaliana
  unsure at all n locations
  Clone ID: LIB25-074-Q1-E1-F4
gantgggagaaagaattganaatgggtacatggtgggatgatattaatgcttattcttatgcttacccattgggnttatccatctgagaagcttgtcttcaaatgggttgaatcaagaaagcctgaaagatactcttcagctgcaccactctctcctgatgcacgtttacggattgtttctgaacganttgacctaactgacaacctcgtcatttctatttcgataggtcccccaaactcaagattaacatcaaaagaaaagaaaacatggtccgctaaagaagttgctgattctgttttgtctgataaatcagcattgcgtgtcacctcaagtcagcgtcttgaagagagttcggttcttgatgctcatgctagtgatattgatgggggaacccttactggtactacgagtaacttgtccgnnaatcaacaaccaanag

SEQ ID NO: 15159 - DNA, 263 bp, Arabidopsis thaliana
  Clone ID: LIB25-075-Q1-E1-D1
gaaaaacattattccgcaggttgctctatttgatttattgaagaagtttgatggagaaactgtgacagaggtggttcggcctaagctggccagaatgagataccgtgtaatcaaatctcctcgttacttgatgttccatatggttcggttcaagaagaataacttcttcaaagagaagaaccctaccttggttaacttcccagtgaaggacatggagctgagggattacataccatcattgcctagagcaccagaaggcgagt

SEQ ID NO: 15160 - DNA, 230 bp, Arabidopsis thaliana
  Clone ID: LIB25-075-Q1-E1-D2
tgctttgaatatagattcaatcttgtctccgtttggtgcaaccattttgttcctcgtcatcacgtttcatctcttggcttttgttgctggttactttttcactggtttcttcttcagcaaggcacctgatgtaaaagctctgcaaagaacaatttcctatgaaacaggaatgcaaagtagtcttctcgctctggccctcgctacaaagttctttcaagatcctctcgttg

SEQ ID NO: 15161 - DNA, 262 bp, Arabidopsis thaliana
  unsure at all n locations
  Clone ID: LIB25-075-Q1-E1-D3
aaagctgagtaaaaccgtgcagccctgancttcgacgctttctcctctttcaaccaatccgttgaacgtcgtcgtaataagcttcatcttcatcaatcatcatcactttcttctttctcccacagatccttccttttctccttcatcttccccttcttccttttccctcatcgcccaggaacacatccgatctgcaccctcttcgttcgattctcacaattaatatctagggtttgcgaggaccccccctctctattcaaaa

SEQ ID NO: 15162 - DNA, 251 bp, Arabidopsis thaliana
  unsure at all n locations
  Clone ID: LIB25-075-Q1-E1-D7
aaaataaaacacatatttcagactgtagtttagatgtggtaaaatatagcaagaatataaaaatatcaatataagtttcaaaatttagagaagaaagaacttcattgattgtgagttctaaataaataatggttagtatatattagtgatanagggttaggaagaagtcgttatatacataaactcagtgtaatgtttctgtcaagctttgctttgatttaaggattgtactttcttccttctcactgtta

SEQ ID NO: 15163 - DNA, 258 bp, Arabidopsis thaliana
  Clone ID: LIB25-075-Q1-E1-E1
ctatggcgacccagaagttatcattgccgagaatggttagagaaaatactcaaagctcatttcctaaatttcaatattattttatttttgatgaaaaacgaagtttgaatttttcttttggttttcaaggatacggagaagaccttggagagaagcacaatgacgtaaactttgggacacaagatcacaacagaaaatattatatccaaaggcatctcttgagtatgcacgacgccatttgcaaggacaaagtgaacg

SEQ ID NO: 15164 - DNA, 308 bp, Arabidopsis thaliana
  unsure at all n locations
  Clone ID: LIB25-074-Q1-E1-B9
ggnccgccggtaccanaccagaattcccnggtcgacccacgcnanccggcgatgaaaacagtgaaatgatcattgtctatgaatatatggagaagggaacgcttaaggaccatttgtatgacttggatgataagccgaggttgagttggngacagaggcttgagatatgcgttggtgcanctagagggcttcattacctccacacaggttccacnagagcaatcatacaccgccatgtganatctgcnaacattctattggatganaattttanggctaaanttgcngattttggattgtctaanaca

SEQ ID NO: 15165 - DNA, 440 bp, Arabidopsis thaliana
  unsure at all n locations
  Clone ID: LIB25-074-Q1-E1-C1
cantccaatctcgaacctgtccgtcctatctcaaatggtgaccagaaacgcgagctaaaggcttctaatgcaaacaccgaatcaagcagcttcatttctaaccgagcccatcttaagcttgaggaagaagatgaggaagaggagcctgagcagttattcagaagattgcgaaaagggaaagctagagcaaggcctgaggatgaagaagagccatcacctccacaaggattgcctggatcagcaatacataacgaaagacttaaccgtccacttatccgtcctttaccatcagangaggcatcacgcggtggtgatagccattcgcaatccccacctgttgtgantccaacancacctggngaagcacgttnagagggaaaaantcttcaaagggagaataanggttaaccggngcccttggggtttacaaaggtcaaaag

SEQ ID NO: 15166 - DNA, 269 bp, Arabidopsis thaliana
  unsure at all n locations
  Clone ID: LIB25-074-Q1-E1-C10
aatattagatatataaataacacanagtgaactcctaatcagggttcattttataaatttattatttagttattgcggataaagaacaataataatatggggatgtctaaangtatcanggttatcttatctcttgctctcgtagtgttcttggcccttgctgcaaccanggttgaggccacangatacagancttatcctgctatcgatcgtggagatcatgcngtacattgtgacaaancccaccctaacacctgcaatangannga

SEQ ID NO: 15167 - DNA, 428 bp, Arabidopsis thaliana
  unsure at all n locations
  Clone ID: LIB25-074-Q1-E1-C6
gggaaaaaagatgcaaacgcttctctgtcagccatgtaagtctcttcctatactcactgcttcgtcgtcgtcgtcgttgattcgtagctccggtgatgtgcgagaatgtatcgattttagagcgtcggagaaagtctcgaagtttcaatttcatgtaaccctaagcccctttgcctttcgtggtttctcaatatgtcgcgaatttgctgttcgtggagcttatgggattagattttgctcacgagaagatgtttccggtgttggaaatggaggaatcgtggcggaggaggagattgaagctattgaacaagccgaatcctttaccaaaatcagaaaatgaaggagagtggtaaagcagacgatgacgcgaatctgggngccgtttntggaaattccttaaaccgggaagaaagaaggggaaaggaatt

SEQ ID NO: 15168 - DNA, 415 bp, Arabidopsis thaliana
  unsure at all n locations
  Clone ID: LIB25-074-Q1-E1-C8
aatggctctccaagctgcctattctcttcttccttctaccatttcaatccaaaaagagggcaaattcaatgcttctctaaagganacnacttttactggttcttcattttcaaaccatcttanagctgaaaagatatccaccctgttgaccatcaaggaacagagaagacagaaaccgcgattttccaccggtattcgtgcacagacagttacagccacgccgccggcaaacgaagcatcgccggagcaanagaagactgaganaaaaggcactgcagtgatcactnggagctcgtctgggttaagtttaactacggccaagggctttangnagagacagggaaatggcatgtgatcatngcttgcaggaannttctcaaggccgagaaangcagngagatcgttggganggtcg

SEQ ID NO: 15169 - DNA, 415 bp, Arabidopsis thaliana
  unsure at all n locations
  Clone ID: LIB25-074-Q1-E1-D12
acggagaagaaaaccctagaccggcgaagaagataaatcagattcgatgtcggataataaagaccgtgattccgattccgatgctccggaggaattaacccaggagcaggcgaagctggaagaggaagcactgtggaaaatacagagagagaataagaatagggtttcccgtgagaagaaagagaggcgcaagcttatggcagagcaagtaactctccgaaaatctcgaaagattgaaataattgaggatgtagtagaagaagaagaacctgangaaaactctgaagctcttgcaaacaaagggattcctttccaaagacatcatagactttcttgcggngcgaagaaaaacaaaaagctgangtcagattctgaagaagaagangatnatntnngnagtcccaacnnaaggnag

SEQ ID NO: 15170 - DNA, 249 bp, Arabidopsis thaliana
  unsure at all n locations
  Clone ID: LIB25-074-Q1-E1-D3
caaaaactcggggtttgtatcgttctcgttatctcttatcaagacccaaagggtcctgaatttagagaacaggtcctaaaactctccgcttaaattctttcattttcgagttgtctttttgcgttgttatatacaattcatggttatcacttatcagcaactgagtgatcagtgtaatgttgctgggataagattacagttttcagtgtagtgtctgatcttaaaanncagcaccnnnnnanantnggt

SEQ ID NO: 15171 - DNA, 491 bp, Arabidopsis thaliana
  unsure at all n locations
  Clone ID: LIB25-074-Q1-E1-D4
agcctgccttacggnccaaaattccggatcaccaagcgtccgattaagataaaaatttntcaangnattaattacacatactgggnttnngagcaagancattgctcagaattattaccaaataagatgtttagaaaccaagactcgaaatacttgatcccggtgcaagaaagaagcgccaccggtgacaactttaccgatgaaagcttcaacggtgaaatctccacacaactgtgaggccattctcagagacgcagatcctccgatctctctctcctctgttaatctctctgaacagctacggtctggtgttttcttgaaacccaagaaacagatcaaatattgggtggacgagagaaacagcaactgcntcatgctctttgcaaagaacctctctataacttgggtctgatgacgtcaactattgggacttgggtttaccgaaaaaggatcaccaaaaccaagaatgtggaagctgttgggaattgaaa

SEQ ID NO: 15172 - DNA, 437 bp, Arabidopsis thaliana
  unsure at all n locations
  Clone ID: LIB25-074-Q1-E1-D7
tttcaaaaccggagctcagagactgatctcggaaagtaaatcgcagccatggcggaaaaagctgtcactatcaggaccagaaacttcatgaccaacaggcttctcgccagaaagcaattcgttattgatgttcttcatcctggaagagccaatgtttcaaaggctgagcttaaggagaaattggcgaggatgtatgaggttaaggacccaaatgctatcttctgtttcaagttcagaactcactttggaggtggtaaatcttctggatatggtttgatctatgatactgtcgagaacgctaagaagtttgagcctaagtacaagacntatcagggaatggacttgacaccnangattgngaaatcaaggnaaacangatcaangagnaggaagaacanggccgaacaaacatccttggggttaangaagaaccnngg

SEQ ID NO: 15173 - DNA, 436 bp, Arabidopsis thaliana
  unsure at all n locations
  Clone ID: LIB25-074-Q1-E1-E2
gaagacatctttttaattcactcccttgcaaaatggtggatcatcatctcaaagctgatcgtgtagttgctcgggtagagaagtcggtcaatttggttatangtcataggcaaacacaaaggcaggccggctcaagggagtatgaaggtgaatcaaancagaagtacacaactaagaagatcccaaaatggaagcataatgattcanagagaaagatangtcaaaagcaaaacaatgaaacaccaactatgattgtcgctggtggatgggtcagggccaaatcgagccatgtgggcttcacctccaaattcctcgaagctccangccacannagaatanttaantattganagaagctggtggtaacatatataagaactcaaattaaatgttcaagttggggaagtagacaactgttgngccgagaacaaggcca

SEQ ID NO: 15174 - DNA, 436 bp, Arabidopsis thaliana
  unsure at all n locations
  Clone ID: LIB25-074-Q1-E1-E3
agttatgttccattacacgagaagtgagggaatgtacgtggaaacacccanaaaanaattgagaagctcaggcagcttttaggtggactgcttagcgaacttacctacttcgaagagcctattcgatcaccgcttacccctaatgttctcataaaggggattgtggcaggagaatcatcactctttaaaagtgcattgcatcctctgcgccttactttccgaacaccagaagaaggaggaagttgcaaacttatatttaagaagggagatgatctccggcaagaccaactggttgttcaaatggnttggctcatggatagactacttaagctggaaaatcttgatctatgcctaacgccttataaggtgttagcaactggacatgacgaanggatgttggattcataccgtcccgttccttgggctcaagatctcc

SEQ ID NO: 15175 - DNA, 428 bp, Arabidopsis thaliana
  unsure at all n locations
  Clone ID: LIB25-074-Q1-E1-E5
tttatattcctctgatattttctctcagtttgatctcatttgctctgcaatggcgactaccatgaatgctgctgtttctctcacatcttcaaactcttcttcttttcccgctacaagttgtgccattgctcctgaaaggatcaggtttactaagggtgctttttactacaaaagcaacaatgtagtgacaggtaaaagagtgttttccataaaagcacaaatcacaacagaaacagatactcctactcctgcaaagaaagtagagaaagtgtcanagaagaacgaggaaggtgtgattgttaacaggtacaagaccaaaagaagccttacactggaaaatgccttctcaacaccaanatcacaggctgatgatgctcctggnagangacctggcacaatgggntttcaagncaatcanagggagaaag

SEQ ID NO: 15176 - DNA, 446 bp, Arabidopsis thaliana
  unsure at all n locations
  Clone ID: LIB25-074-Q1-E1-E6
tctcaacttctcaattcccaaaaccagccgaccgattattgagccagcctcgttaccctagctcctctcctccgtcaaatcctccggccaaatcaacggatccgccgtcgtaacccatctctcagatcgacgaatctcccgactcgccgatcctcctaaggtcatatcccttaaatcggctcagatctgtggctcatagatccagcgccgatcctctttctctctagctgctgtttctgctttccctccaaaaaaataacttccctctctctctcgcaacggtttttactctacggatcgtttcanagagactaatangacgcttgggatcaagtgggantggaatgtanagaatgcattcaagnanctanangngaaattgggaactnaaagncanngntggggnatggananttngggnccaaaatcccggantcgcgangtgg

SEQ ID NO: 15177 - DNA, 416 bp, Arabidopsis thaliana
  unsure at all n locations
  Clone ID: LIB25-074-Q1-E1-E7
tctatcaagctcatttctcagatccgtaggatcttcatttccatggaggcttaaaaaccctagaagatattcttttacacatcactcatccgctagtgaagataaaaatcatttctagagcttcctctttctctctctgtatgatctgaagcgaatcgtctttagattcttcaccaatcactatcaaaaggacctctttttaaagcttttcgagacgagctgggtttcggatcctgtgagcttcagagacgcttactggtttatcaacaaggctttccctttgaatcaagctttgattganaaaggagtgaaaagattttgattttgatcaggatacacaaagtgtncttgcgttagttaagcgactaagtgtgtgttttggtagtgaaagcttcntanatgtngacagntnnctg

SEQ ID NO: 15178 - DNA, 70 bp, Arabidopsis thaliana
  unsure at all n locations
  Clone ID: LIB25-074-Q1-E1-F12
aatttgccanactgaagaggttcctccggagctcccagagcctgtcttgggtancaattntgccagagac

SEQ ID NO: 15179 - DNA, 449 bp, Arabidopsis thaliana
  unsure at all n locations
  Clone ID: LIB25-074-Q1-E1-F2
gnnactttcgagcttcctgttttgcgggtgctctcaaaggcttanatcgggatctcgaatcttgaatcggactcagaacctcggatcttcgaaaatcgacgaacatgtcttctcctgggcgaattctataactcacttccacctataaccaaggcttatggtacgttgtgctttttcactacagtagccacgcagcttggcttagttgctcccgttcacattgctttaattcctgaacttgtacttaagcagttccagatctggaggctgataacaaacttgtttttcctcggtggtttctctatcaattttggaatacgtcttttgatganaagcaagatatggaagttcaactcgagaaaggggcatttgaaangcggacagcangactttttgtggatgaatgatctttgggattcntcactccaangggnaantancanntcata

SEQ ID NO: 15180 - DNA, 427 bp, Arabidopsis thaliana
  unsure at all n locations
  Clone ID: LIB25-074-Q1-E1-B8
ttcaccatgtctgggttttggccttcgggagtcctaacgaagcttctctccggcgaatcgccggaagttacaacgattctcgaatcagcttcatcagctcaaactacgatttcaaatactatggaagattccagatcgcgcttcaaacagaagcagatctggtttatatcctcgacgatgatatgattcctgggaagaaaatgcttcagatgctctcacacgtcgccggaactgagaaatacganaactctgttttgggaagtatcggaaggattttacctttccggcaaaaggatttcacgtttccgagctataggaagtttagatctaancgaagctggcctttacttgccngattcagccttatgacatcaccttanntcggatctcaggttgatttcttatcangcncggggttctatcggcg

SEQ ID NO: 15181 - DNA, 420 bp, Arabidopsis thaliana
  unsure at all n locations
  Clone ID: LIB25-071-Q1-E1-G7
cactcttcatcttcaaagactgcgccttttagctcagtgaaaaaggttcgagcttcggaaactatggcagcattccctaaccttaactctgatgctggattgaanaagctcgacgagcatcttctcactcgcagttacattactggataccaggcttcaaangatgatatcaccgtctttgcagctcttgcaaagcccccaacttcacantatgtgaacgnntcncgntggngnanncagattgatgccctcttgangatctctggtgtctctgctgaangaagcggtgtcattgttgaggggatnagctcctatcactgatgaggctgttgctactccccctgcagntgaantctaangatgctgcnggctgattaaagaaatgnatnnggaangttgagccgttttnccgggagggng

SEQ ID NO: 15182 - DNA, 417 bp, Arabidopsis thaliana
  unsure at all n locations
  Clone ID: LIB25-071-Q1-E1-G8
ggacaaatctctctcccgcactcatctctgttcattggttcctcccaaaaaatatcaatcaaatcggaataaactatacgaatcctccaatataaagctccaccctttctctttctatctctctctctccattgttgactgtctctcttccctcgtaaacatcgctgtctctaaagatggcctctctctcaggcctatactcttcttctccatctctcaaacctgccaaaaaccattcctttaaagcattgccggcgcaatctcgagattccttctctttcccacatacctcnaaacccaccaatctaccgttgantctctccncgggctcgttctgtggnanngcgnnaattcncaagcggattcgangnaaagagcntcnaaaggtccggntgcgtttgtgggnaggcgaanntg

SEQ ID NO: 15183 - DNA, 478 bp, Arabidopsis thaliana
  unsure at all n locations
  Clone ID: LIB25-071-Q1-E1-G9
ntgttacgcttgcangtgccggtccganaattaacgggtcgacgcacgcgtccgcccacgcgtccgcccacgcgtccgcttgacacttctctctctctttctctttgctattcatcttctacagtttcttaaaaattatactcttcttctccaaaatatctcagactctcttatttttgatcgtcttcttcttcttcgntgtgagcttccatttttcatccaggatttgttttttccgtttgaggtaaagcagctttgcagttaaagaaaccttgagtatccaatgtccccggaagaggagctacagagcaatgtatcggtggctaagttcttcacctactagcaattgcatctccaggaacactctaggaggncttaaaagagnanaactacttgggnctctctgattgttcttctgttgggaagctctactctctcnccccttgcggaaagatgncaanngtacnatcangctcng

SEQ ID NO: 15184 - DNA, 475 bp, Arabidopsis thaliana
  unsure at all n locations
  Clone ID: LIB25-071-Q1-E1-H10
ntgtaactttgcncgtgccggtccagaattaacgggtcgacgcacgcgtccgctctctgtatgtcgcaaagtagcagcaacttaattctctcatggagtctcttacatcaaatccttccttcgcttgtttctctaaaaccatttctcattacccttctcgtttctccttcgtaaagctaacctctatccaaaagttggaagcttccaacaacaccttatcgttattctgctgtaaatcatcttcgaatcctaaaccagattgcaatcgtcgtatcaagttaaaccctttatgtgtattgcgtccaatcattcgaacaataaagggtttggtttcttctcaatccaggcaatggatgtctcgttttcgagcttacagagacgacacggcggcgttttctgaggatttcgctggagatttgaagcataacggtggattaagggaatgcccttttgagcgttacnggnntccgncaag

SEQ ID NO: 15185 - DNA, 461 bp, Arabidopsis thaliana
  unsure at all n locations
  Clone ID: LIB25-071-Q1-E1-H2
ggaatctttgtggcaaagttgtagctcttgtcgaagaagctcgtcaggacagttgcggtgtatgccacaggactgtttcagagattctcatcaaactacaagatcctgacacacagctggatatcgttgaactgcttatcaagggatgcaaatcgctcaagaactacgagaagaagtgcaagacgttggtgtttgaatatggacctctgatactcgtaaatgcagaggaattcctagtgaaaaacgacgtctgcacactcttgcgcgcatgcccccctgagaaatcggttctaaggcagccggagttggctgattcntgaatgttcaaaacgttgctataacaaggattttaantccttatggggtttatacaagnngggacaacgaacctgctccatgngaatgggtgncgacnttggggtnangtcnananggtannggagttcaaacaacaacctccg

SEQ ID NO: 15186 - DNA, 440 bp, Arabidopsis thaliana
  unsure at all n locations
  Clone ID: LIB25-071-Q1-E1-H3
tttttccgttttttgggtttcgtctggtgttactctctccttctgagttatggtgaaataatggcagcagctgaagcaagagcagtgtggcaaagaacagttaatcgttgctttgtccaagaagacgctaaaagagctcccaagttaacttattgccaatcatcttcatcctcaactgcttcttcaactaagcaagtggaagtttctggttcttctcctcgagtttctgttgaaccacggactcaatcatcttgtgcaggtttcatgcctcttcctcgaaacccgaatttccctgatctgttaccccacaacaccagactgtgggagtcatcctcatcatcagtttcaggtgaataagaacanncattggagggatgaggttaacaatcaangggtntctgagaanaagtctngnattgggancngngaaaaaanaaagg

SEQ ID NO: 15187 - DNA, 451 bp, Arabidopsis thaliana
  unsure at all n locations
  Clone ID: LIB25-071-Q1-E1-H4
attctctggagctggagggtcaacccacccccctccttcttccaacctaaacctctcttttatgctaacttcttctctaccaccgtcgtctccgccgccatgtcccctctcctcctcctcctcctcacagtcttctccctcctctcctcttccctctctcagccctctcctccttcagcgattctgatcgattgtggcgcctcttcctcctccgtaatcgacggccgacaatggcaacccgacgagactttcgtctccagcggcacaccaaaaaacgtttccgatcaagtcctcgacgaaatcttattcactgttagatctttccctctttccctcgacggaactcatcacaagtttggctaacgttgatgagcgtttctcgtggctgggaatataagatnangnggacatactaattacggggggagtttaangtaaaggnacnccncng

SEQ ID NO: 15188 - DNA, 436 bp, Arabidopsis thaliana
  unsure at all n locations
  Clone ID: LIB25-071-Q1-E1-H6
ggatcaacgaaagtgtgagtttgaggtgaaagatgacggcgacgatagatcggaggttatcaacgctgaatccaaacgcgccggtgtttgatccggtggaatttcgtgaggtggaggatttttcaccgaaatggtgggatctagtaacgacttcgaaatggttccgtgacttttggctcagtgctaactctgagaatgagttcctcggcggcgacgatttctcanttatggaagaagagttcnaggagatgatcgcatcgtctgatggtggatccatggctgatacagttacagaagcagatgtggctagntanttgaagatgcntttgaacatagcggagtcctacaaaagaggancantatagattnganggttccgncctgnttnaccaacangnnnaagcccggccaanttncaaggaanccccgancnttt

SEQ ID NO: 15189 - DNA, 452 bp, Arabidopsis thaliana
  unsure at all n locations
  Clone ID: LIB25-071-Q1-E1-H8
agattaaaagattagaccttttcgcattcatggattcgaagttgagaaattttgtgatgggtctgtttgtgatgactgcgatcttgaataattctggtgttggcgcgtggactggagagattcgtggtagagttgtgtgtgatgtctgtgctgattcttcaattggaccatgaagatcatgttcttgaaggagctgaggttgcggttctgtgcataaccaaatctggagaagttgtgaactaccaagctttcacaaactcaaaaggtgtctacacagttgcagagacaatgccanagagcgaacgttgggacgcttgccttgcaagacccatcagcagcttccanacaccttgcaatccgcctacaccaaaaccaaanaccnggaatcaaantcancttataaaccgccccttcccggnttccttcangnccgttgaaaacaatttgtngtg

SEQ ID NO: 15190 - DNA, 424 bp, Arabidopsis thaliana
  unsure at all n locations
  Clone ID: LIB25-071-Q1-E1-H9
tagaaggctctgacccaattcgtctctttgagaagagaataaacgcaagaagagagcctggatacgagtttgacaagagttctttgttggaatacaaccacatgagctttggaggacccccagttaaaacagaaacaaaagaagaagaagatgagcttgtgcgccatgatgaaaaagaatcgaaaatcgaagccgaagtgctttcaagctcccccaaagctggtgtacagcaaacttgttttacggtttgcaaagaaactcttggctgcggtagttgataaatgggatagtcatgtcgttatcancgangaaaatttccccgccagattggaagagtgcaccagctggaaagaatattggagttttcgattcttcacttggnaatgtctgnaagtggnantcccttgnaaccccgacaccggng

SEQ ID NO: 15191 - DNA, 430 bp, Arabidopsis thaliana
  unsure at all n locations
  Clone ID: LIB25-072-Q1-E1-B11
aaacatgaaaatcctctcactttcacttctcttgctcttggccgctacggtctcggcatccgttccagggctcatcgaactcgtcgngncgnaaaancatctttgggaacgtagccgaactcttagagaaagagaaactttccatcaactacgccaactgcagaagctggcaccttggtgttgagacctctaacatcatngacntcgacacggtgcccgcaaattgcaaagactatgttgaagacnacttgatcacttccaagacagtancaatacgactccaaaancgtgtgcaaagaaggcttagttctatgccaaaggacttgccctanaagaacggacaccgtcaaatgtttggatctttggnctagatgataccctcctctcgangtattccctactaggcaaaaatatggatacggaacaaaga

SEQ ID NO: 15192 - DNA, 441 bp, Arabidopsis thaliana
  unsure at all n locations
  Clone ID: LIB25-072-Q1-E1-H1
gaccggagcgagcgtgaaccaccatcttgagaagagcaagggtcttatgcagggtaaaaccgagggtgatacaatcatcgttatggatgcttttgctttgcctgttgaaggtactgagactagggttaatgctcagtctgatgcctatgagtatatggttgaatactctcagaccagcaagctggctgggaggttggagaacgttgttggatggtatcactctcaccctgggtatggatgttgggctctcgggtattgatgtttcgacacaagatgcttaaccaacaagtatcaggagccattcttagctgttgttattgatccaacaanggactgtttcggctggtaagggttganattgggggcattcagaacatatccagaagggacattaagnatctcggatgatcatgnttcctggagtacangnctanncccnct

SEQ ID NO: 15193 - DNA, 167 bp, Arabidopsis thaliana
  unsure at all n locations
  Clone ID: LIB25-073-Q1-E1-A1
gaangagantctgccaacatccaagtttacnaangaaaaagnctggnttgacagttaatgatncccgttcttcgaacacacaagccactttctgtggaagctccgggccaaggaatattgggaaataatccttgatggaattcagaagcctttgaagactantgcaa

SEQ ID NO: 15194 - DNA, 394 bp, Arabidopsis thaliana
  Clone ID: LIB25-073-Q1-E1-A10
acaaacgaaacttctctgcaatagccttctccaaatttcctcactttcacgcgtttcagtcttctctatataaacttgtttcatcaacccatcaaaatcccactcaaattctgtttcagtgttcttcaaattctcaatctttctctcaattcatctaaagggttcctcaaagtttcaatctttctctctgaatctaaaccatggctcgttgtagcaacaatctcgtagggatactcaatttcctagtatttcttctctcgatcccaatcttagctggtggaatctggctaagccaaaaagggtcaacagagtgtgaaagattcctagacaaaccaagtgattgctcttggtgttttccttaaggttgtagcaatagctgggccaataaggtcag

SEQ ID NO: 15195 - DNA, 409 bp, Arabidopsis thaliana
  unsure at all n locations
  Clone ID: LIB25-073-Q1-E1-A11
gcccacgcgtccgcccacgcgtccgggaagatgatggagaacactgttcggagattgaatctccgccgtctcttggaactcataggagattgatttctttgcttctgtggttgtttccgaaagaaggaagaaggaagagaatattggaggagcagttgaattcgtcgttgaggattaagaagactaatcaacggttgatgctctttcaacctttgtttaattatcgtaaacccaacgaccaattttcattactctcttaagatttttcttttctaaaagaaacaacagtttgaagtttattatacacacttgtgcaagttgcttaacaaagtcatagaatttaaatcaaaaaaaacnatcnaaaaagaaaaaaaaaagggcgggcgctctaaaaggattcaagcttact

SEQ ID NO: 15196 - DNA, 450 bp, Arabidopsis thaliana
  unsure at all n locations
  Clone ID: LIB25-071-Q1-E1-G6
cttcaatcgaaaggtaaagagtttgaagaagtaagtcacagagaaagagaagatgtctgagaaaaagggaaggaaagaggaagtgattaccagagagtacaccattaacctccacagacgccttcacaaatgcacctttaagaagaaggcaccgaaagccatcaaggaaatcaggaagttcgcagagaaagctatggggactaaggacgttagggtagacgtgaaattgaacaagcaaatctggagcaagggaatcaagaggtccaccaaggaggatcagggttcgtgttgcacgtaagagaaacgacgatgaagatgcgaaggaagagttcttctcccttgtcactgttgctganatccctgccagaaaggctcaatggtccttggnacnaaaggtcatncganganggnggattaacaggaaaccnnttcgaccaanttttnnttttg

SEQ ID NO: 15197 - DNA, 424 bp, Arabidopsis thaliana
  unsure at all n locations
  Clone ID: LIB25-071-Q1-E1-E12
gtatataccatcttcgagtgacatcattcatcacgaaaagaaactatagtgaatgcttgcgctctgttgttactgcagataaaanagagaaaaaaagatgctgaagaacctacaaagtatatgggttgtggagactgtgacaatctgagtcgctccatcacggtgcctgctgctacagatgacatagaagttctgcagaggatttcaaagaagttgtttgggtcattttgcttgggtaagtgcgtctcagctgctttgaaaagatggttttgcagttgcgatttactgangcatctatcgagtccttcctcacatgcaagacgcagcttagttgaattttcaaattttataaaagatggatgangactagtttgaaagattaaaatgagnctgtggagaancnagttaaggnnaaagattgngg

SEQ ID NO: 15198 - DNA, 425 bp, Arabidopsis thaliana
  unsure at all n locations
  Clone ID: LIB25-071-Q1-E1-E2
tttttggtttttcatttaagtctattcaatcatggaaaccggtttaaacatcttaaagctatcgctatgcgtcagcctagtcgtggttggatcatatgctcaggctcccgcaccatggaatccatctaatgggtttcgtccggggacatgtgaccactacgagtgtcccacctataaattggtagaggccggatacggctttgagatccgcatgtacgacgctgccctatggatatctactagtcctatcccctccctatccatgactcaagccaccaaaaccgggtttccgacgattaaataggtacattagaaggagataacaagagcaacnttgaanatgaacatgnganggncgggggnttgnanaagcaangnccnggaagatnantctncacnggggnncaaactgcccccccgagaag

SEQ ID NO: 15199 - DNA, 433 bp, Arabidopsis thaliana
  unsure at all n locations
  Clone ID: LIB25-071-Q1-E1-E3
aaagaaagaaaaaccattttaaaaatctttttatactaaaactccacagatctcccattctgagatgcagagtgataataacaacaattgagaccaaagcaaaatccgaaactgtcaccgttttcctttgtcttcttctctgccaaaatctttcaatctttatcttcttcctttttcttgtttttctaaaactttctccatcttgaaaaccaaaacaacccaagattaataatatacaccaatgggtactggttggcgacgagccttttgcaccaccgcccctagaaacagcgatgccgcggcgccggatctcgacaagcaacgcaccggctataatcttaccccaagtcctagcccaagaagctgcgttaagctaagcttttctaaccggggggaaagtaatcccnttaantnccccggntttaattccang

SEQ ID NO: 15200 - DNA, 403 bp, Arabidopsis thaliana
  unsure at all n locations
  Clone ID: LIB25-071-Q1-E1-E7
gcaaaaagacaattctttgtaataaatatcttcaattcgtaaatgtcttggcctttgtcgttttcaaacttcaacatcagcatcacgtgattggctaatacaaataaaattttctctttattttattattttgccacaagccgtgaaaagatggagaaaatgaatgtccgttttatgattgtgttgatggtaatgtctctggttctgggtttttcgtcggcagttgatttcagatggaggaaaactgcaggattctcagatagattcaccaagagctgtttcttcagtcgtgttcccagttcatgggcaacgtttatcctcttgggtactanaatgtaancatcaacatntgggcaaccaccanngacctnaatnacccggntnttgggannngggngngggg

SEQ ID NO: 15201 - DNA, 438 bp, Arabidopsis thaliana
  unsure at all n locations
  Clone ID: LIB25-071-Q1-E1-E8
ggaaaaattgaaaacctctctctttctcattttccctttttttctctttatctcaagctcattcttcttcttaataactagatctctctttctttcttcttatttttctcttctcttctttagtttcgcttatctcgcggctctgaccagctctcaagttgttcgtttctggttaatggatattgaaccctcttgggatcttgggggggtggttatttccttttcgaaattgcatgggaacatcaaatgaccaaaccaatacnaaatcatcacattctcgtactcntctccttctcttcatcttcgtatcgctccttctcntcagtagccttacaatcnccaatgactcggtcatcagttnagatnnatggttgncccntcaagaggggtctccncggnaanngtgagntccnaagggtgaannaagaagaggggngg

SEQ ID NO: 15202 - DNA, 409 bp, Arabidopsis thaliana
  unsure at all n locations
  Clone ID: LIB25-071-Q1-E1-F10
tacacaacttgtaacttcaaatagattactttcaaagaagagagagagaaagaaagatggagaagaacatgaagtttccagtagtagacttgtccaagctcaatggggaagagagagaccaaaccatggctctaatcaatgaagcttgtgagaattggggcttctttgagatagtgaaccatggattaccacatgacttaatggacaagatcgagaagatgacanaggaccattacaaggacatgccaagaacaaaagttcaatgacatgctcaagtccaaaggtttggntaatcttgangacagaagtcgaagatgtcgattgggaaagcactttcnacgttcgtcacctccctcaatccaatcctcaatgncatttcaaaantggtcnngnatggntacaggnccgg

SEQ ID NO: 15203 - DNA, 469 bp, Arabidopsis thaliana
  unsure at all n locations
  Clone ID: LIB25-071-Q1-E1-F11
acgtttgccnggccccgtccaaaattaaangggtcgacgcncgcgtccgctccatntggagaatcactgaggcaagtanagtttcgaatggttcagtttctaaacgggacagtctcaggagttgcanagaagcttaggtcanattattcttccactacnaatcacaatgaaactcatgagcgtgatggtggtgtgtcacttgcttcgactaactgggacttactacacaagcatcgtcccagtcttacaaggaagaaatctggtaaaagcaggcttcaagtgatgactaatcacgaacctgacnatggaaactccccaanggaagaagttaatcannatcacactgacctaagtgattcgtcttccntaatctccaantgtgtcggngttttnacgcattctttgnctataaagtgtcctttaaccgggaatcctcngntgcanatccgggtagngaaccccnanggtt

SEQ ID NO: 15204 - DNA, 436 bp, Arabidopsis thaliana
  unsure at all n locations
  Clone ID: LIB25-071-Q1-E1-F3
gacgaataatcggaatcgaaaaattcgaaaaaggaactgagaagaaacagatctgaagatggagtgtgtatttggtctagttgggaatggattcgctatcgtggcggcggatacatcagcagttcacagtattcttcttcacaagaacaaagaggacaagatcatgactcttgactctcacaagctcgtcgccgctagtggtgagcctggtgaccgggttcagtttacggngtatgttcagaagaatgtgtcactgtatcagtttcgtaatgggattcctttgagtantgctgctgctgntaacttcactcgtgggngaacttgccactgctttgaagaaagnatccatattcgggtgaanatccnggangggtggctntgncnaaacnangcccggggnanctccangngagnaggtggcnncagntgggancgg

SEQ ID NO: 15205 - DNA, 448 bp, Arabidopsis thaliana
  unsure at all n locations
  Clone ID: LIB25-071-Q1-E1-F4
ctctaagctctttctctgaacctacgcttctgctaagctattctaagagaagccagactagcaataaacccttcattttaagcattctgtttccttcttgagaaacctagatattttggtttcttgtatccggtgatgaagatacagtgtgatgtgtgtgagaaagctccggcgacggtgatttgttgcgccgacgaagctgctctctgtcctcaatgcgacatcgagattcacgccgctaacaaactcgctagcaagcaccaacgtcttcatcttaattccctctccaccaaattccctcgttgcgatatctgccaagagaaggcagctttcattttctgtgtagaggatanagctctgctttgcanggactgcgaatgantccaaccangttgggcaaattcccgattttgcgaaatcaccanaggggtcttaancantgggattt

SEQ ID NO: 15206 - DNA, 423 bp, Arabidopsis thaliana
  unsure at all n locations
  Clone ID: LIB25-071-Q1-E1-F5
acattagggtttataccaggaatggagaattacagagttaaagatataccagaggaagttgtatttgaagatttggactctgttttcccaaaggctttataccaaatgagtcttgctttacctcgtgcctctgctgttttcatcagttcctttgaagagttagaacctacattgaactataacctaagatccaaacttaancgtttcttgaacatcgcccctctcacgttattatcttctacatcggagaangagatgcntgatcctcatggctgctttgcttgggatggggaagagatcagctgcttctgtagcgtacattagcntcggcaccgtcatgggaactccgnctgaagacctggtggcnatagcacaaggggttggggntnaangccnangtgggccgtttggttgggccccggg

SEQ ID NO: 15207 - DNA, 442 bp, Arabidopsis thaliana
  unsure at all n locations
  Clone ID: LIB25-071-Q1-E1-F7
acatcactaatctctgcaatttttactctcctccttcacgtcttttcctcttaattttttctaggaaaattctcaaatccatctccgcgatacgaacagagagaagaagacttagaaaaatggctgttcaacctacaaggaataggtctagctggacttgctgtgatgggtcagaacctaggctctcaacattgcaagagaaaggcttcccaatctctgtttacaacagaactacttccaaagttgatgagaccgtcgaacgagccaaaaaggaaggcaatcttcctctttacggcttccatgaccccgagtcttttgtcaagtccattcagaagccacgcgttattatcatgcttgttaangctgggtctccccgttgaccaagaccatcaaaaancctctcggnntanantgggggnaanggngnnnggnnnattttcgg

SEQ ID NO: 15208 - DNA, 445 bp, Arabidopsis thaliana
  unsure at all n locations
  Clone ID: LIB25-071-Q1-E1-F8
tctggcacaacaacggagtcaggttgtcgtttccaanagccgagtcttctataaacatcactatgggttgtacgcttcagcgtgggatagcaaaaagcttaagtcaggaaaacctagtggagttatctgatgaaaatgatgatctatgtcctgtggagtgtgtcactgagttcaagacagatgatgaattgcttagcgttcttgaaaagtcgaaagaaactaattctttggttgtggttgatttttatcgcactgcatgtgggagttgtaaatacatagagcagggcttctcaaaactgtgcaagcaatctggtgaccaagaagctcntgttatcntccttaggcataatgtggtanatgaatnatgatgnacaatcctgnagtcncannaaagggcccgtttcaagggggggtccccccctccaaatttgaaaannaaangggg

SEQ ID NO: 15209 - DNA, 206 bp, Arabidopsis thaliana
  unsure at all n locations
  Clone ID: LIB25-071-Q1-E1-F9
ctaaagtagtaaanntaatggnaacttcagggtttaagcatttggtggttgtgaagtttaaggaatgatacaaaggttgatgagatcttgaagggcttggngaatcttgtttctcagattgatactgtcaaatcctttgaatgggganaagatanagagagtcanganatgcttanacaaggattcactcatgcattttcgangac

SEQ ID NO: 15210 - DNA, 283 bp, Arabidopsis thaliana
  unsure at all n locations
  Clone ID: LIB25-071-Q1-E1-G1
tctaagaaaaacaaaatcaaactcataaagaataatgggagaaacagaagagaaagtgaagaaccatgataacaaagaagaggaacacaacaaggctgagaaagctgagaagaaggagaagaagaaggataaagataagaaggataagaacgaggacgataaaaatggtggaggagaagaaggggaagatcaagagaagaagagcaaaanaaaaagaannanaannananaaaaannnaaagaagganggncancaaaanagaaaaagggcgggccncnctaa

SEQ ID NO: 15211 - DNA, 93 bp, Arabidopsis thaliana
  unsure at all n locations
  Clone ID: LIB25-071-Q1-E1-G2
tgttacaatcaaactatgggatcgtgggtgggccaaccaagantccgcagcaaggtgggaacgtttactgtccncgctgttttctgncaattg

SEQ ID NO: 15212 - DNA, 386 bp, Arabidopsis thaliana
  unsure at all n locations
  Clone ID: LIB25-071-Q1-E1-G4
caaggcaatcttaacaactcgtttatgacgggtcaggatgcgagcttcggacctctttcgacattgaatgggtttgatcttcaagcactanccgtcacaggtcagttacctgcacagagtcttgcacagcttcaagccgctggtttaggccggcctgcgatggtctctaagtcaggtttgccggtttcctccattgtggatgagagaagcatcttcagctttgacaacacganaacaagatttggngaaggggcttgggcatcacgggcaanaaccccaacagcanccacangntgnacttacntcacgggtgtccccacggggtttacaannagcnagnntcctaatgnggtnaatccaangagttantcnnnaagnangatggc

SEQ ID NO: 15213 - DNA, 421 bp, Arabidopsis thaliana
  unsure at all n locations
  Clone ID: LIB25-071-Q1-E1-E10
ctctctcagattcttcttcttcctcgcagatcgatttttttttgaagctaaatctcaaaaatggagaacgacgcaggtcaggtcacagagctctacattccaaggaaatgctcggcaacaaacaggaatgatcacatcaaaggatcatgcttcagttcagcttaacattggtcatcttgatgctaatggtctctacactggncaattcaccacttttgctctctgcggatttgtccgtgctcagggagacgcaagacagtggcgtggacaggctctggcagaagaagaaggtcgaagctaaacaacagtgagagacaatctgacaatgtcataagctcntgtttgttttttgaggtttcgatttattaactanngtgggctttggcattgaantttgaaaatgttaggttcccccttaagg

SEQ ID NO: 15214 - DNA, 443 bp, Arabidopsis thaliana
  unsure at all n locations
  Clone ID: LIB25-071-Q1-E1-B2
acagcaaagcctctcgttgctagaggaatcaaacaatggtgtttgtgaagtccaccaagtcgaatgcttacttcaagaggtaccaagtgaagttcaggagaagaagagatggaaagactgactacagggcaaggatccgtcttatcaaccaagacaagaacaagtacaatactcctaagtatcgttttgttgtccggtttaccaacaaagacatagtggcacagattgtatctgcaagcattgctggtgacattgttaaagcttctgcttacgcacatgaactgcctcagtatggtctcactgttggtcttacaaactatgctgcagcttactgtactgggccttcttttggctcgccgtgttttaaanatgttggnaatggatgaccagtatgaggggaaacttnngggcactggggaanacattttccctttntgcccaag

SEQ ID NO: 15215 - DNA, 427 bp, Arabidopsis thaliana
  unsure at all n locations
  Clone ID: LIB25-071-Q1-E1-B7
acgcagcgctcatagccgtggccaaaaactgtccaaacttcatccggttcaggctatgcattctcgagccacacaaacctgaccacattacatttcaatcactggacgagggctttggtgcaatcgtacaagcttgcaagggtctaagacggctctctgtctccggtctcttaaccgatcaagtctttctctacatcggtatgtacgcggaacagctcgagatgctttcgatagcttttgcgggggacactgacaaaggaatgctctatgtgttgaatggatgcaaaaaaatgaggaagctggagataagggacagtccttttgggaacgctgcgcttcttgctgacgtgggtaggtacgaaacaatgcgattcctttggatgtcgtcttgtgaagtaacactccggtggctncaaaaaggtnncng

SEQ ID NO: 15216 - DNA, 482 bp, Arabidopsis thaliana
  unsure at all n locations
  Clone ID: LIB25-071-Q1-E1-B9
ctgttaacnttgccngtgccggtccnaagattaacgggtccaggcacacgtccggcttctcgtgtggagccttacatgtgtgatacagattgtaanccttcttttccaatgccgaattttataacacaagctctctttganggnagtcanactgggcntcgtgtacgatgatgggagatcattcccnagcaacantgatgtttgtagtcatgcgcctcagaattttttaggagctcaatccagcttgcagagttcctctgttgaaccangttaacttcgatgtgttactgggatatggtgaagctactggtcatatcaagcctttgcccgagaatccaaatncnaaatnnacaatgacatccatcaacttgtttgccgaagtccgcgatctncctaccccttaccatctattaantaattcctctgtgtcactggattaaagatgaagtagaaggtagtggtgtctcctccctttancaang

SEQ ID NO: 15217 - DNA, 431 bp, Arabidopsis thaliana
  unsure at all n locations
  Clone ID: LIB25-071-Q1-E1-C1
ggnatccattttcgtttgaatctcaacgttttttgcttgattttagcttctgagagagtccagatccaaggaattggaggaagaataatgtcggcaaggcatgggcaatcgtcgtatcgagatcggagtgacgaattcttcaaaattgtggagactctaaggagatcgattgctccggctccggcggcgaataatgtgccgtatggtaataatcggaacgatggtgcgagaagagaggatcttatcaacaaatccgagttcaacaagagagcttctcatattggtttagctattaatcaaacgtcgcagaagctatcgaagcttgcgaaacttgcaaagaggacatcantgtttgatgatcctactcanggagatacaaggagctgacggtaatcatcaagcaagagatnnccggcccaaaatntgncccg

SEQ ID NO: 15218 - DNA, 414 bp, Arabidopsis thaliana
  unsure at all n locations
  Clone ID: LIB25-071-Q1-E1-C10
ctctccactaccatggcgtgtcctagagtgatttttctgattctgatcacgttcttcattttacagactgctttctcaagttcttggcaaacattgagtgggaaacctccggctgtgattgctcgaggcggattctctggtatgtttccagattccagtattcaagcatatcagttggtgaatataacaacttcaccagacgtaatgctctggtgtgatcttcaactaacaaaggatggtgttggaatctgctttccaaatctgaagcttgacaatggttctaacgtcataagaattgacccacattacaaagaaaggttttctgttgatttcacatggaaggaactctctgatgtgaaattggcacaaggtgttgtctcaagaccatatatattccgaagatgtnacctccag

SEQ ID NO: 15219 - DNA, 409 bp, Arabidopsis thaliana
  unsure at all n locations
  Clone ID: LIB25-071-Q1-E1-C11
canctcttttcctttaacaaactatttgaatctaaattcaaattgatttgttaagggaaanctgagctataaaaaccatggcaaagatctccttcgtacttttcgttgtggnccttatcgcctttctccacgcttatgaagctcgcaangtagtaaatctcggtgaagcatttgaaaaagacttacataaagccgaggccatgatcgcggaagaattaaaggctaacaaaannaacattcaangtttgaaatctgaggtgaaaacgttgagcaaatcaagaagtgatgttgaaggaacttggnaatgcttacaanaangatatgggacttaaggccttacgannagaaactcaaaaacntcagcaggatcgtaaccctcaagaaagcncctatnnanngccnacnncaa

SEQ ID NO: 15220 - DNA, 418 bp, Arabidopsis thaliana
  unsure at all n locations
  Clone ID: LIB25-071-Q1-E1-C2
taccaagaaacttggttttaaaactggtactactaagtcatccgaaaaacggtttacacaaaaaccttttggcaggcaccttgtgtaggtcaagttgataactgaattccaggatggacatttttccggcggtttacttgaaactgccgatatccgttttcgacggattgaatgcngttctggacaaaccgtgcaggtcaagactaataaaggagacattaaattttccggttacatgtcccatacccaaccttagagaacatgtgtagcctttagcttacgcttccttgtgtgctgttatattgagtatgatatgaggtaatttttgcctcctgnnttgtaacacgnggtantnttggnccctntaaaantttgcgntngnnaattttcccaanagaggtnnancnngnggncnggc

SEQ ID NO: 15221 - DNA, 428 bp, Arabidopsis thaliana
  unsure at all n locations
  Clone ID: LIB25-071-Q1-E1-C5
ctttgcagcaagctcgaacgattctgagccgcctggaacagcggctaggttcaggttcgtgtcttttgattccagaacaagtttccggattcttccactccgagagacgagaggaaactgcaaaagagaacgagtttgtgtaaagcagtttctcttttttcttctgagtttattgaatttggttaccttgtgaagggaaaaggtcgcagagccgacttcaatggttaagtcactcgtaacgtccgagacaggcctggaacaacagagagatcagcaacattttgaggaaagaagagatgagttagtgaaagagtaccattgaggagtgtgtctgatactggaacttggacgaaacgctcttttagcaagcaacacnttgcttattagactcaagaagcattanaacacccaattggntnttantaang

SEQ ID NO: 15222 - DNA, 439 bp, Arabidopsis thaliana
  unsure at all n locations
  Clone ID: LIB25-071-Q1-E1-C6
atttctaagctaagaaaatctttaaaaataacaaagcttctaaaataataatccgacctaccggattcaaaccattgatctgaagatcatctataaaccagtccttgatctataaactaaaataagggaagaaaaaaacaagagagagaaatagagaatgaagtcttttgcggctaaggtagaagagggagttaaaggaatagacggaaagccgtcggtaggtccggtgtaccggaatcttctgtcggaaaaaggttttcctccgattgattctgagatcaccactgcttgggacattttcagtaaatcagtggagaaattccctgacaataatatgcttggatgggcgtcgaattgttgatgagaaggttggaccatatatgtggaaaaangtnnangggngtttncannnagttttttncnagtggggccgggccgg

SEQ ID NO: 15223 - DNA, 404 bp, Arabidopsis thaliana
  unsure at all n locations
  Clone ID: LIB25-071-Q1-E1-D1
gagtaaacgttaatacacagatctccagcaaaaggcacatagataaattcgaggcagttcctgattctaaaagattggcagttggggctcaaataggatcacccaagagatctgttctcccaagaatgtccactttatcccgagaaacatcatttaagggcttagagaagccaacgagaaagctagctcattactcatctttcaatagccactccagtgatgacacagaaagcacacgatctactgactcacagctccaagtcccctaaaggttccgtttttgaagtccaattcgtttaattctttgagctctagatcaaaagtgagaccagtgggatgatgatatgcttccacgacagangactgggaatggnaaatcctcccttgaagttnagggaggggtt

SEQ ID NO: 15224 - DNA, 418 bp, Arabidopsis thaliana
  unsure at all n locations
  Clone ID: LIB25-071-Q1-E1-D11
gagcttatcattgagtaatcatgttcctccattaacgctcttgagccatgaacgaagaatcctcaagctccaaagtcgatcgtctattctctttcaccaactcttccacactaagttccttctcctgtcgaattcttcctctttgtcttcttcacatggagttgttgctatttcggcatctccgtcttcagtcgcagttccggaattagaagacgaggaccacttcgatgacgaattacgtcgtctattggcgctcgtaccggaggagatacgccagacaccgaaggagcaccctgaaattagtgaactcatagagatagtgttggatttaggtcgtaaacntctggcgcgattcccttcaggtgactttgntatctccgaggatgctgttagagttaaagatntggaantccctggg

SEQ ID NO: 15225 - DNA, 85 bp, Arabidopsis thaliana
  unsure at all n locations
  Clone ID: LIB25-071-Q1-E1-D12
gacnaggtcgccctccgtgantgtgatcncgaggtggtttcggtgggatttcagctgctcgcactcttcangatgcttcctttca

SEQ ID NO: 15226 - DNA, 435 bp, Arabidopsis thaliana
  unsure at all n locations
  Clone ID: LIB25-071-Q1-E1-D3
agagaaaggttttggagatcgagaccaaactccgattgaaagaggatgcattcttttggttacagagcgaatgctctactcacattcgccgtcacgattctagctttcatttgcgcgattgcttccttctctgataacttcagtaaccaaaatccctctgctcagatccagatattgaatatcaattggtttcagaagcaacctcatggaaatgatgaggtcagcttgacactgaacataacagctgacttgcagtcactatttacttggaacacaaagcaggtatttgcttttgtagcagcagagtatgaaacctccaagaacgccctgaatcangtttcactatggtatgccataataccangagaaagagcatgccaaattctggatacaaatctcaaacaagttaccgtttcataagattagggncantag

SEQ ID NO: 15227 - DNA, 435 bp, Arabidopsis thaliana
  unsure at all n locations
  Clone ID: LIB25-071-Q1-E1-D4
atcatggaagtctttctgaccgtatcatgagctattacggggattctccccgaggaatggttgaatctgcgtttgagtttgcaagaatatgtcggaaattagactatcacaactttgttttctcaatgaaagcgagcaacccagtgatcatggtccaggcgtaccgtttacttgtggctgagatgtatgttcatggatgggattatcctttgcatttgggagttactgaggcaggagaaggcgaagatggacggatgaaatctgcgattggaattgggacgcttcttcaggacgggctcggtgacacaataagagtttcactgacggagccaccaagaaganggagatagatccctgcaaggcgattggctaacctcgggacaaaagctggcaaacttcaacnaaggggntgccccncttntagaaaaacaanng

SEQ ID NO: 15228 - DNA, 378 bp, Arabidopsis thaliana
  unsure at all n locations
  Clone ID: LIB25-071-Q1-E1-D5
cgtggggagcnacacnaccttcatcaaacttcttcataacaaatcacatttctctctcttctctgcttgaatccattacagagggattgtggagtggtttggtttgatttgatttcgatctgtgacaatggtggagactagtatcgacatggaggaangaactctcgagatcggaatggantatagaantgtctccggagttgctggacctttgagtcatccttgacaaagtgaagggtcnanagtnccagcgagattgttaatattcgcntatgagatgggatcaacgangacgtggtcaggtcttgggnggttgattggggganaaagnctgtngtcccagnntttttgaacngaatnatcctggggagttganna

SEQ ID NO: 15229 - DNA, 423 bp, Arabidopsis thaliana
  unsure at all n locations
  Clone ID: LIB25-071-Q1-E1-B1
atctctcttattttgtgagctttttagatcctcctttcttcatcgtttcttttccgaggtttcaaattcgttcaatttctcgattgaagatacctgaaatcgcgttattctaggtccgccgctgttggatctgcaaattccccttcgaatttgaacatttgtgatttcaaattcttcgagaagatgagcgcgaaaaagcttgaaggttcgtcggctccggcgaatcgacgggatccgtacgaggtcctttgtgtatcaaaggacgctaatgatcaagaaatcaaatcccgcttacagaaaattagctcncaagtatcatccngataagaatgcgaacaatcctgatgcttctgagcttttcaaggaagttgcattttcgtaagaacanttttgtcctgattccngnaaaagaagaaagggctg

SEQ ID NO: 15230 - DNA, 62 bp, Arabidopsis thaliana
  unsure at all n locations
  Clone ID: LIB25-071-Q1-E1-D9
gagctcgaantcagacactgaagatctgcaaaggttggtggatcagtgcttagagagcaatg

SEQ ID NO: 15231 - DNA, 282 bp, Arabidopsis thaliana
  unsure at all n locations
  Clone ID: LIB25-069-Q1-E1-D11
ctcaaanncacactcttctctctctcntcntcttcttcccctctttcaatttttttcagattccgagtanantccctaaatctccgtctctctgtttctctcttctctcaagtctcagctatgaatccttaccagggtttantcggttctgtgtttntcactctgcatttgcttctgtggagtagatagattcttcagggctaaatgagtcattttctcacnttctgcttcctctcaatccttcgnctccnccacggtgccaangccgtcancgagcacnga

SEQ ID NO: 15232 - DNA, 418 bp, Arabidopsis thaliana
  unsure at all n locations
  Clone ID: LIB25-069-Q1-E1-D12
aatctaacattactctctcaacacatctctctttcttctccatttccttcttctctttcattctcttatttaagatttaaatctgctcaaatgcttgtaaacaaatttcaagttctttaaacgatttccttttcaagaaaaatccttctccttcttctttttaccacatagatcttcttgatctacaatggattctgtttctctttctgaggttactgtcattaaaggaacaacacatttgggttttatgcacagtttcagacagccattttgtggtgtcaaaatatctccaaagttctatttatccaaagttgatggaccaaaggcaatatcttcgagcagcaacacaaagagtcaatttgtttatggangaggaaagcatanctgcaaacttcaagantcaaggttataagatgaa

SEQ ID NO: 15233 - DNA, 485 bp, Arabidopsis thaliana
  unsure at all n locations
  Clone ID: LIB25-069-Q1-E1-D2
accttgccggtgncccgtccaaaataangggtcgacgcacgcgtccgcaaaaaacctagatccacaacaatggcggaagagaagaaatcgaagcagagacatcgagtcatggtcttcgaatccatgtatcccatcctcgctcttatgcttatactcgtcgcttgcgtcgagctttgcgatgcagctactgttgtagatgtttatcgtctaatccagtacgatatctctggtgttccttttggttctcgtttctcttctcttaatcatcatgctgnttctcttagcttccaacgtggtgcccgatctatctcgttctgtacttatacttcctcntcgggagcttgacattgcntttgttcaagattacatctcgnaaaagcaatcgcttggtggattgttganttttgcntcctcacacgtttaaggcctgggaatgtttgtgggtgggaagttttaanctctgaaaaatgatggggttnaaggag

SEQ ID NO: 15234 - DNA, 69 bp, Arabidopsis thaliana
  unsure at all n locations
  Clone ID: LIB25-069-Q1-E1-D4
acctgtcggtttgcttgangtgatcccgcagcacatcaactggcgtccgccttcatactttggtcgtga

SEQ ID NO: 15235 - DNA, 333 bp, Arabidopsis thaliana
  unsure at all n locations
  Clone ID: LIB25-069-Q1-E1-D5
cattcttccgggaagaggaaaaggtttcttcgatcgtcgaagagattctttggacaagtcccctccttcctggttcaatcttcgattcagctctcttttaatttttttggttttgggaagctgctatgttatttgagaggcttaccaagaaaccaccttcgcttgttgatctttgcgtaaggaaagcgattganaangtaaagtacattggatatgttggtggggttgattttcanctccttnanncanattctgcancactgtancctanaacagctnaagcacatacaggatgctacngacgncccagatcttagtcgagntcaccnagga

SEQ ID NO: 15236 - DNA, 426 bp, Arabidopsis thaliana
  unsure at all n locations
  Clone ID: LIB25-069-Q1-E1-D9
aacacaaaaatcgacatggcttccaagtcactctttcttgttgccttacttgtcggctcttttgctttcacttcatttgccagtgtcgctaacaggaagctgaagagtggtctcgaggaccaaaagacattcttccaccatccaggcggaggtctcggtggaggaggcggtattggtggaggcagtggtcttggtggaggaggcggctttggtggaggaggcggtcttggcggaggagctggaggcggtggcggtttaggaggaggcggaagcggtattggtggtggtttcggtgggggaagccggttccnggaagttgtttcggttgtggacancnttgatgaanaactatganattttgacgttaaaaccaatggnnntggaanngcatgggcaatggggttttaacgttcccaaagttcttag

SEQ ID NO: 15237 - DNA, 115 bp, Arabidopsis thaliana
  unsure at all n locations
  Clone ID: LIB25-069-Q1-E1-E1
ctttgngtctccgaaaaggttggttatgtcatcttctgttccaaactcggaccggaanattgttactggncccgccggttatattcatgaagaccttcctcatttctccgacnac

SEQ ID NO: 15238 - DNA, 403 bp, Arabidopsis thaliana
  unsure at all n locations
  Clone ID: LIB25-069-Q1-E1-E11
ttcttcttttcttcntcttcggttgctaantcnaagatggcgactgntctggtttctcctcttacttcacaactcaaccatgaagctgtctgttccaagtttgtgttacccaaatcgccgttcatgtcgggatctaagctcttttcatcgaacatgccttgctctactgttcctagacgcacaagaagatcacactgctttgcttctgctaaagatatgagctttgaccatatccctaaataatttcgtggagacaatctcaaagacngagtgatgcacgaacttcaagaacgtaccacaatatttttacgggcttaantcagctcagatggatatgttcatgacataagatagccctgtcngtangcagcggaaanaagttatangaaggaaagcaccncgt

SEQ ID NO: 15239 - DNA, 153 bp, Arabidopsis thaliana
  unsure at all n locations
  Clone ID: LIB25-069-Q1-E1-E2
gnattanaggaagctcgtaaagccgggcttgctccagctgangttgatgaggatggcaaggaaattaatcctcatattccgcantatatgtcatctgctccatggtatcttaattctgaaaaaccgagtttgangcatcantgggaaatggaa

SEQ ID NO: 15240 - DNA, 499 bp, Arabidopsis thaliana
  unsure at all n locations
  Clone ID: LIB25-069-Q1-E1-E3
nnnggnnnnnngnantgttaccctgccgtnncggtccgaaattcacgggtcgacccacgcgtccgcggacgcgtgggctcttccattcaaatctcacattccctcttcacaacaacaggttcgtattcgctcatcttcttcgcnttctgatcttggaaatcgcaggcattgttcgtctactcgaggatttcaattttggtcatacaagagaagcgaagcagcgtcgccgttcaagacgaggtacagagaaaacgaanaanaagaagatatgacgattaaaccggcggttcgtatttccgacgggaatctaatcatcaaaaaccggacgattctaaccggtgtaccagataatgtcatcacgacgtcagcatcggaagctggaccggtagaaggagtcttcgtcggagctgtatttaacaangaagagagtaaacacatcgtaccgatnggtacgcttcgcaattcccggtttaagtcctggttccggtttaagctctgg

SEQ ID NO: 15241 - DNA, 481 bp, Arabidopsis thaliana
  unsure at all n locations
  Clone ID: LIB25-069-Q1-E1-E4
tgtttacgctnnccgtgncctgtccanagttaaagggtcnacgcacgcgtccgcaggacnttatccacagtccacacacagcgagactctatttactcgccggcggaagaacaaaatggcgggaagagcgattttctctgtatcttgttcatctactccttccttgtgtatcccttattcaactgcttcgttttcatcgatgaatcgactggcgctccccgccgtccggatttctccccgaaccaacagatttcccaggattcactgctctatgtctgctaacgacatcaaagcggggaaccaatatcgaagtcgatggtgctcccttggccgtgttcttngagtttctncatgttaaaccnaggaaaaangtgggggcattntgttgagaactaaggatnanggaaactatgtgaannggnaggcacantccnangagnaacattttcgtgctgggaaattnccgttnaanggaaggnca

SEQ ID NO: 15242 - DNA, 393 bp, Arabidopsis thaliana
  unsure at all n locations
  Clone ID: LIB25-069-Q1-E1-E6
gaannnnntctctttgtcnttgcagatgcgacacgcaaaacgacnattcngatcncgcttgtctgatttcaaaaacaatgagaagatagttctgattatataacacacaaaccctacttcattccttcatcatcgtctccaatcattacccaaagatccgtctttttctttacttcatgtcgaagcaaacgtacaaagtgtgtttctgctttcgccggaggtttcgttacactgcatcggaggcancgcgtgagatcaagaccattttcgaaaagtactcaganaatggagttatgaccgttgatcatctccacaggtttctgatcgatgttcaaganacaagatnnngccnccagagangatgcacagtcanttatcaattctgcatcgngc

SEQ ID NO: 15243 - DNA, 130 bp, Arabidopsis thaliana
  unsure at all n locations
  Clone ID: LIB25-069-Q1-E1-E7
ctcctcncctgccttcgccggtaaggccgtcaagctttcncccgcggcatctgaagtccttggaancggccgtgtgacaatgaggaagactgttgccangctaaagggcccancaggcaaccnatggtac

SEQ ID NO: 15244 - DNA, 419 bp, Arabidopsis thaliana
  unsure at all n locations
  Clone ID: LIB25-069-Q1-E1-E9
ctcgaagcttgtgccctttcattattatgtcaacaaccctcctctattgaagatttcttcaatcatcttctccacaacaaaaaaataaccctaatttacacagaaaatatgtggggaattggaggaaattactactggcgaaagaaaaacaacaacggaggagaaagcgaagcgatcgttgtggtattcgcttggatgtctagcgaagaacgcattctaaatgaaccatgtcgatctctattcttctcttctttgggattctctcgtttgccattctcaatttctcaacatgtntgttttcatctccttctctcatctctctgttttctaatctctctgtttcataaattgaattctcttttgattcanacaggtttcttccangatnnagccgcaganttagcttctaaatgttgttt

SEQ ID NO: 15245 - DNA, 143 bp, Arabidopsis thaliana
  unsure at all n locations
  Clone ID: LIB25-069-Q1-E1-F10
nctgctcgccactgtcgagcaagatctttcntcatcantacaaanggccctacatgccaccaatgagggctttggtatccgctgatcttttgagaaaccctgatgtctgatgttagggtttctgttgtctcnngcttgaccga

SEQ ID NO: 15246 - DNA, 487 bp, Arabidopsis thaliana
  unsure at all n locations
  Clone ID: LIB25-069-Q1-E1-F2
acttttccctgnccgtccaaaattaaanggtccgacgnacgcgtccgggaaaangaagggtgacgtttttcacattgatggcaataatgtctctcctcttagccttctcgttagtccatggaggaggagagtctggaacaccttctaatgcanccgctaccccgactagcccaaccgaaggatccagtggttcaagtggttcagctcatggacctaattggggatatagttggggatggggttcagccccgggaggtggttntggctatggttcnggttcgggttcggtcaccanatggangaggaaaaggggctggattcgggtttggttcggggtcaggttcangaactggatttgggtctggctcggganggagganganccacagaccgtggttctggccacngaagtgggacccnncannctggttaaangngnttgctcccggaagttggaaattggngaanggattccctggggcccang

SEQ ID NO: 15247 - DNA, 496 bp, Arabidopsis thaliana
  unsure at all n locations
  Clone ID: LIB25-069-Q1-E1-F3
nntggnnnnnnngnanggttaccttgccgtgccgtccgaaattcaagggtcgaccnacgcgtccgttctccatggctgtgattcaagccaatcaggttcttgaagatcagagccaggtcgaatccggtaattttgggacttttgttggtgtttacgatggtcatggtggtcctgaagctgctcgttatgtctgtgatcatctctttaaccattttcgagaaatatcagcggaaacacaaggagttgtgacgagagagacgatagaaagagcctttcatgcgacagaagaaggattcgcttccattgtgtcagagctgtggcaagaaataccaaatttggcaactgttggcacttgttgtttggttggagtgatatatcaaaatactctttttgtggcaagtcttggagattcacgggttgttcttggaaagaaaggcaactgtggcggactctctgctattcagctgtccactgaacacaatgccaacaatgaana

SEQ ID NO: 15248 - DNA, 498 bp, Arabidopsis thaliana
  unsure at all n locations
  Clone ID: LIB25-069-Q1-E1-F4
nnnnnngggnngnngaacgttagcttccggtgccgtccanaattcangggtcgacccacgcgtccgattgggtgacattgttcctgctgatgctcgtctcctcgaaggagatcctttaaaaattgaccaatctgctcttactggtgaatcccttccaaccaccaaacacccaggagatgaagtattctctggctcaacctgcaagcaaggtgagattgaggctgttgtcattgccacgggtgtccacaccttttttggcaaggctgctcatcttgttgacagtaccaacaatgttggccatttccaaaaggttttgacatcaattggtaacttctgtatatgctcaattggattggggatgttgattgagatattgattatgtaccctatccaacaccgcacatacagagatggtattgataatctattggtgcttttgatcggaggaatcccaatcgccatgccaacagttttgtccgtaacaanggctaatggatt

SEQ ID NO: 15249 - DNA, 416 bp, Arabidopsis thaliana
  unsure at all n locations
  Clone ID: LIB25-069-Q1-E1-C8
ttctgatgcncatcggatttataatcttgggaggagaagccatcataagttacaaatcgcttccgctgganaaaccagtgaagaagttgatcnaccttatantccatgccattgctcnggctcttgggatatttggcatctgtgcacgcctttaagaancacantgaaagccatatccctaatctctanagtctccattcctgnattggtattggagtcatttctctttatggcttccagtgggtgtacagcttcanangtgttcttcttcccaggangatcaacacnatttgaaaagcggattgcttccgtggccacgcaatgcttggcctgtttgtttacntacttgctgtcgggaatgcagctttanggtttcagggaaaangctgacnttcnngaaaattggangggctgng

SEQ ID NO: 15250 - DNA, 422 bp, Arabidopsis thaliana
  unsure at all n locations
  Clone ID: LIB25-069-Q1-E1-A12
aaaccaccgggctctgtttcaataaaaaaaatcccctccctctcatatttacctcccgaataaaaccggagggagagaaaaaacataaaaagcaaaaaaaaaggtaaaatcaaaaaggggaaaaatatataacaacaaaaaaaaaaaagttagaaaaaatggcagtaggaaaggttgtggtatctgtggcatcactcctcctagtggtgggtgttgccataggagttatcacgttcgttaataaaggaggcggcgccaatggcgacagtaatggtcccataaactctcatcagaaagcggttcagacaatttgccagtcaaccacagaccaaggttcgtgcgcgaaaacactcgacccagtcaaaagtgatgatccaagcaagctttgttaaagccttcctgatggcactaaangacgcgat

SEQ ID NO: 15251 - DNA, 487 bp, Arabidopsis thaliana
  unsure at all n locations
  Clone ID: LIB25-069-Q1-E1-A4
accttgccgtgccggtccaaaatcangggtcnacgcacgcgtccggtanatnggcagagnaaaggcggtgcgatttgttattacaagcgcagggcttgttggatccgatggtccactgcagtgtggagcttttgacatagctttcatgtcatccttaccanacatgatagccatggctccanccgangaggatgancttgtaaatatggttgcaactgctgcttatgtcactgaccgcccagtatgtttccggttccctagaggctccatcgtcancatgaattatcttgtccccactggattaccaattgaaatcggaangaggaagagttctcgtanaangtcaagatgtggctttacntggttatggancgatggttcaaaaattgtcttcatgctcactcncttctctccaanactcggtttgaaacncgactggtacctgnggcaagatttttgcaanacccctagnacatcaanncttggg

SEQ ID NO: 15252 - DNA, 421 bp, Arabidopsis thaliana
  unsure at all n locations
  Clone ID: LIB25-069-Q1-E1-A5
cgnngccgtagccgtcnaaagtcaanggnccgggtcgacccacgagtccgttaagcttctctcacatttctctttcaaatttcttcgagtctctcncgctctctccgtttcttcgcggtctctctctctcagatctctccgaaacattcttcgtagtgangcaaaatggggttgagtttcgccaagctgtttancaggctttttgccaagaaggagatgcgaattcngatggttggtcntgatgctgctggtaagaccacaatcttgtacaagctcaagctcggagagattgtcaccacnatcncnantattggtttcaatgtggaaactgtggaatacaagaacattaagtttcaccgtgtgggatgtccggggtcaggacaaagatccgtcncttgtgggngacantanttcnaanana

SEQ ID NO: 15253 - DNA, 421 bp, Arabidopsis thaliana
  unsure at all n locations
  Clone ID: LIB25-069-Q1-E1-A7
atctccggcaacaaacgcgccggagtcaagattttgtctctcaactgcttctcctttctttccccattgtaaatttctaaactttagccagaaattgacccaanaccctaaaatttgtgtttttggttctccgacctaataatggaggagtctcgaggatcttctgatcaagaagatgaacaaattgttcaagtcagggaagctttaatgtgtcccgacggtgaaaagtttgaatctttacgaacggcgaggttcttaaactacacaacggcatctatcgacgacgatgtctttgaccttcctctcgatgcgtttgtgtgtagaccaccggaagggtttgatccaacggcgaagatctcgtttccagggtggggaactccgtcgttgaactggattgagtgggttaatgtaatggctaaag

SEQ ID NO: 15254 - DNA, 94 bp, Arabidopsis thaliana
  unsure at all n locations
  Clone ID: LIB25-069-Q1-E1-A8
ttatcnggcgacaggactcttacncgtttattgcatacgaagacgctcaatgtntccgaggccaggacgaaagatctggtaccgtatcctgnta

SEQ ID NO: 15255 - DNA, 480 bp, Arabidopsis thaliana
  unsure at all n locations
  Clone ID: LIB25-069-Q1-E1-B1
aactgttccgccgccngngaaagtcaaaaggtccnnggacgcgtcccgctcgctcactctcgattggnatctctcgctccgtccntcctcagatctgatcgtccgccggttttcacgatgccgtcttcctcctccgccgccgtcctcgtgttccttcttctcgtttcccttctcactcctacgttcgcatccgattcagatcacaaggtaagactcggatctccagtcgttttttcttttcttttaatgcagctcgaaatcgagcactgtgtccgtagatccgtgatttgcatggtgtttgcgattgaattttttttcanggatctgttcgtttacggattgctangatcctcgagcttctattcattgtgatttangcgtatcctttcgttgcaagtctaggcgtaatttgtcnaatcattgtgatttaggcntttcacaatcctcgattttaaaaangaaantttganggntggnttg

SEQ ID NO: 15256 - DNA, 281 bp, Arabidopsis thaliana
  unsure at all n locations
  Clone ID: LIB25-069-Q1-E1-B11
tattttagattgatacgtcaaagctcctcctcgcgcacgttagctaaaggaatgtcttgtactctttttgttgttgttgttgactttttgaacaaagaaagaaactaatcaaaaagacnaagaggaagaagaagctcancgtttctatctctcattttanccacngatcttcgccgattgcgtcttgcttctcgtcgtgtgcttccgatctctcnctggattttctnaatttcgtacngactangtnaattgtgtnnaaaggagtttagttgatcantgtt

SEQ ID NO: 15257 - DNA, 421 bp, Arabidopsis thaliana
  unsure at all n locations
  Clone ID: LIB25-069-Q1-E1-B12
ccataaaacctagtagtggaaacatgactaagaaagtagagaacaacagagaagcaagcagaaagtatcctcctagaagtagagaatcatcttcagcaatccaaaaccaattcatggcattaacacctctacgtgatatagttagccaggttgctcatgatcttagcatcggtgaggtcatcaatttcagacataaaggagataatatgttgcgggtctcagatttgggatccaattgttgtggggttcaagatttactggctccaagcagtaactatgatcatgacaacatcagtaacatttcgatgaaaataaatccgcatataagaaaagaagctgtaacattttcgtcatatgatggttatgctcatgacaactttggtataatcaagttttagtanaagtacatatatngatgagt

SEQ ID NO: 15258 - DNA, 75 bp, Arabidopsis thaliana
  unsure at all n locations
  Clone ID: LIB25-069-Q1-E1-B2
ctgttgtatctgagnaaagtanatcagagaaagcctactgtacctgtagacaagaaccncactgatcgatggaaa

SEQ ID NO: 15259 - DNA, 489 bp, Arabidopsis thaliana
  unsure at all n locations
  Clone ID: LIB25-069-Q1-E1-B3
tagcgtnnccgtagccgnccanaattcanaaggtccaccgacncgtccgnaaaatcnataattctcgaagctcgaanaaagagacgaaaatggcactgagaaatgcaattcttcgtcacctgagggttccggtgcaaaccctagngattgaatcagtctaaaattgggttccttggtacgatccggtcattttcttcgcacgatgatcatcttancagagaagctgtcgtcgatagagtactcnatgttgtcaagagcttccccaaagtcgatccctcnaaggtgactcctgaggttcatttccaaaacgatttgggattagatagtttggacacagtggagatagtgatggctatttaagaggaantcaagctggaaattccagacaaagaagctgaccagatcgattcntgctctctcgccantgaatacgtttacagtcatncaagtgtccangcctaancgccggtgtgctcgcctcntgggntt

SEQ ID NO: 15260 - DNA, 430 bp, Arabidopsis thaliana
  unsure at all n locations
  Clone ID: LIB25-069-Q1-E1-B4
agatcatcacttctcagatttcgatattcccaataaataanagatactctcagttcttctcttctccaagaacanaananaaaaatgaattcagaatcgctagaaaatcttcaccgtccattaatcgaatcatcgaagtcgttcgtcgattatcgtctcgagactgtgttaacagatcgagagttaccgtattttcgccggatttatctagcgatgatgattgagatgaagtttctctttcatctggcggctccggcgatctttgtttacgtcatcaacaacggcatgtcaattcttacacgtatcttcgctggacacgtaggaagcttcgaactcgccgncgcttcacttggaaacagtggtttcaacatgttcaccnatggacttctgcttggaatgggaantgcagtggaaacantagggtnggcng

SEQ ID NO: 15261 - DNA, 421 bp, Arabidopsis thaliana
  unsure at all n locations
  Clone ID: LIB25-069-Q1-E1-B7
actttaagctaaacctctgtagttttcagattgattcgttggtggaaagcgtctaaattttgcgtaaatggcggcagctcttgtacgcagattctgccggggatcatcttttccggtctctggtcatggatataggatgctatcgacggttgaaaatgtatctgaaagtggtaaatcgatgaatctatactctgctattaatcaagctcttcacatcgctttagagaccgatcctcggtcttatgtttttggggaagatgttggatttggtggtgtcttccgatgtacaacaggattagctgaacgttttgggaaatctcgagttttcaacactcctctctgcgagcaangcattgttggctttggcattggtttagctgcaatgggaaatcgagttattgcggaaattcagtttgccgga

SEQ ID NO: 15262 - DNA, 386 bp, Arabidopsis thaliana
  unsure at all n locations
  Clone ID: LIB25-069-Q1-E1-B8
aancattnagcatanaccatgtttcttcanccgacgacgatgttttagccgccgaggagaaacctctcccacagacgcanaagcgtctggtttctccagctcagtcttttcctccaaagaggcagagatttgagcaggacganagtgttgagaagctaccagatgctctgcttcttctggagtcaccgacactcgctcacgtgactggcggagaccatgcttccgttgttgcagctgcaatggctgagagtgcattaangaagagagacttgagtgggaatgcttcttctcttcctcgtcgtcgcaagctaccaagaggaaatttgcctcattcanagaattanccngaanctttgggtaactgtgcttgtgcngtcntnagctna

SEQ ID NO: 15263 - DNA, 403 bp, Arabidopsis thaliana
  unsure at all n locations
  Clone ID: LIB25-069-Q1-E1-C10
gagatggagaatggagcaacgacgacgagcacaattaccatcaaagggattctgagtttgctaatggaaagcatcacaacagaggaagatgaaggaggaaagagagtaatatctctgggaatgggagacccaacactctactcgtgttttcgtacaacacaagtctctcttcaagctgtttctgattctcttctctccaacaagttccatggttactctcctaccgtcggtcttccccaagctcgaagggcaatagcagagtatctatcgcgtgatcttccatacaaactttcacaggatgatgtgtttatcacatcgggttgcacgcaagcgatcgatgtancattgtcgatgttagctccgtcccaaggctaatatacntcctccaanggcctggtttccc

SEQ ID NO: 15264 - DNA, 375 bp, Arabidopsis thaliana
  unsure at all n locations
  Clone ID: LIB25-068-Q1-E1-H9
tacgcctccnaaattccaaaggtcnacccncccgtccgcncangcgatccgaacgaaaagcannatccacgagagaaacagatagaaagttgcaaaagtgcgttcgatttttgcttcttcttctgtttcggattcggatttggatttggaatctgcnccnttagcagaaccagaggaaatggtgacgtacgtgagcgcgttgttctacggattcggagggatagtcgtcgccggagtggcgctgctcgtggctttccangagaagcttgtgtacgtcccantgcttccgnggtttaagcaaagtcttatccgatcactccccgctangntcantctcatctacgaanatanttgggcttcaaatcatccgnttgg

SEQ ID NO: 15265 - DNA, 225 bp, Arabidopsis thaliana
  unsure at all n locations
  Clone ID: LIB25-069-Q1-E1-C11
atgatgatggggatttcgtcctaccaccacacattggattccaatatgcatcgccaccaccaccaatgttccaaggatattaaaaccaatgtagtagtgacagtgttacccatttttaacatttctgtccattttttccatgtgaattanttgtatcaaacgaaaaagatattacaaagatgaaaaattaaaatgccaataattatataaaaaaaaaaaaaaaag

SEQ ID NO: 15266 - DNA, 74 bp, Arabidopsis thaliana
  unsure at all n locations
  Clone ID: LIB25-069-Q1-E1-C12
aatnagtagagattatgaggaaattctcngancaatatgctcgtcgctctgggacttacttctgtgttgataaa

SEQ ID NO: 15267 - DNA, 412 bp, Arabidopsis thaliana
  unsure at all n locations
  Clone ID: LIB25-069-Q1-E1-C6
tcgaatcttctctctgagtaaatcaatttcacaaattcgaggtttttggtttttagcttactacactactccaagaagaaaatcncaagttaaagtcatttcctatcaaatctcttttcanggnggctgccattctcgtttctcctgttcgctaaattgcgtcantttcattgaagcttactanaaaagcggcgtagatctgtgattctactcantgcatttccgcgtttgtgaggagaaagagganaagatgttgtgtgcttgttcaggcgaacaattccggttcgaggatgagcccggttcgccggaatccctanctacaagagatttcncangccantggacttncntcncgaatcggagganggcgattgggattccanantggancanagcnngttcgatggaagct

SEQ ID NO: 15268 - DNA, 184 bp, Arabidopsis thaliana
  unsure at all n locations
  Clone ID: LIB25-069-Q1-E1-C7
cttttgatganttgttgcagaactctgataaacntgtacntgtagacttcnatgccacttggtgtggtccatgtcaagcttagggtaccaatactcaatgaagtgagtgaaacactgaaagatataattgcagttgtganaattgagacggagaagttcccaagtcntgcnaacnaataccaga

SEQ ID NO: 15269 - DNA, 422 bp, Arabidopsis thaliana
  unsure at all n locations
  Clone ID: LIB25-068-Q1-E1-F3
caagcctgataatctgctacttgacaaagacggccacatgaaattgtcagattttggattatgtaaaccattagactgtagtaatcttcaagagaaagactttacagttgcaagaaacgttagtggggctttacaaagtgatggtcgccctgtggcgacaagacgcacccaacaagagcaattactaaactggcagagaaatagaaggatgcttgcttattccacagttggcactcctgactatattgccccagaagttctgttgaaaaaaggatatggaatggaatgtgattggtgggtctcttggcgccattatgtatgaaatgcttgtgggggtttccgcccttttaantcagatgaccccaatgacaacttgtaggaaagatagtaaattggagaaattacttgaaattcccagatng

SEQ ID NO: 15270 - DNA, 407 bp, Arabidopsis thaliana
  unsure at all n locations
  Clone ID: LIB25-068-Q1-E1-F6
aatctctctctttttacaccggcgataattttccgatcccgattataagatggcgaaggaaccagttcgtgttcttgttaccggagctgcaggataataaatcggattggataaccggccaaacatgtttcacatctcatgggtcgaatcnccggtcccctccggtttaaaaatgatgggctaataacaaaagtcaaagactcaaaaaagttgttagttaagtctgcgtcgagatcacttgcaancaatcaanagnttcatttcaatcttcggtgaacantcaatctcgangaangacnaanatnaanattttcaatttctctgtaatcttcgnttcntgcgangccaattctcnatgtcnaggtaannaaggaaanaagtcntgggtganagnagaagaattgtgg

SEQ ID NO: 15271 - DNA, 414 bp, Arabidopsis thaliana
  unsure at all n locations
  Clone ID: LIB25-068-Q1-E1-F7
cagtataactgtataaggtctcattttcgtgtgctctcgtcgcgattactctctttgagctctctctctctcttctaacatcggtcttgtattggtgcttattggatatctccggcgaaggaaacgagtttcgcggttagatttttctttatcgcttaccggcgaggatgatcgtttcttcggtaaggtcgattaatcggttctgttttcgaagatgttgttgttagagttagatccgcatggttttggtgatcgttttggatcgaagacgtggttccacagacgcaaaaaatgccgtcgtctcttgctttgagatttggcttctgaaatctttcctctttcgttctcgttgaatcctaatttttgttttgtcttttttagaaatttttggtctttcgaatcctgggggaaang

SEQ ID NO: 15272 - DNA, 417 bp, Arabidopsis thaliana
  unsure at all n locations
  Clone ID: LIB25-068-Q1-E1-F8
tctcaagaacaaccgtcaaaaccaaatctcacaatccaaaaaccctatatcctaacaacaaaccaanatgggaatccaagctccacgctggacctaaagggtttcaatcttctanaacctctgaaaaacccggccggncanacccggacccggaagacgatcccccgatacctcaagaantgttcgagaggatgatggggaggattgtggtgtctgtgggaacaccactgggcttggnagtggcgatcttgaaagtactcgangttttgaaggatagaaacgtctgggacgtgcctttgtgggttccatacttgaccacactcgtgacctttgggttcgtcggctcttgggattgcgtacggaancttgtccacananctgnacccggccaagactaactctctttttgggctcaag

SEQ ID NO: 15273 - DNA, 410 bp, Arabidopsis thaliana
  unsure at all n locations
  Clone ID: LIB25-068-Q1-E1-F9
attgtatgggccttaatgttccgagcaatatcgctgtatcatagcaaaactcacatctatgannagaacctggtggacgangatctcanatnagggccaatggaaatatatgtcgatgatgaagccaagttgactcttcatgggcttgtccagcactatatcaaactgagcgagatggagaaaaaccggaagttgaatgaccttcttgatgcgttggacttcaatcaagttgtcatttttgtgaagagcgtgagcagggctgctgagctgaacaagttactggtggaatgcaatttcccctcaatatgcatccactctggaatgtctcaagaagagaggttgactcgatacaaaagtttcaagggaagggcacaanaaggattnntgtggcgactgacttggtaaggaag

SEQ ID NO: 15274 - DNA, 395 bp, Arabidopsis thaliana
  unsure at all n locations
  Clone ID: LIB25-068-Q1-E1-G11
gagaattctgaggctttggttaatattactggtaaagatgatgctggttcgaataacaggacggatgttagtctgatcaagaaagatgatggggtttctcgacggagcttgagttccaagcagaagacgagaaaaactgtccggacttctcgtagtaagatccgtgttaagcagaaggtgattaaagaggtacttgagactaaggatttggatgatgagcaagatccacaanttccattgacaaatgctacttatngtaagcttcttggnccctttggatcactaagangataaaagttcttgaatggagcccgcatanaanatctgggacttgcgacacgaaatcagantttaaaccccttgtttggncaaaggaattcgtccngcccttttnc

SEQ ID NO: 15275 - DNA, 445 bp, Arabidopsis thaliana
  unsure at all n locations
  Clone ID: LIB25-068-Q1-E1-G12
aaactttncngtacgncctccaaaattccaaaggtccacccncccgtccgcanaaagcaagcttttcagcttattagagcttggggacaatcccaagatcttacttatcttcctgttttccaccagacttatatnagcttggaaggngaaaatggattacacgctcgaggtgaagagaattcantgccgggacaaagttctctggagtctcttatgcaacggcctgttccagtgcctccacctggtagctatccggttcctaatcaagaacangctcttggggacgatgatggtcttgactataactttgggaacttancnataaaggataanaaagaacacgattgatattacacggnncagcctcgaattgcnctcnagcatttgaatactgaacgaaagccaaatcacaccagangacgatcnancggttagcccnganngg

SEQ ID NO: 15276 - DNA, 481 bp, Arabidopsis thaliana
  unsure at all n locations
  Clone ID: LIB25-068-Q1-E1-G3
acgcttgccngtgccggtccgagnattcacgggtcgacccacgcgtccgaaagactcttccttcggcgatcgctgctcanaagtttgatttcgatatcaagaatcgtgatagaanaaatgcgacacaattgttgccatgtctcgttcgcttcgattctcaagatccntaattttctccaagctttcatcggtatatcaatcataatcnactcgatttggatgctcgatcaatacaatcatcacgttcccgttgaccctcctccgtctcaagcctccggcagcttcatcancgggattcttcttattccttctctaattcaataattgngatcaacagtgtttctgattcnttgaangaatccgatcgatttcgnaacggggtancgttctcggggtctggtggtgggngattcgggtttcaaatctccgttctttngatcntcctggctccanggggtttatctaccngtntcatgggcga

SEQ ID NO: 15277 - DNA, 417 bp, Arabidopsis thaliana
  unsure at all n locations
  Clone ID: LIB25-068-Q1-E1-G6
gactgaagctagaggagctactcttccatctgatatgttggaagctgctaagaactatgggatccgcaaagtgcttctccttaggtacttggatttgcagagctcagcagggcttcttgggtttgctataagatcatgggctatgcttcgtaacanaatgttggctgatccatctttcctcttcaaaatangggctgagatagtcattgattcttgctgtgccactgttgctgaagttcaaaagagagggaaagatttctgggcggagtttgagttgtatgttgctgatcttttagttgggaactgtggttaanattgctctggtcggtatgttggcgccttatgttcgttttggacaaccttccgcatcaccnggcttcttangacgcaatggnttttgcataataangcngcctt

SEQ ID NO: 15278 - DNA, 414 bp, Arabidopsis thaliana
  unsure at all n locations
  Clone ID: LIB25-068-Q1-E1-G8
taaagagagaaagaagcacgaaaaccaaatcaatggcggtttcagtttcaatcctcaccgtcgtcactgctcttcacctccttgctttcgtcttcgccttcggtgccgagcgtcgccgtagcaccgctgtgccggttccggatcagtacgatgagaagactatttgtaagtacggaactgaggcgtcgacagtgtacggtatgtcggcgtttgggttgcttcttgttagccaagcggtggttaacggtgttactaagtgtctctgttttggaaagggtcttgttactggtacttcttacactgtctgggctattgtcttcttcgttgtttcttgggtaagctttttaaggagctgangcgtgcttgttgggtggatnaacgangaacgcgtaccacactaaaagtgaaggcatt

SEQ ID NO: 15279 - DNA, 499 bp, Arabidopsis thaliana
  unsure at all n locations
  Clone ID: LIB25-068-Q1-E1-G9
gnngnnnnnnggnnnnngaantgttagcctnncgtacgcctccgaaattccaaggtcgacccacgcgtccgcccacgcgtccgcccacgcgtccgcccacgcgtccgatttaagcatcctaacttcttcttcaaagcttaaaaaccagaaaacaaaaggaagctctctgttcaaatcaaaaagagagatcgtacgcaaaagtttccgatatggctcgctcgtttggagcaaacagcactgttgtgcttgcgatcatcttcttcggatgtttatttgcgttttccactgcaaaagaagaggctacgaagttaggatcagttattgggatanatcttggtaccacttactcttgtgttggtgtttacaagaatggtcatgttgaaattattgccaatgaccaatgaaaccgtattacaccttcatgggttggttttactgactctgaaaggctcattggtgacgctgctaagaatcaaggcggctgttaatccctgaanaa

SEQ ID NO: 15280 - DNA, 465 bp, Arabidopsis thaliana
  unsure at all n locations
  Clone ID: LIB25-068-Q1-E1-H12
acctgtcagcatgccngtaanggtccaagtncacggntccntccagggcctanncttcgaatcnatccaagcttgaccttaattccaggcttatccaacgacgtcgggagactgattctctccttcgncccttaccctcacatctctcgtatcaaatcaacctgtaaatcatggtacgctttcctctcttccaaaaccctaatttcacaccgccataggaagagacaacagcatcaccantaaatctctcggcatntcccttgnatcttccctcanggntccttcgagtttcgacctccttttctctncgatcccgtgaatctctcntggagatcgcttcctcttatgccttgtaaccctcacgtttacggtctctgcaanttcgnagctgtagctcttggnccttacgtttatgtcctcngtgggtctgcttttgatagcaagggtcttaaccctcntngangt

SEQ ID NO: 15281 - DNA, 419 bp, Arabidopsis thaliana
  unsure at all n locations
  Clone ID: LIB25-068-Q1-E1-H2
atttatgttaatggaaatcgtattcctaagaaacttcctccaaaggtttattttgctctgaacaagcctaaaggatatatttgttcttccggagagaaagagatcaaatctgctattagtttgtttgacgagtacttgtcctcttgggataaaaggaatccggggactcccaaacctcgcctttttactgttggtcgtcttgatgttgccacaacgggattgatagttgttacaaatgatggagatttcgcacagaaactttcacatccttcatctagtttaccgaaagaatatattaccacggttgtcggtgatatacacaaacgacacttaatggctatcaattgaaggnacaatggtggaaggagtccactgtgtcccagattcacttgaagttggtgccaaagcagcatgatatt

SEQ ID NO: 15282 - DNA, 58 bp, Arabidopsis thaliana
  unsure at all n locations
  Clone ID: LIB25-068-Q1-E1-H4
catttcgattattgggcaggtgagaanatcacataacgtgntgtacgccatttctggc

SEQ ID NO: 15283 - DNA, 419 bp, Arabidopsis thaliana
  unsure at all n locations
  Clone ID: LIB25-068-Q1-E1-H6
gcaccttttccttgtcaaggcaaatctgatgtcgaaggcatctttgatcctccttattacgagtggtttcaattcaacaaggaattcaccgagtatacgaatttcgagaaatgtttggagtacctggaggatcgtatgatcaagcttggtcctttcgatggtctcattgggttttcccagggtgcaattttgtctgggggtttaccaggactgcaagctaagggaattgcatttcagaaagtaccaaagattaagtttgttataatcattggaggagctaaagctcaaatccgccaaattggncgagnatgcatattcgtcttccttggaaactctctccctccactttttaggagagactgattttctgaaancttacgggnactcagctgatagaatcgtacaangaatcccggtgg

SEQ ID NO: 15284 - DNA, 427 bp, Arabidopsis thaliana
  unsure at all n locations
  Clone ID: LIB25-068-Q1-E1-F2
tggagagcgattcangagatggttccgtttcctcaactaccgatgccaatagaaaacaactacagagcttgcacaattccttacagatttccttctgatgatcccaagaaagccactccaaatgaaatctcgtggatcaacgtcttcgccaattccattccttctttcaagaaacgtgcagagagcgatatcactgttccagatgctcctgctagagctgaaaaatttgcagaaagatatgctgggattcttgaagacttgaagaaagatccagagagtcatggcggnccaccaagatggcattcttctaagccgacttcgtgagcaaagtactcagagagttaggatttanggacatantcaagaaaagtttaagggntganggagaatgcaaanggnaatatcactaatttcctcaaagttgtna

SEQ ID NO: 15285 - DNA, 386 bp, Arabidopsis thaliana
  unsure at all n locations
  Clone ID: LIB25-067-Q1-E1-D12
atgttgttgtaaaacttgaaactttggaagcaaactcatttttataacaaaaggaaatcttattttatacattacattaaagcaacatgaaagacaattcaagctggtcttgttcttgttcttggtcttcgtggaaaatatgtttgttgtctgttctctttctcaccgagacgatcaccgccgtgaagctgccgccaaaattgattattccggctgtaatcgctttcggagactccatcgtcgacacaggaatgaacaacaatgtcaaaaccgtggttaagtgtgattttcttccttatgggtatcaatttccaaagcggagttccacggggagattctgcgatggacgagtcccctgccgantttgctagcccgaaagaactggg

SEQ ID NO: 15286 - DNA, 418 bp, Arabidopsis thaliana
  Clone ID: LIB25-067-Q1-E1-D4
ccatcaaagatcttttttttttctcaattattgtgataatgaattcgatgtttagtgccttcgacgccatgtgtgcagagattatgggaaagaaagtcaccgctgcttcttatgtctaccgctctgaacgcaattctgcttcttcttcttcttccgtcggcggtcaaaacgcgtctttgtctctcaagaaagatgaaaaagcttcaaagaacatggatttaccaacgaagacaccgaggtttgctcttgagctcgatggtcttcattgcttcgagactatagttcgttcttgatcaatatcaagattaccaatttttgctgagtttttttttctttttcttgttttgttctgtttcgattccttttatgtaaatacaattttggaagatttaatttccttggattagaaaaaaaaaaa

SEQ ID NO: 15287 - DNA, 415 bp, Arabidopsis thaliana
  unsure at all n locations
  Clone ID: LIB25-067-Q1-E1-D6
ttttcaatcgagtcgccattaacatatttcatcaagctcagtccactcttctcatgaaacttcatcatcatcgaccttgaccctgataggtttcagacgacacccattattgtaaatctgctgctggagtcttttttgtctgaatcttcttcttgttgagacactgtttcttcttggtctgtgatttttgttttgttctcattaggacgttctttattccggttcagatttactggatcgtcattttctctttgaaattgtatttttttgttccttttctggtatgttgtgaaagctatgagattgctgtaagaatccaagactgaccaacatgtttcccctgtgctcggccacaagctgccgttaccattctcagattnatttcctggcaattgggcgaggctgttcntccttg

SEQ ID NO: 15288 - DNA, 420 bp, Arabidopsis thaliana
  unsure at all n locations
  Clone ID: LIB25-067-Q1-E1-D7
tcctttgccctcgttttttttcggttctcgtctttcgttcttcacttttagacaagcaaatatgagacccccagttacaggaggacgtggtggtggaggattcagaggtggaagagatggtggtggaagaggttttggaggtggaagaagctttggaggaggccgtagtggtgacagaggccgtagtgggcctcgcggcagaggacgtggtgcgcctcgtggtcgtggaggaccacctcgtggaggaatgaaaggaggaagcaaagtgattgttgagcctcacagacatgcgggagtgtttattgctaagggtaaagaagatgctcttgtcactaagaatttggttcctggtgaaagctgtttacaatgaagaaagagaatctctgttcagaatgaanatggaactaangttgaatacag

SEQ ID NO: 15289 - DNA, 416 bp, Arabidopsis thaliana
  unsure at all n locations
  Clone ID: LIB25-067-Q1-E1-D8
tcatcatcttctccggcgatgaagacgacggcgacgtcgtttgtaacgggagagagagttgtagttttcgtcgtggtttctcgtattctcttatctcttcctttatcacttatctcccatggcttctccctcttcctcctctctctctccgccttcctcgtcgagatccgcgtcgagacttctccgtttcttctctctcatttcagctccagacgcggtgcgtcttcagggatattactaggagctgtgacacttccttctgttatgatatctaagttagttcagctttcaagagctatttcaatccatgaagctgaacaagatgagcttgcacatgtgacaatgcagtattgggcaagcatcggctanttgttgtgcnatacttanatatcnatcangtgattatgtcacaangg

SEQ ID NO: 15290 - DNA, 397 bp, Arabidopsis thaliana
  unsure at all n locations
  Clone ID: LIB25-067-Q1-E1-E10
actaaatcgccagtattcgccgcaagaaagatgtctccggcgaagaagagccgaagttttcctccgataagcgagtgtaaaagcagagagtatgattcgatcgctgcggatctcgacgggactctgcttctgtcaagaagctctttcccttacttcatgctggtggccattgaagcaggtagtctcttccgtggattgatccttcttctttctcttcccatcgtcatcatcgcttatcncttcgtctccgaatctctcggnatccanatccttatcttcatctccttcgccggtatcaanatcaagaacatcgannncgtctcncggngccgttnttacacggntttacgcngtgggatgtgnagggaangaaangtttgnggggggtttgagnaag

SEQ ID NO: 15291 - DNA, 396 bp, Arabidopsis thaliana
  Clone ID: LIB25-067-Q1-E1-E11
catgagacttgttcgtcatccaaacatcgttgagttaaaagaagtcatggctacaaaaacaaagatcttctttatcatggaatacgttaaaggcggtgaacttttctccaagatcgttaaaggaaagcttaaagaagactctgctcattttacaagacggtttgcttcatactcagtgtggaactccggcgtatgttgcaccggaggttttgaggaagaaaggttacgacggagctaaaggtgatatttggtcgtgtggtattatcttgtacgtgcttctcgctggattcttaccgtttcaagatgagaacctaatgaaaatgtatcggaagatcttcaaatcggagtttgagtatccgccgtggttttcaccggagtccaagaggttgatttcaa

SEQ ID NO: 15292 - DNA, 391 bp, Arabidopsis thaliana
  unsure at all n locations
  Clone ID: LIB25-067-Q1-E1-E12
aaatggtggaagatgaacaatgacgaagaatcattgttattgttcatgcattaaccttgttgttatgttcctccatggcctgttacatcgttccttattaccaccatcctgttttgtctcatcccaatatgagaaatcttcagtcaccgtcaccaccaccaccaccgtttctgcaacaatctcttgaatagaagaattagtgttcctcgaagctccgctattagtgacggtggtgtctcctacaatactctagtctccgaggcggtgaggcttttggttccacaagcaaactttgattcttcaaagcttaaaagttgagttcttagggagaattattgggngaanaaggagtaacngnggaattattaangccngcggggcgtttaattng

SEQ ID NO: 15293 - DNA, 479 bp, Arabidopsis thaliana
  unsure at all n locations
  Clone ID: LIB25-067-Q1-E1-E2
ctgttacgcttgccnggcccggtccaaaattaacgggtcgacccacgcgtccggagagagatggctatgtctcaggtggtgaacacgtacccgctttcgaactacagcttcggaactaaggaacccaagctggaaaaggacacctccgtcgccgaccggctcgctcgtatgaaaatcaactatatgaaagagggcatgaggactagcgttgaagggattctactggtgcaagaacacaaccatcctcatatacttctgctacaaattggtaacacattctgcaaacttccaggtggacgcctgaagcctggtgaaaatgaagctgatggtctgaaaagaaagctgaccagtanacttggaggcaattcggctgctcttgtacctgactggacggtaggagaatgtgttgcgacatggtggcgtccaaactttgaaaccatgatgtacccgtattgcnctcctcacatcacgaaaccaaa

SEQ ID NO: 15294 - DNA, 409 bp, Arabidopsis thaliana
  unsure at all n locations
  Clone ID: LIB25-067-Q1-E1-E3
agaagataatgttgtcaaggtgtgggatttgactgctggaaaacttttgcatgagtttaagagtcatgaagggaaaattcagagtctagattttcatccccatgaatttctgctggcaacaggttcagctgataagactgtaaaattctgggaccttgaaacattcgagcttattggttctggtggaactgagactactggggtccgttgcctaacctttaatccagatggaaagagtgtgctttgtggattgcaagaaagtcttaaaattttctcatgggagccaataagatgtcatgatggagtggatgttggatggtcaaacttgtcggatatgaatgttcacgagggaaagcttctcggttgctcatacaatcaaaattgtgtangcgtttggggttgtaaaact

SEQ ID NO: 15295 - DNA, 409 bp, Arabidopsis thaliana
  unsure at all n locations
  Clone ID: LIB25-067-Q1-E1-E5
cacacacacatttgtcgaaatcttaacaccaatcccaaatcagaaaaatcaaaactttttattttattttatcaaaatggcgcttatgaatggaagcatgaatctatcatcggtcaaatcatcgatgatcaaccaccgtcaaccaaacttctcctccgccgtctccagacccacttctttccggatctccgccgtgcaaaccgacccaaaaacaccagctgcttcatcggcgtcggcggcgacgacgactccggcaacgttgacgaagcccgttggagttaatgtgggtaaaggaaaatgggcaccagagagttggaggacgaagaaagctttacagcaaccgggactatccagatttagctgcgcttgaagctgtgccagagacgatnnaaagcttttcctccgattg

SEQ ID NO: 15296 - DNA, 389 bp, Arabidopsis thaliana
  Clone ID: LIB25-067-Q1-E1-E7
gtgtatgaaggacttgaaggtaacaactgtgctcccaacgcagctacttttaggacattgatatttcatctttgttatagccgattgtacgagcaaggctatgcgatcttcaagaagagtgtgtatatgcacaagattccagatttcaacactttgaagcatttggttgtgggattggtggagaacaagaaaagagatgacgctaaagggttgattagaacggtgaagaagaaattccctccgagtttcttgaatgcgtggaagaaactcgaggaggaactcgggctgtattcaaaaaccgatgcttttccatcttctgcaaaagaggctgctgctgcttaatagctcaagagcatttcgattgaacatcttaatttgttgcctgaaaa

SEQ ID NO: 15297 - DNA, 388 bp, Arabidopsis thaliana
  unsure at all n locations
  Clone ID: LIB25-067-Q1-E1-F1
atctatcaccgccgtgcgatctctctcctccgtactgatttctctacttctccttcgattgctgatgctccgccgcacattccgccgttcgttcaccagccacggccgtataaaggtccttccgccgatgaggttttacagaaacggaagaagtttctcggaccttctcttttccactactaccagaagcctcttaacatcgttgaagggaagatgcagtacttgtatgatgagagtggtaggcgatatctggatgcctttgctggaatagtcactgtgtcgtgcggtcactgccatccggatattcttaatgcgattacggnacagagcaagctacttcagcacgcgactactanttacctgcatcatgccattggtgattttgctg

SEQ ID NO: 15298 - DNA, 258 bp, Arabidopsis thaliana
  unsure at all n locations
  Clone ID: LIB25-067-Q1-E1-F10
tgaatggaacttcngaggatttcctgtttggcttaagtacattccagggattagcttcagaanagataacggtcctttcaaggctcaaatgcaaagattcaccactaagattgttaacatgatgaaagcngagaggctttttgaatctcaangcggtcctataattctctctcagattgaanatgaatanggaccagtggagtatnagcttggtgcancgggcnggtcatacaccaactgggcagctnagatggnagt

SEQ ID NO: 15299 - DNA, 349 bp, Arabidopsis thaliana
  unsure at all n locations
  Clone ID: LIB25-067-Q1-E1-F11
gagacatctcggtgaagaagtagcagagatgtcgacggtgtacgtgctagagccgccgacaaagggaaaggtcattgtaaatactactcatggtccaatcgacgtcgagctttggcctaaggaagcgcccaaatccgtacggaacttcgttcaactatgcctcgagggttactttgacaacaccatcttccatcgtgtcattcccggttttctcgttcaaggcggcgatcccaccggctccggaaccggtggagatagtatatatggaggtgtctttgccgatgagttccattcaaggctgagatttagccaccggtgggattgttgccatggctaatgcganctcacc

SEQ ID NO: 15300 - DNA, 419 bp, Arabidopsis thaliana
  unsure at all n locations
  Clone ID: LIB25-067-Q1-E1-F2
agagtagttgatggttctaacaatggaagcgctaagtactttgattacttattctacattgattttgaagcctccatggctgatacacgtgctcagcacgctcttggccatctacaggaattcgcaagtttcatccgtatcctcgggtgttatccaatggatctagtcagataaccgagcaactcttcaattgatttcatgttaccataccgtgaagaacatgtgaatatacccaaacagaagaacagggtttgtggctttggtatacttcaagaatcttctttcaccattttctcattttangaactttagcttcaaactcttcattgttgagacagatacaattgatgtancattttgttaagaataagttctgtacattaaacaangtttttttcagttaatatcanttgaanaag

SEQ ID NO: 15301 - DNA, 391 bp, Arabidopsis thaliana
  unsure at all n locations
  Clone ID: LIB25-067-Q1-E1-D1
aaaatggctctccgatctgtcaaaacgccgaccttgataacttcggtcgccgtcgtctcctcctccgttaccaanaagcctcactctatcagattctctcttaaaccaacgtcggnactcgtcgtccataaccatcagctatcgttctacggttcgaatctcaagctgaaaccaactaaattccgatgctcagcgtcggctcttacgccgcaacttaaagacacgctggagaaactggtgaattcggagaaagtggttctgtttatgaaaggaacgagagacttcccgatgtgtgggattctccaacantgtggttcagattttgaagaatctgaatggttcctttcgaaagattnnnanatttctggagaatngngatgntntagggcag

SEQ ID NO: 15302 - DNA, 423 bp, Arabidopsis thaliana
  unsure at all n locations
  Clone ID: LIB25-067-Q1-E1-A3
tgtaagctgttgatgtgaattcttttttatggttctcgattgtttaatgatttgattgtttggttatatttgcatgtgggttttgtgtgtgtttggaaatttgaatgaattgatgtgaaaagttgtaactcttgtttttgttgatttaaaaggctaagttttgaaaattttcatttctgtggagagaggtagtgttggatatgagtgatattagctatgtgggttttgtatgcttttgaattttgaaatgaattgctatgaaaagttgtaacctaagaaaggtagtgttagatggaaattagattaagtatgtgagttttgcatgttttagaagcttgaaatgaattgcccttgaaagtttataagctttacgccgatataagangcctaatttcnaantaagtgttggntagaaataagatt

SEQ ID NO: 15303 - DNA, 404 bp, Arabidopsis thaliana
  unsure at all n locations
  Clone ID: LIB25-067-Q1-E1-A4
ttctccctctcgcaattctccgtcccctcgaatccaacaaaaagattttaatgtaaaatcactctattgatccacaatgtcgatgatgttcccatcgtttcagttgctagaacttaacataatatcagctcaggacttggctcccgtcgcacgcaagacaaagacttatgcggttgcttgggttcattccgaacgtaaacttaccacccgtgtcgactataatggcggaacaaacccaacttggaacgacaaattcgtattcagagtcaacgaagaatttctctacgctgatacttcagcagtggttatcgaaatatacgccttgcattggttcagagatgttcatgtangaacaagttcgtgtcctcattagcaacctcattcctcctaatcgccgtccaaga

SEQ ID NO: 15304 - DNA, 477 bp, Arabidopsis thaliana
  unsure at all n locations
  Clone ID: LIB25-067-Q1-E1-B1
tgtgtacccggccggtaccgagtcaaacgggtcganccncgcgtccggtttcntctcattcgtcatctagtcccattctctgtccataacaatgaatatcaattgttctccattagggtttctaatttcactcttcttcattgttacttttcttgcaccacaagtcaaatctagggctttctttgtctttggtgactctctcgtcgacaatggaaacaacgactacctcgtcaccactgcccgtgccgacaattacccgtatggtatcgactacccgacccgtagacccaccggacgtttctctaacggccttaacattcccgacattatcagtgaggctataggcatgccgtcgactttgccgtaccttagcccgcatctcaccggagaaaatcttccaagtcggtgctaattttgcctccgcaaggaaatgggatcntcaacgacacctgggaatttaaatttcgnaaaacaana

SEQ ID NO: 15305 - DNA, 399 bp, Arabidopsis thaliana
  unsure at all n locations
  Clone ID: LIB25-067-Q1-E1-B12
agatccaaaaatgagtgaagaagcatatgaagaaactcaggaatcaagtcaatctcctcgtccggttccaaaactgaacgagaggattctctcaacactatccaggagatctgtagctgcacatccatggcacgaccttgagattggtcctgaagctccattggtcttcaatgtggtggttgagatcacaaagggaagcaaagtgaaatatgaactcgacaaaaagaccggtcttatcaaggttgaccggatcttgtactcctccgttgtttatccacacaattacggattcatcccacggacattgtgtgaagacaacgatcctcttgatgtccttgtccttatgcaggaaccagtgcttcccgggatgtttccccccgtgccnaaanncnaatgggg

SEQ ID NO: 15306 - DNA, 476 bp, Arabidopsis thaliana
  unsure at all n locations
  Clone ID: LIB25-067-Q1-E1-B2
ngttacttgccgggcccggtccnaaataaacgggtcgagcacgcgtccgtttcgntctttcttcttttaacaagaaaccaccgctctgtacaaaacaaagtctccgtcgtttcttctccgttctccggtcaattcgaattcctcagagagaaatttgtgctcgcgagttccgcgtgaaatacatggaaatgttggcggcgttggactcgcgttcttctctccatcttcatcgttccatgtctcgcgttgacctttttgccggtgttcgtatgaaaccatctcctacaagtcctgttccgaatacgcctcgaatatgtgggaagtaaactctgttgattcgactcttcctcttccctttagtaagttcctccgtttgtttttcctttgcatctgaatttccagattcaatcgaagctgtgattacctggtagcgtcttgtgtagtcttattttnggtaaagtgatcgtttctggggg

SEQ ID NO: 15307 - DNA, 418 bp, Arabidopsis thaliana
  unsure at all n locations
  Clone ID: LIB25-067-Q1-E1-B3
gacagagtcagaaacaatggcgaaatctccagaaacagagcatccgaacaaagtctttggttggggtgctagagacaaatccggtgttctctctccttttcacttctctagaagagacaatggtgaaaatgatgtgacagtgaagatcttgttctgtggagtttgccacactgatttacacaccatcaaaaacgactggggatactcgtattacccagtagttccagggcatgaaatcgttgggatcgctacaaaagttggtaagaacgtgactaaattcaaagaaggagatcgtgtcggagtaggagtgatcagtggctcgtgccaatcttgcgaatcttgtgaccaagatcttggnaaactactgncctcnaatgtccttcacatacnatgncgaatgggttcnaantgggaacna

SEQ ID NO: 15308 - DNA, 369 bp, Arabidopsis thaliana
  unsure at all n locations
  Clone ID: LIB25-067-Q1-E1-B4
ctgtctgaatattatttttattaacggaccaaacaaaaaaaaacttgcagaagaatgaaagaaaaagcaataaccctccaaaccaaattctaaagcctcaaatttggaatattccctttcttcttcattcccttttttttttttttaatttgccatttactcattattgatcttatgtgagacgacctcctctgtttctttcttcctcgtaacagtaaagggtcttcctttttaatctgaatttaccaatctgattcttctgttttttgttttttttatttgtctatcttttaaactatttgaaatctaaactttgtttggttcttcacgatttttaatctccgatgaatcaanttcatcaaaagattc

SEQ ID NO: 15309 - DNA, 417 bp, Arabidopsis thaliana
  unsure at all n locations
  Clone ID: LIB25-067-Q1-E1-B5
tttcacaaattcgaggtttttggtttttagcttactacactactccaagaagaaaatctcaagttaaagtcatttcctatcaaatctcttttcatggcggctgctattctcgtttctcctgttcgctaaattgcgtcattttcattgaagcttattataaaagcggcgtagatctgtgattctactcattgcatttccgcgtttgtgaggagaaagaggagaagatgttgtgtgcttgttcaggcgaacaattccggttcgaggatcagcccggttcgccggaatccctagctacaagagatttctcagctagtggactttcttctcgaaacggaggaggcgattgggattccaaattggaagatattcaagtcgatgaagctgaatcgactttaaaggaagctctcccactcaang

SEQ ID NO: 15310 - DNA, 423 bp, Arabidopsis thaliana
  Clone ID: LIB25-067-Q1-E1-B6
gcccacgcgtccgatgctgcaaaatgctcttggagtgcctctcagaggattctgtatgctcagttctccaagtggtttcgtctatctcatcatgtaaactcattgaggagatgtgcaagaggaagttctccatgcacttcgactattgtaccactgcaagtttggactttgtcttgttagatcagaccaccttcagtgatattcttgagtctgcagatctgacggtgacatctgaagaaaagattctgaatgctgttctcatgtggtgcatgaaagctgaggagtcgcacagttggggagtaatagatgagatgatgaactatgctgaccccaaaagtttgttcaaagaaaggcttcagtcacttgatgacctgttacctcatgtacgcttcctctttgttgccatatgagttacctaaaaag

SEQ ID NO: 15311 - DNA, 391 bp, Arabidopsis thaliana
  unsure at all n locations
  Clone ID: LIB25-067-Q1-E1-C10
tcttctttagaagattaaaaatcttctctctaatctctccactctttcataaatattttcctaattcttctaccttggtgtctgattctagcaccaaaccattttctcctaccaaaatctgggtttcgatcaattttaggtcttttgattcctacttgtctaatcgtcttgcaatttcaaagatgacagttgttggagatgttgctccaattccaaggaggaacagttctacttgctctaatgatatcgctgctccgttattaccagagtgtcatggagatgaagttgctcatgatgaattcaatggagcttcttttagtggcgcggtttttaacctcgccacgactataattgggtgctggtatcaatgggctttgcctgnctacaaatg

SEQ ID NO: 15312 - DNA, 423 bp, Arabidopsis thaliana
  unsure at all n locations
  Clone ID: LIB25-067-Q1-E1-C2
ttgttgctaggtcaccaaacctgaagagcttgaagttaaaccgtgcagtaccgcttgacgcactcgcaaggttaatgagttgtgcgccgcagctagtggacttaggagtagggtcttatgagaatgagccagatcctgaatcttttgcaaaactcatgactgccattaagaaatacacatcgttaaggagcttgtctggctttttagaggttgctccactctgcctcccagcgttctacccaatttgccaaaaccttatctctttgaacctcagctatgcagctgaaatccaaggcaaccacctcattaagcttattcagctttgcaagagacttcaacgattatggatattggatagtattggtgacaaaggacttgcgggttgtcgctgccacatgtaaagagttacaangagcttangat

SEQ ID NO: 15313 - DNA, 419 bp, Arabidopsis thaliana
  Clone ID: LIB25-067-Q1-E1-C7
tcacattagccaaaaccatggcctcctcaagtctccatttcttcttcttcttgacacttctcttgccattcactttcaccaccgccacacgtgacacatgtgcgaccgccgctcccgatggttcctacgacctctcaatcatccccattaacgccaaatgctcacctttcgcacccactcacgtctctgcctccgtgatagacacggtccttcacatggcctcctcagactcccatcgactcacctacctctcaagcctcgtcgccggcaaaccaaaacccacctccgtccccgtcgcctccggtaatcagctccacatcggaaactacgtggtccgagccaaactcggcactcctccacagctaatgttcatggtcctaagacacaagtaacgacgccgtttggctcccttgctccgg

SEQ ID NO: 15314 - DNA, 381 bp, Arabidopsis thaliana
  unsure at all n locations
  Clone ID: LIB25-067-Q1-E1-C8
caaaacggggccttttcgtgcccagtttctgattgagtccgtttcggagctccggaagaatctccaagccagagggtcgaatctagttgtccgtgtcgggaaacctgaagctgttttggtggaattggctaaggagattggagctgacgcggtttatgctcacagagaagtgtctcacgacgaggttaaagcggaagggaagatagagaccgcgatgaaggaggaaggcgttgaagtcaagtatttctggggaagcactctctatcatttggatgatttgcccttcaaaattgaagacttgccgtcaaattacggagctttcaaggataaagtccagaaattggagattangaagactatcgcaacgcttgatnaattgaa

SEQ ID NO: 15315 - DNA, 398 bp, Arabidopsis thaliana
  Clone ID: LIB25-067-Q1-E1-C9
ggaaaaaagttgctctcgcttcaggttttttatttcccgccaattatttcgacaaaaatggctcctaaatcggataacaccgaagctatcgtactcaactttgtcaatgagcaaaacaaacctctaaacactcaaaatgcagctgatgctctacaaaagtttaaccttaagaagactgcggtgcaaaaggcacttgatagtcttgctgatgctggaaaaatcacgtttaaagagtatggtaagcagaagatatacattgctagacaagaccagtttgagattccaaactctgaagaacttgctcaaatgaaagaagacaatgccaaacttcaagaacagcttcaagagaagaagaaaactatcagtgatgtggaatcagaaatcaagagtttgcagtc

SEQ ID NO: 15316 - DNA, 478 bp, Arabidopsis thaliana
  unsure at all n locations
  Clone ID: LIB25-067-Q1-E1-A2
ctgttacttgccgggcccggtccaaaattaacgggtcgacccacgcgtccgcggacncgtgggcggacgcgtgggcggcggcggaatattctcgccggaaaatggggaaagctagaggagttaacagcggcggcggagagagctctctcggttatctttttggttccggcgagtctgttcccaaaccaaacaagcccaacgctaaaaccggttttaccaccaccacgaccaccacaacaacaacggatggagctggaggtagacccaagaccacgaccacaactacaacaaccggagataaaaacaagacagaggagaactcggctggtgtgagaggaagtcctaataattactacagatcagatggacaaaactgtggcaacttcctcacggaacgaccatctacgaangttcatgctgcaccaggtggaggatcttcctttgggttacntgtttgggntctggtccttgtggatct

SEQ ID NO: 15317 - DNA, 416 bp, Arabidopsis thaliana
  unsure at all n locations
  Clone ID: LIB25-066-Q1-E1-F12
gcttccataaaacccaaaagaaactaggaagaggagtaaataatatttgttttaaagaaatgattctccacaaaatggcgttcttggccgttattctcttcttcttgataagcagcagcagcgtttgcgttcatagccgtgaaacgtttgcttgcgatacaaaggacgcagcancagctacactgagattctgccagctttcagttcctataccggananagtcaganatttgatcgggcggttgacattggccnagaaagtgagcttgttagggaacactgcggcngcgatnccacgtctaggaatcaaagggtacgngtggtggtcggaggctttacacggcgtttcaaatgtgggacccgggtactaaagttcggtgggggtttacccctggagccatcaatttccctcaagt

SEQ ID NO: 15318 - DNA, 410 bp, Arabidopsis thaliana
  unsure at all n locations
  Clone ID: LIB25-066-Q1-E1-F3
ggatttcttagctctctcaaaaaaatggcgtacaaatccctaaattcaatcaccaaatctgatatcgaagctctaggaatctccggtgatgtctccgagaagcttctcagagatctcgaagacattattcacggttcatccacgccgccggagacgtggattcagatttctcggcggatccttcaccctaatctccctttctcttttcaccagatgatgtattacggttgctacaaggatttcggacccgacctacccgcttggatacccgacccgaaggttgcttctttaactaacgtaggcaagttattagaaaagcgaggcaaagagtttttaggtggaaattacaaagaatccagtttcgagtttctccagttttcaangaagttctctgtatcaaatcctgaggg

SEQ ID NO: 15319 - DNA, 53 bp, Arabidopsis thaliana
  unsure at all n locations
  Clone ID: LIB25-066-Q1-E1-F4
cacgtgatgaagttcaagcctcgaanctgctttantcatcgcaactgaggaac

SEQ ID NO: 15320 - DNA, 232 bp, Arabidopsis thaliana
  Clone ID: LIB25-066-Q1-E1-F5
aaaaaaaatccattaatccaacaacagcaatatctggaaactaagacaaatctactccacaagtctttcgcttttcccctctgcattttgtgtttcatttgcttcagtttgttcccagaatttgtcttagtttccagatattgctgttgttggattaatggattttcagtttgatcaaaaaaaaaaaaaaaaaaaaaaaaaaaaaaaaaaaaaaaaaaaaaaaaaagggcgg

SEQ ID NO: 15321 - DNA, 399 bp, Arabidopsis thaliana
  Clone ID: LIB25-066-Q1-E1-F7
gtcaactaaactctgaccttagaaaacttgctgtgaaccttattcctttcccacgactccacttcttcatggttggttttgcacttttgacatcaagaggatctcaacaatacagtgccttgagtgtccctgagctaactcaacagatgtgggatgccaaaaacatgatgtgtgcagctgatcctcgtcatggtcgttacttgacagcttctgctgtcttccgtggaaagatgagtaccaaagaggttgatgaacagatgatgaacgtccagaacaaaaactcctcatactttgttgaatggattccaaataacgtgaaatcaagcgtctgcgatatagctcccactgggtttgaaaatggcatcaactttcattggaaactcaacttcaatccaggaa

SEQ ID NO: 15322 - DNA, 409 bp, Arabidopsis thaliana
  unsure at all n locations
  Clone ID: LIB25-066-Q1-E1-F8
taacaacacaactcagaatcgctctcgccgctgtttttctgtgaagagttatgatgccgaaagctgcgtgggaaccagaataccacagagtatttgtggacttatgcgtcgagcaaaagatgttagggaatcaacctggaacgcagcatatattgaaaccttttctacaaagaactggcgctaggttcaccagaaaccagcttaagaatcactgggatacaatgatcaagcagtggaagatttggtgtagacttgttcaatgcagtgatatgcaatgggatcctcagactaacacttttggtgctaatgatcaagactgggccaactatttacatgtgaatcctgaggctgggcagtatcggttgaatcctccatcgttcctcgagaaacttgagcttancctttgaag

SEQ ID NO: 15323 - DNA, 391 bp, Arabidopsis thaliana
  Clone ID: LIB25-066-Q1-E1-F9
aaatcctaagctaaggaagaagaaggttttgatgttagtgaaaggttagattttttattccgatcttggtcagtctcctccaatcgtgatttctcttctggatccaagctgatgagctctacgtcttcctcccagatggttcagctcgtagctgacaagcatgtacgttacattctgatggcagaaaagaaagagagttttgagtctgtggtgatggatcatctaagaatgaatggtgcatactggggactcaccactctcgacttacttgacaagctcggctgtgtttctgaagaggaagtcatttcatggctcatgacttgccaacatgaatctggtggctttgccggtaacactgggacacgattcacatatcctatatacactcagt

SEQ ID NO: 15324 - DNA, 423 bp, Arabidopsis thaliana
  unsure at all n locations
  Clone ID: LIB25-066-Q1-E1-G10
tcaactcaaaatctttttcatttctctgtatcctcctcatatttttattcttttgtaatgacaggttgctttagcttgtctgaagcattagaacgaacttacaaatccgggttcaaaagatccggtctacgacccgtaaccatcgacttgaaagatggaaccgtagtcaacttttgggtatccaaaaccaaacccgaatccaaacccaaacctaatctcctcctcatccaaaggggctcggagctantgcgcaactgggaatggtacgacgtaagctcgccgtctctcacgttatttcaacctcnacatccccganctantcttcttcggngggntttccacgacccggacccggaaaggatctgngattttcnaanccccanncactcacgcggggncctatgnanncccaatacggtgnna

SEQ ID NO: 15325 - DNA, 408 bp, Arabidopsis thaliana
  Clone ID: LIB25-066-Q1-E1-G11
tttaacatgccttcactccagttcaccgccgttgtcttctctctcaccgacggcttaagttttatctgtcggagtagtttcaatgcggagtgggaagaagagagctcgctcagaacctggatccacaaagcaaccccgaagcaaatactccgacaacccaccggattttgcctcgttagcgtctctttacccatctttcaagccctttgttttcttctccggtagtcgagctcgcatcgactggaccgattacaacgcaacccgagagctcactcgtgtcctccttctacatgaccatggcgtcaactggtggattcctgatggacagctttgcccaactgttcctaatagatcgaattacattcattggatcaatgatcttttgtcctctgggatcattcaaagttt

SEQ ID NO: 15326 - DNA, 248 bp, Arabidopsis thaliana
  unsure at all n locations
  Clone ID: LIB25-066-Q1-E1-G4
angagtgtccttcctctccactgttccttccttcaccaanacaaccaatcancaacatctcantanactctcttcttcttctcatcgctctgctgttatacgatgttccaacgattgaacctcaagtttccggtgaaagtttagctttccaccgccgtgatnttctcaaactctccggcactgcagtcggaatggaantnataggcaanggnttcatnatcaatgtgggtgatgcaaaanctgcngga

SEQ ID NO: 15327 - DNA, 405 bp, Arabidopsis thaliana
  unsure at all n locations
  Clone ID: LIB25-066-Q1-E1-G8
gtgtatatcatcaataggtttccgaactacaagaagtctccgatcggttcatttgcgaaaaactcatcatctcacgacggtattaaaacaatcgaagctgttaacagttgcagtttttctagaaaagcagatctttgcatccgtatcatcacatggaacatgaatggaaatgtttcgtatgaggatttagttgagcttgttggcaaagaaaggaagttcgatttgcttgtcgttggcttgcaagaagctcccaaagcaaacgttgatcaacttttgcagacagcttcatctccaactcacgagcttcttgggaaggcgaaattgcaatcggtccagttatatttgtttgggccaaagaattcacatacattagtanaagaattaaaggcagaagagatattccgt

SEQ ID NO: 15328 - DNA, 215 bp, Arabidopsis thaliana
  unsure at all n locations
  Clone ID: LIB25-066-Q1-E1-H10
gnttcaatgccttnnaaagggnttcccnngggcatacataaaatgggttctaaagaaactttgncacgaaagtctgaacaacttactgatgggccatgaagataaatcagcttatgcaattgtgcgcaatctctttctcgcgtggtccaagtgctgaacctcctanaatttttggggaaaaaactcccgggtaaanaaaaattccacccaaaagg

SEQ ID NO: 15329 - DNA, 416 bp, Arabidopsis thaliana
  unsure at all n locations
  Clone ID: LIB25-066-Q1-E1-H5
aaacatgtccatggagagtatgcagacgagtaacgctggaggatctgtctcaatgtctgtggataacagtagcgttggttccagcgatgctcttattggccacccgggtttgaagcctgtacgccattactcactctcggttggtcaaagcgtgtttcgcccgggaagagttacccatgcgttgaatgatgatgctttggctcaagcactgntggataccaggtatccaactgnagggctgacgaactatnatgagtggacgattgatctgaggaaactcancatgggtcctgcctttgctcaangggcttttggnaaattatncacagggacatacaacggtgaanatgtagctatcaagattacttgatcgggtcagannacaacccacnaatganggacagttcatgggacaa

SEQ ID NO: 15330 - DNA, 87 bp, Arabidopsis thaliana
  unsure at all n locations
  Clone ID: LIB25-066-Q1-E1-H6
agantggtganggcagcagtgagcactttactgagtgatggacaccgagttggtctgatnggtcacnggaagaaaatccntgacaat

SEQ ID NO: 15331 - DNA, 414 bp, Arabidopsis thaliana
  unsure at all n locations
  Clone ID: LIB25-066-Q1-E1-H7
atcaataacgtctttggctttaaacctttgtgactttgtgtacaaattccggagtgtctctctcccaaatcagcatcgcagattcgatttctcatcctaagagagctgaaaaatggaggttggattcaaggcattgctcgatgatcttgacgttctcgagaaatctctctcagatccggctctgatcaacaagctgcgatcacatgttgagaatctagccactctgtctaaatgtaatcctcaccggcgttccaaagtcaaggaactaagctcggaagtggtagatagtaatccttacagtaggcttatggcacttcagcggatgggcattgtggacaactatgagagaattagagagttttccgtcgccattgttggaattgggtggtgttgggnagtgtgccggtgaaaagg

SEQ ID NO: 15332 - DNA, 92 bp, Arabidopsis thaliana
  unsure at all n locations
  Clone ID: LIB25-066-Q1-E1-H8
tcttcaancgccgtccatcagagtttcaaggganttgctttaaagatcaatcctttcctaagaaaataccganaattcatcagcttttccnt

SEQ ID NO: 15333 - DNA, 409 bp, Arabidopsis thaliana
  Clone ID: LIB25-066-Q1-E1-H9
gcttcctagtgttttgtttagctataatgattcacttgagatcttgaaactcaagtgtgctatcgatttagactttccttctcgggtttgtttgaagtctcttagaaagctataccttgaccaagtacatttcaaagacgaagaatctgtttgcaatcttttatgtggctgccctagtcttcaagatttggtcgtgcatagatatagcaatgccgatgtggcgactttcacaattgcgtcgccgtcattacaaagattgaccatagaagatcttagacaagaaggaggttatggaaatggaagctatgtgataaatgcccctgggtttgaaatacttgaacatcaacggggttattgatattgagtcttgtttgattgacaaggcactaagagttagaggaggcaaaaa

SEQ ID NO: 15334 - DNA, 411 bp, Arabidopsis thaliana
  Clone ID: LIB25-066-Q1-E1-F10
aaatataacttcagaaccctttcaacaaaactctctctgttctttctccgtggagaagttaaagatgacgatgtcggagaactcaagaaacttggaagctggtttgctactgaggaagaaccaaaacgacatcaacgaatgtcgtatcactgctgttgtacttttcagtactttcgtttctgtttgtggctctttctgcttcggttgtgcggcaggttattcatcagttgctcaaacagggatcataaatgatttaggtctctctgttgcacaatactccatgtttggttcaatcatgacttttggaggaatgattggtgccatcttcagcgggaaagttgcagatctcatgggtcgaaaagggactatgtggtttgctcaaattttctgcaatccttcgggttggggttg

SEQ ID NO: 15335 - DNA, 419 bp, Arabidopsis thaliana
  unsure at all n locations
  Clone ID: LIB25-067-Q1-E1-A1
gagaccggcgacgaatcgtcggcgagaaagatgcgacgtaaagtacccacgtcgatcgaatctctagacgccgatatactgtgcatcatcttctcttttcttgatttgttcgacctcgttcattgtaccgtcgtctgcaattcctggaatgctgttatcaaaaggctgaagctgctacaagcttcttgccggaagatgcaccatctcggttccgactctcccagtagctccacgtcacttgatcgtccagctgaagatagatgtggaggattttgcgatgaagcatcacaagatggcattgttaaagggtcgaatcgaaattgagcgatgggaaagctcattctcaccgggtttctcaatgtcgaatgaagaaaggtttgcttcntacatgnntgtccgngaataaagntatgccncct

SEQ ID NO: 15336 - DNA, 414 bp, Arabidopsis thaliana
  unsure at all n locations
  Clone ID: LIB25-065-Q1-E1-A5
ttccgaaattgtttcgaaaaatcctgaagaagaagaggtctttgaatcaacaacagttccatgttgtgcccaacgtatacaccaagtgtttaccattttcaaacgcaaaagccagttttccggaaacagaggtttcgggtttgttcatctacttctggtggtgaggatgatagattcaaagtagagtacactccttggcttatcnttgggttgggcaatccaggaaacaagtatcatggaacaagacacaatgttggtttcgagatgatcgatgtgttggctagaaaagaaggggtgttgatgaacactatacagtccaaagctctaatcggaataggtgctattgaagatgtacctatcttgttggctaaacctcagacttatatgaacttcagcggcgaatcggttggatcc

SEQ ID NO: 15337 - DNA, 71 bp, Arabidopsis thaliana
  unsure at all n locations
  Clone ID: LIB25-065-Q1-E1-A7
anancgatcttcatgagtttttccgactttgtgatcccgaaaaggagaacctttgcctttanggacatcca

SEQ ID NO: 15338 - DNA, 419 bp, Arabidopsis thaliana
  unsure at all n locations
  Clone ID: LIB25-065-Q1-E1-A9
gnacgaggttccaagagaacttagcttcttgttctacgtacgacaccaaaaattaattcaaaaaagaaaaagaagagagttcaatgagaaaacattctcttgatcgatggcttttaacagctgttcttgtcgttctcctctcgtcttcttcctccttcgcggccaagaaggacgccaagaagaagaagaagagtaataaggaggtgacatatgatggaacctctttgatcatcgatggcaaaagagagcttctttattctggctctattcattacccgangaagcactccggaaatgtggccaagtatcatcaagagagccaaagcaagggcggtttgaacacgattcagacatacgttttcctggaatgtacatgagcctcaacaaggaaagttcaacttttcggggacgagctgatt

SEQ ID NO: 15339 - DNA, 395 bp, Arabidopsis thaliana
  unsure at all n locations
  Clone ID: LIB25-065-Q1-E1-B2
tgatgatagccatgtccaccaaatcagccaagaaaagatcaagacctcggctgcttacgttctgttctataaacgccttgtagactaaagaaactgaagcggtaaagacaagaaagtggtatttgcatttttgccgggtttggcttatttaaanacatcattggcttgattctaattcactacaagatnaagatgaaagcagctctgcgttgaggctaatttacagaanaganagagagagttgggaanaagagcacaagaccgagaggacatgttgcggggaatttattttaatcttacaaaaattggtatctgattattttattaaccatnttcaantagagaatacaagaatannanaaangccctttgtgggatatggttctaaannnnaa

SEQ ID NO: 15340 - DNA, 420 bp, Arabidopsis thaliana
  unsure at all n locations
  Clone ID: LIB25-065-Q1-E1-B3
ganatgaatgatgttctttatcagctatacagcatcactggagattccaagtatttgctgctcgcacatctctttgacaagccttgctttctcggagtcctcgcaattcaggccgatgatattagtggattccacgctaatacacatattcccatcgtcgttggatcccaacaacggtatgaaatcactggtgatctactccataaggaaatctcgatgttctttatggacatttttaatgcttctcacagctatgcaacaggaggaacatcantcagtgagttctggcaagatcccaagagaatggcgactgcactgcaaaactgaaaacgangaatcatgtactacttanaacatgctcaaggtctcctaggaatctgttcagatggncaaangaggttagctatgcagntantacga

SEQ ID NO: 15341 - DNA, 467 bp, Arabidopsis thaliana
  unsure at all n locations
  Clone ID: LIB25-065-Q1-E1-B4
ttattcngccggcccnggtcgnanaaacccgggtcgncccacgcgtcngnccaagcgtccgcgaatttattcgctccgccgcttctcaaagctaacggttttccccatccgaaatcattgtcgtacattgggaatctcggcgagctccccatcgtgatcgaagctccatctggatttccgagaggaaacagcctcggatcgctttcccaagcggcgattccacggcggaccgtcgcgtcgtcgtgcgccaccacgttcctgtgtaactgttcggcggaccacctgagatctttgcttagcanatctcccgcagacgccaacgtcggtatgctctgtatcgcgtttccgaagtagtacggatccatcttcggctcaagccggtgccggcaattaaccgccattcgaaacgtcgtcgtcttgctcggatcgagattcctcgctcgtgtaacggattgcatagctgagcg

SEQ ID NO: 15342 - DNA, 395 bp, Arabidopsis thaliana
  Clone ID: LIB25-065-Q1-E1-B5
gtgactgattaccggaagaagctccttcatcacaaggagctcgaatcccgtgtccgaacagctagggagaatttaagagcagctaagaaggaattcaacaaaactgaggatgatttgaagtctcttcaaagcgttggccagattattggagaagtactacgtcctcttgataacgagcgattgattgttaaggcaagtagtggccctcgttatgtggtgggttgtcgtagcaaggtggacaaggaaaagcttacttctggaactcgagttgtcctggatatgactacgctgacaattatgcgagcccttcctcgtgaagttgatcctgttgtttataacatgttgcatgaagatccaggcaacattagttactcagctgtgggtggtttaagtgg

SEQ ID NO: 15343 - DNA, 404 bp, Arabidopsis thaliana
  unsure at all n locations
  Clone ID: LIB25-065-Q1-E1-B6
gtcccgtcttcgatcttctcntctctctctcttcatcgcacgctgtgcccagccagctcaaaacactgcacttccgctttttatcaagatcaatctctaccaatacttagaaaagttctttcctttttgtcaaattctttcaatttctctcttcaattccctacgaattactcacttcggatccaatcagctctttatagcctctgcgtttgggagtcaatctttctctcttcgacaattaagggtttcgtataaagattgctgttttacgacaggattctgaataangagaagaagggttggtttcatttggatggaaagtatatggtangtctacacattaatatggaagcgcagattcatatacttgagcangaagcntaatccggctgtantaagagctt

SEQ ID NO: 15344 - DNA, 428 bp, Arabidopsis thaliana
  unsure at all n locations
  Clone ID: LIB25-065-Q1-E1-C1
tcacaccgctttcttctcttcattgaacaaaaaaaaaagctcttaacttttttttcttctttaggtaaaatttgacaaaagctctcaactttcaaactctgtttcttcatcatcatcatcatcaccatggacgccctgcttcaagtttcagttgatgggtttagatttgagaacggatctggatcttgctgcaaacccagaaacaatctcgaatctgggaacaatctcttccctgatttccacgagtctcagaatcagtcttcaancaaacgattcacctccaacggtgtgtttggataactctcctgttccgaaagtacatcaatgataatgttgatggacgaaggaangacttccgtagggtataactccgtgaacaattagcctttacnangccgctgaagagatcctctacgngataaatncag

SEQ ID NO: 15345 - DNA, 408 bp, Arabidopsis thaliana
  Clone ID: LIB25-065-Q1-E1-C10
ctctctctctataacaaaattggacagaattgggcaatcgagagagaaagatgcaagccatctccaaagtttcttctgcagcatcattctttagatgttctaggaagctagttagtcagccatgtgtgaggccttgcgtgagacagcttcacgtcagaaagggtcttgtctctggtgtcatgaagctgttctcttcacctcttaggactttgcgtgatgctggtaaatccgttcgcatttcaagattctgcagtgtctccaatgtctcttcctcattgcaaattgaactggtgccatgtcttacggacaactatgcttatatcttacatgatgaggataccggtacagttggtgtggttgacccttctgaagctgtacctgttatggatgccctccagaaagaaatat

SEQ ID NO: 15346 - DNA, 409 bp, Arabidopsis thaliana
  Clone ID: LIB25-065-Q1-E1-C11
ctacacagtgacggtttatgaaaagggagctgaggtcgtcaggatgtacaaaactctactaggaactcaggggttccgaaagggaattgatctctattttgaaagacatgatgagcaagcagtgacttgtgaagacttctttgctgctatgcgtgatgcaaataatgcagactttgctaatttcttgcaatggtactctcaagctggaacgcccgttgtcaaagtggtatcctcttacaatgctgacgctcgtactttctctttaaaattcagtcaggagatacctccaactccaggccagccaacaaaagaacctacatttattccagtggttgttggtcttttggactcaagtgggaaagacattactctttcctctgttcatcatgatggtacagtgcagaccatt

SEQ ID NO: 15347 - DNA, 465 bp, Arabidopsis thaliana
  unsure at all n locations
  Clone ID: LIB25-065-Q1-E1-C4
gttattagccgcccgggccgaaaaaccggggncgncccacgcgtcngccttactcgtgaccggattcgcagagttcacgagcttccgagtcaaaaacactctaaaacaaaaccatgactttgttccatagactcgatctcatcgatccgtacacgtgtacaccactcatcgtccgtgaaacctccattgttgaaccttcatcattgttcctagggtttccttccttcatcgacgaagacattgaagatctcttcgagttttcatcacctaatcctctcgatctattcgaaaccgtgacggatctggttaagattaagaaatctccgtcgtcttgcaagtacaaggtgattcgtcggagattagagccggagtatccattgaagtatctttgtgaccgtgtttctgatttggnatcaaagtttgatagattggttagtcctaagagtgataaggaagtatacattg

SEQ ID NO: 15348 - DNA, 413 bp, Arabidopsis thaliana
  Clone ID: LIB25-065-Q1-E1-C6
ctctagatcgattttggatttagatctctttgtttctactgcttttcatcgttggatctgcgttttgcaaagggagatacagaaaggaatagctttgaattgacaaggtttctctctaatccaaccgaatctcaagcttccatggctctcaatctccgtcagaaacagactgaatgtgtaatccggatgttgaatctgaaccaacctttgaatccaagtggaactgcgaacgaagaagtttacaagatcttgatttacgataggttttgtcagaacattctatctccattgacccatgtcaaggatctgcgtaagcatggagttacactcttctttctcatagacaaagatcgacaacctgttcatgatgttcccgctgtctactttgttcaaccaactgaatccaacctcca

SEQ ID NO: 15349 - DNA, 400 bp, Arabidopsis thaliana
  unsure at all n locations
  Clone ID: LIB25-065-Q1-E1-D11
ctctcttctttgttcttgctccttgttctagttcggatttttcttttgaagtgaaatggttaacgctacagttgcgagaaacattgccggcatttgtggaaatgtcatctccttgttcttgttcttatctcccatacctacgttcataaccatatacaagaagaaaaaggtggaggagtacaaagctgacccatacttagccacggttctaaattgcgcactatgggtcttttatggcttaccaatggttcaaccangatagtctccttgtgatcaccataaatggtaccggtttagccattgagctggtgtatctcgcnancttcttcttcttttctccaaactagtcgcaaaggtgaaagtggggctaanggttantaaggaagagatggtgttttgt

SEQ ID NO: 15350 - DNA, 406 bp, Arabidopsis thaliana
  Clone ID: LIB25-065-Q1-E1-D5
tgatctcattttcgaacaaggagacaacattacggggaaggtatcaagagacgaagtagcgcgtatatgcatcgctgctttagaaagcccgtatgctcttaacaagaccttcgaggttaaaagtacggttccgtttagcgagcctttcacggtagatcctgagaatcctccaccggagaaagactacaatgagtatttcaagactctgaaagatggaatcaccggtaaagaagctttagaacagagcactgttgcagtttaaaccaggttttatctacttttgtaactgtgtgttgtctcatcttcgttaaaaaatctttccaaaagtaaaaacaacaacaaaaagagtcgtgttagaaacatgttgtatactccatatatcgtacattgtagataagattacaaa

SEQ ID NO: 15351 - DNA, 189 bp, Arabidopsis thaliana
  unsure at all n locations
  Clone ID: LIB25-065-Q1-E1-D6
ttgttgtaanggantctatacanagccgagtggaatcgtgggtcagagaccagagggcnaggttcttacgggtttcgtggggaccgattcantggaggttccggtggccaccatggaacggangagatgcggatcaaaggattaaggatccgtcgggaatacgagaagcgcagttancacnttgaggat

SEQ ID NO: 15352 - DNA, 416 bp, Arabidopsis thaliana
  unsure at all n locations
  Clone ID: LIB25-065-Q1-E1-A4
tacttcaaggatggttgctcgaattccgagaaattggtggaagtgctaaaacgtgtcaagaaacagagtgaacaactttcttctgcagcaaaagaccaagtggaagctgcaaaccctgnaactaacgtctctgtgtcaaaggatcattttgataggacagtaacaactctcaacattgcggttacctggtttcatctgtatcactattcaaaatccttttccattctagaacctttgtttcaaaatattcancggctanacgagacaatcgcacttcaaatctgcttcttgttgctgggatatttcactggcttgtcgtgatgctgtnaattttttggctgtgtttgactatatggacaaagcttttggtgttgggttttggaantcatgaagaaaatggaagcacaatgcaactt

SEQ ID NO: 15353 - DNA, 409 bp, Arabidopsis thaliana
  unsure at all n locations
  Clone ID: LIB25-064-Q1-E1-F5
cgtttatganatcccgcatgtaaggattgttgggaatgtttgctttactaattttcctagcaacactgctttccgagggtttggaggcccccaaggtatgcttataactgaaaactggattcaaagaatcgcagctgagcttaataaaagccctgaagaaatcaaagagatgaactttcaagtggaaggatcagtcacccattactgtcagactcttcagcactgcacattgcatcagctctggaaagagctgaaagtatcgtgcaacttcttaaaggcccgcatcagaagctgacgaatttaatagtcataatcggtggaaaaagcgtggtgtagctatgggttcccacaaaatttggcatatcatttaccacaananttcatgaatcanggccggngcnctgttcag

SEQ ID NO: 15354 - DNA, 411 bp, Arabidopsis thaliana
  unsure at all n locations
  Clone ID: LIB25-064-Q1-E1-F6
gcagctgctgtgatgcaggtcacagatgacttaaccgggtgtggcatttctgatccagagaggttgtctcggatcaagaaccttctcaagaaatgtgcttaagggaagcaacacaccaagggaagctaaaaccgtagtgtctcatggggaggtccacacggataggaggcttcatcagatgatgtttgaggatagagactatgaacaccgtttggtggatgatgattcctctatccaagatgaaaggcaaagaccagatgtttgtgttgataattggctcgataaggattactctgtggtcacaagttagatgtaaagacagaccaaaagcttctgttcgacacagtctgcactttgactgatatgcagtaagtggttttccatggaaatgttgntactgangggaaccgg

SEQ ID NO: 15355 - DNA, 412 bp, Arabidopsis thaliana
  unsure at all n locations
  Clone ID: LIB25-064-Q1-E1-F9
gctcatctgtaatcgatacagatggcagcttcatcagcttgtcttgtgggaaatggtttgtcagtgaacacaacaaccaaacagaggttaagtaaacatttttccggcagacagacaagcttttcttcagtgattaggacatctaaggttaatgtagtgaaggcttctttggatgggaagaagaagcaagaaggaagaagagattttctcaaaatcttgttaggaaatgctggggtcggtttggttgcaagtgggaaagcaaatgctgatgaacaaggtgtttcttcgtcgaggatgtcgtattcctaggtttctaaaatacttggataagggatanggtgaataaaagtttgattttgtatgaaaatgggactatagctattgtggaaagctgtttctcctgaantgggta

SEQ ID NO: 15356 - DNA, 419 bp, Arabidopsis thaliana
  unsure at all n locations
  Clone ID: LIB25-064-Q1-E1-G1
tgatggtcactaaacaacgaaggtcaacatttccccagttgcaacaccaagagaaccttgtctgtagcatctgagactaatcctcatcccatcgatcagcttctttttgatcgtgtcttatgtgatgtcccgtgtagtggtgatggtactctgcgcaaggctccaagacatatggcgaagatggaattctggatctggcaatggacttcatagtctacangttgtgccttgccatgaagangtttatctccngctaaaaagttggtgggagaatgggtatactcaacctgctcaangaacccaatttgaaagatgaaacctgttgttgccgaaaattctgaagganatttggatgccccngttgaanctttgtagatnttcccagataagccttccagaanccttattannannancca

SEQ ID NO: 15357 - DNA, 428 bp, Arabidopsis thaliana
  unsure at all n locations
  Clone ID: LIB25-064-Q1-E1-G5
gcccacgcgtccgaaaagagaagaggtatcaaaaagaagaccagaatcttttaacattttgaaacaaatggcgtccaaagccatcttcttcttctttgtctctgccgtgtgcctgtcctctctcgccggtgtggccatcgctgatgccgatgactttgaccgtttccaaattcagggatcggtttattgtgacacatgccgtgtccaattcgttacccgtctcagcaagttccttgaaggcgcgaaagtgaagctagaatgcaggagcaagaacaaacggaaccgtaacattgacaaaagaagccgtaacggacaaaacagggagctacagaatggaagtgaccggtgaccatgaggangaagtttgcgaagcttgtgctccgtcgaatcaccagacagtggttgcagtgacgttaacaaagangctt

SEQ ID NO: 15358 - DNA, 423 bp, Arabidopsis thaliana
  unsure at all n locations
  Clone ID: LIB25-064-Q1-E1-G6
aagaagaaaccaaaaacctaaaagaacagacagaggaagaaaagatctttaatattttttttatttctcttcctggttgagaacttttacttcctctccccttaattgcaacaatgggaaattgttgctctcatggaagagattcagatgataacaaagaagaaccgaggccggaaaatggaggcggcggtgttggtgccgctgaagcctctgttagagcttctaaacacccgccagcatctcctcctcctgcaaccaaacaaggaccaataggacctgtcttaaggcgaccaatggnagatgtaaagagctcatatacattgggtaaggagctangtcctggacaatttggggtgactcatctctgcacgcaaaanggnacagggctgcaaatttcnttnnanacacntgtgnaaaangggg

SEQ ID NO: 15359 - DNA, 66 bp, Arabidopsis thaliana
  unsure at all n locations
  Clone ID: LIB25-064-Q1-E1-G8
aaaagcaacaatgtaatgacaggnaaaaaagtgttttccataanagcacaaatcacaanagaaaca

SEQ ID NO: 15360 - DNA, 419 bp, Arabidopsis thaliana
  unsure at all n locations
  Clone ID: LIB25-064-Q1-E1-G9
tgtggataatcgattacttgatctgacctgagaaaaagtagaaacctttgagtagagctggttctattacaaagttgtgtttgggagcttgctacaagaccattggatttcttcactttcttcatttgttgagtctgctacaagatcaaggatctgttgattttgggtatttgatcaaaatctgaaattgatcttgtggaagtaaggttgctgtagttgtcaaggtctttggtgaagtttgtttctcacaaagtttgatccttgaagttggtctctattgatcttagatctagtgtgaataaaggaagtccttggaaagcagcaagacttgaaaaacgctatcacaagangaantgccttcctggaagagaacgtctgggattgctgatagatttatatgattcagagaaagaaactca

SEQ ID NO: 15361 - DNA, 419 bp, Arabidopsis thaliana
  unsure at all n locations
  Clone ID: LIB25-064-Q1-E1-H10
aagacaaaaatatatataaaaaagaaaaaaaaagaaaaaaaaataattgtcttgctctgttctatttaacttttcttatatataaaaaaaatggcgaaaaatttactagcaatatgtctggtgtttatggttgcatcaagtgtggtttatgaagtgcaagggactttcttgttaaagctttacttgaggaggaagtttcccagacgttgtatcgactttgccccttatgctggcaaaggtatgttgatgccccgtgagcaaccttgaagggggatgtcccgcaactaagagagttcaaacaattctttcaacgttcaagtcttacaatgagctttaacnagctcagcatncnanatcccgcatcnnaaanacatcnganggnngngaangatgggnaaananttaaatttncttnccca

SEQ ID NO: 15362 - DNA, 490 bp, Arabidopsis thaliana
  unsure at all n locations
  Clone ID: LIB25-064-Q1-E1-H11
nnnnnnngnaactgttacgcctgccggtacngcgtccnaaattccanggtcgacccacgcgtccgaataagagtttctctgtcttaaactcattcattctttctctctctataaccagagttctgtctgtgaaaacacacaaatctaagagaagttatgaataaacaagatgttatgaaacttcagacttgtgttctgaaagtgaacgtacactgtgaagggtgtaagcataaagtgaagaaacaattgcagaaaatcgaaggtgtttactctgtaaaagcagatgtagaacaggggagagttactgttacagggaacattgacccagctcttctggttaagaaacttagcaaatcaggcaaacatgccgagatcttaggcggtggtgggaggangaggcggcggangtgggaaaaggggttccctaatctgaatgggcaatttgcaaatctcaacatgggtggaaacaattaagccctaaaagggtggg

SEQ ID NO: 15363 - DNA, 483 bp, Arabidopsis thaliana
  unsure at all n locations
  Clone ID: LIB25-064-Q1-E1-H12
acaccttncagnatgcntctanaattccaaggtcgacccanccgtccgnggacgcgtgggcgatgaagctctttgttcatctctctatcttcttctccatcctcttcatcactctcccatcttcttacagctgcaccgaaaatgacaagaatgccctccttcaaatcaagaaagcacttggcaatcctccccttctatcctcctggaacccccgaaccgactgttgtaccggctggaccggcgtcgaatgcactaaccgtcgcgttaccggtctcaagcgttacctccggcgaagtctccggtcagatctcgtaccagattggggaactcnttgacctccggtncactaagatttcagctacctgccacacctcatcggggaancatnccacgcaccatnaccaaaactcaangaancntcangactnctctaacttgaanncaaantangtctcctccggttcgnattcctgantanatnag

SEQ ID NO: 15364 - DNA, 74 bp, Arabidopsis thaliana
  unsure at all n locations
  Clone ID: LIB25-064-Q1-E1-H2
cncttggggacctgctattatttggccatgcngatgacgaagttcttgcggctctagctgagacgatgacngaa

SEQ ID NO: 15365 - DNA, 427 bp, Arabidopsis thaliana
  unsure at all n locations
  Clone ID: LIB25-064-Q1-E1-H3
ctgcagtcatccgacgatctcaattgctaaagatcgaccagtgttaggcataactttgtcgccagacttcangatgaaacctattcagttcgaaaaggatgatgatacaaactatcacatggatgtgatagcaggactagccaacatgagggcgagaaattacagcatccctgaagtggacaagctgaaagcaaagttcatagcagggagaatcatcccagccattgcgacttcaacagccatggctactgggctggtctgcctcgagctgtacaaggtccttgatggaggacataaagtggaagcttacagaaacacatttgccaacctggcacttccactattctccatggctgaaccacttccaccaaaggtgggtgaaacaccgtgacatggcttgggacagtttggggacanatggggtnnc

SEQ ID NO: 15366 - DNA, 105 bp, Arabidopsis thaliana
  unsure at all n locations
  Clone ID: LIB25-064-Q1-E1-H4
tggngtcgtcctccaatcgcaacaacaccgacacnaatcctttgaagataaatttcacattatgtgggcnggaaatcnacttcagaacttccgatnangggagaa

SEQ ID NO: 15367 - DNA, 409 bp, Arabidopsis thaliana
  unsure at all n locations
  Clone ID: LIB25-064-Q1-E1-H7
gtgacataaaaatctacctcagtgaccatagtctcactttccaatcccacaaagtcattctaagtctttggagtgttgcatttgcaaagatgtttacaaatgggatgagtgaaagccattcatcaacgatttacctaaccgatgtatcaccagaagcattcaaggctatgatgaatttcatgtatagtggagagttgaacatggaagacactgtgaattttggcaccgagttgattcatcttctctttctagctgaccggtttggagttgttccacttcatcaagaatgctgcaaaatgctcttggagtgcctctcaagaggattctgtatgctcaagttctccaagtggtttcgtctatctcatcangtanactcattgangagatgtgcaaggaggaagttctccat

SEQ ID NO: 15368 - DNA, 412 bp, Arabidopsis thaliana
  unsure at all n locations
  Clone ID: LIB25-064-Q1-E1-H9
gaacccaaaaaatgaaagagttctcgagagtttctttggttggtactacgcttcctcagctgtggcggttctcatcgcgttcacgggtattgtatacattcaggagcatctcgggtggaaaatcgggtttggagtacctgcggtcctcatgttgatcgctgctttgctattcattcttgcgtctcctctctatgttacacgtggtgtgaccaagagtctcttcaccggtttagctcaagcgattgttgcagcttacaagaagaggaagctaagtctaccaagatnatcatggactcctttgattgttattatcacatgaaagattcctgaaatcaaagctccaagtcaaaagttgaggtttttgaataaagcttgtttaataagtaaccgtgaggaggagantgggtcagat

SEQ ID NO: 15369 - DNA, 425 bp, Arabidopsis thaliana
  unsure at all n locations
  Clone ID: LIB25-064-Q1-E1-F4
ttancgaagcccactgggtttcggagctgatcggtctctatttctctcttcatacatatctcaagcagataaagttgatcggatactagaatgggaggaggatttagagttttgcatttggtgaggccattcttggcttttctgcctgaggttcagagtgctgataggaaggttccattcagagagaaggttatctacactgtcatctctctcttcatctttcttgtctgcagtcagcttcctctttatggaatccattccaccaccggtgcggatccattctattggatgcgtgtcattcttgcgtccaaccgtggaactgtcatggagctcggtattactcctattgttacatctggacttgtgatgcaactcttgggctggntccaagattaatgaggtttgacaacaatgnttcgtngagg

SEQ ID NO: 15370 - DNA, 412 bp, Arabidopsis thaliana
  unsure at all n locations
  Clone ID: LIB25-065-Q1-E1-A10
aacgcttccaatctatacatacaacgcttctcaatcggaagcgtaagcgatgtcgtacgacgatgttgagatagaggatatggagtggaacgaagagattcaagcgtacacgtatccttgtccttgtggtgatttgttccagattacgaaagaagatctccggctcggcgaagagatcgcgaattgcccaagttgttctctttatatcaccgtcatctacaatatggaagattttcaaaacgatacgaagaagaataacgaacctaaaactcgtcaccctgtggccgttgcctaaggatagtcatggaattgattagaagattgttcaacaaccactgcagaagagattaanctgcngttttgggaaagcatatgaaaagtgtgttacattaaccacatatagagagaaggg

SEQ ID NO: 15371 - DNA, 414 bp, Arabidopsis thaliana
  unsure at all n locations
  Clone ID: LIB25-064-Q1-E1-D12
ctttgacagtggtggctacaacattaagactggacctggctgctcaattgagctcatgaaattcgacatgggcggttcagctgctgttcttggcgctgcgaaagctattggtgagattaagcctcctggtgttgaggttcatttcatcgttgcagcctgtgaaaatatgattagtggaaccggaatgagacctggagatgtcatcactgcctcaaacggaaagaccattgaggtcaacaacacagatgctgaaggtcgtctaacactcgcagatgctctagtgtatgcttgtaaccaanggcgtcgacaagattgtttgacctcgccnacntttgaccgggggcctggtgttaattgcctccttgggaacttcaatgggcaanggaatnctatacacctaagccgaccaagctt

SEQ ID NO: 15372 - DNA, 429 bp, Arabidopsis thaliana
  unsure at all n locations
  Clone ID: LIB25-064-Q1-E1-D2
caaatgcaagaagaagaagaagtgtctctatgtgctctgtctgaatctgttaacggcgttttcaggaactttgcagctgacttctgactacgttcctgataaattcttagtcttcctctctctctcatagtcagaattgtttagtatctctgttttcgggcatcgtgttagaataatttggataagctttctatctgtttggaatagcttgccgttttgttattgttgtccaccacttgttcgatgaaatgactgtgtgaaggttttaattgcttttcgacggtgttatttgcctctctatggataacgaagttgcatttcttgtcaaatttcaatccaaaacaaaaatttgcatttttgcttaagttaaaattttcagaacccagttaagattaangtttgccgaaaaaatccaggaactgttttagc

SEQ ID NO: 15373 - DNA, 444 bp, Arabidopsis thaliana
  unsure at all n locations
  Clone ID: LIB25-064-Q1-E1-D3
aaacattagggagcctctcagatcctcaagaaaaccctaaatcaaaagtcgagatcgatggcgtccttcgctcgccgtgccatgagcttagctcagatcccatctgctcgtatttcctctggagccgcttctattggtcagcgtcgttgcctcgccggcgccgctgatcaccatggatctaccaaggttgacttctggaaacagcccacgaacccaggaaactggaaagaggagcattttgtgccttaattctctgtctggctggggcttacttttcctacagtggataanaagctcnccaacngggggnaaaaaangagacncctgttggagaattacncaatgagntttcattngccccaaaggaanaaccttttatggngaaaanccncccattcnaanggcactttgttttccccntttagnaaatttggnnaggggccc

SEQ ID NO: 15374 - DNA, 401 bp, Arabidopsis thaliana
  Clone ID: LIB25-064-Q1-E1-D4
ttcacggaaaatagaagcgtcgagttcctcctctccctcaggttgtcaatggccgctaggttacttgctttgagacgcgctttgtctcttttcagcaaccaacaacatcgttttcctttgtctcaagtctcaacagagcagttgtcgctatcaaactcactcttcagcagaagtcatgtttatggaagattatttcagagacagttatctgtaatccgtgaggcaaatgaagcttctgtaaccaatgtctgcaactcgtcaaactctgctactgaatcggccaaagttccctcccctgcgacgccctctgaggaaatgatggtgaagtacaagtcccagttaaaaataaacccgaggcatgacttcatgatggtcttcacttgcaaagtccgtgataaaag

SEQ ID NO: 15375 - DNA, 494 bp, Arabidopsis thaliana
  unsure at all n locations
  Clone ID: LIB25-064-Q1-E1-D9
nnnnnnngaantgtttacgcctgncggtacggcntccaaaaattccanggtcgacccacgcgtccgnccacgcgtccgcccacgcgtccgagactcttctccttcgcttattaagccctctcaactcttcttctctctctctctctctctccgcctgttctccattgatctaatctaactcgctcatcagaatcatctcttcatcgttaatcctcttccttctcactcaccatgtatcgtttcgcttctaacctcgcctccaaggcaaggattgctcaaaacgctcgccaggtttccagcagaatgagctggagcaggaactatgcagcgaaagagattaagtttgggngttgaagctcgaagctttgatgcttaaggggtgttgaagatnttgctgatgctgttaaaatcaccaatgggttccaaangggacgtnaatgttgtgaattgagcaaagtttggggtgctcctaaagttgacaaaaaagatggtgt

SEQ ID NO: 15376 - DNA, 388 bp, Arabidopsis thaliana
  unsure at all n locations
  Clone ID: LIB25-064-Q1-E1-E11
agagcaagagtttgccagctgcaatcaacgtgctcgccaagtccctagagtacactgtcaagagcaagtcctataagcttaataaggacgaagaagagaggttactaaaagaaaagatagaaatggttctctcggctgagcggggtaatccatccgaccaggaatctagttctgagagccctaagaaagcaagtggagaaaatccaatcctgcttcttgcatacaagctgttcaaaaccgatggtccattgaaggatacaatattggattgtttttggcataacttggacttctttgagcattgtggctgtgtttactaccgtgacctgatnacacaatggatacttgaaggctactttgatcctgttangtctgtcgaaaaaggcgt

SEQ ID NO: 15377 - DNA, 416 bp, Arabidopsis thaliana
  unsure at all n locations
  Clone ID: LIB25-064-Q1-E1-E2
tttaaaaatctcagcctttgggcttcgttagtgttggtttgctttcagaatttaacttagttacggtaaaagcaatgcttagcgttatacgatgtgcatctaccgtcggagattcctattgttggctgcgaacttacaccttacgtacttctccggcggcctgataagaccccctccaccgatgatgtgcctgagtcagccccgcttgaaggtcacttcntaaagtacagatgngtttcgaagtacagantgataanaaacttgcgatttgtagntgtgcatcnatccgannacggcancattgcaagtgtctggggatgtctaaagtctaaagttcctgttgcccaaanagctancantgctccacnaangtgcatttccgaangcgtggcancanncaccagtngtgttgcant

SEQ ID NO: 15378 - DNA, 428 bp, Arabidopsis thaliana
  unsure at all n locations
  Clone ID: LIB25-064-Q1-E1-E4
ggaacaatcccagaggtggagatacttgcaagattaccgttgagaagcattgcgaggttcaaatcagtatgcaaaagatggaaatcagtaatagaatcggactacttccgacgtctcttcggatcttttcaccgaagctcctctacctcatggtcgatcatgttcagaacagagtatcttcgtgagatgacacaagccataggcttccatggatgcaaaacatgggatcttcccaaatctctagtttcatatatcatgccatttcaagaatatccgaatctccctacctctgaatactactatatagcttcttccaatggattgatttggatcgatgtgcttgtttctcgcatcaagaacaaggtttatagttataaatctttcgttggtaatccagttttacaagaatgggttgagattcccnccac

SEQ ID NO: 15379 - DNA, 431 bp, Arabidopsis thaliana
  unsure at all n locations
  Clone ID: LIB25-064-Q1-E1-E5
aacttcaaaccaaaaaaaataaatgggagaggttcaagaaaatcctaaactcttatatcagcttttcaaatctccatgaataatattaacaaatttgttctgatctattttattttatttttggtatcaggaagagaagaaaccagaagcagcagaggaaaagaaaatggaagagaagaaaccagaagagaaaaaagaaggagaagacaagaaagtggatgctgagaaaaaaggagaagattctgacaagaagcctcaagaaggagaatctaacaaagattccaaagaagattctgctccggcggcgcctgaggctccancaccgcctcctccgccgcaagaggttgttcttaaggtttacatgcactggtgaaggatgtgctaagaaaagtnccggcgtttgtctcnaaggnntncnanngnntggnaag

SEQ ID NO: 15380 - DNA, 423 bp, Arabidopsis thaliana
  unsure at all n locations
  Clone ID: LIB25-064-Q1-E1-E6
tctgcgtttcccgtttgcgttttccggcaatggctctccaagccactactactacgttctgcttctccggtccaactttccgatcaactcctcactcactcacttcaaaacgtcctanctccatcaaagctactacttcttctccttcaagactctccaattcacgatctaatctcaaaggaagagcattgtctagtgatggttcaacacaagaatctccttatgtagtctgttttggagaaatgctaatcgattttgtaccgacgacaagcggactttcantagccgatgcaccggcttttaaaaaagctccaggtggtgcagctgctaatgtanctgttgggantgctcgtcttgggtggttcctcaagctttcaantggnaagggtnggtgaagatgagtttgggttaaaatgcnttgcg

SEQ ID NO: 15381 - DNA, 423 bp, Arabidopsis thaliana
  unsure at all n locations
  Clone ID: LIB25-064-Q1-E1-E7
gaacaccgatgaanaaatcttcatcaagctgggatctgacaaggaaaaacgcaaagatgctactgagaaggccaaaaagtcgttgagcattaatgagttcttgaagccggctgatggaaagaggtacaacgggagaggtggaggctcccgcggaagaggaggtcgcggtggtcgtggtgaaggaggaaaccaaaggtatgcaaaagaagctgcagctccggcgattggagacacagctcagttcccttcgttgggctagtaaagacccctggtccttcagcctcgctatctctgtctttcgtttctctttggttgaattttgttagttttataattttttgttacactttctgaaggtcttttctgcgaaactattacgttttttaagttatganaaaaattattaagatnaaaaaaaanaaa

SEQ ID NO: 15382 - DNA, 421 bp, Arabidopsis thaliana
  unsure at all n locations
  Clone ID: LIB25-064-Q1-E1-E9
aaagtagccaccgcttgacgaatcattcatcaacacacgcagagagctctgaatctcgaggaagaagatggtgaggatcattcctatggctgcttcctccattcgaccttccctcgcctgcttctctgattctcctcgcttccccatctccctcctctccagaaatcnctctcgcactctccatgttcctcaatcacagntttttggnttaacttctcataancntttgacaacaagtgtaaaactgtttagcgagttgctgaatctgggtaatagcagctcaanagctnactacagcaaagatgaatcntctcacctngnggttaataatgatnaggngnangaattgcttcaatgttggtttanccgttgttggcnganaatgggaccgggaccgattaaaggttttannactggnatg

SEQ ID NO: 15383 - DNA, 428 bp, Arabidopsis thaliana
  unsure at all n locations
  Clone ID: LIB25-064-Q1-E1-F1
agaaccatcggagaagaggaagaagatcagtgtagagctatcgggaaatttatctgaagaggaaactgaaattgagatcgaagttttgagtttgggtaaaaaatggtaggaggagtagaagaattgagtattgaacagttagcttcgagtatctctacctacaaagaacaactcgaacaggttaggcagcttttgtcagaggatcctaggaactcggaatatgcagacatggaaaaggagcttaaagaggtgattgcattgacagaggaagttcttgcaactgcaaagcaaaatgagatttctctatcagatgccggagttagtgctgaagcaactcctgggctcacccgatttagagggtgcttgggaaaagacgggtttaaggaatgacccaatccatgaaggtaagttcccnggttggaacnaaa

SEQ ID NO: 15384 - DNA, 485 bp, Arabidopsis thaliana
  unsure at all n locations
  Clone ID: LIB25-064-Q1-E1-F3
ctgttaccctgccngtagccgtccgaaaattccngggtcnacccacgcgtccgcncacgcgtccgatcttttcaccgcccttctcatagcagctctcgccgatcctgtgtaatcgggaatcggtaatcgtcagggtctgtttggggtacggcgacgcgattttctgattattagggtttaagatctcgaggttgaggagagcttgaaaagttgtttgtcaacatggagcgcaagactattgacttggagcaaggatgggactatatgcagactgggaattactaagctgaaacggattctggaaggattgaatgagccancatttgactctgagcaatatatgatgctttatacgactatccacaacatgtgcncccagaaacctcctcatgattacnccagcagcttttatgacaagtatccgggaaacatttgaggaatatattaacccaacanttttgccctgcnttttanggaaaaaccat

SEQ ID NO: 15385 - DNA, 488 bp, Arabidopsis thaliana
  unsure at all n locations
  Clone ID: LIB25-064-Q1-E1-D11
gctgcggaactgttagccnccgtaggccccaaaattccaaaggtcgacccacccgtccgaaagagtaatagcgcggcggagccatggttctcaagactgagctttgccgattcagtggccagaaaatttaccctggtagagggatcagatttatccgatcggactctcaggtgtttttgtttctcaactccaaatgtaanaggtatttccacaacaagttgaagccatctaagctttgctggactgctatgtaccgaaagcagcacangaaggacgcagcacaaggaggctgtgaagagaangagacgtgcaactagcgaagccttactcaagggtcgaatttgtccgggtgctacttttnnagggtnattcagananaagcnnngcaatngaancccctgaaagttcnntgaatgccgcctanangaagctgccctacgttaagatnaanggagangaatcacgaaanaccnatggacgaagaanaa

SEQ ID NO: 15386 - DNA, 409 bp, Arabidopsis thaliana
  unsure at all n locations
  Clone ID: LIB25-063-Q1-E1-A9
gaaagagagagagaaggagatggcggattcaagcgattctgtctccattgatatggaggcattgtctcttggaggacaggaacaccttgtggagactacttatggcccggtttgtgttgccgtttgtggagatccagataaaccagctcttatcacttatcctgatatagctcttaattatatgttctgttttcaaggattattgttttgtccagaagctagttctttgttactccacaacttttgcatatatcacatcaagtcctcttggccatgagttgggagctccaatgatcagtgttgatgcccctttgctcctcaagctgaatgacctaacaagancaaatagtcccagggtccttaattaanttccggaccttggtgcaagtaaatgtgtaagggggtggtc

SEQ ID NO: 15387 - DNA, 417 bp, Arabidopsis thaliana
  unsure at all n locations
  Clone ID: LIB25-063-Q1-E1-B10
gcaaaagcggttgaaggtcctctacttctcggcccaccgtaacaacatacactgtcaatccatatagttatcataaacccacacgtcaacgaaaccactcttttgacttcatcctctatccaatcacaccacgccacgttaacaccacgacctagtgtttctgtgatctccacacagagaaagaagcgtttcggttctgttttcgccccaacacaaagactccttttgtttcttttcctcaattggatcgaaaaaacccctaactttgacatggaaggagagattcaagactgggaaatacttcagagctcgagatctaccacggaagatgacaattcgaggagcttggaggagattgatgatggcacgcaaggtatgattangtttgatcatttctctcttgagaaccagagtggt

SEQ ID NO: 15388 - DNA, 416 bp, Arabidopsis thaliana
  unsure at all n locations
  Clone ID: LIB25-063-Q1-E1-B12
cttctccttcttcttcttcaacaacaaacttccattgttcttaatacctagctagctcttccccggtttgagattatcccaaaataacaccggttctcgggtaaccggtcggtttttccggagcaaccaacccttttacttctctttatcattgtctcagatcttctgttcttcaaaggcaaaaatgggcataaaccaaagatcattgtgaattagggtttcactgtgtctccaaaatggaagatatacttggagaagaaaatcaaatcacgaaaatatattgatcagtgccttgaaggaaaccaaagttgacaactccaaaaatccatttcgttattaatatcnaactgagtgatcataagtcaatcatccataacaatgtancatccaaacntgtttgagaggcatcatatgtt

SEQ ID NO: 15389 - DNA, 416 bp, Arabidopsis thaliana
  unsure at all n locations
  Clone ID: LIB25-063-Q1-E1-B2
aaaagctctctctctctatctcccacgatttcctttttccgccggaagaagaagcaaaaaaaaaagaaatcgaatctctctttcaagtgttcgatttaaagcaaaagtgtaattataatcggaagcgagatcttgagaaatggtgggatgacggcggagggagatggcgaggggaggaggagaatggaccggagggatcgccggaaccggagttctctctttcaaaagaatcactctacttgtttgctttttcaacattctcattgctctctttgttcttcgctttctctatgcttcttctctccacatctattccaataacgataatgttgttaagtacacagctgatgagattangaaaatggaggaatctattcggattcgaagatcganggaacctactcctgaatccttca

SEQ ID NO: 15390 - DNA, 359 bp, Arabidopsis thaliana
  unsure at all n locations
  Clone ID: LIB25-063-Q1-E1-B4
angatngtggcnggncaaacnanancaaacgctngngcnangcngttggttcagttnaacaagcaaactttgggcaagcgttgcattgggctaacgttgcctccaaagggtggtgtcattcccccaagccgtgttgctccgggcgttaaaaacctcaacagcatanccaagacgaccccagaccgtcagcaagcttgcaattgcattcaaggtgccgctagagccttaggctctggtctcaacgctggccgtgcagctggaattcctaaggcatgtggagtcaatattccttacaaaatcagcaccaagcaccaactgcaaaaccgtgaggtgatgagctancaacngtgagatgatgc

SEQ ID NO: 15391 - DNA, 394 bp, Arabidopsis thaliana
  unsure at all n locations
  Clone ID: LIB25-063-Q1-E1-B5
atgaaaacagacatgatgcctgaaaaccaaggtggtcgtgatagactttcaagtatgccaaagagttcctggacatctgaaagttaccagctgaagccacaatctagtttttctgggtcgcacccctctggtagccctaacgcaagaaacactacaaatggtagtcagtgggaaagcagtttattttccagctcaatgtctgatttatttagtagaaagctgcggctacagggaagtgatatgctatccactatgtctgcaaacacagttgttacccaccgtgaagaagaaccgtctgaatctttggaagagattgaggcacaaactattggaaatcttctcccaagatgaagatgatctttttgcagaagtgacaagtgangttgggcnttaa

SEQ ID NO: 15392 - DNA, 411 bp, Arabidopsis thaliana
  unsure at all n locations
  Clone ID: LIB25-063-Q1-E1-B7
ctttgtcttctttctctttaaagaacctcactctctctctctttagtcaaaaatccccaattcgtgaacaaattagggtttttgaagtttgaagaaggagagaaagatgagtgcttcaaggtttatcaagtgtgtcactgtcggcgacggtgctgttggaaagacttgtcttctcatctcctacactagcaacactttccccacggattatgtgccaactgtgttcgataatttcagtgccaatgtgattgttgatggcaacactatcaacttgggattgtgggacactgcagggcaagaggactacaatagactaagacctttgagctatcgcggtgcagatgtcttcttacttgcattctcacttgtcagcaaagctagctatganaatgtttccaaaaagtgggttcc

SEQ ID NO: 15393 - DNA, 474 bp, Arabidopsis thaliana
  unsure at all n locations
  Clone ID: LIB25-063-Q1-E1-C1
attttgccnggnccggtccaaaaataaacgggtcgaggcncgcgtccgnccacacgtccggagtaatccacgattctgcattgtngatcganctanacaatggnaatgttccaaatatatctgatttgtcatacaaaagcgttcctgtgcacagcgtacaagttggntccnatgttttggttggaactggtgaaattgtgcctgtagattgcgagagtctatcaaggtagtgcnacaattacaattgagcacttgactggggaagtcaagccgttggaggcaaaagctgcgagatagacgtgcctggtggtgcaagaaatttggatggcagaatgattgtaaaggctacaaaggcatggaatgattcgacgcttaacaanattgtacagctgaccgaggaagcacattctaatangacccaaacntcatagatggcngggnnnagtttgggcnagaattttcgnaagggntttg

SEQ ID NO: 15394 - DNA, 398 bp, Arabidopsis thaliana
  unsure at all n locations
  Clone ID: LIB25-063-Q1-E1-C10
gaaatcagcagcaaggtcagagagttagctacaacaagaggacaatcagacgttttagtgttagagctaatgtaaaggaaatagcttttgaccagcactctagagctgctctacaagctggtattgataagcttgctgattgtgttggtctcactcttggccctagagggaggaatgttgtgttggatgaatttggaagtcctaaggttgtgaatgatggagtcaccattgctagagctattgagttacctaatgccatggaaaatgctggtgcagcgcttattcgtgaggttgcgactaagactaatgactctgctggtgatgggacaaccactgcgtctatccttgctccnggaaataatcaaacatggattgttgagcgtcacttctggtgcgaa

SEQ ID NO: 15395 - DNA, 431 bp, Arabidopsis thaliana
  unsure at all n locations
  Clone ID: LIB25-063-Q1-E1-C12
gaagcatggatcgtgtggtcttcttcttcctcatcgcagctacgttactancaggttctctcggatcnaccgtcatctccggcgaggttaccgacggtttcgttaacccgatcaggnaagtcntcccggaggagaacgatnaacaactcctcaacgcanaacatcacttcactctantcaaatcnaagtacgagaagacttacgcgactcaggtagagcacgatcatcggttccgtgtcntcaaagctaacctaagacgagctaggcgtaaccaggcttctagatccgtctgcncgtcnacggcgncanggcagttctcaagatcttactccgaaagaattnggccggcnaagtttttaggactgacaacgcccgagcggtttcntcntccnaagggatactcagnacgngngccnatttcttcggacnag

SEQ ID NO: 15396 - DNA, 474 bp, Arabidopsis thaliana
  unsure at all n locations
  Clone ID: LIB25-063-Q1-E1-C2
actttgcccggnccggtccnanaatnnacgggtcgagncncgcgtccgnggacacgtgggcgaagctctcatcttcttcctcaggcattgcatatgataccgagaaccccttctttctcgtcgaagaatttaggggtttcttcaattctaccacgaccatcatcagtgaactcaagactatcagtttctagggtttttcncaatcattcgagctccaattttggtttcgccatcgattccaaggaagagaaaagagtttatcgctaaagctgaagagagtactgaaggtgaaactgaggctgttgtggagaatgctgttgaaactgaagcggaatgngaaggagaagccactgttgcggcggnngaagctaaanctccgtggaagacgagagtcaagctcggagatatcatgggggctactgaacaaggaaagctantgnnngntgcagacactggtnatgacccnggttccct

SEQ ID NO: 15397 - DNA, 471 bp, Arabidopsis thaliana
  unsure at all n locations
  Clone ID: LIB25-063-Q1-E1-C3
ctgttacgtttgcccnggcccggtccaaaattaccggggcctcttttgaggcaancatctaccctggttaatgatgtcaggggtgatggtttctatgagggtggtgacaatggagatgcaatcgaggcacacgaatggaaatgtgttcgtacaatcaatggtgttaggatttttgaagatgttgctaacttcaaggctggtcgaggagttcttgtgaaagccgttgctgtagttgaagcaagtgcggataccgtgttcgaagtacttttgaacattgacaaacatcaaagatacgagtgggatgcagtaacaggtgattcggaaaagatagactcatacgagggtcactatgatgtcatttattgcatatacgatcctaaatatctttcgcgatggcagtcaaagagagattttgtgttctctaaacagtgggttcgtgggcaagatgggacatatacaatccntacagtt

SEQ ID NO: 15398 - DNA, 383 bp, Arabidopsis thaliana
  Clone ID: LIB25-063-Q1-E1-C4
agcagctattgaacatgataaagctactgaaggatgctatagatgaaatccctaacacaaatgatgggggtagtggtgttgtagagatcaattctatttcagctatttttttcgtagttcttgcttcgggattcctggtgattctttacaagcttatgtcttattggtttgtggagcttcttgtggtcgttttctgcattggtggtgttgagggtttgcaaacttgcctcgtcgcgttactatcaagatggttccaacgtgctgcagatacttatgtaaaagtccctttccttggacctatctcttacctcactcttgcagtttctcctttctgcattgtctttgctgttctatgggctgtataccgagttcaaccctttgct

SEQ ID NO: 15399 - DNA, 112 bp, Arabidopsis thaliana
  unsure at all n locations
  Clone ID: LIB25-063-Q1-E1-C5
gatgcttcngcaacagttangtggaactgcaggaataanttcttacggaagcactctatttaaanttgccgggtttcctgctcggattgggatgatggtgttatctcntatc

SEQ ID NO: 15400 - DNA, 89 bp, Arabidopsis thaliana
  unsure at all n locations
  Clone ID: LIB25-063-Q1-E1-D1
aaaggtcaccnaacatgtgtgnttccgtcggaatccaatgaatcacttgggctttcggtggtatgaaatttgccttagnctactgtacc

SEQ ID NO: 15401 - DNA, 403 bp, Arabidopsis thaliana
  unsure at all n locations
  Clone ID: LIB25-063-Q1-E1-D10
ttgttaatcaacttcttaanggagtttcctccananagtaagcttgacagtgaatcatacggtnaccagaacagtacaatcactaaaagccacatagaacacaatttggatggactcactgttgaagaggctctggagaaagagaagttgtttatattagaccaccatgacacactgatgccatactttgggacgcgtaaacaccaccacgaccaagacttatgccaacaaggacacttctgttcttgaaaagatgatgggaccttgaanccgtttggtgatananctgaaccttgcctcatccnaatnggagacaaaatttnggancaatgagtgaagtatanacnccntggngaangtgtccnacaaancccaatgggcaatttggctaaaggnctttttg

SEQ ID NO: 15402 - DNA, 412 bp, Arabidopsis thaliana
  unsure at all n locations
  Clone ID: LIB25-063-Q1-E1-A8
aggaaagctctgaaattagggtttttcgtctgcgatcacgatccttcaattactttgcgataatgganaagataagacaaccaacacatgcaggctcttggnataccgataatcctacaaaattgtcatctgatcttgaanaatggcttaatgcaactggtttgaccaaatctcctgatgtacgaggcgtcattgcaccacacgcaggttattcgtactccggtcgtgcagctgcttatgcttttgcaaacatagatcctactaacatttcacggatatttcttcttggtccatctcaccacttttatactccaaaatgtgccctttcgacngcaacagtttataaaacccccattgggaaatctacctgttgangtggngatgantaaggagatannangccannnggaag

SEQ ID NO: 15403 - DNA, 66 bp, Arabidopsis thaliana
  unsure at all n locations
  Clone ID: LIB25-063-Q1-E1-D4
cantccgaaagctagatcttgggaaatggtgggatgacngcggagggagatggcgangggaggagg

SEQ ID NO: 15404 - DNA, 414 bp, Arabidopsis thaliana
  unsure at all n locations
  Clone ID: LIB25-062-Q1-E1-G5
tcgcagccgagacctgcgtggcagcctggtaagccgtcgtggacgcatcaacctgcaccgaagcagagtacgatccgatctgagatcggaagtggaccgacttcaatggtgggtgatattcatggtaagacgtgggggtcagcttcgggatcgggttcgggtattgggattgtgaataaggatcctagtttgtttggagatttggttggttctgcgataggtcaaggtaaatctagtagaaacgtgccgttgaagaatgcaccgcctgtttcggcttcaggttcgagtaagagtccttattctatggggaatttgggtgattcgttgcctaaatctgggtaattcgatgaaaactggtggtggtatgggttatagcagtaatccgantgggttttccgggggggtaaaccaacc

SEQ ID NO: 15405 - DNA, 421 bp, Arabidopsis thaliana
  unsure at all n locations
  Clone ID: LIB25-062-Q1-E1-G6
ctggcgggttagcttcgctgatgcattgtgatagtttccgtgctctattaccgatgggaaccaaagtaaaatgtctttcagatgctggtttttttctcaacacaagagacgtctcaggagttcaatacattaaaacatacttcgaagatgttgttactcttcatggatcagcaaagaacttgccgaggtcatgcacatcaagattaactcctgcaatgtgtttctttccgcaatatgtggctcgccagattagaactcctctgttcattcttaatgccgcttatgactcttggcagataaagaacattttggctccgcgagcagctgatccttacggaaaatggcaaagttgtcaactagacatcaagaattgccatccaagtcaagatnaaagttatgcaagatttcangttaagagttc

SEQ ID NO: 15406 - DNA, 257 bp, Arabidopsis thaliana
  unsure at all n locations
  Clone ID: LIB25-062-Q1-E1-H1
gttctaagatcgcgagccggccgcccttttttttttttttttgcaagattgataaatatatcgtctgattgataatttcgatctgcatgactatatgaattggttatgtttgttttgatagttaatatctgttattttcatttttgtataacaaataatgttatgtttgcgaatgaattaagtttccattttcttactaaaaaaaaaaaaaaaaaaaanaaaagaaaaaananaaaanaaaaaaaaaaaaagggcgg

SEQ ID NO: 15407 - DNA, 423 bp, Arabidopsis thaliana
  unsure at all n locations
  Clone ID: LIB25-062-Q1-E1-H2
attttgttcacacagagatagacatggcttccgatataaacagaagaagatcgttctctcttctagtcttgattattgtgatgctttatgggcataaaggtgattcaaaatgtgatttcgaagcaattttcaacttcggagactcgaattcggacactggcggattttgggctgcttttcctgcccaatctggtccatggggaatgacttatttcaagaaaccagccggtcgtgcttcagacggtcgtcttatcattgattttctagccaaatctcttggaatgcctttcctaagcccatatttgcaatctattggatcggattttcgacatggcgcaaactttgcgacgttagcgtccacggttctcttgccaaacacgtctttatttgtctccggaatcagccctttctcantcgctaatt

SEQ ID NO: 15408 - DNA, 399 bp, Arabidopsis thaliana
  unsure at all n locations
  Clone ID: LIB25-062-Q1-E1-H4
gtgcaagtagtgaatcatcctccactaaatctggatctgtttccagtagcggaagtgtttctaccaagtcgaaagaatcgagtagtagtggaagttctgccagtggaagtgttgctaccaaatccaaagaatccagcggtggaagtgctgctaccaaatccaaagaatctagcggtggaagtgctgctaccaaatccaaagaatctagtggtggaagtgctactacaggtaaaacttcgggcagtccgagcggaagtcctaaggccaagcccatctggttcagttagtggcaaatcatcttcaaaaggaagcgcaagtgctcaaggaagcgcaagtgctcaaggaagtgcaagtgctcaaggaaacgcaaagttgctcaanggaattgcaagtggcnca

SEQ ID NO: 15409 - DNA, 397 bp, Arabidopsis thaliana
  Clone ID: LIB25-062-Q1-E1-H5
ctcccattcgctgccgccgacggaagacactcctcttttggggcctcgaacattgtcgtcgcagccaaaaacctttgcaaatgtcttcatcgccatcgtcggcgccggcgtgctcggacttccgtacaccttcaagaagactggatggctcttgggcctcctcacactcctcttcgtatcctccctcaccttcttctgtatgatgctcctcgtccacacccgccggaaactcgagtccctctccggcttcaacagcatcacttctttcggagatctcggcgaatccgtctgcggccctgccggtcgtctcgtcgtcgatgttatgcttgtcctttcccaatctggcttctgcgtcaagttaccttatcttcgtccgccaacacaatgggtaatctcc

SEQ ID NO: 15410 - DNA, 422 bp, Arabidopsis thaliana
  unsure at all n locations
  Clone ID: LIB25-062-Q1-E1-H6
tctagatcgcgagccggccgcccttatatctttcccagcagcactaacaaagacttctttacagacatgggcgcgtatattatctccactgggaactcttcatcattcgtgtttgatgctgttccatggggtctggaaggtgttcttcagcatataaagcatcgctataacaatcctccaatctacattcttgaaaatggttcaccgatgaaacacgattcgatgctacaagacacaccaagagttgaatacattcaagcttacattggtgctgtcctcaacgctatcaagagtggatcggacacgagaggttacttcgtatggtcgctgatagatttgtttgaggtacaggttggatataaaagcagcttcggaatgtactaagtcaattttagcgattctgggcncaagaaggccnccag

SEQ ID NO: 15411 - DNA, 425 bp, Arabidopsis thaliana
  unsure at all n locations
  Clone ID: LIB25-062-Q1-E1-H8
ggaaaaggggaagtggattgttttcatcggcgataagtctcttctcctctgggattgaggttggtggtgtgaggtaaagcttcggtagttagagatgaatgcgtccggcttaactgttactccgcccagatttcactttcgatggcgttctgatcgttttggtacatctcagagaagctctcaagcttttactgttcttagcaaattgaataatcgaaattccgcttggcctgttcttaaaagttctcgtttggcgcttcctacacaaagaagaaatgctatgatcactcgtgccatgagtgcttcctttggtgatatggcagacgattcagctgctatcttccctcggatcaatgtcaaagacccatataaacggcttgggataagccggatggcctcanangatgagaatcaanggacgaagg

SEQ ID NO: 15412 - DNA, 401 bp, Arabidopsis thaliana
  unsure at all n locations
  Clone ID: LIB25-063-Q1-E1-A1
ttcatcttcatctaataaagttaacaacactctcatcaatttttattatgttcaaatctgtctgacttttcgttcttttctcttacacccaagcgttttaacaatctaacatctgtctctttgaanacttagatatccaacttcaatttctctcctttctcttcncaactttgattcctgatttgggtctttgttaaagttcaagaaagttcttttttctttttttttcctcctttaatggncgaagtttctcctgcagtcgctgttccattcagaccattcactgaccctcacgccggacttagaggctattgnaacggtgaatctagggttacnttaccgggaaagttcntgtncaggcgacggnncnanncaagaatngtcnttggtnatcccgngna

SEQ ID NO: 15413 - DNA, 399 bp, Arabidopsis thaliana
  unsure at all n locations
  Clone ID: LIB25-063-Q1-E1-A11
tcccatactctctctctttctctaatggttcttaatctgttttagcattttgatcatctaaaactttcaatttctctcttgatcctcacttgaattttttgttgtttctctcaaatctttgatcctttcctttgtttttcatttgacctcttacaaaaaaatctggtgtgccattaaatctttantaatggnacaacttcctccgaaaatcccaaccatgacgacgccaaattgggctganttctcctcccagaaantcccttccatanccgcaacggcggcangccgcancaaccggctggacntcannaanaanncccttcaagggatggatgagtttctcgaacttctcaagcgantccgccgtgggaantcaccgtcggttctnanaaggcgagt

SEQ ID NO: 15414 - DNA, 447 bp, Arabidopsis thaliana
  unsure at all n locations
  Clone ID: LIB25-063-Q1-E1-A12
acgcctgcctntaccgggnccaaaattcncggatacgacccacgggcccgatttcaaacccaagcttctcgatttctctcctctgctctccaattccatcttcccatggcnatttcggctccagccgcttgttcttcctcctctagaattctctgttcctactcctctcnttctccttctctctgtcccgccatttccanctctggtaaactcaaaaccctaactctctcttcntccttcctcccttcttactcattaaccaccanctccgcttctcaatcnactcgtcgctccttcancgtccggcgccgctcgtggnaagttcgatgaggaagaagnntcatgtnaanatcggaaccatcggtcatgttgatcatgggaaanatacttntaatgcgcaactctaaccatgggntctcgcttncaantggttcnaagcgtcgcnaa

SEQ ID NO: 15415 - DNA, 420 bp, Arabidopsis thaliana
  unsure at all n locations
  Clone ID: LIB25-063-Q1-E1-A2
naagattatccatcgccatgggacaagtctttaacaagctccgaggtaaagagtgnagacataagcaggtacaagcgatatgtgatcgngttttcgatcggttcaagatgcaaaccggaagagccaatcttacntttgaanagttatacatcgctgttcttctcgtttacaatgacataaacaacagattgcctggtcctcatttcgatccaccttctaaggatctagtcaatagcattatgacggactgtgatatcaacttggatgganaacttgataatggaagagtttgtnaagtttattgaccagattacggntganacgtttaaagtggttantcaagggtttgatcatagctttgattgttgcncccacngttggctantgcnacgacgaagggcaacngnaaggtgtcccttg

SEQ ID NO: 15416 - DNA, 469 bp, Arabidopsis thaliana
  unsure at all n locations
  Clone ID: LIB25-063-Q1-E1-A3
ntgttacttgncccgggccctccaaagantanaaaggtcnaggcncgcgtccggggacangccacgagtctctctcacttcctcatcctctcttcctccaggttctctcgtctcgggtctctcactagattactctccaaacccacctctctctccggctctttttcttccatttcggtcaccggacaagggttccgatgctgttgctccgtcgccacanatgacacttctccttctgtaaagaaacgtgtggtctctggtgtccancctacaggttcagttcacttaggcaactatctcggggntatcaaaaactgggtcgctcttcaggatacatatgaaacactctttatcatcntanaccatcacgcgatnacacttccatatgatacangtcaactaggaaaggcaacaacggttttcgcaggantttttcgtnncaanntggtananaactcnccaangggtt

SEQ ID NO: 15417 - DNA, 329 bp, Arabidopsis thaliana
  unsure at all n locations
  Clone ID: LIB25-063-Q1-E1-A5
ccgtcncgaagggnatctccggtgntcctttcggtgtttctccgaccaanagnntcgcntccttcactgtccgagctgttaaatccgacaaganaanattcnaagtagttcaaccaatcaacggtgatccattcatcggaagtttggaaactccggtgacatcaagcccattgatcgcgtggtacctttccaacctccctggataccgtaccgccgtcaaccctctcctcngcggtgtggaagtgggcctggcccatgggtttcttcttantggggcccattcggtcaaangctggnccattaacggaacaccgggnttacncccgggt

SEQ ID NO: 15418 - DNA, 410 bp, Arabidopsis thaliana
  unsure at all n locations
  Clone ID: LIB25-063-Q1-E1-A7
aacacttcccacaaaaataaaaaacaaaaaaaaataaaaatttggccaaatctctctctttttttgcttcttcgttgtagatgctgctggttgtctgaaaaacatttatctttcgctctgcgaatcttcctgtgcggaggaggaacaatgaacgggacatcgcccgacgaatctcccgattcgacaactcagcggatcgattcgttcaacggcgagcagagagtctacttcgttcccttgaggtggtggaaagatgcgcaagattcaatgccttctgaatcagttgaaaaaagagagatcttgtatacagcaagttgcgggtcgtcttatggaggcccaatgaagttgataaataacatttttaactctgatattttgttcgatctgangagagaagganatgcgttaca

SEQ ID NO: 15419 - DNA, 413 bp, Arabidopsis thaliana
  unsure at all n locations
  Clone ID: LIB25-062-Q1-E1-G4
tgctgttgattttcaagagagctgcgagtcatgttcctttgaagattctatcaatcgaagatggcactcttctgaagtccttccatcatttgcttcaccgaaataagaaagttgatttcattgaacaattcaatgaaaagcttctagttaagcaagagaacgagaatctacaaatacttgacgttcgaaatgctgagctgatagaagttagcagaactgacttcatgacaccatcagcattcatatttttgtatgagaatcagttgtttctaacattcaggaaccgaaatgtttctgtgtggaatttccgcggagagcttgtgacctcgtttgaggatcatcttctttggcatccaagactgtaacacaaacaatatctacataacaaggcgatnaaagatctggatnaaccc

SEQ ID NO: 15420 - DNA, 501 bp, Arabidopsis thaliana
  unsure at all n locations
  Clone ID: LIB25-062-Q1-E1-E10
ntgttaccttgccgggccggtccganaattnccgggtcgacccacgcgtccgatgcanctgattcttctgaaagttcccagaagccttctcttggttccatggttggtaaaacacgagaaggtgaagagaaaaattgtgatgatgttagtaggaaaatcagtacgaggaagaacaaattccaaaaagaaacagctgatactggtgccagtggagctctaggcctgcagactctagaccatatggattctaaagtgtcagggagctctgcgtctcagatctctggaggttctgaacttaacaaaatgacaccgagcagttcacttcctgatgatcacaaaccgcagtctgttgaaatggtatcagagggaataagtagtggcaatagagacagagctatcgaattaaaacgagaactggtggtttcaagaaactgaaaaagatattcangaaacaaagcctgggatctgttttaattcaaagaancatcaaagnccttgcgg

SEQ ID NO: 15421 - DNA, 432 bp, Arabidopsis thaliana
  unsure at all n locations
  Clone ID: LIB25-062-Q1-E1-E11
cctcaaactttttgaatccgaaacgagaaaacaaactatgttacagtccattcatcttcgtttttcctccacaccatcaccttctaaaagagaatctctcataattccatcggttatttgctcatttcctttcacctcttcttcgttccgtccaaagcaaacccagaaactgaagcgtctggttcaattttgcgctccttacgaggtcggaggtggatacaccgatgaagaattgttcgaaagatacggaactcagcanaatcaaactaatgtcaaagataaattagatccagctgagtatgaagctttgcttaaaggaggcgaacaagtgacttccgttcttgaagaaatgattaccctcttggaagatatgaagatgaatgaagcatctgaaaatgttgctgtagaaatggntgnccaaagnngttttng

SEQ ID NO: 15422 - DNA, 443 bp, Arabidopsis thaliana
  unsure at all n locations
  Clone ID: LIB25-062-Q1-E1-E12
tctttttcctcttctttctctctcttctctctgaagacagtacttgtttctgtccggcgttaaaagcttcggtggtggtctcttgacttctctgagaagaagaaaaggaagctgagtctcattttagattcagctcacgaggaagtgacgacgatgtctcattctagaagactttcgttggaacctgctatagattcaatcactggtcgatttcgtgatttacagagaaatgatgatgacgtcaacaaacctgattttcgagaactcgatctaggttctcctgtttctaccttaatgccacgtggctctgcttcttcttccgctgctgcgactcctactagcaagctctggctcttctggctctgcttctggtaaaccgtcggtgagttctcagatgggctaaacngttagatgatggnntacaagagtcattcccggggaag

SEQ ID NO: 15423 - DNA, 419 bp, Arabidopsis thaliana
  unsure at all n locations
  Clone ID: LIB25-062-Q1-E1-E3
ctcttttctctatctcaatctcaccttctcaatttacagttttgccatccatcaacaacgagagacgacgccttgctatcgccgctcgatctcaccgactatcacgccggaagattcgtaagagacctcctgatagagatatgtcctccatagtttcaatcccggagcttcctcgccggcgggattctgaggaaagcctgcttttagattctcgaatcagtgtagctgaaggagatacatcgaatacagatgtagaaggagacagagatactacttctagtattagaacacagcctccccctcgtaaaggaagaaatcttagtagcagcaagaatcaaattctacggtgttgaattatcaccagataatgttgctgtagcaatggtgtaatttggtcaaaggggtttaaggnccnncag

SEQ ID NO: 15424 - DNA, 289 bp, Arabidopsis thaliana
  unsure at all n locations
  Clone ID: LIB25-062-Q1-E1-E4
antctcttttctctanctcantctcaccttctcaatttacagttttgccatccatcaacaacgagagacgacgccttgctatcgccgctcgatctcaccgactatcacgccggangattcgtancagacctcctgatagagatatgtcctccatagtttcaatcccggagcttcctcgccggcgggattctgaggaaagcctgcttttagattctcgantcagtgtacctgaaggagatacatcgagntacangatgtanancggagacaggagatacnacttcnagta

SEQ ID NO: 15425 - DNA, 286 bp, Arabidopsis thaliana
  unsure at all n locations
  Clone ID: LIB25-062-Q1-E1-E6
tcaccgttctataggatttacattggttgattcgctccggccaacgaacttggtttccctgcgaacgggaaataaacgttcgtcatcgtcttcactacggctatttctctctccgactagaagcgctctccgtacgccgactatttccgcggaggaggtgaaagatgtcccgatgccgaagattgataagaacggccgattaagcaatcctcganccgcaagccaacccnctcntgnnataatttaagccncnagnctaaaaagnnccgaaccaantcctcccctt

SEQ ID NO: 15426 - DNA, 418 bp, Arabidopsis thaliana
  unsure at all n locations
  Clone ID: LIB25-062-Q1-E1-E7
cttcttcttcaaaatctcttgtacgcaaataatccatgagaaactagggtttaacttgagatctctcttccgaagtattaccatcaatggcgacttcttcttcttcatcgtcgtctctgcttttaccaaacatcaatttcaactcaagacaatctccaacaatcactcgttccgtttcaatcgccgggatcttcttacccagaaaccgattaagctacaatcacaatctccggattcgtacgagattaatcagagcttctaaagacgataatgtcgctgttgaagatcgtgataatgcagtgaagatcaacggtgattacaacggaagtgcacgtttaaacggtaacggctctgcgagaaaatccgtcaacggagattttaacggaagtgctcgtttgaacggnaacggtaatttggg

SEQ ID NO: 15427 - DNA, 406 bp, Arabidopsis thaliana
  Clone ID: LIB25-062-Q1-E1-E8
tctctctctcgcttctcttcattgtttgtgtgtgattacagcgaagaagagagaatccttggagcattccatggattcgcttcgatttctccggattcttcttctatcatcttcgattttactcttatctctccgttctacagtcaccgccggtgatattgttcatcaagacaatttagctccgaagaaaccaggttgcgagaatgacttcgttttggtgaaagttcaaacgtggattgatggtgttgagaatgaggagtttgtgggggttggcgctagatttgggaagcggatagtttccaaggagaagaatgcaaaccaagactcaccttgtttttgcaaatcctcgtgattcttgtacaccgctcaaagaacaagctttctggaaatgttggtaatgtgggaa

SEQ ID NO: 15428 - DNA, 414 bp, Arabidopsis thaliana
  Clone ID: LIB25-062-Q1-E1-F1
taaaacccttttgatcaaaacatggcttccatttccagaatcttaccaacagatggcagattaagtcaatgcagaatcaacacctcgtgggttccttctacaaccagaactcaaactcacttagattttcccaagttagtttctgttagtaactctgggataagtttgaggattcagaatagtaaacctattagccctgtctttgctcttgaagcaacttcctccaggagggttgtttgcaaagctgctgctggtgtgtcaggtgacttacctgagagtactcctaaggaacttagtcagtatgagaagattattgagcttttgacaaccctttttccactttgggttattttgggaacacttgttggcatcttcaagccatccttgggtacatgggtgggaacaaatttcctt

SEQ ID NO: 15429 - DNA, 494 bp, Arabidopsis thaliana
  unsure at all n locations
  Clone ID: LIB25-062-Q1-E1-F11
ctgttacgtntgcccgggcccggtccaaaatacccgggtcnacccacgcgtccggtcagcttctggttctctctctcggtaactttctgagctgaagaaccctaattcttatcttcaccggattccgggtatagggctttgtaaagttgttgaatttacaaagaaagatatgctggtttgtctgggttttgtagaagaatctgtgttgttgctttgagattaaagtccgaacaatgttgggtttgattcatgtccttgatgagctcgtcaatggtcttatgccactgcttatcattcagtagtcaaaacccagatcctgaatcatcatcatcttctcttcttcgttataagccttgtgattcgatttcgttgtggggtaagagaaggaagaagctttggagatttgttcccaagtgcgggagaagaataacagtcatacgggtaataataatangangagaagaaactgggnggganaaggtttccttgnagaa

SEQ ID NO: 15430 - DNA, 442 bp, Arabidopsis thaliana
  unsure at all n locations
  Clone ID: LIB25-062-Q1-E1-F12
ttcgcctctttctcaactctcttctcgaaaacctagcagtcgtctctttctcagttctccatgggaaagtctaaatccgccaccaaagttgttgcagagattaaggccactaagcctttgaagaaaggcaagagagagcctgaagatgatattgacaccaaagtgagtcttaagaagcagaagaaagacgtgattgctgctgtccagaaggaaaaagctgtgaagaaggttcctaagaaggttgagagctctgatgattcagattctgaatctgaggaagaggagaaggctaagaaagtcccagccaagaaggctgcttcaagcagtgatgagtcatctgatgactcttcttcagatgatgaacctgcacccaagaangccgttgctgctactaacnggactgttgcnaanaanntaaaggntgctcnacaacaaccggagg

SEQ ID NO: 15431 - DNA, 418 bp, Arabidopsis thaliana
  Clone ID: LIB25-062-Q1-E1-F8
ccgttatgagagcatagtgctactagtggatcggtaaacaataaatgccgtaataaaaatctaaacgtcacgcgcgtgatgaaaaaacaggaagtaaatcgtcgacgtcgttattcaactaccatttctggatcacaactcccacacactcttttaaatcaaaacaaaatatctctttcctgttagagacaatggacggattgatcagaggtttggtcgacgtggctatcggaggaaaccaacgccgcggcggagacgatggtggtgatgatgaaggcaactcgagggacgagagatccagatctacttgggctaatgtggtttccggtgaggaagaggatcagaatcgcgcgggaggatcgtcgcacggccgtcgccagaattcagaggaaaatccatgggaaaaagaaaggggaag

SEQ ID NO: 15432 - DNA, 416 bp, Arabidopsis thaliana
  unsure at all n locations
  Clone ID: LIB25-062-Q1-E1-F9
cagatgcccaagcaaaaagctccaaggaagcagctcaagtcctataaactcaaacacatcaacaagagtattcaagagggagatgctgtgttgatgcggtcgtcggagcctggaaaaccgtcgtacgtagcgagggtagaggcgatcgagacggacgcgcgtggatcgcacgcgaaagttcgtgtgaggtggtattatcgccctgaggaatctatcggagggaggagacaattccatggagccaaggaggtttttctctctgaccacttcgattttcaaagcgccgatacgattgaaggaaagtgtaaggttcacagtttcaagtagctacaccaaacttgactcctgttggaaacgacgacttcctccgtcgtttccangtacaaatccactaacgggggncntttggttccnga

SEQ ID NO: 15433 - DNA, 436 bp, Arabidopsis thaliana
  unsure at all n locations
  Clone ID: LIB25-062-Q1-E1-G11
ctcctttcaactttctggaggccttctcgtagcctagcgtcatagatggatttgatggagaagaacttggagttagtggagattcagaaactagaaggccacaccgatcgtgtttggagcgtagcttggaaccccgtttcttctcacgccgacggtgtttcaccgattcttgcttcttgcagtggcgataacactgttcgaatctgggaacaaagctctctctctcgctcctggacttgcaagttttggaagagacgcatacaagaactgtgaggtcgtgcgcttggtcaccctcaggacagttattggccactgcaagttttgatggtaccactggcatttggaagaattacggttctgagtttgagtgtatttccactttggaggggacatgaaaacgaagtccaaatgtttcaatgggaagcatncnggtcca

SEQ ID NO: 15434 - DNA, 422 bp, Arabidopsis thaliana
  unsure at all n locations
  Clone ID: LIB25-062-Q1-E1-E1
gctttaagaaaattacaaacttttatcttctattggacgaatctttgatctggttttaattaatcacacgcttactttaggatttttttacctgaattcgaatatatacttttgattttcatcttccgtagtccgtaccgtagaattgaggagcttcatggagaacgagctgtttatgaatgcaggagtttcgcatccgccggtgatgacgtcaccgtcttcttcgtcggcgatgcttaagtgggtttcaatggagactcagccagtggatccaagtctcagtcgcaatctgttttgggaaaagtcaacggaacagagcatttttgattcggctctgagctcactcgtctcttctcctacgccgtcaaattcaaacttttcggttggcggagtangtggagaaaatgtcattaagaaaaanc

SEQ ID NO: 15435 - DNA, 426 bp, Arabidopsis thaliana
  Clone ID: LIB25-061-Q1-E1-C2
aaaactaaaattactagagaaaacaagaatggctgcgaatctaaggaacaatgcgttcttgtcttctctcatgtttcttctcttgatcggttcatcatacgcaatcacaagttcagaaatgagcacaatctgtgacaaaaccttaaatccatctttctgtcttaagttcctcaatacgaaattcgcatcgcctaatcttcaagccttggcaaaaaccacacttgattctacacaagcgagagctacacaaacgttaaagaaactccaatctattatcgatggaggagtcgaccctcgatctaagttagcttacaggtcatgcgtagatgaatacgagagcgcgattggaaacctcgaggaagcttttgagcatttagcttcaggagatggtatggggatgaacatgaaagtttctgctgcattgga

SEQ ID NO: 15436 - DNA, 418 bp, Arabidopsis thaliana
  Clone ID: LIB25-061-Q1-E1-C6
agagctcaagcaacagtctcactcgagataaaataaagtcgtgattttgattggacccatgattctcattcgtataaattatcatctttcggcttaatcggaaaatggacgttctcgccttatcctcttccgcttccgccgccgcaccctccgcttctctcgccggaaaattcctgtcgtttccttctagggttagagtgagaagaaaccgagagaatttgttagctaaacagaagaagtttttagtttctgcttcgaaaagagaagagcctaagctcaacgaatgggatcaaatggagctcaactttggccgtttactcggcgaagacccgaaattgactttggctaagatagtagctagaaaagtggatccagaagcttcttttattgacattgagaaatctttctacaagaacaa

SEQ ID NO: 15437 - DNA, 422 bp, Arabidopsis thaliana
  Clone ID: LIB25-061-Q1-E1-C7
gaattgaagcacatcaatatcttggtcgaaagattccccctttcaggagcaaaaactctgattttggagtatccttagtgttgttctcttcccatattgtaaaaacgacttcgtttaattgaaggaaaaagcttctttttggtttaaagtctctctgctcaacctaagagatgaaaatgtataatccatctttcattatgtttttgttcgatttccttctctgtttttgtagtcaaaatttggtgtggttatttgcagaatgaaggcaaatgcaggagcacttaccaatttcgagttgcttgacttcttaaactcaagaggtgcttcaaaagatactacaagagttattgctccaattgctaagatcaagaatacaaggtctatgattatttggtgggagactgctgcttccactcaaacaa

SEQ ID NO: 15438 - DNA, 231 bp, Arabidopsis thaliana
  unsure at all n locations
  Clone ID: LIB25-061-Q1-E1-C8
aaactcggntattggttccancaagtcctcaccaccaatgaggtctcctttaanaagcccgantaggtcagcttcttcanccactagaagttcaatgatgaaaccagcattaccgtcatcttcatctgttcaacgttcgactctgaagtcancgttgcgagatgatngatctgttgttgctaaggagaggaacggttttgggaaagctccttcngtgtctaaaagtgatna

SEQ ID NO: 15439 - DNA, 419 bp, Arabidopsis thaliana
  unsure at all n locations
  Clone ID: LIB25-061-Q1-E1-C9
cttctgaaaacagatctctctactttgcttcttcactcgacttgtatctatcatccatggcttccgagaatcctttccgaagcatattgaaggcgttagagaagcctgatggtggtgaattcggtaactactacagcttacctgctttgaacgatcccaggatcgataaactaccttattccattaggatacttcttgaatcggccatacgtaactgtgatgagttccaagttaagagcaaagatgttgagaagattcttgattgggagaatacttctcccaagcaggttgagattccgttcaagcctgctcgggttcttcttcaggactttactgggtgttcctgctgttgttgatcttgcttgcatgagaagatgccatgaataatcctcggtggggaatcnaataaaaattaancg

SEQ ID NO: 15440 - DNA, 437 bp, Arabidopsis thaliana
  unsure at all n locations
  Clone ID: LIB25-061-Q1-E1-D11
actgcgccgccaaaaaacccttctttaaaccctttcctcctcgcgccgtcatgcaagccaccatcttctctccacgcgccactctcttcccctgtaaacctctcctcccttcccacaatgtcaactctcgccgtccctcaatcatctcctgctccgcccaatccgtaaccgctgatccttcaccacctatcactgacaccaataagctcaacaaatacagctcaagaatcactgaacccaaatcccaaggtgggtctcaagcaattcttcacggtgttggtttatcagacgacgatttgctaaaaccccagattggtatctcgtcggtttggtatgaagggaacacttgtnacatgcatttgctgaaattgtctgaggctgtgaaaagaaggagttgaaaatgcaggaaatgggttgggtttaagtttaatactaat

SEQ ID NO: 15441 - DNA, 170 bp, Arabidopsis thaliana
  Clone ID: LIB25-061-Q1-E1-D12
agaccaaagttttcaagtctctttattgttttatcgttttcttttgaagtattttagcatctagtttgtcggagatagaaacaagttttagcaaaactaaaagggggatacaatgtctgtcagatgctcattttagactttaaaaaaccaaaaaaaaaaaaaaagggcgg

SEQ ID NO: 15442 - DNA, 398 bp, Arabidopsis thaliana
  Clone ID: LIB25-061-Q1-E1-D2
gaaattatttcaactattccaggcaacagcatcgcaactgctacagccccgacctctgaacggacaactgaccatagccaagtcctacagcatggttcctcatttcatttgtcttcaaatcaagctccacttcatccacctcttgaacactttgtttcaggtcttggttataatatccaggagcaagaactgcctaaaaattctatgaatctcaatcctctttttgctcagcaactacttccagttcctcatgacacatcattacctcctggttctcacgtccctcgaccaccggattcgttcccttttagcctttccaacacaccaaggacctattctgtgactttgcctccatattctggcaagtcagatacaaccaataggaccacgttctactg

SEQ ID NO: 15443 - DNA, 68 bp, Arabidopsis thaliana
  unsure at all n locations
  Clone ID: LIB25-061-Q1-E1-D3
agcagaatctgtgacaaaaccttaaatccatctttctgtcttaanttcctcaatacganattcgcatc

SEQ ID NO: 15444 - DNA, 432 bp, Arabidopsis thaliana
  unsure at all n locations
  Clone ID: LIB25-061-Q1-E1-D4
caaatggcgcttagaggagtttggcagctcaagaaactcgttgtgagctactgtaattggggtggtagcagtagaggcatcagagcctttatggaatcagaattgcctgctctaaaggagaaaaacccgcagctcgaagtaattaccgagctttcacggggacaacatccttatttgaagggcatttacaggaatagaaatgaaagggtagtgtgtgtgaagaacatggatcctgaagaagtgcttttgaatgcaacgaggctgaggaactcgcttggacggaaagtggttaaactgaggaccagacatgtcaccaaacaccccagtgttcaaggcacctggacaactgctgtcaaattctgagactttcctgctaaattgtttgcaggttttcatcctccaagctgttaaatcnaaatgttgccaagntat

SEQ ID NO: 15445 - DNA, 416 bp, Arabidopsis thaliana
  unsure at all n locations
  Clone ID: LIB25-061-Q1-E1-D6
taccatgaagaagctccggggaggatgagtgctatttacacggcggggcttttggctcgtaaccgtgaagatggtgaaactgacgtttttgttcacgacgttaaccgtccggtggaagatgagttctcggcgactttcttgtgtaaaggttatatgagggagcaaaatgggagacttagacattttactattcctagtcatcgggctcgtgctggacgacctttttgtccggtggaagttgatcgccgccgttaattttgtggtgggagatttatttagttcaccgtcgttggtcggtcaacggactcagggctggtaaattgttttacctaagtggacattgaangacttgcttagctggcattttgtatttgttttgttttgtttttgcttgatttaaatacgtttttcaagat

SEQ ID NO: 15446 - DNA, 439 bp, Arabidopsis thaliana
  unsure at all n locations
  Clone ID: LIB25-061-Q1-E1-D9
catgacaggcggaatcttcgctccttcagacaaaggagcagctcccgtcaacaaaggaacccctcctgttgctgatgattctcccgtggccgatccagatggtcctgctcgccgtcttcttgaagacattgacgagaccggaatcccaacatgggtttcaggtgctgacaggaagctcatgactaaggctggacgtggcagtaatgacggtggtgctaggatcagagcaacctttgtggtggctaaggacggaagtggacagtttaagactgttcaacaagccgttaatgcttgtcctgagaaaaacccaggccgttgcatcatccacatcaaggctggtatctacagagaagcaagtgatcatccctaagangaangaacaacatcttcatgttcgganatgggtgcaagaaagacggtcatttccttacaacannag

SEQ ID NO: 15447 - DNA, 428 bp, Arabidopsis thaliana
  Clone ID: LIB25-061-Q1-E1-E1
aaattagggcaaaattagcgtattgatgtgtttcacttttcttcttcttcttcttcatcgtgttcgtgtttgatttgcgactttctccaaggaaaatttagggttttcgatgaaggaacctttgcagaagaagaaggtggttgttcgtcacttgccgccttctctttcacagtccgatctcttatctcaaattgatcctcgtttcgctgatcgttacaattgggtttcgtttcgtcctgggaagtccagctataaaaatcagaagtattcacgggcctatgtaagtttcaaggcaccagaagatgtttatgagttcgctgcatttttcaacgggcatgtgtttgttaatgaaaagggtgctcagtttaaggctatagttgaatatgcacccttctcaaccgtgttccgaaaccgaatgataaaaaaaa

SEQ ID NO: 15448 - DNA, 437 bp, Arabidopsis thaliana
  unsure at all n locations
  Clone ID: LIB25-061-Q1-E1-E11
tgttatagagagggaaaccaaaaaagggaatctcaaaagctcgagttcacagatttgacccgagtctttaatccaatctgctggttcgttttccacattcaaactcgactcttgaatatcaaatcagaagtctttgctatggctgctaccgctgctgcttctgttgtccgttacgcacctgaggatcatactcttcccaagccctggaaaggccttatcgatgatagaactggttacttgtacttttggaatcctgagaccaatgttactcagtacgagaaaccaaccccctctctacctcctaagttttctcccgccgtttctgttagctcttccgttcaggttcaacaaactgatgcctatgctcctcccaanggatgacgataagtactccagaggctccgaacgtgtgtccanggttttccgaagggggggga

SEQ ID NO: 15449 - DNA, 434 bp, Arabidopsis thaliana
  Clone ID: LIB25-061-Q1-E1-E12
aacgtgacgatgaagaaagagaagaagccgacccgtcgttcaaatcatccttcgttcctcaacaacattaaccccaaacctaaggttagggttttacctttatctcttcaatttcttcattcctctcatcgattcgcgacaacatgtctctaccggattctctcccatcttcttcttcttctccgcctgtgacccgtgaagaaaccggctttcatcgctttgaacatcacggcaacgattccggttttgatcatcgtgatcgtccaccgtggaatcgttctgagtacgattatcgccatggaagcgttgttgcatctgagaacgtcaggaacaattccacttctgaagacccttggtcttgcgttgtcgtcgttgctaccttctgtatctttgtgtcgatgactttgattccggggcttaaggaacaacgaatg

SEQ ID NO: 15450 - DNA, 435 bp, Arabidopsis thaliana
  unsure at all n locations
  Clone ID: LIB25-061-Q1-E1-C11
attttcccgagcgatcgtccatggcggacatcgacatcggaaccgcagcaacaacaggaggaaacgaaggaagaggaggcacacgagaacgtctaataaaccgagaaaacaagttcacacgtagcgtatctcacgcacaagacgagctccacagtttccggaaatatctccgatggatgtgcgtagatcagtcgagtccttggacggcggttctatcatggtctatgttcgttgttttcacgctcgttgttcctgccacgtctcacttcatgctcgcttgctctgactgcgatagccatcactctaggccgtacgattccgttgttcagctttctcttagcaagtttcgctgctctttcgtttctttgtctctccagattcgttagcaagtatggtctccgacggntcctaatccttgataagccttggggaang

SEQ ID NO: 15451 - DNA, 414 bp, Arabidopsis thaliana
  unsure at all n locations
  Clone ID: LIB25-061-Q1-E1-E2
tctcttcatggctccaattactgtcggcgatgttgtaccagacggaactatctctttcttcgatgaaaatgatcagcttcagaccgtctctgttcactctatcgccgccggtaaaaaagtcattctctttggtgttcctggtgctttcactcccacatgcagcatgagccatgtgcctggattcattgggaaagcagaggagctgaagtcaaagggtatcgatgagatcatttgctttagtgtgaatgatccatttgtgatgaaggcatggggaaagacataccaagagaacaagcatgtgaagtttgtagcagatgggtctggagaatacacacatcttcttggacttgagcttgatctcaangacaangggtcttggtattaagtcaaggagattgctcctgttgcctgana

SEQ ID NO: 15452 - DNA, 480 bp, Arabidopsis thaliana
  unsure at all n locations
  Clone ID: LIB25-060-Q1-E1-H4
acgctgntcgtatgcctgtaacggtccaanntncacgggtcnatccacncgtnacagagcccnnataattaaaaagtcncttcctntgactacaattattactaacaataattcacttatctaaagacatcatctgactngactctacgctgaatcatcacgaggaagacttgaatcgaccggagaagagatacgtgtagagatctgattggctcaccggagagaacaaaacaagaaatgggggaggacgacgtggttcgacgttgacgggttgaggaaangagagtggacggcggaggaagaccggaagctcgtggtttacatcaacgaacacggtctaagcgagtggggttcactgcctaagaganccggtctacaaagatgtggaaagagttgtagattaagatggctgaattatttgaggcctgggattaaaagangcaagttcactcctccaggaaagaagaagaatcatcanat

SEQ ID NO: 15453 - DNA, 428 bp, Arabidopsis thaliana
  unsure at all n locations
  Clone ID: LIB25-060-Q1-E1-H5
tagaagaatttgagaaggataagcaagaagttctaaatcaggaagttcctgaaccggaaaagccggttctagttcctggttggggacaatggaccaatgtccaaaagaagagaggtttaccttcatggatggttagagaacatgaagatgcaaataaaaagagaaagctagatctcaaaacaaggaaagactatcgtctcagaaatgttatcatatcagagaaagtcgataaaaaggctgacaaacttcatacaacgactctacctttcccatatacatctaaggaagttttcgaacacagcatgcgcatgcctataggaccccgagtttaatcctgcgactattgttggagctctcaaaccgacccgagggttgtgaanaaaagctgggngtgataaattaacccggtcaaanttngggggaanttg

SEQ ID NO: 15454 - DNA, 423 bp, Arabidopsis thaliana
  unsure at all n locations
  Clone ID: LIB25-060-Q1-E1-H7
aatcagacctcaatttcgttgttaaagaacaaagctttaagcagccatggatccaaaccaacgtatcgcgagaatctctgctcatctcaatcctcctaatcttcataatcagattgctgacgggtcaggtttgaatcgggtggcttgtcgggcaaaaggtggatcacccggattcaaagtggcgatacttggagcagctggtggaattggacaacctcttgcgatgttgatgaagatgaatcctttggtttcggttcttcatctctatgatgttgctaatgctcctggtgttactgctgatattagtcatatggatactaatgcccgttgttcgtggatttctcgggcagccgcagttagaggaagcacttacnggtatggatttagtgatcatacctgctggtgttccgaaggaaaacaagg

SEQ ID NO: 15455 - DNA, 386 bp, Arabidopsis thaliana
  unsure at all n locations
  Clone ID: LIB25-060-Q1-E1-H8
gctttcgccattaaaacnctgtttccnttttcanagattcncagagaagattcattttacccnaagannnaaaatgtcgaacattcttcagaatcggcgatcttcgttttcctcttcgacgaaatcttcattagcgaancgtcaagcaccatcttcatcggagaattctgttnaacttatgccggcgatgacgaagaaacgagcaccgttaagtaacattaccaatcaaaagatcgcctcacgattacaaaattctgattcggtacattgttcaagacaagtcatgcgaannttgaangatagcaccangtgtttgcgttaatgncagtttctctangcaatcttgcaacaaagcatacttcctcanagganttgcttcttcanct

SEQ ID NO: 15456 - DNA, 420 bp, Arabidopsis thaliana
  unsure at all n locations
  Clone ID: LIB25-060-Q1-E1-H9
gcccacgcgtccgctctttctctctgctttcttggtatggctgctgacgtcagctctctcgtacggatactgagtaggttcaaggatgatcggacggttgtaaaagattccaccggaccaagatccacggtggcgctcatgacacgcgatctcctcggaatcggcggttgtgtgggtggaggaggaggaggagacgaacagtcgctggagcttgaccttgacgtccaagtccctaacggatgggaaaaacgtctcgacttaaagtcagggaaagtgtatctgcaacaacaatgcaattcaacgaagctcgtcatcatcgtctcatcatcatcatcatcatcacgaagaccaaaccaaccaaacagttccaagatttcaaagatttgaatggtgccaccgattttcnganaantttccggg

SEQ ID NO: 15457 - DNA, 403 bp, Arabidopsis thaliana
  unsure at all n locations
  Clone ID: LIB25-061-Q1-E1-A2
ttaagctatggtggatgactcagagaatgggaagctgtggaaaagacattcctttggagacacagttcatgctactggaaagcaaggatgaggttgaagggaatggggatgatgctcctactgtttataccgtctttctccctctccttgaaggccagttcagagctgttctgcaaggaaatgagaagaatgagattgagatttgttttgagagtggagataaggcggtggaaactagccagggaactcaccttgtttatgttcatgctggaaccaatccctttgaagttatcagacaatccgtaaaggctgtggagagacacatgcagacatttcatcatcgtgagaagaagaagcttccttccttcccaagactggtttggctggtgcacaatgggnacnc

SEQ ID NO: 15458 - DNA, 431 bp, Arabidopsis thaliana
  unsure at all n locations
  Clone ID: LIB25-061-Q1-E1-A4
gaatttacagtatttgaaaaaatacaaaatggcgaaaatctaccggaagttgacaggctacggtggtgaaggagggcgtgaatgggacgatgatgtatatgagggtgtaagaaaagtgtatgtaggacaagatatcaatcgtatcacttacgtcaaattcgagtatgtgaaggaagacggccaagtcgtaacaactgaatatgggaaaatcattcaacaacccaaagagtttgtacttcaatatccggacgaacatatcatagcggtggaaggaaactatcgcggagtggctctatgtgccacagaggtgatcacaaacctcgtcttcaagacctcaaagggtagaaagtcaccactgtttggtccaaacttgcttggaattacgaccggtacaaagttcgttaattgaggatggaggaaagaaaantcnt

SEQ ID NO: 15459 - DNA, 425 bp, Arabidopsis thaliana
  unsure at all n locations
  Clone ID: LIB25-061-Q1-E1-A5
cattgttccagtacttcatcgtagcgccgctcctctcttgtccagactccagaagattcaatggcacccaagaaagacaaagttcctcctccgtcctctaaacccgccaaatccggtggcggcaagcaaaagaaaaagaagtggagcaaaggaaagcaaaaggagaaagtgaacaacatggttttgtttgaccaagcaacttacgacaagcttctctctgaggctcccaagttcaaacttatcactccttctatcctctctgaccgtttgaggatcaatggatcgcttgctagaagggcgatcagagaattgatggctaagggaacaatcaggatggtctctgctcactcaagccagcagatctacactagggcaacccacggctaacttccttcgaatgttttaantggttcccntggtattta

SEQ ID NO: 15460 - DNA, 419 bp, Arabidopsis thaliana
  unsure at all n locations
  Clone ID: LIB25-061-Q1-E1-A6
tagattgattcggttggaaggggaaaagatcaatttctctctcttctctctcttcaattattcagagagaggaacacgatctttgtttctccatccggtttgtttactagttttgtctctggtatggttcagctttgtctccggcgaggtccggctttgtttcggctatctgttgccgctttttgttttttctgttgaataaattatgcgatctatgttagtgttgtggttttaggtgattcgtctttgcctaaacacaattctctccaacataagattgatgaatatgatgcttgagttcgtgaaccgttgacgtttaattgggaagattttgaagttgaatttccatgaagttgaagatttgtttttagagctttggaattgaccaagtgctancancggggattcaacnatgccat

SEQ ID NO: 15461 - DNA, 428 bp, Arabidopsis thaliana
  unsure at all n locations
  Clone ID: LIB25-061-Q1-E1-A9
gagctgcaacactatcttctcagaaatggtaaccgaagctttcgaattcgtcgccgttcctttcaattccgatggctggggacctccagacgcttccgacgtttcctcctccgcctctcccaccagcgtcgccgccgctaatcttctcccgaacgttcctttcgcttccttctcccgttccgataagctcggccgtgtagctgattggactcgcaatctctctaatccatccgctcgtcctaacaccggatccaaatcagatccgtctgcagttttcgatttctccgctttcgcaatcgacgaaggtttcggtctcgcttcctccggtggtaatcccgacgaagacgcagctttccgtctcgtcgacggtaaacctccgccggcgtcctaaaattcggncctaaatggcgtttcaatcctcaacaaaa

SEQ ID NO: 15462 - DNA, 424 bp, Arabidopsis thaliana
  unsure at all n locations
  Clone ID: LIB25-061-Q1-E1-B11
tctcaaaaacactcggcataaaattcagctctttaagaaaaaaattcagaggaaaattaaaaaaagtggatataataganaaaaaggtaaaggaaaggaatagtgagagagagagagggagagatggtcttcttgtttagaacatgttgtttccaattattctaagaatggcgttttaggtaaatgatcacagcttattacagatggaagagaagctgactcaatttgtggtttagatttgtcaaagaggatcgtgtggaatctgaaagttttcaattttcactaaaaatangattagagttaaaaaggaggaagaagaaatggggaaacacaaatctttcagaagcaaagcagtgcactttgtcancgatntcaccgctggtcttcttantcccatctctgataaaccctcctccgctcaatc

SEQ ID NO: 15463 - DNA, 433 bp, Arabidopsis thaliana
  unsure at all n locations
  Clone ID: LIB25-061-Q1-E1-B12
gagtgtcaaggaattgatctacaagagaggttacggaaagcttaaccaccagaggatagctttgactgacaactctattgtagagcaggctcttggaaagcatggtatcatttgcactgaggatttgatccacgagattctaacagtaggacctcatttcaaggaagccaacaacttcctttggccattccagcttaaggcaccactaggtggcctcaagaagaagagaaatcactacgtggaaggtggtgatgccggaaaccgtgagaacttcatcaatgagcttatcangaggatgaattanaatgttatcgttttcaatgtcaaacttctctgcgttttcattatgtgcctccccctggaatttggatctccttcctcaagttaaaaagacanttttgaatccaaaaaaaaaaaaaaaggggcggcccnc

SEQ ID NO: 15464 - DNA, 431 bp, Arabidopsis thaliana
  unsure at all n locations
  Clone ID: LIB25-061-Q1-E1-B3
aatactggtggtgacgaacgagatgcttccatagaagcctataacaagccaggaagtgagaaattcgttttcttgttatccactagagctggaggacttggtatcaatcttgctactgcagatgttgtgatcctctatgatagtgactggaaccctcaagttgacttgcaagctcaggatcgtgcacataggattggtcaaaaaaaagaagttcaagtgttccggttctgcaccgagaatgctattgaggctaaagtcattgagagagcttacaagaagttggcacttgatgctctggttattcagcaagggagattggcaagaacagaaaactgttaataaggatgagttgcttcaaatggtgagatatggtgctgaaatggtgtttaagttctaaagatancacaatttacggntgaaggatattgaca

SEQ ID NO: 15465 - DNA, 421 bp, Arabidopsis thaliana
  unsure at all n locations
  Clone ID: LIB25-061-Q1-E1-B5
tctatatatctattacccatctcgaattcgaccgaacccatgttctaatctccttcgcaacattggaaatctattttaaaaatccgttgagatatagttatataagtagtttggtgactcaattaggtttacacacaaagacatgggatcggctggtgtagcgagttcttcttctgatgttgcgatctcagctttgcgtgagaagcatgagaaggaagtagagaatctaacattaacgacacaacctttgaatacattgaagttgtttgttgaggctactattcagtacatcaagcgatccatatcgtatctattggctcatggaggttggtttatactgataaccactttgttagtggtatctggtggtttgcttgttactgttgatggacctcatggcaagcatgttgaagaagtnatt

SEQ ID NO: 15466 - DNA, 428 bp, Arabidopsis thaliana
  unsure at all n locations
  Clone ID: LIB25-061-Q1-E1-C1
caccacacaacactttcataaaatcaattcatcgatccatcgtctctatcagatcaattcatcgattgcgatcgctctttcaattttcttcatcaccggtgaaaataatcgaaacccagcacgagaaaaatgcatgatttttgcttcactatcccgtacgggatgcttctcatcggcggaggatttatcgggtacatgaagaaaggaagtataacatctttcgccggaggtgcaggcactggattattactcattctcgctggttatatcagtctcaaagcttttgagaagaagaagaattccactattgctatggttcttcagacagtcatcgcagctgctctcacactaagtcatgggacagcgttacttgctgactgggaaagattatgccggctggtttggttgctgggattaagtgctccnca

SEQ ID NO: 15467 - DNA, 424 bp, Arabidopsis thaliana
  unsure at all n locations
  Clone ID: LIB25-060-Q1-E1-H10
ggagctccaanggagaaagangagaaacaagagctccggagccgaagattccttccatcctcccgatttacgaaagaagaaaagttaaagaaggcatccgagggaacagagaaagatgatgaaaggagaagtaggagaagtgataagaaggataagaaatctcacaagcaccacaaatccagtacatcaaagaagtccaaggatgataagccgaaaaagaaacatacggaaagcgaccacaagctaaaagagggaattccagagctatcaatggaagactacttctcgaaaaacaacgagtttgctacatggctgaaagaagaaaaacgtacttactttaatgatctcacgaccgaagctgcacgaaggactgttctcacgattttgtcaagagatggaacaagaggaaaactccgagtctcga

SEQ ID NO: 15468 - DNA, 315 bp, Arabidopsis thaliana
  unsure at all n locations
  Clone ID: LIB25-060-Q1-E1-E3
gtangcctccgaaaatccaaaggtccacccncccgtccgnaaaagaancttttacttgcgccacactctcaccgcaatggccgcctcgacaatggctctctcctctcctgctttgaccggaaaggccgttaagcnatccccggnggcctccgaantanttggaaccggccgaatcaccatgcgcaaagcctccaaggcccaccgcgtccatccggcagcccatggtacggatccgaccgagtcaagtacttgggtccantctccggtgagnctccgngctacctcactggttgagttccccnggtgnntacnggt

SEQ ID NO: 15469 - DNA, 487 bp, Arabidopsis thaliana
  unsure at all n locations
  Clone ID: LIB25-060-Q1-E1-E4
tgttacgccnncggtagcctccaaaattccanggtcgacccacncgtccgtttatctctctctctctctctatttcttttgcttccttttggtatttgctttgtatgtttgttttgagatcaaaatggcttcaagtgcttcaaagttcatcaagtgtgtgactgttggtgatggtgctgttggtaaaacctgtatgctcatctgctacaccagcaataaattccccactgactacataccaacagtttttgacaactttagtgcaaatgttgttgttnaaggcaccactgtcaatttggggctttgggacactgctgggcaagaagactataacagattaaggcctttaagttacaggggancaagatgttttcgtcttgtctttctcattantcagccgagctaagctacganaatgtttttaaaaaaagtgggntccctgaactccaacaactttgctccanggagttccccttngtccctttgg

SEQ ID NO: 15470 - DNA, 421 bp, Arabidopsis thaliana
  Clone ID: LIB25-060-Q1-E1-E7
tttttttttttttttttctttcgcgtgtgattattaactcgaggtaatttctctaatcccagttaatatcacacgcggaatatcaaagatctgattttttgtaaacattgtaccaaaatcatcagaagattataagtggagtctttcgaagaagaacaaatttgtaacacgcgtctccatcaatcttctagctggcaatgagatccattctttagcttctttcttctctgttttttcttttttgaagaaaaaaaaaatggcaccaaagtttgaatggtgggctaaaggaaacaacaacaacactcgtaaaggaacaccagtcgttgtcaaaatggaaaaccctaataactggtcaatggtggaacttgaatcaccttctcatggacgatttcctcgtaagaactcatgagaaatctcgtaa

SEQ ID NO: 15471 - DNA, 69 bp, Arabidopsis thaliana
  unsure at all n locations
  Clone ID: LIB25-060-Q1-E1-F11
ttacggtacctctgactatactnccaaaattttgattcgatctctntgttccacgttctgagaaanccg

SEQ ID NO: 15472 - DNA, 99 bp, Arabidopsis thaliana
  unsure at all n locations
  Clone ID: LIB25-060-Q1-E1-F12
agaggangattgtctctcagcnccttacgctaanggatggactgaaatctcgtgctcatgttatcatcatgggagcaaccaatcgccccaacagtatcg

SEQ ID NO: 15473 - DNA, 431 bp, Arabidopsis thaliana
  unsure at all n locations
  Clone ID: LIB25-060-Q1-E1-F2
ggaggctaaaaatatcttttgtataaacaaggttttgattcatcctgtgttttgganaagtaatattacagtatgcangacccaaaaggcaagaaatggatctccggatgttcctaagaaggtgtctcctcgagctgctcggccactgaagatcgcagcgctagagcctgaatcttcttcatctcctatctcagctactaacagaacaccaaaggataagagtccaaacgttctaaatcgtaggtctcctcgaagccctgtctctgagaagaagaggccgagtagaataacggagctagagttgctagtctcgcagcttcaggangagctaaaaaaggcgaaagatcanatctcagtgtctgaaacatcaaagaagcaagcagaacaangaagcagagggagtccaaggaaacagctccaagaantttctt

SEQ ID NO: 15474 - DNA, 431 bp, Arabidopsis thaliana
  unsure at all n locations
  Clone ID: LIB25-060-Q1-E1-F3
gaatcnttacttgtcttgtgacccttacatggggattctcatgagagaaccaactccttccactctagcacttttggatgccttcatccccggaaagcctatagctggaattggagtgtctcaagtaatagattctgatgatccatcttttacgaaaggcantatgatttggggaattgtgaactgggaggagtttagtactatcaacccggctgctatattcaaaatcgacgtcaatatcaatgttcctctcagctactatactggaatcctcggtatgatangtttaactgcttacgccgggttttttcgagatatgttcacctaaagaaaggagacacagtgttcngtgtctgctgcttctggcgcggttggacanctcgtgggtcagtttgcaaaagttgatgggctgctaggttngtttggaaagt

SEQ ID NO: 15475 - DNA, 424 bp, Arabidopsis thaliana
  unsure at all n locations
  Clone ID: LIB25-060-Q1-E1-F6
gttttatatttcaagttcttttttttttaaccttgccatcaatacaaccatggcaaggatttctctgttgttctctttagccttagttctaagccatcgggtccgtcttggctcacccacctacccacaagaaattacaaaagaccttgtgtccatctactttgtccaaagttcaagctttcccttaccttgaagtctctaagcttcgtcganaagaaggttcagttcgcaccaaaaaccattgcgttcaagtctttgttctccatctgcaagagctacatcgactttcttgggggcgttangttttctgcctccangagatgtgtttcacgtccgttcatgtcaaattcacnttgatgacaaggcnatgggttaantgcacangcacccattggnntngaangagactcnccggtnanttggg

SEQ ID NO: 15476 - DNA, 490 bp, Arabidopsis thaliana
  unsure at all n locations
  Clone ID: LIB25-060-Q1-E1-G1
ccctncncgtacgcctccaaaattccaaggtcnacccacncgtccgcagtgatnaacgagctccaaaagaatctacaactatcaggagaacacgttgaggcctcaagaatgacactacatcgttttggtaacacgtcatcttcatcgttatggtacnagcttagctacatcnagtctaaaggganaatgactgagaggcgatcgcgtttggcaaatcncgtttgggagtggtttcaagtgtaactctgccgtgtggaaatgtaaccgtacgattaanacacctaaggacggaccatggtccgattgtatcnaccgttaccctgtctttattcccganagttgtcaaactctaaactgaaaacntcnttgaacggtttagtaacgggtttgactttgtgnttacngnttacgtttaattggtctccggaattttgggttttaangggggattgacaanatggggaaagttngnngaggaagaancaancca

SEQ ID NO: 15477 - DNA, 424 bp, Arabidopsis thaliana
  unsure at all n locations
  Clone ID: LIB25-060-Q1-E1-G2
gataaaaagcctcaagatccaaatcccagatttgcttgcgaaggttgcagcgttctgctcgacatcaacgatggtgaccgtctcgtcttcgctcgtttatctagtggcgctatattaaaaattgggaataagaattattctttaaagccattgatcggagctccgtttggatctctgttccaagtcgaaaccggagaagatggttctttcctctctcgcattcttcccattaaacaagaaagtaacagtaataatgttatggacgattcgagagataatcgagaaatcgtcgacaataatgaagctcagaatcttactggtgaagaaattgaagctatgcggagagagggtgcaaaaggggatgaaattattgaagctctaatttgcaaacagcaaaaacttttgataagnaagtttcaatttg

SEQ ID NO: 15478 - DNA, 493 bp, Arabidopsis thaliana
  unsure at all n locations
  Clone ID: LIB25-060-Q1-E1-G3
nnnnnngaantgttagcctgtcgtaggctccaaaattccaaggtcnacccacgcgtccgcacacgcgtccgcccacgcgtccgcccacgcgtccgaaccaaaatccgatttccccatacttagaggtcaagagaaataaaatatttttccggcgacgcaatggcttcttactccggttgtttcttcgtcgttactttggcagttctgtcacaatttctcttagccccagcttcagccttggtcaacagggaatacatcgattccaattgccaaagagtcaaaaacaaagccttctgcatccaaactttgaccacctatcctcctgccgctgctgccaccggcctgttaccattggctgangccgtggttggccttgcaatatcccactgcgagaagacagctgggtttcgcagcagagacagccaaaaagggacgcaacattgaagactcagttcaacgangtgccacgangcctangttggtatttttggcg

SEQ ID NO: 15479 - DNA, 493 bp, Arabidopsis thaliana
  unsure at all n locations
  Clone ID: LIB25-060-Q1-E1-G4
aaactnctcgtagncctccaaaattccanaggtccacncnccccgtccgcaaacgctancattacncactataaccaagttgaanggncntcancgcttantttatgacatttgcnacaccttctngagacatgggaaatgggttnngactctcacnngatatctcctgcggatatagagtggatagganaggatcctgggcttgggtaatcgatataatgggcaaggtcatggactgaatanaactaccggacccaactgtgttccacaacgangaaacggtttggagaagaacactatcagaaagggtttcagaacatcacagaatggaactggaaaaaagaaacatctccatatacgaatccgccaaacaagatgtcctaatcagagaggtggacgagagttcttcgttcacacaatcccagatccttacgaagtttgaaaagggctaangagagtttgggnggaccacgagcatgcacttgtggggcgc

SEQ ID NO: 15480 - DNA, 421 bp, Arabidopsis thaliana
  unsure at all n locations
  Clone ID: LIB25-060-Q1-E1-G5
taaaaaggcttaagcgggcaaggagaatttcaacacatatcagtcagaacgatcagaggcagagcaaattcaatttcgaaacagtgactattacgagaagcgaaatggatacgtcgcttcttcttccgatcatcgatctttcttcgccggaaaaaatctccactactcaattgattcgtcaggcatgtcttgaacatggattcttctatgtcaagaatcatggaatctcggaagaattaatggaaggggtttttaaggagagcaaaggcttctttaatctcccattagaggaaaagatggctttactccgccgtgatttgctcggttatactccgttgtatgctgagaaacttgaccccgtccttgagctccataggtgattccaaaggaaagcttcnattttggctccttggaanggtgg

SEQ ID NO: 15481 - DNA, 432 bp, Arabidopsis thaliana
  unsure at all n locations
  Clone ID: LIB25-060-Q1-E1-G6
gnaaagatgggtttcaaactcatctctctcctccttctttttcttccacttctaacagtcacaatcttgtcgggagtcgagcaggcctttgcttccgacaaggcactcctcgtgaccggccgcaacatcacggctgacggnggtaggtcgtcactgagagggaanaagcagaggagagcatcaggatgtaacttgttccaangccgatgggtgttcgatgcttcttaccctttctatgactcgtccanntgtcctttcatcgacggngagtttgantgtctcaagttcggccgaccagacaaanagttcctcaaagtactcttggcaagctgagtcnttgcaccatcccaaggttcgacggtgggggcatttctnaangaaatacacaggaaaacgangtcatgttngtngganacgcactgnagtttanag

SEQ ID NO: 15482 - DNA, 409 bp, Arabidopsis thaliana
  Clone ID: LIB25-060-Q1-E1-G8
gatgatccctacttattcactactaacaacttcgccggacgacaaacatgggagtttgatcctgacggaggctcgccggaggaaagacactccgtcgttgaggctcgccggattttctacgacaatcgttttcatgttaaagcaagcagcgatctcttgtggcgcatgcagtttctgaaggagaaaaagtttgagcaacggatagctccggtgaaagttgaagactccgagaaggtaacctttgaaacggcgacgagtgcattacggagaggtattcatttcttctcggcgttgcaggccagcgacggtcactggccggcggaaaatgccggccctttgtttttccttccgccactgggtgttttgtctttacataacgggacatcttgatgaagtgttcacttcagaa

SEQ ID NO: 15483 - DNA, 384 bp, Arabidopsis thaliana
  unsure at all n locations
  Clone ID: LIB25-060-Q1-E1-G9
nnnaangttatttgccgncccggtccanactaaacgggtcgagtcacgcgtccgcccacncgtccggaaacaaaaggcagaagaggaagctgctggctctgcagatggtctcaagagctaccagaaggttgtattcgacctcttgaacaaggttgcanatttatctttcctaagtgcctacaagtctaagatcacggaactgattgagaaagccgancaacaaccaaacttaaccattggtgtcctcgtcnccattgtggttgtattcttctcgctcttcctcaagcttatctttggtggcaaaaangcggcggcacctgtgngaaaagaagaaaccagaantagcggagagttcanttgagtngggatgaggncngngaagaa

SEQ ID NO: 15484 - DNA, 428 bp, Arabidopsis thaliana
  unsure at all n locations
  Clone ID: LIB25-060-Q1-E1-E11
tgaagctttaacattgttgcgaagaccagactctcagactcagactcgggagtgatttcacttcaactttctgctcagatggcagtccactactggacagccctgtttcnattgttgccatgccttttctgtatttcaantgctagtgctggcgatgctgatccagattacaggacatgtgtttcagaatgtgagatagagcggttgtgttggacaactttgctttcctcagtgcaattcntcatccgatggtggtccanggnacatccaaggaacctttgtattnacantgganaanatggggttgtcaaggtgattgccgttatcaangtanggntaananagagactgaacgggaaantctcggtcangccccantcaagtaccatggtaaatgggccttcaancgtgtacttggggaatcaagg

SEQ ID NO: 15485 - DNA, 442 bp, Arabidopsis thaliana
  unsure at all n locations
  Clone ID: LIB25-058-P1-E1-H4
agctagttgattggttcaagtttgcagctttagatgatcctttaactgagctatcttcattctttaattaccaatgggagagtgggtcatcggagctttcatcaacatttttggaagtgttgctattaattttggcacaaaccttctcaaattgggacataatgagagagaaaggttagccctacaagatggcggaggaaagatgccattgaagccaattatacataatcagacttggagagttgggatccttgtctttcttcttgggaattgcctcaatttcatttcgtttggttatgctgctcagtcccttctagcaactcttggatccattcaatttgtatccaacatagcatttgcttatgttgtantgancaaaatgggtactgtccaaagtacccgttggcnacaagccctttagagttccctggggaaacngntt

SEQ ID NO: 15486 - DNA, 432 bp, Arabidopsis thaliana
  unsure at all n locations
  Clone ID: LIB25-058-P1-E1-H6
ttgaagcatgatgacgacagtcgccgccgatctccaccgttatcttttcctgattaccgtttttcttttcttcctctgcgacaaaacctctcttgctctgaccacagacggtgttcttcttctctctttccgttactcaatcgttgacgatcctctttacgtttttcggagctggagattcgacgacgagactccttgctcttggcgtggtgtcacgtgcgatgcatcttcccggcacgtgactgttctgtcacttccaagctcgaaccttaccggcacactaccttcaaatttggggttcactcaattcacttcaaagacttgatctttccaacaattccatcaatgggtctttcccggtttcgnttctcaacgcgacggaggcttcgatttcttgatctgtcccgntaantcaaatctccgggggggacg

SEQ ID NO: 15487 - DNA, 434 bp, Arabidopsis thaliana
  unsure at all n locations
  Clone ID: LIB25-058-P1-E1-H8
cttgtttccttcgctcgattctcttctcttctcctactaaccttcgttcaaatcaccatctccccactttcttccccaagaattatctcatttgctctcattccacttcttctcgcttcgaatcgctctcggtttcatcgatcggaactggatctaccaagaaatcatccgatactcggagaaaggtaaagagcatggctacgacaaatataggaaaggaggagaagaaaagagtcgagatttatgatctcgaagagaatttagtgattgatttggctaaattcacaagcagatctctccgataagttttgtaaagagagaggcgctttcaccgtcgttgtctccggtggctctctcatcaaatcactccggaaattagtangaatctccttacgttgantcnatagattggggnnagggggcaattttttcgg

SEQ ID NO: 15488 - DNA, 425 bp, Arabidopsis thaliana
  unsure at all n locations
  Clone ID: LIB25-058-P1-E1-H9
gcaacccaaaagcatacaatacaatgtctactcttgttttattcctccaacttttttccatcctaccattagcacttgggttgaaccacccaaattgtgacctgaccaagactcaagaccaaggctctaccctaagaatcttccacatagacagnccttgctcccccttcaaatcatcatccccactctcatgggaagcgcgtgtgctccaagacgctggctcaagaccaaggcccgtctccagtacctgagcagcctcgtcgccgggagatctgtagtccccattgcctcagggcgtcaaatgttgcaaaggcactacanacattgncaaggcntttgntnggttancccggntcagccngntgctcctagccaatgggcaagcgagcaagtngacttggcttgggnttccntggccccgggng

SEQ ID NO: 15489 - DNA, 435 bp, Arabidopsis thaliana
  unsure at all n locations
  Clone ID: LIB25-059-Q1-E1-A1
tttttgtgattcaccaagcagaagaaaattgagaaaaaaaaaagctttaagatggagaaaaatcaacaaaagcaggaatttctagctgagacctcagagatgaagaacaccaaaaacaacgacgactgttctgtacaacaacaacaacgatttgtgtggccatgggttggtctagtagccaacataccaacggaggtggaaccatcgggtcggagagtaggcaaaagcggttcaacgttacgtgatgagttcactatgaaagggtttaatccaacaagagtccaacccatttgggatttcaagggtcattctgggttttgctttggttgaattcgctaaaagactttgaagggattccgaaagccncatgaatttcgaaaggagtttttaaatttagaaccgtcatggggaaagaagagaattgggaaaaaangg

SEQ ID NO: 15490 - DNA, 423 bp, Arabidopsis thaliana
  unsure at all n locations
  Clone ID: LIB25-059-Q1-E1-A10
cctgtcgcatttggatctcaaagcaaatctggttctggcgctttccggttctccaccggtgcaatcgcggcactttccggtggattctcctattactacttganatccggcaacaatctggtttatcnggatcaagctaangaagagacaggaccaaaaaccgctctaaaccctgataaatggctcgagttcaagcttcaagacactgctagagttagccacaacactcanttgttcaggttctcatttgacccctcagctgagttgggtctacatgttgcttcttgtctcctgacaatggctccnttangctataatgctgaagggaaaacgaaaatatgtcantanaccttacactccctatatcaagttcaagaggctaanggctaatttganttactgattaaggtanancctgacgga

SEQ ID NO: 15491 - DNA, 441 bp, Arabidopsis thaliana
  unsure at all n locations
  Clone ID: LIB25-059-Q1-E1-A12
ttggtgaaaaagtttaatttgtctctttctctatttatctccggcgtcaatttcacggcggctacacgacggttatcgatgtcattgactgtaccggagttcgatttcagattgacgccacagtttggtttctcacagtcaccgatcggggagcgtaatttcgcggatgttgataatctggagaactgtattaagtatttgaatcagagcttagtcacctctggattctctgcttcgcttgacctcttcgctaccgatcctgtttcgattgctaanaacttgcaattgcgtataacgctttggattcaacaagaaggcaaacgaanatgtggaattttagaagaaatctgctaatggatcagaagacaacgaactttttatccgaatatgggcgaagactccgaaagccaaaagttgaaaggccttgaagactcaatttgc

SEQ ID NO: 15492 - DNA, 417 bp, Arabidopsis thaliana
  unsure at all n locations
  Clone ID: LIB25-059-Q1-E1-A2
ccaagaactctctgggccgccgcgtctccgtcgtcgtggctatctacagatggcggataagaagaagcgaaagcgatcaaaagatgacgaggcggaggaacttcctttcaaaagcattctggaatcagacgacgttatcacggagcttctcaaatcgtatatttcctcttctatcaaagccgccgccgggagccggcggtgcctcctcctcttcatcgaaacctctaaccctagctgacctctctctatcatcttcctggtcgtgaagtcgcagatttctcaatctcctccgtgcagacaagagatagagacagtcatcgtccaaattgcccgttctaatctcgccggtgatgggcttctccttcaagtgttccttcangccgccgcctcgaaatcancctgtatnttcctgaacct

SEQ ID NO: 15493 - DNA, 285 bp, Arabidopsis thaliana
  unsure at all n locations
  Clone ID: LIB25-059-Q1-E1-A3
gggacncctccgnantagaaaagatnaagaanatgggtttgngaanaacatggttggttttgtacattctcttcatctttcatcttcagcacaatcttccttccgtgagctcacgaccttcctcagtcgatacaaaccacganactctcccttttagtgtttcaaagccagacgttgttgtgtttgaaggaaaggctcgggaattagctgtcgttatcaaaaaaggangaggtggangangtggangacgcggangcggtggagcacgaatcggcggtangagca

SEQ ID NO: 15494 - DNA, 414 bp, Arabidopsis thaliana
  unsure at all n locations
  Clone ID: LIB25-059-Q1-E1-A4
attgcttatagcttctgagcatcaatggatccaaatcataataatcttctcatctttgtagccttttttgttctctgcttagccaccaatggtgtaaccggatatgccacggtcacaggctcggtgttttgtgaccaatgcaaggatggagagagatctttgtttgattttcctgtctctggaatcaagattagtgtcacatgtgctgatgaaaatggacaggtcnaaatgtcaaagagaaganactactaattgggcttggaggaatatgtaatgangatttgatggggacaccggatttaaagtaactgttatgctcaagtttcaaacaatggagttcaacaagacccaagtagctgcagcaattgcttcaagtcctgcacagaaacttaaaccaaagttcaagcttttttt

SEQ ID NO: 15495 - DNA, 350 bp, Arabidopsis thaliana
  unsure at all n locations
  Clone ID: LIB25-059-Q1-E1-A5
aggctcagcttcagctagctgagatcaaacatgctcgtttagccatggttggattcttgggttttgcggttcaggcggctgcaaccggtaaaggaccgctcaacaactgggcgactcaccttagtgacccacttcacaccaccattatcgataccttctcttcctcctgatgtggtggcttttagcttctactggtgtcatgtaatgatgtggtggcttttagcttctactggtgtcatgtaatgatgtaacgtcgttattttaaagaaaatttggcaccttttgtataaaaaaaaaaaanaaanaannaannanaaaannanaaaaaaaattaaaaanaaagggcggcc

SEQ ID NO: 15496 - DNA, 407 bp, Arabidopsis thaliana
  unsure at all n locations
  Clone ID: LIB25-059-Q1-E1-A6
agaagaggaagcttgtagaaatcgatggcgacgatagtgcagtgtctttcttcctgtgcgaccctcgaatcccaattcaaagtcctttcgcttaagggaatctcttgttcgtcaccatcttcttccttctccaatcgtcgtggtgcttcggctaccttatcctcttcccttagcttctctcagagcgtttctcaatgcgtcgccttctcaaccgggaatttgtgggtacagaagccaatgaggcaatttgattgtgtgtgaggctgctgctcctaccaagaaagctgattcagctgcaaagagagctcgccaagctgagaagangcgtgtttacaacaaatctaaagaaatctgaagcccgttcccgggatgaagaaagtcctgggaacacttgaagggctcaagaa

SEQ ID NO: 15497 - DNA, 417 bp, Arabidopsis thaliana
  Clone ID: LIB25-059-Q1-E1-A7
taggattaacaagtcatcctaacacctctaattggtcgccaatctcacatctttccgtctgcacagggcaaagttcatctgatcagcaatcaaatttgaaggctactccaagaaacgatgatgttgacatatatattgcaatttctgatgatgattaaagatatgatgcgaagagaagcaagtagacaaatgttgtatattataaactcaaggctacttggtgaaaagtaaagctttgtatcttttgttttgtggttcccttagtcctttatgttgtatgtattgctagctaatgtttatgcctagtggaaactgacctaattttgattcgtttgtggaatcaatgttagatggaatccgtttatgtattttggtgcatattacgctttcggtatataatccttttgtatcatataa

SEQ ID NO: 15498 - DNA, 438 bp, Arabidopsis thaliana
  unsure at all n locations
  Clone ID: LIB25-058-P1-E1-H3
gaagagattcctcttaatgagcaagaagaagtgtatcangattcttcttgagagtttcaagtgtgtgcctacgtttttgcctttggatttgtacactagatactaccatggattctgtaagcaacagctttggcctttgtttcattacatgttgccactttctcctgatcttggaggtaggtttgataggactttgtggcaagcttatgtctctgtgaacaagatttttgctgatagaattatggaggtgattaatcctgaggatgattttgtgtggatacatgattatcatttgatggttttgcctactttcttgaggaagaggtttaacagaagtcaagcttggtttcttccttcatagnccatttccatcgtctgagatttacaaaaccnttgcctantccgtgaaanncctccncngggctttgccnaaaancg

SEQ ID NO: 15499 - DNA, 419 bp, Arabidopsis thaliana
  Clone ID: LIB25-059-Q1-E1-A9
ggttccaagagaacttagcttcttgttctacgtacgacaccaaaaattaattcaaaaaagaaaaagaagagagttcaatgagaaaacattctcttgatcgatggcttttaacagctgttcttgtcgttctcctctcgtcttcttcctccttcgcggccaagaaggacgccaagaagaagaagaagagtaataaggaggtgacatatgatggaacctctttgatcatcgatggcaaaagagagcttctttattctggctctattcattacccgagaagcactccggaaatgtggccaagtatcatcaagagagccaagcaaggcggtttgaacacgattcagacatacgttttctgggaatgtacatgagcctcaacaaggaaagttcaacttttcgggacgagctgaatttggtgaaat

SEQ ID NO: 15500 - DNA, 416 bp, Arabidopsis thaliana
  unsure at all n locations
  Clone ID: LIB25-059-Q1-E1-B10
ntggtgtttgtgaagtcctccaaatcgaatgcttacttcaaggaggtaccaagtgaagttcangacnaaggagagatgggaagactgattacagggcaaggatccgtcttatcaatcacgacaagaacaggtacancacccctaantaccgttttgttgttcgatttaccaacannnacattgtggcacagattgtatctgcaagcatagctggngacattgttanancttcggcttacgcacatgagcttccncagtatggnctcactgttggtcttaccaaactatgctgcancttactgtactgggcttcttttggctcgncgtgttctgaaaatgcctggaaatgggatgnttagttnccaagggaaaacgtagangccactgnanaaaggacttttccgtgggaaccaant

SEQ ID NO: 15501 - DNA, 412 bp, Arabidopsis thaliana
  unsure at all n locations
  Clone ID: LIB25-058-P1-E1-F11
tttgtatagaaggaaatggaagctcagactggaagtcactcgagttcattaagaggtcagaagaagtagctgttgttatcgacgaaacagaagacttggggtcaggtttcgatgatgctgagatattcaaaggggaaaaggaagcgagttacgaaggcggttattcggagaatctgttcacttgaacttgcaccttttcctgtaatcatcatagggtttgattttgtgattctttcttagggtttgatttgtattattaatagaagtctttaccagctttaagttgtatcccagaaactaatagttactcttcttcttcttcttcctcttcttcttctttactcagtaatgagaacaaaaaccattttagagatgttgantgatatttaccaaaacnnngaaaaaaagggng

SEQ ID NO: 15502 - DNA, 410 bp, Arabidopsis thaliana
  unsure at all n locations
  Clone ID: LIB25-058-P1-E1-F12
cgccgtatgtatgctgctactactctatcatctgccaaatcaatctctgcagaatccctaaatcttcgttccgattccaattcagaggcagcgcatggtgcttctgagtctgagactcgagtctctttaaggaagaagaggataaagcaggatgatttggagcctgtaaagaaatgttccgccangagaaaccaaggcccgcaaggacatgtgtggattacctgatatagaagactctccttataagaagactaatgggaactgcttcatctaggncgagaaaactaaactcatacataaaatcaacagaaggctagccccttctgcatcgtncgattaanacaagcaagggcttaggcataccacctgnaaactggggaaaaaggngcncccaagggtntttcgaaaaa

SEQ ID NO: 15503 - DNA, 403 bp, Arabidopsis thaliana
  unsure at all n locations
  Clone ID: LIB25-058-P1-E1-F2
gtttcaagatttataatcgcttgcctaagtttcaattcatcttcattccgggagaaaaagtcgcgatacttgagctactcagctttagggtttaacatgttaaggtctctgatttggaaacgatcacaggcatattcttcagtcgtcacgatgtcttcaatcagtcagagaggaaatgaaaggcttttgtctgaagtcgctggttcacattcaagagataataagatattggntttgggaggaaatggttatgtaggttcacacatatgtaaggaggcactgagacaaggtttctctgtatctagtcttagcaggtctggaagatcttctcttcacgattcgtgggtcgatgatgtaacctggcatcaaggngatttgctttcanccnagntctccggagccg

SEQ ID NO: 15504 - DNA, 423 bp, Arabidopsis thaliana
  unsure at all n locations
  Clone ID: LIB25-058-P1-E1-F3
cagcatgtccaaanacagtatccgaactccagaccttaccttttaccgaantcactgagatcctaaaccgaaaagagcggtctgccccgaaaacccctgagttcaaggcaatgttcacaatgtgcaaaggcnacgtgacaganctcgagagcctctacaagtttgagaatcccattgtagatgttttaggaattgccaagaccagatacaccctgatgaacaaggcaattcttgctgcgcaagctagtgttggcggtaaagtcaataagaaaacttctttgaagctaaagaaaagctatgctgatttgacaaaagggtttctccgaattaaagaaactattgtaaagatatcagccaaacatgattaccaaggctgatgcaaagatnacnggtcacgaanccnaaaaaagncccaatccnnng

SEQ ID NO: 15505 - DNA, 424 bp, Arabidopsis thaliana
  unsure at all n locations
  Clone ID: LIB25-058-P1-E1-F4
gcagcttttagatattttctttccccgttctttcggattttttttttctccccctctcaagcaaagcattatcgctattgctctgccttgtgagctgcgatcacctgtttactgagagaagaacactgcgacgtcgttaaaagtaggttgagagcgagaaaggccgagagaatggagatggaagaaggagcaagtggtgttggtgagaagataaagattggagtctgcgtcatggaaaagaaggttttctcagctcccatgggggaaattctcgacagactccagtcttttggtgaatttgagatcttacattttggggataaagttatacttgaagattcaatagaaagttggccattttgtgattgcttgattgcntttcaatcctccggntatcctcctgagaaaggtcnaggnatatgng

SEQ ID NO: 15506 - DNA, 422 bp, Arabidopsis thaliana
  unsure at all n locations
  Clone ID: LIB25-058-P1-E1-F5
cagtttcaatttgtttgttccatacactgtacctcaatacgtaatctctggtctcataatgtttgttgctgctgaagtactcgaaggtgtgaatctatcgttgttatcgcgggtaatgtcatcaaggctatcgaaaggaacgtacaacggaggattgctctcaacagaagctggaacgttggctcgtgttgtggcagatgcaaccataacattgggaggatatttgggaagaggccatctcctgaatgccactcttctaccatcacttgtcatctgcattggctccatcgttgctacttgttgtacttataactcactctattgattttggagttttgctaccaaattttacaaaatagaataaaacagtgtgtaagatcgatcctctctttgatttgattatttttgntggtccaaatcag

SEQ ID NO: 15507 - DNA, 417 bp, Arabidopsis thaliana
  unsure at all n locations
  Clone ID: LIB25-058-P1-E1-F6
agatgggagggagggtttgtggcagataaactgatagaaaactttcgaacctctcttctttaacttttactactctctattcgtttttctcttccttttgtggtgccgcctccaactgaaagtcttctaatatatattctcaattattctagctctccgggagaagtcttatctcacgccaatctctcatttcccactatgaggcatgaggagaattacttagacctcaacaatcttccagatgatttttctaaagatggcaataagcaagccctcgaggaaggttcttcctctggtcaaagaaagaagaaagggagtaaagaagggaaagatgaggagtgggaaagtgtacgaatgtcgattttgttcactcaagttctgcaaatcccaagcctcttggtgggcacatgaaatcng

SEQ ID NO: 15508 - DNA, 430 bp, Arabidopsis thaliana
  unsure at all n locations
  Clone ID: LIB25-058-P1-E1-G1
gctttagtgatggcggcgcttatccggtgttgctcctccttctctcatacttccggtggccaaccaccgccgcgtgacaagtctcgagctccagagattggaaaatttgctacatctattggctactcagtagtcagaaaacctggggatcatcctcctttctccaaaattatacattcgtcttcacagcctaaggagcgacaaggaaagggaatcttacaaacgccatttgccagtgtgggatctcttgacaagttttcagcttttgagggaattgggaggctcaaattaccggtgatggcagtgttgttgacaaactcccttcaagatggctacacctcttgaagctttggctgctgagatatgtgagcctgagagctccatgttcaagcatgcctaatttggttgncttggtgcncctaaagggggg

SEQ ID NO: 15509 - DNA, 252 bp, Arabidopsis thaliana
  unsure at all n locations
  Clone ID: LIB25-058-P1-E1-G10
ncttccangcncacattttgaaccctcgatttcccattcttctcatttctctccactctanttctcaaatcaaccaaaagctccctcanagctctctctttatccctccgattcttaatcaangcctcacttacgtcagccggtgtaatctcagccctancaancacttccgcnaactccttcaaaacaacgtcgttaagatcaccttcctcanaccccaagtaantcctcaataaaatcntggcgaagaag

SEQ ID NO: 15510 - DNA, 94 bp, Arabidopsis thaliana
  unsure at all n locations
  Clone ID: LIB25-058-P1-E1-G12
ctanattgaacaggttgtggaacttgattttcggtatccaagtgaaggcatccacaggcnttgggatggtggattcagantcacatcaacanca

SEQ ID NO: 15511 - DNA, 430 bp, Arabidopsis thaliana
  unsure at all n locations
  Clone ID: LIB25-058-P1-E1-G6
ggttcatgttattgatttaggacttaaccatggtttacaatggccggctttgattcaagctcttgctttacgtcctaatggtccaccggattttcggttaaccgggatcggttattcgttaaccgatattcaagaagttggttggaaacttggtcagcttgcgagtactattggtgtcaatttcgaattcaagagcattgctttaaacaatttgtctgatcttaaaccggaaatgctagacattagacccggtttagaatcagtggcggttaactcggtcttcgagcttcatcgcctcttagctcatcccggttccatcgataagtttttatcgacaatcaaatcaatccgaccggatataatgactgtggtcnaagcaagaagcaaaccataacggtaccgtanttccccgattggttcacgggatcgc

SEQ ID NO: 15512 - DNA, 403 bp, Arabidopsis thaliana
  unsure at all n locations
  Clone ID: LIB25-058-P1-E1-G7
tctaaatggatccctgtctcagagagaagcagatcgcttgcactggtctatagtggcatgtatcttggttccgtcacaggattggcattctctcctatgctaatcaccaagttcggatggccatctgttttctactcgtttggctccctcggaagtatatggtttttgctatggctaaaatttgcatatagctctcccaaggatgacccggacctaagtgaagaagaaaaaaaggttatactgggaggtagcaaaccaagggaacctgttacagtgattccatgggaagctaatactgtctaaacccccagtctgggctctcataatttcccacttctgccataattggggaaactttcatactattgacatggatgcccacatattacaaatcaagncctng

SEQ ID NO: 15513 - DNA, 408 bp, Arabidopsis thaliana
  unsure at all n locations
  Clone ID: LIB25-058-P1-E1-H1
gcttaagctgaaatctagtttattttttctatttactaaaacctcccaaggaccaaagaacatcgacaaaggaagacgacgaagaagatttcgagcttcgacaaatcatgcggattcttactgctcgcatagctaaccatttttgcagggcacgaaacgcgaatcctcgatctcgaaatttctcctcgtcgaacaagaaagatgaccttacattggaggaagaagctgagaggaaaataggttggtgtctcaaaattttctttgcgggcacagcaacgtatattggataccaagtttttcccttacttaaggtgataacttaattcatcaatcaatatcgcttttacatgtgaaggatcctttggttaaganaatgggagcttccnggnttcccgnttccgncaatgg

SEQ ID NO: 15514 - DNA, 424 bp, Arabidopsis thaliana
  unsure at all n locations
  Clone ID: LIB25-058-P1-E1-H10
agaagaataactttttcatttctctctcttcccgctcctccttcctccttctcctctctctttgacattccaccgagaaaaaaaaagaaagaagttgaaatttcaactctctctctctcaccctccgacccatttctggtcttgtcatttctacaattagacttctcttagatttcccttgttcttgtctctttccgcggatttcgattccgacacaatcccaaacaagatagctgtttattcgaaataaagaaaatggaaggagggtctgttaatgaatcgcattctaatgcggaccaaatgtttgacacaactatagaagagttatgtaagaatctctgcgaattgcagagttctaatcaantctccttcnagggganagttttgggttaaaaanggngatgagtcnaaagattgantccgg

SEQ ID NO: 15515 - DNA, 486 bp, Arabidopsis thaliana
  unsure at all n locations
  Clone ID: LIB25-058-P1-E1-F1
ttacgcctgcngntaccgggccgnaattcccgggacgacccacgcgtccgcttttgtcggaatctgacgtcagcatacctgctaccacttccagagttcaatcgatcttcgcctcgttgaaacgttttccctcttcgattatcaacagtgtctccactcgtatcatcaccgcctccaactaattttgccatctctctcgttgttccaatttgattctactagtgagctccgatttaatttagggttttgaaagatgtcagctttgaaaaattacggcttgatctccattgattcngccctccattttcctcgatcaaatcaattgcaagagctataagagaaggaatgcaaaatgggtctctccaatagcaactgttgtacctaacttccatcttcctaagcgcagtctcgaggataaaaacaggacaaacacangacgacataaggtcccttaaagtgatcacaggcatttaagagaccgttttt

SEQ ID NO: 15516 - DNA, 481 bp, Arabidopsis thaliana
  unsure at all n locations
  Clone ID: LIB25-058-P1-E1-H11
ttacgcttgccgggnccgggtccganaattnccgggtcgacccacgcgtccgcggagataaattccgtggtgctgcgtttggccttaccaaaatttgagatctcaattgaagaaagaaacatagcgaagaagaagacgatcaaggaattgaaattagattctgttatctctctatcatcttcaatttttttaatttgattgttttcaccaaaaaaacaaaaactatgaacacgacgttacgttacgatccgagacacgatntcgaggcaaacgaaaccgtcagatacaccancgtcttctccgtctcgtagnaaccggngacagnctttgcttcacagaagtctctcttcnccgtcaccacgaagcttcttgcgggcggntntactcccgccggagntttgcggggggnaccnacgggaanttgcccccncctggtgggggtnggtgggccccngggggggnnccngttaaccaangcgnt

SEQ ID NO: 15517 - DNA, 446 bp, Arabidopsis thaliana
  unsure at all n locations
  Clone ID: LIB25-058-P1-E1-H2
ggattgtagtataaggccgtgtttggcttggatcaaatcgcctgaagcgcaagctaacgcaactgtctttctcgccaagttctatggccgtgctggactcatgaacctcatcaacgccggtcccaatcaccttcgtcctgggattttccgatcgttgttgcacgaagcttgtgggaggattgtgaatccgatctatggttcggtgggtttgttgtggtcggggaattggcagctttgtcaagacgccgtggaggctgtgatgaaaggagaaccgggtcaaagagatcgccacagacgctgcgacgatcggccaangtccgcctcntaanatctacgacatccgacatatctccaagggatgataactctgccgccgcggctactggcncaaccgatttgannacttgccnaaactcccccgtncngaancggggnctccnaccgtt

SEQ ID NO: 15518 - DNA, 438 bp, Arabidopsis thaliana
  unsure at all n locations
  Clone ID: LIB25-058-P1-E1-D1
aaaaaaatggcgacggtacaattgtccacccaatttagctgccaaaccagagtttcaatctcaccgaactctaaatctatctccaagcctccgtttctggtaccggtgacctcaattattcaccgcccgatgatctccaccggaggaatcgctgtttccccccgtagagttttcaaagtccgaagccacagatacgggagagataggatcagctctattggcggcggaggaagcaattgaagacgtggaagagacggagcggctaaagagatcgctcgtggattcgttgtacggaacagatcgaggtttaagcgcatcgagcgaaaccagagctgaaatcggagatctaatcacacagctcgagtctaaagaaccctactccaagntccgacgggaagctcctttccctcccaacgggaaaatngnttccccccccaa

SEQ ID NO: 15519 - DNA, 396 bp, Arabidopsis thaliana
  unsure at all n locations
  Clone ID: LIB25-058-P1-E1-D10
atagagacacttttttttttttgattagaaatggctttagctgttacttcttcttcaactgcaatctctggatcgagtttctctcgttctggagcttcttctgaatctaaagctcttcaaatatgttcgattaggttatctgatcgaacccatttgtctcagagacgttactctatgaaacctttaaacgctgagtcacattcacgaagcgaatcttgggttactcgtgcttcaactctaattgctcctgaagttgaagagaaaggaggagaagttgaagactttgagcaacttgctaaaaagcttgaagatgcttctccacttgaaatcatggntaaagctcntgagagattcgggagaacnaatcncaattgcctttagtggggcngaaaaagt

SEQ ID NO: 15520 - DNA, 442 bp, Arabidopsis thaliana
  unsure at all n locations
  Clone ID: LIB25-058-P1-E1-D2
ctccaccgcgcacgttagcctcctctctttcccactccgagatggagacgacgccggagactcagtcgaagactcaccgtctaccggcgggaagagaggattggtggagcgaagacgctacggcgacattgatcgaagcttggggagatcgttacgtcaatctcaaccggggaaatctccggcaaaacgattggaaagaagtcgccgacgccgtcaattcaagccacgggaatggccggccaaagaccgatgtacagtgcaaaaaccggatcgatacgttgaagaagaagtacaaaactgaaaaggcgaaacctttatcgaattggtgcttctttgatagactcgatttcttaatcgggtccggttatgaagaaatcgtccgggtgctgttgttaaatcggngtttntgaaaccnaaattntgancccaacggggntnnaaa

SEQ ID NO: 15521 - DNA, 419 bp, Arabidopsis thaliana
  unsure at all n locations
  Clone ID: LIB25-058-P1-E1-D4
aaaaaaagcaaatcttcaaagaaaaaaactccgtgtataaacttttctcgatcatttttgcagtctctctcccaaccaatcccattctgctcgactctcattgttgcagaggtttaggaagaaaggaatggttcgatcgtgactttganttgggatattgtgtgtaaaatgtgggtgcctacattgagctcaagctcatgttcaagtgatgagagggatgagagcagtggagaagccgcgcttacgccggtttatctcaatgtcnatgatctaacgcctgtcaacaattacctttattggtttgggattggnattttccantctggtantgaggctcanaatttgngaagattgcnagngagctcacgagtnccnaanagntgtgggnctatgncggtgggnnccnangnnccgtncnc

SEQ ID NO: 15522 - DNA, 90 bp, Arabidopsis thaliana
  unsure at all n locations
  Clone ID: LIB25-058-P1-E1-D6
ngccatgctntcgccgtcttccttatttatgctcagattgggtgcgcgctaatcggatcactaggagcattatacaatggaattgtgtng

SEQ ID NO: 15523 - DNA, 418 bp, Arabidopsis thaliana
  unsure at all n locations
  Clone ID: LIB25-058-P1-E1-D7
cgattacaatgcccttggcatttctgtgtggatttgataaagcaaaaggaccatttgcgacgttcattgttcagaaggggactttgaaaagaggggatgttgttgtttgcggagaagctttcggaaaggtacgagctttatttgatcacagtggggaacgagttgatgaagctggaccctccatacctgtacaggtgattggtttaaataatgtccccattgctggtgatgaatttgagatcgtctcttcccttgatgtggcgcgggagatggcagaggcacgtgcggtatcactacgaagatganagaatatctgcaaaggctggggatggaaaggtcacgctttcctccttaagcttctgctgtatcagcgaaaaagatgtcaggcttaagatttgcntcaacctaatatcnaccg

SEQ ID NO: 15524 - DNA, 429 bp, Arabidopsis thaliana
  unsure at all n locations
  Clone ID: LIB25-058-P1-E1-D8
aagaagaaaccaaaaacctaaaagaacagacagaggaagaaaagatctttaatattttttttatttctcttcctggttgagaacttttacttcctctccccttaattgcaacaatgggaaattgttgctctcatggaagagattcagatgataacaaagaagaaccgaggccggaaaatggaggcggcggtgttggtgccgctgaagcctctgttagagcttctaaacacccgccagcatctcctcctcctgcaaccaaacaaggaccaataggacctgtcttagggcgaccaatggaagatgtaaagagctcatatacattgggtaaggagctaggtcgtggacagtttggggtgactcatctctgcacgcaaaaggccacggggctgcaattcgcttgcaagaccattgctaaaagggnactccnga

SEQ ID NO: 15525 - DNA, 489 bp, Arabidopsis thaliana
  unsure at all n locations
  Clone ID: LIB25-058-P1-E1-E1
ctgttacgcctgccgntaccgggccgaaattcccgggacgacccacgcgtccgaataaataatattccgtggcgcctgcggcagagatcaatgacgataccggatctctgtaacgatttggtcgatgagatactctgtcgcgttccggcgaggaatctgaaacggttacgatctaccagcaaacgatggaaccgtttattcaaagatgataggagattcgcaagagagcacatgcataaagccccaaaggagtatctacctctcatgttgacaagcgagtacaggatctgtccggtgagcatcaatctccaaggagatgttccttctgtagtgttaaagagagagcttagcctaccagatccggattattcacatcaattcgatataggtcgagtctttcactgcgacggcttattggtatgcaaccacgtangcaaggaatccccgataccggtntaaaatcctgggttgggaacccccngactngng

SEQ ID NO: 15526 - DNA, 415 bp, Arabidopsis thaliana
  unsure at all n locations
  Clone ID: LIB25-058-P1-E1-E10
attccttcttcgccaagttctctgagctatagaagaaggagggatttcttcagaccgccattgttgcccaccttctctcctttctatttttcgccgcattttactcgcttactgacaaaagtcttctactcaagtctctctctcgctctctttggaggctcaattagggttttgttgtcgtgagatttgattacacaaattgctgaatttggtttcgattattggtgttattgttttcgaagatttccaagtgagtttccgtttatggatctgactgggaggatttggagctagattcggcggtgttggaccgtgccgggaaccaatagggcttgaatcgccacatctcgggtgaccaaattcgggaaactaagtgacgaactttacctccccganaaaccccnggggggtnntg

SEQ ID NO: 15527 - DNA, 416 bp, Arabidopsis thaliana
  unsure at all n locations
  Clone ID: LIB25-058-P1-E1-E12
cgattacaatgcccttggcatttctgtgtggatttgataaagcaaaaggaccatttgcgacgttcattgttcagaaggggactttgaaaagaggggatgttgttgtttgcggagaagctttcggaaaggtacgagctttatttgatcacagtggggaacgagttgatgaagctggaccctccatacctgtacaggtgattggtttaaataatgtccccattgctggtgatgaatttgagatcgtctcttcccttgatgtggcgcgggagatggcagaggcacgtgcggtatcactacgagatgaaagaatatctgcaaaggctggggatggaaaggtcacgctttcctccttancttcctgccgtatcaaccaaaaagatgtccaaggctaaanttgcntcaaccttaanancntc

SEQ ID NO: 15528 - DNA, 443 bp, Arabidopsis thaliana
  unsure at all n locations
  Clone ID: LIB25-058-P1-E1-E2
caaatgaagaagacgaagcacactgagaattcaccggccagagatcaccaataagtgttgtagtttccggttacttcgaataaccttcaatggagcttccgttactctcgtatgctagctccgcgtcgttttcacggacaggcttatgctcttcttcttcttcctcctcaactagtatctatgagtttccggagagaagacggagtttaaaattgagattcaatggtggagaaaggtcacgaagcgttatagcttccgctgaacggagcagtgaagggattgagaagacaacagacaccgtcggtggcggaggaggaggaggagcaggcagatttgctggtactgccatgggaggttactacacttgatcgtggttttgctaactccaccaccgttgattttccgntttgggaacaaaanngngcggccntntctttnngctt

SEQ ID NO: 15529 - DNA, 433 bp, Arabidopsis thaliana
  unsure at all n locations
  Clone ID: LIB25-058-P1-E1-E3
agttccatggtgaagtatgttgtgttcaaccatatgagctctgatggtgattctgttatcttctctggtgataaggttccttgcgaggatcgagtattgctcattgcaaaccaccgaacagaagttgattggatgtacttctgggatcttgcactgcgtaaaggccagattgggaatatcaaatatgtgcttaagagtagtttgatgaaattacctctctttggttgggcgtttcacctctttgagtttattccagttgagaggagatgggaagtcgatgaagcaaacttgagacagatagtttcgaagttttaaggatccccgagacgctttatggcttgctcttttccccgagggcacagattacacaagaggctaaatgccaaaggagtaagaaatttgctgctgnaaatgggcttccgatacctgaaaa

SEQ ID NO: 15530 - DNA, 411 bp, Arabidopsis thaliana
  unsure at all n locations
  Clone ID: LIB25-058-P1-E1-E4
catattcttcttcatacgttcaataattcttacgaggacgagatcttcctaacgtctttgatcttcttcattaggagataagtctaaactggtcgaagatgttgggagatttcatcatcagactccttgtattgatattagggtacacatacccagcattcgaatgctttaaaacggtggagaagaacaaagttgatatcgaggaactcagattttggtgccaatactggatacttttggcgctaatttcatcattcgagagggttggcgatttttttatctcatggttaccgttatacggagagatgaaagtagtcttcttcgtatatctctggtaccctaaaacaaagggaacgaagacatgtgtatgaaacattgtttgaagncatncatggntcaacacgaganagg

SEQ ID NO: 15531 - DNA, 418 bp, Arabidopsis thaliana
  Clone ID: LIB25-058-P1-E1-E7
cattaatcaccgactcgcagaacctttctctcattaaatcttgtggaaacctcggaaattgaatctgcgtgagtttcaatcgcttgatcgatccatcaaaccctagagatggtgaggaaaaaggtaccggaatggcttaatagcaccatgtggtctactcctcctccgccatcttcttacgacgatggtctcctccgtcattcccccgtcactaagatgaaggaagaggcagaatcgatttccgttgctcccaggcttaattctgctcctccgccttcttccaacacttcggttccatcgccgtcgcatagaccgaggaacggtaacagtatctctggcggtagtggcgaatatggacattccgttggtccttccgccgaagacttttcccgccagggctcatgtctcaacgggggtt

SEQ ID NO: 15532 - DNA, 420 bp, Arabidopsis thaliana
  unsure at all n locations
  Clone ID: LIB25-058-P1-E1-E9
agcttacgaacaagaaaaaaagaagaatctttagtcacctttgagatcaaaagatgaacatcgctcacactatcttcggcgttttcggaaatgcaactgctctgtttcttttcttggctccttcgataacattcaagagaatcatcaagaacaaatccactgaacaattctctggtatcccttatccaatgactctcctcaactgtctcctctctgcttggtatggacttccctttgtgtcaaaagacaacacacttgtgagcacaatcaatggcacaggagcagtgatcgaaacagtctacgtgttaatctttcttttctacgcaccaaagaangagaaaattaagatctttggtatcttctcttgcgttttggctgtattcgcaacagtagctctcgtcctctctctttgggnctcaa

SEQ ID NO: 15533 - DNA, 423 bp, Arabidopsis thaliana
  unsure at all n locations
  Clone ID: LIB25-058-P1-E1-C9
aaagccaccgttgatatttcttccttgttgcttcttcaatggcgtcgttcgacgaagcacctcccggaaaccccaaagccggtgaaaagatcttcagaaccaagtgcgctcagtgtcacaccgtcgagaaaggtgccggtcacaaacaaggaccgaatttgaatggattgtttggaagacaatctggaacaactccaggatattcttactctgctgctaacaaaagcatggctgtgaattgggaggagaagactctttacgattacttgttgaatcctaagaagtacatccctggaacaaaaatggtgtttcctggactgaaaaaaccgcaagatcgtgccgatctcatcgcttaattgaangaagggtactgcttagacaaggntccgtccaagatatatgaagctgggaattttttttccc

SEQ ID NO: 15534 - DNA, 476 bp, Arabidopsis thaliana
  unsure at all n locations
  Clone ID: LIB25-057-Q1-E1-A2
acgttgccgggccggtccanaattaacgggtcgacncacgcgtccgcttaantctatctctaggtgacttaagagtaaaaaatggtanaggcagaggttgaagtagatgtggaaatcaaatctacggctgataagtttttcatgttctcnagaagatcacaacatgcctccaaagccactcgctatgtacagggatgtgatctgctcgaaggcgagtggggcgaacttggaagcatactcttgtggaaattaactgttgatggagagccaaaagtgtcaaaggatatgantgaggcgattgatangaanatgaatatgatccagtggagggtgttagagggacctctgaaangaacagtacaatattttctcgaaagacnatgaacagtnagccctaagcangngaggggtctgnaaagtgtngtngaantnggaaccttgagctatgnaggnngaaattgantgagnaaaggggg

SEQ ID NO: 15535 - DNA, 434 bp, Arabidopsis thaliana
  unsure at all n locations
  Clone ID: LIB25-057-Q1-E1-A4
tctcactcatccaaatctttgatcatctcatcatcattggacttgaagctaactccagagttttatccagattcatcattttccaacgtttttcttcaatcgaatcatcagcgagtttggttccgacgacgatcttagtagcttcataagctcaagattcttcaggtttcggtggattttcttgagctcttctaagcttctccattttgtgagcctccgatttcgaacctggtagtgttgtggatctcactggaccacgaagctttcttcactgagctaagcttgaagtcaattcctctgttcgacaatcaatagaggaagatgaattatttcccagacgaggttatagagcacgtgtttgacttcgtagcttctcacaaaagacaggaactccgaaatctccnggtctggaaattcatggnacaagantcagg

SEQ ID NO: 15536 - DNA, 230 bp, Arabidopsis thaliana
  unsure at all n locations
  Clone ID: LIB25-057-Q1-E1-A5
tnactttgtgctgcactactcaacctcaatggccgcctcaacaatggctctctcctcncctgccttcgccggtaaggccgtcaagctttcccccgcggcatctgaagtccttggaancggccgtgtgacaatganggaagactgttgccaagccaaagggcccatcaggcagcccatgggtanggatctgacngtggtcagntantngggtcatcccccggnnaancaac

SEQ ID NO: 15537 - DNA, 433 bp, Arabidopsis thaliana
  unsure at all n locations
  Clone ID: LIB25-057-Q1-E1-A6
taatgcatgatgagagaaagcatgggataaagtcttcttgttacttatttatatttctttccatctatcatggggataatgtatacatatttgcctacctacatagtatatatgcatgtatgtgagtatatataagttaagtctttctcactttgcacaacatctctatgtgctaaggcatctctttctctccctttctcaccaaatactctctcaatttctctctgccactctctttctctagagattttcataatgaaaggtaccaagaagaagacgccatgcaacaaaaagcttggaggatacttgaaagagcaaaagggaaggctttacatcatcaagaagatgtgtggtcatgctcatttgttgggcatgactaanttacaacttanatggtgttnnatatacatgnataaggcncaaggcattattg

SEQ ID NO: 15538 - DNA, 422 bp, Arabidopsis thaliana
  unsure at all n locations
  Clone ID: LIB25-057-Q1-E1-A7
tangcgaatgcatcgccttcgtggttgctgatacgcagagacatgcggatgctgcagtaaaccttgcagttgttgaatacgatacagaggatttggaaccaccaatcttatctgtataaggacgcggtcaagaaatctactctgtttgacattatccctttcctttatccacaacaanttggtgatacatcaaaaggaatggctgaagctgatcaccaanttctcagctcggaaataagactcggatcgcaatacgtcttctacatggagacacanacagctcttgcagtgggagatgaagacaactgcattgtagtctatagttcaacatatgaccctcngtacgttacagtcatcggtcgctggcttgcctaagcatccctgaaaaataaaatccgtgtccataaccagnacgttttgng

SEQ ID NO: 15539 - DNA, 430 bp, Arabidopsis thaliana
  Clone ID: LIB25-057-Q1-E1-A8
ttttagctcccaattcaacgattatcaatctgaagcaacaatcttatacaaaaaccaagttccagttgcatcgtagcaacagaagaactctatcgataaactgcgtaaacagtggcggtgatgaagagaagattactcagccgttggatggagtggagataagattcagaagaggatccagaaggaaaatgagggaagagggttcaggagaaggaggaggacaaagcgggaagaaaaaagagactgttcaaaagccatgggaagagatgacattgaatgagaaggcattggagctttatgttggagagaaaggtttgttgttttggctaaacaaattggcttacgcgtcgatatacattgtcattggaggttggatttttttccggtttgttggaccggcgtttaatccttaacaaactccgaatacaac

SEQ ID NO: 15540 - DNA, 55 bp, Arabidopsis thaliana
  unsure at all n locations
  Clone ID: LIB25-057-Q1-E1-B1
actgtagattccatcaaatctatcaatatccgtnaagttctcactcangctatca

SEQ ID NO: 15541 - DNA, 422 bp, Arabidopsis thaliana
  unsure at all n locations
  Clone ID: LIB25-057-Q1-E1-B11
ggtggagcattagtcaggaaacgagtactctcccccttaaatactcttttccctgtcaaattcagaggtgacctgcatgatatcagctgtggtaaccaccaacaaattacttattctggtcagtctaatggattctgcaactctgtcgcacaagatcacataaaggctaatacccctagtaggttacatctctccactactcctacaaaccacaagttgctgggagtggaagaatgtctcaaacagtggtagactctcgtctatgggtcttcactgatggtccattgcttgactctgtagatctccgccaacccgtcaaanggaggtgaggtttgccttanattccccactatatgaaacgtctagcacacccaataagcccttacctttgtganaaggaaaatatctgtcnctccgccggg

SEQ ID NO: 15542 - DNA, 416 bp, Arabidopsis thaliana
  unsure at all n locations
  Clone ID: LIB25-057-Q1-E1-B3
gctcgcttgccttcttcttccgctcacaatctcttcctttctcgttccttctcttcttcgatcagacgattcaatcgcttctcactcaaaccacttcgctccttcgcatccatgtcttcttcttcccccgacgctgctcagactcctctaaccaccgctccttatggctcctggaaatctccaatcaccgccgacatcgtttccggagcttcaaagcgtcttggcggcancgccgtcgattctcatggccgtctcgtcttgctcgagtctcgccctaangaatccgggagaggagttttggtgctacaaggagaaacatcaattgatattactccanaagactcgctggtgagaaacttaaanacaagaantacgggtggtgggtgntttgnannatttcatcaanntgatnacag

SEQ ID NO: 15543 - DNA, 424 bp, Arabidopsis thaliana
  unsure at all n locations
  Clone ID: LIB25-057-Q1-E1-B4
agcccgtgatggcctgatctgcttcctcctcctccttacttcttgtttccatcttggtttcaaatttcttcaaagattccgatcatcttcacgtcggagtacacaatctgaaaccgatcatcatcatcatcaattggggtttttaatccctagaatcagtagaaaatatcgatcattgagcttcgattctggtctccgtttgattgtttcggacaatcagagctttgagtctccgaaaaggttggttatgtcatcttctgttccaaactcggaccggaagattgttactggtcccgccggttatactcttgaagacgttcctcatttctccgacgacttcctgatcatccnacatatccaaatccattacnagacaatgcagctaatccgttgttanagcagtaatttgncnaacagggatgng

SEQ ID NO: 15544 - DNA, 426 bp, Arabidopsis thaliana
  unsure at all n locations
  Clone ID: LIB25-057-Q1-E1-B5
tattggaccgatgatggccttggccactttgagttctttcaaatggcagaagacatcggtgcagccccgatatgggtgtttaacaacgggataagtcacaatgatgaagttgaaactgccagtatcatgccctttgttcaagaagcactcgacggtatcgagtttgcccgaggagatgccaattctacttggggatctgttcgagctaaaatgggacgccaagaaccttttgaacttaaatacgttgctattggaaatgaagattgtgggaaaacttactacagaggaaactacattgtgttctatgatgctatcaagaaagcctatccagatatcaaaatcatctccaactgcgatggatcctctcatccactcgaccacccagctgattactaatgactatcacatttaacacntccngccanc

SEQ ID NO: 15545 - DNA, 431 bp, Arabidopsis thaliana
  unsure at all n locations
  Clone ID: LIB25-057-Q1-E1-B6
aaantgaactcctaatcagggttcattttatagatttantatnnagttattgcggataaagaacaatagtaatatggggatgtctaaaagtatcaaggttatcttatctcttgctctcgtagtgttcttggcccttgctgcaaccaaggttgaggccacaagatacataacttatcctgctatcgatcgtggagatcatgctgtacattgtgacaaagcccaccctaacacctgcaagaagaaagaagcaaatccttaccagagaggatgcgagaagatcantcgttgccgtggtggataggtggaaaacagtgaattaaccaacccacccaagagcatannatatacatcaatacattatctatatacacacttttgacatcctcatattcaattttaatgatnataattttaagcccaataagtggcnt

SEQ ID NO: 15546 - DNA, 426 bp, Arabidopsis thaliana
  unsure at all n locations
  Clone ID: LIB25-057-Q1-E1-B7
aagagatgtcagtctgaaggctgtggcaaaagtgctcaaggtagtaccgacttttgcaaagcacatggaggagggaaaaggtgtgcgtggggtcaacccgagactgagtatgcgggacagtcttcttctggtccttgtacctcgtttgctcgcggtaagactggtctttgtgcactccataacagtctggttcaggataaccgggttcacggaggaatgactataacttccgagagccaagaaccgagagtaagcagcagcgaaacagagaacgaggaagagtttagcggttctcaagacatgaacatggatacaatgaaagcgagaagtgctaccggatctccagagactgatgttgatctcaatgagtatgaagcangattggggttagctccggaaagaaaaatccaangtgggaantttgat

SEQ ID NO: 15547 - DNA, 423 bp, Arabidopsis thaliana
  unsure at all n locations
  Clone ID: LIB25-057-Q1-E1-C12
aaagacaaaaatatatataaaaaagaaaaaaaaagaaaaaaaaataattgtcttgctctgttctatttaacttttcttatatataaaaaaaatggcgaaaaatttactagcaatatgtctggtgtttatggttgcatcaagtgtggtttatgaagtgcaagggactttcttgttaaagctttacttgaggaggaagtttcccagacgttgtatcgactttgccccttatgctggcaaaggtatgttgatgctcgtgagcaaccttgaaggtggatgtcccgcaactagagagttcaaaacaaattcttttcaacgttcaagtcttacatgaagctttatcagctcaagcatcgatatccgcatnngaaaaacatcgatgtggaagatgaatgggaagatgtgaattgctttccaaaggcaatg

SEQ ID NO: 15548 - DNA, 429 bp, Arabidopsis thaliana
  unsure at all n locations
  Clone ID: LIB25-057-Q1-E1-C4
gctctctctctcgcctaccancgttttcnagttcgctatcanacatatttgaaacccnataactcataaagcttcactcttttccanaatctcttactccaaagttttcttctttccccccaaaaaattataatggtcgacgttgatcggagaatgaccggtctcagaccagctcacgccgctggtctccgtcgtctctctgctcgcgccgccgcaccancaacaccaacggttanaaacagtctcgtctctttctcntctctcgccgatcaagtaatctcacacttacacacttcaaggatccaagtccaaccgggtcnaaccgactccgaattcgctangagcagaatcatagtttgcattcgnttttccaacggaantccgtgctggttctcaaagccggtttaccacntcgggggccggaatttg

SEQ ID NO: 15549 - DNA, 403 bp, Arabidopsis thaliana
  unsure at all n locations
  Clone ID: LIB25-057-Q1-E1-A10
caaaaagactcatgttcatccgatggggcttaacttgtggagggataatgttgtgcatttcactaagatacatacaaggcttctaaacactcttcttgatctagtgcagaaggaacggataggtgaagttattgatagggggttgatgaggaatgtcattaagatgtttatggatttgggtgaatctgtgtatcaggaggattttgagaagccgtttttggatgcgtcttctgagttttataaggttgagtctcaggagtttattgaatcttgtgattgtggggactatctgaagaaatcagagaaacgccttactgaagagatagagagggtagcgcactacttagatgccaagagcgaaagagaagattactaatgttggttgagaaagagatgantgcca

SEQ ID NO: 15550 - DNA, 425 bp, Arabidopsis thaliana
  unsure at all n locations
  Clone ID: LIB25-057-Q1-E1-C8
tcgccggacatgctagaagataacaatccacacccaaacttanccagagagacaatctctgattcacgtccactacaattaccgaatctctccgaagccaccgatcacctacgctagtttcagtggcaattcgaagcttccaatgagtttgttctgtaattcaatcgaaaccctttatccaaaaccattcctttcacacaaatctcacttctttaccttctccaattccaaattccaaaaccctaaattcacaagcttcccacttcgtcaccaatggcggatcgaatcatgtctgaaatcagcatcttcatcagaaatcgatatggtaagaaacaaagaaggtatctttgcaccaaaggagaagaaagttgtagtcttatgggacttagacaacaaancaaccacgangtcaacatacgnaagcg

SEQ ID NO: 15551 - DNA, 390 bp, Arabidopsis thaliana
  unsure at all n locations
  Clone ID: LIB25-056-Q1-E1-F12
gttcagggaatgggtttcatagccggtttgttgcttctttatatgagcgaagaagatgcattctggttattagttgcattactcaaaggagctgtccactccccaatagaaggattgtatcaggcagggcttcctcttgtacagcaatatctgttacagtttgatcagttggtaagagagctaatgcccaaactaggagaacatttcactcaagaaatgatcaatccgagtatgtatgcaagtcaatggttcataaccgtcttttcgtattcacttcctttccattcagcgctacgaatttgggatgtgtttctagctgagggtgttaaaatcngtgttcanangtccggtttagcattattgaagcattgccatgatgatttgttgaaa

SEQ ID NO: 15552 - DNA, 473 bp, Arabidopsis thaliana
  unsure at all n locations
  Clone ID: LIB25-056-Q1-E1-F2
acnttgccnggccggtccaaaattaacgggtcgacccacgcgtccggcgatggctgcaactgcaatctcttctctttccttcccagctttgggtcaatcggacaagatctccaatttcgcatcttctcgtcctctcgcctccgcaattcgcatctgcacaaagttttctcgcctttctttgaattcgcgttccacttcgaaatctcttattcactgcatgtccaatgttaccgccgatgtgcctcctgtatcagagacaaagtcgaaattcctaaaagcttacaagcgacccatcccgagtatctacaacacggttttgcaggagctcattgtccagcagcatttgatgaggtataagaagacttatcgttatgatcctgtttttgcccttggatttgtcactgtatatgatcagctcatggaaggatatccgagtgattaagaccganatgccanttttaaagggtanattg

SEQ ID NO: 15553 - DNA, 398 bp, Arabidopsis thaliana
  unsure at all n locations
  Clone ID: LIB25-056-Q1-E1-F3
aaaataaccatttttaattcccagcctctttttatacntantctaaattgacanacacatcattcgctctctttctcttctttctctanctctcttggttttttgctaaaaacagagcattttctctctagctctcactgtttctttaccataagtttcgtcatattagtacatgcaagtgtaagggatggtgatggaggaaggaagaagcatacaagaagggcttttgcagctcaagaacaaaaacgacgattcagagtgtcgtattactgcttgtgttatccttagcacttttgtcgccgtttgtggctccttctcttttggtgttgctactggttacacttcaggtgctgannacaggagttatgaaggncttggatntttccaacgccgcaatt

SEQ ID NO: 15554 - DNA, 418 bp, Arabidopsis thaliana
  Clone ID: LIB25-056-Q1-E1-F6
gcgcctcctcctccactactactaccaccaccacctttggtttccgtttctctgtatattcattcctcgaaaccctccaaaaacccatttcaatcaatttctcgcttttgccctctacgtttctcgtcctgggtttctcaaatccagctcagtttattccccaattcaataatcaaaactctgtcttttggtgggtcttcgtcaaagctctctcctttacggtccttttctccagcgcatgaaataataaaggacacctgtatttattaaaatcactacattttccgtaacaaaaaaaatcaaactttgttttctcaatggacggtgccggagaatcacgactcggtggtgatggtggtggtgatgggttctgttggagttcaagatccgaaaaaacacggatggcaaccgggatttt

SEQ ID NO: 15555 - DNA, 413 bp, Arabidopsis thaliana
  unsure at all n locations
  Clone ID: LIB25-056-Q1-E1-F9
agcttcagtttgaggctgcttgggcattgacaaacattgcttctgggacttcagagaatacaaaggtggtcattgaacatggtgctgttccgatttttgttcaactattggcttctcagagtgatgatgtccgtgagcaggctgtgtgggcattagggaatgttgctggtgattctccacggtgcagagatcttgtccttggtcaaggagctttgataccattactctctcagttgaatgagcatgctaaactctcgatgctgagaaatgctacttggaccctctctaatttctgcanggggcaagccacagcctccctttgaccaggtccgtccancacttcncagcccttgaacgncctgattcattcgactgatgaggaanntgttaanggatgcatgttggggctctcc

SEQ ID NO: 15556 - DNA, 430 bp, Arabidopsis thaliana
  unsure at all n locations
  Clone ID: LIB25-056-Q1-E1-G4
agtagaagaagcgtgtggattggacatgggcttaaagacacacaaattctttctacgaattttgttaatttttgttatatttccttcttcactattccgcttagagcacaacaccacgatgacgaccaanggcatgganaaaaggattaagctgattccgggttctcaatccatggcgagaaagaagattttggctgaaatgggatatgattacactatcgtgactgcagacattgatgagaaagctattaggacagagaagcctgaagatttggttgtggctcctgctgaagccaaggnaaatgagattatatccaaattgggaaggtaaaaccaatttgcaaaagattctcaaacaactcctttgnataccgcanacacnggttgttgtgttcaaaangngttnttnagnnaaaacccccccccnaag

SEQ ID NO: 15557 - DNA, 424 bp, Arabidopsis thaliana
  unsure at all n locations
  Clone ID: LIB25-056-Q1-E1-G5
cttcatcatcatcggtttcttcttttgattccacaatgaagcgtttgctgctgcttgttgtcctctgcagcctttctctatcaaggtgtgaatcaaaagtcgtgccgtatgattattctgcaaccatcgagtgtctagagatacctttaaaaccacagtacaatggaggaatcatcgtcagccctgacgtacgagatggcaccctaggctggacaccattcggaaacgcgaaagtcgatttcagaaaaattggaaaccataatttttttgttgcacgagacaggaaacaaccttttgatagtgtctcacagaaggtttatttggaaaagggacttctctacactttctctgcttggttacaagtaagtaaaggaaaggctcctgtgaaagcagttttcaagaagaatggtgaatataaacctng

SEQ ID NO: 15558 - DNA, 314 bp, Arabidopsis thaliana
  unsure at all n locations
  Clone ID: LIB25-056-Q1-E1-G9
gatcatagagctcggggattgaacccatcanactcagtgaccgttggaagttgtggaagaatgtcactctcgacaatctcgaanctgctggcgtgacctactggaagcatctcatattgaagcctaatggttcgaacttgaggcaantggtgtacaagtcaaaggtgangaagagtctcgtgaagaaaggatacancatcgttggcaatatcgggagatcaatgggctganttggttgagggatacccctgggaagggtttttanggctccccangatcccacncnacgnangttacgcttcntaagaaatcna

SEQ ID NO: 15559 - DNA, 430 bp, Arabidopsis thaliana
  unsure at all n locations
  Clone ID: LIB25-056-Q1-E1-H1
ttcttctattagccgccatggtgaagtactcgcaagaacccgacaatcagaccaagtcttgcaaggctagaggatccgatcttagggttcacttcaagaatactagggaaacagcgcacgcaatcaggaagctaccattgatcaaggcgaagaggtaccttgaggatgtgatacctcacaagcaagcaattcccttcacacgtttctgcagaggtgttgggagaactgctcaagctaagancaggcactcnaatggtcaaggacgttggccagccaaggtctgctcagtttgttcttgatttgctcaagaacgctgagancaatgctgaggtgaaaggtttggatgttcatngccctcntcatatcacacctccnggtgaacccagggccgcannancaacnaggacannggacttacncgttnctcatg

SEQ ID NO: 15560 - DNA, 410 bp, Arabidopsis thaliana
  unsure at all n locations
  Clone ID: LIB25-056-Q1-E1-H10
agaattaatctcagctattttgtcttaacgactctttattgtcccgacacacgaaaatggcgtctcttagccaaatcaccctgccacgcgcgccgtcgtcggagattggcctcttacgccgtcgattggagcggccgatcatcagaacccggatcggattcaacggccggattgcgagcgtattgactaacgcaggggaccaagcggtgtcggtaaaagcgagtgtgagccagaaggtgattgaagaggaagccaaagttattgtgggtacctacgcgcgagctccagtggttctctcgagtgggaaaggttgtaaattgttcgaccctgaanganaagagtatctggattgtgcatctggaatcgctgttgaaaggctcttggncatggaaattcctgaatgggnntcg

SEQ ID NO: 15561 - DNA, 394 bp, Arabidopsis thaliana
  unsure at all n locations
  Clone ID: LIB25-056-Q1-E1-H11
taaacagtgtttcgatcttctggtctcatcgagatattaaaagaaaatccagattacaaattctttttctatttttttgtggagtttgaatctatccatcttctgagagaagaaaagggaacaactttttttctccatttcacctannaaattgttcatcccaagtttctgtctttggtttcatctaagtttcactcntggtgattctggaagataagtcgctgagttaaagttgcanatcntgaggttaaganaaagaacgtgagtgttgtgtaatgngangaggtaangggacnagagaggaagtggaaccacngaggcatgattttgtgttgccaagggggtgagaaggaanagagttangnngtnnggaaagntgaaggancgnatcaag

SEQ ID NO: 15562 - DNA, 386 bp, Arabidopsis thaliana
  unsure at all n locations
  Clone ID: LIB25-056-Q1-E1-H3
tagggcaaatgctcagcagcctaagctatttgttgggatgattcttatccttatctttgcggaagcgctcgctctatacggcctaattgtaggcatcattttatcttctcgagctggtcagtccagagcagaatgagagcacaaacaaatgttaaaatttccaggtacttccttatcgatcaacttataagtgcggtatgtagtatcgggagccgatattttgtggattcttggtttgggaagcagatgttgccacctcgctttccttggttggtggttacttgagtgtaggatgttatttggttggtacggtaataaaaaaaagagcttggcatttgttttgtattcttgtagtgtctgcatctgtcntgatgaactganaatat

SEQ ID NO: 15563 - DNA, 427 bp, Arabidopsis thaliana
  unsure at all n locations
  Clone ID: LIB25-056-Q1-E1-H5
cgataagctaattttggttncaagtttaattgaaattttgcctgggtaantggttttttgnttggttccaagtttatcaaatccttgttaaggtaaatggttttttttccaaaaaaacttgaaatccgatcttcttcttcttcttcttcttcctctgcttcttgtgttctctgctgctgctgctactactggtttcttgcaatggtaactttgagtatatttgaaaacctgattttgatgcgccgtatatgacagatttttgtgaatactgagggctatttttcttttatcactaatctttgttgtttggtattgatgtagttaatcatttgtagttgtatgttgttatttttggtgagatttaagccctgtgatgatgactctaatgagtttgagtggtgccgcttgggttttttcttgctgaaaa

SEQ ID NO: 15564 - DNA, 425 bp, Arabidopsis thaliana
  unsure at all n locations
  Clone ID: LIB25-056-Q1-E1-H6
ggaggtggaacctttgatgtttctatcttggaaatctcaagtggtgtttttgaggttaaagcaacaaatggagatacctttttgggaggagaagactttgacaacaccttgttggagtacttggttaatgagttcaaaagatcagataatattgatctgactaaagacaaccttgccctccagaggctgagagaagctgcagagaaggccaagattgagctctcatcgacaactcagaccgaaatcaacctgcctttcattacagcggatgcttcaggagctaagcacttgaacatcaccttaactaggtcaaagtttgaaggtttggtgggcaagttgattgagaagaacaagatccccgtgccaaaactgcctgaaggatgctggagtcacaattaaggaagttgatgaagttcntcctgttg

SEQ ID NO: 15565 - DNA, 386 bp, Arabidopsis thaliana; identical to SEQ ID NO: 15562
  unsure at all n locations
  Clone ID: LIB25-056-Q1-E1-H7

SEQ ID NO: 15566 - DNA, 399 bp, Arabidopsis thaliana
  unsure at all n locations
  Clone ID: LIB25-056-Q1-E1-F10
attctctgtttttgtttcttcttctttcaaaatctcaagcaaaagaaaaaatggagctattcacaaaaggtaacaacgttaagttacgtagccacctagataagtttttagtcgccgacgatgaccaagaaaccatccgtcaaagccgtaaaggagatgcacggcgtgccgtttggacggtggagcccgtcgtcgataaacctaatctgataaggttaaagagcagccacggcacgtacttaacggcgagcaacaaaccgttattgttaggtatgaccggtgagaaagtgactcaaacggcgtcgtttaacaagctgatggattggcaaacgcagtgggaaccggagcgagatgggtttcaggtgaagcnaaaatctggtgcgggtaagtggatgaagg

SEQ ID NO: 15567 - DNA, 423 bp, Arabidopsis thaliana
  unsure at all n locations
  Clone ID: LIB25-056-Q1-E1-C5
gccataaccgaagactgtcctccacctcctgagtttcactctgtccgcgcaggtgatgaatattatgacgatgatgaagaggaagagattgaagaagatgaagatgaaggtgagggtgaagatgaagaagatgctgataatatagagtacgaagtagatgatgatggtaatgtcgttatggtgttgtacggagatgaagaagaaggagaagaagaagaagatggagctagtgaacaagaagaaggacaggacaagtcaactaatggtagaagagaaacccggagaacagttaacgtnngaagttaggactgtccgtaattcctttgtttttgggtcatgttttgggatatnaggtcccacctcaaatccaaattgttggtgttcccnataataccanctaagaagtttntgagaacctaacct

SEQ ID NO: 15568 - DNA, 419 bp, Arabidopsis thaliana
  Clone ID: LIB25-056-Q1-E1-C6
gagcttcgttgtcttccccattgcaattagggttttcaaaacgggtaatcgaattcggtggtgctcggctttgaaattgaggatgagatcctttccacttccttctacctgctgacaatgggcaactgcggtactagagacgaggctgccgtcttcactcctcaagctcaagcccaacagctccagaagaagcactcccgatccgtctcagatctgagcgatccatccactcctcgcttccgagacgactctcgcactcctatttcgtatgcccaagtcatcccctttactttgtttgagcttgagaccatcaccaagagcttccgcccagattatatactcggagaaggtggtttcggtaccgtctacaagggttacattgatgacaatctccgcgtcggcctcaagtctctcccctg

SEQ ID NO: 15569 - DNA, 416 bp, Arabidopsis thaliana
  unsure at all n locations
  Clone ID: LIB25-056-Q1-E1-C7
agatggacatcaagttggcaggaaggcgtcatttgccttgttataattgcatgcagtggttttggtgctggcgtattttaccgtttcagtgcttcagttatatttattctcctctcagttggtgtggcagttgttgcttcagcagttcttcattatcgccaagcttatgctctgcctctaggttctgggtttagctgtcctggtgtacccattgtgccatccgtttgcattttcttcaacatcttcttatttgctcagttgcattanggaagcangganaanatttgttgttgtcagtgtgcttgcaactgccgtntatgccttgtaannggcangtacacccanatncgagcaaggttggataacanangggaccctgaaaactgaaangnaacctcaagtaanngctacattng

SEQ ID NO: 15570 - DNA, 69 bp, Arabidopsis thaliana
  unsure at all n locations
  Clone ID: LIB25-056-Q1-E1-C8
gtacgaaaccctaaatgcctcttcggtgctgganntggatcaaagcttgttagagtctatgngggccgc

SEQ ID NO: 15571 - DNA, 397 bp, Arabidopsis thaliana
  unsure at all n locations
  Clone ID: LIB25-056-Q1-E1-D11
cctaataaaatcacaacaaattaacacaaaaaaaccagatcttaaaactctctctacccaccaagaggatcaaccagtctcttccccttcagattctcctttccacagtgaatggatcaacaagaccatggacagtctggagctatgaactatggcacaaanccataccaaaccaacccgatgagcaccactgctgctactgtagcaggaggtgcggcacaanccaggccagctggcgttccaccagatccatcaggcagcaagcaagcagcaacagctggcacagcaacttcaangcattttggganaaccaattnnngagagattgaagaangactancggatttcannganannacaggccttcgccttgngagantcaagnaggatcntgana

SEQ ID NO: 15572 - DNA, 487 bp, Arabidopsis thaliana
  unsure at all n locations
  Clone ID: LIB25-056-Q1-E1-D2
gtttacgcttgnccgtgccggtccaaaaattancggggtcgacncacgcgtccggccacaaagaagaagaaaaccttcttcaacgtttaaagtctcttctctctctctctcttaacttctcccattttctttgaactaaagatcaatggctcacaaccattctaatgaagacggctctattggaacctccttgcatggagtcacggcaagggagcaagtcttctccttctccgtccaagaagatgtcccttcatctcaagccgtccgaacaaacgatccaacggctaagtttgccctaccagtggactccgaacatagggcaaaagtgttcanaccactatcattcgctaaaccacatatgagagccttccacttaggatggatctctttcttcacttgcttcatctccaccttcgcatccgcacctctantccccgtcattcgcgacaatcncgacctgaacaanaaccggannntngggnaatgg

SEQ ID NO: 15573 - DNA, 420 bp, Arabidopsis thaliana
  Clone ID: LIB25-056-Q1-E1-D3
ggaagggttatcggcgattatgcggtgggtcgacaaatcgggtcggggtcgttttccgtggtttgggaagggaggcatcttgttcatggcaccgtcgttgctatcaaggagatcgctatggctcggcttaataagaagttgcaagagagtctcatgtcggagattatcatcttaaggaagattaatcatcctaacatcattcgctttatcgacatgatcgaggctcccgggaagataaatttggtgttggagtactgtaaaggtggtgatctgtctatgtatattcacaaacatggaagtgttcctgaagctactgctaagcattttatgctgcagttagcggctggcttacaagttcttcgtgacaataatatcattcaccgcgatttaaagcctcagaatcctcctctatccacaaga

SEQ ID NO: 15574 - DNA, 420 bp, Arabidopsis thaliana
  Clone ID: LIB25-056-Q1-E1-D6
tagcggttttctcatcttctctactcttctttctcttttctgagaaacccaaaagacaaaaacgaagaagaagattaggaaatcatcttgagaaacaggaggtagcaggagaatatgggggacaaggaagaagtccttgaggctgttttgaaagaaactgtggatctggagaatgtacctattgaagaagtttttgagagtctgagatgtagcagagaaggtctcactacagaagctgctgatgaaaggctggctctttttgggcataacaagctcgaagagaagaaggaaagcaaattcctgaaatttcttggtttcatgtggaaccctctttcttgggttatggaagctgctgctatcatggctattgctcttgctaatggaggagggaagccacctgattggcaagactttgttggt

SEQ ID NO: 15575 - DNA, 481 bp, Arabidopsis thaliana
  unsure at all n locations
  Clone ID: LIB25-056-Q1-E1-D7
acgttgnccgtgccggtccaaaaattaacgggtcnanngcncgcgtccgnnggacgacgtgggttcaatttctaaaattctcctctctcaacgcaatcaccaaatccaaatttagggtttcttttctctttctgcgatcgatctctgaaaactcataactgttgtttaatcgtgaagatggcatcaaacggatctttctctgctcagagaaacgcaaacgctagaacaacgatgaagagaagaagcgacaatcgcggttacggtggcggaatcggaggttatcangaggagacgaaccgttacgcgccgccgcaaaaacgtttcagatcacaagcgcaacagcaattcccatctggncataatcctctgtatcatcatcatggtagtaataataataacgtgtcnagggtttcttctcaatcanataacaattgccgggtgttnatgtgattgcttctaaattcaagttttgcatnacntt

SEQ ID NO: 15576 - DNA, 414 bp, Arabidopsis thaliana
  unsure at all n locations
  Clone ID: LIB25-056-Q1-E1-D8
aaagttttaacccaaaaaagcaaaaaaaaaaaaacttttgttcactcgatggcggcgaagagaatcggagccggtaaatctggcggcggagatccaaacatattagcgaggatttcaaactccgagatcgtgtcccaaggaagacgcgcagcaggagatgccgtcgaagtatcgaagaaactgctccggagcaccggaaaagcagcgtggatcgctgggacaacttttctcatacttgttgttccattgatcatcgagatggatcgagaggcacaaatcaacgaaattgagcttcaacaggccagtctcctcggagctccaccatctccaatgcaaaggggattgtaagaatcccttattanggattagggtcctctgttttacgagtttttttggttaaaangttgttggttt

SEQ ID NO: 15577 - DNA, 394 bp, Arabidopsis thaliana
  unsure at all n locations
  Clone ID: LIB25-056-Q1-E1-D9
ctagatttctcatcaatcgatcacaattccctcaaaaatggcggatccagccaccaagagatctctcatgataatctcctcaacctcttcaaatcccagcaagatcttctcaatcacttcttcaaacatctcgatctctctcaaaccctagatttctcacgcattctcctttccancaccggtaccgttttcttcaccggcgtcggtaaatccgctttcgtagctaanaaggtntcacagacgcgcgtntccttaagcttccgttcctctttcctcncgggcnctcgatgcggcttcatgggtgacattgggcgctctttcgccangccgatgttctngtttntcttcagcnaatntggggngccaccgganggaggcttnngnngtcntngtc

SEQ ID NO: 15578 - DNA, 414 bp, Arabidopsis thaliana
  unsure at all n locations
  Clone ID: LIB25-056-Q1-E1-E10
taatgactttagcctaaaaaaacttaagtcagtgtaaaacaatatcgatgtgtgattaagaagagatccaatttaacattacccacacaatcatttgattatttcctcctctccgtatctgtgtctctcttctcttgatcttttagtgttcttgctttgtcgcttcaacgcttaagtttggatttgtgtgagtctgcataatcatggcgaggaagatgcttgttgatggtgagattgataaggtggcggctgatgaagccnacgcgacgcactnngantttgatttgtntgtcatcggtgccgggangtggcggtgttcgtgctgcnagggttttcggctaancatggcgctaaggttggtanttgtgagcttccattncagccnnngtaggctctggagganattgggacggg

SEQ ID NO: 15579 - DNA, 53 bp, Arabidopsis thaliana
  unsure at all n locations
  Clone ID: LIB25-056-Q1-E1-E11
atgtttatgggagtcnatgagcaagactatggtcacgatntcgctaacattat

SEQ ID NO: 15580 - DNA, 421 bp, Arabidopsis thaliana
  unsure at all n locations
  Clone ID: LIB25-056-Q1-E1-E3
aacactaagctcagtagtgctggtcttgtttacaagcattttggaaaggagatcatagctaaggaacttaatgtcgaacaagatcaccctgatgttcttcggttgtttttagctgtctacaagagcttcatggaggcaattgatgctgtggacaatggaataaaccggtatgatactgatcagcctccacgatatgtgaacaacacacatctgtctccaagggttggaagattaaatctggattggattgaccctgaccagtcacaagaaaaggagaatgaagctttccaacgtgcaatggctctagctggaaaagagttcctcgaaagtgttcagttccatgcaagatcgtggttaccggctcgatcaattgtgatgcantgtcctgaagaaaagattcaagacagaccccaaccgtgag

SEQ ID NO: 15581 - DNA, 419 bp, Arabidopsis thaliana
  unsure at all n locations
  Clone ID: LIB25-056-Q1-E1-E6
ccgtctctaaaactccgacgaacgaaaaatgaagtcattagcttcgccgccgtgtctccgcctgataccgacggcacaccgtcagctcaattcgcgtcaatcttcctccgcctgttatatacacggtggctcttctgtgaacaaatccaataatctctcattctcctcatccacatccggatttgcgtcaccactagctgtagagaaggaattacgctcttcattcgtacagacggctgctgttcgccatgttacggggtctcttatcagaggcgaaggtcttagattcgccatcgtggtagctcgtttcaatgaggttgtgactaagttgcttttggaaggagcgattgagactttcaagaagtattcagtcagagaagaagacattgaatttatttggggttcccgggcagntttgg

SEQ ID NO: 15582 - DNA, 481 bp, Arabidopsis thaliana
  unsure at all n locations
  Clone ID: LIB25-056-Q1-E1-E7
cgcttgcccgtgccggtccaaaaattaacgggtccacncncgcgtccgcaatatgagcctcgcgtttgctatcgacgacgacactcgtcacaccgccggcttatttcaacaaatcgccggcgtttttaacggccagagttggggtgagaagaggaagggctaacgttaangctgtgagcaatagttcgcaaggagccgtcgatggaaccgtttacaaaggtgtttacggtccttgngaccattgaccaagccgatgtcaaanaggttattttgtacagatcaggactantaactgctgctgcatcttttgtaactgcttcttctgctgcctttttaccaggaagactcttggttaantgaaacaancaancaaaaccatgatctgttttactttgttgngtgccnantggtttggggctatcnctgtttctaatacatagatnngttacggagantangagggacccntccnncnttatgg

SEQ ID NO: 15583 - DNA, 515 bp, Arabidopsis thaliana
  unsure at all n locations
  Clone ID: LIB25-056-Q1-E1-C3
ctgtttacnttgcccgtgccgggtccaaaaattaacggggtccaanccngccttccgnnctaagatcnagaattcaatttgtaanggtttgggagaatggcgaagcgaagctgatnaatccggcgacacgaagacggattaaacaaaccgccgatgcttattaacccgaaaccaatcanaccatggttcacggtgactcgtccgatgcgttacatgctccgtgaacagagacttatcttcgttctcgttggcattgcaatcgctactttggttttcacaattttccctccgctccacacaaatccaaccccttactcgggatcctttctccgggttacgggaatccgacccgacgaatcgtacgttccgggctatacaagctcagagggaaacctagcctcnaagttacctgaaccggatcgggagccacaggcggggaaaatcccactggggattgaaacgcaaaagggctaaagagttggttntnaaccgggtgggttgctnggattccnttg

SEQ ID NO: 15584 - DNA, 741 bp, Arabidopsis thaliana
  unsure at all n locations
  Clone ID: LIB25-055-P1-E1-C9
ttacgccttctagttgcnctgacactatagaaaactcaagctatgcatccaacgcgttgggagctctcccatatggtcgacctgcaggcggccgcgaattcactagtgattattggaaatcgtagtacatattgatcattttgaactaaaagaaaactttttggtggaatagtcacgctatgtacaatatcttcgctctcaataattacagacaagtctatataacatagaaaggcaggatgcccgtgacgtgtacgtgtaggatgaaccaaatcctcattgaatttgatttttccattataaggggctcgtacatgttcggcagtacctcctgtaaatactccgccggtatgaaaagttcttaatgttagttgagtccccggttcgccgatcgattgacccgcgataatacctacagcttcccccaattcaacgaggtcaccatgagtgggactccgaccataacataatcgacagatccaagatgtactccgacaagtaaagggagttcgaatggatattgattgtgttccaaaggttattaatcgattgacaagtccaatcccaagatcttgatttcgaaaggngacacatcgggaanctatatatataacgtctgcaaagacacgancaattaatgtttggataaaaanttcttcganatcanccgatttttaattcgagggctcaccgaaaanccccgganagtgncaaaattttttccnannanntttccaaaac

SEQ ID NO: 15585 - DNA, 550 bp, Arabidopsis thaliana
  unsure at all n locations
  Clone ID: LIB25-055-P1-E1-D10
tagtgcancattttgancatcanantgnaatantccatctcttttnncttttcttttttcgtcaaaaagaaatagtccatctcaaaactttaatatatangcntgcntganaggcttaagggtgtgtgttctttgttgccaaacaaaaagttctagttccaaatatagcggattcantgggcnccgaacaaatgataagagatctattacatacaagtttaggttttagaacagtatccaaaatagtcataggttattgtaaaacatatgaaactganaattanttctgttttaacttaaaagaaacctttgggatttaaaagtagagataagtaactttgtantagcgtattaacagctttaggttacctgaaacctttaaatttttgtcaaaanagataagtaaatttgtagtaatcaatcccaattatcaataatgtacgacgattccaataagcactaagngnaatccccggccgcctggnaagggccaaccataaggggaaaaccccccaaagcnnttgggangcacnancctgagttaatcnaa

SEQ ID NO: 15586 - DNA, 748 bp, Arabidopsis thaliana
  unsure at all n locations
  Clone ID: LIB25-055-P1-E1-D11
aaanttgccaggcnctgtaatacgacnaactatagggcganttgggcccgacgtcgcatgctcccggccgccatggcggccgcgggaattcgattattggaaatcgtagtacatattggagaataatgacctacttgaaaaattattgcatcattttgatcatcaaattgaaatagtccatctcttttttcttttcttttttcgtctaaaagaaatagtccatctcaaaactttaatatataagcttgcttgataggcttaagggtgtgtgttctttgttgccaaacaaaaagttctagttccaaatatagcggattcattgggctccgaacaaatgagaagagatctattacatacaagtttaggttttagaaagtatctaaaatagtcatangttattgtataacatatgaaactgataattatttctgttttaacttaaaagaaacctttgaatttaaaagtagaagataagtaactttgtagtaaccgtattaacagctttaggttanctgaaaccnttaaaattttgtaaaaaagataaagtnaanttggtagtaaancantcccaatttatcaataatgttccacgaatttcaaataaancactaagtggaanttccccgggccnctggcaaggtcnanccaaaatngggaaaaacctcccaaagncgttgggtgcaanaaccttgaggttaatccaaaaatggtcanccaaaataaccttggcggtaatcaaggggccana

SEQ ID NO: 15587 - DNA, 191 bp, Arabidopsis thaliana
  unsure at all n locations
  Clone ID: LIB25-055-P1-E1-D2
gcntattgttangtttggggtcacaaaaagatcncctttggtttcggtnttacctcaatggttctggcatcagaatgcctgcaacgtttttgaacaangacatggggtttctatcgtctcaaaaatnaggttctgatgaatgagaaagtagccaactaanggacttgtactttnaatctaaagtcatccng

SEQ ID NO: 15588 - DNA, 612 bp, Arabidopsis thaliana
  unsure at all n locations
  Clone ID: LIB25-055-P1-E1-D7
ggaaacatgatgaccaactcaagttggttgttcgtgtaataaataaaaattgaatctttcgacnaanacaaagtttancttcttcntcntcntatgtgacaagaacgancaatcctccattgagccaaatttcgaaaatgtcaacgaatcttcttcgtcttattctcctagtcatcactttatctatcacttcatctctgtcaactccgtcnccggntgattctcctccttatctatggccgttaccggcggagttttcgttcggaaacgaaacgctctcggtggntcccaccgtgactctaatcgtagctggaaatggcggtggatctctgattattaagagctgcgtttgataagggtanatgggtataatctttaaacacgcttccnggtagaggttctctattggtcgaggattangatttctgaaaaatggttggaggtatgatatcacntctttgaangatcggttggtcaattcagattnccgaaggagncttcaaantggggtgttggnatggagaagttatacattgatnggtgtcncangaagcancgaagnnancgattgttgggggaagncaacgattngangngaantacagtttatgg

SEQ ID NO: 15589 - DNA, 350 bp, Arabidopsis thaliana
  unsure at all n locations
  Clone ID: LIB25-055-P1-E1-D9
atncaatcccaacggggaatanaagcgagtcgcttccggctggcttaanagtccnaatcttttancttangtaatgggtcggccttcctanacgcacgcgcccgccgggaatgccaccttgttttacttttggacgaaagccaagccggatacatacaatataccgatatgcgaaggaaagacccccatttantgaatatcgccngggcaagtttgatcaangattgggtaagtactttantaactcgaacgaagggatnagtgggaacaaaanggtcggaatggntttagggcaaccatatgnatcgaattcccgcggcggcaatgggnggcgggaacaatccaaantt

SEQ ID NO: 15590 - DNA, 647 bp, Arabidopsis thaliana
  unsure at all n locations
  Clone ID: LIB25-055-P1-E1-E11
gtgaaanacgccagtgcnttntaatacgacncactatagggcgaattgggcccgacgtcgcatgctcccggccgccatggcggccgcgggaattcgattcatttctctatattgcaagggaaacgttgtattctttccggtgatccatgccaattancaccaagttgttctatcacgtaaagctttagaaggtggacttggtgtatccttactggaaagagctgcatctttacatgatggagttcttgcgacaaaattaacaactcagtatcgtatgaacgatgtaatcgctggttgggcatcaaaggagatgtatgggtggatggttgaaatctgctccaagtgtggcctctcatctgcttancgattctccttttgtgaaaggtacttcgtctgactgtttctgctgtttgattggtggtggtatttanatgatgggntacaatggcatgcaatcacacantctgtttaccttcaaaagcttttantttggttaaaaaatttnccaatttagcattatccggggtttctctttgnaactccgnttgngntttgtcnttcannganacnnaacnnttaccttgtnggntnaaatatccacgggagtacangcttttttaangggccntaattngaaaaagtganng

SEQ ID NO: 15591 - DNA, 619 bp, Arabidopsis thaliana
  unsure at all n locations
  Clone ID: LIB25-055-P1-E1-E12
gnacgcctttcattggnccganacnagngaaaactcaagctaggcatccaacgcgttgggagctctcccatatggtcgacctgcaggcggccgcgaattcactantgattttagcttgagcttggatcagattgtcgtttcccgccttcagtttaaacttattcgnaatatcaggatatattgtggtgtaaacaaattgacgcttagacaacttaataacacattgcggacgtttttaatgtactgaattaacgccgaattgaattcggatcgatcctacgtaaggatattaaagtatgtattcatcattaatataatcangttgtattccaatatgtactacgatttccaatgtctttantgtcgccgtangtaatcgggggtcacaaaataatccccggtgactttcttntnaatccaggagtgaaataanatgttagtatnagttttgccgatttggtccgttataggnattgaaantgtgcatgagctcggtcnccaacactcccatttcanaacntttacangntanttgaaaaattaaaanatttangngnattncaagtttaaancacggtatacttgttaaaacaatggatatcncgaaaaangaaaccna

SEQ ID NO: 15592 - DNA, 75 bp, Arabidopsis thaliana
  unsure at all n locations
  Clone ID: LIB25-055-P1-E1-E7
aaaacgtccanggaaatgtatatcggnagcactgggatctcgtggtttgcatcatttggtttatgangatanttg

SEQ ID NO: 15593 - DNA, 668 bp, Arabidopsis thaliana
  unsure at all n locations
  Clone ID: LIB25-055-P1-E1-E9
catatggtcgacctgcaggcggccgcgaattcactagtgattttagcttgagcttggatcagattgtcgtttcccgccttcagtttaaacttattcgtaatatcaggatatattgtggtgtaaacaaattgacgcttagacaacttaataacacattgcggacgtttttaatgtactgaattaacgccgaattgaattcggatcgatcctacgtaaggatattaaagtatgtattcatcattaatataatcagtgtattccaatatgtactacgatttccaatgtctttattgtcgccgtatgtaatcggcgtcacaaaataatccccggtgactttcttttaatccaggatgaaataatatgttattataatttttgcgatttgggtccgttataggaattgaagtgtgcttgagctcggtcgccaccactcccatttcataattttacatgtatttgaaaaataaaaatttatggtattcaatttaaacacgtanacttgtaaagaatgatatctcgaaaaagaatcaagtaatcgaattccgcggccgcaatggcggccgggaacatgcnaagtcgggccaanttccccnaaagggantcgaatanaantcacnggccgtctttanaagtcnnannnnnnnnnnnnnnnnnnaaaggnnnnngnt

SEQ ID NO: 15594 - DNA, 617 bp, Arabidopsis thaliana
  unsure at all n locations
  Clone ID: LIB25-055-P1-E1-F10
gtanaannttgccantgcccttgtaatacgacnaactatagggcgaattgggcccgacgtcgcatgctcccggccgccatggcggccgcgggaattcgattcatttctctatattgcaaggaagatgttaggaggaaagttcatggagtgattgataagtttgctgagcgtggacttcgctctttggctgttgcaagacaggtcttttcggttactatatatcgtgaagtttatgtgtccttgtttctttattgtgattcatatcgatttgaatggtgcaggaagttctcgaagaagaagaaagatgctcctggtggcccatggcaacttgtaggtcttttacctctttttgatcctccgaggcatgacagtgccgagacaatcaggagggctttaaacctcggtgttaatgttaagatgataaccggtaagaatcataagttagtccttgtctctctgcacttcatattgcttgaaactaaattttctcttctgactgaaaccangggaccaacttgcaatatagaagaaatgaatcactaatgaattcgcggncgcctgcaaggtcgancatatgggaaaactcccaacgngttnggatgcatagcttgagtaat

SEQ ID NO: 15595 - DNA, 738 bp, Arabidopsis thaliana
  unsure at all n locations
  Clone ID: LIB25-055-P1-E1-C7
gcgattttgcgttgtcaaattccttaaatttcgttacaaaggtttgatatttccgatgagatctccagcaaagacgatgccgtcgatgtcaccttcttcagtttccacggagaaatctccacctccgtcagatacttcaatggctatagtagctttcgataactccactactcacttctcttcttctccatcgccgccacattctcttgatcattccagtgaatcggagaaggaagatgcgaaaagtaaacccgagagtagaagaaacaagaatcctggaaaggttgaggaaactccatctccgattgtggtggttcataatcacaatcgctctgtgaaagaagtgggttccgacgagaaagagtgcgagagttggttctgggagaagtagtggccaacgatctggagctgtttcggctattttgaagaaggtctagganagaagaggtggtaaagttttcagctttagggtttcggntgagtgaggttgtgttggctttganatccntctcaattatgggctgctgataaaaactaaagggttggagttggtgattctttcgatcgttacnaagggaggtacagggttttggcctggccggtgaaacgtggggtgcttttggagaantcnaagttttcaaagcaangttgacttngcgtaccaancttgtcaanggagaaacaatttgattaagcnancaaccnttcgaccncnngntttgaggtcannaagnaatt

SEQ ID NO: 15596 - DNA, 693 bp, Arabidopsis thaliana
  unsure at all n locations
  Clone ID: LIB25-055-P1-E1-A11
cggccgcgggaattcgattattggaaatcgtagtacatattgataaatgggaatgattactacaaatttacttatcttttttacaaaaatttaaaggtttctggtaacttaaagctgataatacgctactacaaagttacttatctctacttttaaattcaaaggtttcttttaagttaaaacagaaataattatcagtttcatatgttatacaataacctatgactattttagatactttctaaaacctaaacttgtatgtaatagatctcttctcatttgttcggagcccaatgaatccgctatatttggaactaagaactttttgtttgggcaacaaagaacacacacccttaagcctatcaagcaagcttatatattaaagttttgagaaggactaattcctttagacgaaaaaagaaaagaaaaaagagatgggccnanttcaaatttggatggatcaaaaatggatgcaataaatttttcaagtaaggtcantaatccccaataangtnccaacgaanttccaataaanccccaantgaaattcnccgggcccccggcaaggtcnaaccaaatngggaaaaactcccaaagccnttgggntgcaaaaccttggagntattccaaaagnggtcccccaaaaaaaccttggngtaaaccaaggggcaaaannnnnnnnnnnnnnnnnna

SEQ ID NO: 15597 - DNA, 470 bp, Arabidopsis thaliana
  unsure at all n locations
  Clone ID: LIB25-055-P1-E1-A12
ttacacncccctattaaacaaataaatattaaattattatgacttggtttagttattagattaaataacaaattattaagggaatataatcttgattgattaatctaaattgttgtagtttgagatcgttgttgagccggatccattgttgctagtcctatttcttaaaatccaaccgagttgccaaggtgagggtaggatctgtggaaacatagtatcacctttacttttgtatttctgaatttcatttgtataagattagacattgggtgctgattgttaaaatgttaggattatatattaaatattgttgattcagtaatcaaacaatgaatttgtactaagggatttagacaaattcactcctctcttagctcacaaataatcaaaggaaaagaactangttgcttaaacaaaaagctagggtttgctctgtaatagtagtctcttgtattgagttaaattgggaa

SEQ ID NO: 15598 - DNA, 866 bp, Arabidopsis thaliana
  unsure at all n locations
  Clone ID: LIB25-055-P1-E1-A2
cgcntngacgtacccgtccggaatcnanggtcgacccacgcgtccgctcgattcaagaaatttggaaagactaagcttttttttctctcgggtttcactttttaaaggtcgtgaaaatttgggaatcactgatcaattttgttaatatgatttcctgatttagggtttctctgcatgcctctagaatcagcaagtgtaaagcaattaccatggtgactccgaagcagatcgatttctcttcctgtggtggtggtgataactccgacgataccctctcccatcgagaatctccacggaatccttcctcaaaagcgtgctgctgcttccttcgcaacagaagcaggcgaaagagactatnaagaaagaaaanagaangaaagaaagaaagaangaaattttgggtccgcccgtttgattcgtcccggatttgggaaccaaaggaaagaatgaagctnctccaatccttaaaaggggattaatttgaattacagaagctaaagacaaggattcaaatccccaaaaatttgaattggggatgccgttttacaagtttccctccggnaagttcctanccgttggcgaaaantcctccaaaggaancaaggtttttgaagttaagatnaagggaattttgnaaaagggggaatttcaaggttcaattggggaaaaaaaaatccanttggaangggaaaagantccgaaantttaccaangggcnaantgaattnctgaaaacccttttgggatttccttccaangaatttggggganaaagggngaatttngggaaggngaaagggganggggaaaggggaaatggnaaaggncccccattttaaacgggaatgggcccactnaaaatgggg

SEQ ID NO: 15599 - DNA, 584 bp, Arabidopsis thaliana
  unsure at all n locations
  Clone ID: LIB25-055-P1-E1-A3
ccntaccgaattcatgaaactctcaaaggtaaactaatattcatcttacatgaagatgaaatgttgaaacttgatccatgtaatgcttgctgttgattgtgattttacttggtttgaatcaggtgcctggattccgtcctaaaacaagagttccagagaatattattgttggtttcgttgggaggcaatatgttctgagagcaactgttgaatctatcttaaagagaacacttcctcacgccatggaatcagtnactggaanggctttaaaagactcgatacagattgtaagcagttttccagatatgganaaggcttattctaagctcaagactcttagttatgacgtggttgttgatgttgtacctgaacntaaaatgggaatcctgacgatgggtataaaaatatgaaggtcnttgtagaantangcganngagatagatgcannaaaagcntgtgacaagacaactnaggacaggnnntacaagtctcttggcngcgttgnagattgtaaccggacccnanggcnacaggtgggagatctagcncttggntgaaaattcctggctacaactntnngntng

SEQ ID NO: 15600 - DNA, 734 bp, Arabidopsis thaliana
  unsure at all n locations
  Clone ID: LIB25-055-P1-E1-A5
agagggttttccattctctgtggccgtcaccgtcgccgtgaaatagctctcctctctctatctccgattatataactgcaagctcaaaggaattgtttgttgttaaaatgtttcttacgcgatttgtcgggaggagattcttggcggctgcatcggcgcgatcggagtccactacagcagcagcagctgcctcgacgattcggacgccaacaaatccactcgaagagttctttgagttcgacagaagccaagacgaagataaacctgttgtctatggtcgaggttggaaagcttcagagctgcgtctcaagtcatgggatgatcttcagaagctgtggtacgttcttctcaaaggagaaaaacatgttgatgactcaagcgtcagatgcttcaggctcagaacatgcagtttcctaaccctgaacgcattccaaaggtgaggagatcaatgtgccgcattaagcatgtgctgacccganagaacgattgaagaacagattctagaagattaagcgagatgannagaaaggnaaatgggatgtngatcccaatgggctcctggttttggnaaacctagcaagttagccncgagtccatccgcagangggttgagtttttccggagtaaggaaattangcatagccnttcangnctttgggaactgggncnantggattgntaccggtnttantnttccggnnntnncaaaaangtttgggtgggnanccnncnca

SEQ ID NO: 15601 - DNA, 74 bp, Arabidopsis thaliana
  unsure at all n locations
  Clone ID: LIB25-055-P1-E1-A9
gggtcccacnctgggttttgccccaagcaaggcgnaaaatccctgttttgatgggtggtttccgaaaatncggg

SEQ ID NO: 15602 - DNA, 87 bp, Arabidopsis thaliana
  unsure at all n locations
  Clone ID: LIB25-055-P1-E1-B10
ttcgngtaaccatactacttggtttgttgtaacatctcgatcctcaatttgcntcgagaancccgaatagatttccagctgacnact

SEQ ID NO: 15603 - DNA, 606 bp, Arabidopsis thaliana
  unsure at all n locations
  Clone ID: LIB25-055-P1-E1-B11
cggccgcgggaattcgattattggaaatcgtagtacatattgataaatgggaatgattactacaaatttacttatcttttttacaaaaatttaaaggtttctggtaacttagagctgataacacgctactacaaagttacttatctctacttttaaattcaaaggtttcttttaagttaaaacagaaataattatcagtttcatatgttatacaataacctatgactattttagatactttctaaaacctaaacttgtatgtaatagatctcttctcatttgttcggagcccaatgaatccgctatatttggaactagaactttttgtttgggcaacaaagaacacacacccttaagcctatcaagcaagcttatatattaaagttttgagatggactatttcttttagacgaaaaaagaaaagaaaaaagagatggactatttcaatttgatgatcaaaatgatgcaataatttttcaagtanggcattaatctccaataagtactacgaaattccaataatcactagtggaantcnccgggccgccgcaaggtcnaaccatatggggaaaaactnccaaaggcgtttggntgcaanaaccttga

SEQ ID NO: 15604 - DNA, 174 bp, Arabidopsis thaliana
  unsure at all n locations
  Clone ID: LIB25-055-P1-E1-B12
ttaatgttagnttgagtccccggttcgccgatcgaattgaccccgcnataataccnacaagcttcccccaattcaacgaaggtcaccatgaggtggggactcccgaccataacataatncgacagatccaaggntgtantccgacaagtaaagggagttccgaaatgganattg

SEQ ID NO: 15605 - DNA, 742 bp, Arabidopsis thaliana
  unsure at all n locations
  Clone ID: LIB25-055-P1-E1-B4
gtgcagttcccatcgaatttgatattgtaaaagatgagaagtcaccagttttggataggacggaggaagatgaactgaaaactgcagagaccagtgacaaagccgaagcccttaaatgtgcagatgtgaaggtaagctctgagaatggtaatgttggttctgataacacaaagcaaagtgaaaaacgagcattgctgcctgcaaatattgacaaacaagatgatgggcttacccttagcggacggaaaatccccagctacatggccccgactgcatctgcaaaggccagagtcaaaggagaagcctctccgaggtttgcccaagcgaagactgagataaatggggcattacggcgccattcactgccttctccaagccaatggtaagctgagtactactactatgtctccaagggctcaaaaacttctcttagcctctgccaaaggatctatgaacggggacaaatcttttacttcttccaagggacataactcacaagtcaaccaagaancgactgggaaacggtgaaaggctcaggcaaaagaaaatttcatcnactcatcntacatgggccgaaatcaattacctaagtggtggttcctcctgcattttgggtttgggntttgggtgaantttagaaagtgtttgggccattgttcaaggtccaagtncaattacctcaattttcaaaaccttgcctcnaantttaccccgaanangtttgaagacaccaaaattnttg

SEQ ID NO: 15606 - DNA, 72 bp, Arabidopsis thaliana
  unsure at all n locations
  Clone ID: LIB25-055-P1-E1-B9
antgaccccttaataatacngacaagcttcccccatttcaacgaagtcaccatgagtgggatnccgaacaat

SEQ ID NO: 15607 - DNA, 108 bp, Arabidopsis thaliana
  unsure at all n locations
  Clone ID: LIB25-055-P1-E1-C10
tcacgaatgaantcaccggaccgcctgcaaggtttaacaataangggaagaacctccccaaagnggtttggatgcaaaaccttgagtaattccaaaaaatggtnaccc

SEQ ID NO: 15608 - DNA, 632 bp, Arabidopsis thaliana
  unsure at all n locations
  Clone ID: LIB25-055-P1-E1-C11
nnnnnnnnnnnnttgtaaaantctgccagggactgtaatacgacanactatagggcganttgggcccgacgtcgcatgctcccggccgccatggcggccgcgggaattcgattattgggaaatcgtagtacatattgataaatgggaatgattactacaaatttacttatcttttttacaaaaatttaaaggtttctggtaacctaaagctgataatacgctactacaaagttacttatctctacttttaaattcaaaggtttcttttaagttaaaacagaaataattatcagtttcatatgttatacaataacctatgactattttaagatactttctaaaacctaaacttgtatgtaatagatctcttctcatttgttccggagcccaatgaatccgctatatttggaactaagaactttttgtttggcaacaaagaacacacancccttaagcctatcaagcaagcttatatattaaagttttgagatgggccatttcctttagacgaaaaaangaaaagaaaaaaagagatgggaccaattcaatttganggancaaaaatggntgcaataatttttcaagttngggtcantantccccaaataangtncnacnanttccaaanaanc

SEQ ID NO: 15609 - DNA, 802 bp, Arabidopsis thaliana
  unsure at all n locations
  Clone ID: LIB25-055-P1-E1-C3
tngccttgccctagcntccgggaaatcccaggtcgacccacgcgtccggttggcctccgacgacggctcaagcctatcttcgtcgccggcttctccgatggttaccaatcgcgtagacgtcttctggcacgaaggaatgctccgacacgacgccgtagaaggcgtcttcgacactggatacgaccctggattcctcgacgtattggagaagcacccggagaacgccgatcgcgtcaggaacatgctttcgattctccgacgcggtcccatcgctcctcatgtcaattggtttaccggtcttccagcaatcgtttcggagcttctaatgtttcacacttcagagtacattgagaagctagtggaggcaagataaatcaggagaaaggtgtgaaattgccgcangtactttcatgagcccaggctcgtgggaagctgctcttcttgcagctggaacaactctttcagcaatgcaacatattcttgattgccatgggaaaattgcatatgctctggtacgcccaccangtcaccactcacangcctactcaagctgatggggtattgcttcctcaancaacggctgctccttgctgtcaagcctggnatttgaaattcgggttcctgttccccganntngcgggttatttgacaatccgatgttacatttatgggaaatnggcacanntgaaagggttttatncaacnnganaaaggtnctaacngggtcantccnaatnaaaccanggnttantggggaatngtcccaacccccnnananagggtcnattggtgnaantttggt

SEQ ID NO: 15610 - DNA, 52 bp, Arabidopsis thaliana
  unsure at all n locations
  Clone ID: LIB25-055-P1-E1-C6
aactacaatgtcaccgtggagcgtgaccgaagaagttgttggnnacctacaa

SEQ ID NO: 15611 - DNA, 73 bp, Arabidopsis thaliana
  unsure at all n locations
  Clone ID: LIB25-055-P1-E1-A10
ngggagcaaactctnaatctgccgtcatccacntcaaaggttcgaatccttcccccatcagcaagggatcggg

SEQ ID NO: 15612 - DNA, 69 bp, Arabidopsis thaliana
  unsure at all n locations
  Clone ID: LIB25-054-Q1-E1-E5
agttttgagctcntgtttcttgaattgttatgtaaagtctgcnatgcataatttagttacnttagtctc

SEQ ID NO: 15613 - DNA, 458 bp, Arabidopsis thaliana
  unsure at all n locations
  Clone ID: LIB25-054-Q1-E1-E8
gacataatataatatcatcagagaaaaacaaaatggataattcaaatttcgaaacacttcctgaagatctacaaaaggagattttgttatggttgtctccaaaatccttggtgaaattcaccctcgtctcaaagaaatgtgcatctattatccgtggggaagaattcaaagctctttacatgcgccgatcaatgacaaggcctcgtgtgttgatcgttgccaatgaaagcacatgtgagaactcattgggtgtttcacactttgtatcaaggaggaggaaccatngttgtcancttgtcagcaacancctatgntntcaccaacnatgcnccacngttttagtgcttcccaaccactcctaggtttgnttccgtcttcgaaatggtagctgngngttgtcattnncaattccgggtncaaanatnnncccnctttaccggggcattngaagcnccatg

SEQ ID NO: 15614 - DNA, 51 bp, Arabidopsis thaliana
  unsure at all n locations
  Clone ID: LIB25-054-Q1-E1-F2
tggataacttttatcaantatgaggggtattctggacanttctctggttca

SEQ ID NO: 15615 - DNA, 537 bp, Arabidopsis thaliana
  unsure at all n locations
  Clone ID: LIB25-054-Q1-E1-F3
nnnnnnnnnnggaactggtttgctttgggcccngcccggtccgggaaatcaagggtcgacccacncgtccgcgaaaatcgnctcctcttcttctcctcctcgacctgngaaatcaatctttcgccgccgagttcttctctctgcggcggagaatcaattagcaatctccagaattangtgagggaaaagaggatggctttgatcggaaaatccganagattctctgctgattttgtgatgggtggtgctgcagccattgttgccaaatctgcagctgctccaatcganagggtgaagcttttactgcagaatcaaggggagatgataaagactggacatctcataagaccttacactgggtttgggtaattgctttaccagaatctatagagaagaangtgttttgtccttttggagagggaaaccaagccaantgtcatacgatatttccctacacaggcttccaaactttgcatttaaanggttacttcaaggaaccctccttggatgtttcaaangagaaaagatggntccttg

SEQ ID NO: 15616 - DNA, 459 bp, Arabidopsis thaliana
  unsure at all n locations
  Clone ID: LIB25-054-Q1-E1-F4
nnnnnnngaantggtntgcttggccntgccgtccggaaatcaagggtcgacccacgcgtccgcccangcgtccgcccacgcgtccgagcgttttaagctctcactagcaagcaagtactagcaacaatggcgtcaagcactgcgactatgctcaaagcctcaccggtgaaatctgattgggttaagggacagagtcttctcctccgtcaaccttcctctgtctcagctattcgcagccacgtggcaccttccgctctcaccgtccgagccgcttctgcttacgccgatgagctcgtcaaaaccgctaaaacaatcgcgtctccgggacacggaattatggcgatggatgattccaangcnactttggnaaaccnttttggntcaattgggctaaaanaacacggggggctaaaccgttaaagctttaagggaactttncctttggtnntcggcncccaa

SEQ ID NO: 15617 - DNA, 449 bp, Arabidopsis thaliana
  unsure at all n locations
  Clone ID: LIB25-054-Q1-E1-F5
agtgaaacagagtaacagagacgcgtcgtcttcaacgatgctctcaacggtgacggcgacggcggtttctcgaccgattctgaaggtggaatgtacaatcaaaangacgtttaangtgacggcggagaagtttccgacgtttctgccgaccgatgtcgagaaaattaaagacacgtttgctctaaagctcgccgccagaatagagaggcttcctgtatctgtgagcttcagggaagatagtattatgagcagttgcgtgacaccgctgatgcggaacgagacaactcctgttgtgcttcttcacggatttgatagttcttgtttacagtgganatacacttatccgttgcttgaagaagccggnttagaaacatgggcatttgatatccttggttggggtttttctgatttagacaaacttccaccttgtgatgtagcgtcnaaaaaaa

SEQ ID NO: 15618 - DNA, 694 bp, Arabidopsis thaliana
  unsure at all n locations
  Clone ID: LIB25-054-Q1-E1-G10
ggataactgaaatacctccctttctagctttaaatgtcacttaaatagccttcgcttgtaaaataaaagtttgaatatttaaaccagaaagctaagtagagaggttgtgatgggtctgcaaacatggatatgcttcacactattctcaattttcttcttcctcctcttactatcagttttctcgtcctattttacccattttatctttttaccaaacttatgagttgtcttaagcaccttcactttgaaaacgttactgggaaagtagttctaatcaccggagcttcctccggcatcggagaggttagctagtattggatgttatgtttaatttgtttgttttggttggtcttatctataatttttagcaacaaataaaaacaatgatgcagaaagttttttttaaaaattatgaatgatatgtaattggtacataatcacgtttggaaaacgaaaacttgaattcaaagtcaaatattgttttggacgttctatcatcatacatatgtacgaccaattgatcctttatatttgacgattgctcgagtagactatcatccgtgaacagtaaaattgttatttggaaatatattcatttaaaagaacttaagtttaaagatnaacataaattgaanatgttcttgtttttgttgggtcggataaaaaacagtggcatacgantacgcaagaaagg

SEQ ID NO: 15619 - DNA, 455 bp, Arabidopsis thaliana
  unsure at all n locations
  Clone ID: LIB25-054-Q1-E1-G12
agacggngaanangtacattacgaacgaanatcntaananacacaacaaatctggagatctatggatcgcgattcanggcaaggtctacaacgtctccgattggattaanactcatcccggaggcgacacggtgattctcaatcncgttggtcaagacgtcaccgatgctttcatcgcatttcatcncggaaccgcttggcaccatctcgaccatctcttcaccggttaccacatcagatatttccaagtctccgaagtctcacgcnattaccgtcgtatggctgccgagtttcgttnactcggtctcctcgaaaacaaaggtcacgttactctccacactccanccctcntcnccgncatgtncctccggagttctctaacngtgttttgggcttgtacctcngtcttcgctcaacaaatcgccgccgcgcttctcggtcncctctggatcaga

SEQ ID NO: 15620 - DNA, 145 bp, Arabidopsis thaliana
  unsure at all n locations
  Clone ID: LIB25-054-Q1-E1-G2
gcnatcgnttcggtgccggcttccgcatctccgacngctctatntccaccgcccgccgcatcgtatgccanacgaccacgcggctgacattacaaaaaanaagatcaacgaagctctgagaatcctgacgatacgttccttaana

SEQ ID NO: 15621 - DNA, 509 bp, Arabidopsis thaliana
  unsure at all n locations
  Clone ID: LIB25-054-Q1-E1-G3
gttggcccgccngtccgganatcaagggtcgacccacncgtccggcttacacagatgggcatctaatcaacactctcgtcttcctcgaatcacttctatttctgaggctgaccaatctcgacccattaaccaagtcgtcgccttttcggttcctatatccagaagagacgcgagtattattcttctcagctcgattccattgacaagcttcttcgttctaacaccgagctcttccgaagctagagagagacgtagcagaaaagttatccctctcgaggaatattccactggccctgaagggttgaaattctatgacattgaggaaggcaaaggtccagtagcaacagagggatcaactgctcaggtgcattttgattgccgttacagaacatcactgcaatttctacccgagaatccaagccttttagctggaaaccgtnggtattgctcagcctttacgaatttaanggtgggatctacgccaaggaaagggaaaggaaancttgaat

SEQ ID NO: 15622 - DNA, 212 bp, Arabidopsis thaliana
  unsure at all n locations
  Clone ID: LIB25-054-Q1-E1-G4
acatcgtnccgatnggtacgcctcncaattccccgggtttatgtcctgtttccgggntttaagctccnggtggatggcccanagaantgggagaaatgggccgaagatattccctacgagacgcaattcctaatggtcnaagagccaacgattggtcccaccttgaattctgacggagcctaacggcgtcnagtgtaaccaagaaagtttac

SEQ ID NO: 15623 - DNA, 56 bp, Arabidopsis thaliana
  unsure at all n locations
  Clone ID: LIB25-054-Q1-E1-G5
atgtgttacctcctttctccaatactgcttggggacagnatgcgantttggcgttc

SEQ ID NO: 15624 - DNA, 111 bp, Arabidopsis thaliana
  unsure at all n locations
  Clone ID: LIB25-054-Q1-E1-G8
gnccttttcccctgnagtcaaaacggccctctggcaaaaacgaaccttggggtaattggggnaccaagctccgcctgggggctcaacaaatgttggtngcaaaccntcaag

SEQ ID NO: 15625 - DNA, 855 bp, Arabidopsis thaliana
  unsure at all n locations
  Clone ID: LIB25-054-Q1-E1-H10
ggnnnnnnnnggngggnntgttcctggttgcgtcggccctaccggannaggnaatcccggcctcgacccacgcgtccgctctcacttgcaaaaccaaatcccttatcgacttccaccgaaagatcacttcttaacctacacaaggtgtttgttatgaagatcagataaataaaaggtcatttgaggataatggttgatgttcaaagattcttacttgcttatttgtgatggacaatgtaagaggttcaataatgttgcagccactgccagagatagctgagagtatcgatgatgctatctgccatgaactctccatgtggcctgatgatgctaaagatttgttattgatagtggaggcaatatcaaggggagacttgaagttggtacttgttgcttgtgcaaaagctgtttctgagaataatcttctaatggcacgatggtgtatgggtgagttgcgcggtatggtttcgatttctggtgagccaatccagagattgggagcttatatgttagaagggcttgttgctaggcttgctgcttctggtaagttcgatatataagtctctccaagtccagangatccagagagttatgaaatttttancctaaggtgtangtttctgccatgaaggtttgtcccataatttccaaggttttggggttacaatgttcaacccnaaattggttgccnaatttgccannaaanccaattgnaangggnttgaaannaanaagggnttcccccattttatttggncctttnccaaaatttggggcccaanggggaacccccanttgggnttnnccacctttanccccaaggccntttttgccanccttanggccctgggttgg

SEQ ID NO: 15626 - DNA, 115 bp, Arabidopsis thaliana
  unsure at all n locations
  Clone ID: LIB25-054-Q1-E1-H2
ctgatcatcncgagaacatcaangtccancacgtctctgacggtgttccggacggaaacatgctcgggaatccantggagatgggtcgaactgtttctcgaagcggntccacgta

SEQ ID NO: 15627 - DNA, 457 bp, Arabidopsis thaliana
  unsure at all n locations
  Clone ID: LIB25-054-Q1-E1-H5
agattgctgcaaaccttgtcaagaacggacctcttgctgtagccatcaacgctggctatatgcaagacttacattggaggagtctcatgcccttacatatgcaccaggaggctcaaccacggtgtcttattggttggctatggagcggcaggttacgctccggctangttcaaggagaagccttactggatcatcaagaactcgtggggagagacttggggtgaaaatggtttctacaaaatctgcaaaggccgtaacatttgtggtgttgacagtatggtctccactgttgcagccaccgtctcaaccaccgcccattaagcatctcgtcaatangttttaattaccttggtgatttgtatgagcnnnctctctttgcgctgctgactctcncnanttaacctcggcntcctgccntgtaaataaaaatgcgttctaantgagcaaaaccgttcaa

SEQ ID NO: 15628 - DNA, 681 bp, Arabidopsis thaliana
  unsure at all n locations
  Clone ID: LIB25-054-Q1-E1-E11
ttacaaaatcatgtcatcttctcccaagctgtttcacgcgcgtccatcattcttcacgcgccgatcgacgcctttgatcgtcttcacctctctcgctatcggtctaaccggtttccttttcggattatcaacgatccttttccctggtctccggttatctggccggtcctgcctcaccaacttgccaccgaagactgttaaaatcgtctgggacgtcgctggtaatagtatcgttaatggcgaagtcaagaggcacaaagtgatgggattcgtcggaatccagaccggattcagatctgctggccggagacgagctctcaggaacacatggatgccgtccgattccgaaggccttcgaagattggaagaatcaacaggattagccattagatttattataggcaaaaccaaagacgangccaaaatggttgaagctgagaagcgaagttgcaatgtacgatgactttatactgctcgatatcnangaggagtacagtaaagctcccctacaaaactttggctttctcaaagctgcatatgcactatatgatcagaantccatgtcaaagctgatgatgatatatacttgaggcaaattcttgtctttacngttggctaaagancggggtcatcgcaagacataccttgggtgcatgaaaaaaagtccnggttttaaaaant

SEQ ID NO: 15629 - DNA, 455 bp, Arabidopsis thaliana
  unsure at all n locations
  Clone ID: LIB25-054-Q1-E1-H7
ntctctanattaatggtgcttcctctctaaaccattcctctctctttctctctaccaccatttattctcnccttaancactgactcgactcgggtcgtgaccagttttttcnatctgagctatggcaacgggacagcttttttctcgtancacacaagctttgttcnacanctataaagcagcttcctgttcaacgaatgctcgatttcgactttctctgtggacgtgaaacgccttctgttgctggaatcataaatcctggttctgaaggttttcaaaagctctttttcgggcanagangaaatcgctatccctgttcatgccgccantgaggcagcttgtgctgcgcatccaagagcggntgtantcatcancnttgcatcttttaggagtgctgcngcttcatccaagggctgcnttgaagcagccgactaatnaaaagttgtggcanttag

SEQ ID NO: 15630 - DNA, 449 bp, Arabidopsis thaliana
  unsure at all n locations
  Clone ID: LIB25-053-Q1-E1-A3
tnttgtctctctccctttcctctttcgtctcctacgtgtttaaaccttgcaaaaaatcaagtcttttttggtgtttaaatcacccatttttgtcaatctgtttttcgagcaaaacaccaggaggaaaccaaaaagctagaggctttgtggagtgagaagaagagtctcagtgaaaacagaaagcagcatttgagattccactgttaatctttgaattaaaaatgagtgcagcagctacaatgcctatgccccgagaagcgtctaattacgatgagatctctatgcaacagagcatgctcttctctgatagtctcaaggatctgaagaatcctgagaacacagttgtattcagcagctgagtatttcgaactatcctacacaaacgatgaacaaaaacagatagtcgtgggagacactgaaagantatgcaataaaagntcctgggtgaa

SEQ ID NO: 15631 - DNA, 438 bp, Arabidopsis thaliana
  unsure at all n locations
  Clone ID: LIB25-053-Q1-E1-A4
cnctacccactttattcacctacagaccaaaatgggaaggtggtcagtatgaaggtgatgaaaatgagagacgggatgtgcttcgtctggccatggagttgggagctgattatattgatgttgaacttcaggtggcaagtgagttcatcaaatctattgacggaaagaagcctggaaagttcaaagtaattgtttcatcgcacaactatcagaataccccttctgttgaggaccttgatggccttgttgcaagaatacaacagactggagccgacattgttaagattgctactactgctgtggacattgcagatgttgctcgcatgttccatataacctcaaaagctcaagttcccacaattgggacttgttatgggtgaaaaaagtttgatgtcccggatccttgttccaaaanttggtgggtaatttgacctttng

SEQ ID NO: 15632 - DNA, 145 bp, Arabidopsis thaliana
  Clone ID: LIB25-053-Q1-E1-A6
ggaagaactttgtgtttagagattatgtacattctgaaatcgagtagatttgttgtgtatatgtataatcatcatacaaagtacaaacattgtaaatcaaaatccagaggaacttttagcactaaaaaaaaaaaaaaaagggcgg

SEQ ID NO: 15633 - DNA, 437 bp, Arabidopsis thaliana
  unsure at all n locations
  Clone ID: LIB25-053-Q1-E1-A7
gcccacgcgtccgaacttttctgataacatcggagtaaaaggaaagtaagtcggagtttaatcatcttaagatttgattgaatggctacgctcactgaaatagcaacccttgaggagaagtatatcgaattgtgcaagatgcatggaatcctacccaacactgccattttatctgctttctttgaggcggaggttaaaaagtcaaggaatcaangatgcattatgaacctttacgtggatagagtgaagtacgatgactatctcccgcttctcgagttatgcaatgagatcaacacatctgaggtacaaggaatanatctatttgtgagatccgcttgttcgttagaagatcattatgcattgcccttaatccgttccgtcantcaanaactccngagtttgttcatccacatgactcctttngggaanaaacnttg

SEQ ID NO: 15634 - DNA, 390 bp, Arabidopsis thaliana
  unsure at all n locations
  Clone ID: LIB25-053-Q1-E1-A9
ggaacccaatcaagactcttcccgatctgtccggtacaggtaaagcaacaagtgttaagtttggactcgactccaaatacataccagtcggttcaatggaccgtaatctcaggatatttgggtttacctgatnatganaatactgaagattcaccacangattcatganaagatatctcaaaagtctcatcatcaagagtagctatatcctcaattctcgcgatttttgttgtatctttacagttctgttggtantttcctgatggcncntctcacaatcacatagtncacacctgagctctctccctttctttctnagtcaacanttttcctgtnacagcatncgnncccttnatggntctgcagttgatctttctcnctttgnacaaa

SEQ ID NO: 15635 - DNA, 436 bp, Arabidopsis thaliana
  unsure at all n locations
  Clone ID: LIB25-053-Q1-E1-B1
tgaagagaagaaagatggggaatttgttttgttgtgtgcaagtggatcaatcaacggtagcgataaaggaaacattcgggaaattcgaagatgttcttgagcctggttgccattttcttccatggtgtcttggtagtcaagttgctggttacctctctctaagggttcagcaattggacgttcgttgcgagacaaagactaaggacaatgtgtttgttaatgttgttgcatcgattcagtaccgtgctttagctaataaggcaaatgatgcgtactacaagctcagtaacacaaggggtcagattcaagcttatgtgtttgatgttattaagagcgagtgtcccgaagtttgcntccttgataatgtctttgagcaagaagaangatatttgccaaaagctgtttgaagaaggnagctccnagaaaggcaaatgtt

SEQ ID NO: 15636 - DNA, 429 bp, Arabidopsis thaliana
  unsure at all n locations
  Clone ID: LIB25-053-Q1-E1-B10
ggctcccacaggggaaacaaagcgaccgttttgctcatcattatttatagccgccggcgaattgatcggtaaaaaaaaaaacttccgacgtttctacaaagttgcgaatcatgatctacctctctagacgctcactctcttctcttctccgatccggtttcaatctccgcggcgatcttacagcagcagctgtctcttgttcctctctcttctccgacgcggacggtgggattaagaagttacactcgcgagctgggaatgcagtgttatggagaaatagtcagctatgtagttctcaaggaagcttttttggacgaggaggacaagtctcaggttctgttgtttcgatgtttctgcagtggtagtgatacttcncctcctagcttggatcggaagtttttggcncagctatnggttgcagataagaaa

SEQ ID NO: 15637 - DNA, 154 bp, Arabidopsis thaliana
  unsure at all n locations
  Clone ID: LIB25-053-Q1-E1-B12
tttnancttcgtccttacgttaatgacttcagcacggaatgggttgtttcttctgttacgttgttaacgcttggttctgttctcactacatatattggcnaganaatctctgatctgaaacttggaaatggnacttccctagtgattttcanaa

SEQ ID NO: 15638 - DNA, 89 bp, Arabidopsis thaliana
  unsure at all n locations
  Clone ID: LIB25-053-Q1-E1-B2
angagcttcttcnaacaacgatcaaggtggaaatggaatccatgatgagatcggactccacgtcgcnagatccgacagtggtganagtt

SEQ ID NO: 15639 - DNA, 434 bp, Arabidopsis thaliana
  unsure at all n locations
  Clone ID: LIB25-053-Q1-E1-B3
ttcttcttctttttttttcgtaaaaattcttcttcttcttcttcttctccgagctccgtccgagcagagaagaagagtaaggtaagttttagagtgcacttgtgtgggantctcatttcttatcctgcgcctcttacgatttcttatggtgcgcttctccgactagtttcggtgtcnaatggactcttcctcttcttctctatctctccaagaaaaaatctcttcngggtatttctagggtttcgttggttcttttttcgaaatgctttggataacgatatttgctggattattctccgccgcgatggnagtgatcgtgttatctccgtcgcttcagtcatttcctccggnggnggnaatccgttcgtctccaatcaaccggtntttcannanaactccancngggggttcanccaanggggnccaatgtctct

SEQ ID NO: 15640 - DNA, 234 bp, Arabidopsis thaliana
  unsure at all n locations
  Clone ID: LIB25-053-Q1-E1-B4
canaggatgtgaagagancangggaancctcaccaacgnggcagaganctcaatgccatcatcacagcaggaggaggctgttgtaaaaaagaagtatggagggctcatgccaaagaaaccacctctcatttccaaggatcatgagcgagcatactttgactcagctgantgggctcttgnaaaagcaaggtgttgcgaagccaaagggacccctgnaancccctcgtcanattt

SEQ ID NO: 15641 - DNA, 420 bp, Arabidopsis thaliana
  unsure at all n locations
  Clone ID: LIB25-053-Q1-E1-B7
gtttttgcgcggttggcagatccagaataccttatttaacaacatcaagttcatgattctctgctgcttcgtgaccattctcatcctacttggcacaatccgtgttgggaaccttggaagctccaacgccgactctgttaatcagagtttcatcaaggaaaccattccgattctcgcggagatcccctctgattcgcattcgacggacttggctgagcctcctaaagctgatgttagtcccaatgcaacgtatactctagagccaagaatcgcggagatcccatctgatgtgcattcaacggacttggttgagctgcctaaagctgatattagtcccaatgcaacgtatactctaggccccagaatcgcggagatccatctgattcgcatttgacanacttgcttgagccgcctaaagct

SEQ ID NO: 15642 - DNA, 441 bp, Arabidopsis thaliana
  unsure at all n locations
  Clone ID: LIB25-053-Q1-E1-B8
cgaatcgaaaaaaaaaattagggttcttctctcttccgtctctcgttatcgatttcgttttgatttcgcgccacaaagaagaagtttcattaggcgcgaatctgaaacctaggttcgatttagttctgtccgaattactgtccgttgtccttggtcccgttaagtcgattcgatntgagaaaagaaagaaagagaagaagaaaaaacgatgtcacgatattcacatccccacngcctgtgttatccaaggaantggncaaaggnncaaaacttggccaaatggaccnaaggtccgcnaacaatcaattcctgggaagtgaatcnctnacngggtcctcctgtccgaacaangggtttccggtgttccggtcaaanatttnaaatttcccttnaaaaaaacccccttgggngnccnnatttcnaangggtgccaannaagtt

SEQ ID NO: 15643 - DNA, 449 bp, Arabidopsis thaliana
  unsure at all n locations
  Clone ID: LIB25-053-Q1-E1-C1
tattttcantgagcgcataacatttttgagacaagagactctctctctctctcttctctctttctctccccctctctccggcgatggttgttgctatggaccaacgcaccaatgtgaacggagatcccggcgccggagaccggaagaaagaagaaaggtttgatccgagtgcacaaccaccgttcaagatcggagatataagggcggcgattcctaagcactgttgggttaagagtcctttgagatcaatgagttacgtcgtcagagacattatcgccgtcgcggctttggccatcgctgccgtgtatgttgataactggttcctttggcctctttattgggccgcccaaggaacacttttctgggccatctttgttctcgggccacgactgttggacatggggagttctcagacattcctcctactgaataattgtnggtggtcacat

SEQ ID NO: 15644 - DNA, 427 bp, Arabidopsis thaliana
  Clone ID: LIB25-053-Q1-E1-C12
aaaaaaaactctatagttagtttctctgaaaatgtacggacagtgcaatatagaatccgactacgctttgttggagtcgataacacgtcacttgctaggaggaggaggagagaacgagctgcgactcaatgagtcaacaccgagttcgtgtttcacagagagttggggaggtttgccattgaaagagaatgattcagaggacatgttggtgtacggactcctcaaagatgccttccattttgacacgtcatcatcggacttgagctgtctttttgattttccggcggttaaagtcgagccaactgagaactttacggcgatggaggagaaaccaaagaaagcgataccggttacggagacggcagtgaaggcgaagcattacagaggagtgaggcagagaccgtgggggaaattcgcggcggagata

SEQ ID NO: 15645 - DNA, 428 bp, Arabidopsis thaliana
  unsure at all n locations
  Clone ID: LIB25-053-Q1-E1-C6
ttcagctatttttatgctttaccattctttttgcatcagtgactcttctggacatcgtttcagctcatttgaagcttaagccaactttgcctcagattgaacctccacaaacgttgaaggatgttgaaccttacaccgttaaagtagtgatagtctttgtgtccgacctcgagaaagaatgtcccaagacaaataaattcaaggctttctttgagaaacttagggcattcgccaagtatgtctgcccaataaaaagaaaagaccaagtagattacgaccgagacatgaaggccaaggctggaggcctcttccaagtcatatcttcttttgcgattggaaagataaanaaggaaattcaagaggataaaatggaagttattaatacctttaagtttatganatttcctgcgactaaaaattgtgggaag

SEQ ID NO: 15646 - DNA, 435 bp, Arabidopsis thaliana
  unsure at all n locations
  Clone ID: LIB25-053-Q1-E1-A2
atgtaaaacagttgttcttgcaactccaccaagtaaggatggaagcatttgtaaggaggttctgtattgcgccaagagggctggtgttactcacatactcaaagctggtggagcgcaggctatagctgccatggcctgggggacagattcttgtccaaaggttgagaagatttttggtcctgggaaccagtatgtcacagctgctaagatgattcttcaaaacagcgatgcaatggtctcaatcgatatgcctgctgggccatcanaaatcctanttattgctgacgaacatgctagtccagtttacattgcagcanactactttctcangggggggcatggccaaataatcaagttgntcctgtantttttgggcgaaaantgtagatttcaacccatcnaagaangaaantnccaacnantnaaaanccttcc

SEQ ID NO: 15647 - DNA, 440 bp, Arabidopsis thaliana
  Clone ID: LIB25-053-Q1-E1-C7
tgccatattggttcccgtcaaatctcattggaccggagtagtatagatttcttcaaggccaatatcgtttcttcagagagaatcgaacggaagatcggaacaagatgatgtccggcgggaactacacgactatagacagccagaaagtctctggatctgtaccttctgttccagatccaggccataccaccgtcaaattcgcagagtcaaatctacaaacttttcctccatctgctactcagggcaagatctctggtggtagtaatccccctcgtgatgctgacgattcattttctgggcatggtaatggtagtacagatgaacctcagtctggtggctggcttcataaattcactgttggtgcttacaagcccttctttgatgtcgacacttccgatgtagttgagagactcaaagaatcccttttcccattccgtggg

SEQ ID NO: 15648 - DNA, 162 bp, Arabidopsis thaliana
  unsure at all n locations
  Clone ID: LIB25-052-Q1-E1-G6
antaggantatgtggtcatcaaancggttcatgatcgagtaantctactggttaaccgggattgtccgagaaaccacgtgctgctaccatttgtcatctgtancagttgatcaaccaggcgatgatgacctatcnggagcagtaccgtatcttagngttanc

SEQ ID NO: 15649 - DNA, 426 bp, Arabidopsis thaliana
  unsure at all n locations
  Clone ID: LIB25-052-Q1-E1-G7
gaagcttcggaaacgttatcgcggcgaaaaacaacgagctcttaatcgaccaggcaagttctcttcctcttgggatttgttccctatcttggatgctatgggattcgctccggtgactccggcagccgtagaaacttacgatcccgatgtggatcatgatgatgagagtaacggtttggatggatttagggttagatcgaagaggtctgggaagtttagcggtggttactctgattcacctcgagaagtangagatggatatggggttagatctagggcaaggagtaacatgaaaatgtatggtggtttcaagtctgagtttgattcagatcacgattcaggaagtggatttggattgaaaaggaaatacaatgggaatccaaaggttagtgctgatttcgatgctgattctgatgatgagattgg

SEQ ID NO: 15650 - DNA, 433 bp, Arabidopsis thaliana
  unsure at all n locations
  Clone ID: LIB25-052-Q1-E1-G8
ttttgaaaaaatcagaaaccctaaaatcgccactctctcgtctctcttcgcggtccattctgcttcatctctcccggcgaaaccttaatcgaacagctcggattcgatcctattctctgttgttttctaagaaagatggagtggaatcgggagactctagtgttcctttcgcaatgttttcttaacacgctctctccgataccggagcctcgtcgaacggctgagagagcactctcggatgctgctgatcaggctaactacggcctagccgttctccgtttggtggctgagccaagcaatcgatgaacagacgcgtcacgccgctgctgtcaactttaagaaccatctccgttcgcgatggcatcctgctggtgattccggtatctcaccgatngtagattctgaaaaaggagcaagattaagacactcatcg

SEQ ID NO: 15651 - DNA, 445 bp, Arabidopsis thaliana
  unsure at all n locations
  Clone ID: LIB25-052-Q1-E1-H1
cgatactcgtctgggcatggcgtttttgctcaacaacgcttcaatttcatctcatttacgctcgtcttcttcacagacgggtgatgctttatcaatatcgcgtcgtggattccacattgagccaggaactcgagagaaagctctcttggctgaagattctgctttgaagagattcaagtctcataagaaaagtgtgcacaaactgaagaggattggtgatgtgctcactgttgttgttgttgcaggatgttgctatgaaatctatgtcaaagctgtgatgaaaaaagaagctctggctgcaggggaaaaagctcatgagtgtcctggtctttgnatggccttttggtttaacccttaaaaaagttgtcccttccnaataacccaanattaatgtttggttaacnaatgaaaaatggaancaataaagtnaaacaaaanaaaaaga

SEQ ID NO: 15652 - DNA, 454 bp, Arabidopsis thaliana
  unsure at all n locations
  Clone ID: LIB25-052-Q1-E1-H10
aaaagtttcaaacttttggcaaattaagcggtttttgttaggttttaattattttttccgatgatgaagcggcgatgagtgtcgtcgtcggagatagatcggagagtactctgatgcggagtgactataaagctcctccgagtcaagctattcccaaagctcgattacaagtttggttctttagagtttgttcttgcattttggtttggacntgtttgattcagctcttttggcattcccaaatcttcactggtttaaccaatcacatttctaganactctctcncggttcagtcagttccattacctcctcctcttcctccaaggaantacacaagtaanggaattttacnangtgtcctgtaatggcggtttgaatcanatgcgtgcagcgatttgtganacggtgactgttgcnaggncantgaatttgacgcctgttgttccngancttg

SEQ ID NO: 15653 - DNA, 458 bp, Arabidopsis thaliana
  unsure at all n locations
  Clone ID: LIB25-052-Q1-E1-H11
anttcgaattttaaacacaaaacctaaacgatgcctgaggcaccaaagatcgcagctttggaggtttctgatgagagcctcgctgagaagaacaagaacaaactccaattcatcgaagacgtgaccacgaacgcagatgatgttcagagacgagttcttgaagagatcctttcacgtaatgctgatgtggagtatcttaaacgacacgggctcgaaggacgaaccgatcgtgagactttcaaacatatcatgcctgtcgtaacttacgaagatattcaacctgagatcaacagaatcgccaatggtgataagtctcaagtcctctggtcctaaaccccatctctgagttcctcacaagttctgggacttctgggtgganagaggaaacngatgccaacaatccaagaggaactagacngaagatnacttcnctacagtcccctgatgccggnatggag

SEQ ID NO: 15654 - DNA, 447 bp, Arabidopsis thaliana
  unsure at all n locations
  Clone ID: LIB25-052-Q1-E1-H2
taacttacncaaacaagaaacccaagaatccaaaatggaaatgctcaacgcaataattctcatcctatttccaatcatagggtttgtattaatcttctcattcccaacaaaaaccctaaaagccaaaaccgcatcaccctctaatccgacatcgtaccaactcatcggctctattctctccttcaacaaaaaccgccaccgtcttctccaatggtacacagatctcctccgtctctctccgtctcaaaccatcaccgtcgatntcctcttcggtcgtcggactatcatcactgcaaaccctgaaaacgttgagcacattctcaaaacaaatttttataacttccctaaaggcaaacctttcaccgacctcctanggagatctnctcggcgggcgggnatcntnaattctgacgggcgagttatgggagctcanaagcgttaaactng

SEQ ID NO: 15655 - DNA, 440 bp, Arabidopsis thaliana
  Clone ID: LIB25-052-Q1-E1-H3
caagtcattcaagttcatgagaatagaaacgagtccaagtttgttgttcatgcaaaattctcatgactctgttacactcctgaatttcttctacttatattccattcaataacttttcttcttctatcagttcaacgttcacacactttttccatttcctcgacaaactcctttttttctctcacttttctcgaattctttttttttttttttctctcaacgaaacataaatcctctgttttggtttaagagatggagatagaagcaagcagacaacaaaccaccgtaccggtttcagtcggcggtgggaattttccggttggtgggttaagtccgttgagtgaagctatatggagagagaaagctccaacggagtttgtcggagacgtgtcagcgaggcttacgtggcaagatctgacggtgatggtgactaagggaag

SEQ ID NO: 15656 - DNA, 280 bp, Arabidopsis thaliana
  unsure at all n locations
  Clone ID: LIB25-052-Q1-E1-H5
gcccacgcgtcngcgcatctttccaaatggtgttggncatataaatgaagccggaatcgatcactannncaaacgcataaatgctttacttgctaangggatcgagccgtacgtgacactgtaccactgggatcttccacagtcacttcatgatcgatacctcggttggctaaacccacaaatcanangatggttttgcagcgtatgcggaggtttgtttccagaagatttgganatagaagttgaangcactggattcacgttaaacgngccaanaana

SEQ ID NO: 15657 - DNA, 360 bp, Arabidopsis thaliana
  unsure at all n locations
  Clone ID: LIB25-052-Q1-E1-H6
caacantgacattggtgtatagctcgatctcgaatcagtaangtctgacacttttgtctctgtcgggaaataccgagtcagatcgggttcatccactanactaattgctgtcatcgaaaagcacggngacattgctcaaaactgtaagctggaancggattcaatgcgatcacgttacctcgagtgtttatgcncactgangcaggaacttaggtcaaccccggtagggcagttgagcanngtcaaggtcaaaganatgcttgcggttctcaaanacttggantctgtgaacattgaagtancttggctacgttctgttcttgaagagtttgcgcagtctcaagaanatgtagaaantga

SEQ ID NO: 15658 - DNA, 421 bp, Arabidopsis thaliana
  unsure at all n locations
  Clone ID: LIB25-052-Q1-E1-H7
catggatttgtaagacagaggttctgggaggttgagactaaaccacctcctttgccatcactttctactgctcatgttgacctgatcgtaagatcatccaatgaggatttgaagatctggccgcataagtttgagtatagactgagagtagcattgggacatgatggagatttgacgttaacatctcgtgttaagaatactgatacaaaaccatttaacttcacatttgctcttcacccctacttcgctgtttccaatatcagtgaaatccatgtcgaaggattacacaacttggattaccttgaccaacanaagaacagaacacgtttcactgatcatganaaggttataactttcaatgctcaacttgacaggttgtacctaagcactccagatnaactaagaatcgtggaccataagg

SEQ ID NO: 15659 - DNA, 446 bp, Arabidopsis thaliana
  unsure at all n locations
  Clone ID: LIB25-052-Q1-E1-H9
tcttggtaagcattcgagagacgaagacgagacggtgaagcaaaaacagaggaatggatctgtattggttccaaagactttgagaattgatgatcctaatgaagctgcaaagagttcgatatggacaacacttgggatcaagaacgaagttatgttcaatgggtttggttcgaagaaagaggttaagctcagtaacaaagaagaaacagagacctcacttgttctttgtgcaaaccctgctgcgttatcaagatcaatcaatttccatgagcagatgtgattgtatacatatgatanatacgtgtatgtatgtatagatgtggtggaagattaagttagatccatcaaaatctgacntttttgttccttcgttgtggctacatgaagcttataatagcttttgtaccanagacnttttagtcnnttaantttgaattttggntgna

SEQ ID NO: 15660 - DNA, 415 bp, Arabidopsis thaliana
  unsure at all n locations
  Clone ID: LIB25-053-Q1-E1-A1
atcaatgaaaacctaaagcattgcttttgccttcatggtatcagagctcatggaacatagatccatggaactctactctgttccttctctcaatatttcaaattgtgtcaccgtcactcttactgccaagaactatattctctggaaatctcagttcgaatcttttcttgatggtcaagggcttctgggttttgtcacaggctcgattcctgcaccaagccanaccagcgttgtttcagacattgatgggtcaacatcggcttcacccaatcctgagtactacacctggntcaagacagatcgagttgtcaaatcctggctccttgggntcgttccttacgaagaaaantcnaagtgntgtggtccaactgganacannntcgcatgganggtnnnggnnctccnggtannnana

SEQ ID NO: 15661 - DNA, 415 bp, Arabidopsis thaliana
  Clone ID: LIB25-053-Q1-E1-A10
tctttttgtttgaagaagatgacgcatgttgaagatgataaggaattcaaggagaaacctttggttcaggttctgagcgacgacgacagtgaagtgaaggaagccaaagacggaggaggtgaagaagttaccggcggcgacggtgaaggagaggctaatgtagaagaggaagacgacgaagcagaaaatgaagacgatgatgatgatgatgatgatgatgatgacgacgacgaggacgaggacgatgaagaaggggaggaggatcttgggacagagtacctagtgaggccggttggtgaggttgaagatgaggatgatgcaagtgattttgaccctgaggagaatggcttggatgaagaagaaggtgatgaagagattgaagaagatgatgttgatgaggacatcagcttgagtt

SEQ ID NO: 15662 - DNA, 359 bp, Arabidopsis thaliana
  unsure at all n locations
  Clone ID: LIB25-052-Q1-E1-G5
tctcttaacacactcttattcttcagagagagaatgagaattccggcgacaactggtttttttgttttatacntagtttctgacttttgacggatctctctttccgcttagtcagattttaataattttcggtttagcttggttcgtttccggttaagatcggattatttttagttttatnttttttccctctttctacaggatttcagtgtaaatcccgcttgctgtcanttggtttctttcaggttcatctgttggcttgactcttctccaaagttanagtnntatcttcgccgtaatgtcttcgtngttatgcgaantggacctctctatcngtcttgggcggagcntcntccgtt

SEQ ID NO: 15663 - DNA, 429 bp, Arabidopsis thaliana
  unsure at all n locations
  Clone ID: LIB25-053-Q1-E1-A11
tcaacttattgtttgaatataaaaagagatatcaaaaagaagagaagaccaaaaacaaaacaaaaatctctaataaaaatggcttccaaagctatcttcttctctttctttgtcgtctccgccgtgtgtttgtcttctctggcaggtttcgccgccgctgatgctgacgacttcgatcgtttccagattcaaggatcagtttactgtgacacttgccgtgtccaattcgttacccgtctcagcaaattcctcgaaggcgcgaaagtgaagttggagtgcaggagcaagaacaaacggaaccataacattgaccaaagaagctgttaccgacaaaacaggaaagctacaaaatggaaagtaaccggtgaccacgaggaanaagtttgcaaccttgttttggtccaaatcaacaagacagtgggntgcang

SEQ ID NO: 15664 - DNA, 513 bp, Arabidopsis thaliana
  unsure at all n locations
  Clone ID: LIB25-052-Q1-E1-E2
gnnnnnnnnnggaactgggtctgccttnncctacgcctccgcgaaantcccgangtcgacccacgcgtccgaaaggaaagcattatgngaagctgaaaggtcgcttanaagaagcggaacttaaactcatcgaaggagaaaaactacggaagaagttgcacaataccatacaggaactgaagggaaacatccgtgtattctgtagggtgagacctctattatcaggagagaattctagtgaggaggccaaaactatatcctaccctacatctctagaagcacttggtcggggcattgacttgttgcaaaatggacaatcgcattgtttcacatttgataaggtttttgtgccaagtgcatcacaagaagatgtttttgtanagatttctcaacttgtccanagcgctcttgatggttacaaggtttgcattttcccatatggacaaacaggatctggaaaaacttatacaatgatgggtaggccaggaaacccngatgaaaaangactgattc

SEQ ID NO: 15665 - DNA, 502 bp, Arabidopsis thaliana
  unsure at all n locations
  Clone ID: LIB25-052-Q1-E1-E4
gnnntnnnnggaactggtttgccttnncctacggcctccgggaaatcccgangtcgacccacgcgtccgcgagaaccatggcgggtaagcagatcggcggagacggaggtttaccggcaaatctcgccggaatgactaaaagtcagctctatgatattatgtctcaaatgaagacgttgattgatcaaaaccatcaacaagcgagggagattctgattcggaaccctcttttgacgaaggctcttttccaggttcttcttcacttcgctaatcttttccatcttctaaatctgcaatccgtgtggtcttataagcaatgnggaattctgatttggancttcttacttgagtaaattgattggactagtttgggtttagtattgttgaacaagcatgcannaatcatgntcggaatggttcagcctcctcaagtgactccgaaagttgagccaaannctgtacgacaacctcnncattctcatgnntctntcncgcccangcc

SEQ ID NO: 15666 - DNA, 409 bp, Arabidopsis thaliana
  unsure at all n locations
  Clone ID: LIB25-052-Q1-E1-E6
ctacggcgaggatgccgccaccgaggacatgcctatcactccttggtctctctctgtcgccagtgggtatacgttgttgcgtgatccacatcacaacaaaggccttgcctttagccacagagagcgtgacgctcactatctacgcggcctcctcccccccactgttatctcacaagatcttcaggttaaaaaaattatgcacactcttcgtcagtatcaagttcccttgcagaagtanatggctatgatggatctccaggagaccaacnagaggctgttttacaaacttctcattgatnacgtcgaggagttgctacccgttatctacactccaacggttggggaagcctgccagaagtatggtagcattttcctgcgtccacangggctttttaacaacttgaaagaa

SEQ ID NO: 15667 - DNA, 442 bp, Arabidopsis thaliana
  unsure at all n locations
  Clone ID: LIB25-052-Q1-E1-E7
ggaactctcatttcttatgaaggcaaagtccagcttctggagattgctcaggttcctgatgaacatgtcaatganttcaaatcaattgagaagttcaagatattcancacaaacaacctatgggttaacttgaaggccatcaaaaagcttgtggaagctgatgcacttaaaatggagatcattccaaacccaaaggaagttgatggagtcaaagttcttcaactggaaactgcagccggtgctgcgataaggttctttgacaacgctatcggtgttaatgtacctcgctcacggttcttgccagtgaaggcaagttcagacttgctgctcgtccagtctgatctctacaccttagttgatggctttgtcactcgaaacaaagctagaactaacccctcnaacccgtcaattganttgggacccgagttcaaagaaggtggct

SEQ ID NO: 15668 - DNA, 454 bp, Arabidopsis thaliana
  unsure at all n locations
  Clone ID: LIB25-052-Q1-E1-E9
gcgaaactaaacctgagagaaaaagccagaagaaccaaactcagaccgagagatagagattgagggagagctctagctctgtagaaaagaaggattcattcatcatatccagaaatggctctaaagtttaaccctttggtggcatctcagccttacaaattcccttcctcgactcgtccgccaactccttctttcagatctcccaagttcctctgcctcgcttcttcttctccggctctcagctccggccccaaggaggttgagagtttgaagaaaccatttacgccacccagggaagtgcatgttcaagtcttgcactccatgccacctcaaaagatngagatnttcaaatctatggaaaactgggccgaggagaaacttctgattcaactcaaggatgtnganaaatcttgggaaccccangaattcctgcctgaccccgcatcagatggng

SEQ ID NO: 15669 - DNA, 457 bp, Arabidopsis thaliana
  unsure at all n locations
  Clone ID: LIB25-052-Q1-E1-F11
cntctacctctgctccaatttctctgaaaacaagaaaaccttaatcaatcgaaatctcagtgtaactaatcaatggagatcaagcctggtttatccgctctcgtcactggcggcgcctctgggatcggtcgagctctctgcttagctcttgcagagaaaggagtttttgtaacagtcgctgatttttcggaggagaaaggacaagagactacttcgcttgttcgagaagcgaatgccaagtttcatcagggcttaagctttccttctgctatctttgtgaaatgtgatgtgactaatagaggagatctcctcgctgctttcgataagcatttagccacatttggaacacttgacatctgtatcaacaatgctgggattagcactcctttaagatttgataaagatgacactgatggatntaaatcatggaaacacancattaaagtcgatttgaatg

SEQ ID NO: 15670 - DNA, 513 bp, Arabidopsis thaliana
  unsure at all n locations
  Clone ID: LIB25-052-Q1-E1-F3
ntggnntnnnggaantggtcngcctnnnctaggcctccggaggtcccaggtcgacccacgcgtccgcccacacgtccgcatttctgaaatctctcaacttcatcatcaagtgggttcctatgagagtgacgactctttgattgcttcgccacatcttttatttttatccttctaagtcatttctctatctatccatatagataaaaaccttctaatagatctctgtgtcattttattcgtaagaatgagatctagtgtagaagataacaaaggatggataggaccagcgacaccggagatatcgaacggttttgagtttcagaaaggttcgaaccggacaccaaaccatcaccggtctactatggggaagccagcgccgtcaaaatgggacgatgctcagaaatggctttctggtgtanggtttgctcgtggaggtggtggaggtggtgacaagagtagtcatcactcaagaagtaataagccgagaaactcgaacgcggatgatcttagact

SEQ ID NO: 15671 - DNA, 507 bp, Arabidopsis thaliana
  unsure at all n locations
  Clone ID: LIB25-052-Q1-E1-F4
nnnnnnnnggaactggtntgcctgtnccctacngccccggaaatcccgantcgacccacgcgtccgaggaagctcagttcagcagccctaacctcaatgtagcttacaaaatgggagtccgtgagtaccaagacctcactccttatgcaaatgccctggaagaaaactgggggaaacctccggggaaccttaactcagatggagagaaccttcttgtctatggaaaagcgtacggtaatgttttcatcggagtgcaaccaacatttgggtatgaaggtgatcccatgaggctgcttttctccaagtcagcaagtcctcatcacggttttgctgcttactactcttatgtagaaaagatcttcaaagctgatgctgttcttcattttggaacacatggttctctccagtttatgcccgggaagcaagtgggaatgaatgatgcttgttttcccgacagtcctatcgggaacattcccnatgtctactaataagcagctaacaatccct

SEQ ID NO: 15672 - DNA, 441 bp, Arabidopsis thaliana
  unsure at all n locations
  Clone ID: LIB25-052-Q1-E1-F5
tgttttgctttagttggaagcattaagagaacagccatggcttcttcttcaatctcattctcctgtgcaccttctttggccacctcactcttctcnaccacttcttcttccccaaggctgctctcctctagatttctcggaacccnaaanttaaagcttcggatccgacctgccagnctaggatcctccaatggttcagganccacttgctggttcaagttcngcaagaatggtgtcgatgctganaatgccggaatctatggcagccagtctcgagatgatttcgacagagacgacgtccancagtatttcaactanatgggtatgcttgcagtanaaggaaccnattcananatggaagctcttcatnncctaaacattcncccagttgatatcttgttgatgttagccgctacanaangtgacagacctaaagatcga

SEQ ID NO: 15673 - DNA, 458 bp, Arabidopsis thaliana
  Clone ID: LIB25-052-Q1-E1-F9
aaaagtgtaagagacaaccaacaaaaaacgattcatctcttctcctatcctctcctcttcgaattcaacgtttggagaatccaagcagccgcaaaatggcttcgcttgtgtattctccattcactctatccacttctaaagcagagcatctctcttcgctcactaacagtaccaaacattctttcctccggaagaaacacagatcaaccaaaccagccaaatctttcttcaaggtgaaatctgctgtatctggaaacggcctcttcacacagacgaacccggaggtccgtcgtatagttccgatcaagagagacaacgttccgacggtgaaaatcgtctacgtcgtcctcgaggctcagtaccaagtcttctctcagtgaaagccgtgcaatctctcaacaagacttcgagattcgcatcctacgaagtggttgggatacctggtccaagaacttaaa

SEQ ID NO: 15674 - DNA, 440 bp, Arabidopsis thaliana
  Clone ID: LIB25-052-Q1-E1-G1
ctcctcctccttccattcttggtcttcgtatccataattcttccctcaagctgccatggcgaatgggaaatcctcacggagcaaaacttctcttctcagatccgtctccaccctcacgtcctcctctttgtcaccactccatggtgtggtgagtccagatctcttaagtatgaaattactcagatggttcagagaagagaagagtttggcttgttgaagttaatggttgtatacagaaactcagaaaaggtgttagcacaagccattggtgctgctgtcaatgggataacaattttgtactatcacaatagtgtgccttacaactatctagggaaactccgagcctcgaatatattgtcatctattcatccttatctgacatctacgcctgaagaactccctctcaaacatttgaagtctccaaaagatttgaaaagatt

SEQ ID NO: 15675 - DNA, 455 bp, Arabidopsis thaliana
  Clone ID: LIB25-052-Q1-E1-G10
aaaaacaaaaaaataataaaacaaaaaaatatctttttttttttctaataaaaaaaaaataataaataaatatgagatacacaaatgtgtccattttattaggcatgttggtgatctttgtttcaccaatggtgttcgcagatgatttgacaccaatcccagagggcaaaccccaagtggtgcagtggttcaatacccacgttggtccattggctcaacgtaaaggcttagatcctgctctcgtagctgctgaggctgctccacgtatcatcaacgtgaatccaaagggaggtgaattcaaaacactaacagacgcaataaagagcgttcccgcagggaacacaaagcgggtgatcataaagatggctcatggtgagtacagagagaaggtcactatcgacaggaacaaacccttcattacattgatgggacaacccaatgccatgcctgttatc

SEQ ID NO: 15676 - DNA, 522 bp, Arabidopsis thaliana
  unsure at all n locations
  Clone ID: LIB25-052-Q1-E1-G3
tgnnnntnnnggaactggtcngccttgntctaggcctccggggaccatcccaggtcgacccacgcgtccgatcggagcattgagcaacacaatggaggaggaaccggagagaaggaaagctatcgctctcttcatggctttcggtaccaaaggcgatgtctaccctctcgctgccattgccgcagttttcgctcgtgttcaacaacactacactgtggttttgatgtcacatttggctcatgagaacctaagctcccatttgagtaaagcaaaagtttcatattttcctatcaattctcctcctgctctgtctaatgaacctcagggtactcaaaacgtcacagactcgctgaggaaaatgtttttggaggaaaaagaaaggataaaaagggaacacagacaagagtgtcattctgcattcaagaancatttttcngaaaaggattccttgtatgggaaggttaattccgtgtcataaaattcctttgcaattggaaaggatgaacccaaccanaanttttc

SEQ ID NO: 15677 - DNA, 454 bp, Arabidopsis thaliana
  unsure at all n locations
  Clone ID: LIB25-052-Q1-E1-E12
tccgtctagagaaatatcctcaccaaaataataacatgtaatgtgtatacagtatacctaatcaatcattatctttctttaattttgttggattttttgcatattgcaaagtttagaacgcgagcgaattctccgcggaattggggttaaaaggaagaacttttagggtttttgattcttcgggttttctcgtgctttgattcctttcaagtcaaagcaaagcattaccttttctcgtcnatatcttttgacgacctaagtttctgctgtgaattgttaaacagccatcagcctgggcttgattagccaaccctgttaaggcannggtttgaactaaaagtgagatantgagatggatgtctcagcacttttaacgtctgctgggattaatatagcngatatgcgtagtgcttgtatcgcctttagtccattctacgaaagcagncagccantt

SEQ ID NO: 15678 - DNA, 450 bp, Arabidopsis thaliana
  unsure at all n locations
  Clone ID: LIB25-051-Q1-E1-B5
caagatatcttaactttagccattaattcaaagtttttttttctttctaatactcgaaatggctttcttaaggagttttttcgctaccaagcatatcattcgccggtcttttactacggaatcattatcaacgcctaaagggttctttgctgtgtatgttggagaaaatctgaagaagaagagatatcttgttccggtttgttacttgaacaagccatctttccaagctttgcttaggaaagcagaagaagagttcggttttaatcatccaacgggcggtttgagtttaccatgcgacgaagctttcttcntcactgtcacttctcagattcgttaatcccatacaataattaaagtcttttttacattcncttatttatanangannatacacattgtacatactaatacctttatntacatactgatgagaagaataantcaacgnag

SEQ ID NO: 15679 - DNA, 335 bp, Arabidopsis thaliana
  unsure at all n locations
  Clone ID: LIB25-051-Q1-E1-B6
acacatctctgatatttgctgtttcatagggacaatataaaggtagtttcattcacagtcatgggaaactgaggcttgtgatagcctcgaaatgaagttacaatgttttggattttgaccggaaaggttgtgcagaggtgagaaaaagccaagccattcttttgtttaccaagtgaggtgatataacatttttctggggtttttcttttaattcagccaataaaacgtaggaaattttggacataattttttcttttatggttcttcatgtttaaacattagttttcacgtaatttacttgcgtatttctcatcgattaaaanaaaaaaaaaaag

SEQ ID NO: 15680 - DNA, 456 bp, Arabidopsis thaliana
  unsure at all n locations
  Clone ID: LIB25-051-Q1-E1-B7
caatgagagtgaaaaagactatgatttgctgccaaaggtggttgagttttctgaggaaaatggttatagaagtgcagaagagaagtcttctaaagtagagaccctcgatggcatgaacatgaaacttgaggaggacaccgagaagaaggaaaagaaagaacgttctccagaggatgagacagttgaagttgaattcaaaatgtgggaaagttgtcagattgagaagaaagaagtttttcataaagagtctgcaaaagaagaagaggaagacttaaatgtggtggaccaaagccagaaaacctcgccagtaaatggattaacccggagaagatgagctgttgaaagagaaagagaaagaagaagaagaagacattgtttggtaaanttnggaatcttcncaaagaagaaaggncccgtgaatcagaaataaatgaaacctcncctgattactacact

SEQ ID NO: 15681 - DNA, 327 bp, Arabidopsis thaliana
  unsure at all n locations
  Clone ID: LIB25-051-Q1-E1-B8
tcggtttgccctgggcctaacgganaccggaaaatccgggctcgaacccaagcgttcaaggttcnagtagggttcataaatatcnntgaaaaccaccgtttggtgatacttcgtcgtcctcgacactctcaagattcatcatcgaacctgatggcgaataatcctccgcagtcttctggtanccagtttcgggcgatggtacctggaaaagcagggtcaacattttgttccctgnagcttcacaaccttttcaaccttatggacatgttccctccnaatgttcaaaagtcagcctccnnnagtantctcagcccganacagnnanca

SEQ ID NO: 15682 - DNA, 450 bp, Arabidopsis thaliana
  Clone ID: LIB25-051-Q1-E1-C10
gctttgcctttgtctttgatttttctctgtatcgtcggtctctcttttgcgtttctcgatcccaccgtctaatccttctccggccaatgactatgatgactccgcctcccgttgatcagccagaagatgaggagatgcttgtgccgaattcagatttggtcgacggtcctgctcagcccatggaagttacccaacccgagactgctgcgagtactgtggagaaccagccagctgaggatcctcctactctgaaattcacgtggactatccctaatttctctaggcaaaacaccaaggaagcattactccgatgtatttgtcgttggaggttacaaatggcgcatattaattttcccgaaagggaacaatgttgatcatttgtccatgtacttggatgtttccgatgctgcgagtttgccgtacggttggagcaaatatgctcaattcagt

SEQ ID NO: 15683 - DNA, 514 bp, Arabidopsis thaliana
  unsure at all n locations
  Clone ID: LIB25-051-Q1-E1-C12
ctggtttgcctgtacntaccgntccggaantcccgnagtcgacccacgcgtccgcctaattcgatcgtcgtctccgacctacatctgccggaaaatatcttttgaccatggatttcaggattgataatggagtagctgctgggatgatgatggggattcctgttgagcttgaggttaccacggttgagaatcataatgaaatgggtgaaagctctggtcaagcaatgattgagcaagatgatgacaaccataatgaactcggtgaaaattctggtgagcaagatgagaaggtggatcttgattctattcctctggctgttgcagatatgacagaggctcaaggagatgagccttacgttggccaggagttcgaatctgaagcagcggctcatggtttttataatgcgtatgctactaaagtaaggttcgtcatccgtgttagtaaactgtcacggtcaangcatgatggatttcccataagcaagcaacttgtttgtaacaangaaaggtacag

SEQ ID NO: 15684 - DNA, 452 bp, Arabidopsis thaliana
  unsure at all n locations
  Clone ID: LIB25-051-Q1-E1-C2
ggntaagctctctctttcctccatcttcttcgtcttccctctcctcctctgtttcttttccccttcttcttcttcatcggatggcttagaatcctacatcgtccatgtgcagagatctcataagccttccctcttctcctcccacaacaactggcacgtctctctccttcgctctctcccttcttctccccaaccagcaacgctgctctactcttattcacgcgccgttcatggcttctccgctcgtctctcccctatccaaaccgccgccctccgccgtcatccttcagtcatctccgttatacctgattaagcgcgtgagattcacacaactcacacgcctgccttcctcggtttctcccaaaactctggactctggagcaactcaaattacggggaaaangtgattgtcggngttttagatactggaatctggcggaacatcaagtttc

SEQ ID NO: 15685 - DNA, 523 bp, Arabidopsis thaliana
  unsure at all n locations
  Clone ID: LIB25-051-Q1-E1-C3
nnnnnnnnngaactggtttgcnttngccctagccgtccgggaaatcccnggtcgacccacgcgtccgcatggctccagatcctccagaaccacaggatctgccagagatttgtagggatgttatgatggaatactcaaagcaagtgatgattttgggtgaatttctgtttgagcttttgtcagaagcactagggttgaaccctaatcacctcaaggacatggagtgcttaaagggtttgcgcatgctttgccactacttcccaccgtgtccggagcctgacctaacttttggcacaagtaagcactccgacggctcttttcttaccgtccttctaccagataacatagaagggcttcaggtttgtcgtgagggatactgggttcgatgttcctcatgttcccggcgctctcatcatcaacatcggagatctctgcagcttataacaaacgacaagttcatcagtttgaagcatanaatattggcgaacagagccacnagaactcgagtctcntcgcatgtttc

SEQ ID NO: 15686 - DNA, 448 bp, Arabidopsis thaliana
  unsure at all n locations
  Clone ID: LIB25-051-Q1-E1-C4
gcccacgcgtccgcttcatctccatttctcacactcaaaggttaagaagaaaagatggcgaaaaagttggaagctcaaggtggtcgtggaggagaagaatgggacgatggtggtgcttacgaaaacgtcaagaaagtgtatgttggtcaaggtgattctggtgttgtttacgtcaagtttgattacgagaaagatggaaaaatcgtatcacacgaacatgggaagcagacactacttggaacagaggagtttgtggttgattcanaagattacataacatcagtgaaaatttactacganaagctctttggatcacgatagagatctaacggctcnaatccttaagacattcaaaggggaaaactctcaaccctttgggacaacctctgggagaaaaanctgaactaagaagtggcaaaatcntttggattcatggaantcaagtnaa

SEQ ID NO: 15687 - DNA, 244 bp, Arabidopsis thaliana
  unsure at all n locations
  Clone ID: LIB25-051-Q1-E1-C6
cagttttgtataatcttcagatcttttcatgtagctctcattggcttgtgttgtgtttgtaagtaagtgtgaggcacattcaaagaaaaacatcatatgattacttctttgagaaactttgctctcattaggaaagtaaaataattcaagaaataagcacaaccttgtgtagttttgaaataatacttgtattttttttgttgttataaaaaacaaacnccgtnnaaggnncncngcncgtnnc

SEQ ID NO: 15688 - DNA, 443 bp, Arabidopsis thaliana
  unsure at all n locations
  Clone ID: LIB25-051-Q1-E1-C7
gtctgacttcgcttctcctctcacatggctctacctaaccaacaaaccgtagattatcctagcttcaagctcgtcatcgttggtgatggaggcacagggaaaacgacctttgtgaagagacatcttactggggagtttgagaagaagtatgaacctactantggtgtggangntcancctttggatttcctcacaaactgcggaaagatccgtttttactgctgggatactgctggacaagagaaatttggtggccttanggatggatactacatccatggtcaatgtgcgataataatgtttgacgtcacagcaaggntcacatacaagaatgttccgacattggcatcntgattttgcaaggggttttgaaaacatcccgatgntctgtgtgggaaacaagtccattttanaacacgnantntaagnaagcagtcccattc

SEQ ID NO: 15689 - DNA, 447 bp, Arabidopsis thaliana
  unsure at all n locations
  Clone ID: LIB25-051-Q1-E1-C8
caacgaaaactcagtgcctcgtccctctctttcaaaaaggtttttggttatggcgacgaagaaagtgatagctatatgtcagtcaggaggagagtttgtaactaataaagatggctcattagcttattctggtggtgatgcttatgccatagacatcgatcaggacacttgtatgagcgatttcaaatccgaattagctgaaaatttcgggtttaagttgggagaatatgacactcaagtacttcctccctggaaacaagaaaaccttaattactatctctaaggataaagatttccaacgcatggttagcttttccgcagacgcaccaaatgtcgaaatcttcgtcttacccgaagaagccgaagcaaggaatgtctccaacatgccagctagtagatcaagtaggacaactgcatcagaancagtggtacctgtagtgtctgcag

SEQ ID NO: 15690 - DNA, 440 bp, Arabidopsis thaliana
  unsure at all n locations
  Clone ID: LIB25-051-Q1-E1-C9
gatccggttcagaagcggagcttctcgaattcggtgtaacggatgatttgagagagttcgctgaaggcttgacctctgctacattccaagcttttcctgatcaagatcaaggggatgaagtttccgatgtgataacaaatgcttcgaatgttcgaaaggatctctcggattggcaagagagacatgccactctggttctaacctctgtcaagcaaatctccaagttaagatacgaactttgccctcgtttcatgaaagaaaggaagttctggaggatttatttcacactantgagcactcatgtttctccatatgagaagaaatncatggangaacttaagaccaaaggagaacatggaaatgaanaaactaagaaagntccaacgactggagaaacanaaacantttaaaanaagtttccaacccttaanatctaccgg

SEQ ID NO: 15691 - DNA, 290 bp, Arabidopsis thaliana
  unsure at all n locations
  Clone ID: LIB25-051-Q1-E1-D1
nnnacgtnacnttgtcgagactattgagctccagatacctactattggtgtggaggttcatcctttgggatttcttcacaaactgcggaaagatncgtttttactgctgggatactgctggacaagagaaatttggtggccttaaggatggatactacatccatggtcaatgtgcgataataatgtttgactcacagcaaggntcacatncangaatntccgacatggcatcntgatcttgcagggtgtttnaaaacatcccgattgttctgtgtggaaacaaattcntt

SEQ ID NO: 15692 - DNA, 457 bp, Arabidopsis thaliana
  unsure at all n locations
  Clone ID: LIB25-051-Q1-E1-B4
aacaaaggaaaagctatacgtgcaggagtgattcccacgttgactagactcttgacagagcccggaagcggaatggtcgatgaggcactcgcgattttggcgattctctctagccaccccgaaggaaaagcaatcataggatcctctgatgcagtcccaagtttggttgagtttatcagaactggctcgcctagaaacagagaaaacgcagctgctgttctagtccacctctgttctggagacccacaacatcttgtcgaagcgcagaaactcggccttatgggtccattgatagatttagctggaaatgggacggatagagggaaacgaaaagcagcgcaattgcctnaacgcatcaaccgtctcgctgaacaacagaaagaaacggtgtttcacaaccggaaagaanaaactgaaacaacacatccagaatccaacacagaagctgcagatactt

SEQ ID NO: 15693 - DNA, 82 bp, Arabidopsis thaliana
  unsure at all n locations
  Clone ID: LIB25-050-Q1-E1-H2
tgggttaaccggtggggtcaatccgttaaagctgttttcgnccgaanctattcccgatcaaanttggtggtcctccanttcc

SEQ ID NO: 15694 - DNA, 462 bp, Arabidopsis thaliana
  unsure at all n locations
  Clone ID: LIB25-050-Q1-E1-H3
gattaaaattttgaattcttcatcatgacgacgacgacgacgattcagtctcctctctctacacgttgaatttcaatcggcttcacgaaccttcaacctcgtgcggatcgaaattcgatcagtttgtagtaaccgacaagttccgaagatttttcatctgctggatttcgtcgatcagattgaaaccgagcttttcaatcaggtgacttggatatttctctacgttatgctcgatctgaagaattgggattcaaatctagtctcatagatcgattctgattaaactcgtggagatccaatctctatcactagttcgaatggattgttgtttgttancttcaagggctctctgtgtttgtgaagtgagatggtataattgcatagctcaatctcngnctgcaaatccgtcgacccaatgatcatgtccnantcctcanctaatccaganacaacccgttatta

SEQ ID NO: 15695 - DNA, 446 bp, Arabidopsis thaliana
  unsure at all n locations
  Clone ID: LIB25-050-Q1-E1-H4
caaacccggcgaattggactatcgttgtcggagtttgtcagtggatgaattgccatggctaaatctaaccaaaacttttctccgtatgaagagacccagccgattgattctaatccaccttcttcttctgattctggcgaggataaagatagcttgcttggggattgtgacacacaacctgttgatgacaatgctttgattaatgatcagtatatggagactcaggtcatggatactgaatgtgataatgaagaatttcttctttgtaatgaaactcaagcagttgatttgggatttgaaaccggagaagaagtacttgtanaagggaaacagttacttgaaanctcctgatgggnttgggctactcaaggttttgggtctttgtgaatgaatgaaagttgttgtgggatagtggattgatgaatgtttaccngaaggtgttgggg

SEQ ID NO: 15696 - DNA, 470 bp, Arabidopsis thaliana
  unsure at all n locations
  Clone ID: LIB25-050-Q1-E1-H5
actgaagaaagccctaagaataaaaagcctgttgtgggaatggaacaagctgcagagaggagttcaaccattgttgcatccacctctgaagggtcggattttgatccgatatctcgattgaggaagctcttgttccgccaaatgcttgtgggaatcaaagacggcagattcttccttggaaatttccattgcattgacaaacaaggaaacatcattctccaagacactgtggagtatcgtagcatacgaagatcatctccttcgcctactgaacagcgttgtcttggtatgatcctaatcccttcctcttgcaggacatcttgccatgttgattgctctatcgatgaacagctttcgttgattcagctgaanagaagtagaagcttccttttaagacttcatgaagagaatccttccaaagtttcatcaatgttgtaancaatnataaggtccttgtcatgggatttagg

SEQ ID NO: 15697 - DNA, 468 bp, Arabidopsis thaliana
  unsure at all n locations
  Clone ID: LIB25-050-Q1-E1-H6
aaacctagatgccattgtgaagaaatttatgcagctgacaaacgcacataggggagatgtcaaagttttggttaccacactcattccgcttccccctgctgaggagaaagaactgactganacgcttcaggagatcattggagcagggaanaaaatcactgtggnacaaaanattgatccaagtatctacggtggactaatcgtagagttccaacaaaaggtgttggacatgtcaatcaggacaagggcacaacagatggatangctcctccgtgaacctgttgacttcaacaacctctgaanatcctgagagaaatttcccccananaaaacatgcttgtgatgaatgccaccannttgacaaatnaatatggaccctncctnggaaacaanataaanancctggccacntctctccctttgaatttggncaanttgcctttntacanaactgttgtttgcctcgag

SEQ ID NO: 15698 - DNA, 75 bp, Arabidopsis thaliana
  unsure at all n locations
  Clone ID: LIB25-050-Q1-E1-H7
ggttgaggnacggaatcctgtntggatcaagccatcnatacaccccacgttccgtcggttttctcgtttgatggc

SEQ ID NO: 15699 - DNA, 468 bp, Arabidopsis thaliana
  unsure at all n locations
  Clone ID: LIB25-050-Q1-E1-H8
cacaagtattcatctcgacgagctgttcgtcgactaggtacacgcgcgatcagatcagcgtcgctttcggcgatggctatggtaaccagatatacgcaccaaggcttgatgatccatctacaaaaacgtttgagcaatgttcatcaagatacatttcagataaacggaccatgtacataccagatatgctatgtatatctctacaggtctggtccagatggttggatcccaaacactgtaaagatatatagccatggctctaaagcggtcaccttcccatataacacatatgttcctgagagtgtatggtatggtttcaattactgcaacagcgcctcagattctaatggtccttgccaattggtcctcangaaggagcgtggatcaataactccctaaggtttggttgtcncccggtacaacattgctcttgtaacccggttatgttcccggttttgtanaaacaaa

SEQ ID NO: 15700 - DNA, 305 bp, Arabidopsis thaliana
  unsure at all n locations
  Clone ID: LIB25-051-Q1-E1-A1
agattcaccagctgtcacgtccacgccgttggttgtaacggagcatccggtggagcctacgacggagcttccagtggaacatccggaggagaagaaggggattttggaaaagatcaaagagaagcttccaggttatcatgccaagaccactgaagaggaagtgaagaaagaaaaanagtctgatgattaagcaaaatgggttaangaatgaataatgatgtgggangtggacattcgctgtgttttgtgatcattancnttctcttttaggnttgtaatgtngncttngngtgattgcattngat

SEQ ID NO: 15701 - DNA, 462 bp, Arabidopsis thaliana
  unsure at all n locations
  Clone ID: LIB25-051-Q1-E1-A10
cttcgtcggagtcggagcagagaaaggttttggagatcgagaccaaactccgattgaaagaggatgcattcttttggttacagagcgaatgctctactcacattcgccgtcacgattctagctttcatttgcgcgattgcttccttctctgataacttcagtaaccaaaatccctctgctcagatccagatattgaatatcaattggtttcagaagcaacctcatggaaatgatgaggtcagcttgacactgaacataacagctgacttgcagtcactatttacntggaacacaaagcaagtanttgcttttgtagcaacagagtatgaaaacctccaagaacgccctgaatcaagtttcactaagggatgccataatancaagagaaagagcatgccaaattctggatacaaatctcaaacaagttccgtttcatagatnagggacataactccganggga

SEQ ID NO: 15702 - DNA, 66 bp, Arabidopsis thaliana
  unsure at all n locations
  Clone ID: LIB25-051-Q1-E1-A11
ttttanaaaccgttcnttgaaccgggggaaaaaaccctgggcgtttaaccccaaaccttnaatcng

SEQ ID NO: 15703 - DNA, 500 bp, Arabidopsis thaliana
  unsure at all n locations
  Clone ID: LIB25-051-Q1-E1-A3
nngttgcctggccctncgganatcgaaggtcgaccnacgcgtccgcggangcgtgggccttcaccaccaaatcggtgcctccttgaatagtcgccgccgtcgtctatcatcgccgcttgtgactccgatgagaagctangttattgaatcagagattatggctgcttcaatttcaagaaggatttttcgcacttttggatccttttcagctctaggacgttcctcttcaccaaatttgtctgcgaatacatctggaaatggtttagcttctcttactaatgatctaaagtatggaatggctttacttccaaccgaaagctctccacttcnatttgactcctgatgatcaattccntctgattactancaaaaagactgtgcttacaccagaccgaaccataggacaanatcaagacttggncaatccaatgnctaaatttcagaacgaagaaaaagggttcaatgggtttaacaagtgatgtccttgaagttccaanaag

SEQ ID NO: 15704 - DNA, 454 bp, Arabidopsis thaliana
  Clone ID: LIB25-051-Q1-E1-A4
ggatggatcttcttattgagcttagtaggcatcacaccattagctgaacgtctcggatatgccaccgagcaattagcttgttacactggttcaactgttggaggtctcctaaacgctacatttggaaacgtgacagagctgatcatatcgattttcgctcttaaaagtggaatgatacgtgttgtacagctgacattgctcggctcgatactttctaacatgttacttgtacttggctgcgccttcttttgtggcgggcttgtattttcccagaaagagcaagtctttgacaaaggtaatgctgttgtgaattcgggattgctttgatggctgtcatgggactactcttcccgcagttcttcattacacgcacagtgaggtcatgctgggtcatcagagcctggctctctcaagaatcagcagtgcataatgctcgttgcctaagctgctactc

SEQ ID NO: 15705 - DNA, 458 bp, Arabidopsis thaliana
  unsure at all n locations
  Clone ID: LIB25-051-Q1-E1-A5
tcctctcctttgcctattttctaaaatcttctccggccacccaccggccaccttatgatctttttggtggcggcgattacaccatcaatttgttagtttatttatatattaatatgggttgcggtggctcgaggcttggaggtgtggcgacgacaagggcggaagaaggcggggttgtgccacttccagcgggaatacgtccccttctccggcgaangttagaggagatgaagaaacggagccatgcaggcgtcttgaaagggagccaagacttgtctaagaaaagaacntcntaagcataactcctccgaaggacgggagaaaatacnggngaaaaacaacggtaccttgaagncttccgccaaaggttctnccgnccctgattnatatgttnaaagaaaaanaagaaggtaattnataaaaanattccacccaagntnannttaaaaaggntnagg

SEQ ID NO: 15706 - DNA, 458 bp, Arabidopsis thaliana
  unsure at all n locations
  Clone ID: LIB25-051-Q1-E1-B10
agctcaaagctcagtgtttaataattgtatagcttttttggtgaacgaagagtcagatcggcgagcctgagatgggttggggttcggtgttgctattactggcggtggctcttctttgtcagagggcaagttcaatcggagctaactggggcacacaggcgtcgcacccacttccaccggacatagttgtgcggatgctaagagagaatggtattcagaaagtaaagctctttgacgccgaatacgacactctcagagctttgggcaaatccggaatcgaagtcatggttggtattcccaatgagatgcttgcgactctcgcctctagcctgaaanctgctnagaaatnggtttcnaaaaatgtctctacncacatctccacccganaacgtcnacatcanatatntggctgttngggaaanaaacttcttgtntactataanggngccatctnantt

SEQ ID NO: 15707 - DNA, 457 bp, Arabidopsis thaliana
  unsure at all n locations
  Clone ID: LIB25-051-Q1-E1-B11
actcgccattgatacacgagagatagagagagagatttgtgtgagagaaatccatggcggaatcttgcagagtgaggaggataaagctaggaagtcaaggcctagaggtatcggcgcaaggccttggttgcatgggactcaccggtcattacggtgcttccaagccggaaactgaagccatcgctctcatccaccacgctattcactccggtgttactttccttgacacttctgacatgtatggtcctgaaaccaatgaaattctcctcggaaaggctcttaaggatggtgtgagggaaaaagtggagcttgcgaccaaatttggaatcagttatgcagaaggaaacngagagattaaggganattctgcttaagttaaaanctgccctgttaagctaattttaaagagactatattttcctgcatgatntgnattatcaacatccggtttatactc

SEQ ID NO: 15708 - DNA, 524 bp, Arabidopsis thaliana
  unsure at all n locations
  Clone ID: LIB25-051-Q1-E1-B12
nnnnnnnnngaactggttgcctgtncctacggcccggaatcccgngtcgacccacgcgtccgcgaagaaggatctttgttttcttcctcttctccttcttctactttcgaacactcgtgaatctgattctactctagtctaattgggtgctttcgatttctgaataaaaattcgattttggtctgacgattaagaaagcgaaagtgatggccgccgtaaatggatatcagggaaatactccggcagatcctccggcgtctaatggatcaaaacaacctgcggctccgaccaagactgttgacagccaatctgttctcaaaagactgcaatctgaattgatgggcttgatgatgggcggtggtccaggaatatcggctttccctgaggaagacaacatattctgctggaaagggacaataacaggaagcaaagatactgtgtttgaangaactgagtacagactctcactctccttctccaatgactatcctttcaaacctccaaanggtaaatttgagacatgt

SEQ ID NO: 15709 - DNA, 451 bp, Arabidopsis thaliana
  unsure at all n locations
  Clone ID: LIB25-050-Q1-E1-H12
aaaggcatacaatgagcagtggtggaacagcagctagtcactgggccttgggtttaagaagatggnanatattgtgggcaattcattagccttgaaaggcgcgtctgatgaagatagaagcggaagctcaatggggaatactgtgaagccagctagaaggtatcctctggtaacatataacccaggagttcaaattaataacgtcaaatcaaaggctacatcaaaccctagatggccaagagtggttctaaaaatcagtggtgcaactcttgcctgcaccggtcctaataacattgatccaaaggtaatcaatctgattgcaagagaagttgcaatggcttgtcgtcttggtgtanangtagcgatanttgttgggagtcggaactttttttgtggcaacacatgggtaactgccactggtttggataaaancactgcatatcatataagt

SEQ ID NO: 15710 - DNA, 474 bp, Arabidopsis thaliana
  unsure at all n locations
  Clone ID: LIB25-050-Q1-E1-E3
gctttgngtcattcttactagcgctgttccgcagatgaagcccggttttgatcctagtaaaggaggaagacctgagttcttctttgatgatggagcttatccagaacaggttgactggattggtcagaagaatcagatagacgctgctaaggctgcaggagttaagcagattgttttggttgggtcgatgggaggaacaaacattaatcaccctctcaatagtattggcaatgctaacattctggtctggaacagacangctgancantacttggctgattccggtattccatacaccatcatcatggctggacgtctgcaggacaangacngtngcattcgagaaattacntgtgggaaaacatgacnagctacttnagacaganacaatgaaccatcgcgaggagctnattttgncaaaagtctgtgttcaaggccannncgagctttcaggaggcanaantccaaaagcnc

SEQ ID NO: 15711 - DNA, 467 bp, Arabidopsis thaliana
  unsure at all n locations
  Clone ID: LIB25-050-Q1-E1-F1
tgatatagtaagcttctttttgaaattcgaccataaaaccgtcatccacaagattcttcacacagaggaagcaggatccgaatcagaacctgaatcagagattttgagcagagggaaggagtcatgtaaagagtatattaagaatttcttggcggccataccaattagggagttgcaagaggatatcaagaaaggattagcctcaaccgcgcctgttcatcaccgtttacagatcgagtttcattacaccacaaacgcagaagattaccagtctataaaagcctaggcagagttgctaacgttttgttgagtttcttgtaagttttgtaactaacttgtgaatgtgatttagagttaaaccagtttgtanctaactatccaaggaattacattttgctccttcaaaaancagaggngcncgnggcgnnccanngnaaaaaaagggcggccgcnctanagggttccag

SEQ ID NO: 15712 - DNA, 449 bp, Arabidopsis thaliana
  unsure at all n locations
  Clone ID: LIB25-050-Q1-E1-F10
tttgagattaagcttgtcaaggagattgaaccagcattgaagaaccagctcattatctcaactgttattatgactgttggtattgctattgtgtcatgggttggcttaccgacctcctttaccatcttcaactttggaacacaaaaagttgtcaagaactggcagctattcctttgtgtttgtgttggtctttgggctggactcattattggtttcgtcactgagtactacactagtaacgcctacagccctgtgcaagatgttgcagattcatgcagaactggtgcagctaccaatgttatcttcggccttgctcttggttacaaatccgtcattantccaatccttgctaatgctancagtanattcgttagcttcanctttgctgcnatgtangggggttgctgttgcctgctcctgggatgctcagtaccaantgccactgggtt

SEQ ID NO: 15713 - DNA, 447 bp, Arabidopsis thaliana
  unsure at all n locations
  Clone ID: LIB25-050-Q1-E1-F11
aaagacaaaattttcttgcaattgaaggtgaggtttggtgaaagggaaattgagaaaaccctagaacaagtacggtctctattttgctttaatgggtcgcgaatctgtggctgttgtgactgcgccgccctcggcgactgctccgggtactgcttcggtggcgacctcgcttgctcctggcttccgatttcatccgactgatgaggaactcgtgagctattacttgaagaggaaggttctgggccaacctgtacgcttcgatgcgattggagaggtcgatatatacaagcatgagccctgggatttagcagtgttttcgagattgaagacaagggaccaagaatggtacttctacagtgcattagataagaagtatggaaacggtgctangatgaaccgagcaactaacaganggtactggaaagctactggaaaagacagagaaat

SEQ ID NO: 15714 - DNA, 445 bp, Arabidopsis thaliana
  Clone ID: LIB25-050-Q1-E1-F12
gatcttatctctccaagatctggggatttcgtatgcatgggaccaaggcagcagcttctgttgtagaagaacatgtctcgggggcagaacgtgaggatgaagaatatgctgatgtagattgggacaaccttggattcagtcttgtacggacagatttcatgttcgccaccaaaagttgcagagacggaaacttcgaacagggttaccttagccgttacggcaacatcgagctcaaccctgctgctggaattctcaactatggccagggactaatagaggggatgaaagcgtacagaggagaagacggtagggttcttctcttccgtccagagctaaacgcgatgcgtatgaagataggagctgagagaatgtgtatgcattctccttctgttcatcagtttattgaaggtgttaagcagaccgttcttgcaaacaggcgttgggt

SEQ ID NO: 15715 - DNA, 458 bp, Arabidopsis thaliana
  unsure at all n locations
  Clone ID: LIB25-050-Q1-E1-F3
gatttagtttcacaaaatcctttattgctgaatggttatgttgttacatagtgtgggactaattccatgttcaaaccaacaaaagtcttttctcttccatagttattaccgttacagatgcatagtttgttcatctgaaacaggtttgtccataagaagacaagctttggagcaagttgattctaagttgtctagtggagacgaaagagctgcattgtctcttgtcaaagatctccaaggaaaacctgatggccttcgatgttttggcgctgcaaggcaggtgcctcagagactctacacgttggaggaactgaaactgaatgggtattaacgcagcttcacttctctcgccaacaagatacaacgccttggctccatccgaaaggaaaccttcaaatttgcancctgtcctcaaggggggaaataagttgccttggnaaagccctttgacttgaagt

SEQ ID NO: 15716 - DNA, 458 bp, Arabidopsis thaliana
  unsure at all n locations
  Clone ID: LIB25-050-Q1-E1-F6
aaatggctcaggttcaagctccttcttcacattctcctcctcctcctgctgttgttaacgacggggctgcgacggcttctgctacccctggaatcggcgtcggcggcggtggagacggagtcactcacggtgctctttgttctctctatgtcggagatctggatttcaatgtcaccgattctcagctttatgactatttcaccgaggtgtgtcaggttgtatctgttcgtgtttgtcgtgatgctgctaccaatacttctcttggttatggttatgtcaactacagcaacaccgacgatgcggagaaggcaatgcagaagttgaactacagttatctcaatgggaagatgattcggattacttactcttctcgtgactcttctgcccgtagaagtggggttgggaatttgtttgtaaagaatttggataantcagttgacaacaaaaactctgcacga

SEQ ID NO: 15717 - DNA, 458 bp, Arabidopsis thaliana
  unsure at all n locations
  Clone ID: LIB25-050-Q1-E1-F7
gtcatcatcatctactctttctgcgtttttcccagctgaataatctaaacaaggaaaagtaaaacagagtaccaatctcagattcatcagctccacttgaatttaaagtagccataactgttcgatcataggatggaagaagcaactcaagtaacgagttctgaggtccctgtagtgaaaggtgatgttgatgaccttaagacagctgatatttccgtcaaggctgtgaatggagaagtgccaaaggaggagaaagaagaggaagatggggaattcataaaagttgagaaggaagcttttgatgccaaggatgatgcggagaaagcagatnatgtttcctgttgaagagcaaaagggaagtttattgaaagaagctcgagtggttcacaagagagaactacatgaatcacaagaaaangnaaaaagaactagaantcgaaattggaaagantgcaagg

SEQ ID NO: 15718 - DNA, 452 bp, Arabidopsis thaliana
  Clone ID: LIB25-050-Q1-E1-G11
gaaaagaaatgtgggcgattacgagagtgataagccggcgagttcatggaacaagttttattactattccaaaactctcaggtttctctattgtatctcccaaacaagttgaggtagagtatgcagatggaaccaagttcaatttttcatcagagtttctgagaattcatagtccagctgctgatggaaaagtcagatcaatcggtggtgaaaaggtgatatctggaaggcggtatgtaggaatcatgtctgcagaaccggttggaaactacggggttagtgtttgatgacttgcatagaacagggatatatccatgggattatttctacgagcttgggagcaataagtttggtcttatgaggaactatatcaagactcttcaaaagcataatctcagccgtgaacctcctccttcaagaaagagatgattctgatgatcaatgttagtatt

SEQ ID NO: 15719 - DNA, 476 bp, Arabidopsis thaliana
  unsure at all n locations
  Clone ID: LIB25-050-Q1-E1-G3
tcttcttcttcgcttcagccatgggaaccctatctctctcatcttctctcaaaccttcactcgtttcatcaagactcaattcatcttcctccgcatcttcttcttcgtttcctaaaccaaacaatctctacctcaaacccaccaaantcatttcaccacctctcagaacaacttcaccatcgccattgagattcgccaatgcttcaatcgagatgtcgcagacacaggaatcagctattcgcggagctgaatctgacgtcatgggtcttctccttagggaacgaatcgtctttctcggtagtaagtatcgacgatttcgtcgctgatgctattatgantcaagttgcntcncttaagatgctaaagatccanagaaagatatcanactctttaacaaattcncccnggtgggntctctcangtgcaaccaatggggtatatngggatgtnggntcnancttgtganaagctgatgg

SEQ ID NO: 15720 - DNA, 462 bp, Arabidopsis thaliana
  unsure at all n locations
  Clone ID: LIB25-050-Q1-E1-G8
anaaaaaagattattaaanggacaaggcaancncaaagaagctcacaacgagattcatgctttcagatttcaactgtcaccggaagttggaaattcgtttgtgataggntctaaacaagtatcaaagtctacaaattctggnttaagcaagttaaagacttgtgattcccctgtatcttcaacaacctcgtcttccaaaactttatccaaagacatctgtggatagccatagcaagccncagttacattatacagggnaaagnaccacntaaggngttgcattccacagaaaatgtcacagtcgctttgtttganaagtttgttcngtggattgttaacattccataaagtccaatangggatcttgcatangcttgcttacncttttgttcagntgcaaaagatcttccangtgaaaaanggtantgagttccccgattcatacanggaaagtgttgggaa

SEQ ID NO: 15721 - DNA, 443 bp, Arabidopsis thaliana
  Clone ID: LIB25-050-Q1-E1-G9
ctccccatctctttcgacagatctcttctctctctcgtgtttcacgaaacaatggcgactcaattcagcgcttctgtctcattgcaaacttcttgtctggcaacaacaaggattagtttccaaaagccagctttgatttccaaccatggaaagactaatctatccttcaacctccgccgttcaatcccatctcgccgcctctctgtttcttgcgcggcaaaacaagagacgatagagaaagtgtctgctatagttaagaagcaactatcacttacaccggataaaaaagtcgttgcagaaaccaaatttgctgaccttggagcagattctctcgacacggttgagatagtaatgggtttagaggaagagtttaacatccaaatggccgaagagaaagcacagaagattgccacagttgagcaagctgctgaactcattgaaga

SEQ ID NO: 15722 - DNA, 448 bp, Arabidopsis thaliana
  unsure at all n locations
  Clone ID: LIB25-050-Q1-E1-H11
tttagcttgccgggtctcgatgtcttcaacattgtaaccattggatgcaaaaccgaaggcaatgcctcaaccatcgtcgaaggcataaagaacacattgatcaaccatccacgcttctctagcatactggtgactggtcatggtgagcacaaaggaaaagctagatggattccaacgaaaataaacgtagaagagcatgtcattgttccggatatagatcccaacattgagaatcctgatgagtttcttgaagattatacatcaaacatggctctttctccaatggatatgtccaaacctttatgggagtttcatttattgaaacttaaaacatcacatgcggaagctgtgaccgtggctaagttccatcattctttgggcgacggaatgtctcctaagtcncntttactcgcctgtactcggaaaacatntattccganggattccc

SEQ ID NO: 15723 - DNA, 467 bp, Arabidopsis thaliana
  unsure at all n locations
  Clone ID: LIB25-050-Q1-E1-E2
agagaaagctcaaattcaatcatcaatgttaacggacgagagagaagtagtctgtgtcaccggcgccagtggctgcatcggctcgtggctggtccatcagctcctcctccgcggctactccgtccacgccaccgtgaaaaacctccaggatgagaaagagacgaaacatctagaaggtctcgaaggtgcagccacacgcctccatctattcgagatggatctcctacaatacgacaccgtttccgccgccatcaatggttgctccggcgtattccacctcgcatcaccttgtatcggtcatgaagtccaagattcccagaagcaactacttgacccggcggttaaaggaaccatnaatgttctgacggcgggaaaaagaagccaantgttanganaagttgttgtgacgtcttcganatccgcgaattactccaaagttccaantgggcctggctgnnaaagatnaa

SEQ ID NO: 15724 - DNA, 461 bp, Arabidopsis thaliana
  unsure at all n locations
  Clone ID: LIB25-049-Q1-E1-C9
tgttttgatctttcactccctaactatttcgagccgtanaaattaaagtaaaagaacaaaaactttattatacatttttctcttcctctttaatatatatacattattacaagtttagatttcanaaaanaaagtcaagaagaagaaagagctgagacgagaattgaagtgagaaagcatgaggaagcgtcaggtggtgttgaggagagcctcgccagaggaacttctacaagctcgtcgacggcttcgtctctgacagtgagaactgtgaggtacggagaatgtcagaagaancacgctgcngcggtngggaaggttacgctgttgacggctgccgttaagttcatggcaagccgaaggagaagaaggtaccgtggcaacgctaaactttcgccgcctggtggctggcaatcccaantttccaaccggngaaaaaanttnaaaacccaaggnttnttttt

SEQ ID NO: 15725 - DNA, 452 bp, Arabidopsis thaliana
  unsure at all n locations
  Clone ID: LIB25-049-Q1-E1-D1
ttggngatctcggcaattctgaaaccgtttctttgtgtgttaaaagacttgtttatactaatgaccaaggagagactgttaaaggagtttgctcaaatttcttgtgtgatttggcacccggaagtgatgttaagctgactggtcctgtangcaaagaaatgcttatgccaaaggatccaaacgccaccgttattatgcttgccacagggacaggaattgctcctttcaggtctttcttatggaagatgttctttgagaaacatgatgactacaagttcaatggcttagcttggttgttcttgggtgtaccaaccactagctctttgctctaccaagaggagtttgataagatgaaagcaaaggcccccgagaacttcagggtggattacgcgataagcaagagaacaanccaangataaaggagagaaaatgtatatccagactccggtggg

SEQ ID NO: 15726 - DNA, 459 bp, Arabidopsis thaliana
  unsure at all n locations
  Clone ID: LIB25-049-Q1-E1-D11
ttgaatctcggaaaaccgcatccgaaagtaacgtaccaccacacgccctcgtcgatgacggaagatgaaatggtagatcttattggaggagagaactctgtggatttgataacggtggctaccgccgtacactggttcgatctcccgagattctacgcgatcgcgaatcgtctcctccgtaaaccaggaggaatcatcgccgtgtggagctacaacactgacatggtggtgaatcccgagttcgactcggtgatgactcggttcatcgctgaaacgttgccgtattgtaaattcccagagagtcagtattttttggacggatataagacgttgccgtttccgtttgagaacgtgggtttgggctcaganggaaagcccatggaactggagatgaagaaaacggtgtcctttgaaggantcntgcggatgctaanatcttggtccgccgttggtgctgcc

SEQ ID NO: 15727 - DNA, 466 bp, Arabidopsis thaliana
  unsure at all n locations
  Clone ID: LIB25-049-Q1-E1-D4
aaccatagtgtatctctgaactgagagtagcaggttgcaattaaaaactaaagattgtgtcagacagacttatgtattaccacaaccagcaccaaggaaagagcatcctctcttcatcgagaatgcccatttcttctgaaaggcatccgttcctcagaggaaatggcacaggagattctggactcattctctccactgatgcaaagccacgactaaaatggactccagatcttcacgagagatttgttgaagcggtcaaccagcttggaggaggagataaggctactcctaagacaatcatgaaagtcatgggcattccaggccttaccttataccatctcaagagtcatcctcagaaatataagggcaagncaagaatcctaatgggacaagctaacagcaagtttaaacaagacaagtgtgatgaccatggtagaaagaaaaccccctgaagtngacgaaagtc

SEQ ID NO: 15728 - DNA, 96 bp, Arabidopsis thaliana
  unsure at all n locations
  Clone ID: LIB25-049-Q1-E1-D5
gaaggctttgatcgaggcaatggaaaangctgatgtgaacaacaagtgggagaaaagctcanggggtaggaaccttaccgtgcacanacgtacggc

SEQ ID NO: 15729 - DNA, 461 bp, Arabidopsis thaliana
  unsure at all n locations
  Clone ID: LIB25-049-Q1-E1-D6
gcccacgcgtccgcccacgcgtccggtttcaccaaggcccacgtcactcaccctgaactaaaatgcactttctgtctcgagatcatcgggattaagaagaatcctaacggtcccatgtatacatcactcggtgtgatgaccaggggaacaatcatcgaggtcaatgtgagtgagcttggtcttgttacaccagctggaaaggttgtctggggaaaatacgctcaagtgacaaacaatccagagaacgacggatgtataaatgctgttttacttgtgtaaccaaatgtccggcactgtcgtagaagtatggatagagacgagaggaaggcgagaatcatgttggctagtttattttgttttctcctgaaacaattttgtgttatttcaagtttttttatgaatgtgtggttggtcttctcttcacattaactagctgctatgttagcttaaaagtaanccaa

SEQ ID NO: 15730 - DNA, 440 bp, Arabidopsis thaliana
  Clone ID: LIB25-049-Q1-E1-D7
ctagttttatatttcaagttctttttttttaaccttgccatcaatacaaccatggcaaggatttctctgttgttctctttagccttagttctagccatcgggtccgtcttggctcacccacctacccacaagaaattacaaaagaccttgtgtccatctactttgtccaaagttcaagctttcccttaccttgaagtctctagcttcgtcgagaagaaggttcagttcgcaccaaaaaccattgcgttcaagtctttgttctccatctgcaagagctacatcgactttcttgggggcgttaagttttctgcctccagagatgtgtttcacgtcgttcatgtcaaattcactttgatgaccaaggcgatggttattgcacaagcacacattgggagttgaaggagacctcgctgttaagttgggcaaaagctacaccgtga

SEQ ID NO: 15731 - DNA, 464 bp, Arabidopsis thaliana
  unsure at all n locations
  Clone ID: LIB25-049-Q1-E1-D9
gggctgtaccctcaacttctcttgagagtggcaaggtagcaattatttccgaatcaaagaagagaaagaaacataagcctagcaaagaatcccggtacaattcattgtttgatgaattagttcctccctgtatttccttggaggaagatgatagcagcagcgatgactggctttttggaacaagtcggaaagaaaatgtttcttctgccaagtcttcttataagactgatgaagacacgatcatgagcttgcagacgtcaagagattgttcctctttgcctaaagctatgttattgtctgaagttggaattttttcattaccatatactgtcccgttttaggtccataatggtttggtccttcccaacctaaccctaaggccttaaccttgtacaagttancattggtacaaatcacagtggatcaangaaaacttgaacgatttccggaatttttgacncnaa

SEQ ID NO: 15732 - DNA, 465 bp, Arabidopsis thaliana
  unsure at all n locations
  Clone ID: LIB25-049-Q1-E1-E10
ttttgctgctattgtgagtgataatatcaagcttctctacttgagaaagagcttagtccaggaactgctcaagtctcctgatacctttgagggtaaaatgttgggaagttttgtgaggatcaagtctgaccctaatgattatcttcagaagtacccttatcagcttgttcaggtgacaggcgtgaagaaggaacatgggactgatgattttcttcttcaggttacaaattatgtgaaagatgtttctatatctgtgctatctgatgataatttctcccaggaggaatgtgaagatttacatcaagagaataaagaacggacttcttaagaagcctactattgtggagatggaagaaaaagctaaaaaattacataaagatcaaacaaaacactgggcttggaagagaaattgaattgttaaaaaggcttattgatcgggctaatgagaaaggatngcgaaganag

SEQ ID NO: 15733 - DNA, 449 bp, Arabidopsis thaliana
  unsure at all n locations
  Clone ID: LIB25-049-Q1-E1-E11
ngaggagatatgcaattgctgacgctaaatccggcggccatttccaggacgccgccgcaagccatagacccttcctcatcctcgagtcttcttcttccttttcctcagattttgagctcccaacgcgctcttggtcttgtagctaggccttgtaatccacttcgacgaggattatctaggtttttatcaagtcgacagcttttccgacgatccaaagttgtcaaggcagtagcaaccccagaccccatcttggaagtacctttaactgaggaaaatgtagaaagcgttttggatgaaatccgaccttaacttatgtctgatggtggtaatgtggcattacatgaagatcgatgggaaatattgtgcgggttaagctgcagggagcatgcngattatgtcaagttctactatgacaatgaagatggtattgaacgtctcnaaaggaaaaa

SEQ ID NO: 15734 - DNA, 428 bp, Arabidopsis thaliana
  unsure at all n locations
  Clone ID: LIB25-049-Q1-E1-E12
atggtctcaagacaactccagctgagatcaaggaaggtttcaagagagttttttctgccccttggcctgagaagttacgttaccaggtccctaaatgcatggagatggaagaccattctggaagcttgttgtttcggaagctactggttgttctgataatgactacttcgaagacgtctaccaatattatgcgaatggcgaggcatggcatctcccagaaggagcttatgagacaatgtcactactgaaagatgctggagttaagatggctgttgtgtctaatttcgataccaggctaagaaagctattgaaggatcttaatgtcatagatatgttcgatgctgtgattgtatccgcagaagtcggatacgaaaaacctgatgaacgaatcctcaaatcctgcgttaaaacaaatcacctnaaattta

SEQ ID NO: 15735 - DNA, 379 bp, Arabidopsis thaliana
  Clone ID: LIB25-049-Q1-E1-E2
gctgaagatgaaatccgcgctgttctgatggaaaagaagcaagtcactacacaggatcttgtttccaggtttaaggcaagacttaagaccaaagaggacaagaatgcctttgccaatattctgaggaagatctcaaagatacagaagaacgctggttctcaaaacttcgtcgttttgagagaaaagtgaggacttcctgttttcacagctaactcttttcaaaaagatttcaagatatctcatgagctagttaaaataagaatgtttttctcatttcttgatttcagatgtttaaagttggacctatttttttcccatgacactattagtaattgaaaatcttcaaatgttttattcgaaaaaaaaaaaaaaagggcgg

SEQ ID NO: 15736 - DNA, 447 bp, Arabidopsis thaliana
  unsure at all n locations
  Clone ID: LIB25-049-Q1-E1-E5
ctctcttcgtgtaaatcgacgatccttctctatctctgcaactatgtcttcatctactaagaaggttttgattcctgttgctcatggtacggagccgtttgaagcggtggttatgatcgatgtgctacggcgaggcggagcggatgttacggtggcttccgttgagaatcaggtcggcgttgatgcttgccatggaatcaaaatggtcgctgatactcttctctctgatatcaccgactcggttttcgaccttattatgctccctggaggacttcctggtggtgagactcttaagaattgtaaacctttaagagaagatggtgaagaagcaagacactgatggacgacttaacgctgctatctgttgtgcgccggcgttggcgtttggtacttggggactactananggtaaaaaagctacatgttacccggttttaatggagaaac

SEQ ID NO: 15737 - DNA, 460 bp, Arabidopsis thaliana
  unsure at all n locations
  Clone ID: LIB25-049-Q1-E1-E6
ctctatttatctctctatacacaacaatggcggtcttcgttttatctctactcatactctcttccttctcagccattccattcacttatgcagattctggaatgatcggagttaactacggccgtatagcagacaatcttccggcaccggagaaagtagttgagctactgaaaacacaaggaatcaaccgcatcaagctttacgacaccgagacaactgtactaaccgcactcgcgaactccggaatcaaagtcgttgtctctctccccaacgaaaacctcgcttccgccgccgcagatcagagctacaccgacacttggggttnaggacaacatannagaattacattccagcgacggatatcgaaagcaatcgccgttgggaacgaagtgttcgtcgatccgaggaacacgacgacgtatctcgttcaagctatgaagaatgttcaaagctctctcgt

SEQ ID NO: 15738 - DNA, 450 bp, Arabidopsis thaliana
  unsure at all n locations
  Clone ID: LIB25-049-Q1-E1-C8
ggtctatcatggtctatggtttggatctgatgtggctgtaataggtgttttccaaacaagaatnttcagaanagatcataacatctttcaaacaanaggtatcattgatgaanaggcttagacatccaaacgttctgctgtttangggagctgtggcatcacctcagcgtctttgtatagtgacagantttctaccacgangaacangtcaaaactagatttgaggcgacgtatccatatggcatcanacattgctcgtggcatgaattatcttcancactgtagtcctcccatcattcaccgtgatctgaagtcgtcaaatctactggttgatcggaactggactgtgaaggttgctgattttggtctttctcgcatcaagcatgagacgtacctcactacaaacggaaggggaacgcctcattggatggcaccagaagttcttcgaaa

SEQ ID NO: 15739 - DNA, 462 bp, Arabidopsis thaliana
  Clone ID: LIB25-049-Q1-E1-B12
tatacagttttggagtagttttacttgaaatattaactgggacgaagatctgtggataaaagtcggccgaacggggaacagaacttggtagaatgggtgagacctcatctcttagacaagaaaaggttttaccggctattagatcctcggttagagggtcactactcgatcaaaggtgctcagaaagccacacaagtagcggcgcaatgccttaaccgagactccaaagccagaccgaaaatgagtgaagttgtggaagccttaaagccattaccaaatcttaaagactttgctagctcttcttcttctttccaaacaatgcagcctgttgctaagaacggagtcagaacacaaggaggagggtttgtgtcgagaaatggaccgccaatgaggagtttgtctagcttaaacttgcctcaagcatccccttatcgttatgcccgtcaatcaccaaagcctaaa

SEQ ID NO: 15740 - DNA, 539 bp, Arabidopsis thaliana
  unsure at all n locations
  Clone ID: LIB25-049-Q1-E1-B2
nnngnnnnggnnnnnngaantggtntgcctgtgccctaccgctccggaaatcccgngtcgacccacgcgtccgcttgaagattataaattgacaaggaaacaacaggaagaggaaaagagacgataccgggatcaaaagaagatgcaggatctgttaataaagcggagggaatcaatttatggatcaaaaccgagtccaagaagaagcaacagtgtaagaaagaccaacggatacaatggggatgcatctgtgcctcctacgccccgcagaaactcagctggagcaacaaataacgacataatgaccaccccaagatcatactcaagccatcgccaaaacggatatttcaaggaagtaagaagactgtcaacagctcctttgaactttgtggcaataccaaaggaagactctgtctctacatacacttcggtttgcggctctgaaccagattcaccgttatataactaagtctcattaggcagcanttggttcaaccacaagaacttganatggagtagganttgggagttagataatt

SEQ ID NO: 15741 - DNA, 458 bp, Arabidopsis thaliana
  unsure at all n locations
  Clone ID: LIB25-049-Q1-E1-B3
ttaaccccaaaccagaagaagaaacanaaatcgagattctcatcaatagcaaaaaaaanattactctnagattttcctcaanaaccttaatcaatcgccgggaaaatgaatattccggtgactatttcctccattactgtttctgaataacgctgtttccgacaatcgtcgtcatgtttcccgtgaaaatcgtcagcgttaagaaaaccgtcacttatatttttttttcttttcttcttcgtttttgtgaagatgatgatccactgatttgagagtagtagcttgagaggtttttagtagatttcgattttgcgattatttttgtttcctggagagatntcanttttttgccacttccgatgatgaagattcagccgattaacaacgatttgccggcgaatagagtggaatcatcaaccaaaccagtgcttaaagtctcgtctcaagcgtttaataaa

SEQ ID NO: 15742 - DNA, 514 bp, Arabidopsis thaliana
  unsure at all n locations
  Clone ID: LIB25-049-Q1-E1-B4
nnnnnganggttgccgtgctaggctccggaatccaggtcgaccacgcgtccggccaaattataagtgagagagaagataacgacnacaagaagaanaaggagaagctccaaaattgttcatttgcatttctccaacttgtaaaatcgagcacctgcatttgggggctttcctcttatctggaaacaaagagagccgccactgatggaatgagtttccgtgaatcatccacccaggtgaaaggaatcataatttggttggtcaactaataataaaaatgggtgaggcaagtgattcaaattcgtctgatgagtctttgaaacacaatagcancccaccactctttagcatctctggcttcttttgtgttgccaaangaggagactctgatcccggtaggagccctacntctccccttgattttggagtccttggtggcctctttagcccaagtcctcctcctcctcaaccctccaacgaaacaaatngcnttccacaaaatccggccttcccctt

SEQ ID NO: 15743 - DNA, 433 bp, Arabidopsis thaliana
  unsure at all n locations
  Clone ID: LIB25-049-Q1-E1-B5
aaacgcngccgtgttccgccggatcgccacngttgaagtcaagatgccgtcgcacaagtcgttcatgatcaaaaagaagctagggaagaagatgagacagaacagaccgatccctaattggatccgtctccgtactgataacaanatcaggtacaacgctaagcgtangcacnggcgccgtaccaagctaggattctagagcactctcaccgtgactcagattcgtccgagtttcgtaantgcnttcttgtatcggaattgtggtctttgacccntanaagttttanttttttgttaaggattttgtggcttanaactatgtntaagtcttagaacttgaagaagagtgcatgattatnaattataanaagttgaatcctttctcctaaaatcngangcggaaacnggtttcacnacncnggnnaaagggcgg

SEQ ID NO: 15744 - DNA, 533 bp, Arabidopsis thaliana
  unsure at all n locations
  Clone ID: LIB25-049-Q1-E1-B6
nnnnnnnantggttactggttccctgggccctaccgntccggaattcncgggtcgacccacgcgtccgggttgagagggttgccaacatgcttaactacttcttgctacaactcgtgggtccacagcgtaaatctttaagcctgaaagatcctgagaaatatgaattccgtccaaaacagttacttaaacagatcgttcgcatatatgttaatctcgcaagangagacacagtaaacatattccctggtgccatctccagtgatggccgatcatataatgaacagctattcaatgcaggagcanatgtgcttangagaatatgtgaagagggaagaatcattcaagagtttatggagttangcacaaaagccanagctgctgcttctgaagctctgggatgctgaagctgcacttgggggaaataccangacgagttccttgacccaantcagtacacgctaatgagagatccagtaatacttccaagctcaagaatcacagttgatcgtcccatcattcaacgtcatcttcc

SEQ ID NO: 15745 - DNA, 437 bp, Arabidopsis thaliana
  unsure at all n locations
  Clone ID: LIB25-049-Q1-E1-B7
ggttatcattcatctttttctacaaaatatcaaattcagcctcgaaggagatggatgttttgtaactcacgcaacaactcgatttcatcggatgatgagtaccgttcatcacccaacatagctataagtcttttaagacgttacaggaccgtgattggacgcggtgaaggcgaaaccttaaaagaattcatatccgctggtgtgaatgcatatgccgctcggctgcacagatgaagatttgagaaaagaactaatggctatgaaagattcgggtttagagattgagagaatggagaattacggcggaagcacacagactaaatccaaaattacgctgtctgaggtagatgaatgcatattgtggcttangattgtattcatcacgatcttgtgtacgccgcaaccaacagtcataagatggtcatcgactccttcgg

SEQ ID NO: 15746 - DNA, 474 bp, Arabidopsis thaliana
  unsure at all n locations
  Clone ID: LIB25-049-Q1-E1-B9
tttctctgttctaagaaagggaagctctttgtctttgtttgggtccttgccaagatccaatttttacgatcaaaatcgacccggtggaattcagacacgtcttttagatagagatatgtcttgttcatcttcttccggatcagaaggagaagaagagggtttcgatgcttaccgtaaaggtggttatcacgccgtcaggatcggcgatcctttttccggtggtcgttacatcgctcagagaaagcttggttggggtcaattctccaccgtttggcttgcctacgatacgctcacctctacttatgttgctttgaagattcagaagagtgcacaacaatttgctcaagctgcacttcacgaaaatccaaattcttcanctgctgctgaaggggatctcgacaagacgaaatgtgttgttcgtctaatgaccattcaagcataattggtccaaatgggcancatttatcatggngg

SEQ ID NO: 15747 - DNA, 431 bp, Arabidopsis thaliana
  unsure at all n locations
  Clone ID: LIB25-049-Q1-E1-C1
acactgcaacagaagaagagcttatggaacattttagcacattcggtaagatatcagaagtccatcttgttcttgacaaggagacaaaaaggtccaggggaattgcctacatcctttacctgattccggaatgtgcggcaagggcaatggaggaattagataactcaagttttcagggccggttgttgcatattttgccagctaagcaccgtgaaacatctgataaacaagtgaatgacacttctaacctgccaaaaacattcaagcagaagagagaggaacaaagaaaggcatctgaagctggtggagatacaaaggcttggaatagtttattcatgcgacccgatactattctagaaaacatantcagggtgtatggtgtaagcaagagtgagttacttgancgtgaagctgaaaattctgccgtacgc

SEQ ID NO: 15748 - DNA, 474 bp, Arabidopsis thaliana
  unsure at all n locations
  Clone ID: LIB25-049-Q1-E1-C11
agtttctctttcatctggcggctccggcgatctttgtttacgtcatcaacaacggcatgtcaattcttacacgtatcttcgctggacacgtaggaagcttcgaactcgccgccgcttcacttgggaaacagtggtttcaacatgttcacctaagggacttctgcttgggaatgggaagtgcagtgggaaacattatgtggtcaaagcacatgggagctcatagatacgaaatgcttgggagtttanctccaaagatnaacagttgttctaatcctaacatgtctaccaatgtcatttctcttcctcttctcaaatccgattctcacagcacttggagaaccagagcaagtggcaacattggcttcagtattcgtctacggtatgattccngtgatcttcgccntacgcagtcaanttccctaaccaaaaatttctccaatcacaaagcatcntcaatccaaagtgccaaaaaat

SEQ ID NO: 15749 - DNA, 451 bp, Arabidopsis thaliana
  unsure at all n locations
  Clone ID: LIB25-049-Q1-E1-C4
tttataacaaattaaagtctacgttgagatatggctttaaaaacatggaagccattcataactgttgtttctctacaatttggatatgctggattgtcgatcatagcgaaattcgcactgaaccaaggcatgagtcctcacgttctagcgtcgtatcgccatatcgtcgctacaattttcattgctccatttgcctatttcttggatagaaaaatacggccgaagatgacgctatccatcttcttcaaagatattgttgcttgggttattgggaaccaacaattgatcagaacttatactacactgggtatgaagttcactttcgccactttcacagctgcaatgacaaatgttccttcctggcctttgcccttaataatggcatgggattctttagaccttgagaaaggttaacgtccaagaaaaatncacaagccaagccaaagantcc

SEQ ID NO: 15750 - DNA, 445 bp, Arabidopsis thaliana
  unsure at all n locations
  Clone ID: LIB25-049-Q1-E1-C6
gtcatagacaaggccatatccatcgggatgttaaggctggaaacatacttcttgatgacaatggtgagattaagcttggcgattttggtgtctctgcttgcttgtttgataacggtgatangcaacgtgctagaaacacatttgttggtactccttgctggatggcaccggaagttttgcagccgggaaatggatacaattccaangctgatatctggtcatttggtataacagcanttgaattggcccatggtcatgnacctttctcaaaatatcctcccatgaangtgctcctaatgactattcanaacgcacctcctggccttgattatgaccgtgataaganattttctaagtcctttaaagaaatggttgcaatgtgtttggtgaaagataaacattaaggcaactgctgaanaactgctgaacactcctgtttcaanca

SEQ ID NO: 15751 - DNA, 456 bp, Arabidopsis thaliana
  unsure at all n locations
  Clone ID: LIB25-049-Q1-E1-C7
agcaacagtcattactctgttttcatatgaacactcttcatcctcacaagcagcaacaagaacaagcacaacaacaagaagaagctagatacgaatgggatctttctctctccaccgtcgtatcttcctcctcctcctccgcctccgacgttatcggagctattgaattcgatcccactgataacatcgtcgctaccgccgggatttcaagaaagattcgtttttacggcctcccttctcttttacgtaacaacgctgtctccggtaccggagtttccttcgtcgatcaagccaccgcctgcgaatattacatctgtactccggcgaaacttagtagtctccggtggagacccgggtcgggcggtcgggttattgggtcgggagantacgaagggcgtagtgatggagtacgattcttgagaagaggacgccggtattcgaaagggacgagcacgt

SEQ ID NO: 15752 - DNA, 474 bp, Arabidopsis thaliana
  unsure at all n locations
  Clone ID: LIB25-049-Q1-E1-B11
tcatttattctttccttttcaattattctttcaatttttccgatcgacggaggttgatcggcgacggcgtaatggccggaggaatcgtctcaccggcctctctactcgacctaatcgctgatatcgtcgagattccactcaacaccggaatgttcaagaaggattgcgcagatctcactcgacgagtttgtctcttaacgcatttgttagaggagattagagactcaactcctatcgattccgccgcttcgtcgtcgtcggagaatgattggtggtctgatctcgtggtcggacttcaaagccgcgaancgtcttctctccaaaagctcgaatccaagctcgcgaatcctctgaatggtgctgcgaagagaaactcaattcaatttcaatgtgttacatggaagcttgagaaaagcantgagcaatccttccaaaatgatcttaagaaancnccgacaaantttgggnaaanat

SEQ ID NO: 15753 - DNA, 544 bp, Arabidopsis thaliana
  unsure at all n locations
  Clone ID: LIB25-048-Q1-E1-H11
nnnncnnngaactggtttgcctgggncctaccggncccggaaatcccggntcgacccacgcgtccgcggacgcgtgggctaatttcggattttgcatcttctccgatcatcttcaccactatgggtgcttcatcttctacagacgacaaagaatcatcggagaaacgagaaatcgaaagccttgctgcttcaaccggagctcttcctctgcttaaacgatccttctccaaactcgtcgattctcaaaccaatactgttccttttcaatccttgaagcaaagttttggtttgagctacgatacaattactactgaaggagagcanaaagtttcagacttgtttcccaaatttgttgggagcatttangatcatctttangtacatttgttcntcgtgcctgataanagaaaggatgagttgggtttaatttggctaagtgggttatgtccaaatgttgtggaangaatgtncgaaatccgatgtcnttcaacactttggttgaagannttaccaangtgacaagcttaaaaatggcnaggcnttt

SEQ ID NO: 15754 - DNA, 467 bp, Arabidopsis thaliana
  unsure at all n locations
  Clone ID: LIB25-048-Q1-E1-H2
ccctctccctctccctctttatctttctcttcctcctttgctaataaacttttctttgaaccttacacgccttgttgatattactctcttaaatatatattttcgtacattaacacagacatatataaagctaaagatttcttcacgtaatgggtttgaaagatattgggtccaaattgccaccggggtttcgatttcatccaagtgatgaagagttggtttgtcattatctttgcaacaagattaagggccaaatctgatcatggtgatgttgatgatgatgatgatgatgttgatgaagctttgaagggttctactgatcttgtggagattgacntgcatatctgtgagccatgggagcttcctgatgtggcaaagttaaacgcaaaggaatggtacntcttcagtttccgtgatcgaaaagtatgctactgggataacccacgaacaagagcgacagtaagcgg

SEQ ID NO: 15755 - DNA, 467 bp, Arabidopsis thaliana
  unsure at all n locations
  Clone ID: LIB25-048-Q1-E1-H5
tnatccatcggagaatgtagtgtatgactatataggaggagttgaagatttaaggaattctaaagttagaacagtatccgcagcgaatctttcatttgtcgaggatacagctcgcattttacgtgcaattaggattgcagcaaggttaggattcagcttgactaaagacgttgctatttctgtgaaggagctttcttcttcattactgagacttgacccttcaaggattcggatggaaatcaattatatgctggcatatgggtccgcagaagcttctttacggttattatggagatttggcctcatggaaattcttctacctatccaggcatcttatcttgtttcccaagggttccggangcgtgatggaaggtccaacatgcttctgtcgctatttcgcaaccttgaccnacntgtagcacctgattgaccatgcagcgnagttcccccgggaatggggatcntat

SEQ ID NO: 15756 - DNA, 450 bp, Arabidopsis thaliana
  unsure at all n locations
  Clone ID: LIB25-048-Q1-E1-H7
gtatcagctttcgtctttattacatcgaagttgctactgtttatgccatgtatcgggtaccaaaacagtgatctctgcatccaaaaacttctctttgattggccattcagaatcatactcagagttcagaagctagctactactaataggccaagcgttttacatcatcaagaacaagaacaagaacaagaacaagaacaagaagagaagactatggttgataaagataagaactcggaattgatggatagagttaggttgttggaagtagctgttgagcaagagaaagtactaaagctgctttaatggttgaattggnacaaagaaagagcagcttcagcatcagcagctgatgaagctatggctatgatttttaaggctacaagcggataaaagctccnttgagaanggaaggggaagcantatgnagagaatgaattggattgagag

SEQ ID NO: 15757 - DNA, 455 bp, Arabidopsis thaliana
  unsure at all n locations
  Clone ID: LIB25-049-Q1-E1-A1
caataaagggcaaggaaaaagatcaaacctttttctttctttctttctcctgctctctgcaatttagaagaagatcgaagaatttgtttgttgtttatcttcttctataaaaacaaaccgtggggtctgttttcatttctggccttgcgattccgataaaantctcagcttcccattcaatccaatccaattccacttctcaaacatatatagaattctatatttttgagagacagtttactttttcnccttctctctctctctctctttctctttctctgtctctttggcttttctcctcctgttctcatggaagcttcacccaatgatcgacttcantttggcaaaatgggtttcgggtgtaagcattagagagganatgccaaatcaganctcatgttgcaacgaaatctcnantgtcgccattgtcacaacgagagcacgaacacattgtg

SEQ ID NO: 15758 - DNA, 455 bp, Arabidopsis thaliana
  unsure at all n locations
  Clone ID: LIB25-049-Q1-E1-A10
gatttgattggatcaattctatgtacacgaggggctatggatgtgatgagcagacagcacagtggtggacacatctttaacatggatggtgctggctctggangttcaagtactcctctcactgccgtatatggttcaacaaaatgtggacttaggcagtttcatgggtctatagtgaaanaaagccaanaaacaaacnttggccttcacactgcatcccctgggcatggttctgacagaacttcttctcagtggttcgagcattaaaaacaagcagatgtttaacataatctgtgagcttcctgagacagtagctagaactttggtaccacgaatgcgagttgtgaaaggttcgggaaaagccgtcaattacctaactcctcctcggatattgttagctattgtcacttcctggctaangagaaggcgatggtttgatgancaaaggacgggct

SEQ ID NO: 15759 - DNA, 434 bp, Arabidopsis thaliana
  unsure at all n locations
  Clone ID: LIB25-049-Q1-E1-A11
aacnccgaaaaaaaaaattgggggggccttccnaacngggggcnaaaagggggaanccaanccngaaaaangccaatcccangaaaaacaaaaaaatttcccgccctngggggtttnccccaaaaaaggcccggggcggttcaaaagaattcaaaacggaaaaacggggaaagttccggcgggggaagaatttaagaaccaattaatcccgaagattaccggagtttgctaacgatgtcgagagcagatcgcctggaaacgcaaatacggaaatacaaacctaactgagcacaaatgtagaattcaaaacgaatgtcncagcatacatatatgcctggtgtgcaaggacaaaggtttnaatgtgcaatgtntaatctggagaatatacaataagtgacanactntntagacacagatncaggaaaaatnanggc

SEQ ID NO: 15760 - DNA, 446 bp, Arabidopsis thaliana
  Clone ID: LIB25-049-Q1-E1-A12
agatagtgtgctacagtttggtgggaggttgaagaaaccaattagcaggcctttggacatgtcttgtgtctctagaaaaattggatttttcggagattttatgtcacatggtggtaattttaggctattcgcggcggcttctccagcggttgaaactagtgtaaaggaagacaaacttccagctgatcttaaggtcacggagactgtacaggcgaattcaagtgtgaaattgagtgtggaagttccagaaattgtctgtgaagattgttaccaacgagtccttaccgaattcatgaaactctcaaaggtgcctggattccgtcctaaaacaagagttccagagaatattattgttggtttcgttgggaggcaatatgttctgagagcaactgttgaatctatcttaaagagaacacttcctcacgccatggaatcagtgactggga

SEQ ID NO: 15761 - DNA, 524 bp, Arabidopsis thaliana
  unsure at all n locations
  Clone ID: LIB25-049-Q1-E1-A2
nnnnnngantggttgcctgtgcctaccgncccggaatcccgagtcgacccacgcgtccgcccangcgtccggtcccttcctgtgaccaagcaccctgggtcaagaagttttctctggttcaacttgtaaacaaggagaaatcgaagcggttgttatagccactggagttcacaccttctttggtaaagctgctcaccttgtggacagcactaaccaagttgggcacttccagaaagttcttacatccattggaaacttctgtatctgttctattgctattggtatagcgattgaaatagtcgtcatgtaccctatccaacaccgaaagtacagagatggaattgacaatctcttggtcctcctgatngggtggtatccccattgctatgcccacggtcttgtctgtgactaaggctatcgggtctcacaagttgtctcaacaaggtgctatcaccaaacgtatgacagccattgaagaaatggcgggaatggatgtcctttgcagtgacaaaaccgggacacta

SEQ ID NO: 15762 - DNA, 538 bp, Arabidopsis thaliana
  unsure at all n locations
  Clone ID: LIB25-049-Q1-E1-A3
nggnnnnnnnngaantggtctgcctggncnctaccggcccggaaatcccggantcgacccacgcgtccgcgggangcgtgggggaatcccttttctcgaagcacatggtgttactacatacaatgtcgaaaccaatcatcgtgatgttgtatttattaaagactgtcaatgaccaaccaggtgcctacattaagggaataaaacatggcaaagctctcattcgggtttccattggtgataatctcaggaaatcagattacgttctggtttcagttggggcgcatatctttcctcaaaacccggtcattcacantgggcaatttgttaaatttcagcataacangggctgataatgaagtcactggtcaatggtttacatcancacacgaagtgtcatatccgtcaaatgtggcatctggccaaagctaaagcgatcagccaangntcaactcncgttacatttanatgtcatggtttgaaactgcacncannagtcacagtgctatttggaaacaccatatgtcgactctccaggaga

SEQ ID NO: 15763 - DNA, 479 bp, Arabidopsis thaliana
  unsure at all n locations
  Clone ID: LIB25-049-Q1-E1-A9
agtccacttcactctctctaaactctctctcagatctctctctctctgtgattcaacaatggcggtttcttcttcttcgtttctatcgacagcttcactaaccaattccaaatccaacatttcattcgcttcctcagtatccccatccctccgcagcgtcgttttccgctccacgactccggcgacttctcaccgtcgttcaatgacggtccgatctaagattcgtgaaattttcatgccggcgttatcatcaaccatgacggaaggcaaaatcgtgtcatggatcaaaacagaaggcgaagaaactcgccaagggagagagtgttgtggttgttgaatctgataaagccgatatggatgtagaaacgttttacgatggttatcttgctgcgaatgtcgtcngagaangtgaaacanctccggttggtgctgcgaatggattgttagctgaganngaanccgagatttaagaaactcna

SEQ ID NO: 15764 - DNA, 534 bp, Arabidopsis thaliana
  unsure at all n locations
  Clone ID: LIB25-049-Q1-E1-B1
nngnnnggnnnnnnngaantggtttnccggtctctatggntcnggaaatcccggaatcgacccacgcgtccgcggctttgcgtcttttgagctctctccgccgtgatcaatctccgtgaatcgcngccactctctcggtttcaatggctgatctcgatgttcctcctcaagttcctcaaagtaaaactagagaccttgacaagcttcttctccgtcatgggaatctcgttgaccccggcttcgtacccggacccggcctgagggatgacataagggattatgtgagaatcttggtgattggtgcgggtgggttgggttgtgagcttctcaaggatttagctctttctggttttcgtaatctcgaagtgattgatatggaccgtattgaggttactaatctcaatcgccagttcctgttcaggattgaagatgtaggaaagcctaaggcataggtagcagcaaagcgtgtaatggganaaagtgantggantaganattgtgccgcatttttcacgtatngaagacanagagatt

SEQ ID NO: 15765 - DNA, 205 bp, Arabidopsis thaliana
  Clone ID: LIB25-049-Q1-E1-B10
ccttccttgttcaagagtctttatgtatgtgtctctttcatttaaagccgttggttttatttatgtatgcagagctttatgctcagtttgtaacctataggtcttacttggattgtaagccaagcaataagacaacatcaaataaaaggggatttggttttctggggttaaaaaaaaaaaaaaaaaaaaaaaaaaaaaagggcgg

SEQ ID NO: 15766 - DNA, 459 bp, Arabidopsis thaliana
  Clone ID: LIB25-048-Q1-E1-G9
acagaaaaccaaaaaaaaaatggactccaaaacaacttttctcacatttctcctctgtattttcattttctctcatttttcaccctcaacttccaaatctctgacagaaaagcccttatctttctcaccgtcggcgagtttgccgactctcacggcggagagacttatcaaaggattcaatttgatgcctacacgcgacgtcaatgtcatcgatgaagaaggttctgaggctccgagactggtcgagagagcattcgatttgccggcggcggttgaccgtcgtggctccggtggttctccgtcggttcaagattttggtcaccatgctggttactacaaactccctaactcaaaagcagcaaggatgttctactttttcttcgagtcaaggacgaacaaagccgattcagtggtgatttggctaaccggtggaccaagttgcaatagtgaactggctcc

SEQ ID NO: 15767 - DNA, 462 bp, Arabidopsis thaliana
  unsure at all n locations
  Clone ID: LIB25-047-Q1-E1-D2
tcatttaactttcctaaaacaatggctttaaaacatatgcaaatctttctcttcgtcgctatattttcatcattctgtttctccatcactctttctcgtccactcgacaatgaactcatcatgcaaaagaggcacatcgagtggatgactaaacacggccgtgtctacgcggatgtgaaggaggaaaacaatcgctacgttgtgttcaaaaacaacgtcgaacgcattgaacatttaaataagcattcctgccggaagaactttcaaacttgcggtaaatcagtttgctgatttaaccaatgacgaatttcgttccatgtacacnggtttcaaaggtgtctcggcattaactagccaaaagccaaactaaaaatgtcgcccgtttaagtaccaanaccgtttccttctgggtgcctttgcccggtttccngttgaccgggaaggaanaaagggagctgtngg

SEQ ID NO: 15768 - DNA, 446 bp, Arabidopsis thaliana
  unsure at all n locations
  Clone ID: LIB25-047-Q1-E1-D3
catcgcctccgtctctcatttcaaacgctatctccatctccttcctccgccgccgccatggaatctccgaagaattctctgatcccgagcttcctctattcatcatcttcatctccgagatctttcctcctcgaccaggtgctcaattccaactccaacgctgcattcgagaaatctccttctccggccccgcgttcctctcctacgtcgatganttctcggaangaatttccttattgcatctcccaccggagccagggaaggggatcgagatgtattcacctgcccttctangctgcntgtacctttggtggaattctcagcngtggtcttactcacatganccgtgactcctcncgatgtcgntcangtgcaatatgnagagttgattcangcgagngtagagnagncatntccgtnnggttttggaatttttggcngnnana

SEQ ID NO: 15769 - DNA, 72 bp, Arabidopsis thaliana
  unsure at all n locations
  Clone ID: LIB25-047-Q1-E1-D5
ggaacantaggtgatattgaatccgcgccttttatcgangcgcttggtcaattctcttaccgtgtacgccca

SEQ ID NO: 15770 - DNA, 425 bp, Arabidopsis thaliana
  unsure at all n locations
  Clone ID: LIB25-047-Q1-E1-D7
gggcagctaagatggcggtggggctaggcactggtgtcccttgggtcatgtgcaaacaagacgatgctcccgaccccattatcaatgcttgcaatggcttctactgtgattacttctccccaaacaaggcttacaagcctaaaatgtggaccgaagcctggactggatggtttacaaagtttggaggcccagttccttaccgcccagctgaagatatggccttttccgttgcaaggtttatccaaaagggtggatctttcatcaactactatatgtatcatggtggaanaaactttggtcgaactgcnggntggtccgtttatcgcaactagctatgattatgatgctcctcntggacgaatatggaccttgaaanggcaaccctaagntgggggcaacttgaanagattttcngaagnncaatg

SEQ ID NO: 15771 - DNA, 475 bp, Arabidopsis thaliana
  unsure at all n locations
  Clone ID: LIB25-047-Q1-E1-D8
gcgtcatcattaacttaaacctcgtacgtttgtgtaatgatttgattaggaggttgaacaacaactcattatctgggccctttcctgcttctctgtctcaaatccctcacctctctttcttagacttgtcttataacaatctcagaggtcctgttcctaaatttcctgcaaggacattcaatgttgctgggaaccctttgatttgtaaaaacagcctaccggagatttgttcaggatcaatcagtgcaagccctctttctgtctctttagcgttcttcatcaggacngtangaccaacatattagcanttgcacttgggtgtaagccttgngcttttgctgttagtgtnangccgnctctcgccggngttaagttgggtatcnnanagnnaacanganacgggtaagcgaatnncttccgcaagtaactgacgaggcancgaggaaantgggttacttggggttggggaaaatcg

SEQ ID NO: 15772 - DNA, 433 bp, Arabidopsis thaliana
  unsure at all n locations
  Clone ID: LIB25-047-Q1-E1-D9
agagtctacaagggaagatcaaagtaattaaataagctgaagtaagaggaagtgatgttttctcttatgtctggactatggagttacatgtttagcaagactgagtttaatgtgcttattcttggtatcgacaaagctgggaagacgacatttttggagaaactgaagacgatatactcaatctcggaaggtcttcctcatgatcgaattgttcctactgtggggcttaatattggtcgcattgaagtctccaatgctaaaattgtgttctgggatctgggaggtcagcctggtttgcggtctatttgggagaaatactatgaagaagcacacgcgttgatatatttgattgatgcagcttgcccaacccgctttgaagattccaaaatccggcttaagaaaaagccctgcggcatnaaggatttgcaaggag

SEQ ID NO: 15773 - DNA, 453 bp, Arabidopsis thaliana
  unsure at all n locations
  Clone ID: LIB25-047-Q1-E1-E1
actttctggaaaaacaaaaatgtcaggaagaggaaaaggaggaaaagggttaggcaaaggaggagcaaagagacacagaaaggttctaagagacaacattcaaggaatcacaaagccagcgattcgtcgtcttgctcgtagaggaggtgtgaagagaatcagtggattgatctatgaagaaacgagaggtgtgttgaagatttttctggagaatgtgattagagatgctgttacttacactgagcatgcgaggaggaagacggtgactgctatggatgttgtttatgccttgaagagacaaggaagaactctatatggatttggtggttgatcaatttgagatctgggttttctggtgaatgatgatgatttaagtccntgcgatnaagaaattccaagaaattgggttgaantttaagggttccgttttggtgttgtaattaagggcancat

SEQ ID NO: 15774 - DNA, 455 bp, Arabidopsis thaliana
  unsure at all n locations
  Clone ID: LIB25-047-Q1-E1-E10
aaataanggtatatgagtttgttggacatgggtggagatatgatggaagatgattgggaatttgcgtcatcatcaaaccctanaagaaccctagttcttgtgggccgtactggaaacggaaagagtgcgacaggtaacagtatccttgggaggaaagcttttaggtcaagagctaagaactgtaggagtgacaagcacntgcgagtcacagagagttgttcaagaagatggtgatatcattaatgttgttgatactcctggtttgtttgatttgtctactgcagctgattttattggtaaagagattgtgaggtgtatangtttggcagaagatgggattcatgcgatcttgttggtattccctggtaaggcggcttgccgaanaaggagcaaacggngcttattttcttgcaaaccncnatccgncattaaaanttncggacaaaaggattgnt

SEQ ID NO: 15775 - DNA, 90 bp, Arabidopsis thaliana
  unsure at all n locations
  Clone ID: LIB25-047-Q1-E1-E11
ggtttatgtgtcngtgtgggacgactttttgtgggagtcanaggtatccggaggttcatggttgtacntttgatttcaaatcggcgggac

SEQ ID NO: 15776 - DNA, 466 bp, Arabidopsis thaliana
  unsure at all n locations
  Clone ID: LIB25-047-Q1-E1-E3
ttacaaagaaaccctagtccgacgacctctccttcgccgctgaatcctcatcgctggtcagatttctatctatctcgctcttctangtttccctatctcgttgattcttggcggctttctttttgatgaaattggattacgatggctggntatcctactaatggatcagtctacgtttcaaatctccccttaggaactgaccgagaatatnttggctgactattttgggaccattgggttgcntaagagagacaaacgaactggtactcctaangtatggctgtnccgggataaagaaactgatcaagcccnagggaagatgtacctggttagctatgaggattccgcatgcggcntttggntgcntgttgaatnggntcaatacacaganatttcatnggaaancaccattggcgagtttntatggccnnagtncnaacaattaaaaangctgggnggatgccgg

SEQ ID NO: 15777 - DNA, 430 bp, Arabidopsis thaliana
  unsure at all n locations
  Clone ID: LIB25-047-Q1-E1-E6
agagctctatggctttctccattgcgatttattgtgagctcgtcgtcgtcaaagttaacgccttacgtatctcgaggacgaggactaagtggaattgataatggggctggttgttcttgttctcgtagtgtcacgacaatgattggtaatgaattcattcgatgccaagatgagtcaaagatcttacagttgcagattgttgatgcccttcgttcaggagagaggcaaggagcgtcagcattgctttttaagttaatacaggggaattattcacttagtgctgatgattttcangatatcnatannanggtgctcnnatnaccggattctgtggnaagtttgatataggacaaagtcccctttggcgttgnttaatctnnnttaactntcacaaagttatnnttcnnnganntttggnaagggctgnaga

SEQ ID NO: 15778 - DNA, 330 bp, Arabidopsis thaliana
  unsure at all n locations
  Clone ID: LIB25-047-Q1-E1-E8
cnaataatctttctaagagatcacaaaccagatcttgaagctgagaaagaaaggatattgaaagctgggtggctttanacatgcagggcgagtcaatgggaaacttaaatctatcacgaagctatccggtgacatggaattcaagcagaataagtttttgccatctgaaaagcnaatagttaccgctagtccagatgttaacactggttgaactctgtgatgangatgatntccttggttctttgcctgcgatgggaatttgggattgcatgagcgaagccanccagctccgttgatttcanncagtgaacaattngaanntcaagttna

SEQ ID NO: 15779 - DNA, 442 bp, Arabidopsis thaliana
  unsure at all n locations
  Clone ID: LIB25-047-Q1-E1-E9
caacactctcacacttcgatatctccgccttcattctcctcagagccaactgtcctgagatttcgatttcgatttctccgatctcttcctccgtcgccggcgaaaccatgtctcagtctattcaattctccactccttcacacactcctcaccttctccatctccctcactcacaattcaaccgtcctctctcctctatctccttccgtcgcttccctctaacaaccatcaaatacacttccatcagagcctcctcgtcatcatctccttcaccggatctcgattcatcgtcctcatcatcatcctcgcaagtacttctctcacctaacggtactggtgctgtgaagtctgatgagagatccgttgtcgctacggcggttacgactgatacgtctgggattgaggttgatactgtgaagggaagctgagcttaanggagaag

SEQ ID NO: 15780 - DNA, 455 bp, Arabidopsis thaliana
  unsure at all n locations
  Clone ID: LIB25-047-Q1-E1-F1
gggtttttggatcaatgtanagccgagttcagatactcgtttggcgaaagtgaaagtagattcggactttaccgcaccttgtgatacttctatactgtacccggctgatggagggaatatgcattgcttcaccgcgaaaacggcttgcgcggttcttgatgttattggtcctccatactctgatcccncangacgtcattgtacttactatttcgattatccgttctctaantttctcgggtanagttttcgaaactttttctatganttgtgttagaatctanctactaagtaagtactgtagtanggttnaacataaacaccgagctgattttcataataacctgaatnngggaaaaannatttgatnacnngataaaccacaccaaccagctgaatgaccttgtatattggaagaaatacttcaanatatgaatcantgttganatnantna

SEQ ID NO: 15781 - DNA, 447 bp, Arabidopsis thaliana
  unsure at all n locations
  Clone ID: LIB25-047-Q1-E1-F11
gcaacaacaagcttccatgaaatcaaccgtcgaatcatctctctctccggtgatcgcacctgttctcgaaaactacgcggcggagttagagatcccgacgacgaagaagacagaggagaaaaaaccgattcaaattccgacggagcaaccgtctccgccgcaacggccgaatcgatgcaccgtatgtaggaaacgggtcgggttaaccgggtttatgtgtcggtgtgggacgactttttgtgggagtcataggtatccggaggttcatggttgtacgtttgatttcaaatcggcgggacgtgaagagatcgcgaaagctaatccgttggttattgcggcgaagcttcagaaaatatgaatcggagccgttgaccgatttctatctttaccctgagaaaatttcgattgtcncgggtggatctcancccgttcaatangttaatgtat

SEQ ID NO: 15782 - DNA, 417 bp, Arabidopsis thaliana
  unsure at all n locations
  Clone ID: LIB25-047-Q1-E1-D11
ccactcttgactctctttctcttcttcttctcgagatcctgaaaatgtgactgacagattcttcaacttcactctcttcttcttccattcactgaactcaaaccaccccctgtgagctatgacccaccaaacccatcagcgtcgtcgccgtcgtcactccgccgtctgtcaccgtcatccttcttccaaacccaccactggtttctgtgccacctgtctccgtgaacgtctctctaccatcgaagctctatcttcctctgtctcagcttccactgagctccgccgtgttcgctcctactctgttcgtgacgcatccgcttctgttttgggaccaagccacgaaggcagattgtgtgatgttaggtctaatcacgacgacgatgatgatgatgagctgctaaagagctngattcgatt

SEQ ID NO: 15783 - DNA, 447 bp, Arabidopsis thaliana
  unsure at all n locations
  Clone ID: LIB25-047-Q1-E1-F12
tgaggaggataaaaaccctagggtgagtgagacagagagaagcgaaaatggtgcagcgccttgtttaccgatcacgacacagttacgccaccaaatccaaccagcacaggatcgtcaaaactccaggaggtaaattgacgtaccagaccactaagaagagagctagtggacctaaatgtcccgttaccggcaagcgtattcagggtattcctcacttgaggccaactgagtacaagaggtcacgtttatcaagaaacacgaggaccttgaacctnccttatggttggggtttngtctnggttcncctgtagggnaaagatccatncttgcctccctggggnaggacaaaaagatgtgaagaangntttggaacttcnanagggaaaaggaaaaggtgctnccnagttnttcnanaaccccantannttttaggttttaanggcnccg

SEQ ID NO: 15784 - DNA, 445 bp, Arabidopsis thaliana
  unsure at all n locations
  Clone ID: LIB25-047-Q1-E1-A8
aaaatcaagaaaccgacgtctctctcttcctcacctcctctttcttctctgcttcggatctctctcttctctctctctctctccctgattaaacctctaaaatcagggagtttttttcttctggtttcggattctcagaaaaattagcaagtctttgtcntttgctgctggttgcatagcccccattgaagctttttcctctcaatcttaatgttctcaagagggcttctgcagcaagcgaaatgggacaaagaaataggaatgttgatttagaaatggagcagcagcaatctcaagcttctctccaagcagagccttgcatccttttaggcaagctttccgcaacaaccggatantaataatatgcctgctatggttggacacgtncntaattgngaacctcattctcgtcaagacccaacttatgacanctcgggccatgttg

SEQ ID NO: 15785 - DNA, 438 bp, Arabidopsis thaliana
  unsure at all n locations
  Clone ID: LIB25-047-Q1-E1-A9
gtgaacagtaaaactcccaaatttgcaaatgactcatcttcttcacctggagagaatctagggttccagatttactcttcgtcttcctctcttcgcttcttccccactgggattttccttttcttctccttttttctctacccatcgatctacacatcctgatcttcttagaagccccaatccttatacattccgggaacaaaaaacctagctttttttttattccggcttaaccagttttcgaaaaaccctagcttccatggcgaaaactcgacctggtgtcgcctccaaaattaagacgggaaggaaggagctggactcttanaccatcaangggcaccaagcaaagttgtgaagagcgggaagattgtgtgttgatgcgccccatcanatgctggtaagacannanatgntggcccgtgttgagaaagattgaag

SEQ ID NO: 15786 - DNA, 425 bp, Arabidopsis thaliana
  unsure at all n locations
  Clone ID: LIB25-047-Q1-E1-B1
ttcaaaaattcccaatttgttttttcaaacaaacttgctcaagatcctcttcttcttagggatcaatcttcaaatcaattgttgttaaaataaatgggattaaagcgaccttatgatgctgaagagatgcaaaagtgcaatgctaagcatgcaagacagcttagttacaaaaaccataaccaatttgacgaagctattccatatcatcatgcttctatggagaanaagacaaatgttttagaggatctgattggtctctgtgagaatcctacgtggactaatgatgcaaatcacgttgacaagggttttgaaacaaccggtttgtgtcaggaagattcccagtctggagtgacgacgcagtcagttcttcncatcaantctccgggttcacatttcacctgggaagccanttggaagatgtttaa

SEQ ID NO: 15787 - DNA, 321 bp, Arabidopsis thaliana
  unsure at all n locations
  Clone ID: LIB25-047-Q1-E1-B12
atcggtttagtagtgactgatctggtattgtcgttcatgtggatatgggcaggagttctggtcaacattttagtccatggagttcttggatttagccggaccgatccttccggtgagatcgttcgttatctcntctctatcatctccatgttcatcttcncctaccttcaacaagccaccaaaggcnggctttataatccnttgancgctttggctgctggatcccnngtggcntcagcagttcaagctcnccgtctncgtccgatncccngttcnaaggtaataggttcactnctttcnggttaacnatatcantncant

SEQ ID NO: 15788 - DNA, 434 bp, Arabidopsis thaliana
  unsure at all n locations
  Clone ID: LIB25-047-Q1-E1-B4
accttcgtatttggacattggtgatggtgtcatctacaaaatccccccaagttatgacaagctggtggcatcattaaacttaccgagcttttcagacattcatgtggaagaattttacttgaaaggaactctggatctgagatcattagcagaactgatggcaagtgataaaaggtctggagtaagaagccgtaatggaatgggtgagcctcgacctcaatatgaatctcttcaagctagaatgaaggccctgtcancttcaaactccaacccaaattttagcctcaaagtgtcagaagctgcaatgaattctgccattccagaaaggatctgctggaagtactgcacggacaattctgtcctgaaggtggtgttttacanggtccattacgtgaaagattctggaaaaaggggggatacatncgagaattgtt

SEQ ID NO: 15789 - DNA, 210 bp, Arabidopsis thaliana
  unsure at all n locations
  Clone ID: LIB25-047-Q1-E1-B5
ntaatcttcgctctgtcgtctgatccatttttttatcaaaatctcnagctaaanactcttgtgtttaagcaaatganatgcantgtgtttgattttgagatttgatggaagtgaagctgtttcttcaatgaatttcatggaggttttannttccctgttgtcagctctttgttaagtactcttagnntcgtcatttccgngggtttccgt

SEQ ID NO: 15790 - DNA, 443 bp, Arabidopsis thaliana
  Clone ID: LIB25-047-Q1-E1-B6
aaaatggagatatggttacttatcttgggctctctcttcctctctctccttctcaatctcctcttctttcgcctccgtgactcctcctctcttccgttaccacctgaccctaactatttccctttcattggaaccatccaatggctccggcaaggcttaggtggactcaacaactatctccgctccgtccaccaccgtctcggtcccatcatcacccttcgcatcacttcccgcccctctatattcgtcgccgatcgttctcttgctcaccaggctctcgttttgaacggtgccgttttcgccgatcgtccaccggcagctccgatcagtaaggattatttcgagtaaccaacataacatcagctcttgtttatatggagccacgtggcgtcttcttcgccggaatctcacttctgagaatcttcaaccctccgcgcgtgaga

SEQ ID NO: 15791 - DNA, 422 bp, Arabidopsis thaliana
  unsure at all n locations
  Clone ID: LIB25-047-Q1-E1-B7
aagcgacttttgcctcttttggtctctccccttctccggagagatctgctctctctatctatctctcaatctgtaagaagaagattcccacttcagtaaaagccctaactttacttgggaaagttcttcatctatcatccttcaatcgtcatcatccatggctgatcaacaaaccctanattcctctactcctcctcctactcaatccgatgatcnatctcantcccactctacttcctctactacttcagcttcttcttcctcagatnnatcagcttgaggtctctcnccttaagtcgactcaacgccggagctcctgagttcgttcctggtcgagctactccttcggtgncntcaaacctcccgagggatgaatagcnngccnccgtccgggcgnangggtgtgnttcagantgtgnnna

SEQ ID NO: 15792 - DNA, 439 bp, Arabidopsis thaliana
  Clone ID: LIB25-047-Q1-E1-B8
tttacgaaagttcttgaaatttgaagagatctcacagatgagaagtgctataggaagaagattctcaaaccctaatggcttcaccattgcatccttagtcaaacaaactccatttctcacccaatccacatctcatttctcctcttcctccgactcctccggccgtggtcgtggacgcggttccggtgaagatggaggatttcccgccgctggaagaggacaattcggtgtaaatcgtgaaccggtggttcctggacgtgaaccgtcatctgccggaggttatggtcatggtcgtggtcgtccgatccaatctgattcgatttctcctgcgtttacgtcatttgtcaaatcaagattctcctagtattggccgtggaagaggatccgttggatcagacaccgtttcacctttcgctgctgaacctcctcgccaatcgcg

SEQ ID NO: 15793 - DNA, 438 bp, Arabidopsis thaliana
  Clone ID: LIB25-047-Q1-E1-B9
ctcactgtactgttttaaaaaccctcgaattctctttactcttccgtcggaatcacctctctttgttttgggttctgataaatgttcaccggcgacgagacggccgagtagaaagactcgtgggtttgtcgtgacgtacgcgcactctaatccgaagataatcaatccgaagaagaagtcgaggtatgggcaaacgttatctccatatgacagtgatgaagatgatgatgatgatgatgatgatgatgatgatgactggttacttaatgatgatttcgctgaggttacagagtatgagaagaagaagcctaagtcacataagcaaaccattgctaagaaaagtgtgaagaaagggattgtcaagcctgaaagaaagtgaagactgatgaagatgatcttgatttaagcattaatcctaatgccacttctgagaaaaag

SEQ ID NO: 15794 - DNA, 403 bp, Arabidopsis thaliana
  unsure at all n locations
  Clone ID: LIB25-047-Q1-E1-C10
ctggttaactggtttccctgggcnctaccgagtccggganatcccggggtcgacccacgcgtccggttanaaacccgaaaacanagaacattcgtctctacgtgaagcgtgtgtttatctctgacgattttgatggagagcttttcccgagatatctgagctttgtgaagggagttgtggactccgatgatcttcctcctaatgtttccccgtgaaantctccaagaagagcagaattgtaagaatcntgagaaagaggctcattagaaaaacctttggcatgatncangaaatctctgagagtgaaacaangnggntttcaggaaattncggggaaaanttngggaaattccttaaattgggtttttttgaaaaaaccggnncccaaaagggttnnaancng

SEQ ID NO: 15795 - DNA, 332 bp, Arabidopsis thaliana
  unsure at all n locations
  Clone ID: LIB25-047-Q1-E1-C11
cnangatatancctcnccnatttgcntctcagcttctacagagcttttancattaaaagttgttaaaatggctggggggtcaaagaggtctaaaagagcangacttgacagtgaatcggaagacataagcgaccaagaaaaccttaaggccgaaagcgacaatgaagatgatcaattacctgatgggatagagggatgatgaagtagatagcatggaagatgatgaagggagagagtganggaagacgatgaaggagataccgaggaagatgatgaaggagatagcgaaggaatatgttannggananancaagnggaagacganggatgga

SEQ ID NO: 15796 - DNA, 437 bp, Arabidopsis thaliana
  unsure at all n locations
  Clone ID: LIB25-047-Q1-E1-C6
gggcaatggcaaaactcgcaattttcaccactcttatggccatactcgtaatgacatctcaaggaaggattccaacagaaggaggagagaaagaagcagaggctgacagaattacgtcacttccaggtcagcctaacgtcacgttcgagcagttttccggctacgtcaccgtcgataaactctccggaagatcactcttttattggctcactgaagcttctgacctccctctctccaaacctctcgtaatttggctcaacggaggaccgggatgttcgtcggtagcgtacggtgcgtcggaggagattggaccattcaggataagcaaaggtggttccggtttgtatctcaacaagttcgcatggaactcaatctccaatctcttgttcctcgaagctcccgccggcgtcggcttctcttacactaaccgctcctng

SEQ ID NO: 15797 - DNA, 364 bp, Arabidopsis thaliana
  unsure at all n locations
  Clone ID: LIB25-047-Q1-E1-C7
ttttataattattaatcaaaatcaaatgagcaaaaattgaaagcaacaaatttcttcttctcttcttcaagctcatcaatcaatggcgtcgtctctatctccaccggaagaagcttcgtatcancaccgtcataccaaaaggtacacctcctccgcttcctccgcttcctccaccaccaacggaaccgtcgaatcatcggtttccgatttcgtcaaacgtcccaanatctctcatccgaattacatatcaagttccgagatcgagncagagttttctcancangatccagatttcgnaagaatcaagnncggtagttttggttgttgtccgtcancaatcgnagcnttagaangangattgggc

SEQ ID NO: 15798 - DNA, 280 bp, Arabidopsis thaliana
  unsure at all n locations
  Clone ID: LIB25-047-Q1-E1-C9
natcatcaacattcaacaagagagccgtgtttgtgtcttgactgattcttctctcaagcttttttaatctctctctcttttcccacgtaattcccccaaatccattctttctagggttcgatctccctctctcaatcatgaaccttcttctcttctagaccccacaaagtttcccccttttatttgatcggcgacggagaancctaagtncgattccgggaatgtcgtnctcnnagttcaaggaanngccaaggcgtncgccaanggnnaacgttnaana

SEQ ID NO: 15799 - DNA, 447 bp, Arabidopsis thaliana
  unsure at all n locations
  Clone ID: LIB25-047-Q1-E1-D10
ntcaaacatttcttcttccacaagaaacaacaacgaagccatatattcttttgtgtcttagttgctactctcacattacattatctgggatcaaatatggctcatgtggatgggcaagttggatatagcgaggaattcatcgagaattcgcggggaatgcaactcttaacatgcaaatggtttccagtcaatcaagaaccaagagctctcatcttcntttgccatggctatgcaattgattgcagcaccacctttaaagatatagcacctaagtttgcaaaagaaggttttgcngtgcatggaattgaatatgaagggcatgggaaatnangcggncnctcggtcaanattgataactncnttcttcncaccnagaagtnccctcaaaatttctccaaattaccngaaatggaaaatacccaaagnagaanaggtttttgatgggaa

SEQ ID NO: 15800 - DNA, 420 bp, Arabidopsis thaliana
  unsure at all n locations
  Clone ID: LIB25-047-Q1-E1-A7
gaaacagctggattgacagttaatgatcccgttcttcgaacacacaagccactttctgtggagctcgggccaggaatattgggaaatatctttgatggaattcagaggcctttgaagactattgcaagaatatccggtgatgtgtacattcctcggggtgtgtctgttccagctcttgacaaagattgtctttgggagttccagcccaataaatttgtcgagggagacacaataactggtggtgacttgtatgctactgtctttgagaacactttgatgaatcacctcgttgcccttcctccggatgccatggggaagatcacttacattgctccagctggtcaatattcgcttanggataccgtgnnngagcttgaattccaggggatnaagaatnttacancatgcgtcagagnctgg

SEQ ID NO: 15801 - DNA, 508 bp, Arabidopsis thaliana
  unsure at all n locations
  Clone ID: LIB25-046-Q1-E1-F7
tntggtcnccctgggntnctaccgnnccgganatcccgggtcgncccacgcgtccgtacagncccgactcagccctcattgactcaaacaggagtcagtaatagtaatagtaatggtgtagatggatttcatgtttgtcacaagagaagaggtgttgattcgtattaccagaaactatcctccacacaagctattgtagatcccatccgtttgccaagaacagcgattatagactttggtggggaaaggaaacaactttttgcatcttgtgacgagtccactcgggagctcatcttgcaagatccttcgacttttactatttctcaacggttgccattgtcaagtcatcttccgcttcaagatgtgaaatactgtcacgtcaatggttcggatctgctcggtctcttaacggatgatagattgcagattcttaggaacgaatctccatgaagattaaaaaagattgatagtcttgcaaggatggtgtttgttgaagagaaaacatgtt

SEQ ID NO: 15802 - DNA, 457 bp, Arabidopsis thaliana
  unsure at all n locations
  Clone ID: LIB25-046-Q1-E1-F8
gggaaataaatctcggtattggnaatgaatttgaagctgatgaatttgtncttttgaatgcatcaagctaagcgccttcttgttttactgtttcaatctatcaattgttctatatanaagtgtttttagttctttgatgctgaaantgatgtacttttctgttactgtcaatctctttgcaggtaaaggttttgccanaggaagaattagcctaggagaaatagaagtggngaaaatcaccaanttncatcnagtttggagctctgattcatcacacgacanatcaaaacgtgctacattttacaaagccgatgacattccagaaggattccattgccttggtcactattgccagccaaccgatcagcccttgacnaggtatgtacttgcagctcggactaacaaagccgtcaatgctgatgatttcccgcccttgaaaaagcctgtgagttattct

SEQ ID NO: 15803 - DNA, 466 bp, Arabidopsis thaliana
  unsure at all n locations
  Clone ID: LIB25-046-Q1-E1-G10
aaatcaaaatgtcttctcatactgcaactaagtatgatgttttcctaantttcagagggcatgacactcgcnacaacttcatcagttttctctacaaagaactggttcgaangagcattcgaaccttcaaagacgacaaagagctggagaatggccagaggttttcgccggagctcaaaagccccatcgaggtgtcaagattcgccgtcgttgtngnctncagagaactatgcngcgtcttcttggtgtctcgatgagctcntaacgatcatggatttcgaaaaaaanggttccatcaccgtgatgcccatcttctacggnggtggaaccgaatcatgtgaggtggcaagaccnggagtactcgctgaacagtttaaganacatgcgagtaagagaacattctggagaaagttcntaaatgggnngcaaacattgaccaattttgcgcaactcctcccggcgantg

SEQ ID NO: 15804 - DNA, 460 bp, Arabidopsis thaliana
  Clone ID: LIB25-046-Q1-E1-G2
agaaccaaacctcacaacgctccagaagcatccctgtcttgtctcttaaatccacattgaagccacttaaacgcctctccgtgaaagccgccgtcgtttctcaaaactcgtccaaaaccgtgacgaagttcgatcactgtttcaagaaatcatcagatgggtttctctattgtgaaggaactaaagttgaggatatcatggagtcagtggagagaagacccttttacttatatagcaaacctcagatcactagaaacctcgaggcttataaagaagcattggaaggagtgagctctgtgattggttacgctatcaaagctaataacaatcttaaaattttggagcatttgagaagtttaggctgtggtgctgtgctcgttagtggaaatgagcttagacttgctcttcgtgctggtttcgatcccacaaagtgcattttcaatgggaaatggcaagtctt

SEQ ID NO: 15805 - DNA, 452 bp, Arabidopsis thaliana
  unsure at all n locations
  Clone ID: LIB25-046-Q1-E1-G9
tctatttaccgtgttccttcctttgaagtcattcttcaattcatcgctccattgttcttcagatttcaattttgctgggaaattttagagtaggcgactcctttgatcgccttatttcatttcgaaagttgagattttggatacgaccctcttgatctgacaccggaatgttggttagttaaatggagagaaaaaagaacaaaggacagtgaaccaggaccagtccctctgcttgtaccggttgatagatttgggtttctgaaacangaacatggcagttctcctcaacgtttcaccaagactaaatcatctattaattatgagaaggaggagaagagagtgacaaaatggaggaagatgattggaactgggggtagtgattggaaagcattacgttaggagaaaactcaagttgtcaagaaggcngattccaaaaaggattcccgaatgct

SEQ ID NO: 15806 - DNA, 349 bp, Arabidopsis thaliana
  unsure at all n locations
  Clone ID: LIB25-046-Q1-E1-H1
gaantggtttgccntgnccctagggcccggnaatcccanatcganccacgggcccgaaaaaatgctaaaaatcccaatttcttcttcttcgtcttcgtctattagccctcctcctaattcatatccatcgaatcatcactctctgtttttctccaatctcacattcccaattcaacatggaagtagaangttgaagactttgngactcagagccaatttctgggagtcaatccgatctgggtttgtgaagaataataatagtacgcaacttgtgganccaccttctatagtcaatgntgangaagaaggagactgagccantgtnacctgtggnagttactttnnttga

SEQ ID NO: 15807 - DNA, 380 bp, Arabidopsis thaliana
  unsure at all n locations
  Clone ID: LIB25-046-Q1-E1-H10
tggtngagttcncnacttgaagcgtggttctgtctgtgtatgtncgagtcttgaagccnaataaagttgctctcaacagtatgattctttcagctatgangacttgctcaatctctgggttccatantcatcttccgaagtcaagcggttcactttcttcgagaaanaagttttcntctactgctttatcactcatcactcaaaccatttcaccatttgctcanccccgttcatcagtaattgtgtcaagccttctctccccatctgatatccctcanaaatctgaacaatggnttgctttaaggaaagacaagttaccacnaagtacattcantaaacccctggggttttgggaaanggaaaccggcgtncnnaactcc

SEQ ID NO: 15808 - DNA, 445 bp, Arabidopsis thaliana
  unsure at all n locations
  Clone ID: LIB25-046-Q1-E1-H11
atggaagcgtttcgagctgcgttgggtttgcctgatcagcaacaggtggctgaggagggtattattgatgatgagccgatgagggagggttttgaangtagattgaaagagaggcgggaacattcttttttggacagagatagtgggaggaagaaggtatatgaggatgtggatganaaagatgctaaggtaaaggaaagcaagaagcagcgaggtggtgatgatgatgatgtggatgtagtgaagcgtcataagaaaaaanagagcaagaagagaagacatgatgattcatctgaatctgatgagcatggtcntgaccgtngaaggcgctctaagaagaaagctaaagggcgtnnacaagaaagtgaaagtgactccaacagctcggantcctgaatcctgactctgacagttattattggaaacaananaagaaagganganc

SEQ ID NO: 15809 - DNA, 460 bp, Arabidopsis thaliana
  unsure at all n locations
  Clone ID: LIB25-046-Q1-E1-H2
tgttgggtttggtgttggtatggcttcgatgacgtctccgttgtatatctctgaagcttctccggcgaggattagaggtgcacttgttagtaccaatggtcttctcatcactggtggacaattcttctcgtacctcatcaatcttgcttttgtccatactccgggaacatggagatggatgttgggtgttgcgggagttccagctattgttcagtttgtgcttatgttgtcgctacctgagtctccaaggtggttatatagaaaggacaggattgcggaatccagagcgattcttgagaggatttacccggctgacgaantggaggcggagatggaagctttgaaactgtcagtggaggcagagaaagcagacgangcaatcattggagatagcttctctgcaaagctgaaaggagctttccgggaaaccccgttggtcgactggaccncctgnttggga

SEQ ID NO: 15810 - DNA, 450 bp, Arabidopsis thaliana
  unsure at all n locations
  Clone ID: LIB25-046-Q1-E1-H3
agaggagactctctggtcagagacggcgatgattctaggccgatgggtttccttcagttgcggaaacacgccggtgactaattgttccgaacgacgacgacatacggagtttcgtcgtctctcctctgctagtacttgtcgaccttctctcatatgctcttgtctcaaaagcaaatcctcccaagaaactactcagattgaacagttggggaatggagaagggttctcagttttggcatcagagattccatgggaggatgataacatatggagcacatttgctctttacatgttctctctgcatattcctctcagttttgggggtttatccattgttgccaacatactccaccggcaggttcttgatctcagacccaagtgctatcacttgtggttctccaaatggtagaacttgcaaggacaatcntgctgctgangaccacagcgaag

SEQ ID NO: 15811 - DNA, 449 bp, Arabidopsis thaliana
  unsure at all n locations
  Clone ID: LIB25-046-Q1-E1-H5
cgatttgacctgacaaccatacanaaaattctcccgagaaaatctctctctcaacgaacgaatttcgaatcaccangaagaaattctgagatttgtttgcgtttcatcggaataatggaagtgaaagtagcaacaacgacgtcgtttcattggtcaggacgacacacagcgattcctcaatgtccgtcattttcgcaaaccctaacttcatctaaacgccgtcgttctcgtggaatagccggtgatgtttccgtcggaggaggatctttgagattaaaaccttcgacgtntctcggaacacaatctgggaaacttcaccgatctaaatcatgtgagctttggcaattttctaattccaccacgannaaggattagaactgatgtgaagaagaaacataatcctttgagaagagtttgtagtgcgagctccggtttcttctcctccgang

SEQ ID NO: 15812 - DNA, 527 bp, Arabidopsis thaliana
  unsure at all n locations
  Clone ID: LIB25-046-Q1-E1-H9
nnnnnnnnnngaactggtttgccttgncctaccgcgtccggaaatcccnggtcgacccacgcgtccgcgganncgtgggatctctcatgacgccggttatcatcagcttatttcccattggttgaggactcatgcctgtacggagccatacataatagcggcaaatagacaactaagtgccatgcatcccatttataggcttttgcatcctcatttccgctacaccatggaaatcaacgctcgtgcacgccaaagtcttgtcaacggaggtggaatcattgagacttgtttctggcccgggaagtatgcattagagctaagttcagccgtctatggtaaactatggaggtttgaccaggaaggcttacccgcggatctcatcaaaagggggttggctgaggaagataagaccgcagaacatggagtacgtctgacgataccaagactatccatttgcaaatgatggtccaataatgtgggatgcaattaaaagaatgggtgacaagactaagtgaaacantactatc

SEQ ID NO: 15813 - DNA, 446 bp, Arabidopsis thaliana
  unsure at all n locations
  Clone ID: LIB25-047-Q1-E1-A10
gaccgcgaggtacctatccagctgtgaaaactgcaagtgggaagaataccctcaggcattggccgcgaagagatggtactcaacgcaagcaactctccctgacggaaagttcttcgtgattggtggaagagacgccttgaactacgaatacattcctgaggagggacaaaacaacaggaagctctttgactcattgctcctcaggcaaacagacgacccggaagaaaacaacctttaccctttcgtctggcttaacaccgacggtaacctcttcattttcgctaacaaccgatncatccttctaagccccaaaacaaaccaagtcatcaaggagttccctcagctcccaagtggtgcccgtaactaacccgggatnangttcttccgcaatcctccccatccaaacttttacgtgaaaaaaccccaaaggtcatcccaagccgaag

SEQ ID NO: 15814 - DNA, 87 bp, Arabidopsis thaliana
  unsure at all n locations
  Clone ID: LIB25-047-Q1-E1-A2
aatggggttacaggatataccaatgtgtnctcganatttggggaaccagagaaaagaatggngtggtgtttaaaaaactcagnacgg

SEQ ID NO: 15815 - DNA, 132 bp, Arabidopsis thaliana
  unsure at all n locations
  Clone ID: LIB25-047-Q1-E1-A3
ctaaantgaagaagagcgttccagantctgctgacttacatgggaaatgtcgctaanantccacattaggaaaaattccggaaaattagactcaccaaccaaacatttcaggaaanggttggttcgctaana

SEQ ID NO: 15816 - DNA, 57 bp, Arabidopsis thaliana
  unsure at all n locations
  Clone ID: LIB25-047-Q1-E1-A4
tttgaacaaagcaatcccgcccgcantntttcaaacgctcaancccctcgctcnttc

SEQ ID NO: 15817 - DNA, 434 bp, Arabidopsis thaliana
  unsure at all n locations
  Clone ID: LIB25-046-Q1-E1-F6
tttctctctgttacttacttccattattttcgagcttattcttatcttcatcgcttaaggttcgaattttcgaattcgatctctttttgtagctataccaatcacaagtagctgaaatcaatagtattaagccaggctagctagaccagcaagtaaatttgctggctagcaggatcctcatgagccctcagagcgtatcgaagactagcaaatcccttgagggtgtccatggggttcatgttgtatctcattctcatttcggatttgaaagtattggccaagtctctggctttgagtctgcggatgcaggaacaaagcagagacttttcattgaacgtgtttggcaacaaaagacctccatgcctaagacccatccattgcagcatccatgggtgatcagagtaaccttagaaacangctgctaatgtgatnnc

SEQ ID NO: 15818 - DNA, 103 bp, Arabidopsis thaliana
  unsure at all n locations
  Clone ID: LIB25-047-Q1-E1-A6
aagaaactgtgagataatccanttcaagaatcctacagttactccaccanagccatttgtgttcttctctcctanacntgtcaccgagcttgatgcagntgca

SEQ ID NO: 15819 - DNA, 434 bp, Arabidopsis thaliana
  unsure at all n locations
  Clone ID: LIB25-045-Q1-E1-E7
tgactanaagtcaaacagtcgttaccggaatcaatggccgggattaaaacttctccggcgacgattaagctcttcaccgttctattcctcattctcacaatctcatctccatcacccaaattcgtaaacgccttcactttcccattttccttcacacaatacaaaaccctaatctcaatctcacgatcactcctcctccgcgtcgcaaacctacgcgcttcacgtggagacgcattgggttcgtctcgtgtacgagcaatggctgatgaaatcgatcgtggattagggttagggtttataagcagagcttggtctgttggttgggattatatgtggaattacgcttggtgaaagggagggattgactacggtgagatgtatggtgcgattggtgatctcaatgagcttatgggtttagtgactgaatttantag

SEQ ID NO: 15820 - DNA, 75 bp, Arabidopsis thaliana
  unsure at all n locations
  Clone ID: LIB25-045-Q1-E1-F1
gaaggaaaggtaatgcaanncatcccattnacaatcattcgactttcataaatgtcttaatcccatgtttacata

SEQ ID NO: 15821 - DNA, 525 bp, Arabidopsis thaliana
  unsure at all n locations
  Clone ID: LIB25-045-Q1-E1-F12
nnnnnntgnggtgnngaantggtctnntcttcggggctctaccgantccggangtcgngngtcgacccacgcgtccgnttaatttttctgatctgagaaannnaatggcgaatggagctaatanagtggntctcgacgggaaaccgatncaaccgttgacaatatgcatgatcggcgccggaggtttcatcggttcacatctctgtgaaaagctcttgaccgagacgccacataaggtgcttgcgctcgatgtttacaacgataagatcaaacacttgcttgagcctgataccgttgaatggagtggtcggatccagtttcatcgtatcaatattaagcatgattcgagacttgaaggtcttgttaagatggcggatctgattataaatcttgctgcgatctgtactccagctgattacaatacacgtcctcttgatactatctncagcaatttcattgatgcgcttccagttgtgaaatactgttctgagaacancaagccgtctcattcacttttcttcctgt

SEQ ID NO: 15822 - DNA, 61 bp, Arabidopsis thaliana
  unsure at all n locations
  Clone ID: LIB25-045-Q1-E1-F3
tcttcttgtttgtctgggcgaaatgagtgttcatnacattcctangaagctctnatcgcat

SEQ ID NO: 15823 - DNA, 513 bp, Arabidopsis thaliana
  unsure at all n locations
  Clone ID: LIB25-045-Q1-E1-F4
gntgntgtagtggtcttgtcggcctagggtctccggatatccanaagtcgacccangcntccgtttnaattaaaagatgggtaaagacgaccaccacgaacaagacaaaagattcttctcacatcataatcatcacggccatgggtatccgccaggagcttatcctcctccaccgcagggagcttatcctccaccgggaggttaccctccgcaaggttatcctccaccacctcacggctatccaccggccgcttacccacctccacccggtgcttatcctcccgccgggtatcccggaccatccggtcctcgtccagggtttggaggaggagttgggggattgatagcaggagcggcaacagcggcagcggctgcaatgggaggtcaccatgcgggtcatcacggaggctacgggcaccacggncacggaaaatacaaaagagggtttttcggaggangaaagtncaagcgangaaagcatagtatgtttggtgganggaagtacanncgtgg

SEQ ID NO: 15824 - DNA, 455 bp, Arabidopsis thaliana
  unsure at all n locations
  Clone ID: LIB25-045-Q1-E1-F5
gngnntacggttcgtctcctggnctaccgganggagatcccgggtngcccacgcgtccncggaagcgtgggtttgcttttacgaacagagagcgagccagagagagtgagtaagagagaatgacgagcgtgagtgggtgtggttcagtgagtctgataactaaccgcantgcgttcttgggaaacggncttcaacaccgtgccgttttccttaaaccatggtcgtcttcttcgcttcagtctcggtccatggttgtcnaagccaaaaccaatgccagcatcnaatacagaatcgcccgccactctcgtatccgtaagaaggttantggtncaactnatatgccaangctatgtgttttccgatcaaacatgcatctttatgtncangtgattgatganaccangatgcacaccttagcttcagcttcnactaagcannaaccaatctctgaagag

SEQ ID NO: 15825 - DNA, 506 bp, Arabidopsis thaliana
  unsure at all n locations
  Clone ID: LIB25-045-Q1-E1-F6
gnnnnganggttnnctcncccagntcnnggaaatgnatntcgcgggtngcccacgcgtcngataaaaggaaacgacgaggaaaaacaaaaacaaaataaaaacaagcctcgttcttcccttttctctcttcaaatcttttcttttacatattttcttttcttttttttgtctttaatacaagtttactaactaatcagaataaaaatgggttcgagtaagtttaaacgagccataggagccgtaaaggaccaaaccagcgtcggtctagccaaagtcaatggtcgaagcgcttctttatctgaacttgacgtagccatcgtcaaagccactcgtcacgaagagtttccagcagaagagaaatacattagagagattcttagcctaacttcttactcacgcagttacatcaacgcttgcgttagcacgctttcgagacgccttaataaaaccaaatgctggacccgttgccctnaaaaaccttgattttgatcaaaggntcctaagg

SEQ ID NO: 15826 - DNA, 441 bp, Arabidopsis thaliana
  unsure at all n locations
  Clone ID: LIB25-045-Q1-E1-G11
ggggtgtttcaggactaaagcagagccacggatatactatgcaccagtgaagcctttggaagaagatacaagtgaggtagaacaacagaaagagcggacattcttagaatggaaggcagcaaggagacaagaagtgagtgagtatcaaaaggagatagaagagcagtgtctgggtaatgttgagaaagagctggagaggtggcaaaacgcaaggaaggcaaggaaagcaaacaacgagggtatgaatttgcaggaaacgatggacaaggaattagagactcataggatggagcatgggccaaagaagagaaagatacctggaggaggagtaggagatgaagatgaagaagatgaagtagaggatatcaatggtggagaggatgaaatgataatggatgatttactggaggagggangagatggaaccatcaaggaggaagt

SEQ ID NO: 15827 - DNA, 524 bp, Arabidopsis thaliana
  unsure at all n locations
  Clone ID: LIB25-045-Q1-E1-G12
nnnnnnntgngnnnnngantggtttctgtccccccnggtcnncnaaaacgnatatcncgggtcgacccacgcgtccgctcnaacgaggtcggttctagggtttcactacgagaatggacggagatgagctcaccgagcaggaaactgctctttatgaccgtcaaattagggtatggggagctggtgctcaaagaagattgagtaaatctcatgttttggtatctggaattaagggcactgttgctgagttttgtaagaacattgtgttggcaggagtaggtagtgtgactctgttggatgatcgattggttacaacggaagtcttcaacgcaaacttcttgattcttcctgatgaaaatgcttatgtaggcaaaaccgtagctgagatttgttgtgattcacttaaggattttaaccctatggttcatgtttcaatagagaaaggtgatttgtcaacacttggtgttgattttttcgagaagtttgatgttgtggttatcggctacagttctcgtgctactaag

SEQ ID NO: 15828 - DNA, 438 bp, Arabidopsis thaliana
  unsure at all n locations
  Clone ID: LIB25-045-Q1-E1-G5
tctcttcaaaggctacaccggaggcgatttggagtttaatcggaaccactcggacgagtctccgatgtagaaacgaggaagattacttcaattgagattaagaggcatanagagagagatttgtgtattcgatcgaatcaagcttgggtttgttagtaatggcgagaatagctatagttttanatctactgaagaaatctcaatccaagcacagtcttcactcatcttccttctcttccgccgccactgctccctttgcgtctaggtttctattcggttctttcgagcctcgagtttcgtatcgtggtgttgctgctggaatagacgatgattaccttgggtgctatacggaaaatgtctgcggatggaaactccaaagggtaacatcatccttgacannaatttcatttaaacgaaaattcatgcnttatttattaa

SEQ ID NO: 15829 - DNA, 435 bp, Arabidopsis thaliana
  Clone ID: LIB25-045-Q1-E1-G6
ttccccttttacgctcttttctttcttcattttctgtggaaattttcagagcttttctgtgtaaattaaagagttcttttttgaaggaaataggcaatctcatcctgagaatcaaacaaccggaaaattcaataaatgaaacgcctttaattgttttctcttacaaaacttctaagcagattactttggcggagacccatctgattggtatttttgcagatattccgttcttggagtaccaactggcctggagctacattccttagcctggagtaaataataggctgaccctttgaaatcaacatggtttcctcaagaacttaataacttttcgctggtttctgtcctggagcgttgttgtgtgtttggtcagaggtattaataagtccaatgcaaggtccacgaagcactggtgattcatcgactggaataaat

SEQ ID NO: 15830 - DNA, 350 bp, Arabidopsis thaliana
  unsure at all n locations
  Clone ID: LIB25-045-Q1-E1-G9
gannggttatagcgaaatagatagagatagaagagagagaaaggacgaagaaagagagttcctttaactctctcttcttcctctgcanatctgacatattgaaccanaccaaaggnagccctctttgattagggttttgtgtcaagnttctggagagagcttttaggtgagttttgtgtatctctgatgttgatgttattgaaattgggactcttctccacttaacttggngttgttttgttttttgattgagcttttgagatcttgannnttgagntcttggcgttgtttgtttctaagtgacctnaatcttacatgatgtcttgggttcnattcacaattgagcantt

SEQ ID NO: 15831 - DNA, 508 bp, Arabidopsis thaliana
  unsure at all n locations
  Clone ID: LIB25-045-Q1-E1-H1
gnnnngantggtttgcctttgccctagcctccggaaatccaaggtcgacccangcgtccggtcaacgttngagccaacgtagtttcctactctcgtttccgtcgccagaatctcgcgaagtttcgctctccaatcgacgaatctaaagaagttctcgctgatttcaattccattgaacacgaggaaggaaaattcttctttgggttagctactgcacctgctcatgcggaggatgatttagatgatgcttggctccagtttgctaaagaaacaccatgttcagcagaagaagcagaggctgctgataagaaagctaggaggaagaaggttaagcttgctgtgggagctataaccaaaggcttggccaagaacactcatggcaaagaagataagaatgcagctgataagccaacctctaaaaatgttgccgcgtggcataacgctcctcacgcggaggacaagcttaaattttggtcagattctgacaaagaagtgaanctagccaaag

SEQ ID NO: 15832 - DNA, 455 bp, Arabidopsis thaliana
  unsure at all n locations
  Clone ID: LIB25-045-Q1-E1-H10
ggagtggtntctgtcntncgtnggtntccacgantcgcagngtcgcgggtcgacccacgcgtccgttcaacaantgttgtacgagagaatacaaacagcaaaganacattcagaaangaaatggaaggctgcagataacacgactcctgattcttatcccaggttcatggatgcactctataatttacttgacggttctattgacaatacaaagtttgaagatgagtgccgagctatttttggagcacagtcatatgttcttttcacattggacaagctagttcagaagtttgttaagcatctccattcggttgcatctgatgnaacagncaccaagcttctgcaactacatgcgtatgaganctacagaaaacctggaaaattctttgatctantgtntcatganaatgcatgtgcctcctccatgangnantcntattccgggttnagttttc

SEQ ID NO: 15833 - DNA, 55 bp, Arabidopsis thaliana
  unsure at all n locations
  Clone ID: LIB25-045-Q1-E1-H11
ttggtttgacggggagaaccatttacaccanatcnctagcatcttcaattcctgc

SEQ ID NO: 15834 - DNA, 506 bp, Arabidopsis thaliana
  unsure at all n locations
  Clone ID: LIB25-045-Q1-E1-H12
tctngnnntnctcgcctcccgaccagnnacancggncctcgancccacgcgtcangcccaancgtccgcccacgcgtccgctccaacggaaacacctccgcttcctctaagaaatctcgtgagattgaccgtcgccgccgcagacggaagcagaagaagaacaacaaagcatcccaagccgatgtagatgcatcggacgtttctgctgcttctgaatccaaagagaatacagatccccagccacaggtttgtgagcagattgtgatagagtatgttccagagcaagctgaatttgaagatggttttaacgatgagtttaaggaaatcttcgagaagttcaacttccgcgaacctcttgcctctgaagaagacggtacgaaagatgagtctgaggagaaagaagatgtcaaaaagaaggttaactctgattctgattcagacgacgacgancaggataatcagaacaaagagaaaggnatctctaataagaagaaaaagcttcaacg

SEQ ID NO: 15835 - DNA, 434 bp, Arabidopsis thaliana
  Clone ID: LIB25-045-Q1-E1-E6
ctgagcttataaaaccttcatggcatttgcgcacttctgcagcatccactgtttccttaaaatcgggaaacaacaagagcttcttctccttgttattggattgccttttgccagcctttgttttagtcagttttctcctcattaacttctgtcggtacagaatctctctccaggctggtgaactcttgcagctttctcagtgattctgtatcgatttttcccgtgtaaattatggtttcctctcagcgtcctgtccccaacaaaatccagaaacagcaatatctatccatcagcccttcaaattctgtcttgaaagatgatgttgaacttgagttctctgatgtgtttggtccactccccgaagaggcaatgatattgcttacgacgagcctgctgttgtctacagtcgatcccactccttgggttggccgtgt

SEQ ID NO: 15836 - DNA, 444 bp, Arabidopsis thaliana
  unsure at all n locations
  Clone ID: LIB25-045-Q1-E1-B5
naagttctctcatttcagtaattagtcgtctctaaaattggttttcgttccccgaggaggtttcttccctagtagaccataagatcgctgagaatatgtcgtggctgcgaacggccgtgaataaggctgtggaggtcggaaaccgcaaaaacatcacacgaaccgtcaaaaactatgccgactccgtcgtccagcacgctggccaagccgtcgctgaaggagccaaattgttccaagaccgcattggtgttggggcttataagagtgttcatcagacaattcagagattggaagaagctgcagtctcatatagangtcaagaaagggcattgctgattactagatggctaagtgtgcttaaggagattgatagagctactgacaagttctctaaaggataaacattgagtttcagagggaacaacttgcttctgatgaaacaaa

SEQ ID NO: 15837 - DNA, 439 bp, Arabidopsis thaliana
  unsure at all n locations
  Clone ID: LIB25-045-Q1-E1-B6
tnatcagatttaccatcttgcatgtcctgcttctcctatcttctacaagtacaaccctgtgaagacaatcaagaccaatgtgattggcacactgaacatgctaggtctcgccaagcgtgttggagcaaggattttgcttacctcaacctcggaggtatatggagatcctctcattcatccccagcctgagagctattggggaaatgtcaacccaattggtgttaggagctgttatgatgaaggcaagcgtgttgctgagaccttgatgtttgactaccacaggcancatggaattgaaatccgcattgctagaatcttcaacacttatggtccacgcatgaacatcnatgatggccgtgttgtaagcaacttcattgcacaagcactccggggtgatgcattgactgttcaaaaaccaagggacacanactcgcagttt

SEQ ID NO: 15838 - DNA, 518 bp, Arabidopsis thaliana
  unsure at all n locations
  Clone ID: LIB25-045-Q1-E1-B7
gntggngaantggtctncctgnccnngcccccgganatccanatcgnccntcgacccacgcgtcagaccaaatgcacactaattctactcgccaaataaagtgaaaagagatggctgatggaggaaaggtggtctgcgtaaccggagcttccggttacatagcgtcttggatcgtcaagcttttgctcttccgtggctacaccatcaatgccaccgttcgagacccaaaagatcgaaagaaaacagatcaccttctagcacttgacggcgcaaangaaagactcaaattantcaaagcagatcttctagatgaaggttcttttgagctcgcaattgatggatgcgagactgtcttccanactgcttcaccggttgcaatcactgtcaagactgattctcaggttgagctgatcantccaacccgtcaatggtnccaatnaacgtcctangaaacttgcaccnaaagtgtcctcnggtccangangggtcatcctnaanatcctccatgggncggaatt

SEQ ID NO: 15839 - DNA, 435 bp, Arabidopsis thaliana
  unsure at all n locations
  Clone ID: LIB25-045-Q1-E1-B9
ggttcttctcntgctcagatttcttctccgataggaanactcccgaagcttcactcagtaaaccctaattttccgatgtcgatcttcgagtanaatggaagtgccgtcgnagctatggtacggaagaattgcttcgctatagctagtgatcggaggcttggtgtgcaattacaaaccattgctaccgattttcagagaatatctaagatccacgatnatctcttcatcggactttcnggtctcgccaccgatgtccagacattgtaccagcgactcgtatttcgtcataagttatatcagcttacggaagaaagagacatgaancctgaaactttcgctagtccgtgtatcggctattctttatgagaaaanatttggcccantcatgtgccancctgtgattgctggattgggagatgattncaaanccntcat

SEQ ID NO: 15840 - DNA, 517 bp, Arabidopsis thaliana
  unsure at all n locations
  Clone ID: LIB25-045-Q1-E1-C10
gtggnggaatngtcctgtccgacggggactaccgacacggatcntccnggctcgacccacgcgtcagttcaagttaccttcaagttacaaattgagacaatcttgttctttgtttgttagattancttctattcttgattgtgttttccgaagattttttagaaccaatccacttgtttttcctaatacaggggtggtgttttcgtggtggtaaaaggataaaatttcttgagaatgcctgcatacatttctgaggagaagttgttcttcaacaagaaacctttcggatccaaaatctcagacaacaacgaaattgaagaacttgatcaagagaatttggttgtgacaagacaagaagttaatgatgattccaaagtggcaccgagagatgtagnanctacatcancaantgtctctaagaaggctttanccttgggaagatattttatcattgngaggattccaaangcnacccaacaaaaacannactaatggacctgaagaaaacatgggccat

SEQ ID NO: 15841 - DNA, 406 bp, Arabidopsis thaliana
  unsure at all n locations
  Clone ID: LIB25-045-Q1-E1-C3
agtggtntntgntccccctaggntccccggganatcccatantcgacccacgccnccgcggangcgtgnaggttggcggtgttgggtgtaacgagcgtttgcangaaatgatgaggactatgtgctcagaacgtgatggtaagctgtttgcaacagatgaccgttactgcatcgataatggngctatgatcgcttacacaggtctactcgcgtttgttaatggtattgaaacaccgatcgaagactctacctttacacaacgatttcgcacanacgangttcatgcggtgtggcgagagaaaagaagctgtactactttggggataanaaagttgcancgaatttgngtctgtccccatttttgttcantttttcatcagattttgagattgantctctcnnctac

SEQ ID NO: 15842 - DNA, 335 bp, Arabidopsis thaliana
  unsure at all n locations
  Clone ID: LIB25-045-Q1-E1-C4
tccagattggggaanaatttttggaaggcaagtgntttaanaactggtggggtncccttggatcctggncncangtttggaacaagcctcaaggaaatccnaagaaggttcctaatgaatccaagtttcctcaaagtggtttttgaagaaagtcccttggcaaataangttgaaagccgaatttcaaacccggcttacaaaggaaaatnccaaggaattggcctggtttaaagaaccaaaggttttcccgaangaaaanatttaccctaaaaaggccaaggnaccaantcccaaaaccnttccaaacctgggaaggtttttttggaaagcctnaa

SEQ ID NO: 15843 - DNA, 151 bp, Arabidopsis thaliana
  unsure at all n locations
  Clone ID: LIB25-045-Q1-E1-C6
ggaaganagttttcttttctcagtangttctcttttctcatgcnactgttggaggttattantattattattgcttctgtggcctccgtaatcttcgncggtttcgcctgtgtaaccctcgctggttctgccgcancattattcgtaanca

SEQ ID NO: 15844 - DNA, 438 bp, Arabidopsis thaliana
  unsure at all n locations
  Clone ID: LIB25-045-Q1-E1-C7
cactcttcttatatctcatttctctctatctctctctctctctcgcattgcgattaacgaaattcgaaaaatgtctcgtcttctccaaacacccttcttaccttcagtttccctccccacaaaaacacgatcttccgttacgggtttccgggtaaagcccagaatcatcccaattcaagcaaagatccgagaaatcttcatgcctgcactaagttccacgatgaccgaaggcaaaatcgtctcttgggttaaatcagaaggcgataaactcaacanaggagagagtgttgttgttgttgaatctgataaagctgatatggatgttgagactttctatgatggttatctagctgcaatcatgggtgaagaangtggtgttgcccctgttggttctgctantgctttgttagctgaaactgaagatganattgctgatgg

SEQ ID NO: 15845 - DNA, 443 bp, Arabidopsis thaliana
  unsure at all n locations
  Clone ID: LIB25-045-Q1-E1-D10
ccggttgaatcatcagcagctgttgaaacttcaactcgtcctaagaggctctgtagacgagtcttggattttgaagccgaaaatggagaaaaccagaccaacggtgacattagagaagcaggtgagatggaatcagctcttcaagagaagcagttagattctgggaatcaagagttaaaagattgccttctttcggctcctagcacgcccaagagaaagcgcagccaaggtaaaagaaagggagttcaaccaaagaaaaatggcagtaatctanaagaagtcgatatttcgatggcgcaagctgcanagagaagacaaggaccaacttgttgcgacatgaatctatcagggattcagtatgatgagcaatgtgactaccagaaaatgcattggnttgtattccccaaacttgcaacanggaaggatgagatatgatgccattt

SEQ ID NO: 15846 - DNA, 443 bp, Arabidopsis thaliana
  Clone ID: LIB25-045-Q1-E1-D8
gcctcaaccgattccaatggaactccacgccggtaaccggaaaaagttactaggaatcaatacgccgtcagttatctatgttccaatcgttctctcgatggatttgttcttctacagggtggcgaggagaaaaatcgatactgtactgatcacaccgagctcttcaggcaagagagttattttgcttacttgtttggagtcagagagccagatttctatggagctattgacattggaagtgggaaatctatcctttttattccaaggttgcctgatgattatgctgtttggttgggagagattaagccattgtcgcattttaaggaaacatatatggttgacatggttttctatgtggatgagattattcaagtctttaatgaacaatttaagggatctggaaagcccctgttgtatctcttgcatggtcttaatactgacag

SEQ ID NO: 15847 - DNA, 521 bp, Arabidopsis thaliana
  unsure at all n locations
  Clone ID: LIB25-045-Q1-E1-E11
nnnngnggggtgnngagtggtnttgtccccctggttctaccgatacggaccatccngggtcgacccacgcgtcagctttattgtctctcttcctttccattgcccaaaaagaaacagaaacttttctccgagaatcctcatttctccgttgaaaaaaggaccttgagaggaaatgtttcactgtttctagggttcttataatccacttcctcatcattagagaatggaaaatctcctcttctctttgatatttcttcggatttcgcttatgtcctgaatctcttgaagacccaattgaaaaaatctcaactttttttctcccggcgtttccggcgatatacaatgcggattctcgtgaatctcattctcttctccttgattcctctggcgttctccaatgaaaactccagctcgtatctcattgcgcgaccattgatcttcgaaacccagctcaagaacatatacgacaatgtcaatctacattgcacgagctggagattcgcggcggagacaaacaatct

SEQ ID NO: 15848 - DNA, 519 bp, Arabidopsis thaliana
  unsure at all n locations
  Clone ID: LIB25-045-Q1-E1-E2
gnnngnnngaantggtttncctttccctagncctccggaaaatccanaggtcgacccangcntccgcccangcgtcngtgaaaaccaaaaaaaaagaagaagatcaaaaaaaaaaggatgtcagaagaagaagtggtggtgttgaacttctggccaagcatgttcggagcaagagtgatcatggcattagaggagaaagagatcaagttcgagtacaaggaagaagatgtgtttggtcagaagaccgatctattgctccaaagcaacccggttaacaagaaaattccggttctcatccacaacggtaaaccggtatgcgagtccaatatcatagtcgaatacatcgatgaggtctggaaagacgataagactctccgtctactaccttctgatccttatcaagaagtcacagtgtagattttgggctgatttgattgacaaaaagttttttgacgcctgggangaagaacgtggacaaangaaggggcaaagaacaagaaggaaacgaaacaagagttc

SEQ ID NO: 15849 - DNA, 416 bp, Arabidopsis thaliana
  unsure at all n locations
  Clone ID: LIB25-045-Q1-E1-E4
tcaagactaaataagataggaaatgggttgatacaaagaagttgtccttttaagaattccatcactaggagttggaaagtctgaaccagagactttggtgtgcttctccaaaaacgacgagagtccagcgtctagcagtatcaagcaactctcttcttactagattctttcacaccatcangaggagccattatggcangggaacttgtgtcgtttgcagtaaacaagctttgggacctactgagccatgaatacacgctatttcagggagtcgaagatcaagtagctgaactaaaaagtgatctaaacttgctaaagtcgtttttgaaagatgcagatgccaagaaacacacaagcgcattggtgagatactgtgtggaggagataaaggatattgtttatgacgcanangatgt

SEQ ID NO: 15850 - DNA, 512 bp, Arabidopsis thaliana
  unsure at all n locations
  Clone ID: LIB25-045-Q1-E1-B4
ggntgnnggaantggtttgccttgncctagncctccgganatccannngtcgacccacgcctccgcgcgatttctaccatctctaaatctcaaccgtccgatcaaacaacttacacaacttccgtgctggagaaataaaaaaattaggtatttaataattcatcattgccattggattgtgtgtggctgcgtcagtaaaacgtattcttaaaagcaaccattggtgtgattgactctataagagaattcgtcagcgtgaagcaatctccaatctaatcgcagcatatcttctccgattcctattcgtctctgcaattgaatcttccggtaggcgaagatggcgacgtctgcgaggatttgttgcggaggaggaagtgcatgcgccgttcgttgtgatcgtcgcacgttaaatttgaattctcgatcgtcatgtttgttccagtgacgaatcgacngnatatgtgtgcgattgggaanatttccgatgtcgatggaggatttgtcnccaccgg

SEQ ID NO: 15851 - DNA, 154 bp, Arabidopsis thaliana
  unsure at all n locations
  Clone ID: LIB25-044-Q1-E1-H12
cggcagatctggcagatgtcggtccanantatcggcttctatgcccgatgttcctatgaaacgcatgngtattgcgagtgttagggattttgcggtgagcgaatatgttcatcttgatttcgacaattgtgcngccaggatgatgtgtnngaga

SEQ ID NO: 15852 - DNA, 310 bp, Arabidopsis thaliana
  unsure at all n locations
  Clone ID: LIB25-044-Q1-E1-H3
ggnngaggaatgtctgtttgggacggccgtccggattatcataggtcgacccgnccgtccgcggaancganaggtggggatcttgttagatctggttgagaaaataatagatgagaaaacgaaaccaaaacgtttctgtttgtgtttttgagttttggatttttgttttctctgtgaatagttttttttttttttcgttttctttgtactttgtgttttatgtaaatcatgtataaaatgaaaagtanatcaatgaagataatggtttgtcttcaaaatacaaanaaannanganangtacanacanata

SEQ ID NO: 15853 - DNA, 503 bp, Arabidopsis thaliana
  unsure at all n locations
  Clone ID: LIB25-044-Q1-E1-H4
nnnttgntccngccctaccggnccnngacatctcgacccagacccacgcgtcaaatctangntagcgaaagacgacnanggtcgctgagacttacagacagaccacttggaagcccaaattcgatgttgagaaagagaaacagaaggcagaanaggaagctgctggctctgcanatggtctcaagagctaccanaaggttgtattcgacctcttgaacaaggttgcagatttatctttcctaantgcctacaagtctaagatcacggaactgattgagaaagccgagcaacaaccaaacttaaccattggtgtcctcgtcgccattgtggttgtattcttctcgctcttcctcaagcttatctttggtggcaaaaaggcggcggcacctgtggaaaagaagaaaccagaagtagcggagagttcaaagagtggggatgangcnganaagaaggaagaaaccgcngnaccacgcaaaaggcaancgagacgtgataattagaca

SEQ ID NO: 15854 - DNA, 512 bp, Arabidopsis thaliana
  unsure at all n locations
  Clone ID: LIB25-044-Q1-E1-H6
gnnnnnnngaatgtccactcgctcggntctaccgcataanaaaanggggtcgacccacgcgtcngattanttgtttttctctcttgattgagagaaaaacaaaaaaaaaaatttgaaaaataattttttctttgtaactgatctttccatacttttgattctctgtttcgcttcggcggaatcagagaatcgtttcaagttacaaattcgcaacaaaaacgtgttgtgatatcgagtatttattcgtttacggggaagaaacatttcaagtggtataagcatttcctgattgtttgaaactttgaatcgtttaataaatttaaaaataagaaaaaaggatttgtagagaaatgggagtgtctcaaaccgacggaagaatggaaggttggctttataccatccgacacaaccgatttggccttcaattttcccgtaaacgatacttcgttcttcacgagaacaaccttacaagttttaaatctgtaccatctgatcacaatgaggaacctgag

SEQ ID NO: 15855 - DNA, 445 bp, Arabidopsis thaliana
  unsure at all n locations
  Clone ID: LIB25-044-Q1-E1-H7
aaactttcagatttatatagaatttgttttgtctgttacttatttaggacaaatctttagtgtaaattgagttgagagttttgttttttcttctctcgtaatgatgacttgccgtttggccaaaagttatggtttaatcaaattgttgttgtgtaataagaataatggccgtcgtcttcgttttcctccggctgatgggttctctgcgtttcacagttgctccaccacgaggaacagatccatgtctgcttctagttcctccacaaatcccatgtcccgtgaggacgcaacaacactgcttccgtctgttcaagacaagtacggtggcgtgatgaccgagatgactcatcccatggatccttctctcttctccacacttctccgatcctctctaatctacctggactcttcangggcaaaaagggaagtgtggatcaagttgcca

SEQ ID NO: 15856 - DNA, 474 bp, Arabidopsis thaliana
  unsure at all n locations
  Clone ID: LIB25-044-Q1-E1-H8
annaaacngggcncgncccacgcgtcancggangcgtgggtcagtttgtcctccttgaatcaaacacgacgttcactggcttgcctaagcctcttgtctttgctgctcaccgagatgagttcaagtttattgagtcacgcttgacttatggtactgttggtggaagatttgtcaaagggcagaatccgttttacgaagaggcgtatcagcgggtagctcttgatcagcttctgagaatcgctgggattactgatgatgacttgttgttaatgtctgatgtcgatgagattccaagtagacacaccattaaccttttgagatggtgcgatgagatcccgaagatacttcatctgcgcctcaagaactatctttactcgtttgaattccttgttgataacaaaagctggagagcttccatccacagatatgagacgggtaagacacggtatgctcattatccgacagtctgatgaa

SEQ ID NO: 15857 - DNA, 520 bp, Arabidopsis thaliana
  unsure at all n locations
  Clone ID: LIB25-044-Q1-E1-H9
nnnnnnngngngntgngaatggtccncttggacangcctccggatgtcccaagtcgacccacgcctccgcggaancgtgnggaaaaatcgatggcggggatactagtgaacaatatcctccctcaacctccgattctccgatcgctttcttcttcttcgcgaagaagttcaattcgaaccctagttatggtcaaagcttcttcctctgaaccttccgagtctgtttcagtctccacgaagaccagtgacgacactggagctgttgttgtgttcactgctcctcctggtttcaagccaccggagccaaaacggttcgccgtcaaatccggaaaactcttcgatgtcttgggtgcagcaattggattgtttttccgattcggcactggtgttttcgtttctgggtactctgcatcttttgtgtctaaggaagagattccagctgatcagtatgcgttgcgtttaggcgggatcacggtaaaggaaactgctaaggtcgggcctcgtcctgagaaaccattga

SEQ ID NO: 15858 - DNA, 437 bp, Arabidopsis thaliana
  unsure at all n locations
  Clone ID: LIB25-045-Q1-E1-A10
aaaaatatgtattgtanagagtccttgtcgagtctccagactttgaacgtagcaaagagtctcagctctttgttccctaaacaatcagctctcatcaacccgatctccgctggacgtcgaaacaacctgcctcgtccaaacctcagaagacgatgtaaggtcaccgcttcacgggctaatattgaacaagaaggtaacacagtgaaagaacccattcagaatattaaagtaaagggatacataacggcccaagaagagtttctggagggcataacttggtcgagaggtctcgatgacattgctgatatccgcggcagatcattgctcgtcgagcttattagcgccaagactgaccagcggattacggtagaagactacgcacaacgtgtatgggccgaancccctgatgagaagtacgagtgcgagtttgagatgcc

SEQ ID NO: 15859 - DNA, 395 bp, Arabidopsis thaliana
  unsure at all n locations
  Clone ID: LIB25-045-Q1-E1-A12
gatggtaggtggagaccantggaccancgctcagatccctgatgctgcatggccangagaaggtcangcancaatctctgctgcacctgctgctgcttcttggnntgattccgctgctgcaccggcagatggtggatgggaagctgccgcgccaccctcaggggcaccanctgctggttgggagtaangttgatancctttactcaatggtttaatggttatncacatgcttttttgttacttttgggattgaagagttatcgagncgtaactgttttttcttctcacttgtttctcttangacccttatatgttttgcacctttttgtttgaatcgaatctatattttgcgtttacaacangnntanaanaagggcgagnggctctacaggatc

SEQ ID NO: 15860 - DNA, 176 bp, Arabidopsis thaliana
  unsure at all n locations
  Clone ID: LIB25-045-Q1-E1-A2
ggngatcccatttactatcaanatgtctggtgtttatggttgcntcaagtgtggtttatnaagtgcangggactttcttgtcaaagctttacttgaggaggaagtttcccagacgttgtagcgactttgccccttatgctggcacangtangttgatgctcgngagcaaccttgaa

SEQ ID NO: 15861 - DNA, 440 bp, Arabidopsis thaliana
  unsure at all n locations
  Clone ID: LIB25-045-Q1-E1-A3
canngngccncttgcanaanggtctaggagacantaatgacttgatggaaaaccaattgtcaaacgacgactactccatcggattcatggctgcagaanaccataacatgtccctggttgaggagcanttcangctgaatattgntgagcttctataagagaatttggatttctggttaaggttcancacagcatttggacagatacagatctacgacacttcaatcgaagatctacaagccgagatatcaaagctcgagcagagaagaaagcaagatggaancagcacagccaaatatgccctgagatcagatgttcgaccactgtatgtacacttaagggaaataaacacagacctggggctctggctggagaaaggtgctgccttgaaagaggaactgaaatccacattcgagtccctgtgtaacatacangatgag

SEQ ID NO: 15862 - DNA, 443 bp, Arabidopsis thaliana
  unsure at all n locations
  Clone ID: LIB25-045-Q1-E1-A5
natcttgctgccgttgagattatgcaacttaagcatatcatcatccttcagaacaagattgatcttattcaagagaatgttgccattaatcagcacgaggcaattcagaaatttataatgaacactgttgctgatgctgctccgatcgtccctgtctcagcacaactgaaatacaacattgatgtggtgtgcgagtacattgtcaagaagatcccaatccctgagaggaattttgtgtcacccccaaatatgatagtgattcggtcttttgatgtcaacaaacctggttatgaggttgatgagatcaaaggtggagttgcaggtggaagtatcctacggggtgttttgagagtcaaccaattaatcgaaatccgacctggtatcgttaccaaagacgagcgtggaactcaaaatgcactccaaatttactcctcgcatcattt

SEQ ID NO: 15863 - DNA, 437 bp, Arabidopsis thaliana
  unsure at all n locations
  Clone ID: LIB25-045-Q1-E1-A8
cagaatgtcttctcatactgcaactaagtacgatgttttcctaagtttcagagggcatgacactcgccanancttcatcagttttctctacaaagaactggttcgaaggagcattcgaaccttcaaagacnacanagagctggagaatggncanaggatttcgtcngagctcanncgcaccatcgaggtgtcangattcgccgtcgttgttgtctcagagacctatgctgcgtcttcttggtgtctcgatgagctcgtaacgatcatggatttcgaaaaaaagggttccatcaccgtgatgcccatcttctacggcgtggaaccgaatcatgtgaggtggcaagaccggngtactcgctgaacagtttaacanacntgggagtagagaagatcatgagaaagtgcntaaatggaggcaagcnttganaanttttgcg

SEQ ID NO: 15864 - DNA, 83 bp, Arabidopsis thaliana
  unsure at all n locations
  Clone ID: LIB25-045-Q1-E1-A9
cggttgtgtgtgcngtttcatcgttgtgtgtcgcgtttnttcaccgtcggtgttgtctctgcggtcttctcctcggctncgtt

SEQ ID NO: 15865 - DNA, 206 bp, Arabidopsis thaliana
  unsure at all n locations
  Clone ID: LIB25-045-Q1-E1-B1
atggctctggnngagtggcggtggctcaaaggtctagacttgtcgtnagagctcagcagagtgagganacttcttgccggtccgtgattgggcttgttgntgctggtttagctggtggctcgtttgttcntggtgtcctcgccgatgctatttcgattantgttgggcctcctccagctccttccggtgggcttcctgggacaggt

SEQ ID NO: 15866 - DNA, 323 bp, Arabidopsis thaliana
  unsure at all n locations
  Clone ID: LIB25-045-Q1-E1-B11
aaccaaaaacttccggtgataaaacctccttcgtcatctctctacttcttggataaaatggcgtcaactttcactgccacatcttctattggttcaatggttgctccgaatggtcacaaatctgataagaaacttatcancaagttgtcttcangctcatttggaaggagacaaagtgtgtgtcctacacncanangatccagttctgcaattgtgtgcncagcaaangaattacatttcancacctcatgggactaccattaggagacttcaagctggtgtcancaagctcncatatcttgttggtgttacacttggaccca

SEQ ID NO: 15867 - DNA, 70 bp, Arabidopsis thaliana
  unsure at all n locations
  Clone ID: LIB25-045-Q1-E1-B2
gtcctatgcctangattgaagacgatgggaanccaagattcgttatcttcattcgtatgggccaatgtgt

SEQ ID NO: 15868 - DNA, 520 bp, Arabidopsis thaliana
  unsure at all n locations
  Clone ID: LIB25-044-Q1-E1-H11
nnnnnngggntnngaatggtccccttgntcagcnctccggacatcccangtcgacccacgcctccgcccaancgtcngaaaagttcttacgaagaacccagattttgttaagaaatggatgtgccagaggagacgaggcttcgccacaagcgagattttatccagttcctcgatagtatgtatatggaggaaatcaaggctttggtacatcaaaagcgtcaccgtctcattattaatatctctgacattcaccaccacttcagggaagttgcctctaggatactgaagaatccaaatgagtatatgcagtcattttgtgacgcagccactgaagctactcgtgctattgaccctaaatacttgaaggaaggagagcttgtccttgttggttttgaaggttattttgtttctcgcgttgttactcctagagagcttctctctgattttattggntctatggtctgtgttgagggcattgtcaccaaatgctctcttgtgaggccaaaggttgttaaaagcg

SEQ ID NO: 15869 - DNA, 453 bp, Arabidopsis thaliana
  Clone ID: LIB25-043-Q1-E1-G11
gcaaaactctcagagtttgatgatgtccaaggccacccaggttttgacaagcaaggaactagatttaagcgattaatcaaggatcagaatgatcactctgatcttgaagaaggcatcagaagattggtactttgctccggaaaggtctattatgagcttgatgatgaacggaagaaggttggcgcaacagatgttgctatctgtagagttgaacagctttgtcctttcccatatgatctcattcagcgtgagctcaagagatatccaaatgcggagatcgtttggtgccaagaagaggcgatgaacatgggagcattcagctacatatctccacggctatggacagcaatgagaagcgtaaacagaggagatatggaagacattaagtatgttggtcgtggtccttctgctgcaactgccacgggtttctatactttccatgtcaaaagagca

SEQ ID NO: 15870 - DNA, 519 bp, Arabidopsis thaliana
  unsure at all n locations
  Clone ID: LIB25-043-Q1-E1-G2
ctttcngnacgggncgnccggatatatanggtcgaccgncccgtccgaccaagtgantttggtgctcatgtgaagattgcttcatcacccgtccctgttgatgagaatctcccttttcacaaattctcttggagcattcgtgatttctctgttctgaaacagaatgattgcatatctaaaacctttgcaatgggaggaaagaattggactctaactgtgtatccaaagggagactctgaggcagataacgagttctgcaagtacttgcatttagctgacggtgaagtcttatcgcctggtgagatgatttccgtgcgagcacaactaagggctttagacccgcgtggatccaaacacaaaacagtctggcttcaacaatggatcatggcagcgaccaaagcgaggggtattcctcaatccttgtctttagctgatcttcaggaggcttacttggatgaanatactttgaatgtgggagatcnatgtgaagttgtgaactctaggaaaatgttttaagcg

SEQ ID NO: 15871 - DNA, 533 bp, Arabidopsis thaliana
  unsure at all n locations
  Clone ID: LIB25-043-Q1-E1-G3
gnttgaatgtcnctcngggncgggncgtccggancatataaggtcgaccgncncgtccgcgaaaaatgangacgacgacgacaacattcttccatccactacttcctgctaacacttacaaatccggagctgtagcttcttcctttgtctcagttcctcgttcgtcgtctctccaatttcgctcacttgtgtcagattctacgtcgatttgtggtccaagtaagttcaccggaaaaaacagaagagtatcggttaccgtttccgccgccgcaacaactgaacctctcaccgtcctcgttaccggtgccggtggaagaacangacaaattgtgtataagaaattgaaggagangtcngagcagttcgtggcaaggggtttagtgaggacaaaggagagtaangagaagatcaatggagaggatgaagtantcattggagatatnagagatactgcatcaattgctcctgctgttgangggattgatgctttggtcattccntactagcgctgttccncagataaagccgggttt

SEQ ID NO: 15872 - DNA, 478 bp, Arabidopsis thaliana
  unsure at all n locations
  Clone ID: LIB25-043-Q1-E1-G5
gaacnactatgcgctatgataaacaacaaccttcgctgctacgaccttgccatggagttaagtaatagcactttagaagctcttccacaaaattatgcagagcaggtgaattttgaagacacttgcaaaggtttcttggaggtggctaaggaagcagtgcatcaaacagttcgcgttatctttgaggatccaggagttcaggaattacttgtcaagctttaccagaaagaatggtgcgagggacaggttaccgagtacctcgtggcaactttcggtgattatttcacagatgtgaaaatgtatgtcgaagaaagatcatttagaagatttgtcgaagcatgtttgggaagaaacagtcgttgtctatgtttgaccatctcctaactcagaaaaactacatcaagggaagaaactattgaaccggtgaaggctanatgaanaaggtcctcatgggatttcctttaagggagtanaataa

SEQ ID NO: 15873 - DNA, 395 bp, Arabidopsis thaliana
  unsure at all n locations
  Clone ID: LIB25-043-Q1-E1-G7
ttttcgcaagtcgctgtaaagtttgntttgcttctttttatatacacacatacttctccnccatacagtttcctcttcaggcctcagtttnttttctaagccctattancatctcaaagaagagatcaagatttgaantcaagaagacaccattactcatgatcaacatgcttgccgttcaccgtccttcttccgccgtatcagacggagattccgttcagattccgatgatgatcgcgtcgtttcaaaatcgttttccttctctctcacgcgacnctanggccgctcgttttcacacacacgaggttggtccnaatcaggtgttgcnccaccgttantcngngagatctccgctccantcctcnancgtgtggtgnntcgtacgccgcnttgnc

SEQ ID NO: 15874 - DNA, 546 bp, Arabidopsis thaliana
  unsure at all n locations
  Clone ID: LIB25-043-Q1-E1-G8
nggnnnnnnngaantggttctctttggnccgnccgtccgganagnatatcccgggccgacccacgcgtcnantctaattccaaaatggtggcgaaaggatctggtttccaagcttccttcaaaccgttggttgtccactcattttcttccctcttctcttatctttcctccgccgtcgtcgttgccttgaagaacaagaaacgactccatttttcctcatgaaacctcctctctttatcgccgctatcgttgttggtttgctcgtgggatttgacaattacctctactcttacgggttagcttatatccctgtttctactgcgtctttgatcatctccgcgcaattaggcttcactgctctctttgcattttttatggtgaagcaaaagttcacacctttcactataaacgctatcgttttgctcactggtggtgccgtagtccttgcccttaactctgatagtgacaagctttgcanacgagacacacaaggaatatgttgttgggttcatcatgaactccttgggtgcagctcttctctaagng

SEQ ID NO: 15875 - DNA, 429 bp, Arabidopsis thaliana
  unsure at all n locations
  Clone ID: LIB25-043-Q1-E1-H1
gnntngnnggaactggttttgtttgncctgcccgtccgganatcaagggtcgacccacgcgtccgaganaatcatctcaaatctaggatgacttgtacggacaacaacaacatcgttttcgggcagcgagaggcggattctgacagtggaggaagtaccgtgacgatggactcgacgttgcagatgatgggtctagggttttcctcaaattgttcttcagattggaaccaaaccattttacaagaagacttaaactcaagcttcataaggagctcacaagatcangatcatggcnnnggattcntatccacaantacttcnccttanatacttaatccagcttgttcttcatctccatcaagnttcttcgtcctcgagcttgatncgancttttacgatcccgaaccaagtccatncaaccntttgtct

SEQ ID NO: 15876 - DNA, 163 bp, Arabidopsis thaliana
  unsure at all n locations
  Clone ID: LIB25-043-Q1-E1-H10
agnnagtggctgagaccactgnttcaacttctgtcgaagctaaggagacatttccggtcgagcngnccaaggaatcaactcctgctgttcaaccatgaggttgcaggccgtcnaagagtcttcttctgctgatgctggtgatgctgcagtcttgcacctgana

SEQ ID NO: 15877 - DNA, 512 bp, Arabidopsis thaliana
  unsure at all n locations
  Clone ID: LIB25-043-Q1-E1-H12
nnnggctttnngggccccaaggtcngganancccgggtggncccacgcagtccgcccaagcgtccgcacatgtagatgcatcgctttcttttaatgctcttatttccctttagcgacaaccgtcccatgatgttcttcagatcattcatcgttttcttctttcntatctttttcgcatcaaatgtttcttcccgtaaacaaacctacgtgatccacactgtcacaaccagtaccaaacacatcgtaacttcactttttaattcactccaaacagagaatatcaacgacgatgatttttctctcccgggagattcactatatttacgagaatgccatgtctgggtttctccgngactctcaccgacgaccagcntgatacggtgaagaacacaaanagggtttatctctgcctatccacgacgagctcttatcctctacacacgacataatctcacgaagtttcntgggtctcgaattcggggatcggtccttgggaacgagacgaacctatc

SEQ ID NO: 15878 - DNA, 64 bp, Arabidopsis thaliana
  unsure at all n locations
  Clone ID: LIB25-043-Q1-E1-H3
cttttgccaatgtagtactgaccttcaatggttgtgacatagtcagatangatgctgaanaaga

SEQ ID NO: 15879 - DNA, 463 bp, Arabidopsis thaliana
  unsure at all n locations
  Clone ID: LIB25-043-Q1-E1-H6
ctaggcctaagcttgtctttggcctttgagaatttcgagaccaacactagagtacactttataacctctcaagttcctggttataaacttaaatttccaggatttgggacacttaagtaactcagtcacttcgcacataccattcaagcggatataatctggatttattggcttctcatagtcccaaccatgcatctctaactcaatccctgtctttttgatataggaaactaggcattgatatatggttagatacgtggcaatacatgagtggagacagtagctgtgagacgtggcaagagaagattggtcgatgggagtgttagaggaagaatcnagatgcagagatatatagctaatgaagatcatttgcagaagatnngaagattttggatttgttgtttanaagtttccttttggattctctcttanaatcgttcctcatcgttccgccgggagtttg

SEQ ID NO: 15880 - DNA, 472 bp, Arabidopsis thaliana
  unsure at all n locations
  Clone ID: LIB25-043-Q1-E1-H7
atttgcttcgtacggatttgaaggctttacctcaccggagcttccaagtagaagacgacactgagtcactgacacagggatacaaattatggcgccttttggcgggaaatctttagcggacgttgtttctggcatcggagggaatggtgttggcggggctctggctgcggtggccgccgctctgttggtccgcctcttcgctggacctggcatcgctctcttacctgaagacgaagctgaagatgattacgctgagacggaagacggtggtggtgattcaattcgtccggtgacaatccgttggaggaacatcacctgctcgctctccgataagtcctccaaatcggtgaaggtttttgttgaaaaatgtatcccggagaagcaaaaactggggangttgctagcgaataagggtccntcctgggttccggggaaaacaacaattgctcaaatgttttagcaaggacagctt

SEQ ID NO: 15881 - DNA, 152 bp, Arabidopsis thaliana
  unsure at all n locations
  Clone ID: LIB25-044-Q1-E1-A10
atcnnatttnatgatcggttgcagtacggagactaattgctgggagtttaggttcatgtgttttgaactgagcttttggttcctgtttgtgtcnggngttgaagacatggatttggaagcnaattgtaaggaacaactttcatatnttcggg

SEQ ID NO: 15882 - DNA, 516 bp, Arabidopsis thaliana
  unsure at all n locations
  Clone ID: LIB25-044-Q1-E1-A12
nnnngggntgngantggtctnctgttcagcctccggancatccanggtcgncccacgcctccgccttaacctaacagcgaataatagaagaaaaagtacaaattctctaataaagcggtaaaagcgtttaagaagatgaagaagaaaaaggaaacgcctccaaatcaccattattgtccgaatcttcttcgcgtctctcaccaacaccacttctcctaccttcttcttcacaccaaatgattctctcgtataatattcatcaaacccagatcatgttttcatcatcaatcatctcttaaactcctctatagatctcaccgcatgacgttccgaagtttactccaggaaatgcggtctangccacaccgtgtagttcacgccgccgcctcaaccgctaatagttcagaccctttcagctggtcggagctcccggaggagctgcttagagaaatcctgattagggttgagactgttgacggcggcgattggccgtcgcggggaaacgtngtggcttgt

SEQ ID NO: 15883 - DNA, 516 bp, Arabidopsis thaliana
  unsure at all n locations
  Clone ID: LIB25-044-Q1-E1-A2
nggntnnnggaantggtctgtttgncctggcccgtccgganatcaaaggtcgacccnngcgtccggattagcgtnagagactcagtcgagcagagaatgacgacgattgttcccacctccgaagaagatccttacctcgccattgttcgtttcacttcccagcttgcctgggctgatgctggtcccgaggtcgcagagcctgaagtttccaggctatgtaaggaagcagaggagtctataataaatgggaagtggctggatttggcaacgttgatggtaacttcagctgacttggtatcagccaaaatctctgagaaagatcttgagtgtacctacaccatcatttgcaaccttgtcaagaatgcgaacagtcctgaggaagtccttgaaatggtgaaagctatagctgctaaggttattcaacaaccanacgacaaagcttcattgcgtttgaagatcctcttcaatctatataatctggtagaccaccaaatgctccgtttcaagtatacattg

SEQ ID NO: 15884 - DNA, 532 bp, Arabidopsis thaliana
  unsure at all n locations
  Clone ID: LIB25-043-Q1-E1-G10
ngnnnnnngggggnngaantggtttgcctgggtctacgnggccganantcggnataggccgggtggacccacgcntccggaaaaagagctcgaaacaaaaatggagggaaccttctcgccgctttgcttacgttcttcttcgaacctctgttacttctccagtaatgtttcaccagattctcaccgttctataggatttacattggttgattcgctccggccaacgaacttggtttccctgcgaacgggaaatanacgttcgtcatcgtcttcactacggctatttctctctccgactagaagcgctctccgtacgccgactatttccgcggnngacgtganagatgtcncgatgccgaagattganaagagcggccgattangcagtcctccgatccgcacgcgagctcgctcttgttatactttatgccgcaatgcttagaaaggctctgaaccanttcgtctctttgagaagagaataancgcaagaanaaaagcctggatacgaatttgacaagagttctttgttggg

SEQ ID NO: 15885 - DNA, 538 bp, Arabidopsis thaliana
  unsure at all n locations
  Clone ID: LIB25-043-Q1-E1-E3
gngnnngaactggtttgtctgnccgnccgtccggaaatcataaggtcgacccgcccgtccgcttgaagaanantccagaangtaaagtcacagttgtgaagtttgatgagaaatgggttccggattcagatgttataacacaggctttagaagagaagtatcctgagcctcctcttgctaccccacctgaaaaggcttcagttggatcgaagatcttttccacatttgtcggttttctgaanagcaaagattcaggagatggaactgagcaagttttgttggatgagcttactacattcaacgattatatcaaggacaatggncctttcataaatggaagagaagatctcggcancagatttgtccttggcaccnaagttataccacatgaagattgcattgggacattacaanaactggtctgttccaaantcacgtcntttcgtcaaatcccacatgggagaatgttttctcgaagggaatcattcacgannacacggtccggaaacagangatgttcattgctggtttgganacc

SEQ ID NO: 15886 - DNA, 455 bp, Arabidopsis thaliana
  unsure at all n locations
  Clone ID: LIB25-043-Q1-E1-E5
ggtgagcttgggaaataatggcgtagctctactagctcaagtttgagctctcccataatgagtacatcaagcttgtcctccatctcctgcctcctctggagatctctctcatgatgacttcgaaggtatgagaaactacagagataatgttaaactgcaacaaggttttagaacaccgggcagcccttagcgacgatccctttctctgttgggcaatttgccaaagggcaatggtctgtgttctcattcccccaccaatctggtaagcttatgttattgttctgtaacgcaaagtagatcaacactcccataaccgcagtgcctgcatcaagagctgcagagaggatgtagttatgccttgcccaccatcccttgtacctcctgaagatatagtagttgaacacgattccaacagcgaaccacgaccagtatgcacanccttggcattggcatca

SEQ ID NO: 15887 - DNA, 464 bp, Arabidopsis thaliana
  unsure at all n locations
  Clone ID: LIB25-043-Q1-E1-E6
aaaatggcgactggtaaaaccgtgaaagatgtttctcctcacgatttcgtgaaggcttacgcttctcacctcaagcgatctggaaagattgagcttcctctatggacagacattgtgaagactggtcgtttgaaggagcttgctccatatgaccctgattggtactacattagagctgcttctatggccagaaagatttacttgagaggaggtcttggtgttggtgctttcagaagaatttatggaggtagcaaaagaaatggaagtcgaccaccacatttctgtaagagcagtggtggtattgctcgccatattctccaacagttggagacaatgagcattgtcgagcttgacactaaaggagggagaagaatcacttcgagcggtcaacgggatttggatcangttgctgggcgtattgcanctgaatcatgaagagctgttgttctccttatgcttgcttg

SEQ ID NO: 15888 - DNA, 462 bp, Arabidopsis thaliana
  unsure at all n locations
  Clone ID: LIB25-043-Q1-E1-E7
natctaatctccgacagatttactctgattctgttgtcttcgagatgatgatgatgtcgtcgcttggtggtggtggtggtggaggaggaggaagtggtggtggtattggtggtggcggcggagggaggtttatgacgtattcgtcgtctctttcggtgcctccttctgctcctcagtctcctaattactccggtggtctccgatcacagtcttctgtcttcgttgagcaagagaagtatctttcagagttacttgcagagcgtcataagcttactccattcctgcctgtgcttccacatgcatttcggctactaaaccaagaaattttgcgtgtaaccacactgttggagaatgctacagttttaagtcagantgggcttgaacaccctanccctctggcttccggaaggaatattcaanaatgcaagaactgacatnaatggatgggcctccaattttcat

SEQ ID NO: 15889 - DNA, 466 bp, Arabidopsis thaliana
  unsure at all n locations
  Clone ID: LIB25-043-Q1-E1-E8
aaacttttcagacagatttgtttcgagaaaagatcgcttgcttggcttttcaggataatctgagatctatctgtagaagaagcagatacagaattcagaaacgatgaccgacgtcgatgaatccgttagacgccgtacagccgccgtttccgagtaccggaaaaagctcctccaacataaggaactcgaatcccgtgttcgaacagctagggagaacttaagaggagctaaaaaggaattcaacaaaaccgaggatgatctcaagtctcttcaaagtgttgggcagattattggagaagtgcttcgacccctggataatgaaagattgattgtgaaagcgagcagtggtccacgttatgtggtgggttgccgaagcaaagtggataaggaaaagctaacctccggaactcgagttgttctcgatatgacaacactaacaattatgcgagccttccccgagaattng

SEQ ID NO: 15890 - DNA, 451 bp, Arabidopsis thaliana
  unsure at all n locations
  Clone ID: LIB25-043-Q1-E1-E9
gggaanacaaagctgacccatacttagccacggttctaaattgcgcactatgggtcttttatggcttaccaatggttcaaccagatagtctccttgtgatcaccataaatggtaccggtttagccattgagctggtgtatctcgctatcttcttcttcttttctccaactagtcgcaaggtgaaagtggggctatggttaataggagagatggtgtttgtaggaatagtagccacatgcacattgctattgttccacacacataaccagagatcttcttttgttggaatcttttgtgtcatttttgttagtctcatgtatattgctcctctcaccatcatgagtaaggtgatcaagaccaaaagtgtgaagtacatgccattctctctctcacttgccaatttcctcaatggtgtcgtttgggttatttangcacttattaagttcgaccg

SEQ ID NO: 15891 - DNA, 382 bp, Arabidopsis thaliana
  unsure at all n locations
  Clone ID: LIB25-043-Q1-E1-F1
gnnnnntgaatggtctgtctggcccgggaccgtccggatatcattaggtcgacccggcccgtccgcncaancgnaacgaaggagaagcgtgtcaacgtgaaaggatactttgtttggtctcttggggataattacgaattctgcaacggctacaccgtcagattcggacttagttacgttgatttcaanantgtcactgctgatagagacctcaaagcttctggcttatggtaccagtcgttcttgagagataccaccaagaaccaagatatcctccgctcaagtctgccctttaagaacggggataggaanaggctcacatgaagnncgtgaancactttatgcccatcgagatcancttcacgtcncntctgtcgancng

SEQ ID NO: 15892 - DNA, 449 bp, Arabidopsis thaliana
  Clone ID: LIB25-043-Q1-E1-F11
aaatccacacagataaaaaaacgggtgagttttatatcaaatagacgaaaatgcccctgtcggcgacggcggatacaagcaagacggtgaagctggagaggtacaatagctacctccggaagattcacagcaccaaagttctcaacgcttcttctaaagttcttttccgagcaacgcttctcgtagctcttgtcctcgtcctcatcttcgccatcaactaccctccactctccgatagccgcgccgccgcagcacaccacctccaccgtcgtagcttcttatccaccggactcttctcctcctcctcttcttcctcctctatcggtggagccgcgtgggaaaagcgcgttagacaatcctcaacagccaaacgaccacacggtctctccgtcctagtcaccggagctgccggattcgtcggattccactgctcacttgcgctgcgaaaa

SEQ ID NO: 15893 - DNA, 447 bp, Arabidopsis thaliana
  unsure at all n locations
  Clone ID: LIB25-043-Q1-E1-F12
tgacaagtcttgacgaagaagaagaaacagagctgcttcaatggcttctaactcattactacgttcttcttcaaatttcttcttaggatcccatatcataatctcatcncccacccctaaaaccaccagaaaaccctctttccctttctccttcgtctcccgtgctaaataccaaatcactcgatcgtctcaagacgaaaattcgccaaatggtaaacccaattcgccattctcgtcgcaagtagccttagcagctattctactatcttcaatttcatcttcgccgctagctttagctgtagtggacgaaccagcttctccgtctgtcgttatagaatctcaagctgtgaagccatcgacgccatcgccattgttcattcanaacgagatacttaaggntcctaagtcctaaatcatcggatntcccaagaanggttacaagtgggg

SEQ ID NO: 15894 - DNA, 544 bp, Arabidopsis thaliana
  unsure at all n locations
  Clone ID: LIB25-043-Q1-E1-F3
gngngntgaactggtcnctctgggacgcccgtccggatatcannnggtcgacccncccgtccgggatnacttncgactanaattgtgggaagccgcaaaaaggaggagagcgaggaatcaatgaagctaacagcagaacaacaaanagaaatcaaagaagggatcttaagatgggaaacaatcattactcggatcacanacacaatggtatcgagcacaaccaactctgcttcttccaatgaagagtctagtgttgggaaagaagcttccagcgaaaacagcanaagctctggtaaagaaagtgagagttccgctaaaggtgaaagtgagacatccgctaaaggtgaaagtaagacttccgctaaaggtgaaagtgagacttcctcttcaaaaagtgctggtggaagctctacaagcgctactaaagaagaaagttcccgctagtcagagcagtggtgtaacagtgacacaagtcgangaagagacgtccaaagatgtttccgacattcataatgaacctccgaaaagaagtttccacaaaang

SEQ ID NO: 15895 - DNA, 465 bp, Arabidopsis thaliana
  unsure at all n locations
  Clone ID: LIB25-043-Q1-E1-F6
agaattttaccaacaactgcaggagtttgagcaggggatattcggatctgagatgatgtcggcgatgaatatnaatgatgctccaacgtttgggtttggtttccctaagattgataatcaagcacaagctcctgtgttcaacaatgctcctacttcttctatattttcatctcctgcttcaagtatccctcctcaggagttcacttttggagcaactccaccaaagccaacaactggtggtgatattgcaatggatggctcttagaaccagataatcatatactcttgcaagaattttcatcaacaaatatactgttgtgagaatgtttctttttcttttttgtacatggagattggtgcattgcttgagagagtttggggtttgngaacatgagattggaagcatctttgtctggtttatcctcaatctcccacaanttctgtacgatcttanagcgaaanang

SEQ ID NO: 15896 - DNA, 469 bp, Arabidopsis thaliana
  unsure at all n locations
  Clone ID: LIB25-043-Q1-E1-F7
antccaataataatacaattagaaatacaatcacattgatctttttttcacaaancttcccagcagaggaggtttcggaaatagganataaagaggagaaaacagagaatacgaagaagaagaagagtcgaggctctgctttgaaactgtcgataaaggagaaaaaggaattggcttcttacgcgcatagtttgggtgataaattgaaatgtcaactcgtcggcaaatctggtgttactgattctgtcgttttctcattcctcgagactctcgagaagaacgagctcttaaaggtgaaaatacgcaagacatccgcccgatgagctanaagatgcggtgcaacatttgggangaagcgactgggttccgtnagcagttagggcaaatanggcggactgtgaaattgtataggccagtcccaaccaanatgaaagcanaggcgaanaanaaggaattganagaagtcnat

SEQ ID NO: 15897 - DNA, 445 bp, Arabidopsis thaliana
  Clone ID: LIB25-043-Q1-E1-F9
cttcgtcttcctccatctccgatccattggtttaacaagcgcgtgagggccagatagaccgagaatcatgggaaacggaaactcaacggagacgaaagagtcgcgccgatcaaagatgcgtaagaagattcaaaactttcgcagccgccgccgtcttagtcgtccaggatccggaagcgtctctggattggctagtcagagatctgtgagcgcagatgatttcgccggcattgctcttctcactcttatcggcgcggagatgaagttcaaggacaagtggctcgcctgtgtttccttcggggaacaaactttccgttcggaaatttcagattccacagagaagccgatttggaactcggaaaagaagcttctcctggagaaaaatggaccaagtctggctagaatctctgtatttgaagaacaatagactcttgaagaacaatat

SEQ ID NO: 15898 - DNA, 541 bp, Arabidopsis thaliana
  unsure at all n locations
  Clone ID: LIB25-043-Q1-E1-E2
ngnnnnnnggaantgggtttgtttggccctgccggtccgggaaatcaagggtcgacccacgcgtccgatccacacnaaactgaagaaccaaacctcacaacgctccagaagcatccctgtcttgtctcttaaatccacattgaagccacttaaacgcctctccgtgaaagccgccgtcgtttctcaaaactcgtccaaaaccgtgacgaagttcgatcactgtttcaagaaatcatcagatgggtttctctattgtgaaggaactaaagttgaggatatcatggagtcagtggagagaagacccttttacttatatagcaaacctcagatcactagaaacctcgaggcttataaagaagcattggaaggagtgagctctgtgattggttacgctatcaaagctaataacaatcttaaaattttggagcatttgagaagtttaagctgtggtgctgtgctcgttagtgggaaatgagcttagacttgctcctcgtgctgggttcgattccacaaagtgcantttcaatgggaatggcaatcc

SEQ ID NO: 15899 - DNA, 472 bp, Arabidopsis thaliana
  unsure at all n locations
  Clone ID: LIB25-043-Q1-E1-C4
gcccacgcgtccgcaagacacacagtgcaaaatgacaaagagcccttcatcgatttcgaatcttctctctgagtaaatcaatttcacaaattcgaggtttttggtttttagcttactacactactccaagaagaaaatctcaagttaaagtcatttcctatcaaatctcttttcatggcggctgctattctcgtttctcctgttcgctaaattgcgtcattttcattgaagcttattataaaagcggcgtagatctgtgattctactcattgcatttccgcgtttgtgaggagaaagaggaaagatgttgtgtgctggtcaaggcaacaattccggttccaaggattaacccggttccccgggatccctaagctacaaagaagaatttccaaccaagtgggactttccttcccaaacnggaggangcaattgggaattccaaaattgggaagatattcaaagttnaatgaag

SEQ ID NO: 15900 - DNA, 437 bp, Arabidopsis thaliana
  unsure at all n locations
  Clone ID: LIB25-043-Q1-E1-C5
agagctcgaagacgcaatggcgagaatcaaggttcatgagctgagggagaaatcaaaagctgatctttcgggtcagttgaaggaatttaaggcagagcttgctctccttcgtgtcgctaaggtcactggaggtgctcctaataagctctctaagatcaaggtggtgaggaagtcgattgctcaggtgttgacagtgatctcacagaaacaaaagtctgctttgagagaggcatacaagaacaagaagcttttgcctcttgatcttcgtcccaagaagactagagccatcaggaggagactcactaagcatcaggcatcgttgaanacagagagggagaagaagaaagaaatgtactttccaataaggaatatgctattaaggtgttaagcttttatcttgatnacatcaatttttgtgtttgaatttgagctcctgt

SEQ ID NO: 15901 - DNA, 490 bp, Arabidopsis thaliana
  unsure at all n locations
  Clone ID: LIB25-043-Q1-E1-C6
anttttctcctccttcacggcaaatcgtcaccgccacattatctcccaaactaagaatctagggttttctaagggtttttaatcttcgtccttctctccttctccagttttaggtttcagtttcagatggcgagatacgctgctggtgcggttgattgtcctggttctcccaaatctgtgcgaatcgttgtggttggtgataagggcactggaaaatcaagcttgattgttgctgcagccactgattctttccctcccaatgtccctcctgttttgcctgattacaagttgcctattgaattcttccctgatggtatacccgtcaccattgtcgacacttcctcgaggccagaaagataagggaacattgttgctggaggaaattgaaacccngcaagatgcaagtaatttttgacataatgcctggtgaatncnaaccttgaanactcctccnaaaggttttgaagttnaataactgggccttccaaag

SEQ ID NO: 15902 - DNA, 450 bp, Arabidopsis thaliana
  Clone ID: LIB25-043-Q1-E1-C7
agtttaatacaaatggcggcgatagaggacagtccaacgttttcctctgtggtaactccggcggcttttgagataggcagcctcccgacaaccgagataccggtggatccggtggaaaatgattcaacagcaccgccaaaaccggtgagaatcacctgtccaacagtcgccggaacttatcccgtcgttttattcttccatggcttttatcttcgcaactacttctactctgacgttcttaaccacatcgcttcgcatggttacattcttgtagccccacagttgtgcaaattattgccgccgggagggcaagtggaagtggacgatgctggaagtgtgataaactgggcatcggaaaacctcaaagctcacctaccaacttcggtaaatgctaatggaaaatacacctcactcgtgggccacagccgcggtgggaaaacggcgttttgc

SEQ ID NO: 15903 - DNA, 446 bp, Arabidopsis thaliana
  Clone ID: LIB25-043-Q1-E1-C9
aatttcactgagcgcataacatttttgagacaagagactctctctctctctcttctctctttctctccccctctctccggcgatggttgttgctatggaccaacgcaccaatgtgaacggagatcccggcgccggagaccggaagaaagaagaaaggtttgatccgagtgcacaaccaccgttcaagatcggagatataagggcggcgattcctaagcactgttgggttaagagtcctttgagatcaatgagttacgtcgtcagagacattatcgccgtcgcggctttggccatcgctgccgtgtatgttgatagctggttcctttggcctctttattgggccgcccaaggaacacttttctgggccatctttgttctcggccacgactgtggacatgggagtttctcagacattcctctactgaatagtgtggttggtcacattc

SEQ ID NO: 15904 - DNA, 519 bp, Arabidopsis thaliana
  unsure at all n locations
  Clone ID: LIB25-043-Q1-E1-D11
ggngnntngtttgaactgnntncctggntctaaaggtccggagatcccgggagnacctctaccanatgatnacaggctctcgcttataatggatcctcagcttaaaggtcggtttccggcaaaagcggctaggagcatagcagatatagcacagaaatgtctgcaggtggagccttcagagcgtccaaccatgagaaacatcgtggatcaactcaagatcatacaggacatgaagtactcgtgtaggttcccattgagagaacccgcaccggtcgtggcaaggaaacatatgggaagatcaagcagtctcaacacgattatttggaccccggcatcagtgccaccaaggtcgagtttttcaccgtcacctccaccacgacgaccgtctgtctcacccacaaggggacggacgctcgtgtttcccccagtgtttccgccgcgagcgtgttcatctttggaggaaatggctcgggaagaggttcgaagatcgtcttcagccantggtaaggagaactancc

SEQ ID NO: 15905 - DNA, 68 bp, Arabidopsis thaliana
  unsure at all n locations
  Clone ID: LIB25-043-Q1-E1-D12
gaggaattcangggatncgtattcaagatcatgggaggatgtgacaagcaaggtttcccaatganaca

SEQ ID NO: 15906 - DNA, 533 bp, Arabidopsis thaliana
  unsure at all n locations
  Clone ID: LIB25-043-Q1-E1-D3
nngnnngaactggtttgtttgnccgnccgtccgganatcataaggtcgacccgnccgtccgcccaagcgaacgcaaaaaanaaaaaanaanaaaangtttaaaacaaaaactaaaanaatagaataatggcaagagttcaactattgttatgcttcaccattcnatttgcatctgtgacccttcttgacctagtatcagcacacctgaaatttaagccatctttgcctcaaatcgaagatccaaagacggtgaaggatgtanagccttacaccgttaaagtagtaatggtctttgtggccgacctcgagaaggaatgtcccaagacaaacaagttcaaggccttctttgagaaacttagaggattcgccaagtatgtttgcccaataanaaggattggccaagtagattacgaccgggacatgaaggccaaagccgggggtatcntcanggccatatcttcctttgcgattggaaagattaggaggaattcangangaaaaacacgaggctattggatacctttaggttccat

SEQ ID NO: 15907 - DNA, 531 bp, Arabidopsis thaliana
  unsure at all n locations
  Clone ID: LIB25-043-Q1-E1-D4
nnggaactggtntgtttgggccgnccgtccggattatcanagggtcgacccacccgtccgcaaaaatttnaataaccatggagggtgttagtgcaactatgcataagttaaggccttatttgttaatgatctttttgcaatttggagcagcaggaacatatattgttattatggccactcttaaccaaggccagaaccgttacgtcgtaattgtgtatcgtaatcttgtggctgctcttgtccttgcaccttttgcactcatctttgaaaggaaagtgaggccgaagatgacactatcggttttgtggaaaataatggcacttggtttcttagagccagtcttggatcanggttttggttacttggggatgaacatgacatcancaacatatacatctgcgatcatgaacattcntccttctgtcacanttataatancttggattttangaatggaganagttacatagcggacgtanaanncatagcagangatcattgggacantggntgggtctggangggccctat

SEQ ID NO: 15908 - DNA, 464 bp, Arabidopsis thaliana
  unsure at all n locations
  Clone ID: LIB25-043-Q1-E1-D5
aattcaaaggcacggataggcgtacagtgagagcgttggaggaagagatcgaagatattggtggtcacctgaacgcgtatacatcgagggaacagaccacttattatgctaaggttttggattccaatgtgaaccaggctttggatgtcttggctgatatcctacagaattctaagttcgaggaacagagaattaaccgcgaacgagatgtcatcctcagggaaatgcaagaggtggagggacaaaccgatgaagtggttcttgaccatttacatgccactgcattccaatacacaccccttggaagaactattttgggacctgctcanaacgtcaaatccatcaccaganaggatctacagaactacattaagactcactacactgcttccaggatggtgantgctgctgcaggacctgttaaccatgangaanttgttgagcnanttaagaaccctanttac

SEQ ID NO: 15909 - DNA, 468 bp, Arabidopsis thaliana
  unsure at all n locations
  Clone ID: LIB25-043-Q1-E1-D6
aaacccaattgttatcctccccaaaccaaacggtcaaacctcactcaccatgagacaccttagctcacctccatggcctctcctccttctcctcctcctctcttctttcacctccggcgaatcctctctgtccgcagaaaaaaacaaattgcacaccggtggtctcagtagacagagttttcctaaaggattcgtgtttggaaccgccacgtcagcttatcaagtcgaaggcgagactcatcaagacggtcgtggcccaagcatttgggatgccttcgtcaagattcctgggaagatcgccangaatgccacggctgagataacagtggaccagtatcaccgttnacaaggaagatgtggatttgatgaanaaactgaacntcgatgcttacagattttccatttcatgggccaaggatatcccttangggaagtggtaaantcactggaaaggggnttgcctatnng

SEQ ID NO: 15910 - DNA, 465 bp, Arabidopsis thaliana
  unsure at all n locations
  Clone ID: LIB25-043-Q1-E1-D7
naattcctctctttacccagaagatttcatcagaacctcttcgccattaatgggttagtgttactttccccaaatgtagaattaagggtttagggtttttagttccaaattcaattcttaacgaagcaatttcaaatctttttttcatttcagttacagcgatgttttgtgcatcatcttctccaattacatctcctctctacccaaaagcttataaattttctcaaacaaaatcgaattcgaagagattttcctctctgcgtgcttcgttgcctgtttctgataacaagcttcttaaatttgaatacacaccatggcttattgttggacttggtaaccctggattaaagtattacggaacaaggcataatattggttttgagatgattgatcatatagctcgagcaacggatatttctatgaacacaattcantccaaggctttagttggggataaggtccgtt

SEQ ID NO: 15911 - DNA, 536 bp, Arabidopsis thaliana
  unsure at all n locations
  Clone ID: LIB25-043-Q1-E1-E1
ggnnnngaactggtttgtttgggccgggccgtccggaaatcanaggtcgacccgcccgtccganaaaaacaacgataaaaccgaaacatcaagcaaacaaaaaaaaaagagaagagaaattatttttttttgttttcgttttcaaaaacaaaatctttgaattttatggcaacccgtcttctccgannaaactttatccggcgatcttaccgtttacccgcttttagcccggtgggtcctcccaccgtgactgcttccaccgccgtcgtcccggagattctctcctttggacaacaagcaccggaaccacctcttcaccacccaaaacccaccgagcaatctcacgatggtctcgatctctccgatcaagcccgtcttttctcctctatcccaacctctgatctcctccgttccaccgccgtgttgcatgcggcggcgataggtcctatggtcgaactanggancgtgggtcatgaactctaaacttatgggacgccttcggtgacgcgtggcatggttttanggcntgtnaaaag

SEQ ID NO: 15912 - DNA, 446 bp, Arabidopsis thaliana
  unsure at all n locations
  Clone ID: LIB25-043-Q1-E1-E10
aaagagctgtgtcactcgtgttctcaccttcactcccaacttccacatcttcaatgtttcattgtcaatggaaactgttagaccattgttgtttccgaatcaacaactttctagtctcaagcttgattgtggaaggcttggtaattcagctattgatatattggtacgtccttctttgagggagatttctcttcacaattgtcgggatttcagcggagatctcatctccgaaattggtangaaatgcaaggatttgaggctcctatgtttgggttcagtagcagagaaagttggtcgaagtattagccgttgtgctttggaggatttacttaatggttgctcccatttagaggtcttagcactcatgtttgacctctcattgtagctgcgtcctggtgatgggcgcatttttggattggtatccgatagattgactcatctggagc

SEQ ID NO: 15913 - DNA, 533 bp, Arabidopsis thaliana
  unsure at all n locations
  Clone ID: LIB25-043-Q1-E1-C3
nngnnntgaactgntttgtcnggnccgnccgtccgganatcanagggtcgacccncccgtccgaaanntttagagcgaagtttgcttgtgtgtgagtgtgtggttatggactctccgttcaaacctgatgtcgtcagaggtcaagtggctctcatcaccggtggtggatccggtatcggttttgagatctcttctcagtttggcaaacatggagcttctatcgctatcatgggacgacgaaaacaagtcctcgatgacgccgtctctgctcttcgatctcttggaatccaggctattggattggaaggtgatgttcgtaagcaagaagatgcgagaagagttgtggaagcaacttttcagcattttggtaaacttgatattcttgttaacgccgctgctggcaattttctggctgctgctgaggatttgtctcctaatggcttcagaacagtcttagacattgatgcggtaagaacattcaacatgtgtcacgcagctctcaagtatcctaaanaaagganccctggaaaaaa

SEQ ID NO: 15914 - DNA, 446 bp, Arabidopsis thaliana
  unsure at all n locations
  Clone ID: LIB25-042-Q1-E1-B1
aatgttcttggcgcccggtccggannaacggtccngccngcctcggcggaaaanaatncgggtcgtgaccagttttttcaacctgagctatggcaacgggacagcttttttctcgtaccacacaagctttgttctacaactataagcagcttcctgttcaacgaatgntcgatttcgactttctctgtggacgtgaaacgccttctgttgctggaatcataaatcctggttctgaangntttcaaaagctctttttcgggcangaggaaatcgctatccctgttcatgccgccattgaagcancttgtgctgcgcatccaacaacggatgtattcatcnactttgcatcntttanggagtgctggctggccttcaaccaangggctgccttgaaancannccgnactaattaaaagttngtggggaaaattaatancctgaaaagg

SEQ ID NO: 15915 - DNA, 530 bp, Arabidopsis thaliana
  unsure at all n locations
  Clone ID: LIB25-042-Q1-E1-B2
ggnntnnngaatggtctcctggnncacggtccggacatcccgggtcgnccacgcgtcgccnantatcacanaccagcgattcatcactccaagccagggctctcgtctacngactttgtgtaccaaagtcatcataccaaacatgcaagattcaggatcaccaccactctcttatcntactcagcgagaanccgctgagattgatgagaccttgatgggtcctcttggtttctccattgatcagctcatggaattggctggtcttagtgtggcagcttcaattgctgaggtttataaaccggaagaatatanccgggttctagctatctgtggtcctgggaacaatggtggtgatggtttggtggcggcgaggcatttgcaccactttggatataaaccgtttatttgttatcccaaacgtacagccaagccactttatactgggactggtcactcagttggattcactctcagtcccttttgtttccgttgagggatctgccggatgacttgtcaaaggactttgatgt

SEQ ID NO: 15916 - DNA, 529 bp, Arabidopsis thaliana
  unsure at all n locations
  Clone ID: LIB25-042-Q1-E1-B3
antgtttgcggccctnggtcnggaaaccgggtcgggcccgcgtncganacaanggactccctnnngccaaanttnnnttnggnanancaaactccnggtcctaacctngngncctgcagacngtagcattgacagagaagcatggagganggcgatctgaaacaaaccagaaaaagtctcttccaatagaacctagcacatgtaaaaaaatcaggaaagacgtgaacatcaaagatgacaacagcaaagagaaaaatgacaaagaagagagcaaatcagtggatggagagaggaaatatctgagagggacatatttaactccatcaagccaaaaacactttgtgacattaacaattacaccttcctctataaaaaaagatagacttattctttccccacaatttgcaaggaagaacaatattgacaagcctggaatgatatatctgctgggatacagatggtacaaaagtggctgatnagccttcaacgangataagaanggaacaatgagttttgggaaaaaggttgg

SEQ ID NO: 15917 - DNA, 530 bp, Arabidopsis thaliana
  unsure at all n locations
  Clone ID: LIB25-042-Q1-E1-B4
ggnnnnnngaanggtttcctggcncacggtccggannaccgggtcgncccacgccgtccgcganaagtttccngttacccgactcgattccgacgccggtgctctcttcgtcctccaatcaaaaggcgagtggtggcacgccggatttcatctaacgacggcgattgttggtccgacgatattgacattaccatatgcgtttagaggattaggatggtggttagggtttgtttgtttaacgacgatgggactcgttactttctacgcttattacctcatgtctaaggttcttgatcactgtgaaaaatccggccgccgtcacatccgtttccgggaactcgccgccgatgttcttggatctggattgatgttttatgtagtgatctttattcaaacagctatcaacactggaattggtattggcgccattctacttgcaggtcaatgtcttgatanaatgtantcgagtcttttcccgcaangaacgttgaangctttacgagttcattgctatggtgacggttgtgata

SEQ ID NO: 15918 - DNA, 494 bp, Arabidopsis thaliana
  unsure at all n locations
  Clone ID: LIB25-042-Q1-E1-B5
nagacgacgagtttgctcgccagacacttgccggccttaatccttatagcattcagctagttgaagagtggccgttaataagcaaactagacccggccgtttatggtgatcccacctcactcattcttgggaaattgtggnaagagaagttnaagggaacatgacanttgntgaagggtccaaaganataagagattgttcgtgttggggtatcangatttgcttctaccatatgtgaacaaagtgagagagttaaacaataccacattatatgcttctagaacactattcttcctcagcgatgatagcacattgaggcctgttgccattgagttgacttgtccancaaatatcaaacaaagccccaatgggnaacaagtcttcacgccaaggctattgatgccaacgtcaatgcctgggctatgggatccttggccaagaactccatgctaactctcaatggangccnggttancaatcangctttatttccc

SEQ ID NO: 15919 - DNA, 457 bp, Arabidopsis thaliana
  unsure at all n locations
  Clone ID: LIB25-042-Q1-E1-B6
ttctcccgaacatgatctttcaatctcaacgacgatttctcagtgactaatactacatttgtatacattcttcatcatcatcatcatcatcatctgtgtttttgttcatattcatttttcagttatcgttttcaatttttaaaacttttttcttgggtttcacaaaatttgtcgttaatcgatgaatttgattgttttcaagatcacccatctctcgaattcacgaaatctctcagcttttccgtgattcttggtaaaaattcacaaaatcgaaattggagaaagaaagaaaaaattagggtttgaggaaaagcttcgatttttcacacgatgagtcatcaccgggcgagattccggcggagatgtagttcacgtgattcccacaaacaatcctccgccgggataantgggtttccgnatctcgggnaaagtgctggtttgggcgacggaagatgag

SEQ ID NO: 15920 - DNA, 470 bp, Arabidopsis thaliana
  unsure at all n locations
  Clone ID: LIB25-042-Q1-E1-B8
tncatctctggtagacccgaggaagaggtcaagaacattcttatgaaccatgtggttcttgactactttgatgagcttaagctcaaggctctcaaggaaaagagcacattgctcactaccctttaccagtccaccggtttgggccaacagcaaaacggtttcctcaactgcaccaaatctaacggaaagatttactttggttctggtgtgaaaggcgctcctcaaaccgctgaatacatcacaaccgttttccgtaacccgtacaatctctctgtggtccaagatcagcatgcccattgtggcacctggactcgggtctccggttaaggttcctccaccaccacccatgtcttcaccaccggccccatctcccaagaagggtgcagccactccagctccagctcctgctgatgaaggggattatgcagatgctcctcctggtttaactccagaaaccgcacctgcatctg

SEQ ID NO: 15921 - DNA, 454 bp, Arabidopsis thaliana
  unsure at all n locations
  Clone ID: LIB25-042-Q1-E1-C10
aaaatgacanacatttccagtctctttagaaaccgaagtcgcaaggaccaacttgactatggtttaactgtgatagttatatcaactctttgttggtgtctttggctctacgccaaatgcaaacggcggtctccaccgttgccgccgggaccttggggccttcccattatcggaaaccttccattcctccaaccggagcttcacacctacttccaagggctggctaaaaancacggtcncattttcaaactctggctcggggccaagctcacantcgtggtcacctcttctgaattaccgcacgagattctcaaaacgaatgacatcatcttcgcgaaccacgatgtccctgctgtgggccctgttaacacgtatggtggtacggagatcatttggtcgccgtatggaccaaagtggcggatgctgaggaagctatgtgttaataangatactg

SEQ ID NO: 15922 - DNA, 450 bp, Arabidopsis thaliana
  unsure at all n locations
  Clone ID: LIB25-042-Q1-E1-C12
ggttccaagagaacttagcttcttgttctacgtacgacaccaaaaattaattcaaaaaagaaaaagaagagagttcaatgagaaaacattctcttgatcgatggcttttaacagctgttcttgtcgttctcctctcgtcttcttcctccttcgcggccaagaaggacgccaagaagaagaagaagagtaataaggaggtgacatatgatgggaacctctttgatcatcgatggcaaaagagagcttctttattctggctctattcattaccccgaagaagcactccggaaatgtggccaagtatcatcaagagagccaagcaaggnggtttgaacacgattcagacatacgttttctggaatgtacatgaagcctcaacaaggaaagttcaacttttcggggacgagctgatttggtgaagttcataaagttgattcaaaaggaatggaa

SEQ ID NO: 15923 - DNA, 299 bp, Arabidopsis thaliana
  unsure at all n locations
  Clone ID: LIB25-042-Q1-E1-C4
aactggtattcctggngccacggtccggantaccgggtngngcccagccttcgggcggaaaatttgaaaattgagggaagctaaaacaattttcaaacacncaatttcttgatcccatctggaattggattccatcgattaatctctcaatggtggtggaccaagatcagcantggctgctcggttgcttatcagcangtcttgaccctanctagaacgtncgttctttcgctgagacctctctcaatcaggcttctcttcaancagggtttgggagtncattgtgcagagttgcngca

SEQ ID NO: 15924 - DNA, 480 bp, Arabidopsis thaliana
  unsure at all n locations
  Clone ID: LIB25-042-Q1-E1-C5
attttctccattctctcgttccaattattatttacttttttcacccaataaaaaaaaaaccatgcattcacttccggtgaatctcgtcctcaccgtacttacggtgttcctaacatcaccggcgcaagttatcggataccgtccatatccaccaaaaaccaacggctccgatcaaatcttcgacgcttcaaaaaaattcgaaggctcatcgaatctcgtccgcctccgttaccacatgggtccagtcttaaccaacaacatcaccgttcacccaatctggtacggcacgtggcaaaaatcccagaagaaaatcatccgtgagttcattaactcaatctcagccgttggatctaaacacccttcagtctcngggttggtggaaaaacgtacaggcnttacactgaccagactgggattgtaacatgacnggtacgggttcgtccccggtnaagagaaacncgaacgggttttattcccatg

SEQ ID NO: 15925 - DNA, 461 bp, Arabidopsis thaliana
  unsure at all n locations
  Clone ID: LIB25-042-Q1-E1-C6
gatggattcttcttttttactcgaaactgttgctgctgcaacaggcttcttcacacttttgggtacaatactttttatggtttacagaaaattcaaagaccatcgagaaaacaaagaaaatgattcttcttcttcaacacaaccgtctccttcaccacctctgtcgtctttatctctcacgcgaaaatacgatgtctttccaagcttccgcggggaagatgtccgcaaagacttcctcagtcacattcagaaggagtttcaaagacaaggaatcacaccatttgttgataacaatatcaagagaggagaatctatcggtccagaactcattcgggcgattagagggtccaagatcgcaatcatcttgctctccaagaactacgcttcttcaagctggtgcttagacgaattggtggagatnataaagtgcaaggaagaaatgggtcaaacagtgatagtcg

SEQ ID NO: 15926 - DNA, 465 bp, Arabidopsis thaliana
  unsure at all n locations
  Clone ID: LIB25-042-Q1-E1-C7
ttccaagttataagataggggttgaagactaatcgcagtatcatccgcggttcacttccttcgtttcgaaattattagggttactgcgtatttgcactctccttcttcgtctctccagcttgacaatgcctcgctatgatgatcgctatggaaacactcgcctctatgttggtcgcttatcatctagaactcgtaccagagaccttgagcgtctctttagcagatacggaagagtacgagatgtggatatgaagcgtgattatgcctttgttgaatttagtgatcctcgtgatgctgatgacgcaagatattacttggatggacgggatttcgatggaagtcgcatcactgtggaggcatcaagangggctcctcgtggttcgcgggacaatggtagcacaggcccaactcctggttctgggtcgctgttttaattgtggtgtcnatggcactggggccgaaaag

SEQ ID NO: 15927 - DNA, 456 bp, Arabidopsis thaliana
  unsure at all n locations
  Clone ID: LIB25-042-Q1-E1-A9
aaggtaaaattggaattgcacacagtccagcttggttcgaaccacaagaccttgagcatgttggaggttccattgaacgtgtgcttgatttcatcctangatggtaaaataattacaataatgaaaaatgtgatatattataactctaactgtttataagttctttttttttttttttttaatcaggcatttggctccaacaacttatggagattatccacaatcgatgaaggatcgtgtcggtcatagattgccaaaattcacagaagctgagaagaagttgctaaagggttctacanattacgtangaatgaattactatacttcagtgtttgcaaaagaaattagccctgatcctaagagtccgagttggaccactgattctcttgttgattgggatantaagtactaaagtaatcgatantaaattttaanagtccttagntanaatatcgg

SEQ ID NO: 15928 - DNA, 445 bp, Arabidopsis thaliana
  unsure at all n locations
  Clone ID: LIB25-041-Q1-E1-H5
tcaagaaactcaatccttaggcaactaagccgaaaagaaggttggagatcggcttctaaaaggtggacttccggagatagctcaacagccttcaacgacgacacaagtggtggtggttactcatcaatggagggtctttatggagtttactccggtggagacacggcggcgagaagtaagagagtgatggttgtagttgatgaaagttcgaggtctaagcatgctatgatgtgggctttgactcatttgactaacaaaggagatttagtgactcttcttcatgttgtgtctcctgatgatgaagctactccttctttggctcaatctcttggttctctttgcaaagcttgtaaacccgaggtggatgtggaggcattggtgattcaaggaccaaagctagcaacagtgttaagccaagtnaagaaacttgaagtcctgttcntgg

SEQ ID NO: 15929 - DNA, 430 bp, Arabidopsis thaliana
  Clone ID: LIB25-041-Q1-E1-H6
caaaatagagagaataatgaaaaaaccctagcctgccccgccgtggaggagaattacaccacgacgagctcgtaatcgccgctgggtttctatgtttacatcgctaagagattaaccatcgagcgtgatttggtattggggttaggtaaatttggggatcaagcgaacagtatcatttggaaatgacgaaagtagttgctaagaggaagacgccttctgaactgagaggagaacaattgaaacggactgcttttgtggaccaagctaaagaagcttttgatgcattgcgtccttgcaaaagtgctgagagagaaaatgggttcaagaaatcagagctttcgaagaatccaaaatacattgagatgcgtatggatgaactgtatcctgtcaaaaaggctaagccttggatgctctctggcaaaagaaaact

SEQ ID NO: 15930 - DNA, 449 bp, Arabidopsis thaliana
  unsure at all n locations
  Clone ID: LIB25-041-Q1-E1-H7
aatcatctcttcttaaaccccaaaacaaacaaacaaacaaacaaaaaataccaaaacaaagaagaaaaaaaaaataactatggatcttctctttctctttttctctcttctcctctcttacctctttttcaagatctggaaactcatagactcaaagcaagacaaagattgctacattttagactaccaatgtcataaaccaaccgacgatcgaatggtgagcactcaattcagtggagagatcatttatcgaaaccaaaaccttggtttaaccgaatacaagttccttctcaaagccatagtaagctcagggattggagaacaaacctacgctccaagacttgtctttgaaggtcgagaagagcgtccttcgttacaagatgggatctccgagatggaagagttctacgtggacagcatcngaaaactcctggaagagaaatcanata

SEQ ID NO: 15931 - DNA, 534 bp, Arabidopsis thaliana
  unsure at all n locations
  Clone ID: LIB25-042-Q1-E1-A1
gcctgcgcccaacgggtccgggaaatcccgggtcgnaccaacgcctncggccaaancttcnaaaattttcaanctnccncctcttccncngccaacttataatcccgtcaaagatctttccttttttcttcttctggtttctttgtggtttcctggaggctctcagcatcttcgagtcgttgcgaggatgcgttagaagagagtctcctctcaatcttcgaatctccaagactgtattgactggccatggctgctgataccacagcttcaagttactggttgaattggagggtcctcctctgtgcattaatcctcttagctccaatagtattagcagctgttctcatttggaaatatgaaggcaagagaagaagacaacgcgaagagccagcgaagaattaccaagggacattgttccaagatgaagcttggaccacatgttttaaaagaatccacctcctttggttgcctgcccttaaggtaatccccgtttggtgcaaatgttgaacnttaancaantcccaaaggttgnng

SEQ ID NO: 15932 - DNA, 328 bp, Arabidopsis thaliana
  unsure at all n locations
  Clone ID: LIB25-042-Q1-E1-A10
agnccganacccgggatagacccacgcggccncccaancgtccgcacttccttatctcttggaaaccaagaagcatggatcgtgtggtcttcttcttcctcatcgcagctacgttactagcaggttctctcggatntaccgtcatctccggngaggttaccgacggtttcgttaacccgatnaggnaagtcgtcccggaggagaacgatgaacaactcctcaacgcagaacatcacttcactctattcaaatccaagtncgagaagactangcgactcaagtanagcacgattatcgggtccgtgtcttcnaaagnntacctnanacg

SEQ ID NO: 15933 - DNA, 518 bp, Arabidopsis thaliana
  unsure at all n locations
  Clone ID: LIB25-042-Q1-E1-A11
nnnngaactggtttgcctgngctntcctggntctaaaggtccggacatcccaggtcgacccacgcgtcnganttagantcttgagcnggaggncgntttgtggagcgtagtaccgcttatcaaccgtggctttggtctgcaggaaatcatgaagtagattacatgccatacatgggggaggtgacacctttcaggaattaccttcagcgttacactacgccttacttagcctcaaaaagtagcagtcctctttggtacgctgttaggcgtgcatctgctcatatcattgtcctctccagctattcgccttttgtgaagtataccccgcaatggcactggcttagtgaagagcttacaagagttgatagggagaaaacaccttggctaattgttttgatgcacgtcccaatatacaacagtaatgaagcacatttcatggagggtgaaagcatgcgagcagcttttgaggagtggtttgtccaacacaaagttgatgtaatctttgctgggcatgttca

SEQ ID NO: 15934 - DNA, 448 bp, Arabidopsis thaliana
  unsure at all n locations
  Clone ID: LIB25-042-Q1-E1-A12
ngacgcgtgggcaaaaaccaaaatctcagtctcaaacaaacaacaacaacacacgagtcacgaggttgaagaagaagaagaagaagcaaatatgttaaacggctggagaagagctttttgcacttccattcccaaagaaactaaccaaaacgacgtcgacgacgacggactcgttggtctccgccacaaatcaacctctcgattcggctttttctcaactccttctacgcctcgttctgattccggcaccggaacttacagcctccgttgcaggacttcaacagccaccgccgtctccactacttcatctcttcccggaactccaaagcttaagtgcaaaaccaccaccaccggagaaacaactcccagaaacagaagccttgtctctcttttaacaccttcttcttcttctatttctccggggaagcttcactctcctcaaatccaa

SEQ ID NO: 15935 - DNA, 524 bp, Arabidopsis thaliana
  unsure at all n locations
  Clone ID: LIB25-042-Q1-E1-A3
atggttttctggngccncggtccggaanaccgggtnggggccngcctncgggggnnncngttttaacctttcctncnnaaaaagagantaaaaggttgaanaanaagaanatgcnaggtcnanttattgaggaagtgaatgaggaggctcttatggatgccattaaagagcagatgaagctccagaaggagaacgatgttgttgttgaggatgtgaaagatggagacgaagacgatgatgatgttgatgacgacgacgatgagattgctgatggagctggtgagaatgaggcttccaagcaaagtagaagcgagaagaaaagccgaaaggcgatgctgaaactcggaatgaaacctgttactgatgttagcagagtgactatcaagagatcaaagaatgtgttgtttgtcatctcgaagccggatgtgttcaagagtccgaactctgagacctatgtgataatcgtgaagctaagattgatgacatgagctctcagctacaagcacaagctgccaaaaggtcaa

SEQ ID NO: 15936 - DNA, 539 bp, Arabidopsis thaliana
  unsure at all n locations
  Clone ID: LIB25-042-Q1-E1-A4
ggntgtgaatgtctccggnncacggtccggattnccgggtcgaccacgcgtcgctcaaccgaaagggaagccccggacaatnnaactacgttacggctgacggtaatgaaaagggtgcagcgatgaanatcggtatcgtcctccataactgccgtatcataccggacaaggagctcgaagctgacaagctaaccatcaaatcgtacctaggaaggccgtggaagaagtttgccacgactgtgattattggaactgagattggtgatttgattaaaccanaaggatggaccgaatggcaangagaacaanaccacaagactgctaaatacattgagttcaataaccgtggaccgggagctgccactactcagaggcctccttgggttaaggtggctaagtctgcngctgaaagttgaaacttacaccgttggctaactgggtttggtccaacctaaactggatccaanaangccanacgtngcccgttcaacctaaggattgtaaganggaccncacaananagttaaggantanannng

SEQ ID NO: 15937 - DNA, 472 bp, Arabidopsis thaliana
  unsure at all n locations
  Clone ID: LIB25-042-Q1-E1-A5
aacctaaagcattgcttttgccttcatggtatcagagctcatggaacatagatccatggaactctactctgttccttctctcaatatttcaaattgtgtcaccgtcactcttactgccaagaactatattctctggaaatctcagttcgaatcttttcttgatggtcaagggcttctgggttttgtcacaggctcgattcctgcaccaagccaaaccagcgttgtttcagacattgatgggtcaacatcggcttcacccaatcctgagtactacacctggttcaagacagatcgagttgtcaaatcctgggctccttggttctttcttagaagatattctcagtgttgtggtcaactgcaacacttctcatgaggtatggatctctgtagcaaancactttaatagggttcctcctctaaggttaatttgagctgcaaaagacgcctccaaantgttagcaaacgtgatnaa

SEQ ID NO: 15938 - DNA, 460 bp, Arabidopsis thaliana
  unsure at all n locations
  Clone ID: LIB25-042-Q1-E1-A6
gaaattctctctcttttctcttctttcgtaggaacaacttctctccctcctgttaatcccgccgtttcttacattttcctctgtttttttcccgggaaacagaaggaaaattttcgtttttttttcttctttttcccggaagaagagatctttgtgaattaggtagctgcccacatctttaagacttgtctcgagctggcgtggcttcattcttccggttaattcaattggagaatgcaacaaaggttactgcttttattagattctaaagctagggtttttgggaacgtgcttaatctgtctgtatcttagcatttgagattgggtttttgggtataataacctattatggattcaagaattgagtttttcttcgagggatgtggtgaattgctgtgantatgggtgtgattantcncntggggcatgttcctcanatcctttgggctnaggacgggga

SEQ ID NO: 15939 - DNA, 526 bp, Arabidopsis thaliana
  unsure at all n locations
  Clone ID: LIB25-042-Q1-E1-A7
tcctctggcnncacggtccggannacccgggtcgnccacgcgtccgcggaancgtgggcggacgcgtgggcggacgcgtggggcgtctttctctttctctctgtctgaagttgagaacacgaaccactgaaaaacccgcgaaagactcgagcacgaaccaacaatggcggaacccaaaaccaagtatgatcgtcagctaaggatttggggagaattaggtcaatcagctcttgaaaccgcgagcatatgtttgctcaattgtggtccaactggctctgaggctctaaagaatcttgttattggtggaatcggaagtatcaccattgtcgacggatctaaagtagaaatttggcgaccttggaaacaatttcatggtggatgcgaagagcgttggtcagtcaagagccaaaacggtcctgtggctttcttcaggagcttaacgattctgttaaagcaaaattttggttgaggagaatccaagacactttgatatcgacagacccatctttccttccctcaantcaag

SEQ ID NO: 15940 - DNA, 505 bp, Arabidopsis thaliana
  unsure at all n locations
  Clone ID: LIB25-042-Q1-E1-A8
gggncnngnnggaactgttntgcctggcgcctaccggtccgaaatatcccgggtcgncccacgcgtccgcggaagcgtgggcggacgcgtgggcggacgcgtggggtttacggaatcnantccaataatgagtactgcgtcggcttttagttcaatccaaggatgctggttcaagggcgaaaggaaaantcgtgtagcggataagcgagccannaggcttactttgggatcccatgtggcttcgccatcttcaatgagcttcagagtttcagctagtagttctgttaaacctgaaaaggatattaggattggtcttcttggtgcaantggctacactggtgctgagatcgttangcttcttgcaaatcatccgcatttccaggtcactttgatgactgctgatanaaaagctggccagtcaatggaaagccgttttcccagacctgagagcnananaactaccnacnttggtctccggtanangatccanatttttcancggtgg

SEQ ID NO: 15941 - DNA, 447 bp, Arabidopsis thaliana
  unsure at all n locations
  Clone ID: LIB25-041-Q1-E1-H4
attaacacttagtttttcttttccttttcattattttcttttattttgtaacagaaataaaagaaaataaaagaaaataaaaagatgggttacatttcaatgtccgtggttgcattccttgttgtttttgcttcgccggtggttctagccaccgatacagatccgattccagaaaacagagcccaaatcccgcaatggtttaaaacaaacgttaaaccatattcccagagaaagggcacgctagaccccgccctcgaagctgctgaagcagcgcgacaaattatcaccgtgaatcaaaaaggtggcgctaatttcaagacattaaacgaagctatcaagagcattccgacaggaaacaagaaccgtgtgatcatcaagttggctcctggtgtatacaatgagaaggtcacaatcgacatagctcgaccattcattacattgcntggg

SEQ ID NO: 15942 - DNA, 413 bp, Arabidopsis thaliana
  unsure at all n locations
  Clone ID: LIB25-041-Q1-E1-F2
taagagtaaaaaatggtagaggcagaggttgaagtagatgtggaaatcaaatctacggctgataagtttttcatgttctctagaagatcacaacatgcctccaaagccactcgctatgtacagggatgtgatctgctcgaaggcgagtggggcgaagttggaagcatactcttgtggaaattaactgttgatggagagccaaaagtgtcaaaggatatgattgaggcgattgatatgaagatgaatatgatccagtggagggtgttagagggacctctgaaggaagagtacaatattttctcgaaaacgatgaaagtaagccctaagcaagganggtctggaagtgtggtgaagtggaacttgaagtatgagagaattgatgagaaagtggctcanctanaaaggctccttca

SEQ ID NO: 15943 - DNA, 529 bp, Arabidopsis thaliana
  unsure at all n locations
  Clone ID: LIB25-041-Q1-E1-F3
nnngnnnnnngggnngnngaantggtccgcctggntctaccggccccgganatcccggatcgacccacgcgtccgcgcaatgttcgtcggcgacgacgactcagttcagattgttcggcttcttgaccagacgcttacttctattgatggcgtttctgtccgcgaggcgacggaggctctggatctactgtctacgaagctccctcatttcccttatcgtcttctctccatcgcttccggaagtgaaaatccaagcctgaaagttgctgctgcaacatatctgaagaattttaccagaaagagcactggcactgaagggacaatctcagaagtcagcaaggagtttaaggatcagctcctcctagctttgcttcaggcagagcctgcagttcttaaagtcttacttgaactgctgcacattgttgttgtgtcagaatttgttaggaaaaatgcatggcctaaacttgtaccggagctgcgctctgctatcgagaagagcagtttaattagcagttcaaactctagctgg

SEQ ID NO: 15944 - DNA, 440 bp, Arabidopsis thaliana
  unsure at all n locations
  Clone ID: LIB25-041-Q1-E1-F4
tatgttgaaatactcccggtctcaacgggagagaagaagtcctcatatgcttgtggagtcactgtacgctaaggatatggggatgagaagctgtcggctggaacattggggtgaatccaagtctgcaaaatccatcaactcatttctcattccaagtgaaatgcttgtccctacaaaagtaaagcttagatctttgcagagacaagactctggtgatggacaagactctccattttctttcccaaggagatctttcagccgtttggagcagagtatattggaagacgagagctggtttcaaagatccaatggtttccagccgtacatgagtgtgacagagtctgcaagggaaaagatgagatcactgagcacaccaaggcaacgtgtanggatcatggattctttgtttgataactacaagaaggatggggataaagtcc

SEQ ID NO: 15945 - DNA, 447 bp, Arabidopsis thaliana
  unsure at all n locations
  Clone ID: LIB25-041-Q1-E1-F5
cntcttcttcgccttctctctgagtcgaactcgctccgatcgactgagccaactcgcccgccttctgtaatgatcatttcctctacattgtacaaaaaaagagtgttgtaatgactcgttccgggagacgatggtcggagcgacggtgagagttacagttttctttccggcgaccaatactctcggcggcggagatgtttaagtcagcgagatggcgtagcgagaagaacaggatcaaagtcgttttcagattgaagtttcatgcgactcaggcgtcacagttcaatacagagggattgattctgtctctagttcccggagatattggaaaaccgacggcgaggtcagagaaagctattgtgaacgacggacattgccggtgggagattccggtttacgagactgtgaaatttctcaaaagatgtaaaaactgggaaaagttaatca

SEQ ID NO: 15946 - DNA, 445 bp, Arabidopsis thaliana
  Clone ID: LIB25-041-Q1-E1-F6
atcttcttcttcttcctctctgtatttttctcattctcttcgatttgtttgcttgctagtgactagtgagtgagagagtatggagagaagtactccggtgagaaagccacacacatcgaccgcagatctacttacttggtcggaagttccaccgccggattctccttcctccgcttctcgctccgccgttcgttcccaccagccatcggatgggattagcaaagtggtgtttggtggtcaagtcaccgatgaagaagttgagagcttgaaccgcaggaagccttgctcagaacataaaatgaaggagataactggcagtgggatcttttctcgtaacgaaaaagatgatgcgtcagagccattaccagtttatcagcaagcagttaatggtataagccagatatcatttggtgaagaggaaaatctatctcctaaaaagccggct

SEQ ID NO: 15947 - DNA, 448 bp, Arabidopsis thaliana
  unsure at all n locations
  Clone ID: LIB25-041-Q1-E1-F7
ntttaaaaaaatcctttgtgtaagatgtacatagaaattgcttcatcttcttcactttctcttccattattacccttaaccagacctcatatctacacttcgatacccttctccacnattcctgaagctagacaacgcaatctcatcttcacagtctctgcttcttcttcttcagaatccacacaaaacaaaaaggtatggagaaaacaaccggagaagaacactacgtcgtcgtttcaggccttaaggaaacatcggaggtatcaaagatctgcttttctcgaccacaacgtcgatatggacgagcttttagcttcaattcaccaagacccagaacgaaaaagagcttttttctttgctttcaacttacaaagacagacaattatctatacggttcatggtctctcttctttctcgagaaaatgattggcagagatnattgggcatt

SEQ ID NO: 15948 - DNA, 523 bp, Arabidopsis thaliana
  unsure at all n locations
  Clone ID: LIB25-041-Q1-E1-F8
ggnnnnnngnggnnnngnnnntttaatggtccctgggtctacaagtccggcgntcccgggtngacccacgcgtccgggaaatcgtgaatccaaccaacaagacatttctctgactctcttcttccttcttctcctccaatttagggttccttcaaattctctctgatttcgtttgaaattgggggctcctcttcgaagatgacgatccctaattccgatttcatgttagaaaacggagtctgtgatttgccttttactcctgaggaagagaaacggattgtatcggagcttactagcgaatcggaggataatttgaaacaaggcaacttgtattttgtcatctctaaaaggtggtatacaagctggcaggaatatgttgagaattcggctaatgaatgttcaactggagagtcttcggaagctccgaggcctggaccgattgataaccatgatattatcgaaagtgatagcgacattaatgattcacaacttcgtagattgctggtggaaggggangactacg

SEQ ID NO: 15949 - DNA, 434 bp, Arabidopsis thaliana
  unsure at all n locations
  Clone ID: LIB25-041-Q1-E1-F9
gcaaggtaatgaggaagaggtctgatgaaactttgaagctgcttcacccaattctatttggtgggaggagagggaaggctgctcagatcaagacaaacatattgggcttctctggtttcgtttggcatggagatgagaagaaagcaaaagaaaaagtaaaagaaaagcttgagaaatgcaccaaagagaaactgtgggagttttgtgatgtgttggacatacacattaccaaggctacaacaaaagaaggtcattatggttatcaatttctaagtttttgttcttgagattcatttttttcctctgtgaatagatacatgtgaaggtttaaatttctgtcnttgttgaacagcttgattagccatttctggttgtccaagtttatgcttaatcatttccccattaatcgaacctggcaacttcctgttgcatgc

SEQ ID NO: 15950 - DNA, 451 bp, Arabidopsis thaliana
  unsure at all n locations
  Clone ID: LIB25-041-Q1-E1-G1
ggaaatggtnagagagataacaatggagagatcaaagatttggctgatgcgttttctaagcttaatccgatggctcaggagtttgttcctccttctcttgctcgaagtcaatctggggttttgagaaatggattagggtttactaacaattttgcagccccacctaaacttgctgatgggaatgatcattttcctagaaggagaaggagttttggccaagggaagcgaagaatgaacaaaaggacaagcttggctcagaaggatgatgtaatcaggagaactgtatatgtctctgacatcgaccaacaggttacagaggagaacctcgcaggtgtctttattaactgtggacaggttgttgattgtcgtgtatgcggtgattcaaattctgtccttcgtttcgctttcattgaatttaccaatgaagaaggagctagagctgctttgagca

SEQ ID NO: 15951 - DNA, 413 bp, Arabidopsis thaliana
  Clone ID: LIB25-041-Q1-E1-G5
attctttgactgtccatgagcccagagtgaaggttgatttgactgcttatgtggaaaagcatgagttctgctttgatgctgttctagatgaggatgtttcaaatgacgaggtgtatcgggccacaattgagccaataattcccattattttccagagaactaaagctacatgctttgcatatggccaaacaggtagtggtaagacatttacaatgaaaccattacctatacgagcagttgaagatcttatgaggttgttgcgtcaaccagtatacagcaatcagaggtttaaattgtggctcagctattttgagatatatggtggaaagctgttcgatcttctcagtgagagaaagaaactttgcatgcgaagaagatggtagacagcaagtttgcattgttggcctgcaaga

SEQ ID NO: 15952 - DNA, 443 bp, Arabidopsis thaliana
  Clone ID: LIB25-041-Q1-E1-G6
actttctacataatataaaaagtcacacattctctctattaattaaacatgttgcttgttgcgtttgtgactcttttggtagcagtagctttgcagccactaccgtcagtgttgtctttggacgttcaccttcttcggcagctagccgcaaagcacaatgtgacatcgatacttgtgtttggagattctagtgtcgatccagggaacaataatttcattaaaaccgaaatgaaagggaattttccaccttatggtgaaaatttcatcaaccataaacccaccggtagattatgcgatggattactcgctcccgattatattgcggaggccatgggttaccctcccataccggcttttcttgatccatccctaacccaagctgatctaactcgcggtgcaagttttgcctctgctggttctggctatgacgatttcacagctaa

SEQ ID NO: 15953 - DNA, 444 bp, Arabidopsis thaliana
  unsure at all n locations
  Clone ID: LIB25-041-Q1-E1-G7
nttatcggatgtgtcgtaatgaaaggggtaaaacacgtggcagtcaaccaggctgtcagttgttggtgaaagcagacaagcgcgtgattttaatataatctctctttacccgcgccaacaacactttaccaagacagatctctcatggcggtgctctgatgcttcagcctttgattttttccttttttgacctttttaatctctaattataataatcagtacaaaatcactgttgtttaccattaatttaaggaattaatcctaatctgattttaaggaattaatctctatttgccaaagaagaggcgcaaaggctccgtcttttttcttcttcttgtttctgtgttaccgatctggctctgtcttcttcttcttcttcttcttcttcttcttcttcttcttcttcttcgtttacgtctctgtgaaatgctcaagctgattang

SEQ ID NO: 15954 - DNA, 434 bp, Arabidopsis thaliana
  unsure at all n locations
  Clone ID: LIB25-041-Q1-E1-H11
gttaaatttttcttctctcgataataaaaacaacaaatgatcgttgatcgtttttctctagattcgattccgattccaaagaactagtctccggcgtgtaatctctgatcgttgaagatccaagctacgccgcatcttactcgccggcggcttgaatcatggctgataggagaaacaggtgtaaccagatcctccttttagcataccagagttttggcttagtgtttggagatttgagtatttctcctctctatgtgtataaatgtacattctacggaggattgagacatcaccaaacagaagatacgatatttggcgcgttttctttgatatttggaccatcactctcctttcactcatcaagtacatgggttttgtgttaantnnanatgacaatggtgaaagganggatcttgccttggaagccttgcnct

SEQ ID NO: 15955 - DNA, 442 bp, Arabidopsis thaliana
  unsure at all n locations
  Clone ID: LIB25-041-Q1-E1-H12
tacttgtatcctaagatgactcaatctttagaaactaagagagaatggaattaacactaaaattgctggttctgcttctgtttatcttaaatcatcatgttggttctggctctatcgtcaagtttcttcccggttttgaaggccctcttcctttcgaacttgaaaccgggtttgttagttctctcttttgcaacaatgtgttttgagtttggagtttgtaattagtcattcttttgactaaaggtacattggtattggtgaggaagaggaagtgcaattgttctattatttcatcaaatctgagagaaatccaaaagaagaccctcttcttctctggttaagtggaggacctggatgttcttctatcactggncttcntttccagaatgggacctttggctttgaagtccgaaggtttacaaatgggaagtgttccctcctt

SEQ ID NO: 15956 - DNA, 484 bp, Arabidopsis thaliana
  unsure at all n locations
  Clone ID: LIB25-041-Q1-E1-F11
gnttggnggaactgtncccttnnngtctgnccgtccggtccatcanaggtcgacccnggcgtccgccaaaattcacttcctcagcctccacgtcgtctctaaactcagcaaaaaccaatgtcgacggtgagaaaaatcactcttaagagttcgggatggcgaaaacttcnaaattgacgaagcggtggcgctagagtcacaaaccatcaaacatatgattgaagatgactgtatcgataatgttatccctctccctaatgtcacaagcaagatcctttcgaaggtgattgagtactgtaagagacatgtcgaagctgctgagaaatccgaaaccacggccgatgctgctgctgctacnactacgaccaccgtcgcgtcnggtncnagtgatgaaagatntcangacttngggaatctggagtttaacannagttgattaagggcaatctcttcgattgtancctggntgctagctagntnaata

SEQ ID NO: 15957 - DNA, 450 bp, Arabidopsis thaliana
  unsure at all n locations
  Clone ID: LIB25-040-Q1-E1-E5
tctcgaagaaaaagaaaatgtgattatccattcgattttttcgcagaagaagacgaaagagagaagaagagaaagagatttgaaatcatggcgaatgtagtgggacagctaaaacgaggaatctcgagacaattctcaactggatcgcttcgtcgtacgcttagtcgtcaattcacgcgtcaagcttcacatgatcctcgccggaacaatatgcgatttagttttggtcgacaatcgtctttagatccgattcgtcggagtcctgatggttctaacggtccgcagcttgctgtaccggataatctcgacgctactatgcagcttctatttgtggcttgtagaggtgatgttgaaggtgttcaaggatctgcttgatgaangnattgatgttaatagtaaccattcttgatgggcctacggntccttcaataancgcctgcttgtgaaang

SEQ ID NO: 15958 - DNA, 434 bp, Arabidopsis thaliana
  unsure at all n locations
  Clone ID: LIB25-040-Q1-E1-E6
tcgccaaataaagtgaaaagagatggctgatggaggaaaggtggtctgcgtaaccggagcttccggttacatagcgtcttggatcgtcaagcttttgctcttccgtggctacaccatcaatgccaccgttcgagacccaaaagatcgaaagaaaacagatcaccttctagcacttgacggcgcaaaagaaagactcaaattattcaaagcagatcttctagatgaaggttcttttgagctcgcaattgatggatgcgagactgtcttccacactgcttcaccggttgcaatcactgtcaagactgatcctcaggttgagctgatcaatccagccgtcaatgggtactattaacgtcctaagaacttgcactaaagtgtcttctgtcaagaagggtcatcttaacatcgtccaagggccgcanttcttgcgcctg

SEQ ID NO: 15959 - DNA, 430 bp, Arabidopsis thaliana
  Clone ID: LIB25-040-Q1-E1-E7
ttaatcatctcatcttctggaaattcgaggtttttatagggttgtggtcttagcaatggaaggaatgttgtcgtccggtgaccaacagagattagtctcttctttccttgaaatcgccgtcggacagaccgccgaaactgctcgacagttcttacaggcgacaagctggaaacttgaggaagctattcagctcttttacattggaaatgaaggtggtatgcttcagtctggtacacacactcagccagcgtccaacgatgatgcggctgcacagtcttggggggcggctacaggcacaggtaatgaaatgatactgcccaacgatgtcgatgaagtccgtgctcctttacctgttgtgagggagactccttatggtgaatcaatgtattaaggggctatgaaggtgggtaactcccaacctgaaacaaat

SEQ ID NO: 15960 - DNA, 454 bp, Arabidopsis thaliana
  unsure at all n locations
  Clone ID: LIB25-040-Q1-E1-E9
ncantacttaactggtcttcttccccctgtgattttgagtcaggatgttcaggagaggaaggtgatgcacaatctccgtcagtacactgttcctctgcagcgttacatggccctgatggatcttcaggaaaggaacgagaggttgttctacaagcttttgattgataacgttgaggagttgcttccagttgtgtacacaccaacagttggtgaggcttgccagaagtatgggagcattttcaggaagccacagggtctctacatcagtttgaacgagaagggcaagatcttgaagttttgaanaactgggcccaaanaaggatccaaagttattggttggtactnatggggaanccggatccccgtncggggaaattttggntgncaagggaattggaaattccattggggaaannttccccttaaacgnctttgggaaggaacccttcaatca

SEQ ID NO: 15961 - DNA, 454 bp, Arabidopsis thaliana
  unsure at all n locations
  Clone ID: LIB25-040-Q1-E1-F1
tgcagctgaagtgccatggtatggtattgagcaagaatacactttactccagaaagatgtgaagtggcctgttggttggcctattggtggttatcccggccctcagggaccgtactattgcggtattggagcagacaaatcttttggcagagatgttgttgattctcactacaaggcctgcttatacgctgggatcaacattagtggcatcaatggagaagtcatgccgggtcagtgggagttccaggtcggtccagctgttggtatctcggctgctgatgaaatttgggtcgctcgttacattttggagangatnacagagattgctggtgtagtggtatcttttgaccccgaaaccgattccccngtgactgggaacggtgctggtgcctcacctgcaaactacagttacccaagtccatgaagggaaagaaggcggtttacnanattnatc

SEQ ID NO: 15962 - DNA, 73 bp, Arabidopsis thaliana
  unsure at all n locations
  Clone ID: LIB25-040-Q1-E1-F11
tgctctaggaacgtttcaaacnctcatctttcggtccnctgaggaagaaatcctctcgggtgtgnaacataac

SEQ ID NO: 15963 - DNA, 451 bp, Arabidopsis thaliana
  Clone ID: LIB25-040-Q1-E1-F4
ttatctctcttcagtctccacgctgcttgaaactgaagcagagaagcaaagagatgtcttttgaggagtttacgccgttaaacgagaagtctcttgtagactacatcaagtcaacacctgctctctcttccaagatcggagccgacaagtccgatgatgatttggttatcaaagaagttggagatggcaatctcaatttcgttttcatcgttgttggatcctctggttctcttgtcatcaaacaggctcttccatatattcgctgtatcggtgaatcatggccaatgacgaaagaaagagcttattttgaagcaacaactttgagaaagcatggaaatttatcacctgatcatgttcctgaagtctaccattttgacagaacaatggcgttgattggaatgagataccttgagcctcctcatatcattccccgcaaaaggactcattgctg

SEQ ID NO: 15964 - DNA, 470 bp, Arabidopsis thaliana
  unsure at all n locations
  Clone ID: LIB25-040-Q1-E1-F6
caaaatagagcagtggatcagagccaaagaggggcggctaatggaatagctatgactgcgatgtctctatttaagacagttggaccagctggtgctggcatcttattttcttggagtgagaggcgactaaacgctgcatttctaccaggatcgcatatggtattcttcgtcttgaatgtgatagtagtggtcggagtanctctgacattcaagccatttccaacgaccagtccaagatgaaattcatttgaattgggaaagataaggaatgtntggacaaagttgattcttttcatttcagataccaaacgaaaccggtaataaaaattcactaaccttaggatttcaagctcccttccaattaacttgtcccttttggtttgcctttgtccggaataattatccncccaaaaccngccttttcatnanannancnaaanaaaangggcggggcncgcncnnanaangat

SEQ ID NO: 15965 - DNA, 467 bp, Arabidopsis thaliana
  unsure at all n locations
  Clone ID: LIB25-040-Q1-E1-F7
ngtttttggttgcaatcgtctcatcacaatcacatcatcatcgtcttcgtcttcttcttcgtcggcacatactttgtcttctcatctcctccattattttgatcttatcgcancagatctctcatctccttcacttgttgactgtttataccacaggacaatggctgacaaagatgaagcagcgacgcgtggaaatgattgggaagttgtttctcttactgcttcagcttacgctgctgctcctggtcctaaaccagtagtggactcgaaagatgatgatcacaaggaagttactccttgttacgaagctgagacatctcatcccttanacatgtctcgccactttggttttcccaaccaactgggtcancttggagaaatactangtngaccttaanccgaaggnctaagcttanccgggggtctcnattgcaanggaatggaantgnatttgagtcctgaaaang

SEQ ID NO: 15966 - DNA, 505 bp, Arabidopsis thaliana
  unsure at all n locations
  Clone ID: LIB25-040-Q1-E1-F9
cnggtttttctggncgcccgnggtcnggaanaaacgggtcgacgcncgcgtccgngacttngtngttgaccggatcattctcacttcgccggccgacgttcttccttccgccgtcggtatctatatttacgatccacgatctctcttgctgtttctgtcttcatcgtgacgaaaatggntgctcgtatcgggatcttctccgtcttcgtagctgtattgttatctatttctgcattttcctcagctcaggatctccagatcgtaaatgccgagcgaaggattgatttaagctcacatatcgtgaaggccttcttgactctcaaggttgaaaatattgggaaagatcctgctgcagaaatgcttcttgctttcccacctacccagatnaagaatttggctatggtacaagccctggcnactactgggcaagaagaagaagaagacttanttgccattagatgttaaacnaactgaacaacctgaggcaccaantganactggatac

SEQ ID NO: 15967 - DNA, 447 bp, Arabidopsis thaliana
  unsure at all n locations
  Clone ID: LIB25-040-Q1-E1-G1
tgtgagagtttgtttcgcgaacattctctgagtttctctcgacgcgacggcgattgcgaatgtcttctccttctgattctcgtctctctgtgtctccgggataagtaatcgaagatgaatatgattcagcgattcatgcaatctatggcaaagacgcgtggcctctgtcatccagattgcgtaaaagcaagtagtgagcaagaagattacgatgcgtctcagctcagtatttggtggataatgctgggaaggaagacgaccagggagaaatggatgaaccaagctctcagttcactatcgaaaacttgcatcagtatatggtggaaaatgtctggaataagangtaagatgtgcagggagaaggagcaaccactcactgtcaaaagactgccttgaatgtgccttcaagaaaaggctaccganaagagaacattgggcacatgttgg

SEQ ID NO: 15968 - DNA, 107 bp, Arabidopsis thaliana
  unsure at all n locations
  Clone ID: LIB25-040-Q1-E1-G10
cggcgttganactgatttctccaatgatgttactcanccttctcaacttcaanatttccaccggcggttttgactactgttctcactcctcnggtgtgatccttcgt

SEQ ID NO: 15969 - DNA, 502 bp, Arabidopsis thaliana
  unsure at all n locations
  Clone ID: LIB25-040-Q1-E1-G11
gtttttctgnccccncggtccganaaaacgggtngacccncgcgtccgggaagaactcttaggctcaaagaattgggacactatcttanacccattagaccaatcacttagggaactcatcttacgttgtggcgacttttgtcaagccacctacgatgccttcgtcaacgaccaanactccaagtactgtggagccagccgctacggcaaatcttctttcttcgacaaggtcatgctcgaaaacgcttccgactacgaggttgtaaacttcctctacgccacagctcgtgtttctctccccgaaggtttgcttctccaatcacantcaanagattcttgggaccgtgagtctaactggtttggctacattgctgtcacgtctgatgaacggtctaaggctttaggacgccgtgagatctatanagctttgagaggaacgancangnactatgagtgggtcaatgtttttgggtgctanggccaanttnanctgaacccntgg

SEQ ID NO: 15970 - DNA, 458 bp, Arabidopsis thaliana
  unsure at all n locations
  Clone ID: LIB25-040-Q1-E1-G12
ntattttttgtacacttagactaaggaaagcaaagtttcatattcctaaaaattctggttttataagtatcaaagacaaattcagtctccatggaaatagagcaaagaaggatcatgaagagagaaggagaagaagaagaagacaacaatcaactttcactgcaagaagaagaaccagatacagaggaagagatgtctgggaggacaatcgaaccgtggacgaagcagataacggtgagaggagtgttcgtgagcatagtgatcggagttgtgttcagtgtgattgctcaagaagctaaatctcacgacaggaattgttccaaatctcaacagctctgcagctttacttgcttttgtctttgtccagacttggactaagattctcaagaaatcaggatttgttgcgaaaccattcacaaagacaagaagacacaatgattcagacatctggctgttgg

SEQ ID NO: 15971 - DNA, 449 bp, Arabidopsis thaliana
  Clone ID: LIB25-040-Q1-E1-G3
actttggtcatttcagggttgtcgtttctctctcttgttcttgagattttgaagagagagagatatgggaagaggtagggttcagctgaagaggatagagaacaagatcaataggcaagttactttctcaaagagaaggtctggtttgctcaagaaagctcatgagatctctgttctctgcgatgctgaggttgctctcatcgtcttctcttccaaaggcaaactcttcgaatattccaccgactcttgcatggagaggatacttgaacgctatgatcgctatttatattcagacaaacaacttgttggccgagacgtttcacaaagtgaaaattgggttctagaacatgctaagctcaaggcaagagttgaggtacttgagaagaacaaaaggaattttatgggggaagatctgattcgttgaccttgaaggagctccaaagcctggg

SEQ ID NO: 15972 - DNA, 456 bp, Arabidopsis thaliana
  unsure at all n locations
  Clone ID: LIB25-040-Q1-E1-E2
gcccacgcgtccgatttgcatctgagaagtcttggtgggagtctctatcgtcgtcgtatccaaagctcttcaatggagaccgatctcaagtcaacctttctcaacgtttattctgttctcaagtctgaccttcttcatgacccttccttcgaattcaccaatgaatctcgtctctgggttgatcggatgctggactacaatgtacgtggagggaaactcaatcggggtctctctgttgttgacagtttcaaacttttgaagcaaggcaatgatttgactgagcaagaggttttcctctcttgtgctctcggttggtgcattgaatggctccaagcttatttccttgtgcttgatgatattatggataactctgtcactcgccgtggtcaancttgctgggtcaagagttcctcaagttggtaanggttgccatcaaatgatgggaattctacntcg

SEQ ID NO: 15973 - DNA, 455 bp, Arabidopsis thaliana
  unsure at all n locations
  Clone ID: LIB25-040-Q1-E1-C2
ttcttcttcgtttcaagccctaaattgtgtatcttctttgttgcaatcttctctacgaagagaatggtgaagagggtcaagaattgagagactccaaagtgaagtctaatcggcacacaaacttgaagcctttccgagcggtcttgcaatctccgtcgtgttaattaaaggaagggttttgcgttttctttcctgattcggtcgcttctatggacatggagagatactgaacctaccagtttaaattgtgggaacaacatggttgtcaaaacttatccattaggaatggttgggactaacaatgggcattgctgaaaacgaaggagattctggtcctgaaccttaagttggattanagtttgatactgctgaaggaagcaagggactactacaactccttaagcctacgccggacgggntttaaaggttaggacnggtcaattggtataaatcta

SEQ ID NO: 15974 - DNA, 456 bp, Arabidopsis thaliana
  Clone ID: LIB25-040-Q1-E1-C4
aaagaaaatcaaagaagatagttttgtgattgttttctataaaaagtgcagatattttctttgtcctagagaaagaggtgataggaaaaatgggtctccaagagcttgacccgttagcccaattgagcttaccgccgggttttcggttttatccgactgacgaagagctgatggttgaatatctctgtagaaaagccgccggtcacgacttctctctccagctcatagctgaaatcgatctctacaagtttgatccatgggttttaccaagtaaggcgttattcggtgaaaaagaatggtattttttcagcccgagggataggaagtatccaaacgggtcaagacctaatcgggttgccgggtccgggttattggaaaaccaccgggtacggataaagttatctcgacggaggggaaagaagagttgggatcaaagaaagccttgggtgttttaca

SEQ ID NO: 15975 - DNA, 443 bp, Arabidopsis thaliana
  unsure at all n locations
  Clone ID: LIB25-040-Q1-E1-C5
cttcttcttttgagtattacatccaacgaaacgtctctttctttctctctgataggcaacaatggcgcagaggaagatgattgtgtttcccaccaagaatgaattgtccgaagcaatggctgagtacactgccaatctctccgccaagttcatcaaagagaaaggccttttcaccgttgttctctccggcggtgacctaatcgattggctctgcaagttggtgcaacctccttatattgattcaatcgaatggccaaaatggcacgtcttttgggtcgatgagagggtttgtgcatgggaagatccagacagtaactacaaactcgccatggagggttttctctcctaagggtccgattccgggataagaacatctacgcaatcgacaaacacttggcggctgattggtaacnccnaacaatggggcnagctctacaaggagt

SEQ ID NO: 15976 - DNA, 426 bp, Arabidopsis thaliana
  Clone ID: LIB25-040-Q1-E1-C6
taaggcctctcacggatctctcttaagatcaatcgccgcggctcatgacgcagtcgcctgttcaaccgcctccgccgctcccagctcagccgcattccgccgccggaggtgtaataagaggcgatgtacaggttaggtgcgcaggctgtcgcgtgattctgagggtgaaaaccggcgttgtggagttctcgtgtccgacttgtcaacttccccaaatgttgccgccggagcttctttctagggcacggccgcagtttccgcagtctccacaacaaccaccacagccaattcagacgcttccgccaccgattcaacagcaagcttaagcctcttaatctacctaggcctccggttccggcacatggaatcgatccgacgaagatgcaattgccttgcgctaactgttaaggctatcctcaatgtgcc

SEQ ID NO: 15977 - DNA, 449 bp, Arabidopsis thaliana
  unsure at all n locations
  Clone ID: LIB25-040-Q1-E1-C8
ccaaattcacaccattctttattttcatttttccccctttgcccagattccgacaaaatccactcgtttgattccaccactatatataattgagcggagaagcttgacatgaagagcagagtcattcttaaccatagagacagaagagataagaatcataacaacaacaacaccaatcattacacacaggttgatactatggagagaaagcctcttgaggttgagccatctactacgacgactaacaccgatgtggtcgattctttcgaggaagagcagagaaaaatcgtttatagaggatggaaagtcatgccttttatcattggtaatgagacatttgagaagcttgggatcataggggacattatcaaaccttcttgtgtacctaacttctgtattcaacnttaagagctacacagctgcaactatcatcaatgccttagtggtag

SEQ ID NO: 15978 - DNA, 447 bp, Arabidopsis thaliana
  unsure at all n locations
  Clone ID: LIB25-040-Q1-E1-D1
cttcttcctcgatcccacccagcttctacttcgttttccaattctgggtttcgattcttccaatctaaccatctcttctcttcacagtctggttcactcatggaagtgtttaaagcagctttttcagaagcgtctaattcttgtgataggattgcgattaaagccgatggaaagagttactcttatggccagctaacatcgtctgctttgaggatatctaaattgttcttaaaagatgatacgacaaatggaggtcaagaaactaagaagtatgaagggtttggtagtctaaaaggagctagaatcgggattgtggcaaaaccttcagctgaagttgttgcangagtcctgggggacatggttttagcggtggtgtanccggntccaacttgnnactcangctatnctgaaggctgaantccttanaggtcatgaaaggnttccggg

SEQ ID NO: 15979 - DNA, 513 bp, Arabidopsis thaliana
  unsure at all n locations
  Clone ID: LIB25-040-Q1-E1-D10
gggnntgnacgttttcggccccnggtccggaaaancgggtngacgcncgcgtccgcccacangtccgctttagtgannaaacaacaaacnnnagaangatntcaacttttttcaagccaaatcttcaaatctgggaggaacganacagtaagagattgaaatcaaacatggaagaagatgaatcaacannaccgangaagaagtcagattctcagctgaatcttcnaccgtcgatgaatcgtccgacggtgtcactcgagtcacgaatcaaccgtttaatcgattcgaatcattatcactctccttcgaaacctatttactcagataggtttattccaagtagatctggttccaatttcgcgcttttcgatttggcatcttcttcgccgaataagaaagatgggaaagaagatggggctggttcttatgcgagtctttgaaaacggggctttttgggccggtgacgccggagaaaagtgatgttgttaaaggggttttctccgtccngggaaa

SEQ ID NO: 15980 - DNA, 422 bp, Arabidopsis thaliana
  unsure at all n locations
  Clone ID: LIB25-040-Q1-E1-D2
aagaattggctgatgaaattgagagtgagtgcgctgaaaagtcgtgggaaggaatcttgaggaggatatggcctaaggctaaatatgttgaggtgattgtgactggttcgatggctcaatacattccgacactagagttttatagcggaggtttaccgttggtttcaacgatgtatgcttcctctgagtgttactttggtatcaaccttaatccgttgtgtgatcctgccgatgtttcctanacgcttcntcctaacatggcttacttcgagttcttgcccgtcnacgacaaatcccacgaaagagattcactttgcaaactcactcnaacaccgatggatgatgatngatgctctcaangaagattcatcgttaatccntgttaanggtcgaantcggtcaatacnncgaaaatcnncaag

SEQ ID NO: 15981 - DNA, 464 bp, Arabidopsis thaliana
  unsure at all n locations
  Clone ID: LIB25-040-Q1-E1-D3
cttctcactctgttttcgtttagagagattttgcagagatgtcgagacgagcaatggtgataaagatgccaatacttatgatactgatttcatcaatggtgatgacgatggtcgagtcttcgagatcagttaataatggtcatgacgattctgagatcttacgaagacacttgctcactaatggcctcggagtcactcctcccatggggtggaatagctggaaccattttagctgcaacatagatgaaaaaatgatcaaagaaactgctgatgctttggttaccactggcctctctaagcttggctacaactatgttaacatcgatgatttgctggggctgaaatttccccgtgacaagcaaaggggaaagtctggtgncaaangaaatcaaacttttcccttctgggaanttaaagcgggttgccggattangttcaaaagtaaaaggccttaaaccttggga

SEQ ID NO: 15982 - DNA, 448 bp, Arabidopsis thaliana
  unsure at all n locations
  Clone ID: LIB25-040-Q1-E1-D4
naggcttaccaagccacagccggttcatccacattatgagcttgtgaatcagtacaagtctgcactggctgagctcactttcaactcgaagccgataataacgaaccttacaataattgctggagagaatgttcatgctgctaaagccgtcgtaaccgccatttgcaacaacatcctcgaggtaccaagtgatcagaagctgccaacactgtacctgttagacagcattgtgaagaacatcggaagggattacattaagtactttggtgccaggctgcctgaggtttttgttaaggcttacaggcaagttgaccctcctatgcattctaacatgcggcatctttttggaacctggaaaggagtccttcatccgcaaacacttcagcttantgagaaagaacttggctttaatgctaaaagtgatggtcagcagctgttgtatccacag

SEQ ID NO: 15983 - DNA, 488 bp, Arabidopsis thaliana
  unsure at all n locations
  Clone ID: LIB25-040-Q1-E1-D7
aaattctacaccaaaagcttaaccagatttttcccaagaaaaaacccatccatgaaaccatcatcagcttcaagattttctttaactttctcacactttctcacactctactgtcttctcacacaaacacatgtagctcaaggatctcatcaatggcaatcaccaatcaaaaccgtcgtcgttttagtgttggagaatcgatctttcgatcatctcttaggatggatgaagaactcagtaaacccgacaataaacggtgtaacgggtcaagaatgtaacccggttccgaattctacacaaactatatgtttcactaagtgatgcctgagtttgtgggattccgggattccgggtcaatccgttttgaaagcctggttggaagcaaacaaagttantccggggtcctgggggcccggggtcaagattcccggttccaatggaaggggggtttncgtttgaancnaagcngcctttccnaaggccngggg

SEQ ID NO: 15984 - DNA, 449 bp, Arabidopsis thaliana
  unsure at all n locations
  Clone ID: LIB25-040-Q1-E1-D8
accagatcgtgctttaaacttcgccggaatcttagtcttctggacttggttcccactcttagtctcatgtctaccaaactggcctgagagattcttcttcgtcttcacaagcttcaccgtcacggcgcttcaacacattcaattcacgcttaaccatttcgctgctgatgtctacgttggtccacccaccggtagcgactggttcgagaagcaagcggcgggaacaatcgatatctcttgtagatcatacatggattggttctttggtggattacagtttcagcttgagcatcatttgttccctcgcttacctcgttgccatctccggaaaagtttctccgggggttcaagagcnttgcaagaagcataatcttccgtataangagtatgtcgtgggttgaaggcaaatgtgttgaacaattaacacttttgaaagacagcagctttat

SEQ ID NO: 15985 - DNA, 90 bp, Arabidopsis thaliana
  unsure at all n locations
  Clone ID: LIB25-040-Q1-E1-D9
gctcagagactcnactcgctatcttcgctcttccgaggggtctactcngtgtcggactcgagtgggcagtcntcctgtgtcagttnatgc

SEQ ID NO: 15986 - DNA, 508 bp, Arabidopsis thaliana
  unsure at all n locations
  Clone ID: LIB25-040-Q1-E1-E11
ntggttttctggncnccgcggtccggananaaangggtngacgcncgcgtccgcanactttcataaagctcataacatacataaaaaatgggtgaatcttttagattattcaatcatcatcacttcctcacaacttttctcataatcatagccatgctcaaattggttcatacaacaacaacaacaactacaacaacaacaacanacaccgagttcgtaaaatcatcatgcactttcanaacgtacccaagactctgtttctcttcactctcaactcatgctagtcncatccaaacaagccccaagctcatggctcatgcggntctcaacatcacattagcctcggctaaagtaacttcagcaatgatggtgcgtctctcgaatagtcggctcaagcctaaagaagtctcggncatgagagactgcgtcgaggagttaggtgacacnttggangagttaagaaatcgattgggtgagatgtgtcagccaagttgntcgnactaagang

SEQ ID NO: 15987 - DNA, 452 bp, Arabidopsis thaliana
  unsure at all n locations
  Clone ID: LIB25-040-Q1-E1-C1
ttgagagtaaaagacccatcactccatgaagaggatcttcttcggtattgtttctcatctgcatatattgtgtcattgcttcacgatacccttggcattcctcttgatgatgaaagaatcggatatgcgaatcaagcaggagacataccgctcgattgggctttaggtgcattcattcaacagactgcaacagagacctctcaacatgcagcctctggtaatctccattggttccatgctcttttcagtaatcacccgaagacgcttcactatctcatcgggataccgatccttatgacagttttggtatatttggtaactaagtggagaaaaccgcagctgaaaacnattttacgaaccttgagaaagggtcggtacatattgactccgaattagatgantcttggtttanaaaccggnttttccgcaaaagcttcccngcctcccctant

SEQ ID NO: 15988 - DNA, 441 bp, Arabidopsis thaliana
  Clone ID: LIB25-039-Q1-E1-G7
ttagaatcaaagaaaccgcttcaaggatggtgagtgaaggagcaacaagaaaagaacttaacctctgtttcgagaatatgaagatggaaggagttttgatctctgagtggaaagatatccctgtggagcttctcatgaagattttaaaccttgttgatgatcggactgtgatcattgcttcttgtatttgtagtggctggagagatgctgtttcccttggcctcactcgcctctccctctcttggtgcaagaagaatatgaacagtttggttctatctcttgctcccaaattcgtaaagcttcagactttagtactgcgacaggacaaaccgcagcttgaggacaacgcggtggaagccatagcaaatcactgtcatgagctacaagatttggacttaagcaaaagctcgaaaatcactgaccattccctatattcacttg

SEQ ID NO: 15989 - DNA, 434 bp, Arabidopsis thaliana
  unsure at all n locations
  Clone ID: LIB25-039-Q1-E1-G9
ctctctctcttcatcgcacgctgtgcccagccagctcaaaacactgcacttccgctttttatcaagatcaatctctaccaatacttagaaaagttctttccttttngncaaattctttcaatttctctcttcaattccctacgaattactcacttcggatccaatcagctctttatagcctctgcgtttgggagtcaatctttctctcttcgacaattaagggtttcgtataaagattgctgttttacgacaggattctgaataaggagaagaagggttggtttcatttggatggaaagtatatggtaggtctacacattaatatggaagcgcagattcatatacttgagcangaagcttaatctgctgtattaagagctttcaagcacaggctgatgaattttcntgggaataaagcaaccgtnaagacaaac

SEQ ID NO: 15990 - DNA, 459 bp, Arabidopsis thaliana
  Clone ID: LIB25-039-Q1-E1-H1
gaaaaatcttaatttataaaaagtagtcaactttacacttgaccccttggtgtgatagaagaatcataaagaaagggtccaaagaaatacaatcactttcttaactctactgttacaacatttaaaagagcatatctttcttcttcttcgtcattatcttcattttcttcttcttcttctttcttgtaaatttcagacctcgttggagagttttggacagcaagcctcgacggcatcagccaccgttagatagatattgtcttgtcctaacatgtcggcaaagtgcgacaagtgtagcttgcctatcaccaacggtccaggattcgccagaatcaactgtttatcatcacaaaacacagagtcaggtaaatcttcttcaactaattcactttgagtgcttagattataatccttaaagaattcagtatgtgtgtatatatgtatgtacctgaatgtcct

SEQ ID NO: 15991 - DNA, 262 bp, Arabidopsis thaliana
  unsure at all n locations
  Clone ID: LIB25-039-Q1-E1-H10
attantgattgaatcttcgagttaccaacaaaanaaaaactctcctttatttcagtcttcttttacaaatcataatcttctctttgattccatcttgtgaaccaggggnatangaaaatatgacaattgctttaacgatcggaggaaacgggttttcgggtctaccaggatcgtcgttttcttcatcatcttcgtcgtttcgattananaacngcagatgaaagantcnnaagatgctcatcangatcaagcagtcgtntgt

SEQ ID NO: 15992 - DNA, 513 bp, Arabidopsis thaliana
  unsure at all n locations
  Clone ID: LIB25-039-Q1-E1-H3
antggtntcctggnccacggtttgganagccgggtcgnccacacgtccgccaaancacaacaaagacccacaaaattcntttttttttccttttcaaatcccattaataaaaaccttaccaacccatgaagtaaagtaaactcctttcttataaactctcttttgttctttttttttcaacttcatcagtctcttaactcaccatcacaagaacaagaaagatgaagagaggatacggagaaacatgggatccgccaccaaaaccactaccagcttctcgttccggagaaggtccttcaatggcggataagaagaaggctgatgatgacaacaacaacagcaacatggatgatgagcttcttgctgttcttggctacaaggttcgatcttctgagatggctgaagtagcacagaagcttgaacaacttgagatggtcttgtctaatgatgatgttggttctactgtcttaaacgactctgttcattataacccatctgatctctccaactggg

SEQ ID NO: 15993 - DNA, 430 bp, Arabidopsis thaliana
  Clone ID: LIB25-039-Q1-E1-H7
tgcctttaacacttcagtctacatcgatccctgagtccgccggccggtacggggacattgccgggaatgagtcacaggtgacgagagggttatcggaaggagggcgaaaccattctacccgaggaatctactacggctgcggtggtggcttgtttttgagggatccgccgggttaatgaatggtttcacgacgttgacaaacaccaagaaacacgcctatggtcaagccttcaatgacgagccattccctttcaagaattcggtcaacggtaacatgacttcgttttcatttaccttcttctttgctatcgtccctgagcatatagacaaaggttctcacggtatagcctttgtgatctctcccacgagaggcattcctggtgcatccgctgatcagtaccttggtatcttcaacgatacaaatgatgga

SEQ ID NO: 15994 - DNA, 333 bp, Arabidopsis thaliana
  unsure at all n locations
  Clone ID: LIB25-039-Q1-E1-H9
cggtaccggncttaaattcncgggccgacncacgcgtncnntttactctctctctctctcacattttctcattctctcntacaacaagtttccgccgctaagccactcactacgcanccatggcaaatcctgaccatgtttcanatgtgggagataatttgtcgattgatccaataaccaaggctttagctcctgattctgaaacaaagttgcagggggcttatggcggaaacggtaatganttcttgctcaatgatganttantggaggctaccaaaattggtaaacctagtcttttgtctaaagatggangtgtgactaaananaagggat

SEQ ID NO: 15995 - DNA, 436 bp, Arabidopsis thaliana
  unsure at all n locations
  Clone ID: LIB25-040-Q1-E1-A2
tttcttcgtctcccaccatttctgcagaagaagacaaataaaaaagctctcatttatcttcgtggagatctaaaagaaggaggaagacatttcttccctctggatctccaaaagtaagaacatttacaagaaacgagaggtttgggtggggaaggaaagaaggaggaagaggcaatgtcagctaggtattggtgtcacatgtgttcacaaatggtgaatccagttattggtgccgagatcaaatgccccttttgccaaagcgggtttgtcgaggaaatgagccgtgagattaatggcggcagcagtagcagtctaagggaggttcaagaccctgagattgattttggtacagaccgtgcattgtcctctatggggtcaatccttgcttgggaatgatgagtaanccccgtagacgtanaaggtttaggaggacaaa

SEQ ID NO: 15996 - DNA, 463 bp, Arabidopsis thaliana
  unsure at all n locations
  Clone ID: LIB25-040-Q1-E1-A3
aaatttacagtatttgaaaaaatacaaaatggcgaaaatctaccggaagttgacaggctacggtggtgaaggagggcgtgaatgggacgatgatgtatatgagggtgtaagaaaagtgtatgtaggacaagatatcaatcgtatcacttacgtcaaattcgagtatgtgaaggaagacggccaagtcgtaacaactgaatatgggaaaatcattcaacaacccaaagagtttgtacttcaatatccggacgaacatatcatagcggtggaaggaaactatcgcggagtggctctatgtgccacagaggtgatcacaaacctcgtcttcaanacctcaaangggtaaaaagtcaccactggttttggtccaaaacttgccttgggaattacgaaccggtacanagttcgtttantgaaggattgganggaaagaanatccttagggtttcaagggacggnccgg

SEQ ID NO: 15997 - DNA, 460 bp, Arabidopsis thaliana
  unsure at all n locations
  Clone ID: LIB25-040-Q1-E1-A5
ttcctgcatcgatggtttccgagttgttatgggcttgggaatctcttaaggtagcaacatgttgtaagtctctagttattgtctacaatggaatttgccttattcaaattgggatggtagctgaatctccagaagataagaaaacagtcatagtaaagaccgataagttgatgcaaggatcggtttacagaggggttatgaaatccaaagcacagagttacttggctaatctttctctttatcctgggagatcagagctgccatttctacctgcaaatacacaggcggtgattttgcagccgcttggagataaaggaatcgcagtcattggtgggaaatacgattagaggattcacgtcttcagaccaagcttgggatttcttcaattgggggaaaaactanatgcgacactggggaagaatatttggttgatcccngataagatttccagatacagttt

SEQ ID NO: 15998 - DNA, 419 bp, Arabidopsis thaliana
  unsure at all n locations
  Clone ID: LIB25-040-Q1-E1-A6
ctgtgagagagaagaatggcgtcgtcatcatcgagaggagagatggagaagatgggaatcgatcagctaaaagctttgaaggagcaagcagatctggaagtgaatcttcttcaagatagtctcaacaacatccgtacagctaccgttcgtctcgatgccgccgccgcagctctcaacgatctctctcttcgacctcaaggtaagaagatgcttgtaccactgactgcttctctatacgtgcctgggacacttgatgaagctgataaggttttagttgatattggcactgggttacttcattgaganaacaatggatgatggaaaagattattgtcaagnggaagatcaactttgctcaaatncaaacttttgattnaactttttganggtcncaacgaaaaangnaaaggngtgggcag

SEQ ID NO: 15999 - DNA, 450 bp, Arabidopsis thaliana
  unsure at all n locations
  Clone ID: LIB25-040-Q1-E1-A7
caaacttcaaacacttgagaaaaaagcttttgatttcacatcttaatctaacaagtcaaacacttttcaaaccacaaaattcgtcaaagctctgaaacaaataaacattttttaatttctccctttttaatggaaatctcttctttcccatttccatacctacaagacgacgagtgttcccatttccttggtctatttcaagacatggactcttctccttctactttcggattagaaggttttaatagcaacgacaataatactaatcaaaagaaacgcccaagaaaagacgacgaaggcggtggtggtggcggcggaggaacagaagttctangagctgttaatggnaataataaggntgcctttgggagatatactcgncaacgcttctggtggtanacgaaggaagctaacaagnaacaagnacagttgggaattttgaattaatag

SEQ ID NO: 16000 - DNA, 388 bp, Arabidopsis thaliana
  unsure at all n locations
  Clone ID: LIB25-040-Q1-E1-A8
gggttttgagcaaaaaggagtgatgagagctaagtggaagaagaagcgtatgaggagattgaagaggaagagacgaaagatgagacagcgatctangtagaccaaatctactccacaagtctttcgcttttcccctctgcattttgtgtttcatttgcttcagtttgttcccagaatttgtcttagtttccagatattgctgttgttggattaatggattttcagtttgatcttcctttgtctattaatttacgatttaatatttgtctcnaagcttatattatctcatcgtagctactagttgatcttaacgcttttgtacaantagtgatccgagagcgatcanttntgaatatcatcatttggtttgcanaaaacnnaaataaaa

SEQ ID NO: 16001 - DNA, 71 bp, Arabidopsis thaliana
  unsure at all n locations
  Clone ID: LIB25-040-Q1-E1-B11
gaagacagggaanaatggaagtgctaagtgantcacgagacggtgagaagaatcccgaagancaaccacaa

SEQ ID NO: 16002 - DNA, 52 bp, Arabidopsis thaliana
  unsure at all n locations
  Clone ID: LIB25-040-Q1-E1-B4
naatcaagcctttactcaaaccctttgggaacncccgatgattggggccaac

SEQ ID NO: 16003 - DNA, 450 bp, Arabidopsis thaliana
  Clone ID: LIB25-040-Q1-E1-B8
tgagtttcttcttctcttggaggaaaatcgagaaagacgaaacatggcttcttcttctacttctctgaaaagaagagagcaaccaatttcgcgagatggagatcaacttatcgttactccgttaggagccggaagtgaagtgggtcgttcctgtgtttacatgtccttccgaggcaaaaatattctgtttgattgtgggattcatcctgcgtactcgggcatggctgcgttgccttacttcgatgagattgatccttcttccattgatgtcctcttgattactcactttcatatagatcatgcagcatctctaccttattttctggagaagacgacattcaatgggcgggttttcatgacacatgcaacaaagggcatctacaagctgttgcctacagattaatgttaaaagtgagcaaaagttgtccggtggaagatatgttgtccatg

SEQ ID NO: 16004 - DNA, 513 bp, Arabidopsis thaliana
  unsure at all n locations
  Clone ID: LIB25-039-Q1-E1-G6
aantggtttgcctgngcctaccggtttggaaatnccgggtcgacccanacgtccgaaaacatgttgccataactcaacgaaccatcaaagacatcaagagacggtctctttctctctctgtctctagtctctactctcgaacgggctaagctcagatcattacaagattcgcttttgtgctgaacttggtcccattcattagttatttgcttaaagacaacatttttatatgcttccgttagctaaatccatcactccccccttcaatcatttccctgctctgctggccccagaaacagcttgctaggattcactacgacgtcgtttcgggttcgtctccagctgtggataatggctattctctgaaattgattctattcactattttgttactggggattttctcaagcaaaccaaancaggatttattttttctggggatttctgagattggaagaaaatgttcagcttttcaaagangcgcatgagacttggcagagttaagaaggnaca

SEQ ID NO: 16005 - DNA, 446 bp, Arabidopsis thaliana
  unsure at all n locations
  Clone ID: LIB25-038-Q1-E1-F11
caaagcctatggcgaggtttccgacttctccggcgcctaaccgcctcttgaggctcttctcttccaacaaacggtcgtcatctcctactgccgcgcttttaaccggagattttcagctgattcgtcatttctccgccggaaccgctgctcgtgttgccaaggatgagaaggaaccatggtggaaagaatccatggacaagcttcgcaacatcgggatctcagctcatatagactctggaaagactacgttgactgaacgtgttctcttctataccggtcggatccatgagatccacgaagtcagaggtagagatggcgtcggcgctaaaatggattccatggacttanaacgagagaaaggtatcaccatccaatcagccgctanctantgtacttggaaggattacaaggttaattaattgatactcctggtcatgttgactngg

SEQ ID NO: 16006 - DNA, 455 bp, Arabidopsis thaliana
  unsure at all n locations
  Clone ID: LIB25-038-Q1-E1-F12
gcccacgcgtccgcttgagaatggtgaagacggtctactatttgttggcgaatcagtagactctgatattctgcagaaactttttgctgtttcttcagctgctgaaattcctaaccagtttgtgctgcagcagtatgataatcagttatcaaagaaattcaatgatgcggtgaatgaaataaggaggcaaagatgttcttacctaagaataaaattgtgcaagaagggagaaccatcaggaatgttgtttctctcgtatatggtagaggacaggacagcaagcggcccgtcgtatgtggagtttctcgtgcaagtccatcgccaaatccagctaaaaatgaactgatcctctgttttctaggagtccttacagaagtttcctcccatctgcatctgtgtcatgttcggaatttgcggtagaaaagcatancagaaggggaaagggcatcggtctt

SEQ ID NO: 16007 - DNA, 481 bp, Arabidopsis thaliana
  unsure at all n locations
  Clone ID: LIB25-038-Q1-E1-F3
gatagagaatgtcctctggctccgcggtccggacttaacgggtcgnnccccgcgtccgctcaaaaatctggtttccagttcggaagcaccaatgttcctcctggtcaattcaactttatttgaaaggtaaaatagttgaattgggtcatagaagttgcttggacttttaagtaagccacatatcgaacgaaagtggtaacatcacaaagatgaaatatcaatcttctctatctcttcatgcccactccttaactcgtggacatgaactatgaagaaacatagtacgattttcttttctttttggaagtttgtctcaataactaaatcatttggggaagagaaacaattattctgtgttagccatcatctcgtctttcaacaaaagttcccttttttcaaaggaacananngtnnnngggggtngnnaananggaanaancgggggggccnnccncaagagggnttccnangctacnttccc

SEQ ID NO: 16008 - DNA, 250 bp, Arabidopsis thaliana
  unsure at all n locations
  Clone ID: LIB25-038-Q1-E1-F4
cggnaaatanttatattcctctttctgcttgctatacctttgatacaacaggtatagcaatggctgtaaagtcttcctcgctgtattcnacnnttattatggatggaggaaccatggacatgtgttggggccatagaacttcgcagcatctggcggtttcaacatttccgtcatggaattgtcgaccgaaatttccaatggttanngagatacactcncaggaatattcgtttcggtttgtntnntgtca

SEQ ID NO: 16009 - DNA, 447 bp, Arabidopsis thaliana
  Clone ID: LIB25-038-Q1-E1-F5
ggttttgccttggcctcgatgatggtttctggaaattgataagacttacttcttcagctgcaaaagacttctttttaccgaaacaagtcagtgacaattatataagttatgtcaaatggaagtttttgcacagagttttcagctctgctttacaagttcttgccactcaggcaatgtttagagcaataggaattggacaatctcggtcactagcttcatctgctgcttttaactggattttgaaagatggacttggaaggttaagtagatgtatatacactgctagtcttgcttctgcttttgacactaatttgaagagagttaggttctcgacgtctgtactcttcagtctaaagcattggagttgagttaatgactccagtattccctcagtactccttttgctaacttccaacgctaacatcgctaaacaaaataacctgtccg

SEQ ID NO: 16010 - DNA, 371 bp, Arabidopsis thaliana
  unsure at all n locations
  Clone ID: LIB25-038-Q1-E1-F8
actaaaaatcatacctttttttttactcctcattccccaatttagggtcggtctgtgtgattttggatttcatgagattttgatagtcgaccacccgtcgatctttggcggcactcgatctatggttcactgtaacttttgaattttgagactaatcttcgtagcctggtcgatccattttcacgaactgaagaatcagatagattgcttctgagcctcccgtcatgtattctctgatacccatggaaaaaggntgggccaattgaagaaatgtnctccattaaagcnttccaattaaactnctccaaaaaggnaccnccttttccnaaattcctncncnaanccaaaggcnacagatgcnacccttaaaa

SEQ ID NO: 16011 - DNA, 288 bp, Arabidopsis thaliana
  unsure at all n locations
  Clone ID: LIB25-038-Q1-E1-G2
gtgatcaaacgcatacatacataactccgtcatcttcgtctttactccaaaattccagacatttgaagcttttaagcatctgggtatttgatcttctatccacagatcatagaaacccaagaggcaaatgtctatttccctaaaaatttcccacatttcaagtttctccaacgatgggttcaatagtgtaaagcaatgcagagtgagtnnaangnttgaaattanatnggnttgnttccgttaaancccnggtgntnaatccaaaanggttcaattnaantncggact

SEQ ID NO: 16012 - DNA, 348 bp, Arabidopsis thaliana
  unsure at all n locations
  Clone ID: LIB25-038-Q1-E1-G3
gnntgngaanggtcctctggcnncacggtccggaccnacccgggtcganccncgcgtccgcggaaaacgtgggtcgaggcatcggacgttgatgaatgtgtttgataaatcaccattggtggataaagatgtgtttgtggctccgagtgcttctgttattggtgatgttcagatcggaaaaggctcgtcgatttggtatggctgtgttcttcgaggtgatgtgaataacatcagtgttggatctgggacgaaatatccaagataatacgccttgtacatgttgcaaagaccaacataagttggcanggtncaaccnacnctnatggggaacaangtaanattaggnca

SEQ ID NO: 16013 - DNA, 464 bp, Arabidopsis thaliana
  unsure at all n locations
  Clone ID: LIB25-038-Q1-E1-G5
attcacaacaaaaccaaaaaaaaaaaaagagaagaagaattagcttacgtgttcatcacatctgcattacgcgcaaacgaaacagattcaaattctccggcgaagttttcttattcatcaatcaatctctggattcatcaatcatgccagagatcgagattgccgccggcagcggcgacaacaacgacgcctttattcggtaaatatgagctcggaaagcttctcggatgcggcgcattcgccaaagtcttccacgcacgtgatcgtcgtaccggccaaagcgtcgccgtgaaaatcctcaacaagaaaaaactcctcacaaatccagctctagccaacaacatcaaacgcgagatctcaatcatggagaagattatctcatccaaacatcgtcaaagctccacgaagttatnggngaacaaatccaagntnttcctcngaatgggatttgttaanggaggaaa

SEQ ID NO: 16014 - DNA, 469 bp, Arabidopsis thaliana
  unsure at all n locations
  Clone ID: LIB25-038-Q1-E1-G6
tctctctctctctctatcatcatcatcgcagaggagacgatcttacgcgacgaatccttgagagattgagagggacaagcgagttttgacccaaggattgttgacggtctatattgaacaagtaaacaaggatgcgtaagtggatctgttgtacatgtcaaatagaagactcaaatgaagagcaacaactgaaaagttcacagcagcaatctgatgcaaatcataagaattcaaaaccagcacctgttgcaaaacatgaggttaagaaggaagctcttcccatcgaggtccctcccttgtctttggatgaggtcaaggaaaagactgaaaattttggattcaaggcactgantggtgaanggtcttatgggagagtatattatgcgacactaaatgatggtntggcggttgctctgaaaaaacttattcccaccngaagctgaaacagatnccgaantcttgngtntgg

SEQ ID NO: 16015 - DNA, 441 bp, Arabidopsis thaliana
  unsure at all n locations
  Clone ID: LIB25-038-Q1-E1-G7
tactatatatatatatatatatatcaccccgcacatattattgaatttctttttattttcacgtttcgaaataaaacgaaatacctaatgctaagtaaataaacatatatacaaccatttaattttggattgcattcaattttttttatatatttgacgacctcatatcgaagctatttttttggccaaaacctatgatttttatttgttttttaggttttgtaaaattaaaagttttaaatcattatatatttccaccaatatagaaaaaaaaaaaaaaaaaaangaggaancttctggctgcnacagaggttttggtncttggcggcaatggaaaccnagagggttaaaangaggcaattttccctttcccaaaatcgaataantagaaaantngaatccccgaantgatctcctccgcgtnanttcgcccccgtaaaa

SEQ ID NO: 16016 - DNA, 352 bp, Arabidopsis thaliana
  unsure at all n locations
  Clone ID: LIB25-038-Q1-E1-H1
aattgaaagaaaaaaaaaaacgagaagcgttttctttctctccaaaatccattactcgcgaactttcctctgctaaggtattctttaaccttgtcaacacactagccttaagtgttcactagaaagaggtggtgattatgagttcaagcgaagcgtttcccgtgatgcaggagatcatgcttgagtttcgtgctgggaagatgtctttgcagggaacaaagaatttgnccctgatgcacgaaagggacttgtccgcatagctaagagggtgacgaaggaacngatnnatttcangtggcttgatcnaaaccagaatacantaaaagatattcaaatngttttccnanataaa

SEQ ID NO: 16017 - DNA, 451 bp, Arabidopsis thaliana
  Clone ID: LIB25-038-Q1-E1-H10
atggcgaaaggagacgataatgtgcagaggaagaagaataaagtgacgaggaagaagatgagtaggaagaacgataccgccaccgtatctgctcgtatcgccgccattatcgccgccaagaaacgtcgcaagtctggcaaacgcagcatgtgtcagggaatgtgttttactcttcctacacttgaagatccattcaatgaaaggcaaggtaaagctgatattactaaaaagaagaagaaaaagaaaaaggtgaagagtagagaagacaagaaaccatctcctatgtctattgaaggtgttgagaagatggatggtccaccaaagtttctgatgttaaacttgaatgagattgagagctcatttcgtaaagatattacatacagtgaacaacatgataagtctttgtttactagtagttgggggattgagttctggaaatgttactcatctg

SEQ ID NO: 16018 - DNA, 438 bp, Arabidopsis thaliana
  unsure at all n locations
  Clone ID: LIB25-038-Q1-E1-H12
aatattccagagttcattgagggtgtgaagaacaggaagaggaagatgtctggttttggacaccgtgtgtacaaaaactatgaccctcgagctaaagtcatcaagaacctggctgatgaagtattttccattgttggaaaggatcctctaattgaggttgctgttgcacttgagaaggcagctctctctgacgattactttgttaagagaaagctgtatccaaatgttgacttctactctggattaatatacagggcaatgggatttccaccggagttcttcacggtcttattcgcgattcctcgcatggctggatacttgtcacattggaaagagtcactggatgatcctgacaccaagatcatgagacacaacaggtgtacacaggcgtgtggctgangcattacacaccaantgagagagagatantgacggatg

SEQ ID NO: 16019 - DNA, 537 bp, Arabidopsis thaliana
  unsure at all n locations
  Clone ID: LIB25-038-Q1-E1-H2
gnntnnngaaagttctcttcggngtctaccggtccanagatcggtcgacccncgcgtccgcggacgcgtgggcggacgcgtgggttagcatacccagttcagtctccaggtgtcttagggaaccaaccagatatagtaatggacagccttgctgttcatggtctcggacttgtcaatccgaagaaagttttcaacttctacaacgaactgcattcatacttggcttcatgtggtatagatggagtcaaagttgacgtccagaacatcattgaaaccctaggtgctggtcttggcgggagagtctctctcactcgtagctaccagcaagctttagaagcttcaattgcccggaacttcacagataatggttgcatatcttgcatgtgtcacaacacagacggactttacagcgcaaaacaaaccgctattgttagagcttcccgatganttctacccaagagatctgcttctcaaaacaatccacattgcatcggttgcatacaacaagccttttcccttggngaagttaagcaaacc

SEQ ID NO: 16020 - DNA, 461 bp, Arabidopsis thaliana
  unsure at all n locations
  Clone ID: LIB25-038-Q1-E1-F10
gcacnatgtgtgtgatggcgtgccctagaaactccataacatacaacgccacgcgctgcgcgtgcggtatcggtcagctactaaaccggagctccgggagctgcgagatcttcggttggccgtcaacaatctccacagacaaagatgtaaacnacagcgtaatatcattcgccgagactttattcgctttcgataggatccgtaagttcacgcaatctcaagctattttcttagaagctacgctcgtgatgcttctctcctggttagtcttttgtttcttcctgagattcaccagaactcggcgatggtcgtaatgtctggtttaatctccgttggtggattactcgacttgacgtcttcttcnccacnagacattggcnccgatgatgagacannttgtcaagaggngtncaacaagaacntggtgganagatntnccgttccgagntggaatngttttg

SEQ ID NO: 16021 - DNA, 411 bp, Arabidopsis thaliana
  unsure at all n locations
  Clone ID: LIB25-038-Q1-E1-C4
gctctttccccatcaaaaaaaacaaaaacaaaacacaactctgtttctctcatcttaaaattcatgtaaaaaaaatctacaaatcaaagagagaaacagagtaaagagaaagagaagaagatggcgcggaaatactttcagagagaagttttgccggtaacggctttggtaataatggaatgtgcaaacgttggtttaaacactctgtttaaaagcaagcaactttgaaagggatgagctttcaagtcctcaacgtttaaccctaaggncccncctggtccggntcctcctccttccccggtttgncccttnnaattnagaactcctncaacnnannaattccccaatccccaaaaaatcctgcncctaaggaataatgggnggcggtcaaacntaaagggggataccagg

SEQ ID NO: 16022 - DNA, 464 bp, Arabidopsis thaliana
  unsure at all n locations
  Clone ID: LIB25-038-Q1-E1-C6
aactaaggcagagagttcaccattagaagatccaacattgctccctgaagaaagaaagctaattgcagacaactgtgctagcaaagagccagtgaagtcgatcccgtggaggctgatattgtcgaaaccaccggtttgggctctcatcagttgccacttttgtcacaactggggaacattcattctcttaacatggatgccaacttattaccatcaagtgctgaagttcaaccttatggagtcaggacttctctctgtatttccatggatgacaatggcaatatctgcaaatgccggtggatggattgccgatacacttgtcagccgangtttctctgtcacgaatgtccgcaaagataatgcaaacaataagggtttcttgggaccagcgttcttcctaacacagctgaaacacataanattcncccaacaatggctgtttgtcatggcttgtatcangggga

SEQ ID NO: 16023 - DNA, 445 bp, Arabidopsis thaliana
  Clone ID: LIB25-038-Q1-E1-C7
gataaaacccaaaagaaactaggaagaggagtaaataatatttgttttaaagaaatgattctccacaaaatggcgttcttggccgttattctcttcttcttgataagcagcagcagcgtttgcgttcatagccgtgaaacgtttgcttgcgatacaaaggacgcagcaacagctacactgagattctgccagctttcagttcctataccggagagagtcagagatttgatcggacggttgacattggccgagaaagtgagcttgttagggaacactgcggcggcgataccacgtctaggaatcaaagggtacgagtggtggtcggaggctttacacggcgtttcaaatgtgggacccggtactaagttcggtggggtttaccctgcagccaccagtttccctcaagtcatcaccaccgttgcttctttcaatgcctccttgtggg

SEQ ID NO: 16024 - DNA, 86 bp, Arabidopsis thaliana
  unsure at all n locations
  Clone ID: LIB25-038-Q1-E1-C8
tattgggtgttgggatcaacggtgttgaangaatgcaaagcggttaagtccaancgatataaccaattgctcaattccnttactta

SEQ ID NO: 16025 - DNA, 262 bp, Arabidopsis thaliana
  unsure at all n locations
  Clone ID: LIB25-038-Q1-E1-D1
gattaanatgacgaagattctcccaagaaaagcagtactcgtgcagcttcgagatccacttctaatgtttcatctgggcatgatctgctttcacgaanagcatcacaggcacaacaccatgggngaatggcataccgacttactatgcttgttgcncggaaccttctctttgcttcaagacattcnttttcccgtgtggtacnttggcaaagattgccactgcagcatnnagnaggcncatctcttcangcttgaagcntgt

SEQ ID NO: 16026 - DNA, 448 bp, Arabidopsis thaliana
  unsure at all n locations
  Clone ID: LIB25-038-Q1-E1-D10
nacactctctacaatgttgtctatgctctggttccttctatctcttctctctcttcttctacttccttgtctccgaccttgctttcctgctaaaggatctctgaaaaacaaaaagaagattgacaagggaacttatgtggtcggagaggaggagacacctaaagagcttcagagagagctgatgccgagacacgtggcagtgataatggacggaaaccggagatgggctaaacagaccggattgttgacgtcacaaggctacgaggctggagctaaacggcttctcgagttcgctgacctctgcttcaaactagggataaatactgtctcagcttttgctttctccactgagaattggggaagacacaagattgaagtcaaatgcttgatgtatttgttccaacgttacctcaagtcaaagattcaatttttccagancaaggaaatc

SEQ ID NO: 16027 - DNA, 397 bp, Arabidopsis thaliana
  unsure at all n locations
  Clone ID: LIB25-038-Q1-E1-D2
antggtcttctgggccgncncgggtccggaaanaacgggtcgagccncgcgtccgattcatgtttcaaacttcaatggcgttctcgagttccatcttctctgttactcagttttcttcttcgttagcttcgcgtccttcttctgcaatcagtaggcagactcgttttcccgctcaaattgcttctccagatctatcgcctgctttgttcgatgatcgccggaagttcgtcggangtgtaatgtctctcttgacgaagagtattaaaaaccgtgtanatgcttcgattaacancattgantcgggcgntaatccancgtatccgaaatccgaagaagatgacgangttgttccaangccaaagggtangaaagaacaagaagntganccngaaancna

SEQ ID NO: 16028 - DNA, 448 bp, Arabidopsis thaliana
  unsure at all n locations
  Clone ID: LIB25-038-Q1-E1-D3
gtggctttggtttcgttgtctttgctgatcctaatgttgctgaaagagtcgtcttgcttaaacatatcattgatggtaaaattgttgaggcaaagaaggctgttccaagagatgatcacgtagtatttaataaaagtaacagcagccttcagggatcacctggcccatcaaactccaagaagatctttgtgggaggtttggcatcatccgtgacagaggctgagttcaaaaagtattttgctcagtttgggatgatcactgatgttgtggtgatgtatgaccacagaacccagcggcctagaggctttgggttcatttcatatgactctgangaagctgttgacaaagtactgcngaagacattccacganctcaatnggtaagatggtggaagtcaaactggctgttcctaanggatatngcctcaacacantgcggaaaccaaatg

SEQ ID NO: 16029 - DNA, 452 bp, Arabidopsis thaliana
  unsure at all n locations
  Clone ID: LIB25-038-Q1-E1-D5
nagtggatggatgtcttatagaatgaacaaaacatcctctgtttctcttgtccttgtccctttttccagatcttaaggttttccacattttatcatctgggtcctctccttaatgatttgaagacactcaattcctatttgatcggggactagaatttggattctgtttcagacaaaagtagatttccctgtctctttcccgtttgattttcaataagatgaatccggaggagcaaaagatggaatctgcatcggatctgggcaagctcttcattggcgggatttcatgggacacagatgaagaacgactgcaagagtattttggcaagtatggagatttggttgaagctgtgatcatgagagaccgtactaccggacgtgcccgtggctttgggtttatcgtttttgcagatccttctgttgccgagagagtcatcatggacaaacacatc

SEQ ID NO: 16030 - DNA, 272 bp, Arabidopsis thaliana
  unsure at all n locations
  Clone ID: LIB25-038-Q1-E1-D8
gcccaagcgtccgattttcttcaaaacgattcgggtcaaggttattgactttctcattcagtgaagcttgaatcatggcctcgagaattgctaaagatgtgactgaattgattgggaacactccattggtgtatttgaacaatgttgctgaaggatgtgttggtcgtgttgctgctaaacttgagatgatggaaccgtgctcnaacgtnaaagacangattggntttaacangatttcngatgcanaaaagaaaggtcntancaaaccaaga

SEQ ID NO: 16031 - DNA, 447 bp, Arabidopsis thaliana
  unsure at all n locations
  Clone ID: LIB25-038-Q1-E1-E10
nagcagcaacagcactggagccatcccaatctctttgtattttgagctcttggctctctggttctgcatctcggttcctctcaccctatttggaggattcctaggaacacgagcagaagcaatccagttcccagtgagaaccaaccagattccaagggaaatcccagaacggaaatacccgtcatggcttctagtccttggagcaggaacccttccttttggaacgctcttcatagaactgttcttcatcttctccagcatatggttagggagattctactatgtatttgggttcttactcatagttctgcttcttttggtantcgtgtgtgcagaagtatcagtggtcttgacctacatgcacctctgcgttgaagactggaagtggtngtggaaagccttctatgcatctggttcantcncaatgtnagttttcgcttantccat

SEQ ID NO: 16032 - DNA, 450 bp, Arabidopsis thaliana
  unsure at all n locations
  Clone ID: LIB25-038-Q1-E1-E12
caaatgagtttgctggtggaagttctgaagttcattatgcattacgtggaatatttgagggattgcttcagcagcttctctctttgaaatggaatgaaccagaacttatgaaagtgcatgtccactatctggatgcaatgggtccctttctcaagtattttccagatgcagttggaagtctcatcaataaattatttgagcttctcacctctcttccacacgttgtgaaggatccagctactagtacatctagagctgcaagattgcagatttgcacatctttcataagaatagccaaagctgcagaaaaaagtgttctgcctcacatgaagggtattgctgatacaatggggtacttggcaaaagaaggaactttactccgtggggagcataacattctgggtgaagcatttcttgttatggcttcctcagcanganctcaacagcagg

SEQ ID NO: 16033 - DNA, 461 bp, Arabidopsis thaliana
  unsure at all n locations
  Clone ID: LIB25-038-Q1-E1-E2
gctagttgcatgttggcctcaggaagtgatgacgggacattctccatccgtgatcttagactgatcaaaggtggagatgctgtggtagcacattttgagtaccataagcatcctattacgtcaattgaatggagcgctcatgaagcttcgacacttgcagtcacttccggtgataaccagctcacgatatgggatctatccttagagaaggatgaagaagaagaggcagagttcaatgcacagaccaaggaactagtcaacacacctcaagacttgcctcctcagcttctctttgttcaccaaggacaaaaagatctgaaggaacttcactggcacaaccaagattccggggatgatcatctcaactgctggtgatggtttcaacatcctaatgccntacaacnntcagaacacgcttccgtctgagctaccagcctgaaaagacaaggtcttactccgna

SEQ ID NO: 16034 - DNA, 392 bp, Arabidopsis thaliana
  unsure at all n locations
  Clone ID: LIB25-038-Q1-E1-E4
cnnnnagcaancnggtccggagctacgggtcgaccncgcgtccggagaaaaaaagagatnacacgtgggaatccaacttaccaattgcaatggcgtcaatgaccatgacatcttcatttctccctaccgtctcaaaccttccggcaaacatctccagcaacaagcagacgaagcctcacggtggtcaaaagcctccgggagtgaaaacacaaccagcttgganaacaagaagcaagaacaagagcatgaaaaatgaggaaggatnttgtcntcacaggtgcagctncanctgtgtgctccttaantaaagtggnaatggcnagacgatgagccccagagangaacagaaactgccaacgaanaaagtatgctccagtctgtggtnacaaatg

SEQ ID NO: 16035 - DNA, 432 bp, Arabidopsis thaliana
  Clone ID: LIB25-038-Q1-E1-E5
ccgacgtaaccatggatagcgatactctctcaggattattggaaaacgtcgccaaaaaattccccgatcgccgagctctctccgtttctggaaaattcaatctcactcacgcgcgtcttcacgatctaatcgaacgcgccgcttcacgccttgtctccgacgctggaatcaaacccggcgatgtcgttgctctcaccttccctaacaccgtcgagtttgttataatgtttttagcggtgataagagctagagccacggcggcgccgttgaacgcagcgtacacggcggaggaatttgagttttacctctccgattcagattcaaagctattgttaacctctaaagaaggaaacgcaccggctcaagaagcagcttcaaagctgaaaatctctcacgtcaccgctacgctgcttgacgctggctcggaccttg

SEQ ID NO: 16036 - DNA, 95 bp, Arabidopsis thaliana
  unsure at all n locations
  Clone ID: LIB25-038-Q1-E1-E6
tctgcnaattcaatttattaagcttttttacctgacacntgctctaancctggacctgatgttaatcatgaccaacgtatgagattcattanggc

SEQ ID NO: 16037 - DNA, 523 bp, Arabidopsis thaliana
  unsure at all n locations
  Clone ID: LIB25-038-Q1-E1-C3
ggaatagaggaaattcnnaaggtanncncggtccgnagnnaccgggtcgncccncgcgtccgtgcaaatcttcagtttccgtttctctcctgagaaatttattgacttcaaaaaccctaaaaagacttgtgattgttcgtttctctaactcgaatgttgatcgtacgacggtgagtgatcgnagtacaatgacgaagaaatcacagccgcagattccgcctccattgtcccgtcgcggcggcgtcgtgtggctgggatggaaactcgtaatcgctttctccgtcgcgctttgccttcttgctcttcttcgaatccaactacagtacaattccttcacgacattgtcgtttccactctccgtcgcgaagatctcagacaccgcttcacaaatactccggtgatcgtcncaagctcgctttccttttcttagctcgccgtgatnncccacttgaatttnatgtgggatagattcttcaagggaagtggatcatgccgaatttctcanatttatatacatncantt

SEQ ID NO: 16038 - DNA, 132 bp, Arabidopsis thaliana
  unsure at all n locations
  Clone ID: LIB25-038-Q1-E1-A3
ggttcgnctctgatnctaccgacctcgcctcctccgtgaaacgagacattaccgaggttcaatctctttgttccaatatggacggtctctggcgttcgatncctgtcaaatcccagcgtgatctttggnnaa

SEQ ID NO: 16039 - DNA, 535 bp, Arabidopsis thaliana
  unsure at all n locations
  Clone ID: LIB25-038-Q1-E1-A4
ggtnnngaatgttcttctgggcaccacggtccggacctaccgggtcganccncgcgtccgctcaaantcaatggcggctgaaatggcgttagtgaaacccatctccaagttctcttccccaaagctctcaaacccgagcaaattcctcttcctcaccgcctcctccaaccaccgccacctcgaagtccaagaagggaacgaagaaagagattcaagagtcgcttcttactccgaggttctacacgacggacttcgaggaaatggaacagcttttcaacacggagatcaacaagaaccttaacgaagcagagttcgaggctctgcttcaagagttcaagaccgattacnaccagacacatttcgtgaggaacaaggagtttaaagaagctgcagacaaattgcaaggacctctccgacagatcntcgttgagttccttgagcggtcttgtgactgcggagttctccnggtttccntcttaganggagcnnggctanngactccnagagagnaagccgnggttgtggncgngagatt

SEQ ID NO: 16040 - DNA, 466 bp, Arabidopsis thaliana
  unsure at all n locations
  Clone ID: LIB25-038-Q1-E1-A6
aattcgggcagagaagaatgttattgatttatatgtcatgcttctgcggttttcaagcttggctctcgagactataccgtcccatcgagattacagaacatctctaaaaagcaataaagagtatttgagaatgagactactanatgtcttgacggagctggagaagttganaccagttgtacagcaaaggattgatgaactgtatcccaagctcaaacctcgatataacgttcaagctcatccagcaaatggttccctaagctggtcttctgccgtgaaaccgtcatttaatagctatgatcatgcaaaggtaagaaatcctcctggacataattctggctacatggggttccangggtcagcaatttttgaacgctgcaacacntnaagaacgtttcngaaagatgtcggtgaacttccgaccaaatgaagaaaccctttccaagcaattcnancntggggtcaa

SEQ ID NO: 16041 - DNA, 456 bp, Arabidopsis thaliana
  unsure at all n locations
  Clone ID: LIB25-038-Q1-E1-A8
gctaacacaactctcgccgttgttttctctgctccaccgtcaaaacctggtggttggatcgcttgggctattaaccctaaatccaccggcatggctggatctcaagccctcgttgcctctaaggaccctagcaccggcgttgcttccgtgacgacccttaacatcgtctcttacagctctctggttccctcgaaactgtcctttgacgtgtgggatgttaaggcggaggaggcggctaatgacggtggagctttacgaatctttgcgaaagtgaaggttccggcggatttagcggcgagtgggaaggttaaccaggtttggcaggttggtccgggagtgtctaatgggaggatacaggctcatgatttcagcggtcccaatcttaactcagtgggatcactcgaattaaccgggacaacccccggagtccctgtctccggangtggttggtgccgg

SEQ ID NO: 16042 - DNA, 448 bp, Arabidopsis thaliana
  Clone ID: LIB25-038-Q1-E1-A9
aagcgtccgctctcttcttactctcaccatatctgctctctctctctctctgtttcaagcttttgctcccatttttcatttccttcgtattctcgctcgagcttagcggttgatgtaccaatgaccaaatcgatatttgaatcgccgtggctacctttctttttcttctgatttctctatctctcgcttgattctaccacttttagggtttctattattcccagggactttgggtttctttaagaagttcgattcgtctccgttttctttttagggttaacgaagtctgtggtgttggatttcgatctttttttttttggtatcttccccattgactgttgcggtgataagagagtgacgcaatggtgtctaagaatgatcatatcgagactttattcaattcaatccaactagttaaagatgttgttcttcttccgattgaagcttg

SEQ ID NO: 16043 - DNA, 444 bp, Arabidopsis thaliana
  unsure at all n locations
  Clone ID: LIB25-038-Q1-E1-B10
atgttcaagggattttgttggagagggactttaacatagcacagagagcaggtggagttggtaaaccgttcctaaggcaagttgatgaagttcaagtgaatggaagtacgttgganattcatttgaagtggacaggaaaaggcacaaacgtaataccaacaagaggtgtttacgggcctctcatatccgctataaccgtcacaccgaatttcaaggttgataccggaaaaccattgtccaatggagtagttgcaggcattgtaatcgcagcgtgtgtagctttcgggttgctggtacttgtaatcctcaggctaacaggttacttaggtggaaaagaagtggatgaaaatgaagagcttcggggactcgatttgcagacaggatcgttcacattgaancaaatcaaacgtgctactaacaactttgatcagaaaacaagattgg

SEQ ID NO: 16044 - DNA, 514 bp, Arabidopsis thaliana
  unsure at all n locations
  Clone ID: LIB25-038-Q1-E1-B2
ggatanagaatttctnnagtnnccgcggtcngnagctaacgggtcgnccccgcgtccggcaaaaaacagcgattcgtttcgtttctgacaagtttccaattctacagcaatggatctcaatctcgatgcacctcactccatgggaacgaccatcatcggcgtcacttacaatggaggtgtcgtcctcggagccgactcacgtaccagcancggtatgtacgtagcgaatcgagcttctgataagattacacaactgacagataatgtctacgtctgccgctctggatcggctgctgattctcaagttgtanctgactatgtccgctacttccttcaccaagcatacaattcangcatggacaacccgcaactgttaaggtttctgcnaaccttatcaggatgctcgcatataataacaagaacatgctccanactgggtctnaacgttggaggatnggatnaatatganggtgggaaagattncgggatntcactnggnnggaactggtngncg

SEQ ID NO: 16045 - DNA, 216 bp, Arabidopsis thaliana
  unsure at all n locations
  Clone ID: LIB25-038-Q1-E1-B4
canaaagaaatgtcggacccnaaacctcaaattctggatatgggagtgggaatagangnggttggacttcgtcattcatgtctccagagannngatgcaaagaaaatgtagctttttcctgaaatggtgagtgagatgatgcgctgttaatgtgactccgtgcccttaattcanctctgaanctacagcataaatcagaacttggtgtcactaana

SEQ ID NO: 16046 - DNA, 443 bp, Arabidopsis thaliana
  Clone ID: LIB25-038-Q1-E1-B5
gagaagaagaagaagacgagacgacgaatccagaaacagagagagagggagagagctttgaatatcttattgtacacaatcttcttcgcatggaagatttctgtttctcgtcactctgatatccaaaaatgtctggatctgattttgatttcgcggcgtttcgagttcaatgctaaaacatcgaagcggtttcgaatctctgagaatcgaaggaaaacgaagcgtgtaggttagggaacttaagattacgttgaagagaagcaagttctcttaaatcgcaactttggagaagtttcgttgttggtttttggtaaagcgatggagtcacgaatggatcagtacgagcttatggaacagatcggggagaggagcgtttggtgctgctattttagttcatcataaagctgagagaaagaagtatgttttgaagaagatcagattag

SEQ ID NO: 16047 - DNA, 463 bp, Arabidopsis thaliana
  unsure at all n locations
  Clone ID: LIB25-038-Q1-E1-B6
aattccgattctgcagaaatgggaaatctgaaacttgctttgatcatcaagagccctagagacgacgttgagttcctactcgagaagcaaaaacagccggcgaaatttggagatgaagcttacgattcctttgtcgattccgatctctgggacttaccgtcaacagatttacaggctctggaagacggagtgaggtccggatttagtatttctatacttgactcatgctcggaggaggttgatttgatgaatttcgacttcgaatccacactgattctgctgctggagaatttagggattgatattagcgatgtangagagtggagaatcgtcaagtctgtanaaaaacctgagtttggacctgactcctgtgtccgtacctggtttanctccnggaaanctcctaaatacagatnaaagtttaaaagacaactggtaattggangttcangggaacaannct

SEQ ID NO: 16048 - DNA, 455 bp, Arabidopsis thaliana
  unsure at all n locations
  Clone ID: LIB25-038-Q1-E1-B8
gcttcttgttcggcttttatcatctctgaaaattgctttatttggttgaattcattggattgttgatcgagattggtttactgattgatcgaaagtatggaggaagatcgtggggaagcgatcgttttagatatttcgccggagattaataatactccggcggtaatgatgagagttccacggaggattcgtgagaggcttttgtctgactgtagtaataagaagacagtatcttctgttcaagatattgaagacaagcttcttcatgcccatctacgaagacagcaattttatcataacgtttcgagaaaggctcgtgctaaacctagaantcctcacgatnatccgatgaagaacttggccaacgaatcgaaancaagacttctggctgctgaacaaaaaaggttgganatccttgcnaagnccnnatccttttggcaanttagatagttaag

SEQ ID NO: 16049 - DNA, 526 bp, Arabidopsis thaliana
  unsure at all n locations
  Clone ID: LIB25-038-Q1-E1-C1
ggnattnnggatgttcctctaggcnccgcggtccggatgnacncgggtcgacccncgcgtccgcgaaaaangagacgaagaaacacagagatcggtgatggcttcacagagatattcaacagagagattggtttctctcatccaatcaccatctctcgtcgaatctccgcttctgaggggagagtgaagaaactagatctttacgggaagttaaatggtcatgagggatgtgtgaatgcagtggagttcaattcgactggcgatgttcttgtttccgggtccgatgatcgacaaatcatgctctggaactggttgagtggaagcaggaagttgtcgtatccctctggccattgtgaaaatgtgtttcagactaagttcataccttttacggatgacaggacaantcataacatctgggtgctgatggacnagtaagacttggtcagatcctagaagattggttaagttggagacgaagangactagggangcatcacggtcggcgtgtacnaggctgctgtttttg

SEQ ID NO: 16050 - DNA, 520 bp, Arabidopsis thaliana
  unsure at all n locations
  Clone ID: LIB25-038-Q1-E1-C10
gggtntnngnnggaattttcttcgcngtactaccggtcanaatgatcncgggtcgacccacgcgtccgcacaancgtccggcagaatgattctggtggaggatcaagctggggaaagcaagatggtggtgggggtggttcaagctggggtaaacagaacgatggtggtggtgggtcgagctggggcaagcagggtgatggtggttctaaaccttggaatgaacatagtggtggtggtcgtgggtttggtgaaagaaggggaggagggggattccgtggaggtagaaaccaatcaggcagaggaggaaggtcgtttgatggtggtcgatcatctagctggaaaacagacaatcaagaaaacacttggaagagcgaccaaagtggtggatcagactggaaaaaaggttggggagaggattcaaacaatagcaaaccatccggttcgtctgctggtggttgtgctggaaactggcctaactgggatactaactcaaagaaagaaaccaatgacaaaccgggag

SEQ ID NO: 16051 - DNA, 450 bp, Arabidopsis thaliana
  unsure at all n locations
  Clone ID: LIB25-038-Q1-E1-C11
anggttatgttcagtttcgtagcaaagaacagataagagaagctttgaagcttctcgatctggaatctgttcactctttgttcgatgatttcattcaaagagcttctaattgcattgcttctccttcctctaacggctctgtttcgtctcgtcctccgctgcctccggcgactacgacggctgctcgttctgattctcagtcaagtttgaatttttctgagagagctcccgttcgccccaaggatatggtttcgcgagacgatagcttcgtcacaaagtctaagccttcttctctctacagtgatggttttgcagctcctcctcgaagaccacagattctcgattcaacacttaccaccggcaatgatgggagagaagctgagtttgataaaacttgctaatttgattgaggtatcagctaagaaagctacacaagagataaatctacag

SEQ ID NO: 16052 - DNA, 460 bp, Arabidopsis thaliana
  unsure at all n locations
  Clone ID: LIB25-038-Q1-E1-A2
tcagtctctgtttttagctctgtgatttgagtttttattttgcggtggcgttgtatggctatggcctttcctctttcttatactccgacgattactgttaaaccagtaacgtactctcggagatcgaactttgtagttttctcgtcgagttctaatggacgagatcctttagaggagaattcagtacctaatggtgtgaaaagcttggagaagcttcaagaagagaagcgtcgtgctgagttatctgctaggattgcttctggagctttcactgtacggaaatctagttttccatctacagtgaagaatggtttanctaagaatggaataccaagcaatgttcctgaattcatgtttgaatggactgggtccgaacaaagaataacccaaaggttccgaaggcnaaaggcccgaatcaaggcggtccgggaaagaaaccttcctcanccctttgtaagaa

SEQ ID NO: 16053 - DNA, 442 bp, Arabidopsis thaliana
  unsure at all n locations
  Clone ID: LIB25-036-Q1-E1-G11
actctctctctgtttctgcattacaaaaagtgtttgttttcaaggtttctctctttcacttctctttgttttcttcatttcaatttctggattttgcttgtagctacatttggtctcactctattccatggctgacactggtgaggttcaatttatgaagcctttcatctcagaaaagtcatctaaatcattggaaatccccttgggattcaacgaatacttcccagcaccatttccaataactgtggacctcctggactatagtgggagatcttggacggttaggatgaagaaaagaggagagaaagtgtttcttacagttggttgggagaattttgtaaaagataacaatctccaagatggcaagtatttgcaattcatctatgaaccgcgacaggaccttttangttatcataaaanggtcataacatgtgtnaccgaa

SEQ ID NO: 16054 - DNA, 504 bp, Arabidopsis thaliana
  unsure at all n locations
  Clone ID: LIB25-036-Q1-E1-G12
gggnntntnnnngcattttcagccgctacggtctannatccgggtcgacccacgcgtccgntcaacgagcctcatcctgttttgaagcttcatgcgctctctaacctcaacaatttggttgaccaattctggcctgagatctccactagtgtccccatcattgagagttnntangaagatgaagaattcgatctgcatcaaagacagcttgctgctttgctggtctctaaggttttctattacttgggcgagcttaatgattcgctgtcttatgccctaggagccggtcccttatttgatgtttcagaggattctgattatgttcatacgcttctggccaaagcaatagacgaatatgccagtctcagatcaaaggcagttgagtcaaatgagatggtggacattgatnccaggctagaagcgattgttgaaagaatgcttggaaaatgcatcagtgatgggaaatntcaacaagccatggggcaattgcgatagaatgcccgg

SEQ ID NO: 16055 - DNA, 466 bp, Arabidopsis thaliana
  unsure at all n locations
  Clone ID: LIB25-036-Q1-E1-G2
gcttgggtcttcntcgaggagagctcctacttctgggttttctaaaggagcgcaaaacggattccagagttccggtgttgacagattcctgctgcccgcttcggagtgtgaatacacactggacttgcttttggatgagctccaatcagaccagtggcctgttcagccaggtcatcgtccccaacgatgcacaggggttgcattgagtgtagctgcaggattgcttggagcttgcttacctggaactggtgctagaattgtagctttggttggaggtccatgtacagagggccctggaacgattatctcaaaggatttgtcagatcctgtgcgctcccacaaagatctagataaagatgctgctccttattataaaaaagctgtaaagttttaagataagtaattgcaaaacaancttgtccctcaanggtcangtgttaaacccttttcccttctgcaacttgat

SEQ ID NO: 16056 - DNA, 520 bp, Arabidopsis thaliana
  unsure at all n locations
  Clone ID: LIB25-036-Q1-E1-G3
ngaatggtntccgngnncacgttcgganacccgggtcgaccaagcgtccgatcggagattcggagtagagaaaaatgtcaggattcgtcgggattttggtatcggatccatggttacagaaccaattcacgcaagtggagcttcggagtttgaaatctcacttcacgagcatgaagagagagagcgggaagctaacagtatcagacctcgcgtcaaggatggggaaatcaaaagtagttggagatcagaatctaagcaacgaagaacgagcgactttgatccaaaattttcatccgaatttgaatgatgaagtcgatttcgagttttacttaaggatttatctgaatcttcaagcgcatgtaaacgcaataatcggaagcggtgttaaaaactcatctgcgtttcttaaagcagctacaacaactttgttgcatactaatagtgantctgagaaatcctcctaangttgcncanaacaataattancccnccggganaataantttcaaacaaatngcct

SEQ ID NO: 16057 - DNA, 454 bp, Arabidopsis thaliana
  unsure at all n locations
  Clone ID: LIB25-036-Q1-E1-G6
naaccagtagtggacagcaaatttatgttcctaaagctgtctcacgagggagaggacccaggaaatccgacactcccctgaggaatgaaaatcaagcacattctgagcaaagcaaacagttacgaaattctaatgggtctcaaaactctcgtgagaaaatgccacacctcgattcacggcgttcaccaactgcccctgctaaaactgagaatcaaggtgcccatgccaaaaagaatgtagctgtgtcaagtttgagttccgcttctcctccattttatccttaagcgccgttcaattatgtggtacatggtatacnagttantatggaaagactccacacaaatgaaagtgtcccgccttctgggaagaagtttaggaatacnaaatccggttattcaccagtttggggctgccaagactcttcagtccactantcaaggtaaagggcacctgc

SEQ ID NO: 16058 - DNA, 440 bp, Arabidopsis thaliana
  unsure at all n locations
  Clone ID: LIB25-036-Q1-E1-G7
atagaatcggtctctttctctataatctctctctctctctgacttgtttgtgttctctcaaatcctctgataagaatcaatggccaaggaattagcagagaaagctaaagaagcttttctagatgatgacttcgatgttgctgttgacttatactccaaagccattgacttggatcccaattgcgccgccttcttcgccgatcgtgctcaggccaacatcaaaatcgataacttcactgaagctgttgtagatgcgaacaaagccattgagttggagccaacgttggcaaaagcctatctcagaaagggcactgcttgtatgaagctagaagaatatagtactgctaaagcagccctggaaaagggagcttctgttgcaccgaatgaaccaaagtttaagaagatgatagatgaatgcgatcttcgtattgcagaanaat

SEQ ID NO: 16059 - DNA, 393 bp, Arabidopsis thaliana
  unsure at all n locations
  Clone ID: LIB25-036-Q1-E1-H11
gnnntnnngcaacgtttatccgccgccaccggtctnaaaatcccgggtccgacccacgcgtccgngacaaggtcgatgaggaagaaggtgaagagtgctcgcaggagtggttccaactcgtggcatcattcagatttctctaactcggaagttgatcctattttcgcaatctaagatgcgtaaaagaatcgtgtatatatattgttgtatttggtgaagagagctagactatttagtgtataaagccccctgaccatcaaaaggcaaacactattgtcaaccattaaaggtttacactgctcaactcatctgtaaaacagttaacaattgtcttcttcggaaagcaaagaaaagcaaaggttcctttgttaggaaaaaaaaaaaaaaagggcg

SEQ ID NO: 16060 - DNA, 494 bp, Arabidopsis thaliana
  unsure at all n locations
  Clone ID: LIB25-036-Q1-E1-H12
tntgccggnccngtancgcnacatatcacncggtcggcccnacgcagtcngagcnaacgttgcatcacgataatgaagaataacttatagatccatccccttttgtctcctaattcttaattttttagaaagagatcattattgttctcggatggagatatttagaaaggcaacgattgtacgtctccgtagccacaacgacaaatacctaagtgccgatgaagatcaagaatccgttcatcaagatcgtcgcggcacaacaaaaaacactagatggacggttgagatcgtacctggatccaatgtgatccgtcttcaaagctgttacggcaaataccttaccgccactaatattcatttcctccttggagccaccggcgaaaaggtacttcaaactctacccgaaaagttggattcatctgcggagtgggaaccgctatcagacgatggtgtacactacggtcaagaatcgctacgggcaatatctganggca

SEQ ID NO: 16061 - DNA, 73 bp, Arabidopsis thaliana
  unsure at all n locations
  Clone ID: LIB25-036-Q1-E1-H2
ggtgggcntctaccttaaagcgccaagtgggaaaagntctacgttatcacgtggaactccccnggaaaggaac

SEQ ID NO: 16062 - DNA, 535 bp, Arabidopsis thaliana
  unsure at all n locations
  Clone ID: LIB25-036-Q1-E1-H4
nnnnnancggttncctgggccctngctttccntgancccntaggggtcgaccaaacgcgtccgcatccnttgtagcattctgaaaggtacangaagcgctaggcggcagacaaaatccaacaaaaaggttactgagccaccgccaaagccgttgaacttcgattttctgaatgtgccggagaaggttacttggactgggataaacggttcagaagaagcttggttgcctttcattggggactacaagattcaagaatctgtcagccaagattgggacagagtattcactcttgtcacctcccaaaacgctggaaaaacgatgttctagaagattgctgcagaaactcacaaattgtaataacacgcgctgctagattatcatatctacttagtatttactgatcgttggttggaatgcnagttaattttttagtagtgatagttttagtaacactttgatttgagttgtaatgtactttcntaacattttcntagataatttgaangcaatgtatgtctaaaaaaaaaaaaaaaa

SEQ ID NO: 16063 - DNA, 456 bp, Arabidopsis thaliana
  unsure at all n locations
  Clone ID: LIB25-036-Q1-E1-H5
gctcnnanccaaatcaccctgccacgcgcgccgtcgtcggagattggcctcttacgccgtcgattggagcggccgatnatcagaacccggatcggattcaacggccggattgcgancgtattgactaacgcaggggaccaagcggtgtcngtaaaagcgagtgtgagccagaaggtgattgaagaggaagccaaagttattgtgggtacctacgcgcgagctccagtggttctctcgagtgggaaaggttgtaaattgttcgaccctgaaggaaaagagtatctggattgtgcatctggaatcgctgtgaatgctcttggtcatggagatcctgattggcttcgagctgtcactgagcaagctggtgttcttgcccatgtcagcaatgtttattacacgatncctcagatagagctcgcaaaacgcttggtggcgagttctttgcanaacgtgtat

SEQ ID NO: 16064 - DNA, 442 bp, Arabidopsis thaliana
  unsure at all n locations
  Clone ID: LIB25-036-Q1-E1-H6
ttgcctcaaactcaaattttgaagataatttttttggtttctctgctactgatttcgaatctttacgcttaatcaattattcatctggattttcaaatccaatccttttcctccctggtgaccaagtaattggggattaacaaagggactggggctttattaagctcgaaacaattgttcttcactctggccgcttctgcaaagtcgtgtgcttctcgcacctctgcgcaggtgtggggtggccttgaagtggtgacttcactctgtcttccaaggatttctctagcttctatcatttggangctccgtcgtgtttctganggtctacccttgattacggctaacatttactacgcccactataccacctcttaagctttataagaacttttaattcgtgcaaaaactaacttggatcttaantgttccagttnattgtggt

SEQ ID NO: 16065 - DNA, 453 bp, Arabidopsis thaliana
  unsure at all n locations
  Clone ID: LIB25-036-Q1-E1-H8
ctgctccagttcgacctgacgtctggtaaagtgacggtggtggattgatcggtgctcatgtcaccgtcaagtccttggacggtgacaagaggtcgtgcggcggctgaggcaaccatcactttaccagacgtcatgactgctccagttcgacctgacattgtcaacttcgtccacgcccaaatctccaacaacagccgtcagccttacgcagtctccaaaaaggccggtcaccaaacctccgccgagtcctggggaaccggaagagccgtgtcacgtatccctcgtgttcctggtggtggaactcaccgtgccggtcaagcagcgttcggaaacatgtgtcgtggtggtcgtatgtttgctccgactaagatctggagacgctggcaccgtcgtgtcaatgtcaacatgaagangcacgcgattgtttctgcaatcgctgctactgctgttcca

SEQ ID NO: 16066 - DNA, 514 bp, Arabidopsis thaliana
  unsure at all n locations
  Clone ID: LIB25-036-Q1-E1-H9
gnnntntngcacttttttcngcccccacgggccttatatcccgggtcnaccaacgcgtcgangaacttccgccttattcagaattttaanggaggttcaanaagaacacaaggaaaaattggactatatgttatgggaccacgggagacaccatctgtttgtaccaggaccagtgaannnnccggaaccggtaatccgggcgatgaaccggaacaacgaggattaccggtcaccagccattccggcgcttacgaaaacattgttggaggatgttaagaagatattcaagaccacatcagggacaccttttctgtttcccacgaccgggactggtgcttgggagagtgccttgaccaacacgttatctcctggagacaggattgtttcgtttctgattggacaatttaacttgctctggattgaccagcanaagaagcntaatttcaatgttgatgttggttnaagantnatttggggacaaggtgctaatcctccaagtcctgggcctcaaaac

SEQ ID NO: 16067 - DNA, 510 bp, Arabidopsis thaliana
  unsure at all n locations
  Clone ID: LIB25-036-Q1-E1-G10
ngcncatntttcagnccgctacggtccttatatcccgggnccacccangcntncnaacaagccttcgncngaaactaancccaancctncnctncnanggctcaactcgctctcccctcctcctggtnaanacggaagcaaacaaaccgttcctncctcccctcccggtgacaccgttcccaaaataacttctgtatcattgaggggatcagagacagttcaagactttgtgcagatgcagcttcaggaaatccaagataacataaggagtagacgcaataagatatttctcctcatggaggaagtgaggaggttacgtgtgcagcaacgtatcaagagtgttaaagccatcaatgaggacagtgagctcgaggctaccgagatgcctgagatnacatcttctattcctttcctccctaatgtgacaccaaagactttgaaacaactctattcgaccaacgttgcattgatatccggaantatcctccttggtggtcncaattgcaccta

SEQ ID NO: 16068 - DNA, 468 bp, Arabidopsis thaliana
  unsure at all n locations
  Clone ID: LIB25-036-Q1-E1-D1
gaattttttaaaaaaaactctccatatatctattacttctacgctaactagagagggagattattgctcttaagtgatggaggaagtaaagaagagggattgtatggagaaggcaaggccattcatttcaatggtagtgttgcaagtagggctagcangaatggatattctctcaaaggctgttctaaacaaaggcatgagcaattacgtccttgttgtttaccgtcacgccgttgcaaccatcgttatggccccgttcgccttctatttcgacaagaaggtgagaccgaagatgacactgatgatattcttcaagatatcactccttggtttactcgagccagtgatcgaccagaacttatactatctcgggatgaaatatacgacagctacatttgcaaccgccatgtacaacgtcctaaccgcaatcacttcgtccttgcctatatattggcctccaaaaantaa

SEQ ID NO: 16069 - DNA, 515 bp, Arabidopsis thaliana
  unsure at all n locations
  Clone ID: LIB25-036-Q1-E1-D10
ngggttttccnaaatttttccnaacnaaaccttttttttttncctccctccccccaaaancttnccntttnccttttccccaaaggggttttttcccctncccngggccttaaacttccctncnaaggggtttttcctccctttccctccccaaactttttcccccntncccnaaggcctttttaaatccccctttttttggaattttccggtcccctgcggagngcctttaaactgggttattttaaccccaaaaaaatcctaaaagccttttctcaagtggttcttccatttctctacttttgttttcatgtaaatgctggcaaacttcgcaatacccatcttcaatttcttcaattcgtaatgggaaaaagcattttagtttaatttgggtttggtggtcccacttgttcatctcnagtctaacatccatgatccattcngaggtttgnacnatggtgtacatgacaaatcanggttggtagtacttagatgaanacngctgggcatgggtc

SEQ ID NO: 16070 - DNA, 439 bp, Arabidopsis thaliana
  unsure at all n locations
  Clone ID: LIB25-036-Q1-E1-D12
cagagttttagttttagcagagttggtgaaatcaatgggccaccaaaacgccgccgtttcagagaatcaaaaccatgatgacggcgctgcgtcgtcgccgggattcaagctcgtcggattttccaagttcgtaagaaagaatccaaagtctgataaattcaaggntaagcgcttccatcacatcgagttctggtgcggcgacgcaaccaacgtcgctcgtcgcttctcctggggtccggggatgagaatctccgccaaatcccgatntttccaacggaaacatgggtcangcctcctaactantcaactcccggtgaactccgaatccctttcantgngccctaatctccgtntctctccgccgggnanattaaaccgacaaacanagcttcaanccaagtttcattanggtcctgncgttccttctcccttaaaaagg

SEQ ID NO: 16071 - DNA, 452 bp, Arabidopsis thaliana
  unsure at all n locations
  Clone ID: LIB25-036-Q1-E1-D6
ttgccccatcaatggatatcatcagatggggtcttggatcaaccgcagtaaagatttcagaagaatacatttaccgcatgcctcagcgccaaagacttgcccacttcattggactgatggagatgctaaatccttatccaaagccaaactgttggttggagcttttaccgggaagatggcgtcttttatactcaactggaaagcacataggtctaactctgcgtcagccttccacacgtgccttaataggcaacgttcacttaacgataactcgagcttcagaatccataaacaacacttcactttcctttacctctgatatacgcttcactgccataaccagcaaagactggccacacaacaaaatcggagctgctgggaaattacaaacgctctctcaattcagactaatanctggaaaaagactttacctcaaagaagagaaaaagaac

SEQ ID NO: 16072 - DNA, 453 bp, Arabidopsis thaliana
  unsure at all n locations
  Clone ID: LIB25-036-Q1-E1-D8
nttttgctttccttttttttttgtaggaaagggttaattatacgtaacacagaaacaaaaacaattctctttttcctctagaaaaagagattaaaaaaaaaatggaggggaggttattgacggtgttggtctgcctcgtctctacggtggcgatcgtgaacgccggtgatccttacttcttccatacatggaacgtgacttacggaactgcctcacctctcggtgttcctcaaaaggtgattctcatcaacggtcaattccctggtcctaaccttaactcaacctctaacaacaacgtcgtcatcaatgtcttcaaccacctagacgaacctttcctcttgacctggagtgggattcagcataggaagaactgctggcaagatggtgtggctggaacttcatgccccatcccagctggacagaactttacttaccatttccaacctaaggaca

SEQ ID NO: 16073 - DNA, 438 bp, Arabidopsis thaliana
  unsure at all n locations
  Clone ID: LIB25-036-Q1-E1-D9
aaattctgtgtacctggatctactacgcttgtttgcccatggcacctggggagactacaaatgcaatgccacccgtcttccgcacttgtcccctgaccaaattcttaagnntaagcagctcactgtcctcacccttgctgagtctaacaaggtattgccctatgatacactaatggtcgagttagatgtttccaatgttcgcgaactcgaggactttcttatcaatgaatgcatgtatgcgggtatagttangggaaaactggatcagttaaaaagatgttttgangttccgtttgcaactggtaaggattaaggcangtcaactagggaatatgttacacacattgtccaactgggtnaacacgtcagagaatctgcncanttcaattcaagaccanattaaatggggcggacatatgantnagatgacaaaaaaca

SEQ ID NO: 16074 - DNA, 207 bp, Arabidopsis thaliana
  unsure at all n locations
  Clone ID: LIB25-036-Q1-E1-E10
gtgacgatttcaggagacttcatcatcagtgcatagaagcaaacggacaccagttggctcttctctatgttgctctctataccatagctctaggcggaggaggaatcaaatccaacgtctctggttttgggtctgaccagttcgatactagtgatcctaaagaagagaancagatgatttnctncttcannanatncaatttctcaa

SEQ ID NO: 16075 - DNA, 434 bp, Arabidopsis thaliana
  unsure at all n locations
  Clone ID: LIB25-036-Q1-E1-E6
acttggattctttctggtcaccatggcttcggttactttctctgtccccaagggnttcactgaattctcaggattgcgaanctcctctgcttctcttcccttcggcaagaaactttcttccgatgagttcgtttccatcgtctccttccanacttctgcaatgggaancagtggtggatacaggaaangtgtnactgaggccaagcttaaggtggccattaatggattcngtaggatcnggaggaacttcctgagatgttggcatggtcgcaaggactctcctcntgatatcattgccattaatgacactggtggcgtcaancaagcttcgcanttacttaaatacgactctactctcggaatctttgatgctgacgtcaaancttccngacagactgcantctctgttgattgaaagataatctcagntatct

SEQ ID NO: 16076 - DNA, 455 bp, Arabidopsis thaliana
  Clone ID: LIB25-036-Q1-E1-E7
actcgaagctacattatcaaatcacaatggcgaaaaagctctgtttcattgttatgctatcaatatgtctcctaatttttgactttgcgggtgctcaggaggaatctccttcacctgctgctgtctcgccaggacgtgaaccttcaacggattctcctttgtcaccgtcttcatcaccggaagaagattctcctttgtcaccgtcttcatcaccggaagaagattctcctctcccaccatcttcatcaccggaagaagattctcctctggcaccgtcttcatcaccggaagtagattctcctctggcaccgtcttcttcaccaagaagtagattcccctcagccaccgtcttcttcaccagaagcagattctcctctgccaccgtcttcttcaccagaagcgaattcccctcagtcaccggcttcatcaccgaaacctgaatccctagcggattc

SEQ ID NO: 16077 - DNA, 453 bp, Arabidopsis thaliana
  Clone ID: LIB25-036-Q1-E1-E8
attcttcatcgactcaaattcaaaaactcatctctctctatctctatttctctggttccatagctcaccgtcgcatcgcagatctactccttccgcaataaattttaccggcggaggtatcagatctcgccgatctgttgtagcagctactgtattttgggcttctcatttgatattggggaaacgaggagtagaggacgatggaaaatctgatctctctggttaacaagatacagagagcttgcacggctttaggagaccatggagactccagcgctttacctactctttgggattccttgcctgcgatcgccgtcgttggtggtcagagctcagggaagtcttcagtcctggagagcatcgtgggaaaggactttttaccccgtggatctggcattgttactcgaaggccccttgtcttacagttgcaaaagatcgatgatggaacccggg

SEQ ID NO: 16078 - DNA, 315 bp, Arabidopsis thaliana
  unsure at all n locations
  Clone ID: LIB25-036-Q1-E1-F11
gacttgatacttttctccagtaagggtttgcaaagatgaagcttgatactagtgggttcgagacttccatgcctatgattggatttggctcgagcagtggntatgcttgatgagctttcttctgtaacctcgtttgatctaacccgtactaaagagtttgatggaattcagaaaaaagctaaagacatttttaaacatgcaaaangaacaaacaactcccgcctttaacctcaaaagtngtgttaaggtccccgctgaatcncnggctaacaatggaagatatntcncctcacaatctgtnaaanaanaataatg

SEQ ID NO: 16079 - DNA, 415 bp, Arabidopsis thaliana
  unsure at all n locations
  Clone ID: LIB25-036-Q1-E1-F12
gggagtcaccccaaagtttagtttggctcctcttgtccctangctctccgagcttcttggtattgaggtcacgaaagctgatgattgtnttggcccagaagtggaaagcttggtggcttctctacctgaaggtggagttttgcttcttgagaacgtcaggttttacaaggaggaagagaagaacgatcctgagtttgctaagaagcttgcttctcctagctgacctttaagtcaatgatgccttcggaactgctcacagagctcangcctctaccgaaggatcactaagttcttgaagccttcaattgcnggtttccttttgcaaaaggaatggactacctaattgggccgtttcaaacccaaannanaccatttcnacccaaannggngggtccaaatntcccccccaattggg

SEQ ID NO: 16080 - DNA, 462 bp, Arabidopsis thaliana
  unsure at all n locations
  Clone ID: LIB25-036-Q1-E1-F3
tttgagctaattgaagaccctatttgatcttaagaagcaatcagcttttagtttaagcatctagaaacttgaattttgcgaacctttttggacgcacacaagaacttaattcgattcagagagataatggattttaaaggtataaaatgggttgggaatgtttatcagaagtttgaagcaatgtgcttagaggttgaagaaattatcgtgcaggacacagcaaaatatgttgagaatcaagttcagacggttggtaacagtgtcaagaaattctgttcagatgtggttcacgacttgctgcctgatgaatctgtagattcgggaaaacctttgcccgtttctatgttacatgaatacgcccctgtttattctttcaaaaaaaaaaaagatagtatgaaccggaaaactaaagatgtgacacaagagcaagangtaactgangggaagaaggatggatttgca

SEQ ID NO: 16081 - DNA, 526 bp, Arabidopsis thaliana
  unsure at all n locations
  Clone ID: LIB25-036-Q1-E1-F9
nnnntntnngcancttntttctgccccctacggtccnnaaattcccgggncgaccaacgcgtccnancaaaatatgggatatggggaccgaagaacacaacccccggggggcgttactgggtcnttggttaagagtcccgggagaaatcaactccaaggactcccgggagaccttgcatctatacgaaaactcttggaactcgggattgaacccatcataatctctgacagatggaaaaaattgtcagaagtcactgtcgagaatctcaaggctgttggtgtaacaaaatggaagcatctcatactcaagccaaacggatctaagttgacncaagtggtgtacaagtcaaaggttaggaataaccttgtgaagaaagggtacaacatcgttgggaatattggagaccaatggggctgatttggttgaggatactcctggaaanggtttttaagctcccaaatccantctactacgtancttcctaaattaagcatccaancntcatggcantgtcccccttgtatc

SEQ ID NO: 16082 - DNA, 514 bp, Arabidopsis thaliana
  unsure at all n locations
  Clone ID: LIB25-036-Q1-E1-C9
ctgtttattccngccgcctacgggtccnaanaatcccggggtccgaccnacgccgtccgaaaaantcccaaccttggcaacaatctcctccccttcaagccgcatttgctaaagggcnaggtttggtcgcttcgggctgttagatcaatccgccattagggttttctggaaatcatcgacnngccgtgttgtctttctgtacaaagccgatgcccagactgcttttcgatatgcaacaggaaacaacactctatttggaaacgtgaatgtaaagtactttctccgtgatgtggatgctcctaaagccgagcctcgtgagccagaaaacaccaaggaagatgatgaaccacagagccagtggttggaccaagcaccaccgcttcaccaaccaacattaccgccaccaaacgtcaacctcaaatcctgtttgaagaaaccagttgatgacccgancagttagtaacaacaatggaaacggtaaccgcgcaaccgttagagtcaaattcatgttagg

SEQ ID NO: 16083 - DNA, 535 bp, Arabidopsis thaliana
  unsure at all n locations
  Clone ID: LIB25-036-Q1-E1-A5
ggnnnnnnnnggnnnganggttgctngcctntggtttgccgancntagggtcgaccaacgcgtccgcncacgcgtccgttcgtttttctctctttctcttctcgtgtaatcttttggtgttcttgaaaccacttttttttttgttaattcctctgtttccttggaattgttttctgcttttttaagaagaaaaaaacgatgaatgtggtgcggagattaacgagtattgcctctggacgtaatttcgtttcttctgataacgtaggagaaactgagacgccgagatcaaagcctaaccagaatcgtgaagaaacagagtctacggaaactacgtcgtacgagaaagattctgtctcttcctcagagaactctgatcatttaccaaaggaaatccgtgaggatatggactgtggaatcatcaagggaaatggaacagaatctggacggattattaccaccaaaaagaagggtttgaatgatcaanaagacaagacaatctcttacaggagctgaacatgtaattggcactggccat

SEQ ID NO: 16084 - DNA, 321 bp, Arabidopsis thaliana
  unsure at all n locations
  Clone ID: LIB25-036-Q1-E1-A7
gcccaancgtccgcttctctttgcgcagtcaatttgctacaacttagaaaatggcggcggctacttcatccatcgctccttctctttcatgcccatctccttcttcttcatccaaaaccctttggtcttccaaagccagaaccttggctctacccaatatcggtttcctctcgtcntcttccaagtctctgaggtcgcttactgcnaccgtcgctggaaatggcgccactggatnctcccttgccgctcgcanggtttcttcgtctgcggtcaaagcccctgtttctctcgattttgnganatctgtcnttaaanangaga

SEQ ID NO: 16085 - DNA, 445 bp, Arabidopsis thaliana
  unsure at all n locations
  Clone ID: LIB25-036-Q1-E1-A9
gcttcttcttcttcttcctctctgtatttttctcattctcttcgatttgtttgcttgctagtgactagtgagtgagagagtatggagagaagtactccggtgagaaagccacacacatcgaccgcagatctacttacttggtcggaagttccaccgccggattctccttcctccgcttctcgctccgccgttcgttcccaccagccatcggatgggattagcaaagtggtgtttggtggtcaagtcaccgatgaagaagttgagagcttgaaccgcangaagccttgctcagaacataaaatgaaggagataactggcaattgggatntttttctcgtaacgaaaaaagatgatgcgtcaaaagccattancagtttaacaagccaagcaantttaanggtataanccaagatatcantttggggaaaaaggaaaatccatccnc

SEQ ID NO: 16086 - DNA, 450 bp, Arabidopsis thaliana
  Clone ID: LIB25-036-Q1-E1-B1
tttttcacaatcaatcatttctttgttgcgaaccaaacttgtgatatggcgacaccgaatcaggaagcaatcgacactttcatcagcatcaccggcgcttctgacgccgtcgcccttcagaaactcgaggagcatcgtggtgatcttaatcaagcagtgaatgcatatttcagcgaaggagatcgaaatgtagtacgtgaagcgccggttaatgatgatgatgaaatggatatagatgatgtgattccggctccacaatctcctctctctatgttcaatgcagctagaacaattggccgtcctcccttttcgcttttggattcggactttgctagacgtgtatttgatagcgatcctcttatgccacgccctccgtttgttagtcatcctagagaggttaggcaagatacctatagaggttaaggatagcagtgggccatctggacgatc

SEQ ID NO: 16087 - DNA, 115 bp, Arabidopsis thaliana
  unsure at all n locations
  Clone ID: LIB25-036-Q1-E1-B10
nntcgctgaattcaccttaaacggagctaatggtctcgatttctacgacgtcagtctcgtcgacggttacaacatcccgatgaccatcgtccctcanggtggangagatgccgga

SEQ ID NO: 16088 - DNA, 441 bp, Arabidopsis thaliana
  Clone ID: LIB25-036-Q1-E1-B11
aaaccttcgtgctctttcttcgccgccaagttatatcgacggtgttttcgtatcgacgtcttctcctctctctctctctcgccgtcatcacctctttgaatgaacggcggacgcgggaaaaggcctaactcagcagaggaggaaggaaccatggctgaaccctctgtaaagaagagcaagttgacggaatccgattggataagtggtttagcagatgatttgctacttcagatcctctcgaaagtccctacgagggaatccgttttcacaagccgtatgtcaaagcgatggagaaatctctggagacacgttcctgccttggacttggactccagtaaattccctcatgagtcggacttggaagatttctttgatagctttctgcagtttgatggtaatcctaagatagagagattcaagtggattacaacgttgaagagc

SEQ ID NO: 16089 - DNA, 61 bp, Arabidopsis thaliana
  Clone ID: LIB25-036-Q1-E1-B12
gagcttaaggggaattttctcgggaaacaaaagagatatttttatcgcagtgagaaagaag

SEQ ID NO: 16090 - DNA, 421 bp, Arabidopsis thaliana
  unsure at all n locations
  Clone ID: LIB25-036-Q1-E1-B6
tggatgatgatgatgaccggtgcgttgtaccggaggtagagctcactgtacccaagaccgacgattcaactttaccggttttaacatttcggatgtgggttcttggtataggcgcgtgcattgtactctcctttatcaaccagtttttctggtacagaacgatgccgttgagtatcaccggaatctccgctcagatngccgtcgtgccgcttggtcatctcatggccagagtgcttccgacaaaaagattcttggaaggtacnangtttcaatttaccttaaacccgggttccttcaacgtccaggaacatgttctgagaactatctttgcaaattccggcgccgggtctgtttacgccactcncatacttantgcantaagccttactacnaacgttctcctcctttcctccccgcattt

SEQ ID NO: 16091 - DNA, 445 bp, Arabidopsis thaliana
  Clone ID: LIB25-036-Q1-E1-B8
gcgccactcttgactctctttctcttcttcttctcgagatcctgaaaatgtgactgacagattcttcaacttcactctcttcttcttccattcactgaactcaaaccaccccctgtgagctatgacccaccaaacccatcagcgtcgtcgccgtcgtcactccgccgtctgtcaccgtcatccttcttccaaacccaccactggtttctgtgccacctgtctccgtgaacgtctctctaccatcgaagctctatcttcctctgtctcagcttccactgagctccgccgtgttcgctcctactctgttcgtgacgcatccgcttctgttttggaccagccacgacgcagatcgtgtgatgttaggtctaatcacgacgacgatgatgatgatgagctgctaaagagctcgattcgattccccattgtaccggatttgatagaagag

SEQ ID NO: 16092 - DNA, 415 bp, Arabidopsis thaliana
  Clone ID: LIB25-036-Q1-E1-C1
gtccatggaagactggtttgagtggacaattgcagaaagcttttgttactggtgtacctaagctaaaccggtctgaactagaaacagcctgtgaagatttcagtaatatcattgaagcatttgatggttacactgtctataaaggaactttgtccagtggcgttgagattgcggttgcttcaaccgccattttggaaactagggaatggacaagagctatggaaatgacttaccgcagaaggattgatacaatgtcaagagtcaaccataagaactttattaatctgattggttattgcgaagaagatgaaccgtttaataggatgatggttttcgaatatgctccaaatggaactcttttcgaacatttgcatgataaggaaatggagcatcttgattggaacgcgaggacgag

SEQ ID NO: 16093 - DNA, 490 bp, Arabidopsis thaliana
  unsure at all n locations
  Clone ID: LIB25-036-Q1-E1-C10
ctacggtccanaaatcccggggccanccaagcctncgaanaagcctncgntatttttnnactngggaattnggaaaaactcccctccccccaaccaaaancaanggtggcttnaactngnactnctcgncctccgatttccctccgcngnggagaacaagaatcgtatcctcatcaccatcggcttcttctctctcttctcggcgggatgttcgccgtcttaccggaatcatcaggtttgagaatccgtctttctctctctccggcttcgttgacctcgattcatcaacctaagggtttctcgattacgaagagccgtcgtctgtgaagctcaagaaactactaacgatattcaaagtggtcaatgactcgacatgggaatctctaattcntaaaagcaactggggcctgtaattggtcgaattttgggcacaatnggtgttggaaccttgcaagatgattgattcgccttggtaaacgatntaacaaaa

SEQ ID NO: 16094 - DNA, 426 bp, Arabidopsis thaliana
  unsure at all n locations
  Clone ID: LIB25-036-Q1-E1-C11
gcccacgcgtccggatggaattgattgttgatttggatgatgaggtcatggagaactatttagaaggagttgagcctgacgaggccacggtaaagagattggttagaaaaggaaccatcacgggcaagtttgtgccaattctatgtggttcagcctttaagaacaaaggagtgcagccattgctcgacgctgtggtcgattatctgccttcgcccgttgaagtcccgccgatgaatggaacagatcctgagaacccggaaattaccattatacggaaaccagatgatgacgagccatttgctgggctagcattcaagatcatgagtgatccttttgtgggttctctacatttgtnaaggttactcagggaaaatctcagctggttctacttttgaatgctacaaaggaaanaaaggaaaaatccga

SEQ ID NO: 16095 - DNA, 465 bp, Arabidopsis thaliana
  unsure at all n locations
  Clone ID: LIB25-036-Q1-E1-C2
tgaaagagaatgagattgattcagctggagatggtgatgttttggtgattctggatctacgagcagatgattctttggttgaagcaggttttgcccgtgagattgtaaacaggatccagaaactaaggaaaaagtcaggtctggaaccaacagactttgtggaagtgtacttccaatcattggacgaggatgaatctgtttctaaacaagttctagtctctcaggaacaaaacatcaaggattcaattggctccactttacttttgtctaagtttaatgccatcacatgcagtcataatagccgatgagacattcaccccaaaagaaacatccgatgagagtgtcaaaaaggttccaaagttgtcgtataagataagtttggctagaccggctttgaagttcaantgaagaaggctgttcctgccttatactcaggagattnaaatctgcaaccggggcttcaaa

SEQ ID NO: 16096 - DNA, 455 bp, Arabidopsis thaliana
  unsure at all n locations
  Clone ID: LIB25-036-Q1-E1-C5
aacaacaccttgaccattattgatagtggtattggcatgaccaaggctgatttggtcaacaaccttggaacaattgcaagatctggaaccaaggaattcatggaagcactggctgctggagctgatgttagcatgattggtcagtttggtgttggtttctactctgcttacttggttgctgacaaggttgttgttactaccaagcacaatgacgatgagcagtacgtgtgggagtctcaggccgggggatctttcactgtgaccagagacacctctggggagactcttggtagaggaacaaagatggttctttacctcaaggaagaccagttggagtaccttgaggagcgaaggcttaaggatttggtgaagaagcactctgagttcatcagctacccaatctctctctgggattgagaagaccattgagaangagatntctgatgatgaanaag

SEQ ID NO: 16097 - DNA, 454 bp, Arabidopsis thaliana
  unsure at all n locations
  Clone ID: LIB25-036-Q1-E1-C6
aacaacaccatcaccaccaccaccggttcgcaagatccgaatctcgacccaattccagacccggatcaatttcccaaccggaaccgcaaccaaccacaatctcgccgccctcgcggattcgccgctgcagcagcagcagcgtcgatagctccaacggaaaacgatgtaaacaacggaaacatcgccggaatcggcggtggagaaggaagcagcggcggcggaggaggtggaggagggaaagggaagagagagagggagaaggaaanagagagaacgaagcttagagaaagacatagacgagcantcactagtanaatgctcgccggattaagacagtacggtaattttccgttaccggcgcgtgctgatatgaatgacgtaatcgctgctttggctcgtgaagctggttggagtgttgaagccgatggtactacttatcggcaatcacagcaac

SEQ ID NO: 16098 - DNA, 74 bp, Arabidopsis thaliana
  unsure at all n locations
  Clone ID: LIB25-036-Q1-E1-C7
tgcaancgccatgtacaacgtcctanccgcaatcactttcgtccttgcctatatatttgggcctccaaaagata

SEQ ID NO: 16099 - DNA, 455 bp, Arabidopsis thaliana
  unsure at all n locations
  Clone ID: LIB25-036-Q1-E1-A3
cnaaaccgatcaaatccatggctaactcttccgctggctccgccgcagaccaccgcaacaaacacctctccgtcaatccaccgcaccagatcttcaaagatatccaaggttctgacaatgcgattcctctttcaccacagtggcttctctccaaaccaggggagaacaagactgggatgggaactggggatcctaatcagtatggaaaccattcggatgttgtgagaacaacagggaatggggaggagacactggataatctgaagaaaaaagatgttttccggccatccttgcttgatgcagaaagtggtcgtcgtgatcgttggcgtgatgaggaaagggacaccttgtcctcagtccgaaatgaccgctggcggaatggcgacaaagactctggtgataataagaaggttgaccggtgggataatgtggctcctaaatttggggaacaacga

SEQ ID NO: 16100 - DNA, 528 bp, Arabidopsis thaliana
  unsure at all n locations
  Clone ID: LIB25-034-Q1-E1-F6
gnnnngnggaantgtntctntngcccgcncgtacngtaaccanaatcccgggtggncccacgcgtccgcggacgcgtgggttcgcatcctccacaagaagaaaattcgatcggtcgattagtctttgtttgatttcgaaatggctcgtactaagcaaaccgcgaggaaatccacaggaggcaaagcaccaagaaagcaactcgcaaccaaggcggcaaggaaatctgctccggccaccggaggagtgaagaagccgcatagattccgtccaggaactgttgccttgagagagatcaggaagtatcagaagagcactgagcttctgatccgtaagcttcctttccagcgtctggttcgtgagatagctcaggatttcaagacggatctgaggtttcagagcagtgctgttgctgctttacaagaggctgctgaaggcttaccttgttggtttgtttgaagacactaatcctttgcgccaattcacgctaananggtcaccatcatgcctaaaggatatccaagctcgcg

SEQ ID NO: 16101 - DNA, 446 bp, Arabidopsis thaliana
  unsure at all n locations
  Clone ID: LIB25-034-Q1-E1-F8
gcaaaaatcagtttctctttgagtaagtgtttattacaattaaactaactcaggcaagtctatgatcatggcttcttctgctgctgcatcgatctctatgataactctaaggaacctctctcgcaatcatcaatctcaccaaagcacttttctcggtttctctagatccttccataaccaaaggatctcatctaacagtccaggtctctccacacgagcaagatccaccacttcctccactggaggtttcttcagaaccatttgcagcagcagtagcaatgactactccaagaccaactaagatccaagagcttaacgtctacgagttcaacgaaaggtgatcgaaacagtccaagcggttttaaaactagggaaaaaaccagatcagcttgtctcggagatctggtccccttcacaaacaaactctacacaggngatttcacaag

SEQ ID NO: 16102 - DNA, 455 bp, Arabidopsis thaliana
  unsure at all n locations
  Clone ID: LIB25-034-Q1-E1-G2
ccatatctctctgtcttgatctctctctcactttctaataagatcaaagaagatgtcgaaagctaccatagaactcgatttcctcggacttgagaagaaacaaaccaacaacgctcctaagcctaagttccagaaatttctcgatcgccgtcgtagtttccgagatattcaaggtgcgatttcgaaaatcgatccggagattatcaaatcgctgttagcttccactggaaacaattccgattcatcggctaaatctcgttcggttccgtctactccgagggaagatcagcctcagatnccgatttctccggtccacgcgtctctcgccaggtctagtaccgaactcgtttcgggaactgttcctatgacgattttctacaatgggaagtgtttcaattttccaaagtgtctcgtaacaaaagctgggggaaattatgaaaggtcgcctaatgaag

SEQ ID NO: 16103 - DNA, 459 bp, Arabidopsis thaliana
  unsure at all n locations
  Clone ID: LIB25-034-Q1-E1-G4
aaacnaatctctcttctcaaagttttattttctctctgcgatggctcaagaagatgttactgctgttgctactaacggtgctggtccggtggagacgcatcttgtcttcactgagttcaagcagatgttgctcgttgaagctcaaaaggtcggtgacgctgttactttctacaaatctgcttttggtgcgatcgagtctggtcattctctttaccctaagcgtaagcttgaccaagagcttcctcatgttctctcttctgagcttaatctcgctggctcttccttcgttgtttgcgacgtttcctctctccctgggtttttctactgcgaaatcggaaggttcgggagtgacttttcttctcggaactaaaggatgctgaagcccgcccgttgcgaaaacctgttgacgcccgganctgtgaaantggaagttacggatggaagaanttgaactgggga

SEQ ID NO: 16104 - DNA, 445 bp, Arabidopsis thaliana
  Clone ID: LIB25-034-Q1-E1-G6
tacaaatcctactgccgtcaaaatcgattcaaagcgaaccagagattgaatggaagatgcagctgctccgaattcaggatccgaatttaatccaggagcaagacgcggcaaatctatcgatgaatgccaagacatgattcgtaggagtttccgaaacccaatagtgaagtttctgatggagcaaatggagaaatctgggtgtagagttggtgataatttcgttaaggctgttgtttgtactggacctgtagctggaggttacactaaaggaagagggataactgtctgcagtaactatctgaccattcaagatgaagtgaaccaagtagttatacatgagttgattcatgcttatgacgagtgccgagccaagaatttggattggactaattgtgctcatcatgcttgcagcgagattcgtgcaagtcatccaaaccgtgattgc

SEQ ID NO: 16105 - DNA, 442 bp, Arabidopsis thaliana
  Clone ID: LIB25-034-Q1-E1-G7
gctcgattcgaaaatttcacatctccggaattttcatttctggagaatattgtttcacatccctacaatggcgtctgagaatctgaatgacaagatctctgtttttaagaaactcaaagccaaatcagataataagatttgttttgattgcaatgcgaagaacccaacatgggcttccgttacttacgggatctttctctgcatcgattgctcagctgttcatcggagtcttggcgtccacattagcttcgtcaggtcaaccaatttagattcatggagctcagagcaattgaaaatgatgatatatggaggaaacaacagggcacaagtctttttcaaacagtacggatggagcgatggaggtaaaaccgaggctaagtatacctcaagagctgctgatttgtataaacagatacttgctaaagaagttgctaaaagcaag

SEQ ID NO: 16106 - DNA, 424 bp, Arabidopsis thaliana
  unsure at all n locations
  Clone ID: LIB25-034-Q1-E1-G9
tcccctcaaacttaaattcacattttaatacttgttacttcaactataataataataataatctttcttcattatatattttcctctcctctcagatcttctctctcaccatcttctcttgagatcaagattgagtattcttgtctcaagaatcgatactcgagagctcttatggaccaaaatggtcataacgacgaagcagaaacagtttcatgcggcaacggcaactgcaaaagcaagatcgtgcctggagatgatcacggtggagatgagagtagtggtaccaagagaaggaagaagagaaaaacgcaacanaagacaatgaaacgacgtgaattaatgtcgtattgtgagctaccggagtacatgaaagacaacgaatacatattgaattaatacaggactgaatggnccaataagaggg

SEQ ID NO: 16107 - DNA, 457 bp, Arabidopsis thaliana
  unsure at all n locations
  Clone ID: LIB25-034-Q1-E1-H1
taatcaatacatagctctttcggcaacgcaatttgcaaacacgtcagactcagagcttttccaatcagcgagactctctgcatcttctttaaggtattacggactggggctagaaaatggaggctatagtgtaacggttcagtttgctgagatacaaatacaaggttctaatacctggaaaagtcttggaaggcgaattttcgacatatatgtccagggaaaacttgttgagaaggattttgacatgcaaaaagctgctaacggttctaagtatccgagttattcaaagagtctataaagcaaatgtatcagaaaattaccttgaagttcatcttttctgggctgggaaaagggaactgctgtattcctgctcaangnacttatgggccattagtctcaagctatcagtgcaactccagatttcatacctactgttaaaaataagttgccctcnaaa

SEQ ID NO: 16108 - DNA, 449 bp, Arabidopsis thaliana
  unsure at all n locations
  Clone ID: LIB25-034-Q1-E1-H10
tgttgaaatagctaacagagatggtgttgcctgctctgctgtgaaacctcagaaagaacaagaaactggaaatgaagccgagaaaaggtttggaaaacctatcccaatggatattagcgaaagagcagccatctcgagtatatcaatcccaagtggggcagaaaacaatcattgtgtagtaggcaaggaagttttgccaggtgcacatgagattcaagccaaaccaagcgacaccctcactgatattcatcatgatgtagatagcattgaaactgttcattcgactcagggaggtgatgttggcaattcgatagttttggcaaatggattaaggtcagattcttctaaaggtactaaggaattctgatgatcccgaaggtccctccagaaatgagaaagangaaggtgaactgtcacctaatggtganttttgaagacaacnttgggtt

SEQ ID NO: 16109 - DNA, 460 bp, Arabidopsis thaliana
  unsure at all n locations
  Clone ID: LIB25-034-Q1-E1-H12
nggtggagaagccaccgaagttctatccagctgaagatgttaagaaacctctccccaacaggcgcacggcaaaaccaaccaagctcagagctagcattactccaggtacagtgttgattatccttgctggtaggttcaagggaaagagagttgtcttccttaagcagcttgcctctggtttgcttcttgtgactggaccattcaagatcaatggtgttcctttggagacgtgttaaccaggcctatgtgattggcacttccacaaaggttgacatttctggagtcaccctcgataaattcgatgataagtactttggcantgttgctgagaagaanaagantnaagacagaacgagagttcctttgaggctganaaaananganaagaangagatccacaggtgangaaangatgaccaagaaagctgttggatgcaacctttgatnaaaanccattgaa

SEQ ID NO: 16110 - DNA, 439 bp, Arabidopsis thaliana
  unsure at all n locations
  Clone ID: LIB25-034-Q1-E1-H2
gaggttcgagaaggttcatttagtgttagggttagctctggttctaactctggtcggagctccgaccaaagcccaaggacctgtttgcggtgcaggcctgcctgacaaatttagcagattaaacttccctgaaggcttcatttggggaaccgcaacagcagcatttcaggttgaaggagctgttaatgaaggttgcagaggtccaagcatgtgggatactttcactaagaagttcccacatagatgtgaaaatcataacgctgatgttgctgtggatttctatcatcgttacaaggaaagatatccaattgatgaaagaccttaacactgatgcttttaaactttctattgcgtggcccaaaatattcccccatggaangatgtctaaagggaataagcaaagtgggaatccaantctacacgactcatcgatgagcnt

SEQ ID NO: 16111 - DNA, 349 bp, Arabidopsis thaliana
  unsure at all n locations
  Clone ID: LIB25-034-Q1-E1-H3
aatgacatcatcgacaaagtggttagcatggggttcccaactggaccaagtgacnnggaacagtgagaacattgacatgagaacggtcacactgttgacctcantgttgttttatatanactgatgaatggagatataggagctatgatgcancagcagcagcatcaaccgccaagaggttggtttggnggtcgttanctgtgttgtctctaattccggtttggctgacattgtatacatcttttatctctcatgtcagatttcctcgancatatcttttggattaccttggtgtttcatttgtnacttcaagatnttttcacanatcggntttttaaaagggnngccg

SEQ ID NO: 16112 - DNA, 505 bp, Arabidopsis thaliana
  unsure at all n locations
  Clone ID: LIB25-034-Q1-E1-H4
nnttngccggccgtaccggaacgaaattcccggntcnncccacgcgcttaaagattcagtcaaaaaaaactttaatctttgttttcctgcaaaaagcaaaagtgtttctgtaataaaacacctttttgcagagaatgttaaaagattctctagttttaggctttatgtaaaaacgatttttttgctgggtgttctgtttttggatctgtgtttcttttttgggaagatccacccaatgaaaccaaatctcacattacaaaatgacaagaaattgtctcttcttcccaataattccaaaactttgatttagtaaaaaataaaataaaataactgggtgacttaacaaccagaaagattatgtattcttcaaagaagcaatcataacgcaattgattatatccccaaaagaaaaggnttttaaactccaaaaatgcagactccaaaatcaagggcaaggatnaatggagctgccacaaaagaagtctcccttaacaactcccaaagt

SEQ ID NO: 16113 - DNA, 451 bp, Arabidopsis thaliana
  Clone ID: LIB25-034-Q1-E1-H7
aataaacaaacactaacaatggtggtcgaagaagattcacgtctcataaatctccaacacaagtacaacccgacaatgcccgaggtggtggaggagctgaagagaatttgggacataagttttccggtggccgccatgagcatattaaactacctaaagaacatgacatccgtcgtgtgtatgggacgactcggtagccttgagctcgcaggaggagccttagccatcggtttcaccaacatcaccggttactccgtcctctctggtttagccaccggtatggaaccattatgtggtcaagccatcggttctaaaaacccttcactcgcttccttaaccctcaagcgaaccatcttcctccttctcttagcttctcttcccatatcactcctttggctaaacctcgcgcctctaatgctgatgctccgccaacaacatgatatcactccgt

SEQ ID NO: 16114 - DNA, 453 bp, Arabidopsis thaliana
  unsure at all n locations
  Clone ID: LIB25-034-Q1-E1-F5
ggccntctgcaatttctctccccgacgctgataaccctagcggcttcaaattacagtcgcttaacgccgagttaggccaccgagtccgatacgaacctgattcggtcgctgtcgcgaagatccccgtagttttccaatttctggaaagagacgaagaaacccttttccagatgcaatgcctaatggctgatggagctctaattactttagattccgacgatattttagctacagaacatgttttagcagttggtaaagagtttcccgatgtggaaacttgcagaagaactttgaaagatttggctatagctctgcattttgatcttcggattgtgaaatcaagatcgtagtcgattcatagccaaatgctctaaagaangttgtccttggcgtatccatgctgctaaatgtccangtgttcaagacattacggttangacgcttaataatgag

SEQ ID NO: 16115 - DNA, 457 bp, Arabidopsis thaliana
  unsure at all n locations
  Clone ID: LIB25-034-Q1-E1-D9
attctcagtttgcggaggagacgacggagaaggaccaagtaacaacaatcaccaatcccggaaaaggcaacgacttccttcaatcgatgaaaatgaagaagacgccgagacctccgacgccggaagttccggtgaagaagacgaagacgaaactcagaatcaaggaatgagaccagaatctgaggatcgaggatcaacgagcgatgataagcgatcgtgaaagttgtgattgangagagacgatttggtaaatttgtaaatagtcagagttcttcttcnagcaaagattcgnctctttctgtnacgttattggatccanatgttcttgattgtcctatttgttgcgagccattgaagattcctanccttcagtggngataatggncaacctggcttgtactttgtgccgcancaaagtngaggaacaangtgcccgtcgtgttacattaancggttg

SEQ ID NO: 16116 - DNA, 452 bp, Arabidopsis thaliana
  unsure at all n locations
  Clone ID: LIB25-034-Q1-E1-E12
aagtcaccgtcgtctcccgcagcggcagagaagtcctcaaagctccccttgacctccccgattcggcgactgttgctgatctgcaagaagcgtttcataagagagctaagaagttttacccgtcgaggcaaagactgactcttcccgtgactcctggatcgaaggacaaacctgttgtcctcaatagcaagaaatcactgaaggagtactgtgatggaaacaacaactccttaactgtagtcttcaaagacctgggggcacaagtttcctaccgcacactcttcttcttcgagtatcttggccctctccttatctaccctgtcttttactacttccctgtttacaagtttcttggttatggagaggactgtgtgatccatccggtccagacgtacgctatgtactactgggtgctttcactacttcaaacngattttagaaacgtttttcgt

SEQ ID NO: 16117 - DNA, 526 bp, Arabidopsis thaliana
  unsure at all n locations
  Clone ID: LIB25-034-Q1-E1-E2
nnnnnnngaantggtctgtttggcncggccgggtccgganattaacgggtcgacccacgcgtccgcccacgcgtccgcttcctcttcgatctctcctgaatcctcaaaccctggagagagagagagagagtgacgggggaagaagatgacttctgctttgtatgcttccgatttgtttaagcagctcaagtcaattatggggacagattcgttatccgacgatgttgtacttgtgattgcaacgacgtctttggcactagtagctggatttgtggtgttgttatggaagaaaacgacggcggatcggagcggggagctgaagcctttgatgatccctaagtctcttatggctaaggacgaggatgatgatttggatttgggatccgggaagactagagtctctatcttcttcggtacgcanactgggaacagctgaaggatttgctaangnattatccgaagaaatcaaagcgaagatatgaaaaagcaagcaatcaaagtcattgacttggntgactaatgctgg

SEQ ID NO: 16118 - DNA, 444 bp, Arabidopsis thaliana
  unsure at all n locations
  Clone ID: LIB25-034-Q1-E1-E3
ctgttagaagcagttgtcttcgtagttcggcaaacagacttactcaacacagaccgtttcttacttccgaggccatttgtttgaggaagaatcggtttctaccccattctgttgatacacataagcaaaacagcaggaggctcatttgttctgttgccacagaatcagttccggataaagctgaagattccaaaatggatgcacctaaagaaatatttctcaagaactacacaaagcctgattactactttgaaactgtggatctgagcttctctctaggtgaagagaaaacaattgttagctctaaaatcaaggtttctcctcgagttaaaggatcttctgctgcattggtcttggatggacatgacttgaagctactttctgtcaangttgaggggaaacttcttaaggaaagggattacanttggactcccgccaaccaag

SEQ ID NO: 16119 - DNA, 517 bp, Arabidopsis thaliana
  unsure at all n locations
  Clone ID: LIB25-034-Q1-E1-E4
nntngngantgtcnagnttggnncgnaccggtccgacattaacgggtngacccacgcgtccgcccacgcgtccgcccacgcgtccggagctacagctgatgtccaaaccgcattgaagacaggattcagtcatgtcaacattaacacatggcttgttgtgctacctcaaatcattgctaggatacattctaataatcgtgctgtcagggaactgattcagtctcttctcatccgcataggcgaaaaccacccacaggctctgatgtatccccttctcgttgcatgtaaatcaataagcaatcttcggagagctgcggctcaagaggtggttgataaagttcgccagcacagtggtgcactcgtggatnaggcgcaacttgtatcacatgaacttatcanggttgccatactttggcatgaaatgtggcatgaancactanaagaagctagtcncttgtatttggtgaacataacattgaaaggatgctgaaagtacttgaaccttacatgacatgct

SEQ ID NO: 16120 - DNA, 425 bp, Arabidopsis thaliana
  unsure at all n locations
  Clone ID: LIB25-034-Q1-E1-E5
gataaatctctccccgattctctctttttctcgctagatactctttttcttcaattagggtttcttctcgcttgccttttaattctctccagctgatctgatctccgttaccgatggagtctactgctaacgcactcgtcgtcaaggtgagctatggaggtgtgcttaggcgtttcagggtgcctgttaaagctaatggacagcttgatcttgaaatggctggtcttaaggaaaagatcgctgctctctttaacctctctgcggatgctgaattgagtctgacttactctgatgaggatggggatgtggttgcccttgttgatgacaacgatctccttgatgttactaatcagcgtcttaagttcctaaagattaaatgtgaacgctggggtgtccactaaatcctgctggtncaaaaanaagta

SEQ ID NO: 16121 - DNA, 452 bp, Arabidopsis thaliana
  unsure at all n locations
  Clone ID: LIB25-034-Q1-E1-E6
aagtgagcgtgttgatgcataacgaacgatgccattttccgcatcaatctcatcgccttcttcttctgtcgcgcttcttcgatcgcctctctctttcttcatcttcactcccaaaaccctaatcttcaccagaaccaggatctctggtttcccttatcttgcttcccggcgatcccgcgatttcatcaacgggagggatgatttcgctgacgatacgaggagctggaaccggaagatcaaaccggagtatgggttcgatgaggattacgatggagaagaagatgatgatgatcacgaggaagaagatagaagcttggatctgttacttagatttgtagaaaatgttttcagaaagattctaaganagcaangaaagtgtcccgattaaatttgcctggttccattctcaacgaagctcctgggggtttcaagtgaatggagtacttaatcct

SEQ ID NO: 16122 - DNA, 365 bp, Arabidopsis thaliana
  unsure at all n locations
  Clone ID: LIB25-034-Q1-E1-E7
tgactctgcaacagatcatcaagaggatgtagcaaatgggaacaaagatccagaggtaaaatatcaggctgccgattcttggtcagaccctacaacttcaactccattggtctgtacaaaatccaaacctccggtgagagatatggacaccaagatgatcgacgctcagtgatgtggtatgttacaacatttgaaaatcagcagagctttttagcttacaaagttacaatagtgatgtagatactattacacaatgacttctatggtaataaagggtgattatacgtaaaaaaaaaaaaaaaaaaaaaaaaaaaaaaaaaaaaaaaaaaaaaaaaaaaaaaaaanaaaaaaaaaaaaaagggngg

SEQ ID NO: 16123 - DNA, 496 bp, Arabidopsis thaliana
  unsure at all n locations
  Clone ID: LIB25-034-Q1-E1-E9
ttttccgcccctacggtcaagaattcncgggtcgacccacgcgtccgnaaacgtagaggccactggagaggacttttctgtggaaccanctgattccagaagacctttccgtgctcntcntgatgttggncttatcangactaccactggaaaccgtgtgtttggtgcactcaagggagctttggacggaggtcttgatatccctcacagtgacaagagatttgctggtttccacaaagagaacaagcaacttgatgctgaaatccacaggaactacatctacggtggccacgtctcaaactacatgaagctgttgggggaagatgagccgganaagttgcaaactcacttcagtgcttacattaagaanggagttgnagctganagcatcganganatgtacaanaaggttcangcatctanccgatcagaaccatcataagaaaaccgagaaatctgctcccaanggncacaacaagtacnacntgannaaact

SEQ ID NO: 16124 - DNA, 453 bp, Arabidopsis thaliana
  unsure at all n locations
  Clone ID: LIB25-034-Q1-E1-F10
aattattcangtgccgagtcaaaattagtgttgagaatttgctgcttctgatcagtgagtgaagaaagtttgaagctttgagtaactttgaaacaatggaggtatttggaaaatctcatgtggttgttggctctgctaatgttatttacttatctgctatattgggtcacgaaggacccaatcacaaatgtgattggaaatgcgagaatgagaatgtgtgtgggaatatgtaccgttgcaaactaactgggttgactcatgtttgtgacaagaactgcaaccaaaggattttgtatgataatcataactctttgtgtcgagctagtggtcggattttcccgctttctttggttgaggaacaggcggttaaaggagtgaggangaagcttgatgatgaagagtcaacaacaaccttctgaaaagttgtgttaaacgtcntccacgtnatgctca

SEQ ID NO: 16125 - DNA, 444 bp, Arabidopsis thaliana
  unsure at all n locations
  Clone ID: LIB25-034-Q1-E1-F12
aagaagattcacttccatctgcaaattccttcactccctgtgagctcaatanagagagaagaagagatgccgctcggaganagaggaggatggganaggaccgagtccagatactgcggcgttgagactgatttctccaacgatgttactcatcttctcaacttnaacatttccaccggnggttttgactatgttctcgctcctctggnggatccttcgnatangccgagcttggtggaaggaaatggtgtagatactcaggttcttccagtctgtggctctgacttagtcttgtcaccttctcaatggagcagtcatgttgttggaaaaattagttcgtggattgacttggattctgaagatgaggtctacggatggattcagaaaccacattgaagcaagaaataacttgggctactcatctctccntacaggcatgccttc

SEQ ID NO: 16126 - DNA, 516 bp, Arabidopsis thaliana
  unsure at all n locations
  Clone ID: LIB25-034-Q1-E1-F2
ggnngnggagtgtctcttngntcgccggtccgacataacgggtcgnccacgcgtccgttnagttntttttttaattagaaacaaatggggttgagtggtgttcttcatgtggaggttgaggttaagtctccggctgaaaagttctgggtagcccttggcgacggcatcaatctcttccccaaagctttccctaacgactacaaaaccatccaagttctagccggcgatggcaacgctcctggctccattcgcctcattacttatggagaaggatctccactggtgaagatatcggcggagaggatcgaagcagtggatttggagaacaaaagcatgtcgtacagcatcattggcggagaaatgttggagtactacaaaaccttcaaaggaaccatcaccgttatccctaaggatggtggtagccttctgaaatggtctgggtgagtttgagaaaaacgcccatgaaatcgatgattcacatgtcatcaangactttgcngtcaagaacntcaaaaa

SEQ ID NO: 16127 - DNA, 452 bp, Arabidopsis thaliana
  Clone ID: LIB25-034-Q1-E1-F3
aactcctctcaaaatatagaacaaaaatcggctgagtatagaaaaaagactattttcaagttcttctcataaaaacatggcggcttctgatagtagaaacaacagagcagatgaacctggttttgttgtgcaacctaaaggagagcatagagtcattatagtatggctgcatgataaggatgagcgttcctctgattcacttcagtttgtggaacaattgaatcttaaaaatgtcaaatggatatgtccctctctcgtgttccccgattcattcataaaaggagtgggaggtttaggaatgggtgcagcagtagctctccactttgcaacaagttgtgctcttaaccattatactataaatccccgagttgttgttggaatcagcgggtggctttctaattcggggagcctaaaacgcagtatagaatctgcttcacatggggctccaactc

SEQ ID NO: 16128 - DNA, 454 bp, Arabidopsis thaliana
  unsure at all n locations
  Clone ID: LIB25-034-Q1-E1-D7
gcgaaacacaaagcaatgggctcttcttctccattaacaaggagaaacagagcaccaccatcctctgtttcctctgtttatctaatctttctctgtttcttcctctactttttaaatttctcaaacgctcaatcatcgccggttttcgcctgcgacgtagctgcaaacccttctctcgccgcctatggtttctgcaacaccgttttgaagatcgaataccgagtcgctgatctggtcgcgaggctcacgttgcaagaaaagatcgggtttttagtgagtaaagctaacggcgtgactcgtcttgggattccaacgtatgaatggtgggtctgaaagcacttcacggcgtttccttacatcgggacccgggaacgcaatttttccnagccaaagtttcccggagctacgagttttcccgcaaggttatactcaacggccggcttctttaaacgta

SEQ ID NO: 16129 - DNA, 502 bp, Arabidopsis thaliana
  unsure at all n locations
  Clone ID: LIB25-034-Q1-E1-B5
tgtcngccgntctacggaacgacattcccgggtngncccacgcgtcaggaaagatctctctctccttcacacacacagatacacatggccatcgcgagcgggtcatgggtagccactgtgaaccaccatgctaatccccacagcttcacttctccgaccaaacccattttctttctttctcaaaagcctcacaatttccatgtctgctcgtctcgatgctctatggttcttgaggaagatgaaaagaagtcaccgagtcctaaagaagacaagtggccattttttgaacctggtccgaatgaccttaaccgggtcttatccaggtttctccgagacccggaaactcggaaactttcttctgaattctacgagaaagctaaggagaactctgaagttgagaacgaccaagcatctgataagttacttggtgagttccaagagttgggacttgcttgtttctgtttgtgangatnncaaggaacattaagcaattgctggatgg

SEQ ID NO: 16130 - DNA, 454 bp, Arabidopsis thaliana
  unsure at all n locations
  Clone ID: LIB25-034-Q1-E1-B6
attcctcctctctctcacaactatcaccaacaagaatcatgacgagctctgttagagagaagaagatcaagaccaacgggatttggttaaacgttgctgagaaaggagacgaagaagggcctttggttctgttactccatggtttccctgagacatggtactcttggcgtcaccagatcgatttcttgtctagccatggttaccacgtggtcgctccagatctcagaggctacggtgactccgattctctaccgagccacgagtcttacactgtgagtcacctagtcgctgatgtcatcggtttactcgatcactacggcactactcaggcttttgtggctgggcatgactggggagcaatcataggttggtgtctatgcttgtttaagaacaagaccgagttaaaggtttcataagtcctccngttccataattcccaaagagattcaaaaag

SEQ ID NO: 16131 - DNA, 489 bp, Arabidopsis thaliana
  unsure at all n locations
  Clone ID: LIB25-034-Q1-E1-B7
ttagtgttgagaatttgctgcttctgatcagtgagtgaagaaagtttgaagctttgagtaactttgaaacaatggaggtatttggaaaatctcatgtggttgttggctctgctaatgttatttacttatctgctatattgggtcacgaaggacccaatcacaaatgtgattggaaatgcgagaatgagaatgtgtgtgggaatatgtaccgttgcaaactaactgggttgactcatgtttgtgacaagaactgcaaccaaaggattttgtatgataatcataactctttgtgtcgagctagtggtcgggattttccccgcctttccttttggttgaggaacaaggcggttaaaagggaagttgaagggaaggaaagcctttgatggattgaagaagtccaaacaaacaaaccctttcctggaaaaagtttggttgtttaaanccgtccgtccnaacgttgaattgcctcaagtttcaattccctcctcc

SEQ ID NO: 16132 - DNA, 454 bp, Arabidopsis thaliana
  unsure at all n locations
  Clone ID: LIB25-034-Q1-E1-B8
ttaagtattccacacatacaaacacacacacacacttgacttttctcatataatttcgacagctcgtgaaggacaaagacatggagccttctcggaggagaatgaccagagacatgttgcttctaatcgtaacgatggcatggctcgtaaccggagacgaaggaggcataaagcaagaggagcgactgtttaatcttgggaagcttgagatgttcgttgacaagcttcctcatataccaacacttcatggctaccacttcgtcaatggcttcctcaaacccaaatctcttcacataggcatgttcttcaagaaatggaaattccacagagacttgcctgccaagccagtgttcgcatatgggtacatcaaaagcgttcaacaacagttcctggancaacaatagaagctgtttaaggcgtcgacanctacgtgacgtggcgaaatcaactccct

SEQ ID NO: 16133 - DNA, 53 bp, Arabidopsis thaliana
  unsure at all n locations
  Clone ID: LIB25-034-Q1-E1-B9
aggaatactttctggagatggtgaagactgganccaaatgctgatcaggctgt

SEQ ID NO: 16134 - DNA, 518 bp, Arabidopsis thaliana
  unsure at all n locations
  Clone ID: LIB25-034-Q1-E1-C4
tnnngaangtcngtttgnncgcccggtccgacntaacgggtngncccacgcgtccgcggacgcntgggcagagaagttgtttcaacttaccatcatatacttgcataagagaaggaccagatcatgctccaagattcaaagcttctgttaacttcaatggtgagatatttgagagtcccacttactgttctactctcagacaagctgagcatgcagctgctgaagtttcccttaatgtcctttcgtctagagtcccttcaaagtctctaactgctaagattcttgatgagacagggatttacaagaacctgcttcaagagacagcacatagagctggtcttgatctaccaatgtacacaagtgtgaagatcaggatcttgtcacttcccaggtttctcttgtactgttgaacttgctgggatgacgtttacaggagaatcagcaaagacaaaagaaacaagctggagaaaaacgcagccaattgcaacntgggcctccttgaagaaaaagtatatata

SEQ ID NO: 16135 - DNA, 423 bp, Arabidopsis thaliana
  unsure at all n locations
  Clone ID: LIB25-034-Q1-E1-C5
taacctggggaacctctacagacagaaaaagcagtacgaagtctcaaaggcaatgttctcaaaggcgttggaactcaaacctggttatgcacccgcatacaacaaccttggactcgtgtttgtggctgaacgcagatgggaagaagcgaagtcttgtttcgagaaatcccttgaagctgattcattgctagatgcagcacagtctaacttgcttaaagccacaaccatgtcaaggctctgtacttgcttctcttcttcaactgttgtccgagattcttgatgctctgtaatacttcttgtttcgttttgtggtttcacaactctcacattatgtgccttgaataatattaagtncaaagaccataatatcgccanaggctttgaaaactaanagncntatnaangntnngtggnnanngtgng

SEQ ID NO: 16136 - DNA, 513 bp, Arabidopsis thaliana
  unsure at all n locations
  Clone ID: LIB25-034-Q1-E1-C9
aaacatagtttcttcttgcttttgagaaaaaataattatatatttttatataggaaagggttaatttattaataaaaaaaaataaaaagaagcagaaaagagataatgcagggtggtaggcttttgacggtgttggtgtgcctcgcctccacggtggcgttggtgagcgccggtgacccttacttctactacacgtggaacgtaacctacggaaccgccgcgcctctcggaattcctcaacaggtgattctcatcaacngncaatttcctggtcctaaanctaaactcaanctccaaacaaacnaatgtcgtcaatcaatgtcntnaaacaanncctcccaacggaggccttttccctcctttgaacctgggaagttggggctnccaaacancaaggggnaagaaactccaatggggaaagnattnggtgtttnaccttggggggaacctccaaggccccaaatccccaaaccaagggcaaccaaaacntttnacctttancaaatttttcgg

SEQ ID NO: 16137 - DNA, 517 bp, Arabidopsis thaliana
  unsure at all n locations
  Clone ID: LIB25-034-Q1-E1-D1
gntnnngaatgnctgntggnnntccggtccgatataacgggtcgacccacgcgtccgcccangcatccgcggacgcgtgggcggacgcgtggggttcgttcccaaactcttctccctcgatcgtctccgtcgccgatctcgtttcttcattttccgcgtgttgattggtacaaaggtttaatcaaatggttggaggaggagttatccagcaaattcttaggangaagcttcactcccaatcacttgcaactccggttttgtcttggttttcttcgaagaaagctcatgaggatgctggttcttctggtgtaaagaacacttgccttgttgggtgctggtgttacaggactgttgagtttttccacagtagcatctgctgatgaggcttgaacatggattggagaatccagagtanccttgggnctcatgaaggcattcctagctcatatgaacatgcttcgattcgtcgtgggcatcaaagtttaacannaagtctgtngatcatgccaatcaattg

SEQ ID NO: 16138 - DNA, 431 bp, Arabidopsis thaliana
  Clone ID: LIB25-034-Q1-E1-D11
aacttttgtaatttaaggttcatcaaatactcagatcttgtctgagaaattaagctgaaatctgataaatgggtttgtttaaattcatcttcttgttatctcttctatggagtttctacagtttaggctcatctcagctacaagcttcacaagcacaagttcttcttcagctgaaaaaacacttagaatatccacaacagctagaatcttggtatgatcacagaaccaatttctgctacttacaagcaacaccatcgatgaacatcacttgtttctctaattcagtctcagagctaaacatcttcggtgataagtcatcaagaaaaagccaaaagctttgatggttttgctatctctaatgttactttatctgatggattctccattgaatcatttgtcactacactgtcaaggctaaaatctcttaaggt

SEQ ID NO: 16139 - DNA, 441 bp, Arabidopsis thaliana
  unsure at all n locations
  Clone ID: LIB25-034-Q1-E1-D3
gtccttaaactctctgtctctgaaacattcttcanccaaaccaaatggaaanatcactgtaatgggtcttgtttactgcgacgtcngctccaacaacagtttctccaatcacagctatttcattcccggtgtggaagtgagaatantctgcagattcaattcagcttcatcnanaactacanagatgattacgttctctgcaaatcgaancacaaatgagcttggactctacaagctanacataacgtctctggaaggcgttgcttgcgccgctgaagcaaanaaagatctctaatggcttcctgtcaagcaagcttgatcggtangtccaaaagattcctgcaacgttcctgggcntcaagaactacaacggagcaagtttgtgtttaaagttcaaagatatcctaatctcngtgtccaanggggtttaacngcgttaaa

SEQ ID NO: 16140 - DNA, 514 bp, Arabidopsis thaliana
  unsure at all n locations
  Clone ID: LIB25-034-Q1-E1-D4
nngngaatgtcngttggnncgccggtccgganactaacgggtcgnccacgcgtccgactnattgttcaaaagagacttctgatgcaactttgggatctgaagaaaaccaacaagataaggatcatcaatgcctcgacaagaaaacagcagatgtacaagatacaatgatagaggaagatgacattactcatgaagctccaagtttcgacccaaaccaaaaggaaaatgcagaaatggaagaaaatcacaacaattttgtttatgctgatgatgaagctggttctgatgttaagaccaatggtgtgaaacgaaaggctgatgtcctgagtgaggattcaccaggagaaggtaggaagactgtttcattcgccaaggtgtcttttgccgaaaggccgtcctttaaaattggtgcatgcataaccagggctgcaagtcagatggcaagattcccctcagttttgaagggtaataactttggtgatgaaactccttccngtgaaaatttggtanccaa

SEQ ID NO: 16141 - DNA, 451 bp, Arabidopsis thaliana
  Clone ID: LIB25-034-Q1-E1-D5
cctaacgtttactcgacttatctaaagccgtgaacctcgccggaattcttaaagtcgcgatttttccttaacgccgtttgattcccttacggcctttgaggtccaggagatagcaaatttgttggtgagtactgaaaaatggaggaagagaacgaagtagtgaagacgtttgcagagcttggtgtgcgtgaggagcttgttaaagcttgcgagagattgggatggaagaacccttccaaaattcaagccgaagcccttccttttgctcttgaagggaaagatgtaattggacttgcgcaaaccggttctgggtaaaaccggagcttttgcaattcctatattgcaagcactacttgagtatgtttatgattctgagcctaagaaaggacgtagaacggattctgctttcctcgcttgtgttttaacctccaactcgagaacttgcaatcca

SEQ ID NO: 16142 - DNA, 434 bp, Arabidopsis thaliana
  unsure at all n locations
  Clone ID: LIB25-034-Q1-E1-D6
accaccggtttattcgcctcgatcacctcggtcaaatcccattccgcaaaccgacctcaatccatctccctaatccgtcgaaaccacatcgatcatcgtctaccgttgatcgttccaagttccaggcggtggattatccaagcggcgagatcctgggatggatttgacgacggagctgaggcggagattaagaagccaggcgcgtatggttacgcgatcggcgataacgaagatcgaagggagcagtagtagtactgtccatgtgatcgacggagagcatgttaagacggcggagatagtgatatgggcggcggttacggcggcgtttggcgtcggaaacagagtgatgtataagctcgcgttagttccactcaaggagtatcctttcctccttgcgcaactctccaacntccgggtaagtanctgtatattaa

SEQ ID NO: 16143 - DNA, 512 bp, Arabidopsis thaliana
  unsure at all n locations
  Clone ID: LIB25-034-Q1-E1-B4
nngngaatgtcgttggccgccggtccganataacgggtngaccacgcgtccgcgcacagacaagaaaggcgtgtgttcattgttgaatcttcccatttcctcatccaaattccgacataactatcctagccgccatttgttctccacattacaaaaccctcagcagcttcaaaactcttccgatctctccctcacgctcgcaattctctcgtctccattttaatagtttttcttctcggaatcacaaatcttcggcttcntgttccttggcgtgtgtgtgtgttgttgaatggctcttgttcancggattccaatttcctcctccagtattcggaattggcaacaaagcgaggaccaatttgactcctanttgttgtttacattacaatactgcatcttcntcntcgtcaacctttanaagagaagcactctgtggagagatancaaagggatnaatggntgtacaaaancgggntgaancaacgccaacatcgannccatctccatcgcca

SEQ ID NO: 16144 - DNA, 346 bp, Arabidopsis thaliana
  unsure at all n locations
  Clone ID: LIB25-032-Q1-E1-H9
ngtaattgtctnggccggccctaccggtnngnnattcccgggtngncccacgcgtccgatcaaaatggacaacctcagtacccacagcagcaaatgatacctggtcagcagcagcagcaaatgatacctggtcagcagcatcctaggccagtttattacatgcatcctcctccttacccgcaggacatgccatatcataataaaggacgagagtaataactactactacccgatggtgatgatgttttttttttttgtgaaggaagtgtacgaacccctctctggttttatccactctcccttacccaatcactgaaaccattttcttctcaaaaaanaannngnt

SEQ ID NO: 16145 - DNA, 511 bp, Arabidopsis thaliana
  unsure at all n locations
  Clone ID: LIB25-033-Q1-E1-A10
gnnnnnngantgttctttggcccnccgggtccggaataacgggtcgnccacgcgtccganaaaaacatnactagctcacanaaaggaaatcatattttgatttaatttgtagtgtctctaatggcacggtttgagccatataactataataatggtcatgatcctttctttgcacacattaaccaaaatccagagctaatanatctggacttaccagcttctaccccttccagtttcatgcttttctccaatggngctttagttgatgccaatcacaataattctcacttcttcccaaatttattgcacggtaatacganaagaaaaggnaataaagaagagagtgggtcgaagagaagaanaaagaggtcggaagangaagaagccatgaatggagatgagactcagaagccaaaagatgttgttcatgtccgagctaagagaagtcaagctactgataaccataatttggctgaaaagggtccgaanngacaaagatnaattgaaaagg

SEQ ID NO: 16146 - DNA, 476 bp, Arabidopsis thaliana
  unsure at all n locations
  Clone ID: LIB25-033-Q1-E1-A12
atggcgtctcgaagagttttatcatctcttctccgttcatcttccggtagatctgccgccaaattagtcaaccgaaaccccaggcttccttctccttcacccgcgcgtcacgccgctccatgtagctacctcctcggccgcgtcgccgagtatgcgacctcttcaccggcaagctctgctgcgccatcctctgctcctgctaaggatgaggggaaaaagacctatgattacggtggcaaaggtgcgatcgggcgtgtttgtcangtcatcggtgccattgtcgatgtgaagattcgangatnangaaggatgcctcccgattaatgacatctcctgaaggtttaanggatnaatcccaacaaaggctggtggccttgaanggtgtcctcaatcaantttggggttcaaaaaatgttcgtttaaggaaccaanttgctaattggaattggtaacctgaaaggggtccttgttccgnt

SEQ ID NO: 16147 - DNA, 450 bp, Arabidopsis thaliana
  unsure at all n locations
  Clone ID: LIB25-033-Q1-E1-A2
aaagacttggtattggatggaaactgtagaagcggggcatgatgatgttattggttggttcgagcatgtgtcggaaaatgcctgcaaggtccaaagcgagacgctacgaaggattcttgagctcaactccggagtggagtatctgaggaaatggcttgggactgttgatgtagaaaagatggacgattatactttggaaactctctttacttccttggtgcctattgtttcacatgctgatttagatccttatattcaaagaattgcagatggagagacttctccattacttacacaagaacccatcactgttctgtccctcaactctggaacaacagaagggagacaaaagtatgttccgtttactccgccataacgcgcaaactactcctcaagatttccgantatcaaccggcttacagatnaaaggtttatccaataaagggaaag

SEQ ID NO: 16148 - DNA, 339 bp, Arabidopsis thaliana
  unsure at all n locations
  Clone ID: LIB25-033-Q1-E1-A3
nnnnnnnnnngnaactgtttgtntggcccggcccgntccggaaattaacgggtcgacccacgcgtccgggtgagctaagagcttgaagaagtcaaaagtatccatattgatgcctagcttcggtcctcggtttaggctaggaaggaaacgaagaagtttctgcaaaccgatgcagatcatcaatggaataatgaaatgttaattttatcatttactcatataggtttccgcctcattatcatttacttgatgtttctcctaaatcttgtcatttaattgactaaggaaataacgaagaaattatcatttacttaaaaaaaaaaaaaaaaaaaagggcgg

SEQ ID NO: 16149 - DNA, 510 bp, Arabidopsis thaliana
  unsure at all n locations
  Clone ID: LIB25-033-Q1-E1-A4
gnnnnngaangtctgtttgnccgccggtccggacataacgggtngnccacgcgtccgcacanccattaattctgctgctgcaaattctatcgaactggtgagttttgttaatctctttcctcgttcgtccttgtctgtatatcagatcgatctctattaccgttttagcttgttcttgatctttgtcaacataaaaacaatcaaacaaagtttcttctatgagttctggtctgaacgaagatttcctcgattgtatcgtgcgtttagaggagacacatgttcaacaaggcttcgatgagggttacgaagaaggtcttgtgtccggtcgtgaagacgctcgtcatctgggtttgaaactcgggttcgagacaggcgagctgattgggattctacagaggttgctctgctcnttggaattcagctctccgtattgattctacacgcttctctcctcaactccataagcatctcaatgatttccatgtcctgctcgataaaatcccgcttttg

SEQ ID NO: 16150 - DNA, 445 bp, Arabidopsis thaliana
  unsure at all n locations
  Clone ID: LIB25-033-Q1-E1-A8
ntgacacctttggctgagcgagtcagctttttgacagagcaactagctttctacaccggtcctacattgggtggtctattgaacgcaacgtgtggaaacgcgactgaattgataatcgcgattcttgctttgaccaataacaaagtcgcagtggtgaaatattcgctgctaggttcgattttgtcgaaccttttattggttctagggacttcactcttctgtggaggaatcgctaatatccgaagggaacagcggttcgaccggaaacaagccgatgtgaacttcttcttacttctactgggtttcttgtgtcacttgctgccattgttggtgggatacttgaaaaacggagaggcttcggctgctgttttgtccgacatgcaactgantatatcgcgaggcttcagtattgttatgttgatcagctacattgcatatcttgttt

SEQ ID NO: 16151 - DNA, 501 bp, Arabidopsis thaliana
  unsure at all n locations
  Clone ID: LIB25-033-Q1-E1-A9
tgttgncctaccggtccganatcccgggtcgnccacgcgtccgggaaaagccaccgcagctgacagaggatacattaagtacaaagatcctaaagtagcggtcgaagaaagagtagaagacttgctgatacgtatgacgttaccggagaaacttggtcaaatgtgtcaaattgatcggttcaacttctcacaagttaccggtggtgtggccactgttgtgccagaaatcttcacaaagtacatgatcggaagtgttttgagcaatccgtatgataccgggaaagacatagcaaagcggatattccagactaacgcgatgaagaaattgagtccttcgacgaggctcgggatccctctgccttacgccgttgacnccggtcatggncacaatactttaatgntgncaaccaattttcccccaaaatgtncggncntgggggcncccanggantccccacttnttnaaaaaatttngggcanaaaccnncccaggaatttang

SEQ ID NO: 16152 - DNA, 450 bp, Arabidopsis thaliana
  unsure at all n locations
  Clone ID: LIB25-033-Q1-E1-B2
angagatcggagacatggcggagagtcacggtggtggtggtggttgctgtccgccgatggatctgatgcggtcagaaccgatgcaactcgttcaagtcattgttcccatggaatctgctcatcttaccgtctcttatctcggcgatctcggtctcgtccagttcaaagatcttaattctgagaagagcccatttcaaaggacttatgctgctcagataaaaagatgtggggaaatggcacgaaaaatacgtttctttaaagagcaaatgtcaaaggctggagttactcccaaagagaccctagatagagaaaatgatattgatttggatgatgtanaggtaaagcttgaagagcttgaagctgaacttgttgaaatcaatgctaataacgacaagttgcagcggtcctataatgaacttgtggagtacaagctccttcctnganaaagng

SEQ ID NO: 16153 - DNA, 522 bp, Arabidopsis thaliana
  unsure at all n locations
  Clone ID: LIB25-033-Q1-E1-B9
ngnnnnnnnggaantgnntgcttggccctaccggtccgaaattcacgggtcgacccacgcgtccgggtttacctcccgttcttgaagcttccactgcgttttaccatcttttatcattcgttgattcgtctctccatagtcatttagtagaactcggagttgaacctcagtactttgggcttcgctggttacgagttttgtttggaagagagtttttgcttcaggatttattgatagtgtgggatgagatattctcagcagataacacgacgagaacagatgcggataacaatacaaaccagagctacaagatctttgattctcctcggggagccctaaccccgggaatgggaantttcaatgatattaaggttnaagattaancattggcttgcnactggaaaacgcagcttctggtctcaagaaactattgaatttccaaaagaaagattgatgtnaaggagatatagagaaaagctaagtcattacaaactttggctttgggtgaagaagtacgataac

SEQ ID NO: 16154 - DNA, 429 bp, Arabidopsis thaliana
  unsure at all n locations
  Clone ID: LIB25-033-Q1-E1-C1
ttagtttctttctactccatttcttgattttgtggtgtttcgtttagaaatagaaagacgaaaacagaaattagggtcaaacaaacttggaccaagagtaactttttttgtggaaatttttgtactcagattatttatcatgccgttatgagatttctctgaaactgagctatttttcaggaatctgagtttcgatttcactgagatgttcgactcctactctctttatcccaccggaaaactatctccggtggttgattcgtacgtcaccgccgagctcgacggcgaaagatatgagagacgactacgcgtttttaaaagccnggtttaaaagacaacaaatcccagttaacccctaagcaaaacgcatcctaatccgngaagacccnnatcaaagagaatccnagatttaagcctcctaacggctng

SEQ ID NO: 16155 - DNA, 484 bp, Arabidopsis thaliana
  unsure at all n locations
  Clone ID: LIB25-033-Q1-E1-C11
ncttcttcttcttctctctctctctttcttcttcgtcttcgatcacagaagacagaattcaatgtcgtcgacctacaagctcaatcacactgattcatttgcaaatggagatgcaaagagtttgttgccgaacccagagaatggtttcactcatttgacttcacttgctcaatcagagaaggctgttcaggagcttcttcttcaacagactcctatgcaggctactgacgaccatctcgttgagttctctgaggctttgagaactgttgcaaaggcactaaggggagctgctgaaggaaaggcgttggctcaagctgaggctgctgaatgggaagcgtagatacgagtttagaagaagggcctaaagaaacgtnggagtttgcaagcataaaagaaactggtcaaaatgggaantgttgttgnccgaatgnaatcctaaatgggtcaaaaagggatnggagcaactttagcnaaaagttctccc

SEQ ID NO: 16156 - DNA, 451 bp, Arabidopsis thaliana
  unsure at all n locations
  Clone ID: LIB25-033-Q1-E1-C12
tttttttcangatttctgataatcagacagacagacacaaacaaacaccggtatcgacgaacggaactaactccgatatccaaaacccactccaagtttcacgaacgaagggcttagtatctgccatggctcctgatgcttctactgctcttgcagcgagggagaaagttcagcaaatcctgaatgcagcttgtaccggaaatctcgaattccttaagaatgttgctaagcagcttgatgaaggaaaagacttgacgaaaactgtggagagtattaaagacgcaaacaaacgtggagcgcttcacttcgctgcgagagaaggacaaactgaaatatgcagatatcttttggaagaactgaaactcaatgctgatgcaaaagatgaaactggtgatactccgcttgttcatgctgcgaagcaagggacagattgaaacggttaagtatcctt

SEQ ID NO: 16157 - DNA, 450 bp, Arabidopsis thaliana
  unsure at all n locations
  Clone ID: LIB25-033-Q1-E1-C5
cttattgttaggtttggggtcacaaaaagatcgcctttggtttcggtgttacctcaatggttctggcatcagaatgcctgcaaggtttttgaacaagacatggggtttctatcgtctcaaaatgaggttctgatgaaggagaaagtaccaactaaggacttgtatttgaatctaaagtcatcggacacatgggtcgctgaatatagaaagtggatggncaaagttggtcatgggatgccttaccatttcgggcataggaccatatctctccccaaagtccctccctgtcgtggaacatgccccggcaagggctcaaatgcaactctctccggcttcctaancctgcaaaaaggcnngaanttggaactaaancaatgctccccaatttggctaaccggtacttcangacaatatantcattgtaaaanctgcanaatgtnattaantctt

SEQ ID NO: 16158 - DNA, 469 bp, Arabidopsis thaliana
  unsure at all n locations
  Clone ID: LIB25-032-Q1-E1-H7
gaanagcaactggggcttacagtcatagccagggtatcaagggtttacgtgatgtaattgcagctggaatcgaagcacgtgatggtttccctgctgatccaaatgatattttcttgactgatggtgcaagtccagcggttcacatgatgatgcaacttctcttgagctcagagaaagatggtattctttccccgattcctcagtatccattgtactcggcttcaattgcccttcatggtggatctttggttccgtactatcttgatgaagcaacaggatggggactggaaatatctgaccttaagaagcanctagaggaagctangtccaanggcatctcctgttaagggccttggttgtcataaacccggtaacccaactggggcaaggttcttgcgggaagaaaaaccaacgtgacattgttaatttccgcaagcaaaaagggtttggtccttttannctgaaggaa

SEQ ID NO: 16159 - DNA, 448 bp, Arabidopsis thaliana
  unsure at all n locations
  Clone ID: LIB25-032-Q1-E1-F6
ggtccatcaactaccccaactgcagaagctggacagtccctctttctctaagagttcggcttcgttcccaaagatggtgttcgattcgaggagttcgatgagccctggaacggatgccgaagactggacgtgggagaccgtagcggccaagagcaagagtagtgaaagtgggactgtccatcaactaccccaactgcagaagctggcaccttggtgttgagacctctaacatcataaacttcgacacggtgcccgcaaattgcaaagcctatgttgaagactacttgatcacttccaaacagtaccaatacgactccaaaactgtaaacaaagangcatatttttacgccaaaggacttgccctaaagaacgataccgtcaatgtttggntntttgncctaaacgaaaatctcctcncnagtattccctactacgccaaatatggtag

SEQ ID NO: 16160 - DNA, 457 bp, Arabidopsis thaliana
  unsure at all n locations
  Clone ID: LIB25-032-Q1-E1-F8
aaacctctcttctcctccgccgtagacacttcccgtctcttcctcaccgtcgtcaacaactgtcccttcactgtctggccagccattcaacccaacgccggccaccccgtcctagagaaaggtggcttcgctctcccaactttcactcaccgctccttcaacgttccaaccacacactggtccggtcgcatctgggccagaacctggtgtgcccactacaacggaaaattctcctgcctcaccggagactgcggaaaccgcctggaatgcaacggtctcggcggggcaccaccagcttctctagctcagttcgacctccaacacggtggtcaacacgacttctcctcttacggtgtctctctcgttgacggttacaatgttccgatgaacgtnaatcctcaanaaaaggcaaggngtcgtcctgtcgttggntgtcntnaagattcaaaaaaaaagg

SEQ ID NO: 16161 - DNA, 216 bp, Arabidopsis thaliana
  unsure at all n locations
  Clone ID: LIB25-032-Q1-E1-F9
gcagcggcggcggcgttaggcttcacgtcggcggattaggagaaagcgtcgggagagatgatcttctcaagatattctctccgatgggtaccgtcgatgccgtcgaattcgtcaggaccaaaggtcgttcctttgcctacatcgatttcccctcaaccttcaacaattnaatcaacaaagcncttctcnacatanaatggaatttnncnggaaagg

SEQ ID NO: 16162 - DNA, 441 bp, Arabidopsis thaliana
  unsure at all n locations
  Clone ID: LIB25-032-Q1-E1-G10
aattcacctgagaaaaacaatatcaatcggctcgttttctctcctcagtgtttcttcagtagtcctgcgagatcgtataagagattcgaaaccctaatctatcaatttgatcctgtccattctctgtgtaatattgtttgagaattgtgcaatccgatggggacgatgcaccggagtggtgctcccaaaaggncaaatgaaaatgcgaagcttatcataacgacaatcgtgggagtggtgtttggtttttttgttggtatcacattancattangttcctttagaaagattagcttancttcaaggcntaagtcatctcctgatgtanccatgtcagatgggaaatttttttccggggggnagattacctgaagatattggtcaagaaantcncctaagatatatgttccaaccaatccgcatggtgcagaatactcctcc

SEQ ID NO: 16163 - DNA, 354 bp, Arabidopsis thaliana
  unsure at all n locations
  Clone ID: LIB25-032-Q1-E1-G2
cttccttttnncacanctctcttcttcaaattcaatcatcatnaanntcgaatctttattcttcagagagcttcaanggcgancacatcatcaaacccattactactttcttcaaatttcctcggttctcaaattataatctcagctccaacaccaaaaaccacnacnaagtctcttcctttctcagtaatctctcgaaaaagataccaaatttctcaatcggagaagctaatgaantcgttacatcacaagctgcgttagcaagctctgttggtcgcatcttcatctcaanaagctttngcagttaacgaaccagttanacagcagnaacaancattactggctggaagctca

SEQ ID NO: 16164 - DNA, 86 bp, Arabidopsis thaliana
  unsure at all n locations
  Clone ID: LIB25-032-Q1-E1-G3
naccgaagaaaagtagattgaagatnggagagtcctctgntttctttacatatgtcaaatctactgtccttagaactaangggtca

SEQ ID NO: 16165 - DNA, 531 bp, Arabidopsis thaliana
  unsure at all n locations
  Clone ID: LIB25-032-Q1-E1-G4
nnggggnngnaactggttntctctgccntgccgtccggaaatcaanggtcgacccacgcgtccgcccacgcgtccgggcttctgaagatactctctcctcgaatcctctattgcagaattttgacttccctccgtttgactccgttgatgctcaccatgtcagacctgggattcgtgctctgttgcagcagctcgaagctgaattggagcacctagaaaaaagctgtnaagccttcatgggccaaaactagtggagccattagagaagattattgatcggttatctgttgtttggggaatgatcaatcatcttaaggctgtcaaggacacacctgagcttcgtgctgccattgaagaagttcagccnggagaaggtgaanttccagctcaaggttgggacaagagcaaaaccccatttacaatgcatttaaggntattccaagaatctccagactggaattcattganccaaanccgtcaacgattaattnaancccaataaaggagcggttctaaatggtattgccccta

SEQ ID NO: 16166 - DNA, 53 bp, Arabidopsis thaliana
  unsure at all n locations
  Clone ID: LIB25-032-Q1-E1-G6
ggcggggttcatttgtgttatgggaaancaaganatgttgattgccgaattgc

SEQ ID NO: 16167 - DNA, 447 bp, Arabidopsis thaliana
  unsure at all n locations
  Clone ID: LIB25-032-Q1-E1-G7
tgttttcttcatctccacaaagataactaaatccgatctcgtcttcgcaatcatcaaccatcaatggaagttgaagaagaagttaaacaaatcatagatgaggtcaaagagcttcatgactccgccgcttctttcatctcatcttcttctcaacaagagctctctctccgtcaaaaagcctccgccgttgattcctctatccgtcgtctccactctactatcgtctccaacaaaaatctcgatcctaagctcgtcgaaaagcttgaggaagatctgcatcgtgctagatgcatgcttgttgacggagaaacatcttcatttctcccatccaaaccacaaaggacgctttgtgagaatgttttgtggacctgtgaatgttcgagctttgcgtaaagatgttcancttaaagttaaagaagaatacaatcgttacagagacaanatgcc

SEQ ID NO: 16168 - DNA, 484 bp, Arabidopsis thaliana
  unsure at all n locations
  Clone ID: LIB25-032-Q1-E1-H1
ggatnctccntctctccgtcagacaaatctacgaacaagcgagcctgagcttaagaccaaactcatagagatgggtttcttctcttttcttggaatagttctcttcgcttctctctttancctctccgcttggcaaatgttcaatgatggtggtcctgcagctaaagaattggctccaaagcttgatttggttaaggcacatttatcttctagattaggagtaacattgcccaaaatagaggtgagacaagtcgttgctactattattgccctgaaaggagtcggaggcttactctttgttatcggaaacaccttcggtgcttatcttctggcttcctacttggtggttttcggtcctattcctcctatgatttccacaaactacgggacctcaaggaacgtcaatttccctccttccggttgaacaagaagttccttgcaaganncgtttgcaactccntttgggagcgtttactccttcntt

SEQ ID NO: 16169 - DNA, 461 bp, Arabidopsis thaliana
  unsure at all n locations
  Clone ID: LIB25-032-Q1-E1-H11
actccactgcgccgttccgggattcgttgagagcaaaatccgatggattggctcgggcctatgttaccggagcgccgcctatcgtggaagaaccagacccaaagattgaagaatccaaatctgaggctgaatcgaaggatttaattagttgggggcttctgtggagcttgatgagcaagcacaagctcaggctcagtgtttgcttattgactctccttggatgcagtacttgcactctctctatgcctgttttttctggtagattctttgaagtactgattggggtgagaccggagccctttgtggcggctgctgaacaaaaattgctgttttgtactccgttgggaaccatccttaactaatgcctttgtgaccaacaatgactggctatcctggggaaaaaacgttaatgggaataataaagangctcaaaatttttcaagaaaggggtttttgattca

SEQ ID NO: 16170 - DNA, 522 bp, Arabidopsis thaliana
  unsure at all n locations
  Clone ID: LIB25-032-Q1-E1-H2
nnnnnngaantgtnttgtccgcctgntctaccggaccgacattcncgggtggnccgtccgcggacgcgngggttcgtctttcttcctcagtcgccctacaatggctttgcctttgtctggcacgcgccacctcacgcgcgctctcctctctaatgtcactcttatggctcctcctcggattccttcctctgttcactacggtggatctcggttaggttgttcgacccggttcttctcaattcgatgtggagctaaccggtcaggttctacttactcgccgcttaactctggctctaactttagtgatcggcctccgacggagatggctcctttgtttccgggatgcgattatgagcactgggcttattgttatggataaacctggcggggaangcgcgactaagcancagatgattgattgttacattcaaaccctagcgaaatcnttgggaagtgaggaaaaaggcgaagaaacgaatctacaatgttcatgttaaaaggtattaaggtttggttgttaaa

SEQ ID NO: 16171 - DNA, 467 bp, Arabidopsis thaliana
  unsure at all n locations
  Clone ID: LIB25-032-Q1-E1-H3
agaagaagatcttgcagagctagcacgtgctacagaggagctgaaattgaaacaagaaactcctgaccctcctgaagcattgagatgtgtcccaagtttgaacttgggtgacattccaaaagaacctacttatgttcccaccgaggttggagatattaatggtgtgaaggttttgcggcatgaccttttcaccaatgatattatctatactgaagtagtctttgatattggttcgctgaaacatgagcttcttccactagtaccacttttctgtcaatcattactggagatgggcacaaaagatttgacttttgttcaacttaatcagttgattggaaggaaaacgggaaggatatcagtttaaccccttacatcatcagtnaaggggtaaaggatgaancatgcaagcaaaattaaccgtacgccggaaatccaaggntgggccttcctgaacgaacntttttaac

SEQ ID NO: 16172 - DNA, 402 bp, Arabidopsis thaliana
  unsure at all n locations
  Clone ID: LIB25-032-Q1-E1-H5
tgggtgttcatggtgacggcgcaaactccgacgaacattgcggtgattaagtattggggaaagagagatgaggttcggattctccccgttaacgatagcattagcgtaactcttgatcctgatcatctctgcacagtcaccactgttgccgttagtcctgcttttgatcgggatcgaatgtggctcaatggcaaggaaatatctctttctggaagtaggtaccaaaattgtttgagggaaatacgangtcgtgctggtgatgttgaagacatggaaaaggggatcaagataaggaagaaagattgggagaaattgatctacatattgcttctcataataacttccctactgctgctggcttancatcttcagctgctggatttgcttgccaatttttccctt

SEQ ID NO: 16173 - DNA, 508 bp, Arabidopsis thaliana
  unsure at all n locations
  Clone ID: LIB25-032-Q1-E1-H6
ngcttgccctgntctaccganacgacaagctggcctggccccacgcgtcngctcatctcttcttttcttcatcgtctttccaaccttcacgttttcctccaccttattgtttcagagtttcaattgggagtcatggaagaaagaaggaggattctacaattctctccacaactccattgacgacatagccaacgctggaatcactcatctttggcttcctcctccttctcaatccgttgctcctgaaggttacttaccgggaaagctatacgatctaaacagctccaaatacggttcagaggcggaactgaaatcgttaatcaaagcgttgaatcaaaaaggaataaaagctttggctgatatagtgattaaccacagaacagctgagaggaaagacgataaatgtggatactgttanttcgaaggtgggacttccgatgattgtccttgattgggatcctcctttgtcngccgcaatgacctaaatttcccggtaccggaaacctcg

SEQ ID NO: 16174 - DNA, 535 bp, Arabidopsis thaliana
  unsure at all n locations
  Clone ID: LIB25-032-Q1-E1-F5
nggnnnnggnngntttgtctgcctgggtntaccggaacgactattcccgggtngacccacgcgtcagganaaagctctttgttcatctctctatcttcttctccatcctcttcatcactctcccatcttcttacagctgcaccgaaaatgacaagaatgccctccttcaaatcaagaaagcacttggcaatcctccccttctatcctcctggaacccccgaaccgactgttgtaccggctggaccggcgtcgaatgcactaaccgtcgcgttaccggtctcagcgttacctccggcgaagtctccggtcagatctcgtaccagatcggcgacctcgttgacctccgtacactagatttcagctacctgccacacctcaccggaaacatcccacgcacaatcaacaaactcaaggaacctcaacactctctacttgaagcaaaataantctctccggtccggattcccggatnnnataagngaagctcaannancctcaagnttcttgggccttttctttaaccaattttacgggg

SEQ ID NO: 16175 - DNA, 451 bp, Arabidopsis thaliana
  unsure at all n locations
  Clone ID: LIB25-032-Q1-E1-D4
gaggagctaataataatatggctgctttgaagatgactatctcttgtttcttgtttcttcaagtaatatattgcttgctctcttcatttgctccaacaaatgtgcaaggattgaaagttggattctacgacaaggcatgccccaaagccgagcttattgtcaaaaagtctgtcttcgaggctgtgaagaatgatcggacaattgcagctcctttgctcaggatgttcttccacgattgcttcgttaggggatgcgaagggtcggtattgctagagctaaagaacaaaaaagatgagaaaaactcaattcctaacctcacccttcgaggatttgagatnatagacaatgtcaaaggaagctctagaaaangagtgtccgggcaatgtttcctgcnccgatgtattggcccttgtcccaaaaaccaatggtncgcccatggacctcttggaag

SEQ ID NO: 16176 - DNA, 458 bp, Arabidopsis thaliana
  unsure at all n locations
  Clone ID: LIB25-032-Q1-E1-D6
aaaaaaaaaaaaaacgctcgcctacttctcttctctctcaccatagagatagtttcaagctccaaaagttcttcaatcagattctggaaactaggttgttggtagaagttatggtgagaaatgaagcttagattgagatttaagttatgggttgtgtatttggccgagaggcggcgacaacaacaacagctgaagctaaacaagctaagagctctaaagctagtagtggagtagtagtagtaggagagagtagtgtgactaagagtaatggagttattgctgatgatgtanagaagaagaagaatgaggaggcaaatggtgataaagaaaggaaatcatccaaaggagatcgaagaaggtcnacaaagccgaatccgcggttgantaanccttcaaagcattggcntggtnaanaggttgctgccggttggccttcttggctttcagaccttgggggg

SEQ ID NO: 16177 - DNA, 512 bp, Arabidopsis thaliana
  unsure at all n locations
  Clone ID: LIB25-032-Q1-E1-D9
nnnnnnnnnngttntttgccggcctaccggnaaggaaatcccgggtcgncccacgcgtcnggtttcgtggtttatcgggtgacactttggtgagagggagagtatttgtgaaagaaatcaatggatttagattttgatgatcaaccctcggatcatgctgcaccagcagttagggctggtgcaaggtttaaaccaaaaggcagaccacaacccaagaagaagcaagtctctctttccacaacccaaacaacactctcccctgatgttgcccaggaaaaactctcaacacaaagtgaagatctcgtccctctagacggatcatcggagattcccagcaatgctttaccttctgagactaatgtgccggatagtggaagtattaacaaaatctaccattggaacattatcagaagaagatgaagatgcattcccaaagangggttcantggtcctgtgaaaccatctattcttccgtgcntgtaataaccgtgaatttggtgggaaataaacgt

SEQ ID NO: 16178 - DNA, 436 bp, Arabidopsis thaliana
  unsure at all n locations
  Clone ID: LIB25-032-Q1-E1-E10
gcaagatcttagtgacggatcctgattcagtgttgggtcctctcacccgtgagatcaaagaagttgggcctgatgggcaacgaggtgactaaggttgtacctgctgttacggaagaantgaaagatgcacttgtgaagaacattaggaggagaatgacaccacaaccaatgaaaatccgggctgatatcgaattgaagtgttttcagtttgatggagttgttcacattaaggaggctatgaaaaatgctgaagccgctggaaatgaagactgtcctgttaagattaaattggttgctccacctctgtatgtccttactactcagacacttgacaaggaacaagggattgaaattctaaacaangccatagcagcatgcactgagacaattgagacacacaaaggcaagcttgtcgttaangaaggggctagaactt

SEQ ID NO: 16179 - DNA, 441 bp, Arabidopsis thaliana
  unsure at all n locations
  Clone ID: LIB25-032-Q1-E1-E11
cttcaccgatcttcctcgtttggtctcgaatattaagtgaaatatgggtttcataatggaattcgcggagaatttggtgttaaggttaatggagaatccagaggaacgagacaggaaagcgagggaacacatatatgagatgcatgagaggtgcaagaagattaaggagatgtgggcattgcctattcgtccttatggattctggacatttgagcgtcacaatgctcagcttcgttgggatcctcagatcagtcaggttgctggtcgaagggatccttatgatgatcttctcgaggacaactacactcctccttcttcctcttcctcatcttcagactaatcaaacaatgaaagaagatgtgttatgctgtctggatggatgcaagtttgttttcaagctanttttcccggatttgtccgcctccggttccaattggtcct

SEQ ID NO: 16180 - DNA, 450 bp, Arabidopsis thaliana
  unsure at all n locations
  Clone ID: LIB25-032-Q1-E1-E2
gttcgactcggtaaaatcacgattactttctccttccatttatcacgatcgtggatccagaaactctgaaagatggcgtctgagctgacaaaccggcgacacgagatagagcaaccagaagcggaatcttattatccaaagccgataaagccatggttcgtagcgattcgtccgatccgttacatgctcagagaacagagactcgtcttcgtcctcgtcggcattgccatcgccacattaggattcacantcttctccaaatcatccaaccaccaaccaattccttacgacgtggattcgctttccggatacggaatgcgatcggagtcatcgtatctgccagcgacgattcataagaaaccaagcatcgaantacatgagcccgattnggttcggnaggcggcaaaatccctcctaaggcttgaaacggaaaantgctaaagggttgtt

SEQ ID NO: 16181 - DNA, 449 bp, Arabidopsis thaliana
  unsure at all n locations
  Clone ID: LIB25-032-Q1-E1-E5
cgtcgagtgaagaaccagtgaagcataagtagcagagacagagagagatacgtgagtgtgtgtctgtgtttttcgctttttggctttcttcgctgattccacgaacggcgtgaatcgacttttctccagatctcatctctttcagtgtttgattctgtcaaaatctgcaagcgaatcgagatttctcagatctcgttttcgcttgcacgagattcagatctgatagtgtcggtgttcaattttctcaaatccaaatggagaaaccggagagcgagaanaaatcggcggtgtctgatgtcngtgcatgggctaatgaaatgtaatcaagctccgttgggaatcatcaatggctaataaacaagctcaagtctcccccgggnttccggttttggctttgcnanaaagtttaannggaatntcantttgaattcagggcccctggttgggga

SEQ ID NO: 16182 - DNA, 526 bp, Arabidopsis thaliana
  unsure at all n locations
  Clone ID: LIB25-032-Q1-E1-E6
gggggtggangntttgtccgccctgggtntaccgnatacgatnatctngncctggncccacgcgtcaaggaaatttcttagtccttttttgttcaatttcttgtctttttgcttgttcctttccaattttgacttcttaagagagaggctatgtgcattttctttatgggtttggttagatttctangtttgagtagctcaaatctaatatttggtataagctttgtgtttctggtttgttttgattactttgattcaggtcttgaaatgattcttctcgaacttctttttttcttgtttaagcagcaaaagttatggtttatacaagagttttgagtttaaaattctctgccttttcaggtgaataaagcggaggtcacgaagatgggttctggtttaaatgacacattatctcggaactacaatggtttggagctatggggagataatagtgattgttctctccgcganattcgttgtagtttagctanagcgctatgggcttacnttcagaagaannnactct

SEQ ID NO: 16183 - DNA, 581 bp, Arabidopsis thaliana
  unsure at all n locations
  Clone ID: LIB25-032-Q1-E1-E7
nnattttctggngttttgggcccctggggcccgnttaaccgggggaanaccgggaaaaaattccgcggggcgctcgnanccccaaacgncggttcaaaggcccccaaacgnccggttcccgggntccctggtccctcctgggtttttctggntgggggtttggccaaaggaaaacggnttttaatggnaacaaactggttggttacaaacggccggtttcaatcccccgggggttttttccaaaaaaaagggggaattnaatttgccctcctttctggttctccttcgaacaaattcccttttccaaattgaaatcctttccgggaagaaacttgtttgggggaagaattggggcattgtcaattaccttactcagctgttagagaggagattcagattttgatgagaattgtgttggtgctactaactggttactggattgaatgatgagatatctgatctgtccctgttgcattnagtgcaaactctacactggtaatgggntgaatattcatgancaanattcaaggttttgtcacattggatccanaggntttannnactaaaaacctgtcnangtg

SEQ ID NO: 16184 - DNA, 458 bp, Arabidopsis thaliana
  unsure at all n locations
  Clone ID: LIB25-032-Q1-E1-E8
nttcagaataagaaccaagagttgatgaaacaaatagaaatctgtcaggaagaaaacaaaattctagaccgaatgcacaggcaaaaggttgcggaggtggaaaagcttactcagactgtacgggaactggaagaggccgttcttgctggtggtgctgctgcaaatgccgtgagggattaccagcggaagtttcaagagatgaacgaagaacgaaaaactcttgaccgggaacttgcgcgtgcaaaggttacagcaaacagagttgcgacagtggttgcaaatgaatggaaagatggtaatgataaagtgatgcctgtgaagcaatggcttgaagaaagaaggtttctacagggagaaatgcagcaactccgcgataagcntgccatatcagatcaactgcgaaatctgaancacagctaaaaagacaagtttcaactacgacttaaattgcttgaaga

SEQ ID NO: 16185 - DNA, 236 bp, Arabidopsis thaliana
  unsure at all n locations
  Clone ID: LIB25-032-Q1-E1-F1
attggnatggnatngnatngggntttgatttgttaaaatggggggtagtttccgggtttgggttgtagcaggaagctaagtttgtcaagttaataagagtattttagtttttttgtaaatcgatttgtgggtcacatcctacgatcganagtccatcttgtaattgnatctggggatttacagattcagtttttttggttgtgttcnactagaagaatcgtctaggtgtgttntnt

SEQ ID NO: 16186 - DNA, 449 bp, Arabidopsis thaliana
  unsure at all n locations
  Clone ID: LIB25-032-Q1-E1-F11
gcttncctaacaaatgttgtttcaatcaaacctacaatcttctcattccagtccgaatccttcactcctttgcatacacgggtcaatgtattctcctcgaaaccctttccttctctcgctggaactttctcccggagctctagaacgagattcattccttatgctgtaacggagacggaagaaaaacccgccgctttggaccctagttcagaagctgccaggcgtgtgtatatcggtaacatacccaggacggtgaccaatgagcagctcactaaacttgttgaagaacacggtgctgttgaaaaagttcangtgatgtatgataagtantcaggaanaagccgtcgatttgggtttgctacaatgaaatcagttgaagatgctaatgccgtggttgagaaattgaatggcaataccgttgaagggcgtgagataaanggtaacattnc

SEQ ID NO: 16187 - DNA, 455 bp, Arabidopsis thaliana
  unsure at all n locations
  Clone ID: LIB25-032-Q1-E1-F2
gccaattccaccgctgcgacgagagaggagcacagagatctctcgtttcgtttttcccggaaaatctgaggaaataaaattaagcaaaagtttccatcgatcctctgagaaaaaattcgactctctagtccacgagttttttttttgttcacctctctctttttcgttaatctctctcaaacaacgcctcttcatcatttccttgtaattcactttcttctccgttttttttttttttgaatctctcttcgtccttcgccgtttcgatttcttgtttcctctacttgatgatgaaattttgatcaagatctagtgtagaatagttaggatttacccagagagattatgtttaaggatcgagagagacggagttctggtcgtaatgggactccctgaatatagcaatggnaaaattccgagatgataatgggttttggnttcctaaattgaattgg

SEQ ID NO: 16188 - DNA, 478 bp, Arabidopsis thaliana
  unsure at all n locations
  Clone ID: LIB25-032-Q1-E1-F4
cgggttctcttaaagattaagagagccaaaacgaagcaaattaatctgccttcaatggcttcttcagcagcagccatcgtctccggttctccatttcgttcttcaccattaatccataaccatcatgcttctcgttatgctcctggatccatctccgtcgtatctctcccccgtcaagtttcccgccgtggcctctccgttaaatcggggttgatcgagccagacggaggaaaactcatgaacctcgtagtcgaagaatcacggcggcgcgtgatgaaacacgaggcggagacggttccggcaagggttaaagctgaaccgtgtggatctaaagtgggtacatgtgcttaagcgaaaggctgggcaagtcctctcaaaagggttcatgaagacaantcagaagttnctcccaaaacaactttaanttttaaactccgtttccnggntccgaaaaaacggggtcccgttcgttnaaaaa

SEQ ID NO: 16189 - DNA, 454 bp, Arabidopsis thaliana
  unsure at all n locations
  Clone ID: LIB25-032-Q1-E1-D3
agcaaaggagaaaaaaaatggtgaactatgtgctcaaaatcaccgctgatctcgagaatctcactaatctccagccttccggtggctgcgacgattccaacttcccttacctcttcaagttgaaatgtgaaagatgtggagaggtgactccgaaagaaacatgtgtgactttgaatgagacttttactcctccgggaggtaggggtacttgtcatcttgttcagaagtgtaagttctgtggaagggaagggaatgtgactatgattccgggcaaaggtcgacctttaactctggaagattctgaggctggagaacatgcccctcttatggtgtttgactgtcgtggctatgaanccaattgatttcggatttggtggatattggaaaactcaagcctgaatctggaaccaaatttgatgaaaattgattgtcaaccgggaagaatcacagatnc

SEQ ID NO: 16190 - DNA, 444 bp, Arabidopsis thaliana
  unsure at all n locations
  Clone ID: LIB25-030-Q1-E1-H3
ttatttctaacaagatatataacaatggcaagagttcagctatttttatgctttaccattctttttgcatcagtgactcttctggacatcgtttcagctcatttgaagcttaagccaactttgcctcagattgaacctccacaaacgttgaaggatgttgaaccttacaccgttaaagtagtgatagtctttgtgtccgacctcgagaaagaatgtcccaagacaaataaattcaaggctttctttgagaaacttagggcattcgccaagtatgtctgcccaataaaaagaaaagaccaagtagattacgaccgagacatgaaggccaaggctggaggctcttcaagtcatatcctcctttgcgattgggaaagataaaaaaggaantcaagagggataaatggaagttataataccttaagtttaagagattctgcgactaaa

SEQ ID NO: 16191 - DNA, 499 bp, Arabidopsis thaliana
  unsure at all n locations
  Clone ID: LIB25-030-Q1-E1-H4
cccggccctgtcggnaantacacngggtcgacncacgcgtccgattttacagaagaaagtgaaaagaaagagagaaaggggaagaagaaaaatgtataaatcaccattaacgttgctcacacttcttactatttgttttggattcttcgatctcagcagtgctctttatggatcttcgtcacctgtggttcagctcactgcttctaactttaagtccaaggttcttaattcaaatggagttgttttggtagagttctttgcaccatggtgtggtcattgcaaagctctaacacctacatgggagaaagtggctaatattctgaaaggagttgctactgtggctgcaattgatgcagatgctcatcagtctgccgcccaagaataaggnaataaaaggttcccaacaattaaaggttttggtcccggaaaaggcccaatccaataacaangagccaganatnccaatccaatgccaaatttgcctaaaaancagatncag

SEQ ID NO: 16192 - DNA, 224 bp, Arabidopsis thaliana
  unsure at all n locations
  Clone ID: LIB25-030-Q1-E1-H6
ctctatctctctctctatctctacttattatttcttaagttaaagaaacagagattaaaaaataaaaagccttctcgggttgtttaaaaatacngtntcaccgcagtaattaatttaaaaattactgtcgatgacgtggcatgcacttaaaangaaacagccatgattacaaaaacgatgcgtcttctccnatgccgagttanntcnggcggngtcgcnggtaa

SEQ ID NO: 16193 - DNA, 428 bp, Arabidopsis thaliana
  unsure at all n locations
  Clone ID: LIB25-030-Q1-E1-H9
gattcgacaaaagctaaaaataaaataaaagaagaagcaaaaccctagagctcaaggtaatcgccgtcgatttctcaatctctcaccggcgattacatgccgatgaaagttgtacaatagctgctgtaagagagagatttatcaggtatttttagaatcatgtatagagacagaggaacggtgaattcgagacctgaagttgtggatcgtaaacggatcaacgacgctcttgaacgtccttctccttcaacctctcgtcaagttaacggcaaaggcaaaggaaccgttacggcggcgacgacgacggcgaacttgattgggaagcagcagtcgaataacatcaaccatagagattctcgttctgcttctctctcgaagaacaatacggtttctgatgatgaatcagacacagatagtgaagaatcang

SEQ ID NO: 16194 - DNA, 439 bp, Arabidopsis thaliana
  unsure at all n locations
  Clone ID: LIB25-031-Q1-E1-A10
tcttagagggatttttgattgagattttaaaattttctgagttggattagttggttggtaaagagatggatccggatacggtgaagtcgaccctctcgaatctggcattcgggaatgtattggcggcagctgctagagattataaaaaggaagttcttgcaaatgaaaaggcacaaggatcaagacctgtcaacgaggaagttgatcttgacgaattgatggatgatccagagctagaaaagttgcacgcagataggattgcagcactcagganagaagtggaaaagagagaagcattcaaaagacaangacatggtgaataccgagaagttagcgaaggcgacttcttgggagaagtcacaaggagtganaaagttatatgtcacttctaccacaanggagttctatcgctgcnagataatgnacaancattttaana

SEQ ID NO: 16195 - DNA, 444 bp, Arabidopsis thaliana
  unsure at all n locations
  Clone ID: LIB25-031-Q1-E1-A11
gaaccctagctttagattcgtcagattctgattactcgaatcaaagcagggtttttgacactaaaaatccgatctcgtgaagtgtgttttgcatcgaatcggaaaatatgaaagaagggaaatcatcgaagtcgtcgagtcaacaagagcagcatgaacagatttatcatcaaaacagtcacttgggttctttcaacttcgccaaattgtttgattctgaagcttcctgggacaaggatcaactgggagatgtgttgcattggatcaggcaagtagttggtttactctgcggattgttgtggggtgcgatacctttggtaggaggcatatggcttcttcnatttcttgcaatctcctctggcatagtatatggttactatgcattggttctaaagatcgatgaanaanacttcggtggtcacgcanctttgctccaggacgtct

SEQ ID NO: 16196 - DNA, 539 bp, Arabidopsis thaliana
  unsure at all n locations
  Clone ID: LIB25-031-Q1-E1-A9
gnnnnnnngnttnnnngaantggtntgcctgggcccttttngtnggccaaaacggtccggnaanncccgggtcgacccacncgtccggtcttctgctaaaatcgcgaaagagatatcttacgaatctccacaagtgcgaatttcgaacggagctacgattccatggcgaccaacggagagaaggtcacggctacggtggtgaatggcggagggctatctactggtgaaaaccctaagaaaattgtagacctcaacactacggagttagatcgtactgacgacattctcgacggagaagtcaagggattttcagattctggtgaaaagaaggaagaaaccgactctaatggtattggatcgacggctggtgttgattctggggatatctctccggtcgatgatatccagaagaagattcgacgtgctgagaggtttggtgtttcggtgaaattgaccgaagaggagaagcgcaattctcgtgctgagaggtttggtactgtagctgcaacagtggtgaatggctcananggaacgaagaa

SEQ ID NO: 16197 - DNA, 447 bp, Arabidopsis thaliana
  unsure at all n locations
  Clone ID: LIB25-031-Q1-E1-B10
gaaaacgaacgaatcagtgtcggctcttgggttccgaacaaaaacaacattgtacgtcggatccaaaaaacgcgcgttatataaacgcttaatttctccaggattcttcttctgcttccgccattgctcgaaaatcgcgtcttctgacaatgtgctgaaactgagtcatcgtccgagttagcaaagtgaaacttcgaagtttctcttacactaatctcaggtttgggattttgtaagaaaccgcgtttacaaaatgttcaagttgaagcaatggttgatttatttggtgtgttcgttagtaataatgaacacagaaggactgtttgtcaatattacatttgttcgaaacgcagtcgctaaaggggccgtttgtttagatggaagtccaccagcttatcatttggatagangttctggaactggaatcaataatttggntgatacaac

SEQ ID NO: 16198 - DNA, 444 bp, Arabidopsis thaliana
  unsure at all n locations
  Clone ID: LIB25-031-Q1-E1-B11
tactgcgctgtcaggaataatggctcgtcattatgctctcagagatggctattcagagcagatagcagaagctttgctggaaattacacttcctagattttctggagacgtcatcccaaaaacagatgcaggaatggttttggcaataggtgataggtaaattgaaagcctaaagttttgttgtctctcccatttctttctacgccaaacggttcgtcctgtgaacacaaaaccttgtatctggattgcgcggagctaaattgtatatgcttctgatatgataatttttgttcgaatttgtgatcctatatactaacacctatgcttgtccctatgactgtagattggatagccttgttggtttatttgctgctggttgccagccaagttcaacaaatgacccttttggccttagaagaatatcatatggcntaataagtttat

SEQ ID NO: 16199 - DNA, 463 bp, Arabidopsis thaliana
  unsure at all n locations
  Clone ID: LIB25-031-Q1-E1-B2
ttcaaagctaagataagcgggaaaggaggccacgcagctcttccgcagcataccatagatccgatactgggcagcttcaaatgttantgttagcttacaacacctcgtttcacnagaggcagatcctttagactctcaggtggttacagttgctaaatttgaangcggtggtgctttcaatgtgattcctgactctgttactatcggtggtacattccgagctttttcaactaaaagctttatgcaactcangaaaagaattgagcaggttatcacaangcaagcgagcgtgaatatgtgtaatgcaacagtggatttcattgangaggagaaaccttttttcccaccaactgtaaatgacaaagccttacaccagtttttcaagaacgtttcangcgatatgttagggattgagaattacgtcgagatgcaaccattaatgggatcagaaagatttctcctt

SEQ ID NO: 16200 - DNA, 55 bp, Arabidopsis thaliana
  unsure at all n locations
  Clone ID: LIB25-031-Q1-E1-B3
ntctaatgtcacagtggcagatganactgatattaacttgatcgaggaatataag

SEQ ID NO: 16201 - DNA, 460 bp, Arabidopsis thaliana
  unsure at all n locations
  Clone ID: LIB25-031-Q1-E1-B5
aatctccgccggtttcttctctcgccggcgttttgacagtcgtcgtcantgttaccgtctcaaaagcttactatttcagttataaaaaanncaatcanagagctaagagatcttcttctttcatcctcgtcgttcttcttcgattttcttattantattttaataatttcctagagatctccacaataaaaaaattgggggttatcgttgccatcataacgtgtattagtanagcagtagtagtgctgatgtatttgctcacgantaagtcncattcctcgtctcntctttttcttcnccttaattagtttgggcaacacgatcacagttgantccttcacaatcgatttgttaaattaagaaatcattttcntctctctctctctctctctgtctaaaatatctatcggttgaanaagatctgaagcgtaactttgctctgttncagactctcaaggat

SEQ ID NO: 16202 - DNA, 328 bp, Arabidopsis thaliana
  unsure at all n locations
  Clone ID: LIB25-031-Q1-E1-B6
ttcagtttttttcatcaaanaagagcgtcttcataaacgcccttcgtcttcttccctggaaatctagtttctttcttccacaaaaatgaganagtgcagttcgatccacattggtcacgctggtatccangtcggaaatgcttgctgggagctgtactgtcttgaacatgggattcagcctgatgggacatgccgagtgacaagactgttggtggacgtgacgatgctttcaataccttcttcagtgaaancggtgcatgtaagcacgtcncacgtgatgtctttgttgatcatnatcnaantgtgatngacnaggtcangacnggta

SEQ ID NO: 16203 - DNA, 96 bp, Arabidopsis thaliana
  unsure at all n locations
  Clone ID: LIB25-031-Q1-E1-B7
gattctctgngctgcgaagcgaaccgggaagcggagatatccttctgagaggaggaanctgaggacagancagaaggaagctgtggctaangttaa

SEQ ID NO: 16204 - DNA, 452 bp, Arabidopsis thaliana
  unsure at all n locations
  Clone ID: LIB25-031-Q1-E1-B9
gctccgagggaagatcagcctcagatcccgatttctccggtccacgcgtctctcgccaggtctagtaccgaactcgtttcgggaactgttcctatgacgattttctacaatggaagtgtttcagttttccaagtgtctcgtaacaaagctggtgaaattatgaaggtcgctaatgaagcagcatctaagaaagacgagtcgtcgatggagacagatctttcggtaattcttccgaccactctaagaccaaagctctttggccagaatctagaaggagatcttcccatcgcaaggagaaagtcactgcaacgttttctcgagaagcgcaaggagagattagtatcaacatctccttactatccgacatcggcctaaacgatctctttttagattgggacatggaccaaatttgtctttttcaatccggnagacatccatgttcgtttttggat

SEQ ID NO: 16205 - DNA, 445 bp, Arabidopsis thaliana
  Clone ID: LIB25-031-Q1-E1-C10
tgattacccattacgaatttgcagagaagaacaaatcctctctttcttcttcctccgtctctctacccctttcatgtcttctcaagtctacgactctcatccagggttgttggtgcatcaaaccctagtttttgatttcgcttttgagatttctcatgcttctttcgtttcggatctctctctgaatcagattacgtcttttgggctcttgttgttgttgtgctgctcttcaatctcttctccgttgcgttctatgtgccaaatatgagtgaaaagaaggtatttgtgtttggatcctttacagaacatgaaactaggtcattttttgagcagaaacccactaaggatcctcagaattctaaagacaagtgtgtgggaagtattcaatttggctccttgaatcttgctgcggaaaattcttcagtaaatactaatggcgagttga

SEQ ID NO: 16206 - DNA, 552 bp, Arabidopsis thaliana
  unsure at all n locations
  Clone ID: LIB25-030-Q1-E1-H2
ggntnngggaagnatntatcttggccggccgtgtccgganataaacggggtcgaccnaacgcgtccgtcancttccttcttatcattcactcacgacactaaccatgaccaaattctccgagccaatcagagactcccacgtggcagttctcgcgtttttccccgttggcgctcatgccggtcctctcttagccgtcactcgccgtctcgccgccgcttctccctccaccatcttttctttcttcaacaccgcaagatcaaacgcgtcgttgttctcctctgatcatcccgagaacatcaaggtccacgacgtctctgacggtgttccggagggaancatgctcgggaatccactgggagatggtcgagctgtttctcgaagcgggtccacgttatttccggaagcgaaatcnccggcnggaagaagatagaagttgggnaaagaaaagttgacatgcaatggctaaacaagaatggcctttcctcctgggtttcgcaaacgggacataaaccgggctgaagctgaaacgccnaacttggggtttgcccttc

SEQ ID NO: 16207 - DNA, 471 bp, Arabidopsis thaliana
  unsure at all n locations
  Clone ID: LIB25-030-Q1-E1-F2
atctacaaagaagaaggaatctggaaagtcctcagttttgattgatatcaaaccgtgggatgatgagactgacatgaagaagcttgaggaagctgtgaagtccattcagatggaaggtttgttttggggagcatcaaagcttgtcccagttggttatggtatcaagaagttgcagattttgtgcaccattgttgacgaccttgtctctantgacaccatgatcgaagagcaactcactgttgaaccgatcaatgaatatgtccagagctgtgacattgttgccttcaacaagatatgaaggatggaagaaagccttcaagggaatgtccggtgttcatgtggtccgggttcctcctcctcctccnaaaattccagtttccccaagtttttggnaaactgttggttttgactccngttaagggcctgccaanctccngattcaantttganaatttaatggaaaaantgaca

SEQ ID NO: 16208 - DNA, 102 bp, Arabidopsis thaliana
  unsure at all n locations
  Clone ID: LIB25-030-Q1-E1-F3
acagcntgnantgcttgaggaatttagtgtagcagaacaaggtgaatacgaacagcgcacagaagctggattctccagtnaaaatgcaaatgctgctataag

SEQ ID NO: 16209 - DNA, 69 bp, Arabidopsis thaliana
  unsure at all n locations
  Clone ID: LIB25-030-Q1-E1-F4
cgacctatcatctgactggcagattcatgtctcacatcacgaaaactnatganagattnggcttgatat

SEQ ID NO: 16210 - DNA, 442 bp, Arabidopsis thaliana
  unsure at all n locations
  Clone ID: LIB25-030-Q1-E1-F5
agaccctactaagtttgtcatcaccctacagccatatctgaagagtcaggctgatagtagaacaggagcacagttactggagagtattattttcattatcgattctgtcctacccttgatccgcaagctgcctctaagtgtcacagaagatctggaacaggatctaaagcatatgattgttcggcattcgtttctaactgttgtgcatgcttgcgttaggtgtctttgttctgtgagtaaattggcggggaaaggtgttagcatagttgagcatcttcttcagttcttttttaagcggctggaggcccaaggttccgataacacacagattgctgggcggtcccttttttgtcttggcttgcttaatcgccatgggaaactctccttaatagtacctcangtggcaaagaattcaatcctctctggctgtcctaanttgtta

SEQ ID NO: 16211 - DNA, 464 bp, Arabidopsis thaliana
  unsure at all n locations
  Clone ID: LIB25-030-Q1-E1-F6
aggatgaggctagatgaataggttctcatggatttctttagggagtatataagtgcatctaaagtggagagcagaatcagaataatgagcgatctgagagaacttgcatctgnggagagtctagatgcatttacactcgtgtactcgaatattctagagcaccagcctgactgcccggccgaggtcgtanagaagcttgttagtctgcgtgaaggcataccacggaaggacacannngaggtggtacaagagtgcaaagagatatatgagaacacactgggtagatggtaatcctcnaaaggacagggatttgtattccccgagagtcaagttgctaactgcttccaaaangattctatgtggccganaactcacttaatctgttaaanaagcgttnaancgtttgcgtccgtnnctgcttttccnagttgancatgaatgttctttctcaaaattattggctg

SEQ ID NO: 16212 - DNA, 505 bp, Arabidopsis thaliana
  unsure at all n locations
  Clone ID: LIB25-030-Q1-E1-G11
nnngaacgtttccctgnccttnggtcgcanatcccgggtnaacccacgcgtnccggcatttaggacctancatagttacacgtatatctgggagcctagcaatggtcgtcttatcatgttacccactaatagcaaagttatctggtttagcccttaccgtgactgtaacttctgcatccgtagcaaagagtgttttaggtacttctgctataactggattattcatccttcaaaacaaggctgtgagacaagaccaaagaggagcagctaatggaattgccatgacagcgatgtctcttttcaaagccataggtccagcagcagcaggaatcattttttcgtggagcgagaaacgtcagggtgctgcttttctccctggcacccaaatggtantctttatactgaatgtggttttggcacttggagttgtattgacattcaaaccaattctagcctgaaaacncaacagtnganaagtgatgnaggatttgatgggtanttaaat

SEQ ID NO: 16213 - DNA, 539 bp, Arabidopsis thaliana
  unsure at all n locations
  Clone ID: LIB25-030-Q1-E1-G12
gnngaactgtttccctggccngntttggtcggccaattcccggggtcaaaccaacgccgtncgcctttattaattannaaaaaagagtcatgggcattttcatccttncgtggttccgtccgtcaaaagcccgtcaaactcacgggtgggacgtctcccgtctcccggtcaaccgtcttctaagattcgccgtcctccctgctttccttcaccgccgttacgcaacaagcgtcaaactaacggccataagcgccgccttaaaaaccgtcgagcaaacgacgttaacagaggataacagattctcaaccgtcggatctgactctgatgaatacaatccaactcttccaaagccgaggatcctcgtcaccgagaaactgggagaagccggcgttgaatctcctcagggaattcggcgacgttgactgctcctacgatctttcgccggaaagatntgaagaagaaagtggcgggagatgacctctgatcgtgaanaagcgggaactaaagtgacgaagggaaatttttgaggcngcgaaagg

SEQ ID NO: 16214 - DNA, 448 bp, Arabidopsis thaliana
  unsure at all n locations
  Clone ID: LIB25-030-Q1-E1-G3
gcgatggtcatggtggtcctgaagctgctcgttatgtctgtgatcatctctttaaccattttcgagaaatatcagcggaaacacaaggagttgtgacgagagagacgatagaaagagcctttcatgcgacagaagaaggattcgcttccattgtgtcagagctgtggcaagaaataccaaatttggcaactgttggcacttgttgtttggttggagtgatatatcaaaatactctttttgtggcaagtcttggagattcacgggttgttcttggaaagaaaggcaactgtggcggactctctgctattcanctgtcgactgaacacaatgctaacaatgaaagatattccttgggaactcaagggacttacatcctgatgaacccgcanatcgttgtgttcaagcatggganttttggagaatttaagggcatcattcaaggtatcca

SEQ ID NO: 16215 - DNA, 462 bp, Arabidopsis thaliana
  unsure at all n locations
  Clone ID: LIB25-030-Q1-E1-G4
ggngtggaagtatctnctncttcgtctgtccgnctgatagggtngncgacgcgtccggatanatnccaattgatcaatcaataaccttatcttcttcatcttctctgtcagtatctgaatctgcatctggaagcgtgatttcatcatcatgtatttaaccgcttcatcttccgnntcntcctccatcatccgagctgcttcttctcgctcttcttctcttttctctttccgatcggttttatctccctccgtttcatctacttctccgtcgtctcttctcgctcgtagatcttttggtaccatttcccctgctttccgtcgctggangccantcntttcactcgaaacatcgccgtttcgcttcacctctcanatnagagctgtttctccagtcttagattggtctcaaganaanncttctcttccatgggcgtnagaacatccgtttaaanggatnntcaa

SEQ ID NO: 16216 - DNA, 450 bp, Arabidopsis thaliana
  Clone ID: LIB25-030-Q1-E1-G7
gcccacgcgtccgattgacaaccaatatgatgtcggtgtctaagatatgtgtagtccaatctgcagagcatggtcctatgattaatgaattcactgttagtgggacaacttatgcaccagaaggtaccgtctttgacagcaatgggatgcagcttgacttacctgctcagtcaccttgccttcatcatttagcaatgtgttcatcactctgcaatgactccatcttgcaatacaatccagataaggattcttatgaaaaaattggagagtcaactgaagttgctcttcgagttcttgcagaaaaggttgggctccctggttttgattcaatgccttctgctctaaacatgttgagcaagcatgaacgtgcatcatattgcaaccattattgggaaaaccaattcaaaaagtttatgttttggagtttactccgtgaccgaaaaatgatga

SEQ ID NO: 16217 - DNA, 422 bp, Arabidopsis thaliana
  unsure at all n locations
  Clone ID: LIB25-030-Q1-E1-G8
gtctccaattcggaatcttcctatcacaatttcaaggctcctttaacccttgatcatcaccgattcaatcaattcggaatcacaatttcaaatcgagagaatttcaatttctcttgtaaaaccctaaattatgtacagcaatttcaaggaacaagcgatcgagtacgtgaagcaagcggttcatgaagacaatgctgggaattacaataaagctttccctctatacatgaacgcgcttgagtacttcaaaactcatctcaagtatgagaagaacctaagatcagagaagctattaccagaaattcaccgaatatctccgtctgctganganatncgtgctgttccccatgaaagtggatnnggtccaagatttaacggtgatgcaancgtccaacgaaggccaaaactaagcctaaagatgg

SEQ ID NO: 16218 - DNA, 437 bp, Arabidopsis thaliana
  unsure at all n locations
  Clone ID: LIB25-030-Q1-E1-H1
ctttcggaggcgactactgacgatgagttgaagactacttttggtcagtatggtagtatctcgagcgctgtagttatgagggatggagatgggaaatccaggtgttttggatttgtcaactttgagaatcctgaagatgcagctcgtgctgttgaagctctcaatggaaagaagtttgatgataaggagtggtatgtgggtaaagctcagaagaaatctgagagggaacttgagttgagccggagatatgaacaaggctcaagtgatggtggaaacaaatttgatgggttgaatttatatgttaagaaccttgatgataccgtcaccgatgagaagttgcgccnagttgtttgccgaatttggtacatcacctcttcaaaggttatgcgggaaccctanttggtactaacanaaggattnaggatttgttgccctct

SEQ ID NO: 16219 - DNA, 261 bp, Arabidopsis thaliana
  unsure at all n locations
  Clone ID: LIB25-030-Q1-E1-H10
atcttctcattcntcatctagtcgcattctctgtccataacaatgaatatcaattgttctccattagggtttctaatttcactcttcntcattgttacttttcttgcaccannggtcaaatcggagggctttctttgtcnttggtgactctctcgtcgacaatggaaacaacgactacctcgtcaccactgcccgttgccgacaattaanccgtatggtatcgactaacccganncgtnnaaccaacggacgtttctctna

SEQ ID NO: 16220 - DNA, 393 bp, Arabidopsis thaliana
  unsure at all n locations
  Clone ID: LIB25-030-Q1-E1-H11
tgtttcaataaaaaaaatcncctccctctcatatttacctcccgaataaaaccggagggagagaaaaaacatannaagcaaaaanaaaggtaaaatcaaaaaggggaaaaatanataacancaaanaaaaaaagttagaaaaaatggcagtaggaaaggttgtggtatctgtggcatcactcctcctagtggtgggtgttgccataggagttatcacgttcgttaataaaggaggcggcgccaatggcgacagtaatggtcncatanactctcatcaganagcggttcagacaatttgccantcnaccacagaccaaggttcgtgcgcgaaaacactcgacccagttannagtgatnattcaangcaagccttgtcaaagccttcctgantgg

SEQ ID NO: 16221 - DNA, 515 bp, Arabidopsis thaliana
  unsure at all n locations
  Clone ID: LIB25-030-Q1-E1-H12
cntgggccggtttcgcctggcnngtaccgcgggctnananctacgcgtccgccgnnagcaaggttgaatcccaatagtccaattttagttaagagtgttaatgcttcaagatctcgaagagttctgttggcgtatgttcatcatcctttagctgctaataagggttcatctattgaaggagttaaagcaaggtctttgttgtacaaagactgtcacttttgttagttctcggagatgttctacattgtgctttgttggaaagtctcaagacactgaaactaattcccaagttgtacaaaaagaaggtgagaagcaagtgatgccgaggaggaaaagtagtaactcaagccaacttttggtggaatatgtgtctaatgatgctaagtttgtgaatgaaagagctcgtaatgactttgttcttctatctccgtggtattatgagacntgatgccccgtgcacgacaaggatgtttgcaatccctggggtcccgggttcccttaaactncaatgctcg

SEQ ID NO: 16222 - DNA, 514 bp, Arabidopsis thaliana
  unsure at all n locations
  Clone ID: LIB25-030-Q1-E1-E9
gnnnnnnnnngtnnngaatgtctncctggntctttggtccgccattcccgggtnaacccacgcgtccgcttagagctctctctcagtcgaaaacaatggcgtcttcttcagcgacgctctctctctgctctactttctctgctcattgcaatgtcaattctcgccgttctagcactatcctctgttctctctctaaaccttcgcttaatttggctaaacctcttactggatttctttctccttccactgcgtcgacgtctcgaaccgcattcaccgtcgctccgaaattcgcggaatcagtcgtcgaagctgaaccggagactaccgatatcgaagctgtggtggtttccgatgtttcggaggttactgaggaaaaagctaaacgagaagagattttcgctgttattatggttggtggacgccaatacatagtgtttccagggagatatctctacactcagaggctaaaagatgcaaatgttgatgaccanattgttctcaacaaagtgttgct

SEQ ID NO: 16223 - DNA, 443 bp, Arabidopsis thaliana
  unsure at all n locations
  Clone ID: LIB25-030-Q1-E1-C4
gaaaaaaactcaccaaacgaggaaagccaaagagagagagagagaaacaaaaatggcgtcacagagttgctacaatggaatccatcgtataaaaagggttcatcctctgattcactctctcacatttcatcgattctcctcatcttctcttccattcaaatctcacattccctcttcacaacaacagcttcgtattcgctcatcttcttcgctttctgatcttggaaatcgcaggcattgttcgtctactcgaggatttcaattttggtcatacaagagaagcgaagcagcgtcgccgttcaagacgaggtacagagaanacgaagaagaagaagatatgacgattaaaccggcggttcgtatttccgacgggaatctaatcatcaaaaancggacgatctaaccggtgtacaagataatgtcatcacgacgtcagcatcgga

SEQ ID NO: 16224 - DNA, 438 bp, Arabidopsis thaliana
  unsure at all n locations
  Clone ID: LIB25-030-Q1-E1-C6
gtttcgtctccacacgcctctctctctctctcgcttcttcaatcattcatcactccgacgtcagattcaaaatcctccatgatcgatcccaattgatcaatcaataaccttatcttcttcatcttctctgtcagtatctgaatctgcatctggaagcgtgatttcatcatcatgtatttaaccgcttcatcttccgcttcttcctccatcatccgagctgcttcttctcgctcttcttctcttttctctttccgatcggttttatctccctccgtttcatctacttctccgtcgtctcttctcgctcgtagatcttttggtaccatttcccctgctttccgtcgctgggagccattcctttcactcgaaaccatctccggtttcgcttcanctctcaagatnagagctgtttctccaagtctaagattgtcctccaag

SEQ ID NO: 16225 - DNA, 445 bp, Arabidopsis thaliana
  unsure at all n locations
  Clone ID: LIB25-030-Q1-E1-C7
ntcgtttcccagaatttgggtcgccattgattcgcacctcgcaagatggaaagcactagatcagatccagagcttgatgatgactttagtgaaatctacaaggagtatactggncctgcaagtgctgtgaccaacaacaatatccaagacaaagacaaacctgtcaaacaacgttctgaagaaagatgtgatgaagaagaagagcaacttcctgatcccaactctgtaccaactgatttcactagccgtgaagctaaggtttgggaggctaaatccaaagctactgagaggaattggaagaagaggaaagaggaagagatgatctgtaaaatttgtggcaatccnggtcattttactcagggatgtcaacctacacttggtgccaataaggaagtctcaagaantcttgaaanggtacaagctaagggacaataatgtgagagtt

SEQ ID NO: 16226 - DNA, 114 bp, Arabidopsis thaliana
  unsure at all n locations
  Clone ID: LIB25-030-Q1-E1-C8
agccacggcanactcggcggtggatgcggttgtttaggtgactgtcttggctgctgcngctgcngtatcttagggcgtcatcttcaacatcctcataaccatanccgtcctatg

SEQ ID NO: 16227 - DNA, 453 bp, Arabidopsis thaliana
  unsure at all n locations
  Clone ID: LIB25-030-Q1-E1-C9
gctcagctctccagcnccggtcaatccgtacaggtaagtcaaaaagtttgtgaaagatggggtcgtgttcgtaccaaaacggttaagaagtcttcacgtcaggtgattgagaagtactactcacggatgacactagacttccacaccaacaagaagatcttggaagaagttgcaatcatcccatcgaaaaggctacgcaacaagattgctggattctccactcacttgatgaaacgtatccaaaagggtccagtccgtggaatctccctcaagctacaagaggaagagcgtgaaaggcgaatggactttgttcccgatgagtcagccattaaaatcgatgatgttaaggtggacaaagagacactagagatgcttgcttcnttgggaatgtctgatattgctgggatttctcaagtggagacacaacaaagctatggnacctgctgtgtttgg

SEQ ID NO: 16228 - DNA, 337 bp, Arabidopsis thaliana
  unsure at all n locations
  Clone ID: LIB25-030-Q1-E1-D1
aactgctgntaaggnncccaacaaaccaaananggcagccagtgntttcttcgttttcatggnanatttccgtgagactttcangaagganaaccccaagaacaagtctgtanctactgttggaaaagctgctggagacaantggaaatccttgtctgattctgagaaaactccttaanttgctaaagctgagaaaacgcaaaggttgaatatgagaangaaacaattaaagntttacaacaaagaaaactggaaggaaaggtccaaaaagaaagatgaaggaatctgacaaagtccagttgtcagaaggtcaattgacnaaggatgaatgcctgag

SEQ ID NO: 16229 - DNA, 445 bp, Arabidopsis thaliana
  unsure at all n locations
  Clone ID: LIB25-030-Q1-E1-D12
tgcgtcctnttggtgcttgaagcgatgaccatggcagcaaatctagcgcgacggctgatcggaaaccgatcgactcagatccttggagccgtgaactctagctcaggtgcggctagttctgtcgctagggctttctgctcctccaccactccgatcaccgcaactctcttccctggcgatgggatcggtcccgagatcgccgaatctgtcaaaaaggtgtttacaacagctggtgtaccaattgagtgggaagaacactatgttgggactgagatagatncgagaacacagagtttcttgacatgggaaagtctcgaatctgtgcgtagaancaaagttggtttgaaangtccaatggctactccaattgggaaaggtcancgttctttgaaccngactcctaaggaaagagcntaatcnaanntgccaatgttagacntggtta

SEQ ID NO: 16230 - DNA, 269 bp, Arabidopsis thaliana
  unsure at all n locations
  Clone ID: LIB25-030-Q1-E1-D3
ctcncagaaaaatgntntnaanggtnccgaaaggtccctttttggggggcaagccctaactttgnaactccaaacctaaantgaggaaatctcatgggaggctaattgaatcaatgggggggaatggccttgcccgaaagaagcaatcaagctaaaggaaaaagttcacaagcctggntgaaattnccggtaaatttttgggaattaacggccaaggaaaccttggattaagaaaaaaggaacaacnaaagggggccgtttnaaatncc

SEQ ID NO: 16231 - DNA, 514 bp, Arabidopsis thaliana
  unsure at all n locations
  Clone ID: LIB25-030-Q1-E1-D4
ggnnngagtgtcntcttgnncnccggtccgganataacgggtcgacncacgcgtccgcccacgcntccgcccacgcgtccggagcctttcagacttcacccgaatcatatttcttagttctcctccagtggatgaggctaaagttcgccagaaccaaagcccatacttgagcgaggtaatccgcacaaacgacctctgcaagacttattcagatgcttgtgtagagctgtgccaagaactcggcctagaagtagttgatctcttctctacttttcagaaagcagatgactggaaaactgtttgcttcacagacgggattcatttgtcagcacaaggaagcaaaatagtagcgggagagatactaagagtggttaaagaacggaatggcatccatcacttnactgggaaatcaatgccaacagaattccgcanatgactctccttatgatctgtatcagcagatggcaaacagacaagtnaattcctcaaaatggacntaattctgggaaaaaca

SEQ ID NO: 16232 - DNA, 175 bp, Arabidopsis thaliana
  unsure at all n locations
  Clone ID: LIB25-030-Q1-E1-D5
gactgaggtcttgggaagatnagcaagcnttattcananaaaagttcggtcatatctcgctaaaaagagtttcatccgttctgcgtaattctgctaaacagattcagtcagtttgcanaggttatctcgcctagaagtgtatatgaaagcatgcngtagggaaactgctgctttg

SEQ ID NO: 16233 - DNA, 451 bp, Arabidopsis thaliana
  unsure at all n locations
  Clone ID: LIB25-030-Q1-E1-D6
ntgtctgaaaaaatctttgtgcgaagcaggaaaaatgtcgtcgacccatcagttagtttcttcgatgatctcttcttcctcatccactttcttagccccttcaaattttaatctcagaactcgaaatgcttgcttacccatggcaaaacgggtcaatacttgcaaatgtgttgctacgccgcaagagaagatcgagtataagaccaaagtgtcacggaattcaaacatgtccaaacttcaggctggatacctattcccggagattgcaagaagaaggtctgcacacttgttgaaatatccagatgcacaagttataagtcttgggaataggcgacacaactgagccaattcctgaagtgatcacttctgctatggcaaaagaaagctcatganttgtcaacaataganggatataatggtatggtgctgaacaaggtgcaaagccactgag

SEQ ID NO: 16234 - DNA, 452 bp, Arabidopsis thaliana
  unsure at all n locations
  Clone ID: LIB25-030-Q1-E1-D8
aaattcgataaacctcgattgatcccaaattcccaatggaggtttctgttctcacctaatttagctccatatccctcgcagtccgattcaagtgagattcttctaagttttttggaagaataatggtgttgccgttgatgaaactgggcacactcgccgtcaaaaccataagtaaaccattggctagtcagctcaagcaccaagctaaggttcatcccaagtttcgtcaatctatcatcaacttcgctcagaggaatcatcgaatcactacgcaaatgcaaagaaggatatatggtcatgccactgatgtagagattcgtcccttagatgaggaaaaggctgttcaagctgctgttgacctcattgggagagatctttctctttggggtcggtggagctgttgttgtttttgangtgcanagaattcgcgggtcagaancaaagaaaagagg

SEQ ID NO: 16235 - DNA, 518 bp, Arabidopsis thaliana
  unsure at all n locations
  Clone ID: LIB25-030-Q1-E1-D9
gnnnnnnnnnggnngaatgtctncctgntctttcggtcggccaatcccgggtcaacccacgcgtccgctttcatccataaanttctatttttctcatcgcaaacttgaaccgtcgtaaccctaaatcgccatcttcatcatcggcaaatcgaatctccgattatatatcaaatagcttaccanntccgacatgacccaggccctcgttttcggaggactataatgatcggactcttcgtgtcccgtctcgattgcatggggtttgagctatgccggagcttcgccgtggagtccgccgtggccgtgttactgatgctgtagctcccaatcagcttccgcaaacacctacagaaaagaaaccgaagaagagtaccgttaaagctccaaaaccggttgccggcggagttacaggagttgcagagaagcccgaggactagattagcggcgangaaattaaagggaggaagataaaagagatacctcaggagattccgggttgttgtgccgtcaaaggatac

SEQ ID NO: 16236 - DNA, 431 bp, Arabidopsis thaliana
  unsure at all n locations
  Clone ID: LIB25-030-Q1-E1-E11
ccgtgaattttcgcggagcttttctcgggaaaataatctaaagaagattcgagattaagacacgtcatctccggtttcgtagagagatctgaagaangagtctcttctcttctccgatgggaacgctacagtcatggagaaaagcctatggagccctaaaagactccaccaaagtcggacttgtccgtgtcaacagcgaatacgccgatttagatgttgccatagtcaaagctaccaatcatgttgagtgtcctcccaaagatcgccatctcagaaaaatcttcgctgcaacatcagtgactcgtgctcgagcagatgttgcttattgtattcacgccctttcacggcgtttgcataaaaccaggaattggacgggttgctttgaaaacactaattgtgatacatcggcttctaagggaaggagattcnac

SEQ ID NO: 16237 - DNA, 114 bp, Arabidopsis thaliana
  unsure at all n locations
  Clone ID: LIB25-030-Q1-E1-E12
anagtgtaacnatttcttggggaagtccatttctacntgcttttctttttatcggcatttggcttttggttcccaaaaactcttatttctgttgtanattcatgtctganttta

SEQ ID NO: 16238 - DNA, 511 bp, Arabidopsis thaliana
  unsure at all n locations
  Clone ID: LIB25-030-Q1-E1-C3
ggntgtnggaanngtcntcntgggngncncggtccggacaanacgggtcgacncacgcgtccgagcagaatacgggtacgcttcttctaagataaatctctccccgattctctctttttctcgctagatactctttttcttcaattanggtttcttctcgcttgccttttaantctctcgnggggatctgatctccgttaccgatggagtctactgctaacgcactcgtcgtnaaggtgagctatggaggtgtgcttaagcgtttcanggtgcctgttaaagctaanggaaancttgatcttgaaatggctggtcttaangaaaaagatcgctgctctcnttaacctctctgcggaagctgaanttaagtctgacttactctgatgaagatgggggatgtggttgcccttgttgatgacaacattctctttgatgttacaaacaagcgtctaagttcctaaagatcaatgtgaacgctggcgtgtcaactaactctgctgcccaagagagt

SEQ ID NO: 16239 - DNA, 455 bp, Arabidopsis thaliana
  unsure at all n locations
  Clone ID: LIB25-030-Q1-E1-E2
gctcnacaaagattctaactttgagagagatttttcggttgtagatgcagattcagagcgtatcatctctcgagaaaggatcaatgtctcatgaaataagctagactctgtttctgttttcttcttcttcgatctcaatttcttcttcttcgagctaggggttgtttatgtttgggaaaggaatgggcactaggcagtattcactgggagaagtagggccaccaataaatccgagagctggattgcgaagggaacaagctggtagaggttcatacagaggtagttagtagattcgtanctcatctgtaggcaaaaagggtttccttttangtggcaaagactgtttaatttcagacacagagactgattaagaattcaagggaaaattcttgtcnggggactaatttaagttttaaaaangggtgttttttaatggttaaagggaaggttaaatt

SEQ ID NO: 16240 - DNA, 181 bp, Arabidopsis thaliana
  unsure at all n locations
  Clone ID: LIB25-030-Q1-E1-E8
ctctgagaagatgggnggtcacgatgactcttcttcttcntcttccgattcggatgacnataagaactctgcgtctctcanaaccaatgatttatcgtcttttcggaanagaacatcctcttcacaagcttttcggtggcggaaaatntgccgacattttccngtggaggaacantgntgt

SEQ ID NO: 16241 - DNA, 435 bp, Arabidopsis thaliana
  unsure at all n locations
  Clone ID: LIB25-029-Q1-E1-B8
gaaagggtaaacacgccgccgttgattcagccggagaatcaatggaaagtgaagcaattcaagaggatcttcagaatttagacgtcgagttaaaggatgttcaaggtcagataagtgctttgattgagcatcaagataggttatacgagagaaagtctgagttaaagacattgttaaaagcattagcagcatcaggaagtcctgttgcatcatctggtggctctaagtgctatagagaattggtcctgagacatttgagtnggaatcccgtgcctgacgaatgttaggtttaacgtttttggtaatatccaaagtntaaggctaaacaagaaggaaattaataacgctattatgaccggaaaaaattcctggtgatcatggaagcangtgggttggnaaaatctttgcnaacaacttcaagctaangcttcttgg

SEQ ID NO: 16242 - DNA, 447 bp, Arabidopsis thaliana
  Clone ID: LIB25-029-Q1-E1-B9
gaaaaaatggagggaggaataatacatggaggagcagatgaatcagctttcaaagaatgtttctctctaacatggaagaatccttatgttcttcgtcttgctttctctgccggaatcggtggtcttctctttggttacgacaccggagtgatatcaggtgctctgctttatatcagagatgatttcaagtctgttgacagaaatacttggttacaggagatgatagtgagcatggcagttgcaggagccatcgttggagccgccataggaggttgggcgaacgacaaattagggaggagaagcgcgattctcatggcggatttcctcttttattaggagctatcattatggcggctgctcctaacccgtccctccttgtcgttggccgtgtttttgtgggcctcggggtcgggatggcctcgatgaccgctcctctatacatctcag

SEQ ID NO: 16243 - DNA, 496 bp, Arabidopsis thaliana
  unsure at all n locations
  Clone ID: LIB25-029-Q1-E1-C1
nnnngagaatttcnggnannacggtccggagtaacgggtcgacgcacgcgtccgcccacgcntccgctctctctcaatccaacaaagaaaaaaaaagtcttcttctttttttacaagtctgagaattttctacagaaacaaaaatctgattgtttttcccactttgcatctgttttgaggatgccagctacggattttcaaggatcatttggaaggtcgttgctaagtttacggcgagaccaagttgactcatcaacagtcgtctccggaagtagtagccaccacgagccaagcaccatggaggttgagctagattcgtttcaaagacaagtcgctgagaaattcatcgatctcaacgcttcttcaaacgaccttctctctctcgaatggatcggaaagcttcttgattctttcctctgttgtcaagaagagtttcgagctatcgtattcaaccaccgatctcagatcctaaatctccgatggancgtttgaattc

SEQ ID NO: 16244 - DNA, 442 bp, Arabidopsis thaliana
  unsure at all n locations
  Clone ID: LIB25-029-Q1-E1-C10
aaattcaaactctctctttctcctttcaccaaacaatacaagagatctgatctcattcacctaaacacaacttcttgaaaaccaatggatcaaatcgaagcaatgttgtgcggcggaggagagaagacaaaagtggcggttactacgaagactttggcagatccattgaattggggtttagcagcggatcaaatgaaaggaagtcatttagatgaagtgaagaagatggtcgaagagtatcgtagaccagtcgtgaatcttggcggagaaacactgacgatcggacaagttgctgccatctccaccgtaggaggcagcgttaaggttgagttagcggagacttcaagagccggtgtgaaagctancantgattgggttatggagagcatgancaaaggtactgacagttacggggtcaccaccgggtttggtgcnacttcca

SEQ ID NO: 16245 - DNA, 498 bp, Arabidopsis thaliana
  unsure at all n locations
  Clone ID: LIB25-029-Q1-E1-C2
gnnnngantgtntcttggcnncaccggtccggaaatanacgggtcgacgcncgcgtccgcccacgnntccggcctctgtaacgttcgatcatcttgtatttcatttcaaccactcattgnttttagtttgttttacnaanaatcaactatggcgacgaagagaancgttggaactttgaaggaagcggatctgaagggaaagagtgtgttcgtgagggttgatctcaacgttcctttggatgataactctaacatcaccgatgacaccaggattcgtgccgctgttcccaccatcaagtacttgaagggtaatggatctaaggttgttccctgcagtcacttgggccgcccaaaaaggggtaccctaaattcaactttaaggcctccttgtgccaaaattgtctgaaacttcctggggttgaaggttgtaattggcaaatgacncnaatgggggaggaagtccaaaaatttggttcaaggctanccgaaaggggtgtt

SEQ ID NO: 16246 - DNA, 493 bp, Arabidopsis thaliana
  unsure at all n locations
  Clone ID: LIB25-029-Q1-E1-C4
gnnnngagtgtcnttttgntcgccggtccggacataacgggtcgacncacgcgtccgcccacgcntccggcaagacccatggaggaaggtctagctgaggctattgatgatggacgtattggcccaagggatgaccctaagatcagatccaagatcttggctgangagtttggatgggacaaggatcttgcaaagaagatctgggcttttggacctgaaaccacagggcctaacatggttgtcgatatgtgtaangganttcagtaccttaacgaaatcaaggattcagttgttgctggtttccantgggcgtccaaggaangtcctcttgctgaacagaacatganaggtatctgttttgangtatgtgatgtggtgcttcactctgatgccatccacanaagaagtggtcangttatccccacagccaagaaaggtcatatacgcntcccagattacagctaanccaanacttttggagccggttanatgg

SEQ ID NO: 16247 - DNA, 429 bp, Arabidopsis thaliana
  unsure at all n locations
  Clone ID: LIB25-029-Q1-E1-C5
gccccatttctctgaaaaccctaacaaatcctcctcttgttccgccactgccgccgccgctactcaacggtggtgaattttctatacggtcagttcgatcctcnttttatcgacaatcctacacaaatccataatcatggccgccactgcttcctccgaagcttctgaaggaccagtgatgggtctcatcaacaagcgtctccgtgctctccgtaagaaatacaaccgaatcactcaaatggaagaatcgatttctcaaggcaaaaccctaaacaaggagcaagaagaagtcctccgctctaaacctgccgtcgtcatcctaatcgacgagcttgaaaagatccgtgctcctctctccgccgctgtgacagaggaaatcagcctcgctactcagcttaaccgtgcttcatccgattaaacaacgcatct

SEQ ID NO: 16248 - DNA, 435 bp, Arabidopsis thaliana
  unsure at all n locations
  Clone ID: LIB25-029-Q1-E1-C6
agttctttcttcttaatcacagctcagcctgacgcaaccgctcaggctgatctcttccaatttacagccatttcccagctcagatctctgatccggtgagatctctctcanggnaaaggagttagagcatcatcaagatgaaggcactcattcttgttggaggcttcggcactcgcttgagaccattgactctcagtttcccaaagccccttgttgattttgctaataaacccatgatccttcatcaagatagaggctcttaaggcagttggagttgatgaagtggttttgggccatcaattatcagccagaggtgatgctgaacttcttgaangactttgagaccaanctgganatcaaaatcacttgctcacangagaccgagccactangtaccgctggtcctctgggctctagcgagaaatnaaattgntg

SEQ ID NO: 16249 - DNA, 432 bp, Arabidopsis thaliana
  unsure at all n locations
  Clone ID: LIB25-029-Q1-E1-C8
ttctctcttcctttacagagaaagcagagagagagacaaagggaaagctaaatccgtgacccggatccgaaataatcgggttttcaaaatctaattcctcttatcttctcncttcttcttcttcctgggttcttcccaaaattcaatttcattaaaagggcactgccctttatcatgcctaaaattctcaggatctaaataaaagtatagaacaatgggtggatgtgtgtcaacccattcaaaagcgaataaggcctaggaggaaaggcgttcgtaattcttcnaaacactttccnaaattgnctganaatngtnccnaatggcaaataattagaaaggccaatgacgtttggaanccaatttcctttggcaactcccaaagaatatgnaaggtttggccccggncatggtccttgatccggtaaggatgag

SEQ ID NO: 16250 - DNA, 431 bp, Arabidopsis thaliana
  unsure at all n locations
  Clone ID: LIB25-029-Q1-E1-D1
ccaacgacgctgctcctctttatcggagctctcatcttctccggcgccggtactgtcagatccgatgcctccgaccaccgttacaaggacggtgactccgttcctctctacgccaacaaggtcggcccctttcacaatcccagtgagacgtatcgctatttcgatctccccttttgtattccagagggtgtgaaagataagaaggaagctcttggtgaggttttgaatggggataggcttgttagtgctccatacaagcttaactttagagatgagaaagactcagaggtgtactgtaaaaagaagcttagtagagaagaagttgaacactttcgaagagctgttgaaaaagattattactttcagatgtatatgatgaattgcctattggggattcantgggaaagtggacaaagagaacaaatctgatc

SEQ ID NO: 16251 - DNA, 437 bp, Arabidopsis thaliana
  unsure at all n locations
  Clone ID: LIB25-029-Q1-E1-D11
tctttgtttggttgttctttcttcgcatccaaagatgaagctcgtcaggtttttgatgaagttaaacaatgaaactgtgtctatcgagctgaagaatgggactgtggtccatggaaccatcactggtgttgatgtgagcatgaacactcacttgaagacagtgaagatgagcctgaaggggaaaaacccagtaacacttgatcatcttagcttgaggggtaataatattcgctactacattcttcctgatagcttgaacctcgagactttacttgtggaagacactcctagagttaaacctaagaagcctgttgctgggaaagctgttggacgcggtcgcggacgtggccgtgggcgtggtcgcggcagangtcgttagatgtagcagcgctctggaacatgttgaaggtttgtgagttaatttttaggagaatgtc

SEQ ID NO: 16252 - DNA, 443 bp, Arabidopsis thaliana
  Clone ID: LIB25-029-Q1-E1-D12
atatacaaatatatatctacaaactacaatgaataatttcattctcttatggcatatggtgctataaacaaacacacttaccacgcttgatcctacaacacatgaaccatggcttcttcaacccactcttacttcaccactttagcactaaccctaatcttgatctttcgtctcataccagaaaccaccgcatcacgccatctgaatggaaagaatccggcggtaattggagttaccactactagcgagaaatacattgttcctacgccgttaccaccgtttttacgaccctttttcccaccgttacagtttgccgctgcaccgttcggagggaatatcccacaaccaccgttaccttcaccacctccaacatttctaccgtgtctcccaggtttcaagtttcctcccctttcagtcccgaaagcctacgccgccgtaatcgt

SEQ ID NO: 16253 - DNA, 490 bp, Arabidopsis thaliana
  unsure at all n locations
  Clone ID: LIB25-029-Q1-E1-D4
gnnnngaantgtntntgccgccggtccggacataacgggtcgacgcacgcgtccgccgaacaaactgcttaaattgaagagacgactatgtgcgtaaaacgaagagactcaaaacaattttgggattcgtgagagatattgattcgctgcaatggaagaatctgttcatcaatcgatacgattcggctcagttgcagatttaatcatgtggaagaatcgacgcggagggtttcttctacttggatcaacgacattgttatggttcctctttgagaaatgtggatacagtttcttcccctttgttgttaatactcagcttctctccgtcgttatactcttcctctgggccaaatctgctattctcttcaataggcctatgcctcaactacctaatcttgaaatcactgaggaatttgtgtttaaggtggctgatgctatacgagtctggattaataccgtgctcgctgntgccccgtaagatttacgtgga

SEQ ID NO: 16254 - DNA, 426 bp, Arabidopsis thaliana
  unsure at all n locations
  Clone ID: LIB25-029-Q1-E1-D5
gggaatctcttaatgaagagcacataataggctgtggaggctttggcacagtgtacaagctgtctatggacgatggcaatgtttttgcgctgaaaagaattgttaagttaaatgaaggttttgatcggttttttgaaagggagcttgagattcttgggagcatcaaacatcgttaccttgtgaatctacgtggatactgcaattcacccacatcaaagcttctgctatatgattaccttcctggtggtagccttgatgaagctctacataagagaggcgagcagctggattgggattcgcgagttaatatcataatangagcggcaaaagggttggcatacttgcatcatgattgttctcctaggattatacaccgtgatataaaatcaagcaacatcttactggatggaaatctggaggctcggg

SEQ ID NO: 16255 - DNA, 420 bp, Arabidopsis thaliana
  unsure at all n locations
  Clone ID: LIB25-029-Q1-E1-B5
attctccgatcactacaacgattccgatctgtcctccgttgatttcgatcctgattttgatattgtttcgacatgaaattggtgtgatctcgtttcgagtttcgtggcgtatttgcttattttaagtgtgtggaatcgatttttaatgggggataattctggtagaagtagaaactctatgatggcaactgtttcttctgggaaagagttgtnacctaaaagaagcttagtagctgctattccaagagctgttcagcagacaatctctaagcatgtttcttttgggagtaatggtagatttggaagtggaaccgctcgtaatgcagctgtgttctgcttaaaatcgctgttttagaanttgttcgaagggtttcaaaggctaaatgtcctcatttgtggaatatcctcangcgttgcaat

SEQ ID NO: 16256 - DNA, 428 bp, Arabidopsis thaliana
  unsure at all n locations
  Clone ID: LIB25-028-Q1-E1-H11
agtccaagttgggtttcacagtttacccatctccacaggtctctacctccgttgttgagccttacaacagtgtcctctccactcactctctcttggaacacactgangtctccntcctcctcgacaatgaagctatctatgacatctgcagangctccctaagcattgagagaccaacctacaccaacctcaaccgcctcgtctctcaggttatttcttccttgactgcttcnctgaggtttgatggtgccttaaatgttgatgtcactganttccaaaccaacttggtcccanacccaagaatccacttcatgctttcctcctatgccccagtcatctccgcatagaaagccttccatgagcaactctcagttgctgagatcacaaacagtgcttttgagccagcttcatgaatggntaagtgtgac

SEQ ID NO: 16257 - DNA, 456 bp, Arabidopsis thaliana
  unsure at all n locations
  Clone ID: LIB25-028-Q1-E1-H2
cactgtantaacgacggagaacaacgaacgaacgcnagagatcgngagagagagaaatatttaatggatcggattctgaaagcagctcgaacatctggttcgctgaatctttcgaatcgttctctcaaggatgtacctactgaggtatatcaatgtttggaaacgaccgganaaggagaaaactggtgggaggctgttgatttgcagaagttgattttggctcataatgacattgangttttaagagaagatctgaagaaccttgcctgtttggttgtgctaaatgtcagtcacaataaactctctcaacttccagcagctattggggancntactgcgaagaaatctttggntgtgtcctttaactcaatatcagaacttcctgaacaaatttgttcagcaanttcccctgtccaagcttacngttcangcaatccggcttnaanaaattgncag

SEQ ID NO: 16258 - DNA, 451 bp, Arabidopsis thaliana
  unsure at all n locations
  Clone ID: LIB25-028-Q1-E1-H3
tccccagaaattttcttccgccgtaaaagcaaaaaaagatgcagatcttcgtgaaaaccctaacggggaagacgatcactctcgaggtcgagtcctctgacaccatcgacaatgtcaaggccaagatccaagacaaggaaggaatcccaccggaccagcagcgattgattttcgccggaaagcagctcgaagacggacgtaccttagccgattacaacatccagaaggaatcaacgcttcaccttgtccttcgtctccgtggaggtgctaagaagaggaagaagaagacctacaccaagcctaagaagatcaagcacaagcacaagaangtcaagctcgctgttcttcagttctacaaaggttgatggttcaagtaanggtcaacgtttgaaggaaggagtgccctaaagcaanctgttggngccngggaactttnagggggaatccattt

SEQ ID NO: 16259 - DNA, 446 bp, Arabidopsis thaliana
  unsure at all n locations
  Clone ID: LIB25-028-Q1-E1-H5
gcttttccctcgccgtcgaaatcaacatggcgccgaagaangataangttccgccaccgtcatcgaagccggcgaaatccggaggtggaaagcagaagaagaanaagtggngcaagggaaagcaaaaggagaaggtgaacaacatggtgctgtttgatcaagctacttatgacaagcttctcactgaagctcccaagttcaagctcatcaccccttccattctctctgaccgtatgaggatcaatgggtcgctagcaaggagagcgattagggagctaatggccaaaggtgtgatcaggatggtcgctgctcactcnagccagcaaatctacactcgtgncaacancacctaagatgtttggtttccttatccacctaagatgtttggctcttttcctaacncntgttgtttggntcctcaaggaacttgtnnnaatcctttgttt

SEQ ID NO: 16260 - DNA, 51 bp, Arabidopsis thaliana
  unsure at all n locations
  Clone ID: LIB25-028-Q1-E1-H7
tcctgctctgatgaaggcaatgacacgaaaangacatctgttgcaattcaa

SEQ ID NO: 16261 - DNA, 446 bp, Arabidopsis thaliana
  unsure at all n locations
  Clone ID: LIB25-028-Q1-E1-H8
actctctctcgctctcccaaaaactcatctctcaccaccgtctcaaaccaagttcgatctaaaagccttttcctttagattctctccaacaacaaatctctttgaatcactcagtcatgtcggttttacttcctctctgtctgattatctccatgttcacctattcaaacgcagcgtattgtctttgcaaagaggggaacgagcaagtgcttcagaaggcaatagactacgcttgtggaaatggagctgactgtacccagatccaacccaccggagcttgttaccaacctaacaccgtcaaaaaccactgtgacgtcgccgtcaacagttactaccagaaaaaagcttcttccggtgccaactgtgactttaacggngccgcctccccctctactaccctccgtcaactggctcaaactgttaactggttaaggtcnatgggaccc

SEQ ID NO: 16262 - DNA, 442 bp, Arabidopsis thaliana
  unsure at all n locations
  Clone ID: LIB25-029-Q1-E1-A10
ntaagtttgaagatgactttaggatcgcatggtccgatactcatatcactcaaattgacggaggcagagccattcagctcaaattggaccctagctcaggatgtggatttgcttcgaagaagcaatacttgttcggccgtgtgagcatgaaaatcaaactgatccccggtgattctgccgggactgtcactgccttctacatgaattcagataccgattcggtacgagacgagcttgattttgagttcttaggaaatcgaagtggacaaccttacacagtgcaaaccaatgtgtttgctcatggtaaaggcgatagagagcaaagagttaacctttggttcgacccttctcgtgatttccacgaatatgccatctcatggaaccatctccgtattgtcttctacgtanacaatgtgcccatcagggtttacaagaacaatga

SEQ ID NO: 16263 - DNA, 156 bp, Arabidopsis thaliana
  unsure at all n locations
  Clone ID: LIB25-029-Q1-E1-A11
caccatctgnagagtcgatgnnagcgctgatttatgggaccgagtgtatacttgtcaccaatgcatgcatcactanaggtagcgcatgaagatattctcgtccttaagaccatacacattgaatgtacctgaagcctcnanaaataggtgccntgg

SEQ ID NO: 16264 - DNA, 445 bp, Arabidopsis thaliana
  unsure at all n locations
  Clone ID: LIB25-029-Q1-E1-A12
gagtgaacacaggaatcatcaaaggtgctgataccgcatcagcttcaatccattttcctccattgtcgagtaacaatgctagattgaagatgggaaaggtagcaaaccgaggttgtgtccagagaagctatggaagctcaagatctcagtctcagttaatgtctctatcacgactactttcttgcaacgcatcatcatcttcttctcctcccgatagcagctccagtgaatacctcaaagactccggcctctgggaaacaccggttggggacatgagcgtggttttgtcgctgcaaattcagacaaaatgttctgatttgtttgctgagactcctgctgtgtcttgagtctctcttcttctgtagcattaactcgagttctatgcacttcaaaggcttctttttttgggtggacaagattatttgaattttgttgaataaccnaa

SEQ ID NO: 16265 - DNA, 52 bp, Arabidopsis thaliana
  unsure at all n locations
  Clone ID: LIB25-029-Q1-E1-A2
tatgacgattaaaccggnggttcgtanttccgacggggaatctaatcatcag

SEQ ID NO: 16266 - DNA, 500 bp, Arabidopsis thaliana
  unsure at all n locations
  Clone ID: LIB25-029-Q1-E1-A4
nnnnnnngaantgnnntcntggccngnaccggtccgganatanacgggtcgacgcacgcgtccgcctctccataaatttagttttgatccccctgggttccttgaagaaaaaaacaccaattccattcatattcttcttcatacgttcaataattcttacgaggacgagatcttcctaacgtctttgatcttcttcattaggagataagtctaaactggtcgaagatgttgggagatttcatcatcagactccttgtattgatattagggtacacatacccagcattcgaatgctttaaaacggtggagaagaacaaagttgatatcgaggaactcagattttggtgcaatactggatacttttggcgctaatttcatcattcgagaagggttggcgatttttttatctcatgggtaccgttatacggagagatgaaagtagcctccttcgtaaaacctctnggtaccctaaacaaagggaacgagacatgtgtttgaaa

SEQ ID NO: 16267 - DNA, 439 bp, Arabidopsis thaliana
  unsure at all n locations
  Clone ID: LIB25-029-Q1-E1-A6
aaattctctcattttcaagaaaatatctgaaaaaacagaaacttaacagaagcagcttcgatcaagagatggcttcacttacttcaatagccacgccttacccatcttcatcgcaggctttgcgtctgaaatcctccggaaacactcttttctctgccggagttcgatcggcagcaatggtttccggtcacaaaacgcttaagattcaatgcacttcaaccaaacctgccaaacctgcagctgaagtcgattggagacagaagagagagcttctattgggagaaaagggtgagaaatgtggacgttaangaagctcaacggttacaaaaagaaaacaactttgtgattcctgatgtaagancaagaaggcagagtacaaggngggtcatcctccggggaagctatcaatgttggagatgtncaagactccataaaggga

SEQ ID NO: 16268 - DNA, 423 bp, Arabidopsis thaliana
  unsure at all n locations
  Clone ID: LIB25-029-Q1-E1-A8
gaaaaaaaaaggagaagaagaccatcgttgttctccgatggctattaacagaattgctcatggttctctgtttctgacggtagtcttgttctttctgacggttaattacggcgaagctatatggttgacgattccgacgacgggtggaacgaagtgtgtctccgaggagatacagatcaacgtcgtcgttttggctgattactatgtcgtcgatgagcataatcctgaaaatacacctgctgtttcttctaaggtaacatctccgtatgggaacaatcttcatcancaagaaaatgtaacacatggtcagtttgcattcacaactcaaganactgggaactacttggctttgtttctggattgattccantcatcacttanccatcccaanaacccttggggttgattggaanattgggtatt

SEQ ID NO: 16269 - DNA, 440 bp, Arabidopsis thaliana
  unsure at all n locations
  Clone ID: LIB25-029-Q1-E1-B10
gttcctctttctcctttcttcactgtagaatccgtcgaccaaacaactagctccaatggcataatgagcattgtagtttgcaatttcttcttccgtgaagaagaagaagatggctttggagaaagaggaagaagcgtcacaaaacggtgcgttttgtgtccttgatgggctctattgcgaggaagaaaccgggtttgtggaggacgatcttgatgacgatggagatttagattttctcgagaaatctgatgagagtgttgtaaagtttcagtttttacctcttttggatatgttcttatgggatgacgatgagattctgagtttgatttcaaaggaaaacgaaacgaatccatgttttggggaacaaatcttagatggctctttggtttcttgtangaaagangcttanattgggttcctaaggttaaatctcattaagg

SEQ ID NO: 16270 - DNA, 499 bp, Arabidopsis thaliana
  unsure at all n locations
  Clone ID: LIB25-029-Q1-E1-B2
nnnnnngantggttctttggcngcccggtccgganatanacgggtcgacccacgcgtccgcatncatcagggccctgtgttctctgagtcaagtcaggaactgatgaataaccctgtaccgtgtcagtcggtctctggtggcaattctggtggttatttgtttccttcttcctctggatactgcaatgtttcagctgtcttgcctcatggaaggaatttgcaaaaccagccacctgtttccaccgtgcctagagacagattggctatgcaggattgtcctttgatagctcaatcctcgttgattaatcatcaccctcaagagttcatagatccacttcatgagttctttgatttctctgatcatgttcctgttcagaatctacaagcagagagtantggagtaagggtggactcatccgtggaacttcataagaaaagtgaatgggcaanaattgggcaaattanctgaatttctgtttaacaanggtctganccaaaa

SEQ ID NO: 16271 - DNA, 442 bp, Arabidopsis thaliana
  unsure at all n locations
  Clone ID: LIB25-029-Q1-E1-B3
ttgaagatgcctccaaagcaacaaccaaaggctgatttggcgaagaagcagaaacaagtggaagacaaaactttcggattgaaaaacaagaacaagagcaagaatgttcagaagtatgttcagagtctcaagcaatctgttcagcctaaacccgatgcaactaaagctgcagctaagaaaaagaaagaggaagagaaagcgagagaacaggaattgaatgagttgttcaaggtatctattagtcagcccaaagttcctgtaggtgtggatccaaagtctatactctgtgagtttttcaaggccgggcagtgtcaaaagggtttcaagtgcaaattctctcatgatttgaacattcaaaggaagggtgagaagattgatatttacagtgatacgcgtgatgaagatggagatatggatgagtgggatnaaganaaccntgaaa

SEQ ID NO: 16272 - DNA, 458 bp, Arabidopsis thaliana
  unsure at all n locations
  Clone ID: LIB25-028-Q1-E1-H1
angattctggcttcctccctcctccttacttcttgtttccatcttgggnttcaaatttcttcaaagattccgatcatcttcacgtcggagtacacaatctgaaaccgatcatcatcatcatcaattggggtttttaatccctagaatcagtagaaaatatcgatcattgagcttcgattctggtctccgtttgattgtttcggacaatcagagctttgagtctccgaaaaggttggttatgtcatcttctgttccaaactcggaccggaagattgttactggtcccgccggttatattcttgaagacgttcctcatttctccgacgactttcctgatcatcctacatatccaaatccattacaagacaatgcagcttaactctgttgttaagcaatantttgtcgatgaaggatgacacnggntcctcaaaaaaataatagttcaacccggaaagtcc

SEQ ID NO: 16273 - DNA, 438 bp, Arabidopsis thaliana
  unsure at all n locations
  Clone ID: LIB25-028-Q1-E1-F11
ttattcattcaggcatcttctcaaatttttgtttgtgaaaaaaacccacatcaaaagatctctcatttattcgtttcgtttctgctgttttgagtgtcgggttcgttttagctgtaatctttttttccggcgttcgatttgaaaaaatccggggaacaggtgatcggaatcacggctatacacgggatatcacggggtgttagctcacatgtccatattgtccgacagaagggttgtttaatcgaaactaatcctttgccgcacggaggacgtggagctctgccgtctgaaggcggcagcccttccgatctcctctttctcgccggtggcggttccagctttaacttcttttcctttaagttttaggagttagggtttgttaagtggttttttcccttccntcctttttttgggttgctccttgaatccccttttttc

SEQ ID NO: 16274 - DNA, 445 bp, Arabidopsis thaliana
  unsure at all n locations
  Clone ID: LIB25-028-Q1-E1-F2
ccccnaaagccgacgcaccttatcctctcctctttctccacaggcaaagtcctccaattccgccgctcccgtttcagccacacaccgtcgtcgtcgtcgtctcgttatcggactctcgtagctcaactcgggttcagaccagattcttttgatttcatcaaggaccatgccgagaatctgctgtacacgatcgctgatgccgccgtttcgtcctctgaaacctttgaatctgtcgccggcactactaccaaaacgacccanagcaatgattggttctctggtattgctaattacatggaaactattctcaagggtttgaaagatgggttatcaactgtacatgttccctaatcctaagggttcgctatcaatctattgactggtgcntgttaangntgcaagttcccattgacgaaaaaacaggtnaatctgcaagggtatgaat

SEQ ID NO: 16275 - DNA, 499 bp, Arabidopsis thaliana
  unsure at all n locations
  Clone ID: LIB25-028-Q1-E1-F4
ntgtagcgcgcgggtccggaanccgggcgaccangcgtccggggacttnaangccccccccaagagnaaccaagggttnagaatncgtacaggagaagatcgtctccgatcagaaccactaccggnggttcaaagtccgttaatttcnccgaactacttcaaatgaagtatctcagctccggtacgatgaagctcacgagaaccttcactacttgcttgatagtcttctctgtactagtagcattctcaatgatctttcaccaacacccatctgattcaaatcggattatgggtttcgccgaagctagagttctcgacgccggagttttcccaaatgttactaacatcaattctgataagcttctcggagggctacttgcntctgggtttgatgaagaatcctgccttaatangtancaatcagttcaataccgtaaaccntcaaccttacaaagccatcctcctaacncanctctaagcctannaactangaaaaggt

SEQ ID NO: 16276 - DNA, 324 bp, Arabidopsis thaliana
  unsure at all n locations
  Clone ID: LIB25-028-Q1-E1-F6
acttcaaatagattactttcaaagaanagagagagaaagaaagatggagaagaacatgaagtttccagtagnanacttgtccaagctcaatggggaagagagagaccaanccatgggtcnaatcaatgaagcttgtgagaattggggcttctttgagatactgaaccatggattaccacatgacttaatggacaanatcganaagatgacaaaggaccattacaagacatgccaagancaaangttcantgacatgctcaagtccaaaggtttggctaatcntgagacagaagtcgaanatgtcgattggganancactttcta

SEQ ID NO: 16277 - DNA, 426 bp, Arabidopsis thaliana
  unsure at all n locations
  Clone ID: LIB25-028-Q1-E1-F7
cgtctcttcgccattaaaacaccttcctttgcaaacaaagcttcaaactttctcttaaaacacccccaaatcagcanagatagggttaatcgaggaacctcaccgtaagtccactgaggattcaagttcttgctttggtttaaggaagaagaacagcanaaacctcaaggagaagaagaagtcaaagatgactcagagtcaaaccaacgacngagctggagctggagctgttacgacggtagaatctgttcctcctcagcctcaatctcangcctcancctcagccgcagcaagcagancaacgaagatggttctgcatacgggaagcttgagtttnagtagtcatatgtcgagagaagangaannngatgactcnttcggtctttcggcgtttaanagctaaagaagatgagattgannaacnng

SEQ ID NO: 16278 - DNA, 444 bp, Arabidopsis thaliana
  unsure at all n locations
  Clone ID: LIB25-028-Q1-E1-F8
agactctttgagaagctttcctctgtttctccgctgttatgggtagctccggcgacgttaactggaaacttgcggaccaccccaagcttcccaaaggcaaaactatcggtttgattgttctcgatggatggggtgaatctgatcccgatcaatacaattgcatccataaagctccaactcctgccatggattcccttaaagacgggaagcccgacacatggaggttgatcaaagctcatggtaccgcngttggtctccccagcgaagacnacatgggaaacagtgaattggcacaatgctccttgganctggtccaaattanncccaagggtnctaaaccttgtngatntcgcccttgcttcanggaaaaatcctangaaagaatgaanggttcaaataacatcnccccaaatccntttgnnaaanggaactgttccancttta

SEQ ID NO: 16279 - DNA, 445 bp, Arabidopsis thaliana
  unsure at all n locations
  Clone ID: LIB25-028-Q1-E1-G1
gcttctcaattgagccaaatactgcaaaaccccgctatgtcgcagatgatgcaaagcgtactttccaatccacagtacatgaatcagcttatgagtcttaacccacaactccgaagcatgctagatatgaatcctcagttgagggaaatgatgcagaaccctgatttccttcgccagtttagctctcccgagatgatgcagcaaatgatgtctctacaacaatcacttttctctcagaataggaacacggctggccaggatcctacgcaaactggtgctgcgacagggacagccaataacggaggactagatttattgatgaatatgtttggcagccttggtgctggcgggctaagtggcacaaaccaaccaatgttcctcctgaanagcgatttgcgaatcaattgcaacaanttgcaagaaatnggattctacgaaaaggcaa

SEQ ID NO: 16280 - DNA, 380 bp, Arabidopsis thaliana
  unsure at all n locations
  Clone ID: LIB25-028-Q1-E1-G11
tagatagcgttagagattcttctgcacataactttgagtttggagaagctacagctgatgtgatacgtaggaaaagatccataagaagtgaatctagtacaagaaatagcgcattacgcataaggttgggctctggatctgtagacaaaataaagaaacaagggattccttccacaagcgtgtatgatgatgcatcacttgaagaatggccttctacctcaaaagctgggtccaggtctagatctgcaagcgtcagcaaaccaagtcttcatactgggataagggttgaatagtgtctcaggaaaaaatctcatggttattgttgtctgaacacgaggaaggctgccgttatatacctcanctagggggatgaagttatt

SEQ ID NO: 16281 - DNA, 456 bp, Arabidopsis thaliana
  unsure at all n locations
  Clone ID: LIB25-028-Q1-E1-G2
ngccaaccgagcaggaaaactcacgccagcatctcaaaaagtagtggaggaaaaatctgcccaaaaccacgagaaggcgcaactccgacccaataaaacagaggcttgcatagccctgtttaagtgtgtaacttgagaattgtcagcccaagtcactctcccatcgttctgtacatacacagcttttgatgagaggaaagagataagatcatgggagaaacagaacacaangtggttttcagataaaagagttgcttggttcatcgatcaatcaagaagagaatgaagccatattggcgtctctctctgccttcattgttgttgttanttatgttagccatcctttttttgnccatgactctctggagttggnttcgtaaatgtatcggtaagtaatggtaataatttaagtttaaatgaaactcnctcnnaggggtaaatttgncaaaccttttt

SEQ ID NO: 16282 - DNA, 445 bp, Arabidopsis thaliana
  unsure at all n locations
  Clone ID: LIB25-028-Q1-E1-G3
ggaaatggcttgcaccgtagatttccggtgccttgacgaaggattcggcggcaaaacctacaaacgcaaacgcgaatctcaagaacaagccgccgccgaagcaatcgccgatgaagcttccatggacatcgatggtgctcctcctgccgcgaaacgtancgccgtcgcttcctctgaaaatccagacaaacctattgctctagctgtcgagagaccaacctacgacggtgtaatcgccgggaaagtctccggacggaactggaaacagccgcgaactcatagatcttcagggaggtttgtgaagaacaggaaaccagatntggaggagatgaagaggcaaanggagantaagaaagcgtataaggagaaggtgaatgagctgaaaggaagagattaggattaataanggtttanaanaagganaanaagggannnanananaaac

SEQ ID NO: 16283 - DNA, 446 bp, Arabidopsis thaliana
  unsure at all n locations
  Clone ID: LIB25-028-Q1-E1-G5
aaaaaaaaaaaaaaagagtttcttcatcggtcttcgtctcgtcgtttgattagttctctacatttgtttttgattagttcgcgattcatttctatcttgtctccggtcaatatttttcttcgatccgtcgatcggatattttgactggagatttaagaagtctgaaattgttagatcgcagctatgtcgtactctgactccgattcgtcgtctcatggtggcgagtacaagaatttccgacagattacgcgtgaacgactcttgtatgagatgcttagatctgcaaagacagggagctcaaaatccacctggaaggtactaatcatggacaaacttactgtcaagataatgtcgtacgcctgcaaaatggctgatatcacacaagaaggagttcattgggttgaagacatatttanacgaagacaaacanntccntcaangggngg

SEQ ID NO: 16284 - DNA, 447 bp, Arabidopsis thaliana
  unsure at all n locations
  Clone ID: LIB25-028-Q1-E1-G6
gaaaaaatggcgtctggtttgatcggaagattggttggaacgaaaccgtcgaaattagccacggnggcgaggttaattccggcgagatggacctctacaggagcggaggcggaaacaaaagcttcctctggcggcggaagaggatcgaacttgaagacttttcagatctatcgatggaatccagataatccagggaagccagagcttcaaaattaccagatcgatctcaaagattgtggtccaatggtattagatgctttgattaagatcaaaaacgaaatggatccatctcttactttccgtagatcatgccgtgaagggatctgtggttcatgtgctatgaacattgatggatgtaacggacttgcttgtttgacaaagattcaagatgaagcatcgggagacnacgattacaccgttgcctcatangtttgtgaataaagnntt

SEQ ID NO: 16285 - DNA, 438 bp, Arabidopsis thaliana
  unsure at all n locations
  Clone ID: LIB25-028-Q1-E1-G7
attgttgtattggttaagaaacacagccattgaagcgatgctatcatcaaggttttcctttttggggatcggcagttccagtgaagtcaatgactccgtgggtgtttctggaagcaagatcaaaccatctctaagtgttcaaacggataaagatgtgtataggcctggagattccatttttgtaactattgaggttgctaattctcatgacaacgcctctaatccctccattttggttgaaaagcttagttttgaggttaaaggtctagagaaattggacattcagtggttttctactcaaaaaccttcaccaggaagcaaaggacgaanagattttcangtgaacacatcttcctaagacagttcaacaccatcctttgatttcaaaatcaaatcctaacccctggtgcnaaagatgacattaaagggttcaancaa

SEQ ID NO: 16286 - DNA, 236 bp, Arabidopsis thaliana
  unsure at all n locations
  Clone ID: LIB25-028-Q1-E1-G8
gaacgaacgaacgcnagagatngagagagagagaaatatttangtggatcggattctganagcagctcgaacatctggttcgctgaatctttcgaatcgttctctcaaggatgtacctactgaggtatatcaatgtttggaaacgaccgganaaggagaaaactggtgggaggctgttgatttgcngaanttgattttggctcataangacattgangttttaanagaanatctga

SEQ ID NO: 16287 - DNA, 429 bp, Arabidopsis thaliana
  unsure at all n locations
  Clone ID: LIB25-028-Q1-E1-G9
ttcgagtgtgagtggatncaggagagagaattagatatttccgacncgaggcaaattcctagnggctcatggcgtcatcatctgatcacacggcgaatataatcgacggcaaggcgattgctcanancatcagatcaganatcgccgaggaagttcgcggtctancngacaancacggcaaggtcccaggactagctgtagttantgtcgggagccgaanggattcacagacctatgtgaatacgangaggaaagcgtgcgctgaggttgggattaagtcatttgacgtgggcctacnagangaatttctgaagctgatcttactagcaaagttcatgaactaaattcaatccgggatgtccatgggcatattattcactcccattgccganacatattaatgaggancatatattgngtcaatcacat

SEQ ID NO: 16288 - DNA, 423 bp, Arabidopsis thaliana
  unsure at all n locations
  Clone ID: LIB25-028-Q1-E1-E9
gaaggagcaagcgacagacaacgccatccttgagcanattcgaaagatggttgaagtacagattccncaatctttatttgaggaacaaggaagacagttttanggagctaggcttctagagattcanggaaacatgaagcttaacgaagaccagttggnttctctttcaagtcaaaaagcagtaaatgagtttctagatctcaaagatagagcatcaccaacataatcaagcanaatatanctgttggagatatcttcaagcgcgaaaacttagagttctcaacagatgaactagttaaagaggtcganaactcgatctcagaattcaagaaacataaacaagagttcgacgaggagcgtgtgaaagatcaggtacaagagantttagaaggagcaaaagtgcttgaatggttaaaagaccga

SEQ ID NO: 16289 - DNA, 439 bp, Arabidopsis thaliana
  unsure at all n locations
  Clone ID: LIB25-027-Q1-E1-C5
agcaaccgccgcaacaacgacgtcgtctcaccttcttctctcaagctcacgtcacgtggcatcatcatcccagccttcaatcctttcaccgagatctctcttgncaanggngggaaacgagcaccaactggagtgaggaaccatcagtatgcgagtggagtgaggtgtatggccgtagcggcggatgctgctgagacgaaaacggcggcgaggaagaagagtggatacgaacttcaaacgttgacgggctggttgctgagacaagagatgaaaggagagatagatgcanagctgacgatagtgatgtccagtatatcattgggcttgtaagcagatngcttcactttgttcaacgtgccgggatctctaacctgaccggagttcaaggngccgttatattcagggaaaagatnagaanaancttgactcatcctaaagg

SEQ ID NO: 16290 - DNA, 441 bp, Arabidopsis thaliana
  unsure at all n locations
  Clone ID: LIB25-027-Q1-E1-C6
gcccacgcgtccgctcactctctccgtagtctgagactcgccggaaaagcttgtattggcttctcttcgatttctggcggaagtaaggatatcacgtgagctatgaagttcnncatgcaatccatttctgggaggaatcgatctctggttcgagctctagttagtcggcgttacttcgcttcatcgccggaggaaatcgcaaagagaaattacgccaacgatctgtcggaatacaacaccgctgtcaactccgtcacagctcagcgcaggcactatttgctgagggatgtttatgatgatatgaagcttgatggtgtgcagcctacagctgatatcttccattcatttgtcgtgggaacgatgaagggtgctcggttaagcgatgcgttctttttccgggaagaaatgaaagccatggggattgctccagatgtnaacttg

SEQ ID NO: 16291 - DNA, 442 bp, Arabidopsis thaliana
  unsure at all n locations
  Clone ID: LIB25-027-Q1-E1-C7
gcaattcgtatcggtttaaagtaaaaaagcaatgggaggtggtaaagacaagcatcatgatgagcaagagaaaggatttcatggttttccaggaggtggacagnacccaggngctcaaggaggttaccctcctcaaggttacccaccacaacaagggtatcctccagctggaggctacccacctgccggatatcctcctggtgcttaccctgctgcgcccggtggttatcctcctgnanctggaggttaccctcctgctggctatcctgcacctggagctcaccattcaggacattctggtggtggactcggacgcatgatagcaggtgcaactggtgcanccgcagcancttatggagctcaccatgttggtcacgcctctcacancccttacggcatgctgtnaggacaatggagggtatnggcatncccctgncatggg

SEQ ID NO: 16292 - DNA, 434 bp, Arabidopsis thaliana
  unsure at all n locations
  Clone ID: LIB25-027-Q1-E1-D11
caangctcttgctctgggtcttcatgggactctttgctggttacgcctcttcacgtctctacaaaatgttcaaaggaacagagtggaagagaatcgctttcagaacagccttcttgtttcctgcagttgtgtcagcaatcttctttgtcctaaacgctctcatctggggacagaagtcatctggggctgtcccctttggaacaatgttcgccttgatcttcctctggtttggcatctcagttcctctcgtctttgttgggggttacattgggttcaagaagccagcggctgatgacccaatgaaaaccaacaaaatcccgaggcaaatcccagagcaagcttggtacatgaacccggttttctcaatcctcattggaggaaacctaccgttttggtgcantcntcatcgagctcttcctcatcctcanatccaa

SEQ ID NO: 16293 - DNA, 436 bp, Arabidopsis thaliana
  unsure at all n locations
  Clone ID: LIB25-027-Q1-E1-D12
gcccacgcgtccgaaagaatggcgcgaaaatccctaattttcccggtgattttgctcgccgttcttctcttctctccgccgatttactccgccggtcacgattaccgcgacgctctcngtaaangcattctcttcttcgaaggtcaacgttccggtaaactccctccagatcaacgcttaaaatggcgccgtgactcagcattacgcgacggttcctccgccggcgttgacttatccggtggttactacgacgccggagacaacatcaagttcggttttccgatggcgttcacaacaacgatgctttcatggagtataatcgatttcggtaaaaccatgggacctgagcttagaaacgccgtgaaagctgttaaatggggaacagattacctccttaaagcgacggggattcccggagtaatctcgtccaaatcgg

SEQ ID NO: 16294 - DNA, 448 bp, Arabidopsis thaliana
  unsure at all n locations
  Clone ID: LIB25-027-Q1-E1-D2
ccntgggctnaaatctnctttncaaatttcaatggcgtccggtgatgttgagtatcggtgcttcgttggaggtctancatgggccactgatgacagagctcttgagactgnggntcgcgggntacggcgacgttattgattccaaggtctgttacacgccgagatcggactccgagtgatatccatgatctcatcctcgacggatctgttccgatcttgtgtttctctgttacttgattcnattacnctgttactattctcgttctttgttactactactactactactgttacttgtattttcccaaatccggtacgttcatcttcctgcttccgtnaaccccggagatcnaatcggatttttttggtaatttggaaatttggttgtanatcaaaatgctttgtcanttttgttggattggtttgccnatcgggttttggannaatt

SEQ ID NO: 16295 - DNA, 101 bp, Arabidopsis thaliana
  unsure at all n locations
  Clone ID: LIB25-027-Q1-E1-D4
gntaagngggttnatcatgataatacacacaaagagaaaggacgtcaaaaggtacatggtgccggttctgatgatcaagacancaattcaanaagaactaa

SEQ ID NO: 16296 - DNA, 439 bp, Arabidopsis thaliana
  unsure at all n locations
  Clone ID: LIB25-027-Q1-E1-D6
gcttttttaaaaaggnttactactgtttacttctctgaatgcgttcactgcttcaccgtactatcttactcacatctccgtctcattctcttatccggcgcactnctctcnnngccatggccaccaccgcctcctcttccttgctcctcccttccatatctctcaacaatctctcctcctctaaaaatgcctcctttggcttcgccgccaagaatctcagccgatctaggatttctatgagcgtctctgctggatctcaagagtactactgttcacgattctctgttcgctgattacaaacccacctctgcttttctctttcccggtcagggagctcaagcagtaggaatgggaaaagagtctcagagtgttggagcaactggagagttgtataagaaagctaatgatatcttaaggtatgatctttggatattgtgtt

SEQ ID NO: 16297 - DNA, 434 bp, Arabidopsis thaliana
  unsure at all n locations
  Clone ID: LIB25-027-Q1-E1-E11
nctgtgttcaaaacaagttcattcgatctatagagacgaaacaaaaagagagatcgtacgcaaaagtttccgatatggctcgctcgtttggagctaacagtaccgttgtgttggngatcagcttcttcggatgtttatttgcgttgtcctctgcaatagaagaggctacgaagttaggatcagtgatagggatagatcttggtactacttactcttgtgttggtgtttacaagaatggtcatgtcgaaattattgccaatgaccaaggaaaccgtattacaccttcatgggttggttttactgactctgaaagactcattggtgaagctgctaaagaatcaagcagctgttaatccagagangactgtcttcgacgttaaganattgatcgggcgaaaatttgaggataaaggaggtcaaaaaggatangaaac

SEQ ID NO: 16298 - DNA, 455 bp, Arabidopsis thaliana
  unsure at all n locations
  Clone ID: LIB25-027-Q1-E1-E3
aagcgatagaagaanacaatggaaaaagacgttgatgaagttggaagtattgcccgtttcataaaggggaaactcnaggagttggacagagagaacttggcaaatagacaaaaacctggatgtgnaaaaggatctggtgtggatcgatcaagaacagcaacaacactttccttaaagaagaagttgaaagacaagatggccgagtttcaggttctacgagagaacattcaacaagagtatcgcgatgttgttgataagcgantttatacagtaactggggaacgggcggatgaagatactattgatgaattgattgaaactggaaacagcgaacagattttccagaaagccattcaagagcaangganaagacagtaatggacancttggcngaaatccaanaactcatgatccttcagaaaccttggaaanaaacntccttgacttacaacaaa

SEQ ID NO: 16299 - DNA, 455 bp, Arabidopsis thaliana
  unsure at all n locations
  Clone ID: LIB25-027-Q1-E1-E7
ttttagattttgagctctggaatggagaaaagtatcaatggatcatgcagactcatcaagagactcgtgattatactttcttgtctttcatattcctttgttcgatcagacnngacagngagaacaaatatcaattatgtatcagctgtgggagatcccgggatgagaaacgataacttaagggtggctatagaagcttggaaccaatgcaacgaggtcggtgaagaagctacaaacatgggaagccctcgaatggcagattgcttcgatatcgataactctagctttcccgtgaagataatccacaaagtcgacgaaagagacaacaggcttggggtangaaatgggaacctacggaggaataagcgctgggagacaacgcagatatctacgcaacgcaaaaaggaggtatacttangaaacaaatgtcanntgtgggcaagccaaatccatgg

SEQ ID NO: 16300 - DNA, 452 bp, Arabidopsis thaliana
  unsure at all n locations
  Clone ID: LIB25-027-Q1-E1-E8
tcgtagtggtcacgagatgaagaagacgttgacgtggtgggatctcatgtggtttggtatcggtgcagtcatcggctctgggatattcgttctcactggactcgaagcacgngggtcanngnggtccagccgtcgtgttgtcttacgttgtctctggtgtctccgccatgctctccgtcttttgttacaccgagttcgccgttgagattcccgtcgcatgcggttcttttgcctacttaagagtggagctcggcgacttcatggccttcatcgccgcgggaaacataatcctcgaatacgttgtcngtggagctgccgtggctcgatcgtgggacctcttacttcgccactctcttaaancataancctgaagacttccgcatcataattcacaaactcgggcgaagactaaanncactanatncaataagccgtccggngtttgngccang

SEQ ID NO: 16301 - DNA, 52 bp, Arabidopsis thaliana
  unsure at all n locations
  Clone ID: LIB25-027-Q1-E1-F1
ctccagngttcattttgctgatggagatttggtcaagggatgttcanaagtt

SEQ ID NO: 16302 - DNA, 471 bp, Arabidopsis thaliana
  unsure at all n locations
  Clone ID: LIB25-027-Q1-E1-F2
gnaaaaacccnncagganncaacaaancttcaaaancaaatnccctggnggtgaattatgacaacntaaancctttcattcaacgaatcgctgatggagaatcatctgatatcgtcnnggctcaggncatcacagaactcctcactagttcggggacttctgcaggaaagccgaagttgatgccttctacagctgaagaattggaaaggaagacatttttctacagcatgcttgtgcctatcatgaacaaatatgtggatgggctagatgagggaaaanggatgtatcttctattcataaaaccagagatcaagactccgtcaggtctaatggcccgtcctgttttgaccaagctactacaaaaagtcaacaatttcaagaaacnagaccattcaacaagntacaacngtctacaactnanccctgaccaagaccnattcttttgtcaagaacaggcaagcaagaagcatg

SEQ ID NO: 16303 - DNA, 452 bp, Arabidopsis thaliana
  unsure at all n locations
  Clone ID: LIB25-027-Q1-E1-C3
aaagagaaaggcactatgacaatgcaggatttganggtgattgatacttgtttcttattggtcttcataagtgtcaataggaatagagttgtttcacaccttatgttgcctcaaatgagtatgcgtagtgtccattatcagctactctatgcattcttacagcttcaataagagttgtttcatgatattaggcactcgatgctgatggaatggatatggaaattgacttgtcaaacctcgggaccgtaaataccatgtttgcagcattgttcagcaaactaggtgtgcctatcaagactactgtatctgctaatgttcttgaagaggctatgaatggaactgttacagttaggcctcttcctattggaacatcagttaatgggaangtgtgaacatcactacatcagttagactatcctcctaactcagtttgttagtanttggaantgaag

SEQ ID NO: 16304 - DNA, 508 bp, Arabidopsis thaliana
  unsure at all n locations
  Clone ID: LIB25-026-Q1-E1-H6
gtgnggaatgtcnntctcnntctggnctacagncctgcnttcgccggtcgccccacgcgnccgcaaacgcgtgggcggacgcgtgggctgaaacttttgccttgcttgcttgcccagaaagtcgccgagaaagttaaaagtagaacggcggagaaaaaaaaaacgaagaggaagaggagagatggagtcgcagaagaagatagctcatgagatcggaggtatgaagaacgatgctcttcgctttggtcttcacggcgttaagagcgatatccttagatctcatcctctcgaaacggcttacgaatctgggaagcaatcacaagaagaaatgaagaggagagtgatcacgcatacttatggagctgctcttcctttgaagatggatcttgatagacaaatcctttctcggtttcagagacctcctggaccaattccttcatcaatgcttggccttgaagtctacacaggagctccaaataattttggntttganggattacttgaatga

SEQ ID NO: 16305 - DNA, 471 bp, Arabidopsis thaliana
  unsure at all n locations
  Clone ID: LIB25-026-Q1-E1-H9
tncctggnctctagctgcccggntatcccggntacgacccacgngggcccgcacaaaccccataaaattaacanaaaaccaaaagaaggcggcgcaaacaaaagataatgcaaccagagacctcagatcagatgttgtactcgtttcttgccggaaacgaagtcggcggtggngggtngggcgtctccggcgactacatgacgactatgcagagcttatgtgggtcttcgtcgtcnacgtcatcgtattacccactggcgatctccggcatcgganaaacgatggctcaagacagagctttagctgctttgaggaancacaacnaagctgagagaagaaggagagagaggatcaantctcatctcaacangcntcgtaaccgtactcnccttgttattctaaggnccgattaaagcccacnctggctcgccaaagtangttcaaccgaagtcagagaancttanancngca

SEQ ID NO: 16306 - DNA, 384 bp, Arabidopsis thaliana
  unsure at all n locations
  Clone ID: LIB25-027-Q1-E1-A10
aaagagtggctgtctgaaatgattttggccggaaagagattctgtggagaagaatggtcaaaattgaaagtgaaatatccaacatttaaggacgagaatttgcnncggtagtgcttctcatcagcatatattatctcaatgcttcatgatagtcttggtgttgctcttgatgatgaaagaatcaagtatgcaagtaaagcaggagaagaagacataccactagattgggcattgggtgcttttatccttaatactgccacagccacttttgattacagtggtaaatctagaaaaattcttgacttgagtaatgtagccaaatacaaaatatgacatttgttactatataaaacaaaattgtttcagataaaanaaannaannna

SEQ ID NO: 16307 - DNA, 514 bp, Arabidopsis thaliana
  unsure at all n locations
  Clone ID: LIB25-027-Q1-E1-A3
ntgnttttttnggcggtcgtaccggtcaatnattccggtcgtncccacgcgtcgtccgcanaatnntcctcctggatttgacncnctcgagtcncgtcgatttcctccgggaggagacttgaaattcgtgactttccgattgtgaattccccgatggatctgcctagcctcgctttaatcgttggcgcggctgctttcagtcccaatcctgacgagngcagagctgctgancagngccttaatcagttgcagcacactcnacagcatttgataaggatattgcaaataattgttgatggtggctctgatntttctgtacgccaatctgctagtatccatttcaagaatttcattgctnancactgggaacctcattccggtgaccagaacataatcttgccaagttgataagaatgttgtcaaggaancanattcctgnatttgtctctcaaagtgcccccgattttgagagttcaaatgggagagttcctgaagaccatnatttacccgggcg

SEQ ID NO: 16308 - DNA, 447 bp, Arabidopsis thaliana
  unsure at all n locations
  Clone ID: LIB25-027-Q1-E1-A4
gcccaacccttccgagtcggctcttgctacctaaacttttctcaatctctagaacacaggttccagctgcatcattgttcaataatctgtacagacgtcacaaacgtngtgttcagtggacgagtaagatgtcaacagatagtgttagatcatccacaactggtggttctgcttctggagctagaacattttgctccctcgcagatttatcaaccaaaaagtgtgtgccatgcaatgcgaaggatctgcgcgccatgaccgaacaaagtgcccaagacctacttcaaaaggttgctggatgggatttggccaatgacaatgatacattaaagctgcatcggtcatgganggtgaaaagttttacaaangggctaaatttcctccaacggtgtagctgatatccctgaatcagaaagncatcaaccaaatttgcatctggtcnggtgg

SEQ ID NO: 16309 - DNA, 447 bp, Arabidopsis thaliana
  unsure at all n locations
  Clone ID: LIB25-027-Q1-E1-A8
ttaccggttaagactcaacggtaacagactcgcggggaatattccggcggagattgggaatctgaaaaatctcaacttcatcgatataagtgagaatcgtctcatcggnnacattcntccggagatctccggttgtacaagtctcgaattcgtcgatctacattcaaacggtttaaccggtggtttacccggtacacttccgaagagcttacaattcattgatttatccgataattcattaaccggttctctaccaaccggaatcggatcgttaaccgaactcacgaagctcaatctcgcgaagaatcgtttctccggcgaaatccctcgagagatatcttcctgtcggagtcttcagcttctcaacctcggcgacaatggcttcaccggagaaatccctaacgagttangacggnttccgtctcctgcgatntctccaaatcctca

SEQ ID NO: 16310 - DNA, 423 bp, Arabidopsis thaliana
  unsure at all n locations
  Clone ID: LIB25-027-Q1-E1-B10
tgcttacgtcgtcagatctgctcgttttttcgctccatttttgggtcaccattactcaggcttccgttttaaatatcacattagatggacgaaagcggaggtgngagtgggtcagtggccacacctgttcaacagcgagcacatgaggcatggaggatttaccaacactatcttgacaagactacacctcatgcaaattacagatggattggaactcttgtcgtcgctcttatctactgtttgagggtttactatattcagggtttctacatcatcgcctatggtcttggaatctaccttctcaatctgcttatcgggttcttgtcccctcttgttgatcctgaanctggnggggtctctgatgggccttctctgcctactanaggttctgatgagttcaancctttcaatcgcgtcnccccg

SEQ ID NO: 16311 - DNA, 450 bp, Arabidopsis thaliana
  unsure at all n locations
  Clone ID: LIB25-027-Q1-E1-B2
tcgaaagaagaaggatggttctccatgcttttgggaaaaggtaagagtttatgagagattgagattattacaaaaaatctaaactttttttttgtccattttttctcggagggaattagncttcttcatcgattttccggtggtttggattgtcaacttcatcttcttcttctctttctcctttcattttttttcttgtgtttcttcttttacgtgggtccttcaatctccatgaaggacccgaccattgcttaatcctaaacaaaactccaaaaatctaattcttttcgatctgttttatcttcaaataataatactctttgattgccaaaaccgattttgatcatcatcaatgcactgttttccgtgtttcccctccgccaaagaacaagaaatcctcaactacgaatgnggacaacgacaacaacgaanccanancaagatgntagg

SEQ ID NO: 16312 - DNA, 457 bp, Arabidopsis thaliana
  unsure at all n locations
  Clone ID: LIB25-027-Q1-E1-B3
attggttggctccccaagcanaatcgagcttcttaggtctaactcggtacccccaagacttgctcaccacttcatgactcgctcttctctcccttctttttcaactaaaggngntaangngcagcaaaacgatgttcaaagagctgctgctgctttgatgataggagatgaattgcaagaagcttggaagatggagacctgaaaggattgatctttctgctatggcttgtccancttcaagacagatctatctgacattccctgccgacagtaggttcagggaggaagatgtgtccaattacttcagtacttttggaccagttcaagatgtgnggataccatatcagcaaaaagagaatgtttggttttngtgacattttgtgtaccctgaanactgttaanagcaatcccccccaaanggaaatcccaacttngngtgtgantccanaanttcttg

SEQ ID NO: 16313 - DNA, 310 bp, Arabidopsis thaliana
  unsure at all n locations
  Clone ID: LIB25-027-Q1-E1-B8
gcccacgcgtccgcccacgcgtccggcacatttgaggcacaactacataacggtgttcacaatgacagcgatggagatgttgagacgatttcaatgggtatttttcagagtagaganggagtgggncaagatcactaaatcacatccaatgggtgagatttcacttgaagaagataaactacttggttctactacacctcatgatgtttagcatccaactatttttgtttatttcctctaatcctatgcaaaattctggttttcctaaaaaaaaaaaaaataaangnanaaaaaanaanananannaaaa

SEQ ID NO: 16314 - DNA, 506 bp, Arabidopsis thaliana
  unsure at all n locations
  Clone ID: LIB25-027-Q1-E1-B9
gnggnnnnnngnngtaattntttngnccggccgtancggtaaggaaantngtcgncccacgcgtccggagaaaggctgataatgttaatgcaaagaaacctgaaatctgggttccaggtcaaacgagaaatcctgaagcatatgttctgaaagaccaggaatcaagatatcgtcagcgtcatcntgatatgattttgaacgtggaggttcgtcagatattcaggactagagctaaaatcatctcctatgtccgcagattcctcgacaacaaaaatttcttggaggtcgagacacctatgatgaacatgattgctggtggagcagctgctagaccttttgtgacacatcacaatgatctagatatgaggctgtacatgcgaatcgcacctgaactctatctcaagcaacttattgttggtggcttggaacgtgtttacgaagataggaaagcaattcagaaacganggtatagacctgacccacaatccgggagttcancacttgcg

SEQ ID NO: 16315 - DNA, 456 bp, Arabidopsis thaliana
  unsure at all n locations
  Clone ID: LIB25-027-Q1-E1-C1
cttttgactccgtcgtaacaaagaacaaaacttccgtatcctggagagtaaattcctttatggctacgaatgggttaatggcgtcgtccagtgtgtttcttcatcgcccgcgtggcgcattngcttctagaacgaatcagactgtaggaaaatacggtaaaggccgtgttagtttcatgggcattgggacacgtcgtcttccggtggttttatccatgacggcgatggcggattccggtgaggaggccgtgaaatctgttttgcctggaaatggcatatccatcatggtgaatggatgtantggcaaaatggggaaagctgtaattaaagcagcagactctgcaagagtaaatattgttcccatatcntttggatntgccggtgaagattggtcanagaattnaaggcctgttggnaaaggagattactgtgcaccggtccaactgaaaaaagaaa

SEQ ID NO: 16316 - DNA, 421 bp, Arabidopsis thaliana
  unsure at all n locations
  Clone ID: LIB25-027-Q1-E1-C11
tcagtattgatgtggaaaaagccaaaagagttgtccatgatctcgctcagagtagattatcgaattcgctggtccaagccgtggcattactcaggcagagaaantctaaaggagtggtcttgtcgctgaatgatttgcttgcatgtgacaaagctgtgccggctgagccaatgtcatgggaggtctcagaggaattatctgatctatatgctatttattcaaagagtgatcccaaacccgcaccggaaaaagttttgaggctacaatatctgctgggaatagatgattcaactgcaactgccctccgtgaaatggaagatggagcattatcttctgctgcagaagagggcaatttcgtcttttaaatctttggagaaatcacttgagttatatgtattgtgttacggccaaggtggaaaaa

SEQ ID NO: 16317 - DNA, 327 bp, Arabidopsis thaliana
  unsure at all n locations
  Clone ID: LIB25-027-Q1-E1-C12
cgtctntttgnnngccggtccganataacgggtcgacncacgcgtccggantgatgattattcaaataatgtttgtatggttcgttagagaggactaaagtttcttatcaatttaaactctttttgttgcaatttatgtattaaatcattgtttaatagattggggattagtcaaaaaaaaaaaaaaaaaaaaaaaaaaaaaaaaaaaaaaaaaaaaaaaaaaaaaaaaaaaaaaaaaaaaaaaaaaaaaaaaaaaaaaaaaaaaaaaaaaaaaaaaaaaaaagggggggccccccaaanggttcnaanctnanttncccntnaatg

SEQ ID NO: 16318 - DNA, 511 bp, Arabidopsis thaliana
  unsure at all n locations
  Clone ID: LIB25-026-Q1-E1-H3
gtnnngcaactgtccnctnggctctgcccgtccgaccattcaaagggtcgacccacncgtccgcccacgcgtccgggaaaatcaaagagttagctcagctccgatcactctctccgattatctttcgctctttagattcatggtgaatcgtttaccgtcactctctcctcgtaaaccctagctctctccgaaaccctaactcgctgcgttggaaactaatcgagctcgtccctctcctttcggaagcatttctttaatcggtgttgcagaggcgttttggtttctgatcggtttagctttctgagttagaacagtctaaggctgcaatgagtattcctcagtcgaaatcttcatcaaatggatttccactcaaaagaggtgaaacagaggaagttttacataagacaaatacatcaaatacagtattcaatggggaagctggaagcttgaagaagctttcacttgatcggttagtgtactcacaacatgttaagattggggcatcatgttg

SEQ ID NO: 16319 - DNA, 511 bp, Arabidopsis thaliana
  unsure at all n locations
  Clone ID: LIB25-026-Q1-E1-E6
ggnngnnaatgttttgtctgccctgntccgccgaaaccatcantcgcgggtngccccacgcgtncgtgancttttctctctgttcattctcttttctttagcttaattcagcaaaaaatttatctttgtttctctcttttgtttctttcctctgcaaagtaaagttatgagagcttaataangtttggcncatcttcaagcttcagatctgattccttgtttctacaagtaattgtctctttctttttcgattaaccaccatttctgtgaagaaaacctttttgctttcttcaagattcgagtgaggaaaattttaagctgaaaatgctggaaattggaagtcccaatgctctgtttttccgtacgaatactacttgtaataatcttctccgtgagcttcagaaaatatgggttgaaattggtgagactgagactgagaaagatagaatgcttatggnattagagagagaatgtcntcaaatccaacaaaggaaagttgatganggctgca

SEQ ID NO: 16320 - DNA, 92 bp, Arabidopsis thaliana
  unsure at all n locations
  Clone ID: LIB25-026-Q1-E1-E8
ccttctctctctccttctgaaagtctctctctttgccgtcgttagcctcttcctacacttggggctgcgattcttccantcctccgntttca

SEQ ID NO: 16321 - DNA, 427 bp, Arabidopsis thaliana
  Clone ID: LIB25-026-Q1-E1-F1
aatctctctctgaaccatgagaggtcacgatcggattaacaattgtttgccggaggaacttatcctcgagatattccggcgacttgaatcgaaaccgaatcgcgacgcatgctccctcgtctgcaagcgatggttatctctcgagcgatttagccgcaccacgcttcgtatcggcgcttcgttttctcccgacgacttcatctccctcctatctcgtcgctttctctatattacctctatccatgtcgacgaacgtatctccgtctcccttccttccctctctccttccccaaaaagaaaacgtgggagggacagttcgtcgccatcgtcgagtaagcggaagaaattgactgataagacacattctgggagctgagaacgtcgagtctccaacttgactgatacggggcttgactgctctaacgaa

SEQ ID NO: 16322 - DNA, 207 bp, Arabidopsis thaliana
  unsure at all n locations
  Clone ID: LIB25-026-Q1-E1-F10
tngacttggncttaatagaaagagtantgatgatgatgntgaagaatgtccggggggtggtgatcttgacatggatgatgatgacattgnnaatggggatgactgggagcacgaggaaattttcacggatgatgatganccagtcggtcntgatcctgaggaacgtgtagaccttctggctcctganattcctgctcctccaganat

SEQ ID NO: 16323 - DNA, 363 bp, Arabidopsis thaliana
  unsure at all n locations
  Clone ID: LIB25-026-Q1-E1-F11
taagtcacnaaagnaagaaangnacacagaaagtttcaatggccgcctccacaatggctctctcctcccctgccttcgccggaaaggctgtgaacctttcccccgcggcatctgaagtcctcggggggcggccgtgtgacaatgaggaagactgttgccatgccaaagggtccatcaggcagcccatggtacggttccgaccgagtcangtacttgggtccattctctggcgagtcacngagctaccttaccggngagttccccggggactacggatgggacaccgctggactttcagctgatccgagacattcgcaaggnancgtnagctanangttatccacagcnggtgggctntgctcg

SEQ ID NO: 16324 - DNA, 448 bp, Arabidopsis thaliana
  unsure at all n locations
  Clone ID: LIB25-026-Q1-E1-F5
ttgagagggagaaaaagggcgatcgattagggtttttgtgttttcgtcttagtatcgaagatgatcggagctgtgaactcggtggaggctgtgataacgtcaatccaaggtttatcggggagtccagaggatttatctgcacttcacgatcttttgagaggagctcaagactcgctccgagccgaaccangtgttaatttctctactcttgaccagctcgacgcctcgaagcactctctcggttacctgtatttccttgaggttcttacctgtggtccagtgtcnaangagaaagctgcttatgagataccgataattgcacggttcatcaattcttgtgatgctggggcanattcgttttggcgagctataaattttgtatctcctttgtaagatattganagaccatgtttatagcactggggagattcgtttccnaaggagtaag

SEQ ID NO: 16325 - DNA, 491 bp, Arabidopsis thaliana
  unsure at all n locations
  Clone ID: LIB25-026-Q1-E1-F6
gancgnaccacaccnngtattcncgngtcgccccacgcgtacgcaaacgcgtgggcgacccacgcgtccgggaggttcaccatatatctatcctctctatgggttgggagaattgcctcaggcatttgcacgacttagtgctgtctatggtgggnngtanggngtngnganaaacctgagtgcaangtagagtttgacgaggagggtaaggtttctggtgttacatctgagggagagactgccaaatgcaagaaagttgtctgcgatccttcttacctaaccaacaaggtcaggaagattggcanggttgctcgggcgattgccattatganccaccctattccaaacaccaatgattctcaatcgggtgcaagtcattcnanccaaaaacaattggggcccgcaaatcaaacatgtatgtcntctgttgttcatattcacacaacgtttctcccaanggaaagntcatancaattttgtcancagacgct

SEQ ID NO: 16326 - DNA, 53 bp, Arabidopsis thaliana
  unsure at all n locations
  Clone ID: LIB25-026-Q1-E1-F7
ttcnttatttattagccgccnaagggaattcctccggcgccattttttataat

SEQ ID NO: 16327 - DNA, 67 bp, Arabidopsis thaliana
  unsure at all n locations
  Clone ID: LIB25-026-Q1-E1-F8
acgangactgttgccaagccaaagggcccatcaggcagcccatggtacgggtctgancgtgtcgngt

SEQ ID NO: 16328 - DNA, 444 bp, Arabidopsis thaliana
  unsure at all n locations
  Clone ID: LIB25-026-Q1-E1-G1
aagctctgttagagagaagaagatcaagaccaacgggatttggttaaacgttgctgagaaaggagacgaagaagggcctttggttctgttactccatggtttccctgagacatggtactcttggcgtcaccagatcgatttcttgtctagccatggttaccacgtggtcgctccagatctcagaggctacggtgactccgattctctaccgagccacgagtcttacactgtgagtcacctagtcgctgatgtcatcggtttactcgatcactacggcactactcangcttttgtggctgggcatgactggggagcaatcataggttggtgtctatgcttgtttanaccanaccgagtcaaanggttcataagtctctctgttccataattcccaagagattcaaaactcaaaccttcaaaatttttcaaaanttttggngaagg

SEQ ID NO: 16329 - DNA, 134 bp, Arabidopsis thaliana
  unsure at all n locations
  Clone ID: LIB25-026-Q1-E1-G10
canggttgcacagggggaggangacgatgaagatgttgatgagactggtgttgaagccaaggacattgatcttgtgntgactcagtccggtgtctcgaggcccanggctgttnaggctcttattcgcgagtnac

SEQ ID NO: 16330 - DNA, 467 bp, Arabidopsis thaliana
  unsure at all n locations
  Clone ID: LIB25-026-Q1-E1-G2
ntgctgcgctaagaaagaaaagaagaagaaagatgccaggagcaattgtggaggaagagaaatctcagattgaatccatcaaagagcaattgaaactcgagaaggaagatgatgttgttgtggaggatgtgaaagacggagaggaagaagacgatgatgaagacgatgaggacgtcgaanttgaangggaangtggaaatgagaatgcaaagcaaagtagaagcgaagaagaaaagtcccaaagctgttctaaagcttggcatgaaacctgtctcagatgtcagcagagtgacaatcaaaagagccaagaatgtgttattttgtcatctcnaaagcccagatgtttacaaagaatcccaatgcaagagacttacgtcaatttttggagaaggccaanggtccacgaatttgaagctctcaacctacaagactcaagctggctcaaaangttttaagatgccctgatg

SEQ ID NO: 16331 - DNA, 513 bp, Arabidopsis thaliana
  unsure at all n locations
  Clone ID: LIB25-026-Q1-E1-G3
ntgggngnggaatgtcnnctcgcnctgccgtccgagnttaganggtcgncccacncgtccgcaacgggctctgtttcaataaaaaaaatcccctccctctcatatttacctcccgaataaaaccggagggagagaaaaaacataaaaagcanaaaaaaaggtaaaatcaaaaaggggaaaaatatatannaacanaaaaaaaaagttagaaaaaatggcagtaggaaaggttgtggtatctgtggcatcactcctcctagtggtgggtgttgccataggagttatcacgttcgttaataaaggaggcggcgccaatggcgacagtaatggtcccataaactctcatcagaaagcggttcagacaatttgccagtcaaccacagaccaaggttcgtgcgcgaaaacactcgacccagtcaaaagtgatgattcaagcaagcttgtcaaagccttcctgatggctactaaagacgcgatnacaaaatcctcaaacttcacggntttgaccgaang

SEQ ID NO: 16332 - DNA, 507 bp, Arabidopsis thaliana
  unsure at all n locations
  Clone ID: LIB25-026-Q1-E1-G4
gngnggaatgtcntctcngtctgccgtccgagnttcanagggtcgccccacncgtccggaagtttacagtgatagttgcccagaagaaccaccacacaaagttcttccagtctcgaggccctgataatgttcctccaggaacaatcattgacagccagatctgtcacccacgcaactttgatttcnatctctgcgcccatgctggcatgattggnactacaaggncaacacattaccatgttctgtatgacgagattgggtttgccacagacgacctccaagaacttgtgcattctctgtcctatgtttaccagaggagcaccactgcgatctcagtcgttgcacctgtatgttacgctcatttggcagctgcacagatgggaactgtgatgaagtatgaagagttgtctgagacttcttcgagccatggaggaatcancacacctgggagcaatccctgtgccaactatgccgcaactgcacaataatgtttcaacctccatgttc

SEQ ID NO: 16333 - DNA, 515 bp, Arabidopsis thaliana
  unsure at all n locations
  Clone ID: LIB25-026-Q1-E1-G6
ngnngnggcaactgtcctnctcttatctgctcgtcccatantatcantcgccngtcnccccacgcgnccgggcaacttcgagatcaagttaaagaatggcggcaacatcactattgtacaatcagctcaaggctgctgaaccattcttcttgttggctggtccaaatgtgattgaatccgaggaacanattcntcgaatggcaaagcacattaaagacatttccacaaaagttgggctgcccctggttttcaagtcaagttttgataaagctaacagaacttcttcaaagtcatttcgtggtcctggcatggccgagggtctgaagattcttgagaaggtgaaggtagcatatgatctaccaatagtaactgatgttcatgaatcaagccagtgtgaagcagttggcaaggttgcagatataattcagattccagcattcttatgtcgccagacagatcttctggttgcagcagcacaaaccggnaaaattatcaatattaagaaaggncaattc

SEQ ID NO: 16334 - DNA, 88 bp, Arabidopsis thaliana
  unsure at all n locations
  Clone ID: LIB25-026-Q1-E1-G9
agacgccacgatggatgaatgatttcgcaaatcgtcgagattttggaattcgatgaagagcgtancaacctgngctttgtcnttcttc

SEQ ID NO: 16335 - DNA, 445 bp, Arabidopsis thaliana
  unsure at all n locations
  Clone ID: LIB25-026-Q1-E1-E3
atggattgaattggtttggctctctgctcgaacgattctctctgataacccgattgtcaactccacagcccacagacagagacagagttcgttgccttgcctccgtgttgttttgttcanaccgcgtgaaaagctttcatcatcaattcatcatcataaagaggtgtcgtgtgagcacacgcaatctcccaatctctcttctctctctctctctccaatctccatatctttgtcctctataatccggagaagtagctctaccatcgaaatctcccaacttgcttccttgaagctttttgctttttgttttcgtctttgcgcgtgtcccattctcttctccaaagttccctataatagtgaaagctcatcaagttatttagctctcagtttctgaaagatggaggtcaagttatggaatgataagcgtgagagagaaatgtntgat

SEQ ID NO: 16336 - DNA, 529 bp, Arabidopsis thaliana
  unsure at all n locations
  Clone ID: LIB25-026-Q1-E1-H11
nnnnngnnntgggnnnnnnngagtggtctgcctggttgtagcggcccggatatcccggntcgacccacgcgtccgcccaagcgtccncggacgcgtgggcggacgcgtgggcgaattaaagtcaatggcgtcacgtttatgtcttctccttctcgttgcgtgtatcgccggagcatttgccggagacgtcatcgaactcngncgatctcagagggagttcgattatttcgctctatctcttcaatggcctggaacctattgccgtggaactcgccattgttgctccaaaaacgcttgctgcagaggctccgatgctccaactcaattcacaattcatgggttatggcctgactataacgatggttcgtggccttcatgttgttatcgatctgactttaaagagaaggagatttcaacgttgatggatggtcttgagaagtactggnctaatctcagttgtggttctccatcatcatgnaatggtgggaaagggtcattttggggcacaagtgggaaaaacatgggactt

SEQ ID NO: 16337 - DNA, 283 bp, Arabidopsis thaliana
  unsure at all n locations
  Clone ID: LIB25-026-Q1-E1-H2
tgggtnngtaatgtcttctcgnanntggtcgtccgtgtgntcacanggtngccccacgcgtccgcaantccaagcgacggcggacagggcgtggaggacccgccggagaagaatgcttggagttgaagcaacccataataaattaattgtcagaggagagtttccgggtggcggcgtgagtatcgacccgggtcgggtaaacgggtccaacgcagggagggcaatccccgcattagaccatagagaaacgaaaataaaggagaaaaaaaaaaaaaaagggcgg

SEQ ID NO: 16338 - DNA, 340 bp, Arabidopsis thaliana
  unsure at all n locations
  Clone ID: LIB25-025-Q1-E1-B8
cagcgaattcacatctcangctgcttttgaatccgccgtaactaaaaacaatcctccttttctcgattcgttaanctatggccccgccggcaggacaaacggcggcggtggcngnagcggctggcgccgatggtgctccaccgcancagcagcgtggatttggttccacgatttccggcatcgttagaatcgccgtcttttggnattttgcttcnaagttcttttctcctaagtcagaaacntaggggatcccactgctcccgtctcaagctcangnctagtcgcttccanagngggcgatacaggtgggnntgntgggttngctaccaaaancaggggg

SEQ ID NO: 16339 - DNA, 451 bp, Arabidopsis thaliana
  unsure at all n locations
  Clone ID: LIB25-025-Q1-E1-B9
nagcttttgccattgcttctgctctcacttccacactcacattatccacgagcagagtccaaaatcctacccagagaagaccacatgtagcgtccacatcatccaccggtggaagatnaatgagagagcgcttggtggtggttcgtgccggcaaagaagtttctagcgtctgtgaaccacttcctccggaccgtcctttatggttccctggtagctctccacctgaatggctcgatggcagcttacctggtgatttcggtttcgatcctctcggtttagggtctgatccggacaccctcaaatggtttgcacaaagctgagcttatacatagccggtgggcaatgctggccgtgancggtatcatatacagaatgtcccagcggttangtttcaatggaaanttccaatggtatgaccaaggtcncctgagtacttcgcggattccantag

SEQ ID NO: 16340 - DNA, 448 bp, Arabidopsis thaliana
  unsure at all n locations
  Clone ID: LIB25-025-Q1-E1-C10
agagagagagagagagagagagagagagagagggacgaaatattaatcatcgatcaagttgcttcaatcgcgaaaaaaatccatgaataaaactatggaatggaatgtgaatnaaaggatttggttatggtgatgacgcgatcttcgattcgattcggtgattaaaagatttggaagctcagatctcaagctcggatttctaatttttgttggattatctaacccaaaagccaaaaaaaaaaaaatgaacggtggtgacgatgccgctactagtggtcctcctccgtctttagagtggagattctctcaggtcttcggtgagcgaaccgccggagaagaagttcangaagttgacatcatttcagccatcgaatttgataaaaagtggagaccatctcgcaactggtgaccgttgggggccgaagtanttccttttgaaanggacana

SEQ ID NO: 16341 - DNA, 456 bp, Arabidopsis thaliana
  unsure at all n locations
  Clone ID: LIB25-025-Q1-E1-C11
aaatttgaacttgtggagagagaaaagggttagatacagagagatagcgaaagagaagaagaagaagaggtctatcgacagagcaaacttcgtcaagagatccgttaaaaggatccatttggagctccgattcgagctagagtcaataatgagcggaagacagagatctgttgcagcggcggtgcatcaccagaggcagctctccgataaccctctcgatatgtcttcatccaatggcagatggcttcaatccactggtcttcagcattttcagtcatccgccaatgattatggatactatgctggtgggcaaggaggtgggtggtcaagcagcaagaggataccagaatgctcagagaggaaacgaattctttgggggaaccaactactcctcaatacggtgctcgtcctaccaaccaaaggaaagaacatgatgaatccgagtttantcctggg

SEQ ID NO: 16342 - DNA, 543 bp, Arabidopsis thaliana
  unsure at all n locations
  Clone ID: LIB25-025-Q1-E1-C2
nnnnnnnnggaantgtctttcctggcccccacggtccgganaaancccggggtcgncccacgcgtccgctacggttcaaacattaaaaagatagatggagaagaggagctctattaaaaacagaggagtacttagattaccaccagggttccgatttcacccgaccgatgaagagctagtggttcaatatttacgtcgaaaagtaaccggtttacccttaccagcttctgtaataccggaaaccgatgtttgtaaatccgatccatgggatttaccaggtgattgtgaatcagagatgtatttttttagcacgagggaagctaaatacccgaacggaaaccggtcgaaccggtctaccggttcgggttattgggaaagcgactgggtcctcgataagcagattcggtaagaaagaaancttgtccntgggggatgaaagaaaaactccctggttttcccaacaaaagggtaaaacccaaccaaaaccgggaacaangaactaactggggttccntcaatgaaatatccgtccntggtttgatt

SEQ ID NO: 16343 - DNA, 62 bp, Arabidopsis thaliana
  unsure at all n locations
  Clone ID: LIB25-025-Q1-E1-C5
aattagaatggcggatttgggattttngaatgggggaaacaanggaatttacgggttnggtg

SEQ ID NO: 16344 - DNA, 457 bp, Arabidopsis thaliana
  unsure at all n locations
  Clone ID: LIB25-025-Q1-E1-C9
ngattcaccaacatcctaaaacccttttgatcaaaacatggcttccatttccagaatcttaccaacagatggcagattaagtcaatgcagaatcaacacctcgtgggttccttctanaaccagaactcaaactcacttagattttcccaagttagtttctgttagtaactctgggataagtttgaggattcagaatagtaaacctattagccctgtctttgctcttgaagcaacttcctccaggagggttgtttgcaaagctgctgctggtgtgtcaggtgacttacctgagagtactcctaaggaacttagtcagtatgagaagattattgagcttttgacaacccttttccactttgggttantttggggaacacntggttgggatcttcaaggcatncctngggttacatggtttggnganaggnttcctntactccaaggtcctggatttcnt

SEQ ID NO: 16345 - DNA, 453 bp, Arabidopsis thaliana
  unsure at all n locations
  Clone ID: LIB25-025-Q1-E1-D11
aattttgcttctccttttcttaaaccaaccttaggatagttttcaaagaaagaaatatgcttaaaccaaaacatttttgagaagacgatggctcgataccgaccactgaagtcgttccaacctcttcaatggatagtactgtaatttttggtaatatttcaaaagttcaacactcaacagtcaacatctatattatttttttctttattcaacaagtcgaatccaaatttggtgtgttttggtttagctaatcacttgcgactaaactaaacacaatccactaatcatttaataacgaaacggtccaacccccattaaaccaaactatttttcatatttataacaaagcttttccctccacgcaacttcaatatccaaaataacaaaacatctcttcacttctcatcacancatgcatcatcatcatcatccaatgcaatcgcaaacccttca

SEQ ID NO: 16346 - DNA, 456 bp, Arabidopsis thaliana
  unsure at all n locations
  Clone ID: LIB25-025-Q1-E1-D12
anattctgatgacgaatcttgcctaaagctgtgacttctccttcgaattctttgactccttttgttgttttctctctcagacgcttcacagcgacttcattgccgtcttctaatgnggccttgtatgctgtgccatatgtacttttccccatgatctcagctgtggcacagagcagatcatcggcggtgaacacgaacggaccatcgaaatggactagcttgcctcccatttcacctcctgctgatgctgttcctgcgacacctgctgatactgtcttctctgaggtcttgtcctttccatctttttgtttcaaggcggcgcgtttcttgatcaggcagcagaggagtatgcagcatagtanaaagganggatggctaaaaagagctccgaatggcgaataaggattacntctttcactggagaagttttccggttggtggnggttttccttgggt

SEQ ID NO: 16347 - DNA, 512 bp, Arabidopsis thaliana
  unsure at all n locations
  Clone ID: LIB25-025-Q1-E1-D2
nnnnnnnngaactgtntttctggcccgccacggtccgaaaancccggggtcgncccacgcgtccgccnacgcgtccgcccacgcgtccggaacgcatgcgtcagctatacaagaaagatctgttgaaaattgtggatatagtgctctcacaccagggcataaaaaacaaaaacaaactcgttctccggctcatggagcagcttgtttaccctaatcctgctgcttacagagataaacttattcgattctcaacacttaaccatactaactactctgagttggcgctcaaggcgagtcaattacttgaacagaccaaactaagtgagcttcgttcaaacattgctagaagcctttcagagttagaaatgtttacagaggacggagaaaatatggatactcccaaagangaaaagtgccattaatgaaagaatagaagatnntgtaagcgcatccttagctgttgaanacgctctcgtgggactaattgaccatancgatnacacacttcaaag

SEQ ID NO: 16348 - DNA, 494 bp, Arabidopsis thaliana
  unsure at all n locations
  Clone ID: LIB25-025-Q1-E1-D6
tntctnaggccnncgtaccggtaaatattcccgggtngncccacgcgtccncgantctccgccatggctgctaaacctcttcttcttcctcttctcctccttcttcatctctcaatcaccttagctcaaaacgacacaaatgctctcacactcttccgtctccaaaccgacacacacggcaacctcgccggaaactggaccggctccgacgcttgtacctcctcatggcaaggcgtttcttgctcaccatcttcacaccgcgtcactgaactatctctcccttccctctccttacgaggaccattaacctctctctcctccttagaccaacttcgtcttcttgacctccacgataacagactcaacggcaccgtttcaacactcacaaactgtaaaaactcagactcgtttatctcgccggtaacgatctctccggtgagaatcctaaaagagatatcctttcttaaacggatgatacgtcntgatctctccgg

SEQ ID NO: 16349 - DNA, 267 bp, Arabidopsis thaliana
  unsure at all n locations
  Clone ID: LIB25-025-Q1-E1-D8
aaaatcatcaccaccgtcaacttttctcttgcggacaagacgattctccgattatccccaagaggagaatcctcataatcattttctccgattcgattcgtcttccttggtcggggattgcttcatgaatttctaggacaacaatggaggctcgtccagttcatagatcaggttcgatagacctcacacgcacttcttcaatcncatctanacaaaaancttcancagtaggaancatantttcatggagatcaggtngcancagtc

SEQ ID NO: 16350 - DNA, 421 bp, Arabidopsis thaliana
  unsure at all n locations
  Clone ID: LIB25-025-Q1-E1-E1
aaaccgtataaccgttcggttcagaggtgccgaaccgaaccgacccgtaaaccgaaatcctcaaaagaaattgccgatcggtttgctactgttcaaaacctcggtgccgagaaccgaaactgtcggttttttcggttcgggtttctcggtttcttccgaactcccaggcctagtttggttttatttttcacgagttttgcttctcttttcatcggcgacgacgacgtcgagtttctgtcaaaacgttaacgatccgactcgagcgtcgacagtaagagaagaagacagcgattgtgtgtagatcgacggcgaaagtttgtccattcgtcccattcnacggagaatacnttccattcgggttccattcaaatccggaaattttgangatttaaaaccgggaaattgcaattaatactccacc

SEQ ID NO: 16351 - DNA, 430 bp, Arabidopsis thaliana
  unsure at all n locations
  Clone ID: LIB25-025-Q1-E1-E10
aaatcggagttactatgtggaccgtgaaaccggcggcgatgccgaatcaatttcttatgagacccaccgtagcaacttctgtcggctattcacagcnaccaccaccgcataatgttatgatcgagaattcttctgaaattttctgagctcaatttcttaatttgtgaattgatttgtggcaagagcgactccatgggacttggagccatctcgtctctgctacatatatgtgggcaagagcagtgctacttatgcaacaggtaactccagtgtttttctttgggttttagctaaagatttttaggctatatgaattgcatttggtttggactatatgttatctgtgtggaatcgaatcaaaattatcaantccggttcgtccgganttggattaattgtgggaagtgacaattgccaagnttgtctttng

SEQ ID NO: 16352 - DNA, 451 bp, Arabidopsis thaliana
  unsure at all n locations
  Clone ID: LIB25-025-Q1-E1-E12
ggggagagagagaaaagaagagcgaacaaattccttctttttcccctctttctctctctctcccactctctcatcttcttcttcttatgattttcaacttattacaannncaacaacaacaaaataatcttgcaaagtttcagtctcaggtggttcacagttaatgctacttgcaatgatgaatccatcccaatttcgataacctctactgaggcatccaaatgttgaacggaaaagaagagcctaagcagaagaaaggttggtcagagtcgctgctagaatttcggtcagggtttggggaaaagatgaaagttgtgtcgaagaaacgttgggaatctcttggtcctcttcaatctgaaaaagcaaatcaatttgcacnggttttgcctcctttcgaangttgaaagtcaaacaaccaatgggccaaaggccgttgcaaccaagtgtatct

SEQ ID NO: 16353 - DNA, 441 bp, Arabidopsis thaliana
  unsure at all n locations
  Clone ID: LIB25-025-Q1-E1-B6
ttatttctaacaagatatataacaatggcaagagttcagctatttttatgctttaccattctttttgcatcagtgactcttctggacatcgtttcagctcatttgaagcttaagccaactttgcctcagattgaacctccacaaacgttgaaggatgttgaaccttacaccgttaaagtagtgatagtctttgtgtccgacctcgagaaagaatgtcccaagacaaataaattcaaggctttctttgagaaacttagggcattcgccaagtatgtctgcccaataaaaagaaaagaccaagtagattacgaccgagacatgaaggccaaggctggaggcctcttccaagtcatatccttcttttgcgattgggaaagataaaaaaggaantcaagaagggataaatgggaagttataatacctttaagtttatganattcc

SEQ ID NO: 16354 - DNA, 120 bp, Arabidopsis thaliana
  unsure at all n locations
  Clone ID: LIB25-024-Q1-E1-H11
cccaaggnatcanacatgcatcacgaagaaggctctgttcctaacaagcctgtctctgaaaacgtagtaaccaagganaacaacacagaaantggtgagaaacaganccagacantgggt

SEQ ID NO: 16355 - DNA, 456 bp, Arabidopsis thaliana
  unsure at all n locations
  Clone ID: LIB25-024-Q1-E1-H12
gcggacgcgtgggaaaattctgactcgttgatccataaagcgaactctttctcgctcttagtttctgcatttcgtctatcaaaagtaggattatacactttttgtttttgtttttgtgaaaccctatacagttcgatctaaaaccctaaaaagatggtgaaaccttccgatttcaaagcagttcacaaacttattcaattgcattacagtcgagtcaacctgttcacaacgacgggatggtcaaaactctcagctttgtcttctccggctcttccttcaaatggggtttctcagcttcagcctaagtctggtttccacaccttctcgtcgagacccacttcgaaaaactttggcttatcccagattcctccctctaatgggggttcccaagcttnaaacctaaagaccagtttccaaaagctttttggccaagacccaanttcgaaaaaatgtngg

SEQ ID NO: 16356 - DNA, 464 bp, Arabidopsis thaliana
  unsure at all n locations
  Clone ID: LIB25-024-Q1-E1-H3
aaatagcttcatatagagatattttcaacaacttgtccctctctaaactcatccaccttccaaaacagagaaggggaaaatatgacaccggctattttttctccgacgactcttcctccatcaactgctacatggccatgttcaacatctcagaagctcatcaccgttagatcaccactcaagttcaagtgtagagcaacttcatcatcatcgtctatcactgactttgatctttatgacctcttgggtattgatcgaagttctgataagtctcagatnaaatcagcctatcgtgcgttgcagaaacgatgtcatccagatatcgcaggagattccggtcatgatatggccatcattcttaacgaggcttaccancttctctctgattcgatntcgcgccaaagcctatgacaaaggagcaaagcaaaactagaagaactcanaggctatacaggggaaaacng

SEQ ID NO: 16357 - DNA, 443 bp, Arabidopsis thaliana
  unsure at all n locations
  Clone ID: LIB25-024-Q1-E1-H5
ggctggtctttctttctcgtctttcnattaangacactttgatanaaagacganaaagaaagaccatgcctgaaacatggntgaagaacaacaganctcagatcagancaatggtggaaacgttattccaactcctgaanaanttgctacgttcctgcacaaaactgttgaagaaggtggatgggaaaaatgttgggaagaagagataacaccatgggaccaagggagagccacacctctcattgttcatcttgtcgacacttcctcactcccacttggccgtgctctggtccccggctgtggtggaggacacgacgtcgttgcgatggcangtcctgaacgcttcgttgttggattggatatttccgaaagcgcactcgcnaaagctaatgagacttacggctcctcancannggcaagagtacttttcgttcgtgaaggga

SEQ ID NO: 16358 - DNA, 461 bp, Arabidopsis thaliana
  unsure at all n locations
  Clone ID: LIB25-024-Q1-E1-H7
tagattgtcagctgggaagaaagaatcagcagggagagccagaaacaagaaagcagtggtcgctgcaaaatccagtccaccagagaagattacacagaagcggtcatcagccaaacgaaagaagactgatgatgacagtgatacaagtccaaaggcgtcctctaagaggaagaagtctgaaaaccctatcaaggcctccccggctccttcaaagtctgcatcaaaagagaagccagtaaaaagggctggaaaagggaaagacaagccgagtgataaagtgctgaaaaatgcaatcgttgagatcttgaaaagagtggactttagtacggctacgttcacggacatccttaaagaacttgctaaggagttcacaagaagatntcactccaaagaaagtcatctataaagatgataatccaaaganggagctcaccaaattagcagatgaggagggaggangg

SEQ ID NO: 16359 - DNA, 493 bp, Arabidopsis thaliana
  unsure at all n locations
  Clone ID: LIB25-024-Q1-E1-H8
aaagtctccgacactctctagatttcctttgctccttcgttctggccatggcaatggcaaaactcgcaattttcaccactcttatggccatactcgtaatgacatctcaaggaaggattccaacagaaggaggagagaaagaagcagaggctgacagaattacgtcacttccaggtcagcctaacgtcacgttcgagcagttttccggctacgtcaccgtcgataaactctccggaagatcactcttttattggctcactgaagcttctgacctccctctctccaaaactctcgtaatttgggctcaacgggagggaccggggatgttcgtccggtaancgttacnggtggcgtcnggaggangaattgggaccattcaagggataaaagcaaaagggtggtttccgggttttggtatcctcaaacaangttccgcaatggggaactcaaatcctccnaatctccctggttcctccgaangctncccggccgg

SEQ ID NO: 16360 - DNA, 341 bp, Arabidopsis thaliana
  unsure at all n locations
  Clone ID: LIB25-024-Q1-E1-H9
tntacttgattgcttattcatctgttgattctgtggttaggtttgattcttctggctctgttttgttctgtttttggtgtttaattcttcttagcaagcaaataagggtatatgagtttgttggacatgggtggagatatgatggaagatgattgggaatttgcgtcatcancaaaccctanaagaaccctanttcttgtgggccgtnctggaaacggnnagagtgcgacaggtaacagtatccttgggaggaaagcttttaggtcaagagctanaactgtaggantgacaagcacgtgcnaatcacagaaagttgttcaagaanatggtgatatcattaa

SEQ ID NO: 16361 - DNA, 188 bp, Arabidopsis thaliana
  unsure at all n locations
  Clone ID: LIB25-025-Q1-E1-A1
gggccggnggaancctgggaataaaanttctcctgggaagaagggntnggncngtagctttatccaacgactcctatactaaggngagaagatgtgttcagaacacctggtaccacacatgttgtctcnatgagacagatccaatgggtcacttgcaagattcgatggcgaacagttatcacggggcg

SEQ ID NO: 16362 - DNA, 442 bp, Arabidopsis thaliana
  unsure at all n locations
  Clone ID: LIB25-025-Q1-E1-A10
gctcgagtaggtctcagttacgtaaaggatcgagcttaaaagatgagtggagttgaagagaaagtttctggaacgacaaagacacctgcagatttcctcaaatccatcngtgggagacccgttgttgtcaagctcaattctggtgttgattatcgaggcactcttacttgtcttgatggatatatgaacatagcaatggagcagacggaggagtatgtaaacgggcagctcaagaacaaatatggtgacgcctttatccgtggaaacaacgttctttacatcaagtacagtaaacatgactgtagcagacggagcctaagcccatcatgatcatcaacaacaacaacagtggtcatgttatggctgccatttttgttgtcctcttctacctcatattanaagagtagtagacatgtaccaaagattgtcatcctaagttctt

SEQ ID NO: 16363 - DNA, 465 bp, Arabidopsis thaliana
  unsure at all n locations
  Clone ID: LIB25-025-Q1-E1-A11
aaacttccgaaaagagaagtctcggcttcagcttctaaagttgtagagaagaaatggttagtgaaagatgagaagagaaatatgctacaagatgaaataaaccgggttaattcggggaacaagaagctaaccgaaatgttagcaagagtctgtgagaagtactatgctcttaataatcttatggaggagttgcagagtcgaaagagtcctgaaagtgttaactttcagaacaaacagctaacggggaaacgaaaacaagaacttgatgagtttgttagctccccaattggactcagtctcggaccaatcgagaacatcaccaacgataaagcgacggtttcaaccgcttactttgctgctgagaaatctgacacaaagcttggtaagggagaattccaactacaaagtaaccgttcctttgagtggtaatggaatttgttaacnnaatgttttgtgggtaaacct

SEQ ID NO: 16364 - DNA, 493 bp, Arabidopsis thaliana
  unsure at all n locations
  Clone ID: LIB25-025-Q1-E1-A4
gnnnnngaatgtcttcctgccnacggtccgagaaccgggtcgnccacgcgtccgatanaaaaatgcgtcagcttctcccaaatcaaacaactccaatctcacttcctcaccgccggccatttccaatcttcctttctccgttctcgtcttctcgaacgctgcgcaatctcaccattcggagacctttccttcgccgtacaaattttccggtacatccctaaacctttaaccaatgattggaacgcaatcatccgcggattcgccggaagttctcatccttcacttgcgttttcatggtatcgttccatgttgcagcaatcttcgtcatcgtcggctatatgtagagtcgatgctttgacttgttcttttactcttaaagcttgtgcacgtgcgctttgttcttccgctatggatcaacttcattgtcagattaaacgtcggggaatatcgctgatcgcttcttggactacgttgcttgatgctaatctaaaaa

SEQ ID NO: 16365 - DNA, 428 bp, Arabidopsis thaliana
  Clone ID: LIB25-025-Q1-E1-A6
gctttggtctgagacaacagtagcaagagtccgtgaaagaagaaaacaaaatgttagaattttgaagaagatgagggaaaaggaagcaactttatctgtttatttgacttgagtctcttcgatctacatctggattttgcagcatttcttcttgaggaaaaatgaggaaacatggatggcagcttccataccatcctcttcaggtggtggctgttgctgtgttcttggctttagggtttgctttctatgtcttctttgctccatttgttgggaagaagattcatcagtacattgcgatgggcatttacactcctctgattacgtgtgtggttggactgtatatatggtgtgcggcttcagatcctgcagaccgtggagtttcccggtctaagaagtaccttaaaatcctgaaaatgggaaatttcccc

SEQ ID NO: 16366 - DNA, 409 bp, Arabidopsis thaliana
  unsure at all n locations
  Clone ID: LIB25-025-Q1-E1-B10
agagagagagaggcttgtttgttttctctcctctaagaaacaatcagtctcataaagtggcaaagatggttgcggaacganacacagtcgatttgaataagccacttgtgtttcaggttggtcatcttggcgaagaatatcaggaatggattcatcaacctattgtatgcgttgagggtcctcgttttttcgaaagtgatttttgggagtttttgactcgcacggtttggtgggcaatcccaacaatctggcttccagttgtttgctacgttctttcaatatcggcgagtaagggacttacgtttccccagatcggtttaataattgcttttggtgtactcacgtnggacactgctcgagtacacgcttcaaccgcntcctttttcaaaattcaaaaccaaagattttg

SEQ ID NO: 16367 - DNA, 433 bp, Arabidopsis thaliana
  unsure at all n locations
  Clone ID: LIB25-025-Q1-E1-B2
attaacggttttatccgaaaccaccgtaagacaaacggtatcagtattcccaacgaacgtgaagtaattggataacggcaattccaacttcgctccacctttaaactcaaaaatcagctccggcaccgtcacatctcccttcccggagatattaaaacacggtccaagtcctgtttccttctccaagtctttctcacgagtgtagttcgacatctgtgaagcgaattcttcagcaacgagctcgaaaacgggtcgctccatgaaagtgaatgtagatccggaatcaacaatggatcctccgtctccgttagttcccggcgcgagatacttatacggaatcttcacgtgctttcttccgacgtagattccgccgganattgaggtaataatactccgagaaaagctttgttggagacaattggaattttccgaa

SEQ ID NO: 16368 - DNA, 533 bp, Arabidopsis thaliana
  unsure at all n locations
  Clone ID: LIB25-024-Q1-E1-H1
gnntnnnnggaantgtttcgcctggncngtaccggccccgaaattcccggaatcgncccacgcgnccgcccacgcgtccgtatctaataaatggcgttacaaaggcaactcctgaagagagctacttccgatatctatcaccgccgtgcgatctctctcctccgtactgatttctctacttctccttcgattgctgatgctccgccgcacattccgccgttcgttcaccagccacggccgtataaaggtccttccgccgatgaggttttacagaaacggaagaagtttctcggaccttctcttttccactactaccagaagcctcttaacatcgttgaanggaagatgcaatacttgtatgatgagagtggtaagcgatatctggatgcctttgctggaatagtcactgtgtcgtgcggtcactgccatccggatattcctaatgcgattacngaacagagcaaggctacttcagcacgcgactactanttacctgcatcatgccnttgggtgantttgctgaaagcaatggg

SEQ ID NO: 16369 - DNA, 386 bp, Arabidopsis thaliana
  unsure at all n locations
  Clone ID: LIB25-024-Q1-E1-F11
tcgccggtgaacggaactagggtttcattcatccccaaattgataacaagaaaatggctcatgcttgcgtctctacatcggcttcttctctcanattcacagctggattcgtctccgctagtcccaatggctcctctttcgattctcccaagctttctcttcctttcgagcctctccgttcaaggaagacgaatangttagttagcgataganagaattggtnnaattcaactccgagagctgtatattccggcnatctctggacaccggagattccntctcctcaatgagtttggtccattaganatgatttacaagtcccttcttcgccgtattttcntgcttatgctcantngacaaggaccanctcctaaggggcaaagaac

SEQ ID NO: 16370 - DNA, 243 bp, Arabidopsis thaliana
  unsure at all n locations
  Clone ID: LIB25-024-Q1-E1-F2
cntanatcttnagtntatgggaagaggatcaggctgcagctgctttgcaggctctgcaangtagcgttctattcaatgaccgtcccatcactgcngatttctctcctgtgaaggttttccgcnacagccacgtgtaagcatctactgaaggaaaacaacgtgnaaccgatggtgggtactgtcctttcatgctctgtgaangcttgtttcgaaggaactccngtgaaaaactcnttggganat

SEQ ID NO: 16371 - DNA, 432 bp, Arabidopsis thaliana
  unsure at all n locations
  Clone ID: LIB25-024-Q1-E1-F3
catatatatataaagcaaacatgtttcttagttcacaaagagaaaaggagatagtactcttattagtaccatagtcaccgagcttaatttgagtactatttccttttctctttgtgaactaagaancatntatatntanngcaaacatgttccaganaaaggnaaaanccnnaagggcggccgctctagaggatncaagcttacgtacgcgtgcatgcgacgtcatagctcttctatagtgtcacctaanttcaattcactggccgtcgttttacaacgtcgtgactgggaaaaccctggcgttacccaacttaatcgccttgcagcanatccccctttcgccagctggngtaatatcgaaaaggcccgcaccgattgcccttcccaacagttgcgcagcctgaanggcgaatgggacgcgccntgtagcgg

SEQ ID NO: 16372 - DNA, 453 bp, Arabidopsis thaliana
  unsure at all n locations
  Clone ID: LIB25-024-Q1-E1-F4
gattttttgacagcaattcttagtttctcttctatcccctttctgggttttgttgaaccctagctcgctttggatccagtggttttaagttaaaggtaaatttatcgaaagtaagtagattcctaatggcagcttccaatcattcatctggtaaacctggaggagttttaagtgatgctttatgtagggagctctggcatgcctgtgctggacctcttgtaaccctacctcgtgaaggggaacgagtttattatttccctgaaggccacatggagcagctcgaggcatcaatgcaccaaggtttggagcaacagatgccttccttcaacctcccatctaagatcctctgtaaaagttatcaacatccaacgcaaggcaaagccccgagactgacgaagtatatgcgcaaataancttattgccaaaactggattaaaancaaaccactanncc

SEQ ID NO: 16373 - DNA, 553 bp, Arabidopsis thaliana
  unsure at all n locations
  Clone ID: LIB25-024-Q1-E1-F5
gngngggggntgnngnantgnctgcctgntctaccggccgganggtccgataantcccgggtngccccacgngtccgctcatctcctctccgtcgagcttactatctccacaaaatggcgtcgacggtaggagttccatcactataccaagttcctcaccttgaaatctccaaacccaattccaanggngaggtcggaattgtttatctttatctctcgataagcctttcttcactcccttatctcttgttcgtagaactcgtcgtatccattcctcttctcttcttgttccttctgctgttgctactcctaattctgttctcagtgaagaagctttcanaagtcttgggtctttctgaccatgacgaatatgaccttgacggngacaacancancgttgnaagcctgatggatgggtganggaactccgctatctcctaanctttagttttgcctccaacgttcttggaagaatctcnttggagaaaacgtggtatnactcatctccttccccaattcagaagagctgtgttggtacctgcactgncanggg

SEQ ID NO: 16374 - DNA, 452 bp, Arabidopsis thaliana
  unsure at all n locations
  Clone ID: LIB25-024-Q1-E1-F6
actttgctcgcattgatggatggtatttggctcccaattcaaatttatcatcacctgtaagtgaaacgcttggaggaaccaagtcaggagatattatattcacagacatcancctggttagcctagtgcaatttcaccggccttcaaatttacccggagctactaatactttgcattgttcttagaagtaacacttgaatgcatatctcaaatgctcttacagataagtggcatggagcaaactagctttctcttccagcaggcatctaaggttggattttctcattcaaacattctgcgaacaatcgtccaccgtgcttgctcgaggtttccccatcttgattgggtataattatggggtatagtccaattactccaaggttcaacaaccctggaagtctctgaaggacccccagaaagtgttgtcatatttggaggagatactcagagcg

SEQ ID NO: 16375 - DNA, 453 bp, Arabidopsis thaliana
  unsure at all n locations
  Clone ID: LIB25-024-Q1-E1-F7
agacgacctccaagaagaaagatacaaaaacagagcaacaccaagcagcgacggtggttcttccgccacaccaaaccaccagcaccaccgccgtaccaacagcaacaacanncaccagcacactctaacacctctccaccacaacggcaaaccccaaaccagaaaacgacatgacgacaacgacgaagacgatggtggtgccgtatcctgcaacaagtgtcgacctcaccactctcaccgtgacaaattctccgtcgtacctctcgaaagccacaacaacccttctttcatctctagccccaatctcataatcaaatccatcttccaatctctcacacgggagaagccccaaaccttctctgcannggaggcgcttccatngcnctcttcctcatcctccgctgcagatgcttcnagatnaagaacagtggnggttagctgtggcggnagctt

SEQ ID NO: 16376 - DNA, 453 bp, Arabidopsis thaliana
  Clone ID: LIB25-024-Q1-E1-F8
gctctactatcgccggttcttctaccttgctccggcgattccaccggcggcgtcgaggatgattctccagcgaccgtatgtatcgtcgggagtgggatcggaggctcatccgtagctcacttcctccgtaactactctgtttccaccggcttaaatcaagccaagatcctgatgtttgagcgtcacgagatagtcggtggacgcatgaggaccgtcactgtcgccggtgatactttcgaagccggcggttcgattctccatccgaagaactaccacgttaaggatttcgtcgaaaggttcaatctgacggttcgattaccgacgccgattgaagaatcttcagcgattggaatctgggatgggaagagatttgtcgtcaagacattccgttccggtaccaaatttcccgtttttggatacgatcgtctccttgggtgaaatgatcctacttgg

SEQ ID NO: 16377 - DNA, 527 bp, Arabidopsis thaliana
  unsure at all n locations
  Clone ID: LIB25-024-Q1-E1-G1
nnnnnnnngnaactgtttcgcctggctctaccgggcccggaaattcccggatcgncccacgcgtccgttttgacaaagccccccaaaaaaaaaaagagttcaaaatgaaaaacgtgagaaatggatttgtcatcattcttctcaccgtccttagtctctgaaaataaattctgattttgatttcgaattttagggattttgagagagagtcagttatgagtagttcggagagagtaccgtgcgatttctgcggcgagcgtacggcggttttgttttgtagagccgatacggcgaagctgtgtttgccttgtgatcagcaagttcacacggcgaatctgttgtcgaggaagcacgtgcgatctcagatctgcgataattgcggtaacgaaccagtctctgttcggtgtttcaccgataatctgattttgtgtcangagtgtgattgggatgttcacggaagttgttcaatttccgatgctcatgttccattcgccgtggaaggttttccgggtgtccatcggcgttgg

SEQ ID NO: 16378 - DNA, 484 bp, Arabidopsis thaliana
  unsure at all n locations
  Clone ID: LIB25-024-Q1-E1-G2
gcccacgcgtccgaaaactcttgagagctaacaaaacagagaaccaacgaataaaacaaaaatgccttctttagagaaatctgtaacaataatctcaagaaacagagtcttcccagaccaaaagtcaaccctcgttgacctcaagctctccgtctccgatcttcccatgctctcttgccactacatccaaaaaggttgtcttttcacgtgccctaaccttcctctccccgcgcttatctcacacctcaaacactctctctcaatcactctcacccacttccctcctctcgctgggccgtctctcaacctcctcctccgggcaacgttttcctcaacctggaaatgacgccnggngccggattttggtttttcgcccaaagcaaaattcatccaacgtnaagccgaacgttgatttgccgggnattcgaangtttccggaatgtnggtccaaaagaggttttttcaacctaangaacaagaaggg

SEQ ID NO: 16379 - DNA, 459 bp, Arabidopsis thaliana
  unsure at all n locations
  Clone ID: LIB25-024-Q1-E1-G4
agaacaagagagaggagaacttgcagaagaagcggcgtgaaggttttaatccttccatggcgtcacagccagggcaggatttctcctcgtctctccctacggaaacgagattggagaatatacaacagatgattgctggagtaatgtcagaggatagagacttacaattggaggcgacggctagcttcaggagattgctttcaattgagcgaaatcctccaatcaatgaagttgttcaatctggtgttgttcctcacattgtgcaatttctttccagggatgacttcactcaacttcagtttgaggcagcttgggcgcttaccaatatcgcttcagggacatctgagaacactaaggtcattattgataatggtgctgtccctttaatcgtcaaacttcctaattctgcaagtgangaaattcnanaacaagctgtttgggcaattgggaaacntgctg

SEQ ID NO: 16380 - DNA, 515 bp, Arabidopsis thaliana
  unsure at all n locations
  Clone ID: LIB25-024-Q1-E1-G7
gaatgtcnngcctggnccgtaaagggtccgattattcccgggtggccccacgcgtccgatattctccttatcaagaatcctctgatcagtcaaatacccatcaatcaatcaaatccccaaacactcccaaaaaaagatcagcttccaatatttttccccttcttacaaanaagatgtctatgtcgtctatgtcctccccttcctcagctgtttgttcaccggaccacttctctccttccgaccatctctgctatgtccaatgcaacttttgccaaaccatccttgcggttaatgttccttacacaagcttgttcaagaccgtaactgtccgatgtggttgctgtaccaatctcctttcggtgaacatgagatcatatgtcctcccaagcttctaaccagctccagctccagctcggtcctcactcttacttcaatccccaggatattctggaggagctgagagatgcancgtcnaanatgaatatgatgatgatgaatcancatccnactatgng

SEQ ID NO: 16381 - DNA, 459 bp, Arabidopsis thaliana
  unsure at all n locations
  Clone ID: LIB25-024-Q1-E1-G8
gaancaaactcatcctcaattgtgttggaccgtttcgtatccatggtgatcctgtcgtctctgcttgtgctgattcagggtgtgattatttggatataagtggtgaacctgagtttanggagagaatggaagctaactaccatgatagagcagaagagactggctctttaatcgtttctgcttgtggttttgattcaattcctgctgaattgggtcttctctttaatgctaaacaatgggtatctccatcggttcctaaccagattgaagcgtaccttagcttggagtctgacaaaaaattgctgggaactttggggacttatgaatctgcggttttaggtgttgctaatgcagaaanagcttanagaattaagacgttcaagaccangaangccaagaccancgatttgtggtcctcctgctaaaggacaacattaagaaaaccangaagacgattng

SEQ ID NO: 16382 - DNA, 93 bp, Arabidopsis thaliana
  unsure at all n locations
  Clone ID: LIB25-024-Q1-E1-G9
aagngcgattgctcanttcanccaacctgcacttgaggctgtattcgacgatactcctaaagagtttgattcttttgaagatgttcttancat

SEQ ID NO: 16383 - DNA, 429 bp, Arabidopsis thaliana
  unsure at all n locations
  Clone ID: LIB25-024-Q1-E1-F10
aaaaacaaaacaaaacttaagttcatacatcatggccttaatagctaccaaaataagttcacgttcttgttttgtttctgcttatccaaacaattctccatcgtttcngatatccaaatttcccaatacggtcgattctttgtcgcctgcaaatactgctaaaagatcgatcttganaaacgtccatgcttcagtttctaacccttcgaancagtttcataataagacatccttagtatatatattctgcttactttttgttgctcatgctgttttcagaactangaatgtgtttgttcttgtacgtaggaatatttacacgagttgantatcaagaanatcaagaatatactaagtgcaaacgtagatgttccatccgagaactggagatgatcgatgtcattcaaagtttaagcnntgatcncaatt

SEQ ID NO: 16384 - DNA, 442 bp, Arabidopsis thaliana
  unsure at all n locations
  Clone ID: LIB25-023-Q1-E1-E2
aaaccttggncggncccttggntnaaatngttnaaattaaaaaaccgaaactttctcgtttcttcttcttcttctccaattttcaaaattcgaaaagatgttgaagctttcgtgtaatgtgactgattctaagttacagagaagcttactcttcttctcccattcatatcgatctgatccggtgaatttcatccgtcggagaattgtctcttgttctcagacgaagaagacaggtttggttcctttgcgtgctgttgtatctgctgatcaaggaagtgtggttcaaggtttggctactctcgcggatcagctccgattaagtagtttgactgaagatggtttatcttataaagagaagtttggtgttaaatcttaacaaagtggggtagtaacaaaancgctactgttgaaancaatggcaaacctttacanggaggtggga

SEQ ID NO: 16385 - DNA, 451 bp, Arabidopsis thaliana
  unsure at all n locations
  Clone ID: LIB25-023-Q1-E1-E3
ggnnnnngnaatntccttcctgnaccnancggtccgaccnatcccgggtgngccccacgcgtccgcaanatcacactttcataaagctcataacatacataaaaaatgggtgaatcttttagattattcaatcatcatcacttcctcacaacttttctcataatcatagccatgctcaaattggttcatacaacaacaacaacaactacaacaacaacaacaaacaccgagttcgtaaaatcatcatgcactttcacaacgtacccaagactctgtttctcttcactctcaactcatgctagtctcatccaaacaagccccaagctcatggctcatgcggctctcaacatcacattagcctcggctaaagtaacttcagcaatgatggtgcgtctctcgaatagtcggctcaagcctaaagaagtctcgggcatgagagactgcgtcgaag

SEQ ID NO: 16386 - DNA, 483 bp, Arabidopsis thaliana
  unsure at all n locations
  Clone ID: LIB25-023-Q1-E1-E4
aantctnagngntccaccggtccancatccgggtgnccccaagcctncgncaaanccttggaaccaaancnatncaanaaanncnaanctttncaaccctngctnaaaggngttncaanggctttctttaatccttttgggttttgagattgctgcttatttcaaaggttggagctttggaacttctaagcttcagcttcagtttatcttcaataaagggttctttgattgggtttacacgagatgggttttgcttcgtgttgagtatcttgctcctcctcttcagtttcttgctaatggctgcattgttctgtttcttgttcagagtcttgatagactcattctttgtcttggttgtttttggatccggtttaagaagattaaaccggttcctaaaccggattcnactctgatctgaatctggtgataatggtgctttcctcccatggtcttgtcaaatcccatgtgtaatgagaaagaggt

SEQ ID NO: 16387 - DNA, 365 bp, Arabidopsis thaliana
  Clone ID: LIB25-023-Q1-E1-E6
atattcttgaggagagatgccgctttgaaaccagggtttgtggttaagaagctgaggaaagtgaaaccaggaaagattttgaagtaccaaaaggttatgaaagaggttaggcgatattttgactatacacatctaaatggaagtgtgaacgagatctggagacaagttactaagaagataccgctaatcaaactgatgattaatcgggagaagcgcatgatcaagagagatggaagtgaccctcaatgttcttgtttatgctcaaaccaaaccgggatcatccatggtgtctagtaaggttaaatgcctagcaagctcatgctaagcaacaaaatgtgatcattaataatgatgaatcaaagact

SEQ ID NO: 16388 - DNA, 510 bp, Arabidopsis thaliana
  unsure at all n locations
  Clone ID: LIB25-023-Q1-E1-E8
gnnnnnggaangtcttctgcgncgtaccggtcaannaattcccgggtcccccacgcgtccganntgggggttttcataatttttggttcttcagctcctcaagcttcgatagggttttagtaattttccgatggcttcaagctcagagaaaacacctcttattccttcagatgagaaaaacgataccaaggaagagagtaagagtactactaaaccagaatcaggctcaggagctccaccttcaccttcaccgactgatcctgggcttgatttcaatgcttttgatttctccggcatggctgggatcctcaatgatccaagtatcaangaattggctgagcaaatagctaaagatccttcatttaaccagttagctgaacagcttcagagatttgtgccaancgggatctcaatgaaaggaaggccaacctaactttgattcacaacaagtatatgcaaacaatgcaacaagttatgggagaaacctgagttttagaacaatggntggac

SEQ ID NO: 16389 - DNA, 419 bp, Arabidopsis thaliana
  unsure at all n locations
  Clone ID: LIB25-023-Q1-E1-E9
agcagagagagagagaaagttcgagcggaagagaagcggaaagctcgaggagtcatcaatggtgacggacgatagcaactcctctggacgaatcaagtctcatgtagatgatgatgatgatggtgaagaagaagaagatagactcgagggtttggaaaacagattaagtgagcttaaaaggaaaattcaaggagaaagagttaggtctattaaagagaaatttgaggctaatagaaagaaagtggatgctcatgtttctcccttttcatctgctgcatcgagccgagctaccgcagaggataatggaaatagcaatatgctttcttcgagaatgagaatgccactctgcaagttaaatggttttctcatggtgttgggagatagagacaagttcccnactaaggatgttatatcancaa

SEQ ID NO: 16390 - DNA, 255 bp, Arabidopsis thaliana
  unsure at all n locations
  Clone ID: LIB25-023-Q1-E1-F10
ngatccaaacattattgtcttaaaagcaaaacaagtgcgaagtggttccataagcaacgttgcaatgtatgtgaagtgattaatgagtcttgtggtatgtggtgaattgctcataatcgatctgattgtggtcaaatgttcatatatatatgtatatctttgaattttactttgttttcatgatgtcttatgttttgttgatctattgaagagaaccatgtttgtttgttggaaaaaaaaaaaaaaaaagggcgg

SEQ ID NO: 16391 - DNA, 434 bp, Arabidopsis thaliana
  unsure at all n locations
  Clone ID: LIB25-023-Q1-E1-F12
acttattggtaactatgtcgtcaatcttgaagcctcgcaccatgtctacaagagacttacccaaagcactaacaccaaatctccttccgtaaaccagccctaccggaccggtttccatttccaaccccccaaaaattggatgaacgatcctaatgggcctatgatatacaaaggaatatatcatcttttctaccaatggaacccgaaaggagccgtgtggggtaacatcgtgtgggctcattccacgtcaacagacttaatcaattgggatccacatcctccaactatcttcccatctgcacccttcgatatcaacggatgctggtccggttcagctactaatctccctaatgggaaaccgggttatcctctataccggaatcgacctaagaacaacaggtcaaaacatagccgancctaagatctctcgatct

SEQ ID NO: 16392 - DNA, 502 bp, Arabidopsis thaliana
  unsure at all n locations
  Clone ID: LIB25-023-Q1-E1-F2
gnnnnnggaatgtnttcctgcnccacggtccganaatccgggtngncccaagcctncgggaaaacggtncnatngncgccgggaacncaacttcanggcggtanctctagcaatctgtcaccacccaatcgaaaacctaataattccatcgtccgatacggatgcggatcttcgaagcgtttccgtatcgtaacggtcttggcgtcactccgggaaaacgatgcaaacggaagggataactccgtgagagctatggaagtgaagaagatctttgaagactcgcctctgcttcctaagccgttatcatcgaaccagctcacggaatctgtctctaatggctcccgcgttcgtgttgcgtatcagggagtacgangtgcatacagcgaatcagctgctgagaaggcttatccaaactgtgaagctgttccatgcgaagagtttgacactgctttgaagcggttgagcggtggcttgttgacaaaactgttttaccgaattgaga

SEQ ID NO: 16393 - DNA, 501 bp, Arabidopsis thaliana
  unsure at all n locations
  Clone ID: LIB25-023-Q1-E1-F4
nnaantcccnctgntgncacggtccgacgnacccgggtggccccacgcgttcgggaaaagtgtgcctcccgagctggntatncaatggagttgcactgcttggtgaatcaatggtcagcagataacaaagatggtgtcctattgtgcttatcacatggctcccancccagngaacgtgttaattatacaaactccttcatcgagccttctctgcananagtcttgtccaacacaanaagaaaggtggttccaggcttatttcattaatcacgagaagacgatgaancacctgcngagaataccattacatgtgattcattttctgctgctcgttgtcgagtatttaatagaaagatcantatcacgaagangattgaataagaagccattcctcaccacacaatgggaccacgccatcatgcatcagcagcaatccaaactttanncacattcanacatgtgccagaagaanccaaatcgtttcctccttcanggaacgaa

SEQ ID NO: 16394 - DNA, 442 bp, Arabidopsis thaliana
  unsure at all n locations
  Clone ID: LIB25-023-Q1-E1-F6
ttttctttctagattaatcaaattctttgaaaccagtttctcacttcgcctctctcttcagatccgtcctctgtagctctagaacaatggggtttatctctaggaatgtgtttccggcatgcgagagtatgtgcatttgctgtcctgctctcaggtcgagatctcgtcagcctgtcaagcgttacaagaaattgctcggcgagatcttccctaaatcccctgatggtggaccaaatgagagaaagattgtcaaattgtgtgagtatgctgcaaagaacccaatccgtatccctaagattgctaagtttcttgaagagaggtgttacaaggaccttcgatctgaacaagatgaagttcatcaatattgtcactgaagcttacaacaaaatgctttgccactgcaaaggatnagatggcttaatttcgctacaagtttgctgaa

SEQ ID NO: 16395 - DNA, 433 bp, Arabidopsis thaliana
  unsure at all n locations
  Clone ID: LIB25-023-Q1-E1-F7
gctgagaatcatttcttcttcttcttcctcactttgttcatcatcttcttctccgatctaaacaacaatggcgacaccaggagcttcctcagcaagagatgaattcgtatacatggcgaaactcgccgaacaagcagagcgttacgaagaaatggttgaattcatggagaaagtcgcgaaagctgttgacaaagacgaactcaccgtcgaagaacgtaatctcctctccgtcgcttacaaaaacgtcatcggagctcgtcgtgcttcgtggagaatcatttcatcgatcgaacaaaaggaggagtctcgcggtaacgatgaccacgtttcgttgatccgtgactacagaagcaaaatcgaaacggaacttctgatatctgtgacggnatccctaagcttctcgatacgaatccccgttcccggctgcngcttc

SEQ ID NO: 16396 - DNA, 494 bp, Arabidopsis thaliana
  unsure at all n locations
  Clone ID: LIB25-023-Q1-E1-F8
ntgcgngnncgtaccgtgtcagngcnttcccgggnccccccacgcgtccgaaaaaaacaaaacaaaaaatggctacccgaaaagctctgatcaacgttcaccggatcattcgctccaccgccgtggttggccggagctctatcattcctgccgccgctaaccggtcatatcctattatattccggaatggagttgatttgggggcgagattcttctgtgagaacactgcgtctgcccagaatttcgatattgatctctctaacgaagagaataagagaagaacgatcaacagattgttgtataggagcaagcaaagagggtttttggaacttgatcttgttttggggaattgggttgaggagaatgttaattccatggacgaaaatggtgttaaatccctaattcatgtcctcaatttggaaaaccctgatctctggaaatggctaactgaacaggaacaacctcccggaagcagtgagttcaaatcccggtgt

SEQ ID NO: 16397 - DNA, 502 bp, Arabidopsis thaliana
  unsure at all n locations
  Clone ID: LIB25-023-Q1-E1-G1
gnnnngaacgtcttcctgcnncaccggtccgaaatcccgggtcgncccangcntncgccgaanccttggntaaaaaaacancaaaggcttnggttaccganctcaagaaaatgtctaaggaggttgaagacagtgaacttgcagatgttgcagctgttagtgcgggtaacaacgacgaaattggaaatatgattgctgaagcaatgagcaaagtgggcaggaaaggtgtggtgacccttgaggagggtaaaagtgccgagaacaacctctacgtcgtagaaggaatgcaatttgaccgtggttatatctctccttactttgtgacagacagcgagaaaatgtccgtcgagttcgacaattgcaagttacttctcgttgacaagaaaattaccaatgcaagggatcttgttggtgttttggaggatgcaattagaggcggatacccaatattaattattgctgaagacattgaacaagaagcttaacgactcntgttgtaaac

SEQ ID NO: 16398 - DNA, 438 bp, Arabidopsis thaliana
  unsure at all n locations
  Clone ID: LIB25-023-Q1-E1-E10
ttgtcgacagtcttcttcttcttcttcttcttcgattggatctggaactgaactcaaattgggaagaattttgacatggaggaggaccggtgttcgatcaaggatgatgcaactcaattgataggtaacaccccaatggtatatctgaacaacattgtggatggttgtgtagctcgtattgcagctaagcttgaaatgatggagccttgctctagtgtcaaggagcgaattgcttatggtatgattaaagatgcagaagacaagggattgattactcctgggaagagcacactgattgaggctacctctggtaacaccgggattggtttagccttcatcggtgcagctaaaggttacaaagtggtcctcacaatgccctcatcaatgagccttgagagaaaaatcantcctttaacattaagtgccggagggtcaact

SEQ ID NO: 16399 - DNA, 501 bp, Arabidopsis thaliana
  unsure at all n locations
  Clone ID: LIB25-023-Q1-E1-B7
gnnnnnggaaattnnngcgcnnacgtaccggtcaancnttcccggggccncccacgcgtccgaaagattcttcattgacggtaggagtcaccacttttggcggcgattccttgttctctattttttttgcacaagcaacatttagcttctgcaaactccagttcatctctcaaccctcatatcgccgtgttttctcgctctagtaccgcgagctcggacgaaccaggaagcaatccgttaatctagaagcggtgttgagaagatgacgattacatcaaatatctctgtacagaacgataacctcgttgttcaagggaagactatccttaccaaaatccctgacaacattatcctaactccggttaccggtaatggattcgtttccggttcatttatangcgcgacgtttgaacaaagcaagagtcttcatgtgttccccatcggtgtattggagggtcntcggttcatgtgctgttccggtttaagctatggtggatgaat

SEQ ID NO: 16400 - DNA, 494 bp, Arabidopsis thaliana
  unsure at all n locations
  Clone ID: LIB25-023-Q1-E1-C1
aacttnctncggccgtcgtaccggncaagtgtcccngggggcccnanncttcngnaaancgnttccncaattgaggaaacatttccctttncgtggntcttacnagaccgagaagagagtaagatatgtccggcgcatcgtctgaggatagcagtattttcgctcgctgtgaagacgtagactgtaacaagaaaatacctgtagagcttgtaaggatgcacatttgttatgctatgttccataggactctggcagctcgaggttttgggacacaaactcaggctaagaagaaacctacaaacaagaagaagtcaacaacatctcttaccgattttgctgtcttcatgaatcatttccgtaaatcttttagaacagattataatggtgcattggtgaaagaaggttcaaagatcggttgggaaatgtggaagtctatgactgangatgagaagaaagantatctcgataaagctgctgatgangaagatgaggat

SEQ ID NO: 16401 - DNA, 505 bp, Arabidopsis thaliana
  unsure at all n locations
  Clone ID: LIB25-023-Q1-E1-C2
tnngnggaatgtctccctgnatcancggtccgaggnatcccggggngccccacgcgtccgcaaaaggtnaatcctncangntggcaatngtancanttaattnaaacccttggaagaaacacngtttancaggagttgaagaaatgttgttatactatacgagaaagatggaaaagatngatagatgctctcatctattcttgaagatactttctactgttttgatctcaaatcttaggcatgattcatggtcagatgcttcattctttcccttcccccatcccagtgttgtttctgcattgctttctccagattgcganggtgacagaaccgagagaatctgtgagcggaagttagacggtaacaacgatgtcaggattggtttggaaaagatgttgaatgaatggctcagatttgggttgaagtgatgaatgttattattgtaatccttttngtcttttgttctgttttgtactttctcatgttagcacagacataaataaac

SEQ ID NO: 16402 - DNA, 510 bp, Arabidopsis thaliana
  unsure at all n locations
  Clone ID: LIB25-023-Q1-E1-C4
nnnngngnaatgtcttgcctggtcgtancggtccgaggantcccggggngccccacgcgtccgcnaaangcgtccgccttaatttcgtctccgtcagtagcagtctccgccgggaatattttttttccggtagctatgctccgaaccgtctcttgtttagcttcgcgcagctcgtcctcnctattctttcgcttctttcgtcagttccctcgctcttacatgtctctcacatcgtcgacggcagctctccgtgtccccagtcgcaatcttcgccgaatttcctctccctcagtcgccggtagacgtcttttgctccgacgaggtttgaggattccctccgccgcagttcgcagtgtcaatgggcagttctctcgcctctctgttcgcgccgtcgccacacaacccgctccactttatcctgatgtaggtcaaagatganggctgagaagcttggatttgaaaaagtgtcggaagaantcatctcagaagtgtaaatcaaaggngatactc

SEQ ID NO: 16403 - DNA, 505 bp, Arabidopsis thaliana
  unsure at all n locations
  Clone ID: LIB25-023-Q1-E1-C5
gtngnggaanctcnntccggcgacgtaccggtcaagcgttcccgggnccncccacgcgtccgcaaagattgtttctcaacacacttcaaggaactttatgaagtctaaaaaggcaaacaagaagtttgatttcaaagttttcacagagacattgcctagtaaactcgaaggtaactcatacatacccgttgagctttatggtttgactaaagacaagacagactatggatggtacacaacaagcttcaaggttcacaagaatcacttacctaccaagaaaggagttaagacttttgtgaggattgctagtcttggacacgcgttgcacgcttggcttaacggagaataccttggaagtggacatggaagccacgaagagaagagttttgttttccaaaaacaggttacactaaaagcaggagagaatcatcttgtaatgcttggtgttctcacaggattcccagacagtggatcttacatggagcatagatacaccggtcctcgt

SEQ ID NO: 16404 - DNA, 504 bp, Arabidopsis thaliana
  unsure at all n locations
  Clone ID: LIB25-023-Q1-E1-C6
ggnnnggaaacttcnncgngacgtaccggtcaaccnattcccgggnccncccacgcgtccgnnacctcaaccgtcttctgctcctccgccccgccacagtttcttagggttcttccgcattgtttctccgaattgcaatcccctcattctccacaataaacagatagctaatataattgagtttggatactcgcaagtgaaaatatgtcggtcacagcgggagtgagtgaatctgcaattgctgtaagggagaaactaaaaggtggtattggacagactaaagtgcgaaggtattggccaggaaaagctccggagtgggctgaggaagctgaagaagatgatgatgttaggatgcagaaggtttctgttttggatagagcttttccaaagaatgatgatttgggtgttgctaggaaggatgatccaaggctgcgccgtttagctaagactaaagttgaaaaccgtgacgaagttagagctgatnatcggcggataagacaagct

SEQ ID NO: 16405 - DNA, 432 bp, Arabidopsis thaliana
  unsure at all n locations
  Clone ID: LIB25-023-Q1-E1-C8
gcttcgcttaaaaaaatatcgcttctctcgagaggggaaggaaagttcatttctttttgtccaattctttcaacttctcgttccaatcccctcaattctccgtttcaccgaacgcacttcgaacccttaattgctttttgcgggtcaagtttcgattcgagcgttttagggtttcgtatctgaatcggtcgacaagataaacccttttgtgggggtttcctctagatttcgaaaacagagggatagctttcgtttggatggaaattctctgaaactaaactacatagtgatatggagacacaaattcatcaacttgagcaggaagcatataccgctgttttaagggcttttaaagcgcagtctgatgcgatttcttgggaaaaagaaagcttgataaccgaattgcgtanagaattgagaagtatctgaang

SEQ ID NO: 16406 - DNA, 94 bp, Arabidopsis thaliana
  unsure at all n locations
  Clone ID: LIB25-023-Q1-E1-C9
tggcggtgganagccnccggattggcatgattttgtcggtatcatttgtcttttggttanaattcagctatcagttttgtcganaaaatcatgc

SEQ ID NO: 16407 - DNA, 438 bp, Arabidopsis thaliana
  unsure at all n locations
  Clone ID: LIB25-023-Q1-E1-D12
tgagtgagcaaaaaaactcaaaaccctccatggaaatgggagagagaatcaattcgagttgttgttagggggtttgcgatattttaggcttctgtcggtgatctcgaccaaaanaaataaacaaaggagctagtagggttctgttttctctatcactcggaaggaagctggtttatgtcaaaactttgttcttcggaaaatgcgaaaatcgttcaaggattcactcaaggctcttgaagctgatatccagttcgccaacactctggcgtcagagtacccagaggagtatgatggtggctacgttcagatgagattatcttacagcccggcggctcatctctttctcttccttcttcagtggactgattgtcatttcgctggcgctttgggcttgcttangatccttatttataangnatatgttgatggggaagacca

SEQ ID NO: 16408 - DNA, 499 bp, Arabidopsis thaliana
  unsure at all n locations
  Clone ID: LIB25-023-Q1-E1-D2
gtngngaanntctnccgnancanggtccaggatccggggnccccacgcgtccggaaaatnaggtnatggcaacaagnnatttnggcnatttnggggtattccncncgttgtcnatggaattttaccccaagttgccctcatacatggagttagcgtctttcccaaggcatcggatccatggttttggctttacattatcttgtttctcggtgggtacgcgcaagatctatcagactttttattagaaggaggaacttatcggaaatggtggaacgatcaaagaatgtggatggtgagaggactctcttctttcttctttggttttacagagttcactctcaaaaccctaaacctctccactcaaggatataatgtcacgagtaaatccaacgacgataatgaacaaatgaagcggtatgagcaaganatcttcgaattttggggcctcttcgtcaatgttccttgcccattactacggtcgccatcatgaatctgctaa

SEQ ID NO: 16409 - DNA, 442 bp, Arabidopsis thaliana
  unsure at all n locations
  Clone ID: LIB25-023-Q1-E1-D3
acatcaaagaaaacgaaacccatttctcaaaatccaaaattttcaaaaactcaaaactcatcatgggtttcatttcttcttcatcaccagtagaagagtctcattaccatacacanaagatcttccttttctccaactacatccttctcggcgctgcttcaagttgtatcttcctcacactctctctccgtctaatcccttccatctgcggattcctcctcatcctcctccacgccaccacaatcgccgccgcagtctcaggctgcgctgctgcatcttgcggaagaaaccgttggtacgccgctcacatggttgcaactgtgctcactgctatattccaaggctctgtctctgttctcatcttcaccaacacgtctaaattcctcgggagtcttaagtcgtatgtgcgtgaggaagatgctgctgtgattttgaaactccg

SEQ ID NO: 16410 - DNA, 500 bp, Arabidopsis thaliana
  unsure at all n locations
  Clone ID: LIB25-023-Q1-E1-D6
gnnnnngnaactccnagcgcgacgtaccggtcancnnttcccgggnccncccacgcgtccgtaaagcttgagagggttaatgtatactacaacgaggcgagttgtggaaggtacgttcctcgcgctgttctcatggatttggagcctggaaccatggacagtgtcagatctggtccgtacggtcagatctttcgaccggataacttcgtcttcggtcagtccggtgctgggaataactgggctaaaggtcactacactgaaggtgctgagcttattgattcggtccttgatgttgttcgcaaagaggctgagaactgtgactgccttcaaggatttcaggtgtgccattccttgggaggaggaactggttctggaatgggaactttgttgatatctaagatcagggaggagtacccagaccgtatgatgatgacttccctgtgttccatcgcctaaggtgtctgacactgttgtggagccttacaacgcaacactatctg

SEQ ID NO: 16411 - DNA, 431 bp, Arabidopsis thaliana
  unsure at all n locations
  Clone ID: LIB25-023-Q1-E1-D8
agctttctcaaccgtcaaggcaacagcgatggctcgaagtagtggtggtccttcattacctctcctcactatttctaaagcacttaaccgccactttaccggcgccagacacctccatcctttattgctcgctcgctgttctccctccgtgcgacgtcttggtgggtttcatggcagtcgatttacttcgtcgaattcagctttgagaagcttgggagctgctgttttgccggtaatccgacaccgtttagagtgtttgtcgagctcatcgccgtctttcaggagtatctcaagtggcggcggttctggatttggggggtataatggtggaaacggcggtggtggtggcngaagatcggagantggtgattccaagtcaaaactgggtgccaatgcaagtgatngtgtcnctgttncgtcntcaaanaaca

SEQ ID NO: 16412 - DNA, 427 bp, Arabidopsis thaliana
  unsure at all n locations
  Clone ID: LIB25-023-Q1-E1-D9
gggttcgaagccatctttttcctaaatccccaattttttttttttccctcgtttccgaatcttttaccggcgagactctgccatggattcaggcgaacaaaagtctaagcggaggttccaaccaaatcctccgaggccttctcgccgtcttccgatcgctccaacctcaaacaccgaagctgaggaggatgaagagaatataaaagcatctcgccaatttgacagacgtatcgtcggcaggagacccaaaaccgaaacgaaagcttcttctcctgaagttgcattccaaccaagcttgtcaccacttgcaataaggtcctttggtgttcctaaagaagatgacaagcccaattctgatgttaatccgtcttctcctgctantantcntcctgctgtttcgtctgttactgctgcccaaaaaaatgga

SEQ ID NO: 16413 - DNA, 504 bp, Arabidopsis thaliana
  unsure at all n locations
  Clone ID: LIB25-023-Q1-E1-B2
ggnnngaantgtcntcctgcancaccggtccgnnaatcccgggtcgccccacgcgtccgccnaaacctncgggngnanccnnacccctngcaananggnatnaggagaaacgaataagaaagtgatcaagaatgtgattaagctcttaacgatggtgattttgatgggcactgtggtgatttggatcatgatgccaacgtctacttacaagaagatttggttgaaatccatgcgtgccaagctcggcaaatcgatttattttgggaaaccaggagtaaaccttttggtttacatgttcccaatgattctactggcttctcttggatctatttaccttcacttgaagaaacaaacgagagtaaaccaatttaatagtagaatggataggaagaagatagacaaagtttggtgcattgaaaagaccaatgttagtgaangccggattaaggataatgacagtgaccgangttangttcctgatgangttcatggctcctcctcctt

SEQ ID NO: 16414 - DNA, 508 bp, Arabidopsis thaliana
  unsure at all n locations
  Clone ID: LIB25-022-Q1-E1-H7
aantgnccgcctgncctacaagtccgattatcccgggtngacccacgcntccgagaaaacgtaatccaagccaatggaggagacgacatggggacagagaatacaagcggtgacacatatcctcacaaacccaacaacgaaaccatcactttactctcaattcttcatcggagccataattccaaactacgtatcgtgggattaccctccggtctattcgccgacgcatctccgtcaatggtgggtttctcagttcttcaaaagggtatcgagatttgggctgcctgatacatcgtggaggtcgaatagcccgtattatcagccaccggcggcggttatggctgtcggagttgaggaaaggaaatgggggaaagaggagangagagagtatgcgangaagatgctgaagaggaaganattggtgaatgnagtgaatccatanattcctcnttttagttccgaantttgcntttgtntactcncttgttantgggatccncntcctgat

SEQ ID NO: 16415 - DNA, 148 bp, Arabidopsis thaliana
  unsure at all n locations
  Clone ID: LIB25-022-Q1-E1-H8
atttggaatcgaaattctagactaatgtttangaaacggaacttagttctagaatcanttcgtcgattcgatagcgggtaacgtagaaaccctaatttcaangggtccttgngtatcgcacctcaaangccgtctcggtccngtacaa

SEQ ID NO: 16416 - DNA, 437 bp, Arabidopsis thaliana
  unsure at all n locations
  Clone ID: LIB25-022-Q1-E1-H9
aaaaaaaaaaaacgagatggaggaattccaatctcctagaatacgatcttacaaatcgtatgaaggagataggaacctccaactggttaatcctgcagatttaaaactggtcagagggatatatgttgttagagaatcgaggcgcaatcgatctccgataaaancagatatatggcgcaagatgtcttacaaagacatgcccgttagaccgagaagatcttcttctcattcgacattgttcaaaggatggtggaacgatccggagataaagagaaagagacgagtggcgaaatacaaactctattcagccgaagggaagatgaagataactttgagaaagagttacaaatggattaagatccaatgctcgaagatcattcatggaatataggtctctctatctctactctgtttatctgtttagaaatttgttttga

SEQ ID NO: 16417 - DNA, 52 bp, Arabidopsis thaliana
  unsure at all n locations
  Clone ID: LIB25-023-Q1-E1-A1
cgttactcctcaaaangtggtggtggccgaaactaccgtggtggaanaccct

SEQ ID NO: 16418 - DNA, 502 bp, Arabidopsis thaliana
  unsure at all n locations
  Clone ID: LIB25-023-Q1-E1-A10
ggnnnnttcnngngccgtctncctggtataccggtccgatattcccgggtngccccacgcgtccgaaaaaacacccatggctctgttttctagcgtctcagtttccgcgtttctcttgatcgttgtatcggttcaatggactctggtttgcagtgaatccacaatcttagcttctcctgctgttttaccgtatatcaatgcaccagatatgtcttcatttttcccttctccgaccaaagactggccaatagagacagcgacatctcctgttccagaaccagaagcgcctggtccaagctcaggccagcttaatgggaagatttcaggcagatcaatgcggctccatcctgatatttccttggttctagccattgttgggatctgtacctttctatgttttaatgaaccaatacttgttaggtttctacactattgatgttgtaatcttttgtggttcgcttttaanagcctcattggtccttcctggagtcgttttactcct

SEQ ID NO: 16419 - DNA, 407 bp, Arabidopsis thaliana
  unsure at all n locations
  Clone ID: LIB25-023-Q1-E1-A11
ggnnnnnnggggngantgtctnngnggccntttttnngtaanacggtccgacantccgggncccccacgcgtccgcantagcagagagaaagtggagggagcggtgagggaagtgatggttggagaagagaggaggaaacgggccaaggagttagcagaaatggcgaaaaatgcggtgaaagaaggaggatcttcagatctagaggtagataggttgatggaagagcttacgttagttaaactgcaaaaagagaaggtataaagaagttgaatgtattgcaagttatggaacaataatgtttttgtaattctgatggtttgagttacaacagtaaaagattgtatttgttcattcaaatttacaatggatgatcttttagtttgtaaaanaaanaaaaaaagggcgg

SEQ ID NO: 16420 - DNA, 505 bp, Arabidopsis thaliana
  unsure at all n locations
  Clone ID: LIB25-023-Q1-E1-A2
gnnnnngaaagtccnctgntncacggtccgatgnacncgggtggccccacgcgtncgttaaanttaaatttngcaagtgattgagaaatacactaagagtactaggtttgcgctcattggaaaccatgtcaataagatcatcccagctttgcagtcgagatgtactcgatttagatttgcccctcttgatggagttcatatgagtcaacgtcttaaacatgtaatagaagctgaaaggcttgttgtaagtgactgtggtttggcagctcttgtacggctgagcaatggggacatgagaaaagcattgaacattttgcaggttctgtaatatttccttttggttctgtcacataatctacaattgtaaatctaaaaaagataatacatttcaatcactatgaatggatctgtaaaaatttctaacggatttattgggtgtggacagtcaacgcatatggcgtcaaaggaaattacagaggaagagtcaaagcaaattacaagangg

SEQ ID NO: 16421 - DNA, 502 bp, Arabidopsis thaliana
  unsure at all n locations
  Clone ID: LIB25-023-Q1-E1-A3
nnnnnnnngnaangtttnngcccncgtacggtanaccnttcgcgggccgcacgcgtccgcnaanangtatccgccggaaaaaaataacgtcttttttttttttcttccaatctctctgtctctctccccaattcccagattctcatttttgcagagattttaggaggaacatgattgtttgaattgggagagacattggttcgtgtaaaatgcgggtgcttggtttgagctcaagcttatgctctggtgaggataaggaagaagaagagattaatggagaaggctctctcacgcctgtttatctcaacgtctatgatctaactcctgtcaacaattatctctattggttcggccttggcatatttcactctggcattgaggctcatggtttcgaatatggatatggagctcatgagtattcgancagtggggtaattgaggntnaacctangagctgtccaagtttcanccttangcgctcaattttgttgggaaacaacaa

SEQ ID NO: 16422 - DNA, 427 bp, Arabidopsis thaliana
  unsure at all n locations
  Clone ID: LIB25-023-Q1-E1-A4
tcatctcgtggagaaccaccaaagaaacctttggtgccatctggtcccaaaactctgtcaaacgagacgaagactgttgtccaagttagaacattccaagatttgcttaaggatgagtatgatgctgatttatttgactactacgcttcatcacaactagtattggcttctttggatggtactgtgaaggaagtaggggttcctgcagtgtatacatcgttagacccttcgacagaccataagtacttgttggtgtcatcacttcacaggccatattccttcattgtaccttgtggtaagatttccaaagaangtggaaatctggacaactgatggtaaatttgttagacaactatgtgacttgccctgggtgaagatatccccaatgcctccaataatgtgcggnaanggatgcgttcaataaact

SEQ ID NO: 16423 - DNA, 491 bp, Arabidopsis thaliana
  unsure at all n locations
  Clone ID: LIB25-023-Q1-E1-A5
ttnngnncacgtagcggtcggncgattcccgggcgnccccacgcgtccnacatagtccgccacactcgataatgatccatcaagctttagctctccctcgtcctattctcaccagaggatttgtgtctaatggtggcggtatgtttgtccatcaatgtcgaacaaaaacccctagggttacattttgcgctgctgatgatcagatagccagttccaagtcgaacaagacaaggaaagtagtggagcatgtgtgtttactcaaagcaaaagagggtttatctgaggaagtagaaaaagatatgcttgactatctttacacaactcaataccaaatgagaggcattgttgctatatctgttggttgtatcggtgatagaaacaatgaatatttcacgcacgctctctacatgcgattccaaaagaaggaagaccttgacaagttctatgagaaccctttcttcttgaaagttctcaatgaatatgttacacca

SEQ ID NO: 16424 - DNA, 506 bp, Arabidopsis thaliana
  unsure at all n locations
  Clone ID: LIB25-023-Q1-E1-A6
gnnnnnggaaactnnnncggnggnctaccggtcaagcnttcccggggccccccacgcgtccggaaaaccgccgtgagttgagcatgggatggaactcaatactcgtgccatctgcagagagacgtataacagaagcggttgcagacgcacggtgttaccaagttttacgagcgaacgaggtcgagtttgagattgtgtcgacagagagaaccaacattgtggatatacggacacgggattgctcatgccgtcgttggcagatttacggattgccgtgtgctcacgcggctgcagcactgatctcgtgtggtcggaatgtgcatctgtttgcagaaccgtgtttcacagtgtccagctatcagcagacgtattcgcagatgattggagagattcctgatagaagcttgtggaaggatgaaggagaagaggctggaggaggagttgagagcttgaggatacgaacaccaaaaaacgaaggagacaacaagttagaccgaagaagaaat

SEQ ID NO: 16425 - DNA, 507 bp, Arabidopsis thaliana
  unsure at all n locations
  Clone ID: LIB25-023-Q1-E1-A7
gntnnngagnaatntcntagcnntcgtancggtaanccgttcccggggccncccacgcgtccgcnaaacgcgtgggaaaaaaaatatgtattgtagagagtccttgtcgagtctccagactttgaacgtagcaaagagtctcagctctttgttccctaaacaatcagctctcatcaacccgatctccgctggacgtcgaaacaacctgcctcgtccaaacctcagaagacgatgtaaggtcaccgcttcacgggctaatattgaacaagaaggtaacacagtgaaagaacccattcagaatattaaagtaaagggatacataacggcccaagaagagtttctggagggcataacttggtcgagaggtctcgatgacattgctgatatccgcggcagatnattgctcgtcgagcttattagcgccaagactgaccagcggattacggtagaagactacgcacaacgtgtatgggccgaagcccctgatgagaagtacgaatgcgagtt

SEQ ID NO: 16426 - DNA, 439 bp, Arabidopsis thaliana
  unsure at all n locations
  Clone ID: LIB25-023-Q1-E1-A8
ctacaaccttgggctctcgcgaacaattggccatcgctgaatttgctgatgcgctattgattataccaaaggtgcttgcagtaaacgctgctaaggatgcaaccgaattggtagctaaactaagagcgtaccaccacactgcacaaaccaaggctgataagaagcactattcaagcatgggacttgacctcgtaaacggaaccatccgcaacaatttggaagctggagtgatcgaaccagctatgagcaaagtgaaaattatccagtttgcaacagaggcagccataacgattctacgaattgacgacatgatcaaactggtgaaggatgagagccaaggcgaagaataagcaaagctcagctcctctttatccgccttatcatccttagtgtgtgtttttgtccgcattttcagctcctccttaacntcctttttgcg

SEQ ID NO: 16427 - DNA, 502 bp, Arabidopsis thaliana
  unsure at all n locations
  Clone ID: LIB25-023-Q1-E1-B1
gnnnnngngnaatttcntcgcnnacgtaccggtaancnctngggtnnncccacgcgtccggnatangtagaatctccggtgaagccgaattcaaaccctaacacttttggttcatcagttcttcttgacgattcagtgttgttgcgcgtcttatttctacattttgctttctcgatttgagaatgtgctgattttagattagagaagtaagggttttatagatcgggaataaatggaggaaggtggatatgcgtttgaggttaacaatggaagaccaacggcgagtgagtttggtacgacggcgaggatttcgtcaccgtcattgactatgtcatcgtctttccgtgaaggaagaagaagaggtggaagtaagggtttaacacgacggaggtcaatgaanccganttttgacgccgataatgagttcantactttactccaaggctcaaattcggttaaagttgaacctaataagcntgagaacgaagtcagagatnaagat

SEQ ID NO: 16428 - DNA, 276 bp, Arabidopsis thaliana
  unsure at all n locations
  Clone ID: LIB25-023-Q1-E1-B11
tgacgcnattgacacannagcatcggaaaggtgagccgncaantatggtcacngcctacgattacccttctgccgttcacatcgatacagctggnntcnatgtttgtctcgtcgganattcagctgccatggttgtccatggctatgacaccactcttcctatctccttagaggagatgcttgttcactgtcgcnccgttgctcgcggagccaagagacgagtcttgtcggcgatttgccgtttggtacttatgaatctancaacgaatcatgngg

SEQ ID NO: 16429 - DNA, 446 bp, Arabidopsis thaliana
  unsure at all n locations
  Clone ID: LIB25-022-Q1-E1-H5
nngaagtgctaatcctacaatcaatagtcaagggaacagatttttggcacccaatatcagatttagcaaagaagtgactaagcatgaggacgcgcctgagagcgagtggaagagatggaattggagatcttccggagatttgttgctaaacggtgcgttttttactccgtctggtggtgcagcctcgtctagctatgcaaaggcttcgagccttggggctaaaccgtcttctctagttggaccattgacgtctacttctggtgcactgaattgccgtaaaggttcccgttgctgattgtggcttagtggtcacacttaagtttttaccccattattatataggaaaaggcaattanagccaccaattaagggggattaagtagtgtagtaagactttcttaaacccttgattactcctttttttttggttgtttanncgggtaaaa

SEQ ID NO: 16430 - DNA, 440 bp, Arabidopsis thaliana
  unsure at all n locations
  Clone ID: LIB25-021-Q1-E1-F1
ctctctctctctctctctctctctctctctctctctctctctctctctctctctcgtgcatctccataaactatcttcaaagattaaattttgaagatcttctttttggnttattacccgattctgtcactgtctcttcttcttctccaatcccaatgtttgcttgagagaaagagagagagtcaaaccaaaacatgggcgtttgttgccctttccttcaaccctgggatcgagctcgtgatcaatgtctcctcaacctcccttgtctctccgatcctgttcgaagatcttctctacttctgaaattggcactagtagctctccacctcgtctttatcggctttctcttccttttcgatgctgaatttattgagaaaactaaacgagatcaatggnataaggggtgttaanatcntacggtttcngnnaagcttcggaag

SEQ ID NO: 16431 - DNA, 520 bp, Arabidopsis thaliana
  unsure at all n locations
  Clone ID: LIB25-021-Q1-E1-F5
nnnnnngnnnntttnggnagcctctacgcctgnccntaccggtccganaattcccgggnccacccacgcgtccgcanattctctctctctgttttccttgttctccaagccagatctctctccataaatctctcttcatctctctctttccaccaaacatccgcgatcctcgattctcaattccgtgtctgttttttttcttcacttagcgatggcgatgatagagcaaaggccgaagacgaagatcgtttgtactctaggtccagcttccagatctgttccgatggtcgagaagcttcttagggctggtatgaacgttgctcgtttcaatttctctcatggatctcatgaataccatcaagagactctcgataatcttcatcaagctatgcttaacactgggattctctgtgccgtcatgctcgacacaagggtccaagaaatccgaaccgggttcttgaaagatgggaaacaatccagctgaaacaaggacaagagatnactatttcgactgactatg

SEQ ID NO: 16432 - DNA, 85 bp, Arabidopsis thaliana
  unsure at all n locations
  Clone ID: LIB25-021-Q1-E1-F6
ntgtgtgtatagacatacaaagtggaaattaaggtaacaaaaagaaatgggaagangatnagtagagctgagtgaggatatgana

SEQ ID NO: 16433 - DNA, 452 bp, Arabidopsis thaliana
  unsure at all n locations
  Clone ID: LIB25-021-Q1-E1-G1
tccttctcacttccatggcgattctcgtcgtctgaattaggttgtggaatcgaagtattgagaggggagattattgaaattaggggttttgaatagtgatggatggtaataaggatgatgcgtctcggtgtttgagaatcgccgaagacgccattgtttctggtgataaagaacgagcgttgaaattcatcaatatggcgaaacggcttaatccaagtctctctgttgatgaacttgttgctgcttgtgacaatctggattcagtttcgaggaattcttctgttagcgagaagcttaaaactatggacggtgatgatgataagcttgagactgggaaaatgaagtatactgaggaaaatgtggatttggttaggaatattataagaaacaatgattantatgcgattttggggtttggnaaaagaattgttcngttgatgagaatanaaaac

SEQ ID NO: 16434 - DNA, 509 bp, Arabidopsis thaliana
  unsure at all n locations
  Clone ID: LIB25-021-Q1-E1-G11
gnnngaactgtttccctgncctatttgtccgncnntcccgggtcgaaacacgcgtcngcgnctcttgattcacncgaacgagaaagcgacgatcgtaaccaccggcgctgaccaaaaagtaatcgattctcttcccgagctgatctctcaggtgtcttgaatctgaatctgtggctatatttggtgctcggtggtgagcaggaagggagggggatattgtcagggttttaatgtacgtcagatgaatagagcaactaatgttactggcagtagaaggagggggtttattctcagcgtccgcgtctgggtatagtaagggattgacccttcttttctctggtgataaagacgtagataggcccatgagagttgtcccgtggaatcactaccaggtggttgaccaagagcctgaggctgaccctgttcttcagctggattctattaagaaccgagtttcccgcggttgcgctgcttccttcagttgttttggtngcgctccgcnggaactt

SEQ ID NO: 16435 - DNA, 472 bp, Arabidopsis thaliana
  unsure at all n locations
  Clone ID: LIB25-021-Q1-E1-G4
ctcgccatcgacgacgacgacaacaaaatnnacataccttcccaancgttctcaaaccatcacctncttcctaactacaggtgtattgatgttctttgcagagatgtctccagcaacaggggtcaaagtctaaggataaaaaanctggtaaagaagctcaaaaggcatcaccaaagccttcactttcggttaatgggaatagcagcttggcagctagtggttataatcctcttttaggancatttcaagctcttgattcagtgtcgatagcttctatctcaccattacagtatantccgtttccnggngtatanattanggcagatgtaaatggggattggantcctgattccantttcgaaataaatgggtacctggttccnggtgaagtccagaangtttcccaaggggggaaaancaancttaatcttgncccccttaaagccagggagggtggnttcccaagggtgcc

SEQ ID NO: 16436 - DNA, 522 bp, Arabidopsis thaliana
  unsure at all n locations
  Clone ID: LIB25-021-Q1-E1-G7
nnngngntgtttcngnagccctntcgcctgnccantaccggtccgananttcccgggnccacccacgcgtccgaaagttacttatcgatggatgcattcatgtatatgagcaaattttatttgagttcttattggtaaatctgcagaatggtgaaatgacaaaatgaatctgccaattacacaacgtaactagctagctagtaggaatcgttaattgtgaacttgtaatttttgttcataatcagttaatcgctatgcanaaattgtataattagtgacaaaaaattaaatttcaccacatcttatgttcataacatggttcaaatctaattgcatgtttatgtgtgtgtgacttgtaaccacatattttgttcanaatcaatcgtttcttatcttgatatanattgttgggattcgtaagtcaagattctaaggagaagaatcctattggttcaagaacgttggatnaagttgttgccgttgatcangtaacgcatttagtctccantcaacgatctancg

SEQ ID NO: 16437 - DNA, 449 bp, Arabidopsis thaliana
  unsure at all n locations
  Clone ID: LIB25-021-Q1-E1-H1
atacganaacttctttatggggtctgtgcatttcaaggatgtggctttagctcatattcttgtatacgaggatccatattcgaaaggaaggcacttgtgcgttgaggctatctctcactacggtgattttgtagccaaagttgctgagctctatcccaattacaatgtccccaagttaccgagagagactcaaccgggtttacttcgagataagaatgcatcaaagaagctcatanatttggggttaaagttcatttccatggaggaaatcatcaaggaaggtgtggagagtcttaaaagcaaaggatttatctcttaatacctacctctgtaactctgtttgattgagcaattaacacaatctctangcagcagaaacatttcatatgatatacgattttgcacttttgtataaataanctggcctatggtatggtatgaacatccaa

SEQ ID NO: 16438 - DNA, 505 bp, Arabidopsis thaliana
  unsure at all n locations
  Clone ID: LIB25-021-Q1-E1-H12
tcccngncctgtttcgcctgnnngtcccggggtcacaacacgcgtcngncactttctccgtaagaaaggggaagcaaataaattatcgaagcccactggtttcggagctgatcggtctctatttctctcttcatacatatctcaagcagataaagttgatcggatactagaatgggaggaggatttagagttttgcatttggtgaggccattcttggcttttctgcctgaggttcagagtgctgataggaaggttccattcagagagaaggttatctacactgtcatctctctcttcatctttcttgtctgcagtcagcttcctctttatggaatccattccaccaccggtgcggatccattctattggatgcgtgtcattcttgcgtccaaccgtggaactgtcatggagctcggtattactcctattgttacatctggacttgtcatgccactctttggccgggttccaagatnantganggttgacannaatgtncncngng

SEQ ID NO: 16439 - DNA, 456 bp, Arabidopsis thaliana
  unsure at all n locations
  Clone ID: LIB25-021-Q1-E1-H3
atcgtgttttgatctgattcttccaggattctcccggtggcggagagaagaaacaaaggaaacccagaaagcatttttctcaatggcgtcgactacacgagaaaagtttgtatctttcataaacaacagatggctcgtcttcgtggctgccatgtggatacagtcttgtgctggcatcggttatttgttcggaagcatttctccggttatcaaaagctccttaaactataatcagaangagctttccagacttggagtcgccaaaggatttcggtgatagtgtcggattcaaccgccggtactctcccctgaagattcttgcctcctttggggccgctccttcctggtttggcgccgnttcaaaaacctcaatccggttaacggatgggtttgggcttaancgtcaccggtcnanccccgattcttcccccaaagggcaaaagtggnttcccaaaa

SEQ ID NO: 16440 - DNA, 514 bp, Arabidopsis thaliana
  unsure at all n locations
  Clone ID: LIB25-021-Q1-E1-H4
tccgtgccctttacgcgtgnccaaaatcgcgggaancccacgcgnccgccnacgcgtccgcacattaccaaggctacaacaaagaaggaagatattattacaaaactgtttgagtttttggagaaacctcatgtgacaggtgatgtgaccggtgacactacagtttctgagaaagagaagtcaagtaagggagcaaaacgcaagagaactcccaagaaaacttcacctacagctgggagttcatcctccaaacgatcagcaaagagccaaaaaaagtctgaagaagcaacaaaagttgtcaaaaagagtttagctcattctgatgatgaatctgaagaagagaaagaagaagaagaaaaacaagaggaggagaaggcagaagagaaagaagagaaaaaagaggaggagaatgaaaatggcattcctgataaatctgangatgangcgccctcaaccttcctgaaagccaaggagaaaagtgaatctgaagagcattctgaagaagaaaactcca

SEQ ID NO: 16441 - DNA, 442 bp, Arabidopsis thaliana
  Clone ID: LIB25-021-Q1-E1-H7
ctcttttagaaacttcagaattggaggaagaagatgcgagatcaggttcatcgtctccagattctgctggatcagtggaaagctcaatatcctctcactttggtggaatgaactacccatcattgttcagttcaaagccttcctcacaagcaacggcaaaatcaggtggaagtaaataccagtccacatatgaaggctatggttccccaattagagaagagcctcctccgccttattcgtattctgagccacaaagtcgtgaatcgtttgagaaccctgtagcagggtctggttctcgaagttatgaatcagatgatgaagaacctaggaaatctactggtacaagatttggaacagcgctctatgacttcacagcaggaggagatgatgagctaaacttgacggcagaagaagaattggagatagagtatgaagttgatgg

SEQ ID NO: 16442 - DNA, 448 bp, Arabidopsis thaliana
  unsure at all n locations
  Clone ID: LIB25-021-Q1-E1-H9
agaagactaagtgtacaagaatttgtaaaggtatatgatacagttttgcaagatagatgtgaagaagaagccaaagctgattctgaaatgtggaacaagcagccagcaatgaagtctccatcgccatttgagaagagtgtttctgaagtctatactcctgcagttttcaaaaagttccagattgaagttttgggtgcgattgcgtgtagtcctagggaggagaaccgagatgccacatgttctacttttagagtgcaggattttgaaaacaaccaagacttcatggtaacatggaaccaaacaaaggctgaagtctcttgcatctgtcggttatttgagtataaagggtatctctgcagacacactcttaatgttcttcagtgttgtcatctttcttccatcccctcgcagtacatattgaagcngtggacaaaagatccaaaagccg

SEQ ID NO: 16443 - DNA, 53 bp, Arabidopsis thaliana
  unsure at all n locations
  Clone ID: LIB25-022-Q1-E1-A1
nttacgcntcgactttaccagggcgttgaatcaaaagttttctctcagtcaca

SEQ ID NO: 16444 - DNA, 514 bp, Arabidopsis thaliana
  unsure at all n locations
  Clone ID: LIB25-021-Q1-E1-E8
nnnnngnnnttnngnagccttccctgnccntaccggtccananttcccgggnccacccacgcgtccggaaggtgtgaacctcttagctgtcatgtgtcacgaagatgtggatccaaagaggacaacaagcaatcacttgattgaaattattgaagttctcggaattgaggcagttcgtcgtgctttgcttgatgaactccgtgttgtgatatcctttgatggttcttatgtgaattaccgtcatcttgccatcttgtgtgatactatgacctatcgcggtcatctgatggctatcactcgacacggtatcaatagaaatgacactgggcctctgatgagatgctcttttgaagaaacagttgatattctgctagatgctgcggcttatgctgagacagactgcttacggggtgttactgagaatataatgttgggtcaacttgcaccaattgggacaggagattgtgaattgtactgaatgatganatgctgaaagaatgcaattgaacntcng

SEQ ID NO: 16445 - DNA, 510 bp, Arabidopsis thaliana
  unsure at all n locations
  Clone ID: LIB25-021-Q1-E1-C4
nnnganngtctncctgnccttacggtgcntattcccgggaaccccacgcgtccgaaaagattgagtgagtgagagagagagagagagagaagatgggggttgatttctataaggttcttgaagttgatcgaagtgctaatgacgacgagcttaagaaagcttatcgcanactcgccatgaaatggcatcctgataagaaccctaacaacaaaaaagaagccgaagctaaattcaagcagatctctgaagcttacgatgttttgagtgatcctcagaaacgagcaatctacgagcaatacggagaagaaggtttaaaccaagccccacctcccggcgccggtggtggctatcctggaggatcagacgccggagcttctttccggttcaatcccagaagcgctgatgatatcttctccgagttctttggtttcacgaggccttcttttggtacgggaagcgactcacgcgcaagacttctggctttaagtatgggcatnnaacctcccctcc

SEQ ID NO: 16446 - DNA, 520 bp, Arabidopsis thaliana
  unsure at all n locations
  Clone ID: LIB25-021-Q1-E1-C7
nnnnngnnnttnngnaggcntctngcctgnncntaccggtccgananttcccgggnccacccacgcgtccgcntgtttccgacttttagaaggaaggacaacattcgaagaacaaccacagtttctacgtttagcaactcattatttttaggcgccatcaagaatgggaaagactcctggtaaatggatcaagactttgcttctcgggaagaagtcgcctaagtcgaattcggataaccgaagccagaaactgaaatctgctaagaaagaagagctggtggaatcggtgacagaagatttgtcaaacttaacagttgatcctccggtggtttcatcacaaccagttccagcttctactgctcaaaatgtggtttctccaatcaatggtgatgagtccaaggataatctcgagtcaaggaatgacttgggagaagtcgagcttgaacaagctgcaattaaggttcaagctaccttcagagctcatcangcacgtnnagcatttcgaactcctaaagggtnc

SEQ ID NO: 16447 - DNA, 516 bp, Arabidopsis thaliana
  unsure at all n locations
  Clone ID: LIB25-021-Q1-E1-C8
nnnnngnnnttnngcagcctcnngccgntcataccggtccacactcccgggnccncccacgcgtccgtatgaattactatttgcagtggaagtctcttccgtctactacagaagagcacgtcaaaactggattggaggcggcgtatccatatggccttggacattgctcgcggtatgaattatcttcaccattgtagtccacccattatccatcgtgatctgaagtcatcaaatctgctggtagacaagaactggaccgttaaggtagctgactttggtctctcgcgtatcaagcatgaaacatacctaaccagcaagtctgggaagggaacgcctcaatggatggcaccagaagttcttcgaaatgagtctgctgatgagaaatctgacatttacagctttgggagtagtattatgggagcttgccaccgagaagatccatgggaaactctcaactctatgcaggtgattggagctgtggggttcatggaccanangctgggaaatcccaaaang

SEQ ID NO: 16448 - DNA, 514 bp, Arabidopsis thaliana
  unsure at all n locations
  Clone ID: LIB25-021-Q1-E1-C9
ggnngatcttcttcctgnctntgtctgtcnggtngactcncgggtgcccacacgcgtcggccaaaaatgtgagtgggggaagatggagagtggtatgggaacaacaacaattgatgctatgacaaacaacaacagcaagaaatttgtgtgagagtagagagtcttgcttcagttgangcaaagattggtcctttttttttcgttttctctttcctgctttttttgtttgtagtttctgatctctcaggaaggctttttataaatttgccctcaatttctccgtccctactactctttttgatcaatttctacgggaaaaagcaccaatctttaaacccgggcatgtccttgtaatcgagtatgttgtgtangtgatgaatttgtggtgagatctggtgagaagtttcctcttttttcctcanattgcggtaaacaaaaanagtttttantaaggaagaaattgagatttagattttntcgcttttgtttgggtganatgggtaacntnaacgcg

SEQ ID NO: 16449 - DNA, 511 bp, Arabidopsis thaliana
  unsure at all n locations
  Clone ID: LIB25-021-Q1-E1-D1
nngaacgttccctgccttcggtgccaaatcccgggnancccacgcgtccgatnagtcctgaggcagatgcagttggggaaacaataagcactttgaagtttgcagagagagtagctacggttgagcttggggctgcacgagtgaacaatgatacttcagatgttaaggaactcaaagaacagattgctactcttaaagcagcactcgcgagaaaagaagcagagtcacagcagaacaacatcttgaaaactcctggtggctctgagaaacacaaagccaaaactggtgaagtagagattcataacaataacatcatgacaaagaaatctgagagttgtgaagtggaggagattacagtgaactcaccaccttggccaccagtagcaagtccaaggacaagcctacagagaggatgaccgaagtttcgggtccagcgagtgggttgacaaggtgatggtgaataacagacaagacgagatgagaaanattgganatctttggggaaggagcc

SEQ ID NO: 16450 - DNA, 509 bp, Arabidopsis thaliana
  unsure at all n locations
  Clone ID: LIB25-021-Q1-E1-D12
nngancgtctncctgngccttttggtccgccnttcccgggncaaacacgcgtcggnnaacctctcgctaantgtgcgttagccgttagggttccgatctaatcatggcggactctgttttgaaggaggttaactgtggccggcctgaaaagatcccgaagttggacaaagcttgcgaaggatcgaaatcgtcctggaaacatctcaagctaggaaacgtggaagatgatgagtatcttcgacagtattgtttgtttcactacgaattccataaatccgagggtttcacggttgattgggagaaatatgactacatgttccatataaggccgttggaaaattcaccacctatcagcgatatacgaaccaatgctgatgtgatccgtgatgtgacactctttgccattgagaaacacaatgaagctcatggatctaaacttgtgtttgtcgagcatgtctcagctaatttcaaattttgccaatggtctcctccgccnggttaacantctg

SEQ ID NO: 16451 - DNA, 443 bp, Arabidopsis thaliana
  unsure at all n locations
  Clone ID: LIB25-021-Q1-E1-D2
gagaaatggcgacggcatcggaaaattcaagaggaatcagcggcggtgatcgaacggcgaaagctgtcgtcgccgatcagatttcacaagccgtaaattccactgctaaccttcttcatctgatgcgtcaatcgtcttcttctcaggctcagttggcaaagctcccgaagaatctgttggcgaaagcttcactgactaaggccactggacaggcgttggcgcagcttcctcaagtgatttcatctctagatgctcatatagaaagcggattgcacagcggtgttcatctaaacacagtaacccagttacttgaaaacatggaaagcacacagcttcgtgctcttcgacaatctaatatttcccctgtggtgtaaactccgatctcttaatagcaattanatgtttccttcctcngttacaattttcnaccagcaaattgggat

SEQ ID NO: 16452 - DNA, 515 bp, Arabidopsis thaliana
  unsure at all n locations
  Clone ID: LIB25-021-Q1-E1-D6
nnnttnngcagcctctcgcctggccntaccggtccgananttcccgggnccncccacgcgtccggcatgtgtcacaacacagacggactttacagcgcaaaacaaaccgctattgttagagcttccgatgatttctacccaagagatcctgcttctcacaccatccacattgcatcggttgcatacaacagccttttccttggagagttcatgcaacctgactgggatatgttccatagtctacacccaactgcagagtaccatgctgcagcgcgtgcagtgggtggatgcgcaatctatgtcagtgataagccaggcaaccacaactttgatctattgaggaagctggttcttcctgatggttcagttcttcgggctaagctcccgggtangcctacccgtgactgcttantcgctgattcagctagagatggaatcancttgctcaagatntggaacntgaataantttaccgggtaatgttggtgtaatcaaatngccaagnngcnggttng

SEQ ID NO: 16453 - DNA, 516 bp, Arabidopsis thaliana
  unsure at all n locations
  Clone ID: LIB25-021-Q1-E1-D7
nnnnngnnntttnggnggcctctngcctgnncntaccggtccgacantcccgggnccncccacgcgtccgcaatagtgttgttcttcccgagaaactgaatactggcagttggaacgtctacagatctgcaaaatctccgttcaagctcgttagcagattcccagatcatcctgacatcgctactctccatgacaattttgagcatgctgttcatgattttcgagattacaagtatttaggaactcgtgttcgtgtcgacggaactgttggagactacaaatggatgacatatggagaagctggtacagcaagaactgctttaggttctggtttggttcatcacggaatccccatgggatcttctgttggaatttacttcatcaatcgcccagagtggctcattgttgatcatgcttgttcttcttattcttatgtgtctgttcctttgtatgatactcttggtcctgatgctgtgaaatttantgtcaatcatgcaactgtgcaagccatatttt

SEQ ID NO: 16454 - DNA, 113 bp, Arabidopsis thaliana
  unsure at all n locations
  Clone ID: LIB25-021-Q1-E1-D8
tgatttcactgngtggaaaatgtatgctattggtggtagtggtaatcccaccattaacagtcangganatcgttactctgctccttctgatcctagcgccaaagaggtgncga

SEQ ID NO: 16455 - DNA, 455 bp, Arabidopsis thaliana
  unsure at all n locations
  Clone ID: LIB25-021-Q1-E1-E10
gntnttgaaactcctgctccatctgttgcaattcaagcaccactatcgaccacatctcagcctgctccacagccaacaacttcatctaatgataactgggcatctttcgatgctgcacccagtgcccctagtttaaatgtatcgcaaccaccacccagtggaaacacactggattcacttctctcccagttggcagtgacttcttctgtgccaggtcaggcgtctacaccatctaacggacctgtgaatcttggtcattccacgtcacaaatctttgcaccctttcagaatgagcattcgagtgaacagccatggaacacagcacttgcatctaatgtacagaggtcaatgagtgcaccgtcattgcaacctcttcaaggagtcccttctggtggcctgcagtcttctgaagttaaaccttcgggaagatnagaattacctgcnggttttantcg

SEQ ID NO: 16456 - DNA, 512 bp, Arabidopsis thaliana
  unsure at all n locations
  Clone ID: LIB25-021-Q1-E1-E3
nnngcaatgtctngcctgncctttacggtgccnaatcccgggnacccccacgcgtccgaaaaaattatgtcaattccttgtctaaccgaagagacagccaaaactgttcttcgccaggtggagttctatttcagtgatagtaatctacccattgatgatttcctcaagaagactgttacagngagcgaagatggcttggtgagtttggcgttgatttgctcctttagtaagatgagaggatatttgaagttgggtgattctaaaggagatgatattcctgaagataccaccaaagctgttgctgatactcttcgaacctcttctgctctcaagatttctgacgatgggaaaaaggttggtaagagtactgaattgttgaagctggaagatttgattgagcaacttaatgctagaacagtagctgcgtcacctttctcctatgatgttaaaanggaagacgtggaatccttttcagtcagtatggaaaggtaatagtgtgaggatgccncntc

SEQ ID NO: 16457 - DNA, 509 bp, Arabidopsis thaliana
  unsure at all n locations
  Clone ID: LIB25-021-Q1-E1-E5
ggnngnnnttcngcagcctccnccggtcanaccggtccanactcccggggccncccacgcgtccggaagatgcaaaacgttgtttgtgttgagagtatgatgcatcttacgtgtactaacatgcctgttgagaagattgatcatgctcttgagactattagatctaatgggattcagaatgtgcttgctcttagaggtgatcctcctcatggtcaagataagtttgttcaggttgaaggtggttttgattgtgctttggatcttgttaatcacattcgtagcaagtatggtgattactttggtatcactgtcgctggttatcctgaggcgcatcctgatgttattggtgagaatggtcttgcgtctaatgaagcttatcagagtgatcttgagtatctgaagaaaaagattgatgctggagctgatctgattgttactcagcttttctatgatactgatatattcctcaagtttgtgaatgattgtcggcaaattgggattagttgtcc

SEQ ID NO: 16458 - DNA, 516 bp, Arabidopsis thaliana
  unsure at all n locations
  Clone ID: LIB25-021-Q1-E1-C2
gnngcactgtttccctgnccnttacggtgcccnaatcccgggnnaccccacgcgtccggtnttttcggacatgtacaatgggaccagatgccggcagatatggtagtaaattcgattcttgtatcaatggccgctcaagccggtaaacaagaagagattatttaccatgtgggttcttcacttagaaatccgatgaaaaattcaaagtttcctgaattagcgtatcggtatttctcaatcaaaccgtggaccaacaaagaagggaaggtcgttaaggtcggggccattgagatcctgagttctatgcgtagtttccatagatacatgaccatacgctacttgattgcattgaaggtaaatagtatctaatgatatattaactagtgtttttataaggttcctaaatatctaaatggttcatttcaagggacttgaattggtaaacataatactttgcaagttgtttgagaangaatttcaattatttcantaagaaaatnaantttaaantccngg

SEQ ID NO: 16459 - DNA, 518 bp, Arabidopsis thaliana
  unsure at all n locations
  Clone ID: LIB25-021-Q1-E1-A8
nnnnnngnnnttnngnagcctntngcctgcccntaccggtccganaattcccgggnccncccacgcgtccgcaaagagttcggcgaagagtcgaagcggctttgggagttagcaggaccagcgattttcactgccataagtcaatactctcttggtgctctcactcagactttctccggccgtctcggtgaacttgagctcgccgccgtctcagttgaaaactctgttatctccggtcttgccttcggtgtcatgttagggatggggagtgcattggagacgttgtgtggacaagcatatggcgcgggacagattaggatgatgggaatatatatgcaacgttcatgggtcattctctttactactgctttgtttttgcttcccgtctacatttgggctcctcctattctttccttcttcggcgaggctcctcacatctctaaagccgcggggaagttcgcattgtggatgatcccgcaactatttgcctatgcaaccaacttcccgatacaagaaat

SEQ ID NO: 16460 - DNA, 515 bp, Arabidopsis thaliana
  unsure at all n locations
  Clone ID: LIB25-021-Q1-E1-B1
nnnngaactgttaccctgccctnncgcgtgnccaattcccggganancccacgcgnccgcnttcttcttctnttgaagaccctttgtcatgagctaatttttatcctctgtgtgttgagaaagatctcattttttagctttaggattgagggagtttcgatttttacttagcacttttccttggaagtgatttggtggaactcatggtgattggtttcttcctagggttattagagattgagttctggatttttcacgcgccttggatttgatctaatgtactctcttttttcatgtcttaatctggtttagatttttattttgagatcttttgttatataggttgcaagttctgtattttgttaggctttttagtttctgtgttgattatgattctcttggtctaggagagatttgggtgttgttaactgtttgagtttgagaattgtgaaattaaggttttttttttttgggtcnccgatctgnaacttgggtanaagaaaaaacatgggngg

SEQ ID NO: 16461 - DNA, 513 bp, Arabidopsis thaliana
  unsure at all n locations
  Clone ID: LIB25-021-Q1-E1-B11
gnngnaactgtctncctgggcntttttgtccgncattcccgggtngaaacacgcgtccgcaaaaaacaaagaaaccaaagtctctttagtttcttcaaccaccacaacactcttcgtttagacaacaaaaaatgataatgagaagaagtctaagtctgagaagcatcacgatgatgatattaatggctgttttggtctggtcagtgactctagagacctgcattgccagaagaggaagacattggagacatagccaccgaagctcttctgacttgtctgattccttgtcaaacaagaaaccgaagagccatgggaacagtcaccaccacagttctcacaacaacaaccatcaccacaagtctaaacctaaaccgaaaccaaagctgaaaacgccgccaaaagctcacgacaataactctccggtggtttcagggccaccaaaagtccaaccaccgcctcttccgcctcaaaagggatctcaagtttcaatgtgatggatttggagccaaaggg

SEQ ID NO: 16462 - DNA, 511 bp, Arabidopsis thaliana
  unsure at all n locations
  Clone ID: LIB25-021-Q1-E1-B12
ggngatnttccncctgctnttttngtccgggtantcccgggtggcnacacgcgtcggctaacttctcctcggatgcactattgtccgtgagatcagagattcaccctctttagattttgcgcagaaacttttgcccacaattttgtattcgtcaaatctgagctgagatctcnagagtgagaaaatgagcatcactaatgaagaagcagtgaagcaattgcgtgctttaatggaagatgttgatgattcactcagagagtcgtatcggaacattcatcaagggtatccgacagagaatttgttacgctttcttaaagccagggatgggaatgtccagaaagctcataaaatgttgctcgagtgtttggaatggaggactcaaaacgagattgacaagatactaactaaacccattgttcctgttgacctgtacagaggaatcagagacacacnacttgtcggtgtgtctggttactccaaagaaggtctcccctgtcattgcatttgggng

SEQ ID NO: 16463 - DNA, 517 bp, Arabidopsis thaliana
  unsure at all n locations
  Clone ID: LIB25-021-Q1-E1-B3
nnngaactgtntccctgncctttncggtgccnaattcccgggnacccccacgcgtccggantgattctccatttttctcgggagaaaagttcctcgccggagatggagcatatgatgaaagaaggaaggtctcttgcagagacgccgacttactctgttgcttcggttgttactgttttggtctttgtttgctttctcgttgaacgcgccatttacagatttggaaagtggttaaagaagactagaagaaaggcactttttacttcacttgagaaaatgaaagaggagttgatgttgctgggacttatatcacttctgttgtcacaaagcgcgagatggatttcagaaatctgtgttaactcttcccttttcaatagtaaattctacatttgctctgaagaggactatggaatccataagaaagttcttctggaacacacctcttctacaaaccagagctcccttanctcatcatggaatacatgaagcctctcancaatgtggtccatggcgttaa

SEQ ID NO: 16464 - DNA, 518 bp, Arabidopsis thaliana
  unsure at all n locations
  Clone ID: LIB25-021-Q1-E1-B4
gnngganctgtctngcctggnccnttacggtgcccnattcccgggnnaccccacgcgtccgcnaattcccacaaaagagaggtacaacaagactcgtcgctcttcgctttttcttctctctttctttctcttgccagtagtgtgatcttacgaagcttttagtagagaaaaagcatatacgcttngtctttcttaatcgactgataagtccttaggatcagatggaacaaatgggtggctactcaaaacaacaaggtccatttttagtttgattaagggatttggatctgagcttacttcatcaactttgtcggaatatacatttgctttgtgtggatttggaagttgtccctgaatggcgtccgaggatttgaatattgttgcggaatcaaagaaaggggaagagaatgttattgttgataattccaaggacatgaatagacctgagaatcttgacttatctactgagaaaactgatactgccaatgagaatggtccaaaagatgaagcntctaatg

SEQ ID NO: 16465 - DNA, 525 bp, Arabidopsis thaliana
  unsure at all n locations
  Clone ID: LIB25-021-Q1-E1-B6
nngnngttgtttnggcagcctcttgccggggtcnataccgtgtcctccactcccggggcccccacgcgtccgaaaaagaagtaacagcaaccaaaaatgacgacaatggcgacacaaggcgcttggctacgaatgacctcatcagccaagtccatgaccaagtcaaccgtgacttcaaaggagcttggattcctcacctcccagctcagcggcttaagaatctcatatactcccagtgacgtcatcaaccgtatctcccttccttcgttccccgggattcagccaatcgtcgcacgtagaatctgcccttttactgggaagaaagcaaacagagcaaacaaagtttcattctctaaccacaagaccaagaagttgcaattcgtcaacttacaatacaagagagtttggtgggaagctggcaaacgttttgtcaaacttcgtttatcaactaangctttgaagaccattgagaagaacgggactcgacgctgttgcccaagaaanccggcattgattttcgccaag

SEQ ID NO: 16466 - DNA, 517 bp, Arabidopsis thaliana
  unsure at all n locations
  Clone ID: LIB25-021-Q1-E1-B7
nnnnnnnnntttnngnngcntntngcctgnccntaccggtccananttcccgggnccacccacgcgtccgcatttctccaaaatctccgagttctacaattgtgtgatcaatcaatcttctccgatttcaagcttctcgatcaaaagaatcatcatgggaggaggaagagctatggcgacggcggcgaaggttgctggaatcggagttggtaaaggaggattcaagggatttggatttcctccggcgactgagcagtttcgtgttaaaaccgcggcggctgcggcgtcgtctaaaccggtttcggcttcgattacatcggcggttcatccttctgttgaagaagatgggatgattatgcagagaccggtttgggatgattgggaatttgctgaagaagaaccgattcctagggttgtttttagcaaacctcctagtcttgaagaagctaaagaagctactgaagatcttaaagaagcaattaanttggtgtatatgtcatctcaaaantgtctgcgg

SEQ ID NO: 16467 - DNA, 457 bp, Arabidopsis thaliana
  unsure at all n locations
  Clone ID: LIB25-021-Q1-E1-C1
aaaccataccataaaaaacatgaaaatcctctcactttcacttctcttgctcttggccgctacggtctcggcatccgttccagggctcatcgaactcgtcgattcgaaaaccatctttgggaacgtagccgaactcttagagaaagagaaactttccatcaactacgccaactgcagaagctggcaccttggtgttgagacctctaacatcatagacttcgacacggtgcccgcaaattgcaaagactatgttgaagactacttgatcacttccaaacagtaccaatacgactccaaaaccgtgtgcaaagaggcttatttctatgccaaaggacttgccctaaagaacgacaccgtcaatgtttggatctttgacctagatgataccctcctctctagtattccctactacgcaaaatatggatacgggacagaagaagaacgacccggggggngg

SEQ ID NO: 16468 - DNA, 505 bp, Arabidopsis thaliana
  unsure at all n locations
  Clone ID: LIB25-021-Q1-E1-C10
nngatgtccncctgcactattggtccgntnatcccgggtggnancacgcgtcgggnaatctcaactcttcttctctctctctctctctctccgcctgttctccattgatctaatctaactcgctcatcagaatcatctcttcatcgttaatcctcttccttctcactcagnatgtatcgtttcgcttctaacctcgcctccaaggcaaggattgctcaaaacgctcgccaggtttccagcagaatgagctggagcaggaactatgcagcgaaagagattaagtttggtgttgaagctcgagctttgatgcttaagggtgttgaagatcttgctgatgctgttaaagtcaccatgggtcccaagggacgtaatgttgtgattgagcaaagttggggtgctcctaaagtgacaaaagatggtgttactgttgccaaaagtattgagttcaaanacaanattaagaacgttggtgctagtcntgtgaacaaggttcaaatgcnactaa

SEQ ID NO: 16469 - DNA, 502 bp, Arabidopsis thaliana
  unsure at all n locations
  Clone ID: LIB25-021-Q1-E1-C11
gngancgtctncctgnncttctgtccggtcttcccgggtngaaacacgcgtcggccaacgcgtccggtttttgattctcggatctactccaagacggttttcgaaattaacaagcttttcaggaaatggatcattcatcaaatagatttggcaataatggagtggaatcgattttaccgaattacaagcttggtaaaactcttggaattgggtcttttgggaaggtgaaaatagcagagcatgttgtcacagggcataaggttgctatcaaaatccttaatcgtcgtaagatcaagaacatggagatggaagagaaagtgaggagggagattaagattctacggttgtttatgcatcctcatattattcggcagtatgaggtaatagagaccacgagtgacatttatgttgtgatggagtatgtcaagtctggagagctctttgattatattgttgagaaaggcagattacaagaagatgangctcgtacttttccancant

SEQ ID NO: 16470 - DNA, 444 bp, Arabidopsis thaliana
  unsure at all n locations
  Clone ID: LIB25-021-Q1-E1-C12
caagataagaaagaagaaagaatcatcaaaaaatgggaataatggaggcagagaggaaaacaacaggctgggctgccagagacccatctgggatcctctctccttacacttacactcttagagagactggaccagaggatgtgaacataagaatcatttgctgtggaatctgccacaccgatnttcatcaaactaaaaatgatcttggcatgtctaattaccccatggttcctgggcatgaagtggtangggaagtattggaggtgggattngatgtgagcaagttcaccgtatgggacatagttggagttggttgccnccttggatgttncggaggttgttccccngcgagagagatntggaacanttttgtccnaagaanatttggagctacaatgatgtttacatcaatggtcaacctacacaanggggggnttcctaaaa

SEQ ID NO: 16471 - DNA, 519 bp, Arabidopsis thaliana
  unsure at all n locations
  Clone ID: LIB25-021-Q1-E1-A7
nnnngngntntttctgnggccctttnnnnngnccaanccgntccatactcccggggccccccacgcgtccggatgcttctgggacatctgagtttgtggagaaaggaacagataatgtagtctttagcacatgtgatgaagaaaaaagtagggttgtttttcagatgggaacttctgatgctgttagggctctaaaggcttctgagattgtgtgtaatgacgttgcaactattgatattaatatgggttgccccaaggcattctctatccaaggtggaatgggtgctgctttgttaagtaaacccgagctaattcatgatattttggcaacacttaagaggaacttagacgtaccggttacttgcaagattcgtctattaaaatcaccagcagatactgttgaattggctaggagaatcgagaaacttggtgtaccagctcttgctgtacatgggaggaaaattgcagacaggccaagagatcctgctaaatgggatnagattgcagatgtngtngcng

SEQ ID NO: 16472 - DNA, 414 bp, Arabidopsis thaliana
  unsure at all n locations
  Clone ID: LIB25-019-Q1-E1-H6
cttgaagaaatgcgctgccaaggttaacatggaatacggtcttgatccgacgattgggaaagcaattatgcaagctgctcaggaagtacctgagggaaagctcaatgatcatttcccccttgttgtctggcaaactggtagtgggactcagagtaatatgaatgctaatgaggtcattgctaatagagcagctgagattcttggtcgcaaacgtggtgagaaatgtgtgcacccaaatgaccatgtgaacagatcacaatcttctaacgacacttttcctaccgtcatgcacattgcagctgcaaccganattaattcgangctcatccctaantttaaaaactttgcatagcactttgggaatctangtccttcgagttcaaagatattgtganaattgggaagaaccacact

SEQ ID NO: 16473 - DNA, 508 bp, Arabidopsis thaliana
  unsure at all n locations
  Clone ID: LIB25-019-Q1-E1-H7
gngntgtnngngaaatttcnacgcgcnacgtaccggtaaancnaattcccgggtccacccacgcgtcagancgatactcaaagctcgtaatctccttctactctccagatccgaggattctcttcgtttacagatttgtaaacgttcgtgaaattggatttgttgatctctttggtaaacaagcatggctgctccagtgcctccaggagcatatagacctaataacaatcagcaaaactctggtggtcctccgaattttgttcctggttcacaaggaaaccccaattctttagctgctaatatgcagaatttgaacattaatcggccacctcctcctatgcctggttcaggtcctagaccatctccaccttttggtcagtcaccacaatcttttcctcaacaacaacaacaacaaccaaggccttctccaatggctagacctggacctcctcctcctgctgctatggctagaccaggtggacctcctcaggtatcgcaacctggtggg

SEQ ID NO: 16474 - DNA, 439 bp, Arabidopsis thaliana
  unsure at all n locations
  Clone ID: LIB25-020-Q1-E1-A1
gtacctccaatggcttcttctgcatttgcttttccttcttacataataaccaaaggaggactttcaactgattcttgtaaatcaacttctttgtcttcttctagatctttggttacagatcttccatcaccatgtctgaaacccaacaacaattcccattcaaacagaagagcaaaagtgtgtgcttcacttgcagagaagggtgaatattattcaaacagaccaccaactccattacttgacactattaactacccaatccacatgaaaaatctttctgtcaaggaactgaaacaactttctgatgagctgagatcagacgtgatctttaaatgtgtcgaaaaccggtggacatttggggtcaagtcctggtgttgtggagcttactgtggctcctcaatacattttcaatactccacaaagacaagattcnttggga

SEQ ID NO: 16475 - DNA, 416 bp, Arabidopsis thaliana
  Clone ID: LIB25-020-Q1-E1-A10
attgcatcaagtaatcgccgtgtaactaactacttttgcattcaccatcgctcttacgtttgaatctatccagatccaaagctcttcttcttcccggcaattctgagatctcattttcaccggcgacgagctttaatcggagaacgatgaagcagcttcacaagcaaatgagctcgaagcgtgatgaagaaaccattcccatgagccaatccagtccttactctcccaaaactttaaagcatcccagatctcttcccagatcgcttcactatctctttcgtgaacaacgactcctctttatcctcgtcgggatcttgatcggattcactttcttcatcctccagccttctctctctcgtttaagcgccgctgaatccaactcgttaaacacaagtttggttcctaaggcgtcacga

SEQ ID NO: 16476 - DNA, 508 bp, Arabidopsis thaliana
  unsure at all n locations
  Clone ID: LIB25-020-Q1-E1-A11
gngnnnnnnngaacaatttttttgncncccngtcggtaaaganattcccgggncgncccacgcgtccngaacgattcaacatcaaatctagctgaattattgtttcgcgttgattgattgatccggagaaaggcgatgacatcgcctggatcgaagaaagttgttaccaccgacgacggatcggagaagaaagtttccggcaatctcggaaaagtaagtttttccggagatcttaatcatagtggaagccatagtggaagccatagtcgtagcagcagcagcgccggaggtggtgaaggaggaacgtttgagtatttcggatgggtttatcatttgggtgtgaataagatcggtcatgattactgtaatcttcgtttccttttcattagaggcaatatgttgagatgtataaaagagattctcatgagaaacccagacattaaancctataagggtggngtcaaagggcccacaatggnggattgaaaacctaggncctcnaaaaatt

SEQ ID NO: 16477 - DNA, 87 bp, Arabidopsis thaliana
  unsure at all n locations
  Clone ID: LIB25-020-Q1-E1-A12
ccgtgtcctgaaggcgcnttggattcgaatttagtgaagggaaagatcgttccttgtgatataggggactcatntctagcacaccna

SEQ ID NO: 16478 - DNA, 105 bp, Arabidopsis thaliana
  unsure at all n locations
  Clone ID: LIB25-020-Q1-E1-A4
naatcctccaacncgcgatcgattacatggcttaatcatcggcgatgatgttcaatgctgacaaataccgaccanncgtttacaagacgattcaagcgtancntg

SEQ ID NO: 16479 - DNA, 406 bp, Arabidopsis thaliana
  Clone ID: LIB25-020-Q1-E1-A5
catgtaacccttttaagataattttcttcttcctgttaatttatctgaagtttgcttcttatcttcgtgatcgctttttgcaatcacaataatgtctaaccgttccttcaagaatttcatagaagaagaacttggaacattcccacagttcttaatctacgctcttcttgaatggatcctcatcattatcctcttcatcgatggcttcctcgctttcttctctaaccaaatcgctaaattctttgacctcaaaatcccctgtcttctctgcactagactcgaccatgttcttgtcagcagaaaccctgatttctattacaacgactcgatatgcgatgctcacaagaagaatgtctcatctctcgcttactgtcatgtgcacaagaaactctctgagattaaacgt

SEQ ID NO: 16480 - DNA, 432 bp, Arabidopsis thaliana
  unsure at all n locations
  Clone ID: LIB25-020-Q1-E1-A6
gagaagagcaagcagcggcgcagaagttgaacacaagtgaagctcacaatggcgaggattaaggttcacgaattgagggagaagtcgaagagcgatcttcaaaaccagctgaaggaactcaaagctgagctcgctctcctccgtgtcgctaaagtcaccggaggtgctccaaacaagctctctaaaatcaaggtcgtgcgtaaatccatagctcaggttttgacagtgtcttctcagaagcagaagtctgctctaagagaagcatacaagaacaagaagttgcttcctcttgatctccgtcccaagaagacccgtgctattcgtagacgcctcaccaaacaccaagcctcgttgaagacagagcgtgagaagaagaaggagatgtnattcccaataagggaatacgctatcaaagtttaagttttagctgcc

SEQ ID NO: 16481 - DNA, 438 bp, Arabidopsis thaliana
  Clone ID: LIB25-020-Q1-E1-A8
caaaaaaaaatggcgacggtacaattgtccacccaatttagctgccaaaccagagtttcaatctcaccgaactctaaatctatctccaagcctccgtttctggtaccggtgacctcaattattcaccgcccgatgatctccaccggaggaatcgctgtttccccccgtagagttttcaaagtccgagccacagatacgggagagataggatcagctctattggcggcggaggaagcaattgaagacgtggaagagacggagcggctaaagagatcgctcgtggattcgttgtacggaacagatcgaggtttaagcgcatcgagcgaaaccagagctgaaatcggagatctaatcacacagctcgagtctaagaacctactccagctccgacggaagctcttttccttctcaacggcaaatgggttctcgcctacacaa

SEQ ID NO: 16482 - DNA, 507 bp, Arabidopsis thaliana
  unsure at all n locations
  Clone ID: LIB25-020-Q1-E1-A9
nnnnnnnngaaactggttctctggccgccccggnnnnaaanaaatcccgggnggncccacgcgtccgaanggagagagatctgcgagagaaagagagatcagattccggtgttccaaggaagcacatattttaagatccagaatcgcctgagagatgtctaccttcagtggcgatgagaccgctcctttcttcggcttccttggcgctgccgctgcgctcgtcttctcatgtatgggagctgcgtacgggacagcaaagagtggtgtgggagtggcatctatgggtgtgatgaggccggagttggtgatgaagtctattgtcccagttgttatggctggtgtgttgggtatctatggtttgattattgctgttatcatcagtaccgggattaaccccaaggctaaatcctactacctcttcgacggatatgctcatctctcctcctggtcctgcctgtnggccaactggtccttcaacctgggaatggcaataagtatccttgggga

SEQ ID NO: 16483 - DNA, 427 bp, Arabidopsis thaliana
  unsure at all n locations
  Clone ID: LIB25-020-Q1-E1-B10
gcacagcttgacaatcatcggaatcagcttattcaggtacgtgaatgtcgaaagccaaagtttttttaatatgtcatcttcttttgttgatcatcttcaaaatcctgcagttggagctagtgttaagttctggaacagtttgcttatcgatgtactctcttgtcgctggaattttcgggatgaacattccatacacatggaacgacggtcatggatacatgttcaaatacgtggtgggcttgacggggacactttgtgtagtcgtgtttgtgatcataatgtcgtacgctaggtacaaaggacttgtgggatcttgatggctgaatttgggttagatggagagattgtgaaggggcattgggcagatcttgttttcgattattatacttgtgggccgttccgagttttgaacgaacntcacaattaa

SEQ ID NO: 16484 - DNA, 439 bp, Arabidopsis thaliana
  unsure at all n locations
  Clone ID: LIB25-020-Q1-E1-B12
ttcacagtagaagtagaagatggagcagctagtgagcatgggtttctccagcgatttggccgccgaggctttaacggccaccggcggagattccatccagaaagccaccgactggattctctcccaccgttcttcccctcaatccacggccacgttacagcccaaactcgaccgcttcctccgtctccatcccaaagccctagcccccgccatgggtgacgattccagcaagcgccccaatcccaaaacccaaatccacgtcgcggctgatgattccaacaagcgtcacaagctctcatcatccagccaccgccaacaccagccattgtcggagcgtatgcgtcctcgcactctagatgacgttgtaggtcaagaccatctcctctctcccaagctctctcctccgttccgccgtcnatccaatcgcctcccttncaat

SEQ ID NO: 16485 - DNA, 434 bp, Arabidopsis thaliana
  unsure at all n locations
  Clone ID: LIB25-020-Q1-E1-B3
atttggaagctctaaaaagataaatcttgtttttccctcctaattgtaaagaagagggctttagacttttagaacaacactcgagggaagtacgacgacgaagaagagctaacaacgataatgaatcgggttactactgaaagcattgcgtctacggcgatactggtggtgatggtgtttctcttctcgtggagatctatcgaggcggcgaatgtatcctacgaccaccgttctctcaccatcggcaatcgccgtcagctcattatctccgccgccattcactatcccagaagcgtccctgctatgtggccatctcttgttcaaacagcaaaagaaggaggctgcaacgtaatcgagtcctatgtcttctggaatggccatgagccatctcctggaaagtataatttggtggccggtataatatantgaagttt

SEQ ID NO: 16486 - DNA, 516 bp, Arabidopsis thaliana
  unsure at all n locations
  Clone ID: LIB25-020-Q1-E1-B8
nnngnntgnnngnntntgtccagcctgnacgtaccganccganaattcncgggnccacccacgcgtccgaaaccctaactattaaaaagaatcgaaaaaatcaaagttctgaacttctgatcaatttcgatatgttatcgttaatcatcagaaggtctcgaagcagattcatcatccatggaatcaaaatttcttgtaactctctgtcggctgtagattcaagttcttcagttttggtttctagaagaaccttcagttcaacacctgcgttaagctattttggattcaattatggaaaaatctctaatttgaatcaagagatttggtaattacgcttattctgggagtagtttcgcttccagtactcgatcattgagctcaaaagctgtagctgtggcancgacttgtgaaggacttactggtgggaacgaattatanccaaacaagtgggcgattttaaatgaagaatgaaaggtgantgggaagantcacgccgcagcaattgcacangtccaa

SEQ ID NO: 16487 - DNA, 437 bp, Arabidopsis thaliana
  unsure at all n locations
  Clone ID: LIB25-019-Q1-E1-H4
ttcagattcaaacttgttcatcgaaattttgcttgaagattcgaatcgagaagtccgtggaagaggaagaagaagaagatgtctgtgcaagagtatttagacaagcatatgctttctcggaaaatcgaagacgccgttaatgccgccgtaagggctaaaacctcagatcccgttctcttcatcgctaatcatctgaagaaagctgtatcatctgtgataacgaaggttaaagcacgacagatccttgacagcagaggaattccaacagttgaagttgatctgcacacgaacaaaggcgtttttcgtgcttctgttcccagtggtgattcntctggaacgtatgaagctattgagctacgtgatggagacaaaggaatgtatcctgggaaacagtgtggctaaagctgttaagaacataaatgaaaaaatttctgang

SEQ ID NO: 16488 - DNA, 513 bp, Arabidopsis thaliana
  unsure at all n locations
  Clone ID: LIB25-019-Q1-E1-F2
ngnnnnnnnngnaangtttttcctgccccctacgggtcaaaaattcccggggtcgacccacgcgtccggagaaaacaaaacanaaaatggctacccgaaaagctctgatcaacgttcaccggatcattcgctccaccgccgtggttggccggagctctatcattcctgccgccgctaaccggtcatatcctattatattccggaatggagttgatttgggggcgagattcttctgtgagaacactgcgtctgcccagaatttcgatattgatctctctaacgaagagaataagagaagaacgatcaacagattgttgtataggagcaagcaaagagggtttttggaacttgatcttgttttggggaattgggttgaggagaatgttaattccatggacgaaaatggtgttaaatccctaattcatgtcctcaatttggaaaaccctgatctctggaaatggctaactgaacaaggaacagcctcccgggaagcagtgagttcaaatcccgtng

SEQ ID NO: 16489 - DNA, 432 bp, Arabidopsis thaliana
  unsure at all n locations
  Clone ID: LIB25-019-Q1-E1-F3
acgcgtcttctcatttctagtttctcagcctcctcctccttctcttccttcttatatataaatatatccacaaaatcatctcttttgcttcgctgtttctctcattattccatctctcttatcgccgctacaaacgtttcttcttcaacctcgttcagagattatcctcccttcttttctcatcttacaaggaagttgggcagttaaagctgctgggatcaccagttttgtcaaaagtggagtgtgaagaatcttttatgtctgaacaggcttctctctttcaatcatctatccggcttttaggagagtactgtcctatatctaggaaaaagtccactcataaagttggtggtttgcgttttgaggaggacatcacgagctgtattggatttcagtttatgcaactgagtgattancactggctcntctgaa

SEQ ID NO: 16490 - DNA, 428 bp, Arabidopsis thaliana
  unsure at all n locations
  Clone ID: LIB25-019-Q1-E1-F6
ctaaaactccgacgaacgaaaaatgaagtcattagcttcgccgccgtgtctccgcctgataccgacggcacaccgtcagctcaattcgcgtcaatcttcctccgcctgttatatacacggtggctcttctgtgaacaaatccaataatctctcattctcctcatccacatccggatttgcgtcaccactagctgtagagaaggaattacgctcttcattcgtacagacggctgctgttcgccatgttacggggtctcttatcagaggcgaaggtcttagattcgccatcgtggtagctcgtttcaatgaggttgtgactaagttgcttttggaaggagcgattgagactttcaagaagtattcagtcagagaagaangacattgaagttatttgggttcctggcaanctttgaaattggtgttgttgc

SEQ ID NO: 16491 - DNA, 436 bp, Arabidopsis thaliana
  unsure at all n locations
  Clone ID: LIB25-019-Q1-E1-F7
gtctgttcaagctcccattcttgtggccttcacgcttcaggaacaaagaccagtatctctctgaaagactacttctcggaaattttcgtctccatggcacccgtgagggggattcttggcttgcaaagggcagtgtccatttggaaggaaagtaacagactgactccagctttgagatcattcagcactcaagctgcatccacttccaccactccacagcctcctccacctcctccgcctccggaaaagactcatttcggtggtctcaaggatgaagatcggatttttactaatctctatggtctgcatgacccatttctcaaaggcgcgatgaagagaagtgattggatangaccaaagatttggtgctcaagggtactgattgggattgtcaatgaaatgaagaatctgggacttcgtggacgtggtggtgctg

SEQ ID NO: 16492 - DNA, 429 bp, Arabidopsis thaliana
  unsure at all n locations
  Clone ID: LIB25-019-Q1-E1-F9
tttcagctcaagcagctgaagaataacgatcaagaaccaaaaaagaagaaaacgaatctgttcttagctttgatgggttcttgcttcagttctcgagtcaaagcagacatcttccacaatggtaagagcagcgatctttatggtctaagtctctcaagtcggaaatcgtcttcgactgtagcggcggctcagaagacggaaggggagatattgagttcgacccctgtcaaaagcttcacctttaacgaactcaaactcgccacaagaaacttcagaccagatagtgtgatcggagaaggtggctttggttgtgtctttaaaggctggttagatgagtcnactctcactccgactaaacctggaaccggtttggtcatcgccgttaaaaagcttaaccaagaaggttttcaaggtcaccgtgaatggctg

SEQ ID NO: 16493 - DNA, 522 bp, Arabidopsis thaliana
  unsure at all n locations
  Clone ID: LIB25-019-Q1-E1-G1
nnnnnnnnngnaactgtctttcctgcnccctaacggtccgaanatcccggggtccnacccacgccgtccgcaagacgcgtgggcggacgcgtgggcttcaacagaatatgcaaataatgtgggcccttcccaacaggataatcttccacgtgatggcggtgcctcaaaacagaagcgcttgggttataagcagaagcaaaatattatatttgagaaaaaaccgacagggagctctgttgctactgcagaggtgtttgatgttgtcccgtctcctgaggttgttaatgaaggtgtctcaagcaataactcagacatgccagcgacgtcaaccgtttcagctgagtcaactttcccgaaaagaaaaaataacaggaatggtaagaaaaaacacaangctgaagagacagcaactatgaatactacaaagaattgccgttgggaaagaaacaaaaatccggggaaatgagtcaattgagactgctaagggcaaagggcaacctgaaaattgaatttgggtccngt

SEQ ID NO: 16494 - DNA, 415 bp, Arabidopsis thaliana
  Clone ID: LIB25-019-Q1-E1-G10
gacttcttctgttttctccggcaatgtcgttaaaactcaacactccttttccaattttcgcgccatctctatttcctaatcataacccaagagcacccagcgagatccgattctctagatggggcaacgctaatgccgaacggttcgagcagcgtcgccggagccaagaagaactcgaggctgagatccgtcgggaccgccgattcgacgccgctactaaaatcgtccatacccatgattccgaagcagcagctgctgagcctaaaacgtcaccgtttagatcaagaggcactccttcacttccctctgctcgttcgattccgggtcgaagatccaaatactccaaacccgattcaggacccaatagacccaagaacaaacctagagtacccgattcgccgccgcaactagacgc

SEQ ID NO: 16495 - DNA, 71 bp, Arabidopsis thaliana
  unsure at all n locations
  Clone ID: LIB25-019-Q1-E1-G12
nccgatgatttcatcggctgacantcgatnggactctggttctgatacacgagaccaacactgattgtgac

SEQ ID NO: 16496 - DNA, 440 bp, Arabidopsis thaliana
  unsure at all n locations
  Clone ID: LIB25-019-Q1-E1-G4
ttattggaggatttcactgagcttgcaagagagaacactgagaaggacctcgagacttgtgggactctcgctgcctttcttgaaagaggaattttttatgtaaccactctgataatacctaagcaagaatcaacttctaattcttgtcaggctatgaatgaagtggaagtgttttccattcaaaacgaaagagaactctatcccgtaggatggattcatactcatccttctcagggttgtttcatgtcatctgtagatctgcatacacattattcgtatcaggtaatggtgccagaggcttttgcaatcgtcgtagctccaactgatagctctaagagttacgggatatttaagctaacggaccctggaggaatggaggtactgagaagctgctcaagagactggattccacccgcacaaaagaancaagaagatnggaa

SEQ ID NO: 16497 - DNA, 434 bp, Arabidopsis thaliana
  Clone ID: LIB25-019-Q1-E1-G5
gaaaaaaaaaacagagtagagattgataaaaaaaaaatgagtagctccgattctcctcagcttcacaatatcttcgtctatggtagctttcaagagcctgacatcatccatgtcatgcttaatcgtattcctgagattgtctctgcaacacttcctggcttgtacgttacctctctctctcgatcttgatcttgatctcgaatgataattctctctgttttttagatctaaggtttaatgccgattttgggttgttttcagtaagagatttaggcttaaaggacgtttgtatccatgtattatcccctctgagaatggagaagttcatggaaaggtactaatgggattgactaatgatgaacttgagaatgtagattgggttgaaggaaacgaatatgaaagagtgtttgttgaagttgtaagaaaagacaatt

SEQ ID NO: 16498 - DNA, 240 bp, Arabidopsis thaliana
  unsure at all n locations
  Clone ID: LIB25-019-Q1-E1-G8
tagagaactctttaggatgtctttgtttgttttcttctactttctagcgtgttagtgtacattggtgtactggagcaaatcttccttaactctttagtagctgacaagtatgatctacatttgtgttagtgtccacgtataatgatggcttgtgtatccaaactacagcttctgatgcttaacagttacatgtttatgcttaaaaaaaaaaaaataaanaannanaananaaananaana

SEQ ID NO: 16499 - DNA, 413 bp, Arabidopsis thaliana
  Clone ID: LIB25-019-Q1-E1-G9
aatcacgaggtttccctcacttcctttccattgctaaaccaggatttgcctcctgcatttggaaatggacgcttctatgattaccaattccaaatccattacttctccaccctctttagccttagggaagtcaggaggaggaggagttatcagaagttcactatgtaacttaatgatgccaagcaaagttaacttccctagacaaagaactcaaactctaaaggttagccagaagaaactcaagagagctactagtggtggtcttggtgttacatgcagtggtggtgataagattctcgtagcgaatcgaggtgaaattgcagttcgtgttatcagaactgctcatgaaatggggattccttgtgttgctgtgtattctactatagataaagatgctcctcatgttaaattaa

SEQ ID NO: 16500 - DNA, 425 bp, Arabidopsis thaliana
  Clone ID: LIB25-019-Q1-E1-H1
aatagacagatctaccctccgatcaatgtcttgccatctctgtctcgtctcatgaagagtgccattggtgagggtatgactcgcagggaccactctgatgtttctaatcaattgtatgccaattacgctattggaaaggacgtgcaggccatgaaagccgtggttggagaagaagctctttcttccgaggatctgctatatcttgagttcttggataagttcgagaggaagtttgtggctcagggagcttatgatacccgaaacatcttccagtcactcgacctggcatggactctcctcagaatcttcccccgtgagttacttcaccgtatacccgcgaaaacccttgatcagttttacagtcgcgataccaccaactgaagaacataagtttctactgccttggtgtgatgatatgtccaaat

SEQ ID NO: 16501 - DNA, 302 bp, Arabidopsis thaliana
  unsure at all n locations
  Clone ID: LIB25-019-Q1-E1-H12
aaaaaaaaaaacagaaagtaacatgagatctctcttattagccgtgtgcctggttcttgcggnnanantgcggtgaagcagccgtgtcttgcancacggtgattgcggatctttacccttgcttatcctangtgactcagggcggaccggtcccaaccctctgctgcaacggtctcacaacactcaagagtcaggctcaaacttctgtggaccgtcagggggtctgtcgttgcatcaaatctgctattggnggactcactctctctcctatnnncatcnaanagtgctttggaattgccttc

SEQ ID NO: 16502 - DNA, 437 bp, Arabidopsis thaliana
  unsure at all n locations
  Clone ID: LIB25-019-Q1-E1-H2
atcttgtgcctttagatttcttttcggggagatctagtagttgttggattcgttaaacggagaagtggatttggtacgagtctttaggtttccttcttcaccaaaagctctatatagagagaatctgcgagctctttttggtaggaaattagggttcgtgttgcttggtaaatatagaatcaatgacggaggttgttctgcatatatacgatgtgacgaacagtggatcggagaagactaacaacaccattgttcagatcaataggttcttcaaagacgggatcggtcttggcggtatattccacagcgctattcaggtatatggaaacgatgaatggtcttacgggtattgtgaactangaactgggtgtattcagctgccccgagtggaaagaatccaatgtacacataccgtgagaaaatcgtccntggcaaaa

SEQ ID NO: 16503 - DNA, 418 bp, Arabidopsis thaliana
  unsure at all n locations
  Clone ID: LIB25-019-Q1-E1-H3
gtggaagttccagaaattgtctgtgaagattgttaccaacgagtccttaccgaattcatgaaactctcaaaggtgcctggattccgtcctaaaacaagagttccagagaatattattgttggtttcgttgggaggcaatatgttctgagagcaactgttgaatctatcttaaagagaacacttcctcacgccatggaatcagtgactggaagggctttaaaagactcgatacagattgtaagcagttttccagatatggagaaggcttattctaagctcaagactcttaagttatgangtggttgttgatgtggtacctgaactaaaatggaatcctgaggatgggtataaaaatatgaaagncnttgtagaactangcgatgagatanatgcaaaaaaagcttgtgaaaagacaact

SEQ ID NO: 16504 - DNA, 372 bp, Arabidopsis thaliana
  unsure at all n locations
  Clone ID: LIB25-019-Q1-E1-F12
ttctcgganaaattacncttcttcatcgattttccggtggtttggtttgtcaacttcatcttcttcttctctttctcctttcattttttttcntgtgtttcttctttnacgtgggtccttcaatctccatgaaggacccgaccattgcttantcctaaacaaaactccaaaaatctaattcttttcgatctgttttatcttcaaataataanactcnttgattgctaaaaccgattttgatcatcatcatgcactgttttccgtgtttctcttcgccaaanaacaaganatcttcanctacgattgagaccaacgacaacannngaacccaaancagatgatangagacgtgcagaagagacanaggagata

SEQ ID NO: 16505 - DNA, 433 bp, Arabidopsis thaliana
  Clone ID: LIB25-019-Q1-E1-D10
agattgaaataccacgatgcttttgtttgcgctgagggaaaagtctttgatgtctcagaatgggctatttgtcagggaatggcgtgtagaccaaatacacataggccaagtttccatgtgaacatggtcggtttagaaaaggcaacacagagatcaaagtcgagcaggttcccgtgggatcttgatgtggagatgatggacgaggatgaggaagagtttgagttatggcttcaacaagctctagcttccggtctattctgtgaaacatcaaaacgcagaaaaagctggagtcctttcaagttaaccaagaaacaatcccgaagaacatcgacttgaccaaaagaagacatcaacaaggatggcaagatcaacaacaatggctgaatggcttgttctttccaacaatgggaaaatgggcgaagataagaacgaa

SEQ ID NO: 16506 - DNA, 367 bp, Arabidopsis thaliana
  unsure at all n locations
  Clone ID: LIB25-019-Q1-E1-D11
tgtcctgttcctggaccaaccttttgtccatcgaaccctcataattggtgggaaggttatgcctatcagtctcttaacgccgttgaagctcgacgttaccggtgggnnagagtaaaccatatggtttatgattattgtactgaccggtctatgtttcctgtcccaccanccnantgtcntgcttgaaaataattgcatacgtacgttgcaatgatcatgtttcgtcttgtacgagattttatatataaattgtgggaaaatgtggattgtattgtcctcttacgcaantgtgcanacgtacgtgagtgtgtatagatanaantggtgatttgtggttatttgaaatttttatgantaannaggaaaa

SEQ ID NO: 16507 - DNA, 353 bp, Arabidopsis thaliana
  unsure at all n locations
  Clone ID: LIB25-019-Q1-E1-D12
gactgctgctactgccgctcctcctgaacaatctgatgaacaacaacctaatgtcaatggtgaagctcaggttttacctgatcagtcagtanaaccaaaacctgaggaatcatgatccttataccaagtctagttgaaganaagtggatgagaattgagaactattgtctccacagatgttgcgctttgcttttctgtctttcaaaagcattatatgctgtttgttgtacttaattctacaggctttagggaagtgattcttgacatttttgtatgtttatgttttgggcaaaggttttttaaatcgaagcaaagccaacagttgccaaacagacaaaaaaaaaaaagggcgg

SEQ ID NO: 16508 - DNA, 504 bp, Arabidopsis thaliana
  unsure at all n locations
  Clone ID: LIB25-019-Q1-E1-D3
ggnnnnnnggnaacttntttcctgccccctaccggtccaaaaatcccgggtcnacccacgcgtccgcaanactccattattctcctgcttcttcgtctcttcaattattttctctgagactagctttgattcaaccatggctaatgcagcatcaggaatggcagtccatgatgactgcaagctgaaatttatggaattgaagacgaaaaggacacaccgtttcatcatttacaagattgaggagctgcagaaacaagtgattgttgagaaaatcggtgaaccgggtcaaacccatgaggaccttgctgcaagtcttccagctgatgaatgccgctatgccattttcgattttgattttgtcagttctgagggtgtcccaaggagcangatttttttcgtggcatggtctccggacacagcaagagtgagaagcaagatgatctatgcgagctccaaggacaggttcaagagagaactagacggattcaagtcgagcttcaggca

SEQ ID NO: 16509 - DNA, 442 bp, Arabidopsis thaliana
  Clone ID: LIB25-019-Q1-E1-D4
cttaaaccccaaaacaaacaaacaaacaaacaaaaaataccaaaacaaagaagaaaaaaaaaataactatggatcttctctttctctttttctctcttctcctctcttacctctttttcaagatctggaaactcatagactcaaagcaagacaaagattgctacattttagactaccaatgtcataaaccaaccgacgatcgaatggtgagcactcaattcagtggagagatcatttatcgaaaccaaaaccttggtttaaccgaatacaagttccttctcaaagccatagtaagctcagggattggagaacaaacctacgctccaagacttgtctttgaaggtcgagaagagcgtccttcgttacaagatgggatctccgagatggaagagttctacgtggacaagcatcggaaaactcctgggagagaaatcaaatatct

SEQ ID NO: 16510 - DNA, 417 bp, Arabidopsis thaliana
  Clone ID: LIB25-019-Q1-E1-E10
aaagacaaaaaaaaaaaaaaaagagaaagaagaagaagcttgggacaggggagtcccagaaagaaaaaaagttttttttttccggtgacagtgtcggttctctgacgctcccatttttgttcaatctttcttccttctttccctgaatgccttcactcgtattctgaaacttgcggctatttacaattgcaggagtgtgaatgattataaggtagtaatggattcaaagaacaccatcttatctccgagtatcatcaatccgctttgcttgctgtcctggaggtgatttgtcttttagatgattgacgaattcatcgaagaagagttgccaccattaatctgatcagccaaaaaaaaggtttggcatgaactgtatggctgtcgctctcgatccactaaccgaccggttttcgcagt

SEQ ID NO: 16511 - DNA, 172 bp, Arabidopsis thaliana
  unsure at all n locations
  Clone ID: LIB25-019-Q1-E1-E12
ntactanttttatcnttttatgtacnttgtctctatttgaattactagctatgagttttgttagacgtacgcactctaataatattcattttatcatgtaaaacgctnngactgtatttggttgtaagtcaatgttcttaacgaaaatattgatgaagcaatgttacannga

SEQ ID NO: 16512 - DNA, 442 bp, Arabidopsis thaliana
  unsure at all n locations
  Clone ID: LIB25-019-Q1-E1-E2
cttgataattggaatggcgtcgaccgtttccacttcaacgctaaggtcacccaacaagatttagaggacacatacaacgtgccattcaaatcatgtgtttacgaaggaaaagtagcgagtgtaatgtgttcgtacaaccaagtcaatggaaagcccacatgtgctgatgaaaatctcttaaagaacactattcgtggtcaatggcgtctcaatgggtacattgtctcagattgtgactctgttgatgttttcttcaaccaacaacattacactagcactccggaagaagccgccgccagatccattaaagccggtttggacttggactgcgggccgtttttggcgattttcacggaangtgcagtgaaagaaaaggattgttaacgggagaatgacatcaatttagcacttgctaatacattaacagtccaaatgagactng

SEQ ID NO: 16513 - DNA, 440 bp, Arabidopsis thaliana
  Clone ID: LIB25-019-Q1-E1-E4
gaagcagaacccaataaagatagtgtcgtctccaaagcagaaccagtaaagaaaccgagaccttgcgagctctacgtgtgtaatatccctagaagctacgacattgctcagcttcttgacatgtttcagccttttggaactgtaatctctgtagaggtatcgcgaaatcctcagacgggagagagccgtggaagcgggtacgtgacaatgggttctataaactctgccaaaatcgccattgcttctcttgatggaacagaagtaggtggtcgggaaatgcgggttaggtactctgttgacatgaatccaggaacaagaagaaaccctgaagtcttgaactcaactccaaagaagattctgatgtacgaaagccaacacaaggtctatgtcggaaatctcccttgggtcacacagcctggatggtttgagaaaccacttta

SEQ ID NO: 16514 - DNA, 430 bp, Arabidopsis thaliana
  Clone ID: LIB25-019-Q1-E1-E7
acgctgttccacgaagcttcgctgtcaacaccatcatcggaacttaccggagttcgttacgaaacacaaagatgaacgctgagaataatcagactactactactcactcgaaagtgatctcacatgtattctgcactggtactgctaagctaggctctgttgggccacccattggtcttgttgatattggcgtcagcgaagttgcttacatcttccgagtctctcttcctggcattgagaaaaatcaagataagatcaaatgtgaaattcagagggaggggagagtttgcatccaaggagttatacctgagattgcgattccaagtgacacgggatgcttatacagaatgcaagtgcaacagctctgtccgcctggtccattctcaatcacgtttaatcttccgggacaagtggattctcgcttgttttc

SEQ ID NO: 16515 - DNA, 437 bp, Arabidopsis thaliana
  Clone ID: LIB25-019-Q1-E1-E8
cttcaaaatctctctcttcaccaaatcctcagaagatgagcaacgacaaggatagcttcaacgtctccgatcttactgctgctcttaaggacgaggatcgagctggccttgtcaatgctctaaagaacaagctgcagaatctggctggtcagcgttctgatgtgctcgagaatctgactcccaatgtgagaaagcgcgttgatgccttgagggatatacagagccaacatgatgaactagaggcaaaattccgtgaggagagagctattcttgaagccaagtatcaaacgctgtatcagcctttgtatgtcaagcgttatgagattgtgaatggcactactgaagttgaactggctccagaggatgataccaaggtggaccaaggagaggagaaaactgcagaagagaaaggagttccaagtttctggctgacaact

SEQ ID NO: 16516 - DNA, 423 bp, Arabidopsis thaliana
  Clone ID: LIB25-019-Q1-E1-E9
gctgggatccaattttcttatttccccaaccaaaacaggggaagaaaaaaaaagaaaacaaaaaaatcaaaaaaaattagaaaatgaaagcctcaacaagagtcatatggacaatatctgtccttatgctcgctgctgtgtccgaggccatcttccctctaccgtttctaccgttcctccctgggttcaacaacggctttagggacaatgaggctgtcaaggttgcgaaaccacagcctgcaggagcagttggtggaaaagccgcaagaaggcagcgtggcggcggtttagacgctcagacaacctggggtggtaagtgggagctcttcttggaaaactcgggtgtgtcagggatgcatgcgatccttatgccagttatcaacaaggtccagtactatgacgccaccatttggagaatttcaa

SEQ ID NO: 16517 - DNA, 511 bp, Arabidopsis thaliana
  unsure at all n locations
  Clone ID: LIB25-019-Q1-E1-F1
ggnnnnnnngnaactgtnttcctgcncccancggtccgaaaaatcccggggtcnacccacgcgtccgggagagacagaggaggatggtggagttaacgaatcaaagagggtcggataaaccaaagtaccatgaccgaatcagaaatgtccgacggagggagaacatgcgttgactcttattantctcagactttacgctagagcaatcatttcgatttgatctccgatgcttttttttgttggtttgttcttttaatttgctagactcttaatgaataatgtatatgatggtgttttggtgatatcgaatgtatcaattgtttctgcaaaaaaaaaaaaaaaaaaaaaaaaaaaaaaaaaaaaaaaaaaaaaaaaaaaaaaaaaaaaaaaaaaaaaaaaaaaaaaaaaaaangggnggccncccnaaaggntccangcttacttacncgtgnatgcaacgtcntacccttccnaaagggtcncctaaatttaattcncggggcgtcgtttt

SEQ ID NO: 16518 - DNA, 430 bp, Arabidopsis thaliana
  unsure at all n locations
  Clone ID: LIB25-019-Q1-E1-F10
atcgttctgtgtattaaaaagtattgatcttttaggtttcaggaatgaatcttggagtgaagaagatggctgtgctttaccattatccttgccatgacggtgttttcgcagctttagctgctcatctctacttctcagcaaagtcaatcccttcactgttcttccccaacacagtctactctccaatcacaatcaaccaacttccacttcaagacatcagtcatctctatctttttgatttcactggacctccaggtttcgttcaccaagtctctcctaaagtcgacaatgtcgtgatcctcgatcaccataaaaccgctattgatagcttaggtgatgtctctttgacttgcaagaacgttactagtgttttggatatagagagaagtggtgcgactattgcgtttgactantttactcagaagttggg

SEQ ID NO: 16519 - DNA, 423 bp, Arabidopsis thaliana
  unsure at all n locations
  Clone ID: LIB25-019-Q1-E1-F11
ggccgagtggagcgggaaggagttacagtgctgcaaaggtaccatctaccaagaaagcttatagtcaggagcancatggtttggactggaaggaagacgcngttgtacgctcagttccccctcttgctcctcctgaaaattatgctataaaggaatctgaatctcctgcaaacattgatagaatgtcttcctggaaaaaacttccatctccagcactganaactgtgaaagaagcgccagcgtcagaagagcagaatgatagcaaagttgaacctccaaatatagttgggagtcgacaaggtagggatgatgccgctgttgctattctcaactttcctccagcaaaagattctcatgaacactcctccaagcatcggcacaatatttcttggggttactggggggaacaaccccttatttcgg

SEQ ID NO: 16520 - DNA, 430 bp, Arabidopsis thaliana
  unsure at all n locations
  Clone ID: LIB25-019-Q1-E1-D1
gcccacgcgtccgcaaaatcttaaaaacaacaacaaaaatgaaaagtctccactttttagctcccaattcaacgattatcaatctgaagcaacaatcttatacanaaaccaagttccagttgcatcgtagcaacagaagaactctatcgataaactgcgtaaacagtggcggtgatgaagagaagattactcagccgttggatggagtggagataagattcaaaagaggatccagaaggaaaatgagggaagagggttcaggagaaggaggaggacaaagcgggaagaaaaaagagactgttcaaaagccatgggaagagatgacattgaatgagaaggcattggagctttatgttggagagaaaggtttgttgttttggctaaacaaattggcttacgcgtcgatatacattgtcattggaggttggat

SEQ ID NO: 16521 - DNA, 450 bp, Arabidopsis thaliana
  unsure at all n locations
  Clone ID: LIB25-017-Q1-E1-H10
gaggtaagcaagttcacgcctttctaatcgtaaacagcatttccggtgatagctataccgatgagaggatcttggggatgtatgcaatgtgtggtagcttttcagattgtggtaaaatgttttacagactagatttaaggcgtagtagcatcaggccatggaattcgattatcagcagttttgttcgaaatggtttgttgantcaagctttggcattttacttcaagatgctctgttttggagttagtcctgangtanctacgtttccttgtctcgttaaagcttgtgttgctttgaacaattttaaagggattgactttctttctgatacggtttcttctcttgggatggattgtnatgagtttgtggcgagttctttgatnaaagcttancttgantatggaaagatcnatgtgcngantacattgtttgngananttctcacanana

SEQ ID NO: 16522 - DNA, 511 bp, Arabidopsis thaliana
  unsure at all n locations
  Clone ID: LIB25-017-Q1-E1-H12
ggnnnnnnntggttgaantggtncgccggccngaaggtccggaacnnccnngcgtccgggtagnncgagcnactgcgacgagcttcacaacgcttcgagctcgtacgtcagcgattatcccgtcttctacacgtaatctgagatctaaaccgagattttcttcatcttcatctctcagagcttctctttcgaatggctttctttcgccgtataccggaggaagcatctctagtgacttatgcggcgctaagcttcgtgcggaatcgcttaatccgttaaatttttccagttccaagcctaaacgcggagttgtcactatggntatacctttctcaaagggaagtgcacacgaacaacctcctcctgatttggcatcatatttgttcaanaaccgaattgtatatttgggaatgtctctcgtancttcagttactgagttgatacttgcggagtttctttaccttcagtatgaagacgangaanagcctaatnacctttacataaactcgac

SEQ ID NO: 16523 - DNA, 398 bp, Arabidopsis thaliana
  unsure at all n locations
  Clone ID: LIB25-017-Q1-E1-H3
ntnnnnncataagagcgtccaactgatgttccagacgctgggtttgctctgtgaccttctttggtctgatcctagtaaagatgtcaaaggctgggggatgaatgatcgtggtgtctcctacacttttggtgctgacaaagttgctgagtttttaataaagaatgatatggatttaagtctgtcgtgcccaccaagttgtanaggatgggtatgagttctttgctgaatagacaagcttgtgactatgttttctgctccaaaactactgtgggtgaaatttgacaaatgccnggtgcattgatgagtgtcnacgaaaaagtttaaatgttgctccttccaaaatctaaancctgtngatntgangtccccggtctttngaagaagaaaaaatncctcct

SEQ ID NO: 16524 - DNA, 474 bp, Arabidopsis thaliana
  unsure at all n locations
  Clone ID: LIB25-017-Q1-E1-H5
gcncgggtcnacccacgcntccgctgggagtcagcanttnntgttntcnactgntgtccnccatcnggacantanncatnttgccannnnnnntgagctcaaggcttatatcatacaagttgctggttgtctagcaaagctgatcaggaccagctcgtatcttagggacataagttttgttaatgacttgtgtcgccacctgaggaaaagctttcaggcgacagctagatcaattggagatgaggaactcaacttgaacgtgatgattcaaaactctattgaagattgtctgcgggagatagccaaaggaattgttaatacacagcccctgttcgatatgatggctgtttcagtcgagggtcttccttcttcaggaattgtttcacgcgcagccgttggatcactggttgatacttgcacatgcaatgtcttcagcattaacgccatcctatncgttcacaacaaggtcttccc

SEQ ID NO: 16525 - DNA, 451 bp, Arabidopsis thaliana
  unsure at all n locations
  Clone ID: LIB25-017-Q1-E1-H7
nncntnnncngncgcgtgnggggntgttttctttcagactannntangnccnngtcagctcnnnncaagcgtggttagcctgtggggaaaattgcgaaccagaagtagcaggtgaggtcggtcagaaacagatggttctcgctacctccacgaagtagcaggggcttacttttcctgacgatgaaacccaaatcctattgttgttaatatcaaattgaataatcaaaccaagatggtgaatttgttcttatctgaaccaaagtggaacgatgatgcccagaaaagtagtaacatcaatgttattttgcctctgttaaacaaattaggctctcaaattcaatcattggtgactcatggagctcgatcaagaagctaggctttgggctttgtaagtgctctttccactatttctatatcctcctancaagcaacttaatatcctcaatgaagt

SEQ ID NO: 16526 - DNA, 446 bp, Arabidopsis thaliana
  unsure at all n locations
  Clone ID: LIB25-018-Q1-E1-A1
cttcgactccatatctgaggtttctgacgtctgattagaaaatgtctcgagctgagtcatcttgggagaggctggtgaatgctgctttacggagagatagaacaggaggagttgctggtggtaatcaaagcagtattgttggttatgtcccttcctcactatccaacaatagggacatcgatgcaattcttagagctgccgatgagattcaggatgaggatcccaacattgcaagaatcttatgtgaagcatggttactcacttgcacaaaatctcgatcctaatagtgaaggcagaggtgttttacagttcaaaactggattgatgtctgttattaagcaaaaattacaaaaagagaggttgggaccatagacagaagtcagggatattcntcgactacaagaattttacanggctatacnnagnaaagaacaatgtttncnctg

SEQ ID NO: 16527 - DNA, 525 bp, Arabidopsis thaliana
  unsure at all n locations
  Clone ID: LIB25-018-Q1-E1-A10
nnngnnnnnnaactggttttctggccgccccgngtccggaaaaaccgggtcgacccacgcgtccgtcttcactcgacttgtatctatcatccatggcttccgagaatcctttccgaagcatattgaaggcgttagagaagcctgatggtggtgaattcggtaactactacagcttacctgcnttgaacgatcccaggatcgataaactaccttattccattaggatacttcttgaatcggccatacgtaactgtgatgagttccaagttaagagcaaagatgttgagaagattcttgattgggagaatacttctcccaagcaggttgagattccgttcaagcctgctcgggttctcttcaaggactttactggtgttcctgctgttgttgatcttgcttgcatganaanatgncatgaataaancncgggtggngaattccnaataaaaattaaaccccctngggccccnggttaattnttgggcaaatggattaacnccngttcaagggggggttgttgncaag

SEQ ID NO: 16528 - DNA, 424 bp, Arabidopsis thaliana
  Clone ID: LIB25-018-Q1-E1-A12
ttctccacttcttcttcttcgtttcgcttcttcaacgtctctccttgttcgacagttctaaattcaccatgaggaagacggtgaagcgagaatcggaagccaccggcgggaaaagagaagccgacgacgagccggagaagttgaggtctgtgaagaaagagaaacagagaaaaaccgaagctgactccgtacgacccgacgagcctcctccgcctcaggaggaagaacaaggaatatctgatcggagaattctcagatccaagtatctctctcttcaaaacgaaatcaacgattgtaaagatgatttgatgaagattgattctgacaaattctccagaattattaatgcagttgaaaacttgcaccaacaagttcggaagcctaaggaacaaattgcagaccagaaggacttctggatataaca

SEQ ID NO: 16529 - DNA, 501 bp, Arabidopsis thaliana
  unsure at all n locations
  Clone ID: LIB25-018-Q1-E1-A3
gnnnnnngaacggttagctnnccgtgntcgcagaagtccanaggtcgacccacncgtccgcttcatttccgtcttttccgctaggtttccgtctctgttttttcttgcattttccccagaattccttcacattctctccttttcctctttttaattcctcaccacctcaaattcttcatnaacaaatccacttctgcatggttgggagaatctgttagagaatttttgttgttgttgggttcagatttggaaaatttcctttttttcgagtttcttctgaattattcatcgtggagattctcggatcgggaagggctgcgagaggtggttttcacggcggggatagattcatcttctgtcttctcctgagggggtagccgaggctccggcctcggcggtttttaaacccctacctttacaaattctgggaaattagaaaaaaaaaggtttgatttttcagttttgctctgttcttctctcgaaagtttttggtttgtccna

SEQ ID NO: 16530 - DNA, 437 bp, Arabidopsis thaliana
  Clone ID: LIB25-018-Q1-E1-A5
tatcacaatcataaccacaaaaacaaacactatgggacacctcaaaagtctcttcacaattcttttcctaatagctatgtcttcaaccgtaacatttgccggtaaaatacccgcgatcatcgtgtttggcgactcttccgttgatgccgggaacaacaactatatcccaactgttgctagaagcaactttgagccatatggacgggactttgttggtggaaagccgaccggacggttttgtaacggaaagattgcgacggattttatgtccgaagccttagggcttaaaccaatcattccggcgtacttggatccttcttataacatttcggattttgcaacaggtgttacctttgcttctgctgccactggctatgacaacgccacttctgatgttctgtcggtactacctctatggaaacaactcgaatactaca

SEQ ID NO: 16531 - DNA, 74 bp, Arabidopsis thaliana
  unsure at all n locations
  Clone ID: LIB25-018-Q1-E1-A6
ttatgatcgtcactctgttcttcatntctctgctgctaatggtcagatagagattttgtcantgcttttggaac

SEQ ID NO: 16532 - DNA, 425 bp, Arabidopsis thaliana
  unsure at all n locations
  Clone ID: LIB25-018-Q1-E1-A7
cagacatttgaggacgcagatgtggatcgggatggaaagattgataagacagaatggagcaatttcgttatcaaaaacccatctttgcttaaaatcatgactcttccgtatctcagggatataacgacgacatttccgagtttcgtatttaactcggaggtggacgagattgcgacgtgaaagagacaagacaagctggtttatagagaccaagtcgtaggctggaccaagaataaaaagaagattgattccaacaatgttatatagcaggatcgaagctctatttcctttggaatttttagtctattggatttcaatttcatgtattgcgattacttttggctctctttctttaacagttttgaatactcaagtttgtagttctacgaaaagattaatataaaaccacaattttctgantaaaa

SEQ ID NO: 16533 - DNA, 448 bp, Arabidopsis thaliana
  unsure at all n locations
  Clone ID: LIB25-018-Q1-E1-A9
aaactctctcggggggtcgcttcttctgcattttctgcttcccaatggcttccagaattgctgattctctcttcgccttcacgggcccacagcaatgtcttcctagggttcctaagcttgctgcttcttctgctcgtgtttctcctggtgtatatgctgtgaagccgattgatcttctgttaaaaggacgaactcatcgaagtagaagatgtgtagctcctgtgaaaaggagaattggatgtatcaaagcggtggctgctccagttgcaccgccttcagctgacagtgcagaagacaaggaacagttagcagaaactatggattcaagacaaattggagaaaatcttcctgaagaaatgtcancntaaaagatatcatnggatacactttccaaaagaaggtgttttgagaattgatgatctgaaaacctttgaaatcngtggttgaa

SEQ ID NO: 16534 - DNA, 504 bp, Arabidopsis thaliana
  unsure at all n locations
  Clone ID: LIB25-018-Q1-E1-B1
ggngnngaactgttanntccccgtgntcgccgaaatcaaaaggtccacccacccgtccgctaaatcagctgagcatcaccgggaaatcgccggtcctttagccggaccgagcagtggtattaaagccggagtatttagtctctttaccgttcttggtatcccattggccattacttacagtattccatttgcactagcgtccattttctcaaccaattccggtgccggccaaggactttcattaggcgttttaaatatagcgatttgtataccacaaatgatagtatcattctcaagtggaccattggacgctcaattcggcggtggaaacctaccttcatttgtggtcggagcaattgccgcggcggttagtggagtcttagcgttaaccgttttaccttcaccgcctccggacgcaccaagccatgtcaggggctatgggattccattagttaactagtttttacatatatatgaatttccatcctaatacagtattgttgt

SEQ ID NO: 16535 - DNA, 398 bp, Arabidopsis thaliana
  unsure at all n locations
  Clone ID: LIB25-017-Q1-E1-G4
nnnnnnnnnnnnnntccatctccccggggattcggattcccaagaatcatgcccatggngaacgacaatggcccacacgttggcaacgtcgtcgtcaccgctgagcaagcgaccaagattaacgagactgatggacggttgccggagaatcggcagaccggtgttgtctctgacaccggaagtggtagcgagagaggagagcaaggggttggagagtcggcagttgctgtggcggtgccggtggaggagagcggatcgatttcggtgggagagctacctgctccccgatcttcctctgctagagttccgtttactaatctaagccaaattgatgcgggatcttgctcttgctcgcacactccaagaacaggagcgggcgtatatgatgttgaccatga

SEQ ID NO: 16536 - DNA, 446 bp, Arabidopsis thaliana
  unsure at all n locations
  Clone ID: LIB25-017-Q1-E1-E12
ttttcgattttaccttacgcagaaaggttcgttgaaaccctagattcgttctcagttttcgtgttggctaatggcgagcgcggcacggggagagagcagcaatccatacggcggcggattgggaaccggaggaaagttccggaagccgacggctcgtaggtctcagaaaactccttatgatcgaccaacgacttctgtgaggaacgctggacttggtggcggagatgtcagaggcggcggctggttgtcaaaattggtggatccggcgcagagacttattacttatagtgctcagaggctcttcgggtccttatcccggaaacgcctcggctctggtgagacgcctttacaatcgccggaacagcagaagcagcttccagaaagangtgtgaatcaggagacgaaggttggacacaaggaggactctctaanttgtccatgaaana

SEQ ID NO: 16537 - DNA, 404 bp, Arabidopsis thaliana
  unsure at all n locations
  Clone ID: LIB25-017-Q1-E1-E2
nnnnnnnngngnttacttcttcttcgtgtgcgaagtagctttttcctgcgattctcatcgagttttggttaagtgctttgttatcaaggtgaaaatcgatttgaagatggcgagcgaaagtcctgatgttgctgttgtagctccggtggtggagaatggcggcgctgagtcctctaatggtaaagaggaacaattggaatctgagctttcgaagaagcttgagattgcagaagatggtcaagaggagaacgatggagaagaaggaagcaaagctgaagacttcaacgaaagaagaagaagaagaaaaaataaaaagcaaagaagaaagaagggaactccctcaacangactgattcaaccttcaattccctgtcgnttgaagctcctcccatcaaggagaantt

SEQ ID NO: 16538 - DNA, 451 bp, Arabidopsis thaliana
  unsure at all n locations
  Clone ID: LIB25-017-Q1-E1-E3
atanntgntggaantnnngnnnattttcntcacagaagtcntcanagtgacactggntgnggataccaacagagcatttgacgaggataaacgttgtcgagcatgnacgtttcctatctgtgatgatcttatttacagttgcatgcaatgtgattttatcctccatcaaacatgtgcacatcttcctccgaggaaacaacatgcgacacatcctcatccccttcttctactggtggatgaggaacatgaagattattttcaatgcactgcttgtaagcgtgaaagcaatggttttgcgtacacatgttgtgctacggattgcaacttcacattagaccgtatcttgcgccttccaatagcctgagtcattgnttcatccggtttcatccgcaatcccaagttaattaaanaacatgaaatccacnagcgcaaaggagntcctgttccaant

SEQ ID NO: 16539 - DNA, 504 bp, Arabidopsis thaliana
  unsure at all n locations
  Clone ID: LIB25-017-Q1-E1-E7
tnnnnggttcnnnnggccnnaaangtcngnaaatccngggtcnacccacgcntccggcanttantggtcaaaccctcttctatgatctttangggaangtgtgaggcaantttctganacanggctgaagtctgcaaattcttccttcgcatagtcctagagaaacctctttgttcctctctttcatatcttgttcttatgggtgctggttgaagaaagatacatcaatttcttttctttttcagtttacaaatgtcgtttccttgagtctgaacccctgagtgagatgttgtgagcatagggtccttcctattagccaaaacagtctttcttgttggttccttcgcgtctttgagttctcagtatgtgttttcctcttctcttgctctctttcttttgcctaaatggtcaaccccgtttatgttcgaagtaaataacggtcagtctacccaagcctggagaatcattgattttactgccttggtgtcaagtactcctacnaac

SEQ ID NO: 16540 - DNA, 138 bp, Arabidopsis thaliana
  unsure at all n locations
  Clone ID: LIB25-017-Q1-E1-E9
antcctttgcttcacctgttcctctcgccanatctcgggcgtcttctctgggcaatccggtcccgtcctctggtcgccgcnttttcctccgttttccgtggnggccttgtgtctgtcaaangtctctcgaccaagcna

SEQ ID NO: 16541 - DNA, 505 bp, Arabidopsis thaliana
  unsure at all n locations
  Clone ID: LIB25-017-Q1-E1-F1
naccggtccggnantccggancgacccacncgtccggaaaacttcctcacgccatggaatcactgactggangggctttnaaanactccatacanattntncccanttttccanatatggagaaggcttattctaagctcaagactcttagttatgaggtggttgttgatgttgtacctgaactaaaatggaatcctgaggatgggtataaaaatatgaaggtcgttgtanaactaggcgatgagatagatgcaaaaaaagcttgtgaaagacaactaagacagaaatacaagtctcttggtgcgttgaagattgtaaccgagcgagggctacaggtgggagatctaacanttgttgatatttctgctacaactatagatgaggacgggtcaaccgggtcaagccgattccagattcctgaanagcaaaagttttcactttngacactggaanaangggaatanattacttccctggattcccttgatgccaannnatagggant

SEQ ID NO: 16542 - DNA, 453 bp, Arabidopsis thaliana
  unsure at all n locations
  Clone ID: LIB25-017-Q1-E1-F10
tattcaatanggccactctcctgcaaataggttcaggtgtgatttatagtaatgcccttanggaagaagcctccgacgtcctcagtcntctanatgcatcatagtgaccgaaaccacaccatgtnggnaagtctcccacagttcagcgtcgttctgcgaactatcagccttctcgttgggaccatcaccatctcctctcggtcgaaaataaatttgcgaaagataaaagggtacgagagagagatttgttgaaggaaaaagtgagaaagatgctcaatgatgagcaaaagacttatcttgaccaattggagttcattgacgatctacaaaaactcggggtttcttancattttgaancggaaatcgacaacattttaacatcttcttataaaanagatagaacaaacatccaggangagtgacctacatgccanngcactcgaatttcgactt

SEQ ID NO: 16543 - DNA, 120 bp, Arabidopsis thaliana
  unsure at all n locations
  Clone ID: LIB25-017-Q1-E1-F12
cccagctngacctttatcaggttccaaaagngtggattaagtggggnaaacccctgtttcanaaggcttatgaccttcacctaataaattatctacaaactaatatccactttnagcgca

SEQ ID NO: 16544 - DNA, 483 bp, Arabidopsis thaliana
  unsure at all n locations
  Clone ID: LIB25-017-Q1-E1-F3
ctannngnccngaatcnggnacgnccaccgtccggnaagattgggatcacannnagaancanagcantcanatacttgaaagtctctttantgacttangtgtcannnntttcnctctcttaactctctcaaatcttttagagagaaaaaactttgaatcttgttcatatcttttgctaatccgattaacatcggatctctttagatttcgttttatgttttagctttctgactatttttcagatctatctcaaacttcttgtcggtttttcttctatactttgtttcgatttgtagtttttttgtaaagccttttgcctgttcttcaaatcaacacttctatgttgttgaagtgttaaatcattgtggtttgatgggtctttgttagctgtgtacttgattcttcgtccaattgttggtaaatcctcgcttgcccatatgggattaaattaagcgattgtcacttggtcgtttgattcaaat

SEQ ID NO: 16545 - DNA, 394 bp, Arabidopsis thaliana
  unsure at all n locations
  Clone ID: LIB25-017-Q1-E1-F4
nnnngnnnnnnngtngaggaggataagaacaattgttagccctgttagtggcactacccgtgangctatagatgcagaatttaccggaccaagatggggagaagtttcggcttatagatacagctgggatcaggaaaaagtcatctgtggcttcatcaggcagcactacagaggccatgtcagtgaatcgtgcatttcgagcaattcgtcgttctgatgttgttgcccttgtcattgaagctatggcatgcataacagagcaggatctgaagattgcagaaagaatagaaagagaagggaaaggatgtctgggttgttgtaaacaaatgggatacaataccgaacaaaaaccaagagactgcagcacattacgangacgatgttcgggagaaac

SEQ ID NO: 16546 - DNA, 506 bp, Arabidopsis thaliana
  unsure at all n locations
  Clone ID: LIB25-017-Q1-E1-F7
tngttcnctngccntaaangtcngnaantcccggntcnacccacncatccgcnatctctctctgatcacaacaatcataancnatnnnagganctanacncnatgaattcanttttantangaatccatcaacgccaaacactggtcagccgacaccgacgtaccccgccggtgttggcggcggcggcggtggaaggaaaaaaggcgttggcgtgaggacgtggttggtacttaactcgtcagggcaatcggagccgaaggaagaagggaaacactccatcatgcggcgaacgggattaccggcgcgtgatcttaggattctcgatccactgttgtcgtatccatctactgttttaggtagagagagagcgattgtcatcaatttggagcatatcaaggcaatcatcactgctcaagaagttttgttgcttaattccaaaggatccttcggtctcacctttaattgatgaagttgcaaaaggcgggattcccctgtcaccatcaac

SEQ ID NO: 16547 - DNA, 403 bp, Arabidopsis thaliana
  unsure at all n locations
  Clone ID: LIB25-017-Q1-E1-F8
nnncnnnnnnnggagaccattcttggaagaaaagatgcttgaggtattaccaacgaggagttgagggtgatcaggagaganaccttctggctggatgttgggcaccttatctcgagcgtgcggttacattgaaaccgtgttacgatggaggcattgatggtggcnaggtggcanctaaaatactgcaggacacagccatggggaagaagcgttccaaactcaatcttaagcggagcgaggagattgcgggatgcaataatattaggcttccagctacagagagctcctgngaagagatctttcagttccaagaatggtatcaagtcgctggaaacgaagctgggattccttcggttgatcagactcataaaccctccaagtttgtaggaatgctttgaaaatt

SEQ ID NO: 16548 - DNA, 404 bp, Arabidopsis thaliana
  unsure at all n locations
  Clone ID: LIB25-017-Q1-E1-G1
nangannanngnnnncnctnnnntcacgaccacggccgctctgaagaagaagactctctccgtctcctcccttctcctcctccgtctaagagacaaggcatccccagacgccatgatctctctcactccctcgttgtttctgaacaagacggttgttcctggatgttccacacgcctctctctgcgccagcctagaactataattactcctcctgcttccttgagagtcttttcctctctcggatctaaccaaggatnccaccggcagcgttttgattgagaacactgccacttcatcctcctctctcgagaactccgccgccgacattgttcccaaatccaacgtatctggtggagttcangatgtctacggcgaaggatgccgccaacgaaggacatgctat

SEQ ID NO: 16549 - DNA, 447 bp, Arabidopsis thaliana
  unsure at all n locations
  Clone ID: LIB25-017-Q1-E1-G11
cancggccgtactatgagagattcaccgtgaantcgaatattaagtgagagaagctccgattgatttcactttctgccgccaatttttgttttttcttcggtgagacnangaanatnccatgggtcgacctcccagtnntggcggtccggcgtttcgatttatcctgcctgaggtaacggagatggangcacttttgctacagcataatacatcaatgccaggtcgacatattcttgaagctcttgctgataagtttagtgaatcacctgagcggaaggggaaagttgttgtgcagttcaagcaaatctggaactggtttcncnataggcgatatgctttacgagcatngggaaacaaagctcctgggaagctaaatgtntcgtccatgccgcgtatggatttaccanatcagatgacaantgtcattcaaccnttancngttccta

SEQ ID NO: 16550 - DNA, 511 bp, Arabidopsis thaliana
  unsure at all n locations
  Clone ID: LIB25-017-Q1-E1-G12
nngggnnngaatggttgnatggcncgcctggcctnaatccgggaacnccnacgcgtccgcacngantcagcanctctttgaactactcttcgacantggccgaacgtggtggagaacgtggtgttgagcgtggtggagaacgtggtgatttcggacgaggattcngaggccgtggaggtcgtggagatcgtggagggcgtggacgtggaggccgtggtggtcgtcgtggagggcgtgccagtgaagaagagaaatgggttccagtgaccaagcttggtcgtctcgtggcggctggtcatatcaagcanatagagcagatctatcttcattcactcccggttaaggagtaccagatcattgatatgctcatcggtccaacattgaaggatgaggtaatgaaaatcatgccggttcanaaacagaccagggctggtcaaangactagattcaaggcctttgttgtccttggagatggtaatggtcatgttgggttgggaatgaaatgcnctna

SEQ ID NO: 16551 - DNA, 89 bp, Arabidopsis thaliana
  unsure at all n locations
  Clone ID: LIB25-017-Q1-E1-G2
ttanggaattgacatctcntgtccatgaagganattcaagtttccagttgacagtgttgagctctatgctgacaaggttaacancagat

SEQ ID NO: 16552 - DNA, 472 bp, Arabidopsis thaliana
  unsure at all n locations
  Clone ID: LIB25-017-Q1-E1-E11
cgnncggtaaaacccacgcttccccngnanatggntttggtacatnncaatttcagcaccattgttgcagctgtncgtgaaggcatgtccatctataacancatgaaggccttcatcangtacatgatctcntccaacatcggcgaggttgcatcnatatttttgacanctgctcttggtatcccaanangcatgatcccggttcagcttctgtgggtaaatctcgtaacagacggtcctccagctactgctttggggttcaacccccctgacananatattatgaaaaagcctcctcgtaagagcgatgactcgcttntcactgcctggatcctcttccgctatatggtgattggtctgtacgtgggagtagcaacggtgggagtattcatcatatggtacacacacagtatcttcatgggcataggcttgagccaagacggtcacaaccttgtganctantcanagctcg

SEQ ID NO: 16553 - DNA, 122 bp, Arabidopsis thaliana
  unsure at all n locations
  Clone ID: LIB25-017-Q1-E1-C11
tgaagctgggntaagcatgcgcttcatggtcatgcgncgtatctgagattgcnggcanatggtcacaatctgcaaagggttgtatcttctacgntgtggaatcgggtttnagtttgggtnca

SEQ ID NO: 16554 - DNA, 259 bp, Arabidopsis thaliana
  unsure at all n locations
  Clone ID: LIB25-017-Q1-E1-C2
tgannancgnggccttnngattggttacctgttggttttaatgttttggtcaggagtaatattttgatagtgagaagactaaaattaatcatttagttatatgtttttttggttgttaaaaaaaaaaaaaaaaaaaaaaaaaaaaaaaaaaaaaaaaaaaaaaaaaaaaaaaaaaaaaaaaaaaaaaaaaaaaaaaaaaaaaaagggcggccncccaaaaggatccaancttacntacccntgnatgcaacntcaaanc

SEQ ID NO: 16555 - DNA, 450 bp, Arabidopsis thaliana
  unsure at all n locations
  Clone ID: LIB25-017-Q1-E1-C5
caaggaacctgcaccccctanagtcgttcagcatcatgatttctcttcacagccaaatcacttncgcaccaaaatactcaagcagtatccgaggttcataaaccactgcntcaagatattccacctgctaattttgagaagcatcagaaatctgagactgccagcgtggagactagaagtgatggtcagaagatttctagtcattcaaatgcattccatgaagatcaaaatacagtgagctcagagtgtgactggagtgaacacacttgtcccaatgggaataaatattacttccattgcatcacttgcgaaagcacgtgggagaaaccggacgaatactccatgtatgaaagatggttggaaagagcaaaacaaggntacangatganaaaattaaatcccccccgtttaaacaatgagagccaagaagcaatcnaaaaacagcgaggc

SEQ ID NO: 16556 - DNA, 420 bp, Arabidopsis thaliana
  unsure at all n locations
  Clone ID: LIB25-017-Q1-E1-C6
gnnncncgttanncnngtanntncncanntgannnnaanagaaataatgtctgaaaaggtgggagcgatgggtggtaacaagggtggagcattcgacgatggtgtttttgatggtgtgaagaaagtaattgttggaaaagacttcaacaatgtaacttatatcaaggttgaatacgaaaaggacggaaaattcgaaattcgtgaacacgggactaatcgcgggcagctaaaagagttttcaagtggattatccgaatgaatatatcacagccgttggtggaagctacgacactgttttcggttacgggatcagcgttgatcaagtcattactcttcaaaacctcttatgggaagaaactctccaatccttggtcacacgacattactaagggaatccagcctgggaaaagaatcatgctc

SEQ ID NO: 16557 - DNA, 452 bp, Arabidopsis thaliana
  unsure at all n locations
  Clone ID: LIB25-017-Q1-E1-C7
nactgagcgcataacatttttgagacaagagactctctctctctctcttctctctttctctcccccnctctccggcgatggttgttgctatggaccaacgcaccaatgtgaacggagatcccggcgccggagaccggaagaaagaagaaaggtttgatccgagtgcacaaccaccgttcaagatcggagatataagggcggcgattcctaagcactgttgggttaagagtcctttgagatcaatgagttacgtcgtcagagacattatcgccgtcgcggctttggccatcgctgccgtgtatgttgatagctggttcctttggcctctttattgggccgcccaaaggaacacttttctgggccatctttgttctcggccacgactgtggacatgggaagtttctcagacattcctctactgaatantgtggttggncacaatccctcaatcc

SEQ ID NO: 16558 - DNA, 403 bp, Arabidopsis thaliana
  unsure at all n locations
  Clone ID: LIB25-017-Q1-E1-C8
gnnncnncncnngnnncntgatctccagcctaaggaaggtctcgcgctagtcaatggcacggcggttggatctggaatggcgtcaatggtgttattcgaaacgaatgttctctctgttttggctgagattttgtcggcggttttcgcagaggtgatgagtggtaagcctgagttcaccgatcatctcactcacagacttaaacatcatcccggtcaaatcgaagcggcggcgataatggagcatatcctcgacggaagctcgtacatgaaattagctcagaagcttcacgaagatggatccgttacagaaacctaaacaaagatcgttacgcctcttcgtacttctcctcaatgggttaaggtcctcaaaatcgaaantgattccgttacgccaacgaaaatc

SEQ ID NO: 16559 - DNA, 52 bp, Arabidopsis thaliana
  unsure at all n locations
  Clone ID: LIB25-017-Q1-E1-C9
gtagctcggtgatcggtcctncagaaagtcttgggttttaagccaacgaaaa

SEQ ID NO: 16560 - DNA, 468 bp, Arabidopsis thaliana
  unsure at all n locations
  Clone ID: LIB25-017-Q1-E1-D1
caaatttcaagtttatttcattcaatttcgatccgantaaccatggantgtanatcattggntnngacgattatatctgcggaggatctcaaagacgttcaattgatcggtaaacaagacttgtacgccgtcgtttccatcaacggcgacgctaggacgaagcagaagacaaaggttgataaagattgcggcaccaaacctaaatggaagcatcaaatgaagctcaccgtcgatgacgcagcggcgcgtgacaatcgtcttactcttgttttcgaagatcgtggcggatcgtcccatcgctggtgataaacctgtccgtgaaggttaacgttcccggtgaaaggagcctttgggttaagaatnaaaggtgacnaaggagaaaaacnggttaccttacgccnttnaagggtnccctaaacgggnaaaggcgaaaagggttttccnccaaaattccccngttcaaaattt

SEQ ID NO: 16561 - DNA, 93 bp, Arabidopsis thaliana
  unsure at all n locations
  Clone ID: LIB25-017-Q1-E1-D11
tttgttcanttctgattcgattgancgtgcttggaagattctgggggaaattcccggggaaagcgactggtgcttntaggncacagccaaggt

SEQ ID NO: 16562 - DNA, 451 bp, Arabidopsis thaliana
  unsure at all n locations
  Clone ID: LIB25-017-Q1-E1-D12
tgaaaccttatgttctctgcgaaacattctcttatttcattttctttctctaaagtttttatttctctgacaaggaagatatccctttaggtggattcttgtttaaatttaaaaatcctcangaagaagaagaagaagaagaagatagtcaaatgaaaatacattcttctgatcattcatggcttttactagccgttctcgtgattctcctctccttctctggagctctctcaagcgatgacaaagagaagaagacgaaatcggtcgataaaaagaaagaagtaacttatgatggaacgtctttgatcatcaatggaaatagagaactcctttactctggctccatacattaccctcgtagcactcctgaaatgtggccaaacatcatcaagagagcgaaacaaggcggtttgaacacgattcagacatacgttttttgggaacgttcatg

SEQ ID NO: 16563 - DNA, 400 bp, Arabidopsis thaliana
  unsure at all n locations
  Clone ID: LIB25-017-Q1-E1-D2
cnncnnnnnnnnnnnnngaaagccgcgggcgccgaaaccgccgcgggaagattgtgacgacggtactgataagagcaataccggaaacagtttcttcgatatatatggacccgaagcgaaagcagaactcgatttcaaaagccctgaaacaacattgaacttacaagatgttcaaggacttgtgacatgggttcttgcagaaggttttatgccttcatgggtatttattaagaacaagcctctcattccaaaggttgtactgctctaccttcctggattggatgcagctttatacttatcacattctaaaaactctgtcnagtttgaaatcatgtttgtggnaatcctaagggngctttaacctttgagctgtgtatttgatgagatgaggacaatcnat

SEQ ID NO: 16564 - DNA, 511 bp, Arabidopsis thaliana
  unsure at all n locations
  Clone ID: LIB25-017-Q1-E1-D3
tcnnngaacncccacgcgtccncgnaangcntggnacaacaaatcttaaacnttttactttgtnctgcactactcaacctcaatggccgcctcaacantgtgnctctcctcccctgccttcgccggtaaggccgtcaagctttcccccgcggcatctgaagtccttggaagcggccgtgtgacaatgaggaagactgttgccaagccaaagggcccatcaggcagcccatggtacggatctgaccgtgtcaagtacttgggtccattctctggcgaatcaccgagctaccttaccggagagttccccggagaactacggatggggacaacgccgggactttcaagctgaaccccgaagacatttcccaagggaaccgtgaactaanaaatttatccaacaagcaaggtnggggncaatgctccgggaacccctaaaggcttgcgntcntcccctggaagccntttttgggctaanaaaaaccngngntccaagttnccggaaaaagnccgg

SEQ ID NO: 16565 - DNA, 405 bp, Arabidopsis thaliana
  unsure at all n locations
  Clone ID: LIB25-017-Q1-E1-D4
nnanggnnnnnnnnnntgatgatgttccgtgggagtttcactgggagtaaacgatgataagtctggncctttctcttccgatgattcttttggttcttctggagttgcaggatctggtttacctggtggagaggggaaatggccggaggagcctaagagatggaatataaagcgaggaagaggaaaaagttgtgtttgatactgggtggtgaagtaggtcaagggattgagactaagtcgcgagaggaggggtaatgaatgggaaggagactaagagatgggatattaanganggaaaaaggagaaagttgtgtttggtggccgangaaatgaagtggatggggttttggaatcaaggggaaangtgaaatctaatgaatgggatgttgtcaaaancatgggaat

SEQ ID NO: 16566 - DNA, 450 bp, Arabidopsis thaliana
  unsure at all n locations
  Clone ID: LIB25-017-Q1-E1-D5
cttgcangaggttgaggcanttgacgaanaacgagagtgtgangaagatggtatgtcanaatgcgtggggaaaagagataactggaacactggagattatgactaagaagctaagatggggtcggttagctagagagctcaccactcttgaagctgtgtgttggcgtaaatttactgttggagggattgtacaaccttcccgctgcaatttcagcgcgtgtgctgttgggaaccggcttgtgctatttggtggggaaggggttaacatgcagccattgggatgatacttttgttctcaatcttgatgcagagtgtcctgagtggcagcgtgtgagggtgacgtcgtcgcctcaaggacgttggggacacacactctcgtgtctcaacgggtccttggttggtagtcctttggaagggtgtgaaanacaagggattgcttaatgatttatt

SEQ ID NO: 16567 - DNA, 395 bp, Arabidopsis thaliana
  unsure at all n locations
  Clone ID: LIB25-017-Q1-E1-D8
nnnnngnnnnncnatgggtgcggagctctccacggcatttcgggtggagaacgatatcgganggtgatggtgtctctatctttggaggaagtcatgtttgggttgaccattgttcgttctctaactgtgaagatggacttattgatgctatcatgggctcgacggctatcactttgtctaacaatcatatgacacatcatgataaggtcatgttgcttggtcatagtgatacttacagtcgtgacaagaatatgcaagttaccattgcttttaaccattttgggtgaaggccttgtccaaagaatgcccaaggtgttagacatgggatactccatgtggtgaacaatgactacacacatttgggaagatgttatgccnattggtggaaattccna

SEQ ID NO: 16568 - DNA, 326 bp, Arabidopsis thaliana
  unsure at all n locations
  Clone ID: LIB25-017-Q1-E1-D9
ggggtatttaaaanatgggacatttctcatcgatgttcantggnttanctcgatcattttctataaagaaagtgaagaacaacantggaaactgcgacgcanangaagctgctgatnanatggcaagcgaggctaanaaaatngaattgattctgaaatcctctggttatgttaatgtacaacggatctaataatttagcctctcttttcaccantcgcggcgataaaggcgttaatcaaggattgtgcactccgttgggaaggatttgggtgccaatgaanacatatcttctgcnggaaaatcgatgggacaccggtccatgggg

SEQ ID NO: 16569 - DNA, 459 bp, Arabidopsis thaliana
  unsure at all n locations
  Clone ID: LIB25-017-Q1-E1-C1
aaangtggtgaacttgtatttggangtgttgatccaaatcatttcaanggcaaacatacatatgttcctgtgaccaaaagggctactggcagtttgacatgggtgatgttcttattggcggtgcacccactgggttctgtgaaagtggctgttctgcgatagcagattctggtacatctttgcttgccggtccaacgactataatcaccatgataaaccatgctattggagcagctggagttgttagccagcagtgcaagactgttgtggatcaatacgggcagaccantttggattacttttgtccgaaaaccaaccgaagaaaatcctgctcncaaaattgggncngtgtacttttgatggtaacccgttggtgtcaattatgggcaatnaatccgttggtggacaaaggaaaacnccaaattgtccaaaggggnttggaaatccgccttttccgca

SEQ ID NO: 16570 - DNA, 494 bp, Arabidopsis thaliana
  unsure at all n locations
  Clone ID: LIB25-017-Q1-E1-E1
aanncncacncgtccncggaattgttttngnnnannagtctctcatctgaactcagannatctccnagttcntatatcttctccgtttgancaatggcgttggtcatgcacacatacaagggaaacaaaggtgccaataaggcacttattgctgcagagtatgcgggtgtgaagatcgaggagtccgcagactttcagatgggcgtcactaacaagtcacctgagttccttaagatgaaccctattggaaaggttcctgtgcttgagactcctgaaggtcccatatttgagagcaatgccattgcccgatatgtnaagccgtaagaatggtgacaactctttgaatgggttctcccttaatgaatacgcctcacattgagcaatggatngaatttctcctcaantgggagaattgatggctnacaatgtttgaagttgggtttgcctccaaagaaatggggctatgccccccttctcctggccccaanctgnag

SEQ ID NO: 16571 - DNA, 54 bp, Arabidopsis thaliana
  unsure at all n locations
  Clone ID: LIB25-016-Q1-E1-C5
cttaagttctcctggaatggccaatggatccatcctccctgggaaaancntttt

SEQ ID NO: 16572 - DNA, 700 bp, Arabidopsis thaliana
  unsure at all n locations
  Clone ID: LIB25-016-Q1-E1-C6
aaagaagagaaaaataaaaaagtttgtgtaaattttttttgcacactccacagcctaaacccaacccaaaatcacaaaaaccaaaaaaatatataataatgggtggctgtgcgagtagacccaaggaatcagacatgcaaaacgaagaaggctctgttcctaacaagcctgtctctgaaaacgtagtagccaaggagaacaacacagaaagcggtgagaaacagaaccagacagtggctgagaccactgaaacaacttctgtcgaagctaaggagacatttccggtcgagccgaccaaggaaacaactcctgctgttcaaccagaggttgcagccgtcgaagagtcttcttctgctgatgctggtgaggctgcantagttgcacctgagaaagtggagaacgctgcaacagaaaacgctgaagcaaaggtggaggcggttgccgtanctgcacccgaaaaggttgaggttgcantggaancgganaaaaagntgaanctgaacaattaaggntgaggctgaacaattaaantgagntgaccattaaggggngatnaccagaagagaagaactgtttcncgtttgtgataattaattgtaaattatttgangttgttgaggccctggttnttgcacacaatggttggttgtgtcttgaccaanatctcttntcataaanaacattncccaaaaaaaaaaaa

SEQ ID NO: 16573 - DNA, 444 bp, Arabidopsis thaliana
  Clone ID: LIB25-016-Q1-E1-D11
ggaaaaaatggcaacggtcacgattctctcacccaaatcgattccaaaggtcactgattccaaattcggagctagggtttctgatcagatcgtcaatgtcgtaaaatgcggcaaatccggccggagattgaagttagcgaagctggtctcagcggctggattgtcacagatcgaaccagacatcaacgaagacccgattggtcaattcgagactaatagcattgaaatggaagatttcaagtatggatattacgatggagctcatacttactatgaaggagaagttcaaaagggaacattttggggagcaattgctgatgacattgctgctgtggatcaaactaatgggtttcaaggtttgatctcttgtatgtttcttcctgctatagctcttgggatgtattttgatgctccgggtgaatacttgttcataagtgcaacgtt

SEQ ID NO: 16574 - DNA, 95 bp, Arabidopsis thaliana
  unsure at all n locations
  Clone ID: LIB25-016-Q1-E1-D2
aanatgaaggactccattaaaggctgtcaatgggccaaaggctaatgttcgnttatcaaancctaaattggggaagaagaagttacgaanaacaa

SEQ ID NO: 16575 - DNA, 916 bp, Arabidopsis thaliana
  unsure at all n locations
  Clone ID: LIB25-016-Q1-E1-D3
nnnnngnaatgtcnacgcctnacgtagccgtccanaattccaaggtccacccacncgtccgcaagagatcntagccaatagacttttgagctactcgaggcatttccatggcggcgacgatagctgtttttaccggtggtctgaaagtgaaggctggagttctcgccgttcaaatctcatcgcttcctctccgccgcgaattccctcgttacttgtcgtcttcctcgaggaggacagtagcggcaatctcctcgtctcttcgagtctccgccgtatataaccatcagcagcgtaatcgaagctcttggcctcgagttgctactttctgtacggcggctccagatgccggcacgacggtttcagcggatgaatcggagaagaagagcgaatctcagaaggaagaggagaatgtgaaggagacggcgaatctgttagatataaaagtaggacgaattgtgaaagcttggcaacacgaagaagctgattctctgtatgttgaagaaatcgacatcggtgaagctgaacccagaatcatctgcaattggtctccgtcaaatatgttcctccttgattncccttaanggtgcaacaattggtggtgcctgggtaaacctgaaacccnaaggaattatgaaaanggggttaaantcaaggttgggaangccttttaanccggaatcctgaacncaagctcaatgaaaaaatgtttnanccttccttgnttccaaccaaaaaaggggtccggnttccccnggaaaaaaaaaaatttttgggttttgggaaaaccaaaanaaaaantttcccaancaaanttttcccggnaaaccctggaaccctccccaaaanaaaggggttcaaaannnaaanaaaaaanttttgggaaaattgggggnaaaaccaactttttttaaaaaaa

SEQ ID NO: 16576 - DNA, 738 bp, Arabidopsis thaliana
  unsure at all n locations
  Clone ID: LIB25-016-Q1-E1-D7
gnatcattttctcaggctccaatgtcgctggacttagctcgttgatcatcgtacaaaaagcttgctcgtagctatcagctccccggagaagaagatggtgcggaaacagtttcaacaggctaaaactggaatagaggcattgaagtcaatggatgctaacaactacttgaagaaggttggattagggcgtgacgatatgttcttttggaaacaagtgggaaaagcattgctatgcacttacacaatctttggtatggcttggatttacaatgaaacgtctcctttaggttggtggacgctgaagccaagaccaaaggaagagagagaattggctcatttgtatgagcggcgtgagtttccttatcctggtgatacagaggctatggaggattttgttgcaaaggggggaatgattggtactgcaattggaccgaaaggaattgttgagtccgaaggtgaggctgataattaccagaaggaaatggagaagaagaatttgataaagaggtcaaaaactgtggntgaaaatgaggaatgaggttattactgaacttcaagagaaanggnataatcctgaataagggaattcaataagggttttganaaataaaaaancgtgtttaattangggggtacaattnancaagggttcacaaccgnaaaanntttcgtcanttaaactaaaatncaaacgggtnaantcttncctgggaananccttgccttaagggggtnana

SEQ ID NO: 16577 - DNA, 829 bp, Arabidopsis thaliana
  unsure at all n locations
  Clone ID: LIB25-016-Q1-E1-E1
gnnnnngnaactgtntacgcctncccgtagccgtccgaaaattccanggtccacccacncgtccgcncacgcgtccggaagatgagcctatccttgagaaggccctcgggacggagattgagtggtatcctggaaagtgtttgacacagaagattctaaaaaagaagccaaagaaaggatccaaaaacacanagccgatcactaagactgaggactgtgagagtttcttcaactttttcagtccacctcaagttcctgacgatgatgaggatcttgatgatgacatggctgatgaactccaaggacaaatggagcatgattatgatatcggttcaacaatcaaagagaaaatcatctcgcatgctgtgtcatggttcactggtgaagctgttgaggcagatgaccttgatattgaggacgacgatgatgagattgatgaagatgatgatgaagaggacgangaagatgatgangatgacgaggangangatgatgaaggatgatgacgangaggaagaagcagttaanggaaagaagagcaaaaagaatcatcaactgggcacaagaaaggctgggaagaatcaaccttccggaaggtcaancagttaaaaggccacccggaattttaancanaattgaanaantgaagaaaccttggcttanttatgatgaanaagaaaattgaaaatttccntttancccaggttgggtttccttaaattgcaaatccagggccggtttataaaaaacaatttttggngaatggttgcaattaaaaaaaaaaangggtccttggttggttgngccccgantttcctttgaagatcta

SEQ ID NO: 16578 - DNA, 328 bp, Arabidopsis thaliana
  unsure at all n locations
  Clone ID: LIB25-016-Q1-E1-E2
tcntttatcttcacaatcngtnantgtcncgtagctctaattaggtaagaactaatgggagtgtcaaaggaaaaaatcaggtgatattagaggagatttaatcccanggttaccagangaattaccaattgagtgtttggttagagttccttttcagtttcattcttccatcaaatctgtttgccnatcatggaaatgcgttatctccagtcgttcttttatcaaggaacggataggttttggtaaagctgaatctcntctcngccttgttcaanctctganttcaacancgtctcnggcgatgatggaaggtggtnagatnagtcag

SEQ ID NO: 16579 - DNA, 736 bp, Arabidopsis thaliana
  unsure at all n locations
  Clone ID: LIB25-016-Q1-E1-E3
ttctcaagacaaaaaaagaaaaaatggtggaagatgaacaatgacgaagaatcattgttattgttcatgcattaaccttgttgttatgttcctccatggcctgttacatcgttccttattaccaccatcctgttttgtctcatcccaatagagaaatcttcagtcaccgtcaccaccaccaccaccgtttctgcaacaatctcttgaatagaagaattagtgttcctcgaagctccgctattagtgacggtggtgtctcctacaatactctagtctccgaggcggtgaggcttttggttccacaagcaaactttgattcttcaaagcttaaagttgagttcttaggagagttattggagaacaagagtaacggangaattattacgccgcggacttatattccttcgcattgtgacttcactgctaacttaacgttaacaatctcaaacgttatcaatcctggattaactanaaaggctggttcaaagaaaagataatgttggntgccngaattggaaaaaanggttaattaatnaacctncgtttaacataattccantggttngtttttaaattggtaanaantttaattgccaggaatntttnccnnccnnaaccttaaggtttncaaaaattttcccccaagggaaattnccctttggggnacttaaaancctnttggtncaagggaaaatccattttagnttttaaanaanaaacccnnaaccaaanggaa

SEQ ID NO: 16580 - DNA, 734 bp, Arabidopsis thaliana
  unsure at all n locations
  Clone ID: LIB25-016-Q1-E1-E4
atggcaccaaatcgtcatcctcctccaccaaatcaccctcatcctcaacctccaccgaaacaaccgctgcctctatctcttcttcttccccttggcgttggattcactctttcgttgcagatttggagctgttttttctggaaagaatcttggcggtgaagttcggttgcttgtgttcgggaggaaagaagatgataaaaaaaaaccggatcggatccggtccgcggatactcgtactttttcacagacttcaggatcccgaatatccgaggttggcaagatacggatccagagactgaaatgacggatccgccggatacggattcggattcggatacctcaaaaatcccggatatccggattcgttacaaggctaataaccaancatttaatataaaaacntgtcaatacaactaaagttttttttcctaacaactaantaattttgggccttccaaaatccttaatataaaaagaatantcctttaataaaattgatntcaaatcactaaaagtctaaacncctaaaaatccttcccttcctaagnaatgaaantcnaaattttaaaacananangtcaaccaaaaaanttgnttccaaacgggaacaaaaaaanttagttccccccnaantttttgggcttttttnaaaaccncccnatntttccantaanttttgnaacnnnaaaacccaacctggtaanaaantttcaccaaaaatttttaattgnccc

SEQ ID NO: 16581 - DNA, 263 bp, Arabidopsis thaliana
  unsure at all n locations
  Clone ID: LIB25-016-Q1-E1-C12
gnnnnggnagttcngtttagnncgccngtaccganaccaaaattcgcgggtcnacccacgcgtccggagggagcagaaggcgataataatatgggccactcttggttatcttattacagctacaggactcattttgtatctgtttcgttgagtgggggatgatatgccttgtattcaagagaagagagacacggttgatttcaacaaagcttatattgataactttgaaaaaaaaaaaaaaaaaaaaaaaaaaaaaagggcgg

SEQ ID NO: 16582 - DNA, 568 bp, Arabidopsis thaliana
  unsure at all n locations
  Clone ID: LIB25-016-Q1-E1-E5
gggctttggctcggattcgtccgtcttctttcttcttagccgagtacttcggtagattagttggaacgattgatgattttgagttaattgaacgttcggcgtatgagtggtgatcggatagctagtgttcgtaggctccatgctcgcgcatcgaactacctaccacctatccttctcagttaattcacgggcgatgttacgctcgatgatgagttccggggcctgtgtttcgtacctaatttgaaggaattgttgagttcggtttacacccatgccggcggcttctccttcgtggggaagtcgtgggcacaaacatcggcgcttgttcacctctcgtcatcgcanttgttgccttgctcgcattggtgaatgaattgcgggttgaaatctcggatgccgaaaagttgtcgacggtgactcnaantnattcagtcccgcaaagctcatccgtccttcgggcaaaaagataacgggcaagaactcgtccntttgnccccttccaattgcnttttnannaagnattttgccggggnaanttnccnttatncnaannaaangncaaccnggg

SEQ ID NO: 16583 - DNA, 842 bp, Arabidopsis thaliana
  unsure at all n locations
  Clone ID: LIB25-016-Q1-E1-A8
nntgggnnngnngnaantgtctacncntntcgcagccctgtaaaggtccananntcccgggtcnacccacgcgtccgcngacgcgtccgcccacgcgtccgcgataaagtcccccaactgttcgacgaaattcctcagaggtacaataagatcatccctgacaaaatctcttacggtatattgattaagtcatactgtgactctggtacccctgaaaaagccattgagattatgagacagatgcaaggtaaaggcatggaagttactaccattgctttcaccaccattttgagttcattgtataagaaaggtgagctcgaggtagctgataacttgtggaatgagatggtgaagaaaggctgtgaattggataatgcagcgtataatgttcgtataatgagtgctcaaaaggaaagccctgaaagagttaaggagttgattgaagaaatgagtantatgggattgaaacctgatacgattagctataactatcctatgactgcgtattgtgagagaagaatgttggacgaagctaagaaatgtatgaanggacttgaaggtaacaactggtgctccaacgcagctacttttaggacattgataattccaccttggtanaaccgaattgttcnancaaggctatgcgattctcaagaagaatgtttnaagcacaagattccagatttcaacactttnaaancatttggtttnggaattggggggnaacaagaaangnaatgcccctaangggttattaaaacggtgaaaaaaaaattccccccgagtttctgaaagccttggaaaaancccngggggaaccnggcgtttcaaaanccngnttt

SEQ ID NO: 16584 - DNA, 500 bp, Arabidopsis thaliana
  unsure at all n locations
  Clone ID: LIB25-016-Q1-E1-B11
ngngngnnttcntttgnacngccgtacantccanaanggccggtccacccacgcatccggaaaaagtatttctccagttttggaattcgccatggctgttgatagcagaatggatctgctaagcgaaagagctgtgttgatgagagcatctcttcaaaagagtcaaaccatcaccgataatgttgtttctatcctcggctccttcgatagtcgtctgtctgctcttgaaaccgccatgcgtcctactcagattaggactcatgctataaggaaagctcatgagaatattgataggactcttaaggctgctgaagttantttgtctcaattcgatctcctccgtcaggcanagactaaagtactcaaaggggccacaataaggacctggaaagttatccgggatgcaattgctcaactcagaaaagaataanncttaatttatgagcaacaaaagcctttaagataatggatggggttctnaancacncaaatanttncct

SEQ ID NO: 16585 - DNA, 436 bp, Arabidopsis thaliana
  unsure at all n locations
  Clone ID: LIB25-016-Q1-E1-B12
gattcttccggagggcgatctgccacaccaaatgctgtggaccagacgtctactcccttggcatcttcacaaccagcagcgattccagattcgttgacaaccttatctgaatatctgaatcatctcagacaagagtttgctgctaatggtagcaatgctaataacttgcaagattctgaaaattcagtgggcaatgtgcaagattctgcttctactactggagagagtcggattccaagaccatctcatttggcagaagtgctgcaatcaacaaggcaattgttgatcggtgaagtancagattgcttatctaatctttcgaggcagctcgtggatatgtaaatgtgaccgatccgccaacccgaaggttgtgccagtcaaacatgcttcaatcaggatccctcttgganagttaagcatttcactctgaacttgg

SEQ ID NO: 16586 - DNA, 849 bp, Arabidopsis thaliana
  unsure at all n locations
  Clone ID: LIB25-016-Q1-E1-B2
cgtccttctgaggctggaagcgatgaccatgacagcatttctcgcgagacggcttatcggtaacggatcgagccagattctcgggacttcgagttctagctccggtccgttcatttccgtttctagggctttcttctcctcctccactccgatcaaagctactctctttcccggtgatgggatcggtcccgaaatcgctgaatctgtcaagcaggtgtttactgccgctgatgtggttattgattgggacgaacagtttgttggtactgaagtagatcctagaaccaatagtttcttgacatgggataatcttcaatctgtgcttaaaaacaaggttggtttgaaaggaccaatggctactccaattggaaagggtcaacgttccttgaaccttactcctaagaaagaactgaatttgtatgccaatgttaaggccttgttacaatcctcccgggtacaaaaacccgttatgaagaagttgattcncaattaacaattcnttaagaacactggaaagganaanttcaanttgggccttnaaacaaccaaagttccntcnaagggggtgttaanttgggaaaaattccttaaaaaatttattaancccngttaanggggnaaatttttnaaaaaatttnncccnaatttaagncccttttccctttaaagnccaaanaaatcccccgggnaaggggaaaaaaaanttttttggcaaatttcanaaaannccaaaaantttttgcccnaaaaaacgggaggggcccttttcccggnaaannttttttaaaaaaaatttcccgcnaaaatttncccggnnaananttttcnaaaaaggtttttttttanaaa

SEQ ID NO: 16587 - DNA, 640 bp, Arabidopsis thaliana
  unsure at all n locations
  Clone ID: LIB25-016-Q1-E1-B3
tagattggccatcgagagaggagcttcattgacaaagagtcctatagccggaagtgaagaaatttccggtgcgtataatgctaaaggccgtccagatcttgggttggtcatcagggttaaccatctcacagagattgaccaagactcgcaagtcctctaccgtctctttcatctcgtcatctctcaatctctcctctgtcacttcgagctctcctcggagaatcttctctttcaagccaaccagaatgtcttcctcacttcccgggtctgacccagttgcaaattccccgactttcgtctctgttcaatcagctggagatgttcgtaagataaagttctgtcaatggtgtggaggaccaaccangcatgaaatanctgacggtgaagagaaattgagagctattttgcacacaattgcggcaaaaatcccctatcaagaatcctaaagaatnggnttgttnggnttgcccttaaaanaancaatgaaagggaaaaantttttaaccttttgcaaaaacgttaacaantttaaaccctttcaaaaccgggttttaaaggggnccnccnttcccnggccnggggttaancccaaaaaaaattttgggggaaaatccaanctttgnaanaaaggggnnnccaa

SEQ ID NO: 16588 - DNA, 721 bp, Arabidopsis thaliana
  unsure at all n locations
  Clone ID: LIB25-016-Q1-E1-B4
nnnggnnnnnnngnaantgtctacgccnnncgtagncgtccacaattccaaggtccacccacgcgtccgggctactcttttagccactcctatcttctctcctttagcttcttctccagcaaggaaccgtctttcttgctctaagatccgtttcggttccaaaaatgggaaaattctcaattctgatggtgcccagaagttgaatctctcaaaattccgtaaacccgatggccaaagatttctacaaatgggttcttctaaagagatgaactttgagagaaaactctcagtccaagctatggatggtgcaggaacaggaaacacatcaacgatctctcgtaacgtaattgcgataagtcacttgttggtatcacttgggatcattcttgctgcagactatttcttgaagcaagcgtttgtagcagcgtctattaagttcccaagtgctttgtttgggangttctgtatttccccggtcctaagatatttgantccgttggtcccggctgctgcaaatgggttgatgaaattcctcnaacctgcgtttccggtttaaccaaagatngnttccctttgntccaaggttccntcccctggtggtcctccccctttcngttaaaanaaattccnggtgcttcaaggggtcaaaaaccggcaanattgtacccggtgggatggttggggtcacntttgngtnncangggtaanaagctntttgcnt

SEQ ID NO: 16589 - DNA, 254 bp, Arabidopsis thaliana
  unsure at all n locations
  Clone ID: LIB25-016-Q1-E1-B6
tncccctccgggtgaanctctccctggtaccnattnaaatccgggctngtttccctcaatnactcccccctcctccggctttctgaaacaatcctccgggctaaaatttgtccctccaagntttttcgccgtcgcctggtccttcttcggttaacctcccttcgacgtctccttccgtcgccaattcnaaacaagccttcantcaagtcaactcttcaatcgangccggaaaaanaaccaaaanctaaaacggc

SEQ ID NO: 16590 - DNA, 651 bp, Arabidopsis thaliana
  unsure at all n locations
  Clone ID: LIB25-016-Q1-E1-B7
gattttgtaacaataatacaattatacattaaaactctccgacgatgcctcaggcaccgatgccagagttctctagctcggtgaagctcaagtacgtgaaacttggttaccaatatttggttaaccatttcttgagttttcttttgatcccgatcatggctattgtcgccgttgagcttcttcggatgggtcctgaagagatccttaatgtttggaattcactccagtttgacctagttcaggttctatgttcttccttctttgtcatcttcatctccactgtttacttcatgtccaagccacgcaccatctacctcgttgactattcntgttacaaagccaactgtcacgtgtcgtgtcccntcgcaacttcatgggaacactctcgtttgattctcaaaggacaagcctaagaccgtccaagttcaaatgagaatcccttgaacgttccgggctccggttaaggagacnttgtcctccctccnggnnaattccattanaatccctccccaaaaccaaanccaatgggccnccggnttagaaanccaagggctcaaaaatggggttaacctttcnangggccaatgggncnnattttttttcaaagaaaaaaccggggtccnttaaanccnaaaangnnggttngnaaaa

SEQ ID NO: 16591 - DNA, 688 bp, Arabidopsis thaliana
  unsure at all n locations
  Clone ID: LIB25-016-Q1-E1-B8
ccgatctatccaaatcatagattcttttatcttcacaatctgttagtgtctcgtagctctaattaggtaataantaatgggagtgtcaaagaagaaatcaggtgagattagaggagatttaatcccagggttaccagaggaattagcanttgagtgtttggttagagttccttttcagtttcattcttccatcaaatctgtttgccgatcatggaaatgcgttatctccagtcgttcttttatcaatgaacggatatgttttggtaaaggctgaatctcttctctgccttgttcaacctctgacttcaccaccgtctccggcgatgatggaaggtggtgagatgagtcagaagaagaaagaggaagaagaaggcgagtctcaaatgacgcagcanctgctanaaccgcntattactggaacgccactttacggttaaagcgtttatnacgcaaccctggncacttggnacgattcccaatccctgaacggntccttgttcgggaatccttgcaatcaggcccggggaaattgttttaanccgcggttggattcgaaactttcaacctgtgcaaaanttttggtccggattttccccggnaaggancggaaaaaggtnagantggcagccntttggggggantttttttcccggggtccgttggtcnnaaggtttntcnccgggggntt

SEQ ID NO: 16592 - DNA, 507 bp, Arabidopsis thaliana
  unsure at all n locations
  Clone ID: LIB25-016-Q1-E1-B9
nnnnnnngnaacttcnnttgnncggccggtaccaggccaaaattcgccggtcnacccacgcgnccggtttgaggtctggctcaagggttgcaccttgtagtgacgatggtgattctgtaaagaattgtaaagatgatgttgaagagagcaagaaagatagtgaggaactgtctttgatacgggaacagcttgctctgattgagaaccaacagtctagtctcttagacttactacagaaattcatgggaacctcacagagtggaattcagtctctggagtctcgtgtaagcggtctaganatggcgttggatgaaatatcgtgcgatctggcggtttcaaacgggagagttcctangaatatantggctgcgcangagacagttgttccaaactacctggtacagagttcctaaatcccaaattcctgganaaaaacccaaggagaagacacggaacaagaacacaactaatgnaatggcttcctacnaacaagggatccaaaatcaa

SEQ ID NO: 16593 - DNA, 688 bp, Arabidopsis thaliana
  unsure at all n locations
  Clone ID: LIB25-016-Q1-E1-A7
gnnnnnngnantgtccacgccgnacgtaggcctnnacacggtccaaagtncncgggtcgacccacncgtccgggcatcagagttttgatcggagaatctaaaagtctcgacttttcgaattttgttggtcgctttcttaaggacatgaatctcgcggtggctagttttcgcggcaatttcggcgtcttgtcgcaatgcagctcatgttgtagtcttcagtttcagccttttgtagctgctacttccagtctcaattttgggcaaacaggaacatctcgaaggaagaaggatctgaagcttgaaagagttttcagaaagagagagactttggttagagtgacggagacgcaaacggaaccagaaggcaatgatgatgaggataataaaagaaggcaaaagagagctctgcagatgatcctcctacaaaaattcctactgagttgaattcacagtcaacggttgtgaatgaaaccgccngggcaaatgaagganggaaaacaaaagctcaagttcaagttcccaaggacnggtgataaaatttagaaagtttancaattgggtcccctccntncctgggtggtnnaatcccanttacaaattgggnccaaattccaatgganaactcccccaaagggaaanccaattgganaantccncaangggggccaaanttantttgggntttttg

SEQ ID NO: 16594 - DNA, 496 bp, Arabidopsis thaliana
  unsure at all n locations
  Clone ID: LIB25-015-Q1-E1-H10
nnnnngaaatgttanaaggnnacgccgnacggaanntgtccacanantcccgggtccacccacgcgtccgaaagggaggatgtccgaaaccacgctttacagtcattacagaagtgtttaggcggagtagacggaatcaacctagctcatagcatgtggtctcaatgctttgacaaagtaatcttcacggttttggatgacttacttgagatagctgctgggtcacagaaagactaccgaaacatggaaggcacattgcttctcgcaatcaaacttctctccaaagtgtttcttcagcaactccaagagctatctcagttatcaaccttctgcaagctatggctcggtgttctaactcgaatggagaaatacatgaaagtgaaagtaagaggcaaaaaaagcgacaagctacaagaatcagtaccaagagcttctcaaaaacatattgctggtgatgaagacgaaaggctgctanttgcaaagaattgctcctggg

SEQ ID NO: 16595 - DNA, 67 bp, Arabidopsis thaliana
  unsure at all n locations
  Clone ID: LIB25-015-Q1-E1-H2
atttcctcctgtgancgctgttcaaatgcaacgtctnacgcaacattgagattaaacttcaacgagc

SEQ ID NO: 16596 - DNA, 501 bp, Arabidopsis thaliana
  unsure at all n locations
  Clone ID: LIB25-015-Q1-E1-H4
nnnnnngaaaatntnnggccgcctatggtcaaacattcgcgggtcgcacgcgtcnncttctncagagcacacaagctctgagatcccatcaataaatggcggtaacagagtcctctgtttatttactctaacaagtcctttaaggttttaataacccagtttcatgggggttacttccttgtatctagccctgttatagcaaggagctcgtgatcatgagtggtacagagttagatgagcctggaaagttaaaacgtgctgtcattgatgcttctgctggtggtgttgctggtgcgatttcacgtatggttacctctccccttgatgttatcaagattagatttcaagttcanttggagcctacaagctacaaggggcccgaaagaatctcaactgaaaacgaaatacaatgggttgtttccaacaaagaaagntatcctttaaaaaggaaggttaaccgggtttccggcgttggaaagnttcaaccttacntaagggtgg

SEQ ID NO: 16597 - DNA, 440 bp, Arabidopsis thaliana
  unsure at all n locations
  Clone ID: LIB25-015-Q1-E1-H5
ngttgaagaagacgaagaagataccttcctctttatcttctccgatttctcaaccttcccgtctgcttgtcgtaaagaaatggcgccgagtagacgggatttacagcttactccggtcaccggaggttcttcttcccagatcagtgatatggaagaagttggtcttctcgattcgtatcacaacgaancgaacgccgatgatattttgactanaatcgaagaangaagagatgtttccggtttaaggaagattcaggtcggagtcaccggtatgacttgtgctgcttgttctaattccgttgaagcagctttgatgaacgttaatggngtcttcaaagcctctgttgctttgttacagaatcnagccgatgtcgtcttcgancctaatttagtcaaggaagaagatattaaagaanctatacaggatgctggatttgang

SEQ ID NO: 16598 - DNA, 510 bp, Arabidopsis thaliana
  unsure at all n locations
  Clone ID: LIB25-015-Q1-E1-H6
ggnntnggaatatcctcntcgnnnntccggtccgntaataatcccgggcngccccatgcgtcnaggaactttggacgacgacaatggncccgaagaaaggagtgaaggtagctgctaagaagaagaccgcggagaaagtttcaaaccctctattcgagaggaggcctaagcaattcggtattggtggagctttacctcctaagaaggatctctctcgctacatcaaatggcccaaatccatccgtcttcaaaggcaaaagaggatcctgaagcagaggttgaaggtccctccagctcttaaccaattcaccaagactcttgacaagaatcttgctaccaacctcttcaaggtccttctgaagtacaagccanaagacaaagctgccaagaaaggagcgtcctgttaaagaaaggccaaactgaaacctnaaggaaaanccttctgagtcnaaaaanccaatngttgtcaaattacggctcaaacaattnacctaactcaattaacaagaa

SEQ ID NO: 16599 - DNA, 423 bp, Arabidopsis thaliana
  unsure at all n locations
  Clone ID: LIB25-015-Q1-E1-H7
aaaggcgaaaacctcgccaatccgattacgcgaaaaatcaaagaatctttgtttgatttttgatttttaggtttttggatatggcgtcgaagcggatcttgaaggaattgaaggatctccagaaggatccacctacatcatgtagcgcaggtcctgttgctgaagacatgtttcactggcaggcaacgataatgggtccttcagagagtccttatgctggaggtgttttccttgtaacnatccatttccctccggattacccattcaaagcctcctaaggtggcctttaagaccaangtgttccatcccaacattaacaacagcngtancaattgcctcgacatctttaaggagcaatggagtcctgcgctcaacaattccaaaggtgctgcnatcnatttgttccttgntnancgattcaaa

SEQ ID NO: 16600 - DNA, 442 bp, Arabidopsis thaliana
  unsure at all n locations
  Clone ID: LIB25-015-Q1-E1-H8
ttgtgtgagtctgcataatcatggcgaggaagatgcttgttgatggtgagattgataaggtggcggctgatgaagccaacgcgacgcactatgattttgatttgtttgtcatcggtgccgggagtggcggtgttcgtgctgctaggttttcggctaatcatggcgctaaggttggtatttgtgagcttccatttcaccctattagctctgaggagattggaggcgttggtggaacctgtgttatccgtggttgtgttcctaaaaaagattctccgtcctatgggagctaccttacnggtggtgaaacttnaaggatgcctaaaaaatttatggggtgggnaaattaaattgagaaaagtccnaaacttccacaattgggaaaaaaacnctttttgccaaaannnaanaccctggattnanaatcctaangnnccggaattaa

SEQ ID NO: 16601 - DNA, 692 bp, Arabidopsis thaliana
  unsure at all n locations
  Clone ID: LIB25-016-Q1-E1-A1
tcgtttcttcattttctctctaggagctaggtgggaaaaagattcaaccttgtcttagaaaaagaaaaccaaagctaatctttttcttttgtacctctctttcaaggattaacaaaacaaatcgatgaagcccgggttttagtacctaaacatctctttgtctcgtctttgaaaacccccccaagtagatccaacatcattcatatctctctctctatctctgcataagctacggagcgatgtcggcgtgcatcaatggcttatgcagagccgtgactgtctctcttcttcttcttcttctttctttctctttttcctcagcttgctccaatggaaattgccagctgctggattcatgctcctcggntactgattgtgtctctggtttanactgtggagaatgtcctgccgttgggagaaattaacccgtttgcaacaaagaaggccaaagccacaaagttcaaactttccaattaatcaaatgggatttgcccttttaaanaanntttacaaangggttgaangaaccccaaaaatggcccttttaaccaaatggcaaaaatggccaccnanttttttggccaaannttnttttnaaaangggntttaaaattttttaaaaatnccaaggaangnnttnccnnnttnncnaaanncaancnttanaaaaaangggggtttttaaaggggnc

SEQ ID NO: 16602 - DNA, 498 bp, Arabidopsis thaliana
  unsure at all n locations
  Clone ID: LIB25-016-Q1-E1-A10
tgttagcctgccngtaccgaaaccaaaattcncgggttgggttttagcantgaagtttgcgaaaatggcgtcttcggtttttctatccagtttctcgtcatcgtcttctttgcaactctgctcttcctttcacggcgagtacttagctccgtcgagatgctttctcggagctccggtcacttcctcttctttatcactctccggtaagaagaactcatattctccgagacagttccatgtttctgccaagaaagtttctgggttagaggaagccattagaatcagaaaaatgagagagcttgaaactaaatcaaaagttaggagaaatccaccattaagacgtggaagagtatcgcctcgtcttcttgtacctgatcacattccaaggcctccttatgttgagtctgggtgtattaccgggatatatcaagtgagttccagattcctggtcctgaaggcattgcgaaaatgagagctgcttgcgagcttgctgctcgg

SEQ ID NO: 16603 - DNA, 517 bp, Arabidopsis thaliana
  unsure at all n locations
  Clone ID: LIB25-016-Q1-E1-A11
gnngtggnggnnngntttctgtttggcccngcccggtaccganaccaaaattcncnggtcgacccacgcgnccgancaaatgccttggttgtgtctatgttcaaagagaagcaaaatcgcctgatttcaagggtgtatctggcacagtaaatgaaagagttcgagaagctcatagcaataaatctgctccaactattatgctttttccagaaggaacaactaccaatggagactacttacttacattcaagacaggtgcatttttggctggaactccagttcttccggtaatattaaaatatccgtatgagcgcttcagtgtggcatgggataccatatccggggcacgccacattttattccttctctgtcaagtcgtaaatcacttggaagtcatacggttacctgtatactacccatcccaaagaagagaaagacgattccaaactttaagctaacaatgttcggaaattaatggncancganggtaacttgattccatccgaatttggactta

SEQ ID NO: 16604 - DNA, 437 bp, Arabidopsis thaliana
  unsure at all n locations
  Clone ID: LIB25-015-Q1-E1-G7
tctctctctccatttgataggaagaagaagaaagatacaaaaagataaaagaaagagagaaaaagagttttaattaaaatgcaatgttatacaaatgaagaagcactagcangtctcttcatcaatgtctcaacatctttctttcttctcctcatcctcctctactccgccgtctccctcctaatcaagcttctccacttcatcggcggctaccctctcctccaaaggaatgaagatgaatatgattccgcggcatggtattccgaagaagaggaggaagaggaagaagaaggggaagaactcaagatgtcgtgtaactcaagttaccatgtgatatctagagatncaaatccggatttgatagctgatatagcagacgacggagaatccttagtgttttacaataatatttctcaaggaggagtaaataatcaaca

SEQ ID NO: 16605 - DNA, 403 bp, Arabidopsis thaliana
  unsure at all n locations
  Clone ID: LIB25-016-Q1-E1-A12
gaagctcctcgttgttggtaccgccttatgcggtggttccggcgccgccttcattgcttcctccgatgacccatcaacaaccctcaagctttgcacctccatccccgttcgtctctaccgcaataccgttaccgccgcctctattgctttcgattatgagtactcgttgttgggtttggctgagggaagcagtgagagagctaaggtcaaacatgaagtccacctaaggtcagctcaaaagcttcaagagctctgttttaaaaatggaggaatctatatcaaactcggccaacatataggacaactagaatatcttgtgcctgaagagtatgttcgtactaatgaagggaatccaatgttgaacaaatgccctaattcctcaatatgaacaagttantgaggt

SEQ ID NO: 16606 - DNA, 103 bp, Arabidopsis thaliana
  unsure at all n locations
  Clone ID: LIB25-016-Q1-E1-A5
nttttaanggggaaatggccttttttggggaanttttcaattgggctttaaggcccaatnaaattgtggntttttcaaaaaaaaaaaaaaaaaaagggggggg

SEQ ID NO: 16607 - DNA, 666 bp, Arabidopsis thaliana
  unsure at all n locations
  Clone ID: LIB25-016-Q1-E1-A6
gcatcgttttgcttgcttgtgcgtttctctcgaactctctccatggctgttgcgctccaattcagccgattatgcgttcgaccggatactttcgtgcgggagaatcatctctctggatccggatctctccgccgccggaaagctttatcagtccggtgctcgtctggcgatgagaacgctccttcgccatcggtggtgatggactccgatttcgacgccaaggtgttccgtaagaacttgacgagaagcgataattacaatcgtaaagggttcggtcataaggaggagacactcaagctcatgaatcgagagtacaccagtgatatattggagacactgaaaacaaatgggtatacttattcttggggagatgttactgtgaaactcgctaaagcatatggtttttgctggggtgttnaccgtgctgttcanattgcatatgaagcacaaaagcantttcaaagganagnnttggnttactaacaaatcatcataacccgaccgtcataanaggttggaanatatggtgttaaattatccggttgaggattaaagaacanttgntgtnttaanaaaatnagtggtacctccngcttggactgggttacaaatttnttctaannnaaaagncaattntnancanttcctggtaaagnctggaaagtt

SEQ ID NO: 16608 - DNA, 484 bp, Arabidopsis thaliana
  unsure at all n locations
  Clone ID: LIB25-014-Q1-E1-E5
ggtgngganaatcncnaggcgtacgtaccggtaancaattcccgggnccacccacgcgtcnncaanacgcgtccgcccacgcgtccgcccacgcgtccgcggtgaagcagttgatgagctttgatccaggggaatggagtgagagtttaaggaaagagtatcttcttgtcatcganggcttcttctctcttcctctccctctcttctccaccacttaccgcaaagccatccaagcgcggaggaaggtggcggaggcgttgacggtggtggtgatgaaaaggagggaggaggaggaagaaggagcggagagaaagaaagatatgcttgcggngttgcttgcngcggatgatggattttccgatgaanagattgttgacttcttggtggctttactttgtcaccggttatgaaaanaanctccaanattaanactntcgccggtcaaattttcaccgnagatccctttactcttgccaantcaagg

SEQ ID NO: 16609 - DNA, 108 bp, Arabidopsis thaliana
  unsure at all n locations
  Clone ID: LIB25-014-Q1-E1-E6
agattttgagattctctcttatnttcctgactctaccgntnccgaatgtggaaaggaagtttcttcttatccgcaacatgtggattccttgtgttgaattcganttgg

SEQ ID NO: 16610 - DNA, 508 bp, Arabidopsis thaliana
  unsure at all n locations
  Clone ID: LIB25-014-Q1-E1-E9
nnggngngaanttccnaccgtacgtacgnnccactnattccatngtccacccaggcgtccgaactctctgatctccgcttctcttcgccaacaaatgtcgaccgctcctctctccggcttctttctcacttcactttctccttctcaatcttctctccagaaactctctcttcgnacttngtccaccgtcgcttgcctcccacccgcctcttcttcttcctcatcttcctcctcctcgtcttcccgttccgttccaacgcttatccgtaacgagccagtttttgccgctcctgctcctatcattgncccttattggagtgaagagatgggaaccgaagcatacgacgaggctattgaagctctcaagaagcttctcatcgagaaggaagagctaaagacggttgcagcggcaaangtggagcaagattacancgggtcttcanaacagggtacttcatccganaaggaaagctttcngaccccggtcgaaatcattaagcaagggttt

SEQ ID NO: 16611 - DNA, 65 bp, Arabidopsis thaliana
  unsure at all n locations
  Clone ID: LIB25-014-Q1-E1-F10
catgggagtttgatcccanagccggcacacctgaggaacgagccgccgtcgangatgctcgccgg

SEQ ID NO: 16612 - DNA, 507 bp, Arabidopsis thaliana
  unsure at all n locations
  Clone ID: LIB25-014-Q1-E1-F11
nngnnngggnnngaacttcnncagntcgtangccccnnnattcccaaggtccacccacgcgtccgnagacgcgtnggcggacgcgtgggtccagaaccttctagatctcgaggaacccacattccaaaacgaggtcgtggagaatctcaaagatggtttgggtttggttcttgaagacttctatcaactcgccggtaagctggccaaggacgatgaaggagtcttccgtgttgagtacgacgctgaagactcagagatcaacggcgtagagttctccgtcgctcatgctgctgacgtaaccgtcgatgatctaacggctgaggacgggacggctaagttcaaggagttggttccttacaatgggatcttgaacttggaaggacttagcagaccactccttgctgtccaggtgaccaagctaaaagatgggcttgcaatgggcctagctttcaatcacgcagtcttagacgggacatccacgtggcantttatgaactcatggggccg

SEQ ID NO: 16613 - DNA, 482 bp, Arabidopsis thaliana
  unsure at all n locations
  Clone ID: LIB25-014-Q1-E1-F5
gtgnggaaatcccnnagntntcgtaccggcagancnattcccggnnccncccacgcgtcagtattctatttactaaaacctcccaaggaccaaagaacatcgacaaaggaagacgacgaagaagatttcgagcttcgacaaatcatgcggattcttactgctcgcatagctancnatttttgcagggcacgaaacgcgaatcctcgatctcgaaatttctcctcgtcgaacaagaaagatgaccttacattggaggaagaagctgagaggaaaataggttggtgtctcaaaattttctttgcgggcacagcaacgtatattggntaccagtttttcccttacttaggtgataacttaattcatcaatcaatatcgcttttacatgtgaaggatcctttgtttaagaaaatgggagcntctcgggcttcccgtttcgctattgatgatgaaaggagggatgaanggtgtanagatgggtgggg

SEQ ID NO: 16614 - DNA, 481 bp, Arabidopsis thaliana
  unsure at all n locations
  Clone ID: LIB25-014-Q1-E1-F7
gtgnggaaagtccnnaggnnntcgtaccggtaaancgattcccgggnccacccacgcgtcnggagatatttttatcgcagtgagaaagaaacacaaaaaatgcagaatcaaaggcttattaagcagcaacaacaacaacaacaacagcaacatcaacaagctatgattcaacaagctatgatgcaacaacatccttctctttatcatcctggtgttatggctcctcctcagatggagcctttaccaagtggaaaccttcctcctggttttgatccaactacttgccgtagtgtgtatgctggaaacattcatacgcaggtcacagagattcttcttcaagagatttttgcaagtactggtcctattgaaagctgtaaactcatcagaaaggataagtcatcatatggatttgttcactactttgatcgaagatgtgctagtatggctataatgactcttaacggaaggnatatatttggac

SEQ ID NO: 16615 - DNA, 478 bp, Arabidopsis thaliana
  unsure at all n locations
  Clone ID: LIB25-014-Q1-E1-F8
ntnngaangtcnncatgntnnncgtacgganaancaattcccggggccacgcactcngaanaaacgaaggatataactctgagatttgtgtaagcattcttctttgagattttccgaggtcacaagtcagtacacaaaggaagttccttttttgggttttggggtctgctttgtgtcagtgattttaggattgcttcatttgccacacatttccaatctcttaagtagttggcggcgaagatgggtttcctgatagggggctcttgcttcgtcccttctgttcctctacactctcgattcctttcatctccttcttcttcttcttcttcttctccttcttcgtctcagtttgggcttctgtgttcgagtaatgtcgccaagttcaagcgccgacgaccaacattggcttctttaaaccaaggaagatgggtacgaatatgacgttgcntccgccaaaanganggcttccntcttgtgg

SEQ ID NO: 16616 - DNA, 504 bp, Arabidopsis thaliana
  unsure at all n locations
  Clone ID: LIB25-014-Q1-E1-F9
nngnntgggnnganttctnnccgnacgtacgccctcgattccanngtccacccangcgtccggaagagganagttctaacacatccctgacaaatactcttgctgaatttgatcccttctccccatcatcgttgtaccccgaacatgagatcaatgctacttctgatctcaacatggaccaggattacgatttttcacaatttttcgaaaaattcggaggagataaccacaatgaggagaacagtatgaatgatctccttatgtccgatgtttcccaagaagtctcatcaactagcgttgatgatcaagacaatatggtaggaaacttcgagggatggtcaaattatcttcttgaccataccaattttatgtatgacaccgactcagactcgcttgaaaagcatttcatatgagtcttcatatccaaacagaaaggttcaaactattcgacgacttaaaataatgggtcctgtcccaagggttngtccattactaactcgcccc

SEQ ID NO: 16617 - DNA, 415 bp, Arabidopsis thaliana
  unsure at all n locations
  Clone ID: LIB25-014-Q1-E1-G1
agtttccccggaaagtttttgtctttcaatcaccattagaattcagctgcaacacaagtgtttgcaacagagagaatcatggagagagctatggaaagacaaaagatattgcntcgtcatctcaatccagtttcttcttctaattcttctcttaaacatgaaccttctcttctgtctcctgtgaattgtgtttctgaagtttccccaatggctgcttttggagatgacattgtgattgtagcggcatatcgtaccgccatttgcaaagcgagacgtggaggtttcaaagacactcttcctgatgatcttcttgcttctgttcttaaggctgtagtggaaagaacatctttggattcaagtgaagttggtgatancgttgttggtaccgtgatancgcctggttctcagagagcaa

SEQ ID NO: 16618 - DNA, 508 bp, Arabidopsis thaliana
  unsure at all n locations
  Clone ID: LIB25-014-Q1-E1-G11
nnnnggggnngaacttcncgcctgnccgtacgcccccanaaattcccanngtccacccangcctccgcattgaggtaaagaagatatacagtagcatgaaagctgctggttacttacccacaatccgcctttataggatgatgattgagcttctctgcaaagggaaacgagttagagatgctgaaattatggtctctgaaatggaagaggccaatttcaaggttgagcttgctatatggaattccatgctgaagatgtatacggctatcgaggattacaagaagacagttcaagtataccagaggataaaagaaactggactggaaccagacgagaccacttacaatactctgattataatgtattgtagagacagacgaccagaagaagggtacttgcttatgcagcaaatgagaaatcttggtttggacccaaaactggacacatacaagagcttgatctctgcttttggtaagcaaaaatgccttgaacaagctgaacaactgtt

SEQ ID NO: 16619 - DNA, 432 bp, Arabidopsis thaliana
  unsure at all n locations
  Clone ID: LIB25-014-Q1-E1-G12
gacgaactttgtgagggagaaaaaatggcgaatttactggaaacatcaatctttttctcctctgctgataaattactgtctttcccgcctaagaattctcaaacccatcatctccctttctctgctttcatcaatggaggaagaaagatacgcaaaagctcaactatcacctttgctaccgacactgtcacttacaatggcactacaagtgcggaagtaaaaagctctgttgaggatccaatgggaaagttgaggttgctgaaaggntacactatggctcaattttgtgacaaagattantgatccctccttgaatgagaaacctaaagtttaacaatgggagacttattgggtttaagaaataatgggacaaagtncaatgttaaattccaataancgntgcanaatncnaacctgataccgaaactgatc

SEQ ID NO: 16620 - DNA, 423 bp, Arabidopsis thaliana
  Clone ID: LIB25-014-Q1-E1-E4
aactccacgttggcccttgttgtgtccatcccgtctcgccgtttgaaacgtattcgttgttcgctccatcagtccaatccgtcaaagttggagagaaaggttttcatgtcgtcaaataggaatatatatgctgaaagacattggatgtatgaaagaatcgatcctacaaccaatcgagtatcacaagctttttatgaaggattggacaattttttgaagtttgcaaaaagtcagcctttatttttggagaataaaaaacttttttgtccgtgtattaagtgtggaaatggaggaagacaacaagaagaacacatcgtggcaacacatttgttcaacaaaggttttatgcttaactactgggtttggacttctcatgggggaagattataatatgttaataaacaacaattctgaaagaagata

SEQ ID NO: 16621 - DNA, 478 bp, Arabidopsis thaliana
  unsure at all n locations
  Clone ID: LIB25-014-Q1-E1-G4
gnntnnnnaagttttctgcnntcgtanggaaannnactcgggccgccacgcgtccgcaaaanttggtgtcaacgctcagacaagaaaggcgtgtgttcattgttgaatcttcccatttcctcatccaaattccgacataactatcctagccgccatttgttctccacattngnaaaccctcagcagcttcaaaactcttccgatctctccctcacgctcgcaattctctcgtctccattttaatagtttttcttctcggaatcacaaatcttcggcttcttgttccttggcgtgtgtgtgtgttgttgaatggctcttgttcagcggattccaanttcctcctccagtattcggaattggnaacaagcgaggaccaatttgactcctatttgttgtttacattacannactgnatcctcctcttcttcaancnttacagagaaacactctgtggagagataccaaagggatcaatggg

SEQ ID NO: 16622 - DNA, 473 bp, Arabidopsis thaliana
  unsure at all n locations
  Clone ID: LIB25-014-Q1-E1-G6
ccncnctgnngntcngcgagtcgacaatgaattcgcgnngccacgcagtccggaccaaatctttctcctttggtggcaaacacaacgacagatannnagaaacgatggcgtcaaactcgcttatganctgtggcatatccgccgtgtacccttcgcttctctcttcnnccaagtctaaattcgtatccgccggagttccactcccaaacgccgggaatgttggtcgtatcagaatggctgctcactggatgcctggcganccacgaccagcttaccttgacggttctgctcctggtgactttgggtttgacccacttggacttggataagttccaacgaaccttgagagatacaaagagtcagagctcatccactgtagatgggctatgctcgctgttcctggggatttggtncaanaagcatnaaggtatngaaactgggttaaaggtnaaggatnnaacanttacaaaggg

SEQ ID NO: 16623 - DNA, 403 bp, Arabidopsis thaliana
  unsure at all n locations
  Clone ID: LIB25-014-Q1-E1-G7
tttcttgaagcagggattcttctaatcattaatccctacttctttctttcttttttgtttgttctcctttgagatctatctagtactagtagtaanancccctcccctccattgaatttgaattgaattgaatctctgggaatcaaatctttgatgtcgcatctggacgacattccttctacgcctgggaaattcaagatgatggataaatcccccttcttcctgcaccgtactcgttggcaatcctccgtcgccaagcttgccttttggtcccttgtctttttcggattgctcttcatcttcttctaccgatctcccatctccaatcccgattcctctcgccgctctcttcgcacctactcttggggcggtcccgcctgggagaaacgcgtccgatcctccg

SEQ ID NO: 16624 - DNA, 497 bp, Arabidopsis thaliana
  unsure at all n locations
  Clone ID: LIB25-014-Q1-E1-B9
tgngatcttccnacgnacgtncgnnccgtnacggncacagnccncccaggcctccgaattccctcacttatcctcaatgaaaaaaataatctgagaaaacgcaaaagaagaacggagcaaaatcctcagaatcgtcgccggagaatctttacgtttcgacataatcgggattttggnattgataattccgatggaaggggttatcacatgtttccatacgaaatgcgtctctcttccaattcgttctttcccactttctagggtttcttcacttcctcggtggaggaacaataaattgatctcttcatcgcgatcggttcatctaagaagcttgtgcgtttcgagctcagatactttagtcgcgagcggttcaccaaaggaagacgagaggcanagcaaagtatcgagcaagaaggaaggagatgactccgaaggattngaagtttggatngtaaaatgggttgcaccntgcaanggtatcccaaggagagacaacc

SEQ ID NO: 16625 - DNA, 477 bp, Arabidopsis thaliana
  unsure at all n locations
  Clone ID: LIB25-014-Q1-E1-C1
gnggngcaatgtccctcnnactncagcggtcctcgttaccgggnccngccacgcgtccgcnaaancgtccgcccacgcgtccgcggacgcgtgggcctgtcttcatatccaacagagatctcttcatggctccaattactgtcggcgatgttgtaccagacggaactatctctntcttcgatgaaaatgatcagcttcagaccgtctctgttcactctatcgccgccggtaaaaaaagtcattctctttggtgttcctggtgctttcactcccacatgcagcatgagccatgtgcctggattcattgggaaagcagaggagctgaagtcaaagggtatcgatgagatcatttgctttagtgtgaatgatccatttgtgatgaaangnatggggaaaganatanannagaacaancatgtnaagtttgtancagatgggtctggagaatatacagatcntcttgggnttgngcntggt

SEQ ID NO: 16626 - DNA, 480 bp, Arabidopsis thaliana
  unsure at all n locations
  Clone ID: LIB25-014-Q1-E1-C2
tgnggaatgtccctcagtggtcgcggtccatttncacgggnccagccacgcgtccggantaagctccccttttcttatccggaaaccaaaaacttccggtgataaaacctccttcgtcatctctctacttcttggataaaatggcgtcaactttcactgccacatcttcgnngggttcaatggttgctccgaatggtcacaaatctgataagaaacttatcagcaagttgtcttcaagctcatttggaaggagacaaagtgtgtgtcctaagacccagaagatccagttctgcaattgtgtgcgcagcaaaggaattacatttcaacaaagatgggactaccattaggagacttcaagctggtgtcaacaagctcgcagatcttgttggtgttacacttggncccaaaggacgaaatgttgttcttganagcaaagtatggnttaccangaattgttaatgatggtgtgactggtngcag

SEQ ID NO: 16627 - DNA, 80 bp, Arabidopsis thaliana
  unsure at all n locations
  Clone ID: LIB25-014-Q1-E1-C3
ttggtagatggtgttgacattgaagantttgcacnagttttccgttttcctgatcactggggaataatcnattactgtnc

SEQ ID NO: 16628 - DNA, 343 bp, Arabidopsis thaliana
  unsure at all n locations
  Clone ID: LIB25-014-Q1-E1-C6
tgctggtataaggccatgtgtttcctcatttggtgctgaccagtttgatgagaagagcaaagactacaagacacatttagaccgtttcttcaacttcnncgagctatcggtcactttaggcgcaatcattgccttcactttggtggtatatgttcaaatggaacttggttggggtatggcttttggcacattggccgtagccatggggatttctaacgctttgttctttgctggtanaccgctttatcgganaggttgcctgntgntagtcccttgactagggtanctcaggtctnanttgcggttttcggaaaacaaaangcantttnaaaagnnattaant

SEQ ID NO: 16629 - DNA, 480 bp, Arabidopsis thaliana
  unsure at all n locations
  Clone ID: LIB25-014-Q1-E1-C7
ggnngggataatcncnangnncntcgtaccgganatcnattcccgggnccacccacgcgtcananngattcagagggttgctctagccattgctcctcgtcctggctccaatatcagtccaatatctgttcccacttcccctgaagctctcactctggtccgttggatctcccggagttacagccttcacactggtgcagatctctttggatctgattctcaaaccagtggtgacacgttgctgcatcaactctggaatcactctgatgcaatcttgtgctgctccctcaaaacaaacgcttcaccggttttcacattcgcaaaccaaaccggtttagacatgctggaaacgactcttgtagcccttcaagacataatgctagacaagacccttgacgaacctggtcgtaaagctctttgctctgagttccccaagatcatgcaacanggctatgctcatctgccggcaggagtatgtng

SEQ ID NO: 16630 - DNA, 483 bp, Arabidopsis thaliana
  unsure at all n locations
  Clone ID: LIB25-014-Q1-E1-C8
ngnggangtccctctgnagtcacggtccnnnnnacttcgcggcgcccaccacncgtcagtaaaaatgtcgggtanaggagaaggaccagctatcggtatcgatcttggtaccacntactcttgcgtcggagtatggcancacgaccgtgttgagatcattgctaatgatgagggaaacaganccacgccatcttacgttgctttcaccgactccgagaggttgatcggtgacgcagctaagaatcaggtcgccatgaaccccgttaacaccgttttcgacgctaagagttgatcggtccgtccgtttctcctgacaactctgttcaagagtgacatgaaattgtggncattcaaagattcaaagcccggcctgccgataagccaatgatntacgtccaatacaaaggtnaaagagaaaganttcccaactgaaggagaattcttccatggntcctaataanatgccttgagaatgctgaggct

SEQ ID NO: 16631 - DNA, 511 bp, Arabidopsis thaliana
  unsure at all n locations
  Clone ID: LIB25-014-Q1-E1-C9
ggggngancgtccnaacgcacgtacgcccccataattccanngtccaccaggcntccgaacttctcnactctcttananttagatgttatttttctgttctaccttctcttcataggaactaaagtgaattgagtcagagataaanaganagagagaangtaacatggatgcttgtnttcttacctcaagatcaatctctggtgttaaagagcttgtcccgttcatcaaagcgagaatctttacttgccccaagagaaattctggccaatttgttaccaggaaggttgcttctccgatctctgtaaattgttctctttcggattcatggaagccactggaagatgatgctgatctcttcanggattgtgtcaacaattctacatcagatgctgattggagggagttcanggcaaaggcttgtttgcaggggaacaagctgcaacgntccganaaggatnagccctccgtngttcnaacccggacattggtggtgggacnaatcanccaacc

SEQ ID NO: 16632 - DNA, 463 bp, Arabidopsis thaliana
  unsure at all n locations
  Clone ID: LIB25-014-Q1-E1-D1
gngnngcaagtgtccctccgggtggcagcggtccngtgntacccggggccngccacgcgtccgcannacccctgtaatggcgcttccacacgtagtctcttcaccttcttcaacttcattatctccttccttcaaatccaaaccaccgtttcactcccttagatctttatcaccganggntgataatcgccggcgttgtaaactcaacagttccttccgatgttcatcttcttcattctccgagaagcatcacaacgcgaaatctccaaaatccgatgatatcgtcgagcttcctctgtttccactcccactcgttctcttccccggagcaatccttcctcgtcagatnttcgaattccgttaacgnatcatggatgcacaaggctcctccaatcctgatttaagaaattnggggnaatttaaatnccggntttcggtttncnggggnttcggncggnnanga

SEQ ID NO: 16633 - DNA, 446 bp, Arabidopsis thaliana
  unsure at all n locations
  Clone ID: LIB25-014-Q1-E1-D12
gggnganttcctgccgnncgtaccgccccataattcccaagtccacccacgcctccgcagctatggnnatgagctttcatcgtcttcctcaggcattgcatatgatacccagaaaccctacgcaatcatcgangaatttagggttttcttcgtttctatcgtgtgcaccatcnatggnttctcgtatatcagtttctaggctttctctgaatcatcccggctcgaaatttgggttctcactcgatactagggtgagaaatgagtttatcgttngagcagangaaggtaacacagaagctgaatctgaagaatttgttgctgaaatcgctgatacgganggaaatgttaggaagtggtcgaagctanacctanaaganaacctagggttaaagctcgggngatgtcatggggatactgaaccacnaaagccatttgagggngcnagc

SEQ ID NO: 16634 - DNA, 478 bp, Arabidopsis thaliana
  unsure at all n locations
  Clone ID: LIB25-014-Q1-E1-D3
gggnngcacgtcnttcctgntcccacggtccacaaacccgggnccngccacgcgtccgcanaatttttgtgcttcgcgaacagcaagttgagctatggtgaaggagagtgagtactacgacatattaggcgtcaagattgacgcctctggtgctgagattaagaaagcttatnatgttcaagcaaggcaagttcatccagacaagaaccctggtgatcctcaagctgctaaaaactttcagatactaggtgaagcttatcaagttctaggcgatccggagaagcgtacagcttatgacaaatatggaaaagaaggggttcaacaggatgcaatggttgatcctgcagctgtgtttggtatgctctttggtagcgagctctttgaggattacgttgggcaacttgcccttgcttcagcagcctcaatcgatgctgaattagaatcgtatgagcctgagattagaaaacagatgcttcag

SEQ ID NO: 16635 - DNA, 421 bp, Arabidopsis thaliana
  unsure at all n locations
  Clone ID: LIB25-014-Q1-E1-B2
angcgtccgggaaaagttccattgtcttgcttctttcgtcggagggctctctttgggctttccgaaaaggtatcacatgccaagtttggcctcacggtatagaagttatagagtcataaagttttaaccaaaaaaaaaaaaaaaaaaaagagggatgcaacacgaggacttcccgggaggtcacccatcctagtactactctcgcccaagcacgcttaactgcggagttctgatgggatccggtgcattagtgctggtatgatcgcatccgttagtatatgcaatgcaatcgtatctattccttttttaaagtcntgatgaaccgttcgccgtgggtcccaaccgccatgcaaggataacccatctaatcctaacganctttgatgcatgaaaaatattccaaaacantgcttgaaaaatt

SEQ ID NO: 16636 - DNA, 270 bp, Arabidopsis thaliana
  unsure at all n locations
  Clone ID: LIB25-014-Q1-E1-D4
tntcattcataattcactcaccccaaaattacaaaaaaaaaaaaaanaaaagattttccatttccctcttctcgatccaccactaccaccaacctcaaaagctttcatcttnnngggtcatggtcggtggttcaggtcaaccggcggctgatacatgagatgacagaagctcctggaggttttcccgcggcggttccatcgcctcatgatgcctgggattgcgaanattcnggngantcttagcnatggtggaangtttactcagtanaa

SEQ ID NO: 16637 - DNA, 403 bp, Arabidopsis thaliana
  unsure at all n locations
  Clone ID: LIB25-014-Q1-E1-D5
ataatttcgtgtgattaatctatggagttggaatttgaatcaaagtacgagattaaccgtacggcggagttcattattagcaaaagcttcaccagaattgctttacagttcccggatgagttgttaaaagattcgactaaggtcgtgagtgctcttaagagcaaaactcgtttgcttactgacagagaagtcaggttctttgtaatggctgacacaacttatggtagttgctgtattgatgaagttggagctttgcatattgattctgaatgtgttgttcattacggtcaaacatgtctaagcccgacatcagttcttccaacattcttccgtttttgggaaaacctcgataaacgtccccaactgtgttaancatttgatagattaagccgtcaaagaacga

SEQ ID NO: 16638 - DNA, 421 bp, Arabidopsis thaliana
  Clone ID: LIB25-014-Q1-E1-D7
gcacacgcgtccggtaagatatctggatatgagtttaagatggagagaacttgtgcggccagaccaaaatctccagaatgtcaaaggcccagagacagatgttgccatttttagaaacgctcggatatgtgacaaaaagcttagtgataacaaggttagctacggagttttctttggaaatcaaaagcatctgccatcacgcgtcatgaagaatataatggaggtcgagaaaacccaagatagaaatgaaaagtattggttacaagaagcccatgttcccctatacttgatcaaagaatttgaagagagcttgcatagagtacaaatgccttcttcaaccaagaagccatccaagaaattatcaaagcttcagagaaagcagctgaaagcttccctcatggacatattttcatatatagcc

SEQ ID NO: 16639 - DNA, 91 bp, Arabidopsis thaliana
  unsure at all n locations
  Clone ID: LIB25-014-Q1-E1-D8
ncctttccacccgcaggagacacatntgtcgcgaaacnagaaacatctctttcagataggangagatcgtgacattcgctgatgattccgt

SEQ ID NO: 16640 - DNA, 67 bp, Arabidopsis thaliana
  unsure at all n locations
  Clone ID: LIB25-014-Q1-E1-E10
tancgagagtattgagtttttacctacagtggatatccaatgcantgtgcttctacntgtttcctgt

SEQ ID NO: 16641 - DNA, 456 bp, Arabidopsis thaliana
  unsure at all n locations
  Clone ID: LIB25-013-Q1-E1-G9
tcnccttctctgttgttacagaagtcgacggcgagtaccttcaaccaaaangaaacacaagtacctggnccaagcattggaattttncaagaaggcaaaanctatncaaangcgtacagtcacaacaagttatctaacagcaagacgaacgattaaagaaaaccgtaactcaaaaaccgttaacggatctaccaaaaaacgctccgatgggaccgtcgaaccggttcgtgattctttcatgttattcgtcttaaaagctgttacggtaagtacttaaccgcttctaacgagcggttcttgctcggggctacggggaagaaagtgattcagttgaaactgagtcnggttgattcgtctgttgagtgggaancgcttagagaaaggtctaaagattaagcttaagactaaatntggtaactaattacgaggtaatgggggncctcctccctgggagaa

SEQ ID NO: 16642 - DNA, 58 bp, Arabidopsis thaliana
  unsure at all n locations
  Clone ID: LIB25-013-Q1-E1-H11
atccgcttattctctntgagctatcccgntgaaatctatcactacgatatgattctta

SEQ ID NO: 16643 - DNA, 147 bp, Arabidopsis thaliana
  Clone ID: LIB25-013-Q1-E1-H2
aatgttaagttactgatcgcgtcgtgttactgttagttggcttattgatattttacattttctctctttttaactttggcgaatggatactttatcgagatatttaatgctatggttgctcatcagaaaaaaaaaaaaaaagggcgg

SEQ ID NO: 16644 - DNA, 442 bp, Arabidopsis thaliana
  unsure at all n locations
  Clone ID: LIB25-013-Q1-E1-H3
gatttgactcagagagagattcattcagtaatggcagcctcaggcacctctgctactttcagagcctccgtttcttcagctccttcctcttcttcccaattgacccatttgaaatcacccttcaaagctgtcaaatatacgcctctgccatcgtctcgctccaagtcatcatccttctccgtctcctgcaccatcgccaaggacccgcctgttctcatggccgccggatctgacccggccctgtggcaacgacccgattcgttcggtcggtttgggaagtttggtgggaagtatgtacctgaaacccttatgcacgctctatctgagcttgaatccgctttccaatgctccttgccaacgacgatgaatttcaagagagaattggntggnatcctgaaagggctatgttgggtaaaagaaaatcctccngtantttggaana

SEQ ID NO: 16645 - DNA, 444 bp, Arabidopsis thaliana
  unsure at all n locations
  Clone ID: LIB25-013-Q1-E1-H4
ttccttgtaccacacgatccttatagctcatcatctaatggccatnttaatccgccagagaanaagaagaagaagaaaatagattagggtttttcattccagaatagcccnaatccaaattcgaaatctttcttctgattttgatctttccgatcatgtcatcggtctgtgttaacgaagcattaaccgatgacgagctgagatgggtattgtcgagactacacagtgataaagataaggaagtgtttggtttggtctgcaagaggtggctaaatctgcagagtaccgaccggaagaagctancggcacgtgctggtccacatatgctccgccgtctcgcttctangttcactcaaatcgtcnaantggatttgtcncaatcaatttctaggtccctttatccangagttactgattccgacctcgctgttacccctgagggaa

SEQ ID NO: 16646 - DNA, 429 bp, Arabidopsis thaliana
  unsure at all n locations
  Clone ID: LIB25-013-Q1-E1-H5
gattttttttgaaaagcttcacttcccactctctctctctctctctctcttcctacggctgcgaaaatgacaatcggttacagagacgccgccggagacccgctcttcccgtggcttatggagattaaaaattcgatggaggatctatacgctggtaaaaattccggatacgatctcgataagcttctatttgattgtatctcaacttataagaaagattctcggtaccgaaatgacctcagattcctcaagatctggnttctctatcttgaaggcanggaagattttgagagggtttatagagaaattgaagagactgagatatgtaaagggnattcnttgctctatgaatggnatgcnattttcctgaaggcaaaggattgtggcnaanaacaaantcngttaacaaactggtccttcaangaaagt

SEQ ID NO: 16647 - DNA, 436 bp, Arabidopsis thaliana
  Clone ID: LIB25-013-Q1-E1-H6
ataatatgagagatagacaaatgtaaagaaaaacacagagagaaaattagtttaattaatctctcaaatatatacaaatattaaaacttcttcttcttcaattacaattctcattctttttttcttgttcttatattgtagttgcaagaaagttaaaagattttgacttttcttgtttcagatttcagcaaatgggatcgattttaagcttcgtctgggttaaaagcttggatcctatctgaagacagaacaaaggttcttgcttttgattcattgcccattttgagaagatgttcgaaggtcgtcctcgtgattcttgtctaagtttcaacacttttcaccatgccaagccataaagaaacgaaatggagctttttggtttccgggaaacgatctttctcaacaacgatgagtctgatctcactcaagaagatgt

SEQ ID NO: 16648 - DNA, 513 bp, Arabidopsis thaliana
  unsure at all n locations
  Clone ID: LIB25-013-Q1-E1-H9
gntnnnggaactgtntattngcccgccnnggtccgaaacnncncgggtccntccacgcntccgcncacacgtccgggcaaagggcattggcnaaaaataataagacactcgttagagtgctcgtccctcgtgcccttacctgcctaattccaactatctggcaaaatcatgactttgatgcaagatgccgagttgaaaccaaggatgggttcttttaagaagaggagctcttctaagaatttgaggtattcaatgacaaagagaagaagaagtagcaaagtgatgtctgtggagatcatcgaagatgtgcatgacgcagaggagttgaaagccgttgatgcttttcgccaatcgcttattctcgatgagctactcccggagaaacacgatgactaccatatgatgcttanatttttgaaggctagaaaatttgatcttgagaaaaccaaacagatgtggactgaaatgcttagatgggangaaagaatttggtgctgatactgtcatggaggg

SEQ ID NO: 16649 - DNA, 423 bp, Arabidopsis thaliana
  unsure at all n locations
  Clone ID: LIB25-014-Q1-E1-A2
naatacacaaacttcattcactctctcccattctcggatctctctcagtgcacagtggttgtcactcttctcctttggtcgaaactctttcttggaaagagcattttgttatcaagactctgaagagctcttttgggaggatagtaaggttggatgatgagagggagatctgatggaggcctaaagaagcggcttattgcttcggtctgtgtcgtggctctattcgtctgtttcttgtttatgtactatggttcctctagccaaggtgcatcagcattggaatatggaagatctttgagaaaactcggatcgtcttanttgagtgggagatgatgataatggtgataccaaacaggatgattccgtggctaaatgcagaaagacagtccntggtgtcnccaaaagttttcccggtttggtgaa

SEQ ID NO: 16650 - DNA, 478 bp, Arabidopsis thaliana
  unsure at all n locations
  Clone ID: LIB25-014-Q1-E1-A3
ggtgngaacgtntcncgntngtcgnggnggacntgtgccgggnccgccacgcgtccgaaaaaatattctctcggttttttccagagcgtatattcaaattcttccttaaaaagtaaaaattaatctgattctctctactactactactacgatgggtgagaaaaaggaagaannggcgacgaaacctcaaggagagaagaaacctaccgatggtggaatcaccaccgtcgttatgaagcttgatatgcattgtgaaggttgcggcaaaaaaatcaaacgcatcttcaaacatttcaaaggtgtggaagatgtgaagattgattataagagtaacaaattgacggtgatcggaaacgtagatccagtggaagttcgtgataaagtggccgacaaaatttaagagaccagtcgaacttgtctctacagtagccgccgccgaagaaagagacactccttcatcaggnggtgcagagaaaaa

SEQ ID NO: 16651 - DNA, 415 bp, Arabidopsis thaliana
  unsure at all n locations
  Clone ID: LIB25-014-Q1-E1-A4
attcanattctctgggaanacgatattancantcatggagcgtctaacatctcctcctcgtttgatgattgtctctgatcttgatcatactatggntgatcatcatgatcntgagantctatctctgctgagattcaattcgttgtgggaacacgcttatcgccatgactcncttcttgtgtnttctacgggaagatcaccgacattgtatagtagaactcagnnaggagaaacctttgttgagccctgatattaccattatgtctgtaggaactgagattacttatggtaactctatggttcctgatcatggttgggttgangctctgaacnatnnatgggatttgggtattgtcaaacaagaagctaacatcttccctganttaaagcttcaagcagaaactgancatanggc

SEQ ID NO: 16652 - DNA, 512 bp, Arabidopsis thaliana
  unsure at all n locations
  Clone ID: LIB25-013-Q1-E1-G8
nnnnnngnantgtttacgttgnccggccggtaccgaaaccaanattcgcgggtcgacccacgcgtccgaaactatctcttccacgacgtcgtcttcttcgtctccgtcctgcgatgtagacgttgacaatcgtggaaaacaattaactccttctacaagacgatctcgagccggcttctctgattctttctcttctcatgatttatcatcattctgtcgagatgaagaagtaaaaacattctgccccatcaaatcggaatcagacgatgaattattaaggagcatagaagccgaaacttcatcttccgtggtgagcacgtcagactcatcagaaactcatcaccatcaccatcatcatcattcgtctggaggtcccaacaacggtcactgggagaagaggtttcttccgtttgcttaagaaaggttatccgcaatgccattcaacacgttcacacctctcaaaggagttccgaaactgaccagacggaagagcaaaaccataagggacaaca

SEQ ID NO: 16653 - DNA, 474 bp, Arabidopsis thaliana
  unsure at all n locations
  Clone ID: LIB25-014-Q1-E1-A5
tgtccatccggntcgccnccggtccganacattnantcccggnggccacgcacgcgtcaagcattattttgttaacaaaaaaaaagaagaattatctggcaaagtgtttaatttccgagaaagttgaagcagagaagcagaaagtttcagaattctcttttctccaagtttaacgcttttttagctcaaagctcacacacacgaccactctattcctcctttaacctttgtgtttgtcaatttgtgtttcctcttttgtcgactcatttctcgattcaatctcgattttttttttttttttttttanggaaatctaatgaactttttttatggatttgatctgttaaagtttcgattaataagatagtggtttaggtttacggttttgtaattgatttattatctgtaatgggttgtgaggtttcaaagttatctgcactttgttgtgtttcagagtctggaagatcgaatcct

SEQ ID NO: 16654 - DNA, 481 bp, Arabidopsis thaliana
  unsure at all n locations
  Clone ID: LIB25-014-Q1-E1-A6
ntggngnaatcccnnggntaacgtaccggtantgtnattcccggngcccccacgcgtcnggaatggagagcacgaagattgctccttcattcgatcgtgccagtgagcttaaagctttcgatgagacgaagactggtgtgaaaggactcgttgactctggaatctcaaagattcnacgcattttccatcactcatctgtcgaactagcaaaccctaaaccacttccctcggacctgctacatctcaagacgatcccaacgatcgatctcggaggacgggacttccaggacgcgattaagcacaagaacgcgattgaagggattaaagaagcagctgccaagtggggtttcttccaagtgatcaaccatggagtttcgctcgagcttcttgagaagatgaaagatggagttcgtgactttcatgagcaacctcctgaagtgaggaaagatttgtacagccgcgatttcggcanaaagtttat

SEQ ID NO: 16655 - DNA, 495 bp, Arabidopsis thaliana
  unsure at all n locations
  Clone ID: LIB25-014-Q1-E1-A9
tggagagagaaanttcttgccgcnncgtaccggcccaccactcccgngnccacccacgcgtccgaacaaacanagaaaacgattacaanagagaagaggtatcanaaggaagacaagaatcttttaacattttgaaacaaatggcgtccaaagccatcttcttcttctttgtctctgncgtgtgnctgtcctctctcgccggtgtggccatcgctgatgccgatgactttgaccgtttccaaattcagggatcggtttattgtgacacatgccgtgtccaattcgttacccgtctcagcaagttccttgaaggcgcgaaagtgaagctagaatgcaggagcagaacaaacggaaccgtaacattgacaaaagaagccgtaacggacaaaacaggtanctncacaatgggaantgaccgntgannatgatggaagaagtttgcganctttgtgctccgtcnaatnattntgacagtggttgncagttgacnttnac

SEQ ID NO: 16656 - DNA, 500 bp, Arabidopsis thaliana
  unsure at all n locations
  Clone ID: LIB25-014-Q1-E1-B11
ggngancntccnaacgcacgnccgncccgataattcccanagtccacccangcctccgnatctctcaatctgatgaaagttgttgtttttaggttatacagagccgttggatgataatattgaagtattggtccctgatgatgaccatggactctatgcaattgacattcgagatccctcttgggtatagtaaagtagctagatattactttgtgcattggctacttgtatgcagttgttaagtttaggagtgaggataagtaagatggaaattgtatctgcaaccatttttgtatcataaagaaggttgctaatgaggacatttccggtcttggagatttagtatctgttctttcaaagctttctangggtgctcgtgttccattggaatatatgtctcacactgatcgtcatcgcaagaagcatctgaataatcttccattttcgtttaaaaaaaacagagattttgattcctcaatcaaccgttcttgaaaatcgcc

SEQ ID NO: 16657 - DNA, 752 bp, Arabidopsis thaliana
  unsure at all n locations
  Clone ID: LIB25-012-Q1-E1-G5
ngngnnntngnngnattgtccacgccggnacgtaccggancacaattcccgggnccacccacgcgtcngcaaggatctcagaaaattgcttatctccctaatttcttcatctccctctaaactctcttccagaatccttgctcaattctcttcatttgtgatctcggctctcttatcacgaagacttctcccggcggcaccgtcttcacatttctgctcgtcattctcaaggaaccaaggtagaagctcactctctgtgaacgaaacatttgccttttgttcggaacgaaatctcacaaattggttctatgatctgcgcgattcgcgtcgtcttctctctggatctgaagtaattgattgccattcgttagctactgtctgccaattttttatgtttgtcctctctctggaacccttgaatgattcaactccatccaagtctcgtcgtccttgtaattagcaccattgaagcgattcatggaangcattgttgtattgggtaagaaacacaancattgaagcgatgcatcaacaaaggtttccnttttggggattggnagttcaattaaatcaatgacccttgggtgttccnggagcaagataaacatctctaatgtcaacggtaaaatnnttaggctgagatccatttgtacnatgggtcnaatccagaaanctcaaccncattggtaaagctattnngtaaggnaaaaatggatcnngtttacaactccngacngggaagggnatccang

SEQ ID NO: 16658 - DNA, 807 bp, Arabidopsis thaliana
  unsure at all n locations
  Clone ID: LIB25-012-Q1-E1-G6
ttaatgagattggtcccttgttgacttttgacaccattttgtagattagcaatggcccatacatcagaatctgtgaatcctagagatgtttgcattgtgggtgttgcacgtactccaatgggtggctttctcggatctctttcatctttacctgccacaaagcttggatctttagctattgcagctgctttgaagagagcaaatgttgatccagctcttgttcaagaagttgtctttggcaatgttcttagtgctaatttgggtcaagctcctgctcgtcaagctgctttaggtgcaggaatccctaactctgttatctgtactacagttaacaaggtttgtgcatcangcatgaaagcggtaatgattgctgctcaaagtatccagttagggatcaatgatgtaattgtggcgggtggtatggaaagcatgtccaatacaccaaaaatatttggcanaancaaggaanggatcccgtttttgggccangaatccttantaaaatggaaatgtttaaaggatggactaatgggaatgtcnaataacgaactgttnggaatnggnaaacctgttcaaaaaattatgcccccgaanaaattttcaaaaattacaaaggggaaccanccangaatgnacnaaagccantttcaaaaaattttttaanccctggggaaatgcccggccccaagaaaaaccngggnnccctttcaaatngggaaaaacctnccccgggttnaaanttttccgggaagnaaaaangtttggcccnnnaacaaatttttttnaaangggnnaaagggcctttgg

SEQ ID NO: 16659 - DNA, 745 bp, Arabidopsis thaliana
  unsure at all n locations
  Clone ID: LIB25-012-Q1-E1-G8
cgactctcttcagagagttttgagagggtgagagagccgtgctcggcgttgttagaaagaaagctgagaattgcaactgcttacaagagcaatgtcgacaagctgatcaagagtctcttggatttgtgcttctgtacttcttaagaggaaggtcaaactttgctttctggtacggcggcgatgtcgacgatttcgatccatcggactgagactctacgaatcactcacgctcggtcacgaatcttccggcagagatatcggagaactatccctctttggaaattaacaatcaattcgagatcttctgatacatctaagaaggaagaactctctgtacaaatatcaattcctcctcaagttgatnaatcaaganctgaangtttgagattcgatcgtttacaacctccgggagccaagaatttggtcatgaaagatagaatttgagttttggnaaaatccgtanctaagagaaacctaagccttgaatgaaagaataattgggnctggaaacnttgggnttcnttgcaaaaagaagtccactnggggaaanatttgctcccaaatggaaaagggagttttaaanggccaaatttaaaaagnaaanaatgtttaaaggggaattccaaaggggccaanaaaaatggccccaaaggtttccccttttnccgggtaaaannaaaggggaannnnaaaancccntnttttaaaacgtttcaantttannccaaaaaaatttttgggnttt

SEQ ID NO: 16660 - DNA, 434 bp, Arabidopsis thaliana
  unsure at all n locations
  Clone ID: LIB25-012-Q1-E1-G9
cgttgaagaagacgaagaagataccttcctctttatcttctccgatttctcaaccttcccgtctgcttgtcgtaaagaaatggcgccgagtagacgggatttacagcttactcnggtcacnggaggttcttcttcccanatcagtgatatggaagaagttggtcttctcgattcgtatcacaacgaagcgaacgccgatgatattttgactaaaatcnaanaangaagagatgtttccggtttaaggaagattcangtcggagtcancggtatgacttgtgctgcttgttctaattccgttgaagcagctttgatgaacgttaatggcgtcttcaaagcctctgttgctttgttacanaatcgagccgatgtcgtcntcgaccctaanttagtcaaggangaagntataaagaaactatanaagatgctggntt

SEQ ID NO: 16661 - DNA, 366 bp, Arabidopsis thaliana
  unsure at all n locations
  Clone ID: LIB25-012-Q1-E1-H1
tagaggtgtggaggatgttattttgagggctgctcagatgggacagatagttgagaaggtttctgaggaacggcttataacactgttggaacaaataaacagccaaactaccaagcaaacgaaagtcacgtaccaacggcgccgtggggtggacgacgattaggaaggaagaagaatattatgatgtgctttgtatatctatggagatctcactgttatgttagtgagttcacttaagatctacttaaatgtttctgttcaatatgtttattgtgagtgaatcttgattatcttccaaacacttgggatgagattaaagcaatctgaaactgaagctctaaaaaaaaaacnnntanannncnnnna

SEQ ID NO: 16662 - DNA, 417 bp, Arabidopsis thaliana
  unsure at all n locations
  Clone ID: LIB25-012-Q1-E1-H12
gcaagcagcggcgcagaagttgaacacaagtgaagctcacaatggcgaggattaaggttcacgaattgagggagaagtcgaagagcgatcttcaaaagcagctgaaggaactcaaagctgagctcgctctcctccgtgtcgctaaagtcaccggaggtgctccaaacaagctctctaaaatcaaggtcgtgcgtaaatccatagctcaggttttgacagtgtcttctcagaagcagaagtctgctctaagagaagcatacaagaacaagaagttgcttcctcttgatctccgtcccaagaagacccgtgctattcgtagacgcctcancaaacaccaaggcctcgttgaagacagagcgtgagaanaagaaggagatgtatttccaataangaagtacctatcaaagtttaaagttt

SEQ ID NO: 16663 - DNA, 803 bp, Arabidopsis thaliana
  unsure at all n locations
  Clone ID: LIB25-012-Q1-E1-H3
ngnnnnnnnngnaantgtttattctgcccgccgcgtgtccganaataaacgggnccanccacgcgtccgccaacgcgtccgatttttctctcttccataaaacccaaaagaaactaggaagaggagtaaataatatttgttttaaagaaatgattctccacaaaatggcgttcttggccgttattctcttcttcttgataagcagcagcagcgtttgcgttcatagccgtgaaacgtttgcttgcgatacaaaggacgcagcaacagctacactgagattctgccagctttcagttcctataccggagagagtcagagatttgatcggacggttgacattggccgagaaagtgagcttgttagggaacactgcggcggcgataccacgtctaggaatcaaagggtacgagtggtggtcggaggctttacacggcgtttcaaatgtgggaacccggtactaagttcggtggggtttacctgcagccaccagtttccctcaaagtcatcaacaacgttgcttcnttcaatgcctccttgtgggaatccatccggacgggttgtgtcaaatgaaggcaagggccatgttcaacgggtggaantttggtgggcttacgttattggagcccaaaccgtttacatnattgagggaaccacntttggggaacttggananggaaacncccgggtgaaaatncaattnttnccggtaaatacgcaacnnnnccaantncaagggtttaagggaaaacaaccgttnccggntnaaagtnacccgcntgttgggaaananttcaagntnngat

SEQ ID NO: 16664 - DNA, 772 bp, Arabidopsis thaliana
  unsure at all n locations
  Clone ID: LIB25-012-Q1-E1-H5
tcaagtgcaatctctactactaccgaacaaactatttcatcatgatcgtcgttatacttggattgggagtccttacaaggcctttagcgatcttcgctgcgcttttgacagcattaagtttggcatttctaaatgacagctttgcaggttcttttagtgagaaggcgacacgaaccgtcagaagattctctccacagttagctgctaaaatgagacctcctttgacacctgtcactcgtgggcgtccatcatcanagagagcaatccatgtatgtggtcaaccccgttgggtttttgtcttgacatgctcacttgtgaagttttgctctttggtatatttcctctggtttgctcaaagtcctccggttgcgccaactcaattgcacatccttgcaaacaaattccttcaatggcaaagccttgaagaaacaaccgaaacctttgaaagggnaacgntttttaacaacaatttttaggggaaagggaaatttccgaanccaanttaangggcgnttaancttacaanccgnaagaatttttaganggtttaancccttgggttccaaaccaanngaatttcgngggtttccggcccnnaagggaacatttaancccccggtttaangggnccaaaancntttaangggcccttttccccccaagggattaaaaccccgggtttcccgtttaaaaacnggttccaaaggggangttcaaacccgggattttnttgcccaangnacggggattanccggtttttccctggnnttt

SEQ ID NO: 16665 - DNA, 444 bp, Arabidopsis thaliana
  unsure at all n locations
  Clone ID: LIB25-012-Q1-E1-H6
ttctgcttcctcgtcagaattcaatttcccggaaatcggtgactggaactcgccggaaaatatgggattcagatgggaagaagacgagggtggaataggatgtgaaggtttgattgagataaagctcgatcattatagccataataggaagatgatgagtaaaacagagattgattttcatgcagaggaagatggtttgatcgagatcgatctttttccatgaagaagaagaagatgatgattctctttgtgcttccgattagaaagcatttttccgattagaaagaaagaaaaagaagcaacaattaatggttgttcanttttttctatacgaatatcatttgtgtaaatattattatacgaatgtaattcaattttcaactttttacacaangattaattaatctccgaaaaaacnnntnnncnnntcnnngnnnnntgntc

SEQ ID NO: 16666 - DNA, 774 bp, Arabidopsis thaliana
  unsure at all n locations
  Clone ID: LIB25-012-Q1-E1-G4
gnnnnnnngnaangtccagttngnacgncccggtccatnataacggggccanccacgcgtccgaaaaaatcattatttattaattattttggccaagttactgcatttaactttttgggcacatcaccacaatactctcacaattccaactatatagaaatataatcactctctctttttcatttttcttttgaatgttttcttagtattagatgaaagttgagaattctaatcctcactcatcgagagttgagaatcaaatgagttaaattgcatcttttcaggattgctagaaggaaaaaaaaaaaaaaaaaaaaagggcggccgctctagaggatccaagcttacgtacgcgtgcatgcgacgtcatagctcttctatagtgtcacctaaattcaattcactggccgtcgttttacaacgtcgtgactgggaaaaccctgggcgttacccaacttaatcgccttgcagcacatccccctttcgccagctggcgtaataacgaaaangccgcaccgattgcccttcccaacagttgcgcancctgaatgggcgaatgggacncncctggtaccggggcattaaaccccggcggtgtngtggttaccccancgtgacgctaaacttgcaanggcctacgccggtcctttcgcttctccctccttccgcaagttgcggtttccgtangccnaacngggccttaggtccattannttaggaccaccaaaantntagggagtcnctatggcacccgaanggttncttgntgncatt

SEQ ID NO: 16667 - DNA, 726 bp, Arabidopsis thaliana
  unsure at all n locations
  Clone ID: LIB25-012-Q1-E1-E7
cttcttatgatcgatctttgacaccaatgcttcccagtgatgctgctgacccttcagtttgctatgttcctaatccttacaatccctaccagtattacaatgtatatgggagtggtcaagagtggactgactacccagcttacacaaatcctgagggtgttgacatgaattctggaatttatggagagaatgggactgttgtgtatcctcagggttatgggtatgcagcgtatccttactcgccagcaactagccctgctccacagcttggcggggaagggcagttgtacggtgctcagcagtatcagtatcctaactattttccaaacagtggaccgtatgcntcatctgtggctacacctacccagccggatctctctgcaaacaaacctgctggtgtgaagacactacctgcggatancaataatgttgcttctgctgctggtatcacaaaaaggaantaatggattaactcaagtgaaaccaaactaaccaaggctanccntaacanctcaaagtaanttggaatggnaaggggtgcnccaagaaggagggtttggctggccgggttatcaaggaccccaagtaancccaangaangggaataaagcccccgttcccttggnaaaatgggnccctnaaccngggngtttcnccnaccannttnnnngggccctttngggancccaaggggaatttnccttngggtngggncccccggggttt

SEQ ID NO: 16668 - DNA, 433 bp, Arabidopsis thaliana
  Clone ID: LIB25-012-Q1-E1-E9
gatgatattgaaaacaaactctggtttgagccagaatgtactggcagcgagtctgaaggacaagtgggtcctacacctcgtgcgtttcatgttgctattacaatcgattgtcatatgttcatctttggtggacgttctggtggcaagaggttgggtgacttctgggttctagatacagatatatggcagtggtctgaattgactagcttcggcgacttacctacacctcgtgattttgctgccgctgctgctattgggagccaaaaaattgtgttgtgcggcggctgggacggtaaaaagtggctgtcagatgtttatgttatggacacaatgtcctttgaatggctgggagctaaccggtttcaagggtcattgccacctcctagatgtggtcatacgggcacaatggtgggagaaaacgaattacttgttt
